United States Patent Application Publication US 2025/0313894 A1 - sequence listing, part 2

SEQ ID NO: 23224 - DNA, 50 bp, synthetic construct
  source 1..50: mol_type = other DNA
aaatcaataactacracaaacttaaaaaaacacaaaaatcctaaaacctc

SEQ ID NO: 23225 - DNA, 50 bp, synthetic construct
  source 1..50: mol_type = other DNA
tcctctaaataaacraaacttcaaaacttttatacctccctaaacctatc

SEQ ID NO: 23226 - DNA, 50 bp, synthetic construct
  source 1..50: mol_type = other DNA
atcctaacatcractactataaaaacaattaaaaaacacaaaatcaaaac

SEQ ID NO: 23227 - DNA, 50 bp, synthetic construct
  source 1..50: mol_type = other DNA
aaactaataaaatctaaatttaaacccttaaactacaaaataaaccaaac

SEQ ID NO: 23228 - DNA, 50 bp, synthetic construct
  source 1..50: mol_type = other DNA
aaataaaatcttattctattacccaacctaaaatacaataatataatctc

SEQ ID NO: 23229 - DNA, 50 bp, synthetic construct
  source 1..50: mol_type = other DNA
aaattaactaaccctacttctaaaaaccctactaaaaaccrcctaaactc

SEQ ID NO: 23230 - DNA, 50 bp, synthetic construct
  source 1..50: mol_type = other DNA
cacacttatattttattcccactcaaacccaaataaaacraccccattac

SEQ ID NO: 23231 - DNA, 50 bp, synthetic construct
  source 1..50: mol_type = other DNA
tctactttccaaaaaataaccraaacacaaaaaaacttctctattccaac

SEQ ID NO: 23232 - DNA, 50 bp, synthetic construct
  source 1..50: mol_type = other DNA
cctaactaaaaactccctaccracaattccctaatacctataatcctcac

SEQ ID NO: 23233 - DNA, 50 bp, synthetic construct
  source 1..50: mol_type = other DNA
caaaaatcttcratacaaaatccaaataaaccctaattattactctcctc

SEQ ID NO: 23234 - DNA, 50 bp, synthetic construct
  source 1..50: mol_type = other DNA
aaaaaaacaataactaaaacccatttaaatcctacaccraaaattcctac

SEQ ID NO: 23235 - DNA, 50 bp, synthetic construct
  source 1..50: mol_type = other DNA
taatttcraaaaccactaaaaccaaaataaaaatccaacratcttccaac

SEQ ID NO: 23236 - DNA, 50 bp, synthetic construct
  source 1..50: mol_type = other DNA
acaaccaaatataatttcraaaaccactaaaaccaaaataaaaatccaac

SEQ ID NO: 23237 - DNA, 50 bp, synthetic construct
  source 1..50: mol_type = other DNA
rctctaaaaaatcccraacaaccctactccctacaaccaaatataatttc

SEQ ID NO: 23238 - DNA, 50 bp, synthetic construct
  source 1..50: mol_type = other DNA
rctaaaatcccrcttaaataccaattaacrtcaaaaaaactaaatcaaac

SEQ ID NO: 23239 - DNA, 50 bp, synthetic construct
  source 1..50: mol_type = other DNA
raacaaacaacttaaaaaaaactcccraacaacaaaaaccccratcaatc

SEQ ID NO: 23240 - DNA, 50 bp, synthetic construct
  source 1..50: mol_type = other DNA
aaaccactcctattctacractaacccctaataatcacrtaaatctattc

SEQ ID NO: 23241 - DNA, 50 bp, synthetic construct
  source 1..50: mol_type = other DNA
aatccacrtaaccaccaaaaatcaaccrtaaaataaaaataaccttaaac

SEQ ID NO: 23242 - DNA, 50 bp, synthetic construct
  source 1..50: mol_type = other DNA
ratacttcctaaaaaatataatttcctatatattaaaacctaaactactc

SEQ ID NO: 23243 - DNA, 50 bp, synthetic construct
  source 1..50: mol_type = other DNA
ctccrcctcccraattaaaacaattttctacctcaactaaaattacaatc

SEQ ID NO: 23244 - DNA, 50 bp, synthetic construct
  source 1..50: mol_type = other DNA
aaaacraaatttcaccatcttaatcaaactaatctttaactcctaacctc

SEQ ID NO: 23245 - DNA, 50 bp, synthetic construct
  source 1..50: mol_type = other DNA
taaattctctaacttcaatcttcctctccttcctttaaaaataaaaatcc

SEQ ID NO: 23246 - DNA, 50 bp, synthetic construct
  source 1..50: mol_type = other DNA
aaccratttttctaattcccccaaaaaattctaaataactaaccrtttcc

SEQ ID NO: 23247 - DNA, 50 bp, synthetic construct
  source 1..50: mol_type = other DNA
rcrctccaaaatatccrccataaaaaaatcttaataataacccattcccc

SEQ ID NO: 23248 - DNA, 50 bp, synthetic construct
  source 1..50: mol_type = other DNA
taattaactaaaatataccccraacccttcttaattaaaaaaaacrcctc

SEQ ID NO: 23249 - DNA, 50 bp, synthetic construct
  source 1..50: mol_type = other DNA
aattaacttaaatacrcccraaacccttctaattaactaaaatatacccc

SEQ ID NO: 23250 - DNA, 50 bp, synthetic construct
  source 1..50: mol_type = other DNA
aatcaaaaaaaactcraaacatattttaaccaatcaaaaaaactccraac

SEQ ID NO: 23251 - DNA, 50 bp, synthetic construct
  source 1..50: mol_type = other DNA
aattctctctattcaacrcrtctctaatttaattccctcaattattcacc

SEQ ID NO: 23252 - DNA, 50 bp, synthetic construct
  source 1..50: mol_type = other DNA
tctactccccaacatctttttaccttcttctcaaatctaactaactctac

SEQ ID NO: 23253 - DNA, 50 bp, synthetic construct
  source 1..50: mol_type = other DNA
aaaaaaaataacttcratccccaaattaaaataaaaactatcrcctactc

SEQ ID NO: 23254 - DNA, 50 bp, synthetic construct
  source 1..50: mol_type = other DNA
atctaaaaaccraaactaccctctccaaaaaataacccctaaaaccaatc

SEQ ID NO: 23255 - DNA, 50 bp, synthetic construct
  source 1..50: mol_type = other DNA
acttaactaaataacaaccaatatcraaataacractaaaaataaaaacc

SEQ ID NO: 23256 - DNA, 50 bp, synthetic construct
  source 1..50: mol_type = other DNA
aaaaaaaatccaattaataaactaacccaaaactaaaacaactaattttc

SEQ ID NO: 23257 - DNA, 50 bp, synthetic construct
  source 1..50: mol_type = other DNA
aaaaaattattttcattacctcaaccctcctcttcctatcccaaaacrtc

SEQ ID NO: 23258 - DNA, 50 bp, synthetic construct
  source 1..50: mol_type = other DNA
aaaaaaaaattattttcattacctcaaccctcctcttcctatcccaaaac

SEQ ID NO: 23259 - DNA, 50 bp, synthetic construct
  source 1..50: mol_type = other DNA
craaaaaatcacctaaacctaaaaaatcraaactacaacraaccraaatc

SEQ ID NO: 23260 - DNA, 50 bp, synthetic construct
  source 1..50: mol_type = other DNA
accccrtctctacaataaatacaaaaaattatcctaacraaattatacac

SEQ ID NO: 23261 - DNA, 50 bp, synthetic construct
  source 1..50: mol_type = other DNA
taataaaacttttttccttaaacctctcaattctttaccattcrtacttc

SEQ ID NO: 23262 - DNA, 50 bp, synthetic construct
  source 1..50: mol_type = other DNA
caaccrctaataaaacttttttccttaaacctctcaattctttaccattc

SEQ ID NO: 23263 - DNA, 50 bp, synthetic construct
  source 1..50: mol_type = other DNA
aaaccacacaccratttttttcaaaaaatctcaactaaatactaaactcc

SEQ ID NO: 23264 - DNA, 50 bp, synthetic construct
  source 1..50: mol_type = other DNA
cctttcraaactataaaaacattctcraaaaacrctaaatcccttttccc

SEQ ID NO: 23265 - DNA, 50 bp, synthetic construct
  source 1..50: mol_type = other DNA
ccctttaattcctataaaaactaaaacaatcactacacatccctcacacc

SEQ ID NO: 23266 - DNA, 50 bp, synthetic construct
  source 1..50: mol_type = other DNA
ttctattctatttctacccrcrattaatactacttattcaatttttctac

SEQ ID NO: 23267 - DNA, 50 bp, synthetic construct
  source 1..50: mol_type = other DNA
atataaacaacrttcrtctacrcaaaaaaactaaataaacaacattaacc

SEQ ID NO: 23268 - DNA, 50 bp, synthetic construct
  source 1..50: mol_type = other DNA
aaaaaaaataatcctacctctctaaacctctataaaaacaactcccaatc

SEQ ID NO: 23269 - DNA, 50 bp, synthetic construct
  source 1..50: mol_type = other DNA
cttaataaaattaaaacccaccaaaataaccttaaatataaaacrcttcc

SEQ ID NO: 23270 - DNA, 50 bp, synthetic construct
  source 1..50: mol_type = other DNA
actaaaaacrcttcactatcacttcccaataatatctaccactaataacc

SEQ ID NO: 23271 - DNA, 50 bp, synthetic construct
  source 1..50: mol_type = other DNA
aaccaacataatataccacttacrctaaacataaataaacacccaaaaac

SEQ ID NO: 23272 - DNA, 50 bp, synthetic construct
  source 1..50: mol_type = other DNA
cctaaatattcacctatacccaacrcaaataatacaccatattaaccaac

SEQ ID NO: 23273 - DNA, 50 bp, synthetic construct
  source 1..50: mol_type = other DNA
aataaatataaaccaaatctctataattcacacrctacaaacaaatttcc

SEQ ID NO: 23274 - DNA, 50 bp, synthetic construct
  source 1..50: mol_type = other DNA
aaccaaaaacrtaattaaaaactccaataataaacatactaaaaaccctc

SEQ ID NO: 23275 - DNA, 50 bp, synthetic construct
  source 1..50: mol_type = other DNA
tactaaaatccctaatcacrcctttaaccaacctccttttaaaaatatcc

SEQ ID NO: 23276 - DNA, 50 bp, synthetic construct
  source 1..50: mol_type = other DNA
taaaaatcacttataaatcaaacaatatcataacaaccaccctcrccaac

SEQ ID NO: 23277 - DNA, 50 bp, synthetic construct
  source 1..50: mol_type = other DNA
attctataaaaatcacttataaatcaaacaatatcataacaaccaccctc

SEQ ID NO: 23278 - DNA, 50 bp, synthetic construct
  source 1..50: mol_type = other DNA
actaatcctaatactacractaataactatataacrtctctctaccctac

SEQ ID NO: 23279 - DNA, 50 bp, synthetic construct
  source 1..50: mol_type = other DNA
cataaaaactctacaaaaaaccctaaaccraactaacaatcactacraac

SEQ ID NO: 23280 - DNA, 50 bp, synthetic construct
  source 1..50: mol_type = other DNA
rctccataaaaactctacaaaaaaccctaaaccraactaacaatcactac

SEQ ID NO: 23281 - DNA, 50 bp, synthetic construct
  source 1..50: mol_type = other DNA
actaactccaaaattaaaaacaccctcaaaacaaaaactaaataaaaaac

SEQ ID NO: 23282 - DNA, 50 bp, synthetic construct
  source 1..50: mol_type = other DNA
ttattatttctattataaccaaaaatcraaatcccraacctaaaaatcac

SEQ ID NO: 23283 - DNA, 50 bp, synthetic construct
  source 1..50: mol_type = other DNA
cttttccctaccttcttattatttctattataaccaaaaatcraaatccc

SEQ ID NO: 23284 - DNA, 50 bp, synthetic construct
  source 1..50: mol_type = other DNA
caaacttacaaacttaatttatttttaattcccctatcttttcaaacctc

SEQ ID NO: 23285 - DNA, 50 bp, synthetic construct
  source 1..50: mol_type = other DNA
aatcttcttcctactacaacataaaattcctcctaatcaatatactatac

SEQ ID NO: 23286 - DNA, 50 bp, synthetic construct
  source 1..50: mol_type = other DNA
aaatccacctctaataatctcattaaatacataaaaaaacaacaaaaatc

SEQ ID NO: 23287 - DNA, 50 bp, synthetic construct
  source 1..50: mol_type = other DNA
aaattaaccaaacrtactaatatacaacacacctataaccccaactactc

SEQ ID NO: 23288 - DNA, 50 bp, synthetic construct
  source 1..50: mol_type = other DNA
aataaaatcatacaacatataatctcttataactaacttctttcataaac

SEQ ID NO: 23289 - DNA, 50 bp, synthetic construct
  source 1..50: mol_type = other DNA
cactaaaccctaaacaaccactaatcractttctatctctataaatttcc

SEQ ID NO: 23290 - DNA, 50 bp, synthetic construct
  source 1..50: mol_type = other DNA
atattatataattccacttacataaaatacataaaataatcaaattcatc

SEQ ID NO: 23291 - DNA, 50 bp, synthetic construct
  source 1..50: mol_type = other DNA
tccttaaaaaaacccctccraaaaacaaaaattccaatcctaaactccac

SEQ ID NO: 23292 - DNA, 50 bp, synthetic construct
  source 1..50: mol_type = other DNA
atcttcctccaacaaccaaaaatactcataaactatctaaaaaacaccac

SEQ ID NO: 23293 - DNA, 50 bp, synthetic construct
  source 1..50: mol_type = other DNA
attctccaacaaatattactatttttcttcaaaaaattaaaataaccctc

SEQ ID NO: 23294 - DNA, 50 bp, synthetic construct
  source 1..50: mol_type = other DNA
aacactcaaataattcatcttaattctctctatttaaaaatcaaaaaaac

SEQ ID NO: 23295 - DNA, 50 bp, synthetic construct
  source 1..50: mol_type = other DNA
taataaaaaaaaccaccacaccatttttcaaacataaacatacctaatac

SEQ ID NO: 23296 - DNA, 50 bp, synthetic construct
  source 1..50: mol_type = other DNA
ttactcatattaaaaataaaaaccaaactttactacttcacaaaccatac

SEQ ID NO: 23297 - DNA, 50 bp, synthetic construct
  source 1..50: mol_type = other DNA
tacttcacaaaccatacrctaaattaaaccacttcaactccactccattc

SEQ ID NO: 23298 - DNA, 50 bp, synthetic construct
  source 1..50: mol_type = other DNA
tccaatatcaacccattaaaaattaaaacctatcactccaatatcaaccc

SEQ ID NO: 23299 - DNA, 50 bp, synthetic construct
  source 1..50: mol_type = other DNA
ctaaaaattcctaaaacattccaacaaaacctctcacaacatcatataac

SEQ ID NO: 23300 - DNA, 50 bp, synthetic construct
  source 1..50: mol_type = other DNA
actactaccttatacacataccccaccttctaaacaaataacaacattac

SEQ ID NO: 23301 - DNA, 50 bp, synthetic construct
  source 1..50: mol_type = other DNA
cttattcttcttaaaaattaataaacttttcctctattccctacaaaatc

SEQ ID NO: 23302 - DNA, 50 bp, synthetic construct
  source 1..50: mol_type = other DNA
taaaaaaaaatcttcctacctcctactcccaatcttaaaaaaaaccaatc

SEQ ID NO: 23303 - DNA, 50 bp, synthetic construct
  source 1..50: mol_type = other DNA
cctaactaaaataatcctaaaaattaccctaaaaactaaacctaaaactc

SEQ ID NO: 23304 - DNA, 50 bp, synthetic construct
  source 1..50: mol_type = other DNA
acaacctaaaaaaacccctcccccaaaacctaaaaactaaaaaccaaaac

SEQ ID NO: 23305 - DNA, 50 bp, synthetic construct
  source 1..50: mol_type = other DNA
cctactaaacccaaataaaaaaaactctcctcctaaacctaaaattaatc

SEQ ID NO: 23306 - DNA, 50 bp, synthetic construct
  source 1..50: mol_type = other DNA
aaaaaactaaacraaacaaaaacaaataatactatcratattactccccc

SEQ ID NO: 23307 - DNA, 50 bp, synthetic construct
  source 1..50: mol_type = other DNA
aaaaactccraaactaaaaataaataccraacctcacctaaaacaaaacc

SEQ ID NO: 23308 - DNA, 50 bp, synthetic construct
  source 1..50: mol_type = other DNA
accttccccracctcttttataaaacratctttactaataccctaaaaac

SEQ ID NO: 23309 - DNA, 50 bp, synthetic construct
  source 1..50: mol_type = other DNA
ctaaaaacccatataactctttctaccttccccracctcttttataaaac

SEQ ID NO: 23310 - DNA, 50 bp, synthetic construct
  source 1..50: mol_type = other DNA
ataaaaccctaaaaaactaaaacacraaaaaccaattcacctaataaaac

SEQ ID NO: 23311 - DNA, 50 bp, synthetic construct
  source 1..50: mol_type = other DNA
ataaaaaatttttaccttcrtaacttcctaattccaaaaaccccacaacc

SEQ ID NO: 23312 - DNA, 50 bp, synthetic construct
  source 1..50: mol_type = other DNA
ctcaaaactccatccctacractataaaacctttaaaatcaaaaaaccac

SEQ ID NO: 23313 - DNA, 50 bp, synthetic construct
  source 1..50: mol_type = other DNA
ctactattaataacccccacactacaatcactaaaaacactaaataaaac

SEQ ID NO: 23314 - DNA, 50 bp, synthetic construct
  source 1..50: mol_type = other DNA
acrtctcaaactcttccttaaaactaaaacttacccatactcaaaatccc

SEQ ID NO: 23315 - DNA, 50 bp, synthetic construct
  source 1..50: mol_type = other DNA
caaactcttccttaaaactaaaacttacccatactcaaaatcccrtaatc

SEQ ID NO: 23316 - DNA, 50 bp, synthetic construct
  source 1..50: mol_type = other DNA
ccttaaaactaaaacttacccatactcaaaatcccrtaatcracaacctc

SEQ ID NO: 23317 - DNA, 50 bp, synthetic construct
  source 1..50: mol_type = other DNA
caacctaaaactataccaacctaacataaataaatataaaaaccaacccc

SEQ ID NO: 23318 - DNA, 50 bp, synthetic construct
  source 1..50: mol_type = other DNA
cttactaattcccaactcacaatttaaaaaaatccaacaccaacctttac

SEQ ID NO: 23319 - DNA, 50 bp, synthetic construct
  source 1..50: mol_type = other DNA
aaccctaaaatacaaatcaaccctttctactttattttctcacrtcaccc

SEQ ID NO: 23320 - DNA, 50 bp, synthetic construct
  source 1..50: mol_type = other DNA
atccaaatcataacacaaaaaaaactacraaaaaaactactaccaaaaac

SEQ ID NO: 23321 - DNA, 50 bp, synthetic construct
  source 1..50: mol_type = other DNA
caactaaaacttttatcctaaaaaaaaacctatatctataaactccaccc

SEQ ID NO: 23322 - DNA, 50 bp, synthetic construct
  source 1..50: mol_type = other DNA
cataaatttaaaaataaaatcaaaattcttacaaaatctccaatactacc

SEQ ID NO: 23323 - DNA, 50 bp, synthetic construct
  source 1..50: mol_type = other DNA
taaatttaaaaataaaatcaaaattcttacaaaatctccaatactaccrc

SEQ ID NO: 23324 - DNA, 50 bp, synthetic construct
  source 1..50: mol_type = other DNA
ttttaaattaaaataataaaatatatcttctacccctacacctctcaatc

SEQ ID NO: 23325 - DNA, 50 bp, synthetic construct
  source 1..50: mol_type = other DNA
tattaatcaaaaactatacracrcaaacatctccttcrccaaaaacaaac

SEQ ID NO: 23326 - DNA, 50 bp, synthetic construct
  source 1..50: mol_type = other DNA
aatatcttttatctattaatcaaaaactatacracrcaaacatctccttc

SEQ ID NO: 23327 - DNA, 50 bp, synthetic construct
  source 1..50: mol_type = other DNA
accccaactccttccaatatcttttatctattaatcaaaaactatacrac

SEQ ID NO: 23328 - DNA, 50 bp, synthetic construct
  source 1..50: mol_type = other DNA
cctaacttcractaaattttcctctccttatatattaaatcctaacttcc

SEQ ID NO: 23329 - DNA, 50 bp, synthetic construct
  source 1..50: mol_type = other DNA
atacraacaaatacrttaaccttccrattaaataaaaatactaaactctc

SEQ ID NO: 23330 - DNA, 50 bp, synthetic construct
  source 1..50: mol_type = other DNA
ccttttccrtcacacaaaaaactttatacaaaataaaacaaaactaaatc

SEQ ID NO: 23331 - DNA, 50 bp, synthetic construct
  source 1..50: mol_type = other DNA
acctcctataaatatcccattcttattctccaaccattaaaaaacaaaac

SEQ ID NO: 23332 - DNA, 50 bp, synthetic construct
  source 1..50: mol_type = other DNA
ctcctataaatatcccattcttattctccaaccattaaaaaacaaaacrc

SEQ ID NO: 23333 - DNA, 50 bp, synthetic construct
  source 1..50: mol_type = other DNA
ccccataaccttaaaccraaaaacrataataactcraacctaaaaaatcc

SEQ ID NO: 23334 - DNA, 50 bp, synthetic construct
  source 1..50: mol_type = other DNA
racaaaataaaacrttaactcctaaaaaaaaacacttaccaaaataaacc

SEQ ID NO: 23335 - DNA, 50 bp, synthetic construct
  source 1..50: mol_type = other DNA
aaaataaaacrttaactcctaaaaaaaaacacttaccaaaataaaccrcc

SEQ ID NO: 23336 - DNA, 50 bp, synthetic construct
  source 1..50: mol_type = other DNA
tacaaccttcaatctccacccraactacrccatattaaaatttataaatc

SEQ ID NO: 23337 - DNA, 50 bp, synthetic construct
  source 1..50: mol_type = other DNA
ccaacataacrtaatccraataaaaactaaaaactacaacaaccrcaacc

SEQ ID NO: 23338 - DNA, 50 bp, synthetic construct
  source 1..50: mol_type = other DNA
aataaacaaccaattcacccaataaacctacctactacaacrtaaacctc

SEQ ID NO: 23339 - DNA, 50 bp, synthetic construct
  source 1..50: mol_type = other DNA
aattaaaaaacrtcactctaaacctcaaaacttaattaaatcataacrac

SEQ ID NO: 23340 - DNA, 50 bp, synthetic construct
  source 1..50: mol_type = other DNA
taaattactaatctatacaatcrcctaaaaacttacaatctcactacttc

SEQ ID NO: 23341 - DNA, 50 bp, synthetic construct
  source 1..50: mol_type = other DNA
accaaaataaaatttttctctcraaataataaaattacaaactcccaaac

SEQ ID NO: 23342 - DNA, 50 bp, synthetic construct
  source 1..50: mol_type = other DNA
ttcctaaaatacttacraaaaataaatcattaccaaaatttctccataac

SEQ ID NO: 23343 - DNA, 50 bp, synthetic construct
  source 1..50: mol_type = other DNA
tatatcaccataaccaacratttttttctttttaacaaaaatataatctc

SEQ ID NO: 23344 - DNA, 50 bp, synthetic construct
  source 1..50: mol_type = other DNA
caataccccccaattaactaaaactacaaacatatatcaccataaccaac

SEQ ID NO: 23345 - DNA, 50 bp, synthetic construct
  source 1..50: mol_type = other DNA
caatcrctaaccacaaaacccaaaaataataacttataaatttttaaacc

SEQ ID NO: 23346 - DNA, 50 bp, synthetic construct
  source 1..50: mol_type = other DNA
craatctccaaaataaaattatccatctttaacctacaaaacaaattatc

SEQ ID NO: 23347 - DNA, 50 bp, synthetic construct
  source 1..50: mol_type = other DNA
acrtctctaattttaataaaaatcttcctatcattcaactatataaaaac

SEQ ID NO: 23348 - DNA, 50 bp, synthetic construct
  source 1..50: mol_type = other DNA
tcrttcctacacaactaaataacaaaaaaatttttaccaaaatcaaaaac

SEQ ID NO: 23349 - DNA, 50 bp, synthetic construct
  source 1..50: mol_type = other DNA
accaaaaaatactacttcrcattttctttttaaatcattatcrttcracc

SEQ ID NO: 23350 - DNA, 50 bp, synthetic construct
  source 1..50: mol_type = other DNA
ctaaccttaccaaaaaatactacttcrcattttctttttaaatcattatc

SEQ ID NO: 23351 - DNA, 50 bp, synthetic construct
  source 1..50: mol_type = other DNA
ccccacttaaaattttccrcttaactaaccttaccaaaaaatactacttc

SEQ ID NO: 23352 - DNA, 50 bp, synthetic construct
  source 1..50: mol_type = other DNA
tacacttacttttcacccaaatttttaaatctactttcctaataataacc

SEQ ID NO: 23353 - DNA, 50 bp, synthetic construct
  source 1..50: mol_type = other DNA
acctccatcaaatacttctacttcaaaccaattttaaacatacttttcrc

SEQ ID NO: 23354 - DNA, 50 bp, synthetic construct
  source 1..50: mol_type = other DNA
acctcaaataaaacataaaacacaaaaaatatccrtatctttccaaaatc

SEQ ID NO: 23355 - DNA, 50 bp, synthetic construct
  source 1..50: mol_type = other DNA
aaataaaacataaaacacaaaaaatatccrtatctttccaaaatcracac

SEQ ID NO: 23356 - DNA, 50 bp, synthetic construct
  source 1..50: mol_type = other DNA
cctcctaactccaatctcttaaaaacacraaaaattaccaaaactcaacc

SEQ ID NO: 23357 - DNA, 50 bp, synthetic construct
  source 1..50: mol_type = other DNA
cracrtaaacataacttccttctaattacctaacaatacctacaactcac

SEQ ID NO: 23358 - DNA, 50 bp, synthetic construct
  source 1..50: mol_type = other DNA
crtaaacataacttccttctaattacctaacaatacctacaactcacrac

SEQ ID NO: 23359 - DNA, 50 bp, synthetic construct
  source 1..50: mol_type = other DNA
ataacttccttctaattacctaacaatacctacaactcacracraaatcc

SEQ ID NO: 23360 - DNA, 50 bp, synthetic construct
  source 1..50: mol_type = other DNA
ctataataaataccrccaaatacctaacraaactcctaaaaaaaccccac

SEQ ID NO: 23361 - DNA, 50 bp, synthetic construct
  source 1..50: mol_type = other DNA
ttataatcccraaaccaaaccctaaatcraatacacctataataaatacc

SEQ ID NO: 23362 - DNA, 50 bp, synthetic construct
  source 1..50: mol_type = other DNA
rccrcataacraacaactaccraaaacttaaaacctaaaataaaattacc

SEQ ID NO: 23363 - DNA, 50 bp, synthetic construct
  source 1..50: mol_type = other DNA
tccccataccraaaatcctacttttacccctttaactatctaaattactc

SEQ ID NO: 23364 - DNA, 50 bp, synthetic construct
  source 1..50: mol_type = other DNA
aatcrttcctacctaaaaacraaaaatccaaaatccttattccrattacc

SEQ ID NO: 23365 - DNA, 50 bp, synthetic construct
  source 1..50: mol_type = other DNA
taataacaatcrttcctacctaaaaacraaaaatccaaaatccttattcc

SEQ ID NO: 23366 - DNA, 50 bp, synthetic construct
  source 1..50: mol_type = other DNA
tatactataaaaaaaaactcacttcaaaatcaaaaacctaaatccacctc

SEQ ID NO: 23367 - DNA, 50 bp, synthetic construct
  source 1..50: mol_type = other DNA
tttcctaactcatctacaacactaaaatctcaaaataaaaacaaaaaccc

SEQ ID NO: 23368 - DNA, 50 bp, synthetic construct
  source 1..50: mol_type = other DNA
taatacttattataaaaccccrttcttcaaaaaaattttataacactttc

SEQ ID NO: 23369 - DNA, 50 bp, synthetic construct
  source 1..50: mol_type = other DNA
ccccrcccaatttccctttttaataacatttaaactaaaatccaaatttc

SEQ ID NO: 23370 - DNA, 50 bp, synthetic construct
  source 1..50: mol_type = other DNA
tttcaccatattaaataaactaatcctaaactcctaacctcaaataatcc

SEQ ID NO: 23371 - DNA, 50 bp, synthetic construct
  source 1..50: mol_type = other DNA
aaaactctcctaataccacttatcattatcctttaataacccaaataccc

SEQ ID NO: 23372 - DNA, 50 bp, synthetic construct
  source 1..50: mol_type = other DNA
tacctcctaaaaaacactaaaatttaaaatctaacaatctaaatcaccac

SEQ ID NO: 23373 - DNA, 50 bp, synthetic construct
  source 1..50: mol_type = other DNA
ctcctacctctacctcctaaataactaatattacaaatatacaccaccac

SEQ ID NO: 23374 - DNA, 50 bp, synthetic construct
  source 1..50: mol_type = other DNA
atacttccttaatataaacctactatacaactcaaactattcaaaaatac

SEQ ID NO: 23375 - DNA, 50 bp, synthetic construct
  source 1..50: mol_type = other DNA
tttaaaacttaaatcaaattattctaaattcatctaaatttcaaatcttc

SEQ ID NO: 23376 - DNA, 50 bp, synthetic construct
  source 1..50: mol_type = other DNA
cttcrtatttataaaattaaattattcaataacacaatctctaaaatctc

SEQ ID NO: 23377 - DNA, 50 bp, synthetic construct
  source 1..50: mol_type = other DNA
aataataaaaaattcttaaaataataacctttctaaatcaattatacaac

SEQ ID NO: 23378 - DNA, 50 bp, synthetic construct
  source 1..50: mol_type = other DNA
taaaacccaaaattaaaataaatccttttatcctcaacrtcraaattaac

SEQ ID NO: 23379 - DNA, 50 bp, synthetic construct
  source 1..50: mol_type = other DNA
atcattatataaaacccaaaattaaaataaatccttttatcctcaacrtc

SEQ ID NO: 23380 - DNA, 50 bp, synthetic construct
  source 1..50: mol_type = other DNA
atatactaataataaatatatcctactaaaccccaaaatcrtcctaaatc

SEQ ID NO: 23381 - DNA, 50 bp, synthetic construct
  source 1..50: mol_type = other DNA
taaataaaatatatactaataataaatatatcctactaaaccccaaaatc

SEQ ID NO: 23382 - DNA, 50 bp, synthetic construct
  source 1..50: mol_type = other DNA
ctaactaaaaccttaatacaacttactaactaaaatttcacaaatactcc

SEQ ID NO: 23383 - DNA, 50 bp, synthetic construct
  source 1..50: mol_type = other DNA
attcrtaaacrttaaaaataccctaacttactttctatattatacctatc

SEQ ID NO: 23384 - DNA, 50 bp, synthetic construct
  source 1..50: mol_type = other DNA
ctcctaatactcacactaactaaactaaaacctcctaaactacrtttacc

SEQ ID NO: 23385 - DNA, 50 bp, synthetic construct
  source 1..50: mol_type = other DNA
ttttctaaatcctataaaacaattcccaaaacaaaacrcactcctcttcc

SEQ ID NO: 23386 - DNA, 50 bp, synthetic construct
  source 1..50: mol_type = other DNA
aactacraataaacaataacracacaaaaaatacttactatacaaaaaac

SEQ ID NO: 23387 - DNA, 50 bp, synthetic construct
  source 1..50: mol_type = other DNA
ttatttttattaaaatcaaatatacatataaaacttattatctttaccac

SEQ ID NO: 23388 - DNA, 50 bp, synthetic construct
  source 1..50: mol_type = other DNA
taaaaatacaaccaattcactcccaaataatttcatcaataatacaaaac

SEQ ID NO: 23389 - DNA, 50 bp, synthetic construct
  source 1..50: mol_type = other DNA
tttctacatctccttttccaaatcactctaattattaaaaaattaataac

SEQ ID NO: 23390 - DNA, 50 bp, synthetic construct
  source 1..50: mol_type = other DNA
ctttaaaatatacatttattttacaataataaaaaattactttcaacacc

SEQ ID NO: 23391 - DNA, 50 bp, synthetic construct
  source 1..50: mol_type = other DNA
acattaaataccccrtttacctacaacratacccaaaaaattactaaaac

SEQ ID NO: 23392 - DNA, 50 bp, synthetic construct
  source 1..50: mol_type = other DNA
ccctaaacaccrctacaaataaacraaacacctaatataaacctaaccac

SEQ ID NO: 23393 - DNA, 50 bp, synthetic construct
  source 1..50: mol_type = other DNA
acaaataaacraaacacctaatataaacctaaccacrcaaaaataaaaac

SEQ ID NO: 23394 - DNA, 50 bp, synthetic construct
  source 1..50: mol_type = other DNA
aataaacraaacacctaatataaacctaaccacrcaaaaataaaaacrac

SEQ ID NO: 23395 - DNA, 50 bp, synthetic construct
  source 1..50: mol_type = other DNA
aacttattatatcctctctcracccatttacacctataaaataataaaac

SEQ ID NO: 23396 - DNA, 50 bp, synthetic construct
  source 1..50: mol_type = other DNA
ttatatcctctctcracccatttacacctataaaataataaaacraactc

SEQ ID NO: 23397 - DNA, 50 bp, synthetic construct
  source 1..50: mol_type = other DNA
aaaacctaatacacaaaaaacrcttcatattatcattctaaaaacacccc

SEQ ID NO: 23398 - DNA, 50 bp, synthetic construct
  source 1..50: mol_type = other DNA
actacttaaactttattaccraaaactctttccctactctcaatactatc

SEQ ID NO: 23399 - DNA, 50 bp, synthetic construct
  source 1..50: mol_type = other DNA
atactttatattcttaactcccacaatttaacctaaatatttaccctaac

SEQ ID NO: 23400 - DNA, 50 bp, synthetic construct
  source 1..50: mol_type = other DNA
cctttattctcctctacctttacctcttttaaaaaattctaaataaaacc

SEQ ID NO: 23401 - DNA, 50 bp, synthetic construct
  source 1..50: mol_type = other DNA
ttctcctctacctttacctcttttaaaaaattctaaataaaaccraatac

SEQ ID NO: 23402 - DNA, 50 bp, synthetic construct
  source 1..50: mol_type = other DNA
tatctaatttttactaactacaacaaaacctcacattttatatttatctc

SEQ ID NO: 23403 - DNA, 50 bp, synthetic construct
  source 1..50: mol_type = other DNA
tttattcaatatactctcataacaaatctactaacaaatataccctttcc

SEQ ID NO: 23404 - DNA, 50 bp, synthetic construct
  source 1..50: mol_type = other DNA
taaacaaattaaaaaaacccccctatttaaaatatttactttttaatatc

SEQ ID NO: 23405 - DNA, 50 bp, synthetic construct
  source 1..50: mol_type = other DNA
tttatacttattttcaccctaccaacttaaataacctcaaactattctcc

SEQ ID NO: 23406 - DNA, 50 bp, synthetic construct
  source 1..50: mol_type = other DNA
ttatttatacacccacaactcttactacatctacataaccacaaaaacac

SEQ ID NO: 23407 - DNA, 50 bp, synthetic construct
  source 1..50: mol_type = other DNA
acaatcaaattaaaactcaaaactaaaaaactcactcaaaaccacacaac

SEQ ID NO: 23408 - DNA, 50 bp, synthetic construct
  source 1..50: mol_type = other DNA
tctttattctcattaatttcaaaaaacatctttatttctaccttcatttc

SEQ ID NO: 23409 - DNA, 50 bp, synthetic construct
  source 1..50: mol_type = other DNA
actcttaattatttcttaccttctattaacttttaaatttatttattctc

SEQ ID NO: 23410 - DNA, 50 bp, synthetic construct
  source 1..50: mol_type = other DNA
aaataaaaaaaatttaaataaaatttttcactcttcaaacaccaaatccc

SEQ ID NO: 23411 - DNA, 50 bp, synthetic construct
  source 1..50: mol_type = other DNA
aaaaacacatcctcctatactattacatctctaaacccraataaaaaaac

SEQ ID NO: 23412 - DNA, 50 bp, synthetic construct
  source 1..50: mol_type = other DNA
actaataaatcaatatcctactctccttaattcaaaaaaatactttccac

SEQ ID NO: 23413 - DNA, 50 bp, synthetic construct
  source 1..50: mol_type = other DNA
aaataattacataaattactaataatactatatctaactttatccaaaac

SEQ ID NO: 23414 - DNA, 50 bp, synthetic construct
  source 1..50: mol_type = other DNA
cttaataacataccaaatactcccacaactttcacattcaaaaattctac

SEQ ID NO: 23415 - DNA, 50 bp, synthetic construct
  source 1..50: mol_type = other DNA
atttacaaaaactaccactaccaaaaaattccaaattattacctatatcc

SEQ ID NO: 23416 - DNA, 50 bp, synthetic construct
  source 1..50: mol_type = other DNA
ataccattttaaaataaacacatttatataacaaaattattaactaacac

SEQ ID NO: 23417 - DNA, 50 bp, synthetic construct
  source 1..50: mol_type = other DNA
caccatctaaacrtatactctatcaaaacrcaaaacacraataacaaaac

SEQ ID NO: 23418 - DNA, 50 bp, synthetic construct
  source 1..50: mol_type = other DNA
aaataataaaaatcactacatttctatcaactacatccrttctaccaccc

SEQ ID NO: 23419 - DNA, 50 bp, synthetic construct
  source 1..50: mol_type = other DNA
ttcattcracaaatcaacaaacaccatctaaacrtatactctatcaaaac

SEQ ID NO: 23420 - DNA, 50 bp, synthetic construct
  source 1..50: mol_type = other DNA
aaaaaaaaaccatctcattcattcracaaatcaacaaacaccatctaaac

SEQ ID NO: 23421 - DNA, 50 bp, synthetic construct
  source 1..50: mol_type = other DNA
aaacttaacaaactaataaacrtcraaactaaaaatctaaaccctaaaac

SEQ ID NO: 23422 - DNA, 50 bp, synthetic construct
  source 1..50: mol_type = other DNA
tcaattactaaaaaacraaactcataaaacccttaaaaaactaaatactc

SEQ ID NO: 23423 - DNA, 50 bp, synthetic construct
  source 1..50: mol_type = other DNA
ataaactaaaaactacttttcccrccctctctcttcaattactaaaaaac

SEQ ID NO: 23424 - DNA, 50 bp, synthetic construct
  source 1..50: mol_type = other DNA
aaactcratatttccataaaaactatctaaaattccttccrttttctttc

SEQ ID NO: 23425 - DNA, 50 bp, synthetic construct
  source 1..50: mol_type = other DNA
tcctactcataaaacratctcaattataaacrtctcataacaaaaaaatc

SEQ ID NO: 23426 - DNA, 50 bp, synthetic construct
  source 1..50: mol_type = other DNA
attactttttatcacracctttctattataaaacrcctacaattaaaatc

SEQ ID NO: 23427 - DNA, 50 bp, synthetic construct
  source 1..50: mol_type = other DNA
tcctttaaaactttaaaaaaccacacttttatcaatcractttaaaaatc

SEQ ID NO: 23428 - DNA, 50 bp, synthetic construct
  source 1..50: mol_type = other DNA
cttctattttaaatcctttaaaactttaaaaaaccacacttttatcaatc

SEQ ID NO: 23429 - DNA, 50 bp, synthetic construct
  source 1..50: mol_type = other DNA
ccaccattctaataaattaattcacactcaaatactaaaaataataaacc

SEQ ID NO: 23430 - DNA, 50 bp, synthetic construct
  source 1..50: mol_type = other DNA
tcctcattactctttatacacatttccaattataattacttatttcaacc

SEQ ID NO: 23431 - DNA, 50 bp, synthetic construct
  source 1..50: mol_type = other DNA
aaaaataaaccaaaccttactaaataaatcraatctaacccaataaaaac

SEQ ID NO: 23432 - DNA, 50 bp, synthetic construct
  source 1..50: mol_type = other DNA
cacacacacacctatctctttatatttttctataatttcccataatctcc

SEQ ID NO: 23433 - DNA, 50 bp, synthetic construct
  source 1..50: mol_type = other DNA
atctttacctctttccctttactacaaactaaaaattccttattctcaac

SEQ ID NO: 23434 - DNA, 50 bp, synthetic construct
  source 1..50: mol_type = other DNA
ccctatttaaaaaatcattaacttatcaaaacccrccaaaaacccaaaac

SEQ ID NO: 23435 - DNA, 50 bp, synthetic construct
  source 1..50: mol_type = other DNA
aaatttatatataaacccctatttaaaaaatcattaacttatcaaaaccc

SEQ ID NO: 23436 - DNA, 50 bp, synthetic construct
  source 1..50: mol_type = other DNA
taattttacaatataacctaacraaaaaacctttccrccttataaaatcc

SEQ ID NO: 23437 - DNA, 50 bp, synthetic construct
  source 1..50: mol_type = other DNA
ccrtaaaccraaactaattttacaatataacctaacraaaaaacctttcc

SEQ ID NO: 23438 - DNA, 50 bp, synthetic construct
  source 1..50: mol_type = other DNA
raaactaaaattccraactaaaaaaaacctcacctataaccaatccrctc

SEQ ID NO: 23439 - DNA, 50 bp, synthetic construct
  source 1..50: mol_type = other DNA
tacrtacatctaactcccrtataatatacacttaaaacraacctaaaaac

SEQ ID NO: 23440 - DNA, 50 bp, synthetic construct
  source 1..50: mol_type = other DNA
cracttctcctatacrtacatctaactcccrtataatatacacttaaaac

SEQ ID NO: 23441 - DNA, 50 bp, synthetic construct
  source 1..50: mol_type = other DNA
cccatactcaaaccttataatactaaacrtataaatattaacaataaacc

SEQ ID NO: 23442 - DNA, 50 bp, synthetic construct
  source 1..50: mol_type = other DNA
cactactaacattcacacrtccaacaccacaaaacctaaatataaacaac

SEQ ID NO: 23443 - DNA, 50 bp, synthetic construct
  source 1..50: mol_type = other DNA
actaacattcacacrtccaacaccacaaaacctaaatataaacaacraac

SEQ ID NO: 23444 - DNA, 50 bp, synthetic construct
  source 1..50: mol_type = other DNA
caccacaaaacctaaatataaacaacraacrtccccrtaattatttaaac

SEQ ID NO: 23445 - DNA, 50 bp, synthetic construct
  source 1..50: mol_type = other DNA
aaaaaaaatttcacaaccacrcacaaatacacaaaaacacaaaaacrcac

SEQ ID NO: 23446 - DNA, 50 bp, synthetic construct
  source 1..50: mol_type = other DNA
tctatatctttatatacttatacrtaattataaaactcctctctcaactc

SEQ ID NO: 23447 - DNA, 50 bp, synthetic construct
  source 1..50: mol_type = other DNA
atcacccatactaaaataaatataaaaacccaatctcccccacaataaac

SEQ ID NO: 23448 - DNA, 50 bp, synthetic construct
  source 1..50: mol_type = other DNA
aaaaaaacaattattaatataaattaatacccaataaaaaaacttacacc

SEQ ID NO: 23449 - DNA, 50 bp, synthetic construct
  source 1..50: mol_type = other DNA
ccaaacctaaaacaaactaacttaaccaaaaacaaaacatccaaataaac

SEQ ID NO: 23450 - DNA, 50 bp, synthetic construct
  source 1..50: mol_type = other DNA
tttaaccaaatcaacttatctcaaatctaatctctcctcccatccatatc

SEQ ID NO: 23451 - DNA, 50 bp, synthetic construct
  source 1..50: mol_type = other DNA
aacccaaccaaaaacatatattatttaaaacctttaccaaaaaactaacc

SEQ ID NO: 23452 - DNA, 50 bp, synthetic construct
  source 1..50: mol_type = other DNA
taacacatacctctaactaaattctatactctaccaatcraataaccctc

SEQ ID NO: 23453 - DNA, 50 bp, synthetic construct
  source 1..50: mol_type = other DNA
tccataacccataaactaacaataccaaaaacaaatcaacaaaaaacrac

SEQ ID NO: 23454 - DNA, 50 bp, synthetic construct
  source 1..50: mol_type = other DNA
ractccataacccataaactaacaataccaaaaacaaatcaacaaaaaac

SEQ ID NO: 23455 - DNA, 50 bp, synthetic construct
  source 1..50: mol_type = other DNA
caacccataaactataaaaccracacatcctacaacaaacactaataaac

SEQ ID NO: 23456 - DNA, 50 bp, synthetic construct
  source 1..50: mol_type = other DNA
actataaaaccracacatcctacaacaaacactaataaacraaaaactac

SEQ ID NO: 23457 - DNA, 50 bp, synthetic construct
  source 1..50: mol_type = other DNA
aaaaccracacatcctacaacaaacactaataaacraaaaactacractc

SEQ ID NO: 23458 - DNA, 50 bp, synthetic construct
  source 1..50: mol_type = other DNA
aactacctcacctacraaaaataacttcrcaaacacacaaaaactaaaac

SEQ ID NO: 23459 - DNA, 50 bp, synthetic construct
  source 1..50: mol_type = other DNA
aatacttaaaaacaacactactaactacctcacctacraaaaataacttc

SEQ ID NO: 23460 - DNA, 50 bp, synthetic construct
  source 1..50: mol_type = other DNA
tcccacctaaccccaaaacaccaaaattactatataaaacctaaataacc

SEQ ID NO: 23461 - DNA, 50 bp, synthetic construct
  source 1..50: mol_type = other DNA
cctttcacaaatctacactaaaaccaaactttccataataaaaacaactc

SEQ ID NO: 23462 - DNA, 50 bp, synthetic construct
  source 1..50: mol_type = other DNA
taccaaaccaaaattaataactttatctactacrtcactctcaacccaac

SEQ ID NO: 23463 - DNA, 50 bp, synthetic construct
  source 1..50: mol_type = other DNA
cacrcacaatttaaaaataccaaaccaaaattaataactttatctactac

SEQ ID NO: 23464 - DNA, 50 bp, synthetic construct
  source 1..50: mol_type = other DNA
aacrcaacaaacaaaaccaccaaccctaacttaatatttttaaactatac

SEQ ID NO: 23465 - DNA, 50 bp, synthetic construct
  source 1..50: mol_type = other DNA
cctaactatacrtaactctatctctatctatctctctctctttctctccc

SEQ ID NO: 23466 - DNA, 50 bp, synthetic construct
  source 1..50: mol_type = other DNA
aaaaaattccattcccatatatataaaccccctcccctccctaactatac

SEQ ID NO: 23467 - DNA, 50 bp, synthetic construct
  source 1..50: mol_type = other DNA
aattcraaaaaaaactactaaacaaatatcctaccccaaaaccccatccc

SEQ ID NO: 23468 - DNA, 50 bp, synthetic construct
  source 1..50: mol_type = other DNA
caaaaatctaaaatcctaaatctaaaaacaccaatccaaccctcactacc

SEQ ID NO: 23469 - DNA, 50 bp, synthetic construct
  source 1..50: mol_type = other DNA
taaaaacaaaatccttaccccctcrctctaaacaaaaataaaaacaccac

SEQ ID NO: 23470 - DNA, 50 bp, synthetic construct
  source 1..50: mol_type = other DNA
ctctatccctaacctctaatataaatatatctatatattcctacctatcc

SEQ ID NO: 23471 - DNA, 50 bp, synthetic construct
  source 1..50: mol_type = other DNA
aaaaaattcaaactctaaaacacaccccaacatacctacacctacaacrc

SEQ ID NO: 23472 - DNA, 50 bp, synthetic construct
  source 1..50: mol_type = other DNA
aaaaaaaattcaaactctaaaacacaccccaacatacctacacctacaac

SEQ ID NO: 23473 - DNA, 50 bp, synthetic construct
  source 1..50: mol_type = other DNA
ttttaaccttaaaataacctaaacatttttcttcccraaatataacactc

SEQ ID NO: 23474 - DNA, 50 bp, synthetic construct
  source 1..50: mol_type = other DNA
tatttactcatctattttaaccttaaaataacctaaacatttttcttccc

SEQ ID NO: 23475 - DNA, 50 bp, synthetic construct
  source 1..50: mol_type = other DNA
ttaattataatcttataaaaccactataatctataattaacaaaaatatc

SEQ ID NO: 23476 - DNA, 50 bp, synthetic construct
  source 1..50: mol_type = other DNA
accacaataatcccataaaattataatcaaaaccaaacaaaataactcac

SEQ ID NO: 23477 - DNA, 50 bp, synthetic construct
  source 1..50: mol_type = other DNA
ccraatatcrtaatacactacaacaaaaaaattactcraacccaaaaaac

SEQ ID NO: 23478 - DNA, 50 bp, synthetic construct
  source 1..50: mol_type = other DNA
ttcaaaataactttaacctattaaaaaaataattcctaaccraacacaac

SEQ ID NO: 23479 - DNA, 50 bp, synthetic construct
  source 1..50: mol_type = other DNA
aaactctaattcaaaataactttaacctattaaaaaaataattcctaacc

SEQ ID NO: 23480 - DNA, 50 bp, synthetic construct
  source 1..50: mol_type = other DNA
catcaaaaaaacacatttctccccaccccaacccataacaaaactaaatc

SEQ ID NO: 23481 - DNA, 50 bp, synthetic construct
  source 1..50: mol_type = other DNA
aatcraaaattaaaacaacttctctaaattacccaatacrtaaatataac

SEQ ID NO: 23482 - DNA, 50 bp, synthetic construct
  source 1..50: mol_type = other DNA
aacaacttctctaaattacccaatacrtaaatataacrataaaaacaaac

SEQ ID NO: 23483 - DNA, 50 bp, synthetic construct
  source 1..50: mol_type = other DNA
craaaaaaaatttccccctcaaaactactccacrcttaactactataaac

SEQ ID NO: 23484 - DNA, 50 bp, synthetic construct
  source 1..50: mol_type = other DNA
taactaaaacrtaaacaaaccccaaatataaacctcataataacccaaac

SEQ ID NO: 23485 - DNA, 50 bp, synthetic construct
  source 1..50: mol_type = other DNA
ccctatcctaccctccactaaaaattcctattcaaaaatataactaaaac

SEQ ID NO: 23486 - DNA, 50 bp, synthetic construct
  source 1..50: mol_type = other DNA
aatttaacaaaaatccactaccctctaacatcaaccttccaaaaaaaaac

SEQ ID NO: 23487 - DNA, 50 bp, synthetic construct
  source 1..50: mol_type = other DNA
aaaaatctaaaaaaatccaaacctcaatactcccctcccccataaatcac

SEQ ID NO: 23488 - DNA, 50 bp, synthetic construct
  source 1..50: mol_type = other DNA
tacctccraaataaatacraaaacctctataaatacataaaaataaattc

SEQ ID NO: 23489 - DNA, 50 bp, synthetic construct
  source 1..50: mol_type = other DNA
taaatccctctaaactctacrctccctccaataaaaaaccctaaaaaacc

SEQ ID NO: 23490 - DNA, 50 bp, synthetic construct
  source 1..50: mol_type = other DNA
atatataatattataattacaataaactctatttataaacctacctacac

SEQ ID NO: 23491 - DNA, 50 bp, synthetic construct
  source 1..50: mol_type = other DNA
aaaaccaaaaaatccaaaaaaacctttactcccraacacctaaaaacccc

SEQ ID NO: 23492 - DNA, 50 bp, synthetic construct
  source 1..50: mol_type = other DNA
aaaaaaaaccccttcaaaccctcaaactacatataattactccaaatacc

SEQ ID NO: 23493 - DNA, 50 bp, synthetic construct
  source 1..50: mol_type = other DNA
ccaaataccrttttcctctcaaaactatcaaactatctaaaatctatttc

SEQ ID NO: 23494 - DNA, 50 bp, synthetic construct
  source 1..50: mol_type = other DNA
cctaatttcacttaaatcccaatactaaaaaaaaccctaaaaaaaacctc

SEQ ID NO: 23495 - DNA, 50 bp, synthetic construct
  source 1..50: mol_type = other DNA
atcttatttctccttttatccaactcccataacccaacacaatataaaac

SEQ ID NO: 23496 - DNA, 50 bp, synthetic construct
  source 1..50: mol_type = other DNA
tctcaaatttcctccatttccactaccaaaaaattactccaaacaaaaac

SEQ ID NO: 23497 - DNA, 50 bp, synthetic construct
  source 1..50: mol_type = other DNA
ctaaaaaaaccctaaaaatacctcctctacccraaataaaaacaaaaacc

SEQ ID NO: 23498 - DNA, 50 bp, synthetic construct
  source 1..50: mol_type = other DNA
ractcccctttaaaactcaatatcatactctaaaatttcaaactccctcc

SEQ ID NO: 23499 - DNA, 50 bp, synthetic construct
  source 1..50: mol_type = other DNA
raaaaaaacctaaaatcctaaaatataacactaaatttcaaaaaaaaacc

SEQ ID NO: 23500 - DNA, 50 bp, synthetic construct
  source 1..50: mol_type = other DNA
aaatcctaaaatataacactaaatttcaaaaaaaaaccrctcaactctcc

SEQ ID NO: 23501 - DNA, 50 bp, synthetic construct
  source 1..50: mol_type = other DNA
acatattctccttaactatctccctaccctttcttaaaatattcacccac

SEQ ID NO: 23502 - DNA, 50 bp, synthetic construct
  source 1..50: mol_type = other DNA
caccccatctttctacaacctctccaacaacaaatacactcaattttatc

SEQ ID NO: 23503 - DNA, 50 bp, synthetic construct
  source 1..50: mol_type = other DNA
ccrcttccattctaaatcaatattaatacaacaaaacattaacctaaccc

SEQ ID NO: 23504 - DNA, 50 bp, synthetic construct
  source 1..50: mol_type = other DNA
acraatcaaactaatatcctactacatcaatattaactcaaaataaaaac

SEQ ID NO: 23505 - DNA, 50 bp, synthetic construct
  source 1..50: mol_type = other DNA
aaaaccactaaacaacacccaaaatacaaaaaattcaataaaaacctctc

SEQ ID NO: 23506 - DNA, 50 bp, synthetic construct
  source 1..50: mol_type = other DNA
aaaaaataaaattaactttccctctaaacaaattataaaaatcctacccc

SEQ ID NO: 23507 - DNA, 50 bp, synthetic construct
  source 1..50: mol_type = other DNA
aaaaaaacttcctatcaaaactaatattaaaaaacccaaaaatctaaaac

SEQ ID NO: 23508 - DNA, 50 bp, synthetic construct
  source 1..50: mol_type = other DNA
aaaaattctttcacrtatctctctacaatccttatactaaccaaaccctc

SEQ ID NO: 23509 - DNA, 50 bp, synthetic construct
  source 1..50: mol_type = other DNA
aataaaactcaaaaacaaataaaatatttaaaacccaaaaacaaaccccc

SEQ ID NO: 23510 - DNA, 50 bp, synthetic construct
  source 1..50: mol_type = other DNA
ttcattaccccactaaaccaactataaaatcttcccraaaaacacaaccc

SEQ ID NO: 23511 - DNA, 50 bp, synthetic construct
  source 1..50: mol_type = other DNA
taaataatactaaattcattaccccactaaaccaactataaaatcttccc

SEQ ID NO: 23512 - DNA, 50 bp, synthetic construct
  source 1..50: mol_type = other DNA
aaaaatctaataaaaacctcactaaaatatcttccctcctaacccccacc

SEQ ID NO: 23513 - DNA, 50 bp, synthetic construct
  source 1..50: mol_type = other DNA
ctacatccccatctcctaaacrtataatctaaataacractataaaaacc

SEQ ID NO: 23514 - DNA, 50 bp, synthetic construct
  source 1..50: mol_type = other DNA
acrtataatctaaataacractataaaaaccrctctaataaatctacttc

SEQ ID NO: 23515 - DNA, 50 bp, synthetic construct
  source 1..50: mol_type = other DNA
craaaacacctacaacccaacacttaaataaccttaaataaattaatctc

SEQ ID NO: 23516 - DNA, 50 bp, synthetic construct
  source 1..50: mol_type = other DNA
actaaaaatcccaaacccaactattaacaaaataaattccttctaaaacc

SEQ ID NO: 23517 - DNA, 50 bp, synthetic construct
  source 1..50: mol_type = other DNA
raatcaaacttcracaaaccaaaaaactacaaaaattaccaacaaaccrc

SEQ ID NO: 23518 - DNA, 50 bp, synthetic construct
  source 1..50: mol_type = other DNA
tcraatcaaacttcracaaaccaaaaaactacaaaaattaccaacaaacc

SEQ ID NO: 23519 - DNA, 50 bp, synthetic construct
  source 1..50: mol_type = other DNA
rcratttactaacaatctttacaactccttaacttatcraaacttaaccc

SEQ ID NO: 23520 - DNA, 50 bp, synthetic construct
  source 1..50: mol_type = other DNA
aaaaaccacctacaaaacccctaaccaccataaaaaaacaacaaaaactc

SEQ ID NO: 23521 - DNA, 50 bp, synthetic construct
  source 1..50: mol_type = other DNA
taataactaaaaatcctacaaataattccccaaaactaccaaccaaatac

SEQ ID NO: 23522 - DNA, 50 bp, synthetic construct
  source 1..50: mol_type = other DNA
taaaaaaatattaacratacccataccttaaatttccttatctttcaaac

SEQ ID NO: 23523 - DNA, 50 bp, synthetic construct
  source 1..50: mol_type = other DNA
aaattcccctaaatcccaataacaaatcaaataccctaatcccaatatcc

SEQ ID NO: 23524 - DNA, 50 bp, synthetic construct
  source 1..50: mol_type = other DNA
ctaaatcccaataacaaatcaaataccctaatcccaatatccraaacctc

SEQ ID NO: 23525 - DNA, 50 bp, synthetic construct
  source 1..50: mol_type = other DNA
taaacctaatattaaaaaacttccraattcttctacttttaaccaatctc

SEQ ID NO: 23526 - DNA, 50 bp, synthetic construct
  source 1..50: mol_type = other DNA
caactcttctcaaatatttccaacaataaacctaatattaaaaaacttcc

SEQ ID NO: 23527 - DNA, 50 bp, synthetic construct
  source 1..50: mol_type = other DNA
cctttaattaaaatcatttccaatcctttcaaccaatacaaaaaactctc

SEQ ID NO: 23528 - DNA, 50 bp, synthetic construct
  source 1..50: mol_type = other DNA
aaaaaaaacaaccaactaaaaaaaaccttaaactaaacrtaataactcac

SEQ ID NO: 23529 - DNA, 50 bp, synthetic construct
  source 1..50: mol_type = other DNA
atatactttaaaaaaaataccaactaaaatatttttatcttactaactcc

SEQ ID NO: 23530 - DNA, 50 bp, synthetic construct
  source 1..50: mol_type = other DNA
aaaacctaccactatcaaaaccctaatctccctatctaaaaccaaaaccc

SEQ ID NO: 23531 - DNA, 50 bp, synthetic construct
  source 1..50: mol_type = other DNA
ccattcaccctaataaataaaacttccaactctaatttctaaaatacccc

SEQ ID NO: 23532 - DNA, 50 bp, synthetic construct
  source 1..50: mol_type = other DNA
ctcaaaatataaaaaccaactacattttttcttcccacctatacccattc

SEQ ID NO: 23533 - DNA, 50 bp, synthetic construct
  source 1..50: mol_type = other DNA
actccaaccttaaaaaaaaacrccraaatccaaattccatataaaaaacc

SEQ ID NO: 23534 - DNA, 50 bp, synthetic construct
  source 1..50: mol_type = other DNA
ccctaccccattttaatcctatttacctaaaattcccacaatactacccc

SEQ ID NO: 23535 - DNA, 50 bp, synthetic construct
  source 1..50: mol_type = other DNA
ttaaaaatacatttaccaattaatactctaaacracaaaaaaaccaaacc

SEQ ID NO: 23536 - DNA, 50 bp, synthetic construct
  source 1..50: mol_type = other DNA
ataaacatttattacttatctacaacaactcaaccaactctataccaaac

SEQ ID NO: 23537 - DNA, 50 bp, synthetic construct
  source 1..50: mol_type = other DNA
caacaactcaaccaactctataccaaacrctaaaaaaacaaatatcatcc

SEQ ID NO: 23538 - DNA, 50 bp, synthetic construct
  source 1..50: mol_type = other DNA
tcacatttcacaccctaactacttctcattaaatctactaacctacatac

SEQ ID NO: 23539 - DNA, 50 bp, synthetic construct
  source 1..50: mol_type = other DNA
ataaaaccccrcctctactaaaactacaaaaattaattaaacrtaataac

SEQ ID NO: 23540 - DNA, 50 bp, synthetic construct
  source 1..50: mol_type = other DNA
acccttaacctacacattattcttaccttaaaatatttaataaaaactac

SEQ ID NO: 23541 - DNA, 50 bp, synthetic construct
  source 1..50: mol_type = other DNA
aaaaccaaaaattctaactccatataatttcacccaacttaaactaatcc

SEQ ID NO: 23542 - DNA, 50 bp, synthetic construct
  source 1..50: mol_type = other DNA
ttaaattacaacccattttaaaaatcctacaacattaaaatcttcttctc

SEQ ID NO: 23543 - DNA, 50 bp, synthetic construct
  source 1..50: mol_type = other DNA
taataactttttaaacaccctcttaaaacatattaaaaaatatacaaatc

SEQ ID NO: 23544 - DNA, 50 bp, synthetic construct
  source 1..50: mol_type = other DNA
tctttaacraaaaataacccttaaaactaactccaaatatttctataatc

SEQ ID NO: 23545 - DNA, 50 bp, synthetic construct
  source 1..50: mol_type = other DNA
atttctataatcrctctaaaataattaaactttacccctctcctctcacc

SEQ ID NO: 23546 - DNA, 50 bp, synthetic construct
  source 1..50: mol_type = other DNA
cctattaaaaacacctcctcccrtttaaattactaaaaaaattcctcttc

SEQ ID NO: 23547 - DNA, 50 bp, synthetic construct
  source 1..50: mol_type = other DNA
catcracaaataataaacactaaaactccctattaaaaacacctcctccc

SEQ ID NO: 23548 - DNA, 50 bp, synthetic construct
  source 1..50: mol_type = other DNA
aaacraaaaaaaatatccccaacaaaaaatttcaatacccactacttatc

SEQ ID NO: 23549 - DNA, 50 bp, synthetic construct
  source 1..50: mol_type = other DNA
attaaaccatattcttacaaataaatcacttcatataaaacrctaaacrc

SEQ ID NO: 23550 - DNA, 50 bp, synthetic construct
  source 1..50: mol_type = other DNA
ctattaaaccatattcttacaaataaatcacttcatataaaacrctaaac

SEQ ID NO: 23551 - DNA, 50 bp, synthetic construct
  source 1..50: mol_type = other DNA
rtttttactattaaaccatattcttacaaataaatcacttcatataaaac

SEQ ID NO: 23552 - DNA, 50 bp, synthetic construct
  source 1..50: mol_type = other DNA
rttttacataaaataacttacctacaaaaatataatttaacaacaaaaac

SEQ ID NO: 23553 - DNA, 50 bp, synthetic construct
  source 1..50: mol_type = other DNA
aaataacttacctacaaaaatataatttaacaacaaaaacrcaacaatac

SEQ ID NO: 23554 - DNA, 50 bp, synthetic construct
  source 1..50: mol_type = other DNA
aaacrcaacaatacrtacatatatcatctttcttaaaaaacaccattatc

SEQ ID NO: 23555 - DNA, 50 bp, synthetic construct
  source 1..50: mol_type = other DNA
aaacaacatttcatacctattatcaaaacttattactacaaaaatttatc

SEQ ID NO: 23556 - DNA, 50 bp, synthetic construct
  source 1..50: mol_type = other DNA
crcatcctatataactccrataaaaaaaaactcttaaaaacttatatctc

SEQ ID NO: 23557 - DNA, 50 bp, synthetic construct
  source 1..50: mol_type = other DNA
ccaatatataaattaaattacaccaaaacaaatcaaattattccctaacc

SEQ ID NO: 23558 - DNA, 50 bp, synthetic construct
  source 1..50: mol_type = other DNA
aaaaaaatacaatacttaacatctcttaaataactataactcactacttc

SEQ ID NO: 23559 - DNA, 50 bp, synthetic construct
  source 1..50: mol_type = other DNA
taaattcaacattaaactaaataaccataaatattaacaatcacaaaatc

SEQ ID NO: 23560 - DNA, 50 bp, synthetic construct
  source 1..50: mol_type = other DNA
ttccctaacaaaaaaaacrataaataaacttactctaactttcttacccc

SEQ ID NO: 23561 - DNA, 50 bp, synthetic construct
  source 1..50: mol_type = other DNA
atctaacaaattttcaaatttaataacattaacaataatataatataacc

SEQ ID NO: 23562 - DNA, 50 bp, synthetic construct
  source 1..50: mol_type = other DNA
cccccaaccttaaaacaaaaacaaatatcatactccacaaaacaatcacc

SEQ ID NO: 23563 - DNA, 50 bp, synthetic construct
  source 1..50: mol_type = other DNA
tcctaccraaacatacctcacactcatatttcccaacctattctaataac

SEQ ID NO: 23564 - DNA, 50 bp, synthetic construct
  source 1..50: mol_type = other DNA
cataccaaaaaatctactttattccccraccaatactaaaccttcctacc

SEQ ID NO: 23565 - DNA, 50 bp, synthetic construct
  source 1..50: mol_type = other DNA
ttcacataacctcaacraaaaaacataccaaaaaatctactttattcccc

SEQ ID NO: 23566 - DNA, 50 bp, synthetic construct
  source 1..50: mol_type = other DNA
aaatccaacattaaccraaaaacaaaacaaacttcttaacataccctctc

SEQ ID NO: 23567 - DNA, 50 bp, synthetic construct
  source 1..50: mol_type = other DNA
acttcttaacataccctctcrctaaaactatataaactactaaacaaacc

SEQ ID NO: 23568 - DNA, 50 bp, synthetic construct
  source 1..50: mol_type = other DNA
aaacttcaaattaaaacaaatactaaatattacactaaataaaactcacc

SEQ ID NO: 23569 - DNA, 50 bp, synthetic construct
  source 1..50: mol_type = other DNA
catcaataaaaaatcatatacccatcaaaaaaaactccctataactaccc

SEQ ID NO: 23570 - DNA, 50 bp, synthetic construct
  source 1..50: mol_type = other DNA
acttcttttacatataaatcctaacaataacaaccaaaaaaacccaaaac

SEQ ID NO: 23571 - DNA, 50 bp, synthetic construct
  source 1..50: mol_type = other DNA
caacttaatacaaaaactactaatttcaacttctttaacttaattctctc

SEQ ID NO: 23572 - DNA, 50 bp, synthetic construct
  source 1..50: mol_type = other DNA
cctctcaacatcatctataaacttattacaaatacacattactaaatccc

SEQ ID NO: 23573 - DNA, 50 bp, synthetic construct
  source 1..50: mol_type = other DNA
atactaaaaattaatcatttaatctaatcatctaactaataaataaaacc

SEQ ID NO: 23574 - DNA, 50 bp, synthetic construct
  source 1..50: mol_type = other DNA
ttaaattaaaactacrttttacttaaacttaacraaaacaatcacttccc

SEQ ID NO: 23575 - DNA, 50 bp, synthetic construct
  source 1..50: mol_type = other DNA
ttaactcctccccaaaataaccacttttctaacttctataacataaactc

SEQ ID NO: 23576 - DNA, 50 bp, synthetic construct
  source 1..50: mol_type = other DNA
taaacccaatacctcaaataaaaatacaaaaatcacccrtcttctatatc

SEQ ID NO: 23577 - DNA, 50 bp, synthetic construct
  source 1..50: mol_type = other DNA
ttaataaactaataataaattttaacacttaaccatcaataactacraac

SEQ ID NO: 23578 - DNA, 50 bp, synthetic construct
  source 1..50: mol_type = other DNA
aaacctccaatacctcctcataaaaaaatacaaaatcacttataattatc

SEQ ID NO: 23579 - DNA, 50 bp, synthetic construct
  source 1..50: mol_type = other DNA
ctttttattcctccctctacttctttactttctctttctactctaaaacc

SEQ ID NO: 23580 - DNA, 50 bp, synthetic construct
  source 1..50: mol_type = other DNA
acatatttttaaataacatattcaaaactaatattacaaaacacacatac

SEQ ID NO: 23581 - DNA, 50 bp, synthetic construct
  source 1..50: mol_type = other DNA
ttctaaaaacaaaatcacaaaattatcaaatcaatattctatctactaac

SEQ ID NO: 23582 - DNA, 50 bp, synthetic construct
  source 1..50: mol_type = other DNA
accactattaaaatatctattatataaaaatttctcaatatctaaaacac

SEQ ID NO: 23583 - DNA, 50 bp, synthetic construct
  source 1..50: mol_type = other DNA
atcatttcttcttataatatttcactctccatttctttccttactaaccc

SEQ ID NO: 23584 - DNA, 50 bp, synthetic construct
  source 1..50: mol_type = other DNA
aaaaaaactttatctaaatttacttaaactttccctctattctttccctc

SEQ ID NO: 23585 - DNA, 50 bp, synthetic construct
  source 1..50: mol_type = other DNA
atatatatacatatatacatatacacactcrcacatacacatataaacac

SEQ ID NO: 23586 - DNA, 50 bp, synthetic construct
  source 1..50: mol_type = other DNA
catttcctaataaacaacaactctacccattacatcaacttactatactc

SEQ ID NO: 23587 - DNA, 50 bp, synthetic construct
  source 1..50: mol_type = other DNA
tataaataccctaccataaaaacctacaacaacatacaataaaaacattc

SEQ ID NO: 23588 - DNA, 50 bp, synthetic construct
  source 1..50: mol_type = other DNA
taaataatattctaacrataatacacraaataaaatctaactcataaacc

SEQ ID NO: 23589 - DNA, 50 bp, synthetic construct
  source 1..50: mol_type = other DNA
acaatttaaaactacrtaataatccaaaccaccataaataatattctaac

SEQ ID NO: 23590 - DNA, 50 bp, synthetic construct
  source 1..50: mol_type = other DNA
accccrtatatcatcrtcaaaacaccatccataataatttaaaccattac

SEQ ID NO: 23591 - DNA, 50 bp, synthetic construct
  source 1..50: mol_type = other DNA
aattaaaaattaaaaacttcaaaaacctcctctattttacctctaaaacc

SEQ ID NO: 23592 - DNA, 50 bp, synthetic construct
  source 1..50: mol_type = other DNA
ccactaaaacatctaacctccctaaccatatacacttcttaacataccac

SEQ ID NO: 23593 - DNA, 50 bp, synthetic construct
  source 1..50: mol_type = other DNA
tttaatcactaacttttttaaactccccactccrcaaatatcaattctcc

SEQ ID NO: 23594 - DNA, 50 bp, synthetic construct
  source 1..50: mol_type = other DNA
aaatttctcaacaataaaaccaacacrcaaatccaatttccctacaatac

SEQ ID NO: 23595 - DNA, 50 bp, synthetic construct
  source 1..50: mol_type = other DNA
atactacctcattctctattcctattaattaaaaaaacatacctataacc

SEQ ID NO: 23596 - DNA, 50 bp, synthetic construct
  source 1..50: mol_type = other DNA
aattaataacctactaacctacracrtctatcaatatatactattaaacc

SEQ ID NO: 23597 - DNA, 50 bp, synthetic construct
  source 1..50: mol_type = other DNA
catcctatacctataaaaatcccaaaaccctaacraacacacacacaaac

SEQ ID NO: 23598 - DNA, 50 bp, synthetic construct
  source 1..50: mol_type = other DNA
cttatctccctacaaaattccaaaaaccctaaaccaatcaaaaaataatc

SEQ ID NO: 23599 - DNA, 50 bp, synthetic construct
  source 1..50: mol_type = other DNA
ccaaaaataaccccctaaattataatctaactcaaaacaaactatacccc

SEQ ID NO: 23600 - DNA, 50 bp, synthetic construct
  source 1..50: mol_type = other DNA
aattaactttcaaacaaaacattaaacaccrcacctaaaatcaccacaac

SEQ ID NO: 23601 - DNA, 50 bp, synthetic construct
  source 1..50: mol_type = other DNA
tctcccctctcttacaaacaaattaactttcaaacaaaacattaaacacc

SEQ ID NO: 23602 - DNA, 50 bp, synthetic construct
  source 1..50: mol_type = other DNA
tcatttaataaaacattttaaacacattaataccttcattctacaccaac

SEQ ID NO: 23603 - DNA, 50 bp, synthetic construct
  source 1..50: mol_type = other DNA
taaacacattaataccttcattctacaccaacratatatacaaacacccc

SEQ ID NO: 23604 - DNA, 50 bp, synthetic construct
  source 1..50: mol_type = other DNA
tacaaaacactaaacaatcatctataaaaactaaaaacttccraccraac

SEQ ID NO: 23605 - DNA, 50 bp, synthetic construct
  source 1..50: mol_type = other DNA
attatacaaaacactaaacaatcatctataaaaactaaaaacttccracc

SEQ ID NO: 23606 - DNA, 50 bp, synthetic construct
  source 1..50: mol_type = other DNA
caaaattatacaaaacactaaacaatcatctataaaaactaaaaacttcc

SEQ ID NO: 23607 - DNA, 50 bp, synthetic construct
  source 1..50: mol_type = other DNA
tatcacaaaatacttactaaatttataatcccacttacataatcaactac

SEQ ID NO: 23608 - DNA, 50 bp, synthetic construct
  source 1..50: mol_type = other DNA
ttaatcatataaataaaatcacaaacttaataaacatcctataacacacc

SEQ ID NO: 23609 - DNA, 50 bp, synthetic construct
  source 1..50: mol_type = other DNA
actaaaactaatttcctataactacaccttcccaaccctaaaatatacac

SEQ ID NO: 23610 - DNA, 50 bp, synthetic construct
  source 1..50: mol_type = other DNA
aatacaactttcaaaaaaatcctttataaataccctaaaataaaaatcrc

SEQ ID NO: 23611 - DNA, 50 bp, synthetic construct
  source 1..50: mol_type = other DNA
ctaaaatcctactattctaaacataacactttaaaaaacaatacttaaac

SEQ ID NO: 23612 - DNA, 50 bp, synthetic construct
  source 1..50: mol_type = other DNA
atcctactattctaaacataacactttaaaaaacaatacttaaacraaac

SEQ ID NO: 23613 - DNA, 50 bp, synthetic construct
  source 1..50: mol_type = other DNA
tattacaactactcaactttaccacaaaaaacatataaacaaacraacac

SEQ ID NO: 23614 - DNA, 50 bp, synthetic construct
  source 1..50: mol_type = other DNA
aacctttattacaactactcaactttaccacaaaaaacatataaacaaac

SEQ ID NO: 23615 - DNA, 50 bp, synthetic construct
  source 1..50: mol_type = other DNA
caaaaaaactaactaacaaaacacaaaaacaaatataacaaaatccaaac

SEQ ID NO: 23616 - DNA, 50 bp, synthetic construct
  source 1..50: mol_type = other DNA
ataaaaaacttaacacacaaatataaatatacttcaaatacttaaaaacc

SEQ ID NO: 23617 - DNA, 50 bp, synthetic construct
  source 1..50: mol_type = other DNA
aaatatacttcaaatacttaaaaaccrtatataaaatttatatcccaacc

SEQ ID NO: 23618 - DNA, 50 bp, synthetic construct
  source 1..50: mol_type = other DNA
tacactttattaccaaatcttaaaacctaaacactacctcctacctcaac

SEQ ID NO: 23619 - DNA, 50 bp, synthetic construct
  source 1..50: mol_type = other DNA
ttattaccaaatcttaaaacctaaacactacctcctacctcaacrtaatc

SEQ ID NO: 23620 - DNA, 50 bp, synthetic construct
  source 1..50: mol_type = other DNA
caacaaactaacratttacttaaacctctacctcatctttcttcttttac

SEQ ID NO: 23621 - DNA, 50 bp, synthetic construct
  source 1..50: mol_type = other DNA
aaatttaatcaattcaaaaatacacaaaataaaaaaattatccaactccc

SEQ ID NO: 23622 - DNA, 50 bp, synthetic construct
  source 1..50: mol_type = other DNA
ctaattaaatcaatctcctactaataaatatacaaattattcccaatttc

SEQ ID NO: 23623 - DNA, 50 bp, synthetic construct
  source 1..50: mol_type = other DNA
aaatcaactatcccactaaaaacaaaatctaaatataaaatcraatcaac

SEQ ID NO: 23624 - DNA, 50 bp, synthetic construct
  source 1..50: mol_type = other DNA
taacttaacaaaatcttcccacctcrttcacccrtactaaatactaaaac

SEQ ID NO: 23625 - DNA, 50 bp, synthetic construct
  source 1..50: mol_type = other DNA
aatatcaaaaaaaatctataatataaacttcatcatacaaaataactcac

SEQ ID NO: 23626 - DNA, 50 bp, synthetic construct
  source 1..50: mol_type = other DNA
aaaaaatctataatataaacttcatcatacaaaataactcacrccttacc

SEQ ID NO: 23627 - DNA, 50 bp, synthetic construct
  source 1..50: mol_type = other DNA
aaataaaataacaaaaatcaaaatctaactaaaatctcctctccccrttc

SEQ ID NO: 23628 - DNA, 50 bp, synthetic construct
  source 1..50: mol_type = other DNA
ccccaaataaaataacaaaaatcaaaatctaactaaaatctcctctcccc

SEQ ID NO: 23629 - DNA, 50 bp, synthetic construct
  source 1..50: mol_type = other DNA
tattacctcacctaaaaatatacaaccttaaatacactaactcaccatcc

SEQ ID NO: 23630 - DNA, 50 bp, synthetic construct
  source 1..50: mol_type = other DNA
taattccctattacaacctcctccaaaaatctctatttttcctatataac

SEQ ID NO: 23631 - DNA, 50 bp, synthetic construct
  source 1..50: mol_type = other DNA
aaatctctatttttcctatataacrtttatcttaaatataaccaattaac

SEQ ID NO: 23632 - DNA, 50 bp, synthetic construct
  source 1..50: mol_type = other DNA
tataaccaattaacrtatttattcaatatatcttcccttattaaaccatc

SEQ ID NO: 23633 - DNA, 50 bp, synthetic construct
  source 1..50: mol_type = other DNA
acctttttcaccctaatacctaacacacaaaaaatactcaataaaatatc

SEQ ID NO: 23634 - DNA, 50 bp, synthetic construct
  source 1..50: mol_type = other DNA
cctctaaaatacaattatataatctcatcatacataaactcrtaacaacc

SEQ ID NO: 23635 - DNA, 50 bp, synthetic construct
  source 1..50: mol_type = other DNA
ttactttatatccttcatcttaaatctcataaaaacaaaacrattaccac

SEQ ID NO: 23636 - DNA, 50 bp, synthetic construct
  source 1..50: mol_type = other DNA
tctaaaaataaatttcctcattaataacaaaaacctcttaaaaaaaaccc

SEQ ID NO: 23637 - DNA, 50 bp, synthetic construct
  source 1..50: mol_type = other DNA
accctaattttattcaaacaacaataaacccaaacctaataaaaactatc

SEQ ID NO: 23638 - DNA, 50 bp, synthetic construct
  source 1..50: mol_type = other DNA
ttaatacactcctaaacaacaaaataactaatacttcattacataactac

SEQ ID NO: 23639 - DNA, 50 bp, synthetic construct
  source 1..50: mol_type = other DNA
taacttttatctcaaaaaactatttcttctccactatataaacacacccc

SEQ ID NO: 23640 - DNA, 50 bp, synthetic construct
  source 1..50: mol_type = other DNA
tcraataataataaatctatttccctcaactaatctcccacaaataactc

SEQ ID NO: 23641 - DNA, 50 bp, synthetic construct
  source 1..50: mol_type = other DNA
ttcatttccttaccaataaaatacaattctactaaacaacccaaaaaaac

SEQ ID NO: 23642 - DNA, 50 bp, synthetic construct
  source 1..50: mol_type = other DNA
aaaaaaacrctttcctcttctaaaaatctctaattctatcttctacacac

SEQ ID NO: 23643 - DNA, 50 bp, synthetic construct
  source 1..50: mol_type = other DNA
ttcttaaatataacccctaaatttacccaaaatcctaaaaacccaaaatc

SEQ ID NO: 23644 - DNA, 50 bp, synthetic construct
  source 1..50: mol_type = other DNA
tacccaaaatcctaaaaacccaaaatcrtataaataatttaaaaactacc

SEQ ID NO: 23645 - DNA, 50 bp, synthetic construct
  source 1..50: mol_type = other DNA
taaaaaaaataaacactaataaacacaaacttaactccttaaaccacaac

SEQ ID NO: 23646 - DNA, 50 bp, synthetic construct
  source 1..50: mol_type = other DNA
ttcttctcctcctcctactatctacrttaaattaaattttattttttacc

SEQ ID NO: 23647 - DNA, 50 bp, synthetic construct
  source 1..50: mol_type = other DNA
atcratataccrtcccataatcrtaaaataaattatatctaatcaccccc

SEQ ID NO: 23648 - DNA, 50 bp, synthetic construct
  source 1..50: mol_type = other DNA
tcaataaaaatactaacractaaaaaaaacccracatacaatcatattcc

SEQ ID NO: 23649 - DNA, 50 bp, synthetic construct
  source 1..50: mol_type = other DNA
ccatcctacttcttttcraaacataattacataccraatttttttcaatc

SEQ ID NO: 23650 - DNA, 50 bp, synthetic construct
  source 1..50: mol_type = other DNA
ctaaaaaatataatcacactaaactcaactttaaaaaattcacactacac

SEQ ID NO: 23651 - DNA, 50 bp, synthetic construct
  source 1..50: mol_type = other DNA
attcacactacacrtattacacaatatatacatttctataaacacacacc

SEQ ID NO: 23652 - DNA, 50 bp, synthetic construct
  source 1..50: mol_type = other DNA
taacrattattcttccttacccattaccttcttatcttttatacttacac

SEQ ID NO: 23653 - DNA, 50 bp, synthetic construct
  source 1..50: mol_type = other DNA
acatttctaaactcttcctatatactaaacattaaaaccaacatctacac

SEQ ID NO: 23654 - DNA, 50 bp, synthetic construct
  source 1..50: mol_type = other DNA
aaatatctttttcaaaatactctaaaccaaaataatctatcccaaaaccc

SEQ ID NO: 23655 - DNA, 50 bp, synthetic construct
  source 1..50: mol_type = other DNA
ttaccaaaaaaccatccccaaataaaaacaaactaaaccacaaaattctc

SEQ ID NO: 23656 - DNA, 50 bp, synthetic construct
  source 1..50: mol_type = other DNA
tattcctatttaaaaataacttcctaacaacccaactaaatacaaaaccc

SEQ ID NO: 23657 - DNA, 50 bp, synthetic construct
  source 1..50: mol_type = other DNA
tataatataacttcctatatcctaaaccctactacaatccctaaaaaatc

SEQ ID NO: 23658 - DNA, 50 bp, synthetic construct
  source 1..50: mol_type = other DNA
acracrccactcaaaaatttcrtttattcaaatcacaacaaaattaaacc

SEQ ID NO: 23659 - DNA, 50 bp, synthetic construct
  source 1..50: mol_type = other DNA
tctacccatcactatattttcttcataacactatctaaaatatctttatc

SEQ ID NO: 23660 - DNA, 50 bp, synthetic construct
  source 1..50: mol_type = other DNA
ctcttactcttccacctcctaccataaaataattcaacaataaaaccctc

SEQ ID NO: 23661 - DNA, 50 bp, synthetic construct
  source 1..50: mol_type = other DNA
aactttaatttcctcatctcataaactaacaattataaaaaaaatccccc

SEQ ID NO: 23662 - DNA, 50 bp, synthetic construct
  source 1..50: mol_type = other DNA
tcataaactaacaattataaaaaaaatcccccrattctaaaaaccacctc

SEQ ID NO: 23663 - DNA, 50 bp, synthetic construct
  source 1..50: mol_type = other DNA
atttatatttctactcaactaataatataaaaacaacrcccaactaaatc

SEQ ID NO: 23664 - DNA, 50 bp, synthetic construct
  source 1..50: mol_type = other DNA
ttcttctttacttatttatatttctactcaactaataatataaaaacaac

SEQ ID NO: 23665 - DNA, 50 bp, synthetic construct
  source 1..50: mol_type = other DNA
acatttcttatcaaaaatacatatttcratatttaatcatatactacctc

SEQ ID NO: 23666 - DNA, 50 bp, synthetic construct
  source 1..50: mol_type = other DNA
actcccttttctaaactcctataacatttcttatcaaaaatacatatttc

SEQ ID NO: 23667 - DNA, 50 bp, synthetic construct
  source 1..50: mol_type = other DNA
tcccaaacaacattaaaaaccaacaaaaatatttatactccaatctcttc

SEQ ID NO: 23668 - DNA, 50 bp, synthetic construct
  source 1..50: mol_type = other DNA
ctaaaataaatcataactatcaaaaactccctacctctcataaacactcc

SEQ ID NO: 23669 - DNA, 50 bp, synthetic construct
  source 1..50: mol_type = other DNA
aaaaccaacttcrtcattctatttttcaatccaacaatacttatctctcc

SEQ ID NO: 23670 - DNA, 50 bp, synthetic construct
  source 1..50: mol_type = other DNA
acccttaataactaactcatccrtcaaaaacattaaattcaaattaaacc

SEQ ID NO: 23671 - DNA, 50 bp, synthetic construct
  source 1..50: mol_type = other DNA
caattctccaaaaccataaatttatctaacccttaataactaactcatcc

SEQ ID NO: 23672 - DNA, 50 bp, synthetic construct
  source 1..50: mol_type = other DNA
acatctatatcaatttcttctccaacattataaccataaaaattttcatc

SEQ ID NO: 23673 - DNA, 50 bp, synthetic construct
  source 1..50: mol_type = other DNA
aaaacacaaatatacttattaaaaacaaaattccccaaatatcaaaaacc

SEQ ID NO: 23674 - DNA, 50 bp, synthetic construct
  source 1..50: mol_type = other DNA
aacctttaaaaaaccaaatacactatttaaacccatccattcctcattcc

SEQ ID NO: 23675 - DNA, 50 bp, synthetic construct
  source 1..50: mol_type = other DNA
acaaccaaataataaccacattcaactacraaaaatcccraaaaaaatcc

SEQ ID NO: 23676 - DNA, 50 bp, synthetic construct
  source 1..50: mol_type = other DNA
tactattttcttattacttttcataattttaacatcatattcctattctc

SEQ ID NO: 23677 - DNA, 50 bp, synthetic construct
  source 1..50: mol_type = other DNA
aaaacraaacaacaaaacaacraccccatacrtatattaattaaaacaac

SEQ ID NO: 23678 - DNA, 50 bp, synthetic construct
  source 1..50: mol_type = other DNA
aaaaaattttaactaatacacrtataaaatcrctattttaactaacacac

SEQ ID NO: 23679 - DNA, 50 bp, synthetic construct
  source 1..50: mol_type = other DNA
aactaatacacrtataaaatcrctattttaactaacacacrtataaaatc

SEQ ID NO: 23680 - DNA, 50 bp, synthetic construct
  source 1..50: mol_type = other DNA
aaatcrctattttaactaacacacrtataaaatcrctattttattacctc

SEQ ID NO: 23681 - DNA, 50 bp, synthetic construct
  source 1..50: mol_type = other DNA
craacctaaaaatcacraataacaacattttctctttaatattaaaaaac

SEQ ID NO: 23682 - DNA, 50 bp, synthetic construct
  source 1..50: mol_type = other DNA
aacaactatatatacttaaatataaatcactacattcrctttctcttctc

SEQ ID NO: 23683 - DNA, 50 bp, synthetic construct
  source 1..50: mol_type = other DNA
rtttcaactccttaacaactatatatacttaaatataaatcactacattc

SEQ ID NO: 23684 - DNA, 50 bp, synthetic construct
  source 1..50: mol_type = other DNA
acttaacaacctcaataaactctttctactaaaaacaaactaaactatcc

SEQ ID NO: 23685 - DNA, 50 bp, synthetic construct
  source 1..50: mol_type = other DNA
aactcaatctatccccaataaaaaaaattcactaaaactaccaaacaatc

SEQ ID NO: 23686 - DNA, 50 bp, synthetic construct
  source 1..50: mol_type = other DNA
ttctaaatttctaattcacaaaacttattcataacctccctaaaactatc

SEQ ID NO: 23687 - DNA, 50 bp, synthetic construct
  source 1..50: mol_type = other DNA
taactcatacaaaaatatttaaaattcatcctataaatcccttaacaacc

SEQ ID NO: 23688 - DNA, 50 bp, synthetic construct
  source 1..50: mol_type = other DNA
aaaaatttcaaattttcttccattcccataattcattccactatataaac

SEQ ID NO: 23689 - DNA, 50 bp, synthetic construct
  source 1..50: mol_type = other DNA
ccactatataaacractatcctaaaaaccaaccaaaaacaaccaacaatc

SEQ ID NO: 23690 - DNA, 50 bp, synthetic construct
  source 1..50: mol_type = other DNA
cractatcctaaaaaccaaccaaaaacaaccaacaatcraaaaccattac

SEQ ID NO: 23691 - DNA, 50 bp, synthetic construct
  source 1..50: mol_type = other DNA
crcctaatacttaacaattatttcaaaataaaataactcttaaactaaac

SEQ ID NO: 23692 - DNA, 50 bp, synthetic construct
  source 1..50: mol_type = other DNA
acaattaccaaacaccaaacrtacccaacctataaataaaaataaataac

SEQ ID NO: 23693 - DNA, 50 bp, synthetic construct
  source 1..50: mol_type = other DNA
ataatttacacaactattttcacatacaatcacactatacattccactac

SEQ ID NO: 23694 - DNA, 50 bp, synthetic construct
  source 1..50: mol_type = other DNA
caaataaacaataaaccaccaactaccacaacrctctccatattattttc

SEQ ID NO: 23695 - DNA, 50 bp, synthetic construct
  source 1..50: mol_type = other DNA
ctaaaacccaccatcctctctaaccaaaaccatctacataataaaaatac

SEQ ID NO: 23696 - DNA, 50 bp, synthetic construct
  source 1..50: mol_type = other DNA
tacaaaaatcaatcactcctatctacrctcaaaaatcactctaaaatatc

SEQ ID NO: 23697 - DNA, 50 bp, synthetic construct
  source 1..50: mol_type = other DNA
ttcctataaacttatcattacatctacaaaaatcaatcactcctatctac

SEQ ID NO: 23698 - DNA, 50 bp, synthetic construct
  source 1..50: mol_type = other DNA
tataaccttcccrataaaaatcrcaaccaaacattactcaaaactaaatc

SEQ ID NO: 23699 - DNA, 50 bp, synthetic construct
  source 1..50: mol_type = other DNA
tccaccaatttcrataactaaacaatcatataaccttcccrataaaaatc

SEQ ID NO: 23700 - DNA, 50 bp, synthetic construct
  source 1..50: mol_type = other DNA
acctaataaatccaccaatttcrataactaaacaatcatataaccttccc

SEQ ID NO: 23701 - DNA, 50 bp, synthetic construct
  source 1..50: mol_type = other DNA
atatctaactacratttccaccraaaaaactacataactacccaatcatc

SEQ ID NO: 23702 - DNA, 50 bp, synthetic construct
  source 1..50: mol_type = other DNA
atcatcraaactaataaatccaccaaattaaaaaaataactcaaaaaaac

SEQ ID NO: 23703 - DNA, 50 bp, synthetic construct
  source 1..50: mol_type = other DNA
raaaataactaaaaactccaacctctcctatctaaaacatacccaacctc

SEQ ID NO: 23704 - DNA, 50 bp, synthetic construct
  source 1..50: mol_type = other DNA
aaaatcatcaaaaaattactcaaaaaaattactatacrcaacactactcc

SEQ ID NO: 23705 - DNA, 50 bp, synthetic construct
  source 1..50: mol_type = other DNA
actacaaacacaaaaaatcatcaaaaaattactcaaaaaaattactatac

SEQ ID NO: 23706 - DNA, 50 bp, synthetic construct
  source 1..50: mol_type = other DNA
aaaatcactaacttacaataacatttatttttctcacaaatcaatatcac

SEQ ID NO: 23707 - DNA, 50 bp, synthetic construct
  source 1..50: mol_type = other DNA
tttatttttctcacaaatcaatatcacraatactacttcaaataataaac

SEQ ID NO: 23708 - DNA, 50 bp, synthetic construct
  source 1..50: mol_type = other DNA
ctaccccaaaataaaacacataaaaataacctaaactcaacccaaaatcc

SEQ ID NO: 23709 - DNA, 50 bp, synthetic construct
  source 1..50: mol_type = other DNA
tccatctaaaataccraattcatctcattaaaaaataccaaacaataaac

SEQ ID NO: 23710 - DNA, 50 bp, synthetic construct
  source 1..50: mol_type = other DNA
ttcatctcattaaaaaataccaaacaataaacrcaaaccaatatatatac

SEQ ID NO: 23711 - DNA, 50 bp, synthetic construct
  source 1..50: mol_type = other DNA
ctcattaaaaaataccaaacaataaacrcaaaccaatatatatacrcacc

SEQ ID NO: 23712 - DNA, 50 bp, synthetic construct
  source 1..50: mol_type = other DNA
ratctaacaaacrcaatattcraataaaaataacccrattttccaaatac

SEQ ID NO: 23713 - DNA, 50 bp, synthetic construct
  source 1..50: mol_type = other DNA
ttattttctccataaaacrcaacaatacctatatataccracaaaaaatc

SEQ ID NO: 23714 - DNA, 50 bp, synthetic construct
  source 1..50: mol_type = other DNA
ctaaaccaaacacaataactcacacctataaacccaatcctttaaaaaac

SEQ ID NO: 23715 - DNA, 50 bp, synthetic construct
  source 1..50: mol_type = other DNA
cacacctataaacccaatcctttaaaaaacraaaacataaaaaatcaccc

SEQ ID NO: 23716 - DNA, 50 bp, synthetic construct
  source 1..50: mol_type = other DNA
aaccaaaaattcaaaactacaataaactaaaattacaccactactctccc

SEQ ID NO: 23717 - DNA, 50 bp, synthetic construct
  source 1..50: mol_type = other DNA
tacttacaaactctaattaaatttcaaaaactaaacctaccatacttatc

SEQ ID NO: 23718 - DNA, 50 bp, synthetic construct
  source 1..50: mol_type = other DNA
accatacttatcratatataattccttcctctaaaattccaaacattccc

SEQ ID NO: 23719 - DNA, 50 bp, synthetic construct
  source 1..50: mol_type = other DNA
aaacccctatattccraatcttttattattctctacataaactttaattc

SEQ ID NO: 23720 - DNA, 50 bp, synthetic construct
  source 1..50: mol_type = other DNA
ttttctttaaatctcraatcaaaatccatacaaaaaacaacaaaaaaccc

SEQ ID NO: 23721 - DNA, 50 bp, synthetic construct
  source 1..50: mol_type = other DNA
taactcactacaaactctacctcrtaaattcataccattttcctacctcc

SEQ ID NO: 23722 - DNA, 50 bp, synthetic construct
  source 1..50: mol_type = other DNA
aaataacaacaacaaaaattacttcattttaactaaacrcrataactcac

SEQ ID NO: 23723 - DNA, 50 bp, synthetic construct
  source 1..50: mol_type = other DNA
acaaacaaaacaaaataacaacaacaaaaattacttcattttaactaaac

SEQ ID NO: 23724 - DNA, 50 bp, synthetic construct
  source 1..50: mol_type = other DNA
actcaaatactcctcctacctctacctcccaaaataataaaattacaaac

SEQ ID NO: 23725 - DNA, 50 bp, synthetic construct
  source 1..50: mol_type = other DNA
aaaacaaataacaacctaaacaactaaaaccaaacctctaaaaaatcccc

SEQ ID NO: 23726 - DNA, 50 bp, synthetic construct
  source 1..50: mol_type = other DNA
ttaaaaatttcttcacataaataaataaatcaaactatcttaccacctac

SEQ ID NO: 23727 - DNA, 50 bp, synthetic construct
  source 1..50: mol_type = other DNA
catttttaattacaaaatttccaaacacaaaataaccaaatcctaatacc

SEQ ID NO: 23728 - DNA, 50 bp, synthetic construct
  source 1..50: mol_type = other DNA
cacccttactaccttactaaaattcctatttacttctcctttcaaaaccc

SEQ ID NO: 23729 - DNA, 50 bp, synthetic construct
  source 1..50: mol_type = other DNA
aaaaaacrcactaatacttcaaaaaaaccaataacrtctaccttattccc

SEQ ID NO: 23730 - DNA, 50 bp, synthetic construct
  source 1..50: mol_type = other DNA
tcaatctcataattacctaaactaatctatactacraaaataaaataaac

SEQ ID NO: 23731 - DNA, 50 bp, synthetic construct
  source 1..50: mol_type = other DNA
tcaaattcaataactctccccaatcatataaaaaataaaatttccatacc

SEQ ID NO: 23732 - DNA, 50 bp, synthetic construct
  source 1..50: mol_type = other DNA
cctctacctcccaaattaaaataacaaaaattacaaacatataccaccac

SEQ ID NO: 23733 - DNA, 50 bp, synthetic construct
  source 1..50: mol_type = other DNA
ataaactccaaaaactttaaatctacrtcracctccccaaaactaaaatc

SEQ ID NO: 23734 - DNA, 50 bp, synthetic construct
  source 1..50: mol_type = other DNA
catcaaaaaaaacrttaacttcctccaaaacctcrattaaaaaattattc

SEQ ID NO: 23735 - DNA, 50 bp, synthetic construct
  source 1..50: mol_type = other DNA
acaactccttaaccraaactctaaaaaaaaccaacrtcctctttaataac

SEQ ID NO: 23736 - DNA, 50 bp, synthetic construct
  source 1..50: mol_type = other DNA
tttaccttttctttacccaaatcaaaaaccataacaaaaaaccraacrtc

SEQ ID NO: 23737 - DNA, 50 bp, synthetic construct
  source 1..50: mol_type = other DNA
tactttaccttttctttacccaaatcaaaaaccataacaaaaaaccraac

SEQ ID NO: 23738 - DNA, 50 bp, synthetic construct
  source 1..50: mol_type = other DNA
atataaacttctttaatcaattaacattttataactttctatttctattc

SEQ ID NO: 23739 - DNA, 50 bp, synthetic construct
  source 1..50: mol_type = other DNA
aaacaaacaaaactacaaactacaaattccttaacaacrcaaaaacaaac

SEQ ID NO: 23740 - DNA, 50 bp, synthetic construct
  source 1..50: mol_type = other DNA
atcraaccatatccttaacaatataactaccttaacaactactccaaacc

SEQ ID NO: 23741 - DNA, 50 bp, synthetic construct
  source 1..50: mol_type = other DNA
ctcratctaaaacaattattaaaacaaccacactaccaaaaatataatcc

SEQ ID NO: 23742 - DNA, 50 bp, synthetic construct
  source 1..50: mol_type = other DNA
aaaatacccaactacaaacaaaaaccatctttaacaaaactaactcraac

SEQ ID NO: 23743 - DNA, 50 bp, synthetic construct
  source 1..50: mol_type = other DNA
actaaaaatacccaactacaaacaaaaaccatctttaacaaaactaactc

SEQ ID NO: 23744 - DNA, 50 bp, synthetic construct
  source 1..50: mol_type = other DNA
attcctttataaatttcacaaccrcaaatttaaataaaaaaacaaacacc

SEQ ID NO: 23745 - DNA, 50 bp, synthetic construct
  source 1..50: mol_type = other DNA
craaatacaaaccaaatccatttttaaattcctttataaatttcacaacc

SEQ ID NO: 23746 - DNA, 50 bp, synthetic construct
  source 1..50: mol_type = other DNA
aaaaccaaacaaccaaaaatatctcaaaataccaaactccaaaacccacc

SEQ ID NO: 23747 - DNA, 50 bp, synthetic construct
  source 1..50: mol_type = other DNA
atatatctatacaccaccaatcccctaacrctctaaaataaatctaaccc

SEQ ID NO: 23748 - DNA, 50 bp, synthetic construct
  source 1..50: mol_type = other DNA
tctaaaatctaaaccaaatcaccraccccttatttaaactatttaaaccc

SEQ ID NO: 23749 - DNA, 50 bp, synthetic construct
  source 1..50: mol_type = other DNA
actaataatatacaaatacactcraattcaaacaatttaaacaaaaaacc

SEQ ID NO: 23750 - DNA, 50 bp, synthetic construct
  source 1..50: mol_type = other DNA
aacaaaaaaccrataatttaatctaaactctaaaactatattcaaatttc

SEQ ID NO: 23751 - DNA, 50 bp, synthetic construct
  source 1..50: mol_type = other DNA
ccrataatttaatctaaactctaaaactatattcaaatttcrctaaaacc

SEQ ID NO: 23752 - DNA, 50 bp, synthetic construct
  source 1..50: mol_type = other DNA
tcaaacrcattcctactaaaaactaacactcatccrtattctaaacattc

SEQ ID NO: 23753 - DNA, 50 bp, synthetic construct
  source 1..50: mol_type = other DNA
caaatacacaaaaactcaaacrcattcctactaaaaactaacactcatcc

SEQ ID NO: 23754 - DNA, 50 bp, synthetic construct
  source 1..50: mol_type = other DNA
aaattacttacaatccacaaaaactctatatcaacaatttatcattacac

SEQ ID NO: 23755 - DNA, 50 bp, synthetic construct
  source 1..50: mol_type = other DNA
aatatctaaaacccctaccaaaaacctccaaatttttaactacacaatcc

SEQ ID NO: 23756 - DNA, 50 bp, synthetic construct
  source 1..50: mol_type = other DNA
aaaataccraaacaaaaactaacttactaactctaaccacacaacccctc

SEQ ID NO: 23757 - DNA, 50 bp, synthetic construct
  source 1..50: mol_type = other DNA
aaaaatttcctcttaaaactaacaaaacacraccraacrtaataactcac

SEQ ID NO: 23758 - DNA, 50 bp, synthetic construct
  source 1..50: mol_type = other DNA
atatacaaaaccaaaaatttcctcttaaaactaacaaaacacraccraac

SEQ ID NO: 23759 - DNA, 50 bp, synthetic construct
  source 1..50: mol_type = other DNA
caactaataaataacaaacacacraaaatatctaaaccactaccctattc

SEQ ID NO: 23760 - DNA, 50 bp, synthetic construct
  source 1..50: mol_type = other DNA
ataaacccctataaacccttaacraacaaaacaataacctaaacattctc

SEQ ID NO: 23761 - DNA, 50 bp, synthetic construct
  source 1..50: mol_type = other DNA
tcacaattaaaataacaaaacaaccatctaaaatttcccaaacttaaatc

SEQ ID NO: 23762 - DNA, 50 bp, synthetic construct
  source 1..50: mol_type = other DNA
acracaaaaaacctcctcaaataaaaaccactaaaattaactcattatcc

SEQ ID NO: 23763 - DNA, 50 bp, synthetic construct
  source 1..50: mol_type = other DNA
acraataataaattaatctcaataattcccacttaaaaaaactccctacc

SEQ ID NO: 23764 - DNA, 50 bp, synthetic construct
  source 1..50: mol_type = other DNA
ctctcacaaaataacattaaaactacttccacacataactaaatatcttc

SEQ ID NO: 23765 - DNA, 50 bp, synthetic construct
  source 1..50: mol_type = other DNA
ccratccccaatataataatcctaatccaaacactaactatccttttctc

SEQ ID NO: 23766 - DNA, 50 bp, synthetic construct
  source 1..50: mol_type = other DNA
tccatttaaaacctaaatcaaaattaacttcatccaacatattttaacac

SEQ ID NO: 23767 - DNA, 50 bp, synthetic construct
  source 1..50: mol_type = other DNA
aaatctttataaactataaaatcctatacaaacrtaaaatatttcctttc

SEQ ID NO: 23768 - DNA, 50 bp, synthetic construct
  source 1..50: mol_type = other DNA
ttcataaaaacctttcccacccaccacaaaaaaaatataacaaatttccc

SEQ ID NO: 23769 - DNA, 50 bp, synthetic construct
  source 1..50: mol_type = other DNA
tcrataccatttatctaattaaacaaactttaaacaattcatctcctccc

SEQ ID NO: 23770 - DNA, 50 bp, synthetic construct
  source 1..50: mol_type = other DNA
aaaacraccttctaaaatatctcctacaaccctactctaaaactcaaaac

SEQ ID NO: 23771 - DNA, 50 bp, synthetic construct
  source 1..50: mol_type = other DNA
aacaaataacaaaaacrcracrcaaaaccaaactttctaatatacaatcc

SEQ ID NO: 23772 - DNA, 50 bp, synthetic construct
  source 1..50: mol_type = other DNA
tctccctaccctaaaattaaactccttaaaaataaaaacccrcctaaatc

SEQ ID NO: 23773 - DNA, 50 bp, synthetic construct
  source 1..50: mol_type = other DNA
atatatcctaaaataaataacttaacctctctaaccttaattacccaatc

SEQ ID NO: 23774 - DNA, 50 bp, synthetic construct
  source 1..50: mol_type = other DNA
caactaccccractcatcatcaacaactttttaaaaaccaaacaaaaacc

SEQ ID NO: 23775 - DNA, 50 bp, synthetic construct
  source 1..50: mol_type = other DNA
aatttcactatattaaccaaaataatttcaatcccttaacttcrtaatcc

SEQ ID NO: 23776 - DNA, 50 bp, synthetic construct
  source 1..50: mol_type = other DNA
ctacactaaactattattacaccactaaacttaataccaaaaaacaaaac

SEQ ID NO: 23777 - DNA, 50 bp, synthetic construct
  source 1..50: mol_type = other DNA
aaaacacaactcaaaaaaccaaattaatcccaaaaaatctcacaccaacc

SEQ ID NO: 23778 - DNA, 50 bp, synthetic construct
  source 1..50: mol_type = other DNA
ataaacataaataacctaacaatctcacttaaaaattaatccttaaaacc

SEQ ID NO: 23779 - DNA, 50 bp, synthetic construct
  source 1..50: mol_type = other DNA
acataaataacctaacaatctcacttaaaaattaatccttaaaaccraac

SEQ ID NO: 23780 - DNA, 50 bp, synthetic construct
  source 1..50: mol_type = other DNA
tactaaacatatttaaaccaacatcctttcataaaaaacttaaccrtcac

SEQ ID NO: 23781 - DNA, 50 bp, synthetic construct
  source 1..50: mol_type = other DNA
taatttactaaacatatttaaaccaacatcctttcataaaaaacttaacc

SEQ ID NO: 23782 - DNA, 50 bp, synthetic construct
  source 1..50: mol_type = other DNA
actaaattctccataaaaaaatactaattcaaacatatccaacaaaccac

SEQ ID NO: 23783 - DNA, 50 bp, synthetic construct
  source 1..50: mol_type = other DNA
caaaccacraatactaaaaaattctccatattctccccaataaaactaac

SEQ ID NO: 23784 - DNA, 50 bp, synthetic construct
  source 1..50: mol_type = other DNA
catcaaccaattaaaaacacrattaatataactaccattcttaaaaactc

SEQ ID NO: 23785 - DNA, 50 bp, synthetic construct
  source 1..50: mol_type = other DNA
ttcataataaaaaccttatccraataccaaaatacaactttcatcaaaac

SEQ ID NO: 23786 - DNA, 50 bp, synthetic construct
  source 1..50: mol_type = other DNA
caaatatttaccccaaacaacataacaacttcataataaaaaccttatcc

SEQ ID NO: 23787 - DNA, 50 bp, synthetic construct
  source 1..50: mol_type = other DNA
actattccttttaatttaactcraattttatttctacaatttattaaaac

SEQ ID NO: 23788 - DNA, 50 bp, synthetic construct
  source 1..50: mol_type = other DNA
aattctaattttcaaatcaaacrttccaacaaactacaaaaataaaaccc

SEQ ID NO: 23789 - DNA, 50 bp, synthetic construct
  source 1..50: mol_type = other DNA
cacaaacctacaaaataaaaactctcctcattttaaaaaaccaattccac

SEQ ID NO: 23790 - DNA, 50 bp, synthetic construct
  source 1..50: mol_type = other DNA
ctatacttaaaacaaaaattatcacrtatccccttcatatactacaaccc

SEQ ID NO: 23791 - DNA, 50 bp, synthetic construct
  source 1..50: mol_type = other DNA
aaacaaatcccrtcaactccctaaactatacttaaaacaaaaattatcac

SEQ ID NO: 23792 - DNA, 50 bp, synthetic construct
  source 1..50: mol_type = other DNA
ttcttcctaataaaccattaacracatcactatatacttaaacaaatccc

SEQ ID NO: 23793 - DNA, 50 bp, synthetic construct
  source 1..50: mol_type = other DNA
cctatcaaaaactactaaatcaaacattcttaaaataaaacccatctatc

SEQ ID NO: 23794 - DNA, 50 bp, synthetic construct
  source 1..50: mol_type = other DNA
ttcccatccrctaatccttattttacacaaaataaaacraactaatcaac

SEQ ID NO: 23795 - DNA, 50 bp, synthetic construct
  source 1..50: mol_type = other DNA
ttcatacataaactaaatcaccaccataattaactattaaatcataaccc

SEQ ID NO: 23796 - DNA, 50 bp, synthetic construct
  source 1..50: mol_type = other DNA
accataattaactattaaatcataacccrattcraaattcaaataaaaac

SEQ ID NO: 23797 - DNA, 50 bp, synthetic construct
  source 1..50: mol_type = other DNA
ttcraaattcaaataaaaacrattctcaactaaaaacratttttctcccc

SEQ ID NO: 23798 - DNA, 50 bp, synthetic construct
  source 1..50: mol_type = other DNA
ataccaataacactccccaaaacatatctctccaaatattaccaaatatc

SEQ ID NO: 23799 - DNA, 50 bp, synthetic construct
  source 1..50: mol_type = other DNA
aaaaacaaataacctaatttaaacaaacatttctccaaaaaaaacacacc

SEQ ID NO: 23800 - DNA, 50 bp, synthetic construct
  source 1..50: mol_type = other DNA
acaaataaccacaacaatacccttattatccccaataatcataataaccc

SEQ ID NO: 23801 - DNA, 50 bp, synthetic construct
  source 1..50: mol_type = other DNA
aatcatcataatcactaaaaacaacaaaaacactactataaccatctatc

SEQ ID NO: 23802 - DNA, 50 bp, synthetic construct
  source 1..50: mol_type = other DNA
catcataatcactaaaaacaacaaaaacactactataaccatctatcrcc

SEQ ID NO: 23803 - DNA, 50 bp, synthetic construct
  source 1..50: mol_type = other DNA
aaaaaattaaattcatcaaactcccracctataaaaacttttaacrtcac

SEQ ID NO: 23804 - DNA, 50 bp, synthetic construct
  source 1..50: mol_type = other DNA
aaacraaaaaattaaattcatcaaactcccracctataaaaacttttaac

SEQ ID NO: 23805 - DNA, 50 bp, synthetic construct
  source 1..50: mol_type = other DNA
taacrtcaaaaactttcacaaaccraaaatttaataaactcaacccctcc

SEQ ID NO: 23806 - DNA, 50 bp, synthetic construct
  source 1..50: mol_type = other DNA
aacttataaaaaaattcaactcraacaaaacaacraacrttcaaacaaac

SEQ ID NO: 23807 - DNA, 50 bp, synthetic construct
  source 1..50: mol_type = other DNA
tctacrattttaaacttataaaaaaattcaactcraacaaaacaacraac

SEQ ID NO: 23808 - DNA, 50 bp, synthetic construct
  source 1..50: mol_type = other DNA
aactatcctaaaccaattcatataataataacttctatttaattaatacc

SEQ ID NO: 23809 - DNA, 50 bp, synthetic construct
  source 1..50: mol_type = other DNA
tcaaataaaaccaactcataaaattatttcaaataacttccaaaactacc

SEQ ID NO: 23810 - DNA, 50 bp, synthetic construct
  source 1..50: mol_type = other DNA
aaacattattccaaacctaaaaatataacaataacaaaataaacaaaatc

SEQ ID NO: 23811 - DNA, 50 bp, synthetic construct
  source 1..50: mol_type = other DNA
tactccctttcacttaccaataacatttcaacaccacraaaacaaaaacc

SEQ ID NO: 23812 - DNA, 50 bp, synthetic construct
  source 1..50: mol_type = other DNA
tttattaactatctactccctttcacttaccaataacatttcaacaccac

SEQ ID NO: 23813 - DNA, 50 bp, synthetic construct
  source 1..50: mol_type = other DNA
ccaacccctatcttactattttccataaaacataaaactacctaacaaac

SEQ ID NO: 23814 - DNA, 50 bp, synthetic construct
  source 1..50: mol_type = other DNA
aaaacccraaaaactcattacrattccaaaaataaaaactaacccaaatc

SEQ ID NO: 23815 - DNA, 50 bp, synthetic construct
  source 1..50: mol_type = other DNA
aaaccraaacttaaccrcaatcccaaacatcaaaccctaaaaataataac

SEQ ID NO: 23816 - DNA, 50 bp, synthetic construct
  source 1..50: mol_type = other DNA
aataactcaataacctaaaacccaataaataattattcacttccaatccc

SEQ ID NO: 23817 - DNA, 50 bp, synthetic construct
  source 1..50: mol_type = other DNA
aaaataaaataacttccccaattcacrtaactaataaataacccaacaac

SEQ ID NO: 23818 - DNA, 50 bp, synthetic construct
  source 1..50: mol_type = other DNA
aaaactaaaaaacctaaatataaatcrctactaaaccacttaccaaccac

SEQ ID NO: 23819 - DNA, 50 bp, synthetic construct
  source 1..50: mol_type = other DNA
cacataatcctctaataattcattaatcactcaaaattattaattaaacc

SEQ ID NO: 23820 - DNA, 50 bp, synthetic construct
  source 1..50: mol_type = other DNA
taatcctctaataattcattaatcactcaaaattattaattaaaccraac

SEQ ID NO: 23821 - DNA, 50 bp, synthetic construct
  source 1..50: mol_type = other DNA
aattcattaatcactcaaaattattaattaaaccraacraaatacctcac

SEQ ID NO: 23822 - DNA, 50 bp, synthetic construct
  source 1..50: mol_type = other DNA
ataaccctttctctccttaaatcccaataacctaccraataaaaaaaacc

SEQ ID NO: 23823 - DNA, 50 bp, synthetic construct
  source 1..50: mol_type = other DNA
taatcrcttcttacccacatccccrccaaaatccaattttttattttaac

SEQ ID NO: 23824 - DNA, 50 bp, synthetic construct
  source 1..50: mol_type = other DNA
aaaaatcttaaaatctcaacraacrccaaaacaaaaaactaaactctaac

SEQ ID NO: 23825 - DNA, 50 bp, synthetic construct
  source 1..50: mol_type = other DNA
aaacacttactacctaaaaaaactcraaataacccctccaaactaaaaac

SEQ ID NO: 23826 - DNA, 50 bp, synthetic construct
  source 1..50: mol_type = other DNA
craaataaaacatactctcaaccaacctctcccccaacatataaaaaaac

SEQ ID NO: 23827 - DNA, 50 bp, synthetic construct
  source 1..50: mol_type = other DNA
ctatcccccaattctaaaaaaaatacatctttctccaaaaaaccctctcc

SEQ ID NO: 23828 - DNA, 50 bp, synthetic construct
  source 1..50: mol_type = other DNA
aaaacaaaactaaaaactaaaaccaaaacccaaatcraaaacctaaaacc

SEQ ID NO: 23829 - DNA, 50 bp, synthetic construct
  source 1..50: mol_type = other DNA
aaaactaaaaactaaaaccaaaacccaaatcraaaacctaaaaccrtaac

SEQ ID NO: 23830 - DNA, 50 bp, synthetic construct
  source 1..50: mol_type = other DNA
taaaaactaaaaccaaaacccaaatcraaaacctaaaaccrtaacraatc

SEQ ID NO: 23831 - DNA, 50 bp, synthetic construct
  source 1..50: mol_type = other DNA
ataatcrcaaataatcaaaatcraacaaaactaaactccctccctaaaac

SEQ ID NO: 23832 - DNA, 50 bp, synthetic construct
  source 1..50: mol_type = other DNA
atcraacaaaactaaactccctccctaaaacrataataaaaaccrtaatc

SEQ ID NO: 23833 - DNA, 50 bp, synthetic construct
  source 1..50: mol_type = other DNA
acaaatcaccaaatacctcaacrcctaaaaacraaaccaaataaaaaaac

SEQ ID NO: 23834 - DNA, 50 bp, synthetic construct
  source 1..50: mol_type = other DNA
crctaaaacacctaataacctaccracrttaaataaataaaactaaaatc

SEQ ID NO: 23835 - DNA, 50 bp, synthetic construct
  source 1..50: mol_type = other DNA
cratcctcacttctatcttcaaactataaaacrcraaatcraataaacac

SEQ ID NO: 23836 - DNA, 50 bp, synthetic construct
  source 1..50: mol_type = other DNA
caatattttaaactaaaaataacrcrcaaaacccraacaaaactaaacac

SEQ ID NO: 23837 - DNA, 50 bp, synthetic construct
  source 1..50: mol_type = other DNA
craattaactacaaaacaatattttaaactaaaaataacrcrcaaaaccc

SEQ ID NO: 23838 - DNA, 50 bp, synthetic construct
  source 1..50: mol_type = other DNA
rcctccatccraattaactacaaaacaatattttaaactaaaaataacrc

SEQ ID NO: 23839 - DNA, 50 bp, synthetic construct
  source 1..50: mol_type = other DNA
acrcctccatccraattaactacaaaacaatattttaaactaaaaataac

SEQ ID NO: 23840 - DNA, 50 bp, synthetic construct
  source 1..50: mol_type = other DNA
aaaaatcaataccaaaaacctatctctaaaacrcctaaccctaataaacc

SEQ ID NO: 23841 - DNA, 50 bp, synthetic construct
  source 1..50: mol_type = other DNA
aaatcccccraccaaaaaacrtctaaaataaatattaatcttctaaatcc

SEQ ID NO: 23842 - DNA, 50 bp, synthetic construct
  source 1..50: mol_type = other DNA
aaaaaatttctacaccaaacatcaaaaacctctaaaataccatccctacc

SEQ ID NO: 23843 - DNA, 50 bp, synthetic construct
  source 1..50: mol_type = other DNA
ataaataaaaaaatcactacctacaactaaaaacctccaaaaaaaaacac

SEQ ID NO: 23844 - DNA, 50 bp, synthetic construct
  source 1..50: mol_type = other DNA
aataaaatctaataaaaaattcaaaacaaaaaccccracaaaacaatatc

SEQ ID NO: 23845 - DNA, 50 bp, synthetic construct
  source 1..50: mol_type = other DNA
caatatcracaaaaccaactttaataacaaaaaaaaccraaatctaaccc

SEQ ID NO: 23846 - DNA, 50 bp, synthetic construct
  source 1..50: mol_type = other DNA
aaaccctaaaacctaactactaaccratattaaaaaactatcatctcccc

SEQ ID NO: 23847 - DNA, 50 bp, synthetic construct
  source 1..50: mol_type = other DNA
tcaaaacccctaccaaaacaataaacctataaatctccaaaaatacaaac

SEQ ID NO: 23848 - DNA, 50 bp, synthetic construct
  source 1..50: mol_type = other DNA
tcccatcactaacctaactacctaaataaaaacaactctaaaaactcctc

SEQ ID NO: 23849 - DNA, 50 bp, synthetic construct
  source 1..50: mol_type = other DNA
ctaactacctaaataaaaacaactctaaaaactcctcraaacctaccctc

SEQ ID NO: 23850 - DNA, 50 bp, synthetic construct
  source 1..50: mol_type = other DNA
aaaaaataaacattcctaaaacttttataaatccctataaaccacaaaac

SEQ ID NO: 23851 - DNA, 50 bp, synthetic construct
  source 1..50: mol_type = other DNA
aataataaaaaaaatcctaaaaactatactttactactcctattaccttc

SEQ ID NO: 23852 - DNA, 50 bp, synthetic construct
  source 1..50: mol_type = other DNA
tcctaaaaactatactttactactcctattaccttcrttcaactaaaaac

SEQ ID NO: 23853 - DNA, 50 bp, synthetic construct
  source 1..50: mol_type = other DNA
aactttaacaactatacacttactataacataacacataaaacactaaac

SEQ ID NO: 23854 - DNA, 50 bp, synthetic construct
  source 1..50: mol_type = other DNA
ttcatacccaataaaaactaacacttaattaccaaatttcctaaaaaaac

SEQ ID NO: 23855 - DNA, 50 bp, synthetic construct
  source 1..50: mol_type = other DNA
aactaacacttaattaccaaatttcctaaaaaaacratccccaaaaaccc

SEQ ID NO: 23856 - DNA, 50 bp, synthetic construct
  source 1..50: mol_type = other DNA
tacaaaaaataaacaactaacactacacctctaaactcrccraaacaaac

SEQ ID NO: 23857 - DNA, 50 bp, synthetic construct
  source 1..50: mol_type = other DNA
ataaaaccttacaaaaaataaacaactaacactacacctctaaactcrcc

SEQ ID NO: 23858 - DNA, 50 bp, synthetic construct
  source 1..50: mol_type = other DNA
aaaataaaaccttacaaaaaataaacaactaacactacacctctaaactc

SEQ ID NO: 23859 - DNA, 50 bp, synthetic construct
  source 1..50: mol_type = other DNA
taataaccaacaaaaccctaaaaccctaataaaaaaatacttatcacccc

SEQ ID NO: 23860 - DNA, 50 bp, synthetic construct
  source 1..50: mol_type = other DNA
aaaaaaaatcttctatctaactactcaactaccraatttccractaaaac

SEQ ID NO: 23861 - DNA, 50 bp, synthetic construct
  source 1..50: mol_type = other DNA
taaacaattaaataaaaaatttttcctcccacrccaccctatcaaaaatc

SEQ ID NO: 23862 - DNA, 50 bp, synthetic construct
  source 1..50: mol_type = other DNA
aataaacccccaaaaactccaaacctaactcacaaaaaaacctataaccc

SEQ ID NO: 23863 - DNA, 50 bp, synthetic construct
  source 1..50: mol_type = other DNA
ttaaaaacatcaaaaaaaacatacrtaaaccctcaattacctcrcctctc

SEQ ID NO: 23864 - DNA, 50 bp, synthetic construct
  source 1..50: mol_type = other DNA
rtactacttaaaaacatcaaaaaaaacatacrtaaaccctcaattacctc

SEQ ID NO: 23865 - DNA, 50 bp, synthetic construct
  source 1..50: mol_type = other DNA
aaataaacctcctccccacrtactacttaaaaacatcaaaaaaaacatac

SEQ ID NO: 23866 - DNA, 50 bp, synthetic construct
  source 1..50: mol_type = other DNA
raaataattaaaaacttacrcatatccctcctaatatccccaaataacac

SEQ ID NO: 23867 - DNA, 50 bp, synthetic construct
  source 1..50: mol_type = other DNA
aaaaaaccaaaaaccatctccctacraaaaaacaacaccatcaaaatccc

SEQ ID NO: 23868 - DNA, 50 bp, synthetic construct
  source 1..50: mol_type = other DNA
rcaaaaaaataattcttaactttccctacctcctaaaacctaactaaaac

SEQ ID NO: 23869 - DNA, 50 bp, synthetic construct
  source 1..50: mol_type = other DNA
ccctacctcctaaaacctaactaaaacrataactaaaatatcaaactaac

SEQ ID NO: 23870 - DNA, 50 bp, synthetic construct
  source 1..50: mol_type = other DNA
aaaaaacatttcctattctaacaaactatactaacctaataaatatcccc

SEQ ID NO: 23871 - DNA, 50 bp, synthetic construct
  source 1..50: mol_type = other DNA
aacacaaaataaccccaacaaaaatacatcaatatccaaccaactacccc

SEQ ID NO: 23872 - DNA, 50 bp, synthetic construct
  source 1..50: mol_type = other DNA
taaacatctctacrtctaacaacttaaatactataaaaaaacaacaaacc

SEQ ID NO: 23873 - DNA, 50 bp, synthetic construct
  source 1..50: mol_type = other DNA
ttcttactctcaaaactttattaaaatataatttacaaaccataaaattc

SEQ ID NO: 23874 - DNA, 50 bp, synthetic construct
  source 1..50: mol_type = other DNA
aataaaaattacacaactctataaatatactaaaaaccaataaattatac

SEQ ID NO: 23875 - DNA, 50 bp, synthetic construct
  source 1..50: mol_type = other DNA
atttacaaaattatacaaccctcaccataatctaattttaaaacattttc

SEQ ID NO: 23876 - DNA, 50 bp, synthetic construct
  source 1..50: mol_type = other DNA
ctcacctcttcttctaaatcatcrttcttcraaaacaaacaataactacc

SEQ ID NO: 23877 - DNA, 50 bp, synthetic construct
  source 1..50: mol_type = other DNA
aaatcttaataataataaatcccctctcctctaatacactctccccaccc

SEQ ID NO: 23878 - DNA, 50 bp, synthetic construct
  source 1..50: mol_type = other DNA
ataacacacaccaataaaaccaaatccccaaacttaaataaaacaccrac

SEQ ID NO: 23879 - DNA, 50 bp, synthetic construct
  source 1..50: mol_type = other DNA
actataacacacaccaataaaaccaaatccccaaacttaaataaaacacc

SEQ ID NO: 23880 - DNA, 50 bp, synthetic construct
  source 1..50: mol_type = other DNA
cactaatatatactacaataaacccaaccctaaaaccccataataccctc

SEQ ID NO: 23881 - DNA, 50 bp, synthetic construct
  source 1..50: mol_type = other DNA
aaacaaaaaaaacaccaataaaaactataaccaaaccccrcatctataac

SEQ ID NO: 23882 - DNA, 50 bp, synthetic construct
  source 1..50: mol_type = other DNA
caccccaaccccaaaaaaaactctcccaatcaaataataaaaacaattac

SEQ ID NO: 23883 - DNA, 50 bp, synthetic construct
  source 1..50: mol_type = other DNA
aatcataattaatacaattcctatacctctccctcaacactaaacttatc

SEQ ID NO: 23884 - DNA, 50 bp, synthetic construct
  source 1..50: mol_type = other DNA
acattcatcataaaccttttactaactaaacatcctttatactaaataac

SEQ ID NO: 23885 - DNA, 50 bp, synthetic construct
  source 1..50: mol_type = other DNA
aaaaacttataataaatattaaacacccaccacctaacaaacactaactc

SEQ ID NO: 23886 - DNA, 50 bp, synthetic construct
  source 1..50: mol_type = other DNA
aatacaaatctctaccrtaacttaactttactcacrtaatatccttaacc

SEQ ID NO: 23887 - DNA, 50 bp, synthetic construct
  source 1..50: mol_type = other DNA
tcttacrcattccttaatacaaatctctaccrtaacttaactttactcac

SEQ ID NO: 23888 - DNA, 50 bp, synthetic construct
  source 1..50: mol_type = other DNA
ctattatcctataaactaatcttacrcattccttaatacaaatctctacc

SEQ ID NO: 23889 - DNA, 50 bp, synthetic construct
  source 1..50: mol_type = other DNA
aaacaaaacactaactaaaaattcaatttactttcaataataaaaaaccc

SEQ ID NO: 23890 - DNA, 50 bp, synthetic construct
  source 1..50: mol_type = other DNA
taaacccaaactaccaaatacctccttaaaaacataaatataacaaaaac

SEQ ID NO: 23891 - DNA, 50 bp, synthetic construct
  source 1..50: mol_type = other DNA
tttaaacccacattcatcratatacaacaacaataaaacaaacctcaatc

SEQ ID NO: 23892 - DNA, 50 bp, synthetic construct
  source 1..50: mol_type = other DNA
aactaatactaaaaaatcractaaaacctatcccactactactatacacc

SEQ ID NO: 23893 - DNA, 50 bp, synthetic construct
  source 1..50: mol_type = other DNA
aataaaaccaccaaaaaactaatataacctaaaaattcccraaaataaac

SEQ ID NO: 23894 - DNA, 50 bp, synthetic construct
  source 1..50: mol_type = other DNA
cccttactactaaaatatatcaaatactaccctatatcctaccctccaac

SEQ ID NO: 23895 - DNA, 50 bp, synthetic construct
  source 1..50: mol_type = other DNA
aactatatcaacaactataaaaactttaaattccctcctctcacataccc

SEQ ID NO: 23896 - DNA, 50 bp, synthetic construct
  source 1..50: mol_type = other DNA
tatcctataccaaaaactccaaccaaattacaacrtataaacacataaac

SEQ ID NO: 23897 - DNA, 50 bp, synthetic construct
  source 1..50: mol_type = other DNA
tacctaataatataaatatcctataccaaaaactccaaccaaattacaac

SEQ ID NO: 23898 - DNA, 50 bp, synthetic construct
  source 1..50: mol_type = other DNA
ctaactaaaacctctaacataaaacacccataccaccaaataactataac

SEQ ID NO: 23899 - DNA, 50 bp, synthetic construct
  source 1..50: mol_type = other DNA
actctaatacttaacaaacttaaattaaaattataactctaaacctaaac

SEQ ID NO: 23900 - DNA, 50 bp, synthetic construct
  source 1..50: mol_type = other DNA
tccaaacctaatccccaatatcaatactaaaattaaccaacaaaactacc

SEQ ID NO: 23901 - DNA, 50 bp, synthetic construct
  source 1..50: mol_type = other DNA
caactctactaattaatctcaacactaacactaaaaactaaacctaaaac

SEQ ID NO: 23902 - DNA, 50 bp, synthetic construct
  source 1..50: mol_type = other DNA
aaccaaccctacaaaaccttcatttcctatctacaaaataaataaaatac

SEQ ID NO: 23903 - DNA, 50 bp, synthetic construct
  source 1..50: mol_type = other DNA
tccacacraacactaaacacaacrcaatatacaaaaaataaaacctctac

SEQ ID NO: 23904 - DNA, 50 bp, synthetic construct
  source 1..50: mol_type = other DNA
caatattaatcattcctacaatcattactctcccccaacctattatatcc

SEQ ID NO: 23905 - DNA, 50 bp, synthetic construct
  source 1..50: mol_type = other DNA
aattcataaaaaactaactcctcccaaaacctatctaaaaactcaaaaac

SEQ ID NO: 23906 - DNA, 50 bp, synthetic construct
  source 1..50: mol_type = other DNA
acaatcaatcctataaattttaaactaaaatttcattttaacctctaatc

SEQ ID NO: 23907 - DNA, 50 bp, synthetic construct
  source 1..50: mol_type = other DNA
catataactttatctaatataaatcttctacctttaatcatttctaaacc

SEQ ID NO: 23908 - DNA, 50 bp, synthetic construct
  source 1..50: mol_type = other DNA
ctattaaaaccataatatctctacaaaatccttaccctacccaaatactc

SEQ ID NO: 23909 - DNA, 50 bp, synthetic construct
  source 1..50: mol_type = other DNA
attaacataaataaactcataaacatttattaatattcccaaattacaac

SEQ ID NO: 23910 - DNA, 50 bp, synthetic construct
  source 1..50: mol_type = other DNA
taatatctcctaaaccaaaataaatatcattaactaaaaattcccaattc

SEQ ID NO: 23911 - DNA, 50 bp, synthetic construct
  source 1..50: mol_type = other DNA
attaaccaaaattaaacaacactaaaattccacatcctcraactaacacc

SEQ ID NO: 23912 - DNA, 50 bp, synthetic construct
  source 1..50: mol_type = other DNA
aaataaaatcttactatattacccaaaaccttaaactcctaaactccaac

SEQ ID NO: 23913 - DNA, 50 bp, synthetic construct
  source 1..50: mol_type = other DNA
accattttataaactactaaccaatactcctctctacaaacaaaaaattc

SEQ ID NO: 23914 - DNA, 50 bp, synthetic construct
  source 1..50: mol_type = other DNA
ctaaaacatcccaaacactacttaaccaaactaattcaaataaaataatc

SEQ ID NO: 23915 - DNA, 50 bp, synthetic construct
  source 1..50: mol_type = other DNA
aatcctcttattccaccttccaaaacccaaaatacctatttaaaaaaaac

SEQ ID NO: 23916 - DNA, 50 bp, synthetic construct
  source 1..50: mol_type = other DNA
cctcttattccaccttccaaaacccaaaatacctatttaaaaaaaacrcc

SEQ ID NO: 23917 - DNA, 50 bp, synthetic construct
  source 1..50: mol_type = other DNA
aacttaccaaaaacacrcaaatccatttcccttatacctcaaatccatcc

SEQ ID NO: 23918 - DNA, 50 bp, synthetic construct
  source 1..50: mol_type = other DNA
tcaataaactccattccattataaccratatccttaacttcraaaatacc

SEQ ID NO: 23919 - DNA, 50 bp, synthetic construct
  source 1..50: mol_type = other DNA
acactcccraaattaaaaacaccraccacaataaaataaaatctattaac

SEQ ID NO: 23920 - DNA, 50 bp, synthetic construct
  source 1..50: mol_type = other DNA
atctattaacrtttccttctccctttaaacactaaacattttcttaattc

SEQ ID NO: 23921 - DNA, 50 bp, synthetic construct
  source 1..50: mol_type = other DNA
crtttccttctccctttaaacactaaacattttcttaattcrtaaaatac

SEQ ID NO: 23922 - DNA, 50 bp, synthetic construct
  source 1..50: mol_type = other DNA
cctttaaacactaaacattttcttaattcrtaaaatacraactaacaacc

SEQ ID NO: 23923 - DNA, 50 bp, synthetic construct
  source 1..50: mol_type = other DNA
taaacactaaacattttcttaattcrtaaaatacraactaacaaccrccc

SEQ ID NO: 23924 - DNA, 50 bp, synthetic construct
  source 1..50: mol_type = other DNA
tccctcctaaaccraaattataataaaaactaaaaactcaatattatccc

SEQ ID NO: 23925 - DNA, 50 bp, synthetic construct
  source 1..50: mol_type = other DNA
ccctaaaaatccraaataacratactaataacaaaaaacraacaccctac

SEQ ID NO: 23926 - DNA, 50 bp, synthetic construct
  source 1..50: mol_type = other DNA
cccaaactaaaccctaaaaatccraaataacratactaataacaaaaaac

SEQ ID NO: 23927 - DNA, 50 bp, synthetic construct
  source 1..50: mol_type = other DNA
tcrataaataaaaactaaacccaaactaaaccctaaaaatccraaataac

SEQ ID NO: 23928 - DNA, 50 bp, synthetic construct
  source 1..50: mol_type = other DNA
acraaaatactacraaaaactaaacaaacctaacaatcccaaaaaacccc

SEQ ID NO: 23929 - DNA, 50 bp, synthetic construct
  source 1..50: mol_type = other DNA
actactactactactactactactactactactactactaaaacttcaac

SEQ ID NO: 23930 - DNA, 50 bp, synthetic construct
  source 1..50: mol_type = other DNA
tactactactaaaacttcaacracataataaaaaacccatacaccractc

SEQ ID NO: 23931 - DNA, 50 bp, synthetic construct
  source 1..50: mol_type = other DNA
aaaacctaatttacccccacctaatacaacccaaaaaataaactaactac

SEQ ID NO: 23932 - DNA, 50 bp, synthetic construct
  source 1..50: mol_type = other DNA
rtataaaacacctaaaaccctaccaaattcaaaaaacacaacatcctacc

SEQ ID NO: 23933 - DNA, 50 bp, synthetic construct
  source 1..50: mol_type = other DNA
acattattttaaaatcractctatctctaccraaaaaaatcccattatcc

SEQ ID NO: 23934 - DNA, 50 bp, synthetic construct
  source 1..50: mol_type = other DNA
aaactaataaaactacraataataaaatctccctcrataaaaacaaaacc

SEQ ID NO: 23935 - DNA, 50 bp, synthetic construct
  source 1..50: mol_type = other DNA
ataataaaatctccctcrataaaaacaaaaccracctcaaaacaatatac

SEQ ID NO: 23936 - DNA, 50 bp, synthetic construct
  source 1..50: mol_type = other DNA
taattaactctttaaaaaatttccttttcaccttctaacataacattctc

SEQ ID NO: 23937 - DNA, 50 bp, synthetic construct
  source 1..50: mol_type = other DNA
actttttaaaaaattaaccaaaaaaacaaccctctcctataaaccataac

SEQ ID NO: 23938 - DNA, 50 bp, synthetic construct
  source 1..50: mol_type = other DNA
aaattaaccaaaaaaacaaccctctcctataaaccataacraaactaacc

SEQ ID NO: 23939 - DNA, 50 bp, synthetic construct
  source 1..50: mol_type = other DNA
tttaactaaaataatactacractcactcctatccttttcttctcactac

SEQ ID NO: 23940 - DNA, 50 bp, synthetic construct
  source 1..50: mol_type = other DNA
aacaaaaataaaccrtaacattactctaaccaaacaaaaccaaaaatctc

SEQ ID NO: 23941 - DNA, 50 bp, synthetic construct
  source 1..50: mol_type = other DNA
ccccrtactataacctaaaatctttcctaaaaatccatacraaatctctc

SEQ ID NO: 23942 - DNA, 50 bp, synthetic construct
  source 1..50: mol_type = other DNA
aaaatctcrccaacraaaaaatacaaaattaacaacaaccraaaaatccc

SEQ ID NO: 23943 - DNA, 50 bp, synthetic construct
  source 1..50: mol_type = other DNA
aaaaacacrcctaaaccraaaactaataccaaaattatcctaactaaaac

SEQ ID NO: 23944 - DNA, 50 bp, synthetic construct
  source 1..50: mol_type = other DNA
atacraaaacctctcccccaacacattcracttcaattatataaaaacac

SEQ ID NO: 23945 - DNA, 50 bp, synthetic construct
  source 1..50: mol_type = other DNA
aaacaaaaccaactacaaaacactaaaaattccacaaccaaaaaaaatac

SEQ ID NO: 23946 - DNA, 50 bp, synthetic construct
  source 1..50: mol_type = other DNA
aaaatcctcaataccctacaattaaccctatttaaaatcaaaaccaattc

SEQ ID NO: 23947 - DNA, 50 bp, synthetic construct
  source 1..50: mol_type = other DNA
ccctacaattaaccctatttaaaatcaaaaccaattcrtattaattttcc

SEQ ID NO: 23948 - DNA, 50 bp, synthetic construct
  source 1..50: mol_type = other DNA
aaattaaaatcctcttttcaaaatacctacctcaaaaaaacaacttcrtc

SEQ ID NO: 23949 - DNA, 50 bp, synthetic construct
  source 1..50: mol_type = other DNA
aaaaaattaaaatcctcttttcaaaatacctacctcaaaaaaacaacttc

SEQ ID NO: 23950 - DNA, 50 bp, synthetic construct
  source 1..50: mol_type = other DNA
atcctaaaattaaaatttcaacaaaaccccctttaaaacaatcatataac

SEQ ID NO: 23951 - DNA, 50 bp, synthetic construct
  source 1..50: mol_type = other DNA
ctacatattcaaattacaactaaaaaaaacttaaacaaattttcaattac

SEQ ID NO: 23952 - DNA, 50 bp, synthetic construct
  source 1..50: mol_type = other DNA
aacaaaatacacaattaactaatcaaaaacctcactctacattttcacac

SEQ ID NO: 23953 - DNA, 50 bp, synthetic construct
  source 1..50: mol_type = other DNA
ataacaactccactatttatttttaataacttcrtacatcattataaacc

SEQ ID NO: 23954 - DNA, 50 bp, synthetic construct
  source 1..50: mol_type = other DNA
taaaaacaaccattaaacctcctccttaattacrattcataataatatac

SEQ ID NO: 23955 - DNA, 50 bp, synthetic construct
  source 1..50: mol_type = other DNA
aaaaaataacttaacatcttaaacctaccccaaaactaaatatcaaatac

SEQ ID NO: 23956 - DNA, 50 bp, synthetic construct
  source 1..50: mol_type = other DNA
acttacttccctataaacttcrtaaaaacaaaaactaaatccccaacaac

SEQ ID NO: 23957 - DNA, 50 bp, synthetic construct
  source 1..50: mol_type = other DNA
tcraaataatcraataatatatttatctcacttacttccctataaacttc

SEQ ID NO: 23958 - DNA, 50 bp, synthetic construct
  source 1..50: mol_type = other DNA
ttcraaacaaaacttccctaaaataacaaacraaaaaacctctcaaaaac

SEQ ID NO: 23959 - DNA, 50 bp, synthetic construct
  source 1..50: mol_type = other DNA
cctataaatatatcactaattattatccrattaaaactcrcraaacactc

SEQ ID NO: 23960 - DNA, 50 bp, synthetic construct
  source 1..50: mol_type = other DNA
aaaaacaaaattctacataacaaataactcraacaattcraaaacctcrc

SEQ ID NO: 23961 - DNA, 50 bp, synthetic construct
  source 1..50: mol_type = other DNA
aaaaaaacaaaattctacataacaaataactcraacaattcraaaacctc

SEQ ID NO: 23962 - DNA, 50 bp, synthetic construct
  source 1..50: mol_type = other DNA
acaaaacaactactaacctttaaaaatttacatctcaaataaaaaataac

SEQ ID NO: 23963 - DNA, 50 bp, synthetic construct
  source 1..50: mol_type = other DNA
aatttacatctcaaataaaaaataacrattaataccccaaaaacctaaac

SEQ ID NO: 23964 - DNA, 50 bp, synthetic construct
  source 1..50: mol_type = other DNA
accaacacttcraaaaaccaaataatatctaaataccaaaacctatactc

SEQ ID NO: 23965 - DNA, 50 bp, synthetic construct
  source 1..50: mol_type = other DNA
taaaaatatctctttacaacctctataaaattattataaaataatctaac

SEQ ID NO: 23966 - DNA, 50 bp, synthetic construct
  source 1..50: mol_type = other DNA
aacaacaaaaatcactaaaacctattctttcratatcactcccaactacc

SEQ ID NO: 23967 - DNA, 50 bp, synthetic construct
  source 1..50: mol_type = other DNA
atttacraccratctcttcacctaaaacatcaaccraaaaaatcaaaatc

SEQ ID NO: 23968 - DNA, 50 bp, synthetic construct
  source 1..50: mol_type = other DNA
ccttaattaaacccccaatatatacctttaaccccaatataaacaaaccc

SEQ ID NO: 23969 - DNA, 50 bp, synthetic construct
  source 1..50: mol_type = other DNA
caaaaaacctcraactactaattaaaaacaaacacracctaaataacrac

SEQ ID NO: 23970 - DNA, 50 bp, synthetic construct
  source 1..50: mol_type = other DNA
ttacaaaaaacctcraactactaattaaaaacaaacacracctaaataac

SEQ ID NO: 23971 - DNA, 50 bp, synthetic construct
  source 1..50: mol_type = other DNA
aaactcacctaattacaaaaaacctcraactactaattaaaaacaaacac

SEQ ID NO: 23972 - DNA, 50 bp, synthetic construct
  source 1..50: mol_type = other DNA
aaaaaacraaaccccraaaattaaccctaaaaaacaaaccraaactaaac

SEQ ID NO: 23973 - DNA, 50 bp, synthetic construct
  source 1..50: mol_type = other DNA
cactttaaactatttaccaaacaaacrcratttcaacttattctacttac

SEQ ID NO: 23974 - DNA, 50 bp, synthetic construct
  source 1..50: mol_type = other DNA
tcaaaaataaaaatttcaattccactttaaactatttaccaaacaaacrc

SEQ ID NO: 23975 - DNA, 50 bp, synthetic construct
  source 1..50: mol_type = other DNA
cttcaaaaataaaaatttcaattccactttaaactatttaccaaacaaac

SEQ ID NO: 23976 - DNA, 50 bp, synthetic construct
  source 1..50: mol_type = other DNA
atcttaattcraaaatatcccraacaaacctaaaaaaataactacccctc

SEQ ID NO: 23977 - DNA, 50 bp, synthetic construct
  source 1..50: mol_type = other DNA
accattacttatattacaaaattccaaaaaataaaattcaaaacaaacac

SEQ ID NO: 23978 - DNA, 50 bp, synthetic construct
  source 1..50: mol_type = other DNA
ctttactccctaaaatcttataatacaaacaataacatctactttccatc

SEQ ID NO: 23979 - DNA, 50 bp, synthetic construct
  source 1..50: mol_type = other DNA
taacaaataaaaaaacacataccrttaaaatcatcccaaactacaaaacc

SEQ ID NO: 23980 - DNA, 50 bp, synthetic construct
  source 1..50: mol_type = other DNA
acaaataaaaaaacacataccrttaaaatcatcccaaactacaaaaccrc

SEQ ID NO: 23981 - DNA, 50 bp, synthetic construct
  source 1..50: mol_type = other DNA
ccaaaccaaactctaaaccaaatactttataacctcctaaccaaaaaccc

SEQ ID NO: 23982 - DNA, 50 bp, synthetic construct
  source 1..50: mol_type = other DNA
aactttaacaaaaactcaatataaaaacaattcctacccaaccccccacc

SEQ ID NO: 23983 - DNA, 50 bp, synthetic construct
  source 1..50: mol_type = other DNA
cactaataaaataaacctaaatctactataaaacrctaaaaacctcctcc

SEQ ID NO: 23984 - DNA, 50 bp, synthetic construct
  source 1..50: mol_type = other DNA
cccatcctcccttctccactaataaaataaacctaaatctactataaaac

SEQ ID NO: 23985 - DNA, 50 bp, synthetic construct
  source 1..50: mol_type = other DNA
ataaaaacaaaactctcaaataataaaccacctaatctccctaaatattc

SEQ ID NO: 23986 - DNA, 50 bp, synthetic construct
  source 1..50: mol_type = other DNA
acaaaactactactactattatatattctatacaatcctacrcccttaac

SEQ ID NO: 23987 - DNA, 50 bp, synthetic construct
  source 1..50: mol_type = other DNA
taaaacctcaacctttatctccactctacraaaattcacrcctaaaaaac

SEQ ID NO: 23988 - DNA, 50 bp, synthetic construct
  source 1..50: mol_type = other DNA
aatctccctactttttaaaactaaaaccraaaaaaacrccacaaaacaac

SEQ ID NO: 23989 - DNA, 50 bp, synthetic construct
  source 1..50: mol_type = other DNA
tcrataaaacctctcactacaaaatctccctactttttaaaactaaaacc

SEQ ID NO: 23990 - DNA, 50 bp, synthetic construct
  source 1..50: mol_type = other DNA
ttcrccrtacaaaacctatcctttaaaaaataaattatcctcacttttcc

SEQ ID NO: 23991 - DNA, 50 bp, synthetic construct
  source 1..50: mol_type = other DNA
aaaactaaaatccaaactacaataaactatatttacatcactacactcac

SEQ ID NO: 23992 - DNA, 50 bp, synthetic construct
  source 1..50: mol_type = other DNA
tcaccatcttaaccaaactaatctccaactcctaaccttataatccacac

SEQ ID NO: 23993 - DNA, 50 bp, synthetic construct
  source 1..50: mol_type = other DNA
atcacaaaatcaaaaattaaaaaccaacctaaccaaaataataaaacccc

SEQ ID NO: 23994 - DNA, 50 bp, synthetic construct
  source 1..50: mol_type = other DNA
accaaaaaattttctaaaaataacatttaaaaatttctaaaaccaaacac

SEQ ID NO: 23995 - DNA, 50 bp, synthetic construct
  source 1..50: mol_type = other DNA
taaatattatcctttttaatcaaacaaaaacatccattaatcattacacc

SEQ ID NO: 23996 - DNA, 50 bp, synthetic construct
  source 1..50: mol_type = other DNA
actataaccacaaaaatttctaaccaaaaaataaacaccccaaaaacccc

SEQ ID NO: 23997 - DNA, 50 bp, synthetic construct
  source 1..50: mol_type = other DNA
ataacactcaataaaattcatctttatcttattcacccttcattatccac

SEQ ID NO: 23998 - DNA, 50 bp, synthetic construct
  source 1..50: mol_type = other DNA
ttttaaccaaacttaacratcaatataacaaacaaaaccctcttaaaccc

SEQ ID NO: 23999 - DNA, 50 bp, synthetic construct
  source 1..50: mol_type = other DNA
cctacttaccacactaaccrccaaacctaaccaaaaaactcaaaaaaacc

SEQ ID NO: 24000 - DNA, 50 bp, synthetic construct
  source 1..50: mol_type = other DNA
cctcratcaatctattaatcaaattcaaccrttattctcaatcaaactcc

SEQ ID NO: 24001 - DNA, 50 bp, synthetic construct
  source 1..50: mol_type = other DNA
taacraaacctaactaaaaataacractaaacttaactaataaactaacc

SEQ ID NO: 24002 - DNA, 50 bp, synthetic construct
  source 1..50: mol_type = other DNA
taccatcrtttcttcctacctttaaaccrtcaaacaattaattaaaaccc

SEQ ID NO: 24003 - DNA, 50 bp, synthetic construct
  source 1..50: mol_type = other DNA
aactaataaactaaccraaaattaaaacraatcccaaccaactacctaac

SEQ ID NO: 24004 - DNA, 50 bp, synthetic construct
  source 1..50: mol_type = other DNA
craaaactaacraaaaataatctataacaacratcccaaaacttcccrac

SEQ ID NO: 24005 - DNA, 50 bp, synthetic construct
  source 1..50: mol_type = other DNA
cracrtcctacaaacctaataaactctaaacraaaaatattataaccacc

SEQ ID NO: 24006 - DNA, 50 bp, synthetic construct
  source 1..50: mol_type = other DNA
cttacttttacaacatttatacttacatccacccttacaaaaatacaacc

SEQ ID NO: 24007 - DNA, 50 bp, synthetic construct
  source 1..50: mol_type = other DNA
attaaaaacccctactttacaaaataactaaactaaaacttattcttcac

SEQ ID NO: 24008 - DNA, 50 bp, synthetic construct
  source 1..50: mol_type = other DNA
actaatataacaaaaaacraaactcaaactataatactaactcrcctacc

SEQ ID NO: 24009 - DNA, 50 bp, synthetic construct
  source 1..50: mol_type = other DNA
taccrcaactaatataacaaaaaacraaactcaaactataatactaactc

SEQ ID NO: 24010 - DNA, 50 bp, synthetic construct
  source 1..50: mol_type = other DNA
aaaaaacacacaacctaaatccctcacatacrtaattcacaataaaaatc

SEQ ID NO: 24011 - DNA, 50 bp, synthetic construct
  source 1..50: mol_type = other DNA
atccaaattatatacttcttatcaaaatctaatacctaataatctaaaac

SEQ ID NO: 24012 - DNA, 50 bp, synthetic construct
  source 1..50: mol_type = other DNA
taataccaaaacattttcatcatcccaaaaaaaaaccctatactcattac

SEQ ID NO: 24013 - DNA, 50 bp, synthetic construct
  source 1..50: mol_type = other DNA
aaaaaccatttaaatcataatcatcaatacctaatccatattatacttac

SEQ ID NO: 24014 - DNA, 50 bp, synthetic construct
  source 1..50: mol_type = other DNA
attataacttccttaaacaacaataataacaatataaaaattaaccaaac

SEQ ID NO: 24015 - DNA, 50 bp, synthetic construct
  source 1..50: mol_type = other DNA
aatttcaccatactaaccaaactaatctcratctcttaacctcataatcc

SEQ ID NO: 24016 - DNA, 50 bp, synthetic construct
  source 1..50: mol_type = other DNA
ctccccatccccataatttcccttattattaacaacttaaattcatatac

SEQ ID NO: 24017 - DNA, 50 bp, synthetic construct
  source 1..50: mol_type = other DNA
atttccaaacaaaaaaacataaacaaataaatacattatatcaaaacctc

SEQ ID NO: 24018 - DNA, 50 bp, synthetic construct
  source 1..50: mol_type = other DNA
ccctctaaaaatatacactaaaaaacaaaaacataaaaatatacaacccc

SEQ ID NO: 24019 - DNA, 50 bp, synthetic construct
  source 1..50: mol_type = other DNA
aacaaaactacttaaactcaaaaattttaaactaaactaaacaacataac

SEQ ID NO: 24020 - DNA, 50 bp, synthetic construct
  source 1..50: mol_type = other DNA
ctaaacaacataacraaacccattctctacaatatatacaaaaattaacc

SEQ ID NO: 24021 - DNA, 50 bp, synthetic construct
  source 1..50: mol_type = other DNA
tccaaactaaaatacaattacacaatcacaatacactacaaccaacctcc

SEQ ID NO: 24022 - DNA, 50 bp, synthetic construct
  source 1..50: mol_type = other DNA
ttataaaataaaaaccraactaactataaccaaaaacaaaattaaccacc

SEQ ID NO: 24023 - DNA, 50 bp, synthetic construct
  source 1..50: mol_type = other DNA
acctcatataaatattactaaattaaaaacttctctccaaaataaaaatc

SEQ ID NO: 24024 - DNA, 50 bp, synthetic construct
  source 1..50: mol_type = other DNA
ttaaaaaaaaacctccaatttaataacatccacataaaatctataaatac

SEQ ID NO: 24025 - DNA, 50 bp, synthetic construct
  source 1..50: mol_type = other DNA
rcratctaaacaacaactaatcracaaaactaacctacttaacaaacccc

SEQ ID NO: 24026 - DNA, 50 bp, synthetic construct
  source 1..50: mol_type = other DNA
ccttcctcaaccttaaaataataataacrcratctaaacaacaactaatc

SEQ ID NO: 24027 - DNA, 50 bp, synthetic construct
  source 1..50: mol_type = other DNA
aaaccaactaaacttaactataattaatcrcaaaaaaaccaaaaactccc

SEQ ID NO: 24028 - DNA, 50 bp, synthetic construct
  source 1..50: mol_type = other DNA
caacaacctaacrctcaatttaatccaaaaacaaataataaaaaactctc

SEQ ID NO: 24029 - DNA, 50 bp, synthetic construct
  source 1..50: mol_type = other DNA
taataatttccaaaccttctccctataactaattacaaaaataaaaactc

SEQ ID NO: 24030 - DNA, 50 bp, synthetic construct
  source 1..50: mol_type = other DNA
tatacaacaaaaataaacttttaacttcctcaaaaatcatcttattaccc

SEQ ID NO: 24031 - DNA, 50 bp, synthetic construct
  source 1..50: mol_type = other DNA
aaaaaattaaccttaaacaaacattcaaatttctaacaaaccractaaac

SEQ ID NO: 24032 - DNA, 50 bp, synthetic construct
  source 1..50: mol_type = other DNA
attaaccttaaacaaacattcaaatttctaacaaaccractaaacrcaac

SEQ ID NO: 24033 - DNA, 50 bp, synthetic construct
  source 1..50: mol_type = other DNA
acaaaaaaataaccaaacataataataaacacctacaatcccaactactc

SEQ ID NO: 24034 - DNA, 50 bp, synthetic construct
  source 1..50: mol_type = other DNA
tcttcctctaacctaatctaaatcctttctactaccactataatcacccc

SEQ ID NO: 24035 - DNA, 50 bp, synthetic construct
  source 1..50: mol_type = other DNA
tcccactataaactataaatttaaaaaaacttctaaatcactcaaacaac

SEQ ID NO: 24036 - DNA, 50 bp, synthetic construct
  source 1..50: mol_type = other DNA
taaaactctcctacactactattaaaaacrtttaattatacaatcacttc

SEQ ID NO: 24037 - DNA, 50 bp, synthetic construct
  source 1..50: mol_type = other DNA
acctctaattccaaatatacaaaaaccaaaacttccaaaaacacrccccc

SEQ ID NO: 24038 - DNA, 50 bp, synthetic construct
  source 1..50: mol_type = other DNA
aacaactctaaaaaccrttattcaatacraaatctaacaaaaaaaactcc

SEQ ID NO: 24039 - DNA, 50 bp, synthetic construct
  source 1..50: mol_type = other DNA
raaatctaacaaaaaaaactccrtatctacaactaatatatcaactcaac

SEQ ID NO: 24040 - DNA, 50 bp, synthetic construct
  source 1..50: mol_type = other DNA
aaaaaactccrtatctacaactaatatatcaactcaacrtttctcctctc

SEQ ID NO: 24041 - DNA, 50 bp, synthetic construct
  source 1..50: mol_type = other DNA
actaatatatcaactcaacrtttctcctctcrtccctaataaaatataac

SEQ ID NO: 24042 - DNA, 50 bp, synthetic construct
  source 1..50: mol_type = other DNA
tttaaaaactacraaaacraaaaaccacctaaattttccacaacaccaac

SEQ ID NO: 24043 - DNA, 50 bp, synthetic construct
  source 1..50: mol_type = other DNA
cractacaatcctaaaaaataaaaatcttaatccccactttaaaaactac

SEQ ID NO: 24044 - DNA, 50 bp, synthetic construct
  source 1..50: mol_type = other DNA
ctcaaataataacaattaccaaacrcttaccraaaaaatcttttaatccc

SEQ ID NO: 24045 - DNA, 50 bp, synthetic construct
  source 1..50: mol_type = other DNA
ataaaaaaataaacracttctcaaataataacaattaccaaacrcttacc

SEQ ID NO: 24046 - DNA, 50 bp, synthetic construct
  source 1..50: mol_type = other DNA
ctttcacctcttaaaattataatcraaattaaaaaattttcccrataaac

SEQ ID NO: 24047 - DNA, 50 bp, synthetic construct
  source 1..50: mol_type = other DNA
aacaactactattatttaaaaaaccrcttacttcttcactccccatcacc

SEQ ID NO: 24048 - DNA, 50 bp, synthetic construct
  source 1..50: mol_type = other DNA
aaacrattaaaaactaccttaaaatatctaaacccracaaaaaaaactcc

SEQ ID NO: 24049 - DNA, 50 bp, synthetic construct
  source 1..50: mol_type = other DNA
crattaaaaactaccttaaaatatctaaacccracaaaaaaaactccrcc

SEQ ID NO: 24050 - DNA, 50 bp, synthetic construct
  source 1..50: mol_type = other DNA
aaaaaacctattaaaaatcaactaaatctctctaatccrcaaaaaaaacc

SEQ ID NO: 24051 - DNA, 50 bp, synthetic construct
  source 1..50: mol_type = other DNA
cttcaaacttataaaaaacctattaaaaatcaactaaatctctctaatcc

SEQ ID NO: 24052 - DNA, 50 bp, synthetic construct
  source 1..50: mol_type = other DNA
ccaacaaactccttataaacttaaaaacttttctatacctcaactcttcc

SEQ ID NO: 24053 - DNA, 50 bp, synthetic construct
  source 1..50: mol_type = other DNA
ctccttataaacttaaaaacttttctatacctcaactcttccrtacattc

SEQ ID NO: 24054 - DNA, 50 bp, synthetic construct
  source 1..50: mol_type = other DNA
ttataaacttaaaaacttttctatacctcaactcttccrtacattcrccc

SEQ ID NO: 24055 - DNA, 50 bp, synthetic construct
  source 1..50: mol_type = other DNA
aaaataacataattcaaaacacccattctaaactaaacrcaacaactcac

SEQ ID NO: 24056 - DNA, 50 bp, synthetic construct
  source 1..50: mol_type = other DNA
actttaaactaaaaaataacataattcaaaacacccattctaaactaaac

SEQ ID NO: 24057 - DNA, 50 bp, synthetic construct
  source 1..50: mol_type = other DNA
tcattccctaatttaaaacccttcaataatttaccattaaacttaaaatc

SEQ ID NO: 24058 - DNA, 50 bp, synthetic construct
  source 1..50: mol_type = other DNA
tcattacttttaaaccttttacccttcccactacctaaataaatttcccc

SEQ ID NO: 24059 - DNA, 50 bp, synthetic construct
  source 1..50: mol_type = other DNA
actacctaaataaatttccccrcattcccatcctctatctttatcttttc

SEQ ID NO: 24060 - DNA, 50 bp, synthetic construct
  source 1..50: mol_type = other DNA
tttatcttttcrtaattaactcttatacttcaattcttaatttaaatatc

SEQ ID NO: 24061 - DNA, 50 bp, synthetic construct
  source 1..50: mol_type = other DNA
attcttccctaaccactcttatctacctaaaataaatttacctctattcc

SEQ ID NO: 24062 - DNA, 50 bp, synthetic construct
  source 1..50: mol_type = other DNA
attcttaaaaaaaccccaacaaaaaccaactaattattaactttacaacc

SEQ ID NO: 24063 - DNA, 50 bp, synthetic construct
  source 1..50: mol_type = other DNA
tttaactcattaataaaatatttaaaccaaataacatttttatcatcatc

SEQ ID NO: 24064 - DNA, 50 bp, synthetic construct
  source 1..50: mol_type = other DNA
tctaatttactaacccttccttaaaacttttaacaattttatctaaatac

SEQ ID NO: 24065 - DNA, 50 bp, synthetic construct
  source 1..50: mol_type = other DNA
tacraaattatatactcatttatctcacttaaaacatcttcattttctcc

SEQ ID NO: 24066 - DNA, 50 bp, synthetic construct
  source 1..50: mol_type = other DNA
cctcctacaaataataaaactactaaataaaactaccttccctaaaaatc

SEQ ID NO: 24067 - DNA, 50 bp, synthetic construct
  source 1..50: mol_type = other DNA
tccaccacctacaaaaaaacraatatcraaataatatcaaactcatcttc

SEQ ID NO: 24068 - DNA, 50 bp, synthetic construct
  source 1..50: mol_type = other DNA
tcctaatattacattccctacccctaaaattcccactaactataaccttc

SEQ ID NO: 24069 - DNA, 50 bp, synthetic construct
  source 1..50: mol_type = other DNA
ctaaaacatcaaatataatacacaaccattataaaacaaaataataaacc

SEQ ID NO: 24070 - DNA, 50 bp, synthetic construct
  source 1..50: mol_type = other DNA
ctctcttcctctaaatattcccctaaacrtatacttaactttctccacac

SEQ ID NO: 24071 - DNA, 50 bp, synthetic construct
  source 1..50: mol_type = other DNA
accctatctctacaaaaaaacacaaaaattaactaaatataatcatacac

SEQ ID NO: 24072 - DNA, 50 bp, synthetic construct
  source 1..50: mol_type = other DNA
ccttcaaaataattttacaatccatacacccacttcaccccttaaaaaac

SEQ ID NO: 24073 - DNA, 50 bp, synthetic construct
  source 1..50: mol_type = other DNA
aaatacacacccaataaaaattaaatcatttcttaactctatctacattc

SEQ ID NO: 24074 - DNA, 50 bp, synthetic construct
  source 1..50: mol_type = other DNA
aaaaacaaaaaataatctctatactctacccaaaataaaaacrcraaccc

SEQ ID NO: 24075 - DNA, 50 bp, synthetic construct
  source 1..50: mol_type = other DNA
atatacaacrcctattctacrccaaccttttacttacatctcatttaaac

SEQ ID NO: 24076 - DNA, 50 bp, synthetic construct
  source 1..50: mol_type = other DNA
taatcatctactatataattctaccaaatacttataaacaaatatacaac

SEQ ID NO: 24077 - DNA, 50 bp, synthetic construct
  source 1..50: mol_type = other DNA
cataacaaatcraaaatacctaccaattcctctaacaaaaacaaaattac

SEQ ID NO: 24078 - DNA, 50 bp, synthetic construct
  source 1..50: mol_type = other DNA
ttaaaattaccctttttcaccttaccaccaacatcaaccttcttaacttc

SEQ ID NO: 24079 - DNA, 50 bp, synthetic construct
  source 1..50: mol_type = other DNA
taacttcraatttcttctctttaatatctaacttctcaactttttcaccc

SEQ ID NO: 24080 - DNA, 50 bp, synthetic construct
  source 1..50: mol_type = other DNA
tattcctaatcctaaattccaaaaaataacactaaacctatcrcaaccac

SEQ ID NO: 24081 - DNA, 50 bp, synthetic construct
  source 1..50: mol_type = other DNA
racaaactcaatatcatcctctaaaacccaaaaccaaaaacacaatacac

SEQ ID NO: 24082 - DNA, 50 bp, synthetic construct
  source 1..50: mol_type = other DNA
caaactcaatatcatcctctaaaacccaaaaccaaaaacacaatacacrc

SEQ ID NO: 24083 - DNA, 50 bp, synthetic construct
  source 1..50: mol_type = other DNA
aactaactaaaaaaccttccaaacrcttcatttttattatttaaatttac

SEQ ID NO: 24084 - DNA, 50 bp, synthetic construct
  source 1..50: mol_type = other DNA
aacaaaaataaaacrtctaaaaaacctctcaattaaccttaaacatatcc

SEQ ID NO: 24085 - DNA, 50 bp, synthetic construct
  source 1..50: mol_type = other DNA
cttaaacatatccracccctataaatatcractaaataccctccaaattc

SEQ ID NO: 24086 - DNA, 50 bp, synthetic construct
  source 1..50: mol_type = other DNA
aaaatcrcraacctatctacaaaacttaaattcaaaactcccaatccttc

SEQ ID NO: 24087 - DNA, 50 bp, synthetic construct
  source 1..50: mol_type = other DNA
craaaaccraaaccttaattctctttcccatcttacaaaataaaaatcrc

SEQ ID NO: 24088 - DNA, 50 bp, synthetic construct
  source 1..50: mol_type = other DNA
accraaaaccraaaccttaattctctttcccatcttacaaaataaaaatc

SEQ ID NO: 24089 - DNA, 50 bp, synthetic construct
  source 1..50: mol_type = other DNA
taaaatcttacttttttacccaaactaacctcraactccttaacttaaac

SEQ ID NO: 24090 - DNA, 50 bp, synthetic construct
  source 1..50: mol_type = other DNA
actcattaactataaaaccttaaaaaaattacctactatctccraacctc

SEQ ID NO: 24091 - DNA, 50 bp, synthetic construct
  source 1..50: mol_type = other DNA
aaaacaataaataatttccccaaaattccacaactaataaataaaacrac

SEQ ID NO: 24092 - DNA, 50 bp, synthetic construct
  source 1..50: mol_type = other DNA
aatttccccaaaattccacaactaataaataaaacracratttataaaac

SEQ ID NO: 24093 - DNA, 50 bp, synthetic construct
  source 1..50: mol_type = other DNA
aaacaactacacaatctccraaatccccaaacctaaaaaaaaatctatac

SEQ ID NO: 24094 - DNA, 50 bp, synthetic construct
  source 1..50: mol_type = other DNA
cataaaacaataaatcaaaaatacracrctaaacctaaccrctaacaccc

SEQ ID NO: 24095 - DNA, 50 bp, synthetic construct
  source 1..50: mol_type = other DNA
ataataattccraaataaccctactcacttaaaaaaactccttaaaacac

SEQ ID NO: 24096 - DNA, 50 bp, synthetic construct
  source 1..50: mol_type = other DNA
raaaataacacaataaaccaaaacractaaaccactaaaaacccracccc

SEQ ID NO: 24097 - DNA, 50 bp, synthetic construct
  source 1..50: mol_type = other DNA
atacacraaaataacacaataaaccaaaacractaaaccactaaaaaccc

SEQ ID NO: 24098 - DNA, 50 bp, synthetic construct
  source 1..50: mol_type = other DNA
atcctacrtaaaatccccaaatacacraaaataacacaataaaccaaaac

SEQ ID NO: 24099 - DNA, 50 bp, synthetic construct
  source 1..50: mol_type = other DNA
tctaatcrttctaactcactataccactttcrtacatttaaaaacttcac

SEQ ID NO: 24100 - DNA, 50 bp, synthetic construct
  source 1..50: mol_type = other DNA
aaaccttaccaacatcactttttacctctttcttccttaaaaacattaac

SEQ ID NO: 24101 - DNA, 50 bp, synthetic construct
  source 1..50: mol_type = other DNA
ccaaccaaatctctaaacaaattcattaaaaactatctcttaccaaacac

SEQ ID NO: 24102 - DNA, 50 bp, synthetic construct
  source 1..50: mol_type = other DNA
taaactcacctttaccaccttaaacacacacacaaaataaaaactacctc

SEQ ID NO: 24103 - DNA, 50 bp, synthetic construct
  source 1..50: mol_type = other DNA
cctatttctaaaataaacatcrcccaaaacaataattcataaacttcaac

SEQ ID NO: 24104 - DNA, 50 bp, synthetic construct
  source 1..50: mol_type = other DNA
aactatttaccaaaactaaaattcaattccctatttctaaaataaacatc

SEQ ID NO: 24105 - DNA, 50 bp, synthetic construct
  source 1..50: mol_type = other DNA
aaaacatataattcttcactacaaaaataataaacccctaacctaaccac

SEQ ID NO: 24106 - DNA, 50 bp, synthetic construct
  source 1..50: mol_type = other DNA
cttcccttaccttatacaactataaatatatctctaaacaaacataaaac

SEQ ID NO: 24107 - DNA, 50 bp, synthetic construct
  source 1..50: mol_type = other DNA
aataaataatcaaaactaaaccctaaaaaaacracctacctaaaactaac

SEQ ID NO: 24108 - DNA, 50 bp, synthetic construct
  source 1..50: mol_type = other DNA
atttacctaactaatttttcctctactttccctcaatacctcataaaacc

SEQ ID NO: 24109 - DNA, 50 bp, synthetic construct
  source 1..50: mol_type = other DNA
tcracctctaaaaataatacccttacctaaaaaaccaccctaaaaaaaac

SEQ ID NO: 24110 - DNA, 50 bp, synthetic construct
  source 1..50: mol_type = other DNA
tcrtctttttcaaaataactcctcaaacaaaaacaccaccctcaaaaacc

SEQ ID NO: 24111 - DNA, 50 bp, synthetic construct
  source 1..50: mol_type = other DNA
ttcaaaataactcctcaaacaaaaacaccaccctcaaaaaccratctaac

SEQ ID NO: 24112 - DNA, 50 bp, synthetic construct
  source 1..50: mol_type = other DNA
cctaattatcttcctcaatcctctcaccacttttcaaaatcaattaaatc

SEQ ID NO: 24113 - DNA, 50 bp, synthetic construct
  source 1..50: mol_type = other DNA
aattatcttcctcaatcctctcaccacttttcaaaatcaattaaatcrcc

SEQ ID NO: 24114 - DNA, 50 bp, synthetic construct
  source 1..50: mol_type = other DNA
aacattttccrtaaaatttaaaatccaaactccacrctaaaacaaccccc

SEQ ID NO: 24115 - DNA, 50 bp, synthetic construct
  source 1..50: mol_type = other DNA
aaatacraaaacaacccaaatattcataacaaacrataaataacraaacc

SEQ ID NO: 24116 - DNA, 50 bp, synthetic construct
  source 1..50: mol_type = other DNA
taaccaaaatacraaaacaacccaaatattcataacaaacrataaataac

SEQ ID NO: 24117 - DNA, 50 bp, synthetic construct
  source 1..50: mol_type = other DNA
ttattcacaataaccaaaatacraaaacaacccaaatattcataacaaac

SEQ ID NO: 24118 - DNA, 50 bp, synthetic construct
  source 1..50: mol_type = other DNA
caactacactccaatactcattccatcattattcacaataaccaaaatac

SEQ ID NO: 24119 - DNA, 50 bp, synthetic construct
  source 1..50: mol_type = other DNA
tcccaaaaccacacccaaaattatcctaaacaaattcctattcaaacttc

SEQ ID NO: 24120 - DNA, 50 bp, synthetic construct
  source 1..50: mol_type = other DNA
aaacaaaccctaaacttacaataacraaacacaatcaaaacttacttctc

SEQ ID NO: 24121 - DNA, 50 bp, synthetic construct
  source 1..50: mol_type = other DNA
aacrtttaataccaactaccacaacaaacaaaccctaaacttacaataac

SEQ ID NO: 24122 - DNA, 50 bp, synthetic construct
  source 1..50: mol_type = other DNA
ccaaaactctacttaaatttaaaacctttactaacrtatatcaataatac

SEQ ID NO: 24123 - DNA, 50 bp, synthetic construct
  source 1..50: mol_type = other DNA
ctaactcttcaaaaacccccaaataaaaatctaacataaaatactacrcc

SEQ ID NO: 24124 - DNA, 50 bp, synthetic construct
  source 1..50: mol_type = other DNA
taacactaataaattttccaaacacaacrttaccaccatacttctatacc

SEQ ID NO: 24125 - DNA, 50 bp, synthetic construct
  source 1..50: mol_type = other DNA
tctttaaactctttcccataatataaaactctcaataacaactaacaaac

SEQ ID NO: 24126 - DNA, 50 bp, synthetic construct
  source 1..50: mol_type = other DNA
ttaaactctttcccataatataaaactctcaataacaactaacaaacrac

SEQ ID NO: 24127 - DNA, 50 bp, synthetic construct
  source 1..50: mol_type = other DNA
ctctttcccataatataaaactctcaataacaactaacaaacracraaac

SEQ ID NO: 24128 - DNA, 50 bp, synthetic construct
  source 1..50: mol_type = other DNA
cataatataaaactctcaataacaactaacaaacracraaacrattactc

SEQ ID NO: 24129 - DNA, 50 bp, synthetic construct
  source 1..50: mol_type = other DNA
ttctaataaacrctaatttccraaaaactccraatactttataaatattc

SEQ ID NO: 24130 - DNA, 50 bp, synthetic construct
  source 1..50: mol_type = other DNA
aataaaaaaaacacaactaaaataaacttaaatatccaaaattctatttc

SEQ ID NO: 24131 - DNA, 50 bp, synthetic construct
  source 1..50: mol_type = other DNA
aaaataaacttaaatatccaaaattctatttcrtctcacaaaaaatatac

SEQ ID NO: 24132 - DNA, 50 bp, synthetic construct
  source 1..50: mol_type = other DNA
tttttattaaatatttcaaaaataaattaaacttcaaaaaacaactcccc

SEQ ID NO: 24133 - DNA, 50 bp, synthetic construct
  source 1..50: mol_type = other DNA
cacaacctacaatccctaatacctcaaattaaacccractaacccaaaac

SEQ ID NO: 24134 - DNA, 50 bp, synthetic construct
  source 1..50: mol_type = other DNA
ccraattcaatttaaaacaccaaaaactacaaactatataaaaaattacc

SEQ ID NO: 24135 - DNA, 50 bp, synthetic construct
  source 1..50: mol_type = other DNA
acttaactaaacaacaaccctccaaattataaaaataaacaaaacrcaac

SEQ ID NO: 24136 - DNA, 50 bp, synthetic construct
  source 1..50: mol_type = other DNA
aacraacttaactaaacaacaaccctccaaattataaaaataaacaaaac

SEQ ID NO: 24137 - DNA, 50 bp, synthetic construct
  source 1..50: mol_type = other DNA
tctaacraatccaaatcraaaataccttcttacaccaatatatttaactc

SEQ ID NO: 24138 - DNA, 50 bp, synthetic construct
  source 1..50: mol_type = other DNA
ctactaaccttttccccraaccaaacacactaatacaaaaaaatattttc

SEQ ID NO: 24139 - DNA, 50 bp, synthetic construct
  source 1..50: mol_type = other DNA
ttccccraaccaaacacactaatacaaaaaaatattttcracttaaattc

SEQ ID NO: 24140 - DNA, 50 bp, synthetic construct
  source 1..50: mol_type = other DNA
aaaatatctaaaattacccttctttctatattctcatcaaacccctttcc

SEQ ID NO: 24141 - DNA, 50 bp, synthetic construct
  source 1..50: mol_type = other DNA
aaacaaaaaacatccctctactaccacaaaaaatcttaaaaaacatttac

SEQ ID NO: 24142 - DNA, 50 bp, synthetic construct
  source 1..50: mol_type = other DNA
tttataaaaacaaattctcactatattacccaaactaaccttaaactccc

SEQ ID NO: 24143 - DNA, 50 bp, synthetic construct
  source 1..50: mol_type = other DNA
taaactaaaataatacaatcataactcactacaaccactacctcctaaac

SEQ ID NO: 24144 - DNA, 50 bp, synthetic construct
  source 1..50: mol_type = other DNA
accactatacctaacccatttctttctttttttctttaaaacaaaatctc

SEQ ID NO: 24145 - DNA, 50 bp, synthetic construct
  source 1..50: mol_type = other DNA
ccaacctaaacaaaataaattctatctcacttaaaaacaccatccaaaac

SEQ ID NO: 24146 - DNA, 50 bp, synthetic construct
  source 1..50: mol_type = other DNA
ttctatctcacttaaaaacaccatccaaaacrttaacttaaaacaaccac

SEQ ID NO: 24147 - DNA, 50 bp, synthetic construct
  source 1..50: mol_type = other DNA
taactataatcacctaaactactctacttctaaaaattaactaattatac

SEQ ID NO: 24148 - DNA, 50 bp, synthetic construct
  source 1..50: mol_type = other DNA
tttatcactaccttacactctaacattatttttaactactaaataacacc

SEQ ID NO: 24149 - DNA, 50 bp, synthetic construct
  source 1..50: mol_type = other DNA
rtttcaacacttccataatcaaaactaccatcaactctacctaaaaaatc

SEQ ID NO: 24150 - DNA, 50 bp, synthetic construct
  source 1..50: mol_type = other DNA
ttaataaatcttatcaattctaccttcaaaacatatatccaacctaaccc

SEQ ID NO: 24151 - DNA, 50 bp, synthetic construct
  source 1..50: mol_type = other DNA
caattaaaaataaatctctactacctcctcrtcrtcatatccraatttac

SEQ ID NO: 24152 - DNA, 50 bp, synthetic construct
  source 1..50: mol_type = other DNA
attacttacaattaaaaataaatctctactacctcctcrtcrtcatatcc

SEQ ID NO: 24153 - DNA, 50 bp, synthetic construct
  source 1..50: mol_type = other DNA
ctaccraaaacaattacttacaattaaaaataaatctctactacctcctc

SEQ ID NO: 24154 - DNA, 50 bp, synthetic construct
  source 1..50: mol_type = other DNA
acracraaaaaacaataaaaacccatcctcaactataaataactaccttc

SEQ ID NO: 24155 - DNA, 50 bp, synthetic construct
  source 1..50: mol_type = other DNA
aatacraacccaaaacttacctctacctatattcctacacaaaaccaaac

SEQ ID NO: 24156 - DNA, 50 bp, synthetic construct
  source 1..50: mol_type = other DNA
accrcrtctaattctatacaaaaacacaaacaaaaacaaaccctaaatcc

SEQ ID NO: 24157 - DNA, 50 bp, synthetic construct
  source 1..50: mol_type = other DNA
taaactttactcctacctaaacaattaataaaaacaaactaaaaaacaac

SEQ ID NO: 24158 - DNA, 50 bp, synthetic construct
  source 1..50: mol_type = other DNA
tccctaaaactaaaatccrtaatccttacctataatcacaaatcctcccc

SEQ ID NO: 24159 - DNA, 50 bp, synthetic construct
  source 1..50: mol_type = other DNA
ttaaactcaatccccaattcaaaaacctcacaaactaaaaacrtaaaaac

SEQ ID NO: 24160 - DNA, 50 bp, synthetic construct
  source 1..50: mol_type = other DNA
ataacaaattaaactcaatccccaattcaaaaacctcacaaactaaaaac

SEQ ID NO: 24161 - DNA, 50 bp, synthetic construct
  source 1..50: mol_type = other DNA
actaaaaaaatcttttataaacratatcctaaacaaatccaactaaatcc

SEQ ID NO: 24162 - DNA, 50 bp, synthetic construct
  source 1..50: mol_type = other DNA
ccaaaattataactcctaaaaacctctatccataaacaacccaaatcttc

SEQ ID NO: 24163 - DNA, 50 bp, synthetic construct
  source 1..50: mol_type = other DNA
actccacaataaaacctaaacaatcttctatacctttttccctcttaatc

SEQ ID NO: 24164 - DNA, 50 bp, synthetic construct
  source 1..50: mol_type = other DNA
caatcaaaatactcaataaaataataatcataaccctaaataacacaaac

SEQ ID NO: 24165 - DNA, 50 bp, synthetic construct
  source 1..50: mol_type = other DNA
aatacaaactaaacraattactcacrcctataatcctaacaatttaatcc

SEQ ID NO: 24166 - DNA, 50 bp, synthetic construct
  source 1..50: mol_type = other DNA
accatattactcaaactaatctaaaactcctaaactcaaataattctccc

SEQ ID NO: 24167 - DNA, 50 bp, synthetic construct
  source 1..50: mol_type = other DNA
aaaataaaaacaaaaacatacaataatccaaacaaaactcaacaacrtcc

SEQ ID NO: 24168 - DNA, 50 bp, synthetic construct
  source 1..50: mol_type = other DNA
aaataaaataaaaacaaaaacatacaataatccaaacaaaactcaacaac

SEQ ID NO: 24169 - DNA, 50 bp, synthetic construct
  source 1..50: mol_type = other DNA
aaaaaaaattttcatttcaaaacaatttcttctattaacrctttctcctc

SEQ ID NO: 24170 - DNA, 50 bp, synthetic construct
  source 1..50: mol_type = other DNA
taaaaattctcttcctaatttaatataacctaacaaataaacacctaacc

SEQ ID NO: 24171 - DNA, 50 bp, synthetic construct
  source 1..50: mol_type = other DNA
atataacctaacaaataaacacctaaccrctttcrtttaaaaaatactac

SEQ ID NO: 24172 - DNA, 50 bp, synthetic construct
  source 1..50: mol_type = other DNA
caaaacacattccaaaataaacaaaaccactaaactcaaactccaaaatc

SEQ ID NO: 24173 - DNA, 50 bp, synthetic construct
  source 1..50: mol_type = other DNA
ttttccctcaaaacaatcttactctatcacccaaactaaaattcaataac

SEQ ID NO: 24174 - DNA, 50 bp, synthetic construct
  source 1..50: mol_type = other DNA
taaccacatcataattaataattttaattaccaaaatcaactcrtttctc

SEQ ID NO: 24175 - DNA, 50 bp, synthetic construct
  source 1..50: mol_type = other DNA
taacaactaaccacatcataattaataattttaattaccaaaatcaactc

SEQ ID NO: 24176 - DNA, 50 bp, synthetic construct
  source 1..50: mol_type = other DNA
cttcatcttaactaacccaataacaataacccaaaactttaaaaaatttc

SEQ ID NO: 24177 - DNA, 50 bp, synthetic construct
  source 1..50: mol_type = other DNA
tctatttccaaacccacccttttcccctaaactcaaaattaaaaataaac

SEQ ID NO: 24178 - DNA, 50 bp, synthetic construct
  source 1..50: mol_type = other DNA
tcacttcccctttaatttttattaaccataaaaaaatattccttcctttc

SEQ ID NO: 24179 - DNA, 50 bp, synthetic construct
  source 1..50: mol_type = other DNA
aacaacaacaacattccctaaataaatcraaaactaccataatatcrtcc

SEQ ID NO: 24180 - DNA, 50 bp, synthetic construct
  source 1..50: mol_type = other DNA
ctcaaaaaaatccaattcaactaaacraaaccctctacccaaacaaatcc

SEQ ID NO: 24181 - DNA, 50 bp, synthetic construct
  source 1..50: mol_type = other DNA
atttaaataaaaaaccccrttcaactaaactaaatcctcctaaaccracc

SEQ ID NO: 24182 - DNA, 50 bp, synthetic construct
  source 1..50: mol_type = other DNA
accraaaattccaaactaaaaacccaaaaacccatttattaaaaaacctc

SEQ ID NO: 24183 - DNA, 50 bp, synthetic construct
  source 1..50: mol_type = other DNA
aaacrttaccccttaatatacaaataaattcttcctcaaaacacataacc

SEQ ID NO: 24184 - DNA, 50 bp, synthetic construct
  source 1..50: mol_type = other DNA
ttcaatttatatacaaactccracatataaatcctacttttaacattctc

SEQ ID NO: 24185 - DNA, 50 bp, synthetic construct
  source 1..50: mol_type = other DNA
tcctcctatcaacraaaaaacttaaaataattaccttttatacaaaaaac

SEQ ID NO: 24186 - DNA, 50 bp, synthetic construct
  source 1..50: mol_type = other DNA
taaataatctccctttttctattctctaccaaaccaatccctaacttaac

SEQ ID NO: 24187 - DNA, 50 bp, synthetic construct
  source 1..50: mol_type = other DNA
acrtacaatctcctaaccctataacaacaacaacattccctaaataaatc

SEQ ID NO: 24188 - DNA, 50 bp, synthetic construct
  source 1..50: mol_type = other DNA
aactactataacaaacaacccaaaactattcaaatacacctcaaattacc

SEQ ID NO: 24189 - DNA, 50 bp, synthetic construct
  source 1..50: mol_type = other DNA
aactaatctaaaccacaaaaacctttaaaacacctcactaaaaatttaac

SEQ ID NO: 24190 - DNA, 50 bp, synthetic construct
  source 1..50: mol_type = other DNA
tatttctcatctaatttactacttaaaacctacaaatttaataaaacccc

SEQ ID NO: 24191 - DNA, 50 bp, synthetic construct
  source 1..50: mol_type = other DNA
cccaaatccttaaaaattatcatattctaaaaaccaaataacctttaatc

SEQ ID NO: 24192 - DNA, 50 bp, synthetic construct
  source 1..50: mol_type = other DNA
aaacaaacctattactaaatcatttacraattaatacccaaaaaatctcc

SEQ ID NO: 24193 - DNA, 50 bp, synthetic construct
  source 1..50: mol_type = other DNA
ctccctctattctaacctcatcrttattctaacaaaatatactctaaaac

SEQ ID NO: 24194 - DNA, 50 bp, synthetic construct
  source 1..50: mol_type = other DNA
caaacataattctttacttttttcttccccctttacctaacttacaattc

SEQ ID NO: 24195 - DNA, 50 bp, synthetic construct
  source 1..50: mol_type = other DNA
tacattatcaacttattatcaacaaaataaaaactatcaaaacraatctc

SEQ ID NO: 24196 - DNA, 50 bp, synthetic construct
  source 1..50: mol_type = other DNA
ctttacctaacttacaattcrtctaataattaaaaatccttacraaaccc

SEQ ID NO: 24197 - DNA, 50 bp, synthetic construct
  source 1..50: mol_type = other DNA
attaacaaactacaacttcratcatctccrtataccaaaatcttataacc

SEQ ID NO: 24198 - DNA, 50 bp, synthetic construct
  source 1..50: mol_type = other DNA
aaaaccaaattccaaatatatattaacaaactacaacttcratcatctcc

SEQ ID NO: 24199 - DNA, 50 bp, synthetic construct
  source 1..50: mol_type = other DNA
aaaaaaaatactttaccrcraccacaaaatcctaacacacraaaataatc

SEQ ID NO: 24200 - DNA, 50 bp, synthetic construct
  source 1..50: mol_type = other DNA
catctaaaacctaaccccaaaaaaccaaaactaaaataacaatttcctac

SEQ ID NO: 24201 - DNA, 50 bp, synthetic construct
  source 1..50: mol_type = other DNA
tctaaaacctaaccccaaaaaaccaaaactaaaataacaatttcctacrc

SEQ ID NO: 24202 - DNA, 50 bp, synthetic construct
  source 1..50: mol_type = other DNA
atactatattttcttccccaatattttttcttccctttttttcctacccc

SEQ ID NO: 24203 - DNA, 50 bp, synthetic construct
  source 1..50: mol_type = other DNA
cacatatcacatatactaaaaacaccactatcattttataaaacctcccc

SEQ ID NO: 24204 - DNA, 50 bp, synthetic construct
  source 1..50: mol_type = other DNA
ctctacactacacaacctaaaaaattaacttttaataaaaatttacctcc

SEQ ID NO: 24205 - DNA, 50 bp, synthetic construct
  source 1..50: mol_type = other DNA
aacacctaaaacaattctaactaacaatctaaaaactcaaactacattac

SEQ ID NO: 24206 - DNA, 50 bp, synthetic construct
  source 1..50: mol_type = other DNA
cctaataacatccttctactaatactaactaaaccctaaccacatcaatc

SEQ ID NO: 24207 - DNA, 50 bp, synthetic construct
  source 1..50: mol_type = other DNA
acaacataaaaaacaaaaccacacrtaaaacacctaaatttacaataaac

SEQ ID NO: 24208 - DNA, 50 bp, synthetic construct
  source 1..50: mol_type = other DNA
aaacaataacaatacaactttcccctacaacataaaaaacaaaaccacac

SEQ ID NO: 24209 - DNA, 50 bp, synthetic construct
  source 1..50: mol_type = other DNA
ctatttctcattataactcctcaaataaaatttacatattcctatcaaac

SEQ ID NO: 24210 - DNA, 50 bp, synthetic construct
  source 1..50: mol_type = other DNA
aacacactatatctactacattaataaactatctcttatctacaatattc

SEQ ID NO: 24211 - DNA, 50 bp, synthetic construct
  source 1..50: mol_type = other DNA
ttcaaaaacaacaaaaccctatcctactaaacataaaccaaacactatcc

SEQ ID NO: 24212 - DNA, 50 bp, synthetic construct
  source 1..50: mol_type = other DNA
atctaatatacaaactaaataaatcctaccttaatatatcctaccccacc

SEQ ID NO: 24213 - DNA, 50 bp, synthetic construct
  source 1..50: mol_type = other DNA
atatacaaactaaataaatcctaccttaatatatcctaccccaccratac

SEQ ID NO: 24214 - DNA, 50 bp, synthetic construct
  source 1..50: mol_type = other DNA
aaaacaatatatcctaaaattcacaaaactaactcctcaccccaatacac

SEQ ID NO: 24215 - DNA, 50 bp, synthetic construct
  source 1..50: mol_type = other DNA
caaaaacctaaatattaaacaccaacacaaaacaaatccttaaacttctc

SEQ ID NO: 24216 - DNA, 50 bp, synthetic construct
  source 1..50: mol_type = other DNA
ttcrttctatttattcaaaacactttacatctaaaattatctacttcccc

SEQ ID NO: 24217 - DNA, 50 bp, synthetic construct
  source 1..50: mol_type = other DNA
tttctacraaactctatccttaactttctcttattaacattttaattaac

SEQ ID NO: 24218 - DNA, 50 bp, synthetic construct
  source 1..50: mol_type = other DNA
tctatccttaactttctcttattaacattttaattaacraatataaacac

SEQ ID NO: 24219 - DNA, 50 bp, synthetic construct
  source 1..50: mol_type = other DNA
aataaaaatctatacaaaaaccaaaaacrcctaaaaaaccraactaaatc

SEQ ID NO: 24220 - DNA, 50 bp, synthetic construct
  source 1..50: mol_type = other DNA
aatcctaaactactatcatttctatttctaaaaccttctctccttaaccc

SEQ ID NO: 24221 - DNA, 50 bp, synthetic construct
  source 1..50: mol_type = other DNA
tataactaactataaataataaacacacctatcccccaatctatatcctc

SEQ ID NO: 24222 - DNA, 50 bp, synthetic construct
  source 1..50: mol_type = other DNA
tcctaaccaaataataatcttaaaaaaaataacactacattctacccrcc

SEQ ID NO: 24223 - DNA, 50 bp, synthetic construct
  source 1..50: mol_type = other DNA
taaacctttaccattaaaaattaaatttcctcacacctacrattactatc

SEQ ID NO: 24224 - DNA, 50 bp, synthetic construct
  source 1..50: mol_type = other DNA
tattactatctacctaaaaataaaaaccccatcaaaacacracaacaacc

SEQ ID NO: 24225 - DNA, 50 bp, synthetic construct
  source 1..50: mol_type = other DNA
aaattcaatctctaataacaaaaactcaaacacaaaaactaaaaactcac

SEQ ID NO: 24226 - DNA, 50 bp, synthetic construct
  source 1..50: mol_type = other DNA
aactctctaataaaacaaaacaactaatatcraaatcccraaactaaatc

SEQ ID NO: 24227 - DNA, 50 bp, synthetic construct
  source 1..50: mol_type = other DNA
tatctacaaacraacaaaaactctaaaaattccaaaataactaaacccac

SEQ ID NO: 24228 - DNA, 50 bp, synthetic construct
  source 1..50: mol_type = other DNA
aaaaacaactcrtaaacttaactattttaaaaccttcaaaacctctattc

SEQ ID NO: 24229 - DNA, 50 bp, synthetic construct
  source 1..50: mol_type = other DNA
tttcctaaataacctaaaatcttaaaaattcatacracaaactccrcttc

SEQ ID NO: 24230 - DNA, 50 bp, synthetic construct
  source 1..50: mol_type = other DNA
ataaatttcctaaataacctaaaatcttaaaaattcatacracaaactcc

SEQ ID NO: 24231 - DNA, 50 bp, synthetic construct
  source 1..50: mol_type = other DNA
ctaccrcataaattcttaaaacctcaaattatctaaaaaatctaccrcac

SEQ ID NO: 24232 - DNA, 50 bp, synthetic construct
  source 1..50: mol_type = other DNA
taaaacctcaaattatctaaaaaatctaccrcacrctaaaatactcctcc

SEQ ID NO: 24233 - DNA, 50 bp, synthetic construct
  source 1..50: mol_type = other DNA
caacctccctacaaaatatttatatcaaacacctactaaccactaactcc

SEQ ID NO: 24234 - DNA, 50 bp, synthetic construct
  source 1..50: mol_type = other DNA
aaccccaaacrcaataatctttcrtcactacaaatttcaaaaatcttacc

SEQ ID NO: 24235 - DNA, 50 bp, synthetic construct
  source 1..50: mol_type = other DNA
aactccrtacrataaaacttctaaaacctataataacraaaaatcattac

SEQ ID NO: 24236 - DNA, 50 bp, synthetic construct
  source 1..50: mol_type = other DNA
tactcctaataaacacaaacctacattcaaccaaatatctaaaaacaaac

SEQ ID NO: 24237 - DNA, 50 bp, synthetic construct
  source 1..50: mol_type = other DNA
crcaaaaataccacaatacrttcaaaaataaaatccacaaccttctctcc

SEQ ID NO: 24238 - DNA, 50 bp, synthetic construct
  source 1..50: mol_type = other DNA
aaaatataacaaccattcccacacaaaatcacrcaaaaataccacaatac

SEQ ID NO: 24239 - DNA, 50 bp, synthetic construct
  source 1..50: mol_type = other DNA
aaaaacccaatacctcaaacttcactaaaacataactaattacctctaac

SEQ ID NO: 24240 - DNA, 50 bp, synthetic construct
  source 1..50: mol_type = other DNA
aaaactctaaactcaaatttctacaaattcaaattccaactatctcatac

SEQ ID NO: 24241 - DNA, 50 bp, synthetic construct
  source 1..50: mol_type = other DNA
atttctaaaacaataactactaacacrtatcaactaaaacactacaaatc

SEQ ID NO: 24242 - DNA, 50 bp, synthetic construct
  source 1..50: mol_type = other DNA
tcaacaatttccaacaataaaatcatttctaaaacaataactactaacac

SEQ ID NO: 24243 - DNA, 50 bp, synthetic construct
  source 1..50: mol_type = other DNA
cttctctacaaaactatatcaacratacaaactcaaaaaaaaaccatctc

SEQ ID NO: 24244 - DNA, 50 bp, synthetic construct
  source 1..50: mol_type = other DNA
ccttaaaaacatcatttatacaacccccttctctacaaaactatatcaac

SEQ ID NO: 24245 - DNA, 50 bp, synthetic construct
  source 1..50: mol_type = other DNA
tactcccatatataaacacraatactacattcccaaactctaacrtaaac

SEQ ID NO: 24246 - DNA, 50 bp, synthetic construct
  source 1..50: mol_type = other DNA
ctttacaaaacaaaaacrtacacacaacataaaatctaataaacaataac

SEQ ID NO: 24247 - DNA, 50 bp, synthetic construct
  source 1..50: mol_type = other DNA
cacttaattaacaaaataaaactcccttcccctccaccctcacaaaaaac

SEQ ID NO: 24248 - DNA, 50 bp, synthetic construct
  source 1..50: mol_type = other DNA
ataaacctactacaaaaataattcaaacaataacttaatcccaaaccacc

SEQ ID NO: 24249 - DNA, 50 bp, synthetic construct
  source 1..50: mol_type = other DNA
cctactacaaaaataattcaaacaataacttaatcccaaaccaccraacc

SEQ ID NO: 24250 - DNA, 50 bp, synthetic construct
  source 1..50: mol_type = other DNA
aaatctatccaaaacctaatatattccattactattattacaatacatac

SEQ ID NO: 24251 - DNA, 50 bp, synthetic construct
  source 1..50: mol_type = other DNA
aacrtttcactactactaaattactatcattctctctatctatcatactc

SEQ ID NO: 24252 - DNA, 50 bp, synthetic construct
  source 1..50: mol_type = other DNA
taaacaataaacacactttattcaataaccaaattctcctttaatatttc

SEQ ID NO: 24253 - DNA, 50 bp, synthetic construct
  source 1..50: mol_type = other DNA
aaaatactaaacrcacttaaaaaaccaatcattaataacaactaatactc

SEQ ID NO: 24254 - DNA, 50 bp, synthetic construct
  source 1..50: mol_type = other DNA
actaattcctacraacatcaactaccaccaataactaatttcctaaatac

SEQ ID NO: 24255 - DNA, 50 bp, synthetic construct
  source 1..50: mol_type = other DNA
taatttcctaaatacrttcaacatctccattaacacaaaattttatttcc

SEQ ID NO: 24256 - DNA, 50 bp, synthetic construct
  source 1..50: mol_type = other DNA
aaatataaacactaaaattaaacrcaaataaataacatatctaaaccacc

SEQ ID NO: 24257 - DNA, 50 bp, synthetic construct
  source 1..50: mol_type = other DNA
aatttacccaaataaactaatctaaatttttactacctcttaatattctc

SEQ ID NO: 24258 - DNA, 50 bp, synthetic construct
  source 1..50: mol_type = other DNA
aaaacttctcatcacctataaatttaaaatactcattttcactctttctc

SEQ ID NO: 24259 - DNA, 50 bp, synthetic construct
  source 1..50: mol_type = other DNA
tatcaaaaaacaaacacattttaaaacttttacataccacacaactattc

SEQ ID NO: 24260 - DNA, 50 bp, synthetic construct
  source 1..50: mol_type = other DNA
catcraaacctttaatataaaatcttctttctatttcaatccctctcccc

SEQ ID NO: 24261 - DNA, 50 bp, synthetic construct
  source 1..50: mol_type = other DNA
aaatcctcacatcataatttccaaaacatacrcttttaattataacttac

SEQ ID NO: 24262 - DNA, 50 bp, synthetic construct
  source 1..50: mol_type = other DNA
atttctttcccttaccttatatttactacaaccaacccaaaactatttcc

SEQ ID NO: 24263 - DNA, 50 bp, synthetic construct
  source 1..50: mol_type = other DNA
aataaaaatacaaaactactttatccaacttatacctattaactttatcc

SEQ ID NO: 24264 - DNA, 50 bp, synthetic construct
  source 1..50: mol_type = other DNA
acaaactacatataccacatttacaacacaatataatacacactataacc

SEQ ID NO: 24265 - DNA, 50 bp, synthetic construct
  source 1..50: mol_type = other DNA
raaccataaaaacaacttctacactcacactaaaaccaaatatttaccac

SEQ ID NO: 24266 - DNA, 50 bp, synthetic construct
  source 1..50: mol_type = other DNA
tcaaaaactaaactaactatctaatccrctccraaaccaaaaataaatac

SEQ ID NO: 24267 - DNA, 50 bp, synthetic construct
  source 1..50: mol_type = other DNA
ttctaattccraaacraactaaacaaccaacccaatccttaataaaaccc

SEQ ID NO: 24268 - DNA, 50 bp, synthetic construct
  source 1..50: mol_type = other DNA
ccctttaccacataaactaatacattcaaaccacctataccaccaataac

SEQ ID NO: 24269 - DNA, 50 bp, synthetic construct
  source 1..50: mol_type = other DNA
aaaatactatcctcctaaaatttaccaacaaacaaaacctctccaatacc

SEQ ID NO: 24270 - DNA, 50 bp, synthetic construct
  source 1..50: mol_type = other DNA
aaaaaatcctacttattaacaaaccccaaaaaaacaatatcccaaaactc

SEQ ID NO: 24271 - DNA, 50 bp, synthetic construct
  source 1..50: mol_type = other DNA
tccaaaacacacaaacctaatttttataataaacaacactaacaaaaaac

SEQ ID NO: 24272 - DNA, 50 bp, synthetic construct
  source 1..50: mol_type = other DNA
ctacaaaaatcaaacctatatattctaaaaataataacaccacaaaaacc

SEQ ID NO: 24273 - DNA, 50 bp, synthetic construct
  source 1..50: mol_type = other DNA
aaacctatatattctaaaaataataacaccacaaaaaccraatcttatcc

SEQ ID NO: 24274 - DNA, 50 bp, synthetic construct
  source 1..50: mol_type = other DNA
tatatattctaaaaataataacaccacaaaaaccraatcttatccraacc

SEQ ID NO: 24275 - DNA, 50 bp, synthetic construct
  source 1..50: mol_type = other DNA
tcaacrtaaaaaccataaaatacaaaaatattaacttcactatataaaac

SEQ ID NO: 24276 - DNA, 50 bp, synthetic construct
  source 1..50: mol_type = other DNA
cccaccataaaaatacacatttcttttctatcaaaaaaacccttaaaaac

SEQ ID NO: 24277 - DNA, 50 bp, synthetic construct
  source 1..50: mol_type = other DNA
caaaacaatacctaactcraaacaacaaccactaaaatacccttcccaac

SEQ ID NO: 24278 - DNA, 50 bp, synthetic construct
  source 1..50: mol_type = other DNA
aaataatatttcaaaacctctcaaatacaaacttaaaattttccataacc

SEQ ID NO: 24279 - DNA, 50 bp, synthetic construct
  source 1..50: mol_type = other DNA
actaactatcactataaaattttcttctccctctaaccttttttttcccc

SEQ ID NO: 24280 - DNA, 50 bp, synthetic construct
  source 1..50: mol_type = other DNA
cctcacaaaaaactaccacatatattcttacatttactccttaaaaaacc

SEQ ID NO: 24281 - DNA, 50 bp, synthetic construct
  source 1..50: mol_type = other DNA
aaattttatcaccccttttaaattattctaattcaaatttatattacctc

SEQ ID NO: 24282 - DNA, 50 bp, synthetic construct
  source 1..50: mol_type = other DNA
cctattatatacattttaaatcttctttacctatttttctataaattacc

SEQ ID NO: 24283 - DNA, 50 bp, synthetic construct
  source 1..50: mol_type = other DNA
taaattctcractcacatttcrttttctctattatattcttccataaaac

SEQ ID NO: 24284 - DNA, 50 bp, synthetic construct
  source 1..50: mol_type = other DNA
acaatttcacttcataatttaactacttataaattctcractcacatttc

SEQ ID NO: 24285 - DNA, 50 bp, synthetic construct
  source 1..50: mol_type = other DNA
ccatataaccctacaatttcacttcataatttaactacttataaattctc

SEQ ID NO: 24286 - DNA, 50 bp, synthetic construct
  source 1..50: mol_type = other DNA
cactaaattacttctatttcctcttttatatacrataactcttctacctc

SEQ ID NO: 24287 - DNA, 50 bp, synthetic construct
  source 1..50: mol_type = other DNA
tcacaaaataatccctccttaataaaaccaactaatatcaaaaaaaaatc

SEQ ID NO: 24288 - DNA, 50 bp, synthetic construct
  source 1..50: mol_type = other DNA
ttaaactaatttcataattttacrtaacaactacctttcaataacaaatc

SEQ ID NO: 24289 - DNA, 50 bp, synthetic construct
  source 1..50: mol_type = other DNA
caactatcacrcaaaactataaaattaacttaaacctctttttaaaacac

SEQ ID NO: 24290 - DNA, 50 bp, synthetic construct
  source 1..50: mol_type = other DNA
cttctccraatatataaattatcaccccataaactacacaataacttctc

SEQ ID NO: 24291 - DNA, 50 bp, synthetic construct
  source 1..50: mol_type = other DNA
raatatataaattatcaccccataaactacacaataacttctcrcttctc

SEQ ID NO: 24292 - DNA, 50 bp, synthetic construct
  source 1..50: mol_type = other DNA
aaaaataaacttaacttacaaatcctccacctccacacttaaccctaaac

SEQ ID NO: 24293 - DNA, 50 bp, synthetic construct
  source 1..50: mol_type = other DNA
aaattctacctctatcacctattctcactaaaacttcctctcaacccaac

SEQ ID NO: 24294 - DNA, 50 bp, synthetic construct
  source 1..50: mol_type = other DNA
aaatcccacraataaaaaattaaatccracaaacaccccraaactaactc

SEQ ID NO: 24295 - DNA, 50 bp, synthetic construct
  source 1..50: mol_type = other DNA
aactattaactaacrattaacaactaaataacaaccaacaaacrcrcatc

SEQ ID NO: 24296 - DNA, 50 bp, synthetic construct
  source 1..50: mol_type = other DNA
caaattaactaacaattaaaaaacccrtaaccaacaaactattaactaac

SEQ ID NO: 24297 - DNA, 50 bp, synthetic construct
  source 1..50: mol_type = other DNA
ccaactatcaatcaacctatcaatcaacaaacaaaaaactacattccttc

SEQ ID NO: 24298 - DNA, 50 bp, synthetic construct
  source 1..50: mol_type = other DNA
ctatcaatcaacctatcaatcaacaaacaaaaaactacattccttcrttc

SEQ ID NO: 24299 - DNA, 50 bp, synthetic construct
  source 1..50: mol_type = other DNA
cataattaacacccaacaaatatctattaattaattctataaaaacaaac

SEQ ID NO: 24300 - DNA, 50 bp, synthetic construct
  source 1..50: mol_type = other DNA
cctaaatctatctccaaataaatcaattaaccattacccatacatctacc

SEQ ID NO: 24301 - DNA, 50 bp, synthetic construct
  source 1..50: mol_type = other DNA
aaaaaaactcactaataaaattaaaatccaaaccraacrcrataactcac

SEQ ID NO: 24302 - DNA, 50 bp, synthetic construct
  source 1..50: mol_type = other DNA
ctcacaaccttaccaaatacttttacataaaaccaactatatccttaaac

SEQ ID NO: 24303 - DNA, 50 bp, synthetic construct
  source 1..50: mol_type = other DNA
ataaaacctaaaacctcactctatacccctttaaaactcaaaataactac

SEQ ID NO: 24304 - DNA, 50 bp, synthetic construct
  source 1..50: mol_type = other DNA
rtataacattataataataattacataccataatatatttatcaaaaccc

SEQ ID NO: 24305 - DNA, 50 bp, synthetic construct
  source 1..50: mol_type = other DNA
raactttaacaaatacactataatatataaccaccattataatatcatac

SEQ ID NO: 24306 - DNA, 50 bp, synthetic construct
  source 1..50: mol_type = other DNA
taataaaacattctaaaataaacaaaactatacaaacaataaaaaaatcc

SEQ ID NO: 24307 - DNA, 50 bp, synthetic construct
  source 1..50: mol_type = other DNA
ctacataattttacctattccaaaatatcctatcattaaaatcatacaac

SEQ ID NO: 24308 - DNA, 50 bp, synthetic construct
  source 1..50: mol_type = other DNA
cctatcattaaaatcatacaacrtataaccttttcaaactaacttttcac

SEQ ID NO: 24309 - DNA, 50 bp, synthetic construct
  source 1..50: mol_type = other DNA
actaacttttcacrtaacaatatacttttaatatttttccatatcttttc

SEQ ID NO: 24310 - DNA, 50 bp, synthetic construct
  source 1..50: mol_type = other DNA
tttctttttattactaaataatattccattatataaatataccaaaattc

SEQ ID NO: 24311 - DNA, 50 bp, synthetic construct
  source 1..50: mol_type = other DNA
acccaactatattaaactcaaaattcaaaactaccaacttaaaatatctc

SEQ ID NO: 24312 - DNA, 50 bp, synthetic construct
  source 1..50: mol_type = other DNA
aattacaatcaaccaaaataaactcattaccattcaaaaacttcctctac

SEQ ID NO: 24313 - DNA, 50 bp, synthetic construct
  source 1..50: mol_type = other DNA
caacctattaccaaaactacacataatacaaataatatataaaaaatacc

SEQ ID NO: 24314 - DNA, 50 bp, synthetic construct
  source 1..50: mol_type = other DNA
caaataatatataaaaaataccraaaatttaacatccctaaaaccttccc

SEQ ID NO: 24315 - DNA, 50 bp, synthetic construct
  source 1..50: mol_type = other DNA
ccttactcataaacraactaaatctcttcatcatctaaacaaataaaaac

SEQ ID NO: 24316 - DNA, 50 bp, synthetic construct
  source 1..50: mol_type = other DNA
aaaatcccaaaaaaaacttatttaaaaacattaaccccttactcataaac

SEQ ID NO: 24317 - DNA, 50 bp, synthetic construct
  source 1..50: mol_type = other DNA
aaacccaaactataaaacaaaaacrtcacctataactcatctcaaacaac

SEQ ID NO: 24318 - DNA, 50 bp, synthetic construct
  source 1..50: mol_type = other DNA
taaaacatacttctacctacccaaataaacccaaactataaaacaaaaac

SEQ ID NO: 24319 - DNA, 50 bp, synthetic construct
  source 1..50: mol_type = other DNA
aacctaaacctacctaaacaaataaaaacatatctcaaacccctctaacc

SEQ ID NO: 24320 - DNA, 50 bp, synthetic construct
  source 1..50: mol_type = other DNA
aaacaaaaaaccctctacctactatctataaatctcaaacactacaccac

SEQ ID NO: 24321 - DNA, 50 bp, synthetic construct
  source 1..50: mol_type = other DNA
tctattaaactctataaaaaaataaattaaaccccaaataaaccctcttc

SEQ ID NO: 24322 - DNA, 50 bp, synthetic construct
  source 1..50: mol_type = other DNA
tccaaaccaacccaacaaatttaccaaatacaaacaaaaattacaaaaac

SEQ ID NO: 24323 - DNA, 50 bp, synthetic construct
  source 1..50: mol_type = other DNA
caacttctatctatacctaacaaacctattaaactaatttaaaattttcc

SEQ ID NO: 24324 - DNA, 50 bp, synthetic construct
  source 1..50: mol_type = other DNA
caaacctattaaactaatttaaaattttccraatcccaaattcaaacacc

SEQ ID NO: 24325 - DNA, 50 bp, synthetic construct
  source 1..50: mol_type = other DNA
aaataaacacracactatataaaatatatacaaccatccccctaaattac

SEQ ID NO: 24326 - DNA, 50 bp, synthetic construct
  source 1..50: mol_type = other DNA
taaatcccacrtaactcaaaaaaataactacacacattccacacaatatc

SEQ ID NO: 24327 - DNA, 50 bp, synthetic construct
  source 1..50: mol_type = other DNA
caccacaatacccttcaaaaaaatcctataaactctaaaaaaataccccc

SEQ ID NO: 24328 - DNA, 50 bp, synthetic construct
  source 1..50: mol_type = other DNA
ttccaaaacccataaaacccctctaaaaaacactataatataattactcc

SEQ ID NO: 24329 - DNA, 50 bp, synthetic construct
  source 1..50: mol_type = other DNA
tataatcccaaaaccaacaacattaacctcacctaaaaacttattaaaac

SEQ ID NO: 24330 - DNA, 50 bp, synthetic construct
  source 1..50: mol_type = other DNA
ctaaaaaaacactactccctccctactcaaaatcatataacaaaaacttc

SEQ ID NO: 24331 - DNA, 50 bp, synthetic construct
  source 1..50: mol_type = other DNA
acacttattatatactaaacacaatcctaaatacttaataaatataaccc

SEQ ID NO: 24332 - DNA, 50 bp, synthetic construct
  source 1..50: mol_type = other DNA
tacccaatatccattcttcctatttttttccttaataacaaattcaaatc

SEQ ID NO: 24333 - DNA, 50 bp, synthetic construct
  source 1..50: mol_type = other DNA
cctaacacctaacaataaatattcattaaacatataaaaaataaatcaac

SEQ ID NO: 24334 - DNA, 50 bp, synthetic construct
  source 1..50: mol_type = other DNA
aaaataacraaactctatattctacaaataaactccttcraaaataacac

SEQ ID NO: 24335 - DNA, 50 bp, synthetic construct
  source 1..50: mol_type = other DNA
caataaacctcaaaataacraaactctatattctacaaataaactccttc

SEQ ID NO: 24336 - DNA, 50 bp, synthetic construct
  source 1..50: mol_type = other DNA
taaaataccrcaaaaattacctaactcataacaataaacctcaaaataac

SEQ ID NO: 24337 - DNA, 50 bp, synthetic construct
  source 1..50: mol_type = other DNA
ctcacctataaaatataaatattaatactacccacaacccatccctcaac

SEQ ID NO: 24338 - DNA, 50 bp, synthetic construct
  source 1..50: mol_type = other DNA
aaaatatcaaaatctttttcaaactaccccatttctccatcccatatctc

SEQ ID NO: 24339 - DNA, 50 bp, synthetic construct
  source 1..50: mol_type = other DNA
acaatattaaaaaaccaaaccaaacacaccacactaaacaaaaatccacc

SEQ ID NO: 24340 - DNA, 50 bp, synthetic construct
  source 1..50: mol_type = other DNA
aacaaacaaatcaaatatccatcaactaataaataaatacacaaaaacac

SEQ ID NO: 24341 - DNA, 50 bp, synthetic construct
  source 1..50: mol_type = other DNA
tctctaaaaaaacaccrtaaaatttcaaaaacctacctcttcctcctcac

SEQ ID NO: 24342 - DNA, 50 bp, synthetic construct
  source 1..50: mol_type = other DNA
tttacacctcrctttcaaataaaccraaaactcaacaatatacaaacrac

SEQ ID NO: 24343 - DNA, 50 bp, synthetic construct
  source 1..50: mol_type = other DNA
atctacaaaaaactaacaaatcaaaaaaccttccaatacatcaaaacccc

SEQ ID NO: 24344 - DNA, 50 bp, synthetic construct
  source 1..50: mol_type = other DNA
ccccrctacctaacaaccccatcraaaaaatataattaacaacacaaaac

SEQ ID NO: 24345 - DNA, 50 bp, synthetic construct
  source 1..50: mol_type = other DNA
aattaaaaaaacttcraacctaaaaaaccttaccccrataccccaaaaac

SEQ ID NO: 24346 - DNA, 50 bp, synthetic construct
  source 1..50: mol_type = other DNA
attattaccactcrataatatcaacctaccataaataaactctactcccc

SEQ ID NO: 24347 - DNA, 50 bp, synthetic construct
  source 1..50: mol_type = other DNA
aaatacaaccactccctccctcaaaaccaaaaacttaactcactaataac

SEQ ID NO: 24348 - DNA, 50 bp, synthetic construct
  source 1..50: mol_type = other DNA
tccctactttaccttacaacaaaacctaaattttttaaaacccaaaacac

SEQ ID NO: 24349 - DNA, 50 bp, synthetic construct
  source 1..50: mol_type = other DNA
aacctaaattttttaaaacccaaaacacrctaaaccacaataaaaaaacc

SEQ ID NO: 24350 - DNA, 50 bp, synthetic construct
  source 1..50: mol_type = other DNA
aaaaacttttaaataacaaccttctttaatcaattcaaaaattaaaaccc

SEQ ID NO: 24351 - DNA, 50 bp, synthetic construct
  source 1..50: mol_type = other DNA
acaaacaaaacctaatctcttaaaatttaaaattaacaaaacaaaaatcc

SEQ ID NO: 24352 - DNA, 50 bp, synthetic construct
  source 1..50: mol_type = other DNA
ccaattataaaactttctttaacttaaaaaaaactcttttacraccraac

SEQ ID NO: 24353 - DNA, 50 bp, synthetic construct
  source 1..50: mol_type = other DNA
ccccaccaccaattataaaactttctttaacttaaaaaaaactcttttac

SEQ ID NO: 24354 - DNA, 50 bp, synthetic construct
  source 1..50: mol_type = other DNA
cattctacctaaaataataccaaaactaaaaaaatccatatcacctaccc

SEQ ID NO: 24355 - DNA, 50 bp, synthetic construct
  source 1..50: mol_type = other DNA
caacctctacaaataaacttaaaaattaaaacaacccaaataaaccaaac

SEQ ID NO: 24356 - DNA, 50 bp, synthetic construct
  source 1..50: mol_type = other DNA
aaacractctaaaaaaaacccaaacctaaaaacttcctcaccaaaaacac

SEQ ID NO: 24357 - DNA, 50 bp, synthetic construct
  source 1..50: mol_type = other DNA
ctaaaacaaaaaaccaaaaacaaatatatattataaaccccaaaaacacc

SEQ ID NO: 24358 - DNA, 50 bp, synthetic construct
  source 1..50: mol_type = other DNA
aaataaaaaaaaacctacaactaaactcaaccactccaaaaaaaaaccrc

SEQ ID NO: 24359 - DNA, 50 bp, synthetic construct
  source 1..50: mol_type = other DNA
acrttaaaaaaaccctcctcccaaacttttaattaacctccattataatc

SEQ ID NO: 24360 - DNA, 50 bp, synthetic construct
  source 1..50: mol_type = other DNA
ccrcactaaacaaatcctaaactccaaaccttcttctaactaactatacc

SEQ ID NO: 24361 - DNA, 50 bp, synthetic construct
  source 1..50: mol_type = other DNA
rcactaaacaaatcctaaactccaaaccttcttctaactaactataccrc

SEQ ID NO: 24362 - DNA, 50 bp, synthetic construct
  source 1..50: mol_type = other DNA
ctctactccracccatttaacaattaataaacacactcaaaacctcaacc

SEQ ID NO: 24363 - DNA, 50 bp, synthetic construct
  source 1..50: mol_type = other DNA
aactctaaatatatttattaactatcaaataaatcraaacaaaacccccc

SEQ ID NO: 24364 - DNA, 50 bp, synthetic construct
  source 1..50: mol_type = other DNA
aattactcttttcacctaatctcrtaactacacaatcaatataaacccrc

SEQ ID NO: 24365 - DNA, 50 bp, synthetic construct
  source 1..50: mol_type = other DNA
aaaatatattattatttatttttccttaattactcttttcacctaatctc

SEQ ID NO: 24366 - DNA, 50 bp, synthetic construct
  source 1..50: mol_type = other DNA
taaataacaacacacttcctatttataaaccttaatactactaaaccccc

SEQ ID NO: 24367 - DNA, 50 bp, synthetic construct
  source 1..50: mol_type = other DNA
aaataattctacaacctatactctcaatcaccctactatcctcactctac

SEQ ID NO: 24368 - DNA, 50 bp, synthetic construct
  source 1..50: mol_type = other DNA
caaaataactaaaaacacaaactacaaaaccacttcctaattcaaatccc

SEQ ID NO: 24369 - DNA, 50 bp, synthetic construct
  source 1..50: mol_type = other DNA
taaaacrtatatataacaaaacttcttactccaaaactaaaactacaccc

SEQ ID NO: 24370 - DNA, 50 bp, synthetic construct
  source 1..50: mol_type = other DNA
aaaaacaacatcraactcattttcacctaaaaattttacactcctatccc

SEQ ID NO: 24371 - DNA, 50 bp, synthetic construct
  source 1..50: mol_type = other DNA
aaataaaacccaaactctttatcccaacctcaaacctctataataaaacc

SEQ ID NO: 24372 - DNA, 50 bp, synthetic construct
  source 1..50: mol_type = other DNA
aaaacaaaaaacctaaattttattccacatataacraaacaatactaaac

SEQ ID NO: 24373 - DNA, 50 bp, synthetic construct
  source 1..50: mol_type = other DNA
ttcctattacacaaatactatcrtatacaataattcttatctaatatacc

SEQ ID NO: 24374 - DNA, 50 bp, synthetic construct
  source 1..50: mol_type = other DNA
attaactttaaaataaccctatatacrattcctattacacaaatactatc

SEQ ID NO: 24375 - DNA, 50 bp, synthetic construct
  source 1..50: mol_type = other DNA
tacactaaataaaaatcactacacacracaatacctatacaataaaaacc

SEQ ID NO: 24376 - DNA, 50 bp, synthetic construct
  source 1..50: mol_type = other DNA
acaatacctatacaataaaaaccrcacacaaaattactccaaaaccaatc

SEQ ID NO: 24377 - DNA, 50 bp, synthetic construct
  source 1..50: mol_type = other DNA
accaatcrtcacaattttataccataatcttatcaattctaaaaaacacc

SEQ ID NO: 24378 - DNA, 50 bp, synthetic construct
  source 1..50: mol_type = other DNA
atttacaacccctacaaataaatccaaaaacctattacaaattaacratc

SEQ ID NO: 24379 - DNA, 50 bp, synthetic construct
  source 1..50: mol_type = other DNA
ttaaatttacaacccctacaaataaatccaaaaacctattacaaattaac

SEQ ID NO: 24380 - DNA, 50 bp, synthetic construct
  source 1..50: mol_type = other DNA
atctataacaaactcttaaatttacttacaaaaactataaactcaaactc

SEQ ID NO: 24381 - DNA, 50 bp, synthetic construct
  source 1..50: mol_type = other DNA
acatacaccaaatttaaaatattacctcaaacaaaatattaataactcac

SEQ ID NO: 24382 - DNA, 50 bp, synthetic construct
  source 1..50: mol_type = other DNA
caaaaatccaaaactaaattctacctacaaaaacrattattataacatcc

SEQ ID NO: 24383 - DNA, 50 bp, synthetic construct
  source 1..50: mol_type = other DNA
aaacaaaatttaactctaaacccctaacctaaataccaattatatataac

SEQ ID NO: 24384 - DNA, 50 bp, synthetic construct
  source 1..50: mol_type = other DNA
ccacrtctcctcaaaaacttcraataactaacraaaactaatcaaaaaac

SEQ ID NO: 24385 - DNA, 50 bp, synthetic construct
  source 1..50: mol_type = other DNA
taactaacraaaactaatcaaaaaacraaacaaccccaaaaaaacaaccc

SEQ ID NO: 24386 - DNA, 50 bp, synthetic construct
  source 1..50: mol_type = other DNA
raaaactaatcaaaaaacraaacaaccccaaaaaaacaacccraaatctc

SEQ ID NO: 24387 - DNA, 50 bp, synthetic construct
  source 1..50: mol_type = other DNA
tacctacccaatcccractacttccttaaataaaaacrtaactataaaac

SEQ ID NO: 24388 - DNA, 50 bp, synthetic construct
  source 1..50: mol_type = other DNA
actactaaccractaaaccacttacttcctaatactaaaataacaacrcc

SEQ ID NO: 24389 - DNA, 50 bp, synthetic construct
  source 1..50: mol_type = other DNA
rctatcacttcaacaccaaaaaataaataatccaaccraccaacaacaac

SEQ ID NO: 24390 - DNA, 50 bp, synthetic construct
  source 1..50: mol_type = other DNA
raactttaaaattaataacttcattatcaccttcctacctcctcttaccc

SEQ ID NO: 24391 - DNA, 50 bp, synthetic construct
  source 1..50: mol_type = other DNA
tcaaaactcraaattactaaaaatttcaatctcattatcacctaccacac

SEQ ID NO: 24392 - DNA, 50 bp, synthetic construct
  source 1..50: mol_type = other DNA
aaaaatttcaatctcattatcacctaccacacrtactaacttcccctacc

SEQ ID NO: 24393 - DNA, 50 bp, synthetic construct
  source 1..50: mol_type = other DNA
acrcaaatatatacaatttacaaacttccatcataaacatttactttatc

SEQ ID NO: 24394 - DNA, 50 bp, synthetic construct
  source 1..50: mol_type = other DNA
acrataaaacaaatatttataataaaaatctataaactacacacacttac

SEQ ID NO: 24395 - DNA, 50 bp, synthetic construct
  source 1..50: mol_type = other DNA
ttcaatattaaaaaatccraaattttcattttaaactttctcaaacccrc

SEQ ID NO: 24396 - DNA, 50 bp, synthetic construct
  source 1..50: mol_type = other DNA
aattcaatattaaaaaatccraaattttcattttaaactttctcaaaccc

SEQ ID NO: 24397 - DNA, 50 bp, synthetic construct
  source 1..50: mol_type = other DNA
atacaacttttctcatcttcaataactacaaattcaatattaaaaaatcc

SEQ ID NO: 24398 - DNA, 50 bp, synthetic construct
  source 1..50: mol_type = other DNA
ctacctaaaacctaaaattacaaaataacacccaaaacttacctcacctc

SEQ ID NO: 24399 - DNA, 50 bp, synthetic construct
  source 1..50: mol_type = other DNA
ctttactttcttactaaacacaaaaccaactacrttaaaattcttatctc

SEQ ID NO: 24400 - DNA, 50 bp, synthetic construct
  source 1..50: mol_type = other DNA
tctcaacataaaactcctctacaaaattcaactacaacttctttacttcc

SEQ ID NO: 24401 - DNA, 50 bp, synthetic construct
  source 1..50: mol_type = other DNA
aaattcaactacaacttctttacttccrtaaaaaaatccttaccaccatc

SEQ ID NO: 24402 - DNA, 50 bp, synthetic construct
  source 1..50: mol_type = other DNA
crtcttccattttctcctaaattaaaaattctattttatacttaattacc

SEQ ID NO: 24403 - DNA, 50 bp, synthetic construct
  source 1..50: mol_type = other DNA
aaaaaaccaaattaaaaacccaaataattacaacttctctcataacacrc

SEQ ID NO: 24404 - DNA, 50 bp, synthetic construct
  source 1..50: mol_type = other DNA
cratccaaaaatataaataatccaatatccattcattacaaaaatcatac

SEQ ID NO: 24405 - DNA, 50 bp, synthetic construct
  source 1..50: mol_type = other DNA
crtataatccctataataaataaacactaaaccatccacattcttaaacc

SEQ ID NO: 24406 - DNA, 50 bp, synthetic construct
  source 1..50: mol_type = other DNA
ccctataataaataaacactaaaccatccacattcttaaaccrctcaccc

SEQ ID NO: 24407 - DNA, 50 bp, synthetic construct
  source 1..50: mol_type = other DNA
ctataataacccracaactaataaactaatttacrtcaaatatttcctcc

SEQ ID NO: 24408 - DNA, 50 bp, synthetic construct
  source 1..50: mol_type = other DNA
aaaacaaaataaaccactataataacccracaactaataaactaatttac

SEQ ID NO: 24409 - DNA, 50 bp, synthetic construct
  source 1..50: mol_type = other DNA
atcaactaccraactatcacaataacttactctactctcacaaaacaatc

SEQ ID NO: 24410 - DNA, 50 bp, synthetic construct
  source 1..50: mol_type = other DNA
aaaaacraacctcaaaacccttttacctacacccctatacaaaaaacaac

SEQ ID NO: 24411 - DNA, 50 bp, synthetic construct
  source 1..50: mol_type = other DNA
aaaaaaccctaaaactcrcctccttaaaaaccccaaaaacctcataaacc

SEQ ID NO: 24412 - DNA, 50 bp, synthetic construct
  source 1..50: mol_type = other DNA
aacatctaaaattccacaaaacttcacataaccattttaatacctcaatc

SEQ ID NO: 24413 - DNA, 50 bp, synthetic construct
  source 1..50: mol_type = other DNA
tctcaatcttctctttaatcatctattccattatctacataacatcttcc

SEQ ID NO: 24414 - DNA, 50 bp, synthetic construct
  source 1..50: mol_type = other DNA
aaaacatctctaataactaaacattaaatacaataaactttcccrtattc

SEQ ID NO: 24415 - DNA, 50 bp, synthetic construct
  source 1..50: mol_type = other DNA
aataaaaaaacatctctaataactaaacattaaatacaataaactttccc

SEQ ID NO: 24416 - DNA, 50 bp, synthetic construct
  source 1..50: mol_type = other DNA
aaaaccaaataaaataactcatatctacaatcctaactctttaaaaaacc

SEQ ID NO: 24417 - DNA, 50 bp, synthetic construct
  source 1..50: mol_type = other DNA
atatctatattacctacaaacttctaatacrcaaatttttattttaattc

SEQ ID NO: 24418 - DNA, 50 bp, synthetic construct
  source 1..50: mol_type = other DNA
aaaacttcaaacaaactcaacacctcctaacacacataaaacracatcac

SEQ ID NO: 24419 - DNA, 50 bp, synthetic construct
  source 1..50: mol_type = other DNA
taaaacaaaaccrcrttaaaacctaaatttctaaacrttataactaccac

SEQ ID NO: 24420 - DNA, 50 bp, synthetic construct
  source 1..50: mol_type = other DNA
aaaaaatttaacaccaaacttccaaaaacaaactacrtaataactacaac

SEQ ID NO: 24421 - DNA, 50 bp, synthetic construct
  source 1..50: mol_type = other DNA
caaaaacaaactacrtaataactacaacrtccaaaaacccaaatttcaac

SEQ ID NO: 24422 - DNA, 50 bp, synthetic construct
  source 1..50: mol_type = other DNA
tcacttcacccrcctaatactaaatttcctttaaatcttaaaacaaaacc

SEQ ID NO: 24423 - DNA, 50 bp, synthetic construct
  source 1..50: mol_type = other DNA
aaattcaacaccaaacraataaaataacttacctatacacaactacactc

SEQ ID NO: 24424 - DNA, 50 bp, synthetic construct
  source 1..50: mol_type = other DNA
aacctcaaaaacatctttatcttaaaataaatttccrttactctcaaaac

SEQ ID NO: 24425 - DNA, 50 bp, synthetic construct
  source 1..50: mol_type = other DNA
taacttaaaaaatcaacctcaaaaacatctttatcttaaaataaatttcc

SEQ ID NO: 24426 - DNA, 50 bp, synthetic construct
  source 1..50: mol_type = other DNA
cctaaatttaaaaaattcattcacaacttaatcctatcccctaaaatcac

SEQ ID NO: 24427 - DNA, 50 bp, synthetic construct
  source 1..50: mol_type = other DNA
caatttaaaaaaatcccaacrttatataaatattttcaataactcaaacc

SEQ ID NO: 24428 - DNA, 50 bp, synthetic construct
  source 1..50: mol_type = other DNA
caatataacctaaactcctcracttaaaccactaaaaacacttacacaac

SEQ ID NO: 24429 - DNA, 50 bp, synthetic construct
  source 1..50: mol_type = other DNA
acrtataaaacctaactctaaaaacaaccaatacrtaaaaaataaaaccc

SEQ ID NO: 24430 - DNA, 50 bp, synthetic construct
  source 1..50: mol_type = other DNA
tctcctaactaaactaaacttaaaatccttaaacraacttcatttcccac

SEQ ID NO: 24431 - DNA, 50 bp, synthetic construct
  source 1..50: mol_type = other DNA
tatacccccaaaacccttctatataacaatatactacrcrtaacaataac

SEQ ID NO: 24432 - DNA, 50 bp, synthetic construct
  source 1..50: mol_type = other DNA
accatttcccatatacccccaaaacccttctatataacaatatactacrc

SEQ ID NO: 24433 - DNA, 50 bp, synthetic construct
  source 1..50: mol_type = other DNA
aaaccatttcccatatacccccaaaacccttctatataacaatatactac

SEQ ID NO: 24434 - DNA, 50 bp, synthetic construct
  source 1..50: mol_type = other DNA
tcataacataatatacaaacaaaacaaaaatacrtataaatcatcattcc

SEQ ID NO: 24435 - DNA, 50 bp, synthetic construct
  source 1..50: mol_type = other DNA
aaactactccaactactaaacaacttcrattacraaataataactcacac

SEQ ID NO: 24436 - DNA, 50 bp, synthetic construct
  source 1..50: mol_type = other DNA
tatttacatatcatactataactaaactccataaaatttaatttatcttc

SEQ ID NO: 24437 - DNA, 50 bp, synthetic construct
  source 1..50: mol_type = other DNA
atcatactataactaaactccataaaatttaatttatcttcrcatccaac

SEQ ID NO: 24438 - DNA, 50 bp, synthetic construct
  source 1..50: mol_type = other DNA
aaataaatcaacaacaaaacaaaaatccataaaattatacaaaataatac

SEQ ID NO: 24439 - DNA, 50 bp, synthetic construct
  source 1..50: mol_type = other DNA
cactctaaacacttaataaacacaaaaacattacaaaatttcccaactcc

SEQ ID NO: 24440 - DNA, 50 bp, synthetic construct
  source 1..50: mol_type = other DNA
ttaacttttaaatttaataataacctttaacaaaaatccccaaacatatc

SEQ ID NO: 24441 - DNA, 50 bp, synthetic construct
  source 1..50: mol_type = other DNA
acaaacacattcctaactctaaaatactctcctaattcrtaaataccatc

SEQ ID NO: 24442 - DNA, 50 bp, synthetic construct
  source 1..50: mol_type = other DNA
rctaaattctacttataaaataacctctaaacaaatatcatctaccttcc

SEQ ID NO: 24443 - DNA, 50 bp, synthetic construct
  source 1..50: mol_type = other DNA
ttacaaaaataacraaaaacccctcraaacaaacctataaattttccctc

SEQ ID NO: 24444 - DNA, 50 bp, synthetic construct
  source 1..50: mol_type = other DNA
ataacttacaaattctaaaaacactttacaaaaataacraaaaacccctc

SEQ ID NO: 24445 - DNA, 50 bp, synthetic construct
  source 1..50: mol_type = other DNA
aaactcttaaatataacttacaaattctaaaaacactttacaaaaataac

SEQ ID NO: 24446 - DNA, 50 bp, synthetic construct
  source 1..50: mol_type = other DNA
aaaatattcccaaaatttacaaatcacacccaaaaaccccattcaacctc

SEQ ID NO: 24447 - DNA, 50 bp, synthetic construct
  source 1..50: mol_type = other DNA
caaaactctcaaccaaacattcatactactaaatatctaaaaaaaatctc

SEQ ID NO: 24448 - DNA, 50 bp, synthetic construct
  source 1..50: mol_type = other DNA
ccattctaacaatatcataacaaaaattcaaaaaaatcaactataccaac

SEQ ID NO: 24449 - DNA, 50 bp, synthetic construct
  source 1..50: mol_type = other DNA
attaaaatccrctcctaacatatactctttcttaactcaatcaaaactcc

SEQ ID NO: 24450 - DNA, 50 bp, synthetic construct
  source 1..50: mol_type = other DNA
aaatctcraaaaaacaattaacaatattaaccacaactaaatcctataac

SEQ ID NO: 24451 - DNA, 50 bp, synthetic construct
  source 1..50: mol_type = other DNA
acctctaccttatctcttaactaactcctcattaacatataaatacattc

SEQ ID NO: 24452 - DNA, 50 bp, synthetic construct
  source 1..50: mol_type = other DNA
aaatctccttattatctccrctaatctaaattaaaccaactactaaaatc

SEQ ID NO: 24453 - DNA, 50 bp, synthetic construct
  source 1..50: mol_type = other DNA
aatttacatcaattatcacratttcaacaactaatctaactcaaactaac

SEQ ID NO: 24454 - DNA, 50 bp, synthetic construct
  source 1..50: mol_type = other DNA
racttaaaccactacatcaaccaaccctaaaactaaaccrtattacaaac

SEQ ID NO: 24455 - DNA, 50 bp, synthetic construct
  source 1..50: mol_type = other DNA
aaaaatttaacracttaaaccactacatcaaccaaccctaaaactaaacc

SEQ ID NO: 24456 - DNA, 50 bp, synthetic construct
  source 1..50: mol_type = other DNA
rtttacaacacrattcaacttcaaaactaattaatataataactcaaacc

SEQ ID NO: 24457 - DNA, 50 bp, synthetic construct
  source 1..50: mol_type = other DNA
taaatttctcaaacacccaaaatcttttcttctctttctctaccatttac

SEQ ID NO: 24458 - DNA, 50 bp, synthetic construct
  source 1..50: mol_type = other DNA
aacaaccttactacacacacaaaccctatttaataatctcctcacacaac

SEQ ID NO: 24459 - DNA, 50 bp, synthetic construct
  source 1..50: mol_type = other DNA
aacaaaatttatatatacaacaaaactatttatttcacctaaatacaaac

SEQ ID NO: 24460 - DNA, 50 bp, synthetic construct
  source 1..50: mol_type = other DNA
tatatacaacaaaactatttatttcacctaaatacaaacraactaaatcc

SEQ ID NO: 24461 - DNA, 50 bp, synthetic construct
  source 1..50: mol_type = other DNA
cccacctaaaccaaaaaaatacataccaaaaaatacrtatatacrtacac

SEQ ID NO: 24462 - DNA, 50 bp, synthetic construct
  source 1..50: mol_type = other DNA
taaacccatctaaacccacctaaaccaaaaaaatacataccaaaaaatac

SEQ ID NO: 24463 - DNA, 50 bp, synthetic construct
  source 1..50: mol_type = other DNA
aaatcactctaacataaaatcaccctacaaaaaaacaatctcaactaccc

SEQ ID NO: 24464 - DNA, 50 bp, synthetic construct
  source 1..50: mol_type = other DNA
acataaaatcaccctacaaaaaaacaatctcaactacccraaatatcaac

SEQ ID NO: 24465 - DNA, 50 bp, synthetic construct
  source 1..50: mol_type = other DNA
aatcaaatctttaattaaacactcaccttaaaaaccacttctaaaatatc

SEQ ID NO: 24466 - DNA, 50 bp, synthetic construct
  source 1..50: mol_type = other DNA
ataaaaacaatcctttacaattatttacataatatttttaacctaatctc

SEQ ID NO: 24467 - DNA, 50 bp, synthetic construct
  source 1..50: mol_type = other DNA
ttataccrtcatattacaattataaataataaaataccractacttaaac

SEQ ID NO: 24468 - DNA, 50 bp, synthetic construct
  source 1..50: mol_type = other DNA
ttaaaatcrtaataaaatttcatatttcrcaaccacrctcaaattatacc

SEQ ID NO: 24469 - DNA, 50 bp, synthetic construct
  source 1..50: mol_type = other DNA
acccttaattacccccctctatttaaaatcrtaataaaatttcatatttc

SEQ ID NO: 24470 - DNA, 50 bp, synthetic construct
  source 1..50: mol_type = other DNA
acctaacaaattatacacaaacccttaattacccccctctatttaaaatc

SEQ ID NO: 24471 - DNA, 50 bp, synthetic construct
  source 1..50: mol_type = other DNA
aaacttatatacaatctatcaaataaacaacctaaaataaccctaaacac

SEQ ID NO: 24472 - DNA, 50 bp, synthetic construct
  source 1..50: mol_type = other DNA
tatacaatctatcaaataaacaacctaaaataaccctaaacacracaccc

SEQ ID NO: 24473 - DNA, 50 bp, synthetic construct
  source 1..50: mol_type = other DNA
acraataacaaaaaacacttaaaattctaaccctcctaaaacttccrccc

SEQ ID NO: 24474 - DNA, 50 bp, synthetic construct
  source 1..50: mol_type = other DNA
ttctcraatcttttccacaacccaaaataaccrcaaaaatatattttaac

SEQ ID NO: 24475 - DNA, 50 bp, synthetic construct
  source 1..50: mol_type = other DNA
aaaaccctaacraataactccrtacraccaaaactctaaaaaataatacc

SEQ ID NO: 24476 - DNA, 50 bp, synthetic construct
  source 1..50: mol_type = other DNA
atacaaacaataaataccaatcrcttaaaaaccacacrtcccaacatacc

SEQ ID NO: 24477 - DNA, 50 bp, synthetic construct
  source 1..50: mol_type = other DNA
ttaatattacaaatataaaccaccccrccctacccccaaattactttaac

SEQ ID NO: 24478 - DNA, 50 bp, synthetic construct
  source 1..50: mol_type = other DNA
ataaaaattaactaaacrattataatcccaaatactcracaaactaaaac

SEQ ID NO: 24479 - DNA, 50 bp, synthetic construct
  source 1..50: mol_type = other DNA
tatctcccaaactaatatacaataacrccatctaaactcaatacaacctc

SEQ ID NO: 24480 - DNA, 50 bp, synthetic construct
  source 1..50: mol_type = other DNA
aaaacctcaacaaacaaataattaaatctaactaatcttacattaaaaac

SEQ ID NO: 24481 - DNA, 50 bp, synthetic construct
  source 1..50: mol_type = other DNA
tatctattaaaactttctatcattcaatcacattatttacttacaccttc

SEQ ID NO: 24482 - DNA, 50 bp, synthetic construct
  source 1..50: mol_type = other DNA
cctaaatataattacaaaaataaccacaataaaataattcctcctctcac

SEQ ID NO: 24483 - DNA, 50 bp, synthetic construct
  source 1..50: mol_type = other DNA
taatcctcattctatttctatataaccttaaactaaaaataattttttac

SEQ ID NO: 24484 - DNA, 50 bp, synthetic construct
  source 1..50: mol_type = other DNA
ataaataacactataaaaactaaactattaaaactaaaaacacttaaaac

SEQ ID NO: 24485 - DNA, 50 bp, synthetic construct
  source 1..50: mol_type = other DNA
ttttaccatattaactaaactaatctcaaactcctaacctcaaattatcc

SEQ ID NO: 24486 - DNA, 50 bp, synthetic construct
  source 1..50: mol_type = other DNA
aaaaccctacttctactaaaaacacaaaaattaaccaaaaataataaaac

SEQ ID NO: 24487 - DNA, 50 bp, synthetic construct
  source 1..50: mol_type = other DNA
attctttcccaaactaaaaaaacaataacrcaatcttaactcacttcaac

SEQ ID NO: 24488 - DNA, 50 bp, synthetic construct
  source 1..50: mol_type = other DNA
accatatacaatctctatcacattctttcccaaactaaaaaaacaataac

SEQ ID NO: 24489 - DNA, 50 bp, synthetic construct
  source 1..50: mol_type = other DNA
aaaaatataacaaaaactacacataacccacaaaaccaaaaatatttacc

SEQ ID NO: 24490 - DNA, 50 bp, synthetic construct
  source 1..50: mol_type = other DNA
aaactatcrattccctatttattcaatccaaattccrtttaatattatac

SEQ ID NO: 24491 - DNA, 50 bp, synthetic construct
  source 1..50: mol_type = other DNA
attcctcctactaaaaactatcrattccctatttattcaatccaaattcc

SEQ ID NO: 24492 - DNA, 50 bp, synthetic construct
  source 1..50: mol_type = other DNA
ataattaatttcttactattctttttataccattattaaaaaaataacac

SEQ ID NO: 24493 - DNA, 50 bp, synthetic construct
  source 1..50: mol_type = other DNA
atttttatactaaaaaattttcaccccttaaaataaaattcaactttctc

SEQ ID NO: 24494 - DNA, 50 bp, synthetic construct
  source 1..50: mol_type = other DNA
ataaaatccaacaacattaactaacttacttaaaataatactacatctcc

SEQ ID NO: 24495 - DNA, 50 bp, synthetic construct
  source 1..50: mol_type = other DNA
caaacactcaacaaataataaataaatctaaaataatcctcaaaaataac

SEQ ID NO: 24496 - DNA, 50 bp, synthetic construct
  source 1..50: mol_type = other DNA
tacttactaaatatttatacaacttacacttaataaacaaaaataatctc

SEQ ID NO: 24497 - DNA, 50 bp, synthetic construct
  source 1..50: mol_type = other DNA
atacaacttacacttaataaacaaaaataatctcraaaattttaaacacc

SEQ ID NO: 24498 - DNA, 50 bp, synthetic construct
  source 1..50: mol_type = other DNA
aaaataatctcraaaattttaaacaccrctattacttctctcaattacac

SEQ ID NO: 24499 - DNA, 50 bp, synthetic construct
  source 1..50: mol_type = other DNA
taaaaactacctaaactaaacactaaattttccataaaaaaattattttc

SEQ ID NO: 24500 - DNA, 50 bp, synthetic construct
  source 1..50: mol_type = other DNA
aactacctcrtaaaaccactactaaaataaaaaactattttacaattaac

SEQ ID NO: 24501 - DNA, 50 bp, synthetic construct
  source 1..50: mol_type = other DNA
cacataaacrttaactacaaaacaaccttctattccaacaataactctac

SEQ ID NO: 24502 - DNA, 50 bp, synthetic construct
  source 1..50: mol_type = other DNA
taaccactttaatttcttataatttacattttattacaaactctaataac

SEQ ID NO: 24503 - DNA, 50 bp, synthetic construct
  source 1..50: mol_type = other DNA
aaatactaaatcacttctctaaaaaactatctttttattaaacaaaacac

SEQ ID NO: 24504 - DNA, 50 bp, synthetic construct
  source 1..50: mol_type = other DNA
aacacracataaataaatatttaaattcactttttaaaatactaaaaccc

SEQ ID NO: 24505 - DNA, 50 bp, synthetic construct
  source 1..50: mol_type = other DNA
cracataaataaatatttaaattcactttttaaaatactaaaacccracc

SEQ ID NO: 24506 - DNA, 50 bp, synthetic construct
  source 1..50: mol_type = other DNA
acacatacacacraacaaaattctaaaaaccrttcacccactattaaaac

SEQ ID NO: 24507 - DNA, 50 bp, synthetic construct
  source 1..50: mol_type = other DNA
ccactattaaaacrtaacaaaaaaatatccctaactttaaactcaaattc

SEQ ID NO: 24508 - DNA, 50 bp, synthetic construct
  source 1..50: mol_type = other DNA
aacrtaacaaaaaaatatccctaactttaaactcaaattcratacctacc

SEQ ID NO: 24509 - DNA, 50 bp, synthetic construct
  source 1..50: mol_type = other DNA
ttataaaaacttttattaccrcccctttttctcccaacaaactatacrac

SEQ ID NO: 24510 - DNA, 50 bp, synthetic construct
  source 1..50: mol_type = other DNA
aaacraaataactacaacctctactcaattcctattattttccccttaac

SEQ ID NO: 24511 - DNA, 50 bp, synthetic construct
  source 1..50: mol_type = other DNA
aaacacttatcaattaaacctccatacttaaacrctctccrctaaacatc

SEQ ID NO: 24512 - DNA, 50 bp, synthetic construct
  source 1..50: mol_type = other DNA
aaacaaaataaaacacttatcaattaaacctccatacttaaacrctctcc

SEQ ID NO: 24513 - DNA, 50 bp, synthetic construct
  source 1..50: mol_type = other DNA
aaaaaataaacaaaataaaacacttatcaattaaacctccatacttaaac

SEQ ID NO: 24514 - DNA, 50 bp, synthetic construct
  source 1..50: mol_type = other DNA
tttaaatataaaaacctaactaacaaatatttcatcttactcattctctc

SEQ ID NO: 24515 - DNA, 50 bp, synthetic construct
  source 1..50: mol_type = other DNA
tataaaaacctaactaacaaatatttcatcttactcattctctcrtattc

SEQ ID NO: 24516 - DNA, 50 bp, synthetic construct
  source 1..50: mol_type = other DNA
taaaaacctaactaacaaatatttcatcttactcattctctcrtattcrc

SEQ ID NO: 24517 - DNA, 50 bp, synthetic construct
  source 1..50: mol_type = other DNA
atatttcatcttactcattctctcrtattcrcraatctattctacattcc

SEQ ID NO: 24518 - DNA, 50 bp, synthetic construct
  source 1..50: mol_type = other DNA
aaactcaacaaacraataatctaattttataattttaaaatcactctaac

SEQ ID NO: 24519 - DNA, 50 bp, synthetic construct
  source 1..50: mol_type = other DNA
tcraaatcrtaccacttacactccaacttaaacaacaaaaataaaactcc

SEQ ID NO: 24520 - DNA, 50 bp, synthetic construct
  source 1..50: mol_type = other DNA
atcttacaccatactccatttaattctaatctctataacatctacttaac

SEQ ID NO: 24521 - DNA, 50 bp, synthetic construct
  source 1..50: mol_type = other DNA
atttccattactaatcactctccatctctacccccaatacattctttatc

SEQ ID NO: 24522 - DNA, 50 bp, synthetic construct
  source 1..50: mol_type = other DNA
tatacctctaccccacaattaaaaaaatacacrttcctcctaattccttc

SEQ ID NO: 24523 - DNA, 50 bp, synthetic construct
  source 1..50: mol_type = other DNA
aatccattcctctcttatttataataatctaaaaattaaacaattaaaac

SEQ ID NO: 24524 - DNA, 50 bp, synthetic construct; identical to SEQ ID NO: 24523
  source 1..50: mol_type = other DNA

SEQ ID NO: 24525 - DNA, 50 bp, synthetic construct
  source 1..50: mol_type = other DNA
taaaaaaaacccaaacatcattaaacaaaccaataaatcacctaacttcc

SEQ ID NO: 24526 - DNA, 50 bp, synthetic construct
  source 1..50: mol_type = other DNA
acaacaattcttcttatctatttccaaaaaataatcctacaaataatacc

SEQ ID NO: 24527 - DNA, 50 bp, synthetic construct
  source 1..50: mol_type = other DNA
ttatctatttccaaaaaataatcctacaaataataccrattcataaatac

SEQ ID NO: 24528 - DNA, 50 bp, synthetic construct
  source 1..50: mol_type = other DNA
aaaaataatcctacaaataataccrattcataaatacractaataaatcc

SEQ ID NO: 24529 - DNA, 50 bp, synthetic construct
  source 1..50: mol_type = other DNA
ccatctatacaaaaaaccaaaattttatcattattcaaatcaaaaaatcc

SEQ ID NO: 24530 - DNA, 50 bp, synthetic construct
  source 1..50: mol_type = other DNA
caaaaaaccaaaattttatcattattcaaatcaaaaaatccraaatcaac

SEQ ID NO: 24531 - DNA, 50 bp, synthetic construct
  source 1..50: mol_type = other DNA
tttaaaaaaattcaaaatcttacaaccaaaaactacataactaataaacc

SEQ ID NO: 24532 - DNA, 50 bp, synthetic construct
  source 1..50: mol_type = other DNA
aacctccaaactatccttattcaatactaaacataaaccatactaacttc

SEQ ID NO: 24533 - DNA, 50 bp, synthetic construct
  source 1..50: mol_type = other DNA
aaaaaacaaaatcatattcatttctaattctttaaactcccttccctttc

SEQ ID NO: 24534 - DNA, 50 bp, synthetic construct
  source 1..50: mol_type = other DNA
aacctcrtcttaccaaataatcaaaaactaacaaaattaaaaataaaaac

SEQ ID NO: 24535 - DNA, 50 bp, synthetic construct
  source 1..50: mol_type = other DNA
aaacttaaactaatcacaaactcaaaccaatacatctcctttccttctcc

SEQ ID NO: 24536 - DNA, 50 bp, synthetic construct
  source 1..50: mol_type = other DNA
ttcaaacaattcttcttctcccaaccttcccaataactaaaactacaaac

SEQ ID NO: 24537 - DNA, 50 bp, synthetic construct
  source 1..50: mol_type = other DNA
accaacaaatcacaaataaatctctaactccaactctactcaacaaaaac

SEQ ID NO: 24538 - DNA, 50 bp, synthetic construct
  source 1..50: mol_type = other DNA
caaaaaataaaacttctaaacatctaaaacttacttcatctctaacrctc

SEQ ID NO: 24539 - DNA, 50 bp, synthetic construct
  source 1..50: mol_type = other DNA
aaaacaaaaaataaaacttctaaacatctaaaacttacttcatctctaac

SEQ ID NO: 24540 - DNA, 50 bp, synthetic construct
  source 1..50: mol_type = other DNA
aaatttcaaatacctaaaaactttactctctattcctccaaaattcctac

SEQ ID NO: 24541 - DNA, 50 bp, synthetic construct
  source 1..50: mol_type = other DNA
ttccctaaatcaaattctctaaatctaaaaattccaaaaaatcttaaacc

SEQ ID NO: 24542 - DNA, 50 bp, synthetic construct
  source 1..50: mol_type = other DNA
attatcaccaaaaaccaacatctctaaaaaaacaattaaactattacatc

SEQ ID NO: 24543 - DNA, 50 bp, synthetic construct
  source 1..50: mol_type = other DNA
aaataattatttaaaattaaacccaaataaaaaaaactccataactcacc

SEQ ID NO: 24544 - DNA, 50 bp, synthetic construct
  source 1..50: mol_type = other DNA
ttaaacccaaataaaaaaaactccataactcaccraaattaacrattaac

SEQ ID NO: 24545 - DNA, 50 bp, synthetic construct
  source 1..50: mol_type = other DNA
aataaaatattcaaaaccacccaactcataaaaacaaaacataaccraac

SEQ ID NO: 24546 - DNA, 50 bp, synthetic construct
  source 1..50: mol_type = other DNA
atattaaccaaaataatctaaatctcctaaccttataatcctcccrtctc

SEQ ID NO: 24547 - DNA, 50 bp, synthetic construct
  source 1..50: mol_type = other DNA
atcacaaaatcaaaaaatccaaaccatcttaaccaatataataaaacccc

SEQ ID NO: 24548 - DNA, 50 bp, synthetic construct
  source 1..50: mol_type = other DNA
ttacaataaaccaaaattataccactacactacaacctaaataacaaaac

SEQ ID NO: 24549 - DNA, 50 bp, synthetic construct
  source 1..50: mol_type = other DNA
ttcactcttattacccaaactataatacaataacrtcatctcaactcacc

SEQ ID NO: 24550 - DNA, 50 bp, synthetic construct
  source 1..50: mol_type = other DNA
tttttctaaacaaaatttcactcttattacccaaactataatacaataac

SEQ ID NO: 24551 - DNA, 50 bp, synthetic construct
  source 1..50: mol_type = other DNA
tattctaactctctcattaactaactataaaaccccttaacccctcaccc

SEQ ID NO: 24552 - DNA, 50 bp, synthetic construct
  source 1..50: mol_type = other DNA
cttcraacttcctcccaactctcacactacataattctaaaccaaaatcc

SEQ ID NO: 24553 - DNA, 50 bp, synthetic construct
  source 1..50: mol_type = other DNA
aaaacaccaaaatccaacraaactaccctttaaaatctacccraataacc

SEQ ID NO: 24554 - DNA, 50 bp, synthetic construct
  source 1..50: mol_type = other DNA
actactcraacaaattctaaaaaacaacctcrctaaattctaatacctcc

SEQ ID NO: 24555 - DNA, 50 bp, synthetic construct
  source 1..50: mol_type = other DNA
cccaaattaattcaaaaacacraaataattacttaacctcctaatacctc

SEQ ID NO: 24556 - DNA, 50 bp, synthetic construct
  source 1..50: mol_type = other DNA
accaacacaaaaaaccataaaaaataacacaataaaaattatattaaacc

SEQ ID NO: 24557 - DNA, 50 bp, synthetic construct
  source 1..50: mol_type = other DNA
aactaacctcaactaaatacttctcatttaaaaattctcaaataacaacc

SEQ ID NO: 24558 - DNA, 50 bp, synthetic construct
  source 1..50: mol_type = other DNA
aatacttctcatttaaaaattctcaaataacaaccraactaaaatcatac

SEQ ID NO: 24559 - DNA, 50 bp, synthetic construct
  source 1..50: mol_type = other DNA
actatatataaataccacataaaaaaaccacacaaaaaaaccacaaaaac

SEQ ID NO: 24560 - DNA, 50 bp, synthetic construct
  source 1..50: mol_type = other DNA
ataccttcaaaaaccctaaatatatccatatacaaaatccaaactatatc

SEQ ID NO: 24561 - DNA, 50 bp, synthetic construct
  source 1..50: mol_type = other DNA
attcctttaatttaatatataatattaaaacrcaaccaaacrctccatcc

SEQ ID NO: 24562 - DNA, 50 bp, synthetic construct
  source 1..50: mol_type = other DNA
aaaaaacaccttcctttaattcaatacataatattaaaatacraccaaac

SEQ ID NO: 24563 - DNA, 50 bp, synthetic construct
  source 1..50: mol_type = other DNA
cttcctttaattcaatacataatattaaaatacraccaaacrctctatcc

SEQ ID NO: 24564 - DNA, 50 bp, synthetic construct
  source 1..50: mol_type = other DNA
tatacaataactaaaaattaatcaaaactccaaaatacaccrcaaacacc

SEQ ID NO: 24565 - DNA, 50 bp, synthetic construct
  source 1..50: mol_type = other DNA
aacrcacctaaatcacaaataactccctattaataaatccraaaatcatc

SEQ ID NO: 24566 - DNA, 50 bp, synthetic construct
  source 1..50: mol_type = other DNA
aacrataatcctcraactcattaataaaaaatcatttataactcaaatac

SEQ ID NO: 24567 - DNA, 50 bp, synthetic construct
  source 1..50: mol_type = other DNA
tataactaccaacacttacctccacaataaaaaactcraaataaataatc

SEQ ID NO: 24568 - DNA, 50 bp, synthetic construct
  source 1..50: mol_type = other DNA
ataaaaatcattctataactaccaacacttacctccacaataaaaaactc

SEQ ID NO: 24569 - DNA, 50 bp, synthetic construct
  source 1..50: mol_type = other DNA
cttaatttaaaatatcaaaaatactaaaataacccrcaactattatcccc

SEQ ID NO: 24570 - DNA, 50 bp, synthetic construct
  source 1..50: mol_type = other DNA
taacatttaaattactcacttccctatcttccatcttccccctaataacc

SEQ ID NO: 24571 - DNA, 50 bp, synthetic construct
  source 1..50: mol_type = other DNA
cattctctaaataataataaacaaccrattctttcaaaccttccaacrcc

SEQ ID NO: 24572 - DNA, 50 bp, synthetic construct
  source 1..50: mol_type = other DNA
actaaaaactcccaaataactcaaactacrtataaacrctttttacccac

SEQ ID NO: 24573 - DNA, 50 bp, synthetic construct
  source 1..50: mol_type = other DNA
ttctacctcraaaactaaaaactcccaaataactcaaactacrtataaac

SEQ ID NO: 24574 - DNA, 50 bp, synthetic construct
  source 1..50: mol_type = other DNA
aaacaccrttcttaaaaaacaataaatttcraccaatatacaccrttccc

SEQ ID NO: 24575 - DNA, 50 bp, synthetic construct
  source 1..50: mol_type = other DNA
ttaaataaacaccrttcttaaaaaacaataaatttcraccaatatacacc

SEQ ID NO: 24576 - DNA, 50 bp, synthetic construct
  source 1..50: mol_type = other DNA
acctatttcacattttaaataaacaccrttcttaaaaaacaataaatttc

SEQ ID NO: 24577 - DNA, 50 bp, synthetic construct
  source 1..50: mol_type = other DNA
aaatctattacttctcaaaaacratatctacttaaaatataaaacaaacc

SEQ ID NO: 24578 - DNA, 50 bp, synthetic construct
  source 1..50: mol_type = other DNA
ctattacttctcaaaaacratatctacttaaaatataaaacaaaccraac

SEQ ID NO: 24579 - DNA, 50 bp, synthetic construct
  source 1..50: mol_type = other DNA
aaacctttacacatactattcctactacctaaaattctcttctacttccc

SEQ ID NO: 24580 - DNA, 50 bp, synthetic construct
  source 1..50: mol_type = other DNA
ctatccctaacttcatcttacaccatcctaacccatcaaatcccaaatac

SEQ ID NO: 24581 - DNA, 50 bp, synthetic construct
  source 1..50: mol_type = other DNA
acaaaataaaaccaaaaacaaaaactaaaaccaaatcatacatacraatc

SEQ ID NO: 24582 - DNA, 50 bp, synthetic construct
  source 1..50: mol_type = other DNA
tactcacccctattacaaaaacaaaacaattaaaatacaaataaaacctc

SEQ ID NO: 24583 - DNA, 50 bp, synthetic construct
  source 1..50: mol_type = other DNA
aaacaaaaatcaaaattacrtaaacrtcattttcctccttacaaacaaac

SEQ ID NO: 24584 - DNA, 50 bp, synthetic construct
  source 1..50: mol_type = other DNA
aacrtaactctcaaataaatattatatttctactatttccctttcctatc

SEQ ID NO: 24585 - DNA, 50 bp, synthetic construct
  source 1..50: mol_type = other DNA
cctcctacccaaacctctctatactacccaatcctcataacattatttac

SEQ ID NO: 24586 - DNA, 50 bp, synthetic construct
  source 1..50: mol_type = other DNA
caaaaaaataacacactcccacttctcaaacraacctaatctacacatac

SEQ ID NO: 24587 - DNA, 50 bp, synthetic construct
  source 1..50: mol_type = other DNA
accccaaaataaataactaatacaaatctaaacaattactcaaaaaactc

SEQ ID NO: 24588 - DNA, 50 bp, synthetic construct
  source 1..50: mol_type = other DNA
taaattcatctacttaaaaataactcaaactcctaacttttaaaacaaac

SEQ ID NO: 24589 - DNA, 50 bp, synthetic construct
  source 1..50: mol_type = other DNA
tacrtcacccctctaccaaactaactctaaaaataacaaacaaccaaatc

SEQ ID NO: 24590 - DNA, 50 bp, synthetic construct
  source 1..50: mol_type = other DNA
ccrccccaaactttataaataacacccaataataaaaaaactattcctac

SEQ ID NO: 24591 - DNA, 50 bp, synthetic construct
  source 1..50: mol_type = other DNA
acrcaaaaacaatcctcctactactaaatatcacccacaaaacctaaaac

SEQ ID NO: 24592 - DNA, 50 bp, synthetic construct
  source 1..50: mol_type = other DNA
aaaaaaacataaaaacccaaattccccaaaacactaattacaatattacc

SEQ ID NO: 24593 - DNA, 50 bp, synthetic construct
  source 1..50: mol_type = other DNA
acaacattataaccaatatcctaaaaaacctaaactctcatactcccctc

SEQ ID NO: 24594 - DNA, 50 bp, synthetic construct
  source 1..50: mol_type = other DNA
craacaactaaatcaactccaacaaacaaaaaatcaaaaacaactactcc

SEQ ID NO: 24595 - DNA, 50 bp, synthetic construct
  source 1..50: mol_type = other DNA
craaacaattacccctaacttcctatctactaaaactaacccaactatcc

SEQ ID NO: 24596 - DNA, 50 bp, synthetic construct
  source 1..50: mol_type = other DNA
aaaacaaacacaaaatttctataactaaaaaaaccraaatataaccacac

SEQ ID NO: 24597 - DNA, 50 bp, synthetic construct
  source 1..50: mol_type = other DNA
tcaaaaaccattaacaaaacaaacacaaaatttctataactaaaaaaacc

SEQ ID NO: 24598 - DNA, 50 bp, synthetic construct
  source 1..50: mol_type = other DNA
actacaaaaaccctatatttactctatcaataacctttaaaaaaacaaac

SEQ ID NO: 24599 - DNA, 50 bp, synthetic construct
  source 1..50: mol_type = other DNA
acataccaaacactattaaaaaactaaaaattcaacaacacctataaacc

SEQ ID NO: 24600 - DNA, 50 bp, synthetic construct
  source 1..50: mol_type = other DNA
aaaatttaaatcrtcctaccattttctactctaaaaaacctctaaatcac

SEQ ID NO: 24601 - DNA, 50 bp, synthetic construct
  source 1..50: mol_type = other DNA
ctaccattttctactctaaaaaacctctaaatcacrtcaaacttcctaac

SEQ ID NO: 24602 - DNA, 50 bp, synthetic construct
  source 1..50: mol_type = other DNA
caattctccaacctaaaaactaaaccctctaaaatttcctatccaacaac

SEQ ID NO: 24603 - DNA, 50 bp, synthetic construct
  source 1..50: mol_type = other DNA
caatttaaacaacctccctaaatccccaaatctaaccaatacaactaaac

SEQ ID NO: 24604 - DNA, 50 bp, synthetic construct
  source 1..50: mol_type = other DNA
ccaacrtcaccaaataaaaaacrtacctataaatattctccacttccctc

SEQ ID NO: 24605 - DNA, 50 bp, synthetic construct
  source 1..50: mol_type = other DNA
tacaccccatttatacttcatcaacacaccaacrtcaccaaataaaaaac

SEQ ID NO: 24606 - DNA, 50 bp, synthetic construct
  source 1..50: mol_type = other DNA
ataacaacaaaaaaacacaaacrtcctaaacatacctcaacaaaaactac

SEQ ID NO: 24607 - DNA, 50 bp, synthetic construct
  source 1..50: mol_type = other DNA
aacaaaaaaacacaaacrtcctaaacatacctcaacaaaaactacrtctc

SEQ ID NO: 24608 - DNA, 50 bp, synthetic construct
  source 1..50: mol_type = other DNA
aacatacctcaacaaaaactacrtctcrctatctatacaaaacaaaaaac

SEQ ID NO: 24609 - DNA, 50 bp, synthetic construct
  source 1..50: mol_type = other DNA
ttcracaatctacttaatttcacacaataaaatattttctaaatcttccc

SEQ ID NO: 24610 - DNA, 50 bp, synthetic construct
  source 1..50: mol_type = other DNA
acacacataaaatactacttaaatcttcaacacrtatatccatactattc

SEQ ID NO: 24611 - DNA, 50 bp, synthetic construct
  source 1..50: mol_type = other DNA
ccttacaaaaaattacaacacacataaaatactacttaaatcttcaacac

SEQ ID NO: 24612 - DNA, 50 bp, synthetic construct
  source 1..50: mol_type = other DNA
ccaactcctctacctatcacrctaataataaaatacrcaacaaaactatc

SEQ ID NO: 24613 - DNA, 50 bp, synthetic construct
  source 1..50: mol_type = other DNA
aaacttcaacataaactaccactaaataaaaaaaacracaaccctactac

SEQ ID NO: 24614 - DNA, 50 bp, synthetic construct
  source 1..50: mol_type = other DNA
ttctatcttacttacccacccaaaacraatctatcaatcaaaatacaacc

SEQ ID NO: 24615 - DNA, 50 bp, synthetic construct
  source 1..50: mol_type = other DNA
ctaaaaccctaaaaacacaaatatttctatcttacttacccacccaaaac

SEQ ID NO: 24616 - DNA, 50 bp, synthetic construct
  source 1..50: mol_type = other DNA
attattacaaactaaaaccracaaaatcttaccaaaataaaactaaactc

SEQ ID NO: 24617 - DNA, 50 bp, synthetic construct
  source 1..50: mol_type = other DNA
cccaacctacaacaactacacaacattcraccttaactcatttccttatc

SEQ ID NO: 24618 - DNA, 50 bp, synthetic construct
  source 1..50: mol_type = other DNA
ctacaaaacttctaaaacacrtccaactacrcattaaaaccttaaacctc

SEQ ID NO: 24619 - DNA, 50 bp, synthetic construct
  source 1..50: mol_type = other DNA
tcatttccttatcrcctaacraaactcaaaactctaatacrcaactaaac

SEQ ID NO: 24620 - DNA, 50 bp, synthetic construct
  source 1..50: mol_type = other DNA
acctaacctatatactaaaaaaaataccaaacaaaaatccaaaaaacaac

SEQ ID NO: 24621 - DNA, 50 bp, synthetic construct
  source 1..50: mol_type = other DNA
ccaccaaccttaataaaatccttaaaacrctttaaacaatccrtaaaccc

SEQ ID NO: 24622 - DNA, 50 bp, synthetic construct
  source 1..50: mol_type = other DNA
aataaaacccaccaaccttaataaaatccttaaaacrctttaaacaatcc

SEQ ID NO: 24623 - DNA, 50 bp, synthetic construct
  source 1..50: mol_type = other DNA
aaaaaaaacactaaaataaaacccaccaaccttaataaaatccttaaaac

SEQ ID NO: 24624 - DNA, 50 bp, synthetic construct
  source 1..50: mol_type = other DNA
ataacaaaaataaaaaatatccaaataaaacccttcataataccaaccac

SEQ ID NO: 24625 - DNA, 50 bp, synthetic construct
  source 1..50: mol_type = other DNA
tcatcataccactttatatttcctttatattttaaataataacttacatc

SEQ ID NO: 24626 - DNA, 50 bp, synthetic construct
  source 1..50: mol_type = other DNA
ataacttacatcraatatacacatctcaaatatataaatcaaatttccac

SEQ ID NO: 24627 - DNA, 50 bp, synthetic construct
  source 1..50: mol_type = other DNA
tcraatatacacatctcaaatatataaatcaaatttccacrtatttaacc

SEQ ID NO: 24628 - DNA, 50 bp, synthetic construct
  source 1..50: mol_type = other DNA
aacaaaaaaaaaccttttataccaaccccaactaaacacrttaaaaacac

SEQ ID NO: 24629 - DNA, 50 bp, synthetic construct
  source 1..50: mol_type = other DNA
caaaaaaaacctaaaattcctaatatttctaaatcaaacrtactttcaac

SEQ ID NO: 24630 - DNA, 50 bp, synthetic construct
  source 1..50: mol_type = other DNA
aataataaaaaccaaaaatatatcaactcctaaacccctaaaatccccac

SEQ ID NO: 24631 - DNA, 50 bp, synthetic construct
  source 1..50: mol_type = other DNA
taaaaaaccaaaaaacttaactctaaatcaataacatctacctaacatac

SEQ ID NO: 24632 - DNA, 50 bp, synthetic construct
  source 1..50: mol_type = other DNA
ctactaacccaaaaccaaaccccttaatttctcatttaaaactactaccc

SEQ ID NO: 24633 - DNA, 50 bp, synthetic construct
  source 1..50: mol_type = other DNA
ctaacccaaaaccaaaccccttaatttctcatttaaaactactacccrtc

SEQ ID NO: 24634 - DNA, 50 bp, synthetic construct
  source 1..50: mol_type = other DNA
accccttaatttctcatttaaaactactacccrtcrtaaaaaataaaacc

SEQ ID NO: 24635 - DNA, 50 bp, synthetic construct
  source 1..50: mol_type = other DNA
aacaaaaaaaactctacataaaatcacaaaacaaaacctatcctaaaaac

SEQ ID NO: 24636 - DNA, 50 bp, synthetic construct
  source 1..50: mol_type = other DNA
cttctacaaacacaataaccrtaataaaaaattcaaatcacaacrcaacc

SEQ ID NO: 24637 - DNA, 50 bp, synthetic construct
  source 1..50: mol_type = other DNA
aatcaaattctaaatctttacaactatttacttctacaaacacaataacc

SEQ ID NO: 24638 - DNA, 50 bp, synthetic construct
  source 1..50: mol_type = other DNA
aacatcataccaactaatctcctactaataaataattccttaacttcctc

SEQ ID NO: 24639 - DNA, 50 bp, synthetic construct
  source 1..50: mol_type = other DNA
caactcttctaaaccttccaactcctaactattaataaataaacaaaacc

SEQ ID NO: 24640 - DNA, 50 bp, synthetic construct
  source 1..50: mol_type = other DNA
caaaacrctcctaacaaaacttaaccaaaatttaaataaaaaacacaaac

SEQ ID NO: 24641 - DNA, 50 bp, synthetic construct
  source 1..50: mol_type = other DNA
aaacrctcctaacaaaacttaaccaaaatttaaataaaaaacacaaacrc

SEQ ID NO: 24642 - DNA, 50 bp, synthetic construct
  source 1..50: mol_type = other DNA
aaaacacaaacrcrtaaataccctaattcccttttcactcactaataatc

SEQ ID NO: 24643 - DNA, 50 bp, synthetic construct
  source 1..50: mol_type = other DNA
aaaaacaaaaacacacrctaaataaaaaatcrcatactattaaaactaac

SEQ ID NO: 24644 - DNA, 50 bp, synthetic construct
  source 1..50: mol_type = other DNA
tccttacccaacrtatatccctatttctctttaaacaactcttcttcaac

SEQ ID NO: 24645 - DNA, 50 bp, synthetic construct
  source 1..50: mol_type = other DNA
ttccctaaaactcttccttatatatataatacrtatacactcrtataaac

SEQ ID NO: 24646 - DNA, 50 bp, synthetic construct
  source 1..50: mol_type = other DNA
aatatcttttaacaaataaataattaaacaaactacaaaccaaccaaacc

SEQ ID NO: 24647 - DNA, 50 bp, synthetic construct
  source 1..50: mol_type = other DNA
aaataaccctttaaaattaactattttccttcaatataattccctaaaac

SEQ ID NO: 24648 - DNA, 50 bp, synthetic construct
  source 1..50: mol_type = other DNA
cacacaacacccttaaaatacaaaatcacaaaaataaaaaacaaattaac

SEQ ID NO: 24649 - DNA, 50 bp, synthetic construct
  source 1..50: mol_type = other DNA
caaaatcraaacactaatactaccaaaacacaaaacatcaaaacractcc

SEQ ID NO: 24650 - DNA, 50 bp, synthetic construct
  source 1..50: mol_type = other DNA
caacaccaaaatcraaacactaatactaccaaaacacaaaacatcaaaac

SEQ ID NO: 24651 - DNA, 50 bp, synthetic construct
  source 1..50: mol_type = other DNA
ccccctaaataacatctaataaaattcaacrcactctcaacaccaaaatc

SEQ ID NO: 24652 - DNA, 50 bp, synthetic construct
  source 1..50: mol_type = other DNA
ctctacttcatcaaaaattaaaaacacttaactctcaacaaacttaaatc

SEQ ID NO: 24653 - DNA, 50 bp, synthetic construct
  source 1..50: mol_type = other DNA
actaaaaacttttaaaaaaattctatttaacaattactttaaaatccaac

SEQ ID NO: 24654 - DNA, 50 bp, synthetic construct
  source 1..50: mol_type = other DNA
cctcaaaaatcctcaatcaaaataacacacaacaaatacaaatctcccac

SEQ ID NO: 24655 - DNA, 50 bp, synthetic construct
  source 1..50: mol_type = other DNA
taaaataatctaaaccrcctactaaaatatcratcratactacattaaac

SEQ ID NO: 24656 - DNA, 50 bp, synthetic construct
  source 1..50: mol_type = other DNA
aaactaaaactactataaaataatctaaaccrcctactaaaatatcratc

SEQ ID NO: 24657 - DNA, 50 bp, synthetic construct
  source 1..50: mol_type = other DNA
accraaactaaaactactataaaataatctaaaccrcctactaaaatatc

SEQ ID NO: 24658 - DNA, 50 bp, synthetic construct
  source 1..50: mol_type = other DNA
aaatcrtaaaacacaaccraaactaaaactactataaaataatctaaacc

SEQ ID NO: 24659 - DNA, 50 bp, synthetic construct
  source 1..50: mol_type = other DNA
acattaaaatttataacaacaacctccctactccccaataaacraaaatc

SEQ ID NO: 24660 - DNA, 50 bp, synthetic construct
  source 1..50: mol_type = other DNA
aacatccatacctaacccctcctaaaaaactcaacaaataaaaattaatc

SEQ ID NO: 24661 - DNA, 50 bp, synthetic construct
  source 1..50: mol_type = other DNA
aaaaaaccaaacataaatactaccttcaaaactccctactaatacatacc

SEQ ID NO: 24662 - DNA, 50 bp, synthetic construct
  source 1..50: mol_type = other DNA
accatctaaaccttactaaataatatatactacrcctataaaaacctccc

SEQ ID NO: 24663 - DNA, 50 bp, synthetic construct
  source 1..50: mol_type = other DNA
atataaccraaataactaccatctaaaccttactaaataatatatactac

SEQ ID NO: 24664 - DNA, 50 bp, synthetic construct
  source 1..50: mol_type = other DNA
tcaaatttactatacaaatttaatcacaaacattaaaactaaaatcaatc

SEQ ID NO: 24665 - DNA, 50 bp, synthetic construct
  source 1..50: mol_type = other DNA
acaaaaaactctctaaaaacatactcaccccaaaataacaacaacaaccc

SEQ ID NO: 24666 - DNA, 50 bp, synthetic construct
  source 1..50: mol_type = other DNA
caacaaactctactataaatccaatatatatccttaaaatcaattatctc

SEQ ID NO: 24667 - DNA, 50 bp, synthetic construct
  source 1..50: mol_type = other DNA
actataaatccaatatatatccttaaaatcaattatctcractacccaac

SEQ ID NO: 24668 - DNA, 50 bp, synthetic construct
  source 1..50: mol_type = other DNA
tccctccaacaatacttataatattcctatatacacacacactctatccc

SEQ ID NO: 24669 - DNA, 50 bp, synthetic construct
  source 1..50: mol_type = other DNA
atttcttttaaatcaaaccttttatctccaaaattaactaataacacctc

SEQ ID NO: 24670 - DNA, 50 bp, synthetic construct
  source 1..50: mol_type = other DNA
attcaaatatctacttttcacataaactctttaacaaaataataaactac

SEQ ID NO: 24671 - DNA, 50 bp, synthetic construct
  source 1..50: mol_type = other DNA
cactcrtaaataatcactaacrctcaaaacatactaaaacaaaaattctc

SEQ ID NO: 24672 - DNA, 50 bp, synthetic construct
  source 1..50: mol_type = other DNA
aaaaataatctaaaaaaccrtataccaaccactcrtaaataatcactaac

SEQ ID NO: 24673 - DNA, 50 bp, synthetic construct
  source 1..50: mol_type = other DNA
taccaaatacrcaataaaaaataatctaaaaaaccrtataccaaccactc

SEQ ID NO: 24674 - DNA, 50 bp, synthetic construct
  source 1..50: mol_type = other DNA
atctcaacatattctaaacrccaataattacctacraataactaacacac

SEQ ID NO: 24675 - DNA, 50 bp, synthetic construct
  source 1..50: mol_type = other DNA
caacattctactacaaatactataatcaaaaccaaacaaacaacaaaacc

SEQ ID NO: 24676 - DNA, 50 bp, synthetic construct
  source 1..50: mol_type = other DNA
cttccaaccaatctctaacaaaatattaaatcatccaacttatttctctc

SEQ ID NO: 24677 - DNA, 50 bp, synthetic construct
  source 1..50: mol_type = other DNA
acaaaatattaaatcatccaacttatttctctcrtttctcccctcccttc

SEQ ID NO: 24678 - DNA, 50 bp, synthetic construct
  source 1..50: mol_type = other DNA
taacacccaaaatatacctaaataatactactaaataaataataataacc

SEQ ID NO: 24679 - DNA, 50 bp, synthetic construct
  source 1..50: mol_type = other DNA
tcttaacttctaaaacaatctcaccaacattcaaaatatatttaaaaacc

SEQ ID NO: 24680 - DNA, 50 bp, synthetic construct
  source 1..50: mol_type = other DNA
caattcaaattaaaaatctttattcccataacataaaaatacccataccc

SEQ ID NO: 24681 - DNA, 50 bp, synthetic construct
  source 1..50: mol_type = other DNA
ctcaaatacataatcattttaaccacaaaaaaatcaatatttaactaaac

SEQ ID NO: 24682 - DNA, 50 bp, synthetic construct
  source 1..50: mol_type = other DNA
ttaaaaaacattctaattttaaaatcacacactccaaactaaacttaacc

SEQ ID NO: 24683 - DNA, 50 bp, synthetic construct
  source 1..50: mol_type = other DNA
caaatccaatctaaaatatataattccaaaaccaaaatattctttaacac

SEQ ID NO: 24684 - DNA, 50 bp, synthetic construct
  source 1..50: mol_type = other DNA
ccaatacataacattaccaaataaataaaactaccataaccaaaaatttc

SEQ ID NO: 24685 - DNA, 50 bp, synthetic construct
  source 1..50: mol_type = other DNA
aaaaccaaaataccttaactcacctaacraaaatcactatcaatcctatc

SEQ ID NO: 24686 - DNA, 50 bp, synthetic construct
  source 1..50: mol_type = other DNA
aaaaaaacacaccacacataaccaaaacracaaaattaacaataatcctc

SEQ ID NO: 24687 - DNA, 50 bp, synthetic construct
  source 1..50: mol_type = other DNA
aaaaataaccttcatacctaaatacccaaaaaaaatattaaaacctaaac

SEQ ID NO: 24688 - DNA, 50 bp, synthetic construct
  source 1..50: mol_type = other DNA
actttataacttaacacataataacrttactccaaaatacaatatacccc

SEQ ID NO: 24689 - DNA, 50 bp, synthetic construct
  source 1..50: mol_type = other DNA
aaaataccacataaaaaccataaacraaatacactacatcttaaaacaac

SEQ ID NO: 24690 - DNA, 50 bp, synthetic construct
  source 1..50: mol_type = other DNA
aaaaattacacattcaaaatccctaaaaaaccctcaacaaatcattatcc

SEQ ID NO: 24691 - DNA, 50 bp, synthetic construct
  source 1..50: mol_type = other DNA
tacaaactctcttttaaaaaaactaacttaatactaaacaatccctcttc

SEQ ID NO: 24692 - DNA, 50 bp, synthetic construct
  source 1..50: mol_type = other DNA
accaaaaacccccacacraactcctaaataaaaaactcaacactataaac

SEQ ID NO: 24693 - DNA, 50 bp, synthetic construct
  source 1..50: mol_type = other DNA
aaatttacaatatatactccctttctctcaacccatttaaactcattctc

SEQ ID NO: 24694 - DNA, 50 bp, synthetic construct
  source 1..50: mol_type = other DNA
tttaacttcttcctaaaactactccaaaaaccttccttaatcccaaacac

SEQ ID NO: 24695 - DNA, 50 bp, synthetic construct
  source 1..50: mol_type = other DNA
ctaaaaataacracaaaatacrtttttctataaaaattaccccctccacc

SEQ ID NO: 24696 - DNA, 50 bp, synthetic construct
  source 1..50: mol_type = other DNA
aaataaccccaacaaaattacraaaattcrtaaataaacctaaaaataac

SEQ ID NO: 24697 - DNA, 50 bp, synthetic construct
  source 1..50: mol_type = other DNA
ataatacccctaaaatctaacttcttttaaaataaccccaacaaaattac

SEQ ID NO: 24698 - DNA, 50 bp, synthetic construct
  source 1..50: mol_type = other DNA
tataatataaccataaactcctacctccaaaccctaaactaaaaaccctc

SEQ ID NO: 24699 - DNA, 50 bp, synthetic construct
  source 1..50: mol_type = other DNA
aactcacaaactacraaaacttccttcccactacctattttccttaaatc

SEQ ID NO: 24700 - DNA, 50 bp, synthetic construct
  source 1..50: mol_type = other DNA
aaaatctctatcttttaaattccrtacatcraactaaactcacaaactac

SEQ ID NO: 24701 - DNA, 50 bp, synthetic construct
  source 1..50: mol_type = other DNA
acaatatatacatataccaaaacttcactctcaataaaaacattattacc

SEQ ID NO: 24702 - DNA, 50 bp, synthetic construct
  source 1..50: mol_type = other DNA
taactaaaatcacacaataaactctctatctcctcccccaataaaattcc

SEQ ID NO: 24703 - DNA, 50 bp, synthetic construct
  source 1..50: mol_type = other DNA
aacaatccrtctactaacaaaaaatacctttacaacttccaccaaaacac

SEQ ID NO: 24704 - DNA, 50 bp, synthetic construct
  source 1..50: mol_type = other DNA
actactacactaaacacacataaaaaataaacaaatcaaaacataactac

SEQ ID NO: 24705 - DNA, 50 bp, synthetic construct
  source 1..50: mol_type = other DNA
accatatacatatcaccacaaacaaaactaaaaaataatcccaaatatac

SEQ ID NO: 24706 - DNA, 50 bp, synthetic construct
  source 1..50: mol_type = other DNA
aaaatccaaaacaaaaacatacactaacatatcccataaccatatatcac

SEQ ID NO: 24707 - DNA, 50 bp, synthetic construct
  source 1..50: mol_type = other DNA
aacaaaaacatacactaacatatcccataaccatatatcacrccccaacc

SEQ ID NO: 24708 - DNA, 50 bp, synthetic construct
  source 1..50: mol_type = other DNA
taaatatattatatataaccaacraatcatctccacaaaccacacacacc

SEQ ID NO: 24709 - DNA, 50 bp, synthetic construct
  source 1..50: mol_type = other DNA
ctctatttaaattttccaccccatacctaaatatattatatataaccaac

SEQ ID NO: 24710 - DNA, 50 bp, synthetic construct
  source 1..50: mol_type = other DNA
aaaaaaactccaaaatttcttactccatcccaaaaactaataaaaaaacc

SEQ ID NO: 24711 - DNA, 50 bp, synthetic construct
  source 1..50: mol_type = other DNA
aataactcaaactctaaaaaataaatttactttctcatctcaataaaaac

SEQ ID NO: 24712 - DNA, 50 bp, synthetic construct
  source 1..50: mol_type = other DNA
aaaaaatcctacctatataactaaaaaaaactataaaaaataacctcacc

SEQ ID NO: 24713 - DNA, 50 bp, synthetic construct
  source 1..50: mol_type = other DNA
aaaacttaaatacataacracctccaaataataccraataaatcattatc

SEQ ID NO: 24714 - DNA, 50 bp, synthetic construct
  source 1..50: mol_type = other DNA
aatacttctaaaacaaaaacttaaatacataacracctccaaataatacc

SEQ ID NO: 24715 - DNA, 50 bp, synthetic construct
  source 1..50: mol_type = other DNA
aaatcacaaccctacctatctaaacccaacctatctatcccttaaaactc

SEQ ID NO: 24716 - DNA, 50 bp, synthetic construct
  source 1..50: mol_type = other DNA
ataaaatcaaacctaactcacraccctaactcraaaacaaaaacaatacc

SEQ ID NO: 24717 - DNA, 50 bp, synthetic construct
  source 1..50: mol_type = other DNA
aataaccaaaaaaaacaacaacctacccataataacatcacaacraaccc

SEQ ID NO: 24718 - DNA, 50 bp, synthetic construct
  source 1..50: mol_type = other DNA
acrtacctaatatatatataaaaataatacraacccrctataataccatc

SEQ ID NO: 24719 - DNA, 50 bp, synthetic construct
  source 1..50: mol_type = other DNA
atatatactaaacaaaaaacacaaccaataaaaaaaccctaaattaaaac

SEQ ID NO: 24720 - DNA, 50 bp, synthetic construct
  source 1..50: mol_type = other DNA
craaatttcrctaaattacccaaactaatctctaactcctaaactcaaac

SEQ ID NO: 24721 - DNA, 50 bp, synthetic construct
  source 1..50: mol_type = other DNA
accatataacctaaacraatcatctcattcaacttcactttcaaccraac

SEQ ID NO: 24722 - DNA, 50 bp, synthetic construct
  source 1..50: mol_type = other DNA
aattaccatataacctaaacraatcatctcattcaacttcactttcaacc

SEQ ID NO: 24723 - DNA, 50 bp, synthetic construct
  source 1..50: mol_type = other DNA
taaaatcaactttaacrtcaatcaaccactaattaccatataacctaaac

SEQ ID NO: 24724 - DNA, 50 bp, synthetic construct
  source 1..50: mol_type = other DNA
ttaaataaaataactcrtccaaaccacataacaatcaataactaattaac

SEQ ID NO: 24725 - DNA, 50 bp, synthetic construct
  source 1..50: mol_type = other DNA
ttcattcttctcaataaattcaaaatccaaattctaaaacctcaaaaaac

SEQ ID NO: 24726 - DNA, 50 bp, synthetic construct
  source 1..50: mol_type = other DNA
aaatctcccattccaccccaaaattattataaaaacacaataaaacaaac

SEQ ID NO: 24727 - DNA, 50 bp, synthetic construct
  source 1..50: mol_type = other DNA
aaaataaaaacccttttcaaaaaacttataaacctaatttaccatctctc

SEQ ID NO: 24728 - DNA, 50 bp, synthetic construct
  source 1..50: mol_type = other DNA
aaaacttataaacctaatttaccatctctcrcccttccaccttctacaac

SEQ ID NO: 24729 - DNA, 50 bp, synthetic construct
  source 1..50: mol_type = other DNA
attctaaaaactaaaaaatcccaaatcaaaataccaacaaatttaatatc

SEQ ID NO: 24730 - DNA, 50 bp, synthetic construct
  source 1..50: mol_type = other DNA
taacaaaataccacaaactaaatcatttaaaaaccataaaaactaatttc

SEQ ID NO: 24731 - DNA, 50 bp, synthetic construct
  source 1..50: mol_type = other DNA
ataacccaatctataatattttattacaacaacaaaaataaaactccccc

SEQ ID NO: 24732 - DNA, 50 bp, synthetic construct
  source 1..50: mol_type = other DNA
tataatattttattacaacaacaaaaataaaactcccccracaataatcc

SEQ ID NO: 24733 - DNA, 50 bp, synthetic construct
  source 1..50: mol_type = other DNA
taaaactaaacatacaataaatactcaataaaaatcaataaataaacccc

SEQ ID NO: 24734 - DNA, 50 bp, synthetic construct
  source 1..50: mol_type = other DNA
ttaatacttactaaaatcaaatattccaaaatattctatcacaactcatc

SEQ ID NO: 24735 - DNA, 50 bp, synthetic construct
  source 1..50: mol_type = other DNA
acaaaatattctaaaatatctaattccaacaaacaccaatactaataatc

SEQ ID NO: 24736 - DNA, 50 bp, synthetic construct
  source 1..50: mol_type = other DNA
caatactaataatcrccttactaaataccaaaaactatacaaaacatacc

SEQ ID NO: 24737 - DNA, 50 bp, synthetic construct
  source 1..50: mol_type = other DNA
tttaaaacctttccaaaccaaaataccaaaccaaacacrcrttaaaaaac

SEQ ID NO: 24738 - DNA, 50 bp, synthetic construct
  source 1..50: mol_type = other DNA
aacccctaattttaaaacctttccaaaccaaaataccaaaccaaacacrc

SEQ ID NO: 24739 - DNA, 50 bp, synthetic construct
  source 1..50: mol_type = other DNA
ccttacccttacctattacctaacaccaaataaactctaaaaaaaaacrc

SEQ ID NO: 24740 - DNA, 50 bp, synthetic construct
  source 1..50: mol_type = other DNA
aacaaactcraatctaaaatacaatttccrcrctactcattaaaaactac

SEQ ID NO: 24741 - DNA, 50 bp, synthetic construct
  source 1..50: mol_type = other DNA
aaataaaatactacatataccaaacctacctaataaataactaaaaaacc

SEQ ID NO: 24742 - DNA, 50 bp, synthetic construct
  source 1..50: mol_type = other DNA
ccctactatctaaaaaaaaatccatttccccaaatcaatattcattaccc

SEQ ID NO: 24743 - DNA, 50 bp, synthetic construct
  source 1..50: mol_type = other DNA
ataaaattcaaacrccatatttaccccttactaaatatataacctacrac

SEQ ID NO: 24744 - DNA, 50 bp, synthetic construct
  source 1..50: mol_type = other DNA
taatacctaactcaaaaatttaatactaataaattcctaaacaaaaatcc

SEQ ID NO: 24745 - DNA, 50 bp, synthetic construct
  source 1..50: mol_type = other DNA
cratctacaaaaattatcatttattaactacrataaaaccacrccccrtc

SEQ ID NO: 24746 - DNA, 50 bp, synthetic construct
  source 1..50: mol_type = other DNA
tattaaattacctcaaattaccccaataaatatctccaccaaaacrctcc

SEQ ID NO: 24747 - DNA, 50 bp, synthetic construct
  source 1..50: mol_type = other DNA
aaatctctctacraaaactaataaaactataaatacttcactataacrac

SEQ ID NO: 24748 - DNA, 50 bp, synthetic construct
  source 1..50: mol_type = other DNA
taaaaaattattcactcctctctaaccccctcatccaaaaaccaataacc

SEQ ID NO: 24749 - DNA, 50 bp, synthetic construct
  source 1..50: mol_type = other DNA
aaactcctctaaaaaactccatctctattctaaaaaacccctcaaaaaac

SEQ ID NO: 24750 - DNA, 50 bp, synthetic construct
  source 1..50: mol_type = other DNA
aaaaaaaataaaccttcrtcccctactctaacctaaaacaaacacaaacc

SEQ ID NO: 24751 - DNA, 50 bp, synthetic construct
  source 1..50: mol_type = other DNA
cctccttaatcataaacttcataacctaaattcraaacttctactcatcc

SEQ ID NO: 24752 - DNA, 50 bp, synthetic construct
  source 1..50: mol_type = other DNA
ctaccraacatcccactcctccttaatcataaacttcataacctaaattc

SEQ ID NO: 24753 - DNA, 50 bp, synthetic construct
  source 1..50: mol_type = other DNA
ctaacrtaaacctaaaaaattatcccaaaaccttataaaaaacacraacc

SEQ ID NO: 24754 - DNA, 50 bp, synthetic construct
  source 1..50: mol_type = other DNA
acrcactaacrtaaacctaaaaaattatcccaaaaccttataaaaaacac

SEQ ID NO: 24755 - DNA, 50 bp, synthetic construct
  source 1..50: mol_type = other DNA
atactaaaccaaaataaccaaccccrccaaaaaacctaacctaaacacac

SEQ ID NO: 24756 - DNA, 50 bp, synthetic construct
  source 1..50: mol_type = other DNA
aacaacacccttaccctaaaaatcaaaaattataaccccatctctatacc

SEQ ID NO: 24757 - DNA, 50 bp, synthetic construct
  source 1..50: mol_type = other DNA
tttaaaacaacaaaaattcataatttacaactaataactaacaaacaccc

SEQ ID NO: 24758 - DNA, 50 bp, synthetic construct
  source 1..50: mol_type = other DNA
atttttattactccaaaacaacaactaatattatacaacctacaaaaaac

SEQ ID NO: 24759 - DNA, 50 bp, synthetic construct
  source 1..50: mol_type = other DNA
aaactaaaaacactaactactaacactaactactaaaactccaacataac

SEQ ID NO: 24760 - DNA, 50 bp, synthetic construct
  source 1..50: mol_type = other DNA
aatataaaacccttaaaactacccccacaactaacctaatctaaaaaacc

SEQ ID NO: 24761 - DNA, 50 bp, synthetic construct
  source 1..50: mol_type = other DNA
aacttcactaacttcrtaaaatctatctaaaccacaaaacttcccaccac

SEQ ID NO: 24762 - DNA, 50 bp, synthetic construct
  source 1..50: mol_type = other DNA
ttaactaactttcaaacrataaataattctttctttaatttaacaaaaac

SEQ ID NO: 24763 - DNA, 50 bp, synthetic construct
  source 1..50: mol_type = other DNA
actcrttccaaaaaaattaaaataatcacctcattaactaactttcaaac

SEQ ID NO: 24764 - DNA, 50 bp, synthetic construct
  source 1..50: mol_type = other DNA
tccaattttcctaaaacraactttccacactttcacaaactaaaaccatc

SEQ ID NO: 24765 - DNA, 50 bp, synthetic construct
  source 1..50: mol_type = other DNA
aattttcctaaaacraactttccacactttcacaaactaaaaccatcrac

SEQ ID NO: 24766 - DNA, 50 bp, synthetic construct
  source 1..50: mol_type = other DNA
ctactctaaaatataacttcacrtaataataacttaacttaaaaaaaacc

SEQ ID NO: 24767 - DNA, 50 bp, synthetic construct
  source 1..50: mol_type = other DNA
taactacatttacctaaaataaatcrtaaatactctaccccaacctctcc

SEQ ID NO: 24768 - DNA, 50 bp, synthetic construct
  source 1..50: mol_type = other DNA
aaaaaaaaaaccractcctccaacctaactacatttacctaaaataaatc

SEQ ID NO: 24769 - DNA, 50 bp, synthetic construct
  source 1..50: mol_type = other DNA
aatctaatataacaccttaaaaaccaacccacaaataacaacacctaatc

SEQ ID NO: 24770 - DNA, 50 bp, synthetic construct
  source 1..50: mol_type = other DNA
aaatactaccacttataaactaacctttaaaatatcacatcaaattttcc

SEQ ID NO: 24771 - DNA, 50 bp, synthetic construct
  source 1..50: mol_type = other DNA
tcactaacaaaccaaaaccaaactaaacaaaactaacacataacctcccc

SEQ ID NO: 24772 - DNA, 50 bp, synthetic construct
  source 1..50: mol_type = other DNA
ccaaaccctcctaacatctaaacratatacaaacttcttaacaacattac

SEQ ID NO: 24773 - DNA, 50 bp, synthetic construct
  source 1..50: mol_type = other DNA
aaaaactcaacrcatacraaaatacctccaaacacctaaaatactaaacc

SEQ ID NO: 24774 - DNA, 50 bp, synthetic construct
  source 1..50: mol_type = other DNA
caatataaatacactaaatacccaccataaaaaaatactaaaaataaacc

SEQ ID NO: 24775 - DNA, 50 bp, synthetic construct
  source 1..50: mol_type = other DNA
aaaaaactctaaaaaaacatataacctactcaaaatcccacaacatatcc

SEQ ID NO: 24776 - DNA, 50 bp, synthetic construct
  source 1..50: mol_type = other DNA
ttcaaactatctacataaaacctattaaattctcaacacacccaataccc

SEQ ID NO: 24777 - DNA, 50 bp, synthetic construct
  source 1..50: mol_type = other DNA
tacratccctaacatccacaactacaaaacraataaaaaacaattctatc

SEQ ID NO: 24778 - DNA, 50 bp, synthetic construct
  source 1..50: mol_type = other DNA
aaaaacaaataccaactacctacratccctaacatccacaactacaaaac

SEQ ID NO: 24779 - DNA, 50 bp, synthetic construct
  source 1..50: mol_type = other DNA
ctctacaacrcttatacacctaacrttaaacatatccttatataactctc

SEQ ID NO: 24780 - DNA, 50 bp, synthetic construct
  source 1..50: mol_type = other DNA
aatcactacrtataaataacatctatctctacaacrcttatacacctaac

SEQ ID NO: 24781 - DNA, 50 bp, synthetic construct
  source 1..50: mol_type = other DNA
aaaacaaacraaaaccatataaaaacatacccaacrtcaaatacacaaac

SEQ ID NO: 24782 - DNA, 50 bp, synthetic construct
  source 1..50: mol_type = other DNA
atacccaacrtcaaatacacaaacrttacaaaaacaaatatcattcatac

SEQ ID NO: 24783 - DNA, 50 bp, synthetic construct
  source 1..50: mol_type = other DNA
raatacactactaaacaaaaaactctcaactaaaccacaaatataaaatc

SEQ ID NO: 24784 - DNA, 50 bp, synthetic construct
  source 1..50: mol_type = other DNA
aaacttataaaactattcataaatactactaaaaacctccaataactctc

SEQ ID NO: 24785 - DNA, 50 bp, synthetic construct
  source 1..50: mol_type = other DNA
aacacatattatttaataaaaccaaacaatataacatataaacaaaccac

SEQ ID NO: 24786 - DNA, 50 bp, synthetic construct
  source 1..50: mol_type = other DNA
ttatccactcatcaactactaaacacttaaattatttccaccttttaacc

SEQ ID NO: 24787 - DNA, 50 bp, synthetic construct
  source 1..50: mol_type = other DNA
ttatcttccacaacaactacaaccatttaacattcccaccaataacacac

SEQ ID NO: 24788 - DNA, 50 bp, synthetic construct
  source 1..50: mol_type = other DNA
aaaataaaactattttaaaaatcacaataaccrcaaatcraccrattccc

SEQ ID NO: 24789 - DNA, 50 bp, synthetic construct
  source 1..50: mol_type = other DNA
aaactattcrtaatcctcttccaactactccctaaaataaaaaccraaac

SEQ ID NO: 24790 - DNA, 50 bp, synthetic construct
  source 1..50: mol_type = other DNA
attactacatataatctataactaaaaatttcccaaccttaaaactaaac

SEQ ID NO: 24791 - DNA, 50 bp, synthetic construct
  source 1..50: mol_type = other DNA
atacaacaatatacaacatcaaaaaataactataaaaactaactacctac

SEQ ID NO: 24792 - DNA, 50 bp, synthetic construct
  source 1..50: mol_type = other DNA
accccaaataacaatcaaatcttattcactaaacacccttaatttaatac

SEQ ID NO: 24793 - DNA, 50 bp, synthetic construct
  source 1..50: mol_type = other DNA
ctaaatttttccaaaaatactacttttccaaacttcaaataaattatttc

SEQ ID NO: 24794 - DNA, 50 bp, synthetic construct
  source 1..50: mol_type = other DNA
atttataaaatttttttaatttttccccccattttttaccaaaatacccc

SEQ ID NO: 24795 - DNA, 50 bp, synthetic construct
  source 1..50: mol_type = other DNA
tcctccrctaaaataatttaaatatccctaaaacrttaaaaacacraatc

SEQ ID NO: 24796 - DNA, 50 bp, synthetic construct
  source 1..50: mol_type = other DNA
ctaaaacrttaaaaacacraatcraatcctaaaaccaaataaacatctac

SEQ ID NO: 24797 - DNA, 50 bp, synthetic construct
  source 1..50: mol_type = other DNA
ctaaaaccaaataaacatctacraaaaaaccaaataaccctacractacc

SEQ ID NO: 24798 - DNA, 50 bp, synthetic construct
  source 1..50: mol_type = other DNA
aattttatacataaaaatccttccrtttcrccttaaacctccrtaaaacc

SEQ ID NO: 24799 - DNA, 50 bp, synthetic construct
  source 1..50: mol_type = other DNA
aacactatatattttcttccaaaaatctcaaaacctatatttctattaac

SEQ ID NO: 24800 - DNA, 50 bp, synthetic construct
  source 1..50: mol_type = other DNA
ttataaaattcccrttaaataccataaataaaacaaatataaaaccraac

SEQ ID NO: 24801 - DNA, 50 bp, synthetic construct
  source 1..50: mol_type = other DNA
acctattaaatttaaaccaaacctaaaataatctctttttcctcccrtcc

SEQ ID NO: 24802 - DNA, 50 bp, synthetic construct
  source 1..50: mol_type = other DNA
ctaataaaacttaaaacaaaccataccatttcctaaacttaaaattttac

SEQ ID NO: 24803 - DNA, 50 bp, synthetic construct
  source 1..50: mol_type = other DNA
ctacaacctctacctaccaaattaaatccattattctactacaacctccc

SEQ ID NO: 24804 - DNA, 50 bp, synthetic construct
  source 1..50: mol_type = other DNA
tctacctaccaaattaaatccattattctactacaacctcccraataacc

SEQ ID NO: 24805 - DNA, 50 bp, synthetic construct
  source 1..50: mol_type = other DNA
acctaataaacaattaaaaaccaaacaacattaaacttaaacaaaccaac

SEQ ID NO: 24806 - DNA, 50 bp, synthetic construct
  source 1..50: mol_type = other DNA
aaccaaacttacaataattattatctctcttctaaatctaaccacccaac

SEQ ID NO: 24807 - DNA, 50 bp, synthetic construct
  source 1..50: mol_type = other DNA
taatataaaccatctataaatctctcaaccataactaccaatacctattc

SEQ ID NO: 24808 - DNA, 50 bp, synthetic construct
  source 1..50: mol_type = other DNA
taaaactaaacrtatctaaactcaaactctccttaaacraatcttactac

SEQ ID NO: 24809 - DNA, 50 bp, synthetic construct
  source 1..50: mol_type = other DNA
taacaacctacataactcaacaaaaacaaccataactctcctaaatacac

SEQ ID NO: 24810 - DNA, 50 bp, synthetic construct
  source 1..50: mol_type = other DNA
aatctcaccctctacctaaaaacaaactcraaacaattataaaaaaacac

SEQ ID NO: 24811 - DNA, 50 bp, synthetic construct
  source 1..50: mol_type = other DNA
cttaaaacaaattttcaaaccaatctcaccctctacctaaaaacaaactc

SEQ ID NO: 24812 - DNA, 50 bp, synthetic construct
  source 1..50: mol_type = other DNA
aataaaactaacttaaaaatttaccccaaaactatacccctcccaacaac

SEQ ID NO: 24813 - DNA, 50 bp, synthetic construct
  source 1..50: mol_type = other DNA
aattacccaaattctaaccaaaaaacttctcaccctatttaaattattac

SEQ ID NO: 24814 - DNA, 50 bp, synthetic construct
  source 1..50: mol_type = other DNA
caaattctaaccaaaaaacttctcaccctatttaaattattacraaattc

SEQ ID NO: 24815 - DNA, 50 bp, synthetic construct
  source 1..50: mol_type = other DNA
crataaatccctataataccaaacaaaaataaaccttctaaaaacccaac

SEQ ID NO: 24816 - DNA, 50 bp, synthetic construct
  source 1..50: mol_type = other DNA
ctataataccaaacaaaaataaaccttctaaaaacccaacraactcccac

SEQ ID NO: 24817 - DNA, 50 bp, synthetic construct
  source 1..50: mol_type = other DNA
ccctttcccacttccacaattaaaacactcacaatatttaaaaatctccc

SEQ ID NO: 24818 - DNA, 50 bp, synthetic construct
  source 1..50: mol_type = other DNA
taaaacactcacaatatttaaaaatctcccraaccctacaaaaacaatcc

SEQ ID NO: 24819 - DNA, 50 bp, synthetic construct
  source 1..50: mol_type = other DNA
acctaacaaaaaccttattaaaaattaactaactaaatacaataactcac

SEQ ID NO: 24820 - DNA, 50 bp, synthetic construct
  source 1..50: mol_type = other DNA
cacattctttccccaaccaactatactaataatatcaccaaaatatttcc

SEQ ID NO: 24821 - DNA, 50 bp, synthetic construct
  source 1..50: mol_type = other DNA
ataaaaattcctctccaaaaactttcctccccatttaatttaaaataaac

SEQ ID NO: 24822 - DNA, 50 bp, synthetic construct
  source 1..50: mol_type = other DNA
ccaaaaactttcctccccatttaatttaaaataaacrataacttctcttc

SEQ ID NO: 24823 - DNA, 50 bp, synthetic construct
  source 1..50: mol_type = other DNA
acaaaatttattcaaaaacctatactaacattcctaattatctactaacc

SEQ ID NO: 24824 - DNA, 50 bp, synthetic construct
  source 1..50: mol_type = other DNA
ctcaccattccacaaattactttctccttcctttattctcttctaccttc

SEQ ID NO: 24825 - DNA, 50 bp, synthetic construct
  source 1..50: mol_type = other DNA
aaaattttaaattacttcccaatcaaaacaaatacaaaatataaaatccc

SEQ ID NO: 24826 - DNA, 50 bp, synthetic construct
  source 1..50: mol_type = other DNA
caacaataaaataaacrcatcaaattacaaataaccctatctctttattc

SEQ ID NO: 24827 - DNA, 50 bp, synthetic construct
  source 1..50: mol_type = other DNA
ttaatttactcaacaaaaccatttttacttcccrcaaaaaaaatacattc

SEQ ID NO: 24828 - DNA, 50 bp, synthetic construct
  source 1..50: mol_type = other DNA
aacacttaaacataaatttaatttactcaacaaaaccatttttacttccc

SEQ ID NO: 24829 - DNA, 50 bp, synthetic construct
  source 1..50: mol_type = other DNA
ttttaaataatctctcataaaaatatttaaaatacttattccccratacc

SEQ ID NO: 24830 - DNA, 50 bp, synthetic construct
  source 1..50: mol_type = other DNA
cttactaaataaattaaatttatattcaaatactatttcttcacracacc

SEQ ID NO: 24831 - DNA, 50 bp, synthetic construct
  source 1..50: mol_type = other DNA
caaacactttcataaaaaattatttaaaataacacttctttacaccaaac

SEQ ID NO: 24832 - DNA, 50 bp, synthetic construct
  source 1..50: mol_type = other DNA
aaaaaataaaaaccatctccctaacttataattatcccctaaaataaaac

SEQ ID NO: 24833 - DNA, 50 bp, synthetic construct
  source 1..50: mol_type = other DNA
cctaaacttataaacttacraacttataaacttaccraaaacccaacctc

SEQ ID NO: 24834 - DNA, 50 bp, synthetic construct
  source 1..50: mol_type = other DNA
aaacaaaaaaacaaccraaaattaacaataccacrttctaaccatacrac

SEQ ID NO: 24835 - DNA, 50 bp, synthetic construct
  source 1..50: mol_type = other DNA
accaaacaaaaaaacaaccraaaattaacaataccacrttctaaccatac

SEQ ID NO: 24836 - DNA, 50 bp, synthetic construct
  source 1..50: mol_type = other DNA
ataactataaaaaaccaaacaaaaaaacaaccraaaattaacaataccac

SEQ ID NO: 24837 - DNA, 50 bp, synthetic construct
  source 1..50: mol_type = other DNA
acraaaaaatactctccctaactaaaccccaacaccaatattctaaaatc

SEQ ID NO: 24838 - DNA, 50 bp, synthetic construct
  source 1..50: mol_type = other DNA
aataatcctaatacccccaacccaaactaacraacaacaaaaataaaacc

SEQ ID NO: 24839 - DNA, 50 bp, synthetic construct
  source 1..50: mol_type = other DNA
taaaaatataaaatacaactaaaataataacraccccattcctactattc

SEQ ID NO: 24840 - DNA, 50 bp, synthetic construct
  source 1..50: mol_type = other DNA
aaacctatccaaaactacaatcaataaccaaacaaaacccaacccaaaac

SEQ ID NO: 24841 - DNA, 50 bp, synthetic construct
  source 1..50: mol_type = other DNA
aaacaaaacccaacccaaaacrcaacctcctaaatctaacaaaaaaatcc

SEQ ID NO: 24842 - DNA, 50 bp, synthetic construct
  source 1..50: mol_type = other DNA
cattctacaaaatatcctttacccrctaataaccactaaaacrccattac

SEQ ID NO: 24843 - DNA, 50 bp, synthetic construct
  source 1..50: mol_type = other DNA
tcccaataaccattaacraataaaaaatatcctacaaaataacaaacaac

SEQ ID NO: 24844 - DNA, 50 bp, synthetic construct
  source 1..50: mol_type = other DNA
aaacaacrataaccataaaaaatttacctaatcctcctcracaactaccc

SEQ ID NO: 24845 - DNA, 50 bp, synthetic construct
  source 1..50: mol_type = other DNA
taaatttaaccaacctaacaccaactatctatccccraaaccaaatctac

SEQ ID NO: 24846 - DNA, 50 bp, synthetic construct
  source 1..50: mol_type = other DNA
tctatactatataccctaaaaccaccccttcaaatccatttctctaaatc

SEQ ID NO: 24847 - DNA, 50 bp, synthetic construct
  source 1..50: mol_type = other DNA
taaaactcraaataacacratactctacccaattcaaaatccaaatccac

SEQ ID NO: 24848 - DNA, 50 bp, synthetic construct
  source 1..50: mol_type = other DNA
ctacaaacrtaaacttaaatcctaaactaaacaaaacaccrtaccactcc

SEQ ID NO: 24849 - DNA, 50 bp, synthetic construct
  source 1..50: mol_type = other DNA
cccaattcctacaataaccataaacrtaccaaatatcrtaaacrttatac

SEQ ID NO: 24850 - DNA, 50 bp, synthetic construct
  source 1..50: mol_type = other DNA
caccctacccaattcctacaataaccataaacrtaccaaatatcrtaaac

SEQ ID NO: 24851 - DNA, 50 bp, synthetic construct
  source 1..50: mol_type = other DNA
aaacatcaccctacccaattcctacaataaccataaacrtaccaaatatc

SEQ ID NO: 24852 - DNA, 50 bp, synthetic construct
  source 1..50: mol_type = other DNA
aaaaactctaaaaaacatcaccctacccaattcctacaataaccataaac

SEQ ID NO: 24853 - DNA, 50 bp, synthetic construct
  source 1..50: mol_type = other DNA
taaacttctaatataacaacaaacataacataacraacacaaactctacc

SEQ ID NO: 24854 - DNA, 50 bp, synthetic construct
  source 1..50: mol_type = other DNA
aaaaaatacraaaatacrtaaaaaataaccaacacccctcctaccaaaac

SEQ ID NO: 24855 - DNA, 50 bp, synthetic construct
  source 1..50: mol_type = other DNA
rtttacaaaatcccaacrccctaacaaaaaaaatactaaccacttcccac

SEQ ID NO: 24856 - DNA, 50 bp, synthetic construct
  source 1..50: mol_type = other DNA
ttttctcaaacattctcacctcctctaaaatccrcaaaccttacaaaaac

SEQ ID NO: 24857 - DNA, 50 bp, synthetic construct
  source 1..50: mol_type = other DNA
ccratttaaaaaattacraaatcaacrtttacaaacaaaacccaaaactc

SEQ ID NO: 24858 - DNA, 50 bp, synthetic construct
  source 1..50: mol_type = other DNA
taacacttaatcraaaacaaacttcccaaaaaacrattatattacraaac

SEQ ID NO: 24859 - DNA, 50 bp, synthetic construct
  source 1..50: mol_type = other DNA
ttctctaacacttaatcraaaacaaacttcccaaaaaacrattatattac

SEQ ID NO: 24860 - DNA, 50 bp, synthetic construct
  source 1..50: mol_type = other DNA
ataccraactttataacctcactaaaacccttcttctctaacacttaatc

SEQ ID NO: 24861 - DNA, 50 bp, synthetic construct
  source 1..50: mol_type = other DNA
aaaactcctccaaaaattatcaaacaacttcraactaaacccaaaaaacc

SEQ ID NO: 24862 - DNA, 50 bp, synthetic construct
  source 1..50: mol_type = other DNA
atctaaaaacccccaaaaactaaccctaaaaaaccctcratacaaaaacc

SEQ ID NO: 24863 - DNA, 50 bp, synthetic construct
  source 1..50: mol_type = other DNA
ctacatcraaaaccttccaaaaccaacccttaaaaactcccaaataaaac

SEQ ID NO: 24864 - DNA, 50 bp, synthetic construct
  source 1..50: mol_type = other DNA
craaaaccttccaaaaccaacccttaaaaactcccaaataaaacrtccac

SEQ ID NO: 24865 - DNA, 50 bp, synthetic construct
  source 1..50: mol_type = other DNA
aatatttaaaataatcacaaaaaaactcccaaacaaaccatacactaaac

SEQ ID NO: 24866 - DNA, 50 bp, synthetic construct
  source 1..50: mol_type = other DNA
acaatatataaacccraaataaactactatcttaaactactacraaaaac

SEQ ID NO: 24867 - DNA, 50 bp, synthetic construct
  source 1..50: mol_type = other DNA
cccaaatacaatatataaacccraaataaactactatcttaaactactac

SEQ ID NO: 24868 - DNA, 50 bp, synthetic construct
  source 1..50: mol_type = other DNA
aaaccaaccaaaataaaacratacccaacccaaatacaatatataaaccc

SEQ ID NO: 24869 - DNA, 50 bp, synthetic construct
  source 1..50: mol_type = other DNA
cctttacaaataacacaaacactaaatcaaaaaaccaaccaaaataaaac

SEQ ID NO: 24870 - DNA, 50 bp, synthetic construct
  source 1..50: mol_type = other DNA
atctcataaacatcttcataatatctttataaaatataaatactatcacc

SEQ ID NO: 24871 - DNA, 50 bp, synthetic construct
  source 1..50: mol_type = other DNA
aaaaatattcataaaatctacraaaacaacrcrcaaaaaaaacacaaccc

SEQ ID NO: 24872 - DNA, 50 bp, synthetic construct
  source 1..50: mol_type = other DNA
tttaacaaaatttatttactcttacaaataaaaacratcaaccrtaaaac

SEQ ID NO: 24873 - DNA, 50 bp, synthetic construct
  source 1..50: mol_type = other DNA
actacattttaacaaaatttatttactcttacaaataaaaacratcaacc

SEQ ID NO: 24874 - DNA, 50 bp, synthetic construct
  source 1..50: mol_type = other DNA
atatactaactacattttaacaaaatttatttactcttacaaataaaaac

SEQ ID NO: 24875 - DNA, 50 bp, synthetic construct
  source 1..50: mol_type = other DNA
ccctattccaataatactacattactacatccaacctttcrtaaaaacac

SEQ ID NO: 24876 - DNA, 50 bp, synthetic construct
  source 1..50: mol_type = other DNA
tactcccacraaaaactaaatacaacaatacaatatcattaaaacaaaac

SEQ ID NO: 24877 - DNA, 50 bp, synthetic construct
  source 1..50: mol_type = other DNA
caatacaatatcattaaaacaaaacrcacccttcacacactaataaacac

SEQ ID NO: 24878 - DNA, 50 bp, synthetic construct
  source 1..50: mol_type = other DNA
acaaataatcttacaaaaaaatttaacatatcaccttattctcctatccc

SEQ ID NO: 24879 - DNA, 50 bp, synthetic construct
  source 1..50: mol_type = other DNA
ataaaatttcccatattatccaaactaatctcaaactcctaaactcaaac

SEQ ID NO: 24880 - DNA, 50 bp, synthetic construct
  source 1..50: mol_type = other DNA
ttttctttatatattttaaaacaaaatctcactttatcacccaaactaac

SEQ ID NO: 24881 - DNA, 50 bp, synthetic construct
  source 1..50: mol_type = other DNA
aaaactaaataatttcccatataaaacaaaataaacaaatttcatcaaac

SEQ ID NO: 24882 - DNA, 50 bp, synthetic construct
  source 1..50: mol_type = other DNA
ttacraaaaattactcaaccacattctatattatttttacctccctctcc

SEQ ID NO: 24883 - DNA, 50 bp, synthetic construct
  source 1..50: mol_type = other DNA
aatattacatctataaaattcattcacactactatatatatcaacacccc

SEQ ID NO: 24884 - DNA, 50 bp, synthetic construct
  source 1..50: mol_type = other DNA
aaaaattctcaaactataaaccctaaaccaataacatcaacattaactac

SEQ ID NO: 24885 - DNA, 50 bp, synthetic construct
  source 1..50: mol_type = other DNA
tctcaaactataaaccctaaaccaataacatcaacattaactacraactc

SEQ ID NO: 24886 - DNA, 50 bp, synthetic construct
  source 1..50: mol_type = other DNA
aaccccrtttcaatcaatcaatcaataatcaattctccraacrtaaaatc

SEQ ID NO: 24887 - DNA, 50 bp, synthetic construct
  source 1..50: mol_type = other DNA
acaacaaaataaaaccccrtttcaatcaatcaatcaataatcaattctcc

SEQ ID NO: 24888 - DNA, 50 bp, synthetic construct
  source 1..50: mol_type = other DNA
craaatctcactttattacccaaactaatctcraatttctaaactcaaac

SEQ ID NO: 24889 - DNA, 50 bp, synthetic construct
  source 1..50: mol_type = other DNA
aaatttcctacaacaatctctttcratttttacattctctttttttactc

SEQ ID NO: 24890 - DNA, 50 bp, synthetic construct
  source 1..50: mol_type = other DNA
acttcctccccracaacattaaattaaaatttcctacaacaatctctttc

SEQ ID NO: 24891 - DNA, 50 bp, synthetic construct
  source 1..50: mol_type = other DNA
tacaaatacaacaaactcctacatttataacaaataaatattttccttcc

SEQ ID NO: 24892 - DNA, 50 bp, synthetic construct
  source 1..50: mol_type = other DNA
actcaaaccaaaacacttatcacacttcaatcttacaaatttaaacaaac

SEQ ID NO: 24893 - DNA, 50 bp, synthetic construct
  source 1..50: mol_type = other DNA
aaatttaaacaaacrtactaatcactataaaaattccaatttcaataaac

SEQ ID NO: 24894 - DNA, 50 bp, synthetic construct
  source 1..50: mol_type = other DNA
taataaataacacctacctaccattcctatcccaaaacccaaaaaactcc

SEQ ID NO: 24895 - DNA, 50 bp, synthetic construct
  source 1..50: mol_type = other DNA
aaaccctctaaattctaaaacaaaaataacaaacaaatatcatctatcac

SEQ ID NO: 24896 - DNA, 50 bp, synthetic construct
  source 1..50: mol_type = other DNA
ccctctaaattctaaaacaaaaataacaaacaaatatcatctatcacrcc

SEQ ID NO: 24897 - DNA, 50 bp, synthetic construct
  source 1..50: mol_type = other DNA
cctactctactcacaacaaacatcattaattaatcttaacactctcctcc

SEQ ID NO: 24898 - DNA, 50 bp, synthetic construct
  source 1..50: mol_type = other DNA
aaaaaactattcratactaaaaaacaaactaaaactaaaccaaactaaac

SEQ ID NO: 24899 - DNA, 50 bp, synthetic construct
  source 1..50: mol_type = other DNA
aactattcratactaaaaaacaaactaaaactaaaccaaactaaacraac

SEQ ID NO: 24900 - DNA, 50 bp, synthetic construct
  source 1..50: mol_type = other DNA
attcctccaattaaacccaaaaaaccccraaaaacctacttaactaaacc

SEQ ID NO: 24901 - DNA, 50 bp, synthetic construct
  source 1..50: mol_type = other DNA
taacttacaactcaactcccrcaaaaacacacataaacttaacacccaac

SEQ ID NO: 24902 - DNA, 50 bp, synthetic construct
  source 1..50: mol_type = other DNA
aaaactaaactacaaaccaaactatacaaaaaaaacatacaaaacctaac

SEQ ID NO: 24903 - DNA, 50 bp, synthetic construct
  source 1..50: mol_type = other DNA
caaaccaaactatacaaaaaaaacatacaaaacctaacrccaaatacacc

SEQ ID NO: 24904 - DNA, 50 bp, synthetic construct
  source 1..50: mol_type = other DNA
aatcaaaactaaaactacacrataccaaccaaatcctactaaaccaaatc

SEQ ID NO: 24905 - DNA, 50 bp, synthetic construct
  source 1..50: mol_type = other DNA
accccaacaactttaaccaacrtcaaatctaatcaaaactaaaactacac

SEQ ID NO: 24906 - DNA, 50 bp, synthetic construct
  source 1..50: mol_type = other DNA
caacaaaacctaactaacaccrtacaattccaaccctaatcaaatctaac

SEQ ID NO: 24907 - DNA, 50 bp, synthetic construct
  source 1..50: mol_type = other DNA
cracccaaaatataactctaaaaaacrttacaaatttaaaacrccaaccc

SEQ ID NO: 24908 - DNA, 50 bp, synthetic construct
  source 1..50: mol_type = other DNA
acaatatacracccaaaatataactctaaaaaacrttacaaatttaaaac

SEQ ID NO: 24909 - DNA, 50 bp, synthetic construct
  source 1..50: mol_type = other DNA
aaataccccataaccaaaactaaactacctaaaaccaaaatacaatatac

SEQ ID NO: 24910 - DNA, 50 bp, synthetic construct
  source 1..50: mol_type = other DNA
aaaccaataaaacrttaaacccratataaaaataacrccaaaaatatctc

SEQ ID NO: 24911 - DNA, 50 bp, synthetic construct
  source 1..50: mol_type = other DNA
aaaaaaacctctctttctacaaaaataaaacactaaaacraaaacaaccc

SEQ ID NO: 24912 - DNA, 50 bp, synthetic construct
  source 1..50: mol_type = other DNA
ttcatataaccaaaaaaacctctctttctacaaaaataaaacactaaaac

SEQ ID NO: 24913 - DNA, 50 bp, synthetic construct
  source 1..50: mol_type = other DNA
aaaaccaaaacccaaaaatactaaaacctaactacaaaccrttaaaaaac

SEQ ID NO: 24914 - DNA, 50 bp, synthetic construct
  source 1..50: mol_type = other DNA
aataaattacaaaaccaaaacccaaaaatactaaaacctaactacaaacc

SEQ ID NO: 24915 - DNA, 50 bp, synthetic construct
  source 1..50: mol_type = other DNA
caaaccccaacattcctaaactctaattttacaattcactaaaataacrc

SEQ ID NO: 24916 - DNA, 50 bp, synthetic construct
  source 1..50: mol_type = other DNA
accctaaaataaatcacraactataaaacratacraaaaacaactcaaac

SEQ ID NO: 24917 - DNA, 50 bp, synthetic construct
  source 1..50: mol_type = other DNA
caataaatcataaactataaaccactataccaacrcttaaactattcccc

SEQ ID NO: 24918 - DNA, 50 bp, synthetic construct
  source 1..50: mol_type = other DNA
ttttaaacctaaaaactaaattaaaacccraacatcctctcttaaactcc

SEQ ID NO: 24919 - DNA, 50 bp, synthetic construct
  source 1..50: mol_type = other DNA
taaaataactcacaaaaaatatataacaacctaacttcctatacrcracc

SEQ ID NO: 24920 - DNA, 50 bp, synthetic construct
  source 1..50: mol_type = other DNA
tccctaaaataactcacaaaaaatatataacaacctaacttcctatacrc

SEQ ID NO: 24921 - DNA, 50 bp, synthetic construct
  source 1..50: mol_type = other DNA
aactttaaaacttaaaaactacaactaaccctaaaactaaaacctctccc

SEQ ID NO: 24922 - DNA, 50 bp, synthetic construct
  source 1..50: mol_type = other DNA
aactaacaaaataaaactacttaactatacttccctaactaacaaatcac

SEQ ID NO: 24923 - DNA, 50 bp, synthetic construct
  source 1..50: mol_type = other DNA
acctacctatataactcattcaattctcaccacaatcaaaataacracac

SEQ ID NO: 24924 - DNA, 50 bp, synthetic construct
  source 1..50: mol_type = other DNA
actatacctacctatataactcattcaattctcaccacaatcaaaataac

SEQ ID NO: 24925 - DNA, 50 bp, synthetic construct
  source 1..50: mol_type = other DNA
ctaacactaatactacctataaaaaccrtaataaataataataccractc

SEQ ID NO: 24926 - DNA, 50 bp, synthetic construct
  source 1..50: mol_type = other DNA
ctataaaatctacacaacctctcctaacactaatactacctataaaaacc

SEQ ID NO: 24927 - DNA, 50 bp, synthetic construct
  source 1..50: mol_type = other DNA
cacaactacactaataaaactaaaacccaactcccactcctacttactac

SEQ ID NO: 24928 - DNA, 50 bp, synthetic construct
  source 1..50: mol_type = other DNA
aataaaattaataaaaaacacctatatatcaaatactacrtactttacac

SEQ ID NO: 24929 - DNA, 50 bp, synthetic construct
  source 1..50: mol_type = other DNA
aaaaaaaaccaaaacaaacaaaatcaacttcctacacaacaaaactaacc

SEQ ID NO: 24930 - DNA, 50 bp, synthetic construct
  source 1..50: mol_type = other DNA
atatactcatacacacactcaaacctatacatacatcccaaaacccattc

SEQ ID NO: 24931 - DNA, 50 bp, synthetic construct
  source 1..50: mol_type = other DNA
tacctaaactctaaaatatatataaactctaaaatatatacataattctc

SEQ ID NO: 24932 - DNA, 50 bp, synthetic construct
  source 1..50: mol_type = other DNA
aacacctcccacttacraaaacctccctttatttattaactaaaactaac

SEQ ID NO: 24933 - DNA, 50 bp, synthetic construct
  source 1..50: mol_type = other DNA
ratcaaaatactaaataactccaataaccataaaaacacctcccacttac

SEQ ID NO: 24934 - DNA, 50 bp, synthetic construct
  source 1..50: mol_type = other DNA
rcaaataaaaaatattctcataattactaaaattattcaacaccctaacc

SEQ ID NO: 24935 - DNA, 50 bp, synthetic construct
  source 1..50: mol_type = other DNA
aaatccataaactaccatctaccaaactatcacatacttcrtcctctatc

SEQ ID NO: 24936 - DNA, 50 bp, synthetic construct
  source 1..50: mol_type = other DNA
atctactcccaaatccataaactaccatctaccaaactatcacatacttc

SEQ ID NO: 24937 - DNA, 50 bp, synthetic construct
  source 1..50: mol_type = other DNA
aaacraaaacaacaaacaacaaaaaccacaacttatttataaacaacaac

SEQ ID NO: 24938 - DNA, 50 bp, synthetic construct
  source 1..50: mol_type = other DNA
aatcaaacttcaccaaccataaaaataaatcacaaaacaataattaatcc

SEQ ID NO: 24939 - DNA, 50 bp, synthetic construct
  source 1..50: mol_type = other DNA
actcatacccaaaacccacaataaaaacaaaatacrtatttatttaaatc

SEQ ID NO: 24940 - DNA, 50 bp, synthetic construct
  source 1..50: mol_type = other DNA
tttaaacacaaacatactcatacccaaaacccacaataaaaacaaaatac

SEQ ID NO: 24941 - DNA, 50 bp, synthetic construct
  source 1..50: mol_type = other DNA
cacaacrccttaccaatcacacaccaaattaatacaataattttataaac

SEQ ID NO: 24942 - DNA, 50 bp, synthetic construct
  source 1..50: mol_type = other DNA
ttaaaattcccaataacrtctttcaacccctaaaccracttactttctac

SEQ ID NO: 24943 - DNA, 50 bp, synthetic construct
  source 1..50: mol_type = other DNA
aatacactaaaaaaataccaatatccacracctctacatcaaaaacacac

SEQ ID NO: 24944 - DNA, 50 bp, synthetic construct
  source 1..50: mol_type = other DNA
ataaacaccaaaaaaatcaactaatacactaaaaaaataccaatatccac

SEQ ID NO: 24945 - DNA, 50 bp, synthetic construct
  source 1..50: mol_type = other DNA
aacatttttttaatacatcaactaatttctctaatatccacccaaaactc

SEQ ID NO: 24946 - DNA, 50 bp, synthetic construct
  source 1..50: mol_type = other DNA
aatttctctaatatccacccaaaactcrcctcaaaaaatatactcaactc

SEQ ID NO: 24947 - DNA, 50 bp, synthetic construct
  source 1..50: mol_type = other DNA
crcaaacctatattctttactctttacaaaataaaaaccctctccctttc

SEQ ID NO: 24948 - DNA, 50 bp, synthetic construct
  source 1..50: mol_type = other DNA
ccrtacccaactaaaatattttattacttacataattctaacacacaaac

SEQ ID NO: 24949 - DNA, 50 bp, synthetic construct
  source 1..50: mol_type = other DNA
aaaaaacaacractaaaatttacaaaacttattaaaacccataaacracc

SEQ ID NO: 24950 - DNA, 50 bp, synthetic construct
  source 1..50: mol_type = other DNA
aaataaaaaacaacractaaaatttacaaaacttattaaaacccataaac

SEQ ID NO: 24951 - DNA, 50 bp, synthetic construct
  source 1..50: mol_type = other DNA
cctccaatataaatacctactactatacracttaataaacctcataaacc

SEQ ID NO: 24952 - DNA, 50 bp, synthetic construct
  source 1..50: mol_type = other DNA
ataaaccraaaacatttaacctcaaaaacctaaataacatcccttaattc

SEQ ID NO: 24953 - DNA, 50 bp, synthetic construct
  source 1..50: mol_type = other DNA
aaaaaacctattactacaaaaaatacacaaaacraacctctaactaaacc

SEQ ID NO: 24954 - DNA, 50 bp, synthetic construct
  source 1..50: mol_type = other DNA
ctattactacaaaaaatacacaaaacraacctctaactaaaccraaaatc

SEQ ID NO: 24955 - DNA, 50 bp, synthetic construct
  source 1..50: mol_type = other DNA
acctctaactaaaccraaaatcracaaaaaaccaaactcataactacaac

SEQ ID NO: 24956 - DNA, 50 bp, synthetic construct
  source 1..50: mol_type = other DNA
aataaaattctttactttaaatcatccaaatcaaaaacacrccccaaccc

SEQ ID NO: 24957 - DNA, 50 bp, synthetic construct
  source 1..50: mol_type = other DNA
cctctctaaccaacttaaatctaaaacaattctacaccttataataacac

SEQ ID NO: 24958 - DNA, 50 bp, synthetic construct
  source 1..50: mol_type = other DNA
aaaaaaccrctaaacttccacrtaaatctaaacrctaactatacaaaaac

SEQ ID NO: 24959 - DNA, 50 bp, synthetic construct
  source 1..50: mol_type = other DNA
tattttcatacacracttatacttctaaatctaaaacctctcrtattcac

SEQ ID NO: 24960 - DNA, 50 bp, synthetic construct
  source 1..50: mol_type = other DNA
acctaactacctttactccctacaataaatcttttaatattttcatacac

SEQ ID NO: 24961 - DNA, 50 bp, synthetic construct
  source 1..50: mol_type = other DNA
aaaaaacaaaaacaaccaaaccctaccaaaccaaaaaaaaccctaacacc

SEQ ID NO: 24962 - DNA, 50 bp, synthetic construct
  source 1..50: mol_type = other DNA
ccttaataacccaaaactacatatactcracraaaaactaaaattaaacc

SEQ ID NO: 24963 - DNA, 50 bp, synthetic construct
  source 1..50: mol_type = other DNA
acacaaaacaacaattctacaaaactctcaaaaacctaccctaaaccccc

SEQ ID NO: 24964 - DNA, 50 bp, synthetic construct
  source 1..50: mol_type = other DNA
aaaaaaaaaccacccctcrataccttactataacttccaaaaaaactaac

SEQ ID NO: 24965 - DNA, 50 bp, synthetic construct
  source 1..50: mol_type = other DNA
aaatcataataaaacaccraaaaataactcctctccctacaacractatc

SEQ ID NO: 24966 - DNA, 50 bp, synthetic construct
  source 1..50: mol_type = other DNA
ccaacaaataactacratcctaaaactaatcrcaacaaaccatcctacac

SEQ ID NO: 24967 - DNA, 50 bp, synthetic construct
  source 1..50: mol_type = other DNA
aaacrtactactacataaccrctcacaatacrtccaaaaactaaaaatac

SEQ ID NO: 24968 - DNA, 50 bp, synthetic construct
  source 1..50: mol_type = other DNA
ttataaaaacrtaaacctacataacaccctacraaacatctcatataaac

SEQ ID NO: 24969 - DNA, 50 bp, synthetic construct
  source 1..50: mol_type = other DNA
taaacrcactataaacrattatacaacaacacrctcatataaaatacccc

SEQ ID NO: 24970 - DNA, 50 bp, synthetic construct
  source 1..50: mol_type = other DNA
acctaactaaaccctaaacacaaaaatccataaaaccaaatacrtactcc

SEQ ID NO: 24971 - DNA, 50 bp, synthetic construct
  source 1..50: mol_type = other DNA
accaaataatatactaatcaatccaatatactaatctaattaatttcttc

SEQ ID NO: 24972 - DNA, 50 bp, synthetic construct
  source 1..50: mol_type = other DNA
aattaatttcttcrttccccatcttccatattaatcatctttaacttaac

SEQ ID NO: 24973 - DNA, 50 bp, synthetic construct
  source 1..50: mol_type = other DNA
atacttatcaattcactattttttaaaccatataaactaaatacttaaac

SEQ ID NO: 24974 - DNA, 50 bp, synthetic construct
  source 1..50: mol_type = other DNA
acaaacaatcctcctatttcracctccaaaataactaaaaccacaaaaac

SEQ ID NO: 24975 - DNA, 50 bp, synthetic construct
  source 1..50: mol_type = other DNA
aatataaaactctcccaaacttcaacrctaaactacaatacaataacrtc

SEQ ID NO: 24976 - DNA, 50 bp, synthetic construct
  source 1..50: mol_type = other DNA
aaaaaaaaccataaactcacaaaaaattatccactaacctctccacatcc

SEQ ID NO: 24977 - DNA, 50 bp, synthetic construct
  source 1..50: mol_type = other DNA
cattatcttcttctattcaataattatcttcccataaaactaacacacac

SEQ ID NO: 24978 - DNA, 50 bp, synthetic construct
  source 1..50: mol_type = other DNA
atattcctacatacaacaaatacacaaataatttctaaaataaataaacc

SEQ ID NO: 24979 - DNA, 50 bp, synthetic construct
  source 1..50: mol_type = other DNA
ctaaaatcaaacaaactaaaaaaaatcaccaactctcaacctcccctctc

SEQ ID NO: 24980 - DNA, 50 bp, synthetic construct
  source 1..50: mol_type = other DNA
ctcattaaccactatatcraaaccttatctaatctctaaaacttaaaacc

SEQ ID NO: 24981 - DNA, 50 bp, synthetic construct
  source 1..50: mol_type = other DNA
caaaattacactaaattctaaaaattcaaatttctttcttacrtactccc

SEQ ID NO: 24982 - DNA, 50 bp, synthetic construct
  source 1..50: mol_type = other DNA
tcaaatttctttcttacrtactcccraatttcaacaaaatattaaaaaac

SEQ ID NO: 24983 - DNA, 50 bp, synthetic construct
  source 1..50: mol_type = other DNA
aaaaatataattttccccaataaattattttctacccaaccctaaaaaac

SEQ ID NO: 24984 - DNA, 50 bp, synthetic construct
  source 1..50: mol_type = other DNA
aaataaaaaacaatccactaaaaaaaaccacactcccattactaaacttc

SEQ ID NO: 24985 - DNA, 50 bp, synthetic construct
  source 1..50: mol_type = other DNA
ataaaaatcttcctaataacctaatacttaatataacaaacaaaaacccc

SEQ ID NO: 24986 - DNA, 50 bp, synthetic construct
  source 1..50: mol_type = other DNA
aaatcctcaacatttaaacttaccttctactatatataaattacatatcc

SEQ ID NO: 24987 - DNA, 50 bp, synthetic construct
  source 1..50: mol_type = other DNA
aaaaaattactaaatacatttctcaatccaaacacaaaaaacaacaacac

SEQ ID NO: 24988 - DNA, 50 bp, synthetic construct
  source 1..50: mol_type = other DNA
atacatttctcaatccaaacacaaaaaacaacaacacraaaaattaaaac

SEQ ID NO: 24989 - DNA, 50 bp, synthetic construct
  source 1..50: mol_type = other DNA
ccaaacacaaaaaacaacaacacraaaaattaaaacrtaaccaataattc

SEQ ID NO: 24990 - DNA, 50 bp, synthetic construct
  source 1..50: mol_type = other DNA
cctaacaacctaaactcraaataaccttaacracaaaaacttaactatcc

SEQ ID NO: 24991 - DNA, 50 bp, synthetic construct
  source 1..50: mol_type = other DNA
atacaactataacaatacatctaaaactctaacctacraaaaccaaacrc

SEQ ID NO: 24992 - DNA, 50 bp, synthetic construct
  source 1..50: mol_type = other DNA
ttatacaactataacaatacatctaaaactctaacctacraaaaccaaac

SEQ ID NO: 24993 - DNA, 50 bp, synthetic construct
  source 1..50: mol_type = other DNA
aaccraaaactcatctaatttctataattaaatatattcatttacctaac

SEQ ID NO: 24994 - DNA, 50 bp, synthetic construct
  source 1..50: mol_type = other DNA
attacatatattcactcaatataacrcatataaaaataacaacaatttcc

SEQ ID NO: 24995 - DNA, 50 bp, synthetic construct
  source 1..50: mol_type = other DNA
aaaaaaacctaaatcaatacactacraaaactattaccactcctatatac

SEQ ID NO: 24996 - DNA, 50 bp, synthetic construct
  source 1..50: mol_type = other DNA
cctaaaaaactacctaataactcccaaaaaaacrccatatcaaaaaaaac

SEQ ID NO: 24997 - DNA, 50 bp, synthetic construct
  source 1..50: mol_type = other DNA
accatcttatactatcctatcctattctcctatcaatataaattaaaacc

SEQ ID NO: 24998 - DNA, 50 bp, synthetic construct
  source 1..50: mol_type = other DNA
ataacaaaatcrctttactaacaaacacacctaactttaaatccaacccc

SEQ ID NO: 24999 - DNA, 50 bp, synthetic construct
  source 1..50: mol_type = other DNA
taaatccaaccccrcaacttaaaaaaaattacttaacatctttaaaccac

SEQ ID NO: 25000 - DNA, 50 bp, synthetic construct
  source 1..50: mol_type = other DNA
caacaacactccaaaatacttataaaactctcaaaaaaatttattccaac

SEQ ID NO: 25001 - DNA, 50 bp, synthetic construct
  source 1..50: mol_type = other DNA
actccaaaatacttataaaactctcaaaaaaatttattccaacrctaaac

SEQ ID NO: 25002 - DNA, 50 bp, synthetic construct
  source 1..50: mol_type = other DNA
ttataaaactctcaaaaaaatttattccaacrctaaacrcaatacctaac

SEQ ID NO: 25003 - DNA, 50 bp, synthetic construct
  source 1..50: mol_type = other DNA
tttaacttatcccacaatacctatcttctattcctaaccaaaaactactc

SEQ ID NO: 25004 - DNA, 50 bp, synthetic construct
  source 1..50: mol_type = other DNA
tccaattcaaaactaaaacrtcrttaactctaaacttctttatatcttac

SEQ ID NO: 25005 - DNA, 50 bp, synthetic construct
  source 1..50: mol_type = other DNA
aaataaaacctaaaaactcaccrcaaaatacaaaaaaacccaaaaccaac

SEQ ID NO: 25006 - DNA, 50 bp, synthetic construct
  source 1..50: mol_type = other DNA
caacttcccacactaaactatctcaccatctctaaacaaataaataattc

SEQ ID NO: 25007 - DNA, 50 bp, synthetic construct
  source 1..50: mol_type = other DNA
acctcaaccctaaaacttaaccattataaacctcatctattctataaaac

SEQ ID NO: 25008 - DNA, 50 bp, synthetic construct
  source 1..50: mol_type = other DNA
ctaaataccaaactaacctacccctatcctctactattccctctattaac

SEQ ID NO: 25009 - DNA, 50 bp, synthetic construct
  source 1..50: mol_type = other DNA
aattcctacaacctttaaataaacaaaacaaacaacacaaactacactac

SEQ ID NO: 25010 - DNA, 50 bp, synthetic construct
  source 1..50: mol_type = other DNA
tacacaaaatttacaaaaaacrcactatcrtcactcaccaatatatcaac

SEQ ID NO: 25011 - DNA, 50 bp, synthetic construct
  source 1..50: mol_type = other DNA
aacctaacttaccaatatatcaccccaacrttaacatactaataaataac

SEQ ID NO: 25012 - DNA, 50 bp, synthetic construct
  source 1..50: mol_type = other DNA
ttaccaatatatcaccccaacrttaacatactaataaataacracaatac

SEQ ID NO: 25013 - DNA, 50 bp, synthetic construct
  source 1..50: mol_type = other DNA
taaaaacccaacctcccaataaaccatatcaatctctcctaataaacttc

SEQ ID NO: 25014 - DNA, 50 bp, synthetic construct
  source 1..50: mol_type = other DNA
atcctcaaatatttccaaatatcataaactacaatataataaaacattac

SEQ ID NO: 25015 - DNA, 50 bp, synthetic construct
  source 1..50: mol_type = other DNA
attttatcacactataatttataacacttaaaaatacctaaaaatttaac

SEQ ID NO: 25016 - DNA, 50 bp, synthetic construct
  source 1..50: mol_type = other DNA
aatcaaatactatattactcataccctttaataacataccaaaaattatc

SEQ ID NO: 25017 - DNA, 50 bp, synthetic construct
  source 1..50: mol_type = other DNA
aactcaaataactaaactaccaataaaacaactatacaactctacctctc

SEQ ID NO: 25018 - DNA, 50 bp, synthetic construct
  source 1..50: mol_type = other DNA
caaaatctctatcttcaaattaaaaccataattaacaaaaaacatatttc

SEQ ID NO: 25019 - DNA, 50 bp, synthetic construct
  source 1..50: mol_type = other DNA
tctccttaaaaataattttcttatacaattaatcacaataaaaacaaaac

SEQ ID NO: 25020 - DNA, 50 bp, synthetic construct
  source 1..50: mol_type = other DNA
tacaacccttatcaaattataaacaccaaaaataccccaactactaaccc

SEQ ID NO: 25021 - DNA, 50 bp, synthetic construct
  source 1..50: mol_type = other DNA
taaaaaccactatcatcrataaaaaccratataatatttataaacaactc

SEQ ID NO: 25022 - DNA, 50 bp, synthetic construct
  source 1..50: mol_type = other DNA
ataccactctaaactccaaattttaaaaaccactatcatcrataaaaacc

SEQ ID NO: 25023 - DNA, 50 bp, synthetic construct
  source 1..50: mol_type = other DNA
aacacattttataccactctaaactccaaattttaaaaaccactatcatc

SEQ ID NO: 25024 - DNA, 50 bp, synthetic construct
  source 1..50: mol_type = other DNA
aaaatccaaataactcatatttctaatcatacctttacataatactttac

SEQ ID NO: 25025 - DNA, 50 bp, synthetic construct
  source 1..50: mol_type = other DNA
taattctacatctaaatctttaactaaatttaccaattctcatataacac

SEQ ID NO: 25026 - DNA, 50 bp, synthetic construct
  source 1..50: mol_type = other DNA
tattttacaactcaatatacaaatatttaaaaacctattataaatttatc

SEQ ID NO: 25027 - DNA, 50 bp, synthetic construct
  source 1..50: mol_type = other DNA
aataaccaacactacctaaaaatttctcacaaaacatttttcttacttac

SEQ ID NO: 25028 - DNA, 50 bp, synthetic construct
  source 1..50: mol_type = other DNA
aacacattcaaataccacrataatcaaaaataccaatatataatccccac

SEQ ID NO: 25029 - DNA, 50 bp, synthetic construct
  source 1..50: mol_type = other DNA
aatataaacatataacacrtaaaaattatacattaacatctctaaccacc

SEQ ID NO: 25030 - DNA, 50 bp, synthetic construct
  source 1..50: mol_type = other DNA
tacaacccaatcctaaaaccaaaaaaactatataaaaaccaaaataaaac

SEQ ID NO: 25031 - DNA, 50 bp, synthetic construct
  source 1..50: mol_type = other DNA
actcttttaccctcacactacaatcaaacactctttctaatatacaaacc

SEQ ID NO: 25032 - DNA, 50 bp, synthetic construct
  source 1..50: mol_type = other DNA
acctccttaatttaactaatcaaaatatccttaaactccttcttaatcac

SEQ ID NO: 25033 - DNA, 50 bp, synthetic construct
  source 1..50: mol_type = other DNA
ttctctccrataatactaacttatttctcctatctattaaaatcaactac

SEQ ID NO: 25034 - DNA, 50 bp, synthetic construct
  source 1..50: mol_type = other DNA
taatactaacttatttctcctatctattaaaatcaactacrtccaacctc

SEQ ID NO: 25035 - DNA, 50 bp, synthetic construct
  source 1..50: mol_type = other DNA
rtaacaaaaacrcaaattcatacaccaaaaaaatattcaaaaatcacrtc

SEQ ID NO: 25036 - DNA, 50 bp, synthetic construct
  source 1..50: mol_type = other DNA
acacacacacacaaataatatacaatcttcatccattaaaaaacaacrac

SEQ ID NO: 25037 - DNA, 50 bp, synthetic construct
  source 1..50: mol_type = other DNA
taaaaaacaacracrtaattcttaaacattttcctaatacataaacttac

SEQ ID NO: 25038 - DNA, 50 bp, synthetic construct
  source 1..50: mol_type = other DNA
racrtaattcttaaacattttcctaatacataaacttacrtctttaccac

SEQ ID NO: 25039 - DNA, 50 bp, synthetic construct
  source 1..50: mol_type = other DNA
cctttaattatttatactacraaaaattataattaactcttcataacacc

SEQ ID NO: 25040 - DNA, 50 bp, synthetic construct
  source 1..50: mol_type = other DNA
tcaaaaatcctctcctaaaaaaccrttctccctttaattatttatactac

SEQ ID NO: 25041 - DNA, 50 bp, synthetic construct
  source 1..50: mol_type = other DNA
cacacrataaaaaaatcacctacraatcaaaaatcctctcctaaaaaacc

SEQ ID NO: 25042 - DNA, 50 bp, synthetic construct
  source 1..50: mol_type = other DNA
caaatacaactccttatcataaccctattataccttttacttttactttc

SEQ ID NO: 25043 - DNA, 50 bp, synthetic construct
  source 1..50: mol_type = other DNA
ccraaatatctctcctatattcaacaaatcaataaacctttcttcccctc

SEQ ID NO: 25044 - DNA, 50 bp, synthetic construct
  source 1..50: mol_type = other DNA
aaaaaaaactcatataatcaccttattttacataaatctccacccctacc

SEQ ID NO: 25045 - DNA, 50 bp, synthetic construct
  source 1..50: mol_type = other DNA
atcaaacttttcaaaccacaatttttctaattttacttttacactttaac

SEQ ID NO: 25046 - DNA, 50 bp, synthetic construct
  source 1..50: mol_type = other DNA
atctaactaatacaattcttcctaaaccattacataaacttccrctaaac

SEQ ID NO: 25047 - DNA, 50 bp, synthetic construct
  source 1..50: mol_type = other DNA
caccraccaaaacaaatattaattaaacattatttacaaatctctaaccc

SEQ ID NO: 25048 - DNA, 50 bp, synthetic construct
  source 1..50: mol_type = other DNA
tactcaattaatatttaccctaaccrataaacccaacaaaaactatacac

SEQ ID NO: 25049 - DNA, 50 bp, synthetic construct
  source 1..50: mol_type = other DNA
aaaaattcaaattaaaaccacrttataaaaaatctaaaaccaaacctacc

SEQ ID NO: 25050 - DNA, 50 bp, synthetic construct
  source 1..50: mol_type = other DNA
tccataaaactaattcacatataattttatttacaaacaattcttaaatc

SEQ ID NO: 25051 - DNA, 50 bp, synthetic construct
  source 1..50: mol_type = other DNA
rttacaactttcactctaacctaacatttcaaaaaaaacttacaaataac

SEQ ID NO: 25052 - DNA, 50 bp, synthetic construct
  source 1..50: mol_type = other DNA
ctcraccaaaatacaataatacttaaaaccaacactcaaataacttttac

SEQ ID NO: 25053 - DNA, 50 bp, synthetic construct
  source 1..50: mol_type = other DNA
aaaaaaaattataatacrcccttactacctacaaataaataattacatcc

SEQ ID NO: 25054 - DNA, 50 bp, synthetic construct
  source 1..50: mol_type = other DNA
ttttctataaaatctccccaaaaaaaaccattcttcrcaatcctaaattc

SEQ ID NO: 25055 - DNA, 50 bp, synthetic construct
  source 1..50: mol_type = other DNA
atattacctaaatattttctataaaatctccccaaaaaaaaccattcttc

SEQ ID NO: 25056 - DNA, 50 bp, synthetic construct
  source 1..50: mol_type = other DNA
cttacttcraattccctcaatctattaaaattaaaaatcacraattacrc

SEQ ID NO: 25057 - DNA, 50 bp, synthetic construct
  source 1..50: mol_type = other DNA
tacttacttcraattccctcaatctattaaaattaaaaatcacraattac

SEQ ID NO: 25058 - DNA, 50 bp, synthetic construct
  source 1..50: mol_type = other DNA
accaaaatacttacttcraattccctcaatctattaaaattaaaaatcac

SEQ ID NO: 25059 - DNA, 50 bp, synthetic construct
  source 1..50: mol_type = other DNA
aaaactacaaaaacaacttcactaaaaatacctaccaaaatacttacttc

SEQ ID NO: 25060 - DNA, 50 bp, synthetic construct
  source 1..50: mol_type = other DNA
crccaacaatcattataacaaaatcttaactcataatcrtatcaaaaatc

SEQ ID NO: 25061 - DNA, 50 bp, synthetic construct
  source 1..50: mol_type = other DNA
aaaaaaaaactatattcctttctaatcaaaactttaaataataactccac

SEQ ID NO: 25062 - DNA, 50 bp, synthetic construct
  source 1..50: mol_type = other DNA
ttaaaaatcaacctctcatactcrtaccaaattttacraaacacacatac

SEQ ID NO: 25063 - DNA, 50 bp, synthetic construct
  source 1..50: mol_type = other DNA
aaaaataaattacaaaatttatcttaatataaaattattcccttctctcc

SEQ ID NO: 25064 - DNA, 50 bp, synthetic construct
  source 1..50: mol_type = other DNA
aatcraaaaacaactctatacraaaattaaccratctactaaataaaatc

SEQ ID NO: 25065 - DNA, 50 bp, synthetic construct
  source 1..50: mol_type = other DNA
atccaataaacttcctatctctaaccaaaaatcraaaaacaactctatac

SEQ ID NO: 25066 - DNA, 50 bp, synthetic construct
  source 1..50: mol_type = other DNA
acttacctaaacctaaaatccaataaacttcctatctctaaccaaaaatc

SEQ ID NO: 25067 - DNA, 50 bp, synthetic construct
  source 1..50: mol_type = other DNA
aaaaaactaatcrtctacattttaccatatcacctacctaaaaaccctcc

SEQ ID NO: 25068 - DNA, 50 bp, synthetic construct
  source 1..50: mol_type = other DNA
taacataataaaatataaacractaactctctatctatcttcaaaataac

SEQ ID NO: 25069 - DNA, 50 bp, synthetic construct
  source 1..50: mol_type = other DNA
aaataatatcttataaactacttttactaatttaaccttaattcttccac

SEQ ID NO: 25070 - DNA, 50 bp, synthetic construct
  source 1..50: mol_type = other DNA
ataaactacttttactaatttaaccttaattcttccacrtctttatcacc

SEQ ID NO: 25071 - DNA, 50 bp, synthetic construct
  source 1..50: mol_type = other DNA
aaacacccctacttctattcaacatctactaatctcaaaataataaaccc

SEQ ID NO: 25072 - DNA, 50 bp, synthetic construct
  source 1..50: mol_type = other DNA
caaaaaaccactttcactttcaaaaaacaaacttaatcattatactccac

SEQ ID NO: 25073 - DNA, 50 bp, synthetic construct
  source 1..50: mol_type = other DNA
ataatcaaaataacaaaaatacacaaaaataaaatcttaaacccattccc

SEQ ID NO: 25074 - DNA, 50 bp, synthetic construct
  source 1..50: mol_type = other DNA
taaaactatctacracacaaaatatctctcttaaaaatattaaccrttac

SEQ ID NO: 25075 - DNA, 50 bp, synthetic construct
  source 1..50: mol_type = other DNA
taacttaaaactatctacracacaaaatatctctcttaaaaatattaacc

SEQ ID NO: 25076 - DNA, 50 bp, synthetic construct
  source 1..50: mol_type = other DNA
aacaacaaacactacractctacaatttaaaaaccaccttctaactaaac

SEQ ID NO: 25077 - DNA, 50 bp, synthetic construct
  source 1..50: mol_type = other DNA
aaacactattaaaaatcttaaaacatacctaaacatataaaccaaacrac

SEQ ID NO: 25078 - DNA, 50 bp, synthetic construct
  source 1..50: mol_type = other DNA
aaaattaacctttaatatcaaattaattaaaatctcaaataacactaacc

SEQ ID NO: 25079 - DNA, 50 bp, synthetic construct
  source 1..50: mol_type = other DNA
attaattaaaatctcaaataacactaaccrctaaccattcatcccatctc

SEQ ID NO: 25080 - DNA, 50 bp, synthetic construct
  source 1..50: mol_type = other DNA
aacacaaataaaaacctaccaaaacttaccaaaaaactaacaaacaactc

SEQ ID NO: 25081 - DNA, 50 bp, synthetic construct
  source 1..50: mol_type = other DNA
cccacactaaaccaaactaaatccaaatataaaatcaaatcatctttccc

SEQ ID NO: 25082 - DNA, 50 bp, synthetic construct
  source 1..50: mol_type = other DNA
ttaataaaacatacctttctcctcaaaatctaaacaaaatcaataaaaac

SEQ ID NO: 25083 - DNA, 50 bp, synthetic construct
  source 1..50: mol_type = other DNA
caactcttaactcacaaaataactaacaacraaaaaacrtaaacaataac

SEQ ID NO: 25084 - DNA, 50 bp, synthetic construct
  source 1..50: mol_type = other DNA
tacctacaactaaccraaaccaactcttaactcacaaaataactaacaac

SEQ ID NO: 25085 - DNA, 50 bp, synthetic construct
  source 1..50: mol_type = other DNA
tatctacrcttccccrttattaatcattctataaatcaaaaactaacctc

SEQ ID NO: 25086 - DNA, 50 bp, synthetic construct
  source 1..50: mol_type = other DNA
craaaaatcccttataacttactaactacaaacctaacctcrtaaaaccc

SEQ ID NO: 25087 - DNA, 50 bp, synthetic construct
  source 1..50: mol_type = other DNA
caaataactcraaaaatcccttataacttactaactacaaacctaacctc

SEQ ID NO: 25088 - DNA, 50 bp, synthetic construct
  source 1..50: mol_type = other DNA
ctctaatcaaaacaaactaaaccacrcataatcacaataacaaataactc

SEQ ID NO: 25089 - DNA, 50 bp, synthetic construct
  source 1..50: mol_type = other DNA
taaactttatttcctctttaaaacrctctaatcaaaacaaactaaaccac

SEQ ID NO: 25090 - DNA, 50 bp, synthetic construct
  source 1..50: mol_type = other DNA
aaccacctattattataaccatacrtaacccaatttattttaattaaaac

SEQ ID NO: 25091 - DNA, 50 bp, synthetic construct
  source 1..50: mol_type = other DNA
ttctcaaacatactacaaaactaataccataaataattcaacctaaaaac

SEQ ID NO: 25092 - DNA, 50 bp, synthetic construct
  source 1..50: mol_type = other DNA
aaattccaaattaaacaaactaatcaatttcacaaaacacacacctaaac

SEQ ID NO: 25093 - DNA, 50 bp, synthetic construct
  source 1..50: mol_type = other DNA
cctaaaccaaaaaatcctaccttaacaaccactactctaaacaaacttac

SEQ ID NO: 25094 - DNA, 50 bp, synthetic construct
  source 1..50: mol_type = other DNA
caaataatactaaaaaatttcatatatatatctatttaccttcccccacc

SEQ ID NO: 25095 - DNA, 50 bp, synthetic construct
  source 1..50: mol_type = other DNA
cctccaaacaactcctatcaaacaactcaattaaactaatataaaaaacc

SEQ ID NO: 25096 - DNA, 50 bp, synthetic construct
  source 1..50: mol_type = other DNA
ctcctatcaaacaactcaattaaactaatataaaaaaccracaaatttac

SEQ ID NO: 25097 - DNA, 50 bp, synthetic construct
  source 1..50: mol_type = other DNA
aaaaaaatttcrtatacacctccrcatctatacactctaaaataaaaccc

SEQ ID NO: 25098 - DNA, 50 bp, synthetic construct
  source 1..50: mol_type = other DNA
caccttataataactatacttaatacaaaaaaaatttcrtatacacctcc

SEQ ID NO: 25099 - DNA, 50 bp, synthetic construct
  source 1..50: mol_type = other DNA
tctaaaaaaccacaccttataataactatacttaatacaaaaaaaatttc

SEQ ID NO: 25100 - DNA, 50 bp, synthetic construct
  source 1..50: mol_type = other DNA
ccttacttcaaaaatcttaaaactactctaaatacctaaactactacccc

SEQ ID NO: 25101 - DNA, 50 bp, synthetic construct
  source 1..50: mol_type = other DNA
aaaactatctaaccataacataaaaaaccaacacatatctttaaaaaaac

SEQ ID NO: 25102 - DNA, 50 bp, synthetic construct
  source 1..50: mol_type = other DNA
aaccataacataaaaaaccaacacatatctttaaaaaaacrttcaactcc

SEQ ID NO: 25103 - DNA, 50 bp, synthetic construct
  source 1..50: mol_type = other DNA
acctaaaacaaactccaaaaataacatttccactaacaataacaaaaatc

SEQ ID NO: 25104 - DNA, 50 bp, synthetic construct
  source 1..50: mol_type = other DNA
aatcacaaaacccaaaaataatcaaaaaaacttctataaatatattaaac

SEQ ID NO: 25105 - DNA, 50 bp, synthetic construct
  source 1..50: mol_type = other DNA
caaatctaacctcaattctccracctaaaacactatttattctatatctc

SEQ ID NO: 25106 - DNA, 50 bp, synthetic construct
  source 1..50: mol_type = other DNA
aaacaaacraataatccccatcctacaaaaacatttattttataaacacc

SEQ ID NO: 25107 - DNA, 50 bp, synthetic construct
  source 1..50: mol_type = other DNA
ataacaaatttatcaaacaatctctaatcttccrtacraatttcttccac

SEQ ID NO: 25108 - DNA, 50 bp, synthetic construct
  source 1..50: mol_type = other DNA
ataactttccacataaaataacaaatttatcaaacaatctctaatcttcc

SEQ ID NO: 25109 - DNA, 50 bp, synthetic construct
  source 1..50: mol_type = other DNA
taaaaaaacacttataaccttaaccataaaattctaccactccatccacc

SEQ ID NO: 25110 - DNA, 50 bp, synthetic construct
  source 1..50: mol_type = other DNA
racaaaatatttaactcttattacccaaactaaaataatctcaactcacc

SEQ ID NO: 25111 - DNA, 50 bp, synthetic construct
  source 1..50: mol_type = other DNA
atttcttcccatcccaaattatctatttaaacaatataacccctaactac

SEQ ID NO: 25112 - DNA, 50 bp, synthetic construct
  source 1..50: mol_type = other DNA
acaaaaaaactctaactaaatttataatcacccaaaaatacaaccacaac

SEQ ID NO: 25113 - DNA, 50 bp, synthetic construct
  source 1..50: mol_type = other DNA
actatacaaaaactctactcaaacrcaataattaacactcraacccraac

SEQ ID NO: 25114 - DNA, 50 bp, synthetic construct
  source 1..50: mol_type = other DNA
acctcatcctactatacaaaaactctactcaaacrcaataattaacactc

SEQ ID NO: 25115 - DNA, 50 bp, synthetic construct
  source 1..50: mol_type = other DNA
ctaaaaaatccacatttcaaaacrccctctaactctctatactacattcc

SEQ ID NO: 25116 - DNA, 50 bp, synthetic construct
  source 1..50: mol_type = other DNA
tctaactctctatactacattccrcctaaaaatttcaacacaacaactac

SEQ ID NO: 25117 - DNA, 50 bp, synthetic construct
  source 1..50: mol_type = other DNA
caactacrtaacaaaccctcctaccaaaacatacaataaaatataaaaac

SEQ ID NO: 25118 - DNA, 50 bp, synthetic construct
  source 1..50: mol_type = other DNA
aaattcttaaaaacaaaaaacaatcactaccatcaccacacacctactcc

SEQ ID NO: 25119 - DNA, 50 bp, synthetic construct
  source 1..50: mol_type = other DNA
aaaatcttaaaacatctccactaatcccaaaactataaacaaaaactaac

SEQ ID NO: 25120 - DNA, 50 bp, synthetic construct
  source 1..50: mol_type = other DNA
cctaacataaaacaaaaacrttaaaccaaataaccttcraaataccttcc

SEQ ID NO: 25121 - DNA, 50 bp, synthetic construct
  source 1..50: mol_type = other DNA
aaactttatttccctaacataaaacaaaaacrttaaaccaaataaccttc

SEQ ID NO: 25122 - DNA, 50 bp, synthetic construct
  source 1..50: mol_type = other DNA
ccatataattctattttttataaataaacacccataaatttcccatctac

SEQ ID NO: 25123 - DNA, 50 bp, synthetic construct
  source 1..50: mol_type = other DNA
aacatccaaattataaaacattataataaacaaataatcctaaacccaac

SEQ ID NO: 25124 - DNA, 50 bp, synthetic construct
  source 1..50: mol_type = other DNA
ctcaaataatccactcaacttaacctcccactatactaaaatttacaaac

SEQ ID NO: 25125 - DNA, 50 bp, synthetic construct
  source 1..50: mol_type = other DNA
aatcaaaaaaactaccatctaaattaacactcaaactacaaataaaaacc

SEQ ID NO: 25126 - DNA, 50 bp, synthetic construct
  source 1..50: mol_type = other DNA
aacrccrtaatcatccactaaaccaaataaaaatcaaaaaattcaaattc

SEQ ID NO: 25127 - DNA, 50 bp, synthetic construct
  source 1..50: mol_type = other DNA
acctaaatatacttcctctttaaaaacctatttcaaatacacatactaac

SEQ ID NO: 25128 - DNA, 50 bp, synthetic construct
  source 1..50: mol_type = other DNA
ccrtataactactactaaacaatcaactaaaaaactctaatataactcac

SEQ ID NO: 25129 - DNA, 50 bp, synthetic construct
  source 1..50: mol_type = other DNA
aaaactcttcacaaattcttaaaaaaacaaaccatttaataataccaacc

SEQ ID NO: 25130 - DNA, 50 bp, synthetic construct
  source 1..50: mol_type = other DNA
aacaataaactttatactctaattcccacaaacttaaattaataaaaacc

SEQ ID NO: 25131 - DNA, 50 bp, synthetic construct
  source 1..50: mol_type = other DNA
atcttaaacaattcaaaaatcatattatttaactaaatacaataactcac

SEQ ID NO: 25132 - DNA, 50 bp, synthetic construct
  source 1..50: mol_type = other DNA
ataccccacaaaaaaactttaaatctataatctcctcccaaattttaacc

SEQ ID NO: 25133 - DNA, 50 bp, synthetic construct
  source 1..50: mol_type = other DNA
cttataaatttcctctttacaaaccttaaaataacttacatcatattcac

SEQ ID NO: 25134 - DNA, 50 bp, synthetic construct
  source 1..50: mol_type = other DNA
aaatttccaatacaaccaacttaataccaaatacacaaacaaccccaatc

SEQ ID NO: 25135 - DNA, 50 bp, synthetic construct
  source 1..50: mol_type = other DNA
taaacatattcctaatttaaaactaacactctaacaataccatttaaaac

SEQ ID NO: 25136 - DNA, 50 bp, synthetic construct
  source 1..50: mol_type = other DNA
aaaaaaaatatttaactcaactaaacaacctttacaacaattccrccacc

SEQ ID NO: 25137 - DNA, 50 bp, synthetic construct
  source 1..50: mol_type = other DNA
acaattccrccaccrataacaataaaaaactatcaacttaaaaaaaccrc

SEQ ID NO: 25138 - DNA, 50 bp, synthetic construct
  source 1..50: mol_type = other DNA
cctttcaaaacrtaaccaaaaaaaacttaacrtaaaaacaaacacttccc

SEQ ID NO: 25139 - DNA, 50 bp, synthetic construct
  source 1..50: mol_type = other DNA
aaaatttttaccatttttacctttcaaaacrtaaccaaaaaaaacttaac

SEQ ID NO: 25140 - DNA, 50 bp, synthetic construct
  source 1..50: mol_type = other DNA
accttaccaccctattcttaaacataaaaaaccaaacraaaaaactttac

SEQ ID NO: 25141 - DNA, 50 bp, synthetic construct
  source 1..50: mol_type = other DNA
ttttactttattttaattttctccraaataacctcraataccraaaaccc

SEQ ID NO: 25142 - DNA, 50 bp, synthetic construct
  source 1..50: mol_type = other DNA
ratacrcattttactttattttaattttctccraaataacctcraatacc

SEQ ID NO: 25143 - DNA, 50 bp, synthetic construct
  source 1..50: mol_type = other DNA
ataaatcaaacraaaacrcaactatacaaatttactcracctaaaaatac

SEQ ID NO: 25144 - DNA, 50 bp, synthetic construct
  source 1..50: mol_type = other DNA
ttactatcacccttatccttaaaataaaacacrctcttaaccatccactc

SEQ ID NO: 25145 - DNA, 50 bp, synthetic construct
  source 1..50: mol_type = other DNA
ccttaaaataaaacacrctcttaaccatccactcrtaaatctacracaac

SEQ ID NO: 25146 - DNA, 50 bp, synthetic construct
  source 1..50: mol_type = other DNA
aactctcrataaccttaataataaaatcracrtaaaacaaattaccccac

SEQ ID NO: 25147 - DNA, 50 bp, synthetic construct
  source 1..50: mol_type = other DNA
craattaaactaactaaactccracctaaacaacraccaaatacacraac

SEQ ID NO: 25148 - DNA, 50 bp, synthetic construct
  source 1..50: mol_type = other DNA
taaatctctattattttctaataattctcraatatttctataattctctc

SEQ ID NO: 25149 - DNA, 50 bp, synthetic construct
  source 1..50: mol_type = other DNA
crccttctcaatattttaattactaaaaaacaaaccaacrtaaaaacrcc

SEQ ID NO: 25150 - DNA, 50 bp, synthetic construct
  source 1..50: mol_type = other DNA
cttctcaatattttaattactaaaaaacaaaccaacrtaaaaacrccrac

SEQ ID NO: 25151 - DNA, 50 bp, synthetic construct
  source 1..50: mol_type = other DNA
tttctttataaactaaactttatccctacataataactaaattccaaaac

SEQ ID NO: 25152 - DNA, 50 bp, synthetic construct
  source 1..50: mol_type = other DNA
aacatcacaaaacacaaattaaccttcccccactatattctaatcaaatc

SEQ ID NO: 25153 - DNA, 50 bp, synthetic construct
  source 1..50: mol_type = other DNA
aacttactctactacccaatcatactttctaaaaatatttttaatataac

SEQ ID NO: 25154 - DNA, 50 bp, synthetic construct
  source 1..50: mol_type = other DNA
taattctaaaataacaaataacttcttacataactaatcaaaatatcaac

SEQ ID NO: 25155 - DNA, 50 bp, synthetic construct
  source 1..50: mol_type = other DNA
atacttcctttaaaaatctaatttatataaaaattacttttaaactaaac

SEQ ID NO: 25156 - DNA, 50 bp, synthetic construct
  source 1..50: mol_type = other DNA
aaactcaaactctaataatactacrtctcaaccccaatattaaaattctc

SEQ ID NO: 25157 - DNA, 50 bp, synthetic construct
  source 1..50: mol_type = other DNA
aatactaaaactaaaacrcaacatcactaaaacctaaatcctaatcaaac

SEQ ID NO: 25158 - DNA, 50 bp, synthetic construct
  source 1..50: mol_type = other DNA
atcrttattttcctaacaaatttttccaaaacttctcaaatactctaatc

SEQ ID NO: 25159 - DNA, 50 bp, synthetic construct
  source 1..50: mol_type = other DNA
tatttctacaaaaattttcccccttaatcrataacraaactactaaacrc

SEQ ID NO: 25160 - DNA, 50 bp, synthetic construct
  source 1..50: mol_type = other DNA
aatatttctacaaaaattttcccccttaatcrataacraaactactaaac

SEQ ID NO: 25161 - DNA, 50 bp, synthetic construct
  source 1..50: mol_type = other DNA
ataaacccaaacctccrtaaacataactacrataaacraaaactaaaaac

SEQ ID NO: 25162 - DNA, 50 bp, synthetic construct
  source 1..50: mol_type = other DNA
taaccatatttacraaaacctaaacctacaaattctccctcttttccacc

SEQ ID NO: 25163 - DNA, 50 bp, synthetic construct
  source 1..50: mol_type = other DNA
tacaaaaatacttctaaactactactcctaaaaactcratcraaataccc

SEQ ID NO: 25164 - DNA, 50 bp, synthetic construct
  source 1..50: mol_type = other DNA
acaatatattacaaaaatacttctaaactactactcctaaaaactcratc

SEQ ID NO: 25165 - DNA, 50 bp, synthetic construct
  source 1..50: mol_type = other DNA
aataacaatatattacaaaaatacttctaaactactactcctaaaaactc

SEQ ID NO: 25166 - DNA, 50 bp, synthetic construct
  source 1..50: mol_type = other DNA
actcaaaaacacttttataacatactattatccctcaaaaacrtatacrc

SEQ ID NO: 25167 - DNA, 50 bp, synthetic construct
  source 1..50: mol_type = other DNA
acacttttataacatactattatccctcaaaaacrtatacrcrcaaaaac

SEQ ID NO: 25168 - DNA, 50 bp, synthetic construct
  source 1..50: mol_type = other DNA
ccatcccttttactttattctattaatcacacacacaaccctaattcatc

SEQ ID NO: 25169 - DNA, 50 bp, synthetic construct
  source 1..50: mol_type = other DNA
aatactaaaactatttcctaaactttcttaaaattataaataacacaaac

SEQ ID NO: 25170 - DNA, 50 bp, synthetic construct
  source 1..50: mol_type = other DNA
tccttctaaaaccctcttctttacttcatccaataacctatcaaatctcc

SEQ ID NO: 25171 - DNA, 50 bp, synthetic construct
  source 1..50: mol_type = other DNA
actcctatcttactcaatcataaatattttaactaaataactacttatcc

SEQ ID NO: 25172 - DNA, 50 bp, synthetic construct
  source 1..50: mol_type = other DNA
aaatactacactcaaaaattaaatacaatcattaactaaattccaatcac

SEQ ID NO: 25173 - DNA, 50 bp, synthetic construct
  source 1..50: mol_type = other DNA
craaacctaaatcataactactccaccttccctaacacaaaaaaacrttc

SEQ ID NO: 25174 - DNA, 50 bp, synthetic construct
  source 1..50: mol_type = other DNA
acatttaatataaatatatataaacctataactacraacctaaaactccc

SEQ ID NO: 25175 - DNA, 50 bp, synthetic construct
  source 1..50: mol_type = other DNA
actcraaccccattaacatttaatataaatatatataaacctataactac

SEQ ID NO: 25176 - DNA, 50 bp, synthetic construct
  source 1..50: mol_type = other DNA
actcrcaactacaaacttatacacactcacatcaaatactaataaaaccc

SEQ ID NO: 25177 - DNA, 50 bp, synthetic construct
  source 1..50: mol_type = other DNA
taaaaaccaaaataacaaacaaataccatacttaaaatattcattcaaac

SEQ ID NO: 25178 - DNA, 50 bp, synthetic construct
  source 1..50: mol_type = other DNA
rtcaattctcaatcctcrtacaaacrtaccaacaacatctaatataattc

SEQ ID NO: 25179 - DNA, 50 bp, synthetic construct
  source 1..50: mol_type = other DNA
aaacrtaccaacaacatctaatataattcraacttcttccttcctatttc

SEQ ID NO: 25180 - DNA, 50 bp, synthetic construct
  source 1..50: mol_type = other DNA
aaataccactttcatccttacaactactaaaaaacaaaacctcctcaatc

SEQ ID NO: 25181 - DNA, 50 bp, synthetic construct
  source 1..50: mol_type = other DNA
aattactcaactatatatacattaacccccacacctaccacctaaccaac

SEQ ID NO: 25182 - DNA, 50 bp, synthetic construct
  source 1..50: mol_type = other DNA
caacaacatccttcactaatctacccaacatcaaaaaaaccaaataatac

SEQ ID NO: 25183 - DNA, 50 bp, synthetic construct
  source 1..50: mol_type = other DNA
atataaaaccraatataccaaatatatatcacaaaaccataccccraaac

SEQ ID NO: 25184 - DNA, 50 bp, synthetic construct
  source 1..50: mol_type = other DNA
ttcccatataaaaccraatataccaaatatatatcacaaaaccatacccc

SEQ ID NO: 25185 - DNA, 50 bp, synthetic construct
  source 1..50: mol_type = other DNA
taacatatacctaacacacccractccacataaaaaatcaaaaataaaac

SEQ ID NO: 25186 - DNA, 50 bp, synthetic construct
  source 1..50: mol_type = other DNA
tccaatttaaaaaccaacrataaccttaaacaataacaaaattccttaac

SEQ ID NO: 25187 - DNA, 50 bp, synthetic construct
  source 1..50: mol_type = other DNA
cttataacccaaacaaccrctaaaaaatcctaccattacctaaaatcatc

SEQ ID NO: 25188 - DNA, 50 bp, synthetic construct
  source 1..50: mol_type = other DNA
tttcataatctaaattcctaatttcatcatactttatataatacattttc

SEQ ID NO: 25189 - DNA, 50 bp, synthetic construct
  source 1..50: mol_type = other DNA
ataaacataactttaaaaaaaaataacctattataacaacaccacacccc

SEQ ID NO: 25190 - DNA, 50 bp, synthetic construct
  source 1..50: mol_type = other DNA
catcaataaaaaacaaaacccaaaaattctaatactttaaatataattac

SEQ ID NO: 25191 - DNA, 50 bp, synthetic construct
  source 1..50: mol_type = other DNA
acacactataaacttcaaaatttaactactattcataaaaaaatataaac

SEQ ID NO: 25192 - DNA, 50 bp, synthetic construct
  source 1..50: mol_type = other DNA
aaaacaattatttctcaaaacatctacaactatttatcaattaatttacc

SEQ ID NO: 25193 - DNA, 50 bp, synthetic construct
  source 1..50: mol_type = other DNA
taccraacttatcattccatttaattacatcttaataaaaaacaaatatc

SEQ ID NO: 25194 - DNA, 50 bp, synthetic construct
  source 1..50: mol_type = other DNA
ttttattcratattacctaaaacaacctcaatatatttccatttattacc

SEQ ID NO: 25195 - DNA, 50 bp, synthetic construct
  source 1..50: mol_type = other DNA
aaacracacctaccttttatcaaaatacaattaaataaaataacaaactc

SEQ ID NO: 25196 - DNA, 50 bp, synthetic construct
  source 1..50: mol_type = other DNA
acaaactcrataataaataaaaatatactaaaactatctcaaacaacatc

SEQ ID NO: 25197 - DNA, 50 bp, synthetic construct
  source 1..50: mol_type = other DNA
taattcactacaattactaaattaacaaaatatatattttcactaaatac

SEQ ID NO: 25198 - DNA, 50 bp, synthetic construct
  source 1..50: mol_type = other DNA
ttcccaaataaaaacaaacttattactatcttaactaacccaacraaaac

SEQ ID NO: 25199 - DNA, 50 bp, synthetic construct
  source 1..50: mol_type = other DNA
tttacttcctctcrccttctttaaaacraatacacacattaacaactaac

SEQ ID NO: 25200 - DNA, 50 bp, synthetic construct
  source 1..50: mol_type = other DNA
rcrttttaaaaacccaacaaacactacacaaattcrctttacttcctctc

SEQ ID NO: 25201 - DNA, 50 bp, synthetic construct
  source 1..50: mol_type = other DNA
aaacraacctatacaatatttactaaacttccaaaacrcraaacttaatc

SEQ ID NO: 25202 - DNA, 50 bp, synthetic construct
  source 1..50: mol_type = other DNA
craaaaatccctatcataccaaacaaaaataacctacttaaaaacccaac

SEQ ID NO: 25203 - DNA, 50 bp, synthetic construct
  source 1..50: mol_type = other DNA
aaacaaaaataacctacttaaaaacccaacraactcctaaaacctttccc

SEQ ID NO: 25204 - DNA, 50 bp, synthetic construct
  source 1..50: mol_type = other DNA
taaacactcacaatatttacaatatcttccaaatcctacaaaaacaatcc

SEQ ID NO: 25205 - DNA, 50 bp, synthetic construct
  source 1..50: mol_type = other DNA
taactaaatttatttatatctaaatactaaattaaaaacccaactaattc

SEQ ID NO: 25206 - DNA, 50 bp, synthetic construct
  source 1..50: mol_type = other DNA
cccttttcttaaccttctataacactcactctacccaaaaccaatcttac

SEQ ID NO: 25207 - DNA, 50 bp, synthetic construct
  source 1..50: mol_type = other DNA
ataatcaaattaaaaaacaaatttcatctttataactaataaaataactc

SEQ ID NO: 25208 - DNA, 50 bp, synthetic construct
  source 1..50: mol_type = other DNA
aaaatacacaaacctaaaaacattcctactttataaaaatacraaacacc

SEQ ID NO: 25209 - DNA, 50 bp, synthetic construct
  source 1..50: mol_type = other DNA
aaactataaaaatacacaaacctaaaaacattcctactttataaaaatac

SEQ ID NO: 25210 - DNA, 50 bp, synthetic construct
  source 1..50: mol_type = other DNA
atatccttaaacttatacacttttataattcaacctttcttaataaaaac

SEQ ID NO: 25211 - DNA, 50 bp, synthetic construct
  source 1..50: mol_type = other DNA
cacrtcctactaattaactcattttacaaacctctaactaactacaaaac

SEQ ID NO: 25212 - DNA, 50 bp, synthetic construct
  source 1..50: mol_type = other DNA
tttaaaataactaatttctatcatataactaaaacrcccataaaaataac

SEQ ID NO: 25213 - DNA, 50 bp, synthetic construct
  source 1..50: mol_type = other DNA
aaacatcctattaaaatctaaaaacraaaatttaaaaacctaactcatac

SEQ ID NO: 25214 - DNA, 50 bp, synthetic construct
  source 1..50: mol_type = other DNA
tataaaaacacrctctaaacactataaaacaccrtacacaaaaaacaaac

SEQ ID NO: 25215 - DNA, 50 bp, synthetic construct
  source 1..50: mol_type = other DNA
ccataaccccttaccractcttatacaaacttaacataatattaacttcc

SEQ ID NO: 25216 - DNA, 50 bp, synthetic construct
  source 1..50: mol_type = other DNA
tcctatacttctaacttctattctcttcctatttttctcctcctttcctc

SEQ ID NO: 25217 - DNA, 50 bp, synthetic construct
  source 1..50: mol_type = other DNA
caacaaaaacacatccaaaaatcaaaactaaaaaacaaaacaaatcaaac

SEQ ID NO: 25218 - DNA, 50 bp, synthetic construct
  source 1..50: mol_type = other DNA
accctaaaacactccataatacacaaacaacaaaaaaaatcctaataccc

SEQ ID NO: 25219 - DNA, 50 bp, synthetic construct
  source 1..50: mol_type = other DNA
ataaattatcctctaaaacaaatcctcacatcataatttccaaaacatac

SEQ ID NO: 25220 - DNA, 50 bp, synthetic construct
  source 1..50: mol_type = other DNA
ctcttactttctctaattttcaattcacaaacataataaccaactataac

SEQ ID NO: 25221 - DNA, 50 bp, synthetic construct
  source 1..50: mol_type = other DNA
aacaacctataaaaaaaactatataaacacacacacatacacrcacatac

SEQ ID NO: 25222 - DNA, 50 bp, synthetic construct
  source 1..50: mol_type = other DNA
aacaaaacaacaacctataaaaaaaactatataaacacacacacatacac

SEQ ID NO: 25223 - DNA, 50 bp, synthetic construct
  source 1..50: mol_type = other DNA
aataattctctaaactttccttccaataaacatcatattttaaaataatc

SEQ ID NO: 25224 - DNA, 50 bp, synthetic construct
  source 1..50: mol_type = other DNA
aaacaaatcctcaattactttaaactttctaattctttacattccttccc

SEQ ID NO: 25225 - DNA, 50 bp, synthetic construct
  source 1..50: mol_type = other DNA
aaatttaaaacaactcttatccctatatatctttaacaataaatatatcc

SEQ ID NO: 25226 - DNA, 50 bp, synthetic construct
  source 1..50: mol_type = other DNA
ctaaaacrtacaatactctttttcttcctaatcctaacaaaaaacaatac

SEQ ID NO: 25227 - DNA, 50 bp, synthetic construct
  source 1..50: mol_type = other DNA
tttttcttcctaatcctaacaaaaaacaatacraaaaaatctccctccrc

SEQ ID NO: 25228 - DNA, 50 bp, synthetic construct
  source 1..50: mol_type = other DNA
taaaactacrcccccraatacccataactacaaaaatactaaacataaac

SEQ ID NO: 25229 - DNA, 50 bp, synthetic construct
  source 1..50: mol_type = other DNA
raatacccataactacaaaaatactaaacataaacrcccrcctaaaaccc

SEQ ID NO: 25230 - DNA, 50 bp, synthetic construct
  source 1..50: mol_type = other DNA
ttcctataattccaaaacataaaaaatataaacraaacaatacctcaatc

SEQ ID NO: 25231 - DNA, 50 bp, synthetic construct
  source 1..50: mol_type = other DNA
accaattcttcactaacactaaaaaattaccttacaatatcaacataaac

SEQ ID NO: 25232 - DNA, 50 bp, synthetic construct
  source 1..50: mol_type = other DNA
tctaataactaaaaataacaacaaattctatcttaatatatattacrcac

SEQ ID NO: 25233 - DNA, 50 bp, synthetic construct
  source 1..50: mol_type = other DNA
tcactctaataactaaaaataacaacaaattctatcttaatatatattac

SEQ ID NO: 25234 - DNA, 50 bp, synthetic construct
  source 1..50: mol_type = other DNA
acacacatcaaaacaaaacctattaccattttcaaccaccaaaataaaac

SEQ ID NO: 25235 - DNA, 50 bp, synthetic construct
  source 1..50: mol_type = other DNA
aaacacataccaaaataatcrcaataataaatacrtcrtttctccaaatc

SEQ ID NO: 25236 - DNA, 50 bp, synthetic construct
  source 1..50: mol_type = other DNA
ttcaaccaaataaaaacacataccaaaataatcrcaataataaatacrtc

SEQ ID NO: 25237 - DNA, 50 bp, synthetic construct
  source 1..50: mol_type = other DNA
tacttcaaccaaataaaaacacataccaaaataatcrcaataataaatac

SEQ ID NO: 25238 - DNA, 50 bp, synthetic construct
  source 1..50: mol_type = other DNA
actacatctattaatacttcaaccaaataaaaacacataccaaaataatc

SEQ ID NO: 25239 - DNA, 50 bp, synthetic construct
  source 1..50: mol_type = other DNA
ttccttcaaaacactaccaatataaattttaaaatccattaataaacatc

SEQ ID NO: 25240 - DNA, 50 bp, synthetic construct
  source 1..50: mol_type = other DNA
aactcttaaaaactttcccatttaaaatatactacataattaataaaaac

SEQ ID NO: 25241 - DNA, 50 bp, synthetic construct
  source 1..50: mol_type = other DNA
ataactacttcatttatcaaaactcaatttccataataacatctaacctc

SEQ ID NO: 25242 - DNA, 50 bp, synthetic construct
  source 1..50: mol_type = other DNA
tccttaaaaacaatttctcaaaaaaccctaaaatctacaacattatcatc

SEQ ID NO: 25243 - DNA, 50 bp, synthetic construct
  source 1..50: mol_type = other DNA
cttatataatcaatttatctccatacaaaaacctcaaaccaaaacaaccc

SEQ ID NO: 25244 - DNA, 50 bp, synthetic construct
  source 1..50: mol_type = other DNA
attcaaatataaatttaactacatccctacaataaataattaattacatc

SEQ ID NO: 25245 - DNA, 50 bp, synthetic construct
  source 1..50: mol_type = other DNA
acttattacaaaaatataatcaaacccatatctaaataacctttcacccc

SEQ ID NO: 25246 - DNA, 50 bp, synthetic construct
  source 1..50: mol_type = other DNA
aaaacaacccacrattaaatatatttaccracaaatcaaattcctaaatc

SEQ ID NO: 25247 - DNA, 50 bp, synthetic construct
  source 1..50: mol_type = other DNA
aatttaataccctaaatacttatacctacrattcaaaaacttaacctacc

SEQ ID NO: 25248 - DNA, 50 bp, synthetic construct
  source 1..50: mol_type = other DNA
acttatacctacrattcaaaaacttaacctaccracaaatacatttaatc

SEQ ID NO: 25249 - DNA, 50 bp, synthetic construct
  source 1..50: mol_type = other DNA
aaaaaaacacctttactaacttcaaatacattcatttaaaaacaacaaac

SEQ ID NO: 25250 - DNA, 50 bp, synthetic construct
  source 1..50: mol_type = other DNA
aatcaaaatacrataacrtttctaaattttttctttcttttttttccccc

SEQ ID NO: 25251 - DNA, 50 bp, synthetic construct
  source 1..50: mol_type = other DNA
ttttatattcctatattatttatacaatatttccattttctcctacraac

SEQ ID NO: 25252 - DNA, 50 bp, synthetic construct
  source 1..50: mol_type = other DNA
aattccaaatctctactaaaatataaactataaatataacccctaacatc

SEQ ID NO: 25253 - DNA, 50 bp, synthetic construct
  source 1..50: mol_type = other DNA
tctctaaatttaacaaatcaatactttctaaccctaaaaaaaatcccctc

SEQ ID NO: 25254 - DNA, 50 bp, synthetic construct
  source 1..50: mol_type = other DNA
tttacctaactttaccctacccaaaaccactaaaaataatctaataatac

SEQ ID NO: 25255 - DNA, 50 bp, synthetic construct
  source 1..50: mol_type = other DNA
aaaatcctaaacactattcaaatattaccaattcccaaatatcacctaac

SEQ ID NO: 25256 - DNA, 50 bp, synthetic construct
  source 1..50: mol_type = other DNA
tcaactaaaaaataacttaataaactcacaacaaaccttaaaccccaaac

SEQ ID NO: 25257 - DNA, 50 bp, synthetic construct
  source 1..50: mol_type = other DNA
aaattcaaaacttactataaatccattaaaccattccttaactaaccttc

SEQ ID NO: 25258 - DNA, 50 bp, synthetic construct
  source 1..50: mol_type = other DNA
tatctcacttaaatcttccattaacaaacactaatacactctctttaaac

SEQ ID NO: 25259 - DNA, 50 bp, synthetic construct
  source 1..50: mol_type = other DNA
acaaaccaaaattcttaatataaaactcatcrttttacttctaactctac

SEQ ID NO: 25260 - DNA, 50 bp, synthetic construct
  source 1..50: mol_type = other DNA
ccaacaaccataaaacacatactccaaaacraaatacttctcattatctc

SEQ ID NO: 25261 - DNA, 50 bp, synthetic construct
  source 1..50: mol_type = other DNA
atactatacaaacttatcacttttttctttttacctttaaaaaatttcac

SEQ ID NO: 25262 - DNA, 50 bp, synthetic construct
  source 1..50: mol_type = other DNA
aaaacccaaatctactatttaaccaaaaattaaataccaatttcctctac

SEQ ID NO: 25263 - DNA, 50 bp, synthetic construct
  source 1..50: mol_type = other DNA
atccccccacttaaaacaatttctataaaatttattcaaatatcaacacc

SEQ ID NO: 25264 - DNA, 50 bp, synthetic construct
  source 1..50: mol_type = other DNA
aaatttaacctaaaacactcaaaccatttacaaaacaaaatataaatcac

SEQ ID NO: 25265 - DNA, 50 bp, synthetic construct
  source 1..50: mol_type = other DNA
aataaaaaaccatacaaatatacctaaaaaaactacractaaaaattcrc

SEQ ID NO: 25266 - DNA, 50 bp, synthetic construct
  source 1..50: mol_type = other DNA
aaaaaaacttaacrcctatatacttccrataataacraatcaactcatcc

SEQ ID NO: 25267 - DNA, 50 bp, synthetic construct
  source 1..50: mol_type = other DNA
ctaatacctcttcatatacaaaaccaaataatcaaaacrcraaaaactac

SEQ ID NO: 25268 - DNA, 50 bp, synthetic construct
  source 1..50: mol_type = other DNA
atactcaattctaatacctcttcatatacaaaaccaaataatcaaaacrc

SEQ ID NO: 25269 - DNA, 50 bp, synthetic construct
  source 1..50: mol_type = other DNA
caatactcaattctaatacctcttcatatacaaaaccaaataatcaaaac

SEQ ID NO: 25270 - DNA, 50 bp, synthetic construct
  source 1..50: mol_type = other DNA
ctaaccacctaaccctacatataaaaaaacaccaaaactaaacactaccc

SEQ ID NO: 25271 - DNA, 50 bp, synthetic construct
  source 1..50: mol_type = other DNA
taaccctacatataaaaaaacaccaaaactaaacactacccrtataaccc

SEQ ID NO: 25272 - DNA, 50 bp, synthetic construct
  source 1..50: mol_type = other DNA
ataataataaacaaataaaaacaaaacctaaacctaacrcaataactcac

SEQ ID NO: 25273 - DNA, 50 bp, synthetic construct
  source 1..50: mol_type = other DNA
tattacataaatatacacrtactataataatttactacacccatcaaccc

SEQ ID NO: 25274 - DNA, 50 bp, synthetic construct
  source 1..50: mol_type = other DNA
tacacccatcaacccrtcatctacattaaatatttcttctaatactaccc

SEQ ID NO: 25275 - DNA, 50 bp, synthetic construct
  source 1..50: mol_type = other DNA
atattcccctccctatctccatatattctcattattcaattcccacttac

SEQ ID NO: 25276 - DNA, 50 bp, synthetic construct
  source 1..50: mol_type = other DNA
atctccatatattctcattattcaattcccacttacraataaaaacatac

SEQ ID NO: 25277 - DNA, 50 bp, synthetic construct
  source 1..50: mol_type = other DNA
cttcctatattccttctaatataccactttctcacactacaaaatactcc

SEQ ID NO: 25278 - DNA, 50 bp, synthetic construct
  source 1..50: mol_type = other DNA
tatactatattataatacaatcctactttactttattactaacatacccc

SEQ ID NO: 25279 - DNA, 50 bp, synthetic construct
  source 1..50: mol_type = other DNA
cctactactcttaacaaactcaaactaactacaccttaaaacaaactccc

SEQ ID NO: 25280 - DNA, 50 bp, synthetic construct
  source 1..50: mol_type = other DNA
cttaacaactctaatcctccactatccctcaaaaaacaatcaaaatcrac

SEQ ID NO: 25281 - DNA, 50 bp, synthetic construct
  source 1..50: mol_type = other DNA
tatcttaacaactctaatcctccactatccctcaaaaaacaatcaaaatc

SEQ ID NO: 25282 - DNA, 50 bp, synthetic construct
  source 1..50: mol_type = other DNA
tactatcaaacctctcttcaattaaaaatttcctccttaaaatatcattc

SEQ ID NO: 25283 - DNA, 50 bp, synthetic construct
  source 1..50: mol_type = other DNA
actatactctttaaaaactaaaaacaacacaccccaaattctaaatcacc

SEQ ID NO: 25284 - DNA, 50 bp, synthetic construct
  source 1..50: mol_type = other DNA
acccataaacctataaattttacaaacaccaaattttactttcraaaaac

SEQ ID NO: 25285 - DNA, 50 bp, synthetic construct
  source 1..50: mol_type = other DNA
attaaaaacccataaacctataaattttacaaacaccaaattttactttc

SEQ ID NO: 25286 - DNA, 50 bp, synthetic construct
  source 1..50: mol_type = other DNA
atatacacacaaacccctccaaaataaatacatacattctaaatttaccc

SEQ ID NO: 25287 - DNA, 50 bp, synthetic construct
  source 1..50: mol_type = other DNA
acacacaaacccctccaaaataaatacatacattctaaatttacccraac

SEQ ID NO: 25288 - DNA, 50 bp, synthetic construct
  source 1..50: mol_type = other DNA
actcactcctataatctcaatactttaataaaccraaacaaacraattac

SEQ ID NO: 25289 - DNA, 50 bp, synthetic construct
  source 1..50: mol_type = other DNA
cttaataactcactcctataatctcaatactttaataaaccraaacaaac

SEQ ID NO: 25290 - DNA, 50 bp, synthetic construct
  source 1..50: mol_type = other DNA
ttaaccraacttaataactcactcctataatctcaatactttaataaacc

SEQ ID NO: 25291 - DNA, 50 bp, synthetic construct
  source 1..50: mol_type = other DNA
ctaaattcaaataattcccccrcctcaacctcctaaatcactaaaattac

SEQ ID NO: 25292 - DNA, 50 bp, synthetic construct
  source 1..50: mol_type = other DNA
taaaaaatttattctctaaaaccactaaaccaaacttaaaatacctaatc

SEQ ID NO: 25293 - DNA, 50 bp, synthetic construct
  source 1..50: mol_type = other DNA
cctaaaaaccaacatactaacttctaatctaaactcttaaatttcacttc

SEQ ID NO: 25294 - DNA, 50 bp, synthetic construct
  source 1..50: mol_type = other DNA
tactaacttctaatctaaactcttaaatttcacttcrtactctaaaccac

SEQ ID NO: 25295 - DNA, 50 bp, synthetic construct
  source 1..50: mol_type = other DNA
ccrataaacatctataacccraaacaataaaatacaaaaacccaacactc

SEQ ID NO: 25296 - DNA, 50 bp, synthetic construct
  source 1..50: mol_type = other DNA
aaacatcctctttcaaacttttaattattacttttaaaaattataaccac

SEQ ID NO: 25297 - DNA, 50 bp, synthetic construct
  source 1..50: mol_type = other DNA
ctaaaacaaaaaactcrcttaaacccaataaataaaacttacaataaacc

SEQ ID NO: 25298 - DNA, 50 bp, synthetic construct
  source 1..50: mol_type = other DNA
tttataaaactatatttcccaattaaaattaacttacttacctctccaac

SEQ ID NO: 25299 - DNA, 50 bp, synthetic construct
  source 1..50: mol_type = other DNA
ttttattaaccatattccaatatttcctataatataaaactcataaacac

SEQ ID NO: 25300 - DNA, 50 bp, synthetic construct
  source 1..50: mol_type = other DNA
tcataaacacrattattctttctccatatataaaaaataactctaaaaac

SEQ ID NO: 25301 - DNA, 50 bp, synthetic construct
  source 1..50: mol_type = other DNA
cracacaaaaacacaacattcttaatcaaactaccttcrtttactaattc

SEQ ID NO: 25302 - DNA, 50 bp, synthetic construct
  source 1..50: mol_type = other DNA
aaaaaaacctaacracacaaaaacacaacattcttaatcaaactaccttc

SEQ ID NO: 25303 - DNA, 50 bp, synthetic construct
  source 1..50: mol_type = other DNA
craactaacaaacraaaacaacctaaccaaaaatactatactcctatacc

SEQ ID NO: 25304 - DNA, 50 bp, synthetic construct
  source 1..50: mol_type = other DNA
aatacaataatataatcrtaactcactataacctcaacctcctaaattcc

SEQ ID NO: 25305 - DNA, 50 bp, synthetic construct
  source 1..50: mol_type = other DNA
attattcaaaaaaatataatatctacctatacttatattcctcatttatc

SEQ ID NO: 25306 - DNA, 50 bp, synthetic construct
  source 1..50: mol_type = other DNA
attactcaactcaaaattaaatatacacacacccataaaactaaccaaac

SEQ ID NO: 25307 - DNA, 50 bp, synthetic construct
  source 1..50: mol_type = other DNA
aaacaaataataaaaaattttatccaaattaccttccctcacttttacrc

SEQ ID NO: 25308 - DNA, 50 bp, synthetic construct
  source 1..50: mol_type = other DNA
attaaaacrcaacaacaaataaaacaacctaaactcctcacaataaaatc

SEQ ID NO: 25309 - DNA, 50 bp, synthetic construct
  source 1..50: mol_type = other DNA
aactataaaaccrcacccaataaaatcaattttcctattttaaaactctc

SEQ ID NO: 25310 - DNA, 50 bp, synthetic construct
  source 1..50: mol_type = other DNA
aaccacaaaaatataaattaaaaccaaaacaacatatttactttaattac

SEQ ID NO: 25311 - DNA, 50 bp, synthetic construct
  source 1..50: mol_type = other DNA
tccactctcttaaacctaaccacaacccataaatcaaaaaaataatttcc

SEQ ID NO: 25312 - DNA, 50 bp, synthetic construct
  source 1..50: mol_type = other DNA
atctatatctctataactattatataactaacatctacccccatactaac

SEQ ID NO: 25313 - DNA, 50 bp, synthetic construct
  source 1..50: mol_type = other DNA
taaatcatacatctataaattcctcattttccacaattattaaaacaccc

SEQ ID NO: 25314 - DNA, 50 bp, synthetic construct
  source 1..50: mol_type = other DNA
cacctacctactaaacactacacataaattccaaataaaaacaaaacatc

SEQ ID NO: 25315 - DNA, 50 bp, synthetic construct
  source 1..50: mol_type = other DNA
atctccataaccttctcaacaaactcaaatacaaaaaataaatatacatc

SEQ ID NO: 25316 - DNA, 50 bp, synthetic construct
  source 1..50: mol_type = other DNA
aactactcrtaaaactattcatactaaccccatctaaaaaactaactacc

SEQ ID NO: 25317 - DNA, 50 bp, synthetic construct
  source 1..50: mol_type = other DNA
ttataaatatcttaaattcctttaaatcrtaaaatcaacaaacccacaac

SEQ ID NO: 25318 - DNA, 50 bp, synthetic construct
  source 1..50: mol_type = other DNA
caactacatacttacctaccttatctctaaataacaattcctaaaacaac

SEQ ID NO: 25319 - DNA, 50 bp, synthetic construct
  source 1..50: mol_type = other DNA
aaacaaataaatatacaactaccaaaattaaatacaaacctaaaaactcc

SEQ ID NO: 25320 - DNA, 50 bp, synthetic construct
  source 1..50: mol_type = other DNA
actttctcctaaaacaaatatatctactactacatactatctacaccctc

SEQ ID NO: 25321 - DNA, 50 bp, synthetic construct
  source 1..50: mol_type = other DNA
ctttaacaataaataaatctttatcacaaactatttcctccacrtaaatc

SEQ ID NO: 25322 - DNA, 50 bp, synthetic construct
  source 1..50: mol_type = other DNA
caaacaacaacaaacrttaattcccaaaaaataccaacaaaacrattcac

SEQ ID NO: 25323 - DNA, 50 bp, synthetic construct
  source 1..50: mol_type = other DNA
attcttctaaatttacaaataatattccatactaactttctacacccatc

SEQ ID NO: 25324 - DNA, 50 bp, synthetic construct
  source 1..50: mol_type = other DNA
taaatatacccttttaaaaatttcctctatcatctaatcccacaataatc

SEQ ID NO: 25325 - DNA, 50 bp, synthetic construct
  source 1..50: mol_type = other DNA
tactacaaaattcttcccatactatatcaaacatatcatttaatttattc

SEQ ID NO: 25326 - DNA, 50 bp, synthetic construct
  source 1..50: mol_type = other DNA
cctcactttactaactaaacaaacctcaaactcctaaactcaaacratcc

SEQ ID NO: 25327 - DNA, 50 bp, synthetic construct
  source 1..50: mol_type = other DNA
caaaacctcactttactaactaaacaaacctcaaactcctaaactcaaac

SEQ ID NO: 25328 - DNA, 50 bp, synthetic construct
  source 1..50: mol_type = other DNA
atacaataatacaatcacaactcactaaaacctcaacctcccaaattcac

SEQ ID NO: 25329 - DNA, 50 bp, synthetic construct
  source 1..50: mol_type = other DNA
taaaacttcaataaactataattacaccactacattccaaacaaaataac

SEQ ID NO: 25330 - DNA, 50 bp, synthetic construct
  source 1..50: mol_type = other DNA
aaactttatctaaaaaacaacaacaacaacaaatacaacaaaatccaaac

SEQ ID NO: 25331 - DNA, 50 bp, synthetic construct
  source 1..50: mol_type = other DNA
ccrataaaaatcatttctacccttaaaaattcctcaaattcttatttctc

SEQ ID NO: 25332 - DNA, 50 bp, synthetic construct
  source 1..50: mol_type = other DNA
tacaaataacaaaaccccattaaccctcttacrttaatatactatctccc

SEQ ID NO: 25333 - DNA, 50 bp, synthetic construct
  source 1..50: mol_type = other DNA
ataaccatcctaataaatatatctttaaattcttaataaaacatttccac

SEQ ID NO: 25334 - DNA, 50 bp, synthetic construct
  source 1..50: mol_type = other DNA
aaaccatatacccatccaaaaaattctatcattaataaacctttaccccc

SEQ ID NO: 25335 - DNA, 50 bp, synthetic construct
  source 1..50: mol_type = other DNA
tacaaaaaatcrctaaacataataaaatccrcctattatcccaaatactc

SEQ ID NO: 25336 - DNA, 50 bp, synthetic construct
  source 1..50: mol_type = other DNA
taaaatttcactatattatccaatctaatctaaaactcctaaaatcaaac

SEQ ID NO: 25337 - DNA, 50 bp, synthetic construct
  source 1..50: mol_type = other DNA
ttaacctcccaaaatacttaacttacaaacattaaccaccacatcttacc

SEQ ID NO: 25338 - DNA, 50 bp, synthetic construct
  source 1..50: mol_type = other DNA
taaatcacatcttcccttctacttaaaatacaaaccaaatataaaaatac

SEQ ID NO: 25339 - DNA, 50 bp, synthetic construct
  source 1..50: mol_type = other DNA
acccctaccaacaaaataaaaataaataacattctttacctaccatttac

SEQ ID NO: 25340 - DNA, 50 bp, synthetic construct
  source 1..50: mol_type = other DNA
aaaaaaaaatttcactatactacccaaactaaaaactcctaaactcaaac

SEQ ID NO: 25341 - DNA, 50 bp, synthetic construct
  source 1..50: mol_type = other DNA
tcaaaattaaaattaataaattcaacaaaaatttttccctcttcaacttc

SEQ ID NO: 25342 - DNA, 50 bp, synthetic construct
  source 1..50: mol_type = other DNA
catactataaatttatcctcctctatccctatactatactcccattcacc

SEQ ID NO: 25343 - DNA, 50 bp, synthetic construct
  source 1..50: mol_type = other DNA
tatacttataattatataactaaaaactttccaacaaaatcaaccaaatc

SEQ ID NO: 25344 - DNA, 50 bp, synthetic construct
  source 1..50: mol_type = other DNA
ttttttttacaaatacctatattaataaaaaacaaaacttaaactcaacc

SEQ ID NO: 25345 - DNA, 50 bp, synthetic construct
  source 1..50: mol_type = other DNA
cratccatttcaaaaaaaacttctactaacatatatttactcaataaccc

SEQ ID NO: 25346 - DNA, 50 bp, synthetic construct
  source 1..50: mol_type = other DNA
actccaaataaaaacttatttttaaacaacatccactttaaaaatttccc

SEQ ID NO: 25347 - DNA, 50 bp, synthetic construct
  source 1..50: mol_type = other DNA
aaaacaaattaattacaaaataaaaatcacrccattctcctttatttacc

SEQ ID NO: 25348 - DNA, 50 bp, synthetic construct
  source 1..50: mol_type = other DNA
aatttaactatacattcacaaacttaataaaaatccaattataaaaaaac

SEQ ID NO: 25349 - DNA, 50 bp, synthetic construct
  source 1..50: mol_type = other DNA
aaatcaccaaataataattacccaaataactcataataaaatataaaacc

SEQ ID NO: 25350 - DNA, 50 bp, synthetic construct
  source 1..50: mol_type = other DNA
atataataacrctcrctatcaaaaaatactataaaaaaaccattcaaatc

SEQ ID NO: 25351 - DNA, 50 bp, synthetic construct
  source 1..50: mol_type = other DNA
tctaaaataacaaataacttcttacataactaatcaaaatatcaacrccc

SEQ ID NO: 25352 - DNA, 50 bp, synthetic construct
  source 1..50: mol_type = other DNA
ataactaatcaaaatatcaacrcccraaacaaataaaaataactaacaac

SEQ ID NO: 25353 - DNA, 50 bp, synthetic construct
  source 1..50: mol_type = other DNA
aacctatttattaattttccttatattaaccacatcaaaatacactaaac

SEQ ID NO: 25354 - DNA, 50 bp, synthetic construct
  source 1..50: mol_type = other DNA
attcttactacacaacttaaaaacctctcaatacctccttctataaaaac

SEQ ID NO: 25355 - DNA, 50 bp, synthetic construct
  source 1..50: mol_type = other DNA
aaaaccttactattaacrcactaaaaaacaatacaaaaaactaccaatac

SEQ ID NO: 25356 - DNA, 50 bp, synthetic construct
  source 1..50: mol_type = other DNA
atataaaaccrtattattaccaatcatctaaacaaaaccttactattaac

SEQ ID NO: 25357 - DNA, 50 bp, synthetic construct
  source 1..50: mol_type = other DNA
atctaaaaccaatacacatttatctacacaattttataatatataaaacc

SEQ ID NO: 25358 - DNA, 50 bp, synthetic construct
  source 1..50: mol_type = other DNA
ttataaataacaacaacccaaaaaaaaccaaatactacaaaaaataaaac

SEQ ID NO: 25359 - DNA, 50 bp, synthetic construct
  source 1..50: mol_type = other DNA
taatcattataaataaacactctactttcaaaaatacttataaataaaac

SEQ ID NO: 25360 - DNA, 50 bp, synthetic construct
  source 1..50: mol_type = other DNA
aaaattaccaataacttttattaccacaataaaattaatttctccatttc

SEQ ID NO: 25361 - DNA, 50 bp, synthetic construct
  source 1..50: mol_type = other DNA
aaatctaaaactctacaaaaacattaaaacaaaatcaatctattcttaac

SEQ ID NO: 25362 - DNA, 50 bp, synthetic construct
  source 1..50: mol_type = other DNA
ccaatttacactttacaatttaacaaaaatcatcaaacaaaatatttccc

SEQ ID NO: 25363 - DNA, 50 bp, synthetic construct
  source 1..50: mol_type = other DNA
tactcattactaatattactcattacaccctattattctccttaccttcc

SEQ ID NO: 25364 - DNA, 50 bp, synthetic construct
  source 1..50: mol_type = other DNA
tatacctaacaataaaaataactaactattaaaatctcttattaaacaac

SEQ ID NO: 25365 - DNA, 50 bp, synthetic construct
  source 1..50: mol_type = other DNA
caccctaaaactaacttttatataccctaaaactaccctcacataaacac

SEQ ID NO: 25366 - DNA, 50 bp, synthetic construct
  source 1..50: mol_type = other DNA
actcactatcacraaaacaacataaaaaaaactacccccataatccaatc

SEQ ID NO: 25367 - DNA, 50 bp, synthetic construct
  source 1..50: mol_type = other DNA
aatcttacacaaacctaaaatattttcataaatttcctctacttacctcc

SEQ ID NO: 25368 - DNA, 50 bp, synthetic construct
  source 1..50: mol_type = other DNA
taccaaatcattaattttcttaaacctccaaccctaccctacttaaaaac

SEQ ID NO: 25369 - DNA, 50 bp, synthetic construct
  source 1..50: mol_type = other DNA
attctattcatctcrcaaaactaaaactatatactcattaaataactccc

SEQ ID NO: 25370 - DNA, 50 bp, synthetic construct
  source 1..50: mol_type = other DNA
ttctatatcaaatatcacraaacaattctccctcattatttcatcacrcc

SEQ ID NO: 25371 - DNA, 50 bp, synthetic construct
  source 1..50: mol_type = other DNA
tttactaaatctttcaaaaataaactcatccattttaactaaatcacrac

SEQ ID NO: 25372 - DNA, 50 bp, synthetic construct
  source 1..50: mol_type = other DNA
tattttactaaatctttcaaaaataaactcatccattttaactaaatcac

SEQ ID NO: 25373 - DNA, 50 bp, synthetic construct
  source 1..50: mol_type = other DNA
ccctcaaatccccattaaacaaaaaaaatcrttaattaaatcrccttacc

SEQ ID NO: 25374 - DNA, 50 bp, synthetic construct
  source 1..50: mol_type = other DNA
aactcctaccctcaaatccccattaaacaaaaaaaatcrttaattaaatc

SEQ ID NO: 25375 - DNA, 50 bp, synthetic construct
  source 1..50: mol_type = other DNA
actcaataaaacaaaaatctttcaaataacracaaaacracctaactaac

SEQ ID NO: 25376 - DNA, 50 bp, synthetic construct
  source 1..50: mol_type = other DNA
tttaaattatcaaacccaaaaaaacattaaaataacacaacaatcacctc

SEQ ID NO: 25377 - DNA, 50 bp, synthetic construct
  source 1..50: mol_type = other DNA
tactatatcattttaatatctctctaaacctaataatttaaaaaaactcc

SEQ ID NO: 25378 - DNA, 50 bp, synthetic construct
  source 1..50: mol_type = other DNA
caacctctttaaaactactatactaaactacttccaattcaaatactatc

SEQ ID NO: 25379 - DNA, 50 bp, synthetic construct
  source 1..50: mol_type = other DNA
actttcacttccacrtaaaaaaacaactcraaaataaaatccctaaaatc

SEQ ID NO: 25380 - DNA, 50 bp, synthetic construct
  source 1..50: mol_type = other DNA
cttctttcccctatttccaatactttcacttccacrtaaaaaaacaactc

SEQ ID NO: 25381 - DNA, 50 bp, synthetic construct
  source 1..50: mol_type = other DNA
tctatctttaaccaacttctttcccctatttccaatactttcacttccac

SEQ ID NO: 25382 - DNA, 50 bp, synthetic construct
  source 1..50: mol_type = other DNA
ttaaacaaaattttccaaaatttacttttaactaaaacatacaccrccac

SEQ ID NO: 25383 - DNA, 50 bp, synthetic construct
  source 1..50: mol_type = other DNA
tattcttaaacaaaattttccaaaatttacttttaactaaaacatacacc

SEQ ID NO: 25384 - DNA, 50 bp, synthetic construct
  source 1..50: mol_type = other DNA
ataaacttataaacaaaaatctctaattttcctaaacaaaaaaccctacc

SEQ ID NO: 25385 - DNA, 50 bp, synthetic construct
  source 1..50: mol_type = other DNA
ctcaaataatcctcccacttcaatctcccaaaaataaacaaactataaac

SEQ ID NO: 25386 - DNA, 50 bp, synthetic construct
  source 1..50: mol_type = other DNA
ctaaaaaatttcctctcaaaaaaatttcctttccttaataaataataccc

SEQ ID NO: 25387 - DNA, 50 bp, synthetic construct
  source 1..50: mol_type = other DNA
aaaccaaatctatcattacaatattaaaaattaaatcctaaataataaac

SEQ ID NO: 25388 - DNA, 50 bp, synthetic construct
  source 1..50: mol_type = other DNA
crctacacaaccacaacraaaataaaacaacaaatactaaacaactacac

SEQ ID NO: 25389 - DNA, 50 bp, synthetic construct
  source 1..50: mol_type = other DNA
aaaacccaataaaaaaccatattttacacaaacaaatcacaaaccaaaac

SEQ ID NO: 25390 - DNA, 50 bp, synthetic construct
  source 1..50: mol_type = other DNA
aaaaacaataatcatacctaaaaaaaacacacacttccctacttaccaac

SEQ ID NO: 25391 - DNA, 50 bp, synthetic construct
  source 1..50: mol_type = other DNA
aaacaaaaaaatatatattccccttaaacataaccactactcccacatcc

SEQ ID NO: 25392 - DNA, 50 bp, synthetic construct
  source 1..50: mol_type = other DNA
ttattttctaaaacaaattctatttacttttataaaactattatctcatc

SEQ ID NO: 25393 - DNA, 50 bp, synthetic construct
  source 1..50: mol_type = other DNA
tatattcctaaaaccaacaaacttaactaatatattaaatataacratac

SEQ ID NO: 25394 - DNA, 50 bp, synthetic construct
  source 1..50: mol_type = other DNA
ttttaaaaacctacttccacatacctaatttcataacaccatacacrttc

SEQ ID NO: 25395 - DNA, 50 bp, synthetic construct
  source 1..50: mol_type = other DNA
tacctaatttcataacaccatacacrttcraatcttatccattcattatc

SEQ ID NO: 25396 - DNA, 50 bp, synthetic construct
  source 1..50: mol_type = other DNA
tacatttaacaacctaacctaacaaaccaataacaaacaaaaacaaactc

SEQ ID NO: 25397 - DNA, 50 bp, synthetic construct
  source 1..50: mol_type = other DNA
aaaaacaaactcrtctatacataccctcaaaaccataatctataaacacc

SEQ ID NO: 25398 - DNA, 50 bp, synthetic construct
  source 1..50: mol_type = other DNA
atttccttataaataactttaattcccaaaaaaaattattccataacatc

SEQ ID NO: 25399 - DNA, 50 bp, synthetic construct
  source 1..50: mol_type = other DNA
raacttcaaaaacttataacaaaattaccaaatattccttaccataatcc

SEQ ID NO: 25400 - DNA, 50 bp, synthetic construct
  source 1..50: mol_type = other DNA
raaccataataaaaaacacctaataatcctaccacaaacctctaaaaccc

SEQ ID NO: 25401 - DNA, 50 bp, synthetic construct
  source 1..50: mol_type = other DNA
aaattacaaacrtaaaccactaaaaccaaccctctcccaattcttaacac

SEQ ID NO: 25402 - DNA, 50 bp, synthetic construct
  source 1..50: mol_type = other DNA
atatccaccaataatttaacctacccttaatcacttctcctaaaaataac

SEQ ID NO: 25403 - DNA, 50 bp, synthetic construct
  source 1..50: mol_type = other DNA
ccaaaaaaaataactaaaaacaaatcaaaccattaataaatacttctccc

SEQ ID NO: 25404 - DNA, 50 bp, synthetic construct
  source 1..50: mol_type = other DNA
cacatccacccataaaaactctacaatcctaacatctaacttcatacccc

SEQ ID NO: 25405 - DNA, 50 bp, synthetic construct
  source 1..50: mol_type = other DNA
ctatcctccraccaccttaaatacatatcctcaaaacttcctaaaactac

SEQ ID NO: 25406 - DNA, 50 bp, synthetic construct
  source 1..50: mol_type = other DNA
ttaattaatatctcatatctccctaaatatataaaactaaactatcctcc

SEQ ID NO: 25407 - DNA, 50 bp, synthetic construct
  source 1..50: mol_type = other DNA
tctcacctatctattacctaaatcttcctacctttactttaaattacccc

SEQ ID NO: 25408 - DNA, 50 bp, synthetic construct
  source 1..50: mol_type = other DNA
caaataaaacctaaaaccaaaaactcatttttttacaaaatactttctcc

SEQ ID NO: 25409 - DNA, 50 bp, synthetic construct
  source 1..50: mol_type = other DNA
ttcatacctacctactaatatataaacttcaaaataatataacttatatc

SEQ ID NO: 25410 - DNA, 50 bp, synthetic construct
  source 1..50: mol_type = other DNA
tactctaaaatccatacattaataaacaaatataaaaataacttatatac

SEQ ID NO: 25411 - DNA, 50 bp, synthetic construct
  source 1..50: mol_type = other DNA
aataaaacracactaaacacaaatataaaactctcraaaactacrcctcc

SEQ ID NO: 25412 - DNA, 50 bp, synthetic construct
  source 1..50: mol_type = other DNA
cacctctccaaattaaaacrataacratcaaaaccrcctaaaataaaaac

SEQ ID NO: 25413 - DNA, 50 bp, synthetic construct
  source 1..50: mol_type = other DNA
crataaaaaaaaactcacctctccaaattaaaacrataacratcaaaacc

SEQ ID NO: 25414 - DNA, 50 bp, synthetic construct
  source 1..50: mol_type = other DNA
aaaaacaaccaaaataacraaaaccratactcacaaaacccactaaaacc

SEQ ID NO: 25415 - DNA, 50 bp, synthetic construct
  source 1..50: mol_type = other DNA
actcctaaacaaaacacctaaaaataccaaataaaatcraaacraacrac

SEQ ID NO: 25416 - DNA, 50 bp, synthetic construct
  source 1..50: mol_type = other DNA
aaaactcctaaacaaaacacctaaaaataccaaataaaatcraaacraac

SEQ ID NO: 25417 - DNA, 50 bp, synthetic construct
  source 1..50: mol_type = other DNA
ccaaaaaactcctaaacaaaacacctaaaaataccaaataaaatcraaac

SEQ ID NO: 25418 - DNA, 50 bp, synthetic construct
  source 1..50: mol_type = other DNA
craccccaaaaaactcctaaacaaaacacctaaaaataccaaataaaatc

SEQ ID NO: 25419 - DNA, 50 bp, synthetic construct
  source 1..50: mol_type = other DNA
craccccacctaatatccccaaatactctacccaaaaatctcttaaaacc

SEQ ID NO: 25420 - DNA, 50 bp, synthetic construct
  source 1..50: mol_type = other DNA
tctcttaaaaccrctacaaataaacaaataccctaatattctcrtaaacc

SEQ ID NO: 25421 - DNA, 50 bp, synthetic construct
  source 1..50: mol_type = other DNA
aaaaaaaccrtcccccttaccataccccattcttttaaacttaaaaaacc

SEQ ID NO: 25422 - DNA, 50 bp, synthetic construct
  source 1..50: mol_type = other DNA
aactaaaaaatcaacttctaaaacraaaactaaactttacaaataaaaac

SEQ ID NO: 25423 - DNA, 50 bp, synthetic construct
  source 1..50: mol_type = other DNA
tcrtaacraaaaaacrcaactatactactaaatattactattttcctaac

SEQ ID NO: 25424 - DNA, 50 bp, synthetic construct
  source 1..50: mol_type = other DNA
ttccacacactcaataaaaaaaaccrtttaactaactataaaaatactcc

SEQ ID NO: 25425 - DNA, 50 bp, synthetic construct
  source 1..50: mol_type = other DNA
crcaatctaccttaccraaaatcaattccacacactcaataaaaaaaacc

SEQ ID NO: 25426 - DNA, 50 bp, synthetic construct
  source 1..50: mol_type = other DNA
caaaattaaaactattctccrttactatacccrtacctaactattaacac

SEQ ID NO: 25427 - DNA, 50 bp, synthetic construct
  source 1..50: mol_type = other DNA
aataatactaaaaattccacccctctaatcacttaatcttcctactaatc

SEQ ID NO: 25428 - DNA, 50 bp, synthetic construct
  source 1..50: mol_type = other DNA
ctacctatcacrcatacatcattacaaatttctctaaattcatttattac

SEQ ID NO: 25429 - DNA, 50 bp, synthetic construct
  source 1..50: mol_type = other DNA
taacaaaaaaaaataccactccctctcacctcraactaaaaataacacac

SEQ ID NO: 25430 - DNA, 50 bp, synthetic construct
  source 1..50: mol_type = other DNA
caataaataataacataaatactccaaatcaaaccacaaattctaaaacc

SEQ ID NO: 25431 - DNA, 50 bp, synthetic construct
  source 1..50: mol_type = other DNA
ttctttatctttcttctttttttatcattttaatcataattattacratc

SEQ ID NO: 25432 - DNA, 50 bp, synthetic construct
  source 1..50: mol_type = other DNA
ataaaaaaatcctaaaaaacacctcactcaaataacaacacatattcaac

SEQ ID NO: 25433 - DNA, 50 bp, synthetic construct
  source 1..50: mol_type = other DNA
taactcctatccctcaatataaacaacacraaaaacractaaaaaaccac

SEQ ID NO: 25434 - DNA, 50 bp, synthetic construct
  source 1..50: mol_type = other DNA
aacttcctcataatacattctaataaaaaaatacacrtaacccctcaacc

SEQ ID NO: 25435 - DNA, 50 bp, synthetic construct
  source 1..50: mol_type = other DNA
tcataatacattctaataaaaaaatacacrtaacccctcaaccrtccttc

SEQ ID NO: 25436 - DNA, 50 bp, synthetic construct
  source 1..50: mol_type = other DNA
tttttccttttacractaaaaaaaacctatcaattcatatcaacatatcc

SEQ ID NO: 25437 - DNA, 50 bp, synthetic construct
  source 1..50: mol_type = other DNA
tttataatttttcacaaaaaacatataccttccataatcctaatttactc

SEQ ID NO: 25438 - DNA, 50 bp, synthetic construct
  source 1..50: mol_type = other DNA
acatttcaacaaaaaccaaaaactattattctaacaccaactaaatcccc

SEQ ID NO: 25439 - DNA, 50 bp, synthetic construct
  source 1..50: mol_type = other DNA
aatatataaaaccccaaatatacaaataaatattcaaccaaaaaattccc

SEQ ID NO: 25440 - DNA, 50 bp, synthetic construct
  source 1..50: mol_type = other DNA
aatatcattattttataaataaactaaattccaaatcaactcratcattc

SEQ ID NO: 25441 - DNA, 50 bp, synthetic construct
  source 1..50: mol_type = other DNA
cattcrctcaaaaatcttactataatactcaaaacaaaaatcrtaaaaac

SEQ ID NO: 25442 - DNA, 50 bp, synthetic construct
  source 1..50: mol_type = other DNA
taatcaacraacaatccctatacctcaaccttatactctactacacatcc

SEQ ID NO: 25443 - DNA, 50 bp, synthetic construct
  source 1..50: mol_type = other DNA
actctactacacatccrtatctatctatctacctattatataccattccc

SEQ ID NO: 25444 - DNA, 50 bp, synthetic construct
  source 1..50: mol_type = other DNA
ttaaataaaccccrtttaaaaacctaacraaaaactactaccrtaactac

SEQ ID NO: 25445 - DNA, 50 bp, synthetic construct
  source 1..50: mol_type = other DNA
acctaaaattaaataaaccccrtttaaaaacctaacraaaaactactacc

SEQ ID NO: 25446 - DNA, 50 bp, synthetic construct
  source 1..50: mol_type = other DNA
aaaacttataatttacctaaaattaaataaaccccrtttaaaaacctaac

SEQ ID NO: 25447 - DNA, 50 bp, synthetic construct
  source 1..50: mol_type = other DNA
tatatatcataacacaaaacttataatttacctaaaattaaataaacccc

SEQ ID NO: 25448 - DNA, 50 bp, synthetic construct
  source 1..50: mol_type = other DNA
ctaaactccattccttcttcaaaaaaattactaatcaacttcccctaatc

SEQ ID NO: 25449 - DNA, 50 bp, synthetic construct
  source 1..50: mol_type = other DNA
taacctaactccaaacatacaaaattacttaaaacctttaaatatcccac

SEQ ID NO: 25450 - DNA, 50 bp, synthetic construct
  source 1..50: mol_type = other DNA
aattacttaaaacctttaaatatcccacrttccctcacaactctataccc

SEQ ID NO: 25451 - DNA, 50 bp, synthetic construct
  source 1..50: mol_type = other DNA
aaaacttacttcaatttaaacaactactcacaactactacacaaaaaccc

SEQ ID NO: 25452 - DNA, 50 bp, synthetic construct
  source 1..50: mol_type = other DNA
tttttttctctatcaccctataactaaacatataataaacaattaacctc

SEQ ID NO: 25453 - DNA, 50 bp, synthetic construct
  source 1..50: mol_type = other DNA
tttccctattattcaaatactcacacaacctctaactcaaacaacctctc

SEQ ID NO: 25454 - DNA, 50 bp, synthetic construct
  source 1..50: mol_type = other DNA
atcaaaactaatctaaccattcccaaccacttctaaatactactttttac

SEQ ID NO: 25455 - DNA, 50 bp, synthetic construct
  source 1..50: mol_type = other DNA
ttaaaaaatatacacractcaaaaatcaacaacctccaaacactacacac

SEQ ID NO: 25456 - DNA, 50 bp, synthetic construct
  source 1..50: mol_type = other DNA
atcrtatacattttttaaaataatactacatttaaacaatcacattaaac

SEQ ID NO: 25457 - DNA, 50 bp, synthetic construct
  source 1..50: mol_type = other DNA
atacaaaacacctaatacacctaaaacattttactatcrtaacacaaacc

SEQ ID NO: 25458 - DNA, 50 bp, synthetic construct
  source 1..50: mol_type = other DNA
ttaaacaatcacattaaacrtttttcttctaaatatccratctatactac

SEQ ID NO: 25459 - DNA, 50 bp, synthetic construct
  source 1..50: mol_type = other DNA
actataaaactcaccaaaacctaacactacrtatattctacraaataaac

SEQ ID NO: 25460 - DNA, 50 bp, synthetic construct
  source 1..50: mol_type = other DNA
accttaatcactataaaactcaccaaaacctaacactacrtatattctac

SEQ ID NO: 25461 - DNA, 50 bp, synthetic construct
  source 1..50: mol_type = other DNA
aaaatcrtactaccttaatcactataaaactcaccaaaacctaacactac

SEQ ID NO: 25462 - DNA, 50 bp, synthetic construct
  source 1..50: mol_type = other DNA
atacacrcaataccaaactctaataaatcccacaataaccaaaacaacac

SEQ ID NO: 25463 - DNA, 50 bp, synthetic construct
  source 1..50: mol_type = other DNA
taaactactaactctaaaaccttaaaaattacacraaatcaaaacttctc

SEQ ID NO: 25464 - DNA, 50 bp, synthetic construct
  source 1..50: mol_type = other DNA
ctatcaaccacaacactaaactactaactctaaaaccttaaaaattacac

SEQ ID NO: 25465 - DNA, 50 bp, synthetic construct
  source 1..50: mol_type = other DNA
acaacccccaaaatttcaaaaccaacaacccaatactataattaacaaac

SEQ ID NO: 25466 - DNA, 50 bp, synthetic construct
  source 1..50: mol_type = other DNA
tcaatataactaatctatactctaatcttaaataaaaaatcrtaactcac

SEQ ID NO: 25467 - DNA, 50 bp, synthetic construct
  source 1..50: mol_type = other DNA
taccaaatctcaatataactaatctatactctaatcttaaataaaaaatc

SEQ ID NO: 25468 - DNA, 50 bp, synthetic construct
  source 1..50: mol_type = other DNA
aacctaaacraacaaatcctctcccaaaaaaaaatcaataatccttcaac

SEQ ID NO: 25469 - DNA, 50 bp, synthetic construct
  source 1..50: mol_type = other DNA
aaaaaaactaaatccaaacataaactaaaaaataaacatccrcctaccac

SEQ ID NO: 25470 - DNA, 50 bp, synthetic construct
  source 1..50: mol_type = other DNA
ctaaatccaaacataaactaaaaaataaacatccrcctaccacrataaac

SEQ ID NO: 25471 - DNA, 50 bp, synthetic construct
  source 1..50: mol_type = other DNA
aaaaaatacacttccattcttatatcttcaaaaccactatctcaatcctc

SEQ ID NO: 25472 - DNA, 50 bp, synthetic construct
  source 1..50: mol_type = other DNA
tcttatatcttcaaaaccactatctcaatcctcrctatataacccttacc

SEQ ID NO: 25473 - DNA, 50 bp, synthetic construct
  source 1..50: mol_type = other DNA
tacaacttcctcactccctcractaaataacacacctataaacactaaac

SEQ ID NO: 25474 - DNA, 50 bp, synthetic construct
  source 1..50: mol_type = other DNA
accacaaaattccacaacccacaacccaactacaaatcaaaaacatcaac

SEQ ID NO: 25475 - DNA, 50 bp, synthetic construct
  source 1..50: mol_type = other DNA
ccctaacctacaactaaactataaactataaaaccctataatccccccac

SEQ ID NO: 25476 - DNA, 50 bp, synthetic construct
  source 1..50: mol_type = other DNA
aaacrtaactaacccatcactcctcataaaaaacttttcctccaaaaacc

SEQ ID NO: 25477 - DNA, 50 bp, synthetic construct
  source 1..50: mol_type = other DNA
tacraactaaaccacaaacctacrtcctaactctcrtttattttaaaaac

SEQ ID NO: 25478 - DNA, 50 bp, synthetic construct
  source 1..50: mol_type = other DNA
aaaaaattccccataaaaaataataaatcaatcacrttttcaaaacaaac

SEQ ID NO: 25479 - DNA, 50 bp, synthetic construct
  source 1..50: mol_type = other DNA
aataaaactctaaacaactacraaaaaacttataacaccaaacacrctac

SEQ ID NO: 25480 - DNA, 50 bp, synthetic construct
  source 1..50: mol_type = other DNA
aataaaataaaactctaaacaactacraaaaaacttataacaccaaacac

SEQ ID NO: 25481 - DNA, 50 bp, synthetic construct
  source 1..50: mol_type = other DNA
aactctaaaaaaaaccataaaatacacataactcaaccatacaccaaaac

SEQ ID NO: 25482 - DNA, 50 bp, synthetic construct
  source 1..50: mol_type = other DNA
aactataaccctaacccttttaacccctacataaaatacacaaacaaaac

SEQ ID NO: 25483 - DNA, 50 bp, synthetic construct
  source 1..50: mol_type = other DNA
cccctacataaaatacacaaacaaaacrtataacctttaaaactccaacc

SEQ ID NO: 25484 - DNA, 50 bp, synthetic construct
  source 1..50: mol_type = other DNA
cttttaacttaaaaaacaaaaatttccaactatcractaccctctacccc

SEQ ID NO: 25485 - DNA, 50 bp, synthetic construct
  source 1..50: mol_type = other DNA
accaaaaaattctcaaaactaaacaacaaaatatattatatctcctaatc

SEQ ID NO: 25486 - DNA, 50 bp, synthetic construct
  source 1..50: mol_type = other DNA
aaaaaaaaataatcrcttaaacaaaatcccaaactaattttacaactctc

SEQ ID NO: 25487 - DNA, 50 bp, synthetic construct
  source 1..50: mol_type = other DNA
aaaaaaataaaaccraaaactacaaaactaacctaaaactttattcaaac

SEQ ID NO: 25488 - DNA, 50 bp, synthetic construct
  source 1..50: mol_type = other DNA
accaaaaaaccaaaactttcaaatatacaacataatttcttctaaacctc

SEQ ID NO: 25489 - DNA, 50 bp, synthetic construct
  source 1..50: mol_type = other DNA
caaaaaaccaaaactttcaaatatacaacataatttcttctaaacctcrc

SEQ ID NO: 25490 - DNA, 50 bp, synthetic construct
  source 1..50: mol_type = other DNA
acctccaatattcaacacaataacttactatacaaatttataacctaatc

SEQ ID NO: 25491 - DNA, 50 bp, synthetic construct
  source 1..50: mol_type = other DNA
ataacctaatcrccataaactacaccaaacaaccttaatatataataaac

SEQ ID NO: 25492 - DNA, 50 bp, synthetic construct
  source 1..50: mol_type = other DNA
aaataatcaattaaaatcrtctttttcctcctttacrtcaacracaaaac

SEQ ID NO: 25493 - DNA, 50 bp, synthetic construct
  source 1..50: mol_type = other DNA
tattcctcaaaaacttctaaaaaaaacrctactaactcaaactaccracc

SEQ ID NO: 25494 - DNA, 50 bp, synthetic construct
  source 1..50: mol_type = other DNA
tacctattcctcaaaaacttctaaaaaaaacrctactaactcaaactacc

SEQ ID NO: 25495 - DNA, 50 bp, synthetic construct
  source 1..50: mol_type = other DNA
atcaccatctttatatttacacrcttaattacttttaaatcctattaatc

SEQ ID NO: 25496 - DNA, 50 bp, synthetic construct
  source 1..50: mol_type = other DNA
tctctatcataataacaaataaactactatcaccatctttatatttacac

SEQ ID NO: 25497 - DNA, 50 bp, synthetic construct
  source 1..50: mol_type = other DNA
accaccataataaaaactttaaacttttttttaactattataattcttac

SEQ ID NO: 25498 - DNA, 50 bp, synthetic construct
  source 1..50: mol_type = other DNA
aaaatataaaaacatctaaaacaaactaccataatacattcccacccrcc

SEQ ID NO: 25499 - DNA, 50 bp, synthetic construct
  source 1..50: mol_type = other DNA
tataaaatataaaaacatctaaaacaaactaccataatacattcccaccc

SEQ ID NO: 25500 - DNA, 50 bp, synthetic construct
  source 1..50: mol_type = other DNA
cccaaactattaaaaaacaataacctcactaccctaataaaaccacaccc

SEQ ID NO: 25501 - DNA, 50 bp, synthetic construct
  source 1..50: mol_type = other DNA
atttttaaatatcctacatacctcctttatatactcttctatattataac

SEQ ID NO: 25502 - DNA, 50 bp, synthetic construct
  source 1..50: mol_type = other DNA
aaaaactccaaaaccctaaaactaaataaacraaatataaaccaaacaac

SEQ ID NO: 25503 - DNA, 50 bp, synthetic construct
  source 1..50: mol_type = other DNA
ataaaccaaacaacrtaatacaaaaaattccaacctaaaacttaaacacc

SEQ ID NO: 25504 - DNA, 50 bp, synthetic construct
  source 1..50: mol_type = other DNA
aaacaacrtaatacaaaaaattccaacctaaaacttaaacaccraaaatc

SEQ ID NO: 25505 - DNA, 50 bp, synthetic construct
  source 1..50: mol_type = other DNA
acaaaaaattccaacctaaaacttaaacaccraaaatcraaaaaactccc

SEQ ID NO: 25506 - DNA, 50 bp, synthetic construct
  source 1..50: mol_type = other DNA
taaaaatccrtaaataaacaccraaaaaaaactataccctctcccaaacc

SEQ ID NO: 25507 - DNA, 50 bp, synthetic construct
  source 1..50: mol_type = other DNA
tacccctttctcttcattcatctctataacctattaaataacratcaacc

SEQ ID NO: 25508 - DNA, 50 bp, synthetic construct
  source 1..50: mol_type = other DNA
ataaaaactacccctttctcttcattcatctctataacctattaaataac

SEQ ID NO: 25509 - DNA, 50 bp, synthetic construct
  source 1..50: mol_type = other DNA
actaaaaatataccacraactcaacattcaacaatttaaaaaacaaaacc

SEQ ID NO: 25510 - DNA, 50 bp, synthetic construct
  source 1..50: mol_type = other DNA
ccctaacttattatttattaatatttccaataatactaaaaatataccac

SEQ ID NO: 25511 - DNA, 50 bp, synthetic construct
  source 1..50: mol_type = other DNA
aataaacrcaaaaacaattacaccrctaacaaatacctaaaaaaaacrac

SEQ ID NO: 25512 - DNA, 50 bp, synthetic construct
  source 1..50: mol_type = other DNA
aataataaacrcaaaaacaattacaccrctaacaaatacctaaaaaaaac

SEQ ID NO: 25513 - DNA, 50 bp, synthetic construct
  source 1..50: mol_type = other DNA
acataaatcatactacrttatcactattatcttactcatctatacctatc

SEQ ID NO: 25514 - DNA, 50 bp, synthetic construct
  source 1..50: mol_type = other DNA
aaaactcaaaaaatacracaaacacaaataaacaaaacaataataacaac

SEQ ID NO: 25515 - DNA, 50 bp, synthetic construct
  source 1..50: mol_type = other DNA
aataaacaaaacaataataacaacrcaacataattcatactaaaaatacc

SEQ ID NO: 25516 - DNA, 50 bp, synthetic construct
  source 1..50: mol_type = other DNA
tctcacraaaaatcacatttaaactaactttctcacacttataaaaatac

SEQ ID NO: 25517 - DNA, 50 bp, synthetic construct
  source 1..50: mol_type = other DNA
atttctactatttactcctctacactctaaacraaaatatacacactcrc

SEQ ID NO: 25518 - DNA, 50 bp, synthetic construct
  source 1..50: mol_type = other DNA
aaaaacccattaaaaaaattcattaaataaaaaaactcraccraatctcc

SEQ ID NO: 25519 - DNA, 50 bp, synthetic construct
  source 1..50: mol_type = other DNA
tcaccttaaaaaacccattaaaaaaattcattaaataaaaaaactcracc

SEQ ID NO: 25520 - DNA, 50 bp, synthetic construct
  source 1..50: mol_type = other DNA
aatatcaccttaaaaaacccattaaaaaaattcattaaataaaaaaactc

SEQ ID NO: 25521 - DNA, 50 bp, synthetic construct
  source 1..50: mol_type = other DNA
tcttactaaataaacaataaaatcacccaaataacccactcctaaatcac

SEQ ID NO: 25522 - DNA, 50 bp, synthetic construct
  source 1..50: mol_type = other DNA
rattatacctatataaacctacrttaacaaacaacracttatcraaactc

SEQ ID NO: 25523 - DNA, 50 bp, synthetic construct
  source 1..50: mol_type = other DNA
caacaacataacctactccttcctaactaatatcaaaaaacccraattcc

SEQ ID NO: 25524 - DNA, 50 bp, synthetic construct
  source 1..50: mol_type = other DNA
taacctactccttcctaactaatatcaaaaaacccraattccrataaacc

SEQ ID NO: 25525 - DNA, 50 bp, synthetic construct
  source 1..50: mol_type = other DNA
cctaactaatatcaaaaaacccraattccrataaaccrctatttactaac

SEQ ID NO: 25526 - DNA, 50 bp, synthetic construct
  source 1..50: mol_type = other DNA
raattccrataaaccrctatttactaacrtaaatctacacaaatataacc

SEQ ID NO: 25527 - DNA, 50 bp, synthetic construct
  source 1..50: mol_type = other DNA
ccrataacaatctaaactttaaaaccctattcctaaaactccaaaaaaac

SEQ ID NO: 25528 - DNA, 50 bp, synthetic construct
  source 1..50: mol_type = other DNA
taaactttaaaaccctattcctaaaactccaaaaaaacraaccccaaaac

SEQ ID NO: 25529 - DNA, 50 bp, synthetic construct
  source 1..50: mol_type = other DNA
tattttataaacaaaaacccaaaacrtccrctaaaaaacrcaaattttac

SEQ ID NO: 25530 - DNA, 50 bp, synthetic construct
  source 1..50: mol_type = other DNA
aacraacrctctaaattcttactcataaaataaatcaaactcrtacctac

SEQ ID NO: 25531 - DNA, 50 bp, synthetic construct
  source 1..50: mol_type = other DNA
ataaccacatctacracraaaactaacatcacaacaaaaaaactatcaac

SEQ ID NO: 25532 - DNA, 50 bp, synthetic construct
  source 1..50: mol_type = other DNA
ctcataaataccaatcaaccaacaaaaaacrtaaaaataaccacatctac

SEQ ID NO: 25533 - DNA, 50 bp, synthetic construct
  source 1..50: mol_type = other DNA
ataactaatattatattatactcataaataccaatcaaccaacaaaaaac

SEQ ID NO: 25534 - DNA, 50 bp, synthetic construct
  source 1..50: mol_type = other DNA
ctactaactaactaatattcataaacataatataacattaactatataac

SEQ ID NO: 25535 - DNA, 50 bp, synthetic construct
  source 1..50: mol_type = other DNA
taactaactaatattcataaacataatataacattaactatataacraac

SEQ ID NO: 25536 - DNA, 50 bp, synthetic construct
  source 1..50: mol_type = other DNA
ataactctctactctttacataacaatactaacaataattacacaataac

SEQ ID NO: 25537 - DNA, 50 bp, synthetic construct
  source 1..50: mol_type = other DNA
tctcctaaaaaatatataaattcrcccaaaataaacttccrctaccaacc

SEQ ID NO: 25538 - DNA, 50 bp, synthetic construct
  source 1..50: mol_type = other DNA
tctaaccaaaacctctctctaataaaactaaaaaacttccatataaaaac

SEQ ID NO: 25539 - DNA, 50 bp, synthetic construct
  source 1..50: mol_type = other DNA
aaccccaaaaatctaaacaacttacactcaaaaccctctacraatttaac

SEQ ID NO: 25540 - DNA, 50 bp, synthetic construct
  source 1..50: mol_type = other DNA
aatacacttcacaatataaaaataaacccaaacaataactcaaaaacccc

SEQ ID NO: 25541 - DNA, 50 bp, synthetic construct
  source 1..50: mol_type = other DNA
ccattaaccacctacttaatatttacctcatataaataaaataataaccc

SEQ ID NO: 25542 - DNA, 50 bp, synthetic construct
  source 1..50: mol_type = other DNA
ttatccaattatttattcaaaacrccaaaaacctaaacaacttactatcc

SEQ ID NO: 25543 - DNA, 50 bp, synthetic construct
  source 1..50: mol_type = other DNA
tcaataaatctctactttccttacttcattctttcctaactttactatac

SEQ ID NO: 25544 - DNA, 50 bp, synthetic construct
  source 1..50: mol_type = other DNA
taaaaacaaactaaacaacaactcaaaaaccccaaatacaaaatcttctc

SEQ ID NO: 25545 - DNA, 50 bp, synthetic construct
  source 1..50: mol_type = other DNA
taattaattactatccccaaccaatcaaactaattataaaccaaaacttc

SEQ ID NO: 25546 - DNA, 50 bp, synthetic construct
  source 1..50: mol_type = other DNA
aaaaaaaaaactccatttctttccaatttacaactaaaattatcactttc

SEQ ID NO: 25547 - DNA, 50 bp, synthetic construct
  source 1..50: mol_type = other DNA
ccacaaaataaaaaccctaccctataaacttttataacctaaacrctatc

SEQ ID NO: 25548 - DNA, 50 bp, synthetic construct
  source 1..50: mol_type = other DNA
crcccaaaccacaaaaacccacaaaacaaaacctccattttataacctac

SEQ ID NO: 25549 - DNA, 50 bp, synthetic construct
  source 1..50: mol_type = other DNA
cacaaaaacccacaaaacaaaacctccattttataacctacrtaaaaaac

SEQ ID NO: 25550 - DNA, 50 bp, synthetic construct
  source 1..50: mol_type = other DNA
aaacccacaaaacaaaacctccattttataacctacrtaaaaaacraaac

SEQ ID NO: 25551 - DNA, 50 bp, synthetic construct
  source 1..50: mol_type = other DNA
tccctataacaaaaaacacctacratctatctaaaaacraaattaataac

SEQ ID NO: 25552 - DNA, 50 bp, synthetic construct
  source 1..50: mol_type = other DNA
cttacraaattctcatatccatcatacaatttctttatcacactatccrc

SEQ ID NO: 25553 - DNA, 50 bp, synthetic construct
  source 1..50: mol_type = other DNA
aaaaaaactatataataaatataaaaacttcrtaaaacccaacaacaaac

SEQ ID NO: 25554 - DNA, 50 bp, synthetic construct
  source 1..50: mol_type = other DNA
ctaaaaaaatctacccctcatttacataactaattcccttacctccctcc

SEQ ID NO: 25555 - DNA, 50 bp, synthetic construct
  source 1..50: mol_type = other DNA
tattacatcctatcctacacacacccatacatcctatttttctatacaac

SEQ ID NO: 25556 - DNA, 50 bp, synthetic construct
  source 1..50: mol_type = other DNA
tttttttaaaacaatatctaattctatcacccaaactacaatacaataac

SEQ ID NO: 25557 - DNA, 50 bp, synthetic construct
  source 1..50: mol_type = other DNA
aaaaaaaaccrcaatattaaaaataaaccacaaaatacrccaaaaccaac

SEQ ID NO: 25558 - DNA, 50 bp, synthetic construct
  source 1..50: mol_type = other DNA
aattcctaaaacctaaaaaacrcatactaaactcctaaactactccraac

SEQ ID NO: 25559 - DNA, 50 bp, synthetic construct
  source 1..50: mol_type = other DNA
aaaaaattcctaaaacctaaaaaacrcatactaaactcctaaactactcc

SEQ ID NO: 25560 - DNA, 50 bp, synthetic construct
  source 1..50: mol_type = other DNA
caaaaactcaacatacrtcccccaaacttcaaaaacttcttactactaac

SEQ ID NO: 25561 - DNA, 50 bp, synthetic construct
  source 1..50: mol_type = other DNA
caaacaactaaaacaatacaaaaacaatcattctaaataaatatataccc

SEQ ID NO: 25562 - DNA, 50 bp, synthetic construct
  source 1..50: mol_type = other DNA
aatcaaaaaattccttcccaaaaaacacccttaacctctttacctatatc

SEQ ID NO: 25563 - DNA, 50 bp, synthetic construct
  source 1..50: mol_type = other DNA
aacaacacaaaataaatctcacaaaacaacctttaatcaaacaatccttc

SEQ ID NO: 25564 - DNA, 50 bp, synthetic construct
  source 1..50: mol_type = other DNA
cattattttactacaaatccataactaaaacacatcttataacataatcc

SEQ ID NO: 25565 - DNA, 50 bp, synthetic construct
  source 1..50: mol_type = other DNA
acaataactacaacaaaactattaaacaaaaaaaaccrtattaataaaac

SEQ ID NO: 25566 - DNA, 50 bp, synthetic construct
  source 1..50: mol_type = other DNA
acttttccaataaacaataactacaacaaaactattaaacaaaaaaaacc

SEQ ID NO: 25567 - DNA, 50 bp, synthetic construct
  source 1..50: mol_type = other DNA
aataaatcaacaaatttaatatatcraccctttacaacaactatccttac

SEQ ID NO: 25568 - DNA, 50 bp, synthetic construct
  source 1..50: mol_type = other DNA
aaaataaccaacccacaaaaccttcrtaaaaacaactattacaaaaaatc

SEQ ID NO: 25569 - DNA, 50 bp, synthetic construct
  source 1..50: mol_type = other DNA
atactccaattaatactaaaaaaaccttcttatattcrtaacctttatcc

SEQ ID NO: 25570 - DNA, 50 bp, synthetic construct
  source 1..50: mol_type = other DNA
ttaaacttactaaatactccaattaatactaaaaaaaccttcttatattc

SEQ ID NO: 25571 - DNA, 50 bp, synthetic construct
  source 1..50: mol_type = other DNA
acaaaaaccttttaatttcaaccatcttttcaaacccaactccctctccc

SEQ ID NO: 25572 - DNA, 50 bp, synthetic construct
  source 1..50: mol_type = other DNA
taatccaattcataaaaacaaaaccaacaacctcacctcctaataccatc

SEQ ID NO: 25573 - DNA, 50 bp, synthetic construct
  source 1..50: mol_type = other DNA
accttaaacaaatactaaaaaaatccataattaatttctaatcatacaac

SEQ ID NO: 25574 - DNA, 50 bp, synthetic construct
  source 1..50: mol_type = other DNA
ccacccccataaacrcctcaatcatataacaaaaattaatcacttcaaac

SEQ ID NO: 25575 - DNA, 50 bp, synthetic construct
  source 1..50: mol_type = other DNA
ccacrctaattaacttaaaaataactcaaaacaaaaacratacccttatc

SEQ ID NO: 25576 - DNA, 50 bp, synthetic construct
  source 1..50: mol_type = other DNA
aaataactcaaaacaaaaacratacccttatcrtaaaacaacctctaatc

SEQ ID NO: 25577 - DNA, 50 bp, synthetic construct
  source 1..50: mol_type = other DNA
aaaacratatataaattaaaaaatcccaaccttaaaaattccccaactcc

SEQ ID NO: 25578 - DNA, 50 bp, synthetic construct
  source 1..50: mol_type = other DNA
taaaaatctaattatcactctaatttctaaaaaaatcccaacctaaactc

SEQ ID NO: 25579 - DNA, 50 bp, synthetic construct
  source 1..50: mol_type = other DNA
aatatctaatttacttcctaccataaacctcraaaacaaataaaaacacc

SEQ ID NO: 25580 - DNA, 50 bp, synthetic construct
  source 1..50: mol_type = other DNA
caaaaaaacractaaaccaaatatctaatttacttcctaccataaacctc

SEQ ID NO: 25581 - DNA, 50 bp, synthetic construct
  source 1..50: mol_type = other DNA
rctacacataaaacaactactacrtacaaaccacttaatacaaccacrac

SEQ ID NO: 25582 - DNA, 50 bp, synthetic construct
  source 1..50: mol_type = other DNA
tttatctaaaccctcratcttaactcattacctaacaacrtactaatacc

SEQ ID NO: 25583 - DNA, 50 bp, synthetic construct
  source 1..50: mol_type = other DNA
ccrctctatcttttatctaaaccctcratcttaactcattacctaacaac

SEQ ID NO: 25584 - DNA, 50 bp, synthetic construct
  source 1..50: mol_type = other DNA
actaaactcaacraacacacaacrcaaaaccaactactaactaaaaaaac

SEQ ID NO: 25585 - DNA, 50 bp, synthetic construct
  source 1..50: mol_type = other DNA
cracattacctacacaaaaaaaatctcctaaccrtctataaacraataac

SEQ ID NO: 25586 - DNA, 50 bp, synthetic construct
  source 1..50: mol_type = other DNA
acaaacraccaaaaaaccctccctatacaaacaataccraataaaacatc

SEQ ID NO: 25587 - DNA, 50 bp, synthetic construct
  source 1..50: mol_type = other DNA
craataaaacatcrctcctaaaaaattaatcaaaaactcaaaaaaattcc

SEQ ID NO: 25588 - DNA, 50 bp, synthetic construct
  source 1..50: mol_type = other DNA
taatcaaaaactcaaaaaaattccrccraacaaaaaccaaataaaaatcc

SEQ ID NO: 25589 - DNA, 50 bp, synthetic construct
  source 1..50: mol_type = other DNA
acaaaaacatcctcratccctactaatataaaaaaacataaatacacrcc

SEQ ID NO: 25590 - DNA, 50 bp, synthetic construct
  source 1..50: mol_type = other DNA
cctactaatataaaaaaacataaatacacrccrtctaaaaactaccaaac

SEQ ID NO: 25591 - DNA, 50 bp, synthetic construct
  source 1..50: mol_type = other DNA
acctacctactaacctaacttctaaattaaaatttctaaatttctacccc

SEQ ID NO: 25592 - DNA, 50 bp, synthetic construct
  source 1..50: mol_type = other DNA
caaaaattctaacccaaaaaccaaaccaacaaataaataaaataactatc

SEQ ID NO: 25593 - DNA, 50 bp, synthetic construct
  source 1..50: mol_type = other DNA
cacaattcacactcaatacctttctaaaaacraaaaacaaactaaaatac

SEQ ID NO: 25594 - DNA, 50 bp, synthetic construct
  source 1..50: mol_type = other DNA
ccatactctaaaatcatctctaacccaaaacaaaacatttccaaaacaac

SEQ ID NO: 25595 - DNA, 50 bp, synthetic construct
  source 1..50: mol_type = other DNA
ctatattaactaaacttcacctctcattcatatatcaaaaactctaaacc

SEQ ID NO: 25596 - DNA, 50 bp, synthetic construct
  source 1..50: mol_type = other DNA
cataccctaacaatcaaattcctaaattttttctaaaaccaatcctaccc

SEQ ID NO: 25597 - DNA, 50 bp, synthetic construct
  source 1..50: mol_type = other DNA
accccrtattttcatatctacacacctttacattttaacraacaataacc

SEQ ID NO: 25598 - DNA, 50 bp, synthetic construct
  source 1..50: mol_type = other DNA
atcracaacaaaccccrtattttcatatctacacacctttacattttaac

SEQ ID NO: 25599 - DNA, 50 bp, synthetic construct
  source 1..50: mol_type = other DNA
ttccccatcctaattcaacacracracaaaacataaccaaaaaacataac

SEQ ID NO: 25600 - DNA, 50 bp, synthetic construct
  source 1..50: mol_type = other DNA
ataactcaaaaaaaaacaccraacrtcatacctcctaattatatcttacc

SEQ ID NO: 25601 - DNA, 50 bp, synthetic construct
  source 1..50: mol_type = other DNA
cccaaacraatacctaaaaaataaaatcattccccatcctaattcaacac

SEQ ID NO: 25602 - DNA, 50 bp, synthetic construct
  source 1..50: mol_type = other DNA
aataacaataattcaacraattaaactaaacactctttaaaaaaacaaac

SEQ ID NO: 25603 - DNA, 50 bp, synthetic construct
  source 1..50: mol_type = other DNA
ttccaaacaaaaaaaacrtctatcttcctaaaaaatatctaacccaactc

SEQ ID NO: 25604 - DNA, 50 bp, synthetic construct
  source 1..50: mol_type = other DNA
ccataaacttttctaaaataccaataaataccaacaattataactacrtc

SEQ ID NO: 25605 - DNA, 50 bp, synthetic construct
  source 1..50: mol_type = other DNA
accccataaacttttctaaaataccaataaataccaacaattataactac

SEQ ID NO: 25606 - DNA, 50 bp, synthetic construct
  source 1..50: mol_type = other DNA
ctaacactcactaacattccaaaaaaacccataaaacttattcattatac

SEQ ID NO: 25607 - DNA, 50 bp, synthetic construct
  source 1..50: mol_type = other DNA
ctaacattccaaaaaaacccataaaacttattcattatacrtaaaaaaac

SEQ ID NO: 25608 - DNA, 50 bp, synthetic construct
  source 1..50: mol_type = other DNA
ttctacacrctacatattttaaaaacatttcaaaatttatcctttaaaac

SEQ ID NO: 25609 - DNA, 50 bp, synthetic construct
  source 1..50: mol_type = other DNA
tctcattttctctaaaaaaccccaaccaaccaactaaccaaattctacac

SEQ ID NO: 25610 - DNA, 50 bp, synthetic construct
  source 1..50: mol_type = other DNA
ccrctaacctaactaaaaaaaacrataaaaccctaaacaaattaaaaccc

SEQ ID NO: 25611 - DNA, 50 bp, synthetic construct
  source 1..50: mol_type = other DNA
ttaacattcctaccttatcraaatctcaaaacacctacraaaaaaacaac

SEQ ID NO: 25612 - DNA, 50 bp, synthetic construct
  source 1..50: mol_type = other DNA
atacraaataccttaacattcctaccttatcraaatctcaaaacacctac

SEQ ID NO: 25613 - DNA, 50 bp, synthetic construct
  source 1..50: mol_type = other DNA
acataccaaaactaaacaaatacraaataccttaacattcctaccttatc

SEQ ID NO: 25614 - DNA, 50 bp, synthetic construct
  source 1..50: mol_type = other DNA
ccaaaatatttcrtacctactcaaccctaacatatcaaattactaaaacc

SEQ ID NO: 25615 - DNA, 50 bp, synthetic construct
  source 1..50: mol_type = other DNA
taataataaatcctcaaccaaacrcaataaaaaatcttactactaatcac

SEQ ID NO: 25616 - DNA, 50 bp, synthetic construct
  source 1..50: mol_type = other DNA
taacttttcrtaaaaatttaaacaatctaataataaatcctcaaccaaac

SEQ ID NO: 25617 - DNA, 50 bp, synthetic construct
  source 1..50: mol_type = other DNA
ctaaaatatttcctaaaacctcaataatatacaactctacctaacttttc

SEQ ID NO: 25618 - DNA, 50 bp, synthetic construct
  source 1..50: mol_type = other DNA
actaaaaacacttttaacacaaaacaacaataataatcttccccaaacac

SEQ ID NO: 25619 - DNA, 50 bp, synthetic construct
  source 1..50: mol_type = other DNA
taaacttcccaacacttaacaataaaacaaattccaactaacttactaac

SEQ ID NO: 25620 - DNA, 50 bp, synthetic construct
  source 1..50: mol_type = other DNA
cctaacacaaaacaaaacacttaatacatattcrataaaatcaaaacatc

SEQ ID NO: 25621 - DNA, 50 bp, synthetic construct
  source 1..50: mol_type = other DNA
aatcacctcraacacaacctaacacaaaacaaaacacttaatacatattc

SEQ ID NO: 25622 - DNA, 50 bp, synthetic construct
  source 1..50: mol_type = other DNA
aacttcatcraacatatatcaaatatcttattctataccaaactatattc

SEQ ID NO: 25623 - DNA, 50 bp, synthetic construct
  source 1..50: mol_type = other DNA
tattcraaataattaaatcccacataaaaacaatcaatactacaacttac

SEQ ID NO: 25624 - DNA, 50 bp, synthetic construct
  source 1..50: mol_type = other DNA
ccacataaaaacaatcaatactacaacttacraataataccacattcctc

SEQ ID NO: 25625 - DNA, 50 bp, synthetic construct
  source 1..50: mol_type = other DNA
tccttcttatatccaaatcaacccctaccatataaattatctatatactc

SEQ ID NO: 25626 - DNA, 50 bp, synthetic construct
  source 1..50: mol_type = other DNA
atattatccttctaaaaacaaaaactatataactaccctccaactatatc

SEQ ID NO: 25627 - DNA, 50 bp, synthetic construct
  source 1..50: mol_type = other DNA
atcctacctaaacctatcrctaataatactattccaatctatctaaactc

SEQ ID NO: 25628 - DNA, 50 bp, synthetic construct
  source 1..50: mol_type = other DNA
aaccaaaaaccrtacaatctcccaacctatatatcctacctaaacctatc

SEQ ID NO: 25629 - DNA, 50 bp, synthetic construct
  source 1..50: mol_type = other DNA
attaataactaataaaataaacaaaccraaatacaaaacaaccaaaaacc

SEQ ID NO: 25630 - DNA, 50 bp, synthetic construct
  source 1..50: mol_type = other DNA
caaaacacacaaactaaaaaactacacractcctaattaccctacattcc

SEQ ID NO: 25631 - DNA, 50 bp, synthetic construct
  source 1..50: mol_type = other DNA
taactaactccrtaatataaaccaacaactacaattaaaaaaatccttac

SEQ ID NO: 25632 - DNA, 50 bp, synthetic construct
  source 1..50: mol_type = other DNA
aaaaaatactaaccctataccctaaaaactataaccaaataacacctccc

SEQ ID NO: 25633 - DNA, 50 bp, synthetic construct
  source 1..50: mol_type = other DNA
taaaattaactaaataaacctcaaaacaaaaacatatcaaatataccttc

SEQ ID NO: 25634 - DNA, 50 bp, synthetic construct
  source 1..50: mol_type = other DNA
caacttcccacactaacctaaatacttcctcacactttactaattactcc

SEQ ID NO: 25635 - DNA, 50 bp, synthetic construct
  source 1..50: mol_type = other DNA
aactaaaaataaccaactacatacccraacaataaccraactctctatac

SEQ ID NO: 25636 - DNA, 50 bp, synthetic construct
  source 1..50: mol_type = other DNA
taaaaaaaataacatccataaccctaaaacracaaacccatattaccaac

SEQ ID NO: 25637 - DNA, 50 bp, synthetic construct
  source 1..50: mol_type = other DNA
aacrcttaccaaataacttaataataatacrctaacaacataaacttatc

SEQ ID NO: 25638 - DNA, 50 bp, synthetic construct
  source 1..50: mol_type = other DNA
taaacaaaacacraaaacaaactctaaaccaaaaaataaccrtatctaac

SEQ ID NO: 25639 - DNA, 50 bp, synthetic construct
  source 1..50: mol_type = other DNA
aaacctctctaaacaaaacacraaaacaaactctaaaccaaaaaataacc

SEQ ID NO: 25640 - DNA, 50 bp, synthetic construct
  source 1..50: mol_type = other DNA
attcaaaaaaactcacccaaaaaaaaacaaccctattcaaaaactcaccc

SEQ ID NO: 25641 - DNA, 50 bp, synthetic construct
  source 1..50: mol_type = other DNA
aataaacacaaatctaaaaatcraaacaacctatataactccctccttcc

SEQ ID NO: 25642 - DNA, 50 bp, synthetic construct
  source 1..50: mol_type = other DNA
atctaacaaaccctaactctactactaaaataaacacaaatctaaaaatc

SEQ ID NO: 25643 - DNA, 50 bp, synthetic construct
  source 1..50: mol_type = other DNA
taacaactttaaataaactacactaaaaaatccttcaccccacraaccac

SEQ ID NO: 25644 - DNA, 50 bp, synthetic construct
  source 1..50: mol_type = other DNA
ctacrtttaacaactttaaataaactacactaaaaaatccttcaccccac

SEQ ID NO: 25645 - DNA, 50 bp, synthetic construct
  source 1..50: mol_type = other DNA
attattttaataactcactcaactactaaacttctctcrattaatccaac

SEQ ID NO: 25646 - DNA, 50 bp, synthetic construct
  source 1..50: mol_type = other DNA
tattccaatcactcaattttatattaatttcaatacaactttaaatacac

SEQ ID NO: 25647 - DNA, 50 bp, synthetic construct
  source 1..50: mol_type = other DNA
tattatctaacacaatactatcttcaaaacctactaaaatacaaacaatc

SEQ ID NO: 25648 - DNA, 50 bp, synthetic construct
  source 1..50: mol_type = other DNA
atactatcttcaaaacctactaaaatacaaacaatcrctaaaccttcacc

SEQ ID NO: 25649 - DNA, 50 bp, synthetic construct
  source 1..50: mol_type = other DNA
atatctatactttcatttcactactaacccaaattctaattaatttaatc

SEQ ID NO: 25650 - DNA, 50 bp, synthetic construct
  source 1..50: mol_type = other DNA
ctattactcaaaaattcctactcaaccatcacatattacaaaaattcccc

SEQ ID NO: 25651 - DNA, 50 bp, synthetic construct
  source 1..50: mol_type = other DNA
tcttaatacacaatcraaaactatattcattaaactattctaatatcacc

SEQ ID NO: 25652 - DNA, 50 bp, synthetic construct
  source 1..50: mol_type = other DNA
cttcatttctatacctaacaacacttttactcctaattaaaaacataacc

SEQ ID NO: 25653 - DNA, 50 bp, synthetic construct
  source 1..50: mol_type = other DNA
tttactcctaattaaaaacataaccrcctcccaattcaacttcctcctac

SEQ ID NO: 25654 - DNA, 50 bp, synthetic construct
  source 1..50: mol_type = other DNA
aaaactctaaataaatctaaaaactataatcrtataaacaattcctcccc

SEQ ID NO: 25655 - DNA, 50 bp, synthetic construct
  source 1..50: mol_type = other DNA
actataatcrtataaacaattcctccccraaatctaaacaaaattctaac

SEQ ID NO: 25656 - DNA, 50 bp, synthetic construct
  source 1..50: mol_type = other DNA
aacccrttaaaaaacccataacraatatcctaaaaccaaacaaaaaaacc

SEQ ID NO: 25657 - DNA, 50 bp, synthetic construct
  source 1..50: mol_type = other DNA
ctatataaattatatcaacttaccaactactacccaaataaaaccaaccc

SEQ ID NO: 25658 - DNA, 50 bp, synthetic construct
  source 1..50: mol_type = other DNA
acaaattaacataactcacacaaaccccatataccacacaaaactaactc

SEQ ID NO: 25659 - DNA, 50 bp, synthetic construct
  source 1..50: mol_type = other DNA
accaaacaaatatctaaacttctcctaaaatctaactcaccaaaacaaac

SEQ ID NO: 25660 - DNA, 50 bp, synthetic construct
  source 1..50: mol_type = other DNA
ttaatcaacatacaaccatctaaaaaaaaaacccaaaactcataactacc

SEQ ID NO: 25661 - DNA, 50 bp, synthetic construct
  source 1..50: mol_type = other DNA
tacataacactaaaaatcaaccraaaactactaaacctaaacraaacrac

SEQ ID NO: 25662 - DNA, 50 bp, synthetic construct
  source 1..50: mol_type = other DNA
ractacataacactaaaaatcaaccraaaactactaaacctaaacraaac

SEQ ID NO: 25663 - DNA, 50 bp, synthetic construct
  source 1..50: mol_type = other DNA
tctacaaaacccaaactaacaaatacctcctacttatctaccraatctac

SEQ ID NO: 25664 - DNA, 50 bp, synthetic construct
  source 1..50: mol_type = other DNA
aactaacrtctacaaaacccaaactaacaaatacctcctacttatctacc

SEQ ID NO: 25665 - DNA, 50 bp, synthetic construct
  source 1..50: mol_type = other DNA
accaaaaaacctacaacctaaataactcactaaacacaaaaaaaaatcac

SEQ ID NO: 25666 - DNA, 50 bp, synthetic construct
  source 1..50: mol_type = other DNA
aatcttcttctatacccaataaatcattcaaactacaaacctcctaactc

SEQ ID NO: 25667 - DNA, 50 bp, synthetic construct
  source 1..50: mol_type = other DNA
aaaaccraaaatatccttaccataaactaaaaaaatcaacraaaaaacac

SEQ ID NO: 25668 - DNA, 50 bp, synthetic construct
  source 1..50: mol_type = other DNA
cacaaaaactaaaaccraaaatatccttaccataaactaaaaaaatcaac

SEQ ID NO: 25669 - DNA, 50 bp, synthetic construct
  source 1..50: mol_type = other DNA
racattaacctaaatcaaaccccacraacctacatcttcaaaaaacattc

SEQ ID NO: 25670 - DNA, 50 bp, synthetic construct
  source 1..50: mol_type = other DNA
craaactaatctaataaatataaacraatactccctaaaaatacaaattc

SEQ ID NO: 25671 - DNA, 50 bp, synthetic construct
  source 1..50: mol_type = other DNA
raatactccctaaaaatacaaattcrtaaaacctaactcaaaccaatacc

SEQ ID NO: 25672 - DNA, 50 bp, synthetic construct
  source 1..50: mol_type = other DNA
attataatatctcratactaatcaaatcattaactaaaactaaaaaacac

SEQ ID NO: 25673 - DNA, 50 bp, synthetic construct
  source 1..50: mol_type = other DNA
acacttactataaaactataataatacaaacatttatatataattaaacc

SEQ ID NO: 25674 - DNA, 50 bp, synthetic construct
  source 1..50: mol_type = other DNA
tacaaaaaaacattattcataaaaaaactataccaatctcctatcaattc

SEQ ID NO: 25675 - DNA, 50 bp, synthetic construct
  source 1..50: mol_type = other DNA
atatttaaaacttcaaacttcaaaactaaccctcctatccaactaaaaac

SEQ ID NO: 25676 - DNA, 50 bp, synthetic construct
  source 1..50: mol_type = other DNA
tcatataccaattacaaaatttttatccacrtaaatatataacttctccc

SEQ ID NO: 25677 - DNA, 50 bp, synthetic construct
  source 1..50: mol_type = other DNA
ctaaaattaaaaacttataatcatataccaattacaaaatttttatccac

SEQ ID NO: 25678 - DNA, 50 bp, synthetic construct
  source 1..50: mol_type = other DNA
aattaaaacttaacctcaaaaaatctataacttcactcaaaaaaaaattc

SEQ ID NO: 25679 - DNA, 50 bp, synthetic construct
  source 1..50: mol_type = other DNA
rcccrtaaaaaatcctactatacaaaaacaatttcaaaactaccactacc

SEQ ID NO: 25680 - DNA, 50 bp, synthetic construct
  source 1..50: mol_type = other DNA
aaataccactctcaacaccctacctataaaaaacccttctctacaaaaac

SEQ ID NO: 25681 - DNA, 50 bp, synthetic construct
  source 1..50: mol_type = other DNA
tcctacaaaaaaaaattccccataaacaaaatattaaaaataacacctcc

SEQ ID NO: 25682 - DNA, 50 bp, synthetic construct
  source 1..50: mol_type = other DNA
crtaatacaaaacaaacatttcaccacaacaactaaaaatatacaaaccc

SEQ ID NO: 25683 - DNA, 50 bp, synthetic construct
  source 1..50: mol_type = other DNA
tcaccacaacaactaaaaatatacaaacccrtacaaaacactaaataaac

SEQ ID NO: 25684 - DNA, 50 bp, synthetic construct
  source 1..50: mol_type = other DNA
acaactaaaaatatacaaacccrtacaaaacactaaataaacraatacac

SEQ ID NO: 25685 - DNA, 50 bp, synthetic construct
  source 1..50: mol_type = other DNA
caaacctccacaaataaaactttctacaaacaaaatacaacratcaaccc

SEQ ID NO: 25686 - DNA, 50 bp, synthetic construct
  source 1..50: mol_type = other DNA
caaataaaactttctacaaacaaaatacaacratcaacccraaaaaccac

SEQ ID NO: 25687 - DNA, 50 bp, synthetic construct
  source 1..50: mol_type = other DNA
taccaaaactaaattcctatcrtccccataaaaacaaccaaaatttactc

SEQ ID NO: 25688 - DNA, 50 bp, synthetic construct
  source 1..50: mol_type = other DNA
tatcctcataaaaacracaaaaattcaattctaacaaaaccaaaactacc

SEQ ID NO: 25689 - DNA, 50 bp, synthetic construct
  source 1..50: mol_type = other DNA
ataaatctcaacccaacccrcctactttcctcactaaatctttaaattcc

SEQ ID NO: 25690 - DNA, 50 bp, synthetic construct
  source 1..50: mol_type = other DNA
ctattcaaaaacaccraaaaactacccctcractcataaactctataatc

SEQ ID NO: 25691 - DNA, 50 bp, synthetic construct
  source 1..50: mol_type = other DNA
aaaaaaccacactaccacacctaaacacaacaaaactttccaaactctac

SEQ ID NO: 25692 - DNA, 50 bp, synthetic construct
  source 1..50: mol_type = other DNA
accacacctaaacacaacaaaactttccaaactctacrcaataaaaaaac

SEQ ID NO: 25693 - DNA, 50 bp, synthetic construct
  source 1..50: mol_type = other DNA
taaaaaatactatacaccccataaccraaactctaaaaataccccaaaac

SEQ ID NO: 25694 - DNA, 50 bp, synthetic construct
  source 1..50: mol_type = other DNA
caaaccacrctaaccaaatactttacaaacraacractcctaaatattac

SEQ ID NO: 25695 - DNA, 50 bp, synthetic construct
  source 1..50: mol_type = other DNA
aattaataatatcaaaaataaataacrctaacaaacrcctccttatctac

SEQ ID NO: 25696 - DNA, 50 bp, synthetic construct
  source 1..50: mol_type = other DNA
attaactcattttacaaacctctaactaactacaaaacrccaattaatac

SEQ ID NO: 25697 - DNA, 50 bp, synthetic construct
  source 1..50: mol_type = other DNA
aaaaaaatataataatcaaaatcactctaccaataaattcctcccaaacc

SEQ ID NO: 25698 - DNA, 50 bp, synthetic construct
  source 1..50: mol_type = other DNA
aaaaataaaactatctaaaccaaaaacctaaaaacraaaactaaacctac

SEQ ID NO: 25699 - DNA, 50 bp, synthetic construct
  source 1..50: mol_type = other DNA
ccttatatccactaaaaatataactttatacaacactttaatttttaaac

SEQ ID NO: 25700 - DNA, 50 bp, synthetic construct
  source 1..50: mol_type = other DNA
tcaatcccctttaattaatcaaaaatatatttcrtttaattccttttttc

SEQ ID NO: 25701 - DNA, 50 bp, synthetic construct
  source 1..50: mol_type = other DNA
aaaattaaccacractttcaatcccctttaattaatcaaaaatatatttc

SEQ ID NO: 25702 - DNA, 50 bp, synthetic construct
  source 1..50: mol_type = other DNA
ctaatccctaaatcaataaactacttcraacactcaaaaaaaacccttcc

SEQ ID NO: 25703 - DNA, 50 bp, synthetic construct
  source 1..50: mol_type = other DNA
aataaaacaactcccaaacctaactaatccctaaatcaataaactacttc

SEQ ID NO: 25704 - DNA, 50 bp, synthetic construct
  source 1..50: mol_type = other DNA
ataactcattaactcaaaaaccaaccaaatctaaaaactacctcatcacc

SEQ ID NO: 25705 - DNA, 50 bp, synthetic construct
  source 1..50: mol_type = other DNA
ataaaataaaacctattacrtatatataaatccactaaaccttctaacac

SEQ ID NO: 25706 - DNA, 50 bp, synthetic construct
  source 1..50: mol_type = other DNA
ctaaacaaataaaataacttacccaaaaacacacaactattaaataaccc

SEQ ID NO: 25707 - DNA, 50 bp, synthetic construct
  source 1..50: mol_type = other DNA
ataactatcattcttccaaacaaactaaaaactcrccattcaacaaaaac

SEQ ID NO: 25708 - DNA, 50 bp, synthetic construct
  source 1..50: mol_type = other DNA
ccaacactcctactttataactatcattcttccaaacaaactaaaaactc

SEQ ID NO: 25709 - DNA, 50 bp, synthetic construct
  source 1..50: mol_type = other DNA
aacttccaacctatctaaaaaaataacaaccacaaaacaaaaatattaac

SEQ ID NO: 25710 - DNA, 50 bp, synthetic construct
  source 1..50: mol_type = other DNA
ctcccaaaacctaatcaacaaaaacttctctcatcaacacaacctaaacc

SEQ ID NO: 25711 - DNA, 50 bp, synthetic construct
  source 1..50: mol_type = other DNA
taacaaacaaaaaaatttcccacaaaccctaaaaacaatataaacaaccc

SEQ ID NO: 25712 - DNA, 50 bp, synthetic construct
  source 1..50: mol_type = other DNA
actatatttaatttccataaaacccataacaccataaaactctacccaac

SEQ ID NO: 25713 - DNA, 50 bp, synthetic construct
  source 1..50: mol_type = other DNA
ctcaaacttaaaaaaaaccaaatccaataaaaaatattaacaaaaacccc

SEQ ID NO: 25714 - DNA, 50 bp, synthetic construct
  source 1..50: mol_type = other DNA
aatcacaacctcaactctaaacrattacaaaaacttaaaaccaactccac

SEQ ID NO: 25715 - DNA, 50 bp, synthetic construct
  source 1..50: mol_type = other DNA
aaattctataattctcaaattcaaacctaccaaatccctctaaaaaaacc

SEQ ID NO: 25716 - DNA, 50 bp, synthetic construct
  source 1..50: mol_type = other DNA
acaaatctaaatctaaaaatcacaaaacttttaaacttaaaaaactcaac

SEQ ID NO: 25717 - DNA, 50 bp, synthetic construct
  source 1..50: mol_type = other DNA
tctaatacataatataatctctaaaatccttcaaaccattcccattcccc

SEQ ID NO: 25718 - DNA, 50 bp, synthetic construct
  source 1..50: mol_type = other DNA
aaactaaaacacraaaatatatttaaccatctaaacttctaatccaatac

SEQ ID NO: 25719 - DNA, 50 bp, synthetic construct
  source 1..50: mol_type = other DNA
tacccaatcctctcctcataacaacaaaaataaaccaaactaaaaaaacc

SEQ ID NO: 25720 - DNA, 50 bp, synthetic construct
  source 1..50: mol_type = other DNA
aaactaaatcccatctcctctaaaaaaattctaacaacttttataccaac

SEQ ID NO: 25721 - DNA, 50 bp, synthetic construct
  source 1..50: mol_type = other DNA
tatactaaacccactaaaactacaaaaaataactaattttataactaaac

SEQ ID NO: 25722 - DNA, 50 bp, synthetic construct
  source 1..50: mol_type = other DNA
aaaaaaaaccacaactcaaaataaacttaaatacaaccractttaactac

SEQ ID NO: 25723 - DNA, 50 bp, synthetic construct
  source 1..50: mol_type = other DNA
ttttctcttttaaaaacacctactaaaccatacaataaaaaaaaacctcc

SEQ ID NO: 25724 - DNA, 50 bp, synthetic construct
  source 1..50: mol_type = other DNA
attacccaaactaatctaaaactcctaaactcaaacaatttacctacctc

SEQ ID NO: 25725 - DNA, 50 bp, synthetic construct
  source 1..50: mol_type = other DNA
aacttcaaacraaccacrtaactactttttttccataaccaaactttaac

SEQ ID NO: 25726 - DNA, 50 bp, synthetic construct
  source 1..50: mol_type = other DNA
ccccattaactatcaaaacaaaaaccrccatctaataaaaaacraaatac

SEQ ID NO: 25727 - DNA, 50 bp, synthetic construct
  source 1..50: mol_type = other DNA
cttctaaattaaattccaaattaaaaatacaaaactccaaaaaaacrtcc

SEQ ID NO: 25728 - DNA, 50 bp, synthetic construct
  source 1..50: mol_type = other DNA
aaaacttctaaattaaattccaaattaaaaatacaaaactccaaaaaaac

SEQ ID NO: 25729 - DNA, 50 bp, synthetic construct
  source 1..50: mol_type = other DNA
acatctccaacctaaaacccaacccaaaaatctcaaatttaacrcatcac

SEQ ID NO: 25730 - DNA, 50 bp, synthetic construct
  source 1..50: mol_type = other DNA
actaaaacrcaaaaaataaacrcccctctctataaaccctcaataaatcc

SEQ ID NO: 25731 - DNA, 50 bp, synthetic construct
  source 1..50: mol_type = other DNA
caataaacaaatacacaattaccaaaataactaaaacrcaaaaaataaac

SEQ ID NO: 25732 - DNA, 50 bp, synthetic construct
  source 1..50: mol_type = other DNA
ataaaacaacraacaataaacaaatacacaattaccaaaataactaaaac

SEQ ID NO: 25733 - DNA, 50 bp, synthetic construct
  source 1..50: mol_type = other DNA
catctcctacrtctcaattatcctaataattatatatctacccattattc

SEQ ID NO: 25734 - DNA, 50 bp, synthetic construct
  source 1..50: mol_type = other DNA
tctccaaaatattaaaaattctataccctaaaaaattccractcaaatcc

SEQ ID NO: 25735 - DNA, 50 bp, synthetic construct
  source 1..50: mol_type = other DNA
caaaatattaaaaattctataccctaaaaaattccractcaaatccraac

SEQ ID NO: 25736 - DNA, 50 bp, synthetic construct
  source 1..50: mol_type = other DNA
ctaaaacacrttaaaataataaaacattatccctctaatctttcaccctc

SEQ ID NO: 25737 - DNA, 50 bp, synthetic construct
  source 1..50: mol_type = other DNA
aaaataaaaaaccaaaaaaacaatattctactatcccaacrtacttcaac

SEQ ID NO: 25738 - DNA, 50 bp, synthetic construct
  source 1..50: mol_type = other DNA
rtaattaaaaatttcctcrctaaaaaacaatacrccctaattaccrctac

SEQ ID NO: 25739 - DNA, 50 bp, synthetic construct
  source 1..50: mol_type = other DNA
aaaataaccaaaactataaacccactcctaaacrcaacrataatcaaaac

SEQ ID NO: 25740 - DNA, 50 bp, synthetic construct
  source 1..50: mol_type = other DNA
rcaacrataatcaaaacrcattattccccaacraaaaaatcctcaattac

SEQ ID NO: 25741 - DNA, 50 bp, synthetic construct
  source 1..50: mol_type = other DNA
aaaaaccaactcttaacctctacactatactaaaaaaactacttaaaatc

SEQ ID NO: 25742 - DNA, 50 bp, synthetic construct
  source 1..50: mol_type = other DNA
aaactacttaaaatcraaactacctctaaaaaccccaccttctaaaatac

SEQ ID NO: 25743 - DNA, 50 bp, synthetic construct
  source 1..50: mol_type = other DNA
ctaaaatacracctaaataactaactaatataacttcaacttctactctc

SEQ ID NO: 25744 - DNA, 50 bp, synthetic construct
  source 1..50: mol_type = other DNA
ctaactaatataacttcaacttctactctcrctctaaccttttaacctcc

SEQ ID NO: 25745 - DNA, 50 bp, synthetic construct
  source 1..50: mol_type = other DNA
tatttaaaccaaacataataacacrttcctacaatcccaacaactactcc

SEQ ID NO: 25746 - DNA, 50 bp, synthetic construct
  source 1..50: mol_type = other DNA
accaccatacctaactcaaacacaaaattttttcataaaactcacttaac

SEQ ID NO: 25747 - DNA, 50 bp, synthetic construct
  source 1..50: mol_type = other DNA
tcataaaactcacttaacracaaaattctaccttacctaaaattatttac

SEQ ID NO: 25748 - DNA, 50 bp, synthetic construct
  source 1..50: mol_type = other DNA
tactcaaaaaataaatacttcctctaaaaccacaattacaaaaaccaccc

SEQ ID NO: 25749 - DNA, 50 bp, synthetic construct
  source 1..50: mol_type = other DNA
atttctacaactataatcccaaaaaaaacactcacctcctaaacaacaac

SEQ ID NO: 25750 - DNA, 50 bp, synthetic construct
  source 1..50: mol_type = other DNA
cctccaaaaatattaaccrtaacattaccttacaactctacaaaacaaac

SEQ ID NO: 25751 - DNA, 50 bp, synthetic construct
  source 1..50: mol_type = other DNA
caacttccaaccaattcctaccaaaacttataaataaatttcctaaaaac

SEQ ID NO: 25752 - DNA, 50 bp, synthetic construct
  source 1..50: mol_type = other DNA
ttccaaccaattcctaccaaaacttataaataaatttcctaaaaacracc

SEQ ID NO: 25753 - DNA, 50 bp, synthetic construct
  source 1..50: mol_type = other DNA
aaaaaaatttaataaacaaataacaaaaacaaaacctcccaactttttac

SEQ ID NO: 25754 - DNA, 50 bp, synthetic construct
  source 1..50: mol_type = other DNA
tacaaaaacrctctatcactaccctaataatactaaacctaaccctaacc

SEQ ID NO: 25755 - DNA, 50 bp, synthetic construct
  source 1..50: mol_type = other DNA
ccttcacttcctaacccaaaacacctaaaattttaaactaactaattacc

SEQ ID NO: 25756 - DNA, 50 bp, synthetic construct
  source 1..50: mol_type = other DNA
tctaaactcataaccrtaataaacaaaacrctaacrtacatactaactcc

SEQ ID NO: 25757 - DNA, 50 bp, synthetic construct
  source 1..50: mol_type = other DNA
aactaactaattaccrcctatatcactatatctacraaatcaacatatac

SEQ ID NO: 25758 - DNA, 50 bp, synthetic construct
  source 1..50: mol_type = other DNA
ctaattaccrcctatatcactatatctacraaatcaacatatacrccaac

SEQ ID NO: 25759 - DNA, 50 bp, synthetic construct
  source 1..50: mol_type = other DNA
aaaaactaaaaaacrtaactctcaactaccraaaaaaaccccaccaaaac

SEQ ID NO: 25760 - DNA, 50 bp, synthetic construct
  source 1..50: mol_type = other DNA
cctcaaaaacttaactttcacaattatataaataaaataattaacctaac

SEQ ID NO: 25761 - DNA, 50 bp, synthetic construct
  source 1..50: mol_type = other DNA
taaattttactatataaccaaaataaatacacaataacacctcatttccc

SEQ ID NO: 25762 - DNA, 50 bp, synthetic construct
  source 1..50: mol_type = other DNA
caaactaatcttatactaacratttaatatacacttaaaaccacrtaacc

SEQ ID NO: 25763 - DNA, 50 bp, synthetic construct
  source 1..50: mol_type = other DNA
attaaccaaactaatcttatactaacratttaatatacacttaaaaccac

SEQ ID NO: 25764 - DNA, 50 bp, synthetic construct
  source 1..50: mol_type = other DNA
atctatcccatatattttacratcacrtaacttcaaatatacattaaacc

SEQ ID NO: 25765 - DNA, 50 bp, synthetic construct
  source 1..50: mol_type = other DNA
cttccacctcaaactacccactaattaaaactataaacaaaaatcaccac

SEQ ID NO: 25766 - DNA, 50 bp, synthetic construct
  source 1..50: mol_type = other DNA
aaacrtaaaaccctctaaaccaaatataaaatataatctcrtaatacrcc

SEQ ID NO: 25767 - DNA, 50 bp, synthetic construct
  source 1..50: mol_type = other DNA
ratctaaaaaacrcaatattcraataaaaataacccrattttccaaatac

SEQ ID NO: 25768 - DNA, 50 bp, synthetic construct
  source 1..50: mol_type = other DNA
actaaatacctcataataaaacatacactttttcttaatttcaattatac

SEQ ID NO: 25769 - DNA, 50 bp, synthetic construct
  source 1..50: mol_type = other DNA
aacccacaatcatcaaaaaaacrtttccaaaactataaatcatcttccac

SEQ ID NO: 25770 - DNA, 50 bp, synthetic construct
  source 1..50: mol_type = other DNA
cctaacatttataattatatatttttcaaaatcaaaaaaacctaactccc

SEQ ID NO: 25771 - DNA, 50 bp, synthetic construct
  source 1..50: mol_type = other DNA
atacctaaatcaaaccaaaataaaactcractctacaaaatcccctactc

SEQ ID NO: 25772 - DNA, 50 bp, synthetic construct
  source 1..50: mol_type = other DNA
rcrccccattcaaacttactaaatacctaaatcaaaccaaaataaaactc

SEQ ID NO: 25773 - DNA, 50 bp, synthetic construct
  source 1..50: mol_type = other DNA
ccraaccccatcctaatctaattcaaacactcaataaacctaaataaaac

SEQ ID NO: 25774 - DNA, 50 bp, synthetic construct
  source 1..50: mol_type = other DNA
raaccccatcctaatctaattcaaacactcaataaacctaaataaaacrc

SEQ ID NO: 25775 - DNA, 50 bp, synthetic construct
  source 1..50: mol_type = other DNA
aatctaattcaaacactcaataaacctaaataaaacrcrattactaaaac

SEQ ID NO: 25776 - DNA, 50 bp, synthetic construct
  source 1..50: mol_type = other DNA
tcctaactttaaaatcacaaaacaaaaataacttattaaaaaaacaaaac

SEQ ID NO: 25777 - DNA, 50 bp, synthetic construct
  source 1..50: mol_type = other DNA
aaaataataaaaacactattctttccccctcaaaaaaattaaacaaaaac

SEQ ID NO: 25778 - DNA, 50 bp, synthetic construct
  source 1..50: mol_type = other DNA
ctcctaacacctaaatttacaaaaaacatttaaaaacccaataaaaaacc

SEQ ID NO: 25779 - DNA, 50 bp, synthetic construct
  source 1..50: mol_type = other DNA
aaatatttctttattcttcttccatcatattaataataaattaatcactc

SEQ ID NO: 25780 - DNA, 50 bp, synthetic construct
  source 1..50: mol_type = other DNA
aaaaaataaaaaaacactttaacatcaatctcctacaaaattcaactcac

SEQ ID NO: 25781 - DNA, 50 bp, synthetic construct
  source 1..50: mol_type = other DNA
aaaataaaaaaacactttaacatcaatctcctacaaaattcaactcacrc

SEQ ID NO: 25782 - DNA, 50 bp, synthetic construct
  source 1..50: mol_type = other DNA
ccrtacaacttccaaaccaaaaaaccataaataaaatatctaaaaacatc

SEQ ID NO: 25783 - DNA, 50 bp, synthetic construct
  source 1..50: mol_type = other DNA
acratactttcaaatattctattcataacctcttaacttaaaaattatac

SEQ ID NO: 25784 - DNA, 50 bp, synthetic construct
  source 1..50: mol_type = other DNA
aaactaatcctatctcaaaacaaaccattattctctcatttctctaatac

SEQ ID NO: 25785 - DNA, 50 bp, synthetic construct
  source 1..50: mol_type = other DNA
tattatcaaaaaataatacataaataaatattcatcttccctctcatacc

SEQ ID NO: 25786 - DNA, 50 bp, synthetic construct
  source 1..50: mol_type = other DNA
atacataaataaatattcatcttccctctcataccratatactctacttc

SEQ ID NO: 25787 - DNA, 50 bp, synthetic construct
  source 1..50: mol_type = other DNA
tccctctcataccratatactctacttcrctatttcaataaaaattttcc

SEQ ID NO: 25788 - DNA, 50 bp, synthetic construct
  source 1..50: mol_type = other DNA
cratatactctacttcrctatttcaataaaaattttccrtaattctaaac

SEQ ID NO: 25789 - DNA, 50 bp, synthetic construct
  source 1..50: mol_type = other DNA
aaaaattttccrtaattctaaacrtcccttaaccacaccataaaacaaac

SEQ ID NO: 25790 - DNA, 50 bp, synthetic construct
  source 1..50: mol_type = other DNA
taaattattttcctaaaatcactaaactaaacaaatcaaaactcaaactc

SEQ ID NO: 25791 - DNA, 50 bp, synthetic construct
  source 1..50: mol_type = other DNA
actataaatcatacatacctctttaatcraatttaaaataaaccattacc

SEQ ID NO: 25792 - DNA, 50 bp, synthetic construct
  source 1..50: mol_type = other DNA
aaccctcaattttcccctataaatcaaccacaaaaccaaaacaatttaac

SEQ ID NO: 25793 - DNA, 50 bp, synthetic construct
  source 1..50: mol_type = other DNA
ttctttcttaaactcttttatttcrtatataacatcrtacaaaacatatc

SEQ ID NO: 25794 - DNA, 50 bp, synthetic construct
  source 1..50: mol_type = other DNA
ctatttacctaaaaaaaactcactttaatctaaacatcaaaaattacacc

SEQ ID NO: 25795 - DNA, 50 bp, synthetic construct
  source 1..50: mol_type = other DNA
accatataaatcrtccaatcaaatttatcacattttaaaaatcaataaac

SEQ ID NO: 25796 - DNA, 50 bp, synthetic construct
  source 1..50: mol_type = other DNA
aatcrtccaatcaaatttatcacattttaaaaatcaataaacratacaac

SEQ ID NO: 25797 - DNA, 50 bp, synthetic construct
  source 1..50: mol_type = other DNA
ttttaactaaactatcacccacrtttaaaataaaaaatacaacacraacc

SEQ ID NO: 25798 - DNA, 50 bp, synthetic construct
  source 1..50: mol_type = other DNA
ctcactacacccctatttctactcactaaaaccaacttataaaaaaaaac

SEQ ID NO: 25799 - DNA, 50 bp, synthetic construct
  source 1..50: mol_type = other DNA
accrccccaaaatctactatactaccaaccaaaaaattaataaataaaac

SEQ ID NO: 25800 - DNA, 50 bp, synthetic construct
  source 1..50: mol_type = other DNA
cttcctctaataaaccaaaaactaaactatcaccccaaaaacccraaacc

SEQ ID NO: 25801 - DNA, 50 bp, synthetic construct
  source 1..50: mol_type = other DNA
tttcttcttcctctaataaaccaaaaactaaactatcaccccaaaaaccc

SEQ ID NO: 25802 - DNA, 50 bp, synthetic construct
  source 1..50: mol_type = other DNA
ccrccctcacctaacttccaactactacaaaaacaacctttaaaaaacac

SEQ ID NO: 25803 - DNA, 50 bp, synthetic construct
  source 1..50: mol_type = other DNA
acrtatcccccaaaaactatccttacaataactaaaaaccaaataaaaac

SEQ ID NO: 25804 - DNA, 50 bp, synthetic construct
  source 1..50: mol_type = other DNA
aaccaaataaaaacracttcaaccacttctcaatctcttctaatacraac

SEQ ID NO: 25805 - DNA, 50 bp, synthetic construct
  source 1..50: mol_type = other DNA
cccacctcraacrattactataaaaatccaataaattaaaactaataaac

SEQ ID NO: 25806 - DNA, 50 bp, synthetic construct
  source 1..50: mol_type = other DNA
taccaaacrtttaccaactttaattcactaaatccttacaataaccrctc

SEQ ID NO: 25807 - DNA, 50 bp, synthetic construct
  source 1..50: mol_type = other DNA
actaaatccttacaataaccrctcraaataaatattaaccccatttcacc

SEQ ID NO: 25808 - DNA, 50 bp, synthetic construct
  source 1..50: mol_type = other DNA
cttacattctatttatattaaacaacrcaactcraaaccttaattacctc

SEQ ID NO: 25809 - DNA, 50 bp, synthetic construct
  source 1..50: mol_type = other DNA
tacaattttcaatacaacttacattctatttatattaaacaacrcaactc

SEQ ID NO: 25810 - DNA, 50 bp, synthetic construct
  source 1..50: mol_type = other DNA
tttaaattacaattttcaatacaacttacattctatttatattaaacaac

SEQ ID NO: 25811 - DNA, 50 bp, synthetic construct
  source 1..50: mol_type = other DNA
aactaatacrcacttaaaatataatcaaccaaaactacratatactatac

SEQ ID NO: 25812 - DNA, 50 bp, synthetic construct
  source 1..50: mol_type = other DNA
ctaaccacatataactaatacrcacttaaaatataatcaaccaaaactac

SEQ ID NO: 25813 - DNA, 50 bp, synthetic construct
  source 1..50: mol_type = other DNA
ttcaaatacrcattaaccacatataactaataattactatattaaacaac

SEQ ID NO: 25814 - DNA, 50 bp, synthetic construct
  source 1..50: mol_type = other DNA
ttaacctcccaaaatatctttttatctaatactaaaaaattacaaaaaac

SEQ ID NO: 25815 - DNA, 50 bp, synthetic construct
  source 1..50: mol_type = other DNA
tcatcctctatctaaaactcaaaactcaaaactctattaccctacaactc

SEQ ID NO: 25816 - DNA, 50 bp, synthetic construct
  source 1..50: mol_type = other DNA
aactcaaaactcaaaactctattaccctacaactcrcctactattaacac

SEQ ID NO: 25817 - DNA, 50 bp, synthetic construct
  source 1..50: mol_type = other DNA
ttttaatacaaatccactaatctaaaaaaaatattttaatcatatctacc

SEQ ID NO: 25818 - DNA, 50 bp, synthetic construct
  source 1..50: mol_type = other DNA
cctaaaccccaccaaaacctataattatcctcctacctttttactatcac

SEQ ID NO: 25819 - DNA, 50 bp, synthetic construct
  source 1..50: mol_type = other DNA
atcttaatctaaacttataaaaaataacttaaaaccccractccaacaac

SEQ ID NO: 25820 - DNA, 50 bp, synthetic construct
  source 1..50: mol_type = other DNA
ctaacttccataatcttaatctaaacttataaaaaataacttaaaacccc

SEQ ID NO: 25821 - DNA, 50 bp, synthetic construct
  source 1..50: mol_type = other DNA
cacctatccaaacaataaattttaaaaaaaacaacccrttaaaataaccc

SEQ ID NO: 25822 - DNA, 50 bp, synthetic construct
  source 1..50: mol_type = other DNA
tcccaacraactacccctcccaaaactcactatttaaacaaatattaaac

SEQ ID NO: 25823 - DNA, 50 bp, synthetic construct
  source 1..50: mol_type = other DNA
caacraactacccctcccaaaactcactatttaaacaaatattaaacrtc

SEQ ID NO: 25824 - DNA, 50 bp, synthetic construct
  source 1..50: mol_type = other DNA
ctacccctcccaaaactcactatttaaacaaatattaaacrtcrctaaac

SEQ ID NO: 25825 - DNA, 50 bp, synthetic construct
  source 1..50: mol_type = other DNA
tcratcaaaataataattaaacraccttcctaacctttacraaacctaac

SEQ ID NO: 25826 - DNA, 50 bp, synthetic construct
  source 1..50: mol_type = other DNA
tttacctctttaaccaaaacttccrccctcratcaaaataataattaaac

SEQ ID NO: 25827 - DNA, 50 bp, synthetic construct
  source 1..50: mol_type = other DNA
cracaataacaataattatttttacctctttaaccaaaacttccrccctc

SEQ ID NO: 25828 - DNA, 50 bp, synthetic construct
  source 1..50: mol_type = other DNA
ataaaaaaaaacrcttccctcaaaccraaactaataaactcctaaatcac

SEQ ID NO: 25829 - DNA, 50 bp, synthetic construct
  source 1..50: mol_type = other DNA
atctaaataccrctttaaattattaaataaaataaacttcatttatcaac

SEQ ID NO: 25830 - DNA, 50 bp, synthetic construct
  source 1..50: mol_type = other DNA
aaattttacratctataaaaaactatacaaaataaaaacccctaaacttc

SEQ ID NO: 25831 - DNA, 50 bp, synthetic construct
  source 1..50: mol_type = other DNA
acratctataaaaaactatacaaaataaaaacccctaaacttcractttc

SEQ ID NO: 25832 - DNA, 50 bp, synthetic construct
  source 1..50: mol_type = other DNA
aaatctattccttttcaaaacaactataatccacrtaaataaaactaaac

SEQ ID NO: 25833 - DNA, 50 bp, synthetic construct
  source 1..50: mol_type = other DNA
tattactaccctcatctttcctaaaatatctaaccttaacaatcaaattc

SEQ ID NO: 25834 - DNA, 50 bp, synthetic construct
  source 1..50: mol_type = other DNA
aactaataataacrataaccacacrataaaactcctctacttttaaaaac

SEQ ID NO: 25835 - DNA, 50 bp, synthetic construct
  source 1..50: mol_type = other DNA
ataaaaacctaacaaaactccctataaactaataataacrataaccacac

SEQ ID NO: 25836 - DNA, 50 bp, synthetic construct
  source 1..50: mol_type = other DNA
taaaaacatcaataaaaacctaacaaaactccctataaactaataataac

SEQ ID NO: 25837 - DNA, 50 bp, synthetic construct
  source 1..50: mol_type = other DNA
taaatcccaaaccaaacaacatacaccacaaactaactaaaaaacctttc

SEQ ID NO: 25838 - DNA, 50 bp, synthetic construct
  source 1..50: mol_type = other DNA
aactaaactcaaaaccaataaactaataaaaacatataacctactaaaac

SEQ ID NO: 25839 - DNA, 50 bp, synthetic construct
  source 1..50: mol_type = other DNA
cctaaaaattacaatccttataacttaaactacctttcaaatttatttac

SEQ ID NO: 25840 - DNA, 50 bp, synthetic construct
  source 1..50: mol_type = other DNA
ttaatattatctttcctaaatttcccaccaccrtaaatataaattcaaac

SEQ ID NO: 25841 - DNA, 50 bp, synthetic construct
  source 1..50: mol_type = other DNA
aaaatttcaaaaatttaaatttttcctttttcattctcttctctacttcc

SEQ ID NO: 25842 - DNA, 50 bp, synthetic construct
  source 1..50: mol_type = other DNA
tttaaaaaaccacaacaaacaacttaaacccaaaaattcaaaaccaaccc

SEQ ID NO: 25843 - DNA, 50 bp, synthetic construct
  source 1..50: mol_type = other DNA
aaaacataacttaaccaaatctccaattataccaaaaacaaaatctaaac

SEQ ID NO: 25844 - DNA, 50 bp, synthetic construct
  source 1..50: mol_type = other DNA
ttaaaccacaatacccaaacaatttttaatcttaaaaacraaaaccraac

SEQ ID NO: 25845 - DNA, 50 bp, synthetic construct
  source 1..50: mol_type = other DNA
ccttaaaaaacraaacctcaaaactcaatactcraactaactccaaaacc

SEQ ID NO: 25846 - DNA, 50 bp, synthetic construct
  source 1..50: mol_type = other DNA
aaaattatatttaaaataatacttctaccaacatatcccrtaattccaac

SEQ ID NO: 25847 - DNA, 50 bp, synthetic construct
  source 1..50: mol_type = other DNA
attatatttaaaataatacttctaccaacatatcccrtaattccaacrcc

SEQ ID NO: 25848 - DNA, 50 bp, synthetic construct
  source 1..50: mol_type = other DNA
aaataatacttctaccaacatatcccrtaattccaacrccrattttaacc

SEQ ID NO: 25849 - DNA, 50 bp, synthetic construct
  source 1..50: mol_type = other DNA
ttcaaataacccacaaacraacctaattcactcacctacttaataaaacc

SEQ ID NO: 25850 - DNA, 50 bp, synthetic construct
  source 1..50: mol_type = other DNA
aaataaaccaaattcrcctataaaccacctaaattaccctatcataatac

SEQ ID NO: 25851 - DNA, 50 bp, synthetic construct
  source 1..50: mol_type = other DNA
attcrcctataaaccacctaaattaccctatcataatacrtacctaaaac

SEQ ID NO: 25852 - DNA, 50 bp, synthetic construct
  source 1..50: mol_type = other DNA
ataaaccacctaaattaccctatcataatacrtacctaaaacraacaaac

SEQ ID NO: 25853 - DNA, 50 bp, synthetic construct
  source 1..50: mol_type = other DNA
aacractaaaactaaattaaactctataatatttacacccccrtctaaac

SEQ ID NO: 25854 - DNA, 50 bp, synthetic construct
  source 1..50: mol_type = other DNA
aactaaattaaactctataatatttacacccccrtctaaacrcaaaaatc

SEQ ID NO: 25855 - DNA, 50 bp, synthetic construct
  source 1..50: mol_type = other DNA
attacaaccctatcttccttaactctccattaaatctacrcaatataacc

SEQ ID NO: 25856 - DNA, 50 bp, synthetic construct
  source 1..50: mol_type = other DNA
craaatcaaacattacaaccctatcttccttaactctccattaaatctac

SEQ ID NO: 25857 - DNA, 50 bp, synthetic construct
  source 1..50: mol_type = other DNA
ttatacctaaccaaaacaaaatacaataactaaaaaaacctcacraaacc

SEQ ID NO: 25858 - DNA, 50 bp, synthetic construct
  source 1..50: mol_type = other DNA
caaaccttatacctaaccaaaacaaaatacaataactaaaaaaacctcac

SEQ ID NO: 25859 - DNA, 50 bp, synthetic construct
  source 1..50: mol_type = other DNA
atcctaaccaaacacaaaatctatttctaaaaaataattaattccttaac

SEQ ID NO: 25860 - DNA, 50 bp, synthetic construct
  source 1..50: mol_type = other DNA
catttatttcttcttaacaatatcccctacaaaaaatactaattaaaaac

SEQ ID NO: 25861 - DNA, 50 bp, synthetic construct
  source 1..50: mol_type = other DNA
taacataaactttaataaaactactaacacccctttatcacaaaaaaatc

SEQ ID NO: 25862 - DNA, 50 bp, synthetic construct
  source 1..50: mol_type = other DNA
aaaaaataacctataaacctcaaaattaacacaataatttaaatttcacc

SEQ ID NO: 25863 - DNA, 50 bp, synthetic construct
  source 1..50: mol_type = other DNA
tataaacctcaaaattaacacaataatttaaatttcaccraatacactac

SEQ ID NO: 25864 - DNA, 50 bp, synthetic construct
  source 1..50: mol_type = other DNA
aacaaccccaaaataccraacctaactaaaattttccaaaaataaaaacc

SEQ ID NO: 25865 - DNA, 50 bp, synthetic construct
  source 1..50: mol_type = other DNA
ctaaaattttccaaaaataaaaaccrtaaacaacaatacraatattaacc

SEQ ID NO: 25866 - DNA, 50 bp, synthetic construct
  source 1..50: mol_type = other DNA
aaaattttccaaaaataaaaaccrtaaacaacaatacraatattaaccrc

SEQ ID NO: 25867 - DNA, 50 bp, synthetic construct
  source 1..50: mol_type = other DNA
ccctcttaataaaaacttatataaattcctaaaaaaaataacaaccaaac

SEQ ID NO: 25868 - DNA, 50 bp, synthetic construct
  source 1..50: mol_type = other DNA
taaaacttaaccactatcacttacaaaataccaacacaaccatcttcacc

SEQ ID NO: 25869 - DNA, 50 bp, synthetic construct
  source 1..50: mol_type = other DNA
cctataccccraaacaaaatctaacttacaaaaaaaactcaaaaatattc

SEQ ID NO: 25870 - DNA, 50 bp, synthetic construct
  source 1..50: mol_type = other DNA
attaatcaacraatatttttaaacccctcctataaatcaaaccctactcc

SEQ ID NO: 25871 - DNA, 50 bp, synthetic construct
  source 1..50: mol_type = other DNA
aaaatactctacaaaaacctaaattcttaacccctaaaaaaacttaatcc

SEQ ID NO: 25872 - DNA, 50 bp, synthetic construct
  source 1..50: mol_type = other DNA
ttcctaaaaaaaactctataaataccacrcccaaaaccctacaacaaatc

SEQ ID NO: 25873 - DNA, 50 bp, synthetic construct
  source 1..50: mol_type = other DNA
tcaacaaccctccaacacaaactaaaaatctaaaaaaatcaaaccatatc

SEQ ID NO: 25874 - DNA, 50 bp, synthetic construct
  source 1..50: mol_type = other DNA
ctcaacctatattaaaaaactattaaatattctttctatacaaaaaatac

SEQ ID NO: 25875 - DNA, 50 bp, synthetic construct
  source 1..50: mol_type = other DNA
tatattaaaaaactattaaatattctttctatacaaaaaatacrcctacc

SEQ ID NO: 25876 - DNA, 50 bp, synthetic construct
  source 1..50: mol_type = other DNA
aatattctttctatacaaaaaatacrcctaccrtcctctattttataatc

SEQ ID NO: 25877 - DNA, 50 bp, synthetic construct
  source 1..50: mol_type = other DNA
ccaaaaaaacataatattacccccccraatacaaccttaaatacaaaaac

SEQ ID NO: 25878 - DNA, 50 bp, synthetic construct
  source 1..50: mol_type = other DNA
aacrttaaaaattttccatcttactctacaacctaacttcttaaatcatc

SEQ ID NO: 25879 - DNA, 50 bp, synthetic construct
  source 1..50: mol_type = other DNA
cctaacttcttaaatcatcrtcctactactaacataaacctaaattaaac

SEQ ID NO: 25880 - DNA, 50 bp, synthetic construct
  source 1..50: mol_type = other DNA
rtcctactactaacataaacctaaattaaacraatttcctacaaatcaac

SEQ ID NO: 25881 - DNA, 50 bp, synthetic construct
  source 1..50: mol_type = other DNA
actaacataaacctaaattaaacraatttcctacaaatcaacraaaacrc

SEQ ID NO: 25882 - DNA, 50 bp, synthetic construct
  source 1..50: mol_type = other DNA
caaaaaatttacttattaccacaaaataatacaaatctattcctaaaacc

SEQ ID NO: 25883 - DNA, 50 bp, synthetic construct
  source 1..50: mol_type = other DNA
cctatacccrtcaaaatcccttttccaaccataaaaacaaaaaataaacc

SEQ ID NO: 25884 - DNA, 50 bp, synthetic construct
  source 1..50: mol_type = other DNA
ccttaaaaataaaaccaaaaactttctcttacaacttataaaaaaataac

SEQ ID NO: 25885 - DNA, 50 bp, synthetic construct
  source 1..50: mol_type = other DNA
taaattttaaatttccaaaaaaaaatctccaaacccttttcataaccrcc

SEQ ID NO: 25886 - DNA, 50 bp, synthetic construct
  source 1..50: mol_type = other DNA
acataaattttaaatttccaaaaaaaaatctccaaacccttttcataacc

SEQ ID NO: 25887 - DNA, 50 bp, synthetic construct
  source 1..50: mol_type = other DNA
taaattatattaaaacaaatataaaattcaataattaatcctactccaac

SEQ ID NO: 25888 - DNA, 50 bp, synthetic construct
  source 1..50: mol_type = other DNA
ccaaaattcacccaactaaattctaataaaaccaaacaaaaacraaatac

SEQ ID NO: 25889 - DNA, 50 bp, synthetic construct
  source 1..50: mol_type = other DNA
aaaaaacccaaaattcacccaactaaattctaataaaaccaaacaaaaac

SEQ ID NO: 25890 - DNA, 50 bp, synthetic construct
  source 1..50: mol_type = other DNA
caaaaaccrctaaccaacaaaacaactactaactaataacrcccaaaaac

SEQ ID NO: 25891 - DNA, 50 bp, synthetic construct
  source 1..50: mol_type = other DNA
actcctacaacaaaaaccrctaaccaacaaaacaactactaactaataac

SEQ ID NO: 25892 - DNA, 50 bp, synthetic construct
  source 1..50: mol_type = other DNA
acaactaccttactaaccaacratttctattacaaaaacctcttatactc

SEQ ID NO: 25893 - DNA, 50 bp, synthetic construct
  source 1..50: mol_type = other DNA
aaatcatatattctatatcaccaaaaccrtaactcacccctatacttacc

SEQ ID NO: 25894 - DNA, 50 bp, synthetic construct
  source 1..50: mol_type = other DNA
acaaacacaaaaataaatcacraccttaataacacaaaacacataacttc

SEQ ID NO: 25895 - DNA, 50 bp, synthetic construct
  source 1..50: mol_type = other DNA
ctaaaattcttaaacctaaaaaatcctaactaacttactccaaacctaac

SEQ ID NO: 25896 - DNA, 50 bp, synthetic construct
  source 1..50: mol_type = other DNA
aaatcctaactaacttactccaaacctaacraaaaatctatctcaatcac

SEQ ID NO: 25897 - DNA, 50 bp, synthetic construct
  source 1..50: mol_type = other DNA
tactaatttctaccatttatacttcatcctacactaaaaaaaatacrccc

SEQ ID NO: 25898 - DNA, 50 bp, synthetic construct
  source 1..50: mol_type = other DNA
crcctactaatttctaccatttatacttcatcctacactaaaaaaaatac

SEQ ID NO: 25899 - DNA, 50 bp, synthetic construct
  source 1..50: mol_type = other DNA
acctctcctaatataaaataaaacataaataacaaaaaccaacaaacrcc

SEQ ID NO: 25900 - DNA, 50 bp, synthetic construct
  source 1..50: mol_type = other DNA
aaataaaacataaataacaaaaaccaacaaacrccrcttctatatccacc

SEQ ID NO: 25901 - DNA, 50 bp, synthetic construct
  source 1..50: mol_type = other DNA
aataaatacaaaccraatatattaactcatacctataatcctaacacttc

SEQ ID NO: 25902 - DNA, 50 bp, synthetic construct
  source 1..50: mol_type = other DNA
aaacctccttttatattcatttttccttaattaaaaaataaatacaaacc

SEQ ID NO: 25903 - DNA, 50 bp, synthetic construct
  source 1..50: mol_type = other DNA
ctcataaaaataactcaacacttcatttcacaaaaaaaaccaaaaatatc

SEQ ID NO: 25904 - DNA, 50 bp, synthetic construct
  source 1..50: mol_type = other DNA
acacaatattcttccctttaaaaaatcaaatcraaccaaaatctccctac

SEQ ID NO: 25905 - DNA, 50 bp, synthetic construct
  source 1..50: mol_type = other DNA
aaaataaaaacactatttctaccaacccaaaatcttttataactaaaccc

SEQ ID NO: 25906 - DNA, 50 bp, synthetic construct
  source 1..50: mol_type = other DNA
aattacaacattaacaaaaattacrcaacttcrtaaaaaaaacrcaatcc

SEQ ID NO: 25907 - DNA, 50 bp, synthetic construct
  source 1..50: mol_type = other DNA
cacctctcctaaacrctacaactaataactatataataaccacraactac

SEQ ID NO: 25908 - DNA, 50 bp, synthetic construct
  source 1..50: mol_type = other DNA
aaaatttcrtcttaccaaaattacaacattaacaaaaattacrcaacttc

SEQ ID NO: 25909 - DNA, 50 bp, synthetic construct
  source 1..50: mol_type = other DNA
caacatacaaactacatcttaactcctataataacaaaacaaaaatttcc

SEQ ID NO: 25910 - DNA, 50 bp, synthetic construct
  source 1..50: mol_type = other DNA
aatctataattaactacaaaacaaacctccacttcaacctctaattaatc

SEQ ID NO: 25911 - DNA, 50 bp, synthetic construct
  source 1..50: mol_type = other DNA
atacattccacaaactaaaaataaacttcaaaaaacaactcaaaaatccc

SEQ ID NO: 25912 - DNA, 50 bp, synthetic construct
  source 1..50: mol_type = other DNA
aaatcrtatttcctaaaaaaacaattccaactaaacatcccactttatac

SEQ ID NO: 25913 - DNA, 50 bp, synthetic construct
  source 1..50: mol_type = other DNA
aacataataaaacctcctctctacaaaataaaaataaaccaaacataatc

SEQ ID NO: 25914 - DNA, 50 bp, synthetic construct
  source 1..50: mol_type = other DNA
aaaaatctcaccatattacccaacctaatctaaaactcctaaattcaaac

SEQ ID NO: 25915 - DNA, 50 bp, synthetic construct
  source 1..50: mol_type = other DNA
tattacccaacctaatctaaaactcctaaattcaaacratcctccatctc

SEQ ID NO: 25916 - DNA, 50 bp, synthetic construct
  source 1..50: mol_type = other DNA
rcaatctaaaaaccaccrtcacaaactacttacaacaacctaaaattatc

SEQ ID NO: 25917 - DNA, 50 bp, synthetic construct
  source 1..50: mol_type = other DNA
ctctaaattactataaacaacttataacrataacccccaaactacrtccc

SEQ ID NO: 25918 - DNA, 50 bp, synthetic construct
  source 1..50: mol_type = other DNA
aactaaaccaatataccctatacaaaacraaaaatacacccratcactcc

SEQ ID NO: 25919 - DNA, 50 bp, synthetic construct
  source 1..50: mol_type = other DNA
tactttcaaaactaaaccaatataccctatacaaaacraaaaatacaccc

SEQ ID NO: 25920 - DNA, 50 bp, synthetic construct
  source 1..50: mol_type = other DNA
acttccccttctctactttcaaaactaaaccaatataccctatacaaaac

SEQ ID NO: 25921 - DNA, 50 bp, synthetic construct
  source 1..50: mol_type = other DNA
aacaatatcttctcccaatcraattatactcactaaactttaaaattatc

SEQ ID NO: 25922 - DNA, 50 bp, synthetic construct
  source 1..50: mol_type = other DNA
caaatctatctaattcacaaaattccttacaacaatatcttctcccaatc

SEQ ID NO: 25923 - DNA, 50 bp, synthetic construct
  source 1..50: mol_type = other DNA
tctatttcaaaaccatccaattcaataattatactactcctccctaaatc

SEQ ID NO: 25924 - DNA, 50 bp, synthetic construct
  source 1..50: mol_type = other DNA
aataaacaattttcctccccaaaacaaactaatcccctataaatcaaccc

SEQ ID NO: 25925 - DNA, 50 bp, synthetic construct
  source 1..50: mol_type = other DNA
aatccaacaaacttaaatattaaacatacaaaaacaaaacaattaaccac

SEQ ID NO: 25926 - DNA, 50 bp, synthetic construct
  source 1..50: mol_type = other DNA
atatttaatattcaaacttactaaactttaacacccatttttaactaacc

SEQ ID NO: 25927 - DNA, 50 bp, synthetic construct
  source 1..50: mol_type = other DNA
aactattcataatactataactcaaaaaaatcaccttcaatattaccacc

SEQ ID NO: 25928 - DNA, 50 bp, synthetic construct
  source 1..50: mol_type = other DNA
ctatatcaaaaaaaatcccttaaacctaccaattaaaaaacttaaatatc

SEQ ID NO: 25929 - DNA, 50 bp, synthetic construct
  source 1..50: mol_type = other DNA
taatttaccaccaatctctatcacttataactactatttcctccctaaac

SEQ ID NO: 25930 - DNA, 50 bp, synthetic construct
  source 1..50: mol_type = other DNA
atatttttattccttacaattccctcctaaatattctctattctctcacc

SEQ ID NO: 25931 - DNA, 50 bp, synthetic construct
  source 1..50: mol_type = other DNA
caaaaatacccatttcctatttttctccccttaatatttaaaaatttcac

SEQ ID NO: 25932 - DNA, 50 bp, synthetic construct
  source 1..50: mol_type = other DNA
tctaattttatcattaaccatttaatacaaaaatatatccttaacaaaac

SEQ ID NO: 25933 - DNA, 50 bp, synthetic construct
  source 1..50: mol_type = other DNA
attaaccatttaatacaaaaatatatccttaacaaaacrcaataactcac

SEQ ID NO: 25934 - DNA, 50 bp, synthetic construct
  source 1..50: mol_type = other DNA
ctaaattcaaacaattctaccttaacctccraaacaactaaaattaaatc

SEQ ID NO: 25935 - DNA, 50 bp, synthetic construct
  source 1..50: mol_type = other DNA
aaaccaaataaaaaacrctaatacctccrctccttaaacattttaactcc

SEQ ID NO: 25936 - DNA, 50 bp, synthetic construct
  source 1..50: mol_type = other DNA
atttaatcataatatatatcrcattataccaaacaacacttctacatatc

SEQ ID NO: 25937 - DNA, 50 bp, synthetic construct
  source 1..50: mol_type = other DNA
taacacaaaaccacttcaacratatacaaaaatattatttaacacaatac

SEQ ID NO: 25938 - DNA, 50 bp, synthetic construct
  source 1..50: mol_type = other DNA
aatacaacctataaatattaaaaacaaattcctttactttttacaacrac

SEQ ID NO: 25939 - DNA, 50 bp, synthetic construct
  source 1..50: mol_type = other DNA
tatttaacacaatacratatatatcataatcaaatccaataaacaacrcc

SEQ ID NO: 25940 - DNA, 50 bp, synthetic construct
  source 1..50: mol_type = other DNA
actcatatccactcttaattataaaatattataaatccctaaaaaaaacc

SEQ ID NO: 25941 - DNA, 50 bp, synthetic construct
  source 1..50: mol_type = other DNA
aaaccrctaaaataaaacaaaacccaacaaattaatatcacatttttatc

SEQ ID NO: 25942 - DNA, 50 bp, synthetic construct
  source 1..50: mol_type = other DNA
caaaacccaacaaattaatatcacatttttatcrccaaccaaaaacaaac

SEQ ID NO: 25943 - DNA, 50 bp, synthetic construct
  source 1..50: mol_type = other DNA
aaaaatatttactttctaactaaaaatatcttaaactattttcaaatttc

SEQ ID NO: 25944 - DNA, 50 bp, synthetic construct
  source 1..50: mol_type = other DNA
tatttatcacaattaaacaaataacttttaatctactttattttattatc

SEQ ID NO: 25945 - DNA, 50 bp, synthetic construct
  source 1..50: mol_type = other DNA
ataacttactatttactacaaataaaatttatcaaacattacttaaaatc

SEQ ID NO: 25946 - DNA, 50 bp, synthetic construct
  source 1..50: mol_type = other DNA
tatataaaacaaaaacaaaaacaaattataacaacctctccaatcctacc

SEQ ID NO: 25947 - DNA, 50 bp, synthetic construct
  source 1..50: mol_type = other DNA
aaactaaatattcccraacattccctaaaaactaataaaatacaaaaaac

SEQ ID NO: 25948 - DNA, 50 bp, synthetic construct
  source 1..50: mol_type = other DNA
cataaactcaaatcacactaaaaacaaaattaccaaaataaaaaaatcac

SEQ ID NO: 25949 - DNA, 50 bp, synthetic construct
  source 1..50: mol_type = other DNA
aaaatcacrtacaataaaaaacaccctcctctcttacctaattctcaaac

SEQ ID NO: 25950 - DNA, 50 bp, synthetic construct
  source 1..50: mol_type = other DNA
tctaaaacttaccaactaacataaaaactctaaccatacaatctactaac

SEQ ID NO: 25951 - DNA, 50 bp, synthetic construct
  source 1..50: mol_type = other DNA
acataatcaaaacttccatactaactaacaaactttaaacaacctacccc

SEQ ID NO: 25952 - DNA, 50 bp, synthetic construct
  source 1..50: mol_type = other DNA
cttccatactaactaacaaactttaaacaacctaccccrataatacaatc

SEQ ID NO: 25953 - DNA, 50 bp, synthetic construct
  source 1..50: mol_type = other DNA
actaactaacaaactttaaacaacctaccccrataatacaatcratcaac

SEQ ID NO: 25954 - DNA, 50 bp, synthetic construct
  source 1..50: mol_type = other DNA
cccatcataactaaactaaaaaactacaacaaaaaacactaaataaacac

SEQ ID NO: 25955 - DNA, 50 bp, synthetic construct
  source 1..50: mol_type = other DNA
tactacaaaaccacctccctattttacataaaactaaataccttttacac

SEQ ID NO: 25956 - DNA, 50 bp, synthetic construct
  source 1..50: mol_type = other DNA
ttacctaaaactcrctaaaactaaaacaaacttctaaaaatattcttccc

SEQ ID NO: 25957 - DNA, 50 bp, synthetic construct
  source 1..50: mol_type = other DNA
aaaataatatcttcccctttctctaaacaactaaacattacctaaaactc

SEQ ID NO: 25958 - DNA, 50 bp, synthetic construct
  source 1..50: mol_type = other DNA
tccactcactaaaacatctcatctctttatacctaattaacctatattcc

SEQ ID NO: 25959 - DNA, 50 bp, synthetic construct
  source 1..50: mol_type = other DNA
caaactttccattttaccactatccttaaaatcaataaaaacttaaaaac

SEQ ID NO: 25960 - DNA, 50 bp, synthetic construct
  source 1..50: mol_type = other DNA
aaacatcttcaaatatacaaatttcaaactttcatcraaaaatccaacac

SEQ ID NO: 25961 - DNA, 50 bp, synthetic construct
  source 1..50: mol_type = other DNA
ttacatcataacraaaacatcttcaaatatacaaatttcaaactttcatc

SEQ ID NO: 25962 - DNA, 50 bp, synthetic construct
  source 1..50: mol_type = other DNA
acccaaaaataattctaaatactttatttatataatctcatttaattcac

SEQ ID NO: 25963 - DNA, 50 bp, synthetic construct
  source 1..50: mol_type = other DNA
aaaaaaataaactttaatccattctaaaacrtctaaccctaaaacctttc

SEQ ID NO: 25964 - DNA, 50 bp, synthetic construct
  source 1..50: mol_type = other DNA
taatccccaacactttaaaacaaaaaactaactaacaatcaatcccatcc

SEQ ID NO: 25965 - DNA, 50 bp, synthetic construct
  source 1..50: mol_type = other DNA
actccacctaacccacatatatataaattaactataacctaattataaac

SEQ ID NO: 25966 - DNA, 50 bp, synthetic construct
  source 1..50: mol_type = other DNA
tcaaacttttcatttcctttaccataaaattatcccctcatatatccttc

SEQ ID NO: 25967 - DNA, 50 bp, synthetic construct
  source 1..50: mol_type = other DNA
aactaaaaataaacaacctacttactcacaacaactaaaaattttatttc

SEQ ID NO: 25968 - DNA, 50 bp, synthetic construct
  source 1..50: mol_type = other DNA
tctccttttccaacccaaaaaataaacatataactaatactaatataacc

SEQ ID NO: 25969 - DNA, 50 bp, synthetic construct
  source 1..50: mol_type = other DNA
aaccacttattctaaaaacattaatcaccaccttctatattttaaacacc

SEQ ID NO: 25970 - DNA, 50 bp, synthetic construct
  source 1..50: mol_type = other DNA
ttaataacctttacctacctcttattcrtattaccaacaaaaaaacaacc

SEQ ID NO: 25971 - DNA, 50 bp, synthetic construct
  source 1..50: mol_type = other DNA
tattcrtattaccaacaaaaaaacaaccrcaaaattttaatacaattacc

SEQ ID NO: 25972 - DNA, 50 bp, synthetic construct
  source 1..50: mol_type = other DNA
aaattttaatacaattaccrtaacaaaattcttaaaataacccaattacc

SEQ ID NO: 25973 - DNA, 50 bp, synthetic construct
  source 1..50: mol_type = other DNA
aacaattatatttaaaactttcattccaaacatctaccacaaaaaactac

SEQ ID NO: 25974 - DNA, 50 bp, synthetic construct
  source 1..50: mol_type = other DNA
aaaaaaaaaaacccacaactttaaaaatcaaaatatacaacatccaaatc

SEQ ID NO: 25975 - DNA, 50 bp, synthetic construct
  source 1..50: mol_type = other DNA
aaaactaacaataataatttcctaccacatattatcataattacaaaatc

SEQ ID NO: 25976 - DNA, 50 bp, synthetic construct
  source 1..50: mol_type = other DNA
cacttaccaatacactttaccaaaaacaaatctttctaaataaatactac

SEQ ID NO: 25977 - DNA, 50 bp, synthetic construct
  source 1..50: mol_type = other DNA
ctttaattcrattactaacatttcaccrtttcctatatcaacaacataac

SEQ ID NO: 25978 - DNA, 50 bp, synthetic construct
  source 1..50: mol_type = other DNA
ataatacrcattatataatttaattccttaaataaacacacttactttac

SEQ ID NO: 25979 - DNA, 50 bp, synthetic construct
  source 1..50: mol_type = other DNA
aataatattcacatcacacacataaaactatatttacttattctaaaatc

SEQ ID NO: 25980 - DNA, 50 bp, synthetic construct
  source 1..50: mol_type = other DNA
aactccctttacataaatttacttcttcaaatatacctactcaaacaatc

SEQ ID NO: 25981 - DNA, 50 bp, synthetic construct
  source 1..50: mol_type = other DNA
atacacacaacatttcctaataaaattctaattactatataaataacaac

SEQ ID NO: 25982 - DNA, 50 bp, synthetic construct
  source 1..50: mol_type = other DNA
taaaatctctactacattctaacaatactaattcctctctccttcaattc

SEQ ID NO: 25983 - DNA, 50 bp, synthetic construct
  source 1..50: mol_type = other DNA
aaacttaaaaaataatttaactacaattaatcatcatctttaaccttaac

SEQ ID NO: 25984 - DNA, 50 bp, synthetic construct
  source 1..50: mol_type = other DNA
aactcaaatcaacatcaataaataacttccttccttaaaaaaaatacctc

SEQ ID NO: 25985 - DNA, 50 bp, synthetic construct
  source 1..50: mol_type = other DNA
catttataactcaaattatatctttactaaccaacactactctaaatccc

SEQ ID NO: 25986 - DNA, 50 bp, synthetic construct
  source 1..50: mol_type = other DNA
acaaaacctaaccaatataaccaaatccctacatataaaatctaacttcc

SEQ ID NO: 25987 - DNA, 50 bp, synthetic construct
  source 1..50: mol_type = other DNA
attaacataaatcaatctttcaaaaaaatatccccaaaatactaacaaac

SEQ ID NO: 25988 - DNA, 50 bp, synthetic construct
  source 1..50: mol_type = other DNA
ctaattatataaacttaaaatacrtctaatctctctaataataactcctc

SEQ ID NO: 25989 - DNA, 50 bp, synthetic construct
  source 1..50: mol_type = other DNA
aacaaaaataatttctctttctaaaataaattctaaaaacaaaataatac

SEQ ID NO: 25990 - DNA, 50 bp, synthetic construct
  source 1..50: mol_type = other DNA
crttaaccacrtaattaacttttcaaaaaaatacaattctaattttacac

SEQ ID NO: 25991 - DNA, 50 bp, synthetic construct
  source 1..50: mol_type = other DNA
caaaataaacrtacaaaatcaaaattatatccttctaaaaaattaatcac

SEQ ID NO: 25992 - DNA, 50 bp, synthetic construct
  source 1..50: mol_type = other DNA
crtacaaaatcaaaattatatccttctaaaaaattaatcacrtaactaac

SEQ ID NO: 25993 - DNA, 50 bp, synthetic construct
  source 1..50: mol_type = other DNA
caaaaaactcaaattcaaaacctaattaacttataaaatcaccaattttc

SEQ ID NO: 25994 - DNA, 50 bp, synthetic construct
  source 1..50: mol_type = other DNA
ttactcctccrtcttcttaatcttacccaatctttttaaatacaaatcac

SEQ ID NO: 25995 - DNA, 50 bp, synthetic construct
  source 1..50: mol_type = other DNA
aaatcaacttacaatatctaaaaacatctaaaacccaactctttatctac

SEQ ID NO: 25996 - DNA, 50 bp, synthetic construct
  source 1..50: mol_type = other DNA
ttaaatatccttaaatattacaaattaacttcacacaaaatttcaccaac

SEQ ID NO: 25997 - DNA, 50 bp, synthetic construct
  source 1..50: mol_type = other DNA
ttcccttatctatccctaccractattcttttatttaaaaaaattcaacc

SEQ ID NO: 25998 - DNA, 50 bp, synthetic construct
  source 1..50: mol_type = other DNA
caaccatataaataaaaaaacctacacaaataacttacccaaacataccc

SEQ ID NO: 25999 - DNA, 50 bp, synthetic construct
  source 1..50: mol_type = other DNA
ataacaatttctcattataaaatatcatccaaaattctttatctcaaaac

SEQ ID NO: 26000 - DNA, 50 bp, synthetic construct
  source 1..50: mol_type = other DNA
cccaaaacatttttcaaaaaacrataacaattatttaacatctcaacaac

SEQ ID NO: 26001 - DNA, 50 bp, synthetic construct
  source 1..50: mol_type = other DNA
ccaactaatatcactacctcacrctactaaaatattaaacaattaccacc

SEQ ID NO: 26002 - DNA, 50 bp, synthetic construct
  source 1..50: mol_type = other DNA
ctcattcataatatttatctttatttaaactaactcactactaactcaac

SEQ ID NO: 26003 - DNA, 50 bp, synthetic construct
  source 1..50: mol_type = other DNA
aacttaaaaccattctactatctttaataattataaaactattaattttc

SEQ ID NO: 26004 - DNA, 50 bp, synthetic construct
  source 1..50: mol_type = other DNA
aatttttttaacttacctcattctcraaaccctattcccaactctataac

SEQ ID NO: 26005 - DNA, 50 bp, synthetic construct
  source 1..50: mol_type = other DNA
aaatttttaataatatttcctaaataataaacacaaaatttcctacatcc

SEQ ID NO: 26006 - DNA, 50 bp, synthetic construct
  source 1..50: mol_type = other DNA
cctaaaaaccacaaaaataaattttcatttcaaataaatttctatttaac

SEQ ID NO: 26007 - DNA, 50 bp, synthetic construct
  source 1..50: mol_type = other DNA
acttactaatttatctattccaatttttataatctaacccctactttccc

SEQ ID NO: 26008 - DNA, 50 bp, synthetic construct
  source 1..50: mol_type = other DNA
attaaccaataaccataaaaaacatctcttcctaaaaataacctaaactc

SEQ ID NO: 26009 - DNA, 50 bp, synthetic construct
  source 1..50: mol_type = other DNA
ctaaacaataaataaatacttacttccttccaactatactatcctttaac

SEQ ID NO: 26010 - DNA, 50 bp, synthetic construct
  source 1..50: mol_type = other DNA
ccactactcaatcactaaaacaacaaactccttaaaatactttaaactac

SEQ ID NO: 26011 - DNA, 50 bp, synthetic construct
  source 1..50: mol_type = other DNA
tactttaaactacraaataacaaaactaacccttcccaattttatacacc

SEQ ID NO: 26012 - DNA, 50 bp, synthetic construct
  source 1..50: mol_type = other DNA
taattaactccataaactttaaaatcactcataaccacctcaaaaactcc

SEQ ID NO: 26013 - DNA, 50 bp, synthetic construct
  source 1..50: mol_type = other DNA
cattactttcaaataacatcraatcctcaattttccacacctccattacc

SEQ ID NO: 26014 - DNA, 50 bp, synthetic construct
  source 1..50: mol_type = other DNA
attttcctcctaaaaacctctatacaaaaaaaataaacttaaaattactc

SEQ ID NO: 26015 - DNA, 50 bp, synthetic construct
  source 1..50: mol_type = other DNA
aaaataaaaatttttttctttacatttttattaattccaactaacaacac

SEQ ID NO: 26016 - DNA, 50 bp, synthetic construct
  source 1..50: mol_type = other DNA
aaataaatatcraattctaactaaaaacctacccacaaatacaactatac

SEQ ID NO: 26017 - DNA, 50 bp, synthetic construct
  source 1..50: mol_type = other DNA
ttataacacaacactaaaacttacctaaaaattacaatctctataatctc

SEQ ID NO: 26018 - DNA, 50 bp, synthetic construct
  source 1..50: mol_type = other DNA
caacctttcaaatttatttaaaaccccaaaatactttaacccaaaataac

SEQ ID NO: 26019 - DNA, 50 bp, synthetic construct
  source 1..50: mol_type = other DNA
tttaacacctatctccatacaaaaacaacttcataaaaaccaaaaattac

SEQ ID NO: 26020 - DNA, 50 bp, synthetic construct
  source 1..50: mol_type = other DNA
aaaataactaaataaaaacctctactaatcatcctccccacaaaaacacc

SEQ ID NO: 26021 - DNA, 50 bp, synthetic construct
  source 1..50: mol_type = other DNA
tattaaccaaccatcattcaaacctcatctttttatactcaattttcccc

SEQ ID NO: 26022 - DNA, 50 bp, synthetic construct
  source 1..50: mol_type = other DNA
ttaataaacataacrtctacaataaaatcttcaattaacctcttacattc

SEQ ID NO: 26023 - DNA, 50 bp, synthetic construct
  source 1..50: mol_type = other DNA
aaattaaacaatctttcctaaaacctttctattcttcccactcctaatac

SEQ ID NO: 26024 - DNA, 50 bp, synthetic construct
  source 1..50: mol_type = other DNA
cacctacataaacctctcaaaacrctaaaatttcaaacttaaaccaccrc

SEQ ID NO: 26025 - DNA, 50 bp, synthetic construct
  source 1..50: mol_type = other DNA
tccacctacataaacctctcaaaacrctaaaatttcaaacttaaaccacc

SEQ ID NO: 26026 - DNA, 50 bp, synthetic construct
  source 1..50: mol_type = other DNA
ctaatcttaaactaaactcaaacaatccacctacataaacctctcaaaac

SEQ ID NO: 26027 - DNA, 50 bp, synthetic construct
  source 1..50: mol_type = other DNA
ctaaacataaacccaaaaaacacattccctcccaattcctacaaaatccc

SEQ ID NO: 26028 - DNA, 50 bp, synthetic construct
  source 1..50: mol_type = other DNA
accttcctacctcttactaaaaaatatttaacaatcaaatctttaaaacc

SEQ ID NO: 26029 - DNA, 50 bp, synthetic construct
  source 1..50: mol_type = other DNA
ttactaattactaccactccaaaaaaaatatatattaatatttattacac

SEQ ID NO: 26030 - DNA, 50 bp, synthetic construct
  source 1..50: mol_type = other DNA
accaatatacacccttcctaaaataacaataattaacaacatcaccattc

SEQ ID NO: 26031 - DNA, 50 bp, synthetic construct
  source 1..50: mol_type = other DNA
tataaaactctcccttactatcaactaataaacctacaaaaacraatatc

SEQ ID NO: 26032 - DNA, 50 bp, synthetic construct
  source 1..50: mol_type = other DNA
tctccacctttatctaatttcctacctctatcttatatctccatcttttc

SEQ ID NO: 26033 - DNA, 50 bp, synthetic construct
  source 1..50: mol_type = other DNA
aacttaaaacaaaaacaaaaacctaaataaaatataacctaataaaaacc

SEQ ID NO: 26034 - DNA, 50 bp, synthetic construct
  source 1..50: mol_type = other DNA
tatctctactactacctcactcttactataaatactactacttcccaaac

SEQ ID NO: 26035 - DNA, 50 bp, synthetic construct
  source 1..50: mol_type = other DNA
catattacataatataatcctaaatatacccraaaacrctctaataaaac

SEQ ID NO: 26036 - DNA, 50 bp, synthetic construct
  source 1..50: mol_type = other DNA
cacaaaaaatacaaaaccaattctacttacttaaaaaaccttctatccrc

SEQ ID NO: 26037 - DNA, 50 bp, synthetic construct
  source 1..50: mol_type = other DNA
aaactttccaaataaacaaaactaactctacatttcctatataaacaaac

SEQ ID NO: 26038 - DNA, 50 bp, synthetic construct
  source 1..50: mol_type = other DNA
tctacatttcctatataaacaaacraaaacttataatccctctacccttc

SEQ ID NO: 26039 - DNA, 50 bp, synthetic construct
  source 1..50: mol_type = other DNA
tataaacaaacraaaacttataatccctctacccttcraactatacaacc

SEQ ID NO: 26040 - DNA, 50 bp, synthetic construct
  source 1..50: mol_type = other DNA
tttaacaaatcaaaccrcccatctaaaaccctaaacttacccaaaaatac

SEQ ID NO: 26041 - DNA, 50 bp, synthetic construct
  source 1..50: mol_type = other DNA
aatcctcaaccctaaaataaaaacacaacaactctttaacaaatcaaacc

SEQ ID NO: 26042 - DNA, 50 bp, synthetic construct
  source 1..50: mol_type = other DNA
atctaaactaaacctctaaaaaaaacrcracaaactatacaaccaatacc

SEQ ID NO: 26043 - DNA, 50 bp, synthetic construct
  source 1..50: mol_type = other DNA
caaactcrtaataacactacaaccatacracactaactatacaacctacc

SEQ ID NO: 26044 - DNA, 50 bp, synthetic construct
  source 1..50: mol_type = other DNA
aatctcattctctaaaaaaataacatctaaactaaacctctaaaaaaaac

SEQ ID NO: 26045 - DNA, 50 bp, synthetic construct
  source 1..50: mol_type = other DNA
cactccccctccaaccaacctaataaaaattacctattcctttttacttc

SEQ ID NO: 26046 - DNA, 50 bp, synthetic construct
  source 1..50: mol_type = other DNA
acaaactctaccaaaacccaactatatcaacaataccaacaaaaaacccc

SEQ ID NO: 26047 - DNA, 50 bp, synthetic construct
  source 1..50: mol_type = other DNA
actacacctcaaactacacataaaaaactcctaatctcacatttaactac

SEQ ID NO: 26048 - DNA, 50 bp, synthetic construct
  source 1..50: mol_type = other DNA
ttaaaaactccccatatataatctaaaatacaaccacctccacatactac

SEQ ID NO: 26049 - DNA, 50 bp, synthetic construct
  source 1..50: mol_type = other DNA
tccccatatataatctaaaatacaaccacctccacatactacraaaaacc

SEQ ID NO: 26050 - DNA, 50 bp, synthetic construct
  source 1..50: mol_type = other DNA
actaataccaaatcaaaaatcaaactaaataaaacaatacaaaacrccac

SEQ ID NO: 26051 - DNA, 50 bp, synthetic construct
  source 1..50: mol_type = other DNA
ctacraaaaaccracctatcaattcaaccacaataacaaataaacrtaac

SEQ ID NO: 26052 - DNA, 50 bp, synthetic construct
  source 1..50: mol_type = other DNA
ctcacatcactttcattttccccacaaaatatatccacataatattacac

SEQ ID NO: 26053 - DNA, 50 bp, synthetic construct
  source 1..50: mol_type = other DNA
taattaatattaatatcattattcaaattacrctctatataataactcac

SEQ ID NO: 26054 - DNA, 50 bp, synthetic construct
  source 1..50: mol_type = other DNA
aaacaaataacttaaacccraaaattcaaaacctacctaaaaaacataac

SEQ ID NO: 26055 - DNA, 50 bp, synthetic construct
  source 1..50: mol_type = other DNA
ctctaaaactctaaacaaactacttcatctttctaatcctcaatttcccc

SEQ ID NO: 26056 - DNA, 50 bp, synthetic construct
  source 1..50: mol_type = other DNA
acactaaaaaaacaataaaaatttaaatcaacctaaataaatctaatccc

SEQ ID NO: 26057 - DNA, 50 bp, synthetic construct
  source 1..50: mol_type = other DNA
taaaaccctttttacataactaactaacattccctaactaaaccttcttc

SEQ ID NO: 26058 - DNA, 50 bp, synthetic construct
  source 1..50: mol_type = other DNA
cataaaccccaatattaaaaacctcactattttatttaactctaaaaacc

SEQ ID NO: 26059 - DNA, 50 bp, synthetic construct
  source 1..50: mol_type = other DNA
ccccaatattaaaaacctcactattttatttaactctaaaaaccrcctac

SEQ ID NO: 26060 - DNA, 50 bp, synthetic construct
  source 1..50: mol_type = other DNA
acrtcaaatcacttaaaaacaaatacrattaacttaaaatcactccatac

SEQ ID NO: 26061 - DNA, 50 bp, synthetic construct
  source 1..50: mol_type = other DNA
aaaacraaaaaactaactctacaaaccaaaacaatactaaatcaaaaaac

SEQ ID NO: 26062 - DNA, 50 bp, synthetic construct
  source 1..50: mol_type = other DNA
aacctacaattcataaaaatatttaaaaccaccacttcaaaaaatattcc

SEQ ID NO: 26063 - DNA, 50 bp, synthetic construct
  source 1..50: mol_type = other DNA
raaaaaaaattaatatatcctatcactaatatcaaataactcacacaaac

SEQ ID NO: 26064 - DNA, 50 bp, synthetic construct
  source 1..50: mol_type = other DNA
tccrtctataactctaattaaaattttataacaacaacactaccaattcc

SEQ ID NO: 26065 - DNA, 50 bp, synthetic construct
  source 1..50: mol_type = other DNA
aattaaaattttataacaacaacactaccaattccrttaccctatcattc

SEQ ID NO: 26066 - DNA, 50 bp, synthetic construct
  source 1..50: mol_type = other DNA
ctaaattaaaacccccaaattatcccactaatcacaaatcttttaacaac

SEQ ID NO: 26067 - DNA, 50 bp, synthetic construct
  source 1..50: mol_type = other DNA
attaaaacccccaaattatcccactaatcacaaatcttttaacaacraac

SEQ ID NO: 26068 - DNA, 50 bp, synthetic construct
  source 1..50: mol_type = other DNA
actaacttctacatttcttaatacaaaattttaccaaacccttaacattc

SEQ ID NO: 26069 - DNA, 50 bp, synthetic construct
  source 1..50: mol_type = other DNA
aaaaatcctatctatcaaaactcataccaatactatcctctatttaactc

SEQ ID NO: 26070 - DNA, 50 bp, synthetic construct
  source 1..50: mol_type = other DNA
aacaaaaaaacaaatctatcaatactaaacctaccaattactcaaaaaac

SEQ ID NO: 26071 - DNA, 50 bp, synthetic construct
  source 1..50: mol_type = other DNA
aaatacatttcttttaaattttaccataaaaataacaccctaacctcctc

SEQ ID NO: 26072 - DNA, 50 bp, synthetic construct
  source 1..50: mol_type = other DNA
acaatatcaaaatactactcttctaaacctacttcaaaccatttaaccac

SEQ ID NO: 26073 - DNA, 50 bp, synthetic construct
  source 1..50: mol_type = other DNA
atttatttttccaaacctcaaatcattacatcaaccrataatttctaaac

SEQ ID NO: 26074 - DNA, 50 bp, synthetic construct
  source 1..50: mol_type = other DNA
catatacraaattccaaataaccataaaatatttacttacracractacc

SEQ ID NO: 26075 - DNA, 50 bp, synthetic construct
  source 1..50: mol_type = other DNA
atcacrtcatatacraaattccaaataaccataaaatatttacttacrac

SEQ ID NO: 26076 - DNA, 50 bp, synthetic construct
  source 1..50: mol_type = other DNA
ccaatcacrtcatatacraaattccaaataaccataaaatatttacttac

SEQ ID NO: 26077 - DNA, 50 bp, synthetic construct
  source 1..50: mol_type = other DNA
ctactaacrttaataaattactcattcttcctcccaatcacrtcatatac

SEQ ID NO: 26078 - DNA, 50 bp, synthetic construct
  source 1..50: mol_type = other DNA
catcctcractactaacrttaataaattactcattcttcctcccaatcac

SEQ ID NO: 26079 - DNA, 50 bp, synthetic construct
  source 1..50: mol_type = other DNA
tataaatattttaaatacacacaaacccaaacccatcctcractactaac

SEQ ID NO: 26080 - DNA, 50 bp, synthetic construct
  source 1..50: mol_type = other DNA
aaaattaaaacatcaaccccaaccttaaataaaccacattccataaacac

SEQ ID NO: 26081 - DNA, 50 bp, synthetic construct
  source 1..50: mol_type = other DNA
aaccttaaataaaccacattccataaacacrtaaacaaaatataataaac

SEQ ID NO: 26082 - DNA, 50 bp, synthetic construct
  source 1..50: mol_type = other DNA
taaaaacacaactaattaaaaatatcaaatcctacacaaacaaataacac

SEQ ID NO: 26083 - DNA, 50 bp, synthetic construct
  source 1..50: mol_type = other DNA
tataaacacatcctaaacaaccaaaacaatataatataataaaaaacaac

SEQ ID NO: 26084 - DNA, 50 bp, synthetic construct
  source 1..50: mol_type = other DNA
atataataaattaaccrtatttcttacaacatatatacaataacaaacac

SEQ ID NO: 26085 - DNA, 50 bp, synthetic construct
  source 1..50: mol_type = other DNA
atcacaaaacctaaaatattttctttttatataaatcataattctcaacc

SEQ ID NO: 26086 - DNA, 50 bp, synthetic construct
  source 1..50: mol_type = other DNA
aatctatcttaatacaacaacacaaaccaacraaaaaacaatatcatttc

SEQ ID NO: 26087 - DNA, 50 bp, synthetic construct
  source 1..50: mol_type = other DNA
tacatactaaacttaataaaattaaaaataccataccttaaaaataatcc

SEQ ID NO: 26088 - DNA, 50 bp, synthetic construct
  source 1..50: mol_type = other DNA
taatacracaataaaaactataacatcaacrtaaatatacaaaaaacccc

SEQ ID NO: 26089 - DNA, 50 bp, synthetic construct
  source 1..50: mol_type = other DNA
tatatataacaacrcctctataatacracaataaaaactataacatcaac

SEQ ID NO: 26090 - DNA, 50 bp, synthetic construct
  source 1..50: mol_type = other DNA
tctctcraaacctcttatatacctacrttaataccacaattcctattacc

SEQ ID NO: 26091 - DNA, 50 bp, synthetic construct
  source 1..50: mol_type = other DNA
acaatttacatctatatcttatacaataaaaaactaatttacacaactcc

SEQ ID NO: 26092 - DNA, 50 bp, synthetic construct
  source 1..50: mol_type = other DNA
ttactcaactttacaatacaaacatcttatttctcatctttaaacatatc

SEQ ID NO: 26093 - DNA, 50 bp, synthetic construct
  source 1..50: mol_type = other DNA
cttccattaatataaatctaaaacaatttataataaacaaaaatctatcc

SEQ ID NO: 26094 - DNA, 50 bp, synthetic construct
  source 1..50: mol_type = other DNA
tccattaatataaatctaaaacaatttataataaacaaaaatctatccrc

SEQ ID NO: 26095 - DNA, 50 bp, synthetic construct
  source 1..50: mol_type = other DNA
ttaatacacrctatcatcataaacatcataatcaattataaaaaacacrc

SEQ ID NO: 26096 - DNA, 50 bp, synthetic construct
  source 1..50: mol_type = other DNA
cataaattcrcrtatttttcacaactaattataatatccataataacaac

SEQ ID NO: 26097 - DNA, 50 bp, synthetic construct
  source 1..50: mol_type = other DNA
rtatttttcacaactaattataatatccataataacaacrtacactaaac

SEQ ID NO: 26098 - DNA, 50 bp, synthetic construct
  source 1..50: mol_type = other DNA
aacattctaaaattataccaacraacaccrtaaacractacaatacaaac

SEQ ID NO: 26099 - DNA, 50 bp, synthetic construct
  source 1..50: mol_type = other DNA
caaccctttacctaacattttaaccaacaaaacccrcttacattacaatc

SEQ ID NO: 26100 - DNA, 50 bp, synthetic construct
  source 1..50: mol_type = other DNA
aaaaaaaatactaaaatataaactcaaatctacccaaacctcattcccac

SEQ ID NO: 26101 - DNA, 50 bp, synthetic construct
  source 1..50: mol_type = other DNA
taaaacatcaattcaaattctaaaaacctccaacaaaattcatccacacc

SEQ ID NO: 26102 - DNA, 50 bp, synthetic construct
  source 1..50: mol_type = other DNA
aaaatctaaactaatactccaactattattactcccaaatatataactac

SEQ ID NO: 26103 - DNA, 50 bp, synthetic construct
  source 1..50: mol_type = other DNA
aaaataaactaaaatccccaattcttactaaaaaacctacatttacattc

SEQ ID NO: 26104 - DNA, 50 bp, synthetic construct
  source 1..50: mol_type = other DNA
ctacacataaaaactcttaactctaaaactaaaaaattacatactaaacc

SEQ ID NO: 26105 - DNA, 50 bp, synthetic construct
  source 1..50: mol_type = other DNA
tccattcttccctaactcactacaaataacaaaaaacaaaaccaataacc

SEQ ID NO: 26106 - DNA, 50 bp, synthetic construct
  source 1..50: mol_type = other DNA
cccaatttcctaacactaccctataactaaccttataaaatacatatatc

SEQ ID NO: 26107 - DNA, 50 bp, synthetic construct
  source 1..50: mol_type = other DNA
ccattcaaacaaaaactaccaaatactaaaatatactttaaacattttac

SEQ ID NO: 26108 - DNA, 50 bp, synthetic construct
  source 1..50: mol_type = other DNA
aaacracaccaaaaaccctaacaatctacaaaaaaatctatcccctatcc

SEQ ID NO: 26109 - DNA, 50 bp, synthetic construct
  source 1..50: mol_type = other DNA
taacaatctacaaaaaaatctatcccctatccrtaaaaacctaaaatccc

SEQ ID NO: 26110 - DNA, 50 bp, synthetic construct
  source 1..50: mol_type = other DNA
ctaataaaaaactaaataatctaaacaaaaacccrtccaacaatctcaac

SEQ ID NO: 26111 - DNA, 50 bp, synthetic construct
  source 1..50: mol_type = other DNA
ctctatccaaaccactcaacctttcaccaaaaactttcaatttcaataac

SEQ ID NO: 26112 - DNA, 50 bp, synthetic construct
  source 1..50: mol_type = other DNA
aaaaaaaattaactaaactcccaaaataataaaccraacttataattacc

SEQ ID NO: 26113 - DNA, 50 bp, synthetic construct
  source 1..50: mol_type = other DNA
aaaacctaaaaaaatatacraactacatcattctttctttcaacaaactc

SEQ ID NO: 26114 - DNA, 50 bp, synthetic construct
  source 1..50: mol_type = other DNA
ttaaatatcaattcacaacctaatcccatcaacrcacacaactacaacac

SEQ ID NO: 26115 - DNA, 50 bp, synthetic construct
  source 1..50: mol_type = other DNA
accatcraactattattaaaatccaatttcaaactccttcraaaaaaacc

SEQ ID NO: 26116 - DNA, 50 bp, synthetic construct
  source 1..50: mol_type = other DNA
acaatactaaccaaaaaaaaccataactttaatactcrctcaacraatac

SEQ ID NO: 26117 - DNA, 50 bp, synthetic construct
  source 1..50: mol_type = other DNA
ttattaacaatactaaccaaaaaaaaccataactttaatactcrctcaac

SEQ ID NO: 26118 - DNA, 50 bp, synthetic construct
  source 1..50: mol_type = other DNA
aacactaaaaccataattccctctaattaacactaccaacaactaaaccc

SEQ ID NO: 26119 - DNA, 50 bp, synthetic construct
  source 1..50: mol_type = other DNA
accataattccctctaattaacactaccaacaactaaacccraaaaaacc

SEQ ID NO: 26120 - DNA, 50 bp, synthetic construct
  source 1..50: mol_type = other DNA
ataattccctctaattaacactaccaacaactaaacccraaaaaaccrac

SEQ ID NO: 26121 - DNA, 50 bp, synthetic construct
  source 1..50: mol_type = other DNA
ttcctcatctcatataatttaaataaaactatcaatcccaacacctcctc

SEQ ID NO: 26122 - DNA, 50 bp, synthetic construct
  source 1..50: mol_type = other DNA
actattataataaacacctattatttttatctaccctacacccrctttcc

SEQ ID NO: 26123 - DNA, 50 bp, synthetic construct
  source 1..50: mol_type = other DNA
aacaaatactattataataaacacctattatttttatctaccctacaccc

SEQ ID NO: 26124 - DNA, 50 bp, synthetic construct
  source 1..50: mol_type = other DNA
aaaaacccctacatttttattttatattaaaccccacaaattatataacc

SEQ ID NO: 26125 - DNA, 50 bp, synthetic construct
  source 1..50: mol_type = other DNA
taaaaacacactaaatatctccacccaaaaaacctctatcacacaaaatc

SEQ ID NO: 26126 - DNA, 50 bp, synthetic construct
  source 1..50: mol_type = other DNA
acccacrtttactaaataccaaatatactttatataactaataaaaattc

SEQ ID NO: 26127 - DNA, 50 bp, synthetic construct
  source 1..50: mol_type = other DNA
cttaacactcaataaacrtaaataataataataaactacaccttacttcc

SEQ ID NO: 26128 - DNA, 50 bp, synthetic construct
  source 1..50: mol_type = other DNA
aaaaaatcattctaactatctcaaaccccacaatacacattatctcatcc

SEQ ID NO: 26129 - DNA, 50 bp, synthetic construct
  source 1..50: mol_type = other DNA
ctaaaaaccracaaaaccaaactaacatactaaacataaccaaacatatc

SEQ ID NO: 26130 - DNA, 50 bp, synthetic construct
  source 1..50: mol_type = other DNA
aaacctaacattataacrctataaacctatcataaataaacattcttccc

SEQ ID NO: 26131 - DNA, 50 bp, synthetic construct
  source 1..50: mol_type = other DNA
acataaacctacctaccraaaaaaatactcattcataacaaatccataac

SEQ ID NO: 26132 - DNA, 50 bp, synthetic construct
  source 1..50: mol_type = other DNA
aaaacaaataaaaaacccataaaaactaatacacttctaaaaatcctttc

SEQ ID NO: 26133 - DNA, 50 bp, synthetic construct
  source 1..50: mol_type = other DNA
aaataccccraaaaaccaaaacccctttttctacataaaaacctaaaccc

SEQ ID NO: 26134 - DNA, 50 bp, synthetic construct
  source 1..50: mol_type = other DNA
aattactttattacttaaccrcccttctactcatttaacaaaccctaaac

SEQ ID NO: 26135 - DNA, 50 bp, synthetic construct
  source 1..50: mol_type = other DNA
cttctactcatttaacaaaccctaaacrcacatttacaaaacttccttcc

SEQ ID NO: 26136 - DNA, 50 bp, synthetic construct
  source 1..50: mol_type = other DNA
ataaatataaccatactaataacacatccaaccaaccactaacaacaacc

SEQ ID NO: 26137 - DNA, 50 bp, synthetic construct
  source 1..50: mol_type = other DNA
ccatacccacaaattaaaataaatcaacaacctaaaaacccaaaaactac

SEQ ID NO: 26138 - DNA, 50 bp, synthetic construct
  source 1..50: mol_type = other DNA
ctaaacctaataactaccttataaacccccttaaaactcaaaaaatttcc

SEQ ID NO: 26139 - DNA, 50 bp, synthetic construct
  source 1..50: mol_type = other DNA
aaaaaccaaaaaaactactaaacatcttacaatacacaaaataacccacc

SEQ ID NO: 26140 - DNA, 50 bp, synthetic construct
  source 1..50: mol_type = other DNA
ctaaacatcttacaatacacaaaataacccaccrccacaaaaaattatcc

SEQ ID NO: 26141 - DNA, 50 bp, synthetic construct
  source 1..50: mol_type = other DNA
ccacaattaaaaaaatatattctaaccctctaaaactaaccttataaaac

SEQ ID NO: 26142 - DNA, 50 bp, synthetic construct
  source 1..50: mol_type = other DNA
aacatcccttactataaaaaaccctcctctttctcatccracatatatcc

SEQ ID NO: 26143 - DNA, 50 bp, synthetic construct
  source 1..50: mol_type = other DNA
aattaaactaaaacactaaaataaaccraactactaaaataaacaaaaac

SEQ ID NO: 26144 - DNA, 50 bp, synthetic construct
  source 1..50: mol_type = other DNA
tactaaaataaaccaaaccactaaattaaactaaaacactaaaataaacc

SEQ ID NO: 26145 - DNA, 50 bp, synthetic construct
  source 1..50: mol_type = other DNA
aaaattacacataaaataacaactaaacaccaaaaccacracccaacrac

SEQ ID NO: 26146 - DNA, 50 bp, synthetic construct
  source 1..50: mol_type = other DNA
caataactcraaccctaaaaacctcaacrtaatcaaaataaacaaacrcc

SEQ ID NO: 26147 - DNA, 50 bp, synthetic construct
  source 1..50: mol_type = other DNA
taatatttaactactactccatatacaactcctttcaataaatccaatac

SEQ ID NO: 26148 - DNA, 50 bp, synthetic construct
  source 1..50: mol_type = other DNA
taaacacttaatacctacatcctaaaatccctactatataattctaaatc

SEQ ID NO: 26149 - DNA, 50 bp, synthetic construct
  source 1..50: mol_type = other DNA
taacctctctcttccttaaaataatattttcaatttctaaatactaatac

SEQ ID NO: 26150 - DNA, 50 bp, synthetic construct
  source 1..50: mol_type = other DNA
cttatccrtatatcatcttatattctacttcctttttcattcccaatatc

SEQ ID NO: 26151 - DNA, 50 bp, synthetic construct
  source 1..50: mol_type = other DNA
crtaaactaaaacttcrtcaacaacaaaacaatactcttccccaaaaacc

SEQ ID NO: 26152 - DNA, 50 bp, synthetic construct
  source 1..50: mol_type = other DNA
caaaataatttcaacctcccaaccaattcctacacrtaaactaaaacttc

SEQ ID NO: 26153 - DNA, 50 bp, synthetic construct
  source 1..50: mol_type = other DNA
tacaaaaattaactaaaaaactaaaactaccctaaataactaaatcatcc

SEQ ID NO: 26154 - DNA, 50 bp, synthetic construct
  source 1..50: mol_type = other DNA
tatttccctccacccaataaaacactaaaaacataccaaaataataaacc

SEQ ID NO: 26155 - DNA, 50 bp, synthetic construct
  source 1..50: mol_type = other DNA
aactaccctataaatacrttattctccccatttcacacataaaaaaacac

SEQ ID NO: 26156 - DNA, 50 bp, synthetic construct
  source 1..50: mol_type = other DNA
accctataaatacrttattctccccatttcacacataaaaaaacacrctc

SEQ ID NO: 26157 - DNA, 50 bp, synthetic construct
  source 1..50: mol_type = other DNA
aaaaaattaaattctttccacaactacccttcaaactccttccaaaaaac

SEQ ID NO: 26158 - DNA, 50 bp, synthetic construct
  source 1..50: mol_type = other DNA
ataaacaacataaaacaactaacrtccaaataaaactaaaacaacatatc

SEQ ID NO: 26159 - DNA, 50 bp, synthetic construct
  source 1..50: mol_type = other DNA
aacaacataaaacaactaacrtccaaataaaactaaaacaacatatcrac

SEQ ID NO: 26160 - DNA, 50 bp, synthetic construct
  source 1..50: mol_type = other DNA
atacaatcctaatacatctacttaaccacaccaaatacactaaaatacac

SEQ ID NO: 26161 - DNA, 50 bp, synthetic construct
  source 1..50: mol_type = other DNA
cctaatacatctacttaaccacaccaaatacactaaaatacacrttaccc

SEQ ID NO: 26162 - DNA, 50 bp, synthetic construct
  source 1..50: mol_type = other DNA
tccaaacccracataaactacraattaaaactattcattaaataccccac

SEQ ID NO: 26163 - DNA, 50 bp, synthetic construct
  source 1..50: mol_type = other DNA
aaatacacrttacccraacccrtaaaatactcaataaacaacttcaattc

SEQ ID NO: 26164 - DNA, 50 bp, synthetic construct
  source 1..50: mol_type = other DNA
tattcttctactacctaaaaaaatctccccaaaccaaacctaattaacac

SEQ ID NO: 26165 - DNA, 50 bp, synthetic construct
  source 1..50: mol_type = other DNA
ccaaactaaaaccataaccaatctatatccaaaaaaaccatctatatacc

SEQ ID NO: 26166 - DNA, 50 bp, synthetic construct
  source 1..50: mol_type = other DNA
aaaaaaaacaaactttctaacccaaccctatcccaaaacctaatatcccc

SEQ ID NO: 26167 - DNA, 50 bp, synthetic construct
  source 1..50: mol_type = other DNA
taaaaactaaaactataaatcataaatccttcaaaacctttaacaaaatc

SEQ ID NO: 26168 - DNA, 50 bp, synthetic construct
  source 1..50: mol_type = other DNA
ttttcaaaacctaacttccttattctttatacctccttacccctaattac

SEQ ID NO: 26169 - DNA, 50 bp, synthetic construct
  source 1..50: mol_type = other DNA
acaaaaacacttactcttccctattctcaccaaaaaaacacaaacrctcc

SEQ ID NO: 26170 - DNA, 50 bp, synthetic construct
  source 1..50: mol_type = other DNA
ctttttaactttccaaaattcaattttttattaaaattttcattctcttc

SEQ ID NO: 26171 - DNA, 50 bp, synthetic construct
  source 1..50: mol_type = other DNA
aaaacccaaaaaaattactatttctaacttaaatatcttatacttatatc

SEQ ID NO: 26172 - DNA, 50 bp, synthetic construct
  source 1..50: mol_type = other DNA
acttttactttcactttaacaaatcttacaaccrcacactctttaaatcc

SEQ ID NO: 26173 - DNA, 50 bp, synthetic construct
  source 1..50: mol_type = other DNA
caaattataacactcrctactataatccacaacttcattccttaaaaccc

SEQ ID NO: 26174 - DNA, 50 bp, synthetic construct
  source 1..50: mol_type = other DNA
caaaaaacttaaaacaaaaataccattcaactcaacaatcccactaaaac

SEQ ID NO: 26175 - DNA, 50 bp, synthetic construct
  source 1..50: mol_type = other DNA
aattttcattctcaccaacaatatataaatattcctttttctctaaactc

SEQ ID NO: 26176 - DNA, 50 bp, synthetic construct
  source 1..50: mol_type = other DNA
ctctttccctcatctaacraaaataacaaacataaaaaaaactctaatac

SEQ ID NO: 26177 - DNA, 50 bp, synthetic construct
  source 1..50: mol_type = other DNA
caaaactaacactaaactcactttaataaactacatactccaaacctcac

SEQ ID NO: 26178 - DNA, 50 bp, synthetic construct
  source 1..50: mol_type = other DNA
ctaaatactacracaaaaacrccaaaataaactctcaatataaaaaaacc

SEQ ID NO: 26179 - DNA, 50 bp, synthetic construct
  source 1..50: mol_type = other DNA
ctactacaataaacaatattcrcctccacactaaatactacracaaaaac

SEQ ID NO: 26180 - DNA, 50 bp, synthetic construct
  source 1..50: mol_type = other DNA
acactaaaaacttatcttaacrctcttaccrcaacacccaatataaaaac

SEQ ID NO: 26181 - DNA, 50 bp, synthetic construct
  source 1..50: mol_type = other DNA
aaacactttaacaaatacacrcttttataatttattttcttaataaaacc

SEQ ID NO: 26182 - DNA, 50 bp, synthetic construct
  source 1..50: mol_type = other DNA
attaaaactaataacrtaactacctaaatcaaacactttaacaaatacac

SEQ ID NO: 26183 - DNA, 50 bp, synthetic construct
  source 1..50: mol_type = other DNA
acaaactacaaaaacrtatacctaccaaaatacttaacccaaacaaccac

SEQ ID NO: 26184 - DNA, 50 bp, synthetic construct
  source 1..50: mol_type = other DNA
actaaaaaaaacaaatatataattcaaacccrataaaatacctaacaaac

SEQ ID NO: 26185 - DNA, 50 bp, synthetic construct
  source 1..50: mol_type = other DNA
ataattcaaacccrataaaatacctaacaaacrcttataaaaatatttac

SEQ ID NO: 26186 - DNA, 50 bp, synthetic construct
  source 1..50: mol_type = other DNA
tcatcaaattaatttactaataaacatcataaaaaaccctacaaatactc

SEQ ID NO: 26187 - DNA, 50 bp, synthetic construct
  source 1..50: mol_type = other DNA
aatttattacctccraccrctcattaactcaaaataacrtaaaaaacctc

SEQ ID NO: 26188 - DNA, 50 bp, synthetic construct
  source 1..50: mol_type = other DNA
rtaaacttcttaaatttattacctccraccrctcattaactcaaaataac

SEQ ID NO: 26189 - DNA, 50 bp, synthetic construct
  source 1..50: mol_type = other DNA
ccratctctttatattttccctctctctctaaaacaataaaactttttcc

SEQ ID NO: 26190 - DNA, 50 bp, synthetic construct
  source 1..50: mol_type = other DNA
ttccttatttacacaatcaaaaatactaccacttaccttccaaaattctc

SEQ ID NO: 26191 - DNA, 50 bp, synthetic construct
  source 1..50: mol_type = other DNA
aattcaaattcraacrcaaaaccactattatataaaatcaataactatac

SEQ ID NO: 26192 - DNA, 50 bp, synthetic construct
  source 1..50: mol_type = other DNA
tatacaactaaaatactaattctccctctttttaaaattcaaattcraac

SEQ ID NO: 26193 - DNA, 50 bp, synthetic construct
  source 1..50: mol_type = other DNA
actatatacaactaaaatactaattctccctctttttaaaattcaaattc

SEQ ID NO: 26194 - DNA, 50 bp, synthetic construct
  source 1..50: mol_type = other DNA
atctaaatacttttaaaaactatccttaaatatatcatttccaaacttac

SEQ ID NO: 26195 - DNA, 50 bp, synthetic construct
  source 1..50: mol_type = other DNA
cttaactattattaactcctaaaaaactctaaataaataactttccatac

SEQ ID NO: 26196 - DNA, 50 bp, synthetic construct
  source 1..50: mol_type = other DNA
tatcataaaaacaaacatttccatctacccttaaaaacaaccaaccttcc

SEQ ID NO: 26197 - DNA, 50 bp, synthetic construct
  source 1..50: mol_type = other DNA
taacaaaaaacratactaccttctctatatacacataataccactcctcc

SEQ ID NO: 26198 - DNA, 50 bp, synthetic construct
  source 1..50: mol_type = other DNA
ccctactaaacraaaaaataacattatatacacacaaaaaaaacaacacc

SEQ ID NO: 26199 - DNA, 50 bp, synthetic construct
  source 1..50: mol_type = other DNA
tacatctaaaatcataatttactttcaatttactaaatttataaattttc

SEQ ID NO: 26200 - DNA, 50 bp, synthetic construct
  source 1..50: mol_type = other DNA
caataaataaatataccaaaaaattactaaaaacccttttaaaaacaaac

SEQ ID NO: 26201 - DNA, 50 bp, synthetic construct
  source 1..50: mol_type = other DNA
caaaactaaaaactttttttcaatctttaatatcaccaaatttaaaaatc

SEQ ID NO: 26202 - DNA, 50 bp, synthetic construct
  source 1..50: mol_type = other DNA
tcatatattacacttatcaatcttaaattacttacacatacatctcatac

SEQ ID NO: 26203 - DNA, 50 bp, synthetic construct
  source 1..50: mol_type = other DNA
ccaaaaaaaaactaattaaattttaaatactaatcccctaactctaaacc

SEQ ID NO: 26204 - DNA, 50 bp, synthetic construct
  source 1..50: mol_type = other DNA
aacctcaattacttcatctttaaattaaaaataataatactcracatctc

SEQ ID NO: 26205 - DNA, 50 bp, synthetic construct
  source 1..50: mol_type = other DNA
tcttttcraacctcaattacttcatctttaaattaaaaataataatactc

SEQ ID NO: 26206 - DNA, 50 bp, synthetic construct
  source 1..50: mol_type = other DNA
cctaaaactaaaacttctatacratattattaaatcctattcttcttttc

SEQ ID NO: 26207 - DNA, 50 bp, synthetic construct
  source 1..50: mol_type = other DNA
aacaaccttaaaatattctaaaacttccttacctactaataaaaaccacc

SEQ ID NO: 26208 - DNA, 50 bp, synthetic construct
  source 1..50: mol_type = other DNA
aaaaaaattcacaaatatacratactaacattcrtctaatacataccatc

SEQ ID NO: 26209 - DNA, 50 bp, synthetic construct
  source 1..50: mol_type = other DNA
tataaacctatccataaaaaaaaattcacaaatatacratactaacattc

SEQ ID NO: 26210 - DNA, 50 bp, synthetic construct
  source 1..50: mol_type = other DNA
tttaaaactattataaccacrataatatatatcaaacraataccaacatc

SEQ ID NO: 26211 - DNA, 50 bp, synthetic construct
  source 1..50: mol_type = other DNA
tcrcacacctataaaccctttcccataaataaacccatacaaaaacatac

SEQ ID NO: 26212 - DNA, 50 bp, synthetic construct
  source 1..50: mol_type = other DNA
aaactaaactaactcaaataacaaactaccaaaatactaatatttccctc

SEQ ID NO: 26213 - DNA, 50 bp, synthetic construct
  source 1..50: mol_type = other DNA
ccaatatacttaacattcaaaaaaaacaaaatatcactaaaactcttacc

SEQ ID NO: 26214 - DNA, 50 bp, synthetic construct
  source 1..50: mol_type = other DNA
craaactaatacctctatctcctcctaacactcctaaaatttacatcccc

SEQ ID NO: 26215 - DNA, 50 bp, synthetic construct
  source 1..50: mol_type = other DNA
ctaactactacctttactaaacacaaaactcctaaacraacccraaaaac

SEQ ID NO: 26216 - DNA, 50 bp, synthetic construct
  source 1..50: mol_type = other DNA
acctaccaaaaaactaactactacctttactaaacacaaaactcctaaac

SEQ ID NO: 26217 - DNA, 50 bp, synthetic construct
  source 1..50: mol_type = other DNA
aaaaaccacrataataatataatactcraccttcaccttcattaactacc

SEQ ID NO: 26218 - DNA, 50 bp, synthetic construct
  source 1..50: mol_type = other DNA
aaaacccaaaatataaaccaataaaaaaccacrataataatataatactc

SEQ ID NO: 26219 - DNA, 50 bp, synthetic construct
  source 1..50: mol_type = other DNA
ttataaacttacrcaaaccctttcacttctatatcataataaatatttac

SEQ ID NO: 26220 - DNA, 50 bp, synthetic construct
  source 1..50: mol_type = other DNA
atataacatatatatattatacatatatatcactaaacttataaacttac

SEQ ID NO: 26221 - DNA, 50 bp, synthetic construct
  source 1..50: mol_type = other DNA
ttctacctcaactcraaaataaacaacctccaactaaaaattttctaacc

SEQ ID NO: 26222 - DNA, 50 bp, synthetic construct
  source 1..50: mol_type = other DNA
cccraactaaaacaaaatcatataaactccaatctaatatcaaactaaac

SEQ ID NO: 26223 - DNA, 50 bp, synthetic construct
  source 1..50: mol_type = other DNA
taaaacaaaatcatataaactccaatctaatatcaaactaaacrattacc

SEQ ID NO: 26224 - DNA, 50 bp, synthetic construct
  source 1..50: mol_type = other DNA
atcrctcaaaataaaatacaataatacaatatcaacttactacaacctcc

SEQ ID NO: 26225 - DNA, 50 bp, synthetic construct
  source 1..50: mol_type = other DNA
aaaaaaccctcatcaatcttaacaaccctctaataacttctaaaaacttc

SEQ ID NO: 26226 - DNA, 50 bp, synthetic construct
  source 1..50: mol_type = other DNA
ttcrtactacctttacccacttcaaactatcaaaataaaatcccttaccc

SEQ ID NO: 26227 - DNA, 50 bp, synthetic construct
  source 1..50: mol_type = other DNA
tccaaaaatccaacatctttaactaaacataaaaactaccacaactaaac

SEQ ID NO: 26228 - DNA, 50 bp, synthetic construct
  source 1..50: mol_type = other DNA
ctatcctataattcatcrcaaaaaataatttactaacaccctaacttccc

SEQ ID NO: 26229 - DNA, 50 bp, synthetic construct
  source 1..50: mol_type = other DNA
attactaataaatattttctacaaaaaacctataaaaaacaaaaactcac

SEQ ID NO: 26230 - DNA, 50 bp, synthetic construct
  source 1..50: mol_type = other DNA
taaactcttacttctcacaaacttcttataaaaaacactcaccaataacc

SEQ ID NO: 26231 - DNA, 50 bp, synthetic construct
  source 1..50: mol_type = other DNA
aaaaaccrccttcaccatcttaccaactacacaactattaaatatctttc

SEQ ID NO: 26232 - DNA, 50 bp, synthetic construct
  source 1..50: mol_type = other DNA
caataccacrtatctatctcccctaaacctaaaataactccctaaaaacc

SEQ ID NO: 26233 - DNA, 50 bp, synthetic construct
  source 1..50: mol_type = other DNA
aattatcaataatcaaaatcaaataaaattcattctctacccaataccac

SEQ ID NO: 26234 - DNA, 50 bp, synthetic construct
  source 1..50: mol_type = other DNA
raaaacttcattacttataatttacttaatccctctttatttttatttcc

SEQ ID NO: 26235 - DNA, 50 bp, synthetic construct
  source 1..50: mol_type = other DNA
ttactatcattttaactccttcrtaatcaccacraaataactatacaccc

SEQ ID NO: 26236 - DNA, 50 bp, synthetic construct
  source 1..50: mol_type = other DNA
tcrtatttatttacatcttacrtactccttactatcattttaactccttc

SEQ ID NO: 26237 - DNA, 50 bp, synthetic construct
  source 1..50: mol_type = other DNA
tttttatttactaacaatcaaaacaaaaatacaattaaactttaactttc

SEQ ID NO: 26238 - DNA, 50 bp, synthetic construct
  source 1..50: mol_type = other DNA
tataaaaaactctctttactatttaaaccatcttaatctccttaacaacc

SEQ ID NO: 26239 - DNA, 50 bp, synthetic construct
  source 1..50: mol_type = other DNA
acraaaccracrtcactcatacttctactatttcaatcttaactattaac

SEQ ID NO: 26240 - DNA, 50 bp, synthetic construct
  source 1..50: mol_type = other DNA
ccaaaaaaaacratatctaaaaatatactaaatacacctacraaaccrac

SEQ ID NO: 26241 - DNA, 50 bp, synthetic construct
  source 1..50: mol_type = other DNA
acaccaaaaaaaacratatctaaaaatatactaaatacacctacraaacc

SEQ ID NO: 26242 - DNA, 50 bp, synthetic construct
  source 1..50: mol_type = other DNA
attttctacacctttaaatctactctaaaattcaaatattcaaaaaacac

SEQ ID NO: 26243 - DNA, 50 bp, synthetic construct
  source 1..50: mol_type = other DNA
actctaaaattcaaatattcaaaaaacacrtactatatacaccttacaac

SEQ ID NO: 26244 - DNA, 50 bp, synthetic construct
  source 1..50: mol_type = other DNA
tattcaaaaaacacrtactatatacaccttacaacraacaaaaaactctc

SEQ ID NO: 26245 - DNA, 50 bp, synthetic construct
  source 1..50: mol_type = other DNA
cacraccataaaatcaaaacccttatatcaactccaaacactaaaacacc

SEQ ID NO: 26246 - DNA, 50 bp, synthetic construct
  source 1..50: mol_type = other DNA
atcratactccaatacttaaaattaatataaaaaccctaattttataacc

SEQ ID NO: 26247 - DNA, 50 bp, synthetic construct
  source 1..50: mol_type = other DNA
attctaactaaaaaaatcatacctatcccaacccaccctacatacatacc

SEQ ID NO: 26248 - DNA, 50 bp, synthetic construct
  source 1..50: mol_type = other DNA
taatcccataaaaaaaaccatatactatccaaacccaaccaacctcaccc

SEQ ID NO: 26249 - DNA, 50 bp, synthetic construct
  source 1..50: mol_type = other DNA
ctcctcraaaccaaaactataatcttaatctatactatactcctaccacc

SEQ ID NO: 26250 - DNA, 50 bp, synthetic construct
  source 1..50: mol_type = other DNA
aaaatataaaaaacaatcttaatcccaatctataactccacaaactcctc

SEQ ID NO: 26251 - DNA, 50 bp, synthetic construct
  source 1..50: mol_type = other DNA
aacaaaaacaaaaccttcctcrtcccaacaaataactaaactaaaaaaac

SEQ ID NO: 26252 - DNA, 50 bp, synthetic construct
  source 1..50: mol_type = other DNA
aaccccaaccctaccctaacataaatacctataaacctaaataaataaac

SEQ ID NO: 26253 - DNA, 50 bp, synthetic construct
  source 1..50: mol_type = other DNA
aaataaaacracattatcaaaccaccraataaaaactaccaaaatataac

SEQ ID NO: 26254 - DNA, 50 bp, synthetic construct
  source 1..50: mol_type = other DNA
catcctactccracttatacctaaaaataaaacracattatcaaaccacc

SEQ ID NO: 26255 - DNA, 50 bp, synthetic construct
  source 1..50: mol_type = other DNA
ccaccctcacaaatcccaacaaactaaaataatctaaactaccatctacc

SEQ ID NO: 26256 - DNA, 50 bp, synthetic construct
  source 1..50: mol_type = other DNA
ccccttatactataatactcrtaccctaaaacctaaactcaaattaaaac

SEQ ID NO: 26257 - DNA, 50 bp, synthetic construct
  source 1..50: mol_type = other DNA
accctccaaatacctaccctaaaacactaaacaaaaaaacctaatcactc

SEQ ID NO: 26258 - DNA, 50 bp, synthetic construct
  source 1..50: mol_type = other DNA
aaaataaaaaaatcacttcaaccccraaaatcraaactacactaaaccac

SEQ ID NO: 26259 - DNA, 50 bp, synthetic construct
  source 1..50: mol_type = other DNA
aataaaatcttattatataacccaaactaatcttaaactcctaaactcac

SEQ ID NO: 26260 - DNA, 50 bp, synthetic construct
  source 1..50: mol_type = other DNA
ccctaccttccaatatttcrtaattcaaataaacaaaccattctatattc

SEQ ID NO: 26261 - DNA, 50 bp, synthetic construct
  source 1..50: mol_type = other DNA
attaaattctatacaccttaaaaccttcaaattctctcaacctattccac

SEQ ID NO: 26262 - DNA, 50 bp, synthetic construct
  source 1..50: mol_type = other DNA
acaatttaacaaaaaataaaccataaaatcttactttccttacaacaaac

SEQ ID NO: 26263 - DNA, 50 bp, synthetic construct
  source 1..50: mol_type = other DNA
aaatcacaaccaaaactaaataaacatataccttctaaataaaactaatc

SEQ ID NO: 26264 - DNA, 50 bp, synthetic construct
  source 1..50: mol_type = other DNA
actcaaaactataaaatacrctacaatctacaaaatacrataaccccttc

SEQ ID NO: 26265 - DNA, 50 bp, synthetic construct
  source 1..50: mol_type = other DNA
aactctaactataaccctaataaattactaaaactcacraaaaaaccatc

SEQ ID NO: 26266 - DNA, 50 bp, synthetic construct
  source 1..50: mol_type = other DNA
taacctttatcacccrattccctaaacaactactcaaaactataaaatac

SEQ ID NO: 26267 - DNA, 50 bp, synthetic construct
  source 1..50: mol_type = other DNA
tctacaaactacaacrtactccacaactctaaacaactactcaaaaaatc

SEQ ID NO: 26268 - DNA, 50 bp, synthetic construct
  source 1..50: mol_type = other DNA
tccacaactctaaacaactactcaaaaaatcraataacaaaaaccaacac

SEQ ID NO: 26269 - DNA, 50 bp, synthetic construct
  source 1..50: mol_type = other DNA
aactctaaacaactactcaaaaaatcraataacaaaaaccaacacraatc

SEQ ID NO: 26270 - DNA, 50 bp, synthetic construct
  source 1..50: mol_type = other DNA
taaacaactactcaaaaaatcraataacaaaaaccaacacraatcraatc

SEQ ID NO: 26271 - DNA, 50 bp, synthetic construct
  source 1..50: mol_type = other DNA
acccaacaaatttaaatatactaatttcatttataaaccctaaaaaaacc

SEQ ID NO: 26272 - DNA, 50 bp, synthetic construct
  source 1..50: mol_type = other DNA
ccaaaaaacctcccttaaccctatccctaaacctaactaaaataaccttc

SEQ ID NO: 26273 - DNA, 50 bp, synthetic construct
  source 1..50: mol_type = other DNA
tacaaatctatctatctcaaaaacctataacccataattttctactaaac

SEQ ID NO: 26274 - DNA, 50 bp, synthetic construct
  source 1..50: mol_type = other DNA
cctcaaaaaaatacttaacaccacatcatccctaaataactacacaaaac

SEQ ID NO: 26275 - DNA, 50 bp, synthetic construct
  source 1..50: mol_type = other DNA
aaaatacttaacaccacatcatccctaaataactacacaaaacraaaaac

SEQ ID NO: 26276 - DNA, 50 bp, synthetic construct
  source 1..50: mol_type = other DNA
aattcaaatactaataactaaaaaaaacacacrtccccttactaccaacc

SEQ ID NO: 26277 - DNA, 50 bp, synthetic construct
  source 1..50: mol_type = other DNA
tcaaaaaccaaacacaaaaaacacaaaaaaacractaacaacaaaaaaac

SEQ ID NO: 26278 - DNA, 50 bp, synthetic construct
  source 1..50: mol_type = other DNA
tcccccaaaccaccacctaaataaacaacatacatatctaaaaaaatttc

SEQ ID NO: 26279 - DNA, 50 bp, synthetic construct
  source 1..50: mol_type = other DNA
aataaacaacatacatatctaaaaaaatttcrcaatacttcttctacccc

SEQ ID NO: 26280 - DNA, 50 bp, synthetic construct
  source 1..50: mol_type = other DNA
attaaaaattttaatctaaatcttcccaaaataccacataaataaaaccc

SEQ ID NO: 26281 - DNA, 50 bp, synthetic construct
  source 1..50: mol_type = other DNA
aaaaattttaatctaaatcttcccaaaataccacataaataaaacccrcc

SEQ ID NO: 26282 - DNA, 50 bp, synthetic construct
  source 1..50: mol_type = other DNA
cctctcctcraacrataaaaataacacccactatataacaatttaaaatc

SEQ ID NO: 26283 - DNA, 50 bp, synthetic construct
  source 1..50: mol_type = other DNA
tctcctcraacrataaaaataacacccactatataacaatttaaaatcrc

SEQ ID NO: 26284 - DNA, 50 bp, synthetic construct
  source 1..50: mol_type = other DNA
caactaaaactcactatactcaaaaaaaccccraattaccctataattcc

SEQ ID NO: 26285 - DNA, 50 bp, synthetic construct
  source 1..50: mol_type = other DNA
caataaacctaaaactaacaactaaaactcactatactcaaaaaaacccc

SEQ ID NO: 26286 - DNA, 50 bp, synthetic construct
  source 1..50: mol_type = other DNA
actatcaatctcaaacttattataaataaaacaacatctataaaaaatcc

SEQ ID NO: 26287 - DNA, 50 bp, synthetic construct
  source 1..50: mol_type = other DNA
taaaaaccaccrcatcctaaaaatacaataattaaaaaccatctaacccc

SEQ ID NO: 26288 - DNA, 50 bp, synthetic construct
  source 1..50: mol_type = other DNA
aaaccatctaaccccrtaataaaataaataaccacacctcctctttccac

SEQ ID NO: 26289 - DNA, 50 bp, synthetic construct
  source 1..50: mol_type = other DNA
ctaaattaacrtacaacttacccaaccctacattaacaacctcaatcacc

SEQ ID NO: 26290 - DNA, 50 bp, synthetic construct
  source 1..50: mol_type = other DNA
atcctaaacrtaactacatccctaccctaaaactacttaaaacaaaactc

SEQ ID NO: 26291 - DNA, 50 bp, synthetic construct
  source 1..50: mol_type = other DNA
tacaaacaaaacaaaaaattacaacacaaaaaccaaacrcrataactcac

SEQ ID NO: 26292 - DNA, 50 bp, synthetic construct
  source 1..50: mol_type = other DNA
aaaaaattaatacaaacaaaacaaaaaattacaacacaaaaaccaaacrc

SEQ ID NO: 26293 - DNA, 50 bp, synthetic construct
  source 1..50: mol_type = other DNA
ctacctacatcaacctctccttaactccataaaataaaacrtctactaac

SEQ ID NO: 26294 - DNA, 50 bp, synthetic construct
  source 1..50: mol_type = other DNA
acctatacaatcttcaaaatcatcccattcaaaaatacttcctaatattc

SEQ ID NO: 26295 - DNA, 50 bp, synthetic construct
  source 1..50: mol_type = other DNA
ctctctacraattattttataaactaccccaacaataacttaatctaaac

SEQ ID NO: 26296 - DNA, 50 bp, synthetic construct
  source 1..50: mol_type = other DNA
ctctctataccaacttctataacaaaaactccaaccttaatacataaacc

SEQ ID NO: 26297 - DNA, 50 bp, synthetic construct
  source 1..50: mol_type = other DNA
aaattatctataaccccaaatacctcctcaaaaacctacaaacattcatc

SEQ ID NO: 26298 - DNA, 50 bp, synthetic construct
  source 1..50: mol_type = other DNA
aaaaaaacrattactaaaaaaccttcraaacccaacacttaatattattc

SEQ ID NO: 26299 - DNA, 50 bp, synthetic construct
  source 1..50: mol_type = other DNA
taaaaaattatttatcttaaaaacacraataacatcaaatactaaacctc

SEQ ID NO: 26300 - DNA, 50 bp, synthetic construct
  source 1..50: mol_type = other DNA
aaaaacacraataacatcaaatactaaacctcraaaactctctaacaatc

SEQ ID NO: 26301 - DNA, 50 bp, synthetic construct
  source 1..50: mol_type = other DNA
atctaacacctaccacrcctttatcatctaaataatataaaacatccaac

SEQ ID NO: 26302 - DNA, 50 bp, synthetic construct
  source 1..50: mol_type = other DNA
actcttaaacataaaaataactccttaaacccaaaacaaaacataatccc

SEQ ID NO: 26303 - DNA, 50 bp, synthetic construct
  source 1..50: mol_type = other DNA
actaaaaccctaatctcctaccttctttaaatttcctaacttatccrttc

SEQ ID NO: 26304 - DNA, 50 bp, synthetic construct
  source 1..50: mol_type = other DNA
aaatactacaatacatacataaaaaaaacatttactaaacaccttttccc

SEQ ID NO: 26305 - DNA, 50 bp, synthetic construct
  source 1..50: mol_type = other DNA
tacaaaatataaactaccttacaaaccaactttcaaaacaacrtcttaac

SEQ ID NO: 26306 - DNA, 50 bp, synthetic construct
  source 1..50: mol_type = other DNA
ttatccctacatcttactaattaaaatacaatctacaacctcraaacrac

SEQ ID NO: 26307 - DNA, 50 bp, synthetic construct
  source 1..50: mol_type = other DNA
catttatccctacatcttactaattaaaatacaatctacaacctcraaac

SEQ ID NO: 26308 - DNA, 50 bp, synthetic construct
  source 1..50: mol_type = other DNA
attcacatttatccctacatcttactaattaaaatacaatctacaacctc

SEQ ID NO: 26309 - DNA, 50 bp, synthetic construct
  source 1..50: mol_type = other DNA
ataaaaccaaccattccactatacactaacatatcacacacaactacccc

SEQ ID NO: 26310 - DNA, 50 bp, synthetic construct
  source 1..50: mol_type = other DNA
taaatatacacaatatctatacttaaacacatccrctaccrtccctaacc

SEQ ID NO: 26311 - DNA, 50 bp, synthetic construct
  source 1..50: mol_type = other DNA
aatcctaacctaaatatacacaatatctatacttaaacacatccrctacc

SEQ ID NO: 26312 - DNA, 50 bp, synthetic construct
  source 1..50: mol_type = other DNA
tcaaaaaatcctaacctaaatatacacaatatctatacttaaacacatcc

SEQ ID NO: 26313 - DNA, 50 bp, synthetic construct
  source 1..50: mol_type = other DNA
tatttaactaaaatctaactctaaaacctcaaaaaaaaattcacacaccc

SEQ ID NO: 26314 - DNA, 50 bp, synthetic construct
  source 1..50: mol_type = other DNA
crttcttaaacacrttacaactattaacaaaacatttattaaccrtaacc

SEQ ID NO: 26315 - DNA, 50 bp, synthetic construct
  source 1..50: mol_type = other DNA
ctttcccrttcttaaacacrttacaactattaacaaaacatttattaacc

SEQ ID NO: 26316 - DNA, 50 bp, synthetic construct
  source 1..50: mol_type = other DNA
accrctaaacaaataaaactaatatctctaacaaatcacaactaatctcc

SEQ ID NO: 26317 - DNA, 50 bp, synthetic construct
  source 1..50: mol_type = other DNA
aatcatcttactacracaaaactctaccaatcaaaaaataaatatataac

SEQ ID NO: 26318 - DNA, 50 bp, synthetic construct
  source 1..50: mol_type = other DNA
ccaatcaaaaaataaatatataacrccraacaaactctaaaaatcaatac

SEQ ID NO: 26319 - DNA, 50 bp, synthetic construct
  source 1..50: mol_type = other DNA
acacaaaaacaaaatacaaatctctaaatatccaaaaccaaaccttctac

SEQ ID NO: 26320 - DNA, 50 bp, synthetic construct
  source 1..50: mol_type = other DNA
actctaaaacctctttattcaaaaactcacrtaaaaacaattactccrcc

SEQ ID NO: 26321 - DNA, 50 bp, synthetic construct
  source 1..50: mol_type = other DNA
aaaccccrattctaattctaattaaaaataaccracaaactttttccacc

SEQ ID NO: 26322 - DNA, 50 bp, synthetic construct
  source 1..50: mol_type = other DNA
ctaacttaaaaaaacaacctacacccccraacttataaccccttccttac

SEQ ID NO: 26323 - DNA, 50 bp, synthetic construct
  source 1..50: mol_type = other DNA
ratccctaaaacacaacttaaaactcaataaataaaaaccactaccactc

SEQ ID NO: 26324 - DNA, 50 bp, synthetic construct
  source 1..50: mol_type = other DNA
aaaactcaataaataaaaaccactaccactcratcaatactaaaacttcc

SEQ ID NO: 26325 - DNA, 50 bp, synthetic construct
  source 1..50: mol_type = other DNA
aaaatacaataactataatctccaccatataatctccttcccttcctcac

SEQ ID NO: 26326 - DNA, 50 bp, synthetic construct
  source 1..50: mol_type = other DNA
tacactcraaaccaataacrcaaaccraaacatataaataataacttcac

SEQ ID NO: 26327 - DNA, 50 bp, synthetic construct
  source 1..50: mol_type = other DNA
aataaccrtaaaatcattatttacatacctcracttacrtcattaatttc

SEQ ID NO: 26328 - DNA, 50 bp, synthetic construct
  source 1..50: mol_type = other DNA
tcattatttacatacctcracttacrtcattaatttcraatacaaccaac

SEQ ID NO: 26329 - DNA, 50 bp, synthetic construct
  source 1..50: mol_type = other DNA
tttattactacaaaaaataatctaaccaactaaccacccactaccaaccc

SEQ ID NO: 26330 - DNA, 50 bp, synthetic construct
  source 1..50: mol_type = other DNA
aaccaaatcattccctacaataataaaccaaacaaaaatacaatcacccc

SEQ ID NO: 26331 - DNA, 50 bp, synthetic construct
  source 1..50: mol_type = other DNA
tcctaaacaaacaaaaataaattaatcaccctaaaactaaatcactaaac

SEQ ID NO: 26332 - DNA, 50 bp, synthetic construct
  source 1..50: mol_type = other DNA
actcatccctatttacccaaaactttcctaattttaacactaaaaacccc

SEQ ID NO: 26333 - DNA, 50 bp, synthetic construct
  source 1..50: mol_type = other DNA
tatcaaaataaactaaaaaatcaacctaaaataacaaaaccactataacc

SEQ ID NO: 26334 - DNA, 50 bp, synthetic construct
  source 1..50: mol_type = other DNA
aattactacaaacccatataaatttactactactaacatactttaatatc

SEQ ID NO: 26335 - DNA, 50 bp, synthetic construct
  source 1..50: mol_type = other DNA
ttactaaaattatatacatactcattttaaatattttccccttactactc

SEQ ID NO: 26336 - DNA, 50 bp, synthetic construct
  source 1..50: mol_type = other DNA
aatattactattccaaacaaatcaaaatatacctcactaaatcacaaacc

SEQ ID NO: 26337 - DNA, 50 bp, synthetic construct
  source 1..50: mol_type = other DNA
aacttataaaactcacaactataaaatatctcttactactaccaaaaccc

SEQ ID NO: 26338 - DNA, 50 bp, synthetic construct
  source 1..50: mol_type = other DNA
atactacctataaaaacaacacrcatacttcctctttttcatccaaaaac

SEQ ID NO: 26339 - DNA, 50 bp, synthetic construct
  source 1..50: mol_type = other DNA
cattaaattacatcccrtaaacaatattatccratttcaccraccaacac

SEQ ID NO: 26340 - DNA, 50 bp, synthetic construct
  source 1..50: mol_type = other DNA
acaatctaccattaaattacatcccrtaaacaatattatccratttcacc

SEQ ID NO: 26341 - DNA, 50 bp, synthetic construct
  source 1..50: mol_type = other DNA
actataactacaatctaccattaaattacatcccrtaaacaatattatcc

SEQ ID NO: 26342 - DNA, 50 bp, synthetic construct
  source 1..50: mol_type = other DNA
taataaactacaaccacaacctaaaaactcaaacacctaatttataaaac

SEQ ID NO: 26343 - DNA, 50 bp, synthetic construct
  source 1..50: mol_type = other DNA
atacraatttaccaatttctctcccactataaaaccatttactaaacttc

SEQ ID NO: 26344 - DNA, 50 bp, synthetic construct
  source 1..50: mol_type = other DNA
aatctatcatcatctaaaatacttcccctctctcacttaactacaacttc

SEQ ID NO: 26345 - DNA, 50 bp, synthetic construct
  source 1..50: mol_type = other DNA
aaaataaaactcttaactcaaaattaaaacccaataataaaaaaactaac

SEQ ID NO: 26346 - DNA, 50 bp, synthetic construct
  source 1..50: mol_type = other DNA
tctctataactcaattcctatctataaaattaaaataacatcaccattac

SEQ ID NO: 26347 - DNA, 50 bp, synthetic construct
  source 1..50: mol_type = other DNA
aactcaaacacattctattttttacctataaaacacttacttttaatatc

SEQ ID NO: 26348 - DNA, 50 bp, synthetic construct
  source 1..50: mol_type = other DNA
tacctaatttcatttatactaaaaccaaccttactatataaaaaccrtcc

SEQ ID NO: 26349 - DNA, 50 bp, synthetic construct
  source 1..50: mol_type = other DNA
aaactaactccaacataaataaaaccaaacactataaaataccaaaacac

SEQ ID NO: 26350 - DNA, 50 bp, synthetic construct
  source 1..50: mol_type = other DNA
ccacttaaaaaaacaaaacactaattccaaatataaaaacttattaaacc

SEQ ID NO: 26351 - DNA, 50 bp, synthetic construct
  source 1..50: mol_type = other DNA
taaatcactatctacraaataaacatcraaatcctcccaattctactttc

SEQ ID NO: 26352 - DNA, 50 bp, synthetic construct
  source 1..50: mol_type = other DNA
aaactacraaaccctctaaaacctaaatcactatctacraaataaacatc

SEQ ID NO: 26353 - DNA, 50 bp, synthetic construct
  source 1..50: mol_type = other DNA
rtcaaaacaacrtaaactacaacrctataatctaaaacrctaaaaacaac

SEQ ID NO: 26354 - DNA, 50 bp, synthetic construct
  source 1..50: mol_type = other DNA
aaaacaaaacaaaatccacactccaacrtcaaaacaacrtaaactacaac

SEQ ID NO: 26355 - DNA, 50 bp, synthetic construct
  source 1..50: mol_type = other DNA
ctattaaaattaataaacccaacaaaactaaattttcctaaaactaaaac

SEQ ID NO: 26356 - DNA, 50 bp, synthetic construct
  source 1..50: mol_type = other DNA
tcaatcatacactacctataaaacatactttaaatacaaaaatacaaatc

SEQ ID NO: 26357 - DNA, 50 bp, synthetic construct
  source 1..50: mol_type = other DNA
accatacccatcccatataaaatcacacaatcacaaattctaaaaattac

SEQ ID NO: 26358 - DNA, 50 bp, synthetic construct
  source 1..50: mol_type = other DNA
tatctttcaccacataaccatcacaaaaataaacacctaacaaacacccc

SEQ ID NO: 26359 - DNA, 50 bp, synthetic construct
  source 1..50: mol_type = other DNA
aaaaaatttcctaaaaaataaacattcracactaaaactaaaataatccc

SEQ ID NO: 26360 - DNA, 50 bp, synthetic construct
  source 1..50: mol_type = other DNA
taaaccaacatttacccataacaaaaaaatttcctaaaaaataaacattc

SEQ ID NO: 26361 - DNA, 50 bp, synthetic construct
  source 1..50: mol_type = other DNA
ataaacraatcaaaaaaccacaactctacraataaactcctatacaaaac

SEQ ID NO: 26362 - DNA, 50 bp, synthetic construct
  source 1..50: mol_type = other DNA
tttaaaaacaacaaacaaaactaaacctcrctttacacaaaaacccaccc

SEQ ID NO: 26363 - DNA, 50 bp, synthetic construct
  source 1..50: mol_type = other DNA
ctatcacaaattaccatcaaccttctctctcacaacaacctaaaataaac

SEQ ID NO: 26364 - DNA, 50 bp, synthetic construct
  source 1..50: mol_type = other DNA
acaaataaccctaactataaaaaaaacaatacatttataattatataccc

SEQ ID NO: 26365 - DNA, 50 bp, synthetic construct
  source 1..50: mol_type = other DNA
aaaaaaataaccttatatttaaccaaactaaacataaacaccccaaaaac

SEQ ID NO: 26366 - DNA, 50 bp, synthetic construct
  source 1..50: mol_type = other DNA
ataaaaccttaaaccaaaaattctcttactaaaaccatcaacctcaatac

SEQ ID NO: 26367 - DNA, 50 bp, synthetic construct
  source 1..50: mol_type = other DNA
acattaatatatacataattttaaacaatctcctaactttcttacctttc

SEQ ID NO: 26368 - DNA, 50 bp, synthetic construct
  source 1..50: mol_type = other DNA
tccaaaattaactatcttaataccacccttccccaaattacaaaatcaac

SEQ ID NO: 26369 - DNA, 50 bp, synthetic construct
  source 1..50: mol_type = other DNA
tcaacatcaaaacrtattatcattcttattataacacccaaaaatatctc

SEQ ID NO: 26370 - DNA, 50 bp, synthetic construct
  source 1..50: mol_type = other DNA
ctatcataattttcactaatacaccctccttctatactcaacatcaaaac

SEQ ID NO: 26371 - DNA, 50 bp, synthetic construct
  source 1..50: mol_type = other DNA
actcccataaaaaacaaaaatcctaactaaacaatcrcraacttaaatcc

SEQ ID NO: 26372 - DNA, 50 bp, synthetic construct
  source 1..50: mol_type = other DNA
tcaaataattcactactcccataaaaaacaaaaatcctaactaaacaatc

SEQ ID NO: 26373 - DNA, 50 bp, synthetic construct
  source 1..50: mol_type = other DNA
tccacaacctaaatatatattaccatctttaccaaacttaaaacttattc

SEQ ID NO: 26374 - DNA, 50 bp, synthetic construct
  source 1..50: mol_type = other DNA
caatacatacccaaattataaaaaacactacaaaaataaccactaatcac

SEQ ID NO: 26375 - DNA, 50 bp, synthetic construct
  source 1..50: mol_type = other DNA
accacctaaaatttacctatataaaaaacactaataaaatctaaaaaacc

SEQ ID NO: 26376 - DNA, 50 bp, synthetic construct
  source 1..50: mol_type = other DNA
ccrctatcctaaaaacaaaatcraaaaaccrcaatacaatactaataacc

SEQ ID NO: 26377 - DNA, 50 bp, synthetic construct
  source 1..50: mol_type = other DNA
craccttaactcatttccttatcrcctaacraaactcaaaactctaatac

SEQ ID NO: 26378 - DNA, 50 bp, synthetic construct
  source 1..50: mol_type = other DNA
atcactatttaaactacrtttaacaataaacrtaaccaacaaatataatc

SEQ ID NO: 26379 - DNA, 50 bp, synthetic construct
  source 1..50: mol_type = other DNA
taaaaccttttatacaataactatacccaccraccacacctactaaccac

SEQ ID NO: 26380 - DNA, 50 bp, synthetic construct
  source 1..50: mol_type = other DNA
taaaccctccccaaaatcacccttaataattcattcataacaatataaac

SEQ ID NO: 26381 - DNA, 50 bp, synthetic construct
  source 1..50: mol_type = other DNA
taaataacaacaaataaccaaataaaacctccacaaacaaacaaaaaccc

SEQ ID NO: 26382 - DNA, 50 bp, synthetic construct
  source 1..50: mol_type = other DNA
ataactaaactaacctctaaaacattcaaacataaacctccttacacttc

SEQ ID NO: 26383 - DNA, 50 bp, synthetic construct
  source 1..50: mol_type = other DNA
tttacctttctttaacttcatattaactaaaattactacaaaaaccatcc

SEQ ID NO: 26384 - DNA, 50 bp, synthetic construct
  source 1..50: mol_type = other DNA
tacaaaataactctaaaaattcacttacacaataataaacaaacaaaaac

SEQ ID NO: 26385 - DNA, 50 bp, synthetic construct
  source 1..50: mol_type = other DNA
caaatccaaaatatacctcaccaccaaaaaaccatatccrttaaataacc

SEQ ID NO: 26386 - DNA, 50 bp, synthetic construct
  source 1..50: mol_type = other DNA
ttaacaaaaaacaaatccaaaatatacctcaccaccaaaaaaccatatcc

SEQ ID NO: 26387 - DNA, 50 bp, synthetic construct
  source 1..50: mol_type = other DNA
aataaaaccctatctcactctaccttctttaacaaaaaaaccraaattcc

SEQ ID NO: 26388 - DNA, 50 bp, synthetic construct
  source 1..50: mol_type = other DNA
aataacaaaataaaaccctatctcactctaccttctttaacaaaaaaacc

SEQ ID NO: 26389 - DNA, 50 bp, synthetic construct
  source 1..50: mol_type = other DNA
tttctaaaaccttttataaaaattaataacaacaaaaacaaccccaaacc

SEQ ID NO: 26390 - DNA, 50 bp, synthetic construct
  source 1..50: mol_type = other DNA
taattacactacaatcccataaataaaaaaaactttaccatccrtaaaac

SEQ ID NO: 26391 - DNA, 50 bp, synthetic construct
  source 1..50: mol_type = other DNA
rcraatttaattacactacaatcccataaataaaaaaaactttaccatcc

SEQ ID NO: 26392 - DNA, 50 bp, synthetic construct
  source 1..50: mol_type = other DNA
acraataacaaaactctcctcacccataaaactataatacaattaaaccc

SEQ ID NO: 26393 - DNA, 50 bp, synthetic construct
  source 1..50: mol_type = other DNA
aaaaaactatacaaaacacraaactacaactttaaaaacatcacctaaac

SEQ ID NO: 26394 - DNA, 50 bp, synthetic construct
  source 1..50: mol_type = other DNA
ataatacaattaaacccrcrtctaaataatacttttaaaattataacttc

SEQ ID NO: 26395 - DNA, 50 bp, synthetic construct
  source 1..50: mol_type = other DNA
aattatactttaaatcaatacaataaactaaactttttccaaacctaacc

SEQ ID NO: 26396 - DNA, 50 bp, synthetic construct
  source 1..50: mol_type = other DNA
taataaaactaaactaacaaattctcccttacactaccctcrtaaatatc

SEQ ID NO: 26397 - DNA, 50 bp, synthetic construct
  source 1..50: mol_type = other DNA
ctctccctataataaaactaaactaacaaattctcccttacactaccctc

SEQ ID NO: 26398 - DNA, 50 bp, synthetic construct
  source 1..50: mol_type = other DNA
caaaccratatatatttcaacaccaaccaaaccaaaacaaatctactaac

SEQ ID NO: 26399 - DNA, 50 bp, synthetic construct
  source 1..50: mol_type = other DNA
aaatacrtcaacaaacctatcctaacctaactaatattaaaatacacacc

SEQ ID NO: 26400 - DNA, 50 bp, synthetic construct
  source 1..50: mol_type = other DNA
tattaaaatacacaccratttacccaaataactattataaaaaaataacc

SEQ ID NO: 26401 - DNA, 50 bp, synthetic construct
  source 1..50: mol_type = other DNA
aataaccrctccaaaactaactataccccataataacctctaaaaaaaac

SEQ ID NO: 26402 - DNA, 50 bp, synthetic construct
  source 1..50: mol_type = other DNA
ataaaataaaatccaaaactacctcctcataaaactatatataaacaaac

SEQ ID NO: 26403 - DNA, 50 bp, synthetic construct
  source 1..50: mol_type = other DNA
atcttttacrtatactaatttccaacaactctaatttacratataatttc

SEQ ID NO: 26404 - DNA, 50 bp, synthetic construct
  source 1..50: mol_type = other DNA
tactaaacrtcatcttttacrtatactaatttccaacaactctaatttac

SEQ ID NO: 26405 - DNA, 50 bp, synthetic construct
  source 1..50: mol_type = other DNA
acaaaacacaccatataccaaaaaataacctcaacaaaaaacctcaaacc

SEQ ID NO: 26406 - DNA, 50 bp, synthetic construct
  source 1..50: mol_type = other DNA
taaacccaaactaaaacrcaaaaaacctaaattctaaacctaactctacc

SEQ ID NO: 26407 - DNA, 50 bp, synthetic construct
  source 1..50: mol_type = other DNA
ccaccaataaaaaaaacaccactccactataacatacttcctaataactc

SEQ ID NO: 26408 - DNA, 50 bp, synthetic construct
  source 1..50: mol_type = other DNA
aacctaaaatcraacaaaactacttatcaccctcraaaatctttaactcc

SEQ ID NO: 26409 - DNA, 50 bp, synthetic construct
  source 1..50: mol_type = other DNA
acttaaaaaaaatactactataccctaaatccccraaaccaaaaactccc

SEQ ID NO: 26410 - DNA, 50 bp, synthetic construct
  source 1..50: mol_type = other DNA
caccccactactttcacctctatcctaaattacaaaaaaaacttcaaacc

SEQ ID NO: 26411 - DNA, 50 bp, synthetic construct
  source 1..50: mol_type = other DNA
ctaatactcaaccctacccaaacaactaacaaataatccaaaaacccctc

SEQ ID NO: 26412 - DNA, 50 bp, synthetic construct
  source 1..50: mol_type = other DNA
cttactaatattaaaaaaaatcrtcttaaataatcttccccctacctttc

SEQ ID NO: 26413 - DNA, 50 bp, synthetic construct
  source 1..50: mol_type = other DNA
aataacctcaaaaaaaatactaaactcccttactaatattaaaaaaaatc

SEQ ID NO: 26414 - DNA, 50 bp, synthetic construct
  source 1..50: mol_type = other DNA
ctataaatccaacctctctaaactaaatatataaaaaccrctcctataac

SEQ ID NO: 26415 - DNA, 50 bp, synthetic construct
  source 1..50: mol_type = other DNA
ctaaaaactaataaatacctaccaaaaacrcccacaacctaccaaaatac

SEQ ID NO: 26416 - DNA, 50 bp, synthetic construct
  source 1..50: mol_type = other DNA
aaataaaatttcactatattaaccaaactaaactcctaacctcataatcc

SEQ ID NO: 26417 - DNA, 50 bp, synthetic construct
  source 1..50: mol_type = other DNA
caatctatcctataaccacrtaaaaaaaccctctcaaaaatacttactcc

SEQ ID NO: 26418 - DNA, 50 bp, synthetic construct
  source 1..50: mol_type = other DNA
tatatttaaacrtacaatactaaataaaacacaatctatcctataaccac

SEQ ID NO: 26419 - DNA, 50 bp, synthetic construct
  source 1..50: mol_type = other DNA
cttacaacacaccatactcttatttaatcttccttatattttttattttc

SEQ ID NO: 26420 - DNA, 50 bp, synthetic construct
  source 1..50: mol_type = other DNA
tctatatcttttcttatttcaatatacctaataatattcttcccaaaacc

SEQ ID NO: 26421 - DNA, 50 bp, synthetic construct
  source 1..50: mol_type = other DNA
cataacrtcaattcattaattataccaccttttcccttaatatttcttac

SEQ ID NO: 26422 - DNA, 50 bp, synthetic construct
  source 1..50: mol_type = other DNA
atacaaaacccccaacacaaaaacctatccaactacratcaaaaaacaac

SEQ ID NO: 26423 - DNA, 50 bp, synthetic construct
  source 1..50: mol_type = other DNA
aaacaaactaataaaaaaaaccctcataaaaatatcacatttcaatacac

SEQ ID NO: 26424 - DNA, 50 bp, synthetic construct
  source 1..50: mol_type = other DNA
ctcataaaaattttcctcatcaatctatctcaattttcaactacatcccc

SEQ ID NO: 26425 - DNA, 50 bp, synthetic construct
  source 1..50: mol_type = other DNA
cacttcctattccccttccttatttttcttttttctcatttactcttatc

SEQ ID NO: 26426 - DNA, 50 bp, synthetic construct
  source 1..50: mol_type = other DNA
actcctatccattttttttatctctatcacaaaacttcraaattccrtcc

SEQ ID NO: 26427 - DNA, 50 bp, synthetic construct
  source 1..50: mol_type = other DNA
aaaaactcctatccattttttttatctctatcacaaaacttcraaattcc

SEQ ID NO: 26428 - DNA, 50 bp, synthetic construct
  source 1..50: mol_type = other DNA
tataaatctctttaacacaatactacccttacactcacatatacaaactc

SEQ ID NO: 26429 - DNA, 50 bp, synthetic construct
  source 1..50: mol_type = other DNA
ttactacaattctacaacaacaatctacttcctccaacatcactaccacc

SEQ ID NO: 26430 - DNA, 50 bp, synthetic construct
  source 1..50: mol_type = other DNA
aaactatcataatatttacatttttcaaataattatatacacacacrtac

SEQ ID NO: 26431 - DNA, 50 bp, synthetic construct
  source 1..50: mol_type = other DNA
atatatatataatctaaaaataaaattactaacttacaaaatatccacac

SEQ ID NO: 26432 - DNA, 50 bp, synthetic construct
  source 1..50: mol_type = other DNA
accaatttttttctctaaaataattaaaccactatacaaccctactaacc

SEQ ID NO: 26433 - DNA, 50 bp, synthetic construct
  source 1..50: mol_type = other DNA
raaacttccccraaaatcccaaacaatataaacaacttctcttaaaaatc

SEQ ID NO: 26434 - DNA, 50 bp, synthetic construct
  source 1..50: mol_type = other DNA
tcraaaaatactttaaaccaaactctcctctaaaaacrcrctaatattcc

SEQ ID NO: 26435 - DNA, 50 bp, synthetic construct
  source 1..50: mol_type = other DNA
raaaacaacactaaacccraaaacraaaatcaaaaaacatctccctaaac

SEQ ID NO: 26436 - DNA, 50 bp, synthetic construct
  source 1..50: mol_type = other DNA
cctcctactataaaacaacaaccraaataaaactaacaactaaaaaaaac

SEQ ID NO: 26437 - DNA, 50 bp, synthetic construct
  source 1..50: mol_type = other DNA
aacaacaaccraaataaaactaacaactaaaaaaaacrcctaaatacrcc

SEQ ID NO: 26438 - DNA, 50 bp, synthetic construct
  source 1..50: mol_type = other DNA
ccractaaacrctaaaaacaaattccttatcttcctccaaaatccaactc

SEQ ID NO: 26439 - DNA, 50 bp, synthetic construct
  source 1..50: mol_type = other DNA
taaaattcaaactccrcaacraattaaaaacaaaaatactaaaacctccc

SEQ ID NO: 26440 - DNA, 50 bp, synthetic construct
  source 1..50: mol_type = other DNA
acaaatcatttccacraatttactatacaaccrcttaaaattcaaactcc

SEQ ID NO: 26441 - DNA, 50 bp, synthetic construct
  source 1..50: mol_type = other DNA
tcactatcttaactcactttctttcattctacttatcatcaccraacatc

SEQ ID NO: 26442 - DNA, 50 bp, synthetic construct
  source 1..50: mol_type = other DNA
tcattctacttatcatcaccraacatcrtattatctactttatatctctc

SEQ ID NO: 26443 - DNA, 50 bp, synthetic construct
  source 1..50: mol_type = other DNA
aaaaattttactcttctactaaaacacctcattctacaactacaaatacc

SEQ ID NO: 26444 - DNA, 50 bp, synthetic construct
  source 1..50: mol_type = other DNA
ttaaaatatcatataaacaccaatctatttaaaaatcaatcaccaaactc

SEQ ID NO: 26445 - DNA, 50 bp, synthetic construct
  source 1..50: mol_type = other DNA
aaatatatatcaccccaaaaacataaaaataaacccaaaacacctaaacc

SEQ ID NO: 26446 - DNA, 50 bp, synthetic construct
  source 1..50: mol_type = other DNA
caaaaacataaaaataaacccaaaacacctaaaccraaaaccacaaaatc

SEQ ID NO: 26447 - DNA, 50 bp, synthetic construct
  source 1..50: mol_type = other DNA
aaaacraactaatccttccacaatattacaataacaacttccaaaaaacc

SEQ ID NO: 26448 - DNA, 50 bp, synthetic construct
  source 1..50: mol_type = other DNA
aaaaaaacttcraaaaaacaaccaatactaataaaaacaacraaaccaac

SEQ ID NO: 26449 - DNA, 50 bp, synthetic construct
  source 1..50: mol_type = other DNA
ccttttatacaacraaaataaattaacctaccctaccccaaaaaaacttc

SEQ ID NO: 26450 - DNA, 50 bp, synthetic construct
  source 1..50: mol_type = other DNA
ttccaaccaataaatatctattaaacttcaaacaaattcataataaaccc

SEQ ID NO: 26451 - DNA, 50 bp, synthetic construct
  source 1..50: mol_type = other DNA
aaaattacttttaataaaatacaaactatcaatcaaactttacaataacc

SEQ ID NO: 26452 - DNA, 50 bp, synthetic construct
  source 1..50: mol_type = other DNA
ctcaaaataaaaccaaaatcctatcaaaacccaaaaaaccataaatatcc

SEQ ID NO: 26453 - DNA, 50 bp, synthetic construct
  source 1..50: mol_type = other DNA
actaaaatcrcrccattacataccaacttaaacaacaaaaataaaactcc

SEQ ID NO: 26454 - DNA, 50 bp, synthetic construct
  source 1..50: mol_type = other DNA
aacttaaactaaaaaatactaacaacttctctcactcaaacatactacac

SEQ ID NO: 26455 - DNA, 50 bp, synthetic construct
  source 1..50: mol_type = other DNA
aaattttcttataactctccctaaatataataatctatacctcaaataac

SEQ ID NO: 26456 - DNA, 50 bp, synthetic construct
  source 1..50: mol_type = other DNA
ataaccaaataaaccatcaattcrtcctaaaatcttctcatatctctcac

SEQ ID NO: 26457 - DNA, 50 bp, synthetic construct
  source 1..50: mol_type = other DNA
aattttcatctttaaactaattcttaacatttacattatcacaacrcrac

SEQ ID NO: 26458 - DNA, 50 bp, synthetic construct
  source 1..50: mol_type = other DNA
caaaaaattttcatctttaaactaattcttaacatttacattatcacaac

SEQ ID NO: 26459 - DNA, 50 bp, synthetic construct
  source 1..50: mol_type = other DNA
cccactcacaaaatttccaatcccatataatattttccaattttcatatc

SEQ ID NO: 26460 - DNA, 50 bp, synthetic construct
  source 1..50: mol_type = other DNA
aatctaattttcaccaacratactaaaatccaaaatctatcaaaatttcc

SEQ ID NO: 26461 - DNA, 50 bp, synthetic construct
  source 1..50: mol_type = other DNA
taaataaatactcataacraaaaccctaacaaaccttaaattccaacatc

SEQ ID NO: 26462 - DNA, 50 bp, synthetic construct
  source 1..50: mol_type = other DNA
caactctctctcctttcctaacttctacattaacaactaaaacaaataac

SEQ ID NO: 26463 - DNA, 50 bp, synthetic construct
  source 1..50: mol_type = other DNA
atttataccttaaaaaaaatccttcatttaactaaaacatctaaacctac

SEQ ID NO: 26464 - DNA, 50 bp, synthetic construct
  source 1..50: mol_type = other DNA
taccttaaaaaaaatccttcatttaactaaaacatctaaacctacrttac

SEQ ID NO: 26465 - DNA, 50 bp, synthetic construct
  source 1..50: mol_type = other DNA
aaaaaaataatcaatcattctcacctaacctaacaatatcattaacatac

SEQ ID NO: 26466 - DNA, 50 bp, synthetic construct
  source 1..50: mol_type = other DNA
aaatcctaattccataaaataaaccctaaaaaccttaaccacraaacrtc

SEQ ID NO: 26467 - DNA, 50 bp, synthetic construct
  source 1..50: mol_type = other DNA
aaaaaatcctaattccataaaataaaccctaaaaaccttaaccacraaac

SEQ ID NO: 26468 - DNA, 50 bp, synthetic construct
  source 1..50: mol_type = other DNA
acaacaaaaaatcctaattccataaaataaaccctaaaaaccttaaccac

SEQ ID NO: 26469 - DNA, 50 bp, synthetic construct
  source 1..50: mol_type = other DNA
aacccttaaaatccactccataaaatcaaaaccccttactactactttac

SEQ ID NO: 26470 - DNA, 50 bp, synthetic construct
  source 1..50: mol_type = other DNA
atcactcctactaaaaacaaatctaaacatcatttccacaatcaaacctc

SEQ ID NO: 26471 - DNA, 50 bp, synthetic construct
  source 1..50: mol_type = other DNA
taaataccatataatttacaccaccrcaacaaactttaaatcccaaaaac

SEQ ID NO: 26472 - DNA, 50 bp, synthetic construct
  source 1..50: mol_type = other DNA
attttaattataaataataaattttacacaaacacacataacattttctc

SEQ ID NO: 26473 - DNA, 50 bp, synthetic construct
  source 1..50: mol_type = other DNA
tacccaaactaaatacaataataccatcataactcactacaacctcaaac

SEQ ID NO: 26474 - DNA, 50 bp, synthetic construct
  source 1..50: mol_type = other DNA
attatttaaaaccactccctcacttctctataacctcatcatatttactc

SEQ ID NO: 26475 - DNA, 50 bp, synthetic construct
  source 1..50: mol_type = other DNA
tatttctaaacaaaaaaccataatctaaacccaacaaaacctatctattc

SEQ ID NO: 26476 - DNA, 50 bp, synthetic construct
  source 1..50: mol_type = other DNA
aaacaaacaaacaaacactcaaaaacaacrttcaaaaacttccaaataac

SEQ ID NO: 26477 - DNA, 50 bp, synthetic construct
  source 1..50: mol_type = other DNA
ttcaaaaacttccaaataacraaacacrtaaaaatttctaaaaataaccc

SEQ ID NO: 26478 - DNA, 50 bp, synthetic construct
  source 1..50: mol_type = other DNA
tataaatacatatttccctaaatcctataaaccactctaacaaattaatc

SEQ ID NO: 26479 - DNA, 50 bp, synthetic construct
  source 1..50: mol_type = other DNA
aaccccaacttaaaactaataaatcaaaaattctaaaaacctaaacttac

SEQ ID NO: 26480 - DNA, 50 bp, synthetic construct
  source 1..50: mol_type = other DNA
aatcrccaatacaaaaaaattacrtaaacaaaactattaacrattcaatc

SEQ ID NO: 26481 - DNA, 50 bp, synthetic construct
  source 1..50: mol_type = other DNA
cctaacaacaatcrccaatacaaaaaaattacrtaaacaaaactattaac

SEQ ID NO: 26482 - DNA, 50 bp, synthetic construct
  source 1..50: mol_type = other DNA
aataaaaaataaacaaccttaacractaaaccrccaacaactttattcac

SEQ ID NO: 26483 - DNA, 50 bp, synthetic construct
  source 1..50: mol_type = other DNA
aataaacrcaataatcacctaacaacctctctaaaaactaactataaatc

SEQ ID NO: 26484 - DNA, 50 bp, synthetic construct
  source 1..50: mol_type = other DNA
aaatctcatctaaatatcttcttccacttatcactatctttatacacatc

SEQ ID NO: 26485 - DNA, 50 bp, synthetic construct
  source 1..50: mol_type = other DNA
aaccacaacaaaaaccacaaaaaacttaaaatccaacrataaatctctac

SEQ ID NO: 26486 - DNA, 50 bp, synthetic construct
  source 1..50: mol_type = other DNA
crataaataaattacaaaatactaaaaacccccttacrtaaaaactcacc

SEQ ID NO: 26487 - DNA, 50 bp, synthetic construct
  source 1..50: mol_type = other DNA
tcaccrctaaactccaaaccctctataacttctactataactaaatcatc

SEQ ID NO: 26488 - DNA, 50 bp, synthetic construct
  source 1..50: mol_type = other DNA
crtaaccaaataaaacattctttccctatataaaactacataaaatcacc

SEQ ID NO: 26489 - DNA, 50 bp, synthetic construct
  source 1..50: mol_type = other DNA
ctaaaaaaatacataactaacctcttcatttcaacaaaacacaaaaaaac

SEQ ID NO: 26490 - DNA, 50 bp, synthetic construct
  source 1..50: mol_type = other DNA
tttaaaaaatctaaatctaaattaaacaatcttcraaaaaactacctcac

SEQ ID NO: 26491 - DNA, 50 bp, synthetic construct
  source 1..50: mol_type = other DNA
ttactactttaattcttctcataaaccccrttactactatctatattaac

SEQ ID NO: 26492 - DNA, 50 bp, synthetic construct
  source 1..50: mol_type = other DNA
ctatcatccaaaacaatacracaacacctataaataaccactacactccc

SEQ ID NO: 26493 - DNA, 50 bp, synthetic construct
  source 1..50: mol_type = other DNA
ttactatattacctcaaacraaaatacaataactattcacaaatactatc

SEQ ID NO: 26494 - DNA, 50 bp, synthetic construct
  source 1..50: mol_type = other DNA
ctaaataataatacactacaaccataaaatcctaaacttaaacaattttc

SEQ ID NO: 26495 - DNA, 50 bp, synthetic construct
  source 1..50: mol_type = other DNA
ttaaccattcccacaaaccacacctacaaaaaactcaaaaaactatttac

SEQ ID NO: 26496 - DNA, 50 bp, synthetic construct
  source 1..50: mol_type = other DNA
tccratcaaactaaaaatcaaattaaaaaactataataaaaaccttcatc

SEQ ID NO: 26497 - DNA, 50 bp, synthetic construct
  source 1..50: mol_type = other DNA
accaaaacacctaacctaaaactatatattattattaactacaatcatcc

SEQ ID NO: 26498 - DNA, 50 bp, synthetic construct
  source 1..50: mol_type = other DNA
ttatctcacttaatataatatcctccacttctatccatattactataaac

SEQ ID NO: 26499 - DNA, 50 bp, synthetic construct
  source 1..50: mol_type = other DNA
atactataataactaacactataaataaataatcatacactcctataccc

SEQ ID NO: 26500 - DNA, 50 bp, synthetic construct
  source 1..50: mol_type = other DNA
aaaacctaaaaaacatttactacacttctaaatctaacrcatacaaactc

SEQ ID NO: 26501 - DNA, 50 bp, synthetic construct
  source 1..50: mol_type = other DNA
catttactacacttctaaatctaacrcatacaaactcraccctataaatc

SEQ ID NO: 26502 - DNA, 50 bp, synthetic construct
  source 1..50: mol_type = other DNA
taaacttctaaaacaacactcrccaaaaacattttaataaccttttcccc

SEQ ID NO: 26503 - DNA, 50 bp, synthetic construct
  source 1..50: mol_type = other DNA
caccttctactttcttaaattccacatataaataaaaccatataatatcc

SEQ ID NO: 26504 - DNA, 50 bp, synthetic construct
  source 1..50: mol_type = other DNA
aaacaaaaacaaccacaaacacaacaaaaataacaaaacaaaaacacacc

SEQ ID NO: 26505 - DNA, 50 bp, synthetic construct
  source 1..50: mol_type = other DNA
aaatactccractcacacracaaacacaaactataactaataataaatac

SEQ ID NO: 26506 - DNA, 50 bp, synthetic construct
  source 1..50: mol_type = other DNA
ccacaacttatatttaccrtataaaccraaacacttatttatcacctcac

SEQ ID NO: 26507 - DNA, 50 bp, synthetic construct
  source 1..50: mol_type = other DNA
ttatacatatattcattctacaaacatactaaacratatacacacatctc

SEQ ID NO: 26508 - DNA, 50 bp, synthetic construct
  source 1..50: mol_type = other DNA
ttcttactttcatacaatctacccaactataaacraaatatatacacatc

SEQ ID NO: 26509 - DNA, 50 bp, synthetic construct
  source 1..50: mol_type = other DNA
tcttaatatacttaattatataatactacctaaaatatcctatactatac

SEQ ID NO: 26510 - DNA, 50 bp, synthetic construct
  source 1..50: mol_type = other DNA
aaataaaacaataaaactataaataacttcacatcaaatcaaaacatacc

SEQ ID NO: 26511 - DNA, 50 bp, synthetic construct
  source 1..50: mol_type = other DNA
aaacaaacrtaatattttcttcctttatatttcaacacrctacataatac

SEQ ID NO: 26512 - DNA, 50 bp, synthetic construct
  source 1..50: mol_type = other DNA
aaattataaacctatcttaataaacatctacttatcacrcattatacaac

SEQ ID NO: 26513 - DNA, 50 bp, synthetic construct
  source 1..50: mol_type = other DNA
taaataatcaccacatacraataataaacccatactaaaaaaacactccc

SEQ ID NO: 26514 - DNA, 50 bp, synthetic construct
  source 1..50: mol_type = other DNA
atccaaaacrattacctcctacactctaaaaaaaacacatttaaccctac

SEQ ID NO: 26515 - DNA, 50 bp, synthetic construct
  source 1..50: mol_type = other DNA
cattataacrcaaaatcaaatatatccctctcaaaatataaaaaataacc

SEQ ID NO: 26516 - DNA, 50 bp, synthetic construct
  source 1..50: mol_type = other DNA
accctcttaactaaacctaaaactttaaacattaactaaattcaacatac

SEQ ID NO: 26517 - DNA, 50 bp, synthetic construct
  source 1..50: mol_type = other DNA
aactaatccttttacacaccaaataactcatataaattataaataaacac

SEQ ID NO: 26518 - DNA, 50 bp, synthetic construct
  source 1..50: mol_type = other DNA
aatcttactcctttcttaaacaaaaaatctaaaatccaaaaaaaataaac

SEQ ID NO: 26519 - DNA, 50 bp, synthetic construct
  source 1..50: mol_type = other DNA
aaaaaaatcaataccaaaaaaaaacaacataccctttctactctacccac

SEQ ID NO: 26520 - DNA, 50 bp, synthetic construct
  source 1..50: mol_type = other DNA
atacaccaataaatactccaacaaaactacttaactctaaacracctaac

SEQ ID NO: 26521 - DNA, 50 bp, synthetic construct
  source 1..50: mol_type = other DNA
ctttccaaatacaccaataaatactccaacaaaactacttaactctaaac

SEQ ID NO: 26522 - DNA, 50 bp, synthetic construct
  source 1..50: mol_type = other DNA
taaaacacccactaatacacttaaaaaataatttctcctattaaaacctc

SEQ ID NO: 26523 - DNA, 50 bp, synthetic construct
  source 1..50: mol_type = other DNA
raccatctaattaaaaacaacaaaatttaatacacraataccaaatcccc

SEQ ID NO: 26524 - DNA, 50 bp, synthetic construct
  source 1..50: mol_type = other DNA
ctaaaaacaataaaaaaccaccttcacaaacctacraaaacctaacaccc

SEQ ID NO: 26525 - DNA, 50 bp, synthetic construct
  source 1..50: mol_type = other DNA
caataaaaaaatcccacaccaacactcttatacctcctaaaacaaccaac

SEQ ID NO: 26526 - DNA, 50 bp, synthetic construct
  source 1..50: mol_type = other DNA
aaaaaacttcaccacraattatttccatattaacaaaaactttaataacc

SEQ ID NO: 26527 - DNA, 50 bp, synthetic construct
  source 1..50: mol_type = other DNA
taataaaaccttttactccccttcacaactactaactattacctacaatc

SEQ ID NO: 26528 - DNA, 50 bp, synthetic construct
  source 1..50: mol_type = other DNA
caaaactactacaaaacatactataccaaccacaacattcacaaaatcrc

SEQ ID NO: 26529 - DNA, 50 bp, synthetic construct
  source 1..50: mol_type = other DNA
aacaaaactactacaaaacatactataccaaccacaacattcacaaaatc

SEQ ID NO: 26530 - DNA, 50 bp, synthetic construct
  source 1..50: mol_type = other DNA
aaccttaaaatacttcctcttaaccacrtacaaaccaaaatacaaccaac

SEQ ID NO: 26531 - DNA, 50 bp, synthetic construct
  source 1..50: mol_type = other DNA
aaatctacaaaaaaacccccttaaaacrttaactacatcctaatctacac

SEQ ID NO: 26532 - DNA, 50 bp, synthetic construct
  source 1..50: mol_type = other DNA
actaccttaacaataaaactaaattatccataaaccaataaactactccc

SEQ ID NO: 26533 - DNA, 50 bp, synthetic construct
  source 1..50: mol_type = other DNA
craaacattataatctacttctcaatataaccatattttatacttttcac

SEQ ID NO: 26534 - DNA, 50 bp, synthetic construct
  source 1..50: mol_type = other DNA
aaaaaaataaaccttatcacatttacaacttctaccccttatacaacccc

SEQ ID NO: 26535 - DNA, 50 bp, synthetic construct
  source 1..50: mol_type = other DNA
caaccaaatacaaacaacacttctccaaataaaaacttcccctaaatcac

SEQ ID NO: 26536 - DNA, 50 bp, synthetic construct
  source 1..50: mol_type = other DNA
taaaaaaaacctccatctaaaaaaatactacctacacttaattacatatc

SEQ ID NO: 26537 - DNA, 50 bp, synthetic construct
  source 1..50: mol_type = other DNA
ctacctacacttaattacatatcraataaactaaacccttaactcctctc

SEQ ID NO: 26538 - DNA, 50 bp, synthetic construct
  source 1..50: mol_type = other DNA
ttcattcaatccttattatatacaaaaacactatacctcttttaacccac

SEQ ID NO: 26539 - DNA, 50 bp, synthetic construct
  source 1..50: mol_type = other DNA
ttcaacatactaactctattcctaatacctaataccaaatattccactac

SEQ ID NO: 26540 - DNA, 50 bp, synthetic construct
  source 1..50: mol_type = other DNA
atataaattttcaaaaaactttcttatcaacaaaacacacctatctattc

SEQ ID NO: 26541 - DNA, 50 bp, synthetic construct
  source 1..50: mol_type = other DNA
ctatctattcrtaatctttacccttctccctttattaacatcacttaaac

SEQ ID NO: 26542 - DNA, 50 bp, synthetic construct
  source 1..50: mol_type = other DNA
ttaattaccctactaaacttaatattaaactacttttctccatatatatc

SEQ ID NO: 26543 - DNA, 50 bp, synthetic construct
  source 1..50: mol_type = other DNA
aaaaaccttttactttatttatctaatacttcccttttttaattttcccc

SEQ ID NO: 26544 - DNA, 50 bp, synthetic construct
  source 1..50: mol_type = other DNA
attaaccaaactaatattaaactcctaacctcaaataattcacccatctc

SEQ ID NO: 26545 - DNA, 50 bp, synthetic construct
  source 1..50: mol_type = other DNA
ataccaaaaaacataaaacctacaaaataaatcaaaatactcttctaacc

SEQ ID NO: 26546 - DNA, 50 bp, synthetic construct
  source 1..50: mol_type = other DNA
ttcaccctacaaacctcatattttctaacattatactaaatactaaaatc

SEQ ID NO: 26547 - DNA, 50 bp, synthetic construct
  source 1..50: mol_type = other DNA
cctacaaacctcatattttctaacattatactaaatactaaaatcrctac

SEQ ID NO: 26548 - DNA, 50 bp, synthetic construct
  source 1..50: mol_type = other DNA
tatactaaatactaaaatcrctacraaataccctaatcttaaccactacc

SEQ ID NO: 26549 - DNA, 50 bp, synthetic construct
  source 1..50: mol_type = other DNA
accrcaaaaccactataaatacctacaaaattaaaccttaaaaacatacc

SEQ ID NO: 26550 - DNA, 50 bp, synthetic construct
  source 1..50: mol_type = other DNA
aattatccaacaaaataattataaaccrtaatatcatctaacaacctttc

SEQ ID NO: 26551 - DNA, 50 bp, synthetic construct
  source 1..50: mol_type = other DNA
tctcactctatcaatacctcatatatttaaactatctccaaccaaatcac

SEQ ID NO: 26552 - DNA, 50 bp, synthetic construct
  source 1..50: mol_type = other DNA
aatacctcatatatttaaactatctccaaccaaatcacrataaaaacccc

SEQ ID NO: 26553 - DNA, 50 bp, synthetic construct
  source 1..50: mol_type = other DNA
taaaaaccccraaaatacaaaatacataactatacacttccctcttaaac

SEQ ID NO: 26554 - DNA, 50 bp, synthetic construct
  source 1..50: mol_type = other DNA
aaacacaataaaaacrtacaaaaccraactaactaacctaacaacaaaac

SEQ ID NO: 26555 - DNA, 50 bp, synthetic construct
  source 1..50: mol_type = other DNA
caaaaaacaccatacaccttctcrtaaacacaataaaaacrtacaaaacc

SEQ ID NO: 26556 - DNA, 50 bp, synthetic construct
  source 1..50: mol_type = other DNA
ttaaacctaacaaaaaacaccatacaccttctcrtaaacacaataaaaac

SEQ ID NO: 26557 - DNA, 50 bp, synthetic construct
  source 1..50: mol_type = other DNA
ttatccaacctttacttttaaacctaacaaaaaacaccatacaccttctc

SEQ ID NO: 26558 - DNA, 50 bp, synthetic construct
  source 1..50: mol_type = other DNA
acattttactaaaaacccaataatatatcaatcatcaaactaaccaaaac

SEQ ID NO: 26559 - DNA, 50 bp, synthetic construct
  source 1..50: mol_type = other DNA
aatatatcaatcatcaaactaaccaaaacractaatcaaaccactactac

SEQ ID NO: 26560 - DNA, 50 bp, synthetic construct
  source 1..50: mol_type = other DNA
ataatctcataaacaaccaaaactacttaccaaaaaacrcaaatacaaac

SEQ ID NO: 26561 - DNA, 50 bp, synthetic construct
  source 1..50: mol_type = other DNA
caatttctccccttccaatcaaatattatcatttactttcctttttaatc

SEQ ID NO: 26562 - DNA, 50 bp, synthetic construct
  source 1..50: mol_type = other DNA
acraataaaaaataataacrcacctacctcttccccacaaaaaactaaac

SEQ ID NO: 26563 - DNA, 50 bp, synthetic construct
  source 1..50: mol_type = other DNA
catcaaatattctctaaaacrcaacaaacrtaatttcatccttaaaaaac

SEQ ID NO: 26564 - DNA, 50 bp, synthetic construct
  source 1..50: mol_type = other DNA
aacaccatttcaaaacaaaacrcaaaatcacatcaaatattctctaaaac

SEQ ID NO: 26565 - DNA, 50 bp, synthetic construct
  source 1..50: mol_type = other DNA
tttaaaacaaacacttcatctatatcaataacaccatttcaaaacaaaac

SEQ ID NO: 26566 - DNA, 50 bp, synthetic construct
  source 1..50: mol_type = other DNA
aaaccaacacractaaataaaaaacrtctccataaacaacaaaaaaactc

SEQ ID NO: 26567 - DNA, 50 bp, synthetic construct
  source 1..50: mol_type = other DNA
aaaatacctattttaaaaataacccraattcccttactactcataaaaac

SEQ ID NO: 26568 - DNA, 50 bp, synthetic construct
  source 1..50: mol_type = other DNA
aaaataacccraattcccttactactcataaaaacrccttttatttaatc

SEQ ID NO: 26569 - DNA, 50 bp, synthetic construct
  source 1..50: mol_type = other DNA
ttactactcataaaaacrccttttatttaatcrtactaatctatacatac

SEQ ID NO: 26570 - DNA, 50 bp, synthetic construct
  source 1..50: mol_type = other DNA
tcataaaaacrccttttatttaatcrtactaatctatacatacratacac

SEQ ID NO: 26571 - DNA, 50 bp, synthetic construct
  source 1..50: mol_type = other DNA
ctaactcraaaacccctactatataaaaaaatccttactaaaaactcccc

SEQ ID NO: 26572 - DNA, 50 bp, synthetic construct
  source 1..50: mol_type = other DNA
tataaaaaaatccttactaaaaactccccrttctatacttaaaatcaaac

SEQ ID NO: 26573 - DNA, 50 bp, synthetic construct
  source 1..50: mol_type = other DNA
tccttactaaaaactccccrttctatacttaaaatcaaacrtacccttac

SEQ ID NO: 26574 - DNA, 50 bp, synthetic construct
  source 1..50: mol_type = other DNA
accccraaataaaacataaatcccaaacaaaataacccaaaacaaactac

SEQ ID NO: 26575 - DNA, 50 bp, synthetic construct
  source 1..50: mol_type = other DNA
acctaatcaacaaaaatctaaaaaacrccctttataacttaacaaacccc

SEQ ID NO: 26576 - DNA, 50 bp, synthetic construct
  source 1..50: mol_type = other DNA
tctctcaaacctctattaatcaaattttcattaactttcccctaccactc

SEQ ID NO: 26577 - DNA, 50 bp, synthetic construct
  source 1..50: mol_type = other DNA
tctcaaacctctattaatcaaattttcattaactttcccctaccactcrc

SEQ ID NO: 26578 - DNA, 50 bp, synthetic construct
  source 1..50: mol_type = other DNA
ctatttactaaaaaacaataccactaacracactaaacatccaaatacac

SEQ ID NO: 26579 - DNA, 50 bp, synthetic construct
  source 1..50: mol_type = other DNA
ttattaaccacaaaaacacaaacataacaaatctaaataactttttaaac

SEQ ID NO: 26580 - DNA, 50 bp, synthetic construct
  source 1..50: mol_type = other DNA
ctataaaataactaaaccacctcacaaactaaaaaccacaccraatactc

SEQ ID NO: 26581 - DNA, 50 bp, synthetic construct
  source 1..50: mol_type = other DNA
caatacaactataaaataactaaaccacctcacaaactaaaaaccacacc

SEQ ID NO: 26582 - DNA, 50 bp, synthetic construct
  source 1..50: mol_type = other DNA
aaataaaataacataaaatcaaacctaattactaacaacctcrtatattc

SEQ ID NO: 26583 - DNA, 50 bp, synthetic construct
  source 1..50: mol_type = other DNA
aatcaaacctaattactaacaacctcrtatattcrtaacaaaatttctac

SEQ ID NO: 26584 - DNA, 50 bp, synthetic construct
  source 1..50: mol_type = other DNA
aaacatatcctcaaaccctaaataaaacccaataaaccratactacaaac

SEQ ID NO: 26585 - DNA, 50 bp, synthetic construct
  source 1..50: mol_type = other DNA
aaaaaaaccccaaaacatatcctcaaaccctaaataaaacccaataaacc

SEQ ID NO: 26586 - DNA, 50 bp, synthetic construct
  source 1..50: mol_type = other DNA
aaaacaaaaacacaatcctatctctataactacaaaaaattccccaaaac

SEQ ID NO: 26587 - DNA, 50 bp, synthetic construct
  source 1..50: mol_type = other DNA
aatttaaaataccaaaatcatacccatataacctcatcttcccttaaaac

SEQ ID NO: 26588 - DNA, 50 bp, synthetic construct
  source 1..50: mol_type = other DNA
raaatatacraaaactacaaaaaaaatatccataaaaaccttataacccc

SEQ ID NO: 26589 - DNA, 50 bp, synthetic construct
  source 1..50: mol_type = other DNA
acttaataaaacctcctattattttcttccatataacttcatatcacctc

SEQ ID NO: 26590 - DNA, 50 bp, synthetic construct
  source 1..50: mol_type = other DNA
aactctacatcaaacctcctaaaaactccctaaaatcaaatacttatacc

SEQ ID NO: 26591 - DNA, 50 bp, synthetic construct
  source 1..50: mol_type = other DNA
ctacracttacacrtaactcaatataatcacaaaaaccaatacccttcac

SEQ ID NO: 26592 - DNA, 50 bp, synthetic construct
  source 1..50: mol_type = other DNA
aactaaaaaaaacctaaataaaccccracatacrctaaacctttcaactc

SEQ ID NO: 26593 - DNA, 50 bp, synthetic construct
  source 1..50: mol_type = other DNA
cacattcatacttaataactcctaaaattaacacaaatcccaacctaacc

SEQ ID NO: 26594 - DNA, 50 bp, synthetic construct
  source 1..50: mol_type = other DNA
atatcaattctaaaaaccatcaaacataaatataattctatctcctaaac

SEQ ID NO: 26595 - DNA, 50 bp, synthetic construct
  source 1..50: mol_type = other DNA
taataaaataaaactacaatataaatcataaaaaccccctctatccaccc

SEQ ID NO: 26596 - DNA, 50 bp, synthetic construct
  source 1..50: mol_type = other DNA
cctattcaactaactattataacatcraaaaaacacaaatactatccctc

SEQ ID NO: 26597 - DNA, 50 bp, synthetic construct
  source 1..50: mol_type = other DNA
aaaactacctaaacaaaaaactcccctattcaactaactattataacatc

SEQ ID NO: 26598 - DNA, 50 bp, synthetic construct
  source 1..50: mol_type = other DNA
ccacaaccaatacaataaaaaccctaacaaataataaacctataaaaccc

SEQ ID NO: 26599 - DNA, 50 bp, synthetic construct
  source 1..50: mol_type = other DNA
aacacrtaacccctaacccaaaataactaaaaaccctaaaacaaactaac

SEQ ID NO: 26600 - DNA, 50 bp, synthetic construct
  source 1..50: mol_type = other DNA
atcacctctaactataaaatataaatccaccatactaactaccaccaaac

SEQ ID NO: 26601 - DNA, 50 bp, synthetic construct
  source 1..50: mol_type = other DNA
raccctcccttaaactaacaaaaaataaccccrctacraacaaaataatc

SEQ ID NO: 26602 - DNA, 50 bp, synthetic construct
  source 1..50: mol_type = other DNA
ccaaaaaaacaataacactaccaccctactaaaactatacacaaaataac

SEQ ID NO: 26603 - DNA, 50 bp, synthetic construct
  source 1..50: mol_type = other DNA
ccaataaaataacaataccactatctccttaaaccrttacaaaattaaac

SEQ ID NO: 26604 - DNA, 50 bp, synthetic construct
  source 1..50: mol_type = other DNA
actatctccttaaaccrttacaaaattaaacraatacaaactccccttac

SEQ ID NO: 26605 - DNA, 50 bp, synthetic construct
  source 1..50: mol_type = other DNA
atctatcacccaaatctacttctcaacccataaccataattctattttcc

SEQ ID NO: 26606 - DNA, 50 bp, synthetic construct
  source 1..50: mol_type = other DNA
tttccrtttacaaatctcaataactctattttctccaaaataaaatatac

SEQ ID NO: 26607 - DNA, 50 bp, synthetic construct
  source 1..50: mol_type = other DNA
rtttacaaatctcaataactctattttctccaaaataaaatatacrcacc

SEQ ID NO: 26608 - DNA, 50 bp, synthetic construct
  source 1..50: mol_type = other DNA
aactctattttctccaaaataaaatatacrcaccraaatcctaaccaaac

SEQ ID NO: 26609 - DNA, 50 bp, synthetic construct
  source 1..50: mol_type = other DNA
ccatcaacatcaacctaaacraaacaacaataataaccaaataacctacc

SEQ ID NO: 26610 - DNA, 50 bp, synthetic construct
  source 1..50: mol_type = other DNA
aaccaaacraaatcaatatcracaaactacctaatcattattactacctc

SEQ ID NO: 26611 - DNA, 50 bp, synthetic construct
  source 1..50: mol_type = other DNA
ctaatcattattactacctcrtccaaactaatactaataatcacaaacac

SEQ ID NO: 26612 - DNA, 50 bp, synthetic construct
  source 1..50: mol_type = other DNA
ctcrtccaaactaatactaataatcacaaacacrataacatcaaaaaacc

SEQ ID NO: 26613 - DNA, 50 bp, synthetic construct
  source 1..50: mol_type = other DNA
aatactaataatcacaaacacrataacatcaaaaaaccraaccaacaaac

SEQ ID NO: 26614 - DNA, 50 bp, synthetic construct
  source 1..50: mol_type = other DNA
aacacaccaaaatcaaataaaaaatacccttacaataaactactaacccc

SEQ ID NO: 26615 - DNA, 50 bp, synthetic construct
  source 1..50: mol_type = other DNA
acattttccacctaatcctaatataccccacatacrataacaaaacaaac

SEQ ID NO: 26616 - DNA, 50 bp, synthetic construct
  source 1..50: mol_type = other DNA
taaattaactcttaaacrtaaaaactactacaatacaaaatcaaaaccac

SEQ ID NO: 26617 - DNA, 50 bp, synthetic construct
  source 1..50: mol_type = other DNA
ctttcaatccaaactcttccctaatttaaatactaaattaactcttaaac

SEQ ID NO: 26618 - DNA, 50 bp, synthetic construct
  source 1..50: mol_type = other DNA
aaaatctaaactaaaaacrcaaccrtacttaataaaaaaccrataatctc

SEQ ID NO: 26619 - DNA, 50 bp, synthetic construct
  source 1..50: mol_type = other DNA
aataccrctatctcccacaaaactacaaaacaatataaaccraatatacc

SEQ ID NO: 26620 - DNA, 50 bp, synthetic construct
  source 1..50: mol_type = other DNA
catataattccactaatatcctacaaaacttataaacraatccraatacc

SEQ ID NO: 26621 - DNA, 50 bp, synthetic construct
  source 1..50: mol_type = other DNA
ttccacccatataattccactaatatcctacaaaacttataaacraatcc

SEQ ID NO: 26622 - DNA, 50 bp, synthetic construct
  source 1..50: mol_type = other DNA
ctaaacttccacccatataattccactaatatcctacaaaacttataaac

SEQ ID NO: 26623 - DNA, 50 bp, synthetic construct
  source 1..50: mol_type = other DNA
ctaaaaaccaaacctaaaatctatatccttcaaataaatacctcaatacc

SEQ ID NO: 26624 - DNA, 50 bp, synthetic construct
  source 1..50: mol_type = other DNA
cccctttaactccctaaaatctaaacaaaaaattctaaactctaccctac

SEQ ID NO: 26625 - DNA, 50 bp, synthetic construct
  source 1..50: mol_type = other DNA
ataaaacaacaataatcaaaaaaactccattactaccccaaatcctaacc

SEQ ID NO: 26626 - DNA, 50 bp, synthetic construct
  source 1..50: mol_type = other DNA
acaaaaatccctacrctcaataactctataatactaacccaacctaaaac

SEQ ID NO: 26627 - DNA, 50 bp, synthetic construct
  source 1..50: mol_type = other DNA
ccaacattaccccttaccttaaaaaaatcrccttaaacaaaaatccctac

SEQ ID NO: 26628 - DNA, 50 bp, synthetic construct
  source 1..50: mol_type = other DNA
acctcracatctctaataccaccaacattaccccttaccttaaaaaaatc

SEQ ID NO: 26629 - DNA, 50 bp, synthetic construct
  source 1..50: mol_type = other DNA
aaaacratccctccaaaataaaaaacaatactaataacatcaaaaatatc

SEQ ID NO: 26630 - DNA, 50 bp, synthetic construct
  source 1..50: mol_type = other DNA
taaaaaacaatactaataacatcaaaaatatcraaacaaaacrcccaccc

SEQ ID NO: 26631 - DNA, 50 bp, synthetic construct
  source 1..50: mol_type = other DNA
cctttacttaacctaatatttacttctttcataaataatatactacatcc

SEQ ID NO: 26632 - DNA, 50 bp, synthetic construct
  source 1..50: mol_type = other DNA
aaacccccaaaaataacatataactctcaactactacctttactatcacc

SEQ ID NO: 26633 - DNA, 50 bp, synthetic construct
  source 1..50: mol_type = other DNA
acctttactatcaccrtaaacttccctaacaaacaaaatacaaaaatctc

SEQ ID NO: 26634 - DNA, 50 bp, synthetic construct
  source 1..50: mol_type = other DNA
aaaattaataatattttaaataacaaacaacrtccaccccctactacctc

SEQ ID NO: 26635 - DNA, 50 bp, synthetic construct
  source 1..50: mol_type = other DNA
aacctaacaaacrctaaccataactaaaaaatcccaactattaatcactc

SEQ ID NO: 26636 - DNA, 50 bp, synthetic construct
  source 1..50: mol_type = other DNA
cccacraaccaacttctcaaaaaactatattcttcctaaaccaaaactac

SEQ ID NO: 26637 - DNA, 50 bp, synthetic construct
  source 1..50: mol_type = other DNA
caaaccccaaactaactctaacccaaaatcctaaaacacctataaaaaac

SEQ ID NO: 26638 - DNA, 50 bp, synthetic construct
  source 1..50: mol_type = other DNA
aaaccaaactaaacataaaaccctaataaaaaaatacccaaaaaaacatc

SEQ ID NO: 26639 - DNA, 50 bp, synthetic construct
  source 1..50: mol_type = other DNA
aaacccttaaaaaataccaaaactaaacaatcccctaaaaactctaaaac

SEQ ID NO: 26640 - DNA, 50 bp, synthetic construct
  source 1..50: mol_type = other DNA
aaataccaaaactaaacaatcccctaaaaactctaaaacrctacaaaaac

SEQ ID NO: 26641 - DNA, 50 bp, synthetic construct
  source 1..50: mol_type = other DNA
ctaaaaactctaaaacrctacaaaaacrccaaaacaataaaccaaaatac

SEQ ID NO: 26642 - DNA, 50 bp, synthetic construct
  source 1..50: mol_type = other DNA
aacaacccttcctacccattctaacctacccctaaaattaaaaaataacc

SEQ ID NO: 26643 - DNA, 50 bp, synthetic construct
  source 1..50: mol_type = other DNA
ttattcatctacacaaaaaactataaaatttctacaccraactcctaaac

SEQ ID NO: 26644 - DNA, 50 bp, synthetic construct
  source 1..50: mol_type = other DNA
tccratataaaattattcatctacacaaaaaactataaaatttctacacc

SEQ ID NO: 26645 - DNA, 50 bp, synthetic construct
  source 1..50: mol_type = other DNA
ttaatataaacrctaaaacttacccataatactcttaatatataaaaccc

SEQ ID NO: 26646 - DNA, 50 bp, synthetic construct
  source 1..50: mol_type = other DNA
cracttcaaaaacraaacacaaataaacaaaacaaatactacracttccc

SEQ ID NO: 26647 - DNA, 50 bp, synthetic construct
  source 1..50: mol_type = other DNA
aacractacracttcaaaaacraaacacaaataaacaaaacaaatactac

SEQ ID NO: 26648 - DNA, 50 bp, synthetic construct
  source 1..50: mol_type = other DNA
acaaatatacatatcaaactacccaacctaaacaaacataaaaaattctc

SEQ ID NO: 26649 - DNA, 50 bp, synthetic construct
  source 1..50: mol_type = other DNA
aaacttctcatacttacccaaattaaacaacttaatatacacacctaccc

SEQ ID NO: 26650 - DNA, 50 bp, synthetic construct
  source 1..50: mol_type = other DNA
aaaaaaataaaatcatacctttaaccactttacccactcccccttaaacc

SEQ ID NO: 26651 - DNA, 50 bp, synthetic construct
  source 1..50: mol_type = other DNA
tcccccttaaaccraaacatcaacattaactataccacaaaataatatac

SEQ ID NO: 26652 - DNA, 50 bp, synthetic construct
  source 1..50: mol_type = other DNA
acttatcaaaaaacaactctcaaactttatcctcttaaacrcaaaaaatc

SEQ ID NO: 26653 - DNA, 50 bp, synthetic construct
  source 1..50: mol_type = other DNA
aaactaaaaaacttatcaaaaaacaactctcaaactttatcctcttaaac

SEQ ID NO: 26654 - DNA, 50 bp, synthetic construct
  source 1..50: mol_type = other DNA
caaaacttaaaaactattttctaacaaaccctttaatctacttccaacac

SEQ ID NO: 26655 - DNA, 50 bp, synthetic construct
  source 1..50: mol_type = other DNA
acaaaaaaccttctataactcactcctctactaaaaacraaaaactcaac

SEQ ID NO: 26656 - DNA, 50 bp, synthetic construct
  source 1..50: mol_type = other DNA
caaatatacaaaacaaaaaaccttctataactcactcctctactaaaaac

SEQ ID NO: 26657 - DNA, 50 bp, synthetic construct
  source 1..50: mol_type = other DNA
taaaaaaaatcaacaaacaaaaaactatcatacaatctaccaaaaattac

SEQ ID NO: 26658 - DNA, 50 bp, synthetic construct
  source 1..50: mol_type = other DNA
acttaaaccacactcccacataacaactctcaaaattattctattttctc

SEQ ID NO: 26659 - DNA, 50 bp, synthetic construct
  source 1..50: mol_type = other DNA
cataacaactctcaaaattattctattttctcrtattttatatctttacc

SEQ ID NO: 26660 - DNA, 50 bp, synthetic construct
  source 1..50: mol_type = other DNA
ctataacactaccaacctaaaccatataacataaatacacacacttacac

SEQ ID NO: 26661 - DNA, 50 bp, synthetic construct
  source 1..50: mol_type = other DNA
ctaccaacctaaaccatataacataaatacacacacttacacraactaac

SEQ ID NO: 26662 - DNA, 50 bp, synthetic construct
  source 1..50: mol_type = other DNA
cacacttacacraactaacrttttctacataactttaaaaattacatccc

SEQ ID NO: 26663 - DNA, 50 bp, synthetic construct
  source 1..50: mol_type = other DNA
tcaaaatttacatttcacacaaattcccacaatactaaaactactaaccc

SEQ ID NO: 26664 - DNA, 50 bp, synthetic construct
  source 1..50: mol_type = other DNA
aaattcccacaatactaaaactactaacccraaaccactttttaaaaatc

SEQ ID NO: 26665 - DNA, 50 bp, synthetic construct
  source 1..50: mol_type = other DNA
tatttaactaactcctaacaataactatactaaaaaattttaaataccac

SEQ ID NO: 26666 - DNA, 50 bp, synthetic construct
  source 1..50: mol_type = other DNA
ataactatactaaaaaattttaaataccacrtattcaaacaaaacaattc

SEQ ID NO: 26667 - DNA, 50 bp, synthetic construct
  source 1..50: mol_type = other DNA
tctttttaaaaaaactacacaaccttccctcaaacccccttttacraaac

SEQ ID NO: 26668 - DNA, 50 bp, synthetic construct
  source 1..50: mol_type = other DNA
ttaactctttttaaaaaaactacacaaccttccctcaaacccccttttac

SEQ ID NO: 26669 - DNA, 50 bp, synthetic construct
  source 1..50: mol_type = other DNA
taaaaaccaacaaaactaaataacctatcttaaaaatataaaaccrcccc

SEQ ID NO: 26670 - DNA, 50 bp, synthetic construct
  source 1..50: mol_type = other DNA
tcctaaataataacrtccaccaaccttaaaaataccttttcaaaacaccc

SEQ ID NO: 26671 - DNA, 50 bp, synthetic construct
  source 1..50: mol_type = other DNA
aataacrtccaccaaccttaaaaataccttttcaaaacacccraaaaacc

SEQ ID NO: 26672 - DNA, 50 bp, synthetic construct
  source 1..50: mol_type = other DNA
aaaaaccatcaataattactctcactaaaacctaataataacrtaacctc

SEQ ID NO: 26673 - DNA, 50 bp, synthetic construct
  source 1..50: mol_type = other DNA
ctaataataacrtaacctcrtatttacttaaactcaaaattaaaaccccc

SEQ ID NO: 26674 - DNA, 50 bp, synthetic construct
  source 1..50: mol_type = other DNA
cattaccctcaaataaacctatcrattctaaaatattctacctactatac

SEQ ID NO: 26675 - DNA, 50 bp, synthetic construct
  source 1..50: mol_type = other DNA
ataacaaaactaaactaaaacacaatcaaaacraaaaacaaccaaccaac

SEQ ID NO: 26676 - DNA, 50 bp, synthetic construct
  source 1..50: mol_type = other DNA
aaacatctaaaaaatccaactaacaactctaccaaaaactccctacccac

SEQ ID NO: 26677 - DNA, 50 bp, synthetic construct
  source 1..50: mol_type = other DNA
tcrtatttacraatataaactttccaattaaacaaacttaattcaacacc

SEQ ID NO: 26678 - DNA, 50 bp, synthetic construct
  source 1..50: mol_type = other DNA
ttacraatataaactttccaattaaacaaacttaattcaacaccrcctcc

SEQ ID NO: 26679 - DNA, 50 bp, synthetic construct
  source 1..50: mol_type = other DNA
aaaacaaacactactatcattcctacttaacaaataaaaaaaccaaaacc

SEQ ID NO: 26680 - DNA, 50 bp, synthetic construct
  source 1..50: mol_type = other DNA
aaaaactccaaaccccatcccrcctatataacctaataactaattaattc

SEQ ID NO: 26681 - DNA, 50 bp, synthetic construct
  source 1..50: mol_type = other DNA
aaaacacctaaaactaaatctaaaattacaaaaactccaaaccccatccc

SEQ ID NO: 26682 - DNA, 50 bp, synthetic construct
  source 1..50: mol_type = other DNA
ttatttctcctaaaataacaaaccccraaccaatacctacaaacccaaac

SEQ ID NO: 26683 - DNA, 50 bp, synthetic construct
  source 1..50: mol_type = other DNA
caaacactaactcraaacctactatcccaaaaaaaacaatcatctaactc

SEQ ID NO: 26684 - DNA, 50 bp, synthetic construct
  source 1..50: mol_type = other DNA
craaacctactatcccaaaaaaaacaatcatctaactcrttatcaaactc

SEQ ID NO: 26685 - DNA, 50 bp, synthetic construct
  source 1..50: mol_type = other DNA
aatcatctaactcrttatcaaactcraatttcttacctcctcaaaaaaac

SEQ ID NO: 26686 - DNA, 50 bp, synthetic construct
  source 1..50: mol_type = other DNA
aacctacaaaatcaacccttctaaaacaacaccactacccaattacaatc

SEQ ID NO: 26687 - DNA, 50 bp, synthetic construct
  source 1..50: mol_type = other DNA
caacaataactttaaaaattataactcataaaaacacaaaaactctaaac

SEQ ID NO: 26688 - DNA, 50 bp, synthetic construct
  source 1..50: mol_type = other DNA
aacraatattacaataaaccraaatcctaccataacactccaacataaac

SEQ ID NO: 26689 - DNA, 50 bp, synthetic construct
  source 1..50: mol_type = other DNA
ttattttctccctaaaaacattacaactactaaaaaactacttttcacac

SEQ ID NO: 26690 - DNA, 50 bp, synthetic construct
  source 1..50: mol_type = other DNA
aaaccactataattacatataactacrattcacctcttccccaatactcc

SEQ ID NO: 26691 - DNA, 50 bp, synthetic construct
  source 1..50: mol_type = other DNA
ttctccttacaactccttaaatttttacctccratattatttaaaaaaac

SEQ ID NO: 26692 - DNA, 50 bp, synthetic construct
  source 1..50: mol_type = other DNA
aaaaaaacttactaacaaccraaaaaccacaaaaacttaaaactacacrc

SEQ ID NO: 26693 - DNA, 50 bp, synthetic construct
  source 1..50: mol_type = other DNA
aaaaaaaaacttactaacaaccraaaaaccacaaaaacttaaaactacac

SEQ ID NO: 26694 - DNA, 50 bp, synthetic construct
  source 1..50: mol_type = other DNA
ratcctaaaaaaaacractcctccaacctaaatactcaactataacaaac

SEQ ID NO: 26695 - DNA, 50 bp, synthetic construct
  source 1..50: mol_type = other DNA
ccaacctaaatactcaactataacaaacrcccractaacctacaaaaaac

SEQ ID NO: 26696 - DNA, 50 bp, synthetic construct
  source 1..50: mol_type = other DNA
tttaaattttatatataacaacaacraattctaaataccaatttctcctc

SEQ ID NO: 26697 - DNA, 50 bp, synthetic construct
  source 1..50: mol_type = other DNA
cataataaaactaaataaactaaaacaacacrttctaaacaacccaaaac

SEQ ID NO: 26698 - DNA, 50 bp, synthetic construct
  source 1..50: mol_type = other DNA
aaataaactaaaacaacacrttctaaacaacccaaaacrcccaaattccc

SEQ ID NO: 26699 - DNA, 50 bp, synthetic construct
  source 1..50: mol_type = other DNA
cacccataccttaacatctaaatcattttttattaataataacttaaccc

SEQ ID NO: 26700 - DNA, 50 bp, synthetic construct
  source 1..50: mol_type = other DNA
ttttattaataataacttaacccracttaaaaacttcacacacacctccc

SEQ ID NO: 26701 - DNA, 50 bp, synthetic construct
  source 1..50: mol_type = other DNA
tataaacaacrcaatcccrtaatacaataaaaaaatactataactaaacc

SEQ ID NO: 26702 - DNA, 50 bp, synthetic construct
  source 1..50: mol_type = other DNA
taaaaaaactccccaaaaatcaaaaataaccctataaacaacrcaatccc

SEQ ID NO: 26703 - DNA, 50 bp, synthetic construct
  source 1..50: mol_type = other DNA
aacctacctaaaaaaactccccaaaaatcaaaaataaccctataaacaac

SEQ ID NO: 26704 - DNA, 50 bp, synthetic construct
  source 1..50: mol_type = other DNA
aatccctccaaataaaccaaaccaaacctatactctataatacaatccac

SEQ ID NO: 26705 - DNA, 50 bp, synthetic construct
  source 1..50: mol_type = other DNA
ctccctctaacrataactaaactaaataaactaaacaaattaaacattac

SEQ ID NO: 26706 - DNA, 50 bp, synthetic construct
  source 1..50: mol_type = other DNA
actatctaaaaatcccttatactaacaaaaaattaactacatccttatcc

SEQ ID NO: 26707 - DNA, 50 bp, synthetic construct
  source 1..50: mol_type = other DNA
acaaccccraactctactaactaaacttataaaaacccctaactaaaacc

SEQ ID NO: 26708 - DNA, 50 bp, synthetic construct
  source 1..50: mol_type = other DNA
atctccrccttccaaaaataaaaacrtataaaaactacrctctaaaaacc

SEQ ID NO: 26709 - DNA, 50 bp, synthetic construct
  source 1..50: mol_type = other DNA
ctcactataacratctccrccttccaaaaataaaaacrtataaaaactac

SEQ ID NO: 26710 - DNA, 50 bp, synthetic construct
  source 1..50: mol_type = other DNA
actaacttaactcctcactataacratctccrccttccaaaaataaaaac

SEQ ID NO: 26711 - DNA, 50 bp, synthetic construct
  source 1..50: mol_type = other DNA
atttttctatattacctcaactaacttaactcctcactataacratctcc

SEQ ID NO: 26712 - DNA, 50 bp, synthetic construct
  source 1..50: mol_type = other DNA
aacraaaatttttctatattacctcaactaacttaactcctcactataac

SEQ ID NO: 26713 - DNA, 50 bp, synthetic construct
  source 1..50: mol_type = other DNA
caactaaaacaacacaaaaaaacccccrttcctacccaaaaccaaaaaac

SEQ ID NO: 26714 - DNA, 50 bp, synthetic construct
  source 1..50: mol_type = other DNA
tctatcacccaaactaaatacaataacaatctcractcactataacttac

SEQ ID NO: 26715 - DNA, 50 bp, synthetic construct
  source 1..50: mol_type = other DNA
aaactacaataaaccraaactaccactacactcaatctaaataacaaaac

SEQ ID NO: 26716 - DNA, 50 bp, synthetic construct
  source 1..50: mol_type = other DNA
ttaatttaaattccctaatttcccctaaaaaatctaaccaaaaactaccc

SEQ ID NO: 26717 - DNA, 50 bp, synthetic construct
  source 1..50: mol_type = other DNA
caaataaacaaaacttaatacctctaccrtaacccctactaaaacaaccc

SEQ ID NO: 26718 - DNA, 50 bp, synthetic construct
  source 1..50: mol_type = other DNA
craaacctctaaaccaaaaaacccrttaaccrtaattaataaaaataaac

SEQ ID NO: 26719 - DNA, 50 bp, synthetic construct
  source 1..50: mol_type = other DNA
ccaaatccractctcataccattaccaaacaaaatataaaactcacccac

SEQ ID NO: 26720 - DNA, 50 bp, synthetic construct
  source 1..50: mol_type = other DNA
taacaataatataaaaatcraacctaaacaaaaccaactactaaaaaaac

SEQ ID NO: 26721 - DNA, 50 bp, synthetic construct
  source 1..50: mol_type = other DNA
ctttattcctccccctccaacctttacctaaaaactaatccttatttacc

SEQ ID NO: 26722 - DNA, 50 bp, synthetic construct
  source 1..50: mol_type = other DNA
aaaaactaatccttatttaccraacttctcraaaaattcactatacattc

SEQ ID NO: 26723 - DNA, 50 bp, synthetic construct
  source 1..50: mol_type = other DNA
ttatcataaaatttattctaataaatcattcttctatcacataacaacac

SEQ ID NO: 26724 - DNA, 50 bp, synthetic construct
  source 1..50: mol_type = other DNA
taaaacaaaccaaaaataactacaattcaaaaatactaccaccaaaaaac

SEQ ID NO: 26725 - DNA, 50 bp, synthetic construct
  source 1..50: mol_type = other DNA
acaaaaaaattaatttataaaaactattcaataaaacaacatccraaaac

SEQ ID NO: 26726 - DNA, 50 bp, synthetic construct
  source 1..50: mol_type = other DNA
aacaaaaatactcttaaaataaacaaacataaccctaaaaatacctctac

SEQ ID NO: 26727 - DNA, 50 bp, synthetic construct
  source 1..50: mol_type = other DNA
aacctaacaaaactaaaaaataatatctcctaaaaaaaattctctcaaac

SEQ ID NO: 26728 - DNA, 50 bp, synthetic construct
  source 1..50: mol_type = other DNA
aaacaaacaaaactaaatcaataccaaaaaacatcaacactcacccccac

SEQ ID NO: 26729 - DNA, 50 bp, synthetic construct
  source 1..50: mol_type = other DNA
tataactctactaaaaaattataaaaaccaaaaatctaaacctaaccccc

SEQ ID NO: 26730 - DNA, 50 bp, synthetic construct
  source 1..50: mol_type = other DNA
aaaaaatcrtattataaaattaccaaaaatacaattcttaaactaacacc

SEQ ID NO: 26731 - DNA, 50 bp, synthetic construct
  source 1..50: mol_type = other DNA
aaacaaaacrataaaactaaccaaattctatctatacaaattaaaaatac

SEQ ID NO: 26732 - DNA, 50 bp, synthetic construct
  source 1..50: mol_type = other DNA
aaaaaactaaaaccaaaaaataacttacctaccattacccttaacttaac

SEQ ID NO: 26733 - DNA, 50 bp, synthetic construct
  source 1..50: mol_type = other DNA
tatatacacacrtatatactcacaaaatatacrtactcaaatactaaaac

SEQ ID NO: 26734 - DNA, 50 bp, synthetic construct
  source 1..50: mol_type = other DNA
aataaacaccaaatttccaacccraaaacaataactcccacaaaactccc

SEQ ID NO: 26735 - DNA, 50 bp, synthetic construct
  source 1..50: mol_type = other DNA
acccaaaataaaaccataaaaacraaaaccctataaaaatcactaccctc

SEQ ID NO: 26736 - DNA, 50 bp, synthetic construct
  source 1..50: mol_type = other DNA
taacaccttcttcataaaattccacractaaataaaacccaaatacracc

SEQ ID NO: 26737 - DNA, 50 bp, synthetic construct
  source 1..50: mol_type = other DNA
crcttaacaccttcttcataaaattccacractaaataaaacccaaatac

SEQ ID NO: 26738 - DNA, 50 bp, synthetic construct
  source 1..50: mol_type = other DNA
aacraactaactatcataaaaccttcaaacttccctaaacaacatccccc

SEQ ID NO: 26739 - DNA, 50 bp, synthetic construct
  source 1..50: mol_type = other DNA
accaaataaaattaaaacccctttatttaaaaccacaaccttcratcctc

SEQ ID NO: 26740 - DNA, 50 bp, synthetic construct
  source 1..50: mol_type = other DNA
cacccccaccaaataaaattaaaacccctttatttaaaaccacaaccttc

SEQ ID NO: 26741 - DNA, 50 bp, synthetic construct
  source 1..50: mol_type = other DNA
aactatatccrtataaaccctaccractaaaaaaactatcaaataataac

SEQ ID NO: 26742 - DNA, 50 bp, synthetic construct
  source 1..50: mol_type = other DNA
acaaaacacttaaaaaacccttactaaactatatccrtataaaccctacc

SEQ ID NO: 26743 - DNA, 50 bp, synthetic construct
  source 1..50: mol_type = other DNA
tatattattcatacctcccctttttaaaccatataaaataacttcctaac

SEQ ID NO: 26744 - DNA, 50 bp, synthetic construct
  source 1..50: mol_type = other DNA
tacaatctataaatctctacttacrctaaaatcaaacracaactaatcac

SEQ ID NO: 26745 - DNA, 50 bp, synthetic construct
  source 1..50: mol_type = other DNA
tttcaaacaacccacctttcttaacttacaatctataaatctctacttac

SEQ ID NO: 26746 - DNA, 50 bp, synthetic construct
  source 1..50: mol_type = other DNA
rtaaaacaacttaaaaattacaaacaatccaaccaaatacrataacttac

SEQ ID NO: 26747 - DNA, 50 bp, synthetic construct
  source 1..50: mol_type = other DNA
accaacaaccrtaaaacaacttaaaaattacaaacaatccaaccaaatac

SEQ ID NO: 26748 - DNA, 50 bp, synthetic construct
  source 1..50: mol_type = other DNA
aaaactaataactccacatttccctccctaaaatttatctcaaacrtaac

SEQ ID NO: 26749 - DNA, 50 bp, synthetic construct
  source 1..50: mol_type = other DNA
cacaaactaaaaataaaaactaaaccattacccaatactaatctctaccc

SEQ ID NO: 26750 - DNA, 50 bp, synthetic construct
  source 1..50: mol_type = other DNA
aaacaacaccaaacrcccaaaaatctctaaataaaacaattataactacc

SEQ ID NO: 26751 - DNA, 50 bp, synthetic construct
  source 1..50: mol_type = other DNA
atcctaaacttctaaccacaaaaaaaccaacataaactaaaacctaacac

SEQ ID NO: 26752 - DNA, 50 bp, synthetic construct
  source 1..50: mol_type = other DNA
cctaaacttctaaccacaaaaaaaccaacataaactaaaacctaacacrc

SEQ ID NO: 26753 - DNA, 50 bp, synthetic construct
  source 1..50: mol_type = other DNA
atactctcaataaacctaaacacttaaaaaacctatatatatacatacrc

SEQ ID NO: 26754 - DNA, 50 bp, synthetic construct
  source 1..50: mol_type = other DNA
ctaaaaaattacatacctcactcataaacttacaaaacccaacccctaac

SEQ ID NO: 26755 - DNA, 50 bp, synthetic construct
  source 1..50: mol_type = other DNA
craatactacctcaacactaccaacrccaatacaaactaactaaataaac

SEQ ID NO: 26756 - DNA, 50 bp, synthetic construct
  source 1..50: mol_type = other DNA
cacccaatcaacctacactaacrttaacaatactaaaacaacatccraac

SEQ ID NO: 26757 - DNA, 50 bp, synthetic construct
  source 1..50: mol_type = other DNA
aaaaatacaaacactttaaataaaccaaatccaaattttaaacaactccc

SEQ ID NO: 26758 - DNA, 50 bp, synthetic construct
  source 1..50: mol_type = other DNA
accttctaaaataatctataactaatatataaacaaccaaatctactacc

SEQ ID NO: 26759 - DNA, 50 bp, synthetic construct
  source 1..50: mol_type = other DNA
ctataactaacaacactaaaaacaaaaataactaatcccttaaaaaaatc

SEQ ID NO: 26760 - DNA, 50 bp, synthetic construct
  source 1..50: mol_type = other DNA
tcccttaaaaaaatcrtaacaaactcaacctaataatctaaaaaaaactc

SEQ ID NO: 26761 - DNA, 50 bp, synthetic construct
  source 1..50: mol_type = other DNA
cctaataatctaaaaaaaactcraaaataaattataacaactttcctacc

SEQ ID NO: 26762 - DNA, 50 bp, synthetic construct
  source 1..50: mol_type = other DNA
caaatactaaaaaacatacataccccaacactaataaataacaaaaccac

SEQ ID NO: 26763 - DNA, 50 bp, synthetic construct
  source 1..50: mol_type = other DNA
cactaataaataacaaaaccacraaaaaataacacaaacctccctaaaac

SEQ ID NO: 26764 - DNA, 50 bp, synthetic construct
  source 1..50: mol_type = other DNA
atcttcrtactaaaaatcaaactctacttcatcttccaaaactacaaaac

SEQ ID NO: 26765 - DNA, 50 bp, synthetic construct
  source 1..50: mol_type = other DNA
crtactaaaaatcaaactctacttcatcttccaaaactacaaaacracrc

SEQ ID NO: 26766 - DNA, 50 bp, synthetic construct
  source 1..50: mol_type = other DNA
acrctaaacctactaaacctactaaacatacaaaccaacctataaaaacc

SEQ ID NO: 26767 - DNA, 50 bp, synthetic construct
  source 1..50: mol_type = other DNA
aaaacctcaccttcttctactactacatactactactaatactaccrtac

SEQ ID NO: 26768 - DNA, 50 bp, synthetic construct
  source 1..50: mol_type = other DNA
ctcaccttcttctactactacatactactactaatactaccrtacrtaac

SEQ ID NO: 26769 - DNA, 50 bp, synthetic construct
  source 1..50: mol_type = other DNA
acataacaaaaaaatcttcactaaatacactctatcccaaaaaactcaac

SEQ ID NO: 26770 - DNA, 50 bp, synthetic construct
  source 1..50: mol_type = other DNA
craacaaaaacaaaattttacttatacacctcctcctaaataacacraac

SEQ ID NO: 26771 - DNA, 50 bp, synthetic construct
  source 1..50: mol_type = other DNA
aacaaaaacaaaattttacttatacacctcctcctaaataacacraacrc

SEQ ID NO: 26772 - DNA, 50 bp, synthetic construct
  source 1..50: mol_type = other DNA
aaaaaaatattactaaccctaaattacaaacctaactttatttaattaac

SEQ ID NO: 26773 - DNA, 50 bp, synthetic construct
  source 1..50: mol_type = other DNA
aatctcatcccctctactatataaactataccttacctcttactctatac

SEQ ID NO: 26774 - DNA, 50 bp, synthetic construct
  source 1..50: mol_type = other DNA
aaaaaataaattttcctatctctcctttaatataaataaacttccctatc

SEQ ID NO: 26775 - DNA, 50 bp, synthetic construct
  source 1..50: mol_type = other DNA
cacrtcaaaaacaataacacrcaaaatttcaataatattatctaaaaacc

SEQ ID NO: 26776 - DNA, 50 bp, synthetic construct
  source 1..50: mol_type = other DNA
aaaaaacaaactacctatattaaactaactcacrtcaaaaacaataacac

SEQ ID NO: 26777 - DNA, 50 bp, synthetic construct
  source 1..50: mol_type = other DNA
tttttcttttttctcrtatcaacattaaattaacaacttatactctttcc

SEQ ID NO: 26778 - DNA, 50 bp, synthetic construct
  source 1..50: mol_type = other DNA
tctcrtatcaacattaaattaacaacttatactctttccractttttcac

SEQ ID NO: 26779 - DNA, 50 bp, synthetic construct
  source 1..50: mol_type = other DNA
atatatttaatttttctaaaccaaaatcttactctatccccaaactaaac

SEQ ID NO: 26780 - DNA, 50 bp, synthetic construct
  source 1..50: mol_type = other DNA
ttactctatccccaaactaaacratacaatctaaactcactacaacttcc

SEQ ID NO: 26781 - DNA, 50 bp, synthetic construct
  source 1..50: mol_type = other DNA
crcttaaatccaaaattaaaaaaccaaccratataacataataaaacccc

SEQ ID NO: 26782 - DNA, 50 bp, synthetic construct
  source 1..50: mol_type = other DNA
craaatttcaccatattacaccractaatctcctaattctaaacttaaac

SEQ ID NO: 26783 - DNA, 50 bp, synthetic construct
  source 1..50: mol_type = other DNA
tctcctaattctaaacttaaacratccaaccaccttaacctccaaaatac

SEQ ID NO: 26784 - DNA, 50 bp, synthetic construct
  source 1..50: mol_type = other DNA
tctttactacctaatttccactactatctaaattaacttaaacccractc

SEQ ID NO: 26785 - DNA, 50 bp, synthetic construct
  source 1..50: mol_type = other DNA
craaatctttactacctaatttccactactatctaaattaacttaaaccc

SEQ ID NO: 26786 - DNA, 50 bp, synthetic construct
  source 1..50: mol_type = other DNA
craacctaaactaacttaaataacaataaaaaccaaataataaaaatttc

SEQ ID NO: 26787 - DNA, 50 bp, synthetic construct
  source 1..50: mol_type = other DNA
tctcaactactcaacaataaccaactaaataaaacccrtaaaaaaacccc

SEQ ID NO: 26788 - DNA, 50 bp, synthetic construct
  source 1..50: mol_type = other DNA
atacaaaatctctctaaaaataaaatatctaaaaaattactaccctatac

SEQ ID NO: 26789 - DNA, 50 bp, synthetic construct
  source 1..50: mol_type = other DNA
ttattaaattattctttaaaacrctttccaatctaataaaaaactctaac

SEQ ID NO: 26790 - DNA, 50 bp, synthetic construct
  source 1..50: mol_type = other DNA
aaacrctttccaatctaataaaaaactctaacrtattcrctcaaatttcc

SEQ ID NO: 26791 - DNA, 50 bp, synthetic construct
  source 1..50: mol_type = other DNA
atccaatacacraaaaattaacraaataacaaaaaacccaaactatcacc

SEQ ID NO: 26792 - DNA, 50 bp, synthetic construct
  source 1..50: mol_type = other DNA
aaataactcaattcaaatatacrataacaacctaaatttcctaccatttc

SEQ ID NO: 26793 - DNA, 50 bp, synthetic construct
  source 1..50: mol_type = other DNA
ttcaaatatacrataacaacctaaatttcctaccatttcrttaacccctc

SEQ ID NO: 26794 - DNA, 50 bp, synthetic construct
  source 1..50: mol_type = other DNA
cataacctatctcactaaccaccaacaacaacacctatatccctatcaac

SEQ ID NO: 26795 - DNA, 50 bp, synthetic construct
  source 1..50: mol_type = other DNA
ccctcrtaaatacatcctaatccacttatttttttcatccctaccccaac

SEQ ID NO: 26796 - DNA, 50 bp, synthetic construct
  source 1..50: mol_type = other DNA
tctcaaaattctcctcccaaacttacactccaatctctataaataacatc

SEQ ID NO: 26797 - DNA, 50 bp, synthetic construct
  source 1..50: mol_type = other DNA
atacrattcaacattaattaacacaacactaaatcaatcctaccaaccac

SEQ ID NO: 26798 - DNA, 50 bp, synthetic construct
  source 1..50: mol_type = other DNA
aaacrtaattaataaaactaacccaatattatatcaatcaatactaaatc

SEQ ID NO: 26799 - DNA, 50 bp, synthetic construct
  source 1..50: mol_type = other DNA
aataactttcaaaactaaactaccaattctcataactcaattttacaaac

SEQ ID NO: 26800 - DNA, 50 bp, synthetic construct
  source 1..50: mol_type = other DNA
caaaaactaacatactcctaaccaaaccctacaaactaaataatactaac

SEQ ID NO: 26801 - DNA, 50 bp, synthetic construct
  source 1..50: mol_type = other DNA
aacatactcctaaccaaaccctacaaactaaataatactaacraaaacac

SEQ ID NO: 26802 - DNA, 50 bp, synthetic construct
  source 1..50: mol_type = other DNA
tattttctacatcaccatttcccatttaataattttcctactcttctctc

SEQ ID NO: 26803 - DNA, 50 bp, synthetic construct
  source 1..50: mol_type = other DNA
acaaaaaaaacatactacttcctatttccctcractaaaatcccaaaaac

SEQ ID NO: 26804 - DNA, 50 bp, synthetic construct
  source 1..50: mol_type = other DNA
caaaacaaaacaaaacacaatctccattataaataactaattaaaattac

SEQ ID NO: 26805 - DNA, 50 bp, synthetic construct
  source 1..50: mol_type = other DNA
ccccraaatttaattaaaattaatctacatctctaaccaaaatctcatac

SEQ ID NO: 26806 - DNA, 50 bp, synthetic construct
  source 1..50: mol_type = other DNA
acctcttaactaaaatattaacrcaaaaactctaaaaacccraacctccc

SEQ ID NO: 26807 - DNA, 50 bp, synthetic construct
  source 1..50: mol_type = other DNA
cacactacaaacactcaaaaaattaatcccrtactcttttacctaccttc

SEQ ID NO: 26808 - DNA, 50 bp, synthetic construct
  source 1..50: mol_type = other DNA
ttcaaaaacraacactataacacactacaaacactcaaaaaattaatccc

SEQ ID NO: 26809 - DNA, 50 bp, synthetic construct
  source 1..50: mol_type = other DNA
aaaaaacacraaaccaaccctttaaatatctacaatatactacaatactc

SEQ ID NO: 26810 - DNA, 50 bp, synthetic construct
  source 1..50: mol_type = other DNA
tctcataataaatcacctaaaataccrataacatacactcccaactacac

SEQ ID NO: 26811 - DNA, 50 bp, synthetic construct
  source 1..50: mol_type = other DNA
aaacaaatttctaaacaattcaactctcataataaatcacctaaaatacc

SEQ ID NO: 26812 - DNA, 50 bp, synthetic construct
  source 1..50: mol_type = other DNA
tcaaaaataactaaaaaaacaaaacacaaaataataactttactacaacc

SEQ ID NO: 26813 - DNA, 50 bp, synthetic construct
  source 1..50: mol_type = other DNA
acaaaacacaaaataataactttactacaaccrtaaactctaaaatatcc

SEQ ID NO: 26814 - DNA, 50 bp, synthetic construct
  source 1..50: mol_type = other DNA
ttctttcctaacctaaatacctccatttaaaaaccctcctaaaaaaaacc

SEQ ID NO: 26815 - DNA, 50 bp, synthetic construct
  source 1..50: mol_type = other DNA
aacaaaacaaatccttaactacaaccccctccaaaaaactacaatacacc

SEQ ID NO: 26816 - DNA, 50 bp, synthetic construct
  source 1..50: mol_type = other DNA
caaattcaattccttttatatatttcttcttccctttaataaatactttc

SEQ ID NO: 26817 - DNA, 50 bp, synthetic construct
  source 1..50: mol_type = other DNA
ttccttttatatatttcttcttccctttaataaatactttcrtaaaacac

SEQ ID NO: 26818 - DNA, 50 bp, synthetic construct
  source 1..50: mol_type = other DNA
ataatctaatattctacccttaatcataaaactaaacatatttctaaccc

SEQ ID NO: 26819 - DNA, 50 bp, synthetic construct
  source 1..50: mol_type = other DNA
tctatatacaacrataccaccaaccacrcaaataacaaaacaataacacc

SEQ ID NO: 26820 - DNA, 50 bp, synthetic construct
  source 1..50: mol_type = other DNA
ccraatacacacactaccatccatacaaaatacaaaaaaccaaacaaaac

SEQ ID NO: 26821 - DNA, 50 bp, synthetic construct
  source 1..50: mol_type = other DNA
aaactactaaattaaactaaacctaaacactaccraacraacttctctac

SEQ ID NO: 26822 - DNA, 50 bp, synthetic construct
  source 1..50: mol_type = other DNA
aattaaactaaacctaaacactaccraacraacttctctacraactaaac

SEQ ID NO: 26823 - DNA, 50 bp, synthetic construct
  source 1..50: mol_type = other DNA
acatttatactaccaatatcaaactattaccaaacctataacttaatacc

SEQ ID NO: 26824 - DNA, 50 bp, synthetic construct
  source 1..50: mol_type = other DNA
aaaaaactaaaaaatcaaatatttataccaactactccttacaatactac

SEQ ID NO: 26825 - DNA, 50 bp, synthetic construct
  source 1..50: mol_type = other DNA
aaaaaccaatatactactttcatttccacaaaaactttaacaaaactaac

SEQ ID NO: 26826 - DNA, 50 bp, synthetic construct
  source 1..50: mol_type = other DNA
ataacatcaaaaaccttcccaatacaactaactaccaatttctcattatc

SEQ ID NO: 26827 - DNA, 50 bp, synthetic construct
  source 1..50: mol_type = other DNA
aaaaataaaacttatttatcatcccctacctaaaaaattccactaacccc

SEQ ID NO: 26828 - DNA, 50 bp, synthetic construct
  source 1..50: mol_type = other DNA
aaacacctaaccaattctattatctatactattcacaaatacctaatctc

SEQ ID NO: 26829 - DNA, 50 bp, synthetic construct
  source 1..50: mol_type = other DNA
ataaactaacattaaataataacccaactactaaactaaaaaatacacac

SEQ ID NO: 26830 - DNA, 50 bp, synthetic construct
  source 1..50: mol_type = other DNA
actcactaaaaatcatataccactatataataaccaaaataaaataaaac

SEQ ID NO: 26831 - DNA, 50 bp, synthetic construct
  source 1..50: mol_type = other DNA
aaatctcttacctaaatttcaatcaacttctaatacaactacttattaac

SEQ ID NO: 26832 - DNA, 50 bp, synthetic construct
  source 1..50: mol_type = other DNA
aaaacacaaataaaaaactcctaaaaaatcccaaacatctactaaactcc

SEQ ID NO: 26833 - DNA, 50 bp, synthetic construct
  source 1..50: mol_type = other DNA
cctatacttcaaaaataaataaatttaccttctataactctatcttaccc

SEQ ID NO: 26834 - DNA, 50 bp, synthetic construct
  source 1..50: mol_type = other DNA
tataactctatcttacccraaacctaatctctaaacaataacaaatcccc

SEQ ID NO: 26835 - DNA, 50 bp, synthetic construct
  source 1..50: mol_type = other DNA
ccaacrtcccaaataataaaccatattaatctaaccacaaccctactacc

SEQ ID NO: 26836 - DNA, 50 bp, synthetic construct
  source 1..50: mol_type = other DNA
aaaacracaacaaaactataatcaaactaacataatctaccatctaaaac

SEQ ID NO: 26837 - DNA, 50 bp, synthetic construct
  source 1..50: mol_type = other DNA
ataataactcacacttactaactacttactaaacrctaaaataaatacac

SEQ ID NO: 26838 - DNA, 50 bp, synthetic construct
  source 1..50: mol_type = other DNA
caacctaaccactcttataataactcacacttactaactacttactaaac

SEQ ID NO: 26839 - DNA, 50 bp, synthetic construct
  source 1..50: mol_type = other DNA
ccccatacttctatactataatttttctcaataaaaattaactcraaaac

SEQ ID NO: 26840 - DNA, 50 bp, synthetic construct
  source 1..50: mol_type = other DNA
actaaaccccatacttctatactataatttttctcaataaaaattaactc

SEQ ID NO: 26841 - DNA, 50 bp, synthetic construct
  source 1..50: mol_type = other DNA
aacaaatcaaactataataccaaaccacaaaaatcraacccaacaactcc

SEQ ID NO: 26842 - DNA, 50 bp, synthetic construct
  source 1..50: mol_type = other DNA
tacaaacaaatttctcttaaaaaataacrccctcacacaatccaaaaccc

SEQ ID NO: 26843 - DNA, 50 bp, synthetic construct
  source 1..50: mol_type = other DNA
aacaactaacctaacacataattacaaacaaatttctcttaaaaaataac

SEQ ID NO: 26844 - DNA, 50 bp, synthetic construct
  source 1..50: mol_type = other DNA
actaatcctaaaacaaataacaaatatactatccaaactcatttcccttc

SEQ ID NO: 26845 - DNA, 50 bp, synthetic construct
  source 1..50: mol_type = other DNA
tacaccataccttatataattaaattactcttactcaacttcctaaccac

SEQ ID NO: 26846 - DNA, 50 bp, synthetic construct
  source 1..50: mol_type = other DNA
aaaataaaaaactctaaactaaaatcrccaccrtcctaactctactaaac

SEQ ID NO: 26847 - DNA, 50 bp, synthetic construct
  source 1..50: mol_type = other DNA
atactcttaattattaaacraaaaccrcccaacaaaaccaaaacrataac

SEQ ID NO: 26848 - DNA, 50 bp, synthetic construct
  source 1..50: mol_type = other DNA
aaaactaaaacrcractataattaaattttcctctctcacctacttaaac

SEQ ID NO: 26849 - DNA, 50 bp, synthetic construct
  source 1..50: mol_type = other DNA
tactaaacttaacaaatatttattccctactccttcacrctctcaatacc

SEQ ID NO: 26850 - DNA, 50 bp, synthetic construct
  source 1..50: mol_type = other DNA
ttctctaccacrtccccaaaacctaaaacaatacttaacacaaaataaac

SEQ ID NO: 26851 - DNA, 50 bp, synthetic construct
  source 1..50: mol_type = other DNA
cacrtccccaaaacctaaaacaatacttaacacaaaataaacrctcattc

SEQ ID NO: 26852 - DNA, 50 bp, synthetic construct
  source 1..50: mol_type = other DNA
aaaaactaaaaacctaactaaaccttcaaaacrtatccaactctcctcac

SEQ ID NO: 26853 - DNA, 50 bp, synthetic construct
  source 1..50: mol_type = other DNA
acctcacccttacctcaaacatttccttaaacrtaaaaaaaactaaacac

SEQ ID NO: 26854 - DNA, 50 bp, synthetic construct
  source 1..50: mol_type = other DNA
aacccttcctaataacaccatcaccccaaaaaactcctaaaatattttcc

SEQ ID NO: 26855 - DNA, 50 bp, synthetic construct
  source 1..50: mol_type = other DNA
cccttcctaataacaccatcaccccaaaaaactcctaaaatattttccrc

SEQ ID NO: 26856 - DNA, 50 bp, synthetic construct
  source 1..50: mol_type = other DNA
tttcaactaaaaaaccctataatcaaaaatcaaccaaaataaacaacaac

SEQ ID NO: 26857 - DNA, 50 bp, synthetic construct
  source 1..50: mol_type = other DNA
ttctcatatataaaatctaaactatacatatactaacccctccaaaaaac

SEQ ID NO: 26858 - DNA, 50 bp, synthetic construct
  source 1..50: mol_type = other DNA
aacctctaaaactacaataccttcaaaaactacccccttaaacrttcaac

SEQ ID NO: 26859 - DNA, 50 bp, synthetic construct
  source 1..50: mol_type = other DNA
attacrcttccttcaactaaaacaaaaacatacrtatcctcaaaaaaaac

SEQ ID NO: 26860 - DNA, 50 bp, synthetic construct
  source 1..50: mol_type = other DNA
ctacaacrcttaaaacrattacrcttccttcaactaaaacaaaaacatac

SEQ ID NO: 26861 - DNA, 50 bp, synthetic construct
  source 1..50: mol_type = other DNA
aaccttaaaaattattcttaccaaaatactacaacrcttaaaacrattac

SEQ ID NO: 26862 - DNA, 50 bp, synthetic construct
  source 1..50: mol_type = other DNA
tccttcctaaaaacacrtatattcctactctaactaaaaaaaacrtaacc

SEQ ID NO: 26863 - DNA, 50 bp, synthetic construct
  source 1..50: mol_type = other DNA
aaaacacrtatattcctactctaactaaaaaaaacrtaaccrctccaaac

SEQ ID NO: 26864 - DNA, 50 bp, synthetic construct
  source 1..50: mol_type = other DNA
aactttattaaaatataattcaaataccaaaaaattccrctttctaaaac

SEQ ID NO: 26865 - DNA, 50 bp, synthetic construct
  source 1..50: mol_type = other DNA
ctacaaccccatccaaaaaaatcaaaaactaataacaaaataccaactac

SEQ ID NO: 26866 - DNA, 50 bp, synthetic construct
  source 1..50: mol_type = other DNA
cccaaactaattactatataataatcraactacacaccaaacacttcccc

SEQ ID NO: 26867 - DNA, 50 bp, synthetic construct
  source 1..50: mol_type = other DNA
tactcccaaaatctaaataaaaaccccaaactaattactatataataatc

SEQ ID NO: 26868 - DNA, 50 bp, synthetic construct
  source 1..50: mol_type = other DNA
caacaatatataaaaattcctaatataccacattctcactaacattaaac

SEQ ID NO: 26869 - DNA, 50 bp, synthetic construct
  source 1..50: mol_type = other DNA
ctaaaaaaattcatacatatttacaccaaaatacatatataaaaaacctc

SEQ ID NO: 26870 - DNA, 50 bp, synthetic construct
  source 1..50: mol_type = other DNA
acatccaattcaaaaaataaaacattacrcraccaaacaaaataactcac

SEQ ID NO: 26871 - DNA, 50 bp, synthetic construct
  source 1..50: mol_type = other DNA
tttacraaaaaatccaaaataaacatccaattcaaaaaataaaacattac

SEQ ID NO: 26872 - DNA, 50 bp, synthetic construct
  source 1..50: mol_type = other DNA
accrcrtaatattttatttcttaaactaaatattcactttaaatttttcc

SEQ ID NO: 26873 - DNA, 50 bp, synthetic construct
  source 1..50: mol_type = other DNA
aaaaatttccaattaccactctcacctaaaaatcactacaaattaatttc

SEQ ID NO: 26874 - DNA, 50 bp, synthetic construct
  source 1..50: mol_type = other DNA
aaattcatcactactattaattaatcaaaattccttcatcctttaaaaac

SEQ ID NO: 26875 - DNA, 50 bp, synthetic construct
  source 1..50: mol_type = other DNA
tatttttataaatatcaacratatatcattataatattcctacrtccccc

SEQ ID NO: 26876 - DNA, 50 bp, synthetic construct
  source 1..50: mol_type = other DNA
ttcctaaattcctattatttattcaacacctacaacaaaatcaaaaaaac

SEQ ID NO: 26877 - DNA, 50 bp, synthetic construct
  source 1..50: mol_type = other DNA
caacrtaatctaccttttctcacaaaaatcraacactaaaaatcctactc

SEQ ID NO: 26878 - DNA, 50 bp, synthetic construct
  source 1..50: mol_type = other DNA
acaaactaacctacracaaacaacrtaatctaccttttctcacaaaaatc

SEQ ID NO: 26879 - DNA, 50 bp, synthetic construct
  source 1..50: mol_type = other DNA
acraaatccrtcttcaacaaaacttaaactaaaactaaactaattcattc

SEQ ID NO: 26880 - DNA, 50 bp, synthetic construct
  source 1..50: mol_type = other DNA
tcaacaaaacttaaactaaaactaaactaattcattcraaactaaaactc

SEQ ID NO: 26881 - DNA, 50 bp, synthetic construct
  source 1..50: mol_type = other DNA
ctcaaactaacctcacaaccaaaaacractatcrctaaaatctaaaactc

SEQ ID NO: 26882 - DNA, 50 bp, synthetic construct
  source 1..50: mol_type = other DNA
raatacctataaaattaaaaaatcctaaacaacctccaaatttaaaaacc

SEQ ID NO: 26883 - DNA, 50 bp, synthetic construct
  source 1..50: mol_type = other DNA
aaaaaccraaaactaaaaaacctattcttccaactacaacttcctaaaac

SEQ ID NO: 26884 - DNA, 50 bp, synthetic construct
  source 1..50: mol_type = other DNA
tcctaaaacraaactctaactactataaaactatccttcccttcaaaatc

SEQ ID NO: 26885 - DNA, 50 bp, synthetic construct
  source 1..50: mol_type = other DNA
ataaaactatccttcccttcaaaatcraaactcttaatcactcrtaaaac

SEQ ID NO: 26886 - DNA, 50 bp, synthetic construct
  source 1..50: mol_type = other DNA
aaaacacactatatataactataaattcttcaacatcaaatttcaccctc

SEQ ID NO: 26887 - DNA, 50 bp, synthetic construct
  source 1..50: mol_type = other DNA
ttatctaaataactttaaccacccctttaaacctctaaaaatacaacctc

SEQ ID NO: 26888 - DNA, 50 bp, synthetic construct
  source 1..50: mol_type = other DNA
tttctcctaataactacaactaccttcttaaaataaaaacraaaccraac

SEQ ID NO: 26889 - DNA, 50 bp, synthetic construct
  source 1..50: mol_type = other DNA
aatctttctcctaataactacaactaccttcttaaaataaaaacraaacc

SEQ ID NO: 26890 - DNA, 50 bp, synthetic construct
  source 1..50: mol_type = other DNA
aataaaaatctttctcctaataactacaactaccttcttaaaataaaaac

SEQ ID NO: 26891 - DNA, 50 bp, synthetic construct
  source 1..50: mol_type = other DNA
aactttaattaaaataaaacttcttcaaaatactttcaaaaactcactcc

SEQ ID NO: 26892 - DNA, 50 bp, synthetic construct
  source 1..50: mol_type = other DNA
atatatatcatatactactctatttacatacattattctcatttcttcac

SEQ ID NO: 26893 - DNA, 50 bp, synthetic construct
  source 1..50: mol_type = other DNA
ataacaaaaacaatcatcctcacataacttaaacraaattataccaaaac

SEQ ID NO: 26894 - DNA, 50 bp, synthetic construct
  source 1..50: mol_type = other DNA
tttaatactttccatttactattcactttccaaacttaataactaaatac

SEQ ID NO: 26895 - DNA, 50 bp, synthetic construct
  source 1..50: mol_type = other DNA
tcaattaacttattaacrtaacctatatactaaattcactaaaatataac

SEQ ID NO: 26896 - DNA, 50 bp, synthetic construct
  source 1..50: mol_type = other DNA
cctcataatcaacrtaatttaattcccatctttacataaactaactaccc

SEQ ID NO: 26897 - DNA, 50 bp, synthetic construct
  source 1..50: mol_type = other DNA
aaaaataaaaaactctactaaactacactacttaactcttaacaaactac

SEQ ID NO: 26898 - DNA, 50 bp, synthetic construct
  source 1..50: mol_type = other DNA
aaaccactattaaattaaactataatactaataatttcattctcaaaccc

SEQ ID NO: 26899 - DNA, 50 bp, synthetic construct
  source 1..50: mol_type = other DNA
aatttccrccrtaaaaactataccacrtaataaaataatataactaaacc

SEQ ID NO: 26900 - DNA, 50 bp, synthetic construct
  source 1..50: mol_type = other DNA
rtaaattaattaaaatacacrtcaatcaataacactcrccccactctttc

SEQ ID NO: 26901 - DNA, 50 bp, synthetic construct
  source 1..50: mol_type = other DNA
aatactattaattaacrtacattccaaccaacctacracrcaaaaaaaac

SEQ ID NO: 26902 - DNA, 50 bp, synthetic construct
  source 1..50: mol_type = other DNA
tacaaccccrtataaatacaaacaaaaaacacaaaaataactaaaaacac

SEQ ID NO: 26903 - DNA, 50 bp, synthetic construct
  source 1..50: mol_type = other DNA
aacaaactttatataaataataaaactatttatttcacctaaatacaaac

SEQ ID NO: 26904 - DNA, 50 bp, synthetic construct
  source 1..50: mol_type = other DNA
tcaatacrtacctacctttaaataaaccttcaataccaactaaaaaaaac

SEQ ID NO: 26905 - DNA, 50 bp, synthetic construct
  source 1..50: mol_type = other DNA
aatataaattctaacccrtatttatcttcctaaaaattacaaataacrtc

SEQ ID NO: 26906 - DNA, 50 bp, synthetic construct
  source 1..50: mol_type = other DNA
aaaaacrcttccaaaacracrttatttataactcctaaaaaaacaaacac

SEQ ID NO: 26907 - DNA, 50 bp, synthetic construct
  source 1..50: mol_type = other DNA
tacraaccttaaaataaaaaatctctcctctaaacaaactcatcctaacc

SEQ ID NO: 26908 - DNA, 50 bp, synthetic construct
  source 1..50: mol_type = other DNA
cctaccccatccccaaaccaaaaaattatttacttccaacttttcatccc

SEQ ID NO: 26909 - DNA, 50 bp, synthetic construct
  source 1..50: mol_type = other DNA
aacctaaaaaatacrctatattccaatacrcacaatatcacrcaatactc

SEQ ID NO: 26910 - DNA, 50 bp, synthetic construct
  source 1..50: mol_type = other DNA
cttaactacaacctaaaaaatacrctatattccaatacrcacaatatcac

SEQ ID NO: 26911 - DNA, 50 bp, synthetic construct
  source 1..50: mol_type = other DNA
crcaactaccrtcttaactacaacctaaaaaatacrctatattccaatac

SEQ ID NO: 26912 - DNA, 50 bp, synthetic construct
  source 1..50: mol_type = other DNA
aaaaaaacrattaaccaaacttcttttacracctccataaaataaaatac

SEQ ID NO: 26913 - DNA, 50 bp, synthetic construct
  source 1..50: mol_type = other DNA
aaaaacttttataataacactaaaaaaacrattaaccaaacttcttttac

SEQ ID NO: 26914 - DNA, 50 bp, synthetic construct
  source 1..50: mol_type = other DNA
ccacctacrtatcccactccataaaaatcrtaaaaaaaacttaatcaatc

SEQ ID NO: 26915 - DNA, 50 bp, synthetic construct
  source 1..50: mol_type = other DNA
cttaaattacccataatatccaataaaaacrcaaaaactatacttaaaac

SEQ ID NO: 26916 - DNA, 50 bp, synthetic construct
  source 1..50: mol_type = other DNA
tacrtcctcattaaacatcataaacaatccaaacactaaaatccraatcc

SEQ ID NO: 26917 - DNA, 50 bp, synthetic construct
  source 1..50: mol_type = other DNA
ttctaaccctaaccaataaaaaaactaatttcccrtcccaacaaaaacrc

SEQ ID NO: 26918 - DNA, 50 bp, synthetic construct
  source 1..50: mol_type = other DNA
acctcaaaaacraaatttctaaccctaaccaataaaaaaactaatttccc

SEQ ID NO: 26919 - DNA, 50 bp, synthetic construct
  source 1..50: mol_type = other DNA
taatcaaaattaaaaaccccrcctttaaaacattttcaaccaataaaaac

SEQ ID NO: 26920 - DNA, 50 bp, synthetic construct
  source 1..50: mol_type = other DNA
atcaaaattaaaaaccccrcctttaaaacattttcaaccaataaaaacrc

SEQ ID NO: 26921 - DNA, 50 bp, synthetic construct
  source 1..50: mol_type = other DNA
taaatttctacctaatcaaaattaaaaataacrccaaaaatttaaaccrc

SEQ ID NO: 26922 - DNA, 50 bp, synthetic construct
  source 1..50: mol_type = other DNA
cctacaaaacttaaccaaaaatctaaatctccraaccaacctaaaaatac

SEQ ID NO: 26923 - DNA, 50 bp, synthetic construct
  source 1..50: mol_type = other DNA
acaaaacttaaccaaaaatctaaatctccraaccaacctaaaaatacrac

SEQ ID NO: 26924 - DNA, 50 bp, synthetic construct
  source 1..50: mol_type = other DNA
ccrtttatcaaaattctaactaaaactaccrtaaaccacatctactaccc

SEQ ID NO: 26925 - DNA, 50 bp, synthetic construct
  source 1..50: mol_type = other DNA
tcraacaataaatataattcacrataatcccaattaaaactctaataaac

SEQ ID NO: 26926 - DNA, 50 bp, synthetic construct
  source 1..50: mol_type = other DNA
accccaacaaacacttaaaccctaattattttatttaaacaatttaaatc

SEQ ID NO: 26927 - DNA, 50 bp, synthetic construct
  source 1..50: mol_type = other DNA
tccttaaaaatatttctaaactataataattaataactcctctatacttc

SEQ ID NO: 26928 - DNA, 50 bp, synthetic construct
  source 1..50: mol_type = other DNA
cactacctatataacctcraataaattaaccttaaaacrtcaatttcttc

SEQ ID NO: 26929 - DNA, 50 bp, synthetic construct
  source 1..50: mol_type = other DNA
aattttaccactcactacctatataacctcraataaattaaccttaaaac

SEQ ID NO: 26930 - DNA, 50 bp, synthetic construct
  source 1..50: mol_type = other DNA
aaaactaatttacccraaatcacacaaataataaataacaaaattcttcc

SEQ ID NO: 26931 - DNA, 50 bp, synthetic construct
  source 1..50: mol_type = other DNA
tcacacaaataataaataacaaaattcttccrccttaacrtatacctccc

SEQ ID NO: 26932 - DNA, 50 bp, synthetic construct
  source 1..50: mol_type = other DNA
aaaaaaacracaaaaccctaacacttaaaaattaaaaaaacctccccaac

SEQ ID NO: 26933 - DNA, 50 bp, synthetic construct
  source 1..50: mol_type = other DNA
aaacctatacraataaaataacttctaaacraaaaatacactataaactc

SEQ ID NO: 26934 - DNA, 50 bp, synthetic construct
  source 1..50: mol_type = other DNA
tactatccttcctaaacttctatactcraccraaactttaatattctaac

SEQ ID NO: 26935 - DNA, 50 bp, synthetic construct
  source 1..50: mol_type = other DNA
crtatacttaaaaaaccracracctaaaaaacataaatcrcctaaaccac

SEQ ID NO: 26936 - DNA, 50 bp, synthetic construct
  source 1..50: mol_type = other DNA
acctactttcaaactatccaacactaataacrtatacttaaaaaaccrac

SEQ ID NO: 26937 - DNA, 50 bp, synthetic construct
  source 1..50: mol_type = other DNA
tctacctactttcaaactatccaacactaataacrtatacttaaaaaacc

SEQ ID NO: 26938 - DNA, 50 bp, synthetic construct
  source 1..50: mol_type = other DNA
taaaaaaactcacrtatctacctactttcaaactatccaacactaataac

SEQ ID NO: 26939 - DNA, 50 bp, synthetic construct
  source 1..50: mol_type = other DNA
tatcraaaactaaaaccrcaaaaatccaaattctctctaaaaaaactcac

SEQ ID NO: 26940 - DNA, 50 bp, synthetic construct
  source 1..50: mol_type = other DNA
actacraaaccraaatttaataaactctcttcctatcraaaactaaaacc

SEQ ID NO: 26941 - DNA, 50 bp, synthetic construct
  source 1..50: mol_type = other DNA
caactaaatcatccttaacaaacataacaaaaactcctaaaaacatttac

SEQ ID NO: 26942 - DNA, 50 bp, synthetic construct
  source 1..50: mol_type = other DNA
taaatatcttactcttcccataaatacaacccacaacttcttaactaaac

SEQ ID NO: 26943 - DNA, 50 bp, synthetic construct
  source 1..50: mol_type = other DNA
aaaaccccatctctactaaaactacaaaacttaaccraacataataatac

SEQ ID NO: 26944 - DNA, 50 bp, synthetic construct
  source 1..50: mol_type = other DNA
cacaaaactacacatacttaaaacatttacaacctaaatctttttaaaac

SEQ ID NO: 26945 - DNA, 50 bp, synthetic construct
  source 1..50: mol_type = other DNA
atctcttttcaaacatttcataaaaacatacacacacctctactaacttc

SEQ ID NO: 26946 - DNA, 50 bp, synthetic construct
  source 1..50: mol_type = other DNA
aactaactatatataccaaaaactaaactaaaaaaacaactaaaaactcc

SEQ ID NO: 26947 - DNA, 50 bp, synthetic construct
  source 1..50: mol_type = other DNA
tatataccaaaaactaaactaaaaaaacaactaaaaactccratctccac

SEQ ID NO: 26948 - DNA, 50 bp, synthetic construct
  source 1..50: mol_type = other DNA
acraaaaactaatctaaaaactctactttatacttcctcaccctactttc

SEQ ID NO: 26949 - DNA, 50 bp, synthetic construct
  source 1..50: mol_type = other DNA
aaattcatttttatatttaaatacaacttacaaatccataatttcccatc

SEQ ID NO: 26950 - DNA, 50 bp, synthetic construct
  source 1..50: mol_type = other DNA
aacataaaaataaacttaataacttctaaatttaataaaacctcaatatc

SEQ ID NO: 26951 - DNA, 50 bp, synthetic construct
  source 1..50: mol_type = other DNA
tattaacaatctataattccacatttacacaataatctataaaaaatttc

SEQ ID NO: 26952 - DNA, 50 bp, synthetic construct
  source 1..50: mol_type = other DNA
ccaaataatactaaatacaaatctacataataaatcaaaataactccaac

SEQ ID NO: 26953 - DNA, 50 bp, synthetic construct
  source 1..50: mol_type = other DNA
rtacacccaaataaaaactctaccccaaaaactaactaaaactactcccc

SEQ ID NO: 26954 - DNA, 50 bp, synthetic construct
  source 1..50: mol_type = other DNA
cctaaaacaaaatctccacttaaatacacrccctaaaataaaacttcttc

SEQ ID NO: 26955 - DNA, 50 bp, synthetic construct
  source 1..50: mol_type = other DNA
aaaatctccacttaaatacacrccctaaaataaaacttcttcraaaaacc

SEQ ID NO: 26956 - DNA, 50 bp, synthetic construct
  source 1..50: mol_type = other DNA
aataaaacttcttcraaaaaccraaaaccttcaactctactcaaaaactc

SEQ ID NO: 26957 - DNA, 50 bp, synthetic construct
  source 1..50: mol_type = other DNA
aaccaaaaataaaaccaacttctcctacrcraaaacaaaacctataaaac

SEQ ID NO: 26958 - DNA, 50 bp, synthetic construct
  source 1..50: mol_type = other DNA
ttaacatatttctttctaccactacaatcttacataaccccaactattac

SEQ ID NO: 26959 - DNA, 50 bp, synthetic construct
  source 1..50: mol_type = other DNA
tactaaaacacctaatcaaaattactaacttaataattactcttacctac

SEQ ID NO: 26960 - DNA, 50 bp, synthetic construct
  source 1..50: mol_type = other DNA
caaaatttaatatctatttcaaaaaccaaaataacaacaaacctaaaacc

SEQ ID NO: 26961 - DNA, 50 bp, synthetic construct
  source 1..50: mol_type = other DNA
acatttataacaaattcccaaaaaatactaatcctactaataaaaaaaac

SEQ ID NO: 26962 - DNA, 50 bp, synthetic construct
  source 1..50: mol_type = other DNA
actcaaatctatttctacccctaataaaactacrccrccaaaacaaaaac

SEQ ID NO: 26963 - DNA, 50 bp, synthetic construct
  source 1..50: mol_type = other DNA
cattaaaaaccactaccactcaaatctatttctacccctaataaaactac

SEQ ID NO: 26964 - DNA, 50 bp, synthetic construct
  source 1..50: mol_type = other DNA
tctatacttcaaattattcaaaactccctaaataattctaataaacaacc

SEQ ID NO: 26965 - DNA, 50 bp, synthetic construct
  source 1..50: mol_type = other DNA
actacccatcaaaaccattcaaaaaactttaaacaacctaaaatacaaac

SEQ ID NO: 26966 - DNA, 50 bp, synthetic construct
  source 1..50: mol_type = other DNA
ttaaactcaaactctaaactacaaaacaaaaaaataaccactattaaccc

SEQ ID NO: 26967 - DNA, 50 bp, synthetic construct
  source 1..50: mol_type = other DNA
aaaaactcaacacaaccttaaacaacctaactataccaaacccttcccac

SEQ ID NO: 26968 - DNA, 50 bp, synthetic construct
  source 1..50: mol_type = other DNA
ccttaaacaacctaactataccaaacccttcccacrtaaaaatataaaac

SEQ ID NO: 26969 - DNA, 50 bp, synthetic construct
  source 1..50: mol_type = other DNA
cctcccaaaaatctatcttcccaaaaacccaaaaaaatcttaaattattc

SEQ ID NO: 26970 - DNA, 50 bp, synthetic construct
  source 1..50: mol_type = other DNA
caacctaactctataaaaactatcaacccaaaaaccaaataaataacctc

SEQ ID NO: 26971 - DNA, 50 bp, synthetic construct
  source 1..50: mol_type = other DNA
aaaaactatcaacccaaaaaccaaataaataacctcrcttataaaaacac

SEQ ID NO: 26972 - DNA, 50 bp, synthetic construct
  source 1..50: mol_type = other DNA
actatcaacccaaaaaccaaataaataacctcrcttataaaaacacrctc

SEQ ID NO: 26973 - DNA, 50 bp, synthetic construct
  source 1..50: mol_type = other DNA
tcaaaaactccaacaaaaactataaaactctacraacrctactaaactac

SEQ ID NO: 26974 - DNA, 50 bp, synthetic construct
  source 1..50: mol_type = other DNA
tactactacaaactcaaaaactccaacaaaaactataaaactctacraac

SEQ ID NO: 26975 - DNA, 50 bp, synthetic construct
  source 1..50: mol_type = other DNA
accttactactacaaactcaaaaactccaacaaaaactataaaactctac

SEQ ID NO: 26976 - DNA, 50 bp, synthetic construct
  source 1..50: mol_type = other DNA
taaaacccttaaacctacaacaacaaaactacctaaacacataatcccac

SEQ ID NO: 26977 - DNA, 50 bp, synthetic construct
  source 1..50: mol_type = other DNA
aacccttaaacctacaacaacaaaactacctaaacacataatcccacrac

SEQ ID NO: 26978 - DNA, 50 bp, synthetic construct
  source 1..50: mol_type = other DNA
aaactataaaaaaatcacaactaaaaataaccttcaaaatcaccttaaac

SEQ ID NO: 26979 - DNA, 50 bp, synthetic construct
  source 1..50: mol_type = other DNA
caaataaacaaccctcttaaactatatccaaaaaaactaattaatattac

SEQ ID NO: 26980 - DNA, 50 bp, synthetic construct
  source 1..50: mol_type = other DNA
taaaattaaaaatcaactttataaacttaacctcctcttatttacttttc

SEQ ID NO: 26981 - DNA, 50 bp, synthetic construct
  source 1..50: mol_type = other DNA
aacccaactaatactaaaatatcacctacctaacccccatactaaaaatc

SEQ ID NO: 26982 - DNA, 50 bp, synthetic construct
  source 1..50: mol_type = other DNA
aaaaacctaccraaaccaacctaaactttatcctacatctctatataccc

SEQ ID NO: 26983 - DNA, 50 bp, synthetic construct
  source 1..50: mol_type = other DNA
ccttcaccctcraacatacaaaaatacaaaacaaaacccaaattaatttc

SEQ ID NO: 26984 - DNA, 50 bp, synthetic construct
  source 1..50: mol_type = other DNA
aaataaacaatcaaaaaaaactctctaaaaaaataacatttaaactaaac

SEQ ID NO: 26985 - DNA, 50 bp, synthetic construct
  source 1..50: mol_type = other DNA
aaaaacrtaaatacaaaccaaaacaaaatacaactaccaatcacacacac

SEQ ID NO: 26986 - DNA, 50 bp, synthetic construct
  source 1..50: mol_type = other DNA
ttctccrtatatataactaacaactatattttaccctaatttacatccac

SEQ ID NO: 26987 - DNA, 50 bp, synthetic construct
  source 1..50: mol_type = other DNA
tctattttctctaaaaattctataaattaactaaactcaattaaattctc

SEQ ID NO: 26988 - DNA, 50 bp, synthetic construct
  source 1..50: mol_type = other DNA
ccctacaaattccacctaaatctctacaaatattcattctataaaaaacc

SEQ ID NO: 26989 - DNA, 50 bp, synthetic construct
  source 1..50: mol_type = other DNA
aacaaatataataacttatcttcaaaaatactacctcctcccaccaccac

SEQ ID NO: 26990 - DNA, 50 bp, synthetic construct
  source 1..50: mol_type = other DNA
atttctcaaaacatatccctattattaaacaacacataactataattatc

SEQ ID NO: 26991 - DNA, 50 bp, synthetic construct
  source 1..50: mol_type = other DNA
ccacttaaataaaaccaataatttcacaaatattaaaccattatattttc

SEQ ID NO: 26992 - DNA, 50 bp, synthetic construct
  source 1..50: mol_type = other DNA
ttcctaatctacaaaatttttataaatacctataacctaatatcrtaaac

SEQ ID NO: 26993 - DNA, 50 bp, synthetic construct
  source 1..50: mol_type = other DNA
ctaaaactaccacttactaaaaacttaataaatatcaaatattactaaac

SEQ ID NO: 26994 - DNA, 50 bp, synthetic construct
  source 1..50: mol_type = other DNA
taaaaatacaaaatttcaaacccattccaattctactaaatctaaaactc

SEQ ID NO: 26995 - DNA, 50 bp, synthetic construct
  source 1..50: mol_type = other DNA
cccctcccccaacaaaaaattatcctatcctaaataccrataatactatc

SEQ ID NO: 26996 - DNA, 50 bp, synthetic construct
  source 1..50: mol_type = other DNA
aacttaaaaaccaccattttaaattaaaattattcaacrataacactacc

SEQ ID NO: 26997 - DNA, 50 bp, synthetic construct
  source 1..50: mol_type = other DNA
taacctcaaataataattctcaaaataattttacctcccaaaaaacatac

SEQ ID NO: 26998 - DNA, 50 bp, synthetic construct
  source 1..50: mol_type = other DNA
cttcaaaaaaattctacctactattttcactcccactaaaatataaactc

SEQ ID NO: 26999 - DNA, 50 bp, synthetic construct
  source 1..50: mol_type = other DNA
aaataaaaatcctaataataaatatataattctatacatactatcttcac

SEQ ID NO: 27000 - DNA, 50 bp, synthetic construct
  source 1..50: mol_type = other DNA
acatctatcatcaaaatttttatccctcatctaaaaataaaactacccac

SEQ ID NO: 27001 - DNA, 50 bp, synthetic construct
  source 1..50: mol_type = other DNA
tcatctaaaaataaaactacccacratcaatcrttctctaaattaaaacc

SEQ ID NO: 27002 - DNA, 50 bp, synthetic construct
  source 1..50: mol_type = other DNA
tatatacttattaaatatttactacaaacataacctaaatttatcaaacc

SEQ ID NO: 27003 - DNA, 50 bp, synthetic construct
  source 1..50: mol_type = other DNA
actccttttataaataaaaaatctactaaatatattccttcacaaccaac

SEQ ID NO: 27004 - DNA, 50 bp, synthetic construct
  source 1..50: mol_type = other DNA
caatcattcactacataacatttcaataaataaaaaactacatatacaac

SEQ ID NO: 27005 - DNA, 50 bp, synthetic construct
  source 1..50: mol_type = other DNA
ataaataaaaaactacatatacaacraaaatcccataaaattataatatc

SEQ ID NO: 27006 - DNA, 50 bp, synthetic construct
  source 1..50: mol_type = other DNA
taattaaataacattaacaataaaaaaattacaatcaaaactcttaacac

SEQ ID NO: 27007 - DNA, 50 bp, synthetic construct
  source 1..50: mol_type = other DNA
aaattcatctataatcaccccttcctatatcatcccaaaattaattcttc

SEQ ID NO: 27008 - DNA, 50 bp, synthetic construct
  source 1..50: mol_type = other DNA
aaacaaaaaattctccaatctttatacacttaattaaaataaactaaacc

SEQ ID NO: 27009 - DNA, 50 bp, synthetic construct
  source 1..50: mol_type = other DNA
aaaaattctccaatctttatacacttaattaaaataaactaaaccrattc

SEQ ID NO: 27010 - DNA, 50 bp, synthetic construct
  source 1..50: mol_type = other DNA
aacaacatactaaatccctatctctacaaaaattttaaaattaaccaaac

SEQ ID NO: 27011 - DNA, 50 bp, synthetic construct
  source 1..50: mol_type = other DNA
acctcctacrttaaaataaaataacacratcttaacttactacaactacc

SEQ ID NO: 27012 - DNA, 50 bp, synthetic construct
  source 1..50: mol_type = other DNA
aatcaacatatccataattatataaaaaactataactaaacacaaacrtc

SEQ ID NO: 27013 - DNA, 50 bp, synthetic construct
  source 1..50: mol_type = other DNA
tataatcaacatatccataattatataaaaaactataactaaacacaaac

SEQ ID NO: 27014 - DNA, 50 bp, synthetic construct
  source 1..50: mol_type = other DNA
aatttatttcacacaaaacttataaatccaacttttataccttctctaac

SEQ ID NO: 27015 - DNA, 50 bp, synthetic construct
  source 1..50: mol_type = other DNA
tttctaaaaaattcttaataatccccaaaccacaacccttaaaatacctc

SEQ ID NO: 27016 - DNA, 50 bp, synthetic construct
  source 1..50: mol_type = other DNA
caacacatttaccrctaaaaaaaaacccatattatttactaccaaaaaac

SEQ ID NO: 27017 - DNA, 50 bp, synthetic construct
  source 1..50: mol_type = other DNA
aactatccatacattcaatttaaaaaaacaaatatttcaacacatttacc

SEQ ID NO: 27018 - DNA, 50 bp, synthetic construct
  source 1..50: mol_type = other DNA
actatttttattaaaactataatctatactaatctcaaaaacacataaac

SEQ ID NO: 27019 - DNA, 50 bp, synthetic construct
  source 1..50: mol_type = other DNA
aaaattatacctccaaaaataaaaaacacatcttccaaaacaaaatccac

SEQ ID NO: 27020 - DNA, 50 bp, synthetic construct
  source 1..50: mol_type = other DNA
catcactatctccatcctaactactttccacatcaacactaaaattcatc

SEQ ID NO: 27021 - DNA, 50 bp, synthetic construct
  source 1..50: mol_type = other DNA
tatacttacattaaataataaaataacttatttataccaaaaaaatcctc

SEQ ID NO: 27022 - DNA, 50 bp, synthetic construct
  source 1..50: mol_type = other DNA
aaaatatattataaactactttattacaataaattaaactctactaaacc

SEQ ID NO: 27023 - DNA, 50 bp, synthetic construct
  source 1..50: mol_type = other DNA
cttataaaactatcttaaaatatataacattattattaactataatcacc

SEQ ID NO: 27024 - DNA, 50 bp, synthetic construct
  source 1..50: mol_type = other DNA
aactctttaattccttttatactataatatataacacttaacaaactaac

SEQ ID NO: 27025 - DNA, 50 bp, synthetic construct
  source 1..50: mol_type = other DNA
tctttaattccttttatactataatatataacacttaacaaactaacrac

SEQ ID NO: 27026 - DNA, 50 bp, synthetic construct
  source 1..50: mol_type = other DNA
ttttatactataatatataacacttaacaaactaacracraaatacaaac

SEQ ID NO: 27027 - DNA, 50 bp, synthetic construct
  source 1..50: mol_type = other DNA
atataactaatataccacaatataacaccaaacttctaatttcataacac

SEQ ID NO: 27028 - DNA, 50 bp, synthetic construct
  source 1..50: mol_type = other DNA
aactataaaactaatacaaacaaacttaaaccaaaaattcacacctcaac

SEQ ID NO: 27029 - DNA, 50 bp, synthetic construct
  source 1..50: mol_type = other DNA
ctcactatattacctaaactaatctcaaactcctaaactcaaataatccc

SEQ ID NO: 27030 - DNA, 50 bp, synthetic construct
  source 1..50: mol_type = other DNA
aacctcatctctacaaaaactaaaaaaattaaccaaacctaataatacac

SEQ ID NO: 27031 - DNA, 50 bp, synthetic construct
  source 1..50: mol_type = other DNA
taatcrtaactactaaaaaaactaaacccraaaaatcaaaactaactacc

SEQ ID NO: 27032 - DNA, 50 bp, synthetic construct
  source 1..50: mol_type = other DNA
taccccrtctctctaactattacaataaatattatttaacttcaaatttc

SEQ ID NO: 27033 - DNA, 50 bp, synthetic construct
  source 1..50: mol_type = other DNA
taacccraaatttaaaatcaaataatatccattataacaatcaaaaaaac

SEQ ID NO: 27034 - DNA, 50 bp, synthetic construct
  source 1..50: mol_type = other DNA
acrcrcttaatatattaccaaatacttaaaaaatactcaaaatctctaac

SEQ ID NO: 27035 - DNA, 50 bp, synthetic construct
  source 1..50: mol_type = other DNA
tattctatcccatttaccataatcctcacctatccctattatattttatc

SEQ ID NO: 27036 - DNA, 50 bp, synthetic construct
  source 1..50: mol_type = other DNA
aataaacttccaccttcccaacaaaccacctccattttaaaaaataaacc

SEQ ID NO: 27037 - DNA, 50 bp, synthetic construct
  source 1..50: mol_type = other DNA
taacttaatatcaaactatatcaaacaccaaatatttacatttaatcatc

SEQ ID NO: 27038 - DNA, 50 bp, synthetic construct
  source 1..50: mol_type = other DNA
caaattaaccccaaataaaataccctaacaatattaatatatcttttccc

SEQ ID NO: 27039 - DNA, 50 bp, synthetic construct
  source 1..50: mol_type = other DNA
cataaaccacaacrcttaacccactcactcattttttataaaataaaaac

SEQ ID NO: 27040 - DNA, 50 bp, synthetic construct
  source 1..50: mol_type = other DNA
atataaccaaaaaccatataaaataccaaatattccaaataacaaccrac

SEQ ID NO: 27041 - DNA, 50 bp, synthetic construct
  source 1..50: mol_type = other DNA
ataatctttaaccatatacccctaacttaaaaaactccrtcataaaaatc

SEQ ID NO: 27042 - DNA, 50 bp, synthetic construct
  source 1..50: mol_type = other DNA
atattaataaaatccatactaaacttaacaaactctaaaattaaaaaatc

SEQ ID NO: 27043 - DNA, 50 bp, synthetic construct
  source 1..50: mol_type = other DNA
caaaatcatcctaacttattccctcaccattaacccaccttcatactacc

SEQ ID NO: 27044 - DNA, 50 bp, synthetic construct
  source 1..50: mol_type = other DNA
atctatcccrtccttcctattaacaccatccctcttcaatataaactatc

SEQ ID NO: 27045 - DNA, 50 bp, synthetic construct
  source 1..50: mol_type = other DNA
aaaacraaacaaattcaaataacatcataaaaacaaatactacaaaattc

SEQ ID NO: 27046 - DNA, 50 bp, synthetic construct
  source 1..50: mol_type = other DNA
aaaaacatctaaataaatcatccttaactcatccttctctcttattctcc

SEQ ID NO: 27047 - DNA, 50 bp, synthetic construct
  source 1..50: mol_type = other DNA
ccaaaatccaattttcaactaccaacctattatttcctaaataccccacc

SEQ ID NO: 27048 - DNA, 50 bp, synthetic construct
  source 1..50: mol_type = other DNA
actctcacaacctcacctaacaaaactacacaaaaaactactaaatccac

SEQ ID NO: 27049 - DNA, 50 bp, synthetic construct
  source 1..50: mol_type = other DNA
ctactatataaaaataaatccattttcctctctaccctctaaaaacttcc

SEQ ID NO: 27050 - DNA, 50 bp, synthetic construct
  source 1..50: mol_type = other DNA
tttcaaactcaacaaaataaccraattaaccaacttcatacttaccatac

SEQ ID NO: 27051 - DNA, 50 bp, synthetic construct
  source 1..50: mol_type = other DNA
ttaacaactatataataccattatacaaatataacataatttaacaaatc

SEQ ID NO: 27052 - DNA, 50 bp, synthetic construct
  source 1..50: mol_type = other DNA
ataataaccattattactaaatccttccatacaaaatactaattacaaac

SEQ ID NO: 27053 - DNA, 50 bp, synthetic construct
  source 1..50: mol_type = other DNA
taaaaatctcaaatcacttatattaacctaaaattattttatattaaaac

SEQ ID NO: 27054 - DNA, 50 bp, synthetic construct
  source 1..50: mol_type = other DNA
attccaaaaaaataataatactattaaaacctaaaactatactccaccrc

SEQ ID NO: 27055 - DNA, 50 bp, synthetic construct
  source 1..50: mol_type = other DNA
ataaactcttttacttacttttactttaaacttcaaaattattttacacc

SEQ ID NO: 27056 - DNA, 50 bp, synthetic construct
  source 1..50: mol_type = other DNA
aaaaaaatttccccaatatcaatacatactatctcacctttaaacaaccc

SEQ ID NO: 27057 - DNA, 50 bp, synthetic construct
  source 1..50: mol_type = other DNA
acactaaaaaaactccctttataaaaatctcacaaaatcattcataaaac

SEQ ID NO: 27058 - DNA, 50 bp, synthetic construct
  source 1..50: mol_type = other DNA
caacrcacataacracaaaaaaccaaaaaacrtacttaataacaacaccc

SEQ ID NO: 27059 - DNA, 50 bp, synthetic construct
  source 1..50: mol_type = other DNA
ataaaacatacaatatatatactaacatatacaaccacaacrcacataac

SEQ ID NO: 27060 - DNA, 50 bp, synthetic construct
  source 1..50: mol_type = other DNA
aaacraatactactattaaacacrttctctaattttctatcrccatatac

SEQ ID NO: 27061 - DNA, 50 bp, synthetic construct
  source 1..50: mol_type = other DNA
acacttctattacattataatcatacttatacttatcttaaacccaaaac

SEQ ID NO: 27062 - DNA, 50 bp, synthetic construct
  source 1..50: mol_type = other DNA
caaaacaaacccacaaataataattctaaaatataaaacaaattctctcc

SEQ ID NO: 27063 - DNA, 50 bp, synthetic construct
  source 1..50: mol_type = other DNA
aaatatctatctataaaatcaaaatttatactaaaatctcataatcttcc

SEQ ID NO: 27064 - DNA, 50 bp, synthetic construct
  source 1..50: mol_type = other DNA
ttttattcttccacacctcttaactttaataaaaaacaactaacactttc

SEQ ID NO: 27065 - DNA, 50 bp, synthetic construct
  source 1..50: mol_type = other DNA
aaaaaaaccctccctattacaaactataacttatcaatctactcacaaac

SEQ ID NO: 27066 - DNA, 50 bp, synthetic construct
  source 1..50: mol_type = other DNA
cctacctacatcaaaaaaattacataaccaccactaaacaattaatttcc

SEQ ID NO: 27067 - DNA, 50 bp, synthetic construct
  source 1..50: mol_type = other DNA
ataaactatttacattaatcatacaaatactaacatctccttttcaaacc

SEQ ID NO: 27068 - DNA, 50 bp, synthetic construct
  source 1..50: mol_type = other DNA
attatccaaaaaatattccccataaaaccrattaacataaataacaaacc

SEQ ID NO: 27069 - DNA, 50 bp, synthetic construct
  source 1..50: mol_type = other DNA
aaactatccaaaataaatataattatccaaaaaatattccccataaaacc

SEQ ID NO: 27070 - DNA, 50 bp, synthetic construct
  source 1..50: mol_type = other DNA
tcaaataattctcatacctcaaccttctaaatacctaaaactacaaacac

SEQ ID NO: 27071 - DNA, 50 bp, synthetic construct
  source 1..50: mol_type = other DNA
ataattctcatacctcaaccttctaaatacctaaaactacaaacacrcac

SEQ ID NO: 27072 - DNA, 50 bp, synthetic construct
  source 1..50: mol_type = other DNA
attaaattatttaaataatactactataaacattcctaattccracaaac

SEQ ID NO: 27073 - DNA, 50 bp, synthetic construct
  source 1..50: mol_type = other DNA
tttcatcccaaacccctttaccctcttaaaaattattaaaacraaatctc

SEQ ID NO: 27074 - DNA, 50 bp, synthetic construct
  source 1..50: mol_type = other DNA
caaaatttcccaatattacctatactaatcttaaactcctaaactccaac

SEQ ID NO: 27075 - DNA, 50 bp, synthetic construct
  source 1..50: mol_type = other DNA
aaaattacaataaatcatattcataccactacacttcaacttaaacaaac

SEQ ID NO: 27076 - DNA, 50 bp, synthetic construct
  source 1..50: mol_type = other DNA
ataatccttaaatcataaaaacaataaacttcrtaaccttaacataaaac

SEQ ID NO: 27077 - DNA, 50 bp, synthetic construct
  source 1..50: mol_type = other DNA
ttttaaaaatcaaacrcaaatctaataaatcataaaatcattctacctcc

SEQ ID NO: 27078 - DNA, 50 bp, synthetic construct
  source 1..50: mol_type = other DNA
ccctatattaatctcraaaacaaaataactttataattcatcaaatctac

SEQ ID NO: 27079 - DNA, 50 bp, synthetic construct
  source 1..50: mol_type = other DNA
acatatttcataaatcaaacrcaaaaaacacttaaaaacaaacccatacc

SEQ ID NO: 27080 - DNA, 50 bp, synthetic construct
  source 1..50: mol_type = other DNA
tacctcaaataaaaacattccctaaaaattaaaaccatataaaaaccatc

SEQ ID NO: 27081 - DNA, 50 bp, synthetic construct
  source 1..50: mol_type = other DNA
acctacctaataataaccccaaaacccaaaataactaacatttcrcaaac

SEQ ID NO: 27082 - DNA, 50 bp, synthetic construct
  source 1..50: mol_type = other DNA
ttcacccaaatacctcaaaaataaaaaatacacaaaacacttaaaacacc

SEQ ID NO: 27083 - DNA, 50 bp, synthetic construct
  source 1..50: mol_type = other DNA
aaacaatctaactaacaaaaataacctaccttacaactaaaaacacttac

SEQ ID NO: 27084 - DNA, 50 bp, synthetic construct
  source 1..50: mol_type = other DNA
tactaaattccatctaattctaataaaaaactaaattcaccacttaactc

SEQ ID NO: 27085 - DNA, 50 bp, synthetic construct
  source 1..50: mol_type = other DNA
tctaataaaaaactaaattcaccacttaactcratattacaaaaccaaac

SEQ ID NO: 27086 - DNA, 50 bp, synthetic construct
  source 1..50: mol_type = other DNA
tactcaaacaataaaataattacttaacaacaacaaaaaaacccaataac

SEQ ID NO: 27087 - DNA, 50 bp, synthetic construct
  source 1..50: mol_type = other DNA
ccaaaacaaaaaaattccttaaacccaaaaaatcraaactacattaaacc

SEQ ID NO: 27088 - DNA, 50 bp, synthetic construct
  source 1..50: mol_type = other DNA
aaattccaatcaaatacraataaaaaaatctatctacccaaaaaaacctc

SEQ ID NO: 27089 - DNA, 50 bp, synthetic construct
  source 1..50: mol_type = other DNA
aaacaaactctctcatccrtacttaattaaaattcctataaataaaaccc

SEQ ID NO: 27090 - DNA, 50 bp, synthetic construct
  source 1..50: mol_type = other DNA
tttatccatattacccaaactaatctcraactactaacttcaaacaatcc

SEQ ID NO: 27091 - DNA, 50 bp, synthetic construct
  source 1..50: mol_type = other DNA
aaacttttttacaaaaattaaattttatccatattacccaaactaatctc

SEQ ID NO: 27092 - DNA, 50 bp, synthetic construct
  source 1..50: mol_type = other DNA
tacctcaaccttttaaataactaaaaccacaaacatataccatcataccc

SEQ ID NO: 27093 - DNA, 50 bp, synthetic construct
  source 1..50: mol_type = other DNA
acttaaaaaaacctaatatatcttttaacaatattaaaaataacttaaac

SEQ ID NO: 27094 - DNA, 50 bp, synthetic construct
  source 1..50: mol_type = other DNA
tttacaatcttaacaatattattaaatatcacctacttattataaaatac

SEQ ID NO: 27095 - DNA, 50 bp, synthetic construct
  source 1..50: mol_type = other DNA
tacccccaaaatccatttttttaataatacrtaaatatatctattttcac

SEQ ID NO: 27096 - DNA, 50 bp, synthetic construct
  source 1..50: mol_type = other DNA
acactatttacataaactaaataccaaattacracacattatacacaatc

SEQ ID NO: 27097 - DNA, 50 bp, synthetic construct
  source 1..50: mol_type = other DNA
aacraaaattactataaaccaaaatcataccaccrcattcctacctaaac

SEQ ID NO: 27098 - DNA, 50 bp, synthetic construct
  source 1..50: mol_type = other DNA
aataatctaaaacccaacaacataacatcacctaaaaactccrtaaactc

SEQ ID NO: 27099 - DNA, 50 bp, synthetic construct
  source 1..50: mol_type = other DNA
atatttaaaaaaccaatataaaccttactttccatttcccctaataacac

SEQ ID NO: 27100 - DNA, 50 bp, synthetic construct
  source 1..50: mol_type = other DNA
acaaaattttccattaaaacataccatatcraccraacrcaataactcac

SEQ ID NO: 27101 - DNA, 50 bp, synthetic construct
  source 1..50: mol_type = other DNA
aaacraaaataacacaacaaaattttccattaaaacataccatatcracc

SEQ ID NO: 27102 - DNA, 50 bp, synthetic construct
  source 1..50: mol_type = other DNA
aataaaacraaaataacacaacaaaattttccattaaaacataccatatc

SEQ ID NO: 27103 - DNA, 50 bp, synthetic construct
  source 1..50: mol_type = other DNA
aaaaactccaaattaaaattaatactcaataacaaattataaccaaacac

SEQ ID NO: 27104 - DNA, 50 bp, synthetic construct
  source 1..50: mol_type = other DNA
ttatatcatcatttttatataacccaaaatattttaaactaaatatattc

SEQ ID NO: 27105 - DNA, 50 bp, synthetic construct
  source 1..50: mol_type = other DNA
cctccaaaatactccccaaaccaaaacatacraacactaacaaaaaaaac

SEQ ID NO: 27106 - DNA, 50 bp, synthetic construct
  source 1..50: mol_type = other DNA
aaactaaccaaataaaactacacttaatatttttttctattccacacccc

SEQ ID NO: 27107 - DNA, 50 bp, synthetic construct
  source 1..50: mol_type = other DNA
taattaattctacccatttcctcttattttcttctcaatctctcttactc

SEQ ID NO: 27108 - DNA, 50 bp, synthetic construct
  source 1..50: mol_type = other DNA
tcttctcaatctctcttactcrttcaactttatcttcttattctcatctc

SEQ ID NO: 27109 - DNA, 50 bp, synthetic construct
  source 1..50: mol_type = other DNA
aactatattacccaacataatatcccrtccaaaaccacactaaaatattc

SEQ ID NO: 27110 - DNA, 50 bp, synthetic construct
  source 1..50: mol_type = other DNA
ccaatataaccctaaacraaacatcatactaaacaacacaactaaaatac

SEQ ID NO: 27111 - DNA, 50 bp, synthetic construct
  source 1..50: mol_type = other DNA
taaacaacacaactaaaatacraataaaaaccaaatttcttacacataac

SEQ ID NO: 27112 - DNA, 50 bp, synthetic construct
  source 1..50: mol_type = other DNA
acacaactaaaatacraataaaaaccaaatttcttacacataacrataac

SEQ ID NO: 27113 - DNA, 50 bp, synthetic construct
  source 1..50: mol_type = other DNA
caaactcacraactaaaaaacracaaaaccaaaaccaaactacaaaatcc

SEQ ID NO: 27114 - DNA, 50 bp, synthetic construct
  source 1..50: mol_type = other DNA
tactaaaaaaataacaatactccaaaaatatacaaaaatcaacttatatc

SEQ ID NO: 27115 - DNA, 50 bp, synthetic construct
  source 1..50: mol_type = other DNA
acaaattaatttttacatattcctaaaacactatcacctcctcaataatc

SEQ ID NO: 27116 - DNA, 50 bp, synthetic construct
  source 1..50: mol_type = other DNA
taccaactccatcttacaaaaaaaatctttttccaaaactatccctaacc

SEQ ID NO: 27117 - DNA, 50 bp, synthetic construct
  source 1..50: mol_type = other DNA
ttattacacaataaacccaaaccaaaattaaaaataaaatcccaaaaaac

SEQ ID NO: 27118 - DNA, 50 bp, synthetic construct
  source 1..50: mol_type = other DNA
aaaaataaaatcccaaaaaacratcttactaaaattataaatcaacrctc

SEQ ID NO: 27119 - DNA, 50 bp, synthetic construct
  source 1..50: mol_type = other DNA
acaaaaaatacctcaacaaaactaaaatcaaaactttaaaaccaccctac

SEQ ID NO: 27120 - DNA, 50 bp, synthetic construct
  source 1..50: mol_type = other DNA
tttcacrtaataaaaaactcaatacaaacacaaacratattattaccctc

SEQ ID NO: 27121 - DNA, 50 bp, synthetic construct
  source 1..50: mol_type = other DNA
cttttcaccacrtaaaaaccccctaaaaaaaccaactaaactaaaaaaac

SEQ ID NO: 27122 - DNA, 50 bp, synthetic construct
  source 1..50: mol_type = other DNA
ttcctatctataataccaaatactcaaccttaccttcctaaccctccttc

SEQ ID NO: 27123 - DNA, 50 bp, synthetic construct
  source 1..50: mol_type = other DNA
ctaaattataaaacactaaaaacaaatacraaataacattattttctctc

SEQ ID NO: 27124 - DNA, 50 bp, synthetic construct
  source 1..50: mol_type = other DNA
ctctcctaaaataattaacractaaattataaaacactaaaaacaaatac

SEQ ID NO: 27125 - DNA, 50 bp, synthetic construct
  source 1..50: mol_type = other DNA
aaaaaaataataccacctcrcatttactcccaatatttcacaacttaacc

SEQ ID NO: 27126 - DNA, 50 bp, synthetic construct
  source 1..50: mol_type = other DNA
tctccaaaacaaataaactaaaccraaaatttacacatcaatccttcccc

SEQ ID NO: 27127 - DNA, 50 bp, synthetic construct
  source 1..50: mol_type = other DNA
ccttttcactcatattatcctttacccccaatcctcacctaaatttaaac

SEQ ID NO: 27128 - DNA, 50 bp, synthetic construct
  source 1..50: mol_type = other DNA
ctaatttcaaattaatattaaaaacatttacttaacracttaccaacaac

SEQ ID NO: 27129 - DNA, 50 bp, synthetic construct
  source 1..50: mol_type = other DNA
tttcataccraaaatatattcaaaataacaatattaaaaaccttacaaac

SEQ ID NO: 27130 - DNA, 50 bp, synthetic construct
  source 1..50: mol_type = other DNA
aaattatccttttccacraaattttactaacctttatcctccctaataac

SEQ ID NO: 27131 - DNA, 50 bp, synthetic construct
  source 1..50: mol_type = other DNA
atttaaaacctttacacaatattataacccttaaaattatccttttccac

SEQ ID NO: 27132 - DNA, 50 bp, synthetic construct
  source 1..50: mol_type = other DNA
aactacaatattatacaaaaattctaaaccacaactaattccacaatacc

SEQ ID NO: 27133 - DNA, 50 bp, synthetic construct
  source 1..50: mol_type = other DNA
ttaaaaaatcttatttactatacatcaatataatttcttattaccttatc

SEQ ID NO: 27134 - DNA, 50 bp, synthetic construct
  source 1..50: mol_type = other DNA
tttccttttccttctaactaatacatcctaacaaatacaatatataaaac

SEQ ID NO: 27135 - DNA, 50 bp, synthetic construct
  source 1..50: mol_type = other DNA
tattacataaaaccataaatacatataactactaaatcaaccattttaac

SEQ ID NO: 27136 - DNA, 50 bp, synthetic construct
  source 1..50: mol_type = other DNA
tacaaattccataaacracattacctcttcraaacaacaaaataaaaaac

SEQ ID NO: 27137 - DNA, 50 bp, synthetic construct
  source 1..50: mol_type = other DNA
caaacctctaatacccatcacaaatatattatcaattttcaaaaaaattc

SEQ ID NO: 27138 - DNA, 50 bp, synthetic construct
  source 1..50: mol_type = other DNA
actacaaaatcctaaaataccttctaaatcatcaaaaaataattcattac

SEQ ID NO: 27139 - DNA, 50 bp, synthetic construct
  source 1..50: mol_type = other DNA
taataaaaaattaaaaattccaaactcccctcrattaactactatataac

SEQ ID NO: 27140 - DNA, 50 bp, synthetic construct
  source 1..50: mol_type = other DNA
tacatacrtcaacatttactaaaacracttcttcttaatacaacaacacc

SEQ ID NO: 27141 - DNA, 50 bp, synthetic construct
  source 1..50: mol_type = other DNA
caaacacttccaactcactacaaaatacatacrtcaacatttactaaaac

SEQ ID NO: 27142 - DNA, 50 bp, synthetic construct
  source 1..50: mol_type = other DNA
atctcatctcataaatatttttctataaactctaccaaaactaatttcac

SEQ ID NO: 27143 - DNA, 50 bp, synthetic construct
  source 1..50: mol_type = other DNA
ratatccttaactaaacccrtaaaaaattaatatctcataaacaaaatac

SEQ ID NO: 27144 - DNA, 50 bp, synthetic construct
  source 1..50: mol_type = other DNA
aaaatatactcactactttataaataacaccratatccttaactaaaccc

SEQ ID NO: 27145 - DNA, 50 bp, synthetic construct
  source 1..50: mol_type = other DNA
actaatcttaataaaaaccaaaatatactcactactttataaataacacc

SEQ ID NO: 27146 - DNA, 50 bp, synthetic construct
  source 1..50: mol_type = other DNA
tatcatttataaaataataaacacaccctaattcccaccaaaaccaacac

SEQ ID NO: 27147 - DNA, 50 bp, synthetic construct
  source 1..50: mol_type = other DNA
tcatttataaaataataaacacaccctaattcccaccaaaaccaacacrc

SEQ ID NO: 27148 - DNA, 50 bp, synthetic construct
  source 1..50: mol_type = other DNA
ttaaaccaatttatataaacaaatcccttcacctaactaacaacctcacc

SEQ ID NO: 27149 - DNA, 50 bp, synthetic construct
  source 1..50: mol_type = other DNA
aaattccaatcttttcccaaaaattaaactaaccttttaaaataatacac

SEQ ID NO: 27150 - DNA, 50 bp, synthetic construct
  source 1..50: mol_type = other DNA
ctaataaattaaaactaatcttataacataactataaaccaataataatc

SEQ ID NO: 27151 - DNA, 50 bp, synthetic construct
  source 1..50: mol_type = other DNA
cattaaacttaaactctaacattaaaaaaacacatatttcaaaaatttcc

SEQ ID NO: 27152 - DNA, 50 bp, synthetic construct
  source 1..50: mol_type = other DNA
taactttcaaacctaaatctatctaatacttaaacctatatcccctcccc

SEQ ID NO: 27153 - DNA, 50 bp, synthetic construct
  source 1..50: mol_type = other DNA
ctctcracataactcaaaattctcattataaacataaataatcaacccac

SEQ ID NO: 27154 - DNA, 50 bp, synthetic construct
  source 1..50: mol_type = other DNA
ttcctcatcaatctatcacctttactaaaacatcactattaatttataac

SEQ ID NO: 27155 - DNA, 50 bp, synthetic construct
  source 1..50: mol_type = other DNA
aaataacaaactaataaaaaattcacttaaaatctaaaaaccttcttaac

SEQ ID NO: 27156 - DNA, 50 bp, synthetic construct
  source 1..50: mol_type = other DNA
aaaacrtaccaaacaacaacaaccaatacttaaaccccataaaatatctc

SEQ ID NO: 27157 - DNA, 50 bp, synthetic construct
  source 1..50: mol_type = other DNA
aaatcraaacacttcataaaacccaaacactaactattactatctaacac

SEQ ID NO: 27158 - DNA, 50 bp, synthetic construct
  source 1..50: mol_type = other DNA
ttaaatattaatacacatccactcaaaacacaataactcctcttctaatc

SEQ ID NO: 27159 - DNA, 50 bp, synthetic construct
  source 1..50: mol_type = other DNA
taaaatttttcracatctaaacttatttaccttaataactcatctccccc

SEQ ID NO: 27160 - DNA, 50 bp, synthetic construct
  source 1..50: mol_type = other DNA
ataaattctaaaatacttcaaccatttatctcttcctatacccctccctc

SEQ ID NO: 27161 - DNA, 50 bp, synthetic construct
  source 1..50: mol_type = other DNA
actctcaccrtaaccaattttaaacaaccaacrtaaaaataactaaatac

SEQ ID NO: 27162 - DNA, 50 bp, synthetic construct
  source 1..50: mol_type = other DNA
aatttctataatataaatactctcaccrtaaccaattttaaacaaccaac

SEQ ID NO: 27163 - DNA, 50 bp, synthetic construct
  source 1..50: mol_type = other DNA
aaaattaatactttccaccaaaactaaatcaaaaacrctattaccaaaac

SEQ ID NO: 27164 - DNA, 50 bp, synthetic construct
  source 1..50: mol_type = other DNA
ccttataaatttataaaattaatactttccaccaaaactaaatcaaaaac

SEQ ID NO: 27165 - DNA, 50 bp, synthetic construct
  source 1..50: mol_type = other DNA
aataattactaatctataaccaaaacactcraactcaaaaaaaatctctc

SEQ ID NO: 27166 - DNA, 50 bp, synthetic construct
  source 1..50: mol_type = other DNA
cctatctcaactccaacatttactatattaaactacaattaattcttatc

SEQ ID NO: 27167 - DNA, 50 bp, synthetic construct
  source 1..50: mol_type = other DNA
aatcrctatataccaaacactacaaaaaatattaaaaatacaaactcaac

SEQ ID NO: 27168 - DNA, 50 bp, synthetic construct
  source 1..50: mol_type = other DNA
cacrtctaatttttcaataattcactttaataaacatacaacaatcaatc

SEQ ID NO: 27169 - DNA, 50 bp, synthetic construct
  source 1..50: mol_type = other DNA
taactctttatactttataaattacatttccaatttaaaaatcccttcac

SEQ ID NO: 27170 - DNA, 50 bp, synthetic construct
  source 1..50: mol_type = other DNA
atatataacttatcaaaaatatttaaaacrctaaaaacccaaaacttatc

SEQ ID NO: 27171 - DNA, 50 bp, synthetic construct
  source 1..50: mol_type = other DNA
ctacaaaaacacraactacraaaacaacatccatcctccaaaaaatacac

SEQ ID NO: 27172 - DNA, 50 bp, synthetic construct
  source 1..50: mol_type = other DNA
cctaaccaaccttaaaaataaaaaattatccctaatcacaatcttcccac

SEQ ID NO: 27173 - DNA, 50 bp, synthetic construct
  source 1..50: mol_type = other DNA
ccaaaataaacccaatcaccactcttattcctaaacacccaaataattcc

SEQ ID NO: 27174 - DNA, 50 bp, synthetic construct
  source 1..50: mol_type = other DNA
ctactaaacacctacacacaaccctaccataacccaaaacattaaatacc

SEQ ID NO: 27175 - DNA, 50 bp, synthetic construct
  source 1..50: mol_type = other DNA
aaaatcaccaattcccttaacatccattaacactcacaaaacaaattaac

SEQ ID NO: 27176 - DNA, 50 bp, synthetic construct
  source 1..50: mol_type = other DNA
tttactaccatctcctaaaaaacaaaacttctcaatattttaaatccttc

SEQ ID NO: 27177 - DNA, 50 bp, synthetic construct
  source 1..50: mol_type = other DNA
taaacaaaaatacccccrataaataaataccattaaacaaaaatctatac

SEQ ID NO: 27178 - DNA, 50 bp, synthetic construct
  source 1..50: mol_type = other DNA
tacccccrataaataaataccattaaacaaaaatctatacraaaaaaacc

SEQ ID NO: 27179 - DNA, 50 bp, synthetic construct
  source 1..50: mol_type = other DNA
tcccccraaataaacctttctcttcttttctctacccatataaaatattc

SEQ ID NO: 27180 - DNA, 50 bp, synthetic construct
  source 1..50: mol_type = other DNA
ctacctcaaccaccrtataaacaaatcttcraaacraacttatttataac

SEQ ID NO: 27181 - DNA, 50 bp, synthetic construct
  source 1..50: mol_type = other DNA
caaaaaccattactcaaaacctaaactacctttcctctacctcaaccacc

SEQ ID NO: 27182 - DNA, 50 bp, synthetic construct
  source 1..50: mol_type = other DNA
aaaaaaaacaactcaaaccttaaataataacctttaacacaaacaatatc

SEQ ID NO: 27183 - DNA, 50 bp, synthetic construct
  source 1..50: mol_type = other DNA
taactcacaaccctcttaaacaataaatatacaaatatatcttatttccc

SEQ ID NO: 27184 - DNA, 50 bp, synthetic construct
  source 1..50: mol_type = other DNA
taatctttaacaaccrtacaaaaacaaaaacraccaaaaatacrctaaac

SEQ ID NO: 27185 - DNA, 50 bp, synthetic construct
  source 1..50: mol_type = other DNA
aaaaaactataaatcaaaaaaaacctattctccacctactcacrttcaac

SEQ ID NO: 27186 - DNA, 50 bp, synthetic construct
  source 1..50: mol_type = other DNA
tactaacctattaattttataatctttaacaaccrtacaaaaacaaaaac

SEQ ID NO: 27187 - DNA, 50 bp, synthetic construct
  source 1..50: mol_type = other DNA
tattctctctttttcctactaacctattaattttataatctttaacaacc

SEQ ID NO: 27188 - DNA, 50 bp, synthetic construct
  source 1..50: mol_type = other DNA
ataaaatacatttttaacattatctcatataatactactcaaaaaacccc

SEQ ID NO: 27189 - DNA, 50 bp, synthetic construct
  source 1..50: mol_type = other DNA
taaataccrtttcccrttcaactcttctacaaactatccttataaacttc

SEQ ID NO: 27190 - DNA, 50 bp, synthetic construct
  source 1..50: mol_type = other DNA
aaaaaaaatcaactatataaaaaattcaacaaaataaatatccrctaccc

SEQ ID NO: 27191 - DNA, 50 bp, synthetic construct
  source 1..50: mol_type = other DNA
ttctaccctttactataaaaactctaaaaacctcactacaaaacccattc

SEQ ID NO: 27192 - DNA, 50 bp, synthetic construct
  source 1..50: mol_type = other DNA
actaaacccatattaaccctaaaatcttaataaaaaattctctccrcccc

SEQ ID NO: 27193 - DNA, 50 bp, synthetic construct
  source 1..50: mol_type = other DNA
aaaaacraaaattaattacccaaactaatatcraactccttaactcaaac

SEQ ID NO: 27194 - DNA, 50 bp, synthetic construct
  source 1..50: mol_type = other DNA
aaaaccraaacctatttccaaaatttaaaataccraacacaataactcac

SEQ ID NO: 27195 - DNA, 50 bp, synthetic construct
  source 1..50: mol_type = other DNA
attcataaaactctaaattcraaacattctactataaactctaaaaaaac

SEQ ID NO: 27196 - DNA, 50 bp, synthetic construct
  source 1..50: mol_type = other DNA
ctcttttctcaacttattattcaataaacaattcataaaactctaaattc

SEQ ID NO: 27197 - DNA, 50 bp, synthetic construct
  source 1..50: mol_type = other DNA
attctaatacaaacctacatttcctaccaaaaaaaccaactcaaataaac

SEQ ID NO: 27198 - DNA, 50 bp, synthetic construct
  source 1..50: mol_type = other DNA
cctaacaacatatctaacrcataataaatactcaatcaatatttattaac

SEQ ID NO: 27199 - DNA, 50 bp, synthetic construct
  source 1..50: mol_type = other DNA
aaaaaacccttcctctaaaaccactaaatctcaaataaaacaactccccc

SEQ ID NO: 27200 - DNA, 50 bp, synthetic construct
  source 1..50: mol_type = other DNA
raacttcaaaaaaacaaaacctaataataataccracataataaaaccac

SEQ ID NO: 27201 - DNA, 50 bp, synthetic construct
  source 1..50: mol_type = other DNA
aaacaaataaaaataacaataacaaaacattcacrtaactctactatatc

SEQ ID NO: 27202 - DNA, 50 bp, synthetic construct
  source 1..50: mol_type = other DNA
accttttctttctctttaattataatcaatacataaaatataccaaaacc

SEQ ID NO: 27203 - DNA, 50 bp, synthetic construct
  source 1..50: mol_type = other DNA
ttctttctctttaattataatcaatacataaaatataccaaaaccrctac

SEQ ID NO: 27204 - DNA, 50 bp, synthetic construct
  source 1..50: mol_type = other DNA
taattataatcaatacataaaatataccaaaaccrctacraaacaaacac

SEQ ID NO: 27205 - DNA, 50 bp, synthetic construct
  source 1..50: mol_type = other DNA
caaaacaaaaataaaacaacacaacccttacatattctctacaaaattcc

SEQ ID NO: 27206 - DNA, 50 bp, synthetic construct
  source 1..50: mol_type = other DNA
taaaaactatactatttcactcctactttaaactctcaaaatttatttcc

SEQ ID NO: 27207 - DNA, 50 bp, synthetic construct
  source 1..50: mol_type = other DNA
aaaactatactatttcactcctactttaaactctcaaaatttatttccrc

SEQ ID NO: 27208 - DNA, 50 bp, synthetic construct
  source 1..50: mol_type = other DNA
aaaaaaaacttaaattctctcaactctccaaccaaactattactataaac

SEQ ID NO: 27209 - DNA, 50 bp, synthetic construct
  source 1..50: mol_type = other DNA
aaattctctcaactctccaaccaaactattactataaacraaaccatatc

SEQ ID NO: 27210 - DNA, 50 bp, synthetic construct
  source 1..50: mol_type = other DNA
aataccaaatttaatttaaatttatatttcacatttctcaaactaaaacc

SEQ ID NO: 27211 - DNA, 50 bp, synthetic construct
  source 1..50: mol_type = other DNA
acccctatcrttaacctttataactcaactaaatcttataaataaaacac

SEQ ID NO: 27212 - DNA, 50 bp, synthetic construct
  source 1..50: mol_type = other DNA
tcttataaataaaacacratacatttccccttttactaccccacaaacac

SEQ ID NO: 27213 - DNA, 50 bp, synthetic construct
  source 1..50: mol_type = other DNA
ataaacaaaaaatattcattacttatactccaatacatcaaataatcatc

SEQ ID NO: 27214 - DNA, 50 bp, synthetic construct
  source 1..50: mol_type = other DNA
ccctaatatcataaaaataactaaaccatcttataaataaaactaaaaac

SEQ ID NO: 27215 - DNA, 50 bp, synthetic construct
  source 1..50: mol_type = other DNA
taatacaacaatactaaactccratacaaaatataaaataaactcacrac

SEQ ID NO: 27216 - DNA, 50 bp, synthetic construct
  source 1..50: mol_type = other DNA
tcctaatacaacaatactaaactccratacaaaatataaaataaactcac

SEQ ID NO: 27217 - DNA, 50 bp, synthetic construct
  source 1..50: mol_type = other DNA
ttcaaatcacttttaaccaaaaacatcctaatacaacaatactaaactcc

SEQ ID NO: 27218 - DNA, 50 bp, synthetic construct
  source 1..50: mol_type = other DNA
tattaatccaaaaataaccacaactattacaaatattaccrtctataaac

SEQ ID NO: 27219 - DNA, 50 bp, synthetic construct
  source 1..50: mol_type = other DNA
tatatcacatacaatcaataacaaaaataataaaccctcaaaaacctctc

SEQ ID NO: 27220 - DNA, 50 bp, synthetic construct
  source 1..50: mol_type = other DNA
tcaaaaatcaacaaaacatcatcaataaatattcaaaaatctcacttaac

SEQ ID NO: 27221 - DNA, 50 bp, synthetic construct
  source 1..50: mol_type = other DNA
ccacacattttataatacaaaccaaattatttcaaatttcaaacaattac

SEQ ID NO: 27222 - DNA, 50 bp, synthetic construct
  source 1..50: mol_type = other DNA
tttacractaaaaactcaaaaatattccctatctacaaaaaattccrtcc

SEQ ID NO: 27223 - DNA, 50 bp, synthetic construct
  source 1..50: mol_type = other DNA
tcrtcraacraaactttctacaaataaaaaatacccttaaatcttcaatc

SEQ ID NO: 27224 - DNA, 50 bp, synthetic construct
  source 1..50: mol_type = other DNA
aataccctttcattccaattcaaaaaaaacaaaacctatcccaaaacctc

SEQ ID NO: 27225 - DNA, 50 bp, synthetic construct
  source 1..50: mol_type = other DNA
aaacacctctctctactccaccaaaacaaaacracaaaaaaacaacttac

SEQ ID NO: 27226 - DNA, 50 bp, synthetic construct
  source 1..50: mol_type = other DNA
aattaacataaaataaacactccaataaatacrtaaattatcttcctacc

SEQ ID NO: 27227 - DNA, 50 bp, synthetic construct
  source 1..50: mol_type = other DNA
tactttcctaaaaaattcttcaatttccaaaaacaataaccaaataaacc

SEQ ID NO: 27228 - DNA, 50 bp, synthetic construct
  source 1..50: mol_type = other DNA
cttcaatttccaaaaacaataaccaaataaaccraaacataaaaccaaac

SEQ ID NO: 27229 - DNA, 50 bp, synthetic construct
  source 1..50: mol_type = other DNA
ccaaaaacaataaccaaataaaccraaacataaaaccaaacraaattacc

SEQ ID NO: 27230 - DNA, 50 bp, synthetic construct
  source 1..50: mol_type = other DNA
caataaccaaataaaccraaacataaaaccaaacraaattaccrcaatac

SEQ ID NO: 27231 - DNA, 50 bp, synthetic construct
  source 1..50: mol_type = other DNA
attaataatccaaattcaccactcataaaacrtcaacctattaaaaaaac

SEQ ID NO: 27232 - DNA, 50 bp, synthetic construct
  source 1..50: mol_type = other DNA
taatccacaaccrtaattaaacaaaaaattaaaaacaccctaacataacc

SEQ ID NO: 27233 - DNA, 50 bp, synthetic construct
  source 1..50: mol_type = other DNA
cctcttataaacaaacrataataaacatctaaaaccactaatccacaacc

SEQ ID NO: 27234 - DNA, 50 bp, synthetic construct
  source 1..50: mol_type = other DNA
ccctttatttaaccacractataaaccaataatctcaaatatttaccatc

SEQ ID NO: 27235 - DNA, 50 bp, synthetic construct
  source 1..50: mol_type = other DNA
ttataaactacacrattaccttactaaaattcatataaaaaataattacc

SEQ ID NO: 27236 - DNA, 50 bp, synthetic construct
  source 1..50: mol_type = other DNA
caacccaactaaacaaaataatatccaacatataatttaattttctcatc

SEQ ID NO: 27237 - DNA, 50 bp, synthetic construct
  source 1..50: mol_type = other DNA
acaactaaaaacaaatataaccaaaataatacttctctttaaaaattccc

SEQ ID NO: 27238 - DNA, 50 bp, synthetic construct
  source 1..50: mol_type = other DNA
accrctaaacaaaaacrataacaaaaaataaatcaattatttactaaacc

SEQ ID NO: 27239 - DNA, 50 bp, synthetic construct
  source 1..50: mol_type = other DNA
tctaatcctcactatataaccaaaacataaaaaatcttcactactatcac

SEQ ID NO: 27240 - DNA, 50 bp, synthetic construct
  source 1..50: mol_type = other DNA
aaaaaaattcattcttttctaaaaaacacraaaaaaacacacatacccac

SEQ ID NO: 27241 - DNA, 50 bp, synthetic construct
  source 1..50: mol_type = other DNA
aaaaaaatacccataaaaaatatatatacrtaaacatatatactctcctc

SEQ ID NO: 27242 - DNA, 50 bp, synthetic construct
  source 1..50: mol_type = other DNA
ctactttcctacrtactacactttacaatttacaaaacactttcccacac

SEQ ID NO: 27243 - DNA, 50 bp, synthetic construct
  source 1..50: mol_type = other DNA
ctacrtactacactttacaatttacaaaacactttcccacacrtcatttc

SEQ ID NO: 27244 - DNA, 50 bp, synthetic construct
  source 1..50: mol_type = other DNA
aataaaaacaacaaaccccaacactactactaaccactaattaaaccacc

SEQ ID NO: 27245 - DNA, 50 bp, synthetic construct
  source 1..50: mol_type = other DNA
accctctcctaaaaaactacccccrcataaaaatataaacaaatatacac

SEQ ID NO: 27246 - DNA, 50 bp, synthetic construct
  source 1..50: mol_type = other DNA
ctctcaatcctacaaaataaaaaaccctaaccctaaataaaataaacccc

SEQ ID NO: 27247 - DNA, 50 bp, synthetic construct
  source 1..50: mol_type = other DNA
acctatctcataaactactcaacaaaaaaattaaaatttttaacaaaatc

SEQ ID NO: 27248 - DNA, 50 bp, synthetic construct
  source 1..50: mol_type = other DNA
atctaacccaaccccatcattaacaactaaaaaaaactaaactcctaaac

SEQ ID NO: 27249 - DNA, 50 bp, synthetic construct
  source 1..50: mol_type = other DNA
aaataaacatcatcatcatcctaccccattcttcccaacaaataacttac

SEQ ID NO: 27250 - DNA, 50 bp, synthetic construct
  source 1..50: mol_type = other DNA
tcaactttaacttaaatctaaaaataacccrtaacaacaataaacctctc

SEQ ID NO: 27251 - DNA, 50 bp, synthetic construct
  source 1..50: mol_type = other DNA
tacactctaacaaccctaaaataaacaatttcctcctcraaactcaaaac

SEQ ID NO: 27252 - DNA, 50 bp, synthetic construct
  source 1..50: mol_type = other DNA
tccctacttaaacacttaattacctactacaaaattacrtcttaaactcc

SEQ ID NO: 27253 - DNA, 50 bp, synthetic construct
  source 1..50: mol_type = other DNA
taacaaataactaaaaacratttaaaatattaccaataacctacccttcc

SEQ ID NO: 27254 - DNA, 50 bp, synthetic construct
  source 1..50: mol_type = other DNA
aatattaccaataacctacccttccrcaataactaaaaatccratattac

SEQ ID NO: 27255 - DNA, 50 bp, synthetic construct
  source 1..50: mol_type = other DNA
aaaaccataaccacaaccacaataatacaacratttcccctaaaaatacc

SEQ ID NO: 27256 - DNA, 50 bp, synthetic construct
  source 1..50: mol_type = other DNA
aaaaacaccttattttaaaaaaaccataaccacaaccacaataatacaac

SEQ ID NO: 27257 - DNA, 50 bp, synthetic construct
  source 1..50: mol_type = other DNA
atttccttaaattcattatcataaattcataattccccaacctttttcac

SEQ ID NO: 27258 - DNA, 50 bp, synthetic construct
  source 1..50: mol_type = other DNA
ttcccattataacttctcaactactttatcacctatataaccaaaatccc

SEQ ID NO: 27259 - DNA, 50 bp, synthetic construct
  source 1..50: mol_type = other DNA
aatcaccaataaacctatctaaaacaattacaactacttctaaaattacc

SEQ ID NO: 27260 - DNA, 50 bp, synthetic construct
  source 1..50: mol_type = other DNA
ctaaaacaaaaaatacaatccraattcaaattccttacctatatcccctc

SEQ ID NO: 27261 - DNA, 50 bp, synthetic construct
  source 1..50: mol_type = other DNA
aatctaaacccraattacattttctattttaaaactctttatataaccac

SEQ ID NO: 27262 - DNA, 50 bp, synthetic construct
  source 1..50: mol_type = other DNA
aacaataatataatattaacacactacaaccttaacctcccaactcaaac

SEQ ID NO: 27263 - DNA, 50 bp, synthetic construct
  source 1..50: mol_type = other DNA
ctctaaaaatcctaaccttcaaaatctaacttccaaaattctataaatac

SEQ ID NO: 27264 - DNA, 50 bp, synthetic construct
  source 1..50: mol_type = other DNA
ttaaaaaacrattccaaatcctactaacttacttacttacttactcrctc

SEQ ID NO: 27265 - DNA, 50 bp, synthetic construct
  source 1..50: mol_type = other DNA
ccaattaaaaaacrattccaaatcctactaacttacttacttacttactc

SEQ ID NO: 27266 - DNA, 50 bp, synthetic construct
  source 1..50: mol_type = other DNA
taatttacctctatactaccaaactattcrccaaaaaataacaaactacc

SEQ ID NO: 27267 - DNA, 50 bp, synthetic construct
  source 1..50: mol_type = other DNA
acacaaaaacaaaccacaaaatacatttaaaacccaaatctacttatttc

SEQ ID NO: 27268 - DNA, 50 bp, synthetic construct
  source 1..50: mol_type = other DNA
cacaaaatacatttaaaacccaaatctacttatttcraaaataaaaccrc

SEQ ID NO: 27269 - DNA, 50 bp, synthetic construct
  source 1..50: mol_type = other DNA
tacaacaataaaaaaaatttcctccaactatcaatacttctaaatccacc

SEQ ID NO: 27270 - DNA, 50 bp, synthetic construct
  source 1..50: mol_type = other DNA
caataaaaaaaatttcctccaactatcaatacttctaaatccaccrtttc

SEQ ID NO: 27271 - DNA, 50 bp, synthetic construct
  source 1..50: mol_type = other DNA
cctccaactatcaatacttctaaatccaccrtttcractttaacattacc

SEQ ID NO: 27272 - DNA, 50 bp, synthetic construct
  source 1..50: mol_type = other DNA
taacattaccrtaaataaccaccctaaacctctttctttataccaaactc

SEQ ID NO: 27273 - DNA, 50 bp, synthetic construct
  source 1..50: mol_type = other DNA
actaaattaccataaacacttacttaaattaattaaaaaaactatttacc

SEQ ID NO: 27274 - DNA, 50 bp, synthetic construct
  source 1..50: mol_type = other DNA
aaaaacaaacacttttaaaaataaaacccrttatacactttctcractac

SEQ ID NO: 27275 - DNA, 50 bp, synthetic construct
  source 1..50: mol_type = other DNA
crctaccacaacaaaaccaacaaaaacaaacacttttaaaaataaaaccc

SEQ ID NO: 27276 - DNA, 50 bp, synthetic construct
  source 1..50: mol_type = other DNA
acaaacraaaatcctaaaatccratcttatctatcttcctacctttaaac

SEQ ID NO: 27277 - DNA, 50 bp, synthetic construct
  source 1..50: mol_type = other DNA
caccrcatacaactcaaaattcaaaatttccactataaccrtaaaaatac

SEQ ID NO: 27278 - DNA, 50 bp, synthetic construct
  source 1..50: mol_type = other DNA
atcctaaactcaccrcatacaactcaaaattcaaaatttccactataacc

SEQ ID NO: 27279 - DNA, 50 bp, synthetic construct
  source 1..50: mol_type = other DNA
ctaaataatactctttacttcccrtaaaaactctacttacccaacaaccc

SEQ ID NO: 27280 - DNA, 50 bp, synthetic construct
  source 1..50: mol_type = other DNA
tcaaccctacctcaacattccacaaaactaaataatactctttacttccc

SEQ ID NO: 27281 - DNA, 50 bp, synthetic construct
  source 1..50: mol_type = other DNA
aaaaaacattaacaaaccctacrttacttcaaacaaattaaaaaccccac

SEQ ID NO: 27282 - DNA, 50 bp, synthetic construct
  source 1..50: mol_type = other DNA
tcttacttaaacatatcctaaataaaaaacttcatctacattcattcccc

SEQ ID NO: 27283 - DNA, 50 bp, synthetic construct
  source 1..50: mol_type = other DNA
aactatatataaaaccatcacaacataaatatcctccacatataatatac

SEQ ID NO: 27284 - DNA, 50 bp, synthetic construct
  source 1..50: mol_type = other DNA
ttaataccaaaaaataaaaccaaaaaaaaccaatactcaataactaccac

SEQ ID NO: 27285 - DNA, 50 bp, synthetic construct
  source 1..50: mol_type = other DNA
aaatcccctaaaataataaatactataccattaccaccattaacaccttc

SEQ ID NO: 27286 - DNA, 50 bp, synthetic construct
  source 1..50: mol_type = other DNA
aaactaccaaaattttaaaccactaaaaaataatatattttaataccacc

SEQ ID NO: 27287 - DNA, 50 bp, synthetic construct
  source 1..50: mol_type = other DNA
caaaaaatccaaataaaatccaatctccttaactaaattcacaaaacccc

SEQ ID NO: 27288 - DNA, 50 bp, synthetic construct
  source 1..50: mol_type = other DNA
ccaaataaaatccaatctccttaactaaattcacaaaaccccrtctacac

SEQ ID NO: 27289 - DNA, 50 bp, synthetic construct
  source 1..50: mol_type = other DNA
ccctcctaatacaatctataatcacctacaaacaaaaacaaataaaatcc

SEQ ID NO: 27290 - DNA, 50 bp, synthetic construct
  source 1..50: mol_type = other DNA
aatacaatctataatcacctacaaacaaaaacaaataaaatccrtcattc

SEQ ID NO: 27291 - DNA, 50 bp, synthetic construct
  source 1..50: mol_type = other DNA
atctataatcacctacaaacaaaaacaaataaaatccrtcattcractac

SEQ ID NO: 27292 - DNA, 50 bp, synthetic construct
  source 1..50: mol_type = other DNA
aataacttaaactaaacaaaccaaataaccrtaacaaaactcaaaaaaac

SEQ ID NO: 27293 - DNA, 50 bp, synthetic construct
  source 1..50: mol_type = other DNA
caataaccacaacracaaacaataacttaaactaaacaaaccaaataacc

SEQ ID NO: 27294 - DNA, 50 bp, synthetic construct
  source 1..50: mol_type = other DNA
taaaccttaccacratcacttaatttacccaacctaaatcactacctatc

SEQ ID NO: 27295 - DNA, 50 bp, synthetic construct
  source 1..50: mol_type = other DNA
cataccaacctaaaatatcccaaacctattcaacttacttcctccaaaac

SEQ ID NO: 27296 - DNA, 50 bp, synthetic construct
  source 1..50: mol_type = other DNA
atacattcttcracaaatatttataaaataaccatactttatcaaacacc

SEQ ID NO: 27297 - DNA, 50 bp, synthetic construct
  source 1..50: mol_type = other DNA
tcatcaaacattaaaaatacccaaatacatattcatcccatacattcttc

SEQ ID NO: 27298 - DNA, 50 bp, synthetic construct
  source 1..50: mol_type = other DNA
ccttatccattaaatatatttccccctctcrcttttccttctttatatac

SEQ ID NO: 27299 - DNA, 50 bp, synthetic construct
  source 1..50: mol_type = other DNA
tccattaaattttactcatcccttatccattaaatatatttccccctctc

SEQ ID NO: 27300 - DNA, 50 bp, synthetic construct
  source 1..50: mol_type = other DNA
taaaacccaataaactaaaaaaaccccaaaactaaacttcacataacccc

SEQ ID NO: 27301 - DNA, 50 bp, synthetic construct
  source 1..50: mol_type = other DNA
aaacccaataaactaaaaaaaccccaaaactaaacttcacataaccccrc

SEQ ID NO: 27302 - DNA, 50 bp, synthetic construct
  source 1..50: mol_type = other DNA
taaaccataaaccccacaaaaaacaaaaactaccatcaacctaataaaac

SEQ ID NO: 27303 - DNA, 50 bp, synthetic construct
  source 1..50: mol_type = other DNA
aactaaaattctattttctaaaaaacactaaattaatttcccccrctaac

SEQ ID NO: 27304 - DNA, 50 bp, synthetic construct
  source 1..50: mol_type = other DNA
ctaataaactaaaattctattttctaaaaaacactaaattaatttccccc

SEQ ID NO: 27305 - DNA, 50 bp, synthetic construct
  source 1..50: mol_type = other DNA
ctacatctatataccttaatttaaaccacaaatatctataaatttaaatc

SEQ ID NO: 27306 - DNA, 50 bp, synthetic construct
  source 1..50: mol_type = other DNA
atctataactcaaatcaaaacatataaatacaataactcttaaaacattc

SEQ ID NO: 27307 - DNA, 50 bp, synthetic construct
  source 1..50: mol_type = other DNA
tattttatcaaacccaaattcctctaaatccaaatcttctaacatatccc

SEQ ID NO: 27308 - DNA, 50 bp, synthetic construct
  source 1..50: mol_type = other DNA
aaaaaacaaaacaaataacaataaacatttacatctacacracaaaaaac

SEQ ID NO: 27309 - DNA, 50 bp, synthetic construct
  source 1..50: mol_type = other DNA
aacatccaaccctatataaactaccctaattacaaaataaacctcctacc

SEQ ID NO: 27310 - DNA, 50 bp, synthetic construct
  source 1..50: mol_type = other DNA
tctatataaccaatcttttctttaaaaaaattcttccttttaaaataatc

SEQ ID NO: 27311 - DNA, 50 bp, synthetic construct
  source 1..50: mol_type = other DNA
ccacccaatataacatataatcaattaaaaataacttattccttaccccc

SEQ ID NO: 27312 - DNA, 50 bp, synthetic construct
  source 1..50: mol_type = other DNA
atcaaatcttcrcaacccactcaccatataacttaaaacaaacaaataac

SEQ ID NO: 27313 - DNA, 50 bp, synthetic construct
  source 1..50: mol_type = other DNA
ataaacacttccaaaaacaccttaatacttcattacaaaaataataaaac

SEQ ID NO: 27314 - DNA, 50 bp, synthetic construct
  source 1..50: mol_type = other DNA
tactaaaaaaacacaacaaaatctacraatataaataaaattctacttcc

SEQ ID NO: 27315 - DNA, 50 bp, synthetic construct
  source 1..50: mol_type = other DNA
ttctattctaaaaacacaactcaatactaaaaaaacacaacaaaatctac

SEQ ID NO: 27316 - DNA, 50 bp, synthetic construct
  source 1..50: mol_type = other DNA
attactatttccatctactttaaatccacatctactatatactcaaaacc

SEQ ID NO: 27317 - DNA, 50 bp, synthetic construct
  source 1..50: mol_type = other DNA
aatttctacaaaccttaaaaacctaataaaaatctacatcctaaaacaac

SEQ ID NO: 27318 - DNA, 50 bp, synthetic construct
  source 1..50: mol_type = other DNA
catataacctccrataaaaaatctaaacttttaaatcttaaatccatctc

SEQ ID NO: 27319 - DNA, 50 bp, synthetic construct
  source 1..50: mol_type = other DNA
aaaaaatctaaacttttaaatcttaaatccatctcraacacaaaaataac

SEQ ID NO: 27320 - DNA, 50 bp, synthetic construct
  source 1..50: mol_type = other DNA
tctaaacttttaaatcttaaatccatctcraacacaaaaataacrataac

SEQ ID NO: 27321 - DNA, 50 bp, synthetic construct
  source 1..50: mol_type = other DNA
rcttctccaaccaaatacttactcaacacrtcaatcattattaaaacaac

SEQ ID NO: 27322 - DNA, 50 bp, synthetic construct
  source 1..50: mol_type = other DNA
ataacrcccatctcacraaatatataaacrttatctcaataataactaac

SEQ ID NO: 27323 - DNA, 50 bp, synthetic construct
  source 1..50: mol_type = other DNA
rttatctcaataataactaacrtactaaacaaatacctaactaaaaaaac

SEQ ID NO: 27324 - DNA, 50 bp, synthetic construct
  source 1..50: mol_type = other DNA
ttcaaaaaaaattattactctttctaactactccacraaacacrccaacc

SEQ ID NO: 27325 - DNA, 50 bp, synthetic construct
  source 1..50: mol_type = other DNA
ataaatactatacattcaaaaaaaattattactctttctaactactccac

SEQ ID NO: 27326 - DNA, 50 bp, synthetic construct
  source 1..50: mol_type = other DNA
acrctcatctatccaactccttaacctatactcctactaataaatactcc

SEQ ID NO: 27327 - DNA, 50 bp, synthetic construct
  source 1..50: mol_type = other DNA
acraaacacctattaacaaaaacacaaaccaaaaaactaaataaataaac

SEQ ID NO: 27328 - DNA, 50 bp, synthetic construct
  source 1..50: mol_type = other DNA
ccctaaataaaactattcttcaaatacaaatctaaaccttctcattctac

SEQ ID NO: 27329 - DNA, 50 bp, synthetic construct
  source 1..50: mol_type = other DNA
tctctacaacatctaacactactactcctttcctcttactacaaaatctc

SEQ ID NO: 27330 - DNA, 50 bp, synthetic construct
  source 1..50: mol_type = other DNA
ctaactaaattatctcaaacttaccaaaaacattcataaaattcaaaccc

SEQ ID NO: 27331 - DNA, 50 bp, synthetic construct
  source 1..50: mol_type = other DNA
tacctttaaactataaacttcttacaaaataattcatttttcccattccc

SEQ ID NO: 27332 - DNA, 50 bp, synthetic construct
  source 1..50: mol_type = other DNA
tcaaaacccacaaaaccractaacaataacctatatcaaaaatacccacc

SEQ ID NO: 27333 - DNA, 50 bp, synthetic construct
  source 1..50: mol_type = other DNA
actcctaacacaaaccactaccaaccraccttataaatcctaaaaacatc

SEQ ID NO: 27334 - DNA, 50 bp, synthetic construct
  source 1..50: mol_type = other DNA
cacraataactatacctaacaaaatataccccacatatcaattacactcc

SEQ ID NO: 27335 - DNA, 50 bp, synthetic construct
  source 1..50: mol_type = other DNA
actataaaattataaccaaaatactctatctacttataaacaccccaccc

SEQ ID NO: 27336 - DNA, 50 bp, synthetic construct
  source 1..50: mol_type = other DNA
ccaaatatcaatcctataacctaacctcaaaaccactcttataacccacc

SEQ ID NO: 27337 - DNA, 50 bp, synthetic construct
  source 1..50: mol_type = other DNA
ctactactaaattcactaatactaaaattaaatcactactaaactaaaac

SEQ ID NO: 27338 - DNA, 50 bp, synthetic construct
  source 1..50: mol_type = other DNA
ctactaaactaaaacrcactaaccataaaaacaacatataaacaaaaacc

SEQ ID NO: 27339 - DNA, 50 bp, synthetic construct
  source 1..50: mol_type = other DNA
rtataaaattcctaataaaacraacracracaataaattaccccaatacc

SEQ ID NO: 27340 - DNA, 50 bp, synthetic construct
  source 1..50: mol_type = other DNA
aaaacaacatataaacaaaaaccrcracactaaaataatttattaccrcc

SEQ ID NO: 27341 - DNA, 50 bp, synthetic construct
  source 1..50: mol_type = other DNA
catacaattatcccatcctataaaaatatcrcatcctataaaaacccaac

SEQ ID NO: 27342 - DNA, 50 bp, synthetic construct
  source 1..50: mol_type = other DNA
caaacccraatataaatttccatacaattatcccatcctataaaaatatc

SEQ ID NO: 27343 - DNA, 50 bp, synthetic construct
  source 1..50: mol_type = other DNA
ctaccaaataaaataactcttactcaaacrtaattactcaacacaaaccc

SEQ ID NO: 27344 - DNA, 50 bp, synthetic construct
  source 1..50: mol_type = other DNA
aattacrtaatttttttcttttcttttctaaattcatcttaccaacaatc

SEQ ID NO: 27345 - DNA, 50 bp, synthetic construct
  source 1..50: mol_type = other DNA
aaattcatcttaccaacaatcrtatttaaaaatatacacaactcaccttc

SEQ ID NO: 27346 - DNA, 50 bp, synthetic construct
  source 1..50: mol_type = other DNA
aactcaccttcrttcaaccctttacaatttacctccataaccttctttac

SEQ ID NO: 27347 - DNA, 50 bp, synthetic construct
  source 1..50: mol_type = other DNA
cctttacaatttacctccataaccttctttacrtcttaacaccatcttac

SEQ ID NO: 27348 - DNA, 50 bp, synthetic construct
  source 1..50: mol_type = other DNA
ataaaaccatactaaaacactatacccaaactctaaacttccaaaaatcc

SEQ ID NO: 27349 - DNA, 50 bp, synthetic construct
  source 1..50: mol_type = other DNA
aacattaaacctataccacccactaaaataattttaattttctattctac

SEQ ID NO: 27350 - DNA, 50 bp, synthetic construct
  source 1..50: mol_type = other DNA
catactcatccracaaacatttaccaaaaacctactatataccaaccacc

SEQ ID NO: 27351 - DNA, 50 bp, synthetic construct
  source 1..50: mol_type = other DNA
aaaccctaaacrataattaacacacaataaacccttaataaatatttatc

SEQ ID NO: 27352 - DNA, 50 bp, synthetic construct
  source 1..50: mol_type = other DNA
catattacaccaaaaaaatacttaaaccaaacctaccaaactctactatc

SEQ ID NO: 27353 - DNA, 50 bp, synthetic construct
  source 1..50: mol_type = other DNA
caaaaatatacctatataaataataactatcttctcctcaccaaaaaatc

SEQ ID NO: 27354 - DNA, 50 bp, synthetic construct
  source 1..50: mol_type = other DNA
aacactcattaaaaaacaactcttacraccactacctaatatattttaac

SEQ ID NO: 27355 - DNA, 50 bp, synthetic construct
  source 1..50: mol_type = other DNA
actcttacraccactacctaatatattttaacrtaaacaataaaatcatc

SEQ ID NO: 27356 - DNA, 50 bp, synthetic construct
  source 1..50: mol_type = other DNA
aaaaaactaacaaattaaataacaaacttaacacaactaaccatcaaaac

SEQ ID NO: 27357 - DNA, 50 bp, synthetic construct
  source 1..50: mol_type = other DNA
ttacctacatcctatataaattcacaaataaaaaaccrtctacaaaatac

SEQ ID NO: 27358 - DNA, 50 bp, synthetic construct
  source 1..50: mol_type = other DNA
aacctcttcccctttacctacatcctatataaattcacaaataaaaaacc

SEQ ID NO: 27359 - DNA, 50 bp, synthetic construct
  source 1..50: mol_type = other DNA
accccttttaaaatataactaactctaaactaaccaaaccttaaccaaac

SEQ ID NO: 27360 - DNA, 50 bp, synthetic construct
  source 1..50: mol_type = other DNA
aatcaaaaataacaaaccacaaaacraaatccrtacataaccatatccac

SEQ ID NO: 27361 - DNA, 50 bp, synthetic construct
  source 1..50: mol_type = other DNA
acaaaaaatttcccaacaaatcaaaaataacaaaccacaaaacraaatcc

SEQ ID NO: 27362 - DNA, 50 bp, synthetic construct
  source 1..50: mol_type = other DNA
aaaaatactaaatacttctcaaaccttcaaacaactaaaactttctactc

SEQ ID NO: 27363 - DNA, 50 bp, synthetic construct
  source 1..50: mol_type = other DNA
acaatcactcactccacaaatattcacrtactttaaaccaaaataatttc

SEQ ID NO: 27364 - DNA, 50 bp, synthetic construct
  source 1..50: mol_type = other DNA
cracaaaaatatcttatcctacatactattaccatattctctaaaaaccc

SEQ ID NO: 27365 - DNA, 50 bp, synthetic construct
  source 1..50: mol_type = other DNA
acaaaaatatcttatcctacatactattaccatattctctaaaaacccrc

SEQ ID NO: 27366 - DNA, 50 bp, synthetic construct
  source 1..50: mol_type = other DNA
atatcttatcctacatactattaccatattctctaaaaacccrcracttc

SEQ ID NO: 27367 - DNA, 50 bp, synthetic construct
  source 1..50: mol_type = other DNA
taacaaaaaactaacactccctaaacctcaatcaacttcraaaatctacc

SEQ ID NO: 27368 - DNA, 50 bp, synthetic construct
  source 1..50: mol_type = other DNA
tatataacctataacaaaaaactaacactccctaaacctcaatcaacttc

SEQ ID NO: 27369 - DNA, 50 bp, synthetic construct
  source 1..50: mol_type = other DNA
aaacacactcaaaataaaaacaacaacaataaaacccraaaacacaactc

SEQ ID NO: 27370 - DNA, 50 bp, synthetic construct
  source 1..50: mol_type = other DNA
tactcctattactaaataataactaatatctattacataccaaacactac

SEQ ID NO: 27371 - DNA, 50 bp, synthetic construct
  source 1..50: mol_type = other DNA
tattcaaaaaaatccaaatctctaaacatcaatttcctcctctttacaac

SEQ ID NO: 27372 - DNA, 50 bp, synthetic construct
  source 1..50: mol_type = other DNA
acctttctaaacatcataaaactaaaaatttcaatcccaacctctctctc

SEQ ID NO: 27373 - DNA, 50 bp, synthetic construct
  source 1..50: mol_type = other DNA
aaaaaacctacttaaataaataacaaactttttatcattaacaaactacc

SEQ ID NO: 27374 - DNA, 50 bp, synthetic construct
  source 1..50: mol_type = other DNA
tttctttcattctaataaactccttaaattaaacaaaaatcaaactcccc

SEQ ID NO: 27375 - DNA, 50 bp, synthetic construct
  source 1..50: mol_type = other DNA
tccttacttatcactcctctttaaacacttatccaaactatttataaccc

SEQ ID NO: 27376 - DNA, 50 bp, synthetic construct
  source 1..50: mol_type = other DNA
aaaaccataatctctactacttaaactaaactactacatctaccctaaac

SEQ ID NO: 27377 - DNA, 50 bp, synthetic construct
  source 1..50: mol_type = other DNA
atttatcctatttaaacactatcaaacctataaccataatcttttacacc

SEQ ID NO: 27378 - DNA, 50 bp, synthetic construct
  source 1..50: mol_type = other DNA
aaaatcatactttatttaccttctcattatttttaaaaacaaacaaaaac

SEQ ID NO: 27379 - DNA, 50 bp, synthetic construct
  source 1..50: mol_type = other DNA
atactaataactttataaattaatttcaaatttaactccatttttctaac

SEQ ID NO: 27380 - DNA, 50 bp, synthetic construct
  source 1..50: mol_type = other DNA
aactctaatcctaattctaaccttcctaactatataactttaaacaaatc

SEQ ID NO: 27381 - DNA, 50 bp, synthetic construct
  source 1..50: mol_type = other DNA
atcccattttcctctaataaaaaatactactaaacrtaaaaatactaaac

SEQ ID NO: 27382 - DNA, 50 bp, synthetic construct
  source 1..50: mol_type = other DNA
aactctacccacatcatcccattttcctctaataaaaaatactactaaac

SEQ ID NO: 27383 - DNA, 50 bp, synthetic construct
  source 1..50: mol_type = other DNA
caaaatcacccacaaaatcactccaaatttcaaatatactaatacttacc

SEQ ID NO: 27384 - DNA, 50 bp, synthetic construct
  source 1..50: mol_type = other DNA
aaaaaaaccactactaaaaattcacaatccttacttcaatattatcttac

SEQ ID NO: 27385 - DNA, 50 bp, synthetic construct
  source 1..50: mol_type = other DNA
aaaccactactaaaaattcacaatccttacttcaatattatcttacrctc

SEQ ID NO: 27386 - DNA, 50 bp, synthetic construct
  source 1..50: mol_type = other DNA
ccttacttcaatattatcttacrctcraaataccttaaaaaacttacaac

SEQ ID NO: 27387 - DNA, 50 bp, synthetic construct
  source 1..50: mol_type = other DNA
cacaattcttctcratcctaaacttcaaaatctttaaaaaccaaaatcrc

SEQ ID NO: 27388 - DNA, 50 bp, synthetic construct
  source 1..50: mol_type = other DNA
aacacaattcttctcratcctaaacttcaaaatctttaaaaaccaaaatc

SEQ ID NO: 27389 - DNA, 50 bp, synthetic construct
  source 1..50: mol_type = other DNA
tatttacacraaattatcaaaaatcattctaccaataataacctattatc

SEQ ID NO: 27390 - DNA, 50 bp, synthetic construct
  source 1..50: mol_type = other DNA
tctataccaaaaatcaacaatctaaattctaacactaaaaaaaacaaaac

SEQ ID NO: 27391 - DNA, 50 bp, synthetic construct
  source 1..50: mol_type = other DNA
aataaaataccacttacccrtaattcaaatatttcacrtttttataatac

SEQ ID NO: 27392 - DNA, 50 bp, synthetic construct
  source 1..50: mol_type = other DNA
rtttattaaatctaataaaataccacttacccrtaattcaaatatttcac

SEQ ID NO: 27393 - DNA, 50 bp, synthetic construct
  source 1..50: mol_type = other DNA
taataataacaccaaatcaacacatacraacccaactatcctaaacaaac

SEQ ID NO: 27394 - DNA, 50 bp, synthetic construct
  source 1..50: mol_type = other DNA
acaaacraaaatttataattacrctacaaaacccaaacttcaatctcttc

SEQ ID NO: 27395 - DNA, 50 bp, synthetic construct
  source 1..50: mol_type = other DNA
aacccaaacttcaatctcttcraattctattttaatttaaaaaaaataac

SEQ ID NO: 27396 - DNA, 50 bp, synthetic construct
  source 1..50: mol_type = other DNA
racttaccaataccccctttaaactataaataaaccccaaattctactcc

SEQ ID NO: 27397 - DNA, 50 bp, synthetic construct
  source 1..50: mol_type = other DNA
ttacaaaaatattaaaatcttactttccacaaacttataacctaatacac

SEQ ID NO: 27398 - DNA, 50 bp, synthetic construct
  source 1..50: mol_type = other DNA
taatacacrtttccaattttacacaatatcacaacaaatataccttccac

SEQ ID NO: 27399 - DNA, 50 bp, synthetic construct
  source 1..50: mol_type = other DNA
acrcccttaatttttcacaaccaaacataaaactaaaatctcaaaactac

SEQ ID NO: 27400 - DNA, 50 bp, synthetic construct
  source 1..50: mol_type = other DNA
tctcaaaactacrattactataattctctaattcctactcaaaaaattac

SEQ ID NO: 27401 - DNA, 50 bp, synthetic construct
  source 1..50: mol_type = other DNA
acaaacaaaaaattaaccttataaattccctcatcctcacaaaaccaaac

SEQ ID NO: 27402 - DNA, 50 bp, synthetic construct
  source 1..50: mol_type = other DNA
catttctccctcctacttaatccaaaaaacaaaaaacaccaaaaaaactc

SEQ ID NO: 27403 - DNA, 50 bp, synthetic construct
  source 1..50: mol_type = other DNA
caaataacaacttcatatatcaaaccccatctaactcccaaatcaacccc

SEQ ID NO: 27404 - DNA, 50 bp, synthetic construct
  source 1..50: mol_type = other DNA
aacctaacraaatacaaaaaaatctttaaaaactactctcttctcacccc

SEQ ID NO: 27405 - DNA, 50 bp, synthetic construct
  source 1..50: mol_type = other DNA
ttactccttccacraaacctatttaaaaattcaataattcacttcccrtc

SEQ ID NO: 27406 - DNA, 50 bp, synthetic construct
  source 1..50: mol_type = other DNA
aaaccaaaactatttacaaaacccraaaaataaacccaaacttaacaacc

SEQ ID NO: 27407 - DNA, 50 bp, synthetic construct
  source 1..50: mol_type = other DNA
ataaccccaacaactaaatatatacaaaataaaaaataccaaacacaacc

SEQ ID NO: 27408 - DNA, 50 bp, synthetic construct
  source 1..50: mol_type = other DNA
aaaaactcctaccctttattataatattaacttctttattcaattacacc

SEQ ID NO: 27409 - DNA, 50 bp, synthetic construct
  source 1..50: mol_type = other DNA
atctacccraatcraaacaccataaatcacttcctataaacaaactacac

SEQ ID NO: 27410 - DNA, 50 bp, synthetic construct
  source 1..50: mol_type = other DNA
ccccaaacrtacaatctacccacaaaaaataattcataatactccrattc

SEQ ID NO: 27411 - DNA, 50 bp, synthetic construct
  source 1..50: mol_type = other DNA
aaaaaataattcataatactccrattcraacaaacctaactacaaaaaac

SEQ ID NO: 27412 - DNA, 50 bp, synthetic construct
  source 1..50: mol_type = other DNA
cctatataaaccatatcttctataataatttaaccaaacaactataaccc

SEQ ID NO: 27413 - DNA, 50 bp, synthetic construct
  source 1..50: mol_type = other DNA
aaaacrtaatttcactatataaaccaaaataatctcratctcctaacctc

SEQ ID NO: 27414 - DNA, 50 bp, synthetic construct
  source 1..50: mol_type = other DNA
atcacraaattaaaaaatcraaaccatcctaactcacacaataaaaccac

SEQ ID NO: 27415 - DNA, 50 bp, synthetic construct
  source 1..50: mol_type = other DNA
ccccaactttatactactcttcaaaaaataacattccataaaaaaaaccc

SEQ ID NO: 27416 - DNA, 50 bp, synthetic construct
  source 1..50: mol_type = other DNA
cccataaaataccactccctaaaaaacaatacaaaattaaaaaacccacc

SEQ ID NO: 27417 - DNA, 50 bp, synthetic construct
  source 1..50: mol_type = other DNA
aaaaacaatacaaaattaaaaaacccaccraaaactaataaataaaaccc

SEQ ID NO: 27418 - DNA, 50 bp, synthetic construct
  source 1..50: mol_type = other DNA
aataaactaaaaaccaaacaacaaatacraaaaactaactctataaattc

SEQ ID NO: 27419 - DNA, 50 bp, synthetic construct
  source 1..50: mol_type = other DNA
caacaaatacraaaaactaactctataaattcrcctaaacatcaaacctc

SEQ ID NO: 27420 - DNA, 50 bp, synthetic construct
  source 1..50: mol_type = other DNA
actaaacrcataaatacaaaaaaaacrcctaaccaacctaaaatcccatc

SEQ ID NO: 27421 - DNA, 50 bp, synthetic construct
  source 1..50: mol_type = other DNA
taacccccaacatcaatacataataaaaactcaaccaatattaactaaac

SEQ ID NO: 27422 - DNA, 50 bp, synthetic construct
  source 1..50: mol_type = other DNA
atactaaaaaccaaaactaaaaaaacactacacatttacaacctaaaaac

SEQ ID NO: 27423 - DNA, 50 bp, synthetic construct
  source 1..50: mol_type = other DNA
tatactattcctccctcttctaaactttctccctaaacacctaacacaac

SEQ ID NO: 27424 - DNA, 50 bp, synthetic construct
  source 1..50: mol_type = other DNA
aaataaaaacacccaacaacrcaacctttatactaactcacaatcaatac

SEQ ID NO: 27425 - DNA, 50 bp, synthetic construct
  source 1..50: mol_type = other DNA
aaaactcctaattaaaacctaactcaacatcctaccccaaacaaactctc

SEQ ID NO: 27426 - DNA, 50 bp, synthetic construct
  source 1..50: mol_type = other DNA
atataataacaaaaacatcacctactcatatctcctaccctacaaacaac

SEQ ID NO: 27427 - DNA, 50 bp, synthetic construct
  source 1..50: mol_type = other DNA
tataaacaaataatattcctattattacacaacrtactaaataaatcacc

SEQ ID NO: 27428 - DNA, 50 bp, synthetic construct
  source 1..50: mol_type = other DNA
ttacacaacrtactaaataaatcaccraaaatttcctaaacatttaaaac

SEQ ID NO: 27429 - DNA, 50 bp, synthetic construct
  source 1..50: mol_type = other DNA
tactccctcaaaactctccctaatacattattttcctcaatcataactcc

SEQ ID NO: 27430 - DNA, 50 bp, synthetic construct
  source 1..50: mol_type = other DNA
aaaaacaattcacaacaaacraccacctttcaatctaaaacactacatcc

SEQ ID NO: 27431 - DNA, 50 bp, synthetic construct
  source 1..50: mol_type = other DNA
aaaaaataacctaaaaattctcaactctcaaacaaaatacctaaaaaaac

SEQ ID NO: 27432 - DNA, 50 bp, synthetic construct
  source 1..50: mol_type = other DNA
acctaattacacctctactaaaaaaatataaatcraaaacaaattacccc

SEQ ID NO: 27433 - DNA, 50 bp, synthetic construct
  source 1..50: mol_type = other DNA
aaaacaaattaccccrtaaatcaaaattaaaattctaaataaaactccac

SEQ ID NO: 27434 - DNA, 50 bp, synthetic construct
  source 1..50: mol_type = other DNA
acttcataaacccctatacccatatataaacacaaatataataacaaaac

SEQ ID NO: 27435 - DNA, 50 bp, synthetic construct
  source 1..50: mol_type = other DNA
ataaacccctatacccatatataaacacaaatataataacaaaacraccc

SEQ ID NO: 27436 - DNA, 50 bp, synthetic construct
  source 1..50: mol_type = other DNA
aacaacataaaaatacctaaaactaaattaaacctctaccctaaaccrcc

SEQ ID NO: 27437 - DNA, 50 bp, synthetic construct
  source 1..50: mol_type = other DNA
aacaacaacataaaaatacctaaaactaaattaaacctctaccctaaacc

SEQ ID NO: 27438 - DNA, 50 bp, synthetic construct
  source 1..50: mol_type = other DNA
catcttcatactactacccaaaactcttttacaatacaacctctaactcc

SEQ ID NO: 27439 - DNA, 50 bp, synthetic construct
  source 1..50: mol_type = other DNA
acacttataaaatcacaaacaaacaacataataacaaaaaatcaactatc

SEQ ID NO: 27440 - DNA, 50 bp, synthetic construct
  source 1..50: mol_type = other DNA
rccaactatatcccaacacccaaaatactaattccaacctatatatctac

SEQ ID NO: 27441 - DNA, 50 bp, synthetic construct
  source 1..50: mol_type = other DNA
rcaaatacataaattaaaattaataccctaaatactaaaacacaactaac

SEQ ID NO: 27442 - DNA, 50 bp, synthetic construct
  source 1..50: mol_type = other DNA
atttctaaatctatactaatctctcctcccaatacaaaaatattaaaaac

SEQ ID NO: 27443 - DNA, 50 bp, synthetic construct
  source 1..50: mol_type = other DNA
aaactaaacattttacacaactaaaataataaacrataacacrtacccac

SEQ ID NO: 27444 - DNA, 50 bp, synthetic construct
  source 1..50: mol_type = other DNA
tcacctctaaactaaacattttacacaactaaaataataaacrataacac

SEQ ID NO: 27445 - DNA, 50 bp, synthetic construct
  source 1..50: mol_type = other DNA
aaacaatttcacctctaaactaaacattttacacaactaaaataataaac

SEQ ID NO: 27446 - DNA, 50 bp, synthetic construct
  source 1..50: mol_type = other DNA
caacctaaaaataaaactactcttcaataaaatatatcaccttacccccc

SEQ ID NO: 27447 - DNA, 50 bp, synthetic construct
  source 1..50: mol_type = other DNA
ctaaatacttttacaataactataacctcataattatcccatttataacc

SEQ ID NO: 27448 - DNA, 50 bp, synthetic construct
  source 1..50: mol_type = other DNA
tcaaaataatcaaacaatatatcaatactactaaccaccactacccaaac

SEQ ID NO: 27449 - DNA, 50 bp, synthetic construct
  source 1..50: mol_type = other DNA
ctaatcctatcttaatcaccatcaaaataaaaaaacaaaacattcttatc

SEQ ID NO: 27450 - DNA, 50 bp, synthetic construct
  source 1..50: mol_type = other DNA
acrcrcatcaaacactcaacacataatattaacaacaataataataaccc

SEQ ID NO: 27451 - DNA, 50 bp, synthetic construct
  source 1..50: mol_type = other DNA
cracrctatttctaaacaaacaaaaataactcatataaaatacaaaacrc

SEQ ID NO: 27452 - DNA, 50 bp, synthetic construct
  source 1..50: mol_type = other DNA
ctcracrctatttctaaacaaacaaaaataactcatataaaatacaaaac

SEQ ID NO: 27453 - DNA, 50 bp, synthetic construct
  source 1..50: mol_type = other DNA
crataccaacaaacatcrttctacaattcctcatcatctactattaaccc

SEQ ID NO: 27454 - DNA, 50 bp, synthetic construct
  source 1..50: mol_type = other DNA
ataaaacrtatatttacaatacctacaactattcrataccaacaaacatc

SEQ ID NO: 27455 - DNA, 50 bp, synthetic construct
  source 1..50: mol_type = other DNA
acaaaacratatttactaacaccraacaactataaacactataaacacac

SEQ ID NO: 27456 - DNA, 50 bp, synthetic construct
  source 1..50: mol_type = other DNA
ctacaaacaaatcactctccctccctaaaccttaattctctcatctatac

SEQ ID NO: 27457 - DNA, 50 bp, synthetic construct
  source 1..50: mol_type = other DNA
ctttccactcacraaccaaaatttacraaaaaacaaaactatataccccc

SEQ ID NO: 27458 - DNA, 50 bp, synthetic construct
  source 1..50: mol_type = other DNA
ctaactctaactaacatataaacacctctacatctaccrcaaaaactaac

SEQ ID NO: 27459 - DNA, 50 bp, synthetic construct
  source 1..50: mol_type = other DNA
acttacaaaacrctaactctaactaacatataaacacctctacatctacc

SEQ ID NO: 27460 - DNA, 50 bp, synthetic construct
  source 1..50: mol_type = other DNA
ccaactcctacracaaatacaaaaatacccacatatcaactaaaaccaac

SEQ ID NO: 27461 - DNA, 50 bp, synthetic construct
  source 1..50: mol_type = other DNA
ataccttcaaaacaacaacactattcctaatataacattacaactctccc

SEQ ID NO: 27462 - DNA, 50 bp, synthetic construct
  source 1..50: mol_type = other DNA
aaaaaaaactctttaataacaaaacctttccctaaaaacactatcaccac

SEQ ID NO: 27463 - DNA, 50 bp, synthetic construct
  source 1..50: mol_type = other DNA
acrataacrcrataaaccacaaaaaactaaatatactaacaaaacatccc

SEQ ID NO: 27464 - DNA, 50 bp, synthetic construct
  source 1..50: mol_type = other DNA
aactcccaaaaacctccactaaacaaaaactatctactaaaactaaaatc

SEQ ID NO: 27465 - DNA, 50 bp, synthetic construct
  source 1..50: mol_type = other DNA
ctattaaacrctatcctaaaaacrataccaataacttactaaaactaccc

SEQ ID NO: 27466 - DNA, 50 bp, synthetic construct
  source 1..50: mol_type = other DNA
ttaataacaatcatcttcccaaaaatactattaaacrctatcctaaaaac

SEQ ID NO: 27467 - DNA, 50 bp, synthetic construct
  source 1..50: mol_type = other DNA
aatttaaccraataatttcaacaaattactaataccrcttctaaaacaac

SEQ ID NO: 27468 - DNA, 50 bp, synthetic construct
  source 1..50: mol_type = other DNA
tttacaataacttaacaaaatcctcacccaaataaactccccaaacatcc

SEQ ID NO: 27469 - DNA, 50 bp, synthetic construct
  source 1..50: mol_type = other DNA
aactttaactcttaaaaaaaacacacataaaaacaaaactactaacaaac

SEQ ID NO: 27470 - DNA, 50 bp, synthetic construct
  source 1..50: mol_type = other DNA
aaacaaactaaacacataatatatactataactcacttcaatatattaac

SEQ ID NO: 27471 - DNA, 50 bp, synthetic construct
  source 1..50: mol_type = other DNA
aaactaaaaataaaacaaatctttacttcttccccaaattacttacatac

SEQ ID NO: 27472 - DNA, 50 bp, synthetic construct
  source 1..50: mol_type = other DNA
ctcctccctaaataatctcatctaccctaataatttcaaaccacataaac

SEQ ID NO: 27473 - DNA, 50 bp, synthetic construct
  source 1..50: mol_type = other DNA
actatcatttatatcaataattatcaaccataactatatatttaaatccc

SEQ ID NO: 27474 - DNA, 50 bp, synthetic construct
  source 1..50: mol_type = other DNA
ataccctaaaaaaaataacaactaccacctcaaatcaaaataatccttcc

SEQ ID NO: 27475 - DNA, 50 bp, synthetic construct
  source 1..50: mol_type = other DNA
tctaaaaacccaacattcttctttcttccctttataaaaccaatactaac

SEQ ID NO: 27476 - DNA, 50 bp, synthetic construct
  source 1..50: mol_type = other DNA
aatctacccaaaactttacaaaaaaccaacatacaaatacaaacctatcc

SEQ ID NO: 27477 - DNA, 50 bp, synthetic construct
  source 1..50: mol_type = other DNA
ctacatttacatactaactctctacaaaaccttaaacaaattaacctctc

SEQ ID NO: 27478 - DNA, 50 bp, synthetic construct
  source 1..50: mol_type = other DNA
tttatcaaatatttactatataccaaactcraaaataaacacaatcttac

SEQ ID NO: 27479 - DNA, 50 bp, synthetic construct
  source 1..50: mol_type = other DNA
aaataaatacrcaaaataaacttcaaaattcaaaataaacactctctccc

SEQ ID NO: 27480 - DNA, 50 bp, synthetic construct
  source 1..50: mol_type = other DNA
aaattcaaaataaacactctctcccraaacaacaaaaataacaacatcac

SEQ ID NO: 27481 - DNA, 50 bp, synthetic construct
  source 1..50: mol_type = other DNA
atttttacraaaatccrttaaaataaacctaaaaactctccraaaattac

SEQ ID NO: 27482 - DNA, 50 bp, synthetic construct
  source 1..50: mol_type = other DNA
cttcttcracrttcctttcracttcctatataaaataaaactaatttccc

SEQ ID NO: 27483 - DNA, 50 bp, synthetic construct
  source 1..50: mol_type = other DNA
aacctaaactaaacaaaacraaaaatcaatctcactttacacaaaaaacc

SEQ ID NO: 27484 - DNA, 50 bp, synthetic construct
  source 1..50: mol_type = other DNA
caataaaaacrcccaatctccccaaataactacccctatctcttaatctc

SEQ ID NO: 27485 - DNA, 50 bp, synthetic construct
  source 1..50: mol_type = other DNA
tcttctcaaaaaaccaactaatccaacrtaaataaataaacrcctaaacc

SEQ ID NO: 27486 - DNA, 50 bp, synthetic construct
  source 1..50: mol_type = other DNA
actcctccrtcttctcaaaaaaccaactaatccaacrtaaataaataaac

SEQ ID NO: 27487 - DNA, 50 bp, synthetic construct
  source 1..50: mol_type = other DNA
rttaatcaccaactactcctccrtcttctcaaaaaaccaactaatccaac

SEQ ID NO: 27488 - DNA, 50 bp, synthetic construct
  source 1..50: mol_type = other DNA
caatattctataccataactaaatcaaaaaacractacctccrcraaaac

SEQ ID NO: 27489 - DNA, 50 bp, synthetic construct
  source 1..50: mol_type = other DNA
caaaaacaaaaaatcctacttctaaaacrtaacctacaaaataaatcacc

SEQ ID NO: 27490 - DNA, 50 bp, synthetic construct
  source 1..50: mol_type = other DNA
aaacctttctctatataattaaaaacttaatcctaaaaattctactaccc

SEQ ID NO: 27491 - DNA, 50 bp, synthetic construct
  source 1..50: mol_type = other DNA
ctaccraattccaatcctaactcaatcccaatacaaaaaacactccaatc

SEQ ID NO: 27492 - DNA, 50 bp, synthetic construct
  source 1..50: mol_type = other DNA
taaacrattaaaatacctcttacactaaaattaaaccaaaactaaaaccc

SEQ ID NO: 27493 - DNA, 50 bp, synthetic construct
  source 1..50: mol_type = other DNA
tcrttatcaccactttatatacctactaatttatctctaccaaacaaaac

SEQ ID NO: 27494 - DNA, 50 bp, synthetic construct
  source 1..50: mol_type = other DNA
atcrttattttaaaattactactaaaaaaatcttacatttactaacattc

SEQ ID NO: 27495 - DNA, 50 bp, synthetic construct
  source 1..50: mol_type = other DNA
tttaaaaacaatacaaaaacactttaaactcttttaacaacrtccttatc

SEQ ID NO: 27496 - DNA, 50 bp, synthetic construct
  source 1..50: mol_type = other DNA
caacaaatacaaaattctcctaacaataatcttaaaacaacrataaaaac

SEQ ID NO: 27497 - DNA, 50 bp, synthetic construct
  source 1..50: mol_type = other DNA
aacattacatcttaataaaataataacccataaacaataacttatatcac

SEQ ID NO: 27498 - DNA, 50 bp, synthetic construct
  source 1..50: mol_type = other DNA
taaccaaaaataacaacctaattcatatttacttttccttactaactttc

SEQ ID NO: 27499 - DNA, 50 bp, synthetic construct
  source 1..50: mol_type = other DNA
attacaaaaattcatatctcaataacttcatatacctatacaaataaaac

SEQ ID NO: 27500 - DNA, 50 bp, synthetic construct
  source 1..50: mol_type = other DNA
tctaatcatttcaaattcttttaattaccacctcaaaacatctctttaac

SEQ ID NO: 27501 - DNA, 50 bp, synthetic construct
  source 1..50: mol_type = other DNA
ctaccacaaaacctaacacrcaataaatattcaataaatatttacttacc

SEQ ID NO: 27502 - DNA, 50 bp, synthetic construct
  source 1..50: mol_type = other DNA
acacttctaaactaaatactacatcctaaaaaaccacaacrctcaaactc

SEQ ID NO: 27503 - DNA, 50 bp, synthetic construct
  source 1..50: mol_type = other DNA
aaattctaccatattactcaaactaatatctccaatacctaaattcaaac

SEQ ID NO: 27504 - DNA, 50 bp, synthetic construct
  source 1..50: mol_type = other DNA
acaacaaaaacaaaaacrtaacacctaaaaacccacttccttctaaacac

SEQ ID NO: 27505 - DNA, 50 bp, synthetic construct
  source 1..50: mol_type = other DNA
ttaattattaacaaaattcaattcccttaaaatataaaactaaaatcccc

SEQ ID NO: 27506 - DNA, 50 bp, synthetic construct
  source 1..50: mol_type = other DNA
ctaacaaaacaatacattaatcrcactatctataatacaaaacaacrtac

SEQ ID NO: 27507 - DNA, 50 bp, synthetic construct
  source 1..50: mol_type = other DNA
ccacctaacaaaacaatacattaatcrcactatctataatacaaaacaac

SEQ ID NO: 27508 - DNA, 50 bp, synthetic construct
  source 1..50: mol_type = other DNA
cttcrtaaaacccaaaactccttaccacctaacaaaacaatacattaatc

SEQ ID NO: 27509 - DNA, 50 bp, synthetic construct
  source 1..50: mol_type = other DNA
ctcctctttaccaaactaattattaaatactcaactaataaatcaccctc

SEQ ID NO: 27510 - DNA, 50 bp, synthetic construct
  source 1..50: mol_type = other DNA
aacaaattaatacaactataaaatttatcctaccaaaccacaaatacctc

SEQ ID NO: 27511 - DNA, 50 bp, synthetic construct
  source 1..50: mol_type = other DNA
ctcttttaattaaaccactctaaaatttctataacaaaaaaaatatcatc

SEQ ID NO: 27512 - DNA, 50 bp, synthetic construct
  source 1..50: mol_type = other DNA
caaaccrcctatatttaatttaacttacttactaaaccccaaacataccc

SEQ ID NO: 27513 - DNA, 50 bp, synthetic construct
  source 1..50: mol_type = other DNA
aattttcacctctttattatcrataacaatctcraattccataccaaacc

SEQ ID NO: 27514 - DNA, 50 bp, synthetic construct
  source 1..50: mol_type = other DNA
caaaccaaattaaatacaaacracctaacataaaatccraaactatcatc

SEQ ID NO: 27515 - DNA, 50 bp, synthetic construct
  source 1..50: mol_type = other DNA
cttataccttaaacaaactaaaaaacaaacaacataccctaacataaaac

SEQ ID NO: 27516 - DNA, 50 bp, synthetic construct
  source 1..50: mol_type = other DNA
caaacaacataccctaacataaaacrattaaaaacaaacaacaacaaaac

SEQ ID NO: 27517 - DNA, 50 bp, synthetic construct
  source 1..50: mol_type = other DNA
caaaacracaaaatatccattatcaaaaaccttccaatactatacttctc

SEQ ID NO: 27518 - DNA, 50 bp, synthetic construct
  source 1..50: mol_type = other DNA
ctttcctacctaaacatctactccctttacctaaaatatcctcctttacc

SEQ ID NO: 27519 - DNA, 50 bp, synthetic construct
  source 1..50: mol_type = other DNA
attcaactaacctaattacatattcattaacacaattctacaaaaaaatc

SEQ ID NO: 27520 - DNA, 50 bp, synthetic construct
  source 1..50: mol_type = other DNA
attcaattcctattaaaaattccaaaccactttaacttaataaaaattac

SEQ ID NO: 27521 - DNA, 50 bp, synthetic construct
  source 1..50: mol_type = other DNA
ctaaaacaaccaaaaaaactatcracaaaacaaataaaaaaacaacctac

SEQ ID NO: 27522 - DNA, 50 bp, synthetic construct
  source 1..50: mol_type = other DNA
accaaaacccttccttccaaaaactctttacataaatacttaaaaaaacc

SEQ ID NO: 27523 - DNA, 50 bp, synthetic construct
  source 1..50: mol_type = other DNA
ttaaaaaaaccraaccttattaaaatatctcaatctctataaccctaacc

SEQ ID NO: 27524 - DNA, 50 bp, synthetic construct
  source 1..50: mol_type = other DNA
aaatatctcaatctctataaccctaaccrcaaacaaacaactaaaccaac

SEQ ID NO: 27525 - DNA, 50 bp, synthetic construct
  source 1..50: mol_type = other DNA
ctaaaccaacrtacacaaaaaactaaacaaaacrttcccaaaaaaaccac

SEQ ID NO: 27526 - DNA, 50 bp, synthetic construct
  source 1..50: mol_type = other DNA
tttttttaaacctcctttttcctccaaaaacacrataaaaacccacaaac

SEQ ID NO: 27527 - DNA, 50 bp, synthetic construct
  source 1..50: mol_type = other DNA
ctaaacacaacrtatacaaacaaaacaacaacttcraacacttaacttcc

SEQ ID NO: 27528 - DNA, 50 bp, synthetic construct
  source 1..50: mol_type = other DNA
ccraaactactaccttatctacacacrctatactcaaaatacctaaaaac

SEQ ID NO: 27529 - DNA, 50 bp, synthetic construct
  source 1..50: mol_type = other DNA
cctccactaactaaaaccraaaaaacaaacactcaaactaccacaaaaac

SEQ ID NO: 27530 - DNA, 50 bp, synthetic construct
  source 1..50: mol_type = other DNA
aaacataaaaactaattccctcttaatccatccctactaatctaaaatac

SEQ ID NO: 27531 - DNA, 50 bp, synthetic construct
  source 1..50: mol_type = other DNA
atccatccctactaatctaaaatacrtaaaacaatccctaacttaaaacc

SEQ ID NO: 27532 - DNA, 50 bp, synthetic construct
  source 1..50: mol_type = other DNA
crccaaaacctctcaactaacttaaataaaaccaaaaactcaacccaaac

SEQ ID NO: 27533 - DNA, 50 bp, synthetic construct
  source 1..50: mol_type = other DNA
rtaacctattctattcaaacttaaccaaacaactacctaaataaaccccc

SEQ ID NO: 27534 - DNA, 50 bp, synthetic construct
  source 1..50: mol_type = other DNA
tctcrcaaaccacacatacacaacaaaatatataaaacccacaaactctc

SEQ ID NO: 27535 - DNA, 50 bp, synthetic construct
  source 1..50: mol_type = other DNA
acctaaataaaacctctatccctactaaataacccaaacccaaccaaacc

SEQ ID NO: 27536 - DNA, 50 bp, synthetic construct
  source 1..50: mol_type = other DNA
aacacaaaaattaactaaacataataacacacacctataataccaactac

SEQ ID NO: 27537 - DNA, 50 bp, synthetic construct
  source 1..50: mol_type = other DNA
ctaccttaccacaaacatcttacaaataaaaactactaactctcttaaac

SEQ ID NO: 27538 - DNA, 50 bp, synthetic construct
  source 1..50: mol_type = other DNA
atccccattttacaaataaaaaccccaaataaaacccacaaaaacaaaac

SEQ ID NO: 27539 - DNA, 50 bp, synthetic construct
  source 1..50: mol_type = other DNA
aaaccctattttctaaacacttattctataccaaaccctatccttaacac

SEQ ID NO: 27540 - DNA, 50 bp, synthetic construct
  source 1..50: mol_type = other DNA
ttaacctatttattacatcttaactatccccrctctccaatcttaacaac

SEQ ID NO: 27541 - DNA, 50 bp, synthetic construct
  source 1..50: mol_type = other DNA
aaacattttcaaacaacacraatccacatatctaataaacttaaaaaaac

SEQ ID NO: 27542 - DNA, 50 bp, synthetic construct
  source 1..50: mol_type = other DNA
attcataaaaccccaaccrctaccaatatcattcaataactaaaacctac

SEQ ID NO: 27543 - DNA, 50 bp, synthetic construct
  source 1..50: mol_type = other DNA
tatataaactaaaataccttcccacaaaactaacctccractctaaaccc

SEQ ID NO: 27544 - DNA, 50 bp, synthetic construct
  source 1..50: mol_type = other DNA
ctaccraataaatatataaactaaaataccttcccacaaaactaacctcc

SEQ ID NO: 27545 - DNA, 50 bp, synthetic construct
  source 1..50: mol_type = other DNA
tataataaaacacrtaaaaatccacccttaaaaccaacaccctatccctc

SEQ ID NO: 27546 - DNA, 50 bp, synthetic construct
  source 1..50: mol_type = other DNA
acaccccccaaaatataaaccaaactccactaaatattaaaaaaccctcc

SEQ ID NO: 27547 - DNA, 50 bp, synthetic construct
  source 1..50: mol_type = other DNA
tattaaaaaaccctccraaaaataacttatcaatccctactaaaaaatac

SEQ ID NO: 27548 - DNA, 50 bp, synthetic construct
  source 1..50: mol_type = other DNA
tctaaataaaatataaaaccraattttcccaatcrctcaatcctcctccc

SEQ ID NO: 27549 - DNA, 50 bp, synthetic construct
  source 1..50: mol_type = other DNA
tatttctaaaaaccrttctaaataaaatataaaaccraattttcccaatc

SEQ ID NO: 27550 - DNA, 50 bp, synthetic construct
  source 1..50: mol_type = other DNA
ctctccaactataatatttctaaaaaccrttctaaataaaatataaaacc

SEQ ID NO: 27551 - DNA, 50 bp, synthetic construct
  source 1..50: mol_type = other DNA
accacaactaaaaaatcctaactaaaccttaaaaatttcaactctttaac

SEQ ID NO: 27552 - DNA, 50 bp, synthetic construct
  source 1..50: mol_type = other DNA
actaaaccttaaaaatttcaactctttaacraaatacccaaataccatac

SEQ ID NO: 27553 - DNA, 50 bp, synthetic construct
  source 1..50: mol_type = other DNA
catacratacttttacctcatcattacaatctaaaatactactatttatc

SEQ ID NO: 27554 - DNA, 50 bp, synthetic construct
  source 1..50: mol_type = other DNA
aatctataactaaaccaacccctcctataacatacaataaatactacccc

SEQ ID NO: 27555 - DNA, 50 bp, synthetic construct
  source 1..50: mol_type = other DNA
acatacaaaacraactataaacactaaatcaccacccaaaaaaaaaccac

SEQ ID NO: 27556 - DNA, 50 bp, synthetic construct
  source 1..50: mol_type = other DNA
ttcttaaaaccrtaatttccctctaaataataactcaatacccacaaccc

SEQ ID NO: 27557 - DNA, 50 bp, synthetic construct
  source 1..50: mol_type = other DNA
taactaccccaacaaaaaacaactataatttcccctaaaacaacaaccac

SEQ ID NO: 27558 - DNA, 50 bp, synthetic construct
  source 1..50: mol_type = other DNA
ctcaaaaacaaaacttataaaactataacctaactaaatactctaacatc

SEQ ID NO: 27559 - DNA, 50 bp, synthetic construct
  source 1..50: mol_type = other DNA
aaccccttaccaccaattccattaataatatatacaattaaacacaaatc

SEQ ID NO: 27560 - DNA, 50 bp, synthetic construct
  source 1..50: mol_type = other DNA
ccaataacccaattataactcattacaaccttaaattactaaacrcaaac

SEQ ID NO: 27561 - DNA, 50 bp, synthetic construct
  source 1..50: mol_type = other DNA
acaataaactacaattaaactactaaactccatcctaaataacaaaatac

SEQ ID NO: 27562 - DNA, 50 bp, synthetic construct
  source 1..50: mol_type = other DNA
aaaaaattacaacaaaaataacacrctctttaccccacrtcaacctactc

SEQ ID NO: 27563 - DNA, 50 bp, synthetic construct
  source 1..50: mol_type = other DNA
ccttttaaaataaaacacatcctccaattccttcctaaaaaaattttcac

SEQ ID NO: 27564 - DNA, 50 bp, synthetic construct
  source 1..50: mol_type = other DNA
atcacaaaatcaaaaaattaaaaccattctaaccaacataataaaacccc

SEQ ID NO: 27565 - DNA, 50 bp, synthetic construct
  source 1..50: mol_type = other DNA
aaaattaactaaacataataacacatatctataatccatcccaactactc

SEQ ID NO: 27566 - DNA, 50 bp, synthetic construct
  source 1..50: mol_type = other DNA
ctttataccctattttaaaaaacaaaccaatcaataataacaacaacaac

SEQ ID NO: 27567 - DNA, 50 bp, synthetic construct
  source 1..50: mol_type = other DNA
attacccaaactaatttcaaattcctatactcaaataatcctcccacttc

SEQ ID NO: 27568 - DNA, 50 bp, synthetic construct
  source 1..50: mol_type = other DNA
aaattattaaaccaaaattatatccaaaacttccccacttttactacatc

SEQ ID NO: 27569 - DNA, 50 bp, synthetic construct
  source 1..50: mol_type = other DNA
acacacactcatataaaataacacttaaaatccaataccccttaacaacc

SEQ ID NO: 27570 - DNA, 50 bp, synthetic construct
  source 1..50: mol_type = other DNA
caaccrattacaataaataaactaaactcaaaattacaaaccaacaaaac

SEQ ID NO: 27571 - DNA, 50 bp, synthetic construct
  source 1..50: mol_type = other DNA
ccaatattaacaaatcctaactaaaaaacaaactaaaaaaacccactacc

SEQ ID NO: 27572 - DNA, 50 bp, synthetic construct
  source 1..50: mol_type = other DNA
aaaaacaaactaaaaaaacccactaccrttacaaactaattactatcccc

SEQ ID NO: 27573 - DNA, 50 bp, synthetic construct
  source 1..50: mol_type = other DNA
caaacatcttcaaacttccacataatccataacacaaatcaccacaaacc

SEQ ID NO: 27574 - DNA, 50 bp, synthetic construct
  source 1..50: mol_type = other DNA
aaacctaaaaatacctaaaaccttcrtaataccattacctttaacctccc

SEQ ID NO: 27575 - DNA, 50 bp, synthetic construct
  source 1..50: mol_type = other DNA
catctctaaccatcctacaaaaccrtaaaaactttaacaatacaactccc

SEQ ID NO: 27576 - DNA, 50 bp, synthetic construct
  source 1..50: mol_type = other DNA
ttcacttttacaaactaaaaaaattccraaaaactcttccataacaatac

SEQ ID NO: 27577 - DNA, 50 bp, synthetic construct
  source 1..50: mol_type = other DNA
aaaactaaaaatcaaccaatctacacacaatccaacttttaaaaatcaac

SEQ ID NO: 27578 - DNA, 50 bp, synthetic construct
  source 1..50: mol_type = other DNA
aacaaaatacctaaatatacccaaaaaaacaactctaataatccaaaacc

SEQ ID NO: 27579 - DNA, 50 bp, synthetic construct
  source 1..50: mol_type = other DNA
tctccaaccttaaatttacctcatcaaaaacttaacctataaaacactac

SEQ ID NO: 27580 - DNA, 50 bp, synthetic construct
  source 1..50: mol_type = other DNA
catacctaaccctaaaacaaaattcctcacctaaacaaattctccatcac

SEQ ID NO: 27581 - DNA, 50 bp, synthetic construct
  source 1..50: mol_type = other DNA
tctaaacctatcacaacaactctcttacaaataataaacctactaattcc

SEQ ID NO: 27582 - DNA, 50 bp, synthetic construct
  source 1..50: mol_type = other DNA
crctttataaaaactctaacctaaaacaacrcctttatacracaattaac

SEQ ID NO: 27583 - DNA, 50 bp, synthetic construct
  source 1..50: mol_type = other DNA
ctttaaatccctttaaaatatttatctttaacttaaaataatacaacaac

SEQ ID NO: 27584 - DNA, 50 bp, synthetic construct
  source 1..50: mol_type = other DNA
ctacatcttaaaaaactaaccctaaaaaacraacaataacrtaaaacctc

SEQ ID NO: 27585 - DNA, 50 bp, synthetic construct
  source 1..50: mol_type = other DNA
aaacacccctatctaaaaccaacaatcatctaattcctaaaataaacacc

SEQ ID NO: 27586 - DNA, 50 bp, synthetic construct
  source 1..50: mol_type = other DNA
aaaaacccaaaaaacttttaaaaacctaaaacctatcacctccactattc

SEQ ID NO: 27587 - DNA, 50 bp, synthetic construct
  source 1..50: mol_type = other DNA
aaaaataaaaaaattcccaacatattttcaaacctaaaactcatccatcc

SEQ ID NO: 27588 - DNA, 50 bp, synthetic construct
  source 1..50: mol_type = other DNA
ctataaccaaaaacactcccttaacaaaaaaacaattaaaattaaaaaac

SEQ ID NO: 27589 - DNA, 50 bp, synthetic construct
  source 1..50: mol_type = other DNA
accctttccattcctttccccaaccttaaaacacccactaaaaataaaac

SEQ ID NO: 27590 - DNA, 50 bp, synthetic construct
  source 1..50: mol_type = other DNA
aaacacaatcaacacaaaccccaacaaactaaaactaaaaataacrtcac

SEQ ID NO: 27591 - DNA, 50 bp, synthetic construct
  source 1..50: mol_type = other DNA
caaccttaactactcaaactaaaaaactatcttccttcccaacttcctcc

SEQ ID NO: 27592 - DNA, 50 bp, synthetic construct
  source 1..50: mol_type = other DNA
crcttatatccctaacraaaaattatcaattatatataattccrtctacc

SEQ ID NO: 27593 - DNA, 50 bp, synthetic construct
  source 1..50: mol_type = other DNA
aaataacctaaacataaataaatctcatacaaaaaacatacraaatccrc

SEQ ID NO: 27594 - DNA, 50 bp, synthetic construct
  source 1..50: mol_type = other DNA
taaaataacctaaacataaataaatctcatacaaaaaacatacraaatcc

SEQ ID NO: 27595 - DNA, 50 bp, synthetic construct
  source 1..50: mol_type = other DNA
tcraaactaaaataacctaaacataaataaatctcatacaaaaaacatac

SEQ ID NO: 27596 - DNA, 50 bp, synthetic construct
  source 1..50: mol_type = other DNA
crtatctctcratactctctcataaataacaataaaataattacraaaac

SEQ ID NO: 27597 - DNA, 50 bp, synthetic construct
  source 1..50: mol_type = other DNA
ccaaaccrtatctctcratactctctcataaataacaataaaataattac

SEQ ID NO: 27598 - DNA, 50 bp, synthetic construct
  source 1..50: mol_type = other DNA
taaacactttcaaaacaaatctaatttctactatttcccaacaatcatac

SEQ ID NO: 27599 - DNA, 50 bp, synthetic construct
  source 1..50: mol_type = other DNA
caataacttacrtttatttattcracaaaaactcacatactctatcctcc

SEQ ID NO: 27600 - DNA, 50 bp, synthetic construct
  source 1..50: mol_type = other DNA
taaactaactattctcacaataaataacaataacttacrtttatttattc

SEQ ID NO: 27601 - DNA, 50 bp, synthetic construct
  source 1..50: mol_type = other DNA
caaatcccactataaactaactattctcacaataaataacaataacttac

SEQ ID NO: 27602 - DNA, 50 bp, synthetic construct
  source 1..50: mol_type = other DNA
aataaacatattaaattaaaaaacaacaaaacacrcacctacaaacaacc

SEQ ID NO: 27603 - DNA, 50 bp, synthetic construct
  source 1..50: mol_type = other DNA
aacraaaaacaaacaaacctataactcaaacaaaacataacacaactaac

SEQ ID NO: 27604 - DNA, 50 bp, synthetic construct
  source 1..50: mol_type = other DNA
tataaaccaccratctaaactatactttacaatatattaaaataatcttc

SEQ ID NO: 27605 - DNA, 50 bp, synthetic construct
  source 1..50: mol_type = other DNA
aatttttaaacatataaaaatattccttatatccrtttataatcaatccc

SEQ ID NO: 27606 - DNA, 50 bp, synthetic construct
  source 1..50: mol_type = other DNA
ccaaaattcaaacratctacttaccccaaactcacaaaataaaccactac

SEQ ID NO: 27607 - DNA, 50 bp, synthetic construct
  source 1..50: mol_type = other DNA
tctaaaaatccaaattacrtaccaactactttccctaaaaaactaactac

SEQ ID NO: 27608 - DNA, 50 bp, synthetic construct
  source 1..50: mol_type = other DNA
aattacrtaccaactactttccctaaaaaactaactacraaacaaaaaac

SEQ ID NO: 27609 - DNA, 50 bp, synthetic construct
  source 1..50: mol_type = other DNA
ataccaaaaatactcctactcaaatctaccaactccatcctaaaaactac

SEQ ID NO: 27610 - DNA, 50 bp, synthetic construct
  source 1..50: mol_type = other DNA
rataaaaccraacctctctaaaactactataactctcccraaaaaactcc

SEQ ID NO: 27611 - DNA, 50 bp, synthetic construct
  source 1..50: mol_type = other DNA
tttataacctcataaacccaaacaccctcaaaatcaataaaaaatacctc

SEQ ID NO: 27612 - DNA, 50 bp, synthetic construct
  source 1..50: mol_type = other DNA
ctaccaaaccttaacctaccctatctaaaaatccttaataaaaccacccc

SEQ ID NO: 27613 - DNA, 50 bp, synthetic construct
  source 1..50: mol_type = other DNA
cttaaaaaaaaataccaccaaaaaccrttctaactaaaacctaaaaaacc

SEQ ID NO: 27614 - DNA, 50 bp, synthetic construct
  source 1..50: mol_type = other DNA
taccaccaaaaaccrttctaactaaaacctaaaaaaccrtaactcaaaac

SEQ ID NO: 27615 - DNA, 50 bp, synthetic construct
  source 1..50: mol_type = other DNA
aaaaaaccrtaactcaaaacrtaaatccccaaaatctctttaaaccaacc

SEQ ID NO: 27616 - DNA, 50 bp, synthetic construct
  source 1..50: mol_type = other DNA
cccaaaatctctttaaaccaaccraactactacaaacaaacaaaaaacac

SEQ ID NO: 27617 - DNA, 50 bp, synthetic construct
  source 1..50: mol_type = other DNA
ttcacrcaaaaaaacaaattactaaacaaactaacrtaaatcccaacccc

SEQ ID NO: 27618 - DNA, 50 bp, synthetic construct
  source 1..50: mol_type = other DNA
caaatcccaataataactttacacaaaaaaaacaacctaccaaaattcac

SEQ ID NO: 27619 - DNA, 50 bp, synthetic construct
  source 1..50: mol_type = other DNA
ctccctcttccacctactcaaaataacctaaaacttaaaaataaacaatc

SEQ ID NO: 27620 - DNA, 50 bp, synthetic construct
  source 1..50: mol_type = other DNA
aaccaccrcrcccaactaaaataaataactttttaaattaacttcttacc

SEQ ID NO: 27621 - DNA, 50 bp, synthetic construct
  source 1..50: mol_type = other DNA
accccaaaactcctcttattaaccaaattaactacractaatccaacttc

SEQ ID NO: 27622 - DNA, 50 bp, synthetic construct
  source 1..50: mol_type = other DNA
aaacccraacaataaacaaaatacaaaaacaacacraaactaaaccaatc

SEQ ID NO: 27623 - DNA, 50 bp, synthetic construct
  source 1..50: mol_type = other DNA
caatcrcaaccaatctaaccaacaaaaaaaatcctaaaactccacctaac

SEQ ID NO: 27624 - DNA, 50 bp, synthetic construct
  source 1..50: mol_type = other DNA
aatcctaaaactccacctaacrccataaaccctaaaatactattaaaaac

SEQ ID NO: 27625 - DNA, 50 bp, synthetic construct
  source 1..50: mol_type = other DNA
cctaaaatactattaaaaacrctattaatctaaatactttccctaatacc

SEQ ID NO: 27626 - DNA, 50 bp, synthetic construct
  source 1..50: mol_type = other DNA
aatactttccctaataccrttacacaaaaattcactattccaaacaaccc

SEQ ID NO: 27627 - DNA, 50 bp, synthetic construct
  source 1..50: mol_type = other DNA
caaacacraaccctcacttattcctctcatttctctcttctatttcctac

SEQ ID NO: 27628 - DNA, 50 bp, synthetic construct
  source 1..50: mol_type = other DNA
atttcctacrttcttaaaaaacctaaatataataaccaaatcttcctttc

SEQ ID NO: 27629 - DNA, 50 bp, synthetic construct
  source 1..50: mol_type = other DNA
ataaaaatctaaaaatatcacaaaaattaataatttcataccctcctaac

SEQ ID NO: 27630 - DNA, 50 bp, synthetic construct
  source 1..50: mol_type = other DNA
aaaaaaatcataaaaaatcactatcaacccaaaacaaacactacccctac

SEQ ID NO: 27631 - DNA, 50 bp, synthetic construct
  source 1..50: mol_type = other DNA
atcccatctcaatccaacaaaactcaatcatctccctttaaaattaaaac

SEQ ID NO: 27632 - DNA, 50 bp, synthetic construct
  source 1..50: mol_type = other DNA
aacaaaactcaatcatctccctttaaaattaaaacraaccacacctaccc

SEQ ID NO: 27633 - DNA, 50 bp, synthetic construct
  source 1..50: mol_type = other DNA
craaccctaaaatcctattaacaaaactaaaataaacattcccacttaac

SEQ ID NO: 27634 - DNA, 50 bp, synthetic construct
  source 1..50: mol_type = other DNA
crccaaataaaaatacctactccaatcttaccaacaaaactccaaaattc

SEQ ID NO: 27635 - DNA, 50 bp, synthetic construct
  source 1..50: mol_type = other DNA
tcaacracrtacacaatcctaccractaacttaaataaataataaactac

SEQ ID NO: 27636 - DNA, 50 bp, synthetic construct
  source 1..50: mol_type = other DNA
taaacrcaatacacctaaactacctcaaaactcaactataaaacaaatcc

SEQ ID NO: 27637 - DNA, 50 bp, synthetic construct
  source 1..50: mol_type = other DNA
craaaaacttaaactattaacccccaaattcctaatatacctaaaataac

SEQ ID NO: 27638 - DNA, 50 bp, synthetic construct
  source 1..50: mol_type = other DNA
acacccttacaaacaacaatctaacctaaaccctattaatacaactttac

SEQ ID NO: 27639 - DNA, 50 bp, synthetic construct
  source 1..50: mol_type = other DNA
aaattcaaaaatcattaactaaactaaatataacctaaacaaaactaaac

SEQ ID NO: 27640 - DNA, 50 bp, synthetic construct
  source 1..50: mol_type = other DNA
ttatccccacccrttattaataaataattctcttactacactaaaacctc

SEQ ID NO: 27641 - DNA, 50 bp, synthetic construct
  source 1..50: mol_type = other DNA
ctcttaaatcaccccactctccaaaaaactccctaaaaacaaaaacttac

SEQ ID NO: 27642 - DNA, 50 bp, synthetic construct
  source 1..50: mol_type = other DNA
tctctcaacaaaatcaccatcttactataaaccaatccctaactcaaccc

SEQ ID NO: 27643 - DNA, 50 bp, synthetic construct
  source 1..50: mol_type = other DNA
cctaaaacaacacratcracttctctataaacacaaaaacctaaattctc

SEQ ID NO: 27644 - DNA, 50 bp, synthetic construct
  source 1..50: mol_type = other DNA
tttcctctccaaaaacraatatttaaaaaaaacccccaaaatattctaac

SEQ ID NO: 27645 - DNA, 50 bp, synthetic construct
  source 1..50: mol_type = other DNA
ttttccctctatcaactttacacatacaattacaaattaccattttcttc

SEQ ID NO: 27646 - DNA, 50 bp, synthetic construct
  source 1..50: mol_type = other DNA
ataatctaaaacatcaactttacttcattacacatatatttaaaatccac

SEQ ID NO: 27647 - DNA, 50 bp, synthetic construct
  source 1..50: mol_type = other DNA
tcracttaataaaaaattaactttattctactaaatacttcaaaaatcrc

SEQ ID NO: 27648 - DNA, 50 bp, synthetic construct
  source 1..50: mol_type = other DNA
aaaaactttaacaaaacataaaccaaaacaacatacrctaaaaaaaacac

SEQ ID NO: 27649 - DNA, 50 bp, synthetic construct
  source 1..50: mol_type = other DNA
caaaaactaaacccaaaaactttaacaaaacataaaccaaaacaacatac

SEQ ID NO: 27650 - DNA, 50 bp, synthetic construct
  source 1..50: mol_type = other DNA
acaaaattcrtacataactacaaattattaactatcatccctctcatcac

SEQ ID NO: 27651 - DNA, 50 bp, synthetic construct
  source 1..50: mol_type = other DNA
tacaaaatttatttaatttttccttacttactaaaaactactaaacctcc

SEQ ID NO: 27652 - DNA, 50 bp, synthetic construct
  source 1..50: mol_type = other DNA
tacaacactaaaaaaaactttcccctttcrtacaaaaaaaatatcataac

SEQ ID NO: 27653 - DNA, 50 bp, synthetic construct
  source 1..50: mol_type = other DNA
taataaaaaaatcaactattatacaacactaaaaaaaactttcccctttc

SEQ ID NO: 27654 - DNA, 50 bp, synthetic construct
  source 1..50: mol_type = other DNA
cccatactttactataatatatttatcctaattatcctaaaaatcactac

SEQ ID NO: 27655 - DNA, 50 bp, synthetic construct
  source 1..50: mol_type = other DNA
tccaatatataatactataaaccataaaatacctctataaaacaaaacac

SEQ ID NO: 27656 - DNA, 50 bp, synthetic construct
  source 1..50: mol_type = other DNA
tacctaaaacactctatcacaaataaaaactaaattttaactacttcttc

SEQ ID NO: 27657 - DNA, 50 bp, synthetic construct
  source 1..50: mol_type = other DNA
aatataacaaaaatctataatttaaaacatcraataaacacctctactcc

SEQ ID NO: 27658 - DNA, 50 bp, synthetic construct
  source 1..50: mol_type = other DNA
taaatcacaacctaaaacaaatataacaaaaatctataatttaaaacatc

SEQ ID NO: 27659 - DNA, 50 bp, synthetic construct
  source 1..50: mol_type = other DNA
tacttcaattttaaattactaatcatcactctctataacttacaaaaaac

SEQ ID NO: 27660 - DNA, 50 bp, synthetic construct
  source 1..50: mol_type = other DNA
attactaatcatcactctctataacttacaaaaaacrcccctaaaatttc

SEQ ID NO: 27661 - DNA, 50 bp, synthetic construct
  source 1..50: mol_type = other DNA
catcttccataatttctaaaacactatcccaatcacttcctaaattctcc

SEQ ID NO: 27662 - DNA, 50 bp, synthetic construct
  source 1..50: mol_type = other DNA
caaactaaactattacaataacctcctacctaattccatttctataaaac

SEQ ID NO: 27663 - DNA, 50 bp, synthetic construct
  source 1..50: mol_type = other DNA
ttaaactcttaacrtataaaactttcccctctcatcctacaaaattaccc

SEQ ID NO: 27664 - DNA, 50 bp, synthetic construct
  source 1..50: mol_type = other DNA
tataaaactttcccctctcatcctacaaaattacccrttacctctaacac

SEQ ID NO: 27665 - DNA, 50 bp, synthetic construct
  source 1..50: mol_type = other DNA
atctatcaatctcacttaattacacaacaaataaaaaccraataaaatac

SEQ ID NO: 27666 - DNA, 50 bp, synthetic construct
  source 1..50: mol_type = other DNA
aaaattaaaataaacacacaacattaaaacccaaattacrcattctactc

SEQ ID NO: 27667 - DNA, 50 bp, synthetic construct
  source 1..50: mol_type = other DNA
ctaaaactctataaacaacaaccttaataactcctctaactcaacctttc

SEQ ID NO: 27668 - DNA, 50 bp, synthetic construct
  source 1..50: mol_type = other DNA
tcaacaccttccattcctactaaacttaaatactaaaaacaaacaaaaac

SEQ ID NO: 27669 - DNA, 50 bp, synthetic construct
  source 1..50: mol_type = other DNA
ctaaacttaaatactaaaaacaaacaaaaacrctaaacaaaaaatcaacc

SEQ ID NO: 27670 - DNA, 50 bp, synthetic construct
  source 1..50: mol_type = other DNA
aaaaaccttactaataaaacaacatacaataaaaaaaccaaccaaaaccc

SEQ ID NO: 27671 - DNA, 50 bp, synthetic construct
  source 1..50: mol_type = other DNA
ttacccaatctacctattataaaactcctcccctttaaaaatataaaccc

SEQ ID NO: 27672 - DNA, 50 bp, synthetic construct
  source 1..50: mol_type = other DNA
accaaaactccaacaaacraaaatcactaaactaaacaaaaacacrctcc

SEQ ID NO: 27673 - DNA, 50 bp, synthetic construct
  source 1..50: mol_type = other DNA
tcraaaaatacctactaaaaacaaacaatatctaattacaaactacaaac

SEQ ID NO: 27674 - DNA, 50 bp, synthetic construct
  source 1..50: mol_type = other DNA
aaaacaaacaatatctaattacaaactacaaacracctaaaatcaaaccc

SEQ ID NO: 27675 - DNA, 50 bp, synthetic construct
  source 1..50: mol_type = other DNA
aacctaaaaaacatcraacataaaatatattcaacacaataaccccatcc

SEQ ID NO: 27676 - DNA, 50 bp, synthetic construct
  source 1..50: mol_type = other DNA
atcctatttaacaacraataaaatcactatattaaacatacctcataccc

SEQ ID NO: 27677 - DNA, 50 bp, synthetic construct
  source 1..50: mol_type = other DNA
aaaaactactaaaacaacaaaaccaacaaaacaaacaaaacraacaaaac

SEQ ID NO: 27678 - DNA, 50 bp, synthetic construct
  source 1..50: mol_type = other DNA
aaacaacctaaaaactactaaaacaacaaaaccaacaaaacaaacaaaac

SEQ ID NO: 27679 - DNA, 50 bp, synthetic construct
  source 1..50: mol_type = other DNA
aaattcccttaccataaaactaaccaaattcccaaacttaacccaaactc

SEQ ID NO: 27680 - DNA, 50 bp, synthetic construct
  source 1..50: mol_type = other DNA
tcaaaaaaccrtaaacaatctaaacttacaaacctaaccatatctaacac

SEQ ID NO: 27681 - DNA, 50 bp, synthetic construct
  source 1..50: mol_type = other DNA
aaaaaaaaccrtattaaacataaccaaacctacaaactcaaactacccac

SEQ ID NO: 27682 - DNA, 50 bp, synthetic construct
  source 1..50: mol_type = other DNA
tcactatcrtaataaatcatatacrtcatcttaactaaactataataccc

SEQ ID NO: 27683 - DNA, 50 bp, synthetic construct
  source 1..50: mol_type = other DNA
aaaaaccctctctcaacctaaaaccatcactatcrtaataaatcatatac

SEQ ID NO: 27684 - DNA, 50 bp, synthetic construct
  source 1..50: mol_type = other DNA
acacaaccraacaccataacttaaccaaaataacrcatataatttaccac

SEQ ID NO: 27685 - DNA, 50 bp, synthetic construct
  source 1..50: mol_type = other DNA
atcctaacaaaaaaatcaacctatacaaaaaccccaaaataaaaaacatc

SEQ ID NO: 27686 - DNA, 50 bp, synthetic construct
  source 1..50: mol_type = other DNA
tacctaaaaaccatcttaaacaacaaataaaaacataaacaatacatccc

SEQ ID NO: 27687 - DNA, 50 bp, synthetic construct
  source 1..50: mol_type = other DNA
ataaaaacataaacaatacatcccrcctaccaaaaaactataaaaactac

SEQ ID NO: 27688 - DNA, 50 bp, synthetic construct
  source 1..50: mol_type = other DNA
acataaacaatacatcccrcctaccaaaaaactataaaaactacraaacc

SEQ ID NO: 27689 - DNA, 50 bp, synthetic construct
  source 1..50: mol_type = other DNA
ctcctaaaacctataaactaaacaaaaataaaactataacaaaaaacccc

SEQ ID NO: 27690 - DNA, 50 bp, synthetic construct
  source 1..50: mol_type = other DNA
aaaaaactaatttccttaaacrataaaatcccrtacatatttttcacaac

SEQ ID NO: 27691 - DNA, 50 bp, synthetic construct
  source 1..50: mol_type = other DNA
tccccrtcrcctaccctttaacttaaatttttctttatatttataaaacc

SEQ ID NO: 27692 - DNA, 50 bp, synthetic construct
  source 1..50: mol_type = other DNA
ataattaaaacaaaaaccctatcatttaactcactactcaaacctatatc

SEQ ID NO: 27693 - DNA, 50 bp, synthetic construct
  source 1..50: mol_type = other DNA
aaaacaaccccaatataaaataatccttaccaaaacacaaaaacaaaaac

SEQ ID NO: 27694 - DNA, 50 bp, synthetic construct
  source 1..50: mol_type = other DNA
ataaaaacaataactcttaacaaacaaaaataactttaaattccctaacc

SEQ ID NO: 27695 - DNA, 50 bp, synthetic construct
  source 1..50: mol_type = other DNA
ccaaactacacctattacaaatattaaaaccactaactataaaatttacc

SEQ ID NO: 27696 - DNA, 50 bp, synthetic construct
  source 1..50: mol_type = other DNA
taaacttttactattcccttaataaacttttactactatatatttaattc

SEQ ID NO: 27697 - DNA, 50 bp, synthetic construct
  source 1..50: mol_type = other DNA
acatatatcatacacaaaaaaatcctataaacattcataccctttaaaac

SEQ ID NO: 27698 - DNA, 50 bp, synthetic construct
  source 1..50: mol_type = other DNA
aatcctataaacattcataccctttaaaacraaacccaaaaatccctaac

SEQ ID NO: 27699 - DNA, 50 bp, synthetic construct
  source 1..50: mol_type = other DNA
ctataactatttctacccttactcttaaccaccacaaaatatcactcttc

SEQ ID NO: 27700 - DNA, 50 bp, synthetic construct
  source 1..50: mol_type = other DNA
acaaaaaaaattcttcctctctaaccaacaattaccrccttaataaaaac

SEQ ID NO: 27701 - DNA, 50 bp, synthetic construct
  source 1..50: mol_type = other DNA
tctaaaccaatcctaacataatactaaaactaacracraacttacraaac

SEQ ID NO: 27702 - DNA, 50 bp, synthetic construct
  source 1..50: mol_type = other DNA
attcctctaaaccaatcctaacataatactaaaactaacracraacttac

SEQ ID NO: 27703 - DNA, 50 bp, synthetic construct
  source 1..50: mol_type = other DNA
aaataaatattcctctaaaccaatcctaacataatactaaaactaacrac

SEQ ID NO: 27704 - DNA, 50 bp, synthetic construct
  source 1..50: mol_type = other DNA
ctaaaataaatattcctctaaaccaatcctaacataatactaaaactaac

SEQ ID NO: 27705 - DNA, 50 bp, synthetic construct
  source 1..50: mol_type = other DNA
taaattttattttcactacttttccaaaaaataccaaaaaatctaccccc

SEQ ID NO: 27706 - DNA, 50 bp, synthetic construct
  source 1..50: mol_type = other DNA
cttaaacaaacacaattacttcctcactcttaaaaaaaacaactaaactc

SEQ ID NO: 27707 - DNA, 50 bp, synthetic construct
  source 1..50: mol_type = other DNA
aattacttcctcactcttaaaaaaaacaactaaactcrcataaaaaaaac

SEQ ID NO: 27708 - DNA, 50 bp, synthetic construct
  source 1..50: mol_type = other DNA
ccctaaaaaacaaacttcraccaataaaaaataacaacctataaataaac

SEQ ID NO: 27709 - DNA, 50 bp, synthetic construct
  source 1..50: mol_type = other DNA
ctctaacaataacttactctataataactactccaaattcctcatatcac

SEQ ID NO: 27710 - DNA, 50 bp, synthetic construct
  source 1..50: mol_type = other DNA
taaacataaaccatcaaacctaaccctataccaaattcattttacatacc

SEQ ID NO: 27711 - DNA, 50 bp, synthetic construct
  source 1..50: mol_type = other DNA
acrattccraaaaaccrataactaaaaaattaaatttaacactttccaac

SEQ ID NO: 27712 - DNA, 50 bp, synthetic construct
  source 1..50: mol_type = other DNA
tatccataaactaataaaactatcaattatcrcctaaccttctaaaaaac

SEQ ID NO: 27713 - DNA, 50 bp, synthetic construct
  source 1..50: mol_type = other DNA
crtaacaaaactataaaaacacaaataaaactccracttcracaaccaac

SEQ ID NO: 27714 - DNA, 50 bp, synthetic construct
  source 1..50: mol_type = other DNA
tataccrtcracraaataaatcattctcttaatcaattttcttacttctc

SEQ ID NO: 27715 - DNA, 50 bp, synthetic construct
  source 1..50: mol_type = other DNA
acttctcrataataatcccaaaatttcaactaatctataaccctctaacc

SEQ ID NO: 27716 - DNA, 50 bp, synthetic construct
  source 1..50: mol_type = other DNA
tctcrataataatcccaaaatttcaactaatctataaccctctaaccrcc

SEQ ID NO: 27717 - DNA, 50 bp, synthetic construct
  source 1..50: mol_type = other DNA
ctaaaaaactataactaaataccactataaaaaactccaatacrttcacc

SEQ ID NO: 27718 - DNA, 50 bp, synthetic construct
  source 1..50: mol_type = other DNA
ataaacrcactaaaacttctcacaataacacttaatcacaacccctcaac

SEQ ID NO: 27719 - DNA, 50 bp, synthetic construct
  source 1..50: mol_type = other DNA
tctacattcattacaaaacacaactacaaaacccacttactaaaaacaac

SEQ ID NO: 27720 - DNA, 50 bp, synthetic construct
  source 1..50: mol_type = other DNA
ccaaaccttctaattccaatctaatttctttcacrttctaaatttaaaac

SEQ ID NO: 27721 - DNA, 50 bp, synthetic construct
  source 1..50: mol_type = other DNA
tttatatattccaaccccaaaccttctaattccaatctaatttctttcac

SEQ ID NO: 27722 - DNA, 50 bp, synthetic construct
  source 1..50: mol_type = other DNA
ttctattaactacrtaacccataataaatcatatcatttaacatttttac

SEQ ID NO: 27723 - DNA, 50 bp, synthetic construct
  source 1..50: mol_type = other DNA
aactaaaaatctaataacttacaaccaaatctaactcttctattaactac

SEQ ID NO: 27724 - DNA, 50 bp, synthetic construct
  source 1..50: mol_type = other DNA
tacctccactctcaacaataacattaaaatattccctactcataactaac

SEQ ID NO: 27725 - DNA, 50 bp, synthetic construct
  source 1..50: mol_type = other DNA
actctttaaacccttaatactaactattccctctacccaaaatattcctc

SEQ ID NO: 27726 - DNA, 50 bp, synthetic construct
  source 1..50: mol_type = other DNA
ttattactaataacccattatcatccctataaatatttcaaaaatttacc

SEQ ID NO: 27727 - DNA, 50 bp, synthetic construct
  source 1..50: mol_type = other DNA
ttccccatactttaatctaactctccaataaactcataattcctataaac

SEQ ID NO: 27728 - DNA, 50 bp, synthetic construct
  source 1..50: mol_type = other DNA
taaaccttaaaactacaataaaaccttataacctattctaaccccaaccc

SEQ ID NO: 27729 - DNA, 50 bp, synthetic construct
  source 1..50: mol_type = other DNA
acttccatctctctaattctaaaatctctatcaaatcatcattcaacacc

SEQ ID NO: 27730 - DNA, 50 bp, synthetic construct
  source 1..50: mol_type = other DNA
tcaccaaattacccaaatacccaaatatttaaaatacraatactaaaacc

SEQ ID NO: 27731 - DNA, 50 bp, synthetic construct
  source 1..50: mol_type = other DNA
catccrcatctcaaatacctaaatacctaaataatctaataactactacc

SEQ ID NO: 27732 - DNA, 50 bp, synthetic construct
  source 1..50: mol_type = other DNA
ataaaacaataaccttaaaaacraaactataaacctaaacraacattccc

SEQ ID NO: 27733 - DNA, 50 bp, synthetic construct
  source 1..50: mol_type = other DNA
acctaaaaccraacaaatctaaaccctaatctatcccttaaatctacccc

SEQ ID NO: 27734 - DNA, 50 bp, synthetic construct
  source 1..50: mol_type = other DNA
aaaactaaaataacttacccaaaacracacctcrtaactaacctaaaacc

SEQ ID NO: 27735 - DNA, 50 bp, synthetic construct
  source 1..50: mol_type = other DNA
aataaaccaaaatccaaacctatccratcccaaactaactacraaatacc

SEQ ID NO: 27736 - DNA, 50 bp, synthetic construct
  source 1..50: mol_type = other DNA
aaaaacaaaaaatcctctaacttcctcattttctattatcraccctaaac

SEQ ID NO: 27737 - DNA, 50 bp, synthetic construct
  source 1..50: mol_type = other DNA
cctcttcrcttcttccaaataacaaaaatactcataaaccacrttctaac

SEQ ID NO: 27738 - DNA, 50 bp, synthetic construct
  source 1..50: mol_type = other DNA
aatctttacctcttcrcttcttccaaataacaaaaatactcataaaccac

SEQ ID NO: 27739 - DNA, 50 bp, synthetic construct
  source 1..50: mol_type = other DNA
caattcccttctcttaatcttctctccaaccaaccaatctttacctcttc

SEQ ID NO: 27740 - DNA, 50 bp, synthetic construct
  source 1..50: mol_type = other DNA
ccaataacttcaaatcctaaaaatactatttccaccccacaattaataac

SEQ ID NO: 27741 - DNA, 50 bp, synthetic construct
  source 1..50: mol_type = other DNA
ctcctcctataacctacraaataactacttaatttaaaaaacttaaaaac

SEQ ID NO: 27742 - DNA, 50 bp, synthetic construct
  source 1..50: mol_type = other DNA
taaatacttttacatacttaaaaaataactaacctaacccrataactcac

SEQ ID NO: 27743 - DNA, 50 bp, synthetic construct
  source 1..50: mol_type = other DNA
acccttaacaaaaaaccttaaatcrttaaataatatctcattaaaacaac

SEQ ID NO: 27744 - DNA, 50 bp, synthetic construct
  source 1..50: mol_type = other DNA
tcrtactttcttctcacttacaaaattccctattctatcctacctaacac

SEQ ID NO: 27745 - DNA, 50 bp, synthetic construct
  source 1..50: mol_type = other DNA
tcctataacctttaacctaactaaattttcttccatttccaatactaatc

SEQ ID NO: 27746 - DNA, 50 bp, synthetic construct
  source 1..50: mol_type = other DNA
aaatacraacactcaacaacaaaaaaataacccataacaaacttaaaaac

SEQ ID NO: 27747 - DNA, 50 bp, synthetic construct
  source 1..50: mol_type = other DNA
aataaccaaaataattaaattacataatttaccacttccctttataatcc

SEQ ID NO: 27748 - DNA, 50 bp, synthetic construct
  source 1..50: mol_type = other DNA
aaaacaaaaaaaattatacaacaatcaaaaacaaatcaccacactaaacc

SEQ ID NO: 27749 - DNA, 50 bp, synthetic construct
  source 1..50: mol_type = other DNA
aaccacaataatataaatcacttccraatattctcactttacctaccaac

SEQ ID NO: 27750 - DNA, 50 bp, synthetic construct
  source 1..50: mol_type = other DNA
caaccaaatcctaaattaaacaaacaaccacaataatataaatcacttcc

SEQ ID NO: 27751 - DNA, 50 bp, synthetic construct
  source 1..50: mol_type = other DNA
tactataattatttacttaactcaaaacttaattacctaaaaaccatatc

SEQ ID NO: 27752 - DNA, 50 bp, synthetic construct
  source 1..50: mol_type = other DNA
ttacttaactcaaaacttaattacctaaaaaccatatcrttaaattaacc

SEQ ID NO: 27753 - DNA, 50 bp, synthetic construct
  source 1..50: mol_type = other DNA
aaattaaccraataaaataccaataaaacctaaaaaacctataacctacc

SEQ ID NO: 27754 - DNA, 50 bp, synthetic construct
  source 1..50: mol_type = other DNA
tatctctctaaaaacaaataaaatcctaacttcactaacacatcactaac

SEQ ID NO: 27755 - DNA, 50 bp, synthetic construct
  source 1..50: mol_type = other DNA
caatataaaacatcacacttattactattaaatttcattattaaattcac

SEQ ID NO: 27756 - DNA, 50 bp, synthetic construct
  source 1..50: mol_type = other DNA
aaatttctttcattttattttcrtttcccaccaacrttattcccactaac

SEQ ID NO: 27757 - DNA, 50 bp, synthetic construct
  source 1..50: mol_type = other DNA
tatctactaataaattaataaacttctcaaatttctttcattttattttc

SEQ ID NO: 27758 - DNA, 50 bp, synthetic construct
  source 1..50: mol_type = other DNA
ataaatataaaataacctaccacaaatctaacatccttactctaaactac

SEQ ID NO: 27759 - DNA, 50 bp, synthetic construct
  source 1..50: mol_type = other DNA
aaatcataattaataaaccctttatcatcctaatcatactcatcraacac

SEQ ID NO: 27760 - DNA, 50 bp, synthetic construct
  source 1..50: mol_type = other DNA
cttcataaatcataattaataaaccctttatcatcctaatcatactcatc

SEQ ID NO: 27761 - DNA, 50 bp, synthetic construct
  source 1..50: mol_type = other DNA
ctaaacctaaaaatctacaacacraattttcccaaaacaactcaaacacc

SEQ ID NO: 27762 - DNA, 50 bp, synthetic construct
  source 1..50: mol_type = other DNA
caatcttccattaaactattacacaatctaaacctaaaaatctacaacac

SEQ ID NO: 27763 - DNA, 50 bp, synthetic construct
  source 1..50: mol_type = other DNA
attaaaaaaattcctccaataaaataattactttaaaacaaataaaacac

SEQ ID NO: 27764 - DNA, 50 bp, synthetic construct
  source 1..50: mol_type = other DNA
aaaactctactaaaaaacacacactactctttctctcttacttaaaaacc

SEQ ID NO: 27765 - DNA, 50 bp, synthetic construct
  source 1..50: mol_type = other DNA
crttccaaacttcctctaaactttcttataacactttatatctctttatc

SEQ ID NO: 27766 - DNA, 50 bp, synthetic construct
  source 1..50: mol_type = other DNA
cctatataaatccttccaaaaatctacacattctctacccttaacctaac

SEQ ID NO: 27767 - DNA, 50 bp, synthetic construct
  source 1..50: mol_type = other DNA
aaactattcctaaaaaaactaaatctcaataacttaaaataatcaattcc

SEQ ID NO: 27768 - DNA, 50 bp, synthetic construct
  source 1..50: mol_type = other DNA
tatcaataaattcttcctaccaacctataaattaactactttccaatacc

SEQ ID NO: 27769 - DNA, 50 bp, synthetic construct
  source 1..50: mol_type = other DNA
ccttaaactcctactttaaattccataaataccctaaaaaaaaatccacc

SEQ ID NO: 27770 - DNA, 50 bp, synthetic construct
  source 1..50: mol_type = other DNA
tctctaaaataccataccraaactccctatacaacccttactaacattac

SEQ ID NO: 27771 - DNA, 50 bp, synthetic construct
  source 1..50: mol_type = other DNA
taaaatttataaacaactaaactttctatacatctctaaaataccatacc

SEQ ID NO: 27772 - DNA, 50 bp, synthetic construct
  source 1..50: mol_type = other DNA
aaccttactttcttttattcttattcctatatctttaacccctccttcac

SEQ ID NO: 27773 - DNA, 50 bp, synthetic construct
  source 1..50: mol_type = other DNA
aaaatcaacaaactaataaaaatcaccaactttcaatactacaaaaaaac

SEQ ID NO: 27774 - DNA, 50 bp, synthetic construct
  source 1..50: mol_type = other DNA
acaacattaaaaactaataacctctaccaatttactaattttttccttcc

SEQ ID NO: 27775 - DNA, 50 bp, synthetic construct
  source 1..50: mol_type = other DNA
ttaaatcattatttacactaatctccacaacataccttcataataaactc

SEQ ID NO: 27776 - DNA, 50 bp, synthetic construct
  source 1..50: mol_type = other DNA
rttaccaaatattatattaacaatattaaacatcatctctaccccctcac

SEQ ID NO: 27777 - DNA, 50 bp, synthetic construct
  source 1..50: mol_type = other DNA
acatataaaatactaaaaacaatacctaacacaaaataaatactcaaaac

SEQ ID NO: 27778 - DNA, 50 bp, synthetic construct
  source 1..50: mol_type = other DNA
ataacactaaccataaacttaaaaaaatctaattccatatcctatctctc

SEQ ID NO: 27779 - DNA, 50 bp, synthetic construct
  source 1..50: mol_type = other DNA
tctttccaaatccataaccaatactactcacattatacttttatttttac

SEQ ID NO: 27780 - DNA, 50 bp, synthetic construct
  source 1..50: mol_type = other DNA
taacctaattcatttctaaactccaataatcaaaaaatttttactaaacc

SEQ ID NO: 27781 - DNA, 50 bp, synthetic construct
  source 1..50: mol_type = other DNA
actacttataacatttcctacaataaacttataaataaaacaactttaac

SEQ ID NO: 27782 - DNA, 50 bp, synthetic construct
  source 1..50: mol_type = other DNA
taaaaccttctcactttataattatttttaatacccttaataataataac

SEQ ID NO: 27783 - DNA, 50 bp, synthetic construct
  source 1..50: mol_type = other DNA
tcaatatacaaaaaactccaatacactaaaaccttaatctatttttatac

SEQ ID NO: 27784 - DNA, 50 bp, synthetic construct
  source 1..50: mol_type = other DNA
ctctataatcacatcctcaaaaaattttactccrataacccaaacaaaac

SEQ ID NO: 27785 - DNA, 50 bp, synthetic construct
  source 1..50: mol_type = other DNA
aaaaaaaatacttcaaactctataatcacatcctcaaaaaattttactcc

SEQ ID NO: 27786 - DNA, 50 bp, synthetic construct
  source 1..50: mol_type = other DNA
ccccattcccaaaaaactatcattaactaacctattcaaaaatcacactc

SEQ ID NO: 27787 - DNA, 50 bp, synthetic construct
  source 1..50: mol_type = other DNA
acraaaaaactaataatctaatctccaaaaaaaacaacaaaaaaatcctc

SEQ ID NO: 27788 - DNA, 50 bp, synthetic construct
  source 1..50: mol_type = other DNA
acraaaatttttctactacttctcttaaaaactaaaccatcaaccctctc

SEQ ID NO: 27789 - DNA, 50 bp, synthetic construct
  source 1..50: mol_type = other DNA
taaattctttattctacctcattcataccttaacaaattatattcacatc

SEQ ID NO: 27790 - DNA, 50 bp, synthetic construct
  source 1..50: mol_type = other DNA
ctctcaaaaaactttctcaaaaatcttaccatactactactactcacaac

SEQ ID NO: 27791 - DNA, 50 bp, synthetic construct
  source 1..50: mol_type = other DNA
actttctcaaaaatcttaccatactactactactcacaacrcataacctc

SEQ ID NO: 27792 - DNA, 50 bp, synthetic construct
  source 1..50: mol_type = other DNA
taatccacactttaaataacactattcttcattctactttccatataccc

SEQ ID NO: 27793 - DNA, 50 bp, synthetic construct
  source 1..50: mol_type = other DNA
ttcattctactttccatatacccraataccaaacaaacaaaaaattttac

SEQ ID NO: 27794 - DNA, 50 bp, synthetic construct
  source 1..50: mol_type = other DNA
ctaccataactaataaaataaaccctttcaaaaaatcaacaaaatattcc

SEQ ID NO: 27795 - DNA, 50 bp, synthetic construct
  source 1..50: mol_type = other DNA
attctactaactccttaaaaaaacttatctcaccaaccataataactcac

SEQ ID NO: 27796 - DNA, 50 bp, synthetic construct
  source 1..50: mol_type = other DNA
acataatactaaaaaccaatcaaataccaaataattcctaataaaaaaac

SEQ ID NO: 27797 - DNA, 50 bp, synthetic construct
  source 1..50: mol_type = other DNA
tacaatacttatctaaaaaattttacctacaacccaaaacattccttacc

SEQ ID NO: 27798 - DNA, 50 bp, synthetic construct
  source 1..50: mol_type = other DNA
tctaaaactaccataacaaatcacctcaaattaaataacttaaaacaacc

SEQ ID NO: 27799 - DNA, 50 bp, synthetic construct
  source 1..50: mol_type = other DNA
caaaatttccactaaaacctctacaaaaaacrtaactcttccaacacctc

SEQ ID NO: 27800 - DNA, 50 bp, synthetic construct
  source 1..50: mol_type = other DNA
aactctaaaaatcaaaaaacaaaatttccactaaaacctctacaaaaaac

SEQ ID NO: 27801 - DNA, 50 bp, synthetic construct
  source 1..50: mol_type = other DNA
aaacctccttctaatttctaacaaaatccaaatttatcaatatcatatac

SEQ ID NO: 27802 - DNA, 50 bp, synthetic construct
  source 1..50: mol_type = other DNA
tacttttttcttctctctcctaattctatactttcctacaataaaacctc

SEQ ID NO: 27803 - DNA, 50 bp, synthetic construct
  source 1..50: mol_type = other DNA
tcttctaaaatcctaaacacatcaaacacrtcttctacatataacaatcc

SEQ ID NO: 27804 - DNA, 50 bp, synthetic construct
  source 1..50: mol_type = other DNA
ctcttcaaaataaataaatcatcttctaaaatcctaaacacatcaaacac

SEQ ID NO: 27805 - DNA, 50 bp, synthetic construct
  source 1..50: mol_type = other DNA
aacacttacatcctatcaaaaaaaaaccactaaaaaattccacaaataac

SEQ ID NO: 27806 - DNA, 50 bp, synthetic construct
  source 1..50: mol_type = other DNA
ttcaactaaatattttctaaaaaataacatctacaaaaactctccaaaac

SEQ ID NO: 27807 - DNA, 50 bp, synthetic construct
  source 1..50: mol_type = other DNA
tcttcaaaaaacatttaactaaaacttccacttaatactaccactaaatc

SEQ ID NO: 27808 - DNA, 50 bp, synthetic construct
  source 1..50: mol_type = other DNA
atcaaaaaaccaacractaaaaaccraaaacctaaaacracaaaactaac

SEQ ID NO: 27809 - DNA, 50 bp, synthetic construct
  source 1..50: mol_type = other DNA
caaattacraaaattttcttctccaaataaaacctaaacraccraacctc

SEQ ID NO: 27810 - DNA, 50 bp, synthetic construct
  source 1..50: mol_type = other DNA
acaaaacaacaaaactcrataataaaaaatattcraaacraccaaaaacc

SEQ ID NO: 27811 - DNA, 50 bp, synthetic construct
  source 1..50: mol_type = other DNA
caaatccatccaaaacccraccctaaaataactcraattattaaaaccac

SEQ ID NO: 27812 - DNA, 50 bp, synthetic construct
  source 1..50: mol_type = other DNA
crtatcraatataaaactctactccttttactccttaaaaatactttatc

SEQ ID NO: 27813 - DNA, 50 bp, synthetic construct
  source 1..50: mol_type = other DNA
actccttttactccttaaaaatactttatcraatccaatttactttattc

SEQ ID NO: 27814 - DNA, 50 bp, synthetic construct
  source 1..50: mol_type = other DNA
ttttactccttaaaaatactttatcraatccaatttactttattcraccc

SEQ ID NO: 27815 - DNA, 50 bp, synthetic construct
  source 1..50: mol_type = other DNA
aatccaatttactttattcracccraaatatttaataaaaactaacaaac

SEQ ID NO: 27816 - DNA, 50 bp, synthetic construct
  source 1..50: mol_type = other DNA
aaaataaaactaaccttaaaaatcctaaatactaaccttaaaaaaccatc

SEQ ID NO: 27817 - DNA, 50 bp, synthetic construct
  source 1..50: mol_type = other DNA
attataccaatatatccaaacatacacactcaaaaaccttacaaaaaaac

SEQ ID NO: 27818 - DNA, 50 bp, synthetic construct
  source 1..50: mol_type = other DNA
cacaccctcaaaatttccratactttctaaattttaattactctattttc

SEQ ID NO: 27819 - DNA, 50 bp, synthetic construct
  source 1..50: mol_type = other DNA
tcttatttcaatttcttctcracrtaaataatcacaccctcaaaatttcc

SEQ ID NO: 27820 - DNA, 50 bp, synthetic construct
  source 1..50: mol_type = other DNA
ataatcaaaacccaaaaaacaccraaaaccttaaaaatataatcacttac

SEQ ID NO: 27821 - DNA, 50 bp, synthetic construct
  source 1..50: mol_type = other DNA
atcaaaacccaaaaaacaccraaaaccttaaaaatataatcacttacrtc

SEQ ID NO: 27822 - DNA, 50 bp, synthetic construct
  source 1..50: mol_type = other DNA
aaaatactatactttaatacttctttaaatctttactattacctctcaac

SEQ ID NO: 27823 - DNA, 50 bp, synthetic construct
  source 1..50: mol_type = other DNA
ccrcaactaactcacatttaataaaaatcctccataatactatataaaac

SEQ ID NO: 27824 - DNA, 50 bp, synthetic construct
  source 1..50: mol_type = other DNA
ttcaaaaaaatacatatctaaaaatacctaaaactctaacrcactactcc

SEQ ID NO: 27825 - DNA, 50 bp, synthetic construct
  source 1..50: mol_type = other DNA
caataccataaaaaatccttaccaaatataaaccaactacraaacaatac

SEQ ID NO: 27826 - DNA, 50 bp, synthetic construct
  source 1..50: mol_type = other DNA
cacattaatttaaacaaaactttccactaatataaacrataaaaacaccc

SEQ ID NO: 27827 - DNA, 50 bp, synthetic construct
  source 1..50: mol_type = other DNA
ataatctatattacatttaaattactacaatatcctcraatactttcatc

SEQ ID NO: 27828 - DNA, 50 bp, synthetic construct
  source 1..50: mol_type = other DNA
aacaatcaattaatacttcatcttaaaatttatatctcaactttaacacc

SEQ ID NO: 27829 - DNA, 50 bp, synthetic construct
  source 1..50: mol_type = other DNA
atctacaaaaaaactaacctataatcttcaaatataacaaaatcacaaac

SEQ ID NO: 27830 - DNA, 50 bp, synthetic construct
  source 1..50: mol_type = other DNA
acactaaatttataatactttattacaacaaccctaaaaaactaacacac

SEQ ID NO: 27831 - DNA, 50 bp, synthetic construct
  source 1..50: mol_type = other DNA
aataactctactatttcacattcttaccaacaatacataaaaattccaac

SEQ ID NO: 27832 - DNA, 50 bp, synthetic construct
  source 1..50: mol_type = other DNA
tcttttttataactaacttatacttaatataatatcttcaaaattcaccc

SEQ ID NO: 27833 - DNA, 50 bp, synthetic construct
  source 1..50: mol_type = other DNA
acattattcacaataaccaaaaaataacracaacccaaatatccattaac

SEQ ID NO: 27834 - DNA, 50 bp, synthetic construct
  source 1..50: mol_type = other DNA
actaaaacatactatccctccactaaacaaaaaaaacaaccctaaccctc

SEQ ID NO: 27835 - DNA, 50 bp, synthetic construct
  source 1..50: mol_type = other DNA
tcctcatacaaataatccaattctatatacatatttacatatcaaatctc

SEQ ID NO: 27836 - DNA, 50 bp, synthetic construct
  source 1..50: mol_type = other DNA
aaatctaacttaaaaaacctaaaaatacccatacaattctacttcaaccc

SEQ ID NO: 27837 - DNA, 50 bp, synthetic construct
  source 1..50: mol_type = other DNA
ttaaaaaacctaaaaatacccatacaattctacttcaacccraatacaac

SEQ ID NO: 27838 - DNA, 50 bp, synthetic construct
  source 1..50: mol_type = other DNA
aaacaaaaatctcrctatactacccaaactaatctcaaattcctaaactc

SEQ ID NO: 27839 - DNA, 50 bp, synthetic construct
  source 1..50: mol_type = other DNA
aactaaccrttaaataaaaaaacaaacaatctaataattacaacaacaac

SEQ ID NO: 27840 - DNA, 50 bp, synthetic construct
  source 1..50: mol_type = other DNA
caactataccttatctaaccatttattcrtccaacraacatttactaaac

SEQ ID NO: 27841 - DNA, 50 bp, synthetic construct
  source 1..50: mol_type = other DNA
atacaaacaaaatttcaactataccttatctaaccatttattcrtccaac

SEQ ID NO: 27842 - DNA, 50 bp, synthetic construct
  source 1..50: mol_type = other DNA
aaaacttatacaaacaaaatttcaactataccttatctaaccatttattc

SEQ ID NO: 27843 - DNA, 50 bp, synthetic construct
  source 1..50: mol_type = other DNA
caaacataaacaactaaaccataaaaccctaaaaacaaaactaaaaccac

SEQ ID NO: 27844 - DNA, 50 bp, synthetic construct
  source 1..50: mol_type = other DNA
cttccccatcctttacttttaaatctattccctaaaacataaaaaatacc

SEQ ID NO: 27845 - DNA, 50 bp, synthetic construct
  source 1..50: mol_type = other DNA
ccaactaaatacttaacaacaaaatattcccaaataaaaaatatcttaac

SEQ ID NO: 27846 - DNA, 50 bp, synthetic construct
  source 1..50: mol_type = other DNA
cataaaatatctctaaaaaaatattcaaatattaacataattttacctcc

SEQ ID NO: 27847 - DNA, 50 bp, synthetic construct
  source 1..50: mol_type = other DNA
tcttcaatatacctcraaatcaccttactacctaataatcacaacttctc

SEQ ID NO: 27848 - DNA, 50 bp, synthetic construct
  source 1..50: mol_type = other DNA
ttaaaaatctatcccraaccttctaaataaaaaattctaaaaacrataac

SEQ ID NO: 27849 - DNA, 50 bp, synthetic construct
  source 1..50: mol_type = other DNA
ccaatattaaaaatctatcccraaccttctaaataaaaaattctaaaaac

SEQ ID NO: 27850 - DNA, 50 bp, synthetic construct
  source 1..50: mol_type = other DNA
ctccaatatcraaaaactcrttaaaaataccaatattaaaaatctatccc

SEQ ID NO: 27851 - DNA, 50 bp, synthetic construct
  source 1..50: mol_type = other DNA
attctcaaataatcctccaaccaaacaacatctccaatatcraaaaactc

SEQ ID NO: 27852 - DNA, 50 bp, synthetic construct
  source 1..50: mol_type = other DNA
tacctaactaaaaaactatctaaaaacctcaatatctaataaaaacttac

SEQ ID NO: 27853 - DNA, 50 bp, synthetic construct
  source 1..50: mol_type = other DNA
taaaaaactatctaaaaacctcaatatctaataaaaacttacrtaccctc

SEQ ID NO: 27854 - DNA, 50 bp, synthetic construct
  source 1..50: mol_type = other DNA
aaatttctttacctaacattaaaaacacttctattactatcaaaacaatc

SEQ ID NO: 27855 - DNA, 50 bp, synthetic construct
  source 1..50: mol_type = other DNA
ttatacaaatcacattttaaaaataatctaaaattttacatttactaatc

SEQ ID NO: 27856 - DNA, 50 bp, synthetic construct
  source 1..50: mol_type = other DNA
ttttaaaatataatatacataatatactaaaaacccaatacctactacrc

SEQ ID NO: 27857 - DNA, 50 bp, synthetic construct
  source 1..50: mol_type = other DNA
aattttaaaatataatatacataatatactaaaaacccaatacctactac

SEQ ID NO: 27858 - DNA, 50 bp, synthetic construct
  source 1..50: mol_type = other DNA
acccccaacataccatatatatcacactttaaaatcttaaaactaaatac

SEQ ID NO: 27859 - DNA, 50 bp, synthetic construct
  source 1..50: mol_type = other DNA
aattttcccaaaatacccattattataccrcrtatttcctctaatcaatc

SEQ ID NO: 27860 - DNA, 50 bp, synthetic construct
  source 1..50: mol_type = other DNA
aatcatttaacrattcttaaattttcccaaaatacccattattataccrc

SEQ ID NO: 27861 - DNA, 50 bp, synthetic construct
  source 1..50: mol_type = other DNA
ttaatcatttaacrattcttaaattttcccaaaatacccattattatacc

SEQ ID NO: 27862 - DNA, 50 bp, synthetic construct
  source 1..50: mol_type = other DNA
atcaaacatttaattttctcttacacactataatacacccaaatttaatc

SEQ ID NO: 27863 - DNA, 50 bp, synthetic construct
  source 1..50: mol_type = other DNA
aaaaataattaaaacatccctcacttcaaaacttctttaacacaaatacc

SEQ ID NO: 27864 - DNA, 50 bp, synthetic construct
  source 1..50: mol_type = other DNA
tctaaccctttccaactattttcttttttataaatcaaattacaccttcc

SEQ ID NO: 27865 - DNA, 50 bp, synthetic construct
  source 1..50: mol_type = other DNA
aaaaatttccaaacaaaacaaatcaataaacataaacccaaccrtttacc

SEQ ID NO: 27866 - DNA, 50 bp, synthetic construct
  source 1..50: mol_type = other DNA
tccttataaaaatttccaaacaaaacaaatcaataaacataaacccaacc

SEQ ID NO: 27867 - DNA, 50 bp, synthetic construct
  source 1..50: mol_type = other DNA
atttaccttatttaaaaacctttacaaaaatttctaattaaaacttcatc

SEQ ID NO: 27868 - DNA, 50 bp, synthetic construct
  source 1..50: mol_type = other DNA
tttaaaaacctttacaaaaatttctaattaaaacttcatcrttcaacaac

SEQ ID NO: 27869 - DNA, 50 bp, synthetic construct
  source 1..50: mol_type = other DNA
atcataataaattctaactttcacaaactatattcaaaaacttaacatac

SEQ ID NO: 27870 - DNA, 50 bp, synthetic construct
  source 1..50: mol_type = other DNA
aacrttcatcaaattctataaacacttaattctctattaacattttatac

SEQ ID NO: 27871 - DNA, 50 bp, synthetic construct
  source 1..50: mol_type = other DNA
actttcrttcttataacaaatatactttaaattaaaaactacaattaaac

SEQ ID NO: 27872 - DNA, 50 bp, synthetic construct
  source 1..50: mol_type = other DNA
ataatttctaaacaactaaacaactcatctattaccattttattctattc

SEQ ID NO: 27873 - DNA, 50 bp, synthetic construct
  source 1..50: mol_type = other DNA
ttcatctattacacttattaacacttcattctctctcrtttcaaccaacc

SEQ ID NO: 27874 - DNA, 50 bp, synthetic construct
  source 1..50: mol_type = other DNA
cacacactaactctacataaaataacccacttcaataattaccttcrtac

SEQ ID NO: 27875 - DNA, 50 bp, synthetic construct
  source 1..50: mol_type = other DNA
cactctatcctaactctctacctaaccctctcttcaataatttcttttcc

SEQ ID NO: 27876 - DNA, 50 bp, synthetic construct
  source 1..50: mol_type = other DNA
aacctctctttaacatctaatctattaacrtatcccacaatactccacac

SEQ ID NO: 27877 - DNA, 50 bp, synthetic construct
  source 1..50: mol_type = other DNA
tcrtaaatctaaacaaacttcaacccttattcaaacaaaaatctccrccc

SEQ ID NO: 27878 - DNA, 50 bp, synthetic construct
  source 1..50: mol_type = other DNA
aaaatcrtaaatctaaacaaacttcaacccttattcaaacaaaaatctcc

SEQ ID NO: 27879 - DNA, 50 bp, synthetic construct
  source 1..50: mol_type = other DNA
atcaaaatttaaaaactaatctcaaaatcaccaaaacattaataaaaatc

SEQ ID NO: 27880 - DNA, 50 bp, synthetic construct
  source 1..50: mol_type = other DNA
aaataaaccatatatctactaaaaactaaactatcaactactataactcc

SEQ ID NO: 27881 - DNA, 50 bp, synthetic construct
  source 1..50: mol_type = other DNA
aaccatatatctactaaaaactaaactatcaactactataactccrctcc

SEQ ID NO: 27882 - DNA, 50 bp, synthetic construct
  source 1..50: mol_type = other DNA
taaactatcaactactataactccrctccrtcaacccaaaaaacttaaac

SEQ ID NO: 27883 - DNA, 50 bp, synthetic construct
  source 1..50: mol_type = other DNA
ttttcttcrtctttctcaaaaactacrtaaactaaaaatcccaacctccc

SEQ ID NO: 27884 - DNA, 50 bp, synthetic construct
  source 1..50: mol_type = other DNA
taataaacaccaaaaaccctcaacttttcttcrtctttctcaaaaactac

SEQ ID NO: 27885 - DNA, 50 bp, synthetic construct
  source 1..50: mol_type = other DNA
crattataaatcrtttcttaataaacaccaaaaaccctcaacttttcttc

SEQ ID NO: 27886 - DNA, 50 bp, synthetic construct
  source 1..50: mol_type = other DNA
ttccccaaattattccaactaaatcataaattacaacacrattataaatc

SEQ ID NO: 27887 - DNA, 50 bp, synthetic construct
  source 1..50: mol_type = other DNA
attcttaaaatttccccaaattattccaactaaatcataaattacaacac

SEQ ID NO: 27888 - DNA, 50 bp, synthetic construct
  source 1..50: mol_type = other DNA
attataacttacaataacaacaaaacttcraaactaccaactaccaaaac

SEQ ID NO: 27889 - DNA, 50 bp, synthetic construct
  source 1..50: mol_type = other DNA
caaaacttcraaactaccaactaccaaaacrcctaccttttactaaaaac

SEQ ID NO: 27890 - DNA, 50 bp, synthetic construct
  source 1..50: mol_type = other DNA
ataacctttctattaacrctaactaaaaaaaacttaccrtaataccaaac

SEQ ID NO: 27891 - DNA, 50 bp, synthetic construct
  source 1..50: mol_type = other DNA
aaatttcaataaataacctttctattaacrctaactaaaaaaaacttacc

SEQ ID NO: 27892 - DNA, 50 bp, synthetic construct
  source 1..50: mol_type = other DNA
tctaacaaactacaaaaacttaaatttcaataaataacctttctattaac

SEQ ID NO: 27893 - DNA, 50 bp, synthetic construct
  source 1..50: mol_type = other DNA
aaaaatcacttattaaaacccaaatccctacaatttaccaaaccaaaatc

SEQ ID NO: 27894 - DNA, 50 bp, synthetic construct
  source 1..50: mol_type = other DNA
tttaccaaaccaaaatcractccaaattccaacctataacttttaaaaac

SEQ ID NO: 27895 - DNA, 50 bp, synthetic construct
  source 1..50: mol_type = other DNA
aattccaacctataacttttaaaaacrcaaaaccaactctaatataaaac

SEQ ID NO: 27896 - DNA, 50 bp, synthetic construct
  source 1..50: mol_type = other DNA
aaaaaaaacataaaaactacctaccractctctaaataaaaaacaatacc

SEQ ID NO: 27897 - DNA, 50 bp, synthetic construct
  source 1..50: mol_type = other DNA
aaaaacataaaaactacctaccractctctaaataaaaaacaataccrcc

SEQ ID NO: 27898 - DNA, 50 bp, synthetic construct
  source 1..50: mol_type = other DNA
aaacaacttattatttcctattactttctaacacctcrcactataccctc

SEQ ID NO: 27899 - DNA, 50 bp, synthetic construct
  source 1..50: mol_type = other DNA
aaaaacaaacaaaaaaaccacaaaaaaacctcaactcaaacaaaaaaatc

SEQ ID NO: 27900 - DNA, 50 bp, synthetic construct
  source 1..50: mol_type = other DNA
taaaatctaaccaaaaatacaacataaaaccatcctattctctaaaaccc

SEQ ID NO: 27901 - DNA, 50 bp, synthetic construct
  source 1..50: mol_type = other DNA
ttctctaaaacccraaaaccaaaaatacaacaaaataacctatttaaaac

SEQ ID NO: 27902 - DNA, 50 bp, synthetic construct
  source 1..50: mol_type = other DNA
ctacaaacraaactataaccacraaaaaaacatcaaaaacccratcactc

SEQ ID NO: 27903 - DNA, 50 bp, synthetic construct
  source 1..50: mol_type = other DNA
tatcaatcaaaaaatatttacatttatctataacctaaaaaccacccccc

SEQ ID NO: 27904 - DNA, 50 bp, synthetic construct
  source 1..50: mol_type = other DNA
atcaaaaaatatttacatttatctataacctaaaaaccaccccccrcccc

SEQ ID NO: 27905 - DNA, 50 bp, synthetic construct
  source 1..50: mol_type = other DNA
cctaaccaccttaaacacatattctcaaaacctcctaaaaactaaatcac

SEQ ID NO: 27906 - DNA, 50 bp, synthetic construct
  source 1..50: mol_type = other DNA
aaaacctcctaaaaactaaatcacraaccataatcactcatatttaactc

SEQ ID NO: 27907 - DNA, 50 bp, synthetic construct
  source 1..50: mol_type = other DNA
aaccaatctacacaatatacaaaataatataattcatttataattcatac

SEQ ID NO: 27908 - DNA, 50 bp, synthetic construct
  source 1..50: mol_type = other DNA
ctcaaacaataatcaaaccacctctaaaaaacaacrcaaataaaacaaac

SEQ ID NO: 27909 - DNA, 50 bp, synthetic construct
  source 1..50: mol_type = other DNA
ccccaaaataacactctcaaacaataatcaaaccacctctaaaaaacaac

SEQ ID NO: 27910 - DNA, 50 bp, synthetic construct
  source 1..50: mol_type = other DNA
ctaaccactacctaaaaatatcaccctaaaacaaacctaaataaacacrc

SEQ ID NO: 27911 - DNA, 50 bp, synthetic construct
  source 1..50: mol_type = other DNA
taaaaactaacttcttcctctttctatcaaacaactctatactcatacac

SEQ ID NO: 27912 - DNA, 50 bp, synthetic construct
  source 1..50: mol_type = other DNA
ctaaaataatattacctaactactaccaatacacccraccaaccctacac

SEQ ID NO: 27913 - DNA, 50 bp, synthetic construct
  source 1..50: mol_type = other DNA
aataaatctccaataatataattttaaacactataacaactaaacaacrc

SEQ ID NO: 27914 - DNA, 50 bp, synthetic construct
  source 1..50: mol_type = other DNA
ccaattaccacaatatctaaaattacaccattaaaaatttattcctttac

SEQ ID NO: 27915 - DNA, 50 bp, synthetic construct
  source 1..50: mol_type = other DNA
taactctataaaactaccaaaccttttacaccttaatataaaaacatttc

SEQ ID NO: 27916 - DNA, 50 bp, synthetic construct
  source 1..50: mol_type = other DNA
tcacattaaaatacaaaaaacctaacaactccacaaaattatttaaaaac

SEQ ID NO: 27917 - DNA, 50 bp, synthetic construct
  source 1..50: mol_type = other DNA
aatatcaacrcactaaatatttactaatcacacacaaataaccraaactc

SEQ ID NO: 27918 - DNA, 50 bp, synthetic construct
  source 1..50: mol_type = other DNA
tatatataatcaataaatatttaatacrctaacatccttaactaaacttc

SEQ ID NO: 27919 - DNA, 50 bp, synthetic construct
  source 1..50: mol_type = other DNA
taacctcctaaaaaaaatcttctaaaaacctctacaaaaataataaatcc

SEQ ID NO: 27920 - DNA, 50 bp, synthetic construct
  source 1..50: mol_type = other DNA
ttctaaaaacctctacaaaaataataaatccraacccaaactcccttctc

SEQ ID NO: 27921 - DNA, 50 bp, synthetic construct
  source 1..50: mol_type = other DNA
aaaaataataaatccraacccaaactcccttctcraacraataaaatatc

SEQ ID NO: 27922 - DNA, 50 bp, synthetic construct
  source 1..50: mol_type = other DNA
aacaaaaccaatcraaaaactactaataatcacrtaaaataaatcctcac

SEQ ID NO: 27923 - DNA, 50 bp, synthetic construct
  source 1..50: mol_type = other DNA
taaaatatctctctataacacaactattccccraaacaaaaatccaaatc

SEQ ID NO: 27924 - DNA, 50 bp, synthetic construct
  source 1..50: mol_type = other DNA
ctctccacctctcctactaaaaaccctacctccaaataaaaaataacaac

SEQ ID NO: 27925 - DNA, 50 bp, synthetic construct
  source 1..50: mol_type = other DNA
aaaactttataacacctaaccctaacactccracacctcaaaaaaaactc

SEQ ID NO: 27926 - DNA, 50 bp, synthetic construct
  source 1..50: mol_type = other DNA
aaactaaataccacaaaatccctaaacraataccattaaaaactaaaacc

SEQ ID NO: 27927 - DNA, 50 bp, synthetic construct
  source 1..50: mol_type = other DNA
aaacaactttatcataaccctaaatatctaatctcttaaaaaatcaaaac

SEQ ID NO: 27928 - DNA, 50 bp, synthetic construct
  source 1..50: mol_type = other DNA
crcaaacttaacaaaaatataatacraacraaaactaaaatcaacccctc

SEQ ID NO: 27929 - DNA, 50 bp, synthetic construct
  source 1..50: mol_type = other DNA
actaaataactaaaactctaaataaaacatcacaacctctacttaatcac

SEQ ID NO: 27930 - DNA, 50 bp, synthetic construct
  source 1..50: mol_type = other DNA
aaaccaataaaccaactcraaatactaaaacctaatttacctaaaacccc

SEQ ID NO: 27931 - DNA, 50 bp, synthetic construct
  source 1..50: mol_type = other DNA
taaatctataaataacccraaactccaaacaaattaaactttaacacccc

SEQ ID NO: 27932 - DNA, 50 bp, synthetic construct
  source 1..50: mol_type = other DNA
tcccataaaaaacaacaaacrattactcaaatcaaaaaaccaaataacrc

SEQ ID NO: 27933 - DNA, 50 bp, synthetic construct
  source 1..50: mol_type = other DNA
cctcccataaaaaacaacaaacrattactcaaatcaaaaaaccaaataac

SEQ ID NO: 27934 - DNA, 50 bp, synthetic construct
  source 1..50: mol_type = other DNA
ttccataaaaaacctaaccrcctaacctttccttcccaaaatcattttcc

SEQ ID NO: 27935 - DNA, 50 bp, synthetic construct
  source 1..50: mol_type = other DNA
attttaaaactaaaacaacctaatcctaaaacaataacaaacctcaaaac

SEQ ID NO: 27936 - DNA, 50 bp, synthetic construct
  source 1..50: mol_type = other DNA
aaccaaacaccaaactaacataaaaatctaaacctcaacctaaaccctac

SEQ ID NO: 27937 - DNA, 50 bp, synthetic construct
  source 1..50: mol_type = other DNA
aaaaaaaaaataacccctctcaaacaaaaaaatacaactactcctaccac

SEQ ID NO: 27938 - DNA, 50 bp, synthetic construct
  source 1..50: mol_type = other DNA
ttaaaatacrtccacrctaaatataccaaacatacacrtaaactacaaac

SEQ ID NO: 27939 - DNA, 50 bp, synthetic construct
  source 1..50: mol_type = other DNA
ataaacaaaaaatttttaaaaaccacctccccattaaacctaccactacc

SEQ ID NO: 27940 - DNA, 50 bp, synthetic construct
  source 1..50: mol_type = other DNA
aaaactccraccaaccacrtatacatatttaaaaataacaataaaaactc

SEQ ID NO: 27941 - DNA, 50 bp, synthetic construct
  source 1..50: mol_type = other DNA
tcttcaaaaaaatcccccraatccccactaccattcttaaacatatatac

SEQ ID NO: 27942 - DNA, 50 bp, synthetic construct
  source 1..50: mol_type = other DNA
tcttaattaacaattcctcrtacctcattttcttcactaaaaatcaaacc

SEQ ID NO: 27943 - DNA, 50 bp, synthetic construct
  source 1..50: mol_type = other DNA
atacctaaacaatttatatccataactaaaaacaaaactaacaaaactcc

SEQ ID NO: 27944 - DNA, 50 bp, synthetic construct
  source 1..50: mol_type = other DNA
tacccaaacatttcctattccaaataattttaaacaaaaaaccaaccaac

SEQ ID NO: 27945 - DNA, 50 bp, synthetic construct
  source 1..50: mol_type = other DNA
ccaccttaattttaaaaatcctcaaatactaaccacatccataaaataac

SEQ ID NO: 27946 - DNA, 50 bp, synthetic construct
  source 1..50: mol_type = other DNA
acaaaaaataccccttacttataaaatataatcaaaaaacaacttccaac

SEQ ID NO: 27947 - DNA, 50 bp, synthetic construct
  source 1..50: mol_type = other DNA
tacttataaaatataatcaaaaaacaacttccaacrttccaaccaacttc

SEQ ID NO: 27948 - DNA, 50 bp, synthetic construct
  source 1..50: mol_type = other DNA
actcctaaaacaatacaaaattataactaatattttaaaattctctctac

SEQ ID NO: 27949 - DNA, 50 bp, synthetic construct
  source 1..50: mol_type = other DNA
aaatataaaaaactattaaaccctatttccaaatccccaaataaaactac

SEQ ID NO: 27950 - DNA, 50 bp, synthetic construct
  source 1..50: mol_type = other DNA
aataaaaacaacctaaaaccaaactcacctcaactatctccaaccctatc

SEQ ID NO: 27951 - DNA, 50 bp, synthetic construct
  source 1..50: mol_type = other DNA
aaaaccctaaaaatatacacraacaaattaaaaatcaacraactacrtac

SEQ ID NO: 27952 - DNA, 50 bp, synthetic construct
  source 1..50: mol_type = other DNA
atacttaataaacaaactactttcaaaacraacctaaaatacaaacaaac

SEQ ID NO: 27953 - DNA, 50 bp, synthetic construct
  source 1..50: mol_type = other DNA
ttctattttttatatattatataaccatcrtctatctatatctcaaactc

SEQ ID NO: 27954 - DNA, 50 bp, synthetic construct
  source 1..50: mol_type = other DNA
atctctaacctcccttcaaaacracctttcctataatcaaaaaaactacc

SEQ ID NO: 27955 - DNA, 50 bp, synthetic construct
  source 1..50: mol_type = other DNA
tcaacrctaaaccaatcctaaaacattccaaaaacaaatctaactaactc

SEQ ID NO: 27956 - DNA, 50 bp, synthetic construct
  source 1..50: mol_type = other DNA
tctcatttcttctcttaacttcctctaactaaaacctaaaaaataaattc

SEQ ID NO: 27957 - DNA, 50 bp, synthetic construct
  source 1..50: mol_type = other DNA
cccaccctataaaaatcaaacaaaaaataaactattaaactaccraaaac

SEQ ID NO: 27958 - DNA, 50 bp, synthetic construct
  source 1..50: mol_type = other DNA
ctccctcccaccctataaaaatcaaacaaaaaataaactattaaactacc

SEQ ID NO: 27959 - DNA, 50 bp, synthetic construct
  source 1..50: mol_type = other DNA
aaaatatcattatcccaaccacccraaaaaataacatacctataaaacrc

SEQ ID NO: 27960 - DNA, 50 bp, synthetic construct
  source 1..50: mol_type = other DNA
crccttacaaacataccatttcctcraataactaaaacaataacaccctc

SEQ ID NO: 27961 - DNA, 50 bp, synthetic construct
  source 1..50: mol_type = other DNA
ttacaaacataccatttcctcraataactaaaacaataacaccctcrcac

SEQ ID NO: 27962 - DNA, 50 bp, synthetic construct
  source 1..50: mol_type = other DNA
aacaaaatttatcctctcactaaactaaaacccraccccttcaaaactac

SEQ ID NO: 27963 - DNA, 50 bp, synthetic construct
  source 1..50: mol_type = other DNA
tatcttatatctcracaaaacccrcacaactaaaataaaacaaccaaacc

SEQ ID NO: 27964 - DNA, 50 bp, synthetic construct
  source 1..50: mol_type = other DNA
crtctaatttctaacctcrctatatccaaaaccrtattatcttatatctc

SEQ ID NO: 27965 - DNA, 50 bp, synthetic construct
  source 1..50: mol_type = other DNA
craaacacaaaacaacacraccctaaacacaacraaatcaaaaaccaaac

SEQ ID NO: 27966 - DNA, 50 bp, synthetic construct
  source 1..50: mol_type = other DNA
aaatattaaacaataaacraaaactctctataactaacractaacratac

SEQ ID NO: 27967 - DNA, 50 bp, synthetic construct
  source 1..50: mol_type = other DNA
ccracaaaaaacrttttctctttaacacaccattcctacattaaatatcc

SEQ ID NO: 27968 - DNA, 50 bp, synthetic construct
  source 1..50: mol_type = other DNA
tcccaacaaaaaaatactaaaaaatccccraaaatacatttatacatccc

SEQ ID NO: 27969 - DNA, 50 bp, synthetic construct
  source 1..50: mol_type = other DNA
aaatcrctcccctaacaaactcctttacaatcaataacaatatctacacc

SEQ ID NO: 27970 - DNA, 50 bp, synthetic construct
  source 1..50: mol_type = other DNA
aaaaaaatacaaatcaaaactacaaataaataccacatcacacctcctac

SEQ ID NO: 27971 - DNA, 50 bp, synthetic construct
  source 1..50: mol_type = other DNA
ataaataccacatcacacctcctacrataactataatcaaaaaaacaaac

SEQ ID NO: 27972 - DNA, 50 bp, synthetic construct
  source 1..50: mol_type = other DNA
tattatattaactctaacctttcaaaaactaccaacctattttccataac

SEQ ID NO: 27973 - DNA, 50 bp, synthetic construct
  source 1..50: mol_type = other DNA
ataaaaaacaaactaacaattcctaaaaaattaaaattaacacaacactc

SEQ ID NO: 27974 - DNA, 50 bp, synthetic construct
  source 1..50: mol_type = other DNA
aatctttctaaaacccctaaattcctaaactactcctataaataacattc

SEQ ID NO: 27975 - DNA, 50 bp, synthetic construct
  source 1..50: mol_type = other DNA
ctaaaaataacaccaaatatctaccrccatacaaaacacccacraaatac

SEQ ID NO: 27976 - DNA, 50 bp, synthetic construct
  source 1..50: mol_type = other DNA
aacraaaacttaactctacccaataaaactaaaaaattctccctactccc

SEQ ID NO: 27977 - DNA, 50 bp, synthetic construct
  source 1..50: mol_type = other DNA
aaaacttataaaacraaactatataaacacrtacacrtattccacaaacc

SEQ ID NO: 27978 - DNA, 50 bp, synthetic construct
  source 1..50: mol_type = other DNA
raaaaaaacctcaaaaaacttataaaacraaactatataaacacrtacac

SEQ ID NO: 27979 - DNA, 50 bp, synthetic construct
  source 1..50: mol_type = other DNA
aacctcraaaaaaacctcaaaaaacttataaaacraaactatataaacac

SEQ ID NO: 27980 - DNA, 50 bp, synthetic construct
  source 1..50: mol_type = other DNA
aacccaaaatcctacccaataaaaacccaaaatccaaaaaacaaaacctc

SEQ ID NO: 27981 - DNA, 50 bp, synthetic construct
  source 1..50: mol_type = other DNA
aacraaacraatcaataccctacctaaaaactataaataacrctatttcc

SEQ ID NO: 27982 - DNA, 50 bp, synthetic construct
  source 1..50: mol_type = other DNA
aactacatcatccaaaccaaaaactaaacaaaataccctctaaaaacccc

SEQ ID NO: 27983 - DNA, 50 bp, synthetic construct
  source 1..50: mol_type = other DNA
ccaaaccaaaaactaaacaaaataccctctaaaaaccccrcaacaacacc

SEQ ID NO: 27984 - DNA, 50 bp, synthetic construct
  source 1..50: mol_type = other DNA
ctccacactcctaaaaatattcccaaactaaactcctaaaaaacctaaac

SEQ ID NO: 27985 - DNA, 50 bp, synthetic construct
  source 1..50: mol_type = other DNA
caacacccaatctctaaaactaacraaacratacctatatatactctttc

SEQ ID NO: 27986 - DNA, 50 bp, synthetic construct
  source 1..50: mol_type = other DNA
atccrtatatctttctccaacctcttcaaaaaatttaaatctacraccac

SEQ ID NO: 27987 - DNA, 50 bp, synthetic construct
  source 1..50: mol_type = other DNA
accactcaaaaaacttctcctaaaattacaataatcccaaaaaacaaacc

SEQ ID NO: 27988 - DNA, 50 bp, synthetic construct
  source 1..50: mol_type = other DNA
cctaaaaaaaaccctctaaataacccttacaaaaactaccataatcacac

SEQ ID NO: 27989 - DNA, 50 bp, synthetic construct
  source 1..50: mol_type = other DNA
cataatcacacrtatcttatctatcacctccattataaaaaaattaaccc

SEQ ID NO: 27990 - DNA, 50 bp, synthetic construct
  source 1..50: mol_type = other DNA
ccctaaaaattctactctatattaaaataccccttatacccaaccctaac

SEQ ID NO: 27991 - DNA, 50 bp, synthetic construct
  source 1..50: mol_type = other DNA
taaaaattctactctatattaaaataccccttatacccaaccctaacrcc

SEQ ID NO: 27992 - DNA, 50 bp, synthetic construct
  source 1..50: mol_type = other DNA
ctacataaaattacaaaaataatcaaaaacctccaacccaaaatataaac

SEQ ID NO: 27993 - DNA, 50 bp, synthetic construct
  source 1..50: mol_type = other DNA
caacccaaaatataaacraataaactaaacttaatcrtcaaaaccaaaac

SEQ ID NO: 27994 - DNA, 50 bp, synthetic construct
  source 1..50: mol_type = other DNA
aacttaaaataacractaaaaataaaaccraataactaaccccacccttc

SEQ ID NO: 27995 - DNA, 50 bp, synthetic construct
  source 1..50: mol_type = other DNA
aaaaaaacrttaaaccccaactactccaacctaaccacaaaaaaacaaac

SEQ ID NO: 27996 - DNA, 50 bp, synthetic construct
  source 1..50: mol_type = other DNA
tcrtacccrtttacttccctataaccaaactaaaacaactaaaattcaac

SEQ ID NO: 27997 - DNA, 50 bp, synthetic construct
  source 1..50: mol_type = other DNA
cctacaactaataatcraaatacccctaaaaataatacacracctactcc

SEQ ID NO: 27998 - DNA, 50 bp, synthetic construct
  source 1..50: mol_type = other DNA
taaataatactactaaaaacataaatatataaaaatctattcaaattccc

SEQ ID NO: 27999 - DNA, 50 bp, synthetic construct
  source 1..50: mol_type = other DNA
ataatcattctatatttaactttttacaaaaccaccaaactattctccac

SEQ ID NO: 28000 - DNA, 50 bp, synthetic construct
  source 1..50: mol_type = other DNA
rtaaaaaacaacttaataattctacraaacaaaaacccccrtatactacc

SEQ ID NO: 28001 - DNA, 50 bp, synthetic construct
  source 1..50: mol_type = other DNA
atccrtaataatacaccttccctaaaataaacaaaaactcaaaaattacc

SEQ ID NO: 28002 - DNA, 50 bp, synthetic construct
  source 1..50: mol_type = other DNA
rtaataatacaccttccctaaaataaacaaaaactcaaaaattaccracc

SEQ ID NO: 28003 - DNA, 50 bp, synthetic construct
  source 1..50: mol_type = other DNA
raaactccaacctaaatactatatatataaccctcractaactaaccttc

SEQ ID NO: 28004 - DNA, 50 bp, synthetic construct
  source 1..50: mol_type = other DNA
taacctactaacraaaactactcatcacaaccaaaacttccaactactac

SEQ ID NO: 28005 - DNA, 50 bp, synthetic construct
  source 1..50: mol_type = other DNA
acaaactctcaaaacaaaactaaccaaacaatcaaacttcraaaaacccc

SEQ ID NO: 28006 - DNA, 50 bp, synthetic construct
  source 1..50: mol_type = other DNA
crttacaactcccaaatcaaactctaaatccctataaaaaacraataacc

SEQ ID NO: 28007 - DNA, 50 bp, synthetic construct
  source 1..50: mol_type = other DNA
tatttcctcrttacaactcccaaatcaaactctaaatccctataaaaaac

SEQ ID NO: 28008 - DNA, 50 bp, synthetic construct
  source 1..50: mol_type = other DNA
ctctcacaaaaacccaaaacctaacctaaaaactacaacraaaaaatacc

SEQ ID NO: 28009 - DNA, 50 bp, synthetic construct
  source 1..50: mol_type = other DNA
aaacctaacctaaaaactacaacraaaaaataccraaaaaataccrtatc

SEQ ID NO: 28010 - DNA, 50 bp, synthetic construct
  source 1..50: mol_type = other DNA
tctaattctaaaacaaaatatttatcraccatacctactattaactactc

SEQ ID NO: 28011 - DNA, 50 bp, synthetic construct
  source 1..50: mol_type = other DNA
aactaccacrcccaactatttctttctaattctaaaacaaaatatttatc

SEQ ID NO: 28012 - DNA, 50 bp, synthetic construct
  source 1..50: mol_type = other DNA
actaaaacccaaaatttaaccacraccaataaaaaccatcaacaaaaaac

SEQ ID NO: 28013 - DNA, 50 bp, synthetic construct
  source 1..50: mol_type = other DNA
aacraaaaatttccttccraataaaattaccccaaaacracatacaaaac

SEQ ID NO: 28014 - DNA, 50 bp, synthetic construct
  source 1..50: mol_type = other DNA
crtaaaattaaccrttcacracataaaatactataacatccaacraaacc

SEQ ID NO: 28015 - DNA, 50 bp, synthetic construct
  source 1..50: mol_type = other DNA
acataacrtaaaattaaccrttcacracataaaatactataacatccaac

SEQ ID NO: 28016 - DNA, 50 bp, synthetic construct
  source 1..50: mol_type = other DNA
atcttccaattatttaattaaaataaaatccacataacrtaaaattaacc

SEQ ID NO: 28017 - DNA, 50 bp, synthetic construct
  source 1..50: mol_type = other DNA
caactactaaaaatcttccaattatttaattaaaataaaatccacataac

SEQ ID NO: 28018 - DNA, 50 bp, synthetic construct
  source 1..50: mol_type = other DNA
ctcacctcaatcaaacaattaaaaaattcccaacaactaaaataactcac

SEQ ID NO: 28019 - DNA, 50 bp, synthetic construct
  source 1..50: mol_type = other DNA
cctcaatcaaacaattaaaaaattcccaacaactaaaataactcacrttc

SEQ ID NO: 28020 - DNA, 50 bp, synthetic construct
  source 1..50: mol_type = other DNA
aaaaatcaaaaacttatcattccaaatcccrccaccaaataacaacaaac

SEQ ID NO: 28021 - DNA, 50 bp, synthetic construct
  source 1..50: mol_type = other DNA
tacaataatatcacracrtatataactataatcaacaaaccttattccrc

SEQ ID NO: 28022 - DNA, 50 bp, synthetic construct
  source 1..50: mol_type = other DNA
ctctacatattcttattacctatcrtctataactctaatattcracattc

SEQ ID NO: 28023 - DNA, 50 bp, synthetic construct
  source 1..50: mol_type = other DNA
aaacrtaaaaactaactaacraccractctacatattcttattacctatc

SEQ ID NO: 28024 - DNA, 50 bp, synthetic construct
  source 1..50: mol_type = other DNA
taaaacacaacaataactaaaaaataccccrtaaaaactaaaataaaaac

SEQ ID NO: 28025 - DNA, 50 bp, synthetic construct
  source 1..50: mol_type = other DNA
aaaaataactcctaaataactaaaacacaacaataactaaaaaatacccc

SEQ ID NO: 28026 - DNA, 50 bp, synthetic construct
  source 1..50: mol_type = other DNA
raaataaaacaaattcctttctacaaaaaccaaaaccccttaacccttcc

SEQ ID NO: 28027 - DNA, 50 bp, synthetic construct
  source 1..50: mol_type = other DNA
ccccrtctctactaaacatacaaaaatattaataaaatataataacttac

SEQ ID NO: 28028 - DNA, 50 bp, synthetic construct
  source 1..50: mol_type = other DNA
aaaaaataaccctctaaacaaaatatatcccacaaaatacctatttaaac

SEQ ID NO: 28029 - DNA, 50 bp, synthetic construct
  source 1..50: mol_type = other DNA
tcacaaaaaatatttataacccraataaccaatctttccccaaaaaaaac

SEQ ID NO: 28030 - DNA, 50 bp, synthetic construct
  source 1..50: mol_type = other DNA
tccataaaattacacactatcatacaaaaacacaactcrataaataactc

SEQ ID NO: 28031 - DNA, 50 bp, synthetic construct
  source 1..50: mol_type = other DNA
attacacactatcatacaaaaacacaactcrataaataactcraaaaacc

SEQ ID NO: 28032 - DNA, 50 bp, synthetic construct
  source 1..50: mol_type = other DNA
cctatacataactcaaaatcaaaaataaaattttaaaactaaaaaacccc

SEQ ID NO: 28033 - DNA, 50 bp, synthetic construct
  source 1..50: mol_type = other DNA
aaactaaaccccaacaaatttaaactttcaaatcaaaatcaacccaaccc

SEQ ID NO: 28034 - DNA, 50 bp, synthetic construct
  source 1..50: mol_type = other DNA
rtaaaaaaataactaaatcaactacataatcrcactacrctataaatacc

SEQ ID NO: 28035 - DNA, 50 bp, synthetic construct
  source 1..50: mol_type = other DNA
ccttaacctccaaacrcrcrtaaaaaaataactaaatcaactacataatc

SEQ ID NO: 28036 - DNA, 50 bp, synthetic construct
  source 1..50: mol_type = other DNA
caccrcatacctaaaaccrcrcaaattcataaaattcaaaacctaataac

SEQ ID NO: 28037 - DNA, 50 bp, synthetic construct
  source 1..50: mol_type = other DNA
crcaaattcataaaattcaaaacctaataacrcctctaaatctcactaac

SEQ ID NO: 28038 - DNA, 50 bp, synthetic construct
  source 1..50: mol_type = other DNA
taaaattcaaaacctaataacrcctctaaatctcactaacrtccraaaac

SEQ ID NO: 28039 - DNA, 50 bp, synthetic construct
  source 1..50: mol_type = other DNA
cctctctaccctaattatactccaaacaaaaccaaaaacaaacaaaaacc

SEQ ID NO: 28040 - DNA, 50 bp, synthetic construct
  source 1..50: mol_type = other DNA
ctctaccctaattatactccaaacaaaaccaaaaacaaacaaaaaccrac

SEQ ID NO: 28041 - DNA, 50 bp, synthetic construct
  source 1..50: mol_type = other DNA
tccataccttaaatttatttaaatataccaaacrtaaaataacaataacc

SEQ ID NO: 28042 - DNA, 50 bp, synthetic construct
  source 1..50: mol_type = other DNA
atcacrtctaaatacaatccataccttaaatttatttaaatataccaaac

SEQ ID NO: 28043 - DNA, 50 bp, synthetic construct
  source 1..50: mol_type = other DNA
ttcacrcttaacacacccaaacaaacccaaaatataaactacattcaaac

SEQ ID NO: 28044 - DNA, 50 bp, synthetic construct
  source 1..50: mol_type = other DNA
taaaaatctaaaccccatctttacctacttttcaaaacttaacaaaacac

SEQ ID NO: 28045 - DNA, 50 bp, synthetic construct
  source 1..50: mol_type = other DNA
aacraataaaaacccaataaaaacracrctaaaaataaaatcaaaccaac

SEQ ID NO: 28046 - DNA, 50 bp, synthetic construct
  source 1..50: mol_type = other DNA
aaaacccaataaaaacracrctaaaaataaaatcaaaccaacrccaaacc

SEQ ID NO: 28047 - DNA, 50 bp, synthetic construct
  source 1..50: mol_type = other DNA
taaaccactaaacccraactatatatttactttttaaaacaaaatctatc

SEQ ID NO: 28048 - DNA, 50 bp, synthetic construct
  source 1..50: mol_type = other DNA
aataaaaaattcccttaaaacctaaaattcrcaaaactacaataaatcrc

SEQ ID NO: 28049 - DNA, 50 bp, synthetic construct
  source 1..50: mol_type = other DNA
raaataaaaaattcccttaaaacctaaaattcrcaaaactacaataaatc

SEQ ID NO: 28050 - DNA, 50 bp, synthetic construct
  source 1..50: mol_type = other DNA
aatatatacctaaaatccraaataaaaaattcccttaaaacctaaaattc

SEQ ID NO: 28051 - DNA, 50 bp, synthetic construct
  source 1..50: mol_type = other DNA
caacctaaaccatataacraaaccccatctctaccaaaacaaacaataac

SEQ ID NO: 28052 - DNA, 50 bp, synthetic construct
  source 1..50: mol_type = other DNA
tattttatcatctttaaaattattaaccaaaacrtaacacaataactcac

SEQ ID NO: 28053 - DNA, 50 bp, synthetic construct
  source 1..50: mol_type = other DNA
aaattaataaacaaatctattttatcatctttaaaattattaaccaaaac

SEQ ID NO: 28054 - DNA, 50 bp, synthetic construct
  source 1..50: mol_type = other DNA
aaacatacctcaaataatcaaaaaacccaaaaaaacaaaacttaccttac

SEQ ID NO: 28055 - DNA, 50 bp, synthetic construct
  source 1..50: mol_type = other DNA
acrtatacctctaaaaaactaaaactactctatccttctacacaataacc

SEQ ID NO: 28056 - DNA, 50 bp, synthetic construct
  source 1..50: mol_type = other DNA
acraccactatacaaaaaaacaaaacaaccccaacctttcaaaaacatac

SEQ ID NO: 28057 - DNA, 50 bp, synthetic construct
  source 1..50: mol_type = other DNA
ataaaaaaaacctatctactaatacrattcaaaaataatactttcctaac

SEQ ID NO: 28058 - DNA, 50 bp, synthetic construct
  source 1..50: mol_type = other DNA
taatacrattcaaaaataatactttcctaacraaaaccttcatctccacc

SEQ ID NO: 28059 - DNA, 50 bp, synthetic construct
  source 1..50: mol_type = other DNA
ttaacttccraataaataaaaaccctaacctaaccccacatcaaaatccc

SEQ ID NO: 28060 - DNA, 50 bp, synthetic construct
  source 1..50: mol_type = other DNA
craacctattaataccataaaaatcaaaaaaaacttactactcraatacc

SEQ ID NO: 28061 - DNA, 50 bp, synthetic construct
  source 1..50: mol_type = other DNA
caaacctcraacctattaataccataaaaatcaaaaaaaacttactactc

SEQ ID NO: 28062 - DNA, 50 bp, synthetic construct
  source 1..50: mol_type = other DNA
aacccaaatattaaaaaatcraaacaaacaacttctaaaatccaaacctc

SEQ ID NO: 28063 - DNA, 50 bp, synthetic construct
  source 1..50: mol_type = other DNA
aactaactatacttatcraatacaaccaccaacccaaatattaaaaaatc

SEQ ID NO: 28064 - DNA, 50 bp, synthetic construct
  source 1..50: mol_type = other DNA
atccctcrataataccaacccctaacataaaacaactaactatacttatc

SEQ ID NO: 28065 - DNA, 50 bp, synthetic construct
  source 1..50: mol_type = other DNA
tacacccracaaacataattaattaccctataccaaaaactaacattacc

SEQ ID NO: 28066 - DNA, 50 bp, synthetic construct
  source 1..50: mol_type = other DNA
accaaaaactaacattaccraaaaaccatatcctataccttaaaaaaaac

SEQ ID NO: 28067 - DNA, 50 bp, synthetic construct
  source 1..50: mol_type = other DNA
aacccaataaaacctctataccraaacaacactactaaccccaaataaac

SEQ ID NO: 28068 - DNA, 50 bp, synthetic construct
  source 1..50: mol_type = other DNA
aaactctacaaaaaacatatacttctaaaacccaataaaacctctatacc

SEQ ID NO: 28069 - DNA, 50 bp, synthetic construct
  source 1..50: mol_type = other DNA
aaaacrttacaactcrttaattactacacccatttacaaataaaaaaacc

SEQ ID NO: 28070 - DNA, 50 bp, synthetic construct
  source 1..50: mol_type = other DNA
aacaatatcaataaaaaacctaataaaatcataaattcaaataaatcaac

SEQ ID NO: 28071 - DNA, 50 bp, synthetic construct
  source 1..50: mol_type = other DNA
caaataaatcaacrtaaaaaactctaaacaaaaataatacaaaaactacc

SEQ ID NO: 28072 - DNA, 50 bp, synthetic construct
  source 1..50: mol_type = other DNA
aaaaacaaaaaacaccaaaaaaaaactaaacaacctaaccaatacctatc

SEQ ID NO: 28073 - DNA, 50 bp, synthetic construct
  source 1..50: mol_type = other DNA
tcrataaataccaaaaaccctaaacttttccattcacttccaaaaatatc

SEQ ID NO: 28074 - DNA, 50 bp, synthetic construct
  source 1..50: mol_type = other DNA
ttcaaaatctttaacacccaccraaaaatacctttaacaaattaaataac

SEQ ID NO: 28075 - DNA, 50 bp, synthetic construct
  source 1..50: mol_type = other DNA
cttaatccttaaaatcccctcaaaaccccaacaaaccctaatctaaaacc

SEQ ID NO: 28076 - DNA, 50 bp, synthetic construct
  source 1..50: mol_type = other DNA
ttccatcccaaataaacaaaatataacrtcraaaactcctaaaatacccc

SEQ ID NO: 28077 - DNA, 50 bp, synthetic construct
  source 1..50: mol_type = other DNA
cctaacrtcccttaaaacrttttttccatcccaaataaacaaaatataac

SEQ ID NO: 28078 - DNA, 50 bp, synthetic construct
  source 1..50: mol_type = other DNA
aattctataaaaacaaacctaattaccataacaaaaccacacrcacttcc

SEQ ID NO: 28079 - DNA, 50 bp, synthetic construct
  source 1..50: mol_type = other DNA
atacrtataactttactataacaaccaaacctatttctataaaatttaac

SEQ ID NO: 28080 - DNA, 50 bp, synthetic construct
  source 1..50: mol_type = other DNA
acraacaatctataaataccctaaacaaactctataataccaaaaaccac

SEQ ID NO: 28081 - DNA, 50 bp, synthetic construct
  source 1..50: mol_type = other DNA
acaatctataaataccctaaacaaactctataataccaaaaaccacrctc

SEQ ID NO: 28082 - DNA, 50 bp, synthetic construct
  source 1..50: mol_type = other DNA
aaaacctacaactaccctaaaaaaaacctaaaacractccaaaaacctcc

SEQ ID NO: 28083 - DNA, 50 bp, synthetic construct
  source 1..50: mol_type = other DNA
aaataaatatacctataaaacctacaactaccctaaaaaaaacctaaaac

SEQ ID NO: 28084 - DNA, 50 bp, synthetic construct
  source 1..50: mol_type = other DNA
raaaaatccaaatcaacatatcctaaaaacaaaactactaacrcctaaac

SEQ ID NO: 28085 - DNA, 50 bp, synthetic construct
  source 1..50: mol_type = other DNA
caaaaatactttttctatcctttccaataaattttaccaaaaattctaac

SEQ ID NO: 28086 - DNA, 50 bp, synthetic construct
  source 1..50: mol_type = other DNA
aatactttttctatcctttccaataaattttaccaaaaattctaacraac

SEQ ID NO: 28087 - DNA, 50 bp, synthetic construct
  source 1..50: mol_type = other DNA
ttttaaaataaaattacrtttattaacactcccatataacacaaaacctc

SEQ ID NO: 28088 - DNA, 50 bp, synthetic construct
  source 1..50: mol_type = other DNA
tcaaaatcctaaaaaccccaaacctccacracaacaataaaaaaattctc

SEQ ID NO: 28089 - DNA, 50 bp, synthetic construct
  source 1..50: mol_type = other DNA
atataataaacaaaattaaaaaacracaaaaccccataaccaaacctaac

SEQ ID NO: 28090 - DNA, 50 bp, synthetic construct
  source 1..50: mol_type = other DNA
cttcatttaaaatatttaccttttaaatccaattttaaaaccatataaac

SEQ ID NO: 28091 - DNA, 50 bp, synthetic construct
  source 1..50: mol_type = other DNA
aatccaattttaaaaccatataaacrttcttccatcacccactacacatc

SEQ ID NO: 28092 - DNA, 50 bp, synthetic construct
  source 1..50: mol_type = other DNA
ttcttccatcacccactacacatcrcatacaaaacataaatttttaaacc

SEQ ID NO: 28093 - DNA, 50 bp, synthetic construct
  source 1..50: mol_type = other DNA
actaatttttatattttcaataaaaaccraacctcaccatattaaccaac

SEQ ID NO: 28094 - DNA, 50 bp, synthetic construct
  source 1..50: mol_type = other DNA
ttatattttcaataaaaaccraacctcaccatattaaccaacrtaatctc

SEQ ID NO: 28095 - DNA, 50 bp, synthetic construct
  source 1..50: mol_type = other DNA
crcrtcctattacraatcaaaaccacctaaattaattaaaacaactaaac

SEQ ID NO: 28096 - DNA, 50 bp, synthetic construct
  source 1..50: mol_type = other DNA
aaaccacctaaattaattaaaacaactaaacraaacrtccaaaactactc

SEQ ID NO: 28097 - DNA, 50 bp, synthetic construct
  source 1..50: mol_type = other DNA
tactcrccaacrataaatctaaatataaacttatacttaaacaacccaac

SEQ ID NO: 28098 - DNA, 50 bp, synthetic construct
  source 1..50: mol_type = other DNA
taaaatttccacttttcrataccrtacttcctattaatatttctaaaccc

SEQ ID NO: 28099 - DNA, 50 bp, synthetic construct
  source 1..50: mol_type = other DNA
ctaattatcaaacccaaaatcacraacttaaaaacattaacaaaaaatac

SEQ ID NO: 28100 - DNA, 50 bp, synthetic construct
  source 1..50: mol_type = other DNA
atcaaacccaaaatcacraacttaaaaacattaacaaaaaatacratacc

SEQ ID NO: 28101 - DNA, 50 bp, synthetic construct
  source 1..50: mol_type = other DNA
aaatacttattattttcctcctaccttattcctatatataccrcttcacc

SEQ ID NO: 28102 - DNA, 50 bp, synthetic construct
  source 1..50: mol_type = other DNA
taataacrcttatattaaatctataccactacatacctaaacaacataac

SEQ ID NO: 28103 - DNA, 50 bp, synthetic construct
  source 1..50: mol_type = other DNA
atacaaaatttcctcatctataaactaaaaattaccaaaattctcaattc

SEQ ID NO: 28104 - DNA, 50 bp, synthetic construct
  source 1..50: mol_type = other DNA
taactactaaaacttaacaaatattaaataaccrtacctatacatatccc

SEQ ID NO: 28105 - DNA, 50 bp, synthetic construct
  source 1..50: mol_type = other DNA
aaacctttcctcactcataactactaaaacttaacaaatattaaataacc

SEQ ID NO: 28106 - DNA, 50 bp, synthetic construct
  source 1..50: mol_type = other DNA
actacccttacccacttaaaaactcactttcctcttcaaaccaataaaac

SEQ ID NO: 28107 - DNA, 50 bp, synthetic construct
  source 1..50: mol_type = other DNA
aataaataaaaaactacrtatacttttataaacatatctaaaaacaaacc

SEQ ID NO: 28108 - DNA, 50 bp, synthetic construct
  source 1..50: mol_type = other DNA
cctaactaaaccctaacacacaaacacctcraaaaatactaaaaacaccc

SEQ ID NO: 28109 - DNA, 50 bp, synthetic construct
  source 1..50: mol_type = other DNA
aacatatctaaaaacaaaccrtaaaaatacraataccctcaatatttccc

SEQ ID NO: 28110 - DNA, 50 bp, synthetic construct
  source 1..50: mol_type = other DNA
tcctaaacctaaaccaaaccacatcataaaaacccctattatcacaaacc

SEQ ID NO: 28111 - DNA, 50 bp, synthetic construct
  source 1..50: mol_type = other DNA
caataaaaatttccataatataacctaactcaaattcaaaacaataaccc

SEQ ID NO: 28112 - DNA, 50 bp, synthetic construct
  source 1..50: mol_type = other DNA
aaactattaaatactttaaataaaacraatcraaactcaaacrtactctc

SEQ ID NO: 28113 - DNA, 50 bp, synthetic construct
  source 1..50: mol_type = other DNA
tttctcataaaaatcttcaaaatccaatatacattttacaacraaaacac

SEQ ID NO: 28114 - DNA, 50 bp, synthetic construct
  source 1..50: mol_type = other DNA
aatcttcaaaatccaatatacattttacaacraaaacacrtctaaactcc

SEQ ID NO: 28115 - DNA, 50 bp, synthetic construct
  source 1..50: mol_type = other DNA
accttaccraacctttaaaatcataaatttactacaaatcaaactacccc

SEQ ID NO: 28116 - DNA, 50 bp, synthetic construct
  source 1..50: mol_type = other DNA
ataaaaccraaacaacttaatttacaacaaatttataattttaaaaaccc

SEQ ID NO: 28117 - DNA, 50 bp, synthetic construct
  source 1..50: mol_type = other DNA
ttaatttacaacaaatttataattttaaaaacccracaaaatcaaacacc

SEQ ID NO: 28118 - DNA, 50 bp, synthetic construct
  source 1..50: mol_type = other DNA
raaaacaacaaaaaaccccaaaacccraactaaatttcctacttaaaatc

SEQ ID NO: 28119 - DNA, 50 bp, synthetic construct
  source 1..50: mol_type = other DNA
craactaaatttcctacttaaaatcrcaaaatataacaatattaaaattc

SEQ ID NO: 28120 - DNA, 50 bp, synthetic construct
  source 1..50: mol_type = other DNA
aacaatattaaaattcrccrtacccctactccctataaaaattaaaatcc

SEQ ID NO: 28121 - DNA, 50 bp, synthetic construct
  source 1..50: mol_type = other DNA
aacaataacaaaataaatacaatctaaccacaatactaatcaacttctac

SEQ ID NO: 28122 - DNA, 50 bp, synthetic construct
  source 1..50: mol_type = other DNA
aaccaaaactataaaaaaaacaaatacatcaacctaacaacaacactacc

SEQ ID NO: 28123 - DNA, 50 bp, synthetic construct
  source 1..50: mol_type = other DNA
atcaacctaacaacaacactaccrttttctcccttataatcaacaaaaac

SEQ ID NO: 28124 - DNA, 50 bp, synthetic construct
  source 1..50: mol_type = other DNA
raactaaaacaaaaattctcaaactctaccccctcaaaaccctaaaatac

SEQ ID NO: 28125 - DNA, 50 bp, synthetic construct
  source 1..50: mol_type = other DNA
ttaactcaaaaaaaacacatacatctaatttctttcttcttttttaaaac

SEQ ID NO: 28126 - DNA, 50 bp, synthetic construct
  source 1..50: mol_type = other DNA
aaaaaaacacatacatctaatttctttcttcttttttaaaacraaatctc

SEQ ID NO: 28127 - DNA, 50 bp, synthetic construct
  source 1..50: mol_type = other DNA
caaataactaactaaaataaaaacacctcraatattcrtaaaaatatccc

SEQ ID NO: 28128 - DNA, 50 bp, synthetic construct
  source 1..50: mol_type = other DNA
atttctaacttaaaaaacaataaaactactaatacctttataaaaaaacc

SEQ ID NO: 28129 - DNA, 50 bp, synthetic construct
  source 1..50: mol_type = other DNA
cttcctcataaaaatatcaacaactccactatttcctaaaccaaaaaccc

SEQ ID NO: 28130 - DNA, 50 bp, synthetic construct
  source 1..50: mol_type = other DNA
aaaatatcaacaactccactatttcctaaaccaaaaacccrtaaatcaac

SEQ ID NO: 28131 - DNA, 50 bp, synthetic construct
  source 1..50: mol_type = other DNA
atattaaacacactactacacaataaacrtaccataaatactctccaacc

SEQ ID NO: 28132 - DNA, 50 bp, synthetic construct
  source 1..50: mol_type = other DNA
aacctaaaaccacaatactaacaaaatctaacaaaaacaaacaaaaccac

SEQ ID NO: 28133 - DNA, 50 bp, synthetic construct
  source 1..50: mol_type = other DNA
ctaaaaccacaatactaacaaaatctaacaaaaacaaacaaaaccacrcc

SEQ ID NO: 28134 - DNA, 50 bp, synthetic construct
  source 1..50: mol_type = other DNA
aaattaaattctacctaattcataaatttacctaaaactaaaacttcaac

SEQ ID NO: 28135 - DNA, 50 bp, synthetic construct
  source 1..50: mol_type = other DNA
attaaaacraaactcrtatatctacaatatactcacacaaacttaatacc

SEQ ID NO: 28136 - DNA, 50 bp, synthetic construct
  source 1..50: mol_type = other DNA
caaacrtttaacctctaatactctcctaactctaaattaaaacraaactc

SEQ ID NO: 28137 - DNA, 50 bp, synthetic construct
  source 1..50: mol_type = other DNA
catctaccracaccaaatctatataaacacactataaatacacraactcc

SEQ ID NO: 28138 - DNA, 50 bp, synthetic construct
  source 1..50: mol_type = other DNA
cacaaatataacacacacaaaacatcacaataaccccttaccccaatatc

SEQ ID NO: 28139 - DNA, 50 bp, synthetic construct
  source 1..50: mol_type = other DNA
actataatatcctatatataccacatttatacacaaatatctatacatcc

SEQ ID NO: 28140 - DNA, 50 bp, synthetic construct
  source 1..50: mol_type = other DNA
tttactaacctcaaataactctaactaaatctactaaaaataacaatacc

SEQ ID NO: 28141 - DNA, 50 bp, synthetic construct
  source 1..50: mol_type = other DNA
ttcacaatacccrcacctaactataaatactatcctcatactacttaccc

SEQ ID NO: 28142 - DNA, 50 bp, synthetic construct
  source 1..50: mol_type = other DNA
ccaaaaactcacttcctctttctattaaattaaaaaataacraactaaac

SEQ ID NO: 28143 - DNA, 50 bp, synthetic construct
  source 1..50: mol_type = other DNA
aaaactccttcaactactaacctaaataaacaaaaaacaaacaaaactcc

SEQ ID NO: 28144 - DNA, 50 bp, synthetic construct
  source 1..50: mol_type = other DNA
aaaaccracaaaaaattacaaactaataactaacttcaattattaccaac

SEQ ID NO: 28145 - DNA, 50 bp, synthetic construct
  source 1..50: mol_type = other DNA
caccatacaaatataaaaactaaaaccaaaaaaacaaaacaacctcccac

SEQ ID NO: 28146 - DNA, 50 bp, synthetic construct
  source 1..50: mol_type = other DNA
aactatcccaaacttaaaacattctaatccccctacaatccccaaaaaac

SEQ ID NO: 28147 - DNA, 50 bp, synthetic construct
  source 1..50: mol_type = other DNA
taaaacaaaatcttactctataacccaaactacaaaacaataacrcratc

SEQ ID NO: 28148 - DNA, 50 bp, synthetic construct
  source 1..50: mol_type = other DNA
aaaaaaatcacaactcactcaaaaactcctcaaaacacaaaacracccac

SEQ ID NO: 28149 - DNA, 50 bp, synthetic construct
  source 1..50: mol_type = other DNA
cccacactactaccacaaaaactatcataaaacccraaaataaaaaattc

SEQ ID NO: 28150 - DNA, 50 bp, synthetic construct
  source 1..50: mol_type = other DNA
aacaacccttataacaacaatataaaaacrttaccaaacaaccctaaaac

SEQ ID NO: 28151 - DNA, 50 bp, synthetic construct
  source 1..50: mol_type = other DNA
aaataccacaaacacctaaacttaccaaaataaaaaacactcccttcccc

SEQ ID NO: 28152 - DNA, 50 bp, synthetic construct
  source 1..50: mol_type = other DNA
ataaaaccttaaacttcccacaaaacaaaatataaacaacttaaaatccc

SEQ ID NO: 28153 - DNA, 50 bp, synthetic construct
  source 1..50: mol_type = other DNA
aaacaaactcaaaactctataaactctatacaaactaaaccctcratacc

SEQ ID NO: 28154 - DNA, 50 bp, synthetic construct
  source 1..50: mol_type = other DNA
tatcctaaataaaaattaactcraatctaaataaaccatatatacrtctc

SEQ ID NO: 28155 - DNA, 50 bp, synthetic construct
  source 1..50: mol_type = other DNA
raaactatcctaaataaaaattaactcraatctaaataaaccatatatac

SEQ ID NO: 28156 - DNA, 50 bp, synthetic construct
  source 1..50: mol_type = other DNA
aacttccraaaaacrtaaatctcraaactatcctaaataaaaattaactc

SEQ ID NO: 28157 - DNA, 50 bp, synthetic construct
  source 1..50: mol_type = other DNA
taaaataaactaaacaaatctaactaactatcctcttaccacaccrtaac

SEQ ID NO: 28158 - DNA, 50 bp, synthetic construct
  source 1..50: mol_type = other DNA
raccctaaaataaactaaacaaatctaactaactatcctcttaccacacc

SEQ ID NO: 28159 - DNA, 50 bp, synthetic construct
  source 1..50: mol_type = other DNA
aaacactatcaaaataaaaatcatatattttacaactaccacccccacrc

SEQ ID NO: 28160 - DNA, 50 bp, synthetic construct
  source 1..50: mol_type = other DNA
aaaaacactatcaaaataaaaatcatatattttacaactaccacccccac

SEQ ID NO: 28161 - DNA, 50 bp, synthetic construct
  source 1..50: mol_type = other DNA
taaaacatataatttttatcttaacaatatccctttaaaaaatcaaaacc

SEQ ID NO: 28162 - DNA, 50 bp, synthetic construct
  source 1..50: mol_type = other DNA
tataatttttatcttaacaatatccctttaaaaaatcaaaaccrcacccc

SEQ ID NO: 28163 - DNA, 50 bp, synthetic construct
  source 1..50: mol_type = other DNA
tatataaatcaaacactaacctaaaacraaaacratctcccctacttatc

SEQ ID NO: 28164 - DNA, 50 bp, synthetic construct
  source 1..50: mol_type = other DNA
craaaatactaaaccaaaaacttctcccattcctcacaaaaaccaaaacc

SEQ ID NO: 28165 - DNA, 50 bp, synthetic construct
  source 1..50: mol_type = other DNA
taatatttttttctaaaaaatctcctactttcactacratcccrcttaac

SEQ ID NO: 28166 - DNA, 50 bp, synthetic construct
  source 1..50: mol_type = other DNA
ctactcacaaaacaataacraaaacaaaataaactaataccaaaaaaaac

SEQ ID NO: 28167 - DNA, 50 bp, synthetic construct
  source 1..50: mol_type = other DNA
acctcaatatcttcaataaaataaattaaccctactcacaaaacaataac

SEQ ID NO: 28168 - DNA, 50 bp, synthetic construct
  source 1..50: mol_type = other DNA
ttccctaaaacattacacaattaaatactccrtaccaaccrtaaaaaacc

SEQ ID NO: 28169 - DNA, 50 bp, synthetic construct
  source 1..50: mol_type = other DNA
ccctacactattccctaaaacattacacaattaaatactccrtaccaacc

SEQ ID NO: 28170 - DNA, 50 bp, synthetic construct
  source 1..50: mol_type = other DNA
ccrtccaatccctacactattccctaaaacattacacaattaaatactcc

SEQ ID NO: 28171 - DNA, 50 bp, synthetic construct
  source 1..50: mol_type = other DNA
acraaacatccaattatacaataccccaaaaaacaatacaaaaactaaac

SEQ ID NO: 28172 - DNA, 50 bp, synthetic construct
  source 1..50: mol_type = other DNA
caatacaaaaactaaacraacctctaattaaatctaaataccaactaaac

SEQ ID NO: 28173 - DNA, 50 bp, synthetic construct
  source 1..50: mol_type = other DNA
cccataaactaactacctaatctaactacaaaaacacaaatttcaaaatc

SEQ ID NO: 28174 - DNA, 50 bp, synthetic construct
  source 1..50: mol_type = other DNA
accaaacaaccaactcataaaaaaccaccaacttcraaaaaattcctcac

SEQ ID NO: 28175 - DNA, 50 bp, synthetic construct
  source 1..50: mol_type = other DNA
caaacacctctccaactactaaaacaacaataataacaaacaaaaaaaac

SEQ ID NO: 28176 - DNA, 50 bp, synthetic construct
  source 1..50: mol_type = other DNA
tatttaccatcactattaccctaacaactaaaaaaatatttaaaatattc

SEQ ID NO: 28177 - DNA, 50 bp, synthetic construct
  source 1..50: mol_type = other DNA
acaccccaaattaaaatacatacaaccacaaataaaaaaataactatctc

SEQ ID NO: 28178 - DNA, 50 bp, synthetic construct
  source 1..50: mol_type = other DNA
aaaatcaaactataaaccaaatcatcaaaacraatcatctacttccccac

SEQ ID NO: 28179 - DNA, 50 bp, synthetic construct
  source 1..50: mol_type = other DNA
aaattataaacataaaccaaaaattacctttccttaaaaataactcatac

SEQ ID NO: 28180 - DNA, 50 bp, synthetic construct
  source 1..50: mol_type = other DNA
tatcaaactatatctaaactaacaaaatatttcattcctcatccctcaac

SEQ ID NO: 28181 - DNA, 50 bp, synthetic construct
  source 1..50: mol_type = other DNA
ttttcatttattcttcatatccaacttttccccacaatatacaaaacaac

SEQ ID NO: 28182 - DNA, 50 bp, synthetic construct
  source 1..50: mol_type = other DNA
ttcccacttcttcctaaaataaaattaaactaccctctcaaaataccaac

SEQ ID NO: 28183 - DNA, 50 bp, synthetic construct
  source 1..50: mol_type = other DNA
acatcataaaaatcaacctaaccacaataaaataaaccaaaaaataaacc

SEQ ID NO: 28184 - DNA, 50 bp, synthetic construct
  source 1..50: mol_type = other DNA
atattattaactatactttttctaaaaatacaataactcaaacaaaaaac

SEQ ID NO: 28185 - DNA, 50 bp, synthetic construct
  source 1..50: mol_type = other DNA
ctctatctcacccccttaatattaaaaacttaataaacatacraattaac

SEQ ID NO: 28186 - DNA, 50 bp, synthetic construct
  source 1..50: mol_type = other DNA
tatcctataaatcactaaaataaactaactactttcaccccaccraatcc

SEQ ID NO: 28187 - DNA, 50 bp, synthetic construct
  source 1..50: mol_type = other DNA
taactatatcctataaatcactaaaataaactaactactttcaccccacc

SEQ ID NO: 28188 - DNA, 50 bp, synthetic construct
  source 1..50: mol_type = other DNA
ataaaaacaaccaactcatcccaataactcacaaaacacaaccatccaac

SEQ ID NO: 28189 - DNA, 50 bp, synthetic construct
  source 1..50: mol_type = other DNA
rtattacrtcaaaacraaacaaccraatcttactcaaacttattttaacc

SEQ ID NO: 28190 - DNA, 50 bp, synthetic construct
  source 1..50: mol_type = other DNA
cttactcaaacttattttaaccraaaataaaaaattactactatatcacc

SEQ ID NO: 28191 - DNA, 50 bp, synthetic construct
  source 1..50: mol_type = other DNA
aaccacaaaataaaaactacctaaatccctaaatcaccacatatcatcac

SEQ ID NO: 28192 - DNA, 50 bp, synthetic construct
  source 1..50: mol_type = other DNA
cttattctaatttacctaaaaccatcctctaatttaaaactaaaaatccc

SEQ ID NO: 28193 - DNA, 50 bp, synthetic construct
  source 1..50: mol_type = other DNA
atctcaaaatcatcctaaaaacataacaaatttaaacttaaccctaaccc

SEQ ID NO: 28194 - DNA, 50 bp, synthetic construct
  source 1..50: mol_type = other DNA
taacaaaatacaaaaatcccttctaaaatactttccaatcaaaaattaac

SEQ ID NO: 28195 - DNA, 50 bp, synthetic construct
  source 1..50: mol_type = other DNA
aaatcaaaaatcaaaaaccacaccataatcatttattatttctcaataac

SEQ ID NO: 28196 - DNA, 50 bp, synthetic construct
  source 1..50: mol_type = other DNA
ctaaaatccttataccctaaaattctccaatcttaacccaaaactatccc

SEQ ID NO: 28197 - DNA, 50 bp, synthetic construct
  source 1..50: mol_type = other DNA
aaactctcaccctttcaaacacctaaaaaaacataaatacctctaaaacc

SEQ ID NO: 28198 - DNA, 50 bp, synthetic construct
  source 1..50: mol_type = other DNA
aaccctacatatacttaacaaatactctaaatacctactatatacaacac

SEQ ID NO: 28199 - DNA, 50 bp, synthetic construct
  source 1..50: mol_type = other DNA
aataaatccaactacatcaaaataaatacttatatcctcttcccatactc

SEQ ID NO: 28200 - DNA, 50 bp, synthetic construct
  source 1..50: mol_type = other DNA
ttaaattttattaacatcctattcactctctctcaactctaattcccaac

SEQ ID NO: 28201 - DNA, 50 bp, synthetic construct
  source 1..50: mol_type = other DNA
aactaactataattcaattctaaacatactatacttcttacccracctac

SEQ ID NO: 28202 - DNA, 50 bp, synthetic construct
  source 1..50: mol_type = other DNA
tcacaataactaactataattcaattctaaacatactatacttcttaccc

SEQ ID NO: 28203 - DNA, 50 bp, synthetic construct
  source 1..50: mol_type = other DNA
cctaccctaaattctaaacrccaaaaaataaacaccaccatttctttatc

SEQ ID NO: 28204 - DNA, 50 bp, synthetic construct
  source 1..50: mol_type = other DNA
atataactcaatacaaacatctactaaataaaaaaccttttcaaaacaac

SEQ ID NO: 28205 - DNA, 50 bp, synthetic construct
  source 1..50: mol_type = other DNA
taaaaaaatttctcattcaacaaatacctatactaaaccatacaaacccc

SEQ ID NO: 28206 - DNA, 50 bp, synthetic construct
  source 1..50: mol_type = other DNA
taacaaattctaacaaaatcaaacttctctcccaattccctcttcctatc

SEQ ID NO: 28207 - DNA, 50 bp, synthetic construct
  source 1..50: mol_type = other DNA
aaacrcraaactaaatcaaatacaaaaataaaaactctacccraaaaacc

SEQ ID NO: 28208 - DNA, 50 bp, synthetic construct
  source 1..50: mol_type = other DNA
tccccrtttcctcctcaaaactttaaaacatataaaataataataaaaac

SEQ ID NO: 28209 - DNA, 50 bp, synthetic construct
  source 1..50: mol_type = other DNA
aaaaaaatccccaacracttctcaatcccrcaaaaactaataaataaaac

SEQ ID NO: 28210 - DNA, 50 bp, synthetic construct
  source 1..50: mol_type = other DNA
ataatacrcrtcaaaaaacraaactacaataacttcatttacatacaacc

SEQ ID NO: 28211 - DNA, 50 bp, synthetic construct
  source 1..50: mol_type = other DNA
caaaaaacraaactacaataacttcatttacatacaaccrtcataacrcc

SEQ ID NO: 28212 - DNA, 50 bp, synthetic construct
  source 1..50: mol_type = other DNA
ctaaatcataaactataaataacrctatcracaaacttaaactacctctc

SEQ ID NO: 28213 - DNA, 50 bp, synthetic construct
  source 1..50: mol_type = other DNA
caaaacctaacaatatcctcctatttaccraaaaataacttaaatctatc

SEQ ID NO: 28214 - DNA, 50 bp, synthetic construct
  source 1..50: mol_type = other DNA
accaaattctattatacaataaatattactccttttcccccaaaaataac

SEQ ID NO: 28215 - DNA, 50 bp, synthetic construct
  source 1..50: mol_type = other DNA
ccaaactttttccraaacctaaaaataataacttctaaaaaactaaccac

SEQ ID NO: 28216 - DNA, 50 bp, synthetic construct
  source 1..50: mol_type = other DNA
cctaaaaataataacttctaaaaaactaaccacrtacrtcaacttttacc

SEQ ID NO: 28217 - DNA, 50 bp, synthetic construct
  source 1..50: mol_type = other DNA
aaaaaatactataccaaaacctaccaaaaaataacaataaaacactaacc

SEQ ID NO: 28218 - DNA, 50 bp, synthetic construct
  source 1..50: mol_type = other DNA
ttttaaataacttccatccaaaccctaatataatcccaaaaataataaac

SEQ ID NO: 28219 - DNA, 50 bp, synthetic construct
  source 1..50: mol_type = other DNA
taaaccaaaaccccaatcatccaactcaacattaccaactcttcttactc

SEQ ID NO: 28220 - DNA, 50 bp, synthetic construct
  source 1..50: mol_type = other DNA
tcaaaaaatataaacraaacacaaataaaactaaaccaccacccttaaac

SEQ ID NO: 28221 - DNA, 50 bp, synthetic construct
  source 1..50: mol_type = other DNA
ccaactttcctatcccctaatctctaaacctaaccacaaaaaccaaactc

SEQ ID NO: 28222 - DNA, 50 bp, synthetic construct
  source 1..50: mol_type = other DNA
aataaatcaacctctcaataactccrtttccctaataataaaataaattc

SEQ ID NO: 28223 - DNA, 50 bp, synthetic construct
  source 1..50: mol_type = other DNA
aaacaaataactacttactcttctctcaatcctactaaatctaaatttcc

SEQ ID NO: 28224 - DNA, 50 bp, synthetic construct
  source 1..50: mol_type = other DNA
aacccttaaaatcaactactctcaaactacaatatacaaaaaaaccaccc

SEQ ID NO: 28225 - DNA, 50 bp, synthetic construct
  source 1..50: mol_type = other DNA
aattctcttacacactacaatttaaaaataattaacttcaaaaatttaac

SEQ ID NO: 28226 - DNA, 50 bp, synthetic construct
  source 1..50: mol_type = other DNA
ataacaaacaatactttaaaaaattaaaccaaaaacacaccaacccaaac

SEQ ID NO: 28227 - DNA, 50 bp, synthetic construct
  source 1..50: mol_type = other DNA
ccaaatcaaaatctcaataataaaacraataatctccactaacaaattcc

SEQ ID NO: 28228 - DNA, 50 bp, synthetic construct
  source 1..50: mol_type = other DNA
aaacaccacaatcacaaaacaaaaccraaacctactaataaaaaccatcc

SEQ ID NO: 28229 - DNA, 50 bp, synthetic construct
  source 1..50: mol_type = other DNA
taataaattacraaacccctcactaattctaaatatatcacttttccacc

SEQ ID NO: 28230 - DNA, 50 bp, synthetic construct
  source 1..50: mol_type = other DNA
aactaataaacrataaaaaaataacacacccaaaatcaataaaaaatccc

SEQ ID NO: 28231 - DNA, 50 bp, synthetic construct
  source 1..50: mol_type = other DNA
taacaatctaacrtaaaaaattaaaaaccaaaccaaaatttctcaacctc

SEQ ID NO: 28232 - DNA, 50 bp, synthetic construct
  source 1..50: mol_type = other DNA
ctaatataaacatttaaccacttatcccccacttctaacraacaaaaccc

SEQ ID NO: 28233 - DNA, 50 bp, synthetic construct
  source 1..50: mol_type = other DNA
ctactaactttattattccaaaataacttcaccaaacccraaccctaccc

SEQ ID NO: 28234 - DNA, 50 bp, synthetic construct
  source 1..50: mol_type = other DNA
caaaaatcracccacatttatcaacttacratcaccraaaaacataaaac

SEQ ID NO: 28235 - DNA, 50 bp, synthetic construct
  source 1..50: mol_type = other DNA
ccctcaaaacttttaaaaaccrcaatcatttcacatccaataaaacaaac

SEQ ID NO: 28236 - DNA, 50 bp, synthetic construct
  source 1..50: mol_type = other DNA
aaaaacctataccactaaactaaatcttcccctcaaaacttttaaaaacc

SEQ ID NO: 28237 - DNA, 50 bp, synthetic construct
  source 1..50: mol_type = other DNA
ctcttaacaaatacacaaacaacaactcraaaccttcactatccaaacac

SEQ ID NO: 28238 - DNA, 50 bp, synthetic construct
  source 1..50: mol_type = other DNA
atactacaaccactatactctcctcttaacaaatacacaaacaacaactc

SEQ ID NO: 28239 - DNA, 50 bp, synthetic construct
  source 1..50: mol_type = other DNA
aaataaaaccracaccataaccatatcctatctaccaaaccctatacctc

SEQ ID NO: 28240 - DNA, 50 bp, synthetic construct
  source 1..50: mol_type = other DNA
tattcaaaacraaacacaaaatctaacaaataaaacataaccataatatc

SEQ ID NO: 28241 - DNA, 50 bp, synthetic construct
  source 1..50: mol_type = other DNA
taaaaaccacataattcaaaaaaacactctaaaaaccrtaaattttaatc

SEQ ID NO: 28242 - DNA, 50 bp, synthetic construct
  source 1..50: mol_type = other DNA
tatatacaatttttaaaaaccacataattcaaaaaaacactctaaaaacc

SEQ ID NO: 28243 - DNA, 50 bp, synthetic construct
  source 1..50: mol_type = other DNA
taatcacracaatcaaataaattaacatatccatcacctcacttttatac

SEQ ID NO: 28244 - DNA, 50 bp, synthetic construct
  source 1..50: mol_type = other DNA
taaatttaactatcttaaattctccctataattaaaatcatacaatatac

SEQ ID NO: 28245 - DNA, 50 bp, synthetic construct
  source 1..50: mol_type = other DNA
ataaaaccaaaaacatctacctaaatttcccacaacaaaacacccttttc

SEQ ID NO: 28246 - DNA, 50 bp, synthetic construct
  source 1..50: mol_type = other DNA
acaaaaatcttctatcctcctcaccccttacaaatccaaattctataaac

SEQ ID NO: 28247 - DNA, 50 bp, synthetic construct
  source 1..50: mol_type = other DNA
ttaaattctacaaaaacttaactttacatttttctaacatttaacttttc

SEQ ID NO: 28248 - DNA, 50 bp, synthetic construct
  source 1..50: mol_type = other DNA
ttacttttctttttcccaccttcccaatatatcctaaatctcattatccc

SEQ ID NO: 28249 - DNA, 50 bp, synthetic construct
  source 1..50: mol_type = other DNA
taatttaaaaataacaacttattatactataatctatttaacctaaccac

SEQ ID NO: 28250 - DNA, 50 bp, synthetic construct
  source 1..50: mol_type = other DNA
aatatccttttctaataaacccraaaacctatacrtaatctcaatctctc

SEQ ID NO: 28251 - DNA, 50 bp, synthetic construct
  source 1..50: mol_type = other DNA
ccccctcactatataactaactttctataatatccttttctaataaaccc

SEQ ID NO: 28252 - DNA, 50 bp, synthetic construct
  source 1..50: mol_type = other DNA
tcaaatatacaactataaatctctcaactataccctaaaactaaaacaac

SEQ ID NO: 28253 - DNA, 50 bp, synthetic construct
  source 1..50: mol_type = other DNA
tctaaataatccacaatttatttatccacctaaaatctaacataaatatc

SEQ ID NO: 28254 - DNA, 50 bp, synthetic construct
  source 1..50: mol_type = other DNA
tatctaataaaaacaaacaatacrcacacttcctatatctaacctctttc

SEQ ID NO: 28255 - DNA, 50 bp, synthetic construct
  source 1..50: mol_type = other DNA
aattccaattcaaaaaacttataaccaaacaacctttatatcaatacaac

SEQ ID NO: 28256 - DNA, 50 bp, synthetic construct
  source 1..50: mol_type = other DNA
aaaaactacctaaccacaaatttcctaaactaaaattacccttccaaaac

SEQ ID NO: 28257 - DNA, 50 bp, synthetic construct
  source 1..50: mol_type = other DNA
attaaatttaaaaacctttctaaaaacccaactaaacccacccaaaaatc

SEQ ID NO: 28258 - DNA, 50 bp, synthetic construct
  source 1..50: mol_type = other DNA
taaaaaaatcaactaacacaaaaacaactacccctttaaaatcaaaaccc

SEQ ID NO: 28259 - DNA, 50 bp, synthetic construct
  source 1..50: mol_type = other DNA
caaaaccaactataacttaaaccaaaatcacaatcttacaaacctaccac

SEQ ID NO: 28260 - DNA, 50 bp, synthetic construct
  source 1..50: mol_type = other DNA
aatcctaaccctattaactattatctattttttacttttccttcaataac

SEQ ID NO: 28261 - DNA, 50 bp, synthetic construct
  source 1..50: mol_type = other DNA
tcttctataaattttctcaataaataaccaaaccatactacactacatcc

SEQ ID NO: 28262 - DNA, 50 bp, synthetic construct
  source 1..50: mol_type = other DNA
craacaacacaaaatacacaaaaccaaaaaccttctatataaacaaaaac

SEQ ID NO: 28263 - DNA, 50 bp, synthetic construct
  source 1..50: mol_type = other DNA
crcctttattcacacaaaaaacttttaactttatatattttatactactc

SEQ ID NO: 28264 - DNA, 50 bp, synthetic construct
  source 1..50: mol_type = other DNA
atatacttaatcattcaccaatatccccactacatttaaaatcccttaac

SEQ ID NO: 28265 - DNA, 50 bp, synthetic construct
  source 1..50: mol_type = other DNA
cttttactcctacaactttaaataaaaccccacactacaaaacccacaac

SEQ ID NO: 28266 - DNA, 50 bp, synthetic construct
  source 1..50: mol_type = other DNA
ataaatctattattaaaaaactttatcrcrattctaattcccaaattacc

SEQ ID NO: 28267 - DNA, 50 bp, synthetic construct
  source 1..50: mol_type = other DNA
atctcattaaactattaaataatccaacatttacccaaaattctatttcc

SEQ ID NO: 28268 - DNA, 50 bp, synthetic construct
  source 1..50: mol_type = other DNA
ataaaaaactatccttctaacttaatccccaactattttaaatttaaaac

SEQ ID NO: 28269 - DNA, 50 bp, synthetic construct
  source 1..50: mol_type = other DNA
ctctaaactataaataataatcaaaacatatccraattaacctacctacc

SEQ ID NO: 28270 - DNA, 50 bp, synthetic construct
  source 1..50: mol_type = other DNA
ataaccccaaaataaaactctaaactataaataataatcaaaacatatcc

SEQ ID NO: 28271 - DNA, 50 bp, synthetic construct
  source 1..50: mol_type = other DNA
actcacaacccaaaatcctattctaaaactatttactcaaaactctacac

SEQ ID NO: 28272 - DNA, 50 bp, synthetic construct
  source 1..50: mol_type = other DNA
taaaactatttactcaaaactctacacraaaccaaatttatctaaatacc

SEQ ID NO: 28273 - DNA, 50 bp, synthetic construct
  source 1..50: mol_type = other DNA
ttactcaaaactctacacraaaccaaatttatctaaataccrctctatac

SEQ ID NO: 28274 - DNA, 50 bp, synthetic construct
  source 1..50: mol_type = other DNA
taacttacttaaatcctattaaactctcaaaatctcaaacaaaaaatacc

SEQ ID NO: 28275 - DNA, 50 bp, synthetic construct
  source 1..50: mol_type = other DNA
aatcatataaaaaacatcctcaaaacccttcaactattaaaacattaccc

SEQ ID NO: 28276 - DNA, 50 bp, synthetic construct
  source 1..50: mol_type = other DNA
tcaactattaaaacattacccraacaaaatctcctccaaaaaacataacc

SEQ ID NO: 28277 - DNA, 50 bp, synthetic construct
  source 1..50: mol_type = other DNA
taaaacaaataattaaatacataaactactaatcctttacaaaacaaacc

SEQ ID NO: 28278 - DNA, 50 bp, synthetic construct
  source 1..50: mol_type = other DNA
aaaacaaaaacccratttttacatatttaaactttttaactttaaaaaac

SEQ ID NO: 28279 - DNA, 50 bp, synthetic construct
  source 1..50: mol_type = other DNA
tcaaaaaatacctaacaatatctaaaaaaatacattcaattatcataacc

SEQ ID NO: 28280 - DNA, 50 bp, synthetic construct
  source 1..50: mol_type = other DNA
aaaaaccctaacctatacatatataaataaacaaatacaaacatacacac

SEQ ID NO: 28281 - DNA, 50 bp, synthetic construct
  source 1..50: mol_type = other DNA
attttaacacacraaaattccacaacatcrtcaaaaaatatataaactac

SEQ ID NO: 28282 - DNA, 50 bp, synthetic construct
  source 1..50: mol_type = other DNA
aaaactctaaccctataataaattttaacacacraaaattccacaacatc

SEQ ID NO: 28283 - DNA, 50 bp, synthetic construct
  source 1..50: mol_type = other DNA
attccaatcaaaaacttaacaaaaaattaactacacaaaaattccatcac

SEQ ID NO: 28284 - DNA, 50 bp, synthetic construct
  source 1..50: mol_type = other DNA
ctctatataaccaaccctctaccaaatccttaattaaaacaaaactctcc

SEQ ID NO: 28285 - DNA, 50 bp, synthetic construct
  source 1..50: mol_type = other DNA
ctatccctcataactaaataaaaccaaatccractaaaataaaacaatac

SEQ ID NO: 28286 - DNA, 50 bp, synthetic construct
  source 1..50: mol_type = other DNA
aaaatacattaatacraaactatccctcataactaaataaaaccaaatcc

SEQ ID NO: 28287 - DNA, 50 bp, synthetic construct
  source 1..50: mol_type = other DNA
tactccacttcaaccraatttaacttcacccaaccataaaaaacaatctc

SEQ ID NO: 28288 - DNA, 50 bp, synthetic construct
  source 1..50: mol_type = other DNA
aatcaatctctccttcaaactattacctatttaactaactactcttcctc

SEQ ID NO: 28289 - DNA, 50 bp, synthetic construct
  source 1..50: mol_type = other DNA
caattcctacratacaaaattcaaaaaataaaccacaaaaaacaaaactc

SEQ ID NO: 28290 - DNA, 50 bp, synthetic construct
  source 1..50: mol_type = other DNA
aaataaaaccraatcctacttcctataactcattctttaaattttacatc

SEQ ID NO: 28291 - DNA, 50 bp, synthetic construct
  source 1..50: mol_type = other DNA
aaattaaaaataccrcacactttcatacaaatcccrtttcttttttttcc

SEQ ID NO: 28292 - DNA, 50 bp, synthetic construct
  source 1..50: mol_type = other DNA
tctcaaacaaatcaccattcaaaataacttcaactaacraattcaccaac

SEQ ID NO: 28293 - DNA, 50 bp, synthetic construct
  source 1..50: mol_type = other DNA
tttttccrccaaatcttcttaattatacatcatacaccrctaataaactc

SEQ ID NO: 28294 - DNA, 50 bp, synthetic construct
  source 1..50: mol_type = other DNA
craaactaataacttacaaaacttctctaaatatcctattcaatcttaac

SEQ ID NO: 28295 - DNA, 50 bp, synthetic construct
  source 1..50: mol_type = other DNA
aacttctcttaaatatacaatcaaaactctaattaaattcactaaatccc

SEQ ID NO: 28296 - DNA, 50 bp, synthetic construct
  source 1..50: mol_type = other DNA
acttctataaacattaattcctctaataaaacattttctcactatatccc

SEQ ID NO: 28297 - DNA, 50 bp, synthetic construct
  source 1..50: mol_type = other DNA
cactctctactaccctcacctaaaacctaaatcattcataaatattcatc

SEQ ID NO: 28298 - DNA, 50 bp, synthetic construct
  source 1..50: mol_type = other DNA
taaacatccataaataactcaaaccccaaataaaaacaataaaaaataac

SEQ ID NO: 28299 - DNA, 50 bp, synthetic construct
  source 1..50: mol_type = other DNA
tccatattcctacaaaacaacaacaacctaaaataaaacaaaaactactc

SEQ ID NO: 28300 - DNA, 50 bp, synthetic construct
  source 1..50: mol_type = other DNA
cttaataatcatttaaaactaaaaattacacrtaacaatacrtttttccc

SEQ ID NO: 28301 - DNA, 50 bp, synthetic construct
  source 1..50: mol_type = other DNA
aatccaaaacttaataatcatttaaaactaaaaattacacrtaacaatac

SEQ ID NO: 28302 - DNA, 50 bp, synthetic construct
  source 1..50: mol_type = other DNA
catactacttaatccaaaacttaataatcatttaaaactaaaaattacac

SEQ ID NO: 28303 - DNA, 50 bp, synthetic construct
  source 1..50: mol_type = other DNA
aataactaaaaacaaaaaaccracacatataaactaacaattccctccac

SEQ ID NO: 28304 - DNA, 50 bp, synthetic construct
  source 1..50: mol_type = other DNA
tcaaacaaatcacaaaaaaaattcaacctatactcttcccaaacctaaac

SEQ ID NO: 28305 - DNA, 50 bp, synthetic construct
  source 1..50: mol_type = other DNA
aaacacaaactaaattccttctataacttatttaataataatcctaatac

SEQ ID NO: 28306 - DNA, 50 bp, synthetic construct
  source 1..50: mol_type = other DNA
aacttatttaataataatcctaatacratttaccttccttccctataaac

SEQ ID NO: 28307 - DNA, 50 bp, synthetic construct
  source 1..50: mol_type = other DNA
cttccttccctataaacraaaacaaactcctattatttcctacccaactc

SEQ ID NO: 28308 - DNA, 50 bp, synthetic construct
  source 1..50: mol_type = other DNA
tatacttattttaaatttcttaatcttttttaacctactttctccttccc

SEQ ID NO: 28309 - DNA, 50 bp, synthetic construct
  source 1..50: mol_type = other DNA
aaaacacatcaacataattaaataaatatctaattaaaattcatctatac

SEQ ID NO: 28310 - DNA, 50 bp, synthetic construct
  source 1..50: mol_type = other DNA
tacrttaaaatcatataattcctactaaaaactaattcttactataattc

SEQ ID NO: 28311 - DNA, 50 bp, synthetic construct
  source 1..50: mol_type = other DNA
tacaaaaacaacraaatattaacaatttcaaaattaatattatcctactc

SEQ ID NO: 28312 - DNA, 50 bp, synthetic construct
  source 1..50: mol_type = other DNA
tataaaaaaatcraataaaacaacactaattctaaaactactaacatctc

SEQ ID NO: 28313 - DNA, 50 bp, synthetic construct
  source 1..50: mol_type = other DNA
taaacatctctaacaaaccccataataacacaaataacacaaacatctcc

SEQ ID NO: 28314 - DNA, 50 bp, synthetic construct
  source 1..50: mol_type = other DNA
taccacctataccatcataaaacttaccaaaaatacccaaaaaaatattc

SEQ ID NO: 28315 - DNA, 50 bp, synthetic construct
  source 1..50: mol_type = other DNA
aacaaactaaaaaataacttctactctaaaaatcattacaaaaatatcac

SEQ ID NO: 28316 - DNA, 50 bp, synthetic construct
  source 1..50: mol_type = other DNA
ttatacacttactatatacataaaaaaactttaaaataaacactttacac

SEQ ID NO: 28317 - DNA, 50 bp, synthetic construct
  source 1..50: mol_type = other DNA
acataaatattaaatattatcattataataaccttaattcctaaaactac

SEQ ID NO: 28318 - DNA, 50 bp, synthetic construct
  source 1..50: mol_type = other DNA
aaacttacraactatctctaaactaataaatataaaaacaaacaccatac

SEQ ID NO: 28319 - DNA, 50 bp, synthetic construct
  source 1..50: mol_type = other DNA
aaacatccratcttaaccaatatcaaaatccttaaaactaattttactac

SEQ ID NO: 28320 - DNA, 50 bp, synthetic construct
  source 1..50: mol_type = other DNA
tcattaatcacctccaaaaataaaaactacactaccctcaaacataaaac

SEQ ID NO: 28321 - DNA, 50 bp, synthetic construct
  source 1..50: mol_type = other DNA
actccttcccacaaaaacctctaactcaccatttctcatattttaaccac

SEQ ID NO: 28322 - DNA, 50 bp, synthetic construct
  source 1..50: mol_type = other DNA
aacataaaccaccaaacccaaccaaattcatcttctataaaacraaaacc

SEQ ID NO: 28323 - DNA, 50 bp, synthetic construct
  source 1..50: mol_type = other DNA
aattacaaacataaaccaccaaacccaaccaaattcatcttctataaaac

SEQ ID NO: 28324 - DNA, 50 bp, synthetic construct
  source 1..50: mol_type = other DNA
aaaaaaccatccaaaacacacaataaacctaaatactaaaacataactac

SEQ ID NO: 28325 - DNA, 50 bp, synthetic construct
  source 1..50: mol_type = other DNA
ccaccccaccctttaatattctatctttataaatttaactactctaaatc

SEQ ID NO: 28326 - DNA, 50 bp, synthetic construct
  source 1..50: mol_type = other DNA
atactaaaaatttccttctctttcttttttttaaactaaataataattcc

SEQ ID NO: 28327 - DNA, 50 bp, synthetic construct
  source 1..50: mol_type = other DNA
attaataaacacttaaattacttccacttttaactattaaaaataatacc

SEQ ID NO: 28328 - DNA, 50 bp, synthetic construct
  source 1..50: mol_type = other DNA
caacctcataaactataaaataataatcacattactcaactcctaaaaac

SEQ ID NO: 28329 - DNA, 50 bp, synthetic construct
  source 1..50: mol_type = other DNA
aatcacattactcaactcctaaaaacraaaaacttcaattatataataac

SEQ ID NO: 28330 - DNA, 50 bp, synthetic construct
  source 1..50: mol_type = other DNA
cacattactcaactcctaaaaacraaaaacttcaattatataataacrcc

SEQ ID NO: 28331 - DNA, 50 bp, synthetic construct
  source 1..50: mol_type = other DNA
acraaaaacttcaattatataataacrccrtaccacctacaaaactaaac

SEQ ID NO: 28332 - DNA, 50 bp, synthetic construct
  source 1..50: mol_type = other DNA
aaaaataaatacctacacaatatcaattcccataccaaacaacataaccc

SEQ ID NO: 28333 - DNA, 50 bp, synthetic construct
  source 1..50: mol_type = other DNA
aactaatcttaaacttctaaactcaaataatcctcttatattaacctccc

SEQ ID NO: 28334 - DNA, 50 bp, synthetic construct
  source 1..50: mol_type = other DNA
ccaaaaaattaaaactacaataaactataatcrtaccacacactccaacc

SEQ ID NO: 28335 - DNA, 50 bp, synthetic construct
  source 1..50: mol_type = other DNA
caaaacaaacaatacacaaatataaccaaaaactaaaatataaactaaac

SEQ ID NO: 28336 - DNA, 50 bp, synthetic construct
  source 1..50: mol_type = other DNA
taaataaacractaatctaacccaacacraaatattttaacaacraaccc

SEQ ID NO: 28337 - DNA, 50 bp, synthetic construct
  source 1..50: mol_type = other DNA
aaataataaataaacractaatctaacccaacacraaatattttaacaac

SEQ ID NO: 28338 - DNA, 50 bp, synthetic construct
  source 1..50: mol_type = other DNA
ttcctcctaatcacttaaacctccaaaaaacctctcctaattactcaaac

SEQ ID NO: 28339 - DNA, 50 bp, synthetic construct
  source 1..50: mol_type = other DNA
tacctaaaatttataatccccatattaaacacactacctaacacacracc

SEQ ID NO: 28340 - DNA, 50 bp, synthetic construct
  source 1..50: mol_type = other DNA
aatttcctcatataattaattattcaacaaatacatataaaacaccracc

SEQ ID NO: 28341 - DNA, 50 bp, synthetic construct
  source 1..50: mol_type = other DNA
aaacccttacccaaaaaaacatcaatcattcttaaacaaaaaaatcctac

SEQ ID NO: 28342 - DNA, 50 bp, synthetic construct
  source 1..50: mol_type = other DNA
atcaacacaataaaaaatcacttacctaataataaacataaactctaccc

SEQ ID NO: 28343 - DNA, 50 bp, synthetic construct
  source 1..50: mol_type = other DNA
atcacttacctaataataaacataaactctacccrcaaaaataaaaaccc

SEQ ID NO: 28344 - DNA, 50 bp, synthetic construct
  source 1..50: mol_type = other DNA
aaacaaaaaaaaacataaaaacctataacatatccatcaaatcactaccc

SEQ ID NO: 28345 - DNA, 50 bp, synthetic construct
  source 1..50: mol_type = other DNA
catatccatcaaatcactacccrttccctaaaataaataacaacatatcc

SEQ ID NO: 28346 - DNA, 50 bp, synthetic construct
  source 1..50: mol_type = other DNA
actaacccactctacacctctcaaaataaatttacaataattcaaccaac

SEQ ID NO: 28347 - DNA, 50 bp, synthetic construct
  source 1..50: mol_type = other DNA
ctcatctaaacttatttaaatacctataacraaaccttaccctaacaaac

SEQ ID NO: 28348 - DNA, 50 bp, synthetic construct
  source 1..50: mol_type = other DNA
ttcttatcattcaacaaatacttactaaacrcttaccaaaacaaaacccc

SEQ ID NO: 28349 - DNA, 50 bp, synthetic construct
  source 1..50: mol_type = other DNA
aaacctaataattatactacaaaaattactaaatactaatcaaaataatc

SEQ ID NO: 28350 - DNA, 50 bp, synthetic construct
  source 1..50: mol_type = other DNA
cctaaaacaaaaatcctccaaataaaaaaaacaacatatacaaaaacccc

SEQ ID NO: 28351 - DNA, 50 bp, synthetic construct
  source 1..50: mol_type = other DNA
ttcttttaaaaacttccatctaaccacatcactatcctacttaaaaattc

SEQ ID NO: 28352 - DNA, 50 bp, synthetic construct
  source 1..50: mol_type = other DNA
tccacattatctcrcctaaataactacaacaacttcttaacaaatctctc

SEQ ID NO: 28353 - DNA, 50 bp, synthetic construct
  source 1..50: mol_type = other DNA
aaaaaaaaacaccraaaaacttactaaaaaactattacaatcatccaaac

SEQ ID NO: 28354 - DNA, 50 bp, synthetic construct
  source 1..50: mol_type = other DNA
ccattactcaaaccaaatcacaaaaatcatctaactcrtccctttcactc

SEQ ID NO: 28355 - DNA, 50 bp, synthetic construct
  source 1..50: mol_type = other DNA
aaaattcaaatccrataccctaaaacccaaatacctaaaaaaactacctc

SEQ ID NO: 28356 - DNA, 50 bp, synthetic construct
  source 1..50: mol_type = other DNA
ttaacacaaaaataattacaatttttaccattaaaaacaattaaaacacc

SEQ ID NO: 28357 - DNA, 50 bp, synthetic construct
  source 1..50: mol_type = other DNA
aaaaaacttaacttaatatctttctactaatatcaccctcaaaaacaaac

SEQ ID NO: 28358 - DNA, 50 bp, synthetic construct
  source 1..50: mol_type = other DNA
atcattaaaaacttaaaaacacaattattaaaaataactatatttccttc

SEQ ID NO: 28359 - DNA, 50 bp, synthetic construct
  source 1..50: mol_type = other DNA
atttccttcrtatctaatctctctttctctaaacctaaatttcctcaaac

SEQ ID NO: 28360 - DNA, 50 bp, synthetic construct
  source 1..50: mol_type = other DNA
ctctctttctctaaacctaaatttcctcaaacrtaaaaaatacrtaatac

SEQ ID NO: 28361 - DNA, 50 bp, synthetic construct
  source 1..50: mol_type = other DNA
actctaatttataactttaaaaaccatctatttctcattaataaattctc

SEQ ID NO: 28362 - DNA, 50 bp, synthetic construct
  source 1..50: mol_type = other DNA
attcattacacacaactccccttatcaacctttatcatctaaattaattc

SEQ ID NO: 28363 - DNA, 50 bp, synthetic construct
  source 1..50: mol_type = other DNA
cttttaaattttacaaaacaaaaataacctatcatttacacctcaaacac

SEQ ID NO: 28364 - DNA, 50 bp, synthetic construct
  source 1..50: mol_type = other DNA
ttaaatcaatccacatttccaactatctaaccaaacccacaaacctcacc

SEQ ID NO: 28365 - DNA, 50 bp, synthetic construct
  source 1..50: mol_type = other DNA
acatacacatctatcaaaaccaatcctccaataaaaactaataccaaaac

SEQ ID NO: 28366 - DNA, 50 bp, synthetic construct
  source 1..50: mol_type = other DNA
attctacatctattcccaaactcatcratcaacttttacataaatacacc

SEQ ID NO: 28367 - DNA, 50 bp, synthetic construct
  source 1..50: mol_type = other DNA
ccttatataaaaacaacacaataacctaaccaacracctaaacaaacccc

SEQ ID NO: 28368 - DNA, 50 bp, synthetic construct
  source 1..50: mol_type = other DNA
ctacccaatttaaaacaaaaaatatctaaaaaactaatcaaaactccccc

SEQ ID NO: 28369 - DNA, 50 bp, synthetic construct
  source 1..50: mol_type = other DNA
aaaacaaaaaatatctaaaaaactaatcaaaactcccccrctatacaacc

SEQ ID NO: 28370 - DNA, 50 bp, synthetic construct
  source 1..50: mol_type = other DNA
accaaaatatctaaaatatttctacttcaaatactataactaatacttcc

SEQ ID NO: 28371 - DNA, 50 bp, synthetic construct
  source 1..50: mol_type = other DNA
aaaataaacccaaaaaaaccttaatatatttctcacacccaaaaaaaacc

SEQ ID NO: 28372 - DNA, 50 bp, synthetic construct
  source 1..50: mol_type = other DNA
cttaatatatttctcacacccaaaaaaaaccrccaaaaaaaacccataac

SEQ ID NO: 28373 - DNA, 50 bp, synthetic construct
  source 1..50: mol_type = other DNA
aacttaatactctcaaaaaataaaatttataccatctaatacacaacctc

SEQ ID NO: 28374 - DNA, 50 bp, synthetic construct
  source 1..50: mol_type = other DNA
atcaaataacacccaactaccaaaaacacratctcatcttacaatacatc

SEQ ID NO: 28375 - DNA, 50 bp, synthetic construct
  source 1..50: mol_type = other DNA
tacaatctaacatatccccttatcaaataacacccaactaccaaaaacac

SEQ ID NO: 28376 - DNA, 50 bp, synthetic construct
  source 1..50: mol_type = other DNA
aattttcacaataaccaaaaaaaccaattatatatcttcatctttccccc

SEQ ID NO: 28377 - DNA, 50 bp, synthetic construct
  source 1..50: mol_type = other DNA
caactccctacctaaaaataacactttcaattaattattactcctaaacc

SEQ ID NO: 28378 - DNA, 50 bp, synthetic construct
  source 1..50: mol_type = other DNA
ctataaaccrataaaatcatcrtactcaaaaaaccacaacaaaaaaacac

SEQ ID NO: 28379 - DNA, 50 bp, synthetic construct
  source 1..50: mol_type = other DNA
aaaacttctaaaataacctacrtacccctttattataactttctaaacac

SEQ ID NO: 28380 - DNA, 50 bp, synthetic construct
  source 1..50: mol_type = other DNA
aaaaactaaaatatacctaaaacccaacaccraaaacccaactataaacc

SEQ ID NO: 28381 - DNA, 50 bp, synthetic construct
  source 1..50: mol_type = other DNA
acaaaacatccrtaaaccaaaaaactaaaatatacctaaaacccaacacc

SEQ ID NO: 28382 - DNA, 50 bp, synthetic construct
  source 1..50: mol_type = other DNA
aaaaaaatcaatataaataaaataaaccttcctcaaaaacccccaccacc

SEQ ID NO: 28383 - DNA, 50 bp, synthetic construct
  source 1..50: mol_type = other DNA
ccccaaatacccaaaactttataaatatcaactatttcaaaacattttcc

SEQ ID NO: 28384 - DNA, 50 bp, synthetic construct
  source 1..50: mol_type = other DNA
cttaaaaaattaaacaacacacaaactacctactaaatataacrtatccc

SEQ ID NO: 28385 - DNA, 50 bp, synthetic construct
  source 1..50: mol_type = other DNA
aattacttataaacrcaaatatctaaattataaaaaactaccaaaactcc

SEQ ID NO: 28386 - DNA, 50 bp, synthetic construct
  source 1..50: mol_type = other DNA
crtctaacaaaactacrcttcttcacctaccccttaaattacttataaac

SEQ ID NO: 28387 - DNA, 50 bp, synthetic construct
  source 1..50: mol_type = other DNA
aaatctaaaacatttaatataatcatcttaacattaaacctacactatac

SEQ ID NO: 28388 - DNA, 50 bp, synthetic construct
  source 1..50: mol_type = other DNA
craaacataaatcatactaacraaaacaaatacttccctaaaacratccc

SEQ ID NO: 28389 - DNA, 50 bp, synthetic construct
  source 1..50: mol_type = other DNA
tttacaaaaaaattccaattttcatttccaccctcrtattcaatacccac

SEQ ID NO: 28390 - DNA, 50 bp, synthetic construct
  source 1..50: mol_type = other DNA
attaccaaatttaaatttacaaaaaaattccaattttcatttccaccctc

SEQ ID NO: 28391 - DNA, 50 bp, synthetic construct
  source 1..50: mol_type = other DNA
aaattaccaaaaatataacrtactactcctaaaaactataacaaaaaacc

SEQ ID NO: 28392 - DNA, 50 bp, synthetic construct
  source 1..50: mol_type = other DNA
taataataccaactaccccttaacaattattcccraattatataaacccc

SEQ ID NO: 28393 - DNA, 50 bp, synthetic construct
  source 1..50: mol_type = other DNA
aaacraaaacatttcctaataataccaactaccccttaacaattattccc

SEQ ID NO: 28394 - DNA, 50 bp, synthetic construct
  source 1..50: mol_type = other DNA
acccraaaataactactaaaaaacaattaacaccatcaaaaaatatcccc

SEQ ID NO: 28395 - DNA, 50 bp, synthetic construct
  source 1..50: mol_type = other DNA
aaaaacaaacacraaaattaaataaacaaacraaataattcctaccatcc

SEQ ID NO: 28396 - DNA, 50 bp, synthetic construct
  source 1..50: mol_type = other DNA
caacctaacccraaaactaatactacaaaataaaaccaaaaaacaaacac

SEQ ID NO: 28397 - DNA, 50 bp, synthetic construct
  source 1..50: mol_type = other DNA
aaaaaccaataacaataacacacactaaaatattttacacaaaaaaaacc

SEQ ID NO: 28398 - DNA, 50 bp, synthetic construct
  source 1..50: mol_type = other DNA
tttacacaaaaaaaaccrcctaactaaatataactaacaaaaaaataacc

SEQ ID NO: 28399 - DNA, 50 bp, synthetic construct
  source 1..50: mol_type = other DNA
aaataaataacctacaacatattcaacaaataaaattaacaaatttaatc

SEQ ID NO: 28400 - DNA, 50 bp, synthetic construct
  source 1..50: mol_type = other DNA
aataaacaccraacacacraataatttatttaaacacttattaaaccrcc

SEQ ID NO: 28401 - DNA, 50 bp, synthetic construct
  source 1..50: mol_type = other DNA
tcaaataaacaccraacacacraataatttatttaaacacttattaaacc

SEQ ID NO: 28402 - DNA, 50 bp, synthetic construct
  source 1..50: mol_type = other DNA
aattaaaataacacaataaatatcatttcatatcatacttttaacccaac

SEQ ID NO: 28403 - DNA, 50 bp, synthetic construct
  source 1..50: mol_type = other DNA
tatcatacttttaacccaacrtaacataatataattcatcatttctccac

SEQ ID NO: 28404 - DNA, 50 bp, synthetic construct
  source 1..50: mol_type = other DNA
cttattacacactttaaaaataaaatttccataaccaaactcaataactc

SEQ ID NO: 28405 - DNA, 50 bp, synthetic construct
  source 1..50: mol_type = other DNA
attaccaaattactttccaaaaatattaaaccactaacactctcaccaac

SEQ ID NO: 28406 - DNA, 50 bp, synthetic construct
  source 1..50: mol_type = other DNA
tttctccccaaaacctctaaaaaaaacattactatacrccctttatatcc

SEQ ID NO: 28407 - DNA, 50 bp, synthetic construct
  source 1..50: mol_type = other DNA
aacaaaaaaactttctaatacctatctaaaccaattttctaaatcaaacc

SEQ ID NO: 28408 - DNA, 50 bp, synthetic construct
  source 1..50: mol_type = other DNA
atttaacctctatttctaaaaaacatttacttctctcccttcccacaacc

SEQ ID NO: 28409 - DNA, 50 bp, synthetic construct
  source 1..50: mol_type = other DNA
caaatattttccaaaaataaaaatcaaataaaaaacattcaactactatc

SEQ ID NO: 28410 - DNA, 50 bp, synthetic construct
  source 1..50: mol_type = other DNA
ttttccaaaaataaaaatcaaataaaaaacattcaactactatcrcaaac

SEQ ID NO: 28411 - DNA, 50 bp, synthetic construct
  source 1..50: mol_type = other DNA
ccrcatataattaattaaaaaatcccccccttctaccctctaaacaatac

SEQ ID NO: 28412 - DNA, 50 bp, synthetic construct
  source 1..50: mol_type = other DNA
tcaccaaacccctatctaaaatcaacttctaaaaaacatacactaaaaac

SEQ ID NO: 28413 - DNA, 50 bp, synthetic construct
  source 1..50: mol_type = other DNA
ctaatataaccacttatcctcaaaaaaactacaccctaaaaccatccctc

SEQ ID NO: 28414 - DNA, 50 bp, synthetic construct
  source 1..50: mol_type = other DNA
actacatctatactcaacttaatcrctaccctaataatttttaacaacac

SEQ ID NO: 28415 - DNA, 50 bp, synthetic construct
  source 1..50: mol_type = other DNA
ttaaaaacctttcttctaaacaataaactacatctatactcaacttaatc

SEQ ID NO: 28416 - DNA, 50 bp, synthetic construct
  source 1..50: mol_type = other DNA
aaacacaaatacaatccactatccaaaaaaaaaacccccaacatctcaac

SEQ ID NO: 28417 - DNA, 50 bp, synthetic construct
  source 1..50: mol_type = other DNA
aaatatctcaaccttaactacrcctaacccaaaccaaaaaaatactaacc

SEQ ID NO: 28418 - DNA, 50 bp, synthetic construct
  source 1..50: mol_type = other DNA
aacctaatctaaccctttctaccctatacaaatatctcaaccttaactac

SEQ ID NO: 28419 - DNA, 50 bp, synthetic construct
  source 1..50: mol_type = other DNA
aacccttcctaacaaacrcctcccaaaaaacaatatcaatcccaaaaaac

SEQ ID NO: 28420 - DNA, 50 bp, synthetic construct
  source 1..50: mol_type = other DNA
ctaactctaaaaataactaaaaataatacccctttaaaacaaatccctac

SEQ ID NO: 28421 - DNA, 50 bp, synthetic construct
  source 1..50: mol_type = other DNA
aaaaaaatatcaaaaaaccaaactataactccatatcactacataacctc

SEQ ID NO: 28422 - DNA, 50 bp, synthetic construct
  source 1..50: mol_type = other DNA
caaatcacttcacttctctaaacctctataactaatatcactaacttcac

SEQ ID NO: 28423 - DNA, 50 bp, synthetic construct
  source 1..50: mol_type = other DNA
tactataattatactacaaactccaaaaccaaacractaaaattcaatcc

SEQ ID NO: 28424 - DNA, 50 bp, synthetic construct
  source 1..50: mol_type = other DNA
aaaacctacaacataaccacaacaaaaaactaccaccraaaacaaacatc

SEQ ID NO: 28425 - DNA, 50 bp, synthetic construct
  source 1..50: mol_type = other DNA
atcccaaatcttataaactcataataattaatccaaataatacaaaaatc

SEQ ID NO: 28426 - DNA, 50 bp, synthetic construct
  source 1..50: mol_type = other DNA
actacccraattaacaaaaacctaaccataaacctcctcaactaaaaacc

SEQ ID NO: 28427 - DNA, 50 bp, synthetic construct
  source 1..50: mol_type = other DNA
accataaacctcctcaactaaaaaccrcctctctaaaaaataaatacccc

SEQ ID NO: 28428 - DNA, 50 bp, synthetic construct
  source 1..50: mol_type = other DNA
raataacaaaaccaaaaaactacaaacrctaccaataaaaaaaaccaaac

SEQ ID NO: 28429 - DNA, 50 bp, synthetic construct
  source 1..50: mol_type = other DNA
acatttaaccttctccataactttaaaacaaaaccaaaaccraccaccac

SEQ ID NO: 28430 - DNA, 50 bp, synthetic construct
  source 1..50: mol_type = other DNA
cacattccctaacttcacaaaacaaaaataaaaaatttctaattccaacc

SEQ ID NO: 28431 - DNA, 50 bp, synthetic construct
  source 1..50: mol_type = other DNA
acaaaacaaaaataaaaaatttctaattccaaccraacacactaactcac

SEQ ID NO: 28432 - DNA, 50 bp, synthetic construct
  source 1..50: mol_type = other DNA
atcttaatatacctatacatatatccaaatataaataactatctccacac

SEQ ID NO: 28433 - DNA, 50 bp, synthetic construct
  source 1..50: mol_type = other DNA
cttaacctacataatccacctttaacacacacaaacaaaaacctcaaacc

SEQ ID NO: 28434 - DNA, 50 bp, synthetic construct
  source 1..50: mol_type = other DNA
aataatttcctcatcaaaatatttccaaattctactttatataaaccaac

SEQ ID NO: 28435 - DNA, 50 bp, synthetic construct
  source 1..50: mol_type = other DNA
acaataaattattaacrtcaatacccatttccttaaacaatttattacrc

SEQ ID NO: 28436 - DNA, 50 bp, synthetic construct
  source 1..50: mol_type = other DNA
tcacaataaattattaacrtcaatacccatttccttaaacaatttattac

SEQ ID NO: 28437 - DNA, 50 bp, synthetic construct
  source 1..50: mol_type = other DNA
tcactctacacatcttactttttaaatacatttcacaataaattattaac

SEQ ID NO: 28438 - DNA, 50 bp, synthetic construct
  source 1..50: mol_type = other DNA
ccactctcaacaaaactactatttaacaaataaatctatacaaaaaaaac

SEQ ID NO: 28439 - DNA, 50 bp, synthetic construct
  source 1..50: mol_type = other DNA
aaaattactacaaaaaaactaccraacctacctaaaaaccaataaaaaac

SEQ ID NO: 28440 - DNA, 50 bp, synthetic construct
  source 1..50: mol_type = other DNA
aaaaaactaccraacctacctaaaaaccaataaaaaacraatcaaaacac

SEQ ID NO: 28441 - DNA, 50 bp, synthetic construct
  source 1..50: mol_type = other DNA
accaacrtccttataacaaaacaatttcttaccrcttaaatcttcaacac

SEQ ID NO: 28442 - DNA, 50 bp, synthetic construct
  source 1..50: mol_type = other DNA
ccaccacaaactctataaaaaccaaaacaatttcaacraaaccttcactc

SEQ ID NO: 28443 - DNA, 50 bp, synthetic construct
  source 1..50: mol_type = other DNA
cctataaaaaaatcaaatcctaaacttcaaattcacctctaccctacccc

SEQ ID NO: 28444 - DNA, 50 bp, synthetic construct
  source 1..50: mol_type = other DNA
aatcccaccacaaacacatactaattttatttataattcaaatataactc

SEQ ID NO: 28445 - DNA, 50 bp, synthetic construct
  source 1..50: mol_type = other DNA
tcttccacraaataattacataaaataaaatcaactttacaatctacacc

SEQ ID NO: 28446 - DNA, 50 bp, synthetic construct
  source 1..50: mol_type = other DNA
acactacaattttaaaccraaatatctcacrattttattatttcttccac

SEQ ID NO: 28447 - DNA, 50 bp, synthetic construct
  source 1..50: mol_type = other DNA
aacaaaacctaaaccccaacrctttataaaccacactacaattttaaacc

SEQ ID NO: 28448 - DNA, 50 bp, synthetic construct
  source 1..50: mol_type = other DNA
tccttttaaataatctaatttactcaaaaattcccataatacttttcatc

SEQ ID NO: 28449 - DNA, 50 bp, synthetic construct
  source 1..50: mol_type = other DNA
atataaattaaaattaaaacttataaattaaatacaattaacatccaacc

SEQ ID NO: 28450 - DNA, 50 bp, synthetic construct
  source 1..50: mol_type = other DNA
tacatcaaactaacacaataacaattcacaaaaaacataaaaacaaaaac

SEQ ID NO: 28451 - DNA, 50 bp, synthetic construct
  source 1..50: mol_type = other DNA
taaataaactatactaaacatcctaaactctataaaataaacatcaacac

SEQ ID NO: 28452 - DNA, 50 bp, synthetic construct
  source 1..50: mol_type = other DNA
taaaaacaaacaaaaaacacctaaatatacaaacttaataactaacctac

SEQ ID NO: 28453 - DNA, 50 bp, synthetic construct
  source 1..50: mol_type = other DNA
caaatcaattaccaaacctacacatccaaatatctcctatctaccttcac

SEQ ID NO: 28454 - DNA, 50 bp, synthetic construct
  source 1..50: mol_type = other DNA
aaaaaataacaactaaaacraccccaacatctccaaaaaataaataaacc

SEQ ID NO: 28455 - DNA, 50 bp, synthetic construct
  source 1..50: mol_type = other DNA
rctaaaatttacacctaacracttactcacttcctaaaaatactaaaacc

SEQ ID NO: 28456 - DNA, 50 bp, synthetic construct
  source 1..50: mol_type = other DNA
aaacaatacctatttcrattttactaacaaaacccrctacctacttaatc

SEQ ID NO: 28457 - DNA, 50 bp, synthetic construct
  source 1..50: mol_type = other DNA
aaaaaaacaaactcctccaaactacaaccaaacaaaacaatacctatttc

SEQ ID NO: 28458 - DNA, 50 bp, synthetic construct
  source 1..50: mol_type = other DNA
ttaaacaataaaaatctaactttaaaacactaccttcccttactttctac

SEQ ID NO: 28459 - DNA, 50 bp, synthetic construct
  source 1..50: mol_type = other DNA
attccttaataaaattactctatatatacctattattcttaatcataccc

SEQ ID NO: 28460 - DNA, 50 bp, synthetic construct
  source 1..50: mol_type = other DNA
acacttccttaaactctatctcataaatatctctatttaacrtacaacac

SEQ ID NO: 28461 - DNA, 50 bp, synthetic construct
  source 1..50: mol_type = other DNA
cccacaaaaaacattattttctatctctcacataaatccctaaaccactc

SEQ ID NO: 28462 - DNA, 50 bp, synthetic construct
  source 1..50: mol_type = other DNA
cacaaaaaacattattttctatctctcacataaatccctaaaccactcrc

SEQ ID NO: 28463 - DNA, 50 bp, synthetic construct
  source 1..50: mol_type = other DNA
tcccrattctacaaaaaacccacaaaaaaactttaaattaataaaattac

SEQ ID NO: 28464 - DNA, 50 bp, synthetic construct
  source 1..50: mol_type = other DNA
ccccrtaaccccactaacttaaaactcttctataaatctcttataaaatc

SEQ ID NO: 28465 - DNA, 50 bp, synthetic construct
  source 1..50: mol_type = other DNA
taaaactcttctataaatctcttataaaatcraaacaaaatatccaatac

SEQ ID NO: 28466 - DNA, 50 bp, synthetic construct
  source 1..50: mol_type = other DNA
aaactctcttccctactaactatatctatctctattctacctcttatacc

SEQ ID NO: 28467 - DNA, 50 bp, synthetic construct
  source 1..50: mol_type = other DNA
tctctattctacctcttataccrtactatataccaaaactaacaaacaac

SEQ ID NO: 28468 - DNA, 50 bp, synthetic construct
  source 1..50: mol_type = other DNA
acttcaactactaaattataaaaaaatctcaaaaatcccaaaacaaaaac

SEQ ID NO: 28469 - DNA, 50 bp, synthetic construct
  source 1..50: mol_type = other DNA
ccataaaacaaatactaactcaaaccaccaataaaataccaaaaacaccc

SEQ ID NO: 28470 - DNA, 50 bp, synthetic construct
  source 1..50: mol_type = other DNA
tcacttcctacttcacccttaaatcaaaaaatactaaatacctcccaaac

SEQ ID NO: 28471 - DNA, 50 bp, synthetic construct
  source 1..50: mol_type = other DNA
atttattttttatacacaaaaccattcaaacctactcttcttaaaattcc

SEQ ID NO: 28472 - DNA, 50 bp, synthetic construct
  source 1..50: mol_type = other DNA
atttctctctatccaaaaataaataaactaaaactaatatataactccac

SEQ ID NO: 28473 - DNA, 50 bp, synthetic construct
  source 1..50: mol_type = other DNA
aaaaataaataaactaaaactaatatataactccacraccatcaaaaacc

SEQ ID NO: 28474 - DNA, 50 bp, synthetic construct
  source 1..50: mol_type = other DNA
tttttccctatccaaactcaaacccctaaatcctatatataaaaataaac

SEQ ID NO: 28475 - DNA, 50 bp, synthetic construct
  source 1..50: mol_type = other DNA
aaaacccataattattcctaaattacaaaataaactcttaatacaaaaac

SEQ ID NO: 28476 - DNA, 50 bp, synthetic construct
  source 1..50: mol_type = other DNA
ttcctaaattacaaaataaactcttaatacaaaaacrttaaaactccccc

SEQ ID NO: 28477 - DNA, 50 bp, synthetic construct
  source 1..50: mol_type = other DNA
crttaaaactcccccraccttcactaaaaaatacttacaatataccactc

SEQ ID NO: 28478 - DNA, 50 bp, synthetic construct
  source 1..50: mol_type = other DNA
acacccaacattctttaattcaaaaataaaacaaaaaataaacaaacacc

SEQ ID NO: 28479 - DNA, 50 bp, synthetic construct
  source 1..50: mol_type = other DNA
aacaaaaaataaacaaacaccrtaaaactactacrtaaaaacractaacc

SEQ ID NO: 28480 - DNA, 50 bp, synthetic construct
  source 1..50: mol_type = other DNA
aactaaataatctattaacacctactcaacraaattcaaaactaaacaac

SEQ ID NO: 28481 - DNA, 50 bp, synthetic construct
  source 1..50: mol_type = other DNA
caaaaaacctacttcctctctccaaaaattacattttcccaaacttaaac

SEQ ID NO: 28482 - DNA, 50 bp, synthetic construct
  source 1..50: mol_type = other DNA
aaaatacacaatatttacaatattttcccctcttctttccttacaaaacc

SEQ ID NO: 28483 - DNA, 50 bp, synthetic construct
  source 1..50: mol_type = other DNA
tattcaacaaacrttcrctattactaaaacaaaaaattccattcrtaatc

SEQ ID NO: 28484 - DNA, 50 bp, synthetic construct
  source 1..50: mol_type = other DNA
aaattaactcaactacrattacraataaaattccttactccaacaacaac

SEQ ID NO: 28485 - DNA, 50 bp, synthetic construct
  source 1..50: mol_type = other DNA
taactcaactacrattacraataaaattccttactccaacaacaacraac

SEQ ID NO: 28486 - DNA, 50 bp, synthetic construct
  source 1..50: mol_type = other DNA
taatttaatcctccaataaataaaacctacrtttccaataaaaaaatcac

SEQ ID NO: 28487 - DNA, 50 bp, synthetic construct
  source 1..50: mol_type = other DNA
ttcccactacttaaaaatccaaccctaaacrtaacttttctattaaaaac

SEQ ID NO: 28488 - DNA, 50 bp, synthetic construct
  source 1..50: mol_type = other DNA
aaaaccaaattacctcctaatcttacctccaacatataaaatccaccctc

SEQ ID NO: 28489 - DNA, 50 bp, synthetic construct
  source 1..50: mol_type = other DNA
tcccacrcctaaacaactcactattataaccccttattaattttttaaac

SEQ ID NO: 28490 - DNA, 50 bp, synthetic construct
  source 1..50: mol_type = other DNA
attaattttttaaacratactcaaccccatttcaaatcattttatttttc

SEQ ID NO: 28491 - DNA, 50 bp, synthetic construct
  source 1..50: mol_type = other DNA
tttaaacratactcaaccccatttcaaatcattttatttttcrcttaatc

SEQ ID NO: 28492 - DNA, 50 bp, synthetic construct
  source 1..50: mol_type = other DNA
aaaaaaactatcactttctcaccaatcttcactcttacttcattctccac

SEQ ID NO: 28493 - DNA, 50 bp, synthetic construct
  source 1..50: mol_type = other DNA
taattatttatatccttaatcrtctctcattaaaatcaaatttactacrc

SEQ ID NO: 28494 - DNA, 50 bp, synthetic construct
  source 1..50: mol_type = other DNA
aaaactaattaaactattaaaataaaaatcatttcccccaacttaaacrc

SEQ ID NO: 28495 - DNA, 50 bp, synthetic construct
  source 1..50: mol_type = other DNA
ccccaccccatctccaactaaataaaatttaattatttatatccttaatc

SEQ ID NO: 28496 - DNA, 50 bp, synthetic construct
  source 1..50: mol_type = other DNA
caacaaacaaacctaaaaacttcccraacaacacraaaaataccccaaac

SEQ ID NO: 28497 - DNA, 50 bp, synthetic construct
  source 1..50: mol_type = other DNA
taaaacacccctcrtattatccraaaaacttttaaacctatttactaaac

SEQ ID NO: 28498 - DNA, 50 bp, synthetic construct
  source 1..50: mol_type = other DNA
cccaaaaacraaactttaaaaaccaattaaataaaacataaactcatctc

SEQ ID NO: 28499 - DNA, 50 bp, synthetic construct
  source 1..50: mol_type = other DNA
ctacacacraatacctttctctactttacttaatataaaaaaaacccttc

SEQ ID NO: 28500 - DNA, 50 bp, synthetic construct
  source 1..50: mol_type = other DNA
racttcccaaaatacttaattacaaacacraaccaccatacctaacctac

SEQ ID NO: 28501 - DNA, 50 bp, synthetic construct
  source 1..50: mol_type = other DNA
racrccaatctccatcactaacaactattaacctcacctatatacaaaac

SEQ ID NO: 28502 - DNA, 50 bp, synthetic construct
  source 1..50: mol_type = other DNA
aacrctctacacacaaataaaatcaacaactattaataataaaaactaac

SEQ ID NO: 28503 - DNA, 50 bp, synthetic construct
  source 1..50: mol_type = other DNA
atctataactcacaatactatattatatacttaaaaatttactaataacc

SEQ ID NO: 28504 - DNA, 50 bp, synthetic construct
  source 1..50: mol_type = other DNA
atatacaatataatattataaactataaacactattctatacaataaacc

SEQ ID NO: 28505 - DNA, 50 bp, synthetic construct
  source 1..50: mol_type = other DNA
cattttacacaattaataaacaacaaaacaaacaaatcaccaatatttac

SEQ ID NO: 28506 - DNA, 50 bp, synthetic construct
  source 1..50: mol_type = other DNA
aatatttacrttatactaacaaatctcttactactaaacatttaaactcc

SEQ ID NO: 28507 - DNA, 50 bp, synthetic construct
  source 1..50: mol_type = other DNA
acccacacaatttctaatacaataaatctaaataaaacccraacatctac

SEQ ID NO: 28508 - DNA, 50 bp, synthetic construct
  source 1..50: mol_type = other DNA
caataatatttaaaacaataatcctcaaacrcaactctatcaccaacatc

SEQ ID NO: 28509 - DNA, 50 bp, synthetic construct
  source 1..50: mol_type = other DNA
aaaaacaatacrtacaacaacaataatatttaaaacaataatcctcaaac

SEQ ID NO: 28510 - DNA, 50 bp, synthetic construct
  source 1..50: mol_type = other DNA
aacaaaactacrtttaaaaatcactactctaaacattattactactacac

SEQ ID NO: 28511 - DNA, 50 bp, synthetic construct
  source 1..50: mol_type = other DNA
tataaaaaacactttaacaatacaaaacraaaataaccaacaaaaaaccc

SEQ ID NO: 28512 - DNA, 50 bp, synthetic construct
  source 1..50: mol_type = other DNA
caaaatccttaaactaccctacrctccaaaaatcaatacctaaaactacc

SEQ ID NO: 28513 - DNA, 50 bp, synthetic construct
  source 1..50: mol_type = other DNA
ctaattaattcaaaccacaaaatttctaaccaactcatctaataccaaac

SEQ ID NO: 28514 - DNA, 50 bp, synthetic construct
  source 1..50: mol_type = other DNA
tttattatcaaataaaaccttccacrtcaaataaaaactatttccaaacc

SEQ ID NO: 28515 - DNA, 50 bp, synthetic construct
  source 1..50: mol_type = other DNA
accaataaacaaccacaacaaaaacctccratatctacaaaacaaaaaac

SEQ ID NO: 28516 - DNA, 50 bp, synthetic construct
  source 1..50: mol_type = other DNA
ttcacaaataaaaactaaaaacctctcttcaactcaacaatccatccccc

SEQ ID NO: 28517 - DNA, 50 bp, synthetic construct
  source 1..50: mol_type = other DNA
tcataaaatataaaacrttcataaaaccraccrtaaactacataaactac

SEQ ID NO: 28518 - DNA, 50 bp, synthetic construct
  source 1..50: mol_type = other DNA
tcatcrtccratttctcactataataataaaacataataaatctactacc

SEQ ID NO: 28519 - DNA, 50 bp, synthetic construct
  source 1..50: mol_type = other DNA
aaacacaacracaacaaacttaccatacttcatcatcacaataaaaaacc

SEQ ID NO: 28520 - DNA, 50 bp, synthetic construct
  source 1..50: mol_type = other DNA
acaacracaacaaacttaccatacttcatcatcacaataaaaaaccraac

SEQ ID NO: 28521 - DNA, 50 bp, synthetic construct
  source 1..50: mol_type = other DNA
ttatcctacatataaataaaatatcctatcacaaacaaataaaaactccc

SEQ ID NO: 28522 - DNA, 50 bp, synthetic construct
  source 1..50: mol_type = other DNA
aaaaaaaaactaaacrattatccaccaatcccatccataattaattaaac

SEQ ID NO: 28523 - DNA, 50 bp, synthetic construct
  source 1..50: mol_type = other DNA
accrcaaaaaacaacrctcaaccaaccataaataaaactaataaataatc

SEQ ID NO: 28524 - DNA, 50 bp, synthetic construct
  source 1..50: mol_type = other DNA
actttaaattctcaaattaaatatcaaatcatacactactaatccttaac

SEQ ID NO: 28525 - DNA, 50 bp, synthetic construct
  source 1..50: mol_type = other DNA
aaatcatacactactaatccttaacrtatccatacacacaacttaccttc

SEQ ID NO: 28526 - DNA, 50 bp, synthetic construct
  source 1..50: mol_type = other DNA
aaaaaaaactaataactatatctaactcccctaacaatctcattcctccc

SEQ ID NO: 28527 - DNA, 50 bp, synthetic construct
  source 1..50: mol_type = other DNA
caactattttctaaaacrcaacaaaaacaacaacatctacactacaaccc

SEQ ID NO: 28528 - DNA, 50 bp, synthetic construct
  source 1..50: mol_type = other DNA
aaaatttaccactactattcccaactcccaacccaactattttctaaaac

SEQ ID NO: 28529 - DNA, 50 bp, synthetic construct
  source 1..50: mol_type = other DNA
cttataaattcaaacaaaaaataaaactcccrttctcccaaatatcaaac

SEQ ID NO: 28530 - DNA, 50 bp, synthetic construct
  source 1..50: mol_type = other DNA
ccttcaacatactaacatacatataccctactctttctcctataatcatc

SEQ ID NO: 28531 - DNA, 50 bp, synthetic construct
  source 1..50: mol_type = other DNA
taaaaattatacttttaaaaaatacaattaactttacaaaatatacctac

SEQ ID NO: 28532 - DNA, 50 bp, synthetic construct
  source 1..50: mol_type = other DNA
aattatacttttaaaaaatacaattaactttacaaaatatacctacrtcc

SEQ ID NO: 28533 - DNA, 50 bp, synthetic construct
  source 1..50: mol_type = other DNA
ctactttcttatccaataaatataattaaaaatctttctaataactaacc

SEQ ID NO: 28534 - DNA, 50 bp, synthetic construct
  source 1..50: mol_type = other DNA
atctcaaatacattattacaactacacaaactaccctaccccracaatac

SEQ ID NO: 28535 - DNA, 50 bp, synthetic construct
  source 1..50: mol_type = other DNA
taaaatatacctttcaccttctaccrtaattataaaacctcctcaaccac

SEQ ID NO: 28536 - DNA, 50 bp, synthetic construct
  source 1..50: mol_type = other DNA
acaaactttcttatctaccactatataaaatatacctttcaccttctacc

SEQ ID NO: 28537 - DNA, 50 bp, synthetic construct
  source 1..50: mol_type = other DNA
aataaaattactctatatatacctatcattcttaatcatacccacaaccc

SEQ ID NO: 28538 - DNA, 50 bp, synthetic construct
  source 1..50: mol_type = other DNA
acacttcctcaaactctatctcataaatatctctatttaatatacaacac

SEQ ID NO: 28539 - DNA, 50 bp, synthetic construct
  source 1..50: mol_type = other DNA
aaaccacaaactacactaaacraaactaaactaaactaatacctataccc

SEQ ID NO: 28540 - DNA, 50 bp, synthetic construct
  source 1..50: mol_type = other DNA
tcaaatttaccaaatactaactccrctaaaaaccacaaactacactaaac

SEQ ID NO: 28541 - DNA, 50 bp, synthetic construct
  source 1..50: mol_type = other DNA
aaaaacccaaactccaaaactaaatatcaaatttaccaaatactaactcc

SEQ ID NO: 28542 - DNA, 50 bp, synthetic construct
  source 1..50: mol_type = other DNA
ttaaacccccctctacaactaactaaaactcctaaaacaacttctttatc

SEQ ID NO: 28543 - DNA, 50 bp, synthetic construct
  source 1..50: mol_type = other DNA
tctacaactaactaaaactcctaaaacaacttctttatcraaatccactc

SEQ ID NO: 28544 - DNA, 50 bp, synthetic construct
  source 1..50: mol_type = other DNA
ctaacaatatccccaccaacraaaatttccttaacctctctatttatttc

SEQ ID NO: 28545 - DNA, 50 bp, synthetic construct
  source 1..50: mol_type = other DNA
aaatttccttaacctctctatttatttcrctttatttctaaccctaccac

SEQ ID NO: 28546 - DNA, 50 bp, synthetic construct
  source 1..50: mol_type = other DNA
ctatttatttcrctttatttctaaccctaccacratataacccaaacctc

SEQ ID NO: 28547 - DNA, 50 bp, synthetic construct
  source 1..50: mol_type = other DNA
aacactaaaaaacaaaaacaacaacaataaccttaaacctaaaaacaacc

SEQ ID NO: 28548 - DNA, 50 bp, synthetic construct
  source 1..50: mol_type = other DNA
tctttatttataaaataaaaacattaaactacaattcctaaactccttcc

SEQ ID NO: 28549 - DNA, 50 bp, synthetic construct
  source 1..50: mol_type = other DNA
ttcattttctcaaaattatccatcaccactaaaaacaaattacaataatc

SEQ ID NO: 28550 - DNA, 50 bp, synthetic construct
  source 1..50: mol_type = other DNA
attataaaaactacactcactccttccaactcccaatactataactaccc

SEQ ID NO: 28551 - DNA, 50 bp, synthetic construct
  source 1..50: mol_type = other DNA
tttaaactttcactttctacttaaataataacaaaataaaccttaatttc

SEQ ID NO: 28552 - DNA, 50 bp, synthetic construct
  source 1..50: mol_type = other DNA
aaaaaaactcaaaaaaattatactttacccaaaccacrtaataaaaaatc

SEQ ID NO: 28553 - DNA, 50 bp, synthetic construct
  source 1..50: mol_type = other DNA
aacaaaataactaaaaaaaactcaaaaaaattatactttacccaaaccac

SEQ ID NO: 28554 - DNA, 50 bp, synthetic construct
  source 1..50: mol_type = other DNA
ttcttccataccaaataaacrttaataaattactattatccaatcattac

SEQ ID NO: 28555 - DNA, 50 bp, synthetic construct
  source 1..50: mol_type = other DNA
actcractatatcccctaaaaaaccaaaaactaacataaaaatatcratc

SEQ ID NO: 28556 - DNA, 50 bp, synthetic construct
  source 1..50: mol_type = other DNA
raccactcractatatcccctaaaaaaccaaaaactaacataaaaatatc

SEQ ID NO: 28557 - DNA, 50 bp, synthetic construct
  source 1..50: mol_type = other DNA
ratactcctatactaacctctaactcctcaaaaaacacaaccraataatc

SEQ ID NO: 28558 - DNA, 50 bp, synthetic construct
  source 1..50: mol_type = other DNA
ctctcraattactcaaactaacctctcttcaactaaaacratatcraatc

SEQ ID NO: 28559 - DNA, 50 bp, synthetic construct
  source 1..50: mol_type = other DNA
ractaattacctaaaaacaacraacacacatataacaaaatataaaaccc

SEQ ID NO: 28560 - DNA, 50 bp, synthetic construct
  source 1..50: mol_type = other DNA
ataaacctaatacrcctacrcraattttatactctactatatatatatcc

SEQ ID NO: 28561 - DNA, 50 bp, synthetic construct
  source 1..50: mol_type = other DNA
cctctaaaacctaaatatataactaccctaaaaaaaaatacttataactc

SEQ ID NO: 28562 - DNA, 50 bp, synthetic construct
  source 1..50: mol_type = other DNA
tctctaaaaaacacacaatcttatatttaaatcrtccrtataaccccaac

SEQ ID NO: 28563 - DNA, 50 bp, synthetic construct
  source 1..50: mol_type = other DNA
ccraactatcccaattatcctataattctaactattcattctttaaactc

SEQ ID NO: 28564 - DNA, 50 bp, synthetic construct
  source 1..50: mol_type = other DNA
tcraactcaaaaaataaacaaccaaaaccacaaaacaactaaaacaatcc

SEQ ID NO: 28565 - DNA, 50 bp, synthetic construct
  source 1..50: mol_type = other DNA
aaataaacaaccaaaaccacaaaacaactaaaacaatccraaactacccc

SEQ ID NO: 28566 - DNA, 50 bp, synthetic construct
  source 1..50: mol_type = other DNA
ccracccctcctacaaacattatttactaattaactttttaccttctaac

SEQ ID NO: 28567 - DNA, 50 bp, synthetic construct
  source 1..50: mol_type = other DNA
acaaacattatttactaattaactttttaccttctaacrtccatcttccc

SEQ ID NO: 28568 - DNA, 50 bp, synthetic construct
  source 1..50: mol_type = other DNA
aaccrcatccctaaaacaaaaatcattctccaaaatacaatcaacttacc

SEQ ID NO: 28569 - DNA, 50 bp, synthetic construct
  source 1..50: mol_type = other DNA
ccccaaaaatacratcctaaaaaatctatacatcaactcctccctaaacc

SEQ ID NO: 28570 - DNA, 50 bp, synthetic construct
  source 1..50: mol_type = other DNA
tcctaaaaaatctatacatcaactcctccctaaaccracatcttaaaaac

SEQ ID NO: 28571 - DNA, 50 bp, synthetic construct
  source 1..50: mol_type = other DNA
aaaaatctatacatcaactcctccctaaaccracatcttaaaaacrtatc

SEQ ID NO: 28572 - DNA, 50 bp, synthetic construct
  source 1..50: mol_type = other DNA
taaatatcaaaacaattctatcactacraacrctactaccacaaaaaatc

SEQ ID NO: 28573 - DNA, 50 bp, synthetic construct
  source 1..50: mol_type = other DNA
aaccttaaaataaaaatcataaatatcaaaacaattctatcactacraac

SEQ ID NO: 28574 - DNA, 50 bp, synthetic construct
  source 1..50: mol_type = other DNA
aaaaaaccttaaaataaaaatcataaatatcaaaacaattctatcactac

SEQ ID NO: 28575 - DNA, 50 bp, synthetic construct
  source 1..50: mol_type = other DNA
cattctaaactaatcctaccttcctatcatttctacaaaccacctcatac

SEQ ID NO: 28576 - DNA, 50 bp, synthetic construct
  source 1..50: mol_type = other DNA
tctacaaaccacctcatacrtttccaaaaaacccctctttaaataaaacc

SEQ ID NO: 28577 - DNA, 50 bp, synthetic construct
  source 1..50: mol_type = other DNA
aaaccraccraaactaacaataactaaacrtactaaacttaccaataaac

SEQ ID NO: 28578 - DNA, 50 bp, synthetic construct
  source 1..50: mol_type = other DNA
aataactaaacrtactaaacttaccaataaacrtatctctacccactaac

SEQ ID NO: 28579 - DNA, 50 bp, synthetic construct
  source 1..50: mol_type = other DNA
taaaaatacttaaccacrcaaaataaatacatcctaatcccacaaatttc

SEQ ID NO: 28580 - DNA, 50 bp, synthetic construct
  source 1..50: mol_type = other DNA
cttataacttccccraaaatttacaaaacataaaaatatacaccaactcc

SEQ ID NO: 28581 - DNA, 50 bp, synthetic construct
  source 1..50: mol_type = other DNA
tctacaaacctccraaaaaaccacaaaaaaaataaacaacaaataacatc

SEQ ID NO: 28582 - DNA, 50 bp, synthetic construct
  source 1..50: mol_type = other DNA
catcrtattatcttctaaaccccaaattaatattaaaaataatcccaaac

SEQ ID NO: 28583 - DNA, 50 bp, synthetic construct
  source 1..50: mol_type = other DNA
rataaattttactaaacaattctaaacacataaacrcaataacaaaaacc

SEQ ID NO: 28584 - DNA, 50 bp, synthetic construct
  source 1..50: mol_type = other DNA
raacctcrtacacctatatccttaaacacctaataattatttccttaaac

SEQ ID NO: 28585 - DNA, 50 bp, synthetic construct
  source 1..50: mol_type = other DNA
tcrttttacaactataactatttataattacaattactcttacraacctc

SEQ ID NO: 28586 - DNA, 50 bp, synthetic construct
  source 1..50: mol_type = other DNA
rcccaaaaaaataatcaccaaatacccaaaaatacaaatatacraaaccc

SEQ ID NO: 28587 - DNA, 50 bp, synthetic construct
  source 1..50: mol_type = other DNA
ttacaaccrctaaaccaacrtaaacattaatatatctttcaatttctatc

SEQ ID NO: 28588 - DNA, 50 bp, synthetic construct
  source 1..50: mol_type = other DNA
ttactactttctaaaataatcttaacactaatttacaaaactttacaacc

SEQ ID NO: 28589 - DNA, 50 bp, synthetic construct
  source 1..50: mol_type = other DNA
aaaaaaatacrccaacaatacaaaaaaactaaacccaaaaccaaaattcc

SEQ ID NO: 28590 - DNA, 50 bp, synthetic construct
  source 1..50: mol_type = other DNA
aaaatacctatacaaaaccccraaaaccraaaacccaataataaactccc

SEQ ID NO: 28591 - DNA, 50 bp, synthetic construct
  source 1..50: mol_type = other DNA
ctacraatacctaaataaaaaaactataacaaatattacaaatcttcacc

SEQ ID NO: 28592 - DNA, 50 bp, synthetic construct
  source 1..50: mol_type = other DNA
aaataaaaaaactataacaaatattacaaatcttcaccrcrtcraaatac

SEQ ID NO: 28593 - DNA, 50 bp, synthetic construct
  source 1..50: mol_type = other DNA
aaaactaaaaccaaaaccatctaaacacaaaaattacraaacraacaaac

SEQ ID NO: 28594 - DNA, 50 bp, synthetic construct
  source 1..50: mol_type = other DNA
ctatatctaaaaaaccaaaaatcaaacactaacatataatctctctaatc

SEQ ID NO: 28595 - DNA, 50 bp, synthetic construct
  source 1..50: mol_type = other DNA
ctaatcraaatactaccctaaaaaaacctatcctaaataaataaacaccc

SEQ ID NO: 28596 - DNA, 50 bp, synthetic construct
  source 1..50: mol_type = other DNA
ataaaaattaccttaaaatctacracactctaaaaaaatcactaaaaacc

SEQ ID NO: 28597 - DNA, 50 bp, synthetic construct
  source 1..50: mol_type = other DNA
ataataaaactcctccaaattcctccrctacctataataaacaacttctc

SEQ ID NO: 28598 - DNA, 50 bp, synthetic construct
  source 1..50: mol_type = other DNA
craaactaatataacaaaaactatataataaaactcctccaaattcctcc

SEQ ID NO: 28599 - DNA, 50 bp, synthetic construct
  source 1..50: mol_type = other DNA
craaaaaacctaaaaaaatctcaccacacaacccctaccacattaacttc

SEQ ID NO: 28600 - DNA, 50 bp, synthetic construct
  source 1..50: mol_type = other DNA
taaaaaaacttcttattaactacctaacctactaaaaccctcaaaaaaac

SEQ ID NO: 28601 - DNA, 50 bp, synthetic construct
  source 1..50: mol_type = other DNA
ctatacctttctcaattcrataacaatactaacaccaccttctacaaaac

SEQ ID NO: 28602 - DNA, 50 bp, synthetic construct
  source 1..50: mol_type = other DNA
actttataatttaacttaccctttatctacccttaatatctaaaaaaaac

SEQ ID NO: 28603 - DNA, 50 bp, synthetic construct
  source 1..50: mol_type = other DNA
atacataaaaaaacccactaaaatcacctattatcccaaaccctaaaacc

SEQ ID NO: 28604 - DNA, 50 bp, synthetic construct
  source 1..50: mol_type = other DNA
ctaaattactaatttctatttaaaataaacctatcccaaaaacctaaccc

SEQ ID NO: 28605 - DNA, 50 bp, synthetic construct
  source 1..50: mol_type = other DNA
accctaaataaaaatcaataactcaaaacacaaacttccccaacccaaac

SEQ ID NO: 28606 - DNA, 50 bp, synthetic construct
  source 1..50: mol_type = other DNA
actactacttataactacaacrattctccrcttccttttcaaaaaaactc

SEQ ID NO: 28607 - DNA, 50 bp, synthetic construct
  source 1..50: mol_type = other DNA
taatcraactcrtaaccaaaaactactacttataactacaacrattctcc

SEQ ID NO: 28608 - DNA, 50 bp, synthetic construct
  source 1..50: mol_type = other DNA
tcacttaataatcraactcrtaaccaaaaactactacttataactacaac

SEQ ID NO: 28609 - DNA, 50 bp, synthetic construct
  source 1..50: mol_type = other DNA
aactatacctcccaaatacttatacccatatatattaaaaacrcactcac

SEQ ID NO: 28610 - DNA, 50 bp, synthetic construct
  source 1..50: mol_type = other DNA
aactcactactaacaaaaacaacaataataatatcaccaattcctctacc

SEQ ID NO: 28611 - DNA, 50 bp, synthetic construct
  source 1..50: mol_type = other DNA
raaaataaaacctcacaataatatactcratactaaactaactaactcrc

SEQ ID NO: 28612 - DNA, 50 bp, synthetic construct
  source 1..50: mol_type = other DNA
acraaaataaaacctcacaataatatactcratactaaactaactaactc

SEQ ID NO: 28613 - DNA, 50 bp, synthetic construct
  source 1..50: mol_type = other DNA
atacctcaatcaaccacttattttaaacaaacttctacaacacctactcc

SEQ ID NO: 28614 - DNA, 50 bp, synthetic construct
  source 1..50: mol_type = other DNA
aaaaaaataattccaccrcctaattctcaaaaatttaaattcaacaaatc

SEQ ID NO: 28615 - DNA, 50 bp, synthetic construct
  source 1..50: mol_type = other DNA
taaacaaataactctaaaacctaataaaacaatacctatcaaatatacac

SEQ ID NO: 28616 - DNA, 50 bp, synthetic construct
  source 1..50: mol_type = other DNA
aatatacacrtacaaaaaattcaataaacacctaacaaaaatacaaattc

SEQ ID NO: 28617 - DNA, 50 bp, synthetic construct
  source 1..50: mol_type = other DNA
atttcactcctaactctaccattctaactataacatcctaaacacatcac

SEQ ID NO: 28618 - DNA, 50 bp, synthetic construct
  source 1..50: mol_type = other DNA
taactctaccattctaactataacatcctaaacacatcacrtaaataaac

SEQ ID NO: 28619 - DNA, 50 bp, synthetic construct
  source 1..50: mol_type = other DNA
ccattctaactataacatcctaaacacatcacrtaaataaacraaaaatc

SEQ ID NO: 28620 - DNA, 50 bp, synthetic construct
  source 1..50: mol_type = other DNA
ttttcaaatttactctcacaaataaaaatttaaacctcatccctcctacc

SEQ ID NO: 28621 - DNA, 50 bp, synthetic construct
  source 1..50: mol_type = other DNA
ccctaatcacccccctttttttaatctatttatttccaaacaataccacc

SEQ ID NO: 28622 - DNA, 50 bp, synthetic construct
  source 1..50: mol_type = other DNA
acctcatcaaaaaaatataacttacttaaatcattccatcccatctcaac

SEQ ID NO: 28623 - DNA, 50 bp, synthetic construct
  source 1..50: mol_type = other DNA
ccccaaacataaataaaaactacaacctcttaaataaacrccaataccac

SEQ ID NO: 28624 - DNA, 50 bp, synthetic construct
  source 1..50: mol_type = other DNA
ttctttcttcctaaaatacttaaaaaacaaacaaacaacaaataaaaaac

SEQ ID NO: 28625 - DNA, 50 bp, synthetic construct
  source 1..50: mol_type = other DNA
atactaattaaaactctcatcaaaaaacaacraacaaaaacaaaaaaccc

SEQ ID NO: 28626 - DNA, 50 bp, synthetic construct
  source 1..50: mol_type = other DNA
tttatacracraaaactcacrcaaactctaaacacatcattaaataatac

SEQ ID NO: 28627 - DNA, 50 bp, synthetic construct
  source 1..50: mol_type = other DNA
caccttcaacrcattactcaataatatactcaaaacctacrtaaactccc

SEQ ID NO: 28628 - DNA, 50 bp, synthetic construct
  source 1..50: mol_type = other DNA
tatataaaaacatacaaaaacaaaaacctctcrcraaacactaaaaatac

SEQ ID NO: 28629 - DNA, 50 bp, synthetic construct
  source 1..50: mol_type = other DNA
aaaactccacctaaaatatataaaaacatacaaaaacaaaaacctctcrc

SEQ ID NO: 28630 - DNA, 50 bp, synthetic construct
  source 1..50: mol_type = other DNA
ataaaactccacctaaaatatataaaaacatacaaaaacaaaaacctctc

SEQ ID NO: 28631 - DNA, 50 bp, synthetic construct
  source 1..50: mol_type = other DNA
cccacacatcttaaataaaactttattcctttctctttttattcaatatc

SEQ ID NO: 28632 - DNA, 50 bp, synthetic construct
  source 1..50: mol_type = other DNA
accaaacttatactaaatcctaaactaaaacaataaaaataacaacaaac

SEQ ID NO: 28633 - DNA, 50 bp, synthetic construct
  source 1..50: mol_type = other DNA
tcataacracaaaaaatacccaaaacaaaacctctccatactaaaaactc

SEQ ID NO: 28634 - DNA, 50 bp, synthetic construct
  source 1..50: mol_type = other DNA
ttacaacraaccctcaacataaaaaaaccctatcctaaacaccttttatc

SEQ ID NO: 28635 - DNA, 50 bp, synthetic construct
  source 1..50: mol_type = other DNA
aataaacracaaaaaaatcaaaaccccraccttataatacaactctaaac

SEQ ID NO: 28636 - DNA, 50 bp, synthetic construct
  source 1..50: mol_type = other DNA
ctaactcrcccaaaattacaccacaaaaccraaactttaacttctctatc

SEQ ID NO: 28637 - DNA, 50 bp, synthetic construct
  source 1..50: mol_type = other DNA
aaaactaaaaacaaaacccaaaacaataacactaatataccatactcaac

SEQ ID NO: 28638 - DNA, 50 bp, synthetic construct
  source 1..50: mol_type = other DNA
aaaacataaatataataaaatcrtaacatataacaataacatctaacctc

SEQ ID NO: 28639 - DNA, 50 bp, synthetic construct
  source 1..50: mol_type = other DNA
acataaatataataaaatcrtaacatataacaataacatctaacctcrac

SEQ ID NO: 28640 - DNA, 50 bp, synthetic construct
  source 1..50: mol_type = other DNA
aaacaaaaaaaaacatttcctaaaaaaacaaaccatccaaaataactacc

SEQ ID NO: 28641 - DNA, 50 bp, synthetic construct
  source 1..50: mol_type = other DNA
caaccaccttaaataacctatttttccaaaaaatattctcttctaccccc

SEQ ID NO: 28642 - DNA, 50 bp, synthetic construct
  source 1..50: mol_type = other DNA
cccratactatcttcctcttccacaacatacaaaacaactctttactaac

SEQ ID NO: 28643 - DNA, 50 bp, synthetic construct
  source 1..50: mol_type = other DNA
aaaaaatatatctaaccaaatcactaacacaaacaaatacraaacaactc

SEQ ID NO: 28644 - DNA, 50 bp, synthetic construct
  source 1..50: mol_type = other DNA
tccacaacatacaaaacaactctttactaacrtaaaaaccraactattcc

SEQ ID NO: 28645 - DNA, 50 bp, synthetic construct
  source 1..50: mol_type = other DNA
accaacrctaaacaactcaaatacaaaaaacccaaacatcaaaaaacctc

SEQ ID NO: 28646 - DNA, 50 bp, synthetic construct
  source 1..50: mol_type = other DNA
taaaacaaatcccacctctctaaaaataacaattcacattttccactaac

SEQ ID NO: 28647 - DNA, 50 bp, synthetic construct
  source 1..50: mol_type = other DNA
taactactaaactaacaaatatcaccaactaactcctatcttaaaacrac

SEQ ID NO: 28648 - DNA, 50 bp, synthetic construct
  source 1..50: mol_type = other DNA
acataactactaaactaacaaatatcaccaactaactcctatcttaaaac

SEQ ID NO: 28649 - DNA, 50 bp, synthetic construct
  source 1..50: mol_type = other DNA
tcctactaacacaacactaaaaacaaaacaaaacaaaccctaaataaaac

SEQ ID NO: 28650 - DNA, 50 bp, synthetic construct
  source 1..50: mol_type = other DNA
catctttacatctatatacctaaaaatccaaaaaatctttttccccaaac

SEQ ID NO: 28651 - DNA, 50 bp, synthetic construct
  source 1..50: mol_type = other DNA
aactaatacaataaaaccctatataccatcactcaattccrataataaac

SEQ ID NO: 28652 - DNA, 50 bp, synthetic construct
  source 1..50: mol_type = other DNA
taaacaaatacaaacataaataaaacaaaatcaatcctacrttcatcatc

SEQ ID NO: 28653 - DNA, 50 bp, synthetic construct
  source 1..50: mol_type = other DNA
aaaaaacacaactacaaacaactataaacacaacaaaaaactaacracac

SEQ ID NO: 28654 - DNA, 50 bp, synthetic construct
  source 1..50: mol_type = other DNA
aaaaacaaccrccaaaaaattctatataaacacccaaaactcraacactc

SEQ ID NO: 28655 - DNA, 50 bp, synthetic construct
  source 1..50: mol_type = other DNA
aaacactataatacaaacaaacaatacctataaattatataccactaacc

SEQ ID NO: 28656 - DNA, 50 bp, synthetic construct
  source 1..50: mol_type = other DNA
ataatacaaacaaacaatacctataaattatataccactaaccrttcacc

SEQ ID NO: 28657 - DNA, 50 bp, synthetic construct
  source 1..50: mol_type = other DNA
taacctcattaatcactatatctcataacaacraatttcctacccacatc

SEQ ID NO: 28658 - DNA, 50 bp, synthetic construct
  source 1..50: mol_type = other DNA
accaacraaatctataataatcccactaaatccattcccaatacttccac

SEQ ID NO: 28659 - DNA, 50 bp, synthetic construct
  source 1..50: mol_type = other DNA
acrcacaaaaatcctaactcaacaactccatactaacctaaaaaaactac

SEQ ID NO: 28660 - DNA, 50 bp, synthetic construct
  source 1..50: mol_type = other DNA
acttttatatctctaactcttactaacctaaatatatccaaatcctaccc

SEQ ID NO: 28661 - DNA, 50 bp, synthetic construct
  source 1..50: mol_type = other DNA
acatctaacrtataactcrataaatttctcaacatacaaaattaacaacc

SEQ ID NO: 28662 - DNA, 50 bp, synthetic construct
  source 1..50: mol_type = other DNA
aaataattccaatataaacctccttaataaaaatcracacaaaaaacctc

SEQ ID NO: 28663 - DNA, 50 bp, synthetic construct
  source 1..50: mol_type = other DNA
attcttaaaaaaccttaaatttttaaaccaaaacttacatccacacatac

SEQ ID NO: 28664 - DNA, 50 bp, synthetic construct
  source 1..50: mol_type = other DNA
aaaaacracaaataaaaaccccttcccattattaaaaatcraaaacraac

SEQ ID NO: 28665 - DNA, 50 bp, synthetic construct
  source 1..50: mol_type = other DNA
aacraaaaacracaaataaaaaccccttcccattattaaaaatcraaaac

SEQ ID NO: 28666 - DNA, 50 bp, synthetic construct
  source 1..50: mol_type = other DNA
ctacattataccaacraaataataaccattaaaaaaaacccaaactacac

SEQ ID NO: 28667 - DNA, 50 bp, synthetic construct
  source 1..50: mol_type = other DNA
atctataaaactaaatataacctcracrtcaaaaatataaactctaatcc

SEQ ID NO: 28668 - DNA, 50 bp, synthetic construct
  source 1..50: mol_type = other DNA
ataaaactaaatataacctcracrtcaaaaatataaactctaatccratc

SEQ ID NO: 28669 - DNA, 50 bp, synthetic construct
  source 1..50: mol_type = other DNA
aaataaatttatactaacctcccactatatatcactaaccaattatcrtc

SEQ ID NO: 28670 - DNA, 50 bp, synthetic construct
  source 1..50: mol_type = other DNA
acaaaattacccaaactaatctcraactataaaattcaaataatcctccc

SEQ ID NO: 28671 - DNA, 50 bp, synthetic construct
  source 1..50: mol_type = other DNA
rcaaaaaaaaccrcraaaaccaaacaaaaacaaatcctaaaaacctaatc

SEQ ID NO: 28672 - DNA, 50 bp, synthetic construct
  source 1..50: mol_type = other DNA
acrcccaacraaaaactctacaataaatccccttaatctcraaataaaac

SEQ ID NO: 28673 - DNA, 50 bp, synthetic construct
  source 1..50: mol_type = other DNA
ccaaacaaaaacaaatcctaaaaacctaatcracrtaaacrttttattcc

SEQ ID NO: 28674 - DNA, 50 bp, synthetic construct
  source 1..50: mol_type = other DNA
aaatcccaatcaataatcrcrattattaaatccatctaatattcraaaac

SEQ ID NO: 28675 - DNA, 50 bp, synthetic construct
  source 1..50: mol_type = other DNA
aactataaatttaaataataaatcaataaatcraaacratctccrcctcc

SEQ ID NO: 28676 - DNA, 50 bp, synthetic construct
  source 1..50: mol_type = other DNA
aaatttcacttaacatcctttcaataaaacaaatcccaatcaataatcrc

SEQ ID NO: 28677 - DNA, 50 bp, synthetic construct
  source 1..50: mol_type = other DNA
aaaaatttcacttaacatcctttcaataaaacaaatcccaatcaataatc

SEQ ID NO: 28678 - DNA, 50 bp, synthetic construct
  source 1..50: mol_type = other DNA
ttttactaaaaaaataccaaataaaacctcccactaacttctctataacc

SEQ ID NO: 28679 - DNA, 50 bp, synthetic construct
  source 1..50: mol_type = other DNA
tactaaaacractaaaatcttaataacctcatctatacaatatccataac

SEQ ID NO: 28680 - DNA, 50 bp, synthetic construct
  source 1..50: mol_type = other DNA
atactatacrtcataaacattatacaaataaaatcaccaaaaccccaacc

SEQ ID NO: 28681 - DNA, 50 bp, synthetic construct
  source 1..50: mol_type = other DNA
acaactaactctaacrtaaaattacctaaactctaatcctactaccccac

SEQ ID NO: 28682 - DNA, 50 bp, synthetic construct
  source 1..50: mol_type = other DNA
aaatactccttaaaacaaacaccaatacccaaaacaccacccaaaacctc

SEQ ID NO: 28683 - DNA, 50 bp, synthetic construct
  source 1..50: mol_type = other DNA
taaacactaatacttacctcaaaaaacaccccctctacaaaaaaacaaac

SEQ ID NO: 28684 - DNA, 50 bp, synthetic construct
  source 1..50: mol_type = other DNA
taaaaaactaatcccctctaacttataatcctacaaccrctaatacatcc

SEQ ID NO: 28685 - DNA, 50 bp, synthetic construct
  source 1..50: mol_type = other DNA
cccaataacctttaaaaaactaatcccctctaacttataatcctacaacc

SEQ ID NO: 28686 - DNA, 50 bp, synthetic construct
  source 1..50: mol_type = other DNA
tataaataaaataaataactacaaattttcctccctactacctccccaac

SEQ ID NO: 28687 - DNA, 50 bp, synthetic construct
  source 1..50: mol_type = other DNA
ttaaatcacttcctaacatttaaaaacccttaaattatctcraacctacc

SEQ ID NO: 28688 - DNA, 50 bp, synthetic construct
  source 1..50: mol_type = other DNA
aatactaaaaaataactcaataactaatatatttaatacaatacaatccc

SEQ ID NO: 28689 - DNA, 50 bp, synthetic construct
  source 1..50: mol_type = other DNA
acataataaaatcctattcctacaaaaaaaatttaaaaacttaaccaaac

SEQ ID NO: 28690 - DNA, 50 bp, synthetic construct
  source 1..50: mol_type = other DNA
ctacaataaactataattataccactacactataacctaaataacaaaac

SEQ ID NO: 28691 - DNA, 50 bp, synthetic construct
  source 1..50: mol_type = other DNA
taaaaacaatcraaaaataaaacatctaatcccaaacrctctcctccatc

SEQ ID NO: 28692 - DNA, 50 bp, synthetic construct
  source 1..50: mol_type = other DNA
tcccaaataccaataaaaacaatcraaaaataaaacatctaatcccaaac

SEQ ID NO: 28693 - DNA, 50 bp, synthetic construct
  source 1..50: mol_type = other DNA
cctctcractaccctcactaatacctaaaaataaaaccaaaacaaaaacc

SEQ ID NO: 28694 - DNA, 50 bp, synthetic construct
  source 1..50: mol_type = other DNA
acccaataaatccacaatcaatatatatatctattattacctatcaaaac

SEQ ID NO: 28695 - DNA, 50 bp, synthetic construct
  source 1..50: mol_type = other DNA
acaacataacaaaatcctatctctaaaaatataaaaacaattaaccaacc

SEQ ID NO: 28696 - DNA, 50 bp, synthetic construct
  source 1..50: mol_type = other DNA
taaaactcaaaaaaaacaacaataaaaatttattcatttaaaccaaacac

SEQ ID NO: 28697 - DNA, 50 bp, synthetic construct
  source 1..50: mol_type = other DNA
catttctaaattttcctcctaactaacacaataaaaacatacccaaccac

SEQ ID NO: 28698 - DNA, 50 bp, synthetic construct
  source 1..50: mol_type = other DNA
acttatctaaaaattacacaaacctacccttaataaatataaatcraaac

SEQ ID NO: 28699 - DNA, 50 bp, synthetic construct
  source 1..50: mol_type = other DNA
tctaaaaattacacaaacctacccttaataaatataaatcraaacrcccc

SEQ ID NO: 28700 - DNA, 50 bp, synthetic construct
  source 1..50: mol_type = other DNA
aacaacttcctccaaattacacaataaaaaactaaaaaataaccaactcc

SEQ ID NO: 28701 - DNA, 50 bp, synthetic construct
  source 1..50: mol_type = other DNA
tacccttaaaaaacrctcaataattactatttttctctacattttaaacc

SEQ ID NO: 28702 - DNA, 50 bp, synthetic construct
  source 1..50: mol_type = other DNA
crctcaataattactatttttctctacattttaaaccraatcccttctac

SEQ ID NO: 28703 - DNA, 50 bp, synthetic construct
  source 1..50: mol_type = other DNA
tacatttcttcctcaaaaatttattaaacacctatatataccaaaacatc

SEQ ID NO: 28704 - DNA, 50 bp, synthetic construct
  source 1..50: mol_type = other DNA
aaaatcaattacactaatatctctacaaaaaaacatctaaacatcacacc

SEQ ID NO: 28705 - DNA, 50 bp, synthetic construct
  source 1..50: mol_type = other DNA
taatacaattaatctttaaatactttcccrccctacataataaacatatc

SEQ ID NO: 28706 - DNA, 50 bp, synthetic construct
  source 1..50: mol_type = other DNA
actaacctatacttacccctcattctacatacacaattctatctaaatac

SEQ ID NO: 28707 - DNA, 50 bp, synthetic construct
  source 1..50: mol_type = other DNA
atctaaatacrtccrttcttacctttccaaaaaatactaatatctcttac

SEQ ID NO: 28708 - DNA, 50 bp, synthetic construct
  source 1..50: mol_type = other DNA
taaaaaatctaaaatctacrctaaaaccaacctaaatactataacctctc

SEQ ID NO: 28709 - DNA, 50 bp, synthetic construct
  source 1..50: mol_type = other DNA
aaatctaaaatctacrctaaaaccaacctaaatactataacctctcracc

SEQ ID NO: 28710 - DNA, 50 bp, synthetic construct
  source 1..50: mol_type = other DNA
ctaaatctatttctacctcttaaaaataataaccatctccctccaaactc

SEQ ID NO: 28711 - DNA, 50 bp, synthetic construct
  source 1..50: mol_type = other DNA
ttataaatttaacctaccttaacacataaatcaactaattaaaatcccac

SEQ ID NO: 28712 - DNA, 50 bp, synthetic construct
  source 1..50: mol_type = other DNA
taaacaaacccaaaaccaaaacaacacataaacacaaataaaaacttccc

SEQ ID NO: 28713 - DNA, 50 bp, synthetic construct
  source 1..50: mol_type = other DNA
aaaacaaaatcctaatcattattaaaacaaattcactactactaaaaacc

SEQ ID NO: 28714 - DNA, 50 bp, synthetic construct
  source 1..50: mol_type = other DNA
tcatcctaaaaaatcaaatttctttatcraaaatacaccaaaattctctc

SEQ ID NO: 28715 - DNA, 50 bp, synthetic construct
  source 1..50: mol_type = other DNA
aacrctcaaaaaaaaccctccctcatcctaaaaaatcaaatttctttatc

SEQ ID NO: 28716 - DNA, 50 bp, synthetic construct
  source 1..50: mol_type = other DNA
actaaacaaactacaaaacttcaaattaacaaaaaaaactattaacaaac

SEQ ID NO: 28717 - DNA, 50 bp, synthetic construct
  source 1..50: mol_type = other DNA
attccacaaccattaaccttttccaaaataacracctataaaaataaccc

SEQ ID NO: 28718 - DNA, 50 bp, synthetic construct
  source 1..50: mol_type = other DNA
taataaaaatcaaaaataattccacaaccattaaccttttccaaaataac

SEQ ID NO: 28719 - DNA, 50 bp, synthetic construct
  source 1..50: mol_type = other DNA
taactataaaatcattcttaactcctattaaccttcctattctctctccc

SEQ ID NO: 28720 - DNA, 50 bp, synthetic construct
  source 1..50: mol_type = other DNA
ttttactttaaaaacaaaatctcattctataactaaaatacaatcrcacc

SEQ ID NO: 28721 - DNA, 50 bp, synthetic construct
  source 1..50: mol_type = other DNA
ctcttttttactttaaaaacaaaatctcattctataactaaaatacaatc

SEQ ID NO: 28722 - DNA, 50 bp, synthetic construct
  source 1..50: mol_type = other DNA
ccacaacaaacccacaaaaaaactaataaatactattaataaaaaaaacc

SEQ ID NO: 28723 - DNA, 50 bp, synthetic construct
  source 1..50: mol_type = other DNA
caaaccaaaccaaaaccccaaaataacccraaatctacctaattaactcc

SEQ ID NO: 28724 - DNA, 50 bp, synthetic construct
  source 1..50: mol_type = other DNA
aaccccactaaaataataaaacaaaccaaaccaaaaccccaaaataaccc

SEQ ID NO: 28725 - DNA, 50 bp, synthetic construct
  source 1..50: mol_type = other DNA
aaaacaataacctacctaaaactaaaatttccaaaaataacaaccacrtc

SEQ ID NO: 28726 - DNA, 50 bp, synthetic construct
  source 1..50: mol_type = other DNA
taactaactaattacrccacaaaaactaaaatttcaaaccaatttctatc

SEQ ID NO: 28727 - DNA, 50 bp, synthetic construct
  source 1..50: mol_type = other DNA
aaaatccaaaaacaacaaaaacctcraataaaaactaaaactttaaaacc

SEQ ID NO: 28728 - DNA, 50 bp, synthetic construct
  source 1..50: mol_type = other DNA
aatatcaaaaaccaacaacaacctaaaaacracccaacaaaactcttccc

SEQ ID NO: 28729 - DNA, 50 bp, synthetic construct
  source 1..50: mol_type = other DNA
attaaataattaaaccttaaaatatcaaaaaccaacaacaacctaaaaac

SEQ ID NO: 28730 - DNA, 50 bp, synthetic construct
  source 1..50: mol_type = other DNA
taacaaaaccaaaatcacaaaattaaaaaacaacaaaatcaataaaaacc

SEQ ID NO: 28731 - DNA, 50 bp, synthetic construct
  source 1..50: mol_type = other DNA
ataattactaacccttaaaatacaatccccaaaaccctaaaactttatcc

SEQ ID NO: 28732 - DNA, 50 bp, synthetic construct
  source 1..50: mol_type = other DNA
aaattttaaaaactacatttcaaaaatcaacaaccacaatccttaaacac

SEQ ID NO: 28733 - DNA, 50 bp, synthetic construct
  source 1..50: mol_type = other DNA
aaacraaaatttactctattccccaaactaaaaaacaataacrtaatatc

SEQ ID NO: 28734 - DNA, 50 bp, synthetic construct
  source 1..50: mol_type = other DNA
tttttttaaaacraaaatttactctattccccaaactaaaaaacaataac

SEQ ID NO: 28735 - DNA, 50 bp, synthetic construct
  source 1..50: mol_type = other DNA
taaaacaaacataaacaaaatactataataaaaaatcacaaaaaaaaccc

SEQ ID NO: 28736 - DNA, 50 bp, synthetic construct
  source 1..50: mol_type = other DNA
caatatcccaactataatactatattacaaatttctacaatcttaccctc

SEQ ID NO: 28737 - DNA, 50 bp, synthetic construct
  source 1..50: mol_type = other DNA
cactaaaccacacatacrtacrcaaacacaaaaataaatacaaataaatc

SEQ ID NO: 28738 - DNA, 50 bp, synthetic construct
  source 1..50: mol_type = other DNA
caaacctataccrtaataaaattacataacactaaaccacacatacrtac

SEQ ID NO: 28739 - DNA, 50 bp, synthetic construct
  source 1..50: mol_type = other DNA
tacacaaacctataccrtaataaaattacataacactaaaccacacatac

SEQ ID NO: 28740 - DNA, 50 bp, synthetic construct
  source 1..50: mol_type = other DNA
tataataataaaactatactaaatcctaactacatacacaaacctatacc

SEQ ID NO: 28741 - DNA, 50 bp, synthetic construct
  source 1..50: mol_type = other DNA
tccatttccataattatataatttcaaatatattacataaataaaatcac

SEQ ID NO: 28742 - DNA, 50 bp, synthetic construct
  source 1..50: mol_type = other DNA
tttcattaatcttttcraaaaaccaatttttaatttcattaattttcctc

SEQ ID NO: 28743 - DNA, 50 bp, synthetic construct
  source 1..50: mol_type = other DNA
taacttaaacctaaaaattaaaaactacaataaactataatcrcaccacc

SEQ ID NO: 28744 - DNA, 50 bp, synthetic construct
  source 1..50: mol_type = other DNA
cacracccctatttatattttactaattacctcaataataccctttatac

SEQ ID NO: 28745 - DNA, 50 bp, synthetic construct
  source 1..50: mol_type = other DNA
ccatcraaatcaaaaaattaacaataatacatcaccactatctcatccac

SEQ ID NO: 28746 - DNA, 50 bp, synthetic construct
  source 1..50: mol_type = other DNA
acatatcaaaaaaacaaaaacattctctacataatcacaatacaaccatc

SEQ ID NO: 28747 - DNA, 50 bp, synthetic construct
  source 1..50: mol_type = other DNA
atacaaaatcaataaatattcaataaaaacaatacttaaaacacccatac

SEQ ID NO: 28748 - DNA, 50 bp, synthetic construct
  source 1..50: mol_type = other DNA
ctatataatcatctcacctatacaatcaacatttaaaataaaaacraccc

SEQ ID NO: 28749 - DNA, 50 bp, synthetic construct
  source 1..50: mol_type = other DNA
ctaaacctctactaatcacccaccctattccccaaaaatcacaaaaaaac

SEQ ID NO: 28750 - DNA, 50 bp, synthetic construct
  source 1..50: mol_type = other DNA
actaaaaaacacaaatataacccacaaccctacctttacaaaaaaaaaac

SEQ ID NO: 28751 - DNA, 50 bp, synthetic construct
  source 1..50: mol_type = other DNA
aataaccctattattaaaaaaaataatactaactcaaaaaacaataaccc

SEQ ID NO: 28752 - DNA, 50 bp, synthetic construct
  source 1..50: mol_type = other DNA
aaaaaaaattaataaacraatcaactatataaaaacttcctccttaaccc

SEQ ID NO: 28753 - DNA, 50 bp, synthetic construct
  source 1..50: mol_type = other DNA
taaacctaaaatataacctctactctcttcattaaaaaaaattaataaac

SEQ ID NO: 28754 - DNA, 50 bp, synthetic construct
  source 1..50: mol_type = other DNA
ttattttaaaacaaaatctcactctatcacccaaaataaaacacaataac

SEQ ID NO: 28755 - DNA, 50 bp, synthetic construct
  source 1..50: mol_type = other DNA
ttaaaaatatcaatacatatacttaaaaaaaaactccactaaccaaatac

SEQ ID NO: 28756 - DNA, 50 bp, synthetic construct
  source 1..50: mol_type = other DNA
ataaacracccctaccattactaacctaataatttcctataaatcctctc

SEQ ID NO: 28757 - DNA, 50 bp, synthetic construct
  source 1..50: mol_type = other DNA
taaaacctaaaatcccacaaaactacaatccaatacctactataccactc

SEQ ID NO: 28758 - DNA, 50 bp, synthetic construct
  source 1..50: mol_type = other DNA
ctttatacctcaatttcctcatctataacacaaaaataacaaaaacaccc

SEQ ID NO: 28759 - DNA, 50 bp, synthetic construct
  source 1..50: mol_type = other DNA
aaaaaaacattataacccractaacaaaaaacctattcctaaacctactc

SEQ ID NO: 28760 - DNA, 50 bp, synthetic construct
  source 1..50: mol_type = other DNA
taccaacaaaacataaaaaaatcataccttcttccaccttcraaaaatac

SEQ ID NO: 28761 - DNA, 50 bp, synthetic construct
  source 1..50: mol_type = other DNA
crataacraaaaacrtctctatacaaatcaaattatctaaactctaaatc

SEQ ID NO: 28762 - DNA, 50 bp, synthetic construct
  source 1..50: mol_type = other DNA
rataactaactcaaaaaattactaaaactacrataaacaaaattacctac

SEQ ID NO: 28763 - DNA, 50 bp, synthetic construct
  source 1..50: mol_type = other DNA
cctccaaatatctaaccaacaataaatctaaacccaactctctaaaacac

SEQ ID NO: 28764 - DNA, 50 bp, synthetic construct
  source 1..50: mol_type = other DNA
aataaaaaccraaacraaaactacaactaccccatactaaaaaacatttc

SEQ ID NO: 28765 - DNA, 50 bp, synthetic construct
  source 1..50: mol_type = other DNA
tatcaaaaatttatacatacrataaaacaaaataacacccaaaccaatac

SEQ ID NO: 28766 - DNA, 50 bp, synthetic construct
  source 1..50: mol_type = other DNA
acccaaatactctaaaaaactacttaaaaaatataaactctacraactac

SEQ ID NO: 28767 - DNA, 50 bp, synthetic construct
  source 1..50: mol_type = other DNA
actccaaacccaaatactctaaaaaactacttaaaaaatataaactctac

SEQ ID NO: 28768 - DNA, 50 bp, synthetic construct
  source 1..50: mol_type = other DNA
cctatcataaccaatccttactataactactactataaaaacaaatcctc

SEQ ID NO: 28769 - DNA, 50 bp, synthetic construct
  source 1..50: mol_type = other DNA
ataataaaaatttactcttctctaaaatacccraaaataccaaaaaaacc

SEQ ID NO: 28770 - DNA, 50 bp, synthetic construct
  source 1..50: mol_type = other DNA
tacacctaaaaaaccctcatatatataaatcccacraaaacaaaattcac

SEQ ID NO: 28771 - DNA, 50 bp, synthetic construct
  source 1..50: mol_type = other DNA
aacaacaaaaaaacatacacctaaaaaaccctcatatatataaatcccac

SEQ ID NO: 28772 - DNA, 50 bp, synthetic construct
  source 1..50: mol_type = other DNA
aacccaatactaaacraaatccaatctctacaacccaatattaaaccaac

SEQ ID NO: 28773 - DNA, 50 bp, synthetic construct
  source 1..50: mol_type = other DNA
attaaccccactaacrttaacctaacactaaactacaaaaactaaacccc

SEQ ID NO: 28774 - DNA, 50 bp, synthetic construct
  source 1..50: mol_type = other DNA
aacattaaactaaactcrccacatcccataaaaataaaaaacactaaatc

SEQ ID NO: 28775 - DNA, 50 bp, synthetic construct
  source 1..50: mol_type = other DNA
craaatacccaaaaacctcaattttcctacaaaaacctaccrtaaaacac

SEQ ID NO: 28776 - DNA, 50 bp, synthetic construct
  source 1..50: mol_type = other DNA
ttcacaaatcraaatacccaaaaacctcaattttcctacaaaaacctacc

SEQ ID NO: 28777 - DNA, 50 bp, synthetic construct
  source 1..50: mol_type = other DNA
atctactacaaaaactataaaaaaaacaaccaacaactcrttcacaaatc

SEQ ID NO: 28778 - DNA, 50 bp, synthetic construct
  source 1..50: mol_type = other DNA
caacaaaaacaatctactacaaaaactataaaaaaaacaaccaacaactc

SEQ ID NO: 28779 - DNA, 50 bp, synthetic construct
  source 1..50: mol_type = other DNA
ccctattataactacccaaaacatattttacccaccaaatcataacccac

SEQ ID NO: 28780 - DNA, 50 bp, synthetic construct
  source 1..50: mol_type = other DNA
ccracccacaaaataactaaacatatttattctaaaaattccatacatac

SEQ ID NO: 28781 - DNA, 50 bp, synthetic construct
  source 1..50: mol_type = other DNA
aaccaacatacaaaataactaataccttatacctactatctaaattaccc

SEQ ID NO: 28782 - DNA, 50 bp, synthetic construct
  source 1..50: mol_type = other DNA
aataataaaactaaaacacacaaacraacattactcaacccaaaattccc

SEQ ID NO: 28783 - DNA, 50 bp, synthetic construct
  source 1..50: mol_type = other DNA
ctctcctcaacaaacacaaataacaaataataaaactaaaacacacaaac

SEQ ID NO: 28784 - DNA, 50 bp, synthetic construct
  source 1..50: mol_type = other DNA
tttaaattccccatacaaaaattcaaataattaatttaaaaaataatccc

SEQ ID NO: 28785 - DNA, 50 bp, synthetic construct
  source 1..50: mol_type = other DNA
ttattcctttactttcctcattaacttactttcactaactctataaactc

SEQ ID NO: 28786 - DNA, 50 bp, synthetic construct
  source 1..50: mol_type = other DNA
tcttctttactacaacctattttatcaacaaaatctttataacttatatc

SEQ ID NO: 28787 - DNA, 50 bp, synthetic construct
  source 1..50: mol_type = other DNA
ttactacaacctattttatcaacaaaatctttataacttatatcrataac

SEQ ID NO: 28788 - DNA, 50 bp, synthetic construct
  source 1..50: mol_type = other DNA
aacaaaaaacccaacaaatatttaaactcccaccacraaaaaaacctaac

SEQ ID NO: 28789 - DNA, 50 bp, synthetic construct
  source 1..50: mol_type = other DNA
actaaaactctaatttaaaacctaactataccactcrataacaacacatc

SEQ ID NO: 28790 - DNA, 50 bp, synthetic construct
  source 1..50: mol_type = other DNA
atacaaaacrattaactaaaactctaatttaaaacctaactataccactc

SEQ ID NO: 28791 - DNA, 50 bp, synthetic construct
  source 1..50: mol_type = other DNA
actattaccraataacataaccaaacttcaaaccaaaatcctaactaacc

SEQ ID NO: 28792 - DNA, 50 bp, synthetic construct
  source 1..50: mol_type = other DNA
atcacacaacttaaaattaaaaaaactaaacctaaccaaacaaaataaac

SEQ ID NO: 28793 - DNA, 50 bp, synthetic construct
  source 1..50: mol_type = other DNA
aacctaaatttcctccttaataaaaaacacacaaaaacaatactctacac

SEQ ID NO: 28794 - DNA, 50 bp, synthetic construct
  source 1..50: mol_type = other DNA
acaaaaacaatactctacacrccacaataataaaataaacaacaaataac

SEQ ID NO: 28795 - DNA, 50 bp, synthetic construct
  source 1..50: mol_type = other DNA
accaaataacaccaaactactctcaaacttaacttacctataataataac

SEQ ID NO: 28796 - DNA, 50 bp, synthetic construct
  source 1..50: mol_type = other DNA
caccaaatcccacctatttccacracrtttattaacaaatcaaaaacacc

SEQ ID NO: 28797 - DNA, 50 bp, synthetic construct
  source 1..50: mol_type = other DNA
atcttcaaacacataacctaacccctctaaacaccatcatctaactacac

SEQ ID NO: 28798 - DNA, 50 bp, synthetic construct
  source 1..50: mol_type = other DNA
acaatttcaacctccaaaccttttctcatacctttccctctaacaaacac

SEQ ID NO: 28799 - DNA, 50 bp, synthetic construct
  source 1..50: mol_type = other DNA
tcaattctctaacaattaaatcaattctctaaaactacraataaaaaaac

SEQ ID NO: 28800 - DNA, 50 bp, synthetic construct
  source 1..50: mol_type = other DNA
ctaaaaattaaatcaattctctaacaattaaatcaattctctaaaactac

SEQ ID NO: 28801 - DNA, 50 bp, synthetic construct
  source 1..50: mol_type = other DNA
acacccactatcaccaaaaatcacctacaaataaaacatttaaaaccatc

SEQ ID NO: 28802 - DNA, 50 bp, synthetic construct
  source 1..50: mol_type = other DNA
aaacaaacaaaaaaccaaacrccraacttacratcactcaacaaaaaaac

SEQ ID NO: 28803 - DNA, 50 bp, synthetic construct
  source 1..50: mol_type = other DNA
ccaacccraatcaccaatcaaactatcataaaacctatcactctaataac

SEQ ID NO: 28804 - DNA, 50 bp, synthetic construct
  source 1..50: mol_type = other DNA
aaacaccctaatcccaacaaaaaaccaaaactaaaattaccttctatttc

SEQ ID NO: 28805 - DNA, 50 bp, synthetic construct
  source 1..50: mol_type = other DNA
cataaaaaaaatacaacracaactcataaaatcacctaacttaactaccc

SEQ ID NO: 28806 - DNA, 50 bp, synthetic construct
  source 1..50: mol_type = other DNA
ctaaaacrtaacaaatcraacaatcaaaccaaataaccccataaactatc

SEQ ID NO: 28807 - DNA, 50 bp, synthetic construct
  source 1..50: mol_type = other DNA
tcaaaccaaataaccccataaactatcrctacatctttctcataaaacac

SEQ ID NO: 28808 - DNA, 50 bp, synthetic construct
  source 1..50: mol_type = other DNA
aaataaccccataaactatcrctacatctttctcataaaacacraaaaac

SEQ ID NO: 28809 - DNA, 50 bp, synthetic construct
  source 1..50: mol_type = other DNA
cactaaacctcactcttatcatctataaaataaactaaataaaactaccc

SEQ ID NO: 28810 - DNA, 50 bp, synthetic construct
  source 1..50: mol_type = other DNA
acaaaacctctcctctaaaaattacctatcctcrtaaaaataaatactcc

SEQ ID NO: 28811 - DNA, 50 bp, synthetic construct
  source 1..50: mol_type = other DNA
crataaaaaacaaataaacaaaacctctcctctaaaaattacctatcctc

SEQ ID NO: 28812 - DNA, 50 bp, synthetic construct
  source 1..50: mol_type = other DNA
ctccactataaaactaaataaaaatccraacaccctcctaacaaaaaaac

SEQ ID NO: 28813 - DNA, 50 bp, synthetic construct
  source 1..50: mol_type = other DNA
ctatcacaaaaacttttaactacctccactataaaactaaataaaaatcc

SEQ ID NO: 28814 - DNA, 50 bp, synthetic construct
  source 1..50: mol_type = other DNA
ctataaaaatactaaaaacrctaacttccctctctaactataaaaaaaac

SEQ ID NO: 28815 - DNA, 50 bp, synthetic construct
  source 1..50: mol_type = other DNA
ctaattatataaaaaaaacccctatacctacctataaaaatactaaaaac

SEQ ID NO: 28816 - DNA, 50 bp, synthetic construct
  source 1..50: mol_type = other DNA
tcacaaaaaataatatactaaaaaaccaattccaattcccccatctaacc

SEQ ID NO: 28817 - DNA, 50 bp, synthetic construct
  source 1..50: mol_type = other DNA
cttcctaaaaaaaacatctattcccctcttttcactactcccttctaaac

SEQ ID NO: 28818 - DNA, 50 bp, synthetic construct
  source 1..50: mol_type = other DNA
ttcataacaactcaaataaaacctctaaataaacttaaaacttctaaaac

SEQ ID NO: 28819 - DNA, 50 bp, synthetic construct
  source 1..50: mol_type = other DNA
actacaaaaatcaacaaactaaattcctaatacaaatatcctaaacaatc

SEQ ID NO: 28820 - DNA, 50 bp, synthetic construct
  source 1..50: mol_type = other DNA
raactaatacacttaccccaactccccraaaacaattcaaaacaaaaatc

SEQ ID NO: 28821 - DNA, 50 bp, synthetic construct
  source 1..50: mol_type = other DNA
ccttatcctattcacacaataaaaaataacaaaaacctaaactaaaaccc

SEQ ID NO: 28822 - DNA, 50 bp, synthetic construct
  source 1..50: mol_type = other DNA
tactaattcattctaaaaaaaattaacaaaccctcrtcctaatcaaaccc

SEQ ID NO: 28823 - DNA, 50 bp, synthetic construct
  source 1..50: mol_type = other DNA
aaaataaactaatattactaattcattctaaaaaaaattaacaaaccctc

SEQ ID NO: 28824 - DNA, 50 bp, synthetic construct
  source 1..50: mol_type = other DNA
ttccccaaaataaatcaataacaccaatccactttaaccaaaaccaaaac

SEQ ID NO: 28825 - DNA, 50 bp, synthetic construct
  source 1..50: mol_type = other DNA
ctatacaacctctcctaactataaaacataaaatcccaatcccaacaccc

SEQ ID NO: 28826 - DNA, 50 bp, synthetic construct
  source 1..50: mol_type = other DNA
atatcctaaacaatatataatatcatcaaactttcaatttttaccaatcc

SEQ ID NO: 28827 - DNA, 50 bp, synthetic construct
  source 1..50: mol_type = other DNA
ccraatttaaataatccttctacctcaacttcccaaataaataaaattac

SEQ ID NO: 28828 - DNA, 50 bp, synthetic construct
  source 1..50: mol_type = other DNA
tttcatcatattaaccaatctaacctcaaactcctaccctcaaaaaatcc

SEQ ID NO: 28829 - DNA, 50 bp, synthetic construct
  source 1..50: mol_type = other DNA
aactacatttttcaaaaataactataacctaaccaaacacaataactcac

SEQ ID NO: 28830 - DNA, 50 bp, synthetic construct
  source 1..50: mol_type = other DNA
aataattattcaaaataacrtcaaaaatcaaatctacccaatcaaaattc

SEQ ID NO: 28831 - DNA, 50 bp, synthetic construct
  source 1..50: mol_type = other DNA
acaaaaaaaactaaaactcctccaaaataacaacaacaataaataaacac

SEQ ID NO: 28832 - DNA, 50 bp, synthetic construct
  source 1..50: mol_type = other DNA
taatctctttaaacctcttcctcattcaaaaactaaaaaaattaaactac

SEQ ID NO: 28833 - DNA, 50 bp, synthetic construct
  source 1..50: mol_type = other DNA
ctaatcctctaaattcctaacctactatacctctaactccccaatttctc

SEQ ID NO: 28834 - DNA, 50 bp, synthetic construct
  source 1..50: mol_type = other DNA
ccaaaactactatccccratattaaaaaactactcratatcraaaaaaac

SEQ ID NO: 28835 - DNA, 50 bp, synthetic construct
  source 1..50: mol_type = other DNA
raacaaatcacttacratcaaaaattcaaaaccaatctaaccaacataac

SEQ ID NO: 28836 - DNA, 50 bp, synthetic construct
  source 1..50: mol_type = other DNA
actacaattaataaaaaaacrattccaacttcaatataaaccaaactccc

SEQ ID NO: 28837 - DNA, 50 bp, synthetic construct
  source 1..50: mol_type = other DNA
ctcttaaacracaaacttaccacctaataattaacaaaaccraactccac

SEQ ID NO: 28838 - DNA, 50 bp, synthetic construct
  source 1..50: mol_type = other DNA
ataaccctaacttaaaatttaatcctaaaactcccrtaaaactcttaaac

SEQ ID NO: 28839 - DNA, 50 bp, synthetic construct
  source 1..50: mol_type = other DNA
ataacraaaccccctataaccctaacttaaaatttaatcctaaaactccc

SEQ ID NO: 28840 - DNA, 50 bp, synthetic construct
  source 1..50: mol_type = other DNA
ttactatatacaactaatctatttattttcataactaaataacrttccrc

SEQ ID NO: 28841 - DNA, 50 bp, synthetic construct
  source 1..50: mol_type = other DNA
aattactatatacaactaatctatttattttcataactaaataacrttcc

SEQ ID NO: 28842 - DNA, 50 bp, synthetic construct
  source 1..50: mol_type = other DNA
aaacaacrtcataacatatacaaactttttaaaatcaacttttcccactc

SEQ ID NO: 28843 - DNA, 50 bp, synthetic construct
  source 1..50: mol_type = other DNA
tcctcctttttaactataaaaactaattccttaaaaaaaatcaatatttc

SEQ ID NO: 28844 - DNA, 50 bp, synthetic construct
  source 1..50: mol_type = other DNA
ttaaaaaataactaaatcrtacataacacttttaaaattccaatataccc

SEQ ID NO: 28845 - DNA, 50 bp, synthetic construct
  source 1..50: mol_type = other DNA
aaattttctttcattaaacaaacactaaataaacttttcaacctaaaaac

SEQ ID NO: 28846 - DNA, 50 bp, synthetic construct
  source 1..50: mol_type = other DNA
aataaaaaaaactaacaaatcacrccacccttatcctctaaaaaatttcc

SEQ ID NO: 28847 - DNA, 50 bp, synthetic construct
  source 1..50: mol_type = other DNA
aaacttctcttttctaactaaacraaaattccccaaaaaacaaaaataac

SEQ ID NO: 28848 - DNA, 50 bp, synthetic construct
  source 1..50: mol_type = other DNA
aaatcacctctacacaaatcaaaataaaactcaactctttctcctaccac

SEQ ID NO: 28849 - DNA, 50 bp, synthetic construct
  source 1..50: mol_type = other DNA
cactacacaatctaaacaacaaacacaatcacaaacctaaacaacaaatc

SEQ ID NO: 28850 - DNA, 50 bp, synthetic construct
  source 1..50: mol_type = other DNA
tcaaaaaaatcacaaaacaaataaatttaaccrataaaaactcaacaacc

SEQ ID NO: 28851 - DNA, 50 bp, synthetic construct
  source 1..50: mol_type = other DNA
aaaccaaaaccaacctacaatccatataccctaaaaaaaatcacaaaccc

SEQ ID NO: 28852 - DNA, 50 bp, synthetic construct
  source 1..50: mol_type = other DNA
accttcatataatccraaatataaaccraactcaacatcttaccacacac

SEQ ID NO: 28853 - DNA, 50 bp, synthetic construct
  source 1..50: mol_type = other DNA
caaccaaaatcctcaccatatctataaactctacaacaaaaatacatacc

SEQ ID NO: 28854 - DNA, 50 bp, synthetic construct
  source 1..50: mol_type = other DNA
cttataaaaatctaaacrccacraactcttaactacaacacccttaaccc

SEQ ID NO: 28855 - DNA, 50 bp, synthetic construct
  source 1..50: mol_type = other DNA
ccaaacrccttaccacraatacraattaaaaatactataaccaaaaactc

SEQ ID NO: 28856 - DNA, 50 bp, synthetic construct
  source 1..50: mol_type = other DNA
crccttaccacraatacraattaaaaatactataaccaaaaactcrtaac

SEQ ID NO: 28857 - DNA, 50 bp, synthetic construct
  source 1..50: mol_type = other DNA
tccaaccaaaacttcttaaaatctaataatattcattcaaatatcccccc

SEQ ID NO: 28858 - DNA, 50 bp, synthetic construct
  source 1..50: mol_type = other DNA
tcttccccaaaactctccaaacaaaaaactttaaataaaacactcctccc

SEQ ID NO: 28859 - DNA, 50 bp, synthetic construct
  source 1..50: mol_type = other DNA
accacccatctccrataattctatttaattaatctaaataaaattcaccc

SEQ ID NO: 28860 - DNA, 50 bp, synthetic construct
  source 1..50: mol_type = other DNA
ttacaataacaacraataaacctcacccaaaccaattaaataaaatcacc

SEQ ID NO: 28861 - DNA, 50 bp, synthetic construct
  source 1..50: mol_type = other DNA
acataacraaaccctatccactaaaaacaaaattatctaaatataataac

SEQ ID NO: 28862 - DNA, 50 bp, synthetic construct
  source 1..50: mol_type = other DNA
ttaaaccaaaactactcaaactataatatacatacaaatcattaaaaatc

SEQ ID NO: 28863 - DNA, 50 bp, synthetic construct
  source 1..50: mol_type = other DNA
acccctaataaatcttaaataacaattaaccaaataaccacactacctac

SEQ ID NO: 28864 - DNA, 50 bp, synthetic construct
  source 1..50: mol_type = other DNA
ttaatcaattaccatttaaaactcactaaaaaccaaatataataattcac

SEQ ID NO: 28865 - DNA, 50 bp, synthetic construct
  source 1..50: mol_type = other DNA
acaaaaaattaaccaaacttaataacatatacctataattccaactactc

SEQ ID NO: 28866 - DNA, 50 bp, synthetic construct
  source 1..50: mol_type = other DNA
ctactcacaattaaccctaaaaatctctaaaaaataataactcataactc

SEQ ID NO: 28867 - DNA, 50 bp, synthetic construct
  source 1..50: mol_type = other DNA
cacctaaaaaaaatataatcaaacaaaactaaacctctacactaaaaacc

SEQ ID NO: 28868 - DNA, 50 bp, synthetic construct
  source 1..50: mol_type = other DNA
aatatactacctaaatcaaaaaatttccctaactcacctccataaataac

SEQ ID NO: 28869 - DNA, 50 bp, synthetic construct
  source 1..50: mol_type = other DNA
aaaatcatcctcataactaaactcctaccttattctaaaaccaaaccctc

SEQ ID NO: 28870 - DNA, 50 bp, synthetic construct
  source 1..50: mol_type = other DNA
aatctaaaaacccraaaaaaccttacttcctacaaaaaaaactaccrtcc

SEQ ID NO: 28871 - DNA, 50 bp, synthetic construct
  source 1..50: mol_type = other DNA
caacaatctaaaaacccraaaaaaccttacttcctacaaaaaaaactacc

SEQ ID NO: 28872 - DNA, 50 bp, synthetic construct
  source 1..50: mol_type = other DNA
atctaataaattatttttacctaactacacataattcataccctaaaacc

SEQ ID NO: 28873 - DNA, 50 bp, synthetic construct
  source 1..50: mol_type = other DNA
aaaaaacaaaaatccrtaaaaaaaccctatacctaaaacacaattcattc

SEQ ID NO: 28874 - DNA, 50 bp, synthetic construct
  source 1..50: mol_type = other DNA
tcctttccrttcaccraataaactatattctaaatataaaacctctttac

SEQ ID NO: 28875 - DNA, 50 bp, synthetic construct
  source 1..50: mol_type = other DNA
aaaaaatattaaaatcaaaactccaataaatctacccraaaaatactaac

SEQ ID NO: 28876 - DNA, 50 bp, synthetic construct
  source 1..50: mol_type = other DNA
ctcttaaaacaatacttaaaactttatactttcattattaaaactatctc

SEQ ID NO: 28877 - DNA, 50 bp, synthetic construct
  source 1..50: mol_type = other DNA
taaaacaatacttaaaactttatactttcattattaaaactatctcracc

SEQ ID NO: 28878 - DNA, 50 bp, synthetic construct
  source 1..50: mol_type = other DNA
ctcctaaatacaaaaaatcctcccaactaactaaacraaccattacaacc

SEQ ID NO: 28879 - DNA, 50 bp, synthetic construct
  source 1..50: mol_type = other DNA
ctacaacctcaaaactcctaaatacaaaaaatcctcccaactaactaaac

SEQ ID NO: 28880 - DNA, 50 bp, synthetic construct
  source 1..50: mol_type = other DNA
ctacaataaactataattacaccactacattccaacctaaataacaaaac

SEQ ID NO: 28881 - DNA, 50 bp, synthetic construct
  source 1..50: mol_type = other DNA
taatctaacaacaaatataaaaaaacctaacaatctaaatcaaactaaac

SEQ ID NO: 28882 - DNA, 50 bp, synthetic construct
  source 1..50: mol_type = other DNA
ccactatcccaaataatctataaaacrcrcacatcttcataacactaatc

SEQ ID NO: 28883 - DNA, 50 bp, synthetic construct
  source 1..50: mol_type = other DNA
cttaaaattaacaacacaaaaaccactatcccaaataatctataaaacrc

SEQ ID NO: 28884 - DNA, 50 bp, synthetic construct
  source 1..50: mol_type = other DNA
aacttaaaattaacaacacaaaaaccactatcccaaataatctataaaac

SEQ ID NO: 28885 - DNA, 50 bp, synthetic construct
  source 1..50: mol_type = other DNA
tatttaatatattcatcttcccaacctcttatatctaataatataaaacc

SEQ ID NO: 28886 - DNA, 50 bp, synthetic construct
  source 1..50: mol_type = other DNA
cctctaacractctatccaaaattttaattaaactaaaaataaataccrc

SEQ ID NO: 28887 - DNA, 50 bp, synthetic construct
  source 1..50: mol_type = other DNA
tacctctaacractctatccaaaattttaattaaactaaaaataaatacc

SEQ ID NO: 28888 - DNA, 50 bp, synthetic construct
  source 1..50: mol_type = other DNA
aaaaaaataaatactaaataaccacrcaaaacctacaaccctcctataac

SEQ ID NO: 28889 - DNA, 50 bp, synthetic construct
  source 1..50: mol_type = other DNA
cccctaaatattataaatatcaaaaaacaaaaccctaaatactacaaccc

SEQ ID NO: 28890 - DNA, 50 bp, synthetic construct
  source 1..50: mol_type = other DNA
aataacaaattcataacaactttcaaaaatttatatttttcctccttctc

SEQ ID NO: 28891 - DNA, 50 bp, synthetic construct
  source 1..50: mol_type = other DNA
caaacaaaaccaaaaactctattattaaactcacaaataccttaactatc

SEQ ID NO: 28892 - DNA, 50 bp, synthetic construct
  source 1..50: mol_type = other DNA
attattaaactcacaaataccttaactatcrcccacaaataataaaaaac

SEQ ID NO: 28893 - DNA, 50 bp, synthetic construct
  source 1..50: mol_type = other DNA
acaaataatactaataactaccaaacaacraaaacraaaccaacaacaac

SEQ ID NO: 28894 - DNA, 50 bp, synthetic construct
  source 1..50: mol_type = other DNA
caaacaaaaacaaccacaaataatactaataactaccaaacaacraaaac

SEQ ID NO: 28895 - DNA, 50 bp, synthetic construct
  source 1..50: mol_type = other DNA
attacccattttcactatcacctctttcattaaattataaatcctctaac

SEQ ID NO: 28896 - DNA, 50 bp, synthetic construct
  source 1..50: mol_type = other DNA
atacataaatcttccctaactcccacactatcctatacttcctatattac

SEQ ID NO: 28897 - DNA, 50 bp, synthetic construct
  source 1..50: mol_type = other DNA
acaaattaactaaaattcctacttctaaatcaaacactcctaacactatc

SEQ ID NO: 28898 - DNA, 50 bp, synthetic construct
  source 1..50: mol_type = other DNA
ttaactaaaattcctacttctaaatcaaacactcctaacactatcrttcc

SEQ ID NO: 28899 - DNA, 50 bp, synthetic construct
  source 1..50: mol_type = other DNA
aacaaaatctacctcrataaaatcaaaaaatacaacaaaaataaatcacc

SEQ ID NO: 28900 - DNA, 50 bp, synthetic construct
  source 1..50: mol_type = other DNA
ttactaaaccaaaactatcactcaatcraaaaaaccttaaaataccatcc

SEQ ID NO: 28901 - DNA, 50 bp, synthetic construct
  source 1..50: mol_type = other DNA
ttccaatatccctaaaccatatattactaaaccaaaactatcactcaatc

SEQ ID NO: 28902 - DNA, 50 bp, synthetic construct
  source 1..50: mol_type = other DNA
ttaaataacaactctaactcaacaacacataacccaaaaatattaaaatc

SEQ ID NO: 28903 - DNA, 50 bp, synthetic construct
  source 1..50: mol_type = other DNA
acaacacataacccaaaaatattaaaatcractaacccaaattaaaaccc

SEQ ID NO: 28904 - DNA, 50 bp, synthetic construct
  source 1..50: mol_type = other DNA
ctaacccaaattaaaacccractatcaaccttaaaactaaaatcaaatcc

SEQ ID NO: 28905 - DNA, 50 bp, synthetic construct
  source 1..50: mol_type = other DNA
actattaaaataaaaatatcrtaaaaatcccrccaaaatacaaaatcctc

SEQ ID NO: 28906 - DNA, 50 bp, synthetic construct
  source 1..50: mol_type = other DNA
ccaaatacaataacttacacttacctataatctcaatactctaaaaaacc

SEQ ID NO: 28907 - DNA, 50 bp, synthetic construct
  source 1..50: mol_type = other DNA
acctaccctctacttcctaaaatacccaactaaaaaaacctaaatttctc

SEQ ID NO: 28908 - DNA, 50 bp, synthetic construct
  source 1..50: mol_type = other DNA
aaacacraaattaataacaactacacrattcaaacrattttcttacctcc

SEQ ID NO: 28909 - DNA, 50 bp, synthetic construct
  source 1..50: mol_type = other DNA
aaaacratttaaaaacratcttaatcacatcaactatatcatcaaaaaac

SEQ ID NO: 28910 - DNA, 50 bp, synthetic construct
  source 1..50: mol_type = other DNA
cactataaaactttttattctattaactaatatatataacccccaatcac

SEQ ID NO: 28911 - DNA, 50 bp, synthetic construct
  source 1..50: mol_type = other DNA
ttaaaaccacaactattaaatctataacrcaatacrtctaacaaaaccac

SEQ ID NO: 28912 - DNA, 50 bp, synthetic construct
  source 1..50: mol_type = other DNA
ttacataatcataattcaataatcaaaaccaaaaaattaacattattatc

SEQ ID NO: 28913 - DNA, 50 bp, synthetic construct
  source 1..50: mol_type = other DNA
aaaaatctcttacrtacattcattcctttcctttctattacctttactac

SEQ ID NO: 28914 - DNA, 50 bp, synthetic construct
  source 1..50: mol_type = other DNA
taaaaacttaacataattaaatcctactttttcttctaaaaatctcttac

SEQ ID NO: 28915 - DNA, 50 bp, synthetic construct
  source 1..50: mol_type = other DNA
caaaaccttcrttcttaatacttacctctcatataataaaccctatctac

SEQ ID NO: 28916 - DNA, 50 bp, synthetic construct
  source 1..50: mol_type = other DNA
taaataaaacaacaaaattcaaacctaaaaaatttatttccaaaaccttc

SEQ ID NO: 28917 - DNA, 50 bp, synthetic construct
  source 1..50: mol_type = other DNA
acccttataacttctaataaaataaattttatcctccccaccaccacccc

SEQ ID NO: 28918 - DNA, 50 bp, synthetic construct
  source 1..50: mol_type = other DNA
aaatcractcccattatcacttcctcatatacaaaacatctaaatttccc

SEQ ID NO: 28919 - DNA, 50 bp, synthetic construct
  source 1..50: mol_type = other DNA
caaccraaaaacccaaataccttacacataaaaaaataacaataaaaacc

SEQ ID NO: 28920 - DNA, 50 bp, synthetic construct
  source 1..50: mol_type = other DNA
aaaccaaaaactcctttctaaatcccaaaactaaaactaaaaataaccac

SEQ ID NO: 28921 - DNA, 50 bp, synthetic construct
  source 1..50: mol_type = other DNA
aaaactcctttctaaatcccaaaactaaaactaaaaataaccacrtaaac

SEQ ID NO: 28922 - DNA, 50 bp, synthetic construct
  source 1..50: mol_type = other DNA
accacacaaaatatcctattcctcattttaaaaactctacttctatccac

SEQ ID NO: 28923 - DNA, 50 bp, synthetic construct
  source 1..50: mol_type = other DNA
attcaatctctaaaacatcactctaaaccaaacccraaaaaacttcaacc

SEQ ID NO: 28924 - DNA, 50 bp, synthetic construct
  source 1..50: mol_type = other DNA
ttcattcattcattcattcaatctctaaaacatcactctaaaccaaaccc

SEQ ID NO: 28925 - DNA, 50 bp, synthetic construct
  source 1..50: mol_type = other DNA
ctaaaacctactaactaaataccaaacatctaaaaaaaccctactccrac

SEQ ID NO: 28926 - DNA, 50 bp, synthetic construct
  source 1..50: mol_type = other DNA
atctcrtacaaactccraataaaccaaataaacccraacataacatacac

SEQ ID NO: 28927 - DNA, 50 bp, synthetic construct
  source 1..50: mol_type = other DNA
racracccrtaaccctacaactaaactacaactctataaataacattaac

SEQ ID NO: 28928 - DNA, 50 bp, synthetic construct
  source 1..50: mol_type = other DNA
actaaatataaaaacaccraactaaactctaaaaatctaaacccaacttc

SEQ ID NO: 28929 - DNA, 50 bp, synthetic construct
  source 1..50: mol_type = other DNA
accacactttattaactaacctatatactaaatctaatactatactttcc

SEQ ID NO: 28930 - DNA, 50 bp, synthetic construct
  source 1..50: mol_type = other DNA
taataaataaatcacacaaacactcaacttatttctccttatataaatcc

SEQ ID NO: 28931 - DNA, 50 bp, synthetic construct
  source 1..50: mol_type = other DNA
craaacaacraaaataactcaaaatcacacctttccctctaatctcaacc

SEQ ID NO: 28932 - DNA, 50 bp, synthetic construct
  source 1..50: mol_type = other DNA
caaaaaccacaataaacaactatcctaaaaaataatttccccraaacaac

SEQ ID NO: 28933 - DNA, 50 bp, synthetic construct
  source 1..50: mol_type = other DNA
ctacctactataactcctacctaaaattatcacactactatacaaacaac

SEQ ID NO: 28934 - DNA, 50 bp, synthetic construct
  source 1..50: mol_type = other DNA
tactataactcctacctaaaattatcacactactatacaaacaacrtccc

SEQ ID NO: 28935 - DNA, 50 bp, synthetic construct
  source 1..50: mol_type = other DNA
aaaaacattaaaaacctacccraaaaacaacaaccacatcaaataccctc

SEQ ID NO: 28936 - DNA, 50 bp, synthetic construct
  source 1..50: mol_type = other DNA
aaataaactaaacctaacaacraaaacacctaatataactactacctccc

SEQ ID NO: 28937 - DNA, 50 bp, synthetic construct
  source 1..50: mol_type = other DNA
aatccaaaataacaaactcaaataccttaaaaaaccaataaatataaatc

SEQ ID NO: 28938 - DNA, 50 bp, synthetic construct
  source 1..50: mol_type = other DNA
taaattaaaaatcaacraacctaacttaaaatataaccttaaacaacacc

SEQ ID NO: 28939 - DNA, 50 bp, synthetic construct
  source 1..50: mol_type = other DNA
ttaaaaaatccttaactacaccctaaatcctaactaataaccaaaaatac

SEQ ID NO: 28940 - DNA, 50 bp, synthetic construct
  source 1..50: mol_type = other DNA
ctacaccctaaatcctaactaataaccaaaaatacraaactaaataaaac

SEQ ID NO: 28941 - DNA, 50 bp, synthetic construct
  source 1..50: mol_type = other DNA
caccctaaatcctaactaataaccaaaaatacraaactaaataaaacrac

SEQ ID NO: 28942 - DNA, 50 bp, synthetic construct
  source 1..50: mol_type = other DNA
caactcaaaaaaaattcatctcttcctcctccrcaaattcaacctaaaac

SEQ ID NO: 28943 - DNA, 50 bp, synthetic construct
  source 1..50: mol_type = other DNA
crattatcttacaaaattataacaaaataccraactaaaattcctaacac

SEQ ID NO: 28944 - DNA, 50 bp, synthetic construct
  source 1..50: mol_type = other DNA
aaaaaataaacctttcctaaactaatactacrtaccaaaaactttaactc

SEQ ID NO: 28945 - DNA, 50 bp, synthetic construct
  source 1..50: mol_type = other DNA
crtaccaaaaactttaactcratattttaccacaatcctataaaacaacc

SEQ ID NO: 28946 - DNA, 50 bp, synthetic construct
  source 1..50: mol_type = other DNA
caaccratactataatctccattttacaaataaaaacattaaaactcaac

SEQ ID NO: 28947 - DNA, 50 bp, synthetic construct
  source 1..50: mol_type = other DNA
actcaacrtaattataacttcctcaaatcacrcaaccactaaataaaaac

SEQ ID NO: 28948 - DNA, 50 bp, synthetic construct
  source 1..50: mol_type = other DNA
aacrccaaaaattcaaactaaaatctaattctaaaactttactctctcac

SEQ ID NO: 28949 - DNA, 50 bp, synthetic construct
  source 1..50: mol_type = other DNA
aaaaaccaaccractaacccttaaaaaatctatataaaaaaaatcccttc

SEQ ID NO: 28950 - DNA, 50 bp, synthetic construct
  source 1..50: mol_type = other DNA
accttaaaaaaatattcrtttaattattaactttctacacaccccctcac

SEQ ID NO: 28951 - DNA, 50 bp, synthetic construct
  source 1..50: mol_type = other DNA
atatcaaataaacctcaaaacaacttaatttcrtaattataaaattttcc

SEQ ID NO: 28952 - DNA, 50 bp, synthetic construct
  source 1..50: mol_type = other DNA
ttccattatcttcataaaaaattaataaatatttataccttccaactctc

SEQ ID NO: 28953 - DNA, 50 bp, synthetic construct
  source 1..50: mol_type = other DNA
cttctattcaacataactttaaaattaaacatattattatatttcaactc

SEQ ID NO: 28954 - DNA, 50 bp, synthetic construct
  source 1..50: mol_type = other DNA
acaataatataatcataactctcttcaacctaaacctcctaaactctaac

SEQ ID NO: 28955 - DNA, 50 bp, synthetic construct
  source 1..50: mol_type = other DNA
tcccctaaaccctaaaattcaaaactttaataaactataataacactacc

SEQ ID NO: 28956 - DNA, 50 bp, synthetic construct
  source 1..50: mol_type = other DNA
tacctaacctaaataatataattttcaatatctaactctatactaaaaac

SEQ ID NO: 28957 - DNA, 50 bp, synthetic construct
  source 1..50: mol_type = other DNA
atattaataatcattcaattaattaccttatatatctctaaactcraacc

SEQ ID NO: 28958 - DNA, 50 bp, synthetic construct
  source 1..50: mol_type = other DNA
taatcactaacaaaaaattaaaacaatcaaaaaacaactttcaaaaaaac

SEQ ID NO: 28959 - DNA, 50 bp, synthetic construct
  source 1..50: mol_type = other DNA
accctttactcctaaaaaccctttcaaaatatatacattcctcttttcac

SEQ ID NO: 28960 - DNA, 50 bp, synthetic construct
  source 1..50: mol_type = other DNA
aatcaaccattttctataatttcctactatatacatttaactccttttac

SEQ ID NO: 28961 - DNA, 50 bp, synthetic construct
  source 1..50: mol_type = other DNA
tacaaaactattattttattaaaaaactatatcttatacttcctaaaatc

SEQ ID NO: 28962 - DNA, 50 bp, synthetic construct
  source 1..50: mol_type = other DNA
acttcttttaaaaaacactactaaataataaaatattccataataataac

SEQ ID NO: 28963 - DNA, 50 bp, synthetic construct
  source 1..50: mol_type = other DNA
ctaatttttcttaccttttacaaaaaaaatccttaaataccccacaaaac

SEQ ID NO: 28964 - DNA, 50 bp, synthetic construct
  source 1..50: mol_type = other DNA
ctaccracacctaaacaaaaaaatacrttccaaaaacacctcaacttaac

SEQ ID NO: 28965 - DNA, 50 bp, synthetic construct
  source 1..50: mol_type = other DNA
aaaaaatacaatacccaaaacrcacaattcccrtatacaaaaaaactcac

SEQ ID NO: 28966 - DNA, 50 bp, synthetic construct
  source 1..50: mol_type = other DNA
rcraaaataaccttcttatacrtaaatccctctacacacraaaactatac

SEQ ID NO: 28967 - DNA, 50 bp, synthetic construct
  source 1..50: mol_type = other DNA
caaaacttactcccttttctaatttctccccaacctctttataaatacrc

SEQ ID NO: 28968 - DNA, 50 bp, synthetic construct
  source 1..50: mol_type = other DNA
aaataaaaacaaatttcaccraaaaaataatatctaaacrcrctaaactc

SEQ ID NO: 28969 - DNA, 50 bp, synthetic construct
  source 1..50: mol_type = other DNA
tttccatctctattcatcccaaaatctctctatccctatccctaaatatc

SEQ ID NO: 28970 - DNA, 50 bp, synthetic construct
  source 1..50: mol_type = other DNA
tttcaaaaaataccccrcatatttaacttcaaaaaaactcaccccaaacc

SEQ ID NO: 28971 - DNA, 50 bp, synthetic construct
  source 1..50: mol_type = other DNA
ctctcrctacttccrcracttaaaataaatccttctaaaatcaaatatac

SEQ ID NO: 28972 - DNA, 50 bp, synthetic construct
  source 1..50: mol_type = other DNA
cttctaaaatcaaatatacraaacactttttaaaatccttattctaaacc

SEQ ID NO: 28973 - DNA, 50 bp, synthetic construct
  source 1..50: mol_type = other DNA
tcaaatatacraaacactttttaaaatccttattctaaaccraactaaac

SEQ ID NO: 28974 - DNA, 50 bp, synthetic construct
  source 1..50: mol_type = other DNA
acraaacactttttaaaatccttattctaaaccraactaaacrcaaatac

SEQ ID NO: 28975 - DNA, 50 bp, synthetic construct
  source 1..50: mol_type = other DNA
aactaactaaactcaactactccaaatccaattccaaatacraaaatcrc

SEQ ID NO: 28976 - DNA, 50 bp, synthetic construct
  source 1..50: mol_type = other DNA
caaactaactaaactcaactactccaaatccaattccaaatacraaaatc

SEQ ID NO: 28977 - DNA, 50 bp, synthetic construct
  source 1..50: mol_type = other DNA
tcccaattaaaaaattaaacaattaacaacrcaaaacrataactctaaac

SEQ ID NO: 28978 - DNA, 50 bp, synthetic construct
  source 1..50: mol_type = other DNA
cracrttactacatctatttaacaaccaaaaaaccraaaccaaaaaaaac

SEQ ID NO: 28979 - DNA, 50 bp, synthetic construct
  source 1..50: mol_type = other DNA
caaatccttattaattataattttataaccaccrtcrccccaaaaaaaac

SEQ ID NO: 28980 - DNA, 50 bp, synthetic construct
  source 1..50: mol_type = other DNA
taataccctttactcaaatccttattaattataattttataaccaccrtc

SEQ ID NO: 28981 - DNA, 50 bp, synthetic construct
  source 1..50: mol_type = other DNA
aactaataccctttactcaaatccttattaattataattttataaccacc

SEQ ID NO: 28982 - DNA, 50 bp, synthetic construct
  source 1..50: mol_type = other DNA
rtccacaccatatacaaatccacctaacaatatacttcaaaaaacaaaac

SEQ ID NO: 28983 - DNA, 50 bp, synthetic construct
  source 1..50: mol_type = other DNA
tcataatcatccaacaaataccaattattaaaaaccccaatctatctacc

SEQ ID NO: 28984 - DNA, 50 bp, synthetic construct
  source 1..50: mol_type = other DNA
tcaacaactaatatttactaaataaccataaactaaccattcaatttctc

SEQ ID NO: 28985 - DNA, 50 bp, synthetic construct
  source 1..50: mol_type = other DNA
actaaataaccataaactaaccattcaatttctcraaactttaatttctc

SEQ ID NO: 28986 - DNA, 50 bp, synthetic construct
  source 1..50: mol_type = other DNA
cccctcacacttatacaacattttaaaattaatcaaaacactaaataaac

SEQ ID NO: 28987 - DNA, 50 bp, synthetic construct
  source 1..50: mol_type = other DNA
aatttcacaatatactaaactttattcctaaatcaaatacaaaactatcc

SEQ ID NO: 28988 - DNA, 50 bp, synthetic construct
  source 1..50: mol_type = other DNA
aaactttattcctaaatcaaatacaaaactatccraatatccacaaaacc

SEQ ID NO: 28989 - DNA, 50 bp, synthetic construct
  source 1..50: mol_type = other DNA
cctcaaataatcaatctacctctacctcccaaaatattaaaattataaac

SEQ ID NO: 28990 - DNA, 50 bp, synthetic construct
  source 1..50: mol_type = other DNA
ttatatctacaacaaccctatttccaaataaaatcacrttaaaaaacrcc

SEQ ID NO: 28991 - DNA, 50 bp, synthetic construct
  source 1..50: mol_type = other DNA
caattatatctacaacaaccctatttccaaataaaatcacrttaaaaaac

SEQ ID NO: 28992 - DNA, 50 bp, synthetic construct
  source 1..50: mol_type = other DNA
tcatcttcaccaattatatctacaacaaccctatttccaaataaaatcac

SEQ ID NO: 28993 - DNA, 50 bp, synthetic construct
  source 1..50: mol_type = other DNA
caccractactaaccattctaaatatcctataactcctaaatacatcrcc

SEQ ID NO: 28994 - DNA, 50 bp, synthetic construct
  source 1..50: mol_type = other DNA
tcccaccractactaaccattctaaatatcctataactcctaaatacatc

SEQ ID NO: 28995 - DNA, 50 bp, synthetic construct
  source 1..50: mol_type = other DNA
ctctcrcaattctaaaaatcaaaatctaaaatcraaatataatcaaaacc

SEQ ID NO: 28996 - DNA, 50 bp, synthetic construct
  source 1..50: mol_type = other DNA
aacaactaaaatttcttctctcrcaattctaaaaatcaaaatctaaaatc

SEQ ID NO: 28997 - DNA, 50 bp, synthetic construct
  source 1..50: mol_type = other DNA
caacctacaactctaaaccctaaatccaaaccttctctcctttatatctc

SEQ ID NO: 28998 - DNA, 50 bp, synthetic construct
  source 1..50: mol_type = other DNA
actttaacttaaatataccaaaccctaacaaaaccacaaaattaaaacac

SEQ ID NO: 28999 - DNA, 50 bp, synthetic construct
  source 1..50: mol_type = other DNA
tcactcaactctaatttactaaaaaaacaaaaccccaaataaaaaataac

SEQ ID NO: 29000 - DNA, 50 bp, synthetic construct
  source 1..50: mol_type = other DNA
aaaaataaaaaactaaataccacaacctcaaacaattattcccaaacatc

SEQ ID NO: 29001 - DNA, 50 bp, synthetic construct
  source 1..50: mol_type = other DNA
acaccatcccaaaaaataaaacrcaaacactaacacttttaaaaactccc

SEQ ID NO: 29002 - DNA, 50 bp, synthetic construct
  source 1..50: mol_type = other DNA
aaaaacacctaaaacaactctacaaaactctaaaaaaaaactaccacctc

SEQ ID NO: 29003 - DNA, 50 bp, synthetic construct
  source 1..50: mol_type = other DNA
taaaaattataactcttcctcccaaaatacaaatcccccatatctaacac

SEQ ID NO: 29004 - DNA, 50 bp, synthetic construct
  source 1..50: mol_type = other DNA
attcttattctaaaattcrtaaacctctaaaaaaccaaaaataaacctcc

SEQ ID NO: 29005 - DNA, 50 bp, synthetic construct
  source 1..50: mol_type = other DNA
aatctaacacraacaactaaaatctcccccaaattcttattctaaaattc

SEQ ID NO: 29006 - DNA, 50 bp, synthetic construct
  source 1..50: mol_type = other DNA
aactaaacacaaccctaaactaccaaaccaaatctcaacaaatctaacac

SEQ ID NO: 29007 - DNA, 50 bp, synthetic construct
  source 1..50: mol_type = other DNA
tcacttcaaaaactacaaaactcccaaccctaaaaacaactaaaccaacc

SEQ ID NO: 29008 - DNA, 50 bp, synthetic construct
  source 1..50: mol_type = other DNA
attctctatcccatccccctctttcctaaaattattataaaaattaaatc

SEQ ID NO: 29009 - DNA, 50 bp, synthetic construct
  source 1..50: mol_type = other DNA
ttaaatcacaaactctctaaataaaaatcatctattaactaaccttcacc

SEQ ID NO: 29010 - DNA, 50 bp, synthetic construct
  source 1..50: mol_type = other DNA
ctcaataatcccacttctaattcaaaatttcacttctaaaacctatctcc

SEQ ID NO: 29011 - DNA, 50 bp, synthetic construct
  source 1..50: mol_type = other DNA
actaataacttatactatactactatacaacttccrcacaaaacccaaac

SEQ ID NO: 29012 - DNA, 50 bp, synthetic construct
  source 1..50: mol_type = other DNA
tctataaatacaaattcaaactctaataaaaatttactaaataaacrcac

SEQ ID NO: 29013 - DNA, 50 bp, synthetic construct
  source 1..50: mol_type = other DNA
aaaaaccctttccatctaaaaactaatttatttccatcatcatccccaac

SEQ ID NO: 29014 - DNA, 50 bp, synthetic construct
  source 1..50: mol_type = other DNA
taaaaaaaacttctaaaaatacaacaaaatattctctccccttctctacc

SEQ ID NO: 29015 - DNA, 50 bp, synthetic construct
  source 1..50: mol_type = other DNA
aaaatataatatcccaaaaaactattaataaataacaatcaacaaaaacc

SEQ ID NO: 29016 - DNA, 50 bp, synthetic construct
  source 1..50: mol_type = other DNA
attcattcataatatcaatatttcctaaatacctattctaaaccttacac

SEQ ID NO: 29017 - DNA, 50 bp, synthetic construct
  source 1..50: mol_type = other DNA
aaacaacttccctaaacccaatttcccaacctccttataatctaaaaccc

SEQ ID NO: 29018 - DNA, 50 bp, synthetic construct
  source 1..50: mol_type = other DNA
aaaaaacaattctccccacacaaaccaaaaaaaaaccccaaaatactaac

SEQ ID NO: 29019 - DNA, 50 bp, synthetic construct
  source 1..50: mol_type = other DNA
taaaaactctacctctaataactacraaaccttaaacaaaactataaacc

SEQ ID NO: 29020 - DNA, 50 bp, synthetic construct
  source 1..50: mol_type = other DNA
crcrtaccctctaataaccaaaaccaatataacraaaacttaacaaaccc

SEQ ID NO: 29021 - DNA, 50 bp, synthetic construct
  source 1..50: mol_type = other DNA
cacctattacctacaaatttcaaaacccaaaacraacctatcaaaccccc

SEQ ID NO: 29022 - DNA, 50 bp, synthetic construct
  source 1..50: mol_type = other DNA
aaaaatctacaaaattaaaaatactactccrtcccrctaaacrctacttc

SEQ ID NO: 29023 - DNA, 50 bp, synthetic construct
  source 1..50: mol_type = other DNA
aacaaccraaaaatctacaaaattaaaaatactactccrtcccrctaaac

SEQ ID NO: 29024 - DNA, 50 bp, synthetic construct
  source 1..50: mol_type = other DNA
ctctacacaacctttacctctatatctatatatatcaaacctccctctcc

SEQ ID NO: 29025 - DNA, 50 bp, synthetic construct
  source 1..50: mol_type = other DNA
ccacttacratccttaacaaaccttaacttctaactatcctccaataccc

SEQ ID NO: 29026 - DNA, 50 bp, synthetic construct
  source 1..50: mol_type = other DNA
acraaaacraacactaaaaaacaaccaaaaaccaaaatttaccaaaaacc

SEQ ID NO: 29027 - DNA, 50 bp, synthetic construct
  source 1..50: mol_type = other DNA
aatccaaaatcaaaactttaacaaaattaactcctcctaaaactctaaac

SEQ ID NO: 29028 - DNA, 50 bp, synthetic construct
  source 1..50: mol_type = other DNA
rcccctcccacctttataatacaattcctaaatataataaaaaatatacc

SEQ ID NO: 29029 - DNA, 50 bp, synthetic construct
  source 1..50: mol_type = other DNA
aaaaaaaacaacctatctctactaaaaacaaatcctccrattttaaaaac

SEQ ID NO: 29030 - DNA, 50 bp, synthetic construct
  source 1..50: mol_type = other DNA
caaaaaaatctacaaccaactcaactcctccaaacaaaaaaaataacaac

SEQ ID NO: 29031 - DNA, 50 bp, synthetic construct
  source 1..50: mol_type = other DNA
ataaaaatccraaattatctacctacaatacaaaatcctccttaaaaccc

SEQ ID NO: 29032 - DNA, 50 bp, synthetic construct
  source 1..50: mol_type = other DNA
actctcaaacctaaaaaatctaacctccttaactctaaataatataaccc

SEQ ID NO: 29033 - DNA, 50 bp, synthetic construct
  source 1..50: mol_type = other DNA
accaaaatccctatataaataacccaaaaactataccccatcacaaaacc

SEQ ID NO: 29034 - DNA, 50 bp, synthetic construct
  source 1..50: mol_type = other DNA
ttctaacaaaaacttccctactaaacaacatttcacatacacrtactatc

SEQ ID NO: 29035 - DNA, 50 bp, synthetic construct
  source 1..50: mol_type = other DNA
ataactccactaaaaaaaaacacttaaaaacataaacctaatttcctccc

SEQ ID NO: 29036 - DNA, 50 bp, synthetic construct
  source 1..50: mol_type = other DNA
acaactcttctctccttctcatcacctccaatataacaaataaataaaac

SEQ ID NO: 29037 - DNA, 50 bp, synthetic construct
  source 1..50: mol_type = other DNA
ataaaaacaaacattttccatccatcaacctacaaccaattaaaaacacc

SEQ ID NO: 29038 - DNA, 50 bp, synthetic construct
  source 1..50: mol_type = other DNA
aactctttaaaactaatcctactacttaacataataaaaccctaattacc

SEQ ID NO: 29039 - DNA, 50 bp, synthetic construct
  source 1..50: mol_type = other DNA
raccaactttaaataaaaaaattcattaaaaacraacctctaacaaaccc

SEQ ID NO: 29040 - DNA, 50 bp, synthetic construct
  source 1..50: mol_type = other DNA
ctcaaaaaaataaacaatccccaaccctataactccccaatacaatcatc

SEQ ID NO: 29041 - DNA, 50 bp, synthetic construct
  source 1..50: mol_type = other DNA
aattctaaacctactaccacactacccaactaaaaactaataccaaaacc

SEQ ID NO: 29042 - DNA, 50 bp, synthetic construct
  source 1..50: mol_type = other DNA
tttatactcactccctaacctaaaaacattttccattttaaacrccctcc

SEQ ID NO: 29043 - DNA, 50 bp, synthetic construct
  source 1..50: mol_type = other DNA
ccctaacctaaaaacattttccattttaaacrccctccraaattaaaaac

SEQ ID NO: 29044 - DNA, 50 bp, synthetic construct
  source 1..50: mol_type = other DNA
acaaaatataatatactaaataaaaaaactcraacacactaaaaatccac

SEQ ID NO: 29045 - DNA, 50 bp, synthetic construct
  source 1..50: mol_type = other DNA
tacctttccacttacttaacatccaatctataaaaatctaaataaataac

SEQ ID NO: 29046 - DNA, 50 bp, synthetic construct
  source 1..50: mol_type = other DNA
aaaaaatttaaaaaacccacccaaaaacccaaaactaaaaaataacattc

SEQ ID NO: 29047 - DNA, 50 bp, synthetic construct
  source 1..50: mol_type = other DNA
atatattatacactacratcaaaaacactacttcacaatctttaatcttc

SEQ ID NO: 29048 - DNA, 50 bp, synthetic construct
  source 1..50: mol_type = other DNA
aattccacattcatttataaactttttctaactcrtctatctatcttccc

SEQ ID NO: 29049 - DNA, 50 bp, synthetic construct
  source 1..50: mol_type = other DNA
acactataaaaattataattccacattcatttataaactttttctaactc

SEQ ID NO: 29050 - DNA, 50 bp, synthetic construct
  source 1..50: mol_type = other DNA
aaacattctctactctcttaaaattacaacatacaaaaaaacaaaacaac

SEQ ID NO: 29051 - DNA, 50 bp, synthetic construct
  source 1..50: mol_type = other DNA
tcctataaacacaaaaccctatattctaaaaaccctcctttcctattatc

SEQ ID NO: 29052 - DNA, 50 bp, synthetic construct
  source 1..50: mol_type = other DNA
aaatttaatcaattaaccctaactcctaactatacaccctaaaacaatac

SEQ ID NO: 29053 - DNA, 50 bp, synthetic construct
  source 1..50: mol_type = other DNA
accccaaaatacacaaccaaaaaccaaaactaattaaccaaatcttaaac

SEQ ID NO: 29054 - DNA, 50 bp, synthetic construct
  source 1..50: mol_type = other DNA
cctaaatcctaacaaaaataaatactattatcctaacttacataaaatac

SEQ ID NO: 29055 - DNA, 50 bp, synthetic construct
  source 1..50: mol_type = other DNA
ataaataaccaaaataaaaccatcacttctcctcatccataaccttaaac

SEQ ID NO: 29056 - DNA, 50 bp, synthetic construct
  source 1..50: mol_type = other DNA
aaccrctaaaaacaacaaaaaccraacttatactaaacrtatacctactc

SEQ ID NO: 29057 - DNA, 50 bp, synthetic construct
  source 1..50: mol_type = other DNA
caaacctaaaacaaccrctaaaaacaacaaaaaccraacttatactaaac

SEQ ID NO: 29058 - DNA, 50 bp, synthetic construct
  source 1..50: mol_type = other DNA
tcaaaacttcctaataaactactactaaacctaccrtctcaacaaataac

SEQ ID NO: 29059 - DNA, 50 bp, synthetic construct
  source 1..50: mol_type = other DNA
taataaaaaatttttctctactcattactccacaacaactcraaaccaac

SEQ ID NO: 29060 - DNA, 50 bp, synthetic construct
  source 1..50: mol_type = other DNA
atttctaactaataaaaaatttttctctactcattactccacaacaactc

SEQ ID NO: 29061 - DNA, 50 bp, synthetic construct
  source 1..50: mol_type = other DNA
atatttccataactatacaaactaaaataataaaataccctaaaatctac

SEQ ID NO: 29062 - DNA, 50 bp, synthetic construct
  source 1..50: mol_type = other DNA
aaaaaaacacctaactaaaccaaaaacaaccctacctatacttaaaaacc

SEQ ID NO: 29063 - DNA, 50 bp, synthetic construct
  source 1..50: mol_type = other DNA
accaaataccttcttcccaaacaaactaaatcaaaaacttaccaccaacc

SEQ ID NO: 29064 - DNA, 50 bp, synthetic construct
  source 1..50: mol_type = other DNA
aaactcaaaaaaacaaaataactaactacctaaaacacccaataaaaatc

SEQ ID NO: 29065 - DNA, 50 bp, synthetic construct
  source 1..50: mol_type = other DNA
tataatcataaataacccatataaactaaataatactatattttacccac

SEQ ID NO: 29066 - DNA, 50 bp, synthetic construct
  source 1..50: mol_type = other DNA
aacaatttaaaacccttatatttaacaaatcacaccacacaatccctccc

SEQ ID NO: 29067 - DNA, 50 bp, synthetic construct
  source 1..50: mol_type = other DNA
aaataacaaattctctttaatttcctcctaacaataaaaaacaaacaaac

SEQ ID NO: 29068 - DNA, 50 bp, synthetic construct
  source 1..50: mol_type = other DNA
aaattctctttaatttcctcctaacaataaaaaacaaacaaacractacc

SEQ ID NO: 29069 - DNA, 50 bp, synthetic construct
  source 1..50: mol_type = other DNA
cttactaaaaaaaacrttctaaccaaaaatccctaccctatcctaccccc

SEQ ID NO: 29070 - DNA, 50 bp, synthetic construct
  source 1..50: mol_type = other DNA
ctctaaatctaaaatttaataaataaaacctctatctcaattccaacacc

SEQ ID NO: 29071 - DNA, 50 bp, synthetic construct
  source 1..50: mol_type = other DNA
aaaaaacaataaataatacratatccttatctacacacaaaaaaacaaac

SEQ ID NO: 29072 - DNA, 50 bp, synthetic construct
  source 1..50: mol_type = other DNA
aattacccaaaatcaaacaacaataaactctaaaaaacaataaataatac

SEQ ID NO: 29073 - DNA, 50 bp, synthetic construct
  source 1..50: mol_type = other DNA
ctcacttctaatcctctctatcctaaaaaccctcctcttaaaaaaaatcc

SEQ ID NO: 29074 - DNA, 50 bp, synthetic construct
  source 1..50: mol_type = other DNA
accaaataaaaaaaccrccccctctctaaacaaaactacaaataaaatac

SEQ ID NO: 29075 - DNA, 50 bp, synthetic construct
  source 1..50: mol_type = other DNA
aaataaaaaaaccrccccctctctaaacaaaactacaaataaaatacrcc

SEQ ID NO: 29076 - DNA, 50 bp, synthetic construct
  source 1..50: mol_type = other DNA
ataaccccctaacraacacttataaaacctacaattctttcctttacctc

SEQ ID NO: 29077 - DNA, 50 bp, synthetic construct
  source 1..50: mol_type = other DNA
tatccttttctactttaacaaaaatataataaaacaactcactccccacc

SEQ ID NO: 29078 - DNA, 50 bp, synthetic construct
  source 1..50: mol_type = other DNA
cactccccaccrccaaaaatccaaccttcaccttaatataaaactaattc

SEQ ID NO: 29079 - DNA, 50 bp, synthetic construct
  source 1..50: mol_type = other DNA
tcrtactaaaaataaaattccaaaataaataccaaatcctaaaaacactc

SEQ ID NO: 29080 - DNA, 50 bp, synthetic construct
  source 1..50: mol_type = other DNA
acraatattcctaaaacctaatacttactttaaaatctcaccttcaatac

SEQ ID NO: 29081 - DNA, 50 bp, synthetic construct
  source 1..50: mol_type = other DNA
taattcaacctaatattaaaaaaccttaccaaaaaaaacctctcaatatc

SEQ ID NO: 29082 - DNA, 50 bp, synthetic construct
  source 1..50: mol_type = other DNA
aataaaaaccracacctaaaatacctatcactataaaaaataatatcacc

SEQ ID NO: 29083 - DNA, 50 bp, synthetic construct
  source 1..50: mol_type = other DNA
ttaaatcaacrataacatcaccctctataataacaaatactctaaatacc

SEQ ID NO: 29084 - DNA, 50 bp, synthetic construct
  source 1..50: mol_type = other DNA
aaataccractcttactcataaatcccaaaaaatactaaccctaaatctc

SEQ ID NO: 29085 - DNA, 50 bp, synthetic construct
  source 1..50: mol_type = other DNA
ctcataaatcccaaaaaatactaaccctaaatctcrtctctattaacttc

SEQ ID NO: 29086 - DNA, 50 bp, synthetic construct
  source 1..50: mol_type = other DNA
cataattacaaacctaaaaattaaataataataaaaccaaccacataaac

SEQ ID NO: 29087 - DNA, 50 bp, synthetic construct
  source 1..50: mol_type = other DNA
ttcttataacttttaccttcttatctcaaatctacatttaaaaaaaaacc

SEQ ID NO: 29088 - DNA, 50 bp, synthetic construct
  source 1..50: mol_type = other DNA
aaaacaaataaatcccttaaatccaaaaaattaaaactacaataaactac

SEQ ID NO: 29089 - DNA, 50 bp, synthetic construct
  source 1..50: mol_type = other DNA
aaataacrtacttatattcacttaactaactacaaaatcaaaaaaatacc

SEQ ID NO: 29090 - DNA, 50 bp, synthetic construct
  source 1..50: mol_type = other DNA
taaaccctaaaaaatcaaaactacaataaaccttaaacrtaccactacac

SEQ ID NO: 29091 - DNA, 50 bp, synthetic construct
  source 1..50: mol_type = other DNA
tttacttctaataaccaactcaaattactttctttttttttaaaacaatc

SEQ ID NO: 29092 - DNA, 50 bp, synthetic construct
  source 1..50: mol_type = other DNA
taaaaccacaataatttaccacacaataaaaatacttaaaaaatactttc

SEQ ID NO: 29093 - DNA, 50 bp, synthetic construct
  source 1..50: mol_type = other DNA
tttctaacatctttctacatctttccctaaataacctcttaaacccaatc

SEQ ID NO: 29094 - DNA, 50 bp, synthetic construct
  source 1..50: mol_type = other DNA
actacttaaaacaaaatacaataatatctcatcccaaatattctccaaac

SEQ ID NO: 29095 - DNA, 50 bp, synthetic construct
  source 1..50: mol_type = other DNA
atcccaaatattctccaaacrtttcttccatccttccaaaatttaaattc

SEQ ID NO: 29096 - DNA, 50 bp, synthetic construct
  source 1..50: mol_type = other DNA
actctaataaaaaaacctcaaacacactaaaaaatcaattcaaaactaac

SEQ ID NO: 29097 - DNA, 50 bp, synthetic construct
  source 1..50: mol_type = other DNA
ctaaaaaatcaattcaaaactaacrtctctctcttaccctctacctaacc

SEQ ID NO: 29098 - DNA, 50 bp, synthetic construct
  source 1..50: mol_type = other DNA
attactttaaaaaatctcaatttcttaacaaataactcaccaaaacctac

SEQ ID NO: 29099 - DNA, 50 bp, synthetic construct
  source 1..50: mol_type = other DNA
acactaaatatattactcttatttcctaaaaaacaaacattaacaacaac

SEQ ID NO: 29100 - DNA, 50 bp, synthetic construct
  source 1..50: mol_type = other DNA
aatacatttcatcctttaccattcttcaaaaatactattaatatttcctc

SEQ ID NO: 29101 - DNA, 50 bp, synthetic construct
  source 1..50: mol_type = other DNA
aatcccttatacaaataaacccatccccaaaactattactactaacaacc

SEQ ID NO: 29102 - DNA, 50 bp, synthetic construct
  source 1..50: mol_type = other DNA
aaaactacaacatccccactccctaataatctaataactaaaaaacaacc

SEQ ID NO: 29103 - DNA, 50 bp, synthetic construct
  source 1..50: mol_type = other DNA
aaaactttataacttcaaaactctttcacaaattaaacrcrataactcac

SEQ ID NO: 29104 - DNA, 50 bp, synthetic construct
  source 1..50: mol_type = other DNA
attacccaaaataatctcaaactccaaaactcaaacaattctaccacctc

SEQ ID NO: 29105 - DNA, 50 bp, synthetic construct
  source 1..50: mol_type = other DNA
aaaccccatctctaccaaatatacaaaaataaccraacrtaataactaac

SEQ ID NO: 29106 - DNA, 50 bp, synthetic construct
  source 1..50: mol_type = other DNA
taaaacaacaaaaacccaacaataactataatctaataaatatcaccaac

SEQ ID NO: 29107 - DNA, 50 bp, synthetic construct
  source 1..50: mol_type = other DNA
accaaacaaactataactactctacactaaccataaattccaaaaaactc

SEQ ID NO: 29108 - DNA, 50 bp, synthetic construct
  source 1..50: mol_type = other DNA
cattttatccctaaaaccccacaaaataaattctcaacaaataattttcc

SEQ ID NO: 29109 - DNA, 50 bp, synthetic construct
  source 1..50: mol_type = other DNA
aaaaaccaaaaacaaaaccatcaacataaaaaaaacctatccctaaaaac

SEQ ID NO: 29110 - DNA, 50 bp, synthetic construct
  source 1..50: mol_type = other DNA
tttcccaaaaacctaacaaaaaatctaaactaaacccaataaaaaacatc

SEQ ID NO: 29111 - DNA, 50 bp, synthetic construct
  source 1..50: mol_type = other DNA
aacctaacaaaaaatctaaactaaacccaataaaaaacatcrtatctccc

SEQ ID NO: 29112 - DNA, 50 bp, synthetic construct
  source 1..50: mol_type = other DNA
actactactaacctaaaataacaacttccaaaacacaaaacaaaaacccc

SEQ ID NO: 29113 - DNA, 50 bp, synthetic construct
  source 1..50: mol_type = other DNA
aactaacctacctaaaacaaccaaaccctaaactaaataaaaccttatac

SEQ ID NO: 29114 - DNA, 50 bp, synthetic construct
  source 1..50: mol_type = other DNA
aaaaacacatattaaaaactaaacatttactcaactaaacaaactaccac

SEQ ID NO: 29115 - DNA, 50 bp, synthetic construct
  source 1..50: mol_type = other DNA
aacttctttcacraaatcctaacccaaaaaaacccaacaacaaaacttcc

SEQ ID NO: 29116 - DNA, 50 bp, synthetic construct
  source 1..50: mol_type = other DNA
ataaaatccraaccacctcccaaaaaaacaaaacactcctaaaataaaac

SEQ ID NO: 29117 - DNA, 50 bp, synthetic construct
  source 1..50: mol_type = other DNA
tttacaaaacctacttctatactaaaaaacraacaaatctaaaaacaatc

SEQ ID NO: 29118 - DNA, 50 bp, synthetic construct
  source 1..50: mol_type = other DNA
taaccraaaaaccrtattaacaaacaaaacractatcttcaaacttactc

SEQ ID NO: 29119 - DNA, 50 bp, synthetic construct
  source 1..50: mol_type = other DNA
rcttcccaacacaaaaacaaaccttataaaaatcacaactatcraatcac

SEQ ID NO: 29120 - DNA, 50 bp, synthetic construct
  source 1..50: mol_type = other DNA
raaaaaaaacaacrcacaccaacacctactccraacaaaattattttaac

SEQ ID NO: 29121 - DNA, 50 bp, synthetic construct
  source 1..50: mol_type = other DNA
aaaaataaaatcataacaccttccrtaccraaaactaactccaatacacc

SEQ ID NO: 29122 - DNA, 50 bp, synthetic construct
  source 1..50: mol_type = other DNA
aacttcaataaattaaaatatataaaaaacaaccaaacacaataactcac

SEQ ID NO: 29123 - DNA, 50 bp, synthetic construct
  source 1..50: mol_type = other DNA
aactccaacatacctaactataaccttaatcaaataacrtaatttccccc

SEQ ID NO: 29124 - DNA, 50 bp, synthetic construct
  source 1..50: mol_type = other DNA
aattcataccctaactccaacatacctaactataaccttaatcaaataac

SEQ ID NO: 29125 - DNA, 50 bp, synthetic construct
  source 1..50: mol_type = other DNA
aaattaaaacataaatccaaacaattaactccaccaaacaaaacaatcac

SEQ ID NO: 29126 - DNA, 50 bp, synthetic construct
  source 1..50: mol_type = other DNA
catttctctcttaaccctttcctcaactaacaaacatacttcctccaacc

SEQ ID NO: 29127 - DNA, 50 bp, synthetic construct
  source 1..50: mol_type = other DNA
aaaaacaacttctactctcaaatttaatcaattaattctccctatatttc

SEQ ID NO: 29128 - DNA, 50 bp, synthetic construct
  source 1..50: mol_type = other DNA
aaacctaaactaaataaaactaataacctcacrtaataccttaaacaaac

SEQ ID NO: 29129 - DNA, 50 bp, synthetic construct
  source 1..50: mol_type = other DNA
cctaaactaaataaaactaataacctcacrtaataccttaaacaaacrac

SEQ ID NO: 29130 - DNA, 50 bp, synthetic construct
  source 1..50: mol_type = other DNA
ccacaacraatattaacacaataaaactaaacttaaacacraataaaatc

SEQ ID NO: 29131 - DNA, 50 bp, synthetic construct
  source 1..50: mol_type = other DNA
aaaccraaatttcaccaaattaatcaaaataatctcaaacttctaacctc

SEQ ID NO: 29132 - DNA, 50 bp, synthetic construct
  source 1..50: mol_type = other DNA
caactaccaattactttaaataataacrtcaaaatatcttcaaataacac

SEQ ID NO: 29133 - DNA, 50 bp, synthetic construct
  source 1..50: mol_type = other DNA
acaactaacaattaactcttaacaattttaaacttatataaaaaacaacc

SEQ ID NO: 29134 - DNA, 50 bp, synthetic construct
  source 1..50: mol_type = other DNA
actaacaattaactcttaacaattttaaacttatataaaaaacaaccrcc

SEQ ID NO: 29135 - DNA, 50 bp, synthetic construct
  source 1..50: mol_type = other DNA
acaattaactcttaacaattttaaacttatataaaaaacaaccrccrccc

SEQ ID NO: 29136 - DNA, 50 bp, synthetic construct
  source 1..50: mol_type = other DNA
tttaaaaaaaacacatacacactaaacaatttcaaacratacaaacaaac

SEQ ID NO: 29137 - DNA, 50 bp, synthetic construct
  source 1..50: mol_type = other DNA
taaaataatataacccaaaaacatctaaactatttctatactcatatcac

SEQ ID NO: 29138 - DNA, 50 bp, synthetic construct
  source 1..50: mol_type = other DNA
racttattttatattaacaactattaaaactcaaatctcattcatctcac

SEQ ID NO: 29139 - DNA, 50 bp, synthetic construct
  source 1..50: mol_type = other DNA
rtaaaataaataaaatttaaactccaataattaccaacacaaaacaaacc

SEQ ID NO: 29140 - DNA, 50 bp, synthetic construct
  source 1..50: mol_type = other DNA
aaactaaacacaataaaacaaaataaaataacrcaacatctcctactacc

SEQ ID NO: 29141 - DNA, 50 bp, synthetic construct
  source 1..50: mol_type = other DNA
tattaactactataacaaacaaaaaccctcccttataccttcctactatc

SEQ ID NO: 29142 - DNA, 50 bp, synthetic construct
  source 1..50: mol_type = other DNA
aatcaatacaaaaacataactctaaaaaccaaaaaaactctaaacaaatc

SEQ ID NO: 29143 - DNA, 50 bp, synthetic construct
  source 1..50: mol_type = other DNA
caatcattatacttacctcacaaaatttcaaaattcaaatcaaacaatac

SEQ ID NO: 29144 - DNA, 50 bp, synthetic construct
  source 1..50: mol_type = other DNA
atacatcraactatctacaaaactttaccaaaaccctcctttctcatttc

SEQ ID NO: 29145 - DNA, 50 bp, synthetic construct
  source 1..50: mol_type = other DNA
taaaaaacaataaacataatcaatatacttttaaaattccttaactaccc

SEQ ID NO: 29146 - DNA, 50 bp, synthetic construct
  source 1..50: mol_type = other DNA
ctaaaacaactataccrcctcctcacactctcccttaattaactaaatac

SEQ ID NO: 29147 - DNA, 50 bp, synthetic construct
  source 1..50: mol_type = other DNA
aattatccaaaaactcaaaactcttcttaaaactccaccaccccaaaacc

SEQ ID NO: 29148 - DNA, 50 bp, synthetic construct
  source 1..50: mol_type = other DNA
tacatacaatacaaatttattccttaatcacttaacaatccataacaaac

SEQ ID NO: 29149 - DNA, 50 bp, synthetic construct
  source 1..50: mol_type = other DNA
tctataacaataaaaactacctcaactcacttcactcatttaaattaccc

SEQ ID NO: 29150 - DNA, 50 bp, synthetic construct
  source 1..50: mol_type = other DNA
taattttatccccrcttcacatataaaatatctaaaattcaaataaaatc

SEQ ID NO: 29151 - DNA, 50 bp, synthetic construct
  source 1..50: mol_type = other DNA
atcttaaaaaaacracttcatctaaacttcaaatatttcacatataaaac

SEQ ID NO: 29152 - DNA, 50 bp, synthetic construct
  source 1..50: mol_type = other DNA
taacaactatatctccctatactatatttaattccaccaacaaaactaac

SEQ ID NO: 29153 - DNA, 50 bp, synthetic construct
  source 1..50: mol_type = other DNA
aaatctccttacctaacccctaaacctaaaaataaaaacttcatataccc

SEQ ID NO: 29154 - DNA, 50 bp, synthetic construct
  source 1..50: mol_type = other DNA
cacaactactcractcacccataacactaccaaaacaacaaacttaaacc

SEQ ID NO: 29155 - DNA, 50 bp, synthetic construct
  source 1..50: mol_type = other DNA
cccrccttaacracttaaacctactactttaacaataccataaataaacc

SEQ ID NO: 29156 - DNA, 50 bp, synthetic construct
  source 1..50: mol_type = other DNA
ataaataaaccraacaactataaaataaataaaacaaaactataacccac

SEQ ID NO: 29157 - DNA, 50 bp, synthetic construct
  source 1..50: mol_type = other DNA
cacaactttccaaattatctaaaaattaacaaacaacaaaaacccctacc

SEQ ID NO: 29158 - DNA, 50 bp, synthetic construct
  source 1..50: mol_type = other DNA
aaaaaaaacactaaaaaacccaaaatacctaaaaaaactatatcracaac

SEQ ID NO: 29159 - DNA, 50 bp, synthetic construct
  source 1..50: mol_type = other DNA
acttacaaaaaaaacactaaaaaacccaaaatacctaaaaaaactatatc

SEQ ID NO: 29160 - DNA, 50 bp, synthetic construct
  source 1..50: mol_type = other DNA
tatatttaaatataataattcatcatttcctacactaaaaattcctaatc

SEQ ID NO: 29161 - DNA, 50 bp, synthetic construct
  source 1..50: mol_type = other DNA
caaccaaataaaaaaacccatctcataaccaactctcaaaaaaattctcc

SEQ ID NO: 29162 - DNA, 50 bp, synthetic construct
  source 1..50: mol_type = other DNA
aaaaaccaacrtaattaaaccraaaccaaaaatttatattaccccataac

SEQ ID NO: 29163 - DNA, 50 bp, synthetic construct
  source 1..50: mol_type = other DNA
aacaattttaaataactatctcttacratcccctcctacacaactataac

SEQ ID NO: 29164 - DNA, 50 bp, synthetic construct
  source 1..50: mol_type = other DNA
attctactactactaaatttattcattcttctccctcacaattttaactc

SEQ ID NO: 29165 - DNA, 50 bp, synthetic construct
  source 1..50: mol_type = other DNA
caactatccctactacaacaaacttaaaattaatttcccaattccctaac

SEQ ID NO: 29166 - DNA, 50 bp, synthetic construct
  source 1..50: mol_type = other DNA
aacaaacttctaaacaaatttacccttaactcatatataattaaacctac

SEQ ID NO: 29167 - DNA, 50 bp, synthetic construct
  source 1..50: mol_type = other DNA
cataattcataaatccttctacttaaataaattttatattacctaccacc

SEQ ID NO: 29168 - DNA, 50 bp, synthetic construct
  source 1..50: mol_type = other DNA
ataaaacacaacctaaaccaacraacatacttacatcacatccaaatccc

SEQ ID NO: 29169 - DNA, 50 bp, synthetic construct
  source 1..50: mol_type = other DNA
acaattccctcaaatttattacraaacctaaatataatacaaacataccc

SEQ ID NO: 29170 - DNA, 50 bp, synthetic construct
  source 1..50: mol_type = other DNA
cccaaccccatccataaaaacaaaatcctttctcaaccattaacaaaaac

SEQ ID NO: 29171 - DNA, 50 bp, synthetic construct
  source 1..50: mol_type = other DNA
aaaactcaactaaataacaactataatacttccataattcaatataatac

SEQ ID NO: 29172 - DNA, 50 bp, synthetic construct
  source 1..50: mol_type = other DNA
taaaacaattccrtaaaaacatttctctaacaaataactacaaacttcac

SEQ ID NO: 29173 - DNA, 50 bp, synthetic construct
  source 1..50: mol_type = other DNA
ataaaaaaatctacataaaaatatacctcttatactatacaatcttctac

SEQ ID NO: 29174 - DNA, 50 bp, synthetic construct
  source 1..50: mol_type = other DNA
ccatataaacaaaacaaaaaactactaacaactaaaatacaaaaaacccc

SEQ ID NO: 29175 - DNA, 50 bp, synthetic construct
  source 1..50: mol_type = other DNA
aaaacttaacataaacacccrtatttaatattactataacractactaac

SEQ ID NO: 29176 - DNA, 50 bp, synthetic construct
  source 1..50: mol_type = other DNA
tatacctataaacatatataaaaactatttattttaaaaattcatctctc

SEQ ID NO: 29177 - DNA, 50 bp, synthetic construct
  source 1..50: mol_type = other DNA
ataaatttctaaaacaaacaacttttacatatattcacaaacacaatcac

SEQ ID NO: 29178 - DNA, 50 bp, synthetic construct
  source 1..50: mol_type = other DNA
ttctaaaacaaacaacttttacatatattcacaaacacaatcacrtcaac

SEQ ID NO: 29179 - DNA, 50 bp, synthetic construct
  source 1..50: mol_type = other DNA
caacttttacatatattcacaaacacaatcacrtcaacrtcaaaaatccc

SEQ ID NO: 29180 - DNA, 50 bp, synthetic construct
  source 1..50: mol_type = other DNA
ccactaaaacatatttaccccaaaaaatataaaatctcctcctaacttac

SEQ ID NO: 29181 - DNA, 50 bp, synthetic construct
  source 1..50: mol_type = other DNA
accaatatattaatcaatattctattataacccaaactccaaaactctcc

SEQ ID NO: 29182 - DNA, 50 bp, synthetic construct
  source 1..50: mol_type = other DNA
tctactcaaacaacataaatcatatccrctcacattccattaaaaaaaac

SEQ ID NO: 29183 - DNA, 50 bp, synthetic construct
  source 1..50: mol_type = other DNA
tatcttctacctctatctaaaaatattacacrtccaacaccrtttaccac

SEQ ID NO: 29184 - DNA, 50 bp, synthetic construct
  source 1..50: mol_type = other DNA
atttacaactatcttctacctctatctaaaaatattacacrtccaacacc

SEQ ID NO: 29185 - DNA, 50 bp, synthetic construct
  source 1..50: mol_type = other DNA
ctccccttactaaattactcctaaaaatcacrtaacaaacratattaaac

SEQ ID NO: 29186 - DNA, 50 bp, synthetic construct
  source 1..50: mol_type = other DNA
aaacaaatttatccttaaatcccattattccaacacttatttcttaatac

SEQ ID NO: 29187 - DNA, 50 bp, synthetic construct
  source 1..50: mol_type = other DNA
ccrtctttattcaattcaaaaacctaaaaactttatattctcttccattc

SEQ ID NO: 29188 - DNA, 50 bp, synthetic construct
  source 1..50: mol_type = other DNA
aaaacattatttttaccactaaaatttaacctatctacaactaaaactcc

SEQ ID NO: 29189 - DNA, 50 bp, synthetic construct
  source 1..50: mol_type = other DNA
aaaaacattaacctcraaaactaactttccraaaacaaaacrataacaac

SEQ ID NO: 29190 - DNA, 50 bp, synthetic construct
  source 1..50: mol_type = other DNA
caccttaaccaacccaaataaataacaccatcrataatataaacctttcc

SEQ ID NO: 29191 - DNA, 50 bp, synthetic construct
  source 1..50: mol_type = other DNA
taaaacttaaaaacaccccctacctataatacttaataacraaaaacaac

SEQ ID NO: 29192 - DNA, 50 bp, synthetic construct
  source 1..50: mol_type = other DNA
cctaattaccaaaatcccaacaaaaaactaaaattaaaaaaacaaccaac

SEQ ID NO: 29193 - DNA, 50 bp, synthetic construct
  source 1..50: mol_type = other DNA
aatataacaaatcaacttacaatcctatcattcactcaacaaccrtttcc

SEQ ID NO: 29194 - DNA, 50 bp, synthetic construct
  source 1..50: mol_type = other DNA
aaaaaaacaaaaaccaactctatttacaaactaacctcctaaaaaatccc

SEQ ID NO: 29195 - DNA, 50 bp, synthetic construct
  source 1..50: mol_type = other DNA
ctaacctttatttctctaccrtatcraaaacaccttcctaaaactaaacc

SEQ ID NO: 29196 - DNA, 50 bp, synthetic construct
  source 1..50: mol_type = other DNA
taaaattatacctccaacttatactaaaaatactaacttaaaaacccccc

SEQ ID NO: 29197 - DNA, 50 bp, synthetic construct
  source 1..50: mol_type = other DNA
ttatacctccaacttatactaaaaatactaacttaaaaaccccccratcc

SEQ ID NO: 29198 - DNA, 50 bp, synthetic construct
  source 1..50: mol_type = other DNA
aaataaatcaattcccaaaataaaactacctcctatttccaaaccaaacc

SEQ ID NO: 29199 - DNA, 50 bp, synthetic construct
  source 1..50: mol_type = other DNA
aaacttaataccattacttcctaatataaatatttaaaattccaactctc

SEQ ID NO: 29200 - DNA, 50 bp, synthetic construct
  source 1..50: mol_type = other DNA
ctaacttacaacctttaccctattatctttacccaaaccatatttactac

SEQ ID NO: 29201 - DNA, 50 bp, synthetic construct
  source 1..50: mol_type = other DNA
actaaaaaaaaactttatattttaaccccaaaacaaaccataaaatttcc

SEQ ID NO: 29202 - DNA, 50 bp, synthetic construct
  source 1..50: mol_type = other DNA
ccacaaaaccaaatacaaatccattcctcaaataaactaaaaatatcacc

SEQ ID NO: 29203 - DNA, 50 bp, synthetic construct
  source 1..50: mol_type = other DNA
cctactaaaaactatactttattctaaactctaaaactaaaaaattaacc

SEQ ID NO: 29204 - DNA, 50 bp, synthetic construct
  source 1..50: mol_type = other DNA
aatcaaaaaaccaaaatattcctttcaactataaatcattttaaaacctc

SEQ ID NO: 29205 - DNA, 50 bp, synthetic construct
  source 1..50: mol_type = other DNA
tccaacacaaaccttatatttttccatctaaaaacrtaaaaaaccacaac

SEQ ID NO: 29206 - DNA, 50 bp, synthetic construct
  source 1..50: mol_type = other DNA
ctcacrcttctaaataaaaaaacacaaaatctatattaaaaaacactaac

SEQ ID NO: 29207 - DNA, 50 bp, synthetic construct
  source 1..50: mol_type = other DNA
caatcacaataatattaacaatacctataacttaatcatcaataaaaatc

SEQ ID NO: 29208 - DNA, 50 bp, synthetic construct
  source 1..50: mol_type = other DNA
ataatattccaaaatatccacaacaacaaaaataaaatatacaaacaccc

SEQ ID NO: 29209 - DNA, 50 bp, synthetic construct
  source 1..50: mol_type = other DNA
ttaccttacaaaaatacccccraaaaaaatcacaataaaaaccccaaccc

SEQ ID NO: 29210 - DNA, 50 bp, synthetic construct
  source 1..50: mol_type = other DNA
ccraaaaaaatcacaataaaaaccccaacccrccaaaaaaacaaatttac

SEQ ID NO: 29211 - DNA, 50 bp, synthetic construct
  source 1..50: mol_type = other DNA
accctatttacaacttcttcaaaaaccaaaccccaaactacaaaactcac

SEQ ID NO: 29212 - DNA, 50 bp, synthetic construct
  source 1..50: mol_type = other DNA
taatttctaaaaaaattacaaacaaaataataatacaattcaaacaacac

SEQ ID NO: 29213 - DNA, 50 bp, synthetic construct
  source 1..50: mol_type = other DNA
caaaaaccaaaaaaacacattcctttcaaatccaaacctacctaacccrc

SEQ ID NO: 29214 - DNA, 50 bp, synthetic construct
  source 1..50: mol_type = other DNA
aacaaaaaccaaaaaaacacattcctttcaaatccaaacctacctaaccc

SEQ ID NO: 29215 - DNA, 50 bp, synthetic construct
  source 1..50: mol_type = other DNA
atataaaaacctttaaattcacaacctacataccaaaaatatcatttatc

SEQ ID NO: 29216 - DNA, 50 bp, synthetic construct
  source 1..50: mol_type = other DNA
aacatatccctattaatatttttttctaatatctaactattcctttaccc

SEQ ID NO: 29217 - DNA, 50 bp, synthetic construct
  source 1..50: mol_type = other DNA
acttctaaaaaaactaaataaacacaaacactataatcaaaaaaattatc

SEQ ID NO: 29218 - DNA, 50 bp, synthetic construct
  source 1..50: mol_type = other DNA
aaaactcacaaacacatataaaaccaaaaaaaccaaacataaaaaaacac

SEQ ID NO: 29219 - DNA, 50 bp, synthetic construct
  source 1..50: mol_type = other DNA
tctcaaaaacaaacaaacaaaaacataattcaacracctttaacaaattc

SEQ ID NO: 29220 - DNA, 50 bp, synthetic construct
  source 1..50: mol_type = other DNA
acctttaacaaattcrcratattatataactaccacttctatctaattcc

SEQ ID NO: 29221 - DNA, 50 bp, synthetic construct
  source 1..50: mol_type = other DNA
aaaacaatactaacacatactacaacacraaaaaaccctaacaacataac

SEQ ID NO: 29222 - DNA, 50 bp, synthetic construct
  source 1..50: mol_type = other DNA
tatataaaaaataaatctaatatcaaaaaacctaactacaaatacacccc

SEQ ID NO: 29223 - DNA, 50 bp, synthetic construct
  source 1..50: mol_type = other DNA
aaaaactaacaacttaacccaatccccrtttataaaaaaactaacacccc

SEQ ID NO: 29224 - DNA, 50 bp, synthetic construct
  source 1..50: mol_type = other DNA
aactttaaataaaacccttcctctctcraaatatcaatttccttataaac

SEQ ID NO: 29225 - DNA, 50 bp, synthetic construct
  source 1..50: mol_type = other DNA
ccctaacccatctaattctttaattatcttccatcttctaccttccttac

SEQ ID NO: 29226 - DNA, 50 bp, synthetic construct
  source 1..50: mol_type = other DNA
caaaaccatatccaccaaaatccraatctctttcaaaacaacttcccaac

SEQ ID NO: 29227 - DNA, 50 bp, synthetic construct
  source 1..50: mol_type = other DNA
aataaaatcatcctacaaaaaaaatatcaaaaccatatccaccaaaatcc

SEQ ID NO: 29228 - DNA, 50 bp, synthetic construct
  source 1..50: mol_type = other DNA
aaaaccactaaaatcccatacacaatttctaaaaacaaacrtaaaaacrc

SEQ ID NO: 29229 - DNA, 50 bp, synthetic construct
  source 1..50: mol_type = other DNA
taaaaaccactaaaatcccatacacaatttctaaaaacaaacrtaaaaac

SEQ ID NO: 29230 - DNA, 50 bp, synthetic construct
  source 1..50: mol_type = other DNA
acaaactaaaacctaaatcccaaacttcatttatctaactcttctaaacc

SEQ ID NO: 29231 - DNA, 50 bp, synthetic construct
  source 1..50: mol_type = other DNA
attaccaacrtcactcttattatttcaaaatccatctatatttcccatac

SEQ ID NO: 29232 - DNA, 50 bp, synthetic construct
  source 1..50: mol_type = other DNA
caacrtcactcttattatttcaaaatccatctatatttcccatacrttac

SEQ ID NO: 29233 - DNA, 50 bp, synthetic construct
  source 1..50: mol_type = other DNA
aacracaaaaaaacaaaactaaatttaaaacccaaaactcccaactccac

SEQ ID NO: 29234 - DNA, 50 bp, synthetic construct
  source 1..50: mol_type = other DNA
aacrtaaaattaaaaatcttaaattctaaacccaactctacctctctatc

SEQ ID NO: 29235 - DNA, 50 bp, synthetic construct
  source 1..50: mol_type = other DNA
aaaaaacaacattcattaaacaaatacttattaaactcctacactatacc

SEQ ID NO: 29236 - DNA, 50 bp, synthetic construct
  source 1..50: mol_type = other DNA
aaactacacaaaaatataaataccaaaaaataatatcattaaaaaccaac

SEQ ID NO: 29237 - DNA, 50 bp, synthetic construct
  source 1..50: mol_type = other DNA
caaccatacactatcrtttccacaatctcraatatttacacaaattaacc

SEQ ID NO: 29238 - DNA, 50 bp, synthetic construct
  source 1..50: mol_type = other DNA
tctaaaatcttaaaaaaattttatactcacaaccacaaccatacactatc

SEQ ID NO: 29239 - DNA, 50 bp, synthetic construct
  source 1..50: mol_type = other DNA
acaaaactttttctacctacttcttaccaaaaaaattttaaaaacccaac

SEQ ID NO: 29240 - DNA, 50 bp, synthetic construct
  source 1..50: mol_type = other DNA
aaaactaaactcttaacccratataaatcatccttccttttccataaaac

SEQ ID NO: 29241 - DNA, 50 bp, synthetic construct
  source 1..50: mol_type = other DNA
taaaaatattcaaacaattctaaaacaatacataacaaatactcatatac

SEQ ID NO: 29242 - DNA, 50 bp, synthetic construct
  source 1..50: mol_type = other DNA
accccaaactaatacaaaaacttctttataacaaaaaaaactccaaacac

SEQ ID NO: 29243 - DNA, 50 bp, synthetic construct
  source 1..50: mol_type = other DNA
tttcaaaaaaactctaaacttaatatcataataccaacaccrtaaatatc

SEQ ID NO: 29244 - DNA, 50 bp, synthetic construct
  source 1..50: mol_type = other DNA
tttataaaacrattaaacccccaacaaaattaaacttaattatcctcaac

SEQ ID NO: 29245 - DNA, 50 bp, synthetic construct
  source 1..50: mol_type = other DNA
aaaaacttaatcrttccataaaataaatccttctaaaaaaactcraaaac

SEQ ID NO: 29246 - DNA, 50 bp, synthetic construct
  source 1..50: mol_type = other DNA
tctataaaaaatacaaacaccrtcttatttcatcaactcaatactccaac

SEQ ID NO: 29247 - DNA, 50 bp, synthetic construct
  source 1..50: mol_type = other DNA
aaaaatcataaaatataacacaacaaataaaacttactaattaactatac

SEQ ID NO: 29248 - DNA, 50 bp, synthetic construct
  source 1..50: mol_type = other DNA
atatctttaactaacacttacataataatcttaatttcttattcaaaatc

SEQ ID NO: 29249 - DNA, 50 bp, synthetic construct
  source 1..50: mol_type = other DNA
aaccaaaaatacccaccccacaaaaaactaaaatacacattacacaaaac

SEQ ID NO: 29250 - DNA, 50 bp, synthetic construct
  source 1..50: mol_type = other DNA
tactatcaataccrcrctacttcctatattaaaataatactccactaaac

SEQ ID NO: 29251 - DNA, 50 bp, synthetic construct
  source 1..50: mol_type = other DNA
tctcctctaaatacraattaaacaacaataactcaaatacratcttaccc

SEQ ID NO: 29252 - DNA, 50 bp, synthetic construct
  source 1..50: mol_type = other DNA
aaaaaaatattctcraacaaaatcrcacctaaatcactactactcaatcc

SEQ ID NO: 29253 - DNA, 50 bp, synthetic construct
  source 1..50: mol_type = other DNA
accactaacacctaaaatatactaataaacraaactacaataaatataac

SEQ ID NO: 29254 - DNA, 50 bp, synthetic construct
  source 1..50: mol_type = other DNA
ataaaattatccttaaaaaaaccactaacacctaaaatatactaataaac

SEQ ID NO: 29255 - DNA, 50 bp, synthetic construct
  source 1..50: mol_type = other DNA
aaaaataatctactacraacaataataccctcaaacttaacrctctcccc

SEQ ID NO: 29256 - DNA, 50 bp, synthetic construct
  source 1..50: mol_type = other DNA
ccracaaccaaaaataatctactacraacaataataccctcaaacttaac

SEQ ID NO: 29257 - DNA, 50 bp, synthetic construct
  source 1..50: mol_type = other DNA
tcataaaattacacacraaaaaaacrctaaacctaaaaacactactaccc

SEQ ID NO: 29258 - DNA, 50 bp, synthetic construct
  source 1..50: mol_type = other DNA
aaaaatacaacttaaaatcccrataactaatccaatttcaaacaaatacc

SEQ ID NO: 29259 - DNA, 50 bp, synthetic construct
  source 1..50: mol_type = other DNA
aataaatcatccttaactaccracacctacctaaaactaaattaatcacc

SEQ ID NO: 29260 - DNA, 50 bp, synthetic construct
  source 1..50: mol_type = other DNA
aatccrttcraaatcrtctactatccataattcaaatacatataataatc

SEQ ID NO: 29261 - DNA, 50 bp, synthetic construct
  source 1..50: mol_type = other DNA
aaacatctattatcccctaaaaataaccaaaaaacaaaacaaacaaaatc

SEQ ID NO: 29262 - DNA, 50 bp, synthetic construct
  source 1..50: mol_type = other DNA
aaaaaatcttaaccctattacttcctaaactacaacttaccracatttcc

SEQ ID NO: 29263 - DNA, 50 bp, synthetic construct
  source 1..50: mol_type = other DNA
ctaaatcttcaaaaactcacaaataattcaccaaaaaataaaaacaacac

SEQ ID NO: 29264 - DNA, 50 bp, synthetic construct
  source 1..50: mol_type = other DNA
actaaacaaataccaacaaacaaaacaaaaacccaaaaatacacaaaaac

SEQ ID NO: 29265 - DNA, 50 bp, synthetic construct
  source 1..50: mol_type = other DNA
aaacaaataccaacaaacaaaacaaaaacccaaaaatacacaaaaacrac

SEQ ID NO: 29266 - DNA, 50 bp, synthetic construct
  source 1..50: mol_type = other DNA
cctactaaaacctcccatacaacctcctctctcctacttaaaaaaataac

SEQ ID NO: 29267 - DNA, 50 bp, synthetic construct
  source 1..50: mol_type = other DNA
cccttcaccaacactctacaaatactaaaaataacaatactataaacaac

SEQ ID NO: 29268 - DNA, 50 bp, synthetic construct
  source 1..50: mol_type = other DNA
aaataaatacctatcacctacaaccaaaactcctaatacccaaaacacac

SEQ ID NO: 29269 - DNA, 50 bp, synthetic construct
  source 1..50: mol_type = other DNA
caaaaataaacaacaataataacctctcaaatacaaatactaaaaaatcc

SEQ ID NO: 29270 - DNA, 50 bp, synthetic construct
  source 1..50: mol_type = other DNA
taacctctcaaatacaaatactaaaaaatccrcaaaaacaaaccraaacc

SEQ ID NO: 29271 - DNA, 50 bp, synthetic construct
  source 1..50: mol_type = other DNA
aaaacaaaccaaacctctcctctccrcataaaattatttttatctaaaac

SEQ ID NO: 29272 - DNA, 50 bp, synthetic construct
  source 1..50: mol_type = other DNA
tttactaacaattaacatccataaaactaataaccaatcctacatccaac

SEQ ID NO: 29273 - DNA, 50 bp, synthetic construct
  source 1..50: mol_type = other DNA
aataacacaaaaattttctataataacatcaaactacaaaacrtcaatac

SEQ ID NO: 29274 - DNA, 50 bp, synthetic construct
  source 1..50: mol_type = other DNA
ttatatcacttttatatccaaaaatcctccaaaaactaaatcaaaacacc

SEQ ID NO: 29275 - DNA, 50 bp, synthetic construct
  source 1..50: mol_type = other DNA
aaaaatacccctcccccrccaaaacttttaaaaattaaatttataacacc

SEQ ID NO: 29276 - DNA, 50 bp, synthetic construct
  source 1..50: mol_type = other DNA
ccaactactacaataccaaaaacaaaacccaaactatttcccaataaaac

SEQ ID NO: 29277 - DNA, 50 bp, synthetic construct
  source 1..50: mol_type = other DNA
ctaaaaaacaacctaaaccttactcctaatactacaacaattaacaatac

SEQ ID NO: 29278 - DNA, 50 bp, synthetic construct
  source 1..50: mol_type = other DNA
attattaaaaatacaaattctctaactccaatcaaccattaatcctaaac

SEQ ID NO: 29279 - DNA, 50 bp, synthetic construct
  source 1..50: mol_type = other DNA
caacacaaaacacaaaaatcccctcaaccctaaacaaaccraaaataacc

SEQ ID NO: 29280 - DNA, 50 bp, synthetic construct
  source 1..50: mol_type = other DNA
aaactaatatcaacacaaaacacaaaaatcccctcaaccctaaacaaacc

SEQ ID NO: 29281 - DNA, 50 bp, synthetic construct
  source 1..50: mol_type = other DNA
aaaaactctatactaacatatcttcatcttcttcaataaataaactaaac

SEQ ID NO: 29282 - DNA, 50 bp, synthetic construct
  source 1..50: mol_type = other DNA
atatcaaaaacctaaaaaataaatttcctactttccaaaattcatttacc

SEQ ID NO: 29283 - DNA, 50 bp, synthetic construct
  source 1..50: mol_type = other DNA
taaacctaatacttacrattcacaatcctaaattttacaaaccaatttcc

SEQ ID NO: 29284 - DNA, 50 bp, synthetic construct
  source 1..50: mol_type = other DNA
tcacaacaactttattcataatacccccaaactaaaaacaacccaaaccc

SEQ ID NO: 29285 - DNA, 50 bp, synthetic construct
  source 1..50: mol_type = other DNA
tcacttctacttatactcaaatccttattctaatttctttctaaataaac

SEQ ID NO: 29286 - DNA, 50 bp, synthetic construct
  source 1..50: mol_type = other DNA
aaaaaaaaaacrccctaaactaaaaattaaaaacctaactcctaaaatcc

SEQ ID NO: 29287 - DNA, 50 bp, synthetic construct
  source 1..50: mol_type = other DNA
tattcctactttcaaacacttaaaacttcctatataaaaaaaacaataac

SEQ ID NO: 29288 - DNA, 50 bp, synthetic construct
  source 1..50: mol_type = other DNA
taaacaacaataataaaattccrtttctattaaaaacacataaattaacc

SEQ ID NO: 29289 - DNA, 50 bp, synthetic construct
  source 1..50: mol_type = other DNA
aactaaaaacacctaaactatttaaaaacacaaaaacttaaacaaaaaac

SEQ ID NO: 29290 - DNA, 50 bp, synthetic construct
  source 1..50: mol_type = other DNA
aactatataaaacaaaaaaacacrcaattctccracaacctactaaaatc

SEQ ID NO: 29291 - DNA, 50 bp, synthetic construct
  source 1..50: mol_type = other DNA
atatttctaaatccataaaattacacattatttaaaccatattctacctc

SEQ ID NO: 29292 - DNA, 50 bp, synthetic construct
  source 1..50: mol_type = other DNA
ctaaacacctactaacataaatatcttacttaatctattacacaaaatcc

SEQ ID NO: 29293 - DNA, 50 bp, synthetic construct
  source 1..50: mol_type = other DNA
ctcacctctcccccaacctattatcttaattttttcraaaataaaaaatc

SEQ ID NO: 29294 - DNA, 50 bp, synthetic construct
  source 1..50: mol_type = other DNA
taattcatcaatataacaaccraatactcraaaccaacctcccaacaaac

SEQ ID NO: 29295 - DNA, 50 bp, synthetic construct
  source 1..50: mol_type = other DNA
cccccctaaaaaccacaaccaacaatttctcctatccatataaaaaacac

SEQ ID NO: 29296 - DNA, 50 bp, synthetic construct
  source 1..50: mol_type = other DNA
aacaatttaaaatccatatctaaaatcctaaatccccactacaaaccrtc

SEQ ID NO: 29297 - DNA, 50 bp, synthetic construct
  source 1..50: mol_type = other DNA
raacttctcctaaacctaacttccaaaacrtttaaaaaacttctcataac

SEQ ID NO: 29298 - DNA, 50 bp, synthetic construct
  source 1..50: mol_type = other DNA
aaattcaaaaaaaacccrtcaataaattccccatcataccacactacaac

SEQ ID NO: 29299 - DNA, 50 bp, synthetic construct
  source 1..50: mol_type = other DNA
ctaattaaccaccaacaactctcactataacactataaccaccaaaaatc

SEQ ID NO: 29300 - DNA, 50 bp, synthetic construct
  source 1..50: mol_type = other DNA
aacaatacrttttaatttctactaacaattccaaacaaaccataataaac

SEQ ID NO: 29301 - DNA, 50 bp, synthetic construct
  source 1..50: mol_type = other DNA
aacatattatacrtaaatatactacaaaaaaaaccccaaaaacrtcaccc

SEQ ID NO: 29302 - DNA, 50 bp, synthetic construct
  source 1..50: mol_type = other DNA
aaaaaccaacatattatacrtaaatatactacaaaaaaaaccccaaaaac

SEQ ID NO: 29303 - DNA, 50 bp, synthetic construct
  source 1..50: mol_type = other DNA
aaaaatactcttaaccractaaaacaaaacctaactcccaccaaaaaaac

SEQ ID NO: 29304 - DNA, 50 bp, synthetic construct
  source 1..50: mol_type = other DNA
ctaaaacaaaacctaactcccaccaaaaaaacrtatatatacctacaaac

SEQ ID NO: 29305 - DNA, 50 bp, synthetic construct
  source 1..50: mol_type = other DNA
ccaaaaaaacrtatatatacctacaaacracccraaaactatatatctcc

SEQ ID NO: 29306 - DNA, 50 bp, synthetic construct
  source 1..50: mol_type = other DNA
aacrtatttatcccrctaaactatttatatttctaataaaccctacaaac

SEQ ID NO: 29307 - DNA, 50 bp, synthetic construct
  source 1..50: mol_type = other DNA
aatatttaacacctaataccaaacctcaaaccraaactaaaaaaacacac

SEQ ID NO: 29308 - DNA, 50 bp, synthetic construct
  source 1..50: mol_type = other DNA
ccaaaaactttaaaaacrctaacccctctaaaaaacttccaaacactaac

SEQ ID NO: 29309 - DNA, 50 bp, synthetic construct
  source 1..50: mol_type = other DNA
ataacctaacttttataatcaaaaactctaattaactaactcaaaacaac

SEQ ID NO: 29310 - DNA, 50 bp, synthetic construct
  source 1..50: mol_type = other DNA
ccttaaaccaactaatcaaaactcctaatcacaaaaaccaaaccattatc

SEQ ID NO: 29311 - DNA, 50 bp, synthetic construct
  source 1..50: mol_type = other DNA
aaaatacctaactcacraaacaaatataaaaattaactcaaccaaaaccc

SEQ ID NO: 29312 - DNA, 50 bp, synthetic construct
  source 1..50: mol_type = other DNA
tacctaactcacraaacaaatataaaaattaactcaaccaaaacccraac

SEQ ID NO: 29313 - DNA, 50 bp, synthetic construct
  source 1..50: mol_type = other DNA
taaatataaacccaacctaaactaccacccaaaactaaacrtaaaaaatc

SEQ ID NO: 29314 - DNA, 50 bp, synthetic construct
  source 1..50: mol_type = other DNA
aacaccaatattcccctatacctaaaacaaaccraatacccctatttaac

SEQ ID NO: 29315 - DNA, 50 bp, synthetic construct
  source 1..50: mol_type = other DNA
caatattcccctatacctaaaacaaaccraatacccctatttaacratac

SEQ ID NO: 29316 - DNA, 50 bp, synthetic construct
  source 1..50: mol_type = other DNA
aaaaaccaaaatcctccraaacaaaacaaaacccaaataaacccctaaac

SEQ ID NO: 29317 - DNA, 50 bp, synthetic construct
  source 1..50: mol_type = other DNA
ccacaacraaaaaatatccaaaaatattcctatatctattacccrtaccc

SEQ ID NO: 29318 - DNA, 50 bp, synthetic construct
  source 1..50: mol_type = other DNA
aaaaaaccacaacraaaaaatatccaaaaatattcctatatctattaccc

SEQ ID NO: 29319 - DNA, 50 bp, synthetic construct
  source 1..50: mol_type = other DNA
tatcctactccccrtacrtctaaataaaatataaactaatccaaaccaac

SEQ ID NO: 29320 - DNA, 50 bp, synthetic construct
  source 1..50: mol_type = other DNA
catccactctatactaaaattcaaaacaaaacctatctacrctaaaccac

SEQ ID NO: 29321 - DNA, 50 bp, synthetic construct
  source 1..50: mol_type = other DNA
aattacaacacatccactctatactaaaattcaaaacaaaacctatctac

SEQ ID NO: 29322 - DNA, 50 bp, synthetic construct
  source 1..50: mol_type = other DNA
cttccacctccccaacacccaaatctaattccatactaaataaaaaaacc

SEQ ID NO: 29323 - DNA, 50 bp, synthetic construct
  source 1..50: mol_type = other DNA
caaatctaattccatactaaataaaaaaaccrctatcccraatactctcc

SEQ ID NO: 29324 - DNA, 50 bp, synthetic construct
  source 1..50: mol_type = other DNA
cctcaaatccttatcacactaaatataaataaaaaaactaccacccracc

SEQ ID NO: 29325 - DNA, 50 bp, synthetic construct
  source 1..50: mol_type = other DNA
ratacctcaaatccttatcacactaaatataaataaaaaaactaccaccc

SEQ ID NO: 29326 - DNA, 50 bp, synthetic construct
  source 1..50: mol_type = other DNA
atacaatataactctaaccttcaatctcctcctctataaaacacttaaac

SEQ ID NO: 29327 - DNA, 50 bp, synthetic construct
  source 1..50: mol_type = other DNA
tccrcttcaactcttcattaaaaaataaacttactacrcctaaacaaaac

SEQ ID NO: 29328 - DNA, 50 bp, synthetic construct
  source 1..50: mol_type = other DNA
aaacaacctttccrattatttataaaataaaacaacccaaaaacatctcc

SEQ ID NO: 29329 - DNA, 50 bp, synthetic construct
  source 1..50: mol_type = other DNA
ttaattaacaatcacaatcccaacccatatatcccaaaaacaacctttcc

SEQ ID NO: 29330 - DNA, 50 bp, synthetic construct
  source 1..50: mol_type = other DNA
ctatattcaactcaacacaaactaacrtttactatataaaactaataatc

SEQ ID NO: 29331 - DNA, 50 bp, synthetic construct
  source 1..50: mol_type = other DNA
actcaacacaaactaacrtttactatataaaactaataatcrtaaaaccc

SEQ ID NO: 29332 - DNA, 50 bp, synthetic construct
  source 1..50: mol_type = other DNA
acatcctttccttaaacaaaatccctctaatataaaatcttacraaaaac

SEQ ID NO: 29333 - DNA, 50 bp, synthetic construct
  source 1..50: mol_type = other DNA
ttccattaaacracccrattatttaccacaatataactaaacraaataac

SEQ ID NO: 29334 - DNA, 50 bp, synthetic construct
  source 1..50: mol_type = other DNA
raaacacrataaaattactttctatttctcaactatttcracatcaaatc

SEQ ID NO: 29335 - DNA, 50 bp, synthetic construct
  source 1..50: mol_type = other DNA
ccttacaaaaatccctatcaccaaaaaatatcactaacctactttaaaac

SEQ ID NO: 29336 - DNA, 50 bp, synthetic construct
  source 1..50: mol_type = other DNA
atcrtaacacttaatcccaacctacaaaaaaaatcataaaaaacatatac

SEQ ID NO: 29337 - DNA, 50 bp, synthetic construct
  source 1..50: mol_type = other DNA
ttaatacctttaactcaaaaccctatcacctcccaaattctaaaactctc

SEQ ID NO: 29338 - DNA, 50 bp, synthetic construct
  source 1..50: mol_type = other DNA
caacaaatactcaaaaactaccctaacaattacacttacaaaaaaccaac

SEQ ID NO: 29339 - DNA, 50 bp, synthetic construct
  source 1..50: mol_type = other DNA
ccaaaaacttaaaatcaataacttacractaaactcctacctcctccrac

SEQ ID NO: 29340 - DNA, 50 bp, synthetic construct
  source 1..50: mol_type = other DNA
aaattacctatatccttccaacccccaaaaacttaaaatcaataacttac

SEQ ID NO: 29341 - DNA, 50 bp, synthetic construct
  source 1..50: mol_type = other DNA
ccactaactccaaatttctaaaaattaaaaaaatacaaataactccaaac

SEQ ID NO: 29342 - DNA, 50 bp, synthetic construct
  source 1..50: mol_type = other DNA
acaataaaaatactctctatctacactatccractaaacaacctccatcc

SEQ ID NO: 29343 - DNA, 50 bp, synthetic construct
  source 1..50: mol_type = other DNA
tccrataaaactttctaaaacaataaaaatactctctatctacactatcc

SEQ ID NO: 29344 - DNA, 50 bp, synthetic construct
  source 1..50: mol_type = other DNA
caaaaacaccatttcctctcctacacttaacattcccaaaaacccaacac

SEQ ID NO: 29345 - DNA, 50 bp, synthetic construct
  source 1..50: mol_type = other DNA
aaaaaaaacaaactacctacctaataaaaacatcctaaactctctaaaac

SEQ ID NO: 29346 - DNA, 50 bp, synthetic construct
  source 1..50: mol_type = other DNA
aatcaaaactaacccaactcctactactacaattatctttttttctcaac

SEQ ID NO: 29347 - DNA, 50 bp, synthetic construct
  source 1..50: mol_type = other DNA
tccaacaactatatctactttaaaacctctaaactccacccctaaataac

SEQ ID NO: 29348 - DNA, 50 bp, synthetic construct
  source 1..50: mol_type = other DNA
atctactttaaaacctctaaactccacccctaaataacrctacaaaaaac

SEQ ID NO: 29349 - DNA, 50 bp, synthetic construct
  source 1..50: mol_type = other DNA
ctttattcctaaccaataaaaaccaacracctctaacactcaaaccaccc

SEQ ID NO: 29350 - DNA, 50 bp, synthetic construct
  source 1..50: mol_type = other DNA
ctcccttccttctaaaatcccaaactcaaaaaataaacttttaataaccc

SEQ ID NO: 29351 - DNA, 50 bp, synthetic construct
  source 1..50: mol_type = other DNA
aaaaaaaaataaaatttcttaaattccccatccaacaacctcaattatac

SEQ ID NO: 29352 - DNA, 50 bp, synthetic construct
  source 1..50: mol_type = other DNA
aaaaatacrcattctaaaaacttcaaccaccctacaaataaccataaaac

SEQ ID NO: 29353 - DNA, 50 bp, synthetic construct
  source 1..50: mol_type = other DNA
taccatattttaaaatattatatcttattactactaattatttcaaactc

SEQ ID NO: 29354 - DNA, 50 bp, synthetic construct
  source 1..50: mol_type = other DNA
tacatctaaaactaaataactaataccctaaatttaaatactaatccaac

SEQ ID NO: 29355 - DNA, 50 bp, synthetic construct
  source 1..50: mol_type = other DNA
ataactaataccctaaatttaaatactaatccaacrtctcccaactaaac

SEQ ID NO: 29356 - DNA, 50 bp, synthetic construct
  source 1..50: mol_type = other DNA
aataccctaaatttaaatactaatccaacrtctcccaactaaacrataac

SEQ ID NO: 29357 - DNA, 50 bp, synthetic construct
  source 1..50: mol_type = other DNA
tactaatccaacrtctcccaactaaacrataacraaacttaaataaaatc

SEQ ID NO: 29358 - DNA, 50 bp, synthetic construct
  source 1..50: mol_type = other DNA
tatttaaataaactaacctaaaaacctcctctttcccaaacracacraac

SEQ ID NO: 29359 - DNA, 50 bp, synthetic construct
  source 1..50: mol_type = other DNA
tatccrtaatatcacaacrtatatttctatctttccaaaaatatataacc

SEQ ID NO: 29360 - DNA, 50 bp, synthetic construct
  source 1..50: mol_type = other DNA
tcctaaatacatactactatcaatctactcratcaaccactatcraaacc

SEQ ID NO: 29361 - DNA, 50 bp, synthetic construct
  source 1..50: mol_type = other DNA
aatcaatcctaaatacatactactatcaatctactcratcaaccactatc

SEQ ID NO: 29362 - DNA, 50 bp, synthetic construct
  source 1..50: mol_type = other DNA
atccacttcctaattataatcttacttaccaacrtatttccaaaaaatcc

SEQ ID NO: 29363 - DNA, 50 bp, synthetic construct
  source 1..50: mol_type = other DNA
accttaaaaataaaaacatccacttcctaattataatcttacttaccaac

SEQ ID NO: 29364 - DNA, 50 bp, synthetic construct
  source 1..50: mol_type = other DNA
aatcttatttattccccaattaattaaataaaacaaattaattccaaacc

SEQ ID NO: 29365 - DNA, 50 bp, synthetic construct
  source 1..50: mol_type = other DNA
ctaccaaaaaccrtcctttatttactaaaaaattccactcatatttaccc

SEQ ID NO: 29366 - DNA, 50 bp, synthetic construct
  source 1..50: mol_type = other DNA
cataaataaaacttcttaataaacaaaaaacracccttaacaacctacac

SEQ ID NO: 29367 - DNA, 50 bp, synthetic construct
  source 1..50: mol_type = other DNA
tttatatccraaatacaatttaccacracttcttttatctctaccataac

SEQ ID NO: 29368 - DNA, 50 bp, synthetic construct
  source 1..50: mol_type = other DNA
aataatatctctcaaactaaaaactttatatccraaatacaatttaccac

SEQ ID NO: 29369 - DNA, 50 bp, synthetic construct
  source 1..50: mol_type = other DNA
cacatttattatcttaacctcaaaaccacaaaaaaattctacctaaaccc

SEQ ID NO: 29370 - DNA, 50 bp, synthetic construct
  source 1..50: mol_type = other DNA
caaaaaaattctacctaaacccraacattaacaataaccctaataattac

SEQ ID NO: 29371 - DNA, 50 bp, synthetic construct
  source 1..50: mol_type = other DNA
aaaaattctacctaaacccraacattaacaataaccctaataattacrac

SEQ ID NO: 29372 - DNA, 50 bp, synthetic construct
  source 1..50: mol_type = other DNA
tacacctaaaaactactcactaaatatatattattaaaactaatcacrac

SEQ ID NO: 29373 - DNA, 50 bp, synthetic construct
  source 1..50: mol_type = other DNA
taaaaatccccatttcccraaaactctaaaactaatattacaacctcctc

SEQ ID NO: 29374 - DNA, 50 bp, synthetic construct
  source 1..50: mol_type = other DNA
ctcttaaaaaacaaccccaaaactaccrttacccaaaatatcataaaccc

SEQ ID NO: 29375 - DNA, 50 bp, synthetic construct
  source 1..50: mol_type = other DNA
catatacaatatctaactaaaacttatttccaaatcctcttttttaaaac

SEQ ID NO: 29376 - DNA, 50 bp, synthetic construct
  source 1..50: mol_type = other DNA
taaaaccraataataaacacrtaaaactaatttaaaccaatctccacttc

SEQ ID NO: 29377 - DNA, 50 bp, synthetic construct
  source 1..50: mol_type = other DNA
ttccataacaaaaatttaaaaaaaaccacaaacacraataaaattccaac

SEQ ID NO: 29378 - DNA, 50 bp, synthetic construct
  source 1..50: mol_type = other DNA
tctaatatccaaaaaatcacatactaaccaaaccccrtataaaaaatacc

SEQ ID NO: 29379 - DNA, 50 bp, synthetic construct
  source 1..50: mol_type = other DNA
atacaactaccaaactctaccctaaaaaatcacaaaacactctaataaac

SEQ ID NO: 29380 - DNA, 50 bp, synthetic construct
  source 1..50: mol_type = other DNA
aaaaaacacaaaaaatacaccaaaacrcaaccaaacctaaaccaattcrc

SEQ ID NO: 29381 - DNA, 50 bp, synthetic construct
  source 1..50: mol_type = other DNA
tccaaaaaacacctatcaatataaaaatcaaaatactcaaaccaaatacc

SEQ ID NO: 29382 - DNA, 50 bp, synthetic construct
  source 1..50: mol_type = other DNA
accaaataccraaatcaactaactattcaaattaaaccaaaaacctaaac

SEQ ID NO: 29383 - DNA, 50 bp, synthetic construct
  source 1..50: mol_type = other DNA
ctattcaaattaaaccaaaaacctaaacraaaacatccaactacccaccc

SEQ ID NO: 29384 - DNA, 50 bp, synthetic construct
  source 1..50: mol_type = other DNA
atacctaataattatactacattctaaaaaactataacctaaaataacrc

SEQ ID NO: 29385 - DNA, 50 bp, synthetic construct
  source 1..50: mol_type = other DNA
tcatacctaataattatactacattctaaaaaactataacctaaaataac

SEQ ID NO: 29386 - DNA, 50 bp, synthetic construct
  source 1..50: mol_type = other DNA
caaaatacaatacaaccactaaatataacttatcaactacaataaactcc

SEQ ID NO: 29387 - DNA, 50 bp, synthetic construct
  source 1..50: mol_type = other DNA
cactaaatataacttatcaactacaataaactccraaaaaaaatcccacc

SEQ ID NO: 29388 - DNA, 50 bp, synthetic construct
  source 1..50: mol_type = other DNA
ataccaccatacctaactaattattatattctttataaaaataaactctc

SEQ ID NO: 29389 - DNA, 50 bp, synthetic construct
  source 1..50: mol_type = other DNA
tctatattttcaaataaaaaaatctaataaccrcaaaacrctcttcaaac

SEQ ID NO: 29390 - DNA, 50 bp, synthetic construct
  source 1..50: mol_type = other DNA
tatattttcaaataaaaaaatctaataaccrcaaaacrctcttcaaacrc

SEQ ID NO: 29391 - DNA, 50 bp, synthetic construct
  source 1..50: mol_type = other DNA
cctctttccraaaaaaaccrcacacttaaacttaaaaatttaccaacaac

SEQ ID NO: 29392 - DNA, 50 bp, synthetic construct
  source 1..50: mol_type = other DNA
aaacttttcaacttaaaacctaccattcaacrttaaaataaataaattcc

SEQ ID NO: 29393 - DNA, 50 bp, synthetic construct
  source 1..50: mol_type = other DNA
caacaaaacattaaaacaaaaacttttcaacttaaaacctaccattcaac

SEQ ID NO: 29394 - DNA, 50 bp, synthetic construct
  source 1..50: mol_type = other DNA
aaaattaacctctaatacttatcaaaataattacrtaaataacaacaaac

SEQ ID NO: 29395 - DNA, 50 bp, synthetic construct
  source 1..50: mol_type = other DNA
ctccaaacctcaacaactaaaaattttccttacattttcaaataaaaaac

SEQ ID NO: 29396 - DNA, 50 bp, synthetic construct
  source 1..50: mol_type = other DNA
cctcaacaactaaaaattttccttacattttcaaataaaaaacrcacaac

SEQ ID NO: 29397 - DNA, 50 bp, synthetic construct
  source 1..50: mol_type = other DNA
tcataccaaatactcacaaaaattctatctaaaaaacactctccaataac

SEQ ID NO: 29398 - DNA, 50 bp, synthetic construct
  source 1..50: mol_type = other DNA
ctatcaaaaaccctaacaaaaaaacattctccttaaaccacatatacatc

SEQ ID NO: 29399 - DNA, 50 bp, synthetic construct
  source 1..50: mol_type = other DNA
aaaaaatatccccctatcaaaattcctaacaaaaccctaactaaaaactc

SEQ ID NO: 29400 - DNA, 50 bp, synthetic construct
  source 1..50: mol_type = other DNA
ctatcaaaattcctaacaaaaccctaactaaaaactcracaccatcaacc

SEQ ID NO: 29401 - DNA, 50 bp, synthetic construct
  source 1..50: mol_type = other DNA
cctaataaaacaaacctaaaaaactcrctcractttcctaataatctttc

SEQ ID NO: 29402 - DNA, 50 bp, synthetic construct
  source 1..50: mol_type = other DNA
taacttactaacttcccaaacctaataaaacaaacctaaaaaactcrctc

SEQ ID NO: 29403 - DNA, 50 bp, synthetic construct
  source 1..50: mol_type = other DNA
cccataacttactaacttcccaaacctaataaaacaaacctaaaaaactc

SEQ ID NO: 29404 - DNA, 50 bp, synthetic construct
  source 1..50: mol_type = other DNA
aactatttcattccttaaaaattaacacataaaaccctaaaaattctaac

SEQ ID NO: 29405 - DNA, 50 bp, synthetic construct
  source 1..50: mol_type = other DNA
caaaacaaattcctccaccccrtaacccaaaacaataacctaacaaactc

SEQ ID NO: 29406 - DNA, 50 bp, synthetic construct
  source 1..50: mol_type = other DNA
taccaaatcattatcctaaatcacraaataaaaaaacctactctatacac

SEQ ID NO: 29407 - DNA, 50 bp, synthetic construct
  source 1..50: mol_type = other DNA
attatcctaaatcacraaataaaaaaacctactctatacacrcaaaacac

SEQ ID NO: 29408 - DNA, 50 bp, synthetic construct
  source 1..50: mol_type = other DNA
ataaaaaaacctactctatacacrcaaaacacraactaacttacaaaacc

SEQ ID NO: 29409 - DNA, 50 bp, synthetic construct
  source 1..50: mol_type = other DNA
accatattttaaacaatacacttaacatccttattaaaccactctaacac

SEQ ID NO: 29410 - DNA, 50 bp, synthetic construct
  source 1..50: mol_type = other DNA
ttaacaaaaataccaaatacattattcaaaacataactcccctatctacc

SEQ ID NO: 29411 - DNA, 50 bp, synthetic construct
  source 1..50: mol_type = other DNA
aaataccaaatacattattcaaaacataactcccctatctaccrtaaatc

SEQ ID NO: 29412 - DNA, 50 bp, synthetic construct
  source 1..50: mol_type = other DNA
aaacccacracctttctaatactctcaccttcctacaatcttaataatac

SEQ ID NO: 29413 - DNA, 50 bp, synthetic construct
  source 1..50: mol_type = other DNA
aaaaaaccactaaaatcctcaaaaccttaactaaccaaacctttctaaac

SEQ ID NO: 29414 - DNA, 50 bp, synthetic construct
  source 1..50: mol_type = other DNA
ccccaactaaacaaatcctataaaatcttacaatataaacaacaaacccc

SEQ ID NO: 29415 - DNA, 50 bp, synthetic construct
  source 1..50: mol_type = other DNA
caaaccccraaaaaaaacatccatactaattaactaataacaccraaaac

SEQ ID NO: 29416 - DNA, 50 bp, synthetic construct
  source 1..50: mol_type = other DNA
catccatactaattaactaataacaccraaaacrtcctaaaatacraaac

SEQ ID NO: 29417 - DNA, 50 bp, synthetic construct
  source 1..50: mol_type = other DNA
ctttcaaacatttttcaaccaaactttcctaatatataataaccrtctcc

SEQ ID NO: 29418 - DNA, 50 bp, synthetic construct
  source 1..50: mol_type = other DNA
cactaactttcaaacatttttcaaccaaactttcctaatatataataacc

SEQ ID NO: 29419 - DNA, 50 bp, synthetic construct
  source 1..50: mol_type = other DNA
ctacacaccaaaaaaatctaattaaaaaatatctaaaaatcaatattttc

SEQ ID NO: 29420 - DNA, 50 bp, synthetic construct
  source 1..50: mol_type = other DNA
aaaaatcaatattttcrctactattcctaaaataaaatacttaaaattcc

SEQ ID NO: 29421 - DNA, 50 bp, synthetic construct
  source 1..50: mol_type = other DNA
rtacrcraaacacaacctatcattacaaataactcctaaaaacaatcctc

SEQ ID NO: 29422 - DNA, 50 bp, synthetic construct
  source 1..50: mol_type = other DNA
acccccraaaactacctccaaaaatcatctataataacaaactatattcc

SEQ ID NO: 29423 - DNA, 50 bp, synthetic construct
  source 1..50: mol_type = other DNA
ccccraaaactacctccaaaaatcatctataataacaaactatattccrc

SEQ ID NO: 29424 - DNA, 50 bp, synthetic construct
  source 1..50: mol_type = other DNA
raaaactacctccaaaaatcatctataataacaaactatattccrcrcac

SEQ ID NO: 29425 - DNA, 50 bp, synthetic construct
  source 1..50: mol_type = other DNA
caccctaaaaaaccaaactacctaaacttcctaaaactaataaaactacc

SEQ ID NO: 29426 - DNA, 50 bp, synthetic construct
  source 1..50: mol_type = other DNA
aaaaaacccaaacaacctaatcccccaaaatacaccraacacaacaattc

SEQ ID NO: 29427 - DNA, 50 bp, synthetic construct
  source 1..50: mol_type = other DNA
aatacctatacccratatcraaccaactataattactataatcaactacc

SEQ ID NO: 29428 - DNA, 50 bp, synthetic construct
  source 1..50: mol_type = other DNA
aactaactaaaactcctaaaacaacttctttatcraaatccactcratac

SEQ ID NO: 29429 - DNA, 50 bp, synthetic construct
  source 1..50: mol_type = other DNA
accrctcractctactattaaactaaaaaacaaacaccttatttataaac

SEQ ID NO: 29430 - DNA, 50 bp, synthetic construct
  source 1..50: mol_type = other DNA
aaaaaaaacctaaaccctacacaaaaaaactaaaatataaaactacttac

SEQ ID NO: 29431 - DNA, 50 bp, synthetic construct
  source 1..50: mol_type = other DNA
actacttacraaaaaaacractaaccaaacttaatactaacaaactctcc

SEQ ID NO: 29432 - DNA, 50 bp, synthetic construct
  source 1..50: mol_type = other DNA
ctacaacaaaaaaaccataaccrctaaacccttctataactaacrccaac

SEQ ID NO: 29433 - DNA, 50 bp, synthetic construct
  source 1..50: mol_type = other DNA
cacraactacaacaaaaaaaccataaccrctaaacccttctataactaac

SEQ ID NO: 29434 - DNA, 50 bp, synthetic construct
  source 1..50: mol_type = other DNA
ctaataaaaaatatctcttttacacaatacaattcctatataattaacac

SEQ ID NO: 29435 - DNA, 50 bp, synthetic construct
  source 1..50: mol_type = other DNA
atataattaacacrtttccacrtatactcataataactcctaactaaaac

SEQ ID NO: 29436 - DNA, 50 bp, synthetic construct
  source 1..50: mol_type = other DNA
ttcttccctttctaatttatatatttctctatttcttaaatttaaaatcc

SEQ ID NO: 29437 - DNA, 50 bp, synthetic construct
  source 1..50: mol_type = other DNA
tttaaaatccracacrtaactactcactaattacttaaaattaaaaatcc

SEQ ID NO: 29438 - DNA, 50 bp, synthetic construct
  source 1..50: mol_type = other DNA
rtaactactcactaattacttaaaattaaaaatccraaaaaaactcaacc

SEQ ID NO: 29439 - DNA, 50 bp, synthetic construct
  source 1..50: mol_type = other DNA
cccrtaaaactcttaaacracaaacttaccacctaataattaacaaaacc

SEQ ID NO: 29440 - DNA, 50 bp, synthetic construct
  source 1..50: mol_type = other DNA
cccacraaaacctcaaaaccaaatcccaaatcaaaaccacaaaaaatccc

SEQ ID NO: 29441 - DNA, 50 bp, synthetic construct
  source 1..50: mol_type = other DNA
taaaaacaaattacacctaacatcracacaacataaaaaccacaaaccac

SEQ ID NO: 29442 - DNA, 50 bp, synthetic construct
  source 1..50: mol_type = other DNA
taaaactaatcaaatcttctcaacaataaaaacaaattacacctaacatc

SEQ ID NO: 29443 - DNA, 50 bp, synthetic construct
  source 1..50: mol_type = other DNA
cccraaactaccaaccattaaacacacaaaaaaactaacccctaaaaaac

SEQ ID NO: 29444 - DNA, 50 bp, synthetic construct
  source 1..50: mol_type = other DNA
actctaacttaaaaaaacaaataaaaacrtcaccctataaatctacraac

SEQ ID NO: 29445 - DNA, 50 bp, synthetic construct
  source 1..50: mol_type = other DNA
cacaactctaacttaaaaaaacaaataaaaacrtcaccctataaatctac

SEQ ID NO: 29446 - DNA, 50 bp, synthetic construct
  source 1..50: mol_type = other DNA
aaccctaacaaactaactcacaactctaacttaaaaaaacaaataaaaac

SEQ ID NO: 29447 - DNA, 50 bp, synthetic construct
  source 1..50: mol_type = other DNA
aaatataaccttaaatcctctatcaaaaaacaacttcaaaatctaatctc

SEQ ID NO: 29448 - DNA, 50 bp, synthetic construct
  source 1..50: mol_type = other DNA
aacccccaactacttactaaaatctctaaacctataaaataaaaacaaac

SEQ ID NO: 29449 - DNA, 50 bp, synthetic construct
  source 1..50: mol_type = other DNA
acttactaaaatctctaaacctataaaataaaaacaaacrctcctctacc

SEQ ID NO: 29450 - DNA, 50 bp, synthetic construct
  source 1..50: mol_type = other DNA
aaaataatacractaaacaaactataatcttaaatacttaaacacctccc

SEQ ID NO: 29451 - DNA, 50 bp, synthetic construct
  source 1..50: mol_type = other DNA
aaatcraaaatccaaatatccaaaaactaccctaaactccaaaataatac

SEQ ID NO: 29452 - DNA, 50 bp, synthetic construct
  source 1..50: mol_type = other DNA
crttaccacatctcaaataaataaattctataaaacrctcacactaatac

SEQ ID NO: 29453 - DNA, 50 bp, synthetic construct
  source 1..50: mol_type = other DNA
ttccraaaaactaaacaactaaaaataattttacatttacrtttcccrac

SEQ ID NO: 29454 - DNA, 50 bp, synthetic construct
  source 1..50: mol_type = other DNA
actaatataaacrcttcataaaacttattcacctaaaatataacaacrtc

SEQ ID NO: 29455 - DNA, 50 bp, synthetic construct
  source 1..50: mol_type = other DNA
taaacrcttcataaaacttattcacctaaaatataacaacrtcraaaaac

SEQ ID NO: 29456 - DNA, 50 bp, synthetic construct
  source 1..50: mol_type = other DNA
atacaaaatcacctctaactactcaatcctccraaaaccactaaaaaaac

SEQ ID NO: 29457 - DNA, 50 bp, synthetic construct
  source 1..50: mol_type = other DNA
tacaaacccttacrctactctaatataaatataacaatacccatcaaccc

SEQ ID NO: 29458 - DNA, 50 bp, synthetic construct
  source 1..50: mol_type = other DNA
ctcctaacaactaaaaaatactcracccttaaatatccttaactataccc

SEQ ID NO: 29459 - DNA, 50 bp, synthetic construct
  source 1..50: mol_type = other DNA
ctaaacaataaaccacctctataaccaaaaacctataaaccaaaacacrc

SEQ ID NO: 29460 - DNA, 50 bp, synthetic construct
  source 1..50: mol_type = other DNA
tcataacaaaaatatcccaatataaaaacatacaccctactctaaccctc

SEQ ID NO: 29461 - DNA, 50 bp, synthetic construct
  source 1..50: mol_type = other DNA
craaacaactccaccctatcacrtcttactctatattacaaaatccttcc

SEQ ID NO: 29462 - DNA, 50 bp, synthetic construct
  source 1..50: mol_type = other DNA
ctctataaaacctttcrcacrattaatttttatctccctataaaattaac

SEQ ID NO: 29463 - DNA, 50 bp, synthetic construct
  source 1..50: mol_type = other DNA
tcactaaatacaaaattcctacaaaactaaacccrataccaataacratc

SEQ ID NO: 29464 - DNA, 50 bp, synthetic construct
  source 1..50: mol_type = other DNA
aaaatcactaaatacaaaattcctacaaaactaaacccrataccaataac

SEQ ID NO: 29465 - DNA, 50 bp, synthetic construct
  source 1..50: mol_type = other DNA
acctcccaaaaaaaaatcactaaatacaaaattcctacaaaactaaaccc

SEQ ID NO: 29466 - DNA, 50 bp, synthetic construct
  source 1..50: mol_type = other DNA
aaaccrataattaaataaatctctcaacctctctaaacctccaacacttc

SEQ ID NO: 29467 - DNA, 50 bp, synthetic construct
  source 1..50: mol_type = other DNA
aatcaaataaaactcccaatcctaactctactactaaacaccattaaacc

SEQ ID NO: 29468 - DNA, 50 bp, synthetic construct
  source 1..50: mol_type = other DNA
aacaaaaccaaaactaaaaacctcatctaactacatacaactaaaaatac

SEQ ID NO: 29469 - DNA, 50 bp, synthetic construct
  source 1..50: mol_type = other DNA
aaaaccaaaactaaaaacctcatctaactacatacaactaaaaatacrac

SEQ ID NO: 29470 - DNA, 50 bp, synthetic construct
  source 1..50: mol_type = other DNA
ctaactacatacaactaaaaatacracracaacaaaaaaccaaaccaaac

SEQ ID NO: 29471 - DNA, 50 bp, synthetic construct
  source 1..50: mol_type = other DNA
atactccttaccctacctactaaacttaaaacctacaaaacaaaaaaaac

SEQ ID NO: 29472 - DNA, 50 bp, synthetic construct
  source 1..50: mol_type = other DNA
aaacccaacaaacaaaataaaaaacacacaactttcttaactaaaaactc

SEQ ID NO: 29473 - DNA, 50 bp, synthetic construct
  source 1..50: mol_type = other DNA
aattcaaacttaaacrtatataacccctaaacccaacaactacrtaaacc

SEQ ID NO: 29474 - DNA, 50 bp, synthetic construct
  source 1..50: mol_type = other DNA
ctactaaaattcaaacttaaacrtatataacccctaaacccaacaactac

SEQ ID NO: 29475 - DNA, 50 bp, synthetic construct
  source 1..50: mol_type = other DNA
taaatatttttcataaaaataaaaatctctacrttacccaaactactctc

SEQ ID NO: 29476 - DNA, 50 bp, synthetic construct
  source 1..50: mol_type = other DNA
tcataaaaataaaaatctctacrttacccaaactactctcraataactac

SEQ ID NO: 29477 - DNA, 50 bp, synthetic construct
  source 1..50: mol_type = other DNA
aaaatcaaaacccatctcttctaaaaaaatatcaaaacaaaactaaacrc

SEQ ID NO: 29478 - DNA, 50 bp, synthetic construct
  source 1..50: mol_type = other DNA
aaaaaatcaaaacccatctcttctaaaaaaatatcaaaacaaaactaaac

SEQ ID NO: 29479 - DNA, 50 bp, synthetic construct
  source 1..50: mol_type = other DNA
taaaatcttactatattacccacrctaatctcaaactcccaaactcaaac

SEQ ID NO: 29480 - DNA, 50 bp, synthetic construct
  source 1..50: mol_type = other DNA
tatttaaactataacaataactataacaaaaccctaaaacraaaaactac

SEQ ID NO: 29481 - DNA, 50 bp, synthetic construct
  source 1..50: mol_type = other DNA
tataacaaaaccctaaaacraaaaactacrtacaaaacacttaaaaaccc

SEQ ID NO: 29482 - DNA, 50 bp, synthetic construct
  source 1..50: mol_type = other DNA
aaaaaaccaaatcttaaacraacccccrtaattctcratataaaaaaaac

SEQ ID NO: 29483 - DNA, 50 bp, synthetic construct
  source 1..50: mol_type = other DNA
taatttaaaaaattcaaatttaaaaaaaaccaaatcttaaacraaccccc

SEQ ID NO: 29484 - DNA, 50 bp, synthetic construct
  source 1..50: mol_type = other DNA
aactaaaaaccccacataataatttcatcccaaacaattcttaattctac

SEQ ID NO: 29485 - DNA, 50 bp, synthetic construct
  source 1..50: mol_type = other DNA
aaacaaaaataacaccaaaaacratctccttaaactacaacaactaaccc

SEQ ID NO: 29486 - DNA, 50 bp, synthetic construct
  source 1..50: mol_type = other DNA
crctacacaaataaaatcracrataaccaaacaaaaataacaccaaaaac

SEQ ID NO: 29487 - DNA, 50 bp, synthetic construct
  source 1..50: mol_type = other DNA
ttattacaactcaaaaaaaccrtccctaatatcacctctacctaatcacc

SEQ ID NO: 29488 - DNA, 50 bp, synthetic construct
  source 1..50: mol_type = other DNA
taaatatacatacacaccccaaccactaaaaaacaaacrtaatacraaac

SEQ ID NO: 29489 - DNA, 50 bp, synthetic construct
  source 1..50: mol_type = other DNA
atatataaatatacatacacaccccaaccactaaaaaacaaacrtaatac

SEQ ID NO: 29490 - DNA, 50 bp, synthetic construct
  source 1..50: mol_type = other DNA
aattacaatatataaatatacatacacaccccaaccactaaaaaacaaac

SEQ ID NO: 29491 - DNA, 50 bp, synthetic construct
  source 1..50: mol_type = other DNA
taccataatatctactctaaaataattctataattacacaatacaataac

SEQ ID NO: 29492 - DNA, 50 bp, synthetic construct
  source 1..50: mol_type = other DNA
actaaactaaaaaatttccaactttctcacrataaatacaaacraatacc

SEQ ID NO: 29493 - DNA, 50 bp, synthetic construct
  source 1..50: mol_type = other DNA
aatcraaactaaactaaaaaatttccaactttctcacrataaatacaaac

SEQ ID NO: 29494 - DNA, 50 bp, synthetic construct
  source 1..50: mol_type = other DNA
caccrcaaacaataatcraaactaaactaaaaaatttccaactttctcac

SEQ ID NO: 29495 - DNA, 50 bp, synthetic construct
  source 1..50: mol_type = other DNA
aaaaacttaataaactaacctaataatatcratacraactctattcacac

SEQ ID NO: 29496 - DNA, 50 bp, synthetic construct
  source 1..50: mol_type = other DNA
cccaaaataaaatccacacatccctcacaacacacrtataaacaaaactc

SEQ ID NO: 29497 - DNA, 50 bp, synthetic construct
  source 1..50: mol_type = other DNA
caaaaaacaaaatatcctaatttaccracaaccccaacrctaatatatac

SEQ ID NO: 29498 - DNA, 50 bp, synthetic construct
  source 1..50: mol_type = other DNA
ttctccttaaacaaaaaaacaactcaaaacaactaaacrcacacatcaac

SEQ ID NO: 29499 - DNA, 50 bp, synthetic construct
  source 1..50: mol_type = other DNA
aaaaaaacaactcaaaacaactaaacrcacacatcaacrctaaaactacc

SEQ ID NO: 29500 - DNA, 50 bp, synthetic construct
  source 1..50: mol_type = other DNA
aaccctatatcaataaacttacaaaaaaaacaatctcracaaaataacac

SEQ ID NO: 29501 - DNA, 50 bp, synthetic construct
  source 1..50: mol_type = other DNA
cctaaataccrtacaacccctaataaaaatcactaacacractaaataac

SEQ ID NO: 29502 - DNA, 50 bp, synthetic construct
  source 1..50: mol_type = other DNA
aactataaaccctcrcrataaatatcacaattcttaaaaataatatatcc

SEQ ID NO: 29503 - DNA, 50 bp, synthetic construct
  source 1..50: mol_type = other DNA
ccrataaattctcratctcrctaacttcaaaaataaaactataaaccctc

SEQ ID NO: 29504 - DNA, 50 bp, synthetic construct
  source 1..50: mol_type = other DNA
aaactataacactcaccrcraaaatccacaacttcattcttaaaatcaac

SEQ ID NO: 29505 - DNA, 50 bp, synthetic construct
  source 1..50: mol_type = other DNA
caatcaattaatcttaaactcccaacaaaacaaaacraaaatacrtctac

SEQ ID NO: 29506 - DNA, 50 bp, synthetic construct
  source 1..50: mol_type = other DNA
aataaacaatcaattaatcttaaactcccaacaaaacaaaacraaaatac

SEQ ID NO: 29507 - DNA, 50 bp, synthetic construct
  source 1..50: mol_type = other DNA
attccttaaataaacaatcaattaatcttaaactcccaacaaaacaaaac

SEQ ID NO: 29508 - DNA, 50 bp, synthetic construct
  source 1..50: mol_type = other DNA
taaaaatccaaaaccaactaactatccactcaaaaaacaaaccaactaac

SEQ ID NO: 29509 - DNA, 50 bp, synthetic construct
  source 1..50: mol_type = other DNA
aaaaacctttttcacttcaacttctacattcaattcaatatactaatacc

SEQ ID NO: 29510 - DNA, 50 bp, synthetic construct
  source 1..50: mol_type = other DNA
aacrtactcaacacaactccaaaacacaactaactattcttaaaacttac

SEQ ID NO: 29511 - DNA, 50 bp, synthetic construct
  source 1..50: mol_type = other DNA
ctattctctaaaaacaatctcttaataactcctaatttaaatcaaaacac

SEQ ID NO: 29512 - DNA, 50 bp, synthetic construct
  source 1..50: mol_type = other DNA
accctaacccaaaccaaaaatcaccaaaaaactacctctaaaaaataaac

SEQ ID NO: 29513 - DNA, 50 bp, synthetic construct
  source 1..50: mol_type = other DNA
tcaaaacttaacacacttcctaactactacttactcatttatacttccrc

SEQ ID NO: 29514 - DNA, 50 bp, synthetic construct
  source 1..50: mol_type = other DNA
crtcaaaacttaacacacttcctaactactacttactcatttatacttcc

SEQ ID NO: 29515 - DNA, 50 bp, synthetic construct
  source 1..50: mol_type = other DNA
craaaatacaaataaataaacaacaattaaaaaatataccaaatcctaac

SEQ ID NO: 29516 - DNA, 50 bp, synthetic construct
  source 1..50: mol_type = other DNA
aacacaaataaacaaacaacaattaaacaatacaaaaaaaacacacaaac

SEQ ID NO: 29517 - DNA, 50 bp, synthetic construct
  source 1..50: mol_type = other DNA
ataaactcccraatctacctttaccctcataacctacaacaaaacaaaac

SEQ ID NO: 29518 - DNA, 50 bp, synthetic construct
  source 1..50: mol_type = other DNA
crccttctttcaaacacataacatctctaaaaaccacctatactaaacac

SEQ ID NO: 29519 - DNA, 50 bp, synthetic construct
  source 1..50: mol_type = other DNA
tttccttcctctttaaaactaaacratactaccttatatataaaaactac

SEQ ID NO: 29520 - DNA, 50 bp, synthetic construct
  source 1..50: mol_type = other DNA
aactaaacratactaccttatatataaaaactacrtcttattatttaccc

SEQ ID NO: 29521 - DNA, 50 bp, synthetic construct
  source 1..50: mol_type = other DNA
ataaataaaaaaaactttttttccccaaatattctaactccraaaaaacc

SEQ ID NO: 29522 - DNA, 50 bp, synthetic construct
  source 1..50: mol_type = other DNA
aaaaaccrttaacttcctattttctttattacctataactatctaaaatc

SEQ ID NO: 29523 - DNA, 50 bp, synthetic construct
  source 1..50: mol_type = other DNA
caaaaaacttacaaaaaaacatcaaaaaacactctaactaccrtaacaac

SEQ ID NO: 29524 - DNA, 50 bp, synthetic construct
  source 1..50: mol_type = other DNA
tcctacaaactccctaaaaactaactataacatacataatctacaaattc

SEQ ID NO: 29525 - DNA, 50 bp, synthetic construct
  source 1..50: mol_type = other DNA
actaactataacatacataatctacaaattcraaccaaaccacrctatcc

SEQ ID NO: 29526 - DNA, 50 bp, synthetic construct
  source 1..50: mol_type = other DNA
crtcctaatacrcraaaacaataaaacttaactcctttatcaataacacc

SEQ ID NO: 29527 - DNA, 50 bp, synthetic construct
  source 1..50: mol_type = other DNA
tccattaaaattatctctacraaaacrcacaaataaaccttaacaatccc

SEQ ID NO: 29528 - DNA, 50 bp, synthetic construct
  source 1..50: mol_type = other DNA
tccaaatcacacaaccttaccatatccattaaaattatctctacraaaac

SEQ ID NO: 29529 - DNA, 50 bp, synthetic construct
  source 1..50: mol_type = other DNA
ttataaataataaactaaacraaactactaaaattcacctatacrtttcc

SEQ ID NO: 29530 - DNA, 50 bp, synthetic construct
  source 1..50: mol_type = other DNA
taacttaaaaacaactttttccattaacrttactctccctaaaatacttc

SEQ ID NO: 29531 - DNA, 50 bp, synthetic construct
  source 1..50: mol_type = other DNA
attatatacrtttccraataattaaattaaaaaacaattttctctacccc

SEQ ID NO: 29532 - DNA, 50 bp, synthetic construct
  source 1..50: mol_type = other DNA
aaaacaattttctctaccccrcccrtaattcacaaataaataactatctc

SEQ ID NO: 29533 - DNA, 50 bp, synthetic construct
  source 1..50: mol_type = other DNA
aacaatccttattaattaaataactatatcttactaaattaacrcaacac

SEQ ID NO: 29534 - DNA, 50 bp, synthetic construct
  source 1..50: mol_type = other DNA
aaaacctaaatttaaataaatattcacttacrttccraacraacataacc

SEQ ID NO: 29535 - DNA, 50 bp, synthetic construct
  source 1..50: mol_type = other DNA
cactaatctcrtctaaaacctaaatttaaataaatattcacttacrttcc

SEQ ID NO: 29536 - DNA, 50 bp, synthetic construct
  source 1..50: mol_type = other DNA
cacaatatcctacctaatatcaaatcacrtatattcacacaaaattatac

SEQ ID NO: 29537 - DNA, 50 bp, synthetic construct
  source 1..50: mol_type = other DNA
aaacaatactaaatcatctctactaaatcatccctattaaaaaacaatac

SEQ ID NO: 29538 - DNA, 50 bp, synthetic construct
  source 1..50: mol_type = other DNA
tccctactaaaaaacaatactaaaccatccctaaatcatatctattaaac

SEQ ID NO: 29539 - DNA, 50 bp, synthetic construct; identical to SEQ ID NO: 29538
  source 1..50: mol_type = other DNA

SEQ ID NO: 29540 - DNA, 50 bp, synthetic construct; identical to SEQ ID NO: 29538
  source 1..50: mol_type = other DNA

SEQ ID NO: 29541 - DNA, 50 bp, synthetic construct
  source 1..50: mol_type = other DNA
taactcaaaaataacttaatactacccctcaacaaaaataactcaacacc

SEQ ID NO: 29542 - DNA, 50 bp, synthetic construct; identical to SEQ ID NO: 29541
  source 1..50: mol_type = other DNA

SEQ ID NO: 29543 - DNA, 50 bp, synthetic construct
  source 1..50: mol_type = other DNA
ctcaacaccrcctctcaacaaaaataactcaacaaaaataactcaacacc

SEQ ID NO: 29544 - DNA, 50 bp, synthetic construct
  source 1..50: mol_type = other DNA
tccctattaaaaaacaatactaaaccatccctaaatcatccctattaaac

SEQ ID NO: 29545 - DNA, 50 bp, synthetic construct
  source 1..50: mol_type = other DNA
cttaatactacccctcaacaaaaataactcaacaaaaataactcaacacc

SEQ ID NO: 29546 - DNA, 50 bp, synthetic construct
  source 1..50: mol_type = other DNA
taaatcatccttaataaaaaacaatactaaatcatccttactatatcatc

SEQ ID NO: 29547 - DNA, 50 bp, synthetic construct
  source 1..50: mol_type = other DNA
ctcaacactacccctcaacaaaaataactcaacaaaaataactcaacacc

SEQ ID NO: 29548 - DNA, 50 bp, synthetic construct
  source 1..50: mol_type = other DNA
crcccctcaacaaaaataactcaacaaaaataattcaacaaaaataactc

SEQ ID NO: 29549 - DNA, 50 bp, synthetic construct
  source 1..50: mol_type = other DNA
ataccactttaaccattcacctactaataaacactacaaatacttccatc

SEQ ID NO: 29550 - DNA, 50 bp, synthetic construct
  source 1..50: mol_type = other DNA
ttacatttaaatcaatattttctaaattcacccatattataacatacatc

SEQ ID NO: 29551 - DNA, 50 bp, synthetic construct
  source 1..50: mol_type = other DNA
aaaacaaaaataacacactaataatcatcaatacraaaaaatcttaccac

SEQ ID NO: 29552 - DNA, 50 bp, synthetic construct
  source 1..50: mol_type = other DNA
aaaaaatcttaccacrccactaatattacatttaaatattataccctccc

SEQ ID NO: 29553 - DNA, 50 bp, synthetic construct
  source 1..50: mol_type = other DNA
cccaatatttattaacctttcaatattctacactcccaaaaaaaaaccac

SEQ ID NO: 29554 - DNA, 50 bp, synthetic construct
  source 1..50: mol_type = other DNA
tcttcaccacatacatcacaattaaaatctatatttatttctttatttac

SEQ ID NO: 29555 - DNA, 50 bp, synthetic construct
  source 1..50: mol_type = other DNA
atatacaataactcttcaaaaccaacacaataaaaataacccttctcccc

SEQ ID NO: 29556 - DNA, 50 bp, synthetic construct
  source 1..50: mol_type = other DNA
aacctcaacatttattaaaaccrctatctaattcattttaaattcatctc

SEQ ID NO: 29557 - DNA, 50 bp, synthetic construct
  source 1..50: mol_type = other DNA
tcttctctttaaaaccctccaaaactaccacaaaacaaaatcttcactac

SEQ ID NO: 29558 - DNA, 50 bp, synthetic construct
  source 1..50: mol_type = other DNA
rtctataaatataaatatctaccrcrcatccacaaacaaacaaccttaac

SEQ ID NO: 29559 - DNA, 50 bp, synthetic construct
  source 1..50: mol_type = other DNA
aactaatatcataaaatttatacaatccaaaactaccccttaataaatac

SEQ ID NO: 29560 - DNA, 50 bp, synthetic construct
  source 1..50: mol_type = other DNA
aatatcccccrccctttaatttcactataaatattacactaatataaaac

SEQ ID NO: 29561 - DNA, 50 bp, synthetic construct
  source 1..50: mol_type = other DNA
accactccccrcttcatatcaatataacacccacaataaaactaaaaaac

SEQ ID NO: 29562 - DNA, 50 bp, synthetic construct
  source 1..50: mol_type = other DNA
cactccccccaccttctatcaatataacaccaacaataaaactaaaaaac

SEQ ID NO: 29563 - DNA, 50 bp, synthetic construct
  source 1..50: mol_type = other DNA
cccccaccttctatcaatataacaccaacaataaaactaaaaaacraaac

SEQ ID NO: 29564 - DNA, 50 bp, synthetic construct
  source 1..50: mol_type = other DNA
aaaatcttaccccaacaaatcaaaaataaaaatcccaaaaaacccrcacc

SEQ ID NO: 29565 - DNA, 50 bp, synthetic construct
  source 1..50: mol_type = other DNA
tataaaatataatctctaacaactaaaaaataccttccttttccatcaac

SEQ ID NO: 29566 - DNA, 50 bp, synthetic construct
  source 1..50: mol_type = other DNA
caattatacaaattccatttaataactaaacaaaaactcccaaaaccctc

SEQ ID NO: 29567 - DNA, 50 bp, synthetic construct
  source 1..50: mol_type = other DNA
acaaaaactcccaaaaccctcraataaaataaacaacattcccaaaaaac

SEQ ID NO: 29568 - DNA, 50 bp, synthetic construct
  source 1..50: mol_type = other DNA
aactcccaaaaccctcraataaaataaacaacattcccaaaaaacraaac

SEQ ID NO: 29569 - DNA, 50 bp, synthetic construct
  source 1..50: mol_type = other DNA
aattacaatttttctccratttcccattcaaacatccctataattattcc

SEQ ID NO: 29570 - DNA, 50 bp, synthetic construct
  source 1..50: mol_type = other DNA
ataaaaaaaattcccaccactcctaacatattacatctttttaaattacc

SEQ ID NO: 29571 - DNA, 50 bp, synthetic construct
  source 1..50: mol_type = other DNA
caactaaaaaactacataaaaccrataaaacrcaaataatatcaaccaac

SEQ ID NO: 29572 - DNA, 50 bp, synthetic construct
  source 1..50: mol_type = other DNA
acctaacttctaaatttaataaactaatcataaacaataaaattataaac

SEQ ID NO: 29573 - DNA, 50 bp, synthetic construct
  source 1..50: mol_type = other DNA
aacraaacaataaaaactttcaaataactaaataacccactttatcatcc

SEQ ID NO: 29574 - DNA, 50 bp, synthetic construct
  source 1..50: mol_type = other DNA
aacraataacaaaataaattatccaattacttaaaaattcccactactcc

SEQ ID NO: 29575 - DNA, 50 bp, synthetic construct
  source 1..50: mol_type = other DNA
atttttttaataaaaatactctcccaaacaataaaaataccataaccttc

SEQ ID NO: 29576 - DNA, 50 bp, synthetic construct
  source 1..50: mol_type = other DNA
ccactatctaaaaaaatatctttaccaaaaaaacttaccactcaaaaaac

SEQ ID NO: 29577 - DNA, 50 bp, synthetic construct
  source 1..50: mol_type = other DNA
aaacttccaaatctaacctcatttctaataatttattaccacratatcac

SEQ ID NO: 29578 - DNA, 50 bp, synthetic construct
  source 1..50: mol_type = other DNA
ctatacaaatctctattacracrtcattacctacattctacttaactctc

SEQ ID NO: 29579 - DNA, 50 bp, synthetic construct
  source 1..50: mol_type = other DNA
ttcaaaaacatcactaccaacaattacttaaaactcatttccraccraac

SEQ ID NO: 29580 - DNA, 50 bp, synthetic construct
  source 1..50: mol_type = other DNA
aaataaatcttaaacaactactaataataatacctctaaaataaactaac

SEQ ID NO: 29581 - DNA, 50 bp, synthetic construct
  source 1..50: mol_type = other DNA
taatacctctaaaataaactaacraaaaacaacrcrtaacaaaaaacaac

SEQ ID NO: 29582 - DNA, 50 bp, synthetic construct
  source 1..50: mol_type = other DNA
actctactttctaaaaaatacaattttctacctccatttctattaccrac

SEQ ID NO: 29583 - DNA, 50 bp, synthetic construct
  source 1..50: mol_type = other DNA
aatactctactttctaaaaaatacaattttctacctccatttctattacc

SEQ ID NO: 29584 - DNA, 50 bp, synthetic construct
  source 1..50: mol_type = other DNA
cctacaaaaaaccttttaaaaataaatcaaaatcaaatcccttattttac

SEQ ID NO: 29585 - DNA, 50 bp, synthetic construct
  source 1..50: mol_type = other DNA
ccttttaaaaataaatcaaaatcaaatcccttattttacrtaaaattaac

SEQ ID NO: 29586 - DNA, 50 bp, synthetic construct
  source 1..50: mol_type = other DNA
aaaaaaactcccctatataccaaccrctactctaaaaataactaaacrcc

SEQ ID NO: 29587 - DNA, 50 bp, synthetic construct
  source 1..50: mol_type = other DNA
attccrctaaatattattaataaccccrctaaaaaccracttataaatac

SEQ ID NO: 29588 - DNA, 50 bp, synthetic construct
  source 1..50: mol_type = other DNA
aacaaaataacraattccrctaaatattattaataaccccrctaaaaacc

SEQ ID NO: 29589 - DNA, 50 bp, synthetic construct
  source 1..50: mol_type = other DNA
ataatacctaatacataacacrtaccrtttaaatatttaccaaacrcttc

SEQ ID NO: 29590 - DNA, 50 bp, synthetic construct
  source 1..50: mol_type = other DNA
ttaaaataatacctaatacataacacrtaccrtttaaatatttaccaaac

SEQ ID NO: 29591 - DNA, 50 bp, synthetic construct
  source 1..50: mol_type = other DNA
taacaacaattacacaacrcaaaataaaaaaccttaaactaaactcaaac

SEQ ID NO: 29592 - DNA, 50 bp, synthetic construct
  source 1..50: mol_type = other DNA
raaccratcactaccttttctacctaacaaatatacataaaacaattccc

SEQ ID NO: 29593 - DNA, 50 bp, synthetic construct
  source 1..50: mol_type = other DNA
actaccttttctacctaacaaatatacataaaacaattcccraacaacac

SEQ ID NO: 29594 - DNA, 50 bp, synthetic construct
  source 1..50: mol_type = other DNA
aataaaactaaaactaaacaaccractttatacaaaataacacaaaaaac

SEQ ID NO: 29595 - DNA, 50 bp, synthetic construct
  source 1..50: mol_type = other DNA
aaactaaaactaaacaaccractttatacaaaataacacaaaaaacrtac

SEQ ID NO: 29596 - DNA, 50 bp, synthetic construct
  source 1..50: mol_type = other DNA
cctaattaaaaaacacacactaaaataataaaaactaaattctaaaatcc

SEQ ID NO: 29597 - DNA, 50 bp, synthetic construct
  source 1..50: mol_type = other DNA
ttaaaaaacacacactaaaataataaaaactaaattctaaaatccrcccc

SEQ ID NO: 29598 - DNA, 50 bp, synthetic construct
  source 1..50: mol_type = other DNA
ctacacraaacatactaaacaatcrctacctaaaccaaaatcaaatcacc

SEQ ID NO: 29599 - DNA, 50 bp, synthetic construct
  source 1..50: mol_type = other DNA
ctaaaataactataacaacracaatccctaaaattaccrtaaccctaaac

SEQ ID NO: 29600 - DNA, 50 bp, synthetic construct
  source 1..50: mol_type = other DNA
raaccctaccrcctaaaataactataacaacracaatccctaaaattacc

SEQ ID NO: 29601 - DNA, 50 bp, synthetic construct
  source 1..50: mol_type = other DNA
tatatcattctaaaaaaaatattacractaacataaacatttttctacac

SEQ ID NO: 29602 - DNA, 50 bp, synthetic construct
  source 1..50: mol_type = other DNA
ctaaattactacaacaacttctaacraatctccctacctttcaattctcc

SEQ ID NO: 29603 - DNA, 50 bp, synthetic construct
  source 1..50: mol_type = other DNA
atatcccttccttaccacctcttacctaaattactacaacaacttctaac

SEQ ID NO: 29604 - DNA, 50 bp, synthetic construct
  source 1..50: mol_type = other DNA
atctaactacccaaaacaaaaaacaaaactcccctacaatactctcactc

SEQ ID NO: 29605 - DNA, 50 bp, synthetic construct
  source 1..50: mol_type = other DNA
taaaattactaaatcaataattaaatattcttacractcttctctaaaac

SEQ ID NO: 29606 - DNA, 50 bp, synthetic construct
  source 1..50: mol_type = other DNA
tccccaacctatcctttaaaattactaaatcaataattaaatattcttac

SEQ ID NO: 29607 - DNA, 50 bp, synthetic construct
  source 1..50: mol_type = other DNA
tctctacctaaaatcccccttcccaaataataccactaactaaaaacctc

SEQ ID NO: 29608 - DNA, 50 bp, synthetic construct
  source 1..50: mol_type = other DNA
taaccaaaaaaataactcttaaaaaatacctctcraaattaacraaatcc

SEQ ID NO: 29609 - DNA, 50 bp, synthetic construct
  source 1..50: mol_type = other DNA
aacctaataaccaaaaaaataactcttaaaaaatacctctcraaattaac

SEQ ID NO: 29610 - DNA, 50 bp, synthetic construct
  source 1..50: mol_type = other DNA
raaaaacactttttaaaaaccatcctcttaaccaccaaatccctataatc

SEQ ID NO: 29611 - DNA, 50 bp, synthetic construct
  source 1..50: mol_type = other DNA
aacctcctaaactactttctctacaaaactaacaaacctttaccctaacc

SEQ ID NO: 29612 - DNA, 50 bp, synthetic construct
  source 1..50: mol_type = other DNA
crtaaaaactattatatatacrtaccaacactaaacrtacaaaacrcaac

SEQ ID NO: 29613 - DNA, 50 bp, synthetic construct
  source 1..50: mol_type = other DNA
caaatataccccaccrtaaaaactattatatatacrtaccaacactaaac

SEQ ID NO: 29614 - DNA, 50 bp, synthetic construct
  source 1..50: mol_type = other DNA
ctttttacaaaaaaccttaaaatacrttaaacacccaaatataccccacc

SEQ ID NO: 29615 - DNA, 50 bp, synthetic construct
  source 1..50: mol_type = other DNA
aacacrtacacacaacaattcccacrataaaacacacctaaatattcaac

SEQ ID NO: 29616 - DNA, 50 bp, synthetic construct
  source 1..50: mol_type = other DNA
tctctacttcaaccttccaaataacaaaaattacaaaaacccaccaccac

SEQ ID NO: 29617 - DNA, 50 bp, synthetic construct
  source 1..50: mol_type = other DNA
accaaataacaaccaattctactataaaaataataatctaaaccaaacac

SEQ ID NO: 29618 - DNA, 50 bp, synthetic construct
  source 1..50: mol_type = other DNA
ractcaacttaacacattctaaccrataaccaataaactaaactcaaacc

SEQ ID NO: 29619 - DNA, 50 bp, synthetic construct
  source 1..50: mol_type = other DNA
acattctaaccrataaccaataaactaaactcaaaccraaaaataacaac

SEQ ID NO: 29620 - DNA, 50 bp, synthetic construct
  source 1..50: mol_type = other DNA
tcttctacataaaaactataaacaacatcctcaaattcctaatcaacrac

SEQ ID NO: 29621 - DNA, 50 bp, synthetic construct
  source 1..50: mol_type = other DNA
tcatcttctacataaaaactataaacaacatcctcaaattcctaatcaac

SEQ ID NO: 29622 - DNA, 50 bp, synthetic construct
  source 1..50: mol_type = other DNA
tcttatctatttttactaccttataattctccaaaaaacatttcccccac

SEQ ID NO: 29623 - DNA, 50 bp, synthetic construct
  source 1..50: mol_type = other DNA
aaaattatatccaacaaacacttaaaaaactccacaataacctaaaaaac

SEQ ID NO: 29624 - DNA, 50 bp, synthetic construct
  source 1..50: mol_type = other DNA
ttctaaataaataacaaacccaaactctacraccttacrcaaaacaaatc

SEQ ID NO: 29625 - DNA, 50 bp, synthetic construct
  source 1..50: mol_type = other DNA
caaccctaccraatacttatcattacccctattttataaacraaaacatc

SEQ ID NO: 29626 - DNA, 50 bp, synthetic construct
  source 1..50: mol_type = other DNA
aaataaaaatcaaataaaccttctaataccctaaaaacactaaacaatac

SEQ ID NO: 29627 - DNA, 50 bp, synthetic construct
  source 1..50: mol_type = other DNA
atattacccaaactaatcttaaactcataaatttaaccaatcctctcrcc

SEQ ID NO: 29628 - DNA, 50 bp, synthetic construct
  source 1..50: mol_type = other DNA
aatatattacccaaactaatcttaaactcataaatttaaccaatcctctc

SEQ ID NO: 29629 - DNA, 50 bp, synthetic construct
  source 1..50: mol_type = other DNA
aatataatatctaaaaaatacacrataatcttctaaatcaacrtcaccrc

SEQ ID NO: 29630 - DNA, 50 bp, synthetic construct
  source 1..50: mol_type = other DNA
taaatataatatctaaaaaatacacrataatcttctaaatcaacrtcacc

SEQ ID NO: 29631 - DNA, 50 bp, synthetic construct
  source 1..50: mol_type = other DNA
tatccataaatataatatctaaaaaatacacrataatcttctaaatcaac

SEQ ID NO: 29632 - DNA, 50 bp, synthetic construct
  source 1..50: mol_type = other DNA
aaaaaaaacrtaacactaaactaaatatcaaaaatcctaattttaatccc

SEQ ID NO: 29633 - DNA, 50 bp, synthetic construct
  source 1..50: mol_type = other DNA
craaaacaacacaaactattcccaaaactccaaactccacaaccaaacac

SEQ ID NO: 29634 - DNA, 50 bp, synthetic construct
  source 1..50: mol_type = other DNA
actacctccrtacaaaatttcccatcaaaaaaaatttcctaaaacaatcc

SEQ ID NO: 29635 - DNA, 50 bp, synthetic construct
  source 1..50: mol_type = other DNA
tcaaaaaaaatttcctaaaacaatccraacaactatttaaaacaaaaccc

SEQ ID NO: 29636 - DNA, 50 bp, synthetic construct
  source 1..50: mol_type = other DNA
cctccttcacccattaattaatatttaccaaatcatcttcctactttccc

SEQ ID NO: 29637 - DNA, 50 bp, synthetic construct
  source 1..50: mol_type = other DNA
aaaaattcctctctaaactaccraaaaacaccrtattacttctcctcaac

SEQ ID NO: 29638 - DNA, 50 bp, synthetic construct
  source 1..50: mol_type = other DNA
caataaaataaaatcatactacctatcccactacaaacraacacrtaacc

SEQ ID NO: 29639 - DNA, 50 bp, synthetic construct
  source 1..50: mol_type = other DNA
ccatacccraccacactactaaaaactttaaaaacatctcattcrattac

SEQ ID NO: 29640 - DNA, 50 bp, synthetic construct
  source 1..50: mol_type = other DNA
tttttataaacacaaaatttaaccatattaccccraataatctctaactc

SEQ ID NO: 29641 - DNA, 50 bp, synthetic construct
  source 1..50: mol_type = other DNA
ctctaacaactatacaactcttaaaatcaacttttaaaaatatacataac

SEQ ID NO: 29642 - DNA, 50 bp, synthetic construct
  source 1..50: mol_type = other DNA
aaaaattattaaaacaataacaatttcacttattcacaattctatacccc

SEQ ID NO: 29643 - DNA, 50 bp, synthetic construct
  source 1..50: mol_type = other DNA
aaaactactacaataatccaaacaaaaaatataaaaccctaatttaaaac

SEQ ID NO: 29644 - DNA, 50 bp, synthetic construct
  source 1..50: mol_type = other DNA
aaaatctaacttactatatactaaacacccactaaatcatcctctccctc

SEQ ID NO: 29645 - DNA, 50 bp, synthetic construct
  source 1..50: mol_type = other DNA
aaactacacaactaaaaaataactccrctaaaaaaatcraaacaaactcc

SEQ ID NO: 29646 - DNA, 50 bp, synthetic construct
  source 1..50: mol_type = other DNA
atctaccaatatttttctacccctaaattactaaattcaatcctcacrac

SEQ ID NO: 29647 - DNA, 50 bp, synthetic construct
  source 1..50: mol_type = other DNA
cacacaattcccttctataacaaaaaacaatatacccttcacaaaccrtc

SEQ ID NO: 29648 - DNA, 50 bp, synthetic construct
  source 1..50: mol_type = other DNA
aattctccrccctaaataacttttcctaaaacraacattttacttaaatc

SEQ ID NO: 29649 - DNA, 50 bp, synthetic construct
  source 1..50: mol_type = other DNA
aaacraacattttacttaaatcraataactatctccaaaaaaatcactac

SEQ ID NO: 29650 - DNA, 50 bp, synthetic construct
  source 1..50: mol_type = other DNA
tcraataactatctccaaaaaaatcactacrcctaaacaattttcttctc

SEQ ID NO: 29651 - DNA, 50 bp, synthetic construct
  source 1..50: mol_type = other DNA
aaacaattttcttctcraaaaccccaacacccaaccaaataccctaaaac

SEQ ID NO: 29652 - DNA, 50 bp, synthetic construct
  source 1..50: mol_type = other DNA
aattattaaactacaacaacaactacctaaaataaccraacrcctccatc

SEQ ID NO: 29653 - DNA, 50 bp, synthetic construct
  source 1..50: mol_type = other DNA
taatacrctaattattaaactacaacaacaactacctaaaataaccraac

SEQ ID NO: 29654 - DNA, 50 bp, synthetic construct
  source 1..50: mol_type = other DNA
cccttaatacrctaattattaaactacaacaacaactacctaaaataacc

SEQ ID NO: 29655 - DNA, 50 bp, synthetic construct
  source 1..50: mol_type = other DNA
aacaactactactacaactcaacaaccaacrcaccaaaaacttcttatac

SEQ ID NO: 29656 - DNA, 50 bp, synthetic construct
  source 1..50: mol_type = other DNA
ttatcatacaccaccaaaaacttaaaataaacrctactaaccrccaacac

SEQ ID NO: 29657 - DNA, 50 bp, synthetic construct
  source 1..50: mol_type = other DNA
taaacaaattatcatacaccaccaaaaacttaaaataaacrctactaacc

SEQ ID NO: 29658 - DNA, 50 bp, synthetic construct
  source 1..50: mol_type = other DNA
taatacataacaacctactcaacctaaaccataacataataaacccracc

SEQ ID NO: 29659 - DNA, 50 bp, synthetic construct
  source 1..50: mol_type = other DNA
aaaaaaccataaaaaaatataacaaaactaaaacctaccctcctaacccc

SEQ ID NO: 29660 - DNA, 50 bp, synthetic construct
  source 1..50: mol_type = other DNA
tattaataaccaaaaccaacactataaaccccatctcrattaacacrcac

SEQ ID NO: 29661 - DNA, 50 bp, synthetic construct
  source 1..50: mol_type = other DNA
taactattaataaccaaaaccaacactataaaccccatctcrattaacac

SEQ ID NO: 29662 - DNA, 50 bp, synthetic construct
  source 1..50: mol_type = other DNA
cctcctcactaactattaataaccaaaaccaacactataaaccccatctc

SEQ ID NO: 29663 - DNA, 50 bp, synthetic construct
  source 1..50: mol_type = other DNA
aaaaaccttctaaaatcttccttctacttaaaaactcccataaaaaatac

SEQ ID NO: 29664 - DNA, 50 bp, synthetic construct
  source 1..50: mol_type = other DNA
cacaaacatactataatatcacaacrctcacctccaaaaaaacccaaacc

SEQ ID NO: 29665 - DNA, 50 bp, synthetic construct
  source 1..50: mol_type = other DNA
aaaaaacactacctctacctactctaactaaaaatatacaaaattatcac

SEQ ID NO: 29666 - DNA, 50 bp, synthetic construct
  source 1..50: mol_type = other DNA
ataaacacaatttcccaaaaaccactaacataaaaaaacccaaaaaactc

SEQ ID NO: 29667 - DNA, 50 bp, synthetic construct
  source 1..50: mol_type = other DNA
aaataacttctctaatcccraatcttaataataccacacttttttttctc

SEQ ID NO: 29668 - DNA, 50 bp, synthetic construct
  source 1..50: mol_type = other DNA
aaaaaaaaccttctctaccctcacaaaaaacaaataacttctctaatccc

SEQ ID NO: 29669 - DNA, 50 bp, synthetic construct
  source 1..50: mol_type = other DNA
ctatataaaaaaacacaaataaaacaatacctccrtcaactctttcaccc

SEQ ID NO: 29670 - DNA, 50 bp, synthetic construct
  source 1..50: mol_type = other DNA
acccaaaccctaaatactatataaaaaaacacaaataaaacaatacctcc

SEQ ID NO: 29671 - DNA, 50 bp, synthetic construct
  source 1..50: mol_type = other DNA
aataaaatcaacaacaaaccaaaaaaaccaaatatcaactaaaaactatc

SEQ ID NO: 29672 - DNA, 50 bp, synthetic construct
  source 1..50: mol_type = other DNA
aacacaatcatttaacctacaacaatctcaaacrcccrataaaacaaaac

SEQ ID NO: 29673 - DNA, 50 bp, synthetic construct
  source 1..50: mol_type = other DNA
ataactaataaccataattataccttccaaaaaacctatttaaaaaaaac

SEQ ID NO: 29674 - DNA, 50 bp, synthetic construct
  source 1..50: mol_type = other DNA
ttaacaatccaacttactactactcctctaattaaaaaaaacaatcacac

SEQ ID NO: 29675 - DNA, 50 bp, synthetic construct
  source 1..50: mol_type = other DNA
aaaaaaaacctataatacaaatctaataacatactaaatcttaaaaaaac

SEQ ID NO: 29676 - DNA, 50 bp, synthetic construct
  source 1..50: mol_type = other DNA
cccaataacacaaaacaaaccacaaaattaactttacrttcracacttac

SEQ ID NO: 29677 - DNA, 50 bp, synthetic construct
  source 1..50: mol_type = other DNA
aacctaaaattaatttaataaaatataatttcaaatttacaaacatcccc

SEQ ID NO: 29678 - DNA, 50 bp, synthetic construct
  source 1..50: mol_type = other DNA
tatttctaactctataaatataaactaaccttcccrcttaaataaatccc

SEQ ID NO: 29679 - DNA, 50 bp, synthetic construct
  source 1..50: mol_type = other DNA
caaaaaacattactatatttctaactctataaatataaactaaccttccc

SEQ ID NO: 29680 - DNA, 50 bp, synthetic construct
  source 1..50: mol_type = other DNA
atacataactccaataaaatctacatacaatactcaaaacaaaatttaac

SEQ ID NO: 29681 - DNA, 50 bp, synthetic construct
  source 1..50: mol_type = other DNA
aaattactcataacacaccccttcactctcraaaatatcccaatttaaac

SEQ ID NO: 29682 - DNA, 50 bp, synthetic construct
  source 1..50: mol_type = other DNA
caaaaataaatcctatttataaattactcataacacaccccttcactctc

SEQ ID NO: 29683 - DNA, 50 bp, synthetic construct
  source 1..50: mol_type = other DNA
ttctattatttaaaactaactacracatcaaaacctaacrctaaaaaacc

SEQ ID NO: 29684 - DNA, 50 bp, synthetic construct
  source 1..50: mol_type = other DNA
aaatataccacaaataaaactataaaaactaatccacccracctctcaac

SEQ ID NO: 29685 - DNA, 50 bp, synthetic construct
  source 1..50: mol_type = other DNA
tattacaccctcaaaaataataacctaaaactcaacaaactcrcaccaac

SEQ ID NO: 29686 - DNA, 50 bp, synthetic construct
  source 1..50: mol_type = other DNA
aatcaataatacctaacctaataacctaactaatcttaacttaaaaaatc

SEQ ID NO: 29687 - DNA, 50 bp, synthetic construct
  source 1..50: mol_type = other DNA
tcctaaacaattactacaactaaaaaatactaaaaaaaaccaaacatcac

SEQ ID NO: 29688 - DNA, 50 bp, synthetic construct
  source 1..50: mol_type = other DNA
ctcaatattccttaattacaataattacttaaaaatacctcctctcaccc

SEQ ID NO: 29689 - DNA, 50 bp, synthetic construct
  source 1..50: mol_type = other DNA
acccraaaaaaccccataactatactcaaaaactaaccraaaaaataaac

SEQ ID NO: 29690 - DNA, 50 bp, synthetic construct
  source 1..50: mol_type = other DNA
taattaattaccraaataataaatcattcrcttccccaccttccctaaac

SEQ ID NO: 29691 - DNA, 50 bp, synthetic construct
  source 1..50: mol_type = other DNA
aacccttttatcccaatctcttaatcctaaactactacaactacaattcc

SEQ ID NO: 29692 - DNA, 50 bp, synthetic construct
  source 1..50: mol_type = other DNA
ctccaaaaactaatcrtaaaatcatcaactcccttctttcaaaaaacctc

SEQ ID NO: 29693 - DNA, 50 bp, synthetic construct
  source 1..50: mol_type = other DNA
cataaaacctttcctctcrataaaaatcaaaacttaccatataaacactc

SEQ ID NO: 29694 - DNA, 50 bp, synthetic construct
  source 1..50: mol_type = other DNA
ctaaacaaaaccrcrttttaacaataccctttcaactcatcctaaacttc

SEQ ID NO: 29695 - DNA, 50 bp, synthetic construct
  source 1..50: mol_type = other DNA
acccaaacaaactaaaactacttttattcttcraaatctactttacctcc

SEQ ID NO: 29696 - DNA, 50 bp, synthetic construct
  source 1..50: mol_type = other DNA
crccccaaccaaaacctcaacaaataaaactccaacaaaaaataaaatcc

SEQ ID NO: 29697 - DNA, 50 bp, synthetic construct
  source 1..50: mol_type = other DNA
caacaaataaaactccaacaaaaaataaaatccraaaaaatacatcaccc

SEQ ID NO: 29698 - DNA, 50 bp, synthetic construct
  source 1..50: mol_type = other DNA
aataaaactccaacaaaaaataaaatccraaaaaatacatcacccrtccc

SEQ ID NO: 29699 - DNA, 50 bp, synthetic construct
  source 1..50: mol_type = other DNA
aaaaacaaacaaatacctaatctataaattcttccataaaccrcctaccc

SEQ ID NO: 29700 - DNA, 50 bp, synthetic construct
  source 1..50: mol_type = other DNA
caaccattttattatactcaaattctataaataaaaaattcaactaaaac

SEQ ID NO: 29701 - DNA, 50 bp, synthetic construct
  source 1..50: mol_type = other DNA
aattcaactaaaacrtattaaaaataataacttctctctactttcacaac

SEQ ID NO: 29702 - DNA, 50 bp, synthetic construct
  source 1..50: mol_type = other DNA
rtctaaaaacctcatcttaaataactcaaataactaaaaataactacrac

SEQ ID NO: 29703 - DNA, 50 bp, synthetic construct
  source 1..50: mol_type = other DNA
aactcaaataactaaaaataactacracratccactaaaactatatatcc

SEQ ID NO: 29704 - DNA, 50 bp, synthetic construct
  source 1..50: mol_type = other DNA
taaacttaatattactcataaaaacaaaaaccaaaaaacrcaaacctccc

SEQ ID NO: 29705 - DNA, 50 bp, synthetic construct
  source 1..50: mol_type = other DNA
cctaaaataactacatacaaccaaaaacacataacaaacactcaattaac

SEQ ID NO: 29706 - DNA, 50 bp, synthetic construct
  source 1..50: mol_type = other DNA
acccttaactatatacaaccatctcaaaatatataaataaaaatatatcc

SEQ ID NO: 29707 - DNA, 50 bp, synthetic construct
  source 1..50: mol_type = other DNA
aaaaaataaatctccttttccacccaaaaacaacrtaactcaaaccaacc

SEQ ID NO: 29708 - DNA, 50 bp, synthetic construct
  source 1..50: mol_type = other DNA
aatacccaacaacaaaaatcaaccaataacaacataaccttaactaaacc

SEQ ID NO: 29709 - DNA, 50 bp, synthetic construct
  source 1..50: mol_type = other DNA
ctaatttctactactaaacactatccatacaaaaatcatccacccaacac

SEQ ID NO: 29710 - DNA, 50 bp, synthetic construct
  source 1..50: mol_type = other DNA
tcataataaaaaaacaactatattttcatattttctatatctaaaaaacc

SEQ ID NO: 29711 - DNA, 50 bp, synthetic construct
  source 1..50: mol_type = other DNA
ttttaaaaacacacacatacrtacatctcaaccaaataaacatcccaacc

SEQ ID NO: 29712 - DNA, 50 bp, synthetic construct
  source 1..50: mol_type = other DNA
tctaaaaaaccrctaaatccractaaaatattcatctaactaaaatacac

SEQ ID NO: 29713 - DNA, 50 bp, synthetic construct
  source 1..50: mol_type = other DNA
aactaccctaccaaaaaaaaacaccaaaccataaaaaacrtccaaaaaac

SEQ ID NO: 29714 - DNA, 50 bp, synthetic construct
  source 1..50: mol_type = other DNA
cacactatatatctctataaaactctcaactatcaactatctaaaaaaac

SEQ ID NO: 29715 - DNA, 50 bp, synthetic construct
  source 1..50: mol_type = other DNA
aactaaaaacctcacaaaaacacacaatatataacaacctcacacaaacc

SEQ ID NO: 29716 - DNA, 50 bp, synthetic construct
  source 1..50: mol_type = other DNA
acacaatatataacaacctcacacaaaccrcaaattccraccaataaatc

SEQ ID NO: 29717 - DNA, 50 bp, synthetic construct
  source 1..50: mol_type = other DNA
ctatacctaactctactcactaaaacaacaaaataaaatatacaaatacc

SEQ ID NO: 29718 - DNA, 50 bp, synthetic construct
  source 1..50: mol_type = other DNA
aaatatacaaataccraaaaataaaactaacaacactaaatcttcccaac

SEQ ID NO: 29719 - DNA, 50 bp, synthetic construct
  source 1..50: mol_type = other DNA
ccacraacaactcaatactaaaaatcactatctacaacaccaacatcrac

SEQ ID NO: 29720 - DNA, 50 bp, synthetic construct
  source 1..50: mol_type = other DNA
ccaccacraacaactcaatactaaaaatcactatctacaacaccaacatc

SEQ ID NO: 29721 - DNA, 50 bp, synthetic construct
  source 1..50: mol_type = other DNA
ccacrtcratattaatattataaacaataatttccaacactaaattatcc

SEQ ID NO: 29722 - DNA, 50 bp, synthetic construct
  source 1..50: mol_type = other DNA
ataatttccaacactaaattatccrtaataatatccacrttaataaaatc

SEQ ID NO: 29723 - DNA, 50 bp, synthetic construct
  source 1..50: mol_type = other DNA
ccaacaaaactaaaccaaccaaaaactaactaaacccaaaaaatacaccc

SEQ ID NO: 29724 - DNA, 50 bp, synthetic construct
  source 1..50: mol_type = other DNA
aataaaataaacraaacaacaaactttatacrcattccacaaataaaaac

SEQ ID NO: 29725 - DNA, 50 bp, synthetic construct
  source 1..50: mol_type = other DNA
cccctaaaccccrtctttatctataaaatacrcacaaaacttactattcc

SEQ ID NO: 29726 - DNA, 50 bp, synthetic construct
  source 1..50: mol_type = other DNA
caactaacrtaaaacatttcaaactaattatacaacttactacaacctac

SEQ ID NO: 29727 - DNA, 50 bp, synthetic construct
  source 1..50: mol_type = other DNA
ataaaaactatttctaaaaaatcatcaatacctaaatttttcaccraacc

SEQ ID NO: 29728 - DNA, 50 bp, synthetic construct
  source 1..50: mol_type = other DNA
aacaaataaaaactatttctaaaaaatcatcaatacctaaatttttcacc

SEQ ID NO: 29729 - DNA, 50 bp, synthetic construct
  source 1..50: mol_type = other DNA
ccaactaaaataacacacccaatccctataactccaaaacraaaactttc

SEQ ID NO: 29730 - DNA, 50 bp, synthetic construct
  source 1..50: mol_type = other DNA
aataaaaaaatctacaaaccactcctaaaactactaaaaatcaaaattcc

SEQ ID NO: 29731 - DNA, 50 bp, synthetic construct
  source 1..50: mol_type = other DNA
atatatatatacrcaaatatatttatacrcctatatacctacaaatctcc

SEQ ID NO: 29732 - DNA, 50 bp, synthetic construct
  source 1..50: mol_type = other DNA
aaatccaaatataaactctaaaatcaaactcccaaaacccccaaaaacrc

SEQ ID NO: 29733 - DNA, 50 bp, synthetic construct
  source 1..50: mol_type = other DNA
aaaaatccaaatataaactctaaaatcaaactcccaaaacccccaaaaac

SEQ ID NO: 29734 - DNA, 50 bp, synthetic construct
  source 1..50: mol_type = other DNA
ttaaaatcaaactaacaaaaactaactacttcccctacrccttaattacc

SEQ ID NO: 29735 - DNA, 50 bp, synthetic construct
  source 1..50: mol_type = other DNA
aaaacttaaactttaaaatcaaactaacaaaaactaactacttcccctac

SEQ ID NO: 29736 - DNA, 50 bp, synthetic construct
  source 1..50: mol_type = other DNA
cactatctttttcctcctttataaacracaaaattaaaaccttcctattc

SEQ ID NO: 29737 - DNA, 50 bp, synthetic construct
  source 1..50: mol_type = other DNA
atcctatacctaaaaacctacacacactatctttttcctcctttataaac

SEQ ID NO: 29738 - DNA, 50 bp, synthetic construct
  source 1..50: mol_type = other DNA
tattactaaaaaacrctaaatttcaaaatcactttaaatattctaacacc

SEQ ID NO: 29739 - DNA, 50 bp, synthetic construct
  source 1..50: mol_type = other DNA
caaaataattttaaaacccaacrcctcttaataataacaataccaatttc

SEQ ID NO: 29740 - DNA, 50 bp, synthetic construct
  source 1..50: mol_type = other DNA
ataaccccaaaaaacaactaacaaaccctactaaactaaaatataaatcc

SEQ ID NO: 29741 - DNA, 50 bp, synthetic construct
  source 1..50: mol_type = other DNA
aaaacaactaacaaaccctactaaactaaaatataaatccrcaactaccc

SEQ ID NO: 29742 - DNA, 50 bp, synthetic construct
  source 1..50: mol_type = other DNA
acacccacaaaaacaaaaatcaaaaaatcrctaacaaacaaatctcaaac

SEQ ID NO: 29743 - DNA, 50 bp, synthetic construct
  source 1..50: mol_type = other DNA
aaacctaaaacataaaaccraacacccacaaaaacaaaaatcaaaaaatc

SEQ ID NO: 29744 - DNA, 50 bp, synthetic construct
  source 1..50: mol_type = other DNA
aaaaacccctaaaaacaaataaatctccctcaaacctaaaacataaaacc

SEQ ID NO: 29745 - DNA, 50 bp, synthetic construct
  source 1..50: mol_type = other DNA
atccctccaaccaacacaattcaaaaaacctatcaaaccaactaaaaacc

SEQ ID NO: 29746 - DNA, 50 bp, synthetic construct
  source 1..50: mol_type = other DNA
ccttaaaacctaataaactaataataactactaaacccaaatcccaactc

SEQ ID NO: 29747 - DNA, 50 bp, synthetic construct
  source 1..50: mol_type = other DNA
taaaacctaataaactaataataactactaaacccaaatcccaactcrac

SEQ ID NO: 29748 - DNA, 50 bp, synthetic construct
  source 1..50: mol_type = other DNA
tctaaatctaaacacaccrtaaaaccraacctatctataaataaacatcc

SEQ ID NO: 29749 - DNA, 50 bp, synthetic construct
  source 1..50: mol_type = other DNA
aaatttcaaactttaaaaataatatttcctaactaaaaacaataactcac

SEQ ID NO: 29750 - DNA, 50 bp, synthetic construct
  source 1..50: mol_type = other DNA
attaaccaaactaattttaaactctcaacctcaaataacccrcctacctc

SEQ ID NO: 29751 - DNA, 50 bp, synthetic construct
  source 1..50: mol_type = other DNA
aaatttcatattaaccaaactaattttaaactctcaacctcaaataaccc

SEQ ID NO: 29752 - DNA, 50 bp, synthetic construct
  source 1..50: mol_type = other DNA
aaactaattaatctattttaacaaaatactaattaatacatttacaatcc

SEQ ID NO: 29753 - DNA, 50 bp, synthetic construct
  source 1..50: mol_type = other DNA
tactaattaatacatttacaatccrtaaactaaacacaaaaattctccac

SEQ ID NO: 29754 - DNA, 50 bp, synthetic construct
  source 1..50: mol_type = other DNA
caaatccccaccaaactcaaaaacccatttaacttcacccaataaatccc

SEQ ID NO: 29755 - DNA, 50 bp, synthetic construct
  source 1..50: mol_type = other DNA
caaactcaaaaacccatttaacttcacccaataaatcccrcttaaaaacc

SEQ ID NO: 29756 - DNA, 50 bp, synthetic construct
  source 1..50: mol_type = other DNA
tcctcaacccttaaataatcrataaaactaaataccttaaaacaaaaaac

SEQ ID NO: 29757 - DNA, 50 bp, synthetic construct
  source 1..50: mol_type = other DNA
cccttaaataatcrataaaactaaataccttaaaacaaaaaacratactc

SEQ ID NO: 29758 - DNA, 50 bp, synthetic construct
  source 1..50: mol_type = other DNA
ccaacaactactatactcaatttttcrctaaaccttaactaccttccctc

SEQ ID NO: 29759 - DNA, 50 bp, synthetic construct
  source 1..50: mol_type = other DNA
acaataaaaaacttaacacctaaaccaacaactactatactcaatttttc

SEQ ID NO: 29760 - DNA, 50 bp, synthetic construct
  source 1..50: mol_type = other DNA
attcaattcctcatacccctaaataaaaacctacactctatattctatcc

SEQ ID NO: 29761 - DNA, 50 bp, synthetic construct
  source 1..50: mol_type = other DNA
aactcctaaaaataacratatttcttcttaattatccaaaaaaaatcrcc

SEQ ID NO: 29762 - DNA, 50 bp, synthetic construct
  source 1..50: mol_type = other DNA
tacaactcctaaaaataacratatttcttcttaattatccaaaaaaaatc

SEQ ID NO: 29763 - DNA, 50 bp, synthetic construct
  source 1..50: mol_type = other DNA
catcaaaactttatatctcaaaaaatcccratacaactcctaaaaataac

SEQ ID NO: 29764 - DNA, 50 bp, synthetic construct
  source 1..50: mol_type = other DNA
ccraaccaaaaaaaacaaactcatcaaaactttatatctcaaaaaatccc

SEQ ID NO: 29765 - DNA, 50 bp, synthetic construct
  source 1..50: mol_type = other DNA
tcraaacctcctaaaacacaaaatcttaataaatctactccctctaactc

SEQ ID NO: 29766 - DNA, 50 bp, synthetic construct
  source 1..50: mol_type = other DNA
cctaaaacacaaaatcttaataaatctactccctctaactcrataaaaac

SEQ ID NO: 29767 - DNA, 50 bp, synthetic construct
  source 1..50: mol_type = other DNA
aaacacaaaatcttaataaatctactccctctaactcrataaaaacracc

SEQ ID NO: 29768 - DNA, 50 bp, synthetic construct
  source 1..50: mol_type = other DNA
cctactcaactttccctatccataattctataccaacatctcaactaaac

SEQ ID NO: 29769 - DNA, 50 bp, synthetic construct
  source 1..50: mol_type = other DNA
ttaacaacctcacccttttctaatctccattcccaaaataaaaaacctcc

SEQ ID NO: 29770 - DNA, 50 bp, synthetic construct
  source 1..50: mol_type = other DNA
aacttcracaccaccttattaaaaataaaatactaaaaaacttaaaatac

SEQ ID NO: 29771 - DNA, 50 bp, synthetic construct
  source 1..50: mol_type = other DNA
ctatacaaaaaactcratttccccraacccacaatattaataaccaattc

SEQ ID NO: 29772 - DNA, 50 bp, synthetic construct
  source 1..50: mol_type = other DNA
ataaaaaatactcaaaaataaactaacaaaaacattttcaaaacaacrcc

SEQ ID NO: 29773 - DNA, 50 bp, synthetic construct
  source 1..50: mol_type = other DNA
ttaccaaaaactcaacraaaaaccaccaaaaaaacttataacrcatcaac

SEQ ID NO: 29774 - DNA, 50 bp, synthetic construct
  source 1..50: mol_type = other DNA
aacaaactttaccaaaaactcaacraaaaaccaccaaaaaaacttataac

SEQ ID NO: 29775 - DNA, 50 bp, synthetic construct
  source 1..50: mol_type = other DNA
ctactcacaaaaaaattaacaaatacaacaaactttaccaaaaactcaac

SEQ ID NO: 29776 - DNA, 50 bp, synthetic construct
  source 1..50: mol_type = other DNA
aataaactcctcraaaatccacaaaaatcctaaaaaaaactttaaacttc

SEQ ID NO: 29777 - DNA, 50 bp, synthetic construct
  source 1..50: mol_type = other DNA
atattctctacaacctctcaaaccctcraaatctaaactaaaattaattc

SEQ ID NO: 29778 - DNA, 50 bp, synthetic construct
  source 1..50: mol_type = other DNA
acttcracaaacctaaaataaaaattcraactaatctcaatctaaatctc

SEQ ID NO: 29779 - DNA, 50 bp, synthetic construct
  source 1..50: mol_type = other DNA
taaaccrattaacataaacaattcttaccccaattcacctctaattcccc

SEQ ID NO: 29780 - DNA, 50 bp, synthetic construct
  source 1..50: mol_type = other DNA
ctaattcaaactattctcctatatcaacctcctaaataactaaaattacc

SEQ ID NO: 29781 - DNA, 50 bp, synthetic construct
  source 1..50: mol_type = other DNA
ataaataatcactaacaacttaaaacccaaatatacataaaaaaatacac

SEQ ID NO: 29782 - DNA, 50 bp, synthetic construct
  source 1..50: mol_type = other DNA
atccaacctctcttcttcccttctctatactttcacttctaaaaaaaacc

SEQ ID NO: 29783 - DNA, 50 bp, synthetic construct
  source 1..50: mol_type = other DNA
tataaccaaaatcacaaataaaaacaactcttcraaaactctaaaacrcc

SEQ ID NO: 29784 - DNA, 50 bp, synthetic construct
  source 1..50: mol_type = other DNA
ctttaaaatcctcctaaaataaaacrtatactctcacatcctcccaaaac

SEQ ID NO: 29785 - DNA, 50 bp, synthetic construct
  source 1..50: mol_type = other DNA
aaccttactctactaaatcaacctcctttaaaatcctcctaaaataaaac

SEQ ID NO: 29786 - DNA, 50 bp, synthetic construct
  source 1..50: mol_type = other DNA
aaactaactcaacaaaacaaaatccaaactctaaaaacccaaactctacc

SEQ ID NO: 29787 - DNA, 50 bp, synthetic construct
  source 1..50: mol_type = other DNA
aaaatccaaactctaaaaacccaaactctaccrtcaccttcttctataac

SEQ ID NO: 29788 - DNA, 50 bp, synthetic construct
  source 1..50: mol_type = other DNA
cttccatataacaaacctaataatttaaatcaataaaatactaatcctac

SEQ ID NO: 29789 - DNA, 50 bp, synthetic construct
  source 1..50: mol_type = other DNA
aaaaaaataaactaattcctccaacctaaaaaacccaaccctataacctc

SEQ ID NO: 29790 - DNA, 50 bp, synthetic construct
  source 1..50: mol_type = other DNA
accraaataaaacttaacactatatttcracaaatccctctaactaaaac

SEQ ID NO: 29791 - DNA, 50 bp, synthetic construct
  source 1..50: mol_type = other DNA
tacaaaaaacaaactataaaaaaaacaaactctataaatatacccraccc

SEQ ID NO: 29792 - DNA, 50 bp, synthetic construct
  source 1..50: mol_type = other DNA
attctcaattaaataacattacacttatactaatatataaatataattac

SEQ ID NO: 29793 - DNA, 50 bp, synthetic construct
  source 1..50: mol_type = other DNA
ataatttaaattaactaaacattacacaaattccaactccaactaaaacc

SEQ ID NO: 29794 - DNA, 50 bp, synthetic construct
  source 1..50: mol_type = other DNA
taaattaactaaacattacacaaattccaactccaactaaaaccraaatc

SEQ ID NO: 29795 - DNA, 50 bp, synthetic construct
  source 1..50: mol_type = other DNA
aaacttctaacttactccttttaatcaaaactccrcttttcttaaatttc

SEQ ID NO: 29796 - DNA, 50 bp, synthetic construct
  source 1..50: mol_type = other DNA
ctctttaactttaaaaaaacttctaacttactccttttaatcaaaactcc

SEQ ID NO: 29797 - DNA, 50 bp, synthetic construct
  source 1..50: mol_type = other DNA
tacaattatatcacacaaaaaatactacratacctaaaaaaaccaaatac

SEQ ID NO: 29798 - DNA, 50 bp, synthetic construct
  source 1..50: mol_type = other DNA
aaaaaaattacaaatataaatcactacacctaacctaacactttaatatc

SEQ ID NO: 29799 - DNA, 50 bp, synthetic construct
  source 1..50: mol_type = other DNA
atttattcctcttataccaacaacractactaattaaaaacataaactcc

SEQ ID NO: 29800 - DNA, 50 bp, synthetic construct
  source 1..50: mol_type = other DNA
taaatacaataaataaaaaactaaacatttattcctcttataccaacaac

SEQ ID NO: 29801 - DNA, 50 bp, synthetic construct
  source 1..50: mol_type = other DNA
aaaaaaacttacctaatccttaactctaaacccacttcctaaatattctc

SEQ ID NO: 29802 - DNA, 50 bp, synthetic construct
  source 1..50: mol_type = other DNA
aaaatcattcacraaataaccacataaatactataaaaacaaacaacaac

SEQ ID NO: 29803 - DNA, 50 bp, synthetic construct
  source 1..50: mol_type = other DNA
catataatcactccrtaaataattctttattatttcctcctatctctccc

SEQ ID NO: 29804 - DNA, 50 bp, synthetic construct
  source 1..50: mol_type = other DNA
aatatatcaaattctcaccttttcatccacccacaattcactaaattccc

SEQ ID NO: 29805 - DNA, 50 bp, synthetic construct
  source 1..50: mol_type = other DNA
ctaataatacaccaactaaacatccaaacrtcaactaacttaaacaaacc

SEQ ID NO: 29806 - DNA, 50 bp, synthetic construct
  source 1..50: mol_type = other DNA
tcataaaaataaccctaaaaaatctaaataatactcactaaatcacatcc

SEQ ID NO: 29807 - DNA, 50 bp, synthetic construct
  source 1..50: mol_type = other DNA
tcccataaactaaccaaataaacaaactttactaaacctatctccccacc

SEQ ID NO: 29808 - DNA, 50 bp, synthetic construct
  source 1..50: mol_type = other DNA
tatctccccaccratctaaaatctacaaattaaacttccaaacaaaaaac

SEQ ID NO: 29809 - DNA, 50 bp, synthetic construct
  source 1..50: mol_type = other DNA
tcaaaacaaccccacccttactaataaaaaataaataattcttaattccc

SEQ ID NO: 29810 - DNA, 50 bp, synthetic construct
  source 1..50: mol_type = other DNA
ctaaacaataaatcaataacccacccaaaaaacaaatatccctaaaaacc

SEQ ID NO: 29811 - DNA, 50 bp, synthetic construct
  source 1..50: mol_type = other DNA
aaaaatctcaaatctatttattattcaaaaattccttaacaaaaaattcc

SEQ ID NO: 29812 - DNA, 50 bp, synthetic construct
  source 1..50: mol_type = other DNA
aaaaaaactacactcacctaaaaaaaacaaaattcttaaaaactaaccac

SEQ ID NO: 29813 - DNA, 50 bp, synthetic construct
  source 1..50: mol_type = other DNA
aaaacctaaaacaaaacaataaaaaactcattttatccaacctccraaac

SEQ ID NO: 29814 - DNA, 50 bp, synthetic construct
  source 1..50: mol_type = other DNA
taaaaaaaacctaaaacaaaacaataaaaaactcattttatccaacctcc

SEQ ID NO: 29815 - DNA, 50 bp, synthetic construct
  source 1..50: mol_type = other DNA
ccaaattctaaataccctaaaaaacccctaatcrttaacraaaacacaac

SEQ ID NO: 29816 - DNA, 50 bp, synthetic construct
  source 1..50: mol_type = other DNA
acacaacrttcaaaaacracaaaactcaaatactaaaaaacacataaacc

SEQ ID NO: 29817 - DNA, 50 bp, synthetic construct
  source 1..50: mol_type = other DNA
acaacrttcaaaaacracaaaactcaaatactaaaaaacacataaaccrc

SEQ ID NO: 29818 - DNA, 50 bp, synthetic construct
  source 1..50: mol_type = other DNA
ttctaaaaaatcracctaaaaaaccrtactaaaatctaaaaatatcccrc

SEQ ID NO: 29819 - DNA, 50 bp, synthetic construct
  source 1..50: mol_type = other DNA
acttctaaaaaatcracctaaaaaaccrtactaaaatctaaaaatatccc

SEQ ID NO: 29820 - DNA, 50 bp, synthetic construct
  source 1..50: mol_type = other DNA
aacccraaaaaaacaataaaccracttctaaaaaatcracctaaaaaacc

SEQ ID NO: 29821 - DNA, 50 bp, synthetic construct
  source 1..50: mol_type = other DNA
caatttcrttttacctatttttaaactttctataaataaaactatacaac

SEQ ID NO: 29822 - DNA, 50 bp, synthetic construct
  source 1..50: mol_type = other DNA
ctcactaaataattaccacccttacacrtatccttaaacactacaatttc

SEQ ID NO: 29823 - DNA, 50 bp, synthetic construct
  source 1..50: mol_type = other DNA
cacaaaaaatccaaaaacaaataaaacraaactacaatattcaaaaatac

SEQ ID NO: 29824 - DNA, 50 bp, synthetic construct
  source 1..50: mol_type = other DNA
ctaaatatcctaaaactaacaacttcctctctaaaacccctaaaaaaaac

SEQ ID NO: 29825 - DNA, 50 bp, synthetic construct
  source 1..50: mol_type = other DNA
attaaccctaacctaaacaaaatctacaattaaaactattattaatcacc

SEQ ID NO: 29826 - DNA, 50 bp, synthetic construct
  source 1..50: mol_type = other DNA
ttaaatacctcctataactccccattatactatatctcctctataatacc

SEQ ID NO: 29827 - DNA, 50 bp, synthetic construct
  source 1..50: mol_type = other DNA
tataaaatataaacracaaacrccctatcactatctacacaatctcacac

SEQ ID NO: 29828 - DNA, 50 bp, synthetic construct
  source 1..50: mol_type = other DNA
tccccatactactaaaaaataacaaacaatataaaatataaacracaaac

SEQ ID NO: 29829 - DNA, 50 bp, synthetic construct
  source 1..50: mol_type = other DNA
tattaaatataaccrtataaaactatacaaacaataacaaaacrcctatc

SEQ ID NO: 29830 - DNA, 50 bp, synthetic construct
  source 1..50: mol_type = other DNA
ccttaactctaacaactaaattatctacctcctaaaaaaccccraaaaac

SEQ ID NO: 29831 - DNA, 50 bp, synthetic construct
  source 1..50: mol_type = other DNA
tatatatccttaactctaacaactaaattatctacctcctaaaaaacccc

SEQ ID NO: 29832 - DNA, 50 bp, synthetic construct
  source 1..50: mol_type = other DNA
atattaaaaaatacaatcrtcacctttaatattactattccatacraaac

SEQ ID NO: 29833 - DNA, 50 bp, synthetic construct
  source 1..50: mol_type = other DNA
attaaaaaatacaatcrtcacctttaatattactattccatacraaacrc

SEQ ID NO: 29834 - DNA, 50 bp, synthetic construct
  source 1..50: mol_type = other DNA
caaaaatttaaaaatctatctaccttcaatcaaattctatcccatccctc

SEQ ID NO: 29835 - DNA, 50 bp, synthetic construct
  source 1..50: mol_type = other DNA
caaacaaacctccaaattcttaactcaaacaaaataatcactaatccaac

SEQ ID NO: 29836 - DNA, 50 bp, synthetic construct
  source 1..50: mol_type = other DNA
aaacctccaaattcttaactcaaacaaaataatcactaatccaacraaac

SEQ ID NO: 29837 - DNA, 50 bp, synthetic construct
  source 1..50: mol_type = other DNA
aattcttaactcaaacaaaataatcactaatccaacraaacrtcaaaatc

SEQ ID NO: 29838 - DNA, 50 bp, synthetic construct
  source 1..50: mol_type = other DNA
crcacatacccttctatatttaccttcatattactaaacaaaatcraaac

SEQ ID NO: 29839 - DNA, 50 bp, synthetic construct
  source 1..50: mol_type = other DNA
atctccrcacatacccttctatatttaccttcatattactaaacaaaatc

SEQ ID NO: 29840 - DNA, 50 bp, synthetic construct
  source 1..50: mol_type = other DNA
cttttatctaaatctacctctacatcactaacrtaatcacrtatatctcc

SEQ ID NO: 29841 - DNA, 50 bp, synthetic construct
  source 1..50: mol_type = other DNA
ctatctcratcttttatctaaatctacctctacatcactaacrtaatcac

SEQ ID NO: 29842 - DNA, 50 bp, synthetic construct
  source 1..50: mol_type = other DNA
cctaactcctatctcratcttttatctaaatctacctctacatcactaac

SEQ ID NO: 29843 - DNA, 50 bp, synthetic construct
  source 1..50: mol_type = other DNA
cctactacaatccataaaacactaccaaatacaacrcraaaacctaatac

SEQ ID NO: 29844 - DNA, 50 bp, synthetic construct
  source 1..50: mol_type = other DNA
aaaccactataaacactcaaaaaaaacaacaaaaccracccactcacatc

SEQ ID NO: 29845 - DNA, 50 bp, synthetic construct
  source 1..50: mol_type = other DNA
atcaaaaacraaccaacctactactacaacraatacratataaataaacc

SEQ ID NO: 29846 - DNA, 50 bp, synthetic construct
  source 1..50: mol_type = other DNA
taactacactatcctccctaccccaaataaaaatatttaacatcctattc

SEQ ID NO: 29847 - DNA, 50 bp, synthetic construct
  source 1..50: mol_type = other DNA
aaaatatttaacatcctattcrtaacaaataaaaataacaaccrcaacac

SEQ ID NO: 29848 - DNA, 50 bp, synthetic construct
  source 1..50: mol_type = other DNA
ccaaataaaatccaaaaacaaccaaaactaaattaataacaataaaaatc

SEQ ID NO: 29849 - DNA, 50 bp, synthetic construct
  source 1..50: mol_type = other DNA
ctttttctaccaataaactcaccatcctcctaatcatccaaaccaaacac

SEQ ID NO: 29850 - DNA, 50 bp, synthetic construct
  source 1..50: mol_type = other DNA
aaatccaatcctatatatccaacaaaatctaaacatatacctacctaccc

SEQ ID NO: 29851 - DNA, 50 bp, synthetic construct
  source 1..50: mol_type = other DNA
tcaaatcttcatcttacrtaacctctatacaacactttatactattaacc

SEQ ID NO: 29852 - DNA, 50 bp, synthetic construct
  source 1..50: mol_type = other DNA
ccataacctactatttactaaatccataatcrctcaaatcttcatcttac

SEQ ID NO: 29853 - DNA, 50 bp, synthetic construct
  source 1..50: mol_type = other DNA
acaaactcattccctcaccratatctccaataactttacttatattcttc

SEQ ID NO: 29854 - DNA, 50 bp, synthetic construct
  source 1..50: mol_type = other DNA
aataaatatccctaaatacraaaaacataaacaaaactactaaaaacacc

SEQ ID NO: 29855 - DNA, 50 bp, synthetic construct
  source 1..50: mol_type = other DNA
aaaatcrattcaaaaacccaaaaaccactaaaaattaaacaaaacraacc

SEQ ID NO: 29856 - DNA, 50 bp, synthetic construct
  source 1..50: mol_type = other DNA
aaaacaaaatcrattcaaaaacccaaaaaccactaaaaattaaacaaaac

SEQ ID NO: 29857 - DNA, 50 bp, synthetic construct
  source 1..50: mol_type = other DNA
aactaaaaactaatctcatattctcaaatttttctacaaattttaataac

SEQ ID NO: 29858 - DNA, 50 bp, synthetic construct
  source 1..50: mol_type = other DNA
cattatactaaacactttatattatcttatttcatccccaaaacaacccc

SEQ ID NO: 29859 - DNA, 50 bp, synthetic construct
  source 1..50: mol_type = other DNA
taaaaacttaaaaccatattataaaacactaaacaaatttaataacttcc

SEQ ID NO: 29860 - DNA, 50 bp, synthetic construct
  source 1..50: mol_type = other DNA
taatattttaatttataaaacccaaaactaatcacattacractccraac

SEQ ID NO: 29861 - DNA, 50 bp, synthetic construct
  source 1..50: mol_type = other DNA
aaaataatattttaatttataaaacccaaaactaatcacattacractcc

SEQ ID NO: 29862 - DNA, 50 bp, synthetic construct
  source 1..50: mol_type = other DNA
cactaaacctctaaacctcctaaaatactaaaatacaaacataaaccacc

SEQ ID NO: 29863 - DNA, 50 bp, synthetic construct
  source 1..50: mol_type = other DNA
aaaatctcactatattacccaaactaatcccaaactcctaaactcaaacc

SEQ ID NO: 29864 - DNA, 50 bp, synthetic construct
  source 1..50: mol_type = other DNA
ttcaaaaacctttataacaacttcracrccrtaacttaattaattaaaac

SEQ ID NO: 29865 - DNA, 50 bp, synthetic construct
  source 1..50: mol_type = other DNA
ctatattcttataaataaatttcaaaaacctttataacaacttcracrcc

SEQ ID NO: 29866 - DNA, 50 bp, synthetic construct
  source 1..50: mol_type = other DNA
ctaactctatattcttataaataaatttcaaaaacctttataacaacttc

SEQ ID NO: 29867 - DNA, 50 bp, synthetic construct
  source 1..50: mol_type = other DNA
accataaaaattcctaaaattcatctacaaaaatataaaactaaaaaccc

SEQ ID NO: 29868 - DNA, 50 bp, synthetic construct
  source 1..50: mol_type = other DNA
aaaaattcctaaaattcatctacaaaaatataaaactaaaaacccraacc

SEQ ID NO: 29869 - DNA, 50 bp, synthetic construct
  source 1..50: mol_type = other DNA
aaaactaatttaataactcaactaactcttacatcacttatccattcctc

SEQ ID NO: 29870 - DNA, 50 bp, synthetic construct
  source 1..50: mol_type = other DNA
actcttacatcacttatccattcctcraatttccttcaatatccaaaaac

SEQ ID NO: 29871 - DNA, 50 bp, synthetic construct
  source 1..50: mol_type = other DNA
crttaatcataaatttcaaaccaaaatcataaactctaaatcaaattctc

SEQ ID NO: 29872 - DNA, 50 bp, synthetic construct
  source 1..50: mol_type = other DNA
tttcttcaacatactaaccatatttctctccaaaataaaataatccaatc

SEQ ID NO: 29873 - DNA, 50 bp, synthetic construct
  source 1..50: mol_type = other DNA
crtaaccraataattaaaacrataaactaaaaatccattaaaatctcccc

SEQ ID NO: 29874 - DNA, 50 bp, synthetic construct; identical to SEQ ID NO: 29873
  source 1..50: mol_type = other DNA

SEQ ID NO: 29875 - DNA, 50 bp, synthetic construct
  source 1..50: mol_type = other DNA
aatacctttcttacttcccttaactaacaaacatctacctccataaaaac

SEQ ID NO: 29876 - DNA, 50 bp, synthetic construct
  source 1..50: mol_type = other DNA
aaattatattacacctactacttcctattccctaaatcactaacrctccc

SEQ ID NO: 29877 - DNA, 50 bp, synthetic construct
  source 1..50: mol_type = other DNA
atatatattttattttctaaccctctactattatccraaaatttctaccc

SEQ ID NO: 29878 - DNA, 50 bp, synthetic construct
  source 1..50: mol_type = other DNA
acaatataattctattaccaaaaaacaactaactccraataaaaacttcc

SEQ ID NO: 29879 - DNA, 50 bp, synthetic construct
  source 1..50: mol_type = other DNA
caaaaaatcaaaaaacaaaacacacacaaaaaaaaaccacccactaaccc

SEQ ID NO: 29880 - DNA, 50 bp, synthetic construct
  source 1..50: mol_type = other DNA
taaccrattaactcaattaattaaaacrtaatactaataacrccaaaatc

SEQ ID NO: 29881 - DNA, 50 bp, synthetic construct; identical to SEQ ID NO: 29880
  source 1..50: mol_type = other DNA

SEQ ID NO: 29882 - DNA, 50 bp, synthetic construct
  source 1..50: mol_type = other DNA
atactacttttataataacaataccctatattaaaatttaaaataaaccc

SEQ ID NO: 29883 - DNA, 50 bp, synthetic construct
  source 1..50: mol_type = other DNA
tttcaaaacctttatataacctataaaatcttattaattactattccacc

SEQ ID NO: 29884 - DNA, 50 bp, synthetic construct
  source 1..50: mol_type = other DNA
aaaattcttttcacttttatacatttcccrcracattacaaaataaatac

SEQ ID NO: 29885 - DNA, 50 bp, synthetic construct
  source 1..50: mol_type = other DNA
aaaaaaaaactcacaaacactcatctactacrtactcaccctataatatc

SEQ ID NO: 29886 - DNA, 50 bp, synthetic construct
  source 1..50: mol_type = other DNA
cacacctaaaactttaacrtaaaaattcttttcacttttatacatttccc

SEQ ID NO: 29887 - DNA, 50 bp, synthetic construct
  source 1..50: mol_type = other DNA
ttacccaaattctaacatttttaccctaaaattaattaccccaaataatc

SEQ ID NO: 29888 - DNA, 50 bp, synthetic construct
  source 1..50: mol_type = other DNA
tctcaaaaacatctttctcaaaaatacaatctctcttctaaactaaatac

SEQ ID NO: 29889 - DNA, 50 bp, synthetic construct
  source 1..50: mol_type = other DNA
aatacaatctctcttctaaactaaatacrtaaaatatccatcaaaacaac

SEQ ID NO: 29890 - DNA, 50 bp, synthetic construct
  source 1..50: mol_type = other DNA
aaaacaacraaaacaaataaaaatacacacctaaacttcatcatcctttc

SEQ ID NO: 29891 - DNA, 50 bp, synthetic construct
  source 1..50: mol_type = other DNA
aataaaaatacacacctaaacttcatcatcctttcraataaacataaatc

SEQ ID NO: 29892 - DNA, 50 bp, synthetic construct
  source 1..50: mol_type = other DNA
aaaatacacacctaaacttcatcatcctttcraataaacataaatcrcac

SEQ ID NO: 29893 - DNA, 50 bp, synthetic construct
  source 1..50: mol_type = other DNA
aaccaaaataaaatttaatccctttataacttccraccraaacaaaaatc

SEQ ID NO: 29894 - DNA, 50 bp, synthetic construct
  source 1..50: mol_type = other DNA
aactttttatttaaccaaaataaaatttaatccctttataacttccracc

SEQ ID NO: 29895 - DNA, 50 bp, synthetic construct
  source 1..50: mol_type = other DNA
ttttaactttttatttaaccaaaataaaatttaatccctttataacttcc

SEQ ID NO: 29896 - DNA, 50 bp, synthetic construct
  source 1..50: mol_type = other DNA
craaacacaaaccaaatatacaaattctacractatacctaaaaacaaac

SEQ ID NO: 29897 - DNA, 50 bp, synthetic construct
  source 1..50: mol_type = other DNA
ataatttccaaaaaaaacaaactatactacrcttacccccaaacacaacc

SEQ ID NO: 29898 - DNA, 50 bp, synthetic construct
  source 1..50: mol_type = other DNA
aaataataacaaattaatatccacaaaccrcaaacaacaaaaacaaccac

SEQ ID NO: 29899 - DNA, 50 bp, synthetic construct
  source 1..50: mol_type = other DNA
cctacatctcratacctacattaatacaacaaacaaaattaaaaaaaacc

SEQ ID NO: 29900 - DNA, 50 bp, synthetic construct
  source 1..50: mol_type = other DNA
ctcaaaaaattcaaataatcataaaaaaatccatacatataaatcctccc

SEQ ID NO: 29901 - DNA, 50 bp, synthetic construct
  source 1..50: mol_type = other DNA
atttctaaaaacttctacaacaacaaaatcrtccaattcaaaaacaaaac

SEQ ID NO: 29902 - DNA, 50 bp, synthetic construct
  source 1..50: mol_type = other DNA
attcccttactcaaaactctacatccacaatcataaaacacaaactattc

SEQ ID NO: 29903 - DNA, 50 bp, synthetic construct
  source 1..50: mol_type = other DNA
ctaaaacttacttatccaacctattatttaaaacaacaaatataaattac

SEQ ID NO: 29904 - DNA, 50 bp, synthetic construct
  source 1..50: mol_type = other DNA
ttttaaaaaaaccttaaccatatattattacrtacccaataaatacttac

SEQ ID NO: 29905 - DNA, 50 bp, synthetic construct
  source 1..50: mol_type = other DNA
ataataaccctccttacaataataacaataacraccracratattataac

SEQ ID NO: 29906 - DNA, 50 bp, synthetic construct
  source 1..50: mol_type = other DNA
aaacttacccatatcrcrataataaccctccttacaataataacaataac

SEQ ID NO: 29907 - DNA, 50 bp, synthetic construct
  source 1..50: mol_type = other DNA
caaaaaattaaaacattaatacttacttcaataaacraaaataatctccc

SEQ ID NO: 29908 - DNA, 50 bp, synthetic construct
  source 1..50: mol_type = other DNA
ccctaacrataatttccraaactataatttcaaatatatactatataacc

SEQ ID NO: 29909 - DNA, 50 bp, synthetic construct
  source 1..50: mol_type = other DNA
taaaaactaaaaaaatactaccatccctaccctaactttacataataatc

SEQ ID NO: 29910 - DNA, 50 bp, synthetic construct
  source 1..50: mol_type = other DNA
aaatactacatctcacataatactaatctcttcctaaactaaaaattaac

SEQ ID NO: 29911 - DNA, 50 bp, synthetic construct
  source 1..50: mol_type = other DNA
ttttccctacattaacacaaaataaccaaaaaaaaacacctttaccttcc

SEQ ID NO: 29912 - DNA, 50 bp, synthetic construct
  source 1..50: mol_type = other DNA
taaaacactattctataaactttctattcatacctaatttaatcacaaac

SEQ ID NO: 29913 - DNA, 50 bp, synthetic construct
  source 1..50: mol_type = other DNA
aaaattcttaataacctctaaaaccatcacctcctaattcaaaaccaccc

SEQ ID NO: 29914 - DNA, 50 bp, synthetic construct
  source 1..50: mol_type = other DNA
aacrcctctaatctctaatatatctaaaacaactattaccctaaactcac

SEQ ID NO: 29915 - DNA, 50 bp, synthetic construct
  source 1..50: mol_type = other DNA
atctaaatataaccttatccaaaaaaacttacaactcacttaaactcaac

SEQ ID NO: 29916 - DNA, 50 bp, synthetic construct
  source 1..50: mol_type = other DNA
attcraaaaacattcttacaaaaatttcaacacaaactattcaccractc

SEQ ID NO: 29917 - DNA, 50 bp, synthetic construct
  source 1..50: mol_type = other DNA
craaaattcraaaaacattcttacaaaaatttcaacacaaactattcacc

SEQ ID NO: 29918 - DNA, 50 bp, synthetic construct
  source 1..50: mol_type = other DNA
taaataatttatattaaaacctttacaaaaatatctctcraactcccrac

SEQ ID NO: 29919 - DNA, 50 bp, synthetic construct
  source 1..50: mol_type = other DNA
ctaaaacaatctccccaacacccacataaataaaataaaaactactactc

SEQ ID NO: 29920 - DNA, 50 bp, synthetic construct
  source 1..50: mol_type = other DNA
tattaaaaaattacaaaaccataaacaaattatcattatactctaaaacc

SEQ ID NO: 29921 - DNA, 50 bp, synthetic construct
  source 1..50: mol_type = other DNA
actcctaactcaacactaacacaaaaccraatatacctacaaacraatac

SEQ ID NO: 29922 - DNA, 50 bp, synthetic construct
  source 1..50: mol_type = other DNA
atcaatactcctaactcaacactaacacaaaaccraatatacctacaaac

SEQ ID NO: 29923 - DNA, 50 bp, synthetic construct
  source 1..50: mol_type = other DNA
aataaacaaatcaaaaccaaaatataacrcacccrcctacaaatacatcc

SEQ ID NO: 29924 - DNA, 50 bp, synthetic construct
  source 1..50: mol_type = other DNA
aaacaaataaaaacaatactataacctaaaaaacrctacaaatccrctcc

SEQ ID NO: 29925 - DNA, 50 bp, synthetic construct
  source 1..50: mol_type = other DNA
acttcaaacaaataaaaacaatactataacctaaaaaacrctacaaatcc

SEQ ID NO: 29926 - DNA, 50 bp, synthetic construct
  source 1..50: mol_type = other DNA
ccraatatataacttcaaacaaataaaaacaatactataacctaaaaaac

SEQ ID NO: 29927 - DNA, 50 bp, synthetic construct
  source 1..50: mol_type = other DNA
atactacctctaaatacaaccattatactaaaacrctaaactccatttcc

SEQ ID NO: 29928 - DNA, 50 bp, synthetic construct
  source 1..50: mol_type = other DNA
tcacaaaataactaaaaaacaaatacctacatcaaactaataaaacaacc

SEQ ID NO: 29929 - DNA, 50 bp, synthetic construct
  source 1..50: mol_type = other DNA
aataacaaaaactattttccrccrcccatcratattaatattaaatactc

SEQ ID NO: 29930 - DNA, 50 bp, synthetic construct
  source 1..50: mol_type = other DNA
aacccattaccatataaaataccaactttctaaaacaccttaaaattttc

SEQ ID NO: 29931 - DNA, 50 bp, synthetic construct
  source 1..50: mol_type = other DNA
tctaataatacratataaaaaaatatatccccaaaaacccaccrcatctc

SEQ ID NO: 29932 - DNA, 50 bp, synthetic construct
  source 1..50: mol_type = other DNA
ttatatctctaataatacratataaaaaaatatatccccaaaaacccacc

SEQ ID NO: 29933 - DNA, 50 bp, synthetic construct
  source 1..50: mol_type = other DNA
ttaccaaaaacraactcttattatcttaaactcaatcataatcaaataac

SEQ ID NO: 29934 - DNA, 50 bp, synthetic construct
  source 1..50: mol_type = other DNA
aaaatttttccrtcatctaatcataactaaattcaaaataacaaaaatcc

SEQ ID NO: 29935 - DNA, 50 bp, synthetic construct
  source 1..50: mol_type = other DNA
ataactaaaaaaacaccataaactaaacaaaatcatacraacaaccacac

SEQ ID NO: 29936 - DNA, 50 bp, synthetic construct
  source 1..50: mol_type = other DNA
aacctcttcacraaaataacatttaaataaaactctcaaacttattctac

SEQ ID NO: 29937 - DNA, 50 bp, synthetic construct
  source 1..50: mol_type = other DNA
atcttaaatccrtaaaacaaacctaaaaatttcacccaaataccatctcc

SEQ ID NO: 29938 - DNA, 50 bp, synthetic construct
  source 1..50: mol_type = other DNA
aaatcctacatctaacraccaactaccaaaactcactaataaaaatatcc

SEQ ID NO: 29939 - DNA, 50 bp, synthetic construct
  source 1..50: mol_type = other DNA
aaccctccaaattcacraacaccctcattaataaattctaacaactaacc

SEQ ID NO: 29940 - DNA, 50 bp, synthetic construct
  source 1..50: mol_type = other DNA
aattactaaaaaatattatacttcaaaacaattcaaaccaactctcccac

SEQ ID NO: 29941 - DNA, 50 bp, synthetic construct
  source 1..50: mol_type = other DNA
aatttataataaacrtatccccaacaatccttacaataataccaaaaaac

SEQ ID NO: 29942 - DNA, 50 bp, synthetic construct
  source 1..50: mol_type = other DNA
acacacacaaaaacacatattcatacatttacatacacatatatactacc

SEQ ID NO: 29943 - DNA, 50 bp, synthetic construct
  source 1..50: mol_type = other DNA
ttcttatctttaaacaacaaactcatcrattcaaaactaatcccaccccc

SEQ ID NO: 29944 - DNA, 50 bp, synthetic construct
  source 1..50: mol_type = other DNA
ctctcaaaacacacratataaaattcttatctttaaacaacaaactcatc

SEQ ID NO: 29945 - DNA, 50 bp, synthetic construct
  source 1..50: mol_type = other DNA
attaactctaaaccrataaacttattacctaaaaataaaaatcccacatc

SEQ ID NO: 29946 - DNA, 50 bp, synthetic construct
  source 1..50: mol_type = other DNA
ccaaacaactaaatactataaatattaaaacaaataaataaacttccacc

SEQ ID NO: 29947 - DNA, 50 bp, synthetic construct
  source 1..50: mol_type = other DNA
ttattacccttatctaaataacattctaaaattaatctactcctaaaccc

SEQ ID NO: 29948 - DNA, 50 bp, synthetic construct
  source 1..50: mol_type = other DNA
actaaatcacatataattatcctataaataactaaaaaattaataacatc

SEQ ID NO: 29949 - DNA, 50 bp, synthetic construct
  source 1..50: mol_type = other DNA
rttcaaacaattctcccacttcratctccccaataactaaaattactaac

SEQ ID NO: 29950 - DNA, 50 bp, synthetic construct
  source 1..50: mol_type = other DNA
ctacatactttctttaaaaacaataatacatacaaccactataaatctac

SEQ ID NO: 29951 - DNA, 50 bp, synthetic construct
  source 1..50: mol_type = other DNA
aatacttatcatataccaaataccttaatataccatctctcaacaacctc

SEQ ID NO: 29952 - DNA, 50 bp, synthetic construct
  source 1..50: mol_type = other DNA
cctaacacataacaaacacctaatactaaaaaatatctataataactaac

SEQ ID NO: 29953 - DNA, 50 bp, synthetic construct
  source 1..50: mol_type = other DNA
aaatacttactaatcttactcaaatactctaaaaatccaaccaaatcctc

SEQ ID NO: 29954 - DNA, 50 bp, synthetic construct
  source 1..50: mol_type = other DNA
atacctaaccttaaatccacaaaacaaaatctacctatatattccraatc

SEQ ID NO: 29955 - DNA, 50 bp, synthetic construct
  source 1..50: mol_type = other DNA
acaaaatacctaaccttaaatccacaaaacaaaatctacctatatattcc

SEQ ID NO: 29956 - DNA, 50 bp, synthetic construct
  source 1..50: mol_type = other DNA
rcttaacttaacrtaacaataatcrcttaacttaacatttctaacttaac

SEQ ID NO: 29957 - DNA, 50 bp, synthetic construct
  source 1..50: mol_type = other DNA
ttaacttaacatttctaacttaacratcctcctttcrcaaattaaaaacc

SEQ ID NO: 29958 - DNA, 50 bp, synthetic construct
  source 1..50: mol_type = other DNA
raaatctcactcttaccactctacaccaactcactattaataaccacctc

SEQ ID NO: 29959 - DNA, 50 bp, synthetic construct
  source 1..50: mol_type = other DNA
caaaataatttctatttccctccctcctactttaaatttaccccatactc

SEQ ID NO: 29960 - DNA, 50 bp, synthetic construct
  source 1..50: mol_type = other DNA
atattttaaattattaattcacattaacattataatccataattataccc

SEQ ID NO: 29961 - DNA, 50 bp, synthetic construct
  source 1..50: mol_type = other DNA
tataaacaaaatacccaccractttcctttaaaaataacaaaaataaaac

SEQ ID NO: 29962 - DNA, 50 bp, synthetic construct
  source 1..50: mol_type = other DNA
actcatccttctctacracaaacacaaaaaatataaacaaaatacccacc

SEQ ID NO: 29963 - DNA, 50 bp, synthetic construct
  source 1..50: mol_type = other DNA
aaaaataaacatacccatccatcaacttatcctaaaaacaccccaataac

SEQ ID NO: 29964 - DNA, 50 bp, synthetic construct
  source 1..50: mol_type = other DNA
aaacatacccatccatcaacttatcctaaaaacaccccaataacraaaac

SEQ ID NO: 29965 - DNA, 50 bp, synthetic construct
  source 1..50: mol_type = other DNA
rcaaacaaataaacaccacacactaaatcaaaaccaaaaaacratcrccc

SEQ ID NO: 29966 - DNA, 50 bp, synthetic construct
  source 1..50: mol_type = other DNA
tttcrcaaacaaataaacaccacacactaaatcaaaaccaaaaaacratc

SEQ ID NO: 29967 - DNA, 50 bp, synthetic construct
  source 1..50: mol_type = other DNA
aatttttcrcaaacaaataaacaccacacactaaatcaaaaccaaaaaac

SEQ ID NO: 29968 - DNA, 50 bp, synthetic construct
  source 1..50: mol_type = other DNA
aaaaaatttatactaaatccttaaaactcacataaaccttaactactatc

SEQ ID NO: 29969 - DNA, 50 bp, synthetic construct
  source 1..50: mol_type = other DNA
ccttaactactatcrttattaaataaataaaccacttacaaactaaaacc

SEQ ID NO: 29970 - DNA, 50 bp, synthetic construct
  source 1..50: mol_type = other DNA
aaaaacctattcttaaaacctaaaccctataaaacctctaactctcraac

SEQ ID NO: 29971 - DNA, 50 bp, synthetic construct
  source 1..50: mol_type = other DNA
tacaaaatctaattaactctttaaaaaaaacccctacaatctaaaacctc

SEQ ID NO: 29972 - DNA, 50 bp, synthetic construct
  source 1..50: mol_type = other DNA
attaactctttaaaaaaaacccctacaatctaaaacctcrcraacaatac

SEQ ID NO: 29973 - DNA, 50 bp, synthetic construct
  source 1..50: mol_type = other DNA
aacaaaaactacacraaaccaaaataactaaaaacaaaaatactaaaacc

SEQ ID NO: 29974 - DNA, 50 bp, synthetic construct
  source 1..50: mol_type = other DNA
tactaaaaccraaaacacraaatctaactaaaaataacaataatcccacc

SEQ ID NO: 29975 - DNA, 50 bp, synthetic construct
  source 1..50: mol_type = other DNA
ccracaaaaaaccraaaaacaaataacaaaaaaccaacaacaaaacctcc

SEQ ID NO: 29976 - DNA, 50 bp, synthetic construct
  source 1..50: mol_type = other DNA
racaaaaaaccraaaaacaaataacaaaaaaccaacaacaaaacctccrc

SEQ ID NO: 29977 - DNA, 50 bp, synthetic construct
  source 1..50: mol_type = other DNA
tttaaatatatataataccctatttaaaaatcaatctctacctcactcac

SEQ ID NO: 29978 - DNA, 50 bp, synthetic construct
  source 1..50: mol_type = other DNA
acaaacattactttaaacaacacaaatactcrcaaaataactatatatcc

SEQ ID NO: 29979 - DNA, 50 bp, synthetic construct
  source 1..50: mol_type = other DNA
caaaactcacaatcttaccccacaactaaactaaaactaaacccaaaatc

SEQ ID NO: 29980 - DNA, 50 bp, synthetic construct
  source 1..50: mol_type = other DNA
tccccaaaaaattacttaattctaaacaaaaatttcccttattcacaacc

SEQ ID NO: 29981 - DNA, 50 bp, synthetic construct
  source 1..50: mol_type = other DNA
taaaacacatcctatcaattactcatttaaaaaacataatttattcrttc

SEQ ID NO: 29982 - DNA, 50 bp, synthetic construct
  source 1..50: mol_type = other DNA
atctcacrataacacaaaaaatcaacactaataactaaaaacrtactttc

SEQ ID NO: 29983 - DNA, 50 bp, synthetic construct
  source 1..50: mol_type = other DNA
caacaccrtacctactaacccaaatactctaaaatcctaaatcatctcac

SEQ ID NO: 29984 - DNA, 50 bp, synthetic construct
  source 1..50: mol_type = other DNA
tatcatcrtaaaataactcaaaatcctaaaacacttaaactaacaaacac

SEQ ID NO: 29985 - DNA, 50 bp, synthetic construct
  source 1..50: mol_type = other DNA
ctaattatcaacatccataataccaaaaatactttacctaaaaaaatatc

SEQ ID NO: 29986 - DNA, 50 bp, synthetic construct
  source 1..50: mol_type = other DNA
aaaaaaacaaaaatcaactaatccraacaaccrtaaaatttctaaacacc

SEQ ID NO: 29987 - DNA, 50 bp, synthetic construct
  source 1..50: mol_type = other DNA
acccatctaaatatccattaccaaataatatcratatccaaaaacttcac

SEQ ID NO: 29988 - DNA, 50 bp, synthetic construct
  source 1..50: mol_type = other DNA
aaatatccattaccaaataatatcratatccaaaaacttcacractaccc

SEQ ID NO: 29989 - DNA, 50 bp, synthetic construct
  source 1..50: mol_type = other DNA
atatatcaaatataatatcctcaaaaaaacaaaacttttacctaaacccc

SEQ ID NO: 29990 - DNA, 50 bp, synthetic construct
  source 1..50: mol_type = other DNA
taacataaaacctaattataacacactctcaataactatactactactcc

SEQ ID NO: 29991 - DNA, 50 bp, synthetic construct
  source 1..50: mol_type = other DNA
tactaaaaatataccacaaccaaactccataccaaatactttatattaac

SEQ ID NO: 29992 - DNA, 50 bp, synthetic construct
  source 1..50: mol_type = other DNA
ataaccataaaaaaaattcactaatcctaaaactactacaaacttccctc

SEQ ID NO: 29993 - DNA, 50 bp, synthetic construct
  source 1..50: mol_type = other DNA
taacaaatcccattttacaatcctaaaaaaacccaccaatttcatttcac

SEQ ID NO: 29994 - DNA, 50 bp, synthetic construct
  source 1..50: mol_type = other DNA
acaaatcccattttacaatcctaaaaaaacccaccaatttcatttcacrc

SEQ ID NO: 29995 - DNA, 50 bp, synthetic construct
  source 1..50: mol_type = other DNA
tacaaaacattcaataaacaaaaaactaccctcracctccaactacaacc

SEQ ID NO: 29996 - DNA, 50 bp, synthetic construct
  source 1..50: mol_type = other DNA
raacaacaatcaacacatacaaaacattcaataaacaaaaaactaccctc

SEQ ID NO: 29997 - DNA, 50 bp, synthetic construct
  source 1..50: mol_type = other DNA
raaaacaaccctctactcactaaatatcttacatatactaactactaccc

SEQ ID NO: 29998 - DNA, 50 bp, synthetic construct
  source 1..50: mol_type = other DNA
tataacaacaacactaaatactaacccaacaaacaatactaaacctaaac

SEQ ID NO: 29999 - DNA, 50 bp, synthetic construct
  source 1..50: mol_type = other DNA
aaaaccaataatcttcraacttctcctacaactaataaaaaaataacrtc

SEQ ID NO: 30000 - DNA, 50 bp, synthetic construct
  source 1..50: mol_type = other DNA
aaccaaaaaaaccaataatacttaaactacccraaaaaccaataatcttc

SEQ ID NO: 30001 - DNA, 50 bp, synthetic construct
  source 1..50: mol_type = other DNA
aaaaactaaaaaatctccraaactaacaatctacrccacraaaaaaaccc

SEQ ID NO: 30002 - DNA, 50 bp, synthetic construct
  source 1..50: mol_type = other DNA
rataactacttaacttaacrataatcrcttaacttaacrtaacaataatc

SEQ ID NO: 30003 - DNA, 50 bp, synthetic construct
  source 1..50: mol_type = other DNA
aattaacttaaccttacccrcraaactttacrataactacttaacttaac

SEQ ID NO: 30004 - DNA, 50 bp, synthetic construct
  source 1..50: mol_type = other DNA
ctaaaacttaaaaataattcaaacccaatatctacccttaaaaaacctcc

SEQ ID NO: 30005 - DNA, 50 bp, synthetic construct
  source 1..50: mol_type = other DNA
tctaaacttccatttcctcatctatcaaacraattaatcatactttcctc

SEQ ID NO: 30006 - DNA, 50 bp, synthetic construct
  source 1..50: mol_type = other DNA
cctttctacaaaacctaacrttaacaaaacactttcacacccataccttc

SEQ ID NO: 30007 - DNA, 50 bp, synthetic construct
  source 1..50: mol_type = other DNA
atattctattaccaaaccatttactaacatttcctacttttacaaatttc

SEQ ID NO: 30008 - DNA, 50 bp, synthetic construct
  source 1..50: mol_type = other DNA
ccatttactaacatttcctacttttacaaatttcratttaacattatacc

SEQ ID NO: 30009 - DNA, 50 bp, synthetic construct
  source 1..50: mol_type = other DNA
aaaataacaactacatataaaacaaaaatatattaacctactccaaactc

SEQ ID NO: 30010 - DNA, 50 bp, synthetic construct
  source 1..50: mol_type = other DNA
aaataaacccaatacctcaaataaaaatacaaaaatcacccrtcttctac

SEQ ID NO: 30011 - DNA, 50 bp, synthetic construct
  source 1..50: mol_type = other DNA
ccaaaacacaaaatcaattctataatttaacacttcttaataactaaacc

SEQ ID NO: 30012 - DNA, 50 bp, synthetic construct
  source 1..50: mol_type = other DNA
ctatcctatcacaatacaaaaaaaaaccatactaaactcaactaatatcc

SEQ ID NO: 30013 - DNA, 50 bp, synthetic construct
  source 1..50: mol_type = other DNA
aaaattacaatccttatatcctaaactacctttcaaattcacttaaaccc

SEQ ID NO: 30014 - DNA, 50 bp, synthetic construct
  source 1..50: mol_type = other DNA
aaaatctacctaatattatatcctactacaactaaactaccactcaaacc

SEQ ID NO: 30015 - DNA, 50 bp, synthetic construct
  source 1..50: mol_type = other DNA
aatcttacccaaaaccctctttaatcattacttaactactacctatattc

SEQ ID NO: 30016 - DNA, 50 bp, synthetic construct
  source 1..50: mol_type = other DNA
ctacaattacaataaaatcacaaattccrtaacrtcacaaataaacaaac

SEQ ID NO: 30017 - DNA, 50 bp, synthetic construct
  source 1..50: mol_type = other DNA
atcacraaatcaaaaattaataaccaatctaaccaacataataaaacccc

SEQ ID NO: 30018 - DNA, 50 bp, synthetic construct
  source 1..50: mol_type = other DNA
actattaaccctctactaccrtatatactcctataattctataccraatc

SEQ ID NO: 30019 - DNA, 50 bp, synthetic construct
  source 1..50: mol_type = other DNA
tcttactatttttccaatttttatttacacctcacaaaaaaaactaatcc

SEQ ID NO: 30020 - DNA, 50 bp, synthetic construct
  source 1..50: mol_type = other DNA
attattaactaaaatattatacaaaaaccccaaccacactacaaaaccac

SEQ ID NO: 30021 - DNA, 50 bp, synthetic construct
  source 1..50: mol_type = other DNA
actacattaaaaaactctttatctaaactaaaaccacatttcccaaaatc

SEQ ID NO: 30022 - DNA, 50 bp, synthetic construct
  source 1..50: mol_type = other DNA
ttcccaaaatcrtcaaattaaaaacatcacctaaaaattctaattaaatc

SEQ ID NO: 30023 - DNA, 50 bp, synthetic construct
  source 1..50: mol_type = other DNA
aacatcacctaaaaattctaattaaatcratctaaaaataccctaaaatc

SEQ ID NO: 30024 - DNA, 50 bp, synthetic construct
  source 1..50: mol_type = other DNA
acccractaaacttaatttttactaaactattttataaatcatctaacrc

SEQ ID NO: 30025 - DNA, 50 bp, synthetic construct
  source 1..50: mol_type = other DNA
attctaattaaatcratctaaaaataccctaaaatcracttctaaaacrc

SEQ ID NO: 30026 - DNA, 50 bp, synthetic construct
  source 1..50: mol_type = other DNA
aaacrcrccaaataatttataaaataactcaataaaaaccaaactcaacc

SEQ ID NO: 30027 - DNA, 50 bp, synthetic construct
  source 1..50: mol_type = other DNA
ttataaaataactcaataaaaaccaaactcaaccraacacaataactcac

SEQ ID NO: 30028 - DNA, 50 bp, synthetic construct
  source 1..50: mol_type = other DNA
tttaaaaacaaacaaaaattcaaataaattatcctcctacaattactaac

SEQ ID NO: 30029 - DNA, 50 bp, synthetic construct
  source 1..50: mol_type = other DNA
ttccaaaaaatattaccttctaaatccacctcaaccctactcaaaaaacc

SEQ ID NO: 30030 - DNA, 50 bp, synthetic construct
  source 1..50: mol_type = other DNA
accaataaacacttaaaaaaatattcaacatcactaatctttaaaaaaac

SEQ ID NO: 30031 - DNA, 50 bp, synthetic construct
  source 1..50: mol_type = other DNA
cctcccaacctaacaatccaaacaataactcacaacaatatataaatcac

SEQ ID NO: 30032 - DNA, 50 bp, synthetic construct
  source 1..50: mol_type = other DNA
aaattactacttaaactactaaattaaaaaactataaacctaaatctacc

SEQ ID NO: 30033 - DNA, 50 bp, synthetic construct
  source 1..50: mol_type = other DNA
ttaaaaaactataaacctaaatctaccrtaaactacttttataacccaac

SEQ ID NO: 30034 - DNA, 50 bp, synthetic construct
  source 1..50: mol_type = other DNA
tctcataaaccaaactcacaaaaataataatttaaattcataacacatac

SEQ ID NO: 30035 - DNA, 50 bp, synthetic construct
  source 1..50: mol_type = other DNA
crtaaatactataacccttcaatcacraatcaacctcataacttcctatc

SEQ ID NO: 30036 - DNA, 50 bp, synthetic construct
  source 1..50: mol_type = other DNA
caaaatcraaaataccraccaatattcttaatacaaattacctaaacttc

SEQ ID NO: 30037 - DNA, 50 bp, synthetic construct
  source 1..50: mol_type = other DNA
aattccaacctccaaaacaatctataccaatatttattttaaacaccacc

SEQ ID NO: 30038 - DNA, 50 bp, synthetic construct
  source 1..50: mol_type = other DNA
aaaaataaaactattacccaataaaccttctttctaccctccaaatccac

SEQ ID NO: 30039 - DNA, 50 bp, synthetic construct
  source 1..50: mol_type = other DNA
atctccccatctataaaaaataaacttattcaacacacttttaaactctc

SEQ ID NO: 30040 - DNA, 50 bp, synthetic construct
  source 1..50: mol_type = other DNA
ctccttatataaaatcctcctttatccttctccttaaactataactcrac

SEQ ID NO: 30041 - DNA, 50 bp, synthetic construct
  source 1..50: mol_type = other DNA
cttctccttatataaaatcctcctttatccttctccttaaactataactc

SEQ ID NO: 30042 - DNA, 50 bp, synthetic construct
  source 1..50: mol_type = other DNA
aaacaattaactttatatcaaccataatataaaaacctccttactcactc

SEQ ID NO: 30043 - DNA, 50 bp, synthetic construct
  source 1..50: mol_type = other DNA
aaaatttacaatcaaaaatttaataaacttctaaacatatctacrttccc

SEQ ID NO: 30044 - DNA, 50 bp, synthetic construct
  source 1..50: mol_type = other DNA
attaataataaaaattccattatctatatttaacaattataacctactac

SEQ ID NO: 30045 - DNA, 50 bp, synthetic construct
  source 1..50: mol_type = other DNA
caattataacctactacratatataaaaacttctttccattcattttccc

SEQ ID NO: 30046 - DNA, 50 bp, synthetic construct
  source 1..50: mol_type = other DNA
attatattcatataaaaaaacaattcacaaactatcttcctacccctccc

SEQ ID NO: 30047 - DNA, 50 bp, synthetic construct
  source 1..50: mol_type = other DNA
tataacttaacctcacctatacataaaaatttactcrtaactaaccraac

SEQ ID NO: 30048 - DNA, 50 bp, synthetic construct
  source 1..50: mol_type = other DNA
aaaacrttactaactctaataccttatctcraaaaaaccaaaaatactac

SEQ ID NO: 30049 - DNA, 50 bp, synthetic construct
  source 1..50: mol_type = other DNA
tttaatcccacaaaacaacraaaacrttactaactctaataccttatctc

SEQ ID NO: 30050 - DNA, 50 bp, synthetic construct
  source 1..50: mol_type = other DNA
aacacrcaacacttctaatcccttcraaataaaacaccaaaatcaataac

SEQ ID NO: 30051 - DNA, 50 bp, synthetic construct
  source 1..50: mol_type = other DNA
caacacttctaatcccttcraaataaaacaccaaaatcaataacrttccc

SEQ ID NO: 30052 - DNA, 50 bp, synthetic construct
  source 1..50: mol_type = other DNA
aataaaacaccaaaatcaataacrttcccrttattctataaaattaaaac

SEQ ID NO: 30053 - DNA, 50 bp, synthetic construct
  source 1..50: mol_type = other DNA
ctaaaatatatacctacctaactacrataaaattacccaaataacccrtc

SEQ ID NO: 30054 - DNA, 50 bp, synthetic construct
  source 1..50: mol_type = other DNA
acaaacaaacaatccttttaaactaactaactatacccccaaattttatc

SEQ ID NO: 30055 - DNA, 50 bp, synthetic construct
  source 1..50: mol_type = other DNA
cttttttccctatactaactaataacactcrtatccaaatatcctttacc

SEQ ID NO: 30056 - DNA, 50 bp, synthetic construct
  source 1..50: mol_type = other DNA
ctatataaaactaactaataacatcttcccrataaaaaacacctaaatac

SEQ ID NO: 30057 - DNA, 50 bp, synthetic construct
  source 1..50: mol_type = other DNA
atctcaaattcctctactatttttaaaaaccatatcaacccaactatccc

SEQ ID NO: 30058 - DNA, 50 bp, synthetic construct
  source 1..50: mol_type = other DNA
acatacacataaatacrcatatacttatctcaaacttaacctataaaacc

SEQ ID NO: 30059 - DNA, 50 bp, synthetic construct
  source 1..50: mol_type = other DNA
attttctataccrtctaccctctaaaaactattactaaaaaatatttacc

SEQ ID NO: 30060 - DNA, 50 bp, synthetic construct
  source 1..50: mol_type = other DNA
acaaaatacttcrataaacattttccaataataatctctaaaaaacaaac

SEQ ID NO: 30061 - DNA, 50 bp, synthetic construct
  source 1..50: mol_type = other DNA
caactctcctaacaaaaattaactaatatataacacatatcttaaaaaac

SEQ ID NO: 30062 - DNA, 50 bp, synthetic construct
  source 1..50: mol_type = other DNA
tctacattattattcatttaactaaaacccattaatatattatcatatcc

SEQ ID NO: 30063 - DNA, 50 bp, synthetic construct
  source 1..50: mol_type = other DNA
acaaaaaatacttttacacaaaaaacttccttccttatcccccattcaac

SEQ ID NO: 30064 - DNA, 50 bp, synthetic construct
  source 1..50: mol_type = other DNA
cttaatcraatacraaattctacccatctaacaacataatcrcaataacc

SEQ ID NO: 30065 - DNA, 50 bp, synthetic construct
  source 1..50: mol_type = other DNA
aaactatcccttaatcraatacraaattctacccatctaacaacataatc

SEQ ID NO: 30066 - DNA, 50 bp, synthetic construct
  source 1..50: mol_type = other DNA
tttaatttctttaacttaaaaaaacccaaaactatcccttaatcraatac

SEQ ID NO: 30067 - DNA, 50 bp, synthetic construct
  source 1..50: mol_type = other DNA
ataaactttaatttctttaacttaaaaaaacccaaaactatcccttaatc

SEQ ID NO: 30068 - DNA, 50 bp, synthetic construct
  source 1..50: mol_type = other DNA
acttaacattcctaaactcctcaatatcaaccaaaaataacaattacaac

SEQ ID NO: 30069 - DNA, 50 bp, synthetic construct
  source 1..50: mol_type = other DNA
rtcaccccacrttattttactacaaataaatccctatatatactaacctc

SEQ ID NO: 30070 - DNA, 50 bp, synthetic construct
  source 1..50: mol_type = other DNA
raaaccaacacacacaaaaacctatttacaataaaacaacrtaaaataac

SEQ ID NO: 30071 - DNA, 50 bp, synthetic construct
  source 1..50: mol_type = other DNA
actataataaataaaataaatctacccaactccttaaaaacaaaataaac

SEQ ID NO: 30072 - DNA, 50 bp, synthetic construct
  source 1..50: mol_type = other DNA
aattccatctaaatttctctaaatcatacttaatattaatctaattaatc

SEQ ID NO: 30073 - DNA, 50 bp, synthetic construct
  source 1..50: mol_type = other DNA
acccrctaccaattaacrataaaacraataatcttcaaaatactattaac

SEQ ID NO: 30074 - DNA, 50 bp, synthetic construct
  source 1..50: mol_type = other DNA
acttattaaacaattacrttaataatactctaaaaattatccrtcctatc

SEQ ID NO: 30075 - DNA, 50 bp, synthetic construct
  source 1..50: mol_type = other DNA
ttacrttaataatactctaaaaattatccrtcctatcrccaattaacaac

SEQ ID NO: 30076 - DNA, 50 bp, synthetic construct
  source 1..50: mol_type = other DNA
ccrtcctatcrccaattaacaacraattatatctttttctatatatattc

SEQ ID NO: 30077 - DNA, 50 bp, synthetic construct
  source 1..50: mol_type = other DNA
aaacaaaatatactcacrctaactacaataacataaaaaaatacttacac

SEQ ID NO: 30078 - DNA, 50 bp, synthetic construct
  source 1..50: mol_type = other DNA
cacrctaactacaataacataaaaaaatacttacacrcatatatactaac

SEQ ID NO: 30079 - DNA, 50 bp, synthetic construct
  source 1..50: mol_type = other DNA
atacacctatacacacrtataaacaaaacatttaaaaaataaccataaac

SEQ ID NO: 30080 - DNA, 50 bp, synthetic construct
  source 1..50: mol_type = other DNA
aaataaccataaacraatacctacaaacaaaacaacataaaacaaccttc

SEQ ID NO: 30081 - DNA, 50 bp, synthetic construct
  source 1..50: mol_type = other DNA
actaatctctcataaaactccaacctaaccaaaatacttacaatactacc

SEQ ID NO: 30082 - DNA, 50 bp, synthetic construct
  source 1..50: mol_type = other DNA
ttcaaatctaacaattcctctaaaactaaaatctcctataaaaacaaatc

SEQ ID NO: 30083 - DNA, 50 bp, synthetic construct
  source 1..50: mol_type = other DNA
actaaatacaaaaacaaaacccaaacctctcacattactttaaaaaaatc

SEQ ID NO: 30084 - DNA, 50 bp, synthetic construct
  source 1..50: mol_type = other DNA
caaaacctaaaaatattctaaaaaatatacctaccccattacttttcaac

SEQ ID NO: 30085 - DNA, 50 bp, synthetic construct
  source 1..50: mol_type = other DNA
aaaacrctcccattacaaaaatctaataacacacaattaatactacctcc

SEQ ID NO: 30086 - DNA, 50 bp, synthetic construct
  source 1..50: mol_type = other DNA
ttacctctttactctaaattcccatcaaatctaaattactaaaacccaac

SEQ ID NO: 30087 - DNA, 50 bp, synthetic construct
  source 1..50: mol_type = other DNA
caacrcccacaaaaacatcttcccctctaaaaaatttatcctataaaccc

SEQ ID NO: 30088 - DNA, 50 bp, synthetic construct
  source 1..50: mol_type = other DNA
cacaaaaacatcttcccctctaaaaaatttatcctataaacccraactcc

SEQ ID NO: 30089 - DNA, 50 bp, synthetic construct
  source 1..50: mol_type = other DNA
aactaaaataaacctatatatctatcrttcaaaacaaaacctaaccaaac

SEQ ID NO: 30090 - DNA, 50 bp, synthetic construct
  source 1..50: mol_type = other DNA
ctaaaataaacctatatatctatcrttcaaaacaaaacctaaccaaacrc

SEQ ID NO: 30091 - DNA, 50 bp, synthetic construct
  source 1..50: mol_type = other DNA
cctatatatctatcrttcaaaacaaaacctaaccaaacrcrataactcac

SEQ ID NO: 30092 - DNA, 50 bp, synthetic construct
  source 1..50: mol_type = other DNA
tactcaaaataaaatatccatataacrataattaaaataactctaattcc

SEQ ID NO: 30093 - DNA, 50 bp, synthetic construct
  source 1..50: mol_type = other DNA
tctaatcttaaatcaattacttctacraaaccaaaatcatctcaatcacc

SEQ ID NO: 30094 - DNA, 50 bp, synthetic construct
  source 1..50: mol_type = other DNA
tcccctaaaataataaaccaacaaaaaatactctaattataatatttaac

SEQ ID NO: 30095 - DNA, 50 bp, synthetic construct
  source 1..50: mol_type = other DNA
attccctaaaaacttcactattaaaacaaacttaaatcataataattaac

SEQ ID NO: 30096 - DNA, 50 bp, synthetic construct
  source 1..50: mol_type = other DNA
craacaattaacaaacaacataaaaacaaaacacctacccracaactccc

SEQ ID NO: 30097 - DNA, 50 bp, synthetic construct
  source 1..50: mol_type = other DNA
ctatcacaccccractaataaaaataaacctaacttaaatttccccaaac

SEQ ID NO: 30098 - DNA, 50 bp, synthetic construct
  source 1..50: mol_type = other DNA
ctaacttaaatttccccaaacraaaaactactctcatctaaaactaaacc

SEQ ID NO: 30099 - DNA, 50 bp, synthetic construct
  source 1..50: mol_type = other DNA
caaatcraatacaaaaacraaaactatactcttcctactaaacaaaaccc

SEQ ID NO: 30100 - DNA, 50 bp, synthetic construct
  source 1..50: mol_type = other DNA
raatacaaaaacraaaactatactcttcctactaaacaaaacccraaccc

SEQ ID NO: 30101 - DNA, 50 bp, synthetic construct
  source 1..50: mol_type = other DNA
aatatctctacttttaaaaccaacaacaacttcttaacatattcaacrtc

SEQ ID NO: 30102 - DNA, 50 bp, synthetic construct
  source 1..50: mol_type = other DNA
acaaatatctctacttttaaaaccaacaacaacttcttaacatattcaac

SEQ ID NO: 30103 - DNA, 50 bp, synthetic construct
  source 1..50: mol_type = other DNA
rtaaaattatactacctatataaacaaacattaaaataccaacctatcrc

SEQ ID NO: 30104 - DNA, 50 bp, synthetic construct
  source 1..50: mol_type = other DNA
acrtaaaattatactacctatataaacaaacattaaaataccaacctatc

SEQ ID NO: 30105 - DNA, 50 bp, synthetic construct
  source 1..50: mol_type = other DNA
tttcaattttataatttattattactactataaaaccataccatataaac

SEQ ID NO: 30106 - DNA, 50 bp, synthetic construct
  source 1..50: mol_type = other DNA
cactccttaaaaaataaaatacctaataatttactactaaatcactaacc

SEQ ID NO: 30107 - DNA, 50 bp, synthetic construct
  source 1..50: mol_type = other DNA
cctaaccaatataataaaaccctatttctactaaaaacacaaaattaacc

SEQ ID NO: 30108 - DNA, 50 bp, synthetic construct
  source 1..50: mol_type = other DNA
caccatattaatcaaactaatctctaactcctaatctcaaataatcaccc

SEQ ID NO: 30109 - DNA, 50 bp, synthetic construct
  source 1..50: mol_type = other DNA
tttttaaacaatttcctttttaaaacataaaatctacatcttaactaaac

SEQ ID NO: 30110 - DNA, 50 bp, synthetic construct
  source 1..50: mol_type = other DNA
aaatactaatcactaaaaacrccttttccacaacccttaaaaaatattcc

SEQ ID NO: 30111 - DNA, 50 bp, synthetic construct
  source 1..50: mol_type = other DNA
atcactaaaaacrccttttccacaacccttaaaaaatattccracctaac

SEQ ID NO: 30112 - DNA, 50 bp, synthetic construct
  source 1..50: mol_type = other DNA
cattctttccttactttatttatatatttatccaattctttattcaacac

SEQ ID NO: 30113 - DNA, 50 bp, synthetic construct
  source 1..50: mol_type = other DNA
tttaaaaaatacttaaaccccaaaaaattctaaaaccraactcttaaacc

SEQ ID NO: 30114 - DNA, 50 bp, synthetic construct
  source 1..50: mol_type = other DNA
ctttacaaaaaacataaactcattcttttttataactacataatatatac

SEQ ID NO: 30115 - DNA, 50 bp, synthetic construct
  source 1..50: mol_type = other DNA
tctatttctatattaatttactaaaaatcataacttccaacttcatccac

SEQ ID NO: 30116 - DNA, 50 bp, synthetic construct
  source 1..50: mol_type = other DNA
taccataataatttactacacccatcaacctatcatctaaattttaaacc

SEQ ID NO: 30117 - DNA, 50 bp, synthetic construct
  source 1..50: mol_type = other DNA
aatacaacaaactaccataacacatatatacctatataacaaacctacac

SEQ ID NO: 30118 - DNA, 50 bp, synthetic construct
  source 1..50: mol_type = other DNA
ttctcaaatcratacttcattttaatcacacatttctatcctacaaaacc

SEQ ID NO: 30119 - DNA, 50 bp, synthetic construct
  source 1..50: mol_type = other DNA
atcaacattaatctaaataatatataacatactcctatccaaaaattccc

SEQ ID NO: 30120 - DNA, 50 bp, synthetic construct
  source 1..50: mol_type = other DNA
rcraataataaacaaaaaacraacaaaccccaataaaaaattacctactc

SEQ ID NO: 30121 - DNA, 50 bp, synthetic construct
  source 1..50: mol_type = other DNA
rcttcatttaaccccrtaaaatctaaatattatcactccrttttataaac

SEQ ID NO: 30122 - DNA, 50 bp, synthetic construct
  source 1..50: mol_type = other DNA
acccctttaacrcttcatttaaccccrtaaaatctaaatattatcactcc

SEQ ID NO: 30123 - DNA, 50 bp, synthetic construct
  source 1..50: mol_type = other DNA
tcactctatttcctcrtttacaaaacraaataataatatccaaatctcac

SEQ ID NO: 30124 - DNA, 50 bp, synthetic construct
  source 1..50: mol_type = other DNA
catcrtaataacatttacaaaacrctttcacaaatattaacccctttaac

SEQ ID NO: 30125 - DNA, 50 bp, synthetic construct
  source 1..50: mol_type = other DNA
cttaactccaactaaaaactaatactacatcrtaataacatttacaaaac

SEQ ID NO: 30126 - DNA, 50 bp, synthetic construct
  source 1..50: mol_type = other DNA
aaaaactactctaatctcacttaactccaactaaaaactaatactacatc

SEQ ID NO: 30127 - DNA, 50 bp, synthetic construct
  source 1..50: mol_type = other DNA
cttataaaacrataataaacaactaacraattaacacacactaaatatcc

SEQ ID NO: 30128 - DNA, 50 bp, synthetic construct
  source 1..50: mol_type = other DNA
ttatactttctatccaacaaaacctccraacatttaatatatattaactc

SEQ ID NO: 30129 - DNA, 50 bp, synthetic construct
  source 1..50: mol_type = other DNA
raaatttactcttcrcctccrtttttacatctataaaacraaataataac

SEQ ID NO: 30130 - DNA, 50 bp, synthetic construct
  source 1..50: mol_type = other DNA
cctattcttttaaaattactaaaaatacccraaatttactcttcrcctcc

SEQ ID NO: 30131 - DNA, 50 bp, synthetic construct
  source 1..50: mol_type = other DNA
ttaatccctattcttttaaaattactaaaaatacccraaatttactcttc

SEQ ID NO: 30132 - DNA, 50 bp, synthetic construct
  source 1..50: mol_type = other DNA
ctaaattaaatctcttaatccctattcttttaaaattactaaaaataccc

SEQ ID NO: 30133 - DNA, 50 bp, synthetic construct
  source 1..50: mol_type = other DNA
aaaattcctaatccctaaaaccactcaaaaatataataaaatattaaacc

SEQ ID NO: 30134 - DNA, 50 bp, synthetic construct
  source 1..50: mol_type = other DNA
taactttataacaaaactaaatctcaaacataaaactaccractaacctc

SEQ ID NO: 30135 - DNA, 50 bp, synthetic construct
  source 1..50: mol_type = other DNA
caatattacttaactttataacaaaactaaatctcaaacataaaactacc

SEQ ID NO: 30136 - DNA, 50 bp, synthetic construct
  source 1..50: mol_type = other DNA
actaacaataaccaaatcrcaactcaaaaaaataaaacttccaaacacac

SEQ ID NO: 30137 - DNA, 50 bp, synthetic construct
  source 1..50: mol_type = other DNA
ccaaaactaaaaacctttataaatccacaacaactaacaataaccaaatc

SEQ ID NO: 30138 - DNA, 50 bp, synthetic construct
  source 1..50: mol_type = other DNA
ctaataaaattaaaactttcttttaaacctcttcctcaaaaataactacc

SEQ ID NO: 30139 - DNA, 50 bp, synthetic construct
  source 1..50: mol_type = other DNA
ctttcttttaaacctcttcctcaaaaataactaccraatacatcttaatc

SEQ ID NO: 30140 - DNA, 50 bp, synthetic construct
  source 1..50: mol_type = other DNA
aaaccaaatctttataaacaaaacaaatcaactttaaaataattaatttc

SEQ ID NO: 30141 - DNA, 50 bp, synthetic construct
  source 1..50: mol_type = other DNA
taaaattatttaaaaaaaataatttaccccttaccctaaaaaataacacc

SEQ ID NO: 30142 - DNA, 50 bp, synthetic construct
  source 1..50: mol_type = other DNA
cttcttcctctatattcaaacacaacacctttaacataataaaaatcctc

SEQ ID NO: 30143 - DNA, 50 bp, synthetic construct
  source 1..50: mol_type = other DNA
ctctctctaaatatcactatttacctatcaacttcataaaatcaaaaacc

SEQ ID NO: 30144 - DNA, 50 bp, synthetic construct
  source 1..50: mol_type = other DNA
caaaaccatcacaataaactacattactacataatataacacataaattc

SEQ ID NO: 30145 - DNA, 50 bp, synthetic construct
  source 1..50: mol_type = other DNA
cctaacctaataaattcacaataattcaatacttactacatactaaaaac

SEQ ID NO: 30146 - DNA, 50 bp, synthetic construct
  source 1..50: mol_type = other DNA
acttactacatactaaaaacrattactaaatactttacatatattaactc

SEQ ID NO: 30147 - DNA, 50 bp, synthetic construct
  source 1..50: mol_type = other DNA
aataactaacaaatcaaccactctatacctcattttcctcatctataaac

SEQ ID NO: 30148 - DNA, 50 bp, synthetic construct
  source 1..50: mol_type = other DNA
acctaaaactcaaattctattctcctaactccaaacccaatactttcacc

SEQ ID NO: 30149 - DNA, 50 bp, synthetic construct
  source 1..50: mol_type = other DNA
ctcaaattctattctcctaactccaaacccaatactttcaccratataac

SEQ ID NO: 30150 - DNA, 50 bp, synthetic construct
  source 1..50: mol_type = other DNA
accratataacrtacttccccttaacttcrtaatatatcttaaaatcaac

SEQ ID NO: 30151 - DNA, 50 bp, synthetic construct
  source 1..50: mol_type = other DNA
atttatcccctttaaaacttacctaaatcracaacctaactataaacccc

SEQ ID NO: 30152 - DNA, 50 bp, synthetic construct
  source 1..50: mol_type = other DNA
crttcttaaacrtaaaatcatatttatcccctttaaaacttacctaaatc

SEQ ID NO: 30153 - DNA, 50 bp, synthetic construct
  source 1..50: mol_type = other DNA
cctaatctaaattttaacaaatatatcaccctactctatcrttcttaaac

SEQ ID NO: 30154 - DNA, 50 bp, synthetic construct
  source 1..50: mol_type = other DNA
accacaaaatcctaatctaaattttaacaaatatatcaccctactctatc

SEQ ID NO: 30155 - DNA, 50 bp, synthetic construct
  source 1..50: mol_type = other DNA
ccraaaaacaaaccccataccctaccactataatatcacaaaaaaaaaac

SEQ ID NO: 30156 - DNA, 50 bp, synthetic construct
  source 1..50: mol_type = other DNA
crccctacaaatcaaatcaattccctttatcttactcactaaaatcacac

SEQ ID NO: 30157 - DNA, 50 bp, synthetic construct
  source 1..50: mol_type = other DNA
acttctcccaaaccaatcratatctttatcttttataacrtcacaaaccc

SEQ ID NO: 30158 - DNA, 50 bp, synthetic construct
  source 1..50: mol_type = other DNA
ttacttaaccctaaaaaataaaaactacaataaaccrtaataacaccacc

SEQ ID NO: 30159 - DNA, 50 bp, synthetic construct
  source 1..50: mol_type = other DNA
aatttcrccatattacaaatataaacctataattataaaatctaattctc

SEQ ID NO: 30160 - DNA, 50 bp, synthetic construct
  source 1..50: mol_type = other DNA
ctaaacraaaatcaaaccctataattacaaactcacacctataacataac

SEQ ID NO: 30161 - DNA, 50 bp, synthetic construct
  source 1..50: mol_type = other DNA
aaatcaaaccctataattacaaactcacacctataacataacraaacccc

SEQ ID NO: 30162 - DNA, 50 bp, synthetic construct
  source 1..50: mol_type = other DNA
aaaatcttccraaaaactcctatacctaatcaattttccrcaaaaaaaac

SEQ ID NO: 30163 - DNA, 50 bp, synthetic construct
  source 1..50: mol_type = other DNA
atcctatctaactttaaaacttctaatatttaatacattttaacttcaac

SEQ ID NO: 30164 - DNA, 50 bp, synthetic construct
  source 1..50: mol_type = other DNA
aaaaatataactcaataataaaacatttaactacaaatcaaaaaatcccc

SEQ ID NO: 30165 - DNA, 50 bp, synthetic construct
  source 1..50: mol_type = other DNA
raaaatataactcaataataaaacatttaactacaaatcaaaaaatcccc

SEQ ID NO: 30166 - DNA, 50 bp, synthetic construct
  source 1..50: mol_type = other DNA
tcaataataaaacatttaactacaaatcaaaaaatccccrattcaaatcc

SEQ ID NO: 30167 - DNA, 50 bp, synthetic construct
  source 1..50: mol_type = other DNA
acctaaaaaaataacatacttccctttaactaacaaaaaatacctaaaac

SEQ ID NO: 30168 - DNA, 50 bp, synthetic construct
  source 1..50: mol_type = other DNA
aaaacccraaataattcacaaaactaaaatatcractcttcaacctctac

SEQ ID NO: 30169 - DNA, 50 bp, synthetic construct
  source 1..50: mol_type = other DNA
aaataactacaactaaaaataactacctatctaattctatttaaaaatcc

SEQ ID NO: 30170 - DNA, 50 bp, synthetic construct
  source 1..50: mol_type = other DNA
aataaacaactacctccaactacaactacttactaccctcaaataaccac

SEQ ID NO: 30171 - DNA, 50 bp, synthetic construct
  source 1..50: mol_type = other DNA
tctaaactccaccctcaaatttctaattcattaaatctaaaataaaaccc

SEQ ID NO: 30172 - DNA, 50 bp, synthetic construct
  source 1..50: mol_type = other DNA
ctaaatatcratttttcctaaactatttacttttactcctactaacaaac

SEQ ID NO: 30173 - DNA, 50 bp, synthetic construct
  source 1..50: mol_type = other DNA
raataccccctctttaaccttttcraaatactatttttatcctaaatatc

SEQ ID NO: 30174 - DNA, 50 bp, synthetic construct
  source 1..50: mol_type = other DNA
aaaacaaacaacttaaaaaaaatcracacccaaaacaaaaacaatatctc

SEQ ID NO: 30175 - DNA, 50 bp, synthetic construct
  source 1..50: mol_type = other DNA
ccaaataaataattcttctaaaaattatattttttccatctcttataaac

SEQ ID NO: 30176 - DNA, 50 bp, synthetic construct
  source 1..50: mol_type = other DNA
taactcaacctatatatatacccaaaataaaatacaatacraataaaaac

SEQ ID NO: 30177 - DNA, 50 bp, synthetic construct
  source 1..50: mol_type = other DNA
ccraaattacctcrttttattaatctccraaaatcctctaaaaaattccc

SEQ ID NO: 30178 - DNA, 50 bp, synthetic construct
  source 1..50: mol_type = other DNA
acacccctattccataaaaattaactctaataacaacrtaataacrtaac

SEQ ID NO: 30179 - DNA, 50 bp, synthetic construct
  source 1..50: mol_type = other DNA
aaaccacacccctattccataaaaattaactctaataacaacrtaataac

SEQ ID NO: 30180 - DNA, 50 bp, synthetic construct
  source 1..50: mol_type = other DNA
aacaatttaaaacacttaacaaacctaaaactaaatttaacaaaaccccc

SEQ ID NO: 30181 - DNA, 50 bp, synthetic construct
  source 1..50: mol_type = other DNA
acaataaaaactaaaattacctatacratacaaaatttaaataccaaacc

SEQ ID NO: 30182 - DNA, 50 bp, synthetic construct
  source 1..50: mol_type = other DNA
aactaaaattacctatacratacaaaatttaaataccaaaccraaaaacc

SEQ ID NO: 30183 - DNA, 50 bp, synthetic construct
  source 1..50: mol_type = other DNA
caaactaacaaacaaaaaaaccaatcactaaaactcttccctaaattccc

SEQ ID NO: 30184 - DNA, 50 bp, synthetic construct
  source 1..50: mol_type = other DNA
aactccaaacaaataacaaataacacaaaaaaaaatacctaaacaatacc

SEQ ID NO: 30185 - DNA, 50 bp, synthetic construct
  source 1..50: mol_type = other DNA
crcccaacctccccattacctaacraacaaaactattaaatataatatcc

SEQ ID NO: 30186 - DNA, 50 bp, synthetic construct
  source 1..50: mol_type = other DNA
acraacaaaactattaaatataatatccraaaacrtactcccatctaacc

SEQ ID NO: 30187 - DNA, 50 bp, synthetic construct
  source 1..50: mol_type = other DNA
acacaaccaaaaataaaaaccaatacaaaaaaaccccaaaaaacccacac

SEQ ID NO: 30188 - DNA, 50 bp, synthetic construct
  source 1..50: mol_type = other DNA
cccaacatcttaattaactctactacctaataaacctccaacttctccrc

SEQ ID NO: 30189 - DNA, 50 bp, synthetic construct
  source 1..50: mol_type = other DNA
tacccaacatcttaattaactctactacctaataaacctccaacttctcc

SEQ ID NO: 30190 - DNA, 50 bp, synthetic construct
  source 1..50: mol_type = other DNA
ttaaaatctaaccaaaccttcttcttaccacaacraaaaacactaaaaac

SEQ ID NO: 30191 - DNA, 50 bp, synthetic construct
  source 1..50: mol_type = other DNA
tatatctaatatactcaaacttcaaaaaaaactcrcctctaatatcctcc

SEQ ID NO: 30192 - DNA, 50 bp, synthetic construct
  source 1..50: mol_type = other DNA
rtaaatacctaaaatctatctcttcaccctacttccttcttttctcctac

SEQ ID NO: 30193 - DNA, 50 bp, synthetic construct
  source 1..50: mol_type = other DNA
raaaaaactacttaaatccaaaaatttaaaactaacctaaacaacataac

SEQ ID NO: 30194 - DNA, 50 bp, synthetic construct
  source 1..50: mol_type = other DNA
aataaactaaaaataataaataccactctacccctcaaaataaaactcac

SEQ ID NO: 30195 - DNA, 50 bp, synthetic construct
  source 1..50: mol_type = other DNA
aacatcacacracttaaaactacaaaacatccraacctcataaaactaac

SEQ ID NO: 30196 - DNA, 50 bp, synthetic construct
  source 1..50: mol_type = other DNA
caactaaaaacactaaataacatcacacracttaaaactacaaaacatcc

SEQ ID NO: 30197 - DNA, 50 bp, synthetic construct
  source 1..50: mol_type = other DNA
aaaaaaatatacccaccttcaacaactaaaaacactaaataacatcacac

SEQ ID NO: 30198 - DNA, 50 bp, synthetic construct
  source 1..50: mol_type = other DNA
cattaacttcttacccaaaaaaacaatcatacccaacctttaccacttcc

SEQ ID NO: 30199 - DNA, 50 bp, synthetic construct
  source 1..50: mol_type = other DNA
tataactatttctctaaacaaaaaaccaatatcatcacaataatatcatc

SEQ ID NO: 30200 - DNA, 50 bp, synthetic construct
  source 1..50: mol_type = other DNA
ctatttctctaaacaaaaaaccaatatcatcacaataatatcatcrtcac

SEQ ID NO: 30201 - DNA, 50 bp, synthetic construct
  source 1..50: mol_type = other DNA
aattcttacccaccacraaactattataaaaatccaattaaataacraac

SEQ ID NO: 30202 - DNA, 50 bp, synthetic construct
  source 1..50: mol_type = other DNA
cttcaattcttacccaccacraaactattataaaaatccaattaaataac

SEQ ID NO: 30203 - DNA, 50 bp, synthetic construct
  source 1..50: mol_type = other DNA
aaaaaacacttaacttctctatacctatttcttcaattcttacccaccac

SEQ ID NO: 30204 - DNA, 50 bp, synthetic construct
  source 1..50: mol_type = other DNA
atttctctaactatacaactacaaaatcactaaacaaataatctcaaatc

SEQ ID NO: 30205 - DNA, 50 bp, synthetic construct
  source 1..50: mol_type = other DNA
aatacatatcttaactaaataactatctttatttcttacttctataatac

SEQ ID NO: 30206 - DNA, 50 bp, synthetic construct
  source 1..50: mol_type = other DNA
ccaaaaaactaaaccttaaacaaaaaatcaaactaccttttaaacatttc

SEQ ID NO: 30207 - DNA, 50 bp, synthetic construct
  source 1..50: mol_type = other DNA
aactaaattaatacacctaaacaattaaataattcctcctcaacccctcc

SEQ ID NO: 30208 - DNA, 50 bp, synthetic construct
  source 1..50: mol_type = other DNA
rccaatcaaaacrctatttaataaaaacttcracctaacrtcactttaac

SEQ ID NO: 30209 - DNA, 50 bp, synthetic construct
  source 1..50: mol_type = other DNA
ttctatacaaaaaacccraaaatctaataaaatatttccatcraaaaaac

SEQ ID NO: 30210 - DNA, 50 bp, synthetic construct
  source 1..50: mol_type = other DNA
aaaacataatataatataataacacaaatcaacttctatacaaaaaaccc

SEQ ID NO: 30211 - DNA, 50 bp, synthetic construct
  source 1..50: mol_type = other DNA
taaatataaaaacctaatcatttcattaataccaaaataatctccaatac

SEQ ID NO: 30212 - DNA, 50 bp, synthetic construct
  source 1..50: mol_type = other DNA
aacraaacaaataaatacaaaatcaacttacatctcrttccaaaaaaaac

SEQ ID NO: 30213 - DNA, 50 bp, synthetic construct
  source 1..50: mol_type = other DNA
tcctttaaaacraaatctcrctctataacccatcctaaaatattaataac

SEQ ID NO: 30214 - DNA, 50 bp, synthetic construct
  source 1..50: mol_type = other DNA
aaactcratttattccrtttcaataaaactttactcaaacraaaaactcc

SEQ ID NO: 30215 - DNA, 50 bp, synthetic construct
  source 1..50: mol_type = other DNA
attccrtttcaataaaactttactcaaacraaaaactccraaaactcatc

SEQ ID NO: 30216 - DNA, 50 bp, synthetic construct
  source 1..50: mol_type = other DNA
crcttatacttcrataccaaacrataacrctctctactattaaaactacc

SEQ ID NO: 30217 - DNA, 50 bp, synthetic construct
  source 1..50: mol_type = other DNA
taaaactttacaaccrtcatcraaaaacracaactctaacaacaaaaaac

SEQ ID NO: 30218 - DNA, 50 bp, synthetic construct
  source 1..50: mol_type = other DNA
catatctttaaaatatttaaacttataccrcttatacttcrataccaaac

SEQ ID NO: 30219 - DNA, 50 bp, synthetic construct
  source 1..50: mol_type = other DNA
tcaccaaccccatatctttaaaatatttaaacttataccrcttatacttc

SEQ ID NO: 30220 - DNA, 50 bp, synthetic construct
  source 1..50: mol_type = other DNA
aacctttaataaaatataataatatcaactctaattccracaccttctcc

SEQ ID NO: 30221 - DNA, 50 bp, synthetic construct
  source 1..50: mol_type = other DNA
aactattaaacaaataactcacctaaaaaataaactccractcaaaaacc

SEQ ID NO: 30222 - DNA, 50 bp, synthetic construct
  source 1..50: mol_type = other DNA
aaacactacraacttccaaacaatattaacacrctaaataccaattcctc

SEQ ID NO: 30223 - DNA, 50 bp, synthetic construct
  source 1..50: mol_type = other DNA
aatattctaatcaataataaacactacraacttccaaacaatattaacac

SEQ ID NO: 30224 - DNA, 50 bp, synthetic construct
  source 1..50: mol_type = other DNA
ctaaaataactaaccaacaacaaaatattctaatcaataataaacactac

SEQ ID NO: 30225 - DNA, 50 bp, synthetic construct
  source 1..50: mol_type = other DNA
aatactcaaaataccccatacatacttactacttaactacatccaaaaac

SEQ ID NO: 30226 - DNA, 50 bp, synthetic construct
  source 1..50: mol_type = other DNA
cccttttaaaacaaaaatccccccraataactcaacttctaataaatccc

SEQ ID NO: 30227 - DNA, 50 bp, synthetic construct
  source 1..50: mol_type = other DNA
ctaaccaaaccacaaacttctttctatacattattcttcaactaccctac

SEQ ID NO: 30228 - DNA, 50 bp, synthetic construct
  source 1..50: mol_type = other DNA
aaaccacataaaaaaatcctttacttcaaaccccaaaccacctaaatccc

SEQ ID NO: 30229 - DNA, 50 bp, synthetic construct
  source 1..50: mol_type = other DNA
aaacaaaattaattaaacttctcccctactcaatcaatttcctaaaaccc

SEQ ID NO: 30230 - DNA, 50 bp, synthetic construct
  source 1..50: mol_type = other DNA
aaaaaaacccaattaaccttattctcaaaacaaaataaaaatcaaacctc

SEQ ID NO: 30231 - DNA, 50 bp, synthetic construct
  source 1..50: mol_type = other DNA
aacacataccccaaatcctaacctacaaaaatctaatctacactcataac

SEQ ID NO: 30232 - DNA, 50 bp, synthetic construct
  source 1..50: mol_type = other DNA
aacactaaacraaaatcaacataccacaataaacaactcctaaccttaac

SEQ ID NO: 30233 - DNA, 50 bp, synthetic construct
  source 1..50: mol_type = other DNA
atatataaacrtatacatacatattttcctaaaactctatttatattaac

SEQ ID NO: 30234 - DNA, 50 bp, synthetic construct
  source 1..50: mol_type = other DNA
aaaactaaccctataaataaaatatccctatctatttaatctatttatcc

SEQ ID NO: 30235 - DNA, 50 bp, synthetic construct
  source 1..50: mol_type = other DNA
taaacctctctctctccaaaaatatttatatatatctctaaaacraaaac

SEQ ID NO: 30236 - DNA, 50 bp, synthetic construct
  source 1..50: mol_type = other DNA
caaatataaacctctctctctccaaaaatatttatatatatctctaaaac

SEQ ID NO: 30237 - DNA, 50 bp, synthetic construct
  source 1..50: mol_type = other DNA
aaaacaaaaccracccaaaattaaaataaatttaaaaactacctatacac

SEQ ID NO: 30238 - DNA, 50 bp, synthetic construct
  source 1..50: mol_type = other DNA
atctacaatacatcataacaaaacacattccccttctccctcacaaaaac

SEQ ID NO: 30239 - DNA, 50 bp, synthetic construct
  source 1..50: mol_type = other DNA
caacccctcaaactaaaacttaatactatacccctctctctaaaaccctc

SEQ ID NO: 30240 - DNA, 50 bp, synthetic construct
  source 1..50: mol_type = other DNA
actaaaaaattaaacaataaaatcaaaaccctaacccttaattaaccacc

SEQ ID NO: 30241 - DNA, 50 bp, synthetic construct
  source 1..50: mol_type = other DNA
ccaaatatcctccaccaacctaactcccaaactacaaaattaaacattcc

SEQ ID NO: 30242 - DNA, 50 bp, synthetic construct
  source 1..50: mol_type = other DNA
cctaaaataaaaacccaccaaaataaacaaactacccaaaaaactaaccc

SEQ ID NO: 30243 - DNA, 50 bp, synthetic construct
  source 1..50: mol_type = other DNA
acccaccaaaataaacaaactacccaaaaaactaacccraaacttaaaac

SEQ ID NO: 30244 - DNA, 50 bp, synthetic construct
  source 1..50: mol_type = other DNA
aaaaacaaaaaatacracraacatcaaaaataacccttcrcttctcaaac

SEQ ID NO: 30245 - DNA, 50 bp, synthetic construct
  source 1..50: mol_type = other DNA
tccctaaaaaaaataccaacaccaacrcccacaaactcttaaactcattc

SEQ ID NO: 30246 - DNA, 50 bp, synthetic construct
  source 1..50: mol_type = other DNA
aaacctttactataaacacaacaatccctaaaaaaaataccaacaccaac

SEQ ID NO: 30247 - DNA, 50 bp, synthetic construct
  source 1..50: mol_type = other DNA
caaaacttaacaccccraaaacctaactaactatacaacaattctacccc

SEQ ID NO: 30248 - DNA, 50 bp, synthetic construct
  source 1..50: mol_type = other DNA
aaaaaaaaatacaaacraaacaaaactactacacaaccaatcaaattctc

SEQ ID NO: 30249 - DNA, 50 bp, synthetic construct
  source 1..50: mol_type = other DNA
aaactactacacaaccaatcaaattctcraaataccaaactctaaaaaac

SEQ ID NO: 30250 - DNA, 50 bp, synthetic construct
  source 1..50: mol_type = other DNA
ctattcctaacctaccaaaaaaaactaatccatataattacctaaatccc

SEQ ID NO: 30251 - DNA, 50 bp, synthetic construct
  source 1..50: mol_type = other DNA
ccttcctactataaataacaaaaaaacctaactaactaccaatccctacc

SEQ ID NO: 30252 - DNA, 50 bp, synthetic construct
  source 1..50: mol_type = other DNA
tatacrtaaaaccacaaaataaataaaactactaaatcccctctccaacc

SEQ ID NO: 30253 - DNA, 50 bp, synthetic construct
  source 1..50: mol_type = other DNA
aaataaaaaaaacactcatatttcaacctatcctaaactctatactatac

SEQ ID NO: 30254 - DNA, 50 bp, synthetic construct
  source 1..50: mol_type = other DNA
aaactaaaacataaatattctctccacttacctaaccaacacaaaacccc

SEQ ID NO: 30255 - DNA, 50 bp, synthetic construct
  source 1..50: mol_type = other DNA
caataaacaccataaaactaacraccttataccrctaaaaactcctcctc

SEQ ID NO: 30256 - DNA, 50 bp, synthetic construct
  source 1..50: mol_type = other DNA
aaccaatacctatcttccttttaaaccctaccaacataacaaaaaactac

SEQ ID NO: 30257 - DNA, 50 bp, synthetic construct
  source 1..50: mol_type = other DNA
tataaacataacraaactttataaacaaaactaaaacaacacaaacattc

SEQ ID NO: 30258 - DNA, 50 bp, synthetic construct
  source 1..50: mol_type = other DNA
aattattctaacraatatttatattatcccaattctatttacaaaacctc

SEQ ID NO: 30259 - DNA, 50 bp, synthetic construct
  source 1..50: mol_type = other DNA
tattatcccaattctatttacaaaacctcrtcatatttacaaataactac

SEQ ID NO: 30260 - DNA, 50 bp, synthetic construct
  source 1..50: mol_type = other DNA
actaaataatcttaaacaaattcccaaacctccaaaacaaaaactaaatc

SEQ ID NO: 30261 - DNA, 50 bp, synthetic construct
  source 1..50: mol_type = other DNA
taaccacaaatcaaataaacaaactcactaataaaataaaactaccaccc

SEQ ID NO: 30262 - DNA, 50 bp, synthetic construct
  source 1..50: mol_type = other DNA
aaaataaaaattacaaccccaatctctaaaacatattatacaaatccacc

SEQ ID NO: 30263 - DNA, 50 bp, synthetic construct
  source 1..50: mol_type = other DNA
craaaatacctaccaaacacacaataaatactcaactcaattactataac

SEQ ID NO: 30264 - DNA, 50 bp, synthetic construct
  source 1..50: mol_type = other DNA
tactataacracccccactccccattattattattttcctattacctaac

SEQ ID NO: 30265 - DNA, 50 bp, synthetic construct
  source 1..50: mol_type = other DNA
ctactctcccaacaaattaaaacctaaaatcaaatcctaaaaaataatac

SEQ ID NO: 30266 - DNA, 50 bp, synthetic construct
  source 1..50: mol_type = other DNA
caaaccaacccttatactatccctaaatctacatataacctataaaaaac

SEQ ID NO: 30267 - DNA, 50 bp, synthetic construct
  source 1..50: mol_type = other DNA
aatacccaattaaacttatttttctactctaataaaataaatcacctaac

SEQ ID NO: 30268 - DNA, 50 bp, synthetic construct
  source 1..50: mol_type = other DNA
cactttaatctcccctcactaacaaacctaatataaactactaccccrac

SEQ ID NO: 30269 - DNA, 50 bp, synthetic construct
  source 1..50: mol_type = other DNA
ataaaccaaatataacaattcaaccctataccccataactaataactcrc

SEQ ID NO: 30270 - DNA, 50 bp, synthetic construct
  source 1..50: mol_type = other DNA
crctaaacaaatatacaaaactaacrtaatacctttataacaacaatttc

SEQ ID NO: 30271 - DNA, 50 bp, synthetic construct
  source 1..50: mol_type = other DNA
ataaaaataacraaacatatccaaataaatctcraaactaacaaaaaacc

SEQ ID NO: 30272 - DNA, 50 bp, synthetic construct
  source 1..50: mol_type = other DNA
accacctaacaaccctaataaaaataacraaacatatccaaataaatctc

SEQ ID NO: 30273 - DNA, 50 bp, synthetic construct
  source 1..50: mol_type = other DNA
aataaattccaaatttccctacaccacctaacaaccctaataaaaataac

SEQ ID NO: 30274 - DNA, 50 bp, synthetic construct
  source 1..50: mol_type = other DNA
aaacaaaaaactcaacccaactaaaaacaaaacctaactaaattacccac

SEQ ID NO: 30275 - DNA, 50 bp, synthetic construct
  source 1..50: mol_type = other DNA
ccaaccctctaacrtccatcatctctacrataattaacattctactaatc

SEQ ID NO: 30276 - DNA, 50 bp, synthetic construct
  source 1..50: mol_type = other DNA
taacrcttttaacacaatctacaaaatcaaaaccaaatcctaaaataaac

SEQ ID NO: 30277 - DNA, 50 bp, synthetic construct
  source 1..50: mol_type = other DNA
tacaaaatcaaaaccaaatcctaaaataaacraccccaaaaaataaaaac

SEQ ID NO: 30278 - DNA, 50 bp, synthetic construct
  source 1..50: mol_type = other DNA
aaatattaaaaaaaaacacatcccccaaaaccaacaaaaaaatcttaaac

SEQ ID NO: 30279 - DNA, 50 bp, synthetic construct
  source 1..50: mol_type = other DNA
aatctaaactctaatctctcttcattaaaatttaaaaaaatataactccc

SEQ ID NO: 30280 - DNA, 50 bp, synthetic construct
  source 1..50: mol_type = other DNA
aaaaactaaactaaaaccrcaccatttcactctaacctaaataacaaaac

SEQ ID NO: 30281 - DNA, 50 bp, synthetic construct
  source 1..50: mol_type = other DNA
aaaacractattaataatcttttctaaaatttctccattactaactcttc

SEQ ID NO: 30282 - DNA, 50 bp, synthetic construct
  source 1..50: mol_type = other DNA
taacaaaataatacactattaaaataaaataaccaaaaaatcctcccaac

SEQ ID NO: 30283 - DNA, 50 bp, synthetic construct
  source 1..50: mol_type = other DNA
aacraaaaaactaaaattcaaaacacaaactaacccaacaaatattctac

SEQ ID NO: 30284 - DNA, 50 bp, synthetic construct
  source 1..50: mol_type = other DNA
aaactaaccaatactataaaaaaacaatatccraacatcraaatcraatc

SEQ ID NO: 30285 - DNA, 50 bp, synthetic construct
  source 1..50: mol_type = other DNA
acctaaaactaaccaatactataaaaaaacaatatccraacatcraaatc

SEQ ID NO: 30286 - DNA, 50 bp, synthetic construct
  source 1..50: mol_type = other DNA
ttcraaacracctacctaaaactaaccaatactataaaaaaacaatatcc

SEQ ID NO: 30287 - DNA, 50 bp, synthetic construct
  source 1..50: mol_type = other DNA
cratacccraatactactccttcacaacactaaccaactccaaataaatc

SEQ ID NO: 30288 - DNA, 50 bp, synthetic construct
  source 1..50: mol_type = other DNA
taaaactaaactaaaaattcraaaataaaacctcccrtaaacccacctcc

SEQ ID NO: 30289 - DNA, 50 bp, synthetic construct
  source 1..50: mol_type = other DNA
aatttaccccaatttaaatttccccaaatctctaaaacaaacrtctctac

SEQ ID NO: 30290 - DNA, 50 bp, synthetic construct
  source 1..50: mol_type = other DNA
cccaatttaaatttccccaaatctctaaaacaaacrtctctacraactac

SEQ ID NO: 30291 - DNA, 50 bp, synthetic construct
  source 1..50: mol_type = other DNA
aaactaccccrccttctcccattaaatatttttcctaaataaaaataaac

SEQ ID NO: 30292 - DNA, 50 bp, synthetic construct
  source 1..50: mol_type = other DNA
ctaaaccctacaccctaaaaaattataaacctctcccrtaaaaacraaac

SEQ ID NO: 30293 - DNA, 50 bp, synthetic construct
  source 1..50: mol_type = other DNA
tacraaactaaaacctaaaccaaaaacctaaatataacraaaaaaccccc

SEQ ID NO: 30294 - DNA, 50 bp, synthetic construct
  source 1..50: mol_type = other DNA
tccaaaatcacaaaacccaattccactacccaaaccctaaaaaaatccac

SEQ ID NO: 30295 - DNA, 50 bp, synthetic construct
  source 1..50: mol_type = other DNA
acraataaccrtacctattaatcacaactatataaaaatacraataaccc

SEQ ID NO: 30296 - DNA, 50 bp, synthetic construct
  source 1..50: mol_type = other DNA
cctactaacactaccccaatttcccaaaaaattccaaaaatctctctctc

SEQ ID NO: 30297 - DNA, 50 bp, synthetic construct
  source 1..50: mol_type = other DNA
ttcaaacrattttcctacctcaacctcttaaataatttaaaattacaaac

SEQ ID NO: 30298 - DNA, 50 bp, synthetic construct
  source 1..50: mol_type = other DNA
cacttaaaatcaaaaatttaaaatcaatctaaccaacataacaaaacccc

SEQ ID NO: 30299 - DNA, 50 bp, synthetic construct
  source 1..50: mol_type = other DNA
tttcacttctaaatcctactcraactataataaaacaacrcraaaacaac

SEQ ID NO: 30300 - DNA, 50 bp, synthetic construct
  source 1..50: mol_type = other DNA
aaaaaaaaacaactacacttctaaaaaacaactcracrtctcaacaaccc

SEQ ID NO: 30301 - DNA, 50 bp, synthetic construct
  source 1..50: mol_type = other DNA
aaactataaaaccrcaaacaaaaaattaaactacraactactaaaacrcc

SEQ ID NO: 30302 - DNA, 50 bp, synthetic construct
  source 1..50: mol_type = other DNA
aaacaaaatcccctcacctataaaattataaaaaactcraaataacrcrc

SEQ ID NO: 30303 - DNA, 50 bp, synthetic construct
  source 1..50: mol_type = other DNA
aaaaacaaaatcccctcacctataaaattataaaaaactcraaataacrc

SEQ ID NO: 30304 - DNA, 50 bp, synthetic construct
  source 1..50: mol_type = other DNA
taaaaaacaaaatcccctcacctataaaattataaaaaactcraaataac

SEQ ID NO: 30305 - DNA, 50 bp, synthetic construct
  source 1..50: mol_type = other DNA
rctctatttccccaaactaaatacaataacacaatcaaaacttacttacc

SEQ ID NO: 30306 - DNA, 50 bp, synthetic construct
  source 1..50: mol_type = other DNA
racaaataaaccttaattataccactacactcaacctaaaaaaacaaaac

SEQ ID NO: 30307 - DNA, 50 bp, synthetic construct
  source 1..50: mol_type = other DNA
taaaaaatcaaaaatcctaaaccctaacttattctcaaaaccattcaatc

SEQ ID NO: 30308 - DNA, 50 bp, synthetic construct
  source 1..50: mol_type = other DNA
accttaatttcacaatcttaaaatacaaaaaataatctcaaactaaatac

SEQ ID NO: 30309 - DNA, 50 bp, synthetic construct
  source 1..50: mol_type = other DNA
acaaaaaaaaccaactttttttattttcttttattttaaaacaatctctc

SEQ ID NO: 30310 - DNA, 50 bp, synthetic construct
  source 1..50: mol_type = other DNA
cctctacaaaaacttaaacactaatctaataaaaaaacttcctttccctc

SEQ ID NO: 30311 - DNA, 50 bp, synthetic construct
  source 1..50: mol_type = other DNA
tacttccaaattctctttctcttatcccttaaaaaaccaacaaaatatac

SEQ ID NO: 30312 - DNA, 50 bp, synthetic construct
  source 1..50: mol_type = other DNA
ctttctcttatcccttaaaaaaccaacaaaatatacratatttcaaaaac

SEQ ID NO: 30313 - DNA, 50 bp, synthetic construct
  source 1..50: mol_type = other DNA
atattccacctcaaactacacaaataacttatccttctttataacataac

SEQ ID NO: 30314 - DNA, 50 bp, synthetic construct
  source 1..50: mol_type = other DNA
attaatattttatttctaaaaaacttatacattcractccaactcaactc

SEQ ID NO: 30315 - DNA, 50 bp, synthetic construct
  source 1..50: mol_type = other DNA
cccaaattcctaataaattaatattttatttctaaaaaacttatacattc

SEQ ID NO: 30316 - DNA, 50 bp, synthetic construct
  source 1..50: mol_type = other DNA
caaacctaacaaaataatttcccataatactatctcaaaaaacactaatc

SEQ ID NO: 30317 - DNA, 50 bp, synthetic construct
  source 1..50: mol_type = other DNA
caaaataatttcccataatactatctcaaaaaacactaatcracaacaac

SEQ ID NO: 30318 - DNA, 50 bp, synthetic construct
  source 1..50: mol_type = other DNA
acaaaaacctaaaacttctactataattcataatctcttaaaacacaatc

SEQ ID NO: 30319 - DNA, 50 bp, synthetic construct
  source 1..50: mol_type = other DNA
tattttctctatctctataactatttaaaaaactaccraaataaaacacc

SEQ ID NO: 30320 - DNA, 50 bp, synthetic construct
  source 1..50: mol_type = other DNA
aaatctaaaaaactattttctctatctctataactatttaaaaaactacc

SEQ ID NO: 30321 - DNA, 50 bp, synthetic construct
  source 1..50: mol_type = other DNA
aaactttctacatttaaaactctttcacttcaatctcaatcaaccaaaac

SEQ ID NO: 30322 - DNA, 50 bp, synthetic construct
  source 1..50: mol_type = other DNA
caaataactaataatcatctacactactcaaattaccrtaactcaaaaac

SEQ ID NO: 30323 - DNA, 50 bp, synthetic construct
  source 1..50: mol_type = other DNA
ttcaattactataatttaccctttctaaatttcatacacattaaatcatc

SEQ ID NO: 30324 - DNA, 50 bp, synthetic construct
  source 1..50: mol_type = other DNA
ataaaacccaaaaaaaataaactacaataattaaaaaaccaacaactcac

SEQ ID NO: 30325 - DNA, 50 bp, synthetic construct
  source 1..50: mol_type = other DNA
tcattcaaaaacrtaatataattttaactaaaaactaaaccaaatactcc

SEQ ID NO: 30326 - DNA, 50 bp, synthetic construct
  source 1..50: mol_type = other DNA
aaaaaacctctaattcaacctaaaactaatatcataaatcattcaaaaac

SEQ ID NO: 30327 - DNA, 50 bp, synthetic construct
  source 1..50: mol_type = other DNA
aatcttaaatcttaaaattcttcaaatcacttaaatatatttactactac

SEQ ID NO: 30328 - DNA, 50 bp, synthetic construct
  source 1..50: mol_type = other DNA
tcacctataataaacatattaataaaattttaacacttcaacaaaccatc

SEQ ID NO: 30329 - DNA, 50 bp, synthetic construct
  source 1..50: mol_type = other DNA
attaacatatttaccacaaataaataaaatctttttttcatattcttttc

SEQ ID NO: 30330 - DNA, 50 bp, synthetic construct
  source 1..50: mol_type = other DNA
tccccaattcatctctaataaatacaaaatactccctactaataattatc

SEQ ID NO: 30331 - DNA, 50 bp, synthetic construct
  source 1..50: mol_type = other DNA
tcatctctaataaatacaaaatactccctactaataattatcrccaaccc

SEQ ID NO: 30332 - DNA, 50 bp, synthetic construct
  source 1..50: mol_type = other DNA
tataaaacataaaactactattttctctccatctcccctcrccttacctc

SEQ ID NO: 30333 - DNA, 50 bp, synthetic construct
  source 1..50: mol_type = other DNA
aataaaataatataaaacataaaactactattttctctccatctcccctc

SEQ ID NO: 30334 - DNA, 50 bp, synthetic construct
  source 1..50: mol_type = other DNA
ttcatctcatacactacacaatatcacaaataatattcctttctccctcc

SEQ ID NO: 30335 - DNA, 50 bp, synthetic construct
  source 1..50: mol_type = other DNA
taaacaaataatactaccctaaataaaacacataaatatcraactaatac

SEQ ID NO: 30336 - DNA, 50 bp, synthetic construct
  source 1..50: mol_type = other DNA
taaaaaacaacaattattaataccactatatatttaaaaaacccatatac

SEQ ID NO: 30337 - DNA, 50 bp, synthetic construct
  source 1..50: mol_type = other DNA
catatatacaaattcataccattttacctattacctcraaaatctatttc

SEQ ID NO: 30338 - DNA, 50 bp, synthetic construct
  source 1..50: mol_type = other DNA
atataacatatttcatatatacaaattcataccattttacctattacctc

SEQ ID NO: 30339 - DNA, 50 bp, synthetic construct
  source 1..50: mol_type = other DNA
aacattaaactttttcrttttaccacattacttactaatctatccaatac

SEQ ID NO: 30340 - DNA, 50 bp, synthetic construct
  source 1..50: mol_type = other DNA
atacraaaactctttcacttcccatctctactttaatatatcttacctcc

SEQ ID NO: 30341 - DNA, 50 bp, synthetic construct
  source 1..50: mol_type = other DNA
aatctaaacaattataacaaataacaacaataaaatatacatccaacttc

SEQ ID NO: 30342 - DNA, 50 bp, synthetic construct
  source 1..50: mol_type = other DNA
actttcccatctcracataaaactacaaaatttaaatataccctaatatc

SEQ ID NO: 30343 - DNA, 50 bp, synthetic construct
  source 1..50: mol_type = other DNA
aatcaataaaaccracaccaaaacacattcaaatcttacaatcttatacc

SEQ ID NO: 30344 - DNA, 50 bp, synthetic construct
  source 1..50: mol_type = other DNA
caccaaaacacattcaaatcttacaatcttataccraaataaaaaaactc

SEQ ID NO: 30345 - DNA, 50 bp, synthetic construct
  source 1..50: mol_type = other DNA
actaatcraaaattaaatctccatctatctatctttttacaaccaaccac

SEQ ID NO: 30346 - DNA, 50 bp, synthetic construct
  source 1..50: mol_type = other DNA
taacttttaatccttttctccaactttaaaacccaactatctatttatac

SEQ ID NO: 30347 - DNA, 50 bp, synthetic construct
  source 1..50: mol_type = other DNA
cctaatctataaatataactttatactacattttattattttttcaacac

SEQ ID NO: 30348 - DNA, 50 bp, synthetic construct
  source 1..50: mol_type = other DNA
catttactttctttataatctatctacccccaataaaatataaactccac

SEQ ID NO: 30349 - DNA, 50 bp, synthetic construct
  source 1..50: mol_type = other DNA
ttacrtaaactcaccaatatcccctaaatcaatactctaaaaaaatatac

SEQ ID NO: 30350 - DNA, 50 bp, synthetic construct
  source 1..50: mol_type = other DNA
aaactcaccaatatcccctaaatcaatactctaaaaaaatatacracaac

SEQ ID NO: 30351 - DNA, 50 bp, synthetic construct
  source 1..50: mol_type = other DNA
ttataaaccattaaaacattaaaactaatacaaaataatccacacacatc

SEQ ID NO: 30352 - DNA, 50 bp, synthetic construct
  source 1..50: mol_type = other DNA
aatccacacacatcrcaattcatctttccactaattaacctactactatc

SEQ ID NO: 30353 - DNA, 50 bp, synthetic construct
  source 1..50: mol_type = other DNA
aattataaatctctactatttaaactactttaataacttcaaatataatc

SEQ ID NO: 30354 - DNA, 50 bp, synthetic construct
  source 1..50: mol_type = other DNA
caaaacaactcaaacaacaaaaacccacaactaacaattaaataccaatc

SEQ ID NO: 30355 - DNA, 50 bp, synthetic construct
  source 1..50: mol_type = other DNA
taacaaaacactatacatctacaaaacaaaaaaacaccattaacrtaacc

SEQ ID NO: 30356 - DNA, 50 bp, synthetic construct
  source 1..50: mol_type = other DNA
aaaacactatacatctacaaaacaaaaaaacaccattaacrtaaccrcac

SEQ ID NO: 30357 - DNA, 50 bp, synthetic construct
  source 1..50: mol_type = other DNA
ttcatttacttacaataatataacccccatattttacaaaataaaatttc

SEQ ID NO: 30358 - DNA, 50 bp, synthetic construct
  source 1..50: mol_type = other DNA
aatcccatctactatattataaaaaaaactcatatactcttcttatctcc

SEQ ID NO: 30359 - DNA, 50 bp, synthetic construct
  source 1..50: mol_type = other DNA
tcttcaatccaataatattctaataattacttaacaaccaactcaaaatc

SEQ ID NO: 30360 - DNA, 50 bp, synthetic construct
  source 1..50: mol_type = other DNA
caaataaattctacttctcaaataaactttaacaccaaacacrataaccc

SEQ ID NO: 30361 - DNA, 50 bp, synthetic construct
  source 1..50: mol_type = other DNA
atctattaaacaataatattaatacctccttccaactaaattaaaaaaac

SEQ ID NO: 30362 - DNA, 50 bp, synthetic construct
  source 1..50: mol_type = other DNA
rtattaaccaaaataatcttaatctcctaacctcrtaatttacccacctc

SEQ ID NO: 30363 - DNA, 50 bp, synthetic construct
  source 1..50: mol_type = other DNA
taattaaatccaaaaatttaaaactaacctaaacaacataacraaacccc

SEQ ID NO: 30364 - DNA, 50 bp, synthetic construct
  source 1..50: mol_type = other DNA
taaccatacataataacatacaactataatcacaactactctaaaatctc

SEQ ID NO: 30365 - DNA, 50 bp, synthetic construct
  source 1..50: mol_type = other DNA
ctataaatacttaccataaacaaaactttacaacttatactatatcaaac

SEQ ID NO: 30366 - DNA, 50 bp, synthetic construct
  source 1..50: mol_type = other DNA
aaaacracacttccttttaaaacatatatttacrtatactaaacaatacc

SEQ ID NO: 30367 - DNA, 50 bp, synthetic construct
  source 1..50: mol_type = other DNA
aacracacttccttttaaaacatatatttacrtatactaaacaataccrc

SEQ ID NO: 30368 - DNA, 50 bp, synthetic construct
  source 1..50: mol_type = other DNA
ttttaaaacatatatttacrtatactaaacaataccrcraaaacctcaac

SEQ ID NO: 30369 - DNA, 50 bp, synthetic construct
  source 1..50: mol_type = other DNA
aacctcaactacctcrttaacataatctaaaatactattaaaaaaaactc

SEQ ID NO: 30370 - DNA, 50 bp, synthetic construct
  source 1..50: mol_type = other DNA
ttttatattcataacraacccctttcaataacaccttaaattatactaac

SEQ ID NO: 30371 - DNA, 50 bp, synthetic construct
  source 1..50: mol_type = other DNA
ataccacacccccaactcctaaaactctctaaatcttattattcaaaaac

SEQ ID NO: 30372 - DNA, 50 bp, synthetic construct
  source 1..50: mol_type = other DNA
ccctccrttaaaaatcttttcaacatacaattaaaaatttcataattaac

SEQ ID NO: 30373 - DNA, 50 bp, synthetic construct
  source 1..50: mol_type = other DNA
aaaaacrctaactataaaactttcaactacatactaaaaaaattcttaac

SEQ ID NO: 30374 - DNA, 50 bp, synthetic construct
  source 1..50: mol_type = other DNA
aaatattcccacataaaaattactcatataaaaactttaaactaattttc

SEQ ID NO: 30375 - DNA, 50 bp, synthetic construct
  source 1..50: mol_type = other DNA
rattttcctattataaatactaaaataatcaaaatctcatttttctcttc

SEQ ID NO: 30376 - DNA, 50 bp, synthetic construct
  source 1..50: mol_type = other DNA
tttaaaaaaccatccctcattctaaaaaaaataccttccttttctaaaac

SEQ ID NO: 30377 - DNA, 50 bp, synthetic construct
  source 1..50: mol_type = other DNA
caatccatatatacccaatatttaactccccrtcataaataaaaacatac

SEQ ID NO: 30378 - DNA, 50 bp, synthetic construct
  source 1..50: mol_type = other DNA
aaatcacattaattcataacaatccatatatacccaatatttaactcccc

SEQ ID NO: 30379 - DNA, 50 bp, synthetic construct
  source 1..50: mol_type = other DNA
cctttctataacttttatttcttaaaaccttcrcatttcatcctccatac

SEQ ID NO: 30380 - DNA, 50 bp, synthetic construct
  source 1..50: mol_type = other DNA
acacaactccctactttataaacaaaatacataaaaaataaatttatctc

SEQ ID NO: 30381 - DNA, 50 bp, synthetic construct
  source 1..50: mol_type = other DNA
attataaatcaatactccaacactatttttcctaaccrtaaccataccac

SEQ ID NO: 30382 - DNA, 50 bp, synthetic construct
  source 1..50: mol_type = other DNA
ttatttttataaaattataaatcaatactccaacactatttttcctaacc

SEQ ID NO: 30383 - DNA, 50 bp, synthetic construct
  source 1..50: mol_type = other DNA
aaaaaaacraccaattaaaattaataatataaaatctaacaaccrtaccc

SEQ ID NO: 30384 - DNA, 50 bp, synthetic construct
  source 1..50: mol_type = other DNA
aaaataacraacacrattaccaaacttcacattactaacctcaactaatc

SEQ ID NO: 30385 - DNA, 50 bp, synthetic construct
  source 1..50: mol_type = other DNA
tcatattccatttctctattccaaacacactaaattacataacccaaaac

SEQ ID NO: 30386 - DNA, 50 bp, synthetic construct
  source 1..50: mol_type = other DNA
ccaaataacatccaaataaaaaaaaccaacatctccttaaaaatatacac

SEQ ID NO: 30387 - DNA, 50 bp, synthetic construct
  source 1..50: mol_type = other DNA
ttctttcaaaactaaaacatacaaaaactaaaaaacaaactaaactcacc

SEQ ID NO: 30388 - DNA, 50 bp, synthetic construct
  source 1..50: mol_type = other DNA
ataaaaacaataactatatttctctttccaatactatataaactctactc

SEQ ID NO: 30389 - DNA, 50 bp, synthetic construct
  source 1..50: mol_type = other DNA
atatcccacactccctaacactcactccaaaaatactataataataaacc

SEQ ID NO: 30390 - DNA, 50 bp, synthetic construct
  source 1..50: mol_type = other DNA
taaaactttatacctctcctaaaaataacaactaatactccccaaaacac

SEQ ID NO: 30391 - DNA, 50 bp, synthetic construct
  source 1..50: mol_type = other DNA
aaaaataacaactaatactccccaaaacacrctaaaaaatcaataccctc

SEQ ID NO: 30392 - DNA, 50 bp, synthetic construct
  source 1..50: mol_type = other DNA
ctaaaaattcactaaaaaaaactaaacaccacttaaaaccctaactccac

SEQ ID NO: 30393 - DNA, 50 bp, synthetic construct
  source 1..50: mol_type = other DNA
aaaacaaaattctctatacttttacctaactattctccracaaatcttac

SEQ ID NO: 30394 - DNA, 50 bp, synthetic construct
  source 1..50: mol_type = other DNA
aacrataatcaaaaaacaaaattctctatacttttacctaactattctcc

SEQ ID NO: 30395 - DNA, 50 bp, synthetic construct
  source 1..50: mol_type = other DNA
atcraaaaacaaccaaacaaaaacacaaaaaattttactctctaactacc

SEQ ID NO: 30396 - DNA, 50 bp, synthetic construct
  source 1..50: mol_type = other DNA
ctactaacttcaacaaaaaaatcccccaaaaaaactataaaaaaactaac

SEQ ID NO: 30397 - DNA, 50 bp, synthetic construct
  source 1..50: mol_type = other DNA
ccttaaaaaatttccctactaaaaccaacaaaaaacccaacaatcccaac

SEQ ID NO: 30398 - DNA, 50 bp, synthetic construct
  source 1..50: mol_type = other DNA
aaacaacractcccrctaaaatactaataaaacatcaatacaactctaac

SEQ ID NO: 30399 - DNA, 50 bp, synthetic construct
  source 1..50: mol_type = other DNA
aaacrcaaataaaaaaacaacatatttctatttccctatatctaaccttc

SEQ ID NO: 30400 - DNA, 50 bp, synthetic construct
  source 1..50: mol_type = other DNA
acaaaatataaataaaatttttactccctttatacaatattctaaaaaac

SEQ ID NO: 30401 - DNA, 50 bp, synthetic construct
  source 1..50: mol_type = other DNA
tcccttacaccaatcctctactactatataaccccattcttctaaatctc

SEQ ID NO: 30402 - DNA, 50 bp, synthetic construct
  source 1..50: mol_type = other DNA
ataaaaatccaaacracaaaaacactcacaaacraaatactcaacaacac

SEQ ID NO: 30403 - DNA, 50 bp, synthetic construct
  source 1..50: mol_type = other DNA
acaaaaacactcacaaacraaatactcaacaacacratataaaaaaaacc

SEQ ID NO: 30404 - DNA, 50 bp, synthetic construct
  source 1..50: mol_type = other DNA
aacaacaaaataaatataaacacaacrcacaacraaataaaccccaacac

SEQ ID NO: 30405 - DNA, 50 bp, synthetic construct
  source 1..50: mol_type = other DNA
aaaataaaactacctaaaattctcaaaaaaacaaaaacctacctcccaac

SEQ ID NO: 30406 - DNA, 50 bp, synthetic construct
  source 1..50: mol_type = other DNA
caaactaccccatacatcatcccattaaaacaaaaccctaacaaaacatc

SEQ ID NO: 30407 - DNA, 50 bp, synthetic construct
  source 1..50: mol_type = other DNA
ttaaaacaaaaccctaacaaaacatcraaaaacaaatcatcaaaaaacac

SEQ ID NO: 30408 - DNA, 50 bp, synthetic construct
  source 1..50: mol_type = other DNA
aatccaacaaaaattatactaaataaaaattctctccctaaaactttatc

SEQ ID NO: 30409 - DNA, 50 bp, synthetic construct
  source 1..50: mol_type = other DNA
tatactaactcacctccctatctaaaataaaatcctacttactaaaaacc

SEQ ID NO: 30410 - DNA, 50 bp, synthetic construct
  source 1..50: mol_type = other DNA
aatcccaaataaaaatattctaaaaatacccaaaaaaccacctccctcac

SEQ ID NO: 30411 - DNA, 50 bp, synthetic construct
  source 1..50: mol_type = other DNA
acaaatttaactaaaatcctaatcaaaaataaataacatctaaatctaac

SEQ ID NO: 30412 - DNA, 50 bp, synthetic construct
  source 1..50: mol_type = other DNA
aatcctcactattattaaaattttctaaataaaacctcraatacraaacc

SEQ ID NO: 30413 - DNA, 50 bp, synthetic construct
  source 1..50: mol_type = other DNA
ttaactacctccaaaactaaataaacrcrtaaaaataactataaaatccc

SEQ ID NO: 30414 - DNA, 50 bp, synthetic construct
  source 1..50: mol_type = other DNA
ratccaatctaaaacccaacaaaaacctacaaaaaattacttacaaatcc

SEQ ID NO: 30415 - DNA, 50 bp, synthetic construct
  source 1..50: mol_type = other DNA
raacttataaataactttctataaatctttactaaatcctaaactaaatc

SEQ ID NO: 30416 - DNA, 50 bp, synthetic construct
  source 1..50: mol_type = other DNA
caaaaaaccraactaatctatttctaaaaaaaccaatctaaaaccaaaac

SEQ ID NO: 30417 - DNA, 50 bp, synthetic construct
  source 1..50: mol_type = other DNA
caatattataaaaaacrctctcccaaaaaaacccaacaaaacaaaaaacc

SEQ ID NO: 30418 - DNA, 50 bp, synthetic construct
  source 1..50: mol_type = other DNA
aaaaacaaactaacccraccctttaccctactaaaccctcctaaaaaaac

SEQ ID NO: 30419 - DNA, 50 bp, synthetic construct
  source 1..50: mol_type = other DNA
taaaaatctaaaaaacccraaacraaacctaccttctccttctcaatcac

SEQ ID NO: 30420 - DNA, 50 bp, synthetic construct
  source 1..50: mol_type = other DNA
actactaataaaaaaatctataatacrtaacctcttctcacrtcaaatac

SEQ ID NO: 30421 - DNA, 50 bp, synthetic construct
  source 1..50: mol_type = other DNA
ctaaaacaaaaactcaaactccttactactaataaaaaaatctataatac

SEQ ID NO: 30422 - DNA, 50 bp, synthetic construct
  source 1..50: mol_type = other DNA
acttaatattactataaaaaattaaactaaataactcttaaaatctcctc

SEQ ID NO: 30423 - DNA, 50 bp, synthetic construct
  source 1..50: mol_type = other DNA
taactcctttaatttttctctaaaattcttcatcctccatcaaattaatc

SEQ ID NO: 30424 - DNA, 50 bp, synthetic construct
  source 1..50: mol_type = other DNA
aaaaaaacctactcaaataaactaaaatctcccaaaaaaaaaccratcac

SEQ ID NO: 30425 - DNA, 50 bp, synthetic construct
  source 1..50: mol_type = other DNA
aaaaaactttaaaaacrcctcaaccaacrtaaaataaatacaacctatcc

SEQ ID NO: 30426 - DNA, 50 bp, synthetic construct
  source 1..50: mol_type = other DNA
ctcaaactccaatctaaattacaaaaaactttaaaaacrcctcaaccaac

SEQ ID NO: 30427 - DNA, 50 bp, synthetic construct
  source 1..50: mol_type = other DNA
caaattaaaacctaaaaaaacctctcrtaaacrcccacaaaaatacactc

SEQ ID NO: 30428 - DNA, 50 bp, synthetic construct
  source 1..50: mol_type = other DNA
acractaaacactcccaacraaaactaaacacaatcaccttaaaaaatac

SEQ ID NO: 30429 - DNA, 50 bp, synthetic construct
  source 1..50: mol_type = other DNA
caataaacctaaaaactccctcttttaaatcctcccctctaacctattcc

SEQ ID NO: 30430 - DNA, 50 bp, synthetic construct
  source 1..50: mol_type = other DNA
aatttccaacraaaacaatcaatcatatattaaaaacrctaaaatcaatc

SEQ ID NO: 30431 - DNA, 50 bp, synthetic construct
  source 1..50: mol_type = other DNA
aaacacaaacactaatttccaacraaaacaatcaatcatatattaaaaac

SEQ ID NO: 30432 - DNA, 50 bp, synthetic construct
  source 1..50: mol_type = other DNA
taaatcatcctaaccctatttacacacaaacacaaacactaatttccaac

SEQ ID NO: 30433 - DNA, 50 bp, synthetic construct
  source 1..50: mol_type = other DNA
ataatcctcttattcctccaaattcatattttacttttcccacttacaac

SEQ ID NO: 30434 - DNA, 50 bp, synthetic construct
  source 1..50: mol_type = other DNA
tcaaaaattaaacratcactaaataacccaacaacttcccttctaaatac

SEQ ID NO: 30435 - DNA, 50 bp, synthetic construct
  source 1..50: mol_type = other DNA
atccaaaatacactataccacaacaacaactacaaaactaaaaacaaaac

SEQ ID NO: 30436 - DNA, 50 bp, synthetic construct
  source 1..50: mol_type = other DNA
cttatccaaaaacctcacaaccaaaaaaatacaaaaaccrctatacaatc

SEQ ID NO: 30437 - DNA, 50 bp, synthetic construct
  source 1..50: mol_type = other DNA
taaacaaacaaaaataaccaaaactaaaaaacataaccctaaaatcccac

SEQ ID NO: 30438 - DNA, 50 bp, synthetic construct
  source 1..50: mol_type = other DNA
aaaaaatctcrtttttcttcttaaaacttttaaaacataatttaactccc

SEQ ID NO: 30439 - DNA, 50 bp, synthetic construct
  source 1..50: mol_type = other DNA
rtttttcttcttaaaacttttaaaacataatttaactcccraacatcacc

SEQ ID NO: 30440 - DNA, 50 bp, synthetic construct
  source 1..50: mol_type = other DNA
tttcttcttaaaacttttaaaacataatttaactcccraacatcaccrac

SEQ ID NO: 30441 - DNA, 50 bp, synthetic construct
  source 1..50: mol_type = other DNA
cctaaaaaaaatcacaatcctaaccctcrtaaaaacaaaacaaatatccc

SEQ ID NO: 30442 - DNA, 50 bp, synthetic construct
  source 1..50: mol_type = other DNA
aatatccaaacacctacctaaccctaaaaaaaatcacaatcctaaccctc

SEQ ID NO: 30443 - DNA, 50 bp, synthetic construct
  source 1..50: mol_type = other DNA
atcacattataactaaacttcaaaataataaaatatttacctccaatcac

SEQ ID NO: 30444 - DNA, 50 bp, synthetic construct
  source 1..50: mol_type = other DNA
cttaacccaacrtctacacaaaataaatactcaaataaatatatactaac

SEQ ID NO: 30445 - DNA, 50 bp, synthetic construct
  source 1..50: mol_type = other DNA
acattcattccrttaacacatatttatctaaacacctactctatacaaac

SEQ ID NO: 30446 - DNA, 50 bp, synthetic construct
  source 1..50: mol_type = other DNA
taaatactaaaaacacaacaaaaaacaaaacaaacataaaatctacactc

SEQ ID NO: 30447 - DNA, 50 bp, synthetic construct
  source 1..50: mol_type = other DNA
aaaccaaattcaaaataaccactaaaatcaaaacttctctcctcaaactc

SEQ ID NO: 30448 - DNA, 50 bp, synthetic construct
  source 1..50: mol_type = other DNA
aataaccactaaaatcaaaacttctctcctcaaactcratctctacactc

SEQ ID NO: 30449 - DNA, 50 bp, synthetic construct
  source 1..50: mol_type = other DNA
ctcrccccaactaatcacttcctacttataacaaccttaaactaaaaaac

SEQ ID NO: 30450 - DNA, 50 bp, synthetic construct
  source 1..50: mol_type = other DNA
ccacacaaaaatctttaactacaaacaaacctcacacctataatacratc

SEQ ID NO: 30451 - DNA, 50 bp, synthetic construct
  source 1..50: mol_type = other DNA
aaaaccacacaaaaatctttaactacaaacaaacctcacacctataatac

SEQ ID NO: 30452 - DNA, 50 bp, synthetic construct
  source 1..50: mol_type = other DNA
ctaaataaataactccraactaacaataaaaacttctaaccctactttcc

SEQ ID NO: 30453 - DNA, 50 bp, synthetic construct
  source 1..50: mol_type = other DNA
ctaccacaccctctctaaccaactacaaaaatacctacaactaaaacaac

SEQ ID NO: 30454 - DNA, 50 bp, synthetic construct
  source 1..50: mol_type = other DNA
accaactacaaaaatacctacaactaaaacaacracaaaataacaacatc

SEQ ID NO: 30455 - DNA, 50 bp, synthetic construct
  source 1..50: mol_type = other DNA
aaacrataccaacatcctttcraaccccaataaatatataaactaaccrc

SEQ ID NO: 30456 - DNA, 50 bp, synthetic construct
  source 1..50: mol_type = other DNA
aaaaacrataccaacatcctttcraaccccaataaatatataaactaacc

SEQ ID NO: 30457 - DNA, 50 bp, synthetic construct
  source 1..50: mol_type = other DNA
aaattaatacractactaaactctaataaaaacrataccaacatcctttc

SEQ ID NO: 30458 - DNA, 50 bp, synthetic construct
  source 1..50: mol_type = other DNA
acratatacaaccttcraaattaatacractactaaactctaataaaaac

SEQ ID NO: 30459 - DNA, 50 bp, synthetic construct
  source 1..50: mol_type = other DNA
taacttataacccacrtccraatactaaaactaaataaacrtaaaaaatc

SEQ ID NO: 30460 - DNA, 50 bp, synthetic construct
  source 1..50: mol_type = other DNA
aatatacaatctaacratatatactataacttaacttataacccacrtcc

SEQ ID NO: 30461 - DNA, 50 bp, synthetic construct
  source 1..50: mol_type = other DNA
caaactacataccttccctttaatattatcaataattttctaaaaaaaac

SEQ ID NO: 30462 - DNA, 50 bp, synthetic construct
  source 1..50: mol_type = other DNA
aaaaaatataaaatataacccraaactccacccrctacacttaactaccc

SEQ ID NO: 30463 - DNA, 50 bp, synthetic construct
  source 1..50: mol_type = other DNA
ttcttaaaccaacatcaccttctcaacctctacraacaactaaatacaac

SEQ ID NO: 30464 - DNA, 50 bp, synthetic construct
  source 1..50: mol_type = other DNA
aatttaatcttcccaaaactacctaaaccaaaaaaaataactaaaacaac

SEQ ID NO: 30465 - DNA, 50 bp, synthetic construct
  source 1..50: mol_type = other DNA
ctaaactaaaacaacaacctaacraaaaacaatacaaccccaaatccaac

SEQ ID NO: 30466 - DNA, 50 bp, synthetic construct
  source 1..50: mol_type = other DNA
taaccactaaataacaacattacccccrtctaactcccttaaaccaattc

SEQ ID NO: 30467 - DNA, 50 bp, synthetic construct
  source 1..50: mol_type = other DNA
caccttcaaccctatattcacattaaccactaaataacaacattaccccc

SEQ ID NO: 30468 - DNA, 50 bp, synthetic construct
  source 1..50: mol_type = other DNA
aataatcaatataaacataaaactaaaaatacctctacraactccaaccc

SEQ ID NO: 30469 - DNA, 50 bp, synthetic construct
  source 1..50: mol_type = other DNA
aaataaaactcaaaaaaatcaaaaaacatacaaacctcctctaatttaac

SEQ ID NO: 30470 - DNA, 50 bp, synthetic construct
  source 1..50: mol_type = other DNA
atcaaaaaacatacaaacctcctctaatttaacratatacaacaaaaccc

SEQ ID NO: 30471 - DNA, 50 bp, synthetic construct
  source 1..50: mol_type = other DNA
ratatacaacaaaacccrattcttaatactactaaaaattttctccaaac

SEQ ID NO: 30472 - DNA, 50 bp, synthetic construct
  source 1..50: mol_type = other DNA
accattaaaaaaacaaaatctaattttacatccttccctataactatcac

SEQ ID NO: 30473 - DNA, 50 bp, synthetic construct
  source 1..50: mol_type = other DNA
aatccctaataaaaaaataccaaaaactctaaaaaacattaatataaatc

SEQ ID NO: 30474 - DNA, 50 bp, synthetic construct
  source 1..50: mol_type = other DNA
aataaaaataatcaacctaaaacaaaccattttacaaacctaaaaaaaac

SEQ ID NO: 30475 - DNA, 50 bp, synthetic construct
  source 1..50: mol_type = other DNA
cttacttcaaattaaccaccttcattatttcactctaaacaaataacaac

SEQ ID NO: 30476 - DNA, 50 bp, synthetic construct
  source 1..50: mol_type = other DNA
tcaaattaaccaccttcattatttcactctaaacaaataacaacrataac

SEQ ID NO: 30477 - DNA, 50 bp, synthetic construct
  source 1..50: mol_type = other DNA
ccctttaactctttttctttcaaattcctctatctcrcttaaatcttccc

SEQ ID NO: 30478 - DNA, 50 bp, synthetic construct
  source 1..50: mol_type = other DNA
aaaaactctaaatatctcctaaaacratacccaaaaccctataactctac

SEQ ID NO: 30479 - DNA, 50 bp, synthetic construct
  source 1..50: mol_type = other DNA
cccaaaaccctataactctacrcatacraaataaatatatatatctacac

SEQ ID NO: 30480 - DNA, 50 bp, synthetic construct
  source 1..50: mol_type = other DNA
accctataactctacrcatacraaataaatatatatatctacacrtatcc

SEQ ID NO: 30481 - DNA, 50 bp, synthetic construct
  source 1..50: mol_type = other DNA
acaaaattcaaaaaccccaaaaaaataaaaccaaaacccaaaacaaatac

SEQ ID NO: 30482 - DNA, 50 bp, synthetic construct
  source 1..50: mol_type = other DNA
caaaaatcctttaaaaatatcctcaaatatacaaaactacaaaataaaac

SEQ ID NO: 30483 - DNA, 50 bp, synthetic construct
  source 1..50: mol_type = other DNA
atcctttaaaaatatcctcaaatatacaaaactacaaaataaaacractc

SEQ ID NO: 30484 - DNA, 50 bp, synthetic construct
  source 1..50: mol_type = other DNA
tcaaatatacaaaactacaaaataaaacractcracaataaaaacctaac

SEQ ID NO: 30485 - DNA, 50 bp, synthetic construct
  source 1..50: mol_type = other DNA
ccctccttataaaataaaaactactaaaaaacaatataaacaaaataccc

SEQ ID NO: 30486 - DNA, 50 bp, synthetic construct
  source 1..50: mol_type = other DNA
ataaaattctatacccaaactaaacaacaaaacaacaaaacccacctatc

SEQ ID NO: 30487 - DNA, 50 bp, synthetic construct
  source 1..50: mol_type = other DNA
taaatcttactatcctactatccaacctaaacacaaaaccccataactcc

SEQ ID NO: 30488 - DNA, 50 bp, synthetic construct
  source 1..50: mol_type = other DNA
aaaacccaacatataaaaaaacacataccacataaacctatattaaccac

SEQ ID NO: 30489 - DNA, 50 bp, synthetic construct
  source 1..50: mol_type = other DNA
cttaacatctctccaaaaacacacttaaacctttaaaataatacaaaaac

SEQ ID NO: 30490 - DNA, 50 bp, synthetic construct
  source 1..50: mol_type = other DNA
ctacccaaccttaactccaaatatatctaaatactaccaaaaacctacac

SEQ ID NO: 30491 - DNA, 50 bp, synthetic construct
  source 1..50: mol_type = other DNA
aaaccaatatatacaaaaataaacactaactactataaaccraaccaaac

SEQ ID NO: 30492 - DNA, 50 bp, synthetic construct
  source 1..50: mol_type = other DNA
crcctaacacactaccaccacttatttacaaaaactaaaaaaatccactc

SEQ ID NO: 30493 - DNA, 50 bp, synthetic construct
  source 1..50: mol_type = other DNA
craataaatttttccaacttctataaacaaataataacaatataccaaac

SEQ ID NO: 30494 - DNA, 50 bp, synthetic construct
  source 1..50: mol_type = other DNA
aacttctataaacaaataataacaatataccaaacraacaaaaaacaaac

SEQ ID NO: 30495 - DNA, 50 bp, synthetic construct
  source 1..50: mol_type = other DNA
raacaaaaaacaaacraaaacaacaccacaaccaaaatataccaaacacc

SEQ ID NO: 30496 - DNA, 50 bp, synthetic construct
  source 1..50: mol_type = other DNA
atctatctatctatatctaaatatctctctctccraatctaaatatctcc

SEQ ID NO: 30497 - DNA, 50 bp, synthetic construct
  source 1..50: mol_type = other DNA
aactacctacatatctatctatctatctatatctaaatatctctctctcc

SEQ ID NO: 30498 - DNA, 50 bp, synthetic construct
  source 1..50: mol_type = other DNA
accrctacraaaattaaactaaacaataaaaaacratcttctaactccac

SEQ ID NO: 30499 - DNA, 50 bp, synthetic construct
  source 1..50: mol_type = other DNA
aaacaaactaaatttataaatcccraactatatactaaaaaaataacttc

SEQ ID NO: 30500 - DNA, 50 bp, synthetic construct
  source 1..50: mol_type = other DNA
caaaaacctaaactaaaaaacacaaaaactacaaataacaaccacacaac

SEQ ID NO: 30501 - DNA, 50 bp, synthetic construct
  source 1..50: mol_type = other DNA
ctctaaaactacactcaaaaactataaatctaataataactactaaaacc

SEQ ID NO: 30502 - DNA, 50 bp, synthetic construct
  source 1..50: mol_type = other DNA
aattactccratctacttcctataaaactaaaaaatcaaatctccctcac

SEQ ID NO: 30503 - DNA, 50 bp, synthetic construct
  source 1..50: mol_type = other DNA
actataaccctaaccaaaatcactatatcaatatattaaaaactacatcc

SEQ ID NO: 30504 - DNA, 50 bp, synthetic construct
  source 1..50: mol_type = other DNA
cacaaattacataaaccctctacatacatacaaaaattatataacctccc

SEQ ID NO: 30505 - DNA, 50 bp, synthetic construct
  source 1..50: mol_type = other DNA
cactacacatatatattaccaaactctccacatacatattacataacctc

SEQ ID NO: 30506 - DNA, 50 bp, synthetic construct
  source 1..50: mol_type = other DNA
ataacaccataaactaaaatcaaaaccraaactaaacccctctatacaac

SEQ ID NO: 30507 - DNA, 50 bp, synthetic construct
  source 1..50: mol_type = other DNA
aactaaaaccctacttatacctaataacaccataaactaaaatcaaaacc

SEQ ID NO: 30508 - DNA, 50 bp, synthetic construct
  source 1..50: mol_type = other DNA
taaaactatataacctttaaaacacacacatacatatacaacataacacc

SEQ ID NO: 30509 - DNA, 50 bp, synthetic construct
  source 1..50: mol_type = other DNA
taaaaactacataactttaaacatatcctaaaaattcttccaacrtattc

SEQ ID NO: 30510 - DNA, 50 bp, synthetic construct
  source 1..50: mol_type = other DNA
taactataacacaaacatattctaaaaccccaacacacacacattcaccc

SEQ ID NO: 30511 - DNA, 50 bp, synthetic construct
  source 1..50: mol_type = other DNA
caaaataaacaaaatcacaaaacaatcttcraataacccctttctcatcc

SEQ ID NO: 30512 - DNA, 50 bp, synthetic construct
  source 1..50: mol_type = other DNA
cacrcacaaccaacctcacctaacatactaattttcaaaaaacattaacc

SEQ ID NO: 30513 - DNA, 50 bp, synthetic construct
  source 1..50: mol_type = other DNA
aaaaaactacttaaacccaaaaaatcaaaactacattaaacrataataac

SEQ ID NO: 30514 - DNA, 50 bp, synthetic construct
  source 1..50: mol_type = other DNA
cttcccctcttcttttctctaattcaaaaactttaacttaaacccctctc

SEQ ID NO: 30515 - DNA, 50 bp, synthetic construct
  source 1..50: mol_type = other DNA
taaaataaaacaaaacaaaccaaaaaatactaaactcaaaactacatatc

SEQ ID NO: 30516 - DNA, 50 bp, synthetic construct
  source 1..50: mol_type = other DNA
cctatattactccaatcccataaataaaccctcttataccttcctaccac

SEQ ID NO: 30517 - DNA, 50 bp, synthetic construct
  source 1..50: mol_type = other DNA
atcccaaatacctataaaaaactaaaactcttcaaaaccttttctctacc

SEQ ID NO: 30518 - DNA, 50 bp, synthetic construct
  source 1..50: mol_type = other DNA
aaaactaaaacaactaccrctctaaaacaaatacrtaacactcctaaatc

SEQ ID NO: 30519 - DNA, 50 bp, synthetic construct
  source 1..50: mol_type = other DNA
attaacccraaacactaaaacaaacaaaataaaacaacaaatacaatatc

SEQ ID NO: 30520 - DNA, 50 bp, synthetic construct
  source 1..50: mol_type = other DNA
raaataataatcataactctaacaaccccttatcctaacctaaccccctc

SEQ ID NO: 30521 - DNA, 50 bp, synthetic construct
  source 1..50: mol_type = other DNA
raaaaaaccaaaccaaaacaaaaaattaccaaaaccataaccactacccc

SEQ ID NO: 30522 - DNA, 50 bp, synthetic construct
  source 1..50: mol_type = other DNA
cccaaaacaaaaattactatcctccttataaacratctctctctcacaac

SEQ ID NO: 30523 - DNA, 50 bp, synthetic construct
  source 1..50: mol_type = other DNA
cttaataaaacraaaaatctccaaaaaccrattcttcaacaccaaaaccc

SEQ ID NO: 30524 - DNA, 50 bp, synthetic construct
  source 1..50: mol_type = other DNA
raacataaaaaattccrcttcrataaaacaactccaaaaaacrctactac

SEQ ID NO: 30525 - DNA, 50 bp, synthetic construct
  source 1..50: mol_type = other DNA
atacaaaataccataaacctaaccaacaaccaattaaacaaccaataccc

SEQ ID NO: 30526 - DNA, 50 bp, synthetic construct
  source 1..50: mol_type = other DNA
caactaattattaaccaaattcataacactctacatctcaacaaacatcc

SEQ ID NO: 30527 - DNA, 50 bp, synthetic construct
  source 1..50: mol_type = other DNA
aaccaaattcataacactctacatctcaacaaacatccrctacttctctc

SEQ ID NO: 30528 - DNA, 50 bp, synthetic construct
  source 1..50: mol_type = other DNA
aaaaacttcctaatactattctcatcctattacaactatacrttttaaac

SEQ ID NO: 30529 - DNA, 50 bp, synthetic construct
  source 1..50: mol_type = other DNA
aacataattaaaaacttcctaatactattctcatcctattacaactatac

SEQ ID NO: 30530 - DNA, 50 bp, synthetic construct
  source 1..50: mol_type = other DNA
caactacaacaaaataaaaacaacatcaaaaaattctcaaccatactcac

SEQ ID NO: 30531 - DNA, 50 bp, synthetic construct
  source 1..50: mol_type = other DNA
catccttcatttacttaaatcaacatatacttctatcccattaatccctc

SEQ ID NO: 30532 - DNA, 50 bp, synthetic construct
  source 1..50: mol_type = other DNA
accaacaatatcrcttcaaaaaatatctctctataaacatatctcraaac

SEQ ID NO: 30533 - DNA, 50 bp, synthetic construct
  source 1..50: mol_type = other DNA
ccrctaccaacaatatcrcttcaaaaaatatctctctataaacatatctc

SEQ ID NO: 30534 - DNA, 50 bp, synthetic construct
  source 1..50: mol_type = other DNA
tcraaacatacccacaaaaaaacacttcttaaaacracattactaacaac

SEQ ID NO: 30535 - DNA, 50 bp, synthetic construct
  source 1..50: mol_type = other DNA
catacccacaaaaaaacacttcttaaaacracattactaacaacrattac

SEQ ID NO: 30536 - DNA, 50 bp, synthetic construct
  source 1..50: mol_type = other DNA
attctcattcttcaaacaccttttatactaaatattctactaaatactcc

SEQ ID NO: 30537 - DNA, 50 bp, synthetic construct
  source 1..50: mol_type = other DNA
ctcattcttcaaacaccttttatactaaatattctactaaatactccrac

SEQ ID NO: 30538 - DNA, 50 bp, synthetic construct
  source 1..50: mol_type = other DNA
tatataaaatatataaaaacrttacctcraacttccactacratatacac

SEQ ID NO: 30539 - DNA, 50 bp, synthetic construct
  source 1..50: mol_type = other DNA
aaaaaaaaaaccrtcatcactcaaactaaataaaatactcccaaaaaaac

SEQ ID NO: 30540 - DNA, 50 bp, synthetic construct
  source 1..50: mol_type = other DNA
aaaaaccrtcatcactcaaactaaataaaatactcccaaaaaaacraacc

SEQ ID NO: 30541 - DNA, 50 bp, synthetic construct
  source 1..50: mol_type = other DNA
ctaaaaactaccattaaaattatcactataaaaaaattcaaaactaatac

SEQ ID NO: 30542 - DNA, 50 bp, synthetic construct
  source 1..50: mol_type = other DNA
aaaacataacractaacaccccctttccttttattctctctccaaataac

SEQ ID NO: 30543 - DNA, 50 bp, synthetic construct
  source 1..50: mol_type = other DNA
acaaacaaataaaaataaacacaataacaccctaaatccraaaacataac

SEQ ID NO: 30544 - DNA, 50 bp, synthetic construct
  source 1..50: mol_type = other DNA
caatattttaaacaaacaaataaaaataaacacaataacaccctaaatcc

SEQ ID NO: 30545 - DNA, 50 bp, synthetic construct
  source 1..50: mol_type = other DNA
aaacaattccccaacacacaataaacataacataaccaaacaacacctac

SEQ ID NO: 30546 - DNA, 50 bp, synthetic construct
  source 1..50: mol_type = other DNA
ccaccttcaacttctactttcaatataaaacataacccctataacatctc

SEQ ID NO: 30547 - DNA, 50 bp, synthetic construct
  source 1..50: mol_type = other DNA
taaaaaaataaaccacaataaaatctatccctatatccaaaaaaaacttc

SEQ ID NO: 30548 - DNA, 50 bp, synthetic construct
  source 1..50: mol_type = other DNA
aattttaaaaccccaaactaaacaatttatacttccacctcctacaactc

SEQ ID NO: 30549 - DNA, 50 bp, synthetic construct
  source 1..50: mol_type = other DNA
taacatatattaaatcacatatatcctaaaatcctcccttctcccacccc

SEQ ID NO: 30550 - DNA, 50 bp, synthetic construct
  source 1..50: mol_type = other DNA
tttccaaaaaactaaattcaccctaaccaaccttaaactattttaaaacc

SEQ ID NO: 30551 - DNA, 50 bp, synthetic construct
  source 1..50: mol_type = other DNA
aataaatctaaacctaaacctaaactcttaaatatactcctcacttccac

SEQ ID NO: 30552 - DNA, 50 bp, synthetic construct
  source 1..50: mol_type = other DNA
ccccacattacaaattcctattccccaaacttctctctccttaattctac

SEQ ID NO: 30553 - DNA, 50 bp, synthetic construct
  source 1..50: mol_type = other DNA
actacrtttattttcattcaacaaaaaccrtaactaccaccccattaatc

SEQ ID NO: 30554 - DNA, 50 bp, synthetic construct
  source 1..50: mol_type = other DNA
acaacraccaataaaataacaaccacracttctactaaataaaaacaaac

SEQ ID NO: 30555 - DNA, 50 bp, synthetic construct
  source 1..50: mol_type = other DNA
taacaaaataaaatattactaccraaaaaacrtaacaaaacacacrtctc

SEQ ID NO: 30556 - DNA, 50 bp, synthetic construct
  source 1..50: mol_type = other DNA
atccctacctctataaaaactccttcccctaaaaatattctccctaaaac

SEQ ID NO: 30557 - DNA, 50 bp, synthetic construct
  source 1..50: mol_type = other DNA
ccctctaaataataatcttctataaaattcatattttatcctccaacacc

SEQ ID NO: 30558 - DNA, 50 bp, synthetic construct
  source 1..50: mol_type = other DNA
ccattcraaataaacaaataaaactaacaataaacrtctaaccttaaatc

SEQ ID NO: 30559 - DNA, 50 bp, synthetic construct
  source 1..50: mol_type = other DNA
tctaacccctattcaatatttcacttatacatctacccaccttcccattc

SEQ ID NO: 30560 - DNA, 50 bp, synthetic construct
  source 1..50: mol_type = other DNA
cctctacttaaaatctattattactcataaaacaattactactctaaaac

SEQ ID NO: 30561 - DNA, 50 bp, synthetic construct
  source 1..50: mol_type = other DNA
aaaccattctcctatctcaacrtcccaaattactaaaactacaaaaacac

SEQ ID NO: 30562 - DNA, 50 bp, synthetic construct
  source 1..50: mol_type = other DNA
atttaaaaacacacaaacaaaatccaacactacccctaataaaaaaattc

SEQ ID NO: 30563 - DNA, 50 bp, synthetic construct
  source 1..50: mol_type = other DNA
tattttacaacaacaacaaaaacactaaaaatttcctataacraaacaac

SEQ ID NO: 30564 - DNA, 50 bp, synthetic construct
  source 1..50: mol_type = other DNA
ccaaaacatattttacaacaacaacaaaaacactaaaaatttcctataac

SEQ ID NO: 30565 - DNA, 50 bp, synthetic construct
  source 1..50: mol_type = other DNA
ataacccaaaatatcctctaaaaacttattaactcaatctccctccttac

SEQ ID NO: 30566 - DNA, 50 bp, synthetic construct
  source 1..50: mol_type = other DNA
tttaatttccaactacaaaattaattacctctactccaactccatttccc

SEQ ID NO: 30567 - DNA, 50 bp, synthetic construct
  source 1..50: mol_type = other DNA
ctcaaactactaccccacattcaccctaaaaaaaacacttttattcaatc

SEQ ID NO: 30568 - DNA, 50 bp, synthetic construct
  source 1..50: mol_type = other DNA
aaccctcaccccaacatataaccaattattatatttccttcctaaaactc

SEQ ID NO: 30569 - DNA, 50 bp, synthetic construct
  source 1..50: mol_type = other DNA
aaatttaaatatttttctccctctactaaccccrccaaaactttcaacrc

SEQ ID NO: 30570 - DNA, 50 bp, synthetic construct
  source 1..50: mol_type = other DNA
tcaaatttaaatatttttctccctctactaaccccrccaaaactttcaac

SEQ ID NO: 30571 - DNA, 50 bp, synthetic construct
  source 1..50: mol_type = other DNA
attaaaaatcacaactcaaatttaaatatttttctccctctactaacccc

SEQ ID NO: 30572 - DNA, 50 bp, synthetic construct
  source 1..50: mol_type = other DNA
aaacrcaaaacataatttctaccaaaaaaaactaaaccaaaccaaactac

SEQ ID NO: 30573 - DNA, 50 bp, synthetic construct
  source 1..50: mol_type = other DNA
tatccaaacaattaaaccaacaaatcctcaaaattccttataaaaaaaac

SEQ ID NO: 30574 - DNA, 50 bp, synthetic construct
  source 1..50: mol_type = other DNA
actaaatcccttcaaaaatttcctttacttcaatccttcaaaaacctccc

SEQ ID NO: 30575 - DNA, 50 bp, synthetic construct
  source 1..50: mol_type = other DNA
aatttcctttacttcaatccttcaaaaacctcccraaaatactaaaaatc

SEQ ID NO: 30576 - DNA, 50 bp, synthetic construct
  source 1..50: mol_type = other DNA
ccrcctccttaaaataaaatattaccaactaccaacaattccttcccaac

SEQ ID NO: 30577 - DNA, 50 bp, synthetic construct
  source 1..50: mol_type = other DNA
caaaaaaatatcttaaacrctaaatctctaaaaaccaaactcacaaacac

SEQ ID NO: 30578 - DNA, 50 bp, synthetic construct
  source 1..50: mol_type = other DNA
taacrcaaaaatacccttaactactactacaataaaaacaaacctatatc

SEQ ID NO: 30579 - DNA, 50 bp, synthetic construct
  source 1..50: mol_type = other DNA
aaacracacaaacttatttttactacaacaataattaaaaacatctctac

SEQ ID NO: 30580 - DNA, 50 bp, synthetic construct
  source 1..50: mol_type = other DNA
aaaaaacaaacaaaataaataaccrcttactcccttactcaactcttaac

SEQ ID NO: 30581 - DNA, 50 bp, synthetic construct
  source 1..50: mol_type = other DNA
aaaaaaacaaacractattcattttatttactttccaaataaatctcatc

SEQ ID NO: 30582 - DNA, 50 bp, synthetic construct
  source 1..50: mol_type = other DNA
aaaaataacactactcaaactatactacaatctaaaaatataataatacc

SEQ ID NO: 30583 - DNA, 50 bp, synthetic construct
  source 1..50: mol_type = other DNA
aaaacaaaaaaatcacctatacctaaaaaatcaaaactacaataaaccrc

SEQ ID NO: 30584 - DNA, 50 bp, synthetic construct
  source 1..50: mol_type = other DNA
ccaaccatcacctatcccaaaatacaaactaatataataccaatattacc

SEQ ID NO: 30585 - DNA, 50 bp, synthetic construct
  source 1..50: mol_type = other DNA
aaaaaacttcttattacaacrttttctctatattctcatttcctcttcac

SEQ ID NO: 30586 - DNA, 50 bp, synthetic construct
  source 1..50: mol_type = other DNA
aaaaaaaaaccaattatctacaataaaaccaaaaaacttcttattacaac

SEQ ID NO: 30587 - DNA, 50 bp, synthetic construct
  source 1..50: mol_type = other DNA
atttctccttcrcccrttatcttaaacaaaactaatacaacaaatctaac

SEQ ID NO: 30588 - DNA, 50 bp, synthetic construct
  source 1..50: mol_type = other DNA
atataataattatctttctatatctaacttattttacttaacataattcc

SEQ ID NO: 30589 - DNA, 50 bp, synthetic construct
  source 1..50: mol_type = other DNA
attaacaaaactaatctaaaactcctaatctcaaataatccrtctaactc

SEQ ID NO: 30590 - DNA, 50 bp, synthetic construct
  source 1..50: mol_type = other DNA
tttcrccatattaacaaaactaatctaaaactcctaatctcaaataatcc

SEQ ID NO: 30591 - DNA, 50 bp, synthetic construct
  source 1..50: mol_type = other DNA
tataattaacrctaaaacaaaaaatttaaactactcaaatccacttctac

SEQ ID NO: 30592 - DNA, 50 bp, synthetic construct
  source 1..50: mol_type = other DNA
aattctcrataaattaaaactctctaaacaataccccacccctatttacc

SEQ ID NO: 30593 - DNA, 50 bp, synthetic construct
  source 1..50: mol_type = other DNA
aatactcrataaacaaaaataaaacattatccaaaaaacctcaacccatc

SEQ ID NO: 30594 - DNA, 50 bp, synthetic construct
  source 1..50: mol_type = other DNA
taaaccraattctaaaacracttactaaaaaaactaccaaaaacaacrcc

SEQ ID NO: 30595 - DNA, 50 bp, synthetic construct
  source 1..50: mol_type = other DNA
ctcaaataaaaaaccrataaactcraacacccaaaacaaaaactaacccc

SEQ ID NO: 30596 - DNA, 50 bp, synthetic construct
  source 1..50: mol_type = other DNA
caaaaactaaccccractcctcttccttacccttaaaacrtaaaaataac

SEQ ID NO: 30597 - DNA, 50 bp, synthetic construct
  source 1..50: mol_type = other DNA
aaccccaaaattttcaaaactaaaacacctctaacraataacataactac

SEQ ID NO: 30598 - DNA, 50 bp, synthetic construct
  source 1..50: mol_type = other DNA
taaaacctaacacattaaaataaaaactacccaacrcaaccataccaccc

SEQ ID NO: 30599 - DNA, 50 bp, synthetic construct
  source 1..50: mol_type = other DNA
cttaaaacctatacctatctaacactacctccctaaataaatcaacctac

SEQ ID NO: 30600 - DNA, 50 bp, synthetic construct
  source 1..50: mol_type = other DNA
aaaataactaaaccracatcataaccctacaacatccaaaatatccaaac

SEQ ID NO: 30601 - DNA, 50 bp, synthetic construct
  source 1..50: mol_type = other DNA
atttcraaatttcaccaacttaatcaaactaatcttaaactcctaacctc

SEQ ID NO: 30602 - DNA, 50 bp, synthetic construct
  source 1..50: mol_type = other DNA
aaccctcctaaacttaaaataatacctaaaactaaacctaaaaaaccctc

SEQ ID NO: 30603 - DNA, 50 bp, synthetic construct
  source 1..50: mol_type = other DNA
accraaaactaaaaacaaatataaaaaccctcaccattaaaacctcaacc

SEQ ID NO: 30604 - DNA, 50 bp, synthetic construct
  source 1..50: mol_type = other DNA
ccttttctcaatatacctaaaacaaacaaaatattaaaataaaacctaac

SEQ ID NO: 30605 - DNA, 50 bp, synthetic construct
  source 1..50: mol_type = other DNA
ccaactccaaacaaatccctcccaactctaaacctcaatttcacatttac

SEQ ID NO: 30606 - DNA, 50 bp, synthetic construct
  source 1..50: mol_type = other DNA
acraaataaaatccttaaaatcaattactttatattaattttcctcctcc

SEQ ID NO: 30607 - DNA, 50 bp, synthetic construct
  source 1..50: mol_type = other DNA
aaaccaaaattacatcactacattccaacctaaataacaaaataaactcc

SEQ ID NO: 30608 - DNA, 50 bp, synthetic construct
  source 1..50: mol_type = other DNA
ctcccaataaaaaacaattaaataattaacaacrtcctcaaactccactc

SEQ ID NO: 30609 - DNA, 50 bp, synthetic construct
  source 1..50: mol_type = other DNA
taactaccttccactaaaaactattccratatatacataaaataaaaacc

SEQ ID NO: 30610 - DNA, 50 bp, synthetic construct
  source 1..50: mol_type = other DNA
tacccaaaaacttactacaaataaaccttaaaaccaaaacrttatactac

SEQ ID NO: 30611 - DNA, 50 bp, synthetic construct
  source 1..50: mol_type = other DNA
raccatacrttacccaaaaacttactacaaataaaccttaaaaccaaaac

SEQ ID NO: 30612 - DNA, 50 bp, synthetic construct
  source 1..50: mol_type = other DNA
aacacaacrtcctaattccaaaactcacttacaacaaacccttaaacaac

SEQ ID NO: 30613 - DNA, 50 bp, synthetic construct
  source 1..50: mol_type = other DNA
rtcctaattccaaaactcacttacaacaaacccttaaacaacrcataacc

SEQ ID NO: 30614 - DNA, 50 bp, synthetic construct
  source 1..50: mol_type = other DNA
attaataatatttcaccaactactaaacacttactaaataccaaacattc

SEQ ID NO: 30615 - DNA, 50 bp, synthetic construct
  source 1..50: mol_type = other DNA
aaatccttctatttaatactacccttatctactctacccctaaataatac

SEQ ID NO: 30616 - DNA, 50 bp, synthetic construct
  source 1..50: mol_type = other DNA
aacaaaaatataaacaacaaacaaccctaactcctaatactactctaccc

SEQ ID NO: 30617 - DNA, 50 bp, synthetic construct
  source 1..50: mol_type = other DNA
cttaactcacccaacccttcaaaaacccttattacctatctctcaaaaac

SEQ ID NO: 30618 - DNA, 50 bp, synthetic construct
  source 1..50: mol_type = other DNA
cccaaaatatcacactaaactcctcacccacaacatcctactaattaacc

SEQ ID NO: 30619 - DNA, 50 bp, synthetic construct
  source 1..50: mol_type = other DNA
tcraccatacacactaccatactaaacactttaacatttccatcttaacc

SEQ ID NO: 30620 - DNA, 50 bp, synthetic construct
  source 1..50: mol_type = other DNA
tccttacctcaatactatttttaaaaactttccttcctaataaaaaactc

SEQ ID NO: 30621 - DNA, 50 bp, synthetic construct
  source 1..50: mol_type = other DNA
ccaactattaacraaacttaaataaaaaaaccacttcaacccraaaaatc

SEQ ID NO: 30622 - DNA, 50 bp, synthetic construct
  source 1..50: mol_type = other DNA
ctataatcccaactattaacraaacttaaataaaaaaaccacttcaaccc

SEQ ID NO: 30623 - DNA, 50 bp, synthetic construct
  source 1..50: mol_type = other DNA
aatcacaaaatcaaaaaatcaaaacatcctcrctaacaaattaaaacccc

SEQ ID NO: 30624 - DNA, 50 bp, synthetic construct
  source 1..50: mol_type = other DNA
ttcaacttattaacraaaatatcttaatctcctaaccttataatccaccc

SEQ ID NO: 30625 - DNA, 50 bp, synthetic construct
  source 1..50: mol_type = other DNA
cttattaacraaaatatcttaatctcctaaccttataatccacccrcctc

SEQ ID NO: 30626 - DNA, 50 bp, synthetic construct
  source 1..50: mol_type = other DNA
cttctttaacataataattttccatttttcctatcctatcacaattttcc

SEQ ID NO: 30627 - DNA, 50 bp, synthetic construct
  source 1..50: mol_type = other DNA
aaaattaacaaaattccrattaactaactatatcttaaaaaatatacccc

SEQ ID NO: 30628 - DNA, 50 bp, synthetic construct
  source 1..50: mol_type = other DNA
tcttattcatctaataattaaatacaaaatcattacctttacctaacttc

SEQ ID NO: 30629 - DNA, 50 bp, synthetic construct
  source 1..50: mol_type = other DNA
ataaataccattattacttctccaataacaacraaaacrtacrtaacctc

SEQ ID NO: 30630 - DNA, 50 bp, synthetic construct
  source 1..50: mol_type = other DNA
aaaattaaaaataactacaaaccacatatctaccatctatccraaaccac

SEQ ID NO: 30631 - DNA, 50 bp, synthetic construct
  source 1..50: mol_type = other DNA
ttaaaaataactacaaaccacatatctaccatctatccraaaccacrcac

SEQ ID NO: 30632 - DNA, 50 bp, synthetic construct
  source 1..50: mol_type = other DNA
attataatttaaattctaccaacacttaaaatttacacaataaactaaac

SEQ ID NO: 30633 - DNA, 50 bp, synthetic construct
  source 1..50: mol_type = other DNA
acacattaatccaaaaccactaactaacaatattattttaaaaaaatcac

SEQ ID NO: 30634 - DNA, 50 bp, synthetic construct
  source 1..50: mol_type = other DNA
aaaaaactcctttcattttcatccrtacttcccaaataaactaaatctcc

SEQ ID NO: 30635 - DNA, 50 bp, synthetic construct
  source 1..50: mol_type = other DNA
tcctcctaacttaaaataacctacaaataaaacttacctaaataaccttc

SEQ ID NO: 30636 - DNA, 50 bp, synthetic construct
  source 1..50: mol_type = other DNA
racctcrattctaattaactataatcacaaaacctttcrccttaaacacc

SEQ ID NO: 30637 - DNA, 50 bp, synthetic construct
  source 1..50: mol_type = other DNA
ratacccaaaacraaaaactctataactacaaccaatcaaaatcraaacc

SEQ ID NO: 30638 - DNA, 50 bp, synthetic construct
  source 1..50: mol_type = other DNA
tttactactaccrctatacaatttattcaaaaacttataataataaatcc

SEQ ID NO: 30639 - DNA, 50 bp, synthetic construct
  source 1..50: mol_type = other DNA
ccrctatacaatttattcaaaaacttataataataaatccraaaaactac

SEQ ID NO: 30640 - DNA, 50 bp, synthetic construct
  source 1..50: mol_type = other DNA
aaaaactaaatataacraatactaaactaaactaataataaaaacacccc

SEQ ID NO: 30641 - DNA, 50 bp, synthetic construct
  source 1..50: mol_type = other DNA
aataatccccacttatccataaaaaatacattccaaaacccccaataaac

SEQ ID NO: 30642 - DNA, 50 bp, synthetic construct
  source 1..50: mol_type = other DNA
acttatccataaaaaatacattccaaaacccccaataaacrcctacaatc

SEQ ID NO: 30643 - DNA, 50 bp, synthetic construct
  source 1..50: mol_type = other DNA
atcctttcataactaaaacaaatacttaaaatataaaccatatataatac

SEQ ID NO: 30644 - DNA, 50 bp, synthetic construct
  source 1..50: mol_type = other DNA
tataaacataaatctaaatattattctcacactcctttactaaaatattc

SEQ ID NO: 30645 - DNA, 50 bp, synthetic construct
  source 1..50: mol_type = other DNA
cctacccaataaaaaacaacctccccacctcattatatttaaaacttaac

SEQ ID NO: 30646 - DNA, 50 bp, synthetic construct
  source 1..50: mol_type = other DNA
aacrccttcctcttaactataaaacttaaatcaaaaacataacttaactc

SEQ ID NO: 30647 - DNA, 50 bp, synthetic construct
  source 1..50: mol_type = other DNA
ctcttaaactacaaacaatacaaatcttcctcttaaaaaaaatatattcc

SEQ ID NO: 30648 - DNA, 50 bp, synthetic construct
  source 1..50: mol_type = other DNA
acctaaaaaaactaaatcaacactttataacaaaaatacrcctactcccc

SEQ ID NO: 30649 - DNA, 50 bp, synthetic construct
  source 1..50: mol_type = other DNA
aaaaaactaaatcaacactttataacaaaaatacrcctactccccrcacc

SEQ ID NO: 30650 - DNA, 50 bp, synthetic construct
  source 1..50: mol_type = other DNA
accctaaaaccaaatcttactctaactttactttcaacttaaatcttaac

SEQ ID NO: 30651 - DNA, 50 bp, synthetic construct
  source 1..50: mol_type = other DNA
ctcraaaaaaacraatcttaaaaaaaccactcctaattaaaaactaaacc

SEQ ID NO: 30652 - DNA, 50 bp, synthetic construct
  source 1..50: mol_type = other DNA
raaataattcctcccctaaaaattttaaaaaacccctaattcccrcaaac

SEQ ID NO: 30653 - DNA, 50 bp, synthetic construct
  source 1..50: mol_type = other DNA
tataatttaaaaaaaatcaaccaaaaaacccactcccaccaaaaaaaacc

SEQ ID NO: 30654 - DNA, 50 bp, synthetic construct
  source 1..50: mol_type = other DNA
atttaaaaaaaatcaaccaaaaaacccactcccaccaaaaaaaaccracc

SEQ ID NO: 30655 - DNA, 50 bp, synthetic construct
  source 1..50: mol_type = other DNA
aataacacaaaacccaaaaacacccctacacacatactacattaactccc

SEQ ID NO: 30656 - DNA, 50 bp, synthetic construct
  source 1..50: mol_type = other DNA
caaatcccaaacaccctcaacaaaacaaaatcracaaatcaatctattcc

SEQ ID NO: 30657 - DNA, 50 bp, synthetic construct
  source 1..50: mol_type = other DNA
aaacctcrtaaataacaccaaatcccaaacaccctcaacaaaacaaaatc

SEQ ID NO: 30658 - DNA, 50 bp, synthetic construct
  source 1..50: mol_type = other DNA
aaaaatacaaaaacatctccaaaactaaaaaactcttctatctaatttcc

SEQ ID NO: 30659 - DNA, 50 bp, synthetic construct
  source 1..50: mol_type = other DNA
cactataattcctaaaatatttattattaattaccataataatatctacc

SEQ ID NO: 30660 - DNA, 50 bp, synthetic construct
  source 1..50: mol_type = other DNA
aaaaaaatcactaccacctactcaaactaaatactaaaaaaactataacc

SEQ ID NO: 30661 - DNA, 50 bp, synthetic construct
  source 1..50: mol_type = other DNA
ctataactttataaatctaactaattttacaacccttatcccctctaacc

SEQ ID NO: 30662 - DNA, 50 bp, synthetic construct
  source 1..50: mol_type = other DNA
aaatctaactaattttacaacccttatcccctctaaccraaattcctctc

SEQ ID NO: 30663 - DNA, 50 bp, synthetic construct
  source 1..50: mol_type = other DNA
actctaatctaaatactttccaaaacttcctatctaaaatcrcacaactc

SEQ ID NO: 30664 - DNA, 50 bp, synthetic construct
  source 1..50: mol_type = other DNA
ctaaataaccttacrcaaatcacttaacctctctaaacatctatttactc

SEQ ID NO: 30665 - DNA, 50 bp, synthetic construct
  source 1..50: mol_type = other DNA
tataaataatttattttccctctctttaatactaatttcrattctctacc

SEQ ID NO: 30666 - DNA, 50 bp, synthetic construct
  source 1..50: mol_type = other DNA
cttaaaatcaatctctccttcattacctaaaaataaaaaacttcctaaac

SEQ ID NO: 30667 - DNA, 50 bp, synthetic construct
  source 1..50: mol_type = other DNA
cctaaatatcacctccaatacttaacaacataaataatccaaaaataaac

SEQ ID NO: 30668 - DNA, 50 bp, synthetic construct
  source 1..50: mol_type = other DNA
aaaaataatacctaaaaatccttaattcccattttcctattaatatatac

SEQ ID NO: 30669 - DNA, 50 bp, synthetic construct
  source 1..50: mol_type = other DNA
aaataaaataaatatcccaaaaaaaaacacttaacctaaactctaacctc

SEQ ID NO: 30670 - DNA, 50 bp, synthetic construct
  source 1..50: mol_type = other DNA
aaaataaatatcccaaaaaaaaacacttaacctaaactctaacctcraac

SEQ ID NO: 30671 - DNA, 50 bp, synthetic construct
  source 1..50: mol_type = other DNA
taccataaaaatcacttattaactaaacaaaaatctcaatacccttcrcc

SEQ ID NO: 30672 - DNA, 50 bp, synthetic construct
  source 1..50: mol_type = other DNA
aaatcacttattaactaaacaaaaatctcaatacccttcrccractaacc

SEQ ID NO: 30673 - DNA, 50 bp, synthetic construct
  source 1..50: mol_type = other DNA
acracaactctaaccaactaacaaaatccaaaactaaaacctaccaaacc

SEQ ID NO: 30674 - DNA, 50 bp, synthetic construct
  source 1..50: mol_type = other DNA
aaaccataaactactaactaaccractaatcaactactaacctaaaaaac

SEQ ID NO: 30675 - DNA, 50 bp, synthetic construct
  source 1..50: mol_type = other DNA
tccccraaaccaaaaaatctctttatccctaaaacaaaccctaactaaac

SEQ ID NO: 30676 - DNA, 50 bp, synthetic construct
  source 1..50: mol_type = other DNA
aaaaatctctttatccctaaaacaaaccctaactaaacrcctcactaccc

SEQ ID NO: 30677 - DNA, 50 bp, synthetic construct
  source 1..50: mol_type = other DNA
aaaaatataaacatataccactacacccaactcaaaataaaatttttaac

SEQ ID NO: 30678 - DNA, 50 bp, synthetic construct
  source 1..50: mol_type = other DNA
actatatatttattctactacaaccaaaataaaaaccctaaaaataatcc

SEQ ID NO: 30679 - DNA, 50 bp, synthetic construct
  source 1..50: mol_type = other DNA
atatatttattctactacaaccaaaataaaaaccctaaaaataatccrac

SEQ ID NO: 30680 - DNA, 50 bp, synthetic construct
  source 1..50: mol_type = other DNA
aataaacaccaatcttcaaaaaccaaaccccaaaaaccaatttaaaaaac

SEQ ID NO: 30681 - DNA, 50 bp, synthetic construct
  source 1..50: mol_type = other DNA
ctctaaaaactaatatttactataaaaatctcaaattctatatacactac

SEQ ID NO: 30682 - DNA, 50 bp, synthetic construct
  source 1..50: mol_type = other DNA
aaaaacaaatcaattctcccctccaaccaaaaaaaattaaaaacccaaac

SEQ ID NO: 30683 - DNA, 50 bp, synthetic construct
  source 1..50: mol_type = other DNA
ccaacaaaaataatacacaaattccctctaaacaaaatcccaacataaac

SEQ ID NO: 30684 - DNA, 50 bp, synthetic construct
  source 1..50: mol_type = other DNA
aacaaaaataatacacaaattccctctaaacaaaatcccaacataaacrc

SEQ ID NO: 30685 - DNA, 50 bp, synthetic construct
  source 1..50: mol_type = other DNA
acaaccccataaacaacacatcccttaacataaaataaacacaatacctc

SEQ ID NO: 30686 - DNA, 50 bp, synthetic construct
  source 1..50: mol_type = other DNA
aaaaaaataaaactaaacaaaataaaaccccaaacctacaaacaactacc

SEQ ID NO: 30687 - DNA, 50 bp, synthetic construct
  source 1..50: mol_type = other DNA
acactatattctactctaacctaccccataaccttactattacccaaaac

SEQ ID NO: 30688 - DNA, 50 bp, synthetic construct
  source 1..50: mol_type = other DNA
tacttaaaatacctataaatccttatttattttttaacaacactcatctc

SEQ ID NO: 30689 - DNA, 50 bp, synthetic construct
  source 1..50: mol_type = other DNA
craaatctttcaaataataaaacaaaactctacrctcacaactacaaaac

SEQ ID NO: 30690 - DNA, 50 bp, synthetic construct
  source 1..50: mol_type = other DNA
aaatacttccataccttcraaatctttcaaataataaaacaaaactctac

SEQ ID NO: 30691 - DNA, 50 bp, synthetic construct
  source 1..50: mol_type = other DNA
acaacccaataaacttctctactttacaatctcaaaaacttcactaatac

SEQ ID NO: 30692 - DNA, 50 bp, synthetic construct
  source 1..50: mol_type = other DNA
aaccratactaattccccaactaaaaaacaccttaaacraaactttactc

SEQ ID NO: 30693 - DNA, 50 bp, synthetic construct
  source 1..50: mol_type = other DNA
ccaaatatttaacacccraatataacattatacaactcraacrctatatc

SEQ ID NO: 30694 - DNA, 50 bp, synthetic construct
  source 1..50: mol_type = other DNA
acataatatcacaaacaataacacaaaccratatctcattccracacaac

SEQ ID NO: 30695 - DNA, 50 bp, synthetic construct
  source 1..50: mol_type = other DNA
aaatcccacccctaatcccttcctaataataaatttttataaccaaaacc

SEQ ID NO: 30696 - DNA, 50 bp, synthetic construct
  source 1..50: mol_type = other DNA
aaaaatcccraaatataataaaaatcctatctctacctttcacttaaccc

SEQ ID NO: 30697 - DNA, 50 bp, synthetic construct
  source 1..50: mol_type = other DNA
taacacccactctaataacrcaaaaacaaaaactaaaaacaacaactatc

SEQ ID NO: 30698 - DNA, 50 bp, synthetic construct
  source 1..50: mol_type = other DNA
ctatcaataccaaaaacactaaatactcccctaacacccactctaataac

SEQ ID NO: 30699 - DNA, 50 bp, synthetic construct
  source 1..50: mol_type = other DNA
ccataaaaacccaataccccttaccaaaataaaaaattaaaataacaaac

SEQ ID NO: 30700 - DNA, 50 bp, synthetic construct
  source 1..50: mol_type = other DNA
ctacctcacaactacrcaaaaaaatacccaaatatacaccctaatactcc

SEQ ID NO: 30701 - DNA, 50 bp, synthetic construct
  source 1..50: mol_type = other DNA
cacctaaacattttcctacrcaactataaaacaatatacactaaataaac

SEQ ID NO: 30702 - DNA, 50 bp, synthetic construct
  source 1..50: mol_type = other DNA
aatcaaaaataataccttccctcttatatctacaaccacacaacaaattc

SEQ ID NO: 30703 - DNA, 50 bp, synthetic construct
  source 1..50: mol_type = other DNA
caaaattccaacrcccaacaaaaaactaaaactaacccaaaaaaccaaac

SEQ ID NO: 30704 - DNA, 50 bp, synthetic construct
  source 1..50: mol_type = other DNA
tattaaacrctaaaactttaaactaaaaaaatataatccttctctaaccc

SEQ ID NO: 30705 - DNA, 50 bp, synthetic construct
  source 1..50: mol_type = other DNA
aaatataaaaaactccraaatcctcacaacctctacaaaaattaaaacac

SEQ ID NO: 30706 - DNA, 50 bp, synthetic construct
  source 1..50: mol_type = other DNA
acaaaaaattataaccrtatcctaactcttacaaaaactataaaaattcc

SEQ ID NO: 30707 - DNA, 50 bp, synthetic construct
  source 1..50: mol_type = other DNA
atcctaactcttacaaaaactataaaaattccraaattccccacacctcc

SEQ ID NO: 30708 - DNA, 50 bp, synthetic construct
  source 1..50: mol_type = other DNA
taaaaataaaaaacaaactatattacaacctccaaaacaatcaaactacc

SEQ ID NO: 30709 - DNA, 50 bp, synthetic construct
  source 1..50: mol_type = other DNA
tctcccattctaccaaaaaataattttaaaaaacacattctctcaattcc

SEQ ID NO: 30710 - DNA, 50 bp, synthetic construct
  source 1..50: mol_type = other DNA
ttctccctctccaatctaattcattttaaaaataaaaccttaaaaaaaac

SEQ ID NO: 30711 - DNA, 50 bp, synthetic construct
  source 1..50: mol_type = other DNA
ctaaaaaaacatcctcatccatccttaaccctaaacaaaaaaacttaaac

SEQ ID NO: 30712 - DNA, 50 bp, synthetic construct
  source 1..50: mol_type = other DNA
aaaaactataaccaaaacaatcccaaattcccaaaaaaccacrcaacatc

SEQ ID NO: 30713 - DNA, 50 bp, synthetic construct
  source 1..50: mol_type = other DNA
tacaaaataaaaactataaccaaaacaatcccaaattcccaaaaaaccac

SEQ ID NO: 30714 - DNA, 50 bp, synthetic construct
  source 1..50: mol_type = other DNA
ataaaaatcaccctaattctaaaactcttacccctaaacracctaacccc

SEQ ID NO: 30715 - DNA, 50 bp, synthetic construct
  source 1..50: mol_type = other DNA
attaaaacccaaaacaacaattctaaaaaaataatacccaaccctccctc

SEQ ID NO: 30716 - DNA, 50 bp, synthetic construct
  source 1..50: mol_type = other DNA
ataataacctaaaaacttatcctaacaaacaaaacaaaacttataaatac

SEQ ID NO: 30717 - DNA, 50 bp, synthetic construct
  source 1..50: mol_type = other DNA
ccttttaaataaatcattctccccaacttttctaacctactcaaataaac

SEQ ID NO: 30718 - DNA, 50 bp, synthetic construct
  source 1..50: mol_type = other DNA
aatcattctccccaacttttctaacctactcaaataaacrataaacaaac

SEQ ID NO: 30719 - DNA, 50 bp, synthetic construct
  source 1..50: mol_type = other DNA
aaaaaaaaatcaaattatccacacccacaataaaaacaatacctaactac

SEQ ID NO: 30720 - DNA, 50 bp, synthetic construct
  source 1..50: mol_type = other DNA
acaattcttatcccrataacacrtatacaccatattcttctaaatactac

SEQ ID NO: 30721 - DNA, 50 bp, synthetic construct
  source 1..50: mol_type = other DNA
aacrattccraatcaccttattaataatacaattcttatcccrataacac

SEQ ID NO: 30722 - DNA, 50 bp, synthetic construct
  source 1..50: mol_type = other DNA
aatatacacrtatcaccraaacaaaaactacatcatcaacaaaataaccc

SEQ ID NO: 30723 - DNA, 50 bp, synthetic construct
  source 1..50: mol_type = other DNA
tactcccttaatctttaaaaacatctaaaaccccaactaaaacraaactc

SEQ ID NO: 30724 - DNA, 50 bp, synthetic construct
  source 1..50: mol_type = other DNA
aataaacatatccaaaaaatataaataccataaaacaaaaaccraatccc

SEQ ID NO: 30725 - DNA, 50 bp, synthetic construct
  source 1..50: mol_type = other DNA
aaaaaacaaaactctataaatatttatacacatacataaacacrcatacc

SEQ ID NO: 30726 - DNA, 50 bp, synthetic construct
  source 1..50: mol_type = other DNA
aactctataaatatttatacacatacataaacacrcataccrtaatatac

SEQ ID NO: 30727 - DNA, 50 bp, synthetic construct
  source 1..50: mol_type = other DNA
aaatatttatacacatacataaacacrcataccrtaatatacraactcac

SEQ ID NO: 30728 - DNA, 50 bp, synthetic construct
  source 1..50: mol_type = other DNA
caaaaacaaaaataattacacatacacratcccraaacacaaacctaccc

SEQ ID NO: 30729 - DNA, 50 bp, synthetic construct
  source 1..50: mol_type = other DNA
cctatttacraatctaactaactatatatccacraacaaatctatactcc

SEQ ID NO: 30730 - DNA, 50 bp, synthetic construct
  source 1..50: mol_type = other DNA
tacraatctaactaactatatatccacraacaaatctatactccraaacc

SEQ ID NO: 30731 - DNA, 50 bp, synthetic construct
  source 1..50: mol_type = other DNA
ctccattcctatctaaaactcttcrtacaacaatcaaaaccatctcaccc

SEQ ID NO: 30732 - DNA, 50 bp, synthetic construct
  source 1..50: mol_type = other DNA
ctcctataacaaaacactccaatcccctccattcctatctaaaactcttc

SEQ ID NO: 30733 - DNA, 50 bp, synthetic construct
  source 1..50: mol_type = other DNA
aaaaaaaaccttaaaaatcaactaaaccaacccctaacttacctaatttc

SEQ ID NO: 30734 - DNA, 50 bp, synthetic construct
  source 1..50: mol_type = other DNA
aaccttaaaaatcaactaaaccaacccctaacttacctaatttcraaaac

SEQ ID NO: 30735 - DNA, 50 bp, synthetic construct
  source 1..50: mol_type = other DNA
raattcraaactccactcttcccacaacatccttaacaactaaaaacacc

SEQ ID NO: 30736 - DNA, 50 bp, synthetic construct
  source 1..50: mol_type = other DNA
tacaaaaattaactaaatataataacacatacctataataccaactactc

SEQ ID NO: 30737 - DNA, 50 bp, synthetic construct
  source 1..50: mol_type = other DNA
ctaaaatttcaaaaccactattatctaaatccaaaaacattttacaaatc

SEQ ID NO: 30738 - DNA, 50 bp, synthetic construct
  source 1..50: mol_type = other DNA
aataaaaattttacatttcctaataaataaaaaccttactaactaaaaac

SEQ ID NO: 30739 - DNA, 50 bp, synthetic construct
  source 1..50: mol_type = other DNA
aaaataaaatttcaccatattacccaaactaatctaaactcaaacaatcc

SEQ ID NO: 30740 - DNA, 50 bp, synthetic construct
  source 1..50: mol_type = other DNA
aaaatcccacaaataaaaacacaaaaaattaaccaaacataacaataaac

SEQ ID NO: 30741 - DNA, 50 bp, synthetic construct
  source 1..50: mol_type = other DNA
aaaaatttcatctttaatttataatctacttttttccacttaacaatatc

SEQ ID NO: 30742 - DNA, 50 bp, synthetic construct
  source 1..50: mol_type = other DNA
aaaaactcaatatcataatctttaaaaaatattaaactaaaaccaaacac

SEQ ID NO: 30743 - DNA, 50 bp, synthetic construct
  source 1..50: mol_type = other DNA
taattttacctaaatcactaattccacaaaaccaatataaatatctaaac

SEQ ID NO: 30744 - DNA, 50 bp, synthetic construct
  source 1..50: mol_type = other DNA
cttaataaaataatatatatctatttaacctaacacctaaaaacctaacc

SEQ ID NO: 30745 - DNA, 50 bp, synthetic construct
  source 1..50: mol_type = other DNA
catcaataaaatacacccacttctttcaattcctacatacattatttacc

SEQ ID NO: 30746 - DNA, 50 bp, synthetic construct
  source 1..50: mol_type = other DNA
atttaccraatacctattattataaattatttacratatcccraacacac

SEQ ID NO: 30747 - DNA, 50 bp, synthetic construct
  source 1..50: mol_type = other DNA
craatacctattattataaattatttacratatcccraacacacracacc

SEQ ID NO: 30748 - DNA, 50 bp, synthetic construct
  source 1..50: mol_type = other DNA
ccttcctaaattcacaacrctcaaataaccaaaaaattaaacraataacc

SEQ ID NO: 30749 - DNA, 50 bp, synthetic construct
  source 1..50: mol_type = other DNA
cracaccrtaaataattctaattcracaacaacaatttaaacractatcc

SEQ ID NO: 30750 - DNA, 50 bp, synthetic construct
  source 1..50: mol_type = other DNA
racaacaacaatttaaacractatccrttcaatcccttaaccacctaaac

SEQ ID NO: 30751 - DNA, 50 bp, synthetic construct
  source 1..50: mol_type = other DNA
caaaacctaacacaatatttctctaaaacaactaaccaacttacaaaaac

SEQ ID NO: 30752 - DNA, 50 bp, synthetic construct
  source 1..50: mol_type = other DNA
aaatcctacctatttaatcrctttcaaaattcttaaaccccttcacracc

SEQ ID NO: 30753 - DNA, 50 bp, synthetic construct
  source 1..50: mol_type = other DNA
crtaaaatcctacctatttaatcrctttcaaaattcttaaaccccttcac

SEQ ID NO: 30754 - DNA, 50 bp, synthetic construct
  source 1..50: mol_type = other DNA
crtaaaaaaactcaaaaaccctaaaaacractaaacaaacaaaaccccac

SEQ ID NO: 30755 - DNA, 50 bp, synthetic construct
  source 1..50: mol_type = other DNA
aattaacaaaaaatctaaccaataaaaaaaactcacttattttctcrtac

SEQ ID NO: 30756 - DNA, 50 bp, synthetic construct
  source 1..50: mol_type = other DNA
cttctctctaaaaccctttcttcrcrtaactaaaattaaatctaaaaccc

SEQ ID NO: 30757 - DNA, 50 bp, synthetic construct
  source 1..50: mol_type = other DNA
taaaacccraaatacaccctaactaaaaacaccaaaactctcaaattaac

SEQ ID NO: 30758 - DNA, 50 bp, synthetic construct
  source 1..50: mol_type = other DNA
attctactaattccatcttaaaaaaacaaaataaaccaaaacccaaatac

SEQ ID NO: 30759 - DNA, 50 bp, synthetic construct
  source 1..50: mol_type = other DNA
aaaacaaaataaaccaaaacccaaatacrccctaaaaaaattacraaaac

SEQ ID NO: 30760 - DNA, 50 bp, synthetic construct
  source 1..50: mol_type = other DNA
taacrtcttaaaacctccaaacctttctatacccctaactatacctatac

SEQ ID NO: 30761 - DNA, 50 bp, synthetic construct
  source 1..50: mol_type = other DNA
ctaactatacctatacrctttaccccacctcaaaaaacttaatctccaac

SEQ ID NO: 30762 - DNA, 50 bp, synthetic construct
  source 1..50: mol_type = other DNA
acctcaaaaaacttaatctccaacrattaaaactaaaaacaccraaatac

SEQ ID NO: 30763 - DNA, 50 bp, synthetic construct
  source 1..50: mol_type = other DNA
tattcttcctaatttatctctcaacctctaatttcactaatcatactctc

SEQ ID NO: 30764 - DNA, 50 bp, synthetic construct
  source 1..50: mol_type = other DNA
rcttcccatttttaatttaatactaacaaaactaacaatattaatacctc

SEQ ID NO: 30765 - DNA, 50 bp, synthetic construct
  source 1..50: mol_type = other DNA
ctaacaaaacaaataaataaccctctaaatcacaactaaaacttctaatc

SEQ ID NO: 30766 - DNA, 50 bp, synthetic construct
  source 1..50: mol_type = other DNA
ttctaatcraaataactaaacccactcaattcataacctaaatatctctc

SEQ ID NO: 30767 - DNA, 50 bp, synthetic construct
  source 1..50: mol_type = other DNA
aaacccactcaattcataacctaaatatctctcraaaaccaaaaactaac

SEQ ID NO: 30768 - DNA, 50 bp, synthetic construct
  source 1..50: mol_type = other DNA
aaaatcctctaactttcrccacaaactttacaaccrataataccaaaacc

SEQ ID NO: 30769 - DNA, 50 bp, synthetic construct
  source 1..50: mol_type = other DNA
cacaaactttacaaccrataataccaaaaccrtataacctcttctctaac

SEQ ID NO: 30770 - DNA, 50 bp, synthetic construct
  source 1..50: mol_type = other DNA
cccctttcaaaaaccattatttacccaccaaaaatctaaataaaaacaac

SEQ ID NO: 30771 - DNA, 50 bp, synthetic construct
  source 1..50: mol_type = other DNA
tatctctaaaatcaactaacatataaaactaaaacatttcctaaaacatc

SEQ ID NO: 30772 - DNA, 50 bp, synthetic construct
  source 1..50: mol_type = other DNA
tctaaaatcaactaacatataaaactaaaacatttcctaaaacatcraac

SEQ ID NO: 30773 - DNA, 50 bp, synthetic construct
  source 1..50: mol_type = other DNA
crtaacattcctaaaacaacttaataacaaaatataactcaaaatacaac

SEQ ID NO: 30774 - DNA, 50 bp, synthetic construct
  source 1..50: mol_type = other DNA
crctataccctaaaccacattctaccaccaaactactccaaaaatattac

SEQ ID NO: 30775 - DNA, 50 bp, synthetic construct
  source 1..50: mol_type = other DNA
aaactactccaaaaatattacraaacatacaaaatttaaaatacctactc

SEQ ID NO: 30776 - DNA, 50 bp, synthetic construct
  source 1..50: mol_type = other DNA
aaatattacctaacaaaaattccccctatattccaaacctctctaacctc

SEQ ID NO: 30777 - DNA, 50 bp, synthetic construct
  source 1..50: mol_type = other DNA
actacaacaatatctactcctccataaatatacccaaaaatctaccccac

SEQ ID NO: 30778 - DNA, 50 bp, synthetic construct
  source 1..50: mol_type = other DNA
ttctctctaaactaaactatataacccaataacaaaaaccttaaaccacc

SEQ ID NO: 30779 - DNA, 50 bp, synthetic construct
  source 1..50: mol_type = other DNA
ctacaactaaaaaaccaaaactaacataccctaaaaaaacctcaacaaac

SEQ ID NO: 30780 - DNA, 50 bp, synthetic construct
  source 1..50: mol_type = other DNA
cttactaaaaccttctcaaaacataccaaccttaactccctaattacaac

SEQ ID NO: 30781 - DNA, 50 bp, synthetic construct
  source 1..50: mol_type = other DNA
accctatatataaaaatacccaaaaaaacatccttctatccacacttaac

SEQ ID NO: 30782 - DNA, 50 bp, synthetic construct
  source 1..50: mol_type = other DNA
acacatcaacacttatctcaataactattcctactctataccctaaacac

SEQ ID NO: 30783 - DNA, 50 bp, synthetic construct
  source 1..50: mol_type = other DNA
atactaatctaaattcaaaatctaactctataaacctttaaacaaattac

SEQ ID NO: 30784 - DNA, 50 bp, synthetic construct
  source 1..50: mol_type = other DNA
tttctctctttctctctttctttctttcttaaataaaatcttactctatc

SEQ ID NO: 30785 - DNA, 50 bp, synthetic construct
  source 1..50: mol_type = other DNA
ctcatcatacctacttataaaattactatacaaaccraaaaaaataaccc

SEQ ID NO: 30786 - DNA, 50 bp, synthetic construct
  source 1..50: mol_type = other DNA
taaacctcaatttcctcatcatacctacttataaaattactatacaaacc

SEQ ID NO: 30787 - DNA, 50 bp, synthetic construct
  source 1..50: mol_type = other DNA
ttaaaaataaaattcactcctaccttattaataaattattttaatatcac

SEQ ID NO: 30788 - DNA, 50 bp, synthetic construct
  source 1..50: mol_type = other DNA
tctactcatacaaaactacttacttcctttcaaaaaacctctctaccttc

SEQ ID NO: 30789 - DNA, 50 bp, synthetic construct
  source 1..50: mol_type = other DNA
taaaactcctcatctactcctttaaaatacactcctttaacaaacractc

SEQ ID NO: 30790 - DNA, 50 bp, synthetic construct
  source 1..50: mol_type = other DNA
raatacactctttcttctctatccaaataaaaacaacaataacctcatcc

SEQ ID NO: 30791 - DNA, 50 bp, synthetic construct
  source 1..50: mol_type = other DNA
tttaaataaattacttaaaaataaataatcacaacactccttttcaaacc

SEQ ID NO: 30792 - DNA, 50 bp, synthetic construct
  source 1..50: mol_type = other DNA
tctacaaataatttatcctaaaaaaacratcaaaacaaatacaaaaacac

SEQ ID NO: 30793 - DNA, 50 bp, synthetic construct
  source 1..50: mol_type = other DNA
aaaaacacrccaaaaatatcattttctcctacttacctccacataacttc

SEQ ID NO: 30794 - DNA, 50 bp, synthetic construct
  source 1..50: mol_type = other DNA
aataaacaataaactataataaacattccacccccaccccctctaaaatc

SEQ ID NO: 30795 - DNA, 50 bp, synthetic construct
  source 1..50: mol_type = other DNA
tactaaaacttaacttctaaatttactacttaaatttattcttcttaaac

SEQ ID NO: 30796 - DNA, 50 bp, synthetic construct
  source 1..50: mol_type = other DNA
aatttactacttaaatttattcttcttaaacrcctataatctcaaactcc

SEQ ID NO: 30797 - DNA, 50 bp, synthetic construct
  source 1..50: mol_type = other DNA
ctcrccctcttactctccttaaattaatcatcaaacacatcctaaaaatc

SEQ ID NO: 30798 - DNA, 50 bp, synthetic construct
  source 1..50: mol_type = other DNA
aataataaaatcaaaaatactcrctcaataaatcaccctaacaactcaac

SEQ ID NO: 30799 - DNA, 50 bp, synthetic construct
  source 1..50: mol_type = other DNA
ccrattcaaaaccctactatccrttaaactaccaaaataatccattaaac

SEQ ID NO: 30800 - DNA, 50 bp, synthetic construct
  source 1..50: mol_type = other DNA
aatctaatttcaaattactctcaataacttaaacctacacccaacattcc

SEQ ID NO: 30801 - DNA, 50 bp, synthetic construct
  source 1..50: mol_type = other DNA
ataacttaaacctacacccaacattccracatttcctaaacataccatac

SEQ ID NO: 30802 - DNA, 50 bp, synthetic construct
  source 1..50: mol_type = other DNA
tctccaatcttaaaaaaaccaccaacraaaaacccaaaccataaaaactc

SEQ ID NO: 30803 - DNA, 50 bp, synthetic construct
  source 1..50: mol_type = other DNA
caacaataaaaacctcatcttctctaaaaaccaaaacaaaaaacaccaac

SEQ ID NO: 30804 - DNA, 50 bp, synthetic construct
  source 1..50: mol_type = other DNA
ccaaaaacataaaatacatcraaataacctccrccaaatcaaaataccac

SEQ ID NO: 30805 - DNA, 50 bp, synthetic construct
  source 1..50: mol_type = other DNA
aaacaaaattctcaaactccactacatattcacataccctaaataacctc

SEQ ID NO: 30806 - DNA, 50 bp, synthetic construct
  source 1..50: mol_type = other DNA
taatcraaacatccaaaactcttaaaattctaaaaccttattcctctccc

SEQ ID NO: 30807 - DNA, 50 bp, synthetic construct
  source 1..50: mol_type = other DNA
aaacatccaaaactcttaaaattctaaaaccttattcctctcccraaatc

SEQ ID NO: 30808 - DNA, 50 bp, synthetic construct
  source 1..50: mol_type = other DNA
caaacaaaaacaataactataaacaaaaccaaataaccctacccaaaaac

SEQ ID NO: 30809 - DNA, 50 bp, synthetic construct
  source 1..50: mol_type = other DNA
ttacatcaaataaacaaaaactaacaactaactaaaacttactactcaac

SEQ ID NO: 30810 - DNA, 50 bp, synthetic construct
  source 1..50: mol_type = other DNA
tataactaaaaaataaaattaaaacctctacccattacaaaaatacaatc

SEQ ID NO: 30811 - DNA, 50 bp, synthetic construct
  source 1..50: mol_type = other DNA
aacctataacaatatacaactctaaacrttataataaattctcttacctc

SEQ ID NO: 30812 - DNA, 50 bp, synthetic construct
  source 1..50: mol_type = other DNA
ttatcttaaaaaataataaactcccaaacattacaaatatccaaacaaac

SEQ ID NO: 30813 - DNA, 50 bp, synthetic construct
  source 1..50: mol_type = other DNA
cracaaaaaacaaataactttaacctccacctataaaacttactaaaatc

SEQ ID NO: 30814 - DNA, 50 bp, synthetic construct
  source 1..50: mol_type = other DNA
tccacctataaaacttactaaaatcraccaaaaaaccccatacaaaacac

SEQ ID NO: 30815 - DNA, 50 bp, synthetic construct
  source 1..50: mol_type = other DNA
aactaaaactaaatactaaatacaaaatcctcctaaactcatcacaaaac

SEQ ID NO: 30816 - DNA, 50 bp, synthetic construct
  source 1..50: mol_type = other DNA
acttactaaccaaaaactcccaaaatctaaaaaaatccaaaaataaaaac

SEQ ID NO: 30817 - DNA, 50 bp, synthetic construct
  source 1..50: mol_type = other DNA
aataaaaacraaataatttctataaataaaacccctacctcccaccctcc

SEQ ID NO: 30818 - DNA, 50 bp, synthetic construct
  source 1..50: mol_type = other DNA
taaacatctactacatcccaaatatatttattaaataaatactacctaac

SEQ ID NO: 30819 - DNA, 50 bp, synthetic construct
  source 1..50: mol_type = other DNA
aaatcacaccataaaaaactatttaaactaaaaatcaaatctaaaccttc

SEQ ID NO: 30820 - DNA, 50 bp, synthetic construct
  source 1..50: mol_type = other DNA
aaacttataaaatataacaacctcataataataacttccatttattaaac

SEQ ID NO: 30821 - DNA, 50 bp, synthetic construct
  source 1..50: mol_type = other DNA
aataacttccatttattaaacrctaaccatataccaaataatttacatac

SEQ ID NO: 30822 - DNA, 50 bp, synthetic construct
  source 1..50: mol_type = other DNA
ctacaccctattatcaatcctcttatttttttttcttaaaacaaaatatc

SEQ ID NO: 30823 - DNA, 50 bp, synthetic construct
  source 1..50: mol_type = other DNA
caataacacaatcataactcactacaaccttaacctcctaaaactcaaac

SEQ ID NO: 30824 - DNA, 50 bp, synthetic construct
  source 1..50: mol_type = other DNA
tccrataaatctaataccaaacttttccttaaccaaatcctacaaaaaac

SEQ ID NO: 30825 - DNA, 50 bp, synthetic construct
  source 1..50: mol_type = other DNA
cccaacaaacccaatccacttaaaacctatataaaaaaaaccrtaattcc

SEQ ID NO: 30826 - DNA, 50 bp, synthetic construct
  source 1..50: mol_type = other DNA
aatcctatcccaacaaacccaatccacttaaaacctatataaaaaaaacc

SEQ ID NO: 30827 - DNA, 50 bp, synthetic construct
  source 1..50: mol_type = other DNA
tttccacacaaactccaaataaactaaatttattaaaacaaaatctaaac

SEQ ID NO: 30828 - DNA, 50 bp, synthetic construct
  source 1..50: mol_type = other DNA
ractaaccttcactaatcctataaatccctacctaaaatccacrtcctac

SEQ ID NO: 30829 - DNA, 50 bp, synthetic construct
  source 1..50: mol_type = other DNA
ataaaacractaaccttcactaatcctataaatccctacctaaaatccac

SEQ ID NO: 30830 - DNA, 50 bp, synthetic construct
  source 1..50: mol_type = other DNA
rcaaaacrtaaacctcaaacaaaaacccataaaaccaataaaaaccaacc

SEQ ID NO: 30831 - DNA, 50 bp, synthetic construct
  source 1..50: mol_type = other DNA
ccatctcccaatcctatctacctctaaaatacccaaaaaactcccaaaac

SEQ ID NO: 30832 - DNA, 50 bp, synthetic construct
  source 1..50: mol_type = other DNA
caaatttaataacttaaaacaacacccatttattaactcacaattaacac

SEQ ID NO: 30833 - DNA, 50 bp, synthetic construct
  source 1..50: mol_type = other DNA
cttctactaactaaaaaacaactcttaccctctctatacaattctactac

SEQ ID NO: 30834 - DNA, 50 bp, synthetic construct
  source 1..50: mol_type = other DNA
aaaatacaaaactataaaatcctcctaacaacctaaactatatataaaac

SEQ ID NO: 30835 - DNA, 50 bp, synthetic construct
  source 1..50: mol_type = other DNA
acaaaactataaaatcctcctaacaacctaaactatatataaaacrtaac

SEQ ID NO: 30836 - DNA, 50 bp, synthetic construct
  source 1..50: mol_type = other DNA
taaaaaaactactttaaaactcaattttattacttataaaataaaaccac

SEQ ID NO: 30837 - DNA, 50 bp, synthetic construct
  source 1..50: mol_type = other DNA
taaaaatataattcrctcataacatcttattacaaaaacaaaaaacttcc

SEQ ID NO: 30838 - DNA, 50 bp, synthetic construct
  source 1..50: mol_type = other DNA
rtaaaaactctccctaaaaatcaaaataaaacaaaaaactccaaaaaccc

SEQ ID NO: 30839 - DNA, 50 bp, synthetic construct
  source 1..50: mol_type = other DNA
aaacaactcaaaaaaaactacaaaaacaccctccacaacraaaaaaatac

SEQ ID NO: 30840 - DNA, 50 bp, synthetic construct
  source 1..50: mol_type = other DNA
aacataactaaaaaaaactccctataatcaaatcacccccatccccaaac

SEQ ID NO: 30841 - DNA, 50 bp, synthetic construct
  source 1..50: mol_type = other DNA
aaccataccattaattaacaataaaacaaaaacttaaacccatatctacc

SEQ ID NO: 30842 - DNA, 50 bp, synthetic construct
  source 1..50: mol_type = other DNA
atcaaccctacttctataataactaaccacctcctcttctaaatttccac

SEQ ID NO: 30843 - DNA, 50 bp, synthetic construct
  source 1..50: mol_type = other DNA
aatttccacrtaaaaccccaccctaattcttcaatttttcctaaaatctc

SEQ ID NO: 30844 - DNA, 50 bp, synthetic construct
  source 1..50: mol_type = other DNA
aaaaacccatacacccataccttcctaaccracaaaaaaaataccataac

SEQ ID NO: 30845 - DNA, 50 bp, synthetic construct
  source 1..50: mol_type = other DNA
ccatatttatataaatatacaaaaacccatacacccataccttcctaacc

SEQ ID NO: 30846 - DNA, 50 bp, synthetic construct
  source 1..50: mol_type = other DNA
acttcctcaaataaaaaattcaatatttatctacrattaatcaaaaaccc

SEQ ID NO: 30847 - DNA, 50 bp, synthetic construct
  source 1..50: mol_type = other DNA
ccaaccctaccaaaaaacttcctcaaataaaaaattcaatatttatctac

SEQ ID NO: 30848 - DNA, 50 bp, synthetic construct
  source 1..50: mol_type = other DNA
aaacacacacacacatacacacacatacatacatacacacaaacatacac

SEQ ID NO: 30849 - DNA, 50 bp, synthetic construct
  source 1..50: mol_type = other DNA
tttcctctctacaaaaaatcaaatcaataatttaactattattattaacc

SEQ ID NO: 30850 - DNA, 50 bp, synthetic construct
  source 1..50: mol_type = other DNA
taacattactctccctttctttaaaaccttaactacctatcctaataacc

SEQ ID NO: 30851 - DNA, 50 bp, synthetic construct
  source 1..50: mol_type = other DNA
accctaaacttaaataatactaaaaacaaaaaacaacactcttctaacac

SEQ ID NO: 30852 - DNA, 50 bp, synthetic construct
  source 1..50: mol_type = other DNA
acaattaaatcattaacctctattatctaaacctccrtaaaaaaacaacc

SEQ ID NO: 30853 - DNA, 50 bp, synthetic construct
  source 1..50: mol_type = other DNA
ctaaaatttcaattcccataaaaacracatctatttacaaaaatacttac

SEQ ID NO: 30854 - DNA, 50 bp, synthetic construct
  source 1..50: mol_type = other DNA
aattcccataaaaacracatctatttacaaaaatacttacrtcaaaaccc

SEQ ID NO: 30855 - DNA, 50 bp, synthetic construct
  source 1..50: mol_type = other DNA
aaaaaccaatactcaacraaataaaactctaaacatattaatacttacac

SEQ ID NO: 30856 - DNA, 50 bp, synthetic construct
  source 1..50: mol_type = other DNA
cttactataaataccttatctaaacaaaatctaaaaaaccaatactcaac

SEQ ID NO: 30857 - DNA, 50 bp, synthetic construct
  source 1..50: mol_type = other DNA
actccccaactatacaataaaattactaaaccaaatcatttctacccatc

SEQ ID NO: 30858 - DNA, 50 bp, synthetic construct
  source 1..50: mol_type = other DNA
aaaacaccctctaaacctaaaaaacaaattaaaccattcaatctttacac

SEQ ID NO: 30859 - DNA, 50 bp, synthetic construct
  source 1..50: mol_type = other DNA
ccacataatataacctccaaattctcatctctaaataaataaacatctcc

SEQ ID NO: 30860 - DNA, 50 bp, synthetic construct
  source 1..50: mol_type = other DNA
aataaatataaccttatttttatatattattcactaaccccaaaaacttc

SEQ ID NO: 30861 - DNA, 50 bp, synthetic construct
  source 1..50: mol_type = other DNA
craactcctctctttatatctatacataacccaattcaaactcctctacc

SEQ ID NO: 30862 - DNA, 50 bp, synthetic construct
  source 1..50: mol_type = other DNA
actactccaaactaaacraatctcaactaatctcrtacraaatcaaaaac

SEQ ID NO: 30863 - DNA, 50 bp, synthetic construct
  source 1..50: mol_type = other DNA
tttctataaaaaactactccaaactaaacraatctcaactaatctcrtac

SEQ ID NO: 30864 - DNA, 50 bp, synthetic construct
  source 1..50: mol_type = other DNA
cccttttctataaaaaactactccaaactaaacraatctcaactaatctc

SEQ ID NO: 30865 - DNA, 50 bp, synthetic construct
  source 1..50: mol_type = other DNA
aaaatacacatcctaacrtttctaatttcrcacraaatcaactaaaattc

SEQ ID NO: 30866 - DNA, 50 bp, synthetic construct
  source 1..50: mol_type = other DNA
tttattctccttaaaatttctctaaaatctcaaaccaaaaacacataacc

SEQ ID NO: 30867 - DNA, 50 bp, synthetic construct
  source 1..50: mol_type = other DNA
accaacaacacatatataaatttttctaaacattttacatatataaattc

SEQ ID NO: 30868 - DNA, 50 bp, synthetic construct
  source 1..50: mol_type = other DNA
aaacrctcaaacttccaaaacaaatttaaccaatatccctacattaccac

SEQ ID NO: 30869 - DNA, 50 bp, synthetic construct
  source 1..50: mol_type = other DNA
actaaaccaatcccccaatcattttctaaataataaaactaaaacccaac

SEQ ID NO: 30870 - DNA, 50 bp, synthetic construct
  source 1..50: mol_type = other DNA
ccaacaatatcaattccctcraactactatatctcaaaaattctaacctc

SEQ ID NO: 30871 - DNA, 50 bp, synthetic construct
  source 1..50: mol_type = other DNA
aatcaaaccaacactaaaccraaatcaaaacttctaaaacacaacaattc

SEQ ID NO: 30872 - DNA, 50 bp, synthetic construct
  source 1..50: mol_type = other DNA
tccaattattctaaaaaaatatatctacaactaaaaaaacrcatttatac

SEQ ID NO: 30873 - DNA, 50 bp, synthetic construct
  source 1..50: mol_type = other DNA
accraaaattattttcccatctataacctcattaaaatatccacaccaac

SEQ ID NO: 30874 - DNA, 50 bp, synthetic construct
  source 1..50: mol_type = other DNA
ttttcccatctataacctcattaaaatatccacaccaacraactccacac

SEQ ID NO: 30875 - DNA, 50 bp, synthetic construct
  source 1..50: mol_type = other DNA
atacrtaaacrtataaccaaaaaacaataccaatatacrtatatatcccc

SEQ ID NO: 30876 - DNA, 50 bp, synthetic construct
  source 1..50: mol_type = other DNA
aactacractatatacrtaaacrtataaccaaaaaacaataccaatatac

SEQ ID NO: 30877 - DNA, 50 bp, synthetic construct
  source 1..50: mol_type = other DNA
aacaataacattaaatattaaaaaacacaactacractatatacrtaaac

SEQ ID NO: 30878 - DNA, 50 bp, synthetic construct
  source 1..50: mol_type = other DNA
rtttacaacaataacattaaatattaaaaaacacaactacractatatac

SEQ ID NO: 30879 - DNA, 50 bp, synthetic construct
  source 1..50: mol_type = other DNA
rcacacaatcrcaactataccttttaatatttaataccattactacaaac

SEQ ID NO: 30880 - DNA, 50 bp, synthetic construct
  source 1..50: mol_type = other DNA
cacaatcrcaactataccttttaatatttaataccattactacaaacrcc

SEQ ID NO: 30881 - DNA, 50 bp, synthetic construct
  source 1..50: mol_type = other DNA
rcaactataccttttaatatttaataccattactacaaacrccrctccac

SEQ ID NO: 30882 - DNA, 50 bp, synthetic construct
  source 1..50: mol_type = other DNA
aaaaaatttttaacaaaatttatcaactaatctccaaaccraaaattaac

SEQ ID NO: 30883 - DNA, 50 bp, synthetic construct
  source 1..50: mol_type = other DNA
aaaaataaaactacctaataataacacccattcrctcatctcrcaaacac

SEQ ID NO: 30884 - DNA, 50 bp, synthetic construct
  source 1..50: mol_type = other DNA
acctcrttaaaaataaaactacctaataataacacccattcrctcatctc

SEQ ID NO: 30885 - DNA, 50 bp, synthetic construct
  source 1..50: mol_type = other DNA
ataaaaaaaacctcrttaaaaataaaactacctaataataacacccattc

SEQ ID NO: 30886 - DNA, 50 bp, synthetic construct
  source 1..50: mol_type = other DNA
cttacraaataaacraataaatatcattaccaaacaactccattttcaac

SEQ ID NO: 30887 - DNA, 50 bp, synthetic construct
  source 1..50: mol_type = other DNA
aatacrtcaaaaaaaatctaaaaaacccaaaactacaataactctaaacc

SEQ ID NO: 30888 - DNA, 50 bp, synthetic construct
  source 1..50: mol_type = other DNA
ttaacrcattataaattaaactaacctactctctaacttacaaaaatcac

SEQ ID NO: 30889 - DNA, 50 bp, synthetic construct
  source 1..50: mol_type = other DNA
aaaaaaaacaaacaaaaacccccacacaaaccaaatatccrtatcatttc

SEQ ID NO: 30890 - DNA, 50 bp, synthetic construct
  source 1..50: mol_type = other DNA
taacttacaaaaatcacractctaaataacaccaaaacacraaataacac

SEQ ID NO: 30891 - DNA, 50 bp, synthetic construct
  source 1..50: mol_type = other DNA
ctcctccacaatcaatatccacactataatttaaatatatatatctttcc

SEQ ID NO: 30892 - DNA, 50 bp, synthetic construct
  source 1..50: mol_type = other DNA
acctaactaattccctcctactcttttattactataaaaacattaatccc

SEQ ID NO: 30893 - DNA, 50 bp, synthetic construct
  source 1..50: mol_type = other DNA
tatcaccaaacraactcaaaacattcctaaacaactttataattctaaac

SEQ ID NO: 30894 - DNA, 50 bp, synthetic construct
  source 1..50: mol_type = other DNA
actcaaaacattcctaaacaactttataattctaaacrtctctaaaaaac

SEQ ID NO: 30895 - DNA, 50 bp, synthetic construct
  source 1..50: mol_type = other DNA
taacaaataaacrtatctttattttacaatcccccacaccccacctaacc

SEQ ID NO: 30896 - DNA, 50 bp, synthetic construct
  source 1..50: mol_type = other DNA
ttctttatcacaaaaactaaaaacctctcctcatattctactttcrattc

SEQ ID NO: 30897 - DNA, 50 bp, synthetic construct
  source 1..50: mol_type = other DNA
ctttattctttatcacaaaaactaaaaacctctcctcatattctactttc

SEQ ID NO: 30898 - DNA, 50 bp, synthetic construct
  source 1..50: mol_type = other DNA
ctaaatacatatcatccccactctaaaacccaaaatataactttaatcac

SEQ ID NO: 30899 - DNA, 50 bp, synthetic construct
  source 1..50: mol_type = other DNA
ctaacctacaaaaaacaccacactctcccctattaaaaacctaaaaaaac

SEQ ID NO: 30900 - DNA, 50 bp, synthetic construct
  source 1..50: mol_type = other DNA
acctacaaaaaacaccacactctcccctattaaaaacctaaaaaaacrac

SEQ ID NO: 30901 - DNA, 50 bp, synthetic construct
  source 1..50: mol_type = other DNA
ctcacraaactcataattctatcaccaaaaaccaaattcaacaactcaac

SEQ ID NO: 30902 - DNA, 50 bp, synthetic construct
  source 1..50: mol_type = other DNA
acraaactcataattctatcaccaaaaaccaaattcaacaactcaacrac

SEQ ID NO: 30903 - DNA, 50 bp, synthetic construct
  source 1..50: mol_type = other DNA
acaactcaacracrataaatttctatccatttatactaaaaaaattcacc

SEQ ID NO: 30904 - DNA, 50 bp, synthetic construct
  source 1..50: mol_type = other DNA
aacaaaataatatccaaaaaccttttctttaaccattactaacctaaaac

SEQ ID NO: 30905 - DNA, 50 bp, synthetic construct
  source 1..50: mol_type = other DNA
rataaaataataacaaaatcrccaaatccaaaataattttctcaacacac

SEQ ID NO: 30906 - DNA, 50 bp, synthetic construct
  source 1..50: mol_type = other DNA
ataaaaaaactaaacatttactaaaaaatacaaaacccaaacataaaccc

SEQ ID NO: 30907 - DNA, 50 bp, synthetic construct
  source 1..50: mol_type = other DNA
tttccaaataaaattctctaccaaaaaaaactctattcccttctccacac

SEQ ID NO: 30908 - DNA, 50 bp, synthetic construct
  source 1..50: mol_type = other DNA
caaacaataactttctcrccttatctcctacaaaaaaaccaataaaaaac

SEQ ID NO: 30909 - DNA, 50 bp, synthetic construct
  source 1..50: mol_type = other DNA
ctactttctttaataacaaaaacttatccctaccaaacaataactttctc

SEQ ID NO: 30910 - DNA, 50 bp, synthetic construct
  source 1..50: mol_type = other DNA
aaaaaaacatcaaaaccaaattatacctttaaacacctaacctactaccc

SEQ ID NO: 30911 - DNA, 50 bp, synthetic construct
  source 1..50: mol_type = other DNA
attaataaatctaaataccccctcccactccacctaatataaaataaaac

SEQ ID NO: 30912 - DNA, 50 bp, synthetic construct
  source 1..50: mol_type = other DNA
aaaaatactcctaaaccaataactaccaacaccaaaacaaaactaaaaac

SEQ ID NO: 30913 - DNA, 50 bp, synthetic construct
  source 1..50: mol_type = other DNA
tactaataaccactaacccaaaaacattttcctaacatccaaataaatac

SEQ ID NO: 30914 - DNA, 50 bp, synthetic construct
  source 1..50: mol_type = other DNA
cactaacccaaaaacattttcctaacatccaaataaatacrcaaccacac

SEQ ID NO: 30915 - DNA, 50 bp, synthetic construct
  source 1..50: mol_type = other DNA
tcaataaaaaaatattataaaactaataaaaccctaaaacaatctccatc

SEQ ID NO: 30916 - DNA, 50 bp, synthetic construct
  source 1..50: mol_type = other DNA
cccctcactaaaataacattcattcaacactaactattaatccactaaac

SEQ ID NO: 30917 - DNA, 50 bp, synthetic construct
  source 1..50: mol_type = other DNA
ttctaaaaatcaaaaaacttcctaaaatctaaacaactaataaaaacccc

SEQ ID NO: 30918 - DNA, 50 bp, synthetic construct
  source 1..50: mol_type = other DNA
attaacaaaataatttacctaaatattttaacttacctacaaatcaaaac

SEQ ID NO: 30919 - DNA, 50 bp, synthetic construct
  source 1..50: mol_type = other DNA
ctaaatattttaacttacctacaaatcaaaacracaataaccctcttccc

SEQ ID NO: 30920 - DNA, 50 bp, synthetic construct
  source 1..50: mol_type = other DNA
aacrctattaaacttaaaactaccaaaaacctaccttcacttataacatc

SEQ ID NO: 30921 - DNA, 50 bp, synthetic construct
  source 1..50: mol_type = other DNA
tacrataccacaaataaaaacaaacccttaacaactccaaactcaataac

SEQ ID NO: 30922 - DNA, 50 bp, synthetic construct
  source 1..50: mol_type = other DNA
aataaaaacaaacccttaacaactccaaactcaataacrccaaaaaatac

SEQ ID NO: 30923 - DNA, 50 bp, synthetic construct
  source 1..50: mol_type = other DNA
catacaaaaaaacttccaacaaataatactataaccaaaaacacraaaac

SEQ ID NO: 30924 - DNA, 50 bp, synthetic construct
  source 1..50: mol_type = other DNA
aaataccatacaaaaaaacttccaacaaataatactataaccaaaaacac

SEQ ID NO: 30925 - DNA, 50 bp, synthetic construct
  source 1..50: mol_type = other DNA
aaaaacctccctacataacacccaaattacaattaattaatatattcccc

SEQ ID NO: 30926 - DNA, 50 bp, synthetic construct
  source 1..50: mol_type = other DNA
ctttaaacaaatatatctaacaataatatacaaaactatttactcaaaac

SEQ ID NO: 30927 - DNA, 50 bp, synthetic construct
  source 1..50: mol_type = other DNA
craaaaactaaactaccaaaccaaacatcaaaaacttcatcctcaaaacc

SEQ ID NO: 30928 - DNA, 50 bp, synthetic construct
  source 1..50: mol_type = other DNA
craccctaaaaataaaacccctaatacttaacctaacaatccaatcctcc

SEQ ID NO: 30929 - DNA, 50 bp, synthetic construct
  source 1..50: mol_type = other DNA
actcaaaaaaaacttcctaactacattttctattctaaaaacaaacaacc

SEQ ID NO: 30930 - DNA, 50 bp, synthetic construct
  source 1..50: mol_type = other DNA
acttcctaactacattttctattctaaaaacaaacaaccrctatcccctc

SEQ ID NO: 30931 - DNA, 50 bp, synthetic construct
  source 1..50: mol_type = other DNA
aactctattacaacaaaatccaatcrcaacaaaactacaaatacccraac

SEQ ID NO: 30932 - DNA, 50 bp, synthetic construct
  source 1..50: mol_type = other DNA
catttataatcctactacrattaaaccctattacaacaaaactccccacc

SEQ ID NO: 30933 - DNA, 50 bp, synthetic construct
  source 1..50: mol_type = other DNA
cattcccctttttcactaaattaccccttaactcctaaatttaaatccac

SEQ ID NO: 30934 - DNA, 50 bp, synthetic construct
  source 1..50: mol_type = other DNA
aaaacctcraaactcracctctaaataaatcaataaaaaacraataaaac

SEQ ID NO: 30935 - DNA, 50 bp, synthetic construct
  source 1..50: mol_type = other DNA
aatttctcatttctccctaacaatcaaaacraactttctctaaaataacc

SEQ ID NO: 30936 - DNA, 50 bp, synthetic construct
  source 1..50: mol_type = other DNA
aaaaacaaaaactatatttctattaaactctattaataaccccttctccc

SEQ ID NO: 30937 - DNA, 50 bp, synthetic construct
  source 1..50: mol_type = other DNA
acaaaaactatatttctattaaactctattaataaccccttctcccraac

SEQ ID NO: 30938 - DNA, 50 bp, synthetic construct
  source 1..50: mol_type = other DNA
ctcatccacctcctccaaaacacctaaaataaaaaatcacaaacacacac

SEQ ID NO: 30939 - DNA, 50 bp, synthetic construct
  source 1..50: mol_type = other DNA
aaccaataattttctttcctaaataaacaatctctcatattaaaaactcc

SEQ ID NO: 30940 - DNA, 50 bp, synthetic construct
  source 1..50: mol_type = other DNA
tttccaaatcctccaaactacccaaaaaatcacaattacccaatcaactc

SEQ ID NO: 30941 - DNA, 50 bp, synthetic construct
  source 1..50: mol_type = other DNA
aaataaccactttaaccctttcacaactatttactaaatccaaatccaac

SEQ ID NO: 30942 - DNA, 50 bp, synthetic construct
  source 1..50: mol_type = other DNA
aaccctttcacaactatttactaaatccaaatccaacrttcaaaacaaac

SEQ ID NO: 30943 - DNA, 50 bp, synthetic construct
  source 1..50: mol_type = other DNA
ttaactttaaaaaataaaaattccctaatactatcctcacacccctcctc

SEQ ID NO: 30944 - DNA, 50 bp, synthetic construct
  source 1..50: mol_type = other DNA
atataaaaacaacaccaaaaaaccttcactttttaaaaccaaccctttac

SEQ ID NO: 30945 - DNA, 50 bp, synthetic construct
  source 1..50: mol_type = other DNA
caaaaaaccttcactttttaaaaccaaccctttacractttaaaaccrcc

SEQ ID NO: 30946 - DNA, 50 bp, synthetic construct
  source 1..50: mol_type = other DNA
tcttaacctcaacctaatctaactccacaactaaaatttataaaaaaaac

SEQ ID NO: 30947 - DNA, 50 bp, synthetic construct
  source 1..50: mol_type = other DNA
cccacctactttaatctaactttactattacctcttacaaattaaaaaac

SEQ ID NO: 30948 - DNA, 50 bp, synthetic construct
  source 1..50: mol_type = other DNA
aatattcatatacctatccacttaaaatcataaaaaaatacaaataaaac

SEQ ID NO: 30949 - DNA, 50 bp, synthetic construct
  source 1..50: mol_type = other DNA
tccaatacccaccaaatcaaaactaatttctccaaaaaacacccctatac

SEQ ID NO: 30950 - DNA, 50 bp, synthetic construct
  source 1..50: mol_type = other DNA
attcttaataaacacaaatactaaaatccttaacaaaatattaactaacc

SEQ ID NO: 30951 - DNA, 50 bp, synthetic construct
  source 1..50: mol_type = other DNA
aaaaacaaaatttcactataatctcratctcctaacttcataatctaccc

SEQ ID NO: 30952 - DNA, 50 bp, synthetic construct
  source 1..50: mol_type = other DNA
aaacaacaaaattaaaatattactttaaaaattactaacaaaaaccaaac

SEQ ID NO: 30953 - DNA, 50 bp, synthetic construct
  source 1..50: mol_type = other DNA
cataaccttaaattatctatttatactctttcaaactttttaatataaac

SEQ ID NO: 30954 - DNA, 50 bp, synthetic construct
  source 1..50: mol_type = other DNA
caaactttttaatataaacrtttaaaaccataaactttcctcttaacacc

SEQ ID NO: 30955 - DNA, 50 bp, synthetic construct
  source 1..50: mol_type = other DNA
accatatcccaaaaattttaataaattatatcattattatcactcaattc

SEQ ID NO: 30956 - DNA, 50 bp, synthetic construct
  source 1..50: mol_type = other DNA
aaaatttaaattatatcaaacactatctcaaaccataatacaataaaacc

SEQ ID NO: 30957 - DNA, 50 bp, synthetic construct
  source 1..50: mol_type = other DNA
acttacaaattattcaacttaaaccaaattacttaactacataaaatctc

SEQ ID NO: 30958 - DNA, 50 bp, synthetic construct
  source 1..50: mol_type = other DNA
ctaatttcctcctcaaatacrtcactaacttctctaactacctaatttcc

SEQ ID NO: 30959 - DNA, 50 bp, synthetic construct
  source 1..50: mol_type = other DNA
aaaaccaaaaatcaaaacacttcaaaaacccaatactaacaaaatacccc

SEQ ID NO: 30960 - DNA, 50 bp, synthetic construct
  source 1..50: mol_type = other DNA
actacttttacttcctaatcctcaaatctcactctacatccrctaacaac

SEQ ID NO: 30961 - DNA, 50 bp, synthetic construct
  source 1..50: mol_type = other DNA
raaaaaaatactacttttacttcctaatcctcaaatctcactctacatcc

SEQ ID NO: 30962 - DNA, 50 bp, synthetic construct
  source 1..50: mol_type = other DNA
ccraataaattaaacaattactatcccaaataaaaaatatcatatcaccc

SEQ ID NO: 30963 - DNA, 50 bp, synthetic construct
  source 1..50: mol_type = other DNA
taaacaattactatcccaaataaaaaatatcatatcacccraacaccatc

SEQ ID NO: 30964 - DNA, 50 bp, synthetic construct
  source 1..50: mol_type = other DNA
ttctaacccrctcctaaatctaataatatccaaataacrtaatattttcc

SEQ ID NO: 30965 - DNA, 50 bp, synthetic construct
  source 1..50: mol_type = other DNA
atcacrtcacctaaacaccatcaaactcaaaaacraattaaaaaacaacc

SEQ ID NO: 30966 - DNA, 50 bp, synthetic construct
  source 1..50: mol_type = other DNA
aacacratcactccctcttaaccaataaacatcaatttcctaacacaaac

SEQ ID NO: 30967 - DNA, 50 bp, synthetic construct
  source 1..50: mol_type = other DNA
taatacaattactaatcaaaaaactatcaatatctaataaaccttattac

SEQ ID NO: 30968 - DNA, 50 bp, synthetic construct
  source 1..50: mol_type = other DNA
taccaaaattaaatttcaaacccaaaccaaactatttcaaaactctactc

SEQ ID NO: 30969 - DNA, 50 bp, synthetic construct
  source 1..50: mol_type = other DNA
rctacctaaaccaataaaaaaaccttctacccraataaaaaataaaccac

SEQ ID NO: 30970 - DNA, 50 bp, synthetic construct
  source 1..50: mol_type = other DNA
ttactaataaaatacattctccaaaacaaaaaaaacracctcaaaaaacc

SEQ ID NO: 30971 - DNA, 50 bp, synthetic construct
  source 1..50: mol_type = other DNA
aaaaacaaaaccaatcccccraaattaatcaaaacacctataaatacccc

SEQ ID NO: 30972 - DNA, 50 bp, synthetic construct
  source 1..50: mol_type = other DNA
actaacaactcccctaaaacraaatattcacaaatactttaaccaatttc

SEQ ID NO: 30973 - DNA, 50 bp, synthetic construct
  source 1..50: mol_type = other DNA
taaaaccaaaaccaaaaaccrattaaaacctccttaaaacctaacaaaac

SEQ ID NO: 30974 - DNA, 50 bp, synthetic construct
  source 1..50: mol_type = other DNA
ccraaaattactaaaattcaaccttaaccrtaaaaccaaaaccaaaaacc

SEQ ID NO: 30975 - DNA, 50 bp, synthetic construct
  source 1..50: mol_type = other DNA
ctaacacaaaataaacctaaatttaacractataaaaaaccraaaccrcc

SEQ ID NO: 30976 - DNA, 50 bp, synthetic construct
  source 1..50: mol_type = other DNA
aatctacacttcactaaacctaaaataaaaacrtaaaaaacttacttcrc

SEQ ID NO: 30977 - DNA, 50 bp, synthetic construct
  source 1..50: mol_type = other DNA
ctacacttcactaaacctaaaataaaaacrtaaaaaacttacttcrcrac

SEQ ID NO: 30978 - DNA, 50 bp, synthetic construct
  source 1..50: mol_type = other DNA
attacaccctaaaaacrcttaaaaaaactacaaaactcrtactaattttc

SEQ ID NO: 30979 - DNA, 50 bp, synthetic construct
  source 1..50: mol_type = other DNA
aaacctaaaacrattacaccctaaaaacrcttaaaaaaactacaaaactc

SEQ ID NO: 30980 - DNA, 50 bp, synthetic construct
  source 1..50: mol_type = other DNA
aactctccraaccttaacttaaaaacctaaaacrattacaccctaaaaac

SEQ ID NO: 30981 - DNA, 50 bp, synthetic construct
  source 1..50: mol_type = other DNA
aaaatcaacacraattctacaatttttccaaacrcttttaaaatataatc

SEQ ID NO: 30982 - DNA, 50 bp, synthetic construct
  source 1..50: mol_type = other DNA
caacaactacccttacaaataaacatacaaacacaaaataaaaatcattc

SEQ ID NO: 30983 - DNA, 50 bp, synthetic construct
  source 1..50: mol_type = other DNA
ataataaaaccccrtatctactaaaaacacacacacaaaaaaaattaacc

SEQ ID NO: 30984 - DNA, 50 bp, synthetic construct
  source 1..50: mol_type = other DNA
aaatttacaaaacaaatcacctttaaaaactaataacacaaaccraacac

SEQ ID NO: 30985 - DNA, 50 bp, synthetic construct
  source 1..50: mol_type = other DNA
ctaaataaatttacaaaacaaatcacctttaaaaactaataacacaaacc

SEQ ID NO: 30986 - DNA, 50 bp, synthetic construct
  source 1..50: mol_type = other DNA
aatttctaaaatcttcaattattaaataatatttactataatctcttccc

SEQ ID NO: 30987 - DNA, 50 bp, synthetic construct
  source 1..50: mol_type = other DNA
aaatcttcaattattaaataatatttactataatctcttcccratccacc

SEQ ID NO: 30988 - DNA, 50 bp, synthetic construct
  source 1..50: mol_type = other DNA
aatattaacctcctccaaaactctaaccttatctaaataattaaccaaac

SEQ ID NO: 30989 - DNA, 50 bp, synthetic construct
  source 1..50: mol_type = other DNA
caccaaaacactaattttatcaccttctctttatcataactaatatattc

SEQ ID NO: 30990 - DNA, 50 bp, synthetic construct
  source 1..50: mol_type = other DNA
tatataaccccactataactaccctaatctaaactttcaccacttttctc

SEQ ID NO: 30991 - DNA, 50 bp, synthetic construct
  source 1..50: mol_type = other DNA
caaaattaatattcttaaaacaatactatcatcacttcatcaacatactc

SEQ ID NO: 30992 - DNA, 50 bp, synthetic construct
  source 1..50: mol_type = other DNA
catactcraacctcttataaataaattaaatcttctccataaccttaccc

SEQ ID NO: 30993 - DNA, 50 bp, synthetic construct
  source 1..50: mol_type = other DNA
ttctcttcataaaataattatataaccctaaacaaaatactcaactttcc

SEQ ID NO: 30994 - DNA, 50 bp, synthetic construct
  source 1..50: mol_type = other DNA
ttaaataccatctccttcataaaacttcccaccrttaatctataattcac

SEQ ID NO: 30995 - DNA, 50 bp, synthetic construct
  source 1..50: mol_type = other DNA
atacaacaaaaacaaaaacaccctcccttctctaaaaaaacttaaatatc

SEQ ID NO: 30996 - DNA, 50 bp, synthetic construct
  source 1..50: mol_type = other DNA
atacctctattcttactacacccaatactcattattctctaaatattttc

SEQ ID NO: 30997 - DNA, 50 bp, synthetic construct
  source 1..50: mol_type = other DNA
acraaattaccacataccraaaccttctaaaaaacraaaactacaaatac

SEQ ID NO: 30998 - DNA, 50 bp, synthetic construct
  source 1..50: mol_type = other DNA
aaaaccaaaaataccaaatactactaaacrtaaaaacccrattaaaaaac

SEQ ID NO: 30999 - DNA, 50 bp, synthetic construct
  source 1..50: mol_type = other DNA
cctaaaacracaaaaccaaaaataccaaatactactaaacrtaaaaaccc

SEQ ID NO: 31000 - DNA, 50 bp, synthetic construct
  source 1..50: mol_type = other DNA
taccatactaaactaaaactacaactctatctccaaaacctacataatac

SEQ ID NO: 31001 - DNA, 50 bp, synthetic construct
  source 1..50: mol_type = other DNA
catactaaactaaaactacaactctatctccaaaacctacataatacrcc

SEQ ID NO: 31002 - DNA, 50 bp, synthetic construct
  source 1..50: mol_type = other DNA
tatatcaacctcrtaatcaacaacccatttttaaatcccctctcactatc

SEQ ID NO: 31003 - DNA, 50 bp, synthetic construct
  source 1..50: mol_type = other DNA
atttcctaacactcttaaaaaaaatctaacacaataaactaaaaataaac

SEQ ID NO: 31004 - DNA, 50 bp, synthetic construct
  source 1..50: mol_type = other DNA
aactcaacctaaaactaatacctaactttaaaaaaattaatacraactac

SEQ ID NO: 31005 - DNA, 50 bp, synthetic construct
  source 1..50: mol_type = other DNA
caacaaaaactcaacctaaaactaatacctaactttaaaaaaattaatac

SEQ ID NO: 31006 - DNA, 50 bp, synthetic construct
  source 1..50: mol_type = other DNA
ctaaacccttactaataactctaactaaactaaaaacctcccctaatacc

SEQ ID NO: 31007 - DNA, 50 bp, synthetic construct
  source 1..50: mol_type = other DNA
craaaataaaaccataaactatccaatatctaaaaaatcttcccactacc

SEQ ID NO: 31008 - DNA, 50 bp, synthetic construct
  source 1..50: mol_type = other DNA
cacctaaactttaaacacacacaacttctaataatttctaaaaccccacc

SEQ ID NO: 31009 - DNA, 50 bp, synthetic construct
  source 1..50: mol_type = other DNA
tctaataatttctaaaaccccaccrtaaaataaacatactttctaaactc

SEQ ID NO: 31010 - DNA, 50 bp, synthetic construct
  source 1..50: mol_type = other DNA
taaactcrcttctctataactaatattaaactaaacccaaaaacacaacc

SEQ ID NO: 31011 - DNA, 50 bp, synthetic construct
  source 1..50: mol_type = other DNA
tttactctaacatctacattatctccaatctataaaccaaaactaaaccc

SEQ ID NO: 31012 - DNA, 50 bp, synthetic construct
  source 1..50: mol_type = other DNA
tttaatcttaaatataaaaacaattcacctcctcccttcatcacrtctcc

SEQ ID NO: 31013 - DNA, 50 bp, synthetic construct
  source 1..50: mol_type = other DNA
actcaatttaatcttaaatataaaaacaattcacctcctcccttcatcac

SEQ ID NO: 31014 - DNA, 50 bp, synthetic construct
  source 1..50: mol_type = other DNA
ctatataaataatactaaaatcaaaaactacccatatataatacaatcac

SEQ ID NO: 31015 - DNA, 50 bp, synthetic construct
  source 1..50: mol_type = other DNA
aaccttaatactaaacaattaaaaatacctccctaaccctacaaaaatac

SEQ ID NO: 31016 - DNA, 50 bp, synthetic construct
  source 1..50: mol_type = other DNA
ccataaacraaaacaactaaattctcatctaacaaaacatctatccactc

SEQ ID NO: 31017 - DNA, 50 bp, synthetic construct
  source 1..50: mol_type = other DNA
caacaaccraataaataaataccctactaaataaaaattcaactaccccc

SEQ ID NO: 31018 - DNA, 50 bp, synthetic construct
  source 1..50: mol_type = other DNA
aaacctaataaccraatttcccaattaaaacccaaccttttaaaaccatc

SEQ ID NO: 31019 - DNA, 50 bp, synthetic construct
  source 1..50: mol_type = other DNA
acctatccttaaaattcaacacatttaaaatacctaaccctaaattcaac

SEQ ID NO: 31020 - DNA, 50 bp, synthetic construct
  source 1..50: mol_type = other DNA
atcaaatactctaaatatactaaatcttaaaaacaaactttcaaccraac

SEQ ID NO: 31021 - DNA, 50 bp, synthetic construct
  source 1..50: mol_type = other DNA
aaatatactaaatcttaaaaacaaactttcaaccraacrtaataactcac

SEQ ID NO: 31022 - DNA, 50 bp, synthetic construct
  source 1..50: mol_type = other DNA
aaactaaaatttccctacttatccaattataaactatcctcratattacc

SEQ ID NO: 31023 - DNA, 50 bp, synthetic construct
  source 1..50: mol_type = other DNA
aacttccctaaactaaaatttccctacttatccaattataaactatcctc

SEQ ID NO: 31024 - DNA, 50 bp, synthetic construct
  source 1..50: mol_type = other DNA
attaaaaataaacccaccccaaaacctactaaaaacaaaacaaccaaacc

SEQ ID NO: 31025 - DNA, 50 bp, synthetic construct
  source 1..50: mol_type = other DNA
aaaaatatatcaaatctaaccccccaaccaaaattactaaaacaaaaaac

SEQ ID NO: 31026 - DNA, 50 bp, synthetic construct
  source 1..50: mol_type = other DNA
cctacccctcaaaatttaataaaaattccaaccataaaaataaatacatc

SEQ ID NO: 31027 - DNA, 50 bp, synthetic construct
  source 1..50: mol_type = other DNA
ctaaacaaccraaacaacaacttcctaaataaccaaacaacaatctcaac

SEQ ID NO: 31028 - DNA, 50 bp, synthetic construct
  source 1..50: mol_type = other DNA
acttcctaaataaccaaacaacaatctcaacrcctaaaaatcaaaactac

SEQ ID NO: 31029 - DNA, 50 bp, synthetic construct
  source 1..50: mol_type = other DNA
tcatcttcaccaaaaaaatcactcttataaatattttaattccataaatc

SEQ ID NO: 31030 - DNA, 50 bp, synthetic construct
  source 1..50: mol_type = other DNA
rtataaaaaaactcctaaaccraccaataaacaatcaataaatcccrcac

SEQ ID NO: 31031 - DNA, 50 bp, synthetic construct
  source 1..50: mol_type = other DNA
tctaacaacaaaacraaaaccataaacaaaaaaacatattcaaaccraac

SEQ ID NO: 31032 - DNA, 50 bp, synthetic construct
  source 1..50: mol_type = other DNA
catcacccrttacttaaacttcctatataaaaattatctaacaacaaaac

SEQ ID NO: 31033 - DNA, 50 bp, synthetic construct
  source 1..50: mol_type = other DNA
aactattcttacactctatatataaatatatattatacattacatcaccc

SEQ ID NO: 31034 - DNA, 50 bp, synthetic construct
  source 1..50: mol_type = other DNA
attctatacaattattcacaaaaatcttcctaaaacaaaatacacttaac

SEQ ID NO: 31035 - DNA, 50 bp, synthetic construct
  source 1..50: mol_type = other DNA
ccttcttcctttctctcaataatatacttaatacttatactatttactcc

SEQ ID NO: 31036 - DNA, 50 bp, synthetic construct
  source 1..50: mol_type = other DNA
caacccccrtcaccaattcaataacttaaaatcaatacaaaatctataac

SEQ ID NO: 31037 - DNA, 50 bp, synthetic construct
  source 1..50: mol_type = other DNA
cttatttaactccaaacccaatcaacaattattaaatattatttcaatcc

SEQ ID NO: 31038 - DNA, 50 bp, synthetic construct
  source 1..50: mol_type = other DNA
atttcatatcacccaataaacaaacaaaaaaactaaccaactaataaaac

SEQ ID NO: 31039 - DNA, 50 bp, synthetic construct
  source 1..50: mol_type = other DNA
tttttttaaaaaataaatctaactctatcatccatctaacatacaataac

SEQ ID NO: 31040 - DNA, 50 bp, synthetic construct
  source 1..50: mol_type = other DNA
ccrataacaataccrcctataaaaaaacacatacacaaaaaaactctacc

SEQ ID NO: 31041 - DNA, 50 bp, synthetic construct
  source 1..50: mol_type = other DNA
tcaaccaaaataacracaaaacccttctatatatatattctttcacaaac

SEQ ID NO: 31042 - DNA, 50 bp, synthetic construct
  source 1..50: mol_type = other DNA
acracaaaacccttctatatatatattctttcacaaacracactattacc

SEQ ID NO: 31043 - DNA, 50 bp, synthetic construct
  source 1..50: mol_type = other DNA
cccttctatatatatattctttcacaaacracactattaccraaaaaaac

SEQ ID NO: 31044 - DNA, 50 bp, synthetic construct
  source 1..50: mol_type = other DNA
ctactttctatttaatctatctaaaacaactaaccttttaaaaaaaaatc

SEQ ID NO: 31045 - DNA, 50 bp, synthetic construct
  source 1..50: mol_type = other DNA
atttccttccaaaaaatcaactacctcaaacaaaccaaacaaaaaacaac

SEQ ID NO: 31046 - DNA, 50 bp, synthetic construct
  source 1..50: mol_type = other DNA
aaaaacaacraattcttaccaacttcccctcctacttctacaactaatac

SEQ ID NO: 31047 - DNA, 50 bp, synthetic construct
  source 1..50: mol_type = other DNA
ttaaaaaaacrtaactccatataatcttactacccttcrttcaatcaaac

SEQ ID NO: 31048 - DNA, 50 bp, synthetic construct
  source 1..50: mol_type = other DNA
aaatataaaacccaaaatctacacaatatcaatatctcrcttaactaaac

SEQ ID NO: 31049 - DNA, 50 bp, synthetic construct
  source 1..50: mol_type = other DNA
taaaaccccrtctctaccaaaaatatacaaaattaactaaatataataac

SEQ ID NO: 31050 - DNA, 50 bp, synthetic construct
  source 1..50: mol_type = other DNA
aaaccccrtctctaccaaaaatatacaaaattaactaaatataataacrc

SEQ ID NO: 31051 - DNA, 50 bp, synthetic construct
  source 1..50: mol_type = other DNA
aaaaccacataaaaccaacracataaaataaaaactcrtaacattttctc

SEQ ID NO: 31052 - DNA, 50 bp, synthetic construct
  source 1..50: mol_type = other DNA
aactaacraattaaaaaccacataaaaccaacracataaaataaaaactc

SEQ ID NO: 31053 - DNA, 50 bp, synthetic construct
  source 1..50: mol_type = other DNA
ctatctacacaaaacttacraaaaaatattacraactcctaccccatatc

SEQ ID NO: 31054 - DNA, 50 bp, synthetic construct
  source 1..50: mol_type = other DNA
atattacraactcctaccccatatcrttaactctatataatttctaactc

SEQ ID NO: 31055 - DNA, 50 bp, synthetic construct
  source 1..50: mol_type = other DNA
cttactattatatttaccttaattaacaccaataataaatcaaaacctcc

SEQ ID NO: 31056 - DNA, 50 bp, synthetic construct
  source 1..50: mol_type = other DNA
atattaacaataaaaaattatccaaaaccaaaccaaacrcrataactcac

SEQ ID NO: 31057 - DNA, 50 bp, synthetic construct
  source 1..50: mol_type = other DNA
aaaaataactttcatattctataaacttcracctaaactctaataattcc

SEQ ID NO: 31058 - DNA, 50 bp, synthetic construct
  source 1..50: mol_type = other DNA
aaacctaaaaattcraaactacaataaactataattaaaccactacattc

SEQ ID NO: 31059 - DNA, 50 bp, synthetic construct
  source 1..50: mol_type = other DNA
ataactacactcaaaatttccatatatataatcaaacaccacataataac

SEQ ID NO: 31060 - DNA, 50 bp, synthetic construct
  source 1..50: mol_type = other DNA
cacaaacatataaatcatacattacattacaacattataataactacaac

SEQ ID NO: 31061 - DNA, 50 bp, synthetic construct
  source 1..50: mol_type = other DNA
acaaacccactacactaccaatcatataaaaatctaacacatacaattac

SEQ ID NO: 31062 - DNA, 50 bp, synthetic construct
  source 1..50: mol_type = other DNA
caataaactttatcatacaacctaaatatacaataaaactcaccatctac

SEQ ID NO: 31063 - DNA, 50 bp, synthetic construct
  source 1..50: mol_type = other DNA
atctacrtttatataaataccctctataataataccacaataacaaaatc

SEQ ID NO: 31064 - DNA, 50 bp, synthetic construct
  source 1..50: mol_type = other DNA
cttaaaactttatcaccatatatcattaaataacaaacractataattac

SEQ ID NO: 31065 - DNA, 50 bp, synthetic construct
  source 1..50: mol_type = other DNA
aaaaaaactatttacattatatccttacatattaaaccttccataccttc

SEQ ID NO: 31066 - DNA, 50 bp, synthetic construct
  source 1..50: mol_type = other DNA
tattttttattatctaaaattcaaaacctaaatcraacccaataactcac

SEQ ID NO: 31067 - DNA, 50 bp, synthetic construct
  source 1..50: mol_type = other DNA
cttaatttttattataaattatctttcattcttcttcccctaacattacc

SEQ ID NO: 31068 - DNA, 50 bp, synthetic construct
  source 1..50: mol_type = other DNA
aacaatatactaaacaaacattattttcaactctaaccttatattaactc

SEQ ID NO: 31069 - DNA, 50 bp, synthetic construct
  source 1..50: mol_type = other DNA
cacaaaaccaaaactaaaaacaatatctacccaacacactatcaataaac

SEQ ID NO: 31070 - DNA, 50 bp, synthetic construct
  source 1..50: mol_type = other DNA
ttcaccttattcttaactcttttccataacactatatataacttttaaac

SEQ ID NO: 31071 - DNA, 50 bp, synthetic construct
  source 1..50: mol_type = other DNA
aactcttttccataacactatatataacttttaaacraatccaaaaaaac

SEQ ID NO: 31072 - DNA, 50 bp, synthetic construct
  source 1..50: mol_type = other DNA
cataaaattctatatcatataaacccaaaacaactcctctttaaaacacc

SEQ ID NO: 31073 - DNA, 50 bp, synthetic construct
  source 1..50: mol_type = other DNA
ataacatatttcaactctatcttaatactatacattttccaaatacctac

SEQ ID NO: 31074 - DNA, 50 bp, synthetic construct
  source 1..50: mol_type = other DNA
cttatacaaacaaacatcaaataccatataatttatctctaaccctttac

SEQ ID NO: 31075 - DNA, 50 bp, synthetic construct
  source 1..50: mol_type = other DNA
aactatacaacttaataaaaataatacttcaaaattaactctacactatc

SEQ ID NO: 31076 - DNA, 50 bp, synthetic construct
  source 1..50: mol_type = other DNA
attcttctcaaaaatccaataacctaaaattaccaaataactttttaaac

SEQ ID NO: 31077 - DNA, 50 bp, synthetic construct
  source 1..50: mol_type = other DNA
atctattacrtttaattcaaacaaatccacaccttaaatcaaataaacrc

SEQ ID NO: 31078 - DNA, 50 bp, synthetic construct
  source 1..50: mol_type = other DNA
ttcatcttccaaaaactacaataacaaacaaatcatctcctaaataacrc

SEQ ID NO: 31079 - DNA, 50 bp, synthetic construct
  source 1..50: mol_type = other DNA
ctaaataacrcrcttacctaacccaaaatataaacttatttaaattaaac

SEQ ID NO: 31080 - DNA, 50 bp, synthetic construct
  source 1..50: mol_type = other DNA
acctctctccccaacattctattattatccatttacttatattatattac

SEQ ID NO: 31081 - DNA, 50 bp, synthetic construct
  source 1..50: mol_type = other DNA
aaaaattaaaacttcaaaaactctaaaattcrtactcttcccaaaacatc

SEQ ID NO: 31082 - DNA, 50 bp, synthetic construct
  source 1..50: mol_type = other DNA
ttccaactctaacattctttaacccacttttaacactatttatttaatac

SEQ ID NO: 31083 - DNA, 50 bp, synthetic construct
  source 1..50: mol_type = other DNA
tttaccaaaaaaccaaaatcaattcttttcttcttaatccctataatccc

SEQ ID NO: 31084 - DNA, 50 bp, synthetic construct
  source 1..50: mol_type = other DNA
aatcratatctcttttaatctttaaaattcttatacttttcattaatccc

SEQ ID NO: 31085 - DNA, 50 bp, synthetic construct
  source 1..50: mol_type = other DNA
aaacttcaaaaaacaaaaccttataaaaaatcaaaacaacaaatacraac

SEQ ID NO: 31086 - DNA, 50 bp, synthetic construct
  source 1..50: mol_type = other DNA
taattccttataaaaccctatttcttaaaactttactaataccccccacc

SEQ ID NO: 31087 - DNA, 50 bp, synthetic construct
  source 1..50: mol_type = other DNA
ctttatttaaattaaatcraccaccactaacaaaactaaaacrcactatc

SEQ ID NO: 31088 - DNA, 50 bp, synthetic construct
  source 1..50: mol_type = other DNA
ttaaattaaatcraccaccactaacaaaactaaaacrcactatcrtaatc

SEQ ID NO: 31089 - DNA, 50 bp, synthetic construct
  source 1..50: mol_type = other DNA
aacaaacccaaaataattattaatcraaacccctataaacttctaacctc

SEQ ID NO: 31090 - DNA, 50 bp, synthetic construct
  source 1..50: mol_type = other DNA
atcaaaaatccacaaaaaccccratcaataattatcctaaatttaccccc

SEQ ID NO: 31091 - DNA, 50 bp, synthetic construct
  source 1..50: mol_type = other DNA
atataaattcctaccrtacccatacaaacracaaaaaccctaactaaaac

SEQ ID NO: 31092 - DNA, 50 bp, synthetic construct
  source 1..50: mol_type = other DNA
aaataaattcracctaaacraatataaattcctaccrtacccatacaaac

SEQ ID NO: 31093 - DNA, 50 bp, synthetic construct
  source 1..50: mol_type = other DNA
cctaaaactcraacaaataaattcracctaaacraatataaattcctacc

SEQ ID NO: 31094 - DNA, 50 bp, synthetic construct
  source 1..50: mol_type = other DNA
tacaaataaccctatttattctttcttctctaaaaaaaacaatccctccc

SEQ ID NO: 31095 - DNA, 50 bp, synthetic construct
  source 1..50: mol_type = other DNA
acccttaaaaaattaccaaaaaaaccrctaaccaactccraaaaataaac

SEQ ID NO: 31096 - DNA, 50 bp, synthetic construct
  source 1..50: mol_type = other DNA
ctttaatactaacccttaaaaaattaccaaaaaaaccrctaaccaactcc

SEQ ID NO: 31097 - DNA, 50 bp, synthetic construct
  source 1..50: mol_type = other DNA
ttcctatatcttactttaatactaacccttaaaaaattaccaaaaaaacc

SEQ ID NO: 31098 - DNA, 50 bp, synthetic construct
  source 1..50: mol_type = other DNA
aaaataacaccaaccacaaaaatctccaactaatcaaaaaacccttctcc

SEQ ID NO: 31099 - DNA, 50 bp, synthetic construct
  source 1..50: mol_type = other DNA
acccaaatataacaataaatttatatccaaccaccracaaactacataac

SEQ ID NO: 31100 - DNA, 50 bp, synthetic construct
  source 1..50: mol_type = other DNA
aaactctaaacaaaatattcactactataacaaaacctataaaaaatttc

SEQ ID NO: 31101 - DNA, 50 bp, synthetic construct
  source 1..50: mol_type = other DNA
ataacaaaaccaaaaacaaacccrattccttaacctctacaaaaaaaaac

SEQ ID NO: 31102 - DNA, 50 bp, synthetic construct
  source 1..50: mol_type = other DNA
aataaacraccataacraactaaatccaaacccaacaactacaaaaaaac

SEQ ID NO: 31103 - DNA, 50 bp, synthetic construct
  source 1..50: mol_type = other DNA
tcaatccactaaaccaaataataccraacctcrataaaaaaatactaacc

SEQ ID NO: 31104 - DNA, 50 bp, synthetic construct
  source 1..50: mol_type = other DNA
raaacrtacctaccataactaactctcaatccactaaaccaaataatacc

SEQ ID NO: 31105 - DNA, 50 bp, synthetic construct
  source 1..50: mol_type = other DNA
aatccracactacttaacccaataaattaaaaaccaaccataataaacac

SEQ ID NO: 31106 - DNA, 50 bp, synthetic construct
  source 1..50: mol_type = other DNA
racactacttaacccaataaattaaaaaccaaccataataaacacrtccc

SEQ ID NO: 31107 - DNA, 50 bp, synthetic construct
  source 1..50: mol_type = other DNA
tactcataataatttaatataactctaatcctacctatccttctttatac

SEQ ID NO: 31108 - DNA, 50 bp, synthetic construct
  source 1..50: mol_type = other DNA
atatctataaaactactaaaaacaaatcttataaaccctaaaataccctc

SEQ ID NO: 31109 - DNA, 50 bp, synthetic construct
  source 1..50: mol_type = other DNA
aaaaaaaacccaaaaattctaatactaaaacaaaataatacttcctcccc

SEQ ID NO: 31110 - DNA, 50 bp, synthetic construct
  source 1..50: mol_type = other DNA
aaacccctaaattttttcctaacctaaccactaactcaccatataaccac

SEQ ID NO: 31111 - DNA, 50 bp, synthetic construct
  source 1..50: mol_type = other DNA
ctaaccactaactcaccatataaccacraacttattaaaaacttttcttc

SEQ ID NO: 31112 - DNA, 50 bp, synthetic construct
  source 1..50: mol_type = other DNA
aaacacctcccacccttactttacaatatactaaaaaaatccracaaatc

SEQ ID NO: 31113 - DNA, 50 bp, synthetic construct
  source 1..50: mol_type = other DNA
ttaacaacaaacacctcccacccttactttacaatatactaaaaaaatcc

SEQ ID NO: 31114 - DNA, 50 bp, synthetic construct
  source 1..50: mol_type = other DNA
tccaattattacatataacrtatataaaactctcattttcctttattctc

SEQ ID NO: 31115 - DNA, 50 bp, synthetic construct
  source 1..50: mol_type = other DNA
acttatttcaaatatcttaataaaattaacttccaattattacatataac

SEQ ID NO: 31116 - DNA, 50 bp, synthetic construct
  source 1..50: mol_type = other DNA
actcacratttcctcacacrtcaaccttctaaataaataaaactacaaac

SEQ ID NO: 31117 - DNA, 50 bp, synthetic construct
  source 1..50: mol_type = other DNA
aatatcattaaaaactaacraaaaaaattaccactaatctcaaaattctc

SEQ ID NO: 31118 - DNA, 50 bp, synthetic construct
  source 1..50: mol_type = other DNA
attaatcacactatcccacaccctctaacrtaatatcattaaaaactaac

SEQ ID NO: 31119 - DNA, 50 bp, synthetic construct
  source 1..50: mol_type = other DNA
ataaacatactaaaattccaaattcattaaaaacatacaacttaaataac

SEQ ID NO: 31120 - DNA, 50 bp, synthetic construct
  source 1..50: mol_type = other DNA
actatatatttttaataaacctaaaattccaacatactcactacccaaac

SEQ ID NO: 31121 - DNA, 50 bp, synthetic construct
  source 1..50: mol_type = other DNA
atatttaaaaaatatatcattcaatcttaaaaaataccccaaaacataac

SEQ ID NO: 31122 - DNA, 50 bp, synthetic construct
  source 1..50: mol_type = other DNA
taactcacacccrtaatcacaacacttaaaaaaaccraaacaaataaaac

SEQ ID NO: 31123 - DNA, 50 bp, synthetic construct
  source 1..50: mol_type = other DNA
tatactaaatataataactcacacccrtaatcacaacacttaaaaaaacc

SEQ ID NO: 31124 - DNA, 50 bp, synthetic construct
  source 1..50: mol_type = other DNA
acttatcaaactacctatctaatcaaaaaaaacttaaataaaactactcc

SEQ ID NO: 31125 - DNA, 50 bp, synthetic construct
  source 1..50: mol_type = other DNA
ttcccrattctaacccaaaactactttccttactaattattaatcttacc

SEQ ID NO: 31126 - DNA, 50 bp, synthetic construct
  source 1..50: mol_type = other DNA
tccttatctaaattactcaaataaaaactttttatctccraaacccrttc

SEQ ID NO: 31127 - DNA, 50 bp, synthetic construct
  source 1..50: mol_type = other DNA
ccttaaattactccttatctaaattactcaaataaaaactttttatctcc

SEQ ID NO: 31128 - DNA, 50 bp, synthetic construct
  source 1..50: mol_type = other DNA
craaaaaaactcctaaaaacccatatacttccaaaaaactcacccaacac

SEQ ID NO: 31129 - DNA, 50 bp, synthetic construct
  source 1..50: mol_type = other DNA
crtactaaataaacctcctaaaaacatataaactcctaaaaaccttctcc

SEQ ID NO: 31130 - DNA, 50 bp, synthetic construct
  source 1..50: mol_type = other DNA
aataaacctcctaaaaacatataaactcctaaaaaccttctccrccctac

SEQ ID NO: 31131 - DNA, 50 bp, synthetic construct
  source 1..50: mol_type = other DNA
aaccrtactaaaaataatactaaaacraactaatcraacctcttatctcc

SEQ ID NO: 31132 - DNA, 50 bp, synthetic construct
  source 1..50: mol_type = other DNA
raacctcttatctccrcaatatataacrcaaacctaaacctactaaaacc

SEQ ID NO: 31133 - DNA, 50 bp, synthetic construct
  source 1..50: mol_type = other DNA
taaaaactatacraatactacaaaccttcctaccaaacataaaaaaacrc

SEQ ID NO: 31134 - DNA, 50 bp, synthetic construct
  source 1..50: mol_type = other DNA
raaacctaccttcaaaactcaactccrcacacaaaaaatctaaaactacc

SEQ ID NO: 31135 - DNA, 50 bp, synthetic construct
  source 1..50: mol_type = other DNA
caactccaaattctttatatacraaactaaaccttaaaaacaaattccrc

SEQ ID NO: 31136 - DNA, 50 bp, synthetic construct
  source 1..50: mol_type = other DNA
aaaaacctcrtctccccacctaaaaactacctttcaataacrtttattac

SEQ ID NO: 31137 - DNA, 50 bp, synthetic construct
  source 1..50: mol_type = other DNA
tccccacctaaaaactacctttcaataacrtttattacrccaacaaattc

SEQ ID NO: 31138 - DNA, 50 bp, synthetic construct
  source 1..50: mol_type = other DNA
atattaactcactaaaccccaaaaaacaacaacaaaaccrccaaactctc

SEQ ID NO: 31139 - DNA, 50 bp, synthetic construct
  source 1..50: mol_type = other DNA
raaaaacraaaatattaactcactaaaccccaaaaaacaacaacaaaacc

SEQ ID NO: 31140 - DNA, 50 bp, synthetic construct
  source 1..50: mol_type = other DNA
atctaacrattctactactaccctttaaaatccaataaatcaacaccccc

SEQ ID NO: 31141 - DNA, 50 bp, synthetic construct
  source 1..50: mol_type = other DNA
atacctaacacacaactaatataaaccraacaaaaaaaaccaaaaaaatc

SEQ ID NO: 31142 - DNA, 50 bp, synthetic construct
  source 1..50: mol_type = other DNA
taccaacacttcaacaactaaatcaacaaataacacaatacrtaccatac

SEQ ID NO: 31143 - DNA, 50 bp, synthetic construct
  source 1..50: mol_type = other DNA
ttcattaatctaaaacaactaaaaaacccaaaaactaatttaaccataac

SEQ ID NO: 31144 - DNA, 50 bp, synthetic construct
  source 1..50: mol_type = other DNA
taacccaaaacacaaaaaacaactataatataactaaaatcaaaaccccc

SEQ ID NO: 31145 - DNA, 50 bp, synthetic construct
  source 1..50: mol_type = other DNA
ataatttacccccttcaccttccaaaaacrcaattattacraaattaaac

SEQ ID NO: 31146 - DNA, 50 bp, synthetic construct
  source 1..50: mol_type = other DNA
ttctaactttataatttacccccttcaccttccaaaaacrcaattattac

SEQ ID NO: 31147 - DNA, 50 bp, synthetic construct
  source 1..50: mol_type = other DNA
tttcccaaaatttctaactttataatttacccccttcaccttccaaaaac

SEQ ID NO: 31148 - DNA, 50 bp, synthetic construct
  source 1..50: mol_type = other DNA
aactaaaccctttcttataatttatttccttatttaaaaaatatacatac

SEQ ID NO: 31149 - DNA, 50 bp, synthetic construct
  source 1..50: mol_type = other DNA
aacaaatatacaataaacaaaattctattcttttaacattaaccaaatac

SEQ ID NO: 31150 - DNA, 50 bp, synthetic construct
  source 1..50: mol_type = other DNA
aaaactttaactaaaatttaatcaataatataactactcacraataccac

SEQ ID NO: 31151 - DNA, 50 bp, synthetic construct
  source 1..50: mol_type = other DNA
tactttactaccaaaatctacaacaataccattaccaccacrtaatactc

SEQ ID NO: 31152 - DNA, 50 bp, synthetic construct
  source 1..50: mol_type = other DNA
ctaaaacaaataatcttataaaatcaataacctacraaaacrcaataaac

SEQ ID NO: 31153 - DNA, 50 bp, synthetic construct
  source 1..50: mol_type = other DNA
aaacaaataatcttataaaatcaataacctacraaaacrcaataaacrcc

SEQ ID NO: 31154 - DNA, 50 bp, synthetic construct
  source 1..50: mol_type = other DNA
accccaatatttattatttttcraattcaacttacttttaccccrtctcc

SEQ ID NO: 31155 - DNA, 50 bp, synthetic construct
  source 1..50: mol_type = other DNA
aaacctaataaaaactcctattatttaaaatcraaaatcrcaaaaacaac

SEQ ID NO: 31156 - DNA, 50 bp, synthetic construct
  source 1..50: mol_type = other DNA
caacrcctctatattcrctcaactaactcctattaaccaataaaaaatcc

SEQ ID NO: 31157 - DNA, 50 bp, synthetic construct
  source 1..50: mol_type = other DNA
caacraacccttcactaactaacaaaaaccaactaaacraacacaaaaac

SEQ ID NO: 31158 - DNA, 50 bp, synthetic construct
  source 1..50: mol_type = other DNA
cactaactaacaaaaaccaactaaacraacacaaaaacrctataaccrac

SEQ ID NO: 31159 - DNA, 50 bp, synthetic construct
  source 1..50: mol_type = other DNA
tactaccaaaaataaaccraaaccaaaaaaatttcatctatctaaaatcc

SEQ ID NO: 31160 - DNA, 50 bp, synthetic construct
  source 1..50: mol_type = other DNA
aacctcttttttcctatcraattccaaacaaataaaattttcctaacccc

SEQ ID NO: 31161 - DNA, 50 bp, synthetic construct
  source 1..50: mol_type = other DNA
ccrcaataaataaaataccaactaaacrcraaacaaacaataataacaac

SEQ ID NO: 31162 - DNA, 50 bp, synthetic construct
  source 1..50: mol_type = other DNA
taaataaaataccaactaaacrcraaacaaacaataataacaacraaaac

SEQ ID NO: 31163 - DNA, 50 bp, synthetic construct
  source 1..50: mol_type = other DNA
acctacctctctacttatatatctatatatacatacrtcratccctatac

SEQ ID NO: 31164 - DNA, 50 bp, synthetic construct
  source 1..50: mol_type = other DNA
ctataatactaacctacctctctacttatatatctatatatacatacrtc

SEQ ID NO: 31165 - DNA, 50 bp, synthetic construct
  source 1..50: mol_type = other DNA
aaaaacccracttaaaaaaacctaatactaaatacaaaaaaataaacccc

SEQ ID NO: 31166 - DNA, 50 bp, synthetic construct
  source 1..50: mol_type = other DNA
ccaaaaacraaactcacttttttatatccaacaccaaactcctccaaatc

SEQ ID NO: 31167 - DNA, 50 bp, synthetic construct
  source 1..50: mol_type = other DNA
ataacrctataatttttaaatcracctcacataaaacaatccctacactc

SEQ ID NO: 31168 - DNA, 50 bp, synthetic construct
  source 1..50: mol_type = other DNA
tacactcactactaataaaaaatacaaacraaaaaatactaccaaattac

SEQ ID NO: 31169 - DNA, 50 bp, synthetic construct
  source 1..50: mol_type = other DNA
ataattaactctaaaatcaaaccattctaaacttcaatcctaaccccacc

SEQ ID NO: 31170 - DNA, 50 bp, synthetic construct
  source 1..50: mol_type = other DNA
actaaacaaatatctaacacatataaaatacttaaaaacaatcaactatc

SEQ ID NO: 31171 - DNA, 50 bp, synthetic construct
  source 1..50: mol_type = other DNA
ctttacctacaaaaatattatccttacatcacatctaaaaccactaaaac

SEQ ID NO: 31172 - DNA, 50 bp, synthetic construct
  source 1..50: mol_type = other DNA
cacactattcaaaaaaaaaccttccaaaatataaccactaaaatctcccc

SEQ ID NO: 31173 - DNA, 50 bp, synthetic construct
  source 1..50: mol_type = other DNA
atcacaaaatcaaaaatttaaaacctacctaaccaatataataaaacccc

SEQ ID NO: 31174 - DNA, 50 bp, synthetic construct
  source 1..50: mol_type = other DNA
aaacattacattcttcccaatataaacataaataaacccattataaaacc

SEQ ID NO: 31175 - DNA, 50 bp, synthetic construct
  source 1..50: mol_type = other DNA
aatcctacaaatacctttaaactaaatcaccaaatctacataatactacc

SEQ ID NO: 31176 - DNA, 50 bp, synthetic construct
  source 1..50: mol_type = other DNA
aactctaaacactaaaaacctaaattaacaataacaattaactaactcac

SEQ ID NO: 31177 - DNA, 50 bp, synthetic construct
  source 1..50: mol_type = other DNA
ctaaacccatttctaaaccaaataataacttctaaacrccaaactcaatc

SEQ ID NO: 31178 - DNA, 50 bp, synthetic construct
  source 1..50: mol_type = other DNA
accaattcataacaaaacctcaaaacaatcactaaaatccaaaataattc

SEQ ID NO: 31179 - DNA, 50 bp, synthetic construct
  source 1..50: mol_type = other DNA
caaaaaaaatttactctaattaaattttaaactaaaccctttactacccc

SEQ ID NO: 31180 - DNA, 50 bp, synthetic construct
  source 1..50: mol_type = other DNA
craatattatccttatcaaactccacraaaccataaatattcaccacttc

SEQ ID NO: 31181 - DNA, 50 bp, synthetic construct
  source 1..50: mol_type = other DNA
taaaacaaaatataaaactcctaacraatattatccttatcaaactccac

SEQ ID NO: 31182 - DNA, 50 bp, synthetic construct
  source 1..50: mol_type = other DNA
ataataaaaaatcccaatactaaatacaaataacaactaaaaatacaccc

SEQ ID NO: 31183 - DNA, 50 bp, synthetic construct
  source 1..50: mol_type = other DNA
ctaaaaatacacccrtactacaaacctaatccttctaaatataactacac

SEQ ID NO: 31184 - DNA, 50 bp, synthetic construct
  source 1..50: mol_type = other DNA
aacccrcctaataatctctcraatcaaaactaaaacaaccctcttaaaac

SEQ ID NO: 31185 - DNA, 50 bp, synthetic construct
  source 1..50: mol_type = other DNA
atatatccacaaaaaactacrttccaaaaaaattactccaattctaatcc

SEQ ID NO: 31186 - DNA, 50 bp, synthetic construct
  source 1..50: mol_type = other DNA
taccaccccracaatataaactacttaaaaaataccctccaaataaaccc

SEQ ID NO: 31187 - DNA, 50 bp, synthetic construct
  source 1..50: mol_type = other DNA
aaaaaacaattttacctacaaataccaacraactttaataataccacccc

SEQ ID NO: 31188 - DNA, 50 bp, synthetic construct
  source 1..50: mol_type = other DNA
ccrttaacacctacaaataaaactatcttcctataaaaccccaaaaatac

SEQ ID NO: 31189 - DNA, 50 bp, synthetic construct
  source 1..50: mol_type = other DNA
aaataaatacctctaccatcatcttctaaacataactacaatccttttcc

SEQ ID NO: 31190 - DNA, 50 bp, synthetic construct
  source 1..50: mol_type = other DNA
ttctccctatttttcttactcaatttcaaaaactattcctttactacaac

SEQ ID NO: 31191 - DNA, 50 bp, synthetic construct
  source 1..50: mol_type = other DNA
aaaaccccaactaaccaacaaataacrtaaaaaacacatcaaatacctcc

SEQ ID NO: 31192 - DNA, 50 bp, synthetic construct
  source 1..50: mol_type = other DNA
aaaaacaaaataacaccactaactccraaaacacctaatatatctctcac

SEQ ID NO: 31193 - DNA, 50 bp, synthetic construct
  source 1..50: mol_type = other DNA
aaccaaaaccctaaaaacaaaacatttatatccccacaaatattaacatc

SEQ ID NO: 31194 - DNA, 50 bp, synthetic construct
  source 1..50: mol_type = other DNA
actataatatatatcttctcccttctattctcataacaaatctaccttac

SEQ ID NO: 31195 - DNA, 50 bp, synthetic construct
  source 1..50: mol_type = other DNA
atatcttctcccttctattctcataacaaatctaccttacrttctaaacc

SEQ ID NO: 31196 - DNA, 50 bp, synthetic construct
  source 1..50: mol_type = other DNA
acctccaacctctaaaattccttactaaatcctcrtctctttaaaaaaac

SEQ ID NO: 31197 - DNA, 50 bp, synthetic construct
  source 1..50: mol_type = other DNA
aaacttcaattctaaaacctccaacctctaaaattccttactaaatcctc

SEQ ID NO: 31198 - DNA, 50 bp, synthetic construct
  source 1..50: mol_type = other DNA
ccaaaaccacctttatatatctaaacctctaaaaatattctaccaacccc

SEQ ID NO: 31199 - DNA, 50 bp, synthetic construct
  source 1..50: mol_type = other DNA
atcacataatttcattccactaaaacatttttctaacaaaaacaactacc

SEQ ID NO: 31200 - DNA, 50 bp, synthetic construct
  source 1..50: mol_type = other DNA
tttcattccactaaaacatttttctaacaaaaacaactaccraataaaac

SEQ ID NO: 31201 - DNA, 50 bp, synthetic construct
  source 1..50: mol_type = other DNA
aataaaatcctaaaaatatactacttttcttctaaatataacccacaacc

SEQ ID NO: 31202 - DNA, 50 bp, synthetic construct
  source 1..50: mol_type = other DNA
tataataatatctaaataaacaaaccctaactaaaccctaaaatctatcc

SEQ ID NO: 31203 - DNA, 50 bp, synthetic construct
  source 1..50: mol_type = other DNA
taataatatctaaataaacaaaccctaactaaaccctaaaatctatccrc

SEQ ID NO: 31204 - DNA, 50 bp, synthetic construct
  source 1..50: mol_type = other DNA
ataacatcaatcacaattcaataaaaaacctataaaaactattaaactac

SEQ ID NO: 31205 - DNA, 50 bp, synthetic construct
  source 1..50: mol_type = other DNA
aaactaacctaatactataaacttaaaaaactttatatccaaaccctatc

SEQ ID NO: 31206 - DNA, 50 bp, synthetic construct
  source 1..50: mol_type = other DNA
tactactctaacttaaaataaacctaaatcaataacaactcrtctctaac

SEQ ID NO: 31207 - DNA, 50 bp, synthetic construct
  source 1..50: mol_type = other DNA
aaacccaattactactctaacttaaaataaacctaaatcaataacaactc

SEQ ID NO: 31208 - DNA, 50 bp, synthetic construct
  source 1..50: mol_type = other DNA
taacctaaaccaaaaaaactactctatacccaactaaaaaaacctaaacc

SEQ ID NO: 31209 - DNA, 50 bp, synthetic construct
  source 1..50: mol_type = other DNA
cccccttaatccaaatcaacaataactcctctaataaaaatacaaacccc

SEQ ID NO: 31210 - DNA, 50 bp, synthetic construct
  source 1..50: mol_type = other DNA
caacaacttaccatattaaaatacacccctaataactcaaaaaaccaccc

SEQ ID NO: 31211 - DNA, 50 bp, synthetic construct
  source 1..50: mol_type = other DNA
tactacraatatcacaaaactatctaaaaataccaattcaacaaatcaac

SEQ ID NO: 31212 - DNA, 50 bp, synthetic construct
  source 1..50: mol_type = other DNA
tcaaacaatcttataatactcrcaacaactttaaaccaaaaacaaaaatc

SEQ ID NO: 31213 - DNA, 50 bp, synthetic construct
  source 1..50: mol_type = other DNA
ctcctcataaacctataaaaataacaacataaaaatactcaaaaaataac

SEQ ID NO: 31214 - DNA, 50 bp, synthetic construct
  source 1..50: mol_type = other DNA
ctctatccaaaaccttctacaaacaaaccatcaacacaaacaacctaaac

SEQ ID NO: 31215 - DNA, 50 bp, synthetic construct
  source 1..50: mol_type = other DNA
raaaccaaatactaaatccctaattaaatacttctatatccccactactc

SEQ ID NO: 31216 - DNA, 50 bp, synthetic construct
  source 1..50: mol_type = other DNA
ataaatatctactaaataactaaataaaaaaccacratcctcrcaacatc

SEQ ID NO: 31217 - DNA, 50 bp, synthetic construct
  source 1..50: mol_type = other DNA
aacctaacaaaacctataaatatctactaaataactaaataaaaaaccac

SEQ ID NO: 31218 - DNA, 50 bp, synthetic construct
  source 1..50: mol_type = other DNA
ccacccaataaacatttataaatcctaccaaacccaaacccacaaatatc

SEQ ID NO: 31219 - DNA, 50 bp, synthetic construct
  source 1..50: mol_type = other DNA
aaatatcrccttaaccttattcctacctactctaaacaaatacacaaacc

SEQ ID NO: 31220 - DNA, 50 bp, synthetic construct
  source 1..50: mol_type = other DNA
caaactcatctattaataaacactcraattatttccaccttttaactttc

SEQ ID NO: 31221 - DNA, 50 bp, synthetic construct
  source 1..50: mol_type = other DNA
raacaacttaaaaaaatatctaaaccccaactaacaacactaaattaaac

SEQ ID NO: 31222 - DNA, 50 bp, synthetic construct
  source 1..50: mol_type = other DNA
ccraactacaaataaaaattaaaaaactaaacctaccctttcctcaacac

SEQ ID NO: 31223 - DNA, 50 bp, synthetic construct
  source 1..50: mol_type = other DNA
ccactaaactcaaaaaaaacaaaccctatatactaaaaataatacaaatc

SEQ ID NO: 31224 - DNA, 50 bp, synthetic construct
  source 1..50: mol_type = other DNA
aatcrcccccaaacaaaaataaatataaaaactatacaataaaaacaaac

SEQ ID NO: 31225 - DNA, 50 bp, synthetic construct
  source 1..50: mol_type = other DNA
aactttattaattctccaaaaaatattataaactctaacaccraaccccc

SEQ ID NO: 31226 - DNA, 50 bp, synthetic construct
  source 1..50: mol_type = other DNA
caacacccttttctctaaaaccaaaacaaacataaaacctaattaaatac

SEQ ID NO: 31227 - DNA, 50 bp, synthetic construct
  source 1..50: mol_type = other DNA
cacacraaactataaaaacacaaaataaccaaaaaaaatccaaaacaccc

SEQ ID NO: 31228 - DNA, 50 bp, synthetic construct
  source 1..50: mol_type = other DNA
cacaaaactaccaaataaaatacaaaacacccrattaaatttaaaattcc

SEQ ID NO: 31229 - DNA, 50 bp, synthetic construct
  source 1..50: mol_type = other DNA
taaaaattaaacaaaatcaaatctaatacaaactcaacacaatacctcac

SEQ ID NO: 31230 - DNA, 50 bp, synthetic construct
  source 1..50: mol_type = other DNA
taaacaaaatcaaatctaatacaaactcaacacaatacctcacrcataac

SEQ ID NO: 31231 - DNA, 50 bp, synthetic construct
  source 1..50: mol_type = other DNA
caaactcaacacaatacctcacrcataacraatactcactaaactctaac

SEQ ID NO: 31232 - DNA, 50 bp, synthetic construct
  source 1..50: mol_type = other DNA
aaaacaaaaaactcccactcactataaaaatattttcttcctccttcccc

SEQ ID NO: 31233 - DNA, 50 bp, synthetic construct
  source 1..50: mol_type = other DNA
acaatttaataaacaaaatcacatacaaacaaataattacaactaaaccc

SEQ ID NO: 31234 - DNA, 50 bp, synthetic construct
  source 1..50: mol_type = other DNA
taactaaaaacaaccctaaaaatcaaccctaacaaaatcacraataccrc

SEQ ID NO: 31235 - DNA, 50 bp, synthetic construct
  source 1..50: mol_type = other DNA
aataactaaaaacaaccctaaaaatcaaccctaacaaaatcacraatacc

SEQ ID NO: 31236 - DNA, 50 bp, synthetic construct
  source 1..50: mol_type = other DNA
atttaaaaataactaaaaacaaccctaaaaatcaaccctaacaaaatcac

SEQ ID NO: 31237 - DNA, 50 bp, synthetic construct
  source 1..50: mol_type = other DNA
aaataaaccccaaaactcccaaaaaataaactaaactaaactctataatc

SEQ ID NO: 31238 - DNA, 50 bp, synthetic construct
  source 1..50: mol_type = other DNA
attcrtaaattccccaaactacacraaactaaaaaactataactaaaaac

SEQ ID NO: 31239 - DNA, 50 bp, synthetic construct
  source 1..50: mol_type = other DNA
tctccraaaaaacaacacctaacctaacacaaaaaaattaatcctataac

SEQ ID NO: 31240 - DNA, 50 bp, synthetic construct
  source 1..50: mol_type = other DNA
raacctaaaatccccaacaactaattctaaattcraaacttaaacaaacc

SEQ ID NO: 31241 - DNA, 50 bp, synthetic construct
  source 1..50: mol_type = other DNA
ccraatcraatatacacttactatttatatacaaacaccaaaatacrtac

SEQ ID NO: 31242 - DNA, 50 bp, synthetic construct
  source 1..50: mol_type = other DNA
raatcraatatacacttactatttatatacaaacaccaaaatacrtacrc

SEQ ID NO: 31243 - DNA, 50 bp, synthetic construct
  source 1..50: mol_type = other DNA
cacttactatttatatacaaacaccaaaatacrtacrcraaataaaaaac

SEQ ID NO: 31244 - DNA, 50 bp, synthetic construct
  source 1..50: mol_type = other DNA
aaataacaaatcaaaccctaaacactaacctctctataaaataccacrcc

SEQ ID NO: 31245 - DNA, 50 bp, synthetic construct
  source 1..50: mol_type = other DNA
taatccccaatacctaaatatctaaaaaactaaataaattacctcraatc

SEQ ID NO: 31246 - DNA, 50 bp, synthetic construct
  source 1..50: mol_type = other DNA
tctaaaaaactaaataaattacctcraatcraccaaacctaaatatcaac

SEQ ID NO: 31247 - DNA, 50 bp, synthetic construct
  source 1..50: mol_type = other DNA
aaataaccaaaacraacracaacrccccctaatacacataataaaaaatc

SEQ ID NO: 31248 - DNA, 50 bp, synthetic construct
  source 1..50: mol_type = other DNA
raatataaaacaaactctctcattaacctaaattccccccctcratctac

SEQ ID NO: 31249 - DNA, 50 bp, synthetic construct
  source 1..50: mol_type = other DNA
cacraaaactacttcttacaaaatcrctcaaaaataaaaccccaaaactc

SEQ ID NO: 31250 - DNA, 50 bp, synthetic construct
  source 1..50: mol_type = other DNA
actacaacctaaaactatttctaacaatcraactctaaactttctttctc

SEQ ID NO: 31251 - DNA, 50 bp, synthetic construct
  source 1..50: mol_type = other DNA
aacaaattctaaataacrctcactacaacctaaaactatttctaacaatc

SEQ ID NO: 31252 - DNA, 50 bp, synthetic construct
  source 1..50: mol_type = other DNA
aaaaaaacccaaaacccractaccaaaaacaattccaaactacaataaac

SEQ ID NO: 31253 - DNA, 50 bp, synthetic construct
  source 1..50: mol_type = other DNA
ttctttcttcaaaatcaaaccccaaacrtcctaaatacraatccaaatac

SEQ ID NO: 31254 - DNA, 50 bp, synthetic construct
  source 1..50: mol_type = other DNA
aaaaactacaataatcaaaaccattctttcttcaaaatcaaaccccaaac

SEQ ID NO: 31255 - DNA, 50 bp, synthetic construct
  source 1..50: mol_type = other DNA
acaatttttacaaacaaacccctacctaaactatcctaaaaattccctcc

SEQ ID NO: 31256 - DNA, 50 bp, synthetic construct
  source 1..50: mol_type = other DNA
aaaaataatactttaccctaacttcccaactctctacccaaattcttacc

SEQ ID NO: 31257 - DNA, 50 bp, synthetic construct
  source 1..50: mol_type = other DNA
tcccctaaaaaactacaattataatacacrtccccratactaaattaacc

SEQ ID NO: 31258 - DNA, 50 bp, synthetic construct
  source 1..50: mol_type = other DNA
aaaaactacaattataatacacrtccccratactaaattaaccrtaactc

SEQ ID NO: 31259 - DNA, 50 bp, synthetic construct
  source 1..50: mol_type = other DNA
ccaaaaaatcccctaaaaaaacccaaacccraaaatcaaaataaaacacc

SEQ ID NO: 31260 - DNA, 50 bp, synthetic construct
  source 1..50: mol_type = other DNA
aataaacttaaaaacrctaacaccaaacraccctcaaaacraccaatttc

SEQ ID NO: 31261 - DNA, 50 bp, synthetic construct
  source 1..50: mol_type = other DNA
aactacrataaaaaccctaaccaataaacttaaaaacrctaacaccaaac

SEQ ID NO: 31262 - DNA, 50 bp, synthetic construct
  source 1..50: mol_type = other DNA
aacaacracraaaaactacrataaaaaccctaaccaataaacttaaaaac

SEQ ID NO: 31263 - DNA, 50 bp, synthetic construct
  source 1..50: mol_type = other DNA
ccttcraaacccctccrctaaaaacaaaatacrataataacctttataac

SEQ ID NO: 31264 - DNA, 50 bp, synthetic construct
  source 1..50: mol_type = other DNA
ataacrcaccttttcataaaaatattctataaaaactctcataaaccatc

SEQ ID NO: 31265 - DNA, 50 bp, synthetic construct
  source 1..50: mol_type = other DNA
ttttcataaaaatattctataaaaactctcataaaccatcraatcttctc

SEQ ID NO: 31266 - DNA, 50 bp, synthetic construct
  source 1..50: mol_type = other DNA
aactctcataaaccatcraatcttctcrtattcctaaaacaaaataatac

SEQ ID NO: 31267 - DNA, 50 bp, synthetic construct
  source 1..50: mol_type = other DNA
ccatcraatcttctcrtattcctaaaacaaaataatacratccaaaaccc

SEQ ID NO: 31268 - DNA, 50 bp, synthetic construct
  source 1..50: mol_type = other DNA
aaaaaattaaatcccctaccrcaaaacccacaaaaaattaaaatcccrac

SEQ ID NO: 31269 - DNA, 50 bp, synthetic construct
  source 1..50: mol_type = other DNA
cttataaactctacracaaaaaatttaaccctttataaatctaacccctc

SEQ ID NO: 31270 - DNA, 50 bp, synthetic construct
  source 1..50: mol_type = other DNA
aaatccaatacrtaaaacccaaccccraaaaaattaaaactaccrataac

SEQ ID NO: 31271 - DNA, 50 bp, synthetic construct
  source 1..50: mol_type = other DNA
acaaaaaatttaaccctttataaatctaacccctcraaaacaacrtcatc

SEQ ID NO: 31272 - DNA, 50 bp, synthetic construct
  source 1..50: mol_type = other DNA
acracaaaaacaatacrtaataaacraaaataaacctcaaacctccaaac

SEQ ID NO: 31273 - DNA, 50 bp, synthetic construct
  source 1..50: mol_type = other DNA
accaactcctttattaaaatactccrcttaaaaatttaaaacccacctcc

SEQ ID NO: 31274 - DNA, 50 bp, synthetic construct
  source 1..50: mol_type = other DNA
caatacraccaactaacraatccaaaaaaatacaacracaaaaacaatac

SEQ ID NO: 31275 - DNA, 50 bp, synthetic construct
  source 1..50: mol_type = other DNA
aaaaactcaaatcaataaaaaattaaacrcccacaatacraccaactaac

SEQ ID NO: 31276 - DNA, 50 bp, synthetic construct
  source 1..50: mol_type = other DNA
actacaatctaaaaaactcaaatcaataaaaaattaaacrcccacaatac

SEQ ID NO: 31277 - DNA, 50 bp, synthetic construct
  source 1..50: mol_type = other DNA
aaaaaaacaatccaacaaaatcctcttcaatttataattcctacaataac

SEQ ID NO: 31278 - DNA, 50 bp, synthetic construct
  source 1..50: mol_type = other DNA
acttactaaccaaaatttcttaaacttcraaaactctactaaccataacc

SEQ ID NO: 31279 - DNA, 50 bp, synthetic construct
  source 1..50: mol_type = other DNA
taacaactatacaaatactactactatccaaaaaaaactaaaccctaaac

SEQ ID NO: 31280 - DNA, 50 bp, synthetic construct
  source 1..50: mol_type = other DNA
caaatactactactatccaaaaaaaactaaaccctaaacrccccccaaac

SEQ ID NO: 31281 - DNA, 50 bp, synthetic construct
  source 1..50: mol_type = other DNA
craaaaaaacaataaataacaatcraaaacrttcccccaattaaataacc

SEQ ID NO: 31282 - DNA, 50 bp, synthetic construct
  source 1..50: mol_type = other DNA
ctcccttacaaacccaaacctatccaaaatctaactacctaaaaaaaaac

SEQ ID NO: 31283 - DNA, 50 bp, synthetic construct
  source 1..50: mol_type = other DNA
cttatcataactccraaaccaataaattaaaaactcctaccrcaaaaaac

SEQ ID NO: 31284 - DNA, 50 bp, synthetic construct
  source 1..50: mol_type = other DNA
aaaaaatccccctaactttaatttcrtaaatttaactatatataacttac

SEQ ID NO: 31285 - DNA, 50 bp, synthetic construct
  source 1..50: mol_type = other DNA
ataactaaaataaatttaattattctcaaatttaaccaccttataactcc

SEQ ID NO: 31286 - DNA, 50 bp, synthetic construct
  source 1..50: mol_type = other DNA
tctcccattaaaaattaatatttttacaaactaacaaatttaacratttc

SEQ ID NO: 31287 - DNA, 50 bp, synthetic construct
  source 1..50: mol_type = other DNA
aaaaattctcccattaaaaattaatatttttacaaactaacaaatttaac

SEQ ID NO: 31288 - DNA, 50 bp, synthetic construct
  source 1..50: mol_type = other DNA
aaataactatttaaaaaattccaaaaatttacctaattatccaattctac

SEQ ID NO: 31289 - DNA, 50 bp, synthetic construct
  source 1..50: mol_type = other DNA
tcaacactatctccctcataaatacctaaaaaaataactaatcttaaatc

SEQ ID NO: 31290 - DNA, 50 bp, synthetic construct
  source 1..50: mol_type = other DNA
ctctaaccaaatcaaccaaattaaaaacaacacacacaaaaacaaaactc

SEQ ID NO: 31291 - DNA, 50 bp, synthetic construct
  source 1..50: mol_type = other DNA
tacctaaaccttcaaccttactaaaaatttaacaaaacttaacctaacrc

SEQ ID NO: 31292 - DNA, 50 bp, synthetic construct
  source 1..50: mol_type = other DNA
aaaactcatcacaaaatacccacaaaattcactaccaatcactctactac

SEQ ID NO: 31293 - DNA, 50 bp, synthetic construct
  source 1..50: mol_type = other DNA
crccttctccraactcaattaaaaaattcattaataacrttaatctttac

SEQ ID NO: 31294 - DNA, 50 bp, synthetic construct
  source 1..50: mol_type = other DNA
tttctaccccrtaaaaattaacrccatcaataaactctttaattaaattc

SEQ ID NO: 31295 - DNA, 50 bp, synthetic construct
  source 1..50: mol_type = other DNA
attctcrcttttttaacaacrattaactataaaaaaacacaactaaaccc

SEQ ID NO: 31296 - DNA, 50 bp, synthetic construct
  source 1..50: mol_type = other DNA
taattaaattcraaaaaaacraatccaattatacctcctcacaactaatc

SEQ ID NO: 31297 - DNA, 50 bp, synthetic construct
  source 1..50: mol_type = other DNA
aaaaacraatccaattatacctcctcacaactaatcrttaccaaaaaaac

SEQ ID NO: 31298 - DNA, 50 bp, synthetic construct
  source 1..50: mol_type = other DNA
taaattttaaaatctcraatataactattaacrttacaaacccttaaatc

SEQ ID NO: 31299 - DNA, 50 bp, synthetic construct
  source 1..50: mol_type = other DNA
cccttaaatcrcttttcaaaccaaaaaaactacaatccccaacaaacacc

SEQ ID NO: 31300 - DNA, 50 bp, synthetic construct
  source 1..50: mol_type = other DNA
cttaaatcrcttttcaaaccaaaaaaactacaatccccaacaaacaccrc

SEQ ID NO: 31301 - DNA, 50 bp, synthetic construct
  source 1..50: mol_type = other DNA
aacrcctaaaccctacctcttactacaattacaacaactctaatcaaacc

SEQ ID NO: 31302 - DNA, 50 bp, synthetic construct
  source 1..50: mol_type = other DNA
actactacaactacaacaaaaaataaaactcaaacrttaaaaattacacc

SEQ ID NO: 31303 - DNA, 50 bp, synthetic construct
  source 1..50: mol_type = other DNA
tacaacaaaaaataaaactcaaacrttaaaaattacaccracaaacaatc

SEQ ID NO: 31304 - DNA, 50 bp, synthetic construct
  source 1..50: mol_type = other DNA
atcrcacaaaaaaacacacaaatataataatatacataacccttaacaac

SEQ ID NO: 31305 - DNA, 50 bp, synthetic construct
  source 1..50: mol_type = other DNA
tacrcracccttaaaaaccaaacatatatcatatatattttacaaacccc

SEQ ID NO: 31306 - DNA, 50 bp, synthetic construct
  source 1..50: mol_type = other DNA
tcttcraaatctacaaaacacacataacatatacctaactcttaaaaacc

SEQ ID NO: 31307 - DNA, 50 bp, synthetic construct
  source 1..50: mol_type = other DNA
ttcraaatctacaaaacacacataacatatacctaactcttaaaaaccrc

SEQ ID NO: 31308 - DNA, 50 bp, synthetic construct
  source 1..50: mol_type = other DNA
atttctaataataaccactaccactaatatattattaaataatatacaac

SEQ ID NO: 31309 - DNA, 50 bp, synthetic construct
  source 1..50: mol_type = other DNA
tcaatacacaccctatatacataaaccacrctcacatatctctaaactac

SEQ ID NO: 31310 - DNA, 50 bp, synthetic construct
  source 1..50: mol_type = other DNA
caacaaaacaaaacaacctaactctcctaatacctaccatatatctatac

SEQ ID NO: 31311 - DNA, 50 bp, synthetic construct
  source 1..50: mol_type = other DNA
tctcaacctcatcatataaatataaattctctaaaatatataaaaccctc

SEQ ID NO: 31312 - DNA, 50 bp, synthetic construct
  source 1..50: mol_type = other DNA
aaaaataaataaacttatctcaaaacctaacrctaactaataatatctac

SEQ ID NO: 31313 - DNA, 50 bp, synthetic construct
  source 1..50: mol_type = other DNA
catcaaaaaaaactaaatcaacctaaataacrcaaataccaccaaccaac

SEQ ID NO: 31314 - DNA, 50 bp, synthetic construct
  source 1..50: mol_type = other DNA
ctaataacacaaccaacactaactcactaataaattaactaatttcctcc

SEQ ID NO: 31315 - DNA, 50 bp, synthetic construct
  source 1..50: mol_type = other DNA
caactcctaaaccaaacctcatcttacccaatataacctatcaaaataac

SEQ ID NO: 31316 - DNA, 50 bp, synthetic construct
  source 1..50: mol_type = other DNA
ccctaaatcctcaaacaactcaatcaaaaaaaacaacaaaaataatcatc

SEQ ID NO: 31317 - DNA, 50 bp, synthetic construct
  source 1..50: mol_type = other DNA
aacaaacaaacctccaaaaactctcctaaaatccaaaaaaccacttcctc

SEQ ID NO: 31318 - DNA, 50 bp, synthetic construct
  source 1..50: mol_type = other DNA
taaaaaactaaaaaacrcaaataaaacaacacctcrataaattaattccc

SEQ ID NO: 31319 - DNA, 50 bp, synthetic construct
  source 1..50: mol_type = other DNA
actaaaaaaaaccractcaactataaataaaaaccaaacctaaatccctc

SEQ ID NO: 31320 - DNA, 50 bp, synthetic construct
  source 1..50: mol_type = other DNA
aacccaaacttcaaaaccaaacaacaaatataaaaacaactaaaaacaac

SEQ ID NO: 31321 - DNA, 50 bp, synthetic construct
  source 1..50: mol_type = other DNA
caattattcccacacctactacttaatcttaaaacctaaacctccactcc

SEQ ID NO: 31322 - DNA, 50 bp, synthetic construct
  source 1..50: mol_type = other DNA
taaaaaaacccaaaaaaactatatccaaacccaacttccccaactaaaac

SEQ ID NO: 31323 - DNA, 50 bp, synthetic construct
  source 1..50: mol_type = other DNA
aaataataaaaaacttcaacaatcactcccataaaacatatattctctac

SEQ ID NO: 31324 - DNA, 50 bp, synthetic construct
  source 1..50: mol_type = other DNA
tctatccactaaacacaaaaatttccacctaaaatcraacaattcctacc

SEQ ID NO: 31325 - DNA, 50 bp, synthetic construct
  source 1..50: mol_type = other DNA
tattacaaacaaaatctatccactaaacacaaaaatttccacctaaaatc

SEQ ID NO: 31326 - DNA, 50 bp, synthetic construct
  source 1..50: mol_type = other DNA
attaatcaaactaatcttaaactcccaacctcaaataattaacccacctc

SEQ ID NO: 31327 - DNA, 50 bp, synthetic construct
  source 1..50: mol_type = other DNA
tcacaatattaaccattataatctcratctcctaacctcataatctaccc

SEQ ID NO: 31328 - DNA, 50 bp, synthetic construct
  source 1..50: mol_type = other DNA
acaacataataacaccccatctctacaaaaaatttaaaaattaactaaac

SEQ ID NO: 31329 - DNA, 50 bp, synthetic construct
  source 1..50: mol_type = other DNA
atttaaaatactttaaacattaaataaaactcctaatactcrcacataac

SEQ ID NO: 31330 - DNA, 50 bp, synthetic construct
  source 1..50: mol_type = other DNA
ttatccatcccctaactccaaaaaaaaccataactatacataaatctccc

SEQ ID NO: 31331 - DNA, 50 bp, synthetic construct
  source 1..50: mol_type = other DNA
tctttcctaaaaccaaaaaataaacaaaataacctctctaaacctctttc

SEQ ID NO: 31332 - DNA, 50 bp, synthetic construct
  source 1..50: mol_type = other DNA
cctcccctcctccacttaacattatcccaaaaaattaccttaaaacttcc

SEQ ID NO: 31333 - DNA, 50 bp, synthetic construct
  source 1..50: mol_type = other DNA
cctccacttaacattatcccaaaaaattaccttaaaacttccrtaataac

SEQ ID NO: 31334 - DNA, 50 bp, synthetic construct
  source 1..50: mol_type = other DNA
ccacttaacattatcccaaaaaattaccttaaaacttccrtaataacrac

SEQ ID NO: 31335 - DNA, 50 bp, synthetic construct
  source 1..50: mol_type = other DNA
cattatcccaaaaaattaccttaaaacttccrtaataacracraaaatac

SEQ ID NO: 31336 - DNA, 50 bp, synthetic construct
  source 1..50: mol_type = other DNA
caaaacctaactaaacctcaaccaaattctaccaaaactaactcaacaac

SEQ ID NO: 31337 - DNA, 50 bp, synthetic construct
  source 1..50: mol_type = other DNA
aacatttcctaatctaacctctaaaaaaaccacaaaaccaaaccaaaaac

SEQ ID NO: 31338 - DNA, 50 bp, synthetic construct
  source 1..50: mol_type = other DNA
tcctaacctaactctataacctccccaaaaatcaaatcaaaaaatattac

SEQ ID NO: 31339 - DNA, 50 bp, synthetic construct
  source 1..50: mol_type = other DNA
ccccaaaaatcaaatcaaaaaatattacraaccraaaaatattctaaaac

SEQ ID NO: 31340 - DNA, 50 bp, synthetic construct
  source 1..50: mol_type = other DNA
ctaaatattcccaataactacactaaaaataacaacaatccaaaaatatc

SEQ ID NO: 31341 - DNA, 50 bp, synthetic construct
  source 1..50: mol_type = other DNA
aatattcccaataactacactaaaaataacaacaatccaaaaatatcrcc

SEQ ID NO: 31342 - DNA, 50 bp, synthetic construct
  source 1..50: mol_type = other DNA
tcccaataactacactaaaaataacaacaatccaaaaatatcrccrctac

SEQ ID NO: 31343 - DNA, 50 bp, synthetic construct
  source 1..50: mol_type = other DNA
ttaaaactaacacattaataaatctatactaccccctactaaccrtaaac

SEQ ID NO: 31344 - DNA, 50 bp, synthetic construct
  source 1..50: mol_type = other DNA
taaaacttaaaactaacacattaataaatctatactaccccctactaacc

SEQ ID NO: 31345 - DNA, 50 bp, synthetic construct
  source 1..50: mol_type = other DNA
acttaaaaaacccccaaaattaaaaatacaatctaataactactacattc

SEQ ID NO: 31346 - DNA, 50 bp, synthetic construct
  source 1..50: mol_type = other DNA
cccccaaaattaaaaatacaatctaataactactacattcrtaactcccc

SEQ ID NO: 31347 - DNA, 50 bp, synthetic construct
  source 1..50: mol_type = other DNA
atccttaaacccctaccaacctaattaaaaaaacataaatctatctttcc

SEQ ID NO: 31348 - DNA, 50 bp, synthetic construct
  source 1..50: mol_type = other DNA
taattaaaaaaacataaatctatctttccrccaaatatatatctataatc

SEQ ID NO: 31349 - DNA, 50 bp, synthetic construct
  source 1..50: mol_type = other DNA
attaaatttaacctacccacaacaaaatataaaacaaactaaaccacccc

SEQ ID NO: 31350 - DNA, 50 bp, synthetic construct
  source 1..50: mol_type = other DNA
aaacaaaactcaactctaaccataataattcraataaaaattcacataac

SEQ ID NO: 31351 - DNA, 50 bp, synthetic construct
  source 1..50: mol_type = other DNA
cctcttaaacactaaccraaaacaaaactcaactctaaccataataattc

SEQ ID NO: 31352 - DNA, 50 bp, synthetic construct
  source 1..50: mol_type = other DNA
ccaatctcaataaaaaaaacacaatcctaccctcaaaaatataatccaac

SEQ ID NO: 31353 - DNA, 50 bp, synthetic construct
  source 1..50: mol_type = other DNA
acaaattaaaccaaaatttccractactaccttaacaacaacaaaaaaac

SEQ ID NO: 31354 - DNA, 50 bp, synthetic construct
  source 1..50: mol_type = other DNA
craacctactataataataaaaacaccaaccaacraaacrccaaactctc

SEQ ID NO: 31355 - DNA, 50 bp, synthetic construct
  source 1..50: mol_type = other DNA
ttctaacaaacctaaaaaaatcrccttatcatcccaatccctaaccctac

SEQ ID NO: 31356 - DNA, 50 bp, synthetic construct
  source 1..50: mol_type = other DNA
atcccaaacccaaatataaatataactcttctaacaaacctaaaaaaatc

SEQ ID NO: 31357 - DNA, 50 bp, synthetic construct
  source 1..50: mol_type = other DNA
ataaaatcrctcaaaccttatacctaccatttacaaaacaaaaaatctcc

SEQ ID NO: 31358 - DNA, 50 bp, synthetic construct
  source 1..50: mol_type = other DNA
ataacattcccaacaaacaaaactaacacatactaaccctaaaaaaccac

SEQ ID NO: 31359 - DNA, 50 bp, synthetic construct
  source 1..50: mol_type = other DNA
cataattcacaataacatctaaaactaactaacaaaaaactaaataaaac

SEQ ID NO: 31360 - DNA, 50 bp, synthetic construct
  source 1..50: mol_type = other DNA
acatctactctatatcaaacactatacraaatcctctatttcaccctctc

SEQ ID NO: 31361 - DNA, 50 bp, synthetic construct
  source 1..50: mol_type = other DNA
accaccaaacaattttcratctaaaccccactactaataacctacataac

SEQ ID NO: 31362 - DNA, 50 bp, synthetic construct
  source 1..50: mol_type = other DNA
ttatacaaatcaccaacaataaaacccaaaccraaaactacctaataacc

SEQ ID NO: 31363 - DNA, 50 bp, synthetic construct
  source 1..50: mol_type = other DNA
aatcaccaacaataaaacccaaaccraaaactacctaataaccraaaacc

SEQ ID NO: 31364 - DNA, 50 bp, synthetic construct
  source 1..50: mol_type = other DNA
aaaaaaattccccaataaataaaaactctatataaacaacaacaaaaaac

SEQ ID NO: 31365 - DNA, 50 bp, synthetic construct
  source 1..50: mol_type = other DNA
ttccccaataaataaaaactctatataaacaacaacaaaaaacrtaaaac

SEQ ID NO: 31366 - DNA, 50 bp, synthetic construct
  source 1..50: mol_type = other DNA
taaaatacttacccaaaataacctcrataacaaactaacaaaaaaaaccc

SEQ ID NO: 31367 - DNA, 50 bp, synthetic construct
  source 1..50: mol_type = other DNA
ractactccttctttaaaaaaaaccraatcttccttactaacttaccacc

SEQ ID NO: 31368 - DNA, 50 bp, synthetic construct
  source 1..50: mol_type = other DNA
ctaccacctacccacctctatataatctcaaccttaattataatattctc

SEQ ID NO: 31369 - DNA, 50 bp, synthetic construct
  source 1..50: mol_type = other DNA
rtccacatctaaacacaaccacaccctaaaatttcactttcaatttaaac

SEQ ID NO: 31370 - DNA, 50 bp, synthetic construct
  source 1..50: mol_type = other DNA
rctcaaactaaaaataaaaccctaaaatataactatatccaaatataaac

SEQ ID NO: 31371 - DNA, 50 bp, synthetic construct
  source 1..50: mol_type = other DNA
aactttattaaatccaaactcaacttctcactaaatattccaaaaactcc

SEQ ID NO: 31372 - DNA, 50 bp, synthetic construct
  source 1..50: mol_type = other DNA
aactcaacttctcactaaatattccaaaaactccrtaaatataaaactcc

SEQ ID NO: 31373 - DNA, 50 bp, synthetic construct
  source 1..50: mol_type = other DNA
actaaatattccaaaaactccrtaaatataaaactccrataaaaaaatac

SEQ ID NO: 31374 - DNA, 50 bp, synthetic construct
  source 1..50: mol_type = other DNA
ccctaatctaaaaatctattcctattttcaaaataacctcactccacccc

SEQ ID NO: 31375 - DNA, 50 bp, synthetic construct
  source 1..50: mol_type = other DNA
ctcctcrataaacacaaccacaactaaaaaacaactactaattaatattc

SEQ ID NO: 31376 - DNA, 50 bp, synthetic construct
  source 1..50: mol_type = other DNA
ctcrataaacacaaccacaactaaaaaacaactactaattaatattcrac

SEQ ID NO: 31377 - DNA, 50 bp, synthetic construct
  source 1..50: mol_type = other DNA
cacctcacaaatacaaacacaaattaatttaataacctacccaaaattac

SEQ ID NO: 31378 - DNA, 50 bp, synthetic construct
  source 1..50: mol_type = other DNA
caaatcactaaactaatctatacctacacctataaaataaaaatattaac

SEQ ID NO: 31379 - DNA, 50 bp, synthetic construct
  source 1..50: mol_type = other DNA
ctaatctatacctacacctataaaataaaaatattaacrataccaataac

SEQ ID NO: 31380 - DNA, 50 bp, synthetic construct
  source 1..50: mol_type = other DNA
aatcaaataaccaactccaccaaaatacctactatacaaaacactactcc

SEQ ID NO: 31381 - DNA, 50 bp, synthetic construct
  source 1..50: mol_type = other DNA
cctaactattaaaaatatcattataactaattactacccctaaaaatacc

SEQ ID NO: 31382 - DNA, 50 bp, synthetic construct
  source 1..50: mol_type = other DNA
aaaaaataactaaacccaacacaaaaccacaaaaaaaacaactacttccc

SEQ ID NO: 31383 - DNA, 50 bp, synthetic construct
  source 1..50: mol_type = other DNA
tattacraaaataaacctaaattaaaaaaaccaccrctatctcatcaacc

SEQ ID NO: 31384 - DNA, 50 bp, synthetic construct
  source 1..50: mol_type = other DNA
rtcattcctctcccctattacraaaataaacctaaattaaaaaaaccacc

SEQ ID NO: 31385 - DNA, 50 bp, synthetic construct
  source 1..50: mol_type = other DNA
aaatctaaaaatccaaaaaacccctaatactattaacacctaattaattc

SEQ ID NO: 31386 - DNA, 50 bp, synthetic construct
  source 1..50: mol_type = other DNA
aaacccctaatactattaacacctaattaattcracaaccctaaactaac

SEQ ID NO: 31387 - DNA, 50 bp, synthetic construct
  source 1..50: mol_type = other DNA
tattaacacctaattaattcracaaccctaaactaacrctaacctactcc

SEQ ID NO: 31388 - DNA, 50 bp, synthetic construct
  source 1..50: mol_type = other DNA
aacaaaactctattaacctttctcaactcctaaaaaaatcccaactaaac

SEQ ID NO: 31389 - DNA, 50 bp, synthetic construct
  source 1..50: mol_type = other DNA
aaaacraccatatcaacaaacaaaaaattccaaatcacaactacaaaaac

SEQ ID NO: 31390 - DNA, 50 bp, synthetic construct
  source 1..50: mol_type = other DNA
taaaaaaaaaactactatccactctccttacaaaaaatttcctaatattc

SEQ ID NO: 31391 - DNA, 50 bp, synthetic construct
  source 1..50: mol_type = other DNA
tttcctaatattcrtaaaacactaataccctaaacctaatctatatacac

SEQ ID NO: 31392 - DNA, 50 bp, synthetic construct
  source 1..50: mol_type = other DNA
attaataaaacccctcttatatacatctaatcccctattttctcccatac

SEQ ID NO: 31393 - DNA, 50 bp, synthetic construct
  source 1..50: mol_type = other DNA
ctaaaaaaaaatcaaccaaacatacacctacccctaaataactacrtacc

SEQ ID NO: 31394 - DNA, 50 bp, synthetic construct
  source 1..50: mol_type = other DNA
actaatatccctaaattcaatactataactaaattcctccatcctaacac

SEQ ID NO: 31395 - DNA, 50 bp, synthetic construct
  source 1..50: mol_type = other DNA
tcaatctctctaataattctatcacattcccaataataccaaaaaacccc

SEQ ID NO: 31396 - DNA, 50 bp, synthetic construct
  source 1..50: mol_type = other DNA
ttcttcrccaacaaatatataatattttcattattacaaaactaccracc

SEQ ID NO: 31397 - DNA, 50 bp, synthetic construct
  source 1..50: mol_type = other DNA
cttattcttcrccaacaaatatataatattttcattattacaaaactacc

SEQ ID NO: 31398 - DNA, 50 bp, synthetic construct
  source 1..50: mol_type = other DNA
caatacctaacacataataaatactatataactatactcccttattcttc

SEQ ID NO: 31399 - DNA, 50 bp, synthetic construct
  source 1..50: mol_type = other DNA
caacaaccctaacaaaaaactactattattaacattcctattctaaaaac

SEQ ID NO: 31400 - DNA, 50 bp, synthetic construct
  source 1..50: mol_type = other DNA
tacraaaattccrcaaaaccttcctactataaactaaaatcaacctaaac

SEQ ID NO: 31401 - DNA, 50 bp, synthetic construct
  source 1..50: mol_type = other DNA
ctaacctaataattcataataacrcrtaaacacataatacaaacrtaaac

SEQ ID NO: 31402 - DNA, 50 bp, synthetic construct
  source 1..50: mol_type = other DNA
cctcracaacttatataacccccaataaaaacaaactaaactccctaatc

SEQ ID NO: 31403 - DNA, 50 bp, synthetic construct
  source 1..50: mol_type = other DNA
taacractaaaaaacccaacctatcctcactaaaaactacacaaactacc

SEQ ID NO: 31404 - DNA, 50 bp, synthetic construct
  source 1..50: mol_type = other DNA
ataataaaaaaacatcctaaaactaaaactataaattccccctaatcacc

SEQ ID NO: 31405 - DNA, 50 bp, synthetic construct
  source 1..50: mol_type = other DNA
ctaaccaaacccttacctataataatatcttcaataaccccatcacratc

SEQ ID NO: 31406 - DNA, 50 bp, synthetic construct
  source 1..50: mol_type = other DNA
aaacctaaccaaacccttacctataataatatcttcaataaccccatcac

SEQ ID NO: 31407 - DNA, 50 bp, synthetic construct
  source 1..50: mol_type = other DNA
cttaatcttatcctcaatctatccttctatactttcttctaacccaatac

SEQ ID NO: 31408 - DNA, 50 bp, synthetic construct
  source 1..50: mol_type = other DNA
crcctcaaacraactaatacatcctcctcttaaccacaaaaaacaacatc

SEQ ID NO: 31409 - DNA, 50 bp, synthetic construct
  source 1..50: mol_type = other DNA
atctcatataaaaataaaatccataaacratcctcraaactaaaacttac

SEQ ID NO: 31410 - DNA, 50 bp, synthetic construct
  source 1..50: mol_type = other DNA
caaacatctttattaatctcatataaaaataaaatccataaacratcctc

SEQ ID NO: 31411 - DNA, 50 bp, synthetic construct
  source 1..50: mol_type = other DNA
tcttttacaaacatctttattaatctcatataaaaataaaatccataaac

SEQ ID NO: 31412 - DNA, 50 bp, synthetic construct
  source 1..50: mol_type = other DNA
aaaattaataaaaatatttacaaaaaatccrcrtcractccatacctacc

SEQ ID NO: 31413 - DNA, 50 bp, synthetic construct
  source 1..50: mol_type = other DNA
ttacaaaaacctactataaaaaacttatacaaataaaacrtttactaaac

SEQ ID NO: 31414 - DNA, 50 bp, synthetic construct
  source 1..50: mol_type = other DNA
crcccrctaatttacaaaaacctactataaaaaacttatacaaataaaac

SEQ ID NO: 31415 - DNA, 50 bp, synthetic construct
  source 1..50: mol_type = other DNA
caaacrctttacttacacaaactcttcataacaaacctctacaaaccaac

SEQ ID NO: 31416 - DNA, 50 bp, synthetic construct
  source 1..50: mol_type = other DNA
raactaataaaactaaatcaaacraaaaccraaacccraaactaaacttc

SEQ ID NO: 31417 - DNA, 50 bp, synthetic construct
  source 1..50: mol_type = other DNA
cctaaaaacraaaaccctaaattctaaatctatttcctaaaccccaaatc

SEQ ID NO: 31418 - DNA, 50 bp, synthetic construct
  source 1..50: mol_type = other DNA
aaaacaaaatctacaatccctaaaaatacaaaactaactattcctcaccc

SEQ ID NO: 31419 - DNA, 50 bp, synthetic construct
  source 1..50: mol_type = other DNA
taaaatcrtaaacttcattaacttcctaaatatcttcrataacaaccacc

SEQ ID NO: 31420 - DNA, 50 bp, synthetic construct
  source 1..50: mol_type = other DNA
tctccccaaataataaaatcrtaaacttcattaacttcctaaatatcttc

SEQ ID NO: 31421 - DNA, 50 bp, synthetic construct
  source 1..50: mol_type = other DNA
accaaacrataattatcatcraaaacacccaaaaaatcaataaaacttac

SEQ ID NO: 31422 - DNA, 50 bp, synthetic construct
  source 1..50: mol_type = other DNA
actactatattcatcctaatcctaatttaaaaacccccaaaacataaacc

SEQ ID NO: 31423 - DNA, 50 bp, synthetic construct
  source 1..50: mol_type = other DNA
ccataccttaaaaattcccaaatcaaaattaaaataaacacaacaacaac

SEQ ID NO: 31424 - DNA, 50 bp, synthetic construct
  source 1..50: mol_type = other DNA
actccctatatacacaaatatatatacrcrcracttaaattaatttaacc

SEQ ID NO: 31425 - DNA, 50 bp, synthetic construct
  source 1..50: mol_type = other DNA
ccttatcraatctaactccacactccctatatacacaaatatatatacrc

SEQ ID NO: 31426 - DNA, 50 bp, synthetic construct
  source 1..50: mol_type = other DNA
aaatactaaattccttaatcataaaactaaaacacacraaataccttatc

SEQ ID NO: 31427 - DNA, 50 bp, synthetic construct
  source 1..50: mol_type = other DNA
actaaaacacacraaatactaaattccttaatcataaaactaaaacacac

SEQ ID NO: 31428 - DNA, 50 bp, synthetic construct; identical to SEQ ID NO: 31427
  source 1..50: mol_type = other DNA

SEQ ID NO: 31429 - DNA, 50 bp, synthetic construct
  source 1..50: mol_type = other DNA
caaaaatacctttataaactaaattccttaatcataaaactaaaacacac

SEQ ID NO: 31430 - DNA, 50 bp, synthetic construct
  source 1..50: mol_type = other DNA
aaataataacaaatatttccaaaccatcratatcctctctcttacctacc

SEQ ID NO: 31431 - DNA, 50 bp, synthetic construct
  source 1..50: mol_type = other DNA
aataccaaaactacaattctttatatactaaaaaccraaactctctcccc

SEQ ID NO: 31432 - DNA, 50 bp, synthetic construct
  source 1..50: mol_type = other DNA
caactaaacaaaaactatcttaacaaaatataaaaataaacttctcccac

SEQ ID NO: 31433 - DNA, 50 bp, synthetic construct
  source 1..50: mol_type = other DNA
caaaaactatcttaacaaaatataaaaataaacttctcccacraaatctc

SEQ ID NO: 31434 - DNA, 50 bp, synthetic construct
  source 1..50: mol_type = other DNA
aaactatcttaacaaaatataaaaataaacttctcccacraaatctcrac

SEQ ID NO: 31435 - DNA, 50 bp, synthetic construct
  source 1..50: mol_type = other DNA
tcccaaaaaaactactcaaaactcacrtaacattaaatcaactataaatc

SEQ ID NO: 31436 - DNA, 50 bp, synthetic construct
  source 1..50: mol_type = other DNA
taaaaacacacaacataaccaaaatcacaaaaaactacrtaactcccatc

SEQ ID NO: 31437 - DNA, 50 bp, synthetic construct
  source 1..50: mol_type = other DNA
taaccaaaatcacaaaaaactacrtaactcccatcrctaaacaaaaacac

SEQ ID NO: 31438 - DNA, 50 bp, synthetic construct
  source 1..50: mol_type = other DNA
attacatcactaaaaaacaaaccaaaccraaccaaaataaactaaaaccc

SEQ ID NO: 31439 - DNA, 50 bp, synthetic construct
  source 1..50: mol_type = other DNA
accacrtaaaatcaaccaaaaaattacatcactaaaaaacaaaccaaacc

SEQ ID NO: 31440 - DNA, 50 bp, synthetic construct
  source 1..50: mol_type = other DNA
aactcratttaacctaccctccaataatataattttctaactaaccctac

SEQ ID NO: 31441 - DNA, 50 bp, synthetic construct
  source 1..50: mol_type = other DNA
accctaacactataaaatttttaaacttttacctatcaataaaaaatatc

SEQ ID NO: 31442 - DNA, 50 bp, synthetic construct
  source 1..50: mol_type = other DNA
caaatatcaaatatccatttaacrcccttctaaattatctacaatacccc

SEQ ID NO: 31443 - DNA, 50 bp, synthetic construct
  source 1..50: mol_type = other DNA
tacaaatactacrataaccrtttccctcaaatatcaaatatccatttaac

SEQ ID NO: 31444 - DNA, 50 bp, synthetic construct
  source 1..50: mol_type = other DNA
actcaaaaaaacrccaaataaatatctaacatttaaaaaaaacraccacc

SEQ ID NO: 31445 - DNA, 50 bp, synthetic construct
  source 1..50: mol_type = other DNA
aaatatctaacatttaaaaaaaacraccaccrcaatatctacaaaacacc

SEQ ID NO: 31446 - DNA, 50 bp, synthetic construct
  source 1..50: mol_type = other DNA
acaaaaacataacttcataaaaatacattatcaaaaaaaatatcacrtac

SEQ ID NO: 31447 - DNA, 50 bp, synthetic construct
  source 1..50: mol_type = other DNA
acctacaaaaacataacttcataaaaatacattatcaaaaaaaatatcac

SEQ ID NO: 31448 - DNA, 50 bp, synthetic construct
  source 1..50: mol_type = other DNA
atatcctatctaatttcaaaaattaaaatatacaacaaaacatacatccc

SEQ ID NO: 31449 - DNA, 50 bp, synthetic construct
  source 1..50: mol_type = other DNA
aatcraataataaatctttatcctaacaacttaataaccatttaaaaaac

SEQ ID NO: 31450 - DNA, 50 bp, synthetic construct
  source 1..50: mol_type = other DNA
acaaaaaaacaactaaaaaacccaataactaaactcccaacactaaatac

SEQ ID NO: 31451 - DNA, 50 bp, synthetic construct
  source 1..50: mol_type = other DNA
aaaaaaacaactaaaaaacccaataactaaactcccaacactaaatacrc

SEQ ID NO: 31452 - DNA, 50 bp, synthetic construct
  source 1..50: mol_type = other DNA
acrtcataaaattcacactaaaataaaacccctaaaccacataaaaaacc

SEQ ID NO: 31453 - DNA, 50 bp, synthetic construct
  source 1..50: mol_type = other DNA
acracctcctatataattcaaaaattttacctcaatataaatttcataac

SEQ ID NO: 31454 - DNA, 50 bp, synthetic construct
  source 1..50: mol_type = other DNA
atcttccacrttaaaacttacccctcaaaccctaactatattaaaacacc

SEQ ID NO: 31455 - DNA, 50 bp, synthetic construct
  source 1..50: mol_type = other DNA
ccccctcctaaaaactctccaaaaacaactcaccttaaaaaacaataaac

SEQ ID NO: 31456 - DNA, 50 bp, synthetic construct
  source 1..50: mol_type = other DNA
ataacaaacctctcaactctaactaaacaaaacttatttctattacctcc

SEQ ID NO: 31457 - DNA, 50 bp, synthetic construct
  source 1..50: mol_type = other DNA
tacttaacaaaaatcccaatccaattaaaaccataacaataataaacccc

SEQ ID NO: 31458 - DNA, 50 bp, synthetic construct
  source 1..50: mol_type = other DNA
aaaaaatactaaaaacaaaaactacttcccactcttacrtaaccrtaaac

SEQ ID NO: 31459 - DNA, 50 bp, synthetic construct
  source 1..50: mol_type = other DNA
caacaaaaaaaatactaaaaacaaaaactacttcccactcttacrtaacc

SEQ ID NO: 31460 - DNA, 50 bp, synthetic construct
  source 1..50: mol_type = other DNA
aaaataaaaaacaacttctattcccaacaccctccctattaataaaaaac

SEQ ID NO: 31461 - DNA, 50 bp, synthetic construct
  source 1..50: mol_type = other DNA
tttcattcaaacaacatcaaaaataaaatttatattcaaaaccctaacac

SEQ ID NO: 31462 - DNA, 50 bp, synthetic construct
  source 1..50: mol_type = other DNA
acrtaactattaaaaatctaactatataaaaactctaataacctatctcc

SEQ ID NO: 31463 - DNA, 50 bp, synthetic construct
  source 1..50: mol_type = other DNA
ctaactatataaaaactctaataacctatctccrcctaacataacccaac

SEQ ID NO: 31464 - DNA, 50 bp, synthetic construct
  source 1..50: mol_type = other DNA
ctaaacaactacctacctaacaccaatataaaaaaacaactctaaaactc

SEQ ID NO: 31465 - DNA, 50 bp, synthetic construct
  source 1..50: mol_type = other DNA
taccaaactattaaataaatcatcraaaaactacaaaaaaatctctaaac

SEQ ID NO: 31466 - DNA, 50 bp, synthetic construct
  source 1..50: mol_type = other DNA
caacaacctccttattactatctacctaccaaactattaaataaatcatc

SEQ ID NO: 31467 - DNA, 50 bp, synthetic construct
  source 1..50: mol_type = other DNA
caaaaatttaacttaccttcaaaaacaaaaacataactaactcccacttc

SEQ ID NO: 31468 - DNA, 50 bp, synthetic construct
  source 1..50: mol_type = other DNA
caaactcctaattcattcctcaacctaaacactctcctcaacttattcac

SEQ ID NO: 31469 - DNA, 50 bp, synthetic construct
  source 1..50: mol_type = other DNA
tttcttaaacttataaataaaccatataaatttaactattaccactactc

SEQ ID NO: 31470 - DNA, 50 bp, synthetic construct
  source 1..50: mol_type = other DNA
atctaccattccccaaaaaattcctctaatctccctaaaaaatcaaaacc

SEQ ID NO: 31471 - DNA, 50 bp, synthetic construct
  source 1..50: mol_type = other DNA
taaatataaataaccacatattactaataactaccattttaaacaatatc

SEQ ID NO: 31472 - DNA, 50 bp, synthetic construct
  source 1..50: mol_type = other DNA
atcaaaattctttaaaaactaaacaactccaactcaaaatactaactatc

SEQ ID NO: 31473 - DNA, 50 bp, synthetic construct
  source 1..50: mol_type = other DNA
attacaaattacaaaaataaaattaaacctaaactactacctcctaaacc

SEQ ID NO: 31474 - DNA, 50 bp, synthetic construct
  source 1..50: mol_type = other DNA
ttctattaaccaaacaacctaattaacatttcatatactcrtcttcattc

SEQ ID NO: 31475 - DNA, 50 bp, synthetic construct
  source 1..50: mol_type = other DNA
tataaacattttcaaactaaccctataaaacaaaattttatttccctttc

SEQ ID NO: 31476 - DNA, 50 bp, synthetic construct
  source 1..50: mol_type = other DNA
ttacctaaccaccaaaccacaataaacaaacctctacctactcaaaatac

SEQ ID NO: 31477 - DNA, 50 bp, synthetic construct
  source 1..50: mol_type = other DNA
cacaataaacaaacctctacctactcaaaatacraaactaaactaaatac

SEQ ID NO: 31478 - DNA, 50 bp, synthetic construct
  source 1..50: mol_type = other DNA
aaacctctacctactcaaaatacraaactaaactaaatacrataactcac

SEQ ID NO: 31479 - DNA, 50 bp, synthetic construct
  source 1..50: mol_type = other DNA
acataaaacctcaacctacctccaatcattaaatttaaaaactctttatc

SEQ ID NO: 31480 - DNA, 50 bp, synthetic construct
  source 1..50: mol_type = other DNA
acaaacctcaaacaaaccaataaatccaattctaaaattcctccaactac

SEQ ID NO: 31481 - DNA, 50 bp, synthetic construct
  source 1..50: mol_type = other DNA
actatatatcctaaatatctacatttttataaatatcattataatatacc

SEQ ID NO: 31482 - DNA, 50 bp, synthetic construct
  source 1..50: mol_type = other DNA
tttttaaaatacaatctcactctatcaccttaactaaactacaataacac

SEQ ID NO: 31483 - DNA, 50 bp, synthetic construct
  source 1..50: mol_type = other DNA
aacttaaataatcctcccatttcaatctcccaaataactaaaacaaatac

SEQ ID NO: 31484 - DNA, 50 bp, synthetic construct
  source 1..50: mol_type = other DNA
taccattaaaaaacataaatccttccctccattcctataaaaaaatcccc

SEQ ID NO: 31485 - DNA, 50 bp, synthetic construct
  source 1..50: mol_type = other DNA
ctacccacacataaatttatacttacatatatatacatatacrcrcacac

SEQ ID NO: 31486 - DNA, 50 bp, synthetic construct
  source 1..50: mol_type = other DNA
aaaatttcctacccacacataaatttatacttacatatatatacatatac

SEQ ID NO: 31487 - DNA, 50 bp, synthetic construct
  source 1..50: mol_type = other DNA
ataaccacrcatacatttaccattcrataaatcaaaacaaaaaacaatcc

SEQ ID NO: 31488 - DNA, 50 bp, synthetic construct
  source 1..50: mol_type = other DNA
ttacccaaaaacatataatccatccaacactaacacraacctataaccac

SEQ ID NO: 31489 - DNA, 50 bp, synthetic construct
  source 1..50: mol_type = other DNA
actaaaaaaactatcctcccttaaatttcccaaactaaaactaaccctac

SEQ ID NO: 31490 - DNA, 50 bp, synthetic construct
  source 1..50: mol_type = other DNA
atattctcctacatattaaatctttataaatccataataccccctataac

SEQ ID NO: 31491 - DNA, 50 bp, synthetic construct
  source 1..50: mol_type = other DNA
tttaataactcaaaacrtactttataatcttaccaaactttaaaatcatc

SEQ ID NO: 31492 - DNA, 50 bp, synthetic construct
  source 1..50: mol_type = other DNA
cttatttaaccttttaaaataaattctaaacaaaaaattccctaaactac

SEQ ID NO: 31493 - DNA, 50 bp, synthetic construct
  source 1..50: mol_type = other DNA
acaaaaaacctaaacctatctttcttcatcttttctaaacacaaataaac

SEQ ID NO: 31494 - DNA, 50 bp, synthetic construct
  source 1..50: mol_type = other DNA
craaaaaaccrtaaactatttcataatttaccctcttttaccaaaaaatc

SEQ ID NO: 31495 - DNA, 50 bp, synthetic construct
  source 1..50: mol_type = other DNA
aaatatttactattaaataaaaatacaaaacttaaatccaaactcctccc

SEQ ID NO: 31496 - DNA, 50 bp, synthetic construct
  source 1..50: mol_type = other DNA
aaaacaaaaataaactaaacacraaaacaaacatctcacaaatcaacccc

SEQ ID NO: 31497 - DNA, 50 bp, synthetic construct
  source 1..50: mol_type = other DNA
atcataactcctaaccaacaccraaattaacctataaaatatctaccttc

SEQ ID NO: 31498 - DNA, 50 bp, synthetic construct
  source 1..50: mol_type = other DNA
aataaaccatatctactaaatactaaaaaaccaaacacaattaaaacacc

SEQ ID NO: 31499 - DNA, 50 bp, synthetic construct
  source 1..50: mol_type = other DNA
ttataactccctcccttccaacctaccaaataattaaacaatataaacac

SEQ ID NO: 31500 - DNA, 50 bp, synthetic construct
  source 1..50: mol_type = other DNA
caccacctccctctaacatatattaaatacttacaaatatatacaaatcc

SEQ ID NO: 31501 - DNA, 50 bp, synthetic construct
  source 1..50: mol_type = other DNA
atttaataactttcaataattaattacaaaaatccaaacccacaatacac

SEQ ID NO: 31502 - DNA, 50 bp, synthetic construct
  source 1..50: mol_type = other DNA
atcaaccttaacctccttttaattacataaacctcataatataaaacaac

SEQ ID NO: 31503 - DNA, 50 bp, synthetic construct
  source 1..50: mol_type = other DNA
acctaaactataaaacccaaactcttcactatactctactaccaaaaaac

SEQ ID NO: 31504 - DNA, 50 bp, synthetic construct
  source 1..50: mol_type = other DNA
tacaaaaaaaacttaactttaataaaactacaactcttacaaataatctc

SEQ ID NO: 31505 - DNA, 50 bp, synthetic construct
  source 1..50: mol_type = other DNA
tccttataattaatcctaaacattacttataaatatccctaaccataatc

SEQ ID NO: 31506 - DNA, 50 bp, synthetic construct
  source 1..50: mol_type = other DNA
aaattcctaaaactttctaaaatccaaaatttaatctaacctttacaatc

SEQ ID NO: 31507 - DNA, 50 bp, synthetic construct
  source 1..50: mol_type = other DNA
aaacttaaaaatcaataacactactaatctaaactctataccccrtccac

SEQ ID NO: 31508 - DNA, 50 bp, synthetic construct
  source 1..50: mol_type = other DNA
aacratttattccccaacacaattacaaaaaaaatcctaaacaaaccttc

SEQ ID NO: 31509 - DNA, 50 bp, synthetic construct
  source 1..50: mol_type = other DNA
cacraaaatctactcaaaactttctctacaactatactaaaaaataaatc

SEQ ID NO: 31510 - DNA, 50 bp, synthetic construct
  source 1..50: mol_type = other DNA
aacctcatataaaactcrattcaaataaaaataaaaccaacaaacctaac

SEQ ID NO: 31511 - DNA, 50 bp, synthetic construct
  source 1..50: mol_type = other DNA
tactaatttcattttcatctaaaccraactccacataaaacttaacatcc

SEQ ID NO: 31512 - DNA, 50 bp, synthetic construct
  source 1..50: mol_type = other DNA
tccctttaaataacattttattttctcttaaaaaaactaacttaataacc

SEQ ID NO: 31513 - DNA, 50 bp, synthetic construct
  source 1..50: mol_type = other DNA
taaaacrataaaaattttcttcccccaaacatatcaattttaaacataac

SEQ ID NO: 31514 - DNA, 50 bp, synthetic construct
  source 1..50: mol_type = other DNA
ttttcttaatatctaaatcactactttttctactaccttactcataaaac

SEQ ID NO: 31515 - DNA, 50 bp, synthetic construct
  source 1..50: mol_type = other DNA
tataactacctaaataacaatacaaaaaaaatcatttttcttcaataacc

SEQ ID NO: 31516 - DNA, 50 bp, synthetic construct
  source 1..50: mol_type = other DNA
taaccttccctttttaaactactactttcaacattttaaccaacatcacc

SEQ ID NO: 31517 - DNA, 50 bp, synthetic construct
  source 1..50: mol_type = other DNA
aaactaacatccttaaaactccctaaatccactaacataaaattatcccc

SEQ ID NO: 31518 - DNA, 50 bp, synthetic construct
  source 1..50: mol_type = other DNA
atcaatcctaaataaaaaatctaaatcaacccaatacrcataaaaacaac

SEQ ID NO: 31519 - DNA, 50 bp, synthetic construct
  source 1..50: mol_type = other DNA
tcttaaaaacaaaatcaatcctaaataaaaaatctaaatcaacccaatac

SEQ ID NO: 31520 - DNA, 50 bp, synthetic construct
  source 1..50: mol_type = other DNA
atcatttactactaaaaaaataacttacrctaattaattatccaaccctc

SEQ ID NO: 31521 - DNA, 50 bp, synthetic construct
  source 1..50: mol_type = other DNA
accaaatcaatctccctctattaaacaaaaatatctaattaaactatttc

SEQ ID NO: 31522 - DNA, 50 bp, synthetic construct
  source 1..50: mol_type = other DNA
ttctacaaacatcrtccraaaataatacccatttctaaaaaccaaacctc

SEQ ID NO: 31523 - DNA, 50 bp, synthetic construct
  source 1..50: mol_type = other DNA
aacaacrattaattaacraaacctaatttccaaaaataaacactatttcc

SEQ ID NO: 31524 - DNA, 50 bp, synthetic construct
  source 1..50: mol_type = other DNA
acrattaattaacraaacctaatttccaaaaataaacactatttccraac

SEQ ID NO: 31525 - DNA, 50 bp, synthetic construct
  source 1..50: mol_type = other DNA
aaactaccaaaaaccraaaacrcatatataattccaccaacaccctaatc

SEQ ID NO: 31526 - DNA, 50 bp, synthetic construct
  source 1..50: mol_type = other DNA
crctatctccaaaataaccraaatcaataacaaaaaatacccacrcatac

SEQ ID NO: 31527 - DNA, 50 bp, synthetic construct
  source 1..50: mol_type = other DNA
cactataaccttctttactcattccaaaaattctacaaaaccaaacacac

SEQ ID NO: 31528 - DNA, 50 bp, synthetic construct
  source 1..50: mol_type = other DNA
aaacccracctataaattaaaacccaaatacaaaaaaaacatataaatac

SEQ ID NO: 31529 - DNA, 50 bp, synthetic construct
  source 1..50: mol_type = other DNA
tataatctacaaacccaaaaaacaaatactttactcaacrctcrtaccac

SEQ ID NO: 31530 - DNA, 50 bp, synthetic construct
  source 1..50: mol_type = other DNA
acaaatacaaactaccacrcctaactattcttttatttttttacaaaaac

SEQ ID NO: 31531 - DNA, 50 bp, synthetic construct
  source 1..50: mol_type = other DNA
tcaaactctcaacctcccctctaactaaaactacaaatacaaactaccac

SEQ ID NO: 31532 - DNA, 50 bp, synthetic construct
  source 1..50: mol_type = other DNA
tcccacttccataaaaaatccataataaatataataaataactctaatcc

SEQ ID NO: 31533 - DNA, 50 bp, synthetic construct
  source 1..50: mol_type = other DNA
atatttaaacaaaaaccaccatctacttaaaactactttacaaacaatcc

SEQ ID NO: 31534 - DNA, 50 bp, synthetic construct
  source 1..50: mol_type = other DNA
atttaaatttaaataccttaaaacaaaacctacrattccttacaattccc

SEQ ID NO: 31535 - DNA, 50 bp, synthetic construct
  source 1..50: mol_type = other DNA
aaccttatatcacctatctaacccctaaaacatttaaaattataactccc

SEQ ID NO: 31536 - DNA, 50 bp, synthetic construct
  source 1..50: mol_type = other DNA
tcacctatctaacccctaaaacatttaaaattataactcccrtaaaatcc

SEQ ID NO: 31537 - DNA, 50 bp, synthetic construct
  source 1..50: mol_type = other DNA
aatcaacacaattcactatctctaattaatacacattaatattcaaaaac

SEQ ID NO: 31538 - DNA, 50 bp, synthetic construct
  source 1..50: mol_type = other DNA
aaccactaaacactaataaaaaaaatattcraaataaacaaaacctctcc

SEQ ID NO: 31539 - DNA, 50 bp, synthetic construct
  source 1..50: mol_type = other DNA
aactttcccaaattatcttaacttaaacttaaaaaaaataatctcrtccc

SEQ ID NO: 31540 - DNA, 50 bp, synthetic construct
  source 1..50: mol_type = other DNA
ccaaaaactttcccaaattatcttaacttaaacttaaaaaaaataatctc

SEQ ID NO: 31541 - DNA, 50 bp, synthetic construct
  source 1..50: mol_type = other DNA
tcaatactcaaaaattctcacaccccatccatttcaaatctaaaaataac

SEQ ID NO: 31542 - DNA, 50 bp, synthetic construct
  source 1..50: mol_type = other DNA
acaccccatccatttcaaatctaaaaataacrttaaaactatactattcc

SEQ ID NO: 31543 - DNA, 50 bp, synthetic construct
  source 1..50: mol_type = other DNA
ccatttcaaatctaaaaataacrttaaaactatactattccraaaaaatc

SEQ ID NO: 31544 - DNA, 50 bp, synthetic construct
  source 1..50: mol_type = other DNA
tctcaactatatctttatcaacaacrtaaaaacaaacraatacaaacccc

SEQ ID NO: 31545 - DNA, 50 bp, synthetic construct
  source 1..50: mol_type = other DNA
ataaattaccccatctcaactatatctttatcaacaacrtaaaaacaaac

SEQ ID NO: 31546 - DNA, 50 bp, synthetic construct
  source 1..50: mol_type = other DNA
cctctttcctttataaattaccccatctcaactatatctttatcaacaac

SEQ ID NO: 31547 - DNA, 50 bp, synthetic construct
  source 1..50: mol_type = other DNA
aaactaaaaaaaacaacaacaacactataactacaacttcaaacaatccc

SEQ ID NO: 31548 - DNA, 50 bp, synthetic construct
  source 1..50: mol_type = other DNA
aaaaaaactataaacaataaaaacaaaacaaacaactaccaaacaaatac

SEQ ID NO: 31549 - DNA, 50 bp, synthetic construct
  source 1..50: mol_type = other DNA
aacaatatcttaacaaaaatcttctatttaccacacraatccaaacttcc

SEQ ID NO: 31550 - DNA, 50 bp, synthetic construct
  source 1..50: mol_type = other DNA
ttacttcacattatctttcaaataaatccctaaaaatacraaactcttac

SEQ ID NO: 31551 - DNA, 50 bp, synthetic construct
  source 1..50: mol_type = other DNA
aaaaatttccaaataaaaaaaccaacractacaaacctcaaaacrtaacc

SEQ ID NO: 31552 - DNA, 50 bp, synthetic construct
  source 1..50: mol_type = other DNA
crtcctaaaacctacaaccrctaattttcctatttaaaaactccttaaac

SEQ ID NO: 31553 - DNA, 50 bp, synthetic construct
  source 1..50: mol_type = other DNA
aaaacctacaaccrctaattttcctatttaaaaactccttaaacrtctcc

SEQ ID NO: 31554 - DNA, 50 bp, synthetic construct
  source 1..50: mol_type = other DNA
aattaaatttacctcccaacatatctaccactacracctatacacccaac

SEQ ID NO: 31555 - DNA, 50 bp, synthetic construct
  source 1..50: mol_type = other DNA
aactacraaaaaatcrtaaaaaaacaacactcaaaacccracctaaaaac

SEQ ID NO: 31556 - DNA, 50 bp, synthetic construct
  source 1..50: mol_type = other DNA
raaaaaaactcataaataccttttcttaacaaaatacatataaaaaaaac

SEQ ID NO: 31557 - DNA, 50 bp, synthetic construct
  source 1..50: mol_type = other DNA
atacaaaaataaaaaattataattcttaacctatttcaattctcaacccc

SEQ ID NO: 31558 - DNA, 50 bp, synthetic construct
  source 1..50: mol_type = other DNA
caaaccaatcrcaaaaaaacaaatataattccacttacrtaaaatatttc

SEQ ID NO: 31559 - DNA, 50 bp, synthetic construct
  source 1..50: mol_type = other DNA
attttactttcaatttctatatattttactactctaacraaataccttac

SEQ ID NO: 31560 - DNA, 50 bp, synthetic construct
  source 1..50: mol_type = other DNA
tcacccttaaaaaaccaattttaacaaatactaccccttaaataaatctc

SEQ ID NO: 31561 - DNA, 50 bp, synthetic construct
  source 1..50: mol_type = other DNA
catatatacaaaaatactttcaaaccataaccctaacaattttacttatc

SEQ ID NO: 31562 - DNA, 50 bp, synthetic construct
  source 1..50: mol_type = other DNA
atatacccctaactactttactaacaaaactaactactttctacatccac

SEQ ID NO: 31563 - DNA, 50 bp, synthetic construct
  source 1..50: mol_type = other DNA
ttaaactaaatcrtactaaaacaaaatactctaaacaaaaactaaaatcc

SEQ ID NO: 31564 - DNA, 50 bp, synthetic construct
  source 1..50: mol_type = other DNA
caaactaaataacaataactaataatcacccraccacaaaccaattttac

SEQ ID NO: 31565 - DNA, 50 bp, synthetic construct
  source 1..50: mol_type = other DNA
cttaatcatcctaaaaaaccaaactaaataacaataactaataatcaccc

SEQ ID NO: 31566 - DNA, 50 bp, synthetic construct
  source 1..50: mol_type = other DNA
ttctttaaaaacttttactaaaatctaaattcccaaataacaaaacctac

SEQ ID NO: 31567 - DNA, 50 bp, synthetic construct
  source 1..50: mol_type = other DNA
ctttaaaaacttttactaaaatctaaattcccaaataacaaaacctacrc

SEQ ID NO: 31568 - DNA, 50 bp, synthetic construct
  source 1..50: mol_type = other DNA
aaaccctacaatactcrccaaaaacrtaaaatttacctaatattaaccac

SEQ ID NO: 31569 - DNA, 50 bp, synthetic construct
  source 1..50: mol_type = other DNA
atccaaatttaatcaacaccaaacaaaaataatcatcaccaaacaaaaac

SEQ ID NO: 31570 - DNA, 50 bp, synthetic construct
  source 1..50: mol_type = other DNA
taatcaacaccaaacaaaaataatcatcaccaaacaaaaacrataaatac

SEQ ID NO: 31571 - DNA, 50 bp, synthetic construct
  source 1..50: mol_type = other DNA
aacaccaaacaaaaataatcatcaccaaacaaaaacrataaatacracrc

SEQ ID NO: 31572 - DNA, 50 bp, synthetic construct
  source 1..50: mol_type = other DNA
aaacaaaaacrtctcrtctatttttctaactcracaatacttctaactcc

SEQ ID NO: 31573 - DNA, 50 bp, synthetic construct
  source 1..50: mol_type = other DNA
rtctcccttataaatcctctaactattaatacaacaacctaaacacaaac

SEQ ID NO: 31574 - DNA, 50 bp, synthetic construct
  source 1..50: mol_type = other DNA
rtctatacccaaactattacaccaacaaccaaaaaactcacaaaaaaaac

SEQ ID NO: 31575 - DNA, 50 bp, synthetic construct
  source 1..50: mol_type = other DNA
cacctaaaattaatatacrcccctaccccactctctactataaaaaaatc

SEQ ID NO: 31576 - DNA, 50 bp, synthetic construct
  source 1..50: mol_type = other DNA
tctctactataaaaaaatcrcaacraacaataaaaacctatactctaaac

SEQ ID NO: 31577 - DNA, 50 bp, synthetic construct
  source 1..50: mol_type = other DNA
taaaaaaatcrcaacraacaataaaaacctatactctaaacraacaaaac

SEQ ID NO: 31578 - DNA, 50 bp, synthetic construct
  source 1..50: mol_type = other DNA
acaataaaacttataaaaaacacaaatcccttccaaacacaaatacccac

SEQ ID NO: 31579 - DNA, 50 bp, synthetic construct
  source 1..50: mol_type = other DNA
cacacaaatcacaaatttctatttctttccttacrcaaaaaactctatcc

SEQ ID NO: 31580 - DNA, 50 bp, synthetic construct
  source 1..50: mol_type = other DNA
cttactaaacaaataccacacaaatcacaaatttctatttctttccttac

SEQ ID NO: 31581 - DNA, 50 bp, synthetic construct
  source 1..50: mol_type = other DNA
aaaaacaaaaacctataacttatataatatttatttaataaacaaccccc

SEQ ID NO: 31582 - DNA, 50 bp, synthetic construct
  source 1..50: mol_type = other DNA
ttatttaataaacaacccccraaataaactatatctaatataaactatac

SEQ ID NO: 31583 - DNA, 50 bp, synthetic construct
  source 1..50: mol_type = other DNA
raaataaactatatctaatataaactatacrcacccacccttcccaatac

SEQ ID NO: 31584 - DNA, 50 bp, synthetic construct
  source 1..50: mol_type = other DNA
aataaacctaaaatactaaatcccaaatccraaaaatataaataccaaac

SEQ ID NO: 31585 - DNA, 50 bp, synthetic construct
  source 1..50: mol_type = other DNA
aaattactaaactattccactttccctaaaataaacccaaaaaaattaac

SEQ ID NO: 31586 - DNA, 50 bp, synthetic construct
  source 1..50: mol_type = other DNA
aatacatcaaaaccttcaaaaaacrtaaataactatttttactaataacc

SEQ ID NO: 31587 - DNA, 50 bp, synthetic construct
  source 1..50: mol_type = other DNA
aaaaaccctaatacattcaaaatactttcacttccattatttcactatac

SEQ ID NO: 31588 - DNA, 50 bp, synthetic construct
  source 1..50: mol_type = other DNA
ctaataaaactaaattaaaattatatatcctctatcccctccataacaac

SEQ ID NO: 31589 - DNA, 50 bp, synthetic construct
  source 1..50: mol_type = other DNA
ccatttcctctcaaaacaaacttttaaacttataacacaacttcctttcc

SEQ ID NO: 31590 - DNA, 50 bp, synthetic construct
  source 1..50: mol_type = other DNA
tctccaaacacaaacrtaaacaccaaaatctcctactaaaataatccacc

SEQ ID NO: 31591 - DNA, 50 bp, synthetic construct
  source 1..50: mol_type = other DNA
caaacctatataaaacattatcaaactaccccaaatctccaaacacaaac

SEQ ID NO: 31592 - DNA, 50 bp, synthetic construct
  source 1..50: mol_type = other DNA
tatatctaaaaatttaaaacaacctaataataccccacacaaacttatac

SEQ ID NO: 31593 - DNA, 50 bp, synthetic construct
  source 1..50: mol_type = other DNA
ctctactaaaaatatctaccatcaactattatatactcrccaacacattc

SEQ ID NO: 31594 - DNA, 50 bp, synthetic construct
  source 1..50: mol_type = other DNA
acctctctcttcctctactaaaaatatctaccatcaactattatatactc

SEQ ID NO: 31595 - DNA, 50 bp, synthetic construct
  source 1..50: mol_type = other DNA
ttcataaaccaaaaaataaacttaaacctcccacataaataactttaatc

SEQ ID NO: 31596 - DNA, 50 bp, synthetic construct
  source 1..50: mol_type = other DNA
atcaaactaaaactaataaatactaaaaactttctctcttctctccaaac

SEQ ID NO: 31597 - DNA, 50 bp, synthetic construct
  source 1..50: mol_type = other DNA
ttactataaccraactaaaacccaccaaccactacaaaatatttataaac

SEQ ID NO: 31598 - DNA, 50 bp, synthetic construct
  source 1..50: mol_type = other DNA
ccactacaaaatatttataaacrtaatcttaataaaccaacaccactaac

SEQ ID NO: 31599 - DNA, 50 bp, synthetic construct
  source 1..50: mol_type = other DNA
tatttataaacrtaatcttaataaaccaacaccactaacrataccaaaac

SEQ ID NO: 31600 - DNA, 50 bp, synthetic construct
  source 1..50: mol_type = other DNA
aacaccactaacrataccaaaacracaaataaatacaatataaaaaaacc

SEQ ID NO: 31601 - DNA, 50 bp, synthetic construct
  source 1..50: mol_type = other DNA
ttccttatttctaatcattatacttctaatttattttccttatcttattc

SEQ ID NO: 31602 - DNA, 50 bp, synthetic construct
  source 1..50: mol_type = other DNA
ataatttctttcactattttttaaccccacctctaataaaatctcactcc

SEQ ID NO: 31603 - DNA, 50 bp, synthetic construct
  source 1..50: mol_type = other DNA
cccraataacccaaaaataaaatataacraaaacatataaaccccraaac

SEQ ID NO: 31604 - DNA, 50 bp, synthetic construct
  source 1..50: mol_type = other DNA
caaaaataaaatataacraaaacatataaaccccraaacrcctacaaacc

SEQ ID NO: 31605 - DNA, 50 bp, synthetic construct
  source 1..50: mol_type = other DNA
aaacacaaataaccccaaaataaaatataaccraaaaacacrtaaacccc

SEQ ID NO: 31606 - DNA, 50 bp, synthetic construct
  source 1..50: mol_type = other DNA
aacraaaacttaacaaataataaatccctctttccaaaataccratcaac

SEQ ID NO: 31607 - DNA, 50 bp, synthetic construct
  source 1..50: mol_type = other DNA
attaccaaacraaaacttaacaaataataaatccctctttccaaaatacc

SEQ ID NO: 31608 - DNA, 50 bp, synthetic construct
  source 1..50: mol_type = other DNA
cacaaattctcaaattcccaacrtaacrtatccrataaacaaaaatcttc

SEQ ID NO: 31609 - DNA, 50 bp, synthetic construct
  source 1..50: mol_type = other DNA
tattaaatcctattaatcatacaactaaaaaaattccaatcacctaaccc

SEQ ID NO: 31610 - DNA, 50 bp, synthetic construct
  source 1..50: mol_type = other DNA
tattaatcatacaactaaaaaaattccaatcacctaacccraatctaacc

SEQ ID NO: 31611 - DNA, 50 bp, synthetic construct
  source 1..50: mol_type = other DNA
aaaaacaaacatacctcctaaaatcaaaaaaacaacccaacactaaaaac

SEQ ID NO: 31612 - DNA, 50 bp, synthetic construct
  source 1..50: mol_type = other DNA
ataaaattaataccraaaccrcactttaaaaaaccacttttactaaaccc

SEQ ID NO: 31613 - DNA, 50 bp, synthetic construct
  source 1..50: mol_type = other DNA
crcaaataataaaatcaatatcacrcaaaaaccaacaactataacctacc

SEQ ID NO: 31614 - DNA, 50 bp, synthetic construct
  source 1..50: mol_type = other DNA
ctcatttttaatatttccacccacaaccctttaatttcaaaaatatctcc

SEQ ID NO: 31615 - DNA, 50 bp, synthetic construct
  source 1..50: mol_type = other DNA
aaaataataaacatttctctataaattatcttttctatatttctctaacc

SEQ ID NO: 31616 - DNA, 50 bp, synthetic construct
  source 1..50: mol_type = other DNA
ttctctataaattatcttttctatatttctctaaccrtttcctctccctc

SEQ ID NO: 31617 - DNA, 50 bp, synthetic construct
  source 1..50: mol_type = other DNA
atatctaaacttcaataacacccaaaaaaaccaataattctaacctccrc

SEQ ID NO: 31618 - DNA, 50 bp, synthetic construct
  source 1..50: mol_type = other DNA
aaatatctaaacttcaataacacccaaaaaaaccaataattctaacctcc

SEQ ID NO: 31619 - DNA, 50 bp, synthetic construct
  source 1..50: mol_type = other DNA
aaattaacaataaaatactctcraaaaaccccrcttaaatcataaaaatc

SEQ ID NO: 31620 - DNA, 50 bp, synthetic construct
  source 1..50: mol_type = other DNA
atataactaaacacttacccaaaaataaaaacratctccataacttaaac

SEQ ID NO: 31621 - DNA, 50 bp, synthetic construct
  source 1..50: mol_type = other DNA
aactaaaatctctctcrcracaatctcaaaattaacaataaaatactctc

SEQ ID NO: 31622 - DNA, 50 bp, synthetic construct
  source 1..50: mol_type = other DNA
acttaaacraaactctccraaaacacctcactatcaactctaaaactatc

SEQ ID NO: 31623 - DNA, 50 bp, synthetic construct
  source 1..50: mol_type = other DNA
ccctaacaattttaaatatataaacaaaaatttaacrtatatccacaacc

SEQ ID NO: 31624 - DNA, 50 bp, synthetic construct
  source 1..50: mol_type = other DNA
aataaaaatacacttctacaaatctcaaaaaccraaaccctaaaaacrac

SEQ ID NO: 31625 - DNA, 50 bp, synthetic construct
  source 1..50: mol_type = other DNA
aaaaataaaaatacacttctacaaatctcaaaaaccraaaccctaaaaac

SEQ ID NO: 31626 - DNA, 50 bp, synthetic construct
  source 1..50: mol_type = other DNA
cttcrattcttaaaatttacaaaaatacacctccacctcctacccattcc

SEQ ID NO: 31627 - DNA, 50 bp, synthetic construct
  source 1..50: mol_type = other DNA
aaaaaatcccraaaactaaatcatcccrtacctcccactaaatttaaaac

SEQ ID NO: 31628 - DNA, 50 bp, synthetic construct
  source 1..50: mol_type = other DNA
ccttaaaactacccrataaccctaacaaataaattacatctcctaaaacc

SEQ ID NO: 31629 - DNA, 50 bp, synthetic construct
  source 1..50: mol_type = other DNA
tcccctcaatttcrctatctataaaataaaacattatccctaccaaaccc

SEQ ID NO: 31630 - DNA, 50 bp, synthetic construct
  source 1..50: mol_type = other DNA
aaacaacraaaattaatacctaacttttcctaaaaacaaattcctccccc

SEQ ID NO: 31631 - DNA, 50 bp, synthetic construct
  source 1..50: mol_type = other DNA
aaactaactaactctataaaatttccaaacrcccctataaaacaaatccc

SEQ ID NO: 31632 - DNA, 50 bp, synthetic construct
  source 1..50: mol_type = other DNA
aatccrattatttcactctaaaactaactaactctataaaatttccaaac

SEQ ID NO: 31633 - DNA, 50 bp, synthetic construct
  source 1..50: mol_type = other DNA
aaaacrtctaaaaattccacaaaaccaaccaatctcaaaataaaacaatc

SEQ ID NO: 31634 - DNA, 50 bp, synthetic construct
  source 1..50: mol_type = other DNA
tctaaaaattccacaaaaccaaccaatctcaaaataaaacaatcraatcc

SEQ ID NO: 31635 - DNA, 50 bp, synthetic construct
  source 1..50: mol_type = other DNA
aaaaattccacaaaaccaaccaatctcaaaataaaacaatcraatccrcc

SEQ ID NO: 31636 - DNA, 50 bp, synthetic construct
  source 1..50: mol_type = other DNA
cctaaacraaaaaatcrctctcaaacrccaactaaaacaactaaaaaaac

SEQ ID NO: 31637 - DNA, 50 bp, synthetic construct
  source 1..50: mol_type = other DNA
aaactcttaaacccractaaaccacaaaatatcaaatcctataattctcc

SEQ ID NO: 31638 - DNA, 50 bp, synthetic construct
  source 1..50: mol_type = other DNA
raatctaaaaactcataaatcaccctatatactttactaataaaaaaacc

SEQ ID NO: 31639 - DNA, 50 bp, synthetic construct
  source 1..50: mol_type = other DNA
aaaaacacaaaactaaaaaacacaaacrtaactcraataaatcaaccccc

SEQ ID NO: 31640 - DNA, 50 bp, synthetic construct
  source 1..50: mol_type = other DNA
ctaataaaaaaaccraaacccaaaaacraaaactaacttattcraaccac

SEQ ID NO: 31641 - DNA, 50 bp, synthetic construct
  source 1..50: mol_type = other DNA
cctacctcaaatcaaatccactctaaaactaaaaacatctaaaaatatac

SEQ ID NO: 31642 - DNA, 50 bp, synthetic construct
  source 1..50: mol_type = other DNA
ccttccatttttctaacatttccctaatataaccaaaccactcttaacrc

SEQ ID NO: 31643 - DNA, 50 bp, synthetic construct
  source 1..50: mol_type = other DNA
aaccttccatttttctaacatttccctaatataaccaaaccactcttaac

SEQ ID NO: 31644 - DNA, 50 bp, synthetic construct
  source 1..50: mol_type = other DNA
atataactttaaaccaacacaataatctttttaaacccctatttacaaac

SEQ ID NO: 31645 - DNA, 50 bp, synthetic construct
  source 1..50: mol_type = other DNA
attaaccaaactaattacaaactcctaacctaaaataatccacccatctc

SEQ ID NO: 31646 - DNA, 50 bp, synthetic construct
  source 1..50: mol_type = other DNA
ctaaaatactacaaacaattcatacccaaaccaaaacactaacaattacc

SEQ ID NO: 31647 - DNA, 50 bp, synthetic construct
  source 1..50: mol_type = other DNA
taacctatcacaatataatcctttcacracaacaacctaatttaaatacc

SEQ ID NO: 31648 - DNA, 50 bp, synthetic construct
  source 1..50: mol_type = other DNA
tactatacaataacattatataaccctactaccaaataaacaacattttc

SEQ ID NO: 31649 - DNA, 50 bp, synthetic construct
  source 1..50: mol_type = other DNA
ctctccaataataaaaacaaactcactactaaaaatcttccatttccacc

SEQ ID NO: 31650 - DNA, 50 bp, synthetic construct
  source 1..50: mol_type = other DNA
aaaaattaaaatcaacaccaactttacactaaaattcactattataaaac

SEQ ID NO: 31651 - DNA, 50 bp, synthetic construct
  source 1..50: mol_type = other DNA
aaaaaaacttttcaaaataaaacctaactattcaaattcatctaatatcc

SEQ ID NO: 31652 - DNA, 50 bp, synthetic construct
  source 1..50: mol_type = other DNA
accaaataaatctaaacaaccaaattctatcctaaaaaattttccctctc

SEQ ID NO: 31653 - DNA, 50 bp, synthetic construct
  source 1..50: mol_type = other DNA
ctcactttccaaaacaaacttcttaccacatttatcacaaatctacatac

SEQ ID NO: 31654 - DNA, 50 bp, synthetic construct
  source 1..50: mol_type = other DNA
acaaacttcttaccacatttatcacaaatctacatacrcctataaataac

SEQ ID NO: 31655 - DNA, 50 bp, synthetic construct
  source 1..50: mol_type = other DNA
aatctacatacrcctataaataacrttcatatacttctccaaataccaac

SEQ ID NO: 31656 - DNA, 50 bp, synthetic construct
  source 1..50: mol_type = other DNA
ctcttcacacttaactttctaaactaatactttaaactcctttataaccc

SEQ ID NO: 31657 - DNA, 50 bp, synthetic construct
  source 1..50: mol_type = other DNA
ataataactacracaacaaaaacaactctcctaattctcctttatataac

SEQ ID NO: 31658 - DNA, 50 bp, synthetic construct
  source 1..50: mol_type = other DNA
ttataaaaaacttatctcaaaacaacatacttcttcaataaaaccaaaac

SEQ ID NO: 31659 - DNA, 50 bp, synthetic construct
  source 1..50: mol_type = other DNA
caaaccaaaaatctattcacttcctcttaaactctatcactttaatattc

SEQ ID NO: 31660 - DNA, 50 bp, synthetic construct
  source 1..50: mol_type = other DNA
cctaaactttaaaactctattccraaacctaaatatctattcataaattc

SEQ ID NO: 31661 - DNA, 50 bp, synthetic construct
  source 1..50: mol_type = other DNA
taatatcctttttctatttaaaaacatcctaaactttaaaactctattcc

SEQ ID NO: 31662 - DNA, 50 bp, synthetic construct
  source 1..50: mol_type = other DNA
taacacccaaaactattaccatttctattctaaatataaaaaataatctc

SEQ ID NO: 31663 - DNA, 50 bp, synthetic construct
  source 1..50: mol_type = other DNA
rttttcraaatattcctacrtaaatctacctttacccccaaattattccc

SEQ ID NO: 31664 - DNA, 50 bp, synthetic construct
  source 1..50: mol_type = other DNA
actctactaaaaattcttaaatccraaacaccaaaaataataacaccccc

SEQ ID NO: 31665 - DNA, 50 bp, synthetic construct
  source 1..50: mol_type = other DNA
ccccraaaatattataccrccaataaataaaatacrtctaatatacaccc

SEQ ID NO: 31666 - DNA, 50 bp, synthetic construct
  source 1..50: mol_type = other DNA
tataaaactaccrataacraatatacatcaaacrcattttatctactaac

SEQ ID NO: 31667 - DNA, 50 bp, synthetic construct
  source 1..50: mol_type = other DNA
tatctactaacracacaatactcccraaaattaaaaatttaaatacaacc

SEQ ID NO: 31668 - DNA, 50 bp, synthetic construct
  source 1..50: mol_type = other DNA
taacracacaatactcccraaaattaaaaatttaaatacaaccrcaaaac

SEQ ID NO: 31669 - DNA, 50 bp, synthetic construct
  source 1..50: mol_type = other DNA
ataaatacaaaccaccaactacaaaacaaaaaaacrctcrcaaaaaaacc

SEQ ID NO: 31670 - DNA, 50 bp, synthetic construct
  source 1..50: mol_type = other DNA
aatcrttaaatttttattcaaaatctctttttacttccaaatctcacrtc

SEQ ID NO: 31671 - DNA, 50 bp, synthetic construct
  source 1..50: mol_type = other DNA
cttaacractactaacctccttattctccttaaaaaacaataaaaataac

SEQ ID NO: 31672 - DNA, 50 bp, synthetic construct
  source 1..50: mol_type = other DNA
aacraaaaacaaaaatcaactcracaacatacaaacaataataatcattc

SEQ ID NO: 31673 - DNA, 50 bp, synthetic construct
  source 1..50: mol_type = other DNA
caaaacaaacraaactctaaatctatttttctaaacaccctaacaatctc

SEQ ID NO: 31674 - DNA, 50 bp, synthetic construct
  source 1..50: mol_type = other DNA
aaacaatttcraaattaccaaaatactcaaaaaaacaaatttaaaacctc

SEQ ID NO: 31675 - DNA, 50 bp, synthetic construct
  source 1..50: mol_type = other DNA
taataactaattaatcataatactataatacaataaaaacttcctttacc

SEQ ID NO: 31676 - DNA, 50 bp, synthetic construct
  source 1..50: mol_type = other DNA
acaatacraaacatatttaatcttttacaataaaactcaaaacrcacatc

SEQ ID NO: 31677 - DNA, 50 bp, synthetic construct
  source 1..50: mol_type = other DNA
taattaataatcataataactacctaaaacacaataatatcccratatac

SEQ ID NO: 31678 - DNA, 50 bp, synthetic construct
  source 1..50: mol_type = other DNA
atatcccratatacrctttaaatctcactacaaaaaattaaatatattcc

SEQ ID NO: 31679 - DNA, 50 bp, synthetic construct
  source 1..50: mol_type = other DNA
cacataaaaaatcaattccctaattaaaaaatcactacrtacattatacc

SEQ ID NO: 31680 - DNA, 50 bp, synthetic construct
  source 1..50: mol_type = other DNA
taataactttcaaaacttattaactaaacaaaatatctacaactctcatc

SEQ ID NO: 31681 - DNA, 50 bp, synthetic construct
  source 1..50: mol_type = other DNA
aatactttccaaccccattataaactaaaactacaaccctatctaacacc

SEQ ID NO: 31682 - DNA, 50 bp, synthetic construct
  source 1..50: mol_type = other DNA
ccctttaaaaatatttttctaataaaccctaaccttatttcttcrattcc

SEQ ID NO: 31683 - DNA, 50 bp, synthetic construct
  source 1..50: mol_type = other DNA
attctcccctttaaaaatatttttctaataaaccctaaccttatttcttc

SEQ ID NO: 31684 - DNA, 50 bp, synthetic construct
  source 1..50: mol_type = other DNA
aaaataataaaaaattctaacctcactaccaacataacctccccatctcc

SEQ ID NO: 31685 - DNA, 50 bp, synthetic construct
  source 1..50: mol_type = other DNA
taaactaacttcctatttatttataaatctcaaaacaacaccrtacaacc

SEQ ID NO: 31686 - DNA, 50 bp, synthetic construct
  source 1..50: mol_type = other DNA
taaaatccttacatctcccaactaaataaaaacttactaaatcaacaaac

SEQ ID NO: 31687 - DNA, 50 bp, synthetic construct
  source 1..50: mol_type = other DNA
aaaaaaaccaatacttaaacccctaaaactacccaataacttcatattac

SEQ ID NO: 31688 - DNA, 50 bp, synthetic construct
  source 1..50: mol_type = other DNA
acccaattattaataaattaatataacacaaaacaaaaccaaacrcratc

SEQ ID NO: 31689 - DNA, 50 bp, synthetic construct
  source 1..50: mol_type = other DNA
acttacccaattattaataaattaatataacacaaaacaaaaccaaacrc

SEQ ID NO: 31690 - DNA, 50 bp, synthetic construct
  source 1..50: mol_type = other DNA
caacttacccaattattaataaattaatataacacaaaacaaaaccaaac

SEQ ID NO: 31691 - DNA, 50 bp, synthetic construct
  source 1..50: mol_type = other DNA
aaataaactacccaaactaaccttaaactaccaaaaactatatatataac

SEQ ID NO: 31692 - DNA, 50 bp, synthetic construct
  source 1..50: mol_type = other DNA
ttaatatatttacaaccacaaatacccaaaaaattctatatcaaaaaatc

SEQ ID NO: 31693 - DNA, 50 bp, synthetic construct
  source 1..50: mol_type = other DNA
ctatttacttatcttcaatactaacrctaacattctcctaatctttcccc

SEQ ID NO: 31694 - DNA, 50 bp, synthetic construct
  source 1..50: mol_type = other DNA
ccccraaatatttttctaaacatcttatactaattaacacaaactaacac

SEQ ID NO: 31695 - DNA, 50 bp, synthetic construct
  source 1..50: mol_type = other DNA
ctcaaaaattcttttcatctcttcaatctcaaactaaaccaaacaaaacc

SEQ ID NO: 31696 - DNA, 50 bp, synthetic construct
  source 1..50: mol_type = other DNA
aaaaacatatcccaataacaacccaaaaacctcattttaccttaacttcc

SEQ ID NO: 31697 - DNA, 50 bp, synthetic construct
  source 1..50: mol_type = other DNA
catataactacaaaacatttaaaaaaccttattataacraaattattcac

SEQ ID NO: 31698 - DNA, 50 bp, synthetic construct
  source 1..50: mol_type = other DNA
aaaaaaaacaaataactcaataaaaataaacaaacaacrtaaacaacccc

SEQ ID NO: 31699 - DNA, 50 bp, synthetic construct
  source 1..50: mol_type = other DNA
accccrccacaataaaactttccaaataccctataatcatataaaaaaac

SEQ ID NO: 31700 - DNA, 50 bp, synthetic construct
  source 1..50: mol_type = other DNA
crccacaataaaactttccaaataccctataatcatataaaaaaacrctc

SEQ ID NO: 31701 - DNA, 50 bp, synthetic construct
  source 1..50: mol_type = other DNA
attaacaaaaatatacaacaaataaaactcttataccaactaacaaaaac

SEQ ID NO: 31702 - DNA, 50 bp, synthetic construct
  source 1..50: mol_type = other DNA
aacaaataaaactcttataccaactaacaaaaacrtaaattaacacaacc

SEQ ID NO: 31703 - DNA, 50 bp, synthetic construct
  source 1..50: mol_type = other DNA
acaaccrctttaaaaaactttataacaacaccaactaaaactaaacatac

SEQ ID NO: 31704 - DNA, 50 bp, synthetic construct
  source 1..50: mol_type = other DNA
tatacttacaatttatttctttacattactaaacaccctcrtataaatac

SEQ ID NO: 31705 - DNA, 50 bp, synthetic construct
  source 1..50: mol_type = other DNA
tattcttttatatctaacaatttttactcaacattaaacctataacattc

SEQ ID NO: 31706 - DNA, 50 bp, synthetic construct
  source 1..50: mol_type = other DNA
aaacctcaaaactaaaaccatcaacaaacattcctaaaaacaaattctac

SEQ ID NO: 31707 - DNA, 50 bp, synthetic construct
  source 1..50: mol_type = other DNA
aacacttacaacaccraataatactcaccttaatttatttctcctcctac

SEQ ID NO: 31708 - DNA, 50 bp, synthetic construct
  source 1..50: mol_type = other DNA
aaatcaaaataaacactattcratattacaaataccataataaaaaatac

SEQ ID NO: 31709 - DNA, 50 bp, synthetic construct
  source 1..50: mol_type = other DNA
acactattcratattacaaataccataataaaaaatacrcttaaactttc

SEQ ID NO: 31710 - DNA, 50 bp, synthetic construct
  source 1..50: mol_type = other DNA
ccaataaaacccaataaaacctaacaaattatctatttactctttaactc

SEQ ID NO: 31711 - DNA, 50 bp, synthetic construct
  source 1..50: mol_type = other DNA
cccatttacatattaaaaataacaccacctaactaaacrtaataactcac

SEQ ID NO: 31712 - DNA, 50 bp, synthetic construct
  source 1..50: mol_type = other DNA
tttttccrtttccccatttacatattaaaaataacaccacctaactaaac

SEQ ID NO: 31713 - DNA, 50 bp, synthetic construct
  source 1..50: mol_type = other DNA
ctactatttacccactactataacccaaaacaaaaaactacrctttttcc

SEQ ID NO: 31714 - DNA, 50 bp, synthetic construct
  source 1..50: mol_type = other DNA
atcctataactactatttacccactactataacccaaaacaaaaaactac

SEQ ID NO: 31715 - DNA, 50 bp, synthetic construct
  source 1..50: mol_type = other DNA
aaaactataaaactaccaaaatttaaccccaacaatccaaactaatacac

SEQ ID NO: 31716 - DNA, 50 bp, synthetic construct
  source 1..50: mol_type = other DNA
aaaccrtccaacctaaccaaaaactccaccaaaataacttcacaaataac

SEQ ID NO: 31717 - DNA, 50 bp, synthetic construct
  source 1..50: mol_type = other DNA
tactatctctttccttccaacraatcrtaaaccttctataaaaataccac

SEQ ID NO: 31718 - DNA, 50 bp, synthetic construct
  source 1..50: mol_type = other DNA
aaacaaaaattaaacaaattataaccrtaacattcccacaaaaaacccac

SEQ ID NO: 31719 - DNA, 50 bp, synthetic construct
  source 1..50: mol_type = other DNA
aaaattaaacaaattataaccrtaacattcccacaaaaaacccacraccc

SEQ ID NO: 31720 - DNA, 50 bp, synthetic construct
  source 1..50: mol_type = other DNA
aaaataaataaaacaaataatatacccattttataaataaaccaaccaac

SEQ ID NO: 31721 - DNA, 50 bp, synthetic construct
  source 1..50: mol_type = other DNA
catacccacctaaaatatcccataaatcaacaaaacaatatataaaaaac

SEQ ID NO: 31722 - DNA, 50 bp, synthetic construct
  source 1..50: mol_type = other DNA
aaaacctatcccacaaacracraaaactcaaaataataaataacttaccc

SEQ ID NO: 31723 - DNA, 50 bp, synthetic construct
  source 1..50: mol_type = other DNA
cttcccaaacrtactaaacaaataaatacaacraaaaaacattttactac

SEQ ID NO: 31724 - DNA, 50 bp, synthetic construct
  source 1..50: mol_type = other DNA
aaaatatctaaaaaacccaactcctaaaaaacrcaacaaaatattctctc

SEQ ID NO: 31725 - DNA, 50 bp, synthetic construct
  source 1..50: mol_type = other DNA
ccaaaaactaaaacctacaaatataaacractcaaaccaccttcccaaac

SEQ ID NO: 31726 - DNA, 50 bp, synthetic construct
  source 1..50: mol_type = other DNA
aacccctatttaacaaataaccccaaaaactaaaacctacaaatataaac

SEQ ID NO: 31727 - DNA, 50 bp, synthetic construct
  source 1..50: mol_type = other DNA
aaaattaaataaattaatacatataatacctttaaaacaatatccaacac

SEQ ID NO: 31728 - DNA, 50 bp, synthetic construct
  source 1..50: mol_type = other DNA
cctccttactttctctaaaataccaaacaatcctaattcaaaatctttac

SEQ ID NO: 31729 - DNA, 50 bp, synthetic construct
  source 1..50: mol_type = other DNA
aaaaaaaaatacctctaactccctataataattaaaacactatcatattc

SEQ ID NO: 31730 - DNA, 50 bp, synthetic construct
  source 1..50: mol_type = other DNA
caatcaccataaaaaatcaaaaacatttccctctaatctaaaacctcccc

SEQ ID NO: 31731 - DNA, 50 bp, synthetic construct
  source 1..50: mol_type = other DNA
taaataccacacactaaacaactacaaacaacaaaaaaatattacttcac

SEQ ID NO: 31732 - DNA, 50 bp, synthetic construct
  source 1..50: mol_type = other DNA
atattacttcacrattctaaaaaccaaaaatctaaaattcaaatataaac

SEQ ID NO: 31733 - DNA, 50 bp, synthetic construct
  source 1..50: mol_type = other DNA
aaaaaaaaacttaatcctttctttctaaacaactacatcctttaaattac

SEQ ID NO: 31734 - DNA, 50 bp, synthetic construct
  source 1..50: mol_type = other DNA
acttaatcctttctttctaaacaactacatcctttaaattacraaaaccc

SEQ ID NO: 31735 - DNA, 50 bp, synthetic construct
  source 1..50: mol_type = other DNA
aaccatttcttctaaaaaccaaaacaactaaaaatttcttttcctaaatc

SEQ ID NO: 31736 - DNA, 50 bp, synthetic construct
  source 1..50: mol_type = other DNA
aactaccaacataacaataactctatttaaaaacacccttaaccaaacrc

SEQ ID NO: 31737 - DNA, 50 bp, synthetic construct
  source 1..50: mol_type = other DNA
ccaactatttcctaaaataattataccattttacaatatataaataaaac

SEQ ID NO: 31738 - DNA, 50 bp, synthetic construct
  source 1..50: mol_type = other DNA
cttcctctaaacatcctaactacataaaccaattaatttccccattatac

SEQ ID NO: 31739 - DNA, 50 bp, synthetic construct
  source 1..50: mol_type = other DNA
aattacttaatctctctacctaaattttctctcctaataaaacttacccc

SEQ ID NO: 31740 - DNA, 50 bp, synthetic construct
  source 1..50: mol_type = other DNA
aaactttaaaattaaactacctaaatacaaatactctattacacrtaacc

SEQ ID NO: 31741 - DNA, 50 bp, synthetic construct
  source 1..50: mol_type = other DNA
acaacaaaactttaaaattaaactacctaaatacaaatactctattacac

SEQ ID NO: 31742 - DNA, 50 bp, synthetic construct
  source 1..50: mol_type = other DNA
cacccaaacaattcaattccaaaaccttattatacccacttacaaacrcc

SEQ ID NO: 31743 - DNA, 50 bp, synthetic construct
  source 1..50: mol_type = other DNA
aaaaacaaatatcttttatacttaaacttacaatcaattaaatacaaacc

SEQ ID NO: 31744 - DNA, 50 bp, synthetic construct
  source 1..50: mol_type = other DNA
atccctaaatactcaaaaactaaatacaaaaattatataaacttaaaacc

SEQ ID NO: 31745 - DNA, 50 bp, synthetic construct
  source 1..50: mol_type = other DNA
caacaaactaaataacaaatcctcactacaaaaatacccctttaaccccc

SEQ ID NO: 31746 - DNA, 50 bp, synthetic construct
  source 1..50: mol_type = other DNA
ctcataaccataaaactactactcctaacatttatacaacaaccccaaac

SEQ ID NO: 31747 - DNA, 50 bp, synthetic construct
  source 1..50: mol_type = other DNA
atcttataaaataccaaataaaactaaatttacracctatattttttccc

SEQ ID NO: 31748 - DNA, 50 bp, synthetic construct
  source 1..50: mol_type = other DNA
tttaaccatattacccaaactaatctaaaattccaaaactcaaacaatcc

SEQ ID NO: 31749 - DNA, 50 bp, synthetic construct
  source 1..50: mol_type = other DNA
cctacacttacraataaaaatctaaatactaaaattcaaccaaactcatc

SEQ ID NO: 31750 - DNA, 50 bp, synthetic construct
  source 1..50: mol_type = other DNA
tcctcaaaccacctactttttaaacttacaaaacccctaatatcattaac

SEQ ID NO: 31751 - DNA, 50 bp, synthetic construct
  source 1..50: mol_type = other DNA
tactaaaattataaacrtaaaccccrcrcctaaccaaaactattctaatc

SEQ ID NO: 31752 - DNA, 50 bp, synthetic construct
  source 1..50: mol_type = other DNA
tcattaacratataaaaatatctttacrattaaaacaatcttaaccaaac

SEQ ID NO: 31753 - DNA, 50 bp, synthetic construct
  source 1..50: mol_type = other DNA
cttactatataactcaaactaatctccaactcctaaactccacccacctc

SEQ ID NO: 31754 - DNA, 50 bp, synthetic construct
  source 1..50: mol_type = other DNA
aacaaaaatccttttccaatacaaatacraccctcatattatattttaac

SEQ ID NO: 31755 - DNA, 50 bp, synthetic construct
  source 1..50: mol_type = other DNA
tcatattatattttaacraataaccaatctttctttaacatcaatcaacc

SEQ ID NO: 31756 - DNA, 50 bp, synthetic construct
  source 1..50: mol_type = other DNA
actaacttaaattttaaaattaaaaaatctaaatattcttatatccttcc

SEQ ID NO: 31757 - DNA, 50 bp, synthetic construct
  source 1..50: mol_type = other DNA
cttaacaaccaaaaaataaatctcaactaaaaaataaatcctatcctatc

SEQ ID NO: 31758 - DNA, 50 bp, synthetic construct
  source 1..50: mol_type = other DNA
aataactaaaataaaatctaaactcctcccactaactcacacaaccctac

SEQ ID NO: 31759 - DNA, 50 bp, synthetic construct
  source 1..50: mol_type = other DNA
taccttctcattaatatttaaataaaaataaaactccttaaaatccctcc

SEQ ID NO: 31760 - DNA, 50 bp, synthetic construct
  source 1..50: mol_type = other DNA
aaattacaattcaaaaaactataacaataaaccctaacacaatataatac

SEQ ID NO: 31761 - DNA, 50 bp, synthetic construct
  source 1..50: mol_type = other DNA
tccaaaaaattaccattctttctttcacaacaaaaatcaatatcacatac

SEQ ID NO: 31762 - DNA, 50 bp, synthetic construct
  source 1..50: mol_type = other DNA
acaaaaatacccractatacaatctaaatttaataactacaactataccc

SEQ ID NO: 31763 - DNA, 50 bp, synthetic construct
  source 1..50: mol_type = other DNA
ctccccatcaactcraaaatattataattcccacttattaccaactccac

SEQ ID NO: 31764 - DNA, 50 bp, synthetic construct
  source 1..50: mol_type = other DNA
caactccacraaatatacaaccctaactaaacttcrctattacaaccaac

SEQ ID NO: 31765 - DNA, 50 bp, synthetic construct
  source 1..50: mol_type = other DNA
tcataaaaaactatactaataataacrcctacaacccatctaaaacaacc

SEQ ID NO: 31766 - DNA, 50 bp, synthetic construct
  source 1..50: mol_type = other DNA
atttactaaacraactactttataaatttaaataactcattttttccccc

SEQ ID NO: 31767 - DNA, 50 bp, synthetic construct
  source 1..50: mol_type = other DNA
raatctacaacrctaactctaaaattttcttataaaaatacctaataaac

SEQ ID NO: 31768 - DNA, 50 bp, synthetic construct
  source 1..50: mol_type = other DNA
aaccaacaaaaatccatattcctaaattttccattattctttatatatac

SEQ ID NO: 31769 - DNA, 50 bp, synthetic construct
  source 1..50: mol_type = other DNA
taacctaatttcatttcattctcacaacaccttcaaaaaaaacaaaaccc

SEQ ID NO: 31770 - DNA, 50 bp, synthetic construct
  source 1..50: mol_type = other DNA
actaataaaaacccaaatccaaaaaccaaaccccatactcaaaatcacac

SEQ ID NO: 31771 - DNA, 50 bp, synthetic construct
  source 1..50: mol_type = other DNA
taaatcaaaaccacaaaaaaaaccaacactcttacaccataatatcctcc

SEQ ID NO: 31772 - DNA, 50 bp, synthetic construct
  source 1..50: mol_type = other DNA
aaacaatccaaaaaacttaaaatcatataaacaaaaacctttaataaacc

SEQ ID NO: 31773 - DNA, 50 bp, synthetic construct
  source 1..50: mol_type = other DNA
aaaaacttttacttacataacctcaaacttcctaaactatttaatactcc

SEQ ID NO: 31774 - DNA, 50 bp, synthetic construct
  source 1..50: mol_type = other DNA
ratttcataatttacatttcttcccataaaccaacctcrtatccaaatcc

SEQ ID NO: 31775 - DNA, 50 bp, synthetic construct
  source 1..50: mol_type = other DNA
ccraattaattcratttcataatttacatttcttcccataaaccaacctc

SEQ ID NO: 31776 - DNA, 50 bp, synthetic construct
  source 1..50: mol_type = other DNA
aaaaaaaatacaaactataaaatcraaccaacccraatcacaatacctac

SEQ ID NO: 31777 - DNA, 50 bp, synthetic construct
  source 1..50: mol_type = other DNA
aataaaataaaactaaatcatatccacctcctaaataccaccaaaacttc

SEQ ID NO: 31778 - DNA, 50 bp, synthetic construct
  source 1..50: mol_type = other DNA
tcataattaacattcaaaaccctctactaaacaccatcaaataataaaac

SEQ ID NO: 31779 - DNA, 50 bp, synthetic construct
  source 1..50: mol_type = other DNA
ttcaaaaccctctactaaacaccatcaaataataaaacrcaataatacac

SEQ ID NO: 31780 - DNA, 50 bp, synthetic construct
  source 1..50: mol_type = other DNA
ctttaaaaaaacataactctacctcactaaaaaacataaaaaatcaccac

SEQ ID NO: 31781 - DNA, 50 bp, synthetic construct
  source 1..50: mol_type = other DNA
ctatattttaaattctctttacttcttactaaccaattcctcatcactcc

SEQ ID NO: 31782 - DNA, 50 bp, synthetic construct
  source 1..50: mol_type = other DNA
attcacaaaccaaaacaaacaaaaacatatacctctcctttatacccttc

SEQ ID NO: 31783 - DNA, 50 bp, synthetic construct
  source 1..50: mol_type = other DNA
acatcacaaaaactctttttcacaaacaaaaaaactaacccactcaacac

SEQ ID NO: 31784 - DNA, 50 bp, synthetic construct
  source 1..50: mol_type = other DNA
ccaaatctaaatttattaaatcattcactttctactccctcaactattcc

SEQ ID NO: 31785 - DNA, 50 bp, synthetic construct
  source 1..50: mol_type = other DNA
attacatccaacratacttttctttttttaaaaccaaatctcactctttc

SEQ ID NO: 31786 - DNA, 50 bp, synthetic construct
  source 1..50: mol_type = other DNA
actaataaaattaacaaaactacttattttacaaaatctcccaaacactc

SEQ ID NO: 31787 - DNA, 50 bp, synthetic construct
  source 1..50: mol_type = other DNA
cttaacaataacaaataaaactacrctcccttaaaaataacaaataaaac

SEQ ID NO: 31788 - DNA, 50 bp, synthetic construct
  source 1..50: mol_type = other DNA
aaaattaaatcaaaaaatacctacrccttatctatcattctcaaaaaaac

SEQ ID NO: 31789 - DNA, 50 bp, synthetic construct
  source 1..50: mol_type = other DNA
attctcaaaaaaacrcaaccttatctattattatcaaaaacaatataatc

SEQ ID NO: 31790 - DNA, 50 bp, synthetic construct
  source 1..50: mol_type = other DNA
atctaatttctaaatcctaccttaaactccctaatattttcaccccatac

SEQ ID NO: 31791 - DNA, 50 bp, synthetic construct
  source 1..50: mol_type = other DNA
ataacttcaaaccccccatttcaaatcttataataactaccaaataatcc

SEQ ID NO: 31792 - DNA, 50 bp, synthetic construct
  source 1..50: mol_type = other DNA
acatatttttctctcttttacctttataaaaaccaacttcctatacaacc

SEQ ID NO: 31793 - DNA, 50 bp, synthetic construct
  source 1..50: mol_type = other DNA
aaaatttatacatctatataaaacccctaattaaaccrataaactaactc

SEQ ID NO: 31794 - DNA, 50 bp, synthetic construct
  source 1..50: mol_type = other DNA
aaaccttacacaaatacacaaatcctaataaaaaacaaataatacattac

SEQ ID NO: 31795 - DNA, 50 bp, synthetic construct
  source 1..50: mol_type = other DNA
acaaatctccttaaaatttaccaaataaacaaacaatttatcatataacc

SEQ ID NO: 31796 - DNA, 50 bp, synthetic construct
  source 1..50: mol_type = other DNA
taacrtaaacrccaaaacaactataaaccrataatatttccaacaatctc

SEQ ID NO: 31797 - DNA, 50 bp, synthetic construct
  source 1..50: mol_type = other DNA
attatcttaaaatatcttacctatctcccraaattattaaaaacaccatc

SEQ ID NO: 31798 - DNA, 50 bp, synthetic construct
  source 1..50: mol_type = other DNA
cctatctcccraaattattaaaaacaccatcractcacaattactttaac

SEQ ID NO: 31799 - DNA, 50 bp, synthetic construct
  source 1..50: mol_type = other DNA
tcccraaattattaaaaacaccatcractcacaattactttaacrttcac

SEQ ID NO: 31800 - DNA, 50 bp, synthetic construct
  source 1..50: mol_type = other DNA
actccttcctaaactcttcccaaacttacttttataatccttctctaccc

SEQ ID NO: 31801 - DNA, 50 bp, synthetic construct
  source 1..50: mol_type = other DNA
caaacttaacaactatcacataaaaataacatctaacctaacracctctc

SEQ ID NO: 31802 - DNA, 50 bp, synthetic construct
  source 1..50: mol_type = other DNA
aaatccracaaacttaacaactatcacataaaaataacatctaacctaac

SEQ ID NO: 31803 - DNA, 50 bp, synthetic construct
  source 1..50: mol_type = other DNA
aaaaccrttaaaccaaataccatttccatataacaactatcaaacctacc

SEQ ID NO: 31804 - DNA, 50 bp, synthetic construct
  source 1..50: mol_type = other DNA
taaaaaataaaactaaataaaaactccattctaactaaacttacaaaacc

SEQ ID NO: 31805 - DNA, 50 bp, synthetic construct
  source 1..50: mol_type = other DNA
aacataatccattcacaataaaaaaacccacaacattaaatataactccc

SEQ ID NO: 31806 - DNA, 50 bp, synthetic construct
  source 1..50: mol_type = other DNA
taactcccracttaactacataaaccatatataaatatatacatacaaac

SEQ ID NO: 31807 - DNA, 50 bp, synthetic construct
  source 1..50: mol_type = other DNA
tatcttacttcctaaaattattaaaaaaactcatataataaccaataaac

SEQ ID NO: 31808 - DNA, 50 bp, synthetic construct
  source 1..50: mol_type = other DNA
taacaactccaaaaaacaaaacacactaaatatccttaaaatcactacac

SEQ ID NO: 31809 - DNA, 50 bp, synthetic construct
  source 1..50: mol_type = other DNA
actccaaaaaacaaaacacactaaatatccttaaaatcactacacraaac

SEQ ID NO: 31810 - DNA, 50 bp, synthetic construct
  source 1..50: mol_type = other DNA
attatctcacttcacaaacaaaaaatctaaaaccaaaacaacccaataac

SEQ ID NO: 31811 - DNA, 50 bp, synthetic construct
  source 1..50: mol_type = other DNA
caaaaaacaaatccctctacaaacaaacatcacracaatcacaaataaac

SEQ ID NO: 31812 - DNA, 50 bp, synthetic construct
  source 1..50: mol_type = other DNA
aacracrtttaaaaatcccaaaatttcacataaaaatccaaatttcaaac

SEQ ID NO: 31813 - DNA, 50 bp, synthetic construct
  source 1..50: mol_type = other DNA
atatcraaaaacttaaatacaaaccccatacraaaaactcaaaacaaaac

SEQ ID NO: 31814 - DNA, 50 bp, synthetic construct
  source 1..50: mol_type = other DNA
taccttccttcactaaaaaaaatttcaaaacrctttaccctaaacttccc

SEQ ID NO: 31815 - DNA, 50 bp, synthetic construct
  source 1..50: mol_type = other DNA
ctcaactcraaacctctaaaaacttaaactactaatctaaataaaaacrc

SEQ ID NO: 31816 - DNA, 50 bp, synthetic construct
  source 1..50: mol_type = other DNA
tcctcaactcraaacctctaaaaacttaaactactaatctaaataaaaac

SEQ ID NO: 31817 - DNA, 50 bp, synthetic construct
  source 1..50: mol_type = other DNA
caattaataccttatattttcccaaaaacaaatatcaaatacaaaactac

SEQ ID NO: 31818 - DNA, 50 bp, synthetic construct
  source 1..50: mol_type = other DNA
taccttatattttcccaaaaacaaatatcaaatacaaaactacrtccrcc

SEQ ID NO: 31819 - DNA, 50 bp, synthetic construct
  source 1..50: mol_type = other DNA
ccrcaactaaaatacrcacaaacatcaaaataaaaccttttaaaccraac

SEQ ID NO: 31820 - DNA, 50 bp, synthetic construct
  source 1..50: mol_type = other DNA
rcaactaaaatacrcacaaacatcaaaataaaaccttttaaaccraacrc

SEQ ID NO: 31821 - DNA, 50 bp, synthetic construct
  source 1..50: mol_type = other DNA
atctcaaaatcaaaaaatcraaatcatcctaactaacacrataaaacccc

SEQ ID NO: 31822 - DNA, 50 bp, synthetic construct
  source 1..50: mol_type = other DNA
aacacaaatccaaacatatcataaaaaaatatacacaacaaataaccacc

SEQ ID NO: 31823 - DNA, 50 bp, synthetic construct
  source 1..50: mol_type = other DNA
ttaatcctaattacaatattatttaccaaactacaaaatttattcaaatc

SEQ ID NO: 31824 - DNA, 50 bp, synthetic construct
  source 1..50: mol_type = other DNA
aaaaaataaaaaacttctttcttcrtttataatccrtccctccttcccac

SEQ ID NO: 31825 - DNA, 50 bp, synthetic construct
  source 1..50: mol_type = other DNA
ttaaaaaactcttaaataaatccttacctttaataaatctaaaaactaac

SEQ ID NO: 31826 - DNA, 50 bp, synthetic construct
  source 1..50: mol_type = other DNA
aatcctcctatctcaacctcccaaaatattaaattacaaactaaaccacc

SEQ ID NO: 31827 - DNA, 50 bp, synthetic construct
  source 1..50: mol_type = other DNA
aaaataaaattaaacccttaccttacaccatatataaaaattaattcacc

SEQ ID NO: 31828 - DNA, 50 bp, synthetic construct
  source 1..50: mol_type = other DNA
aaattaaacccttaccttacaccatatataaaaattaattcaccraacrc

SEQ ID NO: 31829 - DNA, 50 bp, synthetic construct
  source 1..50: mol_type = other DNA
ttacaataaataaaattataccattacactccaccctaaacaacaaaaac

SEQ ID NO: 31830 - DNA, 50 bp, synthetic construct
  source 1..50: mol_type = other DNA
acccataataattatatatataaaccaatcacrcttctaaaacaaaaaac

SEQ ID NO: 31831 - DNA, 50 bp, synthetic construct
  source 1..50: mol_type = other DNA
attacctttcctaccacaacccataataattatatatataaaccaatcac

SEQ ID NO: 31832 - DNA, 50 bp, synthetic construct
  source 1..50: mol_type = other DNA
tccaaaaataaacaattcatacatttcaacttactactattctaaataac

SEQ ID NO: 31833 - DNA, 50 bp, synthetic construct
  source 1..50: mol_type = other DNA
cacttcattctacctaaaatataaatcatcccttaatcaaacatatccac

SEQ ID NO: 31834 - DNA, 50 bp, synthetic construct
  source 1..50: mol_type = other DNA
ataaatcatcccttaatcaaacatatccacrctttatatactacccaccc

SEQ ID NO: 31835 - DNA, 50 bp, synthetic construct
  source 1..50: mol_type = other DNA
taaaaatataattctcratttaaatccraaaaatcccraattcaaatccc

SEQ ID NO: 31836 - DNA, 50 bp, synthetic construct
  source 1..50: mol_type = other DNA
aaataataatcaactaaacttacccacttacccctcttcttcctatatac

SEQ ID NO: 31837 - DNA, 50 bp, synthetic construct
  source 1..50: mol_type = other DNA
ttcctatatacraacaaaaattcacttctcaaacctcattttaaataccc

SEQ ID NO: 31838 - DNA, 50 bp, synthetic construct
  source 1..50: mol_type = other DNA
atacaacaaaacacttccaattaatatatactttaataatcataaacaac

SEQ ID NO: 31839 - DNA, 50 bp, synthetic construct
  source 1..50: mol_type = other DNA
cttaactttcrttttctacttactacaaaaccttaaaatcaaccaaaaac

SEQ ID NO: 31840 - DNA, 50 bp, synthetic construct
  source 1..50: mol_type = other DNA
tatacatacatacaaccttttaaatcccctaaaatatactaaaacttttc

SEQ ID NO: 31841 - DNA, 50 bp, synthetic construct
  source 1..50: mol_type = other DNA
accraaaacaacaatctcacaaccaataacaaaaactaacctcttataac

SEQ ID NO: 31842 - DNA, 50 bp, synthetic construct
  source 1..50: mol_type = other DNA
aacrccacaaaaaatcaacccttaccattaactataaaactactactctc

SEQ ID NO: 31843 - DNA, 50 bp, synthetic construct
  source 1..50: mol_type = other DNA
ctaataaacattataaccrctaacrattaccrctataaattccacaactc

SEQ ID NO: 31844 - DNA, 50 bp, synthetic construct
  source 1..50: mol_type = other DNA
tatctaaataaatatacatacrtttaaacatctcaaaatcraccttaccc

SEQ ID NO: 31845 - DNA, 50 bp, synthetic construct
  source 1..50: mol_type = other DNA
aaccatccactactcccccrtaactaaactatctaaataaatatacatac

SEQ ID NO: 31846 - DNA, 50 bp, synthetic construct
  source 1..50: mol_type = other DNA
ccttccacaaactaaaactaaccaacaacatctctaacaaacacracttc

SEQ ID NO: 31847 - DNA, 50 bp, synthetic construct
  source 1..50: mol_type = other DNA
caaaaacactctaaaaatttacccaacrcttccccctaaaaaatcctacc

SEQ ID NO: 31848 - DNA, 50 bp, synthetic construct
  source 1..50: mol_type = other DNA
aaaccacaaaacaataacccraacaaaaacactctaaaaatttacccaac

SEQ ID NO: 31849 - DNA, 50 bp, synthetic construct
  source 1..50: mol_type = other DNA
tctacaatactaaaccacraaaatcaccctactcttaacctataaatacc

SEQ ID NO: 31850 - DNA, 50 bp, synthetic construct
  source 1..50: mol_type = other DNA
cctactccaaactatatctccaaccaactatatattcctaaacraatcac

SEQ ID NO: 31851 - DNA, 50 bp, synthetic construct
  source 1..50: mol_type = other DNA
tccactaccaacattctattcctcatctataaaattaaaaaactaaacac

SEQ ID NO: 31852 - DNA, 50 bp, synthetic construct
  source 1..50: mol_type = other DNA
atattctataattccaatataaataaatctaaactttattaaccaaacac

SEQ ID NO: 31853 - DNA, 50 bp, synthetic construct
  source 1..50: mol_type = other DNA
tattctaaccacaattcaaaaacctattctattttaacaactacaattac

SEQ ID NO: 31854 - DNA, 50 bp, synthetic construct
  source 1..50: mol_type = other DNA
caaacttctaaattataaccaaaacataataaatcccatttctataaaac

SEQ ID NO: 31855 - DNA, 50 bp, synthetic construct
  source 1..50: mol_type = other DNA
aaaaccaaataaaccaaccacrtcaacaaccccactacataactaattcc

SEQ ID NO: 31856 - DNA, 50 bp, synthetic construct
  source 1..50: mol_type = other DNA
ttcacatttatatttactacaaaaaatataaaaccaaataaaccaaccac

SEQ ID NO: 31857 - DNA, 50 bp, synthetic construct
  source 1..50: mol_type = other DNA
aaccaactcaataactcacacacctaactttactcraaaattcctcaaac

SEQ ID NO: 31858 - DNA, 50 bp, synthetic construct
  source 1..50: mol_type = other DNA
accraaaaaatataaaaccaactcaataactcacacacctaactttactc

SEQ ID NO: 31859 - DNA, 50 bp, synthetic construct
  source 1..50: mol_type = other DNA
tccraacaaaaccaaatatataaatcactaaattaatttcacattctccc

SEQ ID NO: 31860 - DNA, 50 bp, synthetic construct
  source 1..50: mol_type = other DNA
ctcaataaataaaactttcttccaaatacctatccaaattctaaactatc

SEQ ID NO: 31861 - DNA, 50 bp, synthetic construct
  source 1..50: mol_type = other DNA
aaaaaaaacttactcaaaacttaacrctaataaacaaaaatcataacrac

SEQ ID NO: 31862 - DNA, 50 bp, synthetic construct
  source 1..50: mol_type = other DNA
aacttccctctttacaaatttccctataaacctaactaattccctacctc

SEQ ID NO: 31863 - DNA, 50 bp, synthetic construct
  source 1..50: mol_type = other DNA
tttaattattccctcttaacccttaaaataaaaaccaaactccttaaccc

SEQ ID NO: 31864 - DNA, 50 bp, synthetic construct
  source 1..50: mol_type = other DNA
aacaaccttaaaaaacctaaacraaaccatcaaactatatcccaacaacc

SEQ ID NO: 31865 - DNA, 50 bp, synthetic construct
  source 1..50: mol_type = other DNA
ataactcaaattctacttcttccracaactactactaaaactacrataac

SEQ ID NO: 31866 - DNA, 50 bp, synthetic construct
  source 1..50: mol_type = other DNA
catactataactcaaattctacttcttccracaactactactaaaactac

SEQ ID NO: 31867 - DNA, 50 bp, synthetic construct
  source 1..50: mol_type = other DNA
cctatacaaaatatatatcttcatactataactcaaattctacttcttcc

SEQ ID NO: 31868 - DNA, 50 bp, synthetic construct
  source 1..50: mol_type = other DNA
taaaaaccaataaaaacattttcaacatcctattccaaatactcctcctc

SEQ ID NO: 31869 - DNA, 50 bp, synthetic construct
  source 1..50: mol_type = other DNA
cctaaaacaaaatattaaaaatatttccattaacctccaaacaaaaaccc

SEQ ID NO: 31870 - DNA, 50 bp, synthetic construct
  source 1..50: mol_type = other DNA
aataaactaataaatctatctaataaaaaaacctacaaaactactaaacc

SEQ ID NO: 31871 - DNA, 50 bp, synthetic construct
  source 1..50: mol_type = other DNA
aataataatataaacrcrtatccattaacacaaacatccatatatactac

SEQ ID NO: 31872 - DNA, 50 bp, synthetic construct
  source 1..50: mol_type = other DNA
actttttaactaaaaacrtaacacacataaatatttatatcaataaatac

SEQ ID NO: 31873 - DNA, 50 bp, synthetic construct
  source 1..50: mol_type = other DNA
aaaactaactaaatactaaacaataaaaactaattaactaaaaaataacc

SEQ ID NO: 31874 - DNA, 50 bp, synthetic construct
  source 1..50: mol_type = other DNA
accattttttaaccaactaattcccattattcaacatttaactaactttc

SEQ ID NO: 31875 - DNA, 50 bp, synthetic construct
  source 1..50: mol_type = other DNA
ccaaaaataaaatttattattaactaaaacttctaaaatcccrtattccc

SEQ ID NO: 31876 - DNA, 50 bp, synthetic construct
  source 1..50: mol_type = other DNA
tctcccaaaaacataactccaatccacattcccaaaataaacraaaatac

SEQ ID NO: 31877 - DNA, 50 bp, synthetic construct
  source 1..50: mol_type = other DNA
cctacrtacctaccttaccacattaaaaataccaaaataacaaaacctac

SEQ ID NO: 31878 - DNA, 50 bp, synthetic construct
  source 1..50: mol_type = other DNA
acrctaaactaaaaactatacttcccraaactacttctaacctaatttcc

SEQ ID NO: 31879 - DNA, 50 bp, synthetic construct
  source 1..50: mol_type = other DNA
taacaaacrcrtaaaccrccaatactattcctaccacaatataaaaaaac

SEQ ID NO: 31880 - DNA, 50 bp, synthetic construct
  source 1..50: mol_type = other DNA
attatatacractatatcctatatccractataatccctatcctaaaaac

SEQ ID NO: 31881 - DNA, 50 bp, synthetic construct
  source 1..50: mol_type = other DNA
tcccaaaaatcaataacctcrcctaccrcttctaaaaacaaattatatac

SEQ ID NO: 31882 - DNA, 50 bp, synthetic construct
  source 1..50: mol_type = other DNA
acaacttaccctcaaaaacracaaacraaactactaacctttaaaattcc

SEQ ID NO: 31883 - DNA, 50 bp, synthetic construct
  source 1..50: mol_type = other DNA
aacatacaaaaataaaacaacccaaaccaaaaaaaaccctaactaacccc

SEQ ID NO: 31884 - DNA, 50 bp, synthetic construct
  source 1..50: mol_type = other DNA
cactaaataataacrttactactactactctcaaatacaaaacccacrac

SEQ ID NO: 31885 - DNA, 50 bp, synthetic construct
  source 1..50: mol_type = other DNA
aaccactaaataataacrttactactactactctcaaatacaaaacccac

SEQ ID NO: 31886 - DNA, 50 bp, synthetic construct
  source 1..50: mol_type = other DNA
accataaccaaactaacrttatctcctatacccaaccactaaataataac

SEQ ID NO: 31887 - DNA, 50 bp, synthetic construct
  source 1..50: mol_type = other DNA
acctaaatcaccaaaactccccaaaaaacaaatccaatattttcttcccc

SEQ ID NO: 31888 - DNA, 50 bp, synthetic construct
  source 1..50: mol_type = other DNA
aaaactaatacaattcccaaaaccraaatctatcctcataaaaaactctc

SEQ ID NO: 31889 - DNA, 50 bp, synthetic construct
  source 1..50: mol_type = other DNA
cractccraaactatatccaaaacaaaaaactaatacaattcccaaaacc

SEQ ID NO: 31890 - DNA, 50 bp, synthetic construct
  source 1..50: mol_type = other DNA
acctaaataatactctaaaaaactcttacacaacaacacaaatccraccc

SEQ ID NO: 31891 - DNA, 50 bp, synthetic construct
  source 1..50: mol_type = other DNA
caaaaacctaaataatactctaaaaaactcttacacaacaacacaaatcc

SEQ ID NO: 31892 - DNA, 50 bp, synthetic construct
  source 1..50: mol_type = other DNA
ctattcccaaacctccccctactccaaacaaaaaacaataaaacaaaaac

SEQ ID NO: 31893 - DNA, 50 bp, synthetic construct
  source 1..50: mol_type = other DNA
ccacaactttaaaaacccctttaaaataactaaaaaaacccaaaataatc

SEQ ID NO: 31894 - DNA, 50 bp, synthetic construct
  source 1..50: mol_type = other DNA
ataatcraaaaaaaactttactaaacaacrcccctaaacaaaatcaattc

SEQ ID NO: 31895 - DNA, 50 bp, synthetic construct
  source 1..50: mol_type = other DNA
attacctaactaatttacaactaaatattaacaaaacacatcaaaacttc

SEQ ID NO: 31896 - DNA, 50 bp, synthetic construct
  source 1..50: mol_type = other DNA
aatcaaaaaactccctctaaaaaattaaaaaattaaacctacaccttccc

SEQ ID NO: 31897 - DNA, 50 bp, synthetic construct
  source 1..50: mol_type = other DNA
aaaattaaaaaattaaacctacaccttcccrtctttttaatcttccaaac

SEQ ID NO: 31898 - DNA, 50 bp, synthetic construct
  source 1..50: mol_type = other DNA
ctactaaacracaaaccccttaaaaccaaaaattttacaaaccttaaaac

SEQ ID NO: 31899 - DNA, 50 bp, synthetic construct
  source 1..50: mol_type = other DNA
aacaataccrccccaaaacctataaaactcctaacttcaaaaaatttacc

SEQ ID NO: 31900 - DNA, 50 bp, synthetic construct
  source 1..50: mol_type = other DNA
aacctataaaactcctaacttcaaaaaatttaccrtctaacaaaaaaatc

SEQ ID NO: 31901 - DNA, 50 bp, synthetic construct
  source 1..50: mol_type = other DNA
taaatatactaccaaatcaactttcraaaaattcraccataaaacttacc

SEQ ID NO: 31902 - DNA, 50 bp, synthetic construct
  source 1..50: mol_type = other DNA
tactctaaacaaaacctaaatatactaccaaatcaactttcraaaaattc

SEQ ID NO: 31903 - DNA, 50 bp, synthetic construct
  source 1..50: mol_type = other DNA
tcttaaaactactctaaacaaaacctaaatatactaccaaatcaactttc

SEQ ID NO: 31904 - DNA, 50 bp, synthetic construct
  source 1..50: mol_type = other DNA
tttactacaacttcttctaaccccaaccaatcaaaacatacccaaaatcc

SEQ ID NO: 31905 - DNA, 50 bp, synthetic construct
  source 1..50: mol_type = other DNA
tttaaacataatcatttccaatcctaatcttacaacatctaaatatctcc

SEQ ID NO: 31906 - DNA, 50 bp, synthetic construct
  source 1..50: mol_type = other DNA
tcttctaccaaccacaaatcaaataaataattaaacttttaccaaacacc

SEQ ID NO: 31907 - DNA, 50 bp, synthetic construct
  source 1..50: mol_type = other DNA
caacacaaaatcttccaatatctaaatccrcttatacctttccttacctc

SEQ ID NO: 31908 - DNA, 50 bp, synthetic construct
  source 1..50: mol_type = other DNA
aacaaatattcaatacattcctacccataaaacraaacctactaccctac

SEQ ID NO: 31909 - DNA, 50 bp, synthetic construct
  source 1..50: mol_type = other DNA
tatccatacaaataaaacttacaatcaatcttacacaaaaaaccccaacc

SEQ ID NO: 31910 - DNA, 50 bp, synthetic construct
  source 1..50: mol_type = other DNA
ataaaacttacaatcaatcttacacaaaaaaccccaaccrtattttacac

SEQ ID NO: 31911 - DNA, 50 bp, synthetic construct
  source 1..50: mol_type = other DNA
cttacacaaaaaaccccaaccrtattttacacrctatctaaataactaac

SEQ ID NO: 31912 - DNA, 50 bp, synthetic construct
  source 1..50: mol_type = other DNA
atcaaatacacaaaaaaaactctaaaaataacctcaccactcaacattcc

SEQ ID NO: 31913 - DNA, 50 bp, synthetic construct
  source 1..50: mol_type = other DNA
tatatacatcctattaaaaaactacttaacattttatatcaaaaaccacc

SEQ ID NO: 31914 - DNA, 50 bp, synthetic construct
  source 1..50: mol_type = other DNA
aaactatatttttaaaataattctacaataaacaactactattattattc

SEQ ID NO: 31915 - DNA, 50 bp, synthetic construct
  source 1..50: mol_type = other DNA
aacaacactaaaaacacrtcatatcaaaaaatcaaaattctcraaaaaac

SEQ ID NO: 31916 - DNA, 50 bp, synthetic construct
  source 1..50: mol_type = other DNA
tttactcaaacatactataaaaacccaacttaataaaccctaaaaaaatc

SEQ ID NO: 31917 - DNA, 50 bp, synthetic construct
  source 1..50: mol_type = other DNA
ccctccaaaatttaccaaattaaactttcacaacatatctaaacaaacac

SEQ ID NO: 31918 - DNA, 50 bp, synthetic construct
  source 1..50: mol_type = other DNA
caaaatttaccaaattaaactttcacaacatatctaaacaaacacrcaac

SEQ ID NO: 31919 - DNA, 50 bp, synthetic construct
  source 1..50: mol_type = other DNA
atataacaaactttactttcttctaacatctaacaccaacaacrtctaac

SEQ ID NO: 31920 - DNA, 50 bp, synthetic construct
  source 1..50: mol_type = other DNA
ataacaaactttactttcttctaacatctaacaccaacaacrtctaacrc

SEQ ID NO: 31921 - DNA, 50 bp, synthetic construct
  source 1..50: mol_type = other DNA
cctaaacttacattatccttcccttaccrataaaaccctaaaatacraac

SEQ ID NO: 31922 - DNA, 50 bp, synthetic construct
  source 1..50: mol_type = other DNA
ccttttttcctatctacctaaaaaaaacactaaaaaaatcctcatctttc

SEQ ID NO: 31923 - DNA, 50 bp, synthetic construct
  source 1..50: mol_type = other DNA
atacataaaacattctatataaaacaaaaaattataactctcaaccttcc

SEQ ID NO: 31924 - DNA, 50 bp, synthetic construct
  source 1..50: mol_type = other DNA
tacataactttaaaaaatttactctataaacaaaaaaccctaacrtaaac

SEQ ID NO: 31925 - DNA, 50 bp, synthetic construct
  source 1..50: mol_type = other DNA
ttttaatacaattcattctaataaaacaatacctacaattaaacrtccac

SEQ ID NO: 31926 - DNA, 50 bp, synthetic construct
  source 1..50: mol_type = other DNA
tccaaaacrtaactttataactaaaaaaaacctcctaacttctatataac

SEQ ID NO: 31927 - DNA, 50 bp, synthetic construct
  source 1..50: mol_type = other DNA
ttcattaacaaccacracttaacaacaatctaccaacaaaaatcaatctc

SEQ ID NO: 31928 - DNA, 50 bp, synthetic construct
  source 1..50: mol_type = other DNA
ttctatataacraccraaactaacccctactaacaaattattactaaacc

SEQ ID NO: 31929 - DNA, 50 bp, synthetic construct
  source 1..50: mol_type = other DNA
cactaaaaattcaaacaacaacatcaaaaactaatacaaaacataacctc

SEQ ID NO: 31930 - DNA, 50 bp, synthetic construct
  source 1..50: mol_type = other DNA
aactattcraaaaaaacctacraaactacaaaatcaacaaaaaatactcc

SEQ ID NO: 31931 - DNA, 50 bp, synthetic construct
  source 1..50: mol_type = other DNA
aaccccaaaaaacctaacttcctatcataaactattcraaaaaaacctac

SEQ ID NO: 31932 - DNA, 50 bp, synthetic construct
  source 1..50: mol_type = other DNA
tctactaactcaaaaccccaaaaaacctaacttcctatcataaactattc

SEQ ID NO: 31933 - DNA, 50 bp, synthetic construct
  source 1..50: mol_type = other DNA
atcttcaaaaaatcrccttctatcttcaaactaccttctttctcttctac

SEQ ID NO: 31934 - DNA, 50 bp, synthetic construct
  source 1..50: mol_type = other DNA
atttaataaaaaattcatcttcctaatttctccctcaaattaacaacatc

SEQ ID NO: 31935 - DNA, 50 bp, synthetic construct
  source 1..50: mol_type = other DNA
aaattcatcttcctaatttctccctcaaattaacaacatcracaatactc

SEQ ID NO: 31936 - DNA, 50 bp, synthetic construct
  source 1..50: mol_type = other DNA
taaacaaaacaacataatatataaaaacaccaactccaaaatctaaaatc

SEQ ID NO: 31937 - DNA, 50 bp, synthetic construct
  source 1..50: mol_type = other DNA
atatatcatcattactatcatactaaccattattctctactactataccc

SEQ ID NO: 31938 - DNA, 50 bp, synthetic construct
  source 1..50: mol_type = other DNA
acatatcacccaacatacatcaaactcctcatctacctcatataaaccac

SEQ ID NO: 31939 - DNA, 50 bp, synthetic construct
  source 1..50: mol_type = other DNA
acaaataaaaacaatacaaacaaaaactaactcctatacaaaatctcccc

SEQ ID NO: 31940 - DNA, 50 bp, synthetic construct
  source 1..50: mol_type = other DNA
aaacccttaacttaattacatctacaaaaacctttcccaaataaaatcac

SEQ ID NO: 31941 - DNA, 50 bp, synthetic construct
  source 1..50: mol_type = other DNA
tctattttctaattacactaaattaaaacccaacaaaaatttcaaaacac

SEQ ID NO: 31942 - DNA, 50 bp, synthetic construct
  source 1..50: mol_type = other DNA
ctaattacactaaattaaaacccaacaaaaatttcaaaacacrtaatctc

SEQ ID NO: 31943 - DNA, 50 bp, synthetic construct
  source 1..50: mol_type = other DNA
accaaaccttaaaacttacctataaaaaaacccaaaaaatttttaacatc

SEQ ID NO: 31944 - DNA, 50 bp, synthetic construct
  source 1..50: mol_type = other DNA
tcacttaaatttacraacattcaatatctaaattacccccttcacacatc

SEQ ID NO: 31945 - DNA, 50 bp, synthetic construct
  source 1..50: mol_type = other DNA
cccattctttataaaatcattttctttctcattttctcacttaaatttac

SEQ ID NO: 31946 - DNA, 50 bp, synthetic construct
  source 1..50: mol_type = other DNA
ccaataaataatatccaaaaaaccaaataaaaatccacttacaaatactc

SEQ ID NO: 31947 - DNA, 50 bp, synthetic construct
  source 1..50: mol_type = other DNA
aaataaccccacaatactaaaatccaaaaaaatctccctccaaaattaac

SEQ ID NO: 31948 - DNA, 50 bp, synthetic construct
  source 1..50: mol_type = other DNA
tttcaaaatatttaccaatccccttctaatacttctataaataaaattcc

SEQ ID NO: 31949 - DNA, 50 bp, synthetic construct
  source 1..50: mol_type = other DNA
aaaaactactacctaaaaataaatacttcttcttcctcaatctccaaaac

SEQ ID NO: 31950 - DNA, 50 bp, synthetic construct
  source 1..50: mol_type = other DNA
crccttctctctttcatctactcttaaatctaacccctatacaataaacc

SEQ ID NO: 31951 - DNA, 50 bp, synthetic construct
  source 1..50: mol_type = other DNA
aacctcctaaaccaaactataaactcaaaaacaacaaaaatatctaactc

SEQ ID NO: 31952 - DNA, 50 bp, synthetic construct
  source 1..50: mol_type = other DNA
tatctctaaatccacaacctaatccaaaaaacctaactctcccaacaacc

SEQ ID NO: 31953 - DNA, 50 bp, synthetic construct
  source 1..50: mol_type = other DNA
aaaccatatttcactaaatcaaaaaaacaatacaacaaacaaaaaaattc

SEQ ID NO: 31954 - DNA, 50 bp, synthetic construct
  source 1..50: mol_type = other DNA
ataaaacataacccttaaatcccaaccaaaaaaaaccactattcctccrc

SEQ ID NO: 31955 - DNA, 50 bp, synthetic construct
  source 1..50: mol_type = other DNA
tcaacaaaaccataattcataaatttacttatttatacttctctaattac

SEQ ID NO: 31956 - DNA, 50 bp, synthetic construct
  source 1..50: mol_type = other DNA
actttctatcraaaaatacrtatcttataaccataaaaatacatttctac

SEQ ID NO: 31957 - DNA, 50 bp, synthetic construct
  source 1..50: mol_type = other DNA
ctaaacaaacaacttctaataaatttcctaaaattcaacaaaataaaacc

SEQ ID NO: 31958 - DNA, 50 bp, synthetic construct
  source 1..50: mol_type = other DNA
taaattcaaaccaaaattcttttccccrtaattcaatataaaatttcttc

SEQ ID NO: 31959 - DNA, 50 bp, synthetic construct
  source 1..50: mol_type = other DNA
cctaatattcacacacacaaaaaaattacctaaaaatacatttctcaaac

SEQ ID NO: 31960 - DNA, 50 bp, synthetic construct
  source 1..50: mol_type = other DNA
tactatacaaatttatacctaaaatcaacaaactataccatataacctcc

SEQ ID NO: 31961 - DNA, 50 bp, synthetic construct
  source 1..50: mol_type = other DNA
cttcttaaaatcccacccaactttaaaaacccaaaaatcctaaaaattcc

SEQ ID NO: 31962 - DNA, 50 bp, synthetic construct
  source 1..50: mol_type = other DNA
ttcccccaacttacttaattttactatcaatctaatccctactccaaaac

SEQ ID NO: 31963 - DNA, 50 bp, synthetic construct
  source 1..50: mol_type = other DNA
tttctaacaaataaacaaactaaccacrcataaataactaccttcattcc

SEQ ID NO: 31964 - DNA, 50 bp, synthetic construct
  source 1..50: mol_type = other DNA
aaaattcaaatacraaacccttacatcaatcatcaaaaaaaacaaacttc

SEQ ID NO: 31965 - DNA, 50 bp, synthetic construct
  source 1..50: mol_type = other DNA
tctctaacatcataaataaaaatcaaccctaactttcatatattaaaacc

SEQ ID NO: 31966 - DNA, 50 bp, synthetic construct
  source 1..50: mol_type = other DNA
raactaaaactatctactctcctatcctctaactcaataaaaatcccatc

SEQ ID NO: 31967 - DNA, 50 bp, synthetic construct
  source 1..50: mol_type = other DNA
aaaaaaccaaaaaaccaaaattaaaactattaccracattaacaaaaccc

SEQ ID NO: 31968 - DNA, 50 bp, synthetic construct
  source 1..50: mol_type = other DNA
caatttcaatcctaacttcctaactcttctacaaaatccttttcctcctc

SEQ ID NO: 31969 - DNA, 50 bp, synthetic construct
  source 1..50: mol_type = other DNA
aaaaataaaaaactacaatacaaaaactcaaaactataaatctataaaac

SEQ ID NO: 31970 - DNA, 50 bp, synthetic construct
  source 1..50: mol_type = other DNA
aaaaaacaactcctctaccttctctccctttcttaataaattaaacaaac

SEQ ID NO: 31971 - DNA, 50 bp, synthetic construct
  source 1..50: mol_type = other DNA
aaaaacaaactatctactcatactaaaacccaaacaaaacacacccaccc

SEQ ID NO: 31972 - DNA, 50 bp, synthetic construct
  source 1..50: mol_type = other DNA
catactaaaacccaaacaaaacacacccacccrataataatttatcaacc

SEQ ID NO: 31973 - DNA, 50 bp, synthetic construct
  source 1..50: mol_type = other DNA
cacccrataataatttatcaaccrtaaaaaacccaaaaaactcttaaacc

SEQ ID NO: 31974 - DNA, 50 bp, synthetic construct
  source 1..50: mol_type = other DNA
aaataataacaacacctatcctacttacttaacaaaatttatataaaacc

SEQ ID NO: 31975 - DNA, 50 bp, synthetic construct
  source 1..50: mol_type = other DNA
ataaaaaaaattaaaacatatactccctaaataaccctaaacaaaccatc

SEQ ID NO: 31976 - DNA, 50 bp, synthetic construct
  source 1..50: mol_type = other DNA
aaaaacacatatcccaattcctcccataaactaaacaaacaaataacatc

SEQ ID NO: 31977 - DNA, 50 bp, synthetic construct
  source 1..50: mol_type = other DNA
aattaaaccaaaaattcaaatctactctaccttctcctttctttctccac

SEQ ID NO: 31978 - DNA, 50 bp, synthetic construct
  source 1..50: mol_type = other DNA
aaaaatcctcaaaaataaaccttatatttcactaaacaaccccaaaaaac

SEQ ID NO: 31979 - DNA, 50 bp, synthetic construct
  source 1..50: mol_type = other DNA
aaaacctttaaaaaacrtaaattatataaatccaaaaatcccatcctccc

SEQ ID NO: 31980 - DNA, 50 bp, synthetic construct
  source 1..50: mol_type = other DNA
tcctaattcctacractccrtcraatctacaataaaaacctttaaaaaac

SEQ ID NO: 31981 - DNA, 50 bp, synthetic construct
  source 1..50: mol_type = other DNA
aaaaataaactataaataacctaacctcatttacatatccctctcctccc

SEQ ID NO: 31982 - DNA, 50 bp, synthetic construct
  source 1..50: mol_type = other DNA
acaattacaaactataaaaaaccaaattacctccaaacatctaaacctac

SEQ ID NO: 31983 - DNA, 50 bp, synthetic construct
  source 1..50: mol_type = other DNA
tcctaaaactaaaccrccaacacctatctaaaacrtaattaattattaac

SEQ ID NO: 31984 - DNA, 50 bp, synthetic construct
  source 1..50: mol_type = other DNA
tacrtttaattcccataacactcttactaacaacrttaataactaaccac

SEQ ID NO: 31985 - DNA, 50 bp, synthetic construct
  source 1..50: mol_type = other DNA
aaatcacttcccttttataatttactaaaaaactaaatcacccaaaaacc

SEQ ID NO: 31986 - DNA, 50 bp, synthetic construct
  source 1..50: mol_type = other DNA
caacaataatcaaactaataccatccatcatatcctaaacttttaacrtc

SEQ ID NO: 31987 - DNA, 50 bp, synthetic construct
  source 1..50: mol_type = other DNA
tccacaataaaaacrtcacaaacraaatcctcatttataaaataccaaac

SEQ ID NO: 31988 - DNA, 50 bp, synthetic construct
  source 1..50: mol_type = other DNA
ataaaccctcaacaaaaaacctaaaactccacaataaaaacrtcacaaac

SEQ ID NO: 31989 - DNA, 50 bp, synthetic construct
  source 1..50: mol_type = other DNA
tatcaaaataaaataccaactacraaataatcaactaaaataaacaaaac

SEQ ID NO: 31990 - DNA, 50 bp, synthetic construct
  source 1..50: mol_type = other DNA
caaccraaccaaaccaaaaactactaaaatatcacrctaaaactctaacc

SEQ ID NO: 31991 - DNA, 50 bp, synthetic construct
  source 1..50: mol_type = other DNA
aaaattaactaatatacaaaacraattcctaaaactacaaatccctaaac

SEQ ID NO: 31992 - DNA, 50 bp, synthetic construct
  source 1..50: mol_type = other DNA
atatacccatttattaaactaaaaacaaaactaactactaccaaccraac

SEQ ID NO: 31993 - DNA, 50 bp, synthetic construct
  source 1..50: mol_type = other DNA
aaaaatatacccatttattaaactaaaaacaaaactaactactaccaacc

SEQ ID NO: 31994 - DNA, 50 bp, synthetic construct
  source 1..50: mol_type = other DNA
accaactctactctcaacttaacaaataaacacattcttacttcaaaaac

SEQ ID NO: 31995 - DNA, 50 bp, synthetic construct
  source 1..50: mol_type = other DNA
ttcaaaaacrcattcatattctccaacaactttcaaaaaccctttaaatc

SEQ ID NO: 31996 - DNA, 50 bp, synthetic construct
  source 1..50: mol_type = other DNA
caaaaacrcattcatattctccaacaactttcaaaaaccctttaaatcrc

SEQ ID NO: 31997 - DNA, 50 bp, synthetic construct
  source 1..50: mol_type = other DNA
ccctttaaatcrcrcttttaaaaaccctctattcattactatcatcactc

SEQ ID NO: 31998 - DNA, 50 bp, synthetic construct
  source 1..50: mol_type = other DNA
acaatactaacaaacccaaaaaaatattacacactacaaatttacataac

SEQ ID NO: 31999 - DNA, 50 bp, synthetic construct
  source 1..50: mol_type = other DNA
aataaaaaattccttaaattcccctaataaactatattctcttctatcac

SEQ ID NO: 32000 - DNA, 50 bp, synthetic construct
  source 1..50: mol_type = other DNA
tttctaaacaacctctaccttctaaaaacaacrataacttccaacttacc

SEQ ID NO: 32001 - DNA, 50 bp, synthetic construct
  source 1..50: mol_type = other DNA
aaaacaacrataacttccaacttaccrctataaactaccctataataacc

SEQ ID NO: 32002 - DNA, 50 bp, synthetic construct
  source 1..50: mol_type = other DNA
tcaatcattaactaatcactaaactaaacaaaaactataaataatcacac

SEQ ID NO: 32003 - DNA, 50 bp, synthetic construct
  source 1..50: mol_type = other DNA
ataaataaaactatatacacrcccaaaactatatcatactcaaaaaaacc

SEQ ID NO: 32004 - DNA, 50 bp, synthetic construct
  source 1..50: mol_type = other DNA
aaaaaatttaaaactttatcrattttcctaaacataacacaactctaaac

SEQ ID NO: 32005 - DNA, 50 bp, synthetic construct
  source 1..50: mol_type = other DNA
aaactaattaattcattactaaacaatcttattaaataaattaccccacc

SEQ ID NO: 32006 - DNA, 50 bp, synthetic construct
  source 1..50: mol_type = other DNA
tacrcaaatacccaaaacctcaacaaatataactaaaataccactaaatc

SEQ ID NO: 32007 - DNA, 50 bp, synthetic construct
  source 1..50: mol_type = other DNA
taacaaatcaaatctttctctaccaactaaaaaaactactactctaatac

SEQ ID NO: 32008 - DNA, 50 bp, synthetic construct
  source 1..50: mol_type = other DNA
aacataactaaataataaacraaccctaaattacttccacaataaaccrc

SEQ ID NO: 32009 - DNA, 50 bp, synthetic construct
  source 1..50: mol_type = other DNA
aaacaaaataactaaaactctaaaattaaaaacractctcttaaaatcac

SEQ ID NO: 32010 - DNA, 50 bp, synthetic construct
  source 1..50: mol_type = other DNA
aaaaaatctaacaatcccaaccctacaaaaaatatttatacatccrcccc

SEQ ID NO: 32011 - DNA, 50 bp, synthetic construct
  source 1..50: mol_type = other DNA
aaaaatttctaaaaacctaaaaattcttaccrtctttcracratataacc

SEQ ID NO: 32012 - DNA, 50 bp, synthetic construct
  source 1..50: mol_type = other DNA
aatcccacacrtaaaaatttctaaaaacctaaaaattcttaccrtctttc

SEQ ID NO: 32013 - DNA, 50 bp, synthetic construct
  source 1..50: mol_type = other DNA
ctaactcaatcccacacrtaaaaatttctaaaaacctaaaaattcttacc

SEQ ID NO: 32014 - DNA, 50 bp, synthetic construct
  source 1..50: mol_type = other DNA
acaaaaactctcaaatctttaaaaacccctacrtataaaactaaatcaac

SEQ ID NO: 32015 - DNA, 50 bp, synthetic construct
  source 1..50: mol_type = other DNA
cttactctaaaattataatttctaacctaacctcctaatttctaataaac

SEQ ID NO: 32016 - DNA, 50 bp, synthetic construct
  source 1..50: mol_type = other DNA
tacraaactacatcctaaacacrcactaaacctaaatattcattctaatc

SEQ ID NO: 32017 - DNA, 50 bp, synthetic construct
  source 1..50: mol_type = other DNA
tactcttaacacctaatatttaataacaaaaataactaataaaattccac

SEQ ID NO: 32018 - DNA, 50 bp, synthetic construct
  source 1..50: mol_type = other DNA
aaaaacaccaatttaaacttaaccaaatacattacatatttaaacaaacc

SEQ ID NO: 32019 - DNA, 50 bp, synthetic construct
  source 1..50: mol_type = other DNA
aaccraaaatatctaacctaaatctaatcaaaattttatctatacttccc

SEQ ID NO: 32020 - DNA, 50 bp, synthetic construct
  source 1..50: mol_type = other DNA
ataacaaaatactaataactaataacctaaccctaaatactactaaaacc

SEQ ID NO: 32021 - DNA, 50 bp, synthetic construct
  source 1..50: mol_type = other DNA
atatcaaatatcacctccacaaattacttcctaaactcaaaaaaaaaccc

SEQ ID NO: 32022 - DNA, 50 bp, synthetic construct
  source 1..50: mol_type = other DNA
aaaaataacatttaacaccaaaaacatcatataaaaattcttaaaatttc

SEQ ID NO: 32023 - DNA, 50 bp, synthetic construct
  source 1..50: mol_type = other DNA
aaacacactctcactctatcacccaaaataaaatacaatcataaaaacac

SEQ ID NO: 32024 - DNA, 50 bp, synthetic construct
  source 1..50: mol_type = other DNA
raaataaacraatcactaaatcaaaaaattaaaaccatcctaactaacac

SEQ ID NO: 32025 - DNA, 50 bp, synthetic construct
  source 1..50: mol_type = other DNA
rtattaaccaaaataatctcaatttcctaacctaataatccrctcacctc

SEQ ID NO: 32026 - DNA, 50 bp, synthetic construct
  source 1..50: mol_type = other DNA
ccrcrccctacccaattacctttttaatataaaattaatacatatacaac

SEQ ID NO: 32027 - DNA, 50 bp, synthetic construct
  source 1..50: mol_type = other DNA
acaatttacttaaaacataattaaaactcrcrctattcaaaaaaaacacc

SEQ ID NO: 32028 - DNA, 50 bp, synthetic construct
  source 1..50: mol_type = other DNA
craactctaactatactccaaataaactacattttttctcacatccctac

SEQ ID NO: 32029 - DNA, 50 bp, synthetic construct
  source 1..50: mol_type = other DNA
ctcaaatcctcaacraaataactaaataccaattcaataactacaatctc

SEQ ID NO: 32030 - DNA, 50 bp, synthetic construct
  source 1..50: mol_type = other DNA
aaaaaatataatacttctattacrcacattaaaaaccttacacaactacc

SEQ ID NO: 32031 - DNA, 50 bp, synthetic construct
  source 1..50: mol_type = other DNA
tctacccaatcttcttattaactcaaacaattttaaaaaaaataaactcc

SEQ ID NO: 32032 - DNA, 50 bp, synthetic construct
  source 1..50: mol_type = other DNA
ctaatttctcraaaattatcaaacattattactcttctccaatatactcc

SEQ ID NO: 32033 - DNA, 50 bp, synthetic construct
  source 1..50: mol_type = other DNA
cattattactcttctccaatatactccrcctacaaaaataaaccaaatac

SEQ ID NO: 32034 - DNA, 50 bp, synthetic construct
  source 1..50: mol_type = other DNA
taataacccaaatttcaacctatacttcataaaaaaaaacatcacaaaac

SEQ ID NO: 32035 - DNA, 50 bp, synthetic construct
  source 1..50: mol_type = other DNA
caaatttcaacctatacttcataaaaaaaaacatcacaaaacraacaaac

SEQ ID NO: 32036 - DNA, 50 bp, synthetic construct
  source 1..50: mol_type = other DNA
tcctaataccaaacattaaccaaccttaaaataaacccccaaataaaaac

SEQ ID NO: 32037 - DNA, 50 bp, synthetic construct
  source 1..50: mol_type = other DNA
atcaactaaaaacaaccaataacacctactccaaataaaaacacaaaatc

SEQ ID NO: 32038 - DNA, 50 bp, synthetic construct
  source 1..50: mol_type = other DNA
aaacaaaaaacaaaatccaccraaaaaataaccctaaaaccctcaaaatc

SEQ ID NO: 32039 - DNA, 50 bp, synthetic construct
  source 1..50: mol_type = other DNA
ctaaccttttaataattttattcaataaatactaaccttctcaaaaaacc

SEQ ID NO: 32040 - DNA, 50 bp, synthetic construct
  source 1..50: mol_type = other DNA
caaataaaattatactttcaataactctaaatctaaaaaatttacctacc

SEQ ID NO: 32041 - DNA, 50 bp, synthetic construct
  source 1..50: mol_type = other DNA
attacaaacataaaccaacacacctaaccaccttccaaattttaaatatc

SEQ ID NO: 32042 - DNA, 50 bp, synthetic construct
  source 1..50: mol_type = other DNA
aaataaaaaattccaaaaataaacaactcataaattttaaatcrcatacc

SEQ ID NO: 32043 - DNA, 50 bp, synthetic construct
  source 1..50: mol_type = other DNA
ataactaaaaataaacaataaacraacaatccctacaatataaattcccc

SEQ ID NO: 32044 - DNA, 50 bp, synthetic construct
  source 1..50: mol_type = other DNA
aaacaaaaatcatccctttattcraaaaatccacactataaaaactaccc

SEQ ID NO: 32045 - DNA, 50 bp, synthetic construct
  source 1..50: mol_type = other DNA
aaaatactctaatacttctttatcrcraaaaataaattcccaaaaccccc

SEQ ID NO: 32046 - DNA, 50 bp, synthetic construct
  source 1..50: mol_type = other DNA
ccrccaaacccaaacaataatacaaaataaaaaatttccraaactttaac

SEQ ID NO: 32047 - DNA, 50 bp, synthetic construct
  source 1..50: mol_type = other DNA
ccrataaccataaaaactaaaacccaaccraaaacaacatatacacaaac

SEQ ID NO: 32048 - DNA, 50 bp, synthetic construct
  source 1..50: mol_type = other DNA
accataaaaactaaaacccaaccraaaacaacatatacacaaacracaac

SEQ ID NO: 32049 - DNA, 50 bp, synthetic construct
  source 1..50: mol_type = other DNA
aacaaaacaaaactctatctccaaaaaacaaaaaatatctaaacacacac

SEQ ID NO: 32050 - DNA, 50 bp, synthetic construct
  source 1..50: mol_type = other DNA
taaaaactatatataaaaaaaactccaaatctcaaaactctcttacccac

SEQ ID NO: 32051 - DNA, 50 bp, synthetic construct
  source 1..50: mol_type = other DNA
atttacttaaaataacctaactcccaccaactatttttatctttcatacc

SEQ ID NO: 32052 - DNA, 50 bp, synthetic construct
  source 1..50: mol_type = other DNA
tcaaacaaccaaaacracaataaaactaaaaaaaccacctctaactaccc

SEQ ID NO: 32053 - DNA, 50 bp, synthetic construct
  source 1..50: mol_type = other DNA
aaaaaacaccaacctaaactacaaacacctctaacatattataaaacatc

SEQ ID NO: 32054 - DNA, 50 bp, synthetic construct
  source 1..50: mol_type = other DNA
caaaaatacctacaacccaaactaatacctttcctaaacrcctaaaaaac

SEQ ID NO: 32055 - DNA, 50 bp, synthetic construct
  source 1..50: mol_type = other DNA
acctttcctaaacrcctaaaaaacrtacaaactaactaaatatctacctc

SEQ ID NO: 32056 - DNA, 50 bp, synthetic construct
  source 1..50: mol_type = other DNA
ccrtttctcctacctaaaacaataactcataaaacctaaaaaatttaccc

SEQ ID NO: 32057 - DNA, 50 bp, synthetic construct
  source 1..50: mol_type = other DNA
ccraacaaatcccctaaatcttataaatcactactccaaacaaaaaaaac

SEQ ID NO: 32058 - DNA, 50 bp, synthetic construct
  source 1..50: mol_type = other DNA
attctctatccaactattccraaaaccaataataaaaacatataaaccrc

SEQ ID NO: 32059 - DNA, 50 bp, synthetic construct
  source 1..50: mol_type = other DNA
aaattctctatccaactattccraaaaccaataataaaaacatataaacc

SEQ ID NO: 32060 - DNA, 50 bp, synthetic construct
  source 1..50: mol_type = other DNA
ttattaaacctaaactttacaactacratctataataacctttcatcacc

SEQ ID NO: 32061 - DNA, 50 bp, synthetic construct
  source 1..50: mol_type = other DNA
aatttacatcttcaaacaccaaacacrataataaaaaaccaccataaacc

SEQ ID NO: 32062 - DNA, 50 bp, synthetic construct
  source 1..50: mol_type = other DNA
aataattcaattatataaacaccraccaatataaattacataacctaacc

SEQ ID NO: 32063 - DNA, 50 bp, synthetic construct
  source 1..50: mol_type = other DNA
acttacaattaaaaataaacaccractaaatcatacaattcatactaacc

SEQ ID NO: 32064 - DNA, 50 bp, synthetic construct
  source 1..50: mol_type = other DNA
atatttaaaaatctaaatatcaaaattactcraattacccctttactaac

SEQ ID NO: 32065 - DNA, 50 bp, synthetic construct
  source 1..50: mol_type = other DNA
tttaatcaaaaaccaaactctacccaacaaaaaacttaactaccctaaac

SEQ ID NO: 32066 - DNA, 50 bp, synthetic construct
  source 1..50: mol_type = other DNA
rctacrtatccaaatccaaaataaaaaacctacctttaaatttaattccc

SEQ ID NO: 32067 - DNA, 50 bp, synthetic construct
  source 1..50: mol_type = other DNA
aacctacctttaaatttaattcccraatcaaaatcccatctcaccaaaac

SEQ ID NO: 32068 - DNA, 50 bp, synthetic construct
  source 1..50: mol_type = other DNA
cttaaaaaaaaacttttctaacttccctaatttacratacttttatttcc

SEQ ID NO: 32069 - DNA, 50 bp, synthetic construct
  source 1..50: mol_type = other DNA
ttccaaacttcaaaaactaaaccaaaatccaaaaactactaaacacaatc

SEQ ID NO: 32070 - DNA, 50 bp, synthetic construct
  source 1..50: mol_type = other DNA
attatttataatccaaaaactactaaaaaacaattccaaccccaataccc

SEQ ID NO: 32071 - DNA, 50 bp, synthetic construct
  source 1..50: mol_type = other DNA
taaaactaccttccaataacttttaaaccacaaacaactcccaactaaac

SEQ ID NO: 32072 - DNA, 50 bp, synthetic construct
  source 1..50: mol_type = other DNA
aaaaatatatttttccttacacccatcctaaatctcctaaaaaacaaaac

SEQ ID NO: 32073 - DNA, 50 bp, synthetic construct
  source 1..50: mol_type = other DNA
cctaaaaaacaaaacracrttccraacaaacttaatttccctataaaacc

SEQ ID NO: 32074 - DNA, 50 bp, synthetic construct
  source 1..50: mol_type = other DNA
aactaacctcracrataataataactaaacaaaaacaactctcaaaacac

SEQ ID NO: 32075 - DNA, 50 bp, synthetic construct
  source 1..50: mol_type = other DNA
cccaaaaaatttccaaaataaactcaaacatctacaccractataaaaac

SEQ ID NO: 32076 - DNA, 50 bp, synthetic construct
  source 1..50: mol_type = other DNA
aattaatataccttaccaattattaacatccccraatactcaacaaacac

SEQ ID NO: 32077 - DNA, 50 bp, synthetic construct
  source 1..50: mol_type = other DNA
aactaataaaacctcccaaaaaaacatatacaaactaatccccttcctac

SEQ ID NO: 32078 - DNA, 50 bp, synthetic construct
  source 1..50: mol_type = other DNA
tttataactcttactaaaataaaacaaactatactcacaaactatcaaac

SEQ ID NO: 32079 - DNA, 50 bp, synthetic construct
  source 1..50: mol_type = other DNA
racctaaatcctctacaaataaaaattcctcaaaccacrattactaaacc

SEQ ID NO: 32080 - DNA, 50 bp, synthetic construct
  source 1..50: mol_type = other DNA
tttcaaaaacrctaattacaaactaaattatttaacacrattcaacaacc

SEQ ID NO: 32081 - DNA, 50 bp, synthetic construct
  source 1..50: mol_type = other DNA
rtaatctaaaaaattttcacttataaaaaactcaaaccrccatcaaaccc

SEQ ID NO: 32082 - DNA, 50 bp, synthetic construct
  source 1..50: mol_type = other DNA
ttaaacttaccactcractaaataatcacattccttttctacacccaatc

SEQ ID NO: 32083 - DNA, 50 bp, synthetic construct
  source 1..50: mol_type = other DNA
acacctcaactaaactttaccaaaacacrtaaaatacaaactaaatacrc

SEQ ID NO: 32084 - DNA, 50 bp, synthetic construct
  source 1..50: mol_type = other DNA
acttttcacattccctattatcccaaacctaaaataaaaccaacaattcc

SEQ ID NO: 32085 - DNA, 50 bp, synthetic construct
  source 1..50: mol_type = other DNA
aatctaactaacttttacttatttataaaaatcacatccaccraccraac

SEQ ID NO: 32086 - DNA, 50 bp, synthetic construct
  source 1..50: mol_type = other DNA
attcaatctaactaacttttacttatttataaaaatcacatccaccracc

SEQ ID NO: 32087 - DNA, 50 bp, synthetic construct
  source 1..50: mol_type = other DNA
ccaaacacacaaacaaatcattcataacctcatcaccccttatattccac

SEQ ID NO: 32088 - DNA, 50 bp, synthetic construct
  source 1..50: mol_type = other DNA
aaattcaataaaatacaaaaatcctatctaaaaacaacaaacracaccac

SEQ ID NO: 32089 - DNA, 50 bp, synthetic construct
  source 1..50: mol_type = other DNA
tccacaacaaattcaataaaatacaaaaatcctatctaaaaacaacaaac

SEQ ID NO: 32090 - DNA, 50 bp, synthetic construct
  source 1..50: mol_type = other DNA
aaacccttatacctcactaaatctactataaaaaaacattctaaaataac

SEQ ID NO: 32091 - DNA, 50 bp, synthetic construct
  source 1..50: mol_type = other DNA
attttcaataactacaaaactctacacaactacttttcattctcacrtcc

SEQ ID NO: 32092 - DNA, 50 bp, synthetic construct
  source 1..50: mol_type = other DNA
rcccaatctttaaaactaactttaattattccctcctaaataactctatc

SEQ ID NO: 32093 - DNA, 50 bp, synthetic construct
  source 1..50: mol_type = other DNA
ccaaattcttaaaacaccrctaaactttaaaaatcccaaacattaaactc

SEQ ID NO: 32094 - DNA, 50 bp, synthetic construct
  source 1..50: mol_type = other DNA
ctaaactaaaaacaatatcatcataatacttactaaccaaatcaaaacac

SEQ ID NO: 32095 - DNA, 50 bp, synthetic construct
  source 1..50: mol_type = other DNA
accaaatcaaaacacracctaaaccraaatctactaatactaatacaaac

SEQ ID NO: 32096 - DNA, 50 bp, synthetic construct
  source 1..50: mol_type = other DNA
acacracctaaaccraaatctactaatactaatacaaacrataaataaac

SEQ ID NO: 32097 - DNA, 50 bp, synthetic construct
  source 1..50: mol_type = other DNA
aaacraattataaacaacrtcctaaattctaaaatatccacaccctaacc

SEQ ID NO: 32098 - DNA, 50 bp, synthetic construct
  source 1..50: mol_type = other DNA
ttacrattaaaatataaacatcccaaaatccaaaacrctattcacaattc

SEQ ID NO: 32099 - DNA, 50 bp, synthetic construct
  source 1..50: mol_type = other DNA
aataaataataaaataccttatctcaaaaaaaattactcaaaacttcccc

SEQ ID NO: 32100 - DNA, 50 bp, synthetic construct
  source 1..50: mol_type = other DNA
ctaataaacraaaacraacttccaaataacacatacttaattttaacacc

SEQ ID NO: 32101 - DNA, 50 bp, synthetic construct
  source 1..50: mol_type = other DNA
ctcccactaataaatccaaacaataaaaataaccraaatcctcccaaatc

SEQ ID NO: 32102 - DNA, 50 bp, synthetic construct
  source 1..50: mol_type = other DNA
aaaataaaatttataaaataaacaaaaaccaactcttatacaacaacctc

SEQ ID NO: 32103 - DNA, 50 bp, synthetic construct
  source 1..50: mol_type = other DNA
aaaacccctaactatttccatctaaaaactcttataaataaacctattac

SEQ ID NO: 32104 - DNA, 50 bp, synthetic construct
  source 1..50: mol_type = other DNA
acaaaataacaacaccaaatattaaccaaaatataaaacaactaaaactc

SEQ ID NO: 32105 - DNA, 50 bp, synthetic construct
  source 1..50: mol_type = other DNA
accaacatttaatactatcactctataaaatcttaatcattctaataaac

SEQ ID NO: 32106 - DNA, 50 bp, synthetic construct
  source 1..50: mol_type = other DNA
taatatcatctcattataactttaatttactttaacctaataactaatac

SEQ ID NO: 32107 - DNA, 50 bp, synthetic construct
  source 1..50: mol_type = other DNA
aattaaattacttaactttttcttctaaatactaatcttttatcaaatac

SEQ ID NO: 32108 - DNA, 50 bp, synthetic construct
  source 1..50: mol_type = other DNA
atctataacttacctattcattttctttcctttttcaaaaacaaaatctc

SEQ ID NO: 32109 - DNA, 50 bp, synthetic construct
  source 1..50: mol_type = other DNA
ataacacacttttacttattaaaaaataccactaaaaaaataaacaaacc

SEQ ID NO: 32110 - DNA, 50 bp, synthetic construct
  source 1..50: mol_type = other DNA
tctccctaaaattataaataacaaaacaaaccctataaaaccttctaaac

SEQ ID NO: 32111 - DNA, 50 bp, synthetic construct
  source 1..50: mol_type = other DNA
acctactaaaccttacraaataaacaaaaacattattaaaacataaaacc

SEQ ID NO: 32112 - DNA, 50 bp, synthetic construct
  source 1..50: mol_type = other DNA
aaaaaaacaccctactctataaaatctaaaactaaaaacaacttaccacc

SEQ ID NO: 32113 - DNA, 50 bp, synthetic construct
  source 1..50: mol_type = other DNA
ccaaactaaccactccttcttatcccctaatataactttacaaaactccc

SEQ ID NO: 32114 - DNA, 50 bp, synthetic construct
  source 1..50: mol_type = other DNA
atctactaaaatccaaaatctaattaaaaactacccacactttaaacccc

SEQ ID NO: 32115 - DNA, 50 bp, synthetic construct
  source 1..50: mol_type = other DNA
tctaaaaactacaaaaaaacrcttcctcaattaaactccacttcctctcc

SEQ ID NO: 32116 - DNA, 50 bp, synthetic construct
  source 1..50: mol_type = other DNA
taaacccaataacttataaaaacacataaaataaaacccataaaaaactc

SEQ ID NO: 32117 - DNA, 50 bp, synthetic construct
  source 1..50: mol_type = other DNA
catcttaatttcctcatctatacaataaaaataataatcccaaccttctc

SEQ ID NO: 32118 - DNA, 50 bp, synthetic construct
  source 1..50: mol_type = other DNA
caataaaaataataatcccaaccttctcraaaaattacaaaatacctttc

SEQ ID NO: 32119 - DNA, 50 bp, synthetic construct
  source 1..50: mol_type = other DNA
aaatccrtaaaataacactaaacatctattaaacacttattatatacctc

SEQ ID NO: 32120 - DNA, 50 bp, synthetic construct
  source 1..50: mol_type = other DNA
ccaaacraaacacacaataaatacctaataaatactcaatatcatttcac

SEQ ID NO: 32121 - DNA, 50 bp, synthetic construct
  source 1..50: mol_type = other DNA
aaatatcacccaaacccttacacctataacctcctctttctaattacctc

SEQ ID NO: 32122 - DNA, 50 bp, synthetic construct
  source 1..50: mol_type = other DNA
aaaacattttctatatacaaaaacccccttcccctctaccaaaatccatc

SEQ ID NO: 32123 - DNA, 50 bp, synthetic construct
  source 1..50: mol_type = other DNA
ttatctaatataaaatcctcaaaaactctccaacaacttcaattaaaaac

SEQ ID NO: 32124 - DNA, 50 bp, synthetic construct
  source 1..50: mol_type = other DNA
taactaaaactattaaaaaattcctaaaaactttataccaaacaaaaacc

SEQ ID NO: 32125 - DNA, 50 bp, synthetic construct
  source 1..50: mol_type = other DNA
ttcctaaaaactttataccaaacaaaaaccrataaataaaaattcaatac

SEQ ID NO: 32126 - DNA, 50 bp, synthetic construct
  source 1..50: mol_type = other DNA
ataaaaattcaatacrcaaaaaccattccttttattcacaaatatttacc

SEQ ID NO: 32127 - DNA, 50 bp, synthetic construct
  source 1..50: mol_type = other DNA
rtcttttctatctatatccrcattcatataaaaacactcataaatccacc

SEQ ID NO: 32128 - DNA, 50 bp, synthetic construct
  source 1..50: mol_type = other DNA
ttactaccaaaaaatttcttaaaaattcctcaactacaaatcctcctacc

SEQ ID NO: 32129 - DNA, 50 bp, synthetic construct
  source 1..50: mol_type = other DNA
aaatcactccccaacctaaaccttccctaaatatctactatacttaaaac

SEQ ID NO: 32130 - DNA, 50 bp, synthetic construct
  source 1..50: mol_type = other DNA
aaccttccctaaatatctactatacttaaaacrctaactcatcrtaaaac

SEQ ID NO: 32131 - DNA, 50 bp, synthetic construct
  source 1..50: mol_type = other DNA
tactatacttaaaacrctaactcatcrtaaaacracctataaaaccctac

SEQ ID NO: 32132 - DNA, 50 bp, synthetic construct
  source 1..50: mol_type = other DNA
caaaaaaacctctccaaaataacaacrcttcaacaaaacctaaataaaac

SEQ ID NO: 32133 - DNA, 50 bp, synthetic construct
  source 1..50: mol_type = other DNA
acacaaatcaatatcccctaccctcccaaaaaacatataaacaaataaac

SEQ ID NO: 32134 - DNA, 50 bp, synthetic construct
  source 1..50: mol_type = other DNA
ttaacaaacaactacaaacaactaaaaaattactataacataaactactc

SEQ ID NO: 32135 - DNA, 50 bp, synthetic construct
  source 1..50: mol_type = other DNA
tactctaacrtaaatccttaaaaaaaactaaactcccaaaatataaaacc

SEQ ID NO: 32136 - DNA, 50 bp, synthetic construct
  source 1..50: mol_type = other DNA
ccttaaaaaaaactaaactcccaaaatataaaaccrcctatacaaaaacc

SEQ ID NO: 32137 - DNA, 50 bp, synthetic construct
  source 1..50: mol_type = other DNA
aatccctaaacccaccaaccaaccttaataccctaaaaataacaaaaaac

SEQ ID NO: 32138 - DNA, 50 bp, synthetic construct
  source 1..50: mol_type = other DNA
caaataaaacccattcactatacccaacccattaccaaaacccraaaaac

SEQ ID NO: 32139 - DNA, 50 bp, synthetic construct
  source 1..50: mol_type = other DNA
cccttaaacacaactacctcatacactatattaaaataaaatccraaacc

SEQ ID NO: 32140 - DNA, 50 bp, synthetic construct
  source 1..50: mol_type = other DNA
ccraaaccraaaaaaacaacttcttctataaattaacattatcaaccttc

SEQ ID NO: 32141 - DNA, 50 bp, synthetic construct
  source 1..50: mol_type = other DNA
ttttcctcctccattcattaccaccttaccttaaaacttaataaaaccac

SEQ ID NO: 32142 - DNA, 50 bp, synthetic construct
  source 1..50: mol_type = other DNA
taaaaccacrtatatttccataaatatcattctctttaaccaactccccc

SEQ ID NO: 32143 - DNA, 50 bp, synthetic construct
  source 1..50: mol_type = other DNA
ctaaaaatcaacaacaactcaaatctccaaaaacraacattaaaaaaaac

SEQ ID NO: 32144 - DNA, 50 bp, synthetic construct
  source 1..50: mol_type = other DNA
aaaatataatcaaaaaaaacctataatataactcrccttttttaatactc

SEQ ID NO: 32145 - DNA, 50 bp, synthetic construct
  source 1..50: mol_type = other DNA
aaactaataaaaacacaaaataaccaatacaataatatctcaaccacccc

SEQ ID NO: 32146 - DNA, 50 bp, synthetic construct
  source 1..50: mol_type = other DNA
aataactaaaacactattacattaaccactttatattcccactaaccccc

SEQ ID NO: 32147 - DNA, 50 bp, synthetic construct
  source 1..50: mol_type = other DNA
taataataataaaaccaattcaactacrataaaaaaaacccactatatac

SEQ ID NO: 32148 - DNA, 50 bp, synthetic construct
  source 1..50: mol_type = other DNA
acaactatacccccrccttccattaaaacaaaactctcaaaacaaaaatc

SEQ ID NO: 32149 - DNA, 50 bp, synthetic construct
  source 1..50: mol_type = other DNA
tactaatctaaccacaatacttaataacttctacctacaactataccccc

SEQ ID NO: 32150 - DNA, 50 bp, synthetic construct
  source 1..50: mol_type = other DNA
aaacactataatcaaaccaacattccatatcaaaaataaccttattaacc

SEQ ID NO: 32151 - DNA, 50 bp, synthetic construct
  source 1..50: mol_type = other DNA
actataatcaaaccaacattccatatcaaaaataaccttattaaccraac

SEQ ID NO: 32152 - DNA, 50 bp, synthetic construct
  source 1..50: mol_type = other DNA
atactaactaatccraacataataacrcrtacctataataacaactactc

SEQ ID NO: 32153 - DNA, 50 bp, synthetic construct
  source 1..50: mol_type = other DNA
taaaacttccraaataaaaatccttataaaacacaataaacccaatattc

SEQ ID NO: 32154 - DNA, 50 bp, synthetic construct
  source 1..50: mol_type = other DNA
aaaataatcaacccaaaaactctaattacccaaataaatctaaaacttcc

SEQ ID NO: 32155 - DNA, 50 bp, synthetic construct
  source 1..50: mol_type = other DNA
attaaaaacaactaaaaaactttaaacaaataatctcactcttcccaaac

SEQ ID NO: 32156 - DNA, 50 bp, synthetic construct
  source 1..50: mol_type = other DNA
aacaaaaccccaaaaatctaaaaaaataacaccaaacaattcaaatcaac

SEQ ID NO: 32157 - DNA, 50 bp, synthetic construct
  source 1..50: mol_type = other DNA
cacattcacccaacaatactttttaaacatccactcaacaatatcaaaac

SEQ ID NO: 32158 - DNA, 50 bp, synthetic construct
  source 1..50: mol_type = other DNA
caacaatactttttaaacatccactcaacaatatcaaaacrctaaaatac

SEQ ID NO: 32159 - DNA, 50 bp, synthetic construct
  source 1..50: mol_type = other DNA
catccactcaacaatatcaaaacrctaaaatacractataattaaaaccc

SEQ ID NO: 32160 - DNA, 50 bp, synthetic construct
  source 1..50: mol_type = other DNA
aactaaaactatactctaaaaaaataacaactacraaatcctcacaaacc

SEQ ID NO: 32161 - DNA, 50 bp, synthetic construct
  source 1..50: mol_type = other DNA
crctaaaatacractataattaaaacccraacccratctataaaaacctc

SEQ ID NO: 32162 - DNA, 50 bp, synthetic construct
  source 1..50: mol_type = other DNA
tcaaataaccccccaacctcractattccttataacaactcaaaataaac

SEQ ID NO: 32163 - DNA, 50 bp, synthetic construct
  source 1..50: mol_type = other DNA
tccccaaaaaccaaacaaatactaacaccacttatacaacctacaaaacc

SEQ ID NO: 32164 - DNA, 50 bp, synthetic construct
  source 1..50: mol_type = other DNA
aaaacctaaattcaaaataaaaacctacaaaaaaactatcaaaatctccc

SEQ ID NO: 32165 - DNA, 50 bp, synthetic construct
  source 1..50: mol_type = other DNA
aactcccccatcttcttacaacaaaaatatttctaaaataacaaccaaac

SEQ ID NO: 32166 - DNA, 50 bp, synthetic construct
  source 1..50: mol_type = other DNA
actaaaacccaaaaaccaacacttaaacctaaaattctcaaattaatatc

SEQ ID NO: 32167 - DNA, 50 bp, synthetic construct
  source 1..50: mol_type = other DNA
aatacaacaaaccactataacacttatattcctatataacaaacctacac

SEQ ID NO: 32168 - DNA, 50 bp, synthetic construct
  source 1..50: mol_type = other DNA
rtactaaatcaacacaacraactatttctcaaccataaaaaaacacraac

SEQ ID NO: 32169 - DNA, 50 bp, synthetic construct
  source 1..50: mol_type = other DNA
tttcttacaattaaaatattttcaaaattcatctatattaacrcacrctc

SEQ ID NO: 32170 - DNA, 50 bp, synthetic construct
  source 1..50: mol_type = other DNA
aatcactttaaaccaaaaaccaaaacctaaaacctctaactcccaactac

SEQ ID NO: 32171 - DNA, 50 bp, synthetic construct
  source 1..50: mol_type = other DNA
tttaaaccaaaaaccaaaacctaaaacctctaactcccaactacraaacc

SEQ ID NO: 32172 - DNA, 50 bp, synthetic construct
  source 1..50: mol_type = other DNA
actttccattctttcraatatccaaactaattatcaacaatacccacrtc

SEQ ID NO: 32173 - DNA, 50 bp, synthetic construct
  source 1..50: mol_type = other DNA
aaaataacrtatcaattactatccaaatcaaaacctttctaaaaatcrac

SEQ ID NO: 32174 - DNA, 50 bp, synthetic construct
  source 1..50: mol_type = other DNA
aaaaacaaaaacccaaacaaatccttacacaaccrtattcrtaacaaaac

SEQ ID NO: 32175 - DNA, 50 bp, synthetic construct
  source 1..50: mol_type = other DNA
cactaaatttaacaaccctaaaatttcacactcctacttatataatatac

SEQ ID NO: 32176 - DNA, 50 bp, synthetic construct
  source 1..50: mol_type = other DNA
tcacaaataacttctaaacacttaacactaaactaatccaactaaaaaac

SEQ ID NO: 32177 - DNA, 50 bp, synthetic construct
  source 1..50: mol_type = other DNA
aaatactcaaaaatcacttataaacacactataacaattcctcaaaaaac

SEQ ID NO: 32178 - DNA, 50 bp, synthetic construct
  source 1..50: mol_type = other DNA
cttataaacacactataacaattcctcaaaaaacraaaactaaaaccacc

SEQ ID NO: 32179 - DNA, 50 bp, synthetic construct
  source 1..50: mol_type = other DNA
ctttaatttctccattcatttaaccrcraacattcraattatttctaccc

SEQ ID NO: 32180 - DNA, 50 bp, synthetic construct
  source 1..50: mol_type = other DNA
tccatactaatcaaactaatcttaaacttataacctcaaataatccaccc

SEQ ID NO: 32181 - DNA, 50 bp, synthetic construct
  source 1..50: mol_type = other DNA
taccctaaaatctctaaacccactctaactcraaaaactacctaattcac

SEQ ID NO: 32182 - DNA, 50 bp, synthetic construct
  source 1..50: mol_type = other DNA
aaaaaaaattaaactaaacaataaacaattcrtaaatcaaacaacctccc

SEQ ID NO: 32183 - DNA, 50 bp, synthetic construct
  source 1..50: mol_type = other DNA
rctttctataatcratttcctctttctatccataaatcttactccaccac

SEQ ID NO: 32184 - DNA, 50 bp, synthetic construct
  source 1..50: mol_type = other DNA
aaacaaacaccaacctataaccaatccaactatttctatacctcactttc

SEQ ID NO: 32185 - DNA, 50 bp, synthetic construct
  source 1..50: mol_type = other DNA
cacttataccaatcactaaattttaaccaatcaaaaaaaaccractaaac

SEQ ID NO: 32186 - DNA, 50 bp, synthetic construct
  source 1..50: mol_type = other DNA
ataacctacacttataccaatcactaaattttaaccaatcaaaaaaaacc

SEQ ID NO: 32187 - DNA, 50 bp, synthetic construct
  source 1..50: mol_type = other DNA
actaacacaaatacaaactacaatctattaatacctccrcttattacatc

SEQ ID NO: 32188 - DNA, 50 bp, synthetic construct
  source 1..50: mol_type = other DNA
actacctccttacatattttaaattcracctaaaaatttttctatacatc

SEQ ID NO: 32189 - DNA, 50 bp, synthetic construct
  source 1..50: mol_type = other DNA
cccctacaaacccaacaccctaaattaaactcacactaattaaaatcccc

SEQ ID NO: 32190 - DNA, 50 bp, synthetic construct
  source 1..50: mol_type = other DNA
ctacccccaaatacrtaatactaaaactaaccaacttaaaaatattctcc

SEQ ID NO: 32191 - DNA, 50 bp, synthetic construct
  source 1..50: mol_type = other DNA
atcaaaccatactatacattaacaaaaacaaaaacaactataaatcctac

SEQ ID NO: 32192 - DNA, 50 bp, synthetic construct
  source 1..50: mol_type = other DNA
tactatacattaacaaaaacaaaaacaactataaatcctacractacaac

SEQ ID NO: 32193 - DNA, 50 bp, synthetic construct
  source 1..50: mol_type = other DNA
tataaatcctacractacaacrtttataactatcaaataactaacaaccc

SEQ ID NO: 32194 - DNA, 50 bp, synthetic construct
  source 1..50: mol_type = other DNA
ccctttaatcacctttaaaaaaaactataaacaaaactacctacaccrcc

SEQ ID NO: 32195 - DNA, 50 bp, synthetic construct
  source 1..50: mol_type = other DNA
taaaacttcctactctaatcccatcctcaaaacctaaatttcaacctaac

SEQ ID NO: 32196 - DNA, 50 bp, synthetic construct
  source 1..50: mol_type = other DNA
raaacctataaataaccctaacattaacctaaatctaaaaaacrcacacc

SEQ ID NO: 32197 - DNA, 50 bp, synthetic construct
  source 1..50: mol_type = other DNA
tacttccraaacctataaataaccctaacattaacctaaatctaaaaaac

SEQ ID NO: 32198 - DNA, 50 bp, synthetic construct
  source 1..50: mol_type = other DNA
ccaaaaccatccacaaactccraaaacaactaatataaataaatatcctc

SEQ ID NO: 32199 - DNA, 50 bp, synthetic construct
  source 1..50: mol_type = other DNA
ttaactcataacttcaaataatccratcctcctacctaaacctccaaaac

SEQ ID NO: 32200 - DNA, 50 bp, synthetic construct
  source 1..50: mol_type = other DNA
cataccraactcaaaacacraaacaaactttaattttaccacaaccaacc

SEQ ID NO: 32201 - DNA, 50 bp, synthetic construct
  source 1..50: mol_type = other DNA
cataaatctaaacactaaaaccccaattcctataaaccraaattaattac

SEQ ID NO: 32202 - DNA, 50 bp, synthetic construct
  source 1..50: mol_type = other DNA
ctacrcctatctccaaacttccctactacctaaactctataataaaaaac

SEQ ID NO: 32203 - DNA, 50 bp, synthetic construct
  source 1..50: mol_type = other DNA
aaacccttttaaaaactaaaaccccraaaaacaacacrtactaactcacc

SEQ ID NO: 32204 - DNA, 50 bp, synthetic construct
  source 1..50: mol_type = other DNA
aaaacaaaacaaaaaacccttttaaaaactaaaaccccraaaaacaacac

SEQ ID NO: 32205 - DNA, 50 bp, synthetic construct
  source 1..50: mol_type = other DNA
ctcctttaatatttacaaaacacctaccaaatccaaacactatacaccac

SEQ ID NO: 32206 - DNA, 50 bp, synthetic construct
  source 1..50: mol_type = other DNA
aacaaaaaacaaaaaacaaccaaacttatccctcaaattcaaaacaaccc

SEQ ID NO: 32207 - DNA, 50 bp, synthetic construct
  source 1..50: mol_type = other DNA
aaaactttccttaaaaaaaaccaaaacrtcttatatcatcaactcttaac

SEQ ID NO: 32208 - DNA, 50 bp, synthetic construct
  source 1..50: mol_type = other DNA
aatacrtcttcaaaacacaaactatatttatttaatttacatatttaccc

SEQ ID NO: 32209 - DNA, 50 bp, synthetic construct
  source 1..50: mol_type = other DNA
ctactaaaccacraaatcattttacataaaaaaatacctcttccccccac

SEQ ID NO: 32210 - DNA, 50 bp, synthetic construct
  source 1..50: mol_type = other DNA
ttcctctaattcataattatcaatttcctattacctaaccctcrctcctc

SEQ ID NO: 32211 - DNA, 50 bp, synthetic construct
  source 1..50: mol_type = other DNA
aacacatctaaataaatactaaactttccttcccaaacctaatcctaatc

SEQ ID NO: 32212 - DNA, 50 bp, synthetic construct
  source 1..50: mol_type = other DNA
cttcccaaacctaatcctaatcraaaataaaatacaaacaaaaacaaccc

SEQ ID NO: 32213 - DNA, 50 bp, synthetic construct
  source 1..50: mol_type = other DNA
accttatcaaccrttaaaaatataatatctactaaattaccaataaactc

SEQ ID NO: 32214 - DNA, 50 bp, synthetic construct
  source 1..50: mol_type = other DNA
atcaaccrttaaaaatataatatctactaaattaccaataaactcrcttc

SEQ ID NO: 32215 - DNA, 50 bp, synthetic construct
  source 1..50: mol_type = other DNA
aatcaacatactaaaactcactttctaatcttcctcataaaatacacrcc

SEQ ID NO: 32216 - DNA, 50 bp, synthetic construct
  source 1..50: mol_type = other DNA
aaaaatcaacatactaaaactcactttctaatcttcctcataaaatacac

SEQ ID NO: 32217 - DNA, 50 bp, synthetic construct
  source 1..50: mol_type = other DNA
cctactccrccctaaccacccacattatattattaatactaaaatactac

SEQ ID NO: 32218 - DNA, 50 bp, synthetic construct
  source 1..50: mol_type = other DNA
aatttccctatcaacataaaccaaaaatctcttaatccaacacctactcc

SEQ ID NO: 32219 - DNA, 50 bp, synthetic construct
  source 1..50: mol_type = other DNA
aattataaaaatatcactatttttattaccttcctaataaaccaattaac

SEQ ID NO: 32220 - DNA, 50 bp, synthetic construct
  source 1..50: mol_type = other DNA
aaaaaaaaaccrcctcacrtataacctaaacaaacaaaataaaactaccc

SEQ ID NO: 32221 - DNA, 50 bp, synthetic construct
  source 1..50: mol_type = other DNA
aaactaataataaaaaacraacaaccccaccctatttacctaaaccacac

SEQ ID NO: 32222 - DNA, 50 bp, synthetic construct
  source 1..50: mol_type = other DNA
aaaaaaacracctaccctaaatacctaaacacraaaaactactacaaaac

SEQ ID NO: 32223 - DNA, 50 bp, synthetic construct
  source 1..50: mol_type = other DNA
aacrtacaaacaaaaaataaacacaacatctaccaaaatcctctccacac

SEQ ID NO: 32224 - DNA, 50 bp, synthetic construct
  source 1..50: mol_type = other DNA
aacrtataaaaaaaactttaataaatactatactcatttcctatctacac

SEQ ID NO: 32225 - DNA, 50 bp, synthetic construct
  source 1..50: mol_type = other DNA
attttaaatacaaatcaattcaccraaacctaaaaacccaaattacratc

SEQ ID NO: 32226 - DNA, 50 bp, synthetic construct
  source 1..50: mol_type = other DNA
acttactacraccaacctaataaaactactactacaaaacctaattctcc

SEQ ID NO: 32227 - DNA, 50 bp, synthetic construct
  source 1..50: mol_type = other DNA
ratcrtaacraaaaaccaaaccctacaacaacaacttcaccaaattaatc

SEQ ID NO: 32228 - DNA, 50 bp, synthetic construct
  source 1..50: mol_type = other DNA
acaacaacaacttcaccaaattaatcrcaacaaataaaatttcccaaaac

SEQ ID NO: 32229 - DNA, 50 bp, synthetic construct
  source 1..50: mol_type = other DNA
aaatatctccaaacattataaaatacctcttaaaaaacaaaattactccc

SEQ ID NO: 32230 - DNA, 50 bp, synthetic construct
  source 1..50: mol_type = other DNA
cccaactataataaaataatattatctcttatacacaactctatcaccac

SEQ ID NO: 32231 - DNA, 50 bp, synthetic construct
  source 1..50: mol_type = other DNA
ataacatttttacaatttaacattttaattcaaaaaaaactactaacacc

SEQ ID NO: 32232 - DNA, 50 bp, synthetic construct
  source 1..50: mol_type = other DNA
cacaacctaaacaacttatccaactaaaaactaccacaatcacataacac

SEQ ID NO: 32233 - DNA, 50 bp, synthetic construct
  source 1..50: mol_type = other DNA
taaaaactaccacaatcacataacacrcattaaaacataaaataaccacc

SEQ ID NO: 32234 - DNA, 50 bp, synthetic construct
  source 1..50: mol_type = other DNA
aactaccacaatcacataacacrcattaaaacataaaataaccaccraac

SEQ ID NO: 32235 - DNA, 50 bp, synthetic construct
  source 1..50: mol_type = other DNA
atactaaaccrataaaaaacttcaacttaaaaaccrtatcraatctaatc

SEQ ID NO: 32236 - DNA, 50 bp, synthetic construct
  source 1..50: mol_type = other DNA
tctatatattatactaaaccrataaaaaacttcaacttaaaaaccrtatc

SEQ ID NO: 32237 - DNA, 50 bp, synthetic construct
  source 1..50: mol_type = other DNA
tctctatcaaaactaccrtaatttattctacaacctcctaaaaacaaaac

SEQ ID NO: 32238 - DNA, 50 bp, synthetic construct
  source 1..50: mol_type = other DNA
aaaataacaataaaaaaattcraatctcrtttctctctatcaaaactacc

SEQ ID NO: 32239 - DNA, 50 bp, synthetic construct
  source 1..50: mol_type = other DNA
tcctaaattaaactcatacccraaaataacaataaaaaaattcraatctc

SEQ ID NO: 32240 - DNA, 50 bp, synthetic construct
  source 1..50: mol_type = other DNA
caaccrcatcraaataccatacattaaattcctaaattaaactcataccc

SEQ ID NO: 32241 - DNA, 50 bp, synthetic construct
  source 1..50: mol_type = other DNA
aacatatatcccaatcacttacaaaaaaataacttcttaccaaccrcatc

SEQ ID NO: 32242 - DNA, 50 bp, synthetic construct
  source 1..50: mol_type = other DNA
tatctaacatatatcccaatcacttacaaaaaaataacttcttaccaacc

SEQ ID NO: 32243 - DNA, 50 bp, synthetic construct
  source 1..50: mol_type = other DNA
aactaaattccrctcacaatttcctctcttaatccacaaatataaaaacc

SEQ ID NO: 32244 - DNA, 50 bp, synthetic construct
  source 1..50: mol_type = other DNA
aaaataaatacccacaaccraacacaaacaaattcacaaccaaaaaaccc

SEQ ID NO: 32245 - DNA, 50 bp, synthetic construct
  source 1..50: mol_type = other DNA
atatataaaataataaaacraacttcctaactataaacctacctataccc

SEQ ID NO: 32246 - DNA, 50 bp, synthetic construct
  source 1..50: mol_type = other DNA
ctaaaaactaaaatactaacctaaatacaacaatatccataaaaccccac

SEQ ID NO: 32247 - DNA, 50 bp, synthetic construct
  source 1..50: mol_type = other DNA
actcaaatatcatctttataataaactaaccctaaccacctaatcactac

SEQ ID NO: 32248 - DNA, 50 bp, synthetic construct
  source 1..50: mol_type = other DNA
taatatttccaacctacatctcctattaaaacataaaaactacaaacrtc

SEQ ID NO: 32249 - DNA, 50 bp, synthetic construct
  source 1..50: mol_type = other DNA
ctaaacactataccaaataccaaaaacacrtcraacaaaaatataaacac

SEQ ID NO: 32250 - DNA, 50 bp, synthetic construct
  source 1..50: mol_type = other DNA
ctaccaaaccttattcataaactaacaataccaaaacctctcccraaaac

SEQ ID NO: 32251 - DNA, 50 bp, synthetic construct
  source 1..50: mol_type = other DNA
ttacraaaaacaaacaaaactaaactaaaaacccaaactacttaacatcc

SEQ ID NO: 32252 - DNA, 50 bp, synthetic construct
  source 1..50: mol_type = other DNA
ttacaaaaaaacaaactaaataatccrtaacatacctaaaacrttattac

SEQ ID NO: 32253 - DNA, 50 bp, synthetic construct
  source 1..50: mol_type = other DNA
acrtttccttacaaaaaaacaaactaaataatccrtaacatacctaaaac

SEQ ID NO: 32254 - DNA, 50 bp, synthetic construct
  source 1..50: mol_type = other DNA
tcctaacaaaacraacacaacaactcacccacaaaataactaaaataatc

SEQ ID NO: 32255 - DNA, 50 bp, synthetic construct
  source 1..50: mol_type = other DNA
cacaaaatacaaccrtcaaaacctaacrtaaacttcctactacacacaac

SEQ ID NO: 32256 - DNA, 50 bp, synthetic construct
  source 1..50: mol_type = other DNA
aaataacrtatcttaaaacraccaaaccraaaaacacacaaaatacaacc

SEQ ID NO: 32257 - DNA, 50 bp, synthetic construct
  source 1..50: mol_type = other DNA
atttatataatcracrtcaaaaaactaaacataaacttcccaataccccc

SEQ ID NO: 32258 - DNA, 50 bp, synthetic construct
  source 1..50: mol_type = other DNA
aaactaaaacrtaaaaatcacctataacctctaccctcataatatactcc

SEQ ID NO: 32259 - DNA, 50 bp, synthetic construct
  source 1..50: mol_type = other DNA
ctaatactttataaatttaatacaaaacacratcttcrtcaactcacccc

SEQ ID NO: 32260 - DNA, 50 bp, synthetic construct
  source 1..50: mol_type = other DNA
aatcaaacaccttctaatactttataaatttaatacaaaacacratcttc

SEQ ID NO: 32261 - DNA, 50 bp, synthetic construct
  source 1..50: mol_type = other DNA
tacatcaaacccacaaaacaccaaaaaatatctaactcatccaaaacctc

SEQ ID NO: 32262 - DNA, 50 bp, synthetic construct
  source 1..50: mol_type = other DNA
caaaacaccaaaaaatatctaactcatccaaaacctcraccaaaataaac

SEQ ID NO: 32263 - DNA, 50 bp, synthetic construct
  source 1..50: mol_type = other DNA
aaaaaacaaaatccacracccaaaattctacaaactaaacaatataccrc

SEQ ID NO: 32264 - DNA, 50 bp, synthetic construct
  source 1..50: mol_type = other DNA
aaaaaaaacaaaatccacracccaaaattctacaaactaaacaatatacc

SEQ ID NO: 32265 - DNA, 50 bp, synthetic construct
  source 1..50: mol_type = other DNA
tttttaaacctattccacaaactcctcaacatcataaaataaacctaaac

SEQ ID NO: 32266 - DNA, 50 bp, synthetic construct
  source 1..50: mol_type = other DNA
atcaaaaatcraacaaaaaaataaccacaaaatcactctaaaaacaaaac

SEQ ID NO: 32267 - DNA, 50 bp, synthetic construct
  source 1..50: mol_type = other DNA
aaacctaaacrccttactttcaaaataactttataactacctccctatcc

SEQ ID NO: 32268 - DNA, 50 bp, synthetic construct
  source 1..50: mol_type = other DNA
ttcaaaataactttataactacctccctatccrattcctaatttaacctc

SEQ ID NO: 32269 - DNA, 50 bp, synthetic construct
  source 1..50: mol_type = other DNA
aataacraaacaaaaaacttcttccttaaaccttcttacctataaaaaac

SEQ ID NO: 32270 - DNA, 50 bp, synthetic construct
  source 1..50: mol_type = other DNA
craatttattttattcttccttaaatcccaaaaactaactttcctaacac

SEQ ID NO: 32271 - DNA, 50 bp, synthetic construct
  source 1..50: mol_type = other DNA
aaaaaaaataaaacccaaacaacctctaacrtatcaacactaacrctatc

SEQ ID NO: 32272 - DNA, 50 bp, synthetic construct
  source 1..50: mol_type = other DNA
ttataaacccaaaacaaaccaacataaaaactaaataaaaaaactcctac

SEQ ID NO: 32273 - DNA, 50 bp, synthetic construct
  source 1..50: mol_type = other DNA
ataaaaactaaacactaccctccccaacaaccaaaaatcctaaaaaaacc

SEQ ID NO: 32274 - DNA, 50 bp, synthetic construct
  source 1..50: mol_type = other DNA
ttaaattacctaaaccrctacratctttaaaaaattaatataacaaaccc

SEQ ID NO: 32275 - DNA, 50 bp, synthetic construct
  source 1..50: mol_type = other DNA
taattattcacctaactttaaaacccacrttaaattacctaaaccrctac

SEQ ID NO: 32276 - DNA, 50 bp, synthetic construct
  source 1..50: mol_type = other DNA
cctcrtaattattcacctaactttaaaacccacrttaaattacctaaacc

SEQ ID NO: 32277 - DNA, 50 bp, synthetic construct
  source 1..50: mol_type = other DNA
caacratccaaacaatccaacrtaaatcccaaaactaaataaataaccac

SEQ ID NO: 32278 - DNA, 50 bp, synthetic construct
  source 1..50: mol_type = other DNA
acaatccaacrtaaatcccaaaactaaataaataaccacraaaaacccac

SEQ ID NO: 32279 - DNA, 50 bp, synthetic construct
  source 1..50: mol_type = other DNA
atacratccaaactttattttctaaaaataaaaataacccatttccctac

SEQ ID NO: 32280 - DNA, 50 bp, synthetic construct
  source 1..50: mol_type = other DNA
taacctaatcaaaattcacacacrcctaaaacttaaaaccaaaaacaccc

SEQ ID NO: 32281 - DNA, 50 bp, synthetic construct
  source 1..50: mol_type = other DNA
taaaaaaactataactacraaccaaaacctatctaccctctatatttccc

SEQ ID NO: 32282 - DNA, 50 bp, synthetic construct
  source 1..50: mol_type = other DNA
tttatcctatttcctaacraaaaatacaaaaaacaaacaaatcttaaccc

SEQ ID NO: 32283 - DNA, 50 bp, synthetic construct
  source 1..50: mol_type = other DNA
cacacataaatataaaaccataaacaacacattcaacctctctaaacctc

SEQ ID NO: 32284 - DNA, 50 bp, synthetic construct
  source 1..50: mol_type = other DNA
tataaaaaacaaacatatatcrccctacccatcrtataaaaaacaaacrc

SEQ ID NO: 32285 - DNA, 50 bp, synthetic construct
  source 1..50: mol_type = other DNA
crtttatttctcacacrataaacaaaacracacatatttatttctcacac

SEQ ID NO: 32286 - DNA, 50 bp, synthetic construct
  source 1..50: mol_type = other DNA
ttatttctcacacrataaacaaaacracacatatttatttctcacacrac

SEQ ID NO: 32287 - DNA, 50 bp, synthetic construct
  source 1..50: mol_type = other DNA
aacctatataaataaaaaacccaaaaaacrccctataaaaaatacccrtc

SEQ ID NO: 32288 - DNA, 50 bp, synthetic construct
  source 1..50: mol_type = other DNA
ttaaacctatataaataaaaaacccaaaaaacrccctataaaaaataccc

SEQ ID NO: 32289 - DNA, 50 bp, synthetic construct
  source 1..50: mol_type = other DNA
aacrctccctaaatcttttactcacataaatctaaatcccatataaacac

SEQ ID NO: 32290 - DNA, 50 bp, synthetic construct
  source 1..50: mol_type = other DNA
catttccraaaacaacttctcttaaaattaaaacaaatccaaatactatc

SEQ ID NO: 32291 - DNA, 50 bp, synthetic construct
  source 1..50: mol_type = other DNA
aatatttccttctccaatactacactaaaaaaccacaaaccaaaaaactc

SEQ ID NO: 32292 - DNA, 50 bp, synthetic construct
  source 1..50: mol_type = other DNA
aaaatctaaaaacratcccaaaaacacacaaaaaaaatacctacracctc

SEQ ID NO: 32293 - DNA, 50 bp, synthetic construct
  source 1..50: mol_type = other DNA
ataatcactcaaataatctcaaaactactctcaaaaaaactaacraaacc

SEQ ID NO: 32294 - DNA, 50 bp, synthetic construct
  source 1..50: mol_type = other DNA
caaaaaaactaacraaaccrcaaacactcctcttatatatccctaaaacc

SEQ ID NO: 32295 - DNA, 50 bp, synthetic construct
  source 1..50: mol_type = other DNA
ttctcctcttacrtaaacttatcctacacrtctacaaaaactacttcttc

SEQ ID NO: 32296 - DNA, 50 bp, synthetic construct
  source 1..50: mol_type = other DNA
ctaaactaaaccraaaaccctaactactaacaataactacaccaataacc

SEQ ID NO: 32297 - DNA, 50 bp, synthetic construct
  source 1..50: mol_type = other DNA
aacaattaaaaacatcrccrctataattctacataaacacaattcactcc

SEQ ID NO: 32298 - DNA, 50 bp, synthetic construct
  source 1..50: mol_type = other DNA
racccaacccaaatacaacraaataaactatattcatataaaatcacaac

SEQ ID NO: 32299 - DNA, 50 bp, synthetic construct
  source 1..50: mol_type = other DNA
aaaaaaccaaaacratacttccctaccccaacctaacaattaaaaacatc

SEQ ID NO: 32300 - DNA, 50 bp, synthetic construct
  source 1..50: mol_type = other DNA
cctaacacccttctaccraatatcactatatccccataattaaatttaac

SEQ ID NO: 32301 - DNA, 50 bp, synthetic construct
  source 1..50: mol_type = other DNA
aaataataaaaaacaaaactcctccaataaaatacacaaaataaaccccc

SEQ ID NO: 32302 - DNA, 50 bp, synthetic construct
  source 1..50: mol_type = other DNA
aattctaactatataactaataaaacccacaaatatacccaataaccaac

SEQ ID NO: 32303 - DNA, 50 bp, synthetic construct
  source 1..50: mol_type = other DNA
rccctactattaccrataacctaaataactttaaaatttcaccttcaacc

SEQ ID NO: 32304 - DNA, 50 bp, synthetic construct
  source 1..50: mol_type = other DNA
cctaaataactttaaaatttcaccttcaaccracaaaaaaaacattatac

SEQ ID NO: 32305 - DNA, 50 bp, synthetic construct
  source 1..50: mol_type = other DNA
atacrcttaaatttttttcctttttcttttttaaactcacacctaaacac

SEQ ID NO: 32306 - DNA, 50 bp, synthetic construct
  source 1..50: mol_type = other DNA
aaatttttttcctttttcttttttaaactcacacctaaacacrcatctac

SEQ ID NO: 32307 - DNA, 50 bp, synthetic construct
  source 1..50: mol_type = other DNA
actttaccaaaaaacctaaaacccraacctaatataaatcactcctactc

SEQ ID NO: 32308 - DNA, 50 bp, synthetic construct
  source 1..50: mol_type = other DNA
ctaccccctaaatattcacattcactactttaccaaaaaacctaaaaccc

SEQ ID NO: 32309 - DNA, 50 bp, synthetic construct
  source 1..50: mol_type = other DNA
aaaaaacctcattcacaaattacaaaccaatcataacccttctaataaac

SEQ ID NO: 32310 - DNA, 50 bp, synthetic construct
  source 1..50: mol_type = other DNA
attaaaaattacaacraactataatcatactactacactccaactaaaac

SEQ ID NO: 32311 - DNA, 50 bp, synthetic construct
  source 1..50: mol_type = other DNA
aaaaactaaatcaaaaaaataacctaaccccaaaaattaaaaattacaac

SEQ ID NO: 32312 - DNA, 50 bp, synthetic construct
  source 1..50: mol_type = other DNA
ccctcttaaaactccacccctaaacaaatacttttacactacctatactc

SEQ ID NO: 32313 - DNA, 50 bp, synthetic construct
  source 1..50: mol_type = other DNA
aacaccaaccctattataaaacaaaatcacctcctacaaaaactaccaac

SEQ ID NO: 32314 - DNA, 50 bp, synthetic construct
  source 1..50: mol_type = other DNA
cctactaaataaaattcaactatatctaccraaaaccrtacaccrtctac

SEQ ID NO: 32315 - DNA, 50 bp, synthetic construct
  source 1..50: mol_type = other DNA
cccatacctactaaataaaattcaactatatctaccraaaaccrtacacc

SEQ ID NO: 32316 - DNA, 50 bp, synthetic construct
  source 1..50: mol_type = other DNA
aatctataataatccccatacctactaaataaaattcaactatatctacc

SEQ ID NO: 32317 - DNA, 50 bp, synthetic construct
  source 1..50: mol_type = other DNA
acaaaaacatcaaaaaataaaactataatttataaacattacctaacctc

SEQ ID NO: 32318 - DNA, 50 bp, synthetic construct
  source 1..50: mol_type = other DNA
aacccrataccaaaactaaaaacctcrtctacccaataataataacaaac

SEQ ID NO: 32319 - DNA, 50 bp, synthetic construct
  source 1..50: mol_type = other DNA
ccaaaactaaaaacctcrtctacccaataataataacaaacraaaccctc

SEQ ID NO: 32320 - DNA, 50 bp, synthetic construct
  source 1..50: mol_type = other DNA
tttcccaaaaatacctttacctttaactatccrtatacraaaaaacacac

SEQ ID NO: 32321 - DNA, 50 bp, synthetic construct
  source 1..50: mol_type = other DNA
cacrtatataatacaaaactaaactcraaaccaaattaacaaaaaacccc

SEQ ID NO: 32322 - DNA, 50 bp, synthetic construct
  source 1..50: mol_type = other DNA
aatttacttcaaaaccaaacaaaaaacaaaaccaaccttaccctaatacc

SEQ ID NO: 32323 - DNA, 50 bp, synthetic construct
  source 1..50: mol_type = other DNA
craccaactactatatacacrtatatacraaaataatcatatatataaac

SEQ ID NO: 32324 - DNA, 50 bp, synthetic construct
  source 1..50: mol_type = other DNA
aaaactttacatataaaaaccrcctaacaaaacrccacacacacatacac

SEQ ID NO: 32325 - DNA, 50 bp, synthetic construct
  source 1..50: mol_type = other DNA
aaaaacttaaaaattaaaaaactttacatataaaaaccrcctaacaaaac

SEQ ID NO: 32326 - DNA, 50 bp, synthetic construct
  source 1..50: mol_type = other DNA
ctatataaacaaaaaactccaaacccracrcaaaaacccaataaaatacc

SEQ ID NO: 32327 - DNA, 50 bp, synthetic construct
  source 1..50: mol_type = other DNA
cctaaccacraataaaaaaccatatataaaaactctaaaatacacaaaac

SEQ ID NO: 32328 - DNA, 50 bp, synthetic construct
  source 1..50: mol_type = other DNA
acttaaacacrttcctacaacactaacratactaaaaaacaaactcaaac

SEQ ID NO: 32329 - DNA, 50 bp, synthetic construct
  source 1..50: mol_type = other DNA
acraaatctaaaaatcaaaattaacttaaacacrttcctacaacactaac

SEQ ID NO: 32330 - DNA, 50 bp, synthetic construct
  source 1..50: mol_type = other DNA
ccrccaatactacaaaaacrtatctaaaccaactttaattctcaaacttc

SEQ ID NO: 32331 - DNA, 50 bp, synthetic construct
  source 1..50: mol_type = other DNA
rccctacactacaataccataataaactataaatacaataaaaatatcac

SEQ ID NO: 32332 - DNA, 50 bp, synthetic construct
  source 1..50: mol_type = other DNA
caacaaaccctaaaaaatccacraaaccaaaaaccaattttaaacaaaac

SEQ ID NO: 32333 - DNA, 50 bp, synthetic construct
  source 1..50: mol_type = other DNA
tcataatattacaatacaaaacrtcttatttaaaactaactcttaatccc

SEQ ID NO: 32334 - DNA, 50 bp, synthetic construct
  source 1..50: mol_type = other DNA
atttaaaactaactcttaatcccrtaaatctcccaaaacctattactctc

SEQ ID NO: 32335 - DNA, 50 bp, synthetic construct
  source 1..50: mol_type = other DNA
ctaatatctacctaaaacaaaatataaaacraaaacacrctacaacctcc

SEQ ID NO: 32336 - DNA, 50 bp, synthetic construct
  source 1..50: mol_type = other DNA
aaacccraaaccctaatatctacctaaaacaaaatataaaacraaaacac

SEQ ID NO: 32337 - DNA, 50 bp, synthetic construct
  source 1..50: mol_type = other DNA
taaataataaacccraaaccctaatatctacctaaaacaaaatataaaac

SEQ ID NO: 32338 - DNA, 50 bp, synthetic construct
  source 1..50: mol_type = other DNA
ccaaacaatactaaacaaataaccccttcaacaacataaataataaaccc

SEQ ID NO: 32339 - DNA, 50 bp, synthetic construct
  source 1..50: mol_type = other DNA
tacatatttaaaaacaatcattccactaaaaaacattttaaaatatttcc

SEQ ID NO: 32340 - DNA, 50 bp, synthetic construct
  source 1..50: mol_type = other DNA
ttttaaaatatttccrataaaaactaaacctcrtctacctcacctacctc

SEQ ID NO: 32341 - DNA, 50 bp, synthetic construct
  source 1..50: mol_type = other DNA
ctcaaaaacacaaaaaactttcatctctaaaaaattatcrccaaaataac

SEQ ID NO: 32342 - DNA, 50 bp, synthetic construct
  source 1..50: mol_type = other DNA
aaaaataacccctcaaaaacacaaaaaactttcatctctaaaaaattatc

SEQ ID NO: 32343 - DNA, 50 bp, synthetic construct
  source 1..50: mol_type = other DNA
taccaataaaaatttcacatatattaaaaaaaacaaacttcracttatcc

SEQ ID NO: 32344 - DNA, 50 bp, synthetic construct
  source 1..50: mol_type = other DNA
atcraatataatctaaaacracrttttcaaccaaaatcccaataatcacc

SEQ ID NO: 32345 - DNA, 50 bp, synthetic construct
  source 1..50: mol_type = other DNA
aaaactataaaacctcctacctttccctctctaaaatcctataactcacc

SEQ ID NO: 32346 - DNA, 50 bp, synthetic construct
  source 1..50: mol_type = other DNA
tacrcctctaacaataaaaaaaattctaacaaacattctaaacttccccc

SEQ ID NO: 32347 - DNA, 50 bp, synthetic construct
  source 1..50: mol_type = other DNA
aaaaattctaacaaacattctaaacttcccccrtaaaccaataacctacc

SEQ ID NO: 32348 - DNA, 50 bp, synthetic construct
  source 1..50: mol_type = other DNA
taataactctaaatcatcttataattcaatataaaaacaatttctacacc

SEQ ID NO: 32349 - DNA, 50 bp, synthetic construct
  source 1..50: mol_type = other DNA
tatctaaaaaacctacrcttaaactctacraaaataaacaaaactaaacc

SEQ ID NO: 32350 - DNA, 50 bp, synthetic construct
  source 1..50: mol_type = other DNA
acaaaaaccccttacracaaatatctaaaaaacctacrcttaaactctac

SEQ ID NO: 32351 - DNA, 50 bp, synthetic construct
  source 1..50: mol_type = other DNA
aactcacaaaaaccttaaaatataacaaaacttctacaataaaaacttac

SEQ ID NO: 32352 - DNA, 50 bp, synthetic construct
  source 1..50: mol_type = other DNA
aaccaaaaacaatataataaaattactcatcrcaaaaaaacracccctac

SEQ ID NO: 32353 - DNA, 50 bp, synthetic construct
  source 1..50: mol_type = other DNA
aaatataacaaaacttctacaataaaaacttacraaaaaacrcaaaaacc

SEQ ID NO: 32354 - DNA, 50 bp, synthetic construct
  source 1..50: mol_type = other DNA
aaaaaccrtcttcctacrataaataatttcatcacactactcttaactcc

SEQ ID NO: 32355 - DNA, 50 bp, synthetic construct
  source 1..50: mol_type = other DNA
rtcttcctacrataaataatttcatcacactactcttaactccrtaactc

SEQ ID NO: 32356 - DNA, 50 bp, synthetic construct
  source 1..50: mol_type = other DNA
aatttcatcacactactcttaactccrtaactcrataaatcatatcaaac

SEQ ID NO: 32357 - DNA, 50 bp, synthetic construct
  source 1..50: mol_type = other DNA
actaccracaacrataaaataaaaactatactctccaatcaaaacracac

SEQ ID NO: 32358 - DNA, 50 bp, synthetic construct
  source 1..50: mol_type = other DNA
aaaaaactaccracaacrataaaataaaaactatactctccaatcaaaac

SEQ ID NO: 32359 - DNA, 50 bp, synthetic construct
  source 1..50: mol_type = other DNA
ctcactactaataacaaacccctacacracaaaaacractatataaaaac

SEQ ID NO: 32360 - DNA, 50 bp, synthetic construct
  source 1..50: mol_type = other DNA
aaacttcctaaaaacaataaaacctcactactaataacaaacccctacac

SEQ ID NO: 32361 - DNA, 50 bp, synthetic construct
  source 1..50: mol_type = other DNA
aaaataaaccaaactaaatataaacratcattactctactacracttccc

SEQ ID NO: 32362 - DNA, 50 bp, synthetic construct
  source 1..50: mol_type = other DNA
caaactaaatataaacratcattactctactacracttcccraaaaacac

SEQ ID NO: 32363 - DNA, 50 bp, synthetic construct
  source 1..50: mol_type = other DNA
ctcaaacrtaaacraaaactctacraaataacactaaacaaacaacaacc

SEQ ID NO: 32364 - DNA, 50 bp, synthetic construct
  source 1..50: mol_type = other DNA
tttaatatacacaaaaccacaaacrattattatttatccaatactatccc

SEQ ID NO: 32365 - DNA, 50 bp, synthetic construct
  source 1..50: mol_type = other DNA
caaaaccacaaacrattattatttatccaatactatcccrcaaaacctcc

SEQ ID NO: 32366 - DNA, 50 bp, synthetic construct
  source 1..50: mol_type = other DNA
actacaacaaatatcaaaacaaaaactacacaactcaaaaaaactcaaac

SEQ ID NO: 32367 - DNA, 50 bp, synthetic construct
  source 1..50: mol_type = other DNA
actatacaacccctactctaacatttattacaacacaaataacaactacc

SEQ ID NO: 32368 - DNA, 50 bp, synthetic construct
  source 1..50: mol_type = other DNA
ttccaaataaaaaccaacrtatcttctaacactcaacaactaaaacactc

SEQ ID NO: 32369 - DNA, 50 bp, synthetic construct
  source 1..50: mol_type = other DNA
ataacaactaccrtcaccraatatcccaactactaaatatcaaaaaacac

SEQ ID NO: 32370 - DNA, 50 bp, synthetic construct
  source 1..50: mol_type = other DNA
atttccataaaaactcacaaaacraaatctaaaaatacacraactatctc

SEQ ID NO: 32371 - DNA, 50 bp, synthetic construct
  source 1..50: mol_type = other DNA
caacacraatatttccataaaaactcacaaaacraaatctaaaaatacac

SEQ ID NO: 32372 - DNA, 50 bp, synthetic construct
  source 1..50: mol_type = other DNA
actcaaattctacaaaaatttattaaaactcctaactataacracaacac

SEQ ID NO: 32373 - DNA, 50 bp, synthetic construct
  source 1..50: mol_type = other DNA
tctatcaaactcaaattctacaaaaatttattaaaactcctaactataac

SEQ ID NO: 32374 - DNA, 50 bp, synthetic construct
  source 1..50: mol_type = other DNA
atacaatatttcaaaaaaaacaaccccaatctctcccaatccaataaccc

SEQ ID NO: 32375 - DNA, 50 bp, synthetic construct
  source 1..50: mol_type = other DNA
ataactcatcaccatattaacaaataaaacttcaaaacacrcacttaaac

SEQ ID NO: 32376 - DNA, 50 bp, synthetic construct
  source 1..50: mol_type = other DNA
rtctaaaaaaataactcatcaccatattaacaaataaaacttcaaaacac

SEQ ID NO: 32377 - DNA, 50 bp, synthetic construct
  source 1..50: mol_type = other DNA
rtaccctaaaatcccatctaccaacataataataaatcacccttccaaac

SEQ ID NO: 32378 - DNA, 50 bp, synthetic construct
  source 1..50: mol_type = other DNA
accaacataataataaatcacccttccaaacrtaaacataacaaaaaaac

SEQ ID NO: 32379 - DNA, 50 bp, synthetic construct
  source 1..50: mol_type = other DNA
caaacrtaaacataacaaaaaaacrtaaaccaacccccaaaataaccaac

SEQ ID NO: 32380 - DNA, 50 bp, synthetic construct
  source 1..50: mol_type = other DNA
taaacataacaaaaaaacrtaaaccaacccccaaaataaccaacraaccc

SEQ ID NO: 32381 - DNA, 50 bp, synthetic construct
  source 1..50: mol_type = other DNA
cacaaattactaaaaaacraaaacaaaacacaaccctccaaaaaaccacc

SEQ ID NO: 32382 - DNA, 50 bp, synthetic construct
  source 1..50: mol_type = other DNA
aaatactcctaaaaatacacctttactccacaactaaaactaaacctcac

SEQ ID NO: 32383 - DNA, 50 bp, synthetic construct
  source 1..50: mol_type = other DNA
aatacacctttactccacaactaaaactaaacctcacrttaaaaacaacc

SEQ ID NO: 32384 - DNA, 50 bp, synthetic construct
  source 1..50: mol_type = other DNA
aacctcacrttaaaaacaaccracaacattaaaaactacatttaaaaaac

SEQ ID NO: 32385 - DNA, 50 bp, synthetic construct
  source 1..50: mol_type = other DNA
aaaaaaacaccraaaccaacctaacccaaaaaccaacctttaatccaacc

SEQ ID NO: 32386 - DNA, 50 bp, synthetic construct
  source 1..50: mol_type = other DNA
caaaacaaataaaaactaatactccatccatacctaaactacrtaaaaac

SEQ ID NO: 32387 - DNA, 50 bp, synthetic construct
  source 1..50: mol_type = other DNA
aaactaataactacaaaaacattccattcttcccactatctccctaaaac

SEQ ID NO: 32388 - DNA, 50 bp, synthetic construct
  source 1..50: mol_type = other DNA
cccaaatacacccaaaaccccrcaataaaatacctaaataaaataaaaac

SEQ ID NO: 32389 - DNA, 50 bp, synthetic construct
  source 1..50: mol_type = other DNA
caaaaataacaaatccccatccataacaaaactcaaccaaaaacacctac

SEQ ID NO: 32390 - DNA, 50 bp, synthetic construct
  source 1..50: mol_type = other DNA
taaatttccaaatttcaccctatatcccttaacataaacrtcacaaaaac

SEQ ID NO: 32391 - DNA, 50 bp, synthetic construct
  source 1..50: mol_type = other DNA
cacrtaaaccctaaatttccaaatttcaccctatatcccttaacataaac

SEQ ID NO: 32392 - DNA, 50 bp, synthetic construct
  source 1..50: mol_type = other DNA
aacrtctatatcaaaaaacacaaaataaaacctaaaaattcaaaacccac

SEQ ID NO: 32393 - DNA, 50 bp, synthetic construct
  source 1..50: mol_type = other DNA
acacaaaataaaacctaaaaattcaaaacccacrtaataatactacaaac

SEQ ID NO: 32394 - DNA, 50 bp, synthetic construct
  source 1..50: mol_type = other DNA
aacctaaaaattcaaaacccacrtaataatactacaaacrtaacttaaac

SEQ ID NO: 32395 - DNA, 50 bp, synthetic construct
  source 1..50: mol_type = other DNA
cttccacaatcccctcacctaacaaaataatactaaaatttcctctaccc

SEQ ID NO: 32396 - DNA, 50 bp, synthetic construct
  source 1..50: mol_type = other DNA
tcacctaacaaaataatactaaaatttcctctacccrcctaaaaaacccc

SEQ ID NO: 32397 - DNA, 50 bp, synthetic construct
  source 1..50: mol_type = other DNA
aatccaaataatttctccaacractcaaacttccttatacrtcaaaaacc

SEQ ID NO: 32398 - DNA, 50 bp, synthetic construct
  source 1..50: mol_type = other DNA
tcaccraaaaccttactctaatttctaactaaacttattaaacactaaac

SEQ ID NO: 32399 - DNA, 50 bp, synthetic construct
  source 1..50: mol_type = other DNA
aataactacctaaaacaaaactttcctcctctactaacrtccaaaccacc

SEQ ID NO: 32400 - DNA, 50 bp, synthetic construct
  source 1..50: mol_type = other DNA
tatccctccctaaataactacctaaaacaaaactttcctcctctactaac

SEQ ID NO: 32401 - DNA, 50 bp, synthetic construct
  source 1..50: mol_type = other DNA
aatatttactaaactactatttccaataccaaacactaaccacrtactac

SEQ ID NO: 32402 - DNA, 50 bp, synthetic construct
  source 1..50: mol_type = other DNA
acrtaatcaatacctaacactaaaaacaataactcaacaaatatttatcc

SEQ ID NO: 32403 - DNA, 50 bp, synthetic construct
  source 1..50: mol_type = other DNA
tcctctacaaaccaaaaaataaaaccatttaccrcaaaaataaatctctc

SEQ ID NO: 32404 - DNA, 50 bp, synthetic construct
  source 1..50: mol_type = other DNA
aaaaccatttaccrcaaaaataaatctctcrtaccaactccaaaattaac

SEQ ID NO: 32405 - DNA, 50 bp, synthetic construct
  source 1..50: mol_type = other DNA
aaactataacatacttctatcccatataatactaataaaaaataaatctc

SEQ ID NO: 32406 - DNA, 50 bp, synthetic construct
  source 1..50: mol_type = other DNA
ctaaatcctaaaacccaaactaactacactctaaaaacrcttctaaaaac

SEQ ID NO: 32407 - DNA, 50 bp, synthetic construct
  source 1..50: mol_type = other DNA
atatcaaaaactctccrattttataaactaaaaactttccatcccaaaac

SEQ ID NO: 32408 - DNA, 50 bp, synthetic construct
  source 1..50: mol_type = other DNA
aatttccaacctacaaaaccraaaaacccttaacatccaaaatcccaatc

SEQ ID NO: 32409 - DNA, 50 bp, synthetic construct
  source 1..50: mol_type = other DNA
acccataaacaaactaaaaaacrcctctacccaaaataaaaacacaatcc

SEQ ID NO: 32410 - DNA, 50 bp, synthetic construct
  source 1..50: mol_type = other DNA
aaaaaacccaacaacacacaaaaccaaaaccatacctataacaatcccac

SEQ ID NO: 32411 - DNA, 50 bp, synthetic construct
  source 1..50: mol_type = other DNA
ctcccttaatataatcaccaccttctacrtcataataaaaaccttaccac

SEQ ID NO: 32412 - DNA, 50 bp, synthetic construct
  source 1..50: mol_type = other DNA
ctatttctatacaaccaaatactacccacctacracaacctaaataaacc

SEQ ID NO: 32413 - DNA, 50 bp, synthetic construct
  source 1..50: mol_type = other DNA
aaaacaaatataaaactcataattttcactaacractcatccaaactatc

SEQ ID NO: 32414 - DNA, 50 bp, synthetic construct
  source 1..50: mol_type = other DNA
aaaaatcctaaaaataaaaccrctaaaaaaaacrtacctctctcaaatcc

SEQ ID NO: 32415 - DNA, 50 bp, synthetic construct
  source 1..50: mol_type = other DNA
acctaactatataaaaacaaaccatttcacaacraacctaaaaaaaacac

SEQ ID NO: 32416 - DNA, 50 bp, synthetic construct
  source 1..50: mol_type = other DNA
aaaaatcaaaaactctcactaaactacaaaaaaatcctaaaaataaaacc

SEQ ID NO: 32417 - DNA, 50 bp, synthetic construct
  source 1..50: mol_type = other DNA
atctctaaccttccttcatacaacattctctacacactaaaaatcccaac

SEQ ID NO: 32418 - DNA, 50 bp, synthetic construct
  source 1..50: mol_type = other DNA
ttcrcataatacacrctctaaaaaatatcctaaataaaaactactacaac

SEQ ID NO: 32419 - DNA, 50 bp, synthetic construct
  source 1..50: mol_type = other DNA
aaacaacaacctatcrttctataaccttaaaaaatattcrcataatacac

SEQ ID NO: 32420 - DNA, 50 bp, synthetic construct
  source 1..50: mol_type = other DNA
tccctaacrtaaaacaacaacctatcrttctataaccttaaaaaatattc

SEQ ID NO: 32421 - DNA, 50 bp, synthetic construct
  source 1..50: mol_type = other DNA
caaacacacrccaaaacacaaataaaaactactctaccataaaactaaac

SEQ ID NO: 32422 - DNA, 50 bp, synthetic construct
  source 1..50: mol_type = other DNA
crctaaccrctatactaatccatttactaactactaactttctacatccc

SEQ ID NO: 32423 - DNA, 50 bp, synthetic construct
  source 1..50: mol_type = other DNA
tattttctttcactttcttcaaaacratttaaaatttaactccrctaacc

SEQ ID NO: 32424 - DNA, 50 bp, synthetic construct; identical to SEQ ID NO: 32423
  source 1..50: mol_type = other DNA

SEQ ID NO: 32425 - DNA, 50 bp, synthetic construct
  source 1..50: mol_type = other DNA
tatcctatattttctttcactttcttcaaaacratttaaaatttaactcc

SEQ ID NO: 32426 - DNA, 50 bp, synthetic construct; identical to SEQ ID NO: 32425
  source 1..50: mol_type = other DNA

SEQ ID NO: 32427 - DNA, 50 bp, synthetic construct
  source 1..50: mol_type = other DNA
taaccrctatactaataatatcctatattttctttcactttcttcaaaac

SEQ ID NO: 32428 - DNA, 50 bp, synthetic construct
  source 1..50: mol_type = other DNA
tttttaataaaatcaaaatatcctatattttctttcactttcttcaaaac

SEQ ID NO: 32429 - DNA, 50 bp, synthetic construct
  source 1..50: mol_type = other DNA
aacacaaaacatcctaactttattaaaaaacaaaccaaaccaaacacaac

SEQ ID NO: 32430 - DNA, 50 bp, synthetic construct
  source 1..50: mol_type = other DNA
caaaactcctcattaactatccacrtaaacaccacaaacccaaaactctc

SEQ ID NO: 32431 - DNA, 50 bp, synthetic construct
  source 1..50: mol_type = other DNA
ctaacctatatatttcctactttccaaaactcatcaaaaacctataaccc

SEQ ID NO: 32432 - DNA, 50 bp, synthetic construct
  source 1..50: mol_type = other DNA
aaccctaaaaataaaatctttactactcccraactctaacrtttaacaac

SEQ ID NO: 32433 - DNA, 50 bp, synthetic construct
  source 1..50: mol_type = other DNA
atccaaaaaaaaccaaaataaaccctaaaaataaaatctttactactccc

SEQ ID NO: 32434 - DNA, 50 bp, synthetic construct
  source 1..50: mol_type = other DNA
craatttccrtattataaaataaactcaaaaaataccaaacttcttcaac

SEQ ID NO: 32435 - DNA, 50 bp, synthetic construct
  source 1..50: mol_type = other DNA
acccaaacctccaaaacaaccctcttcccrataactttaatataaatatc

SEQ ID NO: 32436 - DNA, 50 bp, synthetic construct
  source 1..50: mol_type = other DNA
caaaataaaaacaactaccacrcctaaaaccctaaaaatcaccaaacrac

SEQ ID NO: 32437 - DNA, 50 bp, synthetic construct
  source 1..50: mol_type = other DNA
ctataaacaaaaaccacccatataccaaaataacccracraatccctaac

SEQ ID NO: 32438 - DNA, 50 bp, synthetic construct
  source 1..50: mol_type = other DNA
tcatcaaactaccaataataactattactaccaattttatttttaaaaac

SEQ ID NO: 32439 - DNA, 50 bp, synthetic construct
  source 1..50: mol_type = other DNA
atttttttctaaaaaatatacrtttttctttaaataccctccctttttcc

SEQ ID NO: 32440 - DNA, 50 bp, synthetic construct
  source 1..50: mol_type = other DNA
aaacaaacttaaaattacttaattactaacraacttccaacatttacaac

SEQ ID NO: 32441 - DNA, 50 bp, synthetic construct
  source 1..50: mol_type = other DNA
caaccaaaaaccaaaacraaaaactatctatataaacctctccccaaacc

SEQ ID NO: 32442 - DNA, 50 bp, synthetic construct
  source 1..50: mol_type = other DNA
ctaaccacataaacttacaacaaaaataaccctaaataaccaaaacaacc

SEQ ID NO: 32443 - DNA, 50 bp, synthetic construct
  source 1..50: mol_type = other DNA
ctaaaacaacctctctatccrtaaatataaaaaatacacacactcctaac

SEQ ID NO: 32444 - DNA, 50 bp, synthetic construct
  source 1..50: mol_type = other DNA
ctctctatccrtaaatataaaaaatacacacactcctaacraaaaccttc

SEQ ID NO: 32445 - DNA, 50 bp, synthetic construct
  source 1..50: mol_type = other DNA
taaatataaaaaatacacacactcctaacraaaaccttcraaacaacaac

SEQ ID NO: 32446 - DNA, 50 bp, synthetic construct
  source 1..50: mol_type = other DNA
taaaaaaataataacacctccaaattaaacataaaaacrcaatatccaac

SEQ ID NO: 32447 - DNA, 50 bp, synthetic construct
  source 1..50: mol_type = other DNA
atacttcrtacttaaaaaaataataacacctccaaattaaacataaaaac

SEQ ID NO: 32448 - DNA, 50 bp, synthetic construct
  source 1..50: mol_type = other DNA
ataatttttctcccctcaatctaacctaaattaactccttcatatacttc

SEQ ID NO: 32449 - DNA, 50 bp, synthetic construct
  source 1..50: mol_type = other DNA
attaaactatactactctaaaaaaaaatccctcaaaacccaaccctcctc

SEQ ID NO: 32450 - DNA, 50 bp, synthetic construct
  source 1..50: mol_type = other DNA
tatatatataaaacaatctcattctatcrcccaaaataaaatccaataac

SEQ ID NO: 32451 - DNA, 50 bp, synthetic construct
  source 1..50: mol_type = other DNA
ctctacaattttaccaaatattatctaaaataaatctccaaacccracrc

SEQ ID NO: 32452 - DNA, 50 bp, synthetic construct
  source 1..50: mol_type = other DNA
acaatctctacaattttaccaaatattatctaaaataaatctccaaaccc

SEQ ID NO: 32453 - DNA, 50 bp, synthetic construct
  source 1..50: mol_type = other DNA
aataatataatataataacaaatatactaacraatcctccttaaaacccc

SEQ ID NO: 32454 - DNA, 50 bp, synthetic construct
  source 1..50: mol_type = other DNA
cacacaactcaccaaaaacaaaaactaattcactcttaaacatcaaactc

SEQ ID NO: 32455 - DNA, 50 bp, synthetic construct
  source 1..50: mol_type = other DNA
aatatttaaaaataaatcaacctctatctctaataaactatataactcac

SEQ ID NO: 32456 - DNA, 50 bp, synthetic construct
  source 1..50: mol_type = other DNA
taaatcaacctctatctctaataaactatataactcacracaataccctc

SEQ ID NO: 32457 - DNA, 50 bp, synthetic construct
  source 1..50: mol_type = other DNA
tcrctcrcraattataaaaaaacttaaaccaacacctaatatactcttac

SEQ ID NO: 32458 - DNA, 50 bp, synthetic construct
  source 1..50: mol_type = other DNA
aaatctacaaaataaactcccaatctatctccaacaaaaactaactaatc

SEQ ID NO: 32459 - DNA, 50 bp, synthetic construct
  source 1..50: mol_type = other DNA
ccaacaacctttaaaaaaactaactttactaataaacaacaatactaatc

SEQ ID NO: 32460 - DNA, 50 bp, synthetic construct
  source 1..50: mol_type = other DNA
aacctttaaaaaaactaactttactaataaacaacaatactaatcrctac

SEQ ID NO: 32461 - DNA, 50 bp, synthetic construct
  source 1..50: mol_type = other DNA
taaacaacaatactaatcrctacrtaaaaaccaaataaacaaatataaac

SEQ ID NO: 32462 - DNA, 50 bp, synthetic construct
  source 1..50: mol_type = other DNA
tcactaatcctaaaaaaaaccttcaaaactcccaaaccacaaacaaccac

SEQ ID NO: 32463 - DNA, 50 bp, synthetic construct
  source 1..50: mol_type = other DNA
aaccacaaacaaccacraccaataaaatacaaccacaacracaaaaaaac

SEQ ID NO: 32464 - DNA, 50 bp, synthetic construct
  source 1..50: mol_type = other DNA
taaacaatatatataaaaacccaacrtaataactaccctacccttaaccc

SEQ ID NO: 32465 - DNA, 50 bp, synthetic construct
  source 1..50: mol_type = other DNA
tctttctaatccaactataaaaatataaacaatatatataaaaacccaac

SEQ ID NO: 32466 - DNA, 50 bp, synthetic construct
  source 1..50: mol_type = other DNA
acatccccacaactaaaccaaaaaaataccctaaaaacttccaattcaac

SEQ ID NO: 32467 - DNA, 50 bp, synthetic construct
  source 1..50: mol_type = other DNA
taccctaaaaacttccaattcaacrctaaaaaaacctaccaccaaacaac

SEQ ID NO: 32468 - DNA, 50 bp, synthetic construct
  source 1..50: mol_type = other DNA
caaacaaaataaaaacaaactttaaaaaactcaaaccaactacaacattc

SEQ ID NO: 32469 - DNA, 50 bp, synthetic construct
  source 1..50: mol_type = other DNA
atttcactatattaaccaaaatctactaactaacctcrtaatttacccrc

SEQ ID NO: 32470 - DNA, 50 bp, synthetic construct
  source 1..50: mol_type = other DNA
raaataaacraatcataaaatcaataattcaaaaacaacctaaccaacac

SEQ ID NO: 32471 - DNA, 50 bp, synthetic construct
  source 1..50: mol_type = other DNA
aatttcaccrtattaaccaaattattcttaaactactaacctcataatcc

SEQ ID NO: 32472 - DNA, 50 bp, synthetic construct
  source 1..50: mol_type = other DNA
rtattaaccaaattattcttaaactactaacctcataatccrcccacctc

SEQ ID NO: 32473 - DNA, 50 bp, synthetic construct
  source 1..50: mol_type = other DNA
aatctcctccctccacaaatcacatataaaaatccaatcatactaaacrc

SEQ ID NO: 32474 - DNA, 50 bp, synthetic construct
  source 1..50: mol_type = other DNA
ttaatctcctccctccacaaatcacatataaaaatccaatcatactaaac

SEQ ID NO: 32475 - DNA, 50 bp, synthetic construct
  source 1..50: mol_type = other DNA
acaaactcaaacacacactctacrctcttaaaattaaaaaacccacctac

SEQ ID NO: 32476 - DNA, 50 bp, synthetic construct
  source 1..50: mol_type = other DNA
taaaactaactatactaaatcrctaaaacaaactcaaacacacactctac

SEQ ID NO: 32477 - DNA, 50 bp, synthetic construct
  source 1..50: mol_type = other DNA
atcaaacatataaacaaataaccatactataaaactaactatactaaatc

SEQ ID NO: 32478 - DNA, 50 bp, synthetic construct
  source 1..50: mol_type = other DNA
taaaatttaaacataaaatttataatatcttcaaaaacaatcccrcctac

SEQ ID NO: 32479 - DNA, 50 bp, synthetic construct
  source 1..50: mol_type = other DNA
caacaaaaaaaactataccaaaacrtaaacrcraactctataaaaaaacc

SEQ ID NO: 32480 - DNA, 50 bp, synthetic construct
  source 1..50: mol_type = other DNA
tcaaaaacctaaaacrtacacaacaaaaaaaactataccaaaacrtaaac

SEQ ID NO: 32481 - DNA, 50 bp, synthetic construct
  source 1..50: mol_type = other DNA
acrccatcaaaaacctaaaacrtacacaacaaaaaaaactataccaaaac

SEQ ID NO: 32482 - DNA, 50 bp, synthetic construct
  source 1..50: mol_type = other DNA
cccaacctcaaaatttccaacrtctctaaaaatttatatttttccctccc

SEQ ID NO: 32483 - DNA, 50 bp, synthetic construct
  source 1..50: mol_type = other DNA
aaaaaaatataaacccattcraaaataaccccaacctcaaaatttccaac

SEQ ID NO: 32484 - DNA, 50 bp, synthetic construct
  source 1..50: mol_type = other DNA
aaacacaaaccctcaaaaacrctaaaaactctaaaattaaaaccacctcc

SEQ ID NO: 32485 - DNA, 50 bp, synthetic construct
  source 1..50: mol_type = other DNA
ctcacaacaaacaatactaaaacatccctaaaccrctaaactaaaaaacc

SEQ ID NO: 32486 - DNA, 50 bp, synthetic construct
  source 1..50: mol_type = other DNA
aaaaatacaaaccaaaactacaaaaatcccacratttaccaaaataacac

SEQ ID NO: 32487 - DNA, 50 bp, synthetic construct
  source 1..50: mol_type = other DNA
aaatcccacratttaccaaaataacacracaaattaaaactaaaaacaac

SEQ ID NO: 32488 - DNA, 50 bp, synthetic construct
  source 1..50: mol_type = other DNA
tttaccaaaataacacracaaattaaaactaaaaacaacrttctcccatc

SEQ ID NO: 32489 - DNA, 50 bp, synthetic construct
  source 1..50: mol_type = other DNA
tcccatcrtattcccaaaaaaactatctacccaattcaaaaaaataaccc

SEQ ID NO: 32490 - DNA, 50 bp, synthetic construct
  source 1..50: mol_type = other DNA
ataacccraaaatatataacaaaacccrtcaattcacccaactaaatacc

SEQ ID NO: 32491 - DNA, 50 bp, synthetic construct
  source 1..50: mol_type = other DNA
tttctctctcaaataaaacraaaccaaccctcctaaccataaaaaaaacc

SEQ ID NO: 32492 - DNA, 50 bp, synthetic construct
  source 1..50: mol_type = other DNA
caaataaaacraaaccaaccctcctaaccataaaaaaaaccrtaataaac

SEQ ID NO: 32493 - DNA, 50 bp, synthetic construct
  source 1..50: mol_type = other DNA
ctataaccratcccaaactcctatataaactccttaaaaaaaacactaac

SEQ ID NO: 32494 - DNA, 50 bp, synthetic construct
  source 1..50: mol_type = other DNA
ccaaaaccrtcaatatcttcttcaaaaaactcatacaaaaatttaaaatc

SEQ ID NO: 32495 - DNA, 50 bp, synthetic construct
  source 1..50: mol_type = other DNA
tccatcctactaaccatactctacraaacaaataaaaataacctcacacc

SEQ ID NO: 32496 - DNA, 50 bp, synthetic construct
  source 1..50: mol_type = other DNA
craaaactaaaactataataaaattaccctaaaaataccctatacaatac

SEQ ID NO: 32497 - DNA, 50 bp, synthetic construct
  source 1..50: mol_type = other DNA
aataaaattaccctaaaaataccctatacaatacracaaccrccaaccac

SEQ ID NO: 32498 - DNA, 50 bp, synthetic construct
  source 1..50: mol_type = other DNA
aaacaattcctcaaactcctaaaccacatttcaaatactcaataatactc

SEQ ID NO: 32499 - DNA, 50 bp, synthetic construct
  source 1..50: mol_type = other DNA
raaatactcaaaactactaaaaaccaataatctaaaccaaaaataatttc

SEQ ID NO: 32500 - DNA, 50 bp, synthetic construct
  source 1..50: mol_type = other DNA
ccaataatctaaaccaaaaataatttcrttccccaaaaaatataactacc

SEQ ID NO: 32501 - DNA, 50 bp, synthetic construct
  source 1..50: mol_type = other DNA
taactaccrccaaaaaaaataacctaaccataaatcaataaaactaaaac

SEQ ID NO: 32502 - DNA, 50 bp, synthetic construct
  source 1..50: mol_type = other DNA
aaaaaaaaatttaattacrctaaccctaaataaaactaaaaataacccac

SEQ ID NO: 32503 - DNA, 50 bp, synthetic construct
  source 1..50: mol_type = other DNA
tccataacccctaaccraattttatctactcatcaaaaaaccaaaataac

SEQ ID NO: 32504 - DNA, 50 bp, synthetic construct
  source 1..50: mol_type = other DNA
acactaatcttcaaacrccactttaatttcctaataaacaaacaaaattc

SEQ ID NO: 32505 - DNA, 50 bp, synthetic construct
  source 1..50: mol_type = other DNA
taatttcctaataaacaaacaaaattcratcaaaaaccataaaaaaaacc

SEQ ID NO: 32506 - DNA, 50 bp, synthetic construct
  source 1..50: mol_type = other DNA
craaccaaaacraatctactatctataccracraaaaaccaataaatacc

SEQ ID NO: 32507 - DNA, 50 bp, synthetic construct
  source 1..50: mol_type = other DNA
ccaatcacraataacraataaaaccrtaaacaaaaaacactacaaatacc

SEQ ID NO: 32508 - DNA, 50 bp, synthetic construct
  source 1..50: mol_type = other DNA
actaaaaaactatattaatattaacratatttacaatatcccttacccac

SEQ ID NO: 32509 - DNA, 50 bp, synthetic construct
  source 1..50: mol_type = other DNA
tatattaatattaacratatttacaatatcccttacccacraccccatcc

SEQ ID NO: 32510 - DNA, 50 bp, synthetic construct
  source 1..50: mol_type = other DNA
ccrtcaacctcttacaacaaacatttccataaacaccaaatcraaaattc

SEQ ID NO: 32511 - DNA, 50 bp, synthetic construct
  source 1..50: mol_type = other DNA
aaatattctaaaacacccraaacaaacccataaaacctacaaacaccaac

SEQ ID NO: 32512 - DNA, 50 bp, synthetic construct
  source 1..50: mol_type = other DNA
atacctacaaacctcataaatttatttcraatactctaaaatattccatc

SEQ ID NO: 32513 - DNA, 50 bp, synthetic construct
  source 1..50: mol_type = other DNA
atactctaaaatattccatcrattatataaaacacaataacaaactctac

SEQ ID NO: 32514 - DNA, 50 bp, synthetic construct
  source 1..50: mol_type = other DNA
ataaaacacaataacaaactctacrtaaaccctaaacacctatataaatc

SEQ ID NO: 32515 - DNA, 50 bp, synthetic construct
  source 1..50: mol_type = other DNA
acaataacaaactctacrtaaaccctaaacacctatataaatcraactac

SEQ ID NO: 32516 - DNA, 50 bp, synthetic construct
  source 1..50: mol_type = other DNA
aaacctaaaaacaaataaacctactacttctctttaaacacrtaaaatac

SEQ ID NO: 32517 - DNA, 50 bp, synthetic construct
  source 1..50: mol_type = other DNA
aaaaaaaaacttaaatattccccaactctttctctacctaacctaaaatc

SEQ ID NO: 32518 - DNA, 50 bp, synthetic construct
  source 1..50: mol_type = other DNA
cacacctacttcctataatactttaaaatatatcctctaaacccacctcc

SEQ ID NO: 32519 - DNA, 50 bp, synthetic construct
  source 1..50: mol_type = other DNA
aaatttacaatacaaacctataaatacaacacaaaaaacctcaccccatc

SEQ ID NO: 32520 - DNA, 50 bp, synthetic construct
  source 1..50: mol_type = other DNA
atacctatatacttaaatctataaaactcacacaacacccattaaactac

SEQ ID NO: 32521 - DNA, 50 bp, synthetic construct
  source 1..50: mol_type = other DNA
accacaaaaaaaccaaatacaataaaaccaatcaataattccaactactc

SEQ ID NO: 32522 - DNA, 50 bp, synthetic construct
  source 1..50: mol_type = other DNA
aaaacraaatttcaccatcttaaccaaactaatattaaactcctaacctc

SEQ ID NO: 32523 - DNA, 50 bp, synthetic construct
  source 1..50: mol_type = other DNA
aacatctccaacaaccraaaacrttaaaaattccaatttataaaccraac

SEQ ID NO: 32524 - DNA, 50 bp, synthetic construct
  source 1..50: mol_type = other DNA
taccaacatctccaacaaccraaaacrttaaaaattccaatttataaacc

SEQ ID NO: 32525 - DNA, 50 bp, synthetic construct
  source 1..50: mol_type = other DNA
ctactaccctcccaatttaatattaaaactcaatattacaaacaatccac

SEQ ID NO: 32526 - DNA, 50 bp, synthetic construct
  source 1..50: mol_type = other DNA
tttaatattaaaactcaatattacaaacaatccacrtaaaattatatacc

SEQ ID NO: 32527 - DNA, 50 bp, synthetic construct
  source 1..50: mol_type = other DNA
ccaacttattcaacctctccaataattacattcaaaccctaaaaacrtac

SEQ ID NO: 32528 - DNA, 50 bp, synthetic construct
  source 1..50: mol_type = other DNA
acttccaacttattcaacctctccaataattacattcaaaccctaaaaac

SEQ ID NO: 32529 - DNA, 50 bp, synthetic construct
  source 1..50: mol_type = other DNA
atctaaatacaattactaaaaaaactaaacaaattaaaaattctttcccc

SEQ ID NO: 32530 - DNA, 50 bp, synthetic construct
  source 1..50: mol_type = other DNA
ttccccrtcttttccaattaaatcaaaccttaaaaatatttaccaacttc

SEQ ID NO: 32531 - DNA, 50 bp, synthetic construct
  source 1..50: mol_type = other DNA
taatatctacttttattcttacttttcttaacaacaatactaaaaattac

SEQ ID NO: 32532 - DNA, 50 bp, synthetic construct
  source 1..50: mol_type = other DNA
tattcttacttttcttaacaacaatactaaaaattacrtaaatttttacc

SEQ ID NO: 32533 - DNA, 50 bp, synthetic construct
  source 1..50: mol_type = other DNA
ctaaacaaaacacaaactccaaaaaacacrtctacaattttctctcacac

SEQ ID NO: 32534 - DNA, 50 bp, synthetic construct
  source 1..50: mol_type = other DNA
cctaaaaaaaacaaacatcacctaaacaaaacacaaactccaaaaaacac

SEQ ID NO: 32535 - DNA, 50 bp, synthetic construct
  source 1..50: mol_type = other DNA
acactaaacctcttaactctccataaaactcaatataaatatatcttacc

SEQ ID NO: 32536 - DNA, 50 bp, synthetic construct
  source 1..50: mol_type = other DNA
aactctccataaaactcaatataaatatatcttaccracaaacaaattcc

SEQ ID NO: 32537 - DNA, 50 bp, synthetic construct
  source 1..50: mol_type = other DNA
raatattcctaaaactataaaccrccaactaacacaaaaccacractacc

SEQ ID NO: 32538 - DNA, 50 bp, synthetic construct
  source 1..50: mol_type = other DNA
aacccctctataactctatccacaactaaaaacaacaatccaatatacac

SEQ ID NO: 32539 - DNA, 50 bp, synthetic construct
  source 1..50: mol_type = other DNA
ctactaaaaaaactaataacctaaaaaatccaaccaaaaacccacctaac

SEQ ID NO: 32540 - DNA, 50 bp, synthetic construct
  source 1..50: mol_type = other DNA
actatacaaacacaacrtccactaacaaacatctaaaccaacacacacac

SEQ ID NO: 32541 - DNA, 50 bp, synthetic construct
  source 1..50: mol_type = other DNA
ccaaatttctatccccaaatccrtataaaataattctctttaacaccatc

SEQ ID NO: 32542 - DNA, 50 bp, synthetic construct
  source 1..50: mol_type = other DNA
racatataacraaaccaacrttaacctaaatcccacttaactttaatctc

SEQ ID NO: 32543 - DNA, 50 bp, synthetic construct
  source 1..50: mol_type = other DNA
caactactaactcratatacrcaaaaaaacccraaaaccataataaaaac

SEQ ID NO: 32544 - DNA, 50 bp, synthetic construct
  source 1..50: mol_type = other DNA
aaaaacacaacrccaactccaaactaaaacrtcaaaaacctataaactac

SEQ ID NO: 32545 - DNA, 50 bp, synthetic construct
  source 1..50: mol_type = other DNA
raaccaacaactactaaaacctcaaaactcrcaactcacaaacttctaac

SEQ ID NO: 32546 - DNA, 50 bp, synthetic construct
  source 1..50: mol_type = other DNA
ctccaaaaacacccttaaatctacraccraaataacacaaataaaaaaac

SEQ ID NO: 32547 - DNA, 50 bp, synthetic construct
  source 1..50: mol_type = other DNA
cccttaatttatcataaataaccacattttaattaccaacttttataccc

SEQ ID NO: 32548 - DNA, 50 bp, synthetic construct
  source 1..50: mol_type = other DNA
aacaaccrctcctcactcttcaaatacctaactcttctaaaaatcaattc

SEQ ID NO: 32549 - DNA, 50 bp, synthetic construct
  source 1..50: mol_type = other DNA
ccatatattaaaaataacattaattttaaaaacctaatttcctcaatatc

SEQ ID NO: 32550 - DNA, 50 bp, synthetic construct
  source 1..50: mol_type = other DNA
attaaaaataacattaattttaaaaacctaatttcctcaatatcrcacac

SEQ ID NO: 32551 - DNA, 50 bp, synthetic construct
  source 1..50: mol_type = other DNA
aaaaaaaattttacaaataacacataaccactctatcccactttaacttc

SEQ ID NO: 32552 - DNA, 50 bp, synthetic construct
  source 1..50: mol_type = other DNA
aataaaaaaatcactaaacacacaataacaacaacaacaacrtaaaactc

SEQ ID NO: 32553 - DNA, 50 bp, synthetic construct
  source 1..50: mol_type = other DNA
aaaatttcaaataaaaaaatcactaaacacacaataacaacaacaacaac

SEQ ID NO: 32554 - DNA, 50 bp, synthetic construct
  source 1..50: mol_type = other DNA
acaaaattatcctaaaaaatcaaaaaataacaaacattactcaaaactac

SEQ ID NO: 32555 - DNA, 50 bp, synthetic construct
  source 1..50: mol_type = other DNA
atcaaaaaataacaaacattactcaaaactacrtcttattctccctcacc

SEQ ID NO: 32556 - DNA, 50 bp, synthetic construct
  source 1..50: mol_type = other DNA
aaaaaaattaaataaccattaccraacaaaatcctaaccctataaaaccc

SEQ ID NO: 32557 - DNA, 50 bp, synthetic construct
  source 1..50: mol_type = other DNA
aataaaacacraaaattttttaaatactttcraatcacacctaaactaac

SEQ ID NO: 32558 - DNA, 50 bp, synthetic construct
  source 1..50: mol_type = other DNA
ttaataattaaaccaaataaacrataactcattcratcaaaccrcttacc

SEQ ID NO: 32559 - DNA, 50 bp, synthetic construct
  source 1..50: mol_type = other DNA
ttaccrccrataaaaaatacaaaacttctacaacatcctaaaaaaatccc

SEQ ID NO: 32560 - DNA, 50 bp, synthetic construct
  source 1..50: mol_type = other DNA
aaaaatcccraaacrtaaatctaaactatactaatactaaaacaaccaac

SEQ ID NO: 32561 - DNA, 50 bp, synthetic construct
  source 1..50: mol_type = other DNA
cctactactaaaactaaaaaaacccctctacttaaaccttaaaatacccc

SEQ ID NO: 32562 - DNA, 50 bp, synthetic construct
  source 1..50: mol_type = other DNA
tcctaactttacccataattaataaccrtattttaaactacrttaatatc

SEQ ID NO: 32563 - DNA, 50 bp, synthetic construct
  source 1..50: mol_type = other DNA
aaaaaaacaaaacaactaaccccaaaaccrattaaaaaaatcctccctac

SEQ ID NO: 32564 - DNA, 50 bp, synthetic construct
  source 1..50: mol_type = other DNA
aaaaactataaccctataacrtattctaaaccatctccaaaacctaaaac

SEQ ID NO: 32565 - DNA, 50 bp, synthetic construct
  source 1..50: mol_type = other DNA
aaaatactaaactaaaaaacctacaaactacaaccacaaaactaaaactc

SEQ ID NO: 32566 - DNA, 50 bp, synthetic construct
  source 1..50: mol_type = other DNA
tcacaacacacctctcaaacaaaaaactcacrtatcctcatattctctac

SEQ ID NO: 32567 - DNA, 50 bp, synthetic construct
  source 1..50: mol_type = other DNA
ccacttattctccaaattcacaacatctcraacctattttcctacatctc

SEQ ID NO: 32568 - DNA, 50 bp, synthetic construct
  source 1..50: mol_type = other DNA
tactataaatctaaaaaacaaataaacctaaatctaaaacaacaaacaac

SEQ ID NO: 32569 - DNA, 50 bp, synthetic construct
  source 1..50: mol_type = other DNA
ataaacctaaatctaaaacaacaaacaacrtaaaacacaaaaaaacaaac

SEQ ID NO: 32570 - DNA, 50 bp, synthetic construct
  source 1..50: mol_type = other DNA
aaaaacaaaaccaataaatctaaatctaaatctaaaacracaaacaatac

SEQ ID NO: 32571 - DNA, 50 bp, synthetic construct
  source 1..50: mol_type = other DNA
cacaaaaaaacaaacraaatatcatatacattataactaacaaaaccrac

SEQ ID NO: 32572 - DNA, 50 bp, synthetic construct
  source 1..50: mol_type = other DNA
ctttcacatttaacttaacaacaaaactaataaaaaaacrcacacctaac

SEQ ID NO: 32573 - DNA, 50 bp, synthetic construct
  source 1..50: mol_type = other DNA
taccttattccaaaaaaattaacaaacctaaaccrtaaaacraaacccrc

SEQ ID NO: 32574 - DNA, 50 bp, synthetic construct
  source 1..50: mol_type = other DNA
tctaccttattccaaaaaaattaacaaacctaaaccrtaaaacraaaccc

SEQ ID NO: 32575 - DNA, 50 bp, synthetic construct
  source 1..50: mol_type = other DNA
caaaaaccaaatactctaccttattccaaaaaaattaacaaacctaaacc

SEQ ID NO: 32576 - DNA, 50 bp, synthetic construct
  source 1..50: mol_type = other DNA
aaacaaaacaaaacacttaacccctaaaaaacctaaaaaccaaaaacctc

SEQ ID NO: 32577 - DNA, 50 bp, synthetic construct
  source 1..50: mol_type = other DNA
aacaaaacacttaacccctaaaaaacctaaaaaccaaaaacctcraaaac

SEQ ID NO: 32578 - DNA, 50 bp, synthetic construct
  source 1..50: mol_type = other DNA
crtatctaaaattctattttccaccttttccctttaaactaataaaaaac

SEQ ID NO: 32579 - DNA, 50 bp, synthetic construct
  source 1..50: mol_type = other DNA
aaatcacccaactcaattactataaataacccaaaacrctctcatcaaac

SEQ ID NO: 32580 - DNA, 50 bp, synthetic construct
  source 1..50: mol_type = other DNA
atatcctcttataaaatcacccaactcaattactataaataacccaaaac

SEQ ID NO: 32581 - DNA, 50 bp, synthetic construct
  source 1..50: mol_type = other DNA
aataatctcacaaaaaaacataataaaacccaaaaaacctaataaaaacc

SEQ ID NO: 32582 - DNA, 50 bp, synthetic construct
  source 1..50: mol_type = other DNA
cccaaaaaacctaataaaaaccraaaaaaaccttactctaaatataactc

SEQ ID NO: 32583 - DNA, 50 bp, synthetic construct
  source 1..50: mol_type = other DNA
aaatcttcctaaaacactaaaatctcctatatctccaaccctaaaaactc

SEQ ID NO: 32584 - DNA, 50 bp, synthetic construct
  source 1..50: mol_type = other DNA
cctaaaacactaaaatctcctatatctccaaccctaaaaactcraaaccc

SEQ ID NO: 32585 - DNA, 50 bp, synthetic construct
  source 1..50: mol_type = other DNA
ctatatctccaaccctaaaaactcraaacccraatacttttaaaaaaaac

SEQ ID NO: 32586 - DNA, 50 bp, synthetic construct
  source 1..50: mol_type = other DNA
aaaatataattatcaccttacccaaataacctactctacctaatcratac

SEQ ID NO: 32587 - DNA, 50 bp, synthetic construct
  source 1..50: mol_type = other DNA
aaaattcacattttaaccttttcaacaacccttactctaaacctataccc

SEQ ID NO: 32588 - DNA, 50 bp, synthetic construct
  source 1..50: mol_type = other DNA
tcttcctcaaaaataaaacaactcataatcaccaactaacaccacrtacc

SEQ ID NO: 32589 - DNA, 50 bp, synthetic construct
  source 1..50: mol_type = other DNA
aacactcttcctcaaaaataaaacaactcataatcaccaactaacaccac

SEQ ID NO: 32590 - DNA, 50 bp, synthetic construct
  source 1..50: mol_type = other DNA
actctaaactttaatttaacctacctatctatctctctaaattaacaacc

SEQ ID NO: 32591 - DNA, 50 bp, synthetic construct
  source 1..50: mol_type = other DNA
taatttaacctacctatctatctctctaaattaacaaccraaacctccrc

SEQ ID NO: 32592 - DNA, 50 bp, synthetic construct
  source 1..50: mol_type = other DNA
attttttaaataaaaaccctcattattaactaaacaaaacctcaaaatac

SEQ ID NO: 32593 - DNA, 50 bp, synthetic construct
  source 1..50: mol_type = other DNA
acccraaactactaaataaaacctaaactctaatccaaactttataaacc

SEQ ID NO: 32594 - DNA, 50 bp, synthetic construct
  source 1..50: mol_type = other DNA
caaaactaacaaatcratacacaccaaaacraacaaacctaaatcaaatc

SEQ ID NO: 32595 - DNA, 50 bp, synthetic construct
  source 1..50: mol_type = other DNA
accttaccrtaaatactatctctacttataatttttctcctaatcrcccc

SEQ ID NO: 32596 - DNA, 50 bp, synthetic construct
  source 1..50: mol_type = other DNA
atctaacctaattatatatttaaattaaacraataaatatcacccraccc

SEQ ID NO: 32597 - DNA, 50 bp, synthetic construct
  source 1..50: mol_type = other DNA
taattatataattaaattaaataaatatcacccracccrctataaaaaac

SEQ ID NO: 32598 - DNA, 50 bp, synthetic construct
  source 1..50: mol_type = other DNA
aaaaatctaacctaattatataattaaattaaacraatatcacccraccc

SEQ ID NO: 32599 - DNA, 50 bp, synthetic construct
  source 1..50: mol_type = other DNA
aacrcrtaaaattctaacctaattaaattttcaactctacaaatatcatc

SEQ ID NO: 32600 - DNA, 50 bp, synthetic construct
  source 1..50: mol_type = other DNA
attctaacctaattaaattttcaactctacaaatatcatcrcrtttcctc

SEQ ID NO: 32601 - DNA, 50 bp, synthetic construct
  source 1..50: mol_type = other DNA
cttactaatcataaacaaaaatataacctccccaaccccraaatctaacc

SEQ ID NO: 32602 - DNA, 50 bp, synthetic construct
  source 1..50: mol_type = other DNA
caacctatctactctaacaaattactttactttttctaaaatttactacc

SEQ ID NO: 32603 - DNA, 50 bp, synthetic construct
  source 1..50: mol_type = other DNA
ctaccraaaatatcacacaataaaaaacctttaaatataatttcttcccc

SEQ ID NO: 32604 - DNA, 50 bp, synthetic construct
  source 1..50: mol_type = other DNA
ccraaaatatcacacaataaaaaacctttaaatataatttcttccccrac

SEQ ID NO: 32605 - DNA, 50 bp, synthetic construct
  source 1..50: mol_type = other DNA
taatttcttccccracrtatctttaaaatacctatattactatatattcc

SEQ ID NO: 32606 - DNA, 50 bp, synthetic construct
  source 1..50: mol_type = other DNA
aaactaaaaacccaaataaacctaaactaataaataaataacacracrcc

SEQ ID NO: 32607 - DNA, 50 bp, synthetic construct
  source 1..50: mol_type = other DNA
taattctataaacaaattaaaactaaacracraccacacttcctccactc

SEQ ID NO: 32608 - DNA, 50 bp, synthetic construct
  source 1..50: mol_type = other DNA
ccccaaaactacccraaaataattctataaacaaattaaaactaaacrac

SEQ ID NO: 32609 - DNA, 50 bp, synthetic construct
  source 1..50: mol_type = other DNA
atcccccaaaactacccraaaataattctataaacaaattaaaactaaac

SEQ ID NO: 32610 - DNA, 50 bp, synthetic construct
  source 1..50: mol_type = other DNA
actaaaaacaactctaaactacccracctcttttcaaaaacaaaacaacc

SEQ ID NO: 32611 - DNA, 50 bp, synthetic construct
  source 1..50: mol_type = other DNA
acctacataaaaaaaccccactaaacaaactcctaataaaaatatctacc

SEQ ID NO: 32612 - DNA, 50 bp, synthetic construct
  source 1..50: mol_type = other DNA
tcraaaaacaattattaacaaaaaccaaactcataaaaactacraaacrc

SEQ ID NO: 32613 - DNA, 50 bp, synthetic construct
  source 1..50: mol_type = other DNA
aatcraaaaacaattattaacaaaaaccaaactcataaaaactacraaac

SEQ ID NO: 32614 - DNA, 50 bp, synthetic construct
  source 1..50: mol_type = other DNA
aacctttataaacctaactcctattaataattatctcccrattatctccc

SEQ ID NO: 32615 - DNA, 50 bp, synthetic construct
  source 1..50: mol_type = other DNA
aaactttacaaaacaaaaatcaccttcacraaaaatacaaaataaacrcc

SEQ ID NO: 32616 - DNA, 50 bp, synthetic construct
  source 1..50: mol_type = other DNA
aaacctccctattctaattctaaactttacaaaacaaaaatcaccttcac

SEQ ID NO: 32617 - DNA, 50 bp, synthetic construct
  source 1..50: mol_type = other DNA
aacaaaaaaatctccaaaatactccttacraactcaactatcrttaaatc

SEQ ID NO: 32618 - DNA, 50 bp, synthetic construct
  source 1..50: mol_type = other DNA
catactaatcccccatctacaaacrctaaaccccataaaaactataactc

SEQ ID NO: 32619 - DNA, 50 bp, synthetic construct
  source 1..50: mol_type = other DNA
aaaccaaatttcaaaacractcaaccttaaacccacaaaattctttttcc

SEQ ID NO: 32620 - DNA, 50 bp, synthetic construct
  source 1..50: mol_type = other DNA
ttcatctcactaaaaaataccaaacaataaacccaaatcaataaatacrc

SEQ ID NO: 32621 - DNA, 50 bp, synthetic construct
  source 1..50: mol_type = other DNA
ctcactaaaaaataccaaacaataaacccaaatcaataaatacrcrcacc

SEQ ID NO: 32622 - DNA, 50 bp, synthetic construct
  source 1..50: mol_type = other DNA
taattctatctttatcctaaatataactttaacatatttataccttaatc

SEQ ID NO: 32623 - DNA, 50 bp, synthetic construct
  source 1..50: mol_type = other DNA
aacatatttaatattacaatatacctcatatcctaataaatcataaaacc

SEQ ID NO: 32624 - DNA, 50 bp, synthetic construct
  source 1..50: mol_type = other DNA
aaaaataacrtaactctcttacaaaatactaaatatatacctacctaaac

SEQ ID NO: 32625 - DNA, 50 bp, synthetic construct
  source 1..50: mol_type = other DNA
crtacaaacataacrtcatacataaaacacrccacactacaaaaaatcac

SEQ ID NO: 32626 - DNA, 50 bp, synthetic construct
  source 1..50: mol_type = other DNA
accttaacattaacttctctccattttcctaataccccatcaataacctc

SEQ ID NO: 32627 - DNA, 50 bp, synthetic construct
  source 1..50: mol_type = other DNA
cttaacattaacttctctccattttcctaataccccatcaataacctcrc

SEQ ID NO: 32628 - DNA, 50 bp, synthetic construct
  source 1..50: mol_type = other DNA
tacaattcatcttattcaaacttaatttcatcaaaacataaacraacatc

SEQ ID NO: 32629 - DNA, 50 bp, synthetic construct
  source 1..50: mol_type = other DNA
caaaaattacaattcatcttattcaaacttaatttcatcaaaacataaac

SEQ ID NO: 32630 - DNA, 50 bp, synthetic construct
  source 1..50: mol_type = other DNA
accttttttacttaaaaaaaatttctcaacaccactaattaaaatttacc

SEQ ID NO: 32631 - DNA, 50 bp, synthetic construct
  source 1..50: mol_type = other DNA
ttataaatctaactatttctttccctattaaaaaacaaaaccccaacctc

SEQ ID NO: 32632 - DNA, 50 bp, synthetic construct
  source 1..50: mol_type = other DNA
ccacaaaacaaaataaacttacttcccatctaccaaacaactcaaaatcc

SEQ ID NO: 32633 - DNA, 50 bp, synthetic construct
  source 1..50: mol_type = other DNA
actcaaacctaaccaatactaccaacctaacaataaacccraatttacac

SEQ ID NO: 32634 - DNA, 50 bp, synthetic construct
  source 1..50: mol_type = other DNA
cacttaatttactcaaacctaaccaatactaccaacctaacaataaaccc

SEQ ID NO: 32635 - DNA, 50 bp, synthetic construct
  source 1..50: mol_type = other DNA
aaccaaccctactaaaaataaatcatacacacrctaataaatcacttatc

SEQ ID NO: 32636 - DNA, 50 bp, synthetic construct
  source 1..50: mol_type = other DNA
ttaaactataaaaaaactctaaaaatctcaaacctactactataataacc

SEQ ID NO: 32637 - DNA, 50 bp, synthetic construct
  source 1..50: mol_type = other DNA
taccatctcctcttcraaatttaacctataaattctccataaataaaaac

SEQ ID NO: 32638 - DNA, 50 bp, synthetic construct
  source 1..50: mol_type = other DNA
aatttaacaaaataccrtaactctattatattaattaccatctcctcttc

SEQ ID NO: 32639 - DNA, 50 bp, synthetic construct
  source 1..50: mol_type = other DNA
cacaacaaaaatataactcacaattcaaccccaccctcaaaaaacaaaac

SEQ ID NO: 32640 - DNA, 50 bp, synthetic construct
  source 1..50: mol_type = other DNA
ataaatataccaaaaactcaactattatctcaaaactccaaatcccrtcc

SEQ ID NO: 32641 - DNA, 50 bp, synthetic construct
  source 1..50: mol_type = other DNA
ccrtctaaactaaaaaccatatactaaaaaccaatactccaatcccactc

SEQ ID NO: 32642 - DNA, 50 bp, synthetic construct
  source 1..50: mol_type = other DNA
acctaaaactcctaaacccaaataattttccttacttaacctcctaaacc

SEQ ID NO: 32643 - DNA, 50 bp, synthetic construct
  source 1..50: mol_type = other DNA
aatttcaactatactatatttaaaactaaatttaataatacacaatacac

SEQ ID NO: 32644 - DNA, 50 bp, synthetic construct
  source 1..50: mol_type = other DNA
catctcaaaacacaaaattctaaatataataaaaactaacaacatttacc

SEQ ID NO: 32645 - DNA, 50 bp, synthetic construct
  source 1..50: mol_type = other DNA
tttctatatccttaaatccttccaaacaaaaataacaaaacatacraccc

SEQ ID NO: 32646 - DNA, 50 bp, synthetic construct
  source 1..50: mol_type = other DNA
atcccctatacrctatacaactaccttctttttatttcctatacaatctc

SEQ ID NO: 32647 - DNA, 50 bp, synthetic construct
  source 1..50: mol_type = other DNA
taaatcttcaatctctcaaaaaatctacaaaataatattcacacaacatc

SEQ ID NO: 32648 - DNA, 50 bp, synthetic construct
  source 1..50: mol_type = other DNA
ttacattaaccaactttaatacataaataatttatattaatctaatcctc

SEQ ID NO: 32649 - DNA, 50 bp, synthetic construct
  source 1..50: mol_type = other DNA
tactatattacctaactaatctcaaactcctaaactcaaaccatctaccc

SEQ ID NO: 32650 - DNA, 50 bp, synthetic construct
  source 1..50: mol_type = other DNA
ataacaataaaaatatcctaccctaaaactctcctaactttctcataaac

SEQ ID NO: 32651 - DNA, 50 bp, synthetic construct
  source 1..50: mol_type = other DNA
acctctaatcctaaaattaaaataaacctacatctacaatcatatatttc

SEQ ID NO: 32652 - DNA, 50 bp, synthetic construct
  source 1..50: mol_type = other DNA
ccaatataataaaacccccrtctctactaaatatacaaaattaaccaaac

SEQ ID NO: 32653 - DNA, 50 bp, synthetic construct
  source 1..50: mol_type = other DNA
actttatataacrattaaaaaaactcaaatcaatacccaaaatttttaac

SEQ ID NO: 32654 - DNA, 50 bp, synthetic construct
  source 1..50: mol_type = other DNA
ttaaaaatttttctcaacaaaactattaatataacracttcatcttacac

SEQ ID NO: 32655 - DNA, 50 bp, synthetic construct
  source 1..50: mol_type = other DNA
tacttttaacccaaattaaaaatttttctcaacaaaactattaatataac

SEQ ID NO: 32656 - DNA, 50 bp, synthetic construct
  source 1..50: mol_type = other DNA
ataaatttctaaaactctacaaacatcttaactaaaatcaaatttaactc

SEQ ID NO: 32657 - DNA, 50 bp, synthetic construct
  source 1..50: mol_type = other DNA
ataattacattaaccatcctctttttaaactaaaataatactcctaaaac

SEQ ID NO: 32658 - DNA, 50 bp, synthetic construct
  source 1..50: mol_type = other DNA
aacaacctacaacaattattaaacaaattcttcacrcccatctaatacac

SEQ ID NO: 32659 - DNA, 50 bp, synthetic construct
  source 1..50: mol_type = other DNA
aaacttaaaactaatctacaactaattaaaaactaatctataatttaacc

SEQ ID NO: 32660 - DNA, 50 bp, synthetic construct
  source 1..50: mol_type = other DNA
tttaaacccaaaccttctcacttatatttcaatattctttccacaactcc

SEQ ID NO: 32661 - DNA, 50 bp, synthetic construct
  source 1..50: mol_type = other DNA
accttattacactttaaaaattatattttctttaaaaataacatcaccac

SEQ ID NO: 32662 - DNA, 50 bp, synthetic construct
  source 1..50: mol_type = other DNA
cccaaaaaacaactccaactttaaaacccatcttttacaactcaaaaacc

SEQ ID NO: 32663 - DNA, 50 bp, synthetic construct
  source 1..50: mol_type = other DNA
aacaaacccaaacccatctcactatactctactaaaaaacrctactctac

SEQ ID NO: 32664 - DNA, 50 bp, synthetic construct
  source 1..50: mol_type = other DNA
taaccccaaactctctatcctaattacaatactaactaaaacacacaaac

SEQ ID NO: 32665 - DNA, 50 bp, synthetic construct
  source 1..50: mol_type = other DNA
ctacaaactcaaaaatttctattaatcattaatttcttactctttaaaac

SEQ ID NO: 32666 - DNA, 50 bp, synthetic construct
  source 1..50: mol_type = other DNA
ccatatttccaccatatatttcatactaactccccctaaaatttatacac

SEQ ID NO: 32667 - DNA, 50 bp, synthetic construct
  source 1..50: mol_type = other DNA
acaataaaaaactttactttttcataatattaccttctaatacctcaaac

SEQ ID NO: 32668 - DNA, 50 bp, synthetic construct
  source 1..50: mol_type = other DNA
caccrctaaaactatttcaaattataatatacaacrtcctcacttcattc

SEQ ID NO: 32669 - DNA, 50 bp, synthetic construct
  source 1..50: mol_type = other DNA
tcttctcrataaactaaccaaaattctaaatttcatttactatataaaac

SEQ ID NO: 32670 - DNA, 50 bp, synthetic construct
  source 1..50: mol_type = other DNA
tcctccttcctatcaataactaactcctccaaattcactataaaaaaacc

SEQ ID NO: 32671 - DNA, 50 bp, synthetic construct
  source 1..50: mol_type = other DNA
accaactacaaacaaactttttatcataattaaaacaaataatttcracc

SEQ ID NO: 32672 - DNA, 50 bp, synthetic construct
  source 1..50: mol_type = other DNA
aaaactttatatcaataattaaatatttctatttctttaaaacttacccc

SEQ ID NO: 32673 - DNA, 50 bp, synthetic construct
  source 1..50: mol_type = other DNA
actctacaatctttcactaaactcaaaactaaaacaaacactcrctaaac

SEQ ID NO: 32674 - DNA, 50 bp, synthetic construct
  source 1..50: mol_type = other DNA
atctatcccaaccctaaactcaataaaaaattacaaaatcctaaacccac

SEQ ID NO: 32675 - DNA, 50 bp, synthetic construct
  source 1..50: mol_type = other DNA
aaaaattacaaaatcctaaacccacraaaaaatctccrctatatccaaac

SEQ ID NO: 32676 - DNA, 50 bp, synthetic construct
  source 1..50: mol_type = other DNA
caactcctctacaaactaaaatcaaaacccaacaaacctataccaacrtc

SEQ ID NO: 32677 - DNA, 50 bp, synthetic construct
  source 1..50: mol_type = other DNA
taataccttacaaacacaaaaataaaaaattataccaaaaatacratacc

SEQ ID NO: 32678 - DNA, 50 bp, synthetic construct
  source 1..50: mol_type = other DNA
ctaacataattttccatccttatacctacaaaacattactatataaaaac

SEQ ID NO: 32679 - DNA, 50 bp, synthetic construct
  source 1..50: mol_type = other DNA
ctatttccactaaaaattacaaattctatcctaatttaatctaccactac

SEQ ID NO: 32680 - DNA, 50 bp, synthetic construct
  source 1..50: mol_type = other DNA
aacaaaacractccctatacaactaacccttaaacataaatttaaacaac

SEQ ID NO: 32681 - DNA, 50 bp, synthetic construct
  source 1..50: mol_type = other DNA
tatacaactaacccttaaacataaatttaaacaacrtaaatccactctac

SEQ ID NO: 32682 - DNA, 50 bp, synthetic construct
  source 1..50: mol_type = other DNA
tacaactaacccttaaacataaatttaaacaacrtaaatccactctacrc

SEQ ID NO: 32683 - DNA, 50 bp, synthetic construct
  source 1..50: mol_type = other DNA
acaacataacraaaccccttctctacaaaaaatacaaaatttaaccraac

SEQ ID NO: 32684 - DNA, 50 bp, synthetic construct
  source 1..50: mol_type = other DNA
tttcrccatattacctaaactaatcttaaattcctaaactcaaaccatcc

SEQ ID NO: 32685 - DNA, 50 bp, synthetic construct
  source 1..50: mol_type = other DNA
ccaaatcttaaaaaacttatcttctaatttcaaaattaacccttaattac

SEQ ID NO: 32686 - DNA, 50 bp, synthetic construct
  source 1..50: mol_type = other DNA
tactactaaaaaaacaaactacttaataacttccctaaaaaatatcccac

SEQ ID NO: 32687 - DNA, 50 bp, synthetic construct
  source 1..50: mol_type = other DNA
ctaacraataaacaaacaaaactcctactcccraatatcctaaaaaacac

SEQ ID NO: 32688 - DNA, 50 bp, synthetic construct
  source 1..50: mol_type = other DNA
atcctaaaaaacacrtaaacataccrcrtaaataatctaaatactacaac

SEQ ID NO: 32689 - DNA, 50 bp, synthetic construct
  source 1..50: mol_type = other DNA
aatcatatctattcrctactttatcaaccttatacccaatttaaactttc

SEQ ID NO: 32690 - DNA, 50 bp, synthetic construct
  source 1..50: mol_type = other DNA
aataccaaaccaaatatactccataacaaaataaaaccactcccaaaatc

SEQ ID NO: 32691 - DNA, 50 bp, synthetic construct
  source 1..50: mol_type = other DNA
aataactttattttatcataaaacacacctaatttaacactatcctaccc

SEQ ID NO: 32692 - DNA, 50 bp, synthetic construct
  source 1..50: mol_type = other DNA
ataaaacacacctaatttaacactatcctacccraacaataaaacctaac

SEQ ID NO: 32693 - DNA, 50 bp, synthetic construct
  source 1..50: mol_type = other DNA
caaacraaactaccaaaactaacaaacctaactcaaaacaaaacrtaacc

SEQ ID NO: 32694 - DNA, 50 bp, synthetic construct
  source 1..50: mol_type = other DNA
aaaataccracacctaaaattcataacctaccrtttatataacaacaaac

SEQ ID NO: 32695 - DNA, 50 bp, synthetic construct
  source 1..50: mol_type = other DNA
aaaccctctaaatacaaaaaaataccracacctaaaattcataacctacc

SEQ ID NO: 32696 - DNA, 50 bp, synthetic construct
  source 1..50: mol_type = other DNA
acaacctcrcctactattacataaacracaaaccataaattccaaatatc

SEQ ID NO: 32697 - DNA, 50 bp, synthetic construct
  source 1..50: mol_type = other DNA
acactacacttcatattaatccctcacccaacttaaatacatccattttc

SEQ ID NO: 32698 - DNA, 50 bp, synthetic construct
  source 1..50: mol_type = other DNA
tataattccaaataaaacctactcttcaactcctatcctacaatacactc

SEQ ID NO: 32699 - DNA, 50 bp, synthetic construct
  source 1..50: mol_type = other DNA
tataaaaatttcataccaattaaactaaaacttattcccrataaaaacac

SEQ ID NO: 32700 - DNA, 50 bp, synthetic construct
  source 1..50: mol_type = other DNA
acacatacatatacccatatacaatctaaaaaccttattacccraaacac

SEQ ID NO: 32701 - DNA, 50 bp, synthetic construct
  source 1..50: mol_type = other DNA
catacatacacatacatatacccatatacaatctaaaaaccttattaccc

SEQ ID NO: 32702 - DNA, 50 bp, synthetic construct
  source 1..50: mol_type = other DNA
tttaaaaaccaattaaataaaacataaactcatctcrccctcaaaacccc

SEQ ID NO: 32703 - DNA, 50 bp, synthetic construct
  source 1..50: mol_type = other DNA
aacttaaaatacctttcaaattcatttaaaacctcaaaacacttaaacac

SEQ ID NO: 32704 - DNA, 50 bp, synthetic construct
  source 1..50: mol_type = other DNA
aacaccaaccaaaataactaaaaaaatacttacactatccctctcccaac

SEQ ID NO: 32705 - DNA, 50 bp, synthetic construct
  source 1..50: mol_type = other DNA
aattatttaattcatttcccttctatcctaaaaccctactctccccraac

SEQ ID NO: 32706 - DNA, 50 bp, synthetic construct
  source 1..50: mol_type = other DNA
aatcatttcrataaaaataatatctccracrtaaaaaatccctataactc

SEQ ID NO: 32707 - DNA, 50 bp, synthetic construct
  source 1..50: mol_type = other DNA
ttaaactcctaaactcaaataatctactcacctcaacctctcaaaatacc

SEQ ID NO: 32708 - DNA, 50 bp, synthetic construct
  source 1..50: mol_type = other DNA
tatccataaaaaccattaaaaaaatcacacatcttataaccrctaacccc

SEQ ID NO: 32709 - DNA, 50 bp, synthetic construct
  source 1..50: mol_type = other DNA
tataatcccttacttcataaatcataaaattcaacaatcacraaaccaac

SEQ ID NO: 32710 - DNA, 50 bp, synthetic construct
  source 1..50: mol_type = other DNA
ctaaatcaaaacaaaacataatataaccaatacaaaacaaaaccaaaacc

SEQ ID NO: 32711 - DNA, 50 bp, synthetic construct
  source 1..50: mol_type = other DNA
aaatctaacraacaccatctaaaactaaaaaactaaacaataactccaac

SEQ ID NO: 32712 - DNA, 50 bp, synthetic construct
  source 1..50: mol_type = other DNA
actaaaacaatcaaaaatatccccaaaactttcttaaaaaatctcaaaac

SEQ ID NO: 32713 - DNA, 50 bp, synthetic construct
  source 1..50: mol_type = other DNA
caaaacaaaaatactttaaacaactcctatatatatcraaataacraaac

SEQ ID NO: 32714 - DNA, 50 bp, synthetic construct
  source 1..50: mol_type = other DNA
ccaaaaaatataccacatataaataaataattcaaaaactaactaatctc

SEQ ID NO: 32715 - DNA, 50 bp, synthetic construct
  source 1..50: mol_type = other DNA
aaaaatttttaatctaaaacaaaataatttctcatctcctaaaaatatac

SEQ ID NO: 32716 - DNA, 50 bp, synthetic construct
  source 1..50: mol_type = other DNA
aaaataacaaattttaatataaaaatcrattccctaaataactcataccc

SEQ ID NO: 32717 - DNA, 50 bp, synthetic construct
  source 1..50: mol_type = other DNA
attaaaaaaacctttaataaactttacraacataaatcatccaaaaaatc

SEQ ID NO: 32718 - DNA, 50 bp, synthetic construct
  source 1..50: mol_type = other DNA
ttctttcctaaactttaactaattaaaattataacatataaaccraacac

SEQ ID NO: 32719 - DNA, 50 bp, synthetic construct
  source 1..50: mol_type = other DNA
tacaaaaattaactaaacaaaataacacatacctataattccaactactc

SEQ ID NO: 32720 - DNA, 50 bp, synthetic construct
  source 1..50: mol_type = other DNA
aaccraaattacrccactatactccaacttaaacaacaaaacataactcc

SEQ ID NO: 32721 - DNA, 50 bp, synthetic construct
  source 1..50: mol_type = other DNA
ctcctcraaaatatacttaccaaaactaaatcttttttaactaactacac

SEQ ID NO: 32722 - DNA, 50 bp, synthetic construct
  source 1..50: mol_type = other DNA
tataacrtataatcaaccaaaaaaaacccaaccttaacaaatatactctc

SEQ ID NO: 32723 - DNA, 50 bp, synthetic construct
  source 1..50: mol_type = other DNA
ataatatatataatctcaaccctaaaaaaaacctataaaaaatactcttc

SEQ ID NO: 32724 - DNA, 50 bp, synthetic construct
  source 1..50: mol_type = other DNA
ctcctataatatttattttaataatcttttttaacccttctttaataaac

SEQ ID NO: 32725 - DNA, 50 bp, synthetic construct
  source 1..50: mol_type = other DNA
acaacaacaaaaaaataccccttcaaaaatacttctctataaataaatac

SEQ ID NO: 32726 - DNA, 50 bp, synthetic construct
  source 1..50: mol_type = other DNA
aactatatctaatacaaacatctattaaaacctatctatccaactatccc

SEQ ID NO: 32727 - DNA, 50 bp, synthetic construct
  source 1..50: mol_type = other DNA
ccctttcccaaaaaaaacttctatccccrtataaaacaaaatttcctctc

SEQ ID NO: 32728 - DNA, 50 bp, synthetic construct
  source 1..50: mol_type = other DNA
catctaactactctaaaaaatcaaatataaatcattcaactatcrttatc

SEQ ID NO: 32729 - DNA, 50 bp, synthetic construct
  source 1..50: mol_type = other DNA
acctttcatctaactactctaaaaaatcaaatataaatcattcaactatc

SEQ ID NO: 32730 - DNA, 50 bp, synthetic construct
  source 1..50: mol_type = other DNA
taaaaaaacatacactcaactactatatcctctcataaaactactaaaac

SEQ ID NO: 32731 - DNA, 50 bp, synthetic construct
  source 1..50: mol_type = other DNA
cctctcataaaactactaaaacracccctataaaaaccacaatacaaaac

SEQ ID NO: 32732 - DNA, 50 bp, synthetic construct
  source 1..50: mol_type = other DNA
tattacttttactacattctacrtccaacttaacactaaaacaaattctc

SEQ ID NO: 32733 - DNA, 50 bp, synthetic construct
  source 1..50: mol_type = other DNA
aacttaatactcatatcraaaaaaaccatattacttttactacattctac

SEQ ID NO: 32734 - DNA, 50 bp, synthetic construct
  source 1..50: mol_type = other DNA
aaatttattttaacatacatcaatttatcatctttaactcaatcaaaaac

SEQ ID NO: 32735 - DNA, 50 bp, synthetic construct
  source 1..50: mol_type = other DNA
cacrataaaaaccccactcttctaaaataaaaatacaataaattcaatcc

SEQ ID NO: 32736 - DNA, 50 bp, synthetic construct
  source 1..50: mol_type = other DNA
aatcctaaatacrtaaaactaaatcaataaaacacaacaaaaacctccac

SEQ ID NO: 32737 - DNA, 50 bp, synthetic construct
  source 1..50: mol_type = other DNA
aaataataaaactaaaaacaaacrttaaaaatccatccaatcctaaatac

SEQ ID NO: 32738 - DNA, 50 bp, synthetic construct
  source 1..50: mol_type = other DNA
cacctaaaatcaaaattattaacattcatatctataatcctaatcccttc

SEQ ID NO: 32739 - DNA, 50 bp, synthetic construct
  source 1..50: mol_type = other DNA
ctaaaatcaaaattattaacattcatatctataatcctaatcccttcrac

SEQ ID NO: 32740 - DNA, 50 bp, synthetic construct
  source 1..50: mol_type = other DNA
atcaaaattattaacattcatatctataatcctaatcccttcracrtcac

SEQ ID NO: 32741 - DNA, 50 bp, synthetic construct
  source 1..50: mol_type = other DNA
acattcatatctataatcctaatcccttcracrtcacrttaaaaaatacc

SEQ ID NO: 32742 - DNA, 50 bp, synthetic construct
  source 1..50: mol_type = other DNA
ctccraaaacaaatattcactcctctattaaacttacacccttttatccc

SEQ ID NO: 32743 - DNA, 50 bp, synthetic construct
  source 1..50: mol_type = other DNA
cccaaaacttatattttacctaaaaacrcraatcttccactaactcacac

SEQ ID NO: 32744 - DNA, 50 bp, synthetic construct
  source 1..50: mol_type = other DNA
taacaaacttcaaactattaacccaaaacttatattttacctaaaaacrc

SEQ ID NO: 32745 - DNA, 50 bp, synthetic construct
  source 1..50: mol_type = other DNA
aaattatccaactacccaaatttttttcttttttactttaactacaactc

SEQ ID NO: 32746 - DNA, 50 bp, synthetic construct
  source 1..50: mol_type = other DNA
aaaaacrcttaaaataccatacaaatataaccattataaaataaatatac

SEQ ID NO: 32747 - DNA, 50 bp, synthetic construct
  source 1..50: mol_type = other DNA
attccatacacaaaacrtctaactaaaaaaattaacaaataatctataac

SEQ ID NO: 32748 - DNA, 50 bp, synthetic construct
  source 1..50: mol_type = other DNA
tacttaataaactaaaaacataaataaacaaataaacttcttaccaaatc

SEQ ID NO: 32749 - DNA, 50 bp, synthetic construct
  source 1..50: mol_type = other DNA
tactcracctcttaaaatttccaaactacaaactccctaccaaaaaaaac

SEQ ID NO: 32750 - DNA, 50 bp, synthetic construct
  source 1..50: mol_type = other DNA
ataccrtcctccctaataaaaaacctacaatttaaaaatcttaaaaaacc

SEQ ID NO: 32751 - DNA, 50 bp, synthetic construct
  source 1..50: mol_type = other DNA
caaaatacraaaatttattacctctatcctacccctctataaactcactc

SEQ ID NO: 32752 - DNA, 50 bp, synthetic construct
  source 1..50: mol_type = other DNA
aatccacrataaaacratactcctataattctattttatttactacattc

SEQ ID NO: 32753 - DNA, 50 bp, synthetic construct
  source 1..50: mol_type = other DNA
tactactatctaaaaaacaaaaccaaatatacaaaataaaacataaaaac

SEQ ID NO: 32754 - DNA, 50 bp, synthetic construct
  source 1..50: mol_type = other DNA
ctcttaactcattaattactccttaaacatctcataactccaaaaaaaac

SEQ ID NO: 32755 - DNA, 50 bp, synthetic construct
  source 1..50: mol_type = other DNA
cctataccatatataatatctataataacctataattaatcatactttcc

SEQ ID NO: 32756 - DNA, 50 bp, synthetic construct
  source 1..50: mol_type = other DNA
tacaacaaaatccaaaaatatacataaacttacatttatttattcaaaac

SEQ ID NO: 32757 - DNA, 50 bp, synthetic construct
  source 1..50: mol_type = other DNA
aatccaaaaatatacataaacttacatttatttattcaaaacrtacttcc

SEQ ID NO: 32758 - DNA, 50 bp, synthetic construct
  source 1..50: mol_type = other DNA
aacaatctccttttaataaaataactaataatacatcaatctaaatatac

SEQ ID NO: 32759 - DNA, 50 bp, synthetic construct
  source 1..50: mol_type = other DNA
aactatttcatctacaattatcaatttacaaacacttacaatttcraacc

SEQ ID NO: 32760 - DNA, 50 bp, synthetic construct
  source 1..50: mol_type = other DNA
aaaataactatttcatctacaattatcaatttacaaacacttacaatttc

SEQ ID NO: 32761 - DNA, 50 bp, synthetic construct
  source 1..50: mol_type = other DNA
taatatctcaacaaaacacaaacaaactatcataaaaattcctaaaaacc

SEQ ID NO: 32762 - DNA, 50 bp, synthetic construct
  source 1..50: mol_type = other DNA
aaaatcctcataataatctatctatattctattaaaacaccaaataactc

SEQ ID NO: 32763 - DNA, 50 bp, synthetic construct
  source 1..50: mol_type = other DNA
aactcrttcactaaaataaaaaacctaatatttatctctataaaaatcac

SEQ ID NO: 32764 - DNA, 50 bp, synthetic construct
  source 1..50: mol_type = other DNA
cattccaaacctaaaaaatcctttaaatcaccactaaaataaacaaatcc

SEQ ID NO: 32765 - DNA, 50 bp, synthetic construct
  source 1..50: mol_type = other DNA
aatcctttaaatcaccactaaaataaacaaatccrtaatatttctaaaac

SEQ ID NO: 32766 - DNA, 50 bp, synthetic construct
  source 1..50: mol_type = other DNA
attctaaaaactacaattaatccaaacacctcacttaaaataatcaaaac

SEQ ID NO: 32767 - DNA, 50 bp, synthetic construct
  source 1..50: mol_type = other DNA
taatatttttccccttttataaaataaaacaaacacaacttaaaaacaac

SEQ ID NO: 32768 - DNA, 50 bp, synthetic construct
  source 1..50: mol_type = other DNA
cacaatttcrttctactcraaactataaattcatatcaaccctaaactac

SEQ ID NO: 32769 - DNA, 50 bp, synthetic construct
  source 1..50: mol_type = other DNA
taaatcatattataatatattcttctactaccttttaaatccaacattac

SEQ ID NO: 32770 - DNA, 50 bp, synthetic construct
  source 1..50: mol_type = other DNA
aaacctaactaattttaaattctaaccttaacatatataatctatataac

SEQ ID NO: 32771 - DNA, 50 bp, synthetic construct
  source 1..50: mol_type = other DNA
attatctctataccttactatcttacctacctccttataaatccaacctc

SEQ ID NO: 32772 - DNA, 50 bp, synthetic construct
  source 1..50: mol_type = other DNA
taataataataacattcaaaaatattaacaccttttcttcctaacttcac

SEQ ID NO: 32773 - DNA, 50 bp, synthetic construct
  source 1..50: mol_type = other DNA
ccccaaaaaaactttcccctaaaccaaaataaatcataactacaaaatac

SEQ ID NO: 32774 - DNA, 50 bp, synthetic construct
  source 1..50: mol_type = other DNA
ccaatcaacaaaaactttcccctaaaccaaaataaatcataactacaaac

SEQ ID NO: 32775 - DNA, 50 bp, synthetic construct
  source 1..50: mol_type = other DNA
tcctccccttttccttttcctatcctataaaattaacttattttctatcc

SEQ ID NO: 32776 - DNA, 50 bp, synthetic construct
  source 1..50: mol_type = other DNA
accattccraatccccataaaaactttactttctcttttactttactttc

SEQ ID NO: 32777 - DNA, 50 bp, synthetic construct
  source 1..50: mol_type = other DNA
cttttactttactttcrcttttactttacttccrcttttactttactttc

SEQ ID NO: 32778 - DNA, 50 bp, synthetic construct
  source 1..50: mol_type = other DNA
ctttacttccrcttttactttactttcrcttttactttactttcactttc

SEQ ID NO: 32779 - DNA, 50 bp, synthetic construct
  source 1..50: mol_type = other DNA
tttactttcrcttttactttactttcactttcrctttaataaatcttacc

SEQ ID NO: 32780 - DNA, 50 bp, synthetic construct
  source 1..50: mol_type = other DNA
aataaaaccctaaaccacaacractaatattataactcrattaaaaaaac

SEQ ID NO: 32781 - DNA, 50 bp, synthetic construct
  source 1..50: mol_type = other DNA
craacttcaaaaaataaaaccctaaaccacaacractaatattataactc

SEQ ID NO: 32782 - DNA, 50 bp, synthetic construct
  source 1..50: mol_type = other DNA
acacactctttaaatctacrcrtttctctaatcraactataacattaacc

SEQ ID NO: 32783 - DNA, 50 bp, synthetic construct
  source 1..50: mol_type = other DNA
craactataacattaaccrctataatccaaaacttcattccttaaaaccc

SEQ ID NO: 32784 - DNA, 50 bp, synthetic construct
  source 1..50: mol_type = other DNA
tactcaccctttaaatcatctacraacctaaattttcataaccrtaaaac

SEQ ID NO: 32785 - DNA, 50 bp, synthetic construct
  source 1..50: mol_type = other DNA
aactaaaaataaaattcttatccrtcccacraccataaaaattcaaactc

SEQ ID NO: 32786 - DNA, 50 bp, synthetic construct
  source 1..50: mol_type = other DNA
aacacaaatattccctcacaaaatcaaactcccctactaaaacacttccc

SEQ ID NO: 32787 - DNA, 50 bp, synthetic construct
  source 1..50: mol_type = other DNA
caacattaaaaaacctaacccctccccttcctatataaaacttaaaattc

SEQ ID NO: 32788 - DNA, 50 bp, synthetic construct
  source 1..50: mol_type = other DNA
taaaaaaattctaaccaacctctccactaaaataaaacctcraaaaattc

SEQ ID NO: 32789 - DNA, 50 bp, synthetic construct
  source 1..50: mol_type = other DNA
ttttccttatccaccctaaaaattttcrtcaaaatattcccaaaacctcc

SEQ ID NO: 32790 - DNA, 50 bp, synthetic construct
  source 1..50: mol_type = other DNA
aaaaccctacctttaatttttcttctatttcctctaaaaaataattacac

SEQ ID NO: 32791 - DNA, 50 bp, synthetic construct
  source 1..50: mol_type = other DNA
aaattctccaaaaccrattttctctaactcataaaattctattatatacc

SEQ ID NO: 32792 - DNA, 50 bp, synthetic construct
  source 1..50: mol_type = other DNA
aaacaaactccrtttactaaaaacacaatatccatcctactcccttctcc

SEQ ID NO: 32793 - DNA, 50 bp, synthetic construct
  source 1..50: mol_type = other DNA
tatttcaaaaaatacttttccacactaattcctcctaataaaacctaccc

SEQ ID NO: 32794 - DNA, 50 bp, synthetic construct
  source 1..50: mol_type = other DNA
aaacaactctaaaatactacttccaaaatattaacaccacataaactctc

SEQ ID NO: 32795 - DNA, 50 bp, synthetic construct
  source 1..50: mol_type = other DNA
aaacaccaatatccttcaaatacraacatacacraataacaataaaaccc

SEQ ID NO: 32796 - DNA, 50 bp, synthetic construct
  source 1..50: mol_type = other DNA
aaaaaaattccaatttttaaaataatcaaacaccaatatccttcaaatac

SEQ ID NO: 32797 - DNA, 50 bp, synthetic construct
  source 1..50: mol_type = other DNA
ttatttaaaataaaatttcrctcttattacccaaaccaaaatacaataac

SEQ ID NO: 32798 - DNA, 50 bp, synthetic construct
  source 1..50: mol_type = other DNA
aataaaacaacaaccaacatcaataaatttaccattattaaccrcccacc

SEQ ID NO: 32799 - DNA, 50 bp, synthetic construct
  source 1..50: mol_type = other DNA
tacrtaacactttacaatttacaaactattttcacrtccttatttcatac

SEQ ID NO: 32800 - DNA, 50 bp, synthetic construct
  source 1..50: mol_type = other DNA
caactctttaacatttacrtaacactttacaatttacaaactattttcac

SEQ ID NO: 32801 - DNA, 50 bp, synthetic construct
  source 1..50: mol_type = other DNA
caacccctacttcaaaacaatttaaatcaatacaactctttaacatttac

SEQ ID NO: 32802 - DNA, 50 bp, synthetic construct
  source 1..50: mol_type = other DNA
ccacrcctaccctaaatcctaattctaacaaaactcacttaactaaaccc

SEQ ID NO: 32803 - DNA, 50 bp, synthetic construct
  source 1..50: mol_type = other DNA
aaaaaaatacctaaaatcccaaaaccaaaattaaaacttacttaactaac

SEQ ID NO: 32804 - DNA, 50 bp, synthetic construct
  source 1..50: mol_type = other DNA
cctaaaatcccaaaaccaaaattaaaacttacttaactaacrctacaaac

SEQ ID NO: 32805 - DNA, 50 bp, synthetic construct
  source 1..50: mol_type = other DNA
caaaaccaaaattaaaacttacttaactaacrctacaaacraaaaacctc

SEQ ID NO: 32806 - DNA, 50 bp, synthetic construct
  source 1..50: mol_type = other DNA
ctatctatactcatccacttctccrcatcaacaaaaaacatccaaaactc

SEQ ID NO: 32807 - DNA, 50 bp, synthetic construct
  source 1..50: mol_type = other DNA
taaaaaaataaccrtataaactacraatcttaaatacctcttactaatac

SEQ ID NO: 32808 - DNA, 50 bp, synthetic construct
  source 1..50: mol_type = other DNA
acacacaatcactctcaatcatttacatatcrtctacractactttttcc

SEQ ID NO: 32809 - DNA, 50 bp, synthetic construct
  source 1..50: mol_type = other DNA
taaaatttcrttaacacacaatcactctcaatcatttacatatcrtctac

SEQ ID NO: 32810 - DNA, 50 bp, synthetic construct
  source 1..50: mol_type = other DNA
cataaataaaatttcrttaacacacaatcactctcaatcatttacatatc

SEQ ID NO: 32811 - DNA, 50 bp, synthetic construct
  source 1..50: mol_type = other DNA
aaacttctttatctcaaaatacaaaactaaataattttctatctctaacc

SEQ ID NO: 32812 - DNA, 50 bp, synthetic construct
  source 1..50: mol_type = other DNA
tcctatatctcractaaaaccttaaacaatataaactaacaaaacaaatc

SEQ ID NO: 32813 - DNA, 50 bp, synthetic construct
  source 1..50: mol_type = other DNA
ataaaataaaaaactccttccctaacttccttaaaaaaacccaacaaacc

SEQ ID NO: 32814 - DNA, 50 bp, synthetic construct
  source 1..50: mol_type = other DNA
tatcaaaacaaaaaacaaactacccaaaaccctaaaacaaaactaaaaac

SEQ ID NO: 32815 - DNA, 50 bp, synthetic construct
  source 1..50: mol_type = other DNA
aaaatattaacaataaacrctttaccctaacaatcaaaaatctcctcctc

SEQ ID NO: 32816 - DNA, 50 bp, synthetic construct
  source 1..50: mol_type = other DNA
atacaaccacattaaaaacctctaatacctaacaaaccctaactcttctc

SEQ ID NO: 32817 - DNA, 50 bp, synthetic construct
  source 1..50: mol_type = other DNA
aaccaaaaccccctaaaaaactaatctcaaaacacaccaaaaccccaaac

SEQ ID NO: 32818 - DNA, 50 bp, synthetic construct
  source 1..50: mol_type = other DNA
acraatatcrctaactaacacaataaaactactcaatcaatacttctccc

SEQ ID NO: 32819 - DNA, 50 bp, synthetic construct
  source 1..50: mol_type = other DNA
ccraaaaaaacattaactaaacaaccccactatatcaaccaacracatcc

SEQ ID NO: 32820 - DNA, 50 bp, synthetic construct
  source 1..50: mol_type = other DNA
aataaccataaaaataaacaaccaacaaccctcaaaactactctatctac

SEQ ID NO: 32821 - DNA, 50 bp, synthetic construct
  source 1..50: mol_type = other DNA
taaaaacaaaacaattaaaaaaacttataactaaaaaccaaataaacttc

SEQ ID NO: 32822 - DNA, 50 bp, synthetic construct
  source 1..50: mol_type = other DNA
ttcrttaaaactaaaaaaaactccaaaactccatttattcactataaaac

SEQ ID NO: 32823 - DNA, 50 bp, synthetic construct
  source 1..50: mol_type = other DNA
acactaaattttcaaataattttctaatactacttctcaatttcacaaac

SEQ ID NO: 32824 - DNA, 50 bp, synthetic construct
  source 1..50: mol_type = other DNA
aaaaaaaataactacaataataactttcttaaaacacctttaaatttacc

SEQ ID NO: 32825 - DNA, 50 bp, synthetic construct
  source 1..50: mol_type = other DNA
acctcctatccacttacatttcrtaaaattctccraatcaaataaataac

SEQ ID NO: 32826 - DNA, 50 bp, synthetic construct
  source 1..50: mol_type = other DNA
catcaacacacattattcatttacaattctttttaaaacaaaatatccac

SEQ ID NO: 32827 - DNA, 50 bp, synthetic construct
  source 1..50: mol_type = other DNA
ttaaacaaacttcacaaatactcatatataaaccraacrccrtaactcac

SEQ ID NO: 32828 - DNA, 50 bp, synthetic construct
  source 1..50: mol_type = other DNA
acaccatatacataaaatatccattttctaaaaaacctcatcatctaacc

SEQ ID NO: 32829 - DNA, 50 bp, synthetic construct
  source 1..50: mol_type = other DNA
acrtaaaattaaaaaacccaaactaactatatacaaaacraacacrtaac

SEQ ID NO: 32830 - DNA, 50 bp, synthetic construct
  source 1..50: mol_type = other DNA
aaactaattataccatactcactccaaaccttaatattctcttaaataac

SEQ ID NO: 32831 - DNA, 50 bp, synthetic construct
  source 1..50: mol_type = other DNA
ctttcatccactaaaatcctttacctaaccatacaccttcataaaacccc

SEQ ID NO: 32832 - DNA, 50 bp, synthetic construct
  source 1..50: mol_type = other DNA
tatataaacaaaacatcaaaaaaaacactcttatataaaaaatattacac

SEQ ID NO: 32833 - DNA, 50 bp, synthetic construct
  source 1..50: mol_type = other DNA
atatacctaaaacaaatatcrctatcctccatcttaaaactaaaaaaacc

SEQ ID NO: 32834 - DNA, 50 bp, synthetic construct
  source 1..50: mol_type = other DNA
aaacaatatcaaccctacaatcaccctataatatacctaaaacaaatatc

SEQ ID NO: 32835 - DNA, 50 bp, synthetic construct
  source 1..50: mol_type = other DNA
ctaaacacaccacaaaataattacaaaattaacactacctacctaaaaac

SEQ ID NO: 32836 - DNA, 50 bp, synthetic construct
  source 1..50: mol_type = other DNA
atttaaaaacttcccaaacrattctactaattaccraattaaaaaccrac

SEQ ID NO: 32837 - DNA, 50 bp, synthetic construct
  source 1..50: mol_type = other DNA
aacatttaaaaacttcccaaacrattctactaattaccraattaaaaacc

SEQ ID NO: 32838 - DNA, 50 bp, synthetic construct
  source 1..50: mol_type = other DNA
taataaaacatcaacatttaaaaacttcccaaacrattctactaattacc

SEQ ID NO: 32839 - DNA, 50 bp, synthetic construct
  source 1..50: mol_type = other DNA
cacaattccccrataataataaaacatcaacatttaaaaacttcccaaac

SEQ ID NO: 32840 - DNA, 50 bp, synthetic construct
  source 1..50: mol_type = other DNA
aatcacaatactatcatttcactctaaacccrtaaatctcratcctaacc

SEQ ID NO: 32841 - DNA, 50 bp, synthetic construct
  source 1..50: mol_type = other DNA
ttccaatcrtaatcacaatactatcatttcactctaaacccrtaaatctc

SEQ ID NO: 32842 - DNA, 50 bp, synthetic construct
  source 1..50: mol_type = other DNA
aaatacatattccaatcrtaatcacaatactatcatttcactctaaaccc

SEQ ID NO: 32843 - DNA, 50 bp, synthetic construct
  source 1..50: mol_type = other DNA
ttactttctcaaaactataatccacrttcracraaatacatattccaatc

SEQ ID NO: 32844 - DNA, 50 bp, synthetic construct
  source 1..50: mol_type = other DNA
aacccaaaataaaataacaatactataatcacractaaaatatacacttc

SEQ ID NO: 32845 - DNA, 50 bp, synthetic construct
  source 1..50: mol_type = other DNA
ccaaaataaaataacaatactataatcacractaaaatatacacttcrcc

SEQ ID NO: 32846 - DNA, 50 bp, synthetic construct
  source 1..50: mol_type = other DNA
aataaaataacaatactataatcacractaaaatatacacttcrccraac

SEQ ID NO: 32847 - DNA, 50 bp, synthetic construct
  source 1..50: mol_type = other DNA
acatatcccaaaacatacaccattaattaaataatttctaattacttccc

SEQ ID NO: 32848 - DNA, 50 bp, synthetic construct
  source 1..50: mol_type = other DNA
tttattttattccctatattttacttaaacaaatcatttatacrattcac

SEQ ID NO: 32849 - DNA, 50 bp, synthetic construct
  source 1..50: mol_type = other DNA
tcctttaataaacaaatatttaaacctacaaacttattcaaatcaaattc

SEQ ID NO: 32850 - DNA, 50 bp, synthetic construct
  source 1..50: mol_type = other DNA
aataaaacaaacratatactatctaataaaaataccccattaaacaacac

SEQ ID NO: 32851 - DNA, 50 bp, synthetic construct
  source 1..50: mol_type = other DNA
ccttcactaatatattttaaaaactctccaaataattctaatataccccc

SEQ ID NO: 32852 - DNA, 50 bp, synthetic construct
  source 1..50: mol_type = other DNA
tcctaatattcaaacttttatatatttccttccccttcaatataaataac

SEQ ID NO: 32853 - DNA, 50 bp, synthetic construct
  source 1..50: mol_type = other DNA
ataataatattacataaaattaaaaccaatatcttactaaaactcttccc

SEQ ID NO: 32854 - DNA, 50 bp, synthetic construct
  source 1..50: mol_type = other DNA
cataaaattaaaaccaatatcttactaaaactcttcccrttactaacttc

SEQ ID NO: 32855 - DNA, 50 bp, synthetic construct
  source 1..50: mol_type = other DNA
cccccaccaaacaaacaaataacctaattaacaaatatatcrtaaaattc

SEQ ID NO: 32856 - DNA, 50 bp, synthetic construct
  source 1..50: mol_type = other DNA
taacctaattaacaaatatatcrtaaaattcraaattcrcctccaactcc

SEQ ID NO: 32857 - DNA, 50 bp, synthetic construct
  source 1..50: mol_type = other DNA
acaacrcctaacaaaactcttcaatatataattccttaactatcctatac

SEQ ID NO: 32858 - DNA, 50 bp, synthetic construct
  source 1..50: mol_type = other DNA
ctaacaaaactcttcaatatataattccttaactatcctatacrtctctc

SEQ ID NO: 32859 - DNA, 50 bp, synthetic construct
  source 1..50: mol_type = other DNA
attccttaactatcctatacrtctctcraatataaacacctctaaaactc

SEQ ID NO: 32860 - DNA, 50 bp, synthetic construct
  source 1..50: mol_type = other DNA
ctatattaaaaacctacrtaaacacaaaaattaaccttcaacaaccaatc

SEQ ID NO: 32861 - DNA, 50 bp, synthetic construct
  source 1..50: mol_type = other DNA
aaaaaacaacaaaaaccraactaataactatttataaacacttactaaac

SEQ ID NO: 32862 - DNA, 50 bp, synthetic construct
  source 1..50: mol_type = other DNA
aaaaccraactaataactatttataaacacttactaaacrcccactctac

SEQ ID NO: 32863 - DNA, 50 bp, synthetic construct
  source 1..50: mol_type = other DNA
ataatcrccraaaaaattaacatctcrttacaaaaaaatatccaaaaaac

SEQ ID NO: 32864 - DNA, 50 bp, synthetic construct
  source 1..50: mol_type = other DNA
ttaacttaattctcccacraactacaaacraaactaaaaacccraaaaac

SEQ ID NO: 32865 - DNA, 50 bp, synthetic construct
  source 1..50: mol_type = other DNA
crcttacaactcrtaaaaaaatcaaattaaactcraacraaactcctacc

SEQ ID NO: 32866 - DNA, 50 bp, synthetic construct
  source 1..50: mol_type = other DNA
tttacaactttcacttaaaccctaaaacaacacattccaaccracccaac

SEQ ID NO: 32867 - DNA, 50 bp, synthetic construct
  source 1..50: mol_type = other DNA
accrctatcactctcaatactcaaaaaataaacatatcaaaaccaaaaac

SEQ ID NO: 32868 - DNA, 50 bp, synthetic construct
  source 1..50: mol_type = other DNA
tctaatttaaaaaatcctaacaacaatttaaaacaaataataaaaccacc

SEQ ID NO: 32869 - DNA, 50 bp, synthetic construct
  source 1..50: mol_type = other DNA
cttttaccaaaattaacatccttctaatcttaataacaacttaattactc

SEQ ID NO: 32870 - DNA, 50 bp, synthetic construct
  source 1..50: mol_type = other DNA
accataaaaattattcaaataccttattctaaatctaattacraaattac

SEQ ID NO: 32871 - DNA, 50 bp, synthetic construct
  source 1..50: mol_type = other DNA
aaaacttttaattttaattccaacaacttaaacctacataattcaccatc

SEQ ID NO: 32872 - DNA, 50 bp, synthetic construct
  source 1..50: mol_type = other DNA
cccaaaaattataatttaattaatctaaaatacaaccaaattaaccctcc

SEQ ID NO: 32873 - DNA, 50 bp, synthetic construct
  source 1..50: mol_type = other DNA
crtctctacttttcctcatcattttccttcaacctaacaaattcttattc

SEQ ID NO: 32874 - DNA, 50 bp, synthetic construct
  source 1..50: mol_type = other DNA
actaaaaaccataattactactaaataccctacaatacactaaacaacac

SEQ ID NO: 32875 - DNA, 50 bp, synthetic construct
  source 1..50: mol_type = other DNA
aaataataaaaccaaaattatattctttaacacacacatccttaaaaacc

SEQ ID NO: 32876 - DNA, 50 bp, synthetic construct
  source 1..50: mol_type = other DNA
taaataacaaacactataaaaccataacaatcaatctaaaaactaaactc

SEQ ID NO: 32877 - DNA, 50 bp, synthetic construct
  source 1..50: mol_type = other DNA
ctaaaattacaaaaattactaaattaacatcaataaccaaaaacaatacc

SEQ ID NO: 32878 - DNA, 50 bp, synthetic construct
  source 1..50: mol_type = other DNA
ttaaaaatataacaattactaacacttcttaccttaaaactacrctttcc

SEQ ID NO: 32879 - DNA, 50 bp, synthetic construct
  source 1..50: mol_type = other DNA
aactctcttaaaaatataacaattactaacacttcttaccttaaaactac

SEQ ID NO: 32880 - DNA, 50 bp, synthetic construct
  source 1..50: mol_type = other DNA
ctaccttccctcraccacatttttctttccactaaaaaaatatcttcatc

SEQ ID NO: 32881 - DNA, 50 bp, synthetic construct
  source 1..50: mol_type = other DNA
aattcaaataactcttatacctcaactcccaaataactaaaactacaaac

SEQ ID NO: 32882 - DNA, 50 bp, synthetic construct
  source 1..50: mol_type = other DNA
tactaaactaaacaacaatatataccaaataaactaaatatactataatc

SEQ ID NO: 32883 - DNA, 50 bp, synthetic construct
  source 1..50: mol_type = other DNA
actactatccaacccaacaatcaaataatacaataatcccccttatccac

SEQ ID NO: 32884 - DNA, 50 bp, synthetic construct
  source 1..50: mol_type = other DNA
aatcaaataatacaataatcccccttatccacrcacaatttcaattaccc

SEQ ID NO: 32885 - DNA, 50 bp, synthetic construct
  source 1..50: mol_type = other DNA
aaaacaacacaatatttcatcatactcatcacrctactcaaaacaaccac

SEQ ID NO: 32886 - DNA, 50 bp, synthetic construct
  source 1..50: mol_type = other DNA
tcccraacaaaacaaaacaaaacaacacaatatttcatcatactcatcac

SEQ ID NO: 32887 - DNA, 50 bp, synthetic construct
  source 1..50: mol_type = other DNA
taacrtaataaacataataaaatactatactatcctactctatcctaccc

SEQ ID NO: 32888 - DNA, 50 bp, synthetic construct
  source 1..50: mol_type = other DNA
ctataccaactctaaataaacaaaacccaaaaaacacaaaataaaaaccc

SEQ ID NO: 32889 - DNA, 50 bp, synthetic construct
  source 1..50: mol_type = other DNA
ctcaatatctaaaaactacccacattccttaactaataactcctttcatc

SEQ ID NO: 32890 - DNA, 50 bp, synthetic construct
  source 1..50: mol_type = other DNA
accattaaccaaaaaatataaacaacctctaaacattaaaaacaaacccc

SEQ ID NO: 32891 - DNA, 50 bp, synthetic construct
  source 1..50: mol_type = other DNA
caatacccatatacattccctaaaaaatacttcaatcaatccacaaacac

SEQ ID NO: 32892 - DNA, 50 bp, synthetic construct
  source 1..50: mol_type = other DNA
aaaatctaacattttctaaacacttaataattaaatcaatacctccctcc

SEQ ID NO: 32893 - DNA, 50 bp, synthetic construct
  source 1..50: mol_type = other DNA
ataattaaatcaatacctccctccractttaatatacatataaatcatcc

SEQ ID NO: 32894 - DNA, 50 bp, synthetic construct
  source 1..50: mol_type = other DNA
cctttttattctattcaaattttcaataaattaaacracrcccatccacc

SEQ ID NO: 32895 - DNA, 50 bp, synthetic construct
  source 1..50: mol_type = other DNA
ccctaactcaacctttttattctattcaaattttcaataaattaaacrac

SEQ ID NO: 32896 - DNA, 50 bp, synthetic construct
  source 1..50: mol_type = other DNA
tctccctaactcaacctttttattctattcaaattttcaataaattaaac

SEQ ID NO: 32897 - DNA, 50 bp, synthetic construct
  source 1..50: mol_type = other DNA
aatttcrttcttattactcaaactaaaataaacaacaataacrcaatacc

SEQ ID NO: 32898 - DNA, 50 bp, synthetic construct
  source 1..50: mol_type = other DNA
caacctattacccaaaataacacrcataccaaaaaatcrtaaaaacccac

SEQ ID NO: 32899 - DNA, 50 bp, synthetic construct
  source 1..50: mol_type = other DNA
aaaaacccaaaaacctctacaattttcrtcraactaactaaaaaattccc

SEQ ID NO: 32900 - DNA, 50 bp, synthetic construct
  source 1..50: mol_type = other DNA
tccttccacctcaacttcraaaaatattaaaattacaataattaaccatc

SEQ ID NO: 32901 - DNA, 50 bp, synthetic construct
  source 1..50: mol_type = other DNA
actatttttaactcccataacaacaaaattatctaatttaatactaaatc

SEQ ID NO: 32902 - DNA, 50 bp, synthetic construct
  source 1..50: mol_type = other DNA
caataaactacataactctactcaaaacatttaaataccacattacacac

SEQ ID NO: 32903 - DNA, 50 bp, synthetic construct
  source 1..50: mol_type = other DNA
taacatacaaaacctataaaattaaccatttatctatatctctacttccc

SEQ ID NO: 32904 - DNA, 50 bp, synthetic construct
  source 1..50: mol_type = other DNA
actaaactcraatctccaatctcccatctactttatatataaaaaactcc

SEQ ID NO: 32905 - DNA, 50 bp, synthetic construct
  source 1..50: mol_type = other DNA
craacctaaaacraaacratatccraattaaaaatactttataatatctc

SEQ ID NO: 32906 - DNA, 50 bp, synthetic construct
  source 1..50: mol_type = other DNA
ccrtcaatcacaaacacaaacaaattcttcaataaaatacttttcactcc

SEQ ID NO: 32907 - DNA, 50 bp, synthetic construct
  source 1..50: mol_type = other DNA
taactctaaatccacaacactcaacatataactttaactaacacaaatcc

SEQ ID NO: 32908 - DNA, 50 bp, synthetic construct
  source 1..50: mol_type = other DNA
aaatccacaacactcaacatataactttaactaacacaaatccratatcc

SEQ ID NO: 32909 - DNA, 50 bp, synthetic construct
  source 1..50: mol_type = other DNA
attatctttaataaatcaaatcttaccaactaactcacctctaataaaac

SEQ ID NO: 32910 - DNA, 50 bp, synthetic construct
  source 1..50: mol_type = other DNA
crcattatacaacaatattaaacaaactaaatacaaaataccaaaatttc

SEQ ID NO: 32911 - DNA, 50 bp, synthetic construct
  source 1..50: mol_type = other DNA
aaatacaaaataccaaaatttcrcattacaacaaatctcttcatttatcc

SEQ ID NO: 32912 - DNA, 50 bp, synthetic construct
  source 1..50: mol_type = other DNA
acttacttatcaacttcctacttaaaaacattcctccaacctatcrattc

SEQ ID NO: 32913 - DNA, 50 bp, synthetic construct
  source 1..50: mol_type = other DNA
ttataacttacttatcaacttcctacttaaaaacattcctccaacctatc

SEQ ID NO: 32914 - DNA, 50 bp, synthetic construct
  source 1..50: mol_type = other DNA
atattaactaaacataataatacacrcctatctattaatcccaactaatc

SEQ ID NO: 32915 - DNA, 50 bp, synthetic construct
  source 1..50: mol_type = other DNA
taatattaaataactataccraaactaaccataaactaatataaataacc

SEQ ID NO: 32916 - DNA, 50 bp, synthetic construct
  source 1..50: mol_type = other DNA
caatctcttaccaatacaccratcactcatatcaactcataatcaacctc

SEQ ID NO: 32917 - DNA, 50 bp, synthetic construct
  source 1..50: mol_type = other DNA
tactttctataacattttcttaaaaaacaacaacaacaacaaaaaacacc

SEQ ID NO: 32918 - DNA, 50 bp, synthetic construct
  source 1..50: mol_type = other DNA
ctcaaacaaacaaaacctaactaaaaacaaaaataccttccatcccttcc

SEQ ID NO: 32919 - DNA, 50 bp, synthetic construct
  source 1..50: mol_type = other DNA
aaaaaacccccaaccaattaaactttactaatccctattacctacacaac

SEQ ID NO: 32920 - DNA, 50 bp, synthetic construct
  source 1..50: mol_type = other DNA
aaaaaaaaataatcatcactcattttaaaaaattacaaaaccaacaatac

SEQ ID NO: 32921 - DNA, 50 bp, synthetic construct
  source 1..50: mol_type = other DNA
taaaaaaccaaaactaataaatcacttaaaaataacctaaacaacacrac

SEQ ID NO: 32922 - DNA, 50 bp, synthetic construct
  source 1..50: mol_type = other DNA
aaaacctctaaaaattaatcccaaataaaactaaatcatttacatatacc

SEQ ID NO: 32923 - DNA, 50 bp, synthetic construct
  source 1..50: mol_type = other DNA
aactaataataaaaaatttccccactctctaaaataaacacacacacacc

SEQ ID NO: 32924 - DNA, 50 bp, synthetic construct
  source 1..50: mol_type = other DNA
craataaatacaaaacaaataaattaaacaaacctctaaaccttcratac

SEQ ID NO: 32925 - DNA, 50 bp, synthetic construct
  source 1..50: mol_type = other DNA
ccttccraataaatacaaaacaaataaattaaacaaacctctaaaccttc

SEQ ID NO: 32926 - DNA, 50 bp, synthetic construct
  source 1..50: mol_type = other DNA
crtatcraaaacccaaaaatttatctaactcacttactctacatttattc

SEQ ID NO: 32927 - DNA, 50 bp, synthetic construct
  source 1..50: mol_type = other DNA
aaaacctaaaaacaaatacacratactttctaaataactacacaaaaaac

SEQ ID NO: 32928 - DNA, 50 bp, synthetic construct
  source 1..50: mol_type = other DNA
aaacttaattacatataaaacrctttctatacaatcattcaaaaaatatc

SEQ ID NO: 32929 - DNA, 50 bp, synthetic construct
  source 1..50: mol_type = other DNA
aaaatcaacaaatactacaaatcaaaattcctttttctcccaaaaaaccc

SEQ ID NO: 32930 - DNA, 50 bp, synthetic construct
  source 1..50: mol_type = other DNA
aatactacaaatcaaaattcctttttctcccaaaaaacccrttattaaac

SEQ ID NO: 32931 - DNA, 50 bp, synthetic construct
  source 1..50: mol_type = other DNA
aaaacaaacacaaaaaactaacacaccaaatacaaaacataaaaaaaaac

SEQ ID NO: 32932 - DNA, 50 bp, synthetic construct
  source 1..50: mol_type = other DNA
tttataaaacctctcacrtcattctcrcatatcttatacaatcaatatcc

SEQ ID NO: 32933 - DNA, 50 bp, synthetic construct
  source 1..50: mol_type = other DNA
cccrtccctaattaactcattaaatttataaaacctctcacrtcattctc

SEQ ID NO: 32934 - DNA, 50 bp, synthetic construct
  source 1..50: mol_type = other DNA
tctcacaaaaatattaacttaacccratcataatcrcaacttacctaaac

SEQ ID NO: 32935 - DNA, 50 bp, synthetic construct
  source 1..50: mol_type = other DNA
atataaaacacrtattctcacaaaaatattaacttaacccratcataatc

SEQ ID NO: 32936 - DNA, 50 bp, synthetic construct
  source 1..50: mol_type = other DNA
aaataaactacraccataaccraattaaactaacacttctataaaaacac

SEQ ID NO: 32937 - DNA, 50 bp, synthetic construct
  source 1..50: mol_type = other DNA
taatacttaacatatcccaaaaaataaccrtactataaacctcaatcccc

SEQ ID NO: 32938 - DNA, 50 bp, synthetic construct
  source 1..50: mol_type = other DNA
tcatcttaaaaaacctaaaacaaaaacttctctctcaaaacaaatccatc

SEQ ID NO: 32939 - DNA, 50 bp, synthetic construct
  source 1..50: mol_type = other DNA
taaacttaccctttttcaatatatacctatacatatatatacctttatac

SEQ ID NO: 32940 - DNA, 50 bp, synthetic construct
  source 1..50: mol_type = other DNA
ttccctaaaacctctccaaaaacaattaccaccatacttcctatataacc

SEQ ID NO: 32941 - DNA, 50 bp, synthetic construct
  source 1..50: mol_type = other DNA
aaaaaactttactcataacaaataacaaaactaaaacccacatcttaccc

SEQ ID NO: 32942 - DNA, 50 bp, synthetic construct
  source 1..50: mol_type = other DNA
ttcttataaaatctaattatttaaaaatatacracacctcccccttactc

SEQ ID NO: 32943 - DNA, 50 bp, synthetic construct
  source 1..50: mol_type = other DNA
aattacatctcaatacaaaatttaataaaaacacaaatccaaaccatatc

SEQ ID NO: 32944 - DNA, 50 bp, synthetic construct
  source 1..50: mol_type = other DNA
aataccctaataaatctccacatataaaaaaattaattaaatccttaacc

SEQ ID NO: 32945 - DNA, 50 bp, synthetic construct
  source 1..50: mol_type = other DNA
ataaaattacttatcaacaacraaccaattatacratttattacttcaac

SEQ ID NO: 32946 - DNA, 50 bp, synthetic construct
  source 1..50: mol_type = other DNA
aacataacaaaaattactaacctataaaaattacrttaaaacaacaaacc

SEQ ID NO: 32947 - DNA, 50 bp, synthetic construct
  source 1..50: mol_type = other DNA
aaactaacctctaaataaaaaccraaaaacctactcttaaaactaatacc

SEQ ID NO: 32948 - DNA, 50 bp, synthetic construct
  source 1..50: mol_type = other DNA
ataaatctataatttccctttctctataaactaacctctaaataaaaacc

SEQ ID NO: 32949 - DNA, 50 bp, synthetic construct
  source 1..50: mol_type = other DNA
attcttctactatacacctattctcaacataaaataaatactaaaacttc

SEQ ID NO: 32950 - DNA, 50 bp, synthetic construct
  source 1..50: mol_type = other DNA
atccaattaaactaaactacaaacrctaattactaatcctccaaatccac

SEQ ID NO: 32951 - DNA, 50 bp, synthetic construct
  source 1..50: mol_type = other DNA
aaattacccrtaatcatacatactatatccaattaaactaaactacaaac

SEQ ID NO: 32952 - DNA, 50 bp, synthetic construct
  source 1..50: mol_type = other DNA
acaaccaacrtttataacccaacttaattaaatataacatacataaccac

SEQ ID NO: 32953 - DNA, 50 bp, synthetic construct
  source 1..50: mol_type = other DNA
accaataatttaaatacctatattcttatacatattaacraaataaatac

SEQ ID NO: 32954 - DNA, 50 bp, synthetic construct
  source 1..50: mol_type = other DNA
ataactacttatactaaaatataataaaaactatataacrcacctacctc

SEQ ID NO: 32955 - DNA, 50 bp, synthetic construct
  source 1..50: mol_type = other DNA
aacttcctaacccaatttctattaccattaacttttcatcacccaaaacc

SEQ ID NO: 32956 - DNA, 50 bp, synthetic construct
  source 1..50: mol_type = other DNA
ccttaaataataaaaaactaataacaacaaaaattaaaccaaaaaacctc

SEQ ID NO: 32957 - DNA, 50 bp, synthetic construct
  source 1..50: mol_type = other DNA
aattaaaccaaaaaacctcrtataaaaaactacctaactaatcacatttc

SEQ ID NO: 32958 - DNA, 50 bp, synthetic construct
  source 1..50: mol_type = other DNA
acaaacaaccctataaaaaatacctttccctaaaataatccraaataaac

SEQ ID NO: 32959 - DNA, 50 bp, synthetic construct
  source 1..50: mol_type = other DNA
rtcatcaaaacaaacaaccctataaaaaatacctttccctaaaataatcc

SEQ ID NO: 32960 - DNA, 50 bp, synthetic construct
  source 1..50: mol_type = other DNA
raatcattccaaaaaaaaacatcctctacaaaattacctactttaataac

SEQ ID NO: 32961 - DNA, 50 bp, synthetic construct
  source 1..50: mol_type = other DNA
attatttttaacaaaaatcatctaatttacaccrcrtcaaactaccrccc

SEQ ID NO: 32962 - DNA, 50 bp, synthetic construct
  source 1..50: mol_type = other DNA
aataattatttttaacaaaaatcatctaatttacaccrcrtcaaactacc

SEQ ID NO: 32963 - DNA, 50 bp, synthetic construct
  source 1..50: mol_type = other DNA
tctacaaaattacctactttaataacraaaattacraacracaatctaac

SEQ ID NO: 32964 - DNA, 50 bp, synthetic construct
  source 1..50: mol_type = other DNA
ttatttaaaaatctaaacaaaaattttaaccaattccaactcaaatatcc

SEQ ID NO: 32965 - DNA, 50 bp, synthetic construct
  source 1..50: mol_type = other DNA
ctccaacactacttccctctaacaataccatacacatctaaccctaaaac

SEQ ID NO: 32966 - DNA, 50 bp, synthetic construct
  source 1..50: mol_type = other DNA
aatactaatatatcrccraacacataaaaatccctaaatcaaaaaaaaac

SEQ ID NO: 32967 - DNA, 50 bp, synthetic construct
  source 1..50: mol_type = other DNA
acaaacctatctaattaaaacraaaaacraaacttcctcctctaaaaacc

SEQ ID NO: 32968 - DNA, 50 bp, synthetic construct
  source 1..50: mol_type = other DNA
cctatctaattaaaacraaaaacraaacttcctcctctaaaaaccrtacc

SEQ ID NO: 32969 - DNA, 50 bp, synthetic construct
  source 1..50: mol_type = other DNA
tacaaaatattcataaattcctacaccccaccctctacattcatcacctc

SEQ ID NO: 32970 - DNA, 50 bp, synthetic construct
  source 1..50: mol_type = other DNA
tcattttaaaaatctctttaatatcttaacttaatcacaaaactaaattc

SEQ ID NO: 32971 - DNA, 50 bp, synthetic construct
  source 1..50: mol_type = other DNA
acttaatcacaaaactaaattcrtttatatacttctacattcaatctatc

SEQ ID NO: 32972 - DNA, 50 bp, synthetic construct
  source 1..50: mol_type = other DNA
acttcattcttctttattcttcttatttttacattatcttttttttttcc

SEQ ID NO: 32973 - DNA, 50 bp, synthetic construct
  source 1..50: mol_type = other DNA
ractaaatcaccttaaatcaaaaccaacctaactaacacaacaaaacccc

SEQ ID NO: 32974 - DNA, 50 bp, synthetic construct
  source 1..50: mol_type = other DNA
raaattttactatattaaccaaactaatcttaacctaaaataatccaacc

SEQ ID NO: 32975 - DNA, 50 bp, synthetic construct
  source 1..50: mol_type = other DNA
tttcttcaaaaaacccaaaaccttccctaaccaaaatactcrttaacacc

SEQ ID NO: 32976 - DNA, 50 bp, synthetic construct
  source 1..50: mol_type = other DNA
atacctaactttcttcaaaaaacccaaaaccttccctaaccaaaatactc

SEQ ID NO: 32977 - DNA, 50 bp, synthetic construct
  source 1..50: mol_type = other DNA
aactaactaaaaacaaacraaaaaaacacaacacccaacatcaaatatcc

SEQ ID NO: 32978 - DNA, 50 bp, synthetic construct
  source 1..50: mol_type = other DNA
aaaactaaaaccattttataacctttaacaaaaactaactaaaaacaaac

SEQ ID NO: 32979 - DNA, 50 bp, synthetic construct
  source 1..50: mol_type = other DNA
caataactaaaaaaaacacttcacaacctcrtaaaacttatcacccacac

SEQ ID NO: 32980 - DNA, 50 bp, synthetic construct
  source 1..50: mol_type = other DNA
aaattctaaaactacaaatccaataactaaaaaaaacacttcacaacctc

SEQ ID NO: 32981 - DNA, 50 bp, synthetic construct
  source 1..50: mol_type = other DNA
aaactataaaatactttcttcaatcactaaatctacaaccctaaaatctc

SEQ ID NO: 32982 - DNA, 50 bp, synthetic construct
  source 1..50: mol_type = other DNA
acaataaaaacatttacaattatttctaatctcttataaacaatttaaac

SEQ ID NO: 32983 - DNA, 50 bp, synthetic construct
  source 1..50: mol_type = other DNA
cttaattccccacaaccatatacatttaaaaatatactataatcaaaccc

SEQ ID NO: 32984 - DNA, 50 bp, synthetic construct
  source 1..50: mol_type = other DNA
caatatatttcccaaactaaaaaaaaaccttctattaaaaccttttacac

SEQ ID NO: 32985 - DNA, 50 bp, synthetic construct
  source 1..50: mol_type = other DNA
atcccaactactctacaaactaaaataaaattacttaaacccaaaaattc

SEQ ID NO: 32986 - DNA, 50 bp, synthetic construct
  source 1..50: mol_type = other DNA
aacaaaacaaaattttattaatttaaatattatcaacctccaacataatc

SEQ ID NO: 32987 - DNA, 50 bp, synthetic construct
  source 1..50: mol_type = other DNA
aaaaaaaaccttatctctaaaacaaataaactaaaaaaaatttccttctc

SEQ ID NO: 32988 - DNA, 50 bp, synthetic construct
  source 1..50: mol_type = other DNA
cctaatttctatttccaacccatttctctactttaaactcctaaattcac

SEQ ID NO: 32989 - DNA, 50 bp, synthetic construct
  source 1..50: mol_type = other DNA
cttaaataactaaaacacrtcttaaatataacatatccaaaatttaacac

SEQ ID NO: 32990 - DNA, 50 bp, synthetic construct
  source 1..50: mol_type = other DNA
cctctttctttcaatttctacaccctctaattattcaatccaaaaacttc

SEQ ID NO: 32991 - DNA, 50 bp, synthetic construct
  source 1..50: mol_type = other DNA
caatccaaaaacttcraattcattcctaactccacttttacacacaaatc

SEQ ID NO: 32992 - DNA, 50 bp, synthetic construct
  source 1..50: mol_type = other DNA
tactataccttcactatatatatataaaatccaatatccactactaacac

SEQ ID NO: 32993 - DNA, 50 bp, synthetic construct
  source 1..50: mol_type = other DNA
atatatatataaaatccaatatccactactaacacrctaaaccaaaccac

SEQ ID NO: 32994 - DNA, 50 bp, synthetic construct
  source 1..50: mol_type = other DNA
catcaaatcttattcctcctctactcaaaactctcctattataaccaaac

SEQ ID NO: 32995 - DNA, 50 bp, synthetic construct
  source 1..50: mol_type = other DNA
aatatttaaaattaccctctacatctactcaatattacctatctacttac

SEQ ID NO: 32996 - DNA, 50 bp, synthetic construct
  source 1..50: mol_type = other DNA
aaaattaaatatatataaacatcatcttaactaaaaaccaatacccatac

SEQ ID NO: 32997 - DNA, 50 bp, synthetic construct
  source 1..50: mol_type = other DNA
catatacaaacttatttcatattttatctcacataatttcaccttaaaac

SEQ ID NO: 32998 - DNA, 50 bp, synthetic construct
  source 1..50: mol_type = other DNA
aaaacaaatctacacataactacttaaaacccaaatccaaactactaccc

SEQ ID NO: 32999 - DNA, 50 bp, synthetic construct
  source 1..50: mol_type = other DNA
ttactctccatatataaaaacacacacaaataatcttaataataacaaac

SEQ ID NO: 33000 - DNA, 50 bp, synthetic construct
  source 1..50: mol_type = other DNA
atttttaatatttttcaattactaaccttataacactaattattctatcc

SEQ ID NO: 33001 - DNA, 50 bp, synthetic construct
  source 1..50: mol_type = other DNA
taaatttctcattctcctaatttaataatcataaaacacttaaaaaaacc

SEQ ID NO: 33002 - DNA, 50 bp, synthetic construct
  source 1..50: mol_type = other DNA
aaatcaacaactttcttccacataatacacctactatatatctaaaccac

SEQ ID NO: 33003 - DNA, 50 bp, synthetic construct
  source 1..50: mol_type = other DNA
actcataaaaatacaaaattaaattaatcaacattcaaaaacctcactac

SEQ ID NO: 33004 - DNA, 50 bp, synthetic construct
  source 1..50: mol_type = other DNA
atttcctaaacctcrcctaatataaaaaatacaaaacctcatccaatatc

SEQ ID NO: 33005 - DNA, 50 bp, synthetic construct
  source 1..50: mol_type = other DNA
tttcctaaattaccratattaaataaaactttatacttcccacatcaaac

SEQ ID NO: 33006 - DNA, 50 bp, synthetic construct
  source 1..50: mol_type = other DNA
atatcataaccaaactaattatatattaaaataatatacatcaaaaccac

SEQ ID NO: 33007 - DNA, 50 bp, synthetic construct
  source 1..50: mol_type = other DNA
ttaaaacaaatttaacttcaaaaaaatcaaaaaacaatcctattctcaac

SEQ ID NO: 33008 - DNA, 50 bp, synthetic construct
  source 1..50: mol_type = other DNA
tcttcctttcttaacattaacttccttccataactaactctccacataac

SEQ ID NO: 33009 - DNA, 50 bp, synthetic construct
  source 1..50: mol_type = other DNA
acctaactcttaacctatcactataccaaaaaaataaaatatactaactc

SEQ ID NO: 33010 - DNA, 50 bp, synthetic construct
  source 1..50: mol_type = other DNA
ctataaatttaatacacactatattaaatacttactttctatttcccaac

SEQ ID NO: 33011 - DNA, 50 bp, synthetic construct
  source 1..50: mol_type = other DNA
aacatatatttcattctctttttcaataattatacttaattactctaacc

SEQ ID NO: 33012 - DNA, 50 bp, synthetic construct
  source 1..50: mol_type = other DNA
actcaatttcaatcaaacccratttcacatataaaaaacttaaaaattcc

SEQ ID NO: 33013 - DNA, 50 bp, synthetic construct
  source 1..50: mol_type = other DNA
tcacaaaaacaatacacaaataataacacaaaaacaaaacrataactccc

SEQ ID NO: 33014 - DNA, 50 bp, synthetic construct
  source 1..50: mol_type = other DNA
acataaaacttcacaaaaacaatacacaaataataacacaaaaacaaaac

SEQ ID NO: 33015 - DNA, 50 bp, synthetic construct
  source 1..50: mol_type = other DNA
aaatcaataactaacattcaaacaacaaccaattcctaaaaatattatac

SEQ ID NO: 33016 - DNA, 50 bp, synthetic construct
  source 1..50: mol_type = other DNA
attaatcaaactaattttaaacttccracctcaaatcatccacccacctc

SEQ ID NO: 33017 - DNA, 50 bp, synthetic construct
  source 1..50: mol_type = other DNA
tacctaacacaacaaaaacattacaatacaataaactttattaaatacac

SEQ ID NO: 33018 - DNA, 50 bp, synthetic construct
  source 1..50: mol_type = other DNA
ttatatatttatctcccctactaaactataacctatcaacaaataaaaac

SEQ ID NO: 33019 - DNA, 50 bp, synthetic construct
  source 1..50: mol_type = other DNA
ttccaccrtcacttaaaacaaaatataacaacrtaaaactataatttctc

SEQ ID NO: 33020 - DNA, 50 bp, synthetic construct
  source 1..50: mol_type = other DNA
cataacaattacaattacctttcaaaactacctctaactattattccacc

SEQ ID NO: 33021 - DNA, 50 bp, synthetic construct
  source 1..50: mol_type = other DNA
aaaccacactaaaaaacaaattaaccaacccatatacaataaaaatactc

SEQ ID NO: 33022 - DNA, 50 bp, synthetic construct
  source 1..50: mol_type = other DNA
ccaacttacccctcaatataatcttacttaaattatataataaaaaaatc

SEQ ID NO: 33023 - DNA, 50 bp, synthetic construct
  source 1..50: mol_type = other DNA
taaactatatataataactcatacctacaatcccaatactttaaaaaacc

SEQ ID NO: 33024 - DNA, 50 bp, synthetic construct
  source 1..50: mol_type = other DNA
tactctacccattccaaattaaaaacatcacttctccaaacaaccatttc

SEQ ID NO: 33025 - DNA, 50 bp, synthetic construct
  source 1..50: mol_type = other DNA
ttaataaaatccacatcaacaatactaattctctctaaacaactcccatc

SEQ ID NO: 33026 - DNA, 50 bp, synthetic construct
  source 1..50: mol_type = other DNA
tccatttacctctactccttttttatttcatacctttttttctcaaatcc

SEQ ID NO: 33027 - DNA, 50 bp, synthetic construct
  source 1..50: mol_type = other DNA
tactccttttttatttcatacctttttttctcaaatccrttataacatac

SEQ ID NO: 33028 - DNA, 50 bp, synthetic construct
  source 1..50: mol_type = other DNA
atttctaaaatacctttacttcacattttatcttcacaattctataaaac

SEQ ID NO: 33029 - DNA, 50 bp, synthetic construct
  source 1..50: mol_type = other DNA
caatttcccccaatatataaccaaaataaatccatatatatccctcctac

SEQ ID NO: 33030 - DNA, 50 bp, synthetic construct
  source 1..50: mol_type = other DNA
ttttaacaaaaaaacacataacttcccttaaaattattctctctcacrac

SEQ ID NO: 33031 - DNA, 50 bp, synthetic construct
  source 1..50: mol_type = other DNA
aatttttaacaaaaaaacacataacttcccttaaaattattctctctcac

SEQ ID NO: 33032 - DNA, 50 bp, synthetic construct
  source 1..50: mol_type = other DNA
taaatacrataaaaccaaaaatcrtactttcaactacacacacatatacc

SEQ ID NO: 33033 - DNA, 50 bp, synthetic construct
  source 1..50: mol_type = other DNA
aaatattatctaaaaaatatacttatttaccaaaaaactatatattcacc

SEQ ID NO: 33034 - DNA, 50 bp, synthetic construct
  source 1..50: mol_type = other DNA
aaaaactatatattcaccrtttaaaataaaactttcatttatataccttc

SEQ ID NO: 33035 - DNA, 50 bp, synthetic construct
  source 1..50: mol_type = other DNA
ctaataaatactacattaaaataactaaaaattaaccataaatccctatc

SEQ ID NO: 33036 - DNA, 50 bp, synthetic construct
  source 1..50: mol_type = other DNA
aaattaacaatttataaacctatcctacaccaacaactttattaataaac

SEQ ID NO: 33037 - DNA, 50 bp, synthetic construct
  source 1..50: mol_type = other DNA
aaatatacattaaaaactactttatcttaaccaaacacaataactcacac

SEQ ID NO: 33038 - DNA, 50 bp, synthetic construct
  source 1..50: mol_type = other DNA
accttactaaaaaaatatatcacacaaaaaacaatcccacaccaaaacac

SEQ ID NO: 33039 - DNA, 50 bp, synthetic construct
  source 1..50: mol_type = other DNA
atacactttctcaataaaataaactcactataacaaaaaacraaattacc

SEQ ID NO: 33040 - DNA, 50 bp, synthetic construct
  source 1..50: mol_type = other DNA
cacctcaacttcccaaaacactaaaattataaaaataaaccaccataacc

SEQ ID NO: 33041 - DNA, 50 bp, synthetic construct
  source 1..50: mol_type = other DNA
caaaaaatttaatttaccccaaataatttaaataaccttctacaaattac

SEQ ID NO: 33042 - DNA, 50 bp, synthetic construct
  source 1..50: mol_type = other DNA
aattatacccacatataacactacaataaatattaataaatattcaacac

SEQ ID NO: 33043 - DNA, 50 bp, synthetic construct
  source 1..50: mol_type = other DNA
caaaatccttaaccttaccctcataaaacttctattttaatacctaaaac

SEQ ID NO: 33044 - DNA, 50 bp, synthetic construct
  source 1..50: mol_type = other DNA
acttaaaataaaaaatccaaattccttaccataactacaaaatcctccac

SEQ ID NO: 33045 - DNA, 50 bp, synthetic construct
  source 1..50: mol_type = other DNA
actttattacactttacaaatacttcactttctacaaattaaaaacttac

SEQ ID NO: 33046 - DNA, 50 bp, synthetic construct
  source 1..50: mol_type = other DNA
tacctacttcatatctctatatcacaccttaataactcttacaatatttc

SEQ ID NO: 33047 - DNA, 50 bp, synthetic construct
  source 1..50: mol_type = other DNA
cacaccttaataactcttacaatatttcraactttttcattatatctatc

SEQ ID NO: 33048 - DNA, 50 bp, synthetic construct
  source 1..50: mol_type = other DNA
ccraaactcccaaaattaaactacctaaaactaatcaatacctacctaac

SEQ ID NO: 33049 - DNA, 50 bp, synthetic construct
  source 1..50: mol_type = other DNA
ccrctaaacaaacactaactaactccaaacaactcaaccttaaaaacttc

SEQ ID NO: 33050 - DNA, 50 bp, synthetic construct
  source 1..50: mol_type = other DNA
caaacactaactaactccaaacaactcaaccttaaaaacttcraaacccc

SEQ ID NO: 33051 - DNA, 50 bp, synthetic construct
  source 1..50: mol_type = other DNA
rtaaaatacatctctctcacaaaaaaaataaactccratccaaaaatctc

SEQ ID NO: 33052 - DNA, 50 bp, synthetic construct
  source 1..50: mol_type = other DNA
taaaaaccaaaacctcctcccctaaataaaatatacraaatccctaaacc

SEQ ID NO: 33053 - DNA, 50 bp, synthetic construct
  source 1..50: mol_type = other DNA
raaatccctaaaccraaacccatcccctctataaaaaaaatatacttcac

SEQ ID NO: 33054 - DNA, 50 bp, synthetic construct
  source 1..50: mol_type = other DNA
taaacaacaaaactttaaatacttcraaccaaaatcccaaaatcrtaaac

SEQ ID NO: 33055 - DNA, 50 bp, synthetic construct
  source 1..50: mol_type = other DNA
aaaacttaaacaacaaaactttaaatacttcraaccaaaatcccaaaatc

SEQ ID NO: 33056 - DNA, 50 bp, synthetic construct
  source 1..50: mol_type = other DNA
ataataactactcrtaaataaaacttaaacaacaaaactttaaatacttc

SEQ ID NO: 33057 - DNA, 50 bp, synthetic construct
  source 1..50: mol_type = other DNA
caacrctaataaaaaacataacaaacctaatctttatataataactactc

SEQ ID NO: 33058 - DNA, 50 bp, synthetic construct
  source 1..50: mol_type = other DNA
aacctcrataaaccaaaaaacctacttaacacccctaaaaaaacracaac

SEQ ID NO: 33059 - DNA, 50 bp, synthetic construct
  source 1..50: mol_type = other DNA
taacttaacctcrataaaccaaaaaacctacttaacacccctaaaaaaac

SEQ ID NO: 33060 - DNA, 50 bp, synthetic construct
  source 1..50: mol_type = other DNA
rtactcaatacaataccaaaaacaaacataaaaaatcaaattcaaaaaac

SEQ ID NO: 33061 - DNA, 50 bp, synthetic construct
  source 1..50: mol_type = other DNA
actaaaaccataaccctaaaaaacaaacacaattccaaataataaataac

SEQ ID NO: 33062 - DNA, 50 bp, synthetic construct
  source 1..50: mol_type = other DNA
caccacctaaaattatatctattcttcaaaatcataattctaataaaacc

SEQ ID NO: 33063 - DNA, 50 bp, synthetic construct
  source 1..50: mol_type = other DNA
aaatcataattctaataaaaccractaaataccaaaaatcctctaccccc

SEQ ID NO: 33064 - DNA, 50 bp, synthetic construct
  source 1..50: mol_type = other DNA
atcatcttaacccacaactaatctaattaaaaactatataattacaaatc

SEQ ID NO: 33065 - DNA, 50 bp, synthetic construct
  source 1..50: mol_type = other DNA
attaccctaactcaaacccaactcctctataacaataacaccaaaatctc

SEQ ID NO: 33066 - DNA, 50 bp, synthetic construct
  source 1..50: mol_type = other DNA
ctcaaacccaactcctctataacaataacaccaaaatctcraaacaaccc

SEQ ID NO: 33067 - DNA, 50 bp, synthetic construct
  source 1..50: mol_type = other DNA
accaaatctataatattctactataacaccaaaaaataaaatacacrtcc

SEQ ID NO: 33068 - DNA, 50 bp, synthetic construct
  source 1..50: mol_type = other DNA
caaaatctcraaacaacccrtaattatacaaaatacatacacaaacraac

SEQ ID NO: 33069 - DNA, 50 bp, synthetic construct
  source 1..50: mol_type = other DNA
aaaactaaaaacttcctaaatatctcccactaaaaaccaatcaacccaac

SEQ ID NO: 33070 - DNA, 50 bp, synthetic construct
  source 1..50: mol_type = other DNA
aactctatatttacataatactacrtaaaccaaaaaccattctaaaaccc

SEQ ID NO: 33071 - DNA, 50 bp, synthetic construct
  source 1..50: mol_type = other DNA
aaaaattaaacttaattaataaatatcatatatattccaactactccacc

SEQ ID NO: 33072 - DNA, 50 bp, synthetic construct
  source 1..50: mol_type = other DNA
ccctaaaacacaacaatattaaaattaaactaattaataaccctacaatc

SEQ ID NO: 33073 - DNA, 50 bp, synthetic construct
  source 1..50: mol_type = other DNA
tataactttctccatctcaacaataaaactattttactttcttatcattc

SEQ ID NO: 33074 - DNA, 50 bp, synthetic construct
  source 1..50: mol_type = other DNA
ccacaacatacccctaaaccaaaacctaatccaaaataaaaccctaactc

SEQ ID NO: 33075 - DNA, 50 bp, synthetic construct
  source 1..50: mol_type = other DNA
actacaacaaatcatccaaaaaatctaactaataccaaacataataactc

SEQ ID NO: 33076 - DNA, 50 bp, synthetic construct
  source 1..50: mol_type = other DNA
tacttaaacttaaaaatttaataccaacctaaacaacataataaaacccc

SEQ ID NO: 33077 - DNA, 50 bp, synthetic construct
  source 1..50: mol_type = other DNA
aaacaaaatctatctctattacctaaactaaaatacaatatcataatctc

SEQ ID NO: 33078 - DNA, 50 bp, synthetic construct
  source 1..50: mol_type = other DNA
tcaatacctaactaactcttattaaaaaccaatacaactaacaactttac

SEQ ID NO: 33079 - DNA, 50 bp, synthetic construct
  source 1..50: mol_type = other DNA
tttattacttattctcttttatcattattacaactttttcctatcacatc

SEQ ID NO: 33080 - DNA, 50 bp, synthetic construct
  source 1..50: mol_type = other DNA
tttcctaccaacatatatcacaaatttcaaaaaaattctaaacttcatcc

SEQ ID NO: 33081 - DNA, 50 bp, synthetic construct
  source 1..50: mol_type = other DNA
aaatttcaaaaaaattctaaacttcatccrtcctatactaacttaacctc

SEQ ID NO: 33082 - DNA, 50 bp, synthetic construct
  source 1..50: mol_type = other DNA
aaattctaaaaaactctactatatttactaaaaattttctaaaacttctc

SEQ ID NO: 33083 - DNA, 50 bp, synthetic construct
  source 1..50: mol_type = other DNA
ctaataatccaaaaataacttaactaaataatcctaactaaaaatctctc

SEQ ID NO: 33084 - DNA, 50 bp, synthetic construct
  source 1..50: mol_type = other DNA
actctctcacaaatattatcaaaaaacctcatttcctcactaactataac

SEQ ID NO: 33085 - DNA, 50 bp, synthetic construct
  source 1..50: mol_type = other DNA
crtaaaactataaatctattaaacctctttcttttataaattacccaatc

SEQ ID NO: 33086 - DNA, 50 bp, synthetic construct
  source 1..50: mol_type = other DNA
acaaaactacctaaataacctcctaccacaatcatatacttccctaaaac

SEQ ID NO: 33087 - DNA, 50 bp, synthetic construct
  source 1..50: mol_type = other DNA
atactatattataaaaacatacaataaacaaaaacaacaccattaaaaac

SEQ ID NO: 33088 - DNA, 50 bp, synthetic construct
  source 1..50: mol_type = other DNA
tataaaaacacaacaaaaaaaccttcatcaaaaactaattctttaatcac

SEQ ID NO: 33089 - DNA, 50 bp, synthetic construct
  source 1..50: mol_type = other DNA
cctaacraaaaactctaccctcacraataaattaataccrctataataac

SEQ ID NO: 33090 - DNA, 50 bp, synthetic construct
  source 1..50: mol_type = other DNA
aaaaaataaaacctaacraaaaactctaccctcacraataaattaatacc

SEQ ID NO: 33091 - DNA, 50 bp, synthetic construct
  source 1..50: mol_type = other DNA
aaaaaaaacctacctacaaaccccrttattacaacracattaattcattc

SEQ ID NO: 33092 - DNA, 50 bp, synthetic construct
  source 1..50: mol_type = other DNA
aaccccrttattacaacracattaattcattcrtaaaaataaaacctccc

SEQ ID NO: 33093 - DNA, 50 bp, synthetic construct
  source 1..50: mol_type = other DNA
cccaaaatcaaaaacaatcttaactaaacaatttataaaactatattacc

SEQ ID NO: 33094 - DNA, 50 bp, synthetic construct
  source 1..50: mol_type = other DNA
acaatatctatcaaactcttttaccaaactattaaaactacatttaaaac

SEQ ID NO: 33095 - DNA, 50 bp, synthetic construct
  source 1..50: mol_type = other DNA
aataaactaactacctacattatatcccacttctataaacttttatcttc

SEQ ID NO: 33096 - DNA, 50 bp, synthetic construct
  source 1..50: mol_type = other DNA
ttcactctattaatcccaataattcaactttcttccaaacttaatatcac

SEQ ID NO: 33097 - DNA, 50 bp, synthetic construct
  source 1..50: mol_type = other DNA
attccacaattactctatcttacctctatataacaaacraaaacaaaatc

SEQ ID NO: 33098 - DNA, 50 bp, synthetic construct
  source 1..50: mol_type = other DNA
tctttttactacattccacaattactctatcttacctctatataacaaac

SEQ ID NO: 33099 - DNA, 50 bp, synthetic construct
  source 1..50: mol_type = other DNA
aacaaaaaccttctaatcaatactatatcatcacacctaaaacataaccc

SEQ ID NO: 33100 - DNA, 50 bp, synthetic construct
  source 1..50: mol_type = other DNA
aaaaccccrtctctcctaaaacacaaaaaataaactaaacrtaataatac

SEQ ID NO: 33101 - DNA, 50 bp, synthetic construct
  source 1..50: mol_type = other DNA
aatttcaccatattaaccaaaataatttcaatctcctaatctcrtaatcc

SEQ ID NO: 33102 - DNA, 50 bp, synthetic construct
  source 1..50: mol_type = other DNA
rcaaatttatattttaaaaacataaatcctaatcraatacracaactcac

SEQ ID NO: 33103 - DNA, 50 bp, synthetic construct
  source 1..50: mol_type = other DNA
ccttcaaaccrcaaatttatattttaaaaacataaatcctaatcraatac

SEQ ID NO: 33104 - DNA, 50 bp, synthetic construct
  source 1..50: mol_type = other DNA
ctacttccttcaaaccrcaaatttatattttaaaaacataaatcctaatc

SEQ ID NO: 33105 - DNA, 50 bp, synthetic construct
  source 1..50: mol_type = other DNA
caaatattaaaacaactactcaccttactattctctacttccttcaaacc

SEQ ID NO: 33106 - DNA, 50 bp, synthetic construct
  source 1..50: mol_type = other DNA
tctaaaatatacactaaattatacactataatccaccttctcttctccac

SEQ ID NO: 33107 - DNA, 50 bp, synthetic construct
  source 1..50: mol_type = other DNA
aactactccttctaaaaactcttacatacacacaaataaactttttctcc

SEQ ID NO: 33108 - DNA, 50 bp, synthetic construct
  source 1..50: mol_type = other DNA
tataatacttttactcttaatctattacctaaaaataaaaactaccccac

SEQ ID NO: 33109 - DNA, 50 bp, synthetic construct
  source 1..50: mol_type = other DNA
aactaaaataacaaactacacttacaactacctaacaatcctactatatc

SEQ ID NO: 33110 - DNA, 50 bp, synthetic construct
  source 1..50: mol_type = other DNA
aaccacattaactaaaaaaacrtaaacaaattatttcaccttaaaacccc

SEQ ID NO: 33111 - DNA, 50 bp, synthetic construct
  source 1..50: mol_type = other DNA
attttacaaatcaaaaaatccraaatctcaaaataaaataacttacccac

SEQ ID NO: 33112 - DNA, 50 bp, synthetic construct
  source 1..50: mol_type = other DNA
caaaactaaaaacaataaccaaacccaattctctatattttctctatacc

SEQ ID NO: 33113 - DNA, 50 bp, synthetic construct
  source 1..50: mol_type = other DNA
caacatttttcccccaaattctaaaacatttctaaattaaaaacaataac

SEQ ID NO: 33114 - DNA, 50 bp, synthetic construct
  source 1..50: mol_type = other DNA
atccaactataaccactaactaaattcaaaaataaaattattattaactc

SEQ ID NO: 33115 - DNA, 50 bp, synthetic construct
  source 1..50: mol_type = other DNA
atcacaactaaatatttacracatcccaaaaaacttccaaaataaataac

SEQ ID NO: 33116 - DNA, 50 bp, synthetic construct
  source 1..50: mol_type = other DNA
ttcccttttctctttctaattcttaaaacaaaacctaacaaataataatc

SEQ ID NO: 33117 - DNA, 50 bp, synthetic construct
  source 1..50: mol_type = other DNA
ccaattatacaattcattaaccaccctcataaaacacaaccttaaacttc

SEQ ID NO: 33118 - DNA, 50 bp, synthetic construct
  source 1..50: mol_type = other DNA
aaaaactttcttactaccacctctttctcccaaaaattaatcttttaaac

SEQ ID NO: 33119 - DNA, 50 bp, synthetic construct
  source 1..50: mol_type = other DNA
accatattacccaacataatcttaaacccctaacctcaaataattcaccc

SEQ ID NO: 33120 - DNA, 50 bp, synthetic construct
  source 1..50: mol_type = other DNA
ctctcatataataatcttactactcacttttcaattcttttccataatac

SEQ ID NO: 33121 - DNA, 50 bp, synthetic construct
  source 1..50: mol_type = other DNA
cttacaataaataatacactcactacataacctttaatactaacatcaac

SEQ ID NO: 33122 - DNA, 50 bp, synthetic construct
  source 1..50: mol_type = other DNA
aaaaaattaaaatactactatctcattcttttctctcactttaatcttcc

SEQ ID NO: 33123 - DNA, 50 bp, synthetic construct
  source 1..50: mol_type = other DNA
tactatctcattcttttctctcactttaatcttccrtaaactcaaataac

SEQ ID NO: 33124 - DNA, 50 bp, synthetic construct
  source 1..50: mol_type = other DNA
ttaaaaaaaattaatataaattaactatatccccacccaaatttcatctc

SEQ ID NO: 33125 - DNA, 50 bp, synthetic construct
  source 1..50: mol_type = other DNA
aatacatatacccatattatatatatattaaaactcactaaactatacac

SEQ ID NO: 33126 - DNA, 50 bp, synthetic construct
  source 1..50: mol_type = other DNA
actaccaaaatttccaaaataatttaccattttacattaccaccaacaac

SEQ ID NO: 33127 - DNA, 50 bp, synthetic construct
  source 1..50: mol_type = other DNA
atttaccattttacattaccaccaacaacrtataaaatttcaaattactc

SEQ ID NO: 33128 - DNA, 50 bp, synthetic construct
  source 1..50: mol_type = other DNA
taaaaactaacracacaacaaaaacctaaaaaaaacccttaaaaacccac

SEQ ID NO: 33129 - DNA, 50 bp, synthetic construct
  source 1..50: mol_type = other DNA
ctaaaaacctcrtaaacctccaaaaatttccctcaaacctctattatacc

SEQ ID NO: 33130 - DNA, 50 bp, synthetic construct
  source 1..50: mol_type = other DNA
cataatctattaaccctatttaaaaaaaaccatataaaaaaatcctaatc

SEQ ID NO: 33131 - DNA, 50 bp, synthetic construct
  source 1..50: mol_type = other DNA
acaacacaacaaaataataattcacatacatcaccttaaaaccaaacaac

SEQ ID NO: 33132 - DNA, 50 bp, synthetic construct
  source 1..50: mol_type = other DNA
aaaaaaaatttaaatctaattttttcatctaaaacttctaaaaaaacttc

SEQ ID NO: 33133 - DNA, 50 bp, synthetic construct
  source 1..50: mol_type = other DNA
rcacccctcatcctaatcaaatatctttttttcattcatacataataatc

SEQ ID NO: 33134 - DNA, 50 bp, synthetic construct
  source 1..50: mol_type = other DNA
aatcatacaaaataattccactaccctaaaaaaatccacctattcaaccc

SEQ ID NO: 33135 - DNA, 50 bp, synthetic construct
  source 1..50: mol_type = other DNA
cctaatttctctattattaacatcttatattaacctaatatatttatcac

SEQ ID NO: 33136 - DNA, 50 bp, synthetic construct
  source 1..50: mol_type = other DNA
cccctatcactctatcaaacactacttcctactttcaaattaaaaatcac

SEQ ID NO: 33137 - DNA, 50 bp, synthetic construct
  source 1..50: mol_type = other DNA
ttaacaactatcactcattaaaaaataatcactaaccaaccracctatac

SEQ ID NO: 33138 - DNA, 50 bp, synthetic construct
  source 1..50: mol_type = other DNA
tacatactcttaacaactatcactcattaaaaaataatcactaaccaacc

SEQ ID NO: 33139 - DNA, 50 bp, synthetic construct
  source 1..50: mol_type = other DNA
aaaaacatatcaacaataaaaactacataaaaacacaaaatatcaacctc

SEQ ID NO: 33140 - DNA, 50 bp, synthetic construct
  source 1..50: mol_type = other DNA
aactatatataaacaaactaaacacaacaaaaaatccccattacctatac

SEQ ID NO: 33141 - DNA, 50 bp, synthetic construct
  source 1..50: mol_type = other DNA
taataaacttcaataacatatatttaaccaataatacaaaattatctccc

SEQ ID NO: 33142 - DNA, 50 bp, synthetic construct
  source 1..50: mol_type = other DNA
taaattctatactttcaccctctaatatacataaaataaaatcccrcccc

SEQ ID NO: 33143 - DNA, 50 bp, synthetic construct
  source 1..50: mol_type = other DNA
tttctcccttacattttcttatcccaaacattcttcaaatacaactattc

SEQ ID NO: 33144 - DNA, 50 bp, synthetic construct
  source 1..50: mol_type = other DNA
ataaaccaccatacccaaccttttcctcaatcttttaaacatattactac

SEQ ID NO: 33145 - DNA, 50 bp, synthetic construct
  source 1..50: mol_type = other DNA
ttaattaaactaatctcaatcttctaaccccaaataatcctacctacctc

SEQ ID NO: 33146 - DNA, 50 bp, synthetic construct
  source 1..50: mol_type = other DNA
cacctaaaatcaaaaaattaaaatcaacctaaccaacataaaaaaacccc

SEQ ID NO: 33147 - DNA, 50 bp, synthetic construct
  source 1..50: mol_type = other DNA
taaaaattataataaactaaaatcrtaccattacacttcaactaaacaac

SEQ ID NO: 33148 - DNA, 50 bp, synthetic construct
  source 1..50: mol_type = other DNA
taatctaaaataaaacaatttcatctcaaaaccacccctcccctaacacc

SEQ ID NO: 33149 - DNA, 50 bp, synthetic construct
  source 1..50: mol_type = other DNA
aaaccttaaattcacaaaccaaaacttattctcttatttcattaaacaac

SEQ ID NO: 33150 - DNA, 50 bp, synthetic construct
  source 1..50: mol_type = other DNA
aactctcatcccatatattttcattttatccccttaaaaactcccaattc

SEQ ID NO: 33151 - DNA, 50 bp, synthetic construct
  source 1..50: mol_type = other DNA
aatctaaacccttaaaaactctaacaatttccactttaaaaatccaaccc

SEQ ID NO: 33152 - DNA, 50 bp, synthetic construct
  source 1..50: mol_type = other DNA
accctaaactaacaaaaaaatcacacatattatattactcaaaaaaaatc

SEQ ID NO: 33153 - DNA, 50 bp, synthetic construct
  source 1..50: mol_type = other DNA
aaaaataataaaaccacttcaaaaaaacattttaactcataatcctaaac

SEQ ID NO: 33154 - DNA, 50 bp, synthetic construct
  source 1..50: mol_type = other DNA
ttcatttatattatcacttaaaaaccattataaattactttatatttacc

SEQ ID NO: 33155 - DNA, 50 bp, synthetic construct
  source 1..50: mol_type = other DNA
attttctttattcctcactcttacctcctcaaattcaaattttattattc

SEQ ID NO: 33156 - DNA, 50 bp, synthetic construct
  source 1..50: mol_type = other DNA
tcctcactcttacctcctcaaattcaaattttattattcrtttctctatc

SEQ ID NO: 33157 - DNA, 50 bp, synthetic construct
  source 1..50: mol_type = other DNA
tactcttataaaattaaaacaaacataaataatcacattactaactcrac

SEQ ID NO: 33158 - DNA, 50 bp, synthetic construct
  source 1..50: mol_type = other DNA
tactactcttataaaattaaaacaaacataaataatcacattactaactc

SEQ ID NO: 33159 - DNA, 50 bp, synthetic construct
  source 1..50: mol_type = other DNA
ctacttaacaacactttataacaaaaattaattaccaaatcctaacctac

SEQ ID NO: 33160 - DNA, 50 bp, synthetic construct
  source 1..50: mol_type = other DNA
aaacaaaataacaaaaacacctacaaccccaaccaactaactaaaaaacc

SEQ ID NO: 33161 - DNA, 50 bp, synthetic construct
  source 1..50: mol_type = other DNA
taacaataataacctctaacractttcttcttaaaaactaacaataaaac

SEQ ID NO: 33162 - DNA, 50 bp, synthetic construct
  source 1..50: mol_type = other DNA
aaaacacaccaaaacctcaaaaccatcccrtaacaataataacctctaac

SEQ ID NO: 33163 - DNA, 50 bp, synthetic construct
  source 1..50: mol_type = other DNA
cacraatactatattcttaatttctacaataaccatataaatatactacc

SEQ ID NO: 33164 - DNA, 50 bp, synthetic construct
  source 1..50: mol_type = other DNA
aacrataatacatccacataactactacaaaaaccaaaaatacaataccc

SEQ ID NO: 33165 - DNA, 50 bp, synthetic construct
  source 1..50: mol_type = other DNA
acaatataataaaacttaataaccacacaacaaaatttacattcatatac

SEQ ID NO: 33166 - DNA, 50 bp, synthetic construct
  source 1..50: mol_type = other DNA
aatttatttctttcaatataaaaaaaccaactattaaactcatctaaacc

SEQ ID NO: 33167 - DNA, 50 bp, synthetic construct
  source 1..50: mol_type = other DNA
taacatttccaaacctattattaaacatacaataataaacaaaaaatacc

SEQ ID NO: 33168 - DNA, 50 bp, synthetic construct
  source 1..50: mol_type = other DNA
ataaccctttaacctaaaatctatccctacataacctttctatattcatc

SEQ ID NO: 33169 - DNA, 50 bp, synthetic construct
  source 1..50: mol_type = other DNA
ctacataacctttctatattcatcrcttactacaacttaattatactttc

SEQ ID NO: 33170 - DNA, 50 bp, synthetic construct
  source 1..50: mol_type = other DNA
rctacaaaccraataacacttttaccatattccracaaaactcctttacc

SEQ ID NO: 33171 - DNA, 50 bp, synthetic construct
  source 1..50: mol_type = other DNA
ctacttaaccactaaactatataaactaaacaactactccrctacaaacc

SEQ ID NO: 33172 - DNA, 50 bp, synthetic construct
  source 1..50: mol_type = other DNA
ctaaaacccactacttaaccactaaactatataaactaaacaactactcc

SEQ ID NO: 33173 - DNA, 50 bp, synthetic construct
  source 1..50: mol_type = other DNA
ttaaaacacttaacaccaaaatattttttctctttcccaaaatatcttac

SEQ ID NO: 33174 - DNA, 50 bp, synthetic construct
  source 1..50: mol_type = other DNA
aaacractaacaacaaacctaaatactacctccctcatatcaaataatac

SEQ ID NO: 33175 - DNA, 50 bp, synthetic construct
  source 1..50: mol_type = other DNA
aaatattttctcccattatataaattatcttttcactttacctaatcttc

SEQ ID NO: 33176 - DNA, 50 bp, synthetic construct
  source 1..50: mol_type = other DNA
ttttactaaactaatctcttttctattaactttcattccaaatccaatcc

SEQ ID NO: 33177 - DNA, 50 bp, synthetic construct
  source 1..50: mol_type = other DNA
tattatttcacttcatactaatattcctctctactttactcatttcatac

SEQ ID NO: 33178 - DNA, 50 bp, synthetic construct
  source 1..50: mol_type = other DNA
aaaatcaaaaaattcatatatctccatacataaattcacacrattcacac

SEQ ID NO: 33179 - DNA, 50 bp, synthetic construct
  source 1..50: mol_type = other DNA
atctctactcactaatcaatcctaatcttccaaacataaaataaataacc

SEQ ID NO: 33180 - DNA, 50 bp, synthetic construct
  source 1..50: mol_type = other DNA
taataaaacaaaaactaacctcccacaaacataaaatttactaacaaccc

SEQ ID NO: 33181 - DNA, 50 bp, synthetic construct
  source 1..50: mol_type = other DNA
ttctccaaaaaaacaataccaacaaaataaacrcatatatacacrtacac

SEQ ID NO: 33182 - DNA, 50 bp, synthetic construct
  source 1..50: mol_type = other DNA
ttaaaattctccaaaaaaacaataccaacaaaataaacrcatatatacac

SEQ ID NO: 33183 - DNA, 50 bp, synthetic construct
  source 1..50: mol_type = other DNA
acttcttctatattaaaattctccaaaaaaacaataccaacaaaataaac

SEQ ID NO: 33184 - DNA, 50 bp, synthetic construct
  source 1..50: mol_type = other DNA
accattaaacataaaacaaatttaaaaacaaatcttccttcccaaacctc

SEQ ID NO: 33185 - DNA, 50 bp, synthetic construct
  source 1..50: mol_type = other DNA
tcctaataatccaaataatattacaccaacaaataactatcattacaacc

SEQ ID NO: 33186 - DNA, 50 bp, synthetic construct
  source 1..50: mol_type = other DNA
caaataactatcattacaaccraactccaaatacatttatttcaaatttc

SEQ ID NO: 33187 - DNA, 50 bp, synthetic construct
  source 1..50: mol_type = other DNA
aaataaaaataacaaaaacaattctatataatacaaaaaactctaactcc

SEQ ID NO: 33188 - DNA, 50 bp, synthetic construct
  source 1..50: mol_type = other DNA
tttataaatttaccaacttactaaaatttataaccctcaaattaatatcc

SEQ ID NO: 33189 - DNA, 50 bp, synthetic construct
  source 1..50: mol_type = other DNA
aaattacaactttaaaaaatatacactaccraccraacataataactcac

SEQ ID NO: 33190 - DNA, 50 bp, synthetic construct
  source 1..50: mol_type = other DNA
caaaaaacatacaaatttaataccaccaatttatattatatatctatccc

SEQ ID NO: 33191 - DNA, 50 bp, synthetic construct
  source 1..50: mol_type = other DNA
acttttcccrttacratataaacaacaacaatactataaacaaaacaccc

SEQ ID NO: 33192 - DNA, 50 bp, synthetic construct
  source 1..50: mol_type = other DNA
cccaaaccaaaaccraatattttatccacaatactactactacttatacc

SEQ ID NO: 33193 - DNA, 50 bp, synthetic construct
  source 1..50: mol_type = other DNA
ttaccatctaacctcaacatcctttatattatactccaacttaaataaac

SEQ ID NO: 33194 - DNA, 50 bp, synthetic construct
  source 1..50: mol_type = other DNA
tctcctaatcaaacaattaacctcacatctttatctaataattttcaaac

SEQ ID NO: 33195 - DNA, 50 bp, synthetic construct
  source 1..50: mol_type = other DNA
acatctttatctaataattttcaaacrtcaaaataaccccttattaaaac

SEQ ID NO: 33196 - DNA, 50 bp, synthetic construct
  source 1..50: mol_type = other DNA
aaattccccactattttccacattacctttccaaataaactttaatctac

SEQ ID NO: 33197 - DNA, 50 bp, synthetic construct
  source 1..50: mol_type = other DNA
ctattttccacattacctttccaaataaactttaatctacrttaaacccc

SEQ ID NO: 33198 - DNA, 50 bp, synthetic construct
  source 1..50: mol_type = other DNA
cttttctaaaaactacratctcccaaaaacrcccaactaatataaaatac

SEQ ID NO: 33199 - DNA, 50 bp, synthetic construct
  source 1..50: mol_type = other DNA
atcaaaaaacttttcttccccttttctaaaaactacratctcccaaaaac

SEQ ID NO: 33200 - DNA, 50 bp, synthetic construct
  source 1..50: mol_type = other DNA
accctcactatacaatcaaaaaacttttcttccccttttctaaaaactac

SEQ ID NO: 33201 - DNA, 50 bp, synthetic construct
  source 1..50: mol_type = other DNA
actaactaacaatataaaatccaataacctaaactccctccaaaccaaac

SEQ ID NO: 33202 - DNA, 50 bp, synthetic construct
  source 1..50: mol_type = other DNA
aacaaaactaatctaaaaaccaaatttaatactatttactccaaaaaccc

SEQ ID NO: 33203 - DNA, 50 bp, synthetic construct
  source 1..50: mol_type = other DNA
aaaccttaaactataatataactttctacacrtatacttccaaaaaaaac

SEQ ID NO: 33204 - DNA, 50 bp, synthetic construct
  source 1..50: mol_type = other DNA
tacaaaaaaccacatcataatccaaaactttataaacacaaaaaaaacac

SEQ ID NO: 33205 - DNA, 50 bp, synthetic construct
  source 1..50: mol_type = other DNA
cttaacctactatcattaaccatcaaattcatctaaacratcccctcccc

SEQ ID NO: 33206 - DNA, 50 bp, synthetic construct
  source 1..50: mol_type = other DNA
actaaataaataaattattataactacaacaaactatcaaaaaacacctc

SEQ ID NO: 33207 - DNA, 50 bp, synthetic construct
  source 1..50: mol_type = other DNA
aatactttctaacaatttactataactacaataatccatttactcaactc

SEQ ID NO: 33208 - DNA, 50 bp, synthetic construct
  source 1..50: mol_type = other DNA
taaaaccattctaactatataaactaacttcacacccaaacctaacccac

SEQ ID NO: 33209 - DNA, 50 bp, synthetic construct
  source 1..50: mol_type = other DNA
ctaactatataaactaacttcacacccaaacctaacccacratataactc

SEQ ID NO: 33210 - DNA, 50 bp, synthetic construct
  source 1..50: mol_type = other DNA
accaatattaatcacrtactactaacaaaaaaccaaaacacraaaatacc

SEQ ID NO: 33211 - DNA, 50 bp, synthetic construct
  source 1..50: mol_type = other DNA
accttaataaccaatattaatcacrtactactaacaaaaaaccaaaacac

SEQ ID NO: 33212 - DNA, 50 bp, synthetic construct
  source 1..50: mol_type = other DNA
actctctattaaccaatctaacttaaaccttaataaccaatattaatcac

SEQ ID NO: 33213 - DNA, 50 bp, synthetic construct
  source 1..50: mol_type = other DNA
aataaacctaaaactaaaactccctaaacccatctccaaatacataatcc

SEQ ID NO: 33214 - DNA, 50 bp, synthetic construct
  source 1..50: mol_type = other DNA
taaatcacataccctttaaaaaacraataaatcctccaaaaataaatccc

SEQ ID NO: 33215 - DNA, 50 bp, synthetic construct
  source 1..50: mol_type = other DNA
tataaaaaaacaataaaacaatacraaacctactcctaaaaaactcaccc

SEQ ID NO: 33216 - DNA, 50 bp, synthetic construct
  source 1..50: mol_type = other DNA
ataacattatccatctctatttctccttaataaaattacctaacaaccrc

SEQ ID NO: 33217 - DNA, 50 bp, synthetic construct
  source 1..50: mol_type = other DNA
ttataacattatccatctctatttctccttaataaaattacctaacaacc

SEQ ID NO: 33218 - DNA, 50 bp, synthetic construct
  source 1..50: mol_type = other DNA
tctaccaataccacrctacctataacctaacccttactataaatatttac

SEQ ID NO: 33219 - DNA, 50 bp, synthetic construct
  source 1..50: mol_type = other DNA
aacccaaatctcaaacttaccctaactaaactaaaccaaaacatttttcc

SEQ ID NO: 33220 - DNA, 50 bp, synthetic construct
  source 1..50: mol_type = other DNA
caaacttaccctaactaaactaaaccaaaacatttttccrtttcttttcc

SEQ ID NO: 33221 - DNA, 50 bp, synthetic construct
  source 1..50: mol_type = other DNA
caatctcactttcaaaaaataatactatctcttcaatatatatttcttcc

SEQ ID NO: 33222 - DNA, 50 bp, synthetic construct
  source 1..50: mol_type = other DNA
catataaatctccaaaccatataaacacacacacacatatacacacacac

SEQ ID NO: 33223 - DNA, 50 bp, synthetic construct
  source 1..50: mol_type = other DNA
acacacaaatatacacatatatacatatataaaatcatactaaactcacc

SEQ ID NO: 33224 - DNA, 50 bp, synthetic construct
  source 1..50: mol_type = other DNA
tctctaaaccttaacaatcacraccttaaaccacraaatatacccttatc

SEQ ID NO: 33225 - DNA, 50 bp, synthetic construct
  source 1..50: mol_type = other DNA
acacctttcaaatttcaactctttaaataaatacracaaaaacacatctc

SEQ ID NO: 33226 - DNA, 50 bp, synthetic construct
  source 1..50: mol_type = other DNA
ttcaactctttaaataaatacracaaaaacacatctcrtaatccaaaatc

SEQ ID NO: 33227 - DNA, 50 bp, synthetic construct
  source 1..50: mol_type = other DNA
atcrtaactactaaaacccaaaaaacacaacaaatttactaacttcaacc

SEQ ID NO: 33228 - DNA, 50 bp, synthetic construct
  source 1..50: mol_type = other DNA
acctactaaaaaataaatacaaactcctaaataaatactaccatttatac

SEQ ID NO: 33229 - DNA, 50 bp, synthetic construct
  source 1..50: mol_type = other DNA
taaatacaaactcctaaataaatactaccatttatacrcctcccaaccac

SEQ ID NO: 33230 - DNA, 50 bp, synthetic construct
  source 1..50: mol_type = other DNA
caaatacatctctatcacccactacccaccaaatcacaaacacctaaaac

SEQ ID NO: 33231 - DNA, 50 bp, synthetic construct
  source 1..50: mol_type = other DNA
tccctaaactctcaaaatcttcaaatatctacaactttactactctaacc

SEQ ID NO: 33232 - DNA, 50 bp, synthetic construct
  source 1..50: mol_type = other DNA
aatcttatacttaaatacaaccctaaaatcaaaaaaataacatctaaccc

SEQ ID NO: 33233 - DNA, 50 bp, synthetic construct
  source 1..50: mol_type = other DNA
aaaaaacaaaaaactacaacaaaaaactctaaatctaaacraaacctttc

SEQ ID NO: 33234 - DNA, 50 bp, synthetic construct
  source 1..50: mol_type = other DNA
aacataataaaaaatcacttaaaccctaacratcraaactacaataaacc

SEQ ID NO: 33235 - DNA, 50 bp, synthetic construct
  source 1..50: mol_type = other DNA
cctaaacaatataacaaaacccatccctacaaaaaataaacaaaattaac

SEQ ID NO: 33236 - DNA, 50 bp, synthetic construct
  source 1..50: mol_type = other DNA
ttaaccaattattctcactaacacacaaacatactatcaaaaccaacttc

SEQ ID NO: 33237 - DNA, 50 bp, synthetic construct
  source 1..50: mol_type = other DNA
aattctatttttttaaacaaaatcttattctatcatccaaattaaaatac

SEQ ID NO: 33238 - DNA, 50 bp, synthetic construct
  source 1..50: mol_type = other DNA
ttactttcattcccaacatttttctcatacaaaattatataattataaac

SEQ ID NO: 33239 - DNA, 50 bp, synthetic construct
  source 1..50: mol_type = other DNA
tcttacacatccattccctcatttattcactcaataaacatccactaaac

SEQ ID NO: 33240 - DNA, 50 bp, synthetic construct
  source 1..50: mol_type = other DNA
accttttaacccccaacattataatctcttatatctatcatcttcctatc

SEQ ID NO: 33241 - DNA, 50 bp, synthetic construct
  source 1..50: mol_type = other DNA
tacccactatcaatccctctttattacaaaaaactctaaaaaaccctccc

SEQ ID NO: 33242 - DNA, 50 bp, synthetic construct
  source 1..50: mol_type = other DNA
ttccracattaccacctaccccatttcctttccaaaacaaaaatataaac

SEQ ID NO: 33243 - DNA, 50 bp, synthetic construct
  source 1..50: mol_type = other DNA
tatactctcttacctaaaaaccraataaactcraactatccccataaaac

SEQ ID NO: 33244 - DNA, 50 bp, synthetic construct
  source 1..50: mol_type = other DNA
aaactaaataaccaaaactatactctcttacctaaaaaccraataaactc

SEQ ID NO: 33245 - DNA, 50 bp, synthetic construct
  source 1..50: mol_type = other DNA
aaaaaaacacaatcctaaccacctaacccaaaaaacataataaacccaac

SEQ ID NO: 33246 - DNA, 50 bp, synthetic construct
  source 1..50: mol_type = other DNA
cacctaacccaaaaaacataataaacccaacraaaaaccctaaaaccccc

SEQ ID NO: 33247 - DNA, 50 bp, synthetic construct
  source 1..50: mol_type = other DNA
cctaaaaacccccaaaccttctaaatattatattaaaccacraactaaac

SEQ ID NO: 33248 - DNA, 50 bp, synthetic construct
  source 1..50: mol_type = other DNA
ctcrtaactcaatacaatacctaaaaaacctaaaaaccctcaaaaaaacc

SEQ ID NO: 33249 - DNA, 50 bp, synthetic construct
  source 1..50: mol_type = other DNA
acttatcctaacctattaatacatacccraatctaactatcatcccaacc

SEQ ID NO: 33250 - DNA, 50 bp, synthetic construct
  source 1..50: mol_type = other DNA
aaaataacaaccaaactcraacatacatcaacaaaccaaaacaaataacc

SEQ ID NO: 33251 - DNA, 50 bp, synthetic construct
  source 1..50: mol_type = other DNA
aatatctaattaactattctcaaaacaaaaacctccctcccaaaaaattc

SEQ ID NO: 33252 - DNA, 50 bp, synthetic construct
  source 1..50: mol_type = other DNA
atttttccctactaaataaataattttcaaaactccrctaaaatctaaac

SEQ ID NO: 33253 - DNA, 50 bp, synthetic construct
  source 1..50: mol_type = other DNA
tttcaatcctttttatttttccctactaaataaataattttcaaaactcc

SEQ ID NO: 33254 - DNA, 50 bp, synthetic construct
  source 1..50: mol_type = other DNA
tattaaccatttttaaatatacaattctattttacattattcccactctc

SEQ ID NO: 33255 - DNA, 50 bp, synthetic construct
  source 1..50: mol_type = other DNA
ctccaaatctatcttttccttataatatttctcaatatctcattctatac

SEQ ID NO: 33256 - DNA, 50 bp, synthetic construct
  source 1..50: mol_type = other DNA
aaaaataccctaaaaaattcrtaaaacacaacractacaaaacctctcac

SEQ ID NO: 33257 - DNA, 50 bp, synthetic construct
  source 1..50: mol_type = other DNA
aataaaaaccctcaaaacaaaaataccctaaaaaattcrtaaaacacaac

SEQ ID NO: 33258 - DNA, 50 bp, synthetic construct
  source 1..50: mol_type = other DNA
acraatatacaaaataaaaaccctcaaaacaaaaataccctaaaaaattc

SEQ ID NO: 33259 - DNA, 50 bp, synthetic construct
  source 1..50: mol_type = other DNA
acraactttccaaaacacctctatcctaaaaacttccactctatacatcc

SEQ ID NO: 33260 - DNA, 50 bp, synthetic construct
  source 1..50: mol_type = other DNA
ccactcccaaataaaccataaattctatctaaactatatataaaaaaaac

SEQ ID NO: 33261 - DNA, 50 bp, synthetic construct
  source 1..50: mol_type = other DNA
taaatcaacrtcaatatccatttccattccctcaaacccratttttctac

SEQ ID NO: 33262 - DNA, 50 bp, synthetic construct
  source 1..50: mol_type = other DNA
ctaaaatatcccrcrattctcaaaaaaactcccaacaacaaaaaattatc

SEQ ID NO: 33263 - DNA, 50 bp, synthetic construct
  source 1..50: mol_type = other DNA
acatccraaaacccrataatttcttattactaaaaactctcctaaaaatc

SEQ ID NO: 33264 - DNA, 50 bp, synthetic construct
  source 1..50: mol_type = other DNA
cattaccttaataattctcaaacaaaaacaattatattcccccaaaaaac

SEQ ID NO: 33265 - DNA, 50 bp, synthetic construct
  source 1..50: mol_type = other DNA
aaatacatcraattaattctttttaactacctctaataaaactatttctc

SEQ ID NO: 33266 - DNA, 50 bp, synthetic construct
  source 1..50: mol_type = other DNA
aaccaacacraaaaacaatttcaccaaaaacaaccaaaaaaaactaattc

SEQ ID NO: 33267 - DNA, 50 bp, synthetic construct
  source 1..50: mol_type = other DNA
ccctacataacccacccaattaataactaaataaatttcaaaaaacttcc

SEQ ID NO: 33268 - DNA, 50 bp, synthetic construct
  source 1..50: mol_type = other DNA
aacattcccaaaactttcctaaactataaacaatttaaaacctaaaaacc

SEQ ID NO: 33269 - DNA, 50 bp, synthetic construct
  source 1..50: mol_type = other DNA
tataaaaccaaaaactaaaaactctttcaaccataaaaatttacatatac

SEQ ID NO: 33270 - DNA, 50 bp, synthetic construct
  source 1..50: mol_type = other DNA
aatattataaaaaaattccatattacaaaaaatttcctctacttaatatc

SEQ ID NO: 33271 - DNA, 50 bp, synthetic construct
  source 1..50: mol_type = other DNA
tcaaaaaacaacaaaaactatacataaaaaaaactacaaccrccaaacac

SEQ ID NO: 33272 - DNA, 50 bp, synthetic construct
  source 1..50: mol_type = other DNA
aatctcatatcaaaaaacaacaaaaactatacataaaaaaaactacaacc

SEQ ID NO: 33273 - DNA, 50 bp, synthetic construct
  source 1..50: mol_type = other DNA
aaaccccacctaccacattaaaaatcacatttcaacataaaattttaaac

SEQ ID NO: 33274 - DNA, 50 bp, synthetic construct
  source 1..50: mol_type = other DNA
tataaaactaacatttacttctaaaaaatcctcaaaaaacttatcataac

SEQ ID NO: 33275 - DNA, 50 bp, synthetic construct
  source 1..50: mol_type = other DNA
aaaaaaaacaactcaacttcaaaaaactacacttaactcttcaccaccac

SEQ ID NO: 33276 - DNA, 50 bp, synthetic construct
  source 1..50: mol_type = other DNA
cctactcrtaaactaatcctaaatcatttttcacaactatattccttacc

SEQ ID NO: 33277 - DNA, 50 bp, synthetic construct
  source 1..50: mol_type = other DNA
aatcatttttcacaactatattccttaccratattaaaacaaataaatcc

SEQ ID NO: 33278 - DNA, 50 bp, synthetic construct
  source 1..50: mol_type = other DNA
ctacctataccttatcctaactctattactcaaattaataatcraccaac

SEQ ID NO: 33279 - DNA, 50 bp, synthetic construct
  source 1..50: mol_type = other DNA
tccttataaaattccaaaacacttaaaaatatacattactcccaaacatc

SEQ ID NO: 33280 - DNA, 50 bp, synthetic construct
  source 1..50: mol_type = other DNA
aattacccaatatcaaataattcttcataacaatataaaaacraactaac

SEQ ID NO: 33281 - DNA, 50 bp, synthetic construct
  source 1..50: mol_type = other DNA
tattcataaattacccaatatcaaataattcttcataacaatataaaaac

SEQ ID NO: 33282 - DNA, 50 bp, synthetic construct
  source 1..50: mol_type = other DNA
aaaaaacataactaaaaaacctcaaaaaacttacaattataacaaaaaac

SEQ ID NO: 33283 - DNA, 50 bp, synthetic construct
  source 1..50: mol_type = other DNA
atataacacctctccctttcttctttctactactccrccattataaaaac

SEQ ID NO: 33284 - DNA, 50 bp, synthetic construct
  source 1..50: mol_type = other DNA
aacratttaaaaaaatataacacctctccctttcttctttctactactcc

SEQ ID NO: 33285 - DNA, 50 bp, synthetic construct
  source 1..50: mol_type = other DNA
ttcccccttactattctcrtaataataaataaattctcacraaatctaac

SEQ ID NO: 33286 - DNA, 50 bp, synthetic construct
  source 1..50: mol_type = other DNA
ccatatccttatacataaaatctcattcaactaaaccctattactacatc

SEQ ID NO: 33287 - DNA, 50 bp, synthetic construct
  source 1..50: mol_type = other DNA
tccraaaaaaacccaattatctaaatttaaaaaccctaaacaccaaaaac

SEQ ID NO: 33288 - DNA, 50 bp, synthetic construct
  source 1..50: mol_type = other DNA
craaaaaaacccaattatctaaatttaaaaaccctaaacaccaaaaacrc

SEQ ID NO: 33289 - DNA, 50 bp, synthetic construct
  source 1..50: mol_type = other DNA
tctaaatttaaaaaccctaaacaccaaaaacrcrtttaaaaaatattatc

SEQ ID NO: 33290 - DNA, 50 bp, synthetic construct
  source 1..50: mol_type = other DNA
tattatcraaatactctctatctcacccaaaatttcccraaaacactatc

SEQ ID NO: 33291 - DNA, 50 bp, synthetic construct
  source 1..50: mol_type = other DNA
ataacacaaattatattactctatacttaataactctaattcccacaatc

SEQ ID NO: 33292 - DNA, 50 bp, synthetic construct
  source 1..50: mol_type = other DNA
aaaccaaaatcactaaatacaaaataacacaacttatattactaatactc

SEQ ID NO: 33293 - DNA, 50 bp, synthetic construct
  source 1..50: mol_type = other DNA
ttcraaaaaataacactaccacctaataactattcacrtacaaaaacccc

SEQ ID NO: 33294 - DNA, 50 bp, synthetic construct
  source 1..50: mol_type = other DNA
aacraaacctttacacrtaaataaccaccaaataacaatattattctctc

SEQ ID NO: 33295 - DNA, 50 bp, synthetic construct
  source 1..50: mol_type = other DNA
acataatatataatataacatataacctcttatatacacaaccctatatc

SEQ ID NO: 33296 - DNA, 50 bp, synthetic construct
  source 1..50: mol_type = other DNA
aaccactatacccaaccaataaaatacttttaatttaatatttatttcac

SEQ ID NO: 33297 - DNA, 50 bp, synthetic construct
  source 1..50: mol_type = other DNA
aaatcacaatttactaatatcttataacctaaataattttattaatcccc

SEQ ID NO: 33298 - DNA, 50 bp, synthetic construct
  source 1..50: mol_type = other DNA
ttacaaaacttctaaaaaacttctacctctaaaatcccctaccctacctc

SEQ ID NO: 33299 - DNA, 50 bp, synthetic construct
  source 1..50: mol_type = other DNA
ctaaaaaaaacatacaatcattttaacaaaaacaaatcaaaaaataccac

SEQ ID NO: 33300 - DNA, 50 bp, synthetic construct
  source 1..50: mol_type = other DNA
aaaaaaaacatacaatcattttaacaaaaacaaatcaaaaaataccacrc

SEQ ID NO: 33301 - DNA, 50 bp, synthetic construct
  source 1..50: mol_type = other DNA
aaaacatacaatcattttaacaaaaacaaatcaaaaaataccacrcrtac

SEQ ID NO: 33302 - DNA, 50 bp, synthetic construct
  source 1..50: mol_type = other DNA
cattatttacatataaaaaattaaactacaaccactcttaactacatccc

SEQ ID NO: 33303 - DNA, 50 bp, synthetic construct
  source 1..50: mol_type = other DNA
aactacaacctaattttctacatataaacaataacctcaataatacccac

SEQ ID NO: 33304 - DNA, 50 bp, synthetic construct
  source 1..50: mol_type = other DNA
cccttctcaaaaataacraaaactatcaacatcccaaaacccttaattcc

SEQ ID NO: 33305 - DNA, 50 bp, synthetic construct
  source 1..50: mol_type = other DNA
aaaaactctaaaatattaacaacccccrccacctctaaaaaaaacaaacc

SEQ ID NO: 33306 - DNA, 50 bp, synthetic construct
  source 1..50: mol_type = other DNA
actctcccttcctacaacaaaaaaacaaaaccraaaatctctattttaac

SEQ ID NO: 33307 - DNA, 50 bp, synthetic construct
  source 1..50: mol_type = other DNA
aaacaatatctaacrataactctcccttcctacaacaaaaaaacaaaacc

SEQ ID NO: 33308 - DNA, 50 bp, synthetic construct
  source 1..50: mol_type = other DNA
caaacaccraataaaatcaaaacaaaaaaaccaaacaaacaatatctaac

SEQ ID NO: 33309 - DNA, 50 bp, synthetic construct
  source 1..50: mol_type = other DNA
caacaacatttacaaacaataaatcacaaccaaaaaaaatcacrtatccc

SEQ ID NO: 33310 - DNA, 50 bp, synthetic construct
  source 1..50: mol_type = other DNA
tctcccaactctaaaaaaacccacaactcccataaaataaaatcttcatc

SEQ ID NO: 33311 - DNA, 50 bp, synthetic construct
  source 1..50: mol_type = other DNA
ccttactctaaatccctacccaaaataactacatctatatttacaaaatc

SEQ ID NO: 33312 - DNA, 50 bp, synthetic construct
  source 1..50: mol_type = other DNA
atcctaaactaaaaacacctaataactatctcaaatactctaactcaacc

SEQ ID NO: 33313 - DNA, 50 bp, synthetic construct
  source 1..50: mol_type = other DNA
aatactctaactcaaccraaatccaataacttatccaaattcacattatc

SEQ ID NO: 33314 - DNA, 50 bp, synthetic construct
  source 1..50: mol_type = other DNA
tttaaaaataaataaaaacacaacccacaatattaacaatacttacctcc

SEQ ID NO: 33315 - DNA, 50 bp, synthetic construct
  source 1..50: mol_type = other DNA
ctctttaccaacaacctactaaaaacataatcaatttaactaaacaaaac

SEQ ID NO: 33316 - DNA, 50 bp, synthetic construct
  source 1..50: mol_type = other DNA
ccactaattccatttctaaaaatctattctaactaaacacaataactcac

SEQ ID NO: 33317 - DNA, 50 bp, synthetic construct
  source 1..50: mol_type = other DNA
taattttaataacctcaaaatattccatacaaaactacaatttattaaac

SEQ ID NO: 33318 - DNA, 50 bp, synthetic construct
  source 1..50: mol_type = other DNA
tacrcaaaactttctaaactaactcttcctcctacattaccaattcattc

SEQ ID NO: 33319 - DNA, 50 bp, synthetic construct
  source 1..50: mol_type = other DNA
tcctaccattatattttttttaaatcttatcatatatctttttctattcc

SEQ ID NO: 33320 - DNA, 50 bp, synthetic construct
  source 1..50: mol_type = other DNA
aaacacraaataatctaaaaaaccaaaaatctaccaacaaataactcaac

SEQ ID NO: 33321 - DNA, 50 bp, synthetic construct
  source 1..50: mol_type = other DNA
atctccrctaaaccatctactaacaaactcttaacccttcaaactatctc

SEQ ID NO: 33322 - DNA, 50 bp, synthetic construct
  source 1..50: mol_type = other DNA
acttatttcaaatatttttaccccatcacttctctaactaaaaaaccacc

SEQ ID NO: 33323 - DNA, 50 bp, synthetic construct
  source 1..50: mol_type = other DNA
actaaaataaatcaacaaaactaaaaaatctacctccatataaatcactc

SEQ ID NO: 33324 - DNA, 50 bp, synthetic construct
  source 1..50: mol_type = other DNA
atacactttttttcaataaatacaattaacactatactaactataatatc

SEQ ID NO: 33325 - DNA, 50 bp, synthetic construct
  source 1..50: mol_type = other DNA
aatatttaacatatttaaaaataaaataacacttacctcatccaaaatac

SEQ ID NO: 33326 - DNA, 50 bp, synthetic construct
  source 1..50: mol_type = other DNA
atataacacacacacacacttacacacattataactcaccraaaacaatc

SEQ ID NO: 33327 - DNA, 50 bp, synthetic construct
  source 1..50: mol_type = other DNA
tattttccaaatataacacacacacacacttacacacattataactcacc

SEQ ID NO: 33328 - DNA, 50 bp, synthetic construct
  source 1..50: mol_type = other DNA
aaacataaacattaataatattacaaactataaccaacaaaacctaatac

SEQ ID NO: 33329 - DNA, 50 bp, synthetic construct
  source 1..50: mol_type = other DNA
tcatcaatattcatatccatattttactttccttctcaaaactaaaaatc

SEQ ID NO: 33330 - DNA, 50 bp, synthetic construct
  source 1..50: mol_type = other DNA
aatcraatatactactcaactcaaaaaatttaaaaacaaactaaacttcc

SEQ ID NO: 33331 - DNA, 50 bp, synthetic construct
  source 1..50: mol_type = other DNA
taatctaaaaaaacttaaacaaaaattcactttaatatattccatcttcc

SEQ ID NO: 33332 - DNA, 50 bp, synthetic construct
  source 1..50: mol_type = other DNA
caatctaatcacaaatcatctcccttcacaataaaccaacrataatcttc

SEQ ID NO: 33333 - DNA, 50 bp, synthetic construct
  source 1..50: mol_type = other DNA
acaccaaaaacaacaacaacaacaatacactaaactatttctccccaacc

SEQ ID NO: 33334 - DNA, 50 bp, synthetic construct
  source 1..50: mol_type = other DNA
tttttaatattttacttttcaataccaactcaacacattatatataattc

SEQ ID NO: 33335 - DNA, 50 bp, synthetic construct
  source 1..50: mol_type = other DNA
aaaactcattctaaaaacactaaaatattatactcaatattaatttcttc

SEQ ID NO: 33336 - DNA, 50 bp, synthetic construct
  source 1..50: mol_type = other DNA
aaacactaaaatattatactcaatattaatttcttcratcactacacaac

SEQ ID NO: 33337 - DNA, 50 bp, synthetic construct
  source 1..50: mol_type = other DNA
tatattacttctattcaaataatctttcattcaatatattcctattaaac

SEQ ID NO: 33338 - DNA, 50 bp, synthetic construct
  source 1..50: mol_type = other DNA
tatatcccaaacrattctttatccactatctcctacaacatttctaactc

SEQ ID NO: 33339 - DNA, 50 bp, synthetic construct
  source 1..50: mol_type = other DNA
crctaataaaaaatcaaaaaaattaacatcatttctcttatatcccaaac

SEQ ID NO: 33340 - DNA, 50 bp, synthetic construct
  source 1..50: mol_type = other DNA
attataaatcctacaaataccttctcraaacctattttttcctctctaac

SEQ ID NO: 33341 - DNA, 50 bp, synthetic construct
  source 1..50: mol_type = other DNA
aactcccttctatctctcctaaattcttttctacttaaactaatcaaacc

SEQ ID NO: 33342 - DNA, 50 bp, synthetic construct
  source 1..50: mol_type = other DNA
aaaaatatccctttcattatctcaaacctcttttcccatctatcccaaac

SEQ ID NO: 33343 - DNA, 50 bp, synthetic construct
  source 1..50: mol_type = other DNA
aacrcattctaaacaaaaacratataatcccraaataaacaacaaattcc

SEQ ID NO: 33344 - DNA, 50 bp, synthetic construct
  source 1..50: mol_type = other DNA
aaaccrctatcatttcaataacrcattctaaacaaaaacratataatccc

SEQ ID NO: 33345 - DNA, 50 bp, synthetic construct
  source 1..50: mol_type = other DNA
aaaaaaaatctaaatcrataccttccctaactctttcccaaccaaaatac

SEQ ID NO: 33346 - DNA, 50 bp, synthetic construct
  source 1..50: mol_type = other DNA
cataatttcrcctttccaacaccctatctaaattaaaaacaaaacactac

SEQ ID NO: 33347 - DNA, 50 bp, synthetic construct
  source 1..50: mol_type = other DNA
tttcrcctttccaacaccctatctaaattaaaaacaaaacactacrctac

SEQ ID NO: 33348 - DNA, 50 bp, synthetic construct
  source 1..50: mol_type = other DNA
ttctactctaaactcttcttatttaaaattaaaaaataaactaccatctc

SEQ ID NO: 33349 - DNA, 50 bp, synthetic construct
  source 1..50: mol_type = other DNA
ccaaaaatacrcctcaaaaccacrtacaaataataaatacraaaactccc

SEQ ID NO: 33350 - DNA, 50 bp, synthetic construct
  source 1..50: mol_type = other DNA
tataatataaccaaaaatacrcctcaaaaccacrtacaaataataaatac

SEQ ID NO: 33351 - DNA, 50 bp, synthetic construct
  source 1..50: mol_type = other DNA
tacataaaatacctaacaacaattcctaataacractaatccccataaac

SEQ ID NO: 33352 - DNA, 50 bp, synthetic construct
  source 1..50: mol_type = other DNA
ataaaatacctaacaacaattcctaataacractaatccccataaacrcc

SEQ ID NO: 33353 - DNA, 50 bp, synthetic construct
  source 1..50: mol_type = other DNA
ttccaacctaaaatatacatataatacaacttcaaaaaaaataattaatc

SEQ ID NO: 33354 - DNA, 50 bp, synthetic construct
  source 1..50: mol_type = other DNA
rcatttttaaaaatctcaaaaaaaaattccraaacctcccttaatcatcc

SEQ ID NO: 33355 - DNA, 50 bp, synthetic construct
  source 1..50: mol_type = other DNA
atctctaaccaaaactacaaaaaatcatctcaaacatacratcttatatc

SEQ ID NO: 33356 - DNA, 50 bp, synthetic construct
  source 1..50: mol_type = other DNA
ctaatccrtctatctctaaccaaaactacaaaaaatcatctcaaacatac

SEQ ID NO: 33357 - DNA, 50 bp, synthetic construct
  source 1..50: mol_type = other DNA
caaaatcrcatatctaaaataatttcttacaatcctaactaaaaacaaac

SEQ ID NO: 33358 - DNA, 50 bp, synthetic construct
  source 1..50: mol_type = other DNA
aataatttcttacaatcctaactaaaaacaaacraactaaataccttaac

SEQ ID NO: 33359 - DNA, 50 bp, synthetic construct
  source 1..50: mol_type = other DNA
attaaattattaaatatacctacctaaaaataactaccacacccaataac

SEQ ID NO: 33360 - DNA, 50 bp, synthetic construct
  source 1..50: mol_type = other DNA
tataccataacacrcccttaactcattactcattttaaataactaccatc

SEQ ID NO: 33361 - DNA, 50 bp, synthetic construct
  source 1..50: mol_type = other DNA
ataaaataaaattctacacactcaaaattcccccrcctataccataacac

SEQ ID NO: 33362 - DNA, 50 bp, synthetic construct
  source 1..50: mol_type = other DNA
aaataactcataaaacataaaataaaattctacacactcaaaattccccc

SEQ ID NO: 33363 - DNA, 50 bp, synthetic construct
  source 1..50: mol_type = other DNA
aaaactatatttcaaactaaataaaataactcacacctataatctcaacc

SEQ ID NO: 33364 - DNA, 50 bp, synthetic construct
  source 1..50: mol_type = other DNA
aaacctaaataaatacctaaacatttaaaaactcaataaattaaaaacac

SEQ ID NO: 33365 - DNA, 50 bp, synthetic construct
  source 1..50: mol_type = other DNA
aacctcaataataactccacaaatatttattaccaataaataacataatc

SEQ ID NO: 33366 - DNA, 50 bp, synthetic construct
  source 1..50: mol_type = other DNA
aaaaacaacttattctacttctaattccataaaatataactatatctctc

SEQ ID NO: 33367 - DNA, 50 bp, synthetic construct
  source 1..50: mol_type = other DNA
acttattctacttctaattccataaaatataactatatctctcraaatac

SEQ ID NO: 33368 - DNA, 50 bp, synthetic construct
  source 1..50: mol_type = other DNA
taaataaacctaaatcaaaaccacaacctctcccaaatcrtctaacaacc

SEQ ID NO: 33369 - DNA, 50 bp, synthetic construct
  source 1..50: mol_type = other DNA
taaacrctctataaataaacctaaatcaaaaccacaacctctcccaaatc

SEQ ID NO: 33370 - DNA, 50 bp, synthetic construct
  source 1..50: mol_type = other DNA
aactcaaacttactcacaaaacrcccaaaacctaaaactatttaaacacc

SEQ ID NO: 33371 - DNA, 50 bp, synthetic construct
  source 1..50: mol_type = other DNA
ttaatctctttttcaaactcaaaatctaccttcaaaatcaaaatttttac

SEQ ID NO: 33372 - DNA, 50 bp, synthetic construct
  source 1..50: mol_type = other DNA
ctcacaaaaataatctaatatccaaaaacacacaacttataaataacacc

SEQ ID NO: 33373 - DNA, 50 bp, synthetic construct
  source 1..50: mol_type = other DNA
acactaactaacaaaaactaaaatttaaaacccattatcraaaacctccc

SEQ ID NO: 33374 - DNA, 50 bp, synthetic construct
  source 1..50: mol_type = other DNA
atcraacacttacactaactaacaaaaactaaaatttaaaacccattatc

SEQ ID NO: 33375 - DNA, 50 bp, synthetic construct
  source 1..50: mol_type = other DNA
ttcrataataaattccaaacctcaatccctatcaattaatataaatattc

SEQ ID NO: 33376 - DNA, 50 bp, synthetic construct
  source 1..50: mol_type = other DNA
aattattaacctaataaacttaaataaatttttctctatcacttacaacc

SEQ ID NO: 33377 - DNA, 50 bp, synthetic construct
  source 1..50: mol_type = other DNA
ccctacaattctaaccatcaaaaatatctctaaacacaaaaccaaatatc

SEQ ID NO: 33378 - DNA, 50 bp, synthetic construct
  source 1..50: mol_type = other DNA
tatcctttacattataacatattcaaccacatctctaacttctaaccacc

SEQ ID NO: 33379 - DNA, 50 bp, synthetic construct
  source 1..50: mol_type = other DNA
cctacaacatttcaatattctcaactaatatcaataaataattaaatccc

SEQ ID NO: 33380 - DNA, 50 bp, synthetic construct
  source 1..50: mol_type = other DNA
aattcataatattattttctttatttccctcattaacttaataactatac

SEQ ID NO: 33381 - DNA, 50 bp, synthetic construct
  source 1..50: mol_type = other DNA
tacaaaatatacttacactctaaaacttaaacatatcccatcctaatctc

SEQ ID NO: 33382 - DNA, 50 bp, synthetic construct
  source 1..50: mol_type = other DNA
taatacctaatacacacaatcaaaaatccaaacatttaaatatcttcaac

SEQ ID NO: 33383 - DNA, 50 bp, synthetic construct
  source 1..50: mol_type = other DNA
aatctatatactaaacaaaataactctcttaaaatataatactaaacccc

SEQ ID NO: 33384 - DNA, 50 bp, synthetic construct
  source 1..50: mol_type = other DNA
atcatatcctaaatttaaacrtaaattaacaaaaacaataaactataacc

SEQ ID NO: 33385 - DNA, 50 bp, synthetic construct
  source 1..50: mol_type = other DNA
ccaactcaaccacaataaactaaaacaccaaataaattcctaaaatttcc

SEQ ID NO: 33386 - DNA, 50 bp, synthetic construct
  source 1..50: mol_type = other DNA
aaaaactctttaatcaacaactaataaatcctaccaaaactaaatccttc

SEQ ID NO: 33387 - DNA, 50 bp, synthetic construct
  source 1..50: mol_type = other DNA
accccattcttatcaactatatcttaacaaaatcccaatcaacttttaac

SEQ ID NO: 33388 - DNA, 50 bp, synthetic construct
  source 1..50: mol_type = other DNA
taccataaacrcatataataatatacaatttcaaaattatcattatacac

SEQ ID NO: 33389 - DNA, 50 bp, synthetic construct
  source 1..50: mol_type = other DNA
cacaaccctcttctatcaatactaaactaaaataaccacctacttcrcac

SEQ ID NO: 33390 - DNA, 50 bp, synthetic construct
  source 1..50: mol_type = other DNA
ccttcacaaccctcttctatcaatactaaactaaaataaccacctacttc

SEQ ID NO: 33391 - DNA, 50 bp, synthetic construct
  source 1..50: mol_type = other DNA
aatataaaattaacctccccacctactcaataccatcctcatcattctcc

SEQ ID NO: 33392 - DNA, 50 bp, synthetic construct
  source 1..50: mol_type = other DNA
taacaacacatcacrcractactatatcatataacaaaataacaatacac

SEQ ID NO: 33393 - DNA, 50 bp, synthetic construct
  source 1..50: mol_type = other DNA
aatattacaaaaatacrtacactaccattttaccacataacacaacaatc

SEQ ID NO: 33394 - DNA, 50 bp, synthetic construct
  source 1..50: mol_type = other DNA
tattacaaaaatacrtacactaccattttaccacataacacaacaatcrc

SEQ ID NO: 33395 - DNA, 50 bp, synthetic construct
  source 1..50: mol_type = other DNA
aatactatatccttctaaccttaaaaaaaaaccraaaactcattccacac

SEQ ID NO: 33396 - DNA, 50 bp, synthetic construct
  source 1..50: mol_type = other DNA
acccaaaactcctctttaatactatatccttctaaccttaaaaaaaaacc

SEQ ID NO: 33397 - DNA, 50 bp, synthetic construct
  source 1..50: mol_type = other DNA
aaaaaaaaatcctaaatcaacaactctattttaatataacaattattaac

SEQ ID NO: 33398 - DNA, 50 bp, synthetic construct
  source 1..50: mol_type = other DNA
aacaactctattttaatataacaattattaacrctctactactctttccc

SEQ ID NO: 33399 - DNA, 50 bp, synthetic construct
  source 1..50: mol_type = other DNA
tcctcctaaattatttttaaatctaaaaaaacctaacraaaataactctc

SEQ ID NO: 33400 - DNA, 50 bp, synthetic construct
  source 1..50: mol_type = other DNA
catcaatatacaatcacttaatttaaaatttttctacraaaatcactctc

SEQ ID NO: 33401 - DNA, 50 bp, synthetic construct
  source 1..50: mol_type = other DNA
tttatcctcattcacttcccatttacctattatttattcaaactaatatc

SEQ ID NO: 33402 - DNA, 50 bp, synthetic construct
  source 1..50: mol_type = other DNA
tcctcatttttctacaaatctaaataaaaatatcataattaaaaaacaac

SEQ ID NO: 33403 - DNA, 50 bp, synthetic construct
  source 1..50: mol_type = other DNA
aaaacactataaatcataaattcactccttatacacactaataaaactcc

SEQ ID NO: 33404 - DNA, 50 bp, synthetic construct
  source 1..50: mol_type = other DNA
aaaaaaactttaaataaacataaacttaaaccaccraaaaacaaaatccc

SEQ ID NO: 33405 - DNA, 50 bp, synthetic construct
  source 1..50: mol_type = other DNA
aataaataaaatttattttctttaccctatctctcraaaccttacctccc

SEQ ID NO: 33406 - DNA, 50 bp, synthetic construct
  source 1..50: mol_type = other DNA
crataacctaaacctatacttattcaaaaccttctcattctcctatcctc

SEQ ID NO: 33407 - DNA, 50 bp, synthetic construct
  source 1..50: mol_type = other DNA
aaaacccrcttcacaaaaatttaaatacatataatatttctcccaaaacc

SEQ ID NO: 33408 - DNA, 50 bp, synthetic construct
  source 1..50: mol_type = other DNA
tatataaaattcctataccacatcctaaactctaaaaattacaattctac

SEQ ID NO: 33409 - DNA, 50 bp, synthetic construct
  source 1..50: mol_type = other DNA
ccaatcattaccatatctaaactataacaactctcaaaaaaacattaccc

SEQ ID NO: 33410 - DNA, 50 bp, synthetic construct
  source 1..50: mol_type = other DNA
actacaacttacttaaactcttacacttcataataaaactatacaccacc

SEQ ID NO: 33411 - DNA, 50 bp, synthetic construct
  source 1..50: mol_type = other DNA
tacttaaactcttacacttcataataaaactatacaccaccraataaaac

SEQ ID NO: 33412 - DNA, 50 bp, synthetic construct
  source 1..50: mol_type = other DNA
taataaattaaataaaacrtatccctaaaactctctcacctcctctcctc

SEQ ID NO: 33413 - DNA, 50 bp, synthetic construct
  source 1..50: mol_type = other DNA
ctcacacaacattactctccaacaaaaaccattaatcrcttctttcttac

SEQ ID NO: 33414 - DNA, 50 bp, synthetic construct
  source 1..50: mol_type = other DNA
atacacctataatctcacacaacattactctccaacaaaaaccattaatc

SEQ ID NO: 33415 - DNA, 50 bp, synthetic construct
  source 1..50: mol_type = other DNA
actaatactaatcatccctcaaaaaaccttcttataacaataccttcccc

SEQ ID NO: 33416 - DNA, 50 bp, synthetic construct
  source 1..50: mol_type = other DNA
tattaaaatatataccacctacatacataccttattacatctaataaaac

SEQ ID NO: 33417 - DNA, 50 bp, synthetic construct
  source 1..50: mol_type = other DNA
cctatccctatatattatcattattattctataaaataccacaaaatatc

SEQ ID NO: 33418 - DNA, 50 bp, synthetic construct
  source 1..50: mol_type = other DNA
atcatacaaaacacttcatatatctcaaaactaactatataatttacaac

SEQ ID NO: 33419 - DNA, 50 bp, synthetic construct
  source 1..50: mol_type = other DNA
aatcttcratactacccctaaaacccatataaaccataaccataataaac

SEQ ID NO: 33420 - DNA, 50 bp, synthetic construct
  source 1..50: mol_type = other DNA
tacaatatataattaaaataatccracataatttcaaaaacccaaactcc

SEQ ID NO: 33421 - DNA, 50 bp, synthetic construct
  source 1..50: mol_type = other DNA
actcaatcaaaaaactctttccacraaatctaaacccttaaaattatacc

SEQ ID NO: 33422 - DNA, 50 bp, synthetic construct
  source 1..50: mol_type = other DNA
aaaaatctaaaaaaacttcaaaaaaaacaatccttactaccaacttcccc

SEQ ID NO: 33423 - DNA, 50 bp, synthetic construct
  source 1..50: mol_type = other DNA
taaacrtcacctaaccttctaaaaaacctaaaataaaaactttaaaaaac

SEQ ID NO: 33424 - DNA, 50 bp, synthetic construct
  source 1..50: mol_type = other DNA
ctaacrttttccaaaactctcattctaaatttctcaaaaaaccaaataac

SEQ ID NO: 33425 - DNA, 50 bp, synthetic construct
  source 1..50: mol_type = other DNA
aactaataacaatctctcaatattaataccctaattttaacaaatatacc

SEQ ID NO: 33426 - DNA, 50 bp, synthetic construct
  source 1..50: mol_type = other DNA
ataaataactaaaatactcaataccaacatcccccaataaccttaacccc

SEQ ID NO: 33427 - DNA, 50 bp, synthetic construct
  source 1..50: mol_type = other DNA
ctccacrtccactaaaattaatcaccaaaaaataacaaccraaacacacc

SEQ ID NO: 33428 - DNA, 50 bp, synthetic construct
  source 1..50: mol_type = other DNA
ataattcrctctccacrtccactaaaattaatcaccaaaaaataacaacc

SEQ ID NO: 33429 - DNA, 50 bp, synthetic construct
  source 1..50: mol_type = other DNA
aaacrcratatacctcractaccacctcctaataactaattctaataaac

SEQ ID NO: 33430 - DNA, 50 bp, synthetic construct
  source 1..50: mol_type = other DNA
atacctcractaccacctcctaataactaattctaataaacrtaaaaaac

SEQ ID NO: 33431 - DNA, 50 bp, synthetic construct
  source 1..50: mol_type = other DNA
aaacraaccacaacctcaacaacacctaattctaattacaactaataatc

SEQ ID NO: 33432 - DNA, 50 bp, synthetic construct
  source 1..50: mol_type = other DNA
aacctcaacaacacctaattctaattacaactaataatcrataaaataac

SEQ ID NO: 33433 - DNA, 50 bp, synthetic construct
  source 1..50: mol_type = other DNA
aaaatcaaaaaacacctcatacaccctaaaaaaaccatctattaattccc

SEQ ID NO: 33434 - DNA, 50 bp, synthetic construct
  source 1..50: mol_type = other DNA
tctttcaaaaattctacrccrcttacattctacraaactaaactatatcc

SEQ ID NO: 33435 - DNA, 50 bp, synthetic construct
  source 1..50: mol_type = other DNA
aaaatacaaacracrcaaaatccttaaaaaaacttccraataaaacccac

SEQ ID NO: 33436 - DNA, 50 bp, synthetic construct
  source 1..50: mol_type = other DNA
caactccraaaaaaattccttcctccraactctaaacaccaactaataac

SEQ ID NO: 33437 - DNA, 50 bp, synthetic construct
  source 1..50: mol_type = other DNA
taaattcccrcccttttcctaaactcaaaaacaaataacraaaatccaac

SEQ ID NO: 33438 - DNA, 50 bp, synthetic construct
  source 1..50: mol_type = other DNA
actaaaataaatatttaactttaaaaataattcccacacrctaaattctc

SEQ ID NO: 33439 - DNA, 50 bp, synthetic construct
  source 1..50: mol_type = other DNA
aacaacaaatacrctaaacacttcactaaacttccctttcrtaaattccc

SEQ ID NO: 33440 - DNA, 50 bp, synthetic construct
  source 1..50: mol_type = other DNA
attactccaaacctttccctaaaactatccttctttactcratctctaac

SEQ ID NO: 33441 - DNA, 50 bp, synthetic construct
  source 1..50: mol_type = other DNA
aaaacaaaaacttaactacacttaactatataccctataaatccaaacrc

SEQ ID NO: 33442 - DNA, 50 bp, synthetic construct
  source 1..50: mol_type = other DNA
taaaaataaatacaataaaacctcccaccctaataaaatttatattaaac

SEQ ID NO: 33443 - DNA, 50 bp, synthetic construct
  source 1..50: mol_type = other DNA
cctaaaacctccaaaaaaaacaacaacaacaatatttatttatcratacc

SEQ ID NO: 33444 - DNA, 50 bp, synthetic construct
  source 1..50: mol_type = other DNA
cctccaaaaaaaacaacaacaacaatatttatttatcrataccraaactc

SEQ ID NO: 33445 - DNA, 50 bp, synthetic construct
  source 1..50: mol_type = other DNA
tactttctttttacactatcccaacacttttactttctaacaacaatatc

SEQ ID NO: 33446 - DNA, 50 bp, synthetic construct
  source 1..50: mol_type = other DNA
ttttataccccaaaacataaatttcaaccactaaaatcccrctcaaaatc

SEQ ID NO: 33447 - DNA, 50 bp, synthetic construct
  source 1..50: mol_type = other DNA
actatattacccaatcatttcctttcatttatcatcaccaccttaaaccc

SEQ ID NO: 33448 - DNA, 50 bp, synthetic construct
  source 1..50: mol_type = other DNA
taataaccaactcacctaaattcaaccatttaaaaaaatactaaatatac

SEQ ID NO: 33449 - DNA, 50 bp, synthetic construct
  source 1..50: mol_type = other DNA
aaataaacaccaaacatcttctaatatcaaacataaaaaaaaccaacccc

SEQ ID NO: 33450 - DNA, 50 bp, synthetic construct
  source 1..50: mol_type = other DNA
aactttttccatatttaataccaaaaaatatctaatactcactcaccctc

SEQ ID NO: 33451 - DNA, 50 bp, synthetic construct
  source 1..50: mol_type = other DNA
atatcacaatctcaaactcraaactttaccrctactacttacaaaccaac

SEQ ID NO: 33452 - DNA, 50 bp, synthetic construct
  source 1..50: mol_type = other DNA
ctaacctacaaataacaacrataaaaccccraatctaaaactataacatc

SEQ ID NO: 33453 - DNA, 50 bp, synthetic construct
  source 1..50: mol_type = other DNA
tcccaaaacaaataataaacaactacaaccacraaaaataaaacrtcatc

SEQ ID NO: 33454 - DNA, 50 bp, synthetic construct
  source 1..50: mol_type = other DNA
aaaatttcacctccaaattcccaaaacaaataataaacaactacaaccac

SEQ ID NO: 33455 - DNA, 50 bp, synthetic construct
  source 1..50: mol_type = other DNA
atttcraaacctaaaaaaaatatcacactcacttatcaacctcaaataac

SEQ ID NO: 33456 - DNA, 50 bp, synthetic construct
  source 1..50: mol_type = other DNA
accacrtcatctaaaactaacaaataaatataacattctttccaaattcc

SEQ ID NO: 33457 - DNA, 50 bp, synthetic construct
  source 1..50: mol_type = other DNA
aatacttaatcataaaaataattaataatattacctaacacaattcttcc

SEQ ID NO: 33458 - DNA, 50 bp, synthetic construct
  source 1..50: mol_type = other DNA
acaaaaaaaaccctttctcttacaaaaatatatcattcacaactaaatac

SEQ ID NO: 33459 - DNA, 50 bp, synthetic construct
  source 1..50: mol_type = other DNA
cttataaaactatatataaacaatcatatcctcttttctatttatctccc

SEQ ID NO: 33460 - DNA, 50 bp, synthetic construct
  source 1..50: mol_type = other DNA
tcttaatatctctctctattttactacttatacacttttctatttctacc

SEQ ID NO: 33461 - DNA, 50 bp, synthetic construct
  source 1..50: mol_type = other DNA
aataataaacaaaccaattttaacacatacccttatttccrcttcacccc

SEQ ID NO: 33462 - DNA, 50 bp, synthetic construct
  source 1..50: mol_type = other DNA
atttattaaaattcccttaatcaactctacctcaaaactctacttctccc

SEQ ID NO: 33463 - DNA, 50 bp, synthetic construct
  source 1..50: mol_type = other DNA
cttcccaacatccaaacccacacrataattacctctataaaaaaattctc

SEQ ID NO: 33464 - DNA, 50 bp, synthetic construct
  source 1..50: mol_type = other DNA
taaaaattaaaataacaccaaactaaaaaaatttccaaacaaactttaac

SEQ ID NO: 33465 - DNA, 50 bp, synthetic construct
  source 1..50: mol_type = other DNA
aaaatcttttcaatctaatatcatctcaacttctaacaaatcactcatac

SEQ ID NO: 33466 - DNA, 50 bp, synthetic construct
  source 1..50: mol_type = other DNA
aatatcatctcaacttctaacaaatcactcatacrttctatatactccac

SEQ ID NO: 33467 - DNA, 50 bp, synthetic construct
  source 1..50: mol_type = other DNA
tccacrtaaacacatactcaaacccttctttttaactaaactaaatacac

SEQ ID NO: 33468 - DNA, 50 bp, synthetic construct
  source 1..50: mol_type = other DNA
cactcaaaaacaaaatcraaacccaatactcccaaccaaccaaaaaaacc

SEQ ID NO: 33469 - DNA, 50 bp, synthetic construct
  source 1..50: mol_type = other DNA
acatatcaaataaaaatacaactaccaaacaaacactcaaaaacaaaatc

SEQ ID NO: 33470 - DNA, 50 bp, synthetic construct
  source 1..50: mol_type = other DNA
tactcctaaatatctacctaacaactacaccctcatctaacatacaaaac

SEQ ID NO: 33471 - DNA, 50 bp, synthetic construct
  source 1..50: mol_type = other DNA
ataaattttataacttatctaaacaaaaatacaaaacctcaaacaaccac

SEQ ID NO: 33472 - DNA, 50 bp, synthetic construct
  source 1..50: mol_type = other DNA
tcactacacracctttccrtaaaaatattcratactaatataaataaatc

SEQ ID NO: 33473 - DNA, 50 bp, synthetic construct
  source 1..50: mol_type = other DNA
caaaaaaataaccaaaaaacctaacccaccccataacaccacaacaaacc

SEQ ID NO: 33474 - DNA, 50 bp, synthetic construct
  source 1..50: mol_type = other DNA
taatattataaaataaaccaaaccccctaaccactcctctaaaaatcttc

SEQ ID NO: 33475 - DNA, 50 bp, synthetic construct
  source 1..50: mol_type = other DNA
taaaaatcttcracttcaaaatttctcctctaaacctccctttacctatc

SEQ ID NO: 33476 - DNA, 50 bp, synthetic construct
  source 1..50: mol_type = other DNA
actatatactaaaaactttaaactcraaaaacaaactcacactaccattc

SEQ ID NO: 33477 - DNA, 50 bp, synthetic construct
  source 1..50: mol_type = other DNA
atcttctctctacactaataatcaaactatatactaaaaactttaaactc

SEQ ID NO: 33478 - DNA, 50 bp, synthetic construct
  source 1..50: mol_type = other DNA
cacttacacattaaataattcaaatactctaaaaaatacacaataactac

SEQ ID NO: 33479 - DNA, 50 bp, synthetic construct
  source 1..50: mol_type = other DNA
aataattcaaatactctaaaaaatacacaataactacrtactaaaacccc

SEQ ID NO: 33480 - DNA, 50 bp, synthetic construct
  source 1..50: mol_type = other DNA
aactaaaatactaacraactatacaaacaatctatacrtaccracataac

SEQ ID NO: 33481 - DNA, 50 bp, synthetic construct
  source 1..50: mol_type = other DNA
aaatataaacaataactaaaatactaacraactatacaaacaatctatac

SEQ ID NO: 33482 - DNA, 50 bp, synthetic construct
  source 1..50: mol_type = other DNA
acaaacttaaatacaaaaaccaaaataaaacrctacaaaaaataacaccc

SEQ ID NO: 33483 - DNA, 50 bp, synthetic construct
  source 1..50: mol_type = other DNA
cacacacraaataaaaaatttccaaataaaactcttaataaccaaaaaac

SEQ ID NO: 33484 - DNA, 50 bp, synthetic construct
  source 1..50: mol_type = other DNA
tttttatctattaatcacaccaaacaacattaaattataaaaacaatacc

SEQ ID NO: 33485 - DNA, 50 bp, synthetic construct
  source 1..50: mol_type = other DNA
caacrtaaaaacaaattcttccctcctcaattttataaatccaataaccc

SEQ ID NO: 33486 - DNA, 50 bp, synthetic construct
  source 1..50: mol_type = other DNA
taacacccaaactacaatatttatttattaaaaccccaacactcraaaac

SEQ ID NO: 33487 - DNA, 50 bp, synthetic construct
  source 1..50: mol_type = other DNA
aatttataacacccaaactacaatatttatttattaaaaccccaacactc

SEQ ID NO: 33488 - DNA, 50 bp, synthetic construct
  source 1..50: mol_type = other DNA
aacaaatactataacctaaatactataaaccacaaaaaacccttcctacc

SEQ ID NO: 33489 - DNA, 50 bp, synthetic construct
  source 1..50: mol_type = other DNA
ccttcccctaacatccctaattaaaaaaatatcctcacaaaactataaac

SEQ ID NO: 33490 - DNA, 50 bp, synthetic construct
  source 1..50: mol_type = other DNA
aataaaacctcccrtaaaacaactcttcttttccrattattaaaatacrc

SEQ ID NO: 33491 - DNA, 50 bp, synthetic construct
  source 1..50: mol_type = other DNA
accaactaaaaataccacacaaaataaaaattaatcaaaaccactaaccc

SEQ ID NO: 33492 - DNA, 50 bp, synthetic construct
  source 1..50: mol_type = other DNA
aattctaactaattctcactttatataataccttcaactaacaaaaactc

SEQ ID NO: 33493 - DNA, 50 bp, synthetic construct
  source 1..50: mol_type = other DNA
actttatataataccttcaactaacaaaaactcraaaaatattcaatacc

SEQ ID NO: 33494 - DNA, 50 bp, synthetic construct
  source 1..50: mol_type = other DNA
aaaaactcraaaaatattcaataccrtaaaaaacaaattcctaaaaaccc

SEQ ID NO: 33495 - DNA, 50 bp, synthetic construct
  source 1..50: mol_type = other DNA
aaaaatattcaataccrtaaaaaacaaattcctaaaaacccrtaaatacc

SEQ ID NO: 33496 - DNA, 50 bp, synthetic construct
  source 1..50: mol_type = other DNA
aaacaaattcctaaaaacccrtaaataccrtaaacaaattaccacaacac

SEQ ID NO: 33497 - DNA, 50 bp, synthetic construct
  source 1..50: mol_type = other DNA
aaactcctatatataacaaaccacttaaaaaaacrtaaataaaaccctac

SEQ ID NO: 33498 - DNA, 50 bp, synthetic construct
  source 1..50: mol_type = other DNA
aaacataaaaaaccaaaaactcctatatataacaaaccacttaaaaaaac

SEQ ID NO: 33499 - DNA, 50 bp, synthetic construct
  source 1..50: mol_type = other DNA
tcctaattctccatatcccctaccaaacaaaactattaaactaaaaaacc

SEQ ID NO: 33500 - DNA, 50 bp, synthetic construct
  source 1..50: mol_type = other DNA
tcctaataaaacctcraaactctaatcaaataacaatatatcccaacrac

SEQ ID NO: 33501 - DNA, 50 bp, synthetic construct
  source 1..50: mol_type = other DNA
aactcctaataaaacctcraaactctaatcaaataacaatatatcccaac

SEQ ID NO: 33502 - DNA, 50 bp, synthetic construct
  source 1..50: mol_type = other DNA
aacractactatttaaaattctacaataacacaactcctaataaaacctc

SEQ ID NO: 33503 - DNA, 50 bp, synthetic construct
  source 1..50: mol_type = other DNA
tccraaaccccaccaaaaactatactattacaaaacctcaaacaacaacc

SEQ ID NO: 33504 - DNA, 50 bp, synthetic construct
  source 1..50: mol_type = other DNA
taacrtataattttataatcaaacctacactttaatttccaccccacrac

SEQ ID NO: 33505 - DNA, 50 bp, synthetic construct
  source 1..50: mol_type = other DNA
ccrtaacrtataattttataatcaaacctacactttaatttccaccccac

SEQ ID NO: 33506 - DNA, 50 bp, synthetic construct
  source 1..50: mol_type = other DNA
ataaaaaattaatccrtacctcctacaaacctccracatttaacaacaac

SEQ ID NO: 33507 - DNA, 50 bp, synthetic construct
  source 1..50: mol_type = other DNA
attccaaaacaaactcataaaaaattaatccrtacctcctacaaacctcc

SEQ ID NO: 33508 - DNA, 50 bp, synthetic construct
  source 1..50: mol_type = other DNA
attccctatacrtttatacrcttaacaatccaaaaaaataacratcattc

SEQ ID NO: 33509 - DNA, 50 bp, synthetic construct
  source 1..50: mol_type = other DNA
atctaaaatatttttactcctacactcraacaatttcctactaaaaactc

SEQ ID NO: 33510 - DNA, 50 bp, synthetic construct
  source 1..50: mol_type = other DNA
taaaaactcraaactctaataaaactaaacacaaaaaccctttcaaaacc

SEQ ID NO: 33511 - DNA, 50 bp, synthetic construct
  source 1..50: mol_type = other DNA
tcaaaaccractaccttccttcctaccaaaaactaaattttaaacaacac

SEQ ID NO: 33512 - DNA, 50 bp, synthetic construct
  source 1..50: mol_type = other DNA
cractaccttccttcctaccaaaaactaaattttaaacaacacraaaacc

SEQ ID NO: 33513 - DNA, 50 bp, synthetic construct
  source 1..50: mol_type = other DNA
ctaccttccttcctaccaaaaactaaattttaaacaacacraaaaccrac

SEQ ID NO: 33514 - DNA, 50 bp, synthetic construct
  source 1..50: mol_type = other DNA
taaacaaaaaaacattacatataaaacccacracataacactacrcraac

SEQ ID NO: 33515 - DNA, 50 bp, synthetic construct
  source 1..50: mol_type = other DNA
cccctctaaacaaaaaaacattacatataaaacccacracataacactac

SEQ ID NO: 33516 - DNA, 50 bp, synthetic construct
  source 1..50: mol_type = other DNA
aaaaacaaaaatacccctctaaacaaaaaaacattacatataaaacccac

SEQ ID NO: 33517 - DNA, 50 bp, synthetic construct
  source 1..50: mol_type = other DNA
acaataactcatctaaaaacacacaacrcaaaactaaacattaaaataac

SEQ ID NO: 33518 - DNA, 50 bp, synthetic construct
  source 1..50: mol_type = other DNA
aacctacacaaacctacctattaacaataactcatctaaaaacacacaac

SEQ ID NO: 33519 - DNA, 50 bp, synthetic construct
  source 1..50: mol_type = other DNA
aaatttatataaaccttactaaacactctatacaattaattacttattac

SEQ ID NO: 33520 - DNA, 50 bp, synthetic construct
  source 1..50: mol_type = other DNA
actaaacactctatacaattaattacttattacrtataattactcacaac

SEQ ID NO: 33521 - DNA, 50 bp, synthetic construct
  source 1..50: mol_type = other DNA
caaattccataaaaaaacattaattcctaaaacacraattcaaatcaacc

SEQ ID NO: 33522 - DNA, 50 bp, synthetic construct
  source 1..50: mol_type = other DNA
tataaccaaaaaacataatttattcattaaaacacrattaacctaaactc

SEQ ID NO: 33523 - DNA, 50 bp, synthetic construct
  source 1..50: mol_type = other DNA
ccacttcttctcatcctaatatcaattttctttctaatcctaaaaataac

SEQ ID NO: 33524 - DNA, 50 bp, synthetic construct
  source 1..50: mol_type = other DNA
aacccaaaactattactaacractaataatactactacraaaaactccac

SEQ ID NO: 33525 - DNA, 50 bp, synthetic construct
  source 1..50: mol_type = other DNA
aaaacaaacatataaaaaacatctataccaaaaaaccactcrccaacccc

SEQ ID NO: 33526 - DNA, 50 bp, synthetic construct
  source 1..50: mol_type = other DNA
aacataactaaaacaaacatataaaaaacatctataccaaaaaaccactc

SEQ ID NO: 33527 - DNA, 50 bp, synthetic construct
  source 1..50: mol_type = other DNA
ctaacacaaatattttttatatatttattccaactatatctaactaaacc

SEQ ID NO: 33528 - DNA, 50 bp, synthetic construct
  source 1..50: mol_type = other DNA
taactaaaccrcctctttctaaatacaaaacctatacacacatttactcc

SEQ ID NO: 33529 - DNA, 50 bp, synthetic construct
  source 1..50: mol_type = other DNA
atacacacatttactccraaaatttttttctactttaaaaaacaactctc

SEQ ID NO: 33530 - DNA, 50 bp, synthetic construct
  source 1..50: mol_type = other DNA
tttctactttaaaaaacaactctcracaaaactaactatatttcctttac

SEQ ID NO: 33531 - DNA, 50 bp, synthetic construct
  source 1..50: mol_type = other DNA
aacaactctcracaaaactaactatatttcctttacratataaactactc

SEQ ID NO: 33532 - DNA, 50 bp, synthetic construct
  source 1..50: mol_type = other DNA
aactaactatatttcctttacratataaactactcratatcraatatcac

SEQ ID NO: 33533 - DNA, 50 bp, synthetic construct
  source 1..50: mol_type = other DNA
crttttactattaaaattatcaaattaaccaaacacaatacctcacacrc

SEQ ID NO: 33534 - DNA, 50 bp, synthetic construct
  source 1..50: mol_type = other DNA
accrttttactattaaaattatcaaattaaccaaacacaatacctcacac

SEQ ID NO: 33535 - DNA, 50 bp, synthetic construct
  source 1..50: mol_type = other DNA
attacttaacaacttataccaactaaaaaacaaaccttctataaaatacc

SEQ ID NO: 33536 - DNA, 50 bp, synthetic construct
  source 1..50: mol_type = other DNA
caatattctattaaaacatcaaaaacatcacrcatttctcactaaaactc

SEQ ID NO: 33537 - DNA, 50 bp, synthetic construct
  source 1..50: mol_type = other DNA
taaactaacaaaacaaaaacraacraatcttactaaaaactacttccccc

SEQ ID NO: 33538 - DNA, 50 bp, synthetic construct
  source 1..50: mol_type = other DNA
rctcttaccctatcaatttaccattaccataacaacacccraaaattacc

SEQ ID NO: 33539 - DNA, 50 bp, synthetic construct
  source 1..50: mol_type = other DNA
ttacraatcactataactactcctatacttcaacraaactaaaaactacc

SEQ ID NO: 33540 - DNA, 50 bp, synthetic construct
  source 1..50: mol_type = other DNA
actaaaactcaacctcraaaaactcataactttacccaaatttcttcccc

SEQ ID NO: 33541 - DNA, 50 bp, synthetic construct
  source 1..50: mol_type = other DNA
aactcraaacratacaaaacaaataaacccctaaactaaaactcaacctc

SEQ ID NO: 33542 - DNA, 50 bp, synthetic construct
  source 1..50: mol_type = other DNA
taaaccctccraaactaaactccaatttaaaaactcacctaccttacatc

SEQ ID NO: 33543 - DNA, 50 bp, synthetic construct
  source 1..50: mol_type = other DNA
cactctcatcaacctaatccaaaaccaaatctaaaactacttaaaattcc

SEQ ID NO: 33544 - DNA, 50 bp, synthetic construct
  source 1..50: mol_type = other DNA
aactaaaacttaaactaaatttactaaaactttaaactctaaattcaaac

SEQ ID NO: 33545 - DNA, 50 bp, synthetic construct
  source 1..50: mol_type = other DNA
crtaacttcatttcaaaaatttcttttctcctaatactcaaaatcctaac

SEQ ID NO: 33546 - DNA, 50 bp, synthetic construct
  source 1..50: mol_type = other DNA
cacaaccccaacaacaacaacacctaatacatctacttataaatcaccac

SEQ ID NO: 33547 - DNA, 50 bp, synthetic construct
  source 1..50: mol_type = other DNA
attaatcacattcctattctccaattaaataataaactcataattaaatc

SEQ ID NO: 33548 - DNA, 50 bp, synthetic construct
  source 1..50: mol_type = other DNA
attaaataaaccataattatttccatccacccattcatttacccattcac

SEQ ID NO: 33549 - DNA, 50 bp, synthetic construct
  source 1..50: mol_type = other DNA
aacttaatctaaaattatttcaaaacraatctaccattttaaaaactaac

SEQ ID NO: 33550 - DNA, 50 bp, synthetic construct
  source 1..50: mol_type = other DNA
aaaaaatcrcattcaaattcactctcrccaatctctaaaataacaaattc

SEQ ID NO: 33551 - DNA, 50 bp, synthetic construct
  source 1..50: mol_type = other DNA
aaaactctacaataatccaaataacaaacataactactataactactacc

SEQ ID NO: 33552 - DNA, 50 bp, synthetic construct
  source 1..50: mol_type = other DNA
caccrttcttttctctaaaaacaaaatctcactccaccatccaaactaac

SEQ ID NO: 33553 - DNA, 50 bp, synthetic construct
  source 1..50: mol_type = other DNA
aaacttacctaataaaactctttaaaaacaccaacctatatactatccac

SEQ ID NO: 33554 - DNA, 50 bp, synthetic construct
  source 1..50: mol_type = other DNA
aacaaaaactaaaatctataaattataaccttatttccaaaatactccac

SEQ ID NO: 33555 - DNA, 50 bp, synthetic construct
  source 1..50: mol_type = other DNA
ataaattataaccttatttccaaaatactccacraactaacracccaaac

SEQ ID NO: 33556 - DNA, 50 bp, synthetic construct
  source 1..50: mol_type = other DNA
actaattaaatttaaaaacaaaaattaaatttcctaccttctccrcaccc

SEQ ID NO: 33557 - DNA, 50 bp, synthetic construct
  source 1..50: mol_type = other DNA
rtttctactaattaaatttaaaaacaaaaattaaatttcctaccttctcc

SEQ ID NO: 33558 - DNA, 50 bp, synthetic construct
  source 1..50: mol_type = other DNA
taatataaaaatccccatatacctacttctatccaacctcaaataaaaac

SEQ ID NO: 33559 - DNA, 50 bp, synthetic construct
  source 1..50: mol_type = other DNA
aaaacacctactcctaaaccaataaaaccctttaaaaacccacrttacac

SEQ ID NO: 33560 - DNA, 50 bp, synthetic construct
  source 1..50: mol_type = other DNA
accaataaaaccctttaaaaacccacrttacacraaatatatactaaacc

SEQ ID NO: 33561 - DNA, 50 bp, synthetic construct
  source 1..50: mol_type = other DNA
ataaaaccctttaaaaacccacrttacacraaatatatactaaaccraac

SEQ ID NO: 33562 - DNA, 50 bp, synthetic construct
  source 1..50: mol_type = other DNA
aaactaaaaattcctacrataactatacttcctatacttccctcctaaac

SEQ ID NO: 33563 - DNA, 50 bp, synthetic construct
  source 1..50: mol_type = other DNA
ccrtcaaataaatcaaaaacaaatctaaaaataatatcccratctaaacc

SEQ ID NO: 33564 - DNA, 50 bp, synthetic construct
  source 1..50: mol_type = other DNA
tctaaaaaattctaaacttctaaactaaaatccaaacrctaaataacaac

SEQ ID NO: 33565 - DNA, 50 bp, synthetic construct
  source 1..50: mol_type = other DNA
tcraaaacaactttctaaaaaattctaaacttctaaactaaaatccaaac

SEQ ID NO: 33566 - DNA, 50 bp, synthetic construct
  source 1..50: mol_type = other DNA
rcccrctaaatcacacraattttctaaatcrttaaataaaactatcaatc

SEQ ID NO: 33567 - DNA, 50 bp, synthetic construct
  source 1..50: mol_type = other DNA
ractaacaatcctacctaacratccaaaaaatccrtataatttaacraac

SEQ ID NO: 33568 - DNA, 50 bp, synthetic construct
  source 1..50: mol_type = other DNA
tttaaactaatttatattcttatcccctctataaaactctaaatcctctc

SEQ ID NO: 33569 - DNA, 50 bp, synthetic construct
  source 1..50: mol_type = other DNA
ctctcctaaaaatactaaaccraaaaactataaaatcaatatctctaacc

SEQ ID NO: 33570 - DNA, 50 bp, synthetic construct
  source 1..50: mol_type = other DNA
taaacctaaaaaacaaaacrtaaccaccaacaacatccaccataaacctc

SEQ ID NO: 33571 - DNA, 50 bp, synthetic construct
  source 1..50: mol_type = other DNA
actatcctaaacacaactcctactaaatatataaacctaaaaaacaaaac

SEQ ID NO: 33572 - DNA, 50 bp, synthetic construct
  source 1..50: mol_type = other DNA
aataaaccctataccaaaatattccaaaaaatactaatacacaataaacc

SEQ ID NO: 33573 - DNA, 50 bp, synthetic construct
  source 1..50: mol_type = other DNA
ccctataccaaaatattccaaaaaatactaatacacaataaaccraaatc

SEQ ID NO: 33574 - DNA, 50 bp, synthetic construct
  source 1..50: mol_type = other DNA
tcctcrtatataaaccaaaaataataacaaccrtacrtcccttataaaac

SEQ ID NO: 33575 - DNA, 50 bp, synthetic construct
  source 1..50: mol_type = other DNA
ctaatacacaataaaccraaatcraaactatccaacrcttcacaaaaaac

SEQ ID NO: 33576 - DNA, 50 bp, synthetic construct
  source 1..50: mol_type = other DNA
craaacctctatatcaattcctcrtatataaaccaaaaataataacaacc

SEQ ID NO: 33577 - DNA, 50 bp, synthetic construct
  source 1..50: mol_type = other DNA
atataacctcaacaaatccaaatctatcraaacctctatatcaattcctc

SEQ ID NO: 33578 - DNA, 50 bp, synthetic construct
  source 1..50: mol_type = other DNA
cttaaacttataaaaaatatatactaaataccaaaccaaattcccccrac

SEQ ID NO: 33579 - DNA, 50 bp, synthetic construct
  source 1..50: mol_type = other DNA
atccttaaacttataaaaaatatatactaaataccaaaccaaattccccc

SEQ ID NO: 33580 - DNA, 50 bp, synthetic construct
  source 1..50: mol_type = other DNA
aaaatccacaaacraaacctaaaactataaacraaaactaatctataaac

SEQ ID NO: 33581 - DNA, 50 bp, synthetic construct
  source 1..50: mol_type = other DNA
aataacataatcrcctcaataaacacctaaacaaaactataaaaaattac

SEQ ID NO: 33582 - DNA, 50 bp, synthetic construct
  source 1..50: mol_type = other DNA
ccctacrtataacccatctacaaaaacataaaaaaattatcacacttatc

SEQ ID NO: 33583 - DNA, 50 bp, synthetic construct
  source 1..50: mol_type = other DNA
aaaaccracaaatataacaactcctccatatccctacaaataaactacac

SEQ ID NO: 33584 - DNA, 50 bp, synthetic construct
  source 1..50: mol_type = other DNA
cccatcraccactataccttacraacaatacttaaaatcatatatctacc

SEQ ID NO: 33585 - DNA, 50 bp, synthetic construct
  source 1..50: mol_type = other DNA
aaaaaaaatcaaacttaaccccaacaactcaaaatttcacttccttatac

SEQ ID NO: 33586 - DNA, 50 bp, synthetic construct
  source 1..50: mol_type = other DNA
taaaattctaaattattaaaactaaacctaaccccctctccatactcccc

SEQ ID NO: 33587 - DNA, 50 bp, synthetic construct
  source 1..50: mol_type = other DNA
taaacaactccttaaacaaatccraaaaaaactcrttaaaaaaattttcc

SEQ ID NO: 33588 - DNA, 50 bp, synthetic construct
  source 1..50: mol_type = other DNA
taaactttcactacaacctccatctccctaattcaaacaattctcctatc

SEQ ID NO: 33589 - DNA, 50 bp, synthetic construct
  source 1..50: mol_type = other DNA
cctacctatattctcttcccacttcrcttttaaattatttcaaaaacrcc

SEQ ID NO: 33590 - DNA, 50 bp, synthetic construct
  source 1..50: mol_type = other DNA
ctacaataaaatataattacrtcactacaatccaacctaaataacaaaac

SEQ ID NO: 33591 - DNA, 50 bp, synthetic construct
  source 1..50: mol_type = other DNA
aaaaaatcattacaacccaaaaaaacaaatctacaataaaatataattac

SEQ ID NO: 33592 - DNA, 50 bp, synthetic construct
  source 1..50: mol_type = other DNA
atactcactatattacccaatttttatttactttttaactatattaacac

SEQ ID NO: 33593 - DNA, 50 bp, synthetic construct
  source 1..50: mol_type = other DNA
cccaatttttatttactttttaactatattaacacratctacaataaaac

SEQ ID NO: 33594 - DNA, 50 bp, synthetic construct
  source 1..50: mol_type = other DNA
taaaataaactatcctcrtatatacaaaacaaaacaaatatatatttacc

SEQ ID NO: 33595 - DNA, 50 bp, synthetic construct
  source 1..50: mol_type = other DNA
aatctaactctacttccccrtttacttactatctaatttcaaaaaacctc

SEQ ID NO: 33596 - DNA, 50 bp, synthetic construct
  source 1..50: mol_type = other DNA
ctcrtatacttaaaataaaacaaaaccacctactaaaaaccttattaatc

SEQ ID NO: 33597 - DNA, 50 bp, synthetic construct
  source 1..50: mol_type = other DNA
tactcaaaacatctttaccatttaaaaacacccaacctcctacaacaacc

SEQ ID NO: 33598 - DNA, 50 bp, synthetic construct
  source 1..50: mol_type = other DNA
atacaaacaattactaacaattaaccctcacaaaaataataataaataac

SEQ ID NO: 33599 - DNA, 50 bp, synthetic construct
  source 1..50: mol_type = other DNA
acccaactcaatttaatttcatttacattaaaaaaacaaatcccttaacc

SEQ ID NO: 33600 - DNA, 50 bp, synthetic construct
  source 1..50: mol_type = other DNA
ctcaatttaatttcatttacattaaaaaaacaaatcccttaaccraatac

SEQ ID NO: 33601 - DNA, 50 bp, synthetic construct
  source 1..50: mol_type = other DNA
aataaataaaaacatctcttctaaacccratcccccccttaaactccaac

SEQ ID NO: 33602 - DNA, 50 bp, synthetic construct
  source 1..50: mol_type = other DNA
aaatcaccattcccrataaaactaacraacattaaatttcaaataccctc

SEQ ID NO: 33603 - DNA, 50 bp, synthetic construct
  source 1..50: mol_type = other DNA
cttctttcctcacrccctactaaaaacctaaaaactaactaaaaaaacac

SEQ ID NO: 33604 - DNA, 50 bp, synthetic construct
  source 1..50: mol_type = other DNA
aaataaaatactctactaaacccttataccaaaaaaaccaaacctaaacc

SEQ ID NO: 33605 - DNA, 50 bp, synthetic construct
  source 1..50: mol_type = other DNA
ccacrataaataactcacrataaacractcaaaaaacatcaaaacacccc

SEQ ID NO: 33606 - DNA, 50 bp, synthetic construct
  source 1..50: mol_type = other DNA
aaactctaattaacctaccatacccataacacccctataaaataaaactc

SEQ ID NO: 33607 - DNA, 50 bp, synthetic construct
  source 1..50: mol_type = other DNA
aacaatcaaaacctacctaataattttctttcctttccttattttaaaac

SEQ ID NO: 33608 - DNA, 50 bp, synthetic construct
  source 1..50: mol_type = other DNA
caaaatattcaattaaaaataaaaatacaccraccaacacaataattcac

SEQ ID NO: 33609 - DNA, 50 bp, synthetic construct
  source 1..50: mol_type = other DNA
acracactatttataataacaaaaaactaaaatctccccaaaaactctac

SEQ ID NO: 33610 - DNA, 50 bp, synthetic construct
  source 1..50: mol_type = other DNA
attctaaccrtccaaaaaaaactctaaactaaaaccaaaatacccctctc

SEQ ID NO: 33611 - DNA, 50 bp, synthetic construct
  source 1..50: mol_type = other DNA
racaatccatcctcaaaaaactttaaacaacttcctaccatattctaacc

SEQ ID NO: 33612 - DNA, 50 bp, synthetic construct
  source 1..50: mol_type = other DNA
ratcaaaacataacaaaaaactacccaaaaccctctaaaaataaactacc

SEQ ID NO: 33613 - DNA, 50 bp, synthetic construct
  source 1..50: mol_type = other DNA
ctacccaaaaccctctaaaaataaactaccraaaaatatctataatattc

SEQ ID NO: 33614 - DNA, 50 bp, synthetic construct
  source 1..50: mol_type = other DNA
aataaaaaaaaacaacccctctatctccaaataaatccccaaacaaaacc

SEQ ID NO: 33615 - DNA, 50 bp, synthetic construct
  source 1..50: mol_type = other DNA
aaaaaaaacaacccctctatctccaaataaatccccaaacaaaaccraac

SEQ ID NO: 33616 - DNA, 50 bp, synthetic construct
  source 1..50: mol_type = other DNA
tacaacrattaaaataaacccracaaaactacccaaatcacaaaacaacc

SEQ ID NO: 33617 - DNA, 50 bp, synthetic construct
  source 1..50: mol_type = other DNA
aacaataaaactacaaactaactcccccacatctaactttatcaacaacc

SEQ ID NO: 33618 - DNA, 50 bp, synthetic construct
  source 1..50: mol_type = other DNA
ctctaaaaaacaaaactaaatccaatatcccctaaactcccctaaatacc

SEQ ID NO: 33619 - DNA, 50 bp, synthetic construct
  source 1..50: mol_type = other DNA
ctaatatataattaacctaaaacraaatctaaatactcttccaactctac

SEQ ID NO: 33620 - DNA, 50 bp, synthetic construct
  source 1..50: mol_type = other DNA
aacccaaaaacrttctcaataaaaatactaatatataattaacctaaaac

SEQ ID NO: 33621 - DNA, 50 bp, synthetic construct
  source 1..50: mol_type = other DNA
actatccctaacrtctaataatataaaactcractctataacccaaaaac

SEQ ID NO: 33622 - DNA, 50 bp, synthetic construct
  source 1..50: mol_type = other DNA
aatccctacactcrccaaataaaacctaataaaaactcaacctaacraac

SEQ ID NO: 33623 - DNA, 50 bp, synthetic construct
  source 1..50: mol_type = other DNA
raatacaaaaacccaaactaacccrtaataacaaaaaaaactttccaaac

SEQ ID NO: 33624 - DNA, 50 bp, synthetic construct
  source 1..50: mol_type = other DNA
actaaaaatcccraaaatttcttcactccaaaacttaaccraaaataacc

SEQ ID NO: 33625 - DNA, 50 bp, synthetic construct
  source 1..50: mol_type = other DNA
aacracaattactaaaaatcccraaaatttcttcactccaaaacttaacc

SEQ ID NO: 33626 - DNA, 50 bp, synthetic construct
  source 1..50: mol_type = other DNA
aaaaaccaaataaaaataatcaaacacaataaaaatcaccctaccaaacc

SEQ ID NO: 33627 - DNA, 50 bp, synthetic construct
  source 1..50: mol_type = other DNA
aaataatcaaacacaataaaaatcaccctaccaaaccrtcccaactatcc

SEQ ID NO: 33628 - DNA, 50 bp, synthetic construct
  source 1..50: mol_type = other DNA
ctaataacaataaattataacrtcctaactacaaaaaacaaacaaaaacc

SEQ ID NO: 33629 - DNA, 50 bp, synthetic construct
  source 1..50: mol_type = other DNA
aactaaaaaaactaccaaaaatcccaactctaataacaataaattataac

SEQ ID NO: 33630 - DNA, 50 bp, synthetic construct
  source 1..50: mol_type = other DNA
raaaaatcccaaactctacccaaaaaacctatctcccaaaaaaacatacc

SEQ ID NO: 33631 - DNA, 50 bp, synthetic construct
  source 1..50: mol_type = other DNA
ratatattcctctaaaaaacaaattctctaaataaaacctaaaacccccc

SEQ ID NO: 33632 - DNA, 50 bp, synthetic construct
  source 1..50: mol_type = other DNA
aactaccttaaacccaacaaaactatttataaccaccaacacacraaacc

SEQ ID NO: 33633 - DNA, 50 bp, synthetic construct
  source 1..50: mol_type = other DNA
tactaataaccacaaacaactctactaaacccaaaacaactactaatacc

SEQ ID NO: 33634 - DNA, 50 bp, synthetic construct
  source 1..50: mol_type = other DNA
actatataacctcaaaactaaaaaacrccctaaatataaaaaaaatcaac

SEQ ID NO: 33635 - DNA, 50 bp, synthetic construct
  source 1..50: mol_type = other DNA
aaccctactacccatcaactcaaaactatataacctcaaaactaaaaaac

SEQ ID NO: 33636 - DNA, 50 bp, synthetic construct
  source 1..50: mol_type = other DNA
tctaaaaccacacaatcctaaactaataaacaacaaaacccaaaccccac

SEQ ID NO: 33637 - DNA, 50 bp, synthetic construct
  source 1..50: mol_type = other DNA
actaaaaaaatccctcaactataatataccccraaaacratcataaaatc

SEQ ID NO: 33638 - DNA, 50 bp, synthetic construct
  source 1..50: mol_type = other DNA
aaaacccctactactaaaaaaatccctcaactataatataccccraaaac

SEQ ID NO: 33639 - DNA, 50 bp, synthetic construct
  source 1..50: mol_type = other DNA
raactcaaaacccctactactaaaaaaatccctcaactataatatacccc

SEQ ID NO: 33640 - DNA, 50 bp, synthetic construct
  source 1..50: mol_type = other DNA
raaatacaccataactaaaaaacccctccaacaacaaaaaccctaaactc

SEQ ID NO: 33641 - DNA, 50 bp, synthetic construct
  source 1..50: mol_type = other DNA
aaaattaccrcctaaaaaaaacrtccacaaacrtaaaaaactcaaaaacc

SEQ ID NO: 33642 - DNA, 50 bp, synthetic construct
  source 1..50: mol_type = other DNA
ataaactccaaatcacataccatatataaaaccctccccttaaaaaaccc

SEQ ID NO: 33643 - DNA, 50 bp, synthetic construct
  source 1..50: mol_type = other DNA
aacctaaaatccataccttaaaaacctaacaaaatataaaaacctaaacc

SEQ ID NO: 33644 - DNA, 50 bp, synthetic construct
  source 1..50: mol_type = other DNA
ctaacctaataaaactcctaacracraaatcaaatatcaaacaaaaccac

SEQ ID NO: 33645 - DNA, 50 bp, synthetic construct
  source 1..50: mol_type = other DNA
aaactataaaatcaactaaacaaccctaacctaataaaactcctaacrac

SEQ ID NO: 33646 - DNA, 50 bp, synthetic construct
  source 1..50: mol_type = other DNA
ataaaactataaaatcaactaaacaaccctaacctaataaaactcctaac

SEQ ID NO: 33647 - DNA, 50 bp, synthetic construct
  source 1..50: mol_type = other DNA
taaaaaaaaccctaaaaaaaaaccttaatacttcatcccaaaccaacccc

SEQ ID NO: 33648 - DNA, 50 bp, synthetic construct
  source 1..50: mol_type = other DNA
acttcatcccaaaccaaccccraaaataaaaaccacaaaaccaaaaaaac

SEQ ID NO: 33649 - DNA, 50 bp, synthetic construct
  source 1..50: mol_type = other DNA
ctattctcaaaaacaacaatactaccttaaaaatacccracaccctactc

SEQ ID NO: 33650 - DNA, 50 bp, synthetic construct
  source 1..50: mol_type = other DNA
ctaaacttccttctattctcaaaaacaacaatactaccttaaaaataccc

SEQ ID NO: 33651 - DNA, 50 bp, synthetic construct
  source 1..50: mol_type = other DNA
cccaaaatcaaaaccaaataaaataataataattactaacactcaatccc

SEQ ID NO: 33652 - DNA, 50 bp, synthetic construct
  source 1..50: mol_type = other DNA
taaaatctaaaatctaattccccaaatataatttcttcctaaaaaacatc

SEQ ID NO: 33653 - DNA, 50 bp, synthetic construct
  source 1..50: mol_type = other DNA
aaaccrtaaatataatacctcccraaacacaaaaactctacaaaaaaatc

SEQ ID NO: 33654 - DNA, 50 bp, synthetic construct
  source 1..50: mol_type = other DNA
taacctaacrctatatactacaaatctaaatcaaccccaaaaaaaccacc

SEQ ID NO: 33655 - DNA, 50 bp, synthetic construct
  source 1..50: mol_type = other DNA
aaaaaaaacrataacttctctaaaactaacccaaacctacaatacacaac

SEQ ID NO: 33656 - DNA, 50 bp, synthetic construct
  source 1..50: mol_type = other DNA
ctcaataaccractttactcctaactaaccrttcaaaaacctaaatttcc

SEQ ID NO: 33657 - DNA, 50 bp, synthetic construct
  source 1..50: mol_type = other DNA
aaccaaaaacaaaaccraccactaaatacraaaacaaactccraaaacac

SEQ ID NO: 33658 - DNA, 50 bp, synthetic construct
  source 1..50: mol_type = other DNA
aacacrctcccactccttttaaaaacccaaaaactataaataaaaaactc

SEQ ID NO: 33659 - DNA, 50 bp, synthetic construct
  source 1..50: mol_type = other DNA
aaaaccaaataatctaaaaaccctaaccacattcctacccacaaatctcc

SEQ ID NO: 33660 - DNA, 50 bp, synthetic construct
  source 1..50: mol_type = other DNA
acttaaattacttaccractttaaaacaccaaaaactaccaccctcaaac

SEQ ID NO: 33661 - DNA, 50 bp, synthetic construct
  source 1..50: mol_type = other DNA
aaaaccacaaatctacrtttaaaaataacaacccctaatattccaaaatc

SEQ ID NO: 33662 - DNA, 50 bp, synthetic construct
  source 1..50: mol_type = other DNA
caaataaatacaaaaactctcraaataaccctaaaatctaaacacccaac

SEQ ID NO: 33663 - DNA, 50 bp, synthetic construct
  source 1..50: mol_type = other DNA
rccaaaaacttaaaaaaactacraacccccaaataaatacaaaaactctc

SEQ ID NO: 33664 - DNA, 50 bp, synthetic construct
  source 1..50: mol_type = other DNA
ttatcaaatcctaaaataactactacccrccaaaaacttaaaaaaactac

SEQ ID NO: 33665 - DNA, 50 bp, synthetic construct
  source 1..50: mol_type = other DNA
accraaacattttcraaaacttttatcaaatcctaaaataactactaccc

SEQ ID NO: 33666 - DNA, 50 bp, synthetic construct
  source 1..50: mol_type = other DNA
aataactatcratattacccraatataactaaactaaccraaacattttc

SEQ ID NO: 33667 - DNA, 50 bp, synthetic construct
  source 1..50: mol_type = other DNA
ccctaataaaaaataactatcratattacccraatataactaaactaacc

SEQ ID NO: 33668 - DNA, 50 bp, synthetic construct
  source 1..50: mol_type = other DNA
actcaactaaacrctaaaaccctaataaaaaataactatcratattaccc

SEQ ID NO: 33669 - DNA, 50 bp, synthetic construct
  source 1..50: mol_type = other DNA
aaccaaaatattttcactaataaaacaaaaacccaaccccraaaactacc

SEQ ID NO: 33670 - DNA, 50 bp, synthetic construct
  source 1..50: mol_type = other DNA
acatcactataaccaaaatattttcactaataaaacaaaaacccaacccc

SEQ ID NO: 33671 - DNA, 50 bp, synthetic construct
  source 1..50: mol_type = other DNA
aaactaaacccctaccccaccaataaaaacattctaatcacaataatacc

SEQ ID NO: 33672 - DNA, 50 bp, synthetic construct
  source 1..50: mol_type = other DNA
caataaaaacattctaatcacaataataccrccctaaaaaactcctcacc

SEQ ID NO: 33673 - DNA, 50 bp, synthetic construct
  source 1..50: mol_type = other DNA
rcaacctccctacrctataaaaaaaccaaacttcrtaaaaacaaacaacc

SEQ ID NO: 33674 - DNA, 50 bp, synthetic construct
  source 1..50: mol_type = other DNA
ttacatatcaaataaactaaaaaaaactacctctaaaatctactacrctc

SEQ ID NO: 33675 - DNA, 50 bp, synthetic construct
  source 1..50: mol_type = other DNA
tcctttacatatcaaataaactaaaaaaaactacctctaaaatctactac

SEQ ID NO: 33676 - DNA, 50 bp, synthetic construct
  source 1..50: mol_type = other DNA
ccttataattaacctccatccccaacaaaaacaaacrtccaaataaaacc

SEQ ID NO: 33677 - DNA, 50 bp, synthetic construct
  source 1..50: mol_type = other DNA
tcacttaaacrcttattcttactaaaaataaaaatcaatcacaaaactcc

SEQ ID NO: 33678 - DNA, 50 bp, synthetic construct
  source 1..50: mol_type = other DNA
crcttattcttactaaaaataaaaatcaatcacaaaactccraaaaacac

SEQ ID NO: 33679 - DNA, 50 bp, synthetic construct
  source 1..50: mol_type = other DNA
caaaacataaaaatactaaaccctaactaaaatcaacaaatcraactaac

SEQ ID NO: 33680 - DNA, 50 bp, synthetic construct
  source 1..50: mol_type = other DNA
ccaccccatcactcataaaattatccaaaacaaaaaacccaaaaaaatcc

SEQ ID NO: 33681 - DNA, 50 bp, synthetic construct
  source 1..50: mol_type = other DNA
aaatacctaataatccaaacraaaaccccrtaaaaactcaacataacaac

SEQ ID NO: 33682 - DNA, 50 bp, synthetic construct
  source 1..50: mol_type = other DNA
cacaaaaaccaatcaacctaaaaatacctaataatccaaacraaaacccc

SEQ ID NO: 33683 - DNA, 50 bp, synthetic construct
  source 1..50: mol_type = other DNA
taaataacacacaaaaaccaatcaacctaaaaatacctaataatccaaac

SEQ ID NO: 33684 - DNA, 50 bp, synthetic construct
  source 1..50: mol_type = other DNA
cctacccctccraaacaataaataattcaaaaacaaaactaaacctaaac

SEQ ID NO: 33685 - DNA, 50 bp, synthetic construct
  source 1..50: mol_type = other DNA
raaacaataaataattcaaaaacaaaactaaacctaaacraaaaaccccc

SEQ ID NO: 33686 - DNA, 50 bp, synthetic construct
  source 1..50: mol_type = other DNA
aacttacatcaaaaaataataaacaactatcctatctcaacccrtaaaac

SEQ ID NO: 33687 - DNA, 50 bp, synthetic construct
  source 1..50: mol_type = other DNA
tacaaccaacttacatcaaaaaataataaacaactatcctatctcaaccc

SEQ ID NO: 33688 - DNA, 50 bp, synthetic construct
  source 1..50: mol_type = other DNA
cccttaatacaaactaactacaaactacctaaccaattcccraaaacacc

SEQ ID NO: 33689 - DNA, 50 bp, synthetic construct
  source 1..50: mol_type = other DNA
caattcccraaaacaccrtactcaaccctataataacaactaaaaattcc

SEQ ID NO: 33690 - DNA, 50 bp, synthetic construct
  source 1..50: mol_type = other DNA
cacttttattttccctaaaatacaatccacaccaaaaaaaacacctatcc

SEQ ID NO: 33691 - DNA, 50 bp, synthetic construct
  source 1..50: mol_type = other DNA
aaatacaatccacaccaaaaaaaacacctatccraaacatataactcaac

SEQ ID NO: 33692 - DNA, 50 bp, synthetic construct
  source 1..50: mol_type = other DNA
ccacaccaaaaaaaacacctatccraaacatataactcaacratttcaac

SEQ ID NO: 33693 - DNA, 50 bp, synthetic construct
  source 1..50: mol_type = other DNA
tcaacrtattctaaaacaaaccaccacaacttctaattccaaaacattcc

SEQ ID NO: 33694 - DNA, 50 bp, synthetic construct
  source 1..50: mol_type = other DNA
aaattctaaccaaaacraaaatttcraatacrtaaaccccatcaactctc

SEQ ID NO: 33695 - DNA, 50 bp, synthetic construct
  source 1..50: mol_type = other DNA
aaaaaactcaaccctacraacraaaacaaacctaaaattctaaccaaaac

SEQ ID NO: 33696 - DNA, 50 bp, synthetic construct
  source 1..50: mol_type = other DNA
acctcccaacaaaaaaacaaaataaccacraaactaacaatctactcttc

SEQ ID NO: 33697 - DNA, 50 bp, synthetic construct
  source 1..50: mol_type = other DNA
ccaactaccraattaaaacctaaaaacraaatcaccccaacctaattctc

SEQ ID NO: 33698 - DNA, 50 bp, synthetic construct
  source 1..50: mol_type = other DNA
aaccaaaacraaaaccaaattaaaataacctcrcttttaaacttcaaccc

SEQ ID NO: 33699 - DNA, 50 bp, synthetic construct
  source 1..50: mol_type = other DNA
cctccaatcactttttccacaaccraaaactatataatcaaacaacacac

SEQ ID NO: 33700 - DNA, 50 bp, synthetic construct
  source 1..50: mol_type = other DNA
aatttattacraacaaacctaaaatacctccaatcactttttccacaacc

SEQ ID NO: 33701 - DNA, 50 bp, synthetic construct
  source 1..50: mol_type = other DNA
atacacccctacttatacatatcttatacacrtatattttatatatatac

SEQ ID NO: 33702 - DNA, 50 bp, synthetic construct
  source 1..50: mol_type = other DNA
atacrtactacrtattctcatacacccctacttatacatatcttatacac

SEQ ID NO: 33703 - DNA, 50 bp, synthetic construct
  source 1..50: mol_type = other DNA
acaaaacacacrtacacaaaacatacacaaacaaaaatacataaaaacac

SEQ ID NO: 33704 - DNA, 50 bp, synthetic construct
  source 1..50: mol_type = other DNA
atatatacccrcatattacctatacacctatatccrttatacacrtatcc

SEQ ID NO: 33705 - DNA, 50 bp, synthetic construct
  source 1..50: mol_type = other DNA
ctttatatacatattatatatacccrcatattacctatacacctatatcc

SEQ ID NO: 33706 - DNA, 50 bp, synthetic construct
  source 1..50: mol_type = other DNA
acacccrtactcatacaaacrtatactttatatacatattatatataccc

SEQ ID NO: 33707 - DNA, 50 bp, synthetic construct
  source 1..50: mol_type = other DNA
tacccatattcataaatcrattatatatatctatattttatatattaccc

SEQ ID NO: 33708 - DNA, 50 bp, synthetic construct
  source 1..50: mol_type = other DNA
tatacrtatctatacatccrtatttatatattatatatacctatacaccc

SEQ ID NO: 33709 - DNA, 50 bp, synthetic construct
  source 1..50: mol_type = other DNA
tcatacrcrtatattttataaatacacattatatacrtatctatacatcc

SEQ ID NO: 33710 - DNA, 50 bp, synthetic construct
  source 1..50: mol_type = other DNA
ctataactatatactcctatacatatatatattactcrtatatttcatac

SEQ ID NO: 33711 - DNA, 50 bp, synthetic construct
  source 1..50: mol_type = other DNA
taaatatacrtacctataactatatactcctatacatatatatattactc

SEQ ID NO: 33712 - DNA, 50 bp, synthetic construct
  source 1..50: mol_type = other DNA
aaataataccaaaactaaaactaaaaaatccaaattttccccaaatcccc

SEQ ID NO: 33713 - DNA, 50 bp, synthetic construct
  source 1..50: mol_type = other DNA
ttttaaaacaaaatttcactcttattacccaaacataaatacaataatac

SEQ ID NO: 33714 - DNA, 50 bp, synthetic construct
  source 1..50: mol_type = other DNA
aacaaaatttcactcttattacccaaacataaatacaataatacratttc

SEQ ID NO: 33715 - DNA, 50 bp, synthetic construct
  source 1..50: mol_type = other DNA
atcctcaactaactcaaaaaaatcaacttaacccaaaaattcaacataac

SEQ ID NO: 33716 - DNA, 50 bp, synthetic construct
  source 1..50: mol_type = other DNA
actactccaactccaaaatacaaacttcaaaacctatacccctaatttcc

SEQ ID NO: 33717 - DNA, 50 bp, synthetic construct
  source 1..50: mol_type = other DNA
taaacactaaaacatcaaaaaaacctcrtaaaaacacacccttcccaacc

SEQ ID NO: 33718 - DNA, 50 bp, synthetic construct
  source 1..50: mol_type = other DNA
acaccttctacccraatccaaactaaacactaaaacatcaaaaaaacctc

SEQ ID NO: 33719 - DNA, 50 bp, synthetic construct
  source 1..50: mol_type = other DNA
acraaatttattaaacttcccacacacaaaaaaaactttttccctacaac

SEQ ID NO: 33720 - DNA, 50 bp, synthetic construct
  source 1..50: mol_type = other DNA
aaaacttatctaaaaaattccaaacactcrctacraaacacaatctaaac

SEQ ID NO: 33721 - DNA, 50 bp, synthetic construct
  source 1..50: mol_type = other DNA
acctcctttatatataaaaaatttaataaactccrctcaaattatatctc

SEQ ID NO: 33722 - DNA, 50 bp, synthetic construct
  source 1..50: mol_type = other DNA
caactaaaaaaccraacrcctaaaacttatctaaaaaattccaaacactc

SEQ ID NO: 33723 - DNA, 50 bp, synthetic construct
  source 1..50: mol_type = other DNA
aaattatatctcrcaacraatatctaaaaccttccaaacaaacctcaaac

SEQ ID NO: 33724 - DNA, 50 bp, synthetic construct
  source 1..50: mol_type = other DNA
caactcrcraaaatcctctttaccataaatccaaacatctaccaatcatc

SEQ ID NO: 33725 - DNA, 50 bp, synthetic construct
  source 1..50: mol_type = other DNA
aaccrcctaaaatataaaaacctacaaaatccaaaactaactcccaactc

SEQ ID NO: 33726 - DNA, 50 bp, synthetic construct
  source 1..50: mol_type = other DNA
cacataactaacrcaaaaacctcaacaaatactaaaaccccataaaaacc

SEQ ID NO: 33727 - DNA, 50 bp, synthetic construct
  source 1..50: mol_type = other DNA
aaaaaacacaaacaaaaacctcraaaacacccaaacctcacataactaac

SEQ ID NO: 33728 - DNA, 50 bp, synthetic construct
  source 1..50: mol_type = other DNA
taaaacctaaatatcctcraaacctctatttatacccctctctaaacaac

SEQ ID NO: 33729 - DNA, 50 bp, synthetic construct
  source 1..50: mol_type = other DNA
ttaacaaaaaacccaaacataaaacataaaaaacaactaaaaaaccaaac

SEQ ID NO: 33730 - DNA, 50 bp, synthetic construct
  source 1..50: mol_type = other DNA
tacacaaccrtataaatatacttaataccactaaattatacactataaac

SEQ ID NO: 33731 - DNA, 50 bp, synthetic construct
  source 1..50: mol_type = other DNA
cattaaatacattcacacractatacaaccactacttctaattccaaaac

SEQ ID NO: 33732 - DNA, 50 bp, synthetic construct
  source 1..50: mol_type = other DNA
aaatacattcacacractatacaaccactacttctaattccaaaacrttc

SEQ ID NO: 33733 - DNA, 50 bp, synthetic construct
  source 1..50: mol_type = other DNA
taactctaaattaacttatcctaaatattacataaaaataaaatcctatc

SEQ ID NO: 33734 - DNA, 50 bp, synthetic construct
  source 1..50: mol_type = other DNA
tctaaattaacttatcctaaatattacataaaaataaaatcctatcracc

SEQ ID NO: 33735 - DNA, 50 bp, synthetic construct
  source 1..50: mol_type = other DNA
aattaacttatcctaaatattacataaaaataaaatcctatcraccraac

SEQ ID NO: 33736 - DNA, 50 bp, synthetic construct
  source 1..50: mol_type = other DNA
cccaaactaatctcrtttaaactactaaactcaaatcatctacccacctc

SEQ ID NO: 33737 - DNA, 50 bp, synthetic construct
  source 1..50: mol_type = other DNA
tttttatattttaataaaaacaatttcaccrtactacccaaactaatctc

SEQ ID NO: 33738 - DNA, 50 bp, synthetic construct
  source 1..50: mol_type = other DNA
aacaaataacttaaacctaataattcaaacraaaccaacctaaacaacac

SEQ ID NO: 33739 - DNA, 50 bp, synthetic construct
  source 1..50: mol_type = other DNA
cctttaatatctcactataacatcctcaaaatacaactaaactataactc

SEQ ID NO: 33740 - DNA, 50 bp, synthetic construct
  source 1..50: mol_type = other DNA
aactcraatcaaaacctcactaatttttataactaaatcttattaaatac

SEQ ID NO: 33741 - DNA, 50 bp, synthetic construct
  source 1..50: mol_type = other DNA
tttttataactaaatcttattaaatacrtaaataaactatactaatcctc

SEQ ID NO: 33742 - DNA, 50 bp, synthetic construct
  source 1..50: mol_type = other DNA
actatactaatcctcrtctataaaaaaacccctaaataattccacatctc

SEQ ID NO: 33743 - DNA, 50 bp, synthetic construct
  source 1..50: mol_type = other DNA
cctcrtctataaaaaaacccctaaataattccacatctcractactatac

SEQ ID NO: 33744 - DNA, 50 bp, synthetic construct
  source 1..50: mol_type = other DNA
aaataattccacatctcractactatacrtcctactactataaacatctc

SEQ ID NO: 33745 - DNA, 50 bp, synthetic construct
  source 1..50: mol_type = other DNA
tataaaccaacaactccactcccaaatacacaccctaaaaaacaatacac

SEQ ID NO: 33746 - DNA, 50 bp, synthetic construct
  source 1..50: mol_type = other DNA
aataaaactactaactcacaaaataacaaacctttaaaaaaactacaaac

SEQ ID NO: 33747 - DNA, 50 bp, synthetic construct
  source 1..50: mol_type = other DNA
tactaactcacaaaataacaaacctttaaaaaaactacaaacrcttccac

SEQ ID NO: 33748 - DNA, 50 bp, synthetic construct
  source 1..50: mol_type = other DNA
aaattataatcaaaaaaactatatctccacaactctactactattaaaac

SEQ ID NO: 33749 - DNA, 50 bp, synthetic construct
  source 1..50: mol_type = other DNA
aaaccaaaaatcaacaaacttttcccatcaaaccccraataataatattc

SEQ ID NO: 33750 - DNA, 50 bp, synthetic construct
  source 1..50: mol_type = other DNA
ataaatattaaactaaaccaaaaatcaacaaacttttcccatcaaacccc

SEQ ID NO: 33751 - DNA, 50 bp, synthetic construct
  source 1..50: mol_type = other DNA
acctaataaaaaaaatctactaacccctaacccaatccaacacttacttc

SEQ ID NO: 33752 - DNA, 50 bp, synthetic construct
  source 1..50: mol_type = other DNA
caaacaaaaaacctcraccaaaatcacacaacaactaataatctaccaac

SEQ ID NO: 33753 - DNA, 50 bp, synthetic construct
  source 1..50: mol_type = other DNA
caaaaaacctcraccaaaatcacacaacaactaataatctaccaacraac

SEQ ID NO: 33754 - DNA, 50 bp, synthetic construct
  source 1..50: mol_type = other DNA
ttatttttcattatctcaaactcatacctaaaacttatttttttaaaatc

SEQ ID NO: 33755 - DNA, 50 bp, synthetic construct
  source 1..50: mol_type = other DNA
ttctaatatttcccctaaaaaacacatatcatttacataaaataaaaaac

SEQ ID NO: 33756 - DNA, 50 bp, synthetic construct
  source 1..50: mol_type = other DNA
taataaaaaataacccctattaaaaatttcattaatatctaccacaaacc

SEQ ID NO: 33757 - DNA, 50 bp, synthetic construct
  source 1..50: mol_type = other DNA
caacctcaccttcaaaaatctatccrtactttaaaaaaacctactccaac

SEQ ID NO: 33758 - DNA, 50 bp, synthetic construct
  source 1..50: mol_type = other DNA
tcttctcaaaatacraacaaatctctaaaaataaaactactactaaaccc

SEQ ID NO: 33759 - DNA, 50 bp, synthetic construct
  source 1..50: mol_type = other DNA
cctataaaaatcraattcraataaaaaaccacrtatacacccaaaaaacc

SEQ ID NO: 33760 - DNA, 50 bp, synthetic construct
  source 1..50: mol_type = other DNA
aaccacrtatacacccaaaaaaccraatctataattcaaaaaaatctatc

SEQ ID NO: 33761 - DNA, 50 bp, synthetic construct
  source 1..50: mol_type = other DNA
aaataaaaccraataccracaaccraaaaacctaaaatcctaatataaac

SEQ ID NO: 33762 - DNA, 50 bp, synthetic construct
  source 1..50: mol_type = other DNA
cactactaaccccttctcataaaacaaatttcaattcaaatacccraaac

SEQ ID NO: 33763 - DNA, 50 bp, synthetic construct
  source 1..50: mol_type = other DNA
aactaaaacctacctcataaaaaaaaaccaacaatatacaaatataaaac

SEQ ID NO: 33764 - DNA, 50 bp, synthetic construct
  source 1..50: mol_type = other DNA
cctcataaaaaaaaaccaacaatatacaaatataaaacraaatatccccc

SEQ ID NO: 33765 - DNA, 50 bp, synthetic construct
  source 1..50: mol_type = other DNA
taaaacraaatatcccccrcaaaacaacaaccaatatacaaatataaaac

SEQ ID NO: 33766 - DNA, 50 bp, synthetic construct
  source 1..50: mol_type = other DNA
caaaatcctattcttaaccaccctatactacrtacracattaactcatac

SEQ ID NO: 33767 - DNA, 50 bp, synthetic construct
  source 1..50: mol_type = other DNA
aaatcaaaacctattcctccacttttaaaaaacaccaaaatatacctctc

SEQ ID NO: 33768 - DNA, 50 bp, synthetic construct
  source 1..50: mol_type = other DNA
aaaataaaaaaacaaactctaactttaaattccrcttccctaaaaaaaac

SEQ ID NO: 33769 - DNA, 50 bp, synthetic construct
  source 1..50: mol_type = other DNA
actctaactttaaattccrcttccctaaaaaaaacrttaatttattcaac

SEQ ID NO: 33770 - DNA, 50 bp, synthetic construct
  source 1..50: mol_type = other DNA
aacacaaaaaaatccatcctaaaatcaaaaactctacccatacccctaac

SEQ ID NO: 33771 - DNA, 50 bp, synthetic construct
  source 1..50: mol_type = other DNA
rtataataaaatataaaaaatccctctctaaatcctaataaatttaacac

SEQ ID NO: 33772 - DNA, 50 bp, synthetic construct
  source 1..50: mol_type = other DNA
acrcraaccctacataataaatataataaacaatatcctcctttaaaaac

SEQ ID NO: 33773 - DNA, 50 bp, synthetic construct
  source 1..50: mol_type = other DNA
aaaaaattaaaaaattaacaccaacaaataacctaaaacrctcaaaacac

SEQ ID NO: 33774 - DNA, 50 bp, synthetic construct
  source 1..50: mol_type = other DNA
aaaattaaaaaattaacaccaacaaataacctaaaacrctcaaaacacrc

SEQ ID NO: 33775 - DNA, 50 bp, synthetic construct
  source 1..50: mol_type = other DNA
ccaaactttaaaataacttcacaaaaccaaaaaaaacacactaaaaactc

SEQ ID NO: 33776 - DNA, 50 bp, synthetic construct
  source 1..50: mol_type = other DNA
caatataccctccctaaccttataaaatcatcttaaaatctaacttaaac

SEQ ID NO: 33777 - DNA, 50 bp, synthetic construct
  source 1..50: mol_type = other DNA
aaaatctaacttaaacrcctctaacttaaattctaaaaaactaacacaac

SEQ ID NO: 33778 - DNA, 50 bp, synthetic construct
  source 1..50: mol_type = other DNA
aatctaacttaaacrcctctaacttaaattctaaaaaactaacacaacrc

SEQ ID NO: 33779 - DNA, 50 bp, synthetic construct
  source 1..50: mol_type = other DNA
aaatacaaaacacactaaaacatctcrcaacaacactacatctaaaacac

SEQ ID NO: 33780 - DNA, 50 bp, synthetic construct
  source 1..50: mol_type = other DNA
ctaacaaacatctactactatacccaaaaacttaaccrctacatctctac

SEQ ID NO: 33781 - DNA, 50 bp, synthetic construct
  source 1..50: mol_type = other DNA
cccaaaatacccactaacaaacatctactactatacccaaaaacttaacc

SEQ ID NO: 33782 - DNA, 50 bp, synthetic construct
  source 1..50: mol_type = other DNA
cctaaacacaacaacaaatacctaccaataaacactttaaaataaacaac

SEQ ID NO: 33783 - DNA, 50 bp, synthetic construct
  source 1..50: mol_type = other DNA
aaaattaactcccraaaaaaaacaactccctaaaaactacacttaaacrc

SEQ ID NO: 33784 - DNA, 50 bp, synthetic construct
  source 1..50: mol_type = other DNA
acaaaattaactcccraaaaaaaacaactccctaaaaactacacttaaac

SEQ ID NO: 33785 - DNA, 50 bp, synthetic construct
  source 1..50: mol_type = other DNA
cctacttccaaataacctaaaaccctaaatacacatacaaattcccaacc

SEQ ID NO: 33786 - DNA, 50 bp, synthetic construct
  source 1..50: mol_type = other DNA
acaaattcccaaccrccctaaaaaccataaactcctcaaaataaaaaatc

SEQ ID NO: 33787 - DNA, 50 bp, synthetic construct
  source 1..50: mol_type = other DNA
ctcaaaataaaaaatcrcttcraaaaaacccaatacacaaaataaaccac

SEQ ID NO: 33788 - DNA, 50 bp, synthetic construct
  source 1..50: mol_type = other DNA
aaaaaaaaatcrttttaaaatcccaatcatccaaccaactatattaacac

SEQ ID NO: 33789 - DNA, 50 bp, synthetic construct
  source 1..50: mol_type = other DNA
ctaaaaacctaaacaaaaaatcctaaaatataaataccaaaaccaacctc

SEQ ID NO: 33790 - DNA, 50 bp, synthetic construct
  source 1..50: mol_type = other DNA
taaacaaaaaatcctaaaatataaataccaaaaccaacctcractaacac

SEQ ID NO: 33791 - DNA, 50 bp, synthetic construct
  source 1..50: mol_type = other DNA
cctaaacaactttaaaaacctaactactaaacccraaactacctccaaac

SEQ ID NO: 33792 - DNA, 50 bp, synthetic construct
  source 1..50: mol_type = other DNA
ttaaaaaaacttttcccaaaattctaaaatcctcacctaacttccraaac

SEQ ID NO: 33793 - DNA, 50 bp, synthetic construct
  source 1..50: mol_type = other DNA
tttttttaaaaaaacttttcccaaaattctaaaatcctcacctaacttcc

SEQ ID NO: 33794 - DNA, 50 bp, synthetic construct
  source 1..50: mol_type = other DNA
acctcatctataaaacaaaatcccaaccataactcaaacacaacaaaccc

SEQ ID NO: 33795 - DNA, 50 bp, synthetic construct
  source 1..50: mol_type = other DNA
ctcaaacacaacaaacccraaacctctaatataaaatctaaaaaaaaccc

SEQ ID NO: 33796 - DNA, 50 bp, synthetic construct
  source 1..50: mol_type = other DNA
ttacaaataaaccaactaaaacacactaaaaaaaccccacctataatttc

SEQ ID NO: 33797 - DNA, 50 bp, synthetic construct
  source 1..50: mol_type = other DNA
aaactcaactaacttaaccaaacataattaaacccaaacrcaatacraac

SEQ ID NO: 33798 - DNA, 50 bp, synthetic construct
  source 1..50: mol_type = other DNA
aaaaaaactcaactaacttaaccaaacataattaaacccaaacrcaatac

SEQ ID NO: 33799 - DNA, 50 bp, synthetic construct
  source 1..50: mol_type = other DNA
aaacccaaaaaaaactcaactaacttaaccaaacataattaaacccaaac

SEQ ID NO: 33800 - DNA, 50 bp, synthetic construct
  source 1..50: mol_type = other DNA
ccatcrtcctaaaaattcaaaaacaacaaaaacccaacaaaaacaaaaac

SEQ ID NO: 33801 - DNA, 50 bp, synthetic construct
  source 1..50: mol_type = other DNA
aataccaaaataaacctaaaccataaaatcacctaactaatatctatccc

SEQ ID NO: 33802 - DNA, 50 bp, synthetic construct
  source 1..50: mol_type = other DNA
ctaaaccataaaatcacctaactaatatctatcccrtcacccaaaacccc

SEQ ID NO: 33803 - DNA, 50 bp, synthetic construct
  source 1..50: mol_type = other DNA
tataaattttccaaaacacacttattcaaaccctacaacaacrttctccc

SEQ ID NO: 33804 - DNA, 50 bp, synthetic construct
  source 1..50: mol_type = other DNA
cacttaatataacccraaaccaaaccacctaaaaataaaaccaacttccc

SEQ ID NO: 33805 - DNA, 50 bp, synthetic construct
  source 1..50: mol_type = other DNA
aaaaccccrcaaaaataacracaaaaaaaaccaacactctattccaaaac

SEQ ID NO: 33806 - DNA, 50 bp, synthetic construct
  source 1..50: mol_type = other DNA
aaaaaaaccraaaataaaaattaacctaacaacctaaaacctaaaaaccc

SEQ ID NO: 33807 - DNA, 50 bp, synthetic construct
  source 1..50: mol_type = other DNA
accraaaataaaaattaacctaacaacctaaaacctaaaaacccraactc

SEQ ID NO: 33808 - DNA, 50 bp, synthetic construct
  source 1..50: mol_type = other DNA
aaattcrcaacaacttaaaaataaaactacctaaaaccaaaaccaacatc

SEQ ID NO: 33809 - DNA, 50 bp, synthetic construct
  source 1..50: mol_type = other DNA
caacaacttaaaaataaaactacctaaaaccaaaaccaacatcrcrcacc

SEQ ID NO: 33810 - DNA, 50 bp, synthetic construct
  source 1..50: mol_type = other DNA
cttcatcacaatatcttataaaactaataccacataaatcaaataaaatc

SEQ ID NO: 33811 - DNA, 50 bp, synthetic construct
  source 1..50: mol_type = other DNA
taaaaaaatcaaaactaatacctaaattctcrcaatcaaaaattaaccrc

SEQ ID NO: 33812 - DNA, 50 bp, synthetic construct
  source 1..50: mol_type = other DNA
aactaatacctaaattctcrcaatcaaaaattaaccrcrctaaactaaac

SEQ ID NO: 33813 - DNA, 50 bp, synthetic construct
  source 1..50: mol_type = other DNA
aaacaaattaaaaactaaatatattttctaaataaacatacccaaatccc

SEQ ID NO: 33814 - DNA, 50 bp, synthetic construct
  source 1..50: mol_type = other DNA
caaattaaaaactaaatatattttctaaataaacatacccaaatcccrac

SEQ ID NO: 33815 - DNA, 50 bp, synthetic construct
  source 1..50: mol_type = other DNA
aattaaaaactaaatatattttctaaataaacatacccaaatcccracrc

SEQ ID NO: 33816 - DNA, 50 bp, synthetic construct
  source 1..50: mol_type = other DNA
aacctaaactaaaaaccracataactccaaacaaataaatcaaaccctac

SEQ ID NO: 33817 - DNA, 50 bp, synthetic construct
  source 1..50: mol_type = other DNA
taaaccacaaacactccactatctccaaaataaaaaacaaacacaacctc

SEQ ID NO: 33818 - DNA, 50 bp, synthetic construct
  source 1..50: mol_type = other DNA
atttatcttttaccctaaaaacaataaaatatttataacctaacaaaacc

SEQ ID NO: 33819 - DNA, 50 bp, synthetic construct
  source 1..50: mol_type = other DNA
atcttttaccctaaaaacaataaaatatttataacctaacaaaaccrtac

SEQ ID NO: 33820 - DNA, 50 bp, synthetic construct
  source 1..50: mol_type = other DNA
ataaaatatttataacctaacaaaaccrtacraacctctcratcctaatc

SEQ ID NO: 33821 - DNA, 50 bp, synthetic construct
  source 1..50: mol_type = other DNA
aaaataaaacaataaactaaactcttaacatcrtttcctaaaaaatcctc

SEQ ID NO: 33822 - DNA, 50 bp, synthetic construct
  source 1..50: mol_type = other DNA
tacctaccaataactctaaaaataaaacaataaactaaactcttaacatc

SEQ ID NO: 33823 - DNA, 50 bp, synthetic construct
  source 1..50: mol_type = other DNA
caaaccttaaatcctaaatcccaaactctaaaccccaaacttcaaactcc

SEQ ID NO: 33824 - DNA, 50 bp, synthetic construct
  source 1..50: mol_type = other DNA
cataacctaaaaccraaaaactacraataaacraacaaaatacaaaccac

SEQ ID NO: 33825 - DNA, 50 bp, synthetic construct
  source 1..50: mol_type = other DNA
tacraataaacraacaaaatacaaaccacrtacactaacactcaacaaac

SEQ ID NO: 33826 - DNA, 50 bp, synthetic construct
  source 1..50: mol_type = other DNA
tacatatcaccacccccractaatttttatatttactatttaataaaaac

SEQ ID NO: 33827 - DNA, 50 bp, synthetic construct
  source 1..50: mol_type = other DNA
caaaatatacaccctaaaaaacaccctaaaaaaaccttataaccraacrc

SEQ ID NO: 33828 - DNA, 50 bp, synthetic construct
  source 1..50: mol_type = other DNA
cccaaaatatacaccctaaaaaacaccctaaaaaaaccttataaccraac

SEQ ID NO: 33829 - DNA, 50 bp, synthetic construct
  source 1..50: mol_type = other DNA
ccttcccaaaatatacaccctaaaaaacaccctaaaaaaaccttataacc

SEQ ID NO: 33830 - DNA, 50 bp, synthetic construct
  source 1..50: mol_type = other DNA
aaaaatccatcccctaatattaccttaaaataaactccttaacattaacc

SEQ ID NO: 33831 - DNA, 50 bp, synthetic construct
  source 1..50: mol_type = other DNA
tcccctaatattaccttaaaataaactccttaacattaaccracctctac

SEQ ID NO: 33832 - DNA, 50 bp, synthetic construct
  source 1..50: mol_type = other DNA
accttaaaataaactccttaacattaaccracctctacrtaactaaaaac

SEQ ID NO: 33833 - DNA, 50 bp, synthetic construct
  source 1..50: mol_type = other DNA
taccctaactaaatccaaataaaataacaaatacaatccctccaactaac

SEQ ID NO: 33834 - DNA, 50 bp, synthetic construct
  source 1..50: mol_type = other DNA
aaaacacaaaaaaacattaatcaacraaattatccacacctaaaaataac

SEQ ID NO: 33835 - DNA, 50 bp, synthetic construct
  source 1..50: mol_type = other DNA
aataacrtaaaaaccctaacttcaaaaaactactacccaacacaaaaaac

SEQ ID NO: 33836 - DNA, 50 bp, synthetic construct
  source 1..50: mol_type = other DNA
taaaaaaacaactacattcctaaaaaacccttaacccacatccccaacac

SEQ ID NO: 33837 - DNA, 50 bp, synthetic construct
  source 1..50: mol_type = other DNA
caacrtctccataataaccaaaacaccctcttcctacaaaatccaaaaac

SEQ ID NO: 33838 - DNA, 50 bp, synthetic construct
  source 1..50: mol_type = other DNA
aacctaaaccaaatatattcrccctaaattaaaatcaatcccacaacaac

SEQ ID NO: 33839 - DNA, 50 bp, synthetic construct
  source 1..50: mol_type = other DNA
actaccttcrcaaatatttaacaaataaaaatcraaaaccaataaaaacc

SEQ ID NO: 33840 - DNA, 50 bp, synthetic construct
  source 1..50: mol_type = other DNA
ctcatcttaataaattacaactacaaaatacaaaccctatcctcacttac

SEQ ID NO: 33841 - DNA, 50 bp, synthetic construct
  source 1..50: mol_type = other DNA
ccctcttataaaaataccaatcattaaattaaaactctccctactcctac

SEQ ID NO: 33842 - DNA, 50 bp, synthetic construct
  source 1..50: mol_type = other DNA
ttaacttataaataaatcactccaatctctacctatattataacttaacc

SEQ ID NO: 33843 - DNA, 50 bp, synthetic construct
  source 1..50: mol_type = other DNA
aaataattcatccacaaatcaaataacaccaaaaataaccaactaccacc

SEQ ID NO: 33844 - DNA, 50 bp, synthetic construct
  source 1..50: mol_type = other DNA
aaactccrtcctattctactactataacttcctaacaacctaaaccacac

SEQ ID NO: 33845 - DNA, 50 bp, synthetic construct
  source 1..50: mol_type = other DNA
ccctcctctaaaaaaacaatacctaaaaaacaaaaatacaaccaaaaaac

SEQ ID NO: 33846 - DNA, 50 bp, synthetic construct
  source 1..50: mol_type = other DNA
aaacaaaaatacaaccaaaaaacraaatccaaaaaaattacccractatc

SEQ ID NO: 33847 - DNA, 50 bp, synthetic construct
  source 1..50: mol_type = other DNA
aaaaaatattaaaaacrtatcctaactaaacaaatacaaaccctaacacc

SEQ ID NO: 33848 - DNA, 50 bp, synthetic construct
  source 1..50: mol_type = other DNA
acaaatataaaaaaccrataccaaaacctatatctacccaatcaaaacac

SEQ ID NO: 33849 - DNA, 50 bp, synthetic construct
  source 1..50: mol_type = other DNA
actaccatcctattcctaataaaacaaataactataacctatttatttcc

SEQ ID NO: 33850 - DNA, 50 bp, synthetic construct
  source 1..50: mol_type = other DNA
actataacctatttatttccrtaacaaatcccctaaaaaccaaaaaatac

SEQ ID NO: 33851 - DNA, 50 bp, synthetic construct
  source 1..50: mol_type = other DNA
acaaaaaccctacaaccccaaaaaactaaaaactaaatactcctaaaaac

SEQ ID NO: 33852 - DNA, 50 bp, synthetic construct
  source 1..50: mol_type = other DNA
caatccctaaaccaaacccaaaataaaaaaacccctatatttcctaaatc

SEQ ID NO: 33853 - DNA, 50 bp, synthetic construct
  source 1..50: mol_type = other DNA
acctaacrtcataaattcccaaaaatctaaaaatcctactcacctaaaac

SEQ ID NO: 33854 - DNA, 50 bp, synthetic construct
  source 1..50: mol_type = other DNA
aaatccataacrccaaatatctaaattctatctccaaaacaaaataaaac

SEQ ID NO: 33855 - DNA, 50 bp, synthetic construct
  source 1..50: mol_type = other DNA
aaaaacttcaatacaaaaaacaaatctaaaactaaccacacctactaccc

SEQ ID NO: 33856 - DNA, 50 bp, synthetic construct
  source 1..50: mol_type = other DNA
actaaacracctaaccctaaaaaaactacaaatacaaaataaatacccac

SEQ ID NO: 33857 - DNA, 50 bp, synthetic construct
  source 1..50: mol_type = other DNA
accaaatcrcccaacaaaacctaaaaaaacractatatataaaaccttcc

SEQ ID NO: 33858 - DNA, 50 bp, synthetic construct
  source 1..50: mol_type = other DNA
aactaaaaacrtaattacaaaaatcaatatttcataaactttctttttcc

SEQ ID NO: 33859 - DNA, 50 bp, synthetic construct
  source 1..50: mol_type = other DNA
ttaaaataaactaaaaattaaatcaatttccatttctttcaactaaaaac

SEQ ID NO: 33860 - DNA, 50 bp, synthetic construct
  source 1..50: mol_type = other DNA
ctcaaaacaacaacaaaaaaaacaacactaaaaactaaactacraactac

SEQ ID NO: 33861 - DNA, 50 bp, synthetic construct
  source 1..50: mol_type = other DNA
taccaactcctcccraacctacaaaaaaatacaaacaaatctataacctc

SEQ ID NO: 33862 - DNA, 50 bp, synthetic construct
  source 1..50: mol_type = other DNA
attttcactttcaccrtatatcatttataccactaaaactctaacacccc

SEQ ID NO: 33863 - DNA, 50 bp, synthetic construct
  source 1..50: mol_type = other DNA
ctaaaacacaaaaaaactcaaactaaacctaaatattaaaaaccttaacc

SEQ ID NO: 33864 - DNA, 50 bp, synthetic construct
  source 1..50: mol_type = other DNA
ractacttctccacrcaacttattacatctaaatatttaaaatcaccatc

SEQ ID NO: 33865 - DNA, 50 bp, synthetic construct
  source 1..50: mol_type = other DNA
acttacctcrcttcttataactatatattaaaccaatattattattaatc

SEQ ID NO: 33866 - DNA, 50 bp, synthetic construct
  source 1..50: mol_type = other DNA
ctaaaacttcrcttaaacttcaaactaccrcrttaatatatacttacctc

SEQ ID NO: 33867 - DNA, 50 bp, synthetic construct
  source 1..50: mol_type = other DNA
aaaacacrtaccctcccaaaatcacataaaatcaatatcaacacaaaaac

SEQ ID NO: 33868 - DNA, 50 bp, synthetic construct
  source 1..50: mol_type = other DNA
taaaacrcctatatataattaccataattactacctaaaactatcactac

SEQ ID NO: 33869 - DNA, 50 bp, synthetic construct
  source 1..50: mol_type = other DNA
atataatctctaatacaacrtatcctcttaaaccaaaattaaaccrtaac

SEQ ID NO: 33870 - DNA, 50 bp, synthetic construct
  source 1..50: mol_type = other DNA
ratttatataatctctaatacaacrtatcctcttaaaccaaaattaaacc

SEQ ID NO: 33871 - DNA, 50 bp, synthetic construct
  source 1..50: mol_type = other DNA
aaactaaataccaaataaaaaaaccacatcctaaaaacccaacaaaatcc

SEQ ID NO: 33872 - DNA, 50 bp, synthetic construct
  source 1..50: mol_type = other DNA
tattaaaaacacrcccatacaaaaaataaacataacccataataaatacc

SEQ ID NO: 33873 - DNA, 50 bp, synthetic construct
  source 1..50: mol_type = other DNA
aaacccaattaaccaccacaatcacratactccaaaaccaatctaaaaac

SEQ ID NO: 33874 - DNA, 50 bp, synthetic construct
  source 1..50: mol_type = other DNA
cctcaaactaaccctaaaacaccrtaactataataaccaattaaacctcc

SEQ ID NO: 33875 - DNA, 50 bp, synthetic construct
  source 1..50: mol_type = other DNA
ctctaaataataatacccaatattccacatcaaaacacccaccaaacatc

SEQ ID NO: 33876 - DNA, 50 bp, synthetic construct
  source 1..50: mol_type = other DNA
caaaactaaaattcaaaccattttccatctaacracttaaacaaataaac

SEQ ID NO: 33877 - DNA, 50 bp, synthetic construct
  source 1..50: mol_type = other DNA
aatcctaaaaactaactaaaccracaaaacttaaaactaaaaaaacccac

SEQ ID NO: 33878 - DNA, 50 bp, synthetic construct
  source 1..50: mol_type = other DNA
caaaacccacccactactcctaaaaaataaaatcctaattttaaaacccc

SEQ ID NO: 33879 - DNA, 50 bp, synthetic construct
  source 1..50: mol_type = other DNA
actactcctaaaaaataaaatcctaattttaaaaccccrtcatttcaaac

SEQ ID NO: 33880 - DNA, 50 bp, synthetic construct
  source 1..50: mol_type = other DNA
acraaaacaaaattaattttcttatttaaaaaccttaaaacaataaaacc

SEQ ID NO: 33881 - DNA, 50 bp, synthetic construct
  source 1..50: mol_type = other DNA
tatttcaaaatttttaaataaaaaaaccaaccctaccttcrcccataccc

SEQ ID NO: 33882 - DNA, 50 bp, synthetic construct
  source 1..50: mol_type = other DNA
aatacacaacccacaataaccttcaaaaactcctcctaaaactaaaaacc

SEQ ID NO: 33883 - DNA, 50 bp, synthetic construct
  source 1..50: mol_type = other DNA
caaaatttctccatattaaccaaactaatatcaaattcctaacctccaac

SEQ ID NO: 33884 - DNA, 50 bp, synthetic construct
  source 1..50: mol_type = other DNA
acctacacacrtacacatatacrtattcctaataaaaacrtaaactaaac

SEQ ID NO: 33885 - DNA, 50 bp, synthetic construct
  source 1..50: mol_type = other DNA
acaaaatacacaaattcctatcctaatccccaaaacctcaaaatataacc

SEQ ID NO: 33886 - DNA, 50 bp, synthetic construct
  source 1..50: mol_type = other DNA
ctacacccaaatttcctcttttaataaaaacaacaatcatactacrtcac

SEQ ID NO: 33887 - DNA, 50 bp, synthetic construct
  source 1..50: mol_type = other DNA
crtatctacacccaaatttcctcttttaataaaaacaacaatcatactac

SEQ ID NO: 33888 - DNA, 50 bp, synthetic construct
  source 1..50: mol_type = other DNA
taacaccccratatctacctacatcttcatataaaattctccctatatac

SEQ ID NO: 33889 - DNA, 50 bp, synthetic construct
  source 1..50: mol_type = other DNA
tactaaccaataccaaaaactaaaaaacrccaaaaacaaattctctcccc

SEQ ID NO: 33890 - DNA, 50 bp, synthetic construct
  source 1..50: mol_type = other DNA
aaacraaaaaaacracaacacaaaaatcacaaaataactaaaacaaccac

SEQ ID NO: 33891 - DNA, 50 bp, synthetic construct
  source 1..50: mol_type = other DNA
aaaaacracaacacaaaaatcacaaaataactaaaacaaccacrctacac

SEQ ID NO: 33892 - DNA, 50 bp, synthetic construct
  source 1..50: mol_type = other DNA
aaccctaaataataccaacatcraaatccaacaaaaaaacactccccttc

SEQ ID NO: 33893 - DNA, 50 bp, synthetic construct
  source 1..50: mol_type = other DNA
aaaaaaaacatttatctccatacccctaaaccctaaataataccaacatc

SEQ ID NO: 33894 - DNA, 50 bp, synthetic construct
  source 1..50: mol_type = other DNA
aacaactaaaaatactaaaacaaaccctcaaaaaaaattattataaaccc

SEQ ID NO: 33895 - DNA, 50 bp, synthetic construct
  source 1..50: mol_type = other DNA
ctaaatcaccttatctctaaaaaatttaccccattccacaaaaaaaaacc

SEQ ID NO: 33896 - DNA, 50 bp, synthetic construct
  source 1..50: mol_type = other DNA
aactaccaaacaatcctataaacaaacaaaaaataaacaaaaattccccc

SEQ ID NO: 33897 - DNA, 50 bp, synthetic construct
  source 1..50: mol_type = other DNA
caaccccctacttctaaatatacctaacaaccaactaaataaaccraaac

SEQ ID NO: 33898 - DNA, 50 bp, synthetic construct
  source 1..50: mol_type = other DNA
ctacacaaccccctacttctaaatatacctaacaaccaactaaataaacc

SEQ ID NO: 33899 - DNA, 50 bp, synthetic construct
  source 1..50: mol_type = other DNA
ccratcccacctcccatctaacctaaaaatcacttactataatatttatc

SEQ ID NO: 33900 - DNA, 50 bp, synthetic construct
  source 1..50: mol_type = other DNA
cctcccatctaacctaaaaatcacttactataatatttatcraaaaccac

SEQ ID NO: 33901 - DNA, 50 bp, synthetic construct
  source 1..50: mol_type = other DNA
tctaacctaaaaatcacttactataatatttatcraaaaccacracaccc

SEQ ID NO: 33902 - DNA, 50 bp, synthetic construct
  source 1..50: mol_type = other DNA
cctaaaaatcacttactataatatttatcraaaaccacracacccraacc

SEQ ID NO: 33903 - DNA, 50 bp, synthetic construct
  source 1..50: mol_type = other DNA
caaccctctaatctaaacaactaccacttcccaactacraaaaatatatc

SEQ ID NO: 33904 - DNA, 50 bp, synthetic construct
  source 1..50: mol_type = other DNA
taatctaaacaactaccacttcccaactacraaaaatatatcrtaaactc

SEQ ID NO: 33905 - DNA, 50 bp, synthetic construct
  source 1..50: mol_type = other DNA
tatcrtaaactcraaaacaccctaacrtaactcaaaaaacaacaaatatc

SEQ ID NO: 33906 - DNA, 50 bp, synthetic construct
  source 1..50: mol_type = other DNA
aacctcaattcctaatactccccrtactaaaatacccttcttaaaatacc

SEQ ID NO: 33907 - DNA, 50 bp, synthetic construct
  source 1..50: mol_type = other DNA
aaaaacaccccaacacraaaaacatcaaaaactaaaacctaaaaataaac

SEQ ID NO: 33908 - DNA, 50 bp, synthetic construct
  source 1..50: mol_type = other DNA
ccttcraaaaaataacraataacaattacctacccaaccctcaccttatc

SEQ ID NO: 33909 - DNA, 50 bp, synthetic construct
  source 1..50: mol_type = other DNA
ctccccaaaatcacacracaaaataaaaactaaacaaataactaccaccc

SEQ ID NO: 33910 - DNA, 50 bp, synthetic construct
  source 1..50: mol_type = other DNA
actctccctaaacaaaaaattaaataaaaaccctaatcccctcattaaac

SEQ ID NO: 33911 - DNA, 50 bp, synthetic construct
  source 1..50: mol_type = other DNA
aaaaaaaccaaaaaaacctctcacccctcatatactatacaaaacaactc

SEQ ID NO: 33912 - DNA, 50 bp, synthetic construct
  source 1..50: mol_type = other DNA
aaatataaacraaaccctaaccacaataaaaaacccctttccactattac

SEQ ID NO: 33913 - DNA, 50 bp, synthetic construct
  source 1..50: mol_type = other DNA
ctctaacrcacattaaatccctaaactaaatttactaaataaatataaac

SEQ ID NO: 33914 - DNA, 50 bp, synthetic construct
  source 1..50: mol_type = other DNA
aaatcccrctcacatccattcaacaaacttaacccaaaaacctaatatac

SEQ ID NO: 33915 - DNA, 50 bp, synthetic construct
  source 1..50: mol_type = other DNA
cccttcaatacttcctaaaaactaccaacaaactaatattatctacraac

SEQ ID NO: 33916 - DNA, 50 bp, synthetic construct
  source 1..50: mol_type = other DNA
ctcccccttcaatacttcctaaaaactaccaacaaactaatattatctac

SEQ ID NO: 33917 - DNA, 50 bp, synthetic construct
  source 1..50: mol_type = other DNA
aaaacrataaaaacttatcctaaaatcttcraaattcccraaaacccatc

SEQ ID NO: 33918 - DNA, 50 bp, synthetic construct
  source 1..50: mol_type = other DNA
aaactacaaataaaacrataaaaacttatcctaaaatcttcraaattccc

SEQ ID NO: 33919 - DNA, 50 bp, synthetic construct
  source 1..50: mol_type = other DNA
crccrcaataaactacaaataaaacrataaaaacttatcctaaaatcttc

SEQ ID NO: 33920 - DNA, 50 bp, synthetic construct
  source 1..50: mol_type = other DNA
aaaacccraaaatatcacataccctaataatcacttctaatttattaaac

SEQ ID NO: 33921 - DNA, 50 bp, synthetic construct
  source 1..50: mol_type = other DNA
actttccaaactatcratttaattaaaaaccccaacaaatcccraaacac

SEQ ID NO: 33922 - DNA, 50 bp, synthetic construct
  source 1..50: mol_type = other DNA
aacrctaactttccaaactatcratttaattaaaaaccccaacaaatccc

SEQ ID NO: 33923 - DNA, 50 bp, synthetic construct
  source 1..50: mol_type = other DNA
ctcraaacctactaaaatttccaaccaaaccracaacttaaaaaaccaac

SEQ ID NO: 33924 - DNA, 50 bp, synthetic construct
  source 1..50: mol_type = other DNA
aacataaaacaataaataaatcatccttctaaccraacrcrataactcac

SEQ ID NO: 33925 - DNA, 50 bp, synthetic construct
  source 1..50: mol_type = other DNA
ctccaaatcaaccacaaaatcaaatcccrattccaaaatactcacaacac

SEQ ID NO: 33926 - DNA, 50 bp, synthetic construct
  source 1..50: mol_type = other DNA
aaatcccrattccaaaatactcacaacacraaacatatttatcaataacc

SEQ ID NO: 33927 - DNA, 50 bp, synthetic construct
  source 1..50: mol_type = other DNA
craaacatatttatcaataaccrtaacacaaattctaaaattctactaac

SEQ ID NO: 33928 - DNA, 50 bp, synthetic construct
  source 1..50: mol_type = other DNA
acatatttatcaataaccrtaacacaaattctaaaattctactaacraac

SEQ ID NO: 33929 - DNA, 50 bp, synthetic construct
  source 1..50: mol_type = other DNA
ccttaactaaaaatcataactataattccttctaacctataaaatttccc

SEQ ID NO: 33930 - DNA, 50 bp, synthetic construct
  source 1..50: mol_type = other DNA
acctataaaatttcccraaaacataaaattaatataaaattaatactatc

SEQ ID NO: 33931 - DNA, 50 bp, synthetic construct
  source 1..50: mol_type = other DNA
taaaactaaatcttactctattacccaacctctacctctctaattcaaac

SEQ ID NO: 33932 - DNA, 50 bp, synthetic construct
  source 1..50: mol_type = other DNA
accaaaactaataactcaaaaccacacaaataaatttttataattatctc

SEQ ID NO: 33933 - DNA, 50 bp, synthetic construct
  source 1..50: mol_type = other DNA
aaaaaacataaattttctcaataccttttcttattcactaaacttaaaac

SEQ ID NO: 33934 - DNA, 50 bp, synthetic construct
  source 1..50: mol_type = other DNA
aaaataaatactttttaaaaacaaactaaaacttcctaaaaaactccatc

SEQ ID NO: 33935 - DNA, 50 bp, synthetic construct
  source 1..50: mol_type = other DNA
aatctacttttaaaaaatactcacttttatataatacttacaaaacatac

SEQ ID NO: 33936 - DNA, 50 bp, synthetic construct
  source 1..50: mol_type = other DNA
aatcttaaaatacrtactattctcaacctctccatactaaaacrctattc

SEQ ID NO: 33937 - DNA, 50 bp, synthetic construct
  source 1..50: mol_type = other DNA
ttttccaaatcttaaaatacrtactattctcaacctctccatactaaaac

SEQ ID NO: 33938 - DNA, 50 bp, synthetic construct
  source 1..50: mol_type = other DNA
aaccataaataactctctaaatataaccrtatataataactataccraac

SEQ ID NO: 33939 - DNA, 50 bp, synthetic construct
  source 1..50: mol_type = other DNA
cccaaaccataaataactctctaaatataaccrtatataataactatacc

SEQ ID NO: 33940 - DNA, 50 bp, synthetic construct
  source 1..50: mol_type = other DNA
craataacaaccctacttcccaaaccataaataactctctaaatataacc

SEQ ID NO: 33941 - DNA, 50 bp, synthetic construct
  source 1..50: mol_type = other DNA
tcaattaacataaaccccractcaatatataaatcattaatccrtataac

SEQ ID NO: 33942 - DNA, 50 bp, synthetic construct
  source 1..50: mol_type = other DNA
ccaattttcaattaacataaaccccractcaatatataaatcattaatcc

SEQ ID NO: 33943 - DNA, 50 bp, synthetic construct
  source 1..50: mol_type = other DNA
ctaaaccracaaactaaaccraatcccaattttcaattaacataaacccc

SEQ ID NO: 33944 - DNA, 50 bp, synthetic construct
  source 1..50: mol_type = other DNA
aataacctacacactaaaccraaactcataccaactaaaaattaaaaccc

SEQ ID NO: 33945 - DNA, 50 bp, synthetic construct
  source 1..50: mol_type = other DNA
aaaacaatattccaaaaacaattaaaaatactacctctaatataatatac

SEQ ID NO: 33946 - DNA, 50 bp, synthetic construct
  source 1..50: mol_type = other DNA
tttattaacactaaaccacaaccacttatttacaaaaactatctataatc

SEQ ID NO: 33947 - DNA, 50 bp, synthetic construct
  source 1..50: mol_type = other DNA
ctataactcaataccaataaaactttatttataaacacaaataataaacc

SEQ ID NO: 33948 - DNA, 50 bp, synthetic construct
  source 1..50: mol_type = other DNA
aaaactttatttataaacacaaataataaaccraatttaacctataaacc

SEQ ID NO: 33949 - DNA, 50 bp, synthetic construct
  source 1..50: mol_type = other DNA
tctaaaccctaccaaatcatacaatcactaaaaaaaactaacttcctacc

SEQ ID NO: 33950 - DNA, 50 bp, synthetic construct
  source 1..50: mol_type = other DNA
tacaatcactaaaaaaaactaacttcctaccratccctattccttctccc

SEQ ID NO: 33951 - DNA, 50 bp, synthetic construct
  source 1..50: mol_type = other DNA
accaataaacaaacaacatattaaaccacacrtaactaacrcrataaatc

SEQ ID NO: 33952 - DNA, 50 bp, synthetic construct
  source 1..50: mol_type = other DNA
acttctaccatttatacaaaatcaccrccrttttaaaatcccaaaactac

SEQ ID NO: 33953 - DNA, 50 bp, synthetic construct
  source 1..50: mol_type = other DNA
taaccctaaaattttaaaacracrataactttatacaaataacaaaaacc

SEQ ID NO: 33954 - DNA, 50 bp, synthetic construct
  source 1..50: mol_type = other DNA
ctaaaattactaatataaaccaccatacccraccacccacaccttctaac

SEQ ID NO: 33955 - DNA, 50 bp, synthetic construct
  source 1..50: mol_type = other DNA
tcataatcccattctaatcaatacttttcttctctcrcctacaaatacac

SEQ ID NO: 33956 - DNA, 50 bp, synthetic construct
  source 1..50: mol_type = other DNA
cacccacattcracccraatcttacctaatacatattttaataaacactc

SEQ ID NO: 33957 - DNA, 50 bp, synthetic construct
  source 1..50: mol_type = other DNA
aaaaaatactctaaccraatatttaccaaaacatatattaaacaaaaccc

SEQ ID NO: 33958 - DNA, 50 bp, synthetic construct
  source 1..50: mol_type = other DNA
atactctaaccraatatttaccaaaacatatattaaacaaaacccraacc

SEQ ID NO: 33959 - DNA, 50 bp, synthetic construct
  source 1..50: mol_type = other DNA
tttaccaaaacatatattaaacaaaacccraaccraatataaataacacc

SEQ ID NO: 33960 - DNA, 50 bp, synthetic construct
  source 1..50: mol_type = other DNA
aaccraatataaataacaccrcccctatactaaaccaaaaaaatataccc

SEQ ID NO: 33961 - DNA, 50 bp, synthetic construct
  source 1..50: mol_type = other DNA
aaaattcaaaatatcttatacaacccactaaaaaaacaaaatctaaaacc

SEQ ID NO: 33962 - DNA, 50 bp, synthetic construct
  source 1..50: mol_type = other DNA
catttcacaaaaaatttctaaaacctacaaaaaccttctaaattcacaac

SEQ ID NO: 33963 - DNA, 50 bp, synthetic construct
  source 1..50: mol_type = other DNA
tactcaacattatctcctctcctaaacttaaaaacataaaaatccaaccc

SEQ ID NO: 33964 - DNA, 50 bp, synthetic construct
  source 1..50: mol_type = other DNA
tattttcccattcctacataattaaaatacaaaaattaaaatactaactc

SEQ ID NO: 33965 - DNA, 50 bp, synthetic construct
  source 1..50: mol_type = other DNA
attctaacttattaaatttatcttaaaacrctctatctttctctctaccc

SEQ ID NO: 33966 - DNA, 50 bp, synthetic construct
  source 1..50: mol_type = other DNA
aaataaattacaaacaccaatccacctttcccttattactacaacacacc

SEQ ID NO: 33967 - DNA, 50 bp, synthetic construct
  source 1..50: mol_type = other DNA
ctaaaaaattaatttcrctttcattataaacctaacacaaaactcactcc

SEQ ID NO: 33968 - DNA, 50 bp, synthetic construct
  source 1..50: mol_type = other DNA
aacatccacaatacaaaacraaacaaaccctatactaaaaaattaatttc

SEQ ID NO: 33969 - DNA, 50 bp, synthetic construct
  source 1..50: mol_type = other DNA
ccaaactcacaataaaaacraaatcaatctcttaacacaaaacctatccc

SEQ ID NO: 33970 - DNA, 50 bp, synthetic construct
  source 1..50: mol_type = other DNA
taaaaccaaatcatcctctaactaaaaccrtcctaaacactacaaaatac

SEQ ID NO: 33971 - DNA, 50 bp, synthetic construct
  source 1..50: mol_type = other DNA
aatcatcctctaactaaaaccrtcctaaacactacaaaatacraaacaac

SEQ ID NO: 33972 - DNA, 50 bp, synthetic construct
  source 1..50: mol_type = other DNA
caactacttcraaaccacaacaacaataataaatcaccctaacaaaaacc

SEQ ID NO: 33973 - DNA, 50 bp, synthetic construct
  source 1..50: mol_type = other DNA
atttataaaaacaaatataacraaacccaataactcataattataatccc

SEQ ID NO: 33974 - DNA, 50 bp, synthetic construct
  source 1..50: mol_type = other DNA
ctacaataaaccaaaattataccactacattccaacctaaaaaacaaaac

SEQ ID NO: 33975 - DNA, 50 bp, synthetic construct
  source 1..50: mol_type = other DNA
caaaaaaacacaaaaaaacctttaaaaactacrtcaccaaaaacractcc

SEQ ID NO: 33976 - DNA, 50 bp, synthetic construct
  source 1..50: mol_type = other DNA
cratctcaaaaaaacacaaaaaaacctttaaaaactacrtcaccaaaaac

SEQ ID NO: 33977 - DNA, 50 bp, synthetic construct
  source 1..50: mol_type = other DNA
ctttccctcttacratctcaaaaaaacacaaaaaaacctttaaaaactac

SEQ ID NO: 33978 - DNA, 50 bp, synthetic construct
  source 1..50: mol_type = other DNA
acaataatcrtaatatctttataacrattatattaacctcactaaccccc

SEQ ID NO: 33979 - DNA, 50 bp, synthetic construct
  source 1..50: mol_type = other DNA
crtaatatctttataacrattatattaacctcactaacccccraaatacc

SEQ ID NO: 33980 - DNA, 50 bp, synthetic construct
  source 1..50: mol_type = other DNA
ataaatataataaaaacacctccctcccaaataattataaaaatcaaaac

SEQ ID NO: 33981 - DNA, 50 bp, synthetic construct
  source 1..50: mol_type = other DNA
ataatcaaaaatattattcacactcaccctacratacccaaaacaacccc

SEQ ID NO: 33982 - DNA, 50 bp, synthetic construct
  source 1..50: mol_type = other DNA
tatccacrttctaaactaaaacattctataacraaactatcctaaacacc

SEQ ID NO: 33983 - DNA, 50 bp, synthetic construct
  source 1..50: mol_type = other DNA
ctcactacraaattaacaatacttcccaaaaaacatttttaattactacc

SEQ ID NO: 33984 - DNA, 50 bp, synthetic construct
  source 1..50: mol_type = other DNA
acaccataaactactacaaaactaaaaaccaaatccaaaattctcactac

SEQ ID NO: 33985 - DNA, 50 bp, synthetic construct
  source 1..50: mol_type = other DNA
accttaaacttaaccttcaaccctacaataactcataatatactataacc

SEQ ID NO: 33986 - DNA, 50 bp, synthetic construct
  source 1..50: mol_type = other DNA
aacaaaaacctaccaaaactcaaaaaccaaaaaacaacccaaaaaaaccc

SEQ ID NO: 33987 - DNA, 50 bp, synthetic construct
  source 1..50: mol_type = other DNA
cttaatcacctcattaacacactaaaaaattccraaaatctaaaaaaatc

SEQ ID NO: 33988 - DNA, 50 bp, synthetic construct
  source 1..50: mol_type = other DNA
atcrtaaaccaaaaaacaaaacaaaatatatttcacaatctcactaaacc

SEQ ID NO: 33989 - DNA, 50 bp, synthetic construct
  source 1..50: mol_type = other DNA
aacaaaacaaaatatatttcacaatctcactaaaccratcccttacctcc

SEQ ID NO: 33990 - DNA, 50 bp, synthetic construct
  source 1..50: mol_type = other DNA
attttatacrttattcaaaattttactttcrtcaaaaacaaaaccttaac

SEQ ID NO: 33991 - DNA, 50 bp, synthetic construct
  source 1..50: mol_type = other DNA
ttcrtcaaaaacaaaaccttaacrtttctacatcaacaataaaaatatac

SEQ ID NO: 33992 - DNA, 50 bp, synthetic construct
  source 1..50: mol_type = other DNA
aaaacaaaaccttaacrtttctacatcaacaataaaaatatacrtaattc

SEQ ID NO: 33993 - DNA, 50 bp, synthetic construct
  source 1..50: mol_type = other DNA
ctatcttctaaactcccacctaaataaaccrtaccaaataacactttccc

SEQ ID NO: 33994 - DNA, 50 bp, synthetic construct
  source 1..50: mol_type = other DNA
cccaaccaaaaaaaactactctatcttctaaactcccacctaaataaacc

SEQ ID NO: 33995 - DNA, 50 bp, synthetic construct
  source 1..50: mol_type = other DNA
aaataaaaacccaaaaaacaaaacaacctcccctaactaaatttaataac

SEQ ID NO: 33996 - DNA, 50 bp, synthetic construct
  source 1..50: mol_type = other DNA
aaacctataaaaacccaccaaatattactctatataccttctaaaatcac

SEQ ID NO: 33997 - DNA, 50 bp, synthetic construct
  source 1..50: mol_type = other DNA
aaacctaaaaatacctaaccaaatacccctacrataatctaaaataaccc

SEQ ID NO: 33998 - DNA, 50 bp, synthetic construct
  source 1..50: mol_type = other DNA
ataaaccraaacttaacctctaactcctcactaaacacctcaaaaaacac

SEQ ID NO: 33999 - DNA, 50 bp, synthetic construct
  source 1..50: mol_type = other DNA
caaaaacctactaacaaaacacrtactcctaattaaaaactaccttaccc

SEQ ID NO: 34000 - DNA, 50 bp, synthetic construct
  source 1..50: mol_type = other DNA
caaatcraacccttctaaacaaaatactcaaaaacctactaacaaaacac

SEQ ID NO: 34001 - DNA, 50 bp, synthetic construct
  source 1..50: mol_type = other DNA
aacaaactataataaaaaccccrctacaaacccctaaataaaactccctc

SEQ ID NO: 34002 - DNA, 50 bp, synthetic construct
  source 1..50: mol_type = other DNA
aaaaatataaacratacctaaaacacacaacaaactataataaaaacccc

SEQ ID NO: 34003 - DNA, 50 bp, synthetic construct
  source 1..50: mol_type = other DNA
aaaatctataacraaaccctcactacaacctattatatatttcaaacacc

SEQ ID NO: 34004 - DNA, 50 bp, synthetic construct
  source 1..50: mol_type = other DNA
cctttctataactctaccrtaacracaaactatcactaaaacaaataatc

SEQ ID NO: 34005 - DNA, 50 bp, synthetic construct
  source 1..50: mol_type = other DNA
aactatactaataactaaaaacctccccacracacaaacctaaaataacc

SEQ ID NO: 34006 - DNA, 50 bp, synthetic construct
  source 1..50: mol_type = other DNA
ttaacacccrcccataccccraatcataaatactatactaaataaaaaac

SEQ ID NO: 34007 - DNA, 50 bp, synthetic construct
  source 1..50: mol_type = other DNA
aaactataatataaacataaataaaacraactcctaactaattaacaccc

SEQ ID NO: 34008 - DNA, 50 bp, synthetic construct
  source 1..50: mol_type = other DNA
actaacraataaacccracrccaaaactataatataaacataaataaaac

SEQ ID NO: 34009 - DNA, 50 bp, synthetic construct
  source 1..50: mol_type = other DNA
aaacaaacataaaactaaaacrtacctataataaacatcatacccrctac

SEQ ID NO: 34010 - DNA, 50 bp, synthetic construct
  source 1..50: mol_type = other DNA
aaaaaaaacaaacataaaactaaaacrtacctataataaacatcataccc

SEQ ID NO: 34011 - DNA, 50 bp, synthetic construct
  source 1..50: mol_type = other DNA
aaaactactctaaacaaatctatacraatcttaatataaatataaacatc

SEQ ID NO: 34012 - DNA, 50 bp, synthetic construct
  source 1..50: mol_type = other DNA
aactcaaccctactattaaatcaatcaatacccttttcctttttataacc

SEQ ID NO: 34013 - DNA, 50 bp, synthetic construct
  source 1..50: mol_type = other DNA
actaaatcctcttatacaataaacaacctaccccactatctataacaacc

SEQ ID NO: 34014 - DNA, 50 bp, synthetic construct
  source 1..50: mol_type = other DNA
ttttcccttaaaattcctacctacctcraattaatatcttaactcaatac

SEQ ID NO: 34015 - DNA, 50 bp, synthetic construct
  source 1..50: mol_type = other DNA
aattactaaaaccracaactcctcaaaaaaaacctctatccaaaaatacc

SEQ ID NO: 34016 - DNA, 50 bp, synthetic construct
  source 1..50: mol_type = other DNA
taacacrataaccrtactatcctacaaaccacaataaaattactaaaacc

SEQ ID NO: 34017 - DNA, 50 bp, synthetic construct
  source 1..50: mol_type = other DNA
attatcaaaaatcatttaaccttcaactaataacctatataacctaacac

SEQ ID NO: 34018 - DNA, 50 bp, synthetic construct
  source 1..50: mol_type = other DNA
acaatatatatttcttaatttcaaaacaaaaaatcacataacccaaatac

SEQ ID NO: 34019 - DNA, 50 bp, synthetic construct
  source 1..50: mol_type = other DNA
cttaatttcaaaacaaaaaatcacataacccaaatacractcttccacac

SEQ ID NO: 34020 - DNA, 50 bp, synthetic construct
  source 1..50: mol_type = other DNA
cataaaataacrctatctactaaaataaacacatcacttacacaccctac

SEQ ID NO: 34021 - DNA, 50 bp, synthetic construct
  source 1..50: mol_type = other DNA
aactctctcccrcaaaatatacaaataatatatttactttaacaaacaac

SEQ ID NO: 34022 - DNA, 50 bp, synthetic construct
  source 1..50: mol_type = other DNA
ttaacaaacaacrccacctcataataacaaaaactcrataaacctactac

SEQ ID NO: 34023 - DNA, 50 bp, synthetic construct
  source 1..50: mol_type = other DNA
ratcractaataacctaaaaacaacccrataacccccaaaaactaaaacc

SEQ ID NO: 34024 - DNA, 50 bp, synthetic construct
  source 1..50: mol_type = other DNA
tcaaatactaaaaacctaataaaacraaacaacattatccaaacccaacc

SEQ ID NO: 34025 - DNA, 50 bp, synthetic construct
  source 1..50: mol_type = other DNA
aaaacctaaaaaactcctattaaccractaaatctaaacaatactatctc

SEQ ID NO: 34026 - DNA, 50 bp, synthetic construct
  source 1..50: mol_type = other DNA
crttttaccaaactcccaacacctaaatacaccttccctcctaaaacaac

SEQ ID NO: 34027 - DNA, 50 bp, synthetic construct
  source 1..50: mol_type = other DNA
tcctactataaaaataactttccacttttatcctctcctaaaactacrcc

SEQ ID NO: 34028 - DNA, 50 bp, synthetic construct
  source 1..50: mol_type = other DNA
cattcctactataaaaataactttccacttttatcctctcctaaaactac

SEQ ID NO: 34029 - DNA, 50 bp, synthetic construct
  source 1..50: mol_type = other DNA
raacacacaatataaaaactaccaacaccataactaaattaactcaaccc

SEQ ID NO: 34030 - DNA, 50 bp, synthetic construct
  source 1..50: mol_type = other DNA
acctatcraataaaatataaaacaaaaacatacaacatacaaacaacaac

SEQ ID NO: 34031 - DNA, 50 bp, synthetic construct
  source 1..50: mol_type = other DNA
aaaataaaaacrtaactcccaccrtaaaaaatactaacaatatacctatc

SEQ ID NO: 34032 - DNA, 50 bp, synthetic construct
  source 1..50: mol_type = other DNA
aaacccctaataactaacaacaaaaaaacctactcaatactcctaaatac

SEQ ID NO: 34033 - DNA, 50 bp, synthetic construct
  source 1..50: mol_type = other DNA
ccaacaaccaatctcaatcccaaaatactaaccrcaaaatacttcraaac

SEQ ID NO: 34034 - DNA, 50 bp, synthetic construct
  source 1..50: mol_type = other DNA
tataaaaaacataccrtttaatcattcccaatacccrtaactcactaacc

SEQ ID NO: 34035 - DNA, 50 bp, synthetic construct
  source 1..50: mol_type = other DNA
accaacaccctaaaattaaaattaactactaaaaacraccaataaatcac

SEQ ID NO: 34036 - DNA, 50 bp, synthetic construct
  source 1..50: mol_type = other DNA
taaaatactcctaaactttataaacccaaatctcrtataaaaaacatacc

SEQ ID NO: 34037 - DNA, 50 bp, synthetic construct
  source 1..50: mol_type = other DNA
ataacattataattatctttttaattcctcraccraacrtaataactcac

SEQ ID NO: 34038 - DNA, 50 bp, synthetic construct
  source 1..50: mol_type = other DNA
attcctaccccacaaatctacattttcataacracaactataaatacccc

SEQ ID NO: 34039 - DNA, 50 bp, synthetic construct
  source 1..50: mol_type = other DNA
taaccaaactaaaaccaaaatcaactccccacaaactacccctaaatacc

SEQ ID NO: 34040 - DNA, 50 bp, synthetic construct
  source 1..50: mol_type = other DNA
aactaatcctaaccccaacctaaccacraaaaataacaaacttaataatc

SEQ ID NO: 34041 - DNA, 50 bp, synthetic construct
  source 1..50: mol_type = other DNA
aaaaaaaactctatacaaaacttaccaaccrtattcttaaaatccacccc

SEQ ID NO: 34042 - DNA, 50 bp, synthetic construct
  source 1..50: mol_type = other DNA
aaataacaaacttaataatcrctctaatacraaataaaccccaaaaacac

SEQ ID NO: 34043 - DNA, 50 bp, synthetic construct
  source 1..50: mol_type = other DNA
atcaacacaatcttctcactaaacaacactaattttttacctaaaaaatc

SEQ ID NO: 34044 - DNA, 50 bp, synthetic construct
  source 1..50: mol_type = other DNA
ttacctaaaaaatcrtaaacaataacaataactaaaacatccccttacrc

SEQ ID NO: 34045 - DNA, 50 bp, synthetic construct
  source 1..50: mol_type = other DNA
cctaaaaaatcrtaaacaataacaataactaaaacatccccttacrcrtc

SEQ ID NO: 34046 - DNA, 50 bp, synthetic construct
  source 1..50: mol_type = other DNA
taaaccacccttatccctatccttacaaaaactccaaaacataaataaac

SEQ ID NO: 34047 - DNA, 50 bp, synthetic construct
  source 1..50: mol_type = other DNA
atccctatccttacaaaaactccaaaacataaataaacrcaaaaccaccc

SEQ ID NO: 34048 - DNA, 50 bp, synthetic construct
  source 1..50: mol_type = other DNA
aatacttaaaaaacataaaaataactacaaatactataaatcccaaaaac

SEQ ID NO: 34049 - DNA, 50 bp, synthetic construct
  source 1..50: mol_type = other DNA
tactataaatcccaaaaacrtaaatacctaatctaaatccactaaactac

SEQ ID NO: 34050 - DNA, 50 bp, synthetic construct
  source 1..50: mol_type = other DNA
ctatcraaaaatacacrattcataaactaactaaaatcctcraattccac

SEQ ID NO: 34051 - DNA, 50 bp, synthetic construct
  source 1..50: mol_type = other DNA
aaaaaacacaacctctaaaaacctatattaaacacrttaaccraaaaacc

SEQ ID NO: 34052 - DNA, 50 bp, synthetic construct
  source 1..50: mol_type = other DNA
racatattaaaaaacacaacctctaaaaacctatattaaacacrttaacc

SEQ ID NO: 34053 - DNA, 50 bp, synthetic construct
  source 1..50: mol_type = other DNA
tattaacracatattaaaaaacacaacctctaaaaacctatattaaacac

SEQ ID NO: 34054 - DNA, 50 bp, synthetic construct
  source 1..50: mol_type = other DNA
ccccaaaaactacaacatacaaaaccccttaaaacatctactttattaac

SEQ ID NO: 34055 - DNA, 50 bp, synthetic construct
  source 1..50: mol_type = other DNA
atatcacaaaaccttacctcactaaacctcaacttcctcatctacaaaac

SEQ ID NO: 34056 - DNA, 50 bp, synthetic construct
  source 1..50: mol_type = other DNA
cttcaacaaaaaaaccrcatcttaatataacccaaaaactaaacattctc

SEQ ID NO: 34057 - DNA, 50 bp, synthetic construct
  source 1..50: mol_type = other DNA
attctcataataacacraaataaaacaacaaactaaactctttctttttc

SEQ ID NO: 34058 - DNA, 50 bp, synthetic construct
  source 1..50: mol_type = other DNA
aacacaaatactatcacaaaaaatccctaaattaacttaccacatttaac

SEQ ID NO: 34059 - DNA, 50 bp, synthetic construct
  source 1..50: mol_type = other DNA
taacaatactataaataatatttcttcataaacccttatcaatatttccc

SEQ ID NO: 34060 - DNA, 50 bp, synthetic construct
  source 1..50: mol_type = other DNA
aataattcttattttccccccracacaaatatcctaattacatacttacc

SEQ ID NO: 34061 - DNA, 50 bp, synthetic construct
  source 1..50: mol_type = other DNA
tccatatttcaataactataaaaaactcttaaatcrctaaaataaaatac

SEQ ID NO: 34062 - DNA, 50 bp, synthetic construct
  source 1..50: mol_type = other DNA
ctaaaccccctaatctccatatttcaataactataaaaaactcttaaatc

SEQ ID NO: 34063 - DNA, 50 bp, synthetic construct
  source 1..50: mol_type = other DNA
caaaactaacacaacaaatcaaccccraaaaaatccaactaaacraaaac

SEQ ID NO: 34064 - DNA, 50 bp, synthetic construct
  source 1..50: mol_type = other DNA
aactaacaaaactaacacaacaaatcaaccccraaaaaatccaactaaac

SEQ ID NO: 34065 - DNA, 50 bp, synthetic construct
  source 1..50: mol_type = other DNA
ttaccacaaacacattcatatctaacaacacatcaattaccaacaccaac

SEQ ID NO: 34066 - DNA, 50 bp, synthetic construct
  source 1..50: mol_type = other DNA
aataacattaacrtcaactaaaatattactaaccacraaatactaataac

SEQ ID NO: 34067 - DNA, 50 bp, synthetic construct
  source 1..50: mol_type = other DNA
acatccataaccaacaatacttcaatcaccaacaccataaccaacaacac

SEQ ID NO: 34068 - DNA, 50 bp, synthetic construct
  source 1..50: mol_type = other DNA
taaaaaaaataatcrctaataaacctaaccacaacactaattttactatc

SEQ ID NO: 34069 - DNA, 50 bp, synthetic construct
  source 1..50: mol_type = other DNA
aatactaacacraaaaatctaatctaaaaatttaaatcaatatttcaacc

SEQ ID NO: 34070 - DNA, 50 bp, synthetic construct
  source 1..50: mol_type = other DNA
ataaaatataaaaacttcccaaaataactataaactctataaaaaaccac

SEQ ID NO: 34071 - DNA, 50 bp, synthetic construct
  source 1..50: mol_type = other DNA
aaactcaaacaaaaatacaactccacraacccaatctcraataaaactac

SEQ ID NO: 34072 - DNA, 50 bp, synthetic construct
  source 1..50: mol_type = other DNA
raaaaaaacttatcaataatacraacrcaattttacccraaactaaactc

SEQ ID NO: 34073 - DNA, 50 bp, synthetic construct
  source 1..50: mol_type = other DNA
tactaaacacataacraaaaccrccrcataccaataaaaaaactttaaac

SEQ ID NO: 34074 - DNA, 50 bp, synthetic construct
  source 1..50: mol_type = other DNA
aataatatatcaataatacttaacataatactaaacacataacraaaacc

SEQ ID NO: 34075 - DNA, 50 bp, synthetic construct
  source 1..50: mol_type = other DNA
cataccaaacaccattaacatattatctcatttaatcctccccaaaactc

SEQ ID NO: 34076 - DNA, 50 bp, synthetic construct
  source 1..50: mol_type = other DNA
ttatctcatttaatcctccccaaaactcraaaaaaccaaaattacaacac

SEQ ID NO: 34077 - DNA, 50 bp, synthetic construct
  source 1..50: mol_type = other DNA
attctatctcatactccccrcaacaaacctcaaaccaaaataacaaaaac

SEQ ID NO: 34078 - DNA, 50 bp, synthetic construct
  source 1..50: mol_type = other DNA
tacraaaaacataaaacaaaattatatacaacaaactacaataaaaaccc

SEQ ID NO: 34079 - DNA, 50 bp, synthetic construct
  source 1..50: mol_type = other DNA
aaaaacctaatacatccctaaaatattaaaaaaaacacaacaaaaataac

SEQ ID NO: 34080 - DNA, 50 bp, synthetic construct
  source 1..50: mol_type = other DNA
attaaaaaaaacacaacaaaaataacrtataaaccaaatcacaaacaaac

SEQ ID NO: 34081 - DNA, 50 bp, synthetic construct
  source 1..50: mol_type = other DNA
caaacrtaatacrctcaaaaaaacrtatccctatacttcctttaataaac

SEQ ID NO: 34082 - DNA, 50 bp, synthetic construct
  source 1..50: mol_type = other DNA
tacctctccctaaatattccaactcaattaataccacatataaaaaaaac

SEQ ID NO: 34083 - DNA, 50 bp, synthetic construct
  source 1..50: mol_type = other DNA
accractccctaaataattttaatacttaaccaaataaaaaccattattc

SEQ ID NO: 34084 - DNA, 50 bp, synthetic construct
  source 1..50: mol_type = other DNA
tccraacaataattctcatttaactaaacatcaaaatcacctaaaaaatc

SEQ ID NO: 34085 - DNA, 50 bp, synthetic construct
  source 1..50: mol_type = other DNA
caactaaaattataatcataaaccacaacrcccraccctaatacctttac

SEQ ID NO: 34086 - DNA, 50 bp, synthetic construct
  source 1..50: mol_type = other DNA
tacattaacctctcaaacaactaaaattataatcataaaccacaacrccc

SEQ ID NO: 34087 - DNA, 50 bp, synthetic construct
  source 1..50: mol_type = other DNA
ctcctacattaacctctcaaacaactaaaattataatcataaaccacaac

SEQ ID NO: 34088 - DNA, 50 bp, synthetic construct
  source 1..50: mol_type = other DNA
aaataaaacacacacaaatataaaattataactaaaatctttacctttcc

SEQ ID NO: 34089 - DNA, 50 bp, synthetic construct
  source 1..50: mol_type = other DNA
accraactaactaaaaatcratatacatttctaaaaatcaaacaccacac

SEQ ID NO: 34090 - DNA, 50 bp, synthetic construct
  source 1..50: mol_type = other DNA
ccacctaacctaaaaacacctaaaaccaatataactctaaacctactccc

SEQ ID NO: 34091 - DNA, 50 bp, synthetic construct
  source 1..50: mol_type = other DNA
cctaacctaaaaacacctaaaaccaatataactctaaacctactcccrcc

SEQ ID NO: 34092 - DNA, 50 bp, synthetic construct
  source 1..50: mol_type = other DNA
taaacrtttctataaaaaacaaactaaataaatacacaaactccraaaac

SEQ ID NO: 34093 - DNA, 50 bp, synthetic construct
  source 1..50: mol_type = other DNA
aaaaaataaacrtttctataaaaaacaaactaaataaatacacaaactcc

SEQ ID NO: 34094 - DNA, 50 bp, synthetic construct
  source 1..50: mol_type = other DNA
ctaaaatacacatctcttaaaaaaaccttaaaacacaaccaacccactcc

SEQ ID NO: 34095 - DNA, 50 bp, synthetic construct
  source 1..50: mol_type = other DNA
acacactaatatacaaaaaatctaaccatctactatacaacataaaaatc

SEQ ID NO: 34096 - DNA, 50 bp, synthetic construct
  source 1..50: mol_type = other DNA
ttttccrttaatttaaaaccacctctttaaccataaccatataatattcc

SEQ ID NO: 34097 - DNA, 50 bp, synthetic construct
  source 1..50: mol_type = other DNA
ataaacraaacatcacataatcataatcaaaaaaataaccccaaaccaac

SEQ ID NO: 34098 - DNA, 50 bp, synthetic construct
  source 1..50: mol_type = other DNA
ttttttttttctcacttataaatcaccrccaatacctaaattaaactaac

SEQ ID NO: 34099 - DNA, 50 bp, synthetic construct
  source 1..50: mol_type = other DNA
aaaaaatccaatcctatcaaaatctccrttaacctaacttaaatactaac

SEQ ID NO: 34100 - DNA, 50 bp, synthetic construct
  source 1..50: mol_type = other DNA
ctaacctctaataactaaatcctatttttctacaacctttcaataacatc

SEQ ID NO: 34101 - DNA, 50 bp, synthetic construct
  source 1..50: mol_type = other DNA
tacttatactccataactcaacccaaaactcactaaccrtttaaaacctc

SEQ ID NO: 34102 - DNA, 50 bp, synthetic construct
  source 1..50: mol_type = other DNA
taaaaacccttaatttaaaataccaattccttcacaccctaaccctcccc

SEQ ID NO: 34103 - DNA, 50 bp, synthetic construct
  source 1..50: mol_type = other DNA
ccctacaaacactaaaactaaaactaaaaatctaaatatataaccccacc

SEQ ID NO: 34104 - DNA, 50 bp, synthetic construct
  source 1..50: mol_type = other DNA
caacracrattaatcraccctcctaaaaaaaatatctattaaacaaaatc

SEQ ID NO: 34105 - DNA, 50 bp, synthetic construct
  source 1..50: mol_type = other DNA
aaaaaacaccrtaccaaaccaataaaaacacttacaaaattcaaaactac

SEQ ID NO: 34106 - DNA, 50 bp, synthetic construct
  source 1..50: mol_type = other DNA
cctctacccratttccacractcccatttcttaattaaatcataataacc

SEQ ID NO: 34107 - DNA, 50 bp, synthetic construct
  source 1..50: mol_type = other DNA
tcaaaaacaaaattctaaaaatcatctctaactccatctcacaccctctc

SEQ ID NO: 34108 - DNA, 50 bp, synthetic construct
  source 1..50: mol_type = other DNA
aaaaaaaaactctataaaaaataacttcaaccctaacrtatctaaacaac

SEQ ID NO: 34109 - DNA, 50 bp, synthetic construct
  source 1..50: mol_type = other DNA
crtccatactatcaatttccaaatttctactactcccaaatcaccatccc

SEQ ID NO: 34110 - DNA, 50 bp, synthetic construct
  source 1..50: mol_type = other DNA
acttaaactacaaccaaatctaaaaacctacaaaatacraaaacaaaaac

SEQ ID NO: 34111 - DNA, 50 bp, synthetic construct
  source 1..50: mol_type = other DNA
craaaacaaaaacrtatcctctaaacctactaacaaaattttctcttctc

SEQ ID NO: 34112 - DNA, 50 bp, synthetic construct
  source 1..50: mol_type = other DNA
aaacrtatcctctaaacctactaacaaaattttctcttctcrtaataacc

SEQ ID NO: 34113 - DNA, 50 bp, synthetic construct
  source 1..50: mol_type = other DNA
cttctcrtaataaccrtacrcaactcccaaaataatacaaaatcaatacc

SEQ ID NO: 34114 - DNA, 50 bp, synthetic construct
  source 1..50: mol_type = other DNA
tacracctttatttaaaaatctatctctctaaccraacrcaataactcac

SEQ ID NO: 34115 - DNA, 50 bp, synthetic construct
  source 1..50: mol_type = other DNA
crttcattttataaaacraaacccaaaataaccaaaaccaaaaaaactcc

SEQ ID NO: 34116 - DNA, 50 bp, synthetic construct
  source 1..50: mol_type = other DNA
aaaattctattaaaaccraaaccctcttaatcttaatcactctaaatctc

SEQ ID NO: 34117 - DNA, 50 bp, synthetic construct
  source 1..50: mol_type = other DNA
craaaccctcttaatcttaatcactctaaatctcrctccataaaataaac

SEQ ID NO: 34118 - DNA, 50 bp, synthetic construct
  source 1..50: mol_type = other DNA
taaaacctaaaaatcaccrcccttccctaaaaccaaacactataccaaac

SEQ ID NO: 34119 - DNA, 50 bp, synthetic construct
  source 1..50: mol_type = other DNA
aaaaaaacrttcctaaaaaatacctacaattataaaacctaaaaatcacc

SEQ ID NO: 34120 - DNA, 50 bp, synthetic construct
  source 1..50: mol_type = other DNA
tataaatctatacraacaccrataaaacatatcccaaacccattaactcc

SEQ ID NO: 34121 - DNA, 50 bp, synthetic construct
  source 1..50: mol_type = other DNA
aaaaatttccaaaaaataaccatattaaatccattcaaccrcaaccrccc

SEQ ID NO: 34122 - DNA, 50 bp, synthetic construct
  source 1..50: mol_type = other DNA
aaaaacatcaaattataaataaccctatctcctttatttaatatactctc

SEQ ID NO: 34123 - DNA, 50 bp, synthetic construct
  source 1..50: mol_type = other DNA
acaaaatttattcaaaaacctatactaacattctcaaatatctataaacc

SEQ ID NO: 34124 - DNA, 50 bp, synthetic construct
  source 1..50: mol_type = other DNA
tttttataacataaaaactttataacataattcacctacctcaacctccc

SEQ ID NO: 34125 - DNA, 50 bp, synthetic construct
  source 1..50: mol_type = other DNA
aattaaccaattaaaattaatttaacctataaaatctaaccctaaccatc

SEQ ID NO: 34126 - DNA, 50 bp, synthetic construct
  source 1..50: mol_type = other DNA
ttaattctttaccttctacttttaaacttctccrtaaaacaacctttttc

SEQ ID NO: 34127 - DNA, 50 bp, synthetic construct
  source 1..50: mol_type = other DNA
tcaatatatcaatatatttaattctttaccttctacttttaaacttctcc

SEQ ID NO: 34128 - DNA, 50 bp, synthetic construct
  source 1..50: mol_type = other DNA
tacaataacrtaatataaactcactataaactctatctcccratccaaac

SEQ ID NO: 34129 - DNA, 50 bp, synthetic construct
  source 1..50: mol_type = other DNA
taaaataaccctccracctcaattcctctaataaataaaactacaaactc

SEQ ID NO: 34130 - DNA, 50 bp, synthetic construct
  source 1..50: mol_type = other DNA
aaactacaaactcrtaacaccacaacaaactaattttttataaaaataac

SEQ ID NO: 34131 - DNA, 50 bp, synthetic construct
  source 1..50: mol_type = other DNA
cacatatacataatccatataaaaaaaccaaacctaaaacrataactcac

SEQ ID NO: 34132 - DNA, 50 bp, synthetic construct
  source 1..50: mol_type = other DNA
aataaaaaaccacatatacataatccatataaaaaaaccaaacctaaaac

SEQ ID NO: 34133 - DNA, 50 bp, synthetic construct
  source 1..50: mol_type = other DNA
aaacacacaactcacacacaaatctccaacataaacatatttatacatcc

SEQ ID NO: 34134 - DNA, 50 bp, synthetic construct
  source 1..50: mol_type = other DNA
acaaaccactctaccttaaaacractataattctaaaccaaattccracc

SEQ ID NO: 34135 - DNA, 50 bp, synthetic construct
  source 1..50: mol_type = other DNA
taaaacaaaccactctaccttaaaacractataattctaaaccaaattcc

SEQ ID NO: 34136 - DNA, 50 bp, synthetic construct
  source 1..50: mol_type = other DNA
acttaatataaataatcataaaatcctataattaaacatatcattatcac

SEQ ID NO: 34137 - DNA, 50 bp, synthetic construct
  source 1..50: mol_type = other DNA
atttccatcctcaaccccaaatctaatctctctaacaacaaccaaaaaac

SEQ ID NO: 34138 - DNA, 50 bp, synthetic construct
  source 1..50: mol_type = other DNA
tctctaaattactttatataactccaaaatcccccatcccaaacrctaac

SEQ ID NO: 34139 - DNA, 50 bp, synthetic construct
  source 1..50: mol_type = other DNA
caaaactctctaaattactttatataactccaaaatcccccatcccaaac

SEQ ID NO: 34140 - DNA, 50 bp, synthetic construct
  source 1..50: mol_type = other DNA
ctcccctcaaccactccctcttcttttctttataacattcttaactttcc

SEQ ID NO: 34141 - DNA, 50 bp, synthetic construct
  source 1..50: mol_type = other DNA
atccaaaatattaccraaaaaccrataaatatcaaaaaaaccctaaaaac

SEQ ID NO: 34142 - DNA, 50 bp, synthetic construct
  source 1..50: mol_type = other DNA
ctataacaacatacraccataaccttaacctataaacttatcccrtaaac

SEQ ID NO: 34143 - DNA, 50 bp, synthetic construct
  source 1..50: mol_type = other DNA
aaaatactatcccccacttaactaaacccacacttccacctaattaaacc

SEQ ID NO: 34144 - DNA, 50 bp, synthetic construct
  source 1..50: mol_type = other DNA
aaactaacctctataaaaaactcraataaaacracttcttcaacacaacc

SEQ ID NO: 34145 - DNA, 50 bp, synthetic construct
  source 1..50: mol_type = other DNA
aacctaactaaattcaaatctcaactctatctatatcactcacrtactac

SEQ ID NO: 34146 - DNA, 50 bp, synthetic construct
  source 1..50: mol_type = other DNA
aaacacaaacctaactaaattcaaatctcaactctatctatatcactcac

SEQ ID NO: 34147 - DNA, 50 bp, synthetic construct
  source 1..50: mol_type = other DNA
taatacaaacaaaactaaaatttaaacctaatcaaacctatactctaaac

SEQ ID NO: 34148 - DNA, 50 bp, synthetic construct
  source 1..50: mol_type = other DNA
tataaaaaataatttaatcctaccraataaaaaaacccccctcctacaac

SEQ ID NO: 34149 - DNA, 50 bp, synthetic construct
  source 1..50: mol_type = other DNA
aatcatattttctttaatccacacaatatccttatactatttttaatttc

SEQ ID NO: 34150 - DNA, 50 bp, synthetic construct
  source 1..50: mol_type = other DNA
aaacaaaatacaataaacaacaaccaaatcctaaaataacccaacctttc

SEQ ID NO: 34151 - DNA, 50 bp, synthetic construct
  source 1..50: mol_type = other DNA
caaaactatacaaaaaactaaccaaacaaaataaactcttactttaaacc

SEQ ID NO: 34152 - DNA, 50 bp, synthetic construct
  source 1..50: mol_type = other DNA
tttcttttaaacaatttcactcttctcatccaaactaaaaatacaataac

SEQ ID NO: 34153 - DNA, 50 bp, synthetic construct
  source 1..50: mol_type = other DNA
tacttacataaatatcrcaaaaaaaatacctacatcattaactaaatctc

SEQ ID NO: 34154 - DNA, 50 bp, synthetic construct
  source 1..50: mol_type = other DNA
acacaaacctaaaaacccctaaaaaatactatttaaaaaaaccccraacc

SEQ ID NO: 34155 - DNA, 50 bp, synthetic construct
  source 1..50: mol_type = other DNA
cacaaacacaaacctaaaaacccctaaaaaatactatttaaaaaaacccc

SEQ ID NO: 34156 - DNA, 50 bp, synthetic construct
  source 1..50: mol_type = other DNA
atcaaaaaacaataactaaaaaaaaccacraaccactaactcaacttaac

SEQ ID NO: 34157 - DNA, 50 bp, synthetic construct
  source 1..50: mol_type = other DNA
aattaatatatctctctatcttacaacactaaattccccrttatctaaac

SEQ ID NO: 34158 - DNA, 50 bp, synthetic construct
  source 1..50: mol_type = other DNA
ctatcttacaacactaaattccccrttatctaaacraaaaccaatcaaac

SEQ ID NO: 34159 - DNA, 50 bp, synthetic construct
  source 1..50: mol_type = other DNA
ctaaatcatatctatatatctatctacccaaaataaaaccaacraaaacc

SEQ ID NO: 34160 - DNA, 50 bp, synthetic construct
  source 1..50: mol_type = other DNA
aaataatactaaaaaaattatcaaaacacaacttataatccccracctcc

SEQ ID NO: 34161 - DNA, 50 bp, synthetic construct
  source 1..50: mol_type = other DNA
ttacctaccccccaaataatcraaaatactaaactaaacrtaaacttcac

SEQ ID NO: 34162 - DNA, 50 bp, synthetic construct
  source 1..50: mol_type = other DNA
ataatctatattaatcaatattaattcaaccrtaaccctcttcracaaac

SEQ ID NO: 34163 - DNA, 50 bp, synthetic construct
  source 1..50: mol_type = other DNA
acccttaataatctatattaatcaatattaattcaaccrtaaccctcttc

SEQ ID NO: 34164 - DNA, 50 bp, synthetic construct
  source 1..50: mol_type = other DNA
ccrttcaaataaacccttaataatctatattaatcaatattaattcaacc

SEQ ID NO: 34165 - DNA, 50 bp, synthetic construct
  source 1..50: mol_type = other DNA
aactatatataaaaaaacttaattcactttataactataaacaattcacc

SEQ ID NO: 34166 - DNA, 50 bp, synthetic construct
  source 1..50: mol_type = other DNA
ccaacccacaaaaaaacaattaaaatccatctcccaacatcctctataac

SEQ ID NO: 34167 - DNA, 50 bp, synthetic construct
  source 1..50: mol_type = other DNA
ctctttctatttcaaacatatccttcrataactccctatttaccrtctcc

SEQ ID NO: 34168 - DNA, 50 bp, synthetic construct
  source 1..50: mol_type = other DNA
aaccactcttcccctaaacaaaatactaataataataaatactaataaac

SEQ ID NO: 34169 - DNA, 50 bp, synthetic construct
  source 1..50: mol_type = other DNA
aaatatccacrtcaaaaaaactctaataataactaaaaatccaaaatccc

SEQ ID NO: 34170 - DNA, 50 bp, synthetic construct
  source 1..50: mol_type = other DNA
aaatcccractactactactactactactcctacaaaaactacacattac

SEQ ID NO: 34171 - DNA, 50 bp, synthetic construct
  source 1..50: mol_type = other DNA
tactactactcctacaaaaactacacattacraacattcaatacctaccc

SEQ ID NO: 34172 - DNA, 50 bp, synthetic construct
  source 1..50: mol_type = other DNA
cacaaaaacacrtaactataaccrtaaactcaaataacaactataaaacc

SEQ ID NO: 34173 - DNA, 50 bp, synthetic construct
  source 1..50: mol_type = other DNA
aattaataaacaaaataatacaatataaaaaaccraacttaataactcac

SEQ ID NO: 34174 - DNA, 50 bp, synthetic construct
  source 1..50: mol_type = other DNA
aaaaattttataaattttctttctcctcctccaaccttaacraaaaccac

SEQ ID NO: 34175 - DNA, 50 bp, synthetic construct
  source 1..50: mol_type = other DNA
ctaaacacaatttctctacccactcraaaaactataaccatattaacctc

SEQ ID NO: 34176 - DNA, 50 bp, synthetic construct
  source 1..50: mol_type = other DNA
cattaataaaaaaccracacttaactctcatttccttattccatcaaaac

SEQ ID NO: 34177 - DNA, 50 bp, synthetic construct
  source 1..50: mol_type = other DNA
racacttaactctcatttccttattccatcaaaacrctatccaactaaac

SEQ ID NO: 34178 - DNA, 50 bp, synthetic construct
  source 1..50: mol_type = other DNA
cctaccttataaaacaccttcaccacraaaaaaacccacttatcaaactc

SEQ ID NO: 34179 - DNA, 50 bp, synthetic construct
  source 1..50: mol_type = other DNA
aaaaaaaaacctcaataactataacctaccttataaaacaccttcaccac

SEQ ID NO: 34180 - DNA, 50 bp, synthetic construct
  source 1..50: mol_type = other DNA
aaatatcttacaaaataaatcacaaccactaaaatttcctctcttactac

SEQ ID NO: 34181 - DNA, 50 bp, synthetic construct
  source 1..50: mol_type = other DNA
aaataaatcacaaccactaaaatttcctctcttactacraaaatacaaac

SEQ ID NO: 34182 - DNA, 50 bp, synthetic construct
  source 1..50: mol_type = other DNA
aacattatctaaaaaattacccaaataataaatcacaaaaataaatcatc

SEQ ID NO: 34183 - DNA, 50 bp, synthetic construct
  source 1..50: mol_type = other DNA
attattctttatccctccttaaaaaaccttcaaatattactaacattccc

SEQ ID NO: 34184 - DNA, 50 bp, synthetic construct
  source 1..50: mol_type = other DNA
aacattcccratctacccaataacacatttaatttataaactaaaccctc

SEQ ID NO: 34185 - DNA, 50 bp, synthetic construct
  source 1..50: mol_type = other DNA
aacaatcaaaatcttaaaaaaaaaacctctaatcaccccactaaataacc

SEQ ID NO: 34186 - DNA, 50 bp, synthetic construct
  source 1..50: mol_type = other DNA
aatacacccctctaatcacaactattaaattaaacttaaacaaaaaaatc

SEQ ID NO: 34187 - DNA, 50 bp, synthetic construct
  source 1..50: mol_type = other DNA
ctttcactctattacccaaattaaaatacaataacataactaaaactcac

SEQ ID NO: 34188 - DNA, 50 bp, synthetic construct
  source 1..50: mol_type = other DNA
taactttaaaaaatatatctatatctttttttctttctctttcraacacc

SEQ ID NO: 34189 - DNA, 50 bp, synthetic construct
  source 1..50: mol_type = other DNA
tacaacctaactttaaaaaatatatctatatctttttttctttctctttc

SEQ ID NO: 34190 - DNA, 50 bp, synthetic construct
  source 1..50: mol_type = other DNA
tcctaccaatattttaattacaacttcataaaaaaccctaaactaaaacc

SEQ ID NO: 34191 - DNA, 50 bp, synthetic construct
  source 1..50: mol_type = other DNA
caaacataaaaaaacttaactaaaattaaaaaatccacttccaaaataac

SEQ ID NO: 34192 - DNA, 50 bp, synthetic construct
  source 1..50: mol_type = other DNA
aaaataacrcactcaataactcttaactaaaaacctcaattccctactac

SEQ ID NO: 34193 - DNA, 50 bp, synthetic construct
  source 1..50: mol_type = other DNA
aactacttaaataaactcataacatacaactaacctcccctaaaacaatc

SEQ ID NO: 34194 - DNA, 50 bp, synthetic construct
  source 1..50: mol_type = other DNA
atccaacaataaacataaccataaactaaactcaaaaaccactccctatc

SEQ ID NO: 34195 - DNA, 50 bp, synthetic construct
  source 1..50: mol_type = other DNA
ataaaaccrcatcttctataataatcctttcaaaaaacaaaacctaattc

SEQ ID NO: 34196 - DNA, 50 bp, synthetic construct
  source 1..50: mol_type = other DNA
aaaaaaacraattaaactctaccttctaaaaaaattatcacaaaaaatac

SEQ ID NO: 34197 - DNA, 50 bp, synthetic construct
  source 1..50: mol_type = other DNA
ctaaaatacaataacaaaatcataacttactacaacctaaattaaacctc

SEQ ID NO: 34198 - DNA, 50 bp, synthetic construct
  source 1..50: mol_type = other DNA
ttcaaatatacaaaaataactttcctacctcactttaacactatctcctc

SEQ ID NO: 34199 - DNA, 50 bp, synthetic construct
  source 1..50: mol_type = other DNA
ttactcaacttctctaaaccccaatttccttatttactccctaaaaattc

SEQ ID NO: 34200 - DNA, 50 bp, synthetic construct
  source 1..50: mol_type = other DNA
aaaccataaaacaacaaacttcaaaaccttatcaaaacccattccctatc

SEQ ID NO: 34201 - DNA, 50 bp, synthetic construct
  source 1..50: mol_type = other DNA
attaaaacaatctctaaaacaacrtttccaccaaaacaaaacataaaatc

SEQ ID NO: 34202 - DNA, 50 bp, synthetic construct
  source 1..50: mol_type = other DNA
cccaaaaaaattttaaactcaacractccatatcctaccttaataaaaac

SEQ ID NO: 34203 - DNA, 50 bp, synthetic construct
  source 1..50: mol_type = other DNA
taactaaaatacccctaacaactaatcaaacaaaaactaaacrtaataac

SEQ ID NO: 34204 - DNA, 50 bp, synthetic construct
  source 1..50: mol_type = other DNA
aaataaataaaacaacattccacrtaaaaaaaacaacattaaacaacaac

SEQ ID NO: 34205 - DNA, 50 bp, synthetic construct
  source 1..50: mol_type = other DNA
aaatatcactcctcctcttcacttataacattttaaaaaaaattaaaacc

SEQ ID NO: 34206 - DNA, 50 bp, synthetic construct
  source 1..50: mol_type = other DNA
aaaacctcrattaaaataaacaaaaaacatactaaccrataaactctaac

SEQ ID NO: 34207 - DNA, 50 bp, synthetic construct
  source 1..50: mol_type = other DNA
caaaaaaaaattcaaaaaaccccaaactcaaaactctaacctaacaaaac

SEQ ID NO: 34208 - DNA, 50 bp, synthetic construct
  source 1..50: mol_type = other DNA
aaaataatatccaaatatcttcctaactccacaatcaaaaaacccctacc

SEQ ID NO: 34209 - DNA, 50 bp, synthetic construct
  source 1..50: mol_type = other DNA
aaaaaactaaacccatcctaatatataaaaaataaatccaaaatccraac

SEQ ID NO: 34210 - DNA, 50 bp, synthetic construct
  source 1..50: mol_type = other DNA
aattcaatatccacaaaaaccatctcctacctcaaaacaacaaaaaaacc

SEQ ID NO: 34211 - DNA, 50 bp, synthetic construct
  source 1..50: mol_type = other DNA
aaaaaaaacactaacrtcttcctcactcaaaaaactatccctactccttc

SEQ ID NO: 34212 - DNA, 50 bp, synthetic construct
  source 1..50: mol_type = other DNA
aaaaacrtaaccrctaaaacacaacatcacaaaaaaataatcaaacctcc

SEQ ID NO: 34213 - DNA, 50 bp, synthetic construct
  source 1..50: mol_type = other DNA
aacctacaccctatatactttatcactcaaaaaataaattctactaaaac

SEQ ID NO: 34214 - DNA, 50 bp, synthetic construct
  source 1..50: mol_type = other DNA
aaaacccctaccaaaaaaccttaaataaaaataatttaaataataactcc

SEQ ID NO: 34215 - DNA, 50 bp, synthetic construct
  source 1..50: mol_type = other DNA
acactctttccttcaaaaccttcatttataccaacaaaaaactctcaccc

SEQ ID NO: 34216 - DNA, 50 bp, synthetic construct
  source 1..50: mol_type = other DNA
aataaaattaacccraaaatttaaaactaattataaccaaataaatcccc

SEQ ID NO: 34217 - DNA, 50 bp, synthetic construct
  source 1..50: mol_type = other DNA
ratatcctccctctatatctatctcctataactaactaactaaacccacc

SEQ ID NO: 34218 - DNA, 50 bp, synthetic construct
  source 1..50: mol_type = other DNA
tataaaaaacttccttcatctaaaacacacctctcaacctatttaactac

SEQ ID NO: 34219 - DNA, 50 bp, synthetic construct
  source 1..50: mol_type = other DNA
cccaacaactctaataaccccaaacattaacataaaccctatctaaaaac

SEQ ID NO: 34220 - DNA, 50 bp, synthetic construct
  source 1..50: mol_type = other DNA
aaacaaaattattaacacctaactattaaatctaaaaaaacacaaccatc

SEQ ID NO: 34221 - DNA, 50 bp, synthetic construct
  source 1..50: mol_type = other DNA
aaaactccaatccaaaacaataataaccatacaaaaatcaaaaaacaaac

SEQ ID NO: 34222 - DNA, 50 bp, synthetic construct
  source 1..50: mol_type = other DNA
taatacaaaaaaataccacaaaaaacctactaaaccctataaactaaaac

SEQ ID NO: 34223 - DNA, 50 bp, synthetic construct
  source 1..50: mol_type = other DNA
aaaaaaataacaaacaaataacatccacrtcaaaaaacaatcattactac

SEQ ID NO: 34224 - DNA, 50 bp, synthetic construct
  source 1..50: mol_type = other DNA
aaaataccatcctaaacccataatacttacaataacctatataaaacatc

SEQ ID NO: 34225 - DNA, 50 bp, synthetic construct
  source 1..50: mol_type = other DNA
ccaaaccataaaattaaaacaccraaaacctactacraattcaaattccc

SEQ ID NO: 34226 - DNA, 50 bp, synthetic construct
  source 1..50: mol_type = other DNA
ctacctctccccccaaacctttatattctaaaaataaaaaatcaaaaccc

SEQ ID NO: 34227 - DNA, 50 bp, synthetic construct
  source 1..50: mol_type = other DNA
aaaaacccacaactcaactatcaaaaacaaaattaaacatcaaaacctcc

SEQ ID NO: 34228 - DNA, 50 bp, synthetic construct
  source 1..50: mol_type = other DNA
tctatccctaacaactaaactataaatctcctactatatttacctatatc

SEQ ID NO: 34229 - DNA, 50 bp, synthetic construct
  source 1..50: mol_type = other DNA
aaacractaaaaacraactaactactcaatcccttcccataaaattaaac

SEQ ID NO: 34230 - DNA, 50 bp, synthetic construct
  source 1..50: mol_type = other DNA
actaaccaaactaaaacraacacaaacaaaaaccaaaatcaatatacrcc

SEQ ID NO: 34231 - DNA, 50 bp, synthetic construct
  source 1..50: mol_type = other DNA
ataaaacaatatataaaactaaaactaaaaaacccccrcaaatctacctc

SEQ ID NO: 34232 - DNA, 50 bp, synthetic construct
  source 1..50: mol_type = other DNA
aaaacrctcccaacaattccraataaaaataacaaatataaacatatccc

SEQ ID NO: 34233 - DNA, 50 bp, synthetic construct
  source 1..50: mol_type = other DNA
aatttcccttaacttataaaaattctttcaaaaacctaccaaaaaaacac

SEQ ID NO: 34234 - DNA, 50 bp, synthetic construct
  source 1..50: mol_type = other DNA
caattaattcccccaacataacttctcaaaactcccaaaaaaaacaaacc

SEQ ID NO: 34235 - DNA, 50 bp, synthetic construct
  source 1..50: mol_type = other DNA
cttcaaaccaaatcccctctatttacacaaaaaatctaaaaaataccctc

SEQ ID NO: 34236 - DNA, 50 bp, synthetic construct
  source 1..50: mol_type = other DNA
aatcccctctatttacacaaaaaatctaaaaaataccctcraaaaattcc

SEQ ID NO: 34237 - DNA, 50 bp, synthetic construct
  source 1..50: mol_type = other DNA
caaaaaccccaaaaactttacttctaccctaaaaacttctaattttttac

SEQ ID NO: 34238 - DNA, 50 bp, synthetic construct
  source 1..50: mol_type = other DNA
tcrtataccccttaataaatacaaaactatttctaaaccattttctactc

SEQ ID NO: 34239 - DNA, 50 bp, synthetic construct
  source 1..50: mol_type = other DNA
ccraacaaaaaataacccaaaaacaaccttacatccatcaaaaaacacac

SEQ ID NO: 34240 - DNA, 50 bp, synthetic construct
  source 1..50: mol_type = other DNA
aaccacaaaaataacaacatttataaaacrcctaataaataccaaacccc

SEQ ID NO: 34241 - DNA, 50 bp, synthetic construct
  source 1..50: mol_type = other DNA
aacctaatatccactaaacrtcccataaatactaccacttttataattcc

SEQ ID NO: 34242 - DNA, 50 bp, synthetic construct
  source 1..50: mol_type = other DNA
crtcccataaatactaccacttttataattccraaaaaacractcactcc

SEQ ID NO: 34243 - DNA, 50 bp, synthetic construct
  source 1..50: mol_type = other DNA
tataaacccaacaaacctatattctaaccttaaataactataaataaatc

SEQ ID NO: 34244 - DNA, 50 bp, synthetic construct
  source 1..50: mol_type = other DNA
raaaaataaataaaacaccccctaaaccccattaactacctctacaaaac

SEQ ID NO: 34245 - DNA, 50 bp, synthetic construct
  source 1..50: mol_type = other DNA
ataccccatataaatacctaaataaaaaataaatatctcctcctccaaac

SEQ ID NO: 34246 - DNA, 50 bp, synthetic construct
  source 1..50: mol_type = other DNA
taaaaattaccttataaaaatactaaaccaaaaaacrtaaccaacraaac

SEQ ID NO: 34247 - DNA, 50 bp, synthetic construct
  source 1..50: mol_type = other DNA
aaatctaaaaattaccttataaaaatactaaaccaaaaaacrtaaccaac

SEQ ID NO: 34248 - DNA, 50 bp, synthetic construct
  source 1..50: mol_type = other DNA
caaaaatcaaaatctaaaaattaccttataaaaatactaaaccaaaaaac

SEQ ID NO: 34249 - DNA, 50 bp, synthetic construct
  source 1..50: mol_type = other DNA
aacctattaactctaaacactaaccaaaaaaaataaccaaaaataaaaac

SEQ ID NO: 34250 - DNA, 50 bp, synthetic construct
  source 1..50: mol_type = other DNA
taaaaataaaaccaccataaacctaactactactaaaaaataaaactccc

SEQ ID NO: 34251 - DNA, 50 bp, synthetic construct
  source 1..50: mol_type = other DNA
aaaataaaaccaccataaacctaactactactaaaaaataaaactcccrc

SEQ ID NO: 34252 - DNA, 50 bp, synthetic construct
  source 1..50: mol_type = other DNA
crctaaaatttcaacttttaattaacctaaatttaccatcctaacactcc

SEQ ID NO: 34253 - DNA, 50 bp, synthetic construct
  source 1..50: mol_type = other DNA
aaatcaaaacaacttttatttacttaaacaacaaacataacacacaacac

SEQ ID NO: 34254 - DNA, 50 bp, synthetic construct
  source 1..50: mol_type = other DNA
cccaaatcatcraaactaaaccattacctttttccccaccctaaataatc

SEQ ID NO: 34255 - DNA, 50 bp, synthetic construct
  source 1..50: mol_type = other DNA
cttttttctaaataaaactaaaaaaacacactaaaatcccccaaatcatc

SEQ ID NO: 34256 - DNA, 50 bp, synthetic construct
  source 1..50: mol_type = other DNA
cttaatctcccaatacrccraaattacaaataactcaaatataaaccacc

SEQ ID NO: 34257 - DNA, 50 bp, synthetic construct
  source 1..50: mol_type = other DNA
ataatcctcctaccttaacctccccaataaaactaaaactacaaatatac

SEQ ID NO: 34258 - DNA, 50 bp, synthetic construct
  source 1..50: mol_type = other DNA
aaataaaaaataaccaaattacaataacaaacaaaactcraatctctacc

SEQ ID NO: 34259 - DNA, 50 bp, synthetic construct
  source 1..50: mol_type = other DNA
aaaatactaataaaccraaatataatccaaaccacaaacaacaaaacaac

SEQ ID NO: 34260 - DNA, 50 bp, synthetic construct
  source 1..50: mol_type = other DNA
aaaaccatcccaaaaacatccaactaaaaaactaaaatataaaacctaac

SEQ ID NO: 34261 - DNA, 50 bp, synthetic construct
  source 1..50: mol_type = other DNA
aaataaaccaaaccaccraaacrcaaaactcaccctacaactaaataatc

SEQ ID NO: 34262 - DNA, 50 bp, synthetic construct
  source 1..50: mol_type = other DNA
catctatatacaaactcttaaacatacacrcraatcraaacctaaaaaac

SEQ ID NO: 34263 - DNA, 50 bp, synthetic construct
  source 1..50: mol_type = other DNA
taactatatacccacatctatatacaaactcttaaacatacacrcraatc

SEQ ID NO: 34264 - DNA, 50 bp, synthetic construct
  source 1..50: mol_type = other DNA
ataaataactatatacccacatctatatacaaactcttaaacatacacrc

SEQ ID NO: 34265 - DNA, 50 bp, synthetic construct
  source 1..50: mol_type = other DNA
aaataaataactatatacccacatctatatacaaactcttaaacatacac

SEQ ID NO: 34266 - DNA, 50 bp, synthetic construct
  source 1..50: mol_type = other DNA
attttatttcttctaaaaaaacccataataaataattctataaaaacccc

SEQ ID NO: 34267 - DNA, 50 bp, synthetic construct
  source 1..50: mol_type = other DNA
ataaaacaaaaaaactttacctcccaactttatcttccrataattaaaac

SEQ ID NO: 34268 - DNA, 50 bp, synthetic construct
  source 1..50: mol_type = other DNA
tcccaactttatcttccrataattaaaacrcttaaaaacttccaaatccc

SEQ ID NO: 34269 - DNA, 50 bp, synthetic construct
  source 1..50: mol_type = other DNA
attaaaacrcttaaaaacttccaaatcccrataaatacccataatcaacc

SEQ ID NO: 34270 - DNA, 50 bp, synthetic construct
  source 1..50: mol_type = other DNA
aaaaaatataaaacaatatctacaactcacaaaaacatttccctccctac

SEQ ID NO: 34271 - DNA, 50 bp, synthetic construct
  source 1..50: mol_type = other DNA
aaaaaaacacacacctcttaaaccacrtaaactaactaaaaaccctacac

SEQ ID NO: 34272 - DNA, 50 bp, synthetic construct
  source 1..50: mol_type = other DNA
taccactcctaaaactaaaaactaaccctaatcaccaaaataaaactaac

SEQ ID NO: 34273 - DNA, 50 bp, synthetic construct
  source 1..50: mol_type = other DNA
acaaatacaaaaatacaaatatataataatacrcraaccctaaataaacc

SEQ ID NO: 34274 - DNA, 50 bp, synthetic construct
  source 1..50: mol_type = other DNA
ctactactatacatcctcactttcctactaatacracccatccaaaactc

SEQ ID NO: 34275 - DNA, 50 bp, synthetic construct
  source 1..50: mol_type = other DNA
tatttaataactaattttccctactactaatcttaacctaccccttcatc

SEQ ID NO: 34276 - DNA, 50 bp, synthetic construct
  source 1..50: mol_type = other DNA
aaaatattcctatcttttaacatatcccaccctttctttccttacctcac

SEQ ID NO: 34277 - DNA, 50 bp, synthetic construct
  source 1..50: mol_type = other DNA
cttattatccaaattaatctcraactcctaaactcaaaccatcctcccac

SEQ ID NO: 34278 - DNA, 50 bp, synthetic construct
  source 1..50: mol_type = other DNA
aatccaacacaccaacataacacatatatacatatataacaaacctacac

SEQ ID NO: 34279 - DNA, 50 bp, synthetic construct
  source 1..50: mol_type = other DNA
tttcatttaaaaaccaacataacataataactaaaaactaaaaccttaac

SEQ ID NO: 34280 - DNA, 50 bp, synthetic construct
  source 1..50: mol_type = other DNA
aattcctaaccactataccatactaatcctcaaataaaaaataacaaatc

SEQ ID NO: 34281 - DNA, 50 bp, synthetic construct
  source 1..50: mol_type = other DNA
cctaaccactataccatactaatcctcaaataaaaaataacaaatcraac

SEQ ID NO: 34282 - DNA, 50 bp, synthetic construct
  source 1..50: mol_type = other DNA
acaaaaccaaaacaaatactttaaattttacccttaaacaataaaaaatc

SEQ ID NO: 34283 - DNA, 50 bp, synthetic construct
  source 1..50: mol_type = other DNA
atacaaaaaccctaaaataacacaaaactttaaaaaaacraataacaccc

SEQ ID NO: 34284 - DNA, 50 bp, synthetic construct
  source 1..50: mol_type = other DNA
caactactaaactcaataataaataacaatcaaacraatataacaaaaac

SEQ ID NO: 34285 - DNA, 50 bp, synthetic construct
  source 1..50: mol_type = other DNA
craacctacctataccaactactaaactcaataataaataacaatcaaac

SEQ ID NO: 34286 - DNA, 50 bp, synthetic construct
  source 1..50: mol_type = other DNA
ctaacacaaacaaacccracrcaacaaaaaacacaatccrtattaattac

SEQ ID NO: 34287 - DNA, 50 bp, synthetic construct
  source 1..50: mol_type = other DNA
atatctatcactcccaaaaaccttttctactaactatacaatttacactc

SEQ ID NO: 34288 - DNA, 50 bp, synthetic construct
  source 1..50: mol_type = other DNA
caaaccctaacaataacraaatactttcratacaaaaaccraactaaccc

SEQ ID NO: 34289 - DNA, 50 bp, synthetic construct
  source 1..50: mol_type = other DNA
rcccaactaatcacaataaacccaaaccctaacaataacraaatactttc

SEQ ID NO: 34290 - DNA, 50 bp, synthetic construct
  source 1..50: mol_type = other DNA
aaacccatccacaaaaaaccaaaaccaaaaaactaatacactaatacctc

SEQ ID NO: 34291 - DNA, 50 bp, synthetic construct
  source 1..50: mol_type = other DNA
tctctaaccctaacttcctataaataaaccccttcaaaaacataatcaac

SEQ ID NO: 34292 - DNA, 50 bp, synthetic construct
  source 1..50: mol_type = other DNA
aaatcttatccttcccaaaacctaacaaaaacrttcctacraaataccac

SEQ ID NO: 34293 - DNA, 50 bp, synthetic construct
  source 1..50: mol_type = other DNA
aaaacrcraacaaaaacaaaatcttatccttcccaaaacctaacaaaaac

SEQ ID NO: 34294 - DNA, 50 bp, synthetic construct
  source 1..50: mol_type = other DNA
aaacaaaccctcaaacttatacratttcaaaacacaaaccaaaaaaacrc

SEQ ID NO: 34295 - DNA, 50 bp, synthetic construct
  source 1..50: mol_type = other DNA
aaaaacaaaccctcaaacttatacratttcaaaacacaaaccaaaaaaac

SEQ ID NO: 34296 - DNA, 50 bp, synthetic construct
  source 1..50: mol_type = other DNA
aactaaatctatacctatccccataaacctcttaactcaacacaatcacc

SEQ ID NO: 34297 - DNA, 50 bp, synthetic construct
  source 1..50: mol_type = other DNA
ccaaaaaaaaaatccaaaaccctcaatcctacatttaaaccccttaaacc

SEQ ID NO: 34298 - DNA, 50 bp, synthetic construct
  source 1..50: mol_type = other DNA
ataactaaaaactacccaaataaaaaatacactacaaccccatccttacc

SEQ ID NO: 34299 - DNA, 50 bp, synthetic construct
  source 1..50: mol_type = other DNA
acaactaaatcctatatacaaataaccaccaacctaacctataaaaccac

SEQ ID NO: 34300 - DNA, 50 bp, synthetic construct
  source 1..50: mol_type = other DNA
ttactctaaaactatataaaccactacccctccctatcctcattaaatac

SEQ ID NO: 34301 - DNA, 50 bp, synthetic construct
  source 1..50: mol_type = other DNA
atataacaccctaaactcctaaattctataacacactattacctcattcc

SEQ ID NO: 34302 - DNA, 50 bp, synthetic construct
  source 1..50: mol_type = other DNA
acccaaaatactacataacaaaaatataaatcttatcctatatacaatac

SEQ ID NO: 34303 - DNA, 50 bp, synthetic construct
  source 1..50: mol_type = other DNA
attctattttaattatatacttttcaactaacttactaataacactatac

SEQ ID NO: 34304 - DNA, 50 bp, synthetic construct
  source 1..50: mol_type = other DNA
taacaaatataccctaaaaaattttacttttacatcttttctttaacttc

SEQ ID NO: 34305 - DNA, 50 bp, synthetic construct
  source 1..50: mol_type = other DNA
accacctttctaacacaaaaatattaaaatcttatacaacaatcaccacc

SEQ ID NO: 34306 - DNA, 50 bp, synthetic construct
  source 1..50: mol_type = other DNA
cataaactaaaactcaattctaccctacaataaacaacacttcaaaaacc

SEQ ID NO: 34307 - DNA, 50 bp, synthetic construct
  source 1..50: mol_type = other DNA
attctaccctacaataaacaacacttcaaaaaccraacataataactcac

SEQ ID NO: 34308 - DNA, 50 bp, synthetic construct
  source 1..50: mol_type = other DNA
ttcactatattttcaaactaatctttaacttctaatctcaaataattcac

SEQ ID NO: 34309 - DNA, 50 bp, synthetic construct
  source 1..50: mol_type = other DNA
atctccttttcaaataatataaaacaaccaatattattcctcttcaaaac

SEQ ID NO: 34310 - DNA, 50 bp, synthetic construct
  source 1..50: mol_type = other DNA
aaaacatcaccctttacaataaaaaaactacaaatttaaaatacatctcc

SEQ ID NO: 34311 - DNA, 50 bp, synthetic construct
  source 1..50: mol_type = other DNA
aaatatcaacatattaacatattatattctaccttcataatttaatcacc

SEQ ID NO: 34312 - DNA, 50 bp, synthetic construct
  source 1..50: mol_type = other DNA
aacaacatttcaaactattctataaccatacacaatataaaaaaccaaac

SEQ ID NO: 34313 - DNA, 50 bp, synthetic construct
  source 1..50: mol_type = other DNA
aaaatcraaacataccractttaactacactaaactcacctaaaaaaacc

SEQ ID NO: 34314 - DNA, 50 bp, synthetic construct
  source 1..50: mol_type = other DNA
tcaaaaacaaatacaaatcatataacaactcctaaaaatcraaacatacc

SEQ ID NO: 34315 - DNA, 50 bp, synthetic construct
  source 1..50: mol_type = other DNA
aaaaccrattcttccaaataaactcaatacaattaaaaccracatacccc

SEQ ID NO: 34316 - DNA, 50 bp, synthetic construct
  source 1..50: mol_type = other DNA
acaaatacataataccacrcccaattaatttttctattttcaataaaaac

SEQ ID NO: 34317 - DNA, 50 bp, synthetic construct
  source 1..50: mol_type = other DNA
tctcaacttactttattacccaaactaatctaaaactcctatactcaaac

SEQ ID NO: 34318 - DNA, 50 bp, synthetic construct
  source 1..50: mol_type = other DNA
taataaatatactaataaccctaatctactcatcatacattatatatatc

SEQ ID NO: 34319 - DNA, 50 bp, synthetic construct
  source 1..50: mol_type = other DNA
ctaaatctaattcctacttttatataaccacttctactaactccttaatc

SEQ ID NO: 34320 - DNA, 50 bp, synthetic construct
  source 1..50: mol_type = other DNA
attcctacttttatataaccacttctactaactccttaatcrttttttcc

SEQ ID NO: 34321 - DNA, 50 bp, synthetic construct
  source 1..50: mol_type = other DNA
taacaacttttacttcaaaacctaaaaacaaattaaaattactttatcac

SEQ ID NO: 34322 - DNA, 50 bp, synthetic construct
  source 1..50: mol_type = other DNA
ctccactccccaacaataaataataaaacaaatatcaaaccactcaatac

SEQ ID NO: 34323 - DNA, 50 bp, synthetic construct
  source 1..50: mol_type = other DNA
rtaataatacttaaaatctacacrtatcttaaacacrctccaaaacccac

SEQ ID NO: 34324 - DNA, 50 bp, synthetic construct
  source 1..50: mol_type = other DNA
aaaaaactaacaacrtaataatacttaaaatctacacrtatcttaaacac

SEQ ID NO: 34325 - DNA, 50 bp, synthetic construct
  source 1..50: mol_type = other DNA
actaacataaatcaaaaaactaacaacrtaataatacttaaaatctacac

SEQ ID NO: 34326 - DNA, 50 bp, synthetic construct
  source 1..50: mol_type = other DNA
aaacaatatacccatccaaaaaaactaacataaatcaaaaaactaacaac

SEQ ID NO: 34327 - DNA, 50 bp, synthetic construct
  source 1..50: mol_type = other DNA
atccccrtaaaatctataaaaactaaattaaaatacaaaaacctactacc

SEQ ID NO: 34328 - DNA, 50 bp, synthetic construct
  source 1..50: mol_type = other DNA
aaaaaacctattaaaatcctaaatccctaataaaataaataaaaatcccc

SEQ ID NO: 34329 - DNA, 50 bp, synthetic construct
  source 1..50: mol_type = other DNA
ttattaaaccttcatttacataccataatattcrccacttttaaactaac

SEQ ID NO: 34330 - DNA, 50 bp, synthetic construct
  source 1..50: mol_type = other DNA
aactaacractccrttatttttaataaatctacaaaattataaaaccrtc

SEQ ID NO: 34331 - DNA, 50 bp, synthetic construct
  source 1..50: mol_type = other DNA
aattataaaaccrtcrccaccatccaactcatccaactttaaaactttac

SEQ ID NO: 34332 - DNA, 50 bp, synthetic construct
  source 1..50: mol_type = other DNA
raaaaaatcacttaaaaccaaaaaatccaaaccaacctaaacaacctaac

SEQ ID NO: 34333 - DNA, 50 bp, synthetic construct
  source 1..50: mol_type = other DNA
atccaaaaaatcaaaaactactataaactataatcataccactacactcc

SEQ ID NO: 34334 - DNA, 50 bp, synthetic construct
  source 1..50: mol_type = other DNA
aatcctaactaaaccaatcttcctacctcaaaccactatataactaaaac

SEQ ID NO: 34335 - DNA, 50 bp, synthetic construct
  source 1..50: mol_type = other DNA
ccaaaaaattaaactcaaaacaataaacacrcccctcactaaaaataccc

SEQ ID NO: 34336 - DNA, 50 bp, synthetic construct
  source 1..50: mol_type = other DNA
taacatataatatcrctatatcacccaaactaaaattcaataatacaatc

SEQ ID NO: 34337 - DNA, 50 bp, synthetic construct
  source 1..50: mol_type = other DNA
ctaccataaacaacatcacttacctaactccaaaaaaacccaaaattaac

SEQ ID NO: 34338 - DNA, 50 bp, synthetic construct
  source 1..50: mol_type = other DNA
ataactatacaataaacactctattaaactaaaaacaaaacaatttccac

SEQ ID NO: 34339 - DNA, 50 bp, synthetic construct
  source 1..50: mol_type = other DNA
cactctattaaactaaaaacaaaacaatttccacrctcacaactactatc

SEQ ID NO: 34340 - DNA, 50 bp, synthetic construct
  source 1..50: mol_type = other DNA
aaaattcacctaaaactataaatcactttccaactcctatacccatcrcc

SEQ ID NO: 34341 - DNA, 50 bp, synthetic construct
  source 1..50: mol_type = other DNA
cataaaattcacctaaaactataaatcactttccaactcctatacccatc

SEQ ID NO: 34342 - DNA, 50 bp, synthetic construct
  source 1..50: mol_type = other DNA
aaaactacaataacctaaaaatatcaaaaaaacaaaacccaaatataccc

SEQ ID NO: 34343 - DNA, 50 bp, synthetic construct
  source 1..50: mol_type = other DNA
aaaaacctatattttctcaaattcttctaaataactaatcctaaaattcc

SEQ ID NO: 34344 - DNA, 50 bp, synthetic construct
  source 1..50: mol_type = other DNA
atcataactcataattacattcaaaatacttaaacactttatatactacc

SEQ ID NO: 34345 - DNA, 50 bp, synthetic construct
  source 1..50: mol_type = other DNA
ctcaaatatcctaaatataaccataaatcataacaaatccctccctaaac

SEQ ID NO: 34346 - DNA, 50 bp, synthetic construct
  source 1..50: mol_type = other DNA
aaacttctacctaactacttaaaaaaaaatcttcrcttaaactaataaac

SEQ ID NO: 34347 - DNA, 50 bp, synthetic construct
  source 1..50: mol_type = other DNA
ttcaatcaaaacaatacctacaaaaaatctaaaaaaacacccaaaaacac

SEQ ID NO: 34348 - DNA, 50 bp, synthetic construct
  source 1..50: mol_type = other DNA
aaatactcccccaaattctctacaaacactatcttaattaaaataccacc

SEQ ID NO: 34349 - DNA, 50 bp, synthetic construct
  source 1..50: mol_type = other DNA
caaattctctacaaacactatcttaattaaaataccaccractaaaaaac

SEQ ID NO: 34350 - DNA, 50 bp, synthetic construct
  source 1..50: mol_type = other DNA
aactattattactaaatacctaaatttactaaaactactataacaaaacc

SEQ ID NO: 34351 - DNA, 50 bp, synthetic construct
  source 1..50: mol_type = other DNA
attattactaaatacctaaatttactaaaactactataacaaaaccrcac

SEQ ID NO: 34352 - DNA, 50 bp, synthetic construct
  source 1..50: mol_type = other DNA
aaaaccaaacrtttaaaatcacattcaaaatcaaaatattaacaaaattc

SEQ ID NO: 34353 - DNA, 50 bp, synthetic construct
  source 1..50: mol_type = other DNA
acrtttaaaatcacattcaaaatcaaaatattaacaaaattcrtaccttc

SEQ ID NO: 34354 - DNA, 50 bp, synthetic construct
  source 1..50: mol_type = other DNA
aaatattaacaaaattcrtaccttcraaaaactataaaaatctattccac

SEQ ID NO: 34355 - DNA, 50 bp, synthetic construct
  source 1..50: mol_type = other DNA
aaactataaaaatctattccacrcctctctctattaactcatacataacc

SEQ ID NO: 34356 - DNA, 50 bp, synthetic construct
  source 1..50: mol_type = other DNA
cctctctctattaactcatacataaccrtcttcccctaaatcttcacatc

SEQ ID NO: 34357 - DNA, 50 bp, synthetic construct
  source 1..50: mol_type = other DNA
aataacatcattttaactaaatcatccccataaaaaccctatctctaaac

SEQ ID NO: 34358 - DNA, 50 bp, synthetic construct
  source 1..50: mol_type = other DNA
taaatcatccccataaaaaccctatctctaaacraaacttaataacacac

SEQ ID NO: 34359 - DNA, 50 bp, synthetic construct
  source 1..50: mol_type = other DNA
aaaaaaataaaaactaaaccacaaaaaaccttactcaactcccctaaacc

SEQ ID NO: 34360 - DNA, 50 bp, synthetic construct
  source 1..50: mol_type = other DNA
aaactaaaccacaaaaaaccttactcaactcccctaaaccraaataaacc

SEQ ID NO: 34361 - DNA, 50 bp, synthetic construct
  source 1..50: mol_type = other DNA
cttaacaccctaaattctaaaaatctactatacaaatccccaaaaataac

SEQ ID NO: 34362 - DNA, 50 bp, synthetic construct
  source 1..50: mol_type = other DNA
aaaaaatataaataaccaaacaacaaaaaacatttaacccctcrtcctcc

SEQ ID NO: 34363 - DNA, 50 bp, synthetic construct
  source 1..50: mol_type = other DNA
aaattccaaaaaatataaataaccaaacaacaaaaaacatttaacccctc

SEQ ID NO: 34364 - DNA, 50 bp, synthetic construct
  source 1..50: mol_type = other DNA
aatcctaatataaaaaatcttaaaactctcrctaaacatatcacttaaac

SEQ ID NO: 34365 - DNA, 50 bp, synthetic construct
  source 1..50: mol_type = other DNA
aaaactaaaatattcacctaaatcctaatataaaaaatcttaaaactctc

SEQ ID NO: 34366 - DNA, 50 bp, synthetic construct
  source 1..50: mol_type = other DNA
accacactataataaactcctcaactcctttaaataacctaatactaaac

SEQ ID NO: 34367 - DNA, 50 bp, synthetic construct
  source 1..50: mol_type = other DNA
aaaaactaaccraaacccaaaaaaactttcaaaatataaaaacccaaacc

SEQ ID NO: 34368 - DNA, 50 bp, synthetic construct
  source 1..50: mol_type = other DNA
caataataaaatatcrcaatatcacccatctcctacaacaaaaactaacc

SEQ ID NO: 34369 - DNA, 50 bp, synthetic construct
  source 1..50: mol_type = other DNA
caactcttattacaaaaaataaataacattacracactccatcactaccc

SEQ ID NO: 34370 - DNA, 50 bp, synthetic construct
  source 1..50: mol_type = other DNA
tattacaaaaaataaataacattacracactccatcactacccraaaacc

SEQ ID NO: 34371 - DNA, 50 bp, synthetic construct
  source 1..50: mol_type = other DNA
aaaaatacccttaattatcttcaccatcaaaaccaacaacraaacctacc

SEQ ID NO: 34372 - DNA, 50 bp, synthetic construct
  source 1..50: mol_type = other DNA
tcrtaattctaaaaatacccttaattatcttcaccatcaaaaccaacaac

SEQ ID NO: 34373 - DNA, 50 bp, synthetic construct
  source 1..50: mol_type = other DNA
atatctctataataacraacaaaacttcatccaatacctctatccccacc

SEQ ID NO: 34374 - DNA, 50 bp, synthetic construct
  source 1..50: mol_type = other DNA
tcctacaaaaaatcaaacccattatcracacccaactactaaacataacc

SEQ ID NO: 34375 - DNA, 50 bp, synthetic construct
  source 1..50: mol_type = other DNA
aaatacaccaccctaacctccaatatacaattcatacaattataatttcc

SEQ ID NO: 34376 - DNA, 50 bp, synthetic construct
  source 1..50: mol_type = other DNA
attactataaaaaccaaccccacaaaatcaataaatctctccctatatac

SEQ ID NO: 34377 - DNA, 50 bp, synthetic construct
  source 1..50: mol_type = other DNA
tatcttttcttttatctcttcrtcttatatctttatttctacactctctc

SEQ ID NO: 34378 - DNA, 50 bp, synthetic construct
  source 1..50: mol_type = other DNA
attactaataataatcccccraacccaactatcttttcttttatctcttc

SEQ ID NO: 34379 - DNA, 50 bp, synthetic construct
  source 1..50: mol_type = other DNA
ttatctaacaacctaaccrtctccctataatactatacttcaataatcac

SEQ ID NO: 34380 - DNA, 50 bp, synthetic construct
  source 1..50: mol_type = other DNA
ccactaaaacacaacatcacaaaaaaacrattaaactaccaaataaccrc

SEQ ID NO: 34381 - DNA, 50 bp, synthetic construct
  source 1..50: mol_type = other DNA
aaaactctactcctccacctcttataaaaaacctaacatcaatcaaactc

SEQ ID NO: 34382 - DNA, 50 bp, synthetic construct
  source 1..50: mol_type = other DNA
ctaacrataacraaaaatatcaaaaaacaacacccactacttaacaaacc

SEQ ID NO: 34383 - DNA, 50 bp, synthetic construct
  source 1..50: mol_type = other DNA
aaaaaataaatccaacraacctaaacctaaaaattactaaaaccctaaac

SEQ ID NO: 34384 - DNA, 50 bp, synthetic construct
  source 1..50: mol_type = other DNA
caacraacctaaacctaaaaattactaaaaccctaaacraaaaattaaac

SEQ ID NO: 34385 - DNA, 50 bp, synthetic construct
  source 1..50: mol_type = other DNA
ctcccaccrttacaaaaacaacaataaaataaacatttaacaaaacaaac

SEQ ID NO: 34386 - DNA, 50 bp, synthetic construct
  source 1..50: mol_type = other DNA
caatataattaatcccractccrtaactaacaaatattatatatcttaac

SEQ ID NO: 34387 - DNA, 50 bp, synthetic construct
  source 1..50: mol_type = other DNA
aaactaaccctaaatataaccaaaataccccataaaaaataaacaataac

SEQ ID NO: 34388 - DNA, 50 bp, synthetic construct
  source 1..50: mol_type = other DNA
taccccataaaaaataaacaataacrctataaaatatcctttatatcaac

SEQ ID NO: 34389 - DNA, 50 bp, synthetic construct
  source 1..50: mol_type = other DNA
aaaaaataaacaataacrctataaaatatcctttatatcaacrctttacc

SEQ ID NO: 34390 - DNA, 50 bp, synthetic construct
  source 1..50: mol_type = other DNA
aaacaataacrctataaaatatcctttatatcaacrctttaccratatac

SEQ ID NO: 34391 - DNA, 50 bp, synthetic construct
  source 1..50: mol_type = other DNA
taatattaaaacaaaaatcctccatccrtacctaacrccaaaaacrtaac

SEQ ID NO: 34392 - DNA, 50 bp, synthetic construct
  source 1..50: mol_type = other DNA
acaactaatattaaaacaaaaatcctccatccrtacctaacrccaaaaac

SEQ ID NO: 34393 - DNA, 50 bp, synthetic construct
  source 1..50: mol_type = other DNA
aaaaaacacacaactaatattaaaacaaaaatcctccatccrtacctaac

SEQ ID NO: 34394 - DNA, 50 bp, synthetic construct
  source 1..50: mol_type = other DNA
ccaaataataaaaaacacacaactaatattaaaacaaaaatcctccatcc

SEQ ID NO: 34395 - DNA, 50 bp, synthetic construct
  source 1..50: mol_type = other DNA
aaaacaactaaaaactaaacaaaaactcataacrcccaaaaaacaacrtc

SEQ ID NO: 34396 - DNA, 50 bp, synthetic construct
  source 1..50: mol_type = other DNA
acraaaacaactaaaaactaaacaaaaactcataacrcccaaaaaacaac

SEQ ID NO: 34397 - DNA, 50 bp, synthetic construct
  source 1..50: mol_type = other DNA
accccaaaaaacttacraaaacaactaaaaactaaacaaaaactcataac

SEQ ID NO: 34398 - DNA, 50 bp, synthetic construct
  source 1..50: mol_type = other DNA
tctaaaaaaaactacaaacttaaaacaaccctacaccccaaaaaacttac

SEQ ID NO: 34399 - DNA, 50 bp, synthetic construct
  source 1..50: mol_type = other DNA
aaacaaaaaatataaaccaaactaaaaaccraacctaacaccaaatccac

SEQ ID NO: 34400 - DNA, 50 bp, synthetic construct
  source 1..50: mol_type = other DNA
aaataatcctcacaactcaacctcctaaataactaaaacaacaaatacac

SEQ ID NO: 34401 - DNA, 50 bp, synthetic construct
  source 1..50: mol_type = other DNA
acaactccacttctaaactaaaaacattaaaaccaacaaccctaacctac

SEQ ID NO: 34402 - DNA, 50 bp, synthetic construct
  source 1..50: mol_type = other DNA
aaacccttaaccatcaccacttaccaaaaatataccaaatataaaaaatc

SEQ ID NO: 34403 - DNA, 50 bp, synthetic construct
  source 1..50: mol_type = other DNA
accatcaccacttaccaaaaatataccaaatataaaaaatcraaaacacc

SEQ ID NO: 34404 - DNA, 50 bp, synthetic construct
  source 1..50: mol_type = other DNA
aaacttcaatatataaaaaacaaattcraaaccaattaaccctacacatc

SEQ ID NO: 34405 - DNA, 50 bp, synthetic construct
  source 1..50: mol_type = other DNA
ctacacatcrtaaactacatttctacaccaaaactaaaaattcctaaaac

SEQ ID NO: 34406 - DNA, 50 bp, synthetic construct
  source 1..50: mol_type = other DNA
ctacatttctacaccaaaactaaaaattcctaaaacraacttaaaaatcc

SEQ ID NO: 34407 - DNA, 50 bp, synthetic construct
  source 1..50: mol_type = other DNA
aacaaactttcccaaaccactaaatactcaccataaaataattctaaacc

SEQ ID NO: 34408 - DNA, 50 bp, synthetic construct
  source 1..50: mol_type = other DNA
ccrcaccatctataaatcataaataaaactcaaaaccaaaactcccaaac

SEQ ID NO: 34409 - DNA, 50 bp, synthetic construct
  source 1..50: mol_type = other DNA
acrcctaaaaactctaatcttaaatcccacccataactcataaataatac

SEQ ID NO: 34410 - DNA, 50 bp, synthetic construct
  source 1..50: mol_type = other DNA
taaaaactctaatcttaaatcccacccataactcataaataatacratac

SEQ ID NO: 34411 - DNA, 50 bp, synthetic construct
  source 1..50: mol_type = other DNA
cacccataactcataaataatacratacrattaaaaaaacacaaaaatac

SEQ ID NO: 34412 - DNA, 50 bp, synthetic construct
  source 1..50: mol_type = other DNA
aaaaaattaaccaaaatattcaacaccaaaaacaaataataaccacctac

SEQ ID NO: 34413 - DNA, 50 bp, synthetic construct
  source 1..50: mol_type = other DNA
aaaactaccactacatataaacaatcctaatccttccactatacacctac

SEQ ID NO: 34414 - DNA, 50 bp, synthetic construct
  source 1..50: mol_type = other DNA
acctcaattatcctaccctataaaataaactcaaaattcctaaaacaccc

SEQ ID NO: 34415 - DNA, 50 bp, synthetic construct
  source 1..50: mol_type = other DNA
tttatcaccaaaattttaaataaatacacaattccatcaaaccaaccccc

SEQ ID NO: 34416 - DNA, 50 bp, synthetic construct
  source 1..50: mol_type = other DNA
aacccctaacaaaactattctaactaccaaaaattaaaaaccactaaacc

SEQ ID NO: 34417 - DNA, 50 bp, synthetic construct
  source 1..50: mol_type = other DNA
aacaaaactattctaactaccaaaaattaaaaaccactaaaccraaaacc

SEQ ID NO: 34418 - DNA, 50 bp, synthetic construct
  source 1..50: mol_type = other DNA
aaaatactaataatatacacrtaaaaccaaaccctcccccaaatactccc

SEQ ID NO: 34419 - DNA, 50 bp, synthetic construct
  source 1..50: mol_type = other DNA
tactactcaaaacaactaaataaatattataccctccctaataaaaatac

SEQ ID NO: 34420 - DNA, 50 bp, synthetic construct
  source 1..50: mol_type = other DNA
aaatctcccctacaacccaaatcttaatcaatattaaaaaactaaaacrc

SEQ ID NO: 34421 - DNA, 50 bp, synthetic construct
  source 1..50: mol_type = other DNA
ccaaatctcccctacaacccaaatcttaatcaatattaaaaaactaaaac

SEQ ID NO: 34422 - DNA, 50 bp, synthetic construct
  source 1..50: mol_type = other DNA
taatccaaaataaaatcaaaaaaaacctcaataaacctaccctaactaac

SEQ ID NO: 34423 - DNA, 50 bp, synthetic construct
  source 1..50: mol_type = other DNA
caaataaaataaaaactcacraaaactaacccctttcaaacccatataac

SEQ ID NO: 34424 - DNA, 50 bp, synthetic construct
  source 1..50: mol_type = other DNA
aaactaaaaaacaaactcccrccacataaacctaaaaaaaactaacctcc

SEQ ID NO: 34425 - DNA, 50 bp, synthetic construct
  source 1..50: mol_type = other DNA
aattataaaaaccraataaaatatcrataacactatacctacatctccac

SEQ ID NO: 34426 - DNA, 50 bp, synthetic construct
  source 1..50: mol_type = other DNA
crtattattcctccatcacaactttaattctttacctatttctctcttac

SEQ ID NO: 34427 - DNA, 50 bp, synthetic construct
  source 1..50: mol_type = other DNA
tattcctccatcacaactttaattctttacctatttctctcttacratcc

SEQ ID NO: 34428 - DNA, 50 bp, synthetic construct
  source 1..50: mol_type = other DNA
craaattataccatataaacaaaactaatctcraactcctaatctcaaac

SEQ ID NO: 34429 - DNA, 50 bp, synthetic construct
  source 1..50: mol_type = other DNA
ttataccatataaacaaaactaatctcraactcctaatctcaaacratcc

SEQ ID NO: 34430 - DNA, 50 bp, synthetic construct
  source 1..50: mol_type = other DNA
taatcccaaaaacraaaacccaaaataaaaataaaccaaaaaacctaaac

SEQ ID NO: 34431 - DNA, 50 bp, synthetic construct
  source 1..50: mol_type = other DNA
aaacattaaccrtaaaaataaattaaattacrcctcataatcccaaaaac

SEQ ID NO: 34432 - DNA, 50 bp, synthetic construct
  source 1..50: mol_type = other DNA
actttttaacctacttttatcctaaatccccrtccctaaaaccataaaac

SEQ ID NO: 34433 - DNA, 50 bp, synthetic construct
  source 1..50: mol_type = other DNA
atataaacrtaacctaaaaacaacaataacrtcttaaccaaacattaacc

SEQ ID NO: 34434 - DNA, 50 bp, synthetic construct
  source 1..50: mol_type = other DNA
caaaaacaatactaaacrcratataaacrtaacctaaaaacaacaataac

SEQ ID NO: 34435 - DNA, 50 bp, synthetic construct
  source 1..50: mol_type = other DNA
tctaacctacctactatctcctttctaaaaaaacctctaaactaaatttc

SEQ ID NO: 34436 - DNA, 50 bp, synthetic construct
  source 1..50: mol_type = other DNA
tcrtattactcattcccccaccaaataaccctactacaattaataaaaac

SEQ ID NO: 34437 - DNA, 50 bp, synthetic construct
  source 1..50: mol_type = other DNA
ttcccccaccaaataaccctactacaattaataaaaacrccaaaactaac

SEQ ID NO: 34438 - DNA, 50 bp, synthetic construct
  source 1..50: mol_type = other DNA
taaccctactacaattaataaaaacrccaaaactaacraaacaaaaaaac

SEQ ID NO: 34439 - DNA, 50 bp, synthetic construct
  source 1..50: mol_type = other DNA
rtaccaaccctaatacaaatcraacataaccaaacracttaaacaacaac

SEQ ID NO: 34440 - DNA, 50 bp, synthetic construct
  source 1..50: mol_type = other DNA
aacaccattatacactaacaaaaaattcctctactaacaacrtcctaacc

SEQ ID NO: 34441 - DNA, 50 bp, synthetic construct
  source 1..50: mol_type = other DNA
ccaaataaaaacaccattatacactaacaaaaaattcctctactaacaac

SEQ ID NO: 34442 - DNA, 50 bp, synthetic construct
  source 1..50: mol_type = other DNA
tatacaacaatatcccaacaatacacaacraaactaatataaaatttcac

SEQ ID NO: 34443 - DNA, 50 bp, synthetic construct
  source 1..50: mol_type = other DNA
aaatatacacttccccaaaaaacacaaccrtaaaacttcacatcaatttc

SEQ ID NO: 34444 - DNA, 50 bp, synthetic construct
  source 1..50: mol_type = other DNA
aaaaaaaccccctttccccataacccaatcctaacataaattacttaaac

SEQ ID NO: 34445 - DNA, 50 bp, synthetic construct
  source 1..50: mol_type = other DNA
aaaaaataacctaataacctaactatataatttaatactaaataaaacac

SEQ ID NO: 34446 - DNA, 50 bp, synthetic construct
  source 1..50: mol_type = other DNA
taacraaaatattaccataacccataaaataactttaactaaccrccccc

SEQ ID NO: 34447 - DNA, 50 bp, synthetic construct
  source 1..50: mol_type = other DNA
ctaaacttacraattaataaaacaaaacaaaaccaaaccccaataacccc

SEQ ID NO: 34448 - DNA, 50 bp, synthetic construct
  source 1..50: mol_type = other DNA
acaaataaaatcaaaccrccraacctccttctaaaaattactaaacttac

SEQ ID NO: 34449 - DNA, 50 bp, synthetic construct
  source 1..50: mol_type = other DNA
atataaacctctaccaaaaaacrtttacaaacaaataaaatcaaaccrcc

SEQ ID NO: 34450 - DNA, 50 bp, synthetic construct
  source 1..50: mol_type = other DNA
rctatataaacctctaccaaaaaacrtttacaaacaaataaaatcaaacc

SEQ ID NO: 34451 - DNA, 50 bp, synthetic construct
  source 1..50: mol_type = other DNA
ctataaaccttatctcctatttacrataaaactatacacracractatac

SEQ ID NO: 34452 - DNA, 50 bp, synthetic construct
  source 1..50: mol_type = other DNA
aaaaaccrctataaaccttatctcctatttacrataaaactatacacrac

SEQ ID NO: 34453 - DNA, 50 bp, synthetic construct
  source 1..50: mol_type = other DNA
taaaataaaaccraaaaaactaacctataaatcaaaaccacccccaaaac

SEQ ID NO: 34454 - DNA, 50 bp, synthetic construct
  source 1..50: mol_type = other DNA
taaaaaaaaccccractccatctaacctatcaataaccataactatatcc

SEQ ID NO: 34455 - DNA, 50 bp, synthetic construct
  source 1..50: mol_type = other DNA
aaaaaaccacctcraacacaaccataaccactaacaaaccaaataaaacc

SEQ ID NO: 34456 - DNA, 50 bp, synthetic construct
  source 1..50: mol_type = other DNA
aactctaccactaaacaaaaaacaccaaaaaaaacccaaaaaacacaacc

SEQ ID NO: 34457 - DNA, 50 bp, synthetic construct
  source 1..50: mol_type = other DNA
ccaacrctaaccttcaactttctaattctacrcaaatacrtataaatacc

SEQ ID NO: 34458 - DNA, 50 bp, synthetic construct
  source 1..50: mol_type = other DNA
ccctcttcattatctccaaataaacaaaaccaaacaaacracatccacac

SEQ ID NO: 34459 - DNA, 50 bp, synthetic construct
  source 1..50: mol_type = other DNA
aacaaaaatacctacaaccccaacrctaaccttcaactttctaattctac

SEQ ID NO: 34460 - DNA, 50 bp, synthetic construct
  source 1..50: mol_type = other DNA
actaaaaaataataacttctatacraaacaaaaatacctacaaccccaac

SEQ ID NO: 34461 - DNA, 50 bp, synthetic construct
  source 1..50: mol_type = other DNA
taaacracaaattcacaaacaacccaacacatatcaaacattaccraacc

SEQ ID NO: 34462 - DNA, 50 bp, synthetic construct
  source 1..50: mol_type = other DNA
ctacttaaacracaaattcacaaacaacccaacacatatcaaacattacc

SEQ ID NO: 34463 - DNA, 50 bp, synthetic construct
  source 1..50: mol_type = other DNA
aaaacracccrataatacctaacatatattaaattatttataaacctacc

SEQ ID NO: 34464 - DNA, 50 bp, synthetic construct
  source 1..50: mol_type = other DNA
accaccttcrtatataccaaaaaccracaactcracttaatttaaaaaac

SEQ ID NO: 34465 - DNA, 50 bp, synthetic construct
  source 1..50: mol_type = other DNA
caatactatcccaaaaaactaaacacatccctacctcaaaacctttaaac

SEQ ID NO: 34466 - DNA, 50 bp, synthetic construct
  source 1..50: mol_type = other DNA
aaccctaaaacaaaaatatattcaaccccttaaaacaacattaaaaaaac

SEQ ID NO: 34467 - DNA, 50 bp, synthetic construct
  source 1..50: mol_type = other DNA
crtcctatctccrtaaaaattaacaacacttcaacctattatctaaaacc

SEQ ID NO: 34468 - DNA, 50 bp, synthetic construct
  source 1..50: mol_type = other DNA
taattaccaataaaatacactttaaataaaataaaacctaacccatcaac

SEQ ID NO: 34469 - DNA, 50 bp, synthetic construct
  source 1..50: mol_type = other DNA
ttccaaaaacaaaatcraaacctaaaactaaccctatactataataactc

SEQ ID NO: 34470 - DNA, 50 bp, synthetic construct
  source 1..50: mol_type = other DNA
atatctaaaatccaaaaaaacrataactacactattccaaaaacaaaatc

SEQ ID NO: 34471 - DNA, 50 bp, synthetic construct
  source 1..50: mol_type = other DNA
acctacctttaaaattttcaacacctacaatatctaaaatccaaaaaaac

SEQ ID NO: 34472 - DNA, 50 bp, synthetic construct
  source 1..50: mol_type = other DNA
aactaaaaacraacataattcccataaaaccaaaaacaacccrtaaaacc

SEQ ID NO: 34473 - DNA, 50 bp, synthetic construct
  source 1..50: mol_type = other DNA
aattccrtcracraaattatacaatccaccaatcttataaatacaataac

SEQ ID NO: 34474 - DNA, 50 bp, synthetic construct
  source 1..50: mol_type = other DNA
racttaattaaaaactataactaaacatcatcctaatttaatcttttacc

SEQ ID NO: 34475 - DNA, 50 bp, synthetic construct
  source 1..50: mol_type = other DNA
atctcaaaaaatatcccccacaacccaacacactaactataacaaacaac

SEQ ID NO: 34476 - DNA, 50 bp, synthetic construct
  source 1..50: mol_type = other DNA
aaaaaaatacaaccaaaaactctaaaaataactactacccttcccrtacc

SEQ ID NO: 34477 - DNA, 50 bp, synthetic construct
  source 1..50: mol_type = other DNA
aaaaactcaaaatactaaaactacaaacaaccacaaccataatactaatc

SEQ ID NO: 34478 - DNA, 50 bp, synthetic construct
  source 1..50: mol_type = other DNA
acraattaacaacctctcaactaaaatctacttaaacctactaaaatccc

SEQ ID NO: 34479 - DNA, 50 bp, synthetic construct
  source 1..50: mol_type = other DNA
tcraaacctcaacaaacttaaacaaactctaactaaaaaactattaatcc

SEQ ID NO: 34480 - DNA, 50 bp, synthetic construct
  source 1..50: mol_type = other DNA
aacaaacttaaacaaactctaactaaaaaactattaatccrttcaactcc

SEQ ID NO: 34481 - DNA, 50 bp, synthetic construct
  source 1..50: mol_type = other DNA
aaactattaatccrttcaactccraaattaaaatctaaaactccaatacc

SEQ ID NO: 34482 - DNA, 50 bp, synthetic construct
  source 1..50: mol_type = other DNA
crtactttttccataaaactatacaatccacaaatcaaaaaattccrctc

SEQ ID NO: 34483 - DNA, 50 bp, synthetic construct
  source 1..50: mol_type = other DNA
aaaccrtactttttccataaaactatacaatccacaaatcaaaaaattcc

SEQ ID NO: 34484 - DNA, 50 bp, synthetic construct
  source 1..50: mol_type = other DNA
aaaatataacraaacctttatctctcrctacaactaaaactacaaatctc

SEQ ID NO: 34485 - DNA, 50 bp, synthetic construct
  source 1..50: mol_type = other DNA
ataaaattaactacraaaaaacctaaatcccaccacaaccacttcccacc

SEQ ID NO: 34486 - DNA, 50 bp, synthetic construct
  source 1..50: mol_type = other DNA
tttctccttatatcttctctaaacacaaaaatcttatcaaaatatttttc

SEQ ID NO: 34487 - DNA, 50 bp, synthetic construct
  source 1..50: mol_type = other DNA
aactttataaaataatatatcctcaaccaccttttaatttttttctaatc

SEQ ID NO: 34488 - DNA, 50 bp, synthetic construct
  source 1..50: mol_type = other DNA
aaataaaccaaaaactaatattcactaaacactttaactaacataaccac

SEQ ID NO: 34489 - DNA, 50 bp, synthetic construct
  source 1..50: mol_type = other DNA
ctaaaatacctaataaatatcaacttctaatttattttcttccataaaac

SEQ ID NO: 34490 - DNA, 50 bp, synthetic construct
  source 1..50: mol_type = other DNA
raactaactaaccaacaatatatccccaaaaaataaaaactaaattaaac

SEQ ID NO: 34491 - DNA, 50 bp, synthetic construct
  source 1..50: mol_type = other DNA
ataactactaaaaaaactcaaaaactaataaaatcctccatatactaaac

SEQ ID NO: 34492 - DNA, 50 bp, synthetic construct
  source 1..50: mol_type = other DNA
aataactataataaaactcraatctcccrtcaatcaactccacaatctac

SEQ ID NO: 34493 - DNA, 50 bp, synthetic construct
  source 1..50: mol_type = other DNA
aaattaattaaaactaataacaaataactataataaaactcraatctccc

SEQ ID NO: 34494 - DNA, 50 bp, synthetic construct
  source 1..50: mol_type = other DNA
acaactaaaataccaaaaccccctaaaaacctaaaaataataaaaatacc

SEQ ID NO: 34495 - DNA, 50 bp, synthetic construct
  source 1..50: mol_type = other DNA
cctaacatcttaactataaatctcccaatacctacaaatcacaaaatcac

SEQ ID NO: 34496 - DNA, 50 bp, synthetic construct
  source 1..50: mol_type = other DNA
aatacctacaaatcacaaaatcacraaaactaaacctctaaaaactaaac

SEQ ID NO: 34497 - DNA, 50 bp, synthetic construct
  source 1..50: mol_type = other DNA
aatcaacaacactaaactaaaaaccctccaatcaaccacrcaactaaaac

SEQ ID NO: 34498 - DNA, 50 bp, synthetic construct
  source 1..50: mol_type = other DNA
aaacrttatccaatcaacaacactaaactaaaaaccctccaatcaaccac

SEQ ID NO: 34499 - DNA, 50 bp, synthetic construct
  source 1..50: mol_type = other DNA
ctacrtaactaattaaaaaatttccaacccaatattactaattaaataac

SEQ ID NO: 34500 - DNA, 50 bp, synthetic construct
  source 1..50: mol_type = other DNA
ttaaaaaatttccaacccaatattactaattaaataacrcttaaatcccc

SEQ ID NO: 34501 - DNA, 50 bp, synthetic construct
  source 1..50: mol_type = other DNA
cactctttcttcattcaacctaacrtttaatcacatcttctatcaatcac

SEQ ID NO: 34502 - DNA, 50 bp, synthetic construct
  source 1..50: mol_type = other DNA
tctaaacraacracaacttaaacaatcactctttcttcattcaacctaac

SEQ ID NO: 34503 - DNA, 50 bp, synthetic construct
  source 1..50: mol_type = other DNA
tctaaaataaacctaactcaactcaaaaacraaaccctttctaaacraac

SEQ ID NO: 34504 - DNA, 50 bp, synthetic construct
  source 1..50: mol_type = other DNA
accctctaaaataaacctaactcaactcaaaaacraaaccctttctaaac

SEQ ID NO: 34505 - DNA, 50 bp, synthetic construct
  source 1..50: mol_type = other DNA
aaaattacatacaaacaccctctaaaataaacctaactcaactcaaaaac

SEQ ID NO: 34506 - DNA, 50 bp, synthetic construct
  source 1..50: mol_type = other DNA
ttcctacctaaactaaaccaaacacaccrcaaaaaatatttacctttaac

SEQ ID NO: 34507 - DNA, 50 bp, synthetic construct
  source 1..50: mol_type = other DNA
ttcaaaaaccaacacaatatcattttcccttaaaaaccttatttcattcc

SEQ ID NO: 34508 - DNA, 50 bp, synthetic construct
  source 1..50: mol_type = other DNA
cccraaaataaaaacaactaaaaccctaaacccacrcaactatcctaatc

SEQ ID NO: 34509 - DNA, 50 bp, synthetic construct
  source 1..50: mol_type = other DNA
aacratcaaaacaactacrtaaacccaaaattccaactacctttatcttc

SEQ ID NO: 34510 - DNA, 50 bp, synthetic construct
  source 1..50: mol_type = other DNA
aaacaactacrtaaacccaaaattccaactacctttatcttcraaaaaac

SEQ ID NO: 34511 - DNA, 50 bp, synthetic construct
  source 1..50: mol_type = other DNA
caaaattccaactacctttatcttcraaaaaacraataactcaaatctcc

SEQ ID NO: 34512 - DNA, 50 bp, synthetic construct
  source 1..50: mol_type = other DNA
tcaaactaaaccttcaaaactacratccataactactcaataccaactcc

SEQ ID NO: 34513 - DNA, 50 bp, synthetic construct
  source 1..50: mol_type = other DNA
caactccttaccaaaaaaataacraaactaacactaaacaatcataaatc

SEQ ID NO: 34514 - DNA, 50 bp, synthetic construct
  source 1..50: mol_type = other DNA
taaaatactaaaaaacaccatctcctatatacacactacttatcaccaac

SEQ ID NO: 34515 - DNA, 50 bp, synthetic construct
  source 1..50: mol_type = other DNA
aaattctatttaacaaaacaacctacatctatataacaaataaaaactac

SEQ ID NO: 34516 - DNA, 50 bp, synthetic construct
  source 1..50: mol_type = other DNA
tcaaacaaaactttcttctaattcacccctacataccraatactaaaaac

SEQ ID NO: 34517 - DNA, 50 bp, synthetic construct
  source 1..50: mol_type = other DNA
tttcttctcrtattcaaacaaaactttcttctaattcacccctacatacc

SEQ ID NO: 34518 - DNA, 50 bp, synthetic construct
  source 1..50: mol_type = other DNA
aaccaaaaaaaaatcctatctaaacacraaaaaaaattactatctaaccc

SEQ ID NO: 34519 - DNA, 50 bp, synthetic construct
  source 1..50: mol_type = other DNA
aaaccaaaaaaacctccraacactaaaacctaaaaatttccttctaaacc

SEQ ID NO: 34520 - DNA, 50 bp, synthetic construct
  source 1..50: mol_type = other DNA
acactaaaacctaaaaatttccttctaaaccrcacaaaaaactcaaatac

SEQ ID NO: 34521 - DNA, 50 bp, synthetic construct
  source 1..50: mol_type = other DNA
crtaaaaatataaaattttctccatatacattaaaactacaacatcaaac

SEQ ID NO: 34522 - DNA, 50 bp, synthetic construct
  source 1..50: mol_type = other DNA
aaaaacatcacctcraaaactaacccttaaacraaaatacaaaaaactac

SEQ ID NO: 34523 - DNA, 50 bp, synthetic construct
  source 1..50: mol_type = other DNA
caaacctacccaacactaaaaaacatcacctcraaaactaacccttaaac

SEQ ID NO: 34524 - DNA, 50 bp, synthetic construct
  source 1..50: mol_type = other DNA
tctaaaaatcaacttccraaataatacttctcaatactaaacaaacctac

SEQ ID NO: 34525 - DNA, 50 bp, synthetic construct
  source 1..50: mol_type = other DNA
accaattctcaaaaattcacrtacaaacaaaaccctaaaaaatacaattc

SEQ ID NO: 34526 - DNA, 50 bp, synthetic construct
  source 1..50: mol_type = other DNA
tctataaataataataacracaaaccctaaaaactaaacttcracctacc

SEQ ID NO: 34527 - DNA, 50 bp, synthetic construct
  source 1..50: mol_type = other DNA
acaaaaccctaaaaaatacaattcraatacaaattctaattcracaaatc

SEQ ID NO: 34528 - DNA, 50 bp, synthetic construct
  source 1..50: mol_type = other DNA
accaccaacaaaccttatcacctcaaaaataatctataaataataataac

SEQ ID NO: 34529 - DNA, 50 bp, synthetic construct
  source 1..50: mol_type = other DNA
tataaaataatataaccrttttaaaaaacaatttaacaacttctcaaaac

SEQ ID NO: 34530 - DNA, 50 bp, synthetic construct
  source 1..50: mol_type = other DNA
caatcactctatttaacrttttaaaaaactatcaaactattttccaaaac

SEQ ID NO: 34531 - DNA, 50 bp, synthetic construct
  source 1..50: mol_type = other DNA
atttaaaaataaacactaaacrcataaaaaaaaactcaacaccatcaacc

SEQ ID NO: 34532 - DNA, 50 bp, synthetic construct
  source 1..50: mol_type = other DNA
ataatatattataattttaacractaataatattaaacctcttctcatac

SEQ ID NO: 34533 - DNA, 50 bp, synthetic construct
  source 1..50: mol_type = other DNA
aaactaaactacctccttactataaaacatcaaattattttaacaccaac

SEQ ID NO: 34534 - DNA, 50 bp, synthetic construct
  source 1..50: mol_type = other DNA
taaccctataactcraaaatataaccaatactaatattaactaataaatc

SEQ ID NO: 34535 - DNA, 50 bp, synthetic construct
  source 1..50: mol_type = other DNA
tctctattatatttctacactctcccttaatcaaataattctatcatttc

SEQ ID NO: 34536 - DNA, 50 bp, synthetic construct
  source 1..50: mol_type = other DNA
crtctatctactttcaaattcataaacattacacttaaaacataactaac

SEQ ID NO: 34537 - DNA, 50 bp, synthetic construct
  source 1..50: mol_type = other DNA
attacaatacttaaatacaacrtatctaaaatttattccctctaatattc

SEQ ID NO: 34538 - DNA, 50 bp, synthetic construct
  source 1..50: mol_type = other DNA
catcaaaaaaaacaaactccaaacacrctacatttaaacactataacacc

SEQ ID NO: 34539 - DNA, 50 bp, synthetic construct
  source 1..50: mol_type = other DNA
ttaataaattcttaatctcactaacttcaaaaataaaacracraaccctc

SEQ ID NO: 34540 - DNA, 50 bp, synthetic construct
  source 1..50: mol_type = other DNA
atccraaattaataaattcttaatctcactaacttcaaaaataaaacrac

SEQ ID NO: 34541 - DNA, 50 bp, synthetic construct
  source 1..50: mol_type = other DNA
tctcactctattacccacactaaatataacaatacaatcctaatatatcc

SEQ ID NO: 34542 - DNA, 50 bp, synthetic construct
  source 1..50: mol_type = other DNA
aacccaataaatattaaacaatattacttcacatacatcacacatctccc

SEQ ID NO: 34543 - DNA, 50 bp, synthetic construct
  source 1..50: mol_type = other DNA
aaccaaaactaatacaatcaaaaacaacttaccaaaaaacaaaaactaac

SEQ ID NO: 34544 - DNA, 50 bp, synthetic construct
  source 1..50: mol_type = other DNA
taatacaatcaaaaacaacttaccaaaaaacaaaaactaacrcaaacctc

SEQ ID NO: 34545 - DNA, 50 bp, synthetic construct
  source 1..50: mol_type = other DNA
aaaaaacaaaaactaacrcaaacctcrcaactctaaaacctataattttc

SEQ ID NO: 34546 - DNA, 50 bp, synthetic construct
  source 1..50: mol_type = other DNA
acctataattttcraaaatatctctctaaaacctaaaatataaaatatac

SEQ ID NO: 34547 - DNA, 50 bp, synthetic construct
  source 1..50: mol_type = other DNA
aaaacctaactaacaacatacaaactccatcctatacaaaaccctaaacc

SEQ ID NO: 34548 - DNA, 50 bp, synthetic construct
  source 1..50: mol_type = other DNA
taaaatttatatattatcaaccaaaccccataactcaaaaaatccttttc

SEQ ID NO: 34549 - DNA, 50 bp, synthetic construct
  source 1..50: mol_type = other DNA
aaaaaattctcttctatttctatttactaaaaattatttatttacatcac

SEQ ID NO: 34550 - DNA, 50 bp, synthetic construct
  source 1..50: mol_type = other DNA
attaaaaataaacacrtaaattaccccaattttttatacccrattttaac

SEQ ID NO: 34551 - DNA, 50 bp, synthetic construct
  source 1..50: mol_type = other DNA
caaactccaaaacacrtcaaaaccraatacaaaaaattaaaacaatctac

SEQ ID NO: 34552 - DNA, 50 bp, synthetic construct
  source 1..50: mol_type = other DNA
ttctaacaaataaatacttataacrtaaaaacaaaactttacacaccacc

SEQ ID NO: 34553 - DNA, 50 bp, synthetic construct
  source 1..50: mol_type = other DNA
taaatacttataacrtaaaaacaaaactttacacaccaccraaactattc

SEQ ID NO: 34554 - DNA, 50 bp, synthetic construct
  source 1..50: mol_type = other DNA
aaaaatatcctaaaaccctctaaacaaaaaatcttctccaataccctacc

SEQ ID NO: 34555 - DNA, 50 bp, synthetic construct
  source 1..50: mol_type = other DNA
taaatatcacaacraatataaatacrcctataaataaaacccraaaaacc

SEQ ID NO: 34556 - DNA, 50 bp, synthetic construct
  source 1..50: mol_type = other DNA
aaaataatataaaattcaaaaactcaatcccaaactcraatttcctaaac

SEQ ID NO: 34557 - DNA, 50 bp, synthetic construct
  source 1..50: mol_type = other DNA
tttcctaaacrctatataactaatatctaccaaaaaaaccactaaataac

SEQ ID NO: 34558 - DNA, 50 bp, synthetic construct
  source 1..50: mol_type = other DNA
aatacacctacaccaactatatacactcatacacatacttataatcacac

SEQ ID NO: 34559 - DNA, 50 bp, synthetic construct
  source 1..50: mol_type = other DNA
ataatattactatataaaacaacrctacctaaaaacratacrtaaaccac

SEQ ID NO: 34560 - DNA, 50 bp, synthetic construct
  source 1..50: mol_type = other DNA
aataaaacaataatattactatataaaacaacrctacctaaaaacratac

SEQ ID NO: 34561 - DNA, 50 bp, synthetic construct
  source 1..50: mol_type = other DNA
aaaccttaaaataacttttaaaacaaaaatataaccrttctcrttccccc

SEQ ID NO: 34562 - DNA, 50 bp, synthetic construct
  source 1..50: mol_type = other DNA
ccctaaaattacttttaacattcaaaaatcctaaaaaaaataacccatcc

SEQ ID NO: 34563 - DNA, 50 bp, synthetic construct
  source 1..50: mol_type = other DNA
taaattacctttcttaaaattcttaaatattaaaaataacttcaaaaacc

SEQ ID NO: 34564 - DNA, 50 bp, synthetic construct
  source 1..50: mol_type = other DNA
aaaaatttcactttattacccaaactaatctaaaactcctaaactcaaac

SEQ ID NO: 34565 - DNA, 50 bp, synthetic construct
  source 1..50: mol_type = other DNA
ataaccccttttaatttttatttattactttatcatcttactaattcctc

SEQ ID NO: 34566 - DNA, 50 bp, synthetic construct
  source 1..50: mol_type = other DNA
atttttatttattactttatcatcttactaattcctcraaacaatcttac

SEQ ID NO: 34567 - DNA, 50 bp, synthetic construct
  source 1..50: mol_type = other DNA
tatttattactttatcatcttactaattcctcraaacaatcttacraaac

SEQ ID NO: 34568 - DNA, 50 bp, synthetic construct
  source 1..50: mol_type = other DNA
attactttatcatcttactaattcctcraaacaatcttacraaacraacc

SEQ ID NO: 34569 - DNA, 50 bp, synthetic construct
  source 1..50: mol_type = other DNA
acaaaactcrcctaataaatttaattacttcctctttaacaacrcrtatc

SEQ ID NO: 34570 - DNA, 50 bp, synthetic construct
  source 1..50: mol_type = other DNA
aacrttttaacaccaaaaaacaacaactcrctaaacraaaaacaaaactc

SEQ ID NO: 34571 - DNA, 50 bp, synthetic construct
  source 1..50: mol_type = other DNA
aacctttatcccttaccctaaactcaaatactccctatctaaaaaattcc

SEQ ID NO: 34572 - DNA, 50 bp, synthetic construct
  source 1..50: mol_type = other DNA
aaaaactaaaaccctaaatatatcraaaatacaaatatcraaaatcactc

SEQ ID NO: 34573 - DNA, 50 bp, synthetic construct
  source 1..50: mol_type = other DNA
acrtcactttaaaataatatcctaatattaaaaaaaacatcttacaatcc

SEQ ID NO: 34574 - DNA, 50 bp, synthetic construct
  source 1..50: mol_type = other DNA
ctttaataaaatttcaaccaaaattccttcctattcaatttatcctcaac

SEQ ID NO: 34575 - DNA, 50 bp, synthetic construct
  source 1..50: mol_type = other DNA
ccaaaatcaaatcctacaaatataaacaaaattactctccctaaataccc

SEQ ID NO: 34576 - DNA, 50 bp, synthetic construct
  source 1..50: mol_type = other DNA
caacacaaacatatactaaatccctaactcacataaccaaaaatcacaac

SEQ ID NO: 34577 - DNA, 50 bp, synthetic construct
  source 1..50: mol_type = other DNA
aatcttaaaacttaatcaaaacatattccaacaacctattctaataccac

SEQ ID NO: 34578 - DNA, 50 bp, synthetic construct
  source 1..50: mol_type = other DNA
tttcaccatattaaccatactaatcttaaacacctaacctcaaatcatcc

SEQ ID NO: 34579 - DNA, 50 bp, synthetic construct
  source 1..50: mol_type = other DNA
taaatcactatttattttctaaccaaaaactaactaacaaaaataaaccc

SEQ ID NO: 34580 - DNA, 50 bp, synthetic construct
  source 1..50: mol_type = other DNA
ctttaaaaaaatctctaaataaacaaaacctctacttcaactaactaacc

SEQ ID NO: 34581 - DNA, 50 bp, synthetic construct
  source 1..50: mol_type = other DNA
tcaactaaaacaaaaaccctacctacccaaaaattttctcaaaacaacac

SEQ ID NO: 34582 - DNA, 50 bp, synthetic construct
  source 1..50: mol_type = other DNA
ttccttttctaaacactaactccrataaataaaataaaaacctttacacc

SEQ ID NO: 34583 - DNA, 50 bp, synthetic construct
  source 1..50: mol_type = other DNA
atttacaaaatatctcaaaccacaaacttccttttctaaacactaactcc

SEQ ID NO: 34584 - DNA, 50 bp, synthetic construct
  source 1..50: mol_type = other DNA
aaacattctataaatccrattccaaaaacacraaataaaactctaaatcc

SEQ ID NO: 34585 - DNA, 50 bp, synthetic construct
  source 1..50: mol_type = other DNA
attccaaaaacacraaataaaactctaaatccratataatttctattctc

SEQ ID NO: 34586 - DNA, 50 bp, synthetic construct
  source 1..50: mol_type = other DNA
taaaaaaaataactcataatcactcaaaattaaatcrcacaaaaacaacc

SEQ ID NO: 34587 - DNA, 50 bp, synthetic construct
  source 1..50: mol_type = other DNA
cactcaaaattaaatcrcacaaaaacaaccraaaacaaacaacaaaaaac

SEQ ID NO: 34588 - DNA, 50 bp, synthetic construct
  source 1..50: mol_type = other DNA
aacccaaaaaatccaacctttccctccaaactaaaaaattaaaaaaaatc

SEQ ID NO: 34589 - DNA, 50 bp, synthetic construct
  source 1..50: mol_type = other DNA
tataatcctcatacacactaatccaaataatcctaaaatactaacctcac

SEQ ID NO: 34590 - DNA, 50 bp, synthetic construct
  source 1..50: mol_type = other DNA
racaaaattatttatcttataacaaattaaaaactatctcaatactcatc

SEQ ID NO: 34591 - DNA, 50 bp, synthetic construct
  source 1..50: mol_type = other DNA
rataaacattaaaataatttccaatttatcacaaaataaacaattctacc

SEQ ID NO: 34592 - DNA, 50 bp, synthetic construct
  source 1..50: mol_type = other DNA
ttaataaaaaactattacccaaactaatctcaaaacttctaacctcaaac

SEQ ID NO: 34593 - DNA, 50 bp, synthetic construct
  source 1..50: mol_type = other DNA
tctaccataaccctctatacctacatatacctataatttaactctaaaac

SEQ ID NO: 34594 - DNA, 50 bp, synthetic construct
  source 1..50: mol_type = other DNA
tataacttacattaacacacaaaactaaataaaaatttcaaaccaaacrc

SEQ ID NO: 34595 - DNA, 50 bp, synthetic construct
  source 1..50: mol_type = other DNA
aatataacttacattaacacacaaaactaaataaaaatttcaaaccaaac

SEQ ID NO: 34596 - DNA, 50 bp, synthetic construct
  source 1..50: mol_type = other DNA
ttaaaaataaccttttctctatcttccctaccaaataataaacccaatac

SEQ ID NO: 34597 - DNA, 50 bp, synthetic construct
  source 1..50: mol_type = other DNA
ataaccttttctctatcttccctaccaaataataaacccaatacraacac

SEQ ID NO: 34598 - DNA, 50 bp, synthetic construct
  source 1..50: mol_type = other DNA
aaacccaatacraacacraaaacaactcaataaaaatatattaactaacc

SEQ ID NO: 34599 - DNA, 50 bp, synthetic construct
  source 1..50: mol_type = other DNA
actaatctttcactatataactatctttaactctttactaaaacttcctc

SEQ ID NO: 34600 - DNA, 50 bp, synthetic construct
  source 1..50: mol_type = other DNA
acaaaactacaaaaaatcacaaaaacatacaacaacccacaaaaaatccc

SEQ ID NO: 34601 - DNA, 50 bp, synthetic construct
  source 1..50: mol_type = other DNA
ttaaaaacaaaaactacaaccrtttccraaacrataaaaaactacttaac

SEQ ID NO: 34602 - DNA, 50 bp, synthetic construct
  source 1..50: mol_type = other DNA
ttctaactcaaataaaaaccracttaaaaacaaaaactacaaccrtttcc

SEQ ID NO: 34603 - DNA, 50 bp, synthetic construct
  source 1..50: mol_type = other DNA
acctaattctaactcaaataaaaaccracttaaaaacaaaaactacaacc

SEQ ID NO: 34604 - DNA, 50 bp, synthetic construct
  source 1..50: mol_type = other DNA
atctaatcccttctccaccataatacctaattctaactcaaataaaaacc

SEQ ID NO: 34605 - DNA, 50 bp, synthetic construct
  source 1..50: mol_type = other DNA
aaaaccraatactaaaccaaaaaccccaaactacaacaatcaaaaaatac

SEQ ID NO: 34606 - DNA, 50 bp, synthetic construct
  source 1..50: mol_type = other DNA
attaaataactcacccaaaatcacacaacacataaataataacataaaac

SEQ ID NO: 34607 - DNA, 50 bp, synthetic construct
  source 1..50: mol_type = other DNA
aaccacaataacaactaccatttacaaatttcttatataaaccraacccc

SEQ ID NO: 34608 - DNA, 50 bp, synthetic construct
  source 1..50: mol_type = other DNA
caaaactcctaaaaccccctcaatctcttaaatccctaacaaattccaac

SEQ ID NO: 34609 - DNA, 50 bp, synthetic construct
  source 1..50: mol_type = other DNA
ttaccccacccraaattaaaaactaaaatctaaataataacccttcaacc

SEQ ID NO: 34610 - DNA, 50 bp, synthetic construct
  source 1..50: mol_type = other DNA
cttaccaaaaaaaataaccctactactaaaatcaaaaaattaatattaac

SEQ ID NO: 34611 - DNA, 50 bp, synthetic construct
  source 1..50: mol_type = other DNA
ctaaaatcaaaaaattaatattaacrtaccrcctatcccaataaaaacac

SEQ ID NO: 34612 - DNA, 50 bp, synthetic construct
  source 1..50: mol_type = other DNA
rtatctctactaaaacaaacaacatcctcatctaacccaaaatataaaac

SEQ ID NO: 34613 - DNA, 50 bp, synthetic construct
  source 1..50: mol_type = other DNA
rtcccacaccctaaaccaaataaaaatactacctatcccaataaaaacac

SEQ ID NO: 34614 - DNA, 50 bp, synthetic construct
  source 1..50: mol_type = other DNA
atatctctactaaaacaaacaacatcctcatctaacccacratataaaac

SEQ ID NO: 34615 - DNA, 50 bp, synthetic construct
  source 1..50: mol_type = other DNA
aactcaaatatcaacaaatccctctaacttcatacaataaacaaataacc

SEQ ID NO: 34616 - DNA, 50 bp, synthetic construct
  source 1..50: mol_type = other DNA
acaaaaacttactattataaactatctaaacacttccatcataacraaac

SEQ ID NO: 34617 - DNA, 50 bp, synthetic construct
  source 1..50: mol_type = other DNA
aaatcacaaaaacttactattataaactatctaaacacttccatcataac

SEQ ID NO: 34618 - DNA, 50 bp, synthetic construct
  source 1..50: mol_type = other DNA
tattcaaacaatttataataataaacccctataaccctctcacttacccc

SEQ ID NO: 34619 - DNA, 50 bp, synthetic construct
  source 1..50: mol_type = other DNA
ctaaaaataacrtataacataaacatcctcracctcraaaatatctatac

SEQ ID NO: 34620 - DNA, 50 bp, synthetic construct
  source 1..50: mol_type = other DNA
cctcaaacaatcctcctacctaaacctcccaaaacrttaaaatcacaaac

SEQ ID NO: 34621 - DNA, 50 bp, synthetic construct
  source 1..50: mol_type = other DNA
caactaaacaataattcraactaaatcacaccatatataaatcraaaaac

SEQ ID NO: 34622 - DNA, 50 bp, synthetic construct
  source 1..50: mol_type = other DNA
raaaataaacaatacatcatctcaaatccaactcaactaaacaataattc

SEQ ID NO: 34623 - DNA, 50 bp, synthetic construct
  source 1..50: mol_type = other DNA
aattcaaacacataaaacttaaccttcaaattacaatataatcttttctc

SEQ ID NO: 34624 - DNA, 50 bp, synthetic construct
  source 1..50: mol_type = other DNA
catcatatacttataactcaactcccccrctaatttactcattaataatc

SEQ ID NO: 34625 - DNA, 50 bp, synthetic construct
  source 1..50: mol_type = other DNA
tacaaaaatctaaacrattacataatcacccctctaaatataaccccctc

SEQ ID NO: 34626 - DNA, 50 bp, synthetic construct
  source 1..50: mol_type = other DNA
cacccatataaaaaacacataaaacatcaatccctctaatatatatatac

SEQ ID NO: 34627 - DNA, 50 bp, synthetic construct
  source 1..50: mol_type = other DNA
aaccctaaaaaccccctaacccaaatatatacaaattttaccaactccac

SEQ ID NO: 34628 - DNA, 50 bp, synthetic construct
  source 1..50: mol_type = other DNA
rcttaaacccaaaaaattaaaactacaataaaccacrattacaaaactac

SEQ ID NO: 34629 - DNA, 50 bp, synthetic construct
  source 1..50: mol_type = other DNA
tatactttacttccracacttccaacaccaaacaataaaccctacctttc

SEQ ID NO: 34630 - DNA, 50 bp, synthetic construct
  source 1..50: mol_type = other DNA
aaattaatattaataaaaaaacaaaacrccaaaatcccaaccctaaaacc

SEQ ID NO: 34631 - DNA, 50 bp, synthetic construct
  source 1..50: mol_type = other DNA
tctatataacttataaaatactaaaaactcaaattttaaaaaccaaatac

SEQ ID NO: 34632 - DNA, 50 bp, synthetic construct
  source 1..50: mol_type = other DNA
aaaaacaaattttatacctacacaactaaaaaacaatttttttaattacc

SEQ ID NO: 34633 - DNA, 50 bp, synthetic construct
  source 1..50: mol_type = other DNA
aaacaaactccaccaacaactaccaaatatcctccctttatctaaactcc

SEQ ID NO: 34634 - DNA, 50 bp, synthetic construct
  source 1..50: mol_type = other DNA
aataaaacttattcctaccccataactttctcctacactataattatacc

SEQ ID NO: 34635 - DNA, 50 bp, synthetic construct
  source 1..50: mol_type = other DNA
cctctatacctttccaatcacaatatctttccaatcacaatcacacaccc

SEQ ID NO: 34636 - DNA, 50 bp, synthetic construct
  source 1..50: mol_type = other DNA
aaacacacccaatcacacaatctactctccactataatacaattactccc

SEQ ID NO: 34637 - DNA, 50 bp, synthetic construct
  source 1..50: mol_type = other DNA
atataactatatatatatccacaataaaaattcaattataactaaatacc

SEQ ID NO: 34638 - DNA, 50 bp, synthetic construct
  source 1..50: mol_type = other DNA
caactcaaaactcaatatcataaaaaaatcccctttactatcacraaacc

SEQ ID NO: 34639 - DNA, 50 bp, synthetic construct
  source 1..50: mol_type = other DNA
acaatacacctcccctaaaacccaaataacaaaaccaaaacttactctac

SEQ ID NO: 34640 - DNA, 50 bp, synthetic construct
  source 1..50: mol_type = other DNA
attaaaccccttcctaaacrcctataaaaacaacctatcaatataatttc

SEQ ID NO: 34641 - DNA, 50 bp, synthetic construct
  source 1..50: mol_type = other DNA
ccactaacacacaaacactataatcractaaccccaaactcaaaaactac

SEQ ID NO: 34642 - DNA, 50 bp, synthetic construct
  source 1..50: mol_type = other DNA
tatcattttaaaaaccaaacccaacccactaacacacaaacactataatc

SEQ ID NO: 34643 - DNA, 50 bp, synthetic construct
  source 1..50: mol_type = other DNA
tccactaaacataactaatcaaaaacaactaaaaaaataacctaataccc

SEQ ID NO: 34644 - DNA, 50 bp, synthetic construct
  source 1..50: mol_type = other DNA
tattttaaataaccaaacttaataacatacacctataatcccaaaaactc

SEQ ID NO: 34645 - DNA, 50 bp, synthetic construct
  source 1..50: mol_type = other DNA
aaaaaaaaacaataaataactaaaccatacaatacttaccaaacccaatc

SEQ ID NO: 34646 - DNA, 50 bp, synthetic construct
  source 1..50: mol_type = other DNA
attaccataaatatacrccttaaaccatttacatcataatatatacattc

SEQ ID NO: 34647 - DNA, 50 bp, synthetic construct
  source 1..50: mol_type = other DNA
aacaaaaacccccrctcactacaacttaattaaataaaaacttatttctc

SEQ ID NO: 34648 - DNA, 50 bp, synthetic construct
  source 1..50: mol_type = other DNA
acttaactaccaatattaatttaataactaaacaatatcaaaacaaaacc

SEQ ID NO: 34649 - DNA, 50 bp, synthetic construct
  source 1..50: mol_type = other DNA
aacattaataaatactaactctataccaaaccctaccrtaaacrcctcac

SEQ ID NO: 34650 - DNA, 50 bp, synthetic construct
  source 1..50: mol_type = other DNA
ctcrtacctcaatttcctcatcattaccataaaaatatcacaacaataac

SEQ ID NO: 34651 - DNA, 50 bp, synthetic construct
  source 1..50: mol_type = other DNA
tcccraaaactaaacctaaaccaataaaaaataattaattacacaaaaac

SEQ ID NO: 34652 - DNA, 50 bp, synthetic construct
  source 1..50: mol_type = other DNA
actatacaactctacaaaataacttattcactctaaacctcrattttctc

SEQ ID NO: 34653 - DNA, 50 bp, synthetic construct
  source 1..50: mol_type = other DNA
tacttactaactatacaactctacaaaataacttattcactctaaacctc

SEQ ID NO: 34654 - DNA, 50 bp, synthetic construct
  source 1..50: mol_type = other DNA
tacaaaattatacaactaataaacaacaaaacaaaattcaaatccaaatc

SEQ ID NO: 34655 - DNA, 50 bp, synthetic construct
  source 1..50: mol_type = other DNA
ctccattatactctacaacctctaaaaaccatcacraactattaatacac

SEQ ID NO: 34656 - DNA, 50 bp, synthetic construct
  source 1..50: mol_type = other DNA
tactctacaacctctaaaaaccatcacraactattaatacacraacatac

SEQ ID NO: 34657 - DNA, 50 bp, synthetic construct
  source 1..50: mol_type = other DNA
acattccctcctattccctttataaaacaactactaaaacaaaatctccc

SEQ ID NO: 34658 - DNA, 50 bp, synthetic construct
  source 1..50: mol_type = other DNA
cctttataaaacaactactaaaacaaaatctcccrtttacaaaaataaac

SEQ ID NO: 34659 - DNA, 50 bp, synthetic construct
  source 1..50: mol_type = other DNA
cctattaatacaaccctaactcaaatatctattataataaactctaaaac

SEQ ID NO: 34660 - DNA, 50 bp, synthetic construct
  source 1..50: mol_type = other DNA
ccctaactcaaatatctattataataaactctaaaacraacaataaaaac

SEQ ID NO: 34661 - DNA, 50 bp, synthetic construct
  source 1..50: mol_type = other DNA
ctaaaaacataaaatcaacrtacaaaccatacracctaactaataacaac

SEQ ID NO: 34662 - DNA, 50 bp, synthetic construct
  source 1..50: mol_type = other DNA
atacattctcctcratatctaaaaacataaaatcaacrtacaaaccatac

SEQ ID NO: 34663 - DNA, 50 bp, synthetic construct
  source 1..50: mol_type = other DNA
cttcaacrccttctaacttccaaataataactaaacccccaataaatccc

SEQ ID NO: 34664 - DNA, 50 bp, synthetic construct
  source 1..50: mol_type = other DNA
ctctattactaaatattacactccaaaatataaattaataaaatcatacc

SEQ ID NO: 34665 - DNA, 50 bp, synthetic construct
  source 1..50: mol_type = other DNA
caaaacctttataacatatacctacccaaaccaaactctcaaccataacc

SEQ ID NO: 34666 - DNA, 50 bp, synthetic construct
  source 1..50: mol_type = other DNA
ttaaaaaaatctttacctactacatcctacctaaacraatacttattccc

SEQ ID NO: 34667 - DNA, 50 bp, synthetic construct
  source 1..50: mol_type = other DNA
ctttaaaatacctattaaaaaaatctttacctactacatcctacctaaac

SEQ ID NO: 34668 - DNA, 50 bp, synthetic construct
  source 1..50: mol_type = other DNA
aattcaaaaccratcraaaacaaaaacaaatccraatccaaaaataaatc

SEQ ID NO: 34669 - DNA, 50 bp, synthetic construct
  source 1..50: mol_type = other DNA
ttaaaaacctaaaacaaaaccctaaaatcaaaaacaaccccaaccttccc

SEQ ID NO: 34670 - DNA, 50 bp, synthetic construct
  source 1..50: mol_type = other DNA
ccccaaaatcctaccttaaacctccaacttcaaaaaactaaataaaaaac

SEQ ID NO: 34671 - DNA, 50 bp, synthetic construct
  source 1..50: mol_type = other DNA
caaaatcctaccttaaacctccaacttcaaaaaactaaataaaaaacrcc

SEQ ID NO: 34672 - DNA, 50 bp, synthetic construct
  source 1..50: mol_type = other DNA
ttaaattttttatcaaaacaaaatcttactatattacccaaactaatctc

SEQ ID NO: 34673 - DNA, 50 bp, synthetic construct
  source 1..50: mol_type = other DNA
cctaacttattaaatttccttttctcactctaaatattcactttaaaacc

SEQ ID NO: 34674 - DNA, 50 bp, synthetic construct
  source 1..50: mol_type = other DNA
tataaacrataacaacrataataactcctacaaacctaaaaaccccraac

SEQ ID NO: 34675 - DNA, 50 bp, synthetic construct
  source 1..50: mol_type = other DNA
aaaaccccraacrcataaactcrccattaataaatactaaaaaaataaac

SEQ ID NO: 34676 - DNA, 50 bp, synthetic construct
  source 1..50: mol_type = other DNA
atacraacctccraaacccraaaactaaatatatctactctaataataac

SEQ ID NO: 34677 - DNA, 50 bp, synthetic construct
  source 1..50: mol_type = other DNA
ttacccaaacttatcccaaactcctaaactcaaataatttaccctcctcc

SEQ ID NO: 34678 - DNA, 50 bp, synthetic construct
  source 1..50: mol_type = other DNA
cacctaaattcaaaaatttaaaacaaacctaaacaacataacaaaacccc

SEQ ID NO: 34679 - DNA, 50 bp, synthetic construct
  source 1..50: mol_type = other DNA
ttatatccaatataatctctaataaaacttattcttatcccaaacctctc

SEQ ID NO: 34680 - DNA, 50 bp, synthetic construct
  source 1..50: mol_type = other DNA
aaaaaaaccaatttaaaaatcaaactaccaaaccraacrcrataactcac

SEQ ID NO: 34681 - DNA, 50 bp, synthetic construct
  source 1..50: mol_type = other DNA
aaatttcattaaacccacaactccccatttaaaaacaaaacttatcaaac

SEQ ID NO: 34682 - DNA, 50 bp, synthetic construct
  source 1..50: mol_type = other DNA
aaacaactaaactaactacaccatcacaaaccaccataatcatttactcc

SEQ ID NO: 34683 - DNA, 50 bp, synthetic construct
  source 1..50: mol_type = other DNA
tataaaaaataactacctaaatcaactacatctccaattataaaatccac

SEQ ID NO: 34684 - DNA, 50 bp, synthetic construct
  source 1..50: mol_type = other DNA
cctaaatcaactacatctccaattataaaatccacrtaccaaaaaaacac

SEQ ID NO: 34685 - DNA, 50 bp, synthetic construct
  source 1..50: mol_type = other DNA
tccaattataaaatccacrtaccaaaaaaacacraaatacacacaaatcc

SEQ ID NO: 34686 - DNA, 50 bp, synthetic construct
  source 1..50: mol_type = other DNA
atttaaatatacacaatcccaaccrtaataacraaaaaatatctccraac

SEQ ID NO: 34687 - DNA, 50 bp, synthetic construct
  source 1..50: mol_type = other DNA
atctcaaaaacaaaaaatatttaaatatacacaatcccaaccrtaataac

SEQ ID NO: 34688 - DNA, 50 bp, synthetic construct
  source 1..50: mol_type = other DNA
aactactcatctcaaaaacaaaaaatatttaaatatacacaatcccaacc

SEQ ID NO: 34689 - DNA, 50 bp, synthetic construct
  source 1..50: mol_type = other DNA
ttctcctccctaaaaccctctaaaaattaattccctctaaaatcaaactc

SEQ ID NO: 34690 - DNA, 50 bp, synthetic construct
  source 1..50: mol_type = other DNA
aaccactacaaaatactaatatttatactatataacctccacaccctaac

SEQ ID NO: 34691 - DNA, 50 bp, synthetic construct
  source 1..50: mol_type = other DNA
ttataactactaacaccttccataaaaaaccrccctaaaccaaacaaacc

SEQ ID NO: 34692 - DNA, 50 bp, synthetic construct
  source 1..50: mol_type = other DNA
ctaactcctaacaactactttataactactaacaccttccataaaaaacc

SEQ ID NO: 34693 - DNA, 50 bp, synthetic construct
  source 1..50: mol_type = other DNA
aactacaataaataaaaattaatcactactataaatacacaaaaccatac

SEQ ID NO: 34694 - DNA, 50 bp, synthetic construct
  source 1..50: mol_type = other DNA
atcactactataaatacacaaaaccatacracactctcataacaataaac

SEQ ID NO: 34695 - DNA, 50 bp, synthetic construct
  source 1..50: mol_type = other DNA
actctctaaaattcatattttataaacrcaaaataaaccccaaatctaac

SEQ ID NO: 34696 - DNA, 50 bp, synthetic construct
  source 1..50: mol_type = other DNA
ctaacrccaatatacccattctatcctaaaatcatttatttctaatcacc

SEQ ID NO: 34697 - DNA, 50 bp, synthetic construct
  source 1..50: mol_type = other DNA
atacccattctatcctaaaatcatttatttctaatcaccraaacrttccc

SEQ ID NO: 34698 - DNA, 50 bp, synthetic construct
  source 1..50: mol_type = other DNA
ccaaactaaatacraaaactcaacrataaaacataattcccttaccttac

SEQ ID NO: 34699 - DNA, 50 bp, synthetic construct
  source 1..50: mol_type = other DNA
acttaacaaaaacaactaacacccraaactcaaatcctctctataaacac

SEQ ID NO: 34700 - DNA, 50 bp, synthetic construct
  source 1..50: mol_type = other DNA
ccatattcattaactaaaaaacctcttaaacctcatctctaaaaaacacc

SEQ ID NO: 34701 - DNA, 50 bp, synthetic construct
  source 1..50: mol_type = other DNA
ttaaacctcatctctaaaaaacaccrcctaaaaccctaaatatatatccc

SEQ ID NO: 34702 - DNA, 50 bp, synthetic construct
  source 1..50: mol_type = other DNA
tctctaaaaaacaccrcctaaaaccctaaatatatatcccrcaacataac

SEQ ID NO: 34703 - DNA, 50 bp, synthetic construct
  source 1..50: mol_type = other DNA
caattacrtaaaacaaaacaaacaaaccctccacaccccaaaatctaatc

SEQ ID NO: 34704 - DNA, 50 bp, synthetic construct
  source 1..50: mol_type = other DNA
aattaatcrtattcccaaaaaatcaaatccctcaaaaaaacatccacrac

SEQ ID NO: 34705 - DNA, 50 bp, synthetic construct
  source 1..50: mol_type = other DNA
craaattaatcrtattcccaaaaaatcaaatccctcaaaaaaacatccac

SEQ ID NO: 34706 - DNA, 50 bp, synthetic construct
  source 1..50: mol_type = other DNA
crtaaatacttctctaaaaaacttaatttcctaaaaatacraccaacccc

SEQ ID NO: 34707 - DNA, 50 bp, synthetic construct
  source 1..50: mol_type = other DNA
aatacttctctaaaaaacttaatttcctaaaaatacraccaaccccraac

SEQ ID NO: 34708 - DNA, 50 bp, synthetic construct
  source 1..50: mol_type = other DNA
cactccaattatcccttaacctaaatcccaaataactataacaataatcc

SEQ ID NO: 34709 - DNA, 50 bp, synthetic construct
  source 1..50: mol_type = other DNA
aaaaaaattacaaaaccrccttataactaaacctcctaccccaaaactac

SEQ ID NO: 34710 - DNA, 50 bp, synthetic construct
  source 1..50: mol_type = other DNA
aatacctatataacataaaactattctcaaatttcaataaaataatattc

SEQ ID NO: 34711 - DNA, 50 bp, synthetic construct
  source 1..50: mol_type = other DNA
caaatactattttaacaaaaaaacaaataacctacaacctcttcctaccc

SEQ ID NO: 34712 - DNA, 50 bp, synthetic construct
  source 1..50: mol_type = other DNA
aaaaatttctcaaacraaaactcctacaataacaactaaaaaactccaac

SEQ ID NO: 34713 - DNA, 50 bp, synthetic construct
  source 1..50: mol_type = other DNA
ttcctaaaataactcctaacatataacaaacactcactaataccaaatac

SEQ ID NO: 34714 - DNA, 50 bp, synthetic construct
  source 1..50: mol_type = other DNA
ataaacraaatacttcctctattctctacttccrttactaacttaaactc

SEQ ID NO: 34715 - DNA, 50 bp, synthetic construct
  source 1..50: mol_type = other DNA
atcaaaaatataataaaataaacraaatacttcctctattctctacttcc

SEQ ID NO: 34716 - DNA, 50 bp, synthetic construct
  source 1..50: mol_type = other DNA
craaacccccaccaaaaccaaaacacaatcaaaaatataataaaataaac

SEQ ID NO: 34717 - DNA, 50 bp, synthetic construct
  source 1..50: mol_type = other DNA
crcaaaacaaaaaacaaccccatactattttatctcaaataaaacacctc

SEQ ID NO: 34718 - DNA, 50 bp, synthetic construct
  source 1..50: mol_type = other DNA
taatacraaacraccacataaataaaacttttataaatttcacaaacrac

SEQ ID NO: 34719 - DNA, 50 bp, synthetic construct
  source 1..50: mol_type = other DNA
ataacaaaatatccrataatcataccaccaacccaactcaattaattccc

SEQ ID NO: 34720 - DNA, 50 bp, synthetic construct
  source 1..50: mol_type = other DNA
tccraaactcctacttaaataaattcrctcttatttcatttaactatatc

SEQ ID NO: 34721 - DNA, 50 bp, synthetic construct
  source 1..50: mol_type = other DNA
aacrataaaattcaaaacattaacacractaaatcrctactatctaatcc

SEQ ID NO: 34722 - DNA, 50 bp, synthetic construct
  source 1..50: mol_type = other DNA
tatacactatcaatcaacrataaaattcaaaacattaacacractaaatc

SEQ ID NO: 34723 - DNA, 50 bp, synthetic construct
  source 1..50: mol_type = other DNA
attcccacatatacactatcaatcaacrataaaattcaaaacattaacac

SEQ ID NO: 34724 - DNA, 50 bp, synthetic construct
  source 1..50: mol_type = other DNA
cctacctccaaaccctattttcctacctcaaaaccatttaaaaataaatc

SEQ ID NO: 34725 - DNA, 50 bp, synthetic construct
  source 1..50: mol_type = other DNA
aattcacacttcaactataacaaaaaacatcctctccatttacataaaac

SEQ ID NO: 34726 - DNA, 50 bp, synthetic construct
  source 1..50: mol_type = other DNA
atttaaataccaaaaaattatataacccaacccttaaacccctatactcc

SEQ ID NO: 34727 - DNA, 50 bp, synthetic construct
  source 1..50: mol_type = other DNA
taaataccaaaaaattatataacccaacccttaaacccctatactccrcc

SEQ ID NO: 34728 - DNA, 50 bp, synthetic construct
  source 1..50: mol_type = other DNA
ttttcaataaatctctacctttattacttcattatttccttactttatac

SEQ ID NO: 34729 - DNA, 50 bp, synthetic construct
  source 1..50: mol_type = other DNA
attaataataataacccctactctaacctcccatatcctcacaattaatc

SEQ ID NO: 34730 - DNA, 50 bp, synthetic construct
  source 1..50: mol_type = other DNA
atcaaaaatcaaatcaaccattttcaccattttatctattacacacaaac

SEQ ID NO: 34731 - DNA, 50 bp, synthetic construct
  source 1..50: mol_type = other DNA
caatcacaaaataaaatactccttcaactaaattacaacaaaacaatacc

SEQ ID NO: 34732 - DNA, 50 bp, synthetic construct
  source 1..50: mol_type = other DNA
aatctaactctaaatcctacttcacataaaaactatataaacctaaacrc

SEQ ID NO: 34733 - DNA, 50 bp, synthetic construct
  source 1..50: mol_type = other DNA
tcctacttcacataaaaactatataaacctaaacrcrttatttaaacccc

SEQ ID NO: 34734 - DNA, 50 bp, synthetic construct
  source 1..50: mol_type = other DNA
ttaaaaacctttatacaactcataacttaacccattacttaaaataattc

SEQ ID NO: 34735 - DNA, 50 bp, synthetic construct
  source 1..50: mol_type = other DNA
aactaaatatctacctaaaaccaaacracattttacttaacattaaaccc

SEQ ID NO: 34736 - DNA, 50 bp, synthetic construct
  source 1..50: mol_type = other DNA
tacacaaaaacccccaaaacccaaacraatttaatattaaacaaaatacc

SEQ ID NO: 34737 - DNA, 50 bp, synthetic construct
  source 1..50: mol_type = other DNA
tttaatattaaacaaaataccrcctaatctcaaataaacactcaaccacc

SEQ ID NO: 34738 - DNA, 50 bp, synthetic construct
  source 1..50: mol_type = other DNA
acaccatcrtttaaaaatttcctcctaaaaacttaaaacctaacaacacc

SEQ ID NO: 34739 - DNA, 50 bp, synthetic construct
  source 1..50: mol_type = other DNA
taaataatatccctccatattatcacctcctcacatatatactacaatac

SEQ ID NO: 34740 - DNA, 50 bp, synthetic construct
  source 1..50: mol_type = other DNA
atccctccatattatcacctcctcacatatatactacaatacrataatac

SEQ ID NO: 34741 - DNA, 50 bp, synthetic construct
  source 1..50: mol_type = other DNA
cctcacatatatactacaatacrataatacratacttctaactatataac

SEQ ID NO: 34742 - DNA, 50 bp, synthetic construct
  source 1..50: mol_type = other DNA
crctccrtatacrtatctcctaatataaaatataccaataaccccactac

SEQ ID NO: 34743 - DNA, 50 bp, synthetic construct
  source 1..50: mol_type = other DNA
caaccaaacaactcaaaaacacacaattacctactaccraataaccaaac

SEQ ID NO: 34744 - DNA, 50 bp, synthetic construct
  source 1..50: mol_type = other DNA
aaataaattccataaacctccaaaacaataaaatcctctctccattcctc

SEQ ID NO: 34745 - DNA, 50 bp, synthetic construct
  source 1..50: mol_type = other DNA
aaaatcctattatcttaaaaacccataaaatctacttccrtctataaaac

SEQ ID NO: 34746 - DNA, 50 bp, synthetic construct
  source 1..50: mol_type = other DNA
aacccataaaatctacttccrtctataaaacrttctccraaaaaaacatc

SEQ ID NO: 34747 - DNA, 50 bp, synthetic construct
  source 1..50: mol_type = other DNA
taactaaaacaactctattctctatatttcctacttctatatacattctc

SEQ ID NO: 34748 - DNA, 50 bp, synthetic construct
  source 1..50: mol_type = other DNA
ctttatctctatatacctctatctctatacttataactattccttaaaac

SEQ ID NO: 34749 - DNA, 50 bp, synthetic construct
  source 1..50: mol_type = other DNA
ttatctctatatacctctatctctatacttataactattccttaaaacrc

SEQ ID NO: 34750 - DNA, 50 bp, synthetic construct
  source 1..50: mol_type = other DNA
taataattttctaccctatatattaataaacaatatacaaaaacaaaacc

SEQ ID NO: 34751 - DNA, 50 bp, synthetic construct
  source 1..50: mol_type = other DNA
crcrtccataaatcccttactaaaaataaaaaacaactttaatcatctcc

SEQ ID NO: 34752 - DNA, 50 bp, synthetic construct
  source 1..50: mol_type = other DNA
cacraaaataatcaaaattatctcctatttttaacaaaaaatccataaac

SEQ ID NO: 34753 - DNA, 50 bp, synthetic construct
  source 1..50: mol_type = other DNA
craaaataatcaaaattatctcctatttttaacaaaaaatccataaacrc

SEQ ID NO: 34754 - DNA, 50 bp, synthetic construct
  source 1..50: mol_type = other DNA
acattacttttcaaaaataacaaaaaataactcrtaatcrctaatacctc

SEQ ID NO: 34755 - DNA, 50 bp, synthetic construct
  source 1..50: mol_type = other DNA
acatttttttattaactacattacttttcaaaaataacaaaaaataactc

SEQ ID NO: 34756 - DNA, 50 bp, synthetic construct
  source 1..50: mol_type = other DNA
cracactcaaacacrtaaaacaaaacaaaactttacataaaaaacaacac

SEQ ID NO: 34757 - DNA, 50 bp, synthetic construct
  source 1..50: mol_type = other DNA
taaataatacttctttaaaaatattccaataatacacracactcaaacac

SEQ ID NO: 34758 - DNA, 50 bp, synthetic construct
  source 1..50: mol_type = other DNA
crtattattttccatacaaaactctatcctatcctacrtatctaaatatc

SEQ ID NO: 34759 - DNA, 50 bp, synthetic construct
  source 1..50: mol_type = other DNA
caataatatattcraaaactctatatactacctcttcaactttaaacaac

SEQ ID NO: 34760 - DNA, 50 bp, synthetic construct
  source 1..50: mol_type = other DNA
caatcccttcrcaaaatctataaatcaaaaaccttaaaaaacratttctc

SEQ ID NO: 34761 - DNA, 50 bp, synthetic construct
  source 1..50: mol_type = other DNA
aaaaccrcaacraaacacataatatacccaaattactaaatcraaaaacc

SEQ ID NO: 34762 - DNA, 50 bp, synthetic construct
  source 1..50: mol_type = other DNA
atttacacccrtaaaactaaatctataaaaataataaccataaattcaac

SEQ ID NO: 34763 - DNA, 50 bp, synthetic construct
  source 1..50: mol_type = other DNA
aacccatccccaaacrataataacctaaaatacrcaaaactaaaactaac

SEQ ID NO: 34764 - DNA, 50 bp, synthetic construct
  source 1..50: mol_type = other DNA
ttcttaaactaaattaaaaactctaaactccccrctaattccaatcctac

SEQ ID NO: 34765 - DNA, 50 bp, synthetic construct
  source 1..50: mol_type = other DNA
cctctaaaattaaaatccaataaaaaaatcaaaaaaacccatccccaaac

SEQ ID NO: 34766 - DNA, 50 bp, synthetic construct
  source 1..50: mol_type = other DNA
aacaatcaatatttattaaatatctatcttatactaaacaatactaaaac

SEQ ID NO: 34767 - DNA, 50 bp, synthetic construct
  source 1..50: mol_type = other DNA
aataaatattaattaccttaataaaaaccaccacataccaaactccaacc

SEQ ID NO: 34768 - DNA, 50 bp, synthetic construct
  source 1..50: mol_type = other DNA
tccctacctacctacraactcccaaaaaacataactataactaattcatc

SEQ ID NO: 34769 - DNA, 50 bp, synthetic construct
  source 1..50: mol_type = other DNA
acaaaaaaacacrattactcaacacaaataataaacaataaaaaaatccc

SEQ ID NO: 34770 - DNA, 50 bp, synthetic construct
  source 1..50: mol_type = other DNA
aaaacacrattactcaacacaaataataaacaataaaaaaatcccrtaac

SEQ ID NO: 34771 - DNA, 50 bp, synthetic construct
  source 1..50: mol_type = other DNA
raaccaaaacrataaaatcacaaactaaacratcataaaatactataacc

SEQ ID NO: 34772 - DNA, 50 bp, synthetic construct
  source 1..50: mol_type = other DNA
ccaaaacrataaaatcacaaactaaacratcataaaatactataaccrcc

SEQ ID NO: 34773 - DNA, 50 bp, synthetic construct
  source 1..50: mol_type = other DNA
tataaatctaacataccctatcccraactaaataaaactataaacatacc

SEQ ID NO: 34774 - DNA, 50 bp, synthetic construct
  source 1..50: mol_type = other DNA
attcaatcctacctctaccactacctactatataaccttaaacaaatccc

SEQ ID NO: 34775 - DNA, 50 bp, synthetic construct
  source 1..50: mol_type = other DNA
ccaactaaacaaaaatcaaacctatcttatccraaccaattccaaaccac

SEQ ID NO: 34776 - DNA, 50 bp, synthetic construct
  source 1..50: mol_type = other DNA
tcaatatcactaattactaaaactaccctcccrtaatttaaaactaactc

SEQ ID NO: 34777 - DNA, 50 bp, synthetic construct
  source 1..50: mol_type = other DNA
ataacaatcaaaatataaaactactcaaaaaatcaaaaccaaactatccc

SEQ ID NO: 34778 - DNA, 50 bp, synthetic construct
  source 1..50: mol_type = other DNA
cattcacaccctatcctaatactaaaactccaaaactcttctaattctac

SEQ ID NO: 34779 - DNA, 50 bp, synthetic construct
  source 1..50: mol_type = other DNA
tctaactcaaatattcataaaataccctaaactaaaaaaaatactaatac

SEQ ID NO: 34780 - DNA, 50 bp, synthetic construct
  source 1..50: mol_type = other DNA
tataaatcatctataaaataaaactctttataaaaacttaacrataccac

SEQ ID NO: 34781 - DNA, 50 bp, synthetic construct
  source 1..50: mol_type = other DNA
aaaaccaactattactaccttaataaaaaatataaacataatatataacc

SEQ ID NO: 34782 - DNA, 50 bp, synthetic construct
  source 1..50: mol_type = other DNA
aaacacaaacaacttcrtaaccaacracaaaaaaacatataataatctac

SEQ ID NO: 34783 - DNA, 50 bp, synthetic construct
  source 1..50: mol_type = other DNA
ttcaacttcatccactcctaccttcccaaaaaaacaacaaaaattcactc

SEQ ID NO: 34784 - DNA, 50 bp, synthetic construct
  source 1..50: mol_type = other DNA
aatacttcaaaactcaacaaaattaatcaaataataaataacaaaatatc

SEQ ID NO: 34785 - DNA, 50 bp, synthetic construct
  source 1..50: mol_type = other DNA
aaactcaacaaaattaatcaaataataaataacaaaatatcratttcccc

SEQ ID NO: 34786 - DNA, 50 bp, synthetic construct
  source 1..50: mol_type = other DNA
cctctacttaaaatctttacacacacaaatttcatcaaaatcctcaaaac

SEQ ID NO: 34787 - DNA, 50 bp, synthetic construct
  source 1..50: mol_type = other DNA
crcctaaacctctcaaaatattaaaatcacaaacataaaccactacaccc

SEQ ID NO: 34788 - DNA, 50 bp, synthetic construct
  source 1..50: mol_type = other DNA
ctacctctactaaaaacacaaaaattaactaaacataataacaaacaccc

SEQ ID NO: 34789 - DNA, 50 bp, synthetic construct
  source 1..50: mol_type = other DNA
ttaccacrttaactaaacaaattttaaactcctaaaattctcctctcrtc

SEQ ID NO: 34790 - DNA, 50 bp, synthetic construct
  source 1..50: mol_type = other DNA
cataccactattatatcatttttctttattttttaaaacaatctcrcttc

SEQ ID NO: 34791 - DNA, 50 bp, synthetic construct
  source 1..50: mol_type = other DNA
tcttttataaaaataaaaatctcactatattacccaaactaacctcaaac

SEQ ID NO: 34792 - DNA, 50 bp, synthetic construct
  source 1..50: mol_type = other DNA
cccacactcctacctaaaaaaactaaatttttactccaaaccctaaaccc

SEQ ID NO: 34793 - DNA, 50 bp, synthetic construct
  source 1..50: mol_type = other DNA
cccatttatcttcaaaaaaccccaaaattaatcttaataaataaattctc

SEQ ID NO: 34794 - DNA, 50 bp, synthetic construct
  source 1..50: mol_type = other DNA
ataaaataaaattcctaaaaatcatcaacacttaaaaaactcaattaacc

SEQ ID NO: 34795 - DNA, 50 bp, synthetic construct
  source 1..50: mol_type = other DNA
aataacttccaaaaattccacttcactatctaaaccctattttcaacacc

SEQ ID NO: 34796 - DNA, 50 bp, synthetic construct
  source 1..50: mol_type = other DNA
catcactaaacaaatctactactacaaccrcrtaaacaaaacctaaaacc

SEQ ID NO: 34797 - DNA, 50 bp, synthetic construct
  source 1..50: mol_type = other DNA
aacccaaccaatcaaattaaaacaataaactcaaaattaaaaaataaaac

SEQ ID NO: 34798 - DNA, 50 bp, synthetic construct
  source 1..50: mol_type = other DNA
taactacaaataaaaataaaaccataaatactatccaatctaaaacctac

SEQ ID NO: 34799 - DNA, 50 bp, synthetic construct
  source 1..50: mol_type = other DNA
crctcaaaaaacaaaaactaacttaaaaactccraaataactataactac

SEQ ID NO: 34800 - DNA, 50 bp, synthetic construct
  source 1..50: mol_type = other DNA
crtaaccacaactaccccraaactcccaaattaatttttatctcctaaac

SEQ ID NO: 34801 - DNA, 50 bp, synthetic construct
  source 1..50: mol_type = other DNA
ctcaaaaaccaaaaacttaatcaaaattcaaaaacaaaataaaactaaac

SEQ ID NO: 34802 - DNA, 50 bp, synthetic construct
  source 1..50: mol_type = other DNA
cacaaaaaaactatttcctaacctccaactctatccctataaacccaacc

SEQ ID NO: 34803 - DNA, 50 bp, synthetic construct
  source 1..50: mol_type = other DNA
tcctaaccaaaaaataaaatatcttaaaaactacaaataaaaccaaaaac

SEQ ID NO: 34804 - DNA, 50 bp, synthetic construct
  source 1..50: mol_type = other DNA
aaaaccaacaaaacaaacacaataaaaaaaacctaccrtattatcacaac

SEQ ID NO: 34805 - DNA, 50 bp, synthetic construct
  source 1..50: mol_type = other DNA
attaaaaaaaatacctcttaatcatcctctccctaaacaataacraatac

SEQ ID NO: 34806 - DNA, 50 bp, synthetic construct
  source 1..50: mol_type = other DNA
caataaaaactcrcaaatacaataataaaaacccacaatattaacacaac

SEQ ID NO: 34807 - DNA, 50 bp, synthetic construct
  source 1..50: mol_type = other DNA
taaaaactcaataaaacrtaatcraaccaaaaacataaaacrtaaccttc

SEQ ID NO: 34808 - DNA, 50 bp, synthetic construct
  source 1..50: mol_type = other DNA
aaaactaaataaaaactcaataaaacrtaatcraaccaaaaacataaaac

SEQ ID NO: 34809 - DNA, 50 bp, synthetic construct
  source 1..50: mol_type = other DNA
acatacaaaaattaccctaaaacttttacctttaaccacctaaccaactc

SEQ ID NO: 34810 - DNA, 50 bp, synthetic construct
  source 1..50: mol_type = other DNA
aaatttaaaactcaaccaaaactaaattaaaatcctaactctaacttaac

SEQ ID NO: 34811 - DNA, 50 bp, synthetic construct
  source 1..50: mol_type = other DNA
aaatcaaaaccaaaattctaactcaattctaactaaatttcaaacccatc

SEQ ID NO: 34812 - DNA, 50 bp, synthetic construct
  source 1..50: mol_type = other DNA
ataccctctctaaaaacaatcaaaaactcaatactacrtttaaaacctcc

SEQ ID NO: 34813 - DNA, 50 bp, synthetic construct
  source 1..50: mol_type = other DNA
acctaaatacacactattccttaaacactcttctattatcctacctccac

SEQ ID NO: 34814 - DNA, 50 bp, synthetic construct
  source 1..50: mol_type = other DNA
tattccttaaacactcttctattatcctacctccacrcattactcaaacc

SEQ ID NO: 34815 - DNA, 50 bp, synthetic construct
  source 1..50: mol_type = other DNA
acaataatacaatcataactcactacaacctcaacctctctaactcaaac

SEQ ID NO: 34816 - DNA, 50 bp, synthetic construct
  source 1..50: mol_type = other DNA
caacaacaacttcactaataacctcaaactaaatcccaacaaactccttc

SEQ ID NO: 34817 - DNA, 50 bp, synthetic construct
  source 1..50: mol_type = other DNA
aacacrtaaacaattacatctcatacaaacatttaattttataaactcac

SEQ ID NO: 34818 - DNA, 50 bp, synthetic construct
  source 1..50: mol_type = other DNA
attacaaaaccaaacacaactttaaaacttcttattaccttcccccaccc

SEQ ID NO: 34819 - DNA, 50 bp, synthetic construct
  source 1..50: mol_type = other DNA
aaaaacctaaccactattaaaaaaacacacaaaacaaaaatcaccaaatc

SEQ ID NO: 34820 - DNA, 50 bp, synthetic construct
  source 1..50: mol_type = other DNA
taattctaattaacccaaaaaacataactaaaactcraaaatcaaaaacc

SEQ ID NO: 34821 - DNA, 50 bp, synthetic construct
  source 1..50: mol_type = other DNA
tccctatctaactctaattctaattaacccaaaaaacataactaaaactc

SEQ ID NO: 34822 - DNA, 50 bp, synthetic construct
  source 1..50: mol_type = other DNA
aacaaaaaacaaaaacrctccrtaacaaaaactttcrttctttaataatc

SEQ ID NO: 34823 - DNA, 50 bp, synthetic construct
  source 1..50: mol_type = other DNA
aacaaacaaaatactcaaaacractattaaaaaacraaaacctctactac

SEQ ID NO: 34824 - DNA, 50 bp, synthetic construct
  source 1..50: mol_type = other DNA
acaaaatactcaaaacractattaaaaaacraaaacctctactacraaac

SEQ ID NO: 34825 - DNA, 50 bp, synthetic construct
  source 1..50: mol_type = other DNA
tcactaattcataaaaccatctaaaaatccaacccratatcaaacacttc

SEQ ID NO: 34826 - DNA, 50 bp, synthetic construct
  source 1..50: mol_type = other DNA
ctttataattctaaacctaaattcctatttcatttctacctctaataacc

SEQ ID NO: 34827 - DNA, 50 bp, synthetic construct
  source 1..50: mol_type = other DNA
aaaataaaacaacattaaaaaaacaaatatacatacaaatatcctcaaac

SEQ ID NO: 34828 - DNA, 50 bp, synthetic construct
  source 1..50: mol_type = other DNA
atcctatctatatacraaacaataactaacacraaacccttattaaaccc

SEQ ID NO: 34829 - DNA, 50 bp, synthetic construct
  source 1..50: mol_type = other DNA
aatcaaataataaacraacctaacaaaaactccrtactaaccactatccc

SEQ ID NO: 34830 - DNA, 50 bp, synthetic construct
  source 1..50: mol_type = other DNA
ccacttcctcaaaatcacacaactaaaaaatatcacaatcaaaactaaac

SEQ ID NO: 34831 - DNA, 50 bp, synthetic construct
  source 1..50: mol_type = other DNA
caataacattaaactccctacattcccacacaaactctcctaatttaaac

SEQ ID NO: 34832 - DNA, 50 bp, synthetic construct
  source 1..50: mol_type = other DNA
cactcaatcatatatacrtctaaaaatactaactaaacrcaataactcac

SEQ ID NO: 34833 - DNA, 50 bp, synthetic construct
  source 1..50: mol_type = other DNA
ttaaatcccaatctacaactatataaccttaaaacaaattacttaatctc

SEQ ID NO: 34834 - DNA, 50 bp, synthetic construct
  source 1..50: mol_type = other DNA
acccaaaaattccaacctaccrtaaaccataattatactactacacttcc

SEQ ID NO: 34835 - DNA, 50 bp, synthetic construct
  source 1..50: mol_type = other DNA
taaaaaactaaaacrtaaaaatcccttaaacccaaaaattccaacctacc

SEQ ID NO: 34836 - DNA, 50 bp, synthetic construct
  source 1..50: mol_type = other DNA
aaaacacctaaaatttaaaacaaaaaaaactttttctccccttaacaaac

SEQ ID NO: 34837 - DNA, 50 bp, synthetic construct
  source 1..50: mol_type = other DNA
aaaaaaattccccacccaaaaaaacactaaaaacaaaaattaaaattcac

SEQ ID NO: 34838 - DNA, 50 bp, synthetic construct
  source 1..50: mol_type = other DNA
atcccaacattttaaaacrctaaaacraattcacttaaaatcaaacattc

SEQ ID NO: 34839 - DNA, 50 bp, synthetic construct
  source 1..50: mol_type = other DNA
attaaccaaataaatctcraatacctaacttcaaataaacccrcctcaac

SEQ ID NO: 34840 - DNA, 50 bp, synthetic construct
  source 1..50: mol_type = other DNA
ccttaaaaaaaaattaccccaatactattaaaaacrtttccaaactaaac

SEQ ID NO: 34841 - DNA, 50 bp, synthetic construct
  source 1..50: mol_type = other DNA
ctacrcccctcaaaaccttaaaaaaaaattaccccaatactattaaaaac

SEQ ID NO: 34842 - DNA, 50 bp, synthetic construct
  source 1..50: mol_type = other DNA
aaacrtttctaacaatactaaaacaactccctcccaaaaccctaaaaaac

SEQ ID NO: 34843 - DNA, 50 bp, synthetic construct
  source 1..50: mol_type = other DNA
aaattaaaaccccatatatccaaaaaactctaaccattcctactcacctc

SEQ ID NO: 34844 - DNA, 50 bp, synthetic construct
  source 1..50: mol_type = other DNA
aaatatcattcccttttaaatatatatatacacatctaatacaaatatac

SEQ ID NO: 34845 - DNA, 50 bp, synthetic construct
  source 1..50: mol_type = other DNA
tcaaaattaaccctcctaacttctaacaaacacrtactaaccaaaaacac

SEQ ID NO: 34846 - DNA, 50 bp, synthetic construct
  source 1..50: mol_type = other DNA
acraaaacaaaaacaaaacctaaaatatatccaaccttaaaataaaaccc

SEQ ID NO: 34847 - DNA, 50 bp, synthetic construct
  source 1..50: mol_type = other DNA
atcacacaacaactaactccaccaaaccttaactactaaataaaactcac

SEQ ID NO: 34848 - DNA, 50 bp, synthetic construct
  source 1..50: mol_type = other DNA
aaataaatacccctacccacaccttaaaacctattctaaaatttcraccc

SEQ ID NO: 34849 - DNA, 50 bp, synthetic construct
  source 1..50: mol_type = other DNA
tacaaaaataaatacccctacccacaccttaaaacctattctaaaatttc

SEQ ID NO: 34850 - DNA, 50 bp, synthetic construct
  source 1..50: mol_type = other DNA
caaacaaaaaacctctaactacctatcttttcattttccaaaacttaaac

SEQ ID NO: 34851 - DNA, 50 bp, synthetic construct
  source 1..50: mol_type = other DNA
aatataactaacccacctcactaaacaaattaaaaatcctaaaaataacc

SEQ ID NO: 34852 - DNA, 50 bp, synthetic construct
  source 1..50: mol_type = other DNA
ctcactaaacaaattaaaaatcctaaaaataaccraatacaacaactcac

SEQ ID NO: 34853 - DNA, 50 bp, synthetic construct
  source 1..50: mol_type = other DNA
aacatcactttctttatctataaataaaaataacaacaataattcccctc

SEQ ID NO: 34854 - DNA, 50 bp, synthetic construct
  source 1..50: mol_type = other DNA
aactaaacttctccaaaatctaaaaaaaaaccaaccaaatatcaaactac

SEQ ID NO: 34855 - DNA, 50 bp, synthetic construct
  source 1..50: mol_type = other DNA
acraccaaaaatataaatacaaaaatcaataattcaacaacaacaacaac

SEQ ID NO: 34856 - DNA, 50 bp, synthetic construct
  source 1..50: mol_type = other DNA
aaatataacctatttccttccracaaaaatcrccaaaaaccacaaaaacc

SEQ ID NO: 34857 - DNA, 50 bp, synthetic construct
  source 1..50: mol_type = other DNA
aaaattacctaaaacraaattactcatcctaaactcaaataaaaaaaccc

SEQ ID NO: 34858 - DNA, 50 bp, synthetic construct
  source 1..50: mol_type = other DNA
catctattaccaatcttaaaaaacaccctaaatctataacctttaacatc

SEQ ID NO: 34859 - DNA, 50 bp, synthetic construct
  source 1..50: mol_type = other DNA
ttaaaataccctctaaaactaataacaaataaacaacttcacttatacac

SEQ ID NO: 34860 - DNA, 50 bp, synthetic construct
  source 1..50: mol_type = other DNA
aacttctctccttaaataaatcctactacttcatattctcttcaaaattc

SEQ ID NO: 34861 - DNA, 50 bp, synthetic construct
  source 1..50: mol_type = other DNA
aaaaatccccaaaacccaaaaaacaacatctataaatacacataactaac

SEQ ID NO: 34862 - DNA, 50 bp, synthetic construct
  source 1..50: mol_type = other DNA
aaatacaaaaactaatactaaaatctctataacacttcratatccaaaac

SEQ ID NO: 34863 - DNA, 50 bp, synthetic construct
  source 1..50: mol_type = other DNA
ttttaatttacatatcccaattactaataaaaaaaatttctcaatcactc

SEQ ID NO: 34864 - DNA, 50 bp, synthetic construct
  source 1..50: mol_type = other DNA
ttaatttacatatcccaattactaataaaaaaaatttctcaatcactcrc

SEQ ID NO: 34865 - DNA, 50 bp, synthetic construct
  source 1..50: mol_type = other DNA
aattaccrtataaaaaaatacrccctaaaacaaaacctctacaaaaccac

SEQ ID NO: 34866 - DNA, 50 bp, synthetic construct
  source 1..50: mol_type = other DNA
aacctcttaaaacctacratacatacaatataaaaccaacraaaattacc

SEQ ID NO: 34867 - DNA, 50 bp, synthetic construct
  source 1..50: mol_type = other DNA
ccctctctatcaatacrttctattcctactcctattaaatctttctcacc

SEQ ID NO: 34868 - DNA, 50 bp, synthetic construct
  source 1..50: mol_type = other DNA
acaaatacataccaccaaaccraactaaattttacattttcaataaaaac

SEQ ID NO: 34869 - DNA, 50 bp, synthetic construct
  source 1..50: mol_type = other DNA
taaatttccacctctaattcccattttcctttcctaaaacactaattccc

SEQ ID NO: 34870 - DNA, 50 bp, synthetic construct
  source 1..50: mol_type = other DNA
cttatccttaatctaccccatcactaacctaaccaaaactaaaatataac

SEQ ID NO: 34871 - DNA, 50 bp, synthetic construct
  source 1..50: mol_type = other DNA
aacraccaataaacaaaaatacccaaactacaaactcaaaaatacccrac

SEQ ID NO: 34872 - DNA, 50 bp, synthetic construct
  source 1..50: mol_type = other DNA
ccraacraccaataaacaaaaatacccaaactacaaactcaaaaataccc

SEQ ID NO: 34873 - DNA, 50 bp, synthetic construct
  source 1..50: mol_type = other DNA
aaaatctcrtctcaaaatcaaatctatattttcttactaaaatccttcac

SEQ ID NO: 34874 - DNA, 50 bp, synthetic construct
  source 1..50: mol_type = other DNA
taatttcacaataaaacaactactttatctaaaatttaaacccraaattc

SEQ ID NO: 34875 - DNA, 50 bp, synthetic construct
  source 1..50: mol_type = other DNA
tttcacaataaaacaactactttatctaaaatttaaacccraaattcrtc

SEQ ID NO: 34876 - DNA, 50 bp, synthetic construct
  source 1..50: mol_type = other DNA
ataaaacaactactttatctaaaatttaaacccraaattcrtcrttaaac

SEQ ID NO: 34877 - DNA, 50 bp, synthetic construct
  source 1..50: mol_type = other DNA
cttcttcctattaaacctccrctcctaaactaaaaaatttttatatatcc

SEQ ID NO: 34878 - DNA, 50 bp, synthetic construct
  source 1..50: mol_type = other DNA
caaactaatctataaaactcaacacattcactaccaaccracccttttcc

SEQ ID NO: 34879 - DNA, 50 bp, synthetic construct
  source 1..50: mol_type = other DNA
cactacctcctcaaactaatctataaaactcaacacattcactaccaacc

SEQ ID NO: 34880 - DNA, 50 bp, synthetic construct
  source 1..50: mol_type = other DNA
aaaacctatttacataaaaaaattaaaataaaacraccaaccttccccac

SEQ ID NO: 34881 - DNA, 50 bp, synthetic construct
  source 1..50: mol_type = other DNA
ctaccrcaaacataaataccaacaattataccaatcatattaaaaataac

SEQ ID NO: 34882 - DNA, 50 bp, synthetic construct
  source 1..50: mol_type = other DNA
tatacraattaaaaaaccatcacttaaacaaataaaatataaaaaccctc

SEQ ID NO: 34883 - DNA, 50 bp, synthetic construct
  source 1..50: mol_type = other DNA
ttaccraaaactcccataccctatctacctaaataataacttcttaactc

SEQ ID NO: 34884 - DNA, 50 bp, synthetic construct
  source 1..50: mol_type = other DNA
catttaacacaaatttaaaatctaatattccttaacrttcaacrtccatc

SEQ ID NO: 34885 - DNA, 50 bp, synthetic construct
  source 1..50: mol_type = other DNA
aaaccracatttaacacaaatttaaaatctaatattccttaacrttcaac

SEQ ID NO: 34886 - DNA, 50 bp, synthetic construct
  source 1..50: mol_type = other DNA
atttaaaaaaccracatttaacacaaatttaaaatctaatattccttaac

SEQ ID NO: 34887 - DNA, 50 bp, synthetic construct
  source 1..50: mol_type = other DNA
acaaaatcacttaaacctaaaaaatcaaaaccrcaataaatcaaaattac

SEQ ID NO: 34888 - DNA, 50 bp, synthetic construct
  source 1..50: mol_type = other DNA
atatccctaaatactcaacrtttaactcccacttacaaataaaaataaac

SEQ ID NO: 34889 - DNA, 50 bp, synthetic construct
  source 1..50: mol_type = other DNA
atataaatcactaaatctacrcaactaaatcaaactacatttataaccac

SEQ ID NO: 34890 - DNA, 50 bp, synthetic construct
  source 1..50: mol_type = other DNA
ataaactccttattaataccrtaaccacaaatacaacctaacccaactac

SEQ ID NO: 34891 - DNA, 50 bp, synthetic construct
  source 1..50: mol_type = other DNA
ttatttaaaccaaaaattattcrccactttaaaaaatcccctcaccaacc

SEQ ID NO: 34892 - DNA, 50 bp, synthetic construct
  source 1..50: mol_type = other DNA
ttttcaaaaattacaaccaacacactaattatttaaaccaaaaattattc

SEQ ID NO: 34893 - DNA, 50 bp, synthetic construct
  source 1..50: mol_type = other DNA
accaataatattctttcccataattatttttcctttttcttttttaaaac

SEQ ID NO: 34894 - DNA, 50 bp, synthetic construct
  source 1..50: mol_type = other DNA
aaaacaaatttctaaaatctaatcattttaaacaaatttcttattaactc

SEQ ID NO: 34895 - DNA, 50 bp, synthetic construct
  source 1..50: mol_type = other DNA
ataaacaaaaccaattatactaaacaatttataataccaaaaacaatccc

SEQ ID NO: 34896 - DNA, 50 bp, synthetic construct
  source 1..50: mol_type = other DNA
ctatccctaatattataaactatccaacataactaatcctatctacttac

SEQ ID NO: 34897 - DNA, 50 bp, synthetic construct
  source 1..50: mol_type = other DNA
caaaatttttactcaacaaccacaaacaacaacaaataaaaaccaacccc

SEQ ID NO: 34898 - DNA, 50 bp, synthetic construct
  source 1..50: mol_type = other DNA
cttctaaccctacttcaaacactactaatatttcaaaacctttcattccc

SEQ ID NO: 34899 - DNA, 50 bp, synthetic construct
  source 1..50: mol_type = other DNA
ctacttcaaacactactaatatttcaaaacctttcattcccractccaac

SEQ ID NO: 34900 - DNA, 50 bp, synthetic construct
  source 1..50: mol_type = other DNA
aaatttccaaaatataaaaaacraatcctaccctcaacaaaaatacrctc

SEQ ID NO: 34901 - DNA, 50 bp, synthetic construct
  source 1..50: mol_type = other DNA
tattaaatttccaaaatataaaaaacraatcctaccctcaacaaaaatac

SEQ ID NO: 34902 - DNA, 50 bp, synthetic construct
  source 1..50: mol_type = other DNA
actaccaaaaaaactatctttctctattaaatttccaaaatataaaaaac

SEQ ID NO: 34903 - DNA, 50 bp, synthetic construct
  source 1..50: mol_type = other DNA
acttcaaaccraacaaacaaattataaaaacctaaaaatacaaccttctc

SEQ ID NO: 34904 - DNA, 50 bp, synthetic construct
  source 1..50: mol_type = other DNA
cttaaaattcraaaaaactacatttctaaactcccacaacctatctatcc

SEQ ID NO: 34905 - DNA, 50 bp, synthetic construct
  source 1..50: mol_type = other DNA
aaaaaactacatttctaaactcccacaacctatctatccratttaaaacc

SEQ ID NO: 34906 - DNA, 50 bp, synthetic construct
  source 1..50: mol_type = other DNA
ttctaaaattctaaaacataccctaaaacattccctacacaaaataatac

SEQ ID NO: 34907 - DNA, 50 bp, synthetic construct
  source 1..50: mol_type = other DNA
attctaaccaaaaaaaacccratctactccatacttaaaaaaattactac

SEQ ID NO: 34908 - DNA, 50 bp, synthetic construct
  source 1..50: mol_type = other DNA
attcactaaaccaaatccccrcaataatcttcctaaacataaaataaacc

SEQ ID NO: 34909 - DNA, 50 bp, synthetic construct
  source 1..50: mol_type = other DNA
cataaaaaatttaactataaattaactcccacctataaccrataaaaaac

SEQ ID NO: 34910 - DNA, 50 bp, synthetic construct
  source 1..50: mol_type = other DNA
aataattaccaaaaaatactcrccrcaaaccttaaataaaacccaatacc

SEQ ID NO: 34911 - DNA, 50 bp, synthetic construct
  source 1..50: mol_type = other DNA
aatctcttaaaccttaaataaacatcaataattaccaaaaaatactcrcc

SEQ ID NO: 34912 - DNA, 50 bp, synthetic construct
  source 1..50: mol_type = other DNA
aaaaatctcttaaaccttaaataaacatcaataattaccaaaaaatactc

SEQ ID NO: 34913 - DNA, 50 bp, synthetic construct
  source 1..50: mol_type = other DNA
aaaaacactaaaaccatattaacaaaatctctacaaaatctaaaaatatc

SEQ ID NO: 34914 - DNA, 50 bp, synthetic construct
  source 1..50: mol_type = other DNA
acaaaatctaaaaatatcrtacataataataaaatactacracctaactc

SEQ ID NO: 34915 - DNA, 50 bp, synthetic construct
  source 1..50: mol_type = other DNA
craaacctaaactaaatcaaaaaccrtctaacaaaacaaaaaccaacctc

SEQ ID NO: 34916 - DNA, 50 bp, synthetic construct
  source 1..50: mol_type = other DNA
aaatctaaaaaactataaaactctataaaaaacccaacaccccccrcctc

SEQ ID NO: 34917 - DNA, 50 bp, synthetic construct
  source 1..50: mol_type = other DNA
acaacaaaacaaactaaaacatactaatacccrcctctatctaaaaaatc

SEQ ID NO: 34918 - DNA, 50 bp, synthetic construct
  source 1..50: mol_type = other DNA
aaaaaactcaacrcccaaaatcacacactccctattcatccaaataaacc

SEQ ID NO: 34919 - DNA, 50 bp, synthetic construct
  source 1..50: mol_type = other DNA
attcaaactaacractcatttaaataaacaaaaaatatataaccttaaac

SEQ ID NO: 34920 - DNA, 50 bp, synthetic construct
  source 1..50: mol_type = other DNA
tcctccaattccacacccacaaactataaatcaaaatctcaaaaaaaaac

SEQ ID NO: 34921 - DNA, 50 bp, synthetic construct
  source 1..50: mol_type = other DNA
rtctaaaatttatactaataacccacaaaccraactacaaaatcccctac

SEQ ID NO: 34922 - DNA, 50 bp, synthetic construct
  source 1..50: mol_type = other DNA
ttaccraactcaacaccractaaaaaaaataacttcaactaactactacc

SEQ ID NO: 34923 - DNA, 50 bp, synthetic construct
  source 1..50: mol_type = other DNA
aaaattctatatttaaaaaaatctttacctccccaacaaaatacatcatc

SEQ ID NO: 34924 - DNA, 50 bp, synthetic construct
  source 1..50: mol_type = other DNA
ttactataacccccaaccataataattaaaatttcccaaaatacactaac

SEQ ID NO: 34925 - DNA, 50 bp, synthetic construct
  source 1..50: mol_type = other DNA
ataaatataaaaaaccaatacattacaatatctaataacatctccaactc

SEQ ID NO: 34926 - DNA, 50 bp, synthetic construct
  source 1..50: mol_type = other DNA
ttacaaaataaaaccaacaaaatttcccataaattaaatataaaacaacc

SEQ ID NO: 34927 - DNA, 50 bp, synthetic construct
  source 1..50: mol_type = other DNA
aaaactcctaaaatctatttattctatcatttataataataatttaaatc

SEQ ID NO: 34928 - DNA, 50 bp, synthetic construct
  source 1..50: mol_type = other DNA
atcccctaaaaaaatatccttaaaaaacacctcraatctataatattccc

SEQ ID NO: 34929 - DNA, 50 bp, synthetic construct
  source 1..50: mol_type = other DNA
atattcaacataaatccaatcraaaaaacaatcaaaaaactccaaacatc

SEQ ID NO: 34930 - DNA, 50 bp, synthetic construct
  source 1..50: mol_type = other DNA
ttttactatatcaatcataattttacaaaaacaatttcaaaattacaaac

SEQ ID NO: 34931 - DNA, 50 bp, synthetic construct
  source 1..50: mol_type = other DNA
ttattaatactaaatccaacctaaaaatacatttcacccccaaaaacaac

SEQ ID NO: 34932 - DNA, 50 bp, synthetic construct
  source 1..50: mol_type = other DNA
accctaaaacacaaataactataacccattccatattcctcacaacatcc

SEQ ID NO: 34933 - DNA, 50 bp, synthetic construct
  source 1..50: mol_type = other DNA
attccatattcctcacaacatccrcactaataatctacttacaaataacc

SEQ ID NO: 34934 - DNA, 50 bp, synthetic construct
  source 1..50: mol_type = other DNA
ttcaaaattaaaaaaactacccaataaacccatccctttcttaaacaatc

SEQ ID NO: 34935 - DNA, 50 bp, synthetic construct
  source 1..50: mol_type = other DNA
cctatcaaaactaactaaaaaaacatcacatactaaaatcttcacaaccc

SEQ ID NO: 34936 - DNA, 50 bp, synthetic construct
  source 1..50: mol_type = other DNA
caaaactaactaaaaaaacatcacatactaaaatcttcacaacccrcaac

SEQ ID NO: 34937 - DNA, 50 bp, synthetic construct
  source 1..50: mol_type = other DNA
acaaaaacatctacttttaaacccrcatctaaccraacataataactcac

SEQ ID NO: 34938 - DNA, 50 bp, synthetic construct
  source 1..50: mol_type = other DNA
aaacaacataaaccacaacatctaactaaatcacctaaaatcaaaaattc

SEQ ID NO: 34939 - DNA, 50 bp, synthetic construct
  source 1..50: mol_type = other DNA
caacratccctaaattccaaatcaaaaccaaccttaaataccaaaaaaac

SEQ ID NO: 34940 - DNA, 50 bp, synthetic construct
  source 1..50: mol_type = other DNA
attttaaacccaatacctaaaacccaactaatccttacccatttacaaac

SEQ ID NO: 34941 - DNA, 50 bp, synthetic construct
  source 1..50: mol_type = other DNA
aaccaactaaaccctaaacactaaatttaaaatacctaaaaaaactaaac

SEQ ID NO: 34942 - DNA, 50 bp, synthetic construct
  source 1..50: mol_type = other DNA
tttaactctatccaaatcttcaatataaccccrcctctaaaattaaccac

SEQ ID NO: 34943 - DNA, 50 bp, synthetic construct
  source 1..50: mol_type = other DNA
tccctaaattaactcaattacttaaaaattaactactacctcccrccaac

SEQ ID NO: 34944 - DNA, 50 bp, synthetic construct
  source 1..50: mol_type = other DNA
aaaaaatacaaccaacttaaaaacctcraaaatattcacataaaaaatac

SEQ ID NO: 34945 - DNA, 50 bp, synthetic construct
  source 1..50: mol_type = other DNA
aaataccttcraaacctccaaattaactacacctcttaacatttaaccac

SEQ ID NO: 34946 - DNA, 50 bp, synthetic construct
  source 1..50: mol_type = other DNA
ccaaaaactttaacatcaaaatcraaaaacactaccaaattaaaaaaaac

SEQ ID NO: 34947 - DNA, 50 bp, synthetic construct
  source 1..50: mol_type = other DNA
taaaaccaaataaaaacattccaaattccaaaaactttaacatcaaaatc

SEQ ID NO: 34948 - DNA, 50 bp, synthetic construct
  source 1..50: mol_type = other DNA
tcaaacttaacatactcaactaataaatataatacaaatactcaaaatcc

SEQ ID NO: 34949 - DNA, 50 bp, synthetic construct
  source 1..50: mol_type = other DNA
aactaataaatataatacaaatactcaaaatccraaaaaatccaaaatcc

SEQ ID NO: 34950 - DNA, 50 bp, synthetic construct
  source 1..50: mol_type = other DNA
taacctacctccctaaacaattaattatacaaatcaaatatcccttaccc

SEQ ID NO: 34951 - DNA, 50 bp, synthetic construct
  source 1..50: mol_type = other DNA
atatcctcccccaaatatcraaaaactttcaaatactactttaaaccacc

SEQ ID NO: 34952 - DNA, 50 bp, synthetic construct
  source 1..50: mol_type = other DNA
ctactttaaaccaccraacctaaaaatatcctctccaacactaaaaaacc

SEQ ID NO: 34953 - DNA, 50 bp, synthetic construct
  source 1..50: mol_type = other DNA
taataaaataaacacaaccraatacaaaaaaacrtaaaacaactcccaac

SEQ ID NO: 34954 - DNA, 50 bp, synthetic construct
  source 1..50: mol_type = other DNA
cctaaccctttaaatctcaaacrtcaatcaaaacttctattcraaaaaac

SEQ ID NO: 34955 - DNA, 50 bp, synthetic construct
  source 1..50: mol_type = other DNA
ccraactacctaaccctttaaatctcaaacrtcaatcaaaacttctattc

SEQ ID NO: 34956 - DNA, 50 bp, synthetic construct
  source 1..50: mol_type = other DNA
caaaaaaaacttattacaccacrtcccctcraacaaaaaccctaattaac

SEQ ID NO: 34957 - DNA, 50 bp, synthetic construct
  source 1..50: mol_type = other DNA
crcttaaaacttaaaaaaccaaacaacccraaaattaaaaacaccaaaac

SEQ ID NO: 34958 - DNA, 50 bp, synthetic construct
  source 1..50: mol_type = other DNA
ctatccatttatttttcaaaataaaattatcccratacccaattcccccc

SEQ ID NO: 34959 - DNA, 50 bp, synthetic construct
  source 1..50: mol_type = other DNA
ataccaaatcaaatacccaccaaaatacactaaaatattacctacraaac

SEQ ID NO: 34960 - DNA, 50 bp, synthetic construct
  source 1..50: mol_type = other DNA
taatcactataccctactatttcactatatattccctaaaatttcaactc

SEQ ID NO: 34961 - DNA, 50 bp, synthetic construct
  source 1..50: mol_type = other DNA
aaaacccrataactttaaaaaataaacaacaataaacccaccrcataaac

SEQ ID NO: 34962 - DNA, 50 bp, synthetic construct
  source 1..50: mol_type = other DNA
aaaaaacaaaaacccrataactttaaaaaataaacaacaataaacccacc

SEQ ID NO: 34963 - DNA, 50 bp, synthetic construct
  source 1..50: mol_type = other DNA
ccaaaacrtccatacrataaactcattactatctattcctcaaaattacc

SEQ ID NO: 34964 - DNA, 50 bp, synthetic construct
  source 1..50: mol_type = other DNA
aacctatcccaaccttttaaaaaactaaaaccacaaatatataccaacac

SEQ ID NO: 34965 - DNA, 50 bp, synthetic construct
  source 1..50: mol_type = other DNA
tataaaataacaataataacaacatccacccataaactaactaaccatcc

SEQ ID NO: 34966 - DNA, 50 bp, synthetic construct
  source 1..50: mol_type = other DNA
ccrctaaaacaaacccaacaaaacacctaataccaatttaacactaaaac

SEQ ID NO: 34967 - DNA, 50 bp, synthetic construct
  source 1..50: mol_type = other DNA
aaacraaatttcrctcttattacccaaacraaatacaatcttaactcacc

SEQ ID NO: 34968 - DNA, 50 bp, synthetic construct
  source 1..50: mol_type = other DNA
caacatacaaaaaccctatctctactaaaactacaaaaattaaccaaaac

SEQ ID NO: 34969 - DNA, 50 bp, synthetic construct
  source 1..50: mol_type = other DNA
taaaatacaataatataactaactataacctctacctcccraattcaaac

SEQ ID NO: 34970 - DNA, 50 bp, synthetic construct
  source 1..50: mol_type = other DNA
tttaatcctctctccatactaaaatatacaatataataaataaaaacaac

SEQ ID NO: 34971 - DNA, 50 bp, synthetic construct
  source 1..50: mol_type = other DNA
aaacaactttcccaaaactatccaacattaattactaaactcaaaattcc

SEQ ID NO: 34972 - DNA, 50 bp, synthetic construct
  source 1..50: mol_type = other DNA
accccaactcaaaaacatataaaaactccccactataaattacaactaac

SEQ ID NO: 34973 - DNA, 50 bp, synthetic construct
  source 1..50: mol_type = other DNA
aaattacaaatactaataaatttcctcctttccaatccaatcccaaaaac

SEQ ID NO: 34974 - DNA, 50 bp, synthetic construct
  source 1..50: mol_type = other DNA
aactataaaatttcaatctcaaaactattaataaaaaattctccrccccc

SEQ ID NO: 34975 - DNA, 50 bp, synthetic construct
  source 1..50: mol_type = other DNA
aaactaaactataaaatttcaatctcaaaactattaataaaaaattctcc

SEQ ID NO: 34976 - DNA, 50 bp, synthetic construct
  source 1..50: mol_type = other DNA
ttaaaaactaaactaaacatccaaataaaaaccctaaaaaaatcratttc

SEQ ID NO: 34977 - DNA, 50 bp, synthetic construct
  source 1..50: mol_type = other DNA
cccraattaaaaactaaactaaacatccaaataaaaaccctaaaaaaatc

SEQ ID NO: 34978 - DNA, 50 bp, synthetic construct
  source 1..50: mol_type = other DNA
caacraaaccaaaacctctctaatcctaaaccctcaaacaaaaaaaatac

SEQ ID NO: 34979 - DNA, 50 bp, synthetic construct
  source 1..50: mol_type = other DNA
aaccrcacctcccctatctaaaaatccaaaaccaaaaaaatcttaatctc

SEQ ID NO: 34980 - DNA, 50 bp, synthetic construct
  source 1..50: mol_type = other DNA
ctaccaaaaatataaaaccctaaacaacracctcracraacactaaaacc

SEQ ID NO: 34981 - DNA, 50 bp, synthetic construct
  source 1..50: mol_type = other DNA
aaccraaaaaataactatcaactaaaatcccttaacctataaaacctccc

SEQ ID NO: 34982 - DNA, 50 bp, synthetic construct
  source 1..50: mol_type = other DNA
aaatttaaaataatctcaaaaaaacrtcataacccctaaaataatccacc

SEQ ID NO: 34983 - DNA, 50 bp, synthetic construct
  source 1..50: mol_type = other DNA
aaactccaaaaccttttacaaaccctacrtaaacaccactacaaaaaaac

SEQ ID NO: 34984 - DNA, 50 bp, synthetic construct
  source 1..50: mol_type = other DNA
aaaaaacttttaaaacaacctaaaaactcaacctctaaaaacccraaacc

SEQ ID NO: 34985 - DNA, 50 bp, synthetic construct
  source 1..50: mol_type = other DNA
ccaaccaaaaaacttttaaaacaacctaaaaactcaacctctaaaaaccc

SEQ ID NO: 34986 - DNA, 50 bp, synthetic construct
  source 1..50: mol_type = other DNA
aaaactaaactcccaaattaccctaaaaattccttaattaaacraaaaac

SEQ ID NO: 34987 - DNA, 50 bp, synthetic construct
  source 1..50: mol_type = other DNA
ctaaactcccaaattaccctaaaaattccttaattaaacraaaaacraac

SEQ ID NO: 34988 - DNA, 50 bp, synthetic construct
  source 1..50: mol_type = other DNA
aaaccaattactaacctacrtaaacracaaaccrataaatataaccaaac

SEQ ID NO: 34989 - DNA, 50 bp, synthetic construct
  source 1..50: mol_type = other DNA
aaccatctaaaacracraaaaaacaatctactacttcaaaaaacrctccc

SEQ ID NO: 34990 - DNA, 50 bp, synthetic construct
  source 1..50: mol_type = other DNA
acccaaaaccatctaaaacracraaaaaacaatctactacttcaaaaaac

SEQ ID NO: 34991 - DNA, 50 bp, synthetic construct
  source 1..50: mol_type = other DNA
ataatcttaaacaacraaaacttcttacrcaatcratacttatccactac

SEQ ID NO: 34992 - DNA, 50 bp, synthetic construct
  source 1..50: mol_type = other DNA
cccaaaacaaaacrtcatacacaaaaaaactttacactttacraaccaac

SEQ ID NO: 34993 - DNA, 50 bp, synthetic construct
  source 1..50: mol_type = other DNA
catacacaaaaaaactttacactttacraaccaacrataaataaaaatac

SEQ ID NO: 34994 - DNA, 50 bp, synthetic construct
  source 1..50: mol_type = other DNA
cctaacrtaaataaacaaactacaaacctaaaaaaacaacaaaccraacc

SEQ ID NO: 34995 - DNA, 50 bp, synthetic construct
  source 1..50: mol_type = other DNA
aaaaccctaacrtaaataaacaaactacaaacctaaaaaaacaacaaacc

SEQ ID NO: 34996 - DNA, 50 bp, synthetic construct
  source 1..50: mol_type = other DNA
taaaaaaatcacaaaccatttctttctttcraccaaactaaaaccctaac

SEQ ID NO: 34997 - DNA, 50 bp, synthetic construct
  source 1..50: mol_type = other DNA
atcttccaacraaaccccraaatcraaaacaattctaaaattcaaaaaac

SEQ ID NO: 34998 - DNA, 50 bp, synthetic construct
  source 1..50: mol_type = other DNA
aaaaacraaatcaacacccracataaacctctaattaactcctaaaactc

SEQ ID NO: 34999 - DNA, 50 bp, synthetic construct
  source 1..50: mol_type = other DNA
taacaaaaaacaacaaataacracratacataaaacctaaccccaccaac

SEQ ID NO: 35000 - DNA, 50 bp, synthetic construct
  source 1..50: mol_type = other DNA
actacaaacaaaaaaaaccacaaataaatccctcatatatccccttcccc

SEQ ID NO: 35001 - DNA, 50 bp, synthetic construct
  source 1..50: mol_type = other DNA
tcataatcttcataacatacacctaacccrtctacttcatcttcactacc

SEQ ID NO: 35002 - DNA, 50 bp, synthetic construct
  source 1..50: mol_type = other DNA
aaatacaaaaacraataaaattaaatctaaacraacccttttattttccc

SEQ ID NO: 35003 - DNA, 50 bp, synthetic construct
  source 1..50: mol_type = other DNA
taaaaattaataaataaccraaccttaaaacctaaaactaaactaaaaac

SEQ ID NO: 35004 - DNA, 50 bp, synthetic construct
  source 1..50: mol_type = other DNA
aaaaaataaaactttcccccttatctccaataccctttctaataaccctc

SEQ ID NO: 35005 - DNA, 50 bp, synthetic construct
  source 1..50: mol_type = other DNA
aaacatctcacctctataaaaaaacatttttaacccccaaaaccttacac

SEQ ID NO: 35006 - DNA, 50 bp, synthetic construct
  source 1..50: mol_type = other DNA
aaatacaaccccacrtctaaaccrttacccaaaacattctacataaaaac

SEQ ID NO: 35007 - DNA, 50 bp, synthetic construct
  source 1..50: mol_type = other DNA
ccacctacatctaaatctaaaaatactaaatacaaccccacrtctaaacc

SEQ ID NO: 35008 - DNA, 50 bp, synthetic construct
  source 1..50: mol_type = other DNA
aaacrataactcacrcraaccctataaaaaaaccaactttacaaacaaac

SEQ ID NO: 35009 - DNA, 50 bp, synthetic construct
  source 1..50: mol_type = other DNA
aaaaaacactaataacrcctatctacaaaactaattctcccacaaaaccc

SEQ ID NO: 35010 - DNA, 50 bp, synthetic construct
  source 1..50: mol_type = other DNA
aaaacctaaaaaacrtaatcctaaacaattctaataatttaaaaaacacc

SEQ ID NO: 35011 - DNA, 50 bp, synthetic construct
  source 1..50: mol_type = other DNA
taactataacttcataaaaaaactaaactataaataaaaacttctttatc

SEQ ID NO: 35012 - DNA, 50 bp, synthetic construct
  source 1..50: mol_type = other DNA
cccaaccccatcataaatctttctaatctcatataatcaataacctctac

SEQ ID NO: 35013 - DNA, 50 bp, synthetic construct
  source 1..50: mol_type = other DNA
aaaaaaaaatcctacaataattcraacataataactcatacctaaaatcc

SEQ ID NO: 35014 - DNA, 50 bp, synthetic construct
  source 1..50: mol_type = other DNA
ttaatacaataatataaattcataacaatcttaatctcctaaactcaaac

SEQ ID NO: 35015 - DNA, 50 bp, synthetic construct
  source 1..50: mol_type = other DNA
tccaaaaaaaaattctactactatcatcaaaaaactaaaaatccaaattc

SEQ ID NO: 35016 - DNA, 50 bp, synthetic construct
  source 1..50: mol_type = other DNA
attaaccraattaatcttaaactcttaacctcaaaccatcctcctacctc

SEQ ID NO: 35017 - DNA, 50 bp, synthetic construct
  source 1..50: mol_type = other DNA
aaaacraaatttcatcatattaacaaaaataatcttaatctcctaacctc

SEQ ID NO: 35018 - DNA, 50 bp, synthetic construct
  source 1..50: mol_type = other DNA
ataaaaacccaaacatacttaaaacacaacctataccaaaacctaaaaac

SEQ ID NO: 35019 - DNA, 50 bp, synthetic construct
  source 1..50: mol_type = other DNA
ccaacaaaaaaacttactaataccccaaatcttccaaactaaaaaaaccc

SEQ ID NO: 35020 - DNA, 50 bp, synthetic construct
  source 1..50: mol_type = other DNA
aacaaattctcctattaaaacaaactacccctctataaccaaccaaaaac

SEQ ID NO: 35021 - DNA, 50 bp, synthetic construct
  source 1..50: mol_type = other DNA
attctcctattaaaacaaactacccctctataaccaaccaaaaacrtttc

SEQ ID NO: 35022 - DNA, 50 bp, synthetic construct
  source 1..50: mol_type = other DNA
tattaaaacaaactacccctctataaccaaccaaaaacrtttcrctaaac

SEQ ID NO: 35023 - DNA, 50 bp, synthetic construct
  source 1..50: mol_type = other DNA
cctctaaaaaacctaaaaaatcctccracccraaaactactaaacaaaac

SEQ ID NO: 35024 - DNA, 50 bp, synthetic construct
  source 1..50: mol_type = other DNA
acctttctcctaaaaatctatacctcctaacraaccataaaaaacctacc

SEQ ID NO: 35025 - DNA, 50 bp, synthetic construct
  source 1..50: mol_type = other DNA
aaaaaaaacttacaaacaaaaaaaccaaacraaaaccacctatcracacc

SEQ ID NO: 35026 - DNA, 50 bp, synthetic construct
  source 1..50: mol_type = other DNA
acaattttccaccaacaaaaacaactccraaaaattcatacccattcctc

SEQ ID NO: 35027 - DNA, 50 bp, synthetic construct
  source 1..50: mol_type = other DNA
aaaataaacattcraaatcaaatcaaatctaaaccacaaaaaaataaccc

SEQ ID NO: 35028 - DNA, 50 bp, synthetic construct
  source 1..50: mol_type = other DNA
ataaaaccaaaaacatcttcaccaataaacraaacacaaaataaacattc

SEQ ID NO: 35029 - DNA, 50 bp, synthetic construct
  source 1..50: mol_type = other DNA
ccraatcacraaacaaataaataaaaccaaaaacatcttcaccaataaac

SEQ ID NO: 35030 - DNA, 50 bp, synthetic construct
  source 1..50: mol_type = other DNA
ctatacttcrttcactaataaaaatatttctaactccacccacctacttc

SEQ ID NO: 35031 - DNA, 50 bp, synthetic construct
  source 1..50: mol_type = other DNA
aaaacaacaacaaataaaacctaatctaaactcrcaaccaaaccaactac

SEQ ID NO: 35032 - DNA, 50 bp, synthetic construct
  source 1..50: mol_type = other DNA
rttactaaacaaaaataaaacctaaccctaactcctatttaacattcacc

SEQ ID NO: 35033 - DNA, 50 bp, synthetic construct
  source 1..50: mol_type = other DNA
rataaataccaaacaaaaaccaaaaccaaactccacctctacccaataac

SEQ ID NO: 35034 - DNA, 50 bp, synthetic construct
  source 1..50: mol_type = other DNA
caaaactataaacttctcraaaacaaaaacaatcrattttaatcaaaaac

SEQ ID NO: 35035 - DNA, 50 bp, synthetic construct
  source 1..50: mol_type = other DNA
aaataatctcactttacaaaaaaattatctaacaaaactataaacttctc

SEQ ID NO: 35036 - DNA, 50 bp, synthetic construct
  source 1..50: mol_type = other DNA
ttctttctacccctaacatttttaaattacaaaacattttcrtaataaac

SEQ ID NO: 35037 - DNA, 50 bp, synthetic construct
  source 1..50: mol_type = other DNA
ccactttttttctttctacccctaacatttttaaattacaaaacattttc

SEQ ID NO: 35038 - DNA, 50 bp, synthetic construct
  source 1..50: mol_type = other DNA
acctctatattactatcactttataaactaaccttcccaatattactaac

SEQ ID NO: 35039 - DNA, 50 bp, synthetic construct
  source 1..50: mol_type = other DNA
aaaaacracataccataccrattatctaataaccaaaatccttaacttac

SEQ ID NO: 35040 - DNA, 50 bp, synthetic construct
  source 1..50: mol_type = other DNA
tattataatttctttcaaccaatcttcttatttaaaaacatttaaaatac

SEQ ID NO: 35041 - DNA, 50 bp, synthetic construct
  source 1..50: mol_type = other DNA
rtataaccttttactataataaacaatatcactatttccccttccctctc

SEQ ID NO: 35042 - DNA, 50 bp, synthetic construct
  source 1..50: mol_type = other DNA
tttactataataaacaatatcactatttccccttccctctcratatactc

SEQ ID NO: 35043 - DNA, 50 bp, synthetic construct
  source 1..50: mol_type = other DNA
tttcccaaaaaacctaaccraacccaaaaccraaaataaaaaatctactc

SEQ ID NO: 35044 - DNA, 50 bp, synthetic construct
  source 1..50: mol_type = other DNA
aactcaataaaaataaaaacccataacctaaccraataaaactactaccc

SEQ ID NO: 35045 - DNA, 50 bp, synthetic construct
  source 1..50: mol_type = other DNA
acctaaatctaaaaacctacaaaattaaaaattccctccctataaaaacc

SEQ ID NO: 35046 - DNA, 50 bp, synthetic construct
  source 1..50: mol_type = other DNA
aaactataaaaaataccractaaaacaaactaaaacaaatccraaaccac

SEQ ID NO: 35047 - DNA, 50 bp, synthetic construct
  source 1..50: mol_type = other DNA
aaaaactataacttttactccraaataaaaaccataaaaaacttcccccc

SEQ ID NO: 35048 - DNA, 50 bp, synthetic construct
  source 1..50: mol_type = other DNA
ataaaataataacacaaattcacaatccccraaaaaaccctaaaaactac

SEQ ID NO: 35049 - DNA, 50 bp, synthetic construct
  source 1..50: mol_type = other DNA
aataataatatctaaaactaataaaataataacacaaattcacaatcccc

SEQ ID NO: 35050 - DNA, 50 bp, synthetic construct
  source 1..50: mol_type = other DNA
acctatattaccatttcaccaactccaaacatcattacccataaatactc

SEQ ID NO: 35051 - DNA, 50 bp, synthetic construct
  source 1..50: mol_type = other DNA
ataaatccacaatactaaataaacaaattatttctaaaaacattatcttc

SEQ ID NO: 35052 - DNA, 50 bp, synthetic construct
  source 1..50: mol_type = other DNA
aaaaatcattcaatccaaaccaaaaaaaactcaactcctaaaaacccacc

SEQ ID NO: 35053 - DNA, 50 bp, synthetic construct
  source 1..50: mol_type = other DNA
caaaaacaaaaacccaacaaaacatcttcactatcccaactaaaccttac

SEQ ID NO: 35054 - DNA, 50 bp, synthetic construct
  source 1..50: mol_type = other DNA
aacaacaaacaaatactcatcccaaaacctactactactataactactac

SEQ ID NO: 35055 - DNA, 50 bp, synthetic construct
  source 1..50: mol_type = other DNA
aaaccttaaaataaacacttacctactactacctaacattaaattctcac

SEQ ID NO: 35056 - DNA, 50 bp, synthetic construct
  source 1..50: mol_type = other DNA
actctaaaactaaacctcctaaatctaaatccaaacctaccaaaacaaac

SEQ ID NO: 35057 - DNA, 50 bp, synthetic construct
  source 1..50: mol_type = other DNA
aaaaacccatcccaacrtacataacraaaatcaaaaacctaaactttaac

SEQ ID NO: 35058 - DNA, 50 bp, synthetic construct
  source 1..50: mol_type = other DNA
atcccaacrtacataacraaaatcaaaaacctaaactttaacrcaatttc

SEQ ID NO: 35059 - DNA, 50 bp, synthetic construct
  source 1..50: mol_type = other DNA
aaaaacttaacaaaacacttaatttactaaactttattttatacatacac

SEQ ID NO: 35060 - DNA, 50 bp, synthetic construct
  source 1..50: mol_type = other DNA
aaaaatccaattcacccctaaatttcrcttaacacacaccccaaaaaaac

SEQ ID NO: 35061 - DNA, 50 bp, synthetic construct
  source 1..50: mol_type = other DNA
tctaacracaccrtcttatataacataaaaattaacaataccctcctcac

SEQ ID NO: 35062 - DNA, 50 bp, synthetic construct
  source 1..50: mol_type = other DNA
ttaaaactacaataaaccaaaatcaaaccactacattccaacctaaaacc

SEQ ID NO: 35063 - DNA, 50 bp, synthetic construct
  source 1..50: mol_type = other DNA
aactctctcaaaaaatatatataacaactaaaccatctacaacacctacc

SEQ ID NO: 35064 - DNA, 50 bp, synthetic construct
  source 1..50: mol_type = other DNA
acaaacattttaacctatacttaacacaaattaacccatttcatcctcac

SEQ ID NO: 35065 - DNA, 50 bp, synthetic construct
  source 1..50: mol_type = other DNA
aaaattcaataatataaaacaatatccataaataaccacccatacatcac

SEQ ID NO: 35066 - DNA, 50 bp, synthetic construct
  source 1..50: mol_type = other DNA
ttacaacctctacctcctaaatttaaataattctcrtacctcaaccttcc

SEQ ID NO: 35067 - DNA, 50 bp, synthetic construct
  source 1..50: mol_type = other DNA
tacratcttaactcattacaacctctacctcctaaatttaaataattctc

SEQ ID NO: 35068 - DNA, 50 bp, synthetic construct
  source 1..50: mol_type = other DNA
taacaactctattataaaatataatacaaaaaccaatttaacaaccctac

SEQ ID NO: 35069 - DNA, 50 bp, synthetic construct
  source 1..50: mol_type = other DNA
tctattataaaatataatacaaaaaccaatttaacaaccctacraacccc

SEQ ID NO: 35070 - DNA, 50 bp, synthetic construct
  source 1..50: mol_type = other DNA
tacatccactttatactacatcccataataaaaaatattcctacattacc

SEQ ID NO: 35071 - DNA, 50 bp, synthetic construct
  source 1..50: mol_type = other DNA
ctacctctaccatcaacctcaaaaattattaccccttcaaaaactaatac

SEQ ID NO: 35072 - DNA, 50 bp, synthetic construct
  source 1..50: mol_type = other DNA
taaatataaattccccaaaactatcaccacattcttaccccaactaaatc

SEQ ID NO: 35073 - DNA, 50 bp, synthetic construct
  source 1..50: mol_type = other DNA
aatatatacaaaccacaaactcaatacaaaaccacaaaaaaaaccacaac

SEQ ID NO: 35074 - DNA, 50 bp, synthetic construct
  source 1..50: mol_type = other DNA
taaatctataatttacacacatcttaataaccccataatttttacctacc

SEQ ID NO: 35075 - DNA, 50 bp, synthetic construct
  source 1..50: mol_type = other DNA
cctacaaataataaaaacaaactaatccacaactaccraactccacattc

SEQ ID NO: 35076 - DNA, 50 bp, synthetic construct
  source 1..50: mol_type = other DNA
aaaaaataaaactcttaccccaatccctttacaaaacraatataaaaccc

SEQ ID NO: 35077 - DNA, 50 bp, synthetic construct
  source 1..50: mol_type = other DNA
caaaaattaccctcaactcctcaactacaaataaaaaccctctatcaaac

SEQ ID NO: 35078 - DNA, 50 bp, synthetic construct
  source 1..50: mol_type = other DNA
ttcccctaaaaacrctaacatcaattaataataaaatttaaatctaccac

SEQ ID NO: 35079 - DNA, 50 bp, synthetic construct
  source 1..50: mol_type = other DNA
ctatctcccaaaaacctataatctaataacaaacattttcccctaaaaac

SEQ ID NO: 35080 - DNA, 50 bp, synthetic construct
  source 1..50: mol_type = other DNA
acaaacctttaaaaaacaacctcataacaaatacatccaaaacaaaaaac

SEQ ID NO: 35081 - DNA, 50 bp, synthetic construct
  source 1..50: mol_type = other DNA
tacccaaaaaaaccaactaaatacttttaaaacatacccttaaaaactac

SEQ ID NO: 35082 - DNA, 50 bp, synthetic construct
  source 1..50: mol_type = other DNA
ccaaaatactaactctattaatactaacttctactaccttcctaaatccc

SEQ ID NO: 35083 - DNA, 50 bp, synthetic construct
  source 1..50: mol_type = other DNA
atcaaactataaaacaccrattaaaaacttacttatatacacttaataac

SEQ ID NO: 35084 - DNA, 50 bp, synthetic construct
  source 1..50: mol_type = other DNA
aaaaatatctcacaaaaaaacctaattttatttcactattacctaataac

SEQ ID NO: 35085 - DNA, 50 bp, synthetic construct
  source 1..50: mol_type = other DNA
acaaataacraaaccaactctcaaaacaataaaaaaatacaacaaaaaac

SEQ ID NO: 35086 - DNA, 50 bp, synthetic construct
  source 1..50: mol_type = other DNA
aaactatacrcttcctactacatttttccactatcttaaaaattaacctc

SEQ ID NO: 35087 - DNA, 50 bp, synthetic construct
  source 1..50: mol_type = other DNA
aaatctcttctttttattattctcccataacatattacaaaacaataaac

SEQ ID NO: 35088 - DNA, 50 bp, synthetic construct
  source 1..50: mol_type = other DNA
atatattattattcatactaataaataaatactatttccataccaaactc

SEQ ID NO: 35089 - DNA, 50 bp, synthetic construct
  source 1..50: mol_type = other DNA
tatatctatcctaaaaatatcaaatatttcaataccctaatcacattctc

SEQ ID NO: 35090 - DNA, 50 bp, synthetic construct
  source 1..50: mol_type = other DNA
aaaatcttttccaaccacttataaatcccttactcaaatttcattttcac

SEQ ID NO: 35091 - DNA, 50 bp, synthetic construct
  source 1..50: mol_type = other DNA
aaatttcattttcacrcctaaataccaacattaacactactatctaaatc

SEQ ID NO: 35092 - DNA, 50 bp, synthetic construct
  source 1..50: mol_type = other DNA
aaaacacacacatacacacaaacacctattacaaaaatacctaaatacac

SEQ ID NO: 35093 - DNA, 50 bp, synthetic construct
  source 1..50: mol_type = other DNA
ctcacacaatttcacaactaacacattaaaactatcaaaaaataacattc

SEQ ID NO: 35094 - DNA, 50 bp, synthetic construct
  source 1..50: mol_type = other DNA
cacaatttcacaactaacacattaaaactatcaaaaaataacattcrccc

SEQ ID NO: 35095 - DNA, 50 bp, synthetic construct
  source 1..50: mol_type = other DNA
tttcacaactaacacattaaaactatcaaaaaataacattcrcccracac

SEQ ID NO: 35096 - DNA, 50 bp, synthetic construct
  source 1..50: mol_type = other DNA
tcatcatattaatcaaactaatctcraattcctaacctcaaacaatccac

SEQ ID NO: 35097 - DNA, 50 bp, synthetic construct
  source 1..50: mol_type = other DNA
aaccraaataataccattacactctaacctaaacaacaaaaacaaactcc

SEQ ID NO: 35098 - DNA, 50 bp, synthetic construct
  source 1..50: mol_type = other DNA
rtaaatcccctaccaaatttataataaatataaccaaatatacatactcc

SEQ ID NO: 35099 - DNA, 50 bp, synthetic construct
  source 1..50: mol_type = other DNA
aaatctacccaaacatatccataccaaatacccaaaactacttccacrac

SEQ ID NO: 35100 - DNA, 50 bp, synthetic construct
  source 1..50: mol_type = other DNA
ataaaatctacccaaacatatccataccaaatacccaaaactacttccac

SEQ ID NO: 35101 - DNA, 50 bp, synthetic construct
  source 1..50: mol_type = other DNA
cccacaaccaattaatcccaacacactcactaaatcacaataatacaatc

SEQ ID NO: 35102 - DNA, 50 bp, synthetic construct
  source 1..50: mol_type = other DNA
ctccaactaaccaatccctaaaatttctaatcracctataaatatatccc

SEQ ID NO: 35103 - DNA, 50 bp, synthetic construct
  source 1..50: mol_type = other DNA
ctcctacctaactcccccaaaaataataaactccaaatttctttttattc

SEQ ID NO: 35104 - DNA, 50 bp, synthetic construct
  source 1..50: mol_type = other DNA
aaaaccaaacaaaaactaaaataaatcccatttataacctatcaaataac

SEQ ID NO: 35105 - DNA, 50 bp, synthetic construct
  source 1..50: mol_type = other DNA
aaatttttaatacaaatctccctctatcacccaaactacaatacaataac

SEQ ID NO: 35106 - DNA, 50 bp, synthetic construct
  source 1..50: mol_type = other DNA
aacacataaaataaaataattttcctcccttctatacctattttaaaaac

SEQ ID NO: 35107 - DNA, 50 bp, synthetic construct
  source 1..50: mol_type = other DNA
tctttacaaaaaacraaaaacttattctcactataaatcattatcaaaac

SEQ ID NO: 35108 - DNA, 50 bp, synthetic construct
  source 1..50: mol_type = other DNA
ctcaaaccacactacaataactacttaacaaacaactccaaaacaaaaac

SEQ ID NO: 35109 - DNA, 50 bp, synthetic construct
  source 1..50: mol_type = other DNA
ctctacrccttaactacctaacataaaaaaactccctatccaataaacac

SEQ ID NO: 35110 - DNA, 50 bp, synthetic construct
  source 1..50: mol_type = other DNA
accctacaaaatctataaatctttctccccatatacraaaacraaaaatc

SEQ ID NO: 35111 - DNA, 50 bp, synthetic construct
  source 1..50: mol_type = other DNA
tatcttttcttctatctctttatcttatatttttatttctacratctctc

SEQ ID NO: 35112 - DNA, 50 bp, synthetic construct
  source 1..50: mol_type = other DNA
ttcttctatctctttatcttatatttttatttctacratctctcrtctcc

SEQ ID NO: 35113 - DNA, 50 bp, synthetic construct
  source 1..50: mol_type = other DNA
caacataataaaacctcaatctctacaaaaaaattaaaactttaccaaac

SEQ ID NO: 35114 - DNA, 50 bp, synthetic construct
  source 1..50: mol_type = other DNA
aaaaaaactacaacratctccttaacctcaaccctattatctttaaaatc

SEQ ID NO: 35115 - DNA, 50 bp, synthetic construct
  source 1..50: mol_type = other DNA
taaatcaaacctcaccraaacraattaataataaaaatacatcttattcc

SEQ ID NO: 35116 - DNA, 50 bp, synthetic construct
  source 1..50: mol_type = other DNA
tcaaaatcaaaccccacratcraaacaaaatacatttttatcactaatcc

SEQ ID NO: 35117 - DNA, 50 bp, synthetic construct
  source 1..50: mol_type = other DNA
taaaacacattcccacctttaccctaaattccaataaatcaaacctcacc

SEQ ID NO: 35118 - DNA, 50 bp, synthetic construct
  source 1..50: mol_type = other DNA
tcaactcaaataaacaaactaaaattaacttttacctaattatccataac

SEQ ID NO: 35119 - DNA, 50 bp, synthetic construct
  source 1..50: mol_type = other DNA
aactaaaaaatacraccattaaaatcaaaacccctaaaaaatctaaaacc

SEQ ID NO: 35120 - DNA, 50 bp, synthetic construct
  source 1..50: mol_type = other DNA
caaaaaaacccaatccctctacaaacccttcaactcctaaatcacaaaac

SEQ ID NO: 35121 - DNA, 50 bp, synthetic construct
  source 1..50: mol_type = other DNA
crcrcctaaccaaaatttacttttttctaaatactatactatttaatatc

SEQ ID NO: 35122 - DNA, 50 bp, synthetic construct
  source 1..50: mol_type = other DNA
aacttctaaaaatataccracaactttaattttcctcratttataaaaac

SEQ ID NO: 35123 - DNA, 50 bp, synthetic construct
  source 1..50: mol_type = other DNA
atccccratctctaacttctaaaaatataccracaactttaattttcctc

SEQ ID NO: 35124 - DNA, 50 bp, synthetic construct
  source 1..50: mol_type = other DNA
taaaccttaactttctaatctatacaataaataaaactttcattctactc

SEQ ID NO: 35125 - DNA, 50 bp, synthetic construct
  source 1..50: mol_type = other DNA
ccatccattatacaaaccaaaaaactaaaatccaaaaaatacaaattctc

SEQ ID NO: 35126 - DNA, 50 bp, synthetic construct
  source 1..50: mol_type = other DNA
aactactaaacctatctaactcccaaaaccataatataaaaacctaaaac

SEQ ID NO: 35127 - DNA, 50 bp, synthetic construct
  source 1..50: mol_type = other DNA
caattataccaaaccccaaatcctttcrctcaattaacaaatattcctac

SEQ ID NO: 35128 - DNA, 50 bp, synthetic construct
  source 1..50: mol_type = other DNA
atttatcaactaaacraaaaaatttaaaatttaacacaattacaccctcc

SEQ ID NO: 35129 - DNA, 50 bp, synthetic construct
  source 1..50: mol_type = other DNA
aaaacactaccaaataataaatcaaaactaaactaacaaaactaacaaac

SEQ ID NO: 35130 - DNA, 50 bp, synthetic construct
  source 1..50: mol_type = other DNA
acatcctcaaacttcactctaaatatcactttctcccttaaaccatcatc

SEQ ID NO: 35131 - DNA, 50 bp, synthetic construct
  source 1..50: mol_type = other DNA
caacttctaacccaacrcctacctaatcacataataaacacctaataaac

SEQ ID NO: 35132 - DNA, 50 bp, synthetic construct
  source 1..50: mol_type = other DNA
tattcactcaacraacrtttactaaatacccactatataattaaacaaac

SEQ ID NO: 35133 - DNA, 50 bp, synthetic construct
  source 1..50: mol_type = other DNA
aaacaaacrctaaaccaaaaactaaaactacaacaaaaaacaaataaaac

SEQ ID NO: 35134 - DNA, 50 bp, synthetic construct
  source 1..50: mol_type = other DNA
aaatcctaatatacaattattccactcrtaactactttccttaaaccccc

SEQ ID NO: 35135 - DNA, 50 bp, synthetic construct
  source 1..50: mol_type = other DNA
ccaacaaacrctcaataactaatcctcctaaaaactaattacctcactac

SEQ ID NO: 35136 - DNA, 50 bp, synthetic construct
  source 1..50: mol_type = other DNA
acccactaaactaaatttacctaataaccrataacatcatcactaattcc

SEQ ID NO: 35137 - DNA, 50 bp, synthetic construct
  source 1..50: mol_type = other DNA
ccactaaactaaatttacctaataaccrataacatcatcactaattccrc

SEQ ID NO: 35138 - DNA, 50 bp, synthetic construct
  source 1..50: mol_type = other DNA
atattttccaaaacctaaacaaacatctcctaaaaaacatacaattcacc

SEQ ID NO: 35139 - DNA, 50 bp, synthetic construct
  source 1..50: mol_type = other DNA
aacaaaataaaacaactaaaaattccaaaaaacctaaaactaactaatac

SEQ ID NO: 35140 - DNA, 50 bp, synthetic construct
  source 1..50: mol_type = other DNA
acctaaaaatacctcaaacraaactaaatataaacaccaaaacaacttac

SEQ ID NO: 35141 - DNA, 50 bp, synthetic construct
  source 1..50: mol_type = other DNA
actctaaaaacaaccaaaacatcaaaaatttatctcaaccaatcrcraac

SEQ ID NO: 35142 - DNA, 50 bp, synthetic construct
  source 1..50: mol_type = other DNA
cttaaaactctaaaaacaaccaaaacatcaaaaatttatctcaaccaatc

SEQ ID NO: 35143 - DNA, 50 bp, synthetic construct
  source 1..50: mol_type = other DNA
ttcccraataataaataactaatccaaaaaacacrataaacctaaaaacc

SEQ ID NO: 35144 - DNA, 50 bp, synthetic construct
  source 1..50: mol_type = other DNA
ttcaaccaaattatattaaaaaaattatttataaatcrcaccaaccracc

SEQ ID NO: 35145 - DNA, 50 bp, synthetic construct
  source 1..50: mol_type = other DNA
cacattcaaccaaattatattaaaaaaattatttataaatcrcaccaacc

SEQ ID NO: 35146 - DNA, 50 bp, synthetic construct
  source 1..50: mol_type = other DNA
aaccaactccacattcaaccaaattatattaaaaaaattatttataaatc

SEQ ID NO: 35147 - DNA, 50 bp, synthetic construct
  source 1..50: mol_type = other DNA
actaaaaaactacraaaaaacaaactatcccaacttctcactatcttccc

SEQ ID NO: 35148 - DNA, 50 bp, synthetic construct
  source 1..50: mol_type = other DNA
attattttaatccaaatcatcatatatttaccccttcactaaaaaactac

SEQ ID NO: 35149 - DNA, 50 bp, synthetic construct
  source 1..50: mol_type = other DNA
tctaaatccttaaccaaaaaaaacctaaaccaactttctccctctaaatc

SEQ ID NO: 35150 - DNA, 50 bp, synthetic construct
  source 1..50: mol_type = other DNA
tccaaaatctcctacatttatattttcaacctctaaactatatacaactc

SEQ ID NO: 35151 - DNA, 50 bp, synthetic construct
  source 1..50: mol_type = other DNA
cattctaatactaacaccaaactcctcccaaaaacctacaaaacaatctc

SEQ ID NO: 35152 - DNA, 50 bp, synthetic construct
  source 1..50: mol_type = other DNA
caccttaaccaacaacctcaaataaatatcctaactcttaaactccttac

SEQ ID NO: 35153 - DNA, 50 bp, synthetic construct
  source 1..50: mol_type = other DNA
cttaaccaacaacctcaaataaatatcctaactcttaaactccttacrcc

SEQ ID NO: 35154 - DNA, 50 bp, synthetic construct
  source 1..50: mol_type = other DNA
aataattaaatccataattacctcttcacccccacaaaaaataaacatcc

SEQ ID NO: 35155 - DNA, 50 bp, synthetic construct
  source 1..50: mol_type = other DNA
aaactatttacaaaaccttcaacccataacacacaaaaccctaaaacatc

SEQ ID NO: 35156 - DNA, 50 bp, synthetic construct
  source 1..50: mol_type = other DNA
atcrcctaaaaataaccccacractataataaacctaaaccataaccttc

SEQ ID NO: 35157 - DNA, 50 bp, synthetic construct
  source 1..50: mol_type = other DNA
aacaaatcraaacccaaaactaactcaaatcttcacaaccraaaataaac

SEQ ID NO: 35158 - DNA, 50 bp, synthetic construct
  source 1..50: mol_type = other DNA
acaattaaacaacaaatcraaacccaaaactaactcaaatcttcacaacc

SEQ ID NO: 35159 - DNA, 50 bp, synthetic construct
  source 1..50: mol_type = other DNA
aaataaccaccaccccracacaacaacaataaacaattaaacaacaaatc

SEQ ID NO: 35160 - DNA, 50 bp, synthetic construct
  source 1..50: mol_type = other DNA
actcactattactataccraaataataaccacccactaaacctactctcc

SEQ ID NO: 35161 - DNA, 50 bp, synthetic construct
  source 1..50: mol_type = other DNA
ctattactataccraaataataaccacccactaaacctactctccrtaac

SEQ ID NO: 35162 - DNA, 50 bp, synthetic construct
  source 1..50: mol_type = other DNA
aaaccacaaaactaaacaccaataacaactaataaaaactaaacaaattc

SEQ ID NO: 35163 - DNA, 50 bp, synthetic construct
  source 1..50: mol_type = other DNA
ttaaaaaacaataccaatattcctaacrtactacatacatataaacaacc

SEQ ID NO: 35164 - DNA, 50 bp, synthetic construct
  source 1..50: mol_type = other DNA
ataccttataaccrtataaaaaatatcractactcacatatatacaacac

SEQ ID NO: 35165 - DNA, 50 bp, synthetic construct
  source 1..50: mol_type = other DNA
aaaatcraattcccctatccttcaaaacaaaaataacttcrtcctaaaac

SEQ ID NO: 35166 - DNA, 50 bp, synthetic construct
  source 1..50: mol_type = other DNA
aattacccaaaaaatcraattcccctatccttcaaaacaaaaataacttc

SEQ ID NO: 35167 - DNA, 50 bp, synthetic construct
  source 1..50: mol_type = other DNA
aataaaacccactaactccaaaaccaaaattcctaattacccaaaaaatc

SEQ ID NO: 35168 - DNA, 50 bp, synthetic construct
  source 1..50: mol_type = other DNA
aaataaattcatacacraaataatcttatttacctatcaaatccattccc

SEQ ID NO: 35169 - DNA, 50 bp, synthetic construct
  source 1..50: mol_type = other DNA
cccactaacaaaactaaaaaccttataatcracaaaacaaacttaaaacc

SEQ ID NO: 35170 - DNA, 50 bp, synthetic construct
  source 1..50: mol_type = other DNA
ctaaacccctaccraatctaaaaaaatatttataaccacraccttaactc

SEQ ID NO: 35171 - DNA, 50 bp, synthetic construct
  source 1..50: mol_type = other DNA
aactcctctactcttaaattaaattacatacaaaaaaacraaccaaaacc

SEQ ID NO: 35172 - DNA, 50 bp, synthetic construct
  source 1..50: mol_type = other DNA
aataattttctacaaaacaaaattacaaaacccttatctaaacccctacc

SEQ ID NO: 35173 - DNA, 50 bp, synthetic construct
  source 1..50: mol_type = other DNA
aaccccraacccccaatacraaaatccttatacataaacaaaaaatactc

SEQ ID NO: 35174 - DNA, 50 bp, synthetic construct
  source 1..50: mol_type = other DNA
ccaatccctacaaaatattaactccratcctcatcctaaattaaacaaac

SEQ ID NO: 35175 - DNA, 50 bp, synthetic construct
  source 1..50: mol_type = other DNA
atacaaaaacaaaaatcctacaaaaataacactcacttaacaaaaactac

SEQ ID NO: 35176 - DNA, 50 bp, synthetic construct
  source 1..50: mol_type = other DNA
crtaaacctataaatcaattcccccaaaaaacaactaacraaactaaaac

SEQ ID NO: 35177 - DNA, 50 bp, synthetic construct
  source 1..50: mol_type = other DNA
cttcatctccccrtaaacctataaatcaattcccccaaaaaacaactaac

SEQ ID NO: 35178 - DNA, 50 bp, synthetic construct
  source 1..50: mol_type = other DNA
tacttcctaaaaaaattaatccacaaacccacraaaaaataaaacttccc

SEQ ID NO: 35179 - DNA, 50 bp, synthetic construct
  source 1..50: mol_type = other DNA
caatccttaattttacccctaaaaaaattaacrtaaataatcataacccc

SEQ ID NO: 35180 - DNA, 50 bp, synthetic construct
  source 1..50: mol_type = other DNA
ttaccctcrtccccaacacaatccttaattttacccctaaaaaaattaac

SEQ ID NO: 35181 - DNA, 50 bp, synthetic construct
  source 1..50: mol_type = other DNA
aaccccaaaaaatatctataaaaaaattcraacccctacrtaaaaaactc

SEQ ID NO: 35182 - DNA, 50 bp, synthetic construct
  source 1..50: mol_type = other DNA
acataaaaaataacacatccrttaaacatattaaaaacattcccaatttc

SEQ ID NO: 35183 - DNA, 50 bp, synthetic construct
  source 1..50: mol_type = other DNA
rttaaacatattaaaaacattcccaatttcraattaatcaaaaatcacac

SEQ ID NO: 35184 - DNA, 50 bp, synthetic construct
  source 1..50: mol_type = other DNA
craaatttcactatattactcaaactaatttcaaactcttaaactcraac

SEQ ID NO: 35185 - DNA, 50 bp, synthetic construct
  source 1..50: mol_type = other DNA
aaaacraaatttcactatattactcaaactaatttcaaactcttaaactc

SEQ ID NO: 35186 - DNA, 50 bp, synthetic construct
  source 1..50: mol_type = other DNA
aatatctaaaaacaaatattaaatctcaaccaaaaacaaccctatttaac

SEQ ID NO: 35187 - DNA, 50 bp, synthetic construct
  source 1..50: mol_type = other DNA
tcaaccaaaaacaaccctatttaacraataattataaaaccaaataaatc

SEQ ID NO: 35188 - DNA, 50 bp, synthetic construct
  source 1..50: mol_type = other DNA
aacraataattataaaaccaaataaatcrctcacctaatatcaaaaattc

SEQ ID NO: 35189 - DNA, 50 bp, synthetic construct
  source 1..50: mol_type = other DNA
aaaaacctcaataaaccccccrattaccatacaaattacataacaataac

SEQ ID NO: 35190 - DNA, 50 bp, synthetic construct
  source 1..50: mol_type = other DNA
ccraaaaactcactaaaatctttactccaaaatttaaaaaattataaccc

SEQ ID NO: 35191 - DNA, 50 bp, synthetic construct
  source 1..50: mol_type = other DNA
ccaaaatttaaaaaattataacccraacttaaataatcccaatataaaac

SEQ ID NO: 35192 - DNA, 50 bp, synthetic construct
  source 1..50: mol_type = other DNA
atttctataataaaccctaaaccccttatccaacattacttaaacatcac

SEQ ID NO: 35193 - DNA, 50 bp, synthetic construct
  source 1..50: mol_type = other DNA
tactttttaaaacctattttaaacttcttcaattcccatttaaaaaatcc

SEQ ID NO: 35194 - DNA, 50 bp, synthetic construct
  source 1..50: mol_type = other DNA
aaaaatcccaaatataatcaaacataacacttaataaacctaactataac

SEQ ID NO: 35195 - DNA, 50 bp, synthetic construct
  source 1..50: mol_type = other DNA
cacctaaatataacaacraaaaccaccctaacactactatctttcctcac

SEQ ID NO: 35196 - DNA, 50 bp, synthetic construct
  source 1..50: mol_type = other DNA
aatcaacaatcaataaaacttatcaactccccaccctttccaaaaaaaac

SEQ ID NO: 35197 - DNA, 50 bp, synthetic construct
  source 1..50: mol_type = other DNA
aaaataaaatcacraataaactttccaatcccctaaactactactcctac

SEQ ID NO: 35198 - DNA, 50 bp, synthetic construct
  source 1..50: mol_type = other DNA
tttaacctaattcaacraccctaccaaaattccaatttcccctaaaacac

SEQ ID NO: 35199 - DNA, 50 bp, synthetic construct
  source 1..50: mol_type = other DNA
craccctaccaaaattccaatttcccctaaaacacrtactatataacttc

SEQ ID NO: 35200 - DNA, 50 bp, synthetic construct
  source 1..50: mol_type = other DNA
aaacacrtactatataacttcraacaaatcatttcacctctctaaatccc

SEQ ID NO: 35201 - DNA, 50 bp, synthetic construct
  source 1..50: mol_type = other DNA
atctaaaatcatatctactctcctactccttaaacctaaacttatatacc

SEQ ID NO: 35202 - DNA, 50 bp, synthetic construct
  source 1..50: mol_type = other DNA
tcatatctactctcctactccttaaacctaaacttatataccrattcaac

SEQ ID NO: 35203 - DNA, 50 bp, synthetic construct
  source 1..50: mol_type = other DNA
ctacaaaaaaccttacttattactacttattctctaactcttccrccatc

SEQ ID NO: 35204 - DNA, 50 bp, synthetic construct
  source 1..50: mol_type = other DNA
aaaaataactctcataatcattattatttatatacacaaccccatttacc

SEQ ID NO: 35205 - DNA, 50 bp, synthetic construct
  source 1..50: mol_type = other DNA
acaaacaacaataatcataaaaaccatttctcaaacacttcctatctatc

SEQ ID NO: 35206 - DNA, 50 bp, synthetic construct
  source 1..50: mol_type = other DNA
ccttactatataacatccatcaaaaaacttcccctctctaaacctcaaac

SEQ ID NO: 35207 - DNA, 50 bp, synthetic construct
  source 1..50: mol_type = other DNA
catacttcattattattttcctattattaatattattttaactcttttac

SEQ ID NO: 35208 - DNA, 50 bp, synthetic construct
  source 1..50: mol_type = other DNA
tatattcaacccaatcctcaacacaaaacaaaaacttcttaaatataaac

SEQ ID NO: 35209 - DNA, 50 bp, synthetic construct
  source 1..50: mol_type = other DNA
ctctaaccrctataaattcaaaacraaaaccaacctaacactaaaaatac

SEQ ID NO: 35210 - DNA, 50 bp, synthetic construct
  source 1..50: mol_type = other DNA
aataaatcattccacraaaattcraacrataaaaaacatcctacataacc

SEQ ID NO: 35211 - DNA, 50 bp, synthetic construct
  source 1..50: mol_type = other DNA
ataaaaacccctaccatttcrcaaacrctaatcaaaataaatcattccac

SEQ ID NO: 35212 - DNA, 50 bp, synthetic construct
  source 1..50: mol_type = other DNA
acacttaatattaacccaaaccrcaccattataaaaacccctaccatttc

SEQ ID NO: 35213 - DNA, 50 bp, synthetic construct
  source 1..50: mol_type = other DNA
attcactttaaccaacrtctacraaataacaaaaacttccacaataatac

SEQ ID NO: 35214 - DNA, 50 bp, synthetic construct
  source 1..50: mol_type = other DNA
crcaacacaaaacctctcaacccractacctacaaaaacaaataaatcac

SEQ ID NO: 35215 - DNA, 50 bp, synthetic construct
  source 1..50: mol_type = other DNA
taaaccaaaacraaaaccaacaaaaacacraaaacaaacaaaaaccactc

SEQ ID NO: 35216 - DNA, 50 bp, synthetic construct
  source 1..50: mol_type = other DNA
taaatatactaactataatatatccraacraataacccctacttaccttc

SEQ ID NO: 35217 - DNA, 50 bp, synthetic construct
  source 1..50: mol_type = other DNA
aaaaccaacaaaaaacaaaccrcactaaacaccataaccacaatattacc

SEQ ID NO: 35218 - DNA, 50 bp, synthetic construct
  source 1..50: mol_type = other DNA
aaacaaaaaactatacctaacaaacctccaaaaccaacaaaaaacaaacc

SEQ ID NO: 35219 - DNA, 50 bp, synthetic construct
  source 1..50: mol_type = other DNA
taatacaaaaccaaacaacraatcaaataatcccratctcctatcaccac

SEQ ID NO: 35220 - DNA, 50 bp, synthetic construct
  source 1..50: mol_type = other DNA
cataacctaaacrtcttaatacaaaaccaaacaacraatcaaataatccc

SEQ ID NO: 35221 - DNA, 50 bp, synthetic construct
  source 1..50: mol_type = other DNA
taatccraaataccacataacctaaacrtcttaatacaaaaccaaacaac

SEQ ID NO: 35222 - DNA, 50 bp, synthetic construct
  source 1..50: mol_type = other DNA
aacaaaacaaaaaacacctaaactaatccraaataccacataacctaaac

SEQ ID NO: 35223 - DNA, 50 bp, synthetic construct
  source 1..50: mol_type = other DNA
aaactatccttaacaacaaaaacctaaaaactacctaacccaaaaacctc

SEQ ID NO: 35224 - DNA, 50 bp, synthetic construct
  source 1..50: mol_type = other DNA
acaaaacrtaaactataaacctccaaatctaaaatataatccttaacaac

SEQ ID NO: 35225 - DNA, 50 bp, synthetic construct
  source 1..50: mol_type = other DNA
acaacccrttactaaaaaccacaccctaaatttaaaaacccacaatctac

SEQ ID NO: 35226 - DNA, 50 bp, synthetic construct
  source 1..50: mol_type = other DNA
taacttaatcctaaaaaatcacaaaatcacaaaacaacctatacaacaac

SEQ ID NO: 35227 - DNA, 50 bp, synthetic construct
  source 1..50: mol_type = other DNA
aatcctaaaacaaccttactttctcaatccctattcctcatctataaaac

SEQ ID NO: 35228 - DNA, 50 bp, synthetic construct
  source 1..50: mol_type = other DNA
rtacataattcccaactctaataactaaatacaaaacacrctattaacac

SEQ ID NO: 35229 - DNA, 50 bp, synthetic construct
  source 1..50: mol_type = other DNA
rcctaacraccatcrtaactaaacaaatactactaaataaatcrctactc

SEQ ID NO: 35230 - DNA, 50 bp, synthetic construct
  source 1..50: mol_type = other DNA
atcataaacccccrctaaaaatcaataataaacaacattcaccatctttc

SEQ ID NO: 35231 - DNA, 50 bp, synthetic construct
  source 1..50: mol_type = other DNA
aaaaataactaacaaatctcaaaacratacataaaattaatctcataacc

SEQ ID NO: 35232 - DNA, 50 bp, synthetic construct
  source 1..50: mol_type = other DNA
attaaactaatttttcatttaaacaaaaacttaactctaacaaatactac

SEQ ID NO: 35233 - DNA, 50 bp, synthetic construct
  source 1..50: mol_type = other DNA
tacrctatatctaaaaaataactacataaacaataataaaaccctcaaac

SEQ ID NO: 35234 - DNA, 50 bp, synthetic construct
  source 1..50: mol_type = other DNA
tatatctaaaaaataactacataaacaataataaaaccctcaaacractc

SEQ ID NO: 35235 - DNA, 50 bp, synthetic construct
  source 1..50: mol_type = other DNA
cttacacttatttctataaaaattaccaaaaatattaataccttcacaac

SEQ ID NO: 35236 - DNA, 50 bp, synthetic construct
  source 1..50: mol_type = other DNA
tacaataacataatcraaaaaacacaacttaaacaaaatcacacrtactc

SEQ ID NO: 35237 - DNA, 50 bp, synthetic construct
  source 1..50: mol_type = other DNA
aaaaacaacaataacaacaccaacaacaaaaaacacaacattcctacctc

SEQ ID NO: 35238 - DNA, 50 bp, synthetic construct
  source 1..50: mol_type = other DNA
aataatacctacractcaaatcctaataaacrtccaattatataaatccc

SEQ ID NO: 35239 - DNA, 50 bp, synthetic construct
  source 1..50: mol_type = other DNA
tttaacaaacraactcacaaccttaacccttcaaataaaacrttaataac

SEQ ID NO: 35240 - DNA, 50 bp, synthetic construct
  source 1..50: mol_type = other DNA
actcrcaaatttaacaaacraactcacaaccttaacccttcaaataaaac

SEQ ID NO: 35241 - DNA, 50 bp, synthetic construct
  source 1..50: mol_type = other DNA
crctaaaaaaaaccraaatcctccacaaaataataacaaatacttaaaac

SEQ ID NO: 35242 - DNA, 50 bp, synthetic construct
  source 1..50: mol_type = other DNA
ccccaacraataatataaaaaaccctcaccaaaatttccrtaatatctac

SEQ ID NO: 35243 - DNA, 50 bp, synthetic construct
  source 1..50: mol_type = other DNA
raataatataaaaaaccctcaccaaaatttccrtaatatctacrtcatcc

SEQ ID NO: 35244 - DNA, 50 bp, synthetic construct
  source 1..50: mol_type = other DNA
aaatcttccactataaaatctatccccrtaaaatcaataaactccataac

SEQ ID NO: 35245 - DNA, 50 bp, synthetic construct
  source 1..50: mol_type = other DNA
ctacaacctaaacctcttaaactcaaacaatcctcccatctcaatcactc

SEQ ID NO: 35246 - DNA, 50 bp, synthetic construct
  source 1..50: mol_type = other DNA
caatttaacctaatccacacaaaatattatcactttaacactaaatcaac

SEQ ID NO: 35247 - DNA, 50 bp, synthetic construct
  source 1..50: mol_type = other DNA
ccrcattccaaaaacttaacaccaaacacaaatatcaaataaaataactc

SEQ ID NO: 35248 - DNA, 50 bp, synthetic construct
  source 1..50: mol_type = other DNA
atactaaatctttaaaatacracrttacraatatctctcaatttaaactc

SEQ ID NO: 35249 - DNA, 50 bp, synthetic construct
  source 1..50: mol_type = other DNA
cttttaaaaattcccaattaacacctaccctcaaaaacttcaccaaaccc

SEQ ID NO: 35250 - DNA, 50 bp, synthetic construct
  source 1..50: mol_type = other DNA
acaaaatccaactcaaattctataacactaaacttaaacccaaaacctac

SEQ ID NO: 35251 - DNA, 50 bp, synthetic construct
  source 1..50: mol_type = other DNA
aacctaacataaacactttaaacattaaccraaaaacacacaaaaaaaac

SEQ ID NO: 35252 - DNA, 50 bp, synthetic construct
  source 1..50: mol_type = other DNA
cttaaaacctcctccatataaaaaactaacaaacctaaaacccctccccc

SEQ ID NO: 35253 - DNA, 50 bp, synthetic construct
  source 1..50: mol_type = other DNA
atcaaaatcaaaactaaaaaaccaaatacctaacccaaaaaaacacccac

SEQ ID NO: 35254 - DNA, 50 bp, synthetic construct
  source 1..50: mol_type = other DNA
caataataataaacrcccattaaaatctactaacttaaacaaaacaaaac

SEQ ID NO: 35255 - DNA, 50 bp, synthetic construct
  source 1..50: mol_type = other DNA
aaccaactacacacrctctaccttatctaaaccaataaatctcaataaac

SEQ ID NO: 35256 - DNA, 50 bp, synthetic construct
  source 1..50: mol_type = other DNA
aaaacattcaaaatacacaaaactattaactccactaaaccaatctctcc

SEQ ID NO: 35257 - DNA, 50 bp, synthetic construct
  source 1..50: mol_type = other DNA
aatataaaccraaccaaaccccaacaatcctaaaaactcaaacacttacc

SEQ ID NO: 35258 - DNA, 50 bp, synthetic construct
  source 1..50: mol_type = other DNA
caccracttaaaataactcaacaataaaaacttttattctatcccacaac

SEQ ID NO: 35259 - DNA, 50 bp, synthetic construct
  source 1..50: mol_type = other DNA
tatataaatataactactcaaatacctttaactaccaataacaacacacc

SEQ ID NO: 35260 - DNA, 50 bp, synthetic construct
  source 1..50: mol_type = other DNA
ctcctaaactcaaatcatcctcccacctctatctaaaatcacaaacacac

SEQ ID NO: 35261 - DNA, 50 bp, synthetic construct
  source 1..50: mol_type = other DNA
ctacaataaactataatcataccaccatacttcaacctaaacractaaac

SEQ ID NO: 35262 - DNA, 50 bp, synthetic construct
  source 1..50: mol_type = other DNA
ttacatctaaactctacrttatcaacaataccaccaaataactatcaacc

SEQ ID NO: 35263 - DNA, 50 bp, synthetic construct
  source 1..50: mol_type = other DNA
taataacactactaacaacrcaaaacccaaatacaaaacraacaaaatac

SEQ ID NO: 35264 - DNA, 50 bp, synthetic construct
  source 1..50: mol_type = other DNA
taacaacrcaaaacccaaatacaaaacraacaaaatacraaactatctcc

SEQ ID NO: 35265 - DNA, 50 bp, synthetic construct
  source 1..50: mol_type = other DNA
aataaactaaactcaacccaaaaaaatttaattcctactaaaactcaaac

SEQ ID NO: 35266 - DNA, 50 bp, synthetic construct
  source 1..50: mol_type = other DNA
aaactaaactcaacccaaaaaaatttaattcctactaaaactcaaacrcc

SEQ ID NO: 35267 - DNA, 50 bp, synthetic construct
  source 1..50: mol_type = other DNA
aaatcccaacactaacactcataaaaataatcctaaccaaaaattcccac

SEQ ID NO: 35268 - DNA, 50 bp, synthetic construct
  source 1..50: mol_type = other DNA
aaattctccrtctacaaactccacaaatctaactactctacttcttaacc

SEQ ID NO: 35269 - DNA, 50 bp, synthetic construct
  source 1..50: mol_type = other DNA
aactactctacttcttaaccrtctcctaaatcaattcctctttcctttac

SEQ ID NO: 35270 - DNA, 50 bp, synthetic construct
  source 1..50: mol_type = other DNA
cataatctcatactcccaaaacactctaatctaaccatttaacctaaacc

SEQ ID NO: 35271 - DNA, 50 bp, synthetic construct
  source 1..50: mol_type = other DNA
actatccttaatactaaactcatacccacaacrcttcccttttatactcc

SEQ ID NO: 35272 - DNA, 50 bp, synthetic construct
  source 1..50: mol_type = other DNA
aatcttaccaatactaatttaaacattcaacaccaaaaccrataaacaac

SEQ ID NO: 35273 - DNA, 50 bp, synthetic construct
  source 1..50: mol_type = other DNA
taaaccaccaaatcttaccaatactaatttaaacattcaacaccaaaacc

SEQ ID NO: 35274 - DNA, 50 bp, synthetic construct
  source 1..50: mol_type = other DNA
cctaattttacctcaaacatatcraaaaacctcctcctactcctctaacc

SEQ ID NO: 35275 - DNA, 50 bp, synthetic construct
  source 1..50: mol_type = other DNA
cctcatctccacaaaaaatattccccattcaaaaaaaatccccaaacccc

SEQ ID NO: 35276 - DNA, 50 bp, synthetic construct
  source 1..50: mol_type = other DNA
attaaactaaaactcraaacaacccaaaaaaacactaaacccctaacccc

SEQ ID NO: 35277 - DNA, 50 bp, synthetic construct
  source 1..50: mol_type = other DNA
aaaaaactttattactaaataaccacaaaacrccctaattacctaaaaac

SEQ ID NO: 35278 - DNA, 50 bp, synthetic construct
  source 1..50: mol_type = other DNA
aacactcaacttaaaactaaacctactaacctaaaaaccaaaatacctac

SEQ ID NO: 35279 - DNA, 50 bp, synthetic construct
  source 1..50: mol_type = other DNA
taaacctactaacctaaaaaccaaaatacctacraaccttaaaaaacccc

SEQ ID NO: 35280 - DNA, 50 bp, synthetic construct
  source 1..50: mol_type = other DNA
ccccaacatatatactcaataactactctaacttctataacttactatac

SEQ ID NO: 35281 - DNA, 50 bp, synthetic construct
  source 1..50: mol_type = other DNA
taactactctaacttctataacttactatacrcctatatacataaaaaac

SEQ ID NO: 35282 - DNA, 50 bp, synthetic construct
  source 1..50: mol_type = other DNA
acaaaaactattcacacatataacacrtatacatacacactcataccacc

SEQ ID NO: 35283 - DNA, 50 bp, synthetic construct
  source 1..50: mol_type = other DNA
aaatatacatacatacrtatcacatatataaacaatttctacacttaaac

SEQ ID NO: 35284 - DNA, 50 bp, synthetic construct
  source 1..50: mol_type = other DNA
tatcacaaacatattttttaccaacatatacrtacaaaccacctatacac

SEQ ID NO: 35285 - DNA, 50 bp, synthetic construct
  source 1..50: mol_type = other DNA
acatatataaacaatttctacacttaaacrcrtacacaaataatctatac

SEQ ID NO: 35286 - DNA, 50 bp, synthetic construct
  source 1..50: mol_type = other DNA
aactttaaactcctatctcaaataaccctcctatttcaacttctacaaac

SEQ ID NO: 35287 - DNA, 50 bp, synthetic construct
  source 1..50: mol_type = other DNA
caatcaccattctacttttctatctctataaatttaaatactcaaaacac

SEQ ID NO: 35288 - DNA, 50 bp, synthetic construct
  source 1..50: mol_type = other DNA
ctcttaccrataatactaaaactactcaataatcaaaaaactaaaatctc

SEQ ID NO: 35289 - DNA, 50 bp, synthetic construct
  source 1..50: mol_type = other DNA
aaaatctcrctaaaaatttaatataaaaccrtaactaaatccaaaaaccc

SEQ ID NO: 35290 - DNA, 50 bp, synthetic construct
  source 1..50: mol_type = other DNA
aatataaaaccrtaactaaatccaaaaacccraaaaacattataccaaac

SEQ ID NO: 35291 - DNA, 50 bp, synthetic construct
  source 1..50: mol_type = other DNA
taaccacccttctaatctattactataaatttaacrtttatactttacac

SEQ ID NO: 35292 - DNA, 50 bp, synthetic construct
  source 1..50: mol_type = other DNA
ctcctaaattcaaataattctcttaccccaacctccaaaataaccaccac

SEQ ID NO: 35293 - DNA, 50 bp, synthetic construct
  source 1..50: mol_type = other DNA
atcccccaaacraaaatacaataacaaacactcaactcactataacctcc

SEQ ID NO: 35294 - DNA, 50 bp, synthetic construct
  source 1..50: mol_type = other DNA
actaaaatatttatataaaatcaaacataaatctaccctacatacacatc

SEQ ID NO: 35295 - DNA, 50 bp, synthetic construct
  source 1..50: mol_type = other DNA
tatctcctactcctccctaaaaataaaatatcttaatataaaacccaatc

SEQ ID NO: 35296 - DNA, 50 bp, synthetic construct
  source 1..50: mol_type = other DNA
aaaccttcctcttatctcaactacaaaaaaaactatctctttcactaacc

SEQ ID NO: 35297 - DNA, 50 bp, synthetic construct
  source 1..50: mol_type = other DNA
aaatattatccaaaatttctctccactaaaacaacctaaaatataacctc

SEQ ID NO: 35298 - DNA, 50 bp, synthetic construct
  source 1..50: mol_type = other DNA
rccattctccaatctcraataccctaaaacaaaatacactataaaaaacc

SEQ ID NO: 35299 - DNA, 50 bp, synthetic construct
  source 1..50: mol_type = other DNA
raccttccacaatatattctatcccaaaatactcraaactaaaaaataac

SEQ ID NO: 35300 - DNA, 50 bp, synthetic construct
  source 1..50: mol_type = other DNA
cattaaaccttaaatcaacacaacacatatttctataaacacaaaattac

SEQ ID NO: 35301 - DNA, 50 bp, synthetic construct
  source 1..50: mol_type = other DNA
aaacccaacctaaacaaactcctaaacacaaaaaattaataactacaaac

SEQ ID NO: 35302 - DNA, 50 bp, synthetic construct
  source 1..50: mol_type = other DNA
aaaaaaaataaaatcaccacctactacttaaacacaacaaaaatacraac

SEQ ID NO: 35303 - DNA, 50 bp, synthetic construct
  source 1..50: mol_type = other DNA
ctttattcaactaaaaacatcracaaactaccttaaaatccraactcccc

SEQ ID NO: 35304 - DNA, 50 bp, synthetic construct
  source 1..50: mol_type = other DNA
aaaaaaaaactttattcaactaaaaacatcracaaactaccttaaaatcc

SEQ ID NO: 35305 - DNA, 50 bp, synthetic construct
  source 1..50: mol_type = other DNA
aaaaacaaaaattatacacccraaaaactcraattttaaaacaacttacc

SEQ ID NO: 35306 - DNA, 50 bp, synthetic construct
  source 1..50: mol_type = other DNA
aaaacccttccttctacaactcratatctaaaaaattttatctataactc

SEQ ID NO: 35307 - DNA, 50 bp, synthetic construct
  source 1..50: mol_type = other DNA
aaatacaaactaaaacrtaaaatacaaaaccctacctaaacaaaaaatac

SEQ ID NO: 35308 - DNA, 50 bp, synthetic construct
  source 1..50: mol_type = other DNA
ataaccctaaaaaaatctctaaaactaaacacaaaataaactctccctcc

SEQ ID NO: 35309 - DNA, 50 bp, synthetic construct
  source 1..50: mol_type = other DNA
ctccrcrtacataacaaaaaacaacattaaaaaaataaactacattttcc

SEQ ID NO: 35310 - DNA, 50 bp, synthetic construct
  source 1..50: mol_type = other DNA
attaacraaaaatataactcattccctcaatattacttcttattatatac

SEQ ID NO: 35311 - DNA, 50 bp, synthetic construct
  source 1..50: mol_type = other DNA
taacraaaaatataactcattccctcaatattacttcttattatatacrc

SEQ ID NO: 35312 - DNA, 50 bp, synthetic construct
  source 1..50: mol_type = other DNA
ataaaaaactaaatcaataaacaccaactctcraacttcctaaaaccatc

SEQ ID NO: 35313 - DNA, 50 bp, synthetic construct
  source 1..50: mol_type = other DNA
ttatatacrcraaaaaactactattaaaaaccrataacctcaaaaaaccc

SEQ ID NO: 35314 - DNA, 50 bp, synthetic construct
  source 1..50: mol_type = other DNA
aaaaactccttctttactatccctctccttatcttattatcctacatctc

SEQ ID NO: 35315 - DNA, 50 bp, synthetic construct
  source 1..50: mol_type = other DNA
cttatcttattatcctacatctcraaacatcraacttttctctacatttc

SEQ ID NO: 35316 - DNA, 50 bp, synthetic construct
  source 1..50: mol_type = other DNA
aaacraaatttcacccrtatttaccaaaataatctccatctcctaacctc

SEQ ID NO: 35317 - DNA, 50 bp, synthetic construct
  source 1..50: mol_type = other DNA
aacctaaatccaccttacaaataaaaactctaaaaaatactctcccracc

SEQ ID NO: 35318 - DNA, 50 bp, synthetic construct
  source 1..50: mol_type = other DNA
aataaacctaaatccaccttacaaataaaaactctaaaaaatactctccc

SEQ ID NO: 35319 - DNA, 50 bp, synthetic construct
  source 1..50: mol_type = other DNA
catctatacaaacrcacrtatatatcraactctattatatctacacatac

SEQ ID NO: 35320 - DNA, 50 bp, synthetic construct
  source 1..50: mol_type = other DNA
crtatatatcraactctattatatctacacatacrtatcracatctatac

SEQ ID NO: 35321 - DNA, 50 bp, synthetic construct
  source 1..50: mol_type = other DNA
rtatataaacrtacacaaacccccratacataacrtactcaactattaac

SEQ ID NO: 35322 - DNA, 50 bp, synthetic construct
  source 1..50: mol_type = other DNA
rcacaaacacrtcaacaactaaacacrctatatatcraaaatctatatac

SEQ ID NO: 35323 - DNA, 50 bp, synthetic construct
  source 1..50: mol_type = other DNA
acrtataaaaatctatatacacatacrtatcraactctactactatctac

SEQ ID NO: 35324 - DNA, 50 bp, synthetic construct
  source 1..50: mol_type = other DNA
caattataaaaaaaacccractatatcaccccacactctccaacaaatac

SEQ ID NO: 35325 - DNA, 50 bp, synthetic construct
  source 1..50: mol_type = other DNA
ccataactaataaccraaaatactccaaaaactttaaatcaacrcaaccc

SEQ ID NO: 35326 - DNA, 50 bp, synthetic construct
  source 1..50: mol_type = other DNA
raaaatactccaaaaactttaaatcaacrcaacccrtacctataaacctc

SEQ ID NO: 35327 - DNA, 50 bp, synthetic construct
  source 1..50: mol_type = other DNA
cctaaaactctactccrtaaaatacrctctaaaaattatacraaaacaac

SEQ ID NO: 35328 - DNA, 50 bp, synthetic construct
  source 1..50: mol_type = other DNA
rtccccraaactctattctataaaatacrctctaaaaaatatataaaaac

SEQ ID NO: 35329 - DNA, 50 bp, synthetic construct
  source 1..50: mol_type = other DNA
accttctaaataacrcaaatatatataacaacacaacctataactccaac

SEQ ID NO: 35330 - DNA, 50 bp, synthetic construct
  source 1..50: mol_type = other DNA
tccaaccatcctcctacctcaatctcctaaataactaaaatttcaaacac

SEQ ID NO: 35331 - DNA, 50 bp, synthetic construct
  source 1..50: mol_type = other DNA
taatatttacatatcttattcactaaccatatcccctaaacataacatac

SEQ ID NO: 35332 - DNA, 50 bp, synthetic construct
  source 1..50: mol_type = other DNA
tccattcaaaataaatacattctaccctcaaaatcctctaaaaaacaccc

SEQ ID NO: 35333 - DNA, 50 bp, synthetic construct
  source 1..50: mol_type = other DNA
ttacttctactaaataaaactaactttacaaaaataacaactaaaacccc

SEQ ID NO: 35334 - DNA, 50 bp, synthetic construct
  source 1..50: mol_type = other DNA
ctaattttaccctacctctaattataataacaacataccratataaaatc

SEQ ID NO: 35335 - DNA, 50 bp, synthetic construct
  source 1..50: mol_type = other DNA
aaaaacaaaacaaaaccaaactaaacaaactacaattcccataaacctcc

SEQ ID NO: 35336 - DNA, 50 bp, synthetic construct
  source 1..50: mol_type = other DNA
acaaactacaattcccataaacctccraaaacaaaaacccaaccaaaaac

SEQ ID NO: 35337 - DNA, 50 bp, synthetic construct
  source 1..50: mol_type = other DNA
cctaaaacctactaaaaaatataattctacaatatcacctaaaactaaac

SEQ ID NO: 35338 - DNA, 50 bp, synthetic construct
  source 1..50: mol_type = other DNA
aaaaaatataattctacaatatcacctaaaactaaacraactcactcacc

SEQ ID NO: 35339 - DNA, 50 bp, synthetic construct
  source 1..50: mol_type = other DNA
aacratacaataataactaacrcaatatatctacaaaaacrcacctaccc

SEQ ID NO: 35340 - DNA, 50 bp, synthetic construct
  source 1..50: mol_type = other DNA
ctaaaactaaacraactcactcaccrcaaaacataaaaacraacaaatac

SEQ ID NO: 35341 - DNA, 50 bp, synthetic construct
  source 1..50: mol_type = other DNA
ataactataaaaccatccrcaacatcractactacaacacaaatttctac

SEQ ID NO: 35342 - DNA, 50 bp, synthetic construct
  source 1..50: mol_type = other DNA
craaaaaaacracttccttaaaatataactataaaaccatccrcaacatc

SEQ ID NO: 35343 - DNA, 50 bp, synthetic construct
  source 1..50: mol_type = other DNA
acctaaccaaaatcccttccttaacatccraaactaaaacactaacaaac

SEQ ID NO: 35344 - DNA, 50 bp, synthetic construct
  source 1..50: mol_type = other DNA
tctaacaaccaaaaaaccattacctaaccaaaatcccttccttaacatcc

SEQ ID NO: 35345 - DNA, 50 bp, synthetic construct
  source 1..50: mol_type = other DNA
tacttaaaactaatatacttaataacraccttaataccctctaacacaac

SEQ ID NO: 35346 - DNA, 50 bp, synthetic construct
  source 1..50: mol_type = other DNA
tacttaaaactaatatacttaataacraccttaataccctctaacacrac

SEQ ID NO: 35347 - DNA, 50 bp, synthetic construct
  source 1..50: mol_type = other DNA
ctaaaactctaaactccaaaataaccccrattacaaactcttctcacccc

SEQ ID NO: 35348 - DNA, 50 bp, synthetic construct
  source 1..50: mol_type = other DNA
tccrctactaaaatcctcaattttattctaatcattcccactcaataccc

SEQ ID NO: 35349 - DNA, 50 bp, synthetic construct
  source 1..50: mol_type = other DNA
aaacaccccttatctccaacttccaaaatcaaattataaaataaaaaccc

SEQ ID NO: 35350 - DNA, 50 bp, synthetic construct
  source 1..50: mol_type = other DNA
caaaaatcaactctaaacaacactatcccaactataaaacccraaactcc

SEQ ID NO: 35351 - DNA, 50 bp, synthetic construct
  source 1..50: mol_type = other DNA
acaaatcccaaaaatcaactctaaacaacactatcccaactataaaaccc

SEQ ID NO: 35352 - DNA, 50 bp, synthetic construct
  source 1..50: mol_type = other DNA
cacaactaaaacaatattacccaaaactaattcctaaaacttacaaaaac

SEQ ID NO: 35353 - DNA, 50 bp, synthetic construct
  source 1..50: mol_type = other DNA
aaacaactaaatttactccacaaaccraaaccaaaccttcaaaaaccttc

SEQ ID NO: 35354 - DNA, 50 bp, synthetic construct
  source 1..50: mol_type = other DNA
aattcctaaaacttacaaaaacrtacraaaatctctaaaaacctaacccc

SEQ ID NO: 35355 - DNA, 50 bp, synthetic construct
  source 1..50: mol_type = other DNA
caaatacctaataaacrtacracaaaaacaactacaaaaattcaacaccc

SEQ ID NO: 35356 - DNA, 50 bp, synthetic construct
  source 1..50: mol_type = other DNA
ctaaactaactccctaacccraatattaaatccctacaactactcctacc

SEQ ID NO: 35357 - DNA, 50 bp, synthetic construct
  source 1..50: mol_type = other DNA
aaatctaaatccctaacaaaacrcttcccatctacaaatacctaataaac

SEQ ID NO: 35358 - DNA, 50 bp, synthetic construct
  source 1..50: mol_type = other DNA
aaataaaaaacatcctaactaaaaatcaaaatctaaatccctaacaaaac

SEQ ID NO: 35359 - DNA, 50 bp, synthetic construct
  source 1..50: mol_type = other DNA
ccctcaaaacracrtaaattatacccctaaaaaaacataaatataaaacc

SEQ ID NO: 35360 - DNA, 50 bp, synthetic construct
  source 1..50: mol_type = other DNA
caacatcctaaaccaatcaaatcataaactttccaaaccctcaaaacrac

SEQ ID NO: 35361 - DNA, 50 bp, synthetic construct
  source 1..50: mol_type = other DNA
ccacaacatcctaaaccaatcaaatcataaactttccaaaccctcaaaac

SEQ ID NO: 35362 - DNA, 50 bp, synthetic construct
  source 1..50: mol_type = other DNA
taataaataacccctacctaaactcactacccactcraaaaaataaaacc

SEQ ID NO: 35363 - DNA, 50 bp, synthetic construct
  source 1..50: mol_type = other DNA
ttttctctaaattccctccaaaacctatacaactaaacaaaaaccaaaac

SEQ ID NO: 35364 - DNA, 50 bp, synthetic construct
  source 1..50: mol_type = other DNA
taacaaaaacaaaaccaaaaccaaactcaaaccttacactatatcccaac

SEQ ID NO: 35365 - DNA, 50 bp, synthetic construct
  source 1..50: mol_type = other DNA
aaaaacaaaaccaaaaccaaactcaaaccttacactatatcccaacrtcc

SEQ ID NO: 35366 - DNA, 50 bp, synthetic construct
  source 1..50: mol_type = other DNA
taaataccccaaaactaaaccttaacaacttcaactctaccaaactaacc

SEQ ID NO: 35367 - DNA, 50 bp, synthetic construct
  source 1..50: mol_type = other DNA
acraatccataaattttctacaaatactaacttaatactactcctatccc

SEQ ID NO: 35368 - DNA, 50 bp, synthetic construct
  source 1..50: mol_type = other DNA
acraaataaaaacaacaccaaaccaacatctataaaaaatccataaaccc

SEQ ID NO: 35369 - DNA, 50 bp, synthetic construct
  source 1..50: mol_type = other DNA
caacatctataaaaaatccataaacccrcacttacaaaaacacttatctc

SEQ ID NO: 35370 - DNA, 50 bp, synthetic construct
  source 1..50: mol_type = other DNA
cacttatctcractccacatcaaaaccaaataaaaaattcttattattcc

SEQ ID NO: 35371 - DNA, 50 bp, synthetic construct
  source 1..50: mol_type = other DNA
aaaccraaaaccatacctataccctttaatcaaatatcttaaaaataaac

SEQ ID NO: 35372 - DNA, 50 bp, synthetic construct
  source 1..50: mol_type = other DNA
aaaaattcaaaacrctacctaaattctcaaaaccraaattcttaaatacc

SEQ ID NO: 35373 - DNA, 50 bp, synthetic construct
  source 1..50: mol_type = other DNA
acaaaacttaaacaaaatttccaaataccaatatcccrtataactttccc

SEQ ID NO: 35374 - DNA, 50 bp, synthetic construct
  source 1..50: mol_type = other DNA
ctaaaaacrcraaaataataaaaactctaaaactctatacaaaccccctc

SEQ ID NO: 35375 - DNA, 50 bp, synthetic construct
  source 1..50: mol_type = other DNA
atacattatactatcaaatacaaacctttttaaaaattccctaaatattc

SEQ ID NO: 35376 - DNA, 50 bp, synthetic construct
  source 1..50: mol_type = other DNA
actatcaaatacaaacctttttaaaaattccctaaatattcrtataaatc

SEQ ID NO: 35377 - DNA, 50 bp, synthetic construct
  source 1..50: mol_type = other DNA
caacaacaaacrcaatctattaactaataatcctcctatctcaaaaacac

SEQ ID NO: 35378 - DNA, 50 bp, synthetic construct
  source 1..50: mol_type = other DNA
aaaaacacrtaatccaaaaaacaaccaattacttaacacttaaaaacccc

SEQ ID NO: 35379 - DNA, 50 bp, synthetic construct
  source 1..50: mol_type = other DNA
taaaaaccccrttctaaaaaatcctaaaaactttcacctcttaaattacc

SEQ ID NO: 35380 - DNA, 50 bp, synthetic construct
  source 1..50: mol_type = other DNA
tttcacrtcaacattaaccacacaaaacractaccatacaaaataaaaac

SEQ ID NO: 35381 - DNA, 50 bp, synthetic construct
  source 1..50: mol_type = other DNA
atccacrtctccaccctacataacaaccrctttatataattaatactaac

SEQ ID NO: 35382 - DNA, 50 bp, synthetic construct
  source 1..50: mol_type = other DNA
aaacccacccctaccttacaaaatcttaatactaatatctccrtacattc

SEQ ID NO: 35383 - DNA, 50 bp, synthetic construct
  source 1..50: mol_type = other DNA
accraatttccaaatctcaacaccactaacattaaacatcctcctttatc

SEQ ID NO: 35384 - DNA, 50 bp, synthetic construct
  source 1..50: mol_type = other DNA
acaataatataataacactcratacttacttaataccaaaccctaatcac

SEQ ID NO: 35385 - DNA, 50 bp, synthetic construct
  source 1..50: mol_type = other DNA
ctaataaaaacaataaaacataaaacaacaaaatcataaaccacaaaacc

SEQ ID NO: 35386 - DNA, 50 bp, synthetic construct
  source 1..50: mol_type = other DNA
caattactaattataaacaaaactaaattcaaacccaaaactaaaccctc

SEQ ID NO: 35387 - DNA, 50 bp, synthetic construct
  source 1..50: mol_type = other DNA
ttctctaaaccttaatcaaaacttttacaaaataaaacacataattctac

SEQ ID NO: 35388 - DNA, 50 bp, synthetic construct
  source 1..50: mol_type = other DNA
catcattcrttcaaatctttactctctacrtaaccttaaacaaaatattc

SEQ ID NO: 35389 - DNA, 50 bp, synthetic construct
  source 1..50: mol_type = other DNA
acctaaaccctaaaatcaaaacatcattcrttcaaatctttactctctac

SEQ ID NO: 35390 - DNA, 50 bp, synthetic construct
  source 1..50: mol_type = other DNA
aacatatctacratattaaaaacctaaaccctaaaatcaaaacatcattc

SEQ ID NO: 35391 - DNA, 50 bp, synthetic construct
  source 1..50: mol_type = other DNA
aaaatttaaacraataatatcttaactccaaaacccaaactcttaacatc

SEQ ID NO: 35392 - DNA, 50 bp, synthetic construct
  source 1..50: mol_type = other DNA
aaaaaccaaaacaaaaaactataataaaccccaattccccccttccattc

SEQ ID NO: 35393 - DNA, 50 bp, synthetic construct
  source 1..50: mol_type = other DNA
cccractatctcttaattaacttatccttatacaaaacccaacctatcac

SEQ ID NO: 35394 - DNA, 50 bp, synthetic construct
  source 1..50: mol_type = other DNA
atcrtaacaaactaaatcttacacaaaaacaaaccaaccaaaaaacaatc

SEQ ID NO: 35395 - DNA, 50 bp, synthetic construct
  source 1..50: mol_type = other DNA
acacaaaaacaaaccaaccaaaaaacaatcraaaaaataacatccaaccc

SEQ ID NO: 35396 - DNA, 50 bp, synthetic construct
  source 1..50: mol_type = other DNA
aaaaaacaatcraaaaaataacatccaacccrtaaaccttacctttaacc

SEQ ID NO: 35397 - DNA, 50 bp, synthetic construct
  source 1..50: mol_type = other DNA
caaaaactacacctatcctctcctaaacctaacaaaaatactatataaac

SEQ ID NO: 35398 - DNA, 50 bp, synthetic construct
  source 1..50: mol_type = other DNA
aatattcaataaacaacaacacaaataatcctaaaaaaacrcaaaaaccc

SEQ ID NO: 35399 - DNA, 50 bp, synthetic construct
  source 1..50: mol_type = other DNA
cccacatctactacctactactataaaatactaacaaatcacctaaactc

SEQ ID NO: 35400 - DNA, 50 bp, synthetic construct
  source 1..50: mol_type = other DNA
tccacaacaacaaataacaaatataaatataaactttatacctttaaaac

SEQ ID NO: 35401 - DNA, 50 bp, synthetic construct
  source 1..50: mol_type = other DNA
aaccaataaaaatcctaaacaataacacacaaaaactcctcraaaaaaac

SEQ ID NO: 35402 - DNA, 50 bp, synthetic construct
  source 1..50: mol_type = other DNA
accttatctaaccaataaaaatcctaaacaataacacacaaaaactcctc

SEQ ID NO: 35403 - DNA, 50 bp, synthetic construct
  source 1..50: mol_type = other DNA
tcactcttaatattaaacrtaaaaaaaataccaaccrtcattccttaacc

SEQ ID NO: 35404 - DNA, 50 bp, synthetic construct
  source 1..50: mol_type = other DNA
atactaataataaacacrtcctcttcctctacraaaaaaacrtatttcac

SEQ ID NO: 35405 - DNA, 50 bp, synthetic construct
  source 1..50: mol_type = other DNA
atatatacaactatctctcaacctcaactcccratactaataataaacac

SEQ ID NO: 35406 - DNA, 50 bp, synthetic construct
  source 1..50: mol_type = other DNA
cttcactttctaaaatctcccatatacctataaaaataacatttataacc

SEQ ID NO: 35407 - DNA, 50 bp, synthetic construct
  source 1..50: mol_type = other DNA
actttctaaaatctcccatatacctataaaaataacatttataaccrtac

SEQ ID NO: 35408 - DNA, 50 bp, synthetic construct
  source 1..50: mol_type = other DNA
ctaaaatctcccatatacctataaaaataacatttataaccrtacrcaac

SEQ ID NO: 35409 - DNA, 50 bp, synthetic construct
  source 1..50: mol_type = other DNA
tttataaacacttaatcctcrcaacactattaactaaaaaatattattcc

SEQ ID NO: 35410 - DNA, 50 bp, synthetic construct
  source 1..50: mol_type = other DNA
attaaaaccaccraacrtctactttaatatatctaataaccccattctcc

SEQ ID NO: 35411 - DNA, 50 bp, synthetic construct
  source 1..50: mol_type = other DNA
ccccrcccacctaaataccatatttaataaaaactactaaaatttactac

SEQ ID NO: 35412 - DNA, 50 bp, synthetic construct
  source 1..50: mol_type = other DNA
aaaactaaaataactatataacattaaatataacratctactcaaacccc

SEQ ID NO: 35413 - DNA, 50 bp, synthetic construct
  source 1..50: mol_type = other DNA
ctaaacaaatcrtcatatccaatactacacaatcacttcaaccttacccc

SEQ ID NO: 35414 - DNA, 50 bp, synthetic construct
  source 1..50: mol_type = other DNA
actaaataacattaaatataacratctattcaaaccctacccrcttaaac

SEQ ID NO: 35415 - DNA, 50 bp, synthetic construct
  source 1..50: mol_type = other DNA
ctaaaataactaaataacattaaatataacratctattcaaaccctaccc

SEQ ID NO: 35416 - DNA, 50 bp, synthetic construct
  source 1..50: mol_type = other DNA
ccccrcccrctttaacrccatatttaataaaaactactaaaatttactac

SEQ ID NO: 35417 - DNA, 50 bp, synthetic construct
  source 1..50: mol_type = other DNA
aaaactaaaataattaaataactatccactcaaaccccrcccrctttaac

SEQ ID NO: 35418 - DNA, 50 bp, synthetic construct
  source 1..50: mol_type = other DNA
aacraaacaaaactaaaataattaaataactatccactcaaaccccrccc

SEQ ID NO: 35419 - DNA, 50 bp, synthetic construct
  source 1..50: mol_type = other DNA
ataaaacraaacaaaactaaaataattaaataactatccactcaaacccc

SEQ ID NO: 35420 - DNA, 50 bp, synthetic construct
  source 1..50: mol_type = other DNA
cccattaaataccatcttttataaaaataactaaaatttaccraataaac

SEQ ID NO: 35421 - DNA, 50 bp, synthetic construct
  source 1..50: mol_type = other DNA
aaaacaaaccattacatccaatacaacccacaatcattcaactttacctc

SEQ ID NO: 35422 - DNA, 50 bp, synthetic construct
  source 1..50: mol_type = other DNA
cccactaaataccatcttttataaaaataactaaaatttaccrcrcaaac

SEQ ID NO: 35423 - DNA, 50 bp, synthetic construct
  source 1..50: mol_type = other DNA
tttattttaataaaatctaactctattaccaaactaaaattcaataatac

SEQ ID NO: 35424 - DNA, 50 bp, synthetic construct
  source 1..50: mol_type = other DNA
tattaccaaactaaaattcaataatacratctcractcactacaaccatc

SEQ ID NO: 35425 - DNA, 50 bp, synthetic construct
  source 1..50: mol_type = other DNA
ccaaaataatctcaatttcctaacctcataatctactcacctcaacctcc

SEQ ID NO: 35426 - DNA, 50 bp, synthetic construct
  source 1..50: mol_type = other DNA
tcaatataaccrtatttcccacttcatcaaaaataatcaaaactaaacac

SEQ ID NO: 35427 - DNA, 50 bp, synthetic construct
  source 1..50: mol_type = other DNA
aaaaacctcatttcatttcrccraacctccatttccaaatcaatataacc

SEQ ID NO: 35428 - DNA, 50 bp, synthetic construct
  source 1..50: mol_type = other DNA
ctaactctacaaacaataataatattttcttctaaatccaaaaacacaac

SEQ ID NO: 35429 - DNA, 50 bp, synthetic construct
  source 1..50: mol_type = other DNA
ataatattttcttctaaatccaaaaacacaacrtcaccctttcaatctac

SEQ ID NO: 35430 - DNA, 50 bp, synthetic construct
  source 1..50: mol_type = other DNA
atattttcttctaaatccaaaaacacaacrtcaccctttcaatctacrtc

SEQ ID NO: 35431 - DNA, 50 bp, synthetic construct
  source 1..50: mol_type = other DNA
taaaaacaaaatacctttataatataatatatccctttaacratataacc

SEQ ID NO: 35432 - DNA, 50 bp, synthetic construct
  source 1..50: mol_type = other DNA
cattaccacattaaatcacacacccaccaataccaaaccaatccaaacac

SEQ ID NO: 35433 - DNA, 50 bp, synthetic construct
  source 1..50: mol_type = other DNA
caactaaaacaaacaaaaacratactcaaatccccaaaccraaaaactac

SEQ ID NO: 35434 - DNA, 50 bp, synthetic construct
  source 1..50: mol_type = other DNA
aaaaaataaacaactaaaacaaacaaaaacratactcaaatccccaaacc

SEQ ID NO: 35435 - DNA, 50 bp, synthetic construct
  source 1..50: mol_type = other DNA
ctaccctaaaacttaaacacaacctcttaaaaacaataataaatcaccac

SEQ ID NO: 35436 - DNA, 50 bp, synthetic construct
  source 1..50: mol_type = other DNA
caataataaatcaccacrcactaaatataataaaaataaccaccaaaatc

SEQ ID NO: 35437 - DNA, 50 bp, synthetic construct
  source 1..50: mol_type = other DNA
cactttctaaacaaaataattacracctatattctccataaaactacctc

SEQ ID NO: 35438 - DNA, 50 bp, synthetic construct
  source 1..50: mol_type = other DNA
ctttctaaacaaaataattacracctatattctccataaaactacctcrc

SEQ ID NO: 35439 - DNA, 50 bp, synthetic construct
  source 1..50: mol_type = other DNA
actttatataccaaatctaaaataatacaaatccccataaacaaaccaac

SEQ ID NO: 35440 - DNA, 50 bp, synthetic construct
  source 1..50: mol_type = other DNA
tacaaattttcaaatatatattactccaaatttacataaaatactaccac

SEQ ID NO: 35441 - DNA, 50 bp, synthetic construct
  source 1..50: mol_type = other DNA
aattacacaacaacaaataactaatacactttctctcaaacctttcttac

SEQ ID NO: 35442 - DNA, 50 bp, synthetic construct
  source 1..50: mol_type = other DNA
tactatataactcaaaacttcrtaacctaaaacaacaataaatatctcac

SEQ ID NO: 35443 - DNA, 50 bp, synthetic construct
  source 1..50: mol_type = other DNA
taaacaaaaaaaacaatcatataaacctatattaaatcaaataactaacc

SEQ ID NO: 35444 - DNA, 50 bp, synthetic construct
  source 1..50: mol_type = other DNA
accccttctttcaaacaaatccttttatctttatcttcatttctaccttc

SEQ ID NO: 35445 - DNA, 50 bp, synthetic construct
  source 1..50: mol_type = other DNA
aatttcactttctctactctaacaaaccttcctcrttcaaatccctaatc

SEQ ID NO: 35446 - DNA, 50 bp, synthetic construct
  source 1..50: mol_type = other DNA
tcctcaacaaacaaattctaccccatattaccctaattcaaaaacctccc

SEQ ID NO: 35447 - DNA, 50 bp, synthetic construct
  source 1..50: mol_type = other DNA
atttaaaccccaaaaaattctataaccraactcttaaacccctatactcc

SEQ ID NO: 35448 - DNA, 50 bp, synthetic construct
  source 1..50: mol_type = other DNA
atacactccactatataaaaacaaaccraaacataaaaactcaaaaaccc

SEQ ID NO: 35449 - DNA, 50 bp, synthetic construct
  source 1..50: mol_type = other DNA
tccatttatacaaaacrtacataaaataaatcactttataactttacttc

SEQ ID NO: 35450 - DNA, 50 bp, synthetic construct
  source 1..50: mol_type = other DNA
tccatttaatttacttctaaaaaatccttaaattccctacctccaaaccc

SEQ ID NO: 35451 - DNA, 50 bp, synthetic construct
  source 1..50: mol_type = other DNA
ataaaaaacaaacccaaccctaaaacctaaatcaaataactaaacccttc

SEQ ID NO: 35452 - DNA, 50 bp, synthetic construct
  source 1..50: mol_type = other DNA
taactaccaaaataaccaaataaataaaataaactaaaacactcactacc

SEQ ID NO: 35453 - DNA, 50 bp, synthetic construct
  source 1..50: mol_type = other DNA
aaccaaataaataaaataaactaaaacactcactaccrtaccaaccccac

SEQ ID NO: 35454 - DNA, 50 bp, synthetic construct
  source 1..50: mol_type = other DNA
ccctaactaaaaacaaacaacraaccctctcacaaaacctaaactattac

SEQ ID NO: 35455 - DNA, 50 bp, synthetic construct
  source 1..50: mol_type = other DNA
ctaccccaaaaaacaaacaaatttattaaacaacaactaaaaaaatcaac

SEQ ID NO: 35456 - DNA, 50 bp, synthetic construct
  source 1..50: mol_type = other DNA
ctatctaccctttaaaacaatcccaaccacctatactattatctatcttc

SEQ ID NO: 35457 - DNA, 50 bp, synthetic construct
  source 1..50: mol_type = other DNA
aaatcttaatacctccactcaactcaattccaattttctaaccatacccc

SEQ ID NO: 35458 - DNA, 50 bp, synthetic construct
  source 1..50: mol_type = other DNA
aacataaccaaaaaactaaaattaaactaaataaaaacaccaaaacctac

SEQ ID NO: 35459 - DNA, 50 bp, synthetic construct
  source 1..50: mol_type = other DNA
ttttaaaaatccaaaccaaaaaaaaccaaaacaccataaccccaacaaac

SEQ ID NO: 35460 - DNA, 50 bp, synthetic construct
  source 1..50: mol_type = other DNA
tccaacaccacttcaaataaaaactcctctaaaccttacctaaaaactcc

SEQ ID NO: 35461 - DNA, 50 bp, synthetic construct
  source 1..50: mol_type = other DNA
acaccacttcaaataaaaactcctctaaaccttacctaaaaactccrttc

SEQ ID NO: 35462 - DNA, 50 bp, synthetic construct
  source 1..50: mol_type = other DNA
taacaaaaaaataaccraactcctaaatatcctccrctaaattcaaacrc

SEQ ID NO: 35463 - DNA, 50 bp, synthetic construct
  source 1..50: mol_type = other DNA
aattttctaaatctataaaatcaattttacttccacacttaaaaataacc

SEQ ID NO: 35464 - DNA, 50 bp, synthetic construct
  source 1..50: mol_type = other DNA
tactacaaaaaatacaactaactctccrccttccacacactaatttacac

SEQ ID NO: 35465 - DNA, 50 bp, synthetic construct
  source 1..50: mol_type = other DNA
cattaatccctcccccatctatataaatatcactatttttaaccraatac

SEQ ID NO: 35466 - DNA, 50 bp, synthetic construct
  source 1..50: mol_type = other DNA
cacccccattaatccctcccccatctatataaatatcactatttttaacc

SEQ ID NO: 35467 - DNA, 50 bp, synthetic construct
  source 1..50: mol_type = other DNA
aatctatctaccaatattcaaaccactatataaacctaaatttcttaacc

SEQ ID NO: 35468 - DNA, 50 bp, synthetic construct
  source 1..50: mol_type = other DNA
caaaatacataaataccatccttaaaaatcttaaaaaactccccaaattc

SEQ ID NO: 35469 - DNA, 50 bp, synthetic construct
  source 1..50: mol_type = other DNA
caaatccataaactctacatacttcatttatattttcatttcatcatcac

SEQ ID NO: 35470 - DNA, 50 bp, synthetic construct
  source 1..50: mol_type = other DNA
aaaccaacaaatatcccrtaacctttcccctaatttcaaactaccatatc

SEQ ID NO: 35471 - DNA, 50 bp, synthetic construct
  source 1..50: mol_type = other DNA
actaacaaacaaccttaataactacaactacaccctcacaaacctaaacc

SEQ ID NO: 35472 - DNA, 50 bp, synthetic construct
  source 1..50: mol_type = other DNA
tcccatacaaaacractaaaaaactaaaccaacaaataaataaacaaaac

SEQ ID NO: 35473 - DNA, 50 bp, synthetic construct
  source 1..50: mol_type = other DNA
aaaacaactttatacaaaacraactacctctaacccctcccatacaaaac

SEQ ID NO: 35474 - DNA, 50 bp, synthetic construct
  source 1..50: mol_type = other DNA
ctctacataaaaaaaaccaaaaacaactcrttttatataaaactatcccc

SEQ ID NO: 35475 - DNA, 50 bp, synthetic construct
  source 1..50: mol_type = other DNA
actaaactataaaacaaatcaaaaacacataataaacrcctaatcttacc

SEQ ID NO: 35476 - DNA, 50 bp, synthetic construct
  source 1..50: mol_type = other DNA
accttctctctccttaaaaacaaaaaactactttattaccacccataaac

SEQ ID NO: 35477 - DNA, 50 bp, synthetic construct
  source 1..50: mol_type = other DNA
aatcacctcctacttacctaacataaacttaaaaaacttatttctatccc

SEQ ID NO: 35478 - DNA, 50 bp, synthetic construct
  source 1..50: mol_type = other DNA
aatatctaaaaaaaatttcctataacctcactaaacatctaaaaaattac

SEQ ID NO: 35479 - DNA, 50 bp, synthetic construct
  source 1..50: mol_type = other DNA
aaatattacttcttacactatatataacttctaaacataatatacacctc

SEQ ID NO: 35480 - DNA, 50 bp, synthetic construct
  source 1..50: mol_type = other DNA
attccactctaaattactctaaataaactaaatactttccacacataaac

SEQ ID NO: 35481 - DNA, 50 bp, synthetic construct
  source 1..50: mol_type = other DNA
tcttttctcataacrtctctaaaattccccttttattaaaaaacrccrtc

SEQ ID NO: 35482 - DNA, 50 bp, synthetic construct
  source 1..50: mol_type = other DNA
tcctcttttctcataacrtctctaaaattccccttttattaaaaaacrcc

SEQ ID NO: 35483 - DNA, 50 bp, synthetic construct
  source 1..50: mol_type = other DNA
tattcctcttttctcataacrtctctaaaattccccttttattaaaaaac

SEQ ID NO: 35484 - DNA, 50 bp, synthetic construct
  source 1..50: mol_type = other DNA
aacaaacatctacaataaatatctacaacttccttttcaaaaacaccatc

SEQ ID NO: 35485 - DNA, 50 bp, synthetic construct
  source 1..50: mol_type = other DNA
cataccccaactcaccaattctaaaacaccaattccttaaaacaaatacc

SEQ ID NO: 35486 - DNA, 50 bp, synthetic construct
  source 1..50: mol_type = other DNA
aaaactaataccccaaaactaataaactaaaatatacatttaactcattc

SEQ ID NO: 35487 - DNA, 50 bp, synthetic construct
  source 1..50: mol_type = other DNA
ttactaaaccttaaaatcratttccttatttctattacaaacaatctcac

SEQ ID NO: 35488 - DNA, 50 bp, synthetic construct
  source 1..50: mol_type = other DNA
cctaccactccrtaattctaaccttaaataaattactaaaccttaaaatc

SEQ ID NO: 35489 - DNA, 50 bp, synthetic construct
  source 1..50: mol_type = other DNA
actctttctaattttcaatctcctttataactcacaaaccctaccactcc

SEQ ID NO: 35490 - DNA, 50 bp, synthetic construct
  source 1..50: mol_type = other DNA
aacttaaattaattcraattcatctactaaaccaaactattattactatc

SEQ ID NO: 35491 - DNA, 50 bp, synthetic construct
  source 1..50: mol_type = other DNA
aaaaatcccaataaacttcacaacaaataaaataatacccaaactaaccc

SEQ ID NO: 35492 - DNA, 50 bp, synthetic construct
  source 1..50: mol_type = other DNA
caaaaccrttacattaactacttctatacctaaaacacctttcccttacc

SEQ ID NO: 35493 - DNA, 50 bp, synthetic construct
  source 1..50: mol_type = other DNA
attaactacttctatacctaaaacacctttcccttaccrataaacaaaac

SEQ ID NO: 35494 - DNA, 50 bp, synthetic construct
  source 1..50: mol_type = other DNA
acaaaattatacctaaaaaaataaccttaaaacaaaaacccaaaaaaaac

SEQ ID NO: 35495 - DNA, 50 bp, synthetic construct
  source 1..50: mol_type = other DNA
tccttattctttatacctccttacccctaattacrataaacaaccttccc

SEQ ID NO: 35496 - DNA, 50 bp, synthetic construct
  source 1..50: mol_type = other DNA
cttctacaaaaaaataccactcacacatctaatcttcaaaaaaacacacc

SEQ ID NO: 35497 - DNA, 50 bp, synthetic construct
  source 1..50: mol_type = other DNA
aactttactaaaaaatcttttatttcaatactaattttccttaaaacttc

SEQ ID NO: 35498 - DNA, 50 bp, synthetic construct
  source 1..50: mol_type = other DNA
ttcaatactaattttccttaaaacttcraactttaatttccaacaccacc

SEQ ID NO: 35499 - DNA, 50 bp, synthetic construct
  source 1..50: mol_type = other DNA
ccraactataataatacctcctctataatcctaccatcttctaaatttcc

SEQ ID NO: 35500 - DNA, 50 bp, synthetic construct
  source 1..50: mol_type = other DNA
attcattttaacttaataccaaattcaaaaaaacttcactaacttcttcc

SEQ ID NO: 35501 - DNA, 50 bp, synthetic construct
  source 1..50: mol_type = other DNA
tcaccaatttataaaatatttccacaaacatccattctatttaatcaccc

SEQ ID NO: 35502 - DNA, 50 bp, synthetic construct
  source 1..50: mol_type = other DNA
ttttaaaaccraaataatcattttaatttttcctttcccctaccaaacac

SEQ ID NO: 35503 - DNA, 50 bp, synthetic construct
  source 1..50: mol_type = other DNA
ctcaaaccaaaaccttaactataacaaacaactcaacaatttcctaaccc

SEQ ID NO: 35504 - DNA, 50 bp, synthetic construct
  source 1..50: mol_type = other DNA
taacaaacaactcaacaatttcctaacccrtaacctaaattcaactctcc

SEQ ID NO: 35505 - DNA, 50 bp, synthetic construct
  source 1..50: mol_type = other DNA
ttaaacaccccattcctacaaacaatacacatatttcataaattactccc

SEQ ID NO: 35506 - DNA, 50 bp, synthetic construct
  source 1..50: mol_type = other DNA
atatatacactacttacaaaaataaaatattcaaaacataaatccaaacc

SEQ ID NO: 35507 - DNA, 50 bp, synthetic construct
  source 1..50: mol_type = other DNA
aacccaaatactacataaaatacacccaccaaatctccttatctaaacac

SEQ ID NO: 35508 - DNA, 50 bp, synthetic construct
  source 1..50: mol_type = other DNA
aaaaacttaataaatatatttcatacaacacctaaaccttacttctccac

SEQ ID NO: 35509 - DNA, 50 bp, synthetic construct
  source 1..50: mol_type = other DNA
taaaccttacttctccacraccaaatctccaaaactaaaaactaacaaac

SEQ ID NO: 35510 - DNA, 50 bp, synthetic construct
  source 1..50: mol_type = other DNA
taacccttttccaaccctccaaaaaatcaatcaaacatttaacatttatc

SEQ ID NO: 35511 - DNA, 50 bp, synthetic construct
  source 1..50: mol_type = other DNA
aatttcacaactaaaaaactatattaaaacctaaacaaaataaatccaac

SEQ ID NO: 35512 - DNA, 50 bp, synthetic construct
  source 1..50: mol_type = other DNA
tatcattttactaattaaaatccttcaataaacaaaatataataactcac

SEQ ID NO: 35513 - DNA, 50 bp, synthetic construct
  source 1..50: mol_type = other DNA
aaacctaacatacaaatattcaataaatactaattaaaaaaataacaaac

SEQ ID NO: 35514 - DNA, 50 bp, synthetic construct
  source 1..50: mol_type = other DNA
actctcraaaaatacaatacaaacataaaaaatatatatcraatttctcc

SEQ ID NO: 35515 - DNA, 50 bp, synthetic construct
  source 1..50: mol_type = other DNA
aaactcatttctaacactaattataaacctatcctaaaaaattcaaatcc

SEQ ID NO: 35516 - DNA, 50 bp, synthetic construct
  source 1..50: mol_type = other DNA
acaaaaacaaaccraataacccaacctaaacccctaaaacctaaaaaacc

SEQ ID NO: 35517 - DNA, 50 bp, synthetic construct
  source 1..50: mol_type = other DNA
accraactaaacttataaacaacattatcatttctatcttccctacaacc

SEQ ID NO: 35518 - DNA, 50 bp, synthetic construct
  source 1..50: mol_type = other DNA
aaaataacaatactacctataaacccaacccracccataacaaaaaaaac

SEQ ID NO: 35519 - DNA, 50 bp, synthetic construct
  source 1..50: mol_type = other DNA
caaaactttaactaaaacccctactttcaacctaataaatataaacaaac

SEQ ID NO: 35520 - DNA, 50 bp, synthetic construct
  source 1..50: mol_type = other DNA
catctcctactattttacctaacatcaaataataaaaattttaccatatc

SEQ ID NO: 35521 - DNA, 50 bp, synthetic construct
  source 1..50: mol_type = other DNA
atacrctaatattcattcataactaaaatactacacaatcattaaaaaac

SEQ ID NO: 35522 - DNA, 50 bp, synthetic construct
  source 1..50: mol_type = other DNA
acacrctttttaataattatataacattccaactataaataaacactaac

SEQ ID NO: 35523 - DNA, 50 bp, synthetic construct
  source 1..50: mol_type = other DNA
aaaactacctaactaaaaaccaacctaaaaattaataatctaacaaaacc

SEQ ID NO: 35524 - DNA, 50 bp, synthetic construct
  source 1..50: mol_type = other DNA
tcaaatcaaaaaaaattcattctacaaaaaccctaaaacrtcttctcttc

SEQ ID NO: 35525 - DNA, 50 bp, synthetic construct
  source 1..50: mol_type = other DNA
accccctcttctcaaatcaaaaaaaattcattctacaaaaaccctaaaac

SEQ ID NO: 35526 - DNA, 50 bp, synthetic construct
  source 1..50: mol_type = other DNA
cractacractacraaaaaacaaaatccctacctaactctttaaaatttc

SEQ ID NO: 35527 - DNA, 50 bp, synthetic construct
  source 1..50: mol_type = other DNA
ccaaactcccctaaacctcacctacatcaaaaaattcraaaaattcaaac

SEQ ID NO: 35528 - DNA, 50 bp, synthetic construct
  source 1..50: mol_type = other DNA
tatatcaaaaaaatttataaaaactacctaaacctcccaatttccctacc

SEQ ID NO: 35529 - DNA, 50 bp, synthetic construct
  source 1..50: mol_type = other DNA
taatttaaaaactctaaaacrtaattttacataaataaaatctcatctcc

SEQ ID NO: 35530 - DNA, 50 bp, synthetic construct
  source 1..50: mol_type = other DNA
ttaaaaaataaaacaaaaacccaaccataaaccctaaaaactaacacatc

SEQ ID NO: 35531 - DNA, 50 bp, synthetic construct
  source 1..50: mol_type = other DNA
aacattacccractttaacctcctttattctaaaacaaccataatccacc

SEQ ID NO: 35532 - DNA, 50 bp, synthetic construct
  source 1..50: mol_type = other DNA
tatcaaaaaaacattaaaaaatccactactaactaaacacaataactcac

SEQ ID NO: 35533 - DNA, 50 bp, synthetic construct
  source 1..50: mol_type = other DNA
aaacraacaaatccctttaattcaaaaatttaaaaccaactaaacaacac

SEQ ID NO: 35534 - DNA, 50 bp, synthetic construct
  source 1..50: mol_type = other DNA
tccctttaattcaaaaatttaaaaccaactaaacaacacrataaaacccc

SEQ ID NO: 35535 - DNA, 50 bp, synthetic construct
  source 1..50: mol_type = other DNA
acctcaaccttcaaaacaaaataactaaaaccacaaacacrtaccattac

SEQ ID NO: 35536 - DNA, 50 bp, synthetic construct
  source 1..50: mol_type = other DNA
aaacrattctataacttcaacctctcaaataactaaaattacaaccatac

SEQ ID NO: 35537 - DNA, 50 bp, synthetic construct
  source 1..50: mol_type = other DNA
crtaaatcaccacacctaacccaaattacccttttcttaatccaaaaccc

SEQ ID NO: 35538 - DNA, 50 bp, synthetic construct
  source 1..50: mol_type = other DNA
ctaacccaaattacccttttcttaatccaaaacccratccaaaaatacac

SEQ ID NO: 35539 - DNA, 50 bp, synthetic construct
  source 1..50: mol_type = other DNA
aaacrtcaaaatcatacratcataaaaaacctaaaaaactactccaaacc

SEQ ID NO: 35540 - DNA, 50 bp, synthetic construct
  source 1..50: mol_type = other DNA
aacctaattctacaaaacaacaaatatcttcaaaaacrtcaaaatcatac

SEQ ID NO: 35541 - DNA, 50 bp, synthetic construct
  source 1..50: mol_type = other DNA
aaataattataataaaaacccctacccttcctataacataatatacaaac

SEQ ID NO: 35542 - DNA, 50 bp, synthetic construct
  source 1..50: mol_type = other DNA
ctaataaaattactcaccttaaatttccaaatcttactaaaaatacttac

SEQ ID NO: 35543 - DNA, 50 bp, synthetic construct
  source 1..50: mol_type = other DNA
ttttactaatcactcctcaaaaataaaacatacatataattaactcaaac

SEQ ID NO: 35544 - DNA, 50 bp, synthetic construct
  source 1..50: mol_type = other DNA
aaacrtctttatacactaaaaattctacaacaaaatatttttaaacattc

SEQ ID NO: 35545 - DNA, 50 bp, synthetic construct
  source 1..50: mol_type = other DNA
actccctcaaaaaaaaatttataaaatactaaacctcaaatttcataaac

SEQ ID NO: 35546 - DNA, 50 bp, synthetic construct
  source 1..50: mol_type = other DNA
aacatcattaccaaaaacraaacactttttcrtcttataatttaaccctc

SEQ ID NO: 35547 - DNA, 50 bp, synthetic construct
  source 1..50: mol_type = other DNA
tatcrcctcttaatcttctaacatcattaccaaaaacraaacactttttc

SEQ ID NO: 35548 - DNA, 50 bp, synthetic construct
  source 1..50: mol_type = other DNA
tattactaataactatcrcctcttaatcttctaacatcattaccaaaaac

SEQ ID NO: 35549 - DNA, 50 bp, synthetic construct
  source 1..50: mol_type = other DNA
acccaaaaaacraataaaacctatcccaaaacactaaaatcrcaaaaaac

SEQ ID NO: 35550 - DNA, 50 bp, synthetic construct
  source 1..50: mol_type = other DNA
taataaaaacaaaatcaactttccccaacaaaaaataacacraaattttc

SEQ ID NO: 35551 - DNA, 50 bp, synthetic construct
  source 1..50: mol_type = other DNA
aaaaaatactttatacraaactacacaaacccaaaaaaatatctccaatc

SEQ ID NO: 35552 - DNA, 50 bp, synthetic construct
  source 1..50: mol_type = other DNA
aacataaatttctccccattatttaataataaaacrtaaaaacrcctacc

SEQ ID NO: 35553 - DNA, 50 bp, synthetic construct
  source 1..50: mol_type = other DNA
ttaaaaaaaacaataaacataaatttctccccattatttaataataaaac

SEQ ID NO: 35554 - DNA, 50 bp, synthetic construct
  source 1..50: mol_type = other DNA
acacaacacaatacaatttcactactataataataaaaatcttcataacc

SEQ ID NO: 35555 - DNA, 50 bp, synthetic construct
  source 1..50: mol_type = other DNA
acaacacaatacaatttcactactataataataaaaatcttcataaccrc

SEQ ID NO: 35556 - DNA, 50 bp, synthetic construct
  source 1..50: mol_type = other DNA
ataataaaaatcttcataaccrcrttattttcttattctaaaaacatcac

SEQ ID NO: 35557 - DNA, 50 bp, synthetic construct
  source 1..50: mol_type = other DNA
aaacatcacratttaattaacaattccccatataatttaaaatatttccc

SEQ ID NO: 35558 - DNA, 50 bp, synthetic construct
  source 1..50: mol_type = other DNA
ttactcctttccactaataattttttcctttcttctacaaatctaaaaac

SEQ ID NO: 35559 - DNA, 50 bp, synthetic construct
  source 1..50: mol_type = other DNA
taactcatcattttaccatttatctattataatcttaatattttcctttc

SEQ ID NO: 35560 - DNA, 50 bp, synthetic construct
  source 1..50: mol_type = other DNA
aactcaactcatcctaaactaataaccrcrttatatccatcctttattcc

SEQ ID NO: 35561 - DNA, 50 bp, synthetic construct
  source 1..50: mol_type = other DNA
crttctttaaatcccacccatattcttcaaaaaaactacaactaatccac

SEQ ID NO: 35562 - DNA, 50 bp, synthetic construct
  source 1..50: mol_type = other DNA
actaaactattttaacaaaactaaataatataaatatcaaaccttataac

SEQ ID NO: 35563 - DNA, 50 bp, synthetic construct
  source 1..50: mol_type = other DNA
aaacaaaacctctaaacaaaaccaacaaatcaaataaataaaacaaaaac

SEQ ID NO: 35564 - DNA, 50 bp, synthetic construct
  source 1..50: mol_type = other DNA
caaaaatcttacttaatcctttaaaacccaaatatcccttctaaatcatc

SEQ ID NO: 35565 - DNA, 50 bp, synthetic construct
  source 1..50: mol_type = other DNA
cccaaatatcccttctaaatcatcrtataacatttaaccttatcttcccc

SEQ ID NO: 35566 - DNA, 50 bp, synthetic construct
  source 1..50: mol_type = other DNA
tttcaaaaataaacaatcctaaatttaaattacataccattctaaacaac

SEQ ID NO: 35567 - DNA, 50 bp, synthetic construct
  source 1..50: mol_type = other DNA
atcctaaatttaaattacataccattctaaacaacrtaataatatcttac

SEQ ID NO: 35568 - DNA, 50 bp, synthetic construct
  source 1..50: mol_type = other DNA
craaaaactaaaataactactaaataactaacraacctaaaacatatacc

SEQ ID NO: 35569 - DNA, 50 bp, synthetic construct
  source 1..50: mol_type = other DNA
cratacatactccaaacccrttaattacttaataaccatctcaatttttc

SEQ ID NO: 35570 - DNA, 50 bp, synthetic construct
  source 1..50: mol_type = other DNA
tactccaaacccrttaattacttaataaccatctcaatttttcraataac

SEQ ID NO: 35571 - DNA, 50 bp, synthetic construct
  source 1..50: mol_type = other DNA
ttttttaaaaattaactctcctcaaacaacccratatatcttcrccatac

SEQ ID NO: 35572 - DNA, 50 bp, synthetic construct
  source 1..50: mol_type = other DNA
ratcactcaaaaaacaattaacaaaatattcrtaatcaaaaaaataaccc

SEQ ID NO: 35573 - DNA, 50 bp, synthetic construct
  source 1..50: mol_type = other DNA
aattaattcccraaaacaaaatctattaaactaacaaaacccacrtctcc

SEQ ID NO: 35574 - DNA, 50 bp, synthetic construct
  source 1..50: mol_type = other DNA
cccracaattaattcccraaaacaaaatctattaaactaacaaaacccac

SEQ ID NO: 35575 - DNA, 50 bp, synthetic construct
  source 1..50: mol_type = other DNA
caaataacaaataacattcttaaacttttaaaaataattctaaaccraac

SEQ ID NO: 35576 - DNA, 50 bp, synthetic construct
  source 1..50: mol_type = other DNA
atcacaaataacaaataacattcttaaacttttaaaaataattctaaacc

SEQ ID NO: 35577 - DNA, 50 bp, synthetic construct
  source 1..50: mol_type = other DNA
aattatttttaaaaactcaaaaatattatttaccacctataacatctctc

SEQ ID NO: 35578 - DNA, 50 bp, synthetic construct
  source 1..50: mol_type = other DNA
accacctataacatctctcrttattcctcactcttaaatttcaaaaacac

SEQ ID NO: 35579 - DNA, 50 bp, synthetic construct
  source 1..50: mol_type = other DNA
cccaactaaattaaaaaactaaccatattactatctcaaaccacacctcc

SEQ ID NO: 35580 - DNA, 50 bp, synthetic construct
  source 1..50: mol_type = other DNA
aaaaactatcaaaccaaaacataaaatcacactactatacacctaaactc

SEQ ID NO: 35581 - DNA, 50 bp, synthetic construct
  source 1..50: mol_type = other DNA
tcttaaaatacaaaaaaacaacttaattacaataatcaatcccaaaaacc

SEQ ID NO: 35582 - DNA, 50 bp, synthetic construct
  source 1..50: mol_type = other DNA
cctattataatctccttattactcataaaaaaacaattttaaaaaaactc

SEQ ID NO: 35583 - DNA, 50 bp, synthetic construct
  source 1..50: mol_type = other DNA
taaatataattacatactatacattaaaaattaaactttaaaccaaacac

SEQ ID NO: 35584 - DNA, 50 bp, synthetic construct
  source 1..50: mol_type = other DNA
tacatactatacattaaaaattaaactttaaaccaaacacratatctcac

SEQ ID NO: 35585 - DNA, 50 bp, synthetic construct
  source 1..50: mol_type = other DNA
raaataaaacaccracttatatcattatctataacatcatatataactcc

SEQ ID NO: 35586 - DNA, 50 bp, synthetic construct
  source 1..50: mol_type = other DNA
ctaccttcaatacattcaatatcctcttataccatctacccattttcctc

SEQ ID NO: 35587 - DNA, 50 bp, synthetic construct
  source 1..50: mol_type = other DNA
acttcraatatccaataaaataaatacracattcattaatacccaatatc

SEQ ID NO: 35588 - DNA, 50 bp, synthetic construct
  source 1..50: mol_type = other DNA
raatatccaataaaataaatacracattcattaatacccaatatcraccc

SEQ ID NO: 35589 - DNA, 50 bp, synthetic construct
  source 1..50: mol_type = other DNA
aactaattcataactactatttctcaacctcrtaaatacaaacracaatc

SEQ ID NO: 35590 - DNA, 50 bp, synthetic construct
  source 1..50: mol_type = other DNA
tcaaacaaactaattcataactactatttctcaacctcrtaaatacaaac

SEQ ID NO: 35591 - DNA, 50 bp, synthetic construct
  source 1..50: mol_type = other DNA
cttcaaaaaatacaatcctaaaacaccataaaacaaaaatttaatattac

SEQ ID NO: 35592 - DNA, 50 bp, synthetic construct
  source 1..50: mol_type = other DNA
tacacataatttacaaccaaaacttaacataccaatattaaaaaaaacac

SEQ ID NO: 35593 - DNA, 50 bp, synthetic construct
  source 1..50: mol_type = other DNA
ctctaaaccaaatataaaatataatctcrtaatacrccrtttcttaaacc

SEQ ID NO: 35594 - DNA, 50 bp, synthetic construct
  source 1..50: mol_type = other DNA
aacaaaacaaataataataaattcactcttttcctcccttataaaattcc

SEQ ID NO: 35595 - DNA, 50 bp, synthetic construct
  source 1..50: mol_type = other DNA
tcatttaaaaatacatacctacctacttactccaacctctcctacatttc

SEQ ID NO: 35596 - DNA, 50 bp, synthetic construct
  source 1..50: mol_type = other DNA
aaaaataaacatttctaacaactcctaaataatactaaaaataccaatcc

SEQ ID NO: 35597 - DNA, 50 bp, synthetic construct
  source 1..50: mol_type = other DNA
aacttttattctaccccactcaacataaaaacccatttctcattaccctc

SEQ ID NO: 35598 - DNA, 50 bp, synthetic construct
  source 1..50: mol_type = other DNA
tcctatattaaataaaacaaaacaaaaaccacatacaacctaaattttac

SEQ ID NO: 35599 - DNA, 50 bp, synthetic construct
  source 1..50: mol_type = other DNA
taaataaaacaaaacaaaaaccacatacaacctaaattttacrtaatacc

SEQ ID NO: 35600 - DNA, 50 bp, synthetic construct
  source 1..50: mol_type = other DNA
caactacactaaatcctctaaaaccaacrataaaaccctatacratcaac

SEQ ID NO: 35601 - DNA, 50 bp, synthetic construct
  source 1..50: mol_type = other DNA
aaacrccctaacaaacctaaaacaactacactaaatcctctaaaaccaac

SEQ ID NO: 35602 - DNA, 50 bp, synthetic construct
  source 1..50: mol_type = other DNA
caccrctaactccaaaaaactcaatataactatctcaaacctaccaaaac

SEQ ID NO: 35603 - DNA, 50 bp, synthetic construct
  source 1..50: mol_type = other DNA
aacctaacctacaaaacaacaaaaaacaactttattccttcactaccaac

SEQ ID NO: 35604 - DNA, 50 bp, synthetic construct
  source 1..50: mol_type = other DNA
tcacaacaacataaaaaaaataatttcataaaccttaacatatcaacacc

SEQ ID NO: 35605 - DNA, 50 bp, synthetic construct
  source 1..50: mol_type = other DNA
atacccaataactaacaaaatacctatcaccaaataatcacttaaatatc

SEQ ID NO: 35606 - DNA, 50 bp, synthetic construct
  source 1..50: mol_type = other DNA
aactactaaacactcactacatatcaaacactatactatatatataatac

SEQ ID NO: 35607 - DNA, 50 bp, synthetic construct
  source 1..50: mol_type = other DNA
taaccctctcttatctttatttccaaatattaaataattatataaaactc

SEQ ID NO: 35608 - DNA, 50 bp, synthetic construct
  source 1..50: mol_type = other DNA
aacatttcaaacctacttaactaaaacacttataaacatacatatataac

SEQ ID NO: 35609 - DNA, 50 bp, synthetic construct
  source 1..50: mol_type = other DNA
aatacttcaactaaacaaacctaaaatacctttaatttcctaaaaatttc

SEQ ID NO: 35610 - DNA, 50 bp, synthetic construct
  source 1..50: mol_type = other DNA
acaacttctcctaaaataccctccacaatacaactaccaaccaaaaaatc

SEQ ID NO: 35611 - DNA, 50 bp, synthetic construct
  source 1..50: mol_type = other DNA
ctcaaaaaaaatcactaaaacttcctaacttactttacaaaaactaaacc

SEQ ID NO: 35612 - DNA, 50 bp, synthetic construct
  source 1..50: mol_type = other DNA
caacctttctaccctttccaataaaaaaatacaataaacctaaatacaac

SEQ ID NO: 35613 - DNA, 50 bp, synthetic construct
  source 1..50: mol_type = other DNA
actcaaaccattccttcacaaattaaaaaaaacacactacataacaacrc

SEQ ID NO: 35614 - DNA, 50 bp, synthetic construct
  source 1..50: mol_type = other DNA
acactcaaaccattccttcacaaattaaaaaaaacacactacataacaac

SEQ ID NO: 35615 - DNA, 50 bp, synthetic construct
  source 1..50: mol_type = other DNA
aactccaaaaatctaaaaatcattatcaataaacacaaaaatataaatac

SEQ ID NO: 35616 - DNA, 50 bp, synthetic construct
  source 1..50: mol_type = other DNA
taataataactttcaaatttctaaaactccccaactaacaacaaaccccc

SEQ ID NO: 35617 - DNA, 50 bp, synthetic construct
  source 1..50: mol_type = other DNA
aaatacaaaaaaatataaaccaattacaataattaataaaccatatacac

SEQ ID NO: 35618 - DNA, 50 bp, synthetic construct
  source 1..50: mol_type = other DNA
ctaaaccacttaataaacaaacctaaactaacctctaactactaaaacac

SEQ ID NO: 35619 - DNA, 50 bp, synthetic construct
  source 1..50: mol_type = other DNA
ttacaatcaaccacrctataaaataatcaactaaacaactctacttttac

SEQ ID NO: 35620 - DNA, 50 bp, synthetic construct
  source 1..50: mol_type = other DNA
actcaaatataaactatccctacctaattaatctaacaataactccctac

SEQ ID NO: 35621 - DNA, 50 bp, synthetic construct
  source 1..50: mol_type = other DNA
acccctacctataatacraacaactcattttcattctactataatttccc

SEQ ID NO: 35622 - DNA, 50 bp, synthetic construct
  source 1..50: mol_type = other DNA
aaccctattatcacatccctacaaaaaaccaaaaacaaatttaaaaaaac

SEQ ID NO: 35623 - DNA, 50 bp, synthetic construct
  source 1..50: mol_type = other DNA
aaaacctaccttccaacaaaaactaaaatcaacaacaaatcaccaaccac

SEQ ID NO: 35624 - DNA, 50 bp, synthetic construct
  source 1..50: mol_type = other DNA
attaattccaattcctactaaaaaacaaatcctaccttacactaacccac

SEQ ID NO: 35625 - DNA, 50 bp, synthetic construct
  source 1..50: mol_type = other DNA
caaaaaaccracaccrtatcaacttatttaaaacaataatattcttatcc

SEQ ID NO: 35626 - DNA, 50 bp, synthetic construct
  source 1..50: mol_type = other DNA
tataacctataatacraataaaaacactactattttaaataaactaacac

SEQ ID NO: 35627 - DNA, 50 bp, synthetic construct
  source 1..50: mol_type = other DNA
aaaaaaactttaaacaatacctaactttcctaaataaacrtccctacrac

SEQ ID NO: 35628 - DNA, 50 bp, synthetic construct
  source 1..50: mol_type = other DNA
taaaaaaaaactttaaacaatacctaactttcctaaataaacrtccctac

SEQ ID NO: 35629 - DNA, 50 bp, synthetic construct
  source 1..50: mol_type = other DNA
aaaaccctataaccaaataaacctaatacaacctaactctaaccaactac

SEQ ID NO: 35630 - DNA, 50 bp, synthetic construct
  source 1..50: mol_type = other DNA
ataaacctaatacaacctaactctaaccaactacrtaaataaaccccttc

SEQ ID NO: 35631 - DNA, 50 bp, synthetic construct
  source 1..50: mol_type = other DNA
acaaaaccaaataaataatacctaacctcctaccctaaaactctcccctc

SEQ ID NO: 35632 - DNA, 50 bp, synthetic construct
  source 1..50: mol_type = other DNA
aaactataaaacctacatacaataccaaacacaaataaaccaactatacc

SEQ ID NO: 35633 - DNA, 50 bp, synthetic construct
  source 1..50: mol_type = other DNA
ccaaaccaaaaatctactcaacttaaaaaataaacaatctaacccaacac

SEQ ID NO: 35634 - DNA, 50 bp, synthetic construct
  source 1..50: mol_type = other DNA
cractatacctacctttaaaaaaactatcactatcaatatcactccctcc

SEQ ID NO: 35635 - DNA, 50 bp, synthetic construct
  source 1..50: mol_type = other DNA
raacaaaaccctaaaaaaaaccttctcttccctcaatcaaaactaacctc

SEQ ID NO: 35636 - DNA, 50 bp, synthetic construct
  source 1..50: mol_type = other DNA
ccctaacactaaatctacctaaacaattcttacctaatactatccctatc

SEQ ID NO: 35637 - DNA, 50 bp, synthetic construct
  source 1..50: mol_type = other DNA
actaaacacaaaccaaaataaacttaacaacaaaaaatacaaaacccacc

SEQ ID NO: 35638 - DNA, 50 bp, synthetic construct
  source 1..50: mol_type = other DNA
cracaaacttcaatataaaccaaaaactaaaaattcaacaaccrcttaac

SEQ ID NO: 35639 - DNA, 50 bp, synthetic construct
  source 1..50: mol_type = other DNA
tacaaaaacctaaataaatctaacaacataaaaattctataattacaaac

SEQ ID NO: 35640 - DNA, 50 bp, synthetic construct
  source 1..50: mol_type = other DNA
aaataaaacaatattcaaacctttcccctataacrttttctcctaataac

SEQ ID NO: 35641 - DNA, 50 bp, synthetic construct
  source 1..50: mol_type = other DNA
tacaacractaaaacrtccctataaaaaacctaacccaaatataaaaaac

SEQ ID NO: 35642 - DNA, 50 bp, synthetic construct
  source 1..50: mol_type = other DNA
aaacrtccctataaaaaacctaacccaaatataaaaaacrcaaccaaacc

SEQ ID NO: 35643 - DNA, 50 bp, synthetic construct
  source 1..50: mol_type = other DNA
aatataaaaaacrcaaccaaaccraaatactcctaaaatacaaaaaattc

SEQ ID NO: 35644 - DNA, 50 bp, synthetic construct
  source 1..50: mol_type = other DNA
ccctcataatatctaaaaccrtcatttcactaccaaaaataaatatacac

SEQ ID NO: 35645 - DNA, 50 bp, synthetic construct
  source 1..50: mol_type = other DNA
aaactttctttatatcctactcraaaaactccctcataatatctaaaacc

SEQ ID NO: 35646 - DNA, 50 bp, synthetic construct
  source 1..50: mol_type = other DNA
catctaatctcaccttataattataacactatatctcctcraaacttccc

SEQ ID NO: 35647 - DNA, 50 bp, synthetic construct
  source 1..50: mol_type = other DNA
ctaaaatccttaccracctacaaaaaatcaaactttaaacraaaaacttc

SEQ ID NO: 35648 - DNA, 50 bp, synthetic construct
  source 1..50: mol_type = other DNA
atatcacaattacaaaataaaaccaaataccctaaccccrctatctcctc

SEQ ID NO: 35649 - DNA, 50 bp, synthetic construct
  source 1..50: mol_type = other DNA
caaatcacacttccatacrtccaatacaattctaccttactaaaaaaaac

SEQ ID NO: 35650 - DNA, 50 bp, synthetic construct
  source 1..50: mol_type = other DNA
aaatttaaaaacacccacrcttccctcaacaaaacaaaactacactaaac

SEQ ID NO: 35651 - DNA, 50 bp, synthetic construct
  source 1..50: mol_type = other DNA
acaaaactacactaaacrcataaaaatataatttaaaaaacraaaccttc

SEQ ID NO: 35652 - DNA, 50 bp, synthetic construct
  source 1..50: mol_type = other DNA
tactatttaccaaataacttttaatcctcctcctaaattcacaatcaatc

SEQ ID NO: 35653 - DNA, 50 bp, synthetic construct
  source 1..50: mol_type = other DNA
cccaactcaactctaaaaatattaataacactcttctaaaatatacracc

SEQ ID NO: 35654 - DNA, 50 bp, synthetic construct
  source 1..50: mol_type = other DNA
catatatactcacaaatacctactatattcaaacccctacacaacaatcc

SEQ ID NO: 35655 - DNA, 50 bp, synthetic construct
  source 1..50: mol_type = other DNA
tactatattcaaacccctacacaacaatccraaaaaacaaacatcctacc

SEQ ID NO: 35656 - DNA, 50 bp, synthetic construct
  source 1..50: mol_type = other DNA
tacccacccttcaaactttataaaacaaacccaaaaatcttaaaaaacac

SEQ ID NO: 35657 - DNA, 50 bp, synthetic construct
  source 1..50: mol_type = other DNA
aaaatcttataaaaaataccaaaaaccaaacaaactaaattattatatcc

SEQ ID NO: 35658 - DNA, 50 bp, synthetic construct
  source 1..50: mol_type = other DNA
aaaaaccaaaaaacrcattttctctcctaccaaccaactccaacctaatc

SEQ ID NO: 35659 - DNA, 50 bp, synthetic construct
  source 1..50: mol_type = other DNA
ccataaatctaaacatcaaccactcctaaaataaaaatactaacaaactc

SEQ ID NO: 35660 - DNA, 50 bp, synthetic construct
  source 1..50: mol_type = other DNA
caaccactcctaaaataaaaatactaacaaactcractctctaaaaatac

SEQ ID NO: 35661 - DNA, 50 bp, synthetic construct
  source 1..50: mol_type = other DNA
rcctataatctcaattactcaattaactaaaatttcaataaactaaaatc

SEQ ID NO: 35662 - DNA, 50 bp, synthetic construct
  source 1..50: mol_type = other DNA
aaaaacacaaactaataaaaccatactaaacacracactacctcaaaacc

SEQ ID NO: 35663 - DNA, 50 bp, synthetic construct
  source 1..50: mol_type = other DNA
tccaacccaaaaaaaatttaaaatactaaacacraccctaaaacaatacc

SEQ ID NO: 35664 - DNA, 50 bp, synthetic construct
  source 1..50: mol_type = other DNA
aaaccrttttatttccattctaaaatatcatttttccatcccccaaaccc

SEQ ID NO: 35665 - DNA, 50 bp, synthetic construct
  source 1..50: mol_type = other DNA
tctacacttaacacataataaacattcaaaaataaaaaccacaataaacc

SEQ ID NO: 35666 - DNA, 50 bp, synthetic construct
  source 1..50: mol_type = other DNA
ttattcttcaaaaaacactactctaaacattactatatttcaaataatac

SEQ ID NO: 35667 - DNA, 50 bp, synthetic construct
  source 1..50: mol_type = other DNA
taaaccaaaccctaattcaactctaaaacacaacaataaccaaaaaaacc

SEQ ID NO: 35668 - DNA, 50 bp, synthetic construct
  source 1..50: mol_type = other DNA
ccccaaatctttaccaaactcctcattcttcaaatctcaaatcaaatatc

SEQ ID NO: 35669 - DNA, 50 bp, synthetic construct
  source 1..50: mol_type = other DNA
aaaaaaattctatatatcacttaaccacccttaatcaaaaaaatcacctc

SEQ ID NO: 35670 - DNA, 50 bp, synthetic construct
  source 1..50: mol_type = other DNA
ttctaataacaacacracattctacaatctactctattcaaatatttatc

SEQ ID NO: 35671 - DNA, 50 bp, synthetic construct
  source 1..50: mol_type = other DNA
atatttaactcaatacaaaacccaaaacaacaactttctaataacaacac

SEQ ID NO: 35672 - DNA, 50 bp, synthetic construct
  source 1..50: mol_type = other DNA
taaaaaactaaattttcatatctctaatcatacctaaaatattctaaacc

SEQ ID NO: 35673 - DNA, 50 bp, synthetic construct
  source 1..50: mol_type = other DNA
atcatcttaaatcctattaaacttactttctaactttactaactactacc

SEQ ID NO: 35674 - DNA, 50 bp, synthetic construct
  source 1..50: mol_type = other DNA
ccaaaaccacaaatcataaacataaaacactttcttaaaactaacctaac

SEQ ID NO: 35675 - DNA, 50 bp, synthetic construct
  source 1..50: mol_type = other DNA
tacctacatactacttaaattactccacccacacctccataaccaaaaac

SEQ ID NO: 35676 - DNA, 50 bp, synthetic construct
  source 1..50: mol_type = other DNA
cacacctccataaccaaaaacrccaaaatactacaactaaaacrtaaacc

SEQ ID NO: 35677 - DNA, 50 bp, synthetic construct
  source 1..50: mol_type = other DNA
tacttttcctatctaactctaacaaatcctccctcactaaatataaaatc

SEQ ID NO: 35678 - DNA, 50 bp, synthetic construct
  source 1..50: mol_type = other DNA
aatcctccctcactaaatataaaatcrttaccaaatttctaaaaaatatc

SEQ ID NO: 35679 - DNA, 50 bp, synthetic construct
  source 1..50: mol_type = other DNA
tactctaaaaaaactaactaaaaataataaacctaataattatctatcac

SEQ ID NO: 35680 - DNA, 50 bp, synthetic construct
  source 1..50: mol_type = other DNA
attattactaatcttaaccttctctttaactacctttaaacaaaaaatac

SEQ ID NO: 35681 - DNA, 50 bp, synthetic construct
  source 1..50: mol_type = other DNA
cttaaattactaacttatttcctatacaacaaaaacaaaccaaaataaac

SEQ ID NO: 35682 - DNA, 50 bp, synthetic construct
  source 1..50: mol_type = other DNA
caacctcttaaacaataccrttatccctattttataactaaacacrtaac

SEQ ID NO: 35683 - DNA, 50 bp, synthetic construct
  source 1..50: mol_type = other DNA
atactacaaataaataatctaataaaccatataatttcatcttacrccac

SEQ ID NO: 35684 - DNA, 50 bp, synthetic construct
  source 1..50: mol_type = other DNA
ctccatacaaaacaataaactctcaaaacctcaacctcttaaacaatacc

SEQ ID NO: 35685 - DNA, 50 bp, synthetic construct
  source 1..50: mol_type = other DNA
aattttaaaaccttaatatacraatctaaaaaataaaaccaaccrcacac

SEQ ID NO: 35686 - DNA, 50 bp, synthetic construct
  source 1..50: mol_type = other DNA
aaacttatcttccaaaaactaatactaaaaattttaaaaccttaatatac

SEQ ID NO: 35687 - DNA, 50 bp, synthetic construct
  source 1..50: mol_type = other DNA
cactaaaacctcaaaacctctaacaccaactcctaaaaaataaacttccc

SEQ ID NO: 35688 - DNA, 50 bp, synthetic construct
  source 1..50: mol_type = other DNA
aaacctcaaaacctctaacaccaactcctaaaaaataaacttcccractc

SEQ ID NO: 35689 - DNA, 50 bp, synthetic construct
  source 1..50: mol_type = other DNA
aacctaaacccaaaaacaacrcaatcttacaacttattaaatctttctcc

SEQ ID NO: 35690 - DNA, 50 bp, synthetic construct
  source 1..50: mol_type = other DNA
tccatccacaaataaaatcctccaacraaaaacctaaacccaaaaacaac

SEQ ID NO: 35691 - DNA, 50 bp, synthetic construct
  source 1..50: mol_type = other DNA
aaaaacctaacaaattataaaactacrctacccttaaacccaaacttccc

SEQ ID NO: 35692 - DNA, 50 bp, synthetic construct
  source 1..50: mol_type = other DNA
ccttaaacccaaacttcccrctaaaaaatctcacctataaataaaattcc

SEQ ID NO: 35693 - DNA, 50 bp, synthetic construct
  source 1..50: mol_type = other DNA
ccrctaaaaaatctcacctataaataaaattccraacccaaatcttaccc

SEQ ID NO: 35694 - DNA, 50 bp, synthetic construct
  source 1..50: mol_type = other DNA
rctaaaaaatctcacctataaataaaattccraacccaaatcttacccrc

SEQ ID NO: 35695 - DNA, 50 bp, synthetic construct
  source 1..50: mol_type = other DNA
caaaaaacacttactacrctaaaaacaaactaaaaatttcrcatccaaac

SEQ ID NO: 35696 - DNA, 50 bp, synthetic construct
  source 1..50: mol_type = other DNA
aaacaacaaaacaaaaacraatcctaaaaacrtaaaacctaaaacccrac

SEQ ID NO: 35697 - DNA, 50 bp, synthetic construct
  source 1..50: mol_type = other DNA
aactaattcctaaacctaaaacccracccctaattcaaacttcaatctcc

SEQ ID NO: 35698 - DNA, 50 bp, synthetic construct
  source 1..50: mol_type = other DNA
atacractaaaacccaaccaaaacraaaactaaaacctaaactaaaaacc

SEQ ID NO: 35699 - DNA, 50 bp, synthetic construct
  source 1..50: mol_type = other DNA
atataataaccttacraaacaaaacctactacaaaaaatcaaaattcrcc

SEQ ID NO: 35700 - DNA, 50 bp, synthetic construct
  source 1..50: mol_type = other DNA
atccaaaaacacrtaacaactacrcttcttaaaatatataataaccttac

SEQ ID NO: 35701 - DNA, 50 bp, synthetic construct
  source 1..50: mol_type = other DNA
tacraccccacctaataaccaaacataaacrtaacataactatataaacc

SEQ ID NO: 35702 - DNA, 50 bp, synthetic construct
  source 1..50: mol_type = other DNA
raccccacctaataaccaaacataaacrtaacataactatataaaccrac

SEQ ID NO: 35703 - DNA, 50 bp, synthetic construct
  source 1..50: mol_type = other DNA
taaacctactaaaaaaatctaattcaactctaattcactaaaataaaccc

SEQ ID NO: 35704 - DNA, 50 bp, synthetic construct
  source 1..50: mol_type = other DNA
ttcctaaccatatcttaaacctaactaaaatctaattccctccacacctc

SEQ ID NO: 35705 - DNA, 50 bp, synthetic construct
  source 1..50: mol_type = other DNA
aacccaaattatcaataataccaaaattaaaaaaccttattttaaacctc

SEQ ID NO: 35706 - DNA, 50 bp, synthetic construct
  source 1..50: mol_type = other DNA
aaactaacaaaattcctatcttaactcctataaaaccaactctccaaacc

SEQ ID NO: 35707 - DNA, 50 bp, synthetic construct
  source 1..50: mol_type = other DNA
aaaattctaaaaactacttcctaaaaaacaaaataccttactaatacccc

SEQ ID NO: 35708 - DNA, 50 bp, synthetic construct
  source 1..50: mol_type = other DNA
aacrttctaatccccaaaaacttttaaaaaatcatacaatccatacctcc

SEQ ID NO: 35709 - DNA, 50 bp, synthetic construct
  source 1..50: mol_type = other DNA
ttcaataaccaaaatatattaacctctatcccccttccaaaacttaacac

SEQ ID NO: 35710 - DNA, 50 bp, synthetic construct
  source 1..50: mol_type = other DNA
attattcctcacaataaccaaataacctctactttctttttcctttcttc

SEQ ID NO: 35711 - DNA, 50 bp, synthetic construct
  source 1..50: mol_type = other DNA
aatttcttttaaacaaaatcaaacacrttcaaaataatataaccataaac

SEQ ID NO: 35712 - DNA, 50 bp, synthetic construct
  source 1..50: mol_type = other DNA
ttaaaaatacccaattccccacrttaaatccttttataattaaaatactc

SEQ ID NO: 35713 - DNA, 50 bp, synthetic construct
  source 1..50: mol_type = other DNA
tactaaaaacaaaaaccaacccraatattttaaccacaaaaaaatttaac

SEQ ID NO: 35714 - DNA, 50 bp, synthetic construct
  source 1..50: mol_type = other DNA
aaaactcaaaaaaactacccttaaaatatcatcttaaaaaacccacaatc

SEQ ID NO: 35715 - DNA, 50 bp, synthetic construct
  source 1..50: mol_type = other DNA
taataacaaaactccccaaataacacccaaaaccacaacaataatctatc

SEQ ID NO: 35716 - DNA, 50 bp, synthetic construct
  source 1..50: mol_type = other DNA
aaatcaatatactttaaaaaatatattaaccccaataaaatctctacttc

SEQ ID NO: 35717 - DNA, 50 bp, synthetic construct
  source 1..50: mol_type = other DNA
acacaactcaaaaaaaaactcttctcaaaaatacaaaatacaaaccaaac

SEQ ID NO: 35718 - DNA, 50 bp, synthetic construct
  source 1..50: mol_type = other DNA
ctcttcttaaactatactataaccctaaaaaattctataactaaaaatac

SEQ ID NO: 35719 - DNA, 50 bp, synthetic construct
  source 1..50: mol_type = other DNA
caaaacacaactaaaatccaaccacttctcacctaaaaaaaacctactac

SEQ ID NO: 35720 - DNA, 50 bp, synthetic construct
  source 1..50: mol_type = other DNA
ctaaaatccaaccacttctcacctaaaaaaaacctactacracttcctac

SEQ ID NO: 35721 - DNA, 50 bp, synthetic construct
  source 1..50: mol_type = other DNA
atcccaaatcctctccctaaaaaaactctatataacctaactctaaactc

SEQ ID NO: 35722 - DNA, 50 bp, synthetic construct
  source 1..50: mol_type = other DNA
caaaatataaatataaatacaaacctcaaaaaaacrcrtcctcaacaaac

SEQ ID NO: 35723 - DNA, 50 bp, synthetic construct
  source 1..50: mol_type = other DNA
aaacacaaaataccaaaatataaatataaatacaaacctcaaaaaaacrc

SEQ ID NO: 35724 - DNA, 50 bp, synthetic construct
  source 1..50: mol_type = other DNA
aaaaacacaaaataccaaaatataaatataaatacaaacctcaaaaaaac

SEQ ID NO: 35725 - DNA, 50 bp, synthetic construct
  source 1..50: mol_type = other DNA
cctaaaacctatactcacactcacaccctaacactctatatcctctaaac

SEQ ID NO: 35726 - DNA, 50 bp, synthetic construct
  source 1..50: mol_type = other DNA
taccaactaaattataaacaaaaatcttacttttcatactacaaaatctc

SEQ ID NO: 35727 - DNA, 50 bp, synthetic construct
  source 1..50: mol_type = other DNA
ataaatctatttacttaaaaactctactaactaccttcccaaccaatccc

SEQ ID NO: 35728 - DNA, 50 bp, synthetic construct
  source 1..50: mol_type = other DNA
actaaacttaaaaataacaaaacaaatttaactaacactcacctcattcc

SEQ ID NO: 35729 - DNA, 50 bp, synthetic construct
  source 1..50: mol_type = other DNA
ttatataaaaattaaaaactaaaaacrccctcttccrtaatcaaaacccc

SEQ ID NO: 35730 - DNA, 50 bp, synthetic construct
  source 1..50: mol_type = other DNA
taaattatacaacctaacccrtcccattaaaacaaattcctaaaaaccac

SEQ ID NO: 35731 - DNA, 50 bp, synthetic construct
  source 1..50: mol_type = other DNA
aatttattttaataaaacraaccaaactatacaacccattaccataaaac

SEQ ID NO: 35732 - DNA, 50 bp, synthetic construct
  source 1..50: mol_type = other DNA
ccaaatactattccctaaccacttcaccaaaataactaatacctccttcc

SEQ ID NO: 35733 - DNA, 50 bp, synthetic construct
  source 1..50: mol_type = other DNA
aacctcctactatataaccttaactaccacttttaacacctttccccaac

SEQ ID NO: 35734 - DNA, 50 bp, synthetic construct
  source 1..50: mol_type = other DNA
taaccttaactaccacttttaacacctttccccaacrttaaacaattccc

SEQ ID NO: 35735 - DNA, 50 bp, synthetic construct
  source 1..50: mol_type = other DNA
atctacrttaaaaatatatctacraatatctataaccctacctccacccc

SEQ ID NO: 35736 - DNA, 50 bp, synthetic construct
  source 1..50: mol_type = other DNA
tacratattttaatttccataataaaacctactaacataaccctaacttc

SEQ ID NO: 35737 - DNA, 50 bp, synthetic construct
  source 1..50: mol_type = other DNA
atcttacttttccctaatctcatacaattataatcaatattataataatc

SEQ ID NO: 35738 - DNA, 50 bp, synthetic construct
  source 1..50: mol_type = other DNA
aaaaaatcaatatccttccccttcctaaattcctaactaataaactcccc

SEQ ID NO: 35739 - DNA, 50 bp, synthetic construct
  source 1..50: mol_type = other DNA
rtcaacraacacccttacttcataccctataaccaataaaataatttctc

SEQ ID NO: 35740 - DNA, 50 bp, synthetic construct
  source 1..50: mol_type = other DNA
tatcccraaaaatcattccattaaccacaaaatataaaacaaaaatactc

SEQ ID NO: 35741 - DNA, 50 bp, synthetic construct
  source 1..50: mol_type = other DNA
taataaacataaaattatacctaaaaactcataacacrcaaaaaccatac

SEQ ID NO: 35742 - DNA, 50 bp, synthetic construct
  source 1..50: mol_type = other DNA
attaaccacaaaatataaaacaaaaatactcrttaacrcataatccctac

SEQ ID NO: 35743 - DNA, 50 bp, synthetic construct
  source 1..50: mol_type = other DNA
catcaataaaaactaaaccatccacataaacaaaaaacaaaacactcaac

SEQ ID NO: 35744 - DNA, 50 bp, synthetic construct
  source 1..50: mol_type = other DNA
ccaaatttatcaaattccaaaccatacccttaacaaccttactatactac

SEQ ID NO: 35745 - DNA, 50 bp, synthetic construct
  source 1..50: mol_type = other DNA
aaaaataaaaaaatctataacttacattacctctataaaccttccactcc

SEQ ID NO: 35746 - DNA, 50 bp, synthetic construct
  source 1..50: mol_type = other DNA
cctaaaaactctaaaactctccaaccaactaataataaaaattaacttac

SEQ ID NO: 35747 - DNA, 50 bp, synthetic construct
  source 1..50: mol_type = other DNA
aataaaaattaacttacrattatttactaaacaccttctctatacaaatc

SEQ ID NO: 35748 - DNA, 50 bp, synthetic construct
  source 1..50: mol_type = other DNA
caaaccctaaaaaactttctaaatctaaaaaacctaaaataaatctctac

SEQ ID NO: 35749 - DNA, 50 bp, synthetic construct
  source 1..50: mol_type = other DNA
aaatcacaataaaataactcaaacctattaaccctacaccctaacaactc

SEQ ID NO: 35750 - DNA, 50 bp, synthetic construct
  source 1..50: mol_type = other DNA
taccaaaatacaaaaccaacaaatctaaaccactccactataacctaacc

SEQ ID NO: 35751 - DNA, 50 bp, synthetic construct
  source 1..50: mol_type = other DNA
taccctaaacrtaaatacactcacttctccaaacttcattctaaatatac

SEQ ID NO: 35752 - DNA, 50 bp, synthetic construct
  source 1..50: mol_type = other DNA
acactttcaaacctctataaaaaaataccctcttcrcttccraaaaaacc

SEQ ID NO: 35753 - DNA, 50 bp, synthetic construct
  source 1..50: mol_type = other DNA
taaataaccacactttcaaacctctataaaaaaataccctcttcrcttcc

SEQ ID NO: 35754 - DNA, 50 bp, synthetic construct
  source 1..50: mol_type = other DNA
aaatcttaaataaccacactttcaaacctctataaaaaaataccctcttc

SEQ ID NO: 35755 - DNA, 50 bp, synthetic construct
  source 1..50: mol_type = other DNA
atactaaaaatcaaacaataaaaccaaaacccactataaatacaaaaacc

SEQ ID NO: 35756 - DNA, 50 bp, synthetic construct
  source 1..50: mol_type = other DNA
atataacataatcataaatacaataaaaatcttatctacttaccaacctc

SEQ ID NO: 35757 - DNA, 50 bp, synthetic construct
  source 1..50: mol_type = other DNA
aatataaataaaaataccaatacattatcaaattaacatatccaaacccc

SEQ ID NO: 35758 - DNA, 50 bp, synthetic construct
  source 1..50: mol_type = other DNA
tacctacacaaatctaccttttccatctttttaatcttttcactaaaccc

SEQ ID NO: 35759 - DNA, 50 bp, synthetic construct
  source 1..50: mol_type = other DNA
aaataaaccaaaaaaatcaaacccttaataacccaaaactacatatactc

SEQ ID NO: 35760 - DNA, 50 bp, synthetic construct
  source 1..50: mol_type = other DNA
ttattttaatttttcaaccaaccaaaaatccratttaaccccaattttcc

SEQ ID NO: 35761 - DNA, 50 bp, synthetic construct
  source 1..50: mol_type = other DNA
accaaatttataccraaaatttcrccaaaaaataccacaataattcaacc

SEQ ID NO: 35762 - DNA, 50 bp, synthetic construct
  source 1..50: mol_type = other DNA
aatcttttattcacactaaaaaaccratatacacatctataccraaaacc

SEQ ID NO: 35763 - DNA, 50 bp, synthetic construct
  source 1..50: mol_type = other DNA
atttcrtaatcttttattcacactaaaaaaccratatacacatctatacc

SEQ ID NO: 35764 - DNA, 50 bp, synthetic construct
  source 1..50: mol_type = other DNA
raaaccaacaatttctaaatttcrtaatcttttattcacactaaaaaacc

SEQ ID NO: 35765 - DNA, 50 bp, synthetic construct
  source 1..50: mol_type = other DNA
ctaaaacacrtaatcaactacttacacraaaccaacaatttctaaatttc

SEQ ID NO: 35766 - DNA, 50 bp, synthetic construct
  source 1..50: mol_type = other DNA
ttacaaatatcttcaacacaattctaaaacacrtaatcaactacttacac

SEQ ID NO: 35767 - DNA, 50 bp, synthetic construct
  source 1..50: mol_type = other DNA
ttcccccacaaaataatcttacaaatatcttcaacacaattctaaaacac

SEQ ID NO: 35768 - DNA, 50 bp, synthetic construct
  source 1..50: mol_type = other DNA
tttttaaattttatcttaaaaaaaacrcrcacaaaaacractaccaaacc

SEQ ID NO: 35769 - DNA, 50 bp, synthetic construct
  source 1..50: mol_type = other DNA
ccraaacactactctccttttaatcatatattcatctattttaaattacc

SEQ ID NO: 35770 - DNA, 50 bp, synthetic construct
  source 1..50: mol_type = other DNA
aaactataacttcrttctcaaaatttcttcataaataaacaaaaatcrtc

SEQ ID NO: 35771 - DNA, 50 bp, synthetic construct
  source 1..50: mol_type = other DNA
cactactctccttttaatcatatattcatctattttaaattaccracrac

SEQ ID NO: 35772 - DNA, 50 bp, synthetic construct
  source 1..50: mol_type = other DNA
cccaaacraaaccccaaaaccacacacacrataaaataaactataacttc

SEQ ID NO: 35773 - DNA, 50 bp, synthetic construct
  source 1..50: mol_type = other DNA
ttatctatttataaaaaaaccttaaaaacraaattacaacttatcctacc

SEQ ID NO: 35774 - DNA, 50 bp, synthetic construct
  source 1..50: mol_type = other DNA
taaacaccaaaacaaacactcrccaaaaccaaaaaacaactacaaacrac

SEQ ID NO: 35775 - DNA, 50 bp, synthetic construct
  source 1..50: mol_type = other DNA
cactaaacaccaaaacaaacactcrccaaaaccaaaaaacaactacaaac

SEQ ID NO: 35776 - DNA, 50 bp, synthetic construct
  source 1..50: mol_type = other DNA
rtttaaatttaaattcttaacrtcrtttacaactatttcctaaccctaac

SEQ ID NO: 35777 - DNA, 50 bp, synthetic construct
  source 1..50: mol_type = other DNA
aacraaaaaaaacacaactaaatcaacaaaaccaatcctaataataaaac

SEQ ID NO: 35778 - DNA, 50 bp, synthetic construct
  source 1..50: mol_type = other DNA
ttctcacraaactttaaacaatacaaacrtaaaactaaaaattaacaaac

SEQ ID NO: 35779 - DNA, 50 bp, synthetic construct
  source 1..50: mol_type = other DNA
aaccctcactctaaaaataaaccacaatcaacrccatccaactcaattac

SEQ ID NO: 35780 - DNA, 50 bp, synthetic construct
  source 1..50: mol_type = other DNA
aattttaattcaaaaaaaaaccctcactctaaaaataaaccacaatcaac

SEQ ID NO: 35781 - DNA, 50 bp, synthetic construct
  source 1..50: mol_type = other DNA
atcttcracaacctatctaattaactacaactaaaatattaaaaaataac

SEQ ID NO: 35782 - DNA, 50 bp, synthetic construct
  source 1..50: mol_type = other DNA
acattccaaaacctaactataattaaactaaacacaattaaaccatcttc

SEQ ID NO: 35783 - DNA, 50 bp, synthetic construct
  source 1..50: mol_type = other DNA
aatttaaaatattttatccaaaaccaacatcatacttcatatttaacaac

SEQ ID NO: 35784 - DNA, 50 bp, synthetic construct
  source 1..50: mol_type = other DNA
aaacaattttctttcaaccratcaattactaaacctctaatataaacrac

SEQ ID NO: 35785 - DNA, 50 bp, synthetic construct
  source 1..50: mol_type = other DNA
aataaacaattttctttcaaccratcaattactaaacctctaatataaac

SEQ ID NO: 35786 - DNA, 50 bp, synthetic construct
  source 1..50: mol_type = other DNA
aaaaacrtaaaattcccctctaaaaaaatcaaaaaaccaaacactatctc

SEQ ID NO: 35787 - DNA, 50 bp, synthetic construct
  source 1..50: mol_type = other DNA
catatcraaacaatacctaacctcctaacctctccaaaaaaaaatctcac

SEQ ID NO: 35788 - DNA, 50 bp, synthetic construct
  source 1..50: mol_type = other DNA
acttaataaatatttattaataactaaaaatacttcctattcacatcaac

SEQ ID NO: 35789 - DNA, 50 bp, synthetic construct
  source 1..50: mol_type = other DNA
tcctcaattaccaacaaatatttactaaaccccactatataccaaacacc

SEQ ID NO: 35790 - DNA, 50 bp, synthetic construct
  source 1..50: mol_type = other DNA
aaacctctctaacacrcatctcttaaaaacaaaaacttaatacatttccc

SEQ ID NO: 35791 - DNA, 50 bp, synthetic construct
  source 1..50: mol_type = other DNA
accrtaaaaaccctcraaaaatacactaaatccctactctcaaaaaatac

SEQ ID NO: 35792 - DNA, 50 bp, synthetic construct
  source 1..50: mol_type = other DNA
aataactctaccaccracacactaaataaccttaaataaataaacccacc

SEQ ID NO: 35793 - DNA, 50 bp, synthetic construct
  source 1..50: mol_type = other DNA
aaaaaaatccaaaacrataaattcacttacccaaaatcactcaatatatc

SEQ ID NO: 35794 - DNA, 50 bp, synthetic construct
  source 1..50: mol_type = other DNA
aatcttaaactcctaaaacaaatactcccaaatctaactcatatttccac

SEQ ID NO: 35795 - DNA, 50 bp, synthetic construct
  source 1..50: mol_type = other DNA
aaaactcaccaaaaaaaactaatctaactaaatttaccttaaaaataaac

SEQ ID NO: 35796 - DNA, 50 bp, synthetic construct
  source 1..50: mol_type = other DNA
taaaaacaactaatctaactaaatttaccttaaaaataaacrccctactc

SEQ ID NO: 35797 - DNA, 50 bp, synthetic construct
  source 1..50: mol_type = other DNA
caactaatctaactaaatttaccttaaaaataaacrccctactcrcctcc

SEQ ID NO: 35798 - DNA, 50 bp, synthetic construct
  source 1..50: mol_type = other DNA
cctccracaattaaatttacctcccaaacacatcrctctattttattttc

SEQ ID NO: 35799 - DNA, 50 bp, synthetic construct
  source 1..50: mol_type = other DNA
aatcattaaacacaaaaaacactaaatactatacraaatactaaaaacac

SEQ ID NO: 35800 - DNA, 50 bp, synthetic construct
  source 1..50: mol_type = other DNA
rcacaacacctaatactctctatattcaataaccacaccrttatttcctc

SEQ ID NO: 35801 - DNA, 50 bp, synthetic construct
  source 1..50: mol_type = other DNA
ratactcaaattctataaactaaccaaacaaccctaactcctctaccccc

SEQ ID NO: 35802 - DNA, 50 bp, synthetic construct
  source 1..50: mol_type = other DNA
aaacattcrattaacaataaacacctataactcatctaaattctaaccac

SEQ ID NO: 35803 - DNA, 50 bp, synthetic construct
  source 1..50: mol_type = other DNA
aacactataaaaactactcaatcccttccactatatacctcraaactaac

SEQ ID NO: 35804 - DNA, 50 bp, synthetic construct
  source 1..50: mol_type = other DNA
tcaacaaaaaacactataaaaactactcaatcccttccactatatacctc

SEQ ID NO: 35805 - DNA, 50 bp, synthetic construct
  source 1..50: mol_type = other DNA
acacatcttaccttctataaaacctctcaacaacaaaactatcaaacccc

SEQ ID NO: 35806 - DNA, 50 bp, synthetic construct
  source 1..50: mol_type = other DNA
taaaaaatctaatacataccacaaccaaaaaactatttaactctaaaccc

SEQ ID NO: 35807 - DNA, 50 bp, synthetic construct
  source 1..50: mol_type = other DNA
aaatattaacatcaataacccaacaccttactatataacatacaaaaaac

SEQ ID NO: 35808 - DNA, 50 bp, synthetic construct
  source 1..50: mol_type = other DNA
taacaaaatactaaatcactaatactaacatctaaacaaaaaccaaatac

SEQ ID NO: 35809 - DNA, 50 bp, synthetic construct
  source 1..50: mol_type = other DNA
cctaacctaaaactatcttaaaatatacrtaaaacaaccctatctatccc

SEQ ID NO: 35810 - DNA, 50 bp, synthetic construct
  source 1..50: mol_type = other DNA
taatatactataaaactacccraaacctttaacactttcttttaacaaac

SEQ ID NO: 35811 - DNA, 50 bp, synthetic construct
  source 1..50: mol_type = other DNA
ataaacatccaaatatttcctatactcttaaaaatacattattcccactc

SEQ ID NO: 35812 - DNA, 50 bp, synthetic construct
  source 1..50: mol_type = other DNA
accaaaaaaattaaaatttttcattaaattcaatacaccatacccctccc

SEQ ID NO: 35813 - DNA, 50 bp, synthetic construct
  source 1..50: mol_type = other DNA
tcctaacattctataattctaaacaaacccccaactcctacaattataac

SEQ ID NO: 35814 - DNA, 50 bp, synthetic construct
  source 1..50: mol_type = other DNA
ttatataacraacrctctatataaccttaaacaaatccctaccctattcc

SEQ ID NO: 35815 - DNA, 50 bp, synthetic construct
  source 1..50: mol_type = other DNA
tatccraaacaaaaacctaacctctttctatcctaaattatataacraac

SEQ ID NO: 35816 - DNA, 50 bp, synthetic construct
  source 1..50: mol_type = other DNA
tcctttatcaataacaatctcaactaaataaaaaactacctaaaatatcc

SEQ ID NO: 35817 - DNA, 50 bp, synthetic construct
  source 1..50: mol_type = other DNA
aaacraaatcaaaccacaaaaaaaacaataaccaaaaatcactctctccc

SEQ ID NO: 35818 - DNA, 50 bp, synthetic construct
  source 1..50: mol_type = other DNA
attaaatactactcaaaaataacttcataactcraaaatcaaaaactacc

SEQ ID NO: 35819 - DNA, 50 bp, synthetic construct
  source 1..50: mol_type = other DNA
actcraaaatcaaaaactaccraactactaatactaaaattcaaaccccc

SEQ ID NO: 35820 - DNA, 50 bp, synthetic construct
  source 1..50: mol_type = other DNA
tattaacaacaatacctaaaactaaatatacaataaccaactaaatccac

SEQ ID NO: 35821 - DNA, 50 bp, synthetic construct
  source 1..50: mol_type = other DNA
ctcattattaactaaactcaaaataaataaccctaacccctcccaataac

SEQ ID NO: 35822 - DNA, 50 bp, synthetic construct
  source 1..50: mol_type = other DNA
ataaataactcaaaaaaaacctataactatatctccaaaaaccttttacc

SEQ ID NO: 35823 - DNA, 50 bp, synthetic construct
  source 1..50: mol_type = other DNA
acattttacaaacttcacratcaacaattacattccraaaaatttttaac

SEQ ID NO: 35824 - DNA, 50 bp, synthetic construct
  source 1..50: mol_type = other DNA
aaataaacaatacaacattttacaaacttcacratcaacaattacattcc

SEQ ID NO: 35825 - DNA, 50 bp, synthetic construct
  source 1..50: mol_type = other DNA
ttaaaatattcrttcaacrtcaaaaatttcccraaatataactattaacc

SEQ ID NO: 35826 - DNA, 50 bp, synthetic construct
  source 1..50: mol_type = other DNA
cctaaactttatcatacaacaaaaattaaaaacaaaactaccatataaac

SEQ ID NO: 35827 - DNA, 50 bp, synthetic construct
  source 1..50: mol_type = other DNA
tatcatacaacaaaaattaaaaacaaaactaccatataaacraaactcac

SEQ ID NO: 35828 - DNA, 50 bp, synthetic construct
  source 1..50: mol_type = other DNA
tcatacaacaaaaattaaaaacaaaactaccatataaacraaactcacrc

SEQ ID NO: 35829 - DNA, 50 bp, synthetic construct
  source 1..50: mol_type = other DNA
tcaaacttaaccaatacacraccacaaaaattaaaacctacaaacaaaac

SEQ ID NO: 35830 - DNA, 50 bp, synthetic construct
  source 1..50: mol_type = other DNA
aaacttaaccaatacacraccacaaaaattaaaacctacaaacaaaacrc

SEQ ID NO: 35831 - DNA, 50 bp, synthetic construct
  source 1..50: mol_type = other DNA
ctcaaaaattaaccacctaacataacatttttttctctctctctccaccc

SEQ ID NO: 35832 - DNA, 50 bp, synthetic construct
  source 1..50: mol_type = other DNA
aaaaaattaactaaacatacacctataattctaaccactaaaaaaactac

SEQ ID NO: 35833 - DNA, 50 bp, synthetic construct
  source 1..50: mol_type = other DNA
acaataatataatcataactcactacaacctccaactcctaaacttaaac

SEQ ID NO: 35834 - DNA, 50 bp, synthetic construct
  source 1..50: mol_type = other DNA
ctcacttccataaaaataatttcrtttcrtttcaataacaaattctcrcc

SEQ ID NO: 35835 - DNA, 50 bp, synthetic construct
  source 1..50: mol_type = other DNA
aatctcacttccataaaaataatttcrtttcrtttcaataacaaattctc

SEQ ID NO: 35836 - DNA, 50 bp, synthetic construct
  source 1..50: mol_type = other DNA
aatcccaccctaccttctaaatctcacttccataaaaataatttcrtttc

SEQ ID NO: 35837 - DNA, 50 bp, synthetic construct
  source 1..50: mol_type = other DNA
acttaaatcccaccctaccttctaaatctcacttccataaaaataatttc

SEQ ID NO: 35838 - DNA, 50 bp, synthetic construct
  source 1..50: mol_type = other DNA
cctaattccaataaaactttatttacaaatcaaacaatcracccrtaaac

SEQ ID NO: 35839 - DNA, 50 bp, synthetic construct
  source 1..50: mol_type = other DNA
cctaaccctaattccaataaaactttatttacaaatcaaacaatcraccc

SEQ ID NO: 35840 - DNA, 50 bp, synthetic construct
  source 1..50: mol_type = other DNA
atattcctaaccctaattccaataaaactttatttacaaatcaaacaatc

SEQ ID NO: 35841 - DNA, 50 bp, synthetic construct
  source 1..50: mol_type = other DNA
atataataaattcttacaattaaatcaaaaattataccctacataccttc

SEQ ID NO: 35842 - DNA, 50 bp, synthetic construct
  source 1..50: mol_type = other DNA
aaactatattcttattattaaataaactaaactaaccacrcccacaccac

SEQ ID NO: 35843 - DNA, 50 bp, synthetic construct
  source 1..50: mol_type = other DNA
taaataatttctatctccratatcaataaccaataacaataaaaataacc

SEQ ID NO: 35844 - DNA, 50 bp, synthetic construct
  source 1..50: mol_type = other DNA
crccraaaactcttttaccctaaatatctacctaaataatttctatctcc

SEQ ID NO: 35845 - DNA, 50 bp, synthetic construct
  source 1..50: mol_type = other DNA
attctctacctaaactataccatattacccatttctttattactatacac

SEQ ID NO: 35846 - DNA, 50 bp, synthetic construct
  source 1..50: mol_type = other DNA
cacaaaatataaatctcracacccccaccccaatcttttattatacaaac

SEQ ID NO: 35847 - DNA, 50 bp, synthetic construct
  source 1..50: mol_type = other DNA
taaaaaactaattaaacccaaatataccattaacacaaaatataaatctc

SEQ ID NO: 35848 - DNA, 50 bp, synthetic construct
  source 1..50: mol_type = other DNA
cactacaaatccaacaacccatttttccaaaacccctcttataacaaaac

SEQ ID NO: 35849 - DNA, 50 bp, synthetic construct
  source 1..50: mol_type = other DNA
aaatttctactcttcacctcactctttataaatccctatccttaatctcc

SEQ ID NO: 35850 - DNA, 50 bp, synthetic construct
  source 1..50: mol_type = other DNA
aaaaaacrcrataaaaaaacaaacttatctaaaaataacacccraaactc

SEQ ID NO: 35851 - DNA, 50 bp, synthetic construct
  source 1..50: mol_type = other DNA
catactccaactacttaacacaaaacctaacaaccactaaaacaaaaaac

SEQ ID NO: 35852 - DNA, 50 bp, synthetic construct
  source 1..50: mol_type = other DNA
ccctacctcaataactaccaaatcctataccaaacaattaaaacatactc

SEQ ID NO: 35853 - DNA, 50 bp, synthetic construct
  source 1..50: mol_type = other DNA
tcrccacaacttccaccctaactactatttttactaaaccaactaatttc

SEQ ID NO: 35854 - DNA, 50 bp, synthetic construct
  source 1..50: mol_type = other DNA
cacaacttccaccctaactactatttttactaaaccaactaatttcratc

SEQ ID NO: 35855 - DNA, 50 bp, synthetic construct
  source 1..50: mol_type = other DNA
aatcccattaaaaacaaaacccaaccttataacaaaaccctacaaaatcc

SEQ ID NO: 35856 - DNA, 50 bp, synthetic construct
  source 1..50: mol_type = other DNA
attaaaaacaaaacccaaccttataacaaaaccctacaaaatccracccc

SEQ ID NO: 35857 - DNA, 50 bp, synthetic construct
  source 1..50: mol_type = other DNA
ctcactaataccraccacaccaaccttactatcraaaatatttcttcttc

SEQ ID NO: 35858 - DNA, 50 bp, synthetic construct
  source 1..50: mol_type = other DNA
tttatcaacaatataaaaacraactaatacactaatactcactatacrcc

SEQ ID NO: 35859 - DNA, 50 bp, synthetic construct
  source 1..50: mol_type = other DNA
atctttatcaacaatataaaaacraactaatacactaatactcactatac

SEQ ID NO: 35860 - DNA, 50 bp, synthetic construct
  source 1..50: mol_type = other DNA
ctttataaattacccaatctcaaatatatctttatcaacaatataaaaac

SEQ ID NO: 35861 - DNA, 50 bp, synthetic construct
  source 1..50: mol_type = other DNA
ctattaaatctccaatacccracrcataataaatactaatatattaatcc

SEQ ID NO: 35862 - DNA, 50 bp, synthetic construct
  source 1..50: mol_type = other DNA
taaatactaatatattaatccrttctcacactactaataaaaacataccc

SEQ ID NO: 35863 - DNA, 50 bp, synthetic construct
  source 1..50: mol_type = other DNA
ctaatatattaatccrttctcacactactaataaaaacatacccraaacc

SEQ ID NO: 35864 - DNA, 50 bp, synthetic construct
  source 1..50: mol_type = other DNA
aaaacacaaccaaaccctatcaactaaaaatttattaacttaatacacac

SEQ ID NO: 35865 - DNA, 50 bp, synthetic construct
  source 1..50: mol_type = other DNA
aaacaactaaaatttaaaccctatcctctctaactacraaaataaacctc

SEQ ID NO: 35866 - DNA, 50 bp, synthetic construct
  source 1..50: mol_type = other DNA
aaaacacaaacaaaaaaccaaacaatatactaacttcraaattcatcttc

SEQ ID NO: 35867 - DNA, 50 bp, synthetic construct
  source 1..50: mol_type = other DNA
tctctctaaatatcactttctcatctaaaaacaaaatttataatactaac

SEQ ID NO: 35868 - DNA, 50 bp, synthetic construct
  source 1..50: mol_type = other DNA
actctactacttatataacctttcaacaaattatttaacctctcaacctc

SEQ ID NO: 35869 - DNA, 50 bp, synthetic construct
  source 1..50: mol_type = other DNA
aacraaacaaccrcttcttaaacracctaaaactaataaaacaaaatacc

SEQ ID NO: 35870 - DNA, 50 bp, synthetic construct
  source 1..50: mol_type = other DNA
ttttcaaaaacaactaatcrattaaaactattacrccraacaatcataac

SEQ ID NO: 35871 - DNA, 50 bp, synthetic construct
  source 1..50: mol_type = other DNA
craaacatcrcracaattttcaaaaacaactaatcrattaaaactattac

SEQ ID NO: 35872 - DNA, 50 bp, synthetic construct
  source 1..50: mol_type = other DNA
raaaaaatcccaaaattaccraaaaaatcccaaaatttccraaacraacc

SEQ ID NO: 35873 - DNA, 50 bp, synthetic construct
  source 1..50: mol_type = other DNA
taaccraaaaaatcccaaaattaccraaaaaatcccaaaatttccraaac

SEQ ID NO: 35874 - DNA, 50 bp, synthetic construct
  source 1..50: mol_type = other DNA
aaaaattaaaaaacrtaaccacttacaaaccraaaatatccraaataaac

SEQ ID NO: 35875 - DNA, 50 bp, synthetic construct
  source 1..50: mol_type = other DNA
cccttcctacaaaaaacctcaaacttcaaaaaaccraaaaattaaaaaac

SEQ ID NO: 35876 - DNA, 50 bp, synthetic construct
  source 1..50: mol_type = other DNA
acraaaccacaaaaacccttcctacaaaaaacctcaaacttcaaaaaacc

SEQ ID NO: 35877 - DNA, 50 bp, synthetic construct
  source 1..50: mol_type = other DNA
tctaaaacctaaaattccctacaaaaaaaactcttataaccccrccttcc

SEQ ID NO: 35878 - DNA, 50 bp, synthetic construct
  source 1..50: mol_type = other DNA
cctaacacttaaaaaaatatcraaaacataattcattatctaacccttcc

SEQ ID NO: 35879 - DNA, 50 bp, synthetic construct
  source 1..50: mol_type = other DNA
atactcatacaaatcaaaatcraaaaaatcaaacaataaaccatatttcc

SEQ ID NO: 35880 - DNA, 50 bp, synthetic construct
  source 1..50: mol_type = other DNA
aaaaactaaaaaaatttaattattcccaattcaatttaaattctatctcc

SEQ ID NO: 35881 - DNA, 50 bp, synthetic construct
  source 1..50: mol_type = other DNA
ttcattacaaaacttataataacacaaactataacaaattcttacaatac

SEQ ID NO: 35882 - DNA, 50 bp, synthetic construct
  source 1..50: mol_type = other DNA
crcacacataaataaataaactacctatcccccttataacactactaacc

SEQ ID NO: 35883 - DNA, 50 bp, synthetic construct
  source 1..50: mol_type = other DNA
acaaattaccaaaaaacccacaatataatatcatttatattaaaaaaaac

SEQ ID NO: 35884 - DNA, 50 bp, synthetic construct
  source 1..50: mol_type = other DNA
tctttatcactaactaatatttctcaaaatcctttaattacttctttttc

SEQ ID NO: 35885 - DNA, 50 bp, synthetic construct
  source 1..50: mol_type = other DNA
aatttaaacaccaccacataccaaacactacrctaaacttaaaataaacc

SEQ ID NO: 35886 - DNA, 50 bp, synthetic construct
  source 1..50: mol_type = other DNA
aaaaaaaaaataccccaatcactaatccacacttatctaacctccccaac

SEQ ID NO: 35887 - DNA, 50 bp, synthetic construct
  source 1..50: mol_type = other DNA
ctaaaaaaaacacaccaacaaaccatcctccctaataaaaaaccccacac

SEQ ID NO: 35888 - DNA, 50 bp, synthetic construct
  source 1..50: mol_type = other DNA
aaatacctaaacccraataaacrctacaacaaataaaaaaccacttttcc

SEQ ID NO: 35889 - DNA, 50 bp, synthetic construct
  source 1..50: mol_type = other DNA
ccatttcttcatctacaaaccaaaaacaactacacttacctaaaactatc

SEQ ID NO: 35890 - DNA, 50 bp, synthetic construct
  source 1..50: mol_type = other DNA
cccaatactatattaaaatctccttctctatcccctctctacaaaatcac

SEQ ID NO: 35891 - DNA, 50 bp, synthetic construct
  source 1..50: mol_type = other DNA
ttaccactcraaactaaaactctatttttctctctacattcaaaaacctc

SEQ ID NO: 35892 - DNA, 50 bp, synthetic construct
  source 1..50: mol_type = other DNA
aacaccactctttcaaaactatatttcaaacatcctatttcctaatcacc

SEQ ID NO: 35893 - DNA, 50 bp, synthetic construct
  source 1..50: mol_type = other DNA
caaactctaaaaactctaaaactaccttaaaacaataacaacaactcctc

SEQ ID NO: 35894 - DNA, 50 bp, synthetic construct
  source 1..50: mol_type = other DNA
ccctctactctaaaaatcacacaaaaaaccaaaaatacacrattctcctc

SEQ ID NO: 35895 - DNA, 50 bp, synthetic construct
  source 1..50: mol_type = other DNA
acraaaacttccctctactctaaaaatcacacaaaaaaccaaaaatacac

SEQ ID NO: 35896 - DNA, 50 bp, synthetic construct
  source 1..50: mol_type = other DNA
ttaacaacacaaacacaaatcacaacttattataccacrtaacaccttcc

SEQ ID NO: 35897 - DNA, 50 bp, synthetic construct
  source 1..50: mol_type = other DNA
tactaaaaatttaatctaaaataaacaatttttctaacaccttaaaaccc

SEQ ID NO: 35898 - DNA, 50 bp, synthetic construct
  source 1..50: mol_type = other DNA
ctccaaactcaatttccacatctataaaataaaaataataataacaacac

SEQ ID NO: 35899 - DNA, 50 bp, synthetic construct
  source 1..50: mol_type = other DNA
tcaaactttctctatatcaacaataaaactattttactttcttatcactc

SEQ ID NO: 35900 - DNA, 50 bp, synthetic construct
  source 1..50: mol_type = other DNA
tctatatcaacaataaaactattttactttcttatcactcrtatattcac

SEQ ID NO: 35901 - DNA, 50 bp, synthetic construct
  source 1..50: mol_type = other DNA
aactaaacatttattacaaaaaacctaactttcatcctatctcaactttc

SEQ ID NO: 35902 - DNA, 50 bp, synthetic construct
  source 1..50: mol_type = other DNA
actttcatcctatctcaactttcracataccttcctcactaaacttaatc

SEQ ID NO: 35903 - DNA, 50 bp, synthetic construct
  source 1..50: mol_type = other DNA
ctcactaaacttaatcrtttctaacttttaatttaaaataaaaaccatac

SEQ ID NO: 35904 - DNA, 50 bp, synthetic construct
  source 1..50: mol_type = other DNA
accattattaaattataaattaacccaatttcaatactcttatatttcac

SEQ ID NO: 35905 - DNA, 50 bp, synthetic construct
  source 1..50: mol_type = other DNA
crtaaacttaattccaaatcaccrcaataaaacaaatacaaaaaaacctc

SEQ ID NO: 35906 - DNA, 50 bp, synthetic construct
  source 1..50: mol_type = other DNA
caatatacraacacaccttaaaaatatcrtaaacttaattccaaatcacc

SEQ ID NO: 35907 - DNA, 50 bp, synthetic construct
  source 1..50: mol_type = other DNA
craaatcttcctatatttactttattacrataatctaaaaccaaacccac

SEQ ID NO: 35908 - DNA, 50 bp, synthetic construct
  source 1..50: mol_type = other DNA
tttattacrataatctaaaaccaaacccacratatctccaaaatataccc

SEQ ID NO: 35909 - DNA, 50 bp, synthetic construct
  source 1..50: mol_type = other DNA
ctaataattctcaaactctaaaattccaccaactaaaaaatctccctccc

SEQ ID NO: 35910 - DNA, 50 bp, synthetic construct
  source 1..50: mol_type = other DNA
ataaataaaatcaactttccrtaaacaaatattacatcracaatccaaac

SEQ ID NO: 35911 - DNA, 50 bp, synthetic construct
  source 1..50: mol_type = other DNA
aaaaacttcaacataaataaaatcaactttccrtaaacaaatattacatc

SEQ ID NO: 35912 - DNA, 50 bp, synthetic construct
  source 1..50: mol_type = other DNA
cratatacaaaatcaccaacrcttaaattatcratataacatttactcac

SEQ ID NO: 35913 - DNA, 50 bp, synthetic construct
  source 1..50: mol_type = other DNA
attaatatattccctcaaaaaaaacraactaccaaaaaactacrtactac

SEQ ID NO: 35914 - DNA, 50 bp, synthetic construct
  source 1..50: mol_type = other DNA
aaactatattaatatattccctcaaaaaaaacraactaccaaaaaactac

SEQ ID NO: 35915 - DNA, 50 bp, synthetic construct
  source 1..50: mol_type = other DNA
aaaaacatctatttatattattactactattttaacactaaccactcatc

SEQ ID NO: 35916 - DNA, 50 bp, synthetic construct
  source 1..50: mol_type = other DNA
aatatcaaaacaacaacaacaacataaacaaatactccttcctttcaacc

SEQ ID NO: 35917 - DNA, 50 bp, synthetic construct
  source 1..50: mol_type = other DNA
ataaacaaatactccttcctttcaaccraacaaataaaaaaaccctatac

SEQ ID NO: 35918 - DNA, 50 bp, synthetic construct
  source 1..50: mol_type = other DNA
caaataaaaaaaccctatacrtcattcctcaaacaccaaaaaataccacc

SEQ ID NO: 35919 - DNA, 50 bp, synthetic construct
  source 1..50: mol_type = other DNA
cctaaaaacrcaactcaaaattaacataaactcacaatctcraacaaaac

SEQ ID NO: 35920 - DNA, 50 bp, synthetic construct
  source 1..50: mol_type = other DNA
acctatttccctaaaaacrcaactcaaaattaacataaactcacaatctc

SEQ ID NO: 35921 - DNA, 50 bp, synthetic construct
  source 1..50: mol_type = other DNA
atccacacaacaacrtcaacacrattaaacttcaatttatccaaacaatc

SEQ ID NO: 35922 - DNA, 50 bp, synthetic construct
  source 1..50: mol_type = other DNA
tcactataaacaacrattatctaaataaactaaaatttaaccrtactaac

SEQ ID NO: 35923 - DNA, 50 bp, synthetic construct
  source 1..50: mol_type = other DNA
ataaatttaaatcaacaaatataataatcctaaatcaccctaaaaatatc

SEQ ID NO: 35924 - DNA, 50 bp, synthetic construct
  source 1..50: mol_type = other DNA
caaatataataatcctaaatcaccctaaaaatatcrtaaacaacaaacac

SEQ ID NO: 35925 - DNA, 50 bp, synthetic construct
  source 1..50: mol_type = other DNA
aacacatccaaaaactaaacctaaaacacrccccaaaataactatcatcc

SEQ ID NO: 35926 - DNA, 50 bp, synthetic construct
  source 1..50: mol_type = other DNA
caaaaaacaaacraattcttaccctaatatcaaacccctataaacaaaac

SEQ ID NO: 35927 - DNA, 50 bp, synthetic construct
  source 1..50: mol_type = other DNA
atccaaacaaacrtcttacttacaaaaatttaacattaaaacaaaaactc

SEQ ID NO: 35928 - DNA, 50 bp, synthetic construct
  source 1..50: mol_type = other DNA
ataattttttaaacaactttaattcttctctacttccttaactccaaccc

SEQ ID NO: 35929 - DNA, 50 bp, synthetic construct
  source 1..50: mol_type = other DNA
ctttctttaaccaactttaaaatttactactattatcctaaaaccccctc

SEQ ID NO: 35930 - DNA, 50 bp, synthetic construct
  source 1..50: mol_type = other DNA
acaaaactctaaacaactcaacctaatttaaataaaataaatcaaaaccc

SEQ ID NO: 35931 - DNA, 50 bp, synthetic construct
  source 1..50: mol_type = other DNA
tctaaaaaatctaaacccaaacactccatatatactctcaaaaaaaaccc

SEQ ID NO: 35932 - DNA, 50 bp, synthetic construct
  source 1..50: mol_type = other DNA
tttctccactattaataacaaaaaacatcctttctttttatacataaaac

SEQ ID NO: 35933 - DNA, 50 bp, synthetic construct
  source 1..50: mol_type = other DNA
caaaaatacrccttaatactctattaaaaatacaaacaaaaccaaaaaac

SEQ ID NO: 35934 - DNA, 50 bp, synthetic construct
  source 1..50: mol_type = other DNA
tataacracrttccctaaccctacctacattttcaacaaaacatcaaaac

SEQ ID NO: 35935 - DNA, 50 bp, synthetic construct
  source 1..50: mol_type = other DNA
aaaaacaaaaactaactaaacttaataacttatatctataattcccrcac

SEQ ID NO: 35936 - DNA, 50 bp, synthetic construct
  source 1..50: mol_type = other DNA
cattaaaaacaaaaactaactaaacttaataacttatatctataattccc

SEQ ID NO: 35937 - DNA, 50 bp, synthetic construct
  source 1..50: mol_type = other DNA
aaaaattcctataataatctaaaattctatttttcctaacaattcaatcc

SEQ ID NO: 35938 - DNA, 50 bp, synthetic construct
  source 1..50: mol_type = other DNA
aaacatttttatatttacacaaacacctatccrtctacaatttataccac

SEQ ID NO: 35939 - DNA, 50 bp, synthetic construct
  source 1..50: mol_type = other DNA
ccccaaactactccctaaaaacatttttatatttacacaaacacctatcc

SEQ ID NO: 35940 - DNA, 50 bp, synthetic construct
  source 1..50: mol_type = other DNA
ttaataactatttacaaacttataaacaacctttttattttacctttacc

SEQ ID NO: 35941 - DNA, 50 bp, synthetic construct
  source 1..50: mol_type = other DNA
taaccacccccaacaaaacctaaaaattaacaataaattttacaaaaccc

SEQ ID NO: 35942 - DNA, 50 bp, synthetic construct
  source 1..50: mol_type = other DNA
caaaaaattctaaaacatattccctttttaaatctctactatacaataac

SEQ ID NO: 35943 - DNA, 50 bp, synthetic construct
  source 1..50: mol_type = other DNA
ttctaactcaaatctttaaactattaattataaaaataactaaacttaac

SEQ ID NO: 35944 - DNA, 50 bp, synthetic construct
  source 1..50: mol_type = other DNA
ttctaccatctttattccttttaaaaaaaacaaatctaccaaacaaaaac

SEQ ID NO: 35945 - DNA, 50 bp, synthetic construct
  source 1..50: mol_type = other DNA
aaactaaaataaaaaaaccccattaaactactctaaaaaccaatactacc

SEQ ID NO: 35946 - DNA, 50 bp, synthetic construct
  source 1..50: mol_type = other DNA
tccctaaaaacaatatctaatcataaaactcctaatttaataccttcaac

SEQ ID NO: 35947 - DNA, 50 bp, synthetic construct
  source 1..50: mol_type = other DNA
ccaaaaatcttataattaaatattacttctaaaaaaaccacaaaaacctc

SEQ ID NO: 35948 - DNA, 50 bp, synthetic construct
  source 1..50: mol_type = other DNA
actaaactaacctaccttacacaaacttttctcaacttaaaatataatac

SEQ ID NO: 35949 - DNA, 50 bp, synthetic construct
  source 1..50: mol_type = other DNA
ataatcttttttctttcaaataaatatccaataacccactttctaacacc

SEQ ID NO: 35950 - DNA, 50 bp, synthetic construct
  source 1..50: mol_type = other DNA
aaactaacataaaaaccaaaaaccctaatattcccccactcattaaaacc

SEQ ID NO: 35951 - DNA, 50 bp, synthetic construct
  source 1..50: mol_type = other DNA
tatcctattaataacrtaacaactaaaaaaatcttttacaatcctaaacc

SEQ ID NO: 35952 - DNA, 50 bp, synthetic construct
  source 1..50: mol_type = other DNA
actccatacrtataaactatcrttattacaactcttaatccaataaaaac

SEQ ID NO: 35953 - DNA, 50 bp, synthetic construct
  source 1..50: mol_type = other DNA
ctatcrttattacaactcttaatccaataaaaacrctaaaaaccaaaaac

SEQ ID NO: 35954 - DNA, 50 bp, synthetic construct
  source 1..50: mol_type = other DNA
acaatataaaattccaaactaacatattcccactaccttaaacattttac

SEQ ID NO: 35955 - DNA, 50 bp, synthetic construct
  source 1..50: mol_type = other DNA
ccaaaacaataaaaacatatcaatctaaaattccacactacactatcaac

SEQ ID NO: 35956 - DNA, 50 bp, synthetic construct
  source 1..50: mol_type = other DNA
caatctaaaattccacactacactatcaacrccttttcaaaaaaaattcc

SEQ ID NO: 35957 - DNA, 50 bp, synthetic construct
  source 1..50: mol_type = other DNA
atttaaaccaacctccataatatcccaaccratccaaaaaaactactacc

SEQ ID NO: 35958 - DNA, 50 bp, synthetic construct
  source 1..50: mol_type = other DNA
aaccaaccattctcctcraactaacctttaaattaacatattctaacaac

SEQ ID NO: 35959 - DNA, 50 bp, synthetic construct
  source 1..50: mol_type = other DNA
acatatcaactcaaaaattaacccraaaaaaataactaactaaaaactac

SEQ ID NO: 35960 - DNA, 50 bp, synthetic construct
  source 1..50: mol_type = other DNA
aactcaaaaattaacccraaaaaaataactaactaaaaactacracccac

SEQ ID NO: 35961 - DNA, 50 bp, synthetic construct
  source 1..50: mol_type = other DNA
aattaactcaactaatcccaactaacaaccaactacctatactataatcc

SEQ ID NO: 35962 - DNA, 50 bp, synthetic construct
  source 1..50: mol_type = other DNA
accctaaacaaaaactaaaaccaacttaatcctaatcaacacccaaaacc

SEQ ID NO: 35963 - DNA, 50 bp, synthetic construct
  source 1..50: mol_type = other DNA
caaaaccttaccttaccacrtaaatctaacctaaacaatatcttctatcc

SEQ ID NO: 35964 - DNA, 50 bp, synthetic construct
  source 1..50: mol_type = other DNA
atatcttctatccrtcacaacctaatcctctaccaaaacttaataaaatc

SEQ ID NO: 35965 - DNA, 50 bp, synthetic construct
  source 1..50: mol_type = other DNA
cacaaacraccraatataaacacaaattaataaatcacccaaaaaccatc

SEQ ID NO: 35966 - DNA, 50 bp, synthetic construct
  source 1..50: mol_type = other DNA
cctcaccctacrataactcttaaataactcatcaatttatacttatatcc

SEQ ID NO: 35967 - DNA, 50 bp, synthetic construct
  source 1..50: mol_type = other DNA
accctacrataactcttaaataactcatcaatttatacttatatccratc

SEQ ID NO: 35968 - DNA, 50 bp, synthetic construct
  source 1..50: mol_type = other DNA
aacraaaataacaataaaccraaattacaccattacactccaaccaaaac

SEQ ID NO: 35969 - DNA, 50 bp, synthetic construct
  source 1..50: mol_type = other DNA
tccaaaattaattttacttttctattttaattaccttaaacttactctac

SEQ ID NO: 35970 - DNA, 50 bp, synthetic construct
  source 1..50: mol_type = other DNA
aattaaatctcaacttatttttctataaaaatactaatacctactttatc

SEQ ID NO: 35971 - DNA, 50 bp, synthetic construct
  source 1..50: mol_type = other DNA
ctaacatatacttaatataaaaacaatatctaaaactaactaattacccc

SEQ ID NO: 35972 - DNA, 50 bp, synthetic construct
  source 1..50: mol_type = other DNA
caatataacaatcataactcactacaaccttaaacctcccaaaatcaaac

SEQ ID NO: 35973 - DNA, 50 bp, synthetic construct
  source 1..50: mol_type = other DNA
tataaaaaaatataaactctaccatatactacaaaaaaacatattttaac

SEQ ID NO: 35974 - DNA, 50 bp, synthetic construct
  source 1..50: mol_type = other DNA
attcataaacaaataaaactctaaaacaataaaacttctaaaaatataac

SEQ ID NO: 35975 - DNA, 50 bp, synthetic construct
  source 1..50: mol_type = other DNA
tttaacaccacaaacaaaactacaacraataaatcaacttatctaaactc

SEQ ID NO: 35976 - DNA, 50 bp, synthetic construct
  source 1..50: mol_type = other DNA
aaccacttaaattatttcccaaattttaacaccacaaacaaaactacaac

SEQ ID NO: 35977 - DNA, 50 bp, synthetic construct
  source 1..50: mol_type = other DNA
ttatccctctactaataaatacaaataaaatctataaaccaacaaaaaac

SEQ ID NO: 35978 - DNA, 50 bp, synthetic construct
  source 1..50: mol_type = other DNA
ccaaataccttaaataaataaccccattccctaccctaccttaaaaaacc

SEQ ID NO: 35979 - DNA, 50 bp, synthetic construct
  source 1..50: mol_type = other DNA
caaaaaaacacaataaacaataaaaccatcaccacccactatttatattc

SEQ ID NO: 35980 - DNA, 50 bp, synthetic construct
  source 1..50: mol_type = other DNA
ccactatttatattcrataaaatttctttccaaacattttacaaatatac

SEQ ID NO: 35981 - DNA, 50 bp, synthetic construct
  source 1..50: mol_type = other DNA
tccttaaaatcaaacccacattactatcrctactactaacaaaaaccatc

SEQ ID NO: 35982 - DNA, 50 bp, synthetic construct
  source 1..50: mol_type = other DNA
acctctaccttcaacaaataaatccttaaaatcaaacccacattactatc

SEQ ID NO: 35983 - DNA, 50 bp, synthetic construct
  source 1..50: mol_type = other DNA
taaaacaacaccaaccccacaattcaccaaactacaaaaataaaaaactc

SEQ ID NO: 35984 - DNA, 50 bp, synthetic construct
  source 1..50: mol_type = other DNA
catctaaacccttatctcacacctactattatcataattcctcaaaactc

SEQ ID NO: 35985 - DNA, 50 bp, synthetic construct
  source 1..50: mol_type = other DNA
actaacctcaataatcaaacacactaaataaatctataattaacataacc

SEQ ID NO: 35986 - DNA, 50 bp, synthetic construct
  source 1..50: mol_type = other DNA
raacrttcatttctaacatccacttatctccttactaaaatcaccaaacc

SEQ ID NO: 35987 - DNA, 50 bp, synthetic construct
  source 1..50: mol_type = other DNA
ccaaaaaacacaatatcaatataaaaccracacccaacaatatctcraac

SEQ ID NO: 35988 - DNA, 50 bp, synthetic construct
  source 1..50: mol_type = other DNA
taaaccaaaaaacacaatatcaatataaaaccracacccaacaatatctc

SEQ ID NO: 35989 - DNA, 50 bp, synthetic construct
  source 1..50: mol_type = other DNA
aaaaactaataaattaattaaaccaaaaaacacaatatcaatataaaacc

SEQ ID NO: 35990 - DNA, 50 bp, synthetic construct
  source 1..50: mol_type = other DNA
accctactaacctcctaaaaaaaaatttcaactacaaaaataccaaaacc

SEQ ID NO: 35991 - DNA, 50 bp, synthetic construct
  source 1..50: mol_type = other DNA
tcctaaaaaaaaatttcaactacaaaaataccaaaaccrcttactacaac

SEQ ID NO: 35992 - DNA, 50 bp, synthetic construct
  source 1..50: mol_type = other DNA
acaaaaacatcaacracaaattaaaaacccaaaactccaaccttcctctc

SEQ ID NO: 35993 - DNA, 50 bp, synthetic construct
  source 1..50: mol_type = other DNA
ttaaaaacttttaatccatactcratattccctttaaaaatatcttatcc

SEQ ID NO: 35994 - DNA, 50 bp, synthetic construct
  source 1..50: mol_type = other DNA
tatctaacaaaataacaatccaccacraccaacttccccttaaaaattcc

SEQ ID NO: 35995 - DNA, 50 bp, synthetic construct
  source 1..50: mol_type = other DNA
cccaactaaaacraccataaaattacrcaaacraaatctataaaaaaacc

SEQ ID NO: 35996 - DNA, 50 bp, synthetic construct
  source 1..50: mol_type = other DNA
caaaataaccccataaaacccaactaaaacraccataaaattacrcaaac

SEQ ID NO: 35997 - DNA, 50 bp, synthetic construct
  source 1..50: mol_type = other DNA
aaaccacaaaataaccccataaaacccaactaaaacraccataaaattac

SEQ ID NO: 35998 - DNA, 50 bp, synthetic construct
  source 1..50: mol_type = other DNA
taatccttaaacrcaaaccacaaaataaccccataaaacccaactaaaac

SEQ ID NO: 35999 - DNA, 50 bp, synthetic construct
  source 1..50: mol_type = other DNA
tacrattccaactttaacrcaaacctattactacratataatccttaaac

SEQ ID NO: 36000 - DNA, 50 bp, synthetic construct
  source 1..50: mol_type = other DNA
caactaaatctcataaaaccaccctataacctacrttcaaaaaccacatc

SEQ ID NO: 36001 - DNA, 50 bp, synthetic construct
  source 1..50: mol_type = other DNA
ctaataaatccccccaaaccraatctactaaatacrattccaactttaac

SEQ ID NO: 36002 - DNA, 50 bp, synthetic construct
  source 1..50: mol_type = other DNA
acrtaacactaaaaaaattttctctacattccaaacctcaatatctccac

SEQ ID NO: 36003 - DNA, 50 bp, synthetic construct
  source 1..50: mol_type = other DNA
aaacraaaaaaacactaaataataaatcaataaactcataactccaccac

SEQ ID NO: 36004 - DNA, 50 bp, synthetic construct
  source 1..50: mol_type = other DNA
ataaatttactaactcactacccaatactctttccrctcaaaacaacctc

SEQ ID NO: 36005 - DNA, 50 bp, synthetic construct
  source 1..50: mol_type = other DNA
tttacaaaacaactattaaccatacatacaacaacccraataaaaaaaac

SEQ ID NO: 36006 - DNA, 50 bp, synthetic construct
  source 1..50: mol_type = other DNA
aaaaaatatttaatttacaaaacaactattaaccatacatacaacaaccc

SEQ ID NO: 36007 - DNA, 50 bp, synthetic construct
  source 1..50: mol_type = other DNA
aactatcctaaatccaaaaacataaaaacaataacccaaaaacratttac

SEQ ID NO: 36008 - DNA, 50 bp, synthetic construct
  source 1..50: mol_type = other DNA
ataataataataaccttacccctaaatctttccaacctcttacrtaaatc

SEQ ID NO: 36009 - DNA, 50 bp, synthetic construct
  source 1..50: mol_type = other DNA
ataactcacacctttccaaaaacactaaatttacatataattatctcatc

SEQ ID NO: 36010 - DNA, 50 bp, synthetic construct
  source 1..50: mol_type = other DNA
aaaaatataaatcatacatcacraaacaaaaaattcacaaccaaaaatcc

SEQ ID NO: 36011 - DNA, 50 bp, synthetic construct
  source 1..50: mol_type = other DNA
aactaaccacaaactacaaataaatcaactttacaataaacaaactccac

SEQ ID NO: 36012 - DNA, 50 bp, synthetic construct
  source 1..50: mol_type = other DNA
catcaactcacraatatactcttcaactctaaaaatacracactcaaaac

SEQ ID NO: 36013 - DNA, 50 bp, synthetic construct
  source 1..50: mol_type = other DNA
caaattaaattaaattttctattacttacaaccaaaacrtcctaaatacc

SEQ ID NO: 36014 - DNA, 50 bp, synthetic construct
  source 1..50: mol_type = other DNA
aaaaaattaaccacataatacrctaaaaaatcttactaacatcaactcac

SEQ ID NO: 36015 - DNA, 50 bp, synthetic construct
  source 1..50: mol_type = other DNA
ataacaaaattcttccattacatatcacaaaaattaattctaatcaaacc

SEQ ID NO: 36016 - DNA, 50 bp, synthetic construct
  source 1..50: mol_type = other DNA
aaaaaaaacaacacacaaaatcacaaaaaccctaactccaccaccaactc

SEQ ID NO: 36017 - DNA, 50 bp, synthetic construct
  source 1..50: mol_type = other DNA
tccaccaccaactcrctctataaccctataaaaataaattaaaaaaatac

SEQ ID NO: 36018 - DNA, 50 bp, synthetic construct
  source 1..50: mol_type = other DNA
catatctaactaattcaaaaatacrtctcaacttattaaaatataactac

SEQ ID NO: 36019 - DNA, 50 bp, synthetic construct
  source 1..50: mol_type = other DNA
aaataaaaaaaaccrcatctccctactaccttacaaacctaaaaaaatcc

SEQ ID NO: 36020 - DNA, 50 bp, synthetic construct
  source 1..50: mol_type = other DNA
aactacrcatacccacaaaattcccaatacccttaaactataaccctaac

SEQ ID NO: 36021 - DNA, 50 bp, synthetic construct
  source 1..50: mol_type = other DNA
cctaaaaacactaaaaaccctataaacatacrcaattcaaacccatcccc

SEQ ID NO: 36022 - DNA, 50 bp, synthetic construct
  source 1..50: mol_type = other DNA
ataaaaaattataaacattccaaaaaattaactcaacaatcctaaactcc

SEQ ID NO: 36023 - DNA, 50 bp, synthetic construct
  source 1..50: mol_type = other DNA
ctctaaaaaaccaaataactcatctcttattaaacccttaaccacttccc

SEQ ID NO: 36024 - DNA, 50 bp, synthetic construct
  source 1..50: mol_type = other DNA
aaccatctaatcctccaaaaataaacaatttacaaaaaacacatcaaacc

SEQ ID NO: 36025 - DNA, 50 bp, synthetic construct
  source 1..50: mol_type = other DNA
aaaaaatctaacttttctacctccctacataaatcctaccccaaaaaaac

SEQ ID NO: 36026 - DNA, 50 bp, synthetic construct
  source 1..50: mol_type = other DNA
cctactatatatttcctaacccttaaatataacctacaccctccctttcc

SEQ ID NO: 36027 - DNA, 50 bp, synthetic construct
  source 1..50: mol_type = other DNA
ttacrataatattaatatataattccccccaaaaaaaacatataaaaaac

SEQ ID NO: 36028 - DNA, 50 bp, synthetic construct
  source 1..50: mol_type = other DNA
tattaatatataattccccccaaaaaaaacatataaaaaacrctatatac

SEQ ID NO: 36029 - DNA, 50 bp, synthetic construct
  source 1..50: mol_type = other DNA
caattttattttacctttacaaaaaatctatttcraatcactctaaaccc

SEQ ID NO: 36030 - DNA, 50 bp, synthetic construct
  source 1..50: mol_type = other DNA
acctcctacracaaaacaacaaatctaaaaaattacactaaacactcttc

SEQ ID NO: 36031 - DNA, 50 bp, synthetic construct
  source 1..50: mol_type = other DNA
acraaataaaataacttactaaaatcacacaaccratcaataacaaaaac

SEQ ID NO: 36032 - DNA, 50 bp, synthetic construct
  source 1..50: mol_type = other DNA
ccaaaacaaatcaaaaaaacctaaatcttttttcrtttctaccactaacc

SEQ ID NO: 36033 - DNA, 50 bp, synthetic construct
  source 1..50: mol_type = other DNA
ataaatattattaatatcctcattataccctaaaaaaacaacaactaaac

SEQ ID NO: 36034 - DNA, 50 bp, synthetic construct
  source 1..50: mol_type = other DNA
tcaaaatacaataaaaacaccaataatacttaccctacaaaaaacttacc

SEQ ID NO: 36035 - DNA, 50 bp, synthetic construct
  source 1..50: mol_type = other DNA
ataaaaacaccaataatacttaccctacaaaaaacttaccraaatttccc

SEQ ID NO: 36036 - DNA, 50 bp, synthetic construct
  source 1..50: mol_type = other DNA
cttatatatctactatacrccaaacactatataaacatttttaaaacrtc

SEQ ID NO: 36037 - DNA, 50 bp, synthetic construct
  source 1..50: mol_type = other DNA
ttccttatatatctactatacrccaaacactatataaacatttttaaaac

SEQ ID NO: 36038 - DNA, 50 bp, synthetic construct
  source 1..50: mol_type = other DNA
aaaacaacracaatcaacraaaataacacrcatacaaccaaaaacaaaac

SEQ ID NO: 36039 - DNA, 50 bp, synthetic construct
  source 1..50: mol_type = other DNA
aatccttttctaaccttaaaactcaatccrttctattcctaactacatac

SEQ ID NO: 36040 - DNA, 50 bp, synthetic construct
  source 1..50: mol_type = other DNA
ccacactacctataataataataaaaacrtaaaacttaaaaatctacccc

SEQ ID NO: 36041 - DNA, 50 bp, synthetic construct
  source 1..50: mol_type = other DNA
ccraaacataacctcaaaaatatactaaccactaaaccrataaaaaaatc

SEQ ID NO: 36042 - DNA, 50 bp, synthetic construct
  source 1..50: mol_type = other DNA
ccacaaaccaaaccraaacataacctcaaaaatatactaaccactaaacc

SEQ ID NO: 36043 - DNA, 50 bp, synthetic construct
  source 1..50: mol_type = other DNA
cacaataaattaacaaaaacaaatacttaaaaaactccacaaaccaaacc

SEQ ID NO: 36044 - DNA, 50 bp, synthetic construct
  source 1..50: mol_type = other DNA
acaaaataaataatattccaaaacccaaaacatacactcccctaaacccc

SEQ ID NO: 36045 - DNA, 50 bp, synthetic construct
  source 1..50: mol_type = other DNA
aaccctaaaatattacttattttacttttccaaaaaaacttcttaaaaac

SEQ ID NO: 36046 - DNA, 50 bp, synthetic construct
  source 1..50: mol_type = other DNA
tacttattttacttttccaaaaaaacttcttaaaaacrtctcaaatactc

SEQ ID NO: 36047 - DNA, 50 bp, synthetic construct
  source 1..50: mol_type = other DNA
aacaaaaaaaacrccttaatattccaaaaacaaacraaaccaaaccaacc

SEQ ID NO: 36048 - DNA, 50 bp, synthetic construct
  source 1..50: mol_type = other DNA
aaaaaaaacrccttaatattccaaaaacaaacraaaccaaaccaaccrac

SEQ ID NO: 36049 - DNA, 50 bp, synthetic construct
  source 1..50: mol_type = other DNA
aataaaaacaaactaactaactcaaaaatacccrtcatcaactcccatcc

SEQ ID NO: 36050 - DNA, 50 bp, synthetic construct
  source 1..50: mol_type = other DNA
ttttcataatacacrtataactttacaaatcacaccacaacctactacac

SEQ ID NO: 36051 - DNA, 50 bp, synthetic construct
  source 1..50: mol_type = other DNA
caataataaatatcaaactcrtacraaacaaaaccattttcataatacac

SEQ ID NO: 36052 - DNA, 50 bp, synthetic construct
  source 1..50: mol_type = other DNA
ataatataacttacaaaatcacacrtacaccataaaaataattttatctc

SEQ ID NO: 36053 - DNA, 50 bp, synthetic construct
  source 1..50: mol_type = other DNA
cttaactaatcacccaaaaataacataactcaataataaatatcaaactc

SEQ ID NO: 36054 - DNA, 50 bp, synthetic construct
  source 1..50: mol_type = other DNA
tctaaatcaaaataaaacccaaaaaaatcttcataactaccaataataac

SEQ ID NO: 36055 - DNA, 50 bp, synthetic construct
  source 1..50: mol_type = other DNA
caatcctataaatattcraaccacttcaaatatactttcttatcaacccc

SEQ ID NO: 36056 - DNA, 50 bp, synthetic construct
  source 1..50: mol_type = other DNA
tccctaactttaatacctaaaaataaataccatcaatcctataaatattc

SEQ ID NO: 36057 - DNA, 50 bp, synthetic construct
  source 1..50: mol_type = other DNA
aactttcttacctctcctaaaaaatacccrtaattatcctactaaaacac

SEQ ID NO: 36058 - DNA, 50 bp, synthetic construct
  source 1..50: mol_type = other DNA
ctttcttacctctcctaaaaaatacccrtaattatcctactaaaacacrc

SEQ ID NO: 36059 - DNA, 50 bp, synthetic construct
  source 1..50: mol_type = other DNA
aaccctaaatctaaaaaataacaatataaacatccacctattttcctacc

SEQ ID NO: 36060 - DNA, 50 bp, synthetic construct
  source 1..50: mol_type = other DNA
cataaccacaatctatcaaaaataaaatatacaattaaacrcttttaaac

SEQ ID NO: 36061 - DNA, 50 bp, synthetic construct
  source 1..50: mol_type = other DNA
caaaaacaaacataaccacaatctatcaaaaataaaatatacaattaaac

SEQ ID NO: 36062 - DNA, 50 bp, synthetic construct
  source 1..50: mol_type = other DNA
tcaactacacactttatctctaataaactataactatacctactcttaac

SEQ ID NO: 36063 - DNA, 50 bp, synthetic construct
  source 1..50: mol_type = other DNA
cacraaattcatcacaaatttatttcrttcccatattataacaaaattac

SEQ ID NO: 36064 - DNA, 50 bp, synthetic construct
  source 1..50: mol_type = other DNA
tatttcrttcccatattataacaaaattacrccataaatttacaaaaatc

SEQ ID NO: 36065 - DNA, 50 bp, synthetic construct
  source 1..50: mol_type = other DNA
tcrttcccatattataacaaaattacrccataaatttacaaaaatcracc

SEQ ID NO: 36066 - DNA, 50 bp, synthetic construct
  source 1..50: mol_type = other DNA
aaaatcraccractatataacattatttaaaaacctcatcttttcccacc

SEQ ID NO: 36067 - DNA, 50 bp, synthetic construct
  source 1..50: mol_type = other DNA
tttatttttataacrtacaaaatattccaataccttctcccccttcccac

SEQ ID NO: 36068 - DNA, 50 bp, synthetic construct
  source 1..50: mol_type = other DNA
rccacaaaaacaaaacaaaaacacaaccttcctacaaaaaaacatcacac

SEQ ID NO: 36069 - DNA, 50 bp, synthetic construct
  source 1..50: mol_type = other DNA
accccaatttaaatctcccctatctcttttttaaacatatataaatacac

SEQ ID NO: 36070 - DNA, 50 bp, synthetic construct
  source 1..50: mol_type = other DNA
ctctatatttataaactcatatctaccttcaaaaccaaaattacaaaaac

SEQ ID NO: 36071 - DNA, 50 bp, synthetic construct
  source 1..50: mol_type = other DNA
acraaaaaataatttaccaaaatcctcaaaaaccatatacttcraataac

SEQ ID NO: 36072 - DNA, 50 bp, synthetic construct
  source 1..50: mol_type = other DNA
taaaactacaaattatactatcacacacacctacrtcacccaaaaaaccc

SEQ ID NO: 36073 - DNA, 50 bp, synthetic construct
  source 1..50: mol_type = other DNA
tttacaaataacctttttaaacaaaaacracaataactcattccaaaccc

SEQ ID NO: 36074 - DNA, 50 bp, synthetic construct
  source 1..50: mol_type = other DNA
ccaaacacataacattctacccaatacatcrtaaaaactaaaaaaataac

SEQ ID NO: 36075 - DNA, 50 bp, synthetic construct
  source 1..50: mol_type = other DNA
actacttctcaaaatctttcaacttctcaactccaaatatcttttatatc

SEQ ID NO: 36076 - DNA, 50 bp, synthetic construct
  source 1..50: mol_type = other DNA
ctcttactaatttttactaatccttaatataaaacaaataatcataaatc

SEQ ID NO: 36077 - DNA, 50 bp, synthetic construct
  source 1..50: mol_type = other DNA
aataatcaaataaatacaacacacrttaaaaaataaaaccctaactaaac

SEQ ID NO: 36078 - DNA, 50 bp, synthetic construct
  source 1..50: mol_type = other DNA
aaccaaaaaattatctaaccattaatttttaatattacatattcacttcc

SEQ ID NO: 36079 - DNA, 50 bp, synthetic construct
  source 1..50: mol_type = other DNA
tattacatattcacttccratcaataaaataataaatcttatcattctac

SEQ ID NO: 36080 - DNA, 50 bp, synthetic construct
  source 1..50: mol_type = other DNA
acaaacrcacaccacaaaacccracaaattcttataattttaataaaaac

SEQ ID NO: 36081 - DNA, 50 bp, synthetic construct
  source 1..50: mol_type = other DNA
acttttatttcttcaatatatctttattaaactttcactaaataccaaac

SEQ ID NO: 36082 - DNA, 50 bp, synthetic construct
  source 1..50: mol_type = other DNA
acctctccaaaataaatttcttcraatcatttaatattcaacaaaaaacc

SEQ ID NO: 36083 - DNA, 50 bp, synthetic construct
  source 1..50: mol_type = other DNA
taacaatcataaactaaacaaataaactttatccraacrcrataactcac

SEQ ID NO: 36084 - DNA, 50 bp, synthetic construct
  source 1..50: mol_type = other DNA
cactctaaaacttcaaacaacctccaacaacatttaatatatatctaacc

SEQ ID NO: 36085 - DNA, 50 bp, synthetic construct
  source 1..50: mol_type = other DNA
ttaatcacaaaaaaaatcatttcataaactaaattacccraacaacttcc

SEQ ID NO: 36086 - DNA, 50 bp, synthetic construct
  source 1..50: mol_type = other DNA
aatcctaaccttaaacracttatttttcccctaataattaaaaaattaac

SEQ ID NO: 36087 - DNA, 50 bp, synthetic construct
  source 1..50: mol_type = other DNA
attatacttactaccctctaataatcaattatttaatcctaaccttaaac

SEQ ID NO: 36088 - DNA, 50 bp, synthetic construct
  source 1..50: mol_type = other DNA
aaccaaacactatcatttaaaaacaaattttcatttatcaaatctctttc

SEQ ID NO: 36089 - DNA, 50 bp, synthetic construct
  source 1..50: mol_type = other DNA
atttaaaattctatcctccttccaataaactctaacttctcctaatacac

SEQ ID NO: 36090 - DNA, 50 bp, synthetic construct
  source 1..50: mol_type = other DNA
aaaacttcaaacacacaccaaccctccaaaaaacaatcaaaaatactacc

SEQ ID NO: 36091 - DNA, 50 bp, synthetic construct
  source 1..50: mol_type = other DNA
aacataccataaatcctaacacataattaaaaatcraaaattacaacaac

SEQ ID NO: 36092 - DNA, 50 bp, synthetic construct
  source 1..50: mol_type = other DNA
aatcatacccaaactaactaaatttataactaaacrttattacaatttcc

SEQ ID NO: 36093 - DNA, 50 bp, synthetic construct
  source 1..50: mol_type = other DNA
tattacaatttccractcccaactatatatcaaaatttataatatattac

SEQ ID NO: 36094 - DNA, 50 bp, synthetic construct
  source 1..50: mol_type = other DNA
aaaaactttaaacacaaactccaattaactaaataatttctactaatacc

SEQ ID NO: 36095 - DNA, 50 bp, synthetic construct
  source 1..50: mol_type = other DNA
aattcttcraaaaactaaatatataaaacccacrataaatttacccacac

SEQ ID NO: 36096 - DNA, 50 bp, synthetic construct
  source 1..50: mol_type = other DNA
acaaatacctcctcctctcaatatcacttaattatatacttaaattcttc

SEQ ID NO: 36097 - DNA, 50 bp, synthetic construct
  source 1..50: mol_type = other DNA
taataaaaacataaatcratcttaaaaaaacatctatcaaaataatcctc

SEQ ID NO: 36098 - DNA, 50 bp, synthetic construct
  source 1..50: mol_type = other DNA
aaacacttattttaaccraaaaccactttaacaaatacttccctaaaacc

SEQ ID NO: 36099 - DNA, 50 bp, synthetic construct
  source 1..50: mol_type = other DNA
aaccactttaacaaatacttccctaaaaccrattcatattcccatcattc

SEQ ID NO: 36100 - DNA, 50 bp, synthetic construct
  source 1..50: mol_type = other DNA
taaaaaatcttactacttaaaacaattaaaaaaaccctaataaacaaacc

SEQ ID NO: 36101 - DNA, 50 bp, synthetic construct
  source 1..50: mol_type = other DNA
aaaaataaacrcaactccaaacacaaataaaatcctttaccctaaataac

SEQ ID NO: 36102 - DNA, 50 bp, synthetic construct
  source 1..50: mol_type = other DNA
caataatttaaacattaaaaaaccctaaccttcacttaaatttttctaac

SEQ ID NO: 36103 - DNA, 50 bp, synthetic construct
  source 1..50: mol_type = other DNA
acaaccaaaatacctccaaacattaccaaatactaattaaaaacaaaatc

SEQ ID NO: 36104 - DNA, 50 bp, synthetic construct
  source 1..50: mol_type = other DNA
taaaaataaacttcccraaaaaatccatctaaataaactaccctatctcc

SEQ ID NO: 36105 - DNA, 50 bp, synthetic construct
  source 1..50: mol_type = other DNA
caaaacaacttacccaaataaattccttcraaaaacccatcctcaaatcc

SEQ ID NO: 36106 - DNA, 50 bp, synthetic construct
  source 1..50: mol_type = other DNA
ccaccatatctataaacraaaaacaaccraaaacrtattctcctaacctc

SEQ ID NO: 36107 - DNA, 50 bp, synthetic construct
  source 1..50: mol_type = other DNA
ratccacractccattttcatccaaaaaaacracraaatcaaaaaaacac

SEQ ID NO: 36108 - DNA, 50 bp, synthetic construct
  source 1..50: mol_type = other DNA
ctaaaatacaaaaccaactaataataaattctaaaaactttaccrcactc

SEQ ID NO: 36109 - DNA, 50 bp, synthetic construct
  source 1..50: mol_type = other DNA
actcraaacaataaataaacttctccttactactaaataacttaaaatcc

SEQ ID NO: 36110 - DNA, 50 bp, synthetic construct
  source 1..50: mol_type = other DNA
caataaataaacttctccttactactaaataacttaaaatccrcrtccac

SEQ ID NO: 36111 - DNA, 50 bp, synthetic construct
  source 1..50: mol_type = other DNA
taaacttctccttactactaaataacttaaaatccrcrtccacraaaaac

SEQ ID NO: 36112 - DNA, 50 bp, synthetic construct
  source 1..50: mol_type = other DNA
tcraaaaccaaaaacaaactacaacaaaacttaaaaaataatccaacaac

SEQ ID NO: 36113 - DNA, 50 bp, synthetic construct
  source 1..50: mol_type = other DNA
aaaaaaccttaatttcttaaaaatcacatacraacacataataacaaatc

SEQ ID NO: 36114 - DNA, 50 bp, synthetic construct
  source 1..50: mol_type = other DNA
caaaccttactacaatttacttctaacccccratttaccattatatatcc

SEQ ID NO: 36115 - DNA, 50 bp, synthetic construct
  source 1..50: mol_type = other DNA
tccacataaaaacacacaaaaattctttcacttacraatataacatatac

SEQ ID NO: 36116 - DNA, 50 bp, synthetic construct
  source 1..50: mol_type = other DNA
tttttaaaaaaccaaaactccttaaatcttcttccrcacatattacaccc

SEQ ID NO: 36117 - DNA, 50 bp, synthetic construct
  source 1..50: mol_type = other DNA
ctatatcaactctcaacattattactatattttaaaaacttaactaatac

SEQ ID NO: 36118 - DNA, 50 bp, synthetic construct
  source 1..50: mol_type = other DNA
tactacccccaatacctaaaacaaaatacctaacacaaaattaaacactc

SEQ ID NO: 36119 - DNA, 50 bp, synthetic construct
  source 1..50: mol_type = other DNA
taataactataaccaaacrtatatactaattctacacrtatactaattcc

SEQ ID NO: 36120 - DNA, 50 bp, synthetic construct
  source 1..50: mol_type = other DNA
ttaaacactcracacataactaataaataaatatcacraaattaacacac

SEQ ID NO: 36121 - DNA, 50 bp, synthetic construct
  source 1..50: mol_type = other DNA
ctaataaataaatatcacraaattaacacacrtataaaatcaatacacac

SEQ ID NO: 36122 - DNA, 50 bp, synthetic construct
  source 1..50: mol_type = other DNA
attaacacacrtataaaatcaatacacacrtttaaccacaatcactaacc

SEQ ID NO: 36123 - DNA, 50 bp, synthetic construct
  source 1..50: mol_type = other DNA
aaacttctaaaaaaacttatatttatacacacaccccattcaattaaaac

SEQ ID NO: 36124 - DNA, 50 bp, synthetic construct
  source 1..50: mol_type = other DNA
cctccaattctttatcaaaaaaaacaatttactttatcaacaataccatc

SEQ ID NO: 36125 - DNA, 50 bp, synthetic construct
  source 1..50: mol_type = other DNA
tataatccaacactataatctaaatacttctaacttacaaaaaaataaac

SEQ ID NO: 36126 - DNA, 50 bp, synthetic construct
  source 1..50: mol_type = other DNA
aactattctatctttacctacactaactctctataataaaaacactaaac

SEQ ID NO: 36127 - DNA, 50 bp, synthetic construct
  source 1..50: mol_type = other DNA
ataacctaattaaatacaaacttaaacaataccttttaaaacataaaatc

SEQ ID NO: 36128 - DNA, 50 bp, synthetic construct
  source 1..50: mol_type = other DNA
aatattcaataatcaaacttccttcacccraatttaaaaaatttcctacc

SEQ ID NO: 36129 - DNA, 50 bp, synthetic construct
  source 1..50: mol_type = other DNA
tttaatatcccactcttttaatccttttatcttcacaacacttttctaac

SEQ ID NO: 36130 - DNA, 50 bp, synthetic construct
  source 1..50: mol_type = other DNA
cccaaaactcccraaaacaaatttttaaacacccraaaaaatcacraaac

SEQ ID NO: 36131 - DNA, 50 bp, synthetic construct
  source 1..50: mol_type = other DNA
aacttaaaaaaaatctttaatatttttcrcrcacaactaccttctaaccc

SEQ ID NO: 36132 - DNA, 50 bp, synthetic construct
  source 1..50: mol_type = other DNA
acctaaaatataacctcattctacatattaataaataacctttaaactcc

SEQ ID NO: 36133 - DNA, 50 bp, synthetic construct
  source 1..50: mol_type = other DNA
tctaataacacctaactcctttaaaaataacctacrcaaaaaataataac

SEQ ID NO: 36134 - DNA, 50 bp, synthetic construct
  source 1..50: mol_type = other DNA
atttttttactaacatctaataacacctaactcctttaaaaataacctac

SEQ ID NO: 36135 - DNA, 50 bp, synthetic construct
  source 1..50: mol_type = other DNA
aaaatcacaccattatctctaatttaatcctaataatataaaacctcttc

SEQ ID NO: 36136 - DNA, 50 bp, synthetic construct
  source 1..50: mol_type = other DNA
acacacaatttccaaataatttttctataataattccacaataaaataac

SEQ ID NO: 36137 - DNA, 50 bp, synthetic construct
  source 1..50: mol_type = other DNA
tacaatttttcaaattttcctactctaaacactaaattcttttacrtccc

SEQ ID NO: 36138 - DNA, 50 bp, synthetic construct
  source 1..50: mol_type = other DNA
ctcactacaatttttcaaattttcctactctaaacactaaattcttttac

SEQ ID NO: 36139 - DNA, 50 bp, synthetic construct
  source 1..50: mol_type = other DNA
aatcaaaactaaactcttaaaaataactctctaaattcaaaccaaaactc

SEQ ID NO: 36140 - DNA, 50 bp, synthetic construct
  source 1..50: mol_type = other DNA
aaaccrctttaaaccctccrctaaaaacrataaaaaaactttaaaccaac

SEQ ID NO: 36141 - DNA, 50 bp, synthetic construct
  source 1..50: mol_type = other DNA
acaaaatttaaatccaaacratctctaaaaactaaattctaaaaaaaccc

SEQ ID NO: 36142 - DNA, 50 bp, synthetic construct
  source 1..50: mol_type = other DNA
aattttctcaaaacccaatctccaaaaaccrcctaaattcaaatcctacc

SEQ ID NO: 36143 - DNA, 50 bp, synthetic construct
  source 1..50: mol_type = other DNA
acaccrttttaaaacttcataataataaaaacatttaaccctcraaacac

SEQ ID NO: 36144 - DNA, 50 bp, synthetic construct
  source 1..50: mol_type = other DNA
ataccaaacaccrttttaaaacttcataataataaaaacatttaaccctc

SEQ ID NO: 36145 - DNA, 50 bp, synthetic construct
  source 1..50: mol_type = other DNA
ttaaataccctcatcaccataaaaccttaaaacratacctaacacataac

SEQ ID NO: 36146 - DNA, 50 bp, synthetic construct
  source 1..50: mol_type = other DNA
taccctcatcaccataaaaccttaaaacratacctaacacataacratac

SEQ ID NO: 36147 - DNA, 50 bp, synthetic construct
  source 1..50: mol_type = other DNA
ttatttacaaaaaacccttaccacraaaaattttctactaattttcaacc

SEQ ID NO: 36148 - DNA, 50 bp, synthetic construct
  source 1..50: mol_type = other DNA
aaaaaataaacrtatattactctccccctcrtaataaatcttattaccac

SEQ ID NO: 36149 - DNA, 50 bp, synthetic construct
  source 1..50: mol_type = other DNA
ttctaaatcaacttaacratatataaaattctatcctactcratacttac

SEQ ID NO: 36150 - DNA, 50 bp, synthetic construct
  source 1..50: mol_type = other DNA
aacccttctttctaaatcaacttaacratatataaaattctatcctactc

SEQ ID NO: 36151 - DNA, 50 bp, synthetic construct
  source 1..50: mol_type = other DNA
tttcatacaataatcacrtaaacaccraacaaaacaaaattctacatacc

SEQ ID NO: 36152 - DNA, 50 bp, synthetic construct
  source 1..50: mol_type = other DNA
aaaattccacattccttaattaacaacataaaaaaaacaccacttcctac

SEQ ID NO: 36153 - DNA, 50 bp, synthetic construct
  source 1..50: mol_type = other DNA
aaaataaattaaacaacactatatctccaaactttataaaaatctttttc

SEQ ID NO: 36154 - DNA, 50 bp, synthetic construct
  source 1..50: mol_type = other DNA
tccaatcttcaattttataacttccaaaaaaatttcattcacttaataac

SEQ ID NO: 36155 - DNA, 50 bp, synthetic construct
  source 1..50: mol_type = other DNA
acaccaaattaactcaaaactaaaataatttaacaaactcrtaatacccc

SEQ ID NO: 36156 - DNA, 50 bp, synthetic construct
  source 1..50: mol_type = other DNA
aacttaaatcctaccaaaataataaactctaaaatacctccattaccccc

SEQ ID NO: 36157 - DNA, 50 bp, synthetic construct
  source 1..50: mol_type = other DNA
aaataaataatacctcctaaaaacacrattctacctatctacraacccac

SEQ ID NO: 36158 - DNA, 50 bp, synthetic construct
  source 1..50: mol_type = other DNA
ctaactataaataaataatacctcctaaaaacacrattctacctatctac

SEQ ID NO: 36159 - DNA, 50 bp, synthetic construct
  source 1..50: mol_type = other DNA
acaaaaccrtactcctaaaaaacattacttatttacaaccaaatccctac

SEQ ID NO: 36160 - DNA, 50 bp, synthetic construct
  source 1..50: mol_type = other DNA
aaacctccrtaacaaacaattcaaaatctcctaaatattttacaaaaatc

SEQ ID NO: 36161 - DNA, 50 bp, synthetic construct
  source 1..50: mol_type = other DNA
aaaactttaaactaaataataaacaatatccctcrtaaacrccaccctcc

SEQ ID NO: 36162 - DNA, 50 bp, synthetic construct
  source 1..50: mol_type = other DNA
caaaaccaaaaaaactttaaactaaataataaacaatatccctcrtaaac

SEQ ID NO: 36163 - DNA, 50 bp, synthetic construct
  source 1..50: mol_type = other DNA
atttctattcctcaatctcttcctctataaaatcraaatcctaataacac

SEQ ID NO: 36164 - DNA, 50 bp, synthetic construct
  source 1..50: mol_type = other DNA
taacaaattaatttacatttctattcctcaatctcttcctctataaaatc

SEQ ID NO: 36165 - DNA, 50 bp, synthetic construct
  source 1..50: mol_type = other DNA
aattatccttaaaaaaccctacaaatctatttttaataacttactacacc

SEQ ID NO: 36166 - DNA, 50 bp, synthetic construct
  source 1..50: mol_type = other DNA
aactcctataatacaaacaataatacaccaaaaccaatatttccaacacc

SEQ ID NO: 36167 - DNA, 50 bp, synthetic construct
  source 1..50: mol_type = other DNA
aaaaccratactccaactcctatacccctactcctatcttcaaaaaaaac

SEQ ID NO: 36168 - DNA, 50 bp, synthetic construct
  source 1..50: mol_type = other DNA
aaaaaacctcatttctttaataatttttttaaaaaactttattttcccac

SEQ ID NO: 36169 - DNA, 50 bp, synthetic construct
  source 1..50: mol_type = other DNA
ataaaaaacttttctactcatattattattaaaatctaaacaacacrccc

SEQ ID NO: 36170 - DNA, 50 bp, synthetic construct
  source 1..50: mol_type = other DNA
crcaaataatacaacrattcataacctaccttccaaccctaatattaaac

SEQ ID NO: 36171 - DNA, 50 bp, synthetic construct
  source 1..50: mol_type = other DNA
ctataactaaaaatcrtctaacaccaaaactaaaaaacaaactataaacc

SEQ ID NO: 36172 - DNA, 50 bp, synthetic construct
  source 1..50: mol_type = other DNA
crtctaacaccaaaactaaaaaacaaactataaaccrctacattacctac

SEQ ID NO: 36173 - DNA, 50 bp, synthetic construct
  source 1..50: mol_type = other DNA
rctacattacctacrtacaacaacaataaaaaacaaccaaaaattccctc

SEQ ID NO: 36174 - DNA, 50 bp, synthetic construct
  source 1..50: mol_type = other DNA
ctttctcatatcrtaaataaactaaattaacacctattttcaactaccac

SEQ ID NO: 36175 - DNA, 50 bp, synthetic construct
  source 1..50: mol_type = other DNA
taaacaacccccaataaattccttaacttttcaaataacattaaaaaaac

SEQ ID NO: 36176 - DNA, 50 bp, synthetic construct
  source 1..50: mol_type = other DNA
acaaccactcaataaatatctattacataaatcaaataaaaaatcaaacc

SEQ ID NO: 36177 - DNA, 50 bp, synthetic construct
  source 1..50: mol_type = other DNA
aaacctaaaataacaactctaaaaaactatttattatcccaaaaataacc

SEQ ID NO: 36178 - DNA, 50 bp, synthetic construct
  source 1..50: mol_type = other DNA
aacataaacatttcttaaacactcattttatactttacataaaatacatc

SEQ ID NO: 36179 - DNA, 50 bp, synthetic construct
  source 1..50: mol_type = other DNA
tacraataaattcactaactctaaaacrccatataactctacctaaaatc

SEQ ID NO: 36180 - DNA, 50 bp, synthetic construct
  source 1..50: mol_type = other DNA
ctcrattccaaacaaaaccacataacrtctcaaaatcaataaatccaccc

SEQ ID NO: 36181 - DNA, 50 bp, synthetic construct
  source 1..50: mol_type = other DNA
ccacataacrtctcaaaatcaataaatccacccrcaatcaacaaaaaaac

SEQ ID NO: 36182 - DNA, 50 bp, synthetic construct
  source 1..50: mol_type = other DNA
actccataactacaattaaacaaccctaaacttcaaaaaatataaaaccc

SEQ ID NO: 36183 - DNA, 50 bp, synthetic construct
  source 1..50: mol_type = other DNA
aaatcttcaaaaaaaattccactaaaacataaataatctcatattcattc

SEQ ID NO: 36184 - DNA, 50 bp, synthetic construct
  source 1..50: mol_type = other DNA
aacttcttcaaccctctaaatataaccacataataatatcaacrttatcc

SEQ ID NO: 36185 - DNA, 50 bp, synthetic construct
  source 1..50: mol_type = other DNA
taaaaataaaaacaatatctccctcaaaaaacataaaataaacaatacac

SEQ ID NO: 36186 - DNA, 50 bp, synthetic construct
  source 1..50: mol_type = other DNA
taaatcttccttatccctctaccaaatactacctctaatcaaccaaaacc

SEQ ID NO: 36187 - DNA, 50 bp, synthetic construct
  source 1..50: mol_type = other DNA
acctctaatcaaccaaaaccrccaactctattatcttttctactaaaaac

SEQ ID NO: 36188 - DNA, 50 bp, synthetic construct
  source 1..50: mol_type = other DNA
ccraaacactataacccractaatatttacaaatacaacaaaaaaaaccc

SEQ ID NO: 36189 - DNA, 50 bp, synthetic construct
  source 1..50: mol_type = other DNA
cttcatcactatacaacraactcttcctactacatttataaacaccaacc

SEQ ID NO: 36190 - DNA, 50 bp, synthetic construct
  source 1..50: mol_type = other DNA
aacataactaaattactccctaaaccraaactttaattcaaaccaaaacc

SEQ ID NO: 36191 - DNA, 50 bp, synthetic construct
  source 1..50: mol_type = other DNA
aaaaactaacaaaacttacaaaaaaacataactaaattactccctaaacc

SEQ ID NO: 36192 - DNA, 50 bp, synthetic construct
  source 1..50: mol_type = other DNA
ataactttcrtctttaaaatttaaaaccaattataaattccttaaaattc

SEQ ID NO: 36193 - DNA, 50 bp, synthetic construct
  source 1..50: mol_type = other DNA
aaataaaacraacttcaaaaaatttacaactaatcttaaacttcaaaaac

SEQ ID NO: 36194 - DNA, 50 bp, synthetic construct
  source 1..50: mol_type = other DNA
ccatcaaacttactaattttacctaatatttcacaatacacaaaaacctc

SEQ ID NO: 36195 - DNA, 50 bp, synthetic construct
  source 1..50: mol_type = other DNA
attctccaacccttaaaaaaataatactcaccaacccaacctaaaaaatc

SEQ ID NO: 36196 - DNA, 50 bp, synthetic construct
  source 1..50: mol_type = other DNA
aaaatcractcccttattcttccccaaaacaaaactaaccaaataaattc

SEQ ID NO: 36197 - DNA, 50 bp, synthetic construct
  source 1..50: mol_type = other DNA
ctatatcaacaccaaacaataaatatactcaaccttatcccaaaccraac

SEQ ID NO: 36198 - DNA, 50 bp, synthetic construct
  source 1..50: mol_type = other DNA
acccctatatcaacaccaaacaataaatatactcaaccttatcccaaacc

SEQ ID NO: 36199 - DNA, 50 bp, synthetic construct
  source 1..50: mol_type = other DNA
cracatctccaaaaaacractctaaaataaatcaccctctactaaaaaac

SEQ ID NO: 36200 - DNA, 50 bp, synthetic construct
  source 1..50: mol_type = other DNA
aaaaaaaatcraaacacrttcctcaacaaaaaataattcatttcaaaacc

SEQ ID NO: 36201 - DNA, 50 bp, synthetic construct
  source 1..50: mol_type = other DNA
crttcctcaacaaaaaataattcatttcaaaaccrtctcttaaaaatatc

SEQ ID NO: 36202 - DNA, 50 bp, synthetic construct
  source 1..50: mol_type = other DNA
atctttaaactaaacttaaacatccacacccaaacaaactaaaataaatc

SEQ ID NO: 36203 - DNA, 50 bp, synthetic construct
  source 1..50: mol_type = other DNA
ctttacccrttacctttctatcttccatactaaaactatacataataatc

SEQ ID NO: 36204 - DNA, 50 bp, synthetic construct
  source 1..50: mol_type = other DNA
aatacccctaacattaaaaacrttactacacatcctactctacacaaaac

SEQ ID NO: 36205 - DNA, 50 bp, synthetic construct
  source 1..50: mol_type = other DNA
aaattctctactacraaaaccrccctatacaaaacaaaatatataacaac

SEQ ID NO: 36206 - DNA, 50 bp, synthetic construct
  source 1..50: mol_type = other DNA
tttcrtcattcaactctactcrcraaaaatattcaacaatatctaaaaac

SEQ ID NO: 36207 - DNA, 50 bp, synthetic construct
  source 1..50: mol_type = other DNA
aaattcaaatataactaaacatctatatttcrtcattcaactctactcrc

SEQ ID NO: 36208 - DNA, 50 bp, synthetic construct
  source 1..50: mol_type = other DNA
taaaattcaaatataactaaacatctatatttcrtcattcaactctactc

SEQ ID NO: 36209 - DNA, 50 bp, synthetic construct
  source 1..50: mol_type = other DNA
aatacctatatactaaaaatatcaacccraatctaaaataataactacrc

SEQ ID NO: 36210 - DNA, 50 bp, synthetic construct
  source 1..50: mol_type = other DNA
aaaatacctatatactaaaaatatcaacccraatctaaaataataactac

SEQ ID NO: 36211 - DNA, 50 bp, synthetic construct
  source 1..50: mol_type = other DNA
caaaatatacaaaaccrtacaaaatacctatatactaaaaatatcaaccc

SEQ ID NO: 36212 - DNA, 50 bp, synthetic construct
  source 1..50: mol_type = other DNA
aaaacaaaaatctcttaaaatttctaaatttaatcaaaatatacaaaacc

SEQ ID NO: 36213 - DNA, 50 bp, synthetic construct
  source 1..50: mol_type = other DNA
ctataacaataaaattaattaatacatctatttaacaaaactaaaacctc

SEQ ID NO: 36214 - DNA, 50 bp, synthetic construct
  source 1..50: mol_type = other DNA
aacaataaaattaattaatacatctatttaacaaaactaaaacctcraac

SEQ ID NO: 36215 - DNA, 50 bp, synthetic construct
  source 1..50: mol_type = other DNA
cacctactcraacaattaactaaaaattacaaccraataaataccctaac

SEQ ID NO: 36216 - DNA, 50 bp, synthetic construct
  source 1..50: mol_type = other DNA
tacttttataatttttcacctactcraacaattaactaaaaattacaacc

SEQ ID NO: 36217 - DNA, 50 bp, synthetic construct
  source 1..50: mol_type = other DNA
cctcctaacccacactaacttttcttacttttataatttttcacctactc

SEQ ID NO: 36218 - DNA, 50 bp, synthetic construct
  source 1..50: mol_type = other DNA
tcctttattatctatatctaaacaacacrccaacraaatatttaatctac

SEQ ID NO: 36219 - DNA, 50 bp, synthetic construct
  source 1..50: mol_type = other DNA
tatacrctataaaaaatcctttattatctatatctaaacaacacrccaac

SEQ ID NO: 36220 - DNA, 50 bp, synthetic construct
  source 1..50: mol_type = other DNA
crtctctatacrctataaaaaatcctttattatctatatctaaacaacac

SEQ ID NO: 36221 - DNA, 50 bp, synthetic construct
  source 1..50: mol_type = other DNA
aaaacaatactacatctttaaataactactttatcaacrcrtctctatac

SEQ ID NO: 36222 - DNA, 50 bp, synthetic construct
  source 1..50: mol_type = other DNA
tactatctaaacacaaataacaaaaaactttttacaacrcacaaaaacrc

SEQ ID NO: 36223 - DNA, 50 bp, synthetic construct
  source 1..50: mol_type = other DNA
crataacttaacattttcatttaaatccatctaacaaatcrttttaaacc

SEQ ID NO: 36224 - DNA, 50 bp, synthetic construct
  source 1..50: mol_type = other DNA
caaaccaaaccrataacttaacattttcatttaaatccatctaacaaatc

SEQ ID NO: 36225 - DNA, 50 bp, synthetic construct
  source 1..50: mol_type = other DNA
aaaaccaaaattatttactaaacraccacrtacaatcctattttaaaaac

SEQ ID NO: 36226 - DNA, 50 bp, synthetic construct
  source 1..50: mol_type = other DNA
tcatctataattaaactaccctccaaatcrctcttaaaataaaactatac

SEQ ID NO: 36227 - DNA, 50 bp, synthetic construct
  source 1..50: mol_type = other DNA
ataattaaactaccctccaaatcrctcttaaaataaaactatacrtaacc

SEQ ID NO: 36228 - DNA, 50 bp, synthetic construct
  source 1..50: mol_type = other DNA
tactactattaatcrttaaaataaatcrcaactcaatacactcctatctc

SEQ ID NO: 36229 - DNA, 50 bp, synthetic construct
  source 1..50: mol_type = other DNA
caacctttaaacaccactccatttactactattaatcrttaaaataaatc

SEQ ID NO: 36230 - DNA, 50 bp, synthetic construct
  source 1..50: mol_type = other DNA
attatattcacccatataattaacaccctctccatcatctcaatacaccc

SEQ ID NO: 36231 - DNA, 50 bp, synthetic construct
  source 1..50: mol_type = other DNA
ttattaatatctatacctcctcrttattaaatcatttcaaataccatcac

SEQ ID NO: 36232 - DNA, 50 bp, synthetic construct
  source 1..50: mol_type = other DNA
tataaatcaaccctaactcaccrtaataacatctaaaataactcaataac

SEQ ID NO: 36233 - DNA, 50 bp, synthetic construct
  source 1..50: mol_type = other DNA
taactcaataacraaaaaacataaacaccaataaataaatcataccttcc

SEQ ID NO: 36234 - DNA, 50 bp, synthetic construct
  source 1..50: mol_type = other DNA
tttaaaaaaacaattaaaactctaaccaactacaaacatcaactcaaccc

SEQ ID NO: 36235 - DNA, 50 bp, synthetic construct
  source 1..50: mol_type = other DNA
aaactctaaccaactacaaacatcaactcaacccrataaaaaaaatctac

SEQ ID NO: 36236 - DNA, 50 bp, synthetic construct
  source 1..50: mol_type = other DNA
aaaaactttacacaaatctaaaaaccctacaaaaacttaatacccrccrc

SEQ ID NO: 36237 - DNA, 50 bp, synthetic construct
  source 1..50: mol_type = other DNA
craaaaactttacacaaatctaaaaaccctacaaaaacttaatacccrcc

SEQ ID NO: 36238 - DNA, 50 bp, synthetic construct
  source 1..50: mol_type = other DNA
aaccraaaaactttacacaaatctaaaaaccctacaaaaacttaataccc

SEQ ID NO: 36239 - DNA, 50 bp, synthetic construct
  source 1..50: mol_type = other DNA
aacrccccatcctccatatactctatcctactaaaatctcattaatatac

SEQ ID NO: 36240 - DNA, 50 bp, synthetic construct
  source 1..50: mol_type = other DNA
aatctcattaatatacraaaaacrtcaaaactaaccaaaaccrcaaaacc

SEQ ID NO: 36241 - DNA, 50 bp, synthetic construct
  source 1..50: mol_type = other DNA
crcaaaaccrctaactcacrcaatatctaaaataaatcactaactaaacc

SEQ ID NO: 36242 - DNA, 50 bp, synthetic construct
  source 1..50: mol_type = other DNA
cacrcaatatctaaaataaatcactaactaaaccraaaactacraaaacc

SEQ ID NO: 36243 - DNA, 50 bp, synthetic construct
  source 1..50: mol_type = other DNA
tttaattccacaacracccraaacataaatataaataactcaaaacraac

SEQ ID NO: 36244 - DNA, 50 bp, synthetic construct
  source 1..50: mol_type = other DNA
aaaatttaattccacaacracccraaacataaatataaataactcaaaac

SEQ ID NO: 36245 - DNA, 50 bp, synthetic construct
  source 1..50: mol_type = other DNA
cacctatacttcraaccrttataaaattaaactctcctctccttaaaaac

SEQ ID NO: 36246 - DNA, 50 bp, synthetic construct
  source 1..50: mol_type = other DNA
cttctaaaaaaaacaatactaaaaacacatctatctaccctcraaccccc

SEQ ID NO: 36247 - DNA, 50 bp, synthetic construct
  source 1..50: mol_type = other DNA
ttaacctcaatttccctatcaaaaaaacaaaaccrtaacaccttttttcc

SEQ ID NO: 36248 - DNA, 50 bp, synthetic construct
  source 1..50: mol_type = other DNA
tttccctatcaaaaaaacaaaaccrtaacaccttttttccrcataacaac

SEQ ID NO: 36249 - DNA, 50 bp, synthetic construct
  source 1..50: mol_type = other DNA
tacatactccacacaaaaaaccttttcttaccctctaaaaacataaactc

SEQ ID NO: 36250 - DNA, 50 bp, synthetic construct
  source 1..50: mol_type = other DNA
craaatcctttttcttcttcctttataccatattatctaacttccacccc

SEQ ID NO: 36251 - DNA, 50 bp, synthetic construct
  source 1..50: mol_type = other DNA
tcctaaatttaaccacatcctaaataccracatttatttaaataaatacc

SEQ ID NO: 36252 - DNA, 50 bp, synthetic construct
  source 1..50: mol_type = other DNA
taaataaataccracaatactcrctaaactaaactaattttacaaaacac

SEQ ID NO: 36253 - DNA, 50 bp, synthetic construct
  source 1..50: mol_type = other DNA
ataaataccracaatactcrctaaactaaactaattttacaaaacacrac

SEQ ID NO: 36254 - DNA, 50 bp, synthetic construct
  source 1..50: mol_type = other DNA
aaaaacctacactacaaaaatatctaaatattaacraatacctctaaccc

SEQ ID NO: 36255 - DNA, 50 bp, synthetic construct
  source 1..50: mol_type = other DNA
aactacaaaaattcctcttaatccacttaatcaacraatcaaaaacactc

SEQ ID NO: 36256 - DNA, 50 bp, synthetic construct
  source 1..50: mol_type = other DNA
tacataataatacttaaaaacaataacataataaattacaaacctaaccc

SEQ ID NO: 36257 - DNA, 50 bp, synthetic construct
  source 1..50: mol_type = other DNA
aatactcttcctaccraaataaaacttaccctccaaattaaaaaaataac

SEQ ID NO: 36258 - DNA, 50 bp, synthetic construct
  source 1..50: mol_type = other DNA
acrataaaatccctacaaaaacacaatattaccaaaaaaacctctaaaac

SEQ ID NO: 36259 - DNA, 50 bp, synthetic construct
  source 1..50: mol_type = other DNA
aaaccraaaaaaatttaccrataaacctaaatctccacacacaataatcc

SEQ ID NO: 36260 - DNA, 50 bp, synthetic construct
  source 1..50: mol_type = other DNA
atccctcaaccacaaaccctaaaaaccrctaaattaaatctttaaactac

SEQ ID NO: 36261 - DNA, 50 bp, synthetic construct
  source 1..50: mol_type = other DNA
actactaaaataaacacaaattaccaaaaaaataacttatttacccctac

SEQ ID NO: 36262 - DNA, 50 bp, synthetic construct
  source 1..50: mol_type = other DNA
ataaataaaactcatactacaaaaccraaataacraaattccctctacac

SEQ ID NO: 36263 - DNA, 50 bp, synthetic construct
  source 1..50: mol_type = other DNA
ctcaaccaaaactcttaataaaataatccttacctactcccrccctatac

SEQ ID NO: 36264 - DNA, 50 bp, synthetic construct
  source 1..50: mol_type = other DNA
tcraaataactcaaccaaaactcttaataaaataatccttacctactccc

SEQ ID NO: 36265 - DNA, 50 bp, synthetic construct
  source 1..50: mol_type = other DNA
acraaaacaaataaaaaccactccactaaaaatcctaactaaaccactcc

SEQ ID NO: 36266 - DNA, 50 bp, synthetic construct
  source 1..50: mol_type = other DNA
aacccraataactatctacraataaaccaaaaaaaatcracataacctac

SEQ ID NO: 36267 - DNA, 50 bp, synthetic construct
  source 1..50: mol_type = other DNA
aataaaatactaaaatcatctatcccrtaaacccrtaactaaaacaaacc

SEQ ID NO: 36268 - DNA, 50 bp, synthetic construct
  source 1..50: mol_type = other DNA
attaatcaactttaacctttaatcaaacactcaacraacaaaaaataacc

SEQ ID NO: 36269 - DNA, 50 bp, synthetic construct
  source 1..50: mol_type = other DNA
ttaacctttaatcaaacactcaacraacaaaaaataaccraaatttatcc

SEQ ID NO: 36270 - DNA, 50 bp, synthetic construct
  source 1..50: mol_type = other DNA
acttacrataatttcctacaatttaaaataaaatcctcacctccctttcc

SEQ ID NO: 36271 - DNA, 50 bp, synthetic construct
  source 1..50: mol_type = other DNA
catccatatactaacactactttttctttctaacataaccctaaacttac

SEQ ID NO: 36272 - DNA, 50 bp, synthetic construct
  source 1..50: mol_type = other DNA
ctaacaatttccaaactaaaaacrtacttattatactaacaacacrcrac

SEQ ID NO: 36273 - DNA, 50 bp, synthetic construct
  source 1..50: mol_type = other DNA
ctcctaacaatttccaaactaaaaacrtacttattatactaacaacacrc

SEQ ID NO: 36274 - DNA, 50 bp, synthetic construct
  source 1..50: mol_type = other DNA
tactcctaacaatttccaaactaaaaacrtacttattatactaacaacac

SEQ ID NO: 36275 - DNA, 50 bp, synthetic construct
  source 1..50: mol_type = other DNA
acacaacacaacaaaatcactatactcctaacaatttccaaactaaaaac

SEQ ID NO: 36276 - DNA, 50 bp, synthetic construct
  source 1..50: mol_type = other DNA
actaaatatcaaactatcttattcacactttacttctaccttaaatccac

SEQ ID NO: 36277 - DNA, 50 bp, synthetic construct
  source 1..50: mol_type = other DNA
tattcacactttacttctaccttaaatccacrtaaaaactctataatccc

SEQ ID NO: 36278 - DNA, 50 bp, synthetic construct
  source 1..50: mol_type = other DNA
tcacactttacttctaccttaaatccacrtaaaaactctataatcccrtc

SEQ ID NO: 36279 - DNA, 50 bp, synthetic construct
  source 1..50: mol_type = other DNA
tactcacracaaaaaacaaaaactacatattctaattaaaatctacratc

SEQ ID NO: 36280 - DNA, 50 bp, synthetic construct
  source 1..50: mol_type = other DNA
taaatactcacracaaaaaacaaaaactacatattctaattaaaatctac

SEQ ID NO: 36281 - DNA, 50 bp, synthetic construct
  source 1..50: mol_type = other DNA
ratcttaaacaatatcraaatccttactaaataaaaaaaaccaacccccc

SEQ ID NO: 36282 - DNA, 50 bp, synthetic construct
  source 1..50: mol_type = other DNA
tctttactacctaaaataacatacccacaattccratcttaaacaatatc

SEQ ID NO: 36283 - DNA, 50 bp, synthetic construct
  source 1..50: mol_type = other DNA
taatttctctaaatcatctttactacctaaaataacatacccacaattcc

SEQ ID NO: 36284 - DNA, 50 bp, synthetic construct
  source 1..50: mol_type = other DNA
ctcaaacrctatcattactcccaatctatcaaaaaaaattaatcaccacc

SEQ ID NO: 36285 - DNA, 50 bp, synthetic construct
  source 1..50: mol_type = other DNA
taaaaacttacttacaatataatacaattaacttttataaaccaacaaac

SEQ ID NO: 36286 - DNA, 50 bp, synthetic construct
  source 1..50: mol_type = other DNA
aaacttacttacaatataatacaattaacttttataaaccaacaaacrcc

SEQ ID NO: 36287 - DNA, 50 bp, synthetic construct
  source 1..50: mol_type = other DNA
aactaaacaatataactctaaaatacaacccraattaaaactcaaccctc

SEQ ID NO: 36288 - DNA, 50 bp, synthetic construct
  source 1..50: mol_type = other DNA
aaaactcaaccctcrcctaactcttcttacaaaccctaaacatattcaac

SEQ ID NO: 36289 - DNA, 50 bp, synthetic construct
  source 1..50: mol_type = other DNA
taaaccccctcatataccaattcratctacctacaaaaactataaaaacc

SEQ ID NO: 36290 - DNA, 50 bp, synthetic construct
  source 1..50: mol_type = other DNA
tataccaattcratctacctacaaaaactataaaaaccrccaacaaaaac

SEQ ID NO: 36291 - DNA, 50 bp, synthetic construct
  source 1..50: mol_type = other DNA
tctacctacaaaaactataaaaaccrccaacaaaaacrataaataactac

SEQ ID NO: 36292 - DNA, 50 bp, synthetic construct
  source 1..50: mol_type = other DNA
tttaatccccaattctaaacaaaaattaaacaccaccttatatctttaac

SEQ ID NO: 36293 - DNA, 50 bp, synthetic construct
  source 1..50: mol_type = other DNA
crataaatcaaaaaataacaatatcttccctacaaaccaaaacaaacccc

SEQ ID NO: 36294 - DNA, 50 bp, synthetic construct
  source 1..50: mol_type = other DNA
tcaaaaaataacaatatcttccctacaaaccaaaacaaaccccractccc

SEQ ID NO: 36295 - DNA, 50 bp, synthetic construct
  source 1..50: mol_type = other DNA
acaaaactaacttatcctaaaaaattaaataccaaataaaaacrcaactc

SEQ ID NO: 36296 - DNA, 50 bp, synthetic construct
  source 1..50: mol_type = other DNA
aactccaacaaaactaacttatcctaaaaaattaaataccaaataaaaac

SEQ ID NO: 36297 - DNA, 50 bp, synthetic construct
  source 1..50: mol_type = other DNA
aaaaaaacraataaaactcaaacaaaacaaaaattcactcccattctcac

SEQ ID NO: 36298 - DNA, 50 bp, synthetic construct
  source 1..50: mol_type = other DNA
ccaaaaaataatccraccttcctaacctaaacaaaatctaaaaacaaccc

SEQ ID NO: 36299 - DNA, 50 bp, synthetic construct
  source 1..50: mol_type = other DNA
aaccaaacaacrataaatcaaaatccttcattcctaattaatatcaaccc

SEQ ID NO: 36300 - DNA, 50 bp, synthetic construct
  source 1..50: mol_type = other DNA
aaaccccaaatctataaaaaacctaccccrtaaataatacctaaaactac

SEQ ID NO: 36301 - DNA, 50 bp, synthetic construct
  source 1..50: mol_type = other DNA
cctaacctaaaaaactttaaaaaaccccaaatctataaaaaacctacccc

SEQ ID NO: 36302 - DNA, 50 bp, synthetic construct
  source 1..50: mol_type = other DNA
crtaaaacatatcacctacacraataacttatctcctaaaaccctaaaac

SEQ ID NO: 36303 - DNA, 50 bp, synthetic construct
  source 1..50: mol_type = other DNA
atataaacccaataacaacctttaaatcraacctcraaaaataaacaaac

SEQ ID NO: 36304 - DNA, 50 bp, synthetic construct
  source 1..50: mol_type = other DNA
cctaaaaccccccaaatataaacccaataacaacctttaaatcraacctc

SEQ ID NO: 36305 - DNA, 50 bp, synthetic construct
  source 1..50: mol_type = other DNA
aaacccacctaaaaccccccaaatataaacccaataacaacctttaaatc

SEQ ID NO: 36306 - DNA, 50 bp, synthetic construct
  source 1..50: mol_type = other DNA
aacccccataccaaaaaaaatacaaacaaacttaaataatacccaatatc

SEQ ID NO: 36307 - DNA, 50 bp, synthetic construct
  source 1..50: mol_type = other DNA
taaaaacctctacraaataataaaatccacattcctaccccaaataaatc

SEQ ID NO: 36308 - DNA, 50 bp, synthetic construct
  source 1..50: mol_type = other DNA
aacaaacctaaacractcacctaaaacaaaaatataaattccatcactcc

SEQ ID NO: 36309 - DNA, 50 bp, synthetic construct
  source 1..50: mol_type = other DNA
aaatataaattccatcactccrcaaaaactttcaaacaaaacacaacctc

SEQ ID NO: 36310 - DNA, 50 bp, synthetic construct
  source 1..50: mol_type = other DNA
ctctacratcaatcacttccctctaaaactaaacaaaacactaaaaaaac

SEQ ID NO: 36311 - DNA, 50 bp, synthetic construct
  source 1..50: mol_type = other DNA
accrtaacaacttaataacttcrattaaaacatcctctaatcrtactaac

SEQ ID NO: 36312 - DNA, 50 bp, synthetic construct
  source 1..50: mol_type = other DNA
crattaaaacatcctctaatcrtactaacrctaaaaaaaactctaaactc

SEQ ID NO: 36313 - DNA, 50 bp, synthetic construct
  source 1..50: mol_type = other DNA
aaaaaactctaaactcraataacactacraacactctaaacactatctcc

SEQ ID NO: 36314 - DNA, 50 bp, synthetic construct
  source 1..50: mol_type = other DNA
aatccccaaaaaactaaacaaatactacracaaaaaatacccctaaccrc

SEQ ID NO: 36315 - DNA, 50 bp, synthetic construct
  source 1..50: mol_type = other DNA
acaccaacactttactcactctaatccccaaaaaactaaacaaatactac

SEQ ID NO: 36316 - DNA, 50 bp, synthetic construct
  source 1..50: mol_type = other DNA
tctcrtaaacaaataaaacctaaatctaaccaactatatttacctctaac

SEQ ID NO: 36317 - DNA, 50 bp, synthetic construct
  source 1..50: mol_type = other DNA
acctccacacttaccctaactcctaaaaactccaaaaaataaaacatctc

SEQ ID NO: 36318 - DNA, 50 bp, synthetic construct
  source 1..50: mol_type = other DNA
actatccccaacractctactataattctttaattaaaacaaacrctaac

SEQ ID NO: 36319 - DNA, 50 bp, synthetic construct
  source 1..50: mol_type = other DNA
ccacaatcctaaatactaattatacactaactaaacaaactatccccaac

SEQ ID NO: 36320 - DNA, 50 bp, synthetic construct
  source 1..50: mol_type = other DNA
taatcaatactcaaaattataactaatacccctaacaaactcaaccctac

SEQ ID NO: 36321 - DNA, 50 bp, synthetic construct
  source 1..50: mol_type = other DNA
aataaaaaaaactaacccraaaccaaatcrctactaaatctcaaaaaaac

SEQ ID NO: 36322 - DNA, 50 bp, synthetic construct
  source 1..50: mol_type = other DNA
tcttttaaatatcaaccatataacttccracaaatacccatcaaacracc

SEQ ID NO: 36323 - DNA, 50 bp, synthetic construct
  source 1..50: mol_type = other DNA
ataataccatataattctcatcrtctacraccrtctaataaacatctatc

SEQ ID NO: 36324 - DNA, 50 bp, synthetic construct
  source 1..50: mol_type = other DNA
actattttacctaaattaaaaactctaacataaatatataaaactcaacc

SEQ ID NO: 36325 - DNA, 50 bp, synthetic construct
  source 1..50: mol_type = other DNA
aaataactaccrtaaaacctacttaacctccraatattaacctacccttc

SEQ ID NO: 36326 - DNA, 50 bp, synthetic construct
  source 1..50: mol_type = other DNA
tacctctaacrtttaacaaaaataactaccrtaaaacctacttaacctcc

SEQ ID NO: 36327 - DNA, 50 bp, synthetic construct
  source 1..50: mol_type = other DNA
tccaaataacctaataaacrtacctctaacrtttaacaaaaataactacc

SEQ ID NO: 36328 - DNA, 50 bp, synthetic construct
  source 1..50: mol_type = other DNA
ccaacataataaaactattatctctactaaaaatacaacattaaccaaac

SEQ ID NO: 36329 - DNA, 50 bp, synthetic construct
  source 1..50: mol_type = other DNA
acctaaattcaaaaaattaaaaatacccccaaaacctacactatacaaac

SEQ ID NO: 36330 - DNA, 50 bp, synthetic construct
  source 1..50: mol_type = other DNA
ataaaatattaccaaccaaaaaaactcrctaaaaaccaaaaacrtatcac

SEQ ID NO: 36331 - DNA, 50 bp, synthetic construct
  source 1..50: mol_type = other DNA
aacrtaaataaaatattaccaaccaaaaaaactcrctaaaaaccaaaaac

SEQ ID NO: 36332 - DNA, 50 bp, synthetic construct
  source 1..50: mol_type = other DNA
aaccatataatctaaaaacrtaaataaaatattaccaaccaaaaaaactc

SEQ ID NO: 36333 - DNA, 50 bp, synthetic construct
  source 1..50: mol_type = other DNA
taaaatcaaacaaattacccctcatacccccaaccatataatctaaaaac

SEQ ID NO: 36334 - DNA, 50 bp, synthetic construct
  source 1..50: mol_type = other DNA
aaaccacataactaaaaacataaaaaacaacctacctaactccacaaaac

SEQ ID NO: 36335 - DNA, 50 bp, synthetic construct
  source 1..50: mol_type = other DNA
accacataactaaaaacataaaaaacaacctacctaactccacaaaacrc

SEQ ID NO: 36336 - DNA, 50 bp, synthetic construct
  source 1..50: mol_type = other DNA
craacctaaacataatctaaaaaatccttaatccatctaaaaaaactaac

SEQ ID NO: 36337 - DNA, 50 bp, synthetic construct
  source 1..50: mol_type = other DNA
ccttaatcatacataattatcacaaataaataatccttaaccrtttctac

SEQ ID NO: 36338 - DNA, 50 bp, synthetic construct
  source 1..50: mol_type = other DNA
tataattaccttaatcatacataattatcacaaataaataatccttaacc

SEQ ID NO: 36339 - DNA, 50 bp, synthetic construct
  source 1..50: mol_type = other DNA
aatcaacctaacaaacaatcacacrtattaccttctatctctttccattc

SEQ ID NO: 36340 - DNA, 50 bp, synthetic construct
  source 1..50: mol_type = other DNA
cccttaaaaaaattcaaaatataaacraaaataccaccrccacacaaaac

SEQ ID NO: 36341 - DNA, 50 bp, synthetic construct
  source 1..50: mol_type = other DNA
cccaaatttacctataaaaactccraaaactaccaaacrccttatataac

SEQ ID NO: 36342 - DNA, 50 bp, synthetic construct
  source 1..50: mol_type = other DNA
tataaaaactccraaaactaccaaacrccttatataacrataacaccttc

SEQ ID NO: 36343 - DNA, 50 bp, synthetic construct
  source 1..50: mol_type = other DNA
attctaaatctctccaaaaactcttcrctctacatttatatccaactaac

SEQ ID NO: 36344 - DNA, 50 bp, synthetic construct
  source 1..50: mol_type = other DNA
ccaactaacrcattctactccrattcctcttcaatacttatttacataac

SEQ ID NO: 36345 - DNA, 50 bp, synthetic construct
  source 1..50: mol_type = other DNA
tctactccrattcctcttcaatacttatttacataacrctacttctttac

SEQ ID NO: 36346 - DNA, 50 bp, synthetic construct
  source 1..50: mol_type = other DNA
aataaatacaacrataaaaacraacccaacrctaaaaatataccaccacc

SEQ ID NO: 36347 - DNA, 50 bp, synthetic construct
  source 1..50: mol_type = other DNA
actacattaaaaacccaactacataacaacaattcccrccrcaatttttc

SEQ ID NO: 36348 - DNA, 50 bp, synthetic construct
  source 1..50: mol_type = other DNA
catacaactaaactcccaatacaataaaaataataacrctctaaactaac

SEQ ID NO: 36349 - DNA, 50 bp, synthetic construct
  source 1..50: mol_type = other DNA
ccaatacaataaaaataataacrctctaaactaacraaaactatcctacc

SEQ ID NO: 36350 - DNA, 50 bp, synthetic construct
  source 1..50: mol_type = other DNA
atcaaacaacrcaaaaactatataaatcaaataactacrcctctactacc

SEQ ID NO: 36351 - DNA, 50 bp, synthetic construct
  source 1..50: mol_type = other DNA
caaaatatccttttttttcaattctaaaaaaactacrcccatcaaacaac

SEQ ID NO: 36352 - DNA, 50 bp, synthetic construct
  source 1..50: mol_type = other DNA
acaaaaacrcaatcatctaacccacataattcctacrttacctaataaac

SEQ ID NO: 36353 - DNA, 50 bp, synthetic construct
  source 1..50: mol_type = other DNA
aaaacttaaccraaaaccccraactctatattaaaacttccaatcaaaac

SEQ ID NO: 36354 - DNA, 50 bp, synthetic construct
  source 1..50: mol_type = other DNA
ctatccttcattccaaaaacctaaatctatccaaaatctaaaacttaacc

SEQ ID NO: 36355 - DNA, 50 bp, synthetic construct
  source 1..50: mol_type = other DNA
taaaataaaacctaaacaacacaaactatctcacaaataactatatacac

SEQ ID NO: 36356 - DNA, 50 bp, synthetic construct
  source 1..50: mol_type = other DNA
taataataatcataaaaaaactaatcttaatatccactataaaaaacccc

SEQ ID NO: 36357 - DNA, 50 bp, synthetic construct
  source 1..50: mol_type = other DNA
aaaacccaataaaatacttctcttcaatatttatttttaaactataccac

SEQ ID NO: 36358 - DNA, 50 bp, synthetic construct
  source 1..50: mol_type = other DNA
aaactataaaaaaactcacaatatcaacaacaaaacctaccaacttcacc

SEQ ID NO: 36359 - DNA, 50 bp, synthetic construct
  source 1..50: mol_type = other DNA
actataaaaaaactcacaatatcaacaacaaaacctaccaacttcaccrc

SEQ ID NO: 36360 - DNA, 50 bp, synthetic construct
  source 1..50: mol_type = other DNA
atatacatatataaacctcrcaaaaacttatctaaaacrtacraatcatc

SEQ ID NO: 36361 - DNA, 50 bp, synthetic construct
  source 1..50: mol_type = other DNA
catattacatatacatatataaacctcrcaaaaacttatctaaaacrtac

SEQ ID NO: 36362 - DNA, 50 bp, synthetic construct
  source 1..50: mol_type = other DNA
tcacatatacacatacaacataaactaaactatctaataaccataaatac

SEQ ID NO: 36363 - DNA, 50 bp, synthetic construct
  source 1..50: mol_type = other DNA
aacctcrcctaacaaccaaacaaaatcccaacaaaacaaaataaaaattc

SEQ ID NO: 36364 - DNA, 50 bp, synthetic construct
  source 1..50: mol_type = other DNA
taacaaccaaacaaaatcccaacaaaacaaaataaaaattcraaaccctc

SEQ ID NO: 36365 - DNA, 50 bp, synthetic construct
  source 1..50: mol_type = other DNA
ctccaacctcaaatacatacatatataaaccctaccctttcctcctaaac

SEQ ID NO: 36366 - DNA, 50 bp, synthetic construct
  source 1..50: mol_type = other DNA
aaaacraaaccctcctcaaaaacttcctattattcaaaactctataaccc

SEQ ID NO: 36367 - DNA, 50 bp, synthetic construct
  source 1..50: mol_type = other DNA
tcaactacaaaataaaactcaacaaaaaaatccrcraaacacacctaacc

SEQ ID NO: 36368 - DNA, 50 bp, synthetic construct
  source 1..50: mol_type = other DNA
aattaaacttctcctccrcctaacractaaaattattattctcctccaac

SEQ ID NO: 36369 - DNA, 50 bp, synthetic construct
  source 1..50: mol_type = other DNA
aataaaaataaacccccattccccaaaacaaacraaacaaaaacaatacc

SEQ ID NO: 36370 - DNA, 50 bp, synthetic construct
  source 1..50: mol_type = other DNA
aataccraaaaaacaaatcccacccataaaataaaaccrcaaaactcttc

SEQ ID NO: 36371 - DNA, 50 bp, synthetic construct
  source 1..50: mol_type = other DNA
ccaaatctatacctaccatcraaaaaaataccacaaccacaaaaataaac

SEQ ID NO: 36372 - DNA, 50 bp, synthetic construct
  source 1..50: mol_type = other DNA
crcttacccttaacctaaaccacacaataaataaaaatctaaacccaaac

SEQ ID NO: 36373 - DNA, 50 bp, synthetic construct
  source 1..50: mol_type = other DNA
atcattatttcatcttacccctaaaaaacaaaaacccaacraaatcaaac

SEQ ID NO: 36374 - DNA, 50 bp, synthetic construct
  source 1..50: mol_type = other DNA
caaaccttcactcactatataacccaaaccaaaaacaaacrtctaacctc

SEQ ID NO: 36375 - DNA, 50 bp, synthetic construct
  source 1..50: mol_type = other DNA
catacatactaatataattcractctatatctccacccaaatctcacctc

SEQ ID NO: 36376 - DNA, 50 bp, synthetic construct
  source 1..50: mol_type = other DNA
taaacaccaaacacaaatttcaataccccccatacatactaatataattc

SEQ ID NO: 36377 - DNA, 50 bp, synthetic construct
  source 1..50: mol_type = other DNA
aacatatataaaaaacactaaaacttatacttaatacccattcattcaac

SEQ ID NO: 36378 - DNA, 50 bp, synthetic construct
  source 1..50: mol_type = other DNA
ttcattcaacraatatatataactaatctcctcatcttcaactccctacc

SEQ ID NO: 36379 - DNA, 50 bp, synthetic construct
  source 1..50: mol_type = other DNA
ataccaataaatactaaaacttctccraacactatctcacacccaaaaac

SEQ ID NO: 36380 - DNA, 50 bp, synthetic construct
  source 1..50: mol_type = other DNA
tcttcrtaacttcttcataactatatttaatatccactaacracacatac

SEQ ID NO: 36381 - DNA, 50 bp, synthetic construct
  source 1..50: mol_type = other DNA
cattcrcatataccrtcaataaacattaaacacaaccataaaaaaaccac

SEQ ID NO: 36382 - DNA, 50 bp, synthetic construct
  source 1..50: mol_type = other DNA
acattaaacacaaccataaaaaaaccacraaaaaatactacctaccracc

SEQ ID NO: 36383 - DNA, 50 bp, synthetic construct
  source 1..50: mol_type = other DNA
actccctcctaaaaccttctaaaaccttctaaaacataaaaactaaaacc

SEQ ID NO: 36384 - DNA, 50 bp, synthetic construct
  source 1..50: mol_type = other DNA
atcaaccctactaccaaccaataccraatactaaaaactcaaaaaaaccc

SEQ ID NO: 36385 - DNA, 50 bp, synthetic construct
  source 1..50: mol_type = other DNA
aaaaaaacratcaaaactctcaaaaaccraatcctaaacaaaacrcaacc

SEQ ID NO: 36386 - DNA, 50 bp, synthetic construct
  source 1..50: mol_type = other DNA
aactctccraacaataataataactcracctaaaaaaacrataataaaac

SEQ ID NO: 36387 - DNA, 50 bp, synthetic construct
  source 1..50: mol_type = other DNA
taaccaataaacctcacttccatcrcccacaaacaaaaatctaaaatccc

SEQ ID NO: 36388 - DNA, 50 bp, synthetic construct
  source 1..50: mol_type = other DNA
ataaaaaaaccacttataaaatcactacractcactactcacttatctcc

SEQ ID NO: 36389 - DNA, 50 bp, synthetic construct
  source 1..50: mol_type = other DNA
aaataaacaataaatcrcaataaccctacaaataattcttttacccraac

SEQ ID NO: 36390 - DNA, 50 bp, synthetic construct
  source 1..50: mol_type = other DNA
aacaataaatcrcaataaccctacaaataattcttttacccraacractc

SEQ ID NO: 36391 - DNA, 50 bp, synthetic construct
  source 1..50: mol_type = other DNA
ataaaatcttctccttaaataaaaacctaaaaaaccacrttccaaaatcc

SEQ ID NO: 36392 - DNA, 50 bp, synthetic construct
  source 1..50: mol_type = other DNA
crattccaaaatataaaatcttctccttaaataaaaacctaaaaaaccac

SEQ ID NO: 36393 - DNA, 50 bp, synthetic construct
  source 1..50: mol_type = other DNA
ttaaaacaacaaccaaaaaaaattccaaaccrataaaatatacaaaattc

SEQ ID NO: 36394 - DNA, 50 bp, synthetic construct
  source 1..50: mol_type = other DNA
tacacactccatcratttaaaatttcctttaactactactctaaataacc

SEQ ID NO: 36395 - DNA, 50 bp, synthetic construct
  source 1..50: mol_type = other DNA
tacacaactcaactaaaaacraactccaaacaaaatcaaaccrtatactc

SEQ ID NO: 36396 - DNA, 50 bp, synthetic construct
  source 1..50: mol_type = other DNA
ctctaaacaatactaacccrtattaaaaaaccaattacccctaaaccccc

SEQ ID NO: 36397 - DNA, 50 bp, synthetic construct
  source 1..50: mol_type = other DNA
tttaaaaattaactaaatacrataatacacacctatattcacaactcctc

SEQ ID NO: 36398 - DNA, 50 bp, synthetic construct
  source 1..50: mol_type = other DNA
cractaaaacacaaaaacttaacaacatacrtaaatttatacaaacrtac

SEQ ID NO: 36399 - DNA, 50 bp, synthetic construct
  source 1..50: mol_type = other DNA
accacractaaaacacaaaaacttaacaacatacrtaaatttatacaaac

SEQ ID NO: 36400 - DNA, 50 bp, synthetic construct
  source 1..50: mol_type = other DNA
aaaaaattctactaaaaacaccaaaaaaccraaatcattcacaaaaatac

SEQ ID NO: 36401 - DNA, 50 bp, synthetic construct
  source 1..50: mol_type = other DNA
taaataattccracttcttaatattcccaacaaaactccctcaaatctac

SEQ ID NO: 36402 - DNA, 50 bp, synthetic construct
  source 1..50: mol_type = other DNA
acaaacaaattccaaacccttaaaatctatacaccractacctcaaacac

SEQ ID NO: 36403 - DNA, 50 bp, synthetic construct
  source 1..50: mol_type = other DNA
taaaaccrctatttataaaacccaaaaacaaaaacaacttctccraaatc

SEQ ID NO: 36404 - DNA, 50 bp, synthetic construct
  source 1..50: mol_type = other DNA
caccraataaatataataacaataaccctcctatctaaataaccctaatc

SEQ ID NO: 36405 - DNA, 50 bp, synthetic construct
  source 1..50: mol_type = other DNA
ccaccctaaccctaaaattccccrtattttctaaaaaacactaaacaaac

SEQ ID NO: 36406 - DNA, 50 bp, synthetic construct
  source 1..50: mol_type = other DNA
ttcctcccccataaaaaaaacccaaatctcatactccaaaataaaaaatc

SEQ ID NO: 36407 - DNA, 50 bp, synthetic construct
  source 1..50: mol_type = other DNA
ctcaccaactttccttccaaaccatcaatacttactatacaaaaattacc

SEQ ID NO: 36408 - DNA, 50 bp, synthetic construct
  source 1..50: mol_type = other DNA
accaaatcaaaacaaaaaaccctaaaaaactcaccttaccccracaaacc

SEQ ID NO: 36409 - DNA, 50 bp, synthetic construct
  source 1..50: mol_type = other DNA
aacaaacaaccaaatcaaaacaaaaaaccctaaaaaactcaccttacccc

SEQ ID NO: 36410 - DNA, 50 bp, synthetic construct
  source 1..50: mol_type = other DNA
ttataaccaaaaaactcccatcctacctacccaaacccaaaacaaaacac

SEQ ID NO: 36411 - DNA, 50 bp, synthetic construct
  source 1..50: mol_type = other DNA
aaactccatctataaatcaaaaccccacttaaaatccacaactcccaaac

SEQ ID NO: 36412 - DNA, 50 bp, synthetic construct
  source 1..50: mol_type = other DNA
ataaaatcctaacccacaaataaaacttcctcccacccctaattaaaaac

SEQ ID NO: 36413 - DNA, 50 bp, synthetic construct
  source 1..50: mol_type = other DNA
caaataataacttataaaaacaaatccaaaaaaaacaatccraccacaac

SEQ ID NO: 36414 - DNA, 50 bp, synthetic construct
  source 1..50: mol_type = other DNA
taaaactcrcaaataataacttataaaaacaaatccaaaaaaaacaatcc

SEQ ID NO: 36415 - DNA, 50 bp, synthetic construct
  source 1..50: mol_type = other DNA
cataaaccrctaatataacttaaacaaaaccaaattataacactatcacc

SEQ ID NO: 36416 - DNA, 50 bp, synthetic construct
  source 1..50: mol_type = other DNA
aaacrcacaaaaaaaataatcccaaaaaaccctaaaccaaaataaaaatc

SEQ ID NO: 36417 - DNA, 50 bp, synthetic construct
  source 1..50: mol_type = other DNA
cttaaaattttccaacaaacaaaaaacttcctaactccractataactcc

SEQ ID NO: 36418 - DNA, 50 bp, synthetic construct
  source 1..50: mol_type = other DNA
aaaaaacacaacccattcctaaccttaaatcaaaaaacraaattataacc

SEQ ID NO: 36419 - DNA, 50 bp, synthetic construct
  source 1..50: mol_type = other DNA
ctaaacaccacccaattcttcccaaaaaccaaaaaacataaacaaaaacc

SEQ ID NO: 36420 - DNA, 50 bp, synthetic construct
  source 1..50: mol_type = other DNA
aaaactaataccatcaaaaaataaataactactaaaaaacctaaactaac

SEQ ID NO: 36421 - DNA, 50 bp, synthetic construct
  source 1..50: mol_type = other DNA
ctactaaaaaacctaaactaacraaaacctaaataaaaaatacctaaacc

SEQ ID NO: 36422 - DNA, 50 bp, synthetic construct
  source 1..50: mol_type = other DNA
acraaaacctaaataaaaaatacctaaaccrcccctaccttaatttccac

SEQ ID NO: 36423 - DNA, 50 bp, synthetic construct
  source 1..50: mol_type = other DNA
aaaatatataaaaaaataaacactactcatccraaaacccctccttatac

SEQ ID NO: 36424 - DNA, 50 bp, synthetic construct
  source 1..50: mol_type = other DNA
aaacaaaaaataaattaactctacctcaaaccaaaaatcctacataaccc

SEQ ID NO: 36425 - DNA, 50 bp, synthetic construct
  source 1..50: mol_type = other DNA
ctacaaaaccttccttaaaacattaaacrttccctaaaacaataactacc

SEQ ID NO: 36426 - DNA, 50 bp, synthetic construct
  source 1..50: mol_type = other DNA
cctcatcatctaatccctaaaactacaaaaccttccttaaaacattaaac

SEQ ID NO: 36427 - DNA, 50 bp, synthetic construct
  source 1..50: mol_type = other DNA
actctacaaccccaaaaaccaaataataaaactaaccctaataaaacctc

SEQ ID NO: 36428 - DNA, 50 bp, synthetic construct
  source 1..50: mol_type = other DNA
taaaactaaccctaataaaacctcraacctatatcctacaaaaaaaaccc

SEQ ID NO: 36429 - DNA, 50 bp, synthetic construct
  source 1..50: mol_type = other DNA
aacccrtaactaatacacaaacraacaaaaccaaactcttcataataacc

SEQ ID NO: 36430 - DNA, 50 bp, synthetic construct
  source 1..50: mol_type = other DNA
tcctatcaactaaatacaaacctcctcaaactactacttataataaaacc

SEQ ID NO: 36431 - DNA, 50 bp, synthetic construct
  source 1..50: mol_type = other DNA
accccaccataaacaacaatttaaaaaaatctatatccaactaacaaaac

SEQ ID NO: 36432 - DNA, 50 bp, synthetic construct
  source 1..50: mol_type = other DNA
acaatttaaaaaaatctatatccaactaacaaaacraaactataactatc

SEQ ID NO: 36433 - DNA, 50 bp, synthetic construct
  source 1..50: mol_type = other DNA
ttaatcaaaaaacaaaactctctaataaaactactaacaatacccaaaac

SEQ ID NO: 36434 - DNA, 50 bp, synthetic construct
  source 1..50: mol_type = other DNA
tatatataaaacaacaacaaaataaacttctaaacttaaacracccctcc

SEQ ID NO: 36435 - DNA, 50 bp, synthetic construct
  source 1..50: mol_type = other DNA
taaaacaacaacaaaataaacttctaaacttaaacracccctccrcaaac

SEQ ID NO: 36436 - DNA, 50 bp, synthetic construct
  source 1..50: mol_type = other DNA
aaacaaaaaaaataacatatcratcaaacacaacaaaatcctatatccrc

SEQ ID NO: 36437 - DNA, 50 bp, synthetic construct
  source 1..50: mol_type = other DNA
ctccctactccaacaaaaaccataaaaacrctaaaaaaaccaaacctatc

SEQ ID NO: 36438 - DNA, 50 bp, synthetic construct
  source 1..50: mol_type = other DNA
ataaaaacrctaaaaaaaccaaacctatcrctactatacctaatattaac

SEQ ID NO: 36439 - DNA, 50 bp, synthetic construct
  source 1..50: mol_type = other DNA
rttacaataacracaacrctctaaataattccaaaactacrtataataac

SEQ ID NO: 36440 - DNA, 50 bp, synthetic construct
  source 1..50: mol_type = other DNA
crcaaaaaacrttacaataacracaacrctctaaataattccaaaactac

SEQ ID NO: 36441 - DNA, 50 bp, synthetic construct
  source 1..50: mol_type = other DNA
aactaaaactactaactaaaaaaatacctaaaaaacacractaacactac

SEQ ID NO: 36442 - DNA, 50 bp, synthetic construct
  source 1..50: mol_type = other DNA
aacactactctaaactaaaactactaactaaaaaaatacctaaaaaacac

SEQ ID NO: 36443 - DNA, 50 bp, synthetic construct
  source 1..50: mol_type = other DNA
aaaaaaaaaacctaacacattaaaaaccaaacccaaaaccrtacaattac

SEQ ID NO: 36444 - DNA, 50 bp, synthetic construct
  source 1..50: mol_type = other DNA
ctaattataattacacaactactaaaaaaacaaccraaaacacctaaacc

SEQ ID NO: 36445 - DNA, 50 bp, synthetic construct
  source 1..50: mol_type = other DNA
ccccraacaacaattctaataacaaacaacctaaaaaatctaaacacaac

SEQ ID NO: 36446 - DNA, 50 bp, synthetic construct
  source 1..50: mol_type = other DNA
ctaaaaaaatcaataaaaaataccacctctacccccaataactataacac

SEQ ID NO: 36447 - DNA, 50 bp, synthetic construct
  source 1..50: mol_type = other DNA
aaaaatatcattactaaaaaaacaaaataaaactcaaaccaaccctaatc

SEQ ID NO: 36448 - DNA, 50 bp, synthetic construct
  source 1..50: mol_type = other DNA
actaaaaaaacraataactaatacaaccccccrattactctaaatacatc

SEQ ID NO: 36449 - DNA, 50 bp, synthetic construct
  source 1..50: mol_type = other DNA
aaattaattcccaaaacctaaaaaaaacctccaaccccraaaacctaacc

SEQ ID NO: 36450 - DNA, 50 bp, synthetic construct
  source 1..50: mol_type = other DNA
tatatattctacaaattaattcccaaaacctaaaaaaaacctccaacccc

SEQ ID NO: 36451 - DNA, 50 bp, synthetic construct
  source 1..50: mol_type = other DNA
aatcctaaaaaccaacctacaaaacacacacaaaatcccctaaaaaaaac

SEQ ID NO: 36452 - DNA, 50 bp, synthetic construct
  source 1..50: mol_type = other DNA
rcaacaactacraaactataactcacaaaaatcraaccctaaaaatcccc

SEQ ID NO: 36453 - DNA, 50 bp, synthetic construct
  source 1..50: mol_type = other DNA
ataaaaaactccccaaataaacctaaaaaatccaaacactcccttcctac

SEQ ID NO: 36454 - DNA, 50 bp, synthetic construct
  source 1..50: mol_type = other DNA
ctatccatcccttccctcctaaaaaataaaaactcctaactattaaacac

SEQ ID NO: 36455 - DNA, 50 bp, synthetic construct
  source 1..50: mol_type = other DNA
aaaaacracctacccaatatcacccaaaataaatacaaaataaaaacrac

SEQ ID NO: 36456 - DNA, 50 bp, synthetic construct
  source 1..50: mol_type = other DNA
aacaaaaacracctacccaatatcacccaaaataaatacaaaataaaaac

SEQ ID NO: 36457 - DNA, 50 bp, synthetic construct
  source 1..50: mol_type = other DNA
taaacctaccraatactatattcttcctcaatctaactataaacaaaaac

SEQ ID NO: 36458 - DNA, 50 bp, synthetic construct
  source 1..50: mol_type = other DNA
cctatatcccctactcraaaataaaactaatcctaaaatcctccctacac

SEQ ID NO: 36459 - DNA, 50 bp, synthetic construct
  source 1..50: mol_type = other DNA
aaaaaaaacctcccraaaaaattctctataaaaccctatatcccctactc

SEQ ID NO: 36460 - DNA, 50 bp, synthetic construct
  source 1..50: mol_type = other DNA
aaaaaactaaaaaaacctactaaaaataactatttttataccccaacccc

SEQ ID NO: 36461 - DNA, 50 bp, synthetic construct
  source 1..50: mol_type = other DNA
aacraaaaccctaaattataatacaacctcraaacaaaactaaaacctac

SEQ ID NO: 36462 - DNA, 50 bp, synthetic construct
  source 1..50: mol_type = other DNA
aaaccatattcccaaaaaccaacraaaaccctaaattataatacaacctc

SEQ ID NO: 36463 - DNA, 50 bp, synthetic construct
  source 1..50: mol_type = other DNA
atcacaaaacaaaaaccaaataacaaccataactaacraacctcctcctc

SEQ ID NO: 36464 - DNA, 50 bp, synthetic construct
  source 1..50: mol_type = other DNA
actaacttaaactacataaaaacaaccctataaaaccctcraaaaacccc

SEQ ID NO: 36465 - DNA, 50 bp, synthetic construct
  source 1..50: mol_type = other DNA
caatactcaaactaacttaaactacataaaaacaaccctataaaaccctc

SEQ ID NO: 36466 - DNA, 50 bp, synthetic construct
  source 1..50: mol_type = other DNA
attttctcraaaacaaactttcctctatatctaaaaaaacrtaaacatcc

SEQ ID NO: 36467 - DNA, 50 bp, synthetic construct
  source 1..50: mol_type = other DNA
tatttactttattttctcraaaacaaactttcctctatatctaaaaaaac

SEQ ID NO: 36468 - DNA, 50 bp, synthetic construct
  source 1..50: mol_type = other DNA
caccaacataatttaccccatcccctaaaaaaactaaaactaaatatatc

SEQ ID NO: 36469 - DNA, 50 bp, synthetic construct
  source 1..50: mol_type = other DNA
aataaaacaaaccatactaataccactcaaataaaacttaaaaaaaaccc

SEQ ID NO: 36470 - DNA, 50 bp, synthetic construct
  source 1..50: mol_type = other DNA
aaaaacccracaaaactataaccacraaccaactaaactataaatatcac

SEQ ID NO: 36471 - DNA, 50 bp, synthetic construct
  source 1..50: mol_type = other DNA
ratttaacaaaaactacaaaaaaataaatctatccaaaatcaccaccacc

SEQ ID NO: 36472 - DNA, 50 bp, synthetic construct
  source 1..50: mol_type = other DNA
cttaatatatttcrcctctacctctctcctcaaaccttcctaaaacaatc

SEQ ID NO: 36473 - DNA, 50 bp, synthetic construct
  source 1..50: mol_type = other DNA
cctaaataaaaatatttaaaaaccaatataacccctccttaatatatttc

SEQ ID NO: 36474 - DNA, 50 bp, synthetic construct
  source 1..50: mol_type = other DNA
caaaaaactaataataactatcctaccrtctcaaataaaatttaacttcc

SEQ ID NO: 36475 - DNA, 50 bp, synthetic construct
  source 1..50: mol_type = other DNA
aaatttaacttccrtctaaataataaacrtacaactaacaacacaaaacc

SEQ ID NO: 36476 - DNA, 50 bp, synthetic construct
  source 1..50: mol_type = other DNA
ttccrtctaaataataaacrtacaactaacaacacaaaaccraaaaaaac

SEQ ID NO: 36477 - DNA, 50 bp, synthetic construct
  source 1..50: mol_type = other DNA
crtctaaataataaacrtacaactaacaacacaaaaccraaaaaaacrcc

SEQ ID NO: 36478 - DNA, 50 bp, synthetic construct
  source 1..50: mol_type = other DNA
atcctaaacctaaacaatactaaaaaaacrataaatacccacrcccttac

SEQ ID NO: 36479 - DNA, 50 bp, synthetic construct
  source 1..50: mol_type = other DNA
aaaaacraatactacatcctaatcctaaacctaaacaatactaaaaaaac

SEQ ID NO: 36480 - DNA, 50 bp, synthetic construct
  source 1..50: mol_type = other DNA
ctcaccrtcttcccaacattatccaaacccaaaatcaaaatacaatactc

SEQ ID NO: 36481 - DNA, 50 bp, synthetic construct
  source 1..50: mol_type = other DNA
ctctctcaacataaacraaaaaaacctaaaatcraccttacaaacctacc

SEQ ID NO: 36482 - DNA, 50 bp, synthetic construct
  source 1..50: mol_type = other DNA
ccttacaaacctaccrtacrcaactacaacaaataaaactaaccttaaac

SEQ ID NO: 36483 - DNA, 50 bp, synthetic construct
  source 1..50: mol_type = other DNA
crtacrcaactacaacaaataaaactaaccttaaacrccracctaaattc

SEQ ID NO: 36484 - DNA, 50 bp, synthetic construct
  source 1..50: mol_type = other DNA
aaaactaaccttaaacrccracctaaattcrtctaaacaaactaacctac

SEQ ID NO: 36485 - DNA, 50 bp, synthetic construct
  source 1..50: mol_type = other DNA
aactcaccraaaccaacctaatatctatcaaaaaaaacaacttattaacc

SEQ ID NO: 36486 - DNA, 50 bp, synthetic construct
  source 1..50: mol_type = other DNA
aaaccaacctaatatctatcaaaaaaaacaacttattaaccrcrctaaac

SEQ ID NO: 36487 - DNA, 50 bp, synthetic construct
  source 1..50: mol_type = other DNA
cctaatatctatcaaaaaaaacaacttattaaccrcrctaaacraaaaac

SEQ ID NO: 36488 - DNA, 50 bp, synthetic construct
  source 1..50: mol_type = other DNA
taccaaactttccraaaaaccatcactaaaacrataaaaacaccaacaac

SEQ ID NO: 36489 - DNA, 50 bp, synthetic construct
  source 1..50: mol_type = other DNA
acacaaaaacaactactaaaaaaccaaactaaaaaataaaatttaaaacc

SEQ ID NO: 36490 - DNA, 50 bp, synthetic construct
  source 1..50: mol_type = other DNA
tcaaaaaactactaccacactataactccaacaaaaacrataaaacacac

SEQ ID NO: 36491 - DNA, 50 bp, synthetic construct
  source 1..50: mol_type = other DNA
aaaaacrataaaacacacraaacatattctaaaacaaccaaatccatccc

SEQ ID NO: 36492 - DNA, 50 bp, synthetic construct
  source 1..50: mol_type = other DNA
tatacacacaatcacacacacaccaaaaaccaattatacactttacacac

SEQ ID NO: 36493 - DNA, 50 bp, synthetic construct
  source 1..50: mol_type = other DNA
aacccaaacataacraactaaatccaaaaaaaatctacatattaaaaaac

SEQ ID NO: 36494 - DNA, 50 bp, synthetic construct
  source 1..50: mol_type = other DNA
aaaaatctacatattaaaaaacraacaacraacacacaaacaataaatac

SEQ ID NO: 36495 - DNA, 50 bp, synthetic construct
  source 1..50: mol_type = other DNA
taaaattaataacataacccaaaaccccacrctaactaataaacccctcc

SEQ ID NO: 36496 - DNA, 50 bp, synthetic construct
  source 1..50: mol_type = other DNA
tcaatcatcttcttataaatatctaccttcctctactcctactacaaacc

SEQ ID NO: 36497 - DNA, 50 bp, synthetic construct
  source 1..50: mol_type = other DNA
cacccacaaaaaaataactaaattctaaaaaccccacaaacactataaac

SEQ ID NO: 36498 - DNA, 50 bp, synthetic construct
  source 1..50: mol_type = other DNA
acaaaaaaataactaaattctaaaaaccccacaaacactataaacraaac

SEQ ID NO: 36499 - DNA, 50 bp, synthetic construct
  source 1..50: mol_type = other DNA
aactacctaacacccacaaataaataaaactcaatactactccaacraac

SEQ ID NO: 36500 - DNA, 50 bp, synthetic construct
  source 1..50: mol_type = other DNA
cctaacacccacaaataaataaaactcaatactactccaacraacraaac

SEQ ID NO: 36501 - DNA, 50 bp, synthetic construct
  source 1..50: mol_type = other DNA
aaaaaattataaattaaactatcaaaacaatacraactaaaaacrcacac

SEQ ID NO: 36502 - DNA, 50 bp, synthetic construct
  source 1..50: mol_type = other DNA
ataaaactacrataataactactacccaaaataaaaaactcaaaaaaaac

SEQ ID NO: 36503 - DNA, 50 bp, synthetic construct
  source 1..50: mol_type = other DNA
ctaattactatctaaactataataaccacaactatcttacccctcctcac

SEQ ID NO: 36504 - DNA, 50 bp, synthetic construct
  source 1..50: mol_type = other DNA
ttactatctaaactataataaccacaactatcttacccctcctcacracc

SEQ ID NO: 36505 - DNA, 50 bp, synthetic construct
  source 1..50: mol_type = other DNA
aaaaaaactaccaaaccttaaaacttcctatactaaatcaaaactaaaac

SEQ ID NO: 36506 - DNA, 50 bp, synthetic construct
  source 1..50: mol_type = other DNA
caaatttaaaactaccaaataacrccaaatccccttaaccaacccccaac

SEQ ID NO: 36507 - DNA, 50 bp, synthetic construct
  source 1..50: mol_type = other DNA
aattcactccraacaaaaaacaaaaacraatctaacccaaaaattaacac

SEQ ID NO: 36508 - DNA, 50 bp, synthetic construct
  source 1..50: mol_type = other DNA
cctaaacacctccaaccaatataaacrcaaaaaatccatactaacaaacc

SEQ ID NO: 36509 - DNA, 50 bp, synthetic construct
  source 1..50: mol_type = other DNA
acataaatctcctacrcccacactaactaaaaatatccaaaaacatcacc

SEQ ID NO: 36510 - DNA, 50 bp, synthetic construct
  source 1..50: mol_type = other DNA
cctaccctaaacactcaaaaacctatactccttcctccaaaataaaaccc

SEQ ID NO: 36511 - DNA, 50 bp, synthetic construct
  source 1..50: mol_type = other DNA
ctaaaaaacttaaaactatcccctctaaccttaaaaaactaactaccccc

SEQ ID NO: 36512 - DNA, 50 bp, synthetic construct
  source 1..50: mol_type = other DNA
aaacttaaaactatcccctctaaccttaaaaaactaactacccccraaac

SEQ ID NO: 36513 - DNA, 50 bp, synthetic construct
  source 1..50: mol_type = other DNA
ttaaaaataactaataattacaaacctaaaaccctaacctaacctccrtc

SEQ ID NO: 36514 - DNA, 50 bp, synthetic construct
  source 1..50: mol_type = other DNA
actcaaaacccraaacraataactatacrtctctatacaaaaaaaactac

SEQ ID NO: 36515 - DNA, 50 bp, synthetic construct
  source 1..50: mol_type = other DNA
acaaaaattaaaaaataacratcaaaaaccccaaaaattcctaaacaatc

SEQ ID NO: 36516 - DNA, 50 bp, synthetic construct
  source 1..50: mol_type = other DNA
aaaacaaaaacraaccctaacctaactcrctaaaacctaaaaaactaccc

SEQ ID NO: 36517 - DNA, 50 bp, synthetic construct
  source 1..50: mol_type = other DNA
cccccatcacacattaaccaaaattatacaacaacaactataaacctcac

SEQ ID NO: 36518 - DNA, 50 bp, synthetic construct
  source 1..50: mol_type = other DNA
aaccrccaaaaacaaaaccaaaatctcctaaaacctaaattctccacatc

SEQ ID NO: 36519 - DNA, 50 bp, synthetic construct
  source 1..50: mol_type = other DNA
tataaaaaactcaaacttcaaaaaaccctaaccctactcctaacractcc

SEQ ID NO: 36520 - DNA, 50 bp, synthetic construct
  source 1..50: mol_type = other DNA
aaaaaccaaacctcatacccaaaactaaaaataaaaaacctaatatacac

SEQ ID NO: 36521 - DNA, 50 bp, synthetic construct
  source 1..50: mol_type = other DNA
aaaccaaacctcatacccaaaactaaaaataaaaaacctaatatacacrc

SEQ ID NO: 36522 - DNA, 50 bp, synthetic construct
  source 1..50: mol_type = other DNA
aataaatccaaaaaatccctaatcctaaactacccctattcaccaaatcc

SEQ ID NO: 36523 - DNA, 50 bp, synthetic construct
  source 1..50: mol_type = other DNA
aacttaataaacaaaaacaactcaaaattaaaaactccctaaacccaccc

SEQ ID NO: 36524 - DNA, 50 bp, synthetic construct
  source 1..50: mol_type = other DNA
ataacctaaaccraactctacaacaacaaaaaccaaaatcaaactcaacc

SEQ ID NO: 36525 - DNA, 50 bp, synthetic construct
  source 1..50: mol_type = other DNA
tactacaaaacccracccaaatcatattccaatatctataaaaaaactac

SEQ ID NO: 36526 - DNA, 50 bp, synthetic construct
  source 1..50: mol_type = other DNA
raaacctaaaatacracraaacctacraattaactaaaattataaaaccc

SEQ ID NO: 36527 - DNA, 50 bp, synthetic construct
  source 1..50: mol_type = other DNA
taaaaaccrtaaaaaacactaaaatcaaactaaacaacccrtcratcaac

SEQ ID NO: 36528 - DNA, 50 bp, synthetic construct
  source 1..50: mol_type = other DNA
aaaaaaacttctactacacaaaactaaatattaatataaacacrctaacc

SEQ ID NO: 36529 - DNA, 50 bp, synthetic construct
  source 1..50: mol_type = other DNA
tataaaatcaaccctataacctatataaacaaaaacacatcctccrctac

SEQ ID NO: 36530 - DNA, 50 bp, synthetic construct
  source 1..50: mol_type = other DNA
aataacatctaaatatttccaacacttccaacraaaacccrctctaaaac

SEQ ID NO: 36531 - DNA, 50 bp, synthetic construct
  source 1..50: mol_type = other DNA
aaatactacaaataacatctaaatatttccaacacttccaacraaaaccc

SEQ ID NO: 36532 - DNA, 50 bp, synthetic construct
  source 1..50: mol_type = other DNA
taaaaaaatcaaaaccrtttccatcaattaacrtttcaaaacraattccc

SEQ ID NO: 36533 - DNA, 50 bp, synthetic construct
  source 1..50: mol_type = other DNA
tccactaaacaaaccacaaaacaaaaactcaaaacacaaaaaataaatcc

SEQ ID NO: 36534 - DNA, 50 bp, synthetic construct
  source 1..50: mol_type = other DNA
tcctacttacaatatcatatctacttaataacctttaccctattcattcc

SEQ ID NO: 36535 - DNA, 50 bp, synthetic construct
  source 1..50: mol_type = other DNA
ctcaaatacaaaacctaatataaaaataccataaaacaaaacacaaatcc

SEQ ID NO: 36536 - DNA, 50 bp, synthetic construct
  source 1..50: mol_type = other DNA
aaaacacaaatccracaaaaaacacttataaccactacccaaaaaacacc

SEQ ID NO: 36537 - DNA, 50 bp, synthetic construct
  source 1..50: mol_type = other DNA
taaaaaacaactcaaaaccacaatcactatctatacaaaacaaaaccccc

SEQ ID NO: 36538 - DNA, 50 bp, synthetic construct
  source 1..50: mol_type = other DNA
aacrtaactaacatctataaaacrttccatttcctataaaactccraaac

SEQ ID NO: 36539 - DNA, 50 bp, synthetic construct
  source 1..50: mol_type = other DNA
atataaaaatacatacacaaaatacaatcatacacttacacccaaaacac

SEQ ID NO: 36540 - DNA, 50 bp, synthetic construct
  source 1..50: mol_type = other DNA
atacatacacaaaatacaatcatacacttacacccaaaacacraacacac

SEQ ID NO: 36541 - DNA, 50 bp, synthetic construct
  source 1..50: mol_type = other DNA
acacacacaaaattcacccacatacttaacaaccatattcatatactaac

SEQ ID NO: 36542 - DNA, 50 bp, synthetic construct
  source 1..50: mol_type = other DNA
aaaattcacccacatacttaacaaccatattcatatactaacrtattccc

SEQ ID NO: 36543 - DNA, 50 bp, synthetic construct
  source 1..50: mol_type = other DNA
tccaaaaactaaaaatataaccctcaccaaaatatccaaaacatattaac

SEQ ID NO: 36544 - DNA, 50 bp, synthetic construct
  source 1..50: mol_type = other DNA
aaacttatatatactaattataaacacacctatctatatacrtcctatac

SEQ ID NO: 36545 - DNA, 50 bp, synthetic construct
  source 1..50: mol_type = other DNA
ttcaaaaatataaatactaaaaacrtaaaacaacaatatacrcacaaaac

SEQ ID NO: 36546 - DNA, 50 bp, synthetic construct
  source 1..50: mol_type = other DNA
taaccaatacacacaaactctacacaactaaacaaaatacaactctactc

SEQ ID NO: 36547 - DNA, 50 bp, synthetic construct
  source 1..50: mol_type = other DNA
cacacaaactctacacaactaaacaaaatacaactctactcraacaaaac

SEQ ID NO: 36548 - DNA, 50 bp, synthetic construct
  source 1..50: mol_type = other DNA
tacacaactaaacaaaatacaactctactcraacaaaacrcaccaaaaac

SEQ ID NO: 36549 - DNA, 50 bp, synthetic construct
  source 1..50: mol_type = other DNA
ctaaaaacaacctaaaacattactacttcccraatactctaatacaatcc

SEQ ID NO: 36550 - DNA, 50 bp, synthetic construct
  source 1..50: mol_type = other DNA
attattttaataataaccaaaacctaataaaattctctactcaaaaattc

SEQ ID NO: 36551 - DNA, 50 bp, synthetic construct
  source 1..50: mol_type = other DNA
aaatattctaaacraaactaaatatcccrcaaaaaattccrcaactcctc

SEQ ID NO: 36552 - DNA, 50 bp, synthetic construct
  source 1..50: mol_type = other DNA
aaaaaaacccaaatattctaaacraaactaaatatcccrcaaaaaattcc

SEQ ID NO: 36553 - DNA, 50 bp, synthetic construct
  source 1..50: mol_type = other DNA
aaaaaactatccttaatcttccaaaaacraaaaactacraaaccccctac

SEQ ID NO: 36554 - DNA, 50 bp, synthetic construct
  source 1..50: mol_type = other DNA
ataaacctaacctttctcaaatccaaaaatccctaaactcatacaacccc

SEQ ID NO: 36555 - DNA, 50 bp, synthetic construct
  source 1..50: mol_type = other DNA
aaattcaataatctacctacatctcttctccaacaacaactacacattac

SEQ ID NO: 36556 - DNA, 50 bp, synthetic construct
  source 1..50: mol_type = other DNA
aacaatcraataaaaaaacccaaaaccacaaaaaaactccaaaaaacccc

SEQ ID NO: 36557 - DNA, 50 bp, synthetic construct
  source 1..50: mol_type = other DNA
ccaaaaccacaaaaaaactccaaaaaaccccrtaaatacctccaacaacc

SEQ ID NO: 36558 - DNA, 50 bp, synthetic construct
  source 1..50: mol_type = other DNA
tctaaaatactccraaaaaaaccctcaaaaactaccctactactaacaac

SEQ ID NO: 36559 - DNA, 50 bp, synthetic construct
  source 1..50: mol_type = other DNA
atttaaaaaacaaataattcatctcccrataccaaacaacaaacrcaaac

SEQ ID NO: 36560 - DNA, 50 bp, synthetic construct
  source 1..50: mol_type = other DNA
attctaatttaaaaaacaaataattcatctcccrataccaaacaacaaac

SEQ ID NO: 36561 - DNA, 50 bp, synthetic construct
  source 1..50: mol_type = other DNA
taattccataaataatcaaatacaacctaacaacrcaacctcctatcaac

SEQ ID NO: 36562 - DNA, 50 bp, synthetic construct
  source 1..50: mol_type = other DNA
cctctactccactactaaaaccacctttactctcaaaaactataaacacc

SEQ ID NO: 36563 - DNA, 50 bp, synthetic construct
  source 1..50: mol_type = other DNA
ccccracatattcaaaatccttatcctttaacctacrtccacatataatc

SEQ ID NO: 36564 - DNA, 50 bp, synthetic construct
  source 1..50: mol_type = other DNA
aaaaaataaaacracaaataaaaacacttcaaaccraacaaacttccaac

SEQ ID NO: 36565 - DNA, 50 bp, synthetic construct
  source 1..50: mol_type = other DNA
cctctacttattattccaacacattccaaaataatacctactaaaaccac

SEQ ID NO: 36566 - DNA, 50 bp, synthetic construct
  source 1..50: mol_type = other DNA
taacttcaacaaacatcaccctaaaatatactaaaataacaaacaaaaac

SEQ ID NO: 36567 - DNA, 50 bp, synthetic construct
  source 1..50: mol_type = other DNA
cttcaacaaacatcaccctaaaatatactaaaataacaaacaaaaacrac

SEQ ID NO: 36568 - DNA, 50 bp, synthetic construct
  source 1..50: mol_type = other DNA
accraccttttattaaatacaaccacraattctttactttctcattcacc

SEQ ID NO: 36569 - DNA, 50 bp, synthetic construct
  source 1..50: mol_type = other DNA
cttttattaaatacaaccacraattctttactttctcattcaccrctaac

SEQ ID NO: 36570 - DNA, 50 bp, synthetic construct
  source 1..50: mol_type = other DNA
aaacctataactaatacttcaatcaataaattaacattcraaaacrtatc

SEQ ID NO: 36571 - DNA, 50 bp, synthetic construct
  source 1..50: mol_type = other DNA
raattctttactttctcattcaccrctaacrtctatactaataacracac

SEQ ID NO: 36572 - DNA, 50 bp, synthetic construct
  source 1..50: mol_type = other DNA
aacaaaaaaacaaacctataactaatacttcaatcaataaattaacattc

SEQ ID NO: 36573 - DNA, 50 bp, synthetic construct
  source 1..50: mol_type = other DNA
atataacattcctaaaacacatttaccatataacatcactacataataac

SEQ ID NO: 36574 - DNA, 50 bp, synthetic construct
  source 1..50: mol_type = other DNA
taatactatataacaaatataccccaaaaataccacactcacaaaacaac

SEQ ID NO: 36575 - DNA, 50 bp, synthetic construct
  source 1..50: mol_type = other DNA
taaataacaaactccttactcttactataaaaaaatattttcatctctcc

SEQ ID NO: 36576 - DNA, 50 bp, synthetic construct
  source 1..50: mol_type = other DNA
acaacaacatcccaaaatcatctcacattccatttcataaaaatcattac

SEQ ID NO: 36577 - DNA, 50 bp, synthetic construct
  source 1..50: mol_type = other DNA
tcatttttaaattatatactccataaccactaatatactacctatacaac

SEQ ID NO: 36578 - DNA, 50 bp, synthetic construct
  source 1..50: mol_type = other DNA
ttccttttcttcctattcttctcctttacccattatataaaattaactcc

SEQ ID NO: 36579 - DNA, 50 bp, synthetic construct
  source 1..50: mol_type = other DNA
taaaacctactaaaaaaaatactaaaacaacaaaaataaaacctaccccc

SEQ ID NO: 36580 - DNA, 50 bp, synthetic construct
  source 1..50: mol_type = other DNA
cacttaacaaataaaattcctcraaaaaataacctaccrtatacccaccc

SEQ ID NO: 36581 - DNA, 50 bp, synthetic construct
  source 1..50: mol_type = other DNA
aaaaaaaaaaaccacttaacaaataaaattcctcraaaaaataacctacc

SEQ ID NO: 36582 - DNA, 50 bp, synthetic construct
  source 1..50: mol_type = other DNA
aatatataaaacrtaaatcctaaatactaaaccataaaaatacaacaaac

SEQ ID NO: 36583 - DNA, 50 bp, synthetic construct
  source 1..50: mol_type = other DNA
tataaaacrtaaatcctaaatactaaaccataaaaatacaacaaacraac

SEQ ID NO: 36584 - DNA, 50 bp, synthetic construct
  source 1..50: mol_type = other DNA
cttcaaccaaaacaaatcaaataattaccatatccttactaacacaaaac

SEQ ID NO: 36585 - DNA, 50 bp, synthetic construct
  source 1..50: mol_type = other DNA
aaaacaaatcaaataattaccatatccttactaacacaaaacraaaacac

SEQ ID NO: 36586 - DNA, 50 bp, synthetic construct
  source 1..50: mol_type = other DNA
aaccrtcacaaaaaactacaaaactacaacaccaaaacrcaaactcaaac

SEQ ID NO: 36587 - DNA, 50 bp, synthetic construct
  source 1..50: mol_type = other DNA
rcacrcctaaatttacrttctaatactacaactttacaaccctttataac

SEQ ID NO: 36588 - DNA, 50 bp, synthetic construct
  source 1..50: mol_type = other DNA
aaatttacrttctaatactacaactttacaaccctttataacraccacrc

SEQ ID NO: 36589 - DNA, 50 bp, synthetic construct
  source 1..50: mol_type = other DNA
ataaatatctaaccccrttcttactaaaaataacrctcraaaataccacc

SEQ ID NO: 36590 - DNA, 50 bp, synthetic construct
  source 1..50: mol_type = other DNA
ttcccrtactcttacctatatataaaaacccraaaaccaaactaataacc

SEQ ID NO: 36591 - DNA, 50 bp, synthetic construct
  source 1..50: mol_type = other DNA
ctaacaaatcaaaatacrattcccrtactcttacctatatataaaaaccc

SEQ ID NO: 36592 - DNA, 50 bp, synthetic construct
  source 1..50: mol_type = other DNA
aaaacacaaaaaaccattaacaaataataactaaaaaaaacactttcctc

SEQ ID NO: 36593 - DNA, 50 bp, synthetic construct
  source 1..50: mol_type = other DNA
attaattacctactaaattacaaaaatccccctaacactaactccttacc

SEQ ID NO: 36594 - DNA, 50 bp, synthetic construct
  source 1..50: mol_type = other DNA
tcacrtactacttaatcatctaatctcctttcaataaactattaatatcc

SEQ ID NO: 36595 - DNA, 50 bp, synthetic construct
  source 1..50: mol_type = other DNA
taactatcctatcaaattcattccaaaataactaaccccrtaatattccc

SEQ ID NO: 36596 - DNA, 50 bp, synthetic construct
  source 1..50: mol_type = other DNA
taaaaatttatatatctaaacaactaaattaaccraatactataactcac

SEQ ID NO: 36597 - DNA, 50 bp, synthetic construct
  source 1..50: mol_type = other DNA
aaaatttatatatctaaacaactaaattaaccraatactataactcacrc

SEQ ID NO: 36598 - DNA, 50 bp, synthetic construct
  source 1..50: mol_type = other DNA
caactaactaactaactaactaaatccttcaaaataaaactacaatcatc

SEQ ID NO: 36599 - DNA, 50 bp, synthetic construct
  source 1..50: mol_type = other DNA
ttaacaaaaacaatcctatctcaacataaatacccaaactactccrtctc

SEQ ID NO: 36600 - DNA, 50 bp, synthetic construct
  source 1..50: mol_type = other DNA
ctcatttaacaaaaacaatcctatctcaacataaatacccaaactactcc

SEQ ID NO: 36601 - DNA, 50 bp, synthetic construct
  source 1..50: mol_type = other DNA
ttcctattaaaaatccratattaacataaactaaaatacaccctcaatcc

SEQ ID NO: 36602 - DNA, 50 bp, synthetic construct
  source 1..50: mol_type = other DNA
taaaaataaattaccaaaaaattaacrccctaacttcctattaaaaatcc

SEQ ID NO: 36603 - DNA, 50 bp, synthetic construct
  source 1..50: mol_type = other DNA
taaaattttcccaaaaaatccctttaaaaataaattaccaaaaaattaac

SEQ ID NO: 36604 - DNA, 50 bp, synthetic construct
  source 1..50: mol_type = other DNA
tctctattacaaacataaaaccractccttaaacccttttccaaaaactc

SEQ ID NO: 36605 - DNA, 50 bp, synthetic construct
  source 1..50: mol_type = other DNA
aaactaataacatctacrataaactcactctctattacaaacataaaacc

SEQ ID NO: 36606 - DNA, 50 bp, synthetic construct
  source 1..50: mol_type = other DNA
ccctaactcracatcaaattcatctacaaaacaaaactaataacatctac

SEQ ID NO: 36607 - DNA, 50 bp, synthetic construct
  source 1..50: mol_type = other DNA
aaactcatcrcaaatatcaccaactctattctacaaataaatttaatacc

SEQ ID NO: 36608 - DNA, 50 bp, synthetic construct
  source 1..50: mol_type = other DNA
ccaaacaactacaaaaatacaaaaccccraaaaaatcrcacctaacaaac

SEQ ID NO: 36609 - DNA, 50 bp, synthetic construct
  source 1..50: mol_type = other DNA
ctccacctataaataaccttaaccaaacaactacaaaaatacaaaacccc

SEQ ID NO: 36610 - DNA, 50 bp, synthetic construct
  source 1..50: mol_type = other DNA
ctctaaaataccctttcaatctcctcatatcacaaaactaaaaccattcc

SEQ ID NO: 36611 - DNA, 50 bp, synthetic construct
  source 1..50: mol_type = other DNA
tatcacaaaactaaaaccattccrttaaaaaaattctattcctctcctac

SEQ ID NO: 36612 - DNA, 50 bp, synthetic construct
  source 1..50: mol_type = other DNA
catcaaacaaccattttcatctaatttcccacattcatcaactcacctac

SEQ ID NO: 36613 - DNA, 50 bp, synthetic construct
  source 1..50: mol_type = other DNA
acaaaataaaccccaaactataaaacaaaaccataaaatcctcttaactc

SEQ ID NO: 36614 - DNA, 50 bp, synthetic construct
  source 1..50: mol_type = other DNA
taaaaaaatactctattaccaaaaaaaatacaattctaacacrcaaatcc

SEQ ID NO: 36615 - DNA, 50 bp, synthetic construct
  source 1..50: mol_type = other DNA
aaaatcatctttaaaaaaaaacacaaaccacaaactatttctataatacc

SEQ ID NO: 36616 - DNA, 50 bp, synthetic construct
  source 1..50: mol_type = other DNA
tcccaacctacttcttttctcttacaacrtataaattaccacactattcc

SEQ ID NO: 36617 - DNA, 50 bp, synthetic construct
  source 1..50: mol_type = other DNA
cttctcttatataaaatactaatttactaaaaaataaactatacacaatc

SEQ ID NO: 36618 - DNA, 50 bp, synthetic construct
  source 1..50: mol_type = other DNA
aaaaactaaatcatataaacaactacctttcctttcrttcctaaacaaac

SEQ ID NO: 36619 - DNA, 50 bp, synthetic construct
  source 1..50: mol_type = other DNA
aaaaaaaataaactaaaaactaaatcatataaacaactacctttcctttc

SEQ ID NO: 36620 - DNA, 50 bp, synthetic construct
  source 1..50: mol_type = other DNA
cttttccttttaacaaaataaactaaaatcctaacttttatattcctttc

SEQ ID NO: 36621 - DNA, 50 bp, synthetic construct
  source 1..50: mol_type = other DNA
aataccaatccaacaaataaacatatccaaaaaatacaacctcaaaacac

SEQ ID NO: 36622 - DNA, 50 bp, synthetic construct
  source 1..50: mol_type = other DNA
tataaatttcaattcaattcccacrcacaaaccttacctctactttctcc

SEQ ID NO: 36623 - DNA, 50 bp, synthetic construct
  source 1..50: mol_type = other DNA
accaaattaattccttataataaaactataaatttcaattcaattcccac

SEQ ID NO: 36624 - DNA, 50 bp, synthetic construct
  source 1..50: mol_type = other DNA
tacccttatttcctatatcatttcaaccttaaaatcccaacattactaac

SEQ ID NO: 36625 - DNA, 50 bp, synthetic construct
  source 1..50: mol_type = other DNA
acaaatacactataacttaactactaaattttccaaaaacaactaaactc

SEQ ID NO: 36626 - DNA, 50 bp, synthetic construct
  source 1..50: mol_type = other DNA
acatcaactactataaactaaaaactcacracatacaaaataccttatac

SEQ ID NO: 36627 - DNA, 50 bp, synthetic construct
  source 1..50: mol_type = other DNA
atttcacrcttaaaaactataacatcaactactataaactaaaaactcac

SEQ ID NO: 36628 - DNA, 50 bp, synthetic construct
  source 1..50: mol_type = other DNA
acataccrtaaattcccaatctacaacaactaatactacaacttctaaac

SEQ ID NO: 36629 - DNA, 50 bp, synthetic construct
  source 1..50: mol_type = other DNA
caacttctaaacrtaaaatccacatctaattctaaatcataaaaaatttc

SEQ ID NO: 36630 - DNA, 50 bp, synthetic construct
  source 1..50: mol_type = other DNA
aatcccacaactccctcataaaaaaccaattaaaaaaacattctaacccc

SEQ ID NO: 36631 - DNA, 50 bp, synthetic construct
  source 1..50: mol_type = other DNA
aaaattttccttaaaaaactttataaaacaatatttccttaaccacattc

SEQ ID NO: 36632 - DNA, 50 bp, synthetic construct
  source 1..50: mol_type = other DNA
tcataaacttccccaacataacrtaattcatatttctactatcttactac

SEQ ID NO: 36633 - DNA, 50 bp, synthetic construct
  source 1..50: mol_type = other DNA
caaaaaaatccaaatactaaatacttacaatacaatccaacaataacccc

SEQ ID NO: 36634 - DNA, 50 bp, synthetic construct
  source 1..50: mol_type = other DNA
actaaactttaaaaacrtttatactatatctaatacccrcatttatactc

SEQ ID NO: 36635 - DNA, 50 bp, synthetic construct
  source 1..50: mol_type = other DNA
ttaaaatacrtaactaaactttaaaaacrtttatactatatctaataccc

SEQ ID NO: 36636 - DNA, 50 bp, synthetic construct
  source 1..50: mol_type = other DNA
tataaatacraataccaaacacaatacaaacrttctcaaaacccaattac

SEQ ID NO: 36637 - DNA, 50 bp, synthetic construct
  source 1..50: mol_type = other DNA
aaacacaatacaaacrttctcaaaacccaattacrtattccaaaccaaac

SEQ ID NO: 36638 - DNA, 50 bp, synthetic construct
  source 1..50: mol_type = other DNA
tttaaaaaatcaatcctataattaaaaatctaactaccctaattcacttc

SEQ ID NO: 36639 - DNA, 50 bp, synthetic construct
  source 1..50: mol_type = other DNA
taatatatattactattcacataaataaacaattaactttacatataccc

SEQ ID NO: 36640 - DNA, 50 bp, synthetic construct
  source 1..50: mol_type = other DNA
ttttctaataaaatcactaaatccctaatacacaacctacttttaaatac

SEQ ID NO: 36641 - DNA, 50 bp, synthetic construct
  source 1..50: mol_type = other DNA
aaaatcataaaaataaacccaaactaaaaatcaaaaccctataatctacc

SEQ ID NO: 36642 - DNA, 50 bp, synthetic construct
  source 1..50: mol_type = other DNA
cccacaacctacacaactattataacaatactataaacaaatcttactac

SEQ ID NO: 36643 - DNA, 50 bp, synthetic construct
  source 1..50: mol_type = other DNA
ctataaatacaactctaaaaacaacactcattttataatttcaataaatc

SEQ ID NO: 36644 - DNA, 50 bp, synthetic construct
  source 1..50: mol_type = other DNA
ctaaaaacaacactcattttataatttcaataaatcrtatccctaaaacc

SEQ ID NO: 36645 - DNA, 50 bp, synthetic construct
  source 1..50: mol_type = other DNA
accaaaaactaaactatccctaacaacaaactatatatcaaatacctaac

SEQ ID NO: 36646 - DNA, 50 bp, synthetic construct
  source 1..50: mol_type = other DNA
cacaaatacaacaactaacttctttctaacattaaaaataataatatttc

SEQ ID NO: 36647 - DNA, 50 bp, synthetic construct
  source 1..50: mol_type = other DNA
aaaacaactaaaataatctataaaacttaacatatcaatttcaatttaac

SEQ ID NO: 36648 - DNA, 50 bp, synthetic construct
  source 1..50: mol_type = other DNA
catcacaaaatcaaaaattaaaaaccaacctaaccaattaataaaacccc

SEQ ID NO: 36649 - DNA, 50 bp, synthetic construct
  source 1..50: mol_type = other DNA
ctaaactaaacacacaaattctccatatctccaccaaaataactaaatac

SEQ ID NO: 36650 - DNA, 50 bp, synthetic construct
  source 1..50: mol_type = other DNA
acatcaatcaacaccctatatctaactcaaaatttataaatacaccaatc

SEQ ID NO: 36651 - DNA, 50 bp, synthetic construct
  source 1..50: mol_type = other DNA
raacrtaaaaaacctttacrtctaactaaaaaattataaatacaccaatc

SEQ ID NO: 36652 - DNA, 50 bp, synthetic construct
  source 1..50: mol_type = other DNA
ataaaaccaactaaactcctaaatctaatacraacrtaaaaaacctttac

SEQ ID NO: 36653 - DNA, 50 bp, synthetic construct
  source 1..50: mol_type = other DNA
tacrtaatccactaaataaaaccaactaaactcctaaatctaatacraac

SEQ ID NO: 36654 - DNA, 50 bp, synthetic construct
  source 1..50: mol_type = other DNA
cacccaataaatcacrcactaaaactacaaataaaactacttaccaatcc

SEQ ID NO: 36655 - DNA, 50 bp, synthetic construct
  source 1..50: mol_type = other DNA
ccaataaatcacrcactaaaactacaaataaaactacttaccaatccrcc

SEQ ID NO: 36656 - DNA, 50 bp, synthetic construct
  source 1..50: mol_type = other DNA
acactcctcaacccttaaataattaataaaactaaacrctataaaacaac

SEQ ID NO: 36657 - DNA, 50 bp, synthetic construct
  source 1..50: mol_type = other DNA
tcctcaacccttaaataattaataaaactaaacrctataaaacaacraac

SEQ ID NO: 36658 - DNA, 50 bp, synthetic construct
  source 1..50: mol_type = other DNA
tcaacccttaaataattaataaaactaaacrctataaaacaacraacrac

SEQ ID NO: 36659 - DNA, 50 bp, synthetic construct
  source 1..50: mol_type = other DNA
rcctaaccttaactatcttcctacaaaacaaaactaaaaacctacaaccc

SEQ ID NO: 36660 - DNA, 50 bp, synthetic construct
  source 1..50: mol_type = other DNA
caattaaaaaacttaacacctaaaccaacaactaccrtactcaatttctc

SEQ ID NO: 36661 - DNA, 50 bp, synthetic construct
  source 1..50: mol_type = other DNA
taaccctaccctacaaaaaaacaactaaaaccaaacraaaaattaaacac

SEQ ID NO: 36662 - DNA, 50 bp, synthetic construct
  source 1..50: mol_type = other DNA
actactattaaaaaataacaacrtactaacaatcctcacaaccctccctc

SEQ ID NO: 36663 - DNA, 50 bp, synthetic construct
  source 1..50: mol_type = other DNA
aaaaaccctcttaattactttatattattctctaattttacttcacatac

SEQ ID NO: 36664 - DNA, 50 bp, synthetic construct
  source 1..50: mol_type = other DNA
taaatactacctaaaaacataacctccaacctccaaaaaaactaaaaacc

SEQ ID NO: 36665 - DNA, 50 bp, synthetic construct
  source 1..50: mol_type = other DNA
aaaaaaaatcaaaacacataaacaaaccaaaaacattaaacaattctaac

SEQ ID NO: 36666 - DNA, 50 bp, synthetic construct
  source 1..50: mol_type = other DNA
aaactccatataatcttacttaataaaaaacccctatatattatttaatc

SEQ ID NO: 36667 - DNA, 50 bp, synthetic construct
  source 1..50: mol_type = other DNA
aaaaaatttataaaaaaacaactctaaatcaaaaacaaatacaaatactc

SEQ ID NO: 36668 - DNA, 50 bp, synthetic construct
  source 1..50: mol_type = other DNA
aaaacaacactactaaaaaccratcaaataaactaaaaattaataataac

SEQ ID NO: 36669 - DNA, 50 bp, synthetic construct
  source 1..50: mol_type = other DNA
ctccaacaatactacctccctataccaaaaaaaacaataaacctaactac

SEQ ID NO: 36670 - DNA, 50 bp, synthetic construct
  source 1..50: mol_type = other DNA
caacttactcaaaaataactataaacatctactaaaactcctaccctcrc

SEQ ID NO: 36671 - DNA, 50 bp, synthetic construct
  source 1..50: mol_type = other DNA
cccaacttactcaaaaataactataaacatctactaaaactcctaccctc

SEQ ID NO: 36672 - DNA, 50 bp, synthetic construct
  source 1..50: mol_type = other DNA
tcatctactaacaaaaatctaaaatcccaccactctaacracactattcc

SEQ ID NO: 36673 - DNA, 50 bp, synthetic construct
  source 1..50: mol_type = other DNA
rccatattaaccaaactaatcttaaactcttaacctcatataatccaccc

SEQ ID NO: 36674 - DNA, 50 bp, synthetic construct
  source 1..50: mol_type = other DNA
aaccaacaactaattaatcttactcacataataatatttctacacraccc

SEQ ID NO: 36675 - DNA, 50 bp, synthetic construct
  source 1..50: mol_type = other DNA
aaaaaaaccaacaactaattaatcttactcacataataatatttctacac

SEQ ID NO: 36676 - DNA, 50 bp, synthetic construct
  source 1..50: mol_type = other DNA
acccaatctcctcctaacaataaaaacaaaattactttcaattcaaaatc

SEQ ID NO: 36677 - DNA, 50 bp, synthetic construct
  source 1..50: mol_type = other DNA
taaattaaaaaataatttcattcaatcattcctcacaaccctactaaacc

SEQ ID NO: 36678 - DNA, 50 bp, synthetic construct
  source 1..50: mol_type = other DNA
aaaataatttcattcaatcattcctcacaaccctactaaaccrattcctc

SEQ ID NO: 36679 - DNA, 50 bp, synthetic construct
  source 1..50: mol_type = other DNA
acctattattaaccaatcaacrtaaaacaaaacattctcaatatataatc

SEQ ID NO: 36680 - DNA, 50 bp, synthetic construct
  source 1..50: mol_type = other DNA
tttcacaatttaccatataacctattttaccraattcaaaaaacaaacac

SEQ ID NO: 36681 - DNA, 50 bp, synthetic construct
  source 1..50: mol_type = other DNA
tatatttcaattaaattatacaacaaaaaacrtatctacctcctaaaccc

SEQ ID NO: 36682 - DNA, 50 bp, synthetic construct
  source 1..50: mol_type = other DNA
tattacttttctatatacaatcaccctccctacaaacaactttctctcac

SEQ ID NO: 36683 - DNA, 50 bp, synthetic construct
  source 1..50: mol_type = other DNA
cctattatatataaaacaaactcttcatacracaccttcaaaacracctc

SEQ ID NO: 36684 - DNA, 50 bp, synthetic construct
  source 1..50: mol_type = other DNA
tcrccctaaaaatatcrcataaaaaacttacttcacacacaacaaaattc

SEQ ID NO: 36685 - DNA, 50 bp, synthetic construct
  source 1..50: mol_type = other DNA
cacacaacaaaattcratactttaccaattcaaaaccctaataactaacc

SEQ ID NO: 36686 - DNA, 50 bp, synthetic construct
  source 1..50: mol_type = other DNA
cratactttaccaattcaaaaccctaataactaaccraaaaaataaattc

SEQ ID NO: 36687 - DNA, 50 bp, synthetic construct
  source 1..50: mol_type = other DNA
ataactaaccraaaaaataaattcrccttaactaaataccaaacaaatcc

SEQ ID NO: 36688 - DNA, 50 bp, synthetic construct
  source 1..50: mol_type = other DNA
ratctaattcraactataacataaactaaaaatcraaatcaaaaacaccc

SEQ ID NO: 36689 - DNA, 50 bp, synthetic construct
  source 1..50: mol_type = other DNA
tactaccaaaccaatcratctaattcraactataacataaactaaaaatc

SEQ ID NO: 36690 - DNA, 50 bp, synthetic construct
  source 1..50: mol_type = other DNA
aaaaaacaatctaaaataacaaactactaccaaaccaatcratctaattc

SEQ ID NO: 36691 - DNA, 50 bp, synthetic construct
  source 1..50: mol_type = other DNA
aatctaaaataaaaaacaatctaaaataacaaactactaccaaaccaatc

SEQ ID NO: 36692 - DNA, 50 bp, synthetic construct
  source 1..50: mol_type = other DNA
actttactatctccattttaataacaaaaacttaaatataaaaaccttac

SEQ ID NO: 36693 - DNA, 50 bp, synthetic construct
  source 1..50: mol_type = other DNA
tacattacatcattttctattcataacaatcccaaaaactaaataaaatc

SEQ ID NO: 36694 - DNA, 50 bp, synthetic construct
  source 1..50: mol_type = other DNA
acctatttttacttatttttactttcattttatttcaaaacatttaatac

SEQ ID NO: 36695 - DNA, 50 bp, synthetic construct
  source 1..50: mol_type = other DNA
ccctctccaattccaatttccttcacaaaaaataataacttcctactctc

SEQ ID NO: 36696 - DNA, 50 bp, synthetic construct
  source 1..50: mol_type = other DNA
aataacttcctactctcraataaactaaaaaacttttctttttaaaaatc

SEQ ID NO: 36697 - DNA, 50 bp, synthetic construct
  source 1..50: mol_type = other DNA
tcraataaactaaaaaacttttctttttaaaaatcrtaatccaaactctc

SEQ ID NO: 36698 - DNA, 50 bp, synthetic construct
  source 1..50: mol_type = other DNA
ataacataaccaaaaatcataataaaataacttaacccacaaatatcacc

SEQ ID NO: 36699 - DNA, 50 bp, synthetic construct
  source 1..50: mol_type = other DNA
catattctcataataactcrtaaaataactccrtaaaaaatactaacccc

SEQ ID NO: 36700 - DNA, 50 bp, synthetic construct
  source 1..50: mol_type = other DNA
taaacctctctaaatcaccatattctcataataactcrtaaaataactcc

SEQ ID NO: 36701 - DNA, 50 bp, synthetic construct
  source 1..50: mol_type = other DNA
aaactattccacraactactataaaaacataataactcaaaaaaactcac

SEQ ID NO: 36702 - DNA, 50 bp, synthetic construct
  source 1..50: mol_type = other DNA
ctccaaatcctaaaaaaactcaactttttactactattctctaaatcctc

SEQ ID NO: 36703 - DNA, 50 bp, synthetic construct
  source 1..50: mol_type = other DNA
aacaaccatcattctactttatctctaaatctaactactctaaaaacctc

SEQ ID NO: 36704 - DNA, 50 bp, synthetic construct
  source 1..50: mol_type = other DNA
aatatcatcaaaattcatccctattaaaacatatatcaaaattcccttcc

SEQ ID NO: 36705 - DNA, 50 bp, synthetic construct
  source 1..50: mol_type = other DNA
atatatcaaaattcccttccrttataaaactaaataatattccattatac

SEQ ID NO: 36706 - DNA, 50 bp, synthetic construct
  source 1..50: mol_type = other DNA
ataaacacttaaattacctccacrtttaaattattataaatcatactacc

SEQ ID NO: 36707 - DNA, 50 bp, synthetic construct
  source 1..50: mol_type = other DNA
aaaaaaaacrtaaccaaaaaacccatcctatctcttacatttccracacc

SEQ ID NO: 36708 - DNA, 50 bp, synthetic construct
  source 1..50: mol_type = other DNA
tctccaatactaaacaaccctacccaactctaaaatacaaataacaactc

SEQ ID NO: 36709 - DNA, 50 bp, synthetic construct
  source 1..50: mol_type = other DNA
acaaactctaataaaaaacacacaaaacaaacttccactacctaaaaccc

SEQ ID NO: 36710 - DNA, 50 bp, synthetic construct
  source 1..50: mol_type = other DNA
ctcctcttcacaaactccaacttataactcaattatttcattttatacac

SEQ ID NO: 36711 - DNA, 50 bp, synthetic construct
  source 1..50: mol_type = other DNA
tctacaaaatttcatttttttcctaaactcctctacattatacaatatac

SEQ ID NO: 36712 - DNA, 50 bp, synthetic construct
  source 1..50: mol_type = other DNA
aaattataaaaaccctaaaataatacttttcctaaaatcttctcattaac

SEQ ID NO: 36713 - DNA, 50 bp, synthetic construct
  source 1..50: mol_type = other DNA
ctaccaaaatactatttcaataaattatctaaatataaaatataatctac

SEQ ID NO: 36714 - DNA, 50 bp, synthetic construct
  source 1..50: mol_type = other DNA
caaaactaacccaactccaaatactccaaaacccaactctataacatcac

SEQ ID NO: 36715 - DNA, 50 bp, synthetic construct
  source 1..50: mol_type = other DNA
tactacaaaattaaactttaaaacatttaaaactaaatcaaccctacctc

SEQ ID NO: 36716 - DNA, 50 bp, synthetic construct
  source 1..50: mol_type = other DNA
aaaacatttaaaactaaatcaaccctacctcrctaactactaacctcccc

SEQ ID NO: 36717 - DNA, 50 bp, synthetic construct
  source 1..50: mol_type = other DNA
ctcccraaactaatacctaacattttaaataataaaatccacatcctatc

SEQ ID NO: 36718 - DNA, 50 bp, synthetic construct
  source 1..50: mol_type = other DNA
tataatttcacttataccataataaacrttaccaaaaacttaactctccc

SEQ ID NO: 36719 - DNA, 50 bp, synthetic construct
  source 1..50: mol_type = other DNA
tcatttaaaatactaaacatcaactccraaaaaattaaatccttaataac

SEQ ID NO: 36720 - DNA, 50 bp, synthetic construct
  source 1..50: mol_type = other DNA
aatcaaaaaaataaacctttcttcatcttaaaactacaaaacaaaataac

SEQ ID NO: 36721 - DNA, 50 bp, synthetic construct
  source 1..50: mol_type = other DNA
acaacccatcatcacacaaattctcttaaccctatatatcraaatttcac

SEQ ID NO: 36722 - DNA, 50 bp, synthetic construct
  source 1..50: mol_type = other DNA
actaacatttacaacccatcatcacacaaattctcttaaccctatatatc

SEQ ID NO: 36723 - DNA, 50 bp, synthetic construct
  source 1..50: mol_type = other DNA
ttattaaatataaatcractctacaataacaactacacattacaaccctc

SEQ ID NO: 36724 - DNA, 50 bp, synthetic construct
  source 1..50: mol_type = other DNA
aaaaaccctaaaaaccraaaactataatatacaactaccactacaaaatc

SEQ ID NO: 36725 - DNA, 50 bp, synthetic construct
  source 1..50: mol_type = other DNA
cctattaaaacctcaatcccraaaataacaacrtataataaaacttcaac

SEQ ID NO: 36726 - DNA, 50 bp, synthetic construct
  source 1..50: mol_type = other DNA
acactctaaaactaaaactcrttaaaacctcactatacrctatcatcttc

SEQ ID NO: 36727 - DNA, 50 bp, synthetic construct
  source 1..50: mol_type = other DNA
aaactaaaatttcaacaaaacaccaaaaaacaaaatacaaaaacctacac

SEQ ID NO: 36728 - DNA, 50 bp, synthetic construct
  source 1..50: mol_type = other DNA
aacaaaacaccaaaaaacaaaatacaaaaacctacacrctaaccctacac

SEQ ID NO: 36729 - DNA, 50 bp, synthetic construct
  source 1..50: mol_type = other DNA
aaaactccaactattacctcaccaaactacraaattatactacractacc

SEQ ID NO: 36730 - DNA, 50 bp, synthetic construct
  source 1..50: mol_type = other DNA
acccaaaaaaactccaactattacctcaccaaactacraaattatactac

SEQ ID NO: 36731 - DNA, 50 bp, synthetic construct
  source 1..50: mol_type = other DNA
taacctaaaaaatacccaaaaaaactccaactattacctcaccaaactac

SEQ ID NO: 36732 - DNA, 50 bp, synthetic construct
  source 1..50: mol_type = other DNA
taataaacttaaccttaccacttccctaaaaacccaaaacaaaaaaacac

SEQ ID NO: 36733 - DNA, 50 bp, synthetic construct
  source 1..50: mol_type = other DNA
cacttccctaaaaacccaaaacaaaaaaacacrtctatcatcaataaacc

SEQ ID NO: 36734 - DNA, 50 bp, synthetic construct
  source 1..50: mol_type = other DNA
atcatcaataaaccrcctaaaaaaatacttaatcctaacttaactaaaac

SEQ ID NO: 36735 - DNA, 50 bp, synthetic construct
  source 1..50: mol_type = other DNA
tacaataaactataactttaccaaaaaattaaataacaattttcattctc

SEQ ID NO: 36736 - DNA, 50 bp, synthetic construct
  source 1..50: mol_type = other DNA
tctcrctcatattaactacaacttctaaataccaccataaataaaaaaac

SEQ ID NO: 36737 - DNA, 50 bp, synthetic construct
  source 1..50: mol_type = other DNA
ctttaatccaaaatattaatttcactttaaactctaacctcacttaacac

SEQ ID NO: 36738 - DNA, 50 bp, synthetic construct
  source 1..50: mol_type = other DNA
ataaacaaaaaatatctcaatctaatataactactacrcrataaacaaac

SEQ ID NO: 36739 - DNA, 50 bp, synthetic construct
  source 1..50: mol_type = other DNA
tttataatctcctataaacaaaaaatatctcaatctaatataactactac

SEQ ID NO: 36740 - DNA, 50 bp, synthetic construct
  source 1..50: mol_type = other DNA
cattatattatatttacctaaatcaattaaaccctaacaaaaccatacac

SEQ ID NO: 36741 - DNA, 50 bp, synthetic construct
  source 1..50: mol_type = other DNA
actctcccaattcaacaaaaactaatctcactaattacctataaaacccc

SEQ ID NO: 36742 - DNA, 50 bp, synthetic construct
  source 1..50: mol_type = other DNA
actaatctcactaattacctataaaaccccractccctaaaataactctc

SEQ ID NO: 36743 - DNA, 50 bp, synthetic construct
  source 1..50: mol_type = other DNA
cttaactaaaataacataacccrattactttaccaacttaaaaaaataac

SEQ ID NO: 36744 - DNA, 50 bp, synthetic construct
  source 1..50: mol_type = other DNA
cccaaatactcataatataacattccaccttaactaaaataacataaccc

SEQ ID NO: 36745 - DNA, 50 bp, synthetic construct
  source 1..50: mol_type = other DNA
tcctatctaaaaaacactaacaataccccctaacaaatacttcactaaac

SEQ ID NO: 36746 - DNA, 50 bp, synthetic construct
  source 1..50: mol_type = other DNA
acctaactttactcatatatatcctatactttaaaaatatctaacttccc

SEQ ID NO: 36747 - DNA, 50 bp, synthetic construct
  source 1..50: mol_type = other DNA
actcatatatatcctatactttaaaaatatctaacttcccractaaatac

SEQ ID NO: 36748 - DNA, 50 bp, synthetic construct
  source 1..50: mol_type = other DNA
atataaaacttttaacaaatacataaactcattaatttttatctcttaac

SEQ ID NO: 36749 - DNA, 50 bp, synthetic construct
  source 1..50: mol_type = other DNA
tttaaaatatatatacattaaaccraacacaataactcaaacctataatc

SEQ ID NO: 36750 - DNA, 50 bp, synthetic construct
  source 1..50: mol_type = other DNA
aaaatctccracctcctaaataactatttaaaatatatatacattaaacc

SEQ ID NO: 36751 - DNA, 50 bp, synthetic construct
  source 1..50: mol_type = other DNA
actatacccracccaatatatacacattttaaacaatcatttaaaaaatc

SEQ ID NO: 36752 - DNA, 50 bp, synthetic construct
  source 1..50: mol_type = other DNA
caaaccaactaacaaaacaaaacattcttccttatcattaccccraaaac

SEQ ID NO: 36753 - DNA, 50 bp, synthetic construct
  source 1..50: mol_type = other DNA
aattttcaaaccaactaacaaaacaaaacattcttccttatcattacccc

SEQ ID NO: 36754 - DNA, 50 bp, synthetic construct
  source 1..50: mol_type = other DNA
actccraactttacactaaacattaaaaaaaccttcaataactcttcccc

SEQ ID NO: 36755 - DNA, 50 bp, synthetic construct
  source 1..50: mol_type = other DNA
ttcaacaaactattaaaaccaactttctatatcaaaaattataaacttcc

SEQ ID NO: 36756 - DNA, 50 bp, synthetic construct
  source 1..50: mol_type = other DNA
actccccttaaaatttaaataaccaactaaatttccaaataaccactccc

SEQ ID NO: 36757 - DNA, 50 bp, synthetic construct
  source 1..50: mol_type = other DNA
aaatttaaaattaacatcrtaatactacttcaccctaaccacctcatcac

SEQ ID NO: 36758 - DNA, 50 bp, synthetic construct
  source 1..50: mol_type = other DNA
taaacacaaacccaccctctcttctcttctcaaaatttaaaattaacatc

SEQ ID NO: 36759 - DNA, 50 bp, synthetic construct
  source 1..50: mol_type = other DNA
aaaaaaaataaatttatactcactattaccaaacaacraaaccacacrcc

SEQ ID NO: 36760 - DNA, 50 bp, synthetic construct
  source 1..50: mol_type = other DNA
taaaaaatcaaaataacrctaaaaaaacaacaataaaacccacccrcacc

SEQ ID NO: 36761 - DNA, 50 bp, synthetic construct
  source 1..50: mol_type = other DNA
ttaactaaaaaatcaaaataacrctaaaaaaacaacaataaaacccaccc

SEQ ID NO: 36762 - DNA, 50 bp, synthetic construct
  source 1..50: mol_type = other DNA
catcaacataatcatctccactaaaaatttaactaaaaaatcaaaataac

SEQ ID NO: 36763 - DNA, 50 bp, synthetic construct
  source 1..50: mol_type = other DNA
actaaactaccacaatataaaactcaacacaaaataccctctacccacac

SEQ ID NO: 36764 - DNA, 50 bp, synthetic construct
  source 1..50: mol_type = other DNA
tctaaacaaacaaacaaacaaaattccctctaaaaccrtaacracttctc

SEQ ID NO: 36765 - DNA, 50 bp, synthetic construct
  source 1..50: mol_type = other DNA
ttcaaaaaacaaactaacttattaaccatcractaaataaactaacctac

SEQ ID NO: 36766 - DNA, 50 bp, synthetic construct
  source 1..50: mol_type = other DNA
tttctaaatttaaacttccrttcaaaaaacaaactaacttattaaccatc

SEQ ID NO: 36767 - DNA, 50 bp, synthetic construct
  source 1..50: mol_type = other DNA
caaatcaacccacctaaccrataactaacaaatcaatttattttctaaac

SEQ ID NO: 36768 - DNA, 50 bp, synthetic construct
  source 1..50: mol_type = other DNA
tcatttcaaccacactaaaatttataacrccctaacactccccatttcac

SEQ ID NO: 36769 - DNA, 50 bp, synthetic construct
  source 1..50: mol_type = other DNA
acttaccatttactttctactttcatttcaaccacactaaaatttataac

SEQ ID NO: 36770 - DNA, 50 bp, synthetic construct
  source 1..50: mol_type = other DNA
aaaacaacaaaacccatcrttctatctaaactatttccaatccaactaac

SEQ ID NO: 36771 - DNA, 50 bp, synthetic construct
  source 1..50: mol_type = other DNA
ttaactaaattaaaaacaatccaaacaaaacrataaactctactacctcc

SEQ ID NO: 36772 - DNA, 50 bp, synthetic construct
  source 1..50: mol_type = other DNA
caatccaaacaaaacrataaactctactacctccraataaaacaccaaac

SEQ ID NO: 36773 - DNA, 50 bp, synthetic construct
  source 1..50: mol_type = other DNA
ataaattacaaaccaaacatactaacaactacctataatttcaacttctc

SEQ ID NO: 36774 - DNA, 50 bp, synthetic construct
  source 1..50: mol_type = other DNA
actaccaacatacctaatctacaatttacatcttttatacactacaacac

SEQ ID NO: 36775 - DNA, 50 bp, synthetic construct
  source 1..50: mol_type = other DNA
ctaaatcatttctaataactctacttaaataatcctatcaactacaaaac

SEQ ID NO: 36776 - DNA, 50 bp, synthetic construct
  source 1..50: mol_type = other DNA
cactcaccctccatctctaaatcaattaccttttaataaaaatactattc

SEQ ID NO: 36777 - DNA, 50 bp, synthetic construct
  source 1..50: mol_type = other DNA
aaatcaattaccttttaataaaaatactattcrctaatcatattcatacc

SEQ ID NO: 36778 - DNA, 50 bp, synthetic construct
  source 1..50: mol_type = other DNA
crcaaccttttccctacacrctttaaatataacaatacaaatcatataac

SEQ ID NO: 36779 - DNA, 50 bp, synthetic construct
  source 1..50: mol_type = other DNA
ttccttacaacaacrtaaaaacaaactcaaaaactaaaacaaacaaaacc

SEQ ID NO: 36780 - DNA, 50 bp, synthetic construct
  source 1..50: mol_type = other DNA
aaaacactccaaacaaaaaaaacaaccaaaaccaaaaccttaaaacaaac

SEQ ID NO: 36781 - DNA, 50 bp, synthetic construct
  source 1..50: mol_type = other DNA
tttattttaaccrccccaaaaaactcacacattattcctcatttaactac

SEQ ID NO: 36782 - DNA, 50 bp, synthetic construct
  source 1..50: mol_type = other DNA
aaatcratatctataattaaaaacccccrtccrtaatatttattttaacc

SEQ ID NO: 36783 - DNA, 50 bp, synthetic construct
  source 1..50: mol_type = other DNA
aaataaaaaacaatatataaattccctaaaacraccaaaacaaacaccac

SEQ ID NO: 36784 - DNA, 50 bp, synthetic construct
  source 1..50: mol_type = other DNA
tttcrcctccaaaactataaaaaaatcratatctataattaaaaaccccc

SEQ ID NO: 36785 - DNA, 50 bp, synthetic construct
  source 1..50: mol_type = other DNA
actccrtacaattttcttaaacttttcrcctccaaaactataaaaaaatc

SEQ ID NO: 36786 - DNA, 50 bp, synthetic construct
  source 1..50: mol_type = other DNA
atctccatcaaaacctcataaatactccrtacaattttcttaaacttttc

SEQ ID NO: 36787 - DNA, 50 bp, synthetic construct
  source 1..50: mol_type = other DNA
tttaaaattaacctcctcaaaatttaacrtcttacataataataatatac

SEQ ID NO: 36788 - DNA, 50 bp, synthetic construct
  source 1..50: mol_type = other DNA
aacttaataccataatttcttataccacttctaccatacttaaaatatcc

SEQ ID NO: 36789 - DNA, 50 bp, synthetic construct
  source 1..50: mol_type = other DNA
cacatcaatttcaacaacractacttcttttcaaaaaccrcataaacatc

SEQ ID NO: 36790 - DNA, 50 bp, synthetic construct
  source 1..50: mol_type = other DNA
tcctatttcaacacatcaatttcaacaacractacttcttttcaaaaacc

SEQ ID NO: 36791 - DNA, 50 bp, synthetic construct
  source 1..50: mol_type = other DNA
aaaacaatacaaatctatacttcctatttcaacacatcaatttcaacaac

SEQ ID NO: 36792 - DNA, 50 bp, synthetic construct
  source 1..50: mol_type = other DNA
aaaattcccacaaacattacccaaataactaaaaaatacctttcctaacc

SEQ ID NO: 36793 - DNA, 50 bp, synthetic construct
  source 1..50: mol_type = other DNA
aaaaatccaaatcaataataaccaactacctaaaatctacraaaaaaacc

SEQ ID NO: 36794 - DNA, 50 bp, synthetic construct
  source 1..50: mol_type = other DNA
tataaatccaaataaataatttacacttacctaattaatcrattttcctc

SEQ ID NO: 36795 - DNA, 50 bp, synthetic construct
  source 1..50: mol_type = other DNA
atcatcaataaaaaaatatataacacatttacaaataaaatcrattaccc

SEQ ID NO: 36796 - DNA, 50 bp, synthetic construct
  source 1..50: mol_type = other DNA
aataaccrataatatctaaattcatcatcrcctaaattattaaaaaacac

SEQ ID NO: 36797 - DNA, 50 bp, synthetic construct
  source 1..50: mol_type = other DNA
ttaatataaaactcatttaaaaataaccrataatatctaaattcatcatc

SEQ ID NO: 36798 - DNA, 50 bp, synthetic construct
  source 1..50: mol_type = other DNA
aactaaattataaaaccttatactttatttccaaacctacaattccaccc

SEQ ID NO: 36799 - DNA, 50 bp, synthetic construct
  source 1..50: mol_type = other DNA
cccttcccrcttcaatccaactcaaatatcaattaacracttatatatac

SEQ ID NO: 36800 - DNA, 50 bp, synthetic construct
  source 1..50: mol_type = other DNA
aaataaaatataaaactctataactcaacctaactccrcacacacaaacc

SEQ ID NO: 36801 - DNA, 50 bp, synthetic construct
  source 1..50: mol_type = other DNA
tataaccataaaaaacraaaataccttaaaaactatccccraaaataaac

SEQ ID NO: 36802 - DNA, 50 bp, synthetic construct
  source 1..50: mol_type = other DNA
ataaaaaacraaaataccttaaaaactatccccraaaataaacrccctcc

SEQ ID NO: 36803 - DNA, 50 bp, synthetic construct
  source 1..50: mol_type = other DNA
tattttccaaaacaacrctaaaacraatacrcccaatctttaaaaactcc

SEQ ID NO: 36804 - DNA, 50 bp, synthetic construct
  source 1..50: mol_type = other DNA
craaatcaccataaaacaattctcataaaacaataaatcaaaaatacrac

SEQ ID NO: 36805 - DNA, 50 bp, synthetic construct
  source 1..50: mol_type = other DNA
aatatcttatcatatttccaaaattctcaacaccaaacacatattcccac

SEQ ID NO: 36806 - DNA, 50 bp, synthetic construct
  source 1..50: mol_type = other DNA
acctatattaccctaaaatatctctaaccaccaacaaaatatcaacaacc

SEQ ID NO: 36807 - DNA, 50 bp, synthetic construct
  source 1..50: mol_type = other DNA
aaacaaatattataatctcattccctctacctcrtaattttcractcaac

SEQ ID NO: 36808 - DNA, 50 bp, synthetic construct
  source 1..50: mol_type = other DNA
aacaacrcaaacaaatattataatctcattccctctacctcrtaattttc

SEQ ID NO: 36809 - DNA, 50 bp, synthetic construct
  source 1..50: mol_type = other DNA
aaatcacaacatttatttacrttatctaaaattatcctctaatttcattc

SEQ ID NO: 36810 - DNA, 50 bp, synthetic construct
  source 1..50: mol_type = other DNA
catttatttacrttatctaaaattatcctctaatttcattcratacctac

SEQ ID NO: 36811 - DNA, 50 bp, synthetic construct
  source 1..50: mol_type = other DNA
aaaaacaaacacaactttaatccaaaaacrataaaccaaacacacaacrc

SEQ ID NO: 36812 - DNA, 50 bp, synthetic construct
  source 1..50: mol_type = other DNA
aaaaaaacaaacacaactttaatccaaaaacrataaaccaaacacacaac

SEQ ID NO: 36813 - DNA, 50 bp, synthetic construct
  source 1..50: mol_type = other DNA
atcttaaacaaaaaaaacatcacaaaaacrcrttatatatctaacttacc

SEQ ID NO: 36814 - DNA, 50 bp, synthetic construct
  source 1..50: mol_type = other DNA
taatactacttaacrcccctataaatctactaaaccaaccaaaaaaaacc

SEQ ID NO: 36815 - DNA, 50 bp, synthetic construct
  source 1..50: mol_type = other DNA
taaattaattaaaccraaaataaaacctaaaaaatactcrccaaaacccc

SEQ ID NO: 36816 - DNA, 50 bp, synthetic construct
  source 1..50: mol_type = other DNA
ctcaataaccataaattaattaaaccraaaataaaacctaaaaaatactc

SEQ ID NO: 36817 - DNA, 50 bp, synthetic construct
  source 1..50: mol_type = other DNA
ctaatcaaaacataaaacaacaaactaacctactaaatactctatactac

SEQ ID NO: 36818 - DNA, 50 bp, synthetic construct
  source 1..50: mol_type = other DNA
taaaacaacaaactaacctactaaatactctatactacraaattaatctc

SEQ ID NO: 36819 - DNA, 50 bp, synthetic construct
  source 1..50: mol_type = other DNA
aacaacaaactaacctactaaatactctatactacraaattaatctcrtc

SEQ ID NO: 36820 - DNA, 50 bp, synthetic construct
  source 1..50: mol_type = other DNA
aaaaataatcrcttctatcaacraaccatctataattccaattaaaatcc

SEQ ID NO: 36821 - DNA, 50 bp, synthetic construct
  source 1..50: mol_type = other DNA
ttaacttcccaaaaacaacatcraatttcaactaaaaccacaaataatcc

SEQ ID NO: 36822 - DNA, 50 bp, synthetic construct
  source 1..50: mol_type = other DNA
aaacaacatcraatttcaactaaaaccacaaataatccrttaataaaaac

SEQ ID NO: 36823 - DNA, 50 bp, synthetic construct
  source 1..50: mol_type = other DNA
accacaaataatccrttaataaaaacractactttttaactctaaaaaac

SEQ ID NO: 36824 - DNA, 50 bp, synthetic construct
  source 1..50: mol_type = other DNA
caaaacctatcaaataaaaacrctcrctctaatacctaatataaccaaac

SEQ ID NO: 36825 - DNA, 50 bp, synthetic construct
  source 1..50: mol_type = other DNA
taacaatactataactaaaattatacaaaacctatcaaataaaaacrctc

SEQ ID NO: 36826 - DNA, 50 bp, synthetic construct
  source 1..50: mol_type = other DNA
tataaatatcacaacraaatcrcctaaccacatcaaataccaaaacraac

SEQ ID NO: 36827 - DNA, 50 bp, synthetic construct
  source 1..50: mol_type = other DNA
acctaataaaccctatacaacctcaaccacaacactatcaaaaaaaacac

SEQ ID NO: 36828 - DNA, 50 bp, synthetic construct
  source 1..50: mol_type = other DNA
ctaataaaccctatacaacctcaaccacaacactatcaaaaaaaacacrc

SEQ ID NO: 36829 - DNA, 50 bp, synthetic construct
  source 1..50: mol_type = other DNA
aaaaaaacaaaaactccaacaacttcataccctacctaaacraaccaccc

SEQ ID NO: 36830 - DNA, 50 bp, synthetic construct
  source 1..50: mol_type = other DNA
taaaaaacttccaaaataataaatacatcaaaataccraacraataactc

SEQ ID NO: 36831 - DNA, 50 bp, synthetic construct
  source 1..50: mol_type = other DNA
aaaaaacraaaacaacccraaacttacrcctaatatctaaaataaaaacc

SEQ ID NO: 36832 - DNA, 50 bp, synthetic construct
  source 1..50: mol_type = other DNA
taacattactcaaacttaacacaaatcccaaaaacccaaaactaaatccc

SEQ ID NO: 36833 - DNA, 50 bp, synthetic construct
  source 1..50: mol_type = other DNA
atacaaatataaaaacatctttaacctctatcctttatctaaaactcccc

SEQ ID NO: 36834 - DNA, 50 bp, synthetic construct
  source 1..50: mol_type = other DNA
rataactatcccccaatctttacttctttcctatcacccaaaaaaacaac

SEQ ID NO: 36835 - DNA, 50 bp, synthetic construct
  source 1..50: mol_type = other DNA
aacccactacaaattactaacrtcaaaataaatcacaccracttctaaac

SEQ ID NO: 36836 - DNA, 50 bp, synthetic construct
  source 1..50: mol_type = other DNA
taccatacraataaatataacctaaaaaaaacccactacaaattactaac

SEQ ID NO: 36837 - DNA, 50 bp, synthetic construct
  source 1..50: mol_type = other DNA
cctttcctaacttttatttttaacaatcraaaaaaaccrccttaccatac

SEQ ID NO: 36838 - DNA, 50 bp, synthetic construct
  source 1..50: mol_type = other DNA
aataaaaaaattcctttcctaacttttatttttaacaatcraaaaaaacc

SEQ ID NO: 36839 - DNA, 50 bp, synthetic construct
  source 1..50: mol_type = other DNA
catactactctaaactatacaacctcaataccccaactttcctaaaaacc

SEQ ID NO: 36840 - DNA, 50 bp, synthetic construct
  source 1..50: mol_type = other DNA
cctaaaaaccrtaaaaacttcccatttacctctaaaaactcacctctcac

SEQ ID NO: 36841 - DNA, 50 bp, synthetic construct
  source 1..50: mol_type = other DNA
ataaaaaatcaacctcctaacctaaaatttcctactaaaaacrccrtatc

SEQ ID NO: 36842 - DNA, 50 bp, synthetic construct
  source 1..50: mol_type = other DNA
ctacaataaaaaatcaacctcctaacctaaaatttcctactaaaaacrcc

SEQ ID NO: 36843 - DNA, 50 bp, synthetic construct
  source 1..50: mol_type = other DNA
aaactacaataaaaaatcaacctcctaacctaaaatttcctactaaaaac

SEQ ID NO: 36844 - DNA, 50 bp, synthetic construct
  source 1..50: mol_type = other DNA
ctaacaaaaaactttaaattaaaaaactaatttcccactacaaccttaac

SEQ ID NO: 36845 - DNA, 50 bp, synthetic construct
  source 1..50: mol_type = other DNA
aaactttaaattaaaaaactaatttcccactacaaccttaacraacaaac

SEQ ID NO: 36846 - DNA, 50 bp, synthetic construct
  source 1..50: mol_type = other DNA
taaattaaaaaactaatttcccactacaaccttaacraacaaacrctacc

SEQ ID NO: 36847 - DNA, 50 bp, synthetic construct
  source 1..50: mol_type = other DNA
aatacaacctaaaactaaatctatctaacaccaaaatttatattattccc

SEQ ID NO: 36848 - DNA, 50 bp, synthetic construct
  source 1..50: mol_type = other DNA
taaatctatctaacaccaaaatttatattattcccrtcaaaacacaaacc

SEQ ID NO: 36849 - DNA, 50 bp, synthetic construct
  source 1..50: mol_type = other DNA
cccctaaaataaacctaaaataacaaaacaaacactctctaaaacttcac

SEQ ID NO: 36850 - DNA, 50 bp, synthetic construct
  source 1..50: mol_type = other DNA
taacaaaacaaacactctctaaaacttcacrtttaaccaccaaaatcttc

SEQ ID NO: 36851 - DNA, 50 bp, synthetic construct
  source 1..50: mol_type = other DNA
taaaacttcacrtttaaccaccaaaatcttcrattaattttcctttcttc

SEQ ID NO: 36852 - DNA, 50 bp, synthetic construct
  source 1..50: mol_type = other DNA
ccttattaatcccaacccaaaacaacaaaacraaatactaaacaccctcc

SEQ ID NO: 36853 - DNA, 50 bp, synthetic construct
  source 1..50: mol_type = other DNA
atatatataacctaaaaactcatacacratccattctattacccttaatc

SEQ ID NO: 36854 - DNA, 50 bp, synthetic construct
  source 1..50: mol_type = other DNA
aacccaataataccrtacaataactacratcaaaaacaataaaataaatc

SEQ ID NO: 36855 - DNA, 50 bp, synthetic construct
  source 1..50: mol_type = other DNA
tcaaaaacaataaaataaatcrtacataaactcccaaaccacacacacac

SEQ ID NO: 36856 - DNA, 50 bp, synthetic construct
  source 1..50: mol_type = other DNA
aaaaaaaataacctaaaaacatcaacttaaacactaacatcccaaacacc

SEQ ID NO: 36857 - DNA, 50 bp, synthetic construct
  source 1..50: mol_type = other DNA
ctctaaaaaatacctctataaaaaactccatcccrtaaaaacatcacaac

SEQ ID NO: 36858 - DNA, 50 bp, synthetic construct
  source 1..50: mol_type = other DNA
tccttacattatattacrattacccaaaataatcaacaaaatcacrtacc

SEQ ID NO: 36859 - DNA, 50 bp, synthetic construct
  source 1..50: mol_type = other DNA
acaaatccttacattatattacrattacccaaaataatcaacaaaatcac

SEQ ID NO: 36860 - DNA, 50 bp, synthetic construct
  source 1..50: mol_type = other DNA
tacccraccaatttaactatttaaacacacaaatccttacattatattac

SEQ ID NO: 36861 - DNA, 50 bp, synthetic construct
  source 1..50: mol_type = other DNA
aatacataactcaaaatcaccttaaatataactcataaccctacactccc

SEQ ID NO: 36862 - DNA, 50 bp, synthetic construct
  source 1..50: mol_type = other DNA
tacaaaaccataaatcacacccaaaataaccttaaatcatacatctaccc

SEQ ID NO: 36863 - DNA, 50 bp, synthetic construct
  source 1..50: mol_type = other DNA
tcccaaaaatccccaaaaaaattacaaacttaaaaaaacactaaaaaacc

SEQ ID NO: 36864 - DNA, 50 bp, synthetic construct
  source 1..50: mol_type = other DNA
ctaaaaactataaaaatatctcaccttacataacaaaaaataactaaaac

SEQ ID NO: 36865 - DNA, 50 bp, synthetic construct
  source 1..50: mol_type = other DNA
aaaatatctcaccttacataacaaaaaataactaaaacraatccccaacc

SEQ ID NO: 36866 - DNA, 50 bp, synthetic construct
  source 1..50: mol_type = other DNA
cractcaaacrcacatacaatacrtaaaatacaaaaaacctaaatactcc

SEQ ID NO: 36867 - DNA, 50 bp, synthetic construct
  source 1..50: mol_type = other DNA
ctccctaaatacataaactactaaattccrttttataaaatcraaacaac

SEQ ID NO: 36868 - DNA, 50 bp, synthetic construct
  source 1..50: mol_type = other DNA
ccaaaaaatcctaccaaccrcctccctaaatacataaactactaaattcc

SEQ ID NO: 36869 - DNA, 50 bp, synthetic construct
  source 1..50: mol_type = other DNA
cratacttcttccctaataaatatctaaccccrttcttactaaaaataac

SEQ ID NO: 36870 - DNA, 50 bp, synthetic construct
  source 1..50: mol_type = other DNA
acaccttacrataaaaactaaacaaaaacttatccttcaaacttcccaac

SEQ ID NO: 36871 - DNA, 50 bp, synthetic construct
  source 1..50: mol_type = other DNA
tcctataacaacaataaatttatcaaaaaccraaaactttaaccaaaacc

SEQ ID NO: 36872 - DNA, 50 bp, synthetic construct
  source 1..50: mol_type = other DNA
craaaactttaaccaaaaccracaaaaaaccccaatcctaaaaaaccctc

SEQ ID NO: 36873 - DNA, 50 bp, synthetic construct
  source 1..50: mol_type = other DNA
attaaccaaacacaaaaatttcaaaactttacaaaattcaaaaaataccc

SEQ ID NO: 36874 - DNA, 50 bp, synthetic construct
  source 1..50: mol_type = other DNA
taaaacctacraaaaaaataaacttctatcaacaatactcttcttccccc

SEQ ID NO: 36875 - DNA, 50 bp, synthetic construct
  source 1..50: mol_type = other DNA
ccrcactatacctaaaacrtaactcctaataacaatctcaaaacctttac

SEQ ID NO: 36876 - DNA, 50 bp, synthetic construct
  source 1..50: mol_type = other DNA
attaatatacctatctacctaaaacraacacttcaccctaactacccatc

SEQ ID NO: 36877 - DNA, 50 bp, synthetic construct
  source 1..50: mol_type = other DNA
cataacaaaccctacctaccaaaatatccraataacaataaccrataacc

SEQ ID NO: 36878 - DNA, 50 bp, synthetic construct
  source 1..50: mol_type = other DNA
aaaaaaataaccaaaaaccttccraacaacaataaaaaaacaacrcaacc

SEQ ID NO: 36879 - DNA, 50 bp, synthetic construct
  source 1..50: mol_type = other DNA
tcaaaaactaaaataccaacaaaaaaaacaacrtaacctataccrtttcc

SEQ ID NO: 36880 - DNA, 50 bp, synthetic construct
  source 1..50: mol_type = other DNA
tctccatcaaaaactaaaataccaacaaaaaaaacaacrtaacctatacc

SEQ ID NO: 36881 - DNA, 50 bp, synthetic construct
  source 1..50: mol_type = other DNA
aaatatatcraaaaaccaaaatactaataaaatcaataacaaccaaaaac

SEQ ID NO: 36882 - DNA, 50 bp, synthetic construct
  source 1..50: mol_type = other DNA
ccttacccaaaaatatatcrtaaaacctaaatataacacaaaatcaaaac

SEQ ID NO: 36883 - DNA, 50 bp, synthetic construct
  source 1..50: mol_type = other DNA
taactctatatcatacccaaacctcacracacactcctaaacaaaactac

SEQ ID NO: 36884 - DNA, 50 bp, synthetic construct
  source 1..50: mol_type = other DNA
ttttaaaaatacaaaatataatctcaaccaaaaaaccccctccataaccc

SEQ ID NO: 36885 - DNA, 50 bp, synthetic construct
  source 1..50: mol_type = other DNA
ttatacattcattcaaactacaattctttcttatccctaaactcaaaacc

SEQ ID NO: 36886 - DNA, 50 bp, synthetic construct
  source 1..50: mol_type = other DNA
aaaaaaatcacaaaacrcaaatcctaaaaactactaaatcatacctaccc

SEQ ID NO: 36887 - DNA, 50 bp, synthetic construct
  source 1..50: mol_type = other DNA
ccaaacacacraaaccraacaaacataactcaacaacccttaaaatctac

SEQ ID NO: 36888 - DNA, 50 bp, synthetic construct
  source 1..50: mol_type = other DNA
taccraaaaatattacaaatcacratcatatttaaacataaaaaactcac

SEQ ID NO: 36889 - DNA, 50 bp, synthetic construct
  source 1..50: mol_type = other DNA
ccctcaaccaaaatattctctacrtaaacttctcatactcaaatataacc

SEQ ID NO: 36890 - DNA, 50 bp, synthetic construct
  source 1..50: mol_type = other DNA
caaaaaataaatccaaaattacctaaccaaatcacacccctacrtaaacc

SEQ ID NO: 36891 - DNA, 50 bp, synthetic construct
  source 1..50: mol_type = other DNA
aaaataaacracaaatcaaacaacrccctaaatattataaaacrattcac

SEQ ID NO: 36892 - DNA, 50 bp, synthetic construct
  source 1..50: mol_type = other DNA
aaatataacctaaccaaacaattttaaacccacttcctaaccrtaaaatc

SEQ ID NO: 36893 - DNA, 50 bp, synthetic construct
  source 1..50: mol_type = other DNA
taaaacaatatatacaacaataaaaattctataaaacatattccaacccc

SEQ ID NO: 36894 - DNA, 50 bp, synthetic construct
  source 1..50: mol_type = other DNA
tatctcacaaaacttccactattacatatactaccttataaaaataaacc

SEQ ID NO: 36895 - DNA, 50 bp, synthetic construct
  source 1..50: mol_type = other DNA
taccttataaaaataaaccrataataaaaactatcccccctcattaaccc

SEQ ID NO: 36896 - DNA, 50 bp, synthetic construct
  source 1..50: mol_type = other DNA
aataaaaccattactttcaatttacttccccaatcctaacacacaaacrc

SEQ ID NO: 36897 - DNA, 50 bp, synthetic construct
  source 1..50: mol_type = other DNA
aaaataaaaccattactttcaatttacttccccaatcctaacacacaaac

SEQ ID NO: 36898 - DNA, 50 bp, synthetic construct
  source 1..50: mol_type = other DNA
ataactcaaaccctattatatcaaatcacttatttacraaatcaaaatac

SEQ ID NO: 36899 - DNA, 50 bp, synthetic construct
  source 1..50: mol_type = other DNA
caacctcraacaaataactcaaaccctattatatcaaatcacttatttac

SEQ ID NO: 36900 - DNA, 50 bp, synthetic construct
  source 1..50: mol_type = other DNA
taaaaataaaaattccaaaaatataaacctaaaaacraccctaccrttcc

SEQ ID NO: 36901 - DNA, 50 bp, synthetic construct
  source 1..50: mol_type = other DNA
atctaacacaacaaaacttaaattacttacccraaattatatcacraaac

SEQ ID NO: 36902 - DNA, 50 bp, synthetic construct
  source 1..50: mol_type = other DNA
ctatacctaaaccataaaaaacaaattaaaaaaaaccctacccctaaaac

SEQ ID NO: 36903 - DNA, 50 bp, synthetic construct
  source 1..50: mol_type = other DNA
ataatcctaaacttcaaaactacccttaatttatacttaaccratctttc

SEQ ID NO: 36904 - DNA, 50 bp, synthetic construct
  source 1..50: mol_type = other DNA
caaacctcataatcctaaacttcaaaactacccttaatttatacttaacc

SEQ ID NO: 36905 - DNA, 50 bp, synthetic construct
  source 1..50: mol_type = other DNA
cttaacaaatccctcratatttactttctcccaatccaaaaaaactccac

SEQ ID NO: 36906 - DNA, 50 bp, synthetic construct
  source 1..50: mol_type = other DNA
taaaccaaaacttctcacccccaaaccatttaaaaccccaaaaaatactc

SEQ ID NO: 36907 - DNA, 50 bp, synthetic construct
  source 1..50: mol_type = other DNA
aaatactcracaaaatccaaaaacattttaaattattcctttccaacccc

SEQ ID NO: 36908 - DNA, 50 bp, synthetic construct
  source 1..50: mol_type = other DNA
tccaaaaacattttaaattattcctttccaaccccracrataataaaaac

SEQ ID NO: 36909 - DNA, 50 bp, synthetic construct
  source 1..50: mol_type = other DNA
tctttccaaaataaaatctacctcaaacacaaacaacaacrtaatatacc

SEQ ID NO: 36910 - DNA, 50 bp, synthetic construct
  source 1..50: mol_type = other DNA
tccaaaataaaatctacctcaaacacaaacaacaacrtaatataccracc

SEQ ID NO: 36911 - DNA, 50 bp, synthetic construct
  source 1..50: mol_type = other DNA
aaacaaaaccccaaaaatattaaccraactcaaatacrtaatacctacac

SEQ ID NO: 36912 - DNA, 50 bp, synthetic construct
  source 1..50: mol_type = other DNA
acctccraaaaacttacctaacaaaaaaacrtaaaacttataattcccac

SEQ ID NO: 36913 - DNA, 50 bp, synthetic construct
  source 1..50: mol_type = other DNA
acccttacaatctaccctaataaaaaaatctacatttccatcctccacrc

SEQ ID NO: 36914 - DNA, 50 bp, synthetic construct
  source 1..50: mol_type = other DNA
taacccttacaatctaccctaataaaaaaatctacatttccatcctccac

SEQ ID NO: 36915 - DNA, 50 bp, synthetic construct
  source 1..50: mol_type = other DNA
aataaactacaaaaatcaaaaacaaccaaataaacccaaaaataataccc

SEQ ID NO: 36916 - DNA, 50 bp, synthetic construct
  source 1..50: mol_type = other DNA
acaaaaatcaaaaacaaccaaataaacccaaaaataatacccraaacatc

SEQ ID NO: 36917 - DNA, 50 bp, synthetic construct
  source 1..50: mol_type = other DNA
aaaatcaaaaacaaccaaataaacccaaaaataatacccraaacatcrcc

SEQ ID NO: 36918 - DNA, 50 bp, synthetic construct
  source 1..50: mol_type = other DNA
ttactatatctacaatctttattctcattatctataaaacctacccaaac

SEQ ID NO: 36919 - DNA, 50 bp, synthetic construct
  source 1..50: mol_type = other DNA
aaccaaactatttacacaactaaaacataacctaaaaccctaaatatcac

SEQ ID NO: 36920 - DNA, 50 bp, synthetic construct
  source 1..50: mol_type = other DNA
aaactaactaaatcaacctaaaacctatcaataaataaacaaaccccacc

SEQ ID NO: 36921 - DNA, 50 bp, synthetic construct
  source 1..50: mol_type = other DNA
aactaaacccacaaacccctaaaaaaacractaaaaaatcctaatactcc

SEQ ID NO: 36922 - DNA, 50 bp, synthetic construct
  source 1..50: mol_type = other DNA
ttatactataaccactactccttctctcrctaaactaaatactcctaaac

SEQ ID NO: 36923 - DNA, 50 bp, synthetic construct
  source 1..50: mol_type = other DNA
atcatctatataaactctacrtaatacctaacacacaataaaaacttaac

SEQ ID NO: 36924 - DNA, 50 bp, synthetic construct
  source 1..50: mol_type = other DNA
aaaacttataactcaacaataccccraaaataactcactaacaaaaaacc

SEQ ID NO: 36925 - DNA, 50 bp, synthetic construct
  source 1..50: mol_type = other DNA
aattctatttcccccatcaaaattcacataacctaaataactcatactac

SEQ ID NO: 36926 - DNA, 50 bp, synthetic construct
  source 1..50: mol_type = other DNA
aaaacaaaaccaacaacttctactaattcacraccaaaaaaaacaatacc

SEQ ID NO: 36927 - DNA, 50 bp, synthetic construct
  source 1..50: mol_type = other DNA
aaaaccaacaacttctactaattcacraccaaaaaaaacaataccraaac

SEQ ID NO: 36928 - DNA, 50 bp, synthetic construct
  source 1..50: mol_type = other DNA
atattcraaaaacactataatatcacraactccrcaaacaataaaaaaac

SEQ ID NO: 36929 - DNA, 50 bp, synthetic construct
  source 1..50: mol_type = other DNA
caaacraccaaattctaaataactactaaaaacrctttcccactatctac

SEQ ID NO: 36930 - DNA, 50 bp, synthetic construct
  source 1..50: mol_type = other DNA
ccaaattctaaataactactaaaaacrctttcccactatctacraaaccc

SEQ ID NO: 36931 - DNA, 50 bp, synthetic construct
  source 1..50: mol_type = other DNA
aaacaccctaaaattatttataaatacraacccctaaatacacttctaac

SEQ ID NO: 36932 - DNA, 50 bp, synthetic construct
  source 1..50: mol_type = other DNA
ctatactacaaacrctaaactaaccraaaaaacaaacccaacaaaaactc

SEQ ID NO: 36933 - DNA, 50 bp, synthetic construct
  source 1..50: mol_type = other DNA
rctctcaaaaatatccaacacaaaaaacaaatccacraaacaatctaacc

SEQ ID NO: 36934 - DNA, 50 bp, synthetic construct
  source 1..50: mol_type = other DNA
aacctcaaaaccacrctctcaaaaatatccaacacaaaaaacaaatccac

SEQ ID NO: 36935 - DNA, 50 bp, synthetic construct
  source 1..50: mol_type = other DNA
raccaaactaccccrtaaacctattctttatactaaacacctctaaaaac

SEQ ID NO: 36936 - DNA, 50 bp, synthetic construct
  source 1..50: mol_type = other DNA
tccctcaaattatcrataaaacrcttaataaaaaacttaactttatccac

SEQ ID NO: 36937 - DNA, 50 bp, synthetic construct
  source 1..50: mol_type = other DNA
ctctaaaaaacrctaaaaaaaactcaaaccaactcactctaaaaaacrcc

SEQ ID NO: 36938 - DNA, 50 bp, synthetic construct
  source 1..50: mol_type = other DNA
ctaaacctctcccaacrccttccaaaataaactaatttaaaaccctactc

SEQ ID NO: 36939 - DNA, 50 bp, synthetic construct
  source 1..50: mol_type = other DNA
aaactaatttaaaaccctactcrcraaaataacacctattcaacaaaacc

SEQ ID NO: 36940 - DNA, 50 bp, synthetic construct
  source 1..50: mol_type = other DNA
ccaaaatccaaataattaataaaaaactcccrcrcaccaaacaaaactac

SEQ ID NO: 36941 - DNA, 50 bp, synthetic construct
  source 1..50: mol_type = other DNA
actacccacraaacaaaccaaaatccaaataattaataaaaaactcccrc

SEQ ID NO: 36942 - DNA, 50 bp, synthetic construct
  source 1..50: mol_type = other DNA
tcactacccacraaacaaaccaaaatccaaataattaataaaaaactccc

SEQ ID NO: 36943 - DNA, 50 bp, synthetic construct
  source 1..50: mol_type = other DNA
accttcaaaacrtaaaatccaaaacccaaataaaaactctcactacccac

SEQ ID NO: 36944 - DNA, 50 bp, synthetic construct
  source 1..50: mol_type = other DNA
taatttattccrtaaacaataaaaacctctacctaaatcctaaatcccac

SEQ ID NO: 36945 - DNA, 50 bp, synthetic construct
  source 1..50: mol_type = other DNA
acaataaaaacctctacctaaatcctaaatcccacrttctaaaaatcccc

SEQ ID NO: 36946 - DNA, 50 bp, synthetic construct
  source 1..50: mol_type = other DNA
ttccrttatcccraaaaaactaatactaccrctaaaacaaaactaaaaac

SEQ ID NO: 36947 - DNA, 50 bp, synthetic construct
  source 1..50: mol_type = other DNA
actactcctaaactaaaaaacctcccccacactaactaaaaaaacratac

SEQ ID NO: 36948 - DNA, 50 bp, synthetic construct
  source 1..50: mol_type = other DNA
atactactactcctaaactaaaaaacctcccccacactaactaaaaaaac

SEQ ID NO: 36949 - DNA, 50 bp, synthetic construct
  source 1..50: mol_type = other DNA
ccaaccaatataaaaaaaatccttcaacccaaaaacaacaacacctaaac

SEQ ID NO: 36950 - DNA, 50 bp, synthetic construct
  source 1..50: mol_type = other DNA
cacaaaaataactttaaaaaaaatacaaaactcaactctcaaacaacccc

SEQ ID NO: 36951 - DNA, 50 bp, synthetic construct
  source 1..50: mol_type = other DNA
aaaatacaaaactcaactctcaaacaaccccraccaaaccaaaaaaaaac

SEQ ID NO: 36952 - DNA, 50 bp, synthetic construct
  source 1..50: mol_type = other DNA
aatataaccacaacraaaaactcaactaataaaaaaaatactctaaaaac

SEQ ID NO: 36953 - DNA, 50 bp, synthetic construct
  source 1..50: mol_type = other DNA
aaaatccactctacrtttccaaaacattcttctcactaactaaatccctc

SEQ ID NO: 36954 - DNA, 50 bp, synthetic construct
  source 1..50: mol_type = other DNA
caaaacattcttctcactaactaaatccctcrctataactacaccaaacc

SEQ ID NO: 36955 - DNA, 50 bp, synthetic construct
  source 1..50: mol_type = other DNA
ataaaaaacttatctctaaataaccaaccctaaacrataacracaaaaac

SEQ ID NO: 36956 - DNA, 50 bp, synthetic construct
  source 1..50: mol_type = other DNA
ccaaacacctcrataaacaaacaaaaccaaaaatatataaacacacraac

SEQ ID NO: 36957 - DNA, 50 bp, synthetic construct
  source 1..50: mol_type = other DNA
aaacaattaaacaacaacaacraatcrcccaaaaacttaaaaaacaccac

SEQ ID NO: 36958 - DNA, 50 bp, synthetic construct
  source 1..50: mol_type = other DNA
crcaaatcraaccrctacttcaaaattccrtaaatattaataaaaaactc

SEQ ID NO: 36959 - DNA, 50 bp, synthetic construct
  source 1..50: mol_type = other DNA
craaccrctacttcaaaattccrtaaatattaataaaaaactcrctaaac

SEQ ID NO: 36960 - DNA, 50 bp, synthetic construct
  source 1..50: mol_type = other DNA
attaaacctttttaaccaaacrccacrtactaatatcaactataactctc

SEQ ID NO: 36961 - DNA, 50 bp, synthetic construct
  source 1..50: mol_type = other DNA
crccctaaatctaacctaatctctaactaattaaacctttttaaccaaac

SEQ ID NO: 36962 - DNA, 50 bp, synthetic construct
  source 1..50: mol_type = other DNA
atcaaaaaaatccaatcaactaaaaactaaaccaaacccaaaacraaaac

SEQ ID NO: 36963 - DNA, 50 bp, synthetic construct
  source 1..50: mol_type = other DNA
ccaatcaactaaaaactaaaccaaacccaaaacraaaacraaaactctac

SEQ ID NO: 36964 - DNA, 50 bp, synthetic construct
  source 1..50: mol_type = other DNA
raaaactctacrtaaaataaattccraattaatttcctccaaacccatac

SEQ ID NO: 36965 - DNA, 50 bp, synthetic construct
  source 1..50: mol_type = other DNA
aaatttttcataactttcaaaaaaacaatttactcccaacacraacttac

SEQ ID NO: 36966 - DNA, 50 bp, synthetic construct
  source 1..50: mol_type = other DNA
aataaaaaaaatttttcataactttcaaaaaaacaatttactcccaacac

SEQ ID NO: 36967 - DNA, 50 bp, synthetic construct
  source 1..50: mol_type = other DNA
accaacttaaataaaataaatacrttaatttcctaataccaacataccac

SEQ ID NO: 36968 - DNA, 50 bp, synthetic construct
  source 1..50: mol_type = other DNA
aaaaacttcctccttcctaactataaaaaacaattataaaactccaaaac

SEQ ID NO: 36969 - DNA, 50 bp, synthetic construct
  source 1..50: mol_type = other DNA
tttacaccttcatataaaatataatcrtctcaaatatcttctaaatacac

SEQ ID NO: 36970 - DNA, 50 bp, synthetic construct
  source 1..50: mol_type = other DNA
aactatatcctttttataaaccaacctcaaaaattacataccatcacttc

SEQ ID NO: 36971 - DNA, 50 bp, synthetic construct
  source 1..50: mol_type = other DNA
tatctttaaattacccttaaaatccaaccatcatattataaaaaaacctc

SEQ ID NO: 36972 - DNA, 50 bp, synthetic construct
  source 1..50: mol_type = other DNA
cccttaaaatccaaccatcatattataaaaaaacctcraccacaaaaacc

SEQ ID NO: 36973 - DNA, 50 bp, synthetic construct
  source 1..50: mol_type = other DNA
taaaatccaaccatcatattataaaaaaacctcraccacaaaaaccracc

SEQ ID NO: 36974 - DNA, 50 bp, synthetic construct
  source 1..50: mol_type = other DNA
atccccaatctaaactacaaccaatctccaatatcaactatcaaacattc

SEQ ID NO: 36975 - DNA, 50 bp, synthetic construct
  source 1..50: mol_type = other DNA
cctaaaataacratataactactactacctaacaaattactccacacttc

SEQ ID NO: 36976 - DNA, 50 bp, synthetic construct
  source 1..50: mol_type = other DNA
ttaacaaaaaataactacaaacttcctacaaaaataactcctaaaataac

SEQ ID NO: 36977 - DNA, 50 bp, synthetic construct
  source 1..50: mol_type = other DNA
caaatttttattctttaataatccttttacatacctaaacctttctcaac

SEQ ID NO: 36978 - DNA, 50 bp, synthetic construct
  source 1..50: mol_type = other DNA
taaaaaaataccaaaccattattactctattaacaataatatatataacc

SEQ ID NO: 36979 - DNA, 50 bp, synthetic construct
  source 1..50: mol_type = other DNA
catcacaaaaaattttcaaaaaacatcacctctaaatatcataataaaac

SEQ ID NO: 36980 - DNA, 50 bp, synthetic construct
  source 1..50: mol_type = other DNA
ttaccatctaataccctttactactaacaaacrctcaaccaatcaaaaac

SEQ ID NO: 36981 - DNA, 50 bp, synthetic construct
  source 1..50: mol_type = other DNA
crtcrcrcrccaattattaaatctttcattatttctataaacctactaac

SEQ ID NO: 36982 - DNA, 50 bp, synthetic construct
  source 1..50: mol_type = other DNA
cattatttctataaacctactaacrccctcccaacrcataaaaaaactac

SEQ ID NO: 36983 - DNA, 50 bp, synthetic construct
  source 1..50: mol_type = other DNA
aatcattttataccttatactacattcrtacctctacctctccrcaatac

SEQ ID NO: 36984 - DNA, 50 bp, synthetic construct
  source 1..50: mol_type = other DNA
ctaaaataatcattttataccttatactacattcrtacctctacctctcc

SEQ ID NO: 36985 - DNA, 50 bp, synthetic construct
  source 1..50: mol_type = other DNA
aatcatctaaccctctctaaaataatcattttataccttatactacattc

SEQ ID NO: 36986 - DNA, 50 bp, synthetic construct
  source 1..50: mol_type = other DNA
ctactccaaaaaaaaccaaataactaaatcaacaaacacttaaaaaacac

SEQ ID NO: 36987 - DNA, 50 bp, synthetic construct
  source 1..50: mol_type = other DNA
aaaaaccaaataactaaatcaacaaacacttaaaaaacacractatatcc

SEQ ID NO: 36988 - DNA, 50 bp, synthetic construct
  source 1..50: mol_type = other DNA
ccaaataactaaatcaacaaacacttaaaaaacacractatatccrctac

SEQ ID NO: 36989 - DNA, 50 bp, synthetic construct
  source 1..50: mol_type = other DNA
aaataaatttaaaataaaacrtaccttaaaccccatactcataaaatccc

SEQ ID NO: 36990 - DNA, 50 bp, synthetic construct
  source 1..50: mol_type = other DNA
ttcacaatataaccctcaattacaatatattaaaaatcacttctccaacc

SEQ ID NO: 36991 - DNA, 50 bp, synthetic construct
  source 1..50: mol_type = other DNA
aatataaccctcaattacaatatattaaaaatcacttctccaaccraaac

SEQ ID NO: 36992 - DNA, 50 bp, synthetic construct
  source 1..50: mol_type = other DNA
aatattaaccccaataaaataaattaacaaaaaaaaccrcaccrttaaac

SEQ ID NO: 36993 - DNA, 50 bp, synthetic construct
  source 1..50: mol_type = other DNA
actccaaaatattaaccccaataaaataaattaacaaaaaaaaccrcacc

SEQ ID NO: 36994 - DNA, 50 bp, synthetic construct
  source 1..50: mol_type = other DNA
aaaaaaaatttaactttctaaaaaattccctaatcctaatctaaaatttc

SEQ ID NO: 36995 - DNA, 50 bp, synthetic construct
  source 1..50: mol_type = other DNA
tccaatttctaaaccaatatacacaaaaaacattacttccactaccaacc

SEQ ID NO: 36996 - DNA, 50 bp, synthetic construct
  source 1..50: mol_type = other DNA
aaccaatatacacaaaaaacattacttccactaccaaccrcctactcaac

SEQ ID NO: 36997 - DNA, 50 bp, synthetic construct
  source 1..50: mol_type = other DNA
ccccatatcttatatcaaaaaaaataatccctaaactatacaaaaaacac

SEQ ID NO: 36998 - DNA, 50 bp, synthetic construct
  source 1..50: mol_type = other DNA
atatcttatatcaaaaaaaataatccctaaactatacaaaaaacacrtcc

SEQ ID NO: 36999 - DNA, 50 bp, synthetic construct
  source 1..50: mol_type = other DNA
atatcaaaaaaaataatccctaaactatacaaaaaacacrtccrtataac

SEQ ID NO: 37000 - DNA, 50 bp, synthetic construct
  source 1..50: mol_type = other DNA
aaacctacraaacaaacacaaaaacactacactaaaatccaaccacaaac

SEQ ID NO: 37001 - DNA, 50 bp, synthetic construct
  source 1..50: mol_type = other DNA
tacraaacaaacacaaaaacactacactaaaatccaaccacaaacraaac

SEQ ID NO: 37002 - DNA, 50 bp, synthetic construct
  source 1..50: mol_type = other DNA
acrcaatctccccacaaaaataactaataataaaaaatataaaccaaacc

SEQ ID NO: 37003 - DNA, 50 bp, synthetic construct
  source 1..50: mol_type = other DNA
accraaaataccttatctaactataaaaaaacaaatccrcaacataaaac

SEQ ID NO: 37004 - DNA, 50 bp, synthetic construct
  source 1..50: mol_type = other DNA
taaccttataaaaccraaaataccttatctaactataaaaaaacaaatcc

SEQ ID NO: 37005 - DNA, 50 bp, synthetic construct
  source 1..50: mol_type = other DNA
aacrtctcatactacraatctatctcctcacaattaaataaaacactttc

SEQ ID NO: 37006 - DNA, 50 bp, synthetic construct
  source 1..50: mol_type = other DNA
aatctatctcctcacaattaaataaaacactttcratttcataaaaccac

SEQ ID NO: 37007 - DNA, 50 bp, synthetic construct
  source 1..50: mol_type = other DNA
aaaaatatacctatacatcrcaaaaaaacctaaataccacctctataaac

SEQ ID NO: 37008 - DNA, 50 bp, synthetic construct
  source 1..50: mol_type = other DNA
rtaacttcaaaaacccacraaaaactaataaaaaaatatacctatacatc

SEQ ID NO: 37009 - DNA, 50 bp, synthetic construct
  source 1..50: mol_type = other DNA
aaatcacctaatataacrccctatacacacaaaaaactccraccaaaatc

SEQ ID NO: 37010 - DNA, 50 bp, synthetic construct
  source 1..50: mol_type = other DNA
taaaattttaaaatcacctaatataacrccctatacacacaaaaaactcc

SEQ ID NO: 37011 - DNA, 50 bp, synthetic construct
  source 1..50: mol_type = other DNA
taataaaacccraaaataattaataaaaaatcccatccacctaaaaaccc

SEQ ID NO: 37012 - DNA, 50 bp, synthetic construct
  source 1..50: mol_type = other DNA
tattaactaccaacacctctttctttataattactccttatctcctcacc

SEQ ID NO: 37013 - DNA, 50 bp, synthetic construct
  source 1..50: mol_type = other DNA
accaaacaaaaatttcaaaaaaaatctttccraattccaacccctttcac

SEQ ID NO: 37014 - DNA, 50 bp, synthetic construct
  source 1..50: mol_type = other DNA
accccaaaaacctactactctaatctataaaaaaaccaaaacctcttcac

SEQ ID NO: 37015 - DNA, 50 bp, synthetic construct
  source 1..50: mol_type = other DNA
aaaaataaaataaatcacacaaaccaaaccccacaaaaacatattcactc

SEQ ID NO: 37016 - DNA, 50 bp, synthetic construct
  source 1..50: mol_type = other DNA
ccctataaactaaaaaaacaactaaacccttcaatttctataacccttcc

SEQ ID NO: 37017 - DNA, 50 bp, synthetic construct
  source 1..50: mol_type = other DNA
tcctaactttcaatctaaattttaaataacttaataaaataattactttc

SEQ ID NO: 37018 - DNA, 50 bp, synthetic construct
  source 1..50: mol_type = other DNA
aaacaatcaccttatcaaattattcaaaatccaaattaaaaatcaaaacc

SEQ ID NO: 37019 - DNA, 50 bp, synthetic construct
  source 1..50: mol_type = other DNA
cttatcaaattattcaaaatccaaattaaaaatcaaaaccraaaatcctc

SEQ ID NO: 37020 - DNA, 50 bp, synthetic construct
  source 1..50: mol_type = other DNA
ccaaaaaaaatacaatcttctctaacctcctaatcaaataaaactactcc

SEQ ID NO: 37021 - DNA, 50 bp, synthetic construct
  source 1..50: mol_type = other DNA
aatattataaacttataaaaaaattcaaacaatacaaacaaatatatctc

SEQ ID NO: 37022 - DNA, 50 bp, synthetic construct
  source 1..50: mol_type = other DNA
ccaaactcttcctatattaaaactaaatcracaaaaacaacaaacacaac

SEQ ID NO: 37023 - DNA, 50 bp, synthetic construct
  source 1..50: mol_type = other DNA
atccattaaatttaaaaaaccccaaactcttcctatattaaaactaaatc

SEQ ID NO: 37024 - DNA, 50 bp, synthetic construct
  source 1..50: mol_type = other DNA
ttaaaaccrtaatttcaaaaacaacttctaatctaaacaaaaccattaac

SEQ ID NO: 37025 - DNA, 50 bp, synthetic construct
  source 1..50: mol_type = other DNA
caccaatattcaaaataaaactataaaactatatctacctataaacaaac

SEQ ID NO: 37026 - DNA, 50 bp, synthetic construct
  source 1..50: mol_type = other DNA
acccactttaaacacatataaaaaacaaatcaacaaaaataaactaaacc

SEQ ID NO: 37027 - DNA, 50 bp, synthetic construct
  source 1..50: mol_type = other DNA
ccttccraaaatctaatatctaataatcaaaaataaaacaatttcacccc

SEQ ID NO: 37028 - DNA, 50 bp, synthetic construct
  source 1..50: mol_type = other DNA
ctctccctataaacractattataaaactacctaaccatcctcaaatttc

SEQ ID NO: 37029 - DNA, 50 bp, synthetic construct
  source 1..50: mol_type = other DNA
aaaaaaaacaaattttacaaatacacccratttaaccrataaacaaaaac

SEQ ID NO: 37030 - DNA, 50 bp, synthetic construct
  source 1..50: mol_type = other DNA
acaaattttacaaatacacccratttaaccrataaacaaaaacraatacc

SEQ ID NO: 37031 - DNA, 50 bp, synthetic construct
  source 1..50: mol_type = other DNA
raaaaaactttacaaacaaaccctaaactccccttaactattcraactcc

SEQ ID NO: 37032 - DNA, 50 bp, synthetic construct
  source 1..50: mol_type = other DNA
aaaccacraaaaaactttacaaacaaaccctaaactccccttaactattc

SEQ ID NO: 37033 - DNA, 50 bp, synthetic construct
  source 1..50: mol_type = other DNA
raaatccraacaaccaaaaaaaactcaaaacctatttacaaaaccttctc

SEQ ID NO: 37034 - DNA, 50 bp, synthetic construct
  source 1..50: mol_type = other DNA
ctcaaaacctatttacaaaaccttctcrtaatttctatttccctactacc

SEQ ID NO: 37035 - DNA, 50 bp, synthetic construct
  source 1..50: mol_type = other DNA
aaaacctatttacaaaaccttctcrtaatttctatttccctactaccrac

SEQ ID NO: 37036 - DNA, 50 bp, synthetic construct
  source 1..50: mol_type = other DNA
aaacrataaacaaaaaacaaataccaaaaaccaacctctaaaacaaaccc

SEQ ID NO: 37037 - DNA, 50 bp, synthetic construct
  source 1..50: mol_type = other DNA
aataaccrtaaaacccttcaaaacaacacaaaaattaaccctcacttacc

SEQ ID NO: 37038 - DNA, 50 bp, synthetic construct
  source 1..50: mol_type = other DNA
actcaataaccaatcaaaactcttaaaaaaacattctacaatacctaaac

SEQ ID NO: 37039 - DNA, 50 bp, synthetic construct
  source 1..50: mol_type = other DNA
aaaatatcctttcaaaaaccctaactaatcactaaaccaaaatccaaaac

SEQ ID NO: 37040 - DNA, 50 bp, synthetic construct
  source 1..50: mol_type = other DNA
caaaacacaaaacaaacttccactccccttaaaacacataaccccaaaac

SEQ ID NO: 37041 - DNA, 50 bp, synthetic construct
  source 1..50: mol_type = other DNA
aatcctatataaattcaaaacrtccccrctacccttttaactaaatcttc

SEQ ID NO: 37042 - DNA, 50 bp, synthetic construct
  source 1..50: mol_type = other DNA
actccaacaaaataaaaccraataatcctatataaattcaaaacrtcccc

SEQ ID NO: 37043 - DNA, 50 bp, synthetic construct
  source 1..50: mol_type = other DNA
ctcccractccaacaaaataaaaccraataatcctatataaattcaaaac

SEQ ID NO: 37044 - DNA, 50 bp, synthetic construct
  source 1..50: mol_type = other DNA
aatatctacaatatctacatatatctacaccrcctacaaacraaactctc

SEQ ID NO: 37045 - DNA, 50 bp, synthetic construct
  source 1..50: mol_type = other DNA
ratatctacaatatctacaatatctacatatatctacaccrcctacaaac

SEQ ID NO: 37046 - DNA, 50 bp, synthetic construct
  source 1..50: mol_type = other DNA
acrccraaacratatctacaatatctacaatatctacatatatctacacc

SEQ ID NO: 37047 - DNA, 50 bp, synthetic construct
  source 1..50: mol_type = other DNA
caaacratataaatacatataaatactataaatactataaataccrcccc

SEQ ID NO: 37048 - DNA, 50 bp, synthetic construct
  source 1..50: mol_type = other DNA
acratataaatacatataaatactataaatactataaataccrccccrac

SEQ ID NO: 37049 - DNA, 50 bp, synthetic construct
  source 1..50: mol_type = other DNA
atctaactaaacacaaataaataaacacrcaaacracttccaaaaaaaac

SEQ ID NO: 37050 - DNA, 50 bp, synthetic construct
  source 1..50: mol_type = other DNA
raaaattcccaacrcratctaactaaacacaaataaataaacacrcaaac

SEQ ID NO: 37051 - DNA, 50 bp, synthetic construct
  source 1..50: mol_type = other DNA
tatcccraaaattcccaacrcratctaactaaacacaaataaataaacac

SEQ ID NO: 37052 - DNA, 50 bp, synthetic construct
  source 1..50: mol_type = other DNA
aaaaaaaaatatccraatctacacractcctattccaccccttaaaaaac

SEQ ID NO: 37053 - DNA, 50 bp, synthetic construct
  source 1..50: mol_type = other DNA
ttacataattatacaataacccacrtttcccaaaaaataaaacaaaaacc

SEQ ID NO: 37054 - DNA, 50 bp, synthetic construct
  source 1..50: mol_type = other DNA
aaaacctaaataccctacccactacctacraaattacaaccttaaaaaac

SEQ ID NO: 37055 - DNA, 50 bp, synthetic construct
  source 1..50: mol_type = other DNA
aaaaaaaattaaacaaccttaaacacaaaaaacrtataacaaaaaacaac

SEQ ID NO: 37056 - DNA, 50 bp, synthetic construct
  source 1..50: mol_type = other DNA
aacaaccttaaacacaaaaaacrtataacaaaaaacaacrcaaactaacc

SEQ ID NO: 37057 - DNA, 50 bp, synthetic construct
  source 1..50: mol_type = other DNA
caaaaaacrtataacaaaaaacaacrcaaactaaccraatactaactaac

SEQ ID NO: 37058 - DNA, 50 bp, synthetic construct
  source 1..50: mol_type = other DNA
aaaaaacaacrcaaactaaccraatactaactaacracctaaaaataacc

SEQ ID NO: 37059 - DNA, 50 bp, synthetic construct
  source 1..50: mol_type = other DNA
tactacaaaaatttaaatcaactcttcccttaacctactatactccatac

SEQ ID NO: 37060 - DNA, 50 bp, synthetic construct
  source 1..50: mol_type = other DNA
ctaactcaaactcctacaacattcctataaatctataaaccttaaatccc

SEQ ID NO: 37061 - DNA, 50 bp, synthetic construct
  source 1..50: mol_type = other DNA
attctccaaaaccccaataaaaatttaaacraaaccraattacccaaatc

SEQ ID NO: 37062 - DNA, 50 bp, synthetic construct
  source 1..50: mol_type = other DNA
catcaatttaacaaattctccaaaaccccaataaaaatttaaacraaacc

SEQ ID NO: 37063 - DNA, 50 bp, synthetic construct
  source 1..50: mol_type = other DNA
ttttaacatcaatttaacaaattctccaaaaccccaataaaaatttaaac

SEQ ID NO: 37064 - DNA, 50 bp, synthetic construct
  source 1..50: mol_type = other DNA
atatcaaaatatacctaaacatttaaaacacaaaaacrtacacaaccccc

SEQ ID NO: 37065 - DNA, 50 bp, synthetic construct
  source 1..50: mol_type = other DNA
atacttaaacccaaaattcraaaccaacctaaaaaacataataaaatctc

SEQ ID NO: 37066 - DNA, 50 bp, synthetic construct
  source 1..50: mol_type = other DNA
aaactacaatttaataaaactacaattaaaaacacctatttcctaacctc

SEQ ID NO: 37067 - DNA, 50 bp, synthetic construct
  source 1..50: mol_type = other DNA
cacaaaaacaaccctacctaaaaacctaaccaacactaaaatcacctcac

SEQ ID NO: 37068 - DNA, 50 bp, synthetic construct
  source 1..50: mol_type = other DNA
taaaaacctaaccaacactaaaatcacctcacraccaaaaaaacaaaacc

SEQ ID NO: 37069 - DNA, 50 bp, synthetic construct
  source 1..50: mol_type = other DNA
ataactttaattcctcaaattattctatataacctacaattacccccrac

SEQ ID NO: 37070 - DNA, 50 bp, synthetic construct
  source 1..50: mol_type = other DNA
aatataactttaattcctcaaattattctatataacctacaattaccccc

SEQ ID NO: 37071 - DNA, 50 bp, synthetic construct
  source 1..50: mol_type = other DNA
ttacccaacrtaaaaccratatactaaaccaacaataatttcratcctac

SEQ ID NO: 37072 - DNA, 50 bp, synthetic construct
  source 1..50: mol_type = other DNA
caaccaaaacaaaaaccaaaacccaacaaaacaatataaacaaaacracc

SEQ ID NO: 37073 - DNA, 50 bp, synthetic construct
  source 1..50: mol_type = other DNA
tacacaaccaaaacaaaaaccaaaacccaacaaaacaatataaacaaaac

SEQ ID NO: 37074 - DNA, 50 bp, synthetic construct
  source 1..50: mol_type = other DNA
cratactaaactaacaaacacctaactacaaaccaaacccaaaaaacccc

SEQ ID NO: 37075 - DNA, 50 bp, synthetic construct
  source 1..50: mol_type = other DNA
craaatcccctaaacctaatctacaaccaaatacctaccaattcaacacc

SEQ ID NO: 37076 - DNA, 50 bp, synthetic construct
  source 1..50: mol_type = other DNA
caaacaacccaaaaatcctctaaaaccacacaaaatacaaaaacaaacac

SEQ ID NO: 37077 - DNA, 50 bp, synthetic construct
  source 1..50: mol_type = other DNA
taatactactactacttctaaaacactaaaactaaaacctataccttatc

SEQ ID NO: 37078 - DNA, 50 bp, synthetic construct
  source 1..50: mol_type = other DNA
catcctacaacccatccacaacctactcataaataacaccaaaaaacaac

SEQ ID NO: 37079 - DNA, 50 bp, synthetic construct
  source 1..50: mol_type = other DNA
tactaaaaaccattaacacctactacraacaaaaaaaataaaccataaac

SEQ ID NO: 37080 - DNA, 50 bp, synthetic construct
  source 1..50: mol_type = other DNA
ttaatacctaatcctaaatccctatcccaaaactaaacacctactaaccc

SEQ ID NO: 37081 - DNA, 50 bp, synthetic construct
  source 1..50: mol_type = other DNA
ttatatccrctaaaaatcaacaaaacccaaacactatccacaacaccaac

SEQ ID NO: 37082 - DNA, 50 bp, synthetic construct
  source 1..50: mol_type = other DNA
ctacaaataaaactaaataaaacacctaaaccttctaaatcaccaatccc

SEQ ID NO: 37083 - DNA, 50 bp, synthetic construct
  source 1..50: mol_type = other DNA
ccaaacaaaatcccaaaaaataaatcattaatataccrtaaaccaaaacc

SEQ ID NO: 37084 - DNA, 50 bp, synthetic construct
  source 1..50: mol_type = other DNA
tactaaaacctaaaaaaccaacttcracaaacaatacrctaaaaaaacrc

SEQ ID NO: 37085 - DNA, 50 bp, synthetic construct
  source 1..50: mol_type = other DNA
aatactaaaacctaaaaaaccaacttcracaaacaatacrctaaaaaaac

SEQ ID NO: 37086 - DNA, 50 bp, synthetic construct
  source 1..50: mol_type = other DNA
aacaaaacctcaatactaaaacctaaaaaaccaacttcracaaacaatac

SEQ ID NO: 37087 - DNA, 50 bp, synthetic construct
  source 1..50: mol_type = other DNA
ccaaataccrctaacaaaacctcaatactaaaacctaaaaaaccaacttc

SEQ ID NO: 37088 - DNA, 50 bp, synthetic construct
  source 1..50: mol_type = other DNA
ctaaaaccttatcaacracatctaactaacaacacttaaaaaaccccaac

SEQ ID NO: 37089 - DNA, 50 bp, synthetic construct
  source 1..50: mol_type = other DNA
aaccacaacrcaaccctacaaatcattaacaactaaacrtttaaaatcac

SEQ ID NO: 37090 - DNA, 50 bp, synthetic construct
  source 1..50: mol_type = other DNA
aatatataactaccraacacrcccactctaaacctaactacaaaaattcc

SEQ ID NO: 37091 - DNA, 50 bp, synthetic construct
  source 1..50: mol_type = other DNA
acaatacctaaaactcaacracaacccctaaatatataactaccraacac

SEQ ID NO: 37092 - DNA, 50 bp, synthetic construct
  source 1..50: mol_type = other DNA
acaatcacacacccaaaaattatcrttaaacctcaaatactacaaaacac

SEQ ID NO: 37093 - DNA, 50 bp, synthetic construct
  source 1..50: mol_type = other DNA
aaaaacaacraaaccrtaaaacacaaataatcacaaataaccaaacaacc

SEQ ID NO: 37094 - DNA, 50 bp, synthetic construct
  source 1..50: mol_type = other DNA
cacaaataaccaaacaaccraatctaacttaaaaacaaaaaatctacccc

SEQ ID NO: 37095 - DNA, 50 bp, synthetic construct
  source 1..50: mol_type = other DNA
aataaccaaacaaccraatctaacttaaaaacaaaaaatctaccccraac

SEQ ID NO: 37096 - DNA, 50 bp, synthetic construct
  source 1..50: mol_type = other DNA
acaaaactctatacaacaaaaaaccracttatttatactaaaaaaaaccc

SEQ ID NO: 37097 - DNA, 50 bp, synthetic construct
  source 1..50: mol_type = other DNA
aaaaaaccracttatttatactaaaaaaaacccractaaaataaacrccc

SEQ ID NO: 37098 - DNA, 50 bp, synthetic construct
  source 1..50: mol_type = other DNA
aactattaataacaacttacraaaaatacaaaaactacraccaaaaaacc

SEQ ID NO: 37099 - DNA, 50 bp, synthetic construct
  source 1..50: mol_type = other DNA
aaatctaataaccaatccaacctatatcaataaactcttaaaataacccc

SEQ ID NO: 37100 - DNA, 50 bp, synthetic construct
  source 1..50: mol_type = other DNA
acattaaacttcctttcttctccccactaaaacttcraacaatacaaaac

SEQ ID NO: 37101 - DNA, 50 bp, synthetic construct
  source 1..50: mol_type = other DNA
tataactatataacacattaaacttcctttcttctccccactaaaacttc

SEQ ID NO: 37102 - DNA, 50 bp, synthetic construct
  source 1..50: mol_type = other DNA
aaaaaactccccctaataaaattaccaaaaattcccccataaaactacac

SEQ ID NO: 37103 - DNA, 50 bp, synthetic construct
  source 1..50: mol_type = other DNA
tacttaactaataaattaccttaattacttacaacctaacaacaactttc

SEQ ID NO: 37104 - DNA, 50 bp, synthetic construct
  source 1..50: mol_type = other DNA
aaacctaatacrtctaattaaatatctatatacacaactaaaataataac

SEQ ID NO: 37105 - DNA, 50 bp, synthetic construct
  source 1..50: mol_type = other DNA
aacttcaacraaaccaaataaataactatatcctttaatcttaattatcc

SEQ ID NO: 37106 - DNA, 50 bp, synthetic construct
  source 1..50: mol_type = other DNA
ttcaacraaaccaaataaataactatatcctttaatcttaattatccrac

SEQ ID NO: 37107 - DNA, 50 bp, synthetic construct
  source 1..50: mol_type = other DNA
ctcaaatataataaaaactaccccctcctttaacctataatatccactac

SEQ ID NO: 37108 - DNA, 50 bp, synthetic construct
  source 1..50: mol_type = other DNA
aatcctacraaaaaacrattaatataactataacttaacrttccccaaac

SEQ ID NO: 37109 - DNA, 50 bp, synthetic construct
  source 1..50: mol_type = other DNA
aaatcctctaatttacaaaaatcattacacacattttcacacttctattc

SEQ ID NO: 37110 - DNA, 50 bp, synthetic construct
  source 1..50: mol_type = other DNA
catacatataaaataaccttcaccttatttcctttctaattaattaactc

SEQ ID NO: 37111 - DNA, 50 bp, synthetic construct
  source 1..50: mol_type = other DNA
attacraccrtaattattaacccaaaaaataccctcaaaaatctcataac

SEQ ID NO: 37112 - DNA, 50 bp, synthetic construct
  source 1..50: mol_type = other DNA
cccttaacttctatcaactaaaaaaaataacccttccccttaaaaacttc

SEQ ID NO: 37113 - DNA, 50 bp, synthetic construct
  source 1..50: mol_type = other DNA
taaacaaaaaactctataaaaccaaacaaaaaaccaaataatctacaccc

SEQ ID NO: 37114 - DNA, 50 bp, synthetic construct
  source 1..50: mol_type = other DNA
taaacatttcactcacttaactcaaccattatataaccaatataaactcc

SEQ ID NO: 37115 - DNA, 50 bp, synthetic construct
  source 1..50: mol_type = other DNA
ccctaaaaacacaaaacctcatcacttctcraaataaaaacaaatacacc

SEQ ID NO: 37116 - DNA, 50 bp, synthetic construct
  source 1..50: mol_type = other DNA
ttccactaaaaataatctaaaccttcaaaaactccctaaaaacttccccc

SEQ ID NO: 37117 - DNA, 50 bp, synthetic construct
  source 1..50: mol_type = other DNA
aaactaatacacraataaaattactctcatcaataaaaaactacctaaac

SEQ ID NO: 37118 - DNA, 50 bp, synthetic construct
  source 1..50: mol_type = other DNA
caccattatactccaacctaattaacaaaacaaaaccccatcacacacac

SEQ ID NO: 37119 - DNA, 50 bp, synthetic construct
  source 1..50: mol_type = other DNA
aaattcaattatcacctctctaaattaactaccccaatataactttatac

SEQ ID NO: 37120 - DNA, 50 bp, synthetic construct
  source 1..50: mol_type = other DNA
aaattactacccccaaaatcccaaccaaaaaacaatttatccaaaaaccc

SEQ ID NO: 37121 - DNA, 50 bp, synthetic construct
  source 1..50: mol_type = other DNA
ctcctaaaatccccaacacattctcctactcctaaaaaaaacctaaaaac

SEQ ID NO: 37122 - DNA, 50 bp, synthetic construct
  source 1..50: mol_type = other DNA
tcaattaacttcaaatatactacactctaaaataaaaatattaaactcac

SEQ ID NO: 37123 - DNA, 50 bp, synthetic construct
  source 1..50: mol_type = other DNA
ttaaatttaatataaacrttcttattctctaaataaatttcccatttacc

SEQ ID NO: 37124 - DNA, 50 bp, synthetic construct
  source 1..50: mol_type = other DNA
aaaacaaaaacattcatacaaaaaaataaacaccctaaatacataaatac

SEQ ID NO: 37125 - DNA, 50 bp, synthetic construct
  source 1..50: mol_type = other DNA
cactccaacctaaacaataaaataaaacttaatctcaaaaacaaacaaac

SEQ ID NO: 37126 - DNA, 50 bp, synthetic construct
  source 1..50: mol_type = other DNA
tattactcaatatctatctaaaacccaattcccttctcaaccctaaatac

SEQ ID NO: 37127 - DNA, 50 bp, synthetic construct
  source 1..50: mol_type = other DNA
ctcatctctacaaattaaaaactacaatattcacattatcatcaaaactc

SEQ ID NO: 37128 - DNA, 50 bp, synthetic construct
  source 1..50: mol_type = other DNA
ataaaaataccattttcctcaaaacaactaaatcaaacacrtaaaccatc

SEQ ID NO: 37129 - DNA, 50 bp, synthetic construct
  source 1..50: mol_type = other DNA
ccatctactatacaatcatcctcattctcttcatttaaattttcttttcc

SEQ ID NO: 37130 - DNA, 50 bp, synthetic construct
  source 1..50: mol_type = other DNA
tcatttaaattttcttttccratatcacttctttctccctaactataacc

SEQ ID NO: 37131 - DNA, 50 bp, synthetic construct
  source 1..50: mol_type = other DNA
taaaaactaaccaaataacaattataactaaaaacactaaaacctaccac

SEQ ID NO: 37132 - DNA, 50 bp, synthetic construct
  source 1..50: mol_type = other DNA
taaaaatttaaaaaactcaaaacatttttcatatcccttaacactatcac

SEQ ID NO: 37133 - DNA, 50 bp, synthetic construct
  source 1..50: mol_type = other DNA
tacrtacacaaatatacrtataaaatactaactcaatctctactcaaaac

SEQ ID NO: 37134 - DNA, 50 bp, synthetic construct
  source 1..50: mol_type = other DNA
atcrctctaaataaaaattaaaccaacattttacacrcatatctatatac

SEQ ID NO: 37135 - DNA, 50 bp, synthetic construct
  source 1..50: mol_type = other DNA
tcataaaacattcctatatacatcaaaactctctaccctctataaaaaac

SEQ ID NO: 37136 - DNA, 50 bp, synthetic construct
  source 1..50: mol_type = other DNA
acatcaaaactctctaccctctataaaaaacrtacaacaacctctaaacc

SEQ ID NO: 37137 - DNA, 50 bp, synthetic construct
  source 1..50: mol_type = other DNA
ctatttcctaaatctttaattcttattatttaataacctaaaccaaacac

SEQ ID NO: 37138 - DNA, 50 bp, synthetic construct
  source 1..50: mol_type = other DNA
accttcaataaataatatctatattatcaaaaacaaacaattcactattc

SEQ ID NO: 37139 - DNA, 50 bp, synthetic construct
  source 1..50: mol_type = other DNA
ctaaacatactacttaaataacrcatcttacaatataaaatttaacacrc

SEQ ID NO: 37140 - DNA, 50 bp, synthetic construct
  source 1..50: mol_type = other DNA
acctaaacatactacttaaataacrcatcttacaatataaaatttaacac

SEQ ID NO: 37141 - DNA, 50 bp, synthetic construct
  source 1..50: mol_type = other DNA
tatataaccttttaaaactcattcatacctaaacatactacttaaataac

SEQ ID NO: 37142 - DNA, 50 bp, synthetic construct
  source 1..50: mol_type = other DNA
ccaaccccttaaaaaacccataaactacacaattaataaaatctaactac

SEQ ID NO: 37143 - DNA, 50 bp, synthetic construct
  source 1..50: mol_type = other DNA
aataataaaatacraattctaataccttacaaattacaataaaaattccc

SEQ ID NO: 37144 - DNA, 50 bp, synthetic construct
  source 1..50: mol_type = other DNA
taaaaccaattaaaaatattttctaaaaacctattctaaatcattaattc

SEQ ID NO: 37145 - DNA, 50 bp, synthetic construct
  source 1..50: mol_type = other DNA
taaaactaaaactcttctctttctataaaatttcacrtttatatttaatc

SEQ ID NO: 37146 - DNA, 50 bp, synthetic construct
  source 1..50: mol_type = other DNA
atcacrttaaaattaaaaaccccraaactaacratcatattctaacaaac

SEQ ID NO: 37147 - DNA, 50 bp, synthetic construct
  source 1..50: mol_type = other DNA
aattaaaaaccccraaactaacratcatattctaacaaacrataaaaaac

SEQ ID NO: 37148 - DNA, 50 bp, synthetic construct
  source 1..50: mol_type = other DNA
ctccaactaaaatacccctctcacatcctaacaaactaaactcaaacacc

SEQ ID NO: 37149 - DNA, 50 bp, synthetic construct
  source 1..50: mol_type = other DNA
aaaatttatcttctaaaaaccataaaaacctattaaaaaactattaaaac

SEQ ID NO: 37150 - DNA, 50 bp, synthetic construct
  source 1..50: mol_type = other DNA
aaatatattccactatcaaatacaccaaatatttatacaaaaatattttc

SEQ ID NO: 37151 - DNA, 50 bp, synthetic construct
  source 1..50: mol_type = other DNA
aatatcaaaacttccaaaaactttctcctaaaacaatccctaaaatcacc

SEQ ID NO: 37152 - DNA, 50 bp, synthetic construct
  source 1..50: mol_type = other DNA
tccaatcaacaaaacraattctaaacttctcaactcttacaaaaaaaaac

SEQ ID NO: 37153 - DNA, 50 bp, synthetic construct
  source 1..50: mol_type = other DNA
attacttaacacaatacttaacataaaatccaatatccaatcaacaaaac

SEQ ID NO: 37154 - DNA, 50 bp, synthetic construct
  source 1..50: mol_type = other DNA
tttcctatcccctcatttaaaataacaaaaaactaaacrcaataacttac

SEQ ID NO: 37155 - DNA, 50 bp, synthetic construct
  source 1..50: mol_type = other DNA
tacatataacrttttcctatcccctcatttaaaataacaaaaaactaaac

SEQ ID NO: 37156 - DNA, 50 bp, synthetic construct
  source 1..50: mol_type = other DNA
ttttcccatcctattccctccctaccaaaataaaattaaccaactaatcc

SEQ ID NO: 37157 - DNA, 50 bp, synthetic construct
  source 1..50: mol_type = other DNA
accctaatacaaattacccaaaaaccacaaataattccccctactaattc

SEQ ID NO: 37158 - DNA, 50 bp, synthetic construct
  source 1..50: mol_type = other DNA
ttttcattccataaaaaataaaatcacacaccaaaaacacacraataacc

SEQ ID NO: 37159 - DNA, 50 bp, synthetic construct
  source 1..50: mol_type = other DNA
acaaaaacttttcattccataaaaaataaaatcacacaccaaaaacacac

SEQ ID NO: 37160 - DNA, 50 bp, synthetic construct
  source 1..50: mol_type = other DNA
rctaaacaaaaaaactcccaaaacctacctcaccaaaaaccctattttcc

SEQ ID NO: 37161 - DNA, 50 bp, synthetic construct
  source 1..50: mol_type = other DNA
acctaaactctctaacctaaaataaaacccrccaaaaaaaacctataaac

SEQ ID NO: 37162 - DNA, 50 bp, synthetic construct
  source 1..50: mol_type = other DNA
ctctctaacctaaaataaaacccrccaaaaaaaacctataaacrtcaaac

SEQ ID NO: 37163 - DNA, 50 bp, synthetic construct
  source 1..50: mol_type = other DNA
crtcactactaaaatacaaaacracaaaaaccaaccctatttctattacc

SEQ ID NO: 37164 - DNA, 50 bp, synthetic construct
  source 1..50: mol_type = other DNA
aacttaaaaacttaaaaaacacaaccatctaaaaccraaacctaaaacac

SEQ ID NO: 37165 - DNA, 50 bp, synthetic construct
  source 1..50: mol_type = other DNA
aaaacttaaacataaacttaaaaacttaaaaaacacaaccatctaaaacc

SEQ ID NO: 37166 - DNA, 50 bp, synthetic construct
  source 1..50: mol_type = other DNA
ctctataccctttttattctataaatccaataaaaacaactactataaac

SEQ ID NO: 37167 - DNA, 50 bp, synthetic construct
  source 1..50: mol_type = other DNA
aatctcattcaaccccacaacraccctataataaattctaaatacactcc

SEQ ID NO: 37168 - DNA, 50 bp, synthetic construct
  source 1..50: mol_type = other DNA
cacattcccctcctaaacaacraaatacattcaaaatccaccacaaaatc

SEQ ID NO: 37169 - DNA, 50 bp, synthetic construct
  source 1..50: mol_type = other DNA
tcaaaatccaccacaaaatcrctataaaattaaataaaatcacaaaaacc

SEQ ID NO: 37170 - DNA, 50 bp, synthetic construct
  source 1..50: mol_type = other DNA
atcrctataaaattaaataaaatcacaaaaaccrattctaaaccaatacc

SEQ ID NO: 37171 - DNA, 50 bp, synthetic construct
  source 1..50: mol_type = other DNA
attctaaaccaataccractacaataaaaatttattaaacaaaacctacc

SEQ ID NO: 37172 - DNA, 50 bp, synthetic construct
  source 1..50: mol_type = other DNA
aaaccrtttaaaataatctaaaaataaacccaaaacccaaaaatcaaaac

SEQ ID NO: 37173 - DNA, 50 bp, synthetic construct
  source 1..50: mol_type = other DNA
aactaatacccrttactaaaaaaattacccrtttctttactaaaaaaacc

SEQ ID NO: 37174 - DNA, 50 bp, synthetic construct
  source 1..50: mol_type = other DNA
cctactatcaatatacaataaactaatacccrttactaaaaaaattaccc

SEQ ID NO: 37175 - DNA, 50 bp, synthetic construct
  source 1..50: mol_type = other DNA
tacaaccaccaacccctctcctactatcaatatacaataaactaataccc

SEQ ID NO: 37176 - DNA, 50 bp, synthetic construct
  source 1..50: mol_type = other DNA
tctaaaattataaaaaaatccctatactaatactccataaccaattctac

SEQ ID NO: 37177 - DNA, 50 bp, synthetic construct
  source 1..50: mol_type = other DNA
aatccaattaaatactctctcatcacaataaaacaaaaccctaatcaaac

SEQ ID NO: 37178 - DNA, 50 bp, synthetic construct
  source 1..50: mol_type = other DNA
atacaaaattaccctctattaaaaactactacrttcaccctatactttcc

SEQ ID NO: 37179 - DNA, 50 bp, synthetic construct
  source 1..50: mol_type = other DNA
taaaaaaattcataaaactccaaaaacctttaaaaaacaccacaaaatac

SEQ ID NO: 37180 - DNA, 50 bp, synthetic construct
  source 1..50: mol_type = other DNA
tttctaccctaataactataaaaacaattaaaaatataactccttaaatc

SEQ ID NO: 37181 - DNA, 50 bp, synthetic construct
  source 1..50: mol_type = other DNA
tcctataaaacataacatttatactaaacttaaaaaacttcaaaaacaac

SEQ ID NO: 37182 - DNA, 50 bp, synthetic construct
  source 1..50: mol_type = other DNA
cctttaaaatccttcaaacccaacacaaataccatattttataaaaaacc

SEQ ID NO: 37183 - DNA, 50 bp, synthetic construct
  source 1..50: mol_type = other DNA
catacccaaaatcaaacaactaatcattaacaaaattaaaatacaaaccc

SEQ ID NO: 37184 - DNA, 50 bp, synthetic construct
  source 1..50: mol_type = other DNA
ctcaacrctaatcttaacaccataacttatttactcctcactcacaaccc

SEQ ID NO: 37185 - DNA, 50 bp, synthetic construct
  source 1..50: mol_type = other DNA
craactacaataaaaactatcaatttaccaaacatttcctatcrctcaac

SEQ ID NO: 37186 - DNA, 50 bp, synthetic construct
  source 1..50: mol_type = other DNA
tctaatacraactacaataaaaactatcaatttaccaaacatttcctatc

SEQ ID NO: 37187 - DNA, 50 bp, synthetic construct
  source 1..50: mol_type = other DNA
crctaaacracaaaaaatacttaataaactaacaacttttactacaatcc

SEQ ID NO: 37188 - DNA, 50 bp, synthetic construct
  source 1..50: mol_type = other DNA
aataaactaacaacttttactacaatccrtatcaaaatacctactatcac

SEQ ID NO: 37189 - DNA, 50 bp, synthetic construct
  source 1..50: mol_type = other DNA
rtatcaaaatacctactatcacrattaactaaaaacacatctacctaccc

SEQ ID NO: 37190 - DNA, 50 bp, synthetic construct
  source 1..50: mol_type = other DNA
ataaacrtaccaaaaataaaactaaacaataaaactcracaacraatacc

SEQ ID NO: 37191 - DNA, 50 bp, synthetic construct
  source 1..50: mol_type = other DNA
rcaaaccataaacrtaccaaaaataaaactaaacaataaaactcracaac

SEQ ID NO: 37192 - DNA, 50 bp, synthetic construct
  source 1..50: mol_type = other DNA
rttaccrcaaaccataaacrtaccaaaaataaaactaaacaataaaactc

SEQ ID NO: 37193 - DNA, 50 bp, synthetic construct
  source 1..50: mol_type = other DNA
ctaaatatacatcttcttctaacctcatcaaaaaatatcctataaaaccc

SEQ ID NO: 37194 - DNA, 50 bp, synthetic construct
  source 1..50: mol_type = other DNA
aaaacrctatccaaataaaattccattccccaaatctataacctccttcc

SEQ ID NO: 37195 - DNA, 50 bp, synthetic construct
  source 1..50: mol_type = other DNA
raaaaactaataaccataccaaatcaaaatacracaaacaaccccaaaac

SEQ ID NO: 37196 - DNA, 50 bp, synthetic construct
  source 1..50: mol_type = other DNA
aaaaaacaaatatctttcctaatcaaacccactaaatacatccctccacc

SEQ ID NO: 37197 - DNA, 50 bp, synthetic construct
  source 1..50: mol_type = other DNA
attaccaaataattaataaactaaaaatcacattccaaaaaccctatccc

SEQ ID NO: 37198 - DNA, 50 bp, synthetic construct
  source 1..50: mol_type = other DNA
aaaaattatttactatttaaacaacaattccaaatattcaaaaacataac

SEQ ID NO: 37199 - DNA, 50 bp, synthetic construct
  source 1..50: mol_type = other DNA
actatttaaacaacaattccaaatattcaaaaacataacrtttccataac

SEQ ID NO: 37200 - DNA, 50 bp, synthetic construct
  source 1..50: mol_type = other DNA
aaaaacacrcaacttcctttccaaatattcttcctttcaaaaataaaaac

SEQ ID NO: 37201 - DNA, 50 bp, synthetic construct
  source 1..50: mol_type = other DNA
taaatcaaaatacaaaaaaaatcttttctaccccractttccaactttcc

SEQ ID NO: 37202 - DNA, 50 bp, synthetic construct
  source 1..50: mol_type = other DNA
tttcraatataaataaaccattactctccctataaaaaactactaaaaac

SEQ ID NO: 37203 - DNA, 50 bp, synthetic construct
  source 1..50: mol_type = other DNA
raaattacraaaaccctccacaattcataaccrttaactaattataaacc

SEQ ID NO: 37204 - DNA, 50 bp, synthetic construct
  source 1..50: mol_type = other DNA
attcrcraataaaccatacttaatctaacaaaatataattattaacrccc

SEQ ID NO: 37205 - DNA, 50 bp, synthetic construct
  source 1..50: mol_type = other DNA
attaaactaaacataatccacccrcraatcctctacaaaaataaccaaac

SEQ ID NO: 37206 - DNA, 50 bp, synthetic construct
  source 1..50: mol_type = other DNA
taaccraaaataaattataaattctcacctaacctaaaaaacrcaaccac

SEQ ID NO: 37207 - DNA, 50 bp, synthetic construct
  source 1..50: mol_type = other DNA
cacaacaataaccraaaataaattataaattctcacctaacctaaaaaac

SEQ ID NO: 37208 - DNA, 50 bp, synthetic construct
  source 1..50: mol_type = other DNA
rctaataattaaacataaaaaactcaaaaactctaaaccttctaacaaac

SEQ ID NO: 37209 - DNA, 50 bp, synthetic construct
  source 1..50: mol_type = other DNA
cccaataccccaccatataaaccaatctatcctactaaatttaaaacacc

SEQ ID NO: 37210 - DNA, 50 bp, synthetic construct
  source 1..50: mol_type = other DNA
aaatctaccccatcctataccctatataatacaaaattaactataatacc

SEQ ID NO: 37211 - DNA, 50 bp, synthetic construct
  source 1..50: mol_type = other DNA
ttttccttctttcaaatacrtaaccaaaaaattcttatatttataaattc

SEQ ID NO: 37212 - DNA, 50 bp, synthetic construct
  source 1..50: mol_type = other DNA
aaaacttatctttaaaaaaaccratttaaaacctattctcctacctcctc

SEQ ID NO: 37213 - DNA, 50 bp, synthetic construct
  source 1..50: mol_type = other DNA
cccaattccctaacccacaaatatccctaaaacttatctttaaaaaaacc

SEQ ID NO: 37214 - DNA, 50 bp, synthetic construct
  source 1..50: mol_type = other DNA
cattcattacacacaaatataatcaaaattcataacatatcataaaacac

SEQ ID NO: 37215 - DNA, 50 bp, synthetic construct
  source 1..50: mol_type = other DNA
tttaaaacaaattctctattactcaaactaaaatacaatcacataatctc

SEQ ID NO: 37216 - DNA, 50 bp, synthetic construct
  source 1..50: mol_type = other DNA
caaccctaaattcatttaaaatatatcacaaactaaacrcrataactcac

SEQ ID NO: 37217 - DNA, 50 bp, synthetic construct
  source 1..50: mol_type = other DNA
atatataaatcaaccctaaattcatttaaaatatatcacaaactaaacrc

SEQ ID NO: 37218 - DNA, 50 bp, synthetic construct
  source 1..50: mol_type = other DNA
ctatatataaatcaaccctaaattcatttaaaatatatcacaaactaaac

SEQ ID NO: 37219 - DNA, 50 bp, synthetic construct
  source 1..50: mol_type = other DNA
aatacaaattatacccctaatatcttattacattaaaaaaacttaaaaac

SEQ ID NO: 37220 - DNA, 50 bp, synthetic construct
  source 1..50: mol_type = other DNA
aactaaaaaccacctcactcaaaaacaatcaaccaataatactaaaactc

SEQ ID NO: 37221 - DNA, 50 bp, synthetic construct
  source 1..50: mol_type = other DNA
caacatcactaactaactattcttaaataaaataatttccaactcctcac

SEQ ID NO: 37222 - DNA, 50 bp, synthetic construct
  source 1..50: mol_type = other DNA
aaaaaaacrtttaaaaattctatataactaaaccaactcacctaacaaac

SEQ ID NO: 37223 - DNA, 50 bp, synthetic construct
  source 1..50: mol_type = other DNA
catcaatctaataccaaactttaatcaaaaaaatatttaaaactaaacac

SEQ ID NO: 37224 - DNA, 50 bp, synthetic construct
  source 1..50: mol_type = other DNA
acraaaaccrtataaactcttaataaaccaaaattaaaatcataaatcac

SEQ ID NO: 37225 - DNA, 50 bp, synthetic construct
  source 1..50: mol_type = other DNA
taaaaatcaccccaaaccaaactattttcaaaaaataaacttccaaactc

SEQ ID NO: 37226 - DNA, 50 bp, synthetic construct
  source 1..50: mol_type = other DNA
ttccaaactcratatacccttaattcatataaaatttcaactctaaactc

SEQ ID NO: 37227 - DNA, 50 bp, synthetic construct
  source 1..50: mol_type = other DNA
acctaccaattccttaaaaacattaacttaaaattttaccraataactcc

SEQ ID NO: 37228 - DNA, 50 bp, synthetic construct
  source 1..50: mol_type = other DNA
tcctatttcaacctaccaattccttaaaaacattaacttaaaattttacc

SEQ ID NO: 37229 - DNA, 50 bp, synthetic construct
  source 1..50: mol_type = other DNA
aaaactattctaaataaaaaccacaaaaacaacacatacttaccrctacc

SEQ ID NO: 37230 - DNA, 50 bp, synthetic construct
  source 1..50: mol_type = other DNA
ttctaaataaaaaccacaaaaacaacacatacttaccrctaccractacc

SEQ ID NO: 37231 - DNA, 50 bp, synthetic construct
  source 1..50: mol_type = other DNA
ctttaaatatacccacaaaacrtaacatttactatcacataaccacrtac

SEQ ID NO: 37232 - DNA, 50 bp, synthetic construct
  source 1..50: mol_type = other DNA
tattaattaccaccccaccttactttaacctttaaatatacccacaaaac

SEQ ID NO: 37233 - DNA, 50 bp, synthetic construct
  source 1..50: mol_type = other DNA
aaataataaccaacaaactaccaacattaaacacacaaaaaactaatatc

SEQ ID NO: 37234 - DNA, 50 bp, synthetic construct
  source 1..50: mol_type = other DNA
aaaacatctattaaaataaccracctatcattttcaaaaacttcaaaacc

SEQ ID NO: 37235 - DNA, 50 bp, synthetic construct
  source 1..50: mol_type = other DNA
ttattctaataacccactttcataaaatcataacaaaaacacctctcccc

SEQ ID NO: 37236 - DNA, 50 bp, synthetic construct
  source 1..50: mol_type = other DNA
rctcattcacttccaaaatacrcaacaactctatatactaaaaatacaac

SEQ ID NO: 37237 - DNA, 50 bp, synthetic construct
  source 1..50: mol_type = other DNA
taaataaacraataaacraacaaataactcaaaaaccaactcacaatctc

SEQ ID NO: 37238 - DNA, 50 bp, synthetic construct
  source 1..50: mol_type = other DNA
ctacccrcaaaattttccaaattaacttctcctctaatcctaaactcacc

SEQ ID NO: 37239 - DNA, 50 bp, synthetic construct
  source 1..50: mol_type = other DNA
aaatcaaaatcatataataacaaaaaccccaaataactctcaaacacacc

SEQ ID NO: 37240 - DNA, 50 bp, synthetic construct
  source 1..50: mol_type = other DNA
aatctaaaaaactaatctaaacaaaaacactaaccacatacaacaataac

SEQ ID NO: 37241 - DNA, 50 bp, synthetic construct
  source 1..50: mol_type = other DNA
caataaacattcctctcccacttactaatttcaatataacaccaccaacc

SEQ ID NO: 37242 - DNA, 50 bp, synthetic construct
  source 1..50: mol_type = other DNA
aacaatctcctaatttcctatcctaatacctattaccctaacacaaaccc

SEQ ID NO: 37243 - DNA, 50 bp, synthetic construct
  source 1..50: mol_type = other DNA
aacaccaaaacaaaaaatcaaaaaactactttctaaaactaactctctac

SEQ ID NO: 37244 - DNA, 50 bp, synthetic construct
  source 1..50: mol_type = other DNA
acaaaaaatcaaaaaactactttctaaaactaactctctacraacttttc

SEQ ID NO: 37245 - DNA, 50 bp, synthetic construct
  source 1..50: mol_type = other DNA
tacraacttttcracaaaccaattaacattatctatacctacctctttac

SEQ ID NO: 37246 - DNA, 50 bp, synthetic construct
  source 1..50: mol_type = other DNA
tcracaaaccaattaacattatctatacctacctctttacrtataaattc

SEQ ID NO: 37247 - DNA, 50 bp, synthetic construct
  source 1..50: mol_type = other DNA
ttatctatacctacctctttacrtataaattcraaaaaccatactcaaac

SEQ ID NO: 37248 - DNA, 50 bp, synthetic construct
  source 1..50: mol_type = other DNA
ataatctacaaaaaatctacctcrcctaaaaaataatacttctaaatccc

SEQ ID NO: 37249 - DNA, 50 bp, synthetic construct
  source 1..50: mol_type = other DNA
tactataaaattcaaataaaaacaactataatctacaaaaaatctacctc

SEQ ID NO: 37250 - DNA, 50 bp, synthetic construct
  source 1..50: mol_type = other DNA
aaaaacrataatatatatcaatcaataaataattacaaaacatcccaaac

SEQ ID NO: 37251 - DNA, 50 bp, synthetic construct
  source 1..50: mol_type = other DNA
aaacacrtctaaaataccctataactacttactaactaacacacaccacc

SEQ ID NO: 37252 - DNA, 50 bp, synthetic construct
  source 1..50: mol_type = other DNA
actaaaccaatatcaaatatcctaaaaattttatcaaatataacraaatc

SEQ ID NO: 37253 - DNA, 50 bp, synthetic construct
  source 1..50: mol_type = other DNA
aacacractaaaccaatatcaaatatcctaaaaattttatcaaatataac

SEQ ID NO: 37254 - DNA, 50 bp, synthetic construct
  source 1..50: mol_type = other DNA
taaccctaactacaaaacaaaacatttaatacctacacctacrccaacac

SEQ ID NO: 37255 - DNA, 50 bp, synthetic construct
  source 1..50: mol_type = other DNA
aaaatttataaccctaactacaaaacaaaacatttaatacctacacctac

SEQ ID NO: 37256 - DNA, 50 bp, synthetic construct
  source 1..50: mol_type = other DNA
tatcttattttataactaaaaccacaaatctctatctataaacatacctc

SEQ ID NO: 37257 - DNA, 50 bp, synthetic construct
  source 1..50: mol_type = other DNA
accaaaataccaaaaaattttaacattatcctattactaaataccctaac

SEQ ID NO: 37258 - DNA, 50 bp, synthetic construct
  source 1..50: mol_type = other DNA
accrtaaacacraataaaacatcacaacatataataccttaaattaaacc

SEQ ID NO: 37259 - DNA, 50 bp, synthetic construct
  source 1..50: mol_type = other DNA
aactcratacaaaaattctaaaataaattaatactatctaccrtaaacac

SEQ ID NO: 37260 - DNA, 50 bp, synthetic construct
  source 1..50: mol_type = other DNA
aaatttaaaactcratacaaaaattctaaaataaattaatactatctacc

SEQ ID NO: 37261 - DNA, 50 bp, synthetic construct
  source 1..50: mol_type = other DNA
cratcaataataactacctaaaaccctatactaacaaaaatttaaaactc

SEQ ID NO: 37262 - DNA, 50 bp, synthetic construct
  source 1..50: mol_type = other DNA
atcccaaatcctttaactaaaaaaacatactaaccacacaaccaaaaaac

SEQ ID NO: 37263 - DNA, 50 bp, synthetic construct
  source 1..50: mol_type = other DNA
atcctttaactaaaaaaacatactaaccacacaaccaaaaaacrcaaacc

SEQ ID NO: 37264 - DNA, 50 bp, synthetic construct
  source 1..50: mol_type = other DNA
tacaaaattccactcccaaatcactcaccttaaaaataaatactaaaaac

SEQ ID NO: 37265 - DNA, 50 bp, synthetic construct
  source 1..50: mol_type = other DNA
aataattcaaattaataaaaaccctataaatcacctaaaactaataaaac

SEQ ID NO: 37266 - DNA, 50 bp, synthetic construct
  source 1..50: mol_type = other DNA
aacctaaatcacccctaaacaaaactctacctacrtctaaacaactaaac

SEQ ID NO: 37267 - DNA, 50 bp, synthetic construct
  source 1..50: mol_type = other DNA
acctaataaactcttaacatcaaccatcttaaaaccattaaattcctttc

SEQ ID NO: 37268 - DNA, 50 bp, synthetic construct
  source 1..50: mol_type = other DNA
aattccccaaaaaacactactcaaacaaacacaacaatacctaaattcac

SEQ ID NO: 37269 - DNA, 50 bp, synthetic construct
  source 1..50: mol_type = other DNA
attaaaaataaaatcaataaccaaaacatcaatactaacctaacaacccc

SEQ ID NO: 37270 - DNA, 50 bp, synthetic construct
  source 1..50: mol_type = other DNA
aacatcaatactaacctaacaaccccrctataaattaccaactactatac

SEQ ID NO: 37271 - DNA, 50 bp, synthetic construct
  source 1..50: mol_type = other DNA
caaaataatatctttctatacaactttttatttttctaaaacraaatctc

SEQ ID NO: 37272 - DNA, 50 bp, synthetic construct
  source 1..50: mol_type = other DNA
tcttaaaccaaaataatatctttctatacaactttttatttttctaaaac

SEQ ID NO: 37273 - DNA, 50 bp, synthetic construct
  source 1..50: mol_type = other DNA
aacccaaaaccctcctactataactaaaaaaaacctttacaaaaccttcc

SEQ ID NO: 37274 - DNA, 50 bp, synthetic construct
  source 1..50: mol_type = other DNA
cctaaactaaaaatacaaacaaccactaaaaaactcccaactactccaac

SEQ ID NO: 37275 - DNA, 50 bp, synthetic construct
  source 1..50: mol_type = other DNA
taaaaatacaaacaaccactaaaaaactcccaactactccaacrcttaac

SEQ ID NO: 37276 - DNA, 50 bp, synthetic construct
  source 1..50: mol_type = other DNA
taaacttctattaaaattactcaaattcccattcccacrattaacttctc

SEQ ID NO: 37277 - DNA, 50 bp, synthetic construct
  source 1..50: mol_type = other DNA
taaaaacacctacccraatactaaatcatctcaaactcraaaaactaatc

SEQ ID NO: 37278 - DNA, 50 bp, synthetic construct
  source 1..50: mol_type = other DNA
acacactataaaactaactctaaaataaaaccrccactacataaacraac

SEQ ID NO: 37279 - DNA, 50 bp, synthetic construct
  source 1..50: mol_type = other DNA
aaacacacactataaaactaactctaaaataaaaccrccactacataaac

SEQ ID NO: 37280 - DNA, 50 bp, synthetic construct
  source 1..50: mol_type = other DNA
aaaatctaaaaaaccccatcaaaatcctaaaatcctacaaaacaacctcc

SEQ ID NO: 37281 - DNA, 50 bp, synthetic construct
  source 1..50: mol_type = other DNA
aaaaacacaaacaacaaaaaatacctaaaacactattctaaaacaacatc

SEQ ID NO: 37282 - DNA, 50 bp, synthetic construct
  source 1..50: mol_type = other DNA
ccttaaacaaataacctcatctctctaaaccataaattcctcatcattcc

SEQ ID NO: 37283 - DNA, 50 bp, synthetic construct
  source 1..50: mol_type = other DNA
aattctacctaaaatcacaaccaatatctactaaatacctaccatatacc

SEQ ID NO: 37284 - DNA, 50 bp, synthetic construct
  source 1..50: mol_type = other DNA
taaaatcacaaccaatatctactaaatacctaccatataccraaaaccac

SEQ ID NO: 37285 - DNA, 50 bp, synthetic construct
  source 1..50: mol_type = other DNA
tctacaaccctaactctacrccctaaaaatactacctaaaacaaaaccac

SEQ ID NO: 37286 - DNA, 50 bp, synthetic construct
  source 1..50: mol_type = other DNA
aacaataattttatcaaaaaccaactatatacctaacaatattccatacc

SEQ ID NO: 37287 - DNA, 50 bp, synthetic construct
  source 1..50: mol_type = other DNA
ttttccctcccattaactttaaccrtacctaaaaattcctccatttatac

SEQ ID NO: 37288 - DNA, 50 bp, synthetic construct
  source 1..50: mol_type = other DNA
tcccattaactttaaccrtacctaaaaattcctccatttatacrtcatcc

SEQ ID NO: 37289 - DNA, 50 bp, synthetic construct
  source 1..50: mol_type = other DNA
ccccaaaactaaaactctattttcaaaccacctaaccaactaaaaaaatc

SEQ ID NO: 37290 - DNA, 50 bp, synthetic construct
  source 1..50: mol_type = other DNA
aaaaaacacacaactttactaataaataaccaataaaaaatacccccatc

SEQ ID NO: 37291 - DNA, 50 bp, synthetic construct
  source 1..50: mol_type = other DNA
caacatataactcaaaacraataacatcctctctaaacctcaaactcctc

SEQ ID NO: 37292 - DNA, 50 bp, synthetic construct
  source 1..50: mol_type = other DNA
aattatcataaaacttaactaacaaaaacaaaataccctaaactcaaccc

SEQ ID NO: 37293 - DNA, 50 bp, synthetic construct
  source 1..50: mol_type = other DNA
aatatcactaaacacttaaccactatctccttataaaaaaccacatctac

SEQ ID NO: 37294 - DNA, 50 bp, synthetic construct
  source 1..50: mol_type = other DNA
tcacccaaaacaaaaatcctaaactaaaaaaccaaaactcactttaactc

SEQ ID NO: 37295 - DNA, 50 bp, synthetic construct
  source 1..50: mol_type = other DNA
atcccccaaaacracctcaaaataaacttaactcctataaaacactaccc

SEQ ID NO: 37296 - DNA, 50 bp, synthetic construct
  source 1..50: mol_type = other DNA
ctaaactcaaataactccaaactcttctccaaactacaactattaactcc

SEQ ID NO: 37297 - DNA, 50 bp, synthetic construct
  source 1..50: mol_type = other DNA
tccractactatttaaaaaaacaaaacctaaattctacaacttacaaaac

SEQ ID NO: 37298 - DNA, 50 bp, synthetic construct
  source 1..50: mol_type = other DNA
tatttaaaaaaacaaaacctaaattctacaacttacaaaacrctcccttc

SEQ ID NO: 37299 - DNA, 50 bp, synthetic construct
  source 1..50: mol_type = other DNA
aacaataaacaataaacttaataccaactaaaataatcraatattcaccc

SEQ ID NO: 37300 - DNA, 50 bp, synthetic construct
  source 1..50: mol_type = other DNA
aaaaaaaaaacaccratttactaataactttaacaattaacttacccaac

SEQ ID NO: 37301 - DNA, 50 bp, synthetic construct
  source 1..50: mol_type = other DNA
aaaaaaatacctccrtcaacatctaaaaacaaataaatacaattctcaac

SEQ ID NO: 37302 - DNA, 50 bp, synthetic construct
  source 1..50: mol_type = other DNA
aaaaatacctccrtcaacatctaaaaacaaataaatacaattctcaacrc

SEQ ID NO: 37303 - DNA, 50 bp, synthetic construct
  source 1..50: mol_type = other DNA
aatacctccrtcaacatctaaaaacaaataaatacaattctcaacrcrac

SEQ ID NO: 37304 - DNA, 50 bp, synthetic construct
  source 1..50: mol_type = other DNA
atatcaaacaaaacctatatactcacrccttccctaaacatctacttaac

SEQ ID NO: 37305 - DNA, 50 bp, synthetic construct
  source 1..50: mol_type = other DNA
rtaccctaccccttatacraaaaaatatcaaacaaaacctatatactcac

SEQ ID NO: 37306 - DNA, 50 bp, synthetic construct
  source 1..50: mol_type = other DNA
aaaaactataccaaaaactacataccrtacaaaaaaaactacaataaacc

SEQ ID NO: 37307 - DNA, 50 bp, synthetic construct
  source 1..50: mol_type = other DNA
cccaaaaatacttataattatcrtaaacaaaaaacccccctttccccacc

SEQ ID NO: 37308 - DNA, 50 bp, synthetic construct
  source 1..50: mol_type = other DNA
tactatataccaaaccttaataacaataaaataaatcctccactcttccc

SEQ ID NO: 37309 - DNA, 50 bp, synthetic construct
  source 1..50: mol_type = other DNA
ccraaataacctcattttcttctccaaaaacactactctcttccaaaaac

SEQ ID NO: 37310 - DNA, 50 bp, synthetic construct
  source 1..50: mol_type = other DNA
ataaaaaaccttaaaacaataacctaacccaaacaaccacaaaacraaac

SEQ ID NO: 37311 - DNA, 50 bp, synthetic construct
  source 1..50: mol_type = other DNA
tattcctaccccaaaactaaaaaacaataccaaccaacaactcaacctac

SEQ ID NO: 37312 - DNA, 50 bp, synthetic construct
  source 1..50: mol_type = other DNA
caataccaaccaacaactcaacctacracctaaactcaaaacctaaaaac

SEQ ID NO: 37313 - DNA, 50 bp, synthetic construct
  source 1..50: mol_type = other DNA
cacccttataaacctctatcccttcaccaaaaactaaaaactaatacctc

SEQ ID NO: 37314 - DNA, 50 bp, synthetic construct
  source 1..50: mol_type = other DNA
ttacccaacttcacaaaactttaataaaatatctactccctcctaacttc

SEQ ID NO: 37315 - DNA, 50 bp, synthetic construct
  source 1..50: mol_type = other DNA
aataactaaataaatcacctcccttctctatacattaaaatctctaccac

SEQ ID NO: 37316 - DNA, 50 bp, synthetic construct
  source 1..50: mol_type = other DNA
aaaaacttccaaccraaattatcttcaaaaaacatcacaaatataaaaac

SEQ ID NO: 37317 - DNA, 50 bp, synthetic construct
  source 1..50: mol_type = other DNA
taccttcaaaaactttcaaaccaactacaaaaccaaacaaacccaaaccc

SEQ ID NO: 37318 - DNA, 50 bp, synthetic construct
  source 1..50: mol_type = other DNA
ctataaataacataacaaaaaaacctcaaataccatccttcctatccctc

SEQ ID NO: 37319 - DNA, 50 bp, synthetic construct
  source 1..50: mol_type = other DNA
acractacaaacctatctacaaaaccaaaacraaacaaacataaacaaac

SEQ ID NO: 37320 - DNA, 50 bp, synthetic construct
  source 1..50: mol_type = other DNA
ttatcaactcaaataactaccatataataacaaaataaacacacaatttc

SEQ ID NO: 37321 - DNA, 50 bp, synthetic construct
  source 1..50: mol_type = other DNA
taacaaccacttaaactaacaaataaaaaaacctactatcttaaaaatac

SEQ ID NO: 37322 - DNA, 50 bp, synthetic construct
  source 1..50: mol_type = other DNA
ctaacctcaaaaaaacraacctcctaacaaaaacatctaaaaacatcrcc

SEQ ID NO: 37323 - DNA, 50 bp, synthetic construct
  source 1..50: mol_type = other DNA
atcctaacctcaaaaaaacraacctcctaacaaaaacatctaaaaacatc

SEQ ID NO: 37324 - DNA, 50 bp, synthetic construct
  source 1..50: mol_type = other DNA
taataacctaaaaaacracratattcccaaatacccctactaaaaaactc

SEQ ID NO: 37325 - DNA, 50 bp, synthetic construct
  source 1..50: mol_type = other DNA
aactcrctcccctaaaatcaaaatctttataatattaactactctatccc

SEQ ID NO: 37326 - DNA, 50 bp, synthetic construct
  source 1..50: mol_type = other DNA
actaaaaatacataaattaactaaacrttataataaacccctataatccc

SEQ ID NO: 37327 - DNA, 50 bp, synthetic construct
  source 1..50: mol_type = other DNA
acaaaaacccaccacaacrcccaactaatttatatacttttaataaaaac

SEQ ID NO: 37328 - DNA, 50 bp, synthetic construct
  source 1..50: mol_type = other DNA
actcataattcacaacccacaaattaaaaacccacttaatacacacaaac

SEQ ID NO: 37329 - DNA, 50 bp, synthetic construct
  source 1..50: mol_type = other DNA
ctccaataaaaacaactatctcataaaacaatatttaacataacactttc

SEQ ID NO: 37330 - DNA, 50 bp, synthetic construct
  source 1..50: mol_type = other DNA
ccacctaactcacraaaaaaatatcaaaacaaattacraataccaaaacc

SEQ ID NO: 37331 - DNA, 50 bp, synthetic construct
  source 1..50: mol_type = other DNA
caaccttcaaaaatcaaatctaataacrtaaaaacacccractaaaaacc

SEQ ID NO: 37332 - DNA, 50 bp, synthetic construct
  source 1..50: mol_type = other DNA
ctatttaattaaaatattactaccaaccttcaaaaatcaaatctaataac

SEQ ID NO: 37333 - DNA, 50 bp, synthetic construct
  source 1..50: mol_type = other DNA
taacttaacctaaaactcactaaattacctaaaacataacacttcacctc

SEQ ID NO: 37334 - DNA, 50 bp, synthetic construct
  source 1..50: mol_type = other DNA
ccaaataactcaataaatcccaaactaaaccaaaatttatatccaaatcc

SEQ ID NO: 37335 - DNA, 50 bp, synthetic construct
  source 1..50: mol_type = other DNA
ccaaatccrttccaactttctttcacaattacctatcctaaaaacaacac

SEQ ID NO: 37336 - DNA, 50 bp, synthetic construct
  source 1..50: mol_type = other DNA
acaattacctatcctaaaaacaacacrtactaaacaaaaataaaactacc

SEQ ID NO: 37337 - DNA, 50 bp, synthetic construct
  source 1..50: mol_type = other DNA
tatcctaaaaacaacacrtactaaacaaaaataaaactaccraaaacaac

SEQ ID NO: 37338 - DNA, 50 bp, synthetic construct
  source 1..50: mol_type = other DNA
tacaataattaaccraacttaataataaacrcctataaccccaactactc

SEQ ID NO: 37339 - DNA, 50 bp, synthetic construct
  source 1..50: mol_type = other DNA
aaatctatcatttaccctaaaatctaactataataaaaaaatccaaatcc

SEQ ID NO: 37340 - DNA, 50 bp, synthetic construct
  source 1..50: mol_type = other DNA
tctaactataataaaaaaatccaaatccrtacatttaaacaaactaatac

SEQ ID NO: 37341 - DNA, 50 bp, synthetic construct
  source 1..50: mol_type = other DNA
ccaaatctcaatttttatccccaataaatttaatcttataaaatccraac

SEQ ID NO: 37342 - DNA, 50 bp, synthetic construct
  source 1..50: mol_type = other DNA
ccacaaaacaaaaacctaattatcaatatcctctatttctttcctaaccc

SEQ ID NO: 37343 - DNA, 50 bp, synthetic construct
  source 1..50: mol_type = other DNA
ctatcctcaaacataactaaaattccaaaaaacccaaacctcacccaaac

SEQ ID NO: 37344 - DNA, 50 bp, synthetic construct
  source 1..50: mol_type = other DNA
actaaaccaaaaacatacctaaaacataccaaaacrataccctaaacccc

SEQ ID NO: 37345 - DNA, 50 bp, synthetic construct
  source 1..50: mol_type = other DNA
cattataaaacctctaaaactaaaacctaaaacaataaaaaacrctaatc

SEQ ID NO: 37346 - DNA, 50 bp, synthetic construct
  source 1..50: mol_type = other DNA
ataaaaacattataaaacctctaaaactaaaacctaaaacaataaaaaac

SEQ ID NO: 37347 - DNA, 50 bp, synthetic construct
  source 1..50: mol_type = other DNA
caaaaccctacccaaattcttaactctaaactactccctaaaaaacaacc

SEQ ID NO: 37348 - DNA, 50 bp, synthetic construct
  source 1..50: mol_type = other DNA
aaaataatatcaactaacttcrattccaaaaactttcacaattaactctc

SEQ ID NO: 37349 - DNA, 50 bp, synthetic construct
  source 1..50: mol_type = other DNA
taacttcrattccaaaaactttcacaattaactctcraaaaccaatatac

SEQ ID NO: 37350 - DNA, 50 bp, synthetic construct
  source 1..50: mol_type = other DNA
caaaaactttcacaattaactctcraaaaccaatatacrctaactccaac

SEQ ID NO: 37351 - DNA, 50 bp, synthetic construct
  source 1..50: mol_type = other DNA
atacttttctatcctcraactccratttacaaaacaccataaaaataatc

SEQ ID NO: 37352 - DNA, 50 bp, synthetic construct
  source 1..50: mol_type = other DNA
caaacacatcctcacttctctaaaataacttactttacaaaatcactccc

SEQ ID NO: 37353 - DNA, 50 bp, synthetic construct
  source 1..50: mol_type = other DNA
ttaaaatctaattttctacaaccaaataaaaactatcttccccatatttc

SEQ ID NO: 37354 - DNA, 50 bp, synthetic construct
  source 1..50: mol_type = other DNA
caaaaatcccacaactaaaaacaaacacctaaattcaaaccccaattacc

SEQ ID NO: 37355 - DNA, 50 bp, synthetic construct
  source 1..50: mol_type = other DNA
ttcraaatattaaaacctacaaccccacaaatctccaaaatttttcrcac

SEQ ID NO: 37356 - DNA, 50 bp, synthetic construct
  source 1..50: mol_type = other DNA
tatattcraaatattaaaacctacaaccccacaaatctccaaaatttttc

SEQ ID NO: 37357 - DNA, 50 bp, synthetic construct
  source 1..50: mol_type = other DNA
aaaactacaaattttaacactccraacacacatttacaataacacaaacc

SEQ ID NO: 37358 - DNA, 50 bp, synthetic construct
  source 1..50: mol_type = other DNA
aataaaaccaactctataactaaatataaaactaactaaatataaaaccc

SEQ ID NO: 37359 - DNA, 50 bp, synthetic construct
  source 1..50: mol_type = other DNA
caaacctaaactcaacatttcaaaatcataaacttaacaaaaaaaacacc

SEQ ID NO: 37360 - DNA, 50 bp, synthetic construct
  source 1..50: mol_type = other DNA
actctaaaaatcaaaaccaaactaacctacacccccaaaaaaacaaatac

SEQ ID NO: 37361 - DNA, 50 bp, synthetic construct
  source 1..50: mol_type = other DNA
ccaaaaattcacaaactaaatcaaaaatcctaaattccaaaaataaactc

SEQ ID NO: 37362 - DNA, 50 bp, synthetic construct
  source 1..50: mol_type = other DNA
cccctaaaacccaaaattcctaactcaacttataaactcttaaaaacatc

SEQ ID NO: 37363 - DNA, 50 bp, synthetic construct
  source 1..50: mol_type = other DNA
aaaattcctaactcaacttataaactcttaaaaacatcrtaaaatacccc

SEQ ID NO: 37364 - DNA, 50 bp, synthetic construct
  source 1..50: mol_type = other DNA
crcccaaaacacctatcaaaaaccaccctctataaaacttacctacttcc

SEQ ID NO: 37365 - DNA, 50 bp, synthetic construct
  source 1..50: mol_type = other DNA
craaaacaaacaaactctacaaaaaataacccttaacaaatactctaaac

SEQ ID NO: 37366 - DNA, 50 bp, synthetic construct
  source 1..50: mol_type = other DNA
aaaaaataacccttaacaaatactctaaacrctcccacccaaaaaatacc

SEQ ID NO: 37367 - DNA, 50 bp, synthetic construct
  source 1..50: mol_type = other DNA
atcaattctaatcactatcactaacatacrtctctctataactcttctcc

SEQ ID NO: 37368 - DNA, 50 bp, synthetic construct
  source 1..50: mol_type = other DNA
accaaaactaacatacaaaacaaacatacaaaccaaaaacraaacctacc

SEQ ID NO: 37369 - DNA, 50 bp, synthetic construct
  source 1..50: mol_type = other DNA
aacatacaaaacaaacatacaaaccaaaaacraaacctaccrtaaaaacc

SEQ ID NO: 37370 - DNA, 50 bp, synthetic construct
  source 1..50: mol_type = other DNA
tattcactcaactatctcttatcttctctatttctttaacttctctcccc

SEQ ID NO: 37371 - DNA, 50 bp, synthetic construct
  source 1..50: mol_type = other DNA
aaacctacaaataaaccctaaaaaaataaatttcttacctccaaccactc

SEQ ID NO: 37372 - DNA, 50 bp, synthetic construct
  source 1..50: mol_type = other DNA
ctaccaaaactactctaaaccacaaaaaaatcaacccaaaaaactaaaac

SEQ ID NO: 37373 - DNA, 50 bp, synthetic construct
  source 1..50: mol_type = other DNA
aaattttaacattaaaaacacacrccaaaacaaacctctaccrtctcttc

SEQ ID NO: 37374 - DNA, 50 bp, synthetic construct
  source 1..50: mol_type = other DNA
ctaactacaactaataaaaaattttcaaataaaaattctaaaatccccac

SEQ ID NO: 37375 - DNA, 50 bp, synthetic construct
  source 1..50: mol_type = other DNA
aatctaaaatcaactcttacccacaatacaacaaacactcccaaaatatc

SEQ ID NO: 37376 - DNA, 50 bp, synthetic construct
  source 1..50: mol_type = other DNA
taaaatcaactcttacccacaatacaacaaacactcccaaaatatcratc

SEQ ID NO: 37377 - DNA, 50 bp, synthetic construct
  source 1..50: mol_type = other DNA
accataatacaaataaccacctaaaatatacaaaacaaaaacaacaaaac

SEQ ID NO: 37378 - DNA, 50 bp, synthetic construct
  source 1..50: mol_type = other DNA
ctaaaatccctcctaaatacccrcaacaaaacataaataatactaacrac

SEQ ID NO: 37379 - DNA, 50 bp, synthetic construct
  source 1..50: mol_type = other DNA
acaaaaacaacaaaacratataaacaacaatcaaaacaacaaaaaacrcc

SEQ ID NO: 37380 - DNA, 50 bp, synthetic construct
  source 1..50: mol_type = other DNA
aaactaaaaaactctaaaaccccaataaaatcaaccacactatccaactc

SEQ ID NO: 37381 - DNA, 50 bp, synthetic construct
  source 1..50: mol_type = other DNA
aaaaccctaactcaaaaaaccaaaataaactaataacraaaaaaactccc

SEQ ID NO: 37382 - DNA, 50 bp, synthetic construct
  source 1..50: mol_type = other DNA
rtctttaactaaaacatactaaaattcrtaaatcacctaaaaaccaaaac

SEQ ID NO: 37383 - DNA, 50 bp, synthetic construct
  source 1..50: mol_type = other DNA
racaaaacttctcctataactacrtctttaactaaaacatactaaaattc

SEQ ID NO: 37384 - DNA, 50 bp, synthetic construct
  source 1..50: mol_type = other DNA
rccttaacctccaaataactcacraatttcaacatattccaatcaaaaac

SEQ ID NO: 37385 - DNA, 50 bp, synthetic construct
  source 1..50: mol_type = other DNA
raatttcaacatattccaatcaaaaacrtaatcataaaaaaaaccctacc

SEQ ID NO: 37386 - DNA, 50 bp, synthetic construct
  source 1..50: mol_type = other DNA
taaaaacaataaataactaaaacaatactaactacaaaaaatctaaaaac

SEQ ID NO: 37387 - DNA, 50 bp, synthetic construct
  source 1..50: mol_type = other DNA
acccacaaatcaatcrttaccataaattcaaaaaactacaaaaacctaac

SEQ ID NO: 37388 - DNA, 50 bp, synthetic construct
  source 1..50: mol_type = other DNA
aaacaataatccctaactctttaccactccttaacacaaccaaaaaaccc

SEQ ID NO: 37389 - DNA, 50 bp, synthetic construct
  source 1..50: mol_type = other DNA
caaaaacaaaaaacactacacaaatccttaacatccccaaaaaaccaccc

SEQ ID NO: 37390 - DNA, 50 bp, synthetic construct
  source 1..50: mol_type = other DNA
aacccctctactcatcacaacatcccttatttatactacaatcaaccaac

SEQ ID NO: 37391 - DNA, 50 bp, synthetic construct
  source 1..50: mol_type = other DNA
catcctcattcccraaacccaactaataaataattatataaactaaaaac

SEQ ID NO: 37392 - DNA, 50 bp, synthetic construct
  source 1..50: mol_type = other DNA
crctactataaacatcraaattattaatcrcaacaatcatcctcattccc

SEQ ID NO: 37393 - DNA, 50 bp, synthetic construct
  source 1..50: mol_type = other DNA
rtataatataacaaaataataaatcrcaccaactataccraacraaaaac

SEQ ID NO: 37394 - DNA, 50 bp, synthetic construct
  source 1..50: mol_type = other DNA
cctctaaaaccctacaaaaaattaacatcaaaaaatacttataaataaac

SEQ ID NO: 37395 - DNA, 50 bp, synthetic construct
  source 1..50: mol_type = other DNA
ctataaaaccctcttttttcttatatctattcaacctctcctatcraatc

SEQ ID NO: 37396 - DNA, 50 bp, synthetic construct
  source 1..50: mol_type = other DNA
caatactataaaaccctcttttttcttatatctattcaacctctcctatc

SEQ ID NO: 37397 - DNA, 50 bp, synthetic construct
  source 1..50: mol_type = other DNA
taccaaaatcccaaaaataaccttttctaactcctataactaaacctaac

SEQ ID NO: 37398 - DNA, 50 bp, synthetic construct
  source 1..50: mol_type = other DNA
aaaaataaccttttctaactcctataactaaacctaacraaaaactcccc

SEQ ID NO: 37399 - DNA, 50 bp, synthetic construct
  source 1..50: mol_type = other DNA
aacaatactcaacttttctataaaaccatatactaacaataatactattc

SEQ ID NO: 37400 - DNA, 50 bp, synthetic construct
  source 1..50: mol_type = other DNA
cttacttataatacccaccacattccacctttaaaaacaaataactaaac

SEQ ID NO: 37401 - DNA, 50 bp, synthetic construct
  source 1..50: mol_type = other DNA
ataaaactctactaccraaaaatttacaatctaaaaataaaactaaatac

SEQ ID NO: 37402 - DNA, 50 bp, synthetic construct
  source 1..50: mol_type = other DNA
tatctatactattaaccactatactataatacctataaaactctactacc

SEQ ID NO: 37403 - DNA, 50 bp, synthetic construct
  source 1..50: mol_type = other DNA
taacctcaactatattttcttaaataatcttcaacaatcccrtaaaatac

SEQ ID NO: 37404 - DNA, 50 bp, synthetic construct
  source 1..50: mol_type = other DNA
aaatactcataacctcaactatattttcttaaataatcttcaacaatccc

SEQ ID NO: 37405 - DNA, 50 bp, synthetic construct
  source 1..50: mol_type = other DNA
aatatctcaacttcataaaccttcaaaactataaatattaactaaattac

SEQ ID NO: 37406 - DNA, 50 bp, synthetic construct
  source 1..50: mol_type = other DNA
aaaatctcttacaacrtatcccraataaaaacattactatcctaaaaaac

SEQ ID NO: 37407 - DNA, 50 bp, synthetic construct
  source 1..50: mol_type = other DNA
aacrtatcccraataaaaacattactatcctaaaaaacrttattaaaaac

SEQ ID NO: 37408 - DNA, 50 bp, synthetic construct
  source 1..50: mol_type = other DNA
tcaaacttaaaacraatactcaacrtttaaataaaatactacctaactcc

SEQ ID NO: 37409 - DNA, 50 bp, synthetic construct
  source 1..50: mol_type = other DNA
aaaaaaaaattcatcccaaactatacacctactctatctatacaattaac

SEQ ID NO: 37410 - DNA, 50 bp, synthetic construct
  source 1..50: mol_type = other DNA
accccacaaccttcctattcctacctcrataattttatcattcttatctc

SEQ ID NO: 37411 - DNA, 50 bp, synthetic construct
  source 1..50: mol_type = other DNA
ttaaactaaaaccrctttaacataaaaattttacctttcctcaatcctcc

SEQ ID NO: 37412 - DNA, 50 bp, synthetic construct
  source 1..50: mol_type = other DNA
atcctcaaaaaacttacaatctaaacctaaaaataataataaccaacacc

SEQ ID NO: 37413 - DNA, 50 bp, synthetic construct
  source 1..50: mol_type = other DNA
aaactacaaactctttaaaaacataaacaaactctccaaaacctaatacc

SEQ ID NO: 37414 - DNA, 50 bp, synthetic construct
  source 1..50: mol_type = other DNA
tcacctaattacataactatcrtaatatcaaaacaaaatacataactcac

SEQ ID NO: 37415 - DNA, 50 bp, synthetic construct
  source 1..50: mol_type = other DNA
aaaattataataaaactaacaaatttctatcacctaattacataactatc

SEQ ID NO: 37416 - DNA, 50 bp, synthetic construct
  source 1..50: mol_type = other DNA
aactaaataataaaaatttatcaactccattataaccttaaaacaccacc

SEQ ID NO: 37417 - DNA, 50 bp, synthetic construct
  source 1..50: mol_type = other DNA
tataaccttaaaacaccaccrtaatatctataatctttcttaaccaaaac

SEQ ID NO: 37418 - DNA, 50 bp, synthetic construct
  source 1..50: mol_type = other DNA
aaaaaaaacaacctcccattcttaaaaccaaaaacrctaaaattctaatc

SEQ ID NO: 37419 - DNA, 50 bp, synthetic construct
  source 1..50: mol_type = other DNA
cccattcttaaaaccaaaaacrctaaaattctaatcracctcctaccaac

SEQ ID NO: 37420 - DNA, 50 bp, synthetic construct
  source 1..50: mol_type = other DNA
tatatattatatcaacaacttttaacctcatccacaatataaaataaaac

SEQ ID NO: 37421 - DNA, 50 bp, synthetic construct
  source 1..50: mol_type = other DNA
raaatcaatcatactaaccctctaattttaattccttaaataatttcctc

SEQ ID NO: 37422 - DNA, 50 bp, synthetic construct
  source 1..50: mol_type = other DNA
acaaaaatcctaatcatctctaataaaattacctatatatcaaacaaccc

SEQ ID NO: 37423 - DNA, 50 bp, synthetic construct
  source 1..50: mol_type = other DNA
cccttccaaaataacttcctctcttccccacttataaataattctccatc

SEQ ID NO: 37424 - DNA, 50 bp, synthetic construct
  source 1..50: mol_type = other DNA
cctcaaacacaactaacacctatacctaataatatcacattccctatccc

SEQ ID NO: 37425 - DNA, 50 bp, synthetic construct
  source 1..50: mol_type = other DNA
actctcttacttcttctaaaaaacacaacaaataacacaaaaaaaaactc

SEQ ID NO: 37426 - DNA, 50 bp, synthetic construct
  source 1..50: mol_type = other DNA
tataaaatactcaatacctaatacaaaacaaaatactcacaataattacc

SEQ ID NO: 37427 - DNA, 50 bp, synthetic construct
  source 1..50: mol_type = other DNA
aatacctaatacaaaacaaaatactcacaataattaccrcctactatccc

SEQ ID NO: 37428 - DNA, 50 bp, synthetic construct
  source 1..50: mol_type = other DNA
tacctaatacaaaacaaaatactcacaataattaccrcctactatcccrc

SEQ ID NO: 37429 - DNA, 50 bp, synthetic construct
  source 1..50: mol_type = other DNA
ctatcccrcrcactaccttaacctataaatactactaattataaataaac

SEQ ID NO: 37430 - DNA, 50 bp, synthetic construct
  source 1..50: mol_type = other DNA
ccccatcaccccatcacaacttaaactaaacctccaaatttcataaaaac

SEQ ID NO: 37431 - DNA, 50 bp, synthetic construct
  source 1..50: mol_type = other DNA
taaaaaacaaaatcctcaatacaaaaaactaaataaactcttattcaaac

SEQ ID NO: 37432 - DNA, 50 bp, synthetic construct
  source 1..50: mol_type = other DNA
tttctaaaactccctaaatttaactaactatatcccaaaaactcccactc

SEQ ID NO: 37433 - DNA, 50 bp, synthetic construct
  source 1..50: mol_type = other DNA
ctaaaatccctaacaatctaacccattcctaatctaaacccacaaaaaac

SEQ ID NO: 37434 - DNA, 50 bp, synthetic construct
  source 1..50: mol_type = other DNA
ttttcaaaatctaattaataaaataacttaaatatatatccctaatctac

SEQ ID NO: 37435 - DNA, 50 bp, synthetic construct
  source 1..50: mol_type = other DNA
cctaatctacraaaaataaccccatttaaaaccttttcttctcaaatacc

SEQ ID NO: 37436 - DNA, 50 bp, synthetic construct
  source 1..50: mol_type = other DNA
ataccccaacaaacccttaccaaaaataaaaaccctaaaaaacacctacc

SEQ ID NO: 37437 - DNA, 50 bp, synthetic construct
  source 1..50: mol_type = other DNA
aaatcccaacacttcttaactctaaaccctactataattcctttacaccc

SEQ ID NO: 37438 - DNA, 50 bp, synthetic construct
  source 1..50: mol_type = other DNA
acaaaaaaaaacatttcaaacctccccccaaataaacctttaaactcaac

SEQ ID NO: 37439 - DNA, 50 bp, synthetic construct
  source 1..50: mol_type = other DNA
tcttttctttttaaaataaaatcttactctatcacccacrctacaatacc

SEQ ID NO: 37440 - DNA, 50 bp, synthetic construct
  source 1..50: mol_type = other DNA
ccaaacacttttcttttctttttaaaataaaatcttactctatcacccac

SEQ ID NO: 37441 - DNA, 50 bp, synthetic construct
  source 1..50: mol_type = other DNA
aactttctacracataactacttttaccaaaataataacaaacacaaacc

SEQ ID NO: 37442 - DNA, 50 bp, synthetic construct
  source 1..50: mol_type = other DNA
caaataacaccratactaacaacatcaaaacacctaaaataactttctac

SEQ ID NO: 37443 - DNA, 50 bp, synthetic construct
  source 1..50: mol_type = other DNA
acaaccataccrcaaaaaatcacttcaaatactctaatactaccaatacc

SEQ ID NO: 37444 - DNA, 50 bp, synthetic construct
  source 1..50: mol_type = other DNA
accaataccratatcatctaccttaaaaccttaaaaaccaaacaaaaaac

SEQ ID NO: 37445 - DNA, 50 bp, synthetic construct
  source 1..50: mol_type = other DNA
ccataaatcattatttcctcctttaaataaacactacaaaaataaaacac

SEQ ID NO: 37446 - DNA, 50 bp, synthetic construct
  source 1..50: mol_type = other DNA
aaaattccctatataattaatcccaatataatttttctaatttcrttatc

SEQ ID NO: 37447 - DNA, 50 bp, synthetic construct
  source 1..50: mol_type = other DNA
tctacaaaaattccctatataattaatcccaatataatttttctaatttc

SEQ ID NO: 37448 - DNA, 50 bp, synthetic construct
  source 1..50: mol_type = other DNA
aatcatttatcttttaacaaccaaaaacaaaatatccccacaacrttacc

SEQ ID NO: 37449 - DNA, 50 bp, synthetic construct
  source 1..50: mol_type = other DNA
aaatcaaatcatttatcttttaacaaccaaaaacaaaatatccccacaac

SEQ ID NO: 37450 - DNA, 50 bp, synthetic construct
  source 1..50: mol_type = other DNA
cccaaaatcaaattccataaataaccrccaaataataacaacttcttctc

SEQ ID NO: 37451 - DNA, 50 bp, synthetic construct
  source 1..50: mol_type = other DNA
cccccrtccttaaattctaatcaacccaaaatcaaattccataaataacc

SEQ ID NO: 37452 - DNA, 50 bp, synthetic construct
  source 1..50: mol_type = other DNA
ataaatacaactaataattacaaattatataattaacrtcctcccacaac

SEQ ID NO: 37453 - DNA, 50 bp, synthetic construct
  source 1..50: mol_type = other DNA
aaccacttacttatcactataaccttcacctcaaaacrttataaaaaaac

SEQ ID NO: 37454 - DNA, 50 bp, synthetic construct
  source 1..50: mol_type = other DNA
aatacatacataataatattctatctccatataataacttccacatacac

SEQ ID NO: 37455 - DNA, 50 bp, synthetic construct
  source 1..50: mol_type = other DNA
caatatttcatcatattactcaaactaatctccaactcctaaactcaaac

SEQ ID NO: 37456 - DNA, 50 bp, synthetic construct
  source 1..50: mol_type = other DNA
aaattctcctatctcaacctcacaaataactaaaactacaaatacaaacc

SEQ ID NO: 37457 - DNA, 50 bp, synthetic construct
  source 1..50: mol_type = other DNA
cctaactatactaccatcattaacatctcaaattccaataaaatcataac

SEQ ID NO: 37458 - DNA, 50 bp, synthetic construct
  source 1..50: mol_type = other DNA
actttttaatttcctatcracaataattcaaatctatatcatcttaactc

SEQ ID NO: 37459 - DNA, 50 bp, synthetic construct
  source 1..50: mol_type = other DNA
tttatccacccttcaaacraatcaaaataacacaaatttaaattactacc

SEQ ID NO: 37460 - DNA, 50 bp, synthetic construct
  source 1..50: mol_type = other DNA
ccctctaaactacaatataaaaataaatttcaacaaattttactaacatc

SEQ ID NO: 37461 - DNA, 50 bp, synthetic construct
  source 1..50: mol_type = other DNA
aaaaacacttaaaaatacaatctccactccratccctaaaacaaataacc

SEQ ID NO: 37462 - DNA, 50 bp, synthetic construct
  source 1..50: mol_type = other DNA
aaaaaaaaactataaacaaaaaaaacacttaaaaatacaatctccactcc

SEQ ID NO: 37463 - DNA, 50 bp, synthetic construct
  source 1..50: mol_type = other DNA
ttcctcaaaactaaaaaaacctcctcctaaatttcccraaacttaaaaac

SEQ ID NO: 37464 - DNA, 50 bp, synthetic construct
  source 1..50: mol_type = other DNA
taccctaaacaataacaactacttcttaactcaactaactcactcctctc

SEQ ID NO: 37465 - DNA, 50 bp, synthetic construct
  source 1..50: mol_type = other DNA
acattctccrataccatccaaaaaactataaacccrtaaaaattaatatc

SEQ ID NO: 37466 - DNA, 50 bp, synthetic construct
  source 1..50: mol_type = other DNA
taactaaaaacrtactaatacatattcctaacatctccataaaatctaac

SEQ ID NO: 37467 - DNA, 50 bp, synthetic construct
  source 1..50: mol_type = other DNA
attctcctctccaaatcraaaactacttaaatccttaaataactaaaaac

SEQ ID NO: 37468 - DNA, 50 bp, synthetic construct
  source 1..50: mol_type = other DNA
catacctaattatcatattatataaacaaccttattctcctctccaaatc

SEQ ID NO: 37469 - DNA, 50 bp, synthetic construct
  source 1..50: mol_type = other DNA
ccttcctatttcaaaaccattacacttactattccttctacctaaaatac

SEQ ID NO: 37470 - DNA, 50 bp, synthetic construct
  source 1..50: mol_type = other DNA
aaacaactactactactacrcataaacaaaccaaacactaaaaacaaaac

SEQ ID NO: 37471 - DNA, 50 bp, synthetic construct
  source 1..50: mol_type = other DNA
ctccccacaaccaaatcaacaaatatttaaaaaacaactactactactac

SEQ ID NO: 37472 - DNA, 50 bp, synthetic construct
  source 1..50: mol_type = other DNA
attatatcaccaccaaataaaactataaacacrtcctaaacrataacctc

SEQ ID NO: 37473 - DNA, 50 bp, synthetic construct
  source 1..50: mol_type = other DNA
tataaccrtcctcrttaaaattcttaaatccctaaaaaaacccaaactac

SEQ ID NO: 37474 - DNA, 50 bp, synthetic construct
  source 1..50: mol_type = other DNA
ctccacccacatttatacctaaaccaccatataccttaaattataaaatc

SEQ ID NO: 37475 - DNA, 50 bp, synthetic construct
  source 1..50: mol_type = other DNA
atttatacctaaaccaccatataccttaaattataaaatcraacaataac

SEQ ID NO: 37476 - DNA, 50 bp, synthetic construct
  source 1..50: mol_type = other DNA
ttaatttctccaccttcctctaaataaccttaaacaaattttacctctcc

SEQ ID NO: 37477 - DNA, 50 bp, synthetic construct
  source 1..50: mol_type = other DNA
aaaaactaactaacccaactaaacaccacctaaccaaacccaaatctaac

SEQ ID NO: 37478 - DNA, 50 bp, synthetic construct
  source 1..50: mol_type = other DNA
aacractccccctcttaatttcctcaattatcaaaaacraaactaatacc

SEQ ID NO: 37479 - DNA, 50 bp, synthetic construct
  source 1..50: mol_type = other DNA
cctacctaaaaaaacractccccctcttaatttcctcaattatcaaaaac

SEQ ID NO: 37480 - DNA, 50 bp, synthetic construct
  source 1..50: mol_type = other DNA
ccctcaatttccaacaaaccaaaataactaattaccctacctaaaaaaac

SEQ ID NO: 37481 - DNA, 50 bp, synthetic construct
  source 1..50: mol_type = other DNA
aaatacacacctaacaaataacaatatcttatattcaaaatctaattacc

SEQ ID NO: 37482 - DNA, 50 bp, synthetic construct
  source 1..50: mol_type = other DNA
aatctaaactataccaacaacatcctataaaaaaccaaataactaattcc

SEQ ID NO: 37483 - DNA, 50 bp, synthetic construct
  source 1..50: mol_type = other DNA
aacaactctatcccrctcataccaaaactaaaaataaaccaaattaaccc

SEQ ID NO: 37484 - DNA, 50 bp, synthetic construct
  source 1..50: mol_type = other DNA
aacaaaacttaaaataaaacacccctcctaactaaaaatcaaaataaaac

SEQ ID NO: 37485 - DNA, 50 bp, synthetic construct
  source 1..50: mol_type = other DNA
raatatatattaaaaaacttccaaaactaatactaactaactacaacacc

SEQ ID NO: 37486 - DNA, 50 bp, synthetic construct
  source 1..50: mol_type = other DNA
aaaaatcttcataaccraaaaaaaccttattatcaaacctaaaattaacc

SEQ ID NO: 37487 - DNA, 50 bp, synthetic construct
  source 1..50: mol_type = other DNA
ttcctaactcctaaaaaacataaaataccctaaaaaaaatcttcataacc

SEQ ID NO: 37488 - DNA, 50 bp, synthetic construct
  source 1..50: mol_type = other DNA
taaaaaccctttctaaaacactccatattcctcaaaaactaaaaaaactc

SEQ ID NO: 37489 - DNA, 50 bp, synthetic construct
  source 1..50: mol_type = other DNA
aaaacactccatattcctcaaaaactaaaaaaactcractcaacccaaac

SEQ ID NO: 37490 - DNA, 50 bp, synthetic construct
  source 1..50: mol_type = other DNA
aatatttaaaaactacaattcccaaaatacaaaacraaccctcaccrccc

SEQ ID NO: 37491 - DNA, 50 bp, synthetic construct
  source 1..50: mol_type = other DNA
atcrcctaatccraaaatatttaaaaactacaattcccaaaatacaaaac

SEQ ID NO: 37492 - DNA, 50 bp, synthetic construct
  source 1..50: mol_type = other DNA
crataaaaacccrctctacactctaaaaattataatcctcaaacacctcc

SEQ ID NO: 37493 - DNA, 50 bp, synthetic construct
  source 1..50: mol_type = other DNA
acaaaaataacctactttccctacacactacacttccctaaacactttac

SEQ ID NO: 37494 - DNA, 50 bp, synthetic construct
  source 1..50: mol_type = other DNA
aaaactataaactataactctcaataatttctttcaactcttaaaaaatc

SEQ ID NO: 37495 - DNA, 50 bp, synthetic construct
  source 1..50: mol_type = other DNA
ataaactataactctcaataatttctttcaactcttaaaaaatcraactc

SEQ ID NO: 37496 - DNA, 50 bp, synthetic construct
  source 1..50: mol_type = other DNA
tataactctcaataatttctttcaactcttaaaaaatcraactcracaac

SEQ ID NO: 37497 - DNA, 50 bp, synthetic construct
  source 1..50: mol_type = other DNA
caataatttctttcaactcttaaaaaatcraactcracaacraaaaaccc

SEQ ID NO: 37498 - DNA, 50 bp, synthetic construct
  source 1..50: mol_type = other DNA
tactaaaaataaaacttttcattaactttactcacttcraaccraaacrc

SEQ ID NO: 37499 - DNA, 50 bp, synthetic construct
  source 1..50: mol_type = other DNA
attactaaaaataaaacttttcattaactttactcacttcraaccraaac

SEQ ID NO: 37500 - DNA, 50 bp, synthetic construct
  source 1..50: mol_type = other DNA
rcaaaattactaaaaataaaacttttcattaactttactcacttcraacc

SEQ ID NO: 37501 - DNA, 50 bp, synthetic construct
  source 1..50: mol_type = other DNA
crtacrcaaaattactaaaaataaaacttttcattaactttactcacttc

SEQ ID NO: 37502 - DNA, 50 bp, synthetic construct
  source 1..50: mol_type = other DNA
aaacaaaatcaataaaaaatttcacccttaacaaccctacrcacraatcc

SEQ ID NO: 37503 - DNA, 50 bp, synthetic construct
  source 1..50: mol_type = other DNA
raacaaacataaatcttccraacrccttataattcctcraaaaactcaac

SEQ ID NO: 37504 - DNA, 50 bp, synthetic construct
  source 1..50: mol_type = other DNA
ctacratcacaaacaaacaaaaataccraaaaatacaatctaaaaccccc

SEQ ID NO: 37505 - DNA, 50 bp, synthetic construct
  source 1..50: mol_type = other DNA
taacrtaaaaaatttaaatacactttccctaaatacaacaaaaaaatacc

SEQ ID NO: 37506 - DNA, 50 bp, synthetic construct
  source 1..50: mol_type = other DNA
ctttccctaaatacaacaaaaaaataccraactaaaaaacaaactccacc

SEQ ID NO: 37507 - DNA, 50 bp, synthetic construct
  source 1..50: mol_type = other DNA
aacacaccractatatttttaactttcaatactctaaaaacrtataaatc

SEQ ID NO: 37508 - DNA, 50 bp, synthetic construct
  source 1..50: mol_type = other DNA
taaaaactaaaaatataaccratatattaacaacaaccttcccattaatc

SEQ ID NO: 37509 - DNA, 50 bp, synthetic construct
  source 1..50: mol_type = other DNA
ctcccaaaaacccaatcttaacractaaatcctaaacccaatcaaacacc

SEQ ID NO: 37510 - DNA, 50 bp, synthetic construct
  source 1..50: mol_type = other DNA
aacrcttaacatcaccaaacctcaatttccccatctataaaataaaactc

SEQ ID NO: 37511 - DNA, 50 bp, synthetic construct
  source 1..50: mol_type = other DNA
ataacaacratttaaaccaaactttacatacaacatcatatttaatcccc

SEQ ID NO: 37512 - DNA, 50 bp, synthetic construct
  source 1..50: mol_type = other DNA
ccrcttacacatttaacrctatatctctctaattttcaacraaaaaaatc

SEQ ID NO: 37513 - DNA, 50 bp, synthetic construct
  source 1..50: mol_type = other DNA
catcttacaaccatcraaaaactatataaaaaatataaataaaacacacc

SEQ ID NO: 37514 - DNA, 50 bp, synthetic construct
  source 1..50: mol_type = other DNA
aaacctttattctaattatactttttaccatctttcatcttacaaccatc

SEQ ID NO: 37515 - DNA, 50 bp, synthetic construct
  source 1..50: mol_type = other DNA
aaaaataaaatctaaaccaaatccaaaaaaactctaaacttacccaaaac

SEQ ID NO: 37516 - DNA, 50 bp, synthetic construct
  source 1..50: mol_type = other DNA
taaaaactaaaaaatcraaaattcccrtctcttccttaaaaacttacctc

SEQ ID NO: 37517 - DNA, 50 bp, synthetic construct
  source 1..50: mol_type = other DNA
rccctacccctaactatctaaacaaaaataatattaaaaactaaaaaatc

SEQ ID NO: 37518 - DNA, 50 bp, synthetic construct
  source 1..50: mol_type = other DNA
catcctaatttaatcttttaccrcaaacaaactaatattaataaaactac

SEQ ID NO: 37519 - DNA, 50 bp, synthetic construct
  source 1..50: mol_type = other DNA
craccratcttactcaaatacttcttcatcctataattataaaaaaacac

SEQ ID NO: 37520 - DNA, 50 bp, synthetic construct
  source 1..50: mol_type = other DNA
caatctactcaaaaacatattacacctcttcaaaactttctcaaaacctc

SEQ ID NO: 37521 - DNA, 50 bp, synthetic construct
  source 1..50: mol_type = other DNA
aatctcacctctaaaaacrtaacaaaaacataaatctcraaatttacrtc

SEQ ID NO: 37522 - DNA, 50 bp, synthetic construct
  source 1..50: mol_type = other DNA
aacaatctcacctctaaaaacrtaacaaaaacataaatctcraaatttac

SEQ ID NO: 37523 - DNA, 50 bp, synthetic construct
  source 1..50: mol_type = other DNA
aaactacccaactacrcacaaacctaaaataacctctaaaaatccctaac

SEQ ID NO: 37524 - DNA, 50 bp, synthetic construct
  source 1..50: mol_type = other DNA
aaaatcatccaaataataaccaaaaactacaaaccttcccaacctcaaac

SEQ ID NO: 37525 - DNA, 50 bp, synthetic construct
  source 1..50: mol_type = other DNA
ctaactcrctatataaatataaccaaatcacttaccttctctatatcccc

SEQ ID NO: 37526 - DNA, 50 bp, synthetic construct
  source 1..50: mol_type = other DNA
tatataaatataaccaaatcacttaccttctctatatccccrtaatcctc

SEQ ID NO: 37527 - DNA, 50 bp, synthetic construct
  source 1..50: mol_type = other DNA
ctcrcttttataaaactcctacctaaaattaaaaactacatatatcccac

SEQ ID NO: 37528 - DNA, 50 bp, synthetic construct
  source 1..50: mol_type = other DNA
tacrtaaaacacatacaatttccaaccccaaataaaaattccacaaaaac

SEQ ID NO: 37529 - DNA, 50 bp, synthetic construct
  source 1..50: mol_type = other DNA
caaatcaaaaaaacctaaccatataccaatcacraccaaaactaaatacc

SEQ ID NO: 37530 - DNA, 50 bp, synthetic construct
  source 1..50: mol_type = other DNA
acacrcaaataaacaaccaaatcaaaaaaacctaaccatataccaatcac

SEQ ID NO: 37531 - DNA, 50 bp, synthetic construct
  source 1..50: mol_type = other DNA
ataaaaaccctaacrcaaaaatactaatataatacaaacctactcaatac

SEQ ID NO: 37532 - DNA, 50 bp, synthetic construct
  source 1..50: mol_type = other DNA
ttttaatatcctacrcactaaacaaatttacatcataccaacatttctac

SEQ ID NO: 37533 - DNA, 50 bp, synthetic construct
  source 1..50: mol_type = other DNA
aaccacraaaccttaaacctacaaaaaactcaaaaaaccaaaaacaatac

SEQ ID NO: 37534 - DNA, 50 bp, synthetic construct
  source 1..50: mol_type = other DNA
catccrtacccrtcaaataatcratctctaaattaaacttaaaaattccc

SEQ ID NO: 37535 - DNA, 50 bp, synthetic construct
  source 1..50: mol_type = other DNA
taaaaaactcatctacatccraaacctccaacctaaacttcttaccatcc

SEQ ID NO: 37536 - DNA, 50 bp, synthetic construct
  source 1..50: mol_type = other DNA
aattcaaactaaaaactccraatacaaataaacttcccaaaaaaataaac

SEQ ID NO: 37537 - DNA, 50 bp, synthetic construct
  source 1..50: mol_type = other DNA
aactaaaaactccraatacaaataaacttcccaaaaaaataaacrcccac

SEQ ID NO: 37538 - DNA, 50 bp, synthetic construct
  source 1..50: mol_type = other DNA
caaaaaaataaacrcccacrccccctacttactaattactatataaccac

SEQ ID NO: 37539 - DNA, 50 bp, synthetic construct
  source 1..50: mol_type = other DNA
ctaaatcctcaattcccacaaaaacaaactctcaaaaaacaaatttcctc

SEQ ID NO: 37540 - DNA, 50 bp, synthetic construct
  source 1..50: mol_type = other DNA
ttaccttctaaaaatctatccttataaaaactaaaaactcaacaccccac

SEQ ID NO: 37541 - DNA, 50 bp, synthetic construct
  source 1..50: mol_type = other DNA
cacttatcaaaaaactccaaaaactacaaacrctaactaataaaactcac

SEQ ID NO: 37542 - DNA, 50 bp, synthetic construct
  source 1..50: mol_type = other DNA
ctccaaatccttaccatcccacttatcaaaaaactccaaaaactacaaac

SEQ ID NO: 37543 - DNA, 50 bp, synthetic construct
  source 1..50: mol_type = other DNA
ctaaactaaaacaatatatataattacacaacaaactccacacctaacac

SEQ ID NO: 37544 - DNA, 50 bp, synthetic construct
  source 1..50: mol_type = other DNA
aaaaaaacttatttttaatcrataccaaacacaaaccatcccatatccac

SEQ ID NO: 37545 - DNA, 50 bp, synthetic construct
  source 1..50: mol_type = other DNA
taacacaaattaaaaacctctaaccacaccaaaaaaacttatttttaatc

SEQ ID NO: 37546 - DNA, 50 bp, synthetic construct
  source 1..50: mol_type = other DNA
ttaaatacrtctaaaacataaaccttatatttactcaaccttcctaccac

SEQ ID NO: 37547 - DNA, 50 bp, synthetic construct
  source 1..50: mol_type = other DNA
aaaccctaaccrtaaacaaacaacttaatatctcaaaacttttcttcacc

SEQ ID NO: 37548 - DNA, 50 bp, synthetic construct
  source 1..50: mol_type = other DNA
aaattctaaaacattaaactacttacccacraccaaaacttaacataacc

SEQ ID NO: 37549 - DNA, 50 bp, synthetic construct
  source 1..50: mol_type = other DNA
taaaacattaaactacttacccacraccaaaacttaacataaccraaacc

SEQ ID NO: 37550 - DNA, 50 bp, synthetic construct
  source 1..50: mol_type = other DNA
aaaattaaccaacaaaatactaaacccacractcrcraacaaaccttaac

SEQ ID NO: 37551 - DNA, 50 bp, synthetic construct
  source 1..50: mol_type = other DNA
ccraaaaactaaacaaaaaattaaccaacaaaatactaaacccacractc

SEQ ID NO: 37552 - DNA, 50 bp, synthetic construct
  source 1..50: mol_type = other DNA
cccaataccttattaaccaacttcttattcaactcctcracaataaaatc

SEQ ID NO: 37553 - DNA, 50 bp, synthetic construct
  source 1..50: mol_type = other DNA
taaacraaaaatacctccctctaacctcaatttcctcatattataataac

SEQ ID NO: 37554 - DNA, 50 bp, synthetic construct
  source 1..50: mol_type = other DNA
ctctaactaccraacaaaaaacaacaatacraataaaacacaaaccaaac

SEQ ID NO: 37555 - DNA, 50 bp, synthetic construct
  source 1..50: mol_type = other DNA
tttacrtttccaaaaaatcactctaactaccraacaaaaaacaacaatac

SEQ ID NO: 37556 - DNA, 50 bp, synthetic construct
  source 1..50: mol_type = other DNA
tacccrcattactatcctctactcracaaccaaaataatcctttaaaaac

SEQ ID NO: 37557 - DNA, 50 bp, synthetic construct
  source 1..50: mol_type = other DNA
cctactaccacctactattcccaataaataattaaaaattaccctttccc

SEQ ID NO: 37558 - DNA, 50 bp, synthetic construct
  source 1..50: mol_type = other DNA
actaaaaacaataaataacaacaaaaaaacacctctaactctacaccaac

SEQ ID NO: 37559 - DNA, 50 bp, synthetic construct
  source 1..50: mol_type = other DNA
taaaataaacataacractcrcaaactctcaacraatcaaaaactttacc

SEQ ID NO: 37560 - DNA, 50 bp, synthetic construct
  source 1..50: mol_type = other DNA
ctttattaaataaaaacaaatactaaatatatatctcctcctacttccac

SEQ ID NO: 37561 - DNA, 50 bp, synthetic construct
  source 1..50: mol_type = other DNA
tttttattatttataaaactttccttaacaacaacttccaaacaaaaccc

SEQ ID NO: 37562 - DNA, 50 bp, synthetic construct
  source 1..50: mol_type = other DNA
ttaaaacaaaacttaatacatatttaactcattaaatattaactactacc

SEQ ID NO: 37563 - DNA, 50 bp, synthetic construct
  source 1..50: mol_type = other DNA
ctaacccaaaatcacacaactaattaaaaacaacrcctaaaaaaaaatcc

SEQ ID NO: 37564 - DNA, 50 bp, synthetic construct
  source 1..50: mol_type = other DNA
rataccactcctcaaaactatcraatccctacttatatatataaaaaaac

SEQ ID NO: 37565 - DNA, 50 bp, synthetic construct
  source 1..50: mol_type = other DNA
aaaaatatttttaaataaactaaaacacrataccactcctcaaaactatc

SEQ ID NO: 37566 - DNA, 50 bp, synthetic construct
  source 1..50: mol_type = other DNA
rccttttcacacacacaaacaaaaactcracaaccctaaaaaataacacc

SEQ ID NO: 37567 - DNA, 50 bp, synthetic construct
  source 1..50: mol_type = other DNA
ccctaaaaaataacaccrtactccaactcactcaaaaacacctctttctc

SEQ ID NO: 37568 - DNA, 50 bp, synthetic construct
  source 1..50: mol_type = other DNA
atcacraaatcaaaaaatcraaaccattctaactaacacrataaaatccc

SEQ ID NO: 37569 - DNA, 50 bp, synthetic construct
  source 1..50: mol_type = other DNA
atataccaaaccctaaactaaaaactttacaaatattatatcacaataac

SEQ ID NO: 37570 - DNA, 50 bp, synthetic construct
  source 1..50: mol_type = other DNA
ttataattcataattctatccatatataactcaatcrttactaactatcc

SEQ ID NO: 37571 - DNA, 50 bp, synthetic construct
  source 1..50: mol_type = other DNA
ttcaaaaatatttcttataattcataattctatccatatataactcaatc

SEQ ID NO: 37572 - DNA, 50 bp, synthetic construct
  source 1..50: mol_type = other DNA
taaaaataataaaaataactcaactaaatctctttccactctaattcccc

SEQ ID NO: 37573 - DNA, 50 bp, synthetic construct
  source 1..50: mol_type = other DNA
accttattcataaacatatatatatatttaaaaacaaaatctatcactac

SEQ ID NO: 37574 - DNA, 50 bp, synthetic construct
  source 1..50: mol_type = other DNA
ccaataaatatcaacacaacctaacatttaaaaccactaccratctctac

SEQ ID NO: 37575 - DNA, 50 bp, synthetic construct
  source 1..50: mol_type = other DNA
atcttatatccaataaatatcaacacaacctaacatttaaaaccactacc

SEQ ID NO: 37576 - DNA, 50 bp, synthetic construct
  source 1..50: mol_type = other DNA
aactaaataaaacaaaaatcactccacaataaaacaataacrtaaaaaac

SEQ ID NO: 37577 - DNA, 50 bp, synthetic construct
  source 1..50: mol_type = other DNA
aaaaccttcaactaaataaaacaaaaatcactccacaataaaacaataac

SEQ ID NO: 37578 - DNA, 50 bp, synthetic construct
  source 1..50: mol_type = other DNA
aattaaaaccctctaactactaaattaataaatccattaatttccaattc

SEQ ID NO: 37579 - DNA, 50 bp, synthetic construct
  source 1..50: mol_type = other DNA
tatcattaatttttctctcaaacatttttctaataccttaaatacctatc

SEQ ID NO: 37580 - DNA, 50 bp, synthetic construct
  source 1..50: mol_type = other DNA
aaatcaaaaacccaaactatataacccctccaacataaatactacttctc

SEQ ID NO: 37581 - DNA, 50 bp, synthetic construct
  source 1..50: mol_type = other DNA
acataacctaaactcctaatttacaaaaccataaataaacacacacacrc

SEQ ID NO: 37582 - DNA, 50 bp, synthetic construct
  source 1..50: mol_type = other DNA
tacctcaatctcccaaataattaaaactaaatacatacaccaccacactc

SEQ ID NO: 37583 - DNA, 50 bp, synthetic construct
  source 1..50: mol_type = other DNA
aaaaaaaataaacaattaaaaaccctaccaaatctctcacraaaaaaacc

SEQ ID NO: 37584 - DNA, 50 bp, synthetic construct
  source 1..50: mol_type = other DNA
atacccaactaacrtacttttctaaacaaccttcccaaaactcrataaac

SEQ ID NO: 37585 - DNA, 50 bp, synthetic construct
  source 1..50: mol_type = other DNA
aaaacaaactatactattactttaaaacccacacractacaacctttaac

SEQ ID NO: 37586 - DNA, 50 bp, synthetic construct
  source 1..50: mol_type = other DNA
ccraacacaaccrataaacacaaccraacaaataataaaacaataacctc

SEQ ID NO: 37587 - DNA, 50 bp, synthetic construct
  source 1..50: mol_type = other DNA
taaaatataaaacatctaaaaaaaaccraacacaaccrataaacacaacc

SEQ ID NO: 37588 - DNA, 50 bp, synthetic construct
  source 1..50: mol_type = other DNA
ractatacccractcctcccaaatacttcatatttcacatatattaactc

SEQ ID NO: 37589 - DNA, 50 bp, synthetic construct
  source 1..50: mol_type = other DNA
attttattcttcaaactctccatatcttacattctccatctaaataaacc

SEQ ID NO: 37590 - DNA, 50 bp, synthetic construct
  source 1..50: mol_type = other DNA
aatcrtaataattctaaaacaacraaacacctaccaaaatcctaaaactc

SEQ ID NO: 37591 - DNA, 50 bp, synthetic construct
  source 1..50: mol_type = other DNA
aaacctacaaccactttttaattacaaactaatataaaaaccrctcaatc

SEQ ID NO: 37592 - DNA, 50 bp, synthetic construct
  source 1..50: mol_type = other DNA
ataaaccaaaacctacaaccactttttaattacaaactaatataaaaacc

SEQ ID NO: 37593 - DNA, 50 bp, synthetic construct
  source 1..50: mol_type = other DNA
ttaaacaaaatctaaaactaatcacacraaaacaaccacaaaaccccacc

SEQ ID NO: 37594 - DNA, 50 bp, synthetic construct
  source 1..50: mol_type = other DNA
caaaatctaaaactaatcacacraaaacaaccacaaaaccccaccrtaac

SEQ ID NO: 37595 - DNA, 50 bp, synthetic construct
  source 1..50: mol_type = other DNA
ataaaccacacaacccatacttacttttacaaacrtacrtcatctatcac

SEQ ID NO: 37596 - DNA, 50 bp, synthetic construct
  source 1..50: mol_type = other DNA
taatctttaaccataaaccacacaacccatacttacttttacaaacrtac

SEQ ID NO: 37597 - DNA, 50 bp, synthetic construct
  source 1..50: mol_type = other DNA
tctataatctttaaccataaaccacacaacccatacttacttttacaaac

SEQ ID NO: 37598 - DNA, 50 bp, synthetic construct
  source 1..50: mol_type = other DNA
atataactcataaccaaaaaccacaaaacaaaccaaaaacaataaatcac

SEQ ID NO: 37599 - DNA, 50 bp, synthetic construct
  source 1..50: mol_type = other DNA
ccaaaccccaataaaactaaacccaaatttaaaacacrctatcctttcac

SEQ ID NO: 37600 - DNA, 50 bp, synthetic construct
  source 1..50: mol_type = other DNA
cacacraactcctccaaaccccaataaaactaaacccaaatttaaaacac

SEQ ID NO: 37601 - DNA, 50 bp, synthetic construct
  source 1..50: mol_type = other DNA
acaacrtatttcaaacttaaattcaactttactaaaacttaaaaaaaccc

SEQ ID NO: 37602 - DNA, 50 bp, synthetic construct
  source 1..50: mol_type = other DNA
caaaataaaaatcraaaacaacccaactactactaaaaatcctcaaaaac

SEQ ID NO: 37603 - DNA, 50 bp, synthetic construct
  source 1..50: mol_type = other DNA
aaatcraaaacaacccaactactactaaaaatcctcaaaaacraataacc

SEQ ID NO: 37604 - DNA, 50 bp, synthetic construct
  source 1..50: mol_type = other DNA
atacaacacaaaacaaacctcttataacaaatatataaaacactccaccc

SEQ ID NO: 37605 - DNA, 50 bp, synthetic construct
  source 1..50: mol_type = other DNA
ctaccttcaactatctctaaaaaacctaaccctaaccactaaacaataac

SEQ ID NO: 37606 - DNA, 50 bp, synthetic construct
  source 1..50: mol_type = other DNA
ccactacccaataaccaaaatcaaatttctcaaaaacaactaaaaacaac

SEQ ID NO: 37607 - DNA, 50 bp, synthetic construct
  source 1..50: mol_type = other DNA
acccaataaccaaaatcaaatttctcaaaaacaactaaaaacaacraaac

SEQ ID NO: 37608 - DNA, 50 bp, synthetic construct
  source 1..50: mol_type = other DNA
ctacttctcccctcattcaaaaaccttcctttaaaaaaataaatactccc

SEQ ID NO: 37609 - DNA, 50 bp, synthetic construct
  source 1..50: mol_type = other DNA
tcaacttcttctttctatatccratatttaatttctattatcrtaaaaac

SEQ ID NO: 37610 - DNA, 50 bp, synthetic construct
  source 1..50: mol_type = other DNA
taaaaacraaataacaaatattccatatattaacatttaatcctcctaac

SEQ ID NO: 37611 - DNA, 50 bp, synthetic construct
  source 1..50: mol_type = other DNA
craaataacaaatattccatatattaacatttaatcctcctaacrtaatc

SEQ ID NO: 37612 - DNA, 50 bp, synthetic construct
  source 1..50: mol_type = other DNA
acaaatattccatatattaacatttaatcctcctaacrtaatcracacac

SEQ ID NO: 37613 - DNA, 50 bp, synthetic construct
  source 1..50: mol_type = other DNA
raaaaatacaactaaaataacacrtacccacaataataccacctcttacc

SEQ ID NO: 37614 - DNA, 50 bp, synthetic construct
  source 1..50: mol_type = other DNA
cacaataataccacctcttaccraaaatcaaacaaaaaaaacccaactcc

SEQ ID NO: 37615 - DNA, 50 bp, synthetic construct
  source 1..50: mol_type = other DNA
caaaaacaataaaaaaccaatatctattattcaatttaactctaaaccac

SEQ ID NO: 37616 - DNA, 50 bp, synthetic construct
  source 1..50: mol_type = other DNA
atttaactctaaaccacrtacatcttcaatcaacccaaaaacctaaacrc

SEQ ID NO: 37617 - DNA, 50 bp, synthetic construct
  source 1..50: mol_type = other DNA
tacaaaccacaaaacrtaatactacaaataaactctactacrataaaaac

SEQ ID NO: 37618 - DNA, 50 bp, synthetic construct
  source 1..50: mol_type = other DNA
crataaaaacraattaacatcractccctcrtaactaactactaaatttc

SEQ ID NO: 37619 - DNA, 50 bp, synthetic construct
  source 1..50: mol_type = other DNA
aaaaatctactaacccraatatactaacccraatatactaacacaaacrc

SEQ ID NO: 37620 - DNA, 50 bp, synthetic construct
  source 1..50: mol_type = other DNA
aaaaaaatctactaacccraatatactaacccraatatactaacacaaac

SEQ ID NO: 37621 - DNA, 50 bp, synthetic construct
  source 1..50: mol_type = other DNA
ractatcttcaatcacaaaaaaaaatctactaacccraatatactaaccc

SEQ ID NO: 37622 - DNA, 50 bp, synthetic construct
  source 1..50: mol_type = other DNA
aaatataaaataccractatcttcaatcacaaaaaaaaatctactaaccc

SEQ ID NO: 37623 - DNA, 50 bp, synthetic construct
  source 1..50: mol_type = other DNA
ataccratctacttaccaaaaaaacaaacccttcaaaaatataaaatacc

SEQ ID NO: 37624 - DNA, 50 bp, synthetic construct
  source 1..50: mol_type = other DNA
tcctaataccatcttaccraaacaactaaaacactaaaaaacaataactc

SEQ ID NO: 37625 - DNA, 50 bp, synthetic construct
  source 1..50: mol_type = other DNA
ttacaaatacaaacraattcaaacaacaacattcctttccttcataccac

SEQ ID NO: 37626 - DNA, 50 bp, synthetic construct
  source 1..50: mol_type = other DNA
cttaaaaaacataaactctaccacraaaacccacraccaaaatttcatac

SEQ ID NO: 37627 - DNA, 50 bp, synthetic construct
  source 1..50: mol_type = other DNA
atctaaaataacacaaccaaaaaaatcttaaaaaacataaactctaccac

SEQ ID NO: 37628 - DNA, 50 bp, synthetic construct
  source 1..50: mol_type = other DNA
atttctttaactatattaccttaaatttaaacaaacactatacctaaaac

SEQ ID NO: 37629 - DNA, 50 bp, synthetic construct
  source 1..50: mol_type = other DNA
ctttaactatattaccttaaatttaaacaaacactatacctaaaacraac

SEQ ID NO: 37630 - DNA, 50 bp, synthetic construct
  source 1..50: mol_type = other DNA
ccaaaaaaaaatctccactcaaacccaacraaaaacttcttaaatatcrc

SEQ ID NO: 37631 - DNA, 50 bp, synthetic construct
  source 1..50: mol_type = other DNA
ttaactaaacrtatcatcctaataaaaccaaatctaaccaacatccctcc

SEQ ID NO: 37632 - DNA, 50 bp, synthetic construct
  source 1..50: mol_type = other DNA
ctaaccaacatccctccrtatactaattataactaatacaaaaaaacacc

SEQ ID NO: 37633 - DNA, 50 bp, synthetic construct
  source 1..50: mol_type = other DNA
ccaatcaccaaccctaccttctttctttttcaaaatacttatcactctcc

SEQ ID NO: 37634 - DNA, 50 bp, synthetic construct
  source 1..50: mol_type = other DNA
acatatataactctacaaaaaaacaacraacttttctcatctctaccccc

SEQ ID NO: 37635 - DNA, 50 bp, synthetic construct
  source 1..50: mol_type = other DNA
aaaaaaaactcaataaaacaaaaaactactcaaccccactctaaaaaccc

SEQ ID NO: 37636 - DNA, 50 bp, synthetic construct
  source 1..50: mol_type = other DNA
atcactatcataaacctcctctcccatcaaaaataacactccataaattc

SEQ ID NO: 37637 - DNA, 50 bp, synthetic construct
  source 1..50: mol_type = other DNA
aaactcrctaaaaaaaccaactaacaaaaacaacataatataatatccrc

SEQ ID NO: 37638 - DNA, 50 bp, synthetic construct
  source 1..50: mol_type = other DNA
aactaaaaacracaaaaactaaaaacaaacttctaaacaaatcaacccrc

SEQ ID NO: 37639 - DNA, 50 bp, synthetic construct
  source 1..50: mol_type = other DNA
ataactaaaaacracaaaaactaaaaacaaacttctaaacaaatcaaccc

SEQ ID NO: 37640 - DNA, 50 bp, synthetic construct
  source 1..50: mol_type = other DNA
ccccctcctcctaaccttataaaataacctaactaaaccctaactcattc

SEQ ID NO: 37641 - DNA, 50 bp, synthetic construct
  source 1..50: mol_type = other DNA
ctaaaccaccctatcaatcatcaaccactataaacacttctaaactatac

SEQ ID NO: 37642 - DNA, 50 bp, synthetic construct
  source 1..50: mol_type = other DNA
aactttccaacccctaaaaaataaatcccactaaacttaacaacrtttcc

SEQ ID NO: 37643 - DNA, 50 bp, synthetic construct
  source 1..50: mol_type = other DNA
aaaaaacattaacacracaaccccaactactaaacaaaaaatcacctctc

SEQ ID NO: 37644 - DNA, 50 bp, synthetic construct
  source 1..50: mol_type = other DNA
ttataacatcctaccraaaaataaccttctacccaacaactaaaactatc

SEQ ID NO: 37645 - DNA, 50 bp, synthetic construct
  source 1..50: mol_type = other DNA
actacatatcaacccaaaacctaacacatactaaatacttaacaaatatc

SEQ ID NO: 37646 - DNA, 50 bp, synthetic construct
  source 1..50: mol_type = other DNA
taaaaaaccatccaaaactctcaatatctactcaactcaaaacctaatcc

SEQ ID NO: 37647 - DNA, 50 bp, synthetic construct
  source 1..50: mol_type = other DNA
aaattctaaactaaacaaacactaaaaactttaaataaccctccacaatc

SEQ ID NO: 37648 - DNA, 50 bp, synthetic construct
  source 1..50: mol_type = other DNA
tacaaaaaccrtcctataaaccaatacacracaccaaacaaaatatcatc

SEQ ID NO: 37649 - DNA, 50 bp, synthetic construct
  source 1..50: mol_type = other DNA
cctaccatatttaaatcaaactacaaaaaccrtcctataaaccaatacac

SEQ ID NO: 37650 - DNA, 50 bp, synthetic construct
  source 1..50: mol_type = other DNA
tcataacaaaatattaaaacctaccatatttaaatcaaactacaaaaacc

SEQ ID NO: 37651 - DNA, 50 bp, synthetic construct
  source 1..50: mol_type = other DNA
acaaatcctaacattttaccataaaaattttccttcctaataaaataatc

SEQ ID NO: 37652 - DNA, 50 bp, synthetic construct
  source 1..50: mol_type = other DNA
caaaaattaaatataccacaataaactataatatacataattctcaaatc

SEQ ID NO: 37653 - DNA, 50 bp, synthetic construct
  source 1..50: mol_type = other DNA
taaatataccacaataaactataatatacataattctcaaatcraaaaac

SEQ ID NO: 37654 - DNA, 50 bp, synthetic construct
  source 1..50: mol_type = other DNA
tataccacaataaactataatatacataattctcaaatcraaaaacraac

SEQ ID NO: 37655 - DNA, 50 bp, synthetic construct
  source 1..50: mol_type = other DNA
acacaaacctaaaaaactcaactcrtaaatcttattccttatccatacac

SEQ ID NO: 37656 - DNA, 50 bp, synthetic construct
  source 1..50: mol_type = other DNA
ataaaaataacaaaaatcaaatttaaacacaaacctaaaaaactcaactc

SEQ ID NO: 37657 - DNA, 50 bp, synthetic construct
  source 1..50: mol_type = other DNA
actactaactccacacaacaataaaaaaaacaaccttcraaaaatcatac

SEQ ID NO: 37658 - DNA, 50 bp, synthetic construct
  source 1..50: mol_type = other DNA
aaaaaaacaaaaactactaactccacacaacaataaaaaaaacaaccttc

SEQ ID NO: 37659 - DNA, 50 bp, synthetic construct
  source 1..50: mol_type = other DNA
ctaacatcaaaatccatacactaactaaccaaaacctctctataactccc

SEQ ID NO: 37660 - DNA, 50 bp, synthetic construct
  source 1..50: mol_type = other DNA
aaaacaatatcactacctaaaacaaactattacataaccataaactcttc

SEQ ID NO: 37661 - DNA, 50 bp, synthetic construct
  source 1..50: mol_type = other DNA
aaataaacttacaataacaaacractacacaacctacaaccaaaaccatc

SEQ ID NO: 37662 - DNA, 50 bp, synthetic construct
  source 1..50: mol_type = other DNA
ctctaaaccattaaaaaaattcrataaccttaactacaaactatacaacc

SEQ ID NO: 37663 - DNA, 50 bp, synthetic construct
  source 1..50: mol_type = other DNA
atacaaccrtctatcattataaattcactctctccccaacctttatcaac

SEQ ID NO: 37664 - DNA, 50 bp, synthetic construct
  source 1..50: mol_type = other DNA
caaactaaaattttatattttacaaccccttttcctactcatcaaaaatc

SEQ ID NO: 37665 - DNA, 50 bp, synthetic construct
  source 1..50: mol_type = other DNA
atcaaaactcccraaaaaaacrctcttactaaattattaaccacaaaaac

SEQ ID NO: 37666 - DNA, 50 bp, synthetic construct
  source 1..50: mol_type = other DNA
taaaaaaaacccataaccracrcttctataattaacaactcaacaaaaac

SEQ ID NO: 37667 - DNA, 50 bp, synthetic construct
  source 1..50: mol_type = other DNA
aaaaaaaaaacacaacaacraactctacaatcctatctatcaaaactccc

SEQ ID NO: 37668 - DNA, 50 bp, synthetic construct
  source 1..50: mol_type = other DNA
caacaaaaacrcctccttcraaaaccttaacaaacaaaactacaaaatcc

SEQ ID NO: 37669 - DNA, 50 bp, synthetic construct
  source 1..50: mol_type = other DNA
ctataatttacracccaacttcctaaatcatactccaattaccaaccctc

SEQ ID NO: 37670 - DNA, 50 bp, synthetic construct
  source 1..50: mol_type = other DNA
taccaaacctctaacrctccaacaaaaaaccttaactcaatttctcaaac

SEQ ID NO: 37671 - DNA, 50 bp, synthetic construct
  source 1..50: mol_type = other DNA
accctaaaccratttctacaatttctttttctcaataaaaaactcctatc

SEQ ID NO: 37672 - DNA, 50 bp, synthetic construct
  source 1..50: mol_type = other DNA
tccataaaacrcaacaatacctatatataccracaaaaaatcractaacc

SEQ ID NO: 37673 - DNA, 50 bp, synthetic construct
  source 1..50: mol_type = other DNA
taacataaaacccccaaaaactcaacaacctacaactaaccacaaactcc

SEQ ID NO: 37674 - DNA, 50 bp, synthetic construct
  source 1..50: mol_type = other DNA
aaatctaccaacctactcaaaaacttcaaaacaataacatcccctaaccc

SEQ ID NO: 37675 - DNA, 50 bp, synthetic construct
  source 1..50: mol_type = other DNA
atcaaaaaataccactatcctaaaatccctaaacaaactaacaaatccac

SEQ ID NO: 37676 - DNA, 50 bp, synthetic construct
  source 1..50: mol_type = other DNA
actaaatctaaacctaaaacaaacataaccaaataaaaacaaacrcttac

SEQ ID NO: 37677 - DNA, 50 bp, synthetic construct
  source 1..50: mol_type = other DNA
taaataactaaatctaaacctaaaacaaacataaccaaataaaaacaaac

SEQ ID NO: 37678 - DNA, 50 bp, synthetic construct
  source 1..50: mol_type = other DNA
taactatacctaccccaaactcaaactcaattactcaccrattactcatc

SEQ ID NO: 37679 - DNA, 50 bp, synthetic construct
  source 1..50: mol_type = other DNA
ctacaaaaaatcataattttaacacaatcaataaaaacraccttaaatcc

SEQ ID NO: 37680 - DNA, 50 bp, synthetic construct
  source 1..50: mol_type = other DNA
caaaaaatcataattttaacacaatcaataaaaacraccttaaatccrac

SEQ ID NO: 37681 - DNA, 50 bp, synthetic construct
  source 1..50: mol_type = other DNA
tcataattttaacacaatcaataaaaacraccttaaatccracraaaatc

SEQ ID NO: 37682 - DNA, 50 bp, synthetic construct
  source 1..50: mol_type = other DNA
aactccrcaactcctttctaaaataacttcccrataaaataatacaactc

SEQ ID NO: 37683 - DNA, 50 bp, synthetic construct
  source 1..50: mol_type = other DNA
aatatctacctaccraacractactaaaaaaacaactaacttttatcaac

SEQ ID NO: 37684 - DNA, 50 bp, synthetic construct
  source 1..50: mol_type = other DNA
ttttatcaacrtttcraaataaccraactaaactacaacaaacaaataac

SEQ ID NO: 37685 - DNA, 50 bp, synthetic construct
  source 1..50: mol_type = other DNA
atttaattccractcttaaaataaatcctctacccacctaataactaacc

SEQ ID NO: 37686 - DNA, 50 bp, synthetic construct
  source 1..50: mol_type = other DNA
acccataaccraccaactaccaaataaacaaaaaatctatttcaaaaacc

SEQ ID NO: 37687 - DNA, 50 bp, synthetic construct
  source 1..50: mol_type = other DNA
aaaactaaaaatttctttcttaaccataatataccaaaattttattatac

SEQ ID NO: 37688 - DNA, 50 bp, synthetic construct
  source 1..50: mol_type = other DNA
ctttcttaaccataatataccaaaattttattatacraaaaaatctatcc

SEQ ID NO: 37689 - DNA, 50 bp, synthetic construct
  source 1..50: mol_type = other DNA
ccrtcccratacracaaatcctaaaaatccattttacaataaaacaaatc

SEQ ID NO: 37690 - DNA, 50 bp, synthetic construct
  source 1..50: mol_type = other DNA
caaatacracttacttcactataaaataaattcccaaaacctaccrtatc

SEQ ID NO: 37691 - DNA, 50 bp, synthetic construct
  source 1..50: mol_type = other DNA
tacccaaacraaactcataaaatattaactaaaacraattaaaaaatcrc

SEQ ID NO: 37692 - DNA, 50 bp, synthetic construct
  source 1..50: mol_type = other DNA
tttacccaaacraaactcataaaatattaactaaaacraattaaaaaatc

SEQ ID NO: 37693 - DNA, 50 bp, synthetic construct
  source 1..50: mol_type = other DNA
caccctaaaacaaccctactaaacaaacraaaaaaccttaaaccaaaacc

SEQ ID NO: 37694 - DNA, 50 bp, synthetic construct
  source 1..50: mol_type = other DNA
accctcttcctaaaaataacratacccctctctaaaccaaaaattaaacc

SEQ ID NO: 37695 - DNA, 50 bp, synthetic construct
  source 1..50: mol_type = other DNA
cctcrcttccaaaacataaaactcaataactaaacctaatcactcaaacc

SEQ ID NO: 37696 - DNA, 50 bp, synthetic construct
  source 1..50: mol_type = other DNA
aacaaaacaaacaacrcacacaataactaaaaacaacaaaaactacccac

SEQ ID NO: 37697 - DNA, 50 bp, synthetic construct
  source 1..50: mol_type = other DNA
taactctatttccrcctaccccaaaaaacctatactaaccaaaattaccc

SEQ ID NO: 37698 - DNA, 50 bp, synthetic construct
  source 1..50: mol_type = other DNA
aaataactacaaaaataaacatataacttttccttactaactctatttcc

SEQ ID NO: 37699 - DNA, 50 bp, synthetic construct
  source 1..50: mol_type = other DNA
aaaaaaaaacctacaataccrctaaacactacaaaaaataacccaaaaac

SEQ ID NO: 37700 - DNA, 50 bp, synthetic construct
  source 1..50: mol_type = other DNA
ccrctaaacactacaaaaaataacccaaaaacrctaaactatacaaatcc

SEQ ID NO: 37701 - DNA, 50 bp, synthetic construct
  source 1..50: mol_type = other DNA
aaataactaaattcaccacacaaccacaataaaacttcttcaccttactc

SEQ ID NO: 37702 - DNA, 50 bp, synthetic construct
  source 1..50: mol_type = other DNA
aataaaaaaaccccactataactatataataaactcaatcattcacaacc

SEQ ID NO: 37703 - DNA, 50 bp, synthetic construct
  source 1..50: mol_type = other DNA
aaattttacttctacaaacrtaaaaaatataattcctccctaatacaatc

SEQ ID NO: 37704 - DNA, 50 bp, synthetic construct
  source 1..50: mol_type = other DNA
cttacaaaactaatcaccatacatataaaccrcaaaattccaaaactctc

SEQ ID NO: 37705 - DNA, 50 bp, synthetic construct
  source 1..50: mol_type = other DNA
actaaaatttttaaaaccccttacaaaactaatcaccatacatataaacc

SEQ ID NO: 37706 - DNA, 50 bp, synthetic construct
  source 1..50: mol_type = other DNA
ccacatatataataaccaactctacaaaaaactttaaaaaccccaatatc

SEQ ID NO: 37707 - DNA, 50 bp, synthetic construct
  source 1..50: mol_type = other DNA
tacaaaaaactttaaaaaccccaatatcractaatttattaactaacacc

SEQ ID NO: 37708 - DNA, 50 bp, synthetic construct
  source 1..50: mol_type = other DNA
tatctccatataaaactaaaaacaaaacaaacaaccaacaacccctccac

SEQ ID NO: 37709 - DNA, 50 bp, synthetic construct
  source 1..50: mol_type = other DNA
aaccaattccttttatatttttattcaaatactttcttttctaaaaaccc

SEQ ID NO: 37710 - DNA, 50 bp, synthetic construct
  source 1..50: mol_type = other DNA
tacaaatcaaataacaataaacaaaatatcratattacttaaacaaacac

SEQ ID NO: 37711 - DNA, 50 bp, synthetic construct
  source 1..50: mol_type = other DNA
ccacaccrttctcaaatacttaaaaataacrtatttacttaaataacatc

SEQ ID NO: 37712 - DNA, 50 bp, synthetic construct
  source 1..50: mol_type = other DNA
cccrtaataattcatcaaacctcaaaatcaaaacttacractttttaaac

SEQ ID NO: 37713 - DNA, 50 bp, synthetic construct
  source 1..50: mol_type = other DNA
acaaaaaaaaatcccrtaataattcatcaaacctcaaaatcaaaacttac

SEQ ID NO: 37714 - DNA, 50 bp, synthetic construct
  source 1..50: mol_type = other DNA
aacrtttaaaaaatcrtaaattctaactttaaaacctaataaaccatcac

SEQ ID NO: 37715 - DNA, 50 bp, synthetic construct
  source 1..50: mol_type = other DNA
cctacaacaaaaaccrcccrcaaaaaaacttctacttaatataaaattcc

SEQ ID NO: 37716 - DNA, 50 bp, synthetic construct
  source 1..50: mol_type = other DNA
cttattacaaacratcttaacraaaaacatccccatttctacaactaaac

SEQ ID NO: 37717 - DNA, 50 bp, synthetic construct
  source 1..50: mol_type = other DNA
ratcttaacraaaaacatccccatttctacaactaaacrataaaaaaaac

SEQ ID NO: 37718 - DNA, 50 bp, synthetic construct
  source 1..50: mol_type = other DNA
taaccatttaacaaatattctctaactacctcttctccrctaaacctacc

SEQ ID NO: 37719 - DNA, 50 bp, synthetic construct
  source 1..50: mol_type = other DNA
ctaatatttccacttcaaacctcttccaaccattaaccaaaatactccac

SEQ ID NO: 37720 - DNA, 50 bp, synthetic construct
  source 1..50: mol_type = other DNA
ctcctttctaatttattttaacaaaaataccctacatatactactccctc

SEQ ID NO: 37721 - DNA, 50 bp, synthetic construct
  source 1..50: mol_type = other DNA
ttctaatttattttaacaaaaataccctacatatactactccctcrtccc

SEQ ID NO: 37722 - DNA, 50 bp, synthetic construct
  source 1..50: mol_type = other DNA
taaaaaaacaaccracaccaacccaaaaaaatactcaaaaaaacaatcrc

SEQ ID NO: 37723 - DNA, 50 bp, synthetic construct
  source 1..50: mol_type = other DNA
cctaaaaaaacaaccracaccaacccaaaaaaatactcaaaaaaacaatc

SEQ ID NO: 37724 - DNA, 50 bp, synthetic construct
  source 1..50: mol_type = other DNA
aaaacaaaaaacraaacacaaaacacacaaaacacraccaaataaacaac

SEQ ID NO: 37725 - DNA, 50 bp, synthetic construct
  source 1..50: mol_type = other DNA
ttacttctttcaacatcattaaactcaaaatactctcatatcaccaaccc

SEQ ID NO: 37726 - DNA, 50 bp, synthetic construct
  source 1..50: mol_type = other DNA
taacatccraaaatctcctcccrtcaaaactaaattaatatctctaatac

SEQ ID NO: 37727 - DNA, 50 bp, synthetic construct
  source 1..50: mol_type = other DNA
rtcaaaactaaattaatatctctaatacraaataataaatcatcataatc

SEQ ID NO: 37728 - DNA, 50 bp, synthetic construct
  source 1..50: mol_type = other DNA
aataaatcatcataatcrtcatcacaaatttccaatcactcaactaaaac

SEQ ID NO: 37729 - DNA, 50 bp, synthetic construct
  source 1..50: mol_type = other DNA
tccaatcactcaactaaaacrtaattatatattctttaaaaaatacacac

SEQ ID NO: 37730 - DNA, 50 bp, synthetic construct
  source 1..50: mol_type = other DNA
tatatattctttaaaaaatacacacrtactctatttcaaccttaccccac

SEQ ID NO: 37731 - DNA, 50 bp, synthetic construct
  source 1..50: mol_type = other DNA
cacrtactctatttcaaccttaccccacraaacaataatataaaaaccac

SEQ ID NO: 37732 - DNA, 50 bp, synthetic construct
  source 1..50: mol_type = other DNA
aactataaataaaaaattaaaaattcatatacccttttatctctctcctc

SEQ ID NO: 37733 - DNA, 50 bp, synthetic construct
  source 1..50: mol_type = other DNA
aaatttactaacccccaaatacaaaaaactataccractacctacaaaac

SEQ ID NO: 37734 - DNA, 50 bp, synthetic construct
  source 1..50: mol_type = other DNA
accaaacraaaactaaaatttactaacccccaaatacaaaaaactatacc

SEQ ID NO: 37735 - DNA, 50 bp, synthetic construct
  source 1..50: mol_type = other DNA
ttacrttctcatatcataaaataaaaccatttaaatctataaaaccaaac

SEQ ID NO: 37736 - DNA, 50 bp, synthetic construct
  source 1..50: mol_type = other DNA
actcttatttctccaaacacrataaaaccaaaaacaaaccccctaccaac

SEQ ID NO: 37737 - DNA, 50 bp, synthetic construct
  source 1..50: mol_type = other DNA
aacctcaaaacctacaaaacrctaacaaaaaatctacccctaattccatc

SEQ ID NO: 37738 - DNA, 50 bp, synthetic construct
  source 1..50: mol_type = other DNA
tcctaaaaacaaatcaactttcccaaaaaaaaaacctattaaactaaacc

SEQ ID NO: 37739 - DNA, 50 bp, synthetic construct
  source 1..50: mol_type = other DNA
ctaaaccraacaactcraaatatataataaacractacaaaaacaactac

SEQ ID NO: 37740 - DNA, 50 bp, synthetic construct
  source 1..50: mol_type = other DNA
acaaaaaacaacaaaaatcacaatataaccraaacaccacctccaaaacc

SEQ ID NO: 37741 - DNA, 50 bp, synthetic construct
  source 1..50: mol_type = other DNA
atctaatcctactataaactaacttaaataaaaatattcctcccrccccc

SEQ ID NO: 37742 - DNA, 50 bp, synthetic construct
  source 1..50: mol_type = other DNA
aaaaacctaaaacaaactactcacctcactccaaaaaaatctctactacc

SEQ ID NO: 37743 - DNA, 50 bp, synthetic construct
  source 1..50: mol_type = other DNA
aaaaaaacaaaaaatctaaaaatactcaaaataaaaattccccacaacac

SEQ ID NO: 37744 - DNA, 50 bp, synthetic construct
  source 1..50: mol_type = other DNA
tttctaaaatatttcctcttttctaataataaacataaaaattccacccc

SEQ ID NO: 37745 - DNA, 50 bp, synthetic construct
  source 1..50: mol_type = other DNA
aactacaacaaataaataccrccttacactaacrtaaataaaactctacc

SEQ ID NO: 37746 - DNA, 50 bp, synthetic construct
  source 1..50: mol_type = other DNA
ctctacrtaaacrtctaaactacaacaaataaataccrccttacactaac

SEQ ID NO: 37747 - DNA, 50 bp, synthetic construct
  source 1..50: mol_type = other DNA
ctaacaaataacacctaatttcactaaccactcccaacccacaactctac

SEQ ID NO: 37748 - DNA, 50 bp, synthetic construct
  source 1..50: mol_type = other DNA
aaccaataaaaccaaataccacctaccaaaccaaacacctaccctaaaac

SEQ ID NO: 37749 - DNA, 50 bp, synthetic construct
  source 1..50: mol_type = other DNA
ccaaaacracaacracaaccccaaaaaaaaatcactacttaaaacaaaac

SEQ ID NO: 37750 - DNA, 50 bp, synthetic construct
  source 1..50: mol_type = other DNA
tccttcctcaaacrctttatttcaaacaataattttcctctaaaactatc

SEQ ID NO: 37751 - DNA, 50 bp, synthetic construct
  source 1..50: mol_type = other DNA
ctcaaacrctttatttcaaacaataattttcctctaaaactatcrctatc

SEQ ID NO: 37752 - DNA, 50 bp, synthetic construct
  source 1..50: mol_type = other DNA
aaaatcattttctaaacaactaattttaaatattcaaacttaaattccac

SEQ ID NO: 37753 - DNA, 50 bp, synthetic construct
  source 1..50: mol_type = other DNA
tctaaacaactaattttaaatattcaaacttaaattccacrtatcaatac

SEQ ID NO: 37754 - DNA, 50 bp, synthetic construct
  source 1..50: mol_type = other DNA
aaaacataaacaaaaatcaaacctaaataataaaaccccctcaaaacttc

SEQ ID NO: 37755 - DNA, 50 bp, synthetic construct
  source 1..50: mol_type = other DNA
ctcaacacaacaataacraaaaattttccaaccacaccctaaaacataac

SEQ ID NO: 37756 - DNA, 50 bp, synthetic construct
  source 1..50: mol_type = other DNA
tacaaaaaacaaacaaataaccraaaaataaacacattcccaacctaacc

SEQ ID NO: 37757 - DNA, 50 bp, synthetic construct
  source 1..50: mol_type = other DNA
ctaaaaatatatccatcttccrattacctatttactctctatactcattc

SEQ ID NO: 37758 - DNA, 50 bp, synthetic construct
  source 1..50: mol_type = other DNA
ctacccaccctaaaatataaactaatcaaatataaatccaaatctatatc

SEQ ID NO: 37759 - DNA, 50 bp, synthetic construct
  source 1..50: mol_type = other DNA
tacctaccttcatcaactcaatttaccttctctactataaccctataccc

SEQ ID NO: 37760 - DNA, 50 bp, synthetic construct
  source 1..50: mol_type = other DNA
acaactcrtaactcttccaaaacctaaaactccatcttacaaaacaactc

SEQ ID NO: 37761 - DNA, 50 bp, synthetic construct; identical to SEQ ID NO: 37760
  source 1..50: mol_type = other DNA

SEQ ID NO: 37762 - DNA, 50 bp, synthetic construct
  source 1..50: mol_type = other DNA
tctacaaaataaaaccccaaatcctaaaaaaaccacraactattctaccc

SEQ ID NO: 37763 - DNA, 50 bp, synthetic construct
  source 1..50: mol_type = other DNA
cttctcttctaaaaactataataaaatacttctctcccaaaatatctatc

SEQ ID NO: 37764 - DNA, 50 bp, synthetic construct
  source 1..50: mol_type = other DNA
taccctaaaacacccctataaatcttaacctaacrctatcctaaaaaatc

SEQ ID NO: 37765 - DNA, 50 bp, synthetic construct
  source 1..50: mol_type = other DNA
ctataaacctaaaacttcatcctcaaaaaaccaatacctctcrcrcaaac

SEQ ID NO: 37766 - DNA, 50 bp, synthetic construct
  source 1..50: mol_type = other DNA
aaaaattcccraaaaacaaatacataacatctctatataaacacrcttac

SEQ ID NO: 37767 - DNA, 50 bp, synthetic construct
  source 1..50: mol_type = other DNA
crtttaaactataaacctaaaacttcatcctcaaaaaaccaatacctctc

SEQ ID NO: 37768 - DNA, 50 bp, synthetic construct
  source 1..50: mol_type = other DNA
craaaaatactaacttcctaaaaataaaaccccaaattcacaactcaaac

SEQ ID NO: 37769 - DNA, 50 bp, synthetic construct
  source 1..50: mol_type = other DNA
acttcctaaaaataaaaccccaaattcacaactcaaacraaaattcaaac

SEQ ID NO: 37770 - DNA, 50 bp, synthetic construct
  source 1..50: mol_type = other DNA
aaaaatctctaaaactcaaacctcaacraacrataaacaaaaaaacaaac

SEQ ID NO: 37771 - DNA, 50 bp, synthetic construct
  source 1..50: mol_type = other DNA
aattcctaattcttaataaaataaccccaaaaaacaaatataaaaaaccc

SEQ ID NO: 37772 - DNA, 50 bp, synthetic construct
  source 1..50: mol_type = other DNA
ctaccttaccaaaaaccaaaaacttaaaactccaacaacaaaaatatacc

SEQ ID NO: 37773 - DNA, 50 bp, synthetic construct
  source 1..50: mol_type = other DNA
caacaacaaaaatataccrctcacaaaaaccaaaaatcaaaaacccaaac

SEQ ID NO: 37774 - DNA, 50 bp, synthetic construct
  source 1..50: mol_type = other DNA
atcaaaaacccaaacrcaaacaaactacttccttaaaaaactaaataaac

SEQ ID NO: 37775 - DNA, 50 bp, synthetic construct
  source 1..50: mol_type = other DNA
caaaaacccaaacrcaaacaaactacttccttaaaaaactaaataaacrc

SEQ ID NO: 37776 - DNA, 50 bp, synthetic construct
  source 1..50: mol_type = other DNA
aaaaaatttaaacaaaaacaaacacccrcataaaaaccacrtaaaaacac

SEQ ID NO: 37777 - DNA, 50 bp, synthetic construct
  source 1..50: mol_type = other DNA
ctaaacttctataaaaactatcacraacaaatttatatcccccaaaacac

SEQ ID NO: 37778 - DNA, 50 bp, synthetic construct
  source 1..50: mol_type = other DNA
actacttctttcccactctctatattctaaacttctataaaaactatcac

SEQ ID NO: 37779 - DNA, 50 bp, synthetic construct
  source 1..50: mol_type = other DNA
aaattacttttatttatcctactcaaaaaacaacttctaaaatctaaatc

SEQ ID NO: 37780 - DNA, 50 bp, synthetic construct
  source 1..50: mol_type = other DNA
atcaataaaaactaaaaatataaacracctacataaactcaaacccaacc

SEQ ID NO: 37781 - DNA, 50 bp, synthetic construct
  source 1..50: mol_type = other DNA
aaaaactaaaaaaaacaaccaaaacractaaacctaaattcatacaaatc

SEQ ID NO: 37782 - DNA, 50 bp, synthetic construct
  source 1..50: mol_type = other DNA
ctcacccrctacaaataaaaaccaacaaaactataccaaaattttacaac

SEQ ID NO: 37783 - DNA, 50 bp, synthetic construct
  source 1..50: mol_type = other DNA
aatcctaacacaactctactaactcctatctacaacraataaaaaactac

SEQ ID NO: 37784 - DNA, 50 bp, synthetic construct
  source 1..50: mol_type = other DNA
cctaacacaactctactaactcctatctacaacraataaaaaactacrac

SEQ ID NO: 37785 - DNA, 50 bp, synthetic construct
  source 1..50: mol_type = other DNA
aattaaccactatacatattcatcttctaacaaacraaaccraaacaaac

SEQ ID NO: 37786 - DNA, 50 bp, synthetic construct
  source 1..50: mol_type = other DNA
cacccactccccttaaattaaccactatacatattcatcttctaacaaac

SEQ ID NO: 37787 - DNA, 50 bp, synthetic construct
  source 1..50: mol_type = other DNA
accaaaacctaaacrtttaatttattcaatacctatatttatataaatac

SEQ ID NO: 37788 - DNA, 50 bp, synthetic construct
  source 1..50: mol_type = other DNA
aatataatctccaaacatctcacttttaaactaaaaaaacccccatctac

SEQ ID NO: 37789 - DNA, 50 bp, synthetic construct
  source 1..50: mol_type = other DNA
aaaaactctaaaaaaaaactttaactactaaataacctaacaaatttccc

SEQ ID NO: 37790 - DNA, 50 bp, synthetic construct
  source 1..50: mol_type = other DNA
actactaaataacctaacaaatttcccrtaaaactaataattttacccac

SEQ ID NO: 37791 - DNA, 50 bp, synthetic construct
  source 1..50: mol_type = other DNA
taacctaacaaatttcccrtaaaactaataattttacccacraaaaaaac

SEQ ID NO: 37792 - DNA, 50 bp, synthetic construct
  source 1..50: mol_type = other DNA
acccacttccaacaatttcaataatccacccacractcaataatttcaac

SEQ ID NO: 37793 - DNA, 50 bp, synthetic construct
  source 1..50: mol_type = other DNA
actcraacrtccatcaactaataaataactaaacaaaatataactttacc

SEQ ID NO: 37794 - DNA, 50 bp, synthetic construct
  source 1..50: mol_type = other DNA
aatatacaaccacrtatcaccaattctttatctaaaataaaattatcatc

SEQ ID NO: 37795 - DNA, 50 bp, synthetic construct
  source 1..50: mol_type = other DNA
aaaacatttaaaatataaaatctcaccctaaacccaaactattcaaatcc

SEQ ID NO: 37796 - DNA, 50 bp, synthetic construct
  source 1..50: mol_type = other DNA
aaatactcaaacattaaaccrttaaataaaaacatattttacaatctctc

SEQ ID NO: 37797 - DNA, 50 bp, synthetic construct
  source 1..50: mol_type = other DNA
aaatatatcaccaaacaaaatcattaaaatatcccaaacaaaccaaacrc

SEQ ID NO: 37798 - DNA, 50 bp, synthetic construct
  source 1..50: mol_type = other DNA
ataaatatatcaccaaacaaaatcattaaaatatcccaaacaaaccaaac

SEQ ID NO: 37799 - DNA, 50 bp, synthetic construct
  source 1..50: mol_type = other DNA
ctaacctatttaaaatattttaataattctacctaataacacatccatcc

SEQ ID NO: 37800 - DNA, 50 bp, synthetic construct
  source 1..50: mol_type = other DNA
ccracctaaactcctaatttctaaaaatctataaaaaactataatacctc

SEQ ID NO: 37801 - DNA, 50 bp, synthetic construct
  source 1..50: mol_type = other DNA
taatttctaaaaatctataaaaaactataatacctcraaacaaccccctc

SEQ ID NO: 37802 - DNA, 50 bp, synthetic construct
  source 1..50: mol_type = other DNA
aaaaccttctctcccactttaaaaaacaaacataatataaaaaaaaccac

SEQ ID NO: 37803 - DNA, 50 bp, synthetic construct
  source 1..50: mol_type = other DNA
cracacaaaatcaatacaaacraaaaaatccacaaaacacacaaatcaac

SEQ ID NO: 37804 - DNA, 50 bp, synthetic construct
  source 1..50: mol_type = other DNA
crttaatttatatactttataaattcctccrtctatactaactctatacc

SEQ ID NO: 37805 - DNA, 50 bp, synthetic construct
  source 1..50: mol_type = other DNA
acccaaaataccracacccttaaaaaaaccrataaaatcaaaaaaacatc

SEQ ID NO: 37806 - DNA, 50 bp, synthetic construct
  source 1..50: mol_type = other DNA
aaataccracacccttaaaaaaaccrataaaatcaaaaaaacatcrtacc

SEQ ID NO: 37807 - DNA, 50 bp, synthetic construct
  source 1..50: mol_type = other DNA
aaacaaaaacaacaaaaaacaaataaaacaaaaacaacccaaacacaacc

SEQ ID NO: 37808 - DNA, 50 bp, synthetic construct
  source 1..50: mol_type = other DNA
aaaaaaatcraaaaaatcaaacaaaaactaaaactcctaactctaacccc

SEQ ID NO: 37809 - DNA, 50 bp, synthetic construct
  source 1..50: mol_type = other DNA
aattacccraaacacatcttcaaataaatctatcttcaccctaaaacaac

SEQ ID NO: 37810 - DNA, 50 bp, synthetic construct
  source 1..50: mol_type = other DNA
ccattcccaaaaccaaacccaacacaaataaattatcacaacttaaaatc

SEQ ID NO: 37811 - DNA, 50 bp, synthetic construct
  source 1..50: mol_type = other DNA
acataaattttccctaaaacttcccaaaaaaaaccaacatctaaattttc

SEQ ID NO: 37812 - DNA, 50 bp, synthetic construct
  source 1..50: mol_type = other DNA
taaaactcatctcaaatttataaactccaaaactataaaataataaatac

SEQ ID NO: 37813 - DNA, 50 bp, synthetic construct
  source 1..50: mol_type = other DNA
aacacaaaaaaccaaacaaaataaactaaatcrtccatacaataatttcc

SEQ ID NO: 37814 - DNA, 50 bp, synthetic construct
  source 1..50: mol_type = other DNA
aacrtatataaaaacctatatcaacaacaaccraaaactactacataaac

SEQ ID NO: 37815 - DNA, 50 bp, synthetic construct
  source 1..50: mol_type = other DNA
actactacataaacratctaatttattctacctaatttcttatacctcac

SEQ ID NO: 37816 - DNA, 50 bp, synthetic construct
  source 1..50: mol_type = other DNA
atttttaaaatcatacatattattacatataccaataattcattcctttc

SEQ ID NO: 37817 - DNA, 50 bp, synthetic construct
  source 1..50: mol_type = other DNA
aaacaaacactaaaaataatccaaatatccttcaaataataaataaacac

SEQ ID NO: 37818 - DNA, 50 bp, synthetic construct
  source 1..50: mol_type = other DNA
atatttacttattataactcatactactataacatttatatacaaatctc

SEQ ID NO: 37819 - DNA, 50 bp, synthetic construct
  source 1..50: mol_type = other DNA
ataactcatactactataacatttatatacaaatctcratataaacacac

SEQ ID NO: 37820 - DNA, 50 bp, synthetic construct
  source 1..50: mol_type = other DNA
accctacttaattaaaaccaaaaactactccaaaaaaataaaacccacac

SEQ ID NO: 37821 - DNA, 50 bp, synthetic construct
  source 1..50: mol_type = other DNA
ataaccaaccatcttacaatcacaataacttttcaaccaaaaactactcc

SEQ ID NO: 37822 - DNA, 50 bp, synthetic construct
  source 1..50: mol_type = other DNA
aactctaaaactaaccatataactactactacctccaaccctaaaataac

SEQ ID NO: 37823 - DNA, 50 bp, synthetic construct
  source 1..50: mol_type = other DNA
aacccacaactcaaaattataaataacactactttataaataataaaaac

SEQ ID NO: 37824 - DNA, 50 bp, synthetic construct
  source 1..50: mol_type = other DNA
aaaaacataatataacactaaaaactcraaaactaatttctaacactacc

SEQ ID NO: 37825 - DNA, 50 bp, synthetic construct
  source 1..50: mol_type = other DNA
ataaactcaacrtaaaataatcttctaaacccttctaaaacracataacc

SEQ ID NO: 37826 - DNA, 50 bp, synthetic construct
  source 1..50: mol_type = other DNA
cactaaaaactcraaaactaatttctaacactaccratcacraccatatc

SEQ ID NO: 37827 - DNA, 50 bp, synthetic construct
  source 1..50: mol_type = other DNA
ctaccratcacraccatatcrtcctaaaaaaatccaaaaaattattttac

SEQ ID NO: 37828 - DNA, 50 bp, synthetic construct
  source 1..50: mol_type = other DNA
aaaataaactaatcacaaatcccacttacctaacaaactaacaaataaac

SEQ ID NO: 37829 - DNA, 50 bp, synthetic construct
  source 1..50: mol_type = other DNA
acaaactaacaaataaacracccaaaacaacaaataaataacaaaataac

SEQ ID NO: 37830 - DNA, 50 bp, synthetic construct
  source 1..50: mol_type = other DNA
craaaacatcctacctacaaaaaaaacrctacracctcaaaacaaaaaac

SEQ ID NO: 37831 - DNA, 50 bp, synthetic construct
  source 1..50: mol_type = other DNA
cctcccacaaacctatataaccccraaaacatcctacctacaaaaaaaac

SEQ ID NO: 37832 - DNA, 50 bp, synthetic construct
  source 1..50: mol_type = other DNA
aaaaacccraaacttaaactaaaaaaacctataccaaactataaaactcc

SEQ ID NO: 37833 - DNA, 50 bp, synthetic construct
  source 1..50: mol_type = other DNA
tccraatcaacaacaacataaatctaatactcctaaaaacaaacacaaac

SEQ ID NO: 37834 - DNA, 50 bp, synthetic construct
  source 1..50: mol_type = other DNA
taaacctaaacrtaaactaaatccttcaaataaataactaatctcaaatc

SEQ ID NO: 37835 - DNA, 50 bp, synthetic construct
  source 1..50: mol_type = other DNA
taaaattctaaactcaaataaacaactacaaatacctattaaacctaaac

SEQ ID NO: 37836 - DNA, 50 bp, synthetic construct
  source 1..50: mol_type = other DNA
ccrtcaacaaaaaattcaccttactaaaatacaaatacaaaacaaaatac

SEQ ID NO: 37837 - DNA, 50 bp, synthetic construct
  source 1..50: mol_type = other DNA
ccattctcaataaaaaactcrtaaaaaaactatccrctctaataataaac

SEQ ID NO: 37838 - DNA, 50 bp, synthetic construct
  source 1..50: mol_type = other DNA
cctcccccaaaacctccattctcaataaaaaactcrtaaaaaaactatcc

SEQ ID NO: 37839 - DNA, 50 bp, synthetic construct
  source 1..50: mol_type = other DNA
aactcctaacctccaaactcaaatcaaaaacctctcrttaaaaattaccc

SEQ ID NO: 37840 - DNA, 50 bp, synthetic construct
  source 1..50: mol_type = other DNA
tctacatattcacaaactcctaacctccaaactcaaatcaaaaacctctc

SEQ ID NO: 37841 - DNA, 50 bp, synthetic construct
  source 1..50: mol_type = other DNA
taattcctacraacraaatcctatatacaaccaaaaatataacaaccacc

SEQ ID NO: 37842 - DNA, 50 bp, synthetic construct
  source 1..50: mol_type = other DNA
aaccaaacraactactatatcrtaaatcaaaataaacaactaattcctac

SEQ ID NO: 37843 - DNA, 50 bp, synthetic construct
  source 1..50: mol_type = other DNA
ataaacaattcctatcccttttaaaaactcacaactctaaaaaaatctac

SEQ ID NO: 37844 - DNA, 50 bp, synthetic construct
  source 1..50: mol_type = other DNA
actacttctaaatccctttatatcctcttttcttaacttccrctattaac

SEQ ID NO: 37845 - DNA, 50 bp, synthetic construct
  source 1..50: mol_type = other DNA
tatatcctcttttcttaacttccrctattaacrtcatcttactaaataac

SEQ ID NO: 37846 - DNA, 50 bp, synthetic construct
  source 1..50: mol_type = other DNA
cctcttttcttaacttccrctattaacrtcatcttactaaataacrattc

SEQ ID NO: 37847 - DNA, 50 bp, synthetic construct
  source 1..50: mol_type = other DNA
tcctattcacattcctaatataactattcccttctatttaaaactaaatc

SEQ ID NO: 37848 - DNA, 50 bp, synthetic construct
  source 1..50: mol_type = other DNA
taatattccccataataaatccatttctacccctacctaatacactcacc

SEQ ID NO: 37849 - DNA, 50 bp, synthetic construct
  source 1..50: mol_type = other DNA
atacracaatactatattttacaaatccccttacaaccacaattccraac

SEQ ID NO: 37850 - DNA, 50 bp, synthetic construct
  source 1..50: mol_type = other DNA
acaaatacracaatactatattttacaaatccccttacaaccacaattcc

SEQ ID NO: 37851 - DNA, 50 bp, synthetic construct
  source 1..50: mol_type = other DNA
aactaaaaatatacccraaacctactataaacctaaccaaacctacttac

SEQ ID NO: 37852 - DNA, 50 bp, synthetic construct
  source 1..50: mol_type = other DNA
taaaaaactacactacrtaaacaaacctaactaaacccacaataaacccc

SEQ ID NO: 37853 - DNA, 50 bp, synthetic construct
  source 1..50: mol_type = other DNA
aaacaaacctaactaaacccacaataaaccccraacacattttcaactac

SEQ ID NO: 37854 - DNA, 50 bp, synthetic construct
  source 1..50: mol_type = other DNA
actaaactaaaaaaacttccraaaaattacrataacctaaaacratccac

SEQ ID NO: 37855 - DNA, 50 bp, synthetic construct
  source 1..50: mol_type = other DNA
ttaccttttccaaaaacracaaaaatactacrcrtttaataaaacacaac

SEQ ID NO: 37856 - DNA, 50 bp, synthetic construct
  source 1..50: mol_type = other DNA
ttacataccccrttactaaaaaaacataacatcrattatattctatactc

SEQ ID NO: 37857 - DNA, 50 bp, synthetic construct
  source 1..50: mol_type = other DNA
aatttaattaaaattaatctacatctctaaccaaaatctcatacrcatcc

SEQ ID NO: 37858 - DNA, 50 bp, synthetic construct
  source 1..50: mol_type = other DNA
atccttccctaaaataaccaataccctcttaaaatccctcaatcaacaac

SEQ ID NO: 37859 - DNA, 50 bp, synthetic construct
  source 1..50: mol_type = other DNA
cattaaacttctccacratattaataaacttcaaattcttctccaaaccc

SEQ ID NO: 37860 - DNA, 50 bp, synthetic construct
  source 1..50: mol_type = other DNA
tcccaaactctataaacttaaaccttcatcaaacrctctacaattctttc

SEQ ID NO: 37861 - DNA, 50 bp, synthetic construct
  source 1..50: mol_type = other DNA
actaaacacattataaaatttaaaaataattccccactccacaacctaac

SEQ ID NO: 37862 - DNA, 50 bp, synthetic construct
  source 1..50: mol_type = other DNA
aaaatcattttaaataccatttcctttaacaaacctactacctaaacaac

SEQ ID NO: 37863 - DNA, 50 bp, synthetic construct
  source 1..50: mol_type = other DNA
ttattaacccaaaaaataccctcaaaaatctcataacrcaccacraaatc

SEQ ID NO: 37864 - DNA, 50 bp, synthetic construct
  source 1..50: mol_type = other DNA
aataaaatatatcacccaataacattaaataactttccccttactcattc

SEQ ID NO: 37865 - DNA, 50 bp, synthetic construct
  source 1..50: mol_type = other DNA
actattttaataatacttttaaatattcccatcactaccraaatactacc

SEQ ID NO: 37866 - DNA, 50 bp, synthetic construct
  source 1..50: mol_type = other DNA
taatactaaacrcccctaaaacaaaactaactctaaaccaaaaaaaccac

SEQ ID NO: 37867 - DNA, 50 bp, synthetic construct
  source 1..50: mol_type = other DNA
aactaaaaataaaaactaatctaaaccactccctcaataacaatttaacc

SEQ ID NO: 37868 - DNA, 50 bp, synthetic construct
  source 1..50: mol_type = other DNA
tctcctcrcccaacaaatcaaaaataaccaccaaaacatataacactttc

SEQ ID NO: 37869 - DNA, 50 bp, synthetic construct
  source 1..50: mol_type = other DNA
ttttctataatacaacaaaacaacraaatccttaaaattctaaccatccc

SEQ ID NO: 37870 - DNA, 50 bp, synthetic construct
  source 1..50: mol_type = other DNA
acaaaaactaaaatcaaaacccaattaaaaaaaaccaccattaataactc

SEQ ID NO: 37871 - DNA, 50 bp, synthetic construct
  source 1..50: mol_type = other DNA
aaaattaaaattctacattaaccrtaatcctaactttacacctaccracc

SEQ ID NO: 37872 - DNA, 50 bp, synthetic construct
  source 1..50: mol_type = other DNA
aatttcaccatactaatcaaactaatatcraactcctaacctcrtaatcc

SEQ ID NO: 37873 - DNA, 50 bp, synthetic construct
  source 1..50: mol_type = other DNA
caccraaaaatatatttataaccaaaaccttacaaacaattaactccaac

SEQ ID NO: 37874 - DNA, 50 bp, synthetic construct
  source 1..50: mol_type = other DNA
aaactattttcctcctttaaaatacttcatacaaataaccaaacaatatc

SEQ ID NO: 37875 - DNA, 50 bp, synthetic construct
  source 1..50: mol_type = other DNA
taattaaaacrataaactactaatccattatactctacacrcrtaaattc

SEQ ID NO: 37876 - DNA, 50 bp, synthetic construct
  source 1..50: mol_type = other DNA
ttctcratatccttatttatctccccaactcaataaaaactccctaaacc

SEQ ID NO: 37877 - DNA, 50 bp, synthetic construct
  source 1..50: mol_type = other DNA
aacattttatttaacctcaataaatacaaatacraacraccccacrtaac

SEQ ID NO: 37878 - DNA, 50 bp, synthetic construct
  source 1..50: mol_type = other DNA
aaaacttcctccacaattaataaatccactactactacctctaactaatc

SEQ ID NO: 37879 - DNA, 50 bp, synthetic construct
  source 1..50: mol_type = other DNA
aataaaacracaaaaacttaaaaaacacaatcccttcttccaaacaaaac

SEQ ID NO: 37880 - DNA, 50 bp, synthetic construct
  source 1..50: mol_type = other DNA
ccaataaatctcctcccaaataactatcattcactacccaaaaaaattcc

SEQ ID NO: 37881 - DNA, 50 bp, synthetic construct
  source 1..50: mol_type = other DNA
cctactcacccctaacccttccaaatacaaatcttataatcccaattacc

SEQ ID NO: 37882 - DNA, 50 bp, synthetic construct
  source 1..50: mol_type = other DNA
cttccctcctcatccttcaaatccaaacaaaacrtcaaatttacaacttc

SEQ ID NO: 37883 - DNA, 50 bp, synthetic construct
  source 1..50: mol_type = other DNA
aactaaaacaaacacracttttaaaataaaacaaattcccataaaaaccc

SEQ ID NO: 37884 - DNA, 50 bp, synthetic construct
  source 1..50: mol_type = other DNA
aatccraacaaaactttccttctaactaactcttctctaaccctaaaacc

SEQ ID NO: 37885 - DNA, 50 bp, synthetic construct
  source 1..50: mol_type = other DNA
aaaacaaatcccctaaatcraacaaaactatcrttaaatcccttaataac

SEQ ID NO: 37886 - DNA, 50 bp, synthetic construct
  source 1..50: mol_type = other DNA
aacctaaaaaatacaataaacaaacactaaaaatatctcctaaacaactc

SEQ ID NO: 37887 - DNA, 50 bp, synthetic construct
  source 1..50: mol_type = other DNA
tctatcccttttaaaaactcacaacactaaaaatttcacataaaaaaatc

SEQ ID NO: 37888 - DNA, 50 bp, synthetic construct
  source 1..50: mol_type = other DNA
ctccaacaaacacttttcttattaatcttttctccactaaaaaaactccc

SEQ ID NO: 37889 - DNA, 50 bp, synthetic construct
  source 1..50: mol_type = other DNA
attatataaaacaataacaacaaattatttatacttaccctctccaaaac

SEQ ID NO: 37890 - DNA, 50 bp, synthetic construct
  source 1..50: mol_type = other DNA
ccatcccccttttacactctacatcttaatcaccctatatatatcaatcc

SEQ ID NO: 37891 - DNA, 50 bp, synthetic construct
  source 1..50: mol_type = other DNA
tacatcttaatcaccctatatatatcaatccrctatattccccttatccc

SEQ ID NO: 37892 - DNA, 50 bp, synthetic construct
  source 1..50: mol_type = other DNA
crttattaaccaaactactctcaaaactcctaacctcaaataaaccaccc

SEQ ID NO: 37893 - DNA, 50 bp, synthetic construct
  source 1..50: mol_type = other DNA
tataattaaacaaaaataactcttaaaaataaatcctcctaaccaaacac

SEQ ID NO: 37894 - DNA, 50 bp, synthetic construct
  source 1..50: mol_type = other DNA
acacactcatactcatacacatactcatacacacacaacaaaatttaacc

SEQ ID NO: 37895 - DNA, 50 bp, synthetic construct
  source 1..50: mol_type = other DNA
actaaaactctcaacaacttttttctattttacaactcacacatacaatc

SEQ ID NO: 37896 - DNA, 50 bp, synthetic construct
  source 1..50: mol_type = other DNA
tctaaatcaaactaaatcaacatttctttaacacaaccttatcttaaacc

SEQ ID NO: 37897 - DNA, 50 bp, synthetic construct
  source 1..50: mol_type = other DNA
acaacttttttctattttacaactcacacatacaatcractcaaacaaac

SEQ ID NO: 37898 - DNA, 50 bp, synthetic construct
  source 1..50: mol_type = other DNA
aaaacaatctataataatcaaaaacttaaaaaaaacctactaaaaaaccc

SEQ ID NO: 37899 - DNA, 50 bp, synthetic construct
  source 1..50: mol_type = other DNA
attatacccataacaattttactcctacaattttctaccaaaaaacacac

SEQ ID NO: 37900 - DNA, 50 bp, synthetic construct
  source 1..50: mol_type = other DNA
aaaataaaaattttaaaataaacrataaacactttatccrcataccctac

SEQ ID NO: 37901 - DNA, 50 bp, synthetic construct
  source 1..50: mol_type = other DNA
atcaatctcratcttcccctataaaactatcaacraccatcaaaaaatac

SEQ ID NO: 37902 - DNA, 50 bp, synthetic construct
  source 1..50: mol_type = other DNA
aaaacccccaaaaacaaaatctaaatcctctcttttaaccctccaaacac

SEQ ID NO: 37903 - DNA, 50 bp, synthetic construct
  source 1..50: mol_type = other DNA
caccaatttcataaatttataaaaatactaattacaaaacatatctattc

SEQ ID NO: 37904 - DNA, 50 bp, synthetic construct
  source 1..50: mol_type = other DNA
ctttctctattacaatttccttattttaacaattcaattttatctaaacc

SEQ ID NO: 37905 - DNA, 50 bp, synthetic construct
  source 1..50: mol_type = other DNA
ctattacaatttccttattttaacaattcaattttatctaaaccrtaaac

SEQ ID NO: 37906 - DNA, 50 bp, synthetic construct
  source 1..50: mol_type = other DNA
aatatcraacaaaaactacaccaacrttatctcctaaaaaattctttacc

SEQ ID NO: 37907 - DNA, 50 bp, synthetic construct
  source 1..50: mol_type = other DNA
caataatcactcactctacaaataacctatcaaaatatcrccaaatacac

SEQ ID NO: 37908 - DNA, 50 bp, synthetic construct
  source 1..50: mol_type = other DNA
cttaaaaaacccaataatcactcactctacaaataacctatcaaaatatc

SEQ ID NO: 37909 - DNA, 50 bp, synthetic construct
  source 1..50: mol_type = other DNA
aattaaatcratacrcctaaataattaaataattcctcctcaaccccatc

SEQ ID NO: 37910 - DNA, 50 bp, synthetic construct
  source 1..50: mol_type = other DNA
ataaaacaatcaattcaccaataacrattaaaccaaacataataactcac

SEQ ID NO: 37911 - DNA, 50 bp, synthetic construct
  source 1..50: mol_type = other DNA
aaaaaaactaaacattctctaaaaaaccaacacataacacccaactcacc

SEQ ID NO: 37912 - DNA, 50 bp, synthetic construct
  source 1..50: mol_type = other DNA
tactcaccatttatcaatatttactataaaacaacactatattcaatatc

SEQ ID NO: 37913 - DNA, 50 bp, synthetic construct
  source 1..50: mol_type = other DNA
cctcacaataaacactaacaaataataaacattactaaaaacaaaacctc

SEQ ID NO: 37914 - DNA, 50 bp, synthetic construct
  source 1..50: mol_type = other DNA
aacctaacttaataaaaactcctaccccraaaatacaaccctaaaaaaac

SEQ ID NO: 37915 - DNA, 50 bp, synthetic construct
  source 1..50: mol_type = other DNA
aataacraataaaacatactaaaacctaacttaataaaaactcctacccc

SEQ ID NO: 37916 - DNA, 50 bp, synthetic construct
  source 1..50: mol_type = other DNA
aacactcctctaaattaaaaaactatatactaactctaaataccccaccc

SEQ ID NO: 37917 - DNA, 50 bp, synthetic construct
  source 1..50: mol_type = other DNA
ttttcttaacrccaaaaaataaattaaatatttacccaaacaacaacrtc

SEQ ID NO: 37918 - DNA, 50 bp, synthetic construct
  source 1..50: mol_type = other DNA
taattttcttaacrccaaaaaataaattaaatatttacccaaacaacaac

SEQ ID NO: 37919 - DNA, 50 bp, synthetic construct
  source 1..50: mol_type = other DNA
atataacttaataaaattaaaacccaccaaaataaccttaaatataaaac

SEQ ID NO: 37920 - DNA, 50 bp, synthetic construct
  source 1..50: mol_type = other DNA
taaaacraaacctactaccctacrtacttaaaccaaactataaatataac

SEQ ID NO: 37921 - DNA, 50 bp, synthetic construct
  source 1..50: mol_type = other DNA
aacactataacaataaacrtaacattttataacrataccctacaatcccc

SEQ ID NO: 37922 - DNA, 50 bp, synthetic construct
  source 1..50: mol_type = other DNA
cccttcctaaacatataacaccaaaaaaaacccraaaactacaaaacatc

SEQ ID NO: 37923 - DNA, 50 bp, synthetic construct
  source 1..50: mol_type = other DNA
taacaccaaaaaaaacccraaaactacaaaacatcrttataaaatatcac

SEQ ID NO: 37924 - DNA, 50 bp, synthetic construct
  source 1..50: mol_type = other DNA
ttacttaaacaactaatctctaaatataaaaaataacttaaactattctc

SEQ ID NO: 37925 - DNA, 50 bp, synthetic construct
  source 1..50: mol_type = other DNA
aaaaaactacttccaccctctaccctattttaactaattctcaatctaac

SEQ ID NO: 37926 - DNA, 50 bp, synthetic construct
  source 1..50: mol_type = other DNA
aaaacataacctaaatcttcctcaaaacaaaatcaaccccaaaccacttc

SEQ ID NO: 37927 - DNA, 50 bp, synthetic construct
  source 1..50: mol_type = other DNA
acraaatcacraaatcacaaaacaaaaaccaaataacaaccataactaac

SEQ ID NO: 37928 - DNA, 50 bp, synthetic construct
  source 1..50: mol_type = other DNA
accaccataacccaaataataaccaacatcraaaaaacccctaaatatac

SEQ ID NO: 37929 - DNA, 50 bp, synthetic construct
  source 1..50: mol_type = other DNA
ctatataaccaaccccrtctctcaaactcataaaaaaaatctatctaacc

SEQ ID NO: 37930 - DNA, 50 bp, synthetic construct
  source 1..50: mol_type = other DNA
taactaccraaaacracactatttcccaattcattcatttacttaaaccc

SEQ ID NO: 37931 - DNA, 50 bp, synthetic construct
  source 1..50: mol_type = other DNA
caattaaaatacactttcttcacaacataacraaatttttactaactacc

SEQ ID NO: 37932 - DNA, 50 bp, synthetic construct
  source 1..50: mol_type = other DNA
aacatatatcaacataaatcaattaaaatacactttcttcacaacataac

SEQ ID NO: 37933 - DNA, 50 bp, synthetic construct
  source 1..50: mol_type = other DNA
taaaatatcttccraatctaaacttctctactcccaactcaaaataacac

SEQ ID NO: 37934 - DNA, 50 bp, synthetic construct
  source 1..50: mol_type = other DNA
ttctaactaccaccctttaactatataaccttaaacaaactctcaacctc

SEQ ID NO: 37935 - DNA, 50 bp, synthetic construct
  source 1..50: mol_type = other DNA
ctatactccaatattactcataaaccrattcrcaacattaaaataaaatc

SEQ ID NO: 37936 - DNA, 50 bp, synthetic construct
  source 1..50: mol_type = other DNA
aaacctatttcaaccaatcctatactccaatattactcataaaccrattc

SEQ ID NO: 37937 - DNA, 50 bp, synthetic construct
  source 1..50: mol_type = other DNA
tttaaaaacctatttcaaccaatcctatactccaatattactcataaacc

SEQ ID NO: 37938 - DNA, 50 bp, synthetic construct
  source 1..50: mol_type = other DNA
tatcataaccrttcctaaatcttcctaccttaaaaattaaactattactc

SEQ ID NO: 37939 - DNA, 50 bp, synthetic construct
  source 1..50: mol_type = other DNA
aacataatcrattcaccctcctacccctaactttcccatattattaattc

SEQ ID NO: 37940 - DNA, 50 bp, synthetic construct
  source 1..50: mol_type = other DNA
aaacaatataattaacctcactaaaatcccaaaaccctccaacctcatcc

SEQ ID NO: 37941 - DNA, 50 bp, synthetic construct
  source 1..50: mol_type = other DNA
atcctttcacrtccccaaaacttctataaaaaaccctaaaaatttccrac

SEQ ID NO: 37942 - DNA, 50 bp, synthetic construct
  source 1..50: mol_type = other DNA
rctatcctttcacrtccccaaaacttctataaaaaaccctaaaaatttcc

SEQ ID NO: 37943 - DNA, 50 bp, synthetic construct
  source 1..50: mol_type = other DNA
ctacactaaaaatataacacacactaaaacaaaaataacctaacaaccca

SEQ ID NO: 37944 - DNA, 50 bp, synthetic construct
  source 1..50: mol_type = other DNA
ctacgctaaaaatataacacgcactaaaacgaaaataacctaacaacccg

SEQ ID NO: 37945 - DNA, 50 bp, synthetic construct
  source 1..50: mol_type = other DNA
ctaaacaactacaaacctaaaattaataaactcaataactacaaccaaca

SEQ ID NO: 37946 - DNA, 50 bp, synthetic construct
  source 1..50: mol_type = other DNA
ctaaacaactacaaacctaaaattaataaactcgataactacgaccgacg

SEQ ID NO: 37947 - DNA, 50 bp, synthetic construct
  source 1..50: mol_type = other DNA
catatataaatcacaaataaatatcccatttccatcaacccaaacttcca

SEQ ID NO: 37948 - DNA, 50 bp, synthetic construct
  source 1..50: mol_type = other DNA
catatataaatcgcaaataaatatcccatttccatcgacccgaacttccg

SEQ ID NO: 37949 - DNA, 50 bp, synthetic construct
  source 1..50: mol_type = other DNA
actataaaccctaaccccctaacaacaactaataataacctcaatatcca

SEQ ID NO: 37950 - DNA, 50 bp, synthetic construct
  source 1..50: mol_type = other DNA
actataaaccctaaccccctaacgacaactaataataacctcgatatccg

SEQ ID NO: 37951 - DNA, 50 bp, synthetic construct
  source 1..50: mol_type = other DNA
tttcaacaaaaactactacaaaaacacaaaaaccccaaattataaataca

SEQ ID NO: 37952 - DNA, 50 bp, synthetic construct
  source 1..50: mol_type = other DNA
tttcaacgaaaactactacaaaaacgcgaaaaccccgaattataaatacg

SEQ ID NO: 37953 - DNA, 50 bp, synthetic construct
  source 1..50: mol_type = other DNA
actaaaaactaaccaaacattaaaaacatacccacaacccaaaatcccca

SEQ ID NO: 37954 - DNA, 50 bp, synthetic construct
  source 1..50: mol_type = other DNA
actaaaaactaaccaaacattaaaaacgtacccacaacccgaaatccccg

SEQ ID NO: 37955 - DNA, 50 bp, synthetic construct
  source 1..50: mol_type = other DNA
aacacaaacttatcataacctttaaaatccaacttaataaacttaaatca

SEQ ID NO: 37956 - DNA, 50 bp, synthetic construct
  source 1..50: mol_type = other DNA
aacgcgaacttatcgtaacctttaaaatccgacttaataaacttaaatcg

SEQ ID NO: 37957 - DNA, 50 bp, synthetic construct
  source 1..50: mol_type = other DNA
acctctctataaaattctaacacctactcaacttaaaaacacactcatca

SEQ ID NO: 37958 - DNA, 50 bp, synthetic construct
  source 1..50: mol_type = other DNA
acctctctataaaattctaacgcctactcaacttaaaaacgcgctcatcg

SEQ ID NO: 37959 - DNA, 50 bp, synthetic construct
  source 1..50: mol_type = other DNA
taaaattctaacacctactcaacttaaaaacacactcatcataaaaccca

SEQ ID NO: 37960 - DNA, 50 bp, synthetic construct
  source 1..50: mol_type = other DNA
taaaattctaacgcctactcaacttaaaaacgcgctcatcgtaaaacccg

SEQ ID NO: 37961 - DNA, 50 bp, synthetic construct
  source 1..50: mol_type = other DNA
aaaaaaacaaaacaacaaataacctaccaaaaaaaaccaccacaactaca

SEQ ID NO: 37962 - DNA, 50 bp, synthetic construct
  source 1..50: mol_type = other DNA
aaaaaaacaaaacgacgaataacctaccaaaaaaaaccgccgcgactacg

SEQ ID NO: 37963 - DNA, 50 bp, synthetic construct
  source 1..50: mol_type = other DNA
cacatcaaaaaattaatatttctaacaaaaaaaaaccaaacctcaccaca

SEQ ID NO: 37964 - DNA, 50 bp, synthetic construct
  source 1..50: mol_type = other DNA
cacgtcaaaaaattaatatttctaacgaaaaaaaaccaaacctcaccacg

SEQ ID NO: 37965 - DNA, 50 bp, synthetic construct
  source 1..50: mol_type = other DNA
ataaaacctcccaaaataacaaattaacaacctacacaccaataacaaca

SEQ ID NO: 37966 - DNA, 50 bp, synthetic construct
  source 1..50: mol_type = other DNA
gtaaaacctcccaaaataacaaattaacaacctacacgccgataacgacg

SEQ ID NO: 37967 - DNA, 50 bp, synthetic construct
  source 1..50: mol_type = other DNA
ctaacaaaaacaaaattccaattcccaaaactccacactaccaaacaaca

SEQ ID NO: 37968 - DNA, 50 bp, synthetic construct
  source 1..50: mol_type = other DNA
ctaacgaaaacaaaattccaattcccaaaactccgcgctaccaaacaacg

SEQ ID NO: 37969 - DNA, 50 bp, synthetic construct
  source 1..50: mol_type = other DNA
tcataaaacaaccttaccaaccactaaaacccaaaataaaataaaaacca

SEQ ID NO: 37970 - DNA, 50 bp, synthetic construct
  source 1..50: mol_type = other DNA
tcataaaacaaccttaccgaccgctaaaacccgaaataaaataaaaaccg

SEQ ID NO: 37971 - DNA, 50 bp, synthetic construct
  source 1..50: mol_type = other DNA
caaaacccactaaatactcatcctccttacaaaacaacaaaactaaaaca

SEQ ID NO: 37972 - DNA, 50 bp, synthetic construct
  source 1..50: mol_type = other DNA
cgaaacccactaaatactcgtcctccttacaaaacgacaaaactaaaacg

SEQ ID NO: 37973 - DNA, 50 bp, synthetic construct
  source 1..50: mol_type = other DNA
cttaaaacaacactcaaaacccactaaatactcatcctccttacaaaaca

SEQ ID NO: 37974 - DNA, 50 bp, synthetic construct
  source 1..50: mol_type = other DNA
cttaaaacaacactcgaaacccactaaatactcgtcctccttacaaaacg

SEQ ID NO: 37975 - DNA, 50 bp, synthetic construct
  source 1..50: mol_type = other DNA
aacccaccaaaaaactacacctacctaaactacacttaaaacaacactca

SEQ ID NO: 37976 - DNA, 50 bp, synthetic construct
  source 1..50: mol_type = other DNA
aacccgccaaaaaactacacctacctaaactacacttaaaacaacactcg

SEQ ID NO: 37977 - DNA, 50 bp, synthetic construct
  source 1..50: mol_type = other DNA
aataaaaaaataaatactatacttaaccaaaaacactaaacactacatca

SEQ ID NO: 37978 - DNA, 50 bp, synthetic construct
  source 1..50: mol_type = other DNA
aataaaaaaataaatactatacttaaccgaaaacgctaaacgctacgtcg

SEQ ID NO: 37979 - DNA, 50 bp, synthetic construct
  source 1..50: mol_type = other DNA
acaaataaaatacaacctcctcaaaacctataactatcaaaaaaaaaaca

SEQ ID NO: 37980 - DNA, 50 bp, synthetic construct
  source 1..50: mol_type = other DNA
acaaataaaatacgacctcctcaaaacctataactatcaaaaaaaaaacg

SEQ ID NO: 37981 - DNA, 50 bp, synthetic construct
  source 1..50: mol_type = other DNA
tccaacaaaataaaactaccaccaaaaatcacaacccaacatctcaaaca

SEQ ID NO: 37982 - DNA, 50 bp, synthetic construct
  source 1..50: mol_type = other DNA
tccaacaaaataaaactaccgccaaaaatcacaacccaacgtctcaaacg

SEQ ID NO: 37983 - DNA, 50 bp, synthetic construct
  source 1..50: mol_type = other DNA
aaccccaactccaacaaaataaaactaccaccaaaaatcacaacccaaca

SEQ ID NO: 37984 - DNA, 50 bp, synthetic construct
  source 1..50: mol_type = other DNA
aaccccaactccaacaaaataaaactaccgccaaaaatcacaacccaacg

SEQ ID NO: 37985 - DNA, 50 bp, synthetic construct
  source 1..50: mol_type = other DNA
aaaaaacccctccactatctcaaactatacaaaaaaaaacccctctacca

SEQ ID NO: 37986 - DNA, 50 bp, synthetic construct
  source 1..50: mol_type = other DNA
aaaaaacccctccactatctcaaactatacaaaaaaaaacccctctaccg

SEQ ID NO: 37987 - DNA, 50 bp, synthetic construct
  source 1..50: mol_type = other DNA
aaacccaaaaataatccaaaaaacaacaaaaatctccctacaacctcaca

SEQ ID NO: 37988 - DNA, 50 bp, synthetic construct
  source 1..50: mol_type = other DNA
aaacccaaaaataatccaaaaaacgacgaaaatctccctacgacctcgcg

SEQ ID NO: 37989 - DNA, 50 bp, synthetic construct
  source 1..50: mol_type = other DNA
ataaacccaaaaataatccaaaaaacaacaaaaatctccctacaacctca

SEQ ID NO: 37990 - DNA, 50 bp, synthetic construct
  source 1..50: mol_type = other DNA
ataaacccaaaaataatccaaaaaacgacgaaaatctccctacgacctcg

SEQ ID NO: 37991 - DNA, 50 bp, synthetic construct
  source 1..50: mol_type = other DNA
aatacaataaacccaaaaataatccaaaaaacaacaaaaatctccctaca

SEQ ID NO: 37992 - DNA, 50 bp, synthetic construct
  source 1..50: mol_type = other DNA
aatacgataaacccaaaaataatccaaaaaacgacgaaaatctccctacg

SEQ ID NO: 37993 - DNA, 50 bp, synthetic construct
  source 1..50: mol_type = other DNA
ccaaaaaacaactaaatacaataaacccaaaaataatccaaaaaacaaca

SEQ ID NO: 37994 - DNA, 50 bp, synthetic construct
  source 1..50: mol_type = other DNA
ccgaaaaacgactaaatacgataaacccaaaaataatccaaaaaacgacg

SEQ ID NO: 37995 - DNA, 50 bp, synthetic construct
  source 1..50: mol_type = other DNA
aaatcaacaacccaacaaaaaaacaaaactaaaaacaaaaccaaaacaca

SEQ ID NO: 37996 - DNA, 50 bp, synthetic construct
  source 1..50: mol_type = other DNA
aaatcgacgacccaacgaaaaaacgaaactaaaaacgaaaccaaaacgcg

SEQ ID NO: 37997 - DNA, 50 bp, synthetic construct
  source 1..50: mol_type = other DNA
accaaaacacaaaacaacaactatcccacaaaacccaaattaaaaaaaca

SEQ ID NO: 37998 - DNA, 50 bp, synthetic construct
  source 1..50: mol_type = other DNA
accaaaacgcgaaacaacaactatcccgcaaaacccgaattaaaaaaacg

SEQ ID NO: 37999 - DNA, 50 bp, synthetic construct
  source 1..50: mol_type = other DNA
aacaaaacttaaaactaaatctataaaccaaaaacaaaaatccaaaaaca

SEQ ID NO: 38000 - DNA, 50 bp, synthetic construct
  source 1..50: mol_type = other DNA
aacgaaacttaaaactaaatctataaaccgaaaacgaaaatccaaaaacg

SEQ ID NO: 38001 - DNA, 50 bp, synthetic construct
  source 1..50: mol_type = other DNA
aacaaaaaacaaaaaatcaaaaaaccaaaaaccaaaactaacaacaacca

SEQ ID NO: 38002 - DNA, 50 bp, synthetic construct
  source 1..50: mol_type = other DNA
aacgaaaaacaaaaaatcgaaaaaccgaaaaccaaaactaacaacgaccg

SEQ ID NO: 38003 - DNA, 50 bp, synthetic construct
  source 1..50: mol_type = other DNA
aaaaatcaaaaaaccaaaaaccaaaactaacaacaaccaccataaacaca

SEQ ID NO: 38004 - DNA, 50 bp, synthetic construct
  source 1..50: mol_type = other DNA
aaaaatcgaaaaaccgaaaaccaaaactaacaacgaccgccataaacacg

SEQ ID NO: 38005 - DNA, 50 bp, synthetic construct
  source 1..50: mol_type = other DNA
caaaaaccaaaactaacaacaaccaccataaacacaataaaccttactca

SEQ ID NO: 38006 - DNA, 50 bp, synthetic construct
  source 1..50: mol_type = other DNA
cgaaaaccaaaactaacaacgaccgccataaacacgataaaccttactcg

SEQ ID NO: 38007 - DNA, 50 bp, synthetic construct
  source 1..50: mol_type = other DNA
taaacacaataaaccttactcacataaacacatacatcctaaaacataca

SEQ ID NO: 38008 - DNA, 50 bp, synthetic construct
  source 1..50: mol_type = other DNA
taaacacgataaaccttactcgcgtaaacgcgtacatcctaaaacatacg

SEQ ID NO: 38009 - DNA, 50 bp, synthetic construct
  source 1..50: mol_type = other DNA
acataaacacatacatcctaaaacatacaataaccaaaaaaataaaacca

SEQ ID NO: 38010 - DNA, 50 bp, synthetic construct
  source 1..50: mol_type = other DNA
gcgtaaacgcgtacatcctaaaacatacgataaccgaaaaaataaaaccg

SEQ ID NO: 38011 - DNA, 50 bp, synthetic construct
  source 1..50: mol_type = other DNA
acatacatcctaaaacatacaataaccaaaaaaataaaaccaaataaaca

SEQ ID NO: 38012 - DNA, 50 bp, synthetic construct
  source 1..50: mol_type = other DNA
gcgtacatcctaaaacatacgataaccgaaaaaataaaaccgaataaacg

SEQ ID NO: 38013 - DNA, 50 bp, synthetic construct
  source 1..50: mol_type = other DNA
tcctaaaacatacaataaccaaaaaaataaaaccaaataaacacaaaaca

SEQ ID NO: 38014 - DNA, 50 bp, synthetic construct
  source 1..50: mol_type = other DNA
tcctaaaacatacgataaccgaaaaaataaaaccgaataaacgcaaaacg

SEQ ID NO: 38015 - DNA, 50 bp, synthetic construct
  source 1..50: mol_type = other DNA
acatacaataaccaaaaaaataaaaccaaataaacacaaaacaataaaca

SEQ ID NO: 38016 - DNA, 50 bp, synthetic construct
  source 1..50: mol_type = other DNA
acatacgataaccgaaaaaataaaaccgaataaacgcaaaacgataaacg

SEQ ID NO: 38017 - DNA, 50 bp, synthetic construct
  source 1..50: mol_type = other DNA
atacaataaccaaaaaaataaaaccaaataaacacaaaacaataaacaca

SEQ ID NO: 38018 - DNA, 50 bp, synthetic construct
  source 1..50: mol_type = other DNA
atacgataaccgaaaaaataaaaccgaataaacgcaaaacgataaacgcg

SEQ ID NO: 38019 - DNA, 50 bp, synthetic construct
  source 1..50: mol_type = other DNA
ctaactccttacccaaacatcctaacaacaataaaataataaaaaccaca

SEQ ID NO: 38020 - DNA, 50 bp, synthetic construct
  source 1..50: mol_type = other DNA
ctaactccttacccgaacgtcctaacaacgataaaataataaaaaccgcg

SEQ ID NO: 38021 - DNA, 50 bp, synthetic construct
  source 1..50: mol_type = other DNA
cccaaacatcctaacaacaataaaataataaaaaccacaaaacctaaaca

SEQ ID NO: 38022 - DNA, 50 bp, synthetic construct
  source 1..50: mol_type = other DNA
cccgaacgtcctaacaacgataaaataataaaaaccgcgaaacctaaacg

SEQ ID NO: 38023 - DNA, 50 bp, synthetic construct
  source 1..50: mol_type = other DNA
aacaataaaataataaaaaccacaaaacctaaacaaaactaaaaacaaca

SEQ ID NO: 38024 - DNA, 50 bp, synthetic construct
  source 1..50: mol_type = other DNA
aacgataaaataataaaaaccgcgaaacctaaacgaaactaaaaacaacg

SEQ ID NO: 38025 - DNA, 50 bp, synthetic construct
  source 1..50: mol_type = other DNA
aaccataaaactacaaaacctataacaaaaacacacatacataataacca

SEQ ID NO: 38026 - DNA, 50 bp, synthetic construct
  source 1..50: mol_type = other DNA
aaccgtaaaactacgaaacctataacgaaaacacgcgtacgtaataaccg

SEQ ID NO: 38027 - DNA, 50 bp, synthetic construct
  source 1..50: mol_type = other DNA
aaactacaaaacctataacaaaaacacacatacataataaccaaactaca

SEQ ID NO: 38028 - DNA, 50 bp, synthetic construct
  source 1..50: mol_type = other DNA
aaactacgaaacctataacgaaaacacgcgtacgtaataaccgaactacg

SEQ ID NO: 38029 - DNA, 50 bp, synthetic construct
  source 1..50: mol_type = other DNA
aaaacccaacaaaactactaaaatcctaaacaatccaacaacacaccaca

SEQ ID NO: 38030 - DNA, 50 bp, synthetic construct
  source 1..50: mol_type = other DNA
aaaacccaacaaaactactaaaatcctaaacgatccaacgacacaccacg

SEQ ID NO: 38031 - DNA, 50 bp, synthetic construct
  source 1..50: mol_type = other DNA
taaatcaaaaataaaacaattaaacctaaataaactcaaaaaaataccca

SEQ ID NO: 38032 - DNA, 50 bp, synthetic construct
  source 1..50: mol_type = other DNA
taaatcaaaaataaaacgattaaacctaaataaactcaaaaaaatacccg

SEQ ID NO: 38033 - DNA, 50 bp, synthetic construct
  source 1..50: mol_type = other DNA
tctacaaaaattccccactacctaaaaaacacaccaaaatacaaacccca

SEQ ID NO: 38034 - DNA, 50 bp, synthetic construct
  source 1..50: mol_type = other DNA
tctacaaaaattccccgctacctaaaaaacacgccaaaatacaaaccccg

SEQ ID NO: 38035 - DNA, 50 bp, synthetic construct
  source 1..50: mol_type = other DNA
cttctaccaactataaacaacactaaacaaaacaaaaactcaaaacccca

SEQ ID NO: 38036 - DNA, 50 bp, synthetic construct
  source 1..50: mol_type = other DNA
cttctaccaactataaacgacgctaaacaaaacaaaaactcgaaaccccg

SEQ ID NO: 38037 - DNA, 50 bp, synthetic construct
  source 1..50: mol_type = other DNA
taaactacaaatcaaaatcaaatacctccacccaaaaaaaaacaatccca

SEQ ID NO: 38038 - DNA, 50 bp, synthetic construct
  source 1..50: mol_type = other DNA
taaactacgaatcgaaatcaaatacctccgcccgaaaaaaaacgatcccg

SEQ ID NO: 38039 - DNA, 50 bp, synthetic construct
  source 1..50: mol_type = other DNA
aaacccacacatttaaaccaaatccataacaacaaaaaaacaaaacccca

SEQ ID NO: 38040 - DNA, 50 bp, synthetic construct
  source 1..50: mol_type = other DNA
aaacccgcacatttaaaccgaatccataacaacaaaaaaacgaaaccccg

SEQ ID NO: 38041 - DNA, 50 bp, synthetic construct
  source 1..50: mol_type = other DNA
aaactcaaaaaaatctaaaatcaaattaaacacccttccccactaaaaca

SEQ ID NO: 38042 - DNA, 50 bp, synthetic construct
  source 1..50: mol_type = other DNA
gaactcaaaaaaatctaaaatcgaattaaacgcccttccccactaaaacg

SEQ ID NO: 38043 - DNA, 50 bp, synthetic construct
  source 1..50: mol_type = other DNA
ctacacaacccaaaccacaaactcaaaaaaatctaaaatcaaattaaaca

SEQ ID NO: 38044 - DNA, 50 bp, synthetic construct
  source 1..50: mol_type = other DNA
ctacgcgacccgaaccgcgaactcaaaaaaatctaaaatcgaattaaacg

SEQ ID NO: 38045 - DNA, 50 bp, synthetic construct
  source 1..50: mol_type = other DNA
cctaaaaacaaaaacccacccaaaaataaaccaacaataatttcacccca

SEQ ID NO: 38046 - DNA, 50 bp, synthetic construct
  source 1..50: mol_type = other DNA
cctaaaaacgaaaacccacccgaaaataaaccaacaataatttcgccccg

SEQ ID NO: 38047 - DNA, 50 bp, synthetic construct
  source 1..50: mol_type = other DNA
caaaaatctacaaaacacaaaataattacctaaaaacaaaaacccaccca

SEQ ID NO: 38048 - DNA, 50 bp, synthetic construct
  source 1..50: mol_type = other DNA
caaaaatctacaaaacgcgaaataattacctaaaaacgaaaacccacccg

SEQ ID NO: 38049 - DNA, 50 bp, synthetic construct
  source 1..50: mol_type = other DNA
cactattaactcatttccaaataaatccccatctccaaacaaccatttca

SEQ ID NO: 38050 - DNA, 50 bp, synthetic construct
  source 1..50: mol_type = other DNA
cactattaactcatttccgaataaatccccgtctccaaacaaccatttcg

SEQ ID NO: 38051 - DNA, 50 bp, synthetic construct
  source 1..50: mol_type = other DNA
tccaaacaaccatttcacatcctacaaattcttacctataccaaaaacca

SEQ ID NO: 38052 - DNA, 50 bp, synthetic construct
  source 1..50: mol_type = other DNA
tccaaacaaccatttcgcgtcctacaaattcttacctataccgaaaaccg

SEQ ID NO: 38053 - DNA, 50 bp, synthetic construct
  source 1..50: mol_type = other DNA
aaaactaaacacaaatctccaaaactacaaaatacaactaaactacaaca

SEQ ID NO: 38054 - DNA, 50 bp, synthetic construct
  source 1..50: mol_type = other DNA
gaaactaaacgcgaatctccgaaactacaaaatacgactaaactacgacg

SEQ ID NO: 38055 - DNA, 50 bp, synthetic construct
  source 1..50: mol_type = other DNA
aacaaaactaaacacaaatctccaaaactacaaaatacaactaaactaca

SEQ ID NO: 38056 - DNA, 50 bp, synthetic construct
  source 1..50: mol_type = other DNA
aacgaaactaaacgcgaatctccgaaactacaaaatacgactaaactacg

SEQ ID NO: 38057 - DNA, 50 bp, synthetic construct
  source 1..50: mol_type = other DNA
taaaatctcctaaacaaaaatcaccaaacccaaaaacaaaactaaacaca

SEQ ID NO: 38058 - DNA, 50 bp, synthetic construct
  source 1..50: mol_type = other DNA
taaaatctcctaaacgaaaatcaccgaacccgaaaacgaaactaaacgcg

SEQ ID NO: 38059 - DNA, 50 bp, synthetic construct
  source 1..50: mol_type = other DNA
aataaaatctcctaaacaaaaatcaccaaacccaaaaacaaaactaaaca

SEQ ID NO: 38060 - DNA, 50 bp, synthetic construct
  source 1..50: mol_type = other DNA
aataaaatctcctaaacgaaaatcaccgaacccgaaaacgaaactaaacg

SEQ ID NO: 38061 - DNA, 50 bp, synthetic construct
  source 1..50: mol_type = other DNA
aaaacaactaaataaaatctcctaaacaaaaatcaccaaacccaaaaaca

SEQ ID NO: 38062 - DNA, 50 bp, synthetic construct
  source 1..50: mol_type = other DNA
aaaacgactaaataaaatctcctaaacgaaaatcaccgaacccgaaaacg

SEQ ID NO: 38063 - DNA, 50 bp, synthetic construct
  source 1..50: mol_type = other DNA
ccaaaaaaaacaactaaataaaatctcctaaacaaaaatcaccaaaccca

SEQ ID NO: 38064 - DNA, 50 bp, synthetic construct
  source 1..50: mol_type = other DNA
ccaaaaaaaacgactaaataaaatctcctaaacgaaaatcaccgaacccg

SEQ ID NO: 38065 - DNA, 50 bp, synthetic construct
  source 1..50: mol_type = other DNA
caaaacccaaaaaaaacaactaaataaaatctcctaaacaaaaatcacca

SEQ ID NO: 38066 - DNA, 50 bp, synthetic construct
  source 1..50: mol_type = other DNA
cgaaacccaaaaaaaacgactaaataaaatctcctaaacgaaaatcaccg

SEQ ID NO: 38067 - DNA, 50 bp, synthetic construct
  source 1..50: mol_type = other DNA
aaaacaaaacctaacaaaaaacaaaaaacctaactaaaaccataatccca

SEQ ID NO: 38068 - DNA, 50 bp, synthetic construct
  source 1..50: mol_type = other DNA
aaaacaaaacctaacaaaaaacgaaaaacctaactaaaaccataatcccg

SEQ ID NO: 38069 - DNA, 50 bp, synthetic construct
  source 1..50: mol_type = other DNA
aaaatctatactaaaatcttcaaaataaaaacaaaacctaacaaaaaaca

SEQ ID NO: 38070 - DNA, 50 bp, synthetic construct
  source 1..50: mol_type = other DNA
aaaatctatactaaaatcttcgaaataaaaacaaaacctaacaaaaaacg

SEQ ID NO: 38071 - DNA, 50 bp, synthetic construct
  source 1..50: mol_type = other DNA
aaatatattaaattatttcccaactctcaaaacaaaactacatcatatca

SEQ ID NO: 38072 - DNA, 50 bp, synthetic construct
  source 1..50: mol_type = other DNA
aaatatattaaattatttcccgactctcgaaacaaaactacgtcgtatcg

SEQ ID NO: 38073 - DNA, 50 bp, synthetic construct
  source 1..50: mol_type = other DNA
ttaaattatttcccaactctcaaaacaaaactacatcatatcatatatca

SEQ ID NO: 38074 - DNA, 50 bp, synthetic construct
  source 1..50: mol_type = other DNA
ttaaattatttcccgactctcgaaacaaaactacgtcgtatcgtatatcg

SEQ ID NO: 38075 - DNA, 50 bp, synthetic construct
  source 1..50: mol_type = other DNA
taaaaacaactacacaaataaaaacaactacataaataaaaattattaca

SEQ ID NO: 38076 - DNA, 50 bp, synthetic construct
  source 1..50: mol_type = other DNA
taaaaacgactacgcgaataaaaacgactacgtaaataaaaattattacg

SEQ ID NO: 38077 - DNA, 50 bp, synthetic construct
  source 1..50: mol_type = other DNA
tcctacctaaataacccaaccaaaaacaatctaacaaaaccaaccaaaca

SEQ ID NO: 38078 - DNA, 50 bp, synthetic construct
  source 1..50: mol_type = other DNA
tcctacctaaataacccaaccaaaaacgatctaacaaaaccaaccgaacg

SEQ ID NO: 38079 - DNA, 50 bp, synthetic construct
  source 1..50: mol_type = other DNA
ccttacaaaaaacctaaaaaaaaatacatccaactaactctaccaaatca

SEQ ID NO: 38080 - DNA, 50 bp, synthetic construct
  source 1..50: mol_type = other DNA
ccttacaaaaaacctaaaaaaaaatacgtccgactaactctaccaaatcg

SEQ ID NO: 38081 - DNA, 50 bp, synthetic construct
  source 1..50: mol_type = other DNA
aaaccatctctaaaaataaaaaaccctaaaaacacattcactaacaatca

SEQ ID NO: 38082 - DNA, 50 bp, synthetic construct
  source 1..50: mol_type = other DNA
aaaccgtctctaaaaataaaaaaccctaaaaacacattcgctaacaatcg

SEQ ID NO: 38083 - DNA, 50 bp, synthetic construct
  source 1..50: mol_type = other DNA
acatactataaaaaaaatcccaaaaatacattttaaaacaattaccaaca

SEQ ID NO: 38084 - DNA, 50 bp, synthetic construct
  source 1..50: mol_type = other DNA
acatactataaaaaaaatcccgaaaatacgttttaaaacgattaccaacg

SEQ ID NO: 38085 - DNA, 50 bp, synthetic construct
  source 1..50: mol_type = other DNA
attcctacaaaatacaaaaatctaaaaacccttcccataaacaaaaccca

SEQ ID NO: 38086 - DNA, 50 bp, synthetic construct
  source 1..50: mol_type = other DNA
attcctacgaaatacgaaaatctaaaaacccttcccataaacgaaacccg

SEQ ID NO: 38087 - DNA, 50 bp, synthetic construct
  source 1..50: mol_type = other DNA
aatcaaacatttccaaatataaccaacttacacaaaaatacaaacaacca

SEQ ID NO: 38088 - DNA, 50 bp, synthetic construct
  source 1..50: mol_type = other DNA
aatcaaacatttccaaatataaccaacttacgcgaaaatacgaacgaccg

SEQ ID NO: 38089 - DNA, 50 bp, synthetic construct
  source 1..50: mol_type = other DNA
ttacaaaaataaacataaacaattttttaacccaccaaataaaaaataca

SEQ ID NO: 38090 - DNA, 50 bp, synthetic construct
  source 1..50: mol_type = other DNA
ttacaaaaataaacgtaaacgattttttaacccaccgaataaaaaatacg

SEQ ID NO: 38091 - DNA, 50 bp, synthetic construct
  source 1..50: mol_type = other DNA
actaaactaacaccacttaaaacaaatacaaccaacataaaaaaaaacca

SEQ ID NO: 38092 - DNA, 50 bp, synthetic construct
  source 1..50: mol_type = other DNA
actaaactaacgccacttaaaacgaatacgaccgacataaaaaaaaaccg

SEQ ID NO: 38093 - DNA, 50 bp, synthetic construct
  source 1..50: mol_type = other DNA
aaccttaaaaatactatcaaaaaatacctaacaaaaacaaaaactacaca

SEQ ID NO: 38094 - DNA, 50 bp, synthetic construct
  source 1..50: mol_type = other DNA
aaccttaaaaatactatcgaaaaatacctaacaaaaacgaaaactacgcg

SEQ ID NO: 38095 - DNA, 50 bp, synthetic construct
  source 1..50: mol_type = other DNA
aataaaataaaacacaaaataaccatttcacaccaacaaaatcaacttca

SEQ ID NO: 38096 - DNA, 50 bp, synthetic construct
  source 1..50: mol_type = other DNA
aataaaataaaacacgaaataaccgtttcgcgccaacaaaatcaacttcg

SEQ ID NO: 38097 - DNA, 50 bp, synthetic construct
  source 1..50: mol_type = other DNA
acaccaaacactaaaaatcaaaacacctattcacaccactataacaacca

SEQ ID NO: 38098 - DNA, 50 bp, synthetic construct
  source 1..50: mol_type = other DNA
acaccaaacactaaaaatcaaaacacctattcacaccgctataacgaccg

SEQ ID NO: 38099 - DNA, 50 bp, synthetic construct
  source 1..50: mol_type = other DNA
catcccaatacacaaaaaaacatctattataacaactatctctacaacca

SEQ ID NO: 38100 - DNA, 50 bp, synthetic construct
  source 1..50: mol_type = other DNA
catcccaatacacaaaaaaacgtctattataacgactatctctacaaccg

SEQ ID NO: 38101 - DNA, 50 bp, synthetic construct
  source 1..50: mol_type = other DNA
aaaatatcaaaaaaaaactccaactacaaaaacaaccattataataaaca

SEQ ID NO: 38102 - DNA, 50 bp, synthetic construct
  source 1..50: mol_type = other DNA
aaaatatcaaaaaaaaactccgactacaaaaacaaccgttataataaacg

SEQ ID NO: 38103 - DNA, 50 bp, synthetic construct
  source 1..50: mol_type = other DNA
acttttaaaataataaacactaaaacaccacctttaacatccaccaacca

SEQ ID NO: 38104 - DNA, 50 bp, synthetic construct
  source 1..50: mol_type = other DNA
acttttaaaataataaacgctaaaacaccgcctttaacgtccgccaaccg

SEQ ID NO: 38105 - DNA, 50 bp, synthetic construct
  source 1..50: mol_type = other DNA
ttaaaataataaacactaaaacaccacctttaacatccaccaaccaaaca

SEQ ID NO: 38106 - DNA, 50 bp, synthetic construct
  source 1..50: mol_type = other DNA
ttaaaataataaacgctaaaacaccgcctttaacgtccgccaaccgaacg

SEQ ID NO: 38107 - DNA, 50 bp, synthetic construct
  source 1..50: mol_type = other DNA
acccaaacaaaaatctccattttactccccaaataactacaactatccca

SEQ ID NO: 38108 - DNA, 50 bp, synthetic construct
  source 1..50: mol_type = other DNA
acccgaacaaaaatctccattttactccccaaataactacgactatcccg

SEQ ID NO: 38109 - DNA, 50 bp, synthetic construct
  source 1..50: mol_type = other DNA
tacccaaactaaaaactataatcataaaatttatccccaactatacccca

SEQ ID NO: 38110 - DNA, 50 bp, synthetic construct
  source 1..50: mol_type = other DNA
tacccgaactaaaaactataatcgtaaaatttatccccgactataccccg

SEQ ID NO: 38111 - DNA, 50 bp, synthetic construct
  source 1..50: mol_type = other DNA
actataatcataaaatttatccccaactataccccacataataaaaaaca

SEQ ID NO: 38112 - DNA, 50 bp, synthetic construct
  source 1..50: mol_type = other DNA
actataatcgtaaaatttatccccgactataccccgcgtaataaaaaacg

SEQ ID NO: 38113 - DNA, 50 bp, synthetic construct
  source 1..50: mol_type = other DNA
aatttatccccaactataccccacataataaaaaacactcctctaaaaca

SEQ ID NO: 38114 - DNA, 50 bp, synthetic construct
  source 1..50: mol_type = other DNA
aatttatccccgactataccccgcgtaataaaaaacgctcctctaaaacg

SEQ ID NO: 38115 - DNA, 50 bp, synthetic construct
  source 1..50: mol_type = other DNA
aacaaatcaaaaaataaccaaataaatccctcctatcaaaaacactatca

SEQ ID NO: 38116 - DNA, 50 bp, synthetic construct
  source 1..50: mol_type = other DNA
gacgaatcgaaaaataaccgaataaatccctcctatcgaaaacactatcg

SEQ ID NO: 38117 - DNA, 50 bp, synthetic construct
  source 1..50: mol_type = other DNA
aaaaacaacaacaacaaatcaaaaaataaccaaataaatccctcctatca

SEQ ID NO: 38118 - DNA, 50 bp, synthetic construct
  source 1..50: mol_type = other DNA
gaaaacgacaacgacgaatcgaaaaataaccgaataaatccctcctatcg

SEQ ID NO: 38119 - DNA, 50 bp, synthetic construct
  source 1..50: mol_type = other DNA
ctacaaacctctccaaaaaaaaccccaaaaaaaacatctctccaaaaaca

SEQ ID NO: 38120 - DNA, 50 bp, synthetic construct
  source 1..50: mol_type = other DNA
ctacgaacctctccaaaaaaaaccccgaaaaaaacatctctccgaaaacg

SEQ ID NO: 38121 - DNA, 50 bp, synthetic construct
  source 1..50: mol_type = other DNA
aaacatccaaaactaactcaaacaccaaccaaaacaaacaataaaaccca

SEQ ID NO: 38122 - DNA, 50 bp, synthetic construct
  source 1..50: mol_type = other DNA
aaacgtccaaaactaactcaaacaccgaccaaaacaaacgataaaacccg

SEQ ID NO: 38123 - DNA, 50 bp, synthetic construct
  source 1..50: mol_type = other DNA
accatataacttcacccaattaacataatctccacaaaaacttaaattca

SEQ ID NO: 38124 - DNA, 50 bp, synthetic construct
  source 1..50: mol_type = other DNA
accgtataacttcgcccgattaacataatctccgcgaaaacttaaattcg

SEQ ID NO: 38125 - DNA, 50 bp, synthetic construct
  source 1..50: mol_type = other DNA
ccacaaaaacttaaattcaaatttacaatattattaccctattatctaca

SEQ ID NO: 38126 - DNA, 50 bp, synthetic construct
  source 1..50: mol_type = other DNA
ccgcgaaaacttaaattcgaatttacgatattattaccctattatctacg

SEQ ID NO: 38127 - DNA, 50 bp, synthetic construct
  source 1..50: mol_type = other DNA
acaaaaacaacaaaataaaacaaatttttcctaaaaactataaacaatca

SEQ ID NO: 38128 - DNA, 50 bp, synthetic construct
  source 1..50: mol_type = other DNA
acaaaaacaacaaaataaaacgaatttttcctaaaaactataaacaatcg

SEQ ID NO: 38129 - DNA, 50 bp, synthetic construct
  source 1..50: mol_type = other DNA
acaaatttttcctaaaaactataaacaatcacttaaccccataaccacca

SEQ ID NO: 38130 - DNA, 50 bp, synthetic construct
  source 1..50: mol_type = other DNA
acgaatttttcctaaaaactataaacaatcgcttaaccccgtaaccgccg

SEQ ID NO: 38131 - DNA, 50 bp, synthetic construct
  source 1..50: mol_type = other DNA
ccaaaataaaacaacatccacatcaaatacatatccattacaaaactcca

SEQ ID NO: 38132 - DNA, 50 bp, synthetic construct
  source 1..50: mol_type = other DNA
ccgaaataaaacaacgtccgcatcaaatacatatccgttacaaaactccg

SEQ ID NO: 38133 - DNA, 50 bp, synthetic construct
  source 1..50: mol_type = other DNA
tacttatccttcaaacaaaaacacccacacccaaaaaaaattaaaaaaca

SEQ ID NO: 38134 - DNA, 50 bp, synthetic construct
  source 1..50: mol_type = other DNA
tacttatccttcgaacaaaaacgcccacgcccgaaaaaaattaaaaaacg

SEQ ID NO: 38135 - DNA, 50 bp, synthetic construct
  source 1..50: mol_type = other DNA
cccaaccctttacaaaactataaaaatcccaatacctaaaaaaacataca

SEQ ID NO: 38136 - DNA, 50 bp, synthetic construct
  source 1..50: mol_type = other DNA
cccaaccctttacaaaactataaaaatcccgatacctaaaaaaacgtacg

SEQ ID NO: 38137 - DNA, 50 bp, synthetic construct
  source 1..50: mol_type = other DNA
accaatacctattaactttataatatatttatcccaaatatatatataca

SEQ ID NO: 38138 - DNA, 50 bp, synthetic construct
  source 1..50: mol_type = other DNA
accgatacctattaactttataatatatttatcccgaatatatatatacg

SEQ ID NO: 38139 - DNA, 50 bp, synthetic construct
  source 1..50: mol_type = other DNA
taaaacaaaaccctccacaaaaacaaaaaatacaccataaaaaaaacaca

SEQ ID NO: 38140 - DNA, 50 bp, synthetic construct
  source 1..50: mol_type = other DNA
taaaacaaaaccctccgcaaaaacgaaaaatacgccgtaaaaaaaacgcg

SEQ ID NO: 38141 - DNA, 50 bp, synthetic construct
  source 1..50: mol_type = other DNA
cataaaacaaaaccctccacaaaaacaaaaaatacaccataaaaaaaaca

SEQ ID NO: 38142 - DNA, 50 bp, synthetic construct
  source 1..50: mol_type = other DNA
cgtaaaacaaaaccctccgcaaaaacgaaaaatacgccgtaaaaaaaacg

SEQ ID NO: 38143 - DNA, 50 bp, synthetic construct
  source 1..50: mol_type = other DNA
atcaaacaaaatcctaccaaatacacaaaaaacaccatttaaaaacatca

SEQ ID NO: 38144 - DNA, 50 bp, synthetic construct
  source 1..50: mol_type = other DNA
atcaaacgaaatcctaccgaatacgcgaaaaacaccgtttaaaaacgtcg

SEQ ID NO: 38145 - DNA, 50 bp, synthetic construct
  source 1..50: mol_type = other DNA
aaaatcaaacaaaatcctaccaaatacacaaaaaacaccatttaaaaaca

SEQ ID NO: 38146 - DNA, 50 bp, synthetic construct
  source 1..50: mol_type = other DNA
aaaatcaaacgaaatcctaccgaatacgcgaaaaacaccgtttaaaaacg

SEQ ID NO: 38147 - DNA, 50 bp, synthetic construct
  source 1..50: mol_type = other DNA
tacccaaactcacaaaaaaaacaaaatcaaacaaaatcctaccaaataca

SEQ ID NO: 38148 - DNA, 50 bp, synthetic construct
  source 1..50: mol_type = other DNA
tacccgaactcgcaaaaaaaacaaaatcaaacgaaatcctaccgaatacg

SEQ ID NO: 38149 - DNA, 50 bp, synthetic construct
  source 1..50: mol_type = other DNA
caaaaccaaaaaatcaatacccaaactcacaaaaaaaacaaaatcaaaca

SEQ ID NO: 38150 - DNA, 50 bp, synthetic construct
  source 1..50: mol_type = other DNA
caaaaccaaaaaatcgatacccgaactcgcaaaaaaaacaaaatcaaacg

SEQ ID NO: 38151 - DNA, 50 bp, synthetic construct
  source 1..50: mol_type = other DNA
ctttaaattttattacttctatcaaataaaacaaaaaacaaccatataca

SEQ ID NO: 38152 - DNA, 50 bp, synthetic construct
  source 1..50: mol_type = other DNA
ctttaaattttattacttctatcaaataaaacgaaaaacaaccatatacg

SEQ ID NO: 38153 - DNA, 50 bp, synthetic construct
  source 1..50: mol_type = other DNA
ttacttctatcaaataaaacaaaaaacaaccatatacatcaataccttca

SEQ ID NO: 38154 - DNA, 50 bp, synthetic construct
  source 1..50: mol_type = other DNA
ttacttctatcaaataaaacgaaaaacaaccatatacgtcgataccttcg

SEQ ID NO: 38155 - DNA, 50 bp, synthetic construct
  source 1..50: mol_type = other DNA
aacccaaaccataatcatactaatcacacaacaaaccctcataactccca

SEQ ID NO: 38156 - DNA, 50 bp, synthetic construct
  source 1..50: mol_type = other DNA
aacccaaaccataatcatactaatcacacaacaaaccctcgtaactcccg

SEQ ID NO: 38157 - DNA, 50 bp, synthetic construct
  source 1..50: mol_type = other DNA
tactaaaaaacaaaaaactaaccattatatttaacataaaccaaaaacca

SEQ ID NO: 38158 - DNA, 50 bp, synthetic construct
  source 1..50: mol_type = other DNA
tactaaaaaacaaaaaactaaccattatatttaacataaaccaaaaaccg

SEQ ID NO: 38159 - DNA, 50 bp, synthetic construct
  source 1..50: mol_type = other DNA
caccatattaacaaaaccaatcttaaactcctaaccttataatccaccca

SEQ ID NO: 38160 - DNA, 50 bp, synthetic construct
  source 1..50: mol_type = other DNA
caccatattaacgaaaccgatcttaaactcctaaccttataatccacccg

SEQ ID NO: 38161 - DNA, 50 bp, synthetic construct
  source 1..50: mol_type = other DNA
ctcaaaataacttttaataacaaacaataaaacaaacccactaactttca

SEQ ID NO: 38162 - DNA, 50 bp, synthetic construct
  source 1..50: mol_type = other DNA
ctcgaaataacttttaataacgaacgataaaacaaacccgctaactttcg

SEQ ID NO: 38163 - DNA, 50 bp, synthetic construct
  source 1..50: mol_type = other DNA
aaaatactaattattctctaatatctcaaaataacttttaataacaaaca

SEQ ID NO: 38164 - DNA, 50 bp, synthetic construct
  source 1..50: mol_type = other DNA
aaaatactaattattctctaatatctcgaaataacttttaataacgaacg

SEQ ID NO: 38165 - DNA, 50 bp, synthetic construct
  source 1..50: mol_type = other DNA
taaaacaaaataaaaatctccaaactaaaattaaaaacaaatctactaca

SEQ ID NO: 38166 - DNA, 50 bp, synthetic construct
  source 1..50: mol_type = other DNA
taaaacaaaataaaaatctccgaactaaaattaaaaacgaatctactacg

SEQ ID NO: 38167 - DNA, 50 bp, synthetic construct
  source 1..50: mol_type = other DNA
cccaacactaaaatctatatcctccttccaaacaaaaaaacatcaaaaca

SEQ ID NO: 38168 - DNA, 50 bp, synthetic construct
  source 1..50: mol_type = other DNA
cccgacgctaaaatctatatcctccttccgaacaaaaaaacatcaaaacg

SEQ ID NO: 38169 - DNA, 50 bp, synthetic construct
  source 1..50: mol_type = other DNA
caaaaccaaccccccatttcacaactaaaacaaaattaaaacaaaaaaca

SEQ ID NO: 38170 - DNA, 50 bp, synthetic construct
  source 1..50: mol_type = other DNA
cgaaaccaaccccccgtttcgcaactaaaacgaaattaaaacgaaaaacg

SEQ ID NO: 38171 - DNA, 50 bp, synthetic construct
  source 1..50: mol_type = other DNA
aaaaatacaaactaatacctaaaccaccaaaaaaaaaccacccacaatca

SEQ ID NO: 38172 - DNA, 50 bp, synthetic construct
  source 1..50: mol_type = other DNA
aaaaatacaaactaatacctaaaccgccaaaaaaaaaccgcccacaatcg

SEQ ID NO: 38173 - DNA, 50 bp, synthetic construct
  source 1..50: mol_type = other DNA
atttaattataaaacaacaaccaaaaaaatacaaactaatacctaaacca

SEQ ID NO: 38174 - DNA, 50 bp, synthetic construct
  source 1..50: mol_type = other DNA
atttaattataaaacgacgaccgaaaaaatacaaactaatacctaaaccg

SEQ ID NO: 38175 - DNA, 50 bp, synthetic construct
  source 1..50: mol_type = other DNA
ttattttaatcacaaacacttctttaaaaaaaacaaacaaacaatcaaca

SEQ ID NO: 38176 - DNA, 50 bp, synthetic construct
  source 1..50: mol_type = other DNA
ttattttaatcacaaacgcttctttaaaaaaaacaaacaaacaatcaacg

SEQ ID NO: 38177 - DNA, 50 bp, synthetic construct
  source 1..50: mol_type = other DNA
taaaataatacctaatttatataaacaactaaattccttataataactca

SEQ ID NO: 38178 - DNA, 50 bp, synthetic construct
  source 1..50: mol_type = other DNA
taaaataatacctaatttatataaacgactaaattccttataataactcg

SEQ ID NO: 38179 - DNA, 50 bp, synthetic construct
  source 1..50: mol_type = other DNA
tctaacttacaaaaaacacaaactaaaaccattcaaaaataaaacaaaca

SEQ ID NO: 38180 - DNA, 50 bp, synthetic construct
  source 1..50: mol_type = other DNA
tctaacttacaaaaaacgcaaactaaaaccattcaaaaataaaacaaacg

SEQ ID NO: 38181 - DNA, 50 bp, synthetic construct
  source 1..50: mol_type = other DNA
aaacacaaatctcaaaccaaaaaattaaacaaatacaaacaaaaaactca

SEQ ID NO: 38182 - DNA, 50 bp, synthetic construct
  source 1..50: mol_type = other DNA
aaacgcgaatctcgaaccaaaaaattaaacaaatacgaacgaaaaactcg

SEQ ID NO: 38183 - DNA, 50 bp, synthetic construct
  source 1..50: mol_type = other DNA
caaactaaaaaaatacaaactaaataccacaaccataaacaacaaactca

SEQ ID NO: 38184 - DNA, 50 bp, synthetic construct
  source 1..50: mol_type = other DNA
cgaactaaaaaaatacgaactaaataccgcgaccgtaaacaacaaactcg

SEQ ID NO: 38185 - DNA, 50 bp, synthetic construct
  source 1..50: mol_type = other DNA
aaaaaataaaattacaactaacattatatatacacacacccacaacaaca

SEQ ID NO: 38186 - DNA, 50 bp, synthetic construct
  source 1..50: mol_type = other DNA
aaaaaataaaattacaactaacattatatatacgcgcgcccgcgacgacg

SEQ ID NO: 38187 - DNA, 50 bp, synthetic construct
  source 1..50: mol_type = other DNA
aaaatcaaaaaaaatcaaacaaaaacaaaacacttctttaatcctatcca

SEQ ID NO: 38188 - DNA, 50 bp, synthetic construct
  source 1..50: mol_type = other DNA
gaaatcgaaaaaaatcgaacgaaaacaaaacacttctttaatcctatccg

SEQ ID NO: 38189 - DNA, 50 bp, synthetic construct
  source 1..50: mol_type = other DNA
caaaaacaatcacctaacccaaacaaaaccaaaaaaataccctaccctca

SEQ ID NO: 38190 - DNA, 50 bp, synthetic construct
  source 1..50: mol_type = other DNA
caaaaacgatcacctaacccgaacaaaaccaaaaaaataccctaccctcg

SEQ ID NO: 38191 - DNA, 50 bp, synthetic construct
  source 1..50: mol_type = other DNA
ctcatcctaataatcaaaaaaaatcaaccataaaaacaatcactcaccca

SEQ ID NO: 38192 - DNA, 50 bp, synthetic construct
  source 1..50: mol_type = other DNA
ctcgtcctaataatcaaaaaaaatcgaccgtaaaaacaatcactcgcccg

SEQ ID NO: 38193 - DNA, 50 bp, synthetic construct
  source 1..50: mol_type = other DNA
acccctcatcctaataatcaaaaaaaatcaaccataaaaacaatcactca

SEQ ID NO: 38194 - DNA, 50 bp, synthetic construct
  source 1..50: mol_type = other DNA
acccctcgtcctaataatcaaaaaaaatcgaccgtaaaaacaatcactcg

SEQ ID NO: 38195 - DNA, 50 bp, synthetic construct
  source 1..50: mol_type = other DNA
cactttccccaaaactaaaccacaaacacctcactattaataatataaca

SEQ ID NO: 38196 - DNA, 50 bp, synthetic construct
  source 1..50: mol_type = other DNA
cactttccccgaaactaaaccgcgaacacctcactattaataatataacg

SEQ ID NO: 38197 - DNA, 50 bp, synthetic construct
  source 1..50: mol_type = other DNA
tacaccatcaataataaaatattcacaacccaactccaaaaaaaataaca

SEQ ID NO: 38198 - DNA, 50 bp, synthetic construct
  source 1..50: mol_type = other DNA
tacaccatcaataataaaatattcgcgacccaactccgaaaaaaataacg

SEQ ID NO: 38199 - DNA, 50 bp, synthetic construct
  source 1..50: mol_type = other DNA
tattcacaacccaactccaaaaaaaataacaaaaataaaacaaaaaacca

SEQ ID NO: 38200 - DNA, 50 bp, synthetic construct
  source 1..50: mol_type = other DNA
tattcgcgacccaactccgaaaaaaataacgaaaataaaacgaaaaaccg

SEQ ID NO: 38201 - DNA, 50 bp, synthetic construct
  source 1..50: mol_type = other DNA
ttcacaacccaactccaaaaaaaataacaaaaataaaacaaaaaaccaca

SEQ ID NO: 38202 - DNA, 50 bp, synthetic construct
  source 1..50: mol_type = other DNA
ttcgcgacccaactccgaaaaaaataacgaaaataaaacgaaaaaccgcg

SEQ ID NO: 38203 - DNA, 50 bp, synthetic construct
  source 1..50: mol_type = other DNA
acaaaacaaacatctcaaaatatacaaaaaactaaaaaaactccaaaaca

SEQ ID NO: 38204 - DNA, 50 bp, synthetic construct
  source 1..50: mol_type = other DNA
acgaaacgaacgtctcgaaatatacgaaaaactaaaaaaactccgaaacg

SEQ ID NO: 38205 - DNA, 50 bp, synthetic construct
  source 1..50: mol_type = other DNA
aaaaacaataaactaaactcccaccacaaacacatctttataaaaataca

SEQ ID NO: 38206 - DNA, 50 bp, synthetic construct
  source 1..50: mol_type = other DNA
aaaaacgataaactaaactcccgccgcgaacgcgtctttataaaaatacg

SEQ ID NO: 38207 - DNA, 50 bp, synthetic construct
  source 1..50: mol_type = other DNA
aaatacaaaaaaataacccaataacacatacctataattccaactaccca

SEQ ID NO: 38208 - DNA, 50 bp, synthetic construct
  source 1..50: mol_type = other DNA
aaatacaaaaaaataacccgataacacgtacctataattccaactacccg

SEQ ID NO: 38209 - DNA, 50 bp, synthetic construct
  source 1..50: mol_type = other DNA
aaaacaaaactctatctcaaaaataaataaactaaacacaataactcaca

SEQ ID NO: 38210 - DNA, 50 bp, synthetic construct
  source 1..50: mol_type = other DNA
aaaacaaaactctatctcaaaaataaataaactaaacgcgataactcacg

SEQ ID NO: 38211 - DNA, 50 bp, synthetic construct
  source 1..50: mol_type = other DNA
taaaaccactctaaaaaataaaatctattaaccaaacataataactcaca

SEQ ID NO: 38212 - DNA, 50 bp, synthetic construct
  source 1..50: mol_type = other DNA
taaaaccgctctaaaaaataaaatctattaaccaaacgtaataactcacg

SEQ ID NO: 38213 - DNA, 50 bp, synthetic construct
  source 1..50: mol_type = other DNA
aaacaataatacataccaataatcccaactactctaaaaactaaaacaca

SEQ ID NO: 38214 - DNA, 50 bp, synthetic construct
  source 1..50: mol_type = other DNA
aaacgataatacataccaataatcccaactactctaaaaactaaaacacg

SEQ ID NO: 38215 - DNA, 50 bp, synthetic construct
  source 1..50: mol_type = other DNA
ctaaaaaacaataaaaattctcctaattaaataattaaaacctaactaca

SEQ ID NO: 38216 - DNA, 50 bp, synthetic construct
  source 1..50: mol_type = other DNA
ctaaaaaacaataaaaattctcctaattaaataattaaaacctaactacg

SEQ ID NO: 38217 - DNA, 50 bp, synthetic construct
  source 1..50: mol_type = other DNA
acaatctcactatactacccaaactactctcaaactcctaaactcaaaca

SEQ ID NO: 38218 - DNA, 50 bp, synthetic construct
  source 1..50: mol_type = other DNA
acgatctcactatactacccaaactactctcaaactcctaaactcaaacg

SEQ ID NO: 38219 - DNA, 50 bp, synthetic construct
  source 1..50: mol_type = other DNA
actttttacaataataaaaatattactcaaatatataatttaccaaaaca

SEQ ID NO: 38220 - DNA, 50 bp, synthetic construct
  source 1..50: mol_type = other DNA
actttttacaataataaaaatattactcgaatatataatttaccaaaacg

SEQ ID NO: 38221 - DNA, 50 bp, synthetic construct
  source 1..50: mol_type = other DNA
ttttttctaaaacaaaatctctctatcacccaaactaaaatataataaca

SEQ ID NO: 38222 - DNA, 50 bp, synthetic construct
  source 1..50: mol_type = other DNA
ttttttctaaaacgaaatctctctatcgcccaaactaaaatataataacg

SEQ ID NO: 38223 - DNA, 50 bp, synthetic construct
  source 1..50: mol_type = other DNA
ccaaaataacaccattacactccaatctaaacaacaacaacaaaactcca

SEQ ID NO: 38224 - DNA, 50 bp, synthetic construct
  source 1..50: mol_type = other DNA
ccaaaataacgccattacactccaatctaaacgacaacaacgaaactccg

SEQ ID NO: 38225 - DNA, 50 bp, synthetic construct
  source 1..50: mol_type = other DNA
acaataaaccaaaataacaccattacactccaatctaaacaacaacaaca

SEQ ID NO: 38226 - DNA, 50 bp, synthetic construct
  source 1..50: mol_type = other DNA
acaataaaccaaaataacgccattacactccaatctaaacgacaacaacg

SEQ ID NO: 38227 - DNA, 50 bp, synthetic construct
  source 1..50: mol_type = other DNA
aaaaaaatcacctaaacataataacaaacacctataatcccacctactca

SEQ ID NO: 38228 - DNA, 50 bp, synthetic construct
  source 1..50: mol_type = other DNA
aaaaaaatcacctaaacgtaataacaaacgcctataatcccacctactcg

SEQ ID NO: 38229 - DNA, 50 bp, synthetic construct
  source 1..50: mol_type = other DNA
tcctatctcaacctcccaaataaataaaattacaaacacctaccattaca

SEQ ID NO: 38230 - DNA, 50 bp, synthetic construct
  source 1..50: mol_type = other DNA
tcctatctcaacctcccgaataaataaaattacaaacgcctaccattacg

SEQ ID NO: 38231 - DNA, 50 bp, synthetic construct
  source 1..50: mol_type = other DNA
ccttctcaaaattaaataaatcaccacttactaaacaaaaacacaaacca

SEQ ID NO: 38232 - DNA, 50 bp, synthetic construct
  source 1..50: mol_type = other DNA
ccttctcgaaattaaataaatcaccgcttactaaacaaaaacgcgaaccg

SEQ ID NO: 38233 - DNA, 50 bp, synthetic construct
  source 1..50: mol_type = other DNA
ttctcaaaattaaataaatcaccacttactaaacaaaaacacaaaccaca

SEQ ID NO: 38234 - DNA, 50 bp, synthetic construct
  source 1..50: mol_type = other DNA
ttctcgaaattaaataaatcaccgcttactaaacaaaaacgcgaaccgcg

SEQ ID NO: 38235 - DNA, 50 bp, synthetic construct
  source 1..50: mol_type = other DNA
caaaattaaataaatcaccacttactaaacaaaaacacaaaccacaaaca

SEQ ID NO: 38236 - DNA, 50 bp, synthetic construct
  source 1..50: mol_type = other DNA
cgaaattaaataaatcaccgcttactaaacaaaaacgcgaaccgcgaacg

SEQ ID NO: 38237 - DNA, 50 bp, synthetic construct
  source 1..50: mol_type = other DNA
ccatcataaccaaatataaaatttttaaaataaacacaaacttaacaaca

SEQ ID NO: 38238 - DNA, 50 bp, synthetic construct
  source 1..50: mol_type = other DNA
ccatcgtaaccaaatataaaatttttaaaataaacgcaaacttaacgacg

SEQ ID NO: 38239 - DNA, 50 bp, synthetic construct
  source 1..50: mol_type = other DNA
tttccatcataaccaaatataaaatttttaaaataaacacaaacttaaca

SEQ ID NO: 38240 - DNA, 50 bp, synthetic construct
  source 1..50: mol_type = other DNA
tttccatcgtaaccaaatataaaatttttaaaataaacgcaaacttaacg

SEQ ID NO: 38241 - DNA, 50 bp, synthetic construct
  source 1..50: mol_type = other DNA
caaactacttaacacaacaaaaattaaaaataaaaattacttttccatca

SEQ ID NO: 38242 - DNA, 50 bp, synthetic construct
  source 1..50: mol_type = other DNA
cgaactacttaacacaacgaaaattaaaaataaaaattacttttccatcg

SEQ ID NO: 38243 - DNA, 50 bp, synthetic construct
  source 1..50: mol_type = other DNA
cactatcaaaaaaaatcaaaaactacacacacaaactacttaacacaaca

SEQ ID NO: 38244 - DNA, 50 bp, synthetic construct
  source 1..50: mol_type = other DNA
cactatcaaaaaaaatcgaaaactacacacgcgaactacttaacacaacg

SEQ ID NO: 38245 - DNA, 50 bp, synthetic construct
  source 1..50: mol_type = other DNA
caataaaaaaacaacttccactcccaactcccactatactaaacaactca

SEQ ID NO: 38246 - DNA, 50 bp, synthetic construct
  source 1..50: mol_type = other DNA
cgataaaaaaacaacttccactcccaactcccgctatactaaacaactcg

SEQ ID NO: 38247 - DNA, 50 bp, synthetic construct
  source 1..50: mol_type = other DNA
tcaacacataattaccaactacaaaaccaaatcactatcaaaaaaaatca

SEQ ID NO: 38248 - DNA, 50 bp, synthetic construct
  source 1..50: mol_type = other DNA
tcaacacgtaattaccgactacgaaaccgaatcactatcaaaaaaaatcg

SEQ ID NO: 38249 - DNA, 50 bp, synthetic construct
  source 1..50: mol_type = other DNA
cacaatcaataatcacatattaatctacactttcccctccaaaaaaatca

SEQ ID NO: 38250 - DNA, 50 bp, synthetic construct
  source 1..50: mol_type = other DNA
cgcaatcgataatcacgtattaatctacactttcccctccaaaaaaatcg

SEQ ID NO: 38251 - DNA, 50 bp, synthetic construct
  source 1..50: mol_type = other DNA
cacatattaatctacactttcccctccaaaaaaatcaaaaacccaacaca

SEQ ID NO: 38252 - DNA, 50 bp, synthetic construct
  source 1..50: mol_type = other DNA
cacgtattaatctacactttcccctccaaaaaaatcgaaaacccaacacg

SEQ ID NO: 38253 - DNA, 50 bp, synthetic construct
  source 1..50: mol_type = other DNA
tattaatctacactttcccctccaaaaaaatcaaaaacccaacacataca

SEQ ID NO: 38254 - DNA, 50 bp, synthetic construct
  source 1..50: mol_type = other DNA
tattaatctacactttcccctccaaaaaaatcgaaaacccaacacgtacg

SEQ ID NO: 38255 - DNA, 50 bp, synthetic construct
  source 1..50: mol_type = other DNA
taacaaaatcaaaaacacatacaaaccacctccctaaataaaaactaaca

SEQ ID NO: 38256 - DNA, 50 bp, synthetic construct
  source 1..50: mol_type = other DNA
taacgaaatcgaaaacacgtacaaaccgcctccctaaataaaaactaacg

SEQ ID NO: 38257 - DNA, 50 bp, synthetic construct
  source 1..50: mol_type = other DNA
ctcaaaataaacaaaaacaccaattcccacccaaaaaaacaacttacaca

SEQ ID NO: 38258 - DNA, 50 bp, synthetic construct
  source 1..50: mol_type = other DNA
ctcgaaataaacgaaaacgccaattcccacccaaaaaaacgacttacacg

SEQ ID NO: 38259 - DNA, 50 bp, synthetic construct
  source 1..50: mol_type = other DNA
ttttctaaacttataaaactcttttccctccaaaaaaaacaacacaccca

SEQ ID NO: 38260 - DNA, 50 bp, synthetic construct
  source 1..50: mol_type = other DNA
ttttctaaacttataaaactcttttccctccgaaaaaaacgacgcgcccg

SEQ ID NO: 38261 - DNA, 50 bp, synthetic construct
  source 1..50: mol_type = other DNA
ccaacaaccctataataatacaaacaaaactctaaccccaaataaaacca

SEQ ID NO: 38262 - DNA, 50 bp, synthetic construct
  source 1..50: mol_type = other DNA
ccaacgaccctataataatacgaacgaaactctaaccccaaataaaaccg

SEQ ID NO: 38263 - DNA, 50 bp, synthetic construct
  source 1..50: mol_type = other DNA
cctataataatacaaacaaaactctaaccccaaataaaaccaataaacca

SEQ ID NO: 38264 - DNA, 50 bp, synthetic construct
  source 1..50: mol_type = other DNA
cctataataatacgaacgaaactctaaccccaaataaaaccgataaaccg

SEQ ID NO: 38265 - DNA, 50 bp, synthetic construct
  source 1..50: mol_type = other DNA
caataaaccaaactaaaatatacaaaaccaaaactccaaaaaataaccca

SEQ ID NO: 38266 - DNA, 50 bp, synthetic construct
  source 1..50: mol_type = other DNA
cgataaaccgaactaaaatatacgaaaccgaaactccgaaaaataacccg

SEQ ID NO: 38267 - DNA, 50 bp, synthetic construct
  source 1..50: mol_type = other DNA
aaccaaactaaaatatacaaaaccaaaactccaaaaaataacccaaaaca

SEQ ID NO: 38268 - DNA, 50 bp, synthetic construct
  source 1..50: mol_type = other DNA
aaccgaactaaaatatacgaaaccgaaactccgaaaaataacccgaaacg

SEQ ID NO: 38269 - DNA, 50 bp, synthetic construct
  source 1..50: mol_type = other DNA
taaaatatacaaaaccaaaactccaaaaaataacccaaaacaacataaca

SEQ ID NO: 38270 - DNA, 50 bp, synthetic construct
  source 1..50: mol_type = other DNA
taaaatatacgaaaccgaaactccgaaaaataacccgaaacgacgtaacg

SEQ ID NO: 38271 - DNA, 50 bp, synthetic construct
  source 1..50: mol_type = other DNA
ccaaaaaataacccaaaacaacataacaaacataaaaactcaaaactcca

SEQ ID NO: 38272 - DNA, 50 bp, synthetic construct
  source 1..50: mol_type = other DNA
ccgaaaaataacccgaaacgacgtaacgaacataaaaactcgaaactccg

SEQ ID NO: 38273 - DNA, 50 bp, synthetic construct
  source 1..50: mol_type = other DNA
tcaacaaaatcaaaaaccaaacataaaaccccaaaacaacactaaataca

SEQ ID NO: 38274 - DNA, 50 bp, synthetic construct
  source 1..50: mol_type = other DNA
tcaacaaaatcgaaaaccgaacgtaaaaccccaaaacgacgctaaatacg

SEQ ID NO: 38275 - DNA, 50 bp, synthetic construct
  source 1..50: mol_type = other DNA
ccaaaattatcaacaaaatcaaaaaccaaacataaaaccccaaaacaaca

SEQ ID NO: 38276 - DNA, 50 bp, synthetic construct
  source 1..50: mol_type = other DNA
ccaaaattatcaacaaaatcgaaaaccgaacgtaaaaccccaaaacgacg

SEQ ID NO: 38277 - DNA, 50 bp, synthetic construct
  source 1..50: mol_type = other DNA
aaaacaaaatcaccttaacaaataccaaacaaaacccaaccaaacaaaca

SEQ ID NO: 38278 - DNA, 50 bp, synthetic construct
  source 1..50: mol_type = other DNA
aaaacaaaatcaccttaacgaataccaaacgaaacccgaccaaacgaacg

SEQ ID NO: 38279 - DNA, 50 bp, synthetic construct
  source 1..50: mol_type = other DNA
caccaaaataaccctatccctttctccttactacaataaaaatcaaacca

SEQ ID NO: 38280 - DNA, 50 bp, synthetic construct
  source 1..50: mol_type = other DNA
cgccaaaataaccctatccctttctccttactacgataaaaatcaaaccg

SEQ ID NO: 38281 - DNA, 50 bp, synthetic construct
  source 1..50: mol_type = other DNA
cactatccaattaattcctacacactcaattcacctctcaaaatccttca

SEQ ID NO: 38282 - DNA, 50 bp, synthetic construct
  source 1..50: mol_type = other DNA
cactatccaattaattcctacacactcgattcacctctcaaaatccttcg

SEQ ID NO: 38283 - DNA, 50 bp, synthetic construct
  source 1..50: mol_type = other DNA
accattaataactttaaataaaaaaatcttaccaaacacaataactcaca

SEQ ID NO: 38284 - DNA, 50 bp, synthetic construct
  source 1..50: mol_type = other DNA
accattaataactttaaataaaaaaatcttaccaaacgcaataactcgcg

SEQ ID NO: 38285 - DNA, 50 bp, synthetic construct
  source 1..50: mol_type = other DNA
acaaaacatacactcaaattttataccaaaacattccattcccaaaaaca

SEQ ID NO: 38286 - DNA, 50 bp, synthetic construct
  source 1..50: mol_type = other DNA
acaaaacgtacgctcgaattttataccgaaacattccgttcccaaaaacg

SEQ ID NO: 38287 - DNA, 50 bp, synthetic construct
  source 1..50: mol_type = other DNA
ctatctcaataaacaaaacatacactcaaattttataccaaaacattcca

SEQ ID NO: 38288 - DNA, 50 bp, synthetic construct
  source 1..50: mol_type = other DNA
ctatctcaataaacaaaacgtacgctcgaattttataccgaaacattccg

SEQ ID NO: 38289 - DNA, 50 bp, synthetic construct
  source 1..50: mol_type = other DNA
ttctttatattaaattacacacctatacccatctcctcactcccccatca

SEQ ID NO: 38290 - DNA, 50 bp, synthetic construct
  source 1..50: mol_type = other DNA
ttctttatattaaattacacacctatacccgtctcctcactcccccatcg

SEQ ID NO: 38291 - DNA, 50 bp, synthetic construct
  source 1..50: mol_type = other DNA
ccccatctctactaaaaattcaaaaaattaactaaacataataactcaca

SEQ ID NO: 38292 - DNA, 50 bp, synthetic construct
  source 1..50: mol_type = other DNA
ccccgtctctactaaaaattcaaaaaattaactaaacataataactcacg

SEQ ID NO: 38293 - DNA, 50 bp, synthetic construct
  source 1..50: mol_type = other DNA
cacaacctccatctcttaaattcaaataattctcctacttcaatctccca

SEQ ID NO: 38294 - DNA, 50 bp, synthetic construct
  source 1..50: mol_type = other DNA
cgcaacctccatctcttaaattcaaataattctcctacttcaatctcccg

SEQ ID NO: 38295 - DNA, 50 bp, synthetic construct
  source 1..50: mol_type = other DNA
ctaatactaaaaaatactcaataaaaacatactaaataaaaccaaacaca

SEQ ID NO: 38296 - DNA, 50 bp, synthetic construct
  source 1..50: mol_type = other DNA
ctaatactaaaaaatactcgataaaaacatactaaataaaaccgaacgcg

SEQ ID NO: 38297 - DNA, 50 bp, synthetic construct
  source 1..50: mol_type = other DNA
aaaatactcaataaaaacatactaaataaaaccaaacacaataactcaca

SEQ ID NO: 38298 - DNA, 50 bp, synthetic construct
  source 1..50: mol_type = other DNA
aaaatactcgataaaaacatactaaataaaaccgaacgcgataactcacg

SEQ ID NO: 38299 - DNA, 50 bp, synthetic construct
  source 1..50: mol_type = other DNA
aaatataaaccccaaatacacaaaaaatcatatatacttaaaaaaaatca

SEQ ID NO: 38300 - DNA, 50 bp, synthetic construct
  source 1..50: mol_type = other DNA
aaatataaaccccgaatacacgaaaaatcgtatatacttaaaaaaaatcg

SEQ ID NO: 38301 - DNA, 50 bp, synthetic construct
  source 1..50: mol_type = other DNA
aaaaacaaactaaaaaacaaattaaataactatcccaaactaaaaaacca

SEQ ID NO: 38302 - DNA, 50 bp, synthetic construct
  source 1..50: mol_type = other DNA
aaaaacaaactaaaaaacgaattaaataactatcccgaactaaaaaaccg

SEQ ID NO: 38303 - DNA, 50 bp, synthetic construct
  source 1..50: mol_type = other DNA
aaaactccttcaaaaaaaaacaaatctcaaacaaaactaacctcctccca

SEQ ID NO: 38304 - DNA, 50 bp, synthetic construct
  source 1..50: mol_type = other DNA
gaaactccttcgaaaaaaaacgaatctcgaacaaaactaacctcctcccg

SEQ ID NO: 38305 - DNA, 50 bp, synthetic construct
  source 1..50: mol_type = other DNA
caccaacaaacactacttactataaataaaaaatatccaacctaaacaca

SEQ ID NO: 38306 - DNA, 50 bp, synthetic construct
  source 1..50: mol_type = other DNA
cgccaacaaacactacttactataaataaaaaatatccaacctaaacgcg

SEQ ID NO: 38307 - DNA, 50 bp, synthetic construct
  source 1..50: mol_type = other DNA
ataaataaaaaatatccaacctaaacacaacctctaaaaaaacaaaacca

SEQ ID NO: 38308 - DNA, 50 bp, synthetic construct
  source 1..50: mol_type = other DNA
ataaataaaaaatatccaacctaaacgcgacctctaaaaaaacaaaaccg

SEQ ID NO: 38309 - DNA, 50 bp, synthetic construct
  source 1..50: mol_type = other DNA
aatatccaacctaaacacaacctctaaaaaaacaaaaccaaaaaaaatca

SEQ ID NO: 38310 - DNA, 50 bp, synthetic construct
  source 1..50: mol_type = other DNA
aatatccaacctaaacgcgacctctaaaaaaacaaaaccgaaaaaaatcg

SEQ ID NO: 38311 - DNA, 50 bp, synthetic construct
  source 1..50: mol_type = other DNA
tccatatcatcaaataaataacaataacactacttttccaaaaaccccca

SEQ ID NO: 38312 - DNA, 50 bp, synthetic construct
  source 1..50: mol_type = other DNA
tccatatcgtcaaataaataacgataacgctacttttccaaaaacccccg

SEQ ID NO: 38313 - DNA, 50 bp, synthetic construct
  source 1..50: mol_type = other DNA
ctcacacaaatcacctactttaaaccttccatatcatcaaataaataaca

SEQ ID NO: 38314 - DNA, 50 bp, synthetic construct
  source 1..50: mol_type = other DNA
ctcgcacaaatcgcctactttaaaccttccatatcgtcaaataaataacg

SEQ ID NO: 38315 - DNA, 50 bp, synthetic construct
  source 1..50: mol_type = other DNA
ctacataacataaaaaaccaaaaaccaaaacaccacaaaaacaaaaacca

SEQ ID NO: 38316 - DNA, 50 bp, synthetic construct
  source 1..50: mol_type = other DNA
ctacataacgtaaaaaaccaaaaaccgaaacgccgcgaaaacaaaaaccg

SEQ ID NO: 38317 - DNA, 50 bp, synthetic construct
  source 1..50: mol_type = other DNA
taacataaaaaaccaaaaaccaaaacaccacaaaaacaaaaaccaaacca

SEQ ID NO: 38318 - DNA, 50 bp, synthetic construct
  source 1..50: mol_type = other DNA
taacgtaaaaaaccaaaaaccgaaacgccgcgaaaacaaaaaccgaaccg

SEQ ID NO: 38319 - DNA, 50 bp, synthetic construct
  source 1..50: mol_type = other DNA
aaacaaaattcaaaacccaaaacccaaataaacaaaaaaacaaccaaaca

SEQ ID NO: 38320 - DNA, 50 bp, synthetic construct
  source 1..50: mol_type = other DNA
aaacgaaattcaaaacccgaaacccaaataaacgaaaaaacgaccgaacg

SEQ ID NO: 38321 - DNA, 50 bp, synthetic construct
  source 1..50: mol_type = other DNA
caaaacataaacaaaattcaaaacccaaaacccaaataaacaaaaaaaca

SEQ ID NO: 38322 - DNA, 50 bp, synthetic construct
  source 1..50: mol_type = other DNA
caaaacgtaaacgaaattcaaaacccgaaacccaaataaacgaaaaaacg

SEQ ID NO: 38323 - DNA, 50 bp, synthetic construct
  source 1..50: mol_type = other DNA
acaaaacacaaaacataaacaaaattcaaaacccaaaacccaaataaaca

SEQ ID NO: 38324 - DNA, 50 bp, synthetic construct
  source 1..50: mol_type = other DNA
acgaaacgcaaaacgtaaacgaaattcaaaacccgaaacccaaataaacg

SEQ ID NO: 38325 - DNA, 50 bp, synthetic construct
  source 1..50: mol_type = other DNA
acccaaaatataaaaacaaaacacaaaacataaacaaaattcaaaaccca

SEQ ID NO: 38326 - DNA, 50 bp, synthetic construct
  source 1..50: mol_type = other DNA
acccgaaatataaaaacgaaacgcaaaacgtaaacgaaattcaaaacccg

SEQ ID NO: 38327 - DNA, 50 bp, synthetic construct
  source 1..50: mol_type = other DNA
aaacaaaactcaaaacccaaaatataaaaacaaaacacaaaacataaaca

SEQ ID NO: 38328 - DNA, 50 bp, synthetic construct
  source 1..50: mol_type = other DNA
aaacgaaactcaaaacccgaaatataaaaacgaaacgcaaaacgtaaacg

SEQ ID NO: 38329 - DNA, 50 bp, synthetic construct
  source 1..50: mol_type = other DNA
acacataaacaaaactcaaaacccaaaatataaaaacaaaacacaaaaca

SEQ ID NO: 38330 - DNA, 50 bp, synthetic construct
  source 1..50: mol_type = other DNA
acgcgtaaacgaaactcaaaacccgaaatataaaaacgaaacgcaaaacg

SEQ ID NO: 38331 - DNA, 50 bp, synthetic construct
  source 1..50: mol_type = other DNA
aaacacaacacataaacaaaactcaaaacccaaaatataaaaacaaaaca

SEQ ID NO: 38332 - DNA, 50 bp, synthetic construct
  source 1..50: mol_type = other DNA
aaacgcgacgcgtaaacgaaactcaaaacccgaaatataaaaacgaaacg

SEQ ID NO: 38333 - DNA, 50 bp, synthetic construct
  source 1..50: mol_type = other DNA
aaacaaaacttaaaaaccaaaataccaaaataaaacacaacacataaaca

SEQ ID NO: 38334 - DNA, 50 bp, synthetic construct
  source 1..50: mol_type = other DNA
aaacgaaacttaaaaaccgaaataccgaaataaaacgcgacgcgtaaacg

SEQ ID NO: 38335 - DNA, 50 bp, synthetic construct
  source 1..50: mol_type = other DNA
aaatataaacaaaacttaaaaaccaaaataccaaaataaaacacaacaca

SEQ ID NO: 38336 - DNA, 50 bp, synthetic construct
  source 1..50: mol_type = other DNA
aaatataaacgaaacttaaaaaccgaaataccgaaataaaacgcgacgcg

SEQ ID NO: 38337 - DNA, 50 bp, synthetic construct
  source 1..50: mol_type = other DNA
aaaaatataaacaaaacttaaaaaccaaaataccaaaataaaacacaaca

SEQ ID NO: 38338 - DNA, 50 bp, synthetic construct
  source 1..50: mol_type = other DNA
aaaaatataaacgaaacttaaaaaccgaaataccgaaataaaacgcgacg

SEQ ID NO: 38339 - DNA, 50 bp, synthetic construct
  source 1..50: mol_type = other DNA
actaaaaatataaacaaaacttaaaaaccaaaataccaaaataaaacaca

SEQ ID NO: 38340 - DNA, 50 bp, synthetic construct
  source 1..50: mol_type = other DNA
actaaaaatataaacgaaacttaaaaaccgaaataccgaaataaaacgcg

SEQ ID NO: 38341 - DNA, 50 bp, synthetic construct
  source 1..50: mol_type = other DNA
atccaaaactcaaattataaacaaaactcaaaacctaaaacaacaaaaca

SEQ ID NO: 38342 - DNA, 50 bp, synthetic construct
  source 1..50: mol_type = other DNA
atccgaaactcgaattataaacgaaactcaaaacctaaaacgacgaaacg

SEQ ID NO: 38343 - DNA, 50 bp, synthetic construct
  source 1..50: mol_type = other DNA
aaacatatatccaaaactcaaattataaacaaaactcaaaacctaaaaca

SEQ ID NO: 38344 - DNA, 50 bp, synthetic construct
  source 1..50: mol_type = other DNA
aaacgtatatccgaaactcgaattataaacgaaactcaaaacctaaaacg

SEQ ID NO: 38345 - DNA, 50 bp, synthetic construct
  source 1..50: mol_type = other DNA
aaaaaacatataaaccaaaaaacatatatccaaaactcaaattataaaca

SEQ ID NO: 38346 - DNA, 50 bp, synthetic construct
  source 1..50: mol_type = other DNA
aaaaaacatataaaccgaaaaacgtatatccgaaactcgaattataaacg

SEQ ID NO: 38347 - DNA, 50 bp, synthetic construct
  source 1..50: mol_type = other DNA
catataaacaaaaaaaacatataaaccaaaaaacatatatccaaaactca

SEQ ID NO: 38348 - DNA, 50 bp, synthetic construct
  source 1..50: mol_type = other DNA
cgtataaacgaaaaaaacatataaaccgaaaaacgtatatccgaaactcg

SEQ ID NO: 38349 - DNA, 50 bp, synthetic construct
  source 1..50: mol_type = other DNA
acaaaaaatcaaaacacataaacaaaactctaaatcccaatctcaacaca

SEQ ID NO: 38350 - DNA, 50 bp, synthetic construct
  source 1..50: mol_type = other DNA
acaaaaaatcgaaacgcgtaaacgaaactctaaatcccaatctcaacgcg

SEQ ID NO: 38351 - DNA, 50 bp, synthetic construct
  source 1..50: mol_type = other DNA
aaacaaaaaatcaaaacacataaacaaaactctaaatcccaatctcaaca

SEQ ID NO: 38352 - DNA, 50 bp, synthetic construct
  source 1..50: mol_type = other DNA
aaacaaaaaatcgaaacgcgtaaacgaaactctaaatcccaatctcaacg

SEQ ID NO: 38353 - DNA, 50 bp, synthetic construct
  source 1..50: mol_type = other DNA
aaacccaaaacacaaaaatataacaaaatacataaacaaaacaaaacaca

SEQ ID NO: 38354 - DNA, 50 bp, synthetic construct
  source 1..50: mol_type = other DNA
aaacccgaaacacaaaaatataacgaaatacgtaaacgaaacgaaacgcg

SEQ ID NO: 38355 - DNA, 50 bp, synthetic construct
  source 1..50: mol_type = other DNA
caaaacccaaaacacaaaaatataacaaaatacataaacaaaacaaaaca

SEQ ID NO: 38356 - DNA, 50 bp, synthetic construct
  source 1..50: mol_type = other DNA
caaaacccgaaacacaaaaatataacgaaatacgtaaacgaaacgaaacg

SEQ ID NO: 38357 - DNA, 50 bp, synthetic construct
  source 1..50: mol_type = other DNA
aaaatcaaaacccaaaacacaaaaatataacaaaatacataaacaaaaca

SEQ ID NO: 38358 - DNA, 50 bp, synthetic construct
  source 1..50: mol_type = other DNA
aaaatcaaaacccgaaacacaaaaatataacgaaatacgtaaacgaaacg

SEQ ID NO: 38359 - DNA, 50 bp, synthetic construct
  source 1..50: mol_type = other DNA
acctcaaaaacataacaaaaacaaaactcaaaacccaaaacaacaaaaca

SEQ ID NO: 38360 - DNA, 50 bp, synthetic construct
  source 1..50: mol_type = other DNA
acctcaaaaacgtaacgaaaacgaaactcaaaacccgaaacaacgaaacg

SEQ ID NO: 38361 - DNA, 50 bp, synthetic construct
  source 1..50: mol_type = other DNA
ataaaacttaaaaacctcaaaaacataacaaaaacaaaactcaaaaccca

SEQ ID NO: 38362 - DNA, 50 bp, synthetic construct
  source 1..50: mol_type = other DNA
ataaaacttaaaaacctcaaaaacgtaacgaaaacgaaactcaaaacccg

SEQ ID NO: 38363 - DNA, 50 bp, synthetic construct
  source 1..50: mol_type = other DNA
acctcaaacaccaaataaaacttaaaaacctcaaaaacataacaaaaaca

SEQ ID NO: 38364 - DNA, 50 bp, synthetic construct
  source 1..50: mol_type = other DNA
acctcgaacaccgaataaaacttaaaaacctcaaaaacgtaacgaaaacg

SEQ ID NO: 38365 - DNA, 50 bp, synthetic construct
  source 1..50: mol_type = other DNA
taaaaacataatataaaaacataaacaaaactcaaaaacctcaaacacca

SEQ ID NO: 38366 - DNA, 50 bp, synthetic construct
  source 1..50: mol_type = other DNA
taaaaacgtaatataaaaacgtaaacgaaactcaaaaacctcgaacaccg

SEQ ID NO: 38367 - DNA, 50 bp, synthetic construct
  source 1..50: mol_type = other DNA
aaaaacttaaaaacataatataaaaacataaacaaaactcaaaaacctca

SEQ ID NO: 38368 - DNA, 50 bp, synthetic construct
  source 1..50: mol_type = other DNA
aaaaacttaaaaacgtaatataaaaacgtaaacgaaactcaaaaacctcg

SEQ ID NO: 38369 - DNA, 50 bp, synthetic construct
  source 1..50: mol_type = other DNA
aacaaaaacaactctcaaatataatcctcattccttcaaccataatccca

SEQ ID NO: 38370 - DNA, 50 bp, synthetic construct
  source 1..50: mol_type = other DNA
aacaaaaacaactctcgaatataatcctcattccttcaaccgtaatcccg

SEQ ID NO: 38371 - DNA, 50 bp, synthetic construct
  source 1..50: mol_type = other DNA
ccataatcccaacatattcacaaattaataataacttaaaaaaaccaaca

SEQ ID NO: 38372 - DNA, 50 bp, synthetic construct
  source 1..50: mol_type = other DNA
ccgtaatcccgacgtattcacaaattaataataacttaaaaaaaccgacg

SEQ ID NO: 38373 - DNA, 50 bp, synthetic construct
  source 1..50: mol_type = other DNA
caaaaaaaaaatcaaaacctaacctcaacctaaaacacaaatacaataca

SEQ ID NO: 38374 - DNA, 50 bp, synthetic construct
  source 1..50: mol_type = other DNA
cgaaaaaaaaatcgaaacctaacctcgacctaaaacgcaaatacgatacg

SEQ ID NO: 38375 - DNA, 50 bp, synthetic construct
  source 1..50: mol_type = other DNA
aaaaaatcaaaacctaacctcaacctaaaacacaaatacaatacacacca

SEQ ID NO: 38376 - DNA, 50 bp, synthetic construct
  source 1..50: mol_type = other DNA
aaaaaatcgaaacctaacctcgacctaaaacgcaaatacgatacgcaccg

SEQ ID NO: 38377 - DNA, 50 bp, synthetic construct
  source 1..50: mol_type = other DNA
acctaaaacacaaatacaatacacaccacaaaaaaacaacataaaataca

SEQ ID NO: 38378 - DNA, 50 bp, synthetic construct
  source 1..50: mol_type = other DNA
acctaaaacgcaaatacgatacgcaccgcaaaaaaacgacgtaaaatacg

SEQ ID NO: 38379 - DNA, 50 bp, synthetic construct
  source 1..50: mol_type = other DNA
aatacaatacacaccacaaaaaaacaacataaaatacaaaaccaatccca

SEQ ID NO: 38380 - DNA, 50 bp, synthetic construct
  source 1..50: mol_type = other DNA
aatacgatacgcaccgcaaaaaaacgacgtaaaatacgaaaccaatcccg

SEQ ID NO: 38381 - DNA, 50 bp, synthetic construct
  source 1..50: mol_type = other DNA
aaaaaaatcacaataaccaaaaaatccaaaacctcaactctaaataaaca

SEQ ID NO: 38382 - DNA, 50 bp, synthetic construct
  source 1..50: mol_type = other DNA
gaaaaaatcgcgataaccgaaaaatccgaaacctcgactctaaataaacg

SEQ ID NO: 38383 - DNA, 50 bp, synthetic construct
  source 1..50: mol_type = other DNA
caaaacttaaaaacacaataaataaaaacaaaacaccaaaccaacaaaca

SEQ ID NO: 38384 - DNA, 50 bp, synthetic construct
  source 1..50: mol_type = other DNA
cgaaacttaaaaacgcaataaataaaaacaaaacgccgaaccgacgaacg

SEQ ID NO: 38385 - DNA, 50 bp, synthetic construct
  source 1..50: mol_type = other DNA
tacaacccacaacaccaaaacttaaaaacacaataaataaaaacaaaaca

SEQ ID NO: 38386 - DNA, 50 bp, synthetic construct
  source 1..50: mol_type = other DNA
tacaacccgcgacgccgaaacttaaaaacgcaataaataaaaacaaaacg

SEQ ID NO: 38387 - DNA, 50 bp, synthetic construct
  source 1..50: mol_type = other DNA
aactatatcccaaacaaaatacaaacaacaaaacctcccctctcactcca

SEQ ID NO: 38388 - DNA, 50 bp, synthetic construct
  source 1..50: mol_type = other DNA
aactatatcccaaacaaaatacgaacaacaaaacctcccctctcactccg

SEQ ID NO: 38389 - DNA, 50 bp, synthetic construct
  source 1..50: mol_type = other DNA
tatcattacaccctcttaaacaaataatcaacctctaccacttcctcaca

SEQ ID NO: 38390 - DNA, 50 bp, synthetic construct
  source 1..50: mol_type = other DNA
tatcattacaccctcttaaacaaataatcgacctctaccgcttcctcacg

SEQ ID NO: 38391 - DNA, 50 bp, synthetic construct
  source 1..50: mol_type = other DNA
aaacataattatatcataaaaaaaacccaaaatactaactactccctaca

SEQ ID NO: 38392 - DNA, 50 bp, synthetic construct
  source 1..50: mol_type = other DNA
aaacgtaattatatcgtaaaaaaaacccgaaatactaactactccctacg

SEQ ID NO: 38393 - DNA, 50 bp, synthetic construct
  source 1..50: mol_type = other DNA
acaaaacaataaaaacctaaaacctaaaacctaaaacaaaataacaacca

SEQ ID NO: 38394 - DNA, 50 bp, synthetic construct
  source 1..50: mol_type = other DNA
gcaaaacgataaaaacctaaaacctaaaacctaaaacgaaataacgaccg

SEQ ID NO: 38395 - DNA, 50 bp, synthetic construct
  source 1..50: mol_type = other DNA
aaaacaaccctaaaaaaaacctaaccacctcctaaacaattccaaaacca

SEQ ID NO: 38396 - DNA, 50 bp, synthetic construct
  source 1..50: mol_type = other DNA
gaaacgaccctaaaaaaaacctaaccgcctcctaaacaattccaaaaccg

SEQ ID NO: 38397 - DNA, 50 bp, synthetic construct
  source 1..50: mol_type = other DNA
ccaaccccacaaaacctaaaactaacaactttaaaactactcaaaaaaca

SEQ ID NO: 38398 - DNA, 50 bp, synthetic construct
  source 1..50: mol_type = other DNA
ccaaccccacgaaacctaaaactaacgactttaaaactactcaaaaaacg

SEQ ID NO: 38399 - DNA, 50 bp, synthetic construct
  source 1..50: mol_type = other DNA
tataatcacaactactcaaaaaacttaaacacaaaaattacctaaaccca

SEQ ID NO: 38400 - DNA, 50 bp, synthetic construct
  source 1..50: mol_type = other DNA
tataatcgcaactactcgaaaaacttaaacacgaaaattacctaaacccg

SEQ ID NO: 38401 - DNA, 50 bp, synthetic construct
  source 1..50: mol_type = other DNA
aaccctatctctactaaaatacaaaaattaaacaaacatactaaccaaca

SEQ ID NO: 38402 - DNA, 50 bp, synthetic construct
  source 1..50: mol_type = other DNA
aaccctatctctactaaaatacaaaaattaaacaaacatactaaccgacg

SEQ ID NO: 38403 - DNA, 50 bp, synthetic construct
  source 1..50: mol_type = other DNA
taacaaaaaacactctctaaatataaaaacaaatattctaactaaacaca

SEQ ID NO: 38404 - DNA, 50 bp, synthetic construct
  source 1..50: mol_type = other DNA
taacgaaaaacgctctctaaatataaaaacaaatattctaactaaacgcg

SEQ ID NO: 38405 - DNA, 50 bp, synthetic construct
  source 1..50: mol_type = other DNA
caccaaaaaaacaacttcctaactctaaacaccataattctatcctaaca

SEQ ID NO: 38406 - DNA, 50 bp, synthetic construct
  source 1..50: mol_type = other DNA
cgccaaaaaaacgacttcctaactctaaacaccgtaattctatcctaacg

SEQ ID NO: 38407 - DNA, 50 bp, synthetic construct
  source 1..50: mol_type = other DNA
aaacccacccatcacatataaaaactcaaatactaaacaccaaaaaaaca

SEQ ID NO: 38408 - DNA, 50 bp, synthetic construct
  source 1..50: mol_type = other DNA
aaacccgcccatcacgtataaaaactcaaatactaaacgccaaaaaaacg

SEQ ID NO: 38409 - DNA, 50 bp, synthetic construct
  source 1..50: mol_type = other DNA
aataaaaacaatcaaaaaacaacaatacaatacaaaaacccccccacaca

SEQ ID NO: 38410 - DNA, 50 bp, synthetic construct
  source 1..50: mol_type = other DNA
aataaaaacaatcaaaaaacgacaatacgatacaaaaacccccccacgcg

SEQ ID NO: 38411 - DNA, 50 bp, synthetic construct
  source 1..50: mol_type = other DNA
aaaccactccatctacaaattaaataaaacaaaaatataaacaaaacaca

SEQ ID NO: 38412 - DNA, 50 bp, synthetic construct
  source 1..50: mol_type = other DNA
aaaccgctccatctacgaattaaataaaacaaaaatataaacaaaacgcg

SEQ ID NO: 38413 - DNA, 50 bp, synthetic construct
  source 1..50: mol_type = other DNA
aaaaaccactccatctacaaattaaataaaacaaaaatataaacaaaaca

SEQ ID NO: 38414 - DNA, 50 bp, synthetic construct
  source 1..50: mol_type = other DNA
aaaaaccgctccatctacgaattaaataaaacaaaaatataaacaaaacg

SEQ ID NO: 38415 - DNA, 50 bp, synthetic construct
  source 1..50: mol_type = other DNA
aaccaaaaaaaacatactaacaaacaaccactaacaccaatcaaaataca

SEQ ID NO: 38416 - DNA, 50 bp, synthetic construct
  source 1..50: mol_type = other DNA
aaccgaaaaaaacgtactaacgaacgaccactaacgccaatcgaaatacg

SEQ ID NO: 38417 - DNA, 50 bp, synthetic construct
  source 1..50: mol_type = other DNA
cacataacacaaaacctaaattacaaccataaaaaactaaaataaaaaca

SEQ ID NO: 38418 - DNA, 50 bp, synthetic construct
  source 1..50: mol_type = other DNA
cgcgtaacgcaaaacctaaattacaaccgtaaaaaactaaaataaaaacg

SEQ ID NO: 38419 - DNA, 50 bp, synthetic construct
  source 1..50: mol_type = other DNA
tccaaaaacatctttaaaaaacacataacacaaaacctaaattacaacca

SEQ ID NO: 38420 - DNA, 50 bp, synthetic construct
  source 1..50: mol_type = other DNA
tccgaaaacgtctttaaaaaacgcgtaacgcaaaacctaaattacaaccg

SEQ ID NO: 38421 - DNA, 50 bp, synthetic construct
  source 1..50: mol_type = other DNA
tttcactttaaaaccatcaattactttttctcctccacacaaaaatcaca

SEQ ID NO: 38422 - DNA, 50 bp, synthetic construct
  source 1..50: mol_type = other DNA
tttcactttaaaaccgtcgattactttttctcctccgcacaaaaatcgcg

SEQ ID NO: 38423 - DNA, 50 bp, synthetic construct
  source 1..50: mol_type = other DNA
aggtagttgtggttgagatggaggtagttttttagaattaagattttttt

SEQ ID NO: 38424 - DNA, 50 bp, synthetic construct
  source 1..50: mol_type = other DNA
aggtagttgcggttgagacggaggtagttttttagaattaagattttttc

SEQ ID NO: 38425 - DNA, 50 bp, synthetic construct
  source 1..50: mol_type = other DNA
aaaactataaccaaaaatcattctactcaactttccaacaaaacatcaca

SEQ ID NO: 38426 - DNA, 50 bp, synthetic construct
  source 1..50: mol_type = other DNA
aaaactataaccaaaaatcattctactcaactttccaacaaaacatcacg

SEQ ID NO: 38427 - DNA, 50 bp, synthetic construct
  source 1..50: mol_type = other DNA
tctaacactaacctaaaataaaacaatactactaaaacaaataaaataca

SEQ ID NO: 38428 - DNA, 50 bp, synthetic construct
  source 1..50: mol_type = other DNA
tctaacgctaacctaaaataaaacgatactactaaaacaaataaaatacg

SEQ ID NO: 38429 - DNA, 50 bp, synthetic construct
  source 1..50: mol_type = other DNA
atcaacaaaaattcaaaatacaatataccaatacaaactaaaaaaaacca

SEQ ID NO: 38430 - DNA, 50 bp, synthetic construct
  source 1..50: mol_type = other DNA
atcgacaaaaattcgaaatacaatataccgatacaaactaaaaaaaaccg

SEQ ID NO: 38431 - DNA, 50 bp, synthetic construct
  source 1..50: mol_type = other DNA
taattaaaaaacaactatatatcaacaaaaattcaaaatacaatatacca

SEQ ID NO: 38432 - DNA, 50 bp, synthetic construct
  source 1..50: mol_type = other DNA
taattaaaaaacaactatatatcgacaaaaattcgaaatacaatataccg

SEQ ID NO: 38433 - DNA, 50 bp, synthetic construct
  source 1..50: mol_type = other DNA
caaactataatcaactaattaaaaaacaactatatatcaacaaaaattca

SEQ ID NO: 38434 - DNA, 50 bp, synthetic construct
  source 1..50: mol_type = other DNA
cgaactataatcaactaattaaaaaacaactatatatcgacaaaaattcg

SEQ ID NO: 38435 - DNA, 50 bp, synthetic construct
  source 1..50: mol_type = other DNA
taatcaacataatattaaaataacactaccaacattaaaaataaaataca

SEQ ID NO: 38436 - DNA, 50 bp, synthetic construct
  source 1..50: mol_type = other DNA
taatcaacataatattaaaataacactaccaacgttaaaaataaaatacg

SEQ ID NO: 38437 - DNA, 50 bp, synthetic construct
  source 1..50: mol_type = other DNA
atataaaacaacaactaatacttaaatctacaaaaatacacataacaaca

SEQ ID NO: 38438 - DNA, 50 bp, synthetic construct
  source 1..50: mol_type = other DNA
atataaaacgacgactaatacttaaatctacgaaaatacgcataacaacg

SEQ ID NO: 38439 - DNA, 50 bp, synthetic construct
  source 1..50: mol_type = other DNA
ttctaaaaaatttattctaaaactacaaccacaaaatcaaaacaaccaca

SEQ ID NO: 38440 - DNA, 50 bp, synthetic construct
  source 1..50: mol_type = other DNA
ttctaaaaaatttattctaaaactacgaccgcgaaatcgaaacgaccgcg

SEQ ID NO: 38441 - DNA, 50 bp, synthetic construct
  source 1..50: mol_type = other DNA
aattctaaaaaatttattctaaaactacaaccacaaaatcaaaacaacca

SEQ ID NO: 38442 - DNA, 50 bp, synthetic construct
  source 1..50: mol_type = other DNA
aattctaaaaaatttattctaaaactacgaccgcgaaatcgaaacgaccg

SEQ ID NO: 38443 - DNA, 50 bp, synthetic construct
  source 1..50: mol_type = other DNA
ccaccacttaattctaaaaaatttattctaaaactacaaccacaaaatca

SEQ ID NO: 38444 - DNA, 50 bp, synthetic construct
  source 1..50: mol_type = other DNA
ccgccacttaattctaaaaaatttattctaaaactacgaccgcgaaatcg

SEQ ID NO: 38445 - DNA, 50 bp, synthetic construct
  source 1..50: mol_type = other DNA
ccacaaccccaccacttaattctaaaaaatttattctaaaactacaacca

SEQ ID NO: 38446 - DNA, 50 bp, synthetic construct
  source 1..50: mol_type = other DNA
ccgcgaccccgccacttaattctaaaaaatttattctaaaactacgaccg

SEQ ID NO: 38447 - DNA, 50 bp, synthetic construct
  source 1..50: mol_type = other DNA
aacattctaaacaaatttctaacatttaccccaaactcccaaaactctca

SEQ ID NO: 38448 - DNA, 50 bp, synthetic construct
  source 1..50: mol_type = other DNA
aacgttctaaacaaatttctaacatttaccccgaactcccaaaactctcg

SEQ ID NO: 38449 - DNA, 50 bp, synthetic construct
  source 1..50: mol_type = other DNA
aatatttcaaaataaaataaaaatttattcacttaccttcttccctaaca

SEQ ID NO: 38450 - DNA, 50 bp, synthetic construct
  source 1..50: mol_type = other DNA
aatatttcgaaataaaataaaaatttattcacttaccttcttccctaacg

SEQ ID NO: 38451 - DNA, 50 bp, synthetic construct
  source 1..50: mol_type = other DNA
acaaaaacaaattctccttaactaactcacacacaacccaataaaattca

SEQ ID NO: 38452 - DNA, 50 bp, synthetic construct
  source 1..50: mol_type = other DNA
acgaaaacaaattctccttaactaactcacacgcgacccaataaaattcg

SEQ ID NO: 38453 - DNA, 50 bp, synthetic construct
  source 1..50: mol_type = other DNA
acactcaaatacataaaaacaaaacccaaccctcaaaaataacaattaca

SEQ ID NO: 38454 - DNA, 50 bp, synthetic construct
  source 1..50: mol_type = other DNA
acactcgaatacgtaaaaacaaaacccaaccctcgaaaataacaattacg

SEQ ID NO: 38455 - DNA, 50 bp, synthetic construct
  source 1..50: mol_type = other DNA
aaacacaatacaaacttccaacaaaaacactaaaaacaaaataacaacca

SEQ ID NO: 38456 - DNA, 50 bp, synthetic construct
  source 1..50: mol_type = other DNA
aaacacgatacgaacttccgacgaaaacgctaaaaacaaaataacgaccg

SEQ ID NO: 38457 - DNA, 50 bp, synthetic construct
  source 1..50: mol_type = other DNA
acccaaccctacaataatacaaaaaaaatacaaaataactaccaaacaca

SEQ ID NO: 38458 - DNA, 50 bp, synthetic construct
  source 1..50: mol_type = other DNA
acccaaccctacgataatacgaaaaaaatacgaaataactaccgaacgcg

SEQ ID NO: 38459 - DNA, 50 bp, synthetic construct
  source 1..50: mol_type = other DNA
caaatactaaaaccacctctcaaaacccaaaaaaaaaccctaaaactaca

SEQ ID NO: 38460 - DNA, 50 bp, synthetic construct
  source 1..50: mol_type = other DNA
caaatactaaaaccgcctctcgaaacccgaaaaaaaaccctaaaactacg

SEQ ID NO: 38461 - DNA, 50 bp, synthetic construct
  source 1..50: mol_type = other DNA
aataaaaccattaaacctaacacacaactataaacaataacaaaatcaca

SEQ ID NO: 38462 - DNA, 50 bp, synthetic construct
  source 1..50: mol_type = other DNA
aataaaaccgttaaacctaacgcgcaactataaacgataacgaaatcgcg

SEQ ID NO: 38463 - DNA, 50 bp, synthetic construct
  source 1..50: mol_type = other DNA
taaataaaaccattaaacctaacacacaactataaacaataacaaaatca

SEQ ID NO: 38464 - DNA, 50 bp, synthetic construct
  source 1..50: mol_type = other DNA
taaataaaaccgttaaacctaacgcgcaactataaacgataacgaaatcg

SEQ ID NO: 38465 - DNA, 50 bp, synthetic construct
  source 1..50: mol_type = other DNA
ttcacacaattctcatacctcaacctcctatatacttaaaattacaaaca

SEQ ID NO: 38466 - DNA, 50 bp, synthetic construct
  source 1..50: mol_type = other DNA
ttcacgcgattctcatacctcaacctcctatatacttaaaattacaaacg

SEQ ID NO: 38467 - DNA, 50 bp, synthetic construct
  source 1..50: mol_type = other DNA
tcataaacctctccaaataaaccaatcaccaaaaaactaaaatcataaca

SEQ ID NO: 38468 - DNA, 50 bp, synthetic construct
  source 1..50: mol_type = other DNA
tcgtaaacctctccaaataaaccaatcaccgaaaaactaaaatcgtaacg

SEQ ID NO: 38469 - DNA, 50 bp, synthetic construct
  source 1..50: mol_type = other DNA
aaaaaaccttaattaaaaaatttccctaaaattaaaaaattctcaataca

SEQ ID NO: 38470 - DNA, 50 bp, synthetic construct
  source 1..50: mol_type = other DNA
aaaaaaccttaattaaaaaatttccctaaaattaaaaaattctcaatacg

SEQ ID NO: 38471 - DNA, 50 bp, synthetic construct
  source 1..50: mol_type = other DNA
cactataacaataacacctcacttaacaactccatccccatattaacaca

SEQ ID NO: 38472 - DNA, 50 bp, synthetic construct
  source 1..50: mol_type = other DNA
cgctataacaataacgcctcacttaacaactccatccccatattaacacg

SEQ ID NO: 38473 - DNA, 50 bp, synthetic construct
  source 1..50: mol_type = other DNA
taaaaataaaactactaaataaaacactattaccacaacaaatataaaca

SEQ ID NO: 38474 - DNA, 50 bp, synthetic construct
  source 1..50: mol_type = other DNA
taaaaataaaactactaaataaaacgctattaccacaacgaatataaacg

SEQ ID NO: 38475 - DNA, 50 bp, synthetic construct
  source 1..50: mol_type = other DNA
aatactacatcaataactcatacctctacctacaaaactaaaccaacaca

SEQ ID NO: 38476 - DNA, 50 bp, synthetic construct
  source 1..50: mol_type = other DNA
aatactacatcaataactcgtacctctacctacgaaactaaaccaacgcg

SEQ ID NO: 38477 - DNA, 50 bp, synthetic construct
  source 1..50: mol_type = other DNA
accacatccaaccatttaaaactctttttcttaaaataaaatcatcctca

SEQ ID NO: 38478 - DNA, 50 bp, synthetic construct
  source 1..50: mol_type = other DNA
accgcgtccgaccatttaaaactctttttcttaaaataaaatcatcctcg

SEQ ID NO: 38479 - DNA, 50 bp, synthetic construct
  source 1..50: mol_type = other DNA
acaaaaaaccaaacttaaatatcacacccaaaaacctcaaccaacaccca

SEQ ID NO: 38480 - DNA, 50 bp, synthetic construct
  source 1..50: mol_type = other DNA
acaaaaaaccgaacttaaatatcacacccaaaaacctcaaccaacacccg

SEQ ID NO: 38481 - DNA, 50 bp, synthetic construct
  source 1..50: mol_type = other DNA
tatctctacaaaaataaaaaactaaactcctcccttccccaaaaaacaca

SEQ ID NO: 38482 - DNA, 50 bp, synthetic construct
  source 1..50: mol_type = other DNA
tatctctacaaaaataaaaaactaaactcctcccttccccaaaaaacgcg

SEQ ID NO: 38483 - DNA, 50 bp, synthetic construct
  source 1..50: mol_type = other DNA
ataaaaatcatactaaaatcaaaaaacaaaaccactactaaaaaacaaca

SEQ ID NO: 38484 - DNA, 50 bp, synthetic construct
  source 1..50: mol_type = other DNA
ataaaaatcgtactaaaatcaaaaaacgaaaccgctactaaaaaacgacg

SEQ ID NO: 38485 - DNA, 50 bp, synthetic construct
  source 1..50: mol_type = other DNA
catcttcaccccaaaaataaaaatcatactaaaatcaaaaaacaaaacca

SEQ ID NO: 38486 - DNA, 50 bp, synthetic construct
  source 1..50: mol_type = other DNA
cgtcttcgccccgaaaataaaaatcgtactaaaatcaaaaaacgaaaccg

SEQ ID NO: 38487 - DNA, 50 bp, synthetic construct
  source 1..50: mol_type = other DNA
accacccaacccaaattaaatttcaaaaactcctaaaataactacaacca

SEQ ID NO: 38488 - DNA, 50 bp, synthetic construct
  source 1..50: mol_type = other DNA
accgcccgacccaaattaaatttcgaaaactcctaaaataactacaaccg

SEQ ID NO: 38489 - DNA, 50 bp, synthetic construct
  source 1..50: mol_type = other DNA
aacaactacaaccatcttaaaaacctccaaaacttaacctaaatcaaaca

SEQ ID NO: 38490 - DNA, 50 bp, synthetic construct
  source 1..50: mol_type = other DNA
aacgactacaaccatcttaaaaacctccgaaacttaacctaaatcgaacg

SEQ ID NO: 38491 - DNA, 50 bp, synthetic construct
  source 1..50: mol_type = other DNA
catcttaaaaacctccaaaacttaacctaaatcaaacaataaaatcctca

SEQ ID NO: 38492 - DNA, 50 bp, synthetic construct
  source 1..50: mol_type = other DNA
catcttaaaaacctccgaaacttaacctaaatcgaacgataaaatcctcg

SEQ ID NO: 38493 - DNA, 50 bp, synthetic construct
  source 1..50: mol_type = other DNA
taaaaacctccaaaacttaacctaaatcaaacaataaaatcctcaactca

SEQ ID NO: 38494 - DNA, 50 bp, synthetic construct
  source 1..50: mol_type = other DNA
taaaaacctccgaaacttaacctaaatcgaacgataaaatcctcgactcg

SEQ ID NO: 38495 - DNA, 50 bp, synthetic construct
  source 1..50: mol_type = other DNA
aaaacctccaaaacttaacctaaatcaaacaataaaatcctcaactcaca

SEQ ID NO: 38496 - DNA, 50 bp, synthetic construct
  source 1..50: mol_type = other DNA
aaaacctccgaaacttaacctaaatcgaacgataaaatcctcgactcgcg

SEQ ID NO: 38497 - DNA, 50 bp, synthetic construct
  source 1..50: mol_type = other DNA
cttaacctaaatcaaacaataaaatcctcaactcacatcctaaaatacca

SEQ ID NO: 38498 - DNA, 50 bp, synthetic construct
  source 1..50: mol_type = other DNA
cttaacctaaatcgaacgataaaatcctcgactcgcgtcctaaaataccg

SEQ ID NO: 38499 - DNA, 50 bp, synthetic construct
  source 1..50: mol_type = other DNA
ataaaatcctcaactcacatcctaaaataccactactaattatcttaaca

SEQ ID NO: 38500 - DNA, 50 bp, synthetic construct
  source 1..50: mol_type = other DNA
ataaaatcctcgactcgcgtcctaaaataccgctactaattatcttaacg

SEQ ID NO: 38501 - DNA, 50 bp, synthetic construct
  source 1..50: mol_type = other DNA
gttattttttgtattggttaagtgggtaaggggtagtataaaagagtaat

SEQ ID NO: 38502 - DNA, 50 bp, synthetic construct
  source 1..50: mol_type = other DNA
gttattttttgtattggttaagtgggtaaggggtagtataaaagagtaac

SEQ ID NO: 38503 - DNA, 50 bp, synthetic construct
  source 1..50: mol_type = other DNA
atataacttacaaatacattatacacaaacaataaaaaattaattataca

SEQ ID NO: 38504 - DNA, 50 bp, synthetic construct
  source 1..50: mol_type = other DNA
atataacttacaaatacattatacgcaaacaataaaaaattaattatacg

SEQ ID NO: 38505 - DNA, 50 bp, synthetic construct
  source 1..50: mol_type = other DNA
taaaccaataaaaactttaaaaactaataataaataaaccaaaaactaca

SEQ ID NO: 38506 - DNA, 50 bp, synthetic construct
  source 1..50: mol_type = other DNA
taaaccgataaaaactttaaaaactaataataaataaaccgaaaactacg

SEQ ID NO: 38507 - DNA, 50 bp, synthetic construct
  source 1..50: mol_type = other DNA
aaagttgttatgagttgatggaaattttagaagttgatgatgagtaagtt

SEQ ID NO: 38508 - DNA, 50 bp, synthetic construct
  source 1..50: mol_type = other DNA
aaagttgttatgagtcgatggaaattttagaagttgatgatgagtaagtc

SEQ ID NO: 38509 - DNA, 50 bp, synthetic construct
  source 1..50: mol_type = other DNA
caataaaaataaaaacaataataaaaactacaaccacaactattactcca

SEQ ID NO: 38510 - DNA, 50 bp, synthetic construct
  source 1..50: mol_type = other DNA
cgataaaaataaaaacgataataaaaactacgaccgcaactattactccg

SEQ ID NO: 38511 - DNA, 50 bp, synthetic construct
  source 1..50: mol_type = other DNA
aaaaataaaaacaataataaaaactacaaccacaactattactccacaca

SEQ ID NO: 38512 - DNA, 50 bp, synthetic construct
  source 1..50: mol_type = other DNA
aaaaataaaaacgataataaaaactacgaccgcaactattactccgcacg

SEQ ID NO: 38513 - DNA, 50 bp, synthetic construct
  source 1..50: mol_type = other DNA
aacaaacaccaatttccaaccaaaacaaattaataataacacccaaacca

SEQ ID NO: 38514 - DNA, 50 bp, synthetic construct
  source 1..50: mol_type = other DNA
aacaaacgccaatttccgaccgaaacgaattaataataacacccaaaccg

SEQ ID NO: 38515 - DNA, 50 bp, synthetic construct
  source 1..50: mol_type = other DNA
ccaaaccaaaaactttaaaaactcaaatcaaaaaaacacaaaatcacaca

SEQ ID NO: 38516 - DNA, 50 bp, synthetic construct
  source 1..50: mol_type = other DNA
ccaaaccaaaaactttaaaaactcgaatcgaaaaaacacgaaatcacgcg

SEQ ID NO: 38517 - DNA, 50 bp, synthetic construct
  source 1..50: mol_type = other DNA
ctaacaataaaaaaaacttacataatacatttattatatcttctaataca

SEQ ID NO: 38518 - DNA, 50 bp, synthetic construct
  source 1..50: mol_type = other DNA
ctaacaataaaaaaaacttacataatacgtttattatatcttctaatacg

SEQ ID NO: 38519 - DNA, 50 bp, synthetic construct
  source 1..50: mol_type = other DNA
tactcaaaacaccaaaacaaaaacaaaacaaaaaaacacttacaaatcca

SEQ ID NO: 38520 - DNA, 50 bp, synthetic construct
  source 1..50: mol_type = other DNA
tactcaaaacgccgaaacgaaaacgaaacaaaaaaacgcttacaaatccg

SEQ ID NO: 38521 - DNA, 50 bp, synthetic construct
  source 1..50: mol_type = other DNA
ctccaaaaaaatctacaactaaaatcaaccataaaaactcacaacccaca

SEQ ID NO: 38522 - DNA, 50 bp, synthetic construct
  source 1..50: mol_type = other DNA
ctccaaaaaaatctacaactaaaatcgaccgtaaaaactcgcaacccgcg

SEQ ID NO: 38523 - DNA, 50 bp, synthetic construct
  source 1..50: mol_type = other DNA
ttctccaaaaaaatctacaactaaaatcaaccataaaaactcacaaccca

SEQ ID NO: 38524 - DNA, 50 bp, synthetic construct
  source 1..50: mol_type = other DNA
ttctccaaaaaaatctacaactaaaatcgaccgtaaaaactcgcaacccg

SEQ ID NO: 38525 - DNA, 50 bp, synthetic construct
  source 1..50: mol_type = other DNA
aaaaaaaaaacctaaaattctccaaaaaaatctacaactaaaatcaacca

SEQ ID NO: 38526 - DNA, 50 bp, synthetic construct
  source 1..50: mol_type = other DNA
aaaaaaaaaacctaaaattctccaaaaaaatctacaactaaaatcgaccg

SEQ ID NO: 38527 - DNA, 50 bp, synthetic construct
  source 1..50: mol_type = other DNA
ataaatcacacacaatatttacaaaacaataatcaaaattcatcttccca

SEQ ID NO: 38528 - DNA, 50 bp, synthetic construct
  source 1..50: mol_type = other DNA
ataaatcacacgcgatatttacgaaacaataatcgaaattcgtcttcccg

SEQ ID NO: 38529 - DNA, 50 bp, synthetic construct
  source 1..50: mol_type = other DNA
ctattaataacacaataaacccaaaaaaacaaatctcaaccactatttca

SEQ ID NO: 38530 - DNA, 50 bp, synthetic construct
  source 1..50: mol_type = other DNA
ctattaataacgcaataaacccgaaaaaacgaatctcgaccactatttcg

SEQ ID NO: 38531 - DNA, 50 bp, synthetic construct
  source 1..50: mol_type = other DNA
acacaataaacccaaaaaaacaaatctcaaccactatttcacaaatacca

SEQ ID NO: 38532 - DNA, 50 bp, synthetic construct
  source 1..50: mol_type = other DNA
acgcaataaacccgaaaaaacgaatctcgaccactatttcgcaaataccg

SEQ ID NO: 38533 - DNA, 50 bp, synthetic construct
  source 1..50: mol_type = other DNA
aaatctcaaccactatttcacaaataccacatataatttattaaatacca

SEQ ID NO: 38534 - DNA, 50 bp, synthetic construct
  source 1..50: mol_type = other DNA
gaatctcgaccactatttcgcaaataccgcgtataatttattaaataccg

SEQ ID NO: 38535 - DNA, 50 bp, synthetic construct
  source 1..50: mol_type = other DNA
accactatttcacaaataccacatataatttattaaataccatctctcca

SEQ ID NO: 38536 - DNA, 50 bp, synthetic construct
  source 1..50: mol_type = other DNA
accactatttcgcaaataccgcgtataatttattaaataccgtctctccg

SEQ ID NO: 38537 - DNA, 50 bp, synthetic construct
  source 1..50: mol_type = other DNA
aaaaccacattcataacaacaaattaacaaataccctacaacccttccca

SEQ ID NO: 38538 - DNA, 50 bp, synthetic construct
  source 1..50: mol_type = other DNA
aaaaccacgttcataacgacgaattaacaaataccctacaacccttcccg

SEQ ID NO: 38539 - DNA, 50 bp, synthetic construct
  source 1..50: mol_type = other DNA
catacccacataacaaaacctccataaaaacccctacccaataatattca

SEQ ID NO: 38540 - DNA, 50 bp, synthetic construct
  source 1..50: mol_type = other DNA
catacccacataacgaaacctccataaaaacccctacccaataatattcg

SEQ ID NO: 38541 - DNA, 50 bp, synthetic construct
  source 1..50: mol_type = other DNA
aaaacaatactataaaaactaacaatctccaatcttcacaaatccacaca

SEQ ID NO: 38542 - DNA, 50 bp, synthetic construct
  source 1..50: mol_type = other DNA
aaaacgatactataaaaactaacgatctccaatcttcacgaatccgcacg

SEQ ID NO: 38543 - DNA, 50 bp, synthetic construct
  source 1..50: mol_type = other DNA
aaaccacataaacaccaaaataaaaaacaccaaaaaacaaaaaacaaaca

SEQ ID NO: 38544 - DNA, 50 bp, synthetic construct
  source 1..50: mol_type = other DNA
gaaccgcgtaaacgccgaaataaaaaacgccaaaaaacgaaaaacgaacg

SEQ ID NO: 38545 - DNA, 50 bp, synthetic construct
  source 1..50: mol_type = other DNA
ctcaaccaaattaaaaccccccaaaacaaataaacaaacaaaaaccccca

SEQ ID NO: 38546 - DNA, 50 bp, synthetic construct
  source 1..50: mol_type = other DNA
ctcaaccaaattaaaaccccccgaaacgaataaacaaacaaaaacccccg

SEQ ID NO: 38547 - DNA, 50 bp, synthetic construct
  source 1..50: mol_type = other DNA
acaaaaaaaatacaaatcataaaaaaactcaaccaaattaaaacccccca

SEQ ID NO: 38548 - DNA, 50 bp, synthetic construct
  source 1..50: mol_type = other DNA
acgaaaaaaatacgaatcgtaaaaaaactcaaccaaattaaaaccccccg

SEQ ID NO: 38549 - DNA, 50 bp, synthetic construct
  source 1..50: mol_type = other DNA
atttactcacctcaaaaaacttcaacttaactaaatttccccacaaccca

SEQ ID NO: 38550 - DNA, 50 bp, synthetic construct
  source 1..50: mol_type = other DNA
atttactcgcctcgaaaaacttcaacttaactaaatttccccacgacccg

SEQ ID NO: 38551 - DNA, 50 bp, synthetic construct
  source 1..50: mol_type = other DNA
ataattcacttaaaaccaaaaattttaaaaacaacctaatcaacaacaca

SEQ ID NO: 38552 - DNA, 50 bp, synthetic construct
  source 1..50: mol_type = other DNA
ataattcacttaaaaccaaaaattttaaaaacaacctaatcaacaacgcg

SEQ ID NO: 38553 - DNA, 50 bp, synthetic construct
  source 1..50: mol_type = other DNA
caatctccaccaaattctaaatcaaaacaactactactaaaaacaaaaca

SEQ ID NO: 38554 - DNA, 50 bp, synthetic construct
  source 1..50: mol_type = other DNA
cgatctccgccgaattctaaatcaaaacaactactactaaaaacgaaacg

SEQ ID NO: 38555 - DNA, 50 bp, synthetic construct
  source 1..50: mol_type = other DNA
aaaaaaaacaaaaccaaattacatataaacctaaccataacactacccca

SEQ ID NO: 38556 - DNA, 50 bp, synthetic construct
  source 1..50: mol_type = other DNA
aaaaaaaacgaaaccaaattacatataaacctaaccataacgctaccccg

SEQ ID NO: 38557 - DNA, 50 bp, synthetic construct
  source 1..50: mol_type = other DNA
tcaacattccaaaccaacaccccaaacattcttcctaataaaaaaaacca

SEQ ID NO: 38558 - DNA, 50 bp, synthetic construct
  source 1..50: mol_type = other DNA
tcaacgttccaaaccaacaccccaaacattcttcctaataaaaaaaaccg

SEQ ID NO: 38559 - DNA, 50 bp, synthetic construct
  source 1..50: mol_type = other DNA
aaatttcaaaacataaacctaaaccatacaacccccttaaccccttaaca

SEQ ID NO: 38560 - DNA, 50 bp, synthetic construct
  source 1..50: mol_type = other DNA
aaatttcgaaacataaacctaaaccatacgacccccttaaccccttaacg

SEQ ID NO: 38561 - DNA, 50 bp, synthetic construct
  source 1..50: mol_type = other DNA
cccctataccatcaaaaattcaactataaacttctaactctcccaaaaca

SEQ ID NO: 38562 - DNA, 50 bp, synthetic construct
  source 1..50: mol_type = other DNA
cccctataccatcgaaaattcgactataaacttctaactctcccaaaacg

SEQ ID NO: 38563 - DNA, 50 bp, synthetic construct
  source 1..50: mol_type = other DNA
tcatactacctttcaataacataaaaaaaaatctaatttaaatttcaaca

SEQ ID NO: 38564 - DNA, 50 bp, synthetic construct
  source 1..50: mol_type = other DNA
tcatactacctttcaataacataaaaaaaaatctaatttaaatttcaacg

SEQ ID NO: 38565 - DNA, 50 bp, synthetic construct
  source 1..50: mol_type = other DNA
attaaaaaaaactccctatcctaacctccattaaaacaacaaccaataca

SEQ ID NO: 38566 - DNA, 50 bp, synthetic construct
  source 1..50: mol_type = other DNA
attaaaaaaaactccctatcctaacctccgttaaaacgacaaccaatacg

SEQ ID NO: 38567 - DNA, 50 bp, synthetic construct
  source 1..50: mol_type = other DNA
aaaacccaatcccaaaaacttaaataaactcaaatatacccaaaaaaaca

SEQ ID NO: 38568 - DNA, 50 bp, synthetic construct
  source 1..50: mol_type = other DNA
aaaacccgatcccgaaaacttaaataaactcgaatatacccaaaaaaacg

SEQ ID NO: 38569 - DNA, 50 bp, synthetic construct
  source 1..50: mol_type = other DNA
actaaaaacaccaaaacaaaacaaaaaccacaaaaaacaataaaaaaaca

SEQ ID NO: 38570 - DNA, 50 bp, synthetic construct
  source 1..50: mol_type = other DNA
actaaaaacgccgaaacgaaacgaaaaccgcgaaaaacgataaaaaaacg

SEQ ID NO: 38571 - DNA, 50 bp, synthetic construct
  source 1..50: mol_type = other DNA
taaaaaaacacaactaaaactaaaaacaccaaaacaaaacaaaaaccaca

SEQ ID NO: 38572 - DNA, 50 bp, synthetic construct
  source 1..50: mol_type = other DNA
taaaaaaacgcaactaaaactaaaaacgccgaaacgaaacgaaaaccgcg

SEQ ID NO: 38573 - DNA, 50 bp, synthetic construct
  source 1..50: mol_type = other DNA
actaaaaaaacacaactaaaactaaaaacaccaaaacaaaacaaaaacca

SEQ ID NO: 38574 - DNA, 50 bp, synthetic construct
  source 1..50: mol_type = other DNA
actaaaaaaacgcaactaaaactaaaaacgccgaaacgaaacgaaaaccg

SEQ ID NO: 38575 - DNA, 50 bp, synthetic construct
  source 1..50: mol_type = other DNA
aaaaaacccaaaactaaaaaaacacaactaaaactaaaaacaccaaaaca

SEQ ID NO: 38576 - DNA, 50 bp, synthetic construct
  source 1..50: mol_type = other DNA
aaaaaacccaaaactaaaaaaacgcaactaaaactaaaaacgccgaaacg

SEQ ID NO: 38577 - DNA, 50 bp, synthetic construct
  source 1..50: mol_type = other DNA
aactaaaaaaacccaaaactaaaaaaacacaactaaaactaaaaacacca

SEQ ID NO: 38578 - DNA, 50 bp, synthetic construct
  source 1..50: mol_type = other DNA
aactaaaaaaacccaaaactaaaaaaacgcaactaaaactaaaaacgccg

SEQ ID NO: 38579 - DNA, 50 bp, synthetic construct
  source 1..50: mol_type = other DNA
aaaaaaaccaaaaaaactaacaactaaaaaaacccaaaactaaaaaaaca

SEQ ID NO: 38580 - DNA, 50 bp, synthetic construct
  source 1..50: mol_type = other DNA
aaaaaaaccgaaaaaactaacaactaaaaaaacccaaaactaaaaaaacg

SEQ ID NO: 38581 - DNA, 50 bp, synthetic construct
  source 1..50: mol_type = other DNA
tttaaaaacaccccaatcctccatctcctcaccaaaattaacaataatca

SEQ ID NO: 38582 - DNA, 50 bp, synthetic construct
  source 1..50: mol_type = other DNA
tttaaaaacgccccaatcctccgtctcctcaccgaaattaacaataatcg

SEQ ID NO: 38583 - DNA, 50 bp, synthetic construct
  source 1..50: mol_type = other DNA
ctcttacacaaaaaaaacaaaattaaaaaaacaactaaacttcttcctca

SEQ ID NO: 38584 - DNA, 50 bp, synthetic construct
  source 1..50: mol_type = other DNA
ctcttacgcaaaaaaaacgaaattaaaaaaacaactaaacttcttcctcg

SEQ ID NO: 38585 - DNA, 50 bp, synthetic construct
  source 1..50: mol_type = other DNA
acaaaatttcactcttattacccaaactaacatacaataacactatctca

SEQ ID NO: 38586 - DNA, 50 bp, synthetic construct
  source 1..50: mol_type = other DNA
acgaaatttcgctcttattacccaaactaacgtacaataacgctatctcg

SEQ ID NO: 38587 - DNA, 50 bp, synthetic construct
  source 1..50: mol_type = other DNA
ttttttgagatggagttttgtttttgttgtttagattggtgtgtagtggt

SEQ ID NO: 38588 - DNA, 50 bp, synthetic construct
  source 1..50: mol_type = other DNA
ttttttgagacggagtttcgtttttgttgtttagattggcgtgtagtggc

SEQ ID NO: 38589 - DNA, 50 bp, synthetic construct
  source 1..50: mol_type = other DNA
aataaaaccccatctatactaaaaatattaaccaaacataataacaaaca

SEQ ID NO: 38590 - DNA, 50 bp, synthetic construct
  source 1..50: mol_type = other DNA
gataaaaccccgtctatactaaaaatattaaccgaacgtaataacgaacg

SEQ ID NO: 38591 - DNA, 50 bp, synthetic construct
  source 1..50: mol_type = other DNA
acacaataaaaccccatctatactaaaaatattaaccaaacataataaca

SEQ ID NO: 38592 - DNA, 50 bp, synthetic construct
  source 1..50: mol_type = other DNA
acacgataaaaccccgtctatactaaaaatattaaccgaacgtaataacg

SEQ ID NO: 38593 - DNA, 50 bp, synthetic construct
  source 1..50: mol_type = other DNA
gggattataggtgtttgttattatgtttggttaatatttttagtatagat

SEQ ID NO: 38594 - DNA, 50 bp, synthetic construct
  source 1..50: mol_type = other DNA
gggattataggcgttcgttattacgttcggttaatatttttagtatagac

SEQ ID NO: 38595 - DNA, 50 bp, synthetic construct
  source 1..50: mol_type = other DNA
accctaccaatctcttctcacatatacccctaaaaaactctaccttaaca

SEQ ID NO: 38596 - DNA, 50 bp, synthetic construct
  source 1..50: mol_type = other DNA
accctaccaatctcttctcacgtatacccctaaaaaactctaccttaacg

SEQ ID NO: 38597 - DNA, 50 bp, synthetic construct
  source 1..50: mol_type = other DNA
taacacatacataattaccttaattttcatcacctctaaaaaacacccca

SEQ ID NO: 38598 - DNA, 50 bp, synthetic construct
  source 1..50: mol_type = other DNA
taacgcatacgtaattaccttaattttcgtcgcctctaaaaaacgccccg

SEQ ID NO: 38599 - DNA, 50 bp, synthetic construct
  source 1..50: mol_type = other DNA
aaacaaaaaaaacacccaaaaacaaacctttaataccattccaatcacca

SEQ ID NO: 38600 - DNA, 50 bp, synthetic construct
  source 1..50: mol_type = other DNA
aaacaaaaaaaacgcccgaaaacaaacctttaataccgttccgatcaccg

SEQ ID NO: 38601 - DNA, 50 bp, synthetic construct
  source 1..50: mol_type = other DNA
aaactaccatcacaataaccaaaacaacactaaaaatttacttccaaaca

SEQ ID NO: 38602 - DNA, 50 bp, synthetic construct
  source 1..50: mol_type = other DNA
aaactaccgtcgcgataaccgaaacgacactaaaaatttacttccgaacg

SEQ ID NO: 38603 - DNA, 50 bp, synthetic construct
  source 1..50: mol_type = other DNA
tacaaaaaatactattaaattatttaataaccaaaaacttatctaaaaca

SEQ ID NO: 38604 - DNA, 50 bp, synthetic construct
  source 1..50: mol_type = other DNA
tacgaaaaatactattaaattatttaataaccaaaaacttatctaaaacg

SEQ ID NO: 38605 - DNA, 50 bp, synthetic construct
  source 1..50: mol_type = other DNA
aaaaaatcttccccaaaaacaaacaaaaacaaaactaaactaaatttaca

SEQ ID NO: 38606 - DNA, 50 bp, synthetic construct
  source 1..50: mol_type = other DNA
aaaaaatcttccccaaaaacgaacgaaaacgaaactaaactaaatttacg

SEQ ID NO: 38607 - DNA, 50 bp, synthetic construct
  source 1..50: mol_type = other DNA
caacatctccctacccctaaaaccataatctcatacaatattttaatcca

SEQ ID NO: 38608 - DNA, 50 bp, synthetic construct
  source 1..50: mol_type = other DNA
cgacgtctccctacccctaaaaccataatctcatacaatattttaatccg

SEQ ID NO: 38609 - DNA, 50 bp, synthetic construct
  source 1..50: mol_type = other DNA
tttcccattaaacacataaaaactctaacctcacctacaaaataaacaca

SEQ ID NO: 38610 - DNA, 50 bp, synthetic construct
  source 1..50: mol_type = other DNA
tttcccgttaaacacataaaaactctaacctcgcctacgaaataaacacg

SEQ ID NO: 38611 - DNA, 50 bp, synthetic construct
  source 1..50: mol_type = other DNA
taaacacataaaaactctaacctcacctacaaaataaacacaataaacca

SEQ ID NO: 38612 - DNA, 50 bp, synthetic construct
  source 1..50: mol_type = other DNA
taaacacataaaaactctaacctcgcctacgaaataaacacgataaaccg

SEQ ID NO: 38613 - DNA, 50 bp, synthetic construct
  source 1..50: mol_type = other DNA
aaaaacttaataaccattaacacaaaaacctccaccctaacaacaaccca

SEQ ID NO: 38614 - DNA, 50 bp, synthetic construct
  source 1..50: mol_type = other DNA
aaaaacttaataaccattaacgcgaaaacctccaccctaacaacgacccg

SEQ ID NO: 38615 - DNA, 50 bp, synthetic construct
  source 1..50: mol_type = other DNA
ataaaacaaaaaataaaaacacaaaaactacaaacaacaaaaccaaacca

SEQ ID NO: 38616 - DNA, 50 bp, synthetic construct
  source 1..50: mol_type = other DNA
ataaaacgaaaaataaaaacgcgaaaactacgaacgacgaaaccgaaccg

SEQ ID NO: 38617 - DNA, 50 bp, synthetic construct
  source 1..50: mol_type = other DNA
aaaattaaaaaccccaaataccactttatcacaaaaccacaaaaaaatca

SEQ ID NO: 38618 - DNA, 50 bp, synthetic construct
  source 1..50: mol_type = other DNA
aaaattaaaaaccccgaataccgctttatcgcgaaaccgcgaaaaaatcg

SEQ ID NO: 38619 - DNA, 50 bp, synthetic construct
  source 1..50: mol_type = other DNA
aaaactacaaaaaaattaaaaaccccaaataccactttatcacaaaacca

SEQ ID NO: 38620 - DNA, 50 bp, synthetic construct
  source 1..50: mol_type = other DNA
aaaactacgaaaaaattaaaaaccccgaataccgctttatcgcgaaaccg

SEQ ID NO: 38621 - DNA, 50 bp, synthetic construct
  source 1..50: mol_type = other DNA
ataaacacaactataaaaccaaaaacaaaaaattaaaatctaacctccca

SEQ ID NO: 38622 - DNA, 50 bp, synthetic construct
  source 1..50: mol_type = other DNA
gtaaacgcgactataaaaccgaaaacgaaaaattaaaatctaacctcccg

SEQ ID NO: 38623 - DNA, 50 bp, synthetic construct
  source 1..50: mol_type = other DNA
ttctctaacacaaaataacaaacataaacacaactataaaaccaaaaaca

SEQ ID NO: 38624 - DNA, 50 bp, synthetic construct
  source 1..50: mol_type = other DNA
ttctctaacgcaaaataacgaacgtaaacgcgactataaaaccgaaaacg

SEQ ID NO: 38625 - DNA, 50 bp, synthetic construct
  source 1..50: mol_type = other DNA
ttacactaaaaaaaccaccaacctaaaaaaacaaatacaaactccttcca

SEQ ID NO: 38626 - DNA, 50 bp, synthetic construct
  source 1..50: mol_type = other DNA
ttacgctaaaaaaaccgccgacctaaaaaaacgaatacgaactccttccg

SEQ ID NO: 38627 - DNA, 50 bp, synthetic construct
  source 1..50: mol_type = other DNA
aaacaaaatccttacctataaaaaatatatatataatacattcacaatca

SEQ ID NO: 38628 - DNA, 50 bp, synthetic construct
  source 1..50: mol_type = other DNA
aaacgaaatccttacctataaaaaatatatatataatacgttcacaatcg

SEQ ID NO: 38629 - DNA, 50 bp, synthetic construct
  source 1..50: mol_type = other DNA
cacataacaaaaacaaaatccttacctataaaaaatatatatataataca

SEQ ID NO: 38630 - DNA, 50 bp, synthetic construct
  source 1..50: mol_type = other DNA
cacataacaaaaacgaaatccttacctataaaaaatatatatataatacg

SEQ ID NO: 38631 - DNA, 50 bp, synthetic construct
  source 1..50: mol_type = other DNA
atttcttctaactacctacccaacaaatttaaaaaaaaccaaaaaaaaca

SEQ ID NO: 38632 - DNA, 50 bp, synthetic construct
  source 1..50: mol_type = other DNA
atttcttctaactacctacccaacaaatttaaaaaaaaccgaaaaaaacg

SEQ ID NO: 38633 - DNA, 50 bp, synthetic construct
  source 1..50: mol_type = other DNA
acaccataactaaacataaaataatacaaatttaaaaataacatactaca

SEQ ID NO: 38634 - DNA, 50 bp, synthetic construct
  source 1..50: mol_type = other DNA
acaccataactaaacataaaataatacgaatttaaaaataacgtactacg

SEQ ID NO: 38635 - DNA, 50 bp, synthetic construct
  source 1..50: mol_type = other DNA
ccaaaaaacccctatcaaaaaccccaaaaaatcaatcccaccttctaaca

SEQ ID NO: 38636 - DNA, 50 bp, synthetic construct
  source 1..50: mol_type = other DNA
ccaaaaaacccctatcaaaaaccccgaaaaatcaatcccaccttctaacg

SEQ ID NO: 38637 - DNA, 50 bp, synthetic construct
  source 1..50: mol_type = other DNA
cacctaataaaatacaaaaaatataataaaaaccccaaactctaaacaca

SEQ ID NO: 38638 - DNA, 50 bp, synthetic construct
  source 1..50: mol_type = other DNA
cacctaataaaatacaaaaaatataataaaaaccccaaactctaaacgcg

SEQ ID NO: 38639 - DNA, 50 bp, synthetic construct
  source 1..50: mol_type = other DNA
cacatttatttaccaaacaactaatccctcaaaaaacaatccttccctca

SEQ ID NO: 38640 - DNA, 50 bp, synthetic construct
  source 1..50: mol_type = other DNA
cacatttatttaccgaacgactaatccctcaaaaaacaatccttccctcg

SEQ ID NO: 38641 - DNA, 50 bp, synthetic construct
  source 1..50: mol_type = other DNA
aaaactaaaaaccaaaatcaaaaaacaaaactcaaacccaccacacaaca

SEQ ID NO: 38642 - DNA, 50 bp, synthetic construct
  source 1..50: mol_type = other DNA
aaaactaaaaaccaaaatcaaaaaacgaaactcgaacccgccacacgacg

SEQ ID NO: 38643 - DNA, 50 bp, synthetic construct
  source 1..50: mol_type = other DNA
acccctaatcaaataaaaatacccctaatcaaaaaaaaatttccccaaca

SEQ ID NO: 38644 - DNA, 50 bp, synthetic construct
  source 1..50: mol_type = other DNA
gcccctaatcgaataaaaatacccctaatcgaaaaaaaatttccccgacg

SEQ ID NO: 38645 - DNA, 50 bp, synthetic construct
  source 1..50: mol_type = other DNA
cccccaaaattcacctaaaaaccaataaaccaaacaaaaccttaaaaaca

SEQ ID NO: 38646 - DNA, 50 bp, synthetic construct
  source 1..50: mol_type = other DNA
cccccgaaattcacctaaaaaccaataaaccaaacgaaaccttaaaaacg

SEQ ID NO: 38647 - DNA, 50 bp, synthetic construct
  source 1..50: mol_type = other DNA
atactccaataactacaaatcataaaacccccaaaacataaactaaccca

SEQ ID NO: 38648 - DNA, 50 bp, synthetic construct
  source 1..50: mol_type = other DNA
atactccgataactacgaatcataaaacccccaaaacgtaaactaacccg

SEQ ID NO: 38649 - DNA, 50 bp, synthetic construct
  source 1..50: mol_type = other DNA
acccaaaacctaacccaaactccaaccaaaatacaacaaatcaatttaca

SEQ ID NO: 38650 - DNA, 50 bp, synthetic construct
  source 1..50: mol_type = other DNA
acccaaaacctaacccaaactccgaccgaaatacaacgaatcaatttacg

SEQ ID NO: 38651 - DNA, 50 bp, synthetic construct
  source 1..50: mol_type = other DNA
tctaaaattatccttatcttccaaaaaaaaccaatccaaacaatactcca

SEQ ID NO: 38652 - DNA, 50 bp, synthetic construct
  source 1..50: mol_type = other DNA
tctaaaattatccttatcttccgaaaaaaaccaatccgaacgatactccg

SEQ ID NO: 38653 - DNA, 50 bp, synthetic construct
  source 1..50: mol_type = other DNA
tctcatcctctaaaattatccttatcttccaaaaaaaaccaatccaaaca

SEQ ID NO: 38654 - DNA, 50 bp, synthetic construct
  source 1..50: mol_type = other DNA
tctcgtcctctaaaattatccttatcttccgaaaaaaaccaatccgaacg

SEQ ID NO: 38655 - DNA, 50 bp, synthetic construct
  source 1..50: mol_type = other DNA
acatcaaccataacatcattctcatcctctaaaattatccttatcttcca

SEQ ID NO: 38656 - DNA, 50 bp, synthetic construct
  source 1..50: mol_type = other DNA
acgtcgaccataacatcattctcgtcctctaaaattatccttatcttccg

SEQ ID NO: 38657 - DNA, 50 bp, synthetic construct
  source 1..50: mol_type = other DNA
aaaaacaaaaataatcctaaaaaacaaaaataataccataaccaacacca

SEQ ID NO: 38658 - DNA, 50 bp, synthetic construct
  source 1..50: mol_type = other DNA
aaaaacaaaaataatcctaaaaaacgaaaataataccataaccgacgccg

SEQ ID NO: 38659 - DNA, 50 bp, synthetic construct
  source 1..50: mol_type = other DNA
ccactacaaatcaaacaccataaaccaaaaccaatctaaaaaactacaca

SEQ ID NO: 38660 - DNA, 50 bp, synthetic construct
  source 1..50: mol_type = other DNA
ccactacaaatcgaacaccataaaccgaaaccgatctaaaaaactacacg

SEQ ID NO: 38661 - DNA, 50 bp, synthetic construct
  source 1..50: mol_type = other DNA
aacaccataaaccaaaaccaatctaaaaaactacacaacctttccaaaca

SEQ ID NO: 38662 - DNA, 50 bp, synthetic construct
  source 1..50: mol_type = other DNA
aacaccataaaccgaaaccgatctaaaaaactacacgacctttccgaacg

SEQ ID NO: 38663 - DNA, 50 bp, synthetic construct
  source 1..50: mol_type = other DNA
aatcaattacaaaaacattattaataaatacaaaacttatactccataca

SEQ ID NO: 38664 - DNA, 50 bp, synthetic construct
  source 1..50: mol_type = other DNA
aatcgattacaaaaacattattaataaatacaaaacttatactccgtacg

SEQ ID NO: 38665 - DNA, 50 bp, synthetic construct
  source 1..50: mol_type = other DNA
aaaccttaaaaccaaaaacaataaaaccaaaaaaaccaatttaaaaccca

SEQ ID NO: 38666 - DNA, 50 bp, synthetic construct
  source 1..50: mol_type = other DNA
aaaccttaaaaccaaaaacgataaaaccgaaaaaaccgatttaaaacccg

SEQ ID NO: 38667 - DNA, 50 bp, synthetic construct
  source 1..50: mol_type = other DNA
accacaaattaaaaaccttaaaaccaaaaacaataaaaccaaaaaaacca

SEQ ID NO: 38668 - DNA, 50 bp, synthetic construct
  source 1..50: mol_type = other DNA
accgcgaattaaaaaccttaaaaccaaaaacgataaaaccgaaaaaaccg

SEQ ID NO: 38669 - DNA, 50 bp, synthetic construct
  source 1..50: mol_type = other DNA
ccaaaataaccataatcatccacactcctaaaatacacaaactaaaacca

SEQ ID NO: 38670 - DNA, 50 bp, synthetic construct
  source 1..50: mol_type = other DNA
ccgaaataaccgtaatcatccacgctcctaaaatacgcaaactaaaaccg

SEQ ID NO: 38671 - DNA, 50 bp, synthetic construct
  source 1..50: mol_type = other DNA
acattccaattccttcttttccttctactcttcaacaacctcaacctaca

SEQ ID NO: 38672 - DNA, 50 bp, synthetic construct
  source 1..50: mol_type = other DNA
acattccaattccttcttttccttctactcttcaacgacctcaacctacg

SEQ ID NO: 38673 - DNA, 50 bp, synthetic construct
  source 1..50: mol_type = other DNA
caaacattcaactacaactaataaaaataaaaaactctactccataacca

SEQ ID NO: 38674 - DNA, 50 bp, synthetic construct
  source 1..50: mol_type = other DNA
caaacgttcaactacaactaataaaaataaaaaactctactccgtaaccg

SEQ ID NO: 38675 - DNA, 50 bp, synthetic construct
  source 1..50: mol_type = other DNA
atataaacttcccaaactaactctacaacaaaataaaaaaaccaaataca

SEQ ID NO: 38676 - DNA, 50 bp, synthetic construct
  source 1..50: mol_type = other DNA
atataaacttcccgaactaactctacgacgaaataaaaaaaccgaatacg

SEQ ID NO: 38677 - DNA, 50 bp, synthetic construct
  source 1..50: mol_type = other DNA
aacttcccaaactaactctacaacaaaataaaaaaaccaaatacaaacca

SEQ ID NO: 38678 - DNA, 50 bp, synthetic construct
  source 1..50: mol_type = other DNA
aacttcccgaactaactctacgacgaaataaaaaaaccgaatacgaaccg

SEQ ID NO: 38679 - DNA, 50 bp, synthetic construct
  source 1..50: mol_type = other DNA
actacactacacaaaacataaaaaaatacctctacaacccctcaaaacca

SEQ ID NO: 38680 - DNA, 50 bp, synthetic construct
  source 1..50: mol_type = other DNA
actacactacgcgaaacgtaaaaaaatacctctacaacccctcaaaaccg

SEQ ID NO: 38681 - DNA, 50 bp, synthetic construct
  source 1..50: mol_type = other DNA
aacaaaactatttaacaaaacaaaaaactactaattacatatcttacaca

SEQ ID NO: 38682 - DNA, 50 bp, synthetic construct
  source 1..50: mol_type = other DNA
aacaaaactatttaacgaaacgaaaaactactaattacgtatcttacgcg

SEQ ID NO: 38683 - DNA, 50 bp, synthetic construct
  source 1..50: mol_type = other DNA
taaacaaaactatttaacaaaacaaaaaactactaattacatatcttaca

SEQ ID NO: 38684 - DNA, 50 bp, synthetic construct
  source 1..50: mol_type = other DNA
taaacaaaactatttaacgaaacgaaaaactactaattacgtatcttacg

SEQ ID NO: 38685 - DNA, 50 bp, synthetic construct
  source 1..50: mol_type = other DNA
taaaaaaatacatcaccaaaacatactaaacaaaactatttaacaaaaca

SEQ ID NO: 38686 - DNA, 50 bp, synthetic construct
  source 1..50: mol_type = other DNA
taaaaaaatacgtcaccgaaacatactaaacaaaactatttaacgaaacg

SEQ ID NO: 38687 - DNA, 50 bp, synthetic construct
  source 1..50: mol_type = other DNA
ttcatcacctttctactaaaacacttctaaaataaaaaaatacatcacca

SEQ ID NO: 38688 - DNA, 50 bp, synthetic construct
  source 1..50: mol_type = other DNA
ttcatcgcctttctactaaaacacttctaaaataaaaaaatacgtcaccg

SEQ ID NO: 38689 - DNA, 50 bp, synthetic construct
  source 1..50: mol_type = other DNA
ccaaaattcatcacctttctactaaaacacttctaaaataaaaaaataca

SEQ ID NO: 38690 - DNA, 50 bp, synthetic construct
  source 1..50: mol_type = other DNA
ccgaaattcatcgcctttctactaaaacacttctaaaataaaaaaatacg

SEQ ID NO: 38691 - DNA, 50 bp, synthetic construct
  source 1..50: mol_type = other DNA
aaaaaaacaaaactaaactaacaaactccataaaaacataaccaacaaca

SEQ ID NO: 38692 - DNA, 50 bp, synthetic construct
  source 1..50: mol_type = other DNA
aaaaaaacgaaactaaactaacgaactccgtaaaaacgtaaccgacaacg

SEQ ID NO: 38693 - DNA, 50 bp, synthetic construct
  source 1..50: mol_type = other DNA
aatataaaacctaaaactaaaaaactaaaccaaaaaaaacccaaaccaca

SEQ ID NO: 38694 - DNA, 50 bp, synthetic construct
  source 1..50: mol_type = other DNA
aatataaaacctaaaactaaaaaactaaaccaaaaaaaacccaaaccgcg

SEQ ID NO: 38695 - DNA, 50 bp, synthetic construct
  source 1..50: mol_type = other DNA
aaaactaaaccaaaaaaaacccaaaccacaaaaataaccactaaaaaaca

SEQ ID NO: 38696 - DNA, 50 bp, synthetic construct
  source 1..50: mol_type = other DNA
aaaactaaaccaaaaaaaacccaaaccgcgaaaataaccactaaaaaacg

SEQ ID NO: 38697 - DNA, 50 bp, synthetic construct
  source 1..50: mol_type = other DNA
actaaaccaaaaaaaacccaaaccacaaaaataaccactaaaaaacaaca

SEQ ID NO: 38698 - DNA, 50 bp, synthetic construct
  source 1..50: mol_type = other DNA
actaaaccaaaaaaaacccaaaccgcgaaaataaccactaaaaaacgacg

SEQ ID NO: 38699 - DNA, 50 bp, synthetic construct
  source 1..50: mol_type = other DNA
aaaaaaaacccaaaccacaaaaataaccactaaaaaacaacacaaaacca

SEQ ID NO: 38700 - DNA, 50 bp, synthetic construct
  source 1..50: mol_type = other DNA
aaaaaaaacccaaaccgcgaaaataaccactaaaaaacgacgcgaaaccg

SEQ ID NO: 38701 - DNA, 50 bp, synthetic construct
  source 1..50: mol_type = other DNA
aaaaccaatttaaaacaaaaaaccaaactcaacctcaacaacaaacctca

SEQ ID NO: 38702 - DNA, 50 bp, synthetic construct
  source 1..50: mol_type = other DNA
aaaaccaatttaaaacaaaaaaccaaactcaacctcgacgacaaacctcg

SEQ ID NO: 38703 - DNA, 50 bp, synthetic construct
  source 1..50: mol_type = other DNA
ctaaaaaataaaaaccaatttaaaacaaaaaaccaaactcaacctcaaca

SEQ ID NO: 38704 - DNA, 50 bp, synthetic construct
  source 1..50: mol_type = other DNA
ctaaaaaataaaaaccaatttaaaacaaaaaaccaaactcaacctcgacg

SEQ ID NO: 38705 - DNA, 50 bp, synthetic construct
  source 1..50: mol_type = other DNA
ccccaacccaacatctttaaaaaaaaacaatctataacttactatcaaca

SEQ ID NO: 38706 - DNA, 50 bp, synthetic construct
  source 1..50: mol_type = other DNA
ccccaacccaacgtctttaaaaaaaaacaatctataacttactatcaacg

SEQ ID NO: 38707 - DNA, 50 bp, synthetic construct
  source 1..50: mol_type = other DNA
attaaaaataatttttttttctctataccaacaaaaatctccctatttca

SEQ ID NO: 38708 - DNA, 50 bp, synthetic construct
  source 1..50: mol_type = other DNA
attaaaaataatttttttttctctataccgacaaaaatctccctatttcg

SEQ ID NO: 38709 - DNA, 50 bp, synthetic construct
  source 1..50: mol_type = other DNA
aaaccctaaaattctaaaccaacctaaacaaaataaaaaaacccctatca

SEQ ID NO: 38710 - DNA, 50 bp, synthetic construct
  source 1..50: mol_type = other DNA
aaaccctaaaattctaaaccaacctaaacgaaataaaaaaacccctatcg

SEQ ID NO: 38711 - DNA, 50 bp, synthetic construct
  source 1..50: mol_type = other DNA
tcccacctcaatttcccaaataactaaaaccaccaataaacactaccaca

SEQ ID NO: 38712 - DNA, 50 bp, synthetic construct
  source 1..50: mol_type = other DNA
tcccacctcaatttcccgaataactaaaaccaccaataaacactaccacg

SEQ ID NO: 38713 - DNA, 50 bp, synthetic construct
  source 1..50: mol_type = other DNA
atacaaatttacaaatcaaatttttcacccccacataactacaatatcca

SEQ ID NO: 38714 - DNA, 50 bp, synthetic construct
  source 1..50: mol_type = other DNA
atacgaatttacaaatcgaatttttcacccccgcgtaactacaatatccg

SEQ ID NO: 38715 - DNA, 50 bp, synthetic construct
  source 1..50: mol_type = other DNA
aaaccaacaaaaaaatataaaactcaaactaaacaaacattacaaccaca

SEQ ID NO: 38716 - DNA, 50 bp, synthetic construct
  source 1..50: mol_type = other DNA
aaaccaacgaaaaaatataaaactcgaactaaacgaacattacaaccacg

SEQ ID NO: 38717 - DNA, 50 bp, synthetic construct
  source 1..50: mol_type = other DNA
aacactttaaaacctaacacaaaaaacaactaatacaaatttacaaatca

SEQ ID NO: 38718 - DNA, 50 bp, synthetic construct
  source 1..50: mol_type = other DNA
aacgctttaaaacctaacgcaaaaaacaactaatacgaatttacaaatcg

SEQ ID NO: 38719 - DNA, 50 bp, synthetic construct
  source 1..50: mol_type = other DNA
taaattcacaccaactacctcctacattaaaccttaaaacattattaaca

SEQ ID NO: 38720 - DNA, 50 bp, synthetic construct
  source 1..50: mol_type = other DNA
taaattcgcaccaactacctcctacgttaaaccttaaaacgttattaacg

SEQ ID NO: 38721 - DNA, 50 bp, synthetic construct
  source 1..50: mol_type = other DNA
aacaatacaaataatcctattcatccctctcattaataccaaaaataaca

SEQ ID NO: 38722 - DNA, 50 bp, synthetic construct
  source 1..50: mol_type = other DNA
aacgatacaaataatcctattcgtccctctcattaataccgaaaataacg

SEQ ID NO: 38723 - DNA, 50 bp, synthetic construct
  source 1..50: mol_type = other DNA
ccaaaacaaaaaaaacttcacaacaactacacactacctaatcctaaaca

SEQ ID NO: 38724 - DNA, 50 bp, synthetic construct
  source 1..50: mol_type = other DNA
ccgaaacaaaaaaaacttcacgacaactacacgctacctaatcctaaacg

SEQ ID NO: 38725 - DNA, 50 bp, synthetic construct
  source 1..50: mol_type = other DNA
aaaacaaaaaaaacttcacaacaactacacactacctaatcctaaacaca

SEQ ID NO: 38726 - DNA, 50 bp, synthetic construct
  source 1..50: mol_type = other DNA
gaaacaaaaaaaacttcacgacaactacacgctacctaatcctaaacgcg

SEQ ID NO: 38727 - DNA, 50 bp, synthetic construct
  source 1..50: mol_type = other DNA
aacacacaaaacttaaacacaacaacaacttcttaaaaaataactaaaca

SEQ ID NO: 38728 - DNA, 50 bp, synthetic construct
  source 1..50: mol_type = other DNA
aacgcgcgaaacttaaacgcgacgacgacttcttaaaaaataactaaacg

SEQ ID NO: 38729 - DNA, 50 bp, synthetic construct
  source 1..50: mol_type = other DNA
aaacacaacaacaacttcttaaaaaataactaaacatacatataacacca

SEQ ID NO: 38730 - DNA, 50 bp, synthetic construct
  source 1..50: mol_type = other DNA
aaacgcgacgacgacttcttaaaaaataactaaacgtacgtataacgccg

SEQ ID NO: 38731 - DNA, 50 bp, synthetic construct
  source 1..50: mol_type = other DNA
tctacccccaactcttacttaaaaaacaaaacaaaaaacaaaaacataca

SEQ ID NO: 38732 - DNA, 50 bp, synthetic construct
  source 1..50: mol_type = other DNA
tctacccccgactcttacttaaaaaacgaaacgaaaaacgaaaacgtacg

SEQ ID NO: 38733 - DNA, 50 bp, synthetic construct
  source 1..50: mol_type = other DNA
aaaatacaaaacaaaaaaacaataaaacatcctaaaaaacatccaactca

SEQ ID NO: 38734 - DNA, 50 bp, synthetic construct
  source 1..50: mol_type = other DNA
aaaatacgaaacgaaaaaacgataaaacgtcctaaaaaacgtccaactcg

SEQ ID NO: 38735 - DNA, 50 bp, synthetic construct
  source 1..50: mol_type = other DNA
caaaacaaaaaaacaataaaacatcctaaaaaacatccaactcataacca

SEQ ID NO: 38736 - DNA, 50 bp, synthetic construct
  source 1..50: mol_type = other DNA
cgaaacgaaaaaacgataaaacgtcctaaaaaacgtccaactcgtaaccg

SEQ ID NO: 38737 - DNA, 50 bp, synthetic construct
  source 1..50: mol_type = other DNA
aaacaataaaacatcctaaaaaacatccaactcataaccaaaaaaactca

SEQ ID NO: 38738 - DNA, 50 bp, synthetic construct
  source 1..50: mol_type = other DNA
aaacgataaaacgtcctaaaaaacgtccaactcgtaaccgaaaaaactcg

SEQ ID NO: 38739 - DNA, 50 bp, synthetic construct
  source 1..50: mol_type = other DNA
aataaaacatcctaaaaaacatccaactcataaccaaaaaaactcaaaca

SEQ ID NO: 38740 - DNA, 50 bp, synthetic construct
  source 1..50: mol_type = other DNA
gataaaacgtcctaaaaaacgtccaactcgtaaccgaaaaaactcgaacg

SEQ ID NO: 38741 - DNA, 50 bp, synthetic construct
  source 1..50: mol_type = other DNA
caaaaacaaatctcccaaaccaaaaaaacaaaaccaaaaactaaaaacca

SEQ ID NO: 38742 - DNA, 50 bp, synthetic construct
  source 1..50: mol_type = other DNA
cgaaaacgaatctcccaaaccaaaaaaacaaaaccaaaaactaaaaaccg

SEQ ID NO: 38743 - DNA, 50 bp, synthetic construct
  source 1..50: mol_type = other DNA
aaacaaatctcccaaaccaaaaaaacaaaaccaaaaactaaaaaccaaca

SEQ ID NO: 38744 - DNA, 50 bp, synthetic construct
  source 1..50: mol_type = other DNA
aaacgaatctcccaaaccaaaaaaacaaaaccaaaaactaaaaaccgacg

SEQ ID NO: 38745 - DNA, 50 bp, synthetic construct
  source 1..50: mol_type = other DNA
atctcccaaaccaaaaaaacaaaaccaaaaactaaaaaccaacaaaaaca

SEQ ID NO: 38746 - DNA, 50 bp, synthetic construct
  source 1..50: mol_type = other DNA
atctcccaaaccaaaaaaacaaaaccaaaaactaaaaaccgacgaaaacg

SEQ ID NO: 38747 - DNA, 50 bp, synthetic construct
  source 1..50: mol_type = other DNA
aaaaaaacaaaaccaaaaactaaaaaccaacaaaaacaaacctaaaacca

SEQ ID NO: 38748 - DNA, 50 bp, synthetic construct
  source 1..50: mol_type = other DNA
aaaaaaacaaaaccaaaaactaaaaaccgacgaaaacgaacctaaaaccg

SEQ ID NO: 38749 - DNA, 50 bp, synthetic construct
  source 1..50: mol_type = other DNA
aaaacaaaaccaaaaactaaaaaccaacaaaaacaaacctaaaaccaaca

SEQ ID NO: 38750 - DNA, 50 bp, synthetic construct
  source 1..50: mol_type = other DNA
aaaacaaaaccaaaaactaaaaaccgacgaaaacgaacctaaaaccgacg

SEQ ID NO: 38751 - DNA, 50 bp, synthetic construct
  source 1..50: mol_type = other DNA
aactaaaaaccaacaaaaacaaacctaaaaccaacactcaataaaaacca

SEQ ID NO: 38752 - DNA, 50 bp, synthetic construct
  source 1..50: mol_type = other DNA
aactaaaaaccgacgaaaacgaacctaaaaccgacgctcaataaaaaccg

SEQ ID NO: 38753 - DNA, 50 bp, synthetic construct
  source 1..50: mol_type = other DNA
aaaattaactcatacaaaaaaacaacaaataaaaccctcaaacaacatca

SEQ ID NO: 38754 - DNA, 50 bp, synthetic construct
  source 1..50: mol_type = other DNA
aaaattaactcgtacaaaaaaacgacgaataaaaccctcgaacaacatcg

SEQ ID NO: 38755 - DNA, 50 bp, synthetic construct
  source 1..50: mol_type = other DNA
accaaaatctaaacaccctctaaaaaattaactcatacaaaaaaacaaca

SEQ ID NO: 38756 - DNA, 50 bp, synthetic construct
  source 1..50: mol_type = other DNA
accgaaatctaaacaccctctaaaaaattaactcgtacaaaaaaacgacg

SEQ ID NO: 38757 - DNA, 50 bp, synthetic construct
  source 1..50: mol_type = other DNA
atcattccaaactttatatcacaaatactcctctatccttatacaaacca

SEQ ID NO: 38758 - DNA, 50 bp, synthetic construct
  source 1..50: mol_type = other DNA
atcgttccgaactttatatcacgaatactcctctatccttatacaaaccg

SEQ ID NO: 38759 - DNA, 50 bp, synthetic construct
  source 1..50: mol_type = other DNA
acaaaaaaactaaaactccaaaacccacaaaaaactaaaccctcctaaca

SEQ ID NO: 38760 - DNA, 50 bp, synthetic construct
  source 1..50: mol_type = other DNA
acaaaaaaactaaaactccgaaacccacgaaaaactaaaccctcctaacg

SEQ ID NO: 38761 - DNA, 50 bp, synthetic construct
  source 1..50: mol_type = other DNA
acatccctcttcccatcccttcaaaaacatcaaaaaaatctaattctcca

SEQ ID NO: 38762 - DNA, 50 bp, synthetic construct
  source 1..50: mol_type = other DNA
acgtccctcttcccatcccttcaaaaacgtcaaaaaaatctaattctccg

SEQ ID NO: 38763 - DNA, 50 bp, synthetic construct
  source 1..50: mol_type = other DNA
ttcccatcccttcaaaaacatcaaaaaaatctaattctccataaatctca

SEQ ID NO: 38764 - DNA, 50 bp, synthetic construct
  source 1..50: mol_type = other DNA
ttcccatcccttcaaaaacgtcaaaaaaatctaattctccgtaaatctcg

SEQ ID NO: 38765 - DNA, 50 bp, synthetic construct
  source 1..50: mol_type = other DNA
ctcattcaattaaactttcatcaaatcacatcccactaaactaaaaaaca

SEQ ID NO: 38766 - DNA, 50 bp, synthetic construct
  source 1..50: mol_type = other DNA
ctcgttcaattaaactttcgtcgaatcgcatcccgctaaactaaaaaacg

SEQ ID NO: 38767 - DNA, 50 bp, synthetic construct
  source 1..50: mol_type = other DNA
acaaaatctaaacacctcattcaattaaactttcatcaaatcacatccca

SEQ ID NO: 38768 - DNA, 50 bp, synthetic construct
  source 1..50: mol_type = other DNA
acaaaatctaaacacctcgttcaattaaactttcgtcgaatcgcatcccg

SEQ ID NO: 38769 - DNA, 50 bp, synthetic construct
  source 1..50: mol_type = other DNA
atactaataaaaacaaaatctaaacacctcattcaattaaactttcatca

SEQ ID NO: 38770 - DNA, 50 bp, synthetic construct
  source 1..50: mol_type = other DNA
atactaataaaaacaaaatctaaacacctcgttcaattaaactttcgtcg

SEQ ID NO: 38771 - DNA, 50 bp, synthetic construct
  source 1..50: mol_type = other DNA
ccaaaaaaatatcaacacccaatatacctaactaacaaaaaaaatcaaca

SEQ ID NO: 38772 - DNA, 50 bp, synthetic construct
  source 1..50: mol_type = other DNA
ccaaaaaaatatcgacgcccgatatacctaactaacgaaaaaaatcaacg

SEQ ID NO: 38773 - DNA, 50 bp, synthetic construct
  source 1..50: mol_type = other DNA
aaacactaaaaaaccaaaaaaatatcaacacccaatatacctaactaaca

SEQ ID NO: 38774 - DNA, 50 bp, synthetic construct
  source 1..50: mol_type = other DNA
aaacgctaaaaaaccaaaaaaatatcgacgcccgatatacctaactaacg

SEQ ID NO: 38775 - DNA, 50 bp, synthetic construct
  source 1..50: mol_type = other DNA
caacaaaaaacaaacttctaaaacactaaaaaaccaaaaaaatatcaaca

SEQ ID NO: 38776 - DNA, 50 bp, synthetic construct
  source 1..50: mol_type = other DNA
cgacgaaaaacaaacttctaaaacgctaaaaaaccaaaaaaatatcgacg

SEQ ID NO: 38777 - DNA, 50 bp, synthetic construct
  source 1..50: mol_type = other DNA
acaaacaaaaaataaacccaactaaaaaacaaacaaaaccactaaaacca

SEQ ID NO: 38778 - DNA, 50 bp, synthetic construct
  source 1..50: mol_type = other DNA
acgaacaaaaaataaacccgactaaaaaacgaacgaaaccactaaaaccg

SEQ ID NO: 38779 - DNA, 50 bp, synthetic construct
  source 1..50: mol_type = other DNA
ataacaaaaaaacaatatctaaccaccctccaaaaacaaaattaatcaca

SEQ ID NO: 38780 - DNA, 50 bp, synthetic construct
  source 1..50: mol_type = other DNA
ataacgaaaaaacgatatctaaccgccctccgaaaacgaaattaatcgcg

SEQ ID NO: 38781 - DNA, 50 bp, synthetic construct
  source 1..50: mol_type = other DNA
attaacaaaaaaataacaaaaaaacaatatctaaccaccctccaaaaaca

SEQ ID NO: 38782 - DNA, 50 bp, synthetic construct
  source 1..50: mol_type = other DNA
attaacgaaaaaataacgaaaaaacgatatctaaccgccctccgaaaacg

SEQ ID NO: 38783 - DNA, 50 bp, synthetic construct
  source 1..50: mol_type = other DNA
ctctacttctatatatatttcttcctctacccaatatcaacaactatcca

SEQ ID NO: 38784 - DNA, 50 bp, synthetic construct
  source 1..50: mol_type = other DNA
ctctacttctatatatatttcttcctctacccgatatcgacgactatccg

SEQ ID NO: 38785 - DNA, 50 bp, synthetic construct
  source 1..50: mol_type = other DNA
aaatcaaaaaaatacaaaatacaccctcaaaaacaaaatcacccaaacca

SEQ ID NO: 38786 - DNA, 50 bp, synthetic construct
  source 1..50: mol_type = other DNA
aaatcaaaaaaatacgaaatacgccctcgaaaacaaaatcgcccaaaccg

SEQ ID NO: 38787 - DNA, 50 bp, synthetic construct
  source 1..50: mol_type = other DNA
ttaaaaacaaaatcaaaaaaatacaaaatacaccctcaaaaacaaaatca

SEQ ID NO: 38788 - DNA, 50 bp, synthetic construct
  source 1..50: mol_type = other DNA
ttaaaaacaaaatcaaaaaaatacgaaatacgccctcgaaaacaaaatcg

SEQ ID NO: 38789 - DNA, 50 bp, synthetic construct
  source 1..50: mol_type = other DNA
ttaactattaacaaaataaaaaaataacttccccatctaaacaaccccca

SEQ ID NO: 38790 - DNA, 50 bp, synthetic construct
  source 1..50: mol_type = other DNA
ttaactattaacaaaataaaaaaataacttccccgtctaaacaacccccg

SEQ ID NO: 38791 - DNA, 50 bp, synthetic construct
  source 1..50: mol_type = other DNA
attccctccaaacaccaaaaaataaatttccaaatcacacaatacataca

SEQ ID NO: 38792 - DNA, 50 bp, synthetic construct
  source 1..50: mol_type = other DNA
attccctccgaacaccaaaaaataaatttccgaatcgcgcaatacatacg

SEQ ID NO: 38793 - DNA, 50 bp, synthetic construct
  source 1..50: mol_type = other DNA
aaaaaataaatttccaaatcacacaatacatacataaaaatacatcccca

SEQ ID NO: 38794 - DNA, 50 bp, synthetic construct
  source 1..50: mol_type = other DNA
aaaaaataaatttccgaatcgcgcaatacatacgtaaaaatacgtccccg

SEQ ID NO: 38795 - DNA, 50 bp, synthetic construct
  source 1..50: mol_type = other DNA
cttaaaccctaaaattcaaaaacaacctaaacaacaccacaaaacctcca

SEQ ID NO: 38796 - DNA, 50 bp, synthetic construct
  source 1..50: mol_type = other DNA
cttaaaccctaaaattcgaaaacaacctaaacaacaccgcgaaacctccg

SEQ ID NO: 38797 - DNA, 50 bp, synthetic construct
  source 1..50: mol_type = other DNA
acaaaatcacttaaaccctaaaattcaaaaacaacctaaacaacaccaca

SEQ ID NO: 38798 - DNA, 50 bp, synthetic construct
  source 1..50: mol_type = other DNA
acaaaatcacttaaaccctaaaattcgaaaacaacctaaacaacaccgcg

SEQ ID NO: 38799 - DNA, 50 bp, synthetic construct
  source 1..50: mol_type = other DNA
tttttttcctttaaaacaaaaatctcacaatactacccaaactaccctca

SEQ ID NO: 38800 - DNA, 50 bp, synthetic construct
  source 1..50: mol_type = other DNA
tttttttcctttaaaacgaaaatctcgcgatactacccaaactaccctcg

SEQ ID NO: 38801 - DNA, 50 bp, synthetic construct
  source 1..50: mol_type = other DNA
ttaaaaccaaacataataacatacacttataaacccaactaatcacaaca

SEQ ID NO: 38802 - DNA, 50 bp, synthetic construct
  source 1..50: mol_type = other DNA
ttaaaaccaaacgtaataacatacgcttataaacccaactaatcgcgacg

SEQ ID NO: 38803 - DNA, 50 bp, synthetic construct
  source 1..50: mol_type = other DNA
ttacctacacaataaacaatcaacataaccaaaatatccaataccaatca

SEQ ID NO: 38804 - DNA, 50 bp, synthetic construct
  source 1..50: mol_type = other DNA
ttacctacacgataaacaatcaacataaccaaaatatccaataccgatcg

SEQ ID NO: 38805 - DNA, 50 bp, synthetic construct
  source 1..50: mol_type = other DNA
tatatatacataactccttatacatatcttatattatacaaaattataca

SEQ ID NO: 38806 - DNA, 50 bp, synthetic construct
  source 1..50: mol_type = other DNA
tatatatacataactccttatacgtatcttatattatacaaaattatacg

SEQ ID NO: 38807 - DNA, 50 bp, synthetic construct
  source 1..50: mol_type = other DNA
ctctaaaaactaatactcaaattaaataaataaatcaaaaccaaaaaaca

SEQ ID NO: 38808 - DNA, 50 bp, synthetic construct
  source 1..50: mol_type = other DNA
ctctaaaaactaatactcgaattaaataaataaatcgaaaccgaaaaacg

SEQ ID NO: 38809 - DNA, 50 bp, synthetic construct
  source 1..50: mol_type = other DNA
aacacaatctcaataaacaatataaatttaactaaaaaccaaacacccca

SEQ ID NO: 38810 - DNA, 50 bp, synthetic construct
  source 1..50: mol_type = other DNA
gacgcaatctcgataaacgatataaatttaactaaaaaccgaacaccccg

SEQ ID NO: 38811 - DNA, 50 bp, synthetic construct
  source 1..50: mol_type = other DNA
acaaataacaacacaatctcaataaacaatataaatttaactaaaaacca

SEQ ID NO: 38812 - DNA, 50 bp, synthetic construct
  source 1..50: mol_type = other DNA
acaaataacgacgcaatctcgataaacgatataaatttaactaaaaaccg

SEQ ID NO: 38813 - DNA, 50 bp, synthetic construct
  source 1..50: mol_type = other DNA
aactcccaaaaccaaactaataaaaaactacaaataacaacacaatctca

SEQ ID NO: 38814 - DNA, 50 bp, synthetic construct
  source 1..50: mol_type = other DNA
aactcccaaaaccgaactaataaaaaactacaaataacgacgcaatctcg

SEQ ID NO: 38815 - DNA, 50 bp, synthetic construct
  source 1..50: mol_type = other DNA
aaacatcaaactcccaaaaccaaactaataaaaaactacaaataacaaca

SEQ ID NO: 38816 - DNA, 50 bp, synthetic construct
  source 1..50: mol_type = other DNA
gaacgtcgaactcccaaaaccgaactaataaaaaactacaaataacgacg

SEQ ID NO: 38817 - DNA, 50 bp, synthetic construct
  source 1..50: mol_type = other DNA
ccaccaacaacaaaaatcaaacatttacaaacaaaaataacaaaatatca

SEQ ID NO: 38818 - DNA, 50 bp, synthetic construct
  source 1..50: mol_type = other DNA
ccaccaacgacgaaaatcgaacgtttacaaacaaaaataacaaaatatcg

SEQ ID NO: 38819 - DNA, 50 bp, synthetic construct
  source 1..50: mol_type = other DNA
aatacaataacacttaacttactacaacctccacctcccaaattcaaaca

SEQ ID NO: 38820 - DNA, 50 bp, synthetic construct
  source 1..50: mol_type = other DNA
aatacaataacgcttaacttactacaacctccacctcccgaattcaaacg

SEQ ID NO: 38821 - DNA, 50 bp, synthetic construct
  source 1..50: mol_type = other DNA
tacactaaaccaaaatcataccactacactacaacctaaacaacaaaaca

SEQ ID NO: 38822 - DNA, 50 bp, synthetic construct
  source 1..50: mol_type = other DNA
tacactaaaccgaaatcgtaccactacactacaacctaaacgacaaaacg

SEQ ID NO: 38823 - DNA, 50 bp, synthetic construct
  source 1..50: mol_type = other DNA
acaaaacttacactaaaccaaaatcataccactacactacaacctaaaca

SEQ ID NO: 38824 - DNA, 50 bp, synthetic construct
  source 1..50: mol_type = other DNA
acgaaacttacactaaaccgaaatcgtaccactacactacaacctaaacg

SEQ ID NO: 38825 - DNA, 50 bp, synthetic construct
  source 1..50: mol_type = other DNA
cctaaattactttaaaaatcaaataatataaccaaacacaataactcaca

SEQ ID NO: 38826 - DNA, 50 bp, synthetic construct
  source 1..50: mol_type = other DNA
cctaaattactttaaaaatcgaataatataaccgaacgcgataactcacg

SEQ ID NO: 38827 - DNA, 50 bp, synthetic construct
  source 1..50: mol_type = other DNA
atttcaaaaaacttaacaaaccaactcttatcccaaattcaaatcactca

SEQ ID NO: 38828 - DNA, 50 bp, synthetic construct
  source 1..50: mol_type = other DNA
atttcaaaaaacttaacgaaccgactcttatcccgaattcaaatcactcg

SEQ ID NO: 38829 - DNA, 50 bp, synthetic construct
  source 1..50: mol_type = other DNA
taaacctaaaaaaacctaccaaaccaccataaaaactatcaaccaaccca

SEQ ID NO: 38830 - DNA, 50 bp, synthetic construct
  source 1..50: mol_type = other DNA
taaacctaaaaaaacctaccgaaccaccgtaaaaactatcgaccaacccg

SEQ ID NO: 38831 - DNA, 50 bp, synthetic construct
  source 1..50: mol_type = other DNA
taaaataaatcctcacaccctaacaaatccacaaataaaaaatatacaca

SEQ ID NO: 38832 - DNA, 50 bp, synthetic construct
  source 1..50: mol_type = other DNA
taaaataaatcctcacgccctaacgaatccacgaataaaaaatatacgcg

SEQ ID NO: 38833 - DNA, 50 bp, synthetic construct
  source 1..50: mol_type = other DNA
aactactaataatcacataaaataaatcctcacaccctaacaaatccaca

SEQ ID NO: 38834 - DNA, 50 bp, synthetic construct
  source 1..50: mol_type = other DNA
aactactaataatcacgtaaaataaatcctcacgccctaacgaatccacg

SEQ ID NO: 38835 - DNA, 50 bp, synthetic construct
  source 1..50: mol_type = other DNA
caataaataaactaataccccaaaaaaatcaaacacatacacaatactca

SEQ ID NO: 38836 - DNA, 50 bp, synthetic construct
  source 1..50: mol_type = other DNA
caataaataaactaataccccgaaaaaatcgaacgcatacgcaatactcg

SEQ ID NO: 38837 - DNA, 50 bp, synthetic construct
  source 1..50: mol_type = other DNA
aaaaaaatcaaacacatacacaatactcaaattttttacttaactaccca

SEQ ID NO: 38838 - DNA, 50 bp, synthetic construct
  source 1..50: mol_type = other DNA
gaaaaaatcgaacgcatacgcaatactcgaattttttacttaactacccg

SEQ ID NO: 38839 - DNA, 50 bp, synthetic construct
  source 1..50: mol_type = other DNA
catacacaatactcaaattttttacttaactacccaaaataaaacaacca

SEQ ID NO: 38840 - DNA, 50 bp, synthetic construct
  source 1..50: mol_type = other DNA
catacgcaatactcgaattttttacttaactacccgaaataaaacgaccg

SEQ ID NO: 38841 - DNA, 50 bp, synthetic construct
  source 1..50: mol_type = other DNA
tactcaaattttttacttaactacccaaaataaaacaaccaaattaaaca

SEQ ID NO: 38842 - DNA, 50 bp, synthetic construct
  source 1..50: mol_type = other DNA
tactcgaattttttacttaactacccgaaataaaacgaccgaattaaacg

SEQ ID NO: 38843 - DNA, 50 bp, synthetic construct
  source 1..50: mol_type = other DNA
aaaaaaaacaaaacataaaaaatcccaaaaaaacaaacaccccttctcca

SEQ ID NO: 38844 - DNA, 50 bp, synthetic construct
  source 1..50: mol_type = other DNA
aaaaaaaacgaaacataaaaaatcccaaaaaaacgaacgccccttctccg

SEQ ID NO: 38845 - DNA, 50 bp, synthetic construct
  source 1..50: mol_type = other DNA
aaccttaaactaatccaaaaaccaactcaacatatctaaaaaaaacccca

SEQ ID NO: 38846 - DNA, 50 bp, synthetic construct
  source 1..50: mol_type = other DNA
aaccttaaactaatccaaaaaccgactcgacgtatctaaaaaaaaccccg

SEQ ID NO: 38847 - DNA, 50 bp, synthetic construct
  source 1..50: mol_type = other DNA
ctaatccaaaaaccaactcaacatatctaaaaaaaaccccaaaaaaaaca

SEQ ID NO: 38848 - DNA, 50 bp, synthetic construct
  source 1..50: mol_type = other DNA
ctaatccaaaaaccgactcgacgtatctaaaaaaaaccccgaaaaaaacg

SEQ ID NO: 38849 - DNA, 50 bp, synthetic construct
  source 1..50: mol_type = other DNA
acccacaaaacacaaattctataaaaaaacattaaaaaaattcaattcca

SEQ ID NO: 38850 - DNA, 50 bp, synthetic construct
  source 1..50: mol_type = other DNA
acccacaaaacgcgaattctataaaaaaacgttaaaaaaattcgattccg

SEQ ID NO: 38851 - DNA, 50 bp, synthetic construct
  source 1..50: mol_type = other DNA
tatttaacaacacctacaactcccaaaacacaacataaaaaacaaaaaca

SEQ ID NO: 38852 - DNA, 50 bp, synthetic construct
  source 1..50: mol_type = other DNA
tatttaacgacacctacaactcccaaaacgcaacgtaaaaaacgaaaacg

SEQ ID NO: 38853 - DNA, 50 bp, synthetic construct
  source 1..50: mol_type = other DNA
caaaaacaaaaacaactaaccaaaccaaaatctataattaataaaaaaca

SEQ ID NO: 38854 - DNA, 50 bp, synthetic construct
  source 1..50: mol_type = other DNA
cgaaaacgaaaacaactaaccaaaccgaaatctataattaataaaaaacg

SEQ ID NO: 38855 - DNA, 50 bp, synthetic construct
  source 1..50: mol_type = other DNA
aacaaaccaattaaaaaaattattattaaaccatcccaaaaacccaatca

SEQ ID NO: 38856 - DNA, 50 bp, synthetic construct
  source 1..50: mol_type = other DNA
gacgaaccaattaaaaaaattattattaaaccgtcccgaaaacccgatcg

SEQ ID NO: 38857 - DNA, 50 bp, synthetic construct
  source 1..50: mol_type = other DNA
aaaataactcaaaaaatccaacaaactccttacctccaaaaccaaaacca

SEQ ID NO: 38858 - DNA, 50 bp, synthetic construct
  source 1..50: mol_type = other DNA
gaaataactcaaaaaatccaacgaactccttacctccgaaaccaaaaccg

SEQ ID NO: 38859 - DNA, 50 bp, synthetic construct
  source 1..50: mol_type = other DNA
acctaaaataaaaaccaaaaactcataaacaaaaaacaaccctaacccca

SEQ ID NO: 38860 - DNA, 50 bp, synthetic construct
  source 1..50: mol_type = other DNA
acctaaaataaaaaccaaaaactcataaacgaaaaacgaccctaaccccg

SEQ ID NO: 38861 - DNA, 50 bp, synthetic construct
  source 1..50: mol_type = other DNA
caaaaactcataaacaaaaaacaaccctaaccccaaaaataaaaaaccca

SEQ ID NO: 38862 - DNA, 50 bp, synthetic construct
  source 1..50: mol_type = other DNA
caaaaactcataaacgaaaaacgaccctaaccccgaaaataaaaaacccg

SEQ ID NO: 38863 - DNA, 50 bp, synthetic construct
  source 1..50: mol_type = other DNA
cctaaaataacaaataatcccaaattaccactattacccccaaaaaaaca

SEQ ID NO: 38864 - DNA, 50 bp, synthetic construct
  source 1..50: mol_type = other DNA
cctaaaataacgaataatcccgaattaccactattacccccaaaaaaacg

SEQ ID NO: 38865 - DNA, 50 bp, synthetic construct
  source 1..50: mol_type = other DNA
ttaaaacatcaaaaaaattcattttccaaacaactcctccctttccccca

SEQ ID NO: 38866 - DNA, 50 bp, synthetic construct
  source 1..50: mol_type = other DNA
ttaaaacatcaaaaaaattcattttccgaacgactcctccctttcccccg

SEQ ID NO: 38867 - DNA, 50 bp, synthetic construct
  source 1..50: mol_type = other DNA
taaaataaaaataaaatcaaaatcaaattttcccacactttattaccaca

SEQ ID NO: 38868 - DNA, 50 bp, synthetic construct
  source 1..50: mol_type = other DNA
taaaataaaaataaaatcaaaatcgaattttcccgcgctttattaccacg

SEQ ID NO: 38869 - DNA, 50 bp, synthetic construct
  source 1..50: mol_type = other DNA
aaaaaaaaccaccaactccatttcccatttaaaaactccccttttcccca

SEQ ID NO: 38870 - DNA, 50 bp, synthetic construct
  source 1..50: mol_type = other DNA
aaaaaaaaccgccaactccatttcccatttaaaaactccccttttccccg

SEQ ID NO: 38871 - DNA, 50 bp, synthetic construct
  source 1..50: mol_type = other DNA
caccatataatctaataaataaaatcctcacacaattcaactcctaaaca

SEQ ID NO: 38872 - DNA, 50 bp, synthetic construct
  source 1..50: mol_type = other DNA
cgccatataatctaataaataaaatcctcgcgcgattcaactcctaaacg

SEQ ID NO: 38873 - DNA, 50 bp, synthetic construct
  source 1..50: mol_type = other DNA
tcttcccaccatctaaatcaccatataatctaataaataaaatcctcaca

SEQ ID NO: 38874 - DNA, 50 bp, synthetic construct
  source 1..50: mol_type = other DNA
tcttcccaccgtctaaatcgccatataatctaataaataaaatcctcgcg

SEQ ID NO: 38875 - DNA, 50 bp, synthetic construct
  source 1..50: mol_type = other DNA
ttcacaaaaataaactacaacttcaaacttcaaacaaccaataaaaaaca

SEQ ID NO: 38876 - DNA, 50 bp, synthetic construct
  source 1..50: mol_type = other DNA
ttcgcgaaaataaactacaacttcaaacttcgaacgaccaataaaaaacg

SEQ ID NO: 38877 - DNA, 50 bp, synthetic construct
  source 1..50: mol_type = other DNA
aaataaactacaacttcaaacttcaaacaaccaataaaaaacaaaaaaca

SEQ ID NO: 38878 - DNA, 50 bp, synthetic construct
  source 1..50: mol_type = other DNA
aaataaactacaacttcaaacttcgaacgaccaataaaaaacgaaaaacg

SEQ ID NO: 38879 - DNA, 50 bp, synthetic construct
  source 1..50: mol_type = other DNA
actacaacttcaaacttcaaacaaccaataaaaaacaaaaaacaaaaaca

SEQ ID NO: 38880 - DNA, 50 bp, synthetic construct
  source 1..50: mol_type = other DNA
actacaacttcaaacttcgaacgaccaataaaaaacgaaaaacgaaaacg

SEQ ID NO: 38881 - DNA, 50 bp, synthetic construct
  source 1..50: mol_type = other DNA
caacaataacaaaaaccaatcatttacaaaactcataaataaaacaaaca

SEQ ID NO: 38882 - DNA, 50 bp, synthetic construct
  source 1..50: mol_type = other DNA
cgacaataacgaaaaccaatcgtttacgaaactcgtaaataaaacaaacg

SEQ ID NO: 38883 - DNA, 50 bp, synthetic construct
  source 1..50: mol_type = other DNA
aacaaaaaccaatcatttacaaaactcataaataaaacaaacaaacccca

SEQ ID NO: 38884 - DNA, 50 bp, synthetic construct
  source 1..50: mol_type = other DNA
aacgaaaaccaatcgtttacgaaactcgtaaataaaacaaacgaaccccg

SEQ ID NO: 38885 - DNA, 50 bp, synthetic construct
  source 1..50: mol_type = other DNA
ctcaaaactaaccccacacaatcctcttatactcattaaacaaaaaacca

SEQ ID NO: 38886 - DNA, 50 bp, synthetic construct
  source 1..50: mol_type = other DNA
ctcgaaactaaccccgcacaatcctcttatactcattaaacaaaaaaccg

SEQ ID NO: 38887 - DNA, 50 bp, synthetic construct
  source 1..50: mol_type = other DNA
tttaaaaccaacccaatacaaaactaaaaaaaacacaaaactaaacaaca

SEQ ID NO: 38888 - DNA, 50 bp, synthetic construct
  source 1..50: mol_type = other DNA
tttaaaaccaacccaatacgaaactaaaaaaaacacaaaactaaacgacg

SEQ ID NO: 38889 - DNA, 50 bp, synthetic construct
  source 1..50: mol_type = other DNA
aacacaaaactaaacaacaaaaacaaaaaccaataacaaatacaaaaaca

SEQ ID NO: 38890 - DNA, 50 bp, synthetic construct
  source 1..50: mol_type = other DNA
aacacaaaactaaacgacgaaaacaaaaaccaataacgaatacgaaaacg

SEQ ID NO: 38891 - DNA, 50 bp, synthetic construct
  source 1..50: mol_type = other DNA
caaaaaaaacaacaataactacaacaactaaaacaaaataaaaaccacca

SEQ ID NO: 38892 - DNA, 50 bp, synthetic construct
  source 1..50: mol_type = other DNA
cgaaaaaaacgacgataactacaacgactaaaacgaaataaaaaccgccg

SEQ ID NO: 38893 - DNA, 50 bp, synthetic construct
  source 1..50: mol_type = other DNA
aacaacaataactacaacaactaaaacaaaataaaaaccaccaaatctca

SEQ ID NO: 38894 - DNA, 50 bp, synthetic construct
  source 1..50: mol_type = other DNA
aacgacgataactacaacgactaaaacgaaataaaaaccgccgaatctcg

SEQ ID NO: 38895 - DNA, 50 bp, synthetic construct
  source 1..50: mol_type = other DNA
aaaaacaaatatttaccccaaacacacttacttattccactcctaataca

SEQ ID NO: 38896 - DNA, 50 bp, synthetic construct
  source 1..50: mol_type = other DNA
aaaaacgaatatttaccccaaacacgcttacttattccgctcctaatacg

SEQ ID NO: 38897 - DNA, 50 bp, synthetic construct
  source 1..50: mol_type = other DNA
aataaaaaccaccaaatctcaacccacaccaaaaacaaaacaaataaaca

SEQ ID NO: 38898 - DNA, 50 bp, synthetic construct
  source 1..50: mol_type = other DNA
aataaaaaccgccgaatctcgacccgcaccaaaaacgaaacaaataaacg

SEQ ID NO: 38899 - DNA, 50 bp, synthetic construct
  source 1..50: mol_type = other DNA
caacccacaccaaaaacaaaacaaataaacatacctaaaataaataccca

SEQ ID NO: 38900 - DNA, 50 bp, synthetic construct
  source 1..50: mol_type = other DNA
cgacccgcaccaaaaacgaaacaaataaacgtacctaaaataaatacccg

SEQ ID NO: 38901 - DNA, 50 bp, synthetic construct
  source 1..50: mol_type = other DNA
ataaaaacaatatctaaaccttcctaaaaaccaccccaaaaaacaacaca

SEQ ID NO: 38902 - DNA, 50 bp, synthetic construct
  source 1..50: mol_type = other DNA
ataaaaacgatatctaaaccttcctaaaaaccgccccaaaaaacgacgcg

SEQ ID NO: 38903 - DNA, 50 bp, synthetic construct
  source 1..50: mol_type = other DNA
cccatccaccccaataaataaaaacaatatctaaaccttcctaaaaacca

SEQ ID NO: 38904 - DNA, 50 bp, synthetic construct
  source 1..50: mol_type = other DNA
cccatccgccccaataaataaaaacgatatctaaaccttcctaaaaaccg

SEQ ID NO: 38905 - DNA, 50 bp, synthetic construct
  source 1..50: mol_type = other DNA
acttacaacaaaccaaaaatttcacccatccaccccaataaataaaaaca

SEQ ID NO: 38906 - DNA, 50 bp, synthetic construct
  source 1..50: mol_type = other DNA
acttacaacaaaccaaaaatttcgcccatccgccccaataaataaaaacg

SEQ ID NO: 38907 - DNA, 50 bp, synthetic construct
  source 1..50: mol_type = other DNA
tccataaccaaataaacccccaaaaaaatcaaaaaccccaaatcctaaca

SEQ ID NO: 38908 - DNA, 50 bp, synthetic construct
  source 1..50: mol_type = other DNA
tccgtaaccgaataaacccccaaaaaaatcgaaaaccccaaatcctaacg

SEQ ID NO: 38909 - DNA, 50 bp, synthetic construct
  source 1..50: mol_type = other DNA
tcaaaaaacacccaaaatacaacccaaaaattaaaaactacaaaatatca

SEQ ID NO: 38910 - DNA, 50 bp, synthetic construct
  source 1..50: mol_type = other DNA
tcgaaaaacacccgaaatacgacccgaaaattaaaaactacgaaatatcg

SEQ ID NO: 38911 - DNA, 50 bp, synthetic construct
  source 1..50: mol_type = other DNA
aaaaaacacccaaaatacaacccaaaaattaaaaactacaaaatatcaca

SEQ ID NO: 38912 - DNA, 50 bp, synthetic construct
  source 1..50: mol_type = other DNA
gaaaaacacccgaaatacgacccgaaaattaaaaactacgaaatatcgcg

SEQ ID NO: 38913 - DNA, 50 bp, synthetic construct
  source 1..50: mol_type = other DNA
aaaaattaaaaactacaaaatatcacaacctaaaataatatccattccca

SEQ ID NO: 38914 - DNA, 50 bp, synthetic construct
  source 1..50: mol_type = other DNA
gaaaattaaaaactacgaaatatcgcgacctaaaataatatccgttcccg

SEQ ID NO: 38915 - DNA, 50 bp, synthetic construct
  source 1..50: mol_type = other DNA
ctacaaaatatcacaacctaaaataatatccattcccaaaaataaaaaca

SEQ ID NO: 38916 - DNA, 50 bp, synthetic construct
  source 1..50: mol_type = other DNA
ctacgaaatatcgcgacctaaaataatatccgttcccgaaaataaaaacg

SEQ ID NO: 38917 - DNA, 50 bp, synthetic construct
  source 1..50: mol_type = other DNA
aaaaatacacaaaaaaccaaaaacacaaacctaaatcttacccaaaccca

SEQ ID NO: 38918 - DNA, 50 bp, synthetic construct
  source 1..50: mol_type = other DNA
aaaaatacgcaaaaaaccgaaaacgcaaacctaaatcttacccgaacccg

SEQ ID NO: 38919 - DNA, 50 bp, synthetic construct
  source 1..50: mol_type = other DNA
cctaaaaactcttaaaactttatcttttaaatctaacctcccccacccca

SEQ ID NO: 38920 - DNA, 50 bp, synthetic construct
  source 1..50: mol_type = other DNA
cctaaaaactcttaaaactttatcttttaaatctaacctcccccaccccg

SEQ ID NO: 38921 - DNA, 50 bp, synthetic construct
  source 1..50: mol_type = other DNA
acaccaaaaaaacaatttcataatcaaactcaaataaaaaaaactataca

SEQ ID NO: 38922 - DNA, 50 bp, synthetic construct
  source 1..50: mol_type = other DNA
acaccaaaaaaacaatttcgtaatcgaactcaaataaaaaaaactatacg

SEQ ID NO: 38923 - DNA, 50 bp, synthetic construct
  source 1..50: mol_type = other DNA
acaaccaataaaacccaaaaacaatcactactactaaaacaacaatatca

SEQ ID NO: 38924 - DNA, 50 bp, synthetic construct
  source 1..50: mol_type = other DNA
acgaccaataaaacccgaaaacgatcgctactactaaaacgacaatatcg

SEQ ID NO: 38925 - DNA, 50 bp, synthetic construct
  source 1..50: mol_type = other DNA
aaaacacaaacaaccaataaaacccaaaaacaatcactactactaaaaca

SEQ ID NO: 38926 - DNA, 50 bp, synthetic construct
  source 1..50: mol_type = other DNA
aaaacgcaaacgaccaataaaacccgaaaacgatcgctactactaaaacg

SEQ ID NO: 38927 - DNA, 50 bp, synthetic construct
  source 1..50: mol_type = other DNA
taaaataaaataaaattccccaacaaatctcaatataatattcttctcca

SEQ ID NO: 38928 - DNA, 50 bp, synthetic construct
  source 1..50: mol_type = other DNA
taaaataaaataaaattccccaacaaatctcgatataatattcttctccg

SEQ ID NO: 38929 - DNA, 50 bp, synthetic construct
  source 1..50: mol_type = other DNA
tcaaaccataaaataaacactaaattcctaaaaaaacacacaaaaaaaca

SEQ ID NO: 38930 - DNA, 50 bp, synthetic construct
  source 1..50: mol_type = other DNA
tcaaaccgtaaaataaacgctaaattcctaaaaaaacgcgcaaaaaaacg

SEQ ID NO: 38931 - DNA, 50 bp, synthetic construct
  source 1..50: mol_type = other DNA
aaccataaaataaacactaaattcctaaaaaaacacacaaaaaaacaaca

SEQ ID NO: 38932 - DNA, 50 bp, synthetic construct
  source 1..50: mol_type = other DNA
aaccgtaaaataaacgctaaattcctaaaaaaacgcgcaaaaaaacgacg

SEQ ID NO: 38933 - DNA, 50 bp, synthetic construct
  source 1..50: mol_type = other DNA
ataaaataaacactaaattcctaaaaaaacacacaaaaaaacaacaaaca

SEQ ID NO: 38934 - DNA, 50 bp, synthetic construct
  source 1..50: mol_type = other DNA
gtaaaataaacgctaaattcctaaaaaaacgcgcaaaaaaacgacgaacg

SEQ ID NO: 38935 - DNA, 50 bp, synthetic construct
  source 1..50: mol_type = other DNA
tcttaaaaaacaatacaaaatttaaactccttaacatttcaaaaataaca

SEQ ID NO: 38936 - DNA, 50 bp, synthetic construct
  source 1..50: mol_type = other DNA
tcttaaaaaacgatacgaaatttaaactccttaacatttcgaaaataacg

SEQ ID NO: 38937 - DNA, 50 bp, synthetic construct
  source 1..50: mol_type = other DNA
ttaaaaaacaatacaaaatttaaactccttaacatttcaaaaataacaca

SEQ ID NO: 38938 - DNA, 50 bp, synthetic construct
  source 1..50: mol_type = other DNA
ttaaaaaacgatacgaaatttaaactccttaacatttcgaaaataacgcg

SEQ ID NO: 38939 - DNA, 50 bp, synthetic construct
  source 1..50: mol_type = other DNA
aatacaaaatttaaactccttaacatttcaaaaataacacaatccaacca

SEQ ID NO: 38940 - DNA, 50 bp, synthetic construct
  source 1..50: mol_type = other DNA
gatacgaaatttaaactccttaacatttcgaaaataacgcgatccaaccg

SEQ ID NO: 38941 - DNA, 50 bp, synthetic construct
  source 1..50: mol_type = other DNA
tacaaaatttaaactccttaacatttcaaaaataacacaatccaaccaca

SEQ ID NO: 38942 - DNA, 50 bp, synthetic construct
  source 1..50: mol_type = other DNA
tacgaaatttaaactccttaacatttcgaaaataacgcgatccaaccgcg

SEQ ID NO: 38943 - DNA, 50 bp, synthetic construct
  source 1..50: mol_type = other DNA
aattaataacctcaaaaacaaaaccacaacctcaaatcaaacctctaaca

SEQ ID NO: 38944 - DNA, 50 bp, synthetic construct
  source 1..50: mol_type = other DNA
aattaataacctcgaaaacaaaaccacgacctcgaatcgaacctctaacg

SEQ ID NO: 38945 - DNA, 50 bp, synthetic construct
  source 1..50: mol_type = other DNA
ctacccaaacaaattaataacctcaaaaacaaaaccacaacctcaaatca

SEQ ID NO: 38946 - DNA, 50 bp, synthetic construct
  source 1..50: mol_type = other DNA
ctacccaaacaaattaataacctcgaaaacaaaaccacgacctcgaatcg

SEQ ID NO: 38947 - DNA, 50 bp, synthetic construct
  source 1..50: mol_type = other DNA
ccccctccattcaatccccaatttctacaaaataaaacaaaaataaaaca

SEQ ID NO: 38948 - DNA, 50 bp, synthetic construct
  source 1..50: mol_type = other DNA
ccccctccattcaatccccgatttctacaaaataaaacgaaaataaaacg

SEQ ID NO: 38949 - DNA, 50 bp, synthetic construct
  source 1..50: mol_type = other DNA
ttaaccaatcaaattctattaccaaacaaacttcaacaaccaccaataca

SEQ ID NO: 38950 - DNA, 50 bp, synthetic construct
  source 1..50: mol_type = other DNA
ttaaccaatcaaattctattaccaaacaaacttcaacgaccgccgatacg

SEQ ID NO: 38951 - DNA, 50 bp, synthetic construct
  source 1..50: mol_type = other DNA
atcccaaaaaattcttctcttaaaaaaaccacaaaataaaaaaacaaaca

SEQ ID NO: 38952 - DNA, 50 bp, synthetic construct
  source 1..50: mol_type = other DNA
atcccaaaaaattcttctcttaaaaaaaccgcaaaataaaaaaacgaacg

SEQ ID NO: 38953 - DNA, 50 bp, synthetic construct
  source 1..50: mol_type = other DNA
caaaaaattcttctcttaaaaaaaccacaaaataaaaaaacaaacactca

SEQ ID NO: 38954 - DNA, 50 bp, synthetic construct
  source 1..50: mol_type = other DNA
caaaaaattcttctcttaaaaaaaccgcaaaataaaaaaacgaacgctcg

SEQ ID NO: 38955 - DNA, 50 bp, synthetic construct
  source 1..50: mol_type = other DNA
aacaaatttactatactaatatcaaaaaccactattccaaaaaaaaaaca

SEQ ID NO: 38956 - DNA, 50 bp, synthetic construct
  source 1..50: mol_type = other DNA
gacgaatttactatactaatatcaaaaaccgctattccgaaaaaaaaacg

SEQ ID NO: 38957 - DNA, 50 bp, synthetic construct
  source 1..50: mol_type = other DNA
ctttcattttttctactaccataactaaaataaaaacatttttaaaatca

SEQ ID NO: 38958 - DNA, 50 bp, synthetic construct
  source 1..50: mol_type = other DNA
ctttcattttttctactaccgtaactaaaataaaaacgtttttaaaatcg

SEQ ID NO: 38959 - DNA, 50 bp, synthetic construct
  source 1..50: mol_type = other DNA
ttcattttttctactaccataactaaaataaaaacatttttaaaatcaca

SEQ ID NO: 38960 - DNA, 50 bp, synthetic construct
  source 1..50: mol_type = other DNA
ttcattttttctactaccgtaactaaaataaaaacgtttttaaaatcgcg

SEQ ID NO: 38961 - DNA, 50 bp, synthetic construct
  source 1..50: mol_type = other DNA
atcaaaaataaacaaaatacaataaaactatcctaaaaccaaacccccca

SEQ ID NO: 38962 - DNA, 50 bp, synthetic construct
  source 1..50: mol_type = other DNA
atcgaaaataaacgaaatacgataaaactatcctaaaaccgaaccccccg

SEQ ID NO: 38963 - DNA, 50 bp, synthetic construct
  source 1..50: mol_type = other DNA
aaataaaaacatttttaaaatcacaatccaaactttaaacaaaaaatcca

SEQ ID NO: 38964 - DNA, 50 bp, synthetic construct
  source 1..50: mol_type = other DNA
aaataaaaacgtttttaaaatcgcgatccgaactttaaacgaaaaatccg

SEQ ID NO: 38965 - DNA, 50 bp, synthetic construct
  source 1..50: mol_type = other DNA
tcacaatccaaactttaaacaaaaaatccaaccccaaaacaattttacca

SEQ ID NO: 38966 - DNA, 50 bp, synthetic construct
  source 1..50: mol_type = other DNA
tcgcgatccgaactttaaacgaaaaatccgaccccaaaacaattttaccg

SEQ ID NO: 38967 - DNA, 50 bp, synthetic construct
  source 1..50: mol_type = other DNA
acctctataaaatacaaacaccaaatccataaaaaaatcaaaaataaaca

SEQ ID NO: 38968 - DNA, 50 bp, synthetic construct
  source 1..50: mol_type = other DNA
acctctataaaatacaaacgccgaatccataaaaaaatcgaaaataaacg

SEQ ID NO: 38969 - DNA, 50 bp, synthetic construct
  source 1..50: mol_type = other DNA
accaaaaactaaaatcccaatcaccataaaattcctaaaaaataaaaaca

SEQ ID NO: 38970 - DNA, 50 bp, synthetic construct
  source 1..50: mol_type = other DNA
gccgaaaactaaaatcccgatcaccataaaattcctaaaaaataaaaacg

SEQ ID NO: 38971 - DNA, 50 bp, synthetic construct
  source 1..50: mol_type = other DNA
attctcactctttaaaaaccccataataaccaaaacctcaatcctcaaca

SEQ ID NO: 38972 - DNA, 50 bp, synthetic construct
  source 1..50: mol_type = other DNA
gttctcactctttaaaaaccccataataaccgaaacctcaatcctcgacg

SEQ ID NO: 38973 - DNA, 50 bp, synthetic construct
  source 1..50: mol_type = other DNA
ctttaaaaaccccataataaccaaaacctcaatcctcaacattaaattca

SEQ ID NO: 38974 - DNA, 50 bp, synthetic construct
  source 1..50: mol_type = other DNA
ctttaaaaaccccataataaccgaaacctcaatcctcgacgttaaattcg

SEQ ID NO: 38975 - DNA, 50 bp, synthetic construct
  source 1..50: mol_type = other DNA
aaaccccataataaccaaaacctcaatcctcaacattaaattcaaaaaca

SEQ ID NO: 38976 - DNA, 50 bp, synthetic construct
  source 1..50: mol_type = other DNA
aaaccccataataaccgaaacctcaatcctcgacgttaaattcgaaaacg

SEQ ID NO: 38977 - DNA, 50 bp, synthetic construct
  source 1..50: mol_type = other DNA
tattaactcacataatacaaaaaatattacaaaaacaaaccaaaaaacca

SEQ ID NO: 38978 - DNA, 50 bp, synthetic construct
  source 1..50: mol_type = other DNA
tattaactcgcataatacgaaaaatattacgaaaacgaaccaaaaaaccg

SEQ ID NO: 38979 - DNA, 50 bp, synthetic construct
  source 1..50: mol_type = other DNA
ttaaaacataaacattattaaatactctactttcttccaatttcaaatca

SEQ ID NO: 38980 - DNA, 50 bp, synthetic construct
  source 1..50: mol_type = other DNA
ttaaaacgtaaacattattaaatactctactttcttccaatttcaaatcg

SEQ ID NO: 38981 - DNA, 50 bp, synthetic construct
  source 1..50: mol_type = other DNA
aaaaaaatcactaaaacccaacaaacaaaaattacaataaacaaaaatca

SEQ ID NO: 38982 - DNA, 50 bp, synthetic construct
  source 1..50: mol_type = other DNA
aaaaaaatcactaaaacccgacaaacgaaaattacaataaacaaaaatcg

SEQ ID NO: 38983 - DNA, 50 bp, synthetic construct
  source 1..50: mol_type = other DNA
atacatataaacatcaaactatatacaaaaccataaaacacaaatacaca

SEQ ID NO: 38984 - DNA, 50 bp, synthetic construct
  source 1..50: mol_type = other DNA
gtacgtataaacgtcgaactatatacgaaaccgtaaaacgcgaatacgcg

SEQ ID NO: 38985 - DNA, 50 bp, synthetic construct
  source 1..50: mol_type = other DNA
aaaaataaaaccaatacacacaaaaataaaaacaaaaaaccaacaataca

SEQ ID NO: 38986 - DNA, 50 bp, synthetic construct
  source 1..50: mol_type = other DNA
aaaaataaaaccgatacgcgcgaaaataaaaacgaaaaaccgacgatacg

SEQ ID NO: 38987 - DNA, 50 bp, synthetic construct
  source 1..50: mol_type = other DNA
aaaaaaaacctccctcaaattcaaataattcaaaataaatttttttccca

SEQ ID NO: 38988 - DNA, 50 bp, synthetic construct
  source 1..50: mol_type = other DNA
aaaaaaaacctccctcgaattcgaataattcgaaataaatttttttcccg

SEQ ID NO: 38989 - DNA, 50 bp, synthetic construct
  source 1..50: mol_type = other DNA
aacatcaaaacaaaacaacaaaaaacacaaaaaccattttaaaaacatca

SEQ ID NO: 38990 - DNA, 50 bp, synthetic construct
  source 1..50: mol_type = other DNA
aacgtcgaaacgaaacgacgaaaaacgcgaaaaccattttaaaaacgtcg

SEQ ID NO: 38991 - DNA, 50 bp, synthetic construct
  source 1..50: mol_type = other DNA
caaaacatcaaaacaaaacaacaaaaaacacaaaaaccattttaaaaaca

SEQ ID NO: 38992 - DNA, 50 bp, synthetic construct
  source 1..50: mol_type = other DNA
cgaaacgtcgaaacgaaacgacgaaaaacgcgaaaaccattttaaaaacg

SEQ ID NO: 38993 - DNA, 50 bp, synthetic construct
  source 1..50: mol_type = other DNA
aactaaaataaataaacccaatacaaaccaaaacacccaaaaaaaaaaca

SEQ ID NO: 38994 - DNA, 50 bp, synthetic construct
  source 1..50: mol_type = other DNA
gactaaaataaataaacccgatacgaaccaaaacacccgaaaaaaaaacg

SEQ ID NO: 38995 - DNA, 50 bp, synthetic construct
  source 1..50: mol_type = other DNA
aacaaacatcaaaacaatataaaatacccctctccaaaacaccaatacca

SEQ ID NO: 38996 - DNA, 50 bp, synthetic construct
  source 1..50: mol_type = other DNA
aacaaacatcgaaacgatataaaatacccctctccaaaacaccgataccg

SEQ ID NO: 38997 - DNA, 50 bp, synthetic construct
  source 1..50: mol_type = other DNA
aaacaatataaaatacccctctccaaaacaccaataccaaataaaaaaca

SEQ ID NO: 38998 - DNA, 50 bp, synthetic construct
  source 1..50: mol_type = other DNA
aaacgatataaaatacccctctccaaaacaccgataccgaataaaaaacg

SEQ ID NO: 38999 - DNA, 50 bp, synthetic construct
  source 1..50: mol_type = other DNA
caaacaccaaccctaaaaacaaaatttctcttaaaaacaacaataacaca

SEQ ID NO: 39000 - DNA, 50 bp, synthetic construct
  source 1..50: mol_type = other DNA
caaacgccaaccctaaaaacaaaatttctcttaaaaacaacgataacgcg

SEQ ID NO: 39001 - DNA, 50 bp, synthetic construct
  source 1..50: mol_type = other DNA
acctatcttcaaccccacccctaataaacctatacaaaaaaacaattcca

SEQ ID NO: 39002 - DNA, 50 bp, synthetic construct
  source 1..50: mol_type = other DNA
acctatcttcaaccccgcccctaataaacctatacaaaaaaacgattccg

SEQ ID NO: 39003 - DNA, 50 bp, synthetic construct
  source 1..50: mol_type = other DNA
aaacaacaaaaacactttttcttaccaccacctaatcctctaaatacaca

SEQ ID NO: 39004 - DNA, 50 bp, synthetic construct
  source 1..50: mol_type = other DNA
aaacaacgaaaacgctttttcttaccgccgcctaatcctctaaatacacg

SEQ ID NO: 39005 - DNA, 50 bp, synthetic construct
  source 1..50: mol_type = other DNA
aaacacaaaactaatataccctaataaacatacacccaaaaaaccaaaca

SEQ ID NO: 39006 - DNA, 50 bp, synthetic construct
  source 1..50: mol_type = other DNA
aaacgcgaaactaatataccctaataaacgtacacccaaaaaaccaaacg

SEQ ID NO: 39007 - DNA, 50 bp, synthetic construct
  source 1..50: mol_type = other DNA
cacaaaactaatataccctaataaacatacacccaaaaaaccaaacaaca

SEQ ID NO: 39008 - DNA, 50 bp, synthetic construct
  source 1..50: mol_type = other DNA
cgcgaaactaatataccctaataaacgtacacccaaaaaaccaaacgacg

SEQ ID NO: 39009 - DNA, 50 bp, synthetic construct
  source 1..50: mol_type = other DNA
acaacacaaaacacaaaaaaaacaaacttaaaaaccaaaaatacaaaaca

SEQ ID NO: 39010 - DNA, 50 bp, synthetic construct
  source 1..50: mol_type = other DNA
acgacgcgaaacacgaaaaaaacgaacttaaaaaccgaaaatacaaaacg

SEQ ID NO: 39011 - DNA, 50 bp, synthetic construct
  source 1..50: mol_type = other DNA
aaaacactctcactatcttctccattttatattcccaatttctaaatcca

SEQ ID NO: 39012 - DNA, 50 bp, synthetic construct
  source 1..50: mol_type = other DNA
aaaacgctctcgctatcttctccgttttatattcccgatttctaaatccg

SEQ ID NO: 39013 - DNA, 50 bp, synthetic construct
  source 1..50: mol_type = other DNA
caacacttctctctttttattcttttacctacaacaaacaataaaaatca

SEQ ID NO: 39014 - DNA, 50 bp, synthetic construct
  source 1..50: mol_type = other DNA
cgacgcttctctctttttattcttttacctacgacgaacaataaaaatcg

SEQ ID NO: 39015 - DNA, 50 bp, synthetic construct
  source 1..50: mol_type = other DNA
acacttctctctttttattcttttacctacaacaaacaataaaaatcaca

SEQ ID NO: 39016 - DNA, 50 bp, synthetic construct
  source 1..50: mol_type = other DNA
acgcttctctctttttattcttttacctacgacgaacaataaaaatcgcg

SEQ ID NO: 39017 - DNA, 50 bp, synthetic construct
  source 1..50: mol_type = other DNA
caaacaataaaaatcacaaaataaaaactcctttaaaactaaaaaattca

SEQ ID NO: 39018 - DNA, 50 bp, synthetic construct
  source 1..50: mol_type = other DNA
cgaacaataaaaatcgcgaaataaaaactcctttaaaactaaaaaattcg

SEQ ID NO: 39019 - DNA, 50 bp, synthetic construct
  source 1..50: mol_type = other DNA
cattctcttataacccaatataactacccaaaaaacacctaaaacccaca

SEQ ID NO: 39020 - DNA, 50 bp, synthetic construct
  source 1..50: mol_type = other DNA
cattctcttataacccaatataactacccaaaaaacgcctaaaacccgcg

SEQ ID NO: 39021 - DNA, 50 bp, synthetic construct
  source 1..50: mol_type = other DNA
ttctatactcccaaacccaaaaaaaccacatctcttttcttccttcatca

SEQ ID NO: 39022 - DNA, 50 bp, synthetic construct
  source 1..50: mol_type = other DNA
ttctatactcccaaacccaaaaaaaccacgtctcttttcttccttcatcg

SEQ ID NO: 39023 - DNA, 50 bp, synthetic construct
  source 1..50: mol_type = other DNA
ctaaactcctaaactaaaaaaaacctacaaataaatcaaaacaattacca

SEQ ID NO: 39024 - DNA, 50 bp, synthetic construct
  source 1..50: mol_type = other DNA
ctaaactcctaaactaaaaaaaacctacaaataaatcgaaacgattaccg

SEQ ID NO: 39025 - DNA, 50 bp, synthetic construct
  source 1..50: mol_type = other DNA
caattaccaaaacccttcttttccaaacctctccaaaaaaacacacttca

SEQ ID NO: 39026 - DNA, 50 bp, synthetic construct
  source 1..50: mol_type = other DNA
cgattaccgaaacccttcttttccaaacctctccaaaaaaacacacttcg

SEQ ID NO: 39027 - DNA, 50 bp, synthetic construct
  source 1..50: mol_type = other DNA
aaaaaaacaaaaaacttaatccacatcaaaaactaaatcattttaccaca

SEQ ID NO: 39028 - DNA, 50 bp, synthetic construct
  source 1..50: mol_type = other DNA
aaaaaaacgaaaaacttaatccgcatcaaaaactaaatcattttaccacg

SEQ ID NO: 39029 - DNA, 50 bp, synthetic construct
  source 1..50: mol_type = other DNA
caaacaccataaaacctcctaaaaaatataatttataaataacaaaaaca

SEQ ID NO: 39030 - DNA, 50 bp, synthetic construct
  source 1..50: mol_type = other DNA
cgaacaccgtaaaacctcctaaaaaatataatttataaataacgaaaacg

SEQ ID NO: 39031 - DNA, 50 bp, synthetic construct
  source 1..50: mol_type = other DNA
accaaaaaaccttaaaaacataaaaaacaaaaatacaactcacctactca

SEQ ID NO: 39032 - DNA, 50 bp, synthetic construct
  source 1..50: mol_type = other DNA
gccgaaaaaccttaaaaacgtaaaaaacgaaaatacgactcgcctactcg

SEQ ID NO: 39033 - DNA, 50 bp, synthetic construct
  source 1..50: mol_type = other DNA
cttaaaaacataaaaaacaaaaatacaactcacctactcacaaaataaca

SEQ ID NO: 39034 - DNA, 50 bp, synthetic construct
  source 1..50: mol_type = other DNA
cttaaaaacgtaaaaaacgaaaatacgactcgcctactcgcaaaataacg

SEQ ID NO: 39035 - DNA, 50 bp, synthetic construct
  source 1..50: mol_type = other DNA
taaaaaacaaaaatacaactcacctactcacaaaataacaaacaaaaaca

SEQ ID NO: 39036 - DNA, 50 bp, synthetic construct
  source 1..50: mol_type = other DNA
taaaaaacgaaaatacgactcgcctactcgcaaaataacgaacgaaaacg

SEQ ID NO: 39037 - DNA, 50 bp, synthetic construct
  source 1..50: mol_type = other DNA
tcacaaaaacaaaaataacaacaacaacaaaaaatctaaactccactaca

SEQ ID NO: 39038 - DNA, 50 bp, synthetic construct
  source 1..50: mol_type = other DNA
tcacaaaaacgaaaataacgacgacgacgaaaaatctaaactccactacg

SEQ ID NO: 39039 - DNA, 50 bp, synthetic construct
  source 1..50: mol_type = other DNA
aactacaacttcaacatacaaaaccaaataaacaaaaacaaacaactaca

SEQ ID NO: 39040 - DNA, 50 bp, synthetic construct
  source 1..50: mol_type = other DNA
gactacgacttcaacgtacgaaaccaaataaacgaaaacgaacaactacg

SEQ ID NO: 39041 - DNA, 50 bp, synthetic construct
  source 1..50: mol_type = other DNA
aaataaacaaaaacaaacaactacaaaacatcaacaaaaaactatacaca

SEQ ID NO: 39042 - DNA, 50 bp, synthetic construct
  source 1..50: mol_type = other DNA
aaataaacgaaaacgaacaactacgaaacatcaacgaaaaactatacgcg

SEQ ID NO: 39043 - DNA, 50 bp, synthetic construct
  source 1..50: mol_type = other DNA
aaaaaaaataaaacaacaaataaccccaatactcacacctccaaaataca

SEQ ID NO: 39044 - DNA, 50 bp, synthetic construct
  source 1..50: mol_type = other DNA
gaaaaaaataaaacgacgaataaccccgatactcacacctccaaaatacg

SEQ ID NO: 39045 - DNA, 50 bp, synthetic construct
  source 1..50: mol_type = other DNA
atcaaaccaaaatacacaaaaaaaaccacatcctaaaaatataaatatca

SEQ ID NO: 39046 - DNA, 50 bp, synthetic construct
  source 1..50: mol_type = other DNA
atcgaaccgaaatacgcaaaaaaaaccgcatcctaaaaatataaatatcg

SEQ ID NO: 39047 - DNA, 50 bp, synthetic construct
  source 1..50: mol_type = other DNA
acctaaaaaacaaaaatccaaaaaccaactcaaaactcaaaaaaaataca

SEQ ID NO: 39048 - DNA, 50 bp, synthetic construct
  source 1..50: mol_type = other DNA
acctaaaaaacgaaaatccgaaaaccgactcgaaactcgaaaaaaatacg

SEQ ID NO: 39049 - DNA, 50 bp, synthetic construct
  source 1..50: mol_type = other DNA
aaaaacccaactacaaaaacctaaaaaacaaaaatccaaaaaccaactca

SEQ ID NO: 39050 - DNA, 50 bp, synthetic construct
  source 1..50: mol_type = other DNA
aaaaacccgactacgaaaacctaaaaaacgaaaatccgaaaaccgactcg

SEQ ID NO: 39051 - DNA, 50 bp, synthetic construct
  source 1..50: mol_type = other DNA
taaaaaaacaacccacaaaaaaaaacccaactacaaaaacctaaaaaaca

SEQ ID NO: 39052 - DNA, 50 bp, synthetic construct
  source 1..50: mol_type = other DNA
taaaaaaacaacccacaaaaaaaaacccgactacgaaaacctaaaaaacg

SEQ ID NO: 39053 - DNA, 50 bp, synthetic construct
  source 1..50: mol_type = other DNA
aacatcaactaaaaacaacaaaataaaaaaccaacatcacaaaaacccca

SEQ ID NO: 39054 - DNA, 50 bp, synthetic construct
  source 1..50: mol_type = other DNA
aacatcaactaaaaacgacgaaataaaaaaccgacgtcgcaaaaaccccg

SEQ ID NO: 39055 - DNA, 50 bp, synthetic construct
  source 1..50: mol_type = other DNA
actaaaaacacaaaaacatcaactaaaaacaacaaaataaaaaaccaaca

SEQ ID NO: 39056 - DNA, 50 bp, synthetic construct
  source 1..50: mol_type = other DNA
actaaaaacgcaaaaacatcaactaaaaacgacgaaataaaaaaccgacg

SEQ ID NO: 39057 - DNA, 50 bp, synthetic construct
  source 1..50: mol_type = other DNA
aacactaaaaacacaaaaacatcaactaaaaacaacaaaataaaaaacca

SEQ ID NO: 39058 - DNA, 50 bp, synthetic construct
  source 1..50: mol_type = other DNA
aacactaaaaacgcaaaaacatcaactaaaaacgacgaaataaaaaaccg

SEQ ID NO: 39059 - DNA, 50 bp, synthetic construct
  source 1..50: mol_type = other DNA
ctcatcttactcaaaaaaaacctcatctactccttactaacaacatttca

SEQ ID NO: 39060 - DNA, 50 bp, synthetic construct
  source 1..50: mol_type = other DNA
ctcgtcttactcaaaaaaaacctcatctactccttactaacgacgtttcg

SEQ ID NO: 39061 - DNA, 50 bp, synthetic construct
  source 1..50: mol_type = other DNA
tcatctactccttactaacaacatttcattttctaatccaaccaatacca

SEQ ID NO: 39062 - DNA, 50 bp, synthetic construct
  source 1..50: mol_type = other DNA
tcatctactccttactaacgacgtttcgttttctaatccaaccaataccg

SEQ ID NO: 39063 - DNA, 50 bp, synthetic construct
  source 1..50: mol_type = other DNA
gatatgaagtattggtttaaagaaaatttggagtttattttgatgtagtt

SEQ ID NO: 39064 - DNA, 50 bp, synthetic construct
  source 1..50: mol_type = other DNA
gatacgaagtatcggtttaaagaaaatttggagtttattttgacgtagtc

SEQ ID NO: 39065 - DNA, 50 bp, synthetic construct
  source 1..50: mol_type = other DNA
ataaaacactaataaaaaataccactaaccaaaaaaaaccaaaaaccaca

SEQ ID NO: 39066 - DNA, 50 bp, synthetic construct
  source 1..50: mol_type = other DNA
gtaaaacgctaataaaaaataccgctaaccgaaaaaaaccgaaaaccgcg

SEQ ID NO: 39067 - DNA, 50 bp, synthetic construct
  source 1..50: mol_type = other DNA
tcataaaacactaataaaaaataccactaaccaaaaaaaaccaaaaacca

SEQ ID NO: 39068 - DNA, 50 bp, synthetic construct
  source 1..50: mol_type = other DNA
tcgtaaaacgctaataaaaaataccgctaaccgaaaaaaaccgaaaaccg

SEQ ID NO: 39069 - DNA, 50 bp, synthetic construct
  source 1..50: mol_type = other DNA
acaatcatcataaaacactaataaaaaataccactaaccaaaaaaaacca

SEQ ID NO: 39070 - DNA, 50 bp, synthetic construct
  source 1..50: mol_type = other DNA
acgatcatcgtaaaacgctaataaaaaataccgctaaccgaaaaaaaccg

SEQ ID NO: 39071 - DNA, 50 bp, synthetic construct
  source 1..50: mol_type = other DNA
cctaaaaaaaaccaatataaaaataacaaactttccttaaaaaactaaca

SEQ ID NO: 39072 - DNA, 50 bp, synthetic construct
  source 1..50: mol_type = other DNA
cctaaaaaaaaccgatataaaaataacgaactttccttaaaaaactaacg

SEQ ID NO: 39073 - DNA, 50 bp, synthetic construct
  source 1..50: mol_type = other DNA
atacactcaaatattatttctaaaaacacactaaaacctaaaaaaaacca

SEQ ID NO: 39074 - DNA, 50 bp, synthetic construct
  source 1..50: mol_type = other DNA
atacgctcgaatattatttctaaaaacgcactaaaacctaaaaaaaaccg

SEQ ID NO: 39075 - DNA, 50 bp, synthetic construct
  source 1..50: mol_type = other DNA
aaactaaaattacaaaccaaatcaaaaacattcccttcatatcacaacca

SEQ ID NO: 39076 - DNA, 50 bp, synthetic construct
  source 1..50: mol_type = other DNA
aaactaaaattacaaaccaaatcaaaaacgttcccttcatatcgcgaccg

SEQ ID NO: 39077 - DNA, 50 bp, synthetic construct
  source 1..50: mol_type = other DNA
cacacctactaaaaattaaacaaccaattacaaacttcccaacatcctca

SEQ ID NO: 39078 - DNA, 50 bp, synthetic construct
  source 1..50: mol_type = other DNA
cgcacctactaaaaattaaacaaccaattacaaacttcccgacgtcctcg

SEQ ID NO: 39079 - DNA, 50 bp, synthetic construct
  source 1..50: mol_type = other DNA
actccatcaattttctcttacaatcttttacataaatcaatcccacccca

SEQ ID NO: 39080 - DNA, 50 bp, synthetic construct
  source 1..50: mol_type = other DNA
actccatcaattttctcttacgatcttttacataaatcgatcccgccccg

SEQ ID NO: 39081 - DNA, 50 bp, synthetic construct
  source 1..50: mol_type = other DNA
aaacacaaaaattctataccctactacctaccaacctcaattaactctca

SEQ ID NO: 39082 - DNA, 50 bp, synthetic construct
  source 1..50: mol_type = other DNA
aaacgcgaaaattctataccctactacctaccaacctcaattaactctcg

SEQ ID NO: 39083 - DNA, 50 bp, synthetic construct
  source 1..50: mol_type = other DNA
aaataaaatacaactaacaacaaaaacaaaacaaaaccctctcaacaaca

SEQ ID NO: 39084 - DNA, 50 bp, synthetic construct
  source 1..50: mol_type = other DNA
aaataaaatacaactaacgacaaaaacgaaacgaaaccctctcaacaacg

SEQ ID NO: 39085 - DNA, 50 bp, synthetic construct
  source 1..50: mol_type = other DNA
aaaaaaaaatcctcattaaaaataaaattaacactacacttaaccacaca

SEQ ID NO: 39086 - DNA, 50 bp, synthetic construct
  source 1..50: mol_type = other DNA
aaaaaaaaatcctcgttaaaaataaaattaacgctacacttaaccacgcg

SEQ ID NO: 39087 - DNA, 50 bp, synthetic construct
  source 1..50: mol_type = other DNA
ttaaaaataaaattaacactacacttaaccacacaactctactactccca

SEQ ID NO: 39088 - DNA, 50 bp, synthetic construct
  source 1..50: mol_type = other DNA
ttaaaaataaaattaacgctacacttaaccacgcgactctactactcccg

SEQ ID NO: 39089 - DNA, 50 bp, synthetic construct
  source 1..50: mol_type = other DNA
acacataaaccacaactaacaacacaaaaaatccaaataaaaaaacaaca

SEQ ID NO: 39090 - DNA, 50 bp, synthetic construct
  source 1..50: mol_type = other DNA
gcgcgtaaaccgcaactaacaacacaaaaaatccaaataaaaaaacgacg

SEQ ID NO: 39091 - DNA, 50 bp, synthetic construct
  source 1..50: mol_type = other DNA
aacaacacaaaaaatccaaataaaaaaacaacaacataaacaacccaaca

SEQ ID NO: 39092 - DNA, 50 bp, synthetic construct
  source 1..50: mol_type = other DNA
aacaacacaaaaaatccaaataaaaaaacgacgacgtaaacgacccgacg

SEQ ID NO: 39093 - DNA, 50 bp, synthetic construct
  source 1..50: mol_type = other DNA
accaaactcactttttctaaaaacaaaaaataaaacctaaacacccaaca

SEQ ID NO: 39094 - DNA, 50 bp, synthetic construct
  source 1..50: mol_type = other DNA
accgaactcgctttttctaaaaacaaaaaataaaacctaaacacccgacg

SEQ ID NO: 39095 - DNA, 50 bp, synthetic construct
  source 1..50: mol_type = other DNA
aaaaatcccccaaccaaaacaaataacaacccataaaacaaaaattccca

SEQ ID NO: 39096 - DNA, 50 bp, synthetic construct
  source 1..50: mol_type = other DNA
aaaaatcccccgaccgaaacaaataacgacccgtaaaacaaaaattcccg

SEQ ID NO: 39097 - DNA, 50 bp, synthetic construct
  source 1..50: mol_type = other DNA
cacaaaaactaaacaatcaaaactactaaaaataaaattctatatcccca

SEQ ID NO: 39098 - DNA, 50 bp, synthetic construct
  source 1..50: mol_type = other DNA
cgcgaaaactaaacgatcaaaactactaaaaataaaattctatatccccg

SEQ ID NO: 39099 - DNA, 50 bp, synthetic construct
  source 1..50: mol_type = other DNA
accctacaaacacaaaatacaataaaactaaaaaacacaaaaactaaaca

SEQ ID NO: 39100 - DNA, 50 bp, synthetic construct
  source 1..50: mol_type = other DNA
gccctacaaacgcgaaatacgataaaactaaaaaacgcgaaaactaaacg

SEQ ID NO: 39101 - DNA, 50 bp, synthetic construct
  source 1..50: mol_type = other DNA
aaacaaacacataataacaaaaccttccaaaaaccactctaaaaataaca

SEQ ID NO: 39102 - DNA, 50 bp, synthetic construct
  source 1..50: mol_type = other DNA
aaacgaacgcgtaataacgaaaccttccgaaaaccgctctaaaaataacg

SEQ ID NO: 39103 - DNA, 50 bp, synthetic construct
  source 1..50: mol_type = other DNA
taataactccacacaaaaataaaacaaacacataataacaaaaccttcca

SEQ ID NO: 39104 - DNA, 50 bp, synthetic construct
  source 1..50: mol_type = other DNA
taataactccgcgcaaaaataaaacgaacgcgtaataacgaaaccttccg

SEQ ID NO: 39105 - DNA, 50 bp, synthetic construct
  source 1..50: mol_type = other DNA
atcaaaacacaatactcttaataactccacacaaaaataaaacaaacaca

SEQ ID NO: 39106 - DNA, 50 bp, synthetic construct
  source 1..50: mol_type = other DNA
atcgaaacacgatactcttaataactccgcgcaaaaataaaacgaacgcg

SEQ ID NO: 39107 - DNA, 50 bp, synthetic construct
  source 1..50: mol_type = other DNA
tcaaatcccaaaacaaaaaatcaaaacacaatactcttaataactccaca

SEQ ID NO: 39108 - DNA, 50 bp, synthetic construct
  source 1..50: mol_type = other DNA
tcgaatcccaaaacaaaaaatcgaaacacgatactcttaataactccgcg

SEQ ID NO: 39109 - DNA, 50 bp, synthetic construct
  source 1..50: mol_type = other DNA
caacaaaaaaaatcactaactcaaatcccaaaacaaaaaatcaaaacaca

SEQ ID NO: 39110 - DNA, 50 bp, synthetic construct
  source 1..50: mol_type = other DNA
cgacgaaaaaaatcgctaactcgaatcccaaaacaaaaaatcgaaacacg

SEQ ID NO: 39111 - DNA, 50 bp, synthetic construct
  source 1..50: mol_type = other DNA
taaaaccaaaacccaaaaacaacccacaaataaaaccaacactccaaaca

SEQ ID NO: 39112 - DNA, 50 bp, synthetic construct
  source 1..50: mol_type = other DNA
taaaaccaaaacccaaaaacgacccacaaataaaaccaacactccgaacg

SEQ ID NO: 39113 - DNA, 50 bp, synthetic construct
  source 1..50: mol_type = other DNA
taaaacataaacaacaaaaacccctaccaactcctcccataaaaactaca

SEQ ID NO: 39114 - DNA, 50 bp, synthetic construct
  source 1..50: mol_type = other DNA
taaaacgtaaacaacgaaaacccctaccaactcctcccataaaaactacg

SEQ ID NO: 39115 - DNA, 50 bp, synthetic construct
  source 1..50: mol_type = other DNA
acttactcccccaacacaatccttataaaaaaaactaacaaaaacctcca

SEQ ID NO: 39116 - DNA, 50 bp, synthetic construct
  source 1..50: mol_type = other DNA
acttactcccccaacgcaatccttataaaaaaaactaacaaaaacctccg

SEQ ID NO: 39117 - DNA, 50 bp, synthetic construct
  source 1..50: mol_type = other DNA
cccaacacaatccttataaaaaaaactaacaaaaacctccactacctaca

SEQ ID NO: 39118 - DNA, 50 bp, synthetic construct
  source 1..50: mol_type = other DNA
cccaacgcaatccttataaaaaaaactaacaaaaacctccgctacctacg

SEQ ID NO: 39119 - DNA, 50 bp, synthetic construct
  source 1..50: mol_type = other DNA
accacaaaccctcataataaatattataattcttaaaaacaacatatcca

SEQ ID NO: 39120 - DNA, 50 bp, synthetic construct
  source 1..50: mol_type = other DNA
accacgaaccctcgtaataaatattataattcttaaaaacgacatatccg

SEQ ID NO: 39121 - DNA, 50 bp, synthetic construct
  source 1..50: mol_type = other DNA
ataaaacaaaaacaaaactcaaaaacacacctacaataacaaaaccttca

SEQ ID NO: 39122 - DNA, 50 bp, synthetic construct
  source 1..50: mol_type = other DNA
ataaaacgaaaacaaaactcaaaaacacgcctacgataacaaaaccttcg

SEQ ID NO: 39123 - DNA, 50 bp, synthetic construct
  source 1..50: mol_type = other DNA
cactcttataacaaaaataaaatacaccatccaaaactaaaacaaacaca

SEQ ID NO: 39124 - DNA, 50 bp, synthetic construct
  source 1..50: mol_type = other DNA
cgctcttataacgaaaataaaatacgccgtccaaaactaaaacaaacgcg

SEQ ID NO: 39125 - DNA, 50 bp, synthetic construct
  source 1..50: mol_type = other DNA
cacactcttataacaaaaataaaatacaccatccaaaactaaaacaaaca

SEQ ID NO: 39126 - DNA, 50 bp, synthetic construct
  source 1..50: mol_type = other DNA
cgcgctcttataacgaaaataaaatacgccgtccaaaactaaaacaaacg

SEQ ID NO: 39127 - DNA, 50 bp, synthetic construct
  source 1..50: mol_type = other DNA
accccaaaaattaactcacacacacactcttataacaaaaataaaataca

SEQ ID NO: 39128 - DNA, 50 bp, synthetic construct
  source 1..50: mol_type = other DNA
accccaaaaattaactcgcacgcgcgctcttataacgaaaataaaatacg

SEQ ID NO: 39129 - DNA, 50 bp, synthetic construct
  source 1..50: mol_type = other DNA
aaaaaaacaatacacactactaacaactaactaaccaaaatataaaacca

SEQ ID NO: 39130 - DNA, 50 bp, synthetic construct
  source 1..50: mol_type = other DNA
aaaaaaacgatacgcactactaacgactaactaaccgaaatataaaaccg

SEQ ID NO: 39131 - DNA, 50 bp, synthetic construct
  source 1..50: mol_type = other DNA
aaaacaatacacactactaacaactaactaaccaaaatataaaaccaaca

SEQ ID NO: 39132 - DNA, 50 bp, synthetic construct
  source 1..50: mol_type = other DNA
aaaacgatacgcactactaacgactaactaaccgaaatataaaaccgacg

SEQ ID NO: 39133 - DNA, 50 bp, synthetic construct
  source 1..50: mol_type = other DNA
acaactaactaaccaaaatataaaaccaacaaaatccaaataaaacatca

SEQ ID NO: 39134 - DNA, 50 bp, synthetic construct
  source 1..50: mol_type = other DNA
acgactaactaaccgaaatataaaaccgacgaaatccgaataaaacatcg

SEQ ID NO: 39135 - DNA, 50 bp, synthetic construct
  source 1..50: mol_type = other DNA
aaattccaaaactaaaaaactaaaaaacccaaaacaataaccaaaatcca

SEQ ID NO: 39136 - DNA, 50 bp, synthetic construct
  source 1..50: mol_type = other DNA
gaattccgaaactaaaaaactaaaaaacccaaaacgataaccgaaatccg

SEQ ID NO: 39137 - DNA, 50 bp, synthetic construct
  source 1..50: mol_type = other DNA
caaaactcaaaaaatatacacctaatattcccaccatacaaatacaaaca

SEQ ID NO: 39138 - DNA, 50 bp, synthetic construct
  source 1..50: mol_type = other DNA
cgaaactcaaaaaatatacgcctaatattcccaccatacgaatacaaacg

SEQ ID NO: 39139 - DNA, 50 bp, synthetic construct
  source 1..50: mol_type = other DNA
catttattatataaacattttctatttccttcctctaaataaaaaaaaca

SEQ ID NO: 39140 - DNA, 50 bp, synthetic construct
  source 1..50: mol_type = other DNA
catttattatataaacattttctatttccttcctctaaataaaaaaaacg

SEQ ID NO: 39141 - DNA, 50 bp, synthetic construct
  source 1..50: mol_type = other DNA
aaatcactcaatcacatacctctcttacccacaaccattacaaaataaca

SEQ ID NO: 39142 - DNA, 50 bp, synthetic construct
  source 1..50: mol_type = other DNA
aaatcactcaatcgcatacctctcttacccacaaccattacgaaataacg

SEQ ID NO: 39143 - DNA, 50 bp, synthetic construct
  source 1..50: mol_type = other DNA
aaatctacaaaaccttaacaaaaccacttttcattatcaaccaatataca

SEQ ID NO: 39144 - DNA, 50 bp, synthetic construct
  source 1..50: mol_type = other DNA
aaatctacaaaaccttaacgaaaccgcttttcgttatcgaccaatatacg

SEQ ID NO: 39145 - DNA, 50 bp, synthetic construct
  source 1..50: mol_type = other DNA
taaaaaacaaataccccctcctctaatccacataaatctaaaaacaacca

SEQ ID NO: 39146 - DNA, 50 bp, synthetic construct
  source 1..50: mol_type = other DNA
taaaaaacaaataccccctcctctaatccgcgtaaatctaaaaacgaccg

SEQ ID NO: 39147 - DNA, 50 bp, synthetic construct
  source 1..50: mol_type = other DNA
caaaactaaacaaaaaacaactaataaaaaatccactactcaatactcca

SEQ ID NO: 39148 - DNA, 50 bp, synthetic construct
  source 1..50: mol_type = other DNA
cgaaactaaacgaaaaacgactaataaaaaatccgctactcaatactccg

SEQ ID NO: 39149 - DNA, 50 bp, synthetic construct
  source 1..50: mol_type = other DNA
aaaaaacactactaacctcatttaaatataacccaaaacactaaacaaca

SEQ ID NO: 39150 - DNA, 50 bp, synthetic construct
  source 1..50: mol_type = other DNA
aaaaaacgctactaacctcgtttaaatataacccgaaacactaaacaacg

SEQ ID NO: 39151 - DNA, 50 bp, synthetic construct
  source 1..50: mol_type = other DNA
caaacaacaaatccaaacctaaaaactacccaaaaaaaacacataaacca

SEQ ID NO: 39152 - DNA, 50 bp, synthetic construct
  source 1..50: mol_type = other DNA
cgaacaacaaatccgaacctaaaaactacccaaaaaaaacgcgtaaaccg

SEQ ID NO: 39153 - DNA, 50 bp, synthetic construct
  source 1..50: mol_type = other DNA
aaaaactacccaaaaaaaacacataaaccaaacaaaactcaccttaacca

SEQ ID NO: 39154 - DNA, 50 bp, synthetic construct
  source 1..50: mol_type = other DNA
aaaaactacccaaaaaaaacgcgtaaaccgaacgaaactcaccttaaccg

SEQ ID NO: 39155 - DNA, 50 bp, synthetic construct
  source 1..50: mol_type = other DNA
caaacactaaacaaactaaacaaactaaacacaaaacaaaaaaacaaaca

SEQ ID NO: 39156 - DNA, 50 bp, synthetic construct
  source 1..50: mol_type = other DNA
cgaacgctaaacgaactaaacgaactaaacgcgaaacgaaaaaacgaacg

SEQ ID NO: 39157 - DNA, 50 bp, synthetic construct
  source 1..50: mol_type = other DNA
actaaacaaactaaacacaaaacaaaaaaacaaacacaacaaactataca

SEQ ID NO: 39158 - DNA, 50 bp, synthetic construct
  source 1..50: mol_type = other DNA
actaaacgaactaaacgcgaaacgaaaaaacgaacgcgacgaactatacg

SEQ ID NO: 39159 - DNA, 50 bp, synthetic construct
  source 1..50: mol_type = other DNA
aaaaaaacaacacaaaaacaaaaaaaacctaacaaacactcaacaaaaca

SEQ ID NO: 39160 - DNA, 50 bp, synthetic construct
  source 1..50: mol_type = other DNA
aaaaaaacgacgcgaaaacgaaaaaaacctaacgaacgctcgacaaaacg

SEQ ID NO: 39161 - DNA, 50 bp, synthetic construct
  source 1..50: mol_type = other DNA
tacaaaaacactctatctaaaacaaacaaaacctctacaaaacaaatcca

SEQ ID NO: 39162 - DNA, 50 bp, synthetic construct
  source 1..50: mol_type = other DNA
tacaaaaacgctctatctaaaacgaacgaaacctctacgaaacgaatccg

SEQ ID NO: 39163 - DNA, 50 bp, synthetic construct
  source 1..50: mol_type = other DNA
aaaaaaaaatttacaaaaacactctatctaaaacaaacaaaacctctaca

SEQ ID NO: 39164 - DNA, 50 bp, synthetic construct
  source 1..50: mol_type = other DNA
aaaaaaaaatttacaaaaacgctctatctaaaacgaacgaaacctctacg

SEQ ID NO: 39165 - DNA, 50 bp, synthetic construct
  source 1..50: mol_type = other DNA
cacaaaacaaccaaattctttaatttatacactttctaaaaccaaaccca

SEQ ID NO: 39166 - DNA, 50 bp, synthetic construct
  source 1..50: mol_type = other DNA
cgcaaaacgaccgaattctttaatttatacactttctaaaaccaaacccg

SEQ ID NO: 39167 - DNA, 50 bp, synthetic construct
  source 1..50: mol_type = other DNA
caaatttaattttaaaaaatatacaaatcaaaaaacccaaccatcctaca

SEQ ID NO: 39168 - DNA, 50 bp, synthetic construct
  source 1..50: mol_type = other DNA
cgaatttaattttaaaaaatatacaaatcaaaaaacccgaccgtcctacg

SEQ ID NO: 39169 - DNA, 50 bp, synthetic construct
  source 1..50: mol_type = other DNA
tccacataccactccctacaaaatcatccaacaaataattcctaaaccca

SEQ ID NO: 39170 - DNA, 50 bp, synthetic construct
  source 1..50: mol_type = other DNA
tccacgtaccactccctacaaaatcatccaacaaataattcctaaacccg

SEQ ID NO: 39171 - DNA, 50 bp, synthetic construct
  source 1..50: mol_type = other DNA
cctaaaaaatccatctaaaaatctcaacaacctacaccaataaaaaaaca

SEQ ID NO: 39172 - DNA, 50 bp, synthetic construct
  source 1..50: mol_type = other DNA
cctaaaaaatccgtctaaaaatctcgacgacctacgccaataaaaaaacg

SEQ ID NO: 39173 - DNA, 50 bp, synthetic construct
  source 1..50: mol_type = other DNA
ttaaaaattcaaacaaaaaaactaaaaaaaccacacctatacaacaacca

SEQ ID NO: 39174 - DNA, 50 bp, synthetic construct
  source 1..50: mol_type = other DNA
ttaaaaattcaaacaaaaaaactaaaaaaaccacacctatacaacaaccg

SEQ ID NO: 39175 - DNA, 50 bp, synthetic construct
  source 1..50: mol_type = other DNA
aacaaaacacaaaaaactataactaaaaacaacactaaaaactctataca

SEQ ID NO: 39176 - DNA, 50 bp, synthetic construct
  source 1..50: mol_type = other DNA
aacgaaacgcgaaaaactataactaaaaacgacgctaaaaactctatacg

SEQ ID NO: 39177 - DNA, 50 bp, synthetic construct
  source 1..50: mol_type = other DNA
caaaacacaaaaaactataactaaaaacaacactaaaaactctatacaca

SEQ ID NO: 39178 - DNA, 50 bp, synthetic construct
  source 1..50: mol_type = other DNA
cgaaacgcgaaaaactataactaaaaacgacgctaaaaactctatacgcg

SEQ ID NO: 39179 - DNA, 50 bp, synthetic construct
  source 1..50: mol_type = other DNA
aaacacaaaaaactataactaaaaacaacactaaaaactctatacacaca

SEQ ID NO: 39180 - DNA, 50 bp, synthetic construct
  source 1..50: mol_type = other DNA
aaacgcgaaaaactataactaaaaacgacgctaaaaactctatacgcgcg

SEQ ID NO: 39181 - DNA, 50 bp, synthetic construct
  source 1..50: mol_type = other DNA
aaaaactataactaaaaacaacactaaaaactctatacacacaacataca

SEQ ID NO: 39182 - DNA, 50 bp, synthetic construct
  source 1..50: mol_type = other DNA
aaaaactataactaaaaacgacgctaaaaactctatacgcgcgacgtacg

SEQ ID NO: 39183 - DNA, 50 bp, synthetic construct
  source 1..50: mol_type = other DNA
cacaaaaactatctaaataaaacttaaacaaaactaaaccaaaaaaaaca

SEQ ID NO: 39184 - DNA, 50 bp, synthetic construct
  source 1..50: mol_type = other DNA
cgcgaaaactatctaaataaaacttaaacaaaactaaaccgaaaaaaacg

SEQ ID NO: 39185 - DNA, 50 bp, synthetic construct
  source 1..50: mol_type = other DNA
ccccacaaacaaaaattacctatttctcatcaactccacttaccaaaaca

SEQ ID NO: 39186 - DNA, 50 bp, synthetic construct
  source 1..50: mol_type = other DNA
ccccacgaacaaaaattacctatttctcatcaactccacttaccaaaacg

SEQ ID NO: 39187 - DNA, 50 bp, synthetic construct
  source 1..50: mol_type = other DNA
acattaacatttattcaaaataccaataaaactttaaacatttataaaca

SEQ ID NO: 39188 - DNA, 50 bp, synthetic construct
  source 1..50: mol_type = other DNA
acattaacgtttattcaaaataccaataaaactttaaacatttataaacg

SEQ ID NO: 39189 - DNA, 50 bp, synthetic construct
  source 1..50: mol_type = other DNA
ttccaaatttatcataaaaaactccacaatatcctctcaacaaaacacca

SEQ ID NO: 39190 - DNA, 50 bp, synthetic construct
  source 1..50: mol_type = other DNA
ttccaaatttatcgtaaaaaactccgcgatatcctctcaacaaaacgccg

SEQ ID NO: 39191 - DNA, 50 bp, synthetic construct
  source 1..50: mol_type = other DNA
caaaacacaaaacaaaaccctaaaacaaccccttaaaaaaacctttaaca

SEQ ID NO: 39192 - DNA, 50 bp, synthetic construct
  source 1..50: mol_type = other DNA
cgaaacacgaaacgaaaccctaaaacgaccccttaaaaaaacctttaacg

SEQ ID NO: 39193 - DNA, 50 bp, synthetic construct
  source 1..50: mol_type = other DNA
ataacacaacaaaaacatactaaacccataacccaaaaatcaataaatca

SEQ ID NO: 39194 - DNA, 50 bp, synthetic construct
  source 1..50: mol_type = other DNA
ataacgcaacgaaaacgtactaaacccataacccaaaaatcgataaatcg

SEQ ID NO: 39195 - DNA, 50 bp, synthetic construct
  source 1..50: mol_type = other DNA
catatctaaaataaaactacaaaaaaccttcaaaaaatataacatcatca

SEQ ID NO: 39196 - DNA, 50 bp, synthetic construct
  source 1..50: mol_type = other DNA
cgtatctaaaataaaactacgaaaaaccttcgaaaaatataacatcatcg

SEQ ID NO: 39197 - DNA, 50 bp, synthetic construct
  source 1..50: mol_type = other DNA
ttaacaaaactaatctcaaacttctaacctaaaataatccacctatctca

SEQ ID NO: 39198 - DNA, 50 bp, synthetic construct
  source 1..50: mol_type = other DNA
ttaacgaaactaatctcgaacttctaacctaaaataatccgcctatctcg

SEQ ID NO: 39199 - DNA, 50 bp, synthetic construct
  source 1..50: mol_type = other DNA
cactatcaacataaaaaatattccaatcaaaccaaacacaataactcaca

SEQ ID NO: 39200 - DNA, 50 bp, synthetic construct
  source 1..50: mol_type = other DNA
cgctatcaacataaaaaatattccaatcaaaccgaacgcgataactcacg

SEQ ID NO: 39201 - DNA, 50 bp, synthetic construct
  source 1..50: mol_type = other DNA
atcatactaactcttcaaaacaaataaaaacaaaaacacaaaactactca

SEQ ID NO: 39202 - DNA, 50 bp, synthetic construct
  source 1..50: mol_type = other DNA
atcatactaactcttcaaaacaaataaaaacaaaaacacgaaactactcg

SEQ ID NO: 39203 - DNA, 50 bp, synthetic construct
  source 1..50: mol_type = other DNA
acacccaataatcatactaactcttcaaaacaaataaaaacaaaaacaca

SEQ ID NO: 39204 - DNA, 50 bp, synthetic construct
  source 1..50: mol_type = other DNA
acgcccaataatcatactaactcttcaaaacaaataaaaacaaaaacacg

SEQ ID NO: 39205 - DNA, 50 bp, synthetic construct
  source 1..50: mol_type = other DNA
caaaatcaccaactactttacatatatacccaaataaaatcaaaaaacca

SEQ ID NO: 39206 - DNA, 50 bp, synthetic construct
  source 1..50: mol_type = other DNA
caaaatcaccgactactttacgtatatacccaaataaaatcaaaaaaccg

SEQ ID NO: 39207 - DNA, 50 bp, synthetic construct
  source 1..50: mol_type = other DNA
aaaaaaattaccattcctacataaaacaaatacttcatactctctcacca

SEQ ID NO: 39208 - DNA, 50 bp, synthetic construct
  source 1..50: mol_type = other DNA
aaaaaaattaccgttcctacgtaaaacaaatacttcgtactctctcgccg

SEQ ID NO: 39209 - DNA, 50 bp, synthetic construct
  source 1..50: mol_type = other DNA
tccaaatcctataactcaacttcacttacatttaaataacaataaccaca

SEQ ID NO: 39210 - DNA, 50 bp, synthetic construct
  source 1..50: mol_type = other DNA
tccgaatcctataactcgacttcacttacgtttaaataacaataaccgcg

SEQ ID NO: 39211 - DNA, 50 bp, synthetic construct
  source 1..50: mol_type = other DNA
aaaaaaaaacaccctcaataaaaataaccacaatcactattatctaaaca

SEQ ID NO: 39212 - DNA, 50 bp, synthetic construct
  source 1..50: mol_type = other DNA
aaaaaaaaacgccctcaataaaaataaccgcgatcactattatctaaacg

SEQ ID NO: 39213 - DNA, 50 bp, synthetic construct
  source 1..50: mol_type = other DNA
atctaaacacaaataaaaccaaatcacaaaacccaaatattatcaattca

SEQ ID NO: 39214 - DNA, 50 bp, synthetic construct
  source 1..50: mol_type = other DNA
atctaaacgcaaataaaaccgaatcacaaaacccgaatattatcaattcg

SEQ ID NO: 39215 - DNA, 50 bp, synthetic construct
  source 1..50: mol_type = other DNA
atctacaaccaaaataaaataacaacactaaaaactttatacaacttcca

SEQ ID NO: 39216 - DNA, 50 bp, synthetic construct
  source 1..50: mol_type = other DNA
atctacaaccgaaataaaataacgacgctaaaaactttatacgacttccg

SEQ ID NO: 39217 - DNA, 50 bp, synthetic construct
  source 1..50: mol_type = other DNA
caaccaaaataaaataacaacactaaaaactttatacaacttccaaaaca

SEQ ID NO: 39218 - DNA, 50 bp, synthetic construct
  source 1..50: mol_type = other DNA
caaccgaaataaaataacgacgctaaaaactttatacgacttccgaaacg

SEQ ID NO: 39219 - DNA, 50 bp, synthetic construct
  source 1..50: mol_type = other DNA
ccaaaataaaataacaacactaaaaactttatacaacttccaaaacatca

SEQ ID NO: 39220 - DNA, 50 bp, synthetic construct
  source 1..50: mol_type = other DNA
ccgaaataaaataacgacgctaaaaactttatacgacttccgaaacgtcg

SEQ ID NO: 39221 - DNA, 50 bp, synthetic construct
  source 1..50: mol_type = other DNA
aaaataaaataacaacactaaaaactttatacaacttccaaaacatcaca

SEQ ID NO: 39222 - DNA, 50 bp, synthetic construct
  source 1..50: mol_type = other DNA
gaaataaaataacgacgctaaaaactttatacgacttccgaaacgtcgcg

SEQ ID NO: 39223 - DNA, 50 bp, synthetic construct
  source 1..50: mol_type = other DNA
tatatcaaaaactaccctcaatctcacctactaaactaaatcaacaatca

SEQ ID NO: 39224 - DNA, 50 bp, synthetic construct
  source 1..50: mol_type = other DNA
tatatcgaaaactaccctcgatctcacctactaaactaaatcgacaatcg

SEQ ID NO: 39225 - DNA, 50 bp, synthetic construct
  source 1..50: mol_type = other DNA
caacctaaaactaaaatccaattaccaattcaacccaacaaataaaatca

SEQ ID NO: 39226 - DNA, 50 bp, synthetic construct
  source 1..50: mol_type = other DNA
cgacctaaaactaaaatccgattaccgattcaacccaacaaataaaatcg

SEQ ID NO: 39227 - DNA, 50 bp, synthetic construct
  source 1..50: mol_type = other DNA
tactaaaaaacaataatataatttcaactcactaaaacctccacctccca

SEQ ID NO: 39228 - DNA, 50 bp, synthetic construct
  source 1..50: mol_type = other DNA
tactaaaaaacaataatataatttcgactcactaaaacctccgcctcccg

SEQ ID NO: 39229 - DNA, 50 bp, synthetic construct
  source 1..50: mol_type = other DNA
caaaaatcccaaaccaaccccactaatatctatctcccaaaacctaaaca

SEQ ID NO: 39230 - DNA, 50 bp, synthetic construct
  source 1..50: mol_type = other DNA
caaaaatcccaaaccaaccccgctaatatctatctcccaaaacctaaacg

SEQ ID NO: 39231 - DNA, 50 bp, synthetic construct
  source 1..50: mol_type = other DNA
ccacaaaaactctaaaaaaacaccctcaacaacctaaaaccaacaaaaca

SEQ ID NO: 39232 - DNA, 50 bp, synthetic construct
  source 1..50: mol_type = other DNA
ccacaaaaactctaaaaaaacgccctcaacaacctaaaaccgacaaaacg

SEQ ID NO: 39233 - DNA, 50 bp, synthetic construct
  source 1..50: mol_type = other DNA
taaacttaaactaaccaataaatacacaaatttcttccaaaaaaactaca

SEQ ID NO: 39234 - DNA, 50 bp, synthetic construct
  source 1..50: mol_type = other DNA
taaacttaaactaaccgataaatacacgaatttcttccgaaaaaactacg

SEQ ID NO: 39235 - DNA, 50 bp, synthetic construct
  source 1..50: mol_type = other DNA
tcaaaaaactccaaaaaaaacttaaacttaaactaaccaataaatacaca

SEQ ID NO: 39236 - DNA, 50 bp, synthetic construct
  source 1..50: mol_type = other DNA
tcgaaaaactccgaaaaaaacttaaacttaaactaaccgataaatacacg

SEQ ID NO: 39237 - DNA, 50 bp, synthetic construct
  source 1..50: mol_type = other DNA
ctaaccccaactcaaaaaactccaaaaaaaacttaaacttaaactaacca

SEQ ID NO: 39238 - DNA, 50 bp, synthetic construct
  source 1..50: mol_type = other DNA
ctaaccccgactcgaaaaactccgaaaaaaacttaaacttaaactaaccg

SEQ ID NO: 39239 - DNA, 50 bp, synthetic construct
  source 1..50: mol_type = other DNA
aataacatttcctctcccaacctccaaaaaactcaatacaataaacaaca

SEQ ID NO: 39240 - DNA, 50 bp, synthetic construct
  source 1..50: mol_type = other DNA
aataacatttcctctcccaacctccgaaaaactcgatacaataaacaacg

SEQ ID NO: 39241 - DNA, 50 bp, synthetic construct
  source 1..50: mol_type = other DNA
caattttaaaatccaaataacatttcctctcccaacctccaaaaaactca

SEQ ID NO: 39242 - DNA, 50 bp, synthetic construct
  source 1..50: mol_type = other DNA
cgattttaaaatccaaataacatttcctctcccaacctccgaaaaactcg

SEQ ID NO: 39243 - DNA, 50 bp, synthetic construct
  source 1..50: mol_type = other DNA
catctctttaaaatcccaacaaaatattcacctataacatatcaataaca

SEQ ID NO: 39244 - DNA, 50 bp, synthetic construct
  source 1..50: mol_type = other DNA
cgtctctttaaaatcccaacgaaatattcacctataacgtatcgataacg

SEQ ID NO: 39245 - DNA, 50 bp, synthetic construct
  source 1..50: mol_type = other DNA
aaaccaaaacaaaaaaacaacataaacacaacttaacaaactaaaactca

SEQ ID NO: 39246 - DNA, 50 bp, synthetic construct
  source 1..50: mol_type = other DNA
aaaccaaaacgaaaaaacgacgtaaacgcgacttaacaaactaaaactcg

SEQ ID NO: 39247 - DNA, 50 bp, synthetic construct
  source 1..50: mol_type = other DNA
tcactaaaattttaaaaaaacaaacttcaacctactaaaccacactcaca

SEQ ID NO: 39248 - DNA, 50 bp, synthetic construct
  source 1..50: mol_type = other DNA
tcgctaaaattttaaaaaaacgaacttcaacctactaaaccgcgctcacg

SEQ ID NO: 39249 - DNA, 50 bp, synthetic construct
  source 1..50: mol_type = other DNA
taaactttaaacataataaaaaaactacccaacccacaatacacccaaca

SEQ ID NO: 39250 - DNA, 50 bp, synthetic construct
  source 1..50: mol_type = other DNA
taaactttaaacgtaataaaaaaactacccaacccgcaatacacccgacg

SEQ ID NO: 39251 - DNA, 50 bp, synthetic construct
  source 1..50: mol_type = other DNA
aacatccttcacaaatataatttataactttaaaacaacaatcccaacca

SEQ ID NO: 39252 - DNA, 50 bp, synthetic construct
  source 1..50: mol_type = other DNA
aacgtccttcacgaatataatttataactttaaaacgacgatcccgaccg

SEQ ID NO: 39253 - DNA, 50 bp, synthetic construct
  source 1..50: mol_type = other DNA
aaaaaacatccttcacaaatataatttataactttaaaacaacaatccca

SEQ ID NO: 39254 - DNA, 50 bp, synthetic construct
  source 1..50: mol_type = other DNA
gaaaaacgtccttcacgaatataatttataactttaaaacgacgatcccg

SEQ ID NO: 39255 - DNA, 50 bp, synthetic construct
  source 1..50: mol_type = other DNA
aataacaacactcaacaaaaaacctcaaacaaaaaaccaactaaaaacca

SEQ ID NO: 39256 - DNA, 50 bp, synthetic construct
  source 1..50: mol_type = other DNA
aataacaacgctcgacaaaaaacctcgaacgaaaaaccaactaaaaaccg

SEQ ID NO: 39257 - DNA, 50 bp, synthetic construct
  source 1..50: mol_type = other DNA
aaacaacaacatataaacaactcaaataaaaaatcacacacaataaccca

SEQ ID NO: 39258 - DNA, 50 bp, synthetic construct
  source 1..50: mol_type = other DNA
gaacgacaacgtataaacaactcaaataaaaaatcacgcgcgataacccg

SEQ ID NO: 39259 - DNA, 50 bp, synthetic construct
  source 1..50: mol_type = other DNA
ataaaaacaaacaacaacatataaacaactcaaataaaaaatcacacaca

SEQ ID NO: 39260 - DNA, 50 bp, synthetic construct
  source 1..50: mol_type = other DNA
ataaaaacgaacgacaacgtataaacaactcaaataaaaaatcacgcgcg

SEQ ID NO: 39261 - DNA, 50 bp, synthetic construct
  source 1..50: mol_type = other DNA
aaataaaaacaaacaacaacatataaacaactcaaataaaaaatcacaca

SEQ ID NO: 39262 - DNA, 50 bp, synthetic construct
  source 1..50: mol_type = other DNA
aaataaaaacgaacgacaacgtataaacaactcaaataaaaaatcacgcg

SEQ ID NO: 39263 - DNA, 50 bp, synthetic construct
  source 1..50: mol_type = other DNA
acaaataaaaacaaacaacaacatataaacaactcaaataaaaaatcaca

SEQ ID NO: 39264 - DNA, 50 bp, synthetic construct
  source 1..50: mol_type = other DNA
gcaaataaaaacgaacgacaacgtataaacaactcaaataaaaaatcacg

SEQ ID NO: 39265 - DNA, 50 bp, synthetic construct
  source 1..50: mol_type = other DNA
caaaaatatactatataaaataaatatactaacccaaatctaaaaaatca

SEQ ID NO: 39266 - DNA, 50 bp, synthetic construct
  source 1..50: mol_type = other DNA
caaaaatatactatataaaataaatatactaacccaaatctaaaaaatcg

SEQ ID NO: 39267 - DNA, 50 bp, synthetic construct
  source 1..50: mol_type = other DNA
ttttaaaataaaatctccctatatccctcaaaataaaacataataaaaca

SEQ ID NO: 39268 - DNA, 50 bp, synthetic construct
  source 1..50: mol_type = other DNA
ttttaaaataaaatctccctatatccctcaaaataaaacgtaataaaacg

SEQ ID NO: 39269 - DNA, 50 bp, synthetic construct
  source 1..50: mol_type = other DNA
aggtaggagaattattgaaatttgggagggggttaagattgttttattat

SEQ ID NO: 39270 - DNA, 50 bp, synthetic construct
  source 1..50: mol_type = other DNA
aggtaggagaattattgaaatttgggagggggttaagatcgttttattac

SEQ ID NO: 39271 - DNA, 50 bp, synthetic construct
  source 1..50: mol_type = other DNA
cacatttttaattaaaacatcataccaaaataaacttataaaaaaaacca

SEQ ID NO: 39272 - DNA, 50 bp, synthetic construct
  source 1..50: mol_type = other DNA
cacatttttaattaaaacgtcataccaaaataaacttataaaaaaaaccg

SEQ ID NO: 39273 - DNA, 50 bp, synthetic construct
  source 1..50: mol_type = other DNA
ttcccacaaacttattttaacataacatcctaatcaaaaatataaaaaca

SEQ ID NO: 39274 - DNA, 50 bp, synthetic construct
  source 1..50: mol_type = other DNA
ttcccacaaacttattttaacataacgtcctaatcaaaaatataaaaacg

SEQ ID NO: 39275 - DNA, 50 bp, synthetic construct
  source 1..50: mol_type = other DNA
aacaaaaacaactaattacccaaaattctctaaaaaaaccaaaaaaatca

SEQ ID NO: 39276 - DNA, 50 bp, synthetic construct
  source 1..50: mol_type = other DNA
aacgaaaacgactaattacccaaaattctctaaaaaaaccaaaaaaatcg

SEQ ID NO: 39277 - DNA, 50 bp, synthetic construct
  source 1..50: mol_type = other DNA
taaacttccctaatatcccactactaaatcccaccaacataaaatccaca

SEQ ID NO: 39278 - DNA, 50 bp, synthetic construct
  source 1..50: mol_type = other DNA
taaacttccctaatatcccactactaaatcccaccgacataaaatccacg

SEQ ID NO: 39279 - DNA, 50 bp, synthetic construct
  source 1..50: mol_type = other DNA
aatcctaactcaaccaaataaaatcttatacaaattaaataatatttcca

SEQ ID NO: 39280 - DNA, 50 bp, synthetic construct
  source 1..50: mol_type = other DNA
aatcctaactcaaccaaataaaatcttatacaaattaaataatatttccg

SEQ ID NO: 39281 - DNA, 50 bp, synthetic construct
  source 1..50: mol_type = other DNA
catactcataaccccaataaccaaaaaacattaccaaactaaataaaaca

SEQ ID NO: 39282 - DNA, 50 bp, synthetic construct
  source 1..50: mol_type = other DNA
cgtactcgtaaccccaataaccaaaaaacgttaccaaactaaataaaacg

SEQ ID NO: 39283 - DNA, 50 bp, synthetic construct
  source 1..50: mol_type = other DNA
tagttgtttttgtagtttgggtatatagttgttttatttagtttggtaat

SEQ ID NO: 39284 - DNA, 50 bp, synthetic construct
  source 1..50: mol_type = other DNA
tagttgtttttgtagtttgggtatatagtcgttttatttagtttggtaac

SEQ ID NO: 39285 - DNA, 50 bp, synthetic construct
  source 1..50: mol_type = other DNA
ttgttttatttagtttggtaatgttttttggttattggggttatgagtat

SEQ ID NO: 39286 - DNA, 50 bp, synthetic construct
  source 1..50: mol_type = other DNA
tcgttttatttagtttggtaacgttttttggttattggggttacgagtac

SEQ ID NO: 39287 - DNA, 50 bp, synthetic construct
  source 1..50: mol_type = other DNA
ttcatctcctaactcatttaaaaaaaattataattaatactataaacaca

SEQ ID NO: 39288 - DNA, 50 bp, synthetic construct
  source 1..50: mol_type = other DNA
ttcatctcctaactcatttaaaaaaaattataattaatactataaacacg

SEQ ID NO: 39289 - DNA, 50 bp, synthetic construct
  source 1..50: mol_type = other DNA
aataaaaaaattattaaataaacactatttcaaatctaacactttcctca

SEQ ID NO: 39290 - DNA, 50 bp, synthetic construct
  source 1..50: mol_type = other DNA
aataaaaaaattattaaataaacactatttcaaatctaacactttcctcg

SEQ ID NO: 39291 - DNA, 50 bp, synthetic construct
  source 1..50: mol_type = other DNA
ctaaaaaacatacaaaacctcatctctacttaaaatacaaaaattatcca

SEQ ID NO: 39292 - DNA, 50 bp, synthetic construct
  source 1..50: mol_type = other DNA
ctaaaaaacatacaaaacctcgtctctacttaaaatacaaaaattatccg

SEQ ID NO: 39293 - DNA, 50 bp, synthetic construct
  source 1..50: mol_type = other DNA
taaaaacaaaattttacatatttcccaaactaaattacttaattcaaaca

SEQ ID NO: 39294 - DNA, 50 bp, synthetic construct
  source 1..50: mol_type = other DNA
taaaaacgaaattttacatatttcccaaactaaattacttaattcaaacg

SEQ ID NO: 39295 - DNA, 50 bp, synthetic construct
  source 1..50: mol_type = other DNA
ttcaatctttttaatattaaacattttaccaatcttaaaataaaaacaca

SEQ ID NO: 39296 - DNA, 50 bp, synthetic construct
  source 1..50: mol_type = other DNA
ttcaatctttttaatattaaacattttaccaatcttaaaataaaaacacg

SEQ ID NO: 39297 - DNA, 50 bp, synthetic construct
  source 1..50: mol_type = other DNA
acaaaaatattcattttaataacccaatttcataatctattaaatataca

SEQ ID NO: 39298 - DNA, 50 bp, synthetic construct
  source 1..50: mol_type = other DNA
acaaaaatattcattttaataacccaatttcataatctattaaatatacg

SEQ ID NO: 39299 - DNA, 50 bp, synthetic construct
  source 1..50: mol_type = other DNA
tacaaaaataacttttatttatttataaaacatcactaccatactaaaca

SEQ ID NO: 39300 - DNA, 50 bp, synthetic construct
  source 1..50: mol_type = other DNA
tacaaaaataacttttatttatttataaaacatcactaccatactaaacg

SEQ ID NO: 39301 - DNA, 50 bp, synthetic construct
  source 1..50: mol_type = other DNA
actcaacaaactcacttctcctaccttcttatacctactttttctaacca

SEQ ID NO: 39302 - DNA, 50 bp, synthetic construct
  source 1..50: mol_type = other DNA
actcaacaaactcacttctcctaccttcttatacctactttttctaaccg

SEQ ID NO: 39303 - DNA, 50 bp, synthetic construct
  source 1..50: mol_type = other DNA
ctacctcccccaatccactaactcaaatattaatctcccttaacaataca

SEQ ID NO: 39304 - DNA, 50 bp, synthetic construct
  source 1..50: mol_type = other DNA
ctacctcccccaatccactaactcaaatattaatctcccttaacaatacg

SEQ ID NO: 39305 - DNA, 50 bp, synthetic construct
  source 1..50: mol_type = other DNA
aataatcccttttactttaaaaaaaatatttcaacaaattccctttatca

SEQ ID NO: 39306 - DNA, 50 bp, synthetic construct
  source 1..50: mol_type = other DNA
aataatcccttttactttaaaaaaaatatttcaacaaattccctttatcg

SEQ ID NO: 39307 - DNA, 50 bp, synthetic construct
  source 1..50: mol_type = other DNA
aaatatctacatatcaattccaacaaaaaacatctacaaatctacataca

SEQ ID NO: 39308 - DNA, 50 bp, synthetic construct
  source 1..50: mol_type = other DNA
aaatatctacgtatcaattccaacaaaaaacgtctacgaatctacgtacg

SEQ ID NO: 39309 - DNA, 50 bp, synthetic construct
  source 1..50: mol_type = other DNA
cactaaatatctacatatcaattccaacaaaaaacatctacaaatctaca

SEQ ID NO: 39310 - DNA, 50 bp, synthetic construct
  source 1..50: mol_type = other DNA
cgctaaatatctacgtatcaattccaacaaaaaacgtctacgaatctacg

SEQ ID NO: 39311 - DNA, 50 bp, synthetic construct
  source 1..50: mol_type = other DNA
aacaaaaccactaaatatctacatatcaattccaacaaaaaacatctaca

SEQ ID NO: 39312 - DNA, 50 bp, synthetic construct
  source 1..50: mol_type = other DNA
gacgaaaccgctaaatatctacgtatcaattccaacaaaaaacgtctacg

SEQ ID NO: 39313 - DNA, 50 bp, synthetic construct
  source 1..50: mol_type = other DNA
attaacaacaaaaccactaaatatctacatatcaattccaacaaaaaaca

SEQ ID NO: 39314 - DNA, 50 bp, synthetic construct
  source 1..50: mol_type = other DNA
attaacgacgaaaccgctaaatatctacgtatcaattccaacaaaaaacg

SEQ ID NO: 39315 - DNA, 50 bp, synthetic construct
  source 1..50: mol_type = other DNA
taaaataaaattaaattttacattaacaacaaaaccactaaatatctaca

SEQ ID NO: 39316 - DNA, 50 bp, synthetic construct
  source 1..50: mol_type = other DNA
taaaataaaattaaattttacattaacgacgaaaccgctaaatatctacg

SEQ ID NO: 39317 - DNA, 50 bp, synthetic construct
  source 1..50: mol_type = other DNA
taacattactacctaaaataaaattaaattttacattaacaacaaaacca

SEQ ID NO: 39318 - DNA, 50 bp, synthetic construct
  source 1..50: mol_type = other DNA
taacattactacctaaaataaaattaaattttacattaacgacgaaaccg

SEQ ID NO: 39319 - DNA, 50 bp, synthetic construct
  source 1..50: mol_type = other DNA
ctaaaataacattactacctaaaataaaattaaattttacattaacaaca

SEQ ID NO: 39320 - DNA, 50 bp, synthetic construct
  source 1..50: mol_type = other DNA
ctaaaataacattactacctaaaataaaattaaattttacattaacgacg

SEQ ID NO: 39321 - DNA, 50 bp, synthetic construct
  source 1..50: mol_type = other DNA
aacctaaaataacattactacctaaaataaaattaaattttacattaaca

SEQ ID NO: 39322 - DNA, 50 bp, synthetic construct
  source 1..50: mol_type = other DNA
aacctaaaataacattactacctaaaataaaattaaattttacattaacg

SEQ ID NO: 39323 - DNA, 50 bp, synthetic construct
  source 1..50: mol_type = other DNA
actaccaacaatcaccctaataaaacacctaaaacaaaaaaccactccca

SEQ ID NO: 39324 - DNA, 50 bp, synthetic construct
  source 1..50: mol_type = other DNA
actaccaacaatcaccctaataaaacacctaaaacaaaaaaccgctcccg

SEQ ID NO: 39325 - DNA, 50 bp, synthetic construct
  source 1..50: mol_type = other DNA
ctaattaaccccaaaacacaactaaaactccacttcctctataaatccca

SEQ ID NO: 39326 - DNA, 50 bp, synthetic construct
  source 1..50: mol_type = other DNA
ctaattaaccccgaaacacaactaaaactccacttcctctataaatcccg

SEQ ID NO: 39327 - DNA, 50 bp, synthetic construct
  source 1..50: mol_type = other DNA
aacatctaaaaccaaaaacaaacaaactaccaactatacacatctaaaca

SEQ ID NO: 39328 - DNA, 50 bp, synthetic construct
  source 1..50: mol_type = other DNA
aacgtctaaaaccgaaaacgaacgaactaccaactatacgcatctaaacg

SEQ ID NO: 39329 - DNA, 50 bp, synthetic construct
  source 1..50: mol_type = other DNA
aaaaacctacaaatataaaaattaaaaccaaaaccaaaactaaaatatca

SEQ ID NO: 39330 - DNA, 50 bp, synthetic construct
  source 1..50: mol_type = other DNA
aaaaacctacgaatataaaaattaaaaccaaaaccgaaactaaaatatcg

SEQ ID NO: 39331 - DNA, 50 bp, synthetic construct
  source 1..50: mol_type = other DNA
ttcaacacaccctaaaaaacctacaaatataaaaattaaaaccaaaacca

SEQ ID NO: 39332 - DNA, 50 bp, synthetic construct
  source 1..50: mol_type = other DNA
ttcgacacgccctaaaaaacctacgaatataaaaattaaaaccaaaaccg

SEQ ID NO: 39333 - DNA, 50 bp, synthetic construct
  source 1..50: mol_type = other DNA
aaaacatatcaaaaactctaaacattaacaccaaaactcctatttaacca

SEQ ID NO: 39334 - DNA, 50 bp, synthetic construct
  source 1..50: mol_type = other DNA
aaaacgtatcgaaaactctaaacgttaacgccgaaactcctatttaaccg

SEQ ID NO: 39335 - DNA, 50 bp, synthetic construct
  source 1..50: mol_type = other DNA
aaaacttactcaaataaaaaaaacacacaaaactattccattattctcca

SEQ ID NO: 39336 - DNA, 50 bp, synthetic construct
  source 1..50: mol_type = other DNA
aaaacttactcgaataaaaaaaacgcgcaaaactattccattattctccg

SEQ ID NO: 39337 - DNA, 50 bp, synthetic construct
  source 1..50: mol_type = other DNA
aaaacaaacattcacaacataatacaaaccaaccacaaacaaaaaaaaca

SEQ ID NO: 39338 - DNA, 50 bp, synthetic construct
  source 1..50: mol_type = other DNA
aaaacgaacgttcgcaacataatacaaaccgaccgcaaacgaaaaaaacg

SEQ ID NO: 39339 - DNA, 50 bp, synthetic construct
  source 1..50: mol_type = other DNA
acatataaattaacaacctatattcccctccacaaacaataaccaaacca

SEQ ID NO: 39340 - DNA, 50 bp, synthetic construct
  source 1..50: mol_type = other DNA
acgtataaattaacaacctatattcccctccacgaacaataaccgaaccg

SEQ ID NO: 39341 - DNA, 50 bp, synthetic construct
  source 1..50: mol_type = other DNA
aataattctacacaaaaacatactaaataatcaaacactacaaaaataca

SEQ ID NO: 39342 - DNA, 50 bp, synthetic construct
  source 1..50: mol_type = other DNA
aataattctacacaaaaacgtactaaataatcaaacgctacaaaaatacg

SEQ ID NO: 39343 - DNA, 50 bp, synthetic construct
  source 1..50: mol_type = other DNA
aacttcattttttttcttaatctttttttaacacatcttcttaaccttca

SEQ ID NO: 39344 - DNA, 50 bp, synthetic construct
  source 1..50: mol_type = other DNA
aacttcattttttttcttaatctttttttaacacatcttcttaaccttcg

SEQ ID NO: 39345 - DNA, 50 bp, synthetic construct
  source 1..50: mol_type = other DNA
atcatcatcctcaaaactctaaaaaaaaacactaaataaatataatatca

SEQ ID NO: 39346 - DNA, 50 bp, synthetic construct
  source 1..50: mol_type = other DNA
atcatcatcctcaaaactctaaaaaaaaacactaaataaatataatatcg

SEQ ID NO: 39347 - DNA, 50 bp, synthetic construct
  source 1..50: mol_type = other DNA
tcaaaactctaaaaaaaaacactaaataaatataatatcataacccctca

SEQ ID NO: 39348 - DNA, 50 bp, synthetic construct
  source 1..50: mol_type = other DNA
tcaaaactctaaaaaaaaacactaaataaatataatatcgtaacccctcg

SEQ ID NO: 39349 - DNA, 50 bp, synthetic construct
  source 1..50: mol_type = other DNA
aacaaccatctaaaaactttacctaaatcttaaccacctaccttacaaca

SEQ ID NO: 39350 - DNA, 50 bp, synthetic construct
  source 1..50: mol_type = other DNA
aacgaccgtctaaaaactttacctaaatcttaaccacctaccttacgacg

SEQ ID NO: 39351 - DNA, 50 bp, synthetic construct
  source 1..50: mol_type = other DNA
aaaaacaaccatctaaaaactttacctaaatcttaaccacctaccttaca

SEQ ID NO: 39352 - DNA, 50 bp, synthetic construct
  source 1..50: mol_type = other DNA
aaaaacgaccgtctaaaaactttacctaaatcttaaccacctaccttacg

SEQ ID NO: 39353 - DNA, 50 bp, synthetic construct
  source 1..50: mol_type = other DNA
aactaataaaaaccctttaccccttcccaattcactatcccctaacaaca

SEQ ID NO: 39354 - DNA, 50 bp, synthetic construct
  source 1..50: mol_type = other DNA
aactaataaaaaccctttaccccttcccaattcgctatcccctaacaacg

SEQ ID NO: 39355 - DNA, 50 bp, synthetic construct
  source 1..50: mol_type = other DNA
cctaatctccttcctaactacaccactataaacattactaaaaaacaaca

SEQ ID NO: 39356 - DNA, 50 bp, synthetic construct
  source 1..50: mol_type = other DNA
cctaatctccttcctaactacgccgctataaacgttactaaaaaacaacg

SEQ ID NO: 39357 - DNA, 50 bp, synthetic construct
  source 1..50: mol_type = other DNA
aaaaaacaccaaactaatcaacctaaacaaaaaaaacccacaaaaaacca

SEQ ID NO: 39358 - DNA, 50 bp, synthetic construct
  source 1..50: mol_type = other DNA
aaaaaacgccgaactaatcaacctaaacgaaaaaaacccacaaaaaaccg

SEQ ID NO: 39359 - DNA, 50 bp, synthetic construct
  source 1..50: mol_type = other DNA
ctccaaaattcccccaaataaaaaaaatactaccacaaaaataaaaaaca

SEQ ID NO: 39360 - DNA, 50 bp, synthetic construct
  source 1..50: mol_type = other DNA
ctccaaaattcccccgaataaaaaaaatactaccgcgaaaataaaaaacg

SEQ ID NO: 39361 - DNA, 50 bp, synthetic construct
  source 1..50: mol_type = other DNA
ccaaaaaaatcctaaaaaaactacaaacacaaataataaaataacaatca

SEQ ID NO: 39362 - DNA, 50 bp, synthetic construct
  source 1..50: mol_type = other DNA
ccgaaaaaatcctaaaaaaactacaaacgcgaataataaaataacaatcg

SEQ ID NO: 39363 - DNA, 50 bp, synthetic construct
  source 1..50: mol_type = other DNA
tcctaaaaaaactacaaacacaaataataaaataacaatcactaactaca

SEQ ID NO: 39364 - DNA, 50 bp, synthetic construct
  source 1..50: mol_type = other DNA
tcctaaaaaaactacaaacgcgaataataaaataacaatcgctaactacg

SEQ ID NO: 39365 - DNA, 50 bp, synthetic construct
  source 1..50: mol_type = other DNA
tattaaaaaataaaaacaatccaaaaaccctatcatacacacaatatcca

SEQ ID NO: 39366 - DNA, 50 bp, synthetic construct
  source 1..50: mol_type = other DNA
tattaaaaaataaaaacgatccaaaaaccctatcgtacgcacaatatccg

SEQ ID NO: 39367 - DNA, 50 bp, synthetic construct
  source 1..50: mol_type = other DNA
aacacaaaaactaactcaaaaaccattccaaaaaccacaaacactataca

SEQ ID NO: 39368 - DNA, 50 bp, synthetic construct
  source 1..50: mol_type = other DNA
aacgcaaaaactaactcaaaaaccattccaaaaaccgcgaacactatacg

SEQ ID NO: 39369 - DNA, 50 bp, synthetic construct
  source 1..50: mol_type = other DNA
aaaattccataataataactacaaaaatacaaaaataacaaatacaacca

SEQ ID NO: 39370 - DNA, 50 bp, synthetic construct
  source 1..50: mol_type = other DNA
aaaattccgtaataataactacgaaaatacaaaaataacgaatacgaccg

SEQ ID NO: 39371 - DNA, 50 bp, synthetic construct
  source 1..50: mol_type = other DNA
aaaaacaaaaaactcaaaaaaaaccataaaatacaaaaaccaacacacca

SEQ ID NO: 39372 - DNA, 50 bp, synthetic construct
  source 1..50: mol_type = other DNA
aaaaacgaaaaactcaaaaaaaaccgtaaaatacgaaaaccgacgcgccg

SEQ ID NO: 39373 - DNA, 50 bp, synthetic construct
  source 1..50: mol_type = other DNA
taaaacaaaaaaaacaactaccaaaactaacacacaaaaacactaaacca

SEQ ID NO: 39374 - DNA, 50 bp, synthetic construct
  source 1..50: mol_type = other DNA
taaaacgaaaaaaacgactaccgaaactaacgcgcgaaaacactaaaccg

SEQ ID NO: 39375 - DNA, 50 bp, synthetic construct
  source 1..50: mol_type = other DNA
attttaaaatatttattgtgttttttaatttgagttttttggtagttgtt

SEQ ID NO: 39376 - DNA, 50 bp, synthetic construct
  source 1..50: mol_type = other DNA
attttaaaatatttattgtgttttttaatttgagtttttcggtagtcgtc

SEQ ID NO: 39377 - DNA, 50 bp, synthetic construct
  source 1..50: mol_type = other DNA
aaaaaccaaaaaaacaccatacaacctttaaaatccttcaacaactacca

SEQ ID NO: 39378 - DNA, 50 bp, synthetic construct
  source 1..50: mol_type = other DNA
aaaaaccaaaaaaacgccatacaacctttaaaatccttcgacgactaccg

SEQ ID NO: 39379 - DNA, 50 bp, synthetic construct
  source 1..50: mol_type = other DNA
caactaccaaaaaactcaaattaaaaaacacaataaatattttaaaatca

SEQ ID NO: 39380 - DNA, 50 bp, synthetic construct
  source 1..50: mol_type = other DNA
cgactaccgaaaaactcaaattaaaaaacacaataaatattttaaaatcg

SEQ ID NO: 39381 - DNA, 50 bp, synthetic construct
  source 1..50: mol_type = other DNA
aacaaacacaaaacataactaaaacacaaaaaaataccacaataaaacca

SEQ ID NO: 39382 - DNA, 50 bp, synthetic construct
  source 1..50: mol_type = other DNA
aacgaacgcaaaacgtaactaaaacgcaaaaaaataccgcgataaaaccg

SEQ ID NO: 39383 - DNA, 50 bp, synthetic construct
  source 1..50: mol_type = other DNA
aaaacacaataaatattttaaaatcaatattttttcccaatcccatcaca

SEQ ID NO: 39384 - DNA, 50 bp, synthetic construct
  source 1..50: mol_type = other DNA
aaaacacaataaatattttaaaatcgatattttttcccgatcccatcgcg

SEQ ID NO: 39385 - DNA, 50 bp, synthetic construct
  source 1..50: mol_type = other DNA
tattttaaaatcaatattttttcccaatcccatcacaacatcttcctaca

SEQ ID NO: 39386 - DNA, 50 bp, synthetic construct
  source 1..50: mol_type = other DNA
tattttaaaatcgatattttttcccgatcccatcgcgacatcttcctacg

SEQ ID NO: 39387 - DNA, 50 bp, synthetic construct
  source 1..50: mol_type = other DNA
cttcaaaaccactaaaaaaacaaaaataacacccaaataactaatcacca

SEQ ID NO: 39388 - DNA, 50 bp, synthetic construct
  source 1..50: mol_type = other DNA
cttcgaaaccgctaaaaaaacgaaaataacgcccgaataactaatcgccg

SEQ ID NO: 39389 - DNA, 50 bp, synthetic construct
  source 1..50: mol_type = other DNA
caacttcaaaaccactaaaaaaacaaaaataacacccaaataactaatca

SEQ ID NO: 39390 - DNA, 50 bp, synthetic construct
  source 1..50: mol_type = other DNA
cgacttcgaaaccgctaaaaaaacgaaaataacgcccgaataactaatcg

SEQ ID NO: 39391 - DNA, 50 bp, synthetic construct
  source 1..50: mol_type = other DNA
aaaatcacaatcccaaaaaactttctccacaacaatcaatcatccaaaca

SEQ ID NO: 39392 - DNA, 50 bp, synthetic construct
  source 1..50: mol_type = other DNA
aaaatcacaatcccgaaaaactttctccgcgacgatcaatcatccgaacg

SEQ ID NO: 39393 - DNA, 50 bp, synthetic construct
  source 1..50: mol_type = other DNA
gtgattagttatttgggtgttatttttgtttttttagtggttttgaagtt

SEQ ID NO: 39394 - DNA, 50 bp, synthetic construct
  source 1..50: mol_type = other DNA
gcgattagttattcgggcgttattttcgtttttttagcggtttcgaagtc

SEQ ID NO: 39395 - DNA, 50 bp, synthetic construct
  source 1..50: mol_type = other DNA
gattagttatttgggtgttatttttgtttttttagtggttttgaagttgt

SEQ ID NO: 39396 - DNA, 50 bp, synthetic construct
  source 1..50: mol_type = other DNA
gattagttattcgggcgttattttcgtttttttagcggtttcgaagtcgc

SEQ ID NO: 39397 - DNA, 50 bp, synthetic construct
  source 1..50: mol_type = other DNA
ctaaaacacccataactcaaaatacacaataaaactcaataaaaccaaca

SEQ ID NO: 39398 - DNA, 50 bp, synthetic construct
  source 1..50: mol_type = other DNA
ctaaaacgcccgtaactcgaaatacgcgataaaactcgataaaaccgacg

SEQ ID NO: 39399 - DNA, 50 bp, synthetic construct
  source 1..50: mol_type = other DNA
aaacaaacactccctacaaaatccctaaaacacccataactcaaaataca

SEQ ID NO: 39400 - DNA, 50 bp, synthetic construct
  source 1..50: mol_type = other DNA
aaacaaacactccctacaaaatccctaaaacgcccgtaactcgaaatacg

SEQ ID NO: 39401 - DNA, 50 bp, synthetic construct
  source 1..50: mol_type = other DNA
acaaaaaaaacaaacactccctacaaaatccctaaaacacccataactca

SEQ ID NO: 39402 - DNA, 50 bp, synthetic construct
  source 1..50: mol_type = other DNA
acgaaaaaaacaaacactccctacaaaatccctaaaacgcccgtaactcg

SEQ ID NO: 39403 - DNA, 50 bp, synthetic construct
  source 1..50: mol_type = other DNA
acaaacccaaaacaaaaaaaacaaacactccctacaaaatccctaaaaca

SEQ ID NO: 39404 - DNA, 50 bp, synthetic construct
  source 1..50: mol_type = other DNA
acgaacccgaaacgaaaaaaacaaacactccctacaaaatccctaaaacg

SEQ ID NO: 39405 - DNA, 50 bp, synthetic construct
  source 1..50: mol_type = other DNA
tttgagttatgggtgttttagggattttgtagggagtgtttgtttttttt

SEQ ID NO: 39406 - DNA, 50 bp, synthetic construct
  source 1..50: mol_type = other DNA
ttcgagttacgggcgttttagggattttgtagggagtgtttgtttttttc

SEQ ID NO: 39407 - DNA, 50 bp, synthetic construct
  source 1..50: mol_type = other DNA
ttatgtttattttttgttttgggaatttatttttggggttgttttgtttt

SEQ ID NO: 39408 - DNA, 50 bp, synthetic construct
  source 1..50: mol_type = other DNA
ttatgtttatttttcgtttcgggaatttattttcggggtcgtttcgtttc

SEQ ID NO: 39409 - DNA, 50 bp, synthetic construct
  source 1..50: mol_type = other DNA
tttttttatgtttattttttgttttgggaatttatttttggggttgtttt

SEQ ID NO: 39410 - DNA, 50 bp, synthetic construct
  source 1..50: mol_type = other DNA
tttttttatgtttatttttcgtttcgggaatttattttcggggtcgtttc

SEQ ID NO: 39411 - DNA, 50 bp, synthetic construct
  source 1..50: mol_type = other DNA
cccaaaaataaattcccaaaacaaaaaataaacataaaaaaaatatccca

SEQ ID NO: 39412 - DNA, 50 bp, synthetic construct
  source 1..50: mol_type = other DNA
cccgaaaataaattcccgaaacgaaaaataaacataaaaaaaatatcccg

SEQ ID NO: 39413 - DNA, 50 bp, synthetic construct
  source 1..50: mol_type = other DNA
aattcccaaaacaaaaaataaacataaaaaaaatatcccaaacaaaaaca

SEQ ID NO: 39414 - DNA, 50 bp, synthetic construct
  source 1..50: mol_type = other DNA
aattcccgaaacgaaaaataaacataaaaaaaatatcccgaacaaaaacg

SEQ ID NO: 39415 - DNA, 50 bp, synthetic construct
  source 1..50: mol_type = other DNA
atctacatactataaacaccaaaaaaaataaccacaattcaaaataaaca

SEQ ID NO: 39416 - DNA, 50 bp, synthetic construct
  source 1..50: mol_type = other DNA
atctacatactataaacaccgaaaaaaataaccgcgattcgaaataaacg

SEQ ID NO: 39417 - DNA, 50 bp, synthetic construct
  source 1..50: mol_type = other DNA
acaaataaaaaccaaaccaaaaaaacaaaaatacctaccaaatataatca

SEQ ID NO: 39418 - DNA, 50 bp, synthetic construct
  source 1..50: mol_type = other DNA
acgaataaaaaccaaaccaaaaaaacaaaaatacctaccaaatataatcg

SEQ ID NO: 39419 - DNA, 50 bp, synthetic construct
  source 1..50: mol_type = other DNA
taaatcttcaaatttataaacaacaataaacataaaaacaatcatttcca

SEQ ID NO: 39420 - DNA, 50 bp, synthetic construct
  source 1..50: mol_type = other DNA
taaatcttcaaatttataaacaacaataaacataaaaacaatcatttccg

SEQ ID NO: 39421 - DNA, 50 bp, synthetic construct
  source 1..50: mol_type = other DNA
acaaaaactttaaaaaaacttaaataaacttaactacctaaaaaccaaca

SEQ ID NO: 39422 - DNA, 50 bp, synthetic construct
  source 1..50: mol_type = other DNA
acaaaaactttaaaaaaacttaaataaacttaactacctaaaaaccaacg

SEQ ID NO: 39423 - DNA, 50 bp, synthetic construct
  source 1..50: mol_type = other DNA
tttaaaaaaacttaaataaacttaactacctaaaaaccaacaaaaaaaca

SEQ ID NO: 39424 - DNA, 50 bp, synthetic construct
  source 1..50: mol_type = other DNA
tttaaaaaaacttaaataaacttaactacctaaaaaccaacgaaaaaacg

SEQ ID NO: 39425 - DNA, 50 bp, synthetic construct
  source 1..50: mol_type = other DNA
aaaaaacttaaataaacttaactacctaaaaaccaacaaaaaaacaaaca

SEQ ID NO: 39426 - DNA, 50 bp, synthetic construct
  source 1..50: mol_type = other DNA
aaaaaacttaaataaacttaactacctaaaaaccaacgaaaaaacgaacg

SEQ ID NO: 39427 - DNA, 50 bp, synthetic construct
  source 1..50: mol_type = other DNA
accaacaaaaaaacaaacaaaaattcttatctatataatcaaaaacttca

SEQ ID NO: 39428 - DNA, 50 bp, synthetic construct
  source 1..50: mol_type = other DNA
accaacgaaaaaacgaacgaaaattcttatctatataatcaaaaacttcg

SEQ ID NO: 39429 - DNA, 50 bp, synthetic construct
  source 1..50: mol_type = other DNA
acaaaataatcctaaaacaaccaccaattaaactaaataataaaataaca

SEQ ID NO: 39430 - DNA, 50 bp, synthetic construct
  source 1..50: mol_type = other DNA
acaaaataatcctaaaacaaccaccaattaaactaaataataaaataacg

SEQ ID NO: 39431 - DNA, 50 bp, synthetic construct
  source 1..50: mol_type = other DNA
aacttcccaaactccaatccacttttctaaactaaaaaactaaaaaatca

SEQ ID NO: 39432 - DNA, 50 bp, synthetic construct
  source 1..50: mol_type = other DNA
aacttcccgaactccaatccgcttttctaaactaaaaaactaaaaaatcg

SEQ ID NO: 39433 - DNA, 50 bp, synthetic construct
  source 1..50: mol_type = other DNA
aactcctcatcattacaaataaccaactacaaataacacaaaataataca

SEQ ID NO: 39434 - DNA, 50 bp, synthetic construct
  source 1..50: mol_type = other DNA
aactcctcgtcgttacgaataaccaactacaaataacgcgaaataatacg

SEQ ID NO: 39435 - DNA, 50 bp, synthetic construct
  source 1..50: mol_type = other DNA
tttactaaaattcaaaccttattacaacacaaaattccctccttaaaaca

SEQ ID NO: 39436 - DNA, 50 bp, synthetic construct
  source 1..50: mol_type = other DNA
tttactaaaattcgaaccttattacgacgcgaaattccctccttaaaacg

SEQ ID NO: 39437 - DNA, 50 bp, synthetic construct
  source 1..50: mol_type = other DNA
ccttaatctcttttacatcactaatcaccaaacaaatccccaaacaacca

SEQ ID NO: 39438 - DNA, 50 bp, synthetic construct
  source 1..50: mol_type = other DNA
ccttaatctcttttacgtcactaatcaccgaacaaatccccaaacaaccg

SEQ ID NO: 39439 - DNA, 50 bp, synthetic construct
  source 1..50: mol_type = other DNA
aaaaacaaaaactaacaaacaaaattaactaccaaaaaactaaatttcca

SEQ ID NO: 39440 - DNA, 50 bp, synthetic construct
  source 1..50: mol_type = other DNA
aaaaacgaaaactaacgaacgaaattaactaccgaaaaactaaatttccg

SEQ ID NO: 39441 - DNA, 50 bp, synthetic construct
  source 1..50: mol_type = other DNA
tcacaataataaaaacaataaacattatactacaaacaactccaaaccca

SEQ ID NO: 39442 - DNA, 50 bp, synthetic construct
  source 1..50: mol_type = other DNA
tcgcaataataaaaacgataaacgttatactacgaacaactccaaacccg

SEQ ID NO: 39443 - DNA, 50 bp, synthetic construct
  source 1..50: mol_type = other DNA
taaatacacatacaccaataaatcaaaccatcctaacctaaaaaaaaaca

SEQ ID NO: 39444 - DNA, 50 bp, synthetic construct
  source 1..50: mol_type = other DNA
taaatacacatacgccaataaatcaaaccatcctaacctaaaaaaaaacg

SEQ ID NO: 39445 - DNA, 50 bp, synthetic construct
  source 1..50: mol_type = other DNA
accctactaactaaccttatataccacttccataactaaccataatcaca

SEQ ID NO: 39446 - DNA, 50 bp, synthetic construct
  source 1..50: mol_type = other DNA
accctactaactaaccttatataccgcttccataactaaccataatcacg

SEQ ID NO: 39447 - DNA, 50 bp, synthetic construct
  source 1..50: mol_type = other DNA
cctcatctctcaaaacctaactccaccctactaactaaccttatatacca

SEQ ID NO: 39448 - DNA, 50 bp, synthetic construct
  source 1..50: mol_type = other DNA
cctcatctctcaaaacctaactccaccctactaactaaccttatataccg

SEQ ID NO: 39449 - DNA, 50 bp, synthetic construct
  source 1..50: mol_type = other DNA
tctaaatacttaacactatcttacaaaaatatcaaaatcaaatttaatca

SEQ ID NO: 39450 - DNA, 50 bp, synthetic construct
  source 1..50: mol_type = other DNA
tctaaatacttaacactatcttacaaaaatatcaaaatcaaatttaatcg

SEQ ID NO: 39451 - DNA, 50 bp, synthetic construct
  source 1..50: mol_type = other DNA
taaacaatactatataaaataataaatatacacacatatacacacacaca

SEQ ID NO: 39452 - DNA, 50 bp, synthetic construct
  source 1..50: mol_type = other DNA
taaacaatactatataaaataataaatatacacacatatacacacacacg

SEQ ID NO: 39453 - DNA, 50 bp, synthetic construct
  source 1..50: mol_type = other DNA
tctaaaaatataccaaaataaatcactcttttaatatcattattccaaca

SEQ ID NO: 39454 - DNA, 50 bp, synthetic construct
  source 1..50: mol_type = other DNA
tctaaaaatataccaaaataaatcactcttttaatatcattattccaacg

SEQ ID NO: 39455 - DNA, 50 bp, synthetic construct
  source 1..50: mol_type = other DNA
ctttaaaaataaattttaacaacttaaaaaataattcaatctccactaca

SEQ ID NO: 39456 - DNA, 50 bp, synthetic construct
  source 1..50: mol_type = other DNA
ctttaaaaataaattttaacaacttaaaaaataattcaatctccactacg

SEQ ID NO: 39457 - DNA, 50 bp, synthetic construct
  source 1..50: mol_type = other DNA
aaaaaaaatactaaaaaccaacacacaaaccaaacaaacacaaaaaaaca

SEQ ID NO: 39458 - DNA, 50 bp, synthetic construct
  source 1..50: mol_type = other DNA
aaaaaaaatactaaaaaccgacgcgcgaaccgaacaaacgcaaaaaaacg

SEQ ID NO: 39459 - DNA, 50 bp, synthetic construct
  source 1..50: mol_type = other DNA
aaactcacaataacactaaaaaccactatatcaaccctacaactaaaaca

SEQ ID NO: 39460 - DNA, 50 bp, synthetic construct
  source 1..50: mol_type = other DNA
aaactcgcgataacgctaaaaaccactatatcaaccctacgactaaaacg

SEQ ID NO: 39461 - DNA, 50 bp, synthetic construct
  source 1..50: mol_type = other DNA
aacaatactaacccaacctcccaaactaaaaaaatacaaactaaatacca

SEQ ID NO: 39462 - DNA, 50 bp, synthetic construct
  source 1..50: mol_type = other DNA
aacaatactaacccgacctcccgaactaaaaaaatacgaactaaataccg

SEQ ID NO: 39463 - DNA, 50 bp, synthetic construct
  source 1..50: mol_type = other DNA
aataataaaacactcacttaacatacaaaaaataacaaaatcaataccca

SEQ ID NO: 39464 - DNA, 50 bp, synthetic construct
  source 1..50: mol_type = other DNA
aataataaaacgctcgcttaacatacgaaaaataacgaaatcgatacccg

SEQ ID NO: 39465 - DNA, 50 bp, synthetic construct
  source 1..50: mol_type = other DNA
ttaaccaacaaactaacaaaaacatttacaatcaacatatatcaacaaca

SEQ ID NO: 39466 - DNA, 50 bp, synthetic construct
  source 1..50: mol_type = other DNA
ttaaccgacaaactaacgaaaacgtttacgatcaacgtatatcaacgacg

SEQ ID NO: 39467 - DNA, 50 bp, synthetic construct
  source 1..50: mol_type = other DNA
ccaaaccaacaaaaataacattaactacaatatactccaacataacaaca

SEQ ID NO: 39468 - DNA, 50 bp, synthetic construct
  source 1..50: mol_type = other DNA
ccgaaccgacaaaaataacattaactacgatatactccgacgtaacaacg

SEQ ID NO: 39469 - DNA, 50 bp, synthetic construct
  source 1..50: mol_type = other DNA
caacaaccccaaaccaacaaaaataacattaactacaatatactccaaca

SEQ ID NO: 39470 - DNA, 50 bp, synthetic construct
  source 1..50: mol_type = other DNA
caacaaccccgaaccgacaaaaataacattaactacgatatactccgacg

SEQ ID NO: 39471 - DNA, 50 bp, synthetic construct
  source 1..50: mol_type = other DNA
aaccaatatcatctctatcaactcaaaactactaataaacacaacaaaca

SEQ ID NO: 39472 - DNA, 50 bp, synthetic construct
  source 1..50: mol_type = other DNA
aaccaatatcatctctatcgactcgaaactactaataaacgcgacaaacg

SEQ ID NO: 39473 - DNA, 50 bp, synthetic construct
  source 1..50: mol_type = other DNA
acaaaaaaaacctcccaaaaaaaaacctataaaacaccaaaccaactcca

SEQ ID NO: 39474 - DNA, 50 bp, synthetic construct
  source 1..50: mol_type = other DNA
acaaaaaaaacctcccaaaaaaaaacctataaaacaccaaaccgactccg

SEQ ID NO: 39475 - DNA, 50 bp, synthetic construct
  source 1..50: mol_type = other DNA
ctataaccataataccacatactactcttataaatcactctcccatacca

SEQ ID NO: 39476 - DNA, 50 bp, synthetic construct
  source 1..50: mol_type = other DNA
ctataaccataataccgcgtactactcttataaatcactctcccgtaccg

SEQ ID NO: 39477 - DNA, 50 bp, synthetic construct
  source 1..50: mol_type = other DNA
aaccaacatcacataactcccttcaaaacctaaccctacaaaaaaaacca

SEQ ID NO: 39478 - DNA, 50 bp, synthetic construct
  source 1..50: mol_type = other DNA
aaccaacgtcacgtaactcccttcaaaacctaaccctacaaaaaaaaccg

SEQ ID NO: 39479 - DNA, 50 bp, synthetic construct
  source 1..50: mol_type = other DNA
aaaataacaatacctacataaaaccctacaatctcttcaaaaactcccca

SEQ ID NO: 39480 - DNA, 50 bp, synthetic construct
  source 1..50: mol_type = other DNA
aaaataacgatacctacgtaaaaccctacgatctcttcaaaaactccccg

SEQ ID NO: 39481 - DNA, 50 bp, synthetic construct
  source 1..50: mol_type = other DNA
tctccttctcctctcaattcctctctctaaaaaacattctaaaaaaccca

SEQ ID NO: 39482 - DNA, 50 bp, synthetic construct
  source 1..50: mol_type = other DNA
tctccttctcctctcaattcctctctctaaaaaacgttctaaaaaacccg

SEQ ID NO: 39483 - DNA, 50 bp, synthetic construct
  source 1..50: mol_type = other DNA
ctaccctattaacactacacaccaaacacataactctaaaactcaactca

SEQ ID NO: 39484 - DNA, 50 bp, synthetic construct
  source 1..50: mol_type = other DNA
ctaccctattaacactacgcaccaaacacataactctaaaactcgactcg

SEQ ID NO: 39485 - DNA, 50 bp, synthetic construct
  source 1..50: mol_type = other DNA
tttctcccaaaaaatctactccatcttcaatcatcatttacatttctcca

SEQ ID NO: 39486 - DNA, 50 bp, synthetic construct
  source 1..50: mol_type = other DNA
tttctcccgaaaaatctactccatcttcgatcatcatttacgtttctccg

SEQ ID NO: 39487 - DNA, 50 bp, synthetic construct
  source 1..50: mol_type = other DNA
acccccaaaaacactacataaactaaaccctaaaccaaaaacaaaaaaca

SEQ ID NO: 39488 - DNA, 50 bp, synthetic construct
  source 1..50: mol_type = other DNA
acccccgaaaacgctacgtaaactaaaccctaaaccaaaaacaaaaaacg

SEQ ID NO: 39489 - DNA, 50 bp, synthetic construct
  source 1..50: mol_type = other DNA
gtaaagtttatagtatttttgtaatttagatggaggaaaaaaaattagtt

SEQ ID NO: 39490 - DNA, 50 bp, synthetic construct
  source 1..50: mol_type = other DNA
gtaaagtttatagtattttcgtaatttagatggaggaaaaaaaattagtc

SEQ ID NO: 39491 - DNA, 50 bp, synthetic construct
  source 1..50: mol_type = other DNA
gggggtttttgtatgtaaatataggaattatagaagaagataggattttt

SEQ ID NO: 39492 - DNA, 50 bp, synthetic construct
  source 1..50: mol_type = other DNA
gggggttttcgtatgtaaatataggaattatagaagaagataggattttc

SEQ ID NO: 39493 - DNA, 50 bp, synthetic construct
  source 1..50: mol_type = other DNA
ggtttttgtatgtaaatataggaattatagaagaagataggatttttgtt

SEQ ID NO: 39494 - DNA, 50 bp, synthetic construct
  source 1..50: mol_type = other DNA
ggttttcgtatgtaaatataggaattatagaagaagataggattttcgtc

SEQ ID NO: 39495 - DNA, 50 bp, synthetic construct
  source 1..50: mol_type = other DNA
ttttttgattttgtatatgtaaatttttatttttgtgttagtggtgggat

SEQ ID NO: 39496 - DNA, 50 bp, synthetic construct
  source 1..50: mol_type = other DNA
tttttcgatttcgtatatgtaaatttttattttcgcgttagcggcgggac

SEQ ID NO: 39497 - DNA, 50 bp, synthetic construct
  source 1..50: mol_type = other DNA
caaaacacaacatcccaccactaacacaaaaataaaaatttacatataca

SEQ ID NO: 39498 - DNA, 50 bp, synthetic construct
  source 1..50: mol_type = other DNA
caaaacgcaacgtcccgccgctaacgcgaaaataaaaatttacatatacg

SEQ ID NO: 39499 - DNA, 50 bp, synthetic construct
  source 1..50: mol_type = other DNA
acaacatcccaccactaacacaaaaataaaaatttacatatacaaaatca

SEQ ID NO: 39500 - DNA, 50 bp, synthetic construct
  source 1..50: mol_type = other DNA
gcaacgtcccgccgctaacgcgaaaataaaaatttacatatacgaaatcg

SEQ ID NO: 39501 - DNA, 50 bp, synthetic construct
  source 1..50: mol_type = other DNA
aaaaaacttttaaaaacacacaaaaccaactctcccaacctaaaaaaaca

SEQ ID NO: 39502 - DNA, 50 bp, synthetic construct
  source 1..50: mol_type = other DNA
aaaaaacttttaaaaacgcgcgaaaccgactctcccgacctaaaaaaacg

SEQ ID NO: 39503 - DNA, 50 bp, synthetic construct
  source 1..50: mol_type = other DNA
atacaaataacataaaaaaaaccaaccactaaaaaacttttaaaaacaca

SEQ ID NO: 39504 - DNA, 50 bp, synthetic construct
  source 1..50: mol_type = other DNA
atacgaataacgtaaaaaaaaccgaccgctaaaaaacttttaaaaacgcg

SEQ ID NO: 39505 - DNA, 50 bp, synthetic construct
  source 1..50: mol_type = other DNA
ttttttaggttgggagagttggttttgtgtgtttttaaaagttttttagt

SEQ ID NO: 39506 - DNA, 50 bp, synthetic construct
  source 1..50: mol_type = other DNA
ttttttaggtcgggagagtcggtttcgcgcgtttttaaaagttttttagc

SEQ ID NO: 39507 - DNA, 50 bp, synthetic construct
  source 1..50: mol_type = other DNA
aaaaaaccactaactcctaaaaaatccccctcctccaaattattcttcca

SEQ ID NO: 39508 - DNA, 50 bp, synthetic construct
  source 1..50: mol_type = other DNA
aaaaaaccgctaactcctaaaaaatccccctcctccaaattattcttccg

SEQ ID NO: 39509 - DNA, 50 bp, synthetic construct
  source 1..50: mol_type = other DNA
caaaaaacaacaaaaaccaaaaaataacaactaacaacataaaaaaacca

SEQ ID NO: 39510 - DNA, 50 bp, synthetic construct
  source 1..50: mol_type = other DNA
caaaaaacgacgaaaaccgaaaaataacgactaacaacgtaaaaaaaccg

SEQ ID NO: 39511 - DNA, 50 bp, synthetic construct
  source 1..50: mol_type = other DNA
cttcaaaaacacaaaaaacaacaaaaaccaaaaaataacaactaacaaca

SEQ ID NO: 39512 - DNA, 50 bp, synthetic construct
  source 1..50: mol_type = other DNA
cttcgaaaacgcaaaaaacgacgaaaaccgaaaaataacgactaacaacg

SEQ ID NO: 39513 - DNA, 50 bp, synthetic construct
  source 1..50: mol_type = other DNA
ttaaaataaacttcaaaaacacaaaaaacaacaaaaaccaaaaaataaca

SEQ ID NO: 39514 - DNA, 50 bp, synthetic construct
  source 1..50: mol_type = other DNA
ttaaaataaacttcgaaaacgcaaaaaacgacgaaaaccgaaaaataacg

SEQ ID NO: 39515 - DNA, 50 bp, synthetic construct
  source 1..50: mol_type = other DNA
aaacaaaaacttaaaataaacttcaaaaacacaaaaaacaacaaaaacca

SEQ ID NO: 39516 - DNA, 50 bp, synthetic construct
  source 1..50: mol_type = other DNA
aaacgaaaacttaaaataaacttcgaaaacgcaaaaaacgacgaaaaccg

SEQ ID NO: 39517 - DNA, 50 bp, synthetic construct
  source 1..50: mol_type = other DNA
ttaggagttagtggtttttttatgttgttagttgttattttttggttttt

SEQ ID NO: 39518 - DNA, 50 bp, synthetic construct
  source 1..50: mol_type = other DNA
ttaggagttagcggtttttttacgttgttagtcgttatttttcggttttc

SEQ ID NO: 39519 - DNA, 50 bp, synthetic construct
  source 1..50: mol_type = other DNA
tttttggtttttgttgttttttgtgtttttgaagtttattttaagttttt

SEQ ID NO: 39520 - DNA, 50 bp, synthetic construct
  source 1..50: mol_type = other DNA
ttttcggttttcgtcgttttttgcgttttcgaagtttattttaagttttc

SEQ ID NO: 39521 - DNA, 50 bp, synthetic construct
  source 1..50: mol_type = other DNA
tttgtttgtttttgtgtatgttttttgttggtttttatgtatatgttttt

SEQ ID NO: 39522 - DNA, 50 bp, synthetic construct
  source 1..50: mol_type = other DNA
tttgtttgttttcgcgtacgtttttcgtcggtttttacgtatacgttttc

SEQ ID NO: 39523 - DNA, 50 bp, synthetic construct
  source 1..50: mol_type = other DNA
tttgtttttgtttgtttttgtgtatgttttttgttggtttttatgtatat

SEQ ID NO: 39524 - DNA, 50 bp, synthetic construct
  source 1..50: mol_type = other DNA
ttcgtttttgtttgttttcgcgtacgtttttcgtcggtttttacgtatac

SEQ ID NO: 39525 - DNA, 50 bp, synthetic construct
  source 1..50: mol_type = other DNA
tagtgttttgtttttgtttgtttttgtgtatgttttttgttggtttttat

SEQ ID NO: 39526 - DNA, 50 bp, synthetic construct
  source 1..50: mol_type = other DNA
tagcgtttcgtttttgtttgttttcgcgtacgtttttcgtcggtttttac

SEQ ID NO: 39527 - DNA, 50 bp, synthetic construct
  source 1..50: mol_type = other DNA
accaacaaaaaacatacacaaaaacaaacaaaaacaaaacactaaaaaca

SEQ ID NO: 39528 - DNA, 50 bp, synthetic construct
  source 1..50: mol_type = other DNA
accgacgaaaaacgtacgcgaaaacaaacaaaaacgaaacgctaaaaacg

SEQ ID NO: 39529 - DNA, 50 bp, synthetic construct
  source 1..50: mol_type = other DNA
atttttgaatttttgtattttgggttatttagtgttgttgtttattgtat

SEQ ID NO: 39530 - DNA, 50 bp, synthetic construct
  source 1..50: mol_type = other DNA
atttttgaatttttgtatttcgggttatttagcgtcgtcgtttatcgtac

SEQ ID NO: 39531 - DNA, 50 bp, synthetic construct
  source 1..50: mol_type = other DNA
tttaatttttgaatttttgtattttgggttatttagtgttgttgtttatt

SEQ ID NO: 39532 - DNA, 50 bp, synthetic construct
  source 1..50: mol_type = other DNA
tttaatttttgaatttttgtatttcgggttatttagcgtcgtcgtttatc

SEQ ID NO: 39533 - DNA, 50 bp, synthetic construct
  source 1..50: mol_type = other DNA
aaaaacaaccacaatcaatcaatcaaaaaaccaaaaaacctctaccaaca

SEQ ID NO: 39534 - DNA, 50 bp, synthetic construct
  source 1..50: mol_type = other DNA
gaaaacgaccgcaatcaatcaatcaaaaaaccgaaaaacctctaccgacg

SEQ ID NO: 39535 - DNA, 50 bp, synthetic construct
  source 1..50: mol_type = other DNA
accaaaaacaaccacaatcaatcaatcaaaaaaccaaaaaacctctacca

SEQ ID NO: 39536 - DNA, 50 bp, synthetic construct
  source 1..50: mol_type = other DNA
accgaaaacgaccgcaatcaatcaatcaaaaaaccgaaaaacctctaccg

SEQ ID NO: 39537 - DNA, 50 bp, synthetic construct
  source 1..50: mol_type = other DNA
ttgttttttgtatttttttgtaggtagtttttagtgttttggttggaggt

SEQ ID NO: 39538 - DNA, 50 bp, synthetic construct
  source 1..50: mol_type = other DNA
tcgtttttcgtattttttcgtaggtagtttttagcgttttggtcggaggc

SEQ ID NO: 39539 - DNA, 50 bp, synthetic construct
  source 1..50: mol_type = other DNA
atggttttgttttttgtatttttttgtaggtagtttttagtgttttggtt

SEQ ID NO: 39540 - DNA, 50 bp, synthetic construct
  source 1..50: mol_type = other DNA
atggtttcgtttttcgtattttttcgtaggtagtttttagcgttttggtc

SEQ ID NO: 39541 - DNA, 50 bp, synthetic construct
  source 1..50: mol_type = other DNA
aggttttttggttttttgattgattgattgtggttgtttttggttaggat

SEQ ID NO: 39542 - DNA, 50 bp, synthetic construct
  source 1..50: mol_type = other DNA
aggtttttcggttttttgattgattgattgcggtcgttttcggttaggac

SEQ ID NO: 39543 - DNA, 50 bp, synthetic construct
  source 1..50: mol_type = other DNA
cacctccaaccaaaacactaaaaactacctacaaaaaaatacaaaaaaca

SEQ ID NO: 39544 - DNA, 50 bp, synthetic construct
  source 1..50: mol_type = other DNA
cgcctccgaccaaaacgctaaaaactacctacgaaaaaatacgaaaaacg

SEQ ID NO: 39545 - DNA, 50 bp, synthetic construct
  source 1..50: mol_type = other DNA
cactaaaaactacctacaaaaaaatacaaaaaacaaaaccataacctcca

SEQ ID NO: 39546 - DNA, 50 bp, synthetic construct
  source 1..50: mol_type = other DNA
cgctaaaaactacctacgaaaaaatacgaaaaacgaaaccataacctccg

SEQ ID NO: 39547 - DNA, 50 bp, synthetic construct
  source 1..50: mol_type = other DNA
aaaatacaaaaaacaaaaccataacctccaataaatattcataaaacaca

SEQ ID NO: 39548 - DNA, 50 bp, synthetic construct
  source 1..50: mol_type = other DNA
aaaatacgaaaaacgaaaccataacctccgataaatattcataaaacgcg

SEQ ID NO: 39549 - DNA, 50 bp, synthetic construct
  source 1..50: mol_type = other DNA
aacaaaaccataacctccaataaatattcataaaacacaaacctaaacca

SEQ ID NO: 39550 - DNA, 50 bp, synthetic construct
  source 1..50: mol_type = other DNA
aacgaaaccataacctccgataaatattcataaaacgcgaacctaaaccg

SEQ ID NO: 39551 - DNA, 50 bp, synthetic construct
  source 1..50: mol_type = other DNA
taaaaacaaaacacaccccaacaaaaactaaactccctaaactcactaca

SEQ ID NO: 39552 - DNA, 50 bp, synthetic construct
  source 1..50: mol_type = other DNA
taaaaacaaaacgcgccccaacaaaaactaaactccctaaactcactacg

SEQ ID NO: 39553 - DNA, 50 bp, synthetic construct
  source 1..50: mol_type = other DNA
aaaaaaatcctaccacaataaatttaaaaaactcaatttttactaaaaca

SEQ ID NO: 39554 - DNA, 50 bp, synthetic construct
  source 1..50: mol_type = other DNA
aaaaaaatcctaccgcaataaatttaaaaaactcaatttttactaaaacg

SEQ ID NO: 39555 - DNA, 50 bp, synthetic construct
  source 1..50: mol_type = other DNA
atttttaattaggagtgtgttagaattttttggaaggtttttttagtaat

SEQ ID NO: 39556 - DNA, 50 bp, synthetic construct
  source 1..50: mol_type = other DNA
atttttaattaggagtgtgttagaattttttggaaggtttttttagtaac

SEQ ID NO: 39557 - DNA, 50 bp, synthetic construct
  source 1..50: mol_type = other DNA
aaaccatattaactaattaacactttataacttaatatctataactaaca

SEQ ID NO: 39558 - DNA, 50 bp, synthetic construct
  source 1..50: mol_type = other DNA
aaaccatattaactaattaacactttataacttaatatctataactaacg

SEQ ID NO: 39559 - DNA, 50 bp, synthetic construct
  source 1..50: mol_type = other DNA
acaaactaaaacaaaaatttttttcctcctaacattaaataacaaaacca

SEQ ID NO: 39560 - DNA, 50 bp, synthetic construct
  source 1..50: mol_type = other DNA
acaaactaaaacaaaaatttttttcctcctaacattaaataacaaaaccg

SEQ ID NO: 39561 - DNA, 50 bp, synthetic construct
  source 1..50: mol_type = other DNA
ctatctttaactcctacaattttcttaaaatattctaaaaaaaataaaca

SEQ ID NO: 39562 - DNA, 50 bp, synthetic construct
  source 1..50: mol_type = other DNA
ctatctttaactcctacaattttcttaaaatattctaaaaaaaataaacg

SEQ ID NO: 39563 - DNA, 50 bp, synthetic construct
  source 1..50: mol_type = other DNA
tcctacaattttcttaaaatattctaaaaaaaataaacaaaaactaccca

SEQ ID NO: 39564 - DNA, 50 bp, synthetic construct
  source 1..50: mol_type = other DNA
tcctacaattttcttaaaatattctaaaaaaaataaacgaaaactacccg

SEQ ID NO: 39565 - DNA, 50 bp, synthetic construct
  source 1..50: mol_type = other DNA
agtatgaaagaaaattgaatttgtgggttttgataagattattggagggt

SEQ ID NO: 39566 - DNA, 50 bp, synthetic construct
  source 1..50: mol_type = other DNA
agtatgaaagaaaattgaatttgtgggttttgataagattatcggagggc

SEQ ID NO: 39567 - DNA, 50 bp, synthetic construct
  source 1..50: mol_type = other DNA
tttaggtagtatgaaagaaaattgaatttgtgggttttgataagattatt

SEQ ID NO: 39568 - DNA, 50 bp, synthetic construct
  source 1..50: mol_type = other DNA
tttaggtagtatgaaagaaaattgaatttgtgggttttgataagattatc

SEQ ID NO: 39569 - DNA, 50 bp, synthetic construct
  source 1..50: mol_type = other DNA
aaattaacactataaaaaatcaactaattccaaattttaaaaattaaaca

SEQ ID NO: 39570 - DNA, 50 bp, synthetic construct
  source 1..50: mol_type = other DNA
aaattaacgctataaaaaatcaactaattccaaattttaaaaattaaacg

SEQ ID NO: 39571 - DNA, 50 bp, synthetic construct
  source 1..50: mol_type = other DNA
aatcaaaaattcaaattcataaaaactaaatcctcttcattttcttatca

SEQ ID NO: 39572 - DNA, 50 bp, synthetic construct
  source 1..50: mol_type = other DNA
aatcaaaaattcaaattcataaaaactaaatcctcttcattttcttatcg

SEQ ID NO: 39573 - DNA, 50 bp, synthetic construct
  source 1..50: mol_type = other DNA
aaaaacattccaccccatcaatacttccactctaaaattaaaattatcca

SEQ ID NO: 39574 - DNA, 50 bp, synthetic construct
  source 1..50: mol_type = other DNA
aaaaacattccaccccgtcgatacttccgctctaaaattaaaattatccg

SEQ ID NO: 39575 - DNA, 50 bp, synthetic construct
  source 1..50: mol_type = other DNA
ccctttcctaaatataaaaaaacaaattccaaaaacccacaaaaaaaaca

SEQ ID NO: 39576 - DNA, 50 bp, synthetic construct
  source 1..50: mol_type = other DNA
ccctttcctaaatataaaaaaacaaattccaaaaacccgcaaaaaaaacg

SEQ ID NO: 39577 - DNA, 50 bp, synthetic construct
  source 1..50: mol_type = other DNA
tttctactatctctctaaaaactaaaactactaccaccactattccccca

SEQ ID NO: 39578 - DNA, 50 bp, synthetic construct
  source 1..50: mol_type = other DNA
tttctactatctctctaaaaactaaaactactaccgccgctattcccccg

SEQ ID NO: 39579 - DNA, 50 bp, synthetic construct
  source 1..50: mol_type = other DNA
aacacacccttaccctaaaaaacacaaaaatccataacctcttaatatca

SEQ ID NO: 39580 - DNA, 50 bp, synthetic construct
  source 1..50: mol_type = other DNA
aacacacccttaccctaaaaaacgcgaaaatccataacctcttaatatcg

SEQ ID NO: 39581 - DNA, 50 bp, synthetic construct
  source 1..50: mol_type = other DNA
tcaatccaactcaatttcatatcatttattattaacacaaaataaaaaca

SEQ ID NO: 39582 - DNA, 50 bp, synthetic construct
  source 1..50: mol_type = other DNA
tcgatccaactcaatttcgtatcatttattattaacgcgaaataaaaacg

SEQ ID NO: 39583 - DNA, 50 bp, synthetic construct
  source 1..50: mol_type = other DNA
cccacacaacataaatattcatcaaaaataaaactcaaacaataaccaca

SEQ ID NO: 39584 - DNA, 50 bp, synthetic construct
  source 1..50: mol_type = other DNA
cccgcgcgacgtaaatattcatcaaaaataaaactcgaacaataaccgcg

SEQ ID NO: 39585 - DNA, 50 bp, synthetic construct
  source 1..50: mol_type = other DNA
cacccacacaacataaatattcatcaaaaataaaactcaaacaataacca

SEQ ID NO: 39586 - DNA, 50 bp, synthetic construct
  source 1..50: mol_type = other DNA
cgcccgcgcgacgtaaatattcatcaaaaataaaactcgaacaataaccg

SEQ ID NO: 39587 - DNA, 50 bp, synthetic construct
  source 1..50: mol_type = other DNA
ctctcctcaaaatatatttttaatatcccatttctcctcctccaacacca

SEQ ID NO: 39588 - DNA, 50 bp, synthetic construct
  source 1..50: mol_type = other DNA
ctctcctcaaaatatatttttaatatcccgtttctcctcctccaacgccg

SEQ ID NO: 39589 - DNA, 50 bp, synthetic construct
  source 1..50: mol_type = other DNA
aaaatctaataaacatcaacctctcctccctacaaataaataaacccaca

SEQ ID NO: 39590 - DNA, 50 bp, synthetic construct
  source 1..50: mol_type = other DNA
aaaatctaataaacatcgacctctcctccctacgaataaataaacccgcg

SEQ ID NO: 39591 - DNA, 50 bp, synthetic construct
  source 1..50: mol_type = other DNA
aaaatcacacaacaaactcaaaacataaaaacaataaaaaataacaccca

SEQ ID NO: 39592 - DNA, 50 bp, synthetic construct
  source 1..50: mol_type = other DNA
aaaatcgcgcgacgaactcgaaacgtaaaaacgataaaaaataacgcccg

SEQ ID NO: 39593 - DNA, 50 bp, synthetic construct
  source 1..50: mol_type = other DNA
atatccccacaaaaaatcacataccacatactataaaatccatacaacca

SEQ ID NO: 39594 - DNA, 50 bp, synthetic construct
  source 1..50: mol_type = other DNA
atatccccacaaaaaatcgcataccacatactataaaatccgtacaaccg

SEQ ID NO: 39595 - DNA, 50 bp, synthetic construct
  source 1..50: mol_type = other DNA
taaaaaccccaataaacaaaaataaaaacaaactacacaaaataatatca

SEQ ID NO: 39596 - DNA, 50 bp, synthetic construct
  source 1..50: mol_type = other DNA
taaaaaccccaataaacaaaaataaaaacaaactacacgaaataatatcg

SEQ ID NO: 39597 - DNA, 50 bp, synthetic construct
  source 1..50: mol_type = other DNA
aaaaaaaatacaaaaacaaaaaacctacaatacaattaatcatcttacca

SEQ ID NO: 39598 - DNA, 50 bp, synthetic construct
  source 1..50: mol_type = other DNA
aaaaaaaatacaaaaacaaaaaacctacaatacaattaatcatcttaccg

SEQ ID NO: 39599 - DNA, 50 bp, synthetic construct
  source 1..50: mol_type = other DNA
aaaaaaaacaaaatcacaaaaactaaaatttaccccaaattactcaatca

SEQ ID NO: 39600 - DNA, 50 bp, synthetic construct
  source 1..50: mol_type = other DNA
aaaaaaaacaaaatcacaaaaactaaaatttaccccaaattactcaatcg

SEQ ID NO: 39601 - DNA, 50 bp, synthetic construct
  source 1..50: mol_type = other DNA
aaaaatcactctaacaaacatttacttcaaaatctaataccctaaaatca

SEQ ID NO: 39602 - DNA, 50 bp, synthetic construct
  source 1..50: mol_type = other DNA
aaaaatcgctctaacgaacgtttacttcgaaatctaataccctaaaatcg

SEQ ID NO: 39603 - DNA, 50 bp, synthetic construct
  source 1..50: mol_type = other DNA
acaaacatttacttcaaaatctaataccctaaaatcaccaactcaattca

SEQ ID NO: 39604 - DNA, 50 bp, synthetic construct
  source 1..50: mol_type = other DNA
acgaacgtttacttcgaaatctaataccctaaaatcgccaactcaattcg

SEQ ID NO: 39605 - DNA, 50 bp, synthetic construct
  source 1..50: mol_type = other DNA
aaacatttacttcaaaatctaataccctaaaatcaccaactcaattcaca

SEQ ID NO: 39606 - DNA, 50 bp, synthetic construct
  source 1..50: mol_type = other DNA
gaacgtttacttcgaaatctaataccctaaaatcgccaactcaattcgcg

SEQ ID NO: 39607 - DNA, 50 bp, synthetic construct
  source 1..50: mol_type = other DNA
tttacttcaaaatctaataccctaaaatcaccaactcaattcacaaatca

SEQ ID NO: 39608 - DNA, 50 bp, synthetic construct
  source 1..50: mol_type = other DNA
tttacttcgaaatctaataccctaaaatcgccaactcaattcgcgaatcg

SEQ ID NO: 39609 - DNA, 50 bp, synthetic construct
  source 1..50: mol_type = other DNA
taacccacaaaaatcccaccaattccaaaacattaaaaaactaccaaaca

SEQ ID NO: 39610 - DNA, 50 bp, synthetic construct
  source 1..50: mol_type = other DNA
taacccgcaaaaatcccgccgattccaaaacattaaaaaactaccgaacg

SEQ ID NO: 39611 - DNA, 50 bp, synthetic construct
  source 1..50: mol_type = other DNA
tcaaaaaaacaaaaaccctaaaaaccaaacaaaaaatacttcaatacaca

SEQ ID NO: 39612 - DNA, 50 bp, synthetic construct
  source 1..50: mol_type = other DNA
tcaaaaaaacgaaaaccctaaaaaccgaacgaaaaatacttcgatacgcg

SEQ ID NO: 39613 - DNA, 50 bp, synthetic construct
  source 1..50: mol_type = other DNA
actcaaaaaaacaaaaaccctaaaaaccaaacaaaaaatacttcaataca

SEQ ID NO: 39614 - DNA, 50 bp, synthetic construct
  source 1..50: mol_type = other DNA
actcaaaaaaacgaaaaccctaaaaaccgaacgaaaaatacttcgatacg

SEQ ID NO: 39615 - DNA, 50 bp, synthetic construct
  source 1..50: mol_type = other DNA
actcaactcaaaaaaacaaaaaccctaaaaaccaaacaaaaaatacttca

SEQ ID NO: 39616 - DNA, 50 bp, synthetic construct
  source 1..50: mol_type = other DNA
actcaactcaaaaaaacgaaaaccctaaaaaccgaacgaaaaatacttcg

SEQ ID NO: 39617 - DNA, 50 bp, synthetic construct
  source 1..50: mol_type = other DNA
aataataaaatcccaaccccaaacaaaacccaactcaactcaaaaaaaca

SEQ ID NO: 39618 - DNA, 50 bp, synthetic construct
  source 1..50: mol_type = other DNA
aataataaaatcccaaccccgaacgaaacccgactcaactcaaaaaaacg

SEQ ID NO: 39619 - DNA, 50 bp, synthetic construct
  source 1..50: mol_type = other DNA
cacaacatcctacaaaacaaaaaactcaaaaatatcaaaactataatcca

SEQ ID NO: 39620 - DNA, 50 bp, synthetic construct
  source 1..50: mol_type = other DNA
cacgacgtcctacaaaacgaaaaactcgaaaatatcaaaactataatccg

SEQ ID NO: 39621 - DNA, 50 bp, synthetic construct
  source 1..50: mol_type = other DNA
aatacaacttaaaaaaaacactcacaacatcctacaaaacaaaaaactca

SEQ ID NO: 39622 - DNA, 50 bp, synthetic construct
  source 1..50: mol_type = other DNA
aatacaacttaaaaaaaacgctcacgacgtcctacaaaacgaaaaactcg

SEQ ID NO: 39623 - DNA, 50 bp, synthetic construct
  source 1..50: mol_type = other DNA
taacaaccaaatacaacttaaaaaaaacactcacaacatcctacaaaaca

SEQ ID NO: 39624 - DNA, 50 bp, synthetic construct
  source 1..50: mol_type = other DNA
taacaaccaaatacaacttaaaaaaaacgctcacgacgtcctacaaaacg

SEQ ID NO: 39625 - DNA, 50 bp, synthetic construct
  source 1..50: mol_type = other DNA
aacaacctaaacaacattaactcttactccacacaaaaaacacacacaca

SEQ ID NO: 39626 - DNA, 50 bp, synthetic construct
  source 1..50: mol_type = other DNA
aacgacctaaacaacgttaactcttactccacacaaaaaacacacacacg

SEQ ID NO: 39627 - DNA, 50 bp, synthetic construct
  source 1..50: mol_type = other DNA
aacccccctccaaaacaactaacaaattccttcaaacaacctaaacaaca

SEQ ID NO: 39628 - DNA, 50 bp, synthetic construct
  source 1..50: mol_type = other DNA
aacccccctccaaaacaactaacaaattccttcaaacgacctaaacaacg

SEQ ID NO: 39629 - DNA, 50 bp, synthetic construct
  source 1..50: mol_type = other DNA
ctaaacctaacctctaaaaaaaacactcctaaacctataaaacataacca

SEQ ID NO: 39630 - DNA, 50 bp, synthetic construct
  source 1..50: mol_type = other DNA
ctaaacctaacctctaaaaaaaacgctcctaaacctataaaacgtaaccg

SEQ ID NO: 39631 - DNA, 50 bp, synthetic construct
  source 1..50: mol_type = other DNA
caaactaaacaacaattcctcaacaaccactaaaaaacacaataacacca

SEQ ID NO: 39632 - DNA, 50 bp, synthetic construct
  source 1..50: mol_type = other DNA
cgaactaaacaacgattcctcaacaaccactaaaaaacgcaataacgccg

SEQ ID NO: 39633 - DNA, 50 bp, synthetic construct
  source 1..50: mol_type = other DNA
aatacccacccacctataaatctccattctaaccacctaaataaattaca

SEQ ID NO: 39634 - DNA, 50 bp, synthetic construct
  source 1..50: mol_type = other DNA
aatacccgcccacctataaatctccattctaaccgcctaaataaattacg

SEQ ID NO: 39635 - DNA, 50 bp, synthetic construct
  source 1..50: mol_type = other DNA
tcaaacaaaaaaaactcaacaaaacaatacccaaaacaaaataataaaca

SEQ ID NO: 39636 - DNA, 50 bp, synthetic construct
  source 1..50: mol_type = other DNA
tcaaacaaaaaaaactcgacaaaacgatacccaaaacgaaataataaacg

SEQ ID NO: 39637 - DNA, 50 bp, synthetic construct
  source 1..50: mol_type = other DNA
aaaaaaaactcaacaaaacaatacccaaaacaaaataataaacaaaaaca

SEQ ID NO: 39638 - DNA, 50 bp, synthetic construct
  source 1..50: mol_type = other DNA
aaaaaaaactcgacaaaacgatacccaaaacgaaataataaacgaaaacg

SEQ ID NO: 39639 - DNA, 50 bp, synthetic construct
  source 1..50: mol_type = other DNA
tccaacaaaaaaactttacactcactaaaaataactcaaaaactacccca

SEQ ID NO: 39640 - DNA, 50 bp, synthetic construct
  source 1..50: mol_type = other DNA
tccgacgaaaaaactttacactcgctaaaaataactcgaaaactaccccg

SEQ ID NO: 39641 - DNA, 50 bp, synthetic construct
  source 1..50: mol_type = other DNA
aacaactttcaaatcattttcaacaaatacaaaactccctcatcaaaaca

SEQ ID NO: 39642 - DNA, 50 bp, synthetic construct
  source 1..50: mol_type = other DNA
aacaactttcgaatcattttcaacgaatacaaaactccctcgtcgaaacg

SEQ ID NO: 39643 - DNA, 50 bp, synthetic construct
  source 1..50: mol_type = other DNA
ctttaaacactacactatcttaaaaaaaaatacctaaaacactaacttca

SEQ ID NO: 39644 - DNA, 50 bp, synthetic construct
  source 1..50: mol_type = other DNA
ctttaaacgctacgctatcttaaaaaaaaatacctaaaacactaacttcg

SEQ ID NO: 39645 - DNA, 50 bp, synthetic construct
  source 1..50: mol_type = other DNA
aaaacatatcaaataataaatacaaaacaataaatacaaaacactaaaca

SEQ ID NO: 39646 - DNA, 50 bp, synthetic construct
  source 1..50: mol_type = other DNA
aaaacgtatcgaataataaatacaaaacaataaatacaaaacactaaacg

SEQ ID NO: 39647 - DNA, 50 bp, synthetic construct
  source 1..50: mol_type = other DNA
caaaaaaacccaaactataaccaaataacctacaaaaccaaaaaaaaaca

SEQ ID NO: 39648 - DNA, 50 bp, synthetic construct
  source 1..50: mol_type = other DNA
cgaaaaaacccgaactataaccgaataacctacgaaaccgaaaaaaaacg

SEQ ID NO: 39649 - DNA, 50 bp, synthetic construct
  source 1..50: mol_type = other DNA
aaatccaaaaattactactaaaaaacccaacaccttacccttttcccaca

SEQ ID NO: 39650 - DNA, 50 bp, synthetic construct
  source 1..50: mol_type = other DNA
aaatccaaaaattactactaaaaaacccaacgccttacccttttcccgcg

SEQ ID NO: 39651 - DNA, 50 bp, synthetic construct
  source 1..50: mol_type = other DNA
aatccaataactccaataactccacacaaaacatctaaataaaaaaacca

SEQ ID NO: 39652 - DNA, 50 bp, synthetic construct
  source 1..50: mol_type = other DNA
gatccaataactccgataactccacgcgaaacgtctaaataaaaaaaccg

SEQ ID NO: 39653 - DNA, 50 bp, synthetic construct
  source 1..50: mol_type = other DNA
caataactccacacaaaacatctaaataaaaaaaccaatcctaaaacaca

SEQ ID NO: 39654 - DNA, 50 bp, synthetic construct
  source 1..50: mol_type = other DNA
cgataactccacgcgaaacgtctaaataaaaaaaccgatcctaaaacacg

SEQ ID NO: 39655 - DNA, 50 bp, synthetic construct
  source 1..50: mol_type = other DNA
acatctaaataaaaaaaccaatcctaaaacacaactacaaaaaacaccca

SEQ ID NO: 39656 - DNA, 50 bp, synthetic construct
  source 1..50: mol_type = other DNA
acgtctaaataaaaaaaccgatcctaaaacacgactacgaaaaacacccg

SEQ ID NO: 39657 - DNA, 50 bp, synthetic construct
  source 1..50: mol_type = other DNA
taaataaaaaaaccaatcctaaaacacaactacaaaaaacacccaaacca

SEQ ID NO: 39658 - DNA, 50 bp, synthetic construct
  source 1..50: mol_type = other DNA
taaataaaaaaaccgatcctaaaacacgactacgaaaaacacccgaaccg

SEQ ID NO: 39659 - DNA, 50 bp, synthetic construct
  source 1..50: mol_type = other DNA
aactccaaatccaaaaatataacaatctaaaacactctcaatctaaaaca

SEQ ID NO: 39660 - DNA, 50 bp, synthetic construct
  source 1..50: mol_type = other DNA
aactccgaatccgaaaatataacgatctaaaacgctctcaatctaaaacg

SEQ ID NO: 39661 - DNA, 50 bp, synthetic construct
  source 1..50: mol_type = other DNA
ctccaaatcaaaaaaaattctacaccaaaaaacaccccaaactaaaaaca

SEQ ID NO: 39662 - DNA, 50 bp, synthetic construct
  source 1..50: mol_type = other DNA
ctccgaatcaaaaaaaattctacgccaaaaaacgccccaaactaaaaacg

SEQ ID NO: 39663 - DNA, 50 bp, synthetic construct
  source 1..50: mol_type = other DNA
actttatcctcaataccaaaaacccaattaccccattctcctcaacctca

SEQ ID NO: 39664 - DNA, 50 bp, synthetic construct
  source 1..50: mol_type = other DNA
actttatcctcgataccaaaaacccaattaccccattctcctcaacctcg

SEQ ID NO: 39665 - DNA, 50 bp, synthetic construct
  source 1..50: mol_type = other DNA
aaagggataaatagaagatttttatatatgggttgggtatggtggtttat

SEQ ID NO: 39666 - DNA, 50 bp, synthetic construct
  source 1..50: mol_type = other DNA
aaagggataaatagaagatttttatatatgggttgggtatggtggtttac

SEQ ID NO: 39667 - DNA, 50 bp, synthetic construct
  source 1..50: mol_type = other DNA
tttagtgttaattatgtttatagtgagatattttttgtttattggggatt

SEQ ID NO: 39668 - DNA, 50 bp, synthetic construct
  source 1..50: mol_type = other DNA
tttagtgttaattatgtttatagcgagatattttttgtttattggggatc

SEQ ID NO: 39669 - DNA, 50 bp, synthetic construct
  source 1..50: mol_type = other DNA
tcatcatcactcttccactccctcccttaataccaactatatttataaca

SEQ ID NO: 39670 - DNA, 50 bp, synthetic construct
  source 1..50: mol_type = other DNA
tcatcatcactcttccactccctcccttaataccaactatatttataacg

SEQ ID NO: 39671 - DNA, 50 bp, synthetic construct
  source 1..50: mol_type = other DNA
tgtaaaatgaggaagtttgattgtgtaaaggtgttaaatttttgtgtgat

SEQ ID NO: 39672 - DNA, 50 bp, synthetic construct
  source 1..50: mol_type = other DNA
tgtaaaatgaggaagtttgattgtgtaaaggtgttaaatttttgtgtgac

SEQ ID NO: 39673 - DNA, 50 bp, synthetic construct
  source 1..50: mol_type = other DNA
aaaactttaataccataaataaaaattccaaaattttccaacttctaaca

SEQ ID NO: 39674 - DNA, 50 bp, synthetic construct
  source 1..50: mol_type = other DNA
aaaactttaataccataaataaaaattccaaaattttccaacttctaacg

SEQ ID NO: 39675 - DNA, 50 bp, synthetic construct
  source 1..50: mol_type = other DNA
tgggattatttgttaagtagatataaggaaagtaggtgagttatattgat

SEQ ID NO: 39676 - DNA, 50 bp, synthetic construct
  source 1..50: mol_type = other DNA
tgggattatttgttaagtagatataaggaaagtaggtgagttatattgac

SEQ ID NO: 39677 - DNA, 50 bp, synthetic construct
  source 1..50: mol_type = other DNA
taaaaaataccataacctaccctactaatacctaccctaccattcctaca

SEQ ID NO: 39678 - DNA, 50 bp, synthetic construct
  source 1..50: mol_type = other DNA
taaaaaataccgtaacctaccctactaatacctaccctaccattcctacg

SEQ ID NO: 39679 - DNA, 50 bp, synthetic construct
  source 1..50: mol_type = other DNA
attttttttgaatagttttgttgggagaattggaggagttagttagttat

SEQ ID NO: 39680 - DNA, 50 bp, synthetic construct
  source 1..50: mol_type = other DNA
attttttttgaatagttttgttgggagaattggaggagttagttagttac

SEQ ID NO: 39681 - DNA, 50 bp, synthetic construct
  source 1..50: mol_type = other DNA
aaaactaaaaaaactaactaatcacaataactacaacaatcaaaaaatca

SEQ ID NO: 39682 - DNA, 50 bp, synthetic construct
  source 1..50: mol_type = other DNA
aaaactaaaaaaactaactaatcacgataactacaacaatcaaaaaatcg

SEQ ID NO: 39683 - DNA, 50 bp, synthetic construct
  source 1..50: mol_type = other DNA
aaaccacaaacttacactaaaacccaaccttaaaataacaacacctacca

SEQ ID NO: 39684 - DNA, 50 bp, synthetic construct
  source 1..50: mol_type = other DNA
aaaccacaaacttacactaaaacccaaccttaaaataacaacacctaccg

SEQ ID NO: 39685 - DNA, 50 bp, synthetic construct
  source 1..50: mol_type = other DNA
atcatctaacccccttccccatttactaaccttatacccaaaactaaaca

SEQ ID NO: 39686 - DNA, 50 bp, synthetic construct
  source 1..50: mol_type = other DNA
atcatctaacccccttccccatttactaaccttatacccaaaactaaacg

SEQ ID NO: 39687 - DNA, 50 bp, synthetic construct
  source 1..50: mol_type = other DNA
taatacaccctcaactataaaaataaaccccaactctaatatctacctca

SEQ ID NO: 39688 - DNA, 50 bp, synthetic construct
  source 1..50: mol_type = other DNA
taatacgccctcaactataaaaataaaccccaactctaatatctacctcg

SEQ ID NO: 39689 - DNA, 50 bp, synthetic construct
  source 1..50: mol_type = other DNA
taaaaatcatttacttaatcataacttaaataaccaaacaaaaaaactca

SEQ ID NO: 39690 - DNA, 50 bp, synthetic construct
  source 1..50: mol_type = other DNA
taaaaatcatttacttaatcgtaacttaaataaccaaacaaaaaaactcg

SEQ ID NO: 39691 - DNA, 50 bp, synthetic construct
  source 1..50: mol_type = other DNA
caaaaacactatcaaccatttcatatttattattttattttctccttaca

SEQ ID NO: 39692 - DNA, 50 bp, synthetic construct
  source 1..50: mol_type = other DNA
caaaaacactatcaaccatttcatatttattattttattttctccttacg

SEQ ID NO: 39693 - DNA, 50 bp, synthetic construct
  source 1..50: mol_type = other DNA
caactccacctttcaaaaacaaccactcttcacacatttctaacctatca

SEQ ID NO: 39694 - DNA, 50 bp, synthetic construct
  source 1..50: mol_type = other DNA
caactccgcctttcaaaaacaaccactcttcacacatttctaacctatcg

SEQ ID NO: 39695 - DNA, 50 bp, synthetic construct
  source 1..50: mol_type = other DNA
acaaaactcttctaaccacacaatccactttaaatctccctaaccaaaca

SEQ ID NO: 39696 - DNA, 50 bp, synthetic construct
  source 1..50: mol_type = other DNA
acgaaactcttctaaccacacgatccactttaaatctccctaaccaaacg

SEQ ID NO: 39697 - DNA, 50 bp, synthetic construct
  source 1..50: mol_type = other DNA
tcaaaaaaaaaacatacttcttaaaacaaatctaaccaacctctccctca

SEQ ID NO: 39698 - DNA, 50 bp, synthetic construct
  source 1..50: mol_type = other DNA
tcaaaaaaaaaacgtacttcttaaaacaaatctaaccaacctctccctcg

SEQ ID NO: 39699 - DNA, 50 bp, synthetic construct
  source 1..50: mol_type = other DNA
ccaataaaataaactccctttcccttattacaacactcaaaaaaaaaaca

SEQ ID NO: 39700 - DNA, 50 bp, synthetic construct
  source 1..50: mol_type = other DNA
ccaataaaataaactccctttcccttattacaacactcaaaaaaaaaacg

SEQ ID NO: 39701 - DNA, 50 bp, synthetic construct
  source 1..50: mol_type = other DNA
aaatacccaccataaaaaaaaatcaaaataaaacactaaaaccaaaaaca

SEQ ID NO: 39702 - DNA, 50 bp, synthetic construct
  source 1..50: mol_type = other DNA
aaatacccgccataaaaaaaaatcgaaataaaacgctaaaaccaaaaacg

SEQ ID NO: 39703 - DNA, 50 bp, synthetic construct
  source 1..50: mol_type = other DNA
ataaaaactactaaaactctccaaaccaaacctacctctcctcattacca

SEQ ID NO: 39704 - DNA, 50 bp, synthetic construct
  source 1..50: mol_type = other DNA
ataaaaactactaaaactctccaaaccgaacctacctctcctcgttaccg

SEQ ID NO: 39705 - DNA, 50 bp, synthetic construct
  source 1..50: mol_type = other DNA
cacactaccacacccaactaaattttttttatatacttttaataaaaaca

SEQ ID NO: 39706 - DNA, 50 bp, synthetic construct
  source 1..50: mol_type = other DNA
cacgctaccacgcccaactaaattttttttatatacttttaataaaaacg

SEQ ID NO: 39707 - DNA, 50 bp, synthetic construct
  source 1..50: mol_type = other DNA
taaaactaaaaaatctctcacatatctaaaaaaatattttacacaaaaca

SEQ ID NO: 39708 - DNA, 50 bp, synthetic construct
  source 1..50: mol_type = other DNA
taaaactaaaaaatctctcgcgtatctaaaaaaatattttacgcgaaacg

SEQ ID NO: 39709 - DNA, 50 bp, synthetic construct
  source 1..50: mol_type = other DNA
ggggtgttatttagtagtaatattgaagtaaatgtattgatttttttaat

SEQ ID NO: 39710 - DNA, 50 bp, synthetic construct
  source 1..50: mol_type = other DNA
ggggtgttatttagtagtaatattgaagtaaatgtattgatttttttaac

SEQ ID NO: 39711 - DNA, 50 bp, synthetic construct
  source 1..50: mol_type = other DNA
aaatccaaacctctccaatcaacaacaattaaaaaaacaaaacacataca

SEQ ID NO: 39712 - DNA, 50 bp, synthetic construct
  source 1..50: mol_type = other DNA
aaatccgaacctctccaatcaacaacgattaaaaaaacgaaacgcgtacg

SEQ ID NO: 39713 - DNA, 50 bp, synthetic construct
  source 1..50: mol_type = other DNA
caccaacccaaaaccctcactcacctcaacactacaaaatcataaaccca

SEQ ID NO: 39714 - DNA, 50 bp, synthetic construct
  source 1..50: mol_type = other DNA
cgccgacccaaaaccctcactcacctcgacgctacaaaatcataaacccg

SEQ ID NO: 39715 - DNA, 50 bp, synthetic construct
  source 1..50: mol_type = other DNA
aaaaaccacataacccaaacctatatcccaaaacccaaaacactataaca

SEQ ID NO: 39716 - DNA, 50 bp, synthetic construct
  source 1..50: mol_type = other DNA
aaaaaccgcataacccaaacctatatcccgaaacccaaaacgctataacg

SEQ ID NO: 39717 - DNA, 50 bp, synthetic construct
  source 1..50: mol_type = other DNA
actcataaattttataaaaaacataaattaaaaccaaaaaacacacctca

SEQ ID NO: 39718 - DNA, 50 bp, synthetic construct
  source 1..50: mol_type = other DNA
actcataaattttataaaaaacgtaaattaaaaccaaaaaacacgcctcg

SEQ ID NO: 39719 - DNA, 50 bp, synthetic construct
  source 1..50: mol_type = other DNA
caccaaaaataattcctcaacattataacatcatttccaaatcaaaccca

SEQ ID NO: 39720 - DNA, 50 bp, synthetic construct
  source 1..50: mol_type = other DNA
cgccaaaaataattcctcaacattataacgtcatttccgaatcaaacccg

SEQ ID NO: 39721 - DNA, 50 bp, synthetic construct
  source 1..50: mol_type = other DNA
taatactaaaaaaccactcctaacattacaaaaaataaaatataaaacca

SEQ ID NO: 39722 - DNA, 50 bp, synthetic construct
  source 1..50: mol_type = other DNA
taatactaaaaaaccactcctaacgttacgaaaaataaaatataaaaccg

SEQ ID NO: 39723 - DNA, 50 bp, synthetic construct
  source 1..50: mol_type = other DNA
cctaacattacaaaaaataaaatataaaaccaaaaaaccctccccccaca

SEQ ID NO: 39724 - DNA, 50 bp, synthetic construct
  source 1..50: mol_type = other DNA
cctaacgttacgaaaaataaaatataaaaccgaaaaaccctccccccgcg

SEQ ID NO: 39725 - DNA, 50 bp, synthetic construct
  source 1..50: mol_type = other DNA
atataattctcaatttaaatccaaaaaatcccaaattcaaatcccaaaca

SEQ ID NO: 39726 - DNA, 50 bp, synthetic construct
  source 1..50: mol_type = other DNA
atataattctcgatttaaatccgaaaaatcccgaattcaaatcccgaacg

SEQ ID NO: 39727 - DNA, 50 bp, synthetic construct
  source 1..50: mol_type = other DNA
ccacaaaaataacatccccaacaaaaaataaaaatcatataaatccttca

SEQ ID NO: 39728 - DNA, 50 bp, synthetic construct
  source 1..50: mol_type = other DNA
ccgcaaaaataacatccccaacgaaaaataaaaatcgtataaatccttcg

SEQ ID NO: 39729 - DNA, 50 bp, synthetic construct
  source 1..50: mol_type = other DNA
aacaaactaatccaaaacactcaccataaataaaccaaaaacacctatca

SEQ ID NO: 39730 - DNA, 50 bp, synthetic construct
  source 1..50: mol_type = other DNA
aacgaactaatccaaaacactcaccgtaaataaaccgaaaacgcctatcg

SEQ ID NO: 39731 - DNA, 50 bp, synthetic construct
  source 1..50: mol_type = other DNA
tcaaacatcctcccacttcaacctccccaataactaaaactataaacaca

SEQ ID NO: 39732 - DNA, 50 bp, synthetic construct
  source 1..50: mol_type = other DNA
tcaaacatcctcccacttcaacctccccaataactaaaactataaacgcg

SEQ ID NO: 39733 - DNA, 50 bp, synthetic construct
  source 1..50: mol_type = other DNA
cacctccaccaaaaaatacccacaaacaataaaaaactactacaaataca

SEQ ID NO: 39734 - DNA, 50 bp, synthetic construct
  source 1..50: mol_type = other DNA
cgcctccaccaaaaaatacccgcgaacgataaaaaactactacaaatacg

SEQ ID NO: 39735 - DNA, 50 bp, synthetic construct
  source 1..50: mol_type = other DNA
aatctcaatttaaccaaattcaattcaatctaccaaaaaaacaactacca

SEQ ID NO: 39736 - DNA, 50 bp, synthetic construct
  source 1..50: mol_type = other DNA
aatctcgatttaaccaaattcgattcaatctaccgaaaaaacgactaccg

SEQ ID NO: 39737 - DNA, 50 bp, synthetic construct
  source 1..50: mol_type = other DNA
tataaaaacaacaatatcaaaaaacaaataaaaccttctccccacaccca

SEQ ID NO: 39738 - DNA, 50 bp, synthetic construct
  source 1..50: mol_type = other DNA
tataaaaacgacaatatcgaaaaacgaataaaaccttctccccacgcccg

SEQ ID NO: 39739 - DNA, 50 bp, synthetic construct
  source 1..50: mol_type = other DNA
ctataatttctttcataaaaactaaacccacatttcaaaaccaaaaatca

SEQ ID NO: 39740 - DNA, 50 bp, synthetic construct
  source 1..50: mol_type = other DNA
ctataatttctttcgtaaaaactaaacccgcgtttcgaaaccaaaaatcg

SEQ ID NO: 39741 - DNA, 50 bp, synthetic construct
  source 1..50: mol_type = other DNA
aacaaaaatcaccaaaactcacaaaaataaacaatctttccctacttaca

SEQ ID NO: 39742 - DNA, 50 bp, synthetic construct
  source 1..50: mol_type = other DNA
aacgaaaatcgccaaaactcacgaaaataaacgatctttccctacttacg

SEQ ID NO: 39743 - DNA, 50 bp, synthetic construct
  source 1..50: mol_type = other DNA
attcaaataaacaaaataacaaaaatcaccaaaactcacaaaaataaaca

SEQ ID NO: 39744 - DNA, 50 bp, synthetic construct
  source 1..50: mol_type = other DNA
attcgaataaacaaaataacgaaaatcgccaaaactcacgaaaataaacg

SEQ ID NO: 39745 - DNA, 50 bp, synthetic construct
  source 1..50: mol_type = other DNA
ccatctatatattcaaataaacaaaataacaaaaatcaccaaaactcaca

SEQ ID NO: 39746 - DNA, 50 bp, synthetic construct
  source 1..50: mol_type = other DNA
ccgtctatatattcgaataaacaaaataacgaaaatcgccaaaactcacg

SEQ ID NO: 39747 - DNA, 50 bp, synthetic construct
  source 1..50: mol_type = other DNA
attcttaaaaacaccaattccatctatatattcaaataaacaaaataaca

SEQ ID NO: 39748 - DNA, 50 bp, synthetic construct
  source 1..50: mol_type = other DNA
attcttaaaaacgccaattccgtctatatattcgaataaacaaaataacg

SEQ ID NO: 39749 - DNA, 50 bp, synthetic construct
  source 1..50: mol_type = other DNA
ttttatccactcaaacacacaaacaaaactaacactcccaaaaacttcca

SEQ ID NO: 39750 - DNA, 50 bp, synthetic construct
  source 1..50: mol_type = other DNA
ttttatccactcgaacacacaaacgaaactaacgctcccaaaaacttccg

SEQ ID NO: 39751 - DNA, 50 bp, synthetic construct
  source 1..50: mol_type = other DNA
aaaaaaataactaaaaactacactctacacatacaccaaacaaaaacaca

SEQ ID NO: 39752 - DNA, 50 bp, synthetic construct
  source 1..50: mol_type = other DNA
aaaaaaataactaaaaactacactctacgcgtacgccaaacgaaaacgcg

SEQ ID NO: 39753 - DNA, 50 bp, synthetic construct
  source 1..50: mol_type = other DNA
aaaacaaacactaaatcccaacaactctaaaaactaaaacaaaaacatca

SEQ ID NO: 39754 - DNA, 50 bp, synthetic construct
  source 1..50: mol_type = other DNA
aaaacaaacactaaatcccaacaactctaaaaactaaaacgaaaacatcg

SEQ ID NO: 39755 - DNA, 50 bp, synthetic construct
  source 1..50: mol_type = other DNA
aaaaacttaaatacaataacacaacacaattacaactcacaactacctca

SEQ ID NO: 39756 - DNA, 50 bp, synthetic construct
  source 1..50: mol_type = other DNA
aaaaacttaaatacaataacgcgacacgattacgactcacgactacctcg

SEQ ID NO: 39757 - DNA, 50 bp, synthetic construct
  source 1..50: mol_type = other DNA
taaaacaaaaacatcacttaaacccaaaaattcaaaacaaccataaacca

SEQ ID NO: 39758 - DNA, 50 bp, synthetic construct
  source 1..50: mol_type = other DNA
taaaacgaaaacatcgcttaaacccaaaaattcgaaacaaccgtaaaccg

SEQ ID NO: 39759 - DNA, 50 bp, synthetic construct
  source 1..50: mol_type = other DNA
aaaaacatcacttaaacccaaaaattcaaaacaaccataaaccataatca

SEQ ID NO: 39760 - DNA, 50 bp, synthetic construct
  source 1..50: mol_type = other DNA
gaaaacatcgcttaaacccaaaaattcgaaacaaccgtaaaccgtaatcg

SEQ ID NO: 39761 - DNA, 50 bp, synthetic construct
  source 1..50: mol_type = other DNA
tcaaaatcttactctatcacccaatctaaaaacttaaatacaataacaca

SEQ ID NO: 39762 - DNA, 50 bp, synthetic construct
  source 1..50: mol_type = other DNA
tcgaaatcttactctatcgcccgatctaaaaacttaaatacaataacgcg

SEQ ID NO: 39763 - DNA, 50 bp, synthetic construct
  source 1..50: mol_type = other DNA
tcctacacaaaacataaactaaacaatcactaaatattacacaaattaca

SEQ ID NO: 39764 - DNA, 50 bp, synthetic construct
  source 1..50: mol_type = other DNA
tcctacgcgaaacgtaaactaaacaatcactaaatattacgcaaattacg

SEQ ID NO: 39765 - DNA, 50 bp, synthetic construct
  source 1..50: mol_type = other DNA
acaaaacataaactaaacaatcactaaatattacacaaattacacaaaca

SEQ ID NO: 39766 - DNA, 50 bp, synthetic construct
  source 1..50: mol_type = other DNA
gcgaaacgtaaactaaacaatcactaaatattacgcaaattacgcgaacg

SEQ ID NO: 39767 - DNA, 50 bp, synthetic construct
  source 1..50: mol_type = other DNA
aacataaactaaacaatcactaaatattacacaaattacacaaacacaca

SEQ ID NO: 39768 - DNA, 50 bp, synthetic construct
  source 1..50: mol_type = other DNA
aacgtaaactaaacaatcactaaatattacgcaaattacgcgaacgcacg

SEQ ID NO: 39769 - DNA, 50 bp, synthetic construct
  source 1..50: mol_type = other DNA
caattaaccaacaaactaacaaaaacatttacaatcaacatatatcaaca

SEQ ID NO: 39770 - DNA, 50 bp, synthetic construct
  source 1..50: mol_type = other DNA
cgattaaccgacaaactaacgaaaacgtttacgatcaacgtatatcaacg

SEQ ID NO: 39771 - DNA, 50 bp, synthetic construct
  source 1..50: mol_type = other DNA
tcaaaaccatataaccaatccaaactaccataataaactctccaaaacca

SEQ ID NO: 39772 - DNA, 50 bp, synthetic construct
  source 1..50: mol_type = other DNA
tcaaaaccgtataaccaatccgaactaccataataaactctccgaaaccg

SEQ ID NO: 39773 - DNA, 50 bp, synthetic construct
  source 1..50: mol_type = other DNA
ctaatccaaaaaataacaaccaacttcaaaaaatctatcataacaactca

SEQ ID NO: 39774 - DNA, 50 bp, synthetic construct
  source 1..50: mol_type = other DNA
ctaatccgaaaaataacgaccgacttcgaaaaatctatcataacaactcg

SEQ ID NO: 39775 - DNA, 50 bp, synthetic construct
  source 1..50: mol_type = other DNA
ctcaaactaatcatacaaccttaaaaaaaataatctcaaaataccatcca

SEQ ID NO: 39776 - DNA, 50 bp, synthetic construct
  source 1..50: mol_type = other DNA
ctcgaactaatcatacgaccttaaaaaaaataatctcgaaataccgtccg

SEQ ID NO: 39777 - DNA, 50 bp, synthetic construct
  source 1..50: mol_type = other DNA
atcatacaaccttaaaaaaaataatctcaaaataccatccaaaatcaaca

SEQ ID NO: 39778 - DNA, 50 bp, synthetic construct
  source 1..50: mol_type = other DNA
atcatacgaccttaaaaaaaataatctcgaaataccgtccgaaatcgacg

SEQ ID NO: 39779 - DNA, 50 bp, synthetic construct
  source 1..50: mol_type = other DNA
cttaaaaaaaataatctcaaaataccatccaaaatcaacaacaacaacca

SEQ ID NO: 39780 - DNA, 50 bp, synthetic construct
  source 1..50: mol_type = other DNA
cttaaaaaaaataatctcgaaataccgtccgaaatcgacgacaacgaccg

SEQ ID NO: 39781 - DNA, 50 bp, synthetic construct
  source 1..50: mol_type = other DNA
aaaaaataatctcaaaataccatccaaaatcaacaacaacaaccaaaaca

SEQ ID NO: 39782 - DNA, 50 bp, synthetic construct
  source 1..50: mol_type = other DNA
aaaaaataatctcgaaataccgtccgaaatcgacgacaacgaccgaaacg

SEQ ID NO: 39783 - DNA, 50 bp, synthetic construct
  source 1..50: mol_type = other DNA
ccaaaacacaaacacccatacaaaataacaaataatcaacaacaaaaaca

SEQ ID NO: 39784 - DNA, 50 bp, synthetic construct
  source 1..50: mol_type = other DNA
ccgaaacgcaaacgcccgtacgaaataacaaataatcaacaacgaaaacg

SEQ ID NO: 39785 - DNA, 50 bp, synthetic construct
  source 1..50: mol_type = other DNA
atcaacaacaaaaacactaaaacaaaaataattttcaattttaactacca

SEQ ID NO: 39786 - DNA, 50 bp, synthetic construct
  source 1..50: mol_type = other DNA
atcaacaacgaaaacgctaaaacgaaaataattttcgattttaactaccg

SEQ ID NO: 39787 - DNA, 50 bp, synthetic construct
  source 1..50: mol_type = other DNA
acactaaaacaaaaataattttcaattttaactaccaaattaaaaaacca

SEQ ID NO: 39788 - DNA, 50 bp, synthetic construct
  source 1..50: mol_type = other DNA
acgctaaaacgaaaataattttcgattttaactaccgaattaaaaaaccg

SEQ ID NO: 39789 - DNA, 50 bp, synthetic construct
  source 1..50: mol_type = other DNA
acacaaaaaaaaaccttctcctctaaaaacacaaaaatacaccaaatcca

SEQ ID NO: 39790 - DNA, 50 bp, synthetic construct
  source 1..50: mol_type = other DNA
acgcaaaaaaaaaccttctcctctaaaaacacgaaaatacaccgaatccg

SEQ ID NO: 39791 - DNA, 50 bp, synthetic construct
  source 1..50: mol_type = other DNA
taccaaacacaaaaaaaaaccttctcctctaaaaacacaaaaatacacca

SEQ ID NO: 39792 - DNA, 50 bp, synthetic construct
  source 1..50: mol_type = other DNA
taccaaacgcaaaaaaaaaccttctcctctaaaaacacgaaaatacaccg

SEQ ID NO: 39793 - DNA, 50 bp, synthetic construct
  source 1..50: mol_type = other DNA
ttaaacccaaaataatacacaccactcttaaatccctcaaataccaaaca

SEQ ID NO: 39794 - DNA, 50 bp, synthetic construct
  source 1..50: mol_type = other DNA
ttaaacccaaaataatacgcgccgctcttaaatccctcaaataccaaacg

SEQ ID NO: 39795 - DNA, 50 bp, synthetic construct
  source 1..50: mol_type = other DNA
cacaaaacaaacaaaccacaaacacaaccttaaacccaaaataatacaca

SEQ ID NO: 39796 - DNA, 50 bp, synthetic construct
  source 1..50: mol_type = other DNA
cacgaaacaaacgaaccacgaacacaaccttaaacccaaaataatacgcg

SEQ ID NO: 39797 - DNA, 50 bp, synthetic construct
  source 1..50: mol_type = other DNA
aaaaaaacttttttttacatttaacatctaaaaaactcaaaaacaacaca

SEQ ID NO: 39798 - DNA, 50 bp, synthetic construct
  source 1..50: mol_type = other DNA
aaaaaaacttttttttacgtttaacatctaaaaaactcaaaaacgacgcg

SEQ ID NO: 39799 - DNA, 50 bp, synthetic construct
  source 1..50: mol_type = other DNA
ctcaaaaacaacacacatcaccttaaacccaaaactatattcataactca

SEQ ID NO: 39800 - DNA, 50 bp, synthetic construct
  source 1..50: mol_type = other DNA
ctcaaaaacgacgcgcatcaccttaaacccaaaactatattcgtaactcg

SEQ ID NO: 39801 - DNA, 50 bp, synthetic construct
  source 1..50: mol_type = other DNA
tactaaaaaaaaatccaaattttaacttaaaccaacaaaattctacctca

SEQ ID NO: 39802 - DNA, 50 bp, synthetic construct
  source 1..50: mol_type = other DNA
tactaaaaaaaaatccaaattttaacttaaaccaacgaaattctacctcg

SEQ ID NO: 39803 - DNA, 50 bp, synthetic construct
  source 1..50: mol_type = other DNA
aacaaacaacataaaatactaaacctaactaacctccaccaaccactaca

SEQ ID NO: 39804 - DNA, 50 bp, synthetic construct
  source 1..50: mol_type = other DNA
aacaaacaacgtaaaatactaaacctaactaacctccgccaaccactacg

SEQ ID NO: 39805 - DNA, 50 bp, synthetic construct
  source 1..50: mol_type = other DNA
ctctttaacttacactaataactaatattccaaaactacaacaccttcca

SEQ ID NO: 39806 - DNA, 50 bp, synthetic construct
  source 1..50: mol_type = other DNA
ctctttaacttacgctaataactaatattccgaaactacgacgccttccg

SEQ ID NO: 39807 - DNA, 50 bp, synthetic construct
  source 1..50: mol_type = other DNA
aaacaacctctttaacttacactaataactaatattccaaaactacaaca

SEQ ID NO: 39808 - DNA, 50 bp, synthetic construct
  source 1..50: mol_type = other DNA
aaacgacctctttaacttacgctaataactaatattccgaaactacgacg

SEQ ID NO: 39809 - DNA, 50 bp, synthetic construct
  source 1..50: mol_type = other DNA
tactaatactataaatcaaacaccaaccaaaacaacctctttaacttaca

SEQ ID NO: 39810 - DNA, 50 bp, synthetic construct
  source 1..50: mol_type = other DNA
tactaatactataaatcaaacgccgaccgaaacgacctctttaacttacg

SEQ ID NO: 39811 - DNA, 50 bp, synthetic construct
  source 1..50: mol_type = other DNA
aaccacatatactttatactaatactataaatcaaacaccaaccaaaaca

SEQ ID NO: 39812 - DNA, 50 bp, synthetic construct
  source 1..50: mol_type = other DNA
aaccgcatatactttatactaatactataaatcaaacgccgaccgaaacg

SEQ ID NO: 39813 - DNA, 50 bp, synthetic construct
  source 1..50: mol_type = other DNA
aaaaaaaccacatatactttatactaatactataaatcaaacaccaacca

SEQ ID NO: 39814 - DNA, 50 bp, synthetic construct
  source 1..50: mol_type = other DNA
aaaaaaaccgcatatactttatactaatactataaatcaaacgccgaccg

SEQ ID NO: 39815 - DNA, 50 bp, synthetic construct
  source 1..50: mol_type = other DNA
taaaaaaaaaaccacatatactttatactaatactataaatcaaacacca

SEQ ID NO: 39816 - DNA, 50 bp, synthetic construct
  source 1..50: mol_type = other DNA
taaaaaaaaaaccgcatatactttatactaatactataaatcaaacgccg

SEQ ID NO: 39817 - DNA, 50 bp, synthetic construct
  source 1..50: mol_type = other DNA
ccataaaaaaaaaaccacatatactttatactaatactataaatcaaaca

SEQ ID NO: 39818 - DNA, 50 bp, synthetic construct
  source 1..50: mol_type = other DNA
ccgtaaaaaaaaaaccgcatatactttatactaatactataaatcaaacg

SEQ ID NO: 39819 - DNA, 50 bp, synthetic construct
  source 1..50: mol_type = other DNA
ttttcacaataaaaaattaactcatttttaacaacaaaaataaataacca

SEQ ID NO: 39820 - DNA, 50 bp, synthetic construct
  source 1..50: mol_type = other DNA
ttttcgcgataaaaaattaactcgtttttaacgacaaaaataaataaccg

SEQ ID NO: 39821 - DNA, 50 bp, synthetic construct
  source 1..50: mol_type = other DNA
atctacccacaaaaccattttcacaataaaaaattaactcatttttaaca

SEQ ID NO: 39822 - DNA, 50 bp, synthetic construct
  source 1..50: mol_type = other DNA
atctacccacaaaaccgttttcgcgataaaaaattaactcgtttttaacg

SEQ ID NO: 39823 - DNA, 50 bp, synthetic construct
  source 1..50: mol_type = other DNA
ccacaaacaactaaaataccacacctccaatcttaaccttactaaaaaca

SEQ ID NO: 39824 - DNA, 50 bp, synthetic construct
  source 1..50: mol_type = other DNA
ccgcaaacaactaaaataccgcgcctccaatcttaaccttactaaaaacg

SEQ ID NO: 39825 - DNA, 50 bp, synthetic construct
  source 1..50: mol_type = other DNA
tatacataaaaaaaccacttttttcccccacaaacaactaaaataccaca

SEQ ID NO: 39826 - DNA, 50 bp, synthetic construct
  source 1..50: mol_type = other DNA
tatacgtaaaaaaaccgcttttttcccccgcaaacaactaaaataccgcg

SEQ ID NO: 39827 - DNA, 50 bp, synthetic construct
  source 1..50: mol_type = other DNA
aatatacataaaaaaaccacttttttcccccacaaacaactaaaatacca

SEQ ID NO: 39828 - DNA, 50 bp, synthetic construct
  source 1..50: mol_type = other DNA
aatatacgtaaaaaaaccgcttttttcccccgcaaacaactaaaataccg

SEQ ID NO: 39829 - DNA, 50 bp, synthetic construct
  source 1..50: mol_type = other DNA
acctaaccaacttcaaaaaaccaaaaaaaataatatacataaaaaaacca

SEQ ID NO: 39830 - DNA, 50 bp, synthetic construct
  source 1..50: mol_type = other DNA
gcctaaccgacttcaaaaaaccgaaaaaaataatatacgtaaaaaaaccg

SEQ ID NO: 39831 - DNA, 50 bp, synthetic construct
  source 1..50: mol_type = other DNA
atacaacctacacctaaccaacttcaaaaaaccaaaaaaaataatataca

SEQ ID NO: 39832 - DNA, 50 bp, synthetic construct
  source 1..50: mol_type = other DNA
atacaacctacgcctaaccgacttcaaaaaaccgaaaaaaataatatacg

SEQ ID NO: 39833 - DNA, 50 bp, synthetic construct
  source 1..50: mol_type = other DNA
tacaatccaactaaaaaatacaaacaacaacaacctaaaattccacacca

SEQ ID NO: 39834 - DNA, 50 bp, synthetic construct
  source 1..50: mol_type = other DNA
tacgatccaactaaaaaatacgaacgacgacaacctaaaattccgcaccg

SEQ ID NO: 39835 - DNA, 50 bp, synthetic construct
  source 1..50: mol_type = other DNA
actcaacaaaacaaatcatcaacaacaaataaaaaacaaaatacaaaaca

SEQ ID NO: 39836 - DNA, 50 bp, synthetic construct
  source 1..50: mol_type = other DNA
gctcgacgaaacaaatcgtcgacgacgaataaaaaacaaaatacaaaacg

SEQ ID NO: 39837 - DNA, 50 bp, synthetic construct
  source 1..50: mol_type = other DNA
taaataaaaactacctacacacacaataccacaaaacaaaaataaaaaca

SEQ ID NO: 39838 - DNA, 50 bp, synthetic construct
  source 1..50: mol_type = other DNA
taaataaaaactacctacacacgcgataccgcgaaacgaaaataaaaacg

SEQ ID NO: 39839 - DNA, 50 bp, synthetic construct
  source 1..50: mol_type = other DNA
ttacaaaacccaaactaacaaaaaataaataaaaactacctacacacaca

SEQ ID NO: 39840 - DNA, 50 bp, synthetic construct
  source 1..50: mol_type = other DNA
ttacaaaacccgaactaacgaaaaataaataaaaactacctacacacgcg

SEQ ID NO: 39841 - DNA, 50 bp, synthetic construct
  source 1..50: mol_type = other DNA
aattacaaaacccaaactaacaaaaaataaataaaaactacctacacaca

SEQ ID NO: 39842 - DNA, 50 bp, synthetic construct
  source 1..50: mol_type = other DNA
aattacaaaacccgaactaacgaaaaataaataaaaactacctacacacg

SEQ ID NO: 39843 - DNA, 50 bp, synthetic construct
  source 1..50: mol_type = other DNA
aaaacaaaactcacacacaaaatatacaaattacaaaacccaaactaaca

SEQ ID NO: 39844 - DNA, 50 bp, synthetic construct
  source 1..50: mol_type = other DNA
aaaacgaaactcgcgcgcaaaatatacaaattacaaaacccgaactaacg

SEQ ID NO: 39845 - DNA, 50 bp, synthetic construct
  source 1..50: mol_type = other DNA
aaactttccaaaaaataccacactccctacaactcaaaaatcaaatcaca

SEQ ID NO: 39846 - DNA, 50 bp, synthetic construct
  source 1..50: mol_type = other DNA
aaactttccaaaaaataccgcgctccctacgactcaaaaatcaaatcgcg

SEQ ID NO: 39847 - DNA, 50 bp, synthetic construct
  source 1..50: mol_type = other DNA
atctaaaacatacaaaaatccctaacacccctcttttattaaactaaaca

SEQ ID NO: 39848 - DNA, 50 bp, synthetic construct
  source 1..50: mol_type = other DNA
atctaaaacgtacgaaaatccctaacgcccctcttttattaaactaaacg

SEQ ID NO: 39849 - DNA, 50 bp, synthetic construct
  source 1..50: mol_type = other DNA
ttattaaactaaacaaaaaaaattaataaccactcaataaccaacaccca

SEQ ID NO: 39850 - DNA, 50 bp, synthetic construct
  source 1..50: mol_type = other DNA
ttattaaactaaacgaaaaaaattaataaccactcaataaccaacgcccg

SEQ ID NO: 39851 - DNA, 50 bp, synthetic construct
  source 1..50: mol_type = other DNA
ttacacatccacaaaaaccctacaaaaacaaataaaacactacacataca

SEQ ID NO: 39852 - DNA, 50 bp, synthetic construct
  source 1..50: mol_type = other DNA
ttacacatccacaaaaaccctacaaaaacaaataaaacgctacgcgtacg

SEQ ID NO: 39853 - DNA, 50 bp, synthetic construct
  source 1..50: mol_type = other DNA
aaactctcattaattacacaaaaaaaacaaacttcatataataacaacca

SEQ ID NO: 39854 - DNA, 50 bp, synthetic construct
  source 1..50: mol_type = other DNA
aaactctcgttaattacacgaaaaaaacgaacttcgtataataacgaccg

SEQ ID NO: 39855 - DNA, 50 bp, synthetic construct
  source 1..50: mol_type = other DNA
attacaattctctaaatatttacttacaaataaatttactaaaacaatca

SEQ ID NO: 39856 - DNA, 50 bp, synthetic construct
  source 1..50: mol_type = other DNA
attacgattctctaaatatttacttacaaataaatttactaaaacgatcg

SEQ ID NO: 39857 - DNA, 50 bp, synthetic construct
  source 1..50: mol_type = other DNA
ttacacattaatataaactctcattaattacacaaaaaaaacaaacttca

SEQ ID NO: 39858 - DNA, 50 bp, synthetic construct
  source 1..50: mol_type = other DNA
ttacacgttaatataaactctcgttaattacacgaaaaaaacgaacttcg

SEQ ID NO: 39859 - DNA, 50 bp, synthetic construct
  source 1..50: mol_type = other DNA
ctatacaaaattcattcttcccatataactaacaaaaacccataccaaca

SEQ ID NO: 39860 - DNA, 50 bp, synthetic construct
  source 1..50: mol_type = other DNA
ctatacgaaattcgttcttcccgtataactaacgaaaacccataccaacg

SEQ ID NO: 39861 - DNA, 50 bp, synthetic construct
  source 1..50: mol_type = other DNA
aaattcattcttcccatataactaacaaaaacccataccaacatacaaca

SEQ ID NO: 39862 - DNA, 50 bp, synthetic construct
  source 1..50: mol_type = other DNA
aaattcgttcttcccgtataactaacgaaaacccataccaacgtacaacg

SEQ ID NO: 39863 - DNA, 50 bp, synthetic construct
  source 1..50: mol_type = other DNA
aaacaatttaaaaaatcataatcacaacaaccactacaacaatatacaca

SEQ ID NO: 39864 - DNA, 50 bp, synthetic construct
  source 1..50: mol_type = other DNA
aaacgatttaaaaaatcgtaatcgcaacgaccgctacgacaatatacacg

SEQ ID NO: 39865 - DNA, 50 bp, synthetic construct
  source 1..50: mol_type = other DNA
acaaaaactacaaaacaatttaaaaaatcataatcacaacaaccactaca

SEQ ID NO: 39866 - DNA, 50 bp, synthetic construct
  source 1..50: mol_type = other DNA
acgaaaactacgaaacgatttaaaaaatcgtaatcgcaacgaccgctacg

SEQ ID NO: 39867 - DNA, 50 bp, synthetic construct
  source 1..50: mol_type = other DNA
tctttacaaaaactacaaaacaatttaaaaaatcataatcacaacaacca

SEQ ID NO: 39868 - DNA, 50 bp, synthetic construct
  source 1..50: mol_type = other DNA
tctttacgaaaactacgaaacgatttaaaaaatcgtaatcgcaacgaccg

SEQ ID NO: 39869 - DNA, 50 bp, synthetic construct
  source 1..50: mol_type = other DNA
aacctctttacaaaaactacaaaacaatttaaaaaatcataatcacaaca

SEQ ID NO: 39870 - DNA, 50 bp, synthetic construct
  source 1..50: mol_type = other DNA
aacctctttacgaaaactacgaaacgatttaaaaaatcgtaatcgcaacg

SEQ ID NO: 39871 - DNA, 50 bp, synthetic construct
  source 1..50: mol_type = other DNA
caaacaccacaaacctctttacaaaaactacaaaacaatttaaaaaatca

SEQ ID NO: 39872 - DNA, 50 bp, synthetic construct
  source 1..50: mol_type = other DNA
cgaacgccacgaacctctttacgaaaactacgaaacgatttaaaaaatcg

SEQ ID NO: 39873 - DNA, 50 bp, synthetic construct
  source 1..50: mol_type = other DNA
accaaacaacatcaaataactactaacaaaaactaaaacaccaaaaaaca

SEQ ID NO: 39874 - DNA, 50 bp, synthetic construct
  source 1..50: mol_type = other DNA
accgaacgacgtcgaataactactaacaaaaactaaaacaccgaaaaacg

SEQ ID NO: 39875 - DNA, 50 bp, synthetic construct
  source 1..50: mol_type = other DNA
aaaaaaaaaacaacaactaacaaaacaactacaacctacaccaaaaacca

SEQ ID NO: 39876 - DNA, 50 bp, synthetic construct
  source 1..50: mol_type = other DNA
aaaaaaaaaacgacaactaacgaaacaactacaacctacgccgaaaaccg

SEQ ID NO: 39877 - DNA, 50 bp, synthetic construct
  source 1..50: mol_type = other DNA
tacccaaatataaaaacaacaacctacacaaaaaacaaaacaaaacaaca

SEQ ID NO: 39878 - DNA, 50 bp, synthetic construct
  source 1..50: mol_type = other DNA
tacccgaatataaaaacgacaacctacgcgaaaaacgaaacaaaacgacg

SEQ ID NO: 39879 - DNA, 50 bp, synthetic construct
  source 1..50: mol_type = other DNA
caatacccaaatataaaaacaacaacctacacaaaaaacaaaacaaaaca

SEQ ID NO: 39880 - DNA, 50 bp, synthetic construct
  source 1..50: mol_type = other DNA
cgatacccgaatataaaaacgacaacctacgcgaaaaacgaaacaaaacg

SEQ ID NO: 39881 - DNA, 50 bp, synthetic construct
  source 1..50: mol_type = other DNA
aattacccaacaaaaaaaatacaaacataatacctacaccttaataccca

SEQ ID NO: 39882 - DNA, 50 bp, synthetic construct
  source 1..50: mol_type = other DNA
aattacccgacaaaaaaaatacaaacataatacctacgccttaatacccg

SEQ ID NO: 39883 - DNA, 50 bp, synthetic construct
  source 1..50: mol_type = other DNA
tcttatcaaacaactaaataccaaacaatactacacccaaaaactaacca

SEQ ID NO: 39884 - DNA, 50 bp, synthetic construct
  source 1..50: mol_type = other DNA
tcttatcgaacaactaaataccgaacaatactacgcccgaaaactaaccg

SEQ ID NO: 39885 - DNA, 50 bp, synthetic construct
  source 1..50: mol_type = other DNA
aacctactcttccaaaactacaacccctcaatttaactaaaacaataaca

SEQ ID NO: 39886 - DNA, 50 bp, synthetic construct
  source 1..50: mol_type = other DNA
gacctactcttccgaaactacaacccctcaatttaactaaaacgataacg

SEQ ID NO: 39887 - DNA, 50 bp, synthetic construct
  source 1..50: mol_type = other DNA
aaaataaacataaaaaacaaataaaatctactaataatacctacctacca

SEQ ID NO: 39888 - DNA, 50 bp, synthetic construct
  source 1..50: mol_type = other DNA
aaaataaacgtaaaaaacgaataaaatctactaataatacctacctaccg

SEQ ID NO: 39889 - DNA, 50 bp, synthetic construct
  source 1..50: mol_type = other DNA
ataatacctacctaccaaaaccctaaactacaaacctatcaacaacaaca

SEQ ID NO: 39890 - DNA, 50 bp, synthetic construct
  source 1..50: mol_type = other DNA
ataatacctacctaccgaaaccctaaactacgaacctatcaacaacaacg

SEQ ID NO: 39891 - DNA, 50 bp, synthetic construct
  source 1..50: mol_type = other DNA
actaatcacacccctccaatactaatcaactaaaactcaaaaacaaaaca

SEQ ID NO: 39892 - DNA, 50 bp, synthetic construct
  source 1..50: mol_type = other DNA
actaatcgcgcccctccaatactaatcaactaaaactcaaaaacaaaacg

SEQ ID NO: 39893 - DNA, 50 bp, synthetic construct
  source 1..50: mol_type = other DNA
cccaactaactaacattaaaaaaacacaaccaacctaataaaaaccccca

SEQ ID NO: 39894 - DNA, 50 bp, synthetic construct
  source 1..50: mol_type = other DNA
cccaactaactaacattaaaaaaacgcgaccaacctaataaaaacccccg

SEQ ID NO: 39895 - DNA, 50 bp, synthetic construct
  source 1..50: mol_type = other DNA
acacaaccaacctaataaaaacccccaaaatttcctaaaaatcaaaacca

SEQ ID NO: 39896 - DNA, 50 bp, synthetic construct
  source 1..50: mol_type = other DNA
acgcgaccaacctaataaaaacccccgaaatttcctaaaaatcgaaaccg

SEQ ID NO: 39897 - DNA, 50 bp, synthetic construct
  source 1..50: mol_type = other DNA
aaaaacaaataaatacttcccaaaccaaataaaaactaaacaccaaatca

SEQ ID NO: 39898 - DNA, 50 bp, synthetic construct
  source 1..50: mol_type = other DNA
aaaaacgaataaatacttcccaaaccaaataaaaactaaacgccgaatcg

SEQ ID NO: 39899 - DNA, 50 bp, synthetic construct
  source 1..50: mol_type = other DNA
taaaaaatacctacccatttcctaccatccaacttatctaaccaaatcca

SEQ ID NO: 39900 - DNA, 50 bp, synthetic construct
  source 1..50: mol_type = other DNA
taaaaaatacctacccgtttcctaccatccaacttatctaaccgaatccg

SEQ ID NO: 39901 - DNA, 50 bp, synthetic construct
  source 1..50: mol_type = other DNA
caataatacaaaaacccacaataataaaacaaaaaaactcaaacataaca

SEQ ID NO: 39902 - DNA, 50 bp, synthetic construct
  source 1..50: mol_type = other DNA
cgataatacaaaaacccacgataataaaacgaaaaaactcaaacataacg

SEQ ID NO: 39903 - DNA, 50 bp, synthetic construct
  source 1..50: mol_type = other DNA
atcctaaaccctacccaacaaaaaaacaactaaaacccaataaaaaatca

SEQ ID NO: 39904 - DNA, 50 bp, synthetic construct
  source 1..50: mol_type = other DNA
atcctaaaccctacccgacgaaaaaacaactaaaacccgataaaaaatcg

SEQ ID NO: 39905 - DNA, 50 bp, synthetic construct
  source 1..50: mol_type = other DNA
acacaaatcacattaaaaaaatataataaaactaaacacaataactcaca

SEQ ID NO: 39906 - DNA, 50 bp, synthetic construct
  source 1..50: mol_type = other DNA
acacaaatcacattaaaaaaatataataaaactaaacgcgataactcacg

SEQ ID NO: 39907 - DNA, 50 bp, synthetic construct
  source 1..50: mol_type = other DNA
tattcctaacctaacttatctaaaatataaacaaatttaaaatataaaca

SEQ ID NO: 39908 - DNA, 50 bp, synthetic construct
  source 1..50: mol_type = other DNA
tattcctaacctaacttatctaaaatataaacgaatttaaaatataaacg

SEQ ID NO: 39909 - DNA, 50 bp, synthetic construct
  source 1..50: mol_type = other DNA
actcatcaatttcaaccaaacaattttaaaactcatacttaaaccaaaca

SEQ ID NO: 39910 - DNA, 50 bp, synthetic construct
  source 1..50: mol_type = other DNA
actcgtcaatttcaaccgaacaattttaaaactcgtacttaaaccaaacg

SEQ ID NO: 39911 - DNA, 50 bp, synthetic construct
  source 1..50: mol_type = other DNA
caacactccccataaaaccactaaaaaacattactcatcaatttcaacca

SEQ ID NO: 39912 - DNA, 50 bp, synthetic construct
  source 1..50: mol_type = other DNA
caacactccccataaaaccactaaaaaacattactcgtcaatttcaaccg

SEQ ID NO: 39913 - DNA, 50 bp, synthetic construct
  source 1..50: mol_type = other DNA
cctcacctaacctaaacacaaactttaaaactattcaattaaaactaaca

SEQ ID NO: 39914 - DNA, 50 bp, synthetic construct
  source 1..50: mol_type = other DNA
cctcgcctaacctaaacacgaactttaaaactattcgattaaaactaacg

SEQ ID NO: 39915 - DNA, 50 bp, synthetic construct
  source 1..50: mol_type = other DNA
ctaatcactcccacccaaatattacacttttcaaaccaacttaaaaaaca

SEQ ID NO: 39916 - DNA, 50 bp, synthetic construct
  source 1..50: mol_type = other DNA
ctaatcactcccacccgaatattacgcttttcaaaccgacttaaaaaacg

SEQ ID NO: 39917 - DNA, 50 bp, synthetic construct
  source 1..50: mol_type = other DNA
cacctaaaaaatctaatcactcccacccaaatattacacttttcaaacca

SEQ ID NO: 39918 - DNA, 50 bp, synthetic construct
  source 1..50: mol_type = other DNA
cacctaaaaaatctaatcactcccacccgaatattacgcttttcaaaccg

SEQ ID NO: 39919 - DNA, 50 bp, synthetic construct
  source 1..50: mol_type = other DNA
aaataacaaacacacctaaaaaatctaatcactcccacccaaatattaca

SEQ ID NO: 39920 - DNA, 50 bp, synthetic construct
  source 1..50: mol_type = other DNA
aaataacgaacgcacctaaaaaatctaatcactcccacccgaatattacg

SEQ ID NO: 39921 - DNA, 50 bp, synthetic construct
  source 1..50: mol_type = other DNA
caaaaaaaaccaaacaataaacacaaaccaataaacacacccaccataca

SEQ ID NO: 39922 - DNA, 50 bp, synthetic construct
  source 1..50: mol_type = other DNA
caaaaaaaaccaaacaataaacacaaaccaataaacacgcccaccgtacg

SEQ ID NO: 39923 - DNA, 50 bp, synthetic construct
  source 1..50: mol_type = other DNA
caaaataaccaaataaaaacaactcccatctacaacacccaacataaaca

SEQ ID NO: 39924 - DNA, 50 bp, synthetic construct
  source 1..50: mol_type = other DNA
caaaataaccgaataaaaacaactcccgtctacaacgcccaacgtaaacg

SEQ ID NO: 39925 - DNA, 50 bp, synthetic construct
  source 1..50: mol_type = other DNA
aaaaaccaaaataaccaaataaaaacaactcccatctacaacacccaaca

SEQ ID NO: 39926 - DNA, 50 bp, synthetic construct
  source 1..50: mol_type = other DNA
aaaaaccaaaataaccgaataaaaacaactcccgtctacaacgcccaacg

SEQ ID NO: 39927 - DNA, 50 bp, synthetic construct
  source 1..50: mol_type = other DNA
aaaacaacattctaacaacacatataaaaaacacatacacaaccaaatca

SEQ ID NO: 39928 - DNA, 50 bp, synthetic construct
  source 1..50: mol_type = other DNA
aaaacgacgttctaacaacacgtataaaaaacgcatacgcaaccgaatcg

SEQ ID NO: 39929 - DNA, 50 bp, synthetic construct
  source 1..50: mol_type = other DNA
cacaaacaaaaaaaacaacattctaacaacacatataaaaaacacataca

SEQ ID NO: 39930 - DNA, 50 bp, synthetic construct
  source 1..50: mol_type = other DNA
cgcaaacgaaaaaaacgacgttctaacaacacgtataaaaaacgcatacg

SEQ ID NO: 39931 - DNA, 50 bp, synthetic construct
  source 1..50: mol_type = other DNA
acataatacaaaccaaccacaaacaaaaaaaacaacattctaacaacaca

SEQ ID NO: 39932 - DNA, 50 bp, synthetic construct
  source 1..50: mol_type = other DNA
acataatacaaaccgaccgcaaacgaaaaaaacgacgttctaacaacacg

SEQ ID NO: 39933 - DNA, 50 bp, synthetic construct
  source 1..50: mol_type = other DNA
aaaaaacaacctactaacccccatacatcctaacaaacaaaaaacaaaca

SEQ ID NO: 39934 - DNA, 50 bp, synthetic construct
  source 1..50: mol_type = other DNA
aaaaaacaacctactaacccccgtacgtcctaacaaacgaaaaacgaacg

SEQ ID NO: 39935 - DNA, 50 bp, synthetic construct
  source 1..50: mol_type = other DNA
ataataacataaaccaaaatcctccaaaaaaaacaacctactaaccccca

SEQ ID NO: 39936 - DNA, 50 bp, synthetic construct
  source 1..50: mol_type = other DNA
ataataacgtaaaccgaaatcctccaaaaaaaacaacctactaacccccg

SEQ ID NO: 39937 - DNA, 50 bp, synthetic construct
  source 1..50: mol_type = other DNA
aaacacacaaaaactaataaactatctctcctaaaaaacttcaacccaca

SEQ ID NO: 39938 - DNA, 50 bp, synthetic construct
  source 1..50: mol_type = other DNA
aaacgcacgaaaactaataaactatctctcctaaaaaacttcgacccacg

SEQ ID NO: 39939 - DNA, 50 bp, synthetic construct
  source 1..50: mol_type = other DNA
aaaaaataaatataataaaataaacacacacatcacaaacatcatcacca

SEQ ID NO: 39940 - DNA, 50 bp, synthetic construct
  source 1..50: mol_type = other DNA
aaaaaataaatataataaaataaacgcgcacatcacaaacatcatcgccg

SEQ ID NO: 39941 - DNA, 50 bp, synthetic construct
  source 1..50: mol_type = other DNA
cataaaaaataaatataataaaataaacacacacatcacaaacatcatca

SEQ ID NO: 39942 - DNA, 50 bp, synthetic construct
  source 1..50: mol_type = other DNA
cgtaaaaaataaatataataaaataaacgcgcacatcacaaacatcatcg

SEQ ID NO: 39943 - DNA, 50 bp, synthetic construct
  source 1..50: mol_type = other DNA
caataatacttataatatacacacctacttcactacacccattttctaca

SEQ ID NO: 39944 - DNA, 50 bp, synthetic construct
  source 1..50: mol_type = other DNA
cgataatacttataatatacgcgcctacttcactacacccattttctacg

SEQ ID NO: 39945 - DNA, 50 bp, synthetic construct
  source 1..50: mol_type = other DNA
tacttataatatacacacctacttcactacacccattttctacataaaca

SEQ ID NO: 39946 - DNA, 50 bp, synthetic construct
  source 1..50: mol_type = other DNA
tacttataatatacgcgcctacttcactacacccattttctacgtaaacg

SEQ ID NO: 39947 - DNA, 50 bp, synthetic construct
  source 1..50: mol_type = other DNA
acataaaacatccaccaataataccaaatacaaatacccaatatacaaca

SEQ ID NO: 39948 - DNA, 50 bp, synthetic construct
  source 1..50: mol_type = other DNA
acataaaacgtccgccaataataccgaatacaaatacccgatatacgacg

SEQ ID NO: 39949 - DNA, 50 bp, synthetic construct
  source 1..50: mol_type = other DNA
acaacataaaacatccaccaataataccaaatacaaatacccaatataca

SEQ ID NO: 39950 - DNA, 50 bp, synthetic construct
  source 1..50: mol_type = other DNA
acgacataaaacgtccgccaataataccgaatacaaatacccgatatacg

SEQ ID NO: 39951 - DNA, 50 bp, synthetic construct
  source 1..50: mol_type = other DNA
ataaaaaatcacataacaaccatactaaaacctcaaaaacaacaataaca

SEQ ID NO: 39952 - DNA, 50 bp, synthetic construct
  source 1..50: mol_type = other DNA
ataaaaaatcgcgtaacgaccgtactaaaacctcgaaaacgacgataacg

SEQ ID NO: 39953 - DNA, 50 bp, synthetic construct
  source 1..50: mol_type = other DNA
ataccaataaaaaatcacataacaaccatactaaaacctcaaaaacaaca

SEQ ID NO: 39954 - DNA, 50 bp, synthetic construct
  source 1..50: mol_type = other DNA
ataccaataaaaaatcgcgtaacgaccgtactaaaacctcgaaaacgacg

SEQ ID NO: 39955 - DNA, 50 bp, synthetic construct
  source 1..50: mol_type = other DNA
tcaataccaataaaaaatcacataacaaccatactaaaacctcaaaaaca

SEQ ID NO: 39956 - DNA, 50 bp, synthetic construct
  source 1..50: mol_type = other DNA
tcgataccaataaaaaatcgcgtaacgaccgtactaaaacctcgaaaacg

SEQ ID NO: 39957 - DNA, 50 bp, synthetic construct
  source 1..50: mol_type = other DNA
actaaatcttcaacccatactcatcaataccaataaaaaatcacataaca

SEQ ID NO: 39958 - DNA, 50 bp, synthetic construct
  source 1..50: mol_type = other DNA
actaaatcttcaacccgtactcgtcgataccaataaaaaatcgcgtaacg

SEQ ID NO: 39959 - DNA, 50 bp, synthetic construct
  source 1..50: mol_type = other DNA
tacctactaaatcttcaacccatactcatcaataccaataaaaaatcaca

SEQ ID NO: 39960 - DNA, 50 bp, synthetic construct
  source 1..50: mol_type = other DNA
tacctactaaatcttcaacccgtactcgtcgataccaataaaaaatcgcg

SEQ ID NO: 39961 - DNA, 50 bp, synthetic construct
  source 1..50: mol_type = other DNA
actacctactaaatcttcaacccatactcatcaataccaataaaaaatca

SEQ ID NO: 39962 - DNA, 50 bp, synthetic construct
  source 1..50: mol_type = other DNA
actacctactaaatcttcaacccgtactcgtcgataccaataaaaaatcg

SEQ ID NO: 39963 - DNA, 50 bp, synthetic construct
  source 1..50: mol_type = other DNA
ctaaaaaaactactaaaactactcaaaaactcaatcacacaactcaatca

SEQ ID NO: 39964 - DNA, 50 bp, synthetic construct
  source 1..50: mol_type = other DNA
ctaaaaaaactactaaaactactcaaaaactcgatcgcacaactcgatcg

SEQ ID NO: 39965 - DNA, 50 bp, synthetic construct
  source 1..50: mol_type = other DNA
aacttttccaaaaaaccaatatctcctacacaaatttcatccacaccaca

SEQ ID NO: 39966 - DNA, 50 bp, synthetic construct
  source 1..50: mol_type = other DNA
aacttttccaaaaaaccgatatctcctacacaaatttcatccgcaccacg

SEQ ID NO: 39967 - DNA, 50 bp, synthetic construct
  source 1..50: mol_type = other DNA
ccacaatctactctacaaaaacatctataaaaattaatattacacttcca

SEQ ID NO: 39968 - DNA, 50 bp, synthetic construct
  source 1..50: mol_type = other DNA
ccgcgatctactctacaaaaacgtctataaaaattaatattacgcttccg

SEQ ID NO: 39969 - DNA, 50 bp, synthetic construct
  source 1..50: mol_type = other DNA
caatctactctacaaaaacatctataaaaattaatattacacttccaaca

SEQ ID NO: 39970 - DNA, 50 bp, synthetic construct
  source 1..50: mol_type = other DNA
cgatctactctacaaaaacgtctataaaaattaatattacgcttccgacg

SEQ ID NO: 39971 - DNA, 50 bp, synthetic construct
  source 1..50: mol_type = other DNA
ttccttaatccaaaaaactaaatacccactctcaaaaaatacaaaaaaca

SEQ ID NO: 39972 - DNA, 50 bp, synthetic construct
  source 1..50: mol_type = other DNA
ttccttaatccaaaaaactaaatacccgctctcgaaaaatacaaaaaacg

SEQ ID NO: 39973 - DNA, 50 bp, synthetic construct
  source 1..50: mol_type = other DNA
aaaataatcacctaaaaattaccccacaaccaccactaaaataacttcca

SEQ ID NO: 39974 - DNA, 50 bp, synthetic construct
  source 1..50: mol_type = other DNA
aaaataatcgcctaaaaattaccccgcaaccaccgctaaaataacttccg

SEQ ID NO: 39975 - DNA, 50 bp, synthetic construct
  source 1..50: mol_type = other DNA
caaaccatttcatcacataattcttcaataactaaacaaaaaactaccca

SEQ ID NO: 39976 - DNA, 50 bp, synthetic construct
  source 1..50: mol_type = other DNA
cgaaccatttcatcacgtaattcttcaataactaaacgaaaaactacccg

SEQ ID NO: 39977 - DNA, 50 bp, synthetic construct
  source 1..50: mol_type = other DNA
caaaacatccaaccatacataaataatctacaaatcatccccaaacacca

SEQ ID NO: 39978 - DNA, 50 bp, synthetic construct
  source 1..50: mol_type = other DNA
caaaacatccaaccatacataaataatctacgaatcatccccgaacaccg

SEQ ID NO: 39979 - DNA, 50 bp, synthetic construct
  source 1..50: mol_type = other DNA
tttttattttgtgtttttgaagagtagagaggaagatggaaattgagttt

SEQ ID NO: 39980 - DNA, 50 bp, synthetic construct
  source 1..50: mol_type = other DNA
tttttatttcgcgtttttgaagagtagagaggaagatggaaatcgagttc

SEQ ID NO: 39981 - DNA, 50 bp, synthetic construct
  source 1..50: mol_type = other DNA
agggaaaagaagtttaaagtttgaaattatttttatgttaaggtagtagt

SEQ ID NO: 39982 - DNA, 50 bp, synthetic construct
  source 1..50: mol_type = other DNA
agggaaaagaagtttaaagtttgaaattatttttacgttaaggtagtagc

SEQ ID NO: 39983 - DNA, 50 bp, synthetic construct
  source 1..50: mol_type = other DNA
attatttttatgttaaggtagtagtgttgtttgttttgtttgggattttt

SEQ ID NO: 39984 - DNA, 50 bp, synthetic construct
  source 1..50: mol_type = other DNA
attatttttacgttaaggtagtagcgttgtttgttttgtttgggattttc

SEQ ID NO: 39985 - DNA, 50 bp, synthetic construct
  source 1..50: mol_type = other DNA
ttagggttggggtttgagtttgtttttttgtagttgttatagttattttt

SEQ ID NO: 39986 - DNA, 50 bp, synthetic construct
  source 1..50: mol_type = other DNA
ttagggtcggggttcgagtttgtttttttgtagttgttatagttattttc

SEQ ID NO: 39987 - DNA, 50 bp, synthetic construct
  source 1..50: mol_type = other DNA
tagttgtagggaagtaggtttggattttggttttgaatttgttatttggt

SEQ ID NO: 39988 - DNA, 50 bp, synthetic construct
  source 1..50: mol_type = other DNA
tagttgtagggaagtaggttcggatttcggttttgaatttgttatttggc

SEQ ID NO: 39989 - DNA, 50 bp, synthetic construct
  source 1..50: mol_type = other DNA
ttttttttggtttgtagtgtttgtttgtattgttatttgttatttgaggt

SEQ ID NO: 39990 - DNA, 50 bp, synthetic construct
  source 1..50: mol_type = other DNA
tttttttcggtttgtagcgttcgttcgtatcgttatttgttattcgaggc

SEQ ID NO: 39991 - DNA, 50 bp, synthetic construct
  source 1..50: mol_type = other DNA
taaaaaaaaacaaactacatcacctcaaataacaaataacaatacaaaca

SEQ ID NO: 39992 - DNA, 50 bp, synthetic construct
  source 1..50: mol_type = other DNA
taaaaaaaaacgaactacgtcgcctcgaataacaaataacgatacgaacg

SEQ ID NO: 39993 - DNA, 50 bp, synthetic construct
  source 1..50: mol_type = other DNA
ttgtttttgagatgttttggtttggagttttagggttatagttgaaattt

SEQ ID NO: 39994 - DNA, 50 bp, synthetic construct
  source 1..50: mol_type = other DNA
ttgtttttgagacgtttcggttcggagttttagggttatagtcgaaattc

SEQ ID NO: 39995 - DNA, 50 bp, synthetic construct
  source 1..50: mol_type = other DNA
ccaaaaaaaaacacaaaaaaacaaatttcaactataaccctaaaactcca

SEQ ID NO: 39996 - DNA, 50 bp, synthetic construct
  source 1..50: mol_type = other DNA
ccgaaaaaaaacgcgaaaaaacgaatttcgactataaccctaaaactccg

SEQ ID NO: 39997 - DNA, 50 bp, synthetic construct
  source 1..50: mol_type = other DNA
aaaaaacacaaaaaaacaaatttcaactataaccctaaaactccaaacca

SEQ ID NO: 39998 - DNA, 50 bp, synthetic construct
  source 1..50: mol_type = other DNA
aaaaaacgcgaaaaaacgaatttcgactataaccctaaaactccgaaccg

SEQ ID NO: 39999 - DNA, 50 bp, synthetic construct
  source 1..50: mol_type = other DNA
acacaaaaaaacaaatttcaactataaccctaaaactccaaaccaaaaca

SEQ ID NO: 40000 - DNA, 50 bp, synthetic construct
  source 1..50: mol_type = other DNA
acgcgaaaaaacgaatttcgactataaccctaaaactccgaaccgaaacg

SEQ ID NO: 40001 - DNA, 50 bp, synthetic construct
  source 1..50: mol_type = other DNA
actataaccctaaaactccaaaccaaaacatctcaaaaacaaaacacaca

SEQ ID NO: 40002 - DNA, 50 bp, synthetic construct
  source 1..50: mol_type = other DNA
actataaccctaaaactccgaaccgaaacgtctcaaaaacaaaacgcacg

SEQ ID NO: 40003 - DNA, 50 bp, synthetic construct
  source 1..50: mol_type = other DNA
caaaaacaaaacacacaacacaacaaaacaaacataaaacatacaaaaca

SEQ ID NO: 40004 - DNA, 50 bp, synthetic construct
  source 1..50: mol_type = other DNA
caaaaacaaaacgcacgacacaacgaaacgaacgtaaaacgtacgaaacg

SEQ ID NO: 40005 - DNA, 50 bp, synthetic construct
  source 1..50: mol_type = other DNA
tttattagttttagaggttgattttttttaagtggaggagaggggaaggt

SEQ ID NO: 40006 - DNA, 50 bp, synthetic construct
  source 1..50: mol_type = other DNA
tttattagttttagaggtcgattttttttaagtggaggagaggggaaggc

SEQ ID NO: 40007 - DNA, 50 bp, synthetic construct
  source 1..50: mol_type = other DNA
gttttgagaggttgaggtgattttaaggttttattgaggtagaagaagtt

SEQ ID NO: 40008 - DNA, 50 bp, synthetic construct
  source 1..50: mol_type = other DNA
gtttcgagaggttgaggtgattttaaggttttattgaggtagaagaagtc

SEQ ID NO: 40009 - DNA, 50 bp, synthetic construct
  source 1..50: mol_type = other DNA
gattttaaggttttattgaggtagaagaagttggttgatgggtgattttt

SEQ ID NO: 40010 - DNA, 50 bp, synthetic construct
  source 1..50: mol_type = other DNA
gattttaaggttttattgaggtagaagaagtcggttgacgggcgattttc

SEQ ID NO: 40011 - DNA, 50 bp, synthetic construct
  source 1..50: mol_type = other DNA
tgaagattggtgtaaagtgaagaaggttttagagttaaattttgattttt

SEQ ID NO: 40012 - DNA, 50 bp, synthetic construct
  source 1..50: mol_type = other DNA
cgaagattggtgtaaagcgaagaaggttttagagttaaattttgattttc

SEQ ID NO: 40013 - DNA, 50 bp, synthetic construct
  source 1..50: mol_type = other DNA
aatcaaactctaactctcaaaacctaactcacaaaactcaaaaactccca

SEQ ID NO: 40014 - DNA, 50 bp, synthetic construct
  source 1..50: mol_type = other DNA
aatcaaactctaactctcgaaacctaactcgcaaaactcgaaaactcccg

SEQ ID NO: 40015 - DNA, 50 bp, synthetic construct
  source 1..50: mol_type = other DNA
tctaactctcaaaacctaactcacaaaactcaaaaactcccaaaaaacca

SEQ ID NO: 40016 - DNA, 50 bp, synthetic construct
  source 1..50: mol_type = other DNA
tctaactctcgaaacctaactcgcaaaactcgaaaactcccgaaaaaccg

SEQ ID NO: 40017 - DNA, 50 bp, synthetic construct
  source 1..50: mol_type = other DNA
cccacctaacaaaataaataacaacaacaacaaatacaaaacaacatcca

SEQ ID NO: 40018 - DNA, 50 bp, synthetic construct
  source 1..50: mol_type = other DNA
cccgcctaacgaaataaataacgacgacaacaaatacaaaacgacgtccg

SEQ ID NO: 40019 - DNA, 50 bp, synthetic construct
  source 1..50: mol_type = other DNA
aacaccaaaacccaactaaactaaataacaaatcctaaccaaaccaccca

SEQ ID NO: 40020 - DNA, 50 bp, synthetic construct
  source 1..50: mol_type = other DNA
aacaccgaaacccgactaaactaaataacaaatcctaaccaaaccacccg

SEQ ID NO: 40021 - DNA, 50 bp, synthetic construct
  source 1..50: mol_type = other DNA
aacaaaaccacacaaataacttaatcaaaacctaccattcaacccaatca

SEQ ID NO: 40022 - DNA, 50 bp, synthetic construct
  source 1..50: mol_type = other DNA
aacgaaaccgcgcgaataacttaatcaaaacctaccattcaacccaatcg

SEQ ID NO: 40023 - DNA, 50 bp, synthetic construct
  source 1..50: mol_type = other DNA
ataccactactaaaaatactcaacaaaaccaaaacccacttaaaacacca

SEQ ID NO: 40024 - DNA, 50 bp, synthetic construct
  source 1..50: mol_type = other DNA
ataccactactaaaaatactcaacgaaaccgaaacccgcttaaaacgccg

SEQ ID NO: 40025 - DNA, 50 bp, synthetic construct
  source 1..50: mol_type = other DNA
cctccaaaaactataccactactaaaaatactcaacaaaaccaaaaccca

SEQ ID NO: 40026 - DNA, 50 bp, synthetic construct
  source 1..50: mol_type = other DNA
cctccaaaaactataccactactaaaaatactcaacgaaaccgaaacccg

SEQ ID NO: 40027 - DNA, 50 bp, synthetic construct
  source 1..50: mol_type = other DNA
ccaaacccctccaaaaactataccactactaaaaatactcaacaaaacca

SEQ ID NO: 40028 - DNA, 50 bp, synthetic construct
  source 1..50: mol_type = other DNA
ccgaacccctccaaaaactataccactactaaaaatactcaacgaaaccg

SEQ ID NO: 40029 - DNA, 50 bp, synthetic construct
  source 1..50: mol_type = other DNA
ttcatcccaaacccctccaaaaactataccactactaaaaatactcaaca

SEQ ID NO: 40030 - DNA, 50 bp, synthetic construct
  source 1..50: mol_type = other DNA
ttcgtcccgaacccctccaaaaactataccactactaaaaatactcaacg

SEQ ID NO: 40031 - DNA, 50 bp, synthetic construct
  source 1..50: mol_type = other DNA
ccctctccttcacccaacctaaatttttattacatctcaaactcatttca

SEQ ID NO: 40032 - DNA, 50 bp, synthetic construct
  source 1..50: mol_type = other DNA
ccctctccttcacccaacctaaatttttattacatctcaaactcatttcg

SEQ ID NO: 40033 - DNA, 50 bp, synthetic construct
  source 1..50: mol_type = other DNA
aactcatttcacaaatctaaacttcctaaaatatacacaaaacacctcca

SEQ ID NO: 40034 - DNA, 50 bp, synthetic construct
  source 1..50: mol_type = other DNA
aactcatttcgcaaatctaaacttcctaaaatatacacgaaacgcctccg

SEQ ID NO: 40035 - DNA, 50 bp, synthetic construct
  source 1..50: mol_type = other DNA
atctaaacttcctaaaatatacacaaaacacctccaaatttacacacaca

SEQ ID NO: 40036 - DNA, 50 bp, synthetic construct
  source 1..50: mol_type = other DNA
atctaaacttcctaaaatatacacgaaacgcctccgaatttacacacgcg

SEQ ID NO: 40037 - DNA, 50 bp, synthetic construct
  source 1..50: mol_type = other DNA
cccaaacacaaaaaataaaatatattctacaactaaaaaccaacccaaca

SEQ ID NO: 40038 - DNA, 50 bp, synthetic construct
  source 1..50: mol_type = other DNA
cccgaacgcgaaaaataaaatatattctacaactaaaaaccgacccaacg

SEQ ID NO: 40039 - DNA, 50 bp, synthetic construct
  source 1..50: mol_type = other DNA
aaaatatacccaaacacaaaaaataaaatatattctacaactaaaaacca

SEQ ID NO: 40040 - DNA, 50 bp, synthetic construct
  source 1..50: mol_type = other DNA
aaaatatacccgaacgcgaaaaataaaatatattctacaactaaaaaccg

SEQ ID NO: 40041 - DNA, 50 bp, synthetic construct
  source 1..50: mol_type = other DNA
attaaccccactaaaccaactcccaattacaaaacacattccattcttca

SEQ ID NO: 40042 - DNA, 50 bp, synthetic construct
  source 1..50: mol_type = other DNA
attaaccccgctaaaccgactcccaattacaaaacacattccattcttcg

SEQ ID NO: 40043 - DNA, 50 bp, synthetic construct
  source 1..50: mol_type = other DNA
aaaaaaactcaacccaaccaatcctcactacaaaaaaatatacccaaaca

SEQ ID NO: 40044 - DNA, 50 bp, synthetic construct
  source 1..50: mol_type = other DNA
gaaaaaactcgacccgaccaatcctcactacgaaaaaatatacccgaacg

SEQ ID NO: 40045 - DNA, 50 bp, synthetic construct
  source 1..50: mol_type = other DNA
ttttgttgggttggtttttagttgtagaatatattttattttttgtgttt

SEQ ID NO: 40046 - DNA, 50 bp, synthetic construct
  source 1..50: mol_type = other DNA
tttcgttgggtcggtttttagttgtagaatatattttatttttcgcgttc

SEQ ID NO: 40047 - DNA, 50 bp, synthetic construct
  source 1..50: mol_type = other DNA
tcctcaaacttcaatctaaaaaactaacaatccaacaaaaaacaataaca

SEQ ID NO: 40048 - DNA, 50 bp, synthetic construct
  source 1..50: mol_type = other DNA
tcctcgaacttcgatctaaaaaactaacaatccgacgaaaaacgataacg

SEQ ID NO: 40049 - DNA, 50 bp, synthetic construct
  source 1..50: mol_type = other DNA
tcaaacaaaaacatcctcaaacttcaatctaaaaaactaacaatccaaca

SEQ ID NO: 40050 - DNA, 50 bp, synthetic construct
  source 1..50: mol_type = other DNA
tcgaacaaaaacgtcctcgaacttcgatctaaaaaactaacaatccgacg

SEQ ID NO: 40051 - DNA, 50 bp, synthetic construct
  source 1..50: mol_type = other DNA
atttttgttattgttttttgttggattgttagttttttagattgaagttt

SEQ ID NO: 40052 - DNA, 50 bp, synthetic construct
  source 1..50: mol_type = other DNA
attttcgttatcgtttttcgtcggattgttagttttttagatcgaagttc

SEQ ID NO: 40053 - DNA, 50 bp, synthetic construct
  source 1..50: mol_type = other DNA
gttattgttttttgttggattgttagttttttagattgaagtttgaggat

SEQ ID NO: 40054 - DNA, 50 bp, synthetic construct
  source 1..50: mol_type = other DNA
gttatcgtttttcgtcggattgttagttttttagatcgaagttcgaggac

SEQ ID NO: 40055 - DNA, 50 bp, synthetic construct
  source 1..50: mol_type = other DNA
tttgttggattgttagttttttagattgaagtttgaggatgtttttgttt

SEQ ID NO: 40056 - DNA, 50 bp, synthetic construct
  source 1..50: mol_type = other DNA
ttcgtcggattgttagttttttagatcgaagttcgaggacgtttttgttc

SEQ ID NO: 40057 - DNA, 50 bp, synthetic construct
  source 1..50: mol_type = other DNA
ttggattgttagttttttagattgaagtttgaggatgtttttgtttgagt

SEQ ID NO: 40058 - DNA, 50 bp, synthetic construct
  source 1..50: mol_type = other DNA
tcggattgttagttttttagatcgaagttcgaggacgtttttgttcgagc

SEQ ID NO: 40059 - DNA, 50 bp, synthetic construct
  source 1..50: mol_type = other DNA
accaccaaaaactacataacaacaacctctaaaaaccaaataaaaaacca

SEQ ID NO: 40060 - DNA, 50 bp, synthetic construct
  source 1..50: mol_type = other DNA
accgccgaaaactacgtaacgacgacctctaaaaaccgaataaaaaaccg

SEQ ID NO: 40061 - DNA, 50 bp, synthetic construct
  source 1..50: mol_type = other DNA
aaactacataacaacaacctctaaaaaccaaataaaaaaccatcacaaca

SEQ ID NO: 40062 - DNA, 50 bp, synthetic construct
  source 1..50: mol_type = other DNA
aaactacgtaacgacgacctctaaaaaccgaataaaaaaccgtcgcaacg

SEQ ID NO: 40063 - DNA, 50 bp, synthetic construct
  source 1..50: mol_type = other DNA
ctctaaaaaccaaataaaaaaccatcacaacaaaatcacactaccaaaca

SEQ ID NO: 40064 - DNA, 50 bp, synthetic construct
  source 1..50: mol_type = other DNA
ctctaaaaaccgaataaaaaaccgtcgcaacgaaatcgcactaccaaacg

SEQ ID NO: 40065 - DNA, 50 bp, synthetic construct
  source 1..50: mol_type = other DNA
taaaaaccaaataaaaaaccatcacaacaaaatcacactaccaaacacca

SEQ ID NO: 40066 - DNA, 50 bp, synthetic construct
  source 1..50: mol_type = other DNA
taaaaaccgaataaaaaaccgtcgcaacgaaatcgcactaccaaacgccg

SEQ ID NO: 40067 - DNA, 50 bp, synthetic construct
  source 1..50: mol_type = other DNA
atacaacacaactttacttaccttaataatactactacaccaaaaaatca

SEQ ID NO: 40068 - DNA, 50 bp, synthetic construct
  source 1..50: mol_type = other DNA
atacgacgcgactttacttaccttaataatactactacgccgaaaaatcg

SEQ ID NO: 40069 - DNA, 50 bp, synthetic construct
  source 1..50: mol_type = other DNA
tagtatgggtgattttttggtgtagtagtattattaaggtaagtaaagtt

SEQ ID NO: 40070 - DNA, 50 bp, synthetic construct
  source 1..50: mol_type = other DNA
tagtacgggcgatttttcggcgtagtagtattattaaggtaagtaaagtc

SEQ ID NO: 40071 - DNA, 50 bp, synthetic construct
  source 1..50: mol_type = other DNA
tttgtttgggtttttgatttatttattatttatagttatgtttttggtgt

SEQ ID NO: 40072 - DNA, 50 bp, synthetic construct
  source 1..50: mol_type = other DNA
tttgttcgggtttttgatttatttattatttatagttacgttttcggtgc

SEQ ID NO: 40073 - DNA, 50 bp, synthetic construct
  source 1..50: mol_type = other DNA
gattttttggtgtagtagtattattaaggtaagtaaagttgtgttgtatt

SEQ ID NO: 40074 - DNA, 50 bp, synthetic construct
  source 1..50: mol_type = other DNA
gatttttcggcgtagtagtattattaaggtaagtaaagtcgcgtcgtatc

SEQ ID NO: 40075 - DNA, 50 bp, synthetic construct
  source 1..50: mol_type = other DNA
cacaccacaccaaaaacataactataaataataaataaatcaaaaaccca

SEQ ID NO: 40076 - DNA, 50 bp, synthetic construct
  source 1..50: mol_type = other DNA
cgcgccgcaccgaaaacgtaactataaataataaataaatcaaaaacccg

SEQ ID NO: 40077 - DNA, 50 bp, synthetic construct
  source 1..50: mol_type = other DNA
aaacataactataaataataaataaatcaaaaacccaaacaaaatataca

SEQ ID NO: 40078 - DNA, 50 bp, synthetic construct
  source 1..50: mol_type = other DNA
aaacgtaactataaataataaataaatcaaaaacccgaacaaaatatacg

SEQ ID NO: 40079 - DNA, 50 bp, synthetic construct
  source 1..50: mol_type = other DNA
caaaccttccttccttatccaaaaattcccaaactcaactatcaaccaca

SEQ ID NO: 40080 - DNA, 50 bp, synthetic construct
  source 1..50: mol_type = other DNA
caaaccttccttccttatccgaaaattcccaaactcaactatcaaccacg

SEQ ID NO: 40081 - DNA, 50 bp, synthetic construct
  source 1..50: mol_type = other DNA
cttccttccttatccaaaaattcccaaactcaactatcaaccacaaaaca

SEQ ID NO: 40082 - DNA, 50 bp, synthetic construct
  source 1..50: mol_type = other DNA
cttccttccttatccgaaaattcccaaactcaactatcaaccacgaaacg

SEQ ID NO: 40083 - DNA, 50 bp, synthetic construct
  source 1..50: mol_type = other DNA
aaaacatccatcaaaacacaaaaacacaaaacaaaacttttcctctacca

SEQ ID NO: 40084 - DNA, 50 bp, synthetic construct
  source 1..50: mol_type = other DNA
aaaacatccatcaaaacgcaaaaacgcaaaacgaaacttttcctctaccg

SEQ ID NO: 40085 - DNA, 50 bp, synthetic construct
  source 1..50: mol_type = other DNA
aaacacacaaataactttttctccccactaacaacaaaaaaaaaattcca

SEQ ID NO: 40086 - DNA, 50 bp, synthetic construct
  source 1..50: mol_type = other DNA
aaacgcacaaataactttttctccccactaacgacaaaaaaaaaattccg

SEQ ID NO: 40087 - DNA, 50 bp, synthetic construct
  source 1..50: mol_type = other DNA
gtgaagtttgtagagaaaatgagggaaagtatttattagaatgtaaagat

SEQ ID NO: 40088 - DNA, 50 bp, synthetic construct
  source 1..50: mol_type = other DNA
gtgaagtttgtagagaaaatgagggaaagtatttattagaacgtaaagac

SEQ ID NO: 40089 - DNA, 50 bp, synthetic construct
  source 1..50: mol_type = other DNA
atggtttagtgaagtttgtagagaaaatgagggaaagtatttattagaat

SEQ ID NO: 40090 - DNA, 50 bp, synthetic construct
  source 1..50: mol_type = other DNA
acggtttagtgaagtttgtagagaaaatgagggaaagtatttattagaac

SEQ ID NO: 40091 - DNA, 50 bp, synthetic construct
  source 1..50: mol_type = other DNA
ttttcaaaaatcattattcaaaataacaaatttcaaaaatctaaattcca

SEQ ID NO: 40092 - DNA, 50 bp, synthetic construct
  source 1..50: mol_type = other DNA
ttttcaaaaatcgttattcgaaataacaaatttcaaaaatctaaattccg

SEQ ID NO: 40093 - DNA, 50 bp, synthetic construct
  source 1..50: mol_type = other DNA
tatacactcccactctacattttctccactaatatctaacctcacttaca

SEQ ID NO: 40094 - DNA, 50 bp, synthetic construct
  source 1..50: mol_type = other DNA
tatacactcccactctacattttctccactaatatctaacctcacttacg

SEQ ID NO: 40095 - DNA, 50 bp, synthetic construct
  source 1..50: mol_type = other DNA
aattactttattaaaccacaactatattttctaaattaatcataaaaaca

SEQ ID NO: 40096 - DNA, 50 bp, synthetic construct
  source 1..50: mol_type = other DNA
aattactttattaaaccacgactatattttctaaattaatcataaaaacg

SEQ ID NO: 40097 - DNA, 50 bp, synthetic construct
  source 1..50: mol_type = other DNA
tcctaacaatcctcaacaaaacaaaaacaataaaacatttccaaaaatca

SEQ ID NO: 40098 - DNA, 50 bp, synthetic construct
  source 1..50: mol_type = other DNA
tcctaacgatcctcgacgaaacgaaaacaataaaacgtttccgaaaatcg

SEQ ID NO: 40099 - DNA, 50 bp, synthetic construct
  source 1..50: mol_type = other DNA
aacaacatctaaataaaaaacaaccataaaaactaaaccaaaccccacca

SEQ ID NO: 40100 - DNA, 50 bp, synthetic construct
  source 1..50: mol_type = other DNA
aacaacatctaaataaaaaacgaccataaaaactaaaccgaaccccgccg

SEQ ID NO: 40101 - DNA, 50 bp, synthetic construct
  source 1..50: mol_type = other DNA
tcatatatccactctaatcctaaatcaaactattaattttaaaaataaca

SEQ ID NO: 40102 - DNA, 50 bp, synthetic construct
  source 1..50: mol_type = other DNA
tcgtatatccgctctaatcctaaatcgaactattaattttaaaaataacg

SEQ ID NO: 40103 - DNA, 50 bp, synthetic construct
  source 1..50: mol_type = other DNA
aaaaaataaaaaatccacctccttcatatatccactctaatcctaaatca

SEQ ID NO: 40104 - DNA, 50 bp, synthetic construct
  source 1..50: mol_type = other DNA
aaaaaataaaaaatccacctccttcgtatatccgctctaatcctaaatcg

SEQ ID NO: 40105 - DNA, 50 bp, synthetic construct
  source 1..50: mol_type = other DNA
cttccaccctcaatcaaaataataattaaacaaccttcctaacctttaca

SEQ ID NO: 40106 - DNA, 50 bp, synthetic construct
  source 1..50: mol_type = other DNA
cttccgccctcgatcaaaataataattaaacgaccttcctaacctttacg

SEQ ID NO: 40107 - DNA, 50 bp, synthetic construct
  source 1..50: mol_type = other DNA
ccaacaaaaacaactacctctacaaatccatacaacaataaaacaaaaca

SEQ ID NO: 40108 - DNA, 50 bp, synthetic construct
  source 1..50: mol_type = other DNA
ccgacaaaaacgactacctctacaaatccatacgacgataaaacaaaacg

SEQ ID NO: 40109 - DNA, 50 bp, synthetic construct
  source 1..50: mol_type = other DNA
caataaactataaaaacttaaattaaacaaaactacaaaaaataacacca

SEQ ID NO: 40110 - DNA, 50 bp, synthetic construct
  source 1..50: mol_type = other DNA
caataaactataaaaacttaaattaaacgaaactacgaaaaataacgccg

SEQ ID NO: 40111 - DNA, 50 bp, synthetic construct
  source 1..50: mol_type = other DNA
taccataaaaacaaacaactccaactaaaaatttccatacttaaaaacca

SEQ ID NO: 40112 - DNA, 50 bp, synthetic construct
  source 1..50: mol_type = other DNA
taccataaaaacgaacgactccgactaaaaatttccgtacttaaaaaccg

SEQ ID NO: 40113 - DNA, 50 bp, synthetic construct
  source 1..50: mol_type = other DNA
acccttcatactaaaactacaacctactaaaccccaaataaaaatccaca

SEQ ID NO: 40114 - DNA, 50 bp, synthetic construct
  source 1..50: mol_type = other DNA
gcccttcgtactaaaactacgacctactaaaccccaaataaaaatccacg

SEQ ID NO: 40115 - DNA, 50 bp, synthetic construct
  source 1..50: mol_type = other DNA
aaaaaaataactattcaaaaaattcttaataactaccttactaaccaaca

SEQ ID NO: 40116 - DNA, 50 bp, synthetic construct
  source 1..50: mol_type = other DNA
aaaaaaataactattcaaaaaattcttaataactaccttactaaccaacg

SEQ ID NO: 40117 - DNA, 50 bp, synthetic construct
  source 1..50: mol_type = other DNA
aaactaaaaaatctaactccacaaacaattaataacaacccaaaactcca

SEQ ID NO: 40118 - DNA, 50 bp, synthetic construct
  source 1..50: mol_type = other DNA
aaactaaaaaatctaactccgcgaacgattaataacgacccgaaactccg

SEQ ID NO: 40119 - DNA, 50 bp, synthetic construct
  source 1..50: mol_type = other DNA
caaattacaccacacaatcctaaaacacaaaactaaaaaatctaactcca

SEQ ID NO: 40120 - DNA, 50 bp, synthetic construct
  source 1..50: mol_type = other DNA
caaattacaccgcgcgatcctaaaacgcaaaactaaaaaatctaactccg

SEQ ID NO: 40121 - DNA, 50 bp, synthetic construct
  source 1..50: mol_type = other DNA
aaccaataaacttcataaccttaaaaacaactaaacaacaacaaaacaca

SEQ ID NO: 40122 - DNA, 50 bp, synthetic construct
  source 1..50: mol_type = other DNA
gaccgataaacttcgtaaccttaaaaacgactaaacaacaacgaaacgcg

SEQ ID NO: 40123 - DNA, 50 bp, synthetic construct
  source 1..50: mol_type = other DNA
tatccccaaccaataaacttcataaccttaaaaacaactaaacaacaaca

SEQ ID NO: 40124 - DNA, 50 bp, synthetic construct
  source 1..50: mol_type = other DNA
tatccccgaccgataaacttcgtaaccttaaaaacgactaaacaacaacg

SEQ ID NO: 40125 - DNA, 50 bp, synthetic construct
  source 1..50: mol_type = other DNA
aaaataaattttaaacaaaatttttccaattcccacttcttaaaaattca

SEQ ID NO: 40126 - DNA, 50 bp, synthetic construct
  source 1..50: mol_type = other DNA
aaaataaattttaaacaaaatttttccaattcccacttcttaaaaattcg

SEQ ID NO: 40127 - DNA, 50 bp, synthetic construct
  source 1..50: mol_type = other DNA
ggttttgtttttgatgttagttttggagttttgtgtgtatattattttat

SEQ ID NO: 40128 - DNA, 50 bp, synthetic construct
  source 1..50: mol_type = other DNA
ggtttcgtttttgatgttagttttggagttttgtgtgtatattattttac

SEQ ID NO: 40129 - DNA, 50 bp, synthetic construct
  source 1..50: mol_type = other DNA
aataggatagagttttagagataataggaaatagaagaattgttgtaatt

SEQ ID NO: 40130 - DNA, 50 bp, synthetic construct
  source 1..50: mol_type = other DNA
aataggatagagttttagagataataggaaatagaagaattgttgtaatc

SEQ ID NO: 40131 - DNA, 50 bp, synthetic construct
  source 1..50: mol_type = other DNA
ggatagagttttagagataataggaaatagaagaattgttgtaattgaat

SEQ ID NO: 40132 - DNA, 50 bp, synthetic construct
  source 1..50: mol_type = other DNA
ggatagagttttagagataataggaaatagaagaattgttgtaatcgaac

SEQ ID NO: 40133 - DNA, 50 bp, synthetic construct
  source 1..50: mol_type = other DNA
aacatacaaaactctctcaacttttctactaacaaaccacaaactaccca

SEQ ID NO: 40134 - DNA, 50 bp, synthetic construct
  source 1..50: mol_type = other DNA
aacgtacaaaactctctcaacttttctactaacaaaccgcaaactacccg

SEQ ID NO: 40135 - DNA, 50 bp, synthetic construct
  source 1..50: mol_type = other DNA
atctattaaatcaaaaactaaaacctaaaacttaaatcaaattctacaca

SEQ ID NO: 40136 - DNA, 50 bp, synthetic construct
  source 1..50: mol_type = other DNA
atctattaaatcaaaaactaaaacctaaaacttaaatcaaattctacacg

SEQ ID NO: 40137 - DNA, 50 bp, synthetic construct
  source 1..50: mol_type = other DNA
gttagattttgtggtgataaagtgaaattggttttgtagtgtttttattt

SEQ ID NO: 40138 - DNA, 50 bp, synthetic construct
  source 1..50: mol_type = other DNA
gttagattttgtggtgataaagtgaaattggttttgtagtgtttttattc

SEQ ID NO: 40139 - DNA, 50 bp, synthetic construct
  source 1..50: mol_type = other DNA
ttaaaaaacataactactaaccttacctattaacaaacactataattaca

SEQ ID NO: 40140 - DNA, 50 bp, synthetic construct
  source 1..50: mol_type = other DNA
ttaaaaaacgtaactactaaccttacctattaacgaacgctataattacg

SEQ ID NO: 40141 - DNA, 50 bp, synthetic construct
  source 1..50: mol_type = other DNA
aaaaaataacacaattctatcctccctacaccctacatattctaatccca

SEQ ID NO: 40142 - DNA, 50 bp, synthetic construct
  source 1..50: mol_type = other DNA
aaaaaataacgcaattctatcctccctacaccctacgtattctaatcccg

SEQ ID NO: 40143 - DNA, 50 bp, synthetic construct
  source 1..50: mol_type = other DNA
atttaataaaaatttaacaatctccataattaccaccaccacacataaca

SEQ ID NO: 40144 - DNA, 50 bp, synthetic construct
  source 1..50: mol_type = other DNA
atttaataaaaatttaacgatctccataattaccgccgccgcgcgtaacg

SEQ ID NO: 40145 - DNA, 50 bp, synthetic construct
  source 1..50: mol_type = other DNA
ccttaaaaaaatttaaaccctaccacaaaaacccacataaaaaacaacca

SEQ ID NO: 40146 - DNA, 50 bp, synthetic construct
  source 1..50: mol_type = other DNA
ccttaaaaaaatttaaaccctaccgcgaaaacccacgtaaaaaacgaccg

SEQ ID NO: 40147 - DNA, 50 bp, synthetic construct
  source 1..50: mol_type = other DNA
aaaaacccaatcccaaaaaaccctctcaaaaactatcaactacaaaaaca

SEQ ID NO: 40148 - DNA, 50 bp, synthetic construct
  source 1..50: mol_type = other DNA
gaaaacccaatcccgaaaaaccctctcgaaaactatcaactacgaaaacg

SEQ ID NO: 40149 - DNA, 50 bp, synthetic construct
  source 1..50: mol_type = other DNA
caatcccaaaaaaccctctcaaaaactatcaactacaaaaacacaaatca

SEQ ID NO: 40150 - DNA, 50 bp, synthetic construct
  source 1..50: mol_type = other DNA
caatcccgaaaaaccctctcgaaaactatcaactacgaaaacgcaaatcg

SEQ ID NO: 40151 - DNA, 50 bp, synthetic construct
  source 1..50: mol_type = other DNA
aaaaaaaccaataataaaacaaacacctcctacaaaaaaaccaaccccca

SEQ ID NO: 40152 - DNA, 50 bp, synthetic construct
  source 1..50: mol_type = other DNA
aaaaaaaccaataataaaacgaacacctcctacgaaaaaaccgacccccg

SEQ ID NO: 40153 - DNA, 50 bp, synthetic construct
  source 1..50: mol_type = other DNA
aactaaaaaaataaacacaaataaaaaattaccaaaaatcaatctttcca

SEQ ID NO: 40154 - DNA, 50 bp, synthetic construct
  source 1..50: mol_type = other DNA
aactaaaaaaataaacgcaaataaaaaattaccgaaaatcgatctttccg

SEQ ID NO: 40155 - DNA, 50 bp, synthetic construct
  source 1..50: mol_type = other DNA
aaacaacaaacactacaaaaacacaaaacaatattaataaataataaaca

SEQ ID NO: 40156 - DNA, 50 bp, synthetic construct
  source 1..50: mol_type = other DNA
aaacgacgaacgctacgaaaacgcgaaacgatattaataaataataaacg

SEQ ID NO: 40157 - DNA, 50 bp, synthetic construct
  source 1..50: mol_type = other DNA
caaaaattataactacacaaacccttacaccaaatcaaccataaaaaaca

SEQ ID NO: 40158 - DNA, 50 bp, synthetic construct
  source 1..50: mol_type = other DNA
cgaaaattataactacacaaacccttacgccaaatcgaccgtaaaaaacg

SEQ ID NO: 40159 - DNA, 50 bp, synthetic construct
  source 1..50: mol_type = other DNA
aaaactaacctaacaaaaaacaaacaaaaaaacaacaaccacataaacca

SEQ ID NO: 40160 - DNA, 50 bp, synthetic construct
  source 1..50: mol_type = other DNA
aaaactaacctaacgaaaaacaaacaaaaaaacaacaaccacgtaaaccg

SEQ ID NO: 40161 - DNA, 50 bp, synthetic construct
  source 1..50: mol_type = other DNA
ataatcccaacttcaaaatcaataaaacaaaccaaacacaataactcaca

SEQ ID NO: 40162 - DNA, 50 bp, synthetic construct
  source 1..50: mol_type = other DNA
ataatcccaacttcaaaatcaataaaacgaaccgaacgcgataactcacg

SEQ ID NO: 40163 - DNA, 50 bp, synthetic construct
  source 1..50: mol_type = other DNA
ataatcccaacttcaaaaccaataaaacaaaccaaacacaataactcaca

SEQ ID NO: 40164 - DNA, 50 bp, synthetic construct
  source 1..50: mol_type = other DNA
ataatcccaacttcaaaaccaataaaacgaaccgaacgcgataactcacg

SEQ ID NO: 40165 - DNA, 50 bp, synthetic construct
  source 1..50: mol_type = other DNA
tgtaaaattttatgtttattaaaaaaaaagttagttgggtatggtggtat

SEQ ID NO: 40166 - DNA, 50 bp, synthetic construct
  source 1..50: mol_type = other DNA
cgtaaaattttatgtttattaaaaaaaaagttagttgggtatggtggtac

SEQ ID NO: 40167 - DNA, 50 bp, synthetic construct
  source 1..50: mol_type = other DNA
acttaaaatcaaaaattcaaaaccaacccaaccaatataacaaaacccca

SEQ ID NO: 40168 - DNA, 50 bp, synthetic construct
  source 1..50: mol_type = other DNA
acttaaaatcaaaaattcgaaaccaacccgaccaatataacaaaaccccg

SEQ ID NO: 40169 - DNA, 50 bp, synthetic construct
  source 1..50: mol_type = other DNA
caactatatacacacaacaccaaaccctcaaccaaaaacacaaatcaaca

SEQ ID NO: 40170 - DNA, 50 bp, synthetic construct
  source 1..50: mol_type = other DNA
caactatatacacacaacaccgaaccctcaaccaaaaacacaaatcaacg

SEQ ID NO: 40171 - DNA, 50 bp, synthetic construct
  source 1..50: mol_type = other DNA
acatcctcataaaaaaaaataaatctaaaccaaaccatataccctccaca

SEQ ID NO: 40172 - DNA, 50 bp, synthetic construct
  source 1..50: mol_type = other DNA
acatcctcataaaaaaaaataaatctaaaccaaaccgtataccctccacg

SEQ ID NO: 40173 - DNA, 50 bp, synthetic construct
  source 1..50: mol_type = other DNA
aaaaatcacttaaacccaaaaaatccaaactaccataaaccaaaataaca

SEQ ID NO: 40174 - DNA, 50 bp, synthetic construct
  source 1..50: mol_type = other DNA
aaaaatcgcttaaacccgaaaaatccaaactaccgtaaaccgaaataacg

SEQ ID NO: 40175 - DNA, 50 bp, synthetic construct
  source 1..50: mol_type = other DNA
actataaactatacaatttttattttaaaaaacaaactttccctatatca

SEQ ID NO: 40176 - DNA, 50 bp, synthetic construct
  source 1..50: mol_type = other DNA
actataaactatacgatttttattttaaaaaacgaactttccctatatcg

SEQ ID NO: 40177 - DNA, 50 bp, synthetic construct
  source 1..50: mol_type = other DNA
actctttactccacttcattatctacaactaacatactataaactataca

SEQ ID NO: 40178 - DNA, 50 bp, synthetic construct
  source 1..50: mol_type = other DNA
actctttactccgcttcgttatctacgactaacgtactataaactatacg

SEQ ID NO: 40179 - DNA, 50 bp, synthetic construct
  source 1..50: mol_type = other DNA
aaaacccatctttcaaaataaaaaccacacaattcacaacacaccaacca

SEQ ID NO: 40180 - DNA, 50 bp, synthetic construct
  source 1..50: mol_type = other DNA
aaaacccgtctttcaaaataaaaaccgcacaattcacaacacgccaaccg

SEQ ID NO: 40181 - DNA, 50 bp, synthetic construct
  source 1..50: mol_type = other DNA
acataaaccacaccaaaaaaaacacacaaaaccacaaactaataaaaaca

SEQ ID NO: 40182 - DNA, 50 bp, synthetic construct
  source 1..50: mol_type = other DNA
acgtaaaccgcgccgaaaaaaacacgcaaaaccgcaaactaataaaaacg

SEQ ID NO: 40183 - DNA, 50 bp, synthetic construct
  source 1..50: mol_type = other DNA
ctcataatactaaaaaacataaaccacaccaaaaaaaacacacaaaacca

SEQ ID NO: 40184 - DNA, 50 bp, synthetic construct
  source 1..50: mol_type = other DNA
ctcataatactaaaaaacgtaaaccgcgccgaaaaaaacacgcaaaaccg

SEQ ID NO: 40185 - DNA, 50 bp, synthetic construct
  source 1..50: mol_type = other DNA
atcataacaacccaacacaaaactctcataatactaaaaaacataaacca

SEQ ID NO: 40186 - DNA, 50 bp, synthetic construct
  source 1..50: mol_type = other DNA
atcataacgacccgacgcgaaactctcataatactaaaaaacgtaaaccg

SEQ ID NO: 40187 - DNA, 50 bp, synthetic construct
  source 1..50: mol_type = other DNA
ataaacaatcataacaacccaacacaaaactctcataatactaaaaaaca

SEQ ID NO: 40188 - DNA, 50 bp, synthetic construct
  source 1..50: mol_type = other DNA
ataaacaatcataacgacccgacgcgaaactctcataatactaaaaaacg

SEQ ID NO: 40189 - DNA, 50 bp, synthetic construct
  source 1..50: mol_type = other DNA
cacactattaacaccaaccaataaaaactccaaaaaactacataaaaaca

SEQ ID NO: 40190 - DNA, 50 bp, synthetic construct
  source 1..50: mol_type = other DNA
cgcgctattaacgccgaccaataaaaactccgaaaaactacgtaaaaacg

SEQ ID NO: 40191 - DNA, 50 bp, synthetic construct
  source 1..50: mol_type = other DNA
caatcccttcaaatttaaccaaaaccaaaaaatactaactaatcacaaca

SEQ ID NO: 40192 - DNA, 50 bp, synthetic construct
  source 1..50: mol_type = other DNA
caatcccttcgaatttaaccgaaaccgaaaaatactaactaatcacgacg

SEQ ID NO: 40193 - DNA, 50 bp, synthetic construct
  source 1..50: mol_type = other DNA
aactaatatttcccaacctcaaccaaattcaaaaaaattaaccaaaacca

SEQ ID NO: 40194 - DNA, 50 bp, synthetic construct
  source 1..50: mol_type = other DNA
aactaatatttcccgacctcgaccaaattcgaaaaaattaaccgaaaccg

SEQ ID NO: 40195 - DNA, 50 bp, synthetic construct
  source 1..50: mol_type = other DNA
aaataaactttaaaaaaaaccccaactaaacccctacactaaaccccaca

SEQ ID NO: 40196 - DNA, 50 bp, synthetic construct
  source 1..50: mol_type = other DNA
aaataaactttaaaaaaaaccccgactaaacccctacactaaaccccgcg

SEQ ID NO: 40197 - DNA, 50 bp, synthetic construct
  source 1..50: mol_type = other DNA
ccataaaacacacttactatccaaataatactccaaatacataacaatca

SEQ ID NO: 40198 - DNA, 50 bp, synthetic construct
  source 1..50: mol_type = other DNA
ccgtaaaacgcgcttactatccaaataatactccaaatacataacgatcg

SEQ ID NO: 40199 - DNA, 50 bp, synthetic construct
  source 1..50: mol_type = other DNA
aaataaaaacaaaacctaatatataaacaaaatcaaaaccacaaacccca

SEQ ID NO: 40200 - DNA, 50 bp, synthetic construct
  source 1..50: mol_type = other DNA
aaataaaaacgaaacctaatatataaacgaaatcgaaaccgcaaaccccg

SEQ ID NO: 40201 - DNA, 50 bp, synthetic construct
  source 1..50: mol_type = other DNA
acaaaacctaaataaaaacaaaacctaatatataaacaaaatcaaaacca

SEQ ID NO: 40202 - DNA, 50 bp, synthetic construct
  source 1..50: mol_type = other DNA
acgaaacctaaataaaaacgaaacctaatatataaacgaaatcgaaaccg

SEQ ID NO: 40203 - DNA, 50 bp, synthetic construct
  source 1..50: mol_type = other DNA
aactccaaaccttaaaaactccaaaatctaaacctccacctaactataca

SEQ ID NO: 40204 - DNA, 50 bp, synthetic construct
  source 1..50: mol_type = other DNA
aactccgaaccttaaaaactccgaaatctaaacctccgcctaactatacg

SEQ ID NO: 40205 - DNA, 50 bp, synthetic construct
  source 1..50: mol_type = other DNA
tatactcctccacctcttataaaaaacctaacatcaatcaaactcaccca

SEQ ID NO: 40206 - DNA, 50 bp, synthetic construct
  source 1..50: mol_type = other DNA
tatactcctccacctcttataaaaaacctaacatcaatcaaactcgcccg

SEQ ID NO: 40207 - DNA, 50 bp, synthetic construct
  source 1..50: mol_type = other DNA
taacaataacaaaaaatatcaaaaaacaccacccactacttaacaaacca

SEQ ID NO: 40208 - DNA, 50 bp, synthetic construct
  source 1..50: mol_type = other DNA
taacgataacgaaaaatatcaaaaaacaccacccgctacttaacaaaccg

SEQ ID NO: 40209 - DNA, 50 bp, synthetic construct
  source 1..50: mol_type = other DNA
aaacaactcatatcttcaatctcttacctcaacacctaaataacttacca

SEQ ID NO: 40210 - DNA, 50 bp, synthetic construct
  source 1..50: mol_type = other DNA
aaacaactcgtatcttcgatctcttacctcgacacctaaataacttaccg

SEQ ID NO: 40211 - DNA, 50 bp, synthetic construct
  source 1..50: mol_type = other DNA
caacaactaaaaaattctccaaaacaaaacccaaaacataaactcaacca

SEQ ID NO: 40212 - DNA, 50 bp, synthetic construct
  source 1..50: mol_type = other DNA
caacaactaaaaaattctccaaaacgaaacccgaaacgtaaactcgaccg

SEQ ID NO: 40213 - DNA, 50 bp, synthetic construct
  source 1..50: mol_type = other DNA
caacaaaacaaaaactataaacacacaaaactaaacctaaaaaacaaaca

SEQ ID NO: 40214 - DNA, 50 bp, synthetic construct
  source 1..50: mol_type = other DNA
cgacgaaacgaaaactataaacgcgcaaaactaaacctaaaaaacaaacg

SEQ ID NO: 40215 - DNA, 50 bp, synthetic construct
  source 1..50: mol_type = other DNA
aactataaacacacaaaactaaacctaaaaaacaaacaaaacaaaaccca

SEQ ID NO: 40216 - DNA, 50 bp, synthetic construct
  source 1..50: mol_type = other DNA
aactataaacgcgcaaaactaaacctaaaaaacaaacgaaacgaaacccg

SEQ ID NO: 40217 - DNA, 50 bp, synthetic construct
  source 1..50: mol_type = other DNA
tacaataacataatctcaacttactacaaactccacctcctaacttcaca

SEQ ID NO: 40218 - DNA, 50 bp, synthetic construct
  source 1..50: mol_type = other DNA
tacaataacgtaatctcgacttactacaaactccgcctcctaacttcacg

SEQ ID NO: 40219 - DNA, 50 bp, synthetic construct
  source 1..50: mol_type = other DNA
ttctacctcactttactattttaacacacaaacacataccaccataccca

SEQ ID NO: 40220 - DNA, 50 bp, synthetic construct
  source 1..50: mol_type = other DNA
ttctacctcgctttactattttaacacacaaacacataccaccatacccg

SEQ ID NO: 40221 - DNA, 50 bp, synthetic construct
  source 1..50: mol_type = other DNA
ataaacaaacactcatctaaccaactcccaaccaaaccaaaataaaacca

SEQ ID NO: 40222 - DNA, 50 bp, synthetic construct
  source 1..50: mol_type = other DNA
ataaacaaacactcatctaaccgactcccgaccaaaccaaaataaaaccg

SEQ ID NO: 40223 - DNA, 50 bp, synthetic construct
  source 1..50: mol_type = other DNA
caaaacctctttaatctccacattctcaacctttaaaacccaaaacaaca

SEQ ID NO: 40224 - DNA, 50 bp, synthetic construct
  source 1..50: mol_type = other DNA
cgaaacctctttaatctccacattctcaacctttaaaacccgaaacaacg

SEQ ID NO: 40225 - DNA, 50 bp, synthetic construct
  source 1..50: mol_type = other DNA
aaataaaacattattataaaacataactatattcacatactttataaaca

SEQ ID NO: 40226 - DNA, 50 bp, synthetic construct
  source 1..50: mol_type = other DNA
aaataaaacgttattataaaacgtaactatattcacatactttataaacg

SEQ ID NO: 40227 - DNA, 50 bp, synthetic construct
  source 1..50: mol_type = other DNA
cacatactttataaacaccaaacacataactcacacctataatctcaaca

SEQ ID NO: 40228 - DNA, 50 bp, synthetic construct
  source 1..50: mol_type = other DNA
cacatactttataaacgccaaacacgtaactcacacctataatctcaacg

SEQ ID NO: 40229 - DNA, 50 bp, synthetic construct
  source 1..50: mol_type = other DNA
cataactttctacacctatataacaacaaaaaaacaaactacaaaccaca

SEQ ID NO: 40230 - DNA, 50 bp, synthetic construct
  source 1..50: mol_type = other DNA
cataactttctacacctatataacgacaaaaaaacgaactacgaaccgcg

SEQ ID NO: 40231 - DNA, 50 bp, synthetic construct
  source 1..50: mol_type = other DNA
cattaaacataactttctacacctatataacaacaaaaaaacaaactaca

SEQ ID NO: 40232 - DNA, 50 bp, synthetic construct
  source 1..50: mol_type = other DNA
cgttaaacataactttctacacctatataacgacaaaaaaacgaactacg

SEQ ID NO: 40233 - DNA, 50 bp, synthetic construct
  source 1..50: mol_type = other DNA
aaaaatcatacccaacaacaccttctacttctccatcctaaaaaacccca

SEQ ID NO: 40234 - DNA, 50 bp, synthetic construct
  source 1..50: mol_type = other DNA
aaaaatcatacccaacgacaccttctacttctccatcctaaaaaaccccg

SEQ ID NO: 40235 - DNA, 50 bp, synthetic construct
  source 1..50: mol_type = other DNA
atctttccaccatataatacctacaacaacctaacaaaaaaactaaaaca

SEQ ID NO: 40236 - DNA, 50 bp, synthetic construct
  source 1..50: mol_type = other DNA
atctttccaccgtataatacctacaacaacctaacgaaaaaactaaaacg

SEQ ID NO: 40237 - DNA, 50 bp, synthetic construct
  source 1..50: mol_type = other DNA
atattaataataaaatacatcaaactcatcaacttaaaataaccaaaaca

SEQ ID NO: 40238 - DNA, 50 bp, synthetic construct
  source 1..50: mol_type = other DNA
atattaataataaaatacgtcaaactcatcaacttaaaataaccgaaacg

SEQ ID NO: 40239 - DNA, 50 bp, synthetic construct
  source 1..50: mol_type = other DNA
acccaaaaataaccctttattcataaacaaaaacttcctcaccataacca

SEQ ID NO: 40240 - DNA, 50 bp, synthetic construct
  source 1..50: mol_type = other DNA
acccgaaaataaccctttattcataaacgaaaacttcctcgccgtaaccg

SEQ ID NO: 40241 - DNA, 50 bp, synthetic construct
  source 1..50: mol_type = other DNA
tctaaaacccaaaaataaccctttattcataaacaaaaacttcctcacca

SEQ ID NO: 40242 - DNA, 50 bp, synthetic construct
  source 1..50: mol_type = other DNA
tctaaaacccgaaaataaccctttattcataaacgaaaacttcctcgccg

SEQ ID NO: 40243 - DNA, 50 bp, synthetic construct
  source 1..50: mol_type = other DNA
cccacactaaatcaaccctaatacaaaaaaaaccactataaataaacaca

SEQ ID NO: 40244 - DNA, 50 bp, synthetic construct
  source 1..50: mol_type = other DNA
cccacactaaatcaaccctaatacgaaaaaaaccgctataaataaacacg

SEQ ID NO: 40245 - DNA, 50 bp, synthetic construct
  source 1..50: mol_type = other DNA
caaccctaatacaaaaaaaaccactataaataaacacaaaacaacacaca

SEQ ID NO: 40246 - DNA, 50 bp, synthetic construct
  source 1..50: mol_type = other DNA
caaccctaatacgaaaaaaaccgctataaataaacacgaaacaacacgcg

SEQ ID NO: 40247 - DNA, 50 bp, synthetic construct
  source 1..50: mol_type = other DNA
aaaaaccactataaataaacacaaaacaacacacattaaaaaactaaaca

SEQ ID NO: 40248 - DNA, 50 bp, synthetic construct
  source 1..50: mol_type = other DNA
aaaaaccgctataaataaacacgaaacaacacgcgttaaaaaactaaacg

SEQ ID NO: 40249 - DNA, 50 bp, synthetic construct
  source 1..50: mol_type = other DNA
acaacacacattaaaaaactaaacaaaaaataaccatacatataaaaaca

SEQ ID NO: 40250 - DNA, 50 bp, synthetic construct
  source 1..50: mol_type = other DNA
acaacacgcgttaaaaaactaaacgaaaaataaccatacgtataaaaacg

SEQ ID NO: 40251 - DNA, 50 bp, synthetic construct
  source 1..50: mol_type = other DNA
aaaaactaaacaaaaaataaccatacatataaaaacactaaacaaaaaca

SEQ ID NO: 40252 - DNA, 50 bp, synthetic construct
  source 1..50: mol_type = other DNA
aaaaactaaacgaaaaataaccatacgtataaaaacgctaaacaaaaacg

SEQ ID NO: 40253 - DNA, 50 bp, synthetic construct
  source 1..50: mol_type = other DNA
caaaaaataaccatacatataaaaacactaaacaaaaacatacccataca

SEQ ID NO: 40254 - DNA, 50 bp, synthetic construct
  source 1..50: mol_type = other DNA
cgaaaaataaccatacgtataaaaacgctaaacaaaaacgtacccatacg

SEQ ID NO: 40255 - DNA, 50 bp, synthetic construct
  source 1..50: mol_type = other DNA
aacactaaacaaaaacatacccatacatataaaaaaactaaataaaaaca

SEQ ID NO: 40256 - DNA, 50 bp, synthetic construct
  source 1..50: mol_type = other DNA
aacgctaaacaaaaacgtacccatacgtataaaaaaactaaataaaaacg

SEQ ID NO: 40257 - DNA, 50 bp, synthetic construct
  source 1..50: mol_type = other DNA
tataactaaacaaaaatataaccacacacaaaaaaaccatacaaaaaaca

SEQ ID NO: 40258 - DNA, 50 bp, synthetic construct
  source 1..50: mol_type = other DNA
tataactaaacaaaaatataaccacgcgcgaaaaaaccgtacaaaaaacg

SEQ ID NO: 40259 - DNA, 50 bp, synthetic construct
  source 1..50: mol_type = other DNA
aacaaaaatataaccacacacaaaaaaaccatacaaaaaacataaccaca

SEQ ID NO: 40260 - DNA, 50 bp, synthetic construct
  source 1..50: mol_type = other DNA
aacaaaaatataaccacgcgcgaaaaaaccgtacaaaaaacgtaaccacg

SEQ ID NO: 40261 - DNA, 50 bp, synthetic construct
  source 1..50: mol_type = other DNA
aaaatataaccacacacaaaaaaaccatacaaaaaacataaccacaaaca

SEQ ID NO: 40262 - DNA, 50 bp, synthetic construct
  source 1..50: mol_type = other DNA
aaaatataaccacgcgcgaaaaaaccgtacaaaaaacgtaaccacgaacg

SEQ ID NO: 40263 - DNA, 50 bp, synthetic construct
  source 1..50: mol_type = other DNA
caaaaaaaccatacaaaaaacataaccacaaacaaaaaaactaaaaaaca

SEQ ID NO: 40264 - DNA, 50 bp, synthetic construct
  source 1..50: mol_type = other DNA
cgaaaaaaccgtacaaaaaacgtaaccacgaacgaaaaaactaaaaaacg

SEQ ID NO: 40265 - DNA, 50 bp, synthetic construct
  source 1..50: mol_type = other DNA
ccatacaaaaaacataaccacaaacaaaaaaactaaaaaacataatcaca

SEQ ID NO: 40266 - DNA, 50 bp, synthetic construct
  source 1..50: mol_type = other DNA
ccgtacaaaaaacgtaaccacgaacgaaaaaactaaaaaacgtaatcacg

SEQ ID NO: 40267 - DNA, 50 bp, synthetic construct
  source 1..50: mol_type = other DNA
atacaaaaaacataaccacaaacaaaaaaactaaaaaacataatcacaca

SEQ ID NO: 40268 - DNA, 50 bp, synthetic construct
  source 1..50: mol_type = other DNA
gtacaaaaaacgtaaccacgaacgaaaaaactaaaaaacgtaatcacgcg

SEQ ID NO: 40269 - DNA, 50 bp, synthetic construct
  source 1..50: mol_type = other DNA
acataatcacacatataaaaaactaaactaaaaaaataaccctatataca

SEQ ID NO: 40270 - DNA, 50 bp, synthetic construct
  source 1..50: mol_type = other DNA
acgtaatcacgcgtataaaaaactaaactaaaaaaataaccctatatacg

SEQ ID NO: 40271 - DNA, 50 bp, synthetic construct
  source 1..50: mol_type = other DNA
catataaaaaactaaactaaaaaaataaccctatatacaaaaactaaaca

SEQ ID NO: 40272 - DNA, 50 bp, synthetic construct
  source 1..50: mol_type = other DNA
cgtataaaaaactaaactaaaaaaataaccctatatacgaaaactaaacg

SEQ ID NO: 40273 - DNA, 50 bp, synthetic construct
  source 1..50: mol_type = other DNA
aaaaactaaactaaaaaaataaccctatatacaaaaactaaacaaaaaca

SEQ ID NO: 40274 - DNA, 50 bp, synthetic construct
  source 1..50: mol_type = other DNA
aaaaactaaactaaaaaaataaccctatatacgaaaactaaacgaaaacg

SEQ ID NO: 40275 - DNA, 50 bp, synthetic construct
  source 1..50: mol_type = other DNA
aaaaaaataaccctatatacaaaaactaaacaaaaacataatcatataca

SEQ ID NO: 40276 - DNA, 50 bp, synthetic construct
  source 1..50: mol_type = other DNA
aaaaaaataaccctatatacgaaaactaaacgaaaacgtaatcatatacg

SEQ ID NO: 40277 - DNA, 50 bp, synthetic construct
  source 1..50: mol_type = other DNA
atcaaaaatataaccacatataaaaaaactaaacaaaaaatataaccaca

SEQ ID NO: 40278 - DNA, 50 bp, synthetic construct
  source 1..50: mol_type = other DNA
atcgaaaatataaccacatataaaaaaactaaacaaaaaatataaccacg

SEQ ID NO: 40279 - DNA, 50 bp, synthetic construct
  source 1..50: mol_type = other DNA
aaaccctccatacaatatctctaaaacaaccccaaaccaaaactataaca

SEQ ID NO: 40280 - DNA, 50 bp, synthetic construct
  source 1..50: mol_type = other DNA
aaaccctccgtacgatatctctaaaacaaccccaaaccaaaactataacg

SEQ ID NO: 40281 - DNA, 50 bp, synthetic construct
  source 1..50: mol_type = other DNA
caaaaaaaccaaatatccaaaaaaaatcccccccaaacctattaatacca

SEQ ID NO: 40282 - DNA, 50 bp, synthetic construct
  source 1..50: mol_type = other DNA
cgaaaaaaccaaatatccgaaaaaaatcccccccgaacctattaataccg

SEQ ID NO: 40283 - DNA, 50 bp, synthetic construct
  source 1..50: mol_type = other DNA
cttaacaaaacaaataacaacaccaacaaacccaaaaaaaacctttccca

SEQ ID NO: 40284 - DNA, 50 bp, synthetic construct
  source 1..50: mol_type = other DNA
cttaacaaaacaaataacgacaccaacaaacccgaaaaaaacctttcccg

SEQ ID NO: 40285 - DNA, 50 bp, synthetic construct
  source 1..50: mol_type = other DNA
ttatctaaaaaaaatcaaacataaaaccaattctaccacctacctcacca

SEQ ID NO: 40286 - DNA, 50 bp, synthetic construct
  source 1..50: mol_type = other DNA
ttatctaaaaaaaatcaaacgtaaaaccaattctaccacctacctcgccg

SEQ ID NO: 40287 - DNA, 50 bp, synthetic construct
  source 1..50: mol_type = other DNA
ccaaaaacacataacacctaaaaaacaataaccaaaaaataattcatcca

SEQ ID NO: 40288 - DNA, 50 bp, synthetic construct
  source 1..50: mol_type = other DNA
ccgaaaacacataacgcctaaaaaacaataaccgaaaaataattcatccg

SEQ ID NO: 40289 - DNA, 50 bp, synthetic construct
  source 1..50: mol_type = other DNA
acatacctaaaaatcaaatctattacctccactcaaaaaaaaccaacaca

SEQ ID NO: 40290 - DNA, 50 bp, synthetic construct
  source 1..50: mol_type = other DNA
acatacctaaaaatcgaatctattacctccgctcaaaaaaaaccaacgcg

SEQ ID NO: 40291 - DNA, 50 bp, synthetic construct
  source 1..50: mol_type = other DNA
acaattaaacattaaatattaaatacataactatacttaatctttcaaca

SEQ ID NO: 40292 - DNA, 50 bp, synthetic construct
  source 1..50: mol_type = other DNA
acaattaaacgttaaatattaaatacataactatacttaatctttcaacg

SEQ ID NO: 40293 - DNA, 50 bp, synthetic construct
  source 1..50: mol_type = other DNA
ccaaattaccaaacctcaaaaaaaaattactaaatccaaattaaaaacca

SEQ ID NO: 40294 - DNA, 50 bp, synthetic construct
  source 1..50: mol_type = other DNA
ccgaattaccaaacctcaaaaaaaaattactaaatccaaattaaaaaccg

SEQ ID NO: 40295 - DNA, 50 bp, synthetic construct
  source 1..50: mol_type = other DNA
cctaacaatattcctcactaactaaattaccttaaacataccacctccca

SEQ ID NO: 40296 - DNA, 50 bp, synthetic construct
  source 1..50: mol_type = other DNA
cctaacaatattcctcactaactaaattaccttaaacataccacctcccg

SEQ ID NO: 40297 - DNA, 50 bp, synthetic construct
  source 1..50: mol_type = other DNA
ataataattactatatatactttcatcaaaaataatatctactatatcca

SEQ ID NO: 40298 - DNA, 50 bp, synthetic construct
  source 1..50: mol_type = other DNA
ataataattactatatatactttcatcgaaaataatatctactatatccg

SEQ ID NO: 40299 - DNA, 50 bp, synthetic construct
  source 1..50: mol_type = other DNA
aacaactcaaatccataactaatatatacctactcaaccttaccatctca

SEQ ID NO: 40300 - DNA, 50 bp, synthetic construct
  source 1..50: mol_type = other DNA
aacgactcaaatccataactaatatatacctactcaaccttaccatctcg

SEQ ID NO: 40301 - DNA, 50 bp, synthetic construct
  source 1..50: mol_type = other DNA
aaactatttataaacaaataaaaaaccttaactaaacaaaataactcaca

SEQ ID NO: 40302 - DNA, 50 bp, synthetic construct
  source 1..50: mol_type = other DNA
aaactatttataaacaaataaaaaaccttaactaaacgaaataactcacg

SEQ ID NO: 40303 - DNA, 50 bp, synthetic construct
  source 1..50: mol_type = other DNA
tttaattatgaagagattgtttataaataagtaaaagattttggttgggt

SEQ ID NO: 40304 - DNA, 50 bp, synthetic construct
  source 1..50: mol_type = other DNA
tttaattatgaagagattgtttataaataagtaaaagattttggttgggc

SEQ ID NO: 40305 - DNA, 50 bp, synthetic construct
  source 1..50: mol_type = other DNA
tctcatccactaatcaaaaaatctaacacaaacaaaatcaaaaaaaaaca

SEQ ID NO: 40306 - DNA, 50 bp, synthetic construct
  source 1..50: mol_type = other DNA
tctcatccactaatcaaaaaatctaacacaaacaaaatcaaaaaaaaacg

SEQ ID NO: 40307 - DNA, 50 bp, synthetic construct
  source 1..50: mol_type = other DNA
atttgtttaaggggaggaattaaagtgtttattgttgttatttttatttt

SEQ ID NO: 40308 - DNA, 50 bp, synthetic construct
  source 1..50: mol_type = other DNA
attcgtttaaggggaggaattaaagcgtttattgttgttatttttatttc

SEQ ID NO: 40309 - DNA, 50 bp, synthetic construct
  source 1..50: mol_type = other DNA
ttttagggtaaaaataagagtgaaatagttttgagaattgtgaaattgtt

SEQ ID NO: 40310 - DNA, 50 bp, synthetic construct
  source 1..50: mol_type = other DNA
ttttagggtaaaaataagagtgaaatagttttgagaattgtgaaattgtc

SEQ ID NO: 40311 - DNA, 50 bp, synthetic construct
  source 1..50: mol_type = other DNA
caataccttatttttacaatattaaaaaacaataacactttacttttaca

SEQ ID NO: 40312 - DNA, 50 bp, synthetic construct
  source 1..50: mol_type = other DNA
cgataccttatttttacaatattaaaaaacaataacactttacttttacg

SEQ ID NO: 40313 - DNA, 50 bp, synthetic construct
  source 1..50: mol_type = other DNA
cataatcaaaaaatacctaaacatactacttttcaaaaaaataaataaca

SEQ ID NO: 40314 - DNA, 50 bp, synthetic construct
  source 1..50: mol_type = other DNA
cataatcaaaaaatacctaaacatactacttttcaaaaaaataaataacg

SEQ ID NO: 40315 - DNA, 50 bp, synthetic construct
  source 1..50: mol_type = other DNA
aaatccccaaaccccaaaccacaaactaatctacaacctattaaaaacca

SEQ ID NO: 40316 - DNA, 50 bp, synthetic construct
  source 1..50: mol_type = other DNA
aaatccccaaaccccaaaccacaaactaatctacgacctattaaaaaccg

SEQ ID NO: 40317 - DNA, 50 bp, synthetic construct
  source 1..50: mol_type = other DNA
actataaaaaaactaccttaatttaaaaaacaaaatcactaataaaaaca

SEQ ID NO: 40318 - DNA, 50 bp, synthetic construct
  source 1..50: mol_type = other DNA
actataaaaaaactaccttaatttaaaaaacaaaatcactaataaaaacg

SEQ ID NO: 40319 - DNA, 50 bp, synthetic construct
  source 1..50: mol_type = other DNA
catccctaatccaaaaaaaaaacctcaaacaatcaacctcaacaataaca

SEQ ID NO: 40320 - DNA, 50 bp, synthetic construct
  source 1..50: mol_type = other DNA
catccctaatccaaaaaaaaaacctcaaacaatcaacctcaacaataacg

SEQ ID NO: 40321 - DNA, 50 bp, synthetic construct
  source 1..50: mol_type = other DNA
tcattcattttaaaaatcttttataaatctctaaacaaattaaacttcca

SEQ ID NO: 40322 - DNA, 50 bp, synthetic construct
  source 1..50: mol_type = other DNA
tcattcattttaaaaatcttttataaatctctaaacaaattaaacttccg

SEQ ID NO: 40323 - DNA, 50 bp, synthetic construct
  source 1..50: mol_type = other DNA
cacttaacatcataatacaatacaattatacctaaaaacacccaacccca

SEQ ID NO: 40324 - DNA, 50 bp, synthetic construct
  source 1..50: mol_type = other DNA
cacttaacatcataatacaatacaattatacctaaaaacacccaaccccg

SEQ ID NO: 40325 - DNA, 50 bp, synthetic construct
  source 1..50: mol_type = other DNA
tactataaaaactaaattataaaatataaaaccaaaacattctctactca

SEQ ID NO: 40326 - DNA, 50 bp, synthetic construct
  source 1..50: mol_type = other DNA
tactataaaaactaaattataaaatataaaaccaaaacattctctactcg

SEQ ID NO: 40327 - DNA, 50 bp, synthetic construct
  source 1..50: mol_type = other DNA
tacttttacaccaacctaatacaaaacactacaaaaaaaataacatacca

SEQ ID NO: 40328 - DNA, 50 bp, synthetic construct
  source 1..50: mol_type = other DNA
tacttttacaccaacctaatacaaaacgctacaaaaaaaataacataccg

SEQ ID NO: 40329 - DNA, 50 bp, synthetic construct
  source 1..50: mol_type = other DNA
tataacacttcccttcctatctcttcctcccactctatccatataaaaca

SEQ ID NO: 40330 - DNA, 50 bp, synthetic construct
  source 1..50: mol_type = other DNA
tataacacttcccttcctatctcttcctcccgctctatccatataaaacg

SEQ ID NO: 40331 - DNA, 50 bp, synthetic construct
  source 1..50: mol_type = other DNA
ataaattacccaatctctaatatttatttaaaacaatacaaaaataaaca

SEQ ID NO: 40332 - DNA, 50 bp, synthetic construct
  source 1..50: mol_type = other DNA
ataaattacccaatctctaatatttatttaaaacaatacaaaaataaacg

SEQ ID NO: 40333 - DNA, 50 bp, synthetic construct
  source 1..50: mol_type = other DNA
cccaaccaataactaacctcaaaattaactacaaccaaaacataacccca

SEQ ID NO: 40334 - DNA, 50 bp, synthetic construct
  source 1..50: mol_type = other DNA
cccaaccaataactaacctcaaaattaactacaaccaaaacataaccccg

SEQ ID NO: 40335 - DNA, 50 bp, synthetic construct
  source 1..50: mol_type = other DNA
aacaacatccctaaacctctacccactaaataccataaacatatctacca

SEQ ID NO: 40336 - DNA, 50 bp, synthetic construct
  source 1..50: mol_type = other DNA
aacaacatccctaaacctctacccactaaataccataaacatatctaccg

SEQ ID NO: 40337 - DNA, 50 bp, synthetic construct
  source 1..50: mol_type = other DNA
aaagttaaagttattgataatatttaaggtgaaaataattaggagtggat

SEQ ID NO: 40338 - DNA, 50 bp, synthetic construct
  source 1..50: mol_type = other DNA
aaagttaaagttattgataatatttaaggtgaaaataattaggagtggac

SEQ ID NO: 40339 - DNA, 50 bp, synthetic construct
  source 1..50: mol_type = other DNA
tatatataaaaatttctataaaaaaaccaaaactaataactcaataccca

SEQ ID NO: 40340 - DNA, 50 bp, synthetic construct
  source 1..50: mol_type = other DNA
tatatataaaaatttctataaaaaaaccaaaactaataactcaatacccg

SEQ ID NO: 40341 - DNA, 50 bp, synthetic construct
  source 1..50: mol_type = other DNA
taaaaaaaaccaaattactactcacaaaaaaatatataaatcaccccaca

SEQ ID NO: 40342 - DNA, 50 bp, synthetic construct
  source 1..50: mol_type = other DNA
taaaaaaaaccaaattactactcacaaaaaaatatataaatcaccccacg

SEQ ID NO: 40343 - DNA, 50 bp, synthetic construct
  source 1..50: mol_type = other DNA
aatatcaataaacaaaaatactaaaaaaactacactaaccaaaatatcca

SEQ ID NO: 40344 - DNA, 50 bp, synthetic construct
  source 1..50: mol_type = other DNA
aatatcgataaacaaaaatactaaaaaaactacactaaccaaaatatccg

SEQ ID NO: 40345 - DNA, 50 bp, synthetic construct
  source 1..50: mol_type = other DNA
aaatcataataaaataaaaacataaacactactttacctttcaaatatca

SEQ ID NO: 40346 - DNA, 50 bp, synthetic construct
  source 1..50: mol_type = other DNA
aaatcataataaaataaaaacataaacactactttacctttcaaatatcg

SEQ ID NO: 40347 - DNA, 50 bp, synthetic construct
  source 1..50: mol_type = other DNA
aaaaaataactattaaaataattctacaccctaaaattatacaattacca

SEQ ID NO: 40348 - DNA, 50 bp, synthetic construct
  source 1..50: mol_type = other DNA
aaaaaataactattaaaataattctacaccctaaaattatacaattaccg

SEQ ID NO: 40349 - DNA, 50 bp, synthetic construct
  source 1..50: mol_type = other DNA
actacaaactcaacccacctacaccctaaaaaaaccaaaattaatccaca

SEQ ID NO: 40350 - DNA, 50 bp, synthetic construct
  source 1..50: mol_type = other DNA
actacaaactcaacccacctacaccctaaaaaaaccaaaattaatccgcg

SEQ ID NO: 40351 - DNA, 50 bp, synthetic construct
  source 1..50: mol_type = other DNA
aaactcaacccacctacaccctaaaaaaaccaaaattaatccacaaaaca

SEQ ID NO: 40352 - DNA, 50 bp, synthetic construct
  source 1..50: mol_type = other DNA
aaactcaacccacctacaccctaaaaaaaccaaaattaatccgcgaaacg

SEQ ID NO: 40353 - DNA, 50 bp, synthetic construct
  source 1..50: mol_type = other DNA
ataccatcattaatcaaaacaaaactaacaaaacaaataaataaaataca

SEQ ID NO: 40354 - DNA, 50 bp, synthetic construct
  source 1..50: mol_type = other DNA
ataccatcgttaatcgaaacaaaactaacgaaacgaataaataaaatacg

SEQ ID NO: 40355 - DNA, 50 bp, synthetic construct
  source 1..50: mol_type = other DNA
acaaactaccaaaaaataccatcattaatcaaaacaaaactaacaaaaca

SEQ ID NO: 40356 - DNA, 50 bp, synthetic construct
  source 1..50: mol_type = other DNA
acaaactaccgaaaaataccatcgttaatcgaaacaaaactaacgaaacg

SEQ ID NO: 40357 - DNA, 50 bp, synthetic construct
  source 1..50: mol_type = other DNA
aactctaatttaaaacaccctcactttcccaattaatactctacaaaaca

SEQ ID NO: 40358 - DNA, 50 bp, synthetic construct
  source 1..50: mol_type = other DNA
gactctaatttaaaacgccctcgctttcccaattaatactctacgaaacg

SEQ ID NO: 40359 - DNA, 50 bp, synthetic construct
  source 1..50: mol_type = other DNA
aaattacacaaattaaaaaatacctccaactctaatttaaaacaccctca

SEQ ID NO: 40360 - DNA, 50 bp, synthetic construct
  source 1..50: mol_type = other DNA
aaattacgcgaattaaaaaatacctccgactctaatttaaaacgccctcg

SEQ ID NO: 40361 - DNA, 50 bp, synthetic construct
  source 1..50: mol_type = other DNA
tataaacatttcctaaattaactttccaaaaaaaaattccaaattacaca

SEQ ID NO: 40362 - DNA, 50 bp, synthetic construct
  source 1..50: mol_type = other DNA
tataaacatttcctaaattaactttccgaaaaaaaattccaaattacgcg

SEQ ID NO: 40363 - DNA, 50 bp, synthetic construct
  source 1..50: mol_type = other DNA
catataaacatttcctaaattaactttccaaaaaaaaattccaaattaca

SEQ ID NO: 40364 - DNA, 50 bp, synthetic construct
  source 1..50: mol_type = other DNA
cgtataaacatttcctaaattaactttccgaaaaaaaattccaaattacg

SEQ ID NO: 40365 - DNA, 50 bp, synthetic construct
  source 1..50: mol_type = other DNA
caaaatattaaaacaaaatacatataaacatttcctaaattaactttcca

SEQ ID NO: 40366 - DNA, 50 bp, synthetic construct
  source 1..50: mol_type = other DNA
cgaaatattaaaacgaaatacgtataaacatttcctaaattaactttccg

SEQ ID NO: 40367 - DNA, 50 bp, synthetic construct
  source 1..50: mol_type = other DNA
caaaaaaccaacttaaaaaatatttacacacacctcatctcaacacctca

SEQ ID NO: 40368 - DNA, 50 bp, synthetic construct
  source 1..50: mol_type = other DNA
cgaaaaaccaacttaaaaaatatttacacgcacctcgtctcaacacctcg

SEQ ID NO: 40369 - DNA, 50 bp, synthetic construct
  source 1..50: mol_type = other DNA
aaaccaacaaaaaacaataccaaaccataaatccttaatcaaataacaca

SEQ ID NO: 40370 - DNA, 50 bp, synthetic construct
  source 1..50: mol_type = other DNA
aaaccgacgaaaaacgataccaaaccgtaaatccttaatcaaataacgcg

SEQ ID NO: 40371 - DNA, 50 bp, synthetic construct
  source 1..50: mol_type = other DNA
aacaaacacaaaaactaactactaaaccaacaaaaaacaataccaaacca

SEQ ID NO: 40372 - DNA, 50 bp, synthetic construct
  source 1..50: mol_type = other DNA
aacaaacgcgaaaactaactactaaaccgacgaaaaacgataccaaaccg

SEQ ID NO: 40373 - DNA, 50 bp, synthetic construct
  source 1..50: mol_type = other DNA
acacaaaactaaacaaacacaaaaactaactactaaaccaacaaaaaaca

SEQ ID NO: 40374 - DNA, 50 bp, synthetic construct
  source 1..50: mol_type = other DNA
acgcgaaactaaacaaacgcgaaaactaactactaaaccgacgaaaaacg

SEQ ID NO: 40375 - DNA, 50 bp, synthetic construct
  source 1..50: mol_type = other DNA
aaaacacctacaaaacccaaataatactatcctaaaatcacacaacaaca

SEQ ID NO: 40376 - DNA, 50 bp, synthetic construct
  source 1..50: mol_type = other DNA
aaaacgcctacaaaacccaaataatactatcctaaaatcacgcgacgacg

SEQ ID NO: 40377 - DNA, 50 bp, synthetic construct
  source 1..50: mol_type = other DNA
ccaaaaaaaacacctacaaaacccaaataatactatcctaaaatcacaca

SEQ ID NO: 40378 - DNA, 50 bp, synthetic construct
  source 1..50: mol_type = other DNA
ccaaaaaaaacgcctacaaaacccaaataatactatcctaaaatcacgcg

SEQ ID NO: 40379 - DNA, 50 bp, synthetic construct
  source 1..50: mol_type = other DNA
aaaactacaatccaaaaaacctactttcaacaacttaataacacacctca

SEQ ID NO: 40380 - DNA, 50 bp, synthetic construct
  source 1..50: mol_type = other DNA
aaaactacaatccgaaaaacctactttcaacaacttaataacgcgcctcg

SEQ ID NO: 40381 - DNA, 50 bp, synthetic construct
  source 1..50: mol_type = other DNA
ttactaacccccaacttaaaattattcaaaaaacccatatataaaacaca

SEQ ID NO: 40382 - DNA, 50 bp, synthetic construct
  source 1..50: mol_type = other DNA
ttactaacccccgacttaaaattattcaaaaaacccgtatataaaacgcg

SEQ ID NO: 40383 - DNA, 50 bp, synthetic construct
  source 1..50: mol_type = other DNA
caacaaacaaaataaataccccaacaaaaaaacaaacaaaccaataacca

SEQ ID NO: 40384 - DNA, 50 bp, synthetic construct
  source 1..50: mol_type = other DNA
caacgaacgaaataaataccccaacaaaaaaacaaacgaaccaataaccg

SEQ ID NO: 40385 - DNA, 50 bp, synthetic construct
  source 1..50: mol_type = other DNA
aatgaaagtgtatagtagttattgaattaggttttatggaggaaaatgat

SEQ ID NO: 40386 - DNA, 50 bp, synthetic construct
  source 1..50: mol_type = other DNA
aatgaaagtgtatagtagttattgaattaggttttatggaggaaaacgac

SEQ ID NO: 40387 - DNA, 50 bp, synthetic construct
  source 1..50: mol_type = other DNA
acacaaaatccaacaccaacacctttatatctatatcaccaaaaaaacca

SEQ ID NO: 40388 - DNA, 50 bp, synthetic construct
  source 1..50: mol_type = other DNA
acgcgaaatccaacaccaacacctttatatctatatcaccgaaaaaaccg

SEQ ID NO: 40389 - DNA, 50 bp, synthetic construct
  source 1..50: mol_type = other DNA
aacaattacatataactacaaacacaacactctcatttctatcaccctca

SEQ ID NO: 40390 - DNA, 50 bp, synthetic construct
  source 1..50: mol_type = other DNA
aacgattacgtataactacaaacacaacactctcatttctatcgccctcg

SEQ ID NO: 40391 - DNA, 50 bp, synthetic construct
  source 1..50: mol_type = other DNA
aaatcaccataacctataccaaacctccaacaaaaaaactaaacaccaca

SEQ ID NO: 40392 - DNA, 50 bp, synthetic construct
  source 1..50: mol_type = other DNA
aaatcaccataacctataccaaacctccgacgaaaaaactaaacaccacg

SEQ ID NO: 40393 - DNA, 50 bp, synthetic construct
  source 1..50: mol_type = other DNA
aacaaaaaaactaaacaccacatacttcacatcaaaatcacaaaaaacca

SEQ ID NO: 40394 - DNA, 50 bp, synthetic construct
  source 1..50: mol_type = other DNA
gacgaaaaaactaaacaccacgtacttcacgtcaaaatcgcgaaaaaccg

SEQ ID NO: 40395 - DNA, 50 bp, synthetic construct
  source 1..50: mol_type = other DNA
tatattttcaatacaaacaaaattttactatattaacctaacaaatctca

SEQ ID NO: 40396 - DNA, 50 bp, synthetic construct
  source 1..50: mol_type = other DNA
tatattttcaatacaaacgaaattttactatattaacctaacaaatctcg

SEQ ID NO: 40397 - DNA, 50 bp, synthetic construct
  source 1..50: mol_type = other DNA
acacaaaataaaaacaaatacaaatacaaatacaaatacaaaaataaaca

SEQ ID NO: 40398 - DNA, 50 bp, synthetic construct
  source 1..50: mol_type = other DNA
acgcgaaataaaaacaaatacgaatacgaatacgaatacgaaaataaacg

SEQ ID NO: 40399 - DNA, 50 bp, synthetic construct
  source 1..50: mol_type = other DNA
atacaaatacaaatacaaaaataaacacaaatctctatacaaaaaaaaca

SEQ ID NO: 40400 - DNA, 50 bp, synthetic construct
  source 1..50: mol_type = other DNA
atacgaatacgaatacgaaaataaacgcgaatctctatacaaaaaaaacg

SEQ ID NO: 40401 - DNA, 50 bp, synthetic construct
  source 1..50: mol_type = other DNA
aaaaataaacacaaatctctatacaaaaaaaacaacaaaaaacactaaca

SEQ ID NO: 40402 - DNA, 50 bp, synthetic construct
  source 1..50: mol_type = other DNA
gaaaataaacgcgaatctctatacaaaaaaaacgacaaaaaacgctaacg

SEQ ID NO: 40403 - DNA, 50 bp, synthetic construct
  source 1..50: mol_type = other DNA
taaacacaaatctctatacaaaaaaaacaacaaaaaacactaacaataca

SEQ ID NO: 40404 - DNA, 50 bp, synthetic construct
  source 1..50: mol_type = other DNA
taaacgcgaatctctatacaaaaaaaacgacaaaaaacgctaacgatacg

SEQ ID NO: 40405 - DNA, 50 bp, synthetic construct
  source 1..50: mol_type = other DNA
atacaaaaaaaacaacaaaaaacactaacaatacaaccttaacaaataca

SEQ ID NO: 40406 - DNA, 50 bp, synthetic construct
  source 1..50: mol_type = other DNA
atacaaaaaaaacgacaaaaaacgctaacgatacgaccttaacaaatacg

SEQ ID NO: 40407 - DNA, 50 bp, synthetic construct
  source 1..50: mol_type = other DNA
aaaaaaacaacaaaaaacactaacaatacaaccttaacaaatacaaccca

SEQ ID NO: 40408 - DNA, 50 bp, synthetic construct
  source 1..50: mol_type = other DNA
aaaaaaacgacaaaaaacgctaacgatacgaccttaacaaatacgacccg

SEQ ID NO: 40409 - DNA, 50 bp, synthetic construct
  source 1..50: mol_type = other DNA
ccaaatactatcaccaaaacaccacaaaaataacaccaaccttaaaaaca

SEQ ID NO: 40410 - DNA, 50 bp, synthetic construct
  source 1..50: mol_type = other DNA
ccaaatactatcaccaaaacaccgcaaaaataacaccgaccttaaaaacg

SEQ ID NO: 40411 - DNA, 50 bp, synthetic construct
  source 1..50: mol_type = other DNA
aaaataactcacacctacaatcccaacacttcaaaaaaccaaaataaaca

SEQ ID NO: 40412 - DNA, 50 bp, synthetic construct
  source 1..50: mol_type = other DNA
aaaataactcacgcctacaatcccaacacttcgaaaaaccaaaataaacg

SEQ ID NO: 40413 - DNA, 50 bp, synthetic construct
  source 1..50: mol_type = other DNA
tcctacaccacaaatcaaaatccaaacaaaaaaatcaacaaaaattttca

SEQ ID NO: 40414 - DNA, 50 bp, synthetic construct
  source 1..50: mol_type = other DNA
tcctacaccacgaatcgaaatccgaacgaaaaaatcaacaaaaattttcg

SEQ ID NO: 40415 - DNA, 50 bp, synthetic construct
  source 1..50: mol_type = other DNA
aaactaaccacaaaaaacaactacaacaacaacaaaaacaatataaacca

SEQ ID NO: 40416 - DNA, 50 bp, synthetic construct
  source 1..50: mol_type = other DNA
gaactaaccgcaaaaaacgactacaacaacgacgaaaacgatataaaccg

SEQ ID NO: 40417 - DNA, 50 bp, synthetic construct
  source 1..50: mol_type = other DNA
aattaaacccaaactaaccacaaaaaacaactacaacaacaacaaaaaca

SEQ ID NO: 40418 - DNA, 50 bp, synthetic construct
  source 1..50: mol_type = other DNA
aattaaacccgaactaaccgcaaaaaacgactacaacaacgacgaaaacg

SEQ ID NO: 40419 - DNA, 50 bp, synthetic construct
  source 1..50: mol_type = other DNA
caacaactatctaaaactcaaacaccaccaaccaataaaaaaaaacaaca

SEQ ID NO: 40420 - DNA, 50 bp, synthetic construct
  source 1..50: mol_type = other DNA
cgacaactatctaaaactcaaacaccaccaaccaataaaaaaaaacaacg

SEQ ID NO: 40421 - DNA, 50 bp, synthetic construct
  source 1..50: mol_type = other DNA
atctaaaactcaaacaccaccaaccaataaaaaaaaacaacataaaacca

SEQ ID NO: 40422 - DNA, 50 bp, synthetic construct
  source 1..50: mol_type = other DNA
atctaaaactcaaacaccaccaaccaataaaaaaaaacaacgtaaaaccg

SEQ ID NO: 40423 - DNA, 50 bp, synthetic construct
  source 1..50: mol_type = other DNA
aaactcacaactcctaaaccaataaaaaaataacatataaaaaaacacca

SEQ ID NO: 40424 - DNA, 50 bp, synthetic construct
  source 1..50: mol_type = other DNA
aaactcgcgactcctaaaccaataaaaaaataacatataaaaaaacgccg

SEQ ID NO: 40425 - DNA, 50 bp, synthetic construct
  source 1..50: mol_type = other DNA
taataatattataaaattcaacaccaccaccaaaacaatcacaaaacaca

SEQ ID NO: 40426 - DNA, 50 bp, synthetic construct
  source 1..50: mol_type = other DNA
taataatattataaaattcaacgccgccgccaaaacgatcacgaaacgcg

SEQ ID NO: 40427 - DNA, 50 bp, synthetic construct
  source 1..50: mol_type = other DNA
tctaataatattataaaattcaacaccaccaccaaaacaatcacaaaaca

SEQ ID NO: 40428 - DNA, 50 bp, synthetic construct
  source 1..50: mol_type = other DNA
tctaataatattataaaattcaacgccgccgccaaaacgatcacgaaacg

SEQ ID NO: 40429 - DNA, 50 bp, synthetic construct
  source 1..50: mol_type = other DNA
tactttcaattattacctacataacaacaattatcctcacaaccttttca

SEQ ID NO: 40430 - DNA, 50 bp, synthetic construct
  source 1..50: mol_type = other DNA
tactttcgattattacctacgtaacaacaattatcctcacgaccttttcg

SEQ ID NO: 40431 - DNA, 50 bp, synthetic construct
  source 1..50: mol_type = other DNA
tttaccactctaaatccaactatctcctcttacaaacactaaaacccaca

SEQ ID NO: 40432 - DNA, 50 bp, synthetic construct
  source 1..50: mol_type = other DNA
tttaccgctctaaatccaactatctcctcttacaaacactaaaacccgcg

SEQ ID NO: 40433 - DNA, 50 bp, synthetic construct
  source 1..50: mol_type = other DNA
aaccaatacttaaaactacacaaaatataataaaccctaaaaaaccaaca

SEQ ID NO: 40434 - DNA, 50 bp, synthetic construct
  source 1..50: mol_type = other DNA
aaccgatacttaaaactacgcgaaatataataaaccctaaaaaaccgacg

SEQ ID NO: 40435 - DNA, 50 bp, synthetic construct
  source 1..50: mol_type = other DNA
aactactaataaacaacatcttatactcaaacacaaccacaaataaacca

SEQ ID NO: 40436 - DNA, 50 bp, synthetic construct
  source 1..50: mol_type = other DNA
aactactaataaacaacgtcttatactcaaacgcgaccgcgaataaaccg

SEQ ID NO: 40437 - DNA, 50 bp, synthetic construct
  source 1..50: mol_type = other DNA
cacaaaactcaaactactaataaacaacatcttatactcaaacacaacca

SEQ ID NO: 40438 - DNA, 50 bp, synthetic construct
  source 1..50: mol_type = other DNA
cgcgaaactcaaactactaataaacaacgtcttatactcaaacgcgaccg

SEQ ID NO: 40439 - DNA, 50 bp, synthetic construct
  source 1..50: mol_type = other DNA
acaacacaaaactcaaactactaataaacaacatcttatactcaaacaca

SEQ ID NO: 40440 - DNA, 50 bp, synthetic construct
  source 1..50: mol_type = other DNA
acaacgcgaaactcaaactactaataaacaacgtcttatactcaaacgcg

SEQ ID NO: 40441 - DNA, 50 bp, synthetic construct
  source 1..50: mol_type = other DNA
ctcaaaatactcaacaaacaacacaaaactcaaactactaataaacaaca

SEQ ID NO: 40442 - DNA, 50 bp, synthetic construct
  source 1..50: mol_type = other DNA
ctcgaaatactcgacgaacaacgcgaaactcaaactactaataaacaacg

SEQ ID NO: 40443 - DNA, 50 bp, synthetic construct
  source 1..50: mol_type = other DNA
acttaaactaataaaaaaaccaatcctcaaaatactcaacaaacaacaca

SEQ ID NO: 40444 - DNA, 50 bp, synthetic construct
  source 1..50: mol_type = other DNA
gcttaaactaataaaaaaaccgatcctcgaaatactcgacgaacaacgcg

SEQ ID NO: 40445 - DNA, 50 bp, synthetic construct
  source 1..50: mol_type = other DNA
tctcaccaaaacacttaaactaataaaaaaaccaatcctcaaaatactca

SEQ ID NO: 40446 - DNA, 50 bp, synthetic construct
  source 1..50: mol_type = other DNA
tctcgccgaaacgcttaaactaataaaaaaaccgatcctcgaaatactcg

SEQ ID NO: 40447 - DNA, 50 bp, synthetic construct
  source 1..50: mol_type = other DNA
aaaaactaatctcaccaaaacacttaaactaataaaaaaaccaatcctca

SEQ ID NO: 40448 - DNA, 50 bp, synthetic construct
  source 1..50: mol_type = other DNA
gaaaactaatctcgccgaaacgcttaaactaataaaaaaaccgatcctcg

SEQ ID NO: 40449 - DNA, 50 bp, synthetic construct
  source 1..50: mol_type = other DNA
aacaaacaaaaactaatctcaccaaaacacttaaactaataaaaaaacca

SEQ ID NO: 40450 - DNA, 50 bp, synthetic construct
  source 1..50: mol_type = other DNA
gacaaacgaaaactaatctcgccgaaacgcttaaactaataaaaaaaccg

SEQ ID NO: 40451 - DNA, 50 bp, synthetic construct
  source 1..50: mol_type = other DNA
atcctataaataccaaaaattcacataaaccacacaacccaactcaaaca

SEQ ID NO: 40452 - DNA, 50 bp, synthetic construct
  source 1..50: mol_type = other DNA
gtcctataaataccgaaaattcacgtaaaccacacgacccaactcaaacg

SEQ ID NO: 40453 - DNA, 50 bp, synthetic construct
  source 1..50: mol_type = other DNA
aaacatactaacaaacctcacatacatcctataaataccaaaaattcaca

SEQ ID NO: 40454 - DNA, 50 bp, synthetic construct
  source 1..50: mol_type = other DNA
aaacgtactaacgaacctcgcgtacgtcctataaataccgaaaattcacg

SEQ ID NO: 40455 - DNA, 50 bp, synthetic construct
  source 1..50: mol_type = other DNA
acctaaactaaaccatataacctacataaatttccaacacccacaaaaca

SEQ ID NO: 40456 - DNA, 50 bp, synthetic construct
  source 1..50: mol_type = other DNA
gcctaaactaaaccgtataacctacgtaaatttccgacacccacaaaacg

SEQ ID NO: 40457 - DNA, 50 bp, synthetic construct
  source 1..50: mol_type = other DNA
aaactaaaccatataacctacataaatttccaacacccacaaaacacaca

SEQ ID NO: 40458 - DNA, 50 bp, synthetic construct
  source 1..50: mol_type = other DNA
aaactaaaccgtataacctacgtaaatttccgacacccacaaaacgcacg

SEQ ID NO: 40459 - DNA, 50 bp, synthetic construct
  source 1..50: mol_type = other DNA
actctaccttaaacaaacaatcataaaacaacaactaccaaaccaaaaca

SEQ ID NO: 40460 - DNA, 50 bp, synthetic construct
  source 1..50: mol_type = other DNA
actctaccttaaacgaacgatcgtaaaacaacaactaccgaaccaaaacg

SEQ ID NO: 40461 - DNA, 50 bp, synthetic construct
  source 1..50: mol_type = other DNA
aacaaccctaaaaaaaacataaaaacaacaacactactactactacttca

SEQ ID NO: 40462 - DNA, 50 bp, synthetic construct
  source 1..50: mol_type = other DNA
aacgaccctaaaaaaaacgtaaaaacgacgacgctactactactacttcg

SEQ ID NO: 40463 - DNA, 50 bp, synthetic construct
  source 1..50: mol_type = other DNA
atacctacataacaacaacaaaaacaatcaacaaaataacaacaacaaca

SEQ ID NO: 40464 - DNA, 50 bp, synthetic construct
  source 1..50: mol_type = other DNA
atacctacgtaacgacgacgaaaacaatcgacgaaataacaacaacaacg

SEQ ID NO: 40465 - DNA, 50 bp, synthetic construct
  source 1..50: mol_type = other DNA
atactaataacctccatataacaaaaaataaccaaacaaatcaacaaaca

SEQ ID NO: 40466 - DNA, 50 bp, synthetic construct
  source 1..50: mol_type = other DNA
atactaataacctccgtataacgaaaaataaccgaacgaatcgacgaacg

SEQ ID NO: 40467 - DNA, 50 bp, synthetic construct
  source 1..50: mol_type = other DNA
acttatactaataacctccatataacaaaaaataaccaaacaaatcaaca

SEQ ID NO: 40468 - DNA, 50 bp, synthetic construct
  source 1..50: mol_type = other DNA
acttatactaataacctccgtataacgaaaaataaccgaacgaatcgacg

SEQ ID NO: 40469 - DNA, 50 bp, synthetic construct
  source 1..50: mol_type = other DNA
actacttatactaataacctccatataacaaaaaataaccaaacaaatca

SEQ ID NO: 40470 - DNA, 50 bp, synthetic construct
  source 1..50: mol_type = other DNA
gctacttatactaataacctccgtataacgaaaaataaccgaacgaatcg

SEQ ID NO: 40471 - DNA, 50 bp, synthetic construct
  source 1..50: mol_type = other DNA
caaacactacttatactaataacctccatataacaaaaaataaccaaaca

SEQ ID NO: 40472 - DNA, 50 bp, synthetic construct
  source 1..50: mol_type = other DNA
cgaacgctacttatactaataacctccgtataacgaaaaataaccgaacg

SEQ ID NO: 40473 - DNA, 50 bp, synthetic construct
  source 1..50: mol_type = other DNA
aacaacaaaaaacaacaaacactacttatactaataacctccatataaca

SEQ ID NO: 40474 - DNA, 50 bp, synthetic construct
  source 1..50: mol_type = other DNA
aacgacgaaaaacaacgaacgctacttatactaataacctccgtataacg

SEQ ID NO: 40475 - DNA, 50 bp, synthetic construct
  source 1..50: mol_type = other DNA
aacatcaaatcctcctcacacacaactaaataaccataaaaacacccaca

SEQ ID NO: 40476 - DNA, 50 bp, synthetic construct
  source 1..50: mol_type = other DNA
aacatcaaatcctcctcacacacaactaaataaccataaaaacgcccacg

SEQ ID NO: 40477 - DNA, 50 bp, synthetic construct
  source 1..50: mol_type = other DNA
taaacacccctataactacccaactatatataaaaaaaacctaataccca

SEQ ID NO: 40478 - DNA, 50 bp, synthetic construct
  source 1..50: mol_type = other DNA
taaacgcccctataactacccaactatatataaaaaaaacctaatacccg

SEQ ID NO: 40479 - DNA, 50 bp, synthetic construct
  source 1..50: mol_type = other DNA
caataataccatatttctcaaaaacccttcacaactccacctcaaataca

SEQ ID NO: 40480 - DNA, 50 bp, synthetic construct
  source 1..50: mol_type = other DNA
cgataataccatatttctcgaaaacccttcgcaactccacctcaaatacg

SEQ ID NO: 40481 - DNA, 50 bp, synthetic construct
  source 1..50: mol_type = other DNA
atcaataatccaaatactcccaaaacaatcaaactctcaaaccaaaacca

SEQ ID NO: 40482 - DNA, 50 bp, synthetic construct
  source 1..50: mol_type = other DNA
atcaataatccgaatactcccaaaacgatcaaactctcgaaccaaaaccg

SEQ ID NO: 40483 - DNA, 50 bp, synthetic construct
  source 1..50: mol_type = other DNA
ctctaaataaataacctaaaacctaacacatcactaacaactctaaccca

SEQ ID NO: 40484 - DNA, 50 bp, synthetic construct
  source 1..50: mol_type = other DNA
ctctaaataaataacctaaaacctaacacgtcactaacgactctaacccg

SEQ ID NO: 40485 - DNA, 50 bp, synthetic construct
  source 1..50: mol_type = other DNA
acccaaaaaaaacaaataaataaaacctcaaaaatactataacaaaacca

SEQ ID NO: 40486 - DNA, 50 bp, synthetic construct
  source 1..50: mol_type = other DNA
acccaaaaaaaacgaataaataaaacctcaaaaatactataacaaaaccg

SEQ ID NO: 40487 - DNA, 50 bp, synthetic construct
  source 1..50: mol_type = other DNA
aacaaaaaaactaaccaaaaaacaaaacatatatacatatctatataaca

SEQ ID NO: 40488 - DNA, 50 bp, synthetic construct
  source 1..50: mol_type = other DNA
aacgaaaaaactaaccaaaaaacaaaacgtatatacgtatctatataacg

SEQ ID NO: 40489 - DNA, 50 bp, synthetic construct
  source 1..50: mol_type = other DNA
aaaaaataccaaacaataaacccaaatcataaatacatacaccatacaca

SEQ ID NO: 40490 - DNA, 50 bp, synthetic construct
  source 1..50: mol_type = other DNA
aaaaaataccaaacaataaacccaaatcataaatacgtacaccgtacgcg

SEQ ID NO: 40491 - DNA, 50 bp, synthetic construct
  source 1..50: mol_type = other DNA
tttggggattttatatattaggtaatagttatatttttgggattattaat

SEQ ID NO: 40492 - DNA, 50 bp, synthetic construct
  source 1..50: mol_type = other DNA
tttggggattttatatattaggtaatagttatatttttgggattattaac

SEQ ID NO: 40493 - DNA, 50 bp, synthetic construct
  source 1..50: mol_type = other DNA
ttcattaaataaacaatcaaaaaaccaaaccaaataactaaatttccaca

SEQ ID NO: 40494 - DNA, 50 bp, synthetic construct
  source 1..50: mol_type = other DNA
ttcattaaataaacgatcgaaaaaccgaaccaaataactaaatttccgcg

SEQ ID NO: 40495 - DNA, 50 bp, synthetic construct
  source 1..50: mol_type = other DNA
tttagttattggggaggttaaagtagaagaattgtttgaatttaggaggt

SEQ ID NO: 40496 - DNA, 50 bp, synthetic construct
  source 1..50: mol_type = other DNA
tttagttattggggaggttaaagtagaagaattgtttgaatttaggaggc

SEQ ID NO: 40497 - DNA, 50 bp, synthetic construct
  source 1..50: mol_type = other DNA
acataatcaaatcatactattaaaaaaattaatctcaaatattactacca

SEQ ID NO: 40498 - DNA, 50 bp, synthetic construct
  source 1..50: mol_type = other DNA
acgtaatcaaatcatactattaaaaaaattaatctcaaatattactaccg

SEQ ID NO: 40499 - DNA, 50 bp, synthetic construct
  source 1..50: mol_type = other DNA
tagtagttaaatttaattttagaaggtatataagaatattgaaggtggat

SEQ ID NO: 40500 - DNA, 50 bp, synthetic construct
  source 1..50: mol_type = other DNA
tagtagttaaatttaattttagaaggtatataagaatattgaaggtggac

SEQ ID NO: 40501 - DNA, 50 bp, synthetic construct
  source 1..50: mol_type = other DNA
actaatcttaatttaaccactaaaatatcctcacatttccccattcccca

SEQ ID NO: 40502 - DNA, 50 bp, synthetic construct
  source 1..50: mol_type = other DNA
actaatcttaatttaaccactaaaatatcctcacatttccccattccccg

SEQ ID NO: 40503 - DNA, 50 bp, synthetic construct
  source 1..50: mol_type = other DNA
actaaattatctcttaactaaattctttctctaaaataaaacaaaaacca

SEQ ID NO: 40504 - DNA, 50 bp, synthetic construct
  source 1..50: mol_type = other DNA
actaaattatctcttaactaaattctttctctaaaataaaacaaaaaccg

SEQ ID NO: 40505 - DNA, 50 bp, synthetic construct
  source 1..50: mol_type = other DNA
tcttctaccatatcattaattaacttaaaataaatttcttaaccttttca

SEQ ID NO: 40506 - DNA, 50 bp, synthetic construct
  source 1..50: mol_type = other DNA
tcttctaccgtatcattaattaacttaaaataaatttcttaaccttttcg

SEQ ID NO: 40507 - DNA, 50 bp, synthetic construct
  source 1..50: mol_type = other DNA
ggttggtgattttgaaaattgtagtttgagtagatagatgtgggagtagt

SEQ ID NO: 40508 - DNA, 50 bp, synthetic construct
  source 1..50: mol_type = other DNA
ggttggtgattttgaaaattgtagtttgagtagatagacgtgggagtagc

SEQ ID NO: 40509 - DNA, 50 bp, synthetic construct
  source 1..50: mol_type = other DNA
gattataaaagggttggtgattttgaaaattgtagtttgagtagatagat

SEQ ID NO: 40510 - DNA, 50 bp, synthetic construct
  source 1..50: mol_type = other DNA
gattataaaagggttggtgattttgaaaattgtagtttgagtagatagac

SEQ ID NO: 40511 - DNA, 50 bp, synthetic construct
  source 1..50: mol_type = other DNA
aaacaatcctcccactcaacctcctaaatatctaaaactacaaatataca

SEQ ID NO: 40512 - DNA, 50 bp, synthetic construct
  source 1..50: mol_type = other DNA
aaacaatcctcccactcaacctcctaaatatctaaaactacaaatatacg

SEQ ID NO: 40513 - DNA, 50 bp, synthetic construct
  source 1..50: mol_type = other DNA
ataaaaacaattttacacaaatattacaaaattatttcataaacatttca

SEQ ID NO: 40514 - DNA, 50 bp, synthetic construct
  source 1..50: mol_type = other DNA
ataaaaacaattttacacaaatattacaaaattatttcgtaaacgtttcg

SEQ ID NO: 40515 - DNA, 50 bp, synthetic construct
  source 1..50: mol_type = other DNA
ttcttataaaaacaattttacacaaatattacaaaattatttcataaaca

SEQ ID NO: 40516 - DNA, 50 bp, synthetic construct
  source 1..50: mol_type = other DNA
ttcttataaaaacaattttacacaaatattacaaaattatttcgtaaacg

SEQ ID NO: 40517 - DNA, 50 bp, synthetic construct
  source 1..50: mol_type = other DNA
tgattttagggagaaatttttgaaataagatgatattatgaaatgtttat

SEQ ID NO: 40518 - DNA, 50 bp, synthetic construct
  source 1..50: mol_type = other DNA
cgattttagggagaaatttttgaaataagatgatattacgaaacgtttac

SEQ ID NO: 40519 - DNA, 50 bp, synthetic construct
  source 1..50: mol_type = other DNA
taaaaaatctctaaaatttaataacatttcctacacctataataaaaaca

SEQ ID NO: 40520 - DNA, 50 bp, synthetic construct
  source 1..50: mol_type = other DNA
taaaaaatctctaaaatttaataacatttcctacacctataataaaaacg

SEQ ID NO: 40521 - DNA, 50 bp, synthetic construct
  source 1..50: mol_type = other DNA
ctacacctataataaaaacaaaaatacaaacaatcccttccacaaaaaca

SEQ ID NO: 40522 - DNA, 50 bp, synthetic construct
  source 1..50: mol_type = other DNA
ctacacctataataaaaacgaaaatacaaacaatcccttccacgaaaacg

SEQ ID NO: 40523 - DNA, 50 bp, synthetic construct
  source 1..50: mol_type = other DNA
aatctcaaacaaaaaactaaaatataaaactccaatacattccaaaaaca

SEQ ID NO: 40524 - DNA, 50 bp, synthetic construct
  source 1..50: mol_type = other DNA
aatctcaaacgaaaaactaaaatataaaactccgatacattccaaaaacg

SEQ ID NO: 40525 - DNA, 50 bp, synthetic construct
  source 1..50: mol_type = other DNA
ttttttttggttttgtttgttttggtttaagtgttttgtttttagtgtgt

SEQ ID NO: 40526 - DNA, 50 bp, synthetic construct
  source 1..50: mol_type = other DNA
ttttttttggtttcgttcgtttcggtttaagtgttttgtttttagtgcgc

SEQ ID NO: 40527 - DNA, 50 bp, synthetic construct
  source 1..50: mol_type = other DNA
atctcctctaacctcactcattccaatctaaatattttaccttcaataca

SEQ ID NO: 40528 - DNA, 50 bp, synthetic construct
  source 1..50: mol_type = other DNA
atctcctctaacctcgctcgttccgatctaaatattttaccttcaatacg

SEQ ID NO: 40529 - DNA, 50 bp, synthetic construct
  source 1..50: mol_type = other DNA
cttaaaccaaaacaaacaaaaccaaaaaaaacaacaactcccaacaaaca

SEQ ID NO: 40530 - DNA, 50 bp, synthetic construct
  source 1..50: mol_type = other DNA
cttaaaccgaaacgaacgaaaccaaaaaaaacaacaactcccaacaaacg

SEQ ID NO: 40531 - DNA, 50 bp, synthetic construct
  source 1..50: mol_type = other DNA
ggttataggagtaaaatttttttgtttgttttttgggaagggagaatggt

SEQ ID NO: 40532 - DNA, 50 bp, synthetic construct
  source 1..50: mol_type = other DNA
ggttataggagtaaaatttttttgttcgttttttgggaagggagaatggc

SEQ ID NO: 40533 - DNA, 50 bp, synthetic construct
  source 1..50: mol_type = other DNA
tataggagtaaaatttttttgtttgttttttgggaagggagaatggtggt

SEQ ID NO: 40534 - DNA, 50 bp, synthetic construct
  source 1..50: mol_type = other DNA
tataggagtaaaatttttttgttcgttttttgggaagggagaatggcggc

SEQ ID NO: 40535 - DNA, 50 bp, synthetic construct
  source 1..50: mol_type = other DNA
tttagtattgtaggtattttaaagagtttttttgtttttagttgtagttt

SEQ ID NO: 40536 - DNA, 50 bp, synthetic construct
  source 1..50: mol_type = other DNA
tttagtatcgtaggtattttaaagagttttttcgtttttagtcgtagttc

SEQ ID NO: 40537 - DNA, 50 bp, synthetic construct
  source 1..50: mol_type = other DNA
tagttgttttagtattgtaggtattttaaagagtttttttgtttttagtt

SEQ ID NO: 40538 - DNA, 50 bp, synthetic construct
  source 1..50: mol_type = other DNA
tagtcgttttagtatcgtaggtattttaaagagttttttcgtttttagtc

SEQ ID NO: 40539 - DNA, 50 bp, synthetic construct
  source 1..50: mol_type = other DNA
caactaaaccactataataacacatcccaaacttttactaaaatactaca

SEQ ID NO: 40540 - DNA, 50 bp, synthetic construct
  source 1..50: mol_type = other DNA
cgactaaaccgctataataacacgtcccaaacttttactaaaatactacg

SEQ ID NO: 40541 - DNA, 50 bp, synthetic construct
  source 1..50: mol_type = other DNA
attccattcaataaccataaaaatattatccaccctaactatatcctcca

SEQ ID NO: 40542 - DNA, 50 bp, synthetic construct
  source 1..50: mol_type = other DNA
attccgttcaataaccgtaaaaatattatccgccctaactatatcctccg

SEQ ID NO: 40543 - DNA, 50 bp, synthetic construct
  source 1..50: mol_type = other DNA
aatacaaacaacaaaactaacataatcaatacaattccattcaataacca

SEQ ID NO: 40544 - DNA, 50 bp, synthetic construct
  source 1..50: mol_type = other DNA
gatacgaacgacgaaactaacgtaatcgatacgattccgttcaataaccg

SEQ ID NO: 40545 - DNA, 50 bp, synthetic construct
  source 1..50: mol_type = other DNA
aaaacataatcaatacaaacaacaaaactaacataatcaatacaattcca

SEQ ID NO: 40546 - DNA, 50 bp, synthetic construct
  source 1..50: mol_type = other DNA
gaaacgtaatcgatacgaacgacgaaactaacgtaatcgatacgattccg

SEQ ID NO: 40547 - DNA, 50 bp, synthetic construct
  source 1..50: mol_type = other DNA
acaaaaaatccaaaacataatcaatacaaacaacaaaactaacataatca

SEQ ID NO: 40548 - DNA, 50 bp, synthetic construct
  source 1..50: mol_type = other DNA
gcgaaaaatccgaaacgtaatcgatacgaacgacgaaactaacgtaatcg

SEQ ID NO: 40549 - DNA, 50 bp, synthetic construct
  source 1..50: mol_type = other DNA
ttagggtggataatatttttatggttattgaatggaattgtattgattat

SEQ ID NO: 40550 - DNA, 50 bp, synthetic construct
  source 1..50: mol_type = other DNA
ttagggcggataatatttttacggttattgaacggaatcgtatcgattac

SEQ ID NO: 40551 - DNA, 50 bp, synthetic construct
  source 1..50: mol_type = other DNA
ataatatttttatggttattgaatggaattgtattgattatgttagtttt

SEQ ID NO: 40552 - DNA, 50 bp, synthetic construct
  source 1..50: mol_type = other DNA
ataatatttttacggttattgaacggaatcgtatcgattacgttagtttc

SEQ ID NO: 40553 - DNA, 50 bp, synthetic construct
  source 1..50: mol_type = other DNA
atatttttatggttattgaatggaattgtattgattatgttagttttgtt

SEQ ID NO: 40554 - DNA, 50 bp, synthetic construct
  source 1..50: mol_type = other DNA
atatttttacggttattgaacggaatcgtatcgattacgttagtttcgtc

SEQ ID NO: 40555 - DNA, 50 bp, synthetic construct
  source 1..50: mol_type = other DNA
ttttatggttattgaatggaattgtattgattatgttagttttgttgttt

SEQ ID NO: 40556 - DNA, 50 bp, synthetic construct
  source 1..50: mol_type = other DNA
ttttacggttattgaacggaatcgtatcgattacgttagtttcgtcgttc

SEQ ID NO: 40557 - DNA, 50 bp, synthetic construct
  source 1..50: mol_type = other DNA
ttgaatggaattgtattgattatgttagttttgttgtttgtattgattat

SEQ ID NO: 40558 - DNA, 50 bp, synthetic construct
  source 1..50: mol_type = other DNA
ttgaacggaatcgtatcgattacgttagtttcgtcgttcgtatcgattac

SEQ ID NO: 40559 - DNA, 50 bp, synthetic construct
  source 1..50: mol_type = other DNA
attgattatgttagttttgttgtttgtattgattatgttttggatttttt

SEQ ID NO: 40560 - DNA, 50 bp, synthetic construct
  source 1..50: mol_type = other DNA
atcgattacgttagtttcgtcgttcgtatcgattacgtttcggatttttc

SEQ ID NO: 40561 - DNA, 50 bp, synthetic construct
  source 1..50: mol_type = other DNA
aaaaataaaaaacaattctcacaattcacctacacaccaacatcacaaca

SEQ ID NO: 40562 - DNA, 50 bp, synthetic construct
  source 1..50: mol_type = other DNA
aaaaataaaaaacgattctcacgattcacctacgcgccgacgtcacaacg

SEQ ID NO: 40563 - DNA, 50 bp, synthetic construct
  source 1..50: mol_type = other DNA
taaaaaatacaaccacaaaatcacccacaaaccaaacaaccaaaaaaaca

SEQ ID NO: 40564 - DNA, 50 bp, synthetic construct
  source 1..50: mol_type = other DNA
taaaaaatacaaccgcaaaatcacccgcgaaccgaacgaccaaaaaaacg

SEQ ID NO: 40565 - DNA, 50 bp, synthetic construct
  source 1..50: mol_type = other DNA
gttaatataaagttagaaaatataattgtaaaattatttgtgagttggat

SEQ ID NO: 40566 - DNA, 50 bp, synthetic construct
  source 1..50: mol_type = other DNA
gttaatataaagttagaaaatataatcgtaaaattattcgcgagtcggac

SEQ ID NO: 40567 - DNA, 50 bp, synthetic construct
  source 1..50: mol_type = other DNA
atgtgttaatataaagttagaaaatataattgtaaaattatttgtgagtt

SEQ ID NO: 40568 - DNA, 50 bp, synthetic construct
  source 1..50: mol_type = other DNA
atgcgttaatataaagttagaaaatataatcgtaaaattattcgcgagtc

SEQ ID NO: 40569 - DNA, 50 bp, synthetic construct
  source 1..50: mol_type = other DNA
atatatacaccaacataaaactaaaaaatacaaccacaaaatcacccaca

SEQ ID NO: 40570 - DNA, 50 bp, synthetic construct
  source 1..50: mol_type = other DNA
atatatacgccaacataaaactaaaaaatacaaccgcaaaatcacccgcg

SEQ ID NO: 40571 - DNA, 50 bp, synthetic construct
  source 1..50: mol_type = other DNA
tccaactcacaaataattttacaattatattttctaactttatattaaca

SEQ ID NO: 40572 - DNA, 50 bp, synthetic construct
  source 1..50: mol_type = other DNA
tccgactcgcgaataattttacgattatattttctaactttatattaacg

SEQ ID NO: 40573 - DNA, 50 bp, synthetic construct
  source 1..50: mol_type = other DNA
aaacctaaacacaaaaacccaacaaattctttccaacatcaacaactaca

SEQ ID NO: 40574 - DNA, 50 bp, synthetic construct
  source 1..50: mol_type = other DNA
aaacctaaacacaaaaacccaacaaattctttccgacgtcaacgactacg

SEQ ID NO: 40575 - DNA, 50 bp, synthetic construct
  source 1..50: mol_type = other DNA
aaaaaaaacacctaaatcaatcctatccacacaaccttattcctaaaaca

SEQ ID NO: 40576 - DNA, 50 bp, synthetic construct
  source 1..50: mol_type = other DNA
aaaaaaaacgcctaaatcaatcctatccgcacgaccttattcctaaaacg

SEQ ID NO: 40577 - DNA, 50 bp, synthetic construct
  source 1..50: mol_type = other DNA
atttctcctctaaaaacaacaaaaaaaaacacctaaatcaatcctatcca

SEQ ID NO: 40578 - DNA, 50 bp, synthetic construct
  source 1..50: mol_type = other DNA
gtttctcctctaaaaacgacgaaaaaaaacgcctaaatcaatcctatccg

SEQ ID NO: 40579 - DNA, 50 bp, synthetic construct
  source 1..50: mol_type = other DNA
ctccaaaaacaaaaccatacaaacaaaactaacctaaacacttttcccca

SEQ ID NO: 40580 - DNA, 50 bp, synthetic construct
  source 1..50: mol_type = other DNA
ctccaaaaacaaaaccgtacgaacaaaactaacctaaacgcttttccccg

SEQ ID NO: 40581 - DNA, 50 bp, synthetic construct
  source 1..50: mol_type = other DNA
aataatccaaatctacacaaaataaccccaaaaacccaccaaaaaaacca

SEQ ID NO: 40582 - DNA, 50 bp, synthetic construct
  source 1..50: mol_type = other DNA
aataatccaaatctacgcaaaataaccccgaaaacccaccgaaaaaaccg

SEQ ID NO: 40583 - DNA, 50 bp, synthetic construct
  source 1..50: mol_type = other DNA
aaataaataaaaaacactacccaactcttccctctacaaatccaataaca

SEQ ID NO: 40584 - DNA, 50 bp, synthetic construct
  source 1..50: mol_type = other DNA
aaataaataaaaaacgctacccaactcttccctctacgaatccaataacg

SEQ ID NO: 40585 - DNA, 50 bp, synthetic construct
  source 1..50: mol_type = other DNA
ttaaacaactcccacaacccctctaacaaaaataaccattattaaactca

SEQ ID NO: 40586 - DNA, 50 bp, synthetic construct
  source 1..50: mol_type = other DNA
ttaaacaactcccgcgacccctctaacgaaaataaccgttattaaactcg

SEQ ID NO: 40587 - DNA, 50 bp, synthetic construct
  source 1..50: mol_type = other DNA
ctaataactaaatccctaacaaaacacaacaataaaaaatatcacataca

SEQ ID NO: 40588 - DNA, 50 bp, synthetic construct
  source 1..50: mol_type = other DNA
ctaataactaaatccctaacgaaacgcgacgataaaaaatatcgcgtacg

SEQ ID NO: 40589 - DNA, 50 bp, synthetic construct
  source 1..50: mol_type = other DNA
caactactaataactaaatccctaacaaaacacaacaataaaaaatatca

SEQ ID NO: 40590 - DNA, 50 bp, synthetic construct
  source 1..50: mol_type = other DNA
caactactaataactaaatccctaacgaaacgcgacgataaaaaatatcg

SEQ ID NO: 40591 - DNA, 50 bp, synthetic construct
  source 1..50: mol_type = other DNA
taatcccatcttccatcccaactactaataactaaatccctaacaaaaca

SEQ ID NO: 40592 - DNA, 50 bp, synthetic construct
  source 1..50: mol_type = other DNA
taatcccatcttccgtcccaactactaataactaaatccctaacgaaacg

SEQ ID NO: 40593 - DNA, 50 bp, synthetic construct
  source 1..50: mol_type = other DNA
attatactaacttcctccaattcctcctcttcatcaattataactaacca

SEQ ID NO: 40594 - DNA, 50 bp, synthetic construct
  source 1..50: mol_type = other DNA
attatactaacttcctccaattcctcctcttcgtcgattataactaaccg

SEQ ID NO: 40595 - DNA, 50 bp, synthetic construct
  source 1..50: mol_type = other DNA
attcaacaatcctaataacaacaaatacccacaatctcaaatctctacca

SEQ ID NO: 40596 - DNA, 50 bp, synthetic construct
  source 1..50: mol_type = other DNA
attcaacaatcctaataacaacgaatacccgcaatctcaaatctctaccg

SEQ ID NO: 40597 - DNA, 50 bp, synthetic construct
  source 1..50: mol_type = other DNA
atcaaccaacttataaaaactcttaacaaaaaaatcaacctaccctcaca

SEQ ID NO: 40598 - DNA, 50 bp, synthetic construct
  source 1..50: mol_type = other DNA
atcaaccgacttataaaaactcttaacgaaaaaatcgacctaccctcacg

SEQ ID NO: 40599 - DNA, 50 bp, synthetic construct
  source 1..50: mol_type = other DNA
acaacactataatacaacataaaaaccccaaattctttaataaaaaaaca

SEQ ID NO: 40600 - DNA, 50 bp, synthetic construct
  source 1..50: mol_type = other DNA
gcgacgctataatacgacgtaaaaaccccaaattctttaataaaaaaacg

SEQ ID NO: 40601 - DNA, 50 bp, synthetic construct
  source 1..50: mol_type = other DNA
ccaccaaaacatctcacattctaattaacttattaacaaaaaacactcca

SEQ ID NO: 40602 - DNA, 50 bp, synthetic construct
  source 1..50: mol_type = other DNA
ccaccgaaacgtctcacgttctaattaacttattaacaaaaaacgctccg

SEQ ID NO: 40603 - DNA, 50 bp, synthetic construct
  source 1..50: mol_type = other DNA
aaaacaaaacaccctttactaataaaccaatcaaaacataaaacactcca

SEQ ID NO: 40604 - DNA, 50 bp, synthetic construct
  source 1..50: mol_type = other DNA
aaaacgaaacgccctttactaataaaccaatcaaaacgtaaaacgctccg

SEQ ID NO: 40605 - DNA, 50 bp, synthetic construct
  source 1..50: mol_type = other DNA
acaccctttactaataaaccaatcaaaacataaaacactccaataaaaca

SEQ ID NO: 40606 - DNA, 50 bp, synthetic construct
  source 1..50: mol_type = other DNA
acgccctttactaataaaccaatcaaaacgtaaaacgctccgataaaacg

SEQ ID NO: 40607 - DNA, 50 bp, synthetic construct
  source 1..50: mol_type = other DNA
ctttactaataaaccaatcaaaacataaaacactccaataaaacaataca

SEQ ID NO: 40608 - DNA, 50 bp, synthetic construct
  source 1..50: mol_type = other DNA
ctttactaataaaccaatcaaaacgtaaaacgctccgataaaacgatacg

SEQ ID NO: 40609 - DNA, 50 bp, synthetic construct
  source 1..50: mol_type = other DNA
aaaacaatacacatcaaacacaaaataaaatctaaataacttaactaaca

SEQ ID NO: 40610 - DNA, 50 bp, synthetic construct
  source 1..50: mol_type = other DNA
aaaacgatacgcgtcgaacgcgaaataaaatctaaataacttaactaacg

SEQ ID NO: 40611 - DNA, 50 bp, synthetic construct
  source 1..50: mol_type = other DNA
aaaaataattataaataacacaacaaaattctcacacctaaaccatcaca

SEQ ID NO: 40612 - DNA, 50 bp, synthetic construct
  source 1..50: mol_type = other DNA
aaaaataattataaataacgcaacgaaattctcacacctaaaccgtcgcg

SEQ ID NO: 40613 - DNA, 50 bp, synthetic construct
  source 1..50: mol_type = other DNA
ataattataaataacacaacaaaattctcacacctaaaccatcacaaaca

SEQ ID NO: 40614 - DNA, 50 bp, synthetic construct
  source 1..50: mol_type = other DNA
ataattataaataacgcaacgaaattctcacacctaaaccgtcgcgaacg

SEQ ID NO: 40615 - DNA, 50 bp, synthetic construct
  source 1..50: mol_type = other DNA
ctatccccaaataatcctcactcacaacacacaatataaaaaacacaaca

SEQ ID NO: 40616 - DNA, 50 bp, synthetic construct
  source 1..50: mol_type = other DNA
ctatccccgaataatcctcactcacaacgcacaatataaaaaacgcaacg

SEQ ID NO: 40617 - DNA, 50 bp, synthetic construct
  source 1..50: mol_type = other DNA
aaccataaaaatctctaaacaacccaaaaacaaaataactaaaaaaaaca

SEQ ID NO: 40618 - DNA, 50 bp, synthetic construct
  source 1..50: mol_type = other DNA
aaccataaaaatctctaaacaacccgaaaacaaaataactaaaaaaaacg

SEQ ID NO: 40619 - DNA, 50 bp, synthetic construct
  source 1..50: mol_type = other DNA
aaaccaataaaactaaaaaccaaaaaccaaaaacaaaaaatccaaataca

SEQ ID NO: 40620 - DNA, 50 bp, synthetic construct
  source 1..50: mol_type = other DNA
aaaccaataaaactaaaaaccaaaaaccaaaaacaaaaaatccaaatacg

SEQ ID NO: 40621 - DNA, 50 bp, synthetic construct
  source 1..50: mol_type = other DNA
ctttaaaacacctaaattcaaaaaaacaaactccaacctaaaaaaaacca

SEQ ID NO: 40622 - DNA, 50 bp, synthetic construct
  source 1..50: mol_type = other DNA
ctttaaaacgcctaaattcgaaaaaacaaactccgacctaaaaaaaaccg

SEQ ID NO: 40623 - DNA, 50 bp, synthetic construct
  source 1..50: mol_type = other DNA
aacaaaatacaaaaacaaaaccccaaaataccaaaaccacaaaaaacaca

SEQ ID NO: 40624 - DNA, 50 bp, synthetic construct
  source 1..50: mol_type = other DNA
aacgaaatacgaaaacaaaaccccaaaataccaaaaccacgaaaaacgcg

SEQ ID NO: 40625 - DNA, 50 bp, synthetic construct
  source 1..50: mol_type = other DNA
caacttcctctacccttaactcaatacaaaaaactccaaaccctacatca

SEQ ID NO: 40626 - DNA, 50 bp, synthetic construct
  source 1..50: mol_type = other DNA
caacttcctctacccttaactcaatacaaaaaactccaaaccctacatcg

SEQ ID NO: 40627 - DNA, 50 bp, synthetic construct
  source 1..50: mol_type = other DNA
cctaacaaacacaaaaaaatccaaactctacaaacctctactaaacctca

SEQ ID NO: 40628 - DNA, 50 bp, synthetic construct
  source 1..50: mol_type = other DNA
cctaacaaacacaaaaaaatccaaactctacgaacctctactaaacctcg

SEQ ID NO: 40629 - DNA, 50 bp, synthetic construct
  source 1..50: mol_type = other DNA
caaacctctactaaacctcatctcctctctccataataaaaataaaaaca

SEQ ID NO: 40630 - DNA, 50 bp, synthetic construct
  source 1..50: mol_type = other DNA
cgaacctctactaaacctcgtctcctctctccataataaaaataaaaacg

SEQ ID NO: 40631 - DNA, 50 bp, synthetic construct
  source 1..50: mol_type = other DNA
tgtttttattgtttttttgtgagggtttgtaaaatggggtttttgtttat

SEQ ID NO: 40632 - DNA, 50 bp, synthetic construct
  source 1..50: mol_type = other DNA
tgtttttatcgtttttttgcgagggtttgtaaaacggggtttttgtttac

SEQ ID NO: 40633 - DNA, 50 bp, synthetic construct
  source 1..50: mol_type = other DNA
tgtatattgattatgagggttatagtttttttgtgggttgtttttaaatt

SEQ ID NO: 40634 - DNA, 50 bp, synthetic construct
  source 1..50: mol_type = other DNA
tgtatattgattatgagggttatagtttttttgtgggtcgtttttaaatc

SEQ ID NO: 40635 - DNA, 50 bp, synthetic construct
  source 1..50: mol_type = other DNA
actcttcccctacatactaaccataaaaaccacaacccccttataaacca

SEQ ID NO: 40636 - DNA, 50 bp, synthetic construct
  source 1..50: mol_type = other DNA
actcttcccctacatactaaccataaaaaccacaacccccttataaaccg

SEQ ID NO: 40637 - DNA, 50 bp, synthetic construct
  source 1..50: mol_type = other DNA
ataaccatatactaacaaataacaaataacaaatatataaacaaacaaca

SEQ ID NO: 40638 - DNA, 50 bp, synthetic construct
  source 1..50: mol_type = other DNA
ataaccgtatactaacaaataacaaataacaaatatataaacgaacaacg

SEQ ID NO: 40639 - DNA, 50 bp, synthetic construct
  source 1..50: mol_type = other DNA
tacaccctatctaaacctaaattcaaaccctatccaaaacttaaacacca

SEQ ID NO: 40640 - DNA, 50 bp, synthetic construct
  source 1..50: mol_type = other DNA
tacaccctatctaaacctaaattcaaaccctatccaaaacttaaacaccg

SEQ ID NO: 40641 - DNA, 50 bp, synthetic construct
  source 1..50: mol_type = other DNA
aaacccaatactaaataaaataaacctaccactaaaataaacaaaacaca

SEQ ID NO: 40642 - DNA, 50 bp, synthetic construct
  source 1..50: mol_type = other DNA
aaacccaatactaaataaaataaacctaccactaaaataaacaaaacacg

SEQ ID NO: 40643 - DNA, 50 bp, synthetic construct
  source 1..50: mol_type = other DNA
ataaaataattatactccaaacactactaataaatcaaactaaacaaaca

SEQ ID NO: 40644 - DNA, 50 bp, synthetic construct
  source 1..50: mol_type = other DNA
ataaaataattatactccaaacactactaataaatcaaactaaacaaacg

SEQ ID NO: 40645 - DNA, 50 bp, synthetic construct
  source 1..50: mol_type = other DNA
actataaatatatacaaaaataaaatcctataaacccaaaactttaatca

SEQ ID NO: 40646 - DNA, 50 bp, synthetic construct
  source 1..50: mol_type = other DNA
actataaatatatacaaaaataaaatcctataaacccaaaactttaatcg

SEQ ID NO: 40647 - DNA, 50 bp, synthetic construct
  source 1..50: mol_type = other DNA
aaaaaacacataaaattaacaacaacaaaaaaaaacacatccaaacctca

SEQ ID NO: 40648 - DNA, 50 bp, synthetic construct
  source 1..50: mol_type = other DNA
aaaaaacacataaaattaacgacaacgaaaaaaaacacatccgaacctcg

SEQ ID NO: 40649 - DNA, 50 bp, synthetic construct
  source 1..50: mol_type = other DNA
atctctaaatccctaaatccactcacctacatactaaacctcaacattca

SEQ ID NO: 40650 - DNA, 50 bp, synthetic construct
  source 1..50: mol_type = other DNA
atctctaaatccctaaatccactcgcctacatactaaacctcaacattcg

SEQ ID NO: 40651 - DNA, 50 bp, synthetic construct
  source 1..50: mol_type = other DNA
tctactaacccacaaataccaactacaaaaaaacataacatcctaccaca

SEQ ID NO: 40652 - DNA, 50 bp, synthetic construct
  source 1..50: mol_type = other DNA
tctactaacccgcaaataccaactacaaaaaaacgtaacgtcctaccacg

SEQ ID NO: 40653 - DNA, 50 bp, synthetic construct
  source 1..50: mol_type = other DNA
aaaaaaaacacatacaaaccccaaaataaaaataacaaaatacaaaaaca

SEQ ID NO: 40654 - DNA, 50 bp, synthetic construct
  source 1..50: mol_type = other DNA
gaaaaaaacgcgtacgaaccccgaaataaaaataacgaaatacgaaaacg

SEQ ID NO: 40655 - DNA, 50 bp, synthetic construct
  source 1..50: mol_type = other DNA
aaaaaatcaaataaacacaaacctataacatataataaatacaaaatcca

SEQ ID NO: 40656 - DNA, 50 bp, synthetic construct
  source 1..50: mol_type = other DNA
aaaaaatcgaataaacgcaaacctataacatataataaatacaaaatccg

SEQ ID NO: 40657 - DNA, 50 bp, synthetic construct
  source 1..50: mol_type = other DNA
ataccccataactctcaaattttacatctaccacataccacaaacttaca

SEQ ID NO: 40658 - DNA, 50 bp, synthetic construct
  source 1..50: mol_type = other DNA
ataccccgtaactctcgaattttacatctaccacataccacaaacttacg

SEQ ID NO: 40659 - DNA, 50 bp, synthetic construct
  source 1..50: mol_type = other DNA
aactaatttcctaacttcaaaaaaaaaccaataaccaaacataaataaca

SEQ ID NO: 40660 - DNA, 50 bp, synthetic construct
  source 1..50: mol_type = other DNA
aactaatttcctaacttcaaaaaaaaaccaataaccgaacgtaaataacg

SEQ ID NO: 40661 - DNA, 50 bp, synthetic construct
  source 1..50: mol_type = other DNA
ccactccccaactaatttcctaacttcaaaaaaaaaccaataaccaaaca

SEQ ID NO: 40662 - DNA, 50 bp, synthetic construct
  source 1..50: mol_type = other DNA
ccactccccaactaatttcctaacttcaaaaaaaaaccaataaccgaacg

SEQ ID NO: 40663 - DNA, 50 bp, synthetic construct
  source 1..50: mol_type = other DNA
aatcatatactaaaaaaataacaattttaatcactaactttccataatca

SEQ ID NO: 40664 - DNA, 50 bp, synthetic construct
  source 1..50: mol_type = other DNA
aatcgtatactaaaaaaataacaattttaatcgctaactttccgtaatcg

SEQ ID NO: 40665 - DNA, 50 bp, synthetic construct
  source 1..50: mol_type = other DNA
aaaaataacaattttaatcactaactttccataatcattaataaatctca

SEQ ID NO: 40666 - DNA, 50 bp, synthetic construct
  source 1..50: mol_type = other DNA
aaaaataacaattttaatcgctaactttccgtaatcgttaataaatctcg

SEQ ID NO: 40667 - DNA, 50 bp, synthetic construct
  source 1..50: mol_type = other DNA
actaaaaccactacctccttaataaaaaaccccaactaaccactaaatca

SEQ ID NO: 40668 - DNA, 50 bp, synthetic construct
  source 1..50: mol_type = other DNA
actaaaaccgctacctccttaataaaaaaccccgactaaccactaaatcg

SEQ ID NO: 40669 - DNA, 50 bp, synthetic construct
  source 1..50: mol_type = other DNA
aactaaaataactacaacaccaaaaaccaaacctcaaaaaaacaacaaca

SEQ ID NO: 40670 - DNA, 50 bp, synthetic construct
  source 1..50: mol_type = other DNA
aactaaaataactacgacgccaaaaaccaaacctcaaaaaaacgacgacg

SEQ ID NO: 40671 - DNA, 50 bp, synthetic construct
  source 1..50: mol_type = other DNA
caaaactaaaataactacaacaccaaaaaccaaacctcaaaaaaacaaca

SEQ ID NO: 40672 - DNA, 50 bp, synthetic construct
  source 1..50: mol_type = other DNA
cgaaactaaaataactacgacgccaaaaaccaaacctcaaaaaaacgacg

SEQ ID NO: 40673 - DNA, 50 bp, synthetic construct
  source 1..50: mol_type = other DNA
caaaatatataaccaaatctaaccaccaaaaacacccccacctctctaca

SEQ ID NO: 40674 - DNA, 50 bp, synthetic construct
  source 1..50: mol_type = other DNA
caaaatatataaccaaatctaaccaccaaaaacacccccgcctctctacg

SEQ ID NO: 40675 - DNA, 50 bp, synthetic construct
  source 1..50: mol_type = other DNA
taaacaataataacattacccaactacttattaacctcctcatcatttca

SEQ ID NO: 40676 - DNA, 50 bp, synthetic construct
  source 1..50: mol_type = other DNA
taaacaataataacgttacccaactacttattaacctcctcgtcgtttcg

SEQ ID NO: 40677 - DNA, 50 bp, synthetic construct
  source 1..50: mol_type = other DNA
taacactactaaaaaaaactaaaccaccaaaaacccatcacaaaaccaca

SEQ ID NO: 40678 - DNA, 50 bp, synthetic construct
  source 1..50: mol_type = other DNA
taacgctactaaaaaaaactaaaccaccaaaaacccgtcacaaaaccacg

SEQ ID NO: 40679 - DNA, 50 bp, synthetic construct
  source 1..50: mol_type = other DNA
ttccataatataataattatcacattcacctaacacacaaaaaatcccca

SEQ ID NO: 40680 - DNA, 50 bp, synthetic construct
  source 1..50: mol_type = other DNA
ttccgtaatataataattatcacgttcgcctaacacgcgaaaaatccccg

SEQ ID NO: 40681 - DNA, 50 bp, synthetic construct
  source 1..50: mol_type = other DNA
ttatccaataaaaactaaattataaaaaataaactacctaacaatactca

SEQ ID NO: 40682 - DNA, 50 bp, synthetic construct
  source 1..50: mol_type = other DNA
ttatccaataaaaactaaattataaaaaataaactacctaacaatactcg

SEQ ID NO: 40683 - DNA, 50 bp, synthetic construct
  source 1..50: mol_type = other DNA
tatttctttatattaaattccctttattaaaatatctaatttacacatca

SEQ ID NO: 40684 - DNA, 50 bp, synthetic construct
  source 1..50: mol_type = other DNA
tatttctttatattaaattccctttattaaaatatctaatttacacgtcg

SEQ ID NO: 40685 - DNA, 50 bp, synthetic construct
  source 1..50: mol_type = other DNA
actcaaaataatactaataaacattatatttaattcaaaccattttatca

SEQ ID NO: 40686 - DNA, 50 bp, synthetic construct
  source 1..50: mol_type = other DNA
actcaaaataatactaataaacattatatttaattcaaaccattttatcg

SEQ ID NO: 40687 - DNA, 50 bp, synthetic construct
  source 1..50: mol_type = other DNA
aaaatttataatactaattatcaacaaataaccataaaactctaacatca

SEQ ID NO: 40688 - DNA, 50 bp, synthetic construct
  source 1..50: mol_type = other DNA
aaaatttataatactaattatcaacaaataaccataaaactctaacatcg

SEQ ID NO: 40689 - DNA, 50 bp, synthetic construct
  source 1..50: mol_type = other DNA
cctaaacaaacactaattaaaaaaacaatacttttaaatcaaattaatca

SEQ ID NO: 40690 - DNA, 50 bp, synthetic construct
  source 1..50: mol_type = other DNA
cctaaacaaacactaattaaaaaaacaatacttttaaatcaaattaatcg

SEQ ID NO: 40691 - DNA, 50 bp, synthetic construct
  source 1..50: mol_type = other DNA
caatactctattacaaaaaaaacaacaatataaaaattccaatttcttca

SEQ ID NO: 40692 - DNA, 50 bp, synthetic construct
  source 1..50: mol_type = other DNA
caatactctattacaaaaaaaacaacaatataaaaattccaatttcttcg

SEQ ID NO: 40693 - DNA, 50 bp, synthetic construct
  source 1..50: mol_type = other DNA
aaacaatataaaacatatctctttttccacctaaaaaacaaaaaacctca

SEQ ID NO: 40694 - DNA, 50 bp, synthetic construct
  source 1..50: mol_type = other DNA
aaacaatataaaacatatctctttttccacctaaaaaacaaaaaacctcg

SEQ ID NO: 40695 - DNA, 50 bp, synthetic construct
  source 1..50: mol_type = other DNA
aaaaaactaatttttttattcaattaaactcaaatcatataacatcctca

SEQ ID NO: 40696 - DNA, 50 bp, synthetic construct
  source 1..50: mol_type = other DNA
aaaaaactaatttttttattcaattaaactcaaatcatataacatcctcg

SEQ ID NO: 40697 - DNA, 50 bp, synthetic construct
  source 1..50: mol_type = other DNA
aattttgtttttattaaaagtatagaaattagttgggtgtagtggttggt

SEQ ID NO: 40698 - DNA, 50 bp, synthetic construct
  source 1..50: mol_type = other DNA
aattttgtttttattaaaagtatagaaattagttgggtgtagtggttggc

SEQ ID NO: 40699 - DNA, 50 bp, synthetic construct
  source 1..50: mol_type = other DNA
tttctaaccattatcataaataattaaataaatatcctccaatatataca

SEQ ID NO: 40700 - DNA, 50 bp, synthetic construct
  source 1..50: mol_type = other DNA
tttctaaccgttatcataaataattaaataaatatcctccaatatatacg

SEQ ID NO: 40701 - DNA, 50 bp, synthetic construct
  source 1..50: mol_type = other DNA
ctaacccctaaccacctcacaaaccttatcttatttcaccttattcacca

SEQ ID NO: 40702 - DNA, 50 bp, synthetic construct
  source 1..50: mol_type = other DNA
ctaacccctaaccacctcacaaaccttatcttatttcaccttattcaccg

SEQ ID NO: 40703 - DNA, 50 bp, synthetic construct
  source 1..50: mol_type = other DNA
tcaaacatcttaacctataaaaatccctcctccccaaactctactataca

SEQ ID NO: 40704 - DNA, 50 bp, synthetic construct
  source 1..50: mol_type = other DNA
tcaaacatcttaacctataaaaatccctcctccccaaactctactatacg

SEQ ID NO: 40705 - DNA, 50 bp, synthetic construct
  source 1..50: mol_type = other DNA
tattttgttatggggtattgatatatgttgtggaggatagaagatttttt

SEQ ID NO: 40706 - DNA, 50 bp, synthetic construct
  source 1..50: mol_type = other DNA
tattttgttatggggtattgatatatgttgcggaggatagaagatttttc

SEQ ID NO: 40707 - DNA, 50 bp, synthetic construct
  source 1..50: mol_type = other DNA
aataaataaacctccaatcataacaacaaatcaatctccacaacccatca

SEQ ID NO: 40708 - DNA, 50 bp, synthetic construct
  source 1..50: mol_type = other DNA
aataaataaacctccaatcataacgacaaatcaatctccgcgacccatcg

SEQ ID NO: 40709 - DNA, 50 bp, synthetic construct
  source 1..50: mol_type = other DNA
aacaaataacctaaaatcaaaaattccaaaccaacctaaccaacaaaaca

SEQ ID NO: 40710 - DNA, 50 bp, synthetic construct
  source 1..50: mol_type = other DNA
aacaaataacctaaaatcaaaaattccaaaccaacctaaccgacaaaacg

SEQ ID NO: 40711 - DNA, 50 bp, synthetic construct
  source 1..50: mol_type = other DNA
ccttaataataaacacaaacttttccattttccaaaaaccccctaacaca

SEQ ID NO: 40712 - DNA, 50 bp, synthetic construct
  source 1..50: mol_type = other DNA
ccttaataataaacgcaaacttttccattttccaaaaaccccctaacgcg

SEQ ID NO: 40713 - DNA, 50 bp, synthetic construct
  source 1..50: mol_type = other DNA
aataataaacacaaacttttccattttccaaaaaccccctaacacaacca

SEQ ID NO: 40714 - DNA, 50 bp, synthetic construct
  source 1..50: mol_type = other DNA
aataataaacgcaaacttttccattttccaaaaaccccctaacgcgaccg

SEQ ID NO: 40715 - DNA, 50 bp, synthetic construct
  source 1..50: mol_type = other DNA
catttatccatataaaatataaaaaaacatatacccacaaaaccaccaca

SEQ ID NO: 40716 - DNA, 50 bp, synthetic construct
  source 1..50: mol_type = other DNA
catttatccatataaaatataaaaaaacgtatacccgcgaaaccgccgcg

SEQ ID NO: 40717 - DNA, 50 bp, synthetic construct
  source 1..50: mol_type = other DNA
acacacatttatccatataaaatataaaaaaacatatacccacaaaacca

SEQ ID NO: 40718 - DNA, 50 bp, synthetic construct
  source 1..50: mol_type = other DNA
acacgcatttatccatataaaatataaaaaaacgtatacccgcgaaaccg

SEQ ID NO: 40719 - DNA, 50 bp, synthetic construct
  source 1..50: mol_type = other DNA
ttacctacacacatttatccatataaaatataaaaaaacatatacccaca

SEQ ID NO: 40720 - DNA, 50 bp, synthetic construct
  source 1..50: mol_type = other DNA
ttacctacacgcatttatccatataaaatataaaaaaacgtatacccgcg

SEQ ID NO: 40721 - DNA, 50 bp, synthetic construct
  source 1..50: mol_type = other DNA
tacatacaaacaaaatcaaaaattcaaacccctaacatcaacctccaaca

SEQ ID NO: 40722 - DNA, 50 bp, synthetic construct
  source 1..50: mol_type = other DNA
tacgtacaaacaaaatcaaaaattcaaacccctaacgtcaacctccaacg

SEQ ID NO: 40723 - DNA, 50 bp, synthetic construct
  source 1..50: mol_type = other DNA
aaccctaccaaaatttcactttttatctataaattcattcccaaatccca

SEQ ID NO: 40724 - DNA, 50 bp, synthetic construct
  source 1..50: mol_type = other DNA
aaccctaccgaaatttcactttttatctataaattcgttcccgaatcccg

SEQ ID NO: 40725 - DNA, 50 bp, synthetic construct
  source 1..50: mol_type = other DNA
ccctaccaaaatttcactttttatctataaattcattcccaaatcccaca

SEQ ID NO: 40726 - DNA, 50 bp, synthetic construct
  source 1..50: mol_type = other DNA
ccctaccgaaatttcactttttatctataaattcgttcccgaatcccgcg

SEQ ID NO: 40727 - DNA, 50 bp, synthetic construct
  source 1..50: mol_type = other DNA
ttaacaatcaaaaaacaaccaaacactacaaaataaaaactaactacaca

SEQ ID NO: 40728 - DNA, 50 bp, synthetic construct
  source 1..50: mol_type = other DNA
ttaacgatcgaaaaacaaccgaacgctacaaaataaaaactaactacacg

SEQ ID NO: 40729 - DNA, 50 bp, synthetic construct
  source 1..50: mol_type = other DNA
actacaaaataaaaactaactacacaacccaaaacacaaaacataaaaca

SEQ ID NO: 40730 - DNA, 50 bp, synthetic construct
  source 1..50: mol_type = other DNA
gctacaaaataaaaactaactacacgacccgaaacgcgaaacgtaaaacg

SEQ ID NO: 40731 - DNA, 50 bp, synthetic construct
  source 1..50: mol_type = other DNA
aataaaaactaactacacaacccaaaacacaaaacataaaacactaaaca

SEQ ID NO: 40732 - DNA, 50 bp, synthetic construct
  source 1..50: mol_type = other DNA
aataaaaactaactacacgacccgaaacgcgaaacgtaaaacgctaaacg

SEQ ID NO: 40733 - DNA, 50 bp, synthetic construct
  source 1..50: mol_type = other DNA
cctaaaatcaacacttttaaaaaaactctaaatccccctcccccataaca

SEQ ID NO: 40734 - DNA, 50 bp, synthetic construct
  source 1..50: mol_type = other DNA
cctaaaatcgacgcttttaaaaaaactctaaatccccctcccccataacg

SEQ ID NO: 40735 - DNA, 50 bp, synthetic construct
  source 1..50: mol_type = other DNA
tttttccaaaaacatcaaccccaaactaaacaaaattaaaaccttacaca

SEQ ID NO: 40736 - DNA, 50 bp, synthetic construct
  source 1..50: mol_type = other DNA
tttttccaaaaacgtcgaccccaaactaaacgaaattaaaaccttacgcg

SEQ ID NO: 40737 - DNA, 50 bp, synthetic construct
  source 1..50: mol_type = other DNA
tataacaactataattccacaaaaactctaaacaaataaacataacccca

SEQ ID NO: 40738 - DNA, 50 bp, synthetic construct
  source 1..50: mol_type = other DNA
tataacaactataattccgcgaaaactctaaacgaataaacgtaaccccg

SEQ ID NO: 40739 - DNA, 50 bp, synthetic construct
  source 1..50: mol_type = other DNA
ctttccactataacaactataattccacaaaaactctaaacaaataaaca

SEQ ID NO: 40740 - DNA, 50 bp, synthetic construct
  source 1..50: mol_type = other DNA
ctttccgctataacaactataattccgcgaaaactctaaacgaataaacg

SEQ ID NO: 40741 - DNA, 50 bp, synthetic construct
  source 1..50: mol_type = other DNA
tctaaaccctttccactataacaactataattccacaaaaactctaaaca

SEQ ID NO: 40742 - DNA, 50 bp, synthetic construct
  source 1..50: mol_type = other DNA
tctaaaccctttccgctataacaactataattccgcgaaaactctaaacg

SEQ ID NO: 40743 - DNA, 50 bp, synthetic construct
  source 1..50: mol_type = other DNA
aaaaaataaaaactaataaaaaaccaactacctataaaaactaaacatca

SEQ ID NO: 40744 - DNA, 50 bp, synthetic construct
  source 1..50: mol_type = other DNA
aaaaaataaaaactaataaaaaaccaactacctataaaaactaaacatcg

SEQ ID NO: 40745 - DNA, 50 bp, synthetic construct
  source 1..50: mol_type = other DNA
ttatatttaaacaattcatacacaaacaattctctttaattaaatatcca

SEQ ID NO: 40746 - DNA, 50 bp, synthetic construct
  source 1..50: mol_type = other DNA
ttatatttaaacgattcgtacacaaacaattctctttaattaaatatccg

SEQ ID NO: 40747 - DNA, 50 bp, synthetic construct
  source 1..50: mol_type = other DNA
cttcctataaaaaattatttaacactaacatcatcactctcctccaccca

SEQ ID NO: 40748 - DNA, 50 bp, synthetic construct
  source 1..50: mol_type = other DNA
cttcctataaaaaattatttaacgctaacatcatcactctcctccacccg

SEQ ID NO: 40749 - DNA, 50 bp, synthetic construct
  source 1..50: mol_type = other DNA
aaaacaaacaacataacatattttaaaaaatacttaactaaatatccaca

SEQ ID NO: 40750 - DNA, 50 bp, synthetic construct
  source 1..50: mol_type = other DNA
aaaacaaacaacataacatattttaaaaaatacttaactaaatatccacg

SEQ ID NO: 40751 - DNA, 50 bp, synthetic construct
  source 1..50: mol_type = other DNA
ttacaatattaaaaataacctctttttatttccctataataattaaatca

SEQ ID NO: 40752 - DNA, 50 bp, synthetic construct
  source 1..50: mol_type = other DNA
ttacaatattaaaaataacctctttttatttccctataataattaaatcg

SEQ ID NO: 40753 - DNA, 50 bp, synthetic construct
  source 1..50: mol_type = other DNA
caatattaaaaataacctctttttatttccctataataattaaatcaaca

SEQ ID NO: 40754 - DNA, 50 bp, synthetic construct
  source 1..50: mol_type = other DNA
caatattaaaaataacctctttttatttccctataataattaaatcgacg

SEQ ID NO: 40755 - DNA, 50 bp, synthetic construct
  source 1..50: mol_type = other DNA
tattattattacaaaaataaaaacatcattttcttaaaactatatctcca

SEQ ID NO: 40756 - DNA, 50 bp, synthetic construct
  source 1..50: mol_type = other DNA
tattattattacaaaaataaaaacgtcattttcttaaaactatatctccg

SEQ ID NO: 40757 - DNA, 50 bp, synthetic construct
  source 1..50: mol_type = other DNA
attagaattgtgataaataatgatgtttaaaagagaagagaaattagttt

SEQ ID NO: 40758 - DNA, 50 bp, synthetic construct
  source 1..50: mol_type = other DNA
attagaattgtgataaataatgatgtttaaaagagaagagaaattagttc

SEQ ID NO: 40759 - DNA, 50 bp, synthetic construct
  source 1..50: mol_type = other DNA
ttagttgggtattttttttagaagtagagaaaggtaaagttagagttatt

SEQ ID NO: 40760 - DNA, 50 bp, synthetic construct
  source 1..50: mol_type = other DNA
ttagttgggtattttttttagaagtagagaaaggtaaagttagagttatc

SEQ ID NO: 40761 - DNA, 50 bp, synthetic construct
  source 1..50: mol_type = other DNA
aaaaacacaaaacaaaatataaaaaaccataatttttaacaaaaacctca

SEQ ID NO: 40762 - DNA, 50 bp, synthetic construct
  source 1..50: mol_type = other DNA
aaaaacacgaaacaaaatataaaaaaccataatttttaacgaaaacctcg

SEQ ID NO: 40763 - DNA, 50 bp, synthetic construct
  source 1..50: mol_type = other DNA
tcacatcaactttttaaatataaaaaaccaaatataaatatactacttca

SEQ ID NO: 40764 - DNA, 50 bp, synthetic construct
  source 1..50: mol_type = other DNA
tcacatcaactttttaaatataaaaaaccaaatataaatatactacttcg

SEQ ID NO: 40765 - DNA, 50 bp, synthetic construct
  source 1..50: mol_type = other DNA
aacaaaatacaaaatataatctcataatacaccattttttaaacccatca

SEQ ID NO: 40766 - DNA, 50 bp, synthetic construct
  source 1..50: mol_type = other DNA
aacaaaatacgaaatataatctcgtaatacaccgttttttaaacccgtcg

SEQ ID NO: 40767 - DNA, 50 bp, synthetic construct
  source 1..50: mol_type = other DNA
acttaactacacaaaaaaacaaaacctattctcattaccaaaacctctca

SEQ ID NO: 40768 - DNA, 50 bp, synthetic construct
  source 1..50: mol_type = other DNA
acttaactacgcgaaaaaacgaaacctattctcattaccgaaacctctcg

SEQ ID NO: 40769 - DNA, 50 bp, synthetic construct
  source 1..50: mol_type = other DNA
ttccctctaaacccccataccataacaatacataaacaaaacaaacaaca

SEQ ID NO: 40770 - DNA, 50 bp, synthetic construct
  source 1..50: mol_type = other DNA
ttccctctaaacccccgtaccgtaacaatacataaacaaaacaaacaacg

SEQ ID NO: 40771 - DNA, 50 bp, synthetic construct
  source 1..50: mol_type = other DNA
aaaaaacaaaaaacaaaaccaaaaccaaacactaaccaaactaaaactca

SEQ ID NO: 40772 - DNA, 50 bp, synthetic construct
  source 1..50: mol_type = other DNA
aaaaaacgaaaaacgaaaccgaaaccaaacactaaccgaactaaaactcg

SEQ ID NO: 40773 - DNA, 50 bp, synthetic construct
  source 1..50: mol_type = other DNA
ctactttctcttatcacccaccaacataacaacactaaccacaaacaaca

SEQ ID NO: 40774 - DNA, 50 bp, synthetic construct
  source 1..50: mol_type = other DNA
ctactttctcttatcacccaccaacataacaacactaaccgcaaacaacg

SEQ ID NO: 40775 - DNA, 50 bp, synthetic construct
  source 1..50: mol_type = other DNA
ttctcaaaaacatactaccatttattccaccttacattcctctacaaaca

SEQ ID NO: 40776 - DNA, 50 bp, synthetic construct
  source 1..50: mol_type = other DNA
ttctcaaaaacatactaccatttattccaccttacgttcctctacgaacg

SEQ ID NO: 40777 - DNA, 50 bp, synthetic construct
  source 1..50: mol_type = other DNA
atattaaaaaatacaaattttaatcaacaattaaacaatttaaccacaca

SEQ ID NO: 40778 - DNA, 50 bp, synthetic construct
  source 1..50: mol_type = other DNA
atattaaaaaatacgaattttaatcgacaattaaacaatttaaccacacg

SEQ ID NO: 40779 - DNA, 50 bp, synthetic construct
  source 1..50: mol_type = other DNA
aattaactaaaacaactcccaaccaaaaacaaaataaataacaaaaacca

SEQ ID NO: 40780 - DNA, 50 bp, synthetic construct
  source 1..50: mol_type = other DNA
aattaactaaaacgactcccgaccgaaaacgaaataaataacgaaaaccg

SEQ ID NO: 40781 - DNA, 50 bp, synthetic construct
  source 1..50: mol_type = other DNA
aaaaaataattaactaaaacaactcccaaccaaaaacaaaataaataaca

SEQ ID NO: 40782 - DNA, 50 bp, synthetic construct
  source 1..50: mol_type = other DNA
aaaaaataattaactaaaacgactcccgaccgaaaacgaaataaataacg

SEQ ID NO: 40783 - DNA, 50 bp, synthetic construct
  source 1..50: mol_type = other DNA
ccacaaacactattctccttcctataccaaatataatttactatcaaaca

SEQ ID NO: 40784 - DNA, 50 bp, synthetic construct
  source 1..50: mol_type = other DNA
ccgcgaacgctattctccttcctataccgaatataatttactatcaaacg

SEQ ID NO: 40785 - DNA, 50 bp, synthetic construct
  source 1..50: mol_type = other DNA
taaaaaaaacacacccttactaatttcataaaaacccaaaaccacaaaca

SEQ ID NO: 40786 - DNA, 50 bp, synthetic construct
  source 1..50: mol_type = other DNA
taaaaaaaacgcgcccttactaatttcataaaaacccgaaaccgcgaacg

SEQ ID NO: 40787 - DNA, 50 bp, synthetic construct
  source 1..50: mol_type = other DNA
acaataaaaaaaacacacccttactaatttcataaaaacccaaaaccaca

SEQ ID NO: 40788 - DNA, 50 bp, synthetic construct
  source 1..50: mol_type = other DNA
acgataaaaaaaacgcgcccttactaatttcataaaaacccgaaaccgcg

SEQ ID NO: 40789 - DNA, 50 bp, synthetic construct
  source 1..50: mol_type = other DNA
caacaataaaaaaaacacacccttactaatttcataaaaacccaaaacca

SEQ ID NO: 40790 - DNA, 50 bp, synthetic construct
  source 1..50: mol_type = other DNA
cgacgataaaaaaaacgcgcccttactaatttcataaaaacccgaaaccg

SEQ ID NO: 40791 - DNA, 50 bp, synthetic construct
  source 1..50: mol_type = other DNA
aatcctaaacactaacaacaaaaaacaaaaccaacaaaaaactccctaca

SEQ ID NO: 40792 - DNA, 50 bp, synthetic construct
  source 1..50: mol_type = other DNA
aatcctaaacgctaacaacgaaaaacgaaaccgacaaaaaactccctacg

SEQ ID NO: 40793 - DNA, 50 bp, synthetic construct
  source 1..50: mol_type = other DNA
acacttaaaatctaataccttttcacataaaaacaaataaacaaaaaaca

SEQ ID NO: 40794 - DNA, 50 bp, synthetic construct
  source 1..50: mol_type = other DNA
acgcttaaaatctaataccttttcacgtaaaaacgaataaacgaaaaacg

SEQ ID NO: 40795 - DNA, 50 bp, synthetic construct
  source 1..50: mol_type = other DNA
ccaataaataaaacaaaatacaaactaccaaaaaacaaaaacccaaccca

SEQ ID NO: 40796 - DNA, 50 bp, synthetic construct
  source 1..50: mol_type = other DNA
ccaataaataaaacaaaatacaaactaccaaaaaacgaaaacccgacccg

SEQ ID NO: 40797 - DNA, 50 bp, synthetic construct
  source 1..50: mol_type = other DNA
aaaaacaaataaacaaaaaacaaatctaaaatcttcaaaccaaacctcca

SEQ ID NO: 40798 - DNA, 50 bp, synthetic construct
  source 1..50: mol_type = other DNA
aaaaacgaataaacgaaaaacgaatctaaaatcttcgaaccgaacctccg

SEQ ID NO: 40799 - DNA, 50 bp, synthetic construct
  source 1..50: mol_type = other DNA
taaaaccaaaaaaacacaaactcaaaaaccaactacaaattcctaaaaca

SEQ ID NO: 40800 - DNA, 50 bp, synthetic construct
  source 1..50: mol_type = other DNA
taaaaccgaaaaaacgcgaactcgaaaaccaactacaaattcctaaaacg

SEQ ID NO: 40801 - DNA, 50 bp, synthetic construct
  source 1..50: mol_type = other DNA
ctccaaaatttatattcaccaattataaaaaaaaacttctcaaccaaaca

SEQ ID NO: 40802 - DNA, 50 bp, synthetic construct
  source 1..50: mol_type = other DNA
ctccgaaatttatattcaccaattataaaaaaaaacttctcgaccgaacg

SEQ ID NO: 40803 - DNA, 50 bp, synthetic construct
  source 1..50: mol_type = other DNA
ccaaaatttatattcaccaattataaaaaaaaacttctcaaccaaacaca

SEQ ID NO: 40804 - DNA, 50 bp, synthetic construct
  source 1..50: mol_type = other DNA
ccgaaatttatattcaccaattataaaaaaaaacttctcgaccgaacgcg

SEQ ID NO: 40805 - DNA, 50 bp, synthetic construct
  source 1..50: mol_type = other DNA
taaaataatctaataccccacaacaaaaaaataacccaaccccacattca

SEQ ID NO: 40806 - DNA, 50 bp, synthetic construct
  source 1..50: mol_type = other DNA
taaaataatctaataccccacaacaaaaaaataacccaaccccgcgttcg

SEQ ID NO: 40807 - DNA, 50 bp, synthetic construct
  source 1..50: mol_type = other DNA
cttctccaaataaacaaactcaaacaaaattaaataataaaaaatcaaca

SEQ ID NO: 40808 - DNA, 50 bp, synthetic construct
  source 1..50: mol_type = other DNA
cttctccaaataaacgaactcgaacgaaattaaataataaaaaatcaacg

SEQ ID NO: 40809 - DNA, 50 bp, synthetic construct
  source 1..50: mol_type = other DNA
tccaaataaacaaactcaaacaaaattaaataataaaaaatcaacatcca

SEQ ID NO: 40810 - DNA, 50 bp, synthetic construct
  source 1..50: mol_type = other DNA
tccaaataaacgaactcgaacgaaattaaataataaaaaatcaacgtccg

SEQ ID NO: 40811 - DNA, 50 bp, synthetic construct
  source 1..50: mol_type = other DNA
caaataaacaaactcaaacaaaattaaataataaaaaatcaacatccaca

SEQ ID NO: 40812 - DNA, 50 bp, synthetic construct
  source 1..50: mol_type = other DNA
caaataaacgaactcgaacgaaattaaataataaaaaatcaacgtccgcg

SEQ ID NO: 40813 - DNA, 50 bp, synthetic construct
  source 1..50: mol_type = other DNA
aaacaaactcaaacaaaattaaataataaaaaatcaacatccacaaccca

SEQ ID NO: 40814 - DNA, 50 bp, synthetic construct
  source 1..50: mol_type = other DNA
aaacgaactcgaacgaaattaaataataaaaaatcaacgtccgcgacccg

SEQ ID NO: 40815 - DNA, 50 bp, synthetic construct
  source 1..50: mol_type = other DNA
caaaatatacccaacatacaaaaacaaataaaaaacccaaccacttccca

SEQ ID NO: 40816 - DNA, 50 bp, synthetic construct
  source 1..50: mol_type = other DNA
caaaatatacccaacatacaaaaacaaataaaaaacccaaccgcttcccg

SEQ ID NO: 40817 - DNA, 50 bp, synthetic construct
  source 1..50: mol_type = other DNA
ttatcctcaccctacctaaataaaaataaaaaacttcctaaaactactca

SEQ ID NO: 40818 - DNA, 50 bp, synthetic construct
  source 1..50: mol_type = other DNA
ttatcctcaccctacctaaataaaaataaaaaacttcctaaaactactcg

SEQ ID NO: 40819 - DNA, 50 bp, synthetic construct
  source 1..50: mol_type = other DNA
tcaacaacaaaatattatacaaatcccaataaaaacccatattattatca

SEQ ID NO: 40820 - DNA, 50 bp, synthetic construct
  source 1..50: mol_type = other DNA
tcgacgacgaaatattatacaaatcccgataaaaacccatattattatcg

SEQ ID NO: 40821 - DNA, 50 bp, synthetic construct
  source 1..50: mol_type = other DNA
tactacacaacaacaacataaacttctaccaaaacctatacaacacctca

SEQ ID NO: 40822 - DNA, 50 bp, synthetic construct
  source 1..50: mol_type = other DNA
tactacgcgacaacaacataaacttctaccgaaacctatacaacacctcg

SEQ ID NO: 40823 - DNA, 50 bp, synthetic construct
  source 1..50: mol_type = other DNA
attcttcccaaaaactaacaataataatattaatcacattaccatccaca

SEQ ID NO: 40824 - DNA, 50 bp, synthetic construct
  source 1..50: mol_type = other DNA
attcttcccaaaaactaacgataataatattaatcacgttaccgtccacg

SEQ ID NO: 40825 - DNA, 50 bp, synthetic construct
  source 1..50: mol_type = other DNA
cactaaaaaaaaattcttcccaaaaactaacaataataatattaatcaca

SEQ ID NO: 40826 - DNA, 50 bp, synthetic construct
  source 1..50: mol_type = other DNA
cgctaaaaaaaaattcttcccaaaaactaacgataataatattaatcacg

SEQ ID NO: 40827 - DNA, 50 bp, synthetic construct
  source 1..50: mol_type = other DNA
aacaaaaatctacaaaatcactaaaaaaaaattcttcccaaaaactaaca

SEQ ID NO: 40828 - DNA, 50 bp, synthetic construct
  source 1..50: mol_type = other DNA
aacgaaaatctacgaaatcgctaaaaaaaaattcttcccaaaaactaacg

SEQ ID NO: 40829 - DNA, 50 bp, synthetic construct
  source 1..50: mol_type = other DNA
tctccacttcctaaacataaaccaaaaccaattccaatacctaccaaaca

SEQ ID NO: 40830 - DNA, 50 bp, synthetic construct
  source 1..50: mol_type = other DNA
tctccgcttcctaaacataaaccaaaaccaattccaatacctaccaaacg

SEQ ID NO: 40831 - DNA, 50 bp, synthetic construct
  source 1..50: mol_type = other DNA
atccaactcaataaacactccaaaaaactcatactcccaaatataaaaca

SEQ ID NO: 40832 - DNA, 50 bp, synthetic construct
  source 1..50: mol_type = other DNA
atccaactcgataaacgctccgaaaaactcgtactcccgaatataaaacg

SEQ ID NO: 40833 - DNA, 50 bp, synthetic construct
  source 1..50: mol_type = other DNA
ccaaaaccaaatacaactccaacaactaattataactcaaatccaactca

SEQ ID NO: 40834 - DNA, 50 bp, synthetic construct
  source 1..50: mol_type = other DNA
ccgaaaccaaatacaactccgacaactaattataactcaaatccaactcg

SEQ ID NO: 40835 - DNA, 50 bp, synthetic construct
  source 1..50: mol_type = other DNA
cctaaacaacctacacttattcaacctaaactccaaccaactcctaaaca

SEQ ID NO: 40836 - DNA, 50 bp, synthetic construct
  source 1..50: mol_type = other DNA
cctaaacaacctacgcttattcaacctaaactccaaccaactcctaaacg

SEQ ID NO: 40837 - DNA, 50 bp, synthetic construct
  source 1..50: mol_type = other DNA
aactcatataattacattatcctttacaatttaccctcccctctccacca

SEQ ID NO: 40838 - DNA, 50 bp, synthetic construct
  source 1..50: mol_type = other DNA
aactcgtataattacattatcctttacgatttaccctcccctctccaccg

SEQ ID NO: 40839 - DNA, 50 bp, synthetic construct
  source 1..50: mol_type = other DNA
caaataacacattcaaacaaaaacaaatcaaaaaaatttacaaaaaaaca

SEQ ID NO: 40840 - DNA, 50 bp, synthetic construct
  source 1..50: mol_type = other DNA
caaataacacgttcaaacaaaaacaaatcaaaaaaatttacaaaaaaacg

SEQ ID NO: 40841 - DNA, 50 bp, synthetic construct
  source 1..50: mol_type = other DNA
aatctccctctatcacctaaactacaatacaataacataatctcccctca

SEQ ID NO: 40842 - DNA, 50 bp, synthetic construct
  source 1..50: mol_type = other DNA
aatctccctctatcgcctaaactacaatacaataacgtaatctcccctcg

SEQ ID NO: 40843 - DNA, 50 bp, synthetic construct
  source 1..50: mol_type = other DNA
aatacacacaaaacccctaaaccaactataaaaccaaacaaaacctaaca

SEQ ID NO: 40844 - DNA, 50 bp, synthetic construct
  source 1..50: mol_type = other DNA
aatacacgcaaaacccctaaaccgactataaaaccgaacgaaacctaacg

SEQ ID NO: 40845 - DNA, 50 bp, synthetic construct
  source 1..50: mol_type = other DNA
cctaaaccaactataaaaccaaacaaaacctaacactacaaaaaaaaaca

SEQ ID NO: 40846 - DNA, 50 bp, synthetic construct
  source 1..50: mol_type = other DNA
cctaaaccgactataaaaccgaacgaaacctaacgctacaaaaaaaaacg

SEQ ID NO: 40847 - DNA, 50 bp, synthetic construct
  source 1..50: mol_type = other DNA
cacaaaaacccttaaaaaccaaaactacaaacaactaaaaaccacaaaca

SEQ ID NO: 40848 - DNA, 50 bp, synthetic construct
  source 1..50: mol_type = other DNA
cgcgaaaacccttaaaaaccgaaactacaaacaactaaaaaccgcgaacg

SEQ ID NO: 40849 - DNA, 50 bp, synthetic construct
  source 1..50: mol_type = other DNA
acatactcaaaaataaattaacattaaataaaaactaacaacaaaataca

SEQ ID NO: 40850 - DNA, 50 bp, synthetic construct
  source 1..50: mol_type = other DNA
acgtactcaaaaataaattaacattaaataaaaactaacaacaaaatacg

SEQ ID NO: 40851 - DNA, 50 bp, synthetic construct
  source 1..50: mol_type = other DNA
aaaaaacacaaaacttaaactccaaaacaaaaaccacaaaccaaatcaca

SEQ ID NO: 40852 - DNA, 50 bp, synthetic construct
  source 1..50: mol_type = other DNA
aaaaaacgcgaaacttaaactccgaaacgaaaaccacaaaccaaatcacg

SEQ ID NO: 40853 - DNA, 50 bp, synthetic construct
  source 1..50: mol_type = other DNA
aaatcaataccttaaaaaactacaaacaaaacaaaaacaaaatacactca

SEQ ID NO: 40854 - DNA, 50 bp, synthetic construct
  source 1..50: mol_type = other DNA
aaatcgataccttaaaaaactacgaacgaaacgaaaacaaaatacactcg

SEQ ID NO: 40855 - DNA, 50 bp, synthetic construct
  source 1..50: mol_type = other DNA
ataaaaacaaaaaaaacctacttcatcaaaaaaaatactaaaaaatcaca

SEQ ID NO: 40856 - DNA, 50 bp, synthetic construct
  source 1..50: mol_type = other DNA
ataaaaacgaaaaaaacctacttcatcgaaaaaaatactaaaaaatcacg

SEQ ID NO: 40857 - DNA, 50 bp, synthetic construct
  source 1..50: mol_type = other DNA
acaaaaaaaacctttaatatccaaaaaccctcctctcaacacactcacca

SEQ ID NO: 40858 - DNA, 50 bp, synthetic construct
  source 1..50: mol_type = other DNA
acaaaaaaaacctttaatatccaaaaaccctcctctcaacacactcgccg

SEQ ID NO: 40859 - DNA, 50 bp, synthetic construct
  source 1..50: mol_type = other DNA
tccctaaaacaatcccaaaactcaaaaacatcaaaattttctaaccctca

SEQ ID NO: 40860 - DNA, 50 bp, synthetic construct
  source 1..50: mol_type = other DNA
tccctaaaacgatcccgaaactcaaaaacatcgaaattttctaaccctcg

SEQ ID NO: 40861 - DNA, 50 bp, synthetic construct
  source 1..50: mol_type = other DNA
ccaatactttcctcaactctacatctttcttccaactacttcttccttca

SEQ ID NO: 40862 - DNA, 50 bp, synthetic construct
  source 1..50: mol_type = other DNA
ccaatactttcctcgactctacatctttcttccaactacttcttccttcg

SEQ ID NO: 40863 - DNA, 50 bp, synthetic construct
  source 1..50: mol_type = other DNA
acataattaccaacataataaccataactctaaaaaaaacaaaccaaaca

SEQ ID NO: 40864 - DNA, 50 bp, synthetic construct
  source 1..50: mol_type = other DNA
acgtaattaccaacataataaccgtaactctaaaaaaaacgaaccgaacg

SEQ ID NO: 40865 - DNA, 50 bp, synthetic construct
  source 1..50: mol_type = other DNA
actctaaaaaaaacaaaccaaacaaaacaaacaactaaaaactactacca

SEQ ID NO: 40866 - DNA, 50 bp, synthetic construct
  source 1..50: mol_type = other DNA
actctaaaaaaaacgaaccgaacgaaacaaacaactaaaaactactaccg

SEQ ID NO: 40867 - DNA, 50 bp, synthetic construct
  source 1..50: mol_type = other DNA
tctaaaaaaaacaaaccaaacaaaacaaacaactaaaaactactaccaca

SEQ ID NO: 40868 - DNA, 50 bp, synthetic construct
  source 1..50: mol_type = other DNA
tctaaaaaaaacgaaccgaacgaaacaaacaactaaaaactactaccgcg

SEQ ID NO: 40869 - DNA, 50 bp, synthetic construct
  source 1..50: mol_type = other DNA
cctacttccctatcctctccttcaatccataaccaatccttatataaaca

SEQ ID NO: 40870 - DNA, 50 bp, synthetic construct
  source 1..50: mol_type = other DNA
cctacttccctatcctctccttcaatccgtaaccaatccttatataaacg

SEQ ID NO: 40871 - DNA, 50 bp, synthetic construct
  source 1..50: mol_type = other DNA
catcaccttaatcaaacaaaacttcaaccttattaccaccctccctaaca

SEQ ID NO: 40872 - DNA, 50 bp, synthetic construct
  source 1..50: mol_type = other DNA
catcaccttaatcaaacaaaacttcaaccttattaccgccctccctaacg

SEQ ID NO: 40873 - DNA, 50 bp, synthetic construct
  source 1..50: mol_type = other DNA
tcaacttttctcttacaataaactaaatacactcaaccaaaaaaaaacca

SEQ ID NO: 40874 - DNA, 50 bp, synthetic construct
  source 1..50: mol_type = other DNA
tcgacttttctcttacaataaactaaatacgctcaaccgaaaaaaaaccg

SEQ ID NO: 40875 - DNA, 50 bp, synthetic construct
  source 1..50: mol_type = other DNA
aacttttctcttacaataaactaaatacactcaaccaaaaaaaaaccaca

SEQ ID NO: 40876 - DNA, 50 bp, synthetic construct
  source 1..50: mol_type = other DNA
gacttttctcttacaataaactaaatacgctcaaccgaaaaaaaaccgcg

SEQ ID NO: 40877 - DNA, 50 bp, synthetic construct
  source 1..50: mol_type = other DNA
ttctcttacaataaactaaatacactcaaccaaaaaaaaaccacaccaca

SEQ ID NO: 40878 - DNA, 50 bp, synthetic construct
  source 1..50: mol_type = other DNA
ttctcttacaataaactaaatacgctcaaccgaaaaaaaaccgcgccgcg

SEQ ID NO: 40879 - DNA, 50 bp, synthetic construct
  source 1..50: mol_type = other DNA
aataaaaaaaacaaaacttactttacaaaacacaatacaaaacaccacca

SEQ ID NO: 40880 - DNA, 50 bp, synthetic construct
  source 1..50: mol_type = other DNA
aataaaaaaaacgaaacttactttacgaaacgcgatacaaaacgccgccg

SEQ ID NO: 40881 - DNA, 50 bp, synthetic construct
  source 1..50: mol_type = other DNA
aaccaaaatatctataattaaaaaaatccaaaaaatacaaactatataca

SEQ ID NO: 40882 - DNA, 50 bp, synthetic construct
  source 1..50: mol_type = other DNA
aaccgaaatatctataattaaaaaaatccaaaaaatacgaactatatacg

SEQ ID NO: 40883 - DNA, 50 bp, synthetic construct
  source 1..50: mol_type = other DNA
aatactccaaaaaccctcaaaaaaaccccaaccctaaactaaaaactcca

SEQ ID NO: 40884 - DNA, 50 bp, synthetic construct
  source 1..50: mol_type = other DNA
aatactccgaaaaccctcaaaaaaaccccgaccctaaactaaaaactccg

SEQ ID NO: 40885 - DNA, 50 bp, synthetic construct
  source 1..50: mol_type = other DNA
aaacacacaaaacttctaattcaaaaccaaaatcctcttaaaaattctca

SEQ ID NO: 40886 - DNA, 50 bp, synthetic construct
  source 1..50: mol_type = other DNA
aaacacgcgaaacttctaattcaaaaccgaaatcctcttaaaaattctcg

SEQ ID NO: 40887 - DNA, 50 bp, synthetic construct
  source 1..50: mol_type = other DNA
actacttaaaaaataaaccaacaatccccaaaactcacaaattccctaca

SEQ ID NO: 40888 - DNA, 50 bp, synthetic construct
  source 1..50: mol_type = other DNA
actacttaaaaaataaaccaacgatccccaaaactcgcgaattccctacg

SEQ ID NO: 40889 - DNA, 50 bp, synthetic construct
  source 1..50: mol_type = other DNA
ccaaaatcaaaattcctaaaaaaatacctaaaaaatcaaaataaaaatca

SEQ ID NO: 40890 - DNA, 50 bp, synthetic construct
  source 1..50: mol_type = other DNA
ccaaaatcaaaattcctaaaaaaatacctaaaaaatcgaaataaaaatcg

SEQ ID NO: 40891 - DNA, 50 bp, synthetic construct
  source 1..50: mol_type = other DNA
attaaccttactcactatataataaaaaaactaattacaaaaaaaaacca

SEQ ID NO: 40892 - DNA, 50 bp, synthetic construct
  source 1..50: mol_type = other DNA
attaaccttactcgctatataataaaaaaactaattacgaaaaaaaaccg

SEQ ID NO: 40893 - DNA, 50 bp, synthetic construct
  source 1..50: mol_type = other DNA
aaaaacttaacttatcccacccctataccaacacaaaaaaccaaaacaca

SEQ ID NO: 40894 - DNA, 50 bp, synthetic construct
  source 1..50: mol_type = other DNA
aaaaacttaacttatcccacccctataccaacgcgaaaaaccaaaacgcg

SEQ ID NO: 40895 - DNA, 50 bp, synthetic construct
  source 1..50: mol_type = other DNA
caaaaataaaacaaaccaaatttccaaaaaactcacccaacacaaaccca

SEQ ID NO: 40896 - DNA, 50 bp, synthetic construct
  source 1..50: mol_type = other DNA
caaaaataaaacaaaccaaatttccaaaaaactcgcccaacgcgaacccg

SEQ ID NO: 40897 - DNA, 50 bp, synthetic construct
  source 1..50: mol_type = other DNA
aaacaataatcaaaaaaaacccaactctaaaataaaaatctaaaacaaca

SEQ ID NO: 40898 - DNA, 50 bp, synthetic construct
  source 1..50: mol_type = other DNA
aaacaataatcaaaaaaaacccgactctaaaataaaaatctaaaacgacg

SEQ ID NO: 40899 - DNA, 50 bp, synthetic construct
  source 1..50: mol_type = other DNA
acaataatcaaaaaaaacccaactctaaaataaaaatctaaaacaacaca

SEQ ID NO: 40900 - DNA, 50 bp, synthetic construct
  source 1..50: mol_type = other DNA
acaataatcaaaaaaaacccgactctaaaataaaaatctaaaacgacgcg

SEQ ID NO: 40901 - DNA, 50 bp, synthetic construct
  source 1..50: mol_type = other DNA
aacccaactctaaaataaaaatctaaaacaacacaaccaaaaaacctaca

SEQ ID NO: 40902 - DNA, 50 bp, synthetic construct
  source 1..50: mol_type = other DNA
aacccgactctaaaataaaaatctaaaacgacgcgaccgaaaaacctacg

SEQ ID NO: 40903 - DNA, 50 bp, synthetic construct
  source 1..50: mol_type = other DNA
tctaaaataaaaatctaaaacaacacaaccaaaaaacctacataaataca

SEQ ID NO: 40904 - DNA, 50 bp, synthetic construct
  source 1..50: mol_type = other DNA
tctaaaataaaaatctaaaacgacgcgaccgaaaaacctacgtaaatacg

SEQ ID NO: 40905 - DNA, 50 bp, synthetic construct
  source 1..50: mol_type = other DNA
aaataaaaatctaaaacaacacaaccaaaaaacctacataaatacaaaca

SEQ ID NO: 40906 - DNA, 50 bp, synthetic construct
  source 1..50: mol_type = other DNA
aaataaaaatctaaaacgacgcgaccgaaaaacctacgtaaatacgaacg

SEQ ID NO: 40907 - DNA, 50 bp, synthetic construct
  source 1..50: mol_type = other DNA
aaccctaaatataaacatataaatatatacataaacataaacccaaaaca

SEQ ID NO: 40908 - DNA, 50 bp, synthetic construct
  source 1..50: mol_type = other DNA
aaccctaaatataaacgtataaatatatacataaacgtaaacccgaaacg

SEQ ID NO: 40909 - DNA, 50 bp, synthetic construct
  source 1..50: mol_type = other DNA
aaccaaaaaaacaaaccctaaatataaacatataaatatatacataaaca

SEQ ID NO: 40910 - DNA, 50 bp, synthetic construct
  source 1..50: mol_type = other DNA
aaccgaaaaaacaaaccctaaatataaacgtataaatatatacataaacg

SEQ ID NO: 40911 - DNA, 50 bp, synthetic construct
  source 1..50: mol_type = other DNA
actccacaaaaattcacacaaaccaaaaaaacaaaccctaaatataaaca

SEQ ID NO: 40912 - DNA, 50 bp, synthetic construct
  source 1..50: mol_type = other DNA
actccgcgaaaattcacgcaaaccgaaaaaacaaaccctaaatataaacg

SEQ ID NO: 40913 - DNA, 50 bp, synthetic construct
  source 1..50: mol_type = other DNA
taaatactttaaaaaatccaaacaaactccacaaaaattcacacaaacca

SEQ ID NO: 40914 - DNA, 50 bp, synthetic construct
  source 1..50: mol_type = other DNA
taaatactttaaaaaatccaaacaaactccgcgaaaattcacgcaaaccg

SEQ ID NO: 40915 - DNA, 50 bp, synthetic construct
  source 1..50: mol_type = other DNA
actcaaaaccaaatcaaaaataaactacaaaatcccccaacccaaacaca

SEQ ID NO: 40916 - DNA, 50 bp, synthetic construct
  source 1..50: mol_type = other DNA
actcgaaaccaaatcaaaaataaactacaaaatcccccaacccgaacacg

SEQ ID NO: 40917 - DNA, 50 bp, synthetic construct
  source 1..50: mol_type = other DNA
aaaacctaaactccctataccaaaaccaaaaacaaacacaccctaaaaca

SEQ ID NO: 40918 - DNA, 50 bp, synthetic construct
  source 1..50: mol_type = other DNA
aaaacctaaactccctataccaaaaccgaaaacaaacgcaccctaaaacg

SEQ ID NO: 40919 - DNA, 50 bp, synthetic construct
  source 1..50: mol_type = other DNA
aaacaatacctacttaaaatattaactaaactaaaaaaacaaacaaaaca

SEQ ID NO: 40920 - DNA, 50 bp, synthetic construct
  source 1..50: mol_type = other DNA
aaacgatacctacttaaaatattaactaaactaaaaaaacaaacaaaacg

SEQ ID NO: 40921 - DNA, 50 bp, synthetic construct
  source 1..50: mol_type = other DNA
aaatctacaataaaaaataaaacccatcccaaaaactacaaataaaaaca

SEQ ID NO: 40922 - DNA, 50 bp, synthetic construct
  source 1..50: mol_type = other DNA
aaatctacgataaaaaataaaacccatcccgaaaactacgaataaaaacg

SEQ ID NO: 40923 - DNA, 50 bp, synthetic construct
  source 1..50: mol_type = other DNA
aaaaacctaaaaatctacaataaaaaataaaacccatcccaaaaactaca

SEQ ID NO: 40924 - DNA, 50 bp, synthetic construct
  source 1..50: mol_type = other DNA
aaaaacctaaaaatctacgataaaaaataaaacccatcccgaaaactacg

SEQ ID NO: 40925 - DNA, 50 bp, synthetic construct
  source 1..50: mol_type = other DNA
tctaaaatacctaaaaatactcaccaaataacaaaaacaaaaactaacca

SEQ ID NO: 40926 - DNA, 50 bp, synthetic construct
  source 1..50: mol_type = other DNA
tctaaaatacctaaaaatactcaccgaataacaaaaacgaaaactaaccg

SEQ ID NO: 40927 - DNA, 50 bp, synthetic construct
  source 1..50: mol_type = other DNA
gtttatagagagatgtttttttatttaagaaaaggtagtgatgtttaggt

SEQ ID NO: 40928 - DNA, 50 bp, synthetic construct
  source 1..50: mol_type = other DNA
gtttatagagagatgtttttttatttaagaaaaggtagtgacgtttaggc

SEQ ID NO: 40929 - DNA, 50 bp, synthetic construct
  source 1..50: mol_type = other DNA
tctaccatccaataaatatttccaaacacctcaaaccaaacacctaaaca

SEQ ID NO: 40930 - DNA, 50 bp, synthetic construct
  source 1..50: mol_type = other DNA
tctaccatccgataaatatttccaaacacctcaaaccaaacgcctaaacg

SEQ ID NO: 40931 - DNA, 50 bp, synthetic construct
  source 1..50: mol_type = other DNA
tttcccataccctacactccaataactcatactctaacttaaaatcacca

SEQ ID NO: 40932 - DNA, 50 bp, synthetic construct
  source 1..50: mol_type = other DNA
tttcccgtaccctacactccaataactcatactctaacttaaaatcaccg

SEQ ID NO: 40933 - DNA, 50 bp, synthetic construct
  source 1..50: mol_type = other DNA
tcaccaaaaatcatttataaaaataaaattaaaccaactcttcaacctca

SEQ ID NO: 40934 - DNA, 50 bp, synthetic construct
  source 1..50: mol_type = other DNA
tcaccgaaaatcatttataaaaataaaattaaaccgactcttcgacctcg

SEQ ID NO: 40935 - DNA, 50 bp, synthetic construct
  source 1..50: mol_type = other DNA
aacccaacaaattaaccaaaaataaaccaatcccctaaacaacaacacca

SEQ ID NO: 40936 - DNA, 50 bp, synthetic construct
  source 1..50: mol_type = other DNA
aacccaacgaattaaccgaaaataaaccaatcccctaaacaacaacgccg

SEQ ID NO: 40937 - DNA, 50 bp, synthetic construct
  source 1..50: mol_type = other DNA
aaccaaacaatctaaaacactaaattaaaactccaatctcttcaaaaaca

SEQ ID NO: 40938 - DNA, 50 bp, synthetic construct
  source 1..50: mol_type = other DNA
aaccgaacgatctaaaacgctaaattaaaactccaatctcttcgaaaacg

SEQ ID NO: 40939 - DNA, 50 bp, synthetic construct
  source 1..50: mol_type = other DNA
ttttccccaaacaacaaatccaaacctaaaaactacccaaaaaaaacaca

SEQ ID NO: 40940 - DNA, 50 bp, synthetic construct
  source 1..50: mol_type = other DNA
ttttccccgaacaacaaatccgaacctaaaaactacccaaaaaaaacgcg

SEQ ID NO: 40941 - DNA, 50 bp, synthetic construct
  source 1..50: mol_type = other DNA
acaaaaatatactaaacatattcaacacaaatctaaacctatcaacaaca

SEQ ID NO: 40942 - DNA, 50 bp, synthetic construct
  source 1..50: mol_type = other DNA
acgaaaatatactaaacgtattcgacgcgaatctaaacctatcgacgacg

SEQ ID NO: 40943 - DNA, 50 bp, synthetic construct
  source 1..50: mol_type = other DNA
tcaacaaaaatatactaaacatattcaacacaaatctaaacctatcaaca

SEQ ID NO: 40944 - DNA, 50 bp, synthetic construct
  source 1..50: mol_type = other DNA
tcaacgaaaatatactaaacgtattcgacgcgaatctaaacctatcgacg

SEQ ID NO: 40945 - DNA, 50 bp, synthetic construct
  source 1..50: mol_type = other DNA
ccttcaacaaaaatatactaaacatattcaacacaaatctaaacctatca

SEQ ID NO: 40946 - DNA, 50 bp, synthetic construct
  source 1..50: mol_type = other DNA
ccttcaacgaaaatatactaaacgtattcgacgcgaatctaaacctatcg

SEQ ID NO: 40947 - DNA, 50 bp, synthetic construct
  source 1..50: mol_type = other DNA
aaaaaccaaaactaaccttcaacaaaaatatactaaacatattcaacaca

SEQ ID NO: 40948 - DNA, 50 bp, synthetic construct
  source 1..50: mol_type = other DNA
aaaaaccaaaactaaccttcaacgaaaatatactaaacgtattcgacgcg

SEQ ID NO: 40949 - DNA, 50 bp, synthetic construct
  source 1..50: mol_type = other DNA
aacaaaaaaaccaaaactaaccttcaacaaaaatatactaaacatattca

SEQ ID NO: 40950 - DNA, 50 bp, synthetic construct
  source 1..50: mol_type = other DNA
aacgaaaaaaccaaaactaaccttcaacgaaaatatactaaacgtattcg

SEQ ID NO: 40951 - DNA, 50 bp, synthetic construct
  source 1..50: mol_type = other DNA
aaaaataacaaaaaaaccaaaactaaccttcaacaaaaatatactaaaca

SEQ ID NO: 40952 - DNA, 50 bp, synthetic construct
  source 1..50: mol_type = other DNA
aaaaataacgaaaaaaccaaaactaaccttcaacgaaaatatactaaacg

SEQ ID NO: 40953 - DNA, 50 bp, synthetic construct
  source 1..50: mol_type = other DNA
aaaaacaaaaacatcaatactcaacactactccaaatcaaaaataacaca

SEQ ID NO: 40954 - DNA, 50 bp, synthetic construct
  source 1..50: mol_type = other DNA
aaaaacgaaaacgtcaatactcgacgctactccgaatcaaaaataacgcg

SEQ ID NO: 40955 - DNA, 50 bp, synthetic construct
  source 1..50: mol_type = other DNA
cacaaatcacaaactactattctttcaaaaacatcaaaaaaccaaaaaca

SEQ ID NO: 40956 - DNA, 50 bp, synthetic construct
  source 1..50: mol_type = other DNA
cgcaaatcgcgaactactattctttcgaaaacgtcgaaaaaccaaaaacg

SEQ ID NO: 40957 - DNA, 50 bp, synthetic construct
  source 1..50: mol_type = other DNA
ttaaaataacaacataaccaaaaaaaacaataaacaaaataaacccccca

SEQ ID NO: 40958 - DNA, 50 bp, synthetic construct
  source 1..50: mol_type = other DNA
ttaaaataacaacgtaaccgaaaaaaacgataaacgaaataaaccccccg

SEQ ID NO: 40959 - DNA, 50 bp, synthetic construct
  source 1..50: mol_type = other DNA
aaacatatatacacaaatcctaaaacatttacaaacccaaatccaaaaca

SEQ ID NO: 40960 - DNA, 50 bp, synthetic construct
  source 1..50: mol_type = other DNA
aaacatatatacgcaaatcctaaaacgtttacaaacccgaatccgaaacg

SEQ ID NO: 40961 - DNA, 50 bp, synthetic construct
  source 1..50: mol_type = other DNA
aaaaaaaacatatatacacaaatcctaaaacatttacaaacccaaatcca

SEQ ID NO: 40962 - DNA, 50 bp, synthetic construct
  source 1..50: mol_type = other DNA
gaaaaaaacatatatacgcaaatcctaaaacgtttacaaacccgaatccg

SEQ ID NO: 40963 - DNA, 50 bp, synthetic construct
  source 1..50: mol_type = other DNA
atatccaaaaaaaacatatatacacaaatcctaaaacatttacaaaccca

SEQ ID NO: 40964 - DNA, 50 bp, synthetic construct
  source 1..50: mol_type = other DNA
atatccgaaaaaaacatatatacgcaaatcctaaaacgtttacaaacccg

SEQ ID NO: 40965 - DNA, 50 bp, synthetic construct
  source 1..50: mol_type = other DNA
atttaaaactttatatccaaaaaaaacatatatacacaaatcctaaaaca

SEQ ID NO: 40966 - DNA, 50 bp, synthetic construct
  source 1..50: mol_type = other DNA
atttaaaactttatatccgaaaaaaacatatatacgcaaatcctaaaacg

SEQ ID NO: 40967 - DNA, 50 bp, synthetic construct
  source 1..50: mol_type = other DNA
ccaaaatttacatacatatactcctcccaaatataaaaccccaaaccaca

SEQ ID NO: 40968 - DNA, 50 bp, synthetic construct
  source 1..50: mol_type = other DNA
ccaaaatttacgtacatatactcctcccgaatataaaaccccaaaccacg

SEQ ID NO: 40969 - DNA, 50 bp, synthetic construct
  source 1..50: mol_type = other DNA
aaaaacaaaaccctcctccccttatttataaaaaacaccaaaacaaatca

SEQ ID NO: 40970 - DNA, 50 bp, synthetic construct
  source 1..50: mol_type = other DNA
gaaaacaaaaccctcctccccttatttataaaaaacgccgaaacgaatcg

SEQ ID NO: 40971 - DNA, 50 bp, synthetic construct
  source 1..50: mol_type = other DNA
aaaacaaaaacaaaaccctcctccccttatttataaaaaacaccaaaaca

SEQ ID NO: 40972 - DNA, 50 bp, synthetic construct
  source 1..50: mol_type = other DNA
aaaacgaaaacaaaaccctcctccccttatttataaaaaacgccgaaacg

SEQ ID NO: 40973 - DNA, 50 bp, synthetic construct
  source 1..50: mol_type = other DNA
ctacaaaaacaaaaacaaaaccctcctccccttatttataaaaaacacca

SEQ ID NO: 40974 - DNA, 50 bp, synthetic construct
  source 1..50: mol_type = other DNA
ctacgaaaacgaaaacaaaaccctcctccccttatttataaaaaacgccg

SEQ ID NO: 40975 - DNA, 50 bp, synthetic construct
  source 1..50: mol_type = other DNA
aaacaacacaaaaacaacaacaataacaataccactaataaaatcataca

SEQ ID NO: 40976 - DNA, 50 bp, synthetic construct
  source 1..50: mol_type = other DNA
aaacaacacgaaaacgacgacgataacaataccgctaataaaatcatacg

SEQ ID NO: 40977 - DNA, 50 bp, synthetic construct
  source 1..50: mol_type = other DNA
aataatcaaaaaacacaaacaacacaaaaacaacaacaataacaatacca

SEQ ID NO: 40978 - DNA, 50 bp, synthetic construct
  source 1..50: mol_type = other DNA
aataatcgaaaaacgcaaacaacacgaaaacgacgacgataacaataccg

SEQ ID NO: 40979 - DNA, 50 bp, synthetic construct
  source 1..50: mol_type = other DNA
tacccttaaaaactataaaccacataactctatcaacaacactaccacca

SEQ ID NO: 40980 - DNA, 50 bp, synthetic construct
  source 1..50: mol_type = other DNA
tacccttaaaaactataaaccgcataactctatcaacgacactaccaccg

SEQ ID NO: 40981 - DNA, 50 bp, synthetic construct
  source 1..50: mol_type = other DNA
aaaaaacacctaccaaacccaatcaataatcaaaaaacacaaacaacaca

SEQ ID NO: 40982 - DNA, 50 bp, synthetic construct
  source 1..50: mol_type = other DNA
aaaaaacgcctaccgaacccaatcaataatcgaaaaacgcaaacaacacg

SEQ ID NO: 40983 - DNA, 50 bp, synthetic construct
  source 1..50: mol_type = other DNA
aaaaaacccccaaaaaacacctaccaaacccaatcaataatcaaaaaaca

SEQ ID NO: 40984 - DNA, 50 bp, synthetic construct
  source 1..50: mol_type = other DNA
aaaaaacccccaaaaaacgcctaccgaacccaatcaataatcgaaaaacg

SEQ ID NO: 40985 - DNA, 50 bp, synthetic construct
  source 1..50: mol_type = other DNA
aaatcccaaaaactaaaaccaataaaaaaacccccaaaaaacacctacca

SEQ ID NO: 40986 - DNA, 50 bp, synthetic construct
  source 1..50: mol_type = other DNA
gaatcccaaaaactaaaaccgataaaaaaacccccaaaaaacgcctaccg

SEQ ID NO: 40987 - DNA, 50 bp, synthetic construct
  source 1..50: mol_type = other DNA
cactcccaaatcccaaaaactaaaaccaataaaaaaacccccaaaaaaca

SEQ ID NO: 40988 - DNA, 50 bp, synthetic construct
  source 1..50: mol_type = other DNA
cgctcccgaatcccaaaaactaaaaccgataaaaaaacccccaaaaaacg

SEQ ID NO: 40989 - DNA, 50 bp, synthetic construct
  source 1..50: mol_type = other DNA
cttaaaattcaaaaacaccctactaaaaaaccaaaaccccacaaaaacca

SEQ ID NO: 40990 - DNA, 50 bp, synthetic construct
  source 1..50: mol_type = other DNA
cttaaaattcgaaaacgccctactaaaaaaccaaaaccccgcaaaaaccg

SEQ ID NO: 40991 - DNA, 50 bp, synthetic construct
  source 1..50: mol_type = other DNA
aattaacaacaacaaaaaaaaacacatccaaacctcacaaaaactaatca

SEQ ID NO: 40992 - DNA, 50 bp, synthetic construct
  source 1..50: mol_type = other DNA
aattaacgacaacgaaaaaaaacacatccgaacctcgcaaaaactaatcg

SEQ ID NO: 40993 - DNA, 50 bp, synthetic construct
  source 1..50: mol_type = other DNA
caaaaaaaaacacatccaaacctcacaaaaactaatcaaccaaaaaacca

SEQ ID NO: 40994 - DNA, 50 bp, synthetic construct
  source 1..50: mol_type = other DNA
cgaaaaaaaacacatccgaacctcgcaaaaactaatcgaccgaaaaaccg

SEQ ID NO: 40995 - DNA, 50 bp, synthetic construct
  source 1..50: mol_type = other DNA
aaattttaaaaatttataaaaattcccctccaattcacattcccacccca

SEQ ID NO: 40996 - DNA, 50 bp, synthetic construct
  source 1..50: mol_type = other DNA
aaattttaaaaatttataaaaattcccctccgattcgcgttcccgccccg

SEQ ID NO: 40997 - DNA, 50 bp, synthetic construct
  source 1..50: mol_type = other DNA
attaaaaattttaaaaatttataaaaattcccctccaattcacattccca

SEQ ID NO: 40998 - DNA, 50 bp, synthetic construct
  source 1..50: mol_type = other DNA
attaaaaattttaaaaatttataaaaattcccctccgattcgcgttcccg

SEQ ID NO: 40999 - DNA, 50 bp, synthetic construct
  source 1..50: mol_type = other DNA
actaaaattaaaaattttaaaaatttataaaaattcccctccaattcaca

SEQ ID NO: 41000 - DNA, 50 bp, synthetic construct
  source 1..50: mol_type = other DNA
actaaaattaaaaattttaaaaatttataaaaattcccctccgattcgcg

SEQ ID NO: 41001 - DNA, 50 bp, synthetic construct
  source 1..50: mol_type = other DNA
aacataatacacatacaccaaaaaaaaaatcatacttctaaaactactca

SEQ ID NO: 41002 - DNA, 50 bp, synthetic construct
  source 1..50: mol_type = other DNA
aacataatacacatacaccaaaaaaaaaatcatacttctaaaactactcg

SEQ ID NO: 41003 - DNA, 50 bp, synthetic construct
  source 1..50: mol_type = other DNA
aaaaacaacaaaaaaaacactaaaacaataaaactctacctacaataaca

SEQ ID NO: 41004 - DNA, 50 bp, synthetic construct
  source 1..50: mol_type = other DNA
aaaaacaacgaaaaaaacgctaaaacaataaaactctacctacaataacg

SEQ ID NO: 41005 - DNA, 50 bp, synthetic construct
  source 1..50: mol_type = other DNA
aaaaaaagtttattgatttaaaataattggagaggggataagaaataaat

SEQ ID NO: 41006 - DNA, 50 bp, synthetic construct
  source 1..50: mol_type = other DNA
aaaaaaagtttatcgatttaaaataattggagaggggataagaaataaac

SEQ ID NO: 41007 - DNA, 50 bp, synthetic construct
  source 1..50: mol_type = other DNA
ttcctaataacaaaaaacaaataaacccacttaaaaaacaaaaactaaca

SEQ ID NO: 41008 - DNA, 50 bp, synthetic construct
  source 1..50: mol_type = other DNA
ttcctaataacaaaaaacaaataaacccacttaaaaaacgaaaactaacg

SEQ ID NO: 41009 - DNA, 50 bp, synthetic construct
  source 1..50: mol_type = other DNA
cttaaatatcaataactacaaccaaaatctaaacctaaacaacaacccca

SEQ ID NO: 41010 - DNA, 50 bp, synthetic construct
  source 1..50: mol_type = other DNA
cttaaatatcgataactacgaccaaaatctaaacctaaacgacgaccccg

SEQ ID NO: 41011 - DNA, 50 bp, synthetic construct
  source 1..50: mol_type = other DNA
aaaaaaatttcaaactacctcaacactcacccaaataaaaaaataaacca

SEQ ID NO: 41012 - DNA, 50 bp, synthetic construct
  source 1..50: mol_type = other DNA
aaaaaaatttcgaactacctcgacactcgcccaaataaaaaaataaaccg

SEQ ID NO: 41013 - DNA, 50 bp, synthetic construct
  source 1..50: mol_type = other DNA
aaccaaaaattaaaaatcaataacaaaatctaaaaaaaccataacaatca

SEQ ID NO: 41014 - DNA, 50 bp, synthetic construct
  source 1..50: mol_type = other DNA
aaccgaaaattaaaaatcaataacaaaatctaaaaaaaccataacaatcg

SEQ ID NO: 41015 - DNA, 50 bp, synthetic construct
  source 1..50: mol_type = other DNA
taatataaaatcaattaaccaaaaacaaaaaaaccttaaaacaaccccca

SEQ ID NO: 41016 - DNA, 50 bp, synthetic construct
  source 1..50: mol_type = other DNA
taatataaaatcgattaaccgaaaacgaaaaaaccttaaaacaacccccg

SEQ ID NO: 41017 - DNA, 50 bp, synthetic construct
  source 1..50: mol_type = other DNA
taaacaaaactacaaaaaataacaccaaaaaatcccaactaaaaacacca

SEQ ID NO: 41018 - DNA, 50 bp, synthetic construct
  source 1..50: mol_type = other DNA
taaacgaaactacgaaaaataacgccgaaaaatcccgactaaaaacgccg

SEQ ID NO: 41019 - DNA, 50 bp, synthetic construct
  source 1..50: mol_type = other DNA
caccaataaactataaaaacttaaattaaacaaaactacaaaaaataaca

SEQ ID NO: 41020 - DNA, 50 bp, synthetic construct
  source 1..50: mol_type = other DNA
cgccaataaactataaaaacttaaattaaacgaaactacgaaaaataacg

SEQ ID NO: 41021 - DNA, 50 bp, synthetic construct
  source 1..50: mol_type = other DNA
gtagtatttgtttatgaggtaggattttggttttatttataattattatt

SEQ ID NO: 41022 - DNA, 50 bp, synthetic construct
  source 1..50: mol_type = other DNA
gtagtatttgtttacgaggtaggattttggttttatttataattattatc

SEQ ID NO: 41023 - DNA, 50 bp, synthetic construct
  source 1..50: mol_type = other DNA
cacaactaattacacaacaaaaaccccacaatataaaaaaaacctaaaca

SEQ ID NO: 41024 - DNA, 50 bp, synthetic construct
  source 1..50: mol_type = other DNA
cacgactaattacgcaacaaaaaccccgcaatataaaaaaaacctaaacg

SEQ ID NO: 41025 - DNA, 50 bp, synthetic construct
  source 1..50: mol_type = other DNA
ttaaaatataccaatttaccctataaaccaatacccccaacccaaaacca

SEQ ID NO: 41026 - DNA, 50 bp, synthetic construct
  source 1..50: mol_type = other DNA
ttaaaatataccaatttaccctataaaccaatacccccgacccgaaaccg

SEQ ID NO: 41027 - DNA, 50 bp, synthetic construct
  source 1..50: mol_type = other DNA
aaacaacacacaacaaataaaaacaaccaaaactacataacaaaaccaca

SEQ ID NO: 41028 - DNA, 50 bp, synthetic construct
  source 1..50: mol_type = other DNA
aaacaacacgcaacaaataaaaacgaccaaaactacataacgaaaccgcg

SEQ ID NO: 41029 - DNA, 50 bp, synthetic construct
  source 1..50: mol_type = other DNA
caaaacaacacacaacaaataaaaacaaccaaaactacataacaaaacca

SEQ ID NO: 41030 - DNA, 50 bp, synthetic construct
  source 1..50: mol_type = other DNA
cgaaacaacacgcaacaaataaaaacgaccaaaactacataacgaaaccg

SEQ ID NO: 41031 - DNA, 50 bp, synthetic construct
  source 1..50: mol_type = other DNA
tatccccaaaacaacacacaacaaataaaaacaaccaaaactacataaca

SEQ ID NO: 41032 - DNA, 50 bp, synthetic construct
  source 1..50: mol_type = other DNA
tatccccgaaacaacacgcaacaaataaaaacgaccaaaactacataacg

SEQ ID NO: 41033 - DNA, 50 bp, synthetic construct
  source 1..50: mol_type = other DNA
acaatccttcctatctttatccccaaaacaacacacaacaaataaaaaca

SEQ ID NO: 41034 - DNA, 50 bp, synthetic construct
  source 1..50: mol_type = other DNA
acgatccttcctatctttatccccgaaacaacacgcaacaaataaaaacg

SEQ ID NO: 41035 - DNA, 50 bp, synthetic construct
  source 1..50: mol_type = other DNA
aaaactctaaaaaaatatttttccaataaaaaccatttcattctactaca

SEQ ID NO: 41036 - DNA, 50 bp, synthetic construct
  source 1..50: mol_type = other DNA
aaaactctaaaaaaatatttttccaataaaaaccgtttcgttctactacg

SEQ ID NO: 41037 - DNA, 50 bp, synthetic construct
  source 1..50: mol_type = other DNA
tcaaaatttaaaaacaaaactctaaaaaaatatttttccaataaaaacca

SEQ ID NO: 41038 - DNA, 50 bp, synthetic construct
  source 1..50: mol_type = other DNA
tcgaaatttaaaaacaaaactctaaaaaaatatttttccaataaaaaccg

SEQ ID NO: 41039 - DNA, 50 bp, synthetic construct
  source 1..50: mol_type = other DNA
ctacaataactaactttaaaaccttaaaccaacacttaaccccaaaacca

SEQ ID NO: 41040 - DNA, 50 bp, synthetic construct
  source 1..50: mol_type = other DNA
ctacaataactaactttaaaaccttaaaccgacgcttaaccccaaaaccg

SEQ ID NO: 41041 - DNA, 50 bp, synthetic construct
  source 1..50: mol_type = other DNA
aactccaaaacttttctaataaaataaccacaacccccactccctaatca

SEQ ID NO: 41042 - DNA, 50 bp, synthetic construct
  source 1..50: mol_type = other DNA
aactccaaaacttttctaataaaataaccgcgacccccactccctaatcg

SEQ ID NO: 41043 - DNA, 50 bp, synthetic construct
  source 1..50: mol_type = other DNA
aaaacaaaaaactcccaaaactccaaaacttttctaataaaataaccaca

SEQ ID NO: 41044 - DNA, 50 bp, synthetic construct
  source 1..50: mol_type = other DNA
aaaacgaaaaactcccgaaactccaaaacttttctaataaaataaccgcg

SEQ ID NO: 41045 - DNA, 50 bp, synthetic construct
  source 1..50: mol_type = other DNA
ccttccaaaaaaacttacaaaacaaatacacctaaaacaaaaaactccca

SEQ ID NO: 41046 - DNA, 50 bp, synthetic construct
  source 1..50: mol_type = other DNA
ccttccaaaaaaacttacaaaacaaatacgcctaaaacgaaaaactcccg

SEQ ID NO: 41047 - DNA, 50 bp, synthetic construct
  source 1..50: mol_type = other DNA
aactaaacaaattcaaaaacatctcaatacacctaacacaactcaataca

SEQ ID NO: 41048 - DNA, 50 bp, synthetic construct
  source 1..50: mol_type = other DNA
aactaaacaaattcgaaaacatctcgatacgcctaacgcgactcgatacg

SEQ ID NO: 41049 - DNA, 50 bp, synthetic construct
  source 1..50: mol_type = other DNA
atctacaaaacaaactaaacaaattcaaaaacatctcaatacacctaaca

SEQ ID NO: 41050 - DNA, 50 bp, synthetic construct
  source 1..50: mol_type = other DNA
atctacaaaacgaactaaacaaattcgaaaacatctcgatacgcctaacg

SEQ ID NO: 41051 - DNA, 50 bp, synthetic construct
  source 1..50: mol_type = other DNA
ttaaaacatacaatctacaaaacaaactaaacaaattcaaaaacatctca

SEQ ID NO: 41052 - DNA, 50 bp, synthetic construct
  source 1..50: mol_type = other DNA
ttaaaacgtacgatctacaaaacgaactaaacaaattcgaaaacatctcg

SEQ ID NO: 41053 - DNA, 50 bp, synthetic construct
  source 1..50: mol_type = other DNA
aaaacacaaaaaataattcatccttaccctctactacttcctcttataca

SEQ ID NO: 41054 - DNA, 50 bp, synthetic construct
  source 1..50: mol_type = other DNA
aaaacgcgaaaaataattcgtccttaccctctactacttcctcttatacg

SEQ ID NO: 41055 - DNA, 50 bp, synthetic construct
  source 1..50: mol_type = other DNA
gttttttttgttggttaaggaaaggggtgatagatagtatttggaatatt

SEQ ID NO: 41056 - DNA, 50 bp, synthetic construct
  source 1..50: mol_type = other DNA
gttttttttgttggttaaggaaaggggtgatagatagtatttggaatatc

SEQ ID NO: 41057 - DNA, 50 bp, synthetic construct
  source 1..50: mol_type = other DNA
tcaacaaaaacatacaaaactacatattactttaattcacaactaacaca

SEQ ID NO: 41058 - DNA, 50 bp, synthetic construct
  source 1..50: mol_type = other DNA
tcgacaaaaacgtacaaaactacatattactttaattcgcgactaacacg

SEQ ID NO: 41059 - DNA, 50 bp, synthetic construct
  source 1..50: mol_type = other DNA
acaaaaacatacaaaactacatattactttaattcacaactaacacacca

SEQ ID NO: 41060 - DNA, 50 bp, synthetic construct
  source 1..50: mol_type = other DNA
acaaaaacgtacaaaactacatattactttaattcgcgactaacacgccg

SEQ ID NO: 41061 - DNA, 50 bp, synthetic construct
  source 1..50: mol_type = other DNA
atacaaaactacatattactttaattcacaactaacacaccaactataca

SEQ ID NO: 41062 - DNA, 50 bp, synthetic construct
  source 1..50: mol_type = other DNA
gtacaaaactacatattactttaattcgcgactaacacgccgactatacg

SEQ ID NO: 41063 - DNA, 50 bp, synthetic construct
  source 1..50: mol_type = other DNA
aacccattaccatatactccctattactactcccaataattaacaaacca

SEQ ID NO: 41064 - DNA, 50 bp, synthetic construct
  source 1..50: mol_type = other DNA
aacccgttaccatatactccctattactactcccgataattaacaaaccg

SEQ ID NO: 41065 - DNA, 50 bp, synthetic construct
  source 1..50: mol_type = other DNA
aacaacaacaaaaaacacataacaacaaactacaaacaaactaaccaaca

SEQ ID NO: 41066 - DNA, 50 bp, synthetic construct
  source 1..50: mol_type = other DNA
aacaacaacaaaaaacacataacaacgaactacgaacgaactaaccaacg

SEQ ID NO: 41067 - DNA, 50 bp, synthetic construct
  source 1..50: mol_type = other DNA
aataaaaactcataaatatccctttcttcaaaaaactaaaaccccaaaca

SEQ ID NO: 41068 - DNA, 50 bp, synthetic construct
  source 1..50: mol_type = other DNA
aataaaaactcgtaaatatccctttcttcgaaaaactaaaaccccgaacg

SEQ ID NO: 41069 - DNA, 50 bp, synthetic construct
  source 1..50: mol_type = other DNA
taaaaataaaaactcataaatatccctttcttcaaaaaactaaaacccca

SEQ ID NO: 41070 - DNA, 50 bp, synthetic construct
  source 1..50: mol_type = other DNA
taaaaataaaaactcgtaaatatccctttcttcgaaaaactaaaaccccg

SEQ ID NO: 41071 - DNA, 50 bp, synthetic construct
  source 1..50: mol_type = other DNA
acctacaacaaaaaattaaaaataaaaactcataaatatccctttcttca

SEQ ID NO: 41072 - DNA, 50 bp, synthetic construct
  source 1..50: mol_type = other DNA
acctacgacaaaaaattaaaaataaaaactcgtaaatatccctttcttcg

SEQ ID NO: 41073 - DNA, 50 bp, synthetic construct
  source 1..50: mol_type = other DNA
aaattccacaaccaaaatacctacaacaaaaaattaaaaataaaaactca

SEQ ID NO: 41074 - DNA, 50 bp, synthetic construct
  source 1..50: mol_type = other DNA
aaattccacgaccgaaatacctacgacaaaaaattaaaaataaaaactcg

SEQ ID NO: 41075 - DNA, 50 bp, synthetic construct
  source 1..50: mol_type = other DNA
tatctctaattctctatcacaaacatttcaaccataaaaccccaaactca

SEQ ID NO: 41076 - DNA, 50 bp, synthetic construct
  source 1..50: mol_type = other DNA
tatctctaattctctatcgcaaacatttcgaccgtaaaaccccaaactcg

SEQ ID NO: 41077 - DNA, 50 bp, synthetic construct
  source 1..50: mol_type = other DNA
tttcaaccataaaaccccaaactcaaaaaactaaatataaacactaccca

SEQ ID NO: 41078 - DNA, 50 bp, synthetic construct
  source 1..50: mol_type = other DNA
tttcgaccgtaaaaccccaaactcgaaaaactaaatataaacgctacccg

SEQ ID NO: 41079 - DNA, 50 bp, synthetic construct
  source 1..50: mol_type = other DNA
aaactcaaaaaactaaatataaacactacccaaaaaaaactaacctacca

SEQ ID NO: 41080 - DNA, 50 bp, synthetic construct
  source 1..50: mol_type = other DNA
aaactcgaaaaactaaatataaacgctacccgaaaaaaactaacctaccg

SEQ ID NO: 41081 - DNA, 50 bp, synthetic construct
  source 1..50: mol_type = other DNA
aatataaacactacccaaaaaaaactaacctaccaaaaccaaaataccca

SEQ ID NO: 41082 - DNA, 50 bp, synthetic construct
  source 1..50: mol_type = other DNA
aatataaacgctacccgaaaaaaactaacctaccgaaaccgaaatacccg

SEQ ID NO: 41083 - DNA, 50 bp, synthetic construct
  source 1..50: mol_type = other DNA
acacaatatactcaaaaaactcaaattctaatcactcctcacaaaaaaca

SEQ ID NO: 41084 - DNA, 50 bp, synthetic construct
  source 1..50: mol_type = other DNA
acacgatatactcaaaaaactcgaattctaatcgctcctcgcaaaaaacg

SEQ ID NO: 41085 - DNA, 50 bp, synthetic construct
  source 1..50: mol_type = other DNA
caactaacaacacaatatactcaaaaaactcaaattctaatcactcctca

SEQ ID NO: 41086 - DNA, 50 bp, synthetic construct
  source 1..50: mol_type = other DNA
caactaacgacacgatatactcaaaaaactcgaattctaatcgctcctcg

SEQ ID NO: 41087 - DNA, 50 bp, synthetic construct
  source 1..50: mol_type = other DNA
aacaaaccaactaacaacacaatatactcaaaaaactcaaattctaatca

SEQ ID NO: 41088 - DNA, 50 bp, synthetic construct
  source 1..50: mol_type = other DNA
aacgaaccaactaacgacacgatatactcaaaaaactcgaattctaatcg

SEQ ID NO: 41089 - DNA, 50 bp, synthetic construct
  source 1..50: mol_type = other DNA
cttcattccttacaaaaaacaactaaaacccaaattctctaaacacacca

SEQ ID NO: 41090 - DNA, 50 bp, synthetic construct
  source 1..50: mol_type = other DNA
cttcgttccttacgaaaaacgactaaaacccgaattctctaaacacaccg

SEQ ID NO: 41091 - DNA, 50 bp, synthetic construct
  source 1..50: mol_type = other DNA
atcaattaatcaaactaatctcaaactcctaacctcaaataatcaacaca

SEQ ID NO: 41092 - DNA, 50 bp, synthetic construct
  source 1..50: mol_type = other DNA
atcaattaatcgaactaatctcgaactcctaacctcaaataatcaacgcg

SEQ ID NO: 41093 - DNA, 50 bp, synthetic construct
  source 1..50: mol_type = other DNA
tcatcaattaatcaaactaatctcaaactcctaacctcaaataatcaaca

SEQ ID NO: 41094 - DNA, 50 bp, synthetic construct
  source 1..50: mol_type = other DNA
tcatcaattaatcgaactaatctcgaactcctaacctcaaataatcaacg

SEQ ID NO: 41095 - DNA, 50 bp, synthetic construct
  source 1..50: mol_type = other DNA
caacacttaaaaaaaccaaaacacactaatcacctaaaatcaaaaattca

SEQ ID NO: 41096 - DNA, 50 bp, synthetic construct
  source 1..50: mol_type = other DNA
caacacttaaaaaaaccgaaacgcgctaatcacctaaaatcaaaaattcg

SEQ ID NO: 41097 - DNA, 50 bp, synthetic construct
  source 1..50: mol_type = other DNA
acaaaaattaaccaaccataataacacacaactataatcacaactactca

SEQ ID NO: 41098 - DNA, 50 bp, synthetic construct
  source 1..50: mol_type = other DNA
acaaaaattaaccgaccgtaataacgcgcgactataatcacaactactcg

SEQ ID NO: 41099 - DNA, 50 bp, synthetic construct
  source 1..50: mol_type = other DNA
acaaaaaacacaactccaccataataacttacaatataaccacccctaca

SEQ ID NO: 41100 - DNA, 50 bp, synthetic construct
  source 1..50: mol_type = other DNA
acaaaaaacgcaactccaccgtaataacttacaatataaccgcccctacg

SEQ ID NO: 41101 - DNA, 50 bp, synthetic construct
  source 1..50: mol_type = other DNA
ttttaaatcattaaaatatcctaaaaaacaatatttacaaaccaaacaca

SEQ ID NO: 41102 - DNA, 50 bp, synthetic construct
  source 1..50: mol_type = other DNA
ttttaaatcattaaaatatcctaaaaaacaatatttacaaaccgaacgcg

SEQ ID NO: 41103 - DNA, 50 bp, synthetic construct
  source 1..50: mol_type = other DNA
accccctcccaactaaaaattaaaaaattaaccaaacataataacaaaca

SEQ ID NO: 41104 - DNA, 50 bp, synthetic construct
  source 1..50: mol_type = other DNA
accccctcccaactaaaaattaaaaaattaaccaaacgtaataacgaacg

SEQ ID NO: 41105 - DNA, 50 bp, synthetic construct
  source 1..50: mol_type = other DNA
aaaccataaaaaaaacaaaaccccaaaaattaaccctaaaaaacaaacca

SEQ ID NO: 41106 - DNA, 50 bp, synthetic construct
  source 1..50: mol_type = other DNA
aaaccataaaaaaaacgaaaccccgaaaattaaccctaaaaaacaaaccg

SEQ ID NO: 41107 - DNA, 50 bp, synthetic construct
  source 1..50: mol_type = other DNA
ataaatccaatataaccacttcctaaaaactccccttaacaacaacaaca

SEQ ID NO: 41108 - DNA, 50 bp, synthetic construct
  source 1..50: mol_type = other DNA
ataaatccaatataaccacttcctaaaaactccccttaacgacgacgacg

SEQ ID NO: 41109 - DNA, 50 bp, synthetic construct
  source 1..50: mol_type = other DNA
ctcatctaattaaaaaccaaaaaaacaatctcctccaacctattaaccca

SEQ ID NO: 41110 - DNA, 50 bp, synthetic construct
  source 1..50: mol_type = other DNA
ctcgtctaattaaaaaccgaaaaaacgatctcctccgacctattaacccg

SEQ ID NO: 41111 - DNA, 50 bp, synthetic construct
  source 1..50: mol_type = other DNA
taacatactttaaaaataccttaatcattaataacttttctacacacaca

SEQ ID NO: 41112 - DNA, 50 bp, synthetic construct
  source 1..50: mol_type = other DNA
taacatactttaaaaataccttaatcattaataacttttctacacacacg

SEQ ID NO: 41113 - DNA, 50 bp, synthetic construct
  source 1..50: mol_type = other DNA
caaaaactaaacctacaacatatccaataacaaaaccaactaaacccaca

SEQ ID NO: 41114 - DNA, 50 bp, synthetic construct
  source 1..50: mol_type = other DNA
caaaaactaaacctacgacgtatccgataacaaaaccaactaaacccacg

SEQ ID NO: 41115 - DNA, 50 bp, synthetic construct
  source 1..50: mol_type = other DNA
atataaaaaaaataacataaactcaactaactttatcatcaaacacacca

SEQ ID NO: 41116 - DNA, 50 bp, synthetic construct
  source 1..50: mol_type = other DNA
atataaaaaaaataacgtaaactcaactaactttatcatcgaacacgccg

SEQ ID NO: 41117 - DNA, 50 bp, synthetic construct
  source 1..50: mol_type = other DNA
accccaaaataaaacaaaataaaataacctaaacaattcaaaaacccaca

SEQ ID NO: 41118 - DNA, 50 bp, synthetic construct
  source 1..50: mol_type = other DNA
accccgaaataaaacgaaataaaataacctaaacaattcaaaaacccgcg

SEQ ID NO: 41119 - DNA, 50 bp, synthetic construct
  source 1..50: mol_type = other DNA
taaaggtgaaatgttttatttttgggatggagtagaggagtagtttttgt

SEQ ID NO: 41120 - DNA, 50 bp, synthetic construct
  source 1..50: mol_type = other DNA
taaaggcgaaatgttttatttttgggatggagtagaggagtagtttttgc

SEQ ID NO: 41121 - DNA, 50 bp, synthetic construct
  source 1..50: mol_type = other DNA
tccactatcaaaccaaactaattactccaaaactaaaaattacaacacca

SEQ ID NO: 41122 - DNA, 50 bp, synthetic construct
  source 1..50: mol_type = other DNA
tccgctatcgaaccaaactaattactccgaaactaaaaattacgacaccg

SEQ ID NO: 41123 - DNA, 50 bp, synthetic construct
  source 1..50: mol_type = other DNA
taaacctccactatcaaaccaaactaattactccaaaactaaaaattaca

SEQ ID NO: 41124 - DNA, 50 bp, synthetic construct
  source 1..50: mol_type = other DNA
taaacctccgctatcgaaccaaactaattactccgaaactaaaaattacg

SEQ ID NO: 41125 - DNA, 50 bp, synthetic construct
  source 1..50: mol_type = other DNA
taaactcaaacattaaaaccatcccaacaaaaaaaaacccaaacaaaaca

SEQ ID NO: 41126 - DNA, 50 bp, synthetic construct
  source 1..50: mol_type = other DNA
taaactcgaacgttaaaaccgtcccgacgaaaaaaaacccgaacaaaacg

SEQ ID NO: 41127 - DNA, 50 bp, synthetic construct
  source 1..50: mol_type = other DNA
cttctaaacattaccctacaccacaacaaattttcctcaactataaaaca

SEQ ID NO: 41128 - DNA, 50 bp, synthetic construct
  source 1..50: mol_type = other DNA
cttctaaacgttaccctacgccgcaacgaattttcctcaactataaaacg

SEQ ID NO: 41129 - DNA, 50 bp, synthetic construct
  source 1..50: mol_type = other DNA
ctccaaaaaccaaactaaaataaaaaatcatcaacaaaaaatcctaaaca

SEQ ID NO: 41130 - DNA, 50 bp, synthetic construct
  source 1..50: mol_type = other DNA
ctccgaaaaccgaactaaaataaaaaatcgtcaacgaaaaatcctaaacg

SEQ ID NO: 41131 - DNA, 50 bp, synthetic construct
  source 1..50: mol_type = other DNA
tttctaaaactttctttaacttcaaacatacaaatatcaaaaataaaaca

SEQ ID NO: 41132 - DNA, 50 bp, synthetic construct
  source 1..50: mol_type = other DNA
tttctaaaactttctttaacttcaaacatacaaatatcaaaaataaaacg

SEQ ID NO: 41133 - DNA, 50 bp, synthetic construct
  source 1..50: mol_type = other DNA
ggttgaaggaaagatttagtgggaattagtaataaaatatattatttttt

SEQ ID NO: 41134 - DNA, 50 bp, synthetic construct
  source 1..50: mol_type = other DNA
ggttgaaggaaagatttagcgggaattagtaataaaatatattatttttc

SEQ ID NO: 41135 - DNA, 50 bp, synthetic construct
  source 1..50: mol_type = other DNA
aaacttaaaaaacaaacccaaaaaataatatattttattactaattccca

SEQ ID NO: 41136 - DNA, 50 bp, synthetic construct
  source 1..50: mol_type = other DNA
aaacttaaaaaacaaacccgaaaaataatatattttattactaattcccg

SEQ ID NO: 41137 - DNA, 50 bp, synthetic construct
  source 1..50: mol_type = other DNA
cacatacccccaaacccttacaaaaattaaaaactcttcccaaatcatca

SEQ ID NO: 41138 - DNA, 50 bp, synthetic construct
  source 1..50: mol_type = other DNA
cgcgtacccccaaacccttacaaaaattaaaaactcttcccaaatcgtcg

SEQ ID NO: 41139 - DNA, 50 bp, synthetic construct
  source 1..50: mol_type = other DNA
aaaaatcaatactaattaaatcaatttcttactatactataaaaacaaca

SEQ ID NO: 41140 - DNA, 50 bp, synthetic construct
  source 1..50: mol_type = other DNA
aaaaatcaatactaattaaatcaatttcttactatactataaaaacgacg

SEQ ID NO: 41141 - DNA, 50 bp, synthetic construct
  source 1..50: mol_type = other DNA
cttaaaaatataaaaaaatttcactcaaatttctattctacttccacaca

SEQ ID NO: 41142 - DNA, 50 bp, synthetic construct
  source 1..50: mol_type = other DNA
cttaaaaatataaaaaaatttcactcgaatttctattctacttccacgcg

SEQ ID NO: 41143 - DNA, 50 bp, synthetic construct
  source 1..50: mol_type = other DNA
caacaatttaaaaaaaattcctaatttctacaaaaatctaaaaatacaca

SEQ ID NO: 41144 - DNA, 50 bp, synthetic construct
  source 1..50: mol_type = other DNA
cgacgatttaaaaaaaattcctaatttctacaaaaatctaaaaatacgcg

SEQ ID NO: 41145 - DNA, 50 bp, synthetic construct
  source 1..50: mol_type = other DNA
aagggtatttataggtgtttaaaatttgaaagtgtagaaaagttttattt

SEQ ID NO: 41146 - DNA, 50 bp, synthetic construct
  source 1..50: mol_type = other DNA
aagggtatttataggtgtttaaaatttgaaagtgtagaaaagttttattc

SEQ ID NO: 41147 - DNA, 50 bp, synthetic construct
  source 1..50: mol_type = other DNA
caccaaaataaaaaacaaacaaaacaacaattaaaaaccaacacaaacca

SEQ ID NO: 41148 - DNA, 50 bp, synthetic construct
  source 1..50: mol_type = other DNA
caccaaaataaaaaacaaacaaaacaacgattaaaaaccaacacgaaccg

SEQ ID NO: 41149 - DNA, 50 bp, synthetic construct
  source 1..50: mol_type = other DNA
aaaaaattaaataaaaaatctcttacccccaaaccctactccacaaccca

SEQ ID NO: 41150 - DNA, 50 bp, synthetic construct
  source 1..50: mol_type = other DNA
aaaaaattaaataaaaaatctcttacccccaaaccctactccacgacccg

SEQ ID NO: 41151 - DNA, 50 bp, synthetic construct
  source 1..50: mol_type = other DNA
tataaatatattttctaccccaccccacccccaaatactactacaattca

SEQ ID NO: 41152 - DNA, 50 bp, synthetic construct
  source 1..50: mol_type = other DNA
tataaatatattttctaccccaccccacccccaaatactactacaattcg

SEQ ID NO: 41153 - DNA, 50 bp, synthetic construct
  source 1..50: mol_type = other DNA
ttttgtggtttagagatgggtgaataatatattaaatataggaaagtatt

SEQ ID NO: 41154 - DNA, 50 bp, synthetic construct
  source 1..50: mol_type = other DNA
ttttgcggtttagagatgggtgaataatatattaaatataggaaagtatc

SEQ ID NO: 41155 - DNA, 50 bp, synthetic construct
  source 1..50: mol_type = other DNA
agggttttttaaggtttatggaaaatgagttttatgaaaaagttatggat

SEQ ID NO: 41156 - DNA, 50 bp, synthetic construct
  source 1..50: mol_type = other DNA
agggttttttaaggtttatggaaaatgagttttatgaaaaagttatggac

SEQ ID NO: 41157 - DNA, 50 bp, synthetic construct
  source 1..50: mol_type = other DNA
actataataaccacaaaaaatattctttataataatatataacaaaacca

SEQ ID NO: 41158 - DNA, 50 bp, synthetic construct
  source 1..50: mol_type = other DNA
actataataaccacaaaaaatattctttataataatatataacgaaaccg

SEQ ID NO: 41159 - DNA, 50 bp, synthetic construct
  source 1..50: mol_type = other DNA
aacaaaaaaaaatcacaaccaaaaacctacaaaataaaatactatcaaca

SEQ ID NO: 41160 - DNA, 50 bp, synthetic construct
  source 1..50: mol_type = other DNA
aacaaaaaaaaatcacaaccgaaaacctacaaaataaaatactatcaacg

SEQ ID NO: 41161 - DNA, 50 bp, synthetic construct
  source 1..50: mol_type = other DNA
ttatttggaggaaaaatgtggattaataagtgttttgattttggatattt

SEQ ID NO: 41162 - DNA, 50 bp, synthetic construct
  source 1..50: mol_type = other DNA
ttatttggaggaaaaatgtggattaataagtgttttgattttggatattc

SEQ ID NO: 41163 - DNA, 50 bp, synthetic construct
  source 1..50: mol_type = other DNA
acttaaccctacctctaattttcaattatatattttatcttaataaatca

SEQ ID NO: 41164 - DNA, 50 bp, synthetic construct
  source 1..50: mol_type = other DNA
acttaaccctacctctaattttcaattatatattttatcttaataaatcg

SEQ ID NO: 41165 - DNA, 50 bp, synthetic construct
  source 1..50: mol_type = other DNA
aaatttaacttcaccctaaaccttctcacatactcaaaaacactatccca

SEQ ID NO: 41166 - DNA, 50 bp, synthetic construct
  source 1..50: mol_type = other DNA
aaatttaacttcaccctaaaccttctcacatactcaaaaacactatcccg

SEQ ID NO: 41167 - DNA, 50 bp, synthetic construct
  source 1..50: mol_type = other DNA
gattagttattgggtgtatttagttattttttaatatttttttaggggtt

SEQ ID NO: 41168 - DNA, 50 bp, synthetic construct
  source 1..50: mol_type = other DNA
gattagttattgggtgtatttagttattttttaatatttttttaggggtc

SEQ ID NO: 41169 - DNA, 50 bp, synthetic construct
  source 1..50: mol_type = other DNA
tatggaattaaatagtattgggtaggttggtattgggggaaagaagaatt

SEQ ID NO: 41170 - DNA, 50 bp, synthetic construct
  source 1..50: mol_type = other DNA
tatggaattaaatagtattgggtaggttggtattgggggaaagaagaatc

SEQ ID NO: 41171 - DNA, 50 bp, synthetic construct
  source 1..50: mol_type = other DNA
ataaaaacaatatctacaaaatacaaacaaaaactactaactttaaacca

SEQ ID NO: 41172 - DNA, 50 bp, synthetic construct
  source 1..50: mol_type = other DNA
ataaaaacgatatctacaaaatacaaacaaaaactactaactttaaaccg

SEQ ID NO: 41173 - DNA, 50 bp, synthetic construct
  source 1..50: mol_type = other DNA
acaacaacaaaacccacaaacaaaaacctaaaactcttaaaataaaaaca

SEQ ID NO: 41174 - DNA, 50 bp, synthetic construct
  source 1..50: mol_type = other DNA
acgacgacgaaacccgcgaacgaaaacctaaaactcttaaaataaaaacg

SEQ ID NO: 41175 - DNA, 50 bp, synthetic construct
  source 1..50: mol_type = other DNA
aacttaaactcaaaacactacaacaaaaacaccacccaatacttaaaaca

SEQ ID NO: 41176 - DNA, 50 bp, synthetic construct
  source 1..50: mol_type = other DNA
aacttaaactcaaaacactacaacgaaaacgccacccgatacttaaaacg

SEQ ID NO: 41177 - DNA, 50 bp, synthetic construct
  source 1..50: mol_type = other DNA
taataaaataatacctttactaaacatcaaaatactaaaacaaatacaca

SEQ ID NO: 41178 - DNA, 50 bp, synthetic construct
  source 1..50: mol_type = other DNA
taataaaataatacctttactaaacatcaaaatactaaaacaaatacgcg

SEQ ID NO: 41179 - DNA, 50 bp, synthetic construct
  source 1..50: mol_type = other DNA
ataaaaaaaaactccaaatataaattaaaacccaaccataacccaacaca

SEQ ID NO: 41180 - DNA, 50 bp, synthetic construct
  source 1..50: mol_type = other DNA
ataaaaaaaaactccaaatataaattaaaacccaaccataacccgacacg

SEQ ID NO: 41181 - DNA, 50 bp, synthetic construct
  source 1..50: mol_type = other DNA
aataaaccaaatcacatatacatacaaaaatcaaaactaaaaatataaca

SEQ ID NO: 41182 - DNA, 50 bp, synthetic construct
  source 1..50: mol_type = other DNA
aataaaccaaatcacatatacatacaaaaatcaaaactaaaaatataacg

SEQ ID NO: 41183 - DNA, 50 bp, synthetic construct
  source 1..50: mol_type = other DNA
accttccatccctaaatactacattcactatatactaatattcctaccca

SEQ ID NO: 41184 - DNA, 50 bp, synthetic construct
  source 1..50: mol_type = other DNA
accttccatccctaaatactacattcactatatactaatattcctacccg

SEQ ID NO: 41185 - DNA, 50 bp, synthetic construct
  source 1..50: mol_type = other DNA
aaataaccaattaattcctttttactacaataataactcaaatctaaaca

SEQ ID NO: 41186 - DNA, 50 bp, synthetic construct
  source 1..50: mol_type = other DNA
aaataaccaattaattcctttttactacaataataactcaaatctaaacg

SEQ ID NO: 41187 - DNA, 50 bp, synthetic construct
  source 1..50: mol_type = other DNA
aaaaaatacttcaaaaccaaccaaccaacaaaaaacaaaaaacaaaaaca

SEQ ID NO: 41188 - DNA, 50 bp, synthetic construct
  source 1..50: mol_type = other DNA
aaaaaatacttcaaaaccaaccaaccaacaaaaaacaaaaaacaaaaacg

SEQ ID NO: 41189 - DNA, 50 bp, synthetic construct
  source 1..50: mol_type = other DNA
acaaatacacaaaataaacacccattaacaaaataaaaaacaaaatttca

SEQ ID NO: 41190 - DNA, 50 bp, synthetic construct
  source 1..50: mol_type = other DNA
acaaatacacaaaataaacgcccattaacaaaataaaaaacaaaatttcg

SEQ ID NO: 41191 - DNA, 50 bp, synthetic construct
  source 1..50: mol_type = other DNA
ccaatataataacaacaaaacacatccctatacaaaacaaaaaaactaca

SEQ ID NO: 41192 - DNA, 50 bp, synthetic construct
  source 1..50: mol_type = other DNA
ccgatataataacaacgaaacgcatccctatacaaaacgaaaaaactacg

SEQ ID NO: 41193 - DNA, 50 bp, synthetic construct
  source 1..50: mol_type = other DNA
acctaaccaaaaaaatatacaaacacctaaaaacacataataacactaca

SEQ ID NO: 41194 - DNA, 50 bp, synthetic construct
  source 1..50: mol_type = other DNA
acctaaccgaaaaaatatacaaacgcctaaaaacacgtaataacgctacg

SEQ ID NO: 41195 - DNA, 50 bp, synthetic construct
  source 1..50: mol_type = other DNA
cacatacctaaccaaaaaaatatacaaacacctaaaaacacataataaca

SEQ ID NO: 41196 - DNA, 50 bp, synthetic construct
  source 1..50: mol_type = other DNA
cgcatacctaaccgaaaaaatatacaaacgcctaaaaacacgtaataacg

SEQ ID NO: 41197 - DNA, 50 bp, synthetic construct
  source 1..50: mol_type = other DNA
ataaaaaacaaaaactaaaccacatacctaaccaaaaaaatatacaaaca

SEQ ID NO: 41198 - DNA, 50 bp, synthetic construct
  source 1..50: mol_type = other DNA
ataaaaaacaaaaactaaaccgcatacctaaccgaaaaaatatacaaacg

SEQ ID NO: 41199 - DNA, 50 bp, synthetic construct
  source 1..50: mol_type = other DNA
ctcttaacaaacctatataaaaaacaaaaactaaaccacatacctaacca

SEQ ID NO: 41200 - DNA, 50 bp, synthetic construct
  source 1..50: mol_type = other DNA
ctcttaacaaacctatataaaaaacaaaaactaaaccgcatacctaaccg

SEQ ID NO: 41201 - DNA, 50 bp, synthetic construct
  source 1..50: mol_type = other DNA
aagtgttatgtattgtgttaggggtaggatgaaagtaggattaagataat

SEQ ID NO: 41202 - DNA, 50 bp, synthetic construct
  source 1..50: mol_type = other DNA
aagcgttatgtattgtgttaggggtaggatgaaagtaggattaagataac

SEQ ID NO: 41203 - DNA, 50 bp, synthetic construct
  source 1..50: mol_type = other DNA
caacacttacaacctaaaaactaaacaaaaaatacaatcacaaaaaaaca

SEQ ID NO: 41204 - DNA, 50 bp, synthetic construct
  source 1..50: mol_type = other DNA
caacgcttacaacctaaaaactaaacaaaaaatacaatcacaaaaaaacg

SEQ ID NO: 41205 - DNA, 50 bp, synthetic construct
  source 1..50: mol_type = other DNA
acaaacaacattttatataatttatttaacatcaactaaataactaatca

SEQ ID NO: 41206 - DNA, 50 bp, synthetic construct
  source 1..50: mol_type = other DNA
acaaacaacattttatataatttatttaacatcaactaaataactaatcg

SEQ ID NO: 41207 - DNA, 50 bp, synthetic construct
  source 1..50: mol_type = other DNA
cttaacatccacattcaaaattttaaacttatattcttttaataaaaaca

SEQ ID NO: 41208 - DNA, 50 bp, synthetic construct
  source 1..50: mol_type = other DNA
cttaacatccacattcgaaattttaaacttatattcttttaataaaaacg

SEQ ID NO: 41209 - DNA, 50 bp, synthetic construct
  source 1..50: mol_type = other DNA
ccactcatccctccatacctaacctaaaaaacaacttaacttttccctca

SEQ ID NO: 41210 - DNA, 50 bp, synthetic construct
  source 1..50: mol_type = other DNA
ccactcatccctccatacctaacctaaaaaacaacttaacttttccctcg

SEQ ID NO: 41211 - DNA, 50 bp, synthetic construct
  source 1..50: mol_type = other DNA
actatattccacatccatcacatataaccctcactacaaaataccttaca

SEQ ID NO: 41212 - DNA, 50 bp, synthetic construct
  source 1..50: mol_type = other DNA
actatattccacatccatcacatataaccctcactacaaaataccttacg

SEQ ID NO: 41213 - DNA, 50 bp, synthetic construct
  source 1..50: mol_type = other DNA
tttaataattaataaaaccaaaacatctcaatttaaatatctacttccca

SEQ ID NO: 41214 - DNA, 50 bp, synthetic construct
  source 1..50: mol_type = other DNA
tttaataattaataaaaccaaaacatctcaatttaaatatctacttcccg

SEQ ID NO: 41215 - DNA, 50 bp, synthetic construct
  source 1..50: mol_type = other DNA
aaatcaacctcataacttacataactatttcttaaccccacttaacctca

SEQ ID NO: 41216 - DNA, 50 bp, synthetic construct
  source 1..50: mol_type = other DNA
aaatcaacctcataacttacgtaactatttcttaaccccacttaacctcg

SEQ ID NO: 41217 - DNA, 50 bp, synthetic construct
  source 1..50: mol_type = other DNA
caaatcctcacaaaaaataaaaattaaaacaaataaactttaaacctcca

SEQ ID NO: 41218 - DNA, 50 bp, synthetic construct
  source 1..50: mol_type = other DNA
caaatcctcacaaaaaataaaaattaaaacgaataaactttaaacctccg

SEQ ID NO: 41219 - DNA, 50 bp, synthetic construct
  source 1..50: mol_type = other DNA
tacataaacacataaaatattaaaatttacaaaaacttaaaattcaccca

SEQ ID NO: 41220 - DNA, 50 bp, synthetic construct
  source 1..50: mol_type = other DNA
tacataaacacataaaatattaaaatttacgaaaacttaaaattcacccg

SEQ ID NO: 41221 - DNA, 50 bp, synthetic construct
  source 1..50: mol_type = other DNA
taatcctaaattaaataaaatataatatatcaaataatccaaatccttca

SEQ ID NO: 41222 - DNA, 50 bp, synthetic construct
  source 1..50: mol_type = other DNA
taatcctaaattaaataaaatataatatatcaaataatccaaatccttcg

SEQ ID NO: 41223 - DNA, 50 bp, synthetic construct
  source 1..50: mol_type = other DNA
atctaaacaactaaaatcaatacccaaatataaaaacaacaacctacaca

SEQ ID NO: 41224 - DNA, 50 bp, synthetic construct
  source 1..50: mol_type = other DNA
gtctaaacgactaaaatcgatacccgaatataaaaacgacaacctacgcg

SEQ ID NO: 41225 - DNA, 50 bp, synthetic construct
  source 1..50: mol_type = other DNA
tctaaccctattatcctaaacatctttatcaactccaacctaaaaaaaca

SEQ ID NO: 41226 - DNA, 50 bp, synthetic construct
  source 1..50: mol_type = other DNA
tctaaccctattatcctaaacatctttatcgactccgacctaaaaaaacg

SEQ ID NO: 41227 - DNA, 50 bp, synthetic construct
  source 1..50: mol_type = other DNA
aaaacacaaaacactccctaaaatcacataatacctactccaataccaca

SEQ ID NO: 41228 - DNA, 50 bp, synthetic construct
  source 1..50: mol_type = other DNA
aaaacacgaaacgctccctaaaatcacataatacctactccaataccgcg

SEQ ID NO: 41229 - DNA, 50 bp, synthetic construct
  source 1..50: mol_type = other DNA
aaatactaaacctacaaaaacacaaaaaatacacaaaaacctacaaaaca

SEQ ID NO: 41230 - DNA, 50 bp, synthetic construct
  source 1..50: mol_type = other DNA
aaatactaaacctacgaaaacgcgaaaaatacgcgaaaacctacgaaacg

SEQ ID NO: 41231 - DNA, 50 bp, synthetic construct
  source 1..50: mol_type = other DNA
acaacaattactatatataataaaataacctcaaattctaatctatcaca

SEQ ID NO: 41232 - DNA, 50 bp, synthetic construct
  source 1..50: mol_type = other DNA
acaacgattactatatataataaaataacctcaaattctaatctatcacg

SEQ ID NO: 41233 - DNA, 50 bp, synthetic construct
  source 1..50: mol_type = other DNA
aacatcaccaaaacaacacttcctacaaaccaataatctcctaaacaaca

SEQ ID NO: 41234 - DNA, 50 bp, synthetic construct
  source 1..50: mol_type = other DNA
aacgtcaccaaaacaacacttcctacaaaccgataatctcctaaacaacg

SEQ ID NO: 41235 - DNA, 50 bp, synthetic construct
  source 1..50: mol_type = other DNA
acttttttttttttaacataataatatattttctcaaaaaaaaatcaaca

SEQ ID NO: 41236 - DNA, 50 bp, synthetic construct
  source 1..50: mol_type = other DNA
acttttttttttttaacataataatatattttctcaaaaaaaaatcaacg

SEQ ID NO: 41237 - DNA, 50 bp, synthetic construct
  source 1..50: mol_type = other DNA
aatatttctaaccaaaatctcaccaaataaactccacccacaaattatca

SEQ ID NO: 41238 - DNA, 50 bp, synthetic construct
  source 1..50: mol_type = other DNA
aatatttctaaccgaaatctcaccgaataaactccacccgcgaattatcg

SEQ ID NO: 41239 - DNA, 50 bp, synthetic construct
  source 1..50: mol_type = other DNA
tataacctcttccaacaaccattaaaaaacacaattactaaaaaaacaca

SEQ ID NO: 41240 - DNA, 50 bp, synthetic construct
  source 1..50: mol_type = other DNA
tataacctcttccgacaaccattaaaaaacacgattactaaaaaaacgcg

SEQ ID NO: 41241 - DNA, 50 bp, synthetic construct
  source 1..50: mol_type = other DNA
tcttcaaaacacataattataacctcttccaacaaccattaaaaaacaca

SEQ ID NO: 41242 - DNA, 50 bp, synthetic construct
  source 1..50: mol_type = other DNA
tcttcgaaacacgtaattataacctcttccgacaaccattaaaaaacacg

SEQ ID NO: 41243 - DNA, 50 bp, synthetic construct
  source 1..50: mol_type = other DNA
ctttaataattaccaaaaaaaactataatcacatactccaaaaacttcca

SEQ ID NO: 41244 - DNA, 50 bp, synthetic construct
  source 1..50: mol_type = other DNA
ctttaataattaccgaaaaaaactataatcacgtactccgaaaacttccg

SEQ ID NO: 41245 - DNA, 50 bp, synthetic construct
  source 1..50: mol_type = other DNA
accaaaaaaaactataatcacatactccaaaaacttccaaatttccaaca

SEQ ID NO: 41246 - DNA, 50 bp, synthetic construct
  source 1..50: mol_type = other DNA
accgaaaaaaactataatcacgtactccgaaaacttccgaatttccaacg

SEQ ID NO: 41247 - DNA, 50 bp, synthetic construct
  source 1..50: mol_type = other DNA
aactataatcacatactccaaaaacttccaaatttccaacataacttcca

SEQ ID NO: 41248 - DNA, 50 bp, synthetic construct
  source 1..50: mol_type = other DNA
aactataatcacgtactccgaaaacttccgaatttccaacgtaacttccg

SEQ ID NO: 41249 - DNA, 50 bp, synthetic construct
  source 1..50: mol_type = other DNA
ttacccctaacacaacaacaaccaacaaaaaactatatatacttaaatca

SEQ ID NO: 41250 - DNA, 50 bp, synthetic construct
  source 1..50: mol_type = other DNA
ttacccctaacgcgacgacgaccgacgaaaaactatatatacttaaatcg

SEQ ID NO: 41251 - DNA, 50 bp, synthetic construct
  source 1..50: mol_type = other DNA
tatacttaaatcataataaccccaataataataaactccaaacaaactca

SEQ ID NO: 41252 - DNA, 50 bp, synthetic construct
  source 1..50: mol_type = other DNA
tatacttaaatcgtaataaccccgataataataaactccgaacgaactcg

SEQ ID NO: 41253 - DNA, 50 bp, synthetic construct
  source 1..50: mol_type = other DNA
acacccaaacaaatttaataacttaaactaccaaaataatacccaaaaca

SEQ ID NO: 41254 - DNA, 50 bp, synthetic construct
  source 1..50: mol_type = other DNA
acgcccgaacgaatttaataacttaaactaccgaaataatacccgaaacg

SEQ ID NO: 41255 - DNA, 50 bp, synthetic construct
  source 1..50: mol_type = other DNA
taccaaaaatatctaaaaaaatcatcacccaataacccaaatccaaccca

SEQ ID NO: 41256 - DNA, 50 bp, synthetic construct
  source 1..50: mol_type = other DNA
taccgaaaatatctaaaaaaatcgtcacccaataacccaaatccgacccg

SEQ ID NO: 41257 - DNA, 50 bp, synthetic construct
  source 1..50: mol_type = other DNA
ataataaacacaccataaaacaaactcttctcaccccaatacaaattaca

SEQ ID NO: 41258 - DNA, 50 bp, synthetic construct
  source 1..50: mol_type = other DNA
ataataaacacgccgtaaaacgaactcttctcgccccaatacaaattacg

SEQ ID NO: 41259 - DNA, 50 bp, synthetic construct
  source 1..50: mol_type = other DNA
cttcatacaaaataaaaataataaacacaccataaaacaaactcttctca

SEQ ID NO: 41260 - DNA, 50 bp, synthetic construct
  source 1..50: mol_type = other DNA
cttcgtacgaaataaaaataataaacacgccgtaaaacgaactcttctcg

SEQ ID NO: 41261 - DNA, 50 bp, synthetic construct
  source 1..50: mol_type = other DNA
ctccataaaaccttcatacaaaataaaaataataaacacaccataaaaca

SEQ ID NO: 41262 - DNA, 50 bp, synthetic construct
  source 1..50: mol_type = other DNA
ctccgtaaaaccttcgtacgaaataaaaataataaacacgccgtaaaacg

SEQ ID NO: 41263 - DNA, 50 bp, synthetic construct
  source 1..50: mol_type = other DNA
aaaattcctccataaaaccttcatacaaaataaaaataataaacacacca

SEQ ID NO: 41264 - DNA, 50 bp, synthetic construct
  source 1..50: mol_type = other DNA
aaaattcctccgtaaaaccttcgtacgaaataaaaataataaacacgccg

SEQ ID NO: 41265 - DNA, 50 bp, synthetic construct
  source 1..50: mol_type = other DNA
aaaaaaattcctccataaaaccttcatacaaaataaaaataataaacaca

SEQ ID NO: 41266 - DNA, 50 bp, synthetic construct
  source 1..50: mol_type = other DNA
aaaaaaattcctccgtaaaaccttcgtacgaaataaaaataataaacacg

SEQ ID NO: 41267 - DNA, 50 bp, synthetic construct
  source 1..50: mol_type = other DNA
aaaaaattactaaaaccacaacttacaacctacaaaccccaaaaacaaca

SEQ ID NO: 41268 - DNA, 50 bp, synthetic construct
  source 1..50: mol_type = other DNA
aaaaaattactaaaaccgcgacttacgacctacaaaccccgaaaacgacg

SEQ ID NO: 41269 - DNA, 50 bp, synthetic construct
  source 1..50: mol_type = other DNA
aaaaccaaacaataaaaattcccaacctacacaaacataaaaacttccca

SEQ ID NO: 41270 - DNA, 50 bp, synthetic construct
  source 1..50: mol_type = other DNA
aaaaccaaacaataaaaattcccaacctacgcgaacgtaaaaacttcccg

SEQ ID NO: 41271 - DNA, 50 bp, synthetic construct
  source 1..50: mol_type = other DNA
ccaaatactatcaaaaccctaccaaatatacatacactcaaaacaacaca

SEQ ID NO: 41272 - DNA, 50 bp, synthetic construct
  source 1..50: mol_type = other DNA
ccaaatactatcaaaaccctaccaaatatacgtacactcaaaacaacgcg

SEQ ID NO: 41273 - DNA, 50 bp, synthetic construct
  source 1..50: mol_type = other DNA
caaactcaaaattttaacaacctccaccccctaaaaacttaaaaaaaaca

SEQ ID NO: 41274 - DNA, 50 bp, synthetic construct
  source 1..50: mol_type = other DNA
cgaactcgaaattttaacaacctccgccccctaaaaacttaaaaaaaacg

SEQ ID NO: 41275 - DNA, 50 bp, synthetic construct
  source 1..50: mol_type = other DNA
tccaccccctaaaaacttaaaaaaaacaaacataaataacaatcttttca

SEQ ID NO: 41276 - DNA, 50 bp, synthetic construct
  source 1..50: mol_type = other DNA
tccgccccctaaaaacttaaaaaaaacgaacgtaaataacaatcttttcg

SEQ ID NO: 41277 - DNA, 50 bp, synthetic construct
  source 1..50: mol_type = other DNA
caccccctaaaaacttaaaaaaaacaaacataaataacaatcttttcaca

SEQ ID NO: 41278 - DNA, 50 bp, synthetic construct
  source 1..50: mol_type = other DNA
cgccccctaaaaacttaaaaaaaacgaacgtaaataacaatcttttcgcg

SEQ ID NO: 41279 - DNA, 50 bp, synthetic construct
  source 1..50: mol_type = other DNA
caaccttaattttcataacaaacatttctttaacaaacaacacacaacca

SEQ ID NO: 41280 - DNA, 50 bp, synthetic construct
  source 1..50: mol_type = other DNA
caaccttaattttcataacgaacatttctttaacgaacgacgcgcaaccg

SEQ ID NO: 41281 - DNA, 50 bp, synthetic construct
  source 1..50: mol_type = other DNA
ctaaaacaaccttaattttcataacaaacatttctttaacaaacaacaca

SEQ ID NO: 41282 - DNA, 50 bp, synthetic construct
  source 1..50: mol_type = other DNA
ctaaaacaaccttaattttcataacgaacatttctttaacgaacgacgcg

SEQ ID NO: 41283 - DNA, 50 bp, synthetic construct
  source 1..50: mol_type = other DNA
cacattacctaacattattctccaactcttttacaataaaaaaaaactca

SEQ ID NO: 41284 - DNA, 50 bp, synthetic construct
  source 1..50: mol_type = other DNA
cacgttacctaacattattctccaactcttttacgataaaaaaaaactcg

SEQ ID NO: 41285 - DNA, 50 bp, synthetic construct
  source 1..50: mol_type = other DNA
aactttatatattacactaaaaacaatctccaaaaacacaattcacaaca

SEQ ID NO: 41286 - DNA, 50 bp, synthetic construct
  source 1..50: mol_type = other DNA
aactttatatattacactaaaaacaatctccgaaaacgcgattcgcaacg

SEQ ID NO: 41287 - DNA, 50 bp, synthetic construct
  source 1..50: mol_type = other DNA
aaaaaactaaaatcacaacaacaataaaacaaacctcaaaaaaacacaca

SEQ ID NO: 41288 - DNA, 50 bp, synthetic construct
  source 1..50: mol_type = other DNA
aaaaaactaaaatcgcgacgacaataaaacgaacctcaaaaaaacgcacg

SEQ ID NO: 41289 - DNA, 50 bp, synthetic construct
  source 1..50: mol_type = other DNA
aaatatcattactaaaaaatcccaaaacccaaaaccccacaaaaaacaca

SEQ ID NO: 41290 - DNA, 50 bp, synthetic construct
  source 1..50: mol_type = other DNA
aaatatcgttactaaaaaatcccaaaacccgaaaccccgcaaaaaacgcg

SEQ ID NO: 41291 - DNA, 50 bp, synthetic construct
  source 1..50: mol_type = other DNA
caccacatataaaatatcattactaaaaaatcccaaaacccaaaacccca

SEQ ID NO: 41292 - DNA, 50 bp, synthetic construct
  source 1..50: mol_type = other DNA
caccacgtataaaatatcgttactaaaaaatcccaaaacccgaaaccccg

SEQ ID NO: 41293 - DNA, 50 bp, synthetic construct
  source 1..50: mol_type = other DNA
ctaaaccacaccacatataaaatatcattactaaaaaatcccaaaaccca

SEQ ID NO: 41294 - DNA, 50 bp, synthetic construct
  source 1..50: mol_type = other DNA
ctaaaccgcaccacgtataaaatatcgttactaaaaaatcccaaaacccg

SEQ ID NO: 41295 - DNA, 50 bp, synthetic construct
  source 1..50: mol_type = other DNA
aaccaacacactttttacaaaattccaaaccttaaaacttttcaacaaca

SEQ ID NO: 41296 - DNA, 50 bp, synthetic construct
  source 1..50: mol_type = other DNA
gaccaacgcgctttttacgaaattccgaaccttaaaacttttcaacaacg

SEQ ID NO: 41297 - DNA, 50 bp, synthetic construct
  source 1..50: mol_type = other DNA
acacaccccaaaaaaactacaaataccaaatcaacacataaacataacca

SEQ ID NO: 41298 - DNA, 50 bp, synthetic construct
  source 1..50: mol_type = other DNA
acacgccccaaaaaaactacaaataccaaatcaacacgtaaacgtaaccg

SEQ ID NO: 41299 - DNA, 50 bp, synthetic construct
  source 1..50: mol_type = other DNA
acaaaaaaaaaacctaaataataataacacaactcatccctccttaaaca

SEQ ID NO: 41300 - DNA, 50 bp, synthetic construct
  source 1..50: mol_type = other DNA
acgaaaaaaaaacctaaataataataacgcaactcatccctccttaaacg

SEQ ID NO: 41301 - DNA, 50 bp, synthetic construct
  source 1..50: mol_type = other DNA
aaaaaaccatacacaacaaaacactactctaaaataacaaacaccaaaca

SEQ ID NO: 41302 - DNA, 50 bp, synthetic construct
  source 1..50: mol_type = other DNA
aaaaaaccgtacgcaacgaaacgctactctaaaataacgaacgccaaacg

SEQ ID NO: 41303 - DNA, 50 bp, synthetic construct
  source 1..50: mol_type = other DNA
aaaaaaacaccataactttaaacatcttcacaacaaaactccaaaaacca

SEQ ID NO: 41304 - DNA, 50 bp, synthetic construct
  source 1..50: mol_type = other DNA
aaaaaaacaccgtaactttaaacatcttcgcaacgaaactccgaaaaccg

SEQ ID NO: 41305 - DNA, 50 bp, synthetic construct
  source 1..50: mol_type = other DNA
tctatttcactttaaaaattccctaaaaaaacaaaaaattaccccaacca

SEQ ID NO: 41306 - DNA, 50 bp, synthetic construct
  source 1..50: mol_type = other DNA
tctatttcgctttaaaaattccctaaaaaaacaaaaaattaccccaaccg

SEQ ID NO: 41307 - DNA, 50 bp, synthetic construct
  source 1..50: mol_type = other DNA
tttaccaaaaacaaaataaacaaactcctacacaccactctaccactaca

SEQ ID NO: 41308 - DNA, 50 bp, synthetic construct
  source 1..50: mol_type = other DNA
tttaccaaaaacaaaataaacaaactcctacgcgccactctaccactacg

SEQ ID NO: 41309 - DNA, 50 bp, synthetic construct
  source 1..50: mol_type = other DNA
ttaattttaataactttcttccttttattttccatcatatacaaatttca

SEQ ID NO: 41310 - DNA, 50 bp, synthetic construct
  source 1..50: mol_type = other DNA
ttaattttaataactttcttccttttattttccgtcgtatacgaatttcg

SEQ ID NO: 41311 - DNA, 50 bp, synthetic construct
  source 1..50: mol_type = other DNA
taactttcttccttttattttccatcatatacaaatttcactacaaaaca

SEQ ID NO: 41312 - DNA, 50 bp, synthetic construct
  source 1..50: mol_type = other DNA
taactttcttccttttattttccgtcgtatacgaatttcgctacaaaacg

SEQ ID NO: 41313 - DNA, 50 bp, synthetic construct
  source 1..50: mol_type = other DNA
ttccttttattttccatcatatacaaatttcactacaaaacaaacttaca

SEQ ID NO: 41314 - DNA, 50 bp, synthetic construct
  source 1..50: mol_type = other DNA
ttccttttattttccgtcgtatacgaatttcgctacaaaacgaacttacg

SEQ ID NO: 41315 - DNA, 50 bp, synthetic construct
  source 1..50: mol_type = other DNA
accccacaaatacttcctaaaaaaaatatcctaactcccaaaatacacca

SEQ ID NO: 41316 - DNA, 50 bp, synthetic construct
  source 1..50: mol_type = other DNA
accccgcaaatacttcctaaaaaaaatatcctaactcccaaaatacaccg

SEQ ID NO: 41317 - DNA, 50 bp, synthetic construct
  source 1..50: mol_type = other DNA
atctaaaaatttaaaaaactccacttcattttaccccaaaatacctaaca

SEQ ID NO: 41318 - DNA, 50 bp, synthetic construct
  source 1..50: mol_type = other DNA
atctaaaaatttaaaaaactccgcttcgttttaccccgaaatacctaacg

SEQ ID NO: 41319 - DNA, 50 bp, synthetic construct
  source 1..50: mol_type = other DNA
aaataccaaacaataaatacaacccaccatacacaaaccaaaccaaaaca

SEQ ID NO: 41320 - DNA, 50 bp, synthetic construct
  source 1..50: mol_type = other DNA
aaataccaaacaataaatacaacccaccatacacgaaccgaaccaaaacg

SEQ ID NO: 41321 - DNA, 50 bp, synthetic construct
  source 1..50: mol_type = other DNA
aacaatctcctaaaataaaaaataaacccacatctaaaatttactttcca

SEQ ID NO: 41322 - DNA, 50 bp, synthetic construct
  source 1..50: mol_type = other DNA
aacgatctcctaaaataaaaaataaacccgcgtctaaaatttactttccg

SEQ ID NO: 41323 - DNA, 50 bp, synthetic construct
  source 1..50: mol_type = other DNA
atccaaaatattcaacaaaaaaaatcaacaaaaaacaaatcccaaacaca

SEQ ID NO: 41324 - DNA, 50 bp, synthetic construct
  source 1..50: mol_type = other DNA
atccaaaatattcaacgaaaaaaatcaacgaaaaacaaatcccaaacgcg

SEQ ID NO: 41325 - DNA, 50 bp, synthetic construct
  source 1..50: mol_type = other DNA
aaccaactatacacaaaaaatcacaaaaattaaacctaaatcaaaacaca

SEQ ID NO: 41326 - DNA, 50 bp, synthetic construct
  source 1..50: mol_type = other DNA
aaccgactatacgcgaaaaatcgcgaaaattaaacctaaatcaaaacgcg

SEQ ID NO: 41327 - DNA, 50 bp, synthetic construct
  source 1..50: mol_type = other DNA
aactatacacaaaaaatcacaaaaattaaacctaaatcaaaacacaatca

SEQ ID NO: 41328 - DNA, 50 bp, synthetic construct
  source 1..50: mol_type = other DNA
gactatacgcgaaaaatcgcgaaaattaaacctaaatcaaaacgcgatcg

SEQ ID NO: 41329 - DNA, 50 bp, synthetic construct
  source 1..50: mol_type = other DNA
tttcaaaattcctaatacaaacaaaatccaaaacaaccaaaaaaccaaca

SEQ ID NO: 41330 - DNA, 50 bp, synthetic construct
  source 1..50: mol_type = other DNA
tttcgaaattcctaatacaaacaaaatccgaaacaaccgaaaaaccgacg

SEQ ID NO: 41331 - DNA, 50 bp, synthetic construct
  source 1..50: mol_type = other DNA
cctaatacaaacaaaatccaaaacaaccaaaaaaccaacaaacttccaca

SEQ ID NO: 41332 - DNA, 50 bp, synthetic construct
  source 1..50: mol_type = other DNA
cctaatacaaacaaaatccgaaacaaccgaaaaaccgacgaacttccacg

SEQ ID NO: 41333 - DNA, 50 bp, synthetic construct
  source 1..50: mol_type = other DNA
aatatttccttacaaataatcttcccaaaaatcatatcaccaccaaacca

SEQ ID NO: 41334 - DNA, 50 bp, synthetic construct
  source 1..50: mol_type = other DNA
aatatttccttacgaataatcttcccaaaaatcgtatcgccaccaaaccg

SEQ ID NO: 41335 - DNA, 50 bp, synthetic construct
  source 1..50: mol_type = other DNA
caatacacacacacaaaattaaataaaacaccaaaaccaaaacacctaca

SEQ ID NO: 41336 - DNA, 50 bp, synthetic construct
  source 1..50: mol_type = other DNA
caatacgcacgcgcaaaattaaataaaacgccaaaaccgaaacacctacg

SEQ ID NO: 41337 - DNA, 50 bp, synthetic construct
  source 1..50: mol_type = other DNA
aacatccatacaaaaaaacaacatctacacacattataaaacaataaaca

SEQ ID NO: 41338 - DNA, 50 bp, synthetic construct
  source 1..50: mol_type = other DNA
aacatccgtacgaaaaaacgacgtctacgcacgttataaaacgataaacg

SEQ ID NO: 41339 - DNA, 50 bp, synthetic construct
  source 1..50: mol_type = other DNA
aaaatccaaaactacaacactcacaaaaaaaaacactccaaaaaataaca

SEQ ID NO: 41340 - DNA, 50 bp, synthetic construct
  source 1..50: mol_type = other DNA
aaaatccgaaactacaacactcgcgaaaaaaaacgctccgaaaaataacg

SEQ ID NO: 41341 - DNA, 50 bp, synthetic construct
  source 1..50: mol_type = other DNA
aactaacaaacacctaaaatccaaaactacaacactcacaaaaaaaaaca

SEQ ID NO: 41342 - DNA, 50 bp, synthetic construct
  source 1..50: mol_type = other DNA
aactaacgaacgcctaaaatccgaaactacaacactcgcgaaaaaaaacg

SEQ ID NO: 41343 - DNA, 50 bp, synthetic construct
  source 1..50: mol_type = other DNA
attaacctctataactaacaaacacctaaaatccaaaactacaacactca

SEQ ID NO: 41344 - DNA, 50 bp, synthetic construct
  source 1..50: mol_type = other DNA
attaacctctataactaacgaacgcctaaaatccgaaactacaacactcg

SEQ ID NO: 41345 - DNA, 50 bp, synthetic construct
  source 1..50: mol_type = other DNA
accaaaaaactacaaacacactaaaaaacacaactacaaacattaaaaca

SEQ ID NO: 41346 - DNA, 50 bp, synthetic construct
  source 1..50: mol_type = other DNA
accaaaaaactacgaacgcgctaaaaaacgcaactacaaacgttaaaacg

SEQ ID NO: 41347 - DNA, 50 bp, synthetic construct
  source 1..50: mol_type = other DNA
tacaaacacactaaaaaacacaactacaaacattaaaacaacaaaaacca

SEQ ID NO: 41348 - DNA, 50 bp, synthetic construct
  source 1..50: mol_type = other DNA
tacgaacgcgctaaaaaacgcaactacaaacgttaaaacgacaaaaaccg

SEQ ID NO: 41349 - DNA, 50 bp, synthetic construct
  source 1..50: mol_type = other DNA
taaaaaacacaactacaaacattaaaacaacaaaaaccacaaaaccaaca

SEQ ID NO: 41350 - DNA, 50 bp, synthetic construct
  source 1..50: mol_type = other DNA
taaaaaacgcaactacaaacgttaaaacgacaaaaaccgcgaaaccgacg

SEQ ID NO: 41351 - DNA, 50 bp, synthetic construct
  source 1..50: mol_type = other DNA
accaacactaaaaaaaactacaaccaaaacaaacaactaaaacaaaaaca

SEQ ID NO: 41352 - DNA, 50 bp, synthetic construct
  source 1..50: mol_type = other DNA
accgacgctaaaaaaaactacgaccgaaacgaacgactaaaacaaaaacg

SEQ ID NO: 41353 - DNA, 50 bp, synthetic construct
  source 1..50: mol_type = other DNA
acaaacaactaaaacaaaaacaacaataaatacaataccaaccccaatca

SEQ ID NO: 41354 - DNA, 50 bp, synthetic construct
  source 1..50: mol_type = other DNA
acgaacgactaaaacaaaaacgacgataaatacaataccaaccccaatcg

SEQ ID NO: 41355 - DNA, 50 bp, synthetic construct
  source 1..50: mol_type = other DNA
aaacaactaaaacaaaaacaacaataaatacaataccaaccccaatcaca

SEQ ID NO: 41356 - DNA, 50 bp, synthetic construct
  source 1..50: mol_type = other DNA
gaacgactaaaacaaaaacgacgataaatacaataccaaccccaatcgcg

SEQ ID NO: 41357 - DNA, 50 bp, synthetic construct
  source 1..50: mol_type = other DNA
aaaacaaaaattcaaaacttcaaaaccccacccaaaaaaccaaaaaaaca

SEQ ID NO: 41358 - DNA, 50 bp, synthetic construct
  source 1..50: mol_type = other DNA
aaaacgaaaattcgaaacttcgaaaccccgcccaaaaaaccgaaaaaacg

SEQ ID NO: 41359 - DNA, 50 bp, synthetic construct
  source 1..50: mol_type = other DNA
ctccccccaacttttcacatctaaaaatcaaaaaaataatacaaaaaaca

SEQ ID NO: 41360 - DNA, 50 bp, synthetic construct
  source 1..50: mol_type = other DNA
ctccccccaacttttcacgtctaaaaatcgaaaaaataatacgaaaaacg

SEQ ID NO: 41361 - DNA, 50 bp, synthetic construct
  source 1..50: mol_type = other DNA
ccccaacttttcacatctaaaaatcaaaaaaataatacaaaaaacaaaca

SEQ ID NO: 41362 - DNA, 50 bp, synthetic construct
  source 1..50: mol_type = other DNA
ccccaacttttcacgtctaaaaatcgaaaaaataatacgaaaaacgaacg

SEQ ID NO: 41363 - DNA, 50 bp, synthetic construct
  source 1..50: mol_type = other DNA
acccaaaatctctaaataaaaatttcaaaaaacaaaaacacctaactcca

SEQ ID NO: 41364 - DNA, 50 bp, synthetic construct
  source 1..50: mol_type = other DNA
acccgaaatctctaaataaaaatttcgaaaaacaaaaacacctaactccg

SEQ ID NO: 41365 - DNA, 50 bp, synthetic construct
  source 1..50: mol_type = other DNA
tctctaaataaaaatttcaaaaaacaaaaacacctaactccaaaactcca

SEQ ID NO: 41366 - DNA, 50 bp, synthetic construct
  source 1..50: mol_type = other DNA
tctctaaataaaaatttcgaaaaacaaaaacacctaactccgaaactccg

SEQ ID NO: 41367 - DNA, 50 bp, synthetic construct
  source 1..50: mol_type = other DNA
taaaaataactcaactcccacaacaaaataaccaaaaactttcaaaccca

SEQ ID NO: 41368 - DNA, 50 bp, synthetic construct
  source 1..50: mol_type = other DNA
taaaaataactcaactcccgcgacgaaataaccaaaaactttcaaacccg

SEQ ID NO: 41369 - DNA, 50 bp, synthetic construct
  source 1..50: mol_type = other DNA
ttaaccaaattaatctcaaattcccaaactcaaataatccacccacctca

SEQ ID NO: 41370 - DNA, 50 bp, synthetic construct
  source 1..50: mol_type = other DNA
ttaaccaaattaatctcaaattcccgaactcaaataatccacccacctcg

SEQ ID NO: 41371 - DNA, 50 bp, synthetic construct
  source 1..50: mol_type = other DNA
acattttaaattatatatcatcctaaataatataataaaatcttatacca

SEQ ID NO: 41372 - DNA, 50 bp, synthetic construct
  source 1..50: mol_type = other DNA
acgttttaaattatatatcatcctaaataatataataaaatcttataccg

SEQ ID NO: 41373 - DNA, 50 bp, synthetic construct
  source 1..50: mol_type = other DNA
tatggatatgttggataaaggatgattttttaggtaggataaggtaggat

SEQ ID NO: 41374 - DNA, 50 bp, synthetic construct
  source 1..50: mol_type = other DNA
tatggatatgttggataaaggatgattttttaggtaggataaggtaggac

SEQ ID NO: 41375 - DNA, 50 bp, synthetic construct
  source 1..50: mol_type = other DNA
aatctactatactaacaatcaacaatactccataaacataaaaccctcca

SEQ ID NO: 41376 - DNA, 50 bp, synthetic construct
  source 1..50: mol_type = other DNA
aatctactatactaacaatcaacgatactccgtaaacgtaaaaccctccg

SEQ ID NO: 41377 - DNA, 50 bp, synthetic construct
  source 1..50: mol_type = other DNA
tactaacaatcaacaatactccataaacataaaaccctccaaaccaaaca

SEQ ID NO: 41378 - DNA, 50 bp, synthetic construct
  source 1..50: mol_type = other DNA
tactaacaatcaacgatactccgtaaacgtaaaaccctccgaaccaaacg

SEQ ID NO: 41379 - DNA, 50 bp, synthetic construct
  source 1..50: mol_type = other DNA
aaccaaacacaaaatataatctcataatacactattttttaaacccctca

SEQ ID NO: 41380 - DNA, 50 bp, synthetic construct
  source 1..50: mol_type = other DNA
aaccaaacgcgaaatataatctcgtaatacgctattttttaaacccctcg

SEQ ID NO: 41381 - DNA, 50 bp, synthetic construct
  source 1..50: mol_type = other DNA
aaaaaacaaaaaataatacactctactctaatacatattaacaattatca

SEQ ID NO: 41382 - DNA, 50 bp, synthetic construct
  source 1..50: mol_type = other DNA
aaaaaacaaaaaataatacactctactctaatacgtattaacaattatcg

SEQ ID NO: 41383 - DNA, 50 bp, synthetic construct
  source 1..50: mol_type = other DNA
gggtaagggttttataaaagattataaatatggtgtagtgtatattgttt

SEQ ID NO: 41384 - DNA, 50 bp, synthetic construct
  source 1..50: mol_type = other DNA
gggtaagggttttataaaagattataaatatggtgtagtgtatattgttc

SEQ ID NO: 41385 - DNA, 50 bp, synthetic construct
  source 1..50: mol_type = other DNA
taatactttcttaacaacactcaaaaacccccaacaaaaacaaatacaca

SEQ ID NO: 41386 - DNA, 50 bp, synthetic construct
  source 1..50: mol_type = other DNA
taatactttcttaacgacactcaaaaacccccgacaaaaacgaatacgcg

SEQ ID NO: 41387 - DNA, 50 bp, synthetic construct
  source 1..50: mol_type = other DNA
taacaacactcaaaaacccccaacaaaaacaaatacacaaattaaaacca

SEQ ID NO: 41388 - DNA, 50 bp, synthetic construct
  source 1..50: mol_type = other DNA
taacgacactcaaaaacccccgacaaaaacgaatacgcgaattaaaaccg

SEQ ID NO: 41389 - DNA, 50 bp, synthetic construct
  source 1..50: mol_type = other DNA
caacaaaaacaaatacacaaattaaaaccacatcacaaacaaaaaaaaca

SEQ ID NO: 41390 - DNA, 50 bp, synthetic construct
  source 1..50: mol_type = other DNA
cgacaaaaacgaatacgcgaattaaaaccgcatcacaaacaaaaaaaacg

SEQ ID NO: 41391 - DNA, 50 bp, synthetic construct
  source 1..50: mol_type = other DNA
aaaaacaaatacacaaattaaaaccacatcacaaacaaaaaaaacaatca

SEQ ID NO: 41392 - DNA, 50 bp, synthetic construct
  source 1..50: mol_type = other DNA
aaaaacgaatacgcgaattaaaaccgcatcacaaacaaaaaaaacgatcg

SEQ ID NO: 41393 - DNA, 50 bp, synthetic construct
  source 1..50: mol_type = other DNA
acaactaccctcttaccaaaatctcacacctactactaaaaatctattca

SEQ ID NO: 41394 - DNA, 50 bp, synthetic construct
  source 1..50: mol_type = other DNA
acgactaccctcttaccaaaatctcgcacctactactaaaaatctattcg

SEQ ID NO: 41395 - DNA, 50 bp, synthetic construct
  source 1..50: mol_type = other DNA
caaattcccaataacaaatacaaaactctaacaaaaaaacaatcaccaca

SEQ ID NO: 41396 - DNA, 50 bp, synthetic construct
  source 1..50: mol_type = other DNA
caaattcccaataacaaatacgaaactctaacaaaaaaacaatcgccgcg

SEQ ID NO: 41397 - DNA, 50 bp, synthetic construct
  source 1..50: mol_type = other DNA
tactaaaaacaaactacaaaatacccaaaccataaccataaactcaccca

SEQ ID NO: 41398 - DNA, 50 bp, synthetic construct
  source 1..50: mol_type = other DNA
tactaaaaacaaactacgaaatacccgaaccgtaaccataaactcacccg

SEQ ID NO: 41399 - DNA, 50 bp, synthetic construct
  source 1..50: mol_type = other DNA
caaacattacaaaaaattatttactaaaattcaaaccttattacaacaca

SEQ ID NO: 41400 - DNA, 50 bp, synthetic construct
  source 1..50: mol_type = other DNA
cgaacgttacgaaaaattatttactaaaattcgaaccttattacgacgcg

SEQ ID NO: 41401 - DNA, 50 bp, synthetic construct
  source 1..50: mol_type = other DNA
ttaaacaaacattacaaaaaattatttactaaaattcaaaccttattaca

SEQ ID NO: 41402 - DNA, 50 bp, synthetic construct
  source 1..50: mol_type = other DNA
ttaaacgaacgttacgaaaaattatttactaaaattcgaaccttattacg

SEQ ID NO: 41403 - DNA, 50 bp, synthetic construct
  source 1..50: mol_type = other DNA
aaaaaacttcacaccataacaaaatccaaactctaacaaacaacccttca

SEQ ID NO: 41404 - DNA, 50 bp, synthetic construct
  source 1..50: mol_type = other DNA
aaaaaacttcgcgccgtaacaaaatccgaactctaacaaacaacccttcg

SEQ ID NO: 41405 - DNA, 50 bp, synthetic construct
  source 1..50: mol_type = other DNA
acaaacttatctccaaccaatcacacataaataaaaaccttaaacaaaca

SEQ ID NO: 41406 - DNA, 50 bp, synthetic construct
  source 1..50: mol_type = other DNA
gcaaacttatctccgaccaatcgcgcgtaaataaaaaccttaaacgaacg

SEQ ID NO: 41407 - DNA, 50 bp, synthetic construct
  source 1..50: mol_type = other DNA
caataaaattactcccttaaacatttcttaacatacacatacatactaca

SEQ ID NO: 41408 - DNA, 50 bp, synthetic construct
  source 1..50: mol_type = other DNA
caataaaattactcccttaaacgtttcttaacgtacgcgtacgtactacg

SEQ ID NO: 41409 - DNA, 50 bp, synthetic construct
  source 1..50: mol_type = other DNA
actcacaccaccccaattttaacatcacaataaaattactcccttaaaca

SEQ ID NO: 41410 - DNA, 50 bp, synthetic construct
  source 1..50: mol_type = other DNA
actcgcaccgccccaattttaacgtcacaataaaattactcccttaaacg

SEQ ID NO: 41411 - DNA, 50 bp, synthetic construct
  source 1..50: mol_type = other DNA
ccccataactaatttaaataaaatctcacaaaatatctttaaatctcaca

SEQ ID NO: 41412 - DNA, 50 bp, synthetic construct
  source 1..50: mol_type = other DNA
ccccgtaactaatttaaataaaatctcgcgaaatatctttaaatctcacg

SEQ ID NO: 41413 - DNA, 50 bp, synthetic construct
  source 1..50: mol_type = other DNA
catcataaaatttaaaaacacctcacaaaacctcacctaaatcaatcaca

SEQ ID NO: 41414 - DNA, 50 bp, synthetic construct
  source 1..50: mol_type = other DNA
cgtcgtaaaatttaaaaacacctcgcgaaacctcacctaaatcaatcacg

SEQ ID NO: 41415 - DNA, 50 bp, synthetic construct
  source 1..50: mol_type = other DNA
aatcaatcacaaaatctaccttaacattataattccatcttctccatcca

SEQ ID NO: 41416 - DNA, 50 bp, synthetic construct
  source 1..50: mol_type = other DNA
aatcaatcacgaaatctaccttaacgttataattccgtcttctccatccg

SEQ ID NO: 41417 - DNA, 50 bp, synthetic construct
  source 1..50: mol_type = other DNA
ttaacattataattccatcttctccatccattaaaaacaccaaaaacaca

SEQ ID NO: 41418 - DNA, 50 bp, synthetic construct
  source 1..50: mol_type = other DNA
ttaacgttataattccgtcttctccatccgttaaaaacaccgaaaacgcg

SEQ ID NO: 41419 - DNA, 50 bp, synthetic construct
  source 1..50: mol_type = other DNA
aattccttctttaccaaataacaacttctacttccacatattcaaaatca

SEQ ID NO: 41420 - DNA, 50 bp, synthetic construct
  source 1..50: mol_type = other DNA
aattccttctttaccgaataacgacttctacttccgcatattcaaaatcg

SEQ ID NO: 41421 - DNA, 50 bp, synthetic construct
  source 1..50: mol_type = other DNA
taaccataaatatttactttctctaccctaatctcaaaacatccatttca

SEQ ID NO: 41422 - DNA, 50 bp, synthetic construct
  source 1..50: mol_type = other DNA
taaccgtaaatatttactttctctaccctaatctcaaaacgtccgtttcg

SEQ ID NO: 41423 - DNA, 50 bp, synthetic construct
  source 1..50: mol_type = other DNA
atacccaaaacaaccctccctcaaacaactacatttaaaattaaaactca

SEQ ID NO: 41424 - DNA, 50 bp, synthetic construct
  source 1..50: mol_type = other DNA
atacccgaaacaaccctccctcaaacaactacgtttaaaattaaaactcg

SEQ ID NO: 41425 - DNA, 50 bp, synthetic construct
  source 1..50: mol_type = other DNA
aactcaaatttcacatttctccttcaataacattaaaatcactcaatcca

SEQ ID NO: 41426 - DNA, 50 bp, synthetic construct
  source 1..50: mol_type = other DNA
aactcaaatttcacatttctccttcgataacattaaaatcgctcgatccg

SEQ ID NO: 41427 - DNA, 50 bp, synthetic construct
  source 1..50: mol_type = other DNA
ccaattactacacacctccaattttaacatccaaaaaacctaaaaaaaca

SEQ ID NO: 41428 - DNA, 50 bp, synthetic construct
  source 1..50: mol_type = other DNA
ccgattactacacacctccaattttaacgtccaaaaaacctaaaaaaacg

SEQ ID NO: 41429 - DNA, 50 bp, synthetic construct
  source 1..50: mol_type = other DNA
tccaattttaacatccaaaaaacctaaaaaaacaacacattacctactca

SEQ ID NO: 41430 - DNA, 50 bp, synthetic construct
  source 1..50: mol_type = other DNA
tccaattttaacgtccaaaaaacctaaaaaaacgacacgttacctactcg

SEQ ID NO: 41431 - DNA, 50 bp, synthetic construct
  source 1..50: mol_type = other DNA
ttatcctccaaacactacattccaactccattaacattataaaaaaaaca

SEQ ID NO: 41432 - DNA, 50 bp, synthetic construct
  source 1..50: mol_type = other DNA
ttatcctccgaacgctacgttccaactccgttaacgttataaaaaaaacg

SEQ ID NO: 41433 - DNA, 50 bp, synthetic construct
  source 1..50: mol_type = other DNA
cctaacaccaaataaaattaaacacaaactaaattaaacctcaaccacca

SEQ ID NO: 41434 - DNA, 50 bp, synthetic construct
  source 1..50: mol_type = other DNA
cctaacaccgaataaaattaaacgcgaactaaattaaacctcaaccgccg

SEQ ID NO: 41435 - DNA, 50 bp, synthetic construct
  source 1..50: mol_type = other DNA
aactctactcaataccaaaaaaacatataaacccaaaatctcaaaccaca

SEQ ID NO: 41436 - DNA, 50 bp, synthetic construct
  source 1..50: mol_type = other DNA
aactctactcgataccaaaaaaacgtataaacccaaaatctcaaaccgcg

SEQ ID NO: 41437 - DNA, 50 bp, synthetic construct
  source 1..50: mol_type = other DNA
aaacccaaaatctcaaaccacaatactaaatccaaaaaaacaaaatcaca

SEQ ID NO: 41438 - DNA, 50 bp, synthetic construct
  source 1..50: mol_type = other DNA
aaacccaaaatctcaaaccgcgatactaaatccgaaaaaacaaaatcgcg

SEQ ID NO: 41439 - DNA, 50 bp, synthetic construct
  source 1..50: mol_type = other DNA
acaatactaaatccaaaaaaacaaaatcacacataactaaaaacaaatca

SEQ ID NO: 41440 - DNA, 50 bp, synthetic construct
  source 1..50: mol_type = other DNA
gcgatactaaatccgaaaaaacaaaatcgcgcgtaactaaaaacaaatcg

SEQ ID NO: 41441 - DNA, 50 bp, synthetic construct
  source 1..50: mol_type = other DNA
aaaaaaacaaaatcacacataactaaaaacaaatcataaacaaaccaaca

SEQ ID NO: 41442 - DNA, 50 bp, synthetic construct
  source 1..50: mol_type = other DNA
gaaaaaacaaaatcgcgcgtaactaaaaacaaatcgtaaacaaaccgacg

SEQ ID NO: 41443 - DNA, 50 bp, synthetic construct
  source 1..50: mol_type = other DNA
aaaaattaaaacaaaatcctaccttttattttaccccacccacctcacca

SEQ ID NO: 41444 - DNA, 50 bp, synthetic construct
  source 1..50: mol_type = other DNA
aaaaattaaaacgaaatcctaccttttattttaccccacccgcctcgccg

SEQ ID NO: 41445 - DNA, 50 bp, synthetic construct
  source 1..50: mol_type = other DNA
ccaaaaaattaaaacaaaatcctaccttttattttaccccacccacctca

SEQ ID NO: 41446 - DNA, 50 bp, synthetic construct
  source 1..50: mol_type = other DNA
ccgaaaaattaaaacgaaatcctaccttttattttaccccacccgcctcg

SEQ ID NO: 41447 - DNA, 50 bp, synthetic construct
  source 1..50: mol_type = other DNA
tcctcaataaaataaaaccaactacaaactaacaccaaaaaattaaaaca

SEQ ID NO: 41448 - DNA, 50 bp, synthetic construct
  source 1..50: mol_type = other DNA
tcctcgataaaataaaaccgactacgaactaacgccgaaaaattaaaacg

SEQ ID NO: 41449 - DNA, 50 bp, synthetic construct
  source 1..50: mol_type = other DNA
aaacaacatctaatcctcaataaaataaaaccaactacaaactaacacca

SEQ ID NO: 41450 - DNA, 50 bp, synthetic construct
  source 1..50: mol_type = other DNA
aaacaacatctaatcctcgataaaataaaaccgactacgaactaacgccg

SEQ ID NO: 41451 - DNA, 50 bp, synthetic construct
  source 1..50: mol_type = other DNA
actccaaaaatattaaaaccttcaatattccaacccaaacaaaaacacca

SEQ ID NO: 41452 - DNA, 50 bp, synthetic construct
  source 1..50: mol_type = other DNA
actccaaaaatattaaaaccttcgatattccgacccgaacgaaaacgccg

SEQ ID NO: 41453 - DNA, 50 bp, synthetic construct
  source 1..50: mol_type = other DNA
aaactccaaactccaaaaatattaaaaccttcaatattccaacccaaaca

SEQ ID NO: 41454 - DNA, 50 bp, synthetic construct
  source 1..50: mol_type = other DNA
aaactccgaactccaaaaatattaaaaccttcgatattccgacccgaacg

SEQ ID NO: 41455 - DNA, 50 bp, synthetic construct
  source 1..50: mol_type = other DNA
ttataaactccaaactccaaaaatattaaaaccttcaatattccaaccca

SEQ ID NO: 41456 - DNA, 50 bp, synthetic construct
  source 1..50: mol_type = other DNA
ttataaactccgaactccaaaaatattaaaaccttcgatattccgacccg

SEQ ID NO: 41457 - DNA, 50 bp, synthetic construct
  source 1..50: mol_type = other DNA
taaaacactataaaacaaaaatcacaaaaccaataaccttataaactcca

SEQ ID NO: 41458 - DNA, 50 bp, synthetic construct
  source 1..50: mol_type = other DNA
taaaacgctataaaacgaaaatcgcgaaaccgataaccttataaactccg

SEQ ID NO: 41459 - DNA, 50 bp, synthetic construct
  source 1..50: mol_type = other DNA
ccaaattacaaattcaaataaaacactataaaacaaaaatcacaaaacca

SEQ ID NO: 41460 - DNA, 50 bp, synthetic construct
  source 1..50: mol_type = other DNA
ccaaattacgaattcaaataaaacgctataaaacgaaaatcgcgaaaccg

SEQ ID NO: 41461 - DNA, 50 bp, synthetic construct
  source 1..50: mol_type = other DNA
caaaacccaaattacaaattcaaataaaacactataaaacaaaaatcaca

SEQ ID NO: 41462 - DNA, 50 bp, synthetic construct
  source 1..50: mol_type = other DNA
cgaaacccaaattacgaattcaaataaaacgctataaaacgaaaatcgcg

SEQ ID NO: 41463 - DNA, 50 bp, synthetic construct
  source 1..50: mol_type = other DNA
cccaaaacccaaattacaaattcaaataaaacactataaaacaaaaatca

SEQ ID NO: 41464 - DNA, 50 bp, synthetic construct
  source 1..50: mol_type = other DNA
cccgaaacccaaattacgaattcaaataaaacgctataaaacgaaaatcg

SEQ ID NO: 41465 - DNA, 50 bp, synthetic construct
  source 1..50: mol_type = other DNA
acacaccataaccatttaaaataactaatttctatcatataactaaaaca

SEQ ID NO: 41466 - DNA, 50 bp, synthetic construct
  source 1..50: mol_type = other DNA
gcgcgccgtaaccgtttaaaataactaatttctatcatataactaaaacg

SEQ ID NO: 41467 - DNA, 50 bp, synthetic construct
  source 1..50: mol_type = other DNA
acacctcaatcatataacaaaaattaatcacttcaaacaaccacaacaca

SEQ ID NO: 41468 - DNA, 50 bp, synthetic construct
  source 1..50: mol_type = other DNA
acgcctcaatcatataacaaaaattaatcacttcaaacgaccacgacgcg

SEQ ID NO: 41469 - DNA, 50 bp, synthetic construct
  source 1..50: mol_type = other DNA
aatcatataacaaaaattaatcacttcaaacaaccacaacacacaaaaca

SEQ ID NO: 41470 - DNA, 50 bp, synthetic construct
  source 1..50: mol_type = other DNA
aatcatataacaaaaattaatcacttcaaacgaccacgacgcgcgaaacg

SEQ ID NO: 41471 - DNA, 50 bp, synthetic construct
  source 1..50: mol_type = other DNA
aacaaaaccaacactcattaactaaaaaaaaaccacatcacataacaaca

SEQ ID NO: 41472 - DNA, 50 bp, synthetic construct
  source 1..50: mol_type = other DNA
aacaaaaccgacactcattaactaaaaaaaaaccgcatcacgtaacgacg

SEQ ID NO: 41473 - DNA, 50 bp, synthetic construct
  source 1..50: mol_type = other DNA
ataaactcactaacaaatcccatcacataacaaaaacaaaacataaacca

SEQ ID NO: 41474 - DNA, 50 bp, synthetic construct
  source 1..50: mol_type = other DNA
ataaactcactaacgaatcccgtcacgtaacaaaaacgaaacgtaaaccg

SEQ ID NO: 41475 - DNA, 50 bp, synthetic construct
  source 1..50: mol_type = other DNA
aaacaaaatctaacaactcctaaaacacaaaaaacccacaaacataccca

SEQ ID NO: 41476 - DNA, 50 bp, synthetic construct
  source 1..50: mol_type = other DNA
gaacaaaatctaacgactcctaaaacacgaaaaacccacaaacgtacccg

SEQ ID NO: 41477 - DNA, 50 bp, synthetic construct
  source 1..50: mol_type = other DNA
acccttaaaaaactacaccaacccacaaaaaatctaaaatctaaacaaca

SEQ ID NO: 41478 - DNA, 50 bp, synthetic construct
  source 1..50: mol_type = other DNA
gcccttaaaaaactacgccgacccgcgaaaaatctaaaatctaaacaacg

SEQ ID NO: 41479 - DNA, 50 bp, synthetic construct
  source 1..50: mol_type = other DNA
taaacactaatacaaactacccacaatacctactcaaaatcatctttaca

SEQ ID NO: 41480 - DNA, 50 bp, synthetic construct
  source 1..50: mol_type = other DNA
taaacgctaatacaaactacccgcaatacctactcgaaatcgtctttacg

SEQ ID NO: 41481 - DNA, 50 bp, synthetic construct
  source 1..50: mol_type = other DNA
caatatcaaaattctaaacactaatacaaactacccacaatacctactca

SEQ ID NO: 41482 - DNA, 50 bp, synthetic construct
  source 1..50: mol_type = other DNA
cgatatcaaaattctaaacgctaatacaaactacccgcaatacctactcg

SEQ ID NO: 41483 - DNA, 50 bp, synthetic construct
  source 1..50: mol_type = other DNA
taacattcacatactcccaaaactacatactaaaactaaacaaacaaaca

SEQ ID NO: 41484 - DNA, 50 bp, synthetic construct
  source 1..50: mol_type = other DNA
taacattcacatactcccaaaactacgtactaaaactaaacgaacgaacg

SEQ ID NO: 41485 - DNA, 50 bp, synthetic construct
  source 1..50: mol_type = other DNA
caaaaaacaccaaacctcctaaataacattcacatactcccaaaactaca

SEQ ID NO: 41486 - DNA, 50 bp, synthetic construct
  source 1..50: mol_type = other DNA
caaaaaacgccgaacctcctaaataacattcacatactcccaaaactacg

SEQ ID NO: 41487 - DNA, 50 bp, synthetic construct
  source 1..50: mol_type = other DNA
aaaacacaacaaaaacatacttaaactatccatacaacaatctctctaca

SEQ ID NO: 41488 - DNA, 50 bp, synthetic construct
  source 1..50: mol_type = other DNA
aaaacacaacgaaaacgtacttaaactatccatacgacaatctctctacg

SEQ ID NO: 41489 - DNA, 50 bp, synthetic construct
  source 1..50: mol_type = other DNA
cacaaaaacccaaacaaatacaaaaacaaaacaaaaaatacaaaataaca

SEQ ID NO: 41490 - DNA, 50 bp, synthetic construct
  source 1..50: mol_type = other DNA
cacaaaaacccaaacgaatacaaaaacaaaacgaaaaatacaaaataacg

SEQ ID NO: 41491 - DNA, 50 bp, synthetic construct
  source 1..50: mol_type = other DNA
aacaaatacaaaaacaaaacaaaaaatacaaaataacaacccaaactaca

SEQ ID NO: 41492 - DNA, 50 bp, synthetic construct
  source 1..50: mol_type = other DNA
aacgaatacaaaaacaaaacgaaaaatacaaaataacgacccgaactacg

SEQ ID NO: 41493 - DNA, 50 bp, synthetic construct
  source 1..50: mol_type = other DNA
aaactaaaaattaaaaaccaaaaccaaatccaaaaccaaaaatcacacca

SEQ ID NO: 41494 - DNA, 50 bp, synthetic construct
  source 1..50: mol_type = other DNA
aaactaaaaattaaaaaccgaaaccgaatccgaaaccgaaaatcgcgccg

SEQ ID NO: 41495 - DNA, 50 bp, synthetic construct
  source 1..50: mol_type = other DNA
acacaaaactaaaaattaaaaaccaaaaccaaatccaaaaccaaaaatca

SEQ ID NO: 41496 - DNA, 50 bp, synthetic construct
  source 1..50: mol_type = other DNA
gcgcgaaactaaaaattaaaaaccgaaaccgaatccgaaaccgaaaatcg

SEQ ID NO: 41497 - DNA, 50 bp, synthetic construct
  source 1..50: mol_type = other DNA
ccaaatcaaccttaacactaaaacacaaactaaaatcaccaaacaataca

SEQ ID NO: 41498 - DNA, 50 bp, synthetic construct
  source 1..50: mol_type = other DNA
ccaaatcaaccttaacgctaaaacgcgaactaaaatcgccaaacgatacg

SEQ ID NO: 41499 - DNA, 50 bp, synthetic construct
  source 1..50: mol_type = other DNA
accacaaaaaattctaaaaacaccaaaaactacaaatatccaaataaaca

SEQ ID NO: 41500 - DNA, 50 bp, synthetic construct
  source 1..50: mol_type = other DNA
gccgcgaaaaattctaaaaacgccgaaaactacgaatatccaaataaacg

SEQ ID NO: 41501 - DNA, 50 bp, synthetic construct
  source 1..50: mol_type = other DNA
cataaaataaaaacataacaacaactcaaataaacaaaaccccaacaaca

SEQ ID NO: 41502 - DNA, 50 bp, synthetic construct
  source 1..50: mol_type = other DNA
cgtaaaataaaaacgtaacgacgactcaaataaacgaaaccccgacaacg

SEQ ID NO: 41503 - DNA, 50 bp, synthetic construct
  source 1..50: mol_type = other DNA
ccaaacaaacacaaaatacatacaataaactacaaacaacataaaaaaca

SEQ ID NO: 41504 - DNA, 50 bp, synthetic construct
  source 1..50: mol_type = other DNA
ccaaacgaacgcgaaatacgtacgataaactacgaacgacataaaaaacg

SEQ ID NO: 41505 - DNA, 50 bp, synthetic construct
  source 1..50: mol_type = other DNA
aaccaaaacccacaaataaaaacaccaaaaccaaacaaacacaaaataca

SEQ ID NO: 41506 - DNA, 50 bp, synthetic construct
  source 1..50: mol_type = other DNA
aaccaaaacccgcaaataaaaacgccaaaaccaaacgaacgcgaaatacg

SEQ ID NO: 41507 - DNA, 50 bp, synthetic construct
  source 1..50: mol_type = other DNA
aaaaaaacaaaccaaaacccacaaataaaaacaccaaaaccaaacaaaca

SEQ ID NO: 41508 - DNA, 50 bp, synthetic construct
  source 1..50: mol_type = other DNA
aaaaaaacgaaccaaaacccgcaaataaaaacgccaaaaccaaacgaacg

SEQ ID NO: 41509 - DNA, 50 bp, synthetic construct
  source 1..50: mol_type = other DNA
aaacaaaaaaacaaaccaaaacccacaaataaaaacaccaaaaccaaaca

SEQ ID NO: 41510 - DNA, 50 bp, synthetic construct
  source 1..50: mol_type = other DNA
aaacaaaaaaacgaaccaaaacccgcaaataaaaacgccaaaaccaaacg

SEQ ID NO: 41511 - DNA, 50 bp, synthetic construct
  source 1..50: mol_type = other DNA
acacccaaaaactaaacaaaaaaacaaaccaaaacccacaaataaaaaca

SEQ ID NO: 41512 - DNA, 50 bp, synthetic construct
  source 1..50: mol_type = other DNA
acgcccaaaaactaaacaaaaaaacgaaccaaaacccgcaaataaaaacg

SEQ ID NO: 41513 - DNA, 50 bp, synthetic construct
  source 1..50: mol_type = other DNA
ttacacaacactaaaccaaaaacacaaacccaaaacaacaacaaacaaca

SEQ ID NO: 41514 - DNA, 50 bp, synthetic construct
  source 1..50: mol_type = other DNA
ttacgcaacactaaaccgaaaacgcaaacccaaaacgacaacaaacaacg

SEQ ID NO: 41515 - DNA, 50 bp, synthetic construct
  source 1..50: mol_type = other DNA
catccaaacacaaaaatctctaaaaactaaataaaaataccaaattacca

SEQ ID NO: 41516 - DNA, 50 bp, synthetic construct
  source 1..50: mol_type = other DNA
cgtccgaacgcgaaaatctctaaaaactaaataaaaataccgaattaccg

SEQ ID NO: 41517 - DNA, 50 bp, synthetic construct
  source 1..50: mol_type = other DNA
acacaaaaatctctaaaaactaaataaaaataccaaattaccaacaacca

SEQ ID NO: 41518 - DNA, 50 bp, synthetic construct
  source 1..50: mol_type = other DNA
acgcgaaaatctctaaaaactaaataaaaataccgaattaccgacaaccg

SEQ ID NO: 41519 - DNA, 50 bp, synthetic construct
  source 1..50: mol_type = other DNA
aaaccccccaaaataaaaaaatcaaactaaccacaaaaccaatccaaaca

SEQ ID NO: 41520 - DNA, 50 bp, synthetic construct
  source 1..50: mol_type = other DNA
aaaccccccgaaataaaaaaatcgaactaaccgcgaaaccaatccaaacg

SEQ ID NO: 41521 - DNA, 50 bp, synthetic construct
  source 1..50: mol_type = other DNA
aaacctacctatcaccctaacccccaaaaacaaaattccataattccaca

SEQ ID NO: 41522 - DNA, 50 bp, synthetic construct
  source 1..50: mol_type = other DNA
aaacctacctatcaccctaacccccaaaaacgaaattccataattccacg

SEQ ID NO: 41523 - DNA, 50 bp, synthetic construct
  source 1..50: mol_type = other DNA
tatatatcatactatatatccactaaaaaaactaataaaaacactaaaca

SEQ ID NO: 41524 - DNA, 50 bp, synthetic construct
  source 1..50: mol_type = other DNA
tatatatcatactatatatccgctaaaaaaactaataaaaacactaaacg

SEQ ID NO: 41525 - DNA, 50 bp, synthetic construct
  source 1..50: mol_type = other DNA
caaactaaccaaacaccctaaacataaaaccactaacaaactcaataaca

SEQ ID NO: 41526 - DNA, 50 bp, synthetic construct
  source 1..50: mol_type = other DNA
cgaactaaccaaacaccctaaacgtaaaaccgctaacaaactcaataacg

SEQ ID NO: 41527 - DNA, 50 bp, synthetic construct
  source 1..50: mol_type = other DNA
accacaactataacatataaaaacctttcctcaaaaaacaaacaaccaca

SEQ ID NO: 41528 - DNA, 50 bp, synthetic construct
  source 1..50: mol_type = other DNA
accgcaactataacgtataaaaacctttcctcgaaaaacaaacaaccgcg

SEQ ID NO: 41529 - DNA, 50 bp, synthetic construct
  source 1..50: mol_type = other DNA
tccccaatcaactccaaacaaaactattactactactactaccacaacca

SEQ ID NO: 41530 - DNA, 50 bp, synthetic construct
  source 1..50: mol_type = other DNA
tccccaatcaactccaaacaaaactattactactactactaccgcaaccg

SEQ ID NO: 41531 - DNA, 50 bp, synthetic construct
  source 1..50: mol_type = other DNA
taaaaaaaaatttaccaaaaaaaacctcctttatcccccaaaatcacaca

SEQ ID NO: 41532 - DNA, 50 bp, synthetic construct
  source 1..50: mol_type = other DNA
taaaaaaaaatttaccaaaaaaaacctcctttatcccccaaaatcacgcg

SEQ ID NO: 41533 - DNA, 50 bp, synthetic construct
  source 1..50: mol_type = other DNA
ataaactaaaaaataaatccacacaacccaaaatctaaaacacatcctca

SEQ ID NO: 41534 - DNA, 50 bp, synthetic construct
  source 1..50: mol_type = other DNA
ataaactaaaaaataaatccacgcgacccgaaatctaaaacacatcctcg

SEQ ID NO: 41535 - DNA, 50 bp, synthetic construct
  source 1..50: mol_type = other DNA
atatttcttttttcatttttaccaatctattaaataaaatatcatataca

SEQ ID NO: 41536 - DNA, 50 bp, synthetic construct
  source 1..50: mol_type = other DNA
atatttcttttttcatttttaccaatctattaaataaaatatcatatacg

SEQ ID NO: 41537 - DNA, 50 bp, synthetic construct
  source 1..50: mol_type = other DNA
aaaatatccctccacctcttaatcaaaacctaaaaaaacaaacacactca

SEQ ID NO: 41538 - DNA, 50 bp, synthetic construct
  source 1..50: mol_type = other DNA
aaaatatccctccgcctcttaatcgaaacctaaaaaaacaaacacactcg

SEQ ID NO: 41539 - DNA, 50 bp, synthetic construct
  source 1..50: mol_type = other DNA
ctactaacaaaaaaccttccaatcaaaaaaaactctaacaacctaccaca

SEQ ID NO: 41540 - DNA, 50 bp, synthetic construct
  source 1..50: mol_type = other DNA
ctactaacaaaaaaccttccaatcgaaaaaaactctaacaacctaccgcg

SEQ ID NO: 41541 - DNA, 50 bp, synthetic construct
  source 1..50: mol_type = other DNA
tcaaaatcaaaacccaacataacaacaatacctccataactatactccca

SEQ ID NO: 41542 - DNA, 50 bp, synthetic construct
  source 1..50: mol_type = other DNA
tcaaaatcaaaacccaacgtaacgacaatacctccataactatactcccg

SEQ ID NO: 41543 - DNA, 50 bp, synthetic construct
  source 1..50: mol_type = other DNA
aatacctccataactatactcccacaatacacaaactccatatcctaaca

SEQ ID NO: 41544 - DNA, 50 bp, synthetic construct
  source 1..50: mol_type = other DNA
aatacctccataactatactcccgcaatacgcaaactccatatcctaacg

SEQ ID NO: 41545 - DNA, 50 bp, synthetic construct
  source 1..50: mol_type = other DNA
aacaaaaacaaaaaacaaccaaatacccaaaaaacaaatttcctccccca

SEQ ID NO: 41546 - DNA, 50 bp, synthetic construct
  source 1..50: mol_type = other DNA
aacgaaaacaaaaaacaaccgaatacccgaaaaacgaatttcctcccccg

SEQ ID NO: 41547 - DNA, 50 bp, synthetic construct
  source 1..50: mol_type = other DNA
cctaaaaaaaataaacaaaatcacactacatcaaaaataaacccaaatca

SEQ ID NO: 41548 - DNA, 50 bp, synthetic construct
  source 1..50: mol_type = other DNA
cctaaaaaaaataaacaaaatcacactacgtcaaaaataaacccgaatcg

SEQ ID NO: 41549 - DNA, 50 bp, synthetic construct
  source 1..50: mol_type = other DNA
atagggaaaataggtttatagtttggaagggatgagtaaggttatattat

SEQ ID NO: 41550 - DNA, 50 bp, synthetic construct
  source 1..50: mol_type = other DNA
atagggaaaataggtttatagtttggaagggatgagtaaggttatattac

SEQ ID NO: 41551 - DNA, 50 bp, synthetic construct
  source 1..50: mol_type = other DNA
cacaccaacaaaaaactcatttcccaacaatcctaacaaaactaaattca

SEQ ID NO: 41552 - DNA, 50 bp, synthetic construct
  source 1..50: mol_type = other DNA
cacgccgacaaaaaactcatttcccaacaatcctaacaaaactaaattcg

SEQ ID NO: 41553 - DNA, 50 bp, synthetic construct
  source 1..50: mol_type = other DNA
aaactattaaaaaataaactccctatcaacatataccaaccacctacaca

SEQ ID NO: 41554 - DNA, 50 bp, synthetic construct
  source 1..50: mol_type = other DNA
aaactattaaaaaataaactccctatcgacgtataccaaccgcctacgcg

SEQ ID NO: 41555 - DNA, 50 bp, synthetic construct
  source 1..50: mol_type = other DNA
aaaacttctaaaaacaacaaaacaacaaaaacacaccctctcctataaca

SEQ ID NO: 41556 - DNA, 50 bp, synthetic construct
  source 1..50: mol_type = other DNA
aaaacttctaaaaacgacaaaacgacaaaaacgcgccctctcctataacg

SEQ ID NO: 41557 - DNA, 50 bp, synthetic construct
  source 1..50: mol_type = other DNA
aaaatcaattcccaaaaaacttctaaaaacaacaaaacaacaaaaacaca

SEQ ID NO: 41558 - DNA, 50 bp, synthetic construct
  source 1..50: mol_type = other DNA
aaaatcgattcccgaaaaacttctaaaaacgacaaaacgacaaaaacgcg

SEQ ID NO: 41559 - DNA, 50 bp, synthetic construct
  source 1..50: mol_type = other DNA
ataaaatcaattcccaaaaaacttctaaaaacaacaaaacaacaaaaaca

SEQ ID NO: 41560 - DNA, 50 bp, synthetic construct
  source 1..50: mol_type = other DNA
ataaaatcgattcccgaaaaacttctaaaaacgacaaaacgacaaaaacg

SEQ ID NO: 41561 - DNA, 50 bp, synthetic construct
  source 1..50: mol_type = other DNA
aacaaatcaataaaatcaattcccaaaaaacttctaaaaacaacaaaaca

SEQ ID NO: 41562 - DNA, 50 bp, synthetic construct
  source 1..50: mol_type = other DNA
aacgaatcaataaaatcgattcccgaaaaacttctaaaaacgacaaaacg

SEQ ID NO: 41563 - DNA, 50 bp, synthetic construct
  source 1..50: mol_type = other DNA
aactaccacacataaaacacaaaaaaacaaatcaataaaatcaattccca

SEQ ID NO: 41564 - DNA, 50 bp, synthetic construct
  source 1..50: mol_type = other DNA
aactaccacgcgtaaaacgcgaaaaaacgaatcaataaaatcgattcccg

SEQ ID NO: 41565 - DNA, 50 bp, synthetic construct
  source 1..50: mol_type = other DNA
aaacttaaactaccacacataaaacacaaaaaaacaaatcaataaaatca

SEQ ID NO: 41566 - DNA, 50 bp, synthetic construct
  source 1..50: mol_type = other DNA
aaacttaaactaccacgcgtaaaacgcgaaaaaacgaatcaataaaatcg

SEQ ID NO: 41567 - DNA, 50 bp, synthetic construct
  source 1..50: mol_type = other DNA
ccaatctaaaaactaaacttaaactaccacacataaaacacaaaaaaaca

SEQ ID NO: 41568 - DNA, 50 bp, synthetic construct
  source 1..50: mol_type = other DNA
ccaatctaaaaactaaacttaaactaccacgcgtaaaacgcgaaaaaacg

SEQ ID NO: 41569 - DNA, 50 bp, synthetic construct
  source 1..50: mol_type = other DNA
aatctcctccaatctaaaaactaaacttaaactaccacacataaaacaca

SEQ ID NO: 41570 - DNA, 50 bp, synthetic construct
  source 1..50: mol_type = other DNA
gatctcctccaatctaaaaactaaacttaaactaccacgcgtaaaacgcg

SEQ ID NO: 41571 - DNA, 50 bp, synthetic construct
  source 1..50: mol_type = other DNA
acaatctcctccaatctaaaaactaaacttaaactaccacacataaaaca

SEQ ID NO: 41572 - DNA, 50 bp, synthetic construct
  source 1..50: mol_type = other DNA
gcgatctcctccaatctaaaaactaaacttaaactaccacgcgtaaaacg

SEQ ID NO: 41573 - DNA, 50 bp, synthetic construct
  source 1..50: mol_type = other DNA
attccctccacaatctcctccaatctaaaaactaaacttaaactaccaca

SEQ ID NO: 41574 - DNA, 50 bp, synthetic construct
  source 1..50: mol_type = other DNA
attccctccgcgatctcctccaatctaaaaactaaacttaaactaccacg

SEQ ID NO: 41575 - DNA, 50 bp, synthetic construct
  source 1..50: mol_type = other DNA
ctccaaattaaaaaaaaccacaaaaaaaaccctactaaaatctaaaccca

SEQ ID NO: 41576 - DNA, 50 bp, synthetic construct
  source 1..50: mol_type = other DNA
ctccaaattaaaaaaaaccgcgaaaaaaaccctactaaaatctaaacccg

SEQ ID NO: 41577 - DNA, 50 bp, synthetic construct
  source 1..50: mol_type = other DNA
taaaaaaaaccacaaaaaaaaccctactaaaatctaaacccaaaaccaca

SEQ ID NO: 41578 - DNA, 50 bp, synthetic construct
  source 1..50: mol_type = other DNA
taaaaaaaaccgcgaaaaaaaccctactaaaatctaaacccgaaaccacg

SEQ ID NO: 41579 - DNA, 50 bp, synthetic construct
  source 1..50: mol_type = other DNA
aaaaaaaccacaaaaaaaaccctactaaaatctaaacccaaaaccacaca

SEQ ID NO: 41580 - DNA, 50 bp, synthetic construct
  source 1..50: mol_type = other DNA
aaaaaaaccgcgaaaaaaaccctactaaaatctaaacccgaaaccacgcg

SEQ ID NO: 41581 - DNA, 50 bp, synthetic construct
  source 1..50: mol_type = other DNA
aataactaaacccaacctaaaaacccccatcaaatccttaaaaacaaaca

SEQ ID NO: 41582 - DNA, 50 bp, synthetic construct
  source 1..50: mol_type = other DNA
aataactaaacccaacctaaaaacccccgtcaaatccttaaaaacgaacg

SEQ ID NO: 41583 - DNA, 50 bp, synthetic construct
  source 1..50: mol_type = other DNA
acacaaaaccaaaaaccattcctaaaaaacaaactaaaaacattaaaaca

SEQ ID NO: 41584 - DNA, 50 bp, synthetic construct
  source 1..50: mol_type = other DNA
acgcgaaaccgaaaaccgttcctaaaaaacaaactaaaaacgttaaaacg

SEQ ID NO: 41585 - DNA, 50 bp, synthetic construct
  source 1..50: mol_type = other DNA
aaaaacaccccaactacaaaacactatcctaaaaacactatcatcaccca

SEQ ID NO: 41586 - DNA, 50 bp, synthetic construct
  source 1..50: mol_type = other DNA
aaaaacgccccaactacaaaacactatcctaaaaacgctatcatcacccg

SEQ ID NO: 41587 - DNA, 50 bp, synthetic construct
  source 1..50: mol_type = other DNA
acactatcctaaaaacactatcatcacccataattacaaatttcaaaaca

SEQ ID NO: 41588 - DNA, 50 bp, synthetic construct
  source 1..50: mol_type = other DNA
acactatcctaaaaacgctatcatcacccgtaattacaaatttcgaaacg

SEQ ID NO: 41589 - DNA, 50 bp, synthetic construct
  source 1..50: mol_type = other DNA
acccataattacaaatttcaaaacaacaataaaaaacatacaaaactaca

SEQ ID NO: 41590 - DNA, 50 bp, synthetic construct
  source 1..50: mol_type = other DNA
acccgtaattacaaatttcgaaacgacaataaaaaacatacgaaactacg

SEQ ID NO: 41591 - DNA, 50 bp, synthetic construct
  source 1..50: mol_type = other DNA
cataattacaaatttcaaaacaacaataaaaaacatacaaaactacaaca

SEQ ID NO: 41592 - DNA, 50 bp, synthetic construct
  source 1..50: mol_type = other DNA
cgtaattacaaatttcgaaacgacaataaaaaacatacgaaactacgacg

SEQ ID NO: 41593 - DNA, 50 bp, synthetic construct
  source 1..50: mol_type = other DNA
aaataaaacactaaaaaaacccccactcacccaaaaaaacaatcacctca

SEQ ID NO: 41594 - DNA, 50 bp, synthetic construct
  source 1..50: mol_type = other DNA
aaataaaacgctaaaaaaacccccactcgcccaaaaaaacgatcacctcg

SEQ ID NO: 41595 - DNA, 50 bp, synthetic construct
  source 1..50: mol_type = other DNA
aacaataaaaaacatacaaaactacaacaaaataatcaccttcctaaaca

SEQ ID NO: 41596 - DNA, 50 bp, synthetic construct
  source 1..50: mol_type = other DNA
gacaataaaaaacatacgaaactacgacgaaataatcgccttcctaaacg

SEQ ID NO: 41597 - DNA, 50 bp, synthetic construct
  source 1..50: mol_type = other DNA
ttaacaataataacaaaccaataacaactacaactataaaacacctcaca

SEQ ID NO: 41598 - DNA, 50 bp, synthetic construct
  source 1..50: mol_type = other DNA
ttaacgataataacgaaccgataacgactacaactataaaacacctcgcg

SEQ ID NO: 41599 - DNA, 50 bp, synthetic construct
  source 1..50: mol_type = other DNA
aattaacaataataacaaaccaataacaactacaactataaaacacctca

SEQ ID NO: 41600 - DNA, 50 bp, synthetic construct
  source 1..50: mol_type = other DNA
aattaacgataataacgaaccgataacgactacaactataaaacacctcg

SEQ ID NO: 41601 - DNA, 50 bp, synthetic construct
  source 1..50: mol_type = other DNA
ctacctaaataactaaaaattcaaccaaaacatctacctatccaccatca

SEQ ID NO: 41602 - DNA, 50 bp, synthetic construct
  source 1..50: mol_type = other DNA
ctacctaaataactaaaaattcaaccaaaacgtctacctatccaccgtcg

SEQ ID NO: 41603 - DNA, 50 bp, synthetic construct
  source 1..50: mol_type = other DNA
aaataactaaaaattcaaccaaaacatctacctatccaccatcataacca

SEQ ID NO: 41604 - DNA, 50 bp, synthetic construct
  source 1..50: mol_type = other DNA
aaataactaaaaattcaaccaaaacgtctacctatccaccgtcgtaaccg

SEQ ID NO: 41605 - DNA, 50 bp, synthetic construct
  source 1..50: mol_type = other DNA
ccaaaaatacacctcacataaatcctattctttcttaaaatacacaccca

SEQ ID NO: 41606 - DNA, 50 bp, synthetic construct
  source 1..50: mol_type = other DNA
ccaaaaatacgcctcgcgtaaatcctattctttcttaaaatacacacccg

SEQ ID NO: 41607 - DNA, 50 bp, synthetic construct
  source 1..50: mol_type = other DNA
tttctccatcacctccttattaaacaaaaacaacccaaaaatacacctca

SEQ ID NO: 41608 - DNA, 50 bp, synthetic construct
  source 1..50: mol_type = other DNA
tttctccatcacctccttattaaacaaaaacgacccaaaaatacgcctcg

SEQ ID NO: 41609 - DNA, 50 bp, synthetic construct
  source 1..50: mol_type = other DNA
atcctaccacaactaaccttacataaaacacacaaccaaaaaaaattaca

SEQ ID NO: 41610 - DNA, 50 bp, synthetic construct
  source 1..50: mol_type = other DNA
atcctaccgcgactaaccttacataaaacgcacgaccaaaaaaaattacg

SEQ ID NO: 41611 - DNA, 50 bp, synthetic construct
  source 1..50: mol_type = other DNA
caataaaacaatataattacaccaaacactactcaaattcacaacatcca

SEQ ID NO: 41612 - DNA, 50 bp, synthetic construct
  source 1..50: mol_type = other DNA
caataaaacaatataattacgccaaacgctactcaaattcgcgacgtccg

SEQ ID NO: 41613 - DNA, 50 bp, synthetic construct
  source 1..50: mol_type = other DNA
accacaataaaacaatataattacaccaaacactactcaaattcacaaca

SEQ ID NO: 41614 - DNA, 50 bp, synthetic construct
  source 1..50: mol_type = other DNA
accgcaataaaacaatataattacgccaaacgctactcaaattcgcgacg

SEQ ID NO: 41615 - DNA, 50 bp, synthetic construct
  source 1..50: mol_type = other DNA
aacaattacttacaaaacataaccaaattatcatttttaaattataaaca

SEQ ID NO: 41616 - DNA, 50 bp, synthetic construct
  source 1..50: mol_type = other DNA
aacaattacttacaaaacataaccaaattatcgtttttaaattataaacg

SEQ ID NO: 41617 - DNA, 50 bp, synthetic construct
  source 1..50: mol_type = other DNA
cccattccctctcctaccatctctataacaaacaattttccttaatctca

SEQ ID NO: 41618 - DNA, 50 bp, synthetic construct
  source 1..50: mol_type = other DNA
cccgttccctctcctaccatctctataacaaacaattttccttaatctcg

SEQ ID NO: 41619 - DNA, 50 bp, synthetic construct
  source 1..50: mol_type = other DNA
ccaaaaatcacctaaaatcccaaaattcaaccactaaacaaaaactaaca

SEQ ID NO: 41620 - DNA, 50 bp, synthetic construct
  source 1..50: mol_type = other DNA
ccaaaaatcgcctaaaatcccaaaattcgaccgctaaacaaaaactaacg

SEQ ID NO: 41621 - DNA, 50 bp, synthetic construct
  source 1..50: mol_type = other DNA
aaaaaaaaaacatatccaaatacacatcactaacttttactcaacaacca

SEQ ID NO: 41622 - DNA, 50 bp, synthetic construct
  source 1..50: mol_type = other DNA
aaaaaaaaaacatatccaaatacacatcgctaacttttactcaacgaccg

SEQ ID NO: 41623 - DNA, 50 bp, synthetic construct
  source 1..50: mol_type = other DNA
tctacccttcattcaacatttacttaaacctataactaacaaccaaccca

SEQ ID NO: 41624 - DNA, 50 bp, synthetic construct
  source 1..50: mol_type = other DNA
tctacccttcattcaacgtttacttaaacctataactaacaaccgacccg

SEQ ID NO: 41625 - DNA, 50 bp, synthetic construct
  source 1..50: mol_type = other DNA
aaataaacactaaataaaaaacaaataaaaaaacctatcccaatcaacca

SEQ ID NO: 41626 - DNA, 50 bp, synthetic construct
  source 1..50: mol_type = other DNA
aaataaacgctaaataaaaaacaaataaaaaaacctatcccgatcgaccg

SEQ ID NO: 41627 - DNA, 50 bp, synthetic construct
  source 1..50: mol_type = other DNA
aacactaaataaaaaacaaataaaaaaacctatcccaatcaaccaaaaca

SEQ ID NO: 41628 - DNA, 50 bp, synthetic construct
  source 1..50: mol_type = other DNA
aacgctaaataaaaaacaaataaaaaaacctatcccgatcgaccgaaacg

SEQ ID NO: 41629 - DNA, 50 bp, synthetic construct
  source 1..50: mol_type = other DNA
attcaaaataaaactaaaccaaccaaatacccaaaaactaatccaccaca

SEQ ID NO: 41630 - DNA, 50 bp, synthetic construct
  source 1..50: mol_type = other DNA
gttcgaaataaaactaaaccaaccgaatacccgaaaactaatccgccacg

SEQ ID NO: 41631 - DNA, 50 bp, synthetic construct
  source 1..50: mol_type = other DNA
taacctaacccaataacattcaaaataaaactaaaccaaccaaataccca

SEQ ID NO: 41632 - DNA, 50 bp, synthetic construct
  source 1..50: mol_type = other DNA
taacctaacccgataacgttcgaaataaaactaaaccaaccgaatacccg

SEQ ID NO: 41633 - DNA, 50 bp, synthetic construct
  source 1..50: mol_type = other DNA
aaactaacacaactaccatttcaaacaaaaaacacaaaatacaacaacca

SEQ ID NO: 41634 - DNA, 50 bp, synthetic construct
  source 1..50: mol_type = other DNA
aaactaacgcaactaccgtttcaaacgaaaaacgcaaaatacaacgaccg

SEQ ID NO: 41635 - DNA, 50 bp, synthetic construct
  source 1..50: mol_type = other DNA
cataccaaaaaactaacaacccaaaatcaaactaaaaccataacaaatca

SEQ ID NO: 41636 - DNA, 50 bp, synthetic construct
  source 1..50: mol_type = other DNA
cgtaccaaaaaactaacaacccgaaatcgaactaaaaccgtaacaaatcg

SEQ ID NO: 41637 - DNA, 50 bp, synthetic construct
  source 1..50: mol_type = other DNA
acaacccaaaatcaaactaaaaccataacaaatcaaaccacctaaacaca

SEQ ID NO: 41638 - DNA, 50 bp, synthetic construct
  source 1..50: mol_type = other DNA
acaacccgaaatcgaactaaaaccgtaacaaatcgaaccacctaaacacg

SEQ ID NO: 41639 - DNA, 50 bp, synthetic construct
  source 1..50: mol_type = other DNA
atacccctaccccctaacacaaaaatctatttctctttccaaataaccca

SEQ ID NO: 41640 - DNA, 50 bp, synthetic construct
  source 1..50: mol_type = other DNA
atacccctaccccctaacgcaaaaatctatttctctttccaaataacccg

SEQ ID NO: 41641 - DNA, 50 bp, synthetic construct
  source 1..50: mol_type = other DNA
ctacttacctacaactaactccttactcacaaatctacatccatccaaca

SEQ ID NO: 41642 - DNA, 50 bp, synthetic construct
  source 1..50: mol_type = other DNA
ctacttacctacaactaactccttactcacaaatctacatccatccgacg

SEQ ID NO: 41643 - DNA, 50 bp, synthetic construct
  source 1..50: mol_type = other DNA
caccacataaacaaaaaaaacttcaaataacaaacactcaactccaaaca

SEQ ID NO: 41644 - DNA, 50 bp, synthetic construct
  source 1..50: mol_type = other DNA
caccacataaacaaaaaaaacttcaaataacaaacgctcgactccaaacg

SEQ ID NO: 41645 - DNA, 50 bp, synthetic construct
  source 1..50: mol_type = other DNA
ccccacaaaaactaaaccccaaaaacaaaatccaaaccacactcaccaca

SEQ ID NO: 41646 - DNA, 50 bp, synthetic construct
  source 1..50: mol_type = other DNA
ccccacaaaaactaaaccccaaaaacaaaatccaaaccacactcaccacg

SEQ ID NO: 41647 - DNA, 50 bp, synthetic construct
  source 1..50: mol_type = other DNA
aaaaaaaccaaaccaaaaaaattaacatcctaatcttaacattataaaca

SEQ ID NO: 41648 - DNA, 50 bp, synthetic construct
  source 1..50: mol_type = other DNA
aaaaaaaccgaaccgaaaaaattaacgtcctaatcttaacgttataaacg

SEQ ID NO: 41649 - DNA, 50 bp, synthetic construct
  source 1..50: mol_type = other DNA
taacttactacccaaataactaaaaaaaatcataacctacaaaaactaca

SEQ ID NO: 41650 - DNA, 50 bp, synthetic construct
  source 1..50: mol_type = other DNA
taacttactacccaaataactaaaaaaaatcgtaacctacgaaaactacg

SEQ ID NO: 41651 - DNA, 50 bp, synthetic construct
  source 1..50: mol_type = other DNA
ttaataaaatcaacactctcctcccccacaccaataaatactacaaaaca

SEQ ID NO: 41652 - DNA, 50 bp, synthetic construct
  source 1..50: mol_type = other DNA
ttaataaaatcaacactctcctcccccgcgccaataaatactacaaaacg

SEQ ID NO: 41653 - DNA, 50 bp, synthetic construct
  source 1..50: mol_type = other DNA
acaaaacaaaaatataaaaattaacccaaaaaaactataccccctcccca

SEQ ID NO: 41654 - DNA, 50 bp, synthetic construct
  source 1..50: mol_type = other DNA
acgaaacaaaaatataaaaattaacccgaaaaaactataccccctccccg

SEQ ID NO: 41655 - DNA, 50 bp, synthetic construct
  source 1..50: mol_type = other DNA
ccaaatctcaaactacaacaaataacaataccccaacaaaaaacacaaca

SEQ ID NO: 41656 - DNA, 50 bp, synthetic construct
  source 1..50: mol_type = other DNA
ccaaatctcaaactacaacgaataacaataccccgacaaaaaacgcaacg

SEQ ID NO: 41657 - DNA, 50 bp, synthetic construct
  source 1..50: mol_type = other DNA
ttacaacctaaaacttaaaataaacctacaactctcccattaaaaacaca

SEQ ID NO: 41658 - DNA, 50 bp, synthetic construct
  source 1..50: mol_type = other DNA
ttacaacctaaaacttaaaataaacctacgactctcccgttaaaaacgcg

SEQ ID NO: 41659 - DNA, 50 bp, synthetic construct
  source 1..50: mol_type = other DNA
ttaaaataaacctacaactctcccattaaaaacacaaataatactaaaca

SEQ ID NO: 41660 - DNA, 50 bp, synthetic construct
  source 1..50: mol_type = other DNA
ttaaaataaacctacgactctcccgttaaaaacgcgaataatactaaacg

SEQ ID NO: 41661 - DNA, 50 bp, synthetic construct
  source 1..50: mol_type = other DNA
aacctacaactctcccattaaaaacacaaataatactaaacaactaaaca

SEQ ID NO: 41662 - DNA, 50 bp, synthetic construct
  source 1..50: mol_type = other DNA
aacctacgactctcccgttaaaaacgcgaataatactaaacgactaaacg

SEQ ID NO: 41663 - DNA, 50 bp, synthetic construct
  source 1..50: mol_type = other DNA
aataactcccacctccacctaaaccttacaactaacaataaaacaaaaca

SEQ ID NO: 41664 - DNA, 50 bp, synthetic construct
  source 1..50: mol_type = other DNA
aataactcccacctccgcctaaaccttacaactaacgataaaacgaaacg

SEQ ID NO: 41665 - DNA, 50 bp, synthetic construct
  source 1..50: mol_type = other DNA
taaaaaaaaacttaaatccaaccatccaataaaaatcaaccccatcacca

SEQ ID NO: 41666 - DNA, 50 bp, synthetic construct
  source 1..50: mol_type = other DNA
taaaaaaaaacttaaatccgaccatccaataaaaatcaaccccatcgccg

SEQ ID NO: 41667 - DNA, 50 bp, synthetic construct
  source 1..50: mol_type = other DNA
aaacttaaatccaaccatccaataaaaatcaaccccatcaccaaattcca

SEQ ID NO: 41668 - DNA, 50 bp, synthetic construct
  source 1..50: mol_type = other DNA
aaacttaaatccgaccatccaataaaaatcaaccccatcgccgaattccg

SEQ ID NO: 41669 - DNA, 50 bp, synthetic construct
  source 1..50: mol_type = other DNA
acaaaaccacaccaaaaaaacaaaacctaaatttcaatttcttacaaaca

SEQ ID NO: 41670 - DNA, 50 bp, synthetic construct
  source 1..50: mol_type = other DNA
gcgaaaccgcgccgaaaaaacgaaacctaaatttcgatttcttacaaacg

SEQ ID NO: 41671 - DNA, 50 bp, synthetic construct
  source 1..50: mol_type = other DNA
caaaacctaaatttcaatttcttacaaacacaacaacaacaaaaaaatca

SEQ ID NO: 41672 - DNA, 50 bp, synthetic construct
  source 1..50: mol_type = other DNA
cgaaacctaaatttcgatttcttacaaacgcgacgacaacaaaaaaatcg

SEQ ID NO: 41673 - DNA, 50 bp, synthetic construct
  source 1..50: mol_type = other DNA
tttcaatttcttacaaacacaacaacaacaaaaaaatcaaaaaatttcca

SEQ ID NO: 41674 - DNA, 50 bp, synthetic construct
  source 1..50: mol_type = other DNA
tttcgatttcttacaaacgcgacgacaacaaaaaaatcgaaaaatttccg

SEQ ID NO: 41675 - DNA, 50 bp, synthetic construct
  source 1..50: mol_type = other DNA
ttcttacaaacacaacaacaacaaaaaaatcaaaaaatttccaaaaacca

SEQ ID NO: 41676 - DNA, 50 bp, synthetic construct
  source 1..50: mol_type = other DNA
ttcttacaaacgcgacgacaacaaaaaaatcgaaaaatttccgaaaaccg

SEQ ID NO: 41677 - DNA, 50 bp, synthetic construct
  source 1..50: mol_type = other DNA
aaacacaacaacaacaaaaaaatcaaaaaatttccaaaaaccaaaccaca

SEQ ID NO: 41678 - DNA, 50 bp, synthetic construct
  source 1..50: mol_type = other DNA
aaacgcgacgacaacaaaaaaatcgaaaaatttccgaaaaccgaaccacg

SEQ ID NO: 41679 - DNA, 50 bp, synthetic construct
  source 1..50: mol_type = other DNA
aacaacaaaaaaatcaaaaaatttccaaaaaccaaaccacactaaaaaca

SEQ ID NO: 41680 - DNA, 50 bp, synthetic construct
  source 1..50: mol_type = other DNA
gacaacaaaaaaatcgaaaaatttccgaaaaccgaaccacgctaaaaacg

SEQ ID NO: 41681 - DNA, 50 bp, synthetic construct
  source 1..50: mol_type = other DNA
atcaaaaaatttccaaaaaccaaaccacactaaaaacactaaaatctaca

SEQ ID NO: 41682 - DNA, 50 bp, synthetic construct
  source 1..50: mol_type = other DNA
atcgaaaaatttccgaaaaccgaaccacgctaaaaacgctaaaatctacg

SEQ ID NO: 41683 - DNA, 50 bp, synthetic construct
  source 1..50: mol_type = other DNA
aaacaaaaataaaaatttctaaaataactactaaacaaaactaactctca

SEQ ID NO: 41684 - DNA, 50 bp, synthetic construct
  source 1..50: mol_type = other DNA
aaacaaaaataaaaatttctaaaataactactaaacgaaactaactctcg

SEQ ID NO: 41685 - DNA, 50 bp, synthetic construct
  source 1..50: mol_type = other DNA
caaaacaaaaaactataaatacacaattacaaaatcacattataactaca

SEQ ID NO: 41686 - DNA, 50 bp, synthetic construct
  source 1..50: mol_type = other DNA
cgaaacaaaaaactataaatacgcgattacgaaatcgcattataactacg

SEQ ID NO: 41687 - DNA, 50 bp, synthetic construct
  source 1..50: mol_type = other DNA
aaaactataaatacacaattacaaaatcacattataactacaactttaca

SEQ ID NO: 41688 - DNA, 50 bp, synthetic construct
  source 1..50: mol_type = other DNA
aaaactataaatacgcgattacgaaatcgcattataactacgactttacg

SEQ ID NO: 41689 - DNA, 50 bp, synthetic construct
  source 1..50: mol_type = other DNA
ataaatacacaattacaaaatcacattataactacaactttacatcccca

SEQ ID NO: 41690 - DNA, 50 bp, synthetic construct
  source 1..50: mol_type = other DNA
ataaatacgcgattacgaaatcgcattataactacgactttacgtccccg

SEQ ID NO: 41691 - DNA, 50 bp, synthetic construct
  source 1..50: mol_type = other DNA
acaaaaaacaaaaccacaaaactaccaaaaaatcctaccaaccaacaaca

SEQ ID NO: 41692 - DNA, 50 bp, synthetic construct
  source 1..50: mol_type = other DNA
acgaaaaacgaaaccacaaaactaccaaaaaatcctaccaaccaacaacg

SEQ ID NO: 41693 - DNA, 50 bp, synthetic construct
  source 1..50: mol_type = other DNA
aacactatactaaaaaatacactctaactcacaacccttcctactaaaca

SEQ ID NO: 41694 - DNA, 50 bp, synthetic construct
  source 1..50: mol_type = other DNA
aacgctatactaaaaaatacgctctaactcgcaacccttcctactaaacg

SEQ ID NO: 41695 - DNA, 50 bp, synthetic construct
  source 1..50: mol_type = other DNA
ctacaccacttatcaaaaaaacactatactaaaaaatacactctaactca

SEQ ID NO: 41696 - DNA, 50 bp, synthetic construct
  source 1..50: mol_type = other DNA
ctacgccgcttatcaaaaaaacgctatactaaaaaatacgctctaactcg

SEQ ID NO: 41697 - DNA, 50 bp, synthetic construct
  source 1..50: mol_type = other DNA
cccataaaacctacaccacttatcaaaaaaacactatactaaaaaataca

SEQ ID NO: 41698 - DNA, 50 bp, synthetic construct
  source 1..50: mol_type = other DNA
cccgtaaaacctacgccgcttatcaaaaaaacgctatactaaaaaatacg

SEQ ID NO: 41699 - DNA, 50 bp, synthetic construct
  source 1..50: mol_type = other DNA
aaactacaaaccaaaacacatcctccaacacaacacctttttaataaaca

SEQ ID NO: 41700 - DNA, 50 bp, synthetic construct
  source 1..50: mol_type = other DNA
aaactacgaaccaaaacgcatcctccaacacaacgcctttttaataaacg

SEQ ID NO: 41701 - DNA, 50 bp, synthetic construct
  source 1..50: mol_type = other DNA
ctttttaataaacaacacaaaccccacaaaatacaacaacaacaaaaaca

SEQ ID NO: 41702 - DNA, 50 bp, synthetic construct
  source 1..50: mol_type = other DNA
ctttttaataaacgacgcaaaccccacgaaatacaacaacgacgaaaacg

SEQ ID NO: 41703 - DNA, 50 bp, synthetic construct
  source 1..50: mol_type = other DNA
ataattaaaaaacctaactaatcaaccccaaaaccacaaaaatccaacca

SEQ ID NO: 41704 - DNA, 50 bp, synthetic construct
  source 1..50: mol_type = other DNA
ataattaaaaaacctaactaatcaaccccgaaaccgcgaaaatccgaccg

SEQ ID NO: 41705 - DNA, 50 bp, synthetic construct
  source 1..50: mol_type = other DNA
catacaataaaaataattaaaaaacctaactaatcaaccccaaaaccaca

SEQ ID NO: 41706 - DNA, 50 bp, synthetic construct
  source 1..50: mol_type = other DNA
cgtacgataaaaataattaaaaaacctaactaatcaaccccgaaaccgcg

SEQ ID NO: 41707 - DNA, 50 bp, synthetic construct
  source 1..50: mol_type = other DNA
aactcaatcatacaataaaaataattaaaaaacctaactaatcaacccca

SEQ ID NO: 41708 - DNA, 50 bp, synthetic construct
  source 1..50: mol_type = other DNA
aactcgatcgtacgataaaaataattaaaaaacctaactaatcaaccccg

SEQ ID NO: 41709 - DNA, 50 bp, synthetic construct
  source 1..50: mol_type = other DNA
aaaacacaaaaccaacaaacaacctaaataaaacaaaacaaactcaatca

SEQ ID NO: 41710 - DNA, 50 bp, synthetic construct
  source 1..50: mol_type = other DNA
aaaacgcgaaaccgacaaacgacctaaataaaacgaaacaaactcgatcg

SEQ ID NO: 41711 - DNA, 50 bp, synthetic construct
  source 1..50: mol_type = other DNA
aaacatccaccaaacacaaaaaaaaaccaaaataccaataaaaaaaatca

SEQ ID NO: 41712 - DNA, 50 bp, synthetic construct
  source 1..50: mol_type = other DNA
aaacgtccgccgaacacgaaaaaaaaccaaaataccgataaaaaaaatcg

SEQ ID NO: 41713 - DNA, 50 bp, synthetic construct
  source 1..50: mol_type = other DNA
tcaaaaacatcaacaaaatatttcaataatctctaaccatcctttctaca

SEQ ID NO: 41714 - DNA, 50 bp, synthetic construct
  source 1..50: mol_type = other DNA
tcgaaaacgtcaacgaaatatttcgataatctctaaccatcctttctacg

SEQ ID NO: 41715 - DNA, 50 bp, synthetic construct
  source 1..50: mol_type = other DNA
atacaacccaacaacaccaaatacacaaaaaaaataaccaaaaactacca

SEQ ID NO: 41716 - DNA, 50 bp, synthetic construct
  source 1..50: mol_type = other DNA
atacaacccaacgacaccgaatacgcaaaaaaaataaccaaaaactaccg

SEQ ID NO: 41717 - DNA, 50 bp, synthetic construct
  source 1..50: mol_type = other DNA
acaacaccaaatacacaaaaaaaataaccaaaaactaccaaaacacctca

SEQ ID NO: 41718 - DNA, 50 bp, synthetic construct
  source 1..50: mol_type = other DNA
acgacaccgaatacgcaaaaaaaataaccaaaaactaccgaaacacctcg

SEQ ID NO: 41719 - DNA, 50 bp, synthetic construct
  source 1..50: mol_type = other DNA
acacaaaaaaaataaccaaaaactaccaaaacacctcattaacactctca

SEQ ID NO: 41720 - DNA, 50 bp, synthetic construct
  source 1..50: mol_type = other DNA
acgcaaaaaaaataaccaaaaactaccgaaacacctcgttaacgctctcg

SEQ ID NO: 41721 - DNA, 50 bp, synthetic construct
  source 1..50: mol_type = other DNA
aaaataaccaaaaactaccaaaacacctcattaacactctcaaaactaca

SEQ ID NO: 41722 - DNA, 50 bp, synthetic construct
  source 1..50: mol_type = other DNA
aaaataaccaaaaactaccgaaacacctcgttaacgctctcgaaactacg

SEQ ID NO: 41723 - DNA, 50 bp, synthetic construct
  source 1..50: mol_type = other DNA
aaactaaacttaaaacaaaacaaactcaaaatacaactacacactaaaca

SEQ ID NO: 41724 - DNA, 50 bp, synthetic construct
  source 1..50: mol_type = other DNA
aaactaaacttaaaacgaaacgaactcgaaatacgactacgcactaaacg

SEQ ID NO: 41725 - DNA, 50 bp, synthetic construct
  source 1..50: mol_type = other DNA
aaccaaaaaaacctaaaactaaacttaaaacaaaacaaactcaaaataca

SEQ ID NO: 41726 - DNA, 50 bp, synthetic construct
  source 1..50: mol_type = other DNA
aaccgaaaaaacctaaaactaaacttaaaacgaaacgaactcgaaatacg

SEQ ID NO: 41727 - DNA, 50 bp, synthetic construct
  source 1..50: mol_type = other DNA
ccacctcaatacataccacatttctaacacaacaaaataacaacattaca

SEQ ID NO: 41728 - DNA, 50 bp, synthetic construct
  source 1..50: mol_type = other DNA
ccgcctcaatacgtaccacatttctaacgcaacaaaataacaacattacg

SEQ ID NO: 41729 - DNA, 50 bp, synthetic construct
  source 1..50: mol_type = other DNA
aaccacacatacacaatactaccattctactacactaaaaatataacaca

SEQ ID NO: 41730 - DNA, 50 bp, synthetic construct
  source 1..50: mol_type = other DNA
aaccgcgcgtacgcaatactaccattctactacgctaaaaatataacacg

SEQ ID NO: 41731 - DNA, 50 bp, synthetic construct
  source 1..50: mol_type = other DNA
acacaatactaccattctactacactaaaaatataacacacactaaaaca

SEQ ID NO: 41732 - DNA, 50 bp, synthetic construct
  source 1..50: mol_type = other DNA
acgcaatactaccattctactacgctaaaaatataacacgcactaaaacg

SEQ ID NO: 41733 - DNA, 50 bp, synthetic construct
  source 1..50: mol_type = other DNA
attactattactaattttaatattccaaatattacaaaaaccaaaaaaca

SEQ ID NO: 41734 - DNA, 50 bp, synthetic construct
  source 1..50: mol_type = other DNA
attactattactaattttaatattccgaatattacaaaaaccaaaaaacg

SEQ ID NO: 41735 - DNA, 50 bp, synthetic construct
  source 1..50: mol_type = other DNA
cttcaaataaaacaaaatatacaattactattactaattttaatattcca

SEQ ID NO: 41736 - DNA, 50 bp, synthetic construct
  source 1..50: mol_type = other DNA
cttcgaataaaacaaaatatacaattactattactaattttaatattccg

SEQ ID NO: 41737 - DNA, 50 bp, synthetic construct
  source 1..50: mol_type = other DNA
acaacacatctaaaattccatttcaaacctatctaaaaaaaacactctca

SEQ ID NO: 41738 - DNA, 50 bp, synthetic construct
  source 1..50: mol_type = other DNA
acaacgcgtctaaaattccatttcaaacctatctaaaaaaaacgctctcg

SEQ ID NO: 41739 - DNA, 50 bp, synthetic construct
  source 1..50: mol_type = other DNA
caaaaccatatcataaacaaaatcctaaatctaaattaccacttaaccca

SEQ ID NO: 41740 - DNA, 50 bp, synthetic construct
  source 1..50: mol_type = other DNA
cgaaaccatatcgtaaacgaaatcctaaatctaaattaccgcttaacccg

SEQ ID NO: 41741 - DNA, 50 bp, synthetic construct
  source 1..50: mol_type = other DNA
tacaaataacaaaacaaccaacactcatccaaatcaccttccaaattaca

SEQ ID NO: 41742 - DNA, 50 bp, synthetic construct
  source 1..50: mol_type = other DNA
tacaaataacaaaacaaccgacgctcgtccaaatcgccttccaaattacg

SEQ ID NO: 41743 - DNA, 50 bp, synthetic construct
  source 1..50: mol_type = other DNA
ttataaaaacaaccaataacctccttactaaaccataccaaaaaaaaaca

SEQ ID NO: 41744 - DNA, 50 bp, synthetic construct
  source 1..50: mol_type = other DNA
ttataaaaacgaccaataacctccttactaaaccataccgaaaaaaaacg

SEQ ID NO: 41745 - DNA, 50 bp, synthetic construct
  source 1..50: mol_type = other DNA
tctccccatcttataaaaacaaccaataacctccttactaaaccatacca

SEQ ID NO: 41746 - DNA, 50 bp, synthetic construct
  source 1..50: mol_type = other DNA
tctccccatcttataaaaacgaccaataacctccttactaaaccataccg

SEQ ID NO: 41747 - DNA, 50 bp, synthetic construct
  source 1..50: mol_type = other DNA
tactcaccacaaaatctaaacctataaaattctaacaaaaaaaaacacca

SEQ ID NO: 41748 - DNA, 50 bp, synthetic construct
  source 1..50: mol_type = other DNA
tactcaccacgaaatctaaacctataaaattctaacaaaaaaaaacaccg

SEQ ID NO: 41749 - DNA, 50 bp, synthetic construct
  source 1..50: mol_type = other DNA
atctaaacctataaaattctaacaaaaaaaaacaccaaaactaaccctca

SEQ ID NO: 41750 - DNA, 50 bp, synthetic construct
  source 1..50: mol_type = other DNA
atctaaacctataaaattctaacaaaaaaaaacaccgaaactaaccctcg

SEQ ID NO: 41751 - DNA, 50 bp, synthetic construct
  source 1..50: mol_type = other DNA
ccaaataaacacccactaaactaaatctaaaatccctccaactcctaaca

SEQ ID NO: 41752 - DNA, 50 bp, synthetic construct
  source 1..50: mol_type = other DNA
ccaaataaacgcccactaaactaaatctaaaatccctccaactcctaacg

SEQ ID NO: 41753 - DNA, 50 bp, synthetic construct
  source 1..50: mol_type = other DNA
cacaccaaaatcctaaatacaactccaaacaaatcaaacctcaataatca

SEQ ID NO: 41754 - DNA, 50 bp, synthetic construct
  source 1..50: mol_type = other DNA
cacgccgaaatcctaaatacgactccaaacaaatcaaacctcaataatcg

SEQ ID NO: 41755 - DNA, 50 bp, synthetic construct
  source 1..50: mol_type = other DNA
taaaacctaacctacctaaaatcacacccaaaattccaacataaaaaaca

SEQ ID NO: 41756 - DNA, 50 bp, synthetic construct
  source 1..50: mol_type = other DNA
taaaacctaacctacctaaaatcgcacccaaaattccgacgtaaaaaacg

SEQ ID NO: 41757 - DNA, 50 bp, synthetic construct
  source 1..50: mol_type = other DNA
acttaaaaaaaaatcctaaccacacaaatactacaaaataaatacaacca

SEQ ID NO: 41758 - DNA, 50 bp, synthetic construct
  source 1..50: mol_type = other DNA
acttaaaaaaaaatcctaaccgcacaaatactacgaaataaatacaaccg

SEQ ID NO: 41759 - DNA, 50 bp, synthetic construct
  source 1..50: mol_type = other DNA
aaactcttccccaaatatacaaaaaaaaacaccctaaacaataaaatcca

SEQ ID NO: 41760 - DNA, 50 bp, synthetic construct
  source 1..50: mol_type = other DNA
aaactcttccccaaatatacaaaaaaaaacaccctaaacgataaaatccg

SEQ ID NO: 41761 - DNA, 50 bp, synthetic construct
  source 1..50: mol_type = other DNA
aacaaatacaaaaataaaataacacccacaaaaccacaaataaaaatcca

SEQ ID NO: 41762 - DNA, 50 bp, synthetic construct
  source 1..50: mol_type = other DNA
aacaaatacgaaaataaaataacgcccgcgaaaccgcaaataaaaatccg

SEQ ID NO: 41763 - DNA, 50 bp, synthetic construct
  source 1..50: mol_type = other DNA
aacaaaaacccacctaactccaaacaaatacaaaaataaaataacaccca

SEQ ID NO: 41764 - DNA, 50 bp, synthetic construct
  source 1..50: mol_type = other DNA
aacaaaaacccgcctaactccgaacaaatacgaaaataaaataacgcccg

SEQ ID NO: 41765 - DNA, 50 bp, synthetic construct
  source 1..50: mol_type = other DNA
accaaacaaatctttactccttcccacaaaaaaaattaaccttacctaca

SEQ ID NO: 41766 - DNA, 50 bp, synthetic construct
  source 1..50: mol_type = other DNA
accaaacgaatctttactccttcccgcgaaaaaaattaaccttacctacg

SEQ ID NO: 41767 - DNA, 50 bp, synthetic construct
  source 1..50: mol_type = other DNA
aaataaactaaaacaaacacaaaaacaacaacaaaaaccaaccaactaca

SEQ ID NO: 41768 - DNA, 50 bp, synthetic construct
  source 1..50: mol_type = other DNA
gaataaactaaaacgaacgcaaaaacaacgacaaaaaccaaccgactacg

SEQ ID NO: 41769 - DNA, 50 bp, synthetic construct
  source 1..50: mol_type = other DNA
aactaaaacaaacacaaaaacaacaacaaaaaccaaccaactacaaaaca

SEQ ID NO: 41770 - DNA, 50 bp, synthetic construct
  source 1..50: mol_type = other DNA
aactaaaacgaacgcaaaaacaacgacaaaaaccaaccgactacgaaacg

SEQ ID NO: 41771 - DNA, 50 bp, synthetic construct
  source 1..50: mol_type = other DNA
tataaccacttcctaaaaactccccttaacaacaacaacaaaaaaaacca

SEQ ID NO: 41772 - DNA, 50 bp, synthetic construct
  source 1..50: mol_type = other DNA
tataaccacttcctaaaaactccccttaacgacgacgacgaaaaaaaccg

SEQ ID NO: 41773 - DNA, 50 bp, synthetic construct
  source 1..50: mol_type = other DNA
taccaactacaaaaactactaaaacttataatccacacattaaaaaacca

SEQ ID NO: 41774 - DNA, 50 bp, synthetic construct
  source 1..50: mol_type = other DNA
taccaactacgaaaactactaaaacttataatccgcgcgttaaaaaaccg

SEQ ID NO: 41775 - DNA, 50 bp, synthetic construct
  source 1..50: mol_type = other DNA
acttataatccacacattaaaaaaccaaaacaacaatatcaaaaaactca

SEQ ID NO: 41776 - DNA, 50 bp, synthetic construct
  source 1..50: mol_type = other DNA
acttataatccgcgcgttaaaaaaccgaaacgacaatatcgaaaaactcg

SEQ ID NO: 41777 - DNA, 50 bp, synthetic construct
  source 1..50: mol_type = other DNA
acattaaaaaaccaaaacaacaatatcaaaaaactcaaaactaataccca

SEQ ID NO: 41778 - DNA, 50 bp, synthetic construct
  source 1..50: mol_type = other DNA
gcgttaaaaaaccgaaacgacaatatcgaaaaactcgaaactaatacccg

SEQ ID NO: 41779 - DNA, 50 bp, synthetic construct
  source 1..50: mol_type = other DNA
caaacctaaataaaaatctcctaaatccacacactaaaaaacctttccca

SEQ ID NO: 41780 - DNA, 50 bp, synthetic construct
  source 1..50: mol_type = other DNA
cgaacctaaataaaaatctcctaaatccgcgcgctaaaaaacctttcccg

SEQ ID NO: 41781 - DNA, 50 bp, synthetic construct
  source 1..50: mol_type = other DNA
tccaacaaataaaaacaacttaataaaaaaaatctctaaaacacacacca

SEQ ID NO: 41782 - DNA, 50 bp, synthetic construct
  source 1..50: mol_type = other DNA
tccaacgaataaaaacgacttaataaaaaaaatctctaaaacgcacgccg

SEQ ID NO: 41783 - DNA, 50 bp, synthetic construct
  source 1..50: mol_type = other DNA
aactccaacaaataaaaacaacttaataaaaaaaatctctaaaacacaca

SEQ ID NO: 41784 - DNA, 50 bp, synthetic construct
  source 1..50: mol_type = other DNA
aactccaacgaataaaaacgacttaataaaaaaaatctctaaaacgcacg

SEQ ID NO: 41785 - DNA, 50 bp, synthetic construct
  source 1..50: mol_type = other DNA
tacaaactccaacaaataaaaacaacttaataaaaaaaatctctaaaaca

SEQ ID NO: 41786 - DNA, 50 bp, synthetic construct
  source 1..50: mol_type = other DNA
tacaaactccaacgaataaaaacgacttaataaaaaaaatctctaaaacg

SEQ ID NO: 41787 - DNA, 50 bp, synthetic construct
  source 1..50: mol_type = other DNA
caaatccacacacataaacaaataccacaaatccaaactactaataaaca

SEQ ID NO: 41788 - DNA, 50 bp, synthetic construct
  source 1..50: mol_type = other DNA
cgaatccgcgcgcataaacaaataccacaaatccaaactactaataaacg

SEQ ID NO: 41789 - DNA, 50 bp, synthetic construct
  source 1..50: mol_type = other DNA
cacacacataaacaaataccacaaatccaaactactaataaacaaaacca

SEQ ID NO: 41790 - DNA, 50 bp, synthetic construct
  source 1..50: mol_type = other DNA
cgcgcgcataaacaaataccacaaatccaaactactaataaacgaaaccg

SEQ ID NO: 41791 - DNA, 50 bp, synthetic construct
  source 1..50: mol_type = other DNA
aataccacaaatccaaactactaataaacaaaaccaaaaaaacacaatca

SEQ ID NO: 41792 - DNA, 50 bp, synthetic construct
  source 1..50: mol_type = other DNA
aataccacaaatccaaactactaataaacgaaaccgaaaaaacgcgatcg

SEQ ID NO: 41793 - DNA, 50 bp, synthetic construct
  source 1..50: mol_type = other DNA
ataccaaataaaaaactccaaataaaaactaaaacaacctactaacccca

SEQ ID NO: 41794 - DNA, 50 bp, synthetic construct
  source 1..50: mol_type = other DNA
ataccgaataaaaaactccgaataaaaactaaaacaacctactaaccccg

SEQ ID NO: 41795 - DNA, 50 bp, synthetic construct
  source 1..50: mol_type = other DNA
ccacacaattctaaacctttcccattaaattcaccatcaaaaaaaaatca

SEQ ID NO: 41796 - DNA, 50 bp, synthetic construct
  source 1..50: mol_type = other DNA
ccgcgcaattctaaacctttcccgttaaattcaccgtcgaaaaaaaatcg

SEQ ID NO: 41797 - DNA, 50 bp, synthetic construct
  source 1..50: mol_type = other DNA
acacaattctaaacctttcccattaaattcaccatcaaaaaaaaatcaca

SEQ ID NO: 41798 - DNA, 50 bp, synthetic construct
  source 1..50: mol_type = other DNA
gcgcaattctaaacctttcccgttaaattcaccgtcgaaaaaaaatcgcg

SEQ ID NO: 41799 - DNA, 50 bp, synthetic construct
  source 1..50: mol_type = other DNA
aaaaaacaaaaacaaaaaataacaaaataaaaccacactacccaccaaca

SEQ ID NO: 41800 - DNA, 50 bp, synthetic construct
  source 1..50: mol_type = other DNA
aaaaaacaaaaacgaaaaataacgaaataaaaccgcgctacccgccgacg

SEQ ID NO: 41801 - DNA, 50 bp, synthetic construct
  source 1..50: mol_type = other DNA
acaaaacaaaaaaacaacccactctaaactaacaacacaactcaaaaaca

SEQ ID NO: 41802 - DNA, 50 bp, synthetic construct
  source 1..50: mol_type = other DNA
acaaaacgaaaaaacgacccactctaaactaacgacgcgactcaaaaacg

SEQ ID NO: 41803 - DNA, 50 bp, synthetic construct
  source 1..50: mol_type = other DNA
actacaaaactacaaaacaaaaaaacaacccactctaaactaacaacaca

SEQ ID NO: 41804 - DNA, 50 bp, synthetic construct
  source 1..50: mol_type = other DNA
actacaaaactacaaaacgaaaaaacgacccactctaaactaacgacgcg

SEQ ID NO: 41805 - DNA, 50 bp, synthetic construct
  source 1..50: mol_type = other DNA
caactacaaaactacaaaacaaaaaaacaacccactctaaactaacaaca

SEQ ID NO: 41806 - DNA, 50 bp, synthetic construct
  source 1..50: mol_type = other DNA
caactacaaaactacaaaacgaaaaaacgacccactctaaactaacgacg

SEQ ID NO: 41807 - DNA, 50 bp, synthetic construct
  source 1..50: mol_type = other DNA
tcccaactacaaaactacaaaacaaaaaaacaacccactctaaactaaca

SEQ ID NO: 41808 - DNA, 50 bp, synthetic construct
  source 1..50: mol_type = other DNA
tcccaactacaaaactacaaaacgaaaaaacgacccactctaaactaacg

SEQ ID NO: 41809 - DNA, 50 bp, synthetic construct
  source 1..50: mol_type = other DNA
cttaaaataaaccacctctccaccctacaactctacaactaaaaaaaaca

SEQ ID NO: 41810 - DNA, 50 bp, synthetic construct
  source 1..50: mol_type = other DNA
cttaaaataaaccgcctctccgccctacaactctacaactaaaaaaaacg

SEQ ID NO: 41811 - DNA, 50 bp, synthetic construct
  source 1..50: mol_type = other DNA
taaaataaaccacctctccaccctacaactctacaactaaaaaaaacaca

SEQ ID NO: 41812 - DNA, 50 bp, synthetic construct
  source 1..50: mol_type = other DNA
taaaataaaccgcctctccgccctacaactctacaactaaaaaaaacgcg

SEQ ID NO: 41813 - DNA, 50 bp, synthetic construct
  source 1..50: mol_type = other DNA
ctacaactctacaactaaaaaaaacacactaaaatccaactccactaaca

SEQ ID NO: 41814 - DNA, 50 bp, synthetic construct
  source 1..50: mol_type = other DNA
ctacaactctacaactaaaaaaaacgcgctaaaatccgactccactaacg

SEQ ID NO: 41815 - DNA, 50 bp, synthetic construct
  source 1..50: mol_type = other DNA
acaactaaaaaaaacacactaaaatccaactccactaacacaacctaaca

SEQ ID NO: 41816 - DNA, 50 bp, synthetic construct
  source 1..50: mol_type = other DNA
acaactaaaaaaaacgcgctaaaatccgactccactaacgcaacctaacg

SEQ ID NO: 41817 - DNA, 50 bp, synthetic construct
  source 1..50: mol_type = other DNA
aataaaatcaaaatcaaaacccaaaactctaatatcaccacacaactaca

SEQ ID NO: 41818 - DNA, 50 bp, synthetic construct
  source 1..50: mol_type = other DNA
aataaaatcgaaatcaaaacccgaaactctaatatcaccgcgcgactacg

SEQ ID NO: 41819 - DNA, 50 bp, synthetic construct
  source 1..50: mol_type = other DNA
cctaaaaataaaatcaaaatcaaaacccaaaactctaatatcaccacaca

SEQ ID NO: 41820 - DNA, 50 bp, synthetic construct
  source 1..50: mol_type = other DNA
cctaaaaataaaatcgaaatcaaaacccgaaactctaatatcaccgcgcg

SEQ ID NO: 41821 - DNA, 50 bp, synthetic construct
  source 1..50: mol_type = other DNA
aaacctcttaccccaaaccaaaaaaacctaaacaaaataataaaaaaaca

SEQ ID NO: 41822 - DNA, 50 bp, synthetic construct
  source 1..50: mol_type = other DNA
aaacctcttaccccaaaccgaaaaaacctaaacgaaataataaaaaaacg

SEQ ID NO: 41823 - DNA, 50 bp, synthetic construct
  source 1..50: mol_type = other DNA
cttaccccaaaccaaaaaaacctaaacaaaataataaaaaaacaactaca

SEQ ID NO: 41824 - DNA, 50 bp, synthetic construct
  source 1..50: mol_type = other DNA
cttaccccaaaccgaaaaaacctaaacgaaataataaaaaaacgactacg

SEQ ID NO: 41825 - DNA, 50 bp, synthetic construct
  source 1..50: mol_type = other DNA
accccaaaccaaaaaaacctaaacaaaataataaaaaaacaactacaaca

SEQ ID NO: 41826 - DNA, 50 bp, synthetic construct
  source 1..50: mol_type = other DNA
accccaaaccgaaaaaacctaaacgaaataataaaaaaacgactacgacg

SEQ ID NO: 41827 - DNA, 50 bp, synthetic construct
  source 1..50: mol_type = other DNA
caaaccaaaaaaacctaaacaaaataataaaaaaacaactacaacaacca

SEQ ID NO: 41828 - DNA, 50 bp, synthetic construct
  source 1..50: mol_type = other DNA
caaaccgaaaaaacctaaacgaaataataaaaaaacgactacgacgaccg

SEQ ID NO: 41829 - DNA, 50 bp, synthetic construct
  source 1..50: mol_type = other DNA
aacccaacctcaaaactcaaaaacactctatctacaactaaaaaaactca

SEQ ID NO: 41830 - DNA, 50 bp, synthetic construct
  source 1..50: mol_type = other DNA
gacccgacctcgaaactcaaaaacgctctatctacaactaaaaaaactcg

SEQ ID NO: 41831 - DNA, 50 bp, synthetic construct
  source 1..50: mol_type = other DNA
tcaaccctcaacttttctataaaatcccaatcaaaaaacaaccaaataca

SEQ ID NO: 41832 - DNA, 50 bp, synthetic construct
  source 1..50: mol_type = other DNA
tcaaccctcgacttttctataaaatcccaatcaaaaaacgaccgaatacg

SEQ ID NO: 41833 - DNA, 50 bp, synthetic construct
  source 1..50: mol_type = other DNA
ttctcctcaaccctcaacttttctataaaatcccaatcaaaaaacaacca

SEQ ID NO: 41834 - DNA, 50 bp, synthetic construct
  source 1..50: mol_type = other DNA
ttctcctcaaccctcgacttttctataaaatcccaatcaaaaaacgaccg

SEQ ID NO: 41835 - DNA, 50 bp, synthetic construct
  source 1..50: mol_type = other DNA
ttaaaaaacaataaacaaacaaaaacactcacacttctcctcaaccctca

SEQ ID NO: 41836 - DNA, 50 bp, synthetic construct
  source 1..50: mol_type = other DNA
ttaaaaaacaataaacaaacgaaaacgctcacacttctcctcaaccctcg

SEQ ID NO: 41837 - DNA, 50 bp, synthetic construct
  source 1..50: mol_type = other DNA
aaacatcaaaaattaaactaactttaaaaaacaataaacaaacaaaaaca

SEQ ID NO: 41838 - DNA, 50 bp, synthetic construct
  source 1..50: mol_type = other DNA
aaacgtcgaaaattaaactaactttaaaaaacaataaacaaacgaaaacg

SEQ ID NO: 41839 - DNA, 50 bp, synthetic construct
  source 1..50: mol_type = other DNA
cttaaaaaccctacccaaaccaataaaataaaacctaacaaaaaacatca

SEQ ID NO: 41840 - DNA, 50 bp, synthetic construct
  source 1..50: mol_type = other DNA
cttaaaaaccctacccgaaccgataaaataaaacctaacgaaaaacgtcg

SEQ ID NO: 41841 - DNA, 50 bp, synthetic construct
  source 1..50: mol_type = other DNA
ttaactcattcatcatttccaacaaaattaaaaaccactcttaaaaatca

SEQ ID NO: 41842 - DNA, 50 bp, synthetic construct
  source 1..50: mol_type = other DNA
ttaactcgttcgtcatttccgacaaaattaaaaaccgctcttaaaaatcg

SEQ ID NO: 41843 - DNA, 50 bp, synthetic construct
  source 1..50: mol_type = other DNA
atcaccaatccaattaactcattcatcatttccaacaaaattaaaaacca

SEQ ID NO: 41844 - DNA, 50 bp, synthetic construct
  source 1..50: mol_type = other DNA
atcaccgatccgattaactcgttcgtcatttccgacaaaattaaaaaccg

SEQ ID NO: 41845 - DNA, 50 bp, synthetic construct
  source 1..50: mol_type = other DNA
aaataaaatctaattatacaatattcataaaccctaaaaaactaaaaaca

SEQ ID NO: 41846 - DNA, 50 bp, synthetic construct
  source 1..50: mol_type = other DNA
aaataaaatctaattatacaatattcgtaaaccctaaaaaactaaaaacg

SEQ ID NO: 41847 - DNA, 50 bp, synthetic construct
  source 1..50: mol_type = other DNA
atacaaaaacaaaaatctaaaattaaaaataaacccccacaaaaactaca

SEQ ID NO: 41848 - DNA, 50 bp, synthetic construct
  source 1..50: mol_type = other DNA
atacaaaaacaaaaatctaaaattaaaaataaacccccgcgaaaactacg

SEQ ID NO: 41849 - DNA, 50 bp, synthetic construct
  source 1..50: mol_type = other DNA
caaaaacaaaaatctaaaattaaaaataaacccccacaaaaactacaaca

SEQ ID NO: 41850 - DNA, 50 bp, synthetic construct
  source 1..50: mol_type = other DNA
caaaaacaaaaatctaaaattaaaaataaacccccgcgaaaactacgacg

SEQ ID NO: 41851 - DNA, 50 bp, synthetic construct
  source 1..50: mol_type = other DNA
acaaaaatctaaaattaaaaataaacccccacaaaaactacaacacttca

SEQ ID NO: 41852 - DNA, 50 bp, synthetic construct
  source 1..50: mol_type = other DNA
acaaaaatctaaaattaaaaataaacccccgcgaaaactacgacgcttcg

SEQ ID NO: 41853 - DNA, 50 bp, synthetic construct
  source 1..50: mol_type = other DNA
aatcctacaaaaccaccaccacaataaaccacaaatttaaaaatctaaca

SEQ ID NO: 41854 - DNA, 50 bp, synthetic construct
  source 1..50: mol_type = other DNA
gatcctacaaaaccgccgccacaataaaccgcgaatttaaaaatctaacg

SEQ ID NO: 41855 - DNA, 50 bp, synthetic construct
  source 1..50: mol_type = other DNA
ctcccaaatacaacacaaaacattaaaaattcctttaataaaaacataca

SEQ ID NO: 41856 - DNA, 50 bp, synthetic construct
  source 1..50: mol_type = other DNA
ctcccgaatacgacgcaaaacattaaaaattcctttaataaaaacgtacg

SEQ ID NO: 41857 - DNA, 50 bp, synthetic construct
  source 1..50: mol_type = other DNA
taaaaaaatccccaatattctacaccacattcaaaaatctttctttcaca

SEQ ID NO: 41858 - DNA, 50 bp, synthetic construct
  source 1..50: mol_type = other DNA
taaaaaaatccccaatattctacgccgcattcgaaaatctttctttcgcg

SEQ ID NO: 41859 - DNA, 50 bp, synthetic construct
  source 1..50: mol_type = other DNA
cattcaaaaatctttctttcacataataccacataaataccttaaaccca

SEQ ID NO: 41860 - DNA, 50 bp, synthetic construct
  source 1..50: mol_type = other DNA
cattcgaaaatctttctttcgcgtaataccgcgtaaataccttaaacccg

SEQ ID NO: 41861 - DNA, 50 bp, synthetic construct
  source 1..50: mol_type = other DNA
aaaaaacacaataactactactactactaaaatccaacctcccactccca

SEQ ID NO: 41862 - DNA, 50 bp, synthetic construct
  source 1..50: mol_type = other DNA
aaaaaacgcaataactactactactactaaaatccaacctcccgctcccg

SEQ ID NO: 41863 - DNA, 50 bp, synthetic construct
  source 1..50: mol_type = other DNA
tcaaaaaaaaaacacaataactactactactactaaaatccaacctccca

SEQ ID NO: 41864 - DNA, 50 bp, synthetic construct
  source 1..50: mol_type = other DNA
tcaaaaaaaaaacgcaataactactactactactaaaatccaacctcccg

SEQ ID NO: 41865 - DNA, 50 bp, synthetic construct
  source 1..50: mol_type = other DNA
taaaaaaaatatatacaacaaattacaaaacacctacccaaccaccaaca

SEQ ID NO: 41866 - DNA, 50 bp, synthetic construct
  source 1..50: mol_type = other DNA
taaaaaaaatatatacgacaaattacaaaacgcctacccgaccgccaacg

SEQ ID NO: 41867 - DNA, 50 bp, synthetic construct
  source 1..50: mol_type = other DNA
attcaataaaaaaaatatatacaacaaattacaaaacacctacccaacca

SEQ ID NO: 41868 - DNA, 50 bp, synthetic construct
  source 1..50: mol_type = other DNA
attcaataaaaaaaatatatacgacaaattacaaaacgcctacccgaccg

SEQ ID NO: 41869 - DNA, 50 bp, synthetic construct
  source 1..50: mol_type = other DNA
aaatattcaataaaaaaaatatatacaacaaattacaaaacacctaccca

SEQ ID NO: 41870 - DNA, 50 bp, synthetic construct
  source 1..50: mol_type = other DNA
aaatattcaataaaaaaaatatatacgacaaattacaaaacgcctacccg

SEQ ID NO: 41871 - DNA, 50 bp, synthetic construct
  source 1..50: mol_type = other DNA
ctcttccaaaaaaaaatctttcaaaaacaaaaaaccatcatccaaataca

SEQ ID NO: 41872 - DNA, 50 bp, synthetic construct
  source 1..50: mol_type = other DNA
ctcttccaaaaaaaaatctttcaaaaacaaaaaaccgtcatccgaatacg

SEQ ID NO: 41873 - DNA, 50 bp, synthetic construct
  source 1..50: mol_type = other DNA
aaaaaaaaaatccaactacctataaaaataacaaataaacaacacatcca

SEQ ID NO: 41874 - DNA, 50 bp, synthetic construct
  source 1..50: mol_type = other DNA
aaaaaaaaaatccaactacctataaaaataacaaataaacaacgcatccg

SEQ ID NO: 41875 - DNA, 50 bp, synthetic construct
  source 1..50: mol_type = other DNA
caccaaacccaaccaaaaacaaaaaatcatttaaaaaataaatacaacca

SEQ ID NO: 41876 - DNA, 50 bp, synthetic construct
  source 1..50: mol_type = other DNA
caccgaacccgaccgaaaacaaaaaatcatttaaaaaataaatacaaccg

SEQ ID NO: 41877 - DNA, 50 bp, synthetic construct
  source 1..50: mol_type = other DNA
taaaatatatactatttttcaaactcaaatataaaaaacacaaaacttca

SEQ ID NO: 41878 - DNA, 50 bp, synthetic construct
  source 1..50: mol_type = other DNA
taaaatatatactatttttcgaactcaaatataaaaaacgcaaaacttcg

SEQ ID NO: 41879 - DNA, 50 bp, synthetic construct
  source 1..50: mol_type = other DNA
tacaaaaaacctcaaaaaaaccctccaaactaaaactactcaatcaaaca

SEQ ID NO: 41880 - DNA, 50 bp, synthetic construct
  source 1..50: mol_type = other DNA
tacgaaaaacctcgaaaaaaccctccgaactaaaactactcaatcaaacg

SEQ ID NO: 41881 - DNA, 50 bp, synthetic construct
  source 1..50: mol_type = other DNA
taaaaataaaaacccacaaattctacaaaaaacctcaaaaaaaccctcca

SEQ ID NO: 41882 - DNA, 50 bp, synthetic construct
  source 1..50: mol_type = other DNA
taaaaataaaaacccgcaaattctacgaaaaacctcgaaaaaaccctccg

SEQ ID NO: 41883 - DNA, 50 bp, synthetic construct
  source 1..50: mol_type = other DNA
aaccaaaaccaaataaaaataaaaacccacaaattctacaaaaaacctca

SEQ ID NO: 41884 - DNA, 50 bp, synthetic construct
  source 1..50: mol_type = other DNA
aaccgaaaccgaataaaaataaaaacccgcaaattctacgaaaaacctcg

SEQ ID NO: 41885 - DNA, 50 bp, synthetic construct
  source 1..50: mol_type = other DNA
caaaaattataaccaaaaccaaataaaaataaaaacccacaaattctaca

SEQ ID NO: 41886 - DNA, 50 bp, synthetic construct
  source 1..50: mol_type = other DNA
cgaaaattataaccgaaaccgaataaaaataaaaacccgcaaattctacg

SEQ ID NO: 41887 - DNA, 50 bp, synthetic construct
  source 1..50: mol_type = other DNA
cacccaaaaaacaataacaaactaccaaaaacaaaaaactccaaaaaaca

SEQ ID NO: 41888 - DNA, 50 bp, synthetic construct
  source 1..50: mol_type = other DNA
cgcccaaaaaacgataacaaactaccaaaaacgaaaaactccgaaaaacg

SEQ ID NO: 41889 - DNA, 50 bp, synthetic construct
  source 1..50: mol_type = other DNA
ccaaaaaacaataacaaactaccaaaaacaaaaaactccaaaaaacaaca

SEQ ID NO: 41890 - DNA, 50 bp, synthetic construct
  source 1..50: mol_type = other DNA
ccaaaaaacgataacaaactaccaaaaacgaaaaactccgaaaaacgacg

SEQ ID NO: 41891 - DNA, 50 bp, synthetic construct
  source 1..50: mol_type = other DNA
aataacaaactaccaaaaacaaaaaactccaaaaaacaacaaaaattcca

SEQ ID NO: 41892 - DNA, 50 bp, synthetic construct
  source 1..50: mol_type = other DNA
gataacaaactaccaaaaacgaaaaactccgaaaaacgacgaaaattccg

SEQ ID NO: 41893 - DNA, 50 bp, synthetic construct
  source 1..50: mol_type = other DNA
ctaccaaaaacaaaaaactccaaaaaacaacaaaaattccaaaaacctca

SEQ ID NO: 41894 - DNA, 50 bp, synthetic construct
  source 1..50: mol_type = other DNA
ctaccaaaaacgaaaaactccgaaaaacgacgaaaattccgaaaacctcg

SEQ ID NO: 41895 - DNA, 50 bp, synthetic construct
  source 1..50: mol_type = other DNA
aaacaaaaaactccaaaaaacaacaaaaattccaaaaacctcaacaaaca

SEQ ID NO: 41896 - DNA, 50 bp, synthetic construct
  source 1..50: mol_type = other DNA
aaacgaaaaactccgaaaaacgacgaaaattccgaaaacctcgacaaacg

SEQ ID NO: 41897 - DNA, 50 bp, synthetic construct
  source 1..50: mol_type = other DNA
aaaactccaaaaaacaacaaaaattccaaaaacctcaacaaacaaaaaca

SEQ ID NO: 41898 - DNA, 50 bp, synthetic construct
  source 1..50: mol_type = other DNA
aaaactccgaaaaacgacgaaaattccgaaaacctcgacaaacgaaaacg

SEQ ID NO: 41899 - DNA, 50 bp, synthetic construct
  source 1..50: mol_type = other DNA
ccataacaatcaaacccaaactaaaacaactaactaaaacaacaaaaaca

SEQ ID NO: 41900 - DNA, 50 bp, synthetic construct
  source 1..50: mol_type = other DNA
ccataacgatcgaacccgaactaaaacaactaactaaaacgacgaaaacg

SEQ ID NO: 41901 - DNA, 50 bp, synthetic construct
  source 1..50: mol_type = other DNA
ccatataaccaaaaccaaacaaatacaaaacatcacataatacctctaca

SEQ ID NO: 41902 - DNA, 50 bp, synthetic construct
  source 1..50: mol_type = other DNA
ccatataaccaaaaccgaacgaatacgaaacgtcacgtaatacctctacg

SEQ ID NO: 41903 - DNA, 50 bp, synthetic construct
  source 1..50: mol_type = other DNA
ctacacacaaaaaaacataaactcccaaatatacaaaccctatactacca

SEQ ID NO: 41904 - DNA, 50 bp, synthetic construct
  source 1..50: mol_type = other DNA
ctacgcgcaaaaaaacgtaaactcccgaatatacaaaccctatactaccg

SEQ ID NO: 41905 - DNA, 50 bp, synthetic construct
  source 1..50: mol_type = other DNA
aaaaaacctaaatttatcacctaaaccccaaaaccaacatatccaattca

SEQ ID NO: 41906 - DNA, 50 bp, synthetic construct
  source 1..50: mol_type = other DNA
gaaaaacctaaatttatcacctaaaccccaaaaccgacatatccgattcg

SEQ ID NO: 41907 - DNA, 50 bp, synthetic construct
  source 1..50: mol_type = other DNA
caaaaacaaaaaacaaaaaacctaaatttatcacctaaaccccaaaacca

SEQ ID NO: 41908 - DNA, 50 bp, synthetic construct
  source 1..50: mol_type = other DNA
caaaaacgaaaaacgaaaaacctaaatttatcacctaaaccccaaaaccg

SEQ ID NO: 41909 - DNA, 50 bp, synthetic construct
  source 1..50: mol_type = other DNA
tcaaaacttcaacacctaaaaacaaatctaaaaaactccaaattaaacca

SEQ ID NO: 41910 - DNA, 50 bp, synthetic construct
  source 1..50: mol_type = other DNA
tcgaaacttcgacacctaaaaacaaatctaaaaaactccgaattaaaccg

SEQ ID NO: 41911 - DNA, 50 bp, synthetic construct
  source 1..50: mol_type = other DNA
tcctacatcctttacctttttactaaacctcttaaaaactcaaaacttca

SEQ ID NO: 41912 - DNA, 50 bp, synthetic construct
  source 1..50: mol_type = other DNA
tcctacgtcctttacctttttactaaacctcttaaaaactcgaaacttcg

SEQ ID NO: 41913 - DNA, 50 bp, synthetic construct
  source 1..50: mol_type = other DNA
acctactaaaaaaactactattaactacatcacaatccaaaaaaccaaca

SEQ ID NO: 41914 - DNA, 50 bp, synthetic construct
  source 1..50: mol_type = other DNA
acctactaaaaaaactactattaactacatcgcgatccaaaaaaccgacg

SEQ ID NO: 41915 - DNA, 50 bp, synthetic construct
  source 1..50: mol_type = other DNA
aaaccaacatcttttataaatacaaaaactaaaccaaaccaaacacacca

SEQ ID NO: 41916 - DNA, 50 bp, synthetic construct
  source 1..50: mol_type = other DNA
aaaccgacgtcttttataaatacaaaaactaaaccaaaccaaacgcgccg

SEQ ID NO: 41917 - DNA, 50 bp, synthetic construct
  source 1..50: mol_type = other DNA
tttataaatacaaaaactaaaccaaaccaaacacaccataaaaacccaca

SEQ ID NO: 41918 - DNA, 50 bp, synthetic construct
  source 1..50: mol_type = other DNA
tttataaatacaaaaactaaaccaaaccaaacgcgccgtaaaaacccgcg

SEQ ID NO: 41919 - DNA, 50 bp, synthetic construct
  source 1..50: mol_type = other DNA
tacaaaacacaaaaaaatacctaaattccaacacatctatataacaccca

SEQ ID NO: 41920 - DNA, 50 bp, synthetic construct
  source 1..50: mol_type = other DNA
tacgaaacgcgaaaaaatacctaaattccaacgcatctatataacacccg

SEQ ID NO: 41921 - DNA, 50 bp, synthetic construct
  source 1..50: mol_type = other DNA
acacaaacccaaataccatacaaatacactaaaatccaaacactttccca

SEQ ID NO: 41922 - DNA, 50 bp, synthetic construct
  source 1..50: mol_type = other DNA
acgcaaacccgaataccatacaaatacgctaaaatccaaacactttcccg

SEQ ID NO: 41923 - DNA, 50 bp, synthetic construct
  source 1..50: mol_type = other DNA
ccctctaaccctcactcaatccaaactaaaacatctaaatttacaaaaca

SEQ ID NO: 41924 - DNA, 50 bp, synthetic construct
  source 1..50: mol_type = other DNA
ccctctaaccctcgctcgatccaaactaaaacatctaaatttacgaaacg

SEQ ID NO: 41925 - DNA, 50 bp, synthetic construct
  source 1..50: mol_type = other DNA
cttctaaaattaaattactataaacaaacaacccatatcaaaatcccaca

SEQ ID NO: 41926 - DNA, 50 bp, synthetic construct
  source 1..50: mol_type = other DNA
cttctaaaattaaattactataaacgaacgacccatatcgaaatcccgcg

SEQ ID NO: 41927 - DNA, 50 bp, synthetic construct
  source 1..50: mol_type = other DNA
aaattaaattactataaacaaacaacccatatcaaaatcccacacccaca

SEQ ID NO: 41928 - DNA, 50 bp, synthetic construct
  source 1..50: mol_type = other DNA
aaattaaattactataaacgaacgacccatatcgaaatcccgcgcccacg

SEQ ID NO: 41929 - DNA, 50 bp, synthetic construct
  source 1..50: mol_type = other DNA
cacataactacccaaaattccaaatctccaaactacaaattctaatcaca

SEQ ID NO: 41930 - DNA, 50 bp, synthetic construct
  source 1..50: mol_type = other DNA
cacgtaactacccaaaattccgaatctccgaactacaaattctaatcacg

SEQ ID NO: 41931 - DNA, 50 bp, synthetic construct
  source 1..50: mol_type = other DNA
acaaaacttatacatcacacatctataacaaacccctcaatcaaacaaca

SEQ ID NO: 41932 - DNA, 50 bp, synthetic construct
  source 1..50: mol_type = other DNA
acaaaacttatacatcacacatctataacgaacccctcaatcaaacgacg

SEQ ID NO: 41933 - DNA, 50 bp, synthetic construct
  source 1..50: mol_type = other DNA
catacaaaacttatacatcacacatctataacaaacccctcaatcaaaca

SEQ ID NO: 41934 - DNA, 50 bp, synthetic construct
  source 1..50: mol_type = other DNA
cgtacaaaacttatacatcacacatctataacgaacccctcaatcaaacg

SEQ ID NO: 41935 - DNA, 50 bp, synthetic construct
  source 1..50: mol_type = other DNA
ataaccttaaaaaactcactcttccaaaacacaccctaaaaaaaacatca

SEQ ID NO: 41936 - DNA, 50 bp, synthetic construct
  source 1..50: mol_type = other DNA
ataaccttaaaaaactcgctcttccgaaacgcaccctaaaaaaaacgtcg

SEQ ID NO: 41937 - DNA, 50 bp, synthetic construct
  source 1..50: mol_type = other DNA
aaccttccaaaataaaaacaaaaaacaaaacaacaaaaaccacaacaaca

SEQ ID NO: 41938 - DNA, 50 bp, synthetic construct
  source 1..50: mol_type = other DNA
aaccttccaaaataaaaacgaaaaacaaaacgacaaaaaccgcgacaacg

SEQ ID NO: 41939 - DNA, 50 bp, synthetic construct
  source 1..50: mol_type = other DNA
cttccaaaataaaaacaaaaaacaaaacaacaaaaaccacaacaacacca

SEQ ID NO: 41940 - DNA, 50 bp, synthetic construct
  source 1..50: mol_type = other DNA
cttccaaaataaaaacgaaaaacaaaacgacaaaaaccgcgacaacgccg

SEQ ID NO: 41941 - DNA, 50 bp, synthetic construct
  source 1..50: mol_type = other DNA
taaaaaacaataaaaccacaaaaatcaaaaccaacaccaaaacaaaaaca

SEQ ID NO: 41942 - DNA, 50 bp, synthetic construct
  source 1..50: mol_type = other DNA
taaaaaacgataaaaccgcgaaaatcgaaaccgacgccgaaacaaaaacg

SEQ ID NO: 41943 - DNA, 50 bp, synthetic construct
  source 1..50: mol_type = other DNA
caaaaaactctaaacccacccctaacctacctaacctcaacaattataca

SEQ ID NO: 41944 - DNA, 50 bp, synthetic construct
  source 1..50: mol_type = other DNA
caaaaaactctaaacccacccctaacctacctaacctcaacaattatacg

SEQ ID NO: 41945 - DNA, 50 bp, synthetic construct
  source 1..50: mol_type = other DNA
tattcaaataaaacaaacaactatatacaaaaaaccaacacccacacaca

SEQ ID NO: 41946 - DNA, 50 bp, synthetic construct
  source 1..50: mol_type = other DNA
tattcaaataaaacaaacgactatatacaaaaaaccgacgcccgcacacg

SEQ ID NO: 41947 - DNA, 50 bp, synthetic construct
  source 1..50: mol_type = other DNA
aaaattataaataaaaatcccttaactatcataaacataaacatatatca

SEQ ID NO: 41948 - DNA, 50 bp, synthetic construct
  source 1..50: mol_type = other DNA
gaaattataaataaaaatcccttaactatcgtaaacgtaaacgtatatcg

SEQ ID NO: 41949 - DNA, 50 bp, synthetic construct
  source 1..50: mol_type = other DNA
taacaacaaaattataaataaaaatcccttaactatcataaacataaaca

SEQ ID NO: 41950 - DNA, 50 bp, synthetic construct
  source 1..50: mol_type = other DNA
taacgacgaaattataaataaaaatcccttaactatcgtaaacgtaaacg

SEQ ID NO: 41951 - DNA, 50 bp, synthetic construct
  source 1..50: mol_type = other DNA
caaaaataacaacaaaattataaataaaaatcccttaactatcataaaca

SEQ ID NO: 41952 - DNA, 50 bp, synthetic construct
  source 1..50: mol_type = other DNA
cgaaaataacgacgaaattataaataaaaatcccttaactatcgtaaacg

SEQ ID NO: 41953 - DNA, 50 bp, synthetic construct
  source 1..50: mol_type = other DNA
ccaaaacaaaaataacaacaaaattataaataaaaatcccttaactatca

SEQ ID NO: 41954 - DNA, 50 bp, synthetic construct
  source 1..50: mol_type = other DNA
ccaaaacgaaaataacgacgaaattataaataaaaatcccttaactatcg

SEQ ID NO: 41955 - DNA, 50 bp, synthetic construct
  source 1..50: mol_type = other DNA
ctcttaatcttaaacctactatcccaaaaaccaaaacaaaaataacaaca

SEQ ID NO: 41956 - DNA, 50 bp, synthetic construct
  source 1..50: mol_type = other DNA
ctcttaatcttaaacctactatcccgaaaaccaaaacgaaaataacgacg

SEQ ID NO: 41957 - DNA, 50 bp, synthetic construct
  source 1..50: mol_type = other DNA
aaccaaaaacctctcttaatcttaaacctactatcccaaaaaccaaaaca

SEQ ID NO: 41958 - DNA, 50 bp, synthetic construct
  source 1..50: mol_type = other DNA
gaccgaaaacctctcttaatcttaaacctactatcccgaaaaccaaaacg

SEQ ID NO: 41959 - DNA, 50 bp, synthetic construct
  source 1..50: mol_type = other DNA
caaccaatacaaaaaaaacccaacccaaaattcaactcacttataaaaca

SEQ ID NO: 41960 - DNA, 50 bp, synthetic construct
  source 1..50: mol_type = other DNA
cgaccgatacaaaaaaaacccaacccgaaattcgactcacttataaaacg

SEQ ID NO: 41961 - DNA, 50 bp, synthetic construct
  source 1..50: mol_type = other DNA
ccaatacaaaaaaaacccaacccaaaattcaactcacttataaaacacca

SEQ ID NO: 41962 - DNA, 50 bp, synthetic construct
  source 1..50: mol_type = other DNA
ccgatacaaaaaaaacccaacccgaaattcgactcacttataaaacgccg

SEQ ID NO: 41963 - DNA, 50 bp, synthetic construct
  source 1..50: mol_type = other DNA
aaaaaaacccaacccaaaattcaactcacttataaaacaccataaaaaca

SEQ ID NO: 41964 - DNA, 50 bp, synthetic construct
  source 1..50: mol_type = other DNA
aaaaaaacccaacccgaaattcgactcacttataaaacgccgtaaaaacg

SEQ ID NO: 41965 - DNA, 50 bp, synthetic construct
  source 1..50: mol_type = other DNA
aataaatcacattatcaaccctattcttcaaaaaaccctaccaaattcca

SEQ ID NO: 41966 - DNA, 50 bp, synthetic construct
  source 1..50: mol_type = other DNA
gataaatcgcgttatcgaccctattcttcgaaaaaccctaccaaattccg

SEQ ID NO: 41967 - DNA, 50 bp, synthetic construct
  source 1..50: mol_type = other DNA
tcactaaatcaaaaacaaaacaaataaacaaaacctaataaaatctccca

SEQ ID NO: 41968 - DNA, 50 bp, synthetic construct
  source 1..50: mol_type = other DNA
tcgctaaatcgaaaacgaaacaaataaacgaaacctaataaaatctcccg

SEQ ID NO: 41969 - DNA, 50 bp, synthetic construct
  source 1..50: mol_type = other DNA
aacaaaacaaataaacaaaacctaataaaatctcccaaaaaacaaaatca

SEQ ID NO: 41970 - DNA, 50 bp, synthetic construct
  source 1..50: mol_type = other DNA
aacgaaacaaataaacgaaacctaataaaatctcccgaaaaacaaaatcg

SEQ ID NO: 41971 - DNA, 50 bp, synthetic construct
  source 1..50: mol_type = other DNA
aaactaaaaaaaatcataactaccaaattacataccaactaacctcacca

SEQ ID NO: 41972 - DNA, 50 bp, synthetic construct
  source 1..50: mol_type = other DNA
aaactaaaaaaaatcgtaactaccgaattacgtaccgactaacctcaccg

SEQ ID NO: 41973 - DNA, 50 bp, synthetic construct
  source 1..50: mol_type = other DNA
ataaccacccactaaactaaaaaaaatcataactaccaaattacatacca

SEQ ID NO: 41974 - DNA, 50 bp, synthetic construct
  source 1..50: mol_type = other DNA
ataaccgcccactaaactaaaaaaaatcgtaactaccgaattacgtaccg

SEQ ID NO: 41975 - DNA, 50 bp, synthetic construct
  source 1..50: mol_type = other DNA
attcaataaacaactactcacaatattcaatattaaaaaaacaaccaaca

SEQ ID NO: 41976 - DNA, 50 bp, synthetic construct
  source 1..50: mol_type = other DNA
attcaataaacgactactcacgatattcgatattaaaaaaacgaccgacg

SEQ ID NO: 41977 - DNA, 50 bp, synthetic construct
  source 1..50: mol_type = other DNA
aactactcacaatattcaatattaaaaaaacaaccaacaaaaaactaaca

SEQ ID NO: 41978 - DNA, 50 bp, synthetic construct
  source 1..50: mol_type = other DNA
gactactcacgatattcgatattaaaaaaacgaccgacgaaaaactaacg

SEQ ID NO: 41979 - DNA, 50 bp, synthetic construct
  source 1..50: mol_type = other DNA
cacaatattcaatattaaaaaaacaaccaacaaaaaactaacaaaaacca

SEQ ID NO: 41980 - DNA, 50 bp, synthetic construct
  source 1..50: mol_type = other DNA
cacgatattcgatattaaaaaaacgaccgacgaaaaactaacgaaaaccg

SEQ ID NO: 41981 - DNA, 50 bp, synthetic construct
  source 1..50: mol_type = other DNA
aaaaatcaaaaaaccaaaaaaattttcacctctccccaactctaaaaaca

SEQ ID NO: 41982 - DNA, 50 bp, synthetic construct
  source 1..50: mol_type = other DNA
aaaaatcgaaaaaccgaaaaaattttcgcctctccccaactctaaaaacg

SEQ ID NO: 41983 - DNA, 50 bp, synthetic construct
  source 1..50: mol_type = other DNA
ctacctaaaaaacctttctaaaccaatcaaaatccaacacccaattaaca

SEQ ID NO: 41984 - DNA, 50 bp, synthetic construct
  source 1..50: mol_type = other DNA
ctacctaaaaaacctttctaaaccaatcgaaatccgacacccaattaacg

SEQ ID NO: 41985 - DNA, 50 bp, synthetic construct
  source 1..50: mol_type = other DNA
ttcactcaacttaaaacaccactacctaaaaaacctttctaaaccaatca

SEQ ID NO: 41986 - DNA, 50 bp, synthetic construct
  source 1..50: mol_type = other DNA
ttcactcgacttaaaacaccgctacctaaaaaacctttctaaaccaatcg

SEQ ID NO: 41987 - DNA, 50 bp, synthetic construct
  source 1..50: mol_type = other DNA
accaaacaaatatatacatctctatatatattcctaaaaacaacaaaaca

SEQ ID NO: 41988 - DNA, 50 bp, synthetic construct
  source 1..50: mol_type = other DNA
accgaacgaatatatacgtctctatatatattcctaaaaacaacaaaacg

SEQ ID NO: 41989 - DNA, 50 bp, synthetic construct
  source 1..50: mol_type = other DNA
actaaactaatacaacttatccaacttccattctccacaataaccctcca

SEQ ID NO: 41990 - DNA, 50 bp, synthetic construct
  source 1..50: mol_type = other DNA
actaaactaatacaacttatccaacttccattctccacgataaccctccg

SEQ ID NO: 41991 - DNA, 50 bp, synthetic construct
  source 1..50: mol_type = other DNA
aacaataaatacctactccttcactaaacatactttaaacccaacataca

SEQ ID NO: 41992 - DNA, 50 bp, synthetic construct
  source 1..50: mol_type = other DNA
aacaataaatacctactccttcactaaacatactttaaacccgacgtacg

SEQ ID NO: 41993 - DNA, 50 bp, synthetic construct
  source 1..50: mol_type = other DNA
taaatacctactccttcactaaacatactttaaacccaacatacaaaaca

SEQ ID NO: 41994 - DNA, 50 bp, synthetic construct
  source 1..50: mol_type = other DNA
taaatacctactccttcactaaacatactttaaacccgacgtacgaaacg

SEQ ID NO: 41995 - DNA, 50 bp, synthetic construct
  source 1..50: mol_type = other DNA
aaacatactttaaacccaacatacaaaacataatactaaaaattccacca

SEQ ID NO: 41996 - DNA, 50 bp, synthetic construct
  source 1..50: mol_type = other DNA
aaacatactttaaacccgacgtacgaaacgtaatactaaaaattccgccg

SEQ ID NO: 41997 - DNA, 50 bp, synthetic construct
  source 1..50: mol_type = other DNA
tcatcaaaaccttcctaaaaacaccctaaaaaaaaattacatccaaacca

SEQ ID NO: 41998 - DNA, 50 bp, synthetic construct
  source 1..50: mol_type = other DNA
tcatcaaaaccttcctaaaaacaccctaaaaaaaaattacgtccaaaccg

SEQ ID NO: 41999 - DNA, 50 bp, synthetic construct
  source 1..50: mol_type = other DNA
aatactaaaaattccaccataaaccaaacaaccaaaacccaacctaaaca

SEQ ID NO: 42000 - DNA, 50 bp, synthetic construct
  source 1..50: mol_type = other DNA
aatactaaaaattccgccgtaaaccaaacaaccaaaacccgacctaaacg

SEQ ID NO: 42001 - DNA, 50 bp, synthetic construct
  source 1..50: mol_type = other DNA
ataacaccattcactcaactcctaaacttttaaatcaaccaaccttaaca

SEQ ID NO: 42002 - DNA, 50 bp, synthetic construct
  source 1..50: mol_type = other DNA
ataacgccgttcactcgactcctaaacttttaaatcaaccgaccttaacg

SEQ ID NO: 42003 - DNA, 50 bp, synthetic construct
  source 1..50: mol_type = other DNA
catctaacaccaaaaccaactaactcaaaaacccaaaaatcaaataaaca

SEQ ID NO: 42004 - DNA, 50 bp, synthetic construct
  source 1..50: mol_type = other DNA
cgtctaacgccaaaaccgactaactcaaaaacccaaaaatcgaataaacg

SEQ ID NO: 42005 - DNA, 50 bp, synthetic construct
  source 1..50: mol_type = other DNA
ctaacaccaaaaccaactaactcaaaaacccaaaaatcaaataaacaaca

SEQ ID NO: 42006 - DNA, 50 bp, synthetic construct
  source 1..50: mol_type = other DNA
ctaacgccaaaaccgactaactcaaaaacccaaaaatcgaataaacgacg

SEQ ID NO: 42007 - DNA, 50 bp, synthetic construct
  source 1..50: mol_type = other DNA
ccaactaactcaaaaacccaaaaatcaaataaacaacaccattttaaaca

SEQ ID NO: 42008 - DNA, 50 bp, synthetic construct
  source 1..50: mol_type = other DNA
ccgactaactcaaaaacccaaaaatcgaataaacgacgccattttaaacg

SEQ ID NO: 42009 - DNA, 50 bp, synthetic construct
  source 1..50: mol_type = other DNA
actaactcaaaaacccaaaaatcaaataaacaacaccattttaaacaaca

SEQ ID NO: 42010 - DNA, 50 bp, synthetic construct
  source 1..50: mol_type = other DNA
actaactcaaaaacccaaaaatcgaataaacgacgccattttaaacgacg

SEQ ID NO: 42011 - DNA, 50 bp, synthetic construct
  source 1..50: mol_type = other DNA
aactcaaaaacccaaaaatcaaataaacaacaccattttaaacaacaaca

SEQ ID NO: 42012 - DNA, 50 bp, synthetic construct
  source 1..50: mol_type = other DNA
aactcaaaaacccaaaaatcgaataaacgacgccattttaaacgacgacg

SEQ ID NO: 42013 - DNA, 50 bp, synthetic construct
  source 1..50: mol_type = other DNA
caaccaatccctacacaaaaaacaaaaaacaccaaatcattaaaaaacca

SEQ ID NO: 42014 - DNA, 50 bp, synthetic construct
  source 1..50: mol_type = other DNA
caaccaatccctacgcgaaaaacaaaaaacgccgaatcgttaaaaaaccg

SEQ ID NO: 42015 - DNA, 50 bp, synthetic construct
  source 1..50: mol_type = other DNA
aaaaaaaacaaccataaaaaaaatacaacataacaaaaaccaccaatcca

SEQ ID NO: 42016 - DNA, 50 bp, synthetic construct
  source 1..50: mol_type = other DNA
aaaaaaaacgaccgtaaaaaaaatacaacataacgaaaaccgccgatccg

SEQ ID NO: 42017 - DNA, 50 bp, synthetic construct
  source 1..50: mol_type = other DNA
aaacctctacaaaaaaataaactataatacaactacaaacaaccaccaca

SEQ ID NO: 42018 - DNA, 50 bp, synthetic construct
  source 1..50: mol_type = other DNA
aaacctctacgaaaaaataaactataatacgactacgaacaaccgccgcg

SEQ ID NO: 42019 - DNA, 50 bp, synthetic construct
  source 1..50: mol_type = other DNA
aaaaacctctacaaaaaaataaactataatacaactacaaacaaccacca

SEQ ID NO: 42020 - DNA, 50 bp, synthetic construct
  source 1..50: mol_type = other DNA
aaaaacctctacgaaaaaataaactataatacgactacgaacaaccgccg

SEQ ID NO: 42021 - DNA, 50 bp, synthetic construct
  source 1..50: mol_type = other DNA
aactcttaacctaaaactcaaacaactacttacactcattcaactactca

SEQ ID NO: 42022 - DNA, 50 bp, synthetic construct
  source 1..50: mol_type = other DNA
aactcttaacctaaaactcgaacaactacttacactcgttcaactactcg

SEQ ID NO: 42023 - DNA, 50 bp, synthetic construct
  source 1..50: mol_type = other DNA
cattcaactactcaatccactaatccaactccttaataaacaccttctca

SEQ ID NO: 42024 - DNA, 50 bp, synthetic construct
  source 1..50: mol_type = other DNA
cgttcaactactcgatccactaatccaactccttaataaacaccttctcg

SEQ ID NO: 42025 - DNA, 50 bp, synthetic construct
  source 1..50: mol_type = other DNA
tatacttctaacaactattaaaactaacactaacccactaactctcacca

SEQ ID NO: 42026 - DNA, 50 bp, synthetic construct
  source 1..50: mol_type = other DNA
tatacttctaacgactattaaaactaacgctaacccgctaactctcaccg

SEQ ID NO: 42027 - DNA, 50 bp, synthetic construct
  source 1..50: mol_type = other DNA
acacaaccaaaattaaaacacaaactaaaaatcaaaacacaaacacaaca

SEQ ID NO: 42028 - DNA, 50 bp, synthetic construct
  source 1..50: mol_type = other DNA
gcacgaccgaaattaaaacgcaaactaaaaatcaaaacgcaaacgcgacg

SEQ ID NO: 42029 - DNA, 50 bp, synthetic construct
  source 1..50: mol_type = other DNA
caaacacaacataaccaactaataactaaaacaccttaactttttaaaca

SEQ ID NO: 42030 - DNA, 50 bp, synthetic construct
  source 1..50: mol_type = other DNA
caaacgcgacgtaaccgactaataactaaaacgccttaactttttaaacg

SEQ ID NO: 42031 - DNA, 50 bp, synthetic construct
  source 1..50: mol_type = other DNA
cctaaaataatactcaaaaattaatccaattcaccactatacacactaca

SEQ ID NO: 42032 - DNA, 50 bp, synthetic construct
  source 1..50: mol_type = other DNA
cctaaaataatactcaaaaattaatccgattcgccgctatacgcactacg

SEQ ID NO: 42033 - DNA, 50 bp, synthetic construct
  source 1..50: mol_type = other DNA
aaaccctcacctctcctaaaataatactcaaaaattaatccaattcacca

SEQ ID NO: 42034 - DNA, 50 bp, synthetic construct
  source 1..50: mol_type = other DNA
aaaccctcgcctctcctaaaataatactcaaaaattaatccgattcgccg

SEQ ID NO: 42035 - DNA, 50 bp, synthetic construct
  source 1..50: mol_type = other DNA
cccaaaccctcacctctcctaaaataatactcaaaaattaatccaattca

SEQ ID NO: 42036 - DNA, 50 bp, synthetic construct
  source 1..50: mol_type = other DNA
cccaaaccctcgcctctcctaaaataatactcaaaaattaatccgattcg

SEQ ID NO: 42037 - DNA, 50 bp, synthetic construct
  source 1..50: mol_type = other DNA
aaaaaaccaattacaaactaccaataaccccaacttccatccaatctaca

SEQ ID NO: 42038 - DNA, 50 bp, synthetic construct
  source 1..50: mol_type = other DNA
aaaaaaccaattacaaactaccaataaccccgacttccatccgatctacg

SEQ ID NO: 42039 - DNA, 50 bp, synthetic construct
  source 1..50: mol_type = other DNA
taataaactcaactcctcacctaaaacctaacaatccaatcacaaaaaca

SEQ ID NO: 42040 - DNA, 50 bp, synthetic construct
  source 1..50: mol_type = other DNA
taataaactcaactcctcacctaaaacctaacaatccgatcacgaaaacg

SEQ ID NO: 42041 - DNA, 50 bp, synthetic construct
  source 1..50: mol_type = other DNA
caactcctcacctaaaacctaacaatccaatcacaaaaacaaaaattaca

SEQ ID NO: 42042 - DNA, 50 bp, synthetic construct
  source 1..50: mol_type = other DNA
caactcctcacctaaaacctaacaatccgatcacgaaaacgaaaattacg

SEQ ID NO: 42043 - DNA, 50 bp, synthetic construct
  source 1..50: mol_type = other DNA
caatcacaaaaacaaaaattacaaccccataactcatctaaaatactaca

SEQ ID NO: 42044 - DNA, 50 bp, synthetic construct
  source 1..50: mol_type = other DNA
cgatcacgaaaacgaaaattacgaccccgtaactcatctaaaatactacg

SEQ ID NO: 42045 - DNA, 50 bp, synthetic construct
  source 1..50: mol_type = other DNA
caaaaattacaaccccataactcatctaaaatactacaactctataatca

SEQ ID NO: 42046 - DNA, 50 bp, synthetic construct
  source 1..50: mol_type = other DNA
cgaaaattacgaccccgtaactcatctaaaatactacgactctataatcg

SEQ ID NO: 42047 - DNA, 50 bp, synthetic construct
  source 1..50: mol_type = other DNA
ctacaactctataatcatataaatttccatcatctttaaaaacaaaaaca

SEQ ID NO: 42048 - DNA, 50 bp, synthetic construct
  source 1..50: mol_type = other DNA
ctacgactctataatcgtataaatttccgtcatctttaaaaacaaaaacg

SEQ ID NO: 42049 - DNA, 50 bp, synthetic construct
  source 1..50: mol_type = other DNA
tctataatcatataaatttccatcatctttaaaaacaaaaacaaacaaca

SEQ ID NO: 42050 - DNA, 50 bp, synthetic construct
  source 1..50: mol_type = other DNA
tctataatcgtataaatttccgtcatctttaaaaacaaaaacgaacaacg

SEQ ID NO: 42051 - DNA, 50 bp, synthetic construct
  source 1..50: mol_type = other DNA
catataaatttccatcatctttaaaaacaaaaacaaacaacaaataacca

SEQ ID NO: 42052 - DNA, 50 bp, synthetic construct
  source 1..50: mol_type = other DNA
cgtataaatttccgtcatctttaaaaacaaaaacgaacaacgaataaccg

SEQ ID NO: 42053 - DNA, 50 bp, synthetic construct
  source 1..50: mol_type = other DNA
aaaacaaacaacaaataaccacttaaattaaccacccccacctctaaaca

SEQ ID NO: 42054 - DNA, 50 bp, synthetic construct
  source 1..50: mol_type = other DNA
aaaacgaacaacgaataaccgcttaaattaaccacccccacctctaaacg

SEQ ID NO: 42055 - DNA, 50 bp, synthetic construct
  source 1..50: mol_type = other DNA
aaatacacactcctccacctacaaataacctaattacaaaataccaacca

SEQ ID NO: 42056 - DNA, 50 bp, synthetic construct
  source 1..50: mol_type = other DNA
aaatacacgctcctccacctacgaataacctaattacaaaataccaaccg

SEQ ID NO: 42057 - DNA, 50 bp, synthetic construct
  source 1..50: mol_type = other DNA
taacaccttataattaaatcactcataaataaaaaaacatatacctacca

SEQ ID NO: 42058 - DNA, 50 bp, synthetic construct
  source 1..50: mol_type = other DNA
taacaccttataattaaatcactcgtaaataaaaaaacgtatacctaccg

SEQ ID NO: 42059 - DNA, 50 bp, synthetic construct
  source 1..50: mol_type = other DNA
aaacacaataacaaaaacaaaacttaaacttttctttaaacctcaaacca

SEQ ID NO: 42060 - DNA, 50 bp, synthetic construct
  source 1..50: mol_type = other DNA
gaacgcgataacgaaaacgaaacttaaacttttctttaaacctcgaaccg

SEQ ID NO: 42061 - DNA, 50 bp, synthetic construct
  source 1..50: mol_type = other DNA
acacaataacaaaaacaaaacttaaacttttctttaaacctcaaaccaca

SEQ ID NO: 42062 - DNA, 50 bp, synthetic construct
  source 1..50: mol_type = other DNA
acgcgataacgaaaacgaaacttaaacttttctttaaacctcgaaccgcg

SEQ ID NO: 42063 - DNA, 50 bp, synthetic construct
  source 1..50: mol_type = other DNA
ataacaaaaacaaaacttaaacttttctttaaacctcaaaccacaactca

SEQ ID NO: 42064 - DNA, 50 bp, synthetic construct
  source 1..50: mol_type = other DNA
ataacgaaaacgaaacttaaacttttctttaaacctcgaaccgcgactcg

SEQ ID NO: 42065 - DNA, 50 bp, synthetic construct
  source 1..50: mol_type = other DNA
taaaattaaacctctatctaattataaatcactttaaaatttacaaaaca

SEQ ID NO: 42066 - DNA, 50 bp, synthetic construct
  source 1..50: mol_type = other DNA
taaaattaaacctctatctaattataaatcgctttaaaatttacgaaacg

SEQ ID NO: 42067 - DNA, 50 bp, synthetic construct
  source 1..50: mol_type = other DNA
catctctcctcaaaattaaaaacttcaaaaccaaaataacaacaaaaaca

SEQ ID NO: 42068 - DNA, 50 bp, synthetic construct
  source 1..50: mol_type = other DNA
cgtctctcctcaaaattaaaaacttcgaaaccaaaataacgacgaaaacg

SEQ ID NO: 42069 - DNA, 50 bp, synthetic construct
  source 1..50: mol_type = other DNA
tcttaaccccaaaatctccaaccctaaaaaaaaacaatctaaaaaaacca

SEQ ID NO: 42070 - DNA, 50 bp, synthetic construct
  source 1..50: mol_type = other DNA
tcttaaccccgaaatctccaaccctaaaaaaaaacgatctaaaaaaaccg

SEQ ID NO: 42071 - DNA, 50 bp, synthetic construct
  source 1..50: mol_type = other DNA
tacattcattcaaccaatcaaataaaaaaacctacaactaccaatccaca

SEQ ID NO: 42072 - DNA, 50 bp, synthetic construct
  source 1..50: mol_type = other DNA
tacgttcgttcgaccaatcaaataaaaaaacctacaactaccaatccgcg

SEQ ID NO: 42073 - DNA, 50 bp, synthetic construct
  source 1..50: mol_type = other DNA
actacattcattcaaccaatcaaataaaaaaacctacaactaccaatcca

SEQ ID NO: 42074 - DNA, 50 bp, synthetic construct
  source 1..50: mol_type = other DNA
gctacgttcgttcgaccaatcaaataaaaaaacctacaactaccaatccg

SEQ ID NO: 42075 - DNA, 50 bp, synthetic construct
  source 1..50: mol_type = other DNA
tacacctcataaacaaaattatactctacaactacaaaaatccaacttca

SEQ ID NO: 42076 - DNA, 50 bp, synthetic construct
  source 1..50: mol_type = other DNA
tacacctcgtaaacgaaattatactctacgactacgaaaatccaacttcg

SEQ ID NO: 42077 - DNA, 50 bp, synthetic construct
  source 1..50: mol_type = other DNA
caacaactaaatataaataaaccaatatcccaaaaaaaacaaataacaca

SEQ ID NO: 42078 - DNA, 50 bp, synthetic construct
  source 1..50: mol_type = other DNA
cgacgactaaatataaataaaccaatatcccaaaaaaaacaaataacacg

SEQ ID NO: 42079 - DNA, 50 bp, synthetic construct
  source 1..50: mol_type = other DNA
aaaccaatatcccaaaaaaaacaaataacacatcttcaaataaatataca

SEQ ID NO: 42080 - DNA, 50 bp, synthetic construct
  source 1..50: mol_type = other DNA
aaaccaatatcccaaaaaaaacaaataacacgtcttcgaataaatatacg

SEQ ID NO: 42081 - DNA, 50 bp, synthetic construct
  source 1..50: mol_type = other DNA
aaataaatatacaactatactaaaacccaaattaccaactcttacccaca

SEQ ID NO: 42082 - DNA, 50 bp, synthetic construct
  source 1..50: mol_type = other DNA
gaataaatatacgactatactaaaacccgaattaccaactcttacccgcg

SEQ ID NO: 42083 - DNA, 50 bp, synthetic construct
  source 1..50: mol_type = other DNA
aaacccaaattaccaactcttacccacacaaaataaactttaaaaaatca

SEQ ID NO: 42084 - DNA, 50 bp, synthetic construct
  source 1..50: mol_type = other DNA
aaacccgaattaccaactcttacccgcgcgaaataaactttaaaaaatcg

SEQ ID NO: 42085 - DNA, 50 bp, synthetic construct
  source 1..50: mol_type = other DNA
ataaaacacctcacccaccaatactataaaaataatatcaaaatccctca

SEQ ID NO: 42086 - DNA, 50 bp, synthetic construct
  source 1..50: mol_type = other DNA
ataaaacacctcgcccgccgatactataaaaataatatcaaaatccctcg

SEQ ID NO: 42087 - DNA, 50 bp, synthetic construct
  source 1..50: mol_type = other DNA
atctaactccaaaaacaaaaaactacacctaaaataaaacacctcaccca

SEQ ID NO: 42088 - DNA, 50 bp, synthetic construct
  source 1..50: mol_type = other DNA
atctaactccaaaaacaaaaaactacgcctaaaataaaacacctcgcccg

SEQ ID NO: 42089 - DNA, 50 bp, synthetic construct
  source 1..50: mol_type = other DNA
aaccacaaattttaaataataaatcccttaccccaaaacaccatatccca

SEQ ID NO: 42090 - DNA, 50 bp, synthetic construct
  source 1..50: mol_type = other DNA
aaccgcgaattttaaataataaatcccttaccccaaaacaccgtatcccg

SEQ ID NO: 42091 - DNA, 50 bp, synthetic construct
  source 1..50: mol_type = other DNA
aaacaaaacacaatatcctaaaacaaaaaacttattacctaaaattcaca

SEQ ID NO: 42092 - DNA, 50 bp, synthetic construct
  source 1..50: mol_type = other DNA
aaacgaaacacgatatcctaaaacaaaaaacttattacctaaaattcgcg

SEQ ID NO: 42093 - DNA, 50 bp, synthetic construct
  source 1..50: mol_type = other DNA
caaaaaattaaaaaacaactactacttattacaaaccttacccaaaaaca

SEQ ID NO: 42094 - DNA, 50 bp, synthetic construct
  source 1..50: mol_type = other DNA
cgaaaaattaaaaaacaactactacttattacgaaccttacccgaaaacg

SEQ ID NO: 42095 - DNA, 50 bp, synthetic construct
  source 1..50: mol_type = other DNA
aatttacaaaaaattaaaaaacaactactacttattacaaaccttaccca

SEQ ID NO: 42096 - DNA, 50 bp, synthetic construct
  source 1..50: mol_type = other DNA
aatttacgaaaaattaaaaaacaactactacttattacgaaccttacccg

SEQ ID NO: 42097 - DNA, 50 bp, synthetic construct
  source 1..50: mol_type = other DNA
atctcaccatttactactatataataaaccccactcccaaataaaaccca

SEQ ID NO: 42098 - DNA, 50 bp, synthetic construct
  source 1..50: mol_type = other DNA
atctcaccatttactactatataataaaccccgctcccgaataaaacccg

SEQ ID NO: 42099 - DNA, 50 bp, synthetic construct
  source 1..50: mol_type = other DNA
tcaaaaaaataactacaaatacctccataatcccaataactataacaaca

SEQ ID NO: 42100 - DNA, 50 bp, synthetic construct
  source 1..50: mol_type = other DNA
tcgaaaaaataactacgaatacctccataatcccgataactataacgacg

SEQ ID NO: 42101 - DNA, 50 bp, synthetic construct
  source 1..50: mol_type = other DNA
ctaaaataacccaaatcaaaaaaataactacaaatacctccataatccca

SEQ ID NO: 42102 - DNA, 50 bp, synthetic construct
  source 1..50: mol_type = other DNA
ctaaaataacccgaatcgaaaaaataactacgaatacctccataatcccg

SEQ ID NO: 42103 - DNA, 50 bp, synthetic construct
  source 1..50: mol_type = other DNA
attatcaccaataattaactaaaataacccaaatcaaaaaaataactaca

SEQ ID NO: 42104 - DNA, 50 bp, synthetic construct
  source 1..50: mol_type = other DNA
attatcgccgataattaactaaaataacccgaatcgaaaaaataactacg

SEQ ID NO: 42105 - DNA, 50 bp, synthetic construct
  source 1..50: mol_type = other DNA
tcaaccctaaaactacaccctttctatttttcatccaatcacatcaccca

SEQ ID NO: 42106 - DNA, 50 bp, synthetic construct
  source 1..50: mol_type = other DNA
tcgaccctaaaactacaccctttctatttttcatccaatcacatcacccg

SEQ ID NO: 42107 - DNA, 50 bp, synthetic construct
  source 1..50: mol_type = other DNA
taaataaattacctaaccaaaatcacacaatcactaaaataaaaaaacca

SEQ ID NO: 42108 - DNA, 50 bp, synthetic construct
  source 1..50: mol_type = other DNA
taaataaattacctaaccaaaatcacgcaatcgctaaaataaaaaaaccg

SEQ ID NO: 42109 - DNA, 50 bp, synthetic construct
  source 1..50: mol_type = other DNA
taaggttatgtaattgttaaagtgggagagttggaatttatatttaagtt

SEQ ID NO: 42110 - DNA, 50 bp, synthetic construct
  source 1..50: mol_type = other DNA
taaggttacgtaatcgttaaagtgggagagtcggaatttatatttaagtc

SEQ ID NO: 42111 - DNA, 50 bp, synthetic construct
  source 1..50: mol_type = other DNA
aataaagatttaggagttgagtagtgtgtgagttatagtaattgtgtatt

SEQ ID NO: 42112 - DNA, 50 bp, synthetic construct
  source 1..50: mol_type = other DNA
aataaagatttaggagttgagtagtgtgtgagttatagtaattgtgtatc

SEQ ID NO: 42113 - DNA, 50 bp, synthetic construct
  source 1..50: mol_type = other DNA
accactaataatcaactaatacatatcaaatttttataaaattcaaccca

SEQ ID NO: 42114 - DNA, 50 bp, synthetic construct
  source 1..50: mol_type = other DNA
accgctaataatcgactaatacgtatcgaatttttataaaattcgacccg

SEQ ID NO: 42115 - DNA, 50 bp, synthetic construct
  source 1..50: mol_type = other DNA
cactaataatcaactaatacatatcaaatttttataaaattcaacccaca

SEQ ID NO: 42116 - DNA, 50 bp, synthetic construct
  source 1..50: mol_type = other DNA
cgctaataatcgactaatacgtatcgaatttttataaaattcgacccgcg

SEQ ID NO: 42117 - DNA, 50 bp, synthetic construct
  source 1..50: mol_type = other DNA
tcaactaatacatatcaaatttttataaaattcaacccacacaaaataca

SEQ ID NO: 42118 - DNA, 50 bp, synthetic construct
  source 1..50: mol_type = other DNA
tcgactaatacgtatcgaatttttataaaattcgacccgcgcaaaatacg

SEQ ID NO: 42119 - DNA, 50 bp, synthetic construct
  source 1..50: mol_type = other DNA
aacaacaaaatcaatacaaaaaaaattaaaaaactcaaacaacacctcca

SEQ ID NO: 42120 - DNA, 50 bp, synthetic construct
  source 1..50: mol_type = other DNA
aacgacaaaatcgatacaaaaaaaattaaaaaactcgaacaacgcctccg

SEQ ID NO: 42121 - DNA, 50 bp, synthetic construct
  source 1..50: mol_type = other DNA
catatcaaatttttataaaattcaacccacacaaaatacacacaaaaaca

SEQ ID NO: 42122 - DNA, 50 bp, synthetic construct
  source 1..50: mol_type = other DNA
cgtatcgaatttttataaaattcgacccgcgcaaaatacgcgcgaaaacg

SEQ ID NO: 42123 - DNA, 50 bp, synthetic construct
  source 1..50: mol_type = other DNA
tgtataatatgggttagaatttggtttgtggttttgagaatatggttttt

SEQ ID NO: 42124 - DNA, 50 bp, synthetic construct
  source 1..50: mol_type = other DNA
tgtataatatgggttagaatttggtttgtggttttgagaatatggttttc

SEQ ID NO: 42125 - DNA, 50 bp, synthetic construct
  source 1..50: mol_type = other DNA
aaaatatatccctaataaacaactactaaataaaaaaatacataactaca

SEQ ID NO: 42126 - DNA, 50 bp, synthetic construct
  source 1..50: mol_type = other DNA
aaaatatatccctaataaacaactactaaataaaaaaatacgtaactacg

SEQ ID NO: 42127 - DNA, 50 bp, synthetic construct
  source 1..50: mol_type = other DNA
taaaaaaccaaaaaaaacacaccttaaataaatctcaataaccaccacca

SEQ ID NO: 42128 - DNA, 50 bp, synthetic construct
  source 1..50: mol_type = other DNA
taaaaaaccgaaaaaaacgcgccttaaataaatctcgataaccgccgccg

SEQ ID NO: 42129 - DNA, 50 bp, synthetic construct
  source 1..50: mol_type = other DNA
aaacactaaaaaaccaaaaaaaacacaccttaaataaatctcaataacca

SEQ ID NO: 42130 - DNA, 50 bp, synthetic construct
  source 1..50: mol_type = other DNA
aaacgctaaaaaaccgaaaaaaacgcgccttaaataaatctcgataaccg

SEQ ID NO: 42131 - DNA, 50 bp, synthetic construct
  source 1..50: mol_type = other DNA
aaaacacaaccactacaacttaaaaacactaaaaaaccaaaaaaaacaca

SEQ ID NO: 42132 - DNA, 50 bp, synthetic construct
  source 1..50: mol_type = other DNA
aaaacgcgaccgctacgacttaaaaacgctaaaaaaccgaaaaaaacgcg

SEQ ID NO: 42133 - DNA, 50 bp, synthetic construct
  source 1..50: mol_type = other DNA
aaattcaaaactaaaatcaaacaccacttacctactaataccaactacca

SEQ ID NO: 42134 - DNA, 50 bp, synthetic construct
  source 1..50: mol_type = other DNA
aaattcgaaactaaaatcgaacgccgcttacctactaataccgactaccg

SEQ ID NO: 42135 - DNA, 50 bp, synthetic construct
  source 1..50: mol_type = other DNA
caaccaacaaacaaaacaaaaccaaaaaccaaaattcaaaactaaaatca

SEQ ID NO: 42136 - DNA, 50 bp, synthetic construct
  source 1..50: mol_type = other DNA
cgaccaacgaacaaaacaaaaccaaaaaccgaaattcgaaactaaaatcg

SEQ ID NO: 42137 - DNA, 50 bp, synthetic construct
  source 1..50: mol_type = other DNA
acttccaaacatttaaaatacacccaacacacaccctacaaacttcatca

SEQ ID NO: 42138 - DNA, 50 bp, synthetic construct
  source 1..50: mol_type = other DNA
acttccaaacatttaaaatacacccgacacacgccctacaaacttcatcg

SEQ ID NO: 42139 - DNA, 50 bp, synthetic construct
  source 1..50: mol_type = other DNA
atttaatacattaaaaccccaaaaaaaaaaactacttatttcactccaca

SEQ ID NO: 42140 - DNA, 50 bp, synthetic construct
  source 1..50: mol_type = other DNA
atttaatacattaaaaccccaaaaaaaaaaactacttatttcactccgcg

SEQ ID NO: 42141 - DNA, 50 bp, synthetic construct
  source 1..50: mol_type = other DNA
attaaaaccacaaataacaacttatatttatcatatttcaaatactttca

SEQ ID NO: 42142 - DNA, 50 bp, synthetic construct
  source 1..50: mol_type = other DNA
attaaaaccgcaaataacgacttatatttatcatatttcaaatactttcg

SEQ ID NO: 42143 - DNA, 50 bp, synthetic construct
  source 1..50: mol_type = other DNA
aactaactttaaaatccaccaattatctccattcccatttccatctccca

SEQ ID NO: 42144 - DNA, 50 bp, synthetic construct
  source 1..50: mol_type = other DNA
aactaactttaaaatccaccaattatctccattcccatttccgtctcccg

SEQ ID NO: 42145 - DNA, 50 bp, synthetic construct
  source 1..50: mol_type = other DNA
ccttaccacactcccacccccaaatattcaaaaaataccttaaatatcca

SEQ ID NO: 42146 - DNA, 50 bp, synthetic construct
  source 1..50: mol_type = other DNA
ccttaccacgctcccacccccaaatattcaaaaaataccttaaatatccg

SEQ ID NO: 42147 - DNA, 50 bp, synthetic construct
  source 1..50: mol_type = other DNA
atccaataataaaaaacaacttcctaccaatctactaaaccaacccctca

SEQ ID NO: 42148 - DNA, 50 bp, synthetic construct
  source 1..50: mol_type = other DNA
atccaataataaaaaacgacttcctaccgatctactaaaccaacccctcg

SEQ ID NO: 42149 - DNA, 50 bp, synthetic construct
  source 1..50: mol_type = other DNA
ctactcacaactaaactccccattccccataactaaaattatataaccca

SEQ ID NO: 42150 - DNA, 50 bp, synthetic construct
  source 1..50: mol_type = other DNA
ctactcgcaactaaactccccattccccataactaaaattatataacccg

SEQ ID NO: 42151 - DNA, 50 bp, synthetic construct
  source 1..50: mol_type = other DNA
aatcccactatacaaataccaaattaataatccaaaacaaaccctaaaca

SEQ ID NO: 42152 - DNA, 50 bp, synthetic construct
  source 1..50: mol_type = other DNA
aatcccactatacgaataccgaattaataatccgaaacgaaccctaaacg

SEQ ID NO: 42153 - DNA, 50 bp, synthetic construct
  source 1..50: mol_type = other DNA
caataacacaaaaaaaccatctacctaaataccaaaaactacaacatcca

SEQ ID NO: 42154 - DNA, 50 bp, synthetic construct
  source 1..50: mol_type = other DNA
cgataacacgaaaaaaccatctacctaaataccgaaaactacaacgtccg

SEQ ID NO: 42155 - DNA, 50 bp, synthetic construct
  source 1..50: mol_type = other DNA
ataacacaaaaaaaccatctacctaaataccaaaaactacaacatccaca

SEQ ID NO: 42156 - DNA, 50 bp, synthetic construct
  source 1..50: mol_type = other DNA
ataacacgaaaaaaccatctacctaaataccgaaaactacaacgtccgcg

SEQ ID NO: 42157 - DNA, 50 bp, synthetic construct
  source 1..50: mol_type = other DNA
aaaaccatctacctaaataccaaaaactacaacatccacaatacaaaaca

SEQ ID NO: 42158 - DNA, 50 bp, synthetic construct
  source 1..50: mol_type = other DNA
aaaaccatctacctaaataccgaaaactacaacgtccgcgatacgaaacg

SEQ ID NO: 42159 - DNA, 50 bp, synthetic construct
  source 1..50: mol_type = other DNA
aaacaactactatctacataatcctaaacatcataaaaatccacacatca

SEQ ID NO: 42160 - DNA, 50 bp, synthetic construct
  source 1..50: mol_type = other DNA
aaacaactactatctacataatcctaaacgtcgtaaaaatccacacgtcg

SEQ ID NO: 42161 - DNA, 50 bp, synthetic construct
  source 1..50: mol_type = other DNA
atctacttatataacaccaaaaataacctactaaaaaaaaaccaaaaaca

SEQ ID NO: 42162 - DNA, 50 bp, synthetic construct
  source 1..50: mol_type = other DNA
atctacttatataacaccaaaaataacctactaaaaaaaaaccgaaaacg

SEQ ID NO: 42163 - DNA, 50 bp, synthetic construct
  source 1..50: mol_type = other DNA
caataaatacaacaaacaaaaaaacaattaaactaaaacacctaccccca

SEQ ID NO: 42164 - DNA, 50 bp, synthetic construct
  source 1..50: mol_type = other DNA
cgataaatacgacgaacaaaaaaacgattaaactaaaacacctacccccg

SEQ ID NO: 42165 - DNA, 50 bp, synthetic construct
  source 1..50: mol_type = other DNA
aaacctaaataaaccccatctaccaactaaccttcccaataaatacaaca

SEQ ID NO: 42166 - DNA, 50 bp, synthetic construct
  source 1..50: mol_type = other DNA
aaacctaaataaaccccatctaccaactaaccttcccgataaatacgacg

SEQ ID NO: 42167 - DNA, 50 bp, synthetic construct
  source 1..50: mol_type = other DNA
aacccatccaaacctaacaatactaaacaaccaataaataacttcactca

SEQ ID NO: 42168 - DNA, 50 bp, synthetic construct
  source 1..50: mol_type = other DNA
aacccatccaaacctaacgatactaaacaaccaataaataacttcgctcg

SEQ ID NO: 42169 - DNA, 50 bp, synthetic construct
  source 1..50: mol_type = other DNA
aaacaaccaataaataacttcactcaataataataaacaaaaaaacacca

SEQ ID NO: 42170 - DNA, 50 bp, synthetic construct
  source 1..50: mol_type = other DNA
aaacaaccaataaataacttcgctcgataataataaacaaaaaaacaccg

SEQ ID NO: 42171 - DNA, 50 bp, synthetic construct
  source 1..50: mol_type = other DNA
actaaattaaaactccaatctcttcaaaaacataaattcaaatcccacca

SEQ ID NO: 42172 - DNA, 50 bp, synthetic construct
  source 1..50: mol_type = other DNA
gctaaattaaaactccaatctcttcgaaaacgtaaattcgaatcccaccg

SEQ ID NO: 42173 - DNA, 50 bp, synthetic construct
  source 1..50: mol_type = other DNA
acaaaaaccaaaaaccaaatcctaaacacataaaaactacaaaaaaacca

SEQ ID NO: 42174 - DNA, 50 bp, synthetic construct
  source 1..50: mol_type = other DNA
gcgaaaaccgaaaaccgaatcctaaacgcgtaaaaactacaaaaaaaccg

SEQ ID NO: 42175 - DNA, 50 bp, synthetic construct
  source 1..50: mol_type = other DNA
caaatcctaaacacataaaaactacaaaaaaaccactaaaaacccaacca

SEQ ID NO: 42176 - DNA, 50 bp, synthetic construct
  source 1..50: mol_type = other DNA
cgaatcctaaacgcgtaaaaactacaaaaaaaccgctaaaaacccgaccg

SEQ ID NO: 42177 - DNA, 50 bp, synthetic construct
  source 1..50: mol_type = other DNA
atgtatggatgaatgtgtaaaattttttaagtttttggttgttttttttt

SEQ ID NO: 42178 - DNA, 50 bp, synthetic construct
  source 1..50: mol_type = other DNA
acgtacggacgaacgcgtaaaattttttaagtttttggtcgttttttttc

SEQ ID NO: 42179 - DNA, 50 bp, synthetic construct
  source 1..50: mol_type = other DNA
aaaaactacaaaaaaaccactaaaaacccaaccaaacccaaaaaaaaaca

SEQ ID NO: 42180 - DNA, 50 bp, synthetic construct
  source 1..50: mol_type = other DNA
aaaaactacaaaaaaaccgctaaaaacccgaccgaacccgaaaaaaaacg

SEQ ID NO: 42181 - DNA, 50 bp, synthetic construct
  source 1..50: mol_type = other DNA
aacccaaccaaacccaaaaaaaaacaaccaaaaacttaaaaaattttaca

SEQ ID NO: 42182 - DNA, 50 bp, synthetic construct
  source 1..50: mol_type = other DNA
aacccgaccgaacccgaaaaaaaacgaccaaaaacttaaaaaattttacg

SEQ ID NO: 42183 - DNA, 50 bp, synthetic construct
  source 1..50: mol_type = other DNA
cccaaccaaacccaaaaaaaaacaaccaaaaacttaaaaaattttacaca

SEQ ID NO: 42184 - DNA, 50 bp, synthetic construct
  source 1..50: mol_type = other DNA
cccgaccgaacccgaaaaaaaacgaccaaaaacttaaaaaattttacgcg

SEQ ID NO: 42185 - DNA, 50 bp, synthetic construct
  source 1..50: mol_type = other DNA
accaaacccaaaaaaaaacaaccaaaaacttaaaaaattttacacattca

SEQ ID NO: 42186 - DNA, 50 bp, synthetic construct
  source 1..50: mol_type = other DNA
accgaacccgaaaaaaaacgaccaaaaacttaaaaaattttacgcgttcg

SEQ ID NO: 42187 - DNA, 50 bp, synthetic construct
  source 1..50: mol_type = other DNA
aacccaaaaaaaaacaaccaaaaacttaaaaaattttacacattcatcca

SEQ ID NO: 42188 - DNA, 50 bp, synthetic construct
  source 1..50: mol_type = other DNA
aacccgaaaaaaaacgaccaaaaacttaaaaaattttacgcgttcgtccg

SEQ ID NO: 42189 - DNA, 50 bp, synthetic construct
  source 1..50: mol_type = other DNA
caaaaaaaaacaaccaaaaacttaaaaaattttacacattcatccataca

SEQ ID NO: 42190 - DNA, 50 bp, synthetic construct
  source 1..50: mol_type = other DNA
cgaaaaaaaacgaccaaaaacttaaaaaattttacgcgttcgtccgtacg

SEQ ID NO: 42191 - DNA, 50 bp, synthetic construct
  source 1..50: mol_type = other DNA
aaaacaaccaaaaacttaaaaaattttacacattcatccatacattctca

SEQ ID NO: 42192 - DNA, 50 bp, synthetic construct
  source 1..50: mol_type = other DNA
aaaacgaccaaaaacttaaaaaattttacgcgttcgtccgtacgttctcg

SEQ ID NO: 42193 - DNA, 50 bp, synthetic construct
  source 1..50: mol_type = other DNA
caaaaacttaaaaaattttacacattcatccatacattctcatttccaca

SEQ ID NO: 42194 - DNA, 50 bp, synthetic construct
  source 1..50: mol_type = other DNA
caaaaacttaaaaaattttacgcgttcgtccgtacgttctcgtttccacg

SEQ ID NO: 42195 - DNA, 50 bp, synthetic construct
  source 1..50: mol_type = other DNA
aaaaaaatttccaaaccctcaaaaacaaaaaaaactcatcacaactcaca

SEQ ID NO: 42196 - DNA, 50 bp, synthetic construct
  source 1..50: mol_type = other DNA
aaaaaaatttccaaaccctcaaaaacaaaaaaaactcatcacaactcacg

SEQ ID NO: 42197 - DNA, 50 bp, synthetic construct
  source 1..50: mol_type = other DNA
actacaaaacatcaacaaaaaactatacacaccactacaacatataaaca

SEQ ID NO: 42198 - DNA, 50 bp, synthetic construct
  source 1..50: mol_type = other DNA
actacgaaacatcaacgaaaaactatacgcgccgctacaacatataaacg

SEQ ID NO: 42199 - DNA, 50 bp, synthetic construct
  source 1..50: mol_type = other DNA
ctaaattattccactcctacaatataacacaaaaaccaacaaaaaacaca

SEQ ID NO: 42200 - DNA, 50 bp, synthetic construct
  source 1..50: mol_type = other DNA
ctaaattattccgctcctacaatataacacgaaaaccaacaaaaaacgcg

SEQ ID NO: 42201 - DNA, 50 bp, synthetic construct
  source 1..50: mol_type = other DNA
tattccactcctacaatataacacaaaaaccaacaaaaaacacaataaca

SEQ ID NO: 42202 - DNA, 50 bp, synthetic construct
  source 1..50: mol_type = other DNA
tattccgctcctacaatataacacgaaaaccaacaaaaaacgcgataacg

SEQ ID NO: 42203 - DNA, 50 bp, synthetic construct
  source 1..50: mol_type = other DNA
atataacacaaaaaccaacaaaaaacacaataacaaaacttcccaaaaca

SEQ ID NO: 42204 - DNA, 50 bp, synthetic construct
  source 1..50: mol_type = other DNA
atataacacgaaaaccaacaaaaaacgcgataacgaaacttcccgaaacg

SEQ ID NO: 42205 - DNA, 50 bp, synthetic construct
  source 1..50: mol_type = other DNA
aataaaaaaccataacaaaaacaacacctatattcacacaaacatctcca

SEQ ID NO: 42206 - DNA, 50 bp, synthetic construct
  source 1..50: mol_type = other DNA
aataaaaaaccgtaacaaaaacaacgcctatattcacacgaacgtctccg

SEQ ID NO: 42207 - DNA, 50 bp, synthetic construct
  source 1..50: mol_type = other DNA
aaaacaaataaaaaaccataacaaaaacaacacctatattcacacaaaca

SEQ ID NO: 42208 - DNA, 50 bp, synthetic construct
  source 1..50: mol_type = other DNA
aaaacgaataaaaaaccgtaacaaaaacaacgcctatattcacacgaacg

SEQ ID NO: 42209 - DNA, 50 bp, synthetic construct
  source 1..50: mol_type = other DNA
caacaaaacaaataaaaaaccataacaaaaacaacacctatattcacaca

SEQ ID NO: 42210 - DNA, 50 bp, synthetic construct
  source 1..50: mol_type = other DNA
caacaaaacgaataaaaaaccgtaacaaaaacaacgcctatattcacacg

SEQ ID NO: 42211 - DNA, 50 bp, synthetic construct
  source 1..50: mol_type = other DNA
atacacaaataatattcacaaaacaccacaacaaaataacatcaaaaaca

SEQ ID NO: 42212 - DNA, 50 bp, synthetic construct
  source 1..50: mol_type = other DNA
atacgcaaataatattcacgaaacgccacaacgaaataacatcaaaaacg

SEQ ID NO: 42213 - DNA, 50 bp, synthetic construct
  source 1..50: mol_type = other DNA
acaacttacactacacccacattacttctacatatttacaattaaacaca

SEQ ID NO: 42214 - DNA, 50 bp, synthetic construct
  source 1..50: mol_type = other DNA
acaacttacgctacgcccacattacttctacgtatttacaattaaacacg

SEQ ID NO: 42215 - DNA, 50 bp, synthetic construct
  source 1..50: mol_type = other DNA
aactcccacatatctccactcaacaaaatacttaaacaaataaaaatcca

SEQ ID NO: 42216 - DNA, 50 bp, synthetic construct
  source 1..50: mol_type = other DNA
aactcccgcgtatctccgctcgacaaaatacttaaacaaataaaaatccg

SEQ ID NO: 42217 - DNA, 50 bp, synthetic construct
  source 1..50: mol_type = other DNA
aatacaaatacaaacaaccccacataacaaataactaccatacctaaaca

SEQ ID NO: 42218 - DNA, 50 bp, synthetic construct
  source 1..50: mol_type = other DNA
aatacaaatacgaacgaccccacgtaacgaataactaccatacctaaacg

SEQ ID NO: 42219 - DNA, 50 bp, synthetic construct
  source 1..50: mol_type = other DNA
aaatttatttcccctttattaactcaaccatcaacctaccaaacctaaca

SEQ ID NO: 42220 - DNA, 50 bp, synthetic construct
  source 1..50: mol_type = other DNA
aaatttatttcccctttattaactcgaccatcgacctaccgaacctaacg

SEQ ID NO: 42221 - DNA, 50 bp, synthetic construct
  source 1..50: mol_type = other DNA
aaaactaaaaataaaccaaactaacaaaacaaaaacatcaaaaaacaaca

SEQ ID NO: 42222 - DNA, 50 bp, synthetic construct
  source 1..50: mol_type = other DNA
aaaactaaaaataaaccgaactaacgaaacgaaaacgtcgaaaaacgacg

SEQ ID NO: 42223 - DNA, 50 bp, synthetic construct
  source 1..50: mol_type = other DNA
taaaaataacacataataaaaaacaatacaaaaaacaaactctacacaca

SEQ ID NO: 42224 - DNA, 50 bp, synthetic construct
  source 1..50: mol_type = other DNA
taaaaataacacgtaataaaaaacaatacaaaaaacaaactctacacacg

SEQ ID NO: 42225 - DNA, 50 bp, synthetic construct
  source 1..50: mol_type = other DNA
aaacaacaacaaacacacaaccatctaaatctccctaaaaataataatca

SEQ ID NO: 42226 - DNA, 50 bp, synthetic construct
  source 1..50: mol_type = other DNA
aaacaacaacaaacgcacgaccgtctaaatctccctaaaaataataatcg

SEQ ID NO: 42227 - DNA, 50 bp, synthetic construct
  source 1..50: mol_type = other DNA
ttaaattaatacaaaaataatcacaatttttaccattattttaacacaca

SEQ ID NO: 42228 - DNA, 50 bp, synthetic construct
  source 1..50: mol_type = other DNA
ttaaattaatacaaaaataatcgcgatttttaccattattttaacgcgcg

SEQ ID NO: 42229 - DNA, 50 bp, synthetic construct
  source 1..50: mol_type = other DNA
gtattaggttggtgtaaaagtaattgtggtttttgttattattttaatgt

SEQ ID NO: 42230 - DNA, 50 bp, synthetic construct
  source 1..50: mol_type = other DNA
gtattaggttggtgtaaaagtaatcgcggtttttgttattattttaacgc

SEQ ID NO: 42231 - DNA, 50 bp, synthetic construct
  source 1..50: mol_type = other DNA
acactaaatttcaatacaaactatattaaattaatacaaaaataatcaca

SEQ ID NO: 42232 - DNA, 50 bp, synthetic construct
  source 1..50: mol_type = other DNA
acactaaatttcaatacaaactatattaaattaatacaaaaataatcgcg

SEQ ID NO: 42233 - DNA, 50 bp, synthetic construct
  source 1..50: mol_type = other DNA
cattcacaacaacaaaaaacttaacaaactactaaacaaaatcaccatca

SEQ ID NO: 42234 - DNA, 50 bp, synthetic construct
  source 1..50: mol_type = other DNA
cattcgcaacgacgaaaaacttaacaaactactaaacgaaatcaccatcg

SEQ ID NO: 42235 - DNA, 50 bp, synthetic construct
  source 1..50: mol_type = other DNA
cctataactaaccattcacaacaacaaaaaacttaacaaactactaaaca

SEQ ID NO: 42236 - DNA, 50 bp, synthetic construct
  source 1..50: mol_type = other DNA
cctataactaaccattcgcaacgacgaaaaacttaacaaactactaaacg

SEQ ID NO: 42237 - DNA, 50 bp, synthetic construct
  source 1..50: mol_type = other DNA
aactcctcaccattacaaataaccaactacaaataacacaaaataataca

SEQ ID NO: 42238 - DNA, 50 bp, synthetic construct
  source 1..50: mol_type = other DNA
aactcctcgccgttacgaataaccaactacaaataacgcaaaataatacg

SEQ ID NO: 42239 - DNA, 50 bp, synthetic construct
  source 1..50: mol_type = other DNA
caaataaccaactacaaataacacaaaataatacaaatcttcttatcaca

SEQ ID NO: 42240 - DNA, 50 bp, synthetic construct
  source 1..50: mol_type = other DNA
cgaataaccaactacaaataacgcaaaataatacgaatcttcttatcgcg

SEQ ID NO: 42241 - DNA, 50 bp, synthetic construct
  source 1..50: mol_type = other DNA
aaccaactacaaataacacaaaataatacaaatcttcttatcacaaacca

SEQ ID NO: 42242 - DNA, 50 bp, synthetic construct
  source 1..50: mol_type = other DNA
aaccaactacaaataacgcaaaataatacgaatcttcttatcgcgaaccg

SEQ ID NO: 42243 - DNA, 50 bp, synthetic construct
  source 1..50: mol_type = other DNA
aaaacatctataccaaacatatcaaaaccaaaacacaaatatacctaaca

SEQ ID NO: 42244 - DNA, 50 bp, synthetic construct
  source 1..50: mol_type = other DNA
aaaacatctataccgaacgtatcgaaaccaaaacgcaaatatacctaacg

SEQ ID NO: 42245 - DNA, 50 bp, synthetic construct
  source 1..50: mol_type = other DNA
aaactaacactaaaatcccaaacttaatcttccctaaccaaactccaaca

SEQ ID NO: 42246 - DNA, 50 bp, synthetic construct
  source 1..50: mol_type = other DNA
aaactaacgctaaaatcccaaacttaatcttccctaaccgaactccaacg

SEQ ID NO: 42247 - DNA, 50 bp, synthetic construct
  source 1..50: mol_type = other DNA
ctaaaacccaaccaaaaaaaaccaaatctaaaacttcaacaccaacctca

SEQ ID NO: 42248 - DNA, 50 bp, synthetic construct
  source 1..50: mol_type = other DNA
ctaaaacccgaccaaaaaaaaccaaatctaaaacttcaacgccaacctcg

SEQ ID NO: 42249 - DNA, 50 bp, synthetic construct
  source 1..50: mol_type = other DNA
aaaaaaaaatattttcttcctacatttccccctcctttaccaaaaaaaca

SEQ ID NO: 42250 - DNA, 50 bp, synthetic construct
  source 1..50: mol_type = other DNA
aaaaaaaaatattttcttcctacgtttccccctcctttaccgaaaaaacg

SEQ ID NO: 42251 - DNA, 50 bp, synthetic construct
  source 1..50: mol_type = other DNA
taaaacacctctccataaaacacacccaccaacaccatatcaatttttca

SEQ ID NO: 42252 - DNA, 50 bp, synthetic construct
  source 1..50: mol_type = other DNA
taaaacacctctccataaaacacgcccaccaacgccatatcaatttttcg

SEQ ID NO: 42253 - DNA, 50 bp, synthetic construct
  source 1..50: mol_type = other DNA
acactttccaactacaaatccaaacaacaacccaaaatttaatccaacca

SEQ ID NO: 42254 - DNA, 50 bp, synthetic construct
  source 1..50: mol_type = other DNA
acgctttccaactacaaatccaaacgacaacccaaaatttaatccaaccg

SEQ ID NO: 42255 - DNA, 50 bp, synthetic construct
  source 1..50: mol_type = other DNA
aaccaaaaaacatttactactctactaaaccctaaatctaacaacaaaca

SEQ ID NO: 42256 - DNA, 50 bp, synthetic construct
  source 1..50: mol_type = other DNA
aaccgaaaaacatttactactctactaaaccctaaatctaacgacgaacg

SEQ ID NO: 42257 - DNA, 50 bp, synthetic construct
  source 1..50: mol_type = other DNA
caaactataaaaaacactaacaccctcacaaaccaaaaacaaaaccaaca

SEQ ID NO: 42258 - DNA, 50 bp, synthetic construct
  source 1..50: mol_type = other DNA
caaactataaaaaacgctaacgccctcacaaaccaaaaacaaaaccgacg

SEQ ID NO: 42259 - DNA, 50 bp, synthetic construct
  source 1..50: mol_type = other DNA
ctacaaactataaaaaacactaacaccctcacaaaccaaaaacaaaacca

SEQ ID NO: 42260 - DNA, 50 bp, synthetic construct
  source 1..50: mol_type = other DNA
ctacaaactataaaaaacgctaacgccctcacaaaccaaaaacaaaaccg

SEQ ID NO: 42261 - DNA, 50 bp, synthetic construct
  source 1..50: mol_type = other DNA
aacaaacctcacaaaaaaacacacaaaacaactacaaactataaaaaaca

SEQ ID NO: 42262 - DNA, 50 bp, synthetic construct
  source 1..50: mol_type = other DNA
aacaaacctcgcgaaaaaacgcgcaaaacgactacaaactataaaaaacg

SEQ ID NO: 42263 - DNA, 50 bp, synthetic construct
  source 1..50: mol_type = other DNA
aactctccaaaaaacacaacattcaaaccccaaatccaactataaaaaca

SEQ ID NO: 42264 - DNA, 50 bp, synthetic construct
  source 1..50: mol_type = other DNA
aactctccaaaaaacgcgacattcaaaccccaaatccaactataaaaacg

SEQ ID NO: 42265 - DNA, 50 bp, synthetic construct
  source 1..50: mol_type = other DNA
taaaatcaaattttaaaatcacctaaatttcaataaccaaaaatcccaca

SEQ ID NO: 42266 - DNA, 50 bp, synthetic construct
  source 1..50: mol_type = other DNA
taaaatcgaattttaaaatcacctaaatttcgataaccgaaaatcccgcg

SEQ ID NO: 42267 - DNA, 50 bp, synthetic construct
  source 1..50: mol_type = other DNA
caatacaattataactaattaacttaaaatcataaaacacaaaacttcca

SEQ ID NO: 42268 - DNA, 50 bp, synthetic construct
  source 1..50: mol_type = other DNA
caatacgattataactaattaacttaaaatcgtaaaacgcgaaacttccg

SEQ ID NO: 42269 - DNA, 50 bp, synthetic construct
  source 1..50: mol_type = other DNA
attataactaattaacttaaaatcataaaacacaaaacttccaactacca

SEQ ID NO: 42270 - DNA, 50 bp, synthetic construct
  source 1..50: mol_type = other DNA
attataactaattaacttaaaatcgtaaaacgcgaaacttccgactaccg

SEQ ID NO: 42271 - DNA, 50 bp, synthetic construct
  source 1..50: mol_type = other DNA
aacttccaactaccaaaacccaaataactttaaaactcaattttaactca

SEQ ID NO: 42272 - DNA, 50 bp, synthetic construct
  source 1..50: mol_type = other DNA
aacttccgactaccgaaacccaaataactttaaaactcgattttaactcg

SEQ ID NO: 42273 - DNA, 50 bp, synthetic construct
  source 1..50: mol_type = other DNA
tttccacaaaaaacaccttcttattaaacttaaaaaaacccaaaactcca

SEQ ID NO: 42274 - DNA, 50 bp, synthetic construct
  source 1..50: mol_type = other DNA
tttccacgaaaaacgccttcttattaaacttaaaaaaacccgaaactccg

SEQ ID NO: 42275 - DNA, 50 bp, synthetic construct
  source 1..50: mol_type = other DNA
aaaacataataatatatcattaacaactcttaaaaaaacactaacaacca

SEQ ID NO: 42276 - DNA, 50 bp, synthetic construct
  source 1..50: mol_type = other DNA
aaaacgtaataatatatcgttaacaactcttaaaaaaacgctaacgaccg

SEQ ID NO: 42277 - DNA, 50 bp, synthetic construct
  source 1..50: mol_type = other DNA
ctaaaaaacataataatatatcattaacaactcttaaaaaaacactaaca

SEQ ID NO: 42278 - DNA, 50 bp, synthetic construct
  source 1..50: mol_type = other DNA
ctaaaaaacgtaataatatatcgttaacaactcttaaaaaaacgctaacg

SEQ ID NO: 42279 - DNA, 50 bp, synthetic construct
  source 1..50: mol_type = other DNA
tagtagtttttaagaaaaaatttgttggtttttttgtgttagagttgatt

SEQ ID NO: 42280 - DNA, 50 bp, synthetic construct
  source 1..50: mol_type = other DNA
tagtagtttttaagaaaaaattcgttggttttttcgtgttagagttgatc

SEQ ID NO: 42281 - DNA, 50 bp, synthetic construct
  source 1..50: mol_type = other DNA
tacaaaaaaaaaaccccaacacaacctatttataaaataaaactacacca

SEQ ID NO: 42282 - DNA, 50 bp, synthetic construct
  source 1..50: mol_type = other DNA
tacgaaaaaaaaaccccaacgcaacctatttataaaataaaactacgccg

SEQ ID NO: 42283 - DNA, 50 bp, synthetic construct
  source 1..50: mol_type = other DNA
tataaaataaaactacaccataattaatacccatcaatacccacccctca

SEQ ID NO: 42284 - DNA, 50 bp, synthetic construct
  source 1..50: mol_type = other DNA
tataaaataaaactacgccgtaattaatacccgtcaatacccgcccctcg

SEQ ID NO: 42285 - DNA, 50 bp, synthetic construct
  source 1..50: mol_type = other DNA
cttctaaaactaaacaaaaccctcaacaacacacaaaaaacactaaaaca

SEQ ID NO: 42286 - DNA, 50 bp, synthetic construct
  source 1..50: mol_type = other DNA
cttctaaaactaaacgaaaccctcgacaacgcgcaaaaaacgctaaaacg

SEQ ID NO: 42287 - DNA, 50 bp, synthetic construct
  source 1..50: mol_type = other DNA
ataaaccctaaaaacccccaactaccttctaaaactaaacaaaaccctca

SEQ ID NO: 42288 - DNA, 50 bp, synthetic construct
  source 1..50: mol_type = other DNA
ataaaccctaaaaacccccaactaccttctaaaactaaacgaaaccctcg

SEQ ID NO: 42289 - DNA, 50 bp, synthetic construct
  source 1..50: mol_type = other DNA
ttacaaaccactatccaatttctcttaaaccaaatccacctcctactcca

SEQ ID NO: 42290 - DNA, 50 bp, synthetic construct
  source 1..50: mol_type = other DNA
ttacgaaccactatccaatttctcttaaaccaaatccacctcctactccg

SEQ ID NO: 42291 - DNA, 50 bp, synthetic construct
  source 1..50: mol_type = other DNA
accttaataaccaactatttacataacaccttaccaccaataaacttcca

SEQ ID NO: 42292 - DNA, 50 bp, synthetic construct
  source 1..50: mol_type = other DNA
accttaataaccaactatttacgtaacgccttaccaccaataaacttccg

SEQ ID NO: 42293 - DNA, 50 bp, synthetic construct
  source 1..50: mol_type = other DNA
aaccaaaacacttttacaaactaccttaataaccaactatttacataaca

SEQ ID NO: 42294 - DNA, 50 bp, synthetic construct
  source 1..50: mol_type = other DNA
aaccgaaacgcttttacgaactaccttaataaccaactatttacgtaacg

SEQ ID NO: 42295 - DNA, 50 bp, synthetic construct
  source 1..50: mol_type = other DNA
taaacaattcaataaacttctaataacaacaaatctcacacaaaaccaca

SEQ ID NO: 42296 - DNA, 50 bp, synthetic construct
  source 1..50: mol_type = other DNA
taaacaattcaataaacttctaataacgacgaatctcgcgcaaaaccacg

SEQ ID NO: 42297 - DNA, 50 bp, synthetic construct
  source 1..50: mol_type = other DNA
ataatttacaaataaacaattcaataaacttctaataacaacaaatctca

SEQ ID NO: 42298 - DNA, 50 bp, synthetic construct
  source 1..50: mol_type = other DNA
ataatttacgaataaacaattcaataaacttctaataacgacgaatctcg

SEQ ID NO: 42299 - DNA, 50 bp, synthetic construct
  source 1..50: mol_type = other DNA
cactaaaaaaataatttacaaataaacaattcaataaacttctaataaca

SEQ ID NO: 42300 - DNA, 50 bp, synthetic construct
  source 1..50: mol_type = other DNA
cgctaaaaaaataatttacgaataaacaattcaataaacttctaataacg

SEQ ID NO: 42301 - DNA, 50 bp, synthetic construct
  source 1..50: mol_type = other DNA
ttaaaatcctacacaatctcacacaccaaacactaaaaaaataatttaca

SEQ ID NO: 42302 - DNA, 50 bp, synthetic construct
  source 1..50: mol_type = other DNA
ttaaaatcctacgcaatctcgcgcaccaaacgctaaaaaaataatttacg

SEQ ID NO: 42303 - DNA, 50 bp, synthetic construct
  source 1..50: mol_type = other DNA
acacaaaattacacaaaactttaaaacaaacctacatttccaaaactcca

SEQ ID NO: 42304 - DNA, 50 bp, synthetic construct
  source 1..50: mol_type = other DNA
acgcgaaattacgcaaaactttaaaacaaacctacgtttccaaaactccg

SEQ ID NO: 42305 - DNA, 50 bp, synthetic construct
  source 1..50: mol_type = other DNA
tcattttaatactactaaaaacttcaaaaccaatcaatttcaaccaatca

SEQ ID NO: 42306 - DNA, 50 bp, synthetic construct
  source 1..50: mol_type = other DNA
tcgttttaatactactaaaaacttcaaaaccaatcgatttcgaccgatcg

SEQ ID NO: 42307 - DNA, 50 bp, synthetic construct
  source 1..50: mol_type = other DNA
attttaatactactaaaaacttcaaaaccaatcaatttcaaccaatcaca

SEQ ID NO: 42308 - DNA, 50 bp, synthetic construct
  source 1..50: mol_type = other DNA
gttttaatactactaaaaacttcaaaaccaatcgatttcgaccgatcgcg

SEQ ID NO: 42309 - DNA, 50 bp, synthetic construct
  source 1..50: mol_type = other DNA
tcaaccatattaaccaaactaatcccaaactcctaatttctaataatcca

SEQ ID NO: 42310 - DNA, 50 bp, synthetic construct
  source 1..50: mol_type = other DNA
tcgaccatattaaccaaactaatcccgaactcctaatttctaataatccg

SEQ ID NO: 42311 - DNA, 50 bp, synthetic construct
  source 1..50: mol_type = other DNA
tatatttttcataaaaacaaaattcaaccatattaaccaaactaatccca

SEQ ID NO: 42312 - DNA, 50 bp, synthetic construct
  source 1..50: mol_type = other DNA
tatatttttcgtaaaaacgaaattcgaccatattaaccaaactaatcccg

SEQ ID NO: 42313 - DNA, 50 bp, synthetic construct
  source 1..50: mol_type = other DNA
acaaattaccaaaaatcaaaaattcaaaatcaacctaaccaacataacca

SEQ ID NO: 42314 - DNA, 50 bp, synthetic construct
  source 1..50: mol_type = other DNA
acgaattaccaaaaatcaaaaattcgaaatcaacctaaccaacataaccg

SEQ ID NO: 42315 - DNA, 50 bp, synthetic construct
  source 1..50: mol_type = other DNA
accaaaaatcaaaaattcaaaatcaacctaaccaacataaccaaatccca

SEQ ID NO: 42316 - DNA, 50 bp, synthetic construct
  source 1..50: mol_type = other DNA
accaaaaatcaaaaattcgaaatcaacctaaccaacataaccgaatcccg

SEQ ID NO: 42317 - DNA, 50 bp, synthetic construct
  source 1..50: mol_type = other DNA
taaatcaaaataactctaatatactccaatctaaacaacaaaaaaattca

SEQ ID NO: 42318 - DNA, 50 bp, synthetic construct
  source 1..50: mol_type = other DNA
taaatcgaaataactctaatatactccaatctaaacgacaaaaaaattcg

SEQ ID NO: 42319 - DNA, 50 bp, synthetic construct
  source 1..50: mol_type = other DNA
aaaatattacataacaacatccaaaacatcaccaaaccaaccatccaaca

SEQ ID NO: 42320 - DNA, 50 bp, synthetic construct
  source 1..50: mol_type = other DNA
aaaatattacgtaacaacatccaaaacatcaccaaaccgaccatccgacg

SEQ ID NO: 42321 - DNA, 50 bp, synthetic construct
  source 1..50: mol_type = other DNA
aatatttttaaaaaacataatccataacactatcacctatacaaaacaca

SEQ ID NO: 42322 - DNA, 50 bp, synthetic construct
  source 1..50: mol_type = other DNA
aatatttttaaaaaacgtaatccgtaacgctatcacctatacgaaacacg

SEQ ID NO: 42323 - DNA, 50 bp, synthetic construct
  source 1..50: mol_type = other DNA
ttaaaaaacataatccataacactatcacctatacaaaacacaccaaaca

SEQ ID NO: 42324 - DNA, 50 bp, synthetic construct
  source 1..50: mol_type = other DNA
ttaaaaaacgtaatccgtaacgctatcacctatacgaaacacgccaaacg

SEQ ID NO: 42325 - DNA, 50 bp, synthetic construct
  source 1..50: mol_type = other DNA
tatcacctatacaaaacacaccaaacacaaaacaatcactaccataaaca

SEQ ID NO: 42326 - DNA, 50 bp, synthetic construct
  source 1..50: mol_type = other DNA
tatcacctatacgaaacacgccaaacgcaaaacaatcactaccataaacg

SEQ ID NO: 42327 - DNA, 50 bp, synthetic construct
  source 1..50: mol_type = other DNA
tacaaaacacaccaaacacaaaacaatcactaccataaacataatctaca

SEQ ID NO: 42328 - DNA, 50 bp, synthetic construct
  source 1..50: mol_type = other DNA
tacgaaacacgccaaacgcaaaacaatcactaccataaacgtaatctacg

SEQ ID NO: 42329 - DNA, 50 bp, synthetic construct
  source 1..50: mol_type = other DNA
acaaccttaaccaccaaaaccataaaaaatacatccctaacacttaaaca

SEQ ID NO: 42330 - DNA, 50 bp, synthetic construct
  source 1..50: mol_type = other DNA
acaaccttaaccgccaaaaccataaaaaatacgtccctaacgcttaaacg

SEQ ID NO: 42331 - DNA, 50 bp, synthetic construct
  source 1..50: mol_type = other DNA
caaaacacaccaaacacaaaactatcactaccataaatataatttacaca

SEQ ID NO: 42332 - DNA, 50 bp, synthetic construct
  source 1..50: mol_type = other DNA
cgaaacacgccaaacgcaaaactatcactaccataaatataatttacgcg

SEQ ID NO: 42333 - DNA, 50 bp, synthetic construct
  source 1..50: mol_type = other DNA
ccttaacacttaaacacataaaccacatccataacaataacaatcttaca

SEQ ID NO: 42334 - DNA, 50 bp, synthetic construct
  source 1..50: mol_type = other DNA
ccttaacgcttaaacgcgtaaaccacatccataacaataacaatcttacg

SEQ ID NO: 42335 - DNA, 50 bp, synthetic construct
  source 1..50: mol_type = other DNA
acttaaacacataaaccacatccataacaataacaatcttacacttaaca

SEQ ID NO: 42336 - DNA, 50 bp, synthetic construct
  source 1..50: mol_type = other DNA
gcttaaacgcgtaaaccacatccataacaataacaatcttacgcttaacg

SEQ ID NO: 42337 - DNA, 50 bp, synthetic construct
  source 1..50: mol_type = other DNA
catccataacaataacaatcttacacttaacatactccatataaatcaca

SEQ ID NO: 42338 - DNA, 50 bp, synthetic construct
  source 1..50: mol_type = other DNA
catccataacaataacaatcttacgcttaacgtactccgtataaatcacg

SEQ ID NO: 42339 - DNA, 50 bp, synthetic construct
  source 1..50: mol_type = other DNA
tataaatcacaacatcccaaatcacattctccaaaaacaccttaaaaaca

SEQ ID NO: 42340 - DNA, 50 bp, synthetic construct
  source 1..50: mol_type = other DNA
tataaatcacgacgtcccgaatcacgttctccaaaaacaccttaaaaacg

SEQ ID NO: 42341 - DNA, 50 bp, synthetic construct
  source 1..50: mol_type = other DNA
aacaccttaaaaacaccacaaatctcctcataaatcaaaccaaaaattca

SEQ ID NO: 42342 - DNA, 50 bp, synthetic construct
  source 1..50: mol_type = other DNA
aacaccttaaaaacgccacgaatctcctcataaatcaaaccgaaaattcg

SEQ ID NO: 42343 - DNA, 50 bp, synthetic construct
  source 1..50: mol_type = other DNA
aaaatactacaaaataacatccaaaacatcaccaaaccaaccattcaaca

SEQ ID NO: 42344 - DNA, 50 bp, synthetic construct
  source 1..50: mol_type = other DNA
aaaatactacgaaataacatccaaaacatcaccaaaccgaccattcgacg

SEQ ID NO: 42345 - DNA, 50 bp, synthetic construct
  source 1..50: mol_type = other DNA
caaaaaatactacaaaataacatccaaaacatcaccaaaccaaccattca

SEQ ID NO: 42346 - DNA, 50 bp, synthetic construct
  source 1..50: mol_type = other DNA
cgaaaaatactacgaaataacatccaaaacatcaccaaaccgaccattcg

SEQ ID NO: 42347 - DNA, 50 bp, synthetic construct
  source 1..50: mol_type = other DNA
aacatcaccaaaaaatactacaaaataacatccaaaacatcaccaaacca

SEQ ID NO: 42348 - DNA, 50 bp, synthetic construct
  source 1..50: mol_type = other DNA
aacgtcaccgaaaaatactacgaaataacatccaaaacatcaccaaaccg

SEQ ID NO: 42349 - DNA, 50 bp, synthetic construct
  source 1..50: mol_type = other DNA
tttcacatacctaatttttattatcaactaattaaacatatctaatcaca

SEQ ID NO: 42350 - DNA, 50 bp, synthetic construct
  source 1..50: mol_type = other DNA
tttcgcgtacctaatttttattatcaactaattaaacatatctaatcgcg

SEQ ID NO: 42351 - DNA, 50 bp, synthetic construct
  source 1..50: mol_type = other DNA
taaaatccaatattcatatataaatactcataacttactttcttttcaca

SEQ ID NO: 42352 - DNA, 50 bp, synthetic construct
  source 1..50: mol_type = other DNA
taaaatccgatattcgtatataaatactcgtaacttactttcttttcgcg

SEQ ID NO: 42353 - DNA, 50 bp, synthetic construct
  source 1..50: mol_type = other DNA
ccttaaatcactacccctcaaaaaacaaaacaaaaaataaaacaacaaca

SEQ ID NO: 42354 - DNA, 50 bp, synthetic construct
  source 1..50: mol_type = other DNA
ccttaaatcactacccctcgaaaaacgaaacaaaaaataaaacaacaacg

SEQ ID NO: 42355 - DNA, 50 bp, synthetic construct
  source 1..50: mol_type = other DNA
tacctcactttttactccacccctcaaaaaacaataacctaaaaactaca

SEQ ID NO: 42356 - DNA, 50 bp, synthetic construct
  source 1..50: mol_type = other DNA
tacctcactttttactccgcccctcgaaaaacaataacctaaaaactacg

SEQ ID NO: 42357 - DNA, 50 bp, synthetic construct
  source 1..50: mol_type = other DNA
acaacttccaaatcaacaactcaatcaacttttaataacaacaaatctca

SEQ ID NO: 42358 - DNA, 50 bp, synthetic construct
  source 1..50: mol_type = other DNA
acaacttccgaatcaacaactcgatcgacttttaataacgacgaatctcg

SEQ ID NO: 42359 - DNA, 50 bp, synthetic construct
  source 1..50: mol_type = other DNA
taattttaccataactcatactaaacaaacaactcaaaaatccaccaaca

SEQ ID NO: 42360 - DNA, 50 bp, synthetic construct
  source 1..50: mol_type = other DNA
taattttaccataactcgtactaaacaaacaactcgaaaatccaccgacg

SEQ ID NO: 42361 - DNA, 50 bp, synthetic construct
  source 1..50: mol_type = other DNA
tccacaataacaaaaaacttaataaactcttaaaacatataaccatcaca

SEQ ID NO: 42362 - DNA, 50 bp, synthetic construct
  source 1..50: mol_type = other DNA
tccgcaataacgaaaaacttaataaactcttaaaacgtataaccatcgcg

SEQ ID NO: 42363 - DNA, 50 bp, synthetic construct
  source 1..50: mol_type = other DNA
aactcctcatcattacaaataaccaattacaaataacacaaaataataca

SEQ ID NO: 42364 - DNA, 50 bp, synthetic construct
  source 1..50: mol_type = other DNA
aactcctcgtcattacgaataaccaattacaaataacgcgaaataatacg

SEQ ID NO: 42365 - DNA, 50 bp, synthetic construct
  source 1..50: mol_type = other DNA
caattacaaataacacaaaataatacaaatcttcttattatcacaaacca

SEQ ID NO: 42366 - DNA, 50 bp, synthetic construct
  source 1..50: mol_type = other DNA
caattacaaataacgcgaaataatacgaatcttcttattatcgcgaaccg

SEQ ID NO: 42367 - DNA, 50 bp, synthetic construct
  source 1..50: mol_type = other DNA
ataacacaaaataatacaaatcttcttattatcacaaaccacattaccca

SEQ ID NO: 42368 - DNA, 50 bp, synthetic construct
  source 1..50: mol_type = other DNA
ataacgcgaaataatacgaatcttcttattatcgcgaaccgcattacccg

SEQ ID NO: 42369 - DNA, 50 bp, synthetic construct
  source 1..50: mol_type = other DNA
tctcatacaaatttacaatttcctataaaccaaatacaccacctactcca

SEQ ID NO: 42370 - DNA, 50 bp, synthetic construct
  source 1..50: mol_type = other DNA
tctcgtacaaatttacaatttcctataaaccgaatacaccgcctactccg

SEQ ID NO: 42371 - DNA, 50 bp, synthetic construct
  source 1..50: mol_type = other DNA
aaacaatacactcaacccacaaaaaactacaaacctacacaaaaaaacca

SEQ ID NO: 42372 - DNA, 50 bp, synthetic construct
  source 1..50: mol_type = other DNA
aaacgatacactcgacccacaaaaaactacaaacctacacgaaaaaaccg

SEQ ID NO: 42373 - DNA, 50 bp, synthetic construct
  source 1..50: mol_type = other DNA
atcaaaaataattatatctaatcacaacaaacaaaacaataaaactcaca

SEQ ID NO: 42374 - DNA, 50 bp, synthetic construct
  source 1..50: mol_type = other DNA
atcaaaaataattatatctaatcgcgacaaacaaaacgataaaactcgcg

SEQ ID NO: 42375 - DNA, 50 bp, synthetic construct
  source 1..50: mol_type = other DNA
ttatcaaaaataattatatctaatcacaacaaacaaaacaataaaactca

SEQ ID NO: 42376 - DNA, 50 bp, synthetic construct
  source 1..50: mol_type = other DNA
ttatcaaaaataattatatctaatcgcgacaaacaaaacgataaaactcg

SEQ ID NO: 42377 - DNA, 50 bp, synthetic construct
  source 1..50: mol_type = other DNA
caattttcccttatcaaaaataattatatctaatcacaacaaacaaaaca

SEQ ID NO: 42378 - DNA, 50 bp, synthetic construct
  source 1..50: mol_type = other DNA
cgattttcccttatcaaaaataattatatctaatcgcgacaaacaaaacg

SEQ ID NO: 42379 - DNA, 50 bp, synthetic construct
  source 1..50: mol_type = other DNA
attttcttataacaattttcccttatcaaaaataattatatctaatcaca

SEQ ID NO: 42380 - DNA, 50 bp, synthetic construct
  source 1..50: mol_type = other DNA
attttcttataacgattttcccttatcaaaaataattatatctaatcgcg

SEQ ID NO: 42381 - DNA, 50 bp, synthetic construct
  source 1..50: mol_type = other DNA
atccactcctttccaaaaacataaatcacaatccaaaaaaaacacaaaca

SEQ ID NO: 42382 - DNA, 50 bp, synthetic construct
  source 1..50: mol_type = other DNA
atccactcctttccaaaaacataaatcacaatccgaaaaaaacacgaacg

SEQ ID NO: 42383 - DNA, 50 bp, synthetic construct
  source 1..50: mol_type = other DNA
taataactctatataaactcactacaacctcctcctctcaaattcaaaca

SEQ ID NO: 42384 - DNA, 50 bp, synthetic construct
  source 1..50: mol_type = other DNA
taataactctatataaactcactacaacctcctcctctcgaattcaaacg

SEQ ID NO: 42385 - DNA, 50 bp, synthetic construct
  source 1..50: mol_type = other DNA
acttacatttactttacactacaaactcaccctaaactctttcttacaca

SEQ ID NO: 42386 - DNA, 50 bp, synthetic construct
  source 1..50: mol_type = other DNA
acttacatttactttacactacgaactcaccctaaactctttcttacgcg

SEQ ID NO: 42387 - DNA, 50 bp, synthetic construct
  source 1..50: mol_type = other DNA
ttgaatttttttggaggtgatggttgagtgtttattgtagtgagttaggt

SEQ ID NO: 42388 - DNA, 50 bp, synthetic construct
  source 1..50: mol_type = other DNA
ttgaatttttttggaggtgatggtcgagcgtttattgtagtgagttaggc

SEQ ID NO: 42389 - DNA, 50 bp, synthetic construct
  source 1..50: mol_type = other DNA
aaccataaaaatcataaattccttcatcaacaacatcttcaaacacatca

SEQ ID NO: 42390 - DNA, 50 bp, synthetic construct
  source 1..50: mol_type = other DNA
aaccataaaaatcataaattccttcgtcaacgacatcttcgaacgcatcg

SEQ ID NO: 42391 - DNA, 50 bp, synthetic construct
  source 1..50: mol_type = other DNA
caccaacatctcatccaaaaccataaaaatcataaattccttcatcaaca

SEQ ID NO: 42392 - DNA, 50 bp, synthetic construct
  source 1..50: mol_type = other DNA
caccgacatctcatccaaaaccataaaaatcataaattccttcgtcaacg

SEQ ID NO: 42393 - DNA, 50 bp, synthetic construct
  source 1..50: mol_type = other DNA
ccccaacaccaacatctcatccaaaaccataaaaatcataaattccttca

SEQ ID NO: 42394 - DNA, 50 bp, synthetic construct
  source 1..50: mol_type = other DNA
ccccgacaccgacatctcatccaaaaccataaaaatcataaattccttcg

SEQ ID NO: 42395 - DNA, 50 bp, synthetic construct
  source 1..50: mol_type = other DNA
caaaaaaaataacaaactctaccctattaaaaactacaaacccaataaca

SEQ ID NO: 42396 - DNA, 50 bp, synthetic construct
  source 1..50: mol_type = other DNA
cgaaaaaaataacgaactctaccctattaaaaactacaaacccgataacg

SEQ ID NO: 42397 - DNA, 50 bp, synthetic construct
  source 1..50: mol_type = other DNA
cactaccaaacttacaattcccaataaaacaaaatccatcatctttttca

SEQ ID NO: 42398 - DNA, 50 bp, synthetic construct
  source 1..50: mol_type = other DNA
cgctaccgaacttacaattcccaataaaacaaaatccgtcatctttttcg

SEQ ID NO: 42399 - DNA, 50 bp, synthetic construct
  source 1..50: mol_type = other DNA
ctaaaatctcaacaaccaaatattataaatacactaacacaccaactcca

SEQ ID NO: 42400 - DNA, 50 bp, synthetic construct
  source 1..50: mol_type = other DNA
ctaaaatctcgacgaccaaatattataaatacactaacgcaccgactccg

SEQ ID NO: 42401 - DNA, 50 bp, synthetic construct
  source 1..50: mol_type = other DNA
aatccatcatctttttcaaaaaaacaattattttaaaccaatcaaaacca

SEQ ID NO: 42402 - DNA, 50 bp, synthetic construct
  source 1..50: mol_type = other DNA
aatccgtcatctttttcgaaaaaacaattattttaaaccgatcgaaaccg

SEQ ID NO: 42403 - DNA, 50 bp, synthetic construct
  source 1..50: mol_type = other DNA
ttttaaaccaatcaaaaccaatacaccaatatacttacaatacctaacca

SEQ ID NO: 42404 - DNA, 50 bp, synthetic construct
  source 1..50: mol_type = other DNA
ttttaaaccgatcgaaaccgatacgccaatatacttacaatacctaaccg

SEQ ID NO: 42405 - DNA, 50 bp, synthetic construct
  source 1..50: mol_type = other DNA
tactacaaatcttatcacatataacactacccaccaattctaaaatctca

SEQ ID NO: 42406 - DNA, 50 bp, synthetic construct
  source 1..50: mol_type = other DNA
tactacgaatcttatcacgtataacgctacccaccaattctaaaatctcg

SEQ ID NO: 42407 - DNA, 50 bp, synthetic construct
  source 1..50: mol_type = other DNA
tcctcatcatttcaaataaccaactacaaataacaaaaaataatactaca

SEQ ID NO: 42408 - DNA, 50 bp, synthetic construct
  source 1..50: mol_type = other DNA
tcctcgtcgtttcgaataaccaactacaaataacgaaaaataatactacg

SEQ ID NO: 42409 - DNA, 50 bp, synthetic construct
  source 1..50: mol_type = other DNA
aactacttattaacctcctcatcatttcaaataaccaactacaaataaca

SEQ ID NO: 42410 - DNA, 50 bp, synthetic construct
  source 1..50: mol_type = other DNA
aactacttattaacctcctcgtcgtttcgaataaccaactacaaataacg

SEQ ID NO: 42411 - DNA, 50 bp, synthetic construct
  source 1..50: mol_type = other DNA
ctccctaaacaataataacattacccaactacttattaacctcctcatca

SEQ ID NO: 42412 - DNA, 50 bp, synthetic construct
  source 1..50: mol_type = other DNA
ctccctaaacaataataacgttacccaactacttattaacctcctcgtcg

SEQ ID NO: 42413 - DNA, 50 bp, synthetic construct
  source 1..50: mol_type = other DNA
catcctatccaatattcaaaccatcctattaccaaaataacaaaaccaca

SEQ ID NO: 42414 - DNA, 50 bp, synthetic construct
  source 1..50: mol_type = other DNA
cgtcctatccaatattcaaaccgtcctattaccaaaataacaaaaccacg

SEQ ID NO: 42415 - DNA, 50 bp, synthetic construct
  source 1..50: mol_type = other DNA
taatcccaaatacacaaaaaactaaaacataaaaaccacataaaacaaca

SEQ ID NO: 42416 - DNA, 50 bp, synthetic construct
  source 1..50: mol_type = other DNA
taatcccaaatacacaaaaaactaaaacataaaaaccgcgtaaaacgacg

SEQ ID NO: 42417 - DNA, 50 bp, synthetic construct
  source 1..50: mol_type = other DNA
ctataatcccaaatacacaaaaaactaaaacataaaaaccacataaaaca

SEQ ID NO: 42418 - DNA, 50 bp, synthetic construct
  source 1..50: mol_type = other DNA
ctataatcccaaatacacaaaaaactaaaacataaaaaccgcgtaaaacg

SEQ ID NO: 42419 - DNA, 50 bp, synthetic construct
  source 1..50: mol_type = other DNA
taaaataataaaaccccatctcacataaaaatacaaaaactaactaaaca

SEQ ID NO: 42420 - DNA, 50 bp, synthetic construct
  source 1..50: mol_type = other DNA
taaaataataaaaccccgtctcgcataaaaatacaaaaactaactaaacg

SEQ ID NO: 42421 - DNA, 50 bp, synthetic construct
  source 1..50: mol_type = other DNA
cactcttacaaactactttaataacaaactacttacacaaaactttacca

SEQ ID NO: 42422 - DNA, 50 bp, synthetic construct
  source 1..50: mol_type = other DNA
cgctcttacgaactactttaataacaaactacttacgcgaaactttaccg

SEQ ID NO: 42423 - DNA, 50 bp, synthetic construct
  source 1..50: mol_type = other DNA
aataaccaaaacactcttacaaactactttaataacaaactacttacaca

SEQ ID NO: 42424 - DNA, 50 bp, synthetic construct
  source 1..50: mol_type = other DNA
gataaccgaaacgctcttacgaactactttaataacaaactacttacgcg

SEQ ID NO: 42425 - DNA, 50 bp, synthetic construct
  source 1..50: mol_type = other DNA
ccaataaccaaaacactcttacaaactactttaataacaaactacttaca

SEQ ID NO: 42426 - DNA, 50 bp, synthetic construct
  source 1..50: mol_type = other DNA
ccgataaccgaaacgctcttacgaactactttaataacaaactacttacg

SEQ ID NO: 42427 - DNA, 50 bp, synthetic construct
  source 1..50: mol_type = other DNA
tcaacaactcaataaacttctaataacaacaaatttcacacaaaaccaca

SEQ ID NO: 42428 - DNA, 50 bp, synthetic construct
  source 1..50: mol_type = other DNA
tcaacaactcgataaacttctaataacgacgaatttcgcgcaaaaccacg

SEQ ID NO: 42429 - DNA, 50 bp, synthetic construct
  source 1..50: mol_type = other DNA
aacttccaaatcaacaactcaataaacttctaataacaacaaatttcaca

SEQ ID NO: 42430 - DNA, 50 bp, synthetic construct
  source 1..50: mol_type = other DNA
aacttccgaatcaacaactcgataaacttctaataacgacgaatttcgcg

SEQ ID NO: 42431 - DNA, 50 bp, synthetic construct
  source 1..50: mol_type = other DNA
taaaacaacaacttccaaatcaacaactcaataaacttctaataacaaca

SEQ ID NO: 42432 - DNA, 50 bp, synthetic construct
  source 1..50: mol_type = other DNA
taaaacgacaacttccgaatcaacaactcgataaacttctaataacgacg

SEQ ID NO: 42433 - DNA, 50 bp, synthetic construct
  source 1..50: mol_type = other DNA
cactaaaacaacaacttccaaatcaacaactcaataaacttctaataaca

SEQ ID NO: 42434 - DNA, 50 bp, synthetic construct
  source 1..50: mol_type = other DNA
cgctaaaacgacaacttccgaatcaacaactcgataaacttctaataacg

SEQ ID NO: 42435 - DNA, 50 bp, synthetic construct
  source 1..50: mol_type = other DNA
ttaaaatcctaaacaatttctcacaccaaacactaaaacaacaacttcca

SEQ ID NO: 42436 - DNA, 50 bp, synthetic construct
  source 1..50: mol_type = other DNA
ttaaaatcctaaacgatttctcgcaccaaacgctaaaacgacaacttccg

SEQ ID NO: 42437 - DNA, 50 bp, synthetic construct
  source 1..50: mol_type = other DNA
caaatcaattttaaaatcctaaacaatttctcacaccaaacactaaaaca

SEQ ID NO: 42438 - DNA, 50 bp, synthetic construct
  source 1..50: mol_type = other DNA
caaatcgattttaaaatcctaaacgatttctcgcaccaaacgctaaaacg

SEQ ID NO: 42439 - DNA, 50 bp, synthetic construct
  source 1..50: mol_type = other DNA
taaaaacacaaatcaattttaaaatcctaaacaatttctcacaccaaaca

SEQ ID NO: 42440 - DNA, 50 bp, synthetic construct
  source 1..50: mol_type = other DNA
taaaaacgcaaatcgattttaaaatcctaaacgatttctcgcaccaaacg

SEQ ID NO: 42441 - DNA, 50 bp, synthetic construct
  source 1..50: mol_type = other DNA
ccatcaccacaaaactctaaaaacacaaatcaattttaaaatcctaaaca

SEQ ID NO: 42442 - DNA, 50 bp, synthetic construct
  source 1..50: mol_type = other DNA
ccatcaccgcaaaactctaaaaacgcaaatcgattttaaaatcctaaacg

SEQ ID NO: 42443 - DNA, 50 bp, synthetic construct
  source 1..50: mol_type = other DNA
attcacactaaacacatcaccatcatacccaaaaatatccaactaacaca

SEQ ID NO: 42444 - DNA, 50 bp, synthetic construct
  source 1..50: mol_type = other DNA
attcacgctaaacgcgtcaccatcatacccaaaaatatccaactaacacg

SEQ ID NO: 42445 - DNA, 50 bp, synthetic construct
  source 1..50: mol_type = other DNA
aaccttccactaaactaacaaatttaaacatatcaattttaaacatatca

SEQ ID NO: 42446 - DNA, 50 bp, synthetic construct
  source 1..50: mol_type = other DNA
aaccttccgctaaactaacaaatttaaacgtatcgattttaaacgtatcg

SEQ ID NO: 42447 - DNA, 50 bp, synthetic construct
  source 1..50: mol_type = other DNA
acctttattacaacttctaaatccctaaccaaaaacttttctcactaaca

SEQ ID NO: 42448 - DNA, 50 bp, synthetic construct
  source 1..50: mol_type = other DNA
acctttattacgacttctaaatccctaaccgaaaacttttctcgctaacg

SEQ ID NO: 42449 - DNA, 50 bp, synthetic construct
  source 1..50: mol_type = other DNA
caaaaccatccaccaacaaaaaaaacctccaatcaaaaacctaaaaacca

SEQ ID NO: 42450 - DNA, 50 bp, synthetic construct
  source 1..50: mol_type = other DNA
caaaaccatccgccaacgaaaaaaacctccgatcaaaaacctaaaaaccg

SEQ ID NO: 42451 - DNA, 50 bp, synthetic construct
  source 1..50: mol_type = other DNA
taccctattacttaaaattaatcatataaaaattactaaaatatcaaaca

SEQ ID NO: 42452 - DNA, 50 bp, synthetic construct
  source 1..50: mol_type = other DNA
taccctattacttaaaattaatcgtataaaaattactaaaatatcaaacg

SEQ ID NO: 42453 - DNA, 50 bp, synthetic construct
  source 1..50: mol_type = other DNA
taaactcttaaccactttcttaattacaataaccacaaccaacttcttca

SEQ ID NO: 42454 - DNA, 50 bp, synthetic construct
  source 1..50: mol_type = other DNA
taaactcttaaccactttcttaattacaataaccgcgaccgacttcttcg

SEQ ID NO: 42455 - DNA, 50 bp, synthetic construct
  source 1..50: mol_type = other DNA
aaaaaacaactaacaacacaactccaaaaaaaaacactaaaaaaacacca

SEQ ID NO: 42456 - DNA, 50 bp, synthetic construct
  source 1..50: mol_type = other DNA
aaaaaacgactaacgacgcaactccgaaaaaaaacgctaaaaaaacaccg

SEQ ID NO: 42457 - DNA, 50 bp, synthetic construct
  source 1..50: mol_type = other DNA
aaccaaaaaacccaaaaaaacaactaacaacacaactccaaaaaaaaaca

SEQ ID NO: 42458 - DNA, 50 bp, synthetic construct
  source 1..50: mol_type = other DNA
aaccaaaaaacccaaaaaaacgactaacgacgcaactccgaaaaaaaacg

SEQ ID NO: 42459 - DNA, 50 bp, synthetic construct
  source 1..50: mol_type = other DNA
caattaaaacaaccaaaaaacccaaaaaaacaactaacaacacaactcca

SEQ ID NO: 42460 - DNA, 50 bp, synthetic construct
  source 1..50: mol_type = other DNA
caattaaaacaaccaaaaaacccaaaaaaacgactaacgacgcaactccg

SEQ ID NO: 42461 - DNA, 50 bp, synthetic construct
  source 1..50: mol_type = other DNA
cccccaatatcaaaactcatcaccaaaactataaccacctctaaaaaaca

SEQ ID NO: 42462 - DNA, 50 bp, synthetic construct
  source 1..50: mol_type = other DNA
cccccgatatcaaaactcatcaccaaaactataaccgcctctaaaaaacg

SEQ ID NO: 42463 - DNA, 50 bp, synthetic construct
  source 1..50: mol_type = other DNA
catcaacactttaccacttatacccaaatttttaattctcaacatatcca

SEQ ID NO: 42464 - DNA, 50 bp, synthetic construct
  source 1..50: mol_type = other DNA
catcgacgctttaccacttatacccgaatttttaattctcaacatatccg

SEQ ID NO: 42465 - DNA, 50 bp, synthetic construct
  source 1..50: mol_type = other DNA
ctcaaatacaaataacaaaacaccaataaaacaacacctaaacaaaacca

SEQ ID NO: 42466 - DNA, 50 bp, synthetic construct
  source 1..50: mol_type = other DNA
ctcgaatacaaataacaaaacgccgataaaacaacgcctaaacaaaaccg

SEQ ID NO: 42467 - DNA, 50 bp, synthetic construct
  source 1..50: mol_type = other DNA
actatatatataaaacacaaacacactctaattaatactctaatcaccca

SEQ ID NO: 42468 - DNA, 50 bp, synthetic construct
  source 1..50: mol_type = other DNA
gctatatatataaaacgcaaacgcgctctaattaatactctaatcgcccg

SEQ ID NO: 42469 - DNA, 50 bp, synthetic construct
  source 1..50: mol_type = other DNA
attcttcatacaatcacacaaaaactataaactaaaacaaaaattccaca

SEQ ID NO: 42470 - DNA, 50 bp, synthetic construct
  source 1..50: mol_type = other DNA
attcttcgtacaatcgcacaaaaactataaactaaaacaaaaattccacg

SEQ ID NO: 42471 - DNA, 50 bp, synthetic construct
  source 1..50: mol_type = other DNA
caaaccaaacaacaaataaccaattttataataccctaaatattatccca

SEQ ID NO: 42472 - DNA, 50 bp, synthetic construct
  source 1..50: mol_type = other DNA
cgaaccaaacgacgaataaccgattttataataccctaaatattatcccg

SEQ ID NO: 42473 - DNA, 50 bp, synthetic construct
  source 1..50: mol_type = other DNA
aacaccatcataaaatactccaaaataacatccaaaacattacaaaacca

SEQ ID NO: 42474 - DNA, 50 bp, synthetic construct
  source 1..50: mol_type = other DNA
aacgccatcgtaaaatactccgaaataacatccaaaacattacaaaaccg

SEQ ID NO: 42475 - DNA, 50 bp, synthetic construct
  source 1..50: mol_type = other DNA
ataacaacatctcaaataacattctctaaaaaaaccttaaacacacctca

SEQ ID NO: 42476 - DNA, 50 bp, synthetic construct
  source 1..50: mol_type = other DNA
ataacgacgtctcgaataacgttctctaaaaaaaccttaaacacacctcg

SEQ ID NO: 42477 - DNA, 50 bp, synthetic construct
  source 1..50: mol_type = other DNA
caattttacacttaacatactccatataaataacaacatctcaaataaca

SEQ ID NO: 42478 - DNA, 50 bp, synthetic construct
  source 1..50: mol_type = other DNA
caattttacgcttaacgtactccgtataaataacgacgtctcgaataacg

SEQ ID NO: 42479 - DNA, 50 bp, synthetic construct
  source 1..50: mol_type = other DNA
actataacaattttacacttaacatactccatataaataacaacatctca

SEQ ID NO: 42480 - DNA, 50 bp, synthetic construct
  source 1..50: mol_type = other DNA
actataacaattttacgcttaacgtactccgtataaataacgacgtctcg

SEQ ID NO: 42481 - DNA, 50 bp, synthetic construct
  source 1..50: mol_type = other DNA
acatcaaaaacacactctatataacttcaacaactaaatctaaaaataca

SEQ ID NO: 42482 - DNA, 50 bp, synthetic construct
  source 1..50: mol_type = other DNA
acgtcaaaaacgcactctatataacttcgacgactaaatctaaaaatacg

SEQ ID NO: 42483 - DNA, 50 bp, synthetic construct
  source 1..50: mol_type = other DNA
atcaaaaacacactctatataacttcaacaactaaatctaaaaatacaca

SEQ ID NO: 42484 - DNA, 50 bp, synthetic construct
  source 1..50: mol_type = other DNA
gtcaaaaacgcactctatataacttcgacgactaaatctaaaaatacgcg

SEQ ID NO: 42485 - DNA, 50 bp, synthetic construct
  source 1..50: mol_type = other DNA
tccctatctacatcaccaaaatcaacaattaccataatatcataatttca

SEQ ID NO: 42486 - DNA, 50 bp, synthetic construct
  source 1..50: mol_type = other DNA
tccctatctacgtcgccaaaatcaacgattaccgtaatatcataatttcg

SEQ ID NO: 42487 - DNA, 50 bp, synthetic construct
  source 1..50: mol_type = other DNA
cacaaactcacttaaatttcaaacccaactatctatccctatctacatca

SEQ ID NO: 42488 - DNA, 50 bp, synthetic construct
  source 1..50: mol_type = other DNA
cgcaaactcgcttaaatttcaaacccaactatctatccctatctacgtcg

SEQ ID NO: 42489 - DNA, 50 bp, synthetic construct
  source 1..50: mol_type = other DNA
aaccacaaactcacttaaatttcaaacccaactatctatccctatctaca

SEQ ID NO: 42490 - DNA, 50 bp, synthetic construct
  source 1..50: mol_type = other DNA
aaccgcaaactcgcttaaatttcaaacccaactatctatccctatctacg

SEQ ID NO: 42491 - DNA, 50 bp, synthetic construct
  source 1..50: mol_type = other DNA
caactaaatctaaaacctaaacaaacctacaatttcttccaaaaacacca

SEQ ID NO: 42492 - DNA, 50 bp, synthetic construct
  source 1..50: mol_type = other DNA
caactaaatctaaaacctaaacgaacctacgatttcttccgaaaacgccg

SEQ ID NO: 42493 - DNA, 50 bp, synthetic construct
  source 1..50: mol_type = other DNA
taaacaaacctacaatttcttccaaaaacaccaaattaacaaaataacca

SEQ ID NO: 42494 - DNA, 50 bp, synthetic construct
  source 1..50: mol_type = other DNA
taaacgaacctacgatttcttccgaaaacgccgaattaacaaaataaccg

SEQ ID NO: 42495 - DNA, 50 bp, synthetic construct
  source 1..50: mol_type = other DNA
tagtattttgtatatgtatatagagtaattttttttgtggttgtgtttgt

SEQ ID NO: 42496 - DNA, 50 bp, synthetic construct
  source 1..50: mol_type = other DNA
tagtattttgtatacgtatatagagtaattttttttgcggttgcgtttgc

SEQ ID NO: 42497 - DNA, 50 bp, synthetic construct
  source 1..50: mol_type = other DNA
aatctactcccaccccaaaaaaaaactccaaaaaaacaataaccaaaaca

SEQ ID NO: 42498 - DNA, 50 bp, synthetic construct
  source 1..50: mol_type = other DNA
aatctactcccgccccgaaaaaaaactccaaaaaaacaataaccaaaacg

SEQ ID NO: 42499 - DNA, 50 bp, synthetic construct
  source 1..50: mol_type = other DNA
aaaaaacaaaatttcactttaacacaaactttacctccttacttaccaca

SEQ ID NO: 42500 - DNA, 50 bp, synthetic construct
  source 1..50: mol_type = other DNA
aaaaaacgaaatttcgctttaacgcgaactttacctccttacttaccacg

SEQ ID NO: 42501 - DNA, 50 bp, synthetic construct
  source 1..50: mol_type = other DNA
ttatctaattacaatatctaaacataataaacaaaaaaacaaaactcaca

SEQ ID NO: 42502 - DNA, 50 bp, synthetic construct
  source 1..50: mol_type = other DNA
ttatctaattacaatatctaaacgtaataaacaaaaaaacaaaactcgcg

SEQ ID NO: 42503 - DNA, 50 bp, synthetic construct
  source 1..50: mol_type = other DNA
tctaaacataataaacaaaaaaacaaaactcacaccaaaacaaaatccca

SEQ ID NO: 42504 - DNA, 50 bp, synthetic construct
  source 1..50: mol_type = other DNA
tctaaacgtaataaacaaaaaaacaaaactcgcgccaaaacgaaatcccg

SEQ ID NO: 42505 - DNA, 50 bp, synthetic construct
  source 1..50: mol_type = other DNA
ctttacaaaacaaacaatacactcaacccaccaaaaactaaaaaccaaca

SEQ ID NO: 42506 - DNA, 50 bp, synthetic construct
  source 1..50: mol_type = other DNA
ctttacgaaacaaacgatacactcgacccaccgaaaactaaaaaccaacg

SEQ ID NO: 42507 - DNA, 50 bp, synthetic construct
  source 1..50: mol_type = other DNA
taaaacaaacacaccaatatacctaacaacaatattaaaatacctaacca

SEQ ID NO: 42508 - DNA, 50 bp, synthetic construct
  source 1..50: mol_type = other DNA
taaaacaaacgcgccgatatacctaacgacgatattaaaatacctaaccg

SEQ ID NO: 42509 - DNA, 50 bp, synthetic construct
  source 1..50: mol_type = other DNA
cctaacaacaatattaaaatacctaaccaccaaaatcctaaaactaacca

SEQ ID NO: 42510 - DNA, 50 bp, synthetic construct
  source 1..50: mol_type = other DNA
cctaacgacgatattaaaatacctaaccgccgaaatcctaaaactaaccg

SEQ ID NO: 42511 - DNA, 50 bp, synthetic construct
  source 1..50: mol_type = other DNA
caatttattaaactcctcatcattacaaataaccaactacaaataacaca

SEQ ID NO: 42512 - DNA, 50 bp, synthetic construct
  source 1..50: mol_type = other DNA
caatttattaaactcctcgtcgttacgaataaccaactacaaataacgcg

SEQ ID NO: 42513 - DNA, 50 bp, synthetic construct
  source 1..50: mol_type = other DNA
taaacaataatcacccaacctaacaatttattaaactcctcatcattaca

SEQ ID NO: 42514 - DNA, 50 bp, synthetic construct
  source 1..50: mol_type = other DNA
taaacaataatcacccgacctaacaatttattaaactcctcgtcgttacg

SEQ ID NO: 42515 - DNA, 50 bp, synthetic construct
  source 1..50: mol_type = other DNA
caccctaaacaataatcacccaacctaacaatttattaaactcctcatca

SEQ ID NO: 42516 - DNA, 50 bp, synthetic construct
  source 1..50: mol_type = other DNA
cgccctaaacaataatcacccgacctaacaatttattaaactcctcgtcg

SEQ ID NO: 42517 - DNA, 50 bp, synthetic construct
  source 1..50: mol_type = other DNA
ttacaactaaccatccacaacaacaaaaaactcaacaaactactaaacca

SEQ ID NO: 42518 - DNA, 50 bp, synthetic construct
  source 1..50: mol_type = other DNA
ttacaactaaccatccgcaacgacgaaaaactcaacaaactactaaaccg

SEQ ID NO: 42519 - DNA, 50 bp, synthetic construct
  source 1..50: mol_type = other DNA
acaaaaacaattcaaaccaaaaacaaaaacactaaccaaaactcaaacca

SEQ ID NO: 42520 - DNA, 50 bp, synthetic construct
  source 1..50: mol_type = other DNA
acgaaaacaattcgaaccgaaaacaaaaacactaaccgaaactcgaaccg

SEQ ID NO: 42521 - DNA, 50 bp, synthetic construct
  source 1..50: mol_type = other DNA
aaacaaacataaacaaaaacaattcaaaccaaaaacaaaaacactaacca

SEQ ID NO: 42522 - DNA, 50 bp, synthetic construct
  source 1..50: mol_type = other DNA
aaacaaacgtaaacgaaaacaattcgaaccgaaaacaaaaacactaaccg

SEQ ID NO: 42523 - DNA, 50 bp, synthetic construct
  source 1..50: mol_type = other DNA
acaatctcaaacatattaaaaacaaacataaacaaaaacaattcaaacca

SEQ ID NO: 42524 - DNA, 50 bp, synthetic construct
  source 1..50: mol_type = other DNA
gcaatctcgaacatattaaaaacaaacgtaaacgaaaacaattcgaaccg

SEQ ID NO: 42525 - DNA, 50 bp, synthetic construct
  source 1..50: mol_type = other DNA
caaacacaatctcaaacatattaaaaacaaacataaacaaaaacaattca

SEQ ID NO: 42526 - DNA, 50 bp, synthetic construct
  source 1..50: mol_type = other DNA
caaacgcaatctcgaacatattaaaaacaaacgtaaacgaaaacaattcg

SEQ ID NO: 42527 - DNA, 50 bp, synthetic construct
  source 1..50: mol_type = other DNA
aacaaacacaacaaacacaatctcaaacatattaaaaacaaacataaaca

SEQ ID NO: 42528 - DNA, 50 bp, synthetic construct
  source 1..50: mol_type = other DNA
aacgaacgcgacaaacgcaatctcgaacatattaaaaacaaacgtaaacg

SEQ ID NO: 42529 - DNA, 50 bp, synthetic construct
  source 1..50: mol_type = other DNA
aaccttcttcttcacaaaaatcttctcaacaaaaaccaaaacaacaaaca

SEQ ID NO: 42530 - DNA, 50 bp, synthetic construct
  source 1..50: mol_type = other DNA
aaccttcttcttcacgaaaatcttctcgacaaaaaccgaaacaacgaacg

SEQ ID NO: 42531 - DNA, 50 bp, synthetic construct
  source 1..50: mol_type = other DNA
tacaaaccttcttcttcacaaaaatcttctcaacaaaaaccaaaacaaca

SEQ ID NO: 42532 - DNA, 50 bp, synthetic construct
  source 1..50: mol_type = other DNA
tacgaaccttcttcttcacgaaaatcttctcgacaaaaaccgaaacaacg

SEQ ID NO: 42533 - DNA, 50 bp, synthetic construct
  source 1..50: mol_type = other DNA
tacaaacttacaaaccttcttcttcacaaaaatcttctcaacaaaaacca

SEQ ID NO: 42534 - DNA, 50 bp, synthetic construct
  source 1..50: mol_type = other DNA
tacaaacttacgaaccttcttcttcacgaaaatcttctcgacaaaaaccg

SEQ ID NO: 42535 - DNA, 50 bp, synthetic construct
  source 1..50: mol_type = other DNA
actacactccttaaaaacaacaacaactttaataataaactcaaacacca

SEQ ID NO: 42536 - DNA, 50 bp, synthetic construct
  source 1..50: mol_type = other DNA
gctacgctccttaaaaacgacaacaactttaataataaactcgaacaccg

SEQ ID NO: 42537 - DNA, 50 bp, synthetic construct
  source 1..50: mol_type = other DNA
caaaacatctaaacccccaatatccaaactcattactaaaactattacca

SEQ ID NO: 42538 - DNA, 50 bp, synthetic construct
  source 1..50: mol_type = other DNA
caaaacgtctaaacccccgatatccgaactcattactaaaactattaccg

SEQ ID NO: 42539 - DNA, 50 bp, synthetic construct
  source 1..50: mol_type = other DNA
aatatccaaactcattactaaaactattaccacctccaaaaaacacaaca

SEQ ID NO: 42540 - DNA, 50 bp, synthetic construct
  source 1..50: mol_type = other DNA
gatatccgaactcattactaaaactattaccgcctccaaaaaacgcaacg

SEQ ID NO: 42541 - DNA, 50 bp, synthetic construct
  source 1..50: mol_type = other DNA
atccaaactcattactaaaactattaccacctccaaaaaacacaacaaca

SEQ ID NO: 42542 - DNA, 50 bp, synthetic construct
  source 1..50: mol_type = other DNA
atccgaactcattactaaaactattaccgcctccaaaaaacgcaacgacg

SEQ ID NO: 42543 - DNA, 50 bp, synthetic construct
  source 1..50: mol_type = other DNA
cttaatacaactattattcttctccacatcataaccaacaactaccaaca

SEQ ID NO: 42544 - DNA, 50 bp, synthetic construct
  source 1..50: mol_type = other DNA
cttaatacgactattattcttctccacgtcataaccaacgactaccaacg

SEQ ID NO: 42545 - DNA, 50 bp, synthetic construct
  source 1..50: mol_type = other DNA
attacactattaaaaaacataactcaaaaaaacactactaaacaaaaaca

SEQ ID NO: 42546 - DNA, 50 bp, synthetic construct
  source 1..50: mol_type = other DNA
attacactattaaaaaacgtaactcgaaaaaacgctactaaacaaaaacg

SEQ ID NO: 42547 - DNA, 50 bp, synthetic construct
  source 1..50: mol_type = other DNA
ttaaaaaacataactcaaaaaaacactactaaacaaaaacaaatctccca

SEQ ID NO: 42548 - DNA, 50 bp, synthetic construct
  source 1..50: mol_type = other DNA
ttaaaaaacgtaactcgaaaaaacgctactaaacaaaaacgaatctcccg

SEQ ID NO: 42549 - DNA, 50 bp, synthetic construct
  source 1..50: mol_type = other DNA
actcaaaaaaacactactaaacaaaaacaaatctcccaaaaacaaaatca

SEQ ID NO: 42550 - DNA, 50 bp, synthetic construct
  source 1..50: mol_type = other DNA
actcgaaaaaacgctactaaacaaaaacgaatctcccgaaaacaaaatcg

SEQ ID NO: 42551 - DNA, 50 bp, synthetic construct
  source 1..50: mol_type = other DNA
ataaaattttatatatctccaaaactatttttaactaaaacatcacatca

SEQ ID NO: 42552 - DNA, 50 bp, synthetic construct
  source 1..50: mol_type = other DNA
ataaaattttatatatctccgaaactatttttaactaaaacgtcgcgtcg

SEQ ID NO: 42553 - DNA, 50 bp, synthetic construct
  source 1..50: mol_type = other DNA
caaaaaaaacccaaataaattcaactccaacactcaaaaacacaaaatca

SEQ ID NO: 42554 - DNA, 50 bp, synthetic construct
  source 1..50: mol_type = other DNA
caaaaaaaacccaaataaattcaactccgacactcgaaaacgcaaaatcg

SEQ ID NO: 42555 - DNA, 50 bp, synthetic construct
  source 1..50: mol_type = other DNA
ccaaaccaaaatacaataacatcatctcaattttacattctcaaatatca

SEQ ID NO: 42556 - DNA, 50 bp, synthetic construct
  source 1..50: mol_type = other DNA
ccaaaccgaaatacaataacgtcatctcgattttacgttctcgaatatcg

SEQ ID NO: 42557 - DNA, 50 bp, synthetic construct
  source 1..50: mol_type = other DNA
ccaaaactccttttcataaccacataaccacaccaaaaataaaataacca

SEQ ID NO: 42558 - DNA, 50 bp, synthetic construct
  source 1..50: mol_type = other DNA
ccaaaactccttttcataaccgcataaccgcaccgaaaataaaataaccg

SEQ ID NO: 42559 - DNA, 50 bp, synthetic construct
  source 1..50: mol_type = other DNA
aaaccaaaaataaaaaatcctaaaaaataacaacaatcatcctactccca

SEQ ID NO: 42560 - DNA, 50 bp, synthetic construct
  source 1..50: mol_type = other DNA
aaaccgaaaataaaaaatcctaaaaaataacaacgatcatcctactcccg

SEQ ID NO: 42561 - DNA, 50 bp, synthetic construct
  source 1..50: mol_type = other DNA
aaaatcctaaaaaataacaacaatcatcctactcccaatacaactataca

SEQ ID NO: 42562 - DNA, 50 bp, synthetic construct
  source 1..50: mol_type = other DNA
aaaatcctaaaaaataacaacgatcatcctactcccgatacgactatacg

SEQ ID NO: 42563 - DNA, 50 bp, synthetic construct
  source 1..50: mol_type = other DNA
ccaacatttttaacaaaaattaataaaataaccctataaaaaaacctaca

SEQ ID NO: 42564 - DNA, 50 bp, synthetic construct
  source 1..50: mol_type = other DNA
ccgacgtttttaacgaaaattaataaaataaccctataaaaaaacctacg

SEQ ID NO: 42565 - DNA, 50 bp, synthetic construct
  source 1..50: mol_type = other DNA
acaaaaaaacataaccaaacaaccctataaaaaaaccaacatttttaaca

SEQ ID NO: 42566 - DNA, 50 bp, synthetic construct
  source 1..50: mol_type = other DNA
acgaaaaaacgtaaccgaacgaccctataaaaaaaccgacgtttttaacg

SEQ ID NO: 42567 - DNA, 50 bp, synthetic construct
  source 1..50: mol_type = other DNA
tataattaaaacacaaaaaaacataaccaaacaaccctataaaaaaacca

SEQ ID NO: 42568 - DNA, 50 bp, synthetic construct
  source 1..50: mol_type = other DNA
tataattaaaacacgaaaaaacgtaaccgaacgaccctataaaaaaaccg

SEQ ID NO: 42569 - DNA, 50 bp, synthetic construct
  source 1..50: mol_type = other DNA
aacataacatataactctataattaaaacacaaaaaaacataaccaaaca

SEQ ID NO: 42570 - DNA, 50 bp, synthetic construct
  source 1..50: mol_type = other DNA
gacgtaacgtataactctataattaaaacacgaaaaaacgtaaccgaacg

SEQ ID NO: 42571 - DNA, 50 bp, synthetic construct
  source 1..50: mol_type = other DNA
aactccaacaaattattcaaaatctccaatatcccacaatctaataacca

SEQ ID NO: 42572 - DNA, 50 bp, synthetic construct
  source 1..50: mol_type = other DNA
aactccaacgaattattcgaaatctccgatatcccgcgatctaataaccg

SEQ ID NO: 42573 - DNA, 50 bp, synthetic construct
  source 1..50: mol_type = other DNA
aaaaacttcataaaaaaaaactacaacaaatataacacttaataatacca

SEQ ID NO: 42574 - DNA, 50 bp, synthetic construct
  source 1..50: mol_type = other DNA
aaaaacttcataaaaaaaaactacaacgaatataacacttaataataccg

SEQ ID NO: 42575 - DNA, 50 bp, synthetic construct
  source 1..50: mol_type = other DNA
ataccctctaacacaacatacttaaccaactccccaaaaaacaacaaaca

SEQ ID NO: 42576 - DNA, 50 bp, synthetic construct
  source 1..50: mol_type = other DNA
ataccctctaacacaacgtacttaaccaactccccgaaaaacaacaaacg

SEQ ID NO: 42577 - DNA, 50 bp, synthetic construct
  source 1..50: mol_type = other DNA
ctaataactttataaaactctaatttccatattttataaaatatcactca

SEQ ID NO: 42578 - DNA, 50 bp, synthetic construct
  source 1..50: mol_type = other DNA
ctaataactttataaaactctaatttccgtattttataaaatatcactcg

SEQ ID NO: 42579 - DNA, 50 bp, synthetic construct
  source 1..50: mol_type = other DNA
aaaaaaaccattaattttacaataatatactataaaaataaactcaacca

SEQ ID NO: 42580 - DNA, 50 bp, synthetic construct
  source 1..50: mol_type = other DNA
aaaaaaaccgttaattttacgataatatactataaaaataaactcaaccg

SEQ ID NO: 42581 - DNA, 50 bp, synthetic construct
  source 1..50: mol_type = other DNA
caaaacacaccaaacacaaaacaatcacaaccataaacataatatacaca

SEQ ID NO: 42582 - DNA, 50 bp, synthetic construct
  source 1..50: mol_type = other DNA
cgaaacacgccaaacgcaaaacaatcacaaccataaacgtaatatacgcg

SEQ ID NO: 42583 - DNA, 50 bp, synthetic construct
  source 1..50: mol_type = other DNA
cacaaaacacaccaaacacaaaacaatcacaaccataaacataatataca

SEQ ID NO: 42584 - DNA, 50 bp, synthetic construct
  source 1..50: mol_type = other DNA
cacgaaacacgccaaacgcaaaacaatcacaaccataaacgtaatatacg

SEQ ID NO: 42585 - DNA, 50 bp, synthetic construct
  source 1..50: mol_type = other DNA
tatcacctacacaaaacacaccaaacacaaaacaatcacaaccataaaca

SEQ ID NO: 42586 - DNA, 50 bp, synthetic construct
  source 1..50: mol_type = other DNA
tatcacctacacgaaacacgccaaacgcaaaacaatcacaaccataaacg

SEQ ID NO: 42587 - DNA, 50 bp, synthetic construct
  source 1..50: mol_type = other DNA
ctaaaaaatataatccacaatactatcacctacacaaaacacaccaaaca

SEQ ID NO: 42588 - DNA, 50 bp, synthetic construct
  source 1..50: mol_type = other DNA
ctaaaaaatataatccgcgatactatcacctacacgaaacacgccaaacg

SEQ ID NO: 42589 - DNA, 50 bp, synthetic construct
  source 1..50: mol_type = other DNA
actataactatcttacatttaacatattccatataaataacaacatcaca

SEQ ID NO: 42590 - DNA, 50 bp, synthetic construct
  source 1..50: mol_type = other DNA
actataactatcttacgtttaacgtattccgtataaataacaacatcgcg

SEQ ID NO: 42591 - DNA, 50 bp, synthetic construct
  source 1..50: mol_type = other DNA
ataacaacatcacaaattacattttccaaaaaaactttcaacactccaca

SEQ ID NO: 42592 - DNA, 50 bp, synthetic construct
  source 1..50: mol_type = other DNA
ataacaacatcgcgaattacattttccaaaaaaactttcaacactccgcg

SEQ ID NO: 42593 - DNA, 50 bp, synthetic construct
  source 1..50: mol_type = other DNA
acactccacaaatttcctcataaataaaaccaaaaatacacttaacacca

SEQ ID NO: 42594 - DNA, 50 bp, synthetic construct
  source 1..50: mol_type = other DNA
acactccgcgaatttcctcataaataaaaccaaaaatacgcttaacgccg

SEQ ID NO: 42595 - DNA, 50 bp, synthetic construct
  source 1..50: mol_type = other DNA
aaaatattacataacaatatccaaaaaatcaccaaacccactatccacca

SEQ ID NO: 42596 - DNA, 50 bp, synthetic construct
  source 1..50: mol_type = other DNA
aaaatattacgtaacaatatccaaaaaatcaccaaacccgctatccgccg

SEQ ID NO: 42597 - DNA, 50 bp, synthetic construct
  source 1..50: mol_type = other DNA
ttacaaatttaacaactataatttcaaaatatctaaccacaataaaaaca

SEQ ID NO: 42598 - DNA, 50 bp, synthetic construct
  source 1..50: mol_type = other DNA
ttacaaatttaacaactataatttcaaaatatctaaccgcgataaaaacg

SEQ ID NO: 42599 - DNA, 50 bp, synthetic construct
  source 1..50: mol_type = other DNA
catattacattacaaatttaacaactataatttcaaaatatctaaccaca

SEQ ID NO: 42600 - DNA, 50 bp, synthetic construct
  source 1..50: mol_type = other DNA
cgtattacgttacaaatttaacaactataatttcaaaatatctaaccgcg

SEQ ID NO: 42601 - DNA, 50 bp, synthetic construct
  source 1..50: mol_type = other DNA
ataaaatcacacaaaacttcaaaactaatctacattttcaaaactcaaca

SEQ ID NO: 42602 - DNA, 50 bp, synthetic construct
  source 1..50: mol_type = other DNA
gtaaaatcgcgcaaaacttcaaaactaatctacgttttcaaaactcgacg

SEQ ID NO: 42603 - DNA, 50 bp, synthetic construct
  source 1..50: mol_type = other DNA
tccataaaatcacacaaaacttcaaaactaatctacattttcaaaactca

SEQ ID NO: 42604 - DNA, 50 bp, synthetic construct
  source 1..50: mol_type = other DNA
tccgtaaaatcgcgcaaaacttcaaaactaatctacgttttcaaaactcg

SEQ ID NO: 42605 - DNA, 50 bp, synthetic construct
  source 1..50: mol_type = other DNA
acaatttacaaatcaacaactcaatcaacttctaataacaacaaatctca

SEQ ID NO: 42606 - DNA, 50 bp, synthetic construct
  source 1..50: mol_type = other DNA
acaatttacgaatcaacaactcgatcgacttctaataacgacgaatctcg

SEQ ID NO: 42607 - DNA, 50 bp, synthetic construct
  source 1..50: mol_type = other DNA
aatttacaaatcaacaactcaatcaacttctaataacaacaaatctcaca

SEQ ID NO: 42608 - DNA, 50 bp, synthetic construct
  source 1..50: mol_type = other DNA
aatttacgaatcaacaactcgatcgacttctaataacgacgaatctcgcg

SEQ ID NO: 42609 - DNA, 50 bp, synthetic construct
  source 1..50: mol_type = other DNA
ccaataactaaaacactctttcaaacaaccttaataaccaactacttaca

SEQ ID NO: 42610 - DNA, 50 bp, synthetic construct
  source 1..50: mol_type = other DNA
ccgataactaaaacgctctttcgaacaaccttaataaccaactacttacg

SEQ ID NO: 42611 - DNA, 50 bp, synthetic construct
  source 1..50: mol_type = other DNA
actttcattttttcatcatttaacaaaatttaaaaattcacaataactca

SEQ ID NO: 42612 - DNA, 50 bp, synthetic construct
  source 1..50: mol_type = other DNA
actttcgttttttcgtcatttaacaaaatttaaaaattcgcaataactcg

SEQ ID NO: 42613 - DNA, 50 bp, synthetic construct
  source 1..50: mol_type = other DNA
ctaaaccctactaaataacaaaaaaacaaaaatctaacctttcataccca

SEQ ID NO: 42614 - DNA, 50 bp, synthetic construct
  source 1..50: mol_type = other DNA
ctaaaccctactaaataacgaaaaaacgaaaatctaacctttcgtacccg

SEQ ID NO: 42615 - DNA, 50 bp, synthetic construct
  source 1..50: mol_type = other DNA
aactcctcatcattacaaataaccaactacaaatatcaaaaaataataca

SEQ ID NO: 42616 - DNA, 50 bp, synthetic construct
  source 1..50: mol_type = other DNA
aactcctcgtcgttacgaataaccaactacaaatatcgaaaaataatacg

SEQ ID NO: 42617 - DNA, 50 bp, synthetic construct
  source 1..50: mol_type = other DNA
ataaccaactacaaatatcaaaaaataatacaaatcttcttattatcaca

SEQ ID NO: 42618 - DNA, 50 bp, synthetic construct
  source 1..50: mol_type = other DNA
ataaccaactacaaatatcgaaaaataatacgaatcttcttattatcgcg

SEQ ID NO: 42619 - DNA, 50 bp, synthetic construct
  source 1..50: mol_type = other DNA
actacaaatatcaaaaaataatacaaatcttcttattatcacaaacaaca

SEQ ID NO: 42620 - DNA, 50 bp, synthetic construct
  source 1..50: mol_type = other DNA
actacaaatatcgaaaaataatacgaatcttcttattatcgcgaacgacg

SEQ ID NO: 42621 - DNA, 50 bp, synthetic construct
  source 1..50: mol_type = other DNA
atatcaaaaaataatacaaatcttcttattatcacaaacaacattaccca

SEQ ID NO: 42622 - DNA, 50 bp, synthetic construct
  source 1..50: mol_type = other DNA
atatcgaaaaataatacgaatcttcttattatcgcgaacgacgttacccg

SEQ ID NO: 42623 - DNA, 50 bp, synthetic construct
  source 1..50: mol_type = other DNA
tacccttacaaaacaaacaatatacacaacccacaaaaaactaaaatcca

SEQ ID NO: 42624 - DNA, 50 bp, synthetic construct
  source 1..50: mol_type = other DNA
tacccttacgaaacaaacgatatacgcgacccacaaaaaactaaaatccg

SEQ ID NO: 42625 - DNA, 50 bp, synthetic construct
  source 1..50: mol_type = other DNA
ttacaaaacaaacaatatacacaacccacaaaaaactaaaatccaaccca

SEQ ID NO: 42626 - DNA, 50 bp, synthetic construct
  source 1..50: mol_type = other DNA
ttacgaaacaaacgatatacgcgacccacaaaaaactaaaatccgacccg

SEQ ID NO: 42627 - DNA, 50 bp, synthetic construct
  source 1..50: mol_type = other DNA
acaacaaacaaaacaaaaaaacccaaactaaaactaaaacccactcttca

SEQ ID NO: 42628 - DNA, 50 bp, synthetic construct
  source 1..50: mol_type = other DNA
gcgacaaacaaaacgaaaaaacccgaactaaaactaaaacccgctcttcg

SEQ ID NO: 42629 - DNA, 50 bp, synthetic construct
  source 1..50: mol_type = other DNA
tccaaacacaacaaacaaaacaaaaaaacccaaactaaaactaaaaccca

SEQ ID NO: 42630 - DNA, 50 bp, synthetic construct
  source 1..50: mol_type = other DNA
tccgaacgcgacaaacaaaacgaaaaaacccgaactaaaactaaaacccg

SEQ ID NO: 42631 - DNA, 50 bp, synthetic construct
  source 1..50: mol_type = other DNA
ctaaacctactaaatccactcctactccaaaaaaaaactccaaaaaaaca

SEQ ID NO: 42632 - DNA, 50 bp, synthetic construct
  source 1..50: mol_type = other DNA
ctaaacctactaaatccgctcctactccaaaaaaaaactccaaaaaaacg

SEQ ID NO: 42633 - DNA, 50 bp, synthetic construct
  source 1..50: mol_type = other DNA
aatccactcctactccaaaaaaaaactccaaaaaaacaataaccaaaaca

SEQ ID NO: 42634 - DNA, 50 bp, synthetic construct
  source 1..50: mol_type = other DNA
aatccgctcctactccaaaaaaaaactccaaaaaaacgataaccaaaacg

SEQ ID NO: 42635 - DNA, 50 bp, synthetic construct
  source 1..50: mol_type = other DNA
tagtattttgtatatgtatatggaatagttttttttgtggttatgtttgt

SEQ ID NO: 42636 - DNA, 50 bp, synthetic construct
  source 1..50: mol_type = other DNA
tagtattttgtatacgtatacggaatagttttttttgcggttacgtttgc

SEQ ID NO: 42637 - DNA, 50 bp, synthetic construct
  source 1..50: mol_type = other DNA
tccaaaaccataaacatcataaactccttcatcaacaatatcttcaaaca

SEQ ID NO: 42638 - DNA, 50 bp, synthetic construct
  source 1..50: mol_type = other DNA
tccaaaaccataaacatcataaactccttcgtcaacgatatcttcgaacg

SEQ ID NO: 42639 - DNA, 50 bp, synthetic construct
  source 1..50: mol_type = other DNA
taaatctccctaaaaataataataaaacacttattataatacaccaaaca

SEQ ID NO: 42640 - DNA, 50 bp, synthetic construct
  source 1..50: mol_type = other DNA
taaatctccctaaaaataataataaaacgcttattataatacgccaaacg

SEQ ID NO: 42641 - DNA, 50 bp, synthetic construct
  source 1..50: mol_type = other DNA
actacccaaaaaactaactaaacacaccatatcaaaaaacaccaaaacca

SEQ ID NO: 42642 - DNA, 50 bp, synthetic construct
  source 1..50: mol_type = other DNA
actacccgaaaaactaactaaacacgccgtatcaaaaaacaccaaaaccg

SEQ ID NO: 42643 - DNA, 50 bp, synthetic construct
  source 1..50: mol_type = other DNA
aatattcttatataccaaaaattcaaacctaaataaaaactaaaaacaca

SEQ ID NO: 42644 - DNA, 50 bp, synthetic construct
  source 1..50: mol_type = other DNA
aatattcttatataccgaaaattcgaacctaaataaaaactaaaaacgcg

SEQ ID NO: 42645 - DNA, 50 bp, synthetic construct
  source 1..50: mol_type = other DNA
tataaaaatactaccatcacttatttttcaaatttttacaactattttca

SEQ ID NO: 42646 - DNA, 50 bp, synthetic construct
  source 1..50: mol_type = other DNA
tataaaaatactaccgtcgcttatttttcaaatttttacgactattttcg

SEQ ID NO: 42647 - DNA, 50 bp, synthetic construct
  source 1..50: mol_type = other DNA
tttcaaatttttacaactattttcattaatatattaatcatatctaatca

SEQ ID NO: 42648 - DNA, 50 bp, synthetic construct
  source 1..50: mol_type = other DNA
tttcaaatttttacgactattttcgttaatatattaatcatatctaatcg

SEQ ID NO: 42649 - DNA, 50 bp, synthetic construct
  source 1..50: mol_type = other DNA
tacaactattttcattaatatattaatcatatctaatcacaacaaaaaca

SEQ ID NO: 42650 - DNA, 50 bp, synthetic construct
  source 1..50: mol_type = other DNA
tacgactattttcgttaatatattaatcatatctaatcgcgacaaaaacg

SEQ ID NO: 42651 - DNA, 50 bp, synthetic construct
  source 1..50: mol_type = other DNA
cataaaatcctacaaaataacatccaaaacattaccaaacctaccatcca

SEQ ID NO: 42652 - DNA, 50 bp, synthetic construct
  source 1..50: mol_type = other DNA
cgtaaaatcctacgaaataacatccaaaacattaccaaacctaccatccg

SEQ ID NO: 42653 - DNA, 50 bp, synthetic construct
  source 1..50: mol_type = other DNA
aacaccttcaaaaccccacaaatctcctcataaataaaaccaaaaataca

SEQ ID NO: 42654 - DNA, 50 bp, synthetic construct
  source 1..50: mol_type = other DNA
aacaccttcaaaaccccgcgaatctcctcgtaaataaaaccaaaaatacg

SEQ ID NO: 42655 - DNA, 50 bp, synthetic construct
  source 1..50: mol_type = other DNA
catcacaaaaatatcaaacacatttctaatctcatctacaaaaaaactca

SEQ ID NO: 42656 - DNA, 50 bp, synthetic construct
  source 1..50: mol_type = other DNA
cgtcgcgaaaatatcaaacgcatttctaatctcatctacgaaaaaactcg

SEQ ID NO: 42657 - DNA, 50 bp, synthetic construct
  source 1..50: mol_type = other DNA
aaatcacaacatcacaaatcacattttccaaaaacaccttcaaaacccca

SEQ ID NO: 42658 - DNA, 50 bp, synthetic construct
  source 1..50: mol_type = other DNA
aaatcacaacatcacgaatcacgttttccaaaaacaccttcaaaaccccg

SEQ ID NO: 42659 - DNA, 50 bp, synthetic construct
  source 1..50: mol_type = other DNA
ttctaaaaatatttctaaaaaacataattcataatactataacttacaca

SEQ ID NO: 42660 - DNA, 50 bp, synthetic construct
  source 1..50: mol_type = other DNA
ttctaaaaatatttctaaaaaacgtaattcgtaatactataacttacacg

SEQ ID NO: 42661 - DNA, 50 bp, synthetic construct
  source 1..50: mol_type = other DNA
ctaaaaaacataattcataatactataacttacacaaaacacaccaaaca

SEQ ID NO: 42662 - DNA, 50 bp, synthetic construct
  source 1..50: mol_type = other DNA
ctaaaaaacgtaattcgtaatactataacttacacgaaacacgccaaacg

SEQ ID NO: 42663 - DNA, 50 bp, synthetic construct
  source 1..50: mol_type = other DNA
aacatactcaaaataaaaacataaaccactatacccaacccaaacttaca

SEQ ID NO: 42664 - DNA, 50 bp, synthetic construct
  source 1..50: mol_type = other DNA
aacgtactcgaaataaaaacataaaccactatacccaacccaaacttacg

SEQ ID NO: 42665 - DNA, 50 bp, synthetic construct
  source 1..50: mol_type = other DNA
taataacaaccttaataccttcaaacactacatacttaaccaactctcca

SEQ ID NO: 42666 - DNA, 50 bp, synthetic construct
  source 1..50: mol_type = other DNA
taataacaaccttaataccttcgaacactacgtacttaaccaactctccg

SEQ ID NO: 42667 - DNA, 50 bp, synthetic construct
  source 1..50: mol_type = other DNA
ataccttcaaacactacatacttaaccaactctccaaaaaacaacaaaca

SEQ ID NO: 42668 - DNA, 50 bp, synthetic construct
  source 1..50: mol_type = other DNA
ataccttcgaacactacgtacttaaccaactctccgaaaaacaacaaacg

SEQ ID NO: 42669 - DNA, 50 bp, synthetic construct
  source 1..50: mol_type = other DNA
aaaaaacaacaaacacacaacaatctaaatctccctaaaaataataatca

SEQ ID NO: 42670 - DNA, 50 bp, synthetic construct
  source 1..50: mol_type = other DNA
gaaaaacaacaaacgcacgacgatctaaatctccctaaaaataataatcg

SEQ ID NO: 42671 - DNA, 50 bp, synthetic construct
  source 1..50: mol_type = other DNA
aacaacaaacacacaacaatctaaatctccctaaaaataataatcaaaca

SEQ ID NO: 42672 - DNA, 50 bp, synthetic construct
  source 1..50: mol_type = other DNA
aacaacaaacgcacgacgatctaaatctccctaaaaataataatcgaacg

SEQ ID NO: 42673 - DNA, 50 bp, synthetic construct
  source 1..50: mol_type = other DNA
aaacatcataaattccttcattaacaacatcttcaaacacatcacaaaca

SEQ ID NO: 42674 - DNA, 50 bp, synthetic construct
  source 1..50: mol_type = other DNA
aaacatcataaattccttcgttaacgacatcttcgaacgcatcgcaaacg

SEQ ID NO: 42675 - DNA, 50 bp, synthetic construct
  source 1..50: mol_type = other DNA
aaccataaacatcataaattccttcattaacaacatcttcaaacacatca

SEQ ID NO: 42676 - DNA, 50 bp, synthetic construct
  source 1..50: mol_type = other DNA
aaccataaacatcataaattccttcgttaacgacatcttcgaacgcatcg

SEQ ID NO: 42677 - DNA, 50 bp, synthetic construct
  source 1..50: mol_type = other DNA
tataataaaccaaacaaaaaacctcacctacaatacattcaaaaatatca

SEQ ID NO: 42678 - DNA, 50 bp, synthetic construct
  source 1..50: mol_type = other DNA
tataataaaccaaacgaaaaacctcgcctacgatacgttcgaaaatatcg

SEQ ID NO: 42679 - DNA, 50 bp, synthetic construct
  source 1..50: mol_type = other DNA
tagtattttgtatatatatatggagtagttttttttatgattgtgtttgt

SEQ ID NO: 42680 - DNA, 50 bp, synthetic construct
  source 1..50: mol_type = other DNA
tagtattttgtatatatatacggagtagttttttttacgattgcgtttgc

SEQ ID NO: 42681 - DNA, 50 bp, synthetic construct
  source 1..50: mol_type = other DNA
actaaaaactaaaaaccaaccctaaaaaaacacattttaacttttaccca

SEQ ID NO: 42682 - DNA, 50 bp, synthetic construct
  source 1..50: mol_type = other DNA
actaaaaactaaaaaccgaccctaaaaaaacgcgttttaacttttacccg

SEQ ID NO: 42683 - DNA, 50 bp, synthetic construct
  source 1..50: mol_type = other DNA
acaatacacacaaccaactaaaaactaaaaaccaaccctaaaaaaacaca

SEQ ID NO: 42684 - DNA, 50 bp, synthetic construct
  source 1..50: mol_type = other DNA
acgatacacacgaccaactaaaaactaaaaaccgaccctaaaaaaacgcg

SEQ ID NO: 42685 - DNA, 50 bp, synthetic construct
  source 1..50: mol_type = other DNA
aaacaatacacacaaccaactaaaaactaaaaaccaaccctaaaaaaaca

SEQ ID NO: 42686 - DNA, 50 bp, synthetic construct
  source 1..50: mol_type = other DNA
aaacgatacacacgaccaactaaaaactaaaaaccgaccctaaaaaaacg

SEQ ID NO: 42687 - DNA, 50 bp, synthetic construct
  source 1..50: mol_type = other DNA
acaaaacaacaaaactcaaacaaaaactaaaacacattcttccaaaacca

SEQ ID NO: 42688 - DNA, 50 bp, synthetic construct
  source 1..50: mol_type = other DNA
acaaaacgacaaaactcgaacaaaaactaaaacgcgttcttccaaaaccg

SEQ ID NO: 42689 - DNA, 50 bp, synthetic construct
  source 1..50: mol_type = other DNA
acacattcttccaaaaccaatcttcaatttccaattaaccatatacacca

SEQ ID NO: 42690 - DNA, 50 bp, synthetic construct
  source 1..50: mol_type = other DNA
acgcgttcttccaaaaccgatcttcaatttccaattaaccgtatacaccg

SEQ ID NO: 42691 - DNA, 50 bp, synthetic construct
  source 1..50: mol_type = other DNA
aaatctcaaccatcaaatattccaacaccactaccaaatacactaaaaca

SEQ ID NO: 42692 - DNA, 50 bp, synthetic construct
  source 1..50: mol_type = other DNA
aaatctcgaccgtcaaatattccaacaccgctaccaaatacactaaaacg

SEQ ID NO: 42693 - DNA, 50 bp, synthetic construct
  source 1..50: mol_type = other DNA
tcaaaaccaacactccaatatacctaacaacaatactaaaatatctaaca

SEQ ID NO: 42694 - DNA, 50 bp, synthetic construct
  source 1..50: mol_type = other DNA
tcgaaaccgacgctccaatatacctaacaacgatactaaaatatctaacg

SEQ ID NO: 42695 - DNA, 50 bp, synthetic construct
  source 1..50: mol_type = other DNA
aaccaacactccaatatacctaacaacaatactaaaatatctaacaacca

SEQ ID NO: 42696 - DNA, 50 bp, synthetic construct
  source 1..50: mol_type = other DNA
aaccgacgctccaatatacctaacaacgatactaaaatatctaacgaccg

SEQ ID NO: 42697 - DNA, 50 bp, synthetic construct
  source 1..50: mol_type = other DNA
taactacaaataacacaaaataatacaaatcttcttattatcacaaacca

SEQ ID NO: 42698 - DNA, 50 bp, synthetic construct
  source 1..50: mol_type = other DNA
taactacaaataacgcgaaataatacgaatcttcttattatcgcgaaccg

SEQ ID NO: 42699 - DNA, 50 bp, synthetic construct
  source 1..50: mol_type = other DNA
aaaatcttaaaactaactaacaacacaactcacaacaataaaaaaaccca

SEQ ID NO: 42700 - DNA, 50 bp, synthetic construct
  source 1..50: mol_type = other DNA
gaaatcttaaaactaactaacaacgcgactcgcgacaataaaaaaacccg

SEQ ID NO: 42701 - DNA, 50 bp, synthetic construct
  source 1..50: mol_type = other DNA
aaacttatttaactcctcatcattacaaataactaactacaaataacaca

SEQ ID NO: 42702 - DNA, 50 bp, synthetic construct
  source 1..50: mol_type = other DNA
aaacttatttaactcctcgtcgttacgaataactaactacaaataacgcg

SEQ ID NO: 42703 - DNA, 50 bp, synthetic construct
  source 1..50: mol_type = other DNA
acaactaaccatccacaacaacaaaaaactaaataaacttctaaatcaca

SEQ ID NO: 42704 - DNA, 50 bp, synthetic construct
  source 1..50: mol_type = other DNA
acaactaaccatccgcaacgacgaaaaactaaataaacttctaaatcgcg

SEQ ID NO: 42705 - DNA, 50 bp, synthetic construct
  source 1..50: mol_type = other DNA
tacaacaaacacacacacacactatccctctctaaaatatttataataca

SEQ ID NO: 42706 - DNA, 50 bp, synthetic construct
  source 1..50: mol_type = other DNA
tacaacgaacacgcacgcgcactatccctctctaaaatatttataatacg

SEQ ID NO: 42707 - DNA, 50 bp, synthetic construct
  source 1..50: mol_type = other DNA
taaactaatctattatcctatttaactataaaaaatcaaatatatttaca

SEQ ID NO: 42708 - DNA, 50 bp, synthetic construct
  source 1..50: mol_type = other DNA
taaactaatctattatcctatttaactataaaaaatcgaatatatttacg

SEQ ID NO: 42709 - DNA, 50 bp, synthetic construct
  source 1..50: mol_type = other DNA
caaataaactataacacatactaaacaaacaactcataaatccacaaaca

SEQ ID NO: 42710 - DNA, 50 bp, synthetic construct
  source 1..50: mol_type = other DNA
caaataaactataacgcgtactaaacaaacgactcgtaaatccacaaacg

SEQ ID NO: 42711 - DNA, 50 bp, synthetic construct
  source 1..50: mol_type = other DNA
taacacatactaaacaaacaactcataaatccacaaacaataaaacacca

SEQ ID NO: 42712 - DNA, 50 bp, synthetic construct
  source 1..50: mol_type = other DNA
taacgcgtactaaacaaacgactcgtaaatccacaaacgataaaacaccg

SEQ ID NO: 42713 - DNA, 50 bp, synthetic construct
  source 1..50: mol_type = other DNA
cccataaccaaaacactcttacaaactaccttaataaccaactatttaca

SEQ ID NO: 42714 - DNA, 50 bp, synthetic construct
  source 1..50: mol_type = other DNA
cccgtaaccgaaacgctcttacgaactaccttaataaccaactatttacg

SEQ ID NO: 42715 - DNA, 50 bp, synthetic construct
  source 1..50: mol_type = other DNA
tctcacacaaaaccacaataccaaaacaataacaataaaacttcttcaca

SEQ ID NO: 42716 - DNA, 50 bp, synthetic construct
  source 1..50: mol_type = other DNA
tctcgcgcaaaaccacgataccaaaacgataacgataaaacttcttcacg

SEQ ID NO: 42717 - DNA, 50 bp, synthetic construct
  source 1..50: mol_type = other DNA
ataaacttctaataacaacaaatctcacacaaaaccacaataccaaaaca

SEQ ID NO: 42718 - DNA, 50 bp, synthetic construct
  source 1..50: mol_type = other DNA
ataaacttctaataacgacgaatctcgcgcaaaaccacgataccaaaacg

SEQ ID NO: 42719 - DNA, 50 bp, synthetic construct
  source 1..50: mol_type = other DNA
aacttccaaattaaaaactcaataaacttctaataacaacaaatctcaca

SEQ ID NO: 42720 - DNA, 50 bp, synthetic construct
  source 1..50: mol_type = other DNA
aacttccgaattaaaaactcgataaacttctaataacgacgaatctcgcg

SEQ ID NO: 42721 - DNA, 50 bp, synthetic construct
  source 1..50: mol_type = other DNA
acaacttccaaattaaaaactcaataaacttctaataacaacaaatctca

SEQ ID NO: 42722 - DNA, 50 bp, synthetic construct
  source 1..50: mol_type = other DNA
acaacttccgaattaaaaactcgataaacttctaataacgacgaatctcg

SEQ ID NO: 42723 - DNA, 50 bp, synthetic construct
  source 1..50: mol_type = other DNA
ctatttctcacaccaaacactaaaacaacaacttccaaattaaaaactca

SEQ ID NO: 42724 - DNA, 50 bp, synthetic construct
  source 1..50: mol_type = other DNA
ctatttctcgcaccaaacgctaaaacgacaacttccgaattaaaaactcg

SEQ ID NO: 42725 - DNA, 50 bp, synthetic construct
  source 1..50: mol_type = other DNA
ttaaaatcctaaactatttctcacaccaaacactaaaacaacaacttcca

SEQ ID NO: 42726 - DNA, 50 bp, synthetic construct
  source 1..50: mol_type = other DNA
ttaaaatcctaaactatttctcgcaccaaacgctaaaacgacaacttccg

SEQ ID NO: 42727 - DNA, 50 bp, synthetic construct
  source 1..50: mol_type = other DNA
caaatcaatcttaaaatcctaaactatttctcacaccaaacactaaaaca

SEQ ID NO: 42728 - DNA, 50 bp, synthetic construct
  source 1..50: mol_type = other DNA
caaatcgatcttaaaatcctaaactatttctcgcaccaaacgctaaaacg

SEQ ID NO: 42729 - DNA, 50 bp, synthetic construct
  source 1..50: mol_type = other DNA
aatatcaaacacacaaaaaataacattaaccacacccaaaacaccaacca

SEQ ID NO: 42730 - DNA, 50 bp, synthetic construct
  source 1..50: mol_type = other DNA
aatatcaaacgcacaaaaaataacgttaaccgcacccaaaacaccgaccg

SEQ ID NO: 42731 - DNA, 50 bp, synthetic construct
  source 1..50: mol_type = other DNA
tcaccaatcaaattacaatattaacaattatatatactaaaacataatca

SEQ ID NO: 42732 - DNA, 50 bp, synthetic construct
  source 1..50: mol_type = other DNA
tcaccaatcaaattacgatattaacaattatatatactaaaacgtaatcg

SEQ ID NO: 42733 - DNA, 50 bp, synthetic construct
  source 1..50: mol_type = other DNA
agaattttatttgagggggaggtggaaaaaaaaataggttttttgattat

SEQ ID NO: 42734 - DNA, 50 bp, synthetic construct
  source 1..50: mol_type = other DNA
agaattttatttgagggggaggtggaaaaaaaaataggtttttcgattac

SEQ ID NO: 42735 - DNA, 50 bp, synthetic construct
  source 1..50: mol_type = other DNA
atttacaaaaaacacaatatattaaccctactaacaactataaacccaca

SEQ ID NO: 42736 - DNA, 50 bp, synthetic construct
  source 1..50: mol_type = other DNA
atttacgaaaaacgcgatatattaaccctactaacaactataaacccgcg

SEQ ID NO: 42737 - DNA, 50 bp, synthetic construct
  source 1..50: mol_type = other DNA
cctactttaccacacaaacctacaattaccaataaaactaatacaccaca

SEQ ID NO: 42738 - DNA, 50 bp, synthetic construct
  source 1..50: mol_type = other DNA
cctactttaccacgcgaacctacaattaccaataaaactaatacaccgcg

SEQ ID NO: 42739 - DNA, 50 bp, synthetic construct
  source 1..50: mol_type = other DNA
atcctaattataaacaatacataacatacccaaaatacttccaacccaca

SEQ ID NO: 42740 - DNA, 50 bp, synthetic construct
  source 1..50: mol_type = other DNA
gtcctaattataaacaatacgtaacatacccaaaatacttccgacccacg

SEQ ID NO: 42741 - DNA, 50 bp, synthetic construct
  source 1..50: mol_type = other DNA
tcaaattcccacaataatatataattaaccaaccaatttctattaaaaca

SEQ ID NO: 42742 - DNA, 50 bp, synthetic construct
  source 1..50: mol_type = other DNA
tcaaattcccgcgataatatataattaaccgaccgatttctattaaaacg

SEQ ID NO: 42743 - DNA, 50 bp, synthetic construct
  source 1..50: mol_type = other DNA
taaataactctaaaaaaaaccatttaaaattttcaaaaaaaaacatccca

SEQ ID NO: 42744 - DNA, 50 bp, synthetic construct
  source 1..50: mol_type = other DNA
taaataactctaaaaaaaaccgtttaaaattttcaaaaaaaaacgtcccg

SEQ ID NO: 42745 - DNA, 50 bp, synthetic construct
  source 1..50: mol_type = other DNA
catttaaaattttcaaaaaaaaacatcccaccaatttcactttttcttca

SEQ ID NO: 42746 - DNA, 50 bp, synthetic construct
  source 1..50: mol_type = other DNA
cgtttaaaattttcaaaaaaaaacgtcccgccaatttcactttttcttcg

SEQ ID NO: 42747 - DNA, 50 bp, synthetic construct
  source 1..50: mol_type = other DNA
atccaactaaaaccaaaacccctaaacccaaaacaaccaaacctaaatca

SEQ ID NO: 42748 - DNA, 50 bp, synthetic construct
  source 1..50: mol_type = other DNA
atccaactaaaaccaaaacccctaaacccaaaacgaccaaacctaaatcg

SEQ ID NO: 42749 - DNA, 50 bp, synthetic construct
  source 1..50: mol_type = other DNA
aaatttatataaaaaaacactaaataataattaattccttactccataca

SEQ ID NO: 42750 - DNA, 50 bp, synthetic construct
  source 1..50: mol_type = other DNA
aaatttatataaaaaaacgctaaataataattaattccttactccatacg

SEQ ID NO: 42751 - DNA, 50 bp, synthetic construct
  source 1..50: mol_type = other DNA
tcataataccctatatattatcacacaacactttacaataacacttaaca

SEQ ID NO: 42752 - DNA, 50 bp, synthetic construct
  source 1..50: mol_type = other DNA
tcgtaataccctatatattatcacgcaacactttacgataacgcttaacg

SEQ ID NO: 42753 - DNA, 50 bp, synthetic construct
  source 1..50: mol_type = other DNA
acaaacttcataataccctatatattatcacacaacactttacaataaca

SEQ ID NO: 42754 - DNA, 50 bp, synthetic construct
  source 1..50: mol_type = other DNA
acgaacttcgtaataccctatatattatcacgcaacactttacgataacg

SEQ ID NO: 42755 - DNA, 50 bp, synthetic construct
  source 1..50: mol_type = other DNA
caaaccaaacaacaaataacaaacttcataataccctatatattatcaca

SEQ ID NO: 42756 - DNA, 50 bp, synthetic construct
  source 1..50: mol_type = other DNA
cgaaccaaacgacgaataacgaacttcgtaataccctatatattatcacg

SEQ ID NO: 42757 - DNA, 50 bp, synthetic construct
  source 1..50: mol_type = other DNA
aacaccttaaaaacaccacaaatctcctcataaataaaacccaaaataca

SEQ ID NO: 42758 - DNA, 50 bp, synthetic construct
  source 1..50: mol_type = other DNA
aacaccttaaaaacaccgcgaatctcctcataaataaaacccgaaatacg

SEQ ID NO: 42759 - DNA, 50 bp, synthetic construct
  source 1..50: mol_type = other DNA
ctccaaaaacaccttaaaaacaccacaaatctcctcataaataaaaccca

SEQ ID NO: 42760 - DNA, 50 bp, synthetic construct
  source 1..50: mol_type = other DNA
ctccaaaaacaccttaaaaacaccgcgaatctcctcataaataaaacccg

SEQ ID NO: 42761 - DNA, 50 bp, synthetic construct
  source 1..50: mol_type = other DNA
aaattacaacatcccatatcacattctccaaaaacaccttaaaaacacca

SEQ ID NO: 42762 - DNA, 50 bp, synthetic construct
  source 1..50: mol_type = other DNA
aaattacgacgtcccgtatcacattctccaaaaacaccttaaaaacaccg

SEQ ID NO: 42763 - DNA, 50 bp, synthetic construct
  source 1..50: mol_type = other DNA
acaataactatcttacacttaacatactccatataaattacaacatccca

SEQ ID NO: 42764 - DNA, 50 bp, synthetic construct
  source 1..50: mol_type = other DNA
acaataactatcttacgcttaacgtactccgtataaattacgacgtcccg

SEQ ID NO: 42765 - DNA, 50 bp, synthetic construct
  source 1..50: mol_type = other DNA
taaaaaattaaccaaacataataacacatacctataaccccaattactca

SEQ ID NO: 42766 - DNA, 50 bp, synthetic construct
  source 1..50: mol_type = other DNA
taaaaaattaaccaaacgtaataacgcatacctataaccccaattactcg

SEQ ID NO: 42767 - DNA, 50 bp, synthetic construct
  source 1..50: mol_type = other DNA
tttaattacccaaactaatctcaaactcctaaactctaataatccaccca

SEQ ID NO: 42768 - DNA, 50 bp, synthetic construct
  source 1..50: mol_type = other DNA
tttaattacccaaactaatctcgaactcctaaactctaataatccgcccg

SEQ ID NO: 42769 - DNA, 50 bp, synthetic construct
  source 1..50: mol_type = other DNA
aacaaaatttcactcttatcaaccaaaataaaatacaataacacaataca

SEQ ID NO: 42770 - DNA, 50 bp, synthetic construct
  source 1..50: mol_type = other DNA
aacgaaatttcgctcttatcaaccaaaataaaatacaataacgcaatacg

SEQ ID NO: 42771 - DNA, 50 bp, synthetic construct
  source 1..50: mol_type = other DNA
acttaaacccaaaaaacaaaaatcccaataaaccaaaatcccacattaca

SEQ ID NO: 42772 - DNA, 50 bp, synthetic construct
  source 1..50: mol_type = other DNA
gcttaaacccgaaaaacgaaaatcccaataaaccgaaatcccgcattacg

SEQ ID NO: 42773 - DNA, 50 bp, synthetic construct
  source 1..50: mol_type = other DNA
aaccaataataacaactcacaccttataatcccaatactataaaaaccca

SEQ ID NO: 42774 - DNA, 50 bp, synthetic construct
  source 1..50: mol_type = other DNA
aaccgataataacgactcacgccttataatcccaatactataaaaacccg

SEQ ID NO: 42775 - DNA, 50 bp, synthetic construct
  source 1..50: mol_type = other DNA
taatttaaattaacacacaccctcaatacaacttataccctctctccaca

SEQ ID NO: 42776 - DNA, 50 bp, synthetic construct
  source 1..50: mol_type = other DNA
taatttaaattaacgcacaccctcaatacaacttataccctctctccgcg

SEQ ID NO: 42777 - DNA, 50 bp, synthetic construct
  source 1..50: mol_type = other DNA
cacaaaacttcaaaaccaacctacacttccaaaactcaactataataaca

SEQ ID NO: 42778 - DNA, 50 bp, synthetic construct
  source 1..50: mol_type = other DNA
cgcaaaacttcaaaaccgacctacgcttccaaaactcgactataataacg

SEQ ID NO: 42779 - DNA, 50 bp, synthetic construct
  source 1..50: mol_type = other DNA
ttccaacatctaatacataaaatcacacaaaacttcaaaaccaacctaca

SEQ ID NO: 42780 - DNA, 50 bp, synthetic construct
  source 1..50: mol_type = other DNA
ttccaacgtctaatacgtaaaatcgcgcaaaacttcaaaaccgacctacg

SEQ ID NO: 42781 - DNA, 50 bp, synthetic construct
  source 1..50: mol_type = other DNA
actaccattccaacatctaatacataaaatcacacaaaacttcaaaacca

SEQ ID NO: 42782 - DNA, 50 bp, synthetic construct
  source 1..50: mol_type = other DNA
actaccattccaacgtctaatacgtaaaatcgcgcaaaacttcaaaaccg

SEQ ID NO: 42783 - DNA, 50 bp, synthetic construct
  source 1..50: mol_type = other DNA
aactactaattcacaaactaccattccaacatctaatacataaaatcaca

SEQ ID NO: 42784 - DNA, 50 bp, synthetic construct
  source 1..50: mol_type = other DNA
aactactaattcgcaaactaccattccaacgtctaatacgtaaaatcgcg

SEQ ID NO: 42785 - DNA, 50 bp, synthetic construct
  source 1..50: mol_type = other DNA
cactatcaaaaatcaactaaactactaattcacaaactaccattccaaca

SEQ ID NO: 42786 - DNA, 50 bp, synthetic construct
  source 1..50: mol_type = other DNA
cgctatcaaaaatcgactaaactactaattcgcaaactaccattccaacg

SEQ ID NO: 42787 - DNA, 50 bp, synthetic construct
  source 1..50: mol_type = other DNA
ttaaaatcctacacaatctcacataccaaacactaaaataataacttaca

SEQ ID NO: 42788 - DNA, 50 bp, synthetic construct
  source 1..50: mol_type = other DNA
ttaaaatcctacgcgatctcacgtaccaaacgctaaaataataacttacg

SEQ ID NO: 42789 - DNA, 50 bp, synthetic construct
  source 1..50: mol_type = other DNA
cactaaaataataacttacaaatcaataactcaatcaatttctaataaca

SEQ ID NO: 42790 - DNA, 50 bp, synthetic construct
  source 1..50: mol_type = other DNA
cgctaaaataataacttacgaatcaataactcaatcgatttctaataacg

SEQ ID NO: 42791 - DNA, 50 bp, synthetic construct
  source 1..50: mol_type = other DNA
taaaataataacttacaaatcaataactcaatcaatttctaataacaaca

SEQ ID NO: 42792 - DNA, 50 bp, synthetic construct
  source 1..50: mol_type = other DNA
taaaataataacttacgaatcaataactcaatcgatttctaataacgacg

SEQ ID NO: 42793 - DNA, 50 bp, synthetic construct
  source 1..50: mol_type = other DNA
aaatcaataactcaatcaatttctaataacaacaaatttcacaaaaaaca

SEQ ID NO: 42794 - DNA, 50 bp, synthetic construct
  source 1..50: mol_type = other DNA
gaatcaataactcaatcgatttctaataacgacgaatttcacgaaaaacg

SEQ ID NO: 42795 - DNA, 50 bp, synthetic construct
  source 1..50: mol_type = other DNA
ttctaataacaacaaatttcacaaaaaacaacaataccaaacctataaca

SEQ ID NO: 42796 - DNA, 50 bp, synthetic construct
  source 1..50: mol_type = other DNA
ttctaataacgacgaatttcacgaaaaacgacaataccaaacctataacg

SEQ ID NO: 42797 - DNA, 50 bp, synthetic construct
  source 1..50: mol_type = other DNA
aaaaaacaacaataccaaacctataacaataaaacttcttcacaccacca

SEQ ID NO: 42798 - DNA, 50 bp, synthetic construct
  source 1..50: mol_type = other DNA
gaaaaacgacaataccaaacctataacgataaaacttcttcacgccaccg

SEQ ID NO: 42799 - DNA, 50 bp, synthetic construct
  source 1..50: mol_type = other DNA
taccaaacctataacaataaaacttcttcacaccaccaataactaacaca

SEQ ID NO: 42800 - DNA, 50 bp, synthetic construct
  source 1..50: mol_type = other DNA
taccaaacctataacgataaaacttcttcacgccaccgataactaacgcg

SEQ ID NO: 42801 - DNA, 50 bp, synthetic construct
  source 1..50: mol_type = other DNA
aaacataaaaattcaaatatccttaaaaattccctctcacaaccaacaca

SEQ ID NO: 42802 - DNA, 50 bp, synthetic construct
  source 1..50: mol_type = other DNA
aaacataaaaattcgaatatccttaaaaattccctctcacgaccgacgcg

SEQ ID NO: 42803 - DNA, 50 bp, synthetic construct
  source 1..50: mol_type = other DNA
aattacaataaaaaaaataattcacaccaaaccaactatacaaaaaacca

SEQ ID NO: 42804 - DNA, 50 bp, synthetic construct
  source 1..50: mol_type = other DNA
aattacaataaaaaaaataattcacgccgaaccaactatacgaaaaaccg

SEQ ID NO: 42805 - DNA, 50 bp, synthetic construct
  source 1..50: mol_type = other DNA
taaaatactaaaaaaactaatttaaataacaataaaactacaatctccca

SEQ ID NO: 42806 - DNA, 50 bp, synthetic construct
  source 1..50: mol_type = other DNA
taaaatactaaaaaaactaatttaaataacaataaaactacgatctcccg

SEQ ID NO: 42807 - DNA, 50 bp, synthetic construct
  source 1..50: mol_type = other DNA
ttctcacaccaaacattaaaaaaacaacttacaaatcaacaactcaatca

SEQ ID NO: 42808 - DNA, 50 bp, synthetic construct
  source 1..50: mol_type = other DNA
ttctcgcaccaaacgttaaaaaaacaacttacgaatcaacaactcaatcg

SEQ ID NO: 42809 - DNA, 50 bp, synthetic construct
  source 1..50: mol_type = other DNA
cattaaaaaaacaacttacaaatcaacaactcaatcaacttctaataaca

SEQ ID NO: 42810 - DNA, 50 bp, synthetic construct
  source 1..50: mol_type = other DNA
cgttaaaaaaacaacttacgaatcaacaactcaatcgacttctaataacg

SEQ ID NO: 42811 - DNA, 50 bp, synthetic construct
  source 1..50: mol_type = other DNA
acaacttacaaatcaacaactcaatcaacttctaataacaacaaatctca

SEQ ID NO: 42812 - DNA, 50 bp, synthetic construct
  source 1..50: mol_type = other DNA
acaacttacgaatcaacaactcaatcgacttctaataacgacgaatctcg

SEQ ID NO: 42813 - DNA, 50 bp, synthetic construct
  source 1..50: mol_type = other DNA
aacttacaaatcaacaactcaatcaacttctaataacaacaaatctcaca

SEQ ID NO: 42814 - DNA, 50 bp, synthetic construct
  source 1..50: mol_type = other DNA
aacttacgaatcaacaactcaatcgacttctaataacgacgaatctcgcg

SEQ ID NO: 42815 - DNA, 50 bp, synthetic construct
  source 1..50: mol_type = other DNA
tctcacacaaaaccacaataccaaaacaataacaataaaatttcttcaca

SEQ ID NO: 42816 - DNA, 50 bp, synthetic construct
  source 1..50: mol_type = other DNA
tctcgcgcaaaaccacgataccgaaacgataacgataaaatttcttcacg

SEQ ID NO: 42817 - DNA, 50 bp, synthetic construct
  source 1..50: mol_type = other DNA
caccctacacaataataactttacccaacaacttattaaacttctcatca

SEQ ID NO: 42818 - DNA, 50 bp, synthetic construct
  source 1..50: mol_type = other DNA
cgccctacgcgataataactttacccaacaacttattaaacttctcgtcg

SEQ ID NO: 42819 - DNA, 50 bp, synthetic construct
  source 1..50: mol_type = other DNA
cccaacaacttattaaacttctcatcataaataacaaactacaaacatca

SEQ ID NO: 42820 - DNA, 50 bp, synthetic construct
  source 1..50: mol_type = other DNA
cccaacaacttattaaacttctcgtcgtaaataacgaactacaaacgtcg

SEQ ID NO: 42821 - DNA, 50 bp, synthetic construct
  source 1..50: mol_type = other DNA
tattaaacttctcatcataaataacaaactacaaacatcaaaaaataaca

SEQ ID NO: 42822 - DNA, 50 bp, synthetic construct
  source 1..50: mol_type = other DNA
tattaaacttctcgtcgtaaataacgaactacaaacgtcgaaaaataacg

SEQ ID NO: 42823 - DNA, 50 bp, synthetic construct
  source 1..50: mol_type = other DNA
ttaaacttctcatcataaataacaaactacaaacatcaaaaaataacaca

SEQ ID NO: 42824 - DNA, 50 bp, synthetic construct
  source 1..50: mol_type = other DNA
ttaaacttctcgtcgtaaataacgaactacaaacgtcgaaaaataacgcg

SEQ ID NO: 42825 - DNA, 50 bp, synthetic construct
  source 1..50: mol_type = other DNA
taaataacaaactacaaacatcaaaaaataacacaaatcttcttatctca

SEQ ID NO: 42826 - DNA, 50 bp, synthetic construct
  source 1..50: mol_type = other DNA
taaataacgaactacaaacgtcgaaaaataacgcgaatcttcttatctcg

SEQ ID NO: 42827 - DNA, 50 bp, synthetic construct
  source 1..50: mol_type = other DNA
aacaaactacaaacatcaaaaaataacacaaatcttcttatctcaaacca

SEQ ID NO: 42828 - DNA, 50 bp, synthetic construct
  source 1..50: mol_type = other DNA
aacgaactacaaacgtcgaaaaataacgcgaatcttcttatctcgaaccg

SEQ ID NO: 42829 - DNA, 50 bp, synthetic construct
  source 1..50: mol_type = other DNA
ccaaaccaatacaccaatatacctaaaaacaatactaaaatacctaacca

SEQ ID NO: 42830 - DNA, 50 bp, synthetic construct
  source 1..50: mol_type = other DNA
ccgaaccgatacgccgatatacctaaaaacgatactaaaatacctaaccg

SEQ ID NO: 42831 - DNA, 50 bp, synthetic construct
  source 1..50: mol_type = other DNA
tccaaaactaatctccaattttctataaaccaaatacaccacctcctcca

SEQ ID NO: 42832 - DNA, 50 bp, synthetic construct
  source 1..50: mol_type = other DNA
tccaaaactaatctccaattttctataaaccgaatacaccgcctcctccg

SEQ ID NO: 42833 - DNA, 50 bp, synthetic construct
  source 1..50: mol_type = other DNA
caatatcacttcaactacaaacatacctaaaccaactaaatcaactccca

SEQ ID NO: 42834 - DNA, 50 bp, synthetic construct
  source 1..50: mol_type = other DNA
cgatatcacttcgactacgaacatacctaaaccaactaaatcaactcccg

SEQ ID NO: 42835 - DNA, 50 bp, synthetic construct
  source 1..50: mol_type = other DNA
ctaaaccaactaaatcaactcccaccccaaaaaaaaactccaaaaaaaca

SEQ ID NO: 42836 - DNA, 50 bp, synthetic construct
  source 1..50: mol_type = other DNA
ctaaaccaactaaatcaactcccgccccgaaaaaaaactccaaaaaaacg

SEQ ID NO: 42837 - DNA, 50 bp, synthetic construct
  source 1..50: mol_type = other DNA
taaacctacttcaacaccttatacacatacacaaaataactctccttaca

SEQ ID NO: 42838 - DNA, 50 bp, synthetic construct
  source 1..50: mol_type = other DNA
taaacctacttcaacaccttatacacgtacacgaaataactctccttacg

SEQ ID NO: 42839 - DNA, 50 bp, synthetic construct; identical to SEQ ID NO: 42837
  source 1..50: mol_type = other DNA

SEQ ID NO: 42840 - DNA, 50 bp, synthetic construct; identical to SEQ ID NO: 42838
  source 1..50: mol_type = other DNA

SEQ ID NO: 42841 - DNA, 50 bp, synthetic construct; identical to SEQ ID NO: 42837
  source 1..50: mol_type = other DNA

SEQ ID NO: 42842 - DNA, 50 bp, synthetic construct; identical to SEQ ID NO: 42838
  source 1..50: mol_type = other DNA

SEQ ID NO: 42843 - DNA, 50 bp, synthetic construct; identical to SEQ ID NO: 42837
  source 1..50: mol_type = other DNA

SEQ ID NO: 42844 - DNA, 50 bp, synthetic construct; identical to SEQ ID NO: 42838
  source 1..50: mol_type = other DNA

SEQ ID NO: 42845 - DNA, 50 bp, synthetic construct; identical to SEQ ID NO: 42837
  source 1..50: mol_type = other DNA

SEQ ID NO: 42846 - DNA, 50 bp, synthetic construct; identical to SEQ ID NO: 42838
  source 1..50: mol_type = other DNA

SEQ ID NO: 42847 - DNA, 50 bp, synthetic construct; identical to SEQ ID NO: 42837
  source 1..50: mol_type = other DNA

SEQ ID NO: 42848 - DNA, 50 bp, synthetic construct; identical to SEQ ID NO: 42838
  source 1..50: mol_type = other DNA

SEQ ID NO: 42849 - DNA, 50 bp, synthetic construct; identical to SEQ ID NO: 42837
  source 1..50: mol_type = other DNA

SEQ ID NO: 42850 - DNA, 50 bp, synthetic construct; identical to SEQ ID NO: 42838
  source 1..50: mol_type = other DNA

SEQ ID NO: 42851 - DNA, 50 bp, synthetic construct; identical to SEQ ID NO: 42837
  source 1..50: mol_type = other DNA

SEQ ID NO: 42852 - DNA, 50 bp, synthetic construct; identical to SEQ ID NO: 42838
  source 1..50: mol_type = other DNA

SEQ ID NO: 42853 - DNA, 50 bp, synthetic construct; identical to SEQ ID NO: 42837
  source 1..50: mol_type = other DNA

SEQ ID NO: 42854 - DNA, 50 bp, synthetic construct; identical to SEQ ID NO: 42838
  source 1..50: mol_type = other DNA

SEQ ID NO: 42855 - DNA, 50 bp, synthetic construct
  source 1..50: mol_type = other DNA
aaataccaatatcaaaataaacctacttcaacaccttatacacatacaca

SEQ ID NO: 42856 - DNA, 50 bp, synthetic construct
  source 1..50: mol_type = other DNA
aaataccgatatcgaaataaacctacttcaacaccttatacacgtacacg

SEQ ID NO: 42857 - DNA, 50 bp, synthetic construct
  source 1..50: mol_type = other DNA
aaaaattataaactccttcatcaacaacattttcaaacacattacaaaca

SEQ ID NO: 42858 - DNA, 50 bp, synthetic construct
  source 1..50: mol_type = other DNA
aaaaattataaactccttcgtcaacgacattttcgaacgcattacaaacg

SEQ ID NO: 42859 - DNA, 50 bp, synthetic construct
  source 1..50: mol_type = other DNA
aactccttcatcaacaacattttcaaacacattacaaacaaaacttccca

SEQ ID NO: 42860 - DNA, 50 bp, synthetic construct
  source 1..50: mol_type = other DNA
aactccttcgtcaacgacattttcgaacgcattacaaacgaaacttcccg

SEQ ID NO: 42861 - DNA, 50 bp, synthetic construct
  source 1..50: mol_type = other DNA
taacacattataacaaacactcaaccatcacttccaaaaaaatccaaaca

SEQ ID NO: 42862 - DNA, 50 bp, synthetic construct
  source 1..50: mol_type = other DNA
taacgcattataacaaacgctcgaccatcacttccaaaaaaatccaaacg

SEQ ID NO: 42863 - DNA, 50 bp, synthetic construct
  source 1..50: mol_type = other DNA
tataacaaacactcaaccatcacttccaaaaaaatccaaacaactataca

SEQ ID NO: 42864 - DNA, 50 bp, synthetic construct
  source 1..50: mol_type = other DNA
tataacaaacgctcgaccatcacttccaaaaaaatccaaacgactatacg

SEQ ID NO: 42865 - DNA, 50 bp, synthetic construct
  source 1..50: mol_type = other DNA
aaatataatctacacactaaaacaacaaaaacacactctttacaacttca

SEQ ID NO: 42866 - DNA, 50 bp, synthetic construct
  source 1..50: mol_type = other DNA
aaatataatctacgcgctaaaacgacaaaaacgcactctttacgacttcg

SEQ ID NO: 42867 - DNA, 50 bp, synthetic construct
  source 1..50: mol_type = other DNA
aacaataaatataatctacacactaaaacaacaaaaacacactctttaca

SEQ ID NO: 42868 - DNA, 50 bp, synthetic construct
  source 1..50: mol_type = other DNA
aacaataaatataatctacgcgctaaaacgacaaaaacgcactctttacg

SEQ ID NO: 42869 - DNA, 50 bp, synthetic construct
  source 1..50: mol_type = other DNA
caaaacacaccaaacacaaaaccataacaacaataaatataatctacaca

SEQ ID NO: 42870 - DNA, 50 bp, synthetic construct
  source 1..50: mol_type = other DNA
caaaacacgccaaacgcaaaaccgtaacaacaataaatataatctacgcg

SEQ ID NO: 42871 - DNA, 50 bp, synthetic construct
  source 1..50: mol_type = other DNA
ctaaaaaacataattcataacactatcacttacacaaaacacaccaaaca

SEQ ID NO: 42872 - DNA, 50 bp, synthetic construct
  source 1..50: mol_type = other DNA
ctaaaaaacgtaattcgtaacgctatcacttacacaaaacacgccaaacg

SEQ ID NO: 42873 - DNA, 50 bp, synthetic construct
  source 1..50: mol_type = other DNA
aaaaactcataatattctaaaaatattcctaaaaaacataattcataaca

SEQ ID NO: 42874 - DNA, 50 bp, synthetic construct
  source 1..50: mol_type = other DNA
aaaaactcgtaatattctaaaaatattcctaaaaaacgtaattcgtaacg

SEQ ID NO: 42875 - DNA, 50 bp, synthetic construct
  source 1..50: mol_type = other DNA
actatcacaatcttacatttaacatactctatataaataacaacatcaca

SEQ ID NO: 42876 - DNA, 50 bp, synthetic construct
  source 1..50: mol_type = other DNA
actatcacgatcttacgtttaacgtactctatataaataacaacgtcacg

SEQ ID NO: 42877 - DNA, 50 bp, synthetic construct
  source 1..50: mol_type = other DNA
caatcttacatttaacatactctatataaataacaacatcacaaatcaca

SEQ ID NO: 42878 - DNA, 50 bp, synthetic construct
  source 1..50: mol_type = other DNA
cgatcttacgtttaacgtactctatataaataacaacgtcacgaatcacg

SEQ ID NO: 42879 - DNA, 50 bp, synthetic construct
  source 1..50: mol_type = other DNA
catcacaacaatatcaaacaaatttctaaccttatctataaaaaaactca

SEQ ID NO: 42880 - DNA, 50 bp, synthetic construct
  source 1..50: mol_type = other DNA
cgtcgcgacgatatcaaacgaatttctaaccttatctataaaaaaactcg

SEQ ID NO: 42881 - DNA, 50 bp, synthetic construct
  source 1..50: mol_type = other DNA
caccacaaatctcctcataaataaaaccaaaaattcacttaacaccacca

SEQ ID NO: 42882 - DNA, 50 bp, synthetic construct
  source 1..50: mol_type = other DNA
caccacgaatctcctcataaataaaaccaaaaattcgcttaacaccgccg

SEQ ID NO: 42883 - DNA, 50 bp, synthetic construct
  source 1..50: mol_type = other DNA
aacaaaaccaaaattccaatatacacactttcaatcttcaattaaatcca

SEQ ID NO: 42884 - DNA, 50 bp, synthetic construct
  source 1..50: mol_type = other DNA
aacaaaaccaaaattccgatatacgcgctttcaatcttcaattaaatccg

SEQ ID NO: 42885 - DNA, 50 bp, synthetic construct
  source 1..50: mol_type = other DNA
cttaaaactctcattcctatttcccaacaattacaaaaaacacctccaca

SEQ ID NO: 42886 - DNA, 50 bp, synthetic construct
  source 1..50: mol_type = other DNA
cttaaaactctcattcctatttcccaacaattacaaaaaacgcctccgcg

SEQ ID NO: 42887 - DNA, 50 bp, synthetic construct
  source 1..50: mol_type = other DNA
taaaaaaaaacctttaaaaaaacccaattaacaaaaaaaaccaaacaaca

SEQ ID NO: 42888 - DNA, 50 bp, synthetic construct
  source 1..50: mol_type = other DNA
taaaaaaaaacctttaaaaaaacccaattaacaaaaaaaaccgaacgacg

SEQ ID NO: 42889 - DNA, 50 bp, synthetic construct
  source 1..50: mol_type = other DNA
ataaacttaaaatccattaaaatctccccacacaaattcaaatcctacca

SEQ ID NO: 42890 - DNA, 50 bp, synthetic construct
  source 1..50: mol_type = other DNA
ataaacttaaaatccattaaaatctccccgcgcaaattcgaatcctaccg

SEQ ID NO: 42891 - DNA, 50 bp, synthetic construct
  source 1..50: mol_type = other DNA
cctcataaaaatatatccaaattattaaaaaaaatacataatcataacca

SEQ ID NO: 42892 - DNA, 50 bp, synthetic construct
  source 1..50: mol_type = other DNA
cctcataaaaatatatccaaattattaaaaaaaatacgtaatcgtaaccg

SEQ ID NO: 42893 - DNA, 50 bp, synthetic construct
  source 1..50: mol_type = other DNA
aaaaactttcaaccaatttcataaatttaaaaaccatttaaaaattaaca

SEQ ID NO: 42894 - DNA, 50 bp, synthetic construct
  source 1..50: mol_type = other DNA
aaaaactttcaaccaatttcgtaaatttaaaaaccatttaaaaattaacg

SEQ ID NO: 42895 - DNA, 50 bp, synthetic construct
  source 1..50: mol_type = other DNA
cctaatcttcaaataaaatatatacaaccatataacaaaaaataatttca

SEQ ID NO: 42896 - DNA, 50 bp, synthetic construct
  source 1..50: mol_type = other DNA
cctaatcttcaaataaaatatatacgaccatataacaaaaaataatttcg

SEQ ID NO: 42897 - DNA, 50 bp, synthetic construct
  source 1..50: mol_type = other DNA
tcaaataaaatatatacaaccatataacaaaaaataatttcaatccatca

SEQ ID NO: 42898 - DNA, 50 bp, synthetic construct
  source 1..50: mol_type = other DNA
tcaaataaaatatatacgaccatataacaaaaaataatttcgatccatcg

SEQ ID NO: 42899 - DNA, 50 bp, synthetic construct
  source 1..50: mol_type = other DNA
acaaaaattacaataaactaaaatcacaccactactctacaacctaaaca

SEQ ID NO: 42900 - DNA, 50 bp, synthetic construct
  source 1..50: mol_type = other DNA
acaaaaattacgataaactaaaatcgcgccactactctacaacctaaacg

SEQ ID NO: 42901 - DNA, 50 bp, synthetic construct
  source 1..50: mol_type = other DNA
tttttttaaaatatatcactatatcacccaaactacaaaacaataacaca

SEQ ID NO: 42902 - DNA, 50 bp, synthetic construct
  source 1..50: mol_type = other DNA
tttttttaaaatatatcactatatcgcccaaactacaaaacaataacgcg

SEQ ID NO: 42903 - DNA, 50 bp, synthetic construct
  source 1..50: mol_type = other DNA
actttacaatacttctcccatcttcccacatacccatatatacatataca

SEQ ID NO: 42904 - DNA, 50 bp, synthetic construct
  source 1..50: mol_type = other DNA
actttacaatacttctcccgtcttcccacgtacccatatatacatatacg

SEQ ID NO: 42905 - DNA, 50 bp, synthetic construct
  source 1..50: mol_type = other DNA
ctccaacaaaaaacaacaacaaaataaacaaaatccctaccaaaactaca

SEQ ID NO: 42906 - DNA, 50 bp, synthetic construct
  source 1..50: mol_type = other DNA
ctccgacgaaaaacaacaacaaaataaacaaaatccctaccaaaactacg

SEQ ID NO: 42907 - DNA, 50 bp, synthetic construct
  source 1..50: mol_type = other DNA
aattaaaacaccaataaaacctacttaaataacaaaaaaaattaaaccca

SEQ ID NO: 42908 - DNA, 50 bp, synthetic construct
  source 1..50: mol_type = other DNA
aattaaaacaccgataaaacctacttaaataacaaaaaaaattaaacccg

SEQ ID NO: 42909 - DNA, 50 bp, synthetic construct
  source 1..50: mol_type = other DNA
aatcaattaaaacctaattcacaatacctaaaaaaacaaaaactaaatca

SEQ ID NO: 42910 - DNA, 50 bp, synthetic construct
  source 1..50: mol_type = other DNA
aatcgattaaaacctaattcacaatacctaaaaaaacaaaaactaaatcg

SEQ ID NO: 42911 - DNA, 50 bp, synthetic construct
  source 1..50: mol_type = other DNA
ataaaaacccaaaaaatctaatcccaaatcccacaacttcacatatcaca

SEQ ID NO: 42912 - DNA, 50 bp, synthetic construct
  source 1..50: mol_type = other DNA
ataaaaacccaaaaaatctaatcccgaatcccacaacttcacatatcgcg

SEQ ID NO: 42913 - DNA, 50 bp, synthetic construct
  source 1..50: mol_type = other DNA
tacaatataacatccacaccaaaaaatacacaaatcctccataaactcca

SEQ ID NO: 42914 - DNA, 50 bp, synthetic construct
  source 1..50: mol_type = other DNA
tacaatataacatccacaccgaaaaatacgcaaatcctccataaactccg

SEQ ID NO: 42915 - DNA, 50 bp, synthetic construct
  source 1..50: mol_type = other DNA
atactcactaatccttctcctttacattatactacaaatctcccaacaca

SEQ ID NO: 42916 - DNA, 50 bp, synthetic construct
  source 1..50: mol_type = other DNA
atactcgctaatccttctcctttacgttatactacaaatctcccaacacg

SEQ ID NO: 42917 - DNA, 50 bp, synthetic construct
  source 1..50: mol_type = other DNA
tacataaaaccaattatccaaaccacaaaacaacatctcccaaataaaca

SEQ ID NO: 42918 - DNA, 50 bp, synthetic construct
  source 1..50: mol_type = other DNA
tacataaaaccgattatccgaaccacaaaacgacgtctcccgaataaacg

SEQ ID NO: 42919 - DNA, 50 bp, synthetic construct
  source 1..50: mol_type = other DNA
ataaacattcctaaattaaaaaataaaccacctctccacaaactacctca

SEQ ID NO: 42920 - DNA, 50 bp, synthetic construct
  source 1..50: mol_type = other DNA
ataaacattcctaaattaaaaaataaaccgcctctccgcgaactacctcg

SEQ ID NO: 42921 - DNA, 50 bp, synthetic construct
  source 1..50: mol_type = other DNA
ctcacttctatctcttatctaaacactattaattccccatccaccaacca

SEQ ID NO: 42922 - DNA, 50 bp, synthetic construct
  source 1..50: mol_type = other DNA
ctcacttctatctcttatctaaacgctattaattccccatccaccaaccg

SEQ ID NO: 42923 - DNA, 50 bp, synthetic construct
  source 1..50: mol_type = other DNA
acaatataacataaacacatcaaaataaccaaacaatctaaaacactaca

SEQ ID NO: 42924 - DNA, 50 bp, synthetic construct
  source 1..50: mol_type = other DNA
acaatataacataaacgcgtcaaaataaccgaacgatctaaaacgctacg

SEQ ID NO: 42925 - DNA, 50 bp, synthetic construct
  source 1..50: mol_type = other DNA
acaaactatcaaaaataaaattcaaacccacacctccaaaaaaaactaca

SEQ ID NO: 42926 - DNA, 50 bp, synthetic construct
  source 1..50: mol_type = other DNA
acgaactatcaaaaataaaattcgaacccacgcctccaaaaaaaactacg

SEQ ID NO: 42927 - DNA, 50 bp, synthetic construct
  source 1..50: mol_type = other DNA
tatctaaatactaaaaatacaaactatcaaaaataaaattcaaacccaca

SEQ ID NO: 42928 - DNA, 50 bp, synthetic construct
  source 1..50: mol_type = other DNA
tatctaaatactaaaaatacgaactatcaaaaataaaattcgaacccacg

SEQ ID NO: 42929 - DNA, 50 bp, synthetic construct
  source 1..50: mol_type = other DNA
aaacataacataaacttaaactcaatttatatctaaatactaaaaataca

SEQ ID NO: 42930 - DNA, 50 bp, synthetic construct
  source 1..50: mol_type = other DNA
aaacgtaacgtaaacttaaactcgatttatatctaaatactaaaaatacg

SEQ ID NO: 42931 - DNA, 50 bp, synthetic construct
  source 1..50: mol_type = other DNA
taacaattcatacttttaatatttaaacacaaatcaaatttaaatttaca

SEQ ID NO: 42932 - DNA, 50 bp, synthetic construct
  source 1..50: mol_type = other DNA
taacaattcgtacttttaatatttaaacacaaatcgaatttaaatttacg

SEQ ID NO: 42933 - DNA, 50 bp, synthetic construct
  source 1..50: mol_type = other DNA
attcatacttttaatatttaaacacaaatcaaatttaaatttacactaca

SEQ ID NO: 42934 - DNA, 50 bp, synthetic construct
  source 1..50: mol_type = other DNA
attcgtacttttaatatttaaacacaaatcgaatttaaatttacgctacg

SEQ ID NO: 42935 - DNA, 50 bp, synthetic construct
  source 1..50: mol_type = other DNA
tactccccataaaaaatcactacaaaaattccaatctaacaaaaaacaca

SEQ ID NO: 42936 - DNA, 50 bp, synthetic construct
  source 1..50: mol_type = other DNA
tactccccgtaaaaaatcactacaaaaattccgatctaacaaaaaacgcg

SEQ ID NO: 42937 - DNA, 50 bp, synthetic construct
  source 1..50: mol_type = other DNA
ataaaaaatcactacaaaaattccaatctaacaaaaaacacaaaaaaaca

SEQ ID NO: 42938 - DNA, 50 bp, synthetic construct
  source 1..50: mol_type = other DNA
gtaaaaaatcactacaaaaattccgatctaacaaaaaacgcgaaaaaacg

SEQ ID NO: 42939 - DNA, 50 bp, synthetic construct
  source 1..50: mol_type = other DNA
cactacaaaaattccaatctaacaaaaaacacaaaaaaacacaaaacaca

SEQ ID NO: 42940 - DNA, 50 bp, synthetic construct
  source 1..50: mol_type = other DNA
cactacaaaaattccgatctaacaaaaaacgcgaaaaaacgcaaaacgcg

SEQ ID NO: 42941 - DNA, 50 bp, synthetic construct
  source 1..50: mol_type = other DNA
caaaaattccaatctaacaaaaaacacaaaaaaacacaaaacacaaacca

SEQ ID NO: 42942 - DNA, 50 bp, synthetic construct
  source 1..50: mol_type = other DNA
caaaaattccgatctaacaaaaaacgcgaaaaaacgcaaaacgcgaaccg

SEQ ID NO: 42943 - DNA, 50 bp, synthetic construct
  source 1..50: mol_type = other DNA
cttaaaccaaaaaacccaacaaccaacaaaatccaaactaaaaaaaacca

SEQ ID NO: 42944 - DNA, 50 bp, synthetic construct
  source 1..50: mol_type = other DNA
cttaaaccgaaaaacccgacgaccgacaaaatccgaactaaaaaaaaccg

SEQ ID NO: 42945 - DNA, 50 bp, synthetic construct
  source 1..50: mol_type = other DNA
caacaaaaaacattaaaacataaaaaacccaaaaaaacaacctaaaaaca

SEQ ID NO: 42946 - DNA, 50 bp, synthetic construct
  source 1..50: mol_type = other DNA
cgacgaaaaacgttaaaacataaaaaacccgaaaaaacgacctaaaaacg

SEQ ID NO: 42947 - DNA, 50 bp, synthetic construct
  source 1..50: mol_type = other DNA
ttaaaacataaaaaacccaaaaaaacaacctaaaaacacaaacaaactca

SEQ ID NO: 42948 - DNA, 50 bp, synthetic construct
  source 1..50: mol_type = other DNA
ttaaaacataaaaaacccgaaaaaacgacctaaaaacgcaaacaaactcg

SEQ ID NO: 42949 - DNA, 50 bp, synthetic construct
  source 1..50: mol_type = other DNA
aacataaaaaacccaaaaaaacaacctaaaaacacaaacaaactcaacca

SEQ ID NO: 42950 - DNA, 50 bp, synthetic construct
  source 1..50: mol_type = other DNA
aacataaaaaacccgaaaaaacgacctaaaaacgcaaacaaactcgaccg

SEQ ID NO: 42951 - DNA, 50 bp, synthetic construct
  source 1..50: mol_type = other DNA
aaatctcacccaataacaacaaaataatcacccaaaacccaaatctaaca

SEQ ID NO: 42952 - DNA, 50 bp, synthetic construct
  source 1..50: mol_type = other DNA
aaatctcgcccaataacgacaaaataatcacccgaaacccaaatctaacg

SEQ ID NO: 42953 - DNA, 50 bp, synthetic construct
  source 1..50: mol_type = other DNA
caaatcccaacaaaacctattataattttcctacattcaaaatacccaca

SEQ ID NO: 42954 - DNA, 50 bp, synthetic construct
  source 1..50: mol_type = other DNA
cgaatcccaacgaaacctattataattttcctacattcaaaatacccacg

SEQ ID NO: 42955 - DNA, 50 bp, synthetic construct
  source 1..50: mol_type = other DNA
tatacctttacctatatatacaataaaaaaaacaataaaaaatcacacca

SEQ ID NO: 42956 - DNA, 50 bp, synthetic construct
  source 1..50: mol_type = other DNA
tatacctttacctatatatacgataaaaaaaacaataaaaaatcacgccg

SEQ ID NO: 42957 - DNA, 50 bp, synthetic construct
  source 1..50: mol_type = other DNA
aatcacaccaactaaaattttcatttttataaaaaaatacaaatcaacca

SEQ ID NO: 42958 - DNA, 50 bp, synthetic construct
  source 1..50: mol_type = other DNA
aatcacgccgactaaaattttcatttttataaaaaaatacaaatcgaccg

SEQ ID NO: 42959 - DNA, 50 bp, synthetic construct
  source 1..50: mol_type = other DNA
acaccaactaaaattttcatttttataaaaaaatacaaatcaaccaaaca

SEQ ID NO: 42960 - DNA, 50 bp, synthetic construct
  source 1..50: mol_type = other DNA
acgccgactaaaattttcatttttataaaaaaatacaaatcgaccgaacg

SEQ ID NO: 42961 - DNA, 50 bp, synthetic construct
  source 1..50: mol_type = other DNA
attttcatttttataaaaaaatacaaatcaaccaaacacaataactcaca

SEQ ID NO: 42962 - DNA, 50 bp, synthetic construct
  source 1..50: mol_type = other DNA
attttcatttttataaaaaaatacaaatcgaccgaacgcaataactcacg

SEQ ID NO: 42963 - DNA, 50 bp, synthetic construct
  source 1..50: mol_type = other DNA
cataaccttcattcctttctcaatctatctctaccaactaaaaaataaca

SEQ ID NO: 42964 - DNA, 50 bp, synthetic construct
  source 1..50: mol_type = other DNA
cgtaaccttcattcctttctcgatctatctctaccgactaaaaaataacg

SEQ ID NO: 42965 - DNA, 50 bp, synthetic construct
  source 1..50: mol_type = other DNA
aaattatacccataatatctaaataaacacctataaaccacatttaccca

SEQ ID NO: 42966 - DNA, 50 bp, synthetic construct
  source 1..50: mol_type = other DNA
aaattatacccgtaatatctaaataaacgcctataaaccgcgtttacccg

SEQ ID NO: 42967 - DNA, 50 bp, synthetic construct
  source 1..50: mol_type = other DNA
caaaatatttcataaaaaactaaattatacccataatatctaaataaaca

SEQ ID NO: 42968 - DNA, 50 bp, synthetic construct
  source 1..50: mol_type = other DNA
cgaaatatttcataaaaaactaaattatacccgtaatatctaaataaacg

SEQ ID NO: 42969 - DNA, 50 bp, synthetic construct
  source 1..50: mol_type = other DNA
aatacctcacccctaaaatacacacaaaaccaataacacaataaataaca

SEQ ID NO: 42970 - DNA, 50 bp, synthetic construct
  source 1..50: mol_type = other DNA
aatacctcgcccctaaaatacgcgcaaaaccaataacgcaataaataacg

SEQ ID NO: 42971 - DNA, 50 bp, synthetic construct
  source 1..50: mol_type = other DNA
tacctcacccctaaaatacacacaaaaccaataacacaataaataacaca

SEQ ID NO: 42972 - DNA, 50 bp, synthetic construct
  source 1..50: mol_type = other DNA
tacctcgcccctaaaatacgcgcaaaaccaataacgcaataaataacgcg

SEQ ID NO: 42973 - DNA, 50 bp, synthetic construct
  source 1..50: mol_type = other DNA
ctaaaatacacacaaaaccaataacacaataaataacacatctaactaca

SEQ ID NO: 42974 - DNA, 50 bp, synthetic construct
  source 1..50: mol_type = other DNA
ctaaaatacgcgcaaaaccaataacgcaataaataacgcgtctaactacg

SEQ ID NO: 42975 - DNA, 50 bp, synthetic construct
  source 1..50: mol_type = other DNA
taaaaaaaaacacaataaaaactttaatttaatctctaaacaatccttca

SEQ ID NO: 42976 - DNA, 50 bp, synthetic construct
  source 1..50: mol_type = other DNA
taaaaaaaaacacaataaaaactttaatttaatctctaaacgatccttcg

SEQ ID NO: 42977 - DNA, 50 bp, synthetic construct
  source 1..50: mol_type = other DNA
cttcattccaaatacatattttactaatatacacatacatctctatacca

SEQ ID NO: 42978 - DNA, 50 bp, synthetic construct
  source 1..50: mol_type = other DNA
cttcgttccaaatacgtattttactaatatacgcgtacgtctctataccg

SEQ ID NO: 42979 - DNA, 50 bp, synthetic construct
  source 1..50: mol_type = other DNA
aaacttttcattaatttttctaatttaaaaaatcaatacaaaaacacaca

SEQ ID NO: 42980 - DNA, 50 bp, synthetic construct
  source 1..50: mol_type = other DNA
aaacttttcattaatttttctaatttaaaaaatcgatacaaaaacgcacg

SEQ ID NO: 42981 - DNA, 50 bp, synthetic construct
  source 1..50: mol_type = other DNA
ctaatttaaaaaatcaatacaaaaacacacacacacatcaacaaaacaca

SEQ ID NO: 42982 - DNA, 50 bp, synthetic construct
  source 1..50: mol_type = other DNA
ctaatttaaaaaatcgatacaaaaacgcacgcgcacatcaacaaaacacg

SEQ ID NO: 42983 - DNA, 50 bp, synthetic construct
  source 1..50: mol_type = other DNA
aaaaaataaacccttaataaatttccataatataataattatcacattca

SEQ ID NO: 42984 - DNA, 50 bp, synthetic construct
  source 1..50: mol_type = other DNA
aaaaaataaacccttaataaatttccgtaatataataattatcacgttcg

SEQ ID NO: 42985 - DNA, 50 bp, synthetic construct
  source 1..50: mol_type = other DNA
ccttaataaatttccataatataataattatcacattcacctcacacaca

SEQ ID NO: 42986 - DNA, 50 bp, synthetic construct
  source 1..50: mol_type = other DNA
ccttaataaatttccgtaatataataattatcacgttcgcctcacacgcg

SEQ ID NO: 42987 - DNA, 50 bp, synthetic construct
  source 1..50: mol_type = other DNA
agaattttgtagtaagatgaggaaaaaaaaatgtgtttttgtttggtttt

SEQ ID NO: 42988 - DNA, 50 bp, synthetic construct
  source 1..50: mol_type = other DNA
agaatttcgtagtaagatgaggaaaaaaaaacgtgttttcgttcggtttc

SEQ ID NO: 42989 - DNA, 50 bp, synthetic construct
  source 1..50: mol_type = other DNA
tctctatcttaaaactaatactaaccctacccacacctaaaactccaaca

SEQ ID NO: 42990 - DNA, 50 bp, synthetic construct
  source 1..50: mol_type = other DNA
tctctatcttaaaactaatactaaccctacccacgcctaaaactccgacg

SEQ ID NO: 42991 - DNA, 50 bp, synthetic construct
  source 1..50: mol_type = other DNA
cacaaaatctataaaacacttacccaaatctcataaccatccaaaaaaca

SEQ ID NO: 42992 - DNA, 50 bp, synthetic construct
  source 1..50: mol_type = other DNA
cacaaaatctataaaacacttacccgaatctcgtaaccgtccgaaaaacg

SEQ ID NO: 42993 - DNA, 50 bp, synthetic construct
  source 1..50: mol_type = other DNA
aataacacacaaaatctataaaacacttacccaaatctcataaccatcca

SEQ ID NO: 42994 - DNA, 50 bp, synthetic construct
  source 1..50: mol_type = other DNA
aataacgcacaaaatctataaaacacttacccgaatctcgtaaccgtccg

SEQ ID NO: 42995 - DNA, 50 bp, synthetic construct
  source 1..50: mol_type = other DNA
ccaaaataacacacaaaatctataaaacacttacccaaatctcataacca

SEQ ID NO: 42996 - DNA, 50 bp, synthetic construct
  source 1..50: mol_type = other DNA
ccgaaataacgcacaaaatctataaaacacttacccgaatctcgtaaccg

SEQ ID NO: 42997 - DNA, 50 bp, synthetic construct
  source 1..50: mol_type = other DNA
caaataaatacctcacaaactttatacactaccccaaaaaataaaaaaca

SEQ ID NO: 42998 - DNA, 50 bp, synthetic construct
  source 1..50: mol_type = other DNA
cgaataaatacctcacaaactttatacgctaccccgaaaaataaaaaacg

SEQ ID NO: 42999 - DNA, 50 bp, synthetic construct
  source 1..50: mol_type = other DNA
acaaaaaaacaaacaaaactaacaaaacccaaaacccctaatcataacca

SEQ ID NO: 43000 - DNA, 50 bp, synthetic construct
  source 1..50: mol_type = other DNA
acgaaaaaacaaacgaaactaacgaaacccaaaacccctaatcataaccg

SEQ ID NO: 43001 - DNA, 50 bp, synthetic construct
  source 1..50: mol_type = other DNA
aaaccctcctaccaactaaccccaatcataattaaaaaccttaaacccca

SEQ ID NO: 43002 - DNA, 50 bp, synthetic construct
  source 1..50: mol_type = other DNA
aaaccctcctaccaactaaccccgatcataattaaaaaccttaaaccccg

SEQ ID NO: 43003 - DNA, 50 bp, synthetic construct
  source 1..50: mol_type = other DNA
ccacaaccaaaaaaaatacattttaacaaaatttctataaaaaacattca

SEQ ID NO: 43004 - DNA, 50 bp, synthetic construct
  source 1..50: mol_type = other DNA
ccgcaaccgaaaaaaatacattttaacgaaatttctataaaaaacattcg

SEQ ID NO: 43005 - DNA, 50 bp, synthetic construct
  source 1..50: mol_type = other DNA
actctccctaattatttataaaaaatttctactaccaccccaccacccca

SEQ ID NO: 43006 - DNA, 50 bp, synthetic construct
  source 1..50: mol_type = other DNA
actctccctaattatttataaaaaatttctactaccaccccaccgccccg

SEQ ID NO: 43007 - DNA, 50 bp, synthetic construct
  source 1..50: mol_type = other DNA
taaaacaacttaaaaataccaaaaatcaaacccaaaacctcatacataca

SEQ ID NO: 43008 - DNA, 50 bp, synthetic construct
  source 1..50: mol_type = other DNA
taaaacaacttaaaaataccgaaaatcgaacccgaaacctcatacatacg

SEQ ID NO: 43009 - DNA, 50 bp, synthetic construct
  source 1..50: mol_type = other DNA
aataataaaacacatacttcacatatataaaatcccaaattcaatcccca

SEQ ID NO: 43010 - DNA, 50 bp, synthetic construct
  source 1..50: mol_type = other DNA
aataataaaacgcatacttcgcatatataaaatcccgaattcgatccccg

SEQ ID NO: 43011 - DNA, 50 bp, synthetic construct
  source 1..50: mol_type = other DNA
tctcaactcaacacaaacaaatttaactactctaatacaccaatctccca

SEQ ID NO: 43012 - DNA, 50 bp, synthetic construct
  source 1..50: mol_type = other DNA
tctcaactcaacacgaacgaatttaactactctaatacaccgatctcccg

SEQ ID NO: 43013 - DNA, 50 bp, synthetic construct
  source 1..50: mol_type = other DNA
aaaacaaataaccaattaactcaattaattaaaacataatactaataaca

SEQ ID NO: 43014 - DNA, 50 bp, synthetic construct
  source 1..50: mol_type = other DNA
aaaacaaataaccgattaactcaattaattaaaacgtaatactaataacg

SEQ ID NO: 43015 - DNA, 50 bp, synthetic construct
  source 1..50: mol_type = other DNA
ccaattaactcaattaattaaaacataatactaataacaccaaaatcaca

SEQ ID NO: 43016 - DNA, 50 bp, synthetic construct
  source 1..50: mol_type = other DNA
ccgattaactcaattaattaaaacgtaatactaataacgccaaaatcgcg

SEQ ID NO: 43017 - DNA, 50 bp, synthetic construct
  source 1..50: mol_type = other DNA
aagttatgtgatggaagaaaataaagttggtttgtatggggattgaattt

SEQ ID NO: 43018 - DNA, 50 bp, synthetic construct
  source 1..50: mol_type = other DNA
aagttacgtgatggaagaaaataaagttggttcgtacggggatcgaattc

SEQ ID NO: 43019 - DNA, 50 bp, synthetic construct
  source 1..50: mol_type = other DNA
tgtttttggttgtaagttatgtgatggaagaaaataaagttggtttgtat

SEQ ID NO: 43020 - DNA, 50 bp, synthetic construct
  source 1..50: mol_type = other DNA
tgtttttggtcgtaagttacgtgatggaagaaaataaagttggttcgtac

SEQ ID NO: 43021 - DNA, 50 bp, synthetic construct
  source 1..50: mol_type = other DNA
aaaaatataattctcacttaaaatacaaaaaatcccaaattcaaatccca

SEQ ID NO: 43022 - DNA, 50 bp, synthetic construct
  source 1..50: mol_type = other DNA
aaaaatataattctcgcttaaaatacgaaaaatcccgaattcaaatcccg

SEQ ID NO: 43023 - DNA, 50 bp, synthetic construct
  source 1..50: mol_type = other DNA
atataattctcacttaaaatacaaaaaatcccaaattcaaatcccaaaca

SEQ ID NO: 43024 - DNA, 50 bp, synthetic construct
  source 1..50: mol_type = other DNA
atataattctcgcttaaaatacgaaaaatcccgaattcaaatcccgaacg

SEQ ID NO: 43025 - DNA, 50 bp, synthetic construct
  source 1..50: mol_type = other DNA
actttcctcattactacaacatcaaatactactctatcacacaaatcaca

SEQ ID NO: 43026 - DNA, 50 bp, synthetic construct
  source 1..50: mol_type = other DNA
actttcctcgttactacaacgtcaaatactactctatcacacaaatcacg

SEQ ID NO: 43027 - DNA, 50 bp, synthetic construct
  source 1..50: mol_type = other DNA
ctacaatataaaatacaataatttttatatattatatttaccaccaacca

SEQ ID NO: 43028 - DNA, 50 bp, synthetic construct
  source 1..50: mol_type = other DNA
ctacaatataaaatacaataatttttatatattatatttaccgccaaccg

SEQ ID NO: 43029 - DNA, 50 bp, synthetic construct
  source 1..50: mol_type = other DNA
tcctatttacctacatcattaatattcttttaacatccactaccccttca

SEQ ID NO: 43030 - DNA, 50 bp, synthetic construct
  source 1..50: mol_type = other DNA
tcctatttacctacgtcgttaatattcttttaacatccactaccccttcg

SEQ ID NO: 43031 - DNA, 50 bp, synthetic construct
  source 1..50: mol_type = other DNA
acaaaaaattaaacaatcataaatacttatcatcctatttacctacatca

SEQ ID NO: 43032 - DNA, 50 bp, synthetic construct
  source 1..50: mol_type = other DNA
acgaaaaattaaacaatcgtaaatacttatcgtcctatttacctacgtcg

SEQ ID NO: 43033 - DNA, 50 bp, synthetic construct
  source 1..50: mol_type = other DNA
taactcaaataataaaacactcacttaacatacaaaaaataacaaaatca

SEQ ID NO: 43034 - DNA, 50 bp, synthetic construct
  source 1..50: mol_type = other DNA
taactcaaataataaaacgctcgcttaacatacgaaaaataacgaaatcg

SEQ ID NO: 43035 - DNA, 50 bp, synthetic construct
  source 1..50: mol_type = other DNA
catctataacctattttaccatatcaaatcccatctaaaaaaacccacca

SEQ ID NO: 43036 - DNA, 50 bp, synthetic construct
  source 1..50: mol_type = other DNA
catctataacctattttaccatatcgaatcccgtctaaaaaaacccaccg

SEQ ID NO: 43037 - DNA, 50 bp, synthetic construct
  source 1..50: mol_type = other DNA
cttaaaaatccaaaaaaaatttaacactaaaatcacatctacaaaaacca

SEQ ID NO: 43038 - DNA, 50 bp, synthetic construct
  source 1..50: mol_type = other DNA
cttaaaaatccgaaaaaaatttaacactaaaatcacatctacgaaaaccg

SEQ ID NO: 43039 - DNA, 50 bp, synthetic construct
  source 1..50: mol_type = other DNA
aaccacctcaacctcccaaaatactaacattacaaaaataaaccactaca

SEQ ID NO: 43040 - DNA, 50 bp, synthetic construct
  source 1..50: mol_type = other DNA
aaccgcctcaacctcccaaaatactaacattacaaaaataaaccactacg

SEQ ID NO: 43041 - DNA, 50 bp, synthetic construct
  source 1..50: mol_type = other DNA
aacaattctcctatctcaacctccaaaataaccaaaattacaatcaccca

SEQ ID NO: 43042 - DNA, 50 bp, synthetic construct
  source 1..50: mol_type = other DNA
aacgattctcctatctcaacctccgaaataaccaaaattacaatcacccg

SEQ ID NO: 43043 - DNA, 50 bp, synthetic construct
  source 1..50: mol_type = other DNA
atcaatatttataattaaataacaataaacaaaatttatcactctcatca

SEQ ID NO: 43044 - DNA, 50 bp, synthetic construct
  source 1..50: mol_type = other DNA
atcaatatttataattaaataacaataaacgaaatttatcgctctcatcg

SEQ ID NO: 43045 - DNA, 50 bp, synthetic construct
  source 1..50: mol_type = other DNA
tctaaactactctacactcttaaaacaaaataaaaaattttatcaaacca

SEQ ID NO: 43046 - DNA, 50 bp, synthetic construct
  source 1..50: mol_type = other DNA
tctaaactactctacgctcttaaaacgaaataaaaaattttatcaaaccg

SEQ ID NO: 43047 - DNA, 50 bp, synthetic construct
  source 1..50: mol_type = other DNA
tactaaaaaccacatacaaataatccaattaactttctaaaaacaaccca

SEQ ID NO: 43048 - DNA, 50 bp, synthetic construct
  source 1..50: mol_type = other DNA
tactaaaaaccgcgtacaaataatccgattaactttctaaaaacaacccg

SEQ ID NO: 43049 - DNA, 50 bp, synthetic construct
  source 1..50: mol_type = other DNA
cccatcaacaccaacaacaaactaactacaaaaaacaatactaaaaacca

SEQ ID NO: 43050 - DNA, 50 bp, synthetic construct
  source 1..50: mol_type = other DNA
cccatcgacgccaacgacaaactaactacaaaaaacaatactaaaaaccg

SEQ ID NO: 43051 - DNA, 50 bp, synthetic construct
  source 1..50: mol_type = other DNA
cttatacacaattcccaacactatcctttacaatcaacttatcactaaca

SEQ ID NO: 43052 - DNA, 50 bp, synthetic construct
  source 1..50: mol_type = other DNA
cttatacgcgattcccaacactatcctttacaatcaacttatcgctaacg

SEQ ID NO: 43053 - DNA, 50 bp, synthetic construct
  source 1..50: mol_type = other DNA
aaaaaaaactaaaacacctcaaaaataaaaacaacaccccctactaatca

SEQ ID NO: 43054 - DNA, 50 bp, synthetic construct
  source 1..50: mol_type = other DNA
aaaaaaaactaaaacgcctcaaaaataaaaacgacgccccctactaatcg

SEQ ID NO: 43055 - DNA, 50 bp, synthetic construct
  source 1..50: mol_type = other DNA
aaaaaactaaaacacctcaaaaataaaaacaacaccccctactaatcaca

SEQ ID NO: 43056 - DNA, 50 bp, synthetic construct
  source 1..50: mol_type = other DNA
aaaaaactaaaacgcctcaaaaataaaaacgacgccccctactaatcgcg

SEQ ID NO: 43057 - DNA, 50 bp, synthetic construct
  source 1..50: mol_type = other DNA
ccaaacccacacaaaaaaaactaccctaaacttaacttaaaaataatcca

SEQ ID NO: 43058 - DNA, 50 bp, synthetic construct
  source 1..50: mol_type = other DNA
ccgaacccgcgcgaaaaaaactaccctaaacttaacttaaaaataatccg

SEQ ID NO: 43059 - DNA, 50 bp, synthetic construct
  source 1..50: mol_type = other DNA
cacacaaaaaaaactaccctaaacttaacttaaaaataatccacaaacca

SEQ ID NO: 43060 - DNA, 50 bp, synthetic construct
  source 1..50: mol_type = other DNA
cgcgcgaaaaaaactaccctaaacttaacttaaaaataatccgcaaaccg

SEQ ID NO: 43061 - DNA, 50 bp, synthetic construct
  source 1..50: mol_type = other DNA
acaaaaataaacacaccaccaaaaaatcaccaaaattaaaaacttataca

SEQ ID NO: 43062 - DNA, 50 bp, synthetic construct
  source 1..50: mol_type = other DNA
acaaaaataaacgcgccgccgaaaaatcgccaaaattaaaaacttatacg

SEQ ID NO: 43063 - DNA, 50 bp, synthetic construct
  source 1..50: mol_type = other DNA
acccaaatacacaatacctaacactacccatttcttactaccacaaacca

SEQ ID NO: 43064 - DNA, 50 bp, synthetic construct
  source 1..50: mol_type = other DNA
acccaaatacacaatacctaacactacccgtttcttactaccacaaaccg

SEQ ID NO: 43065 - DNA, 50 bp, synthetic construct
  source 1..50: mol_type = other DNA
aaaaaaaaacacatccaacctcaccataaacactaaaaaaattacaaaca

SEQ ID NO: 43066 - DNA, 50 bp, synthetic construct
  source 1..50: mol_type = other DNA
aaaaaaaaacgcgtccgacctcgccataaacgctaaaaaaattacgaacg

SEQ ID NO: 43067 - DNA, 50 bp, synthetic construct
  source 1..50: mol_type = other DNA
ctatcaccatcaaaacctacatacttaccctcaacctaaaaaaaaacaca

SEQ ID NO: 43068 - DNA, 50 bp, synthetic construct
  source 1..50: mol_type = other DNA
ctatcaccgtcaaaacctacatacttaccctcaacctaaaaaaaaacgcg

SEQ ID NO: 43069 - DNA, 50 bp, synthetic construct
  source 1..50: mol_type = other DNA
tatcactcactaacaaaatacaaacatacatatcctattacttcactaca

SEQ ID NO: 43070 - DNA, 50 bp, synthetic construct
  source 1..50: mol_type = other DNA
tatcgctcgctaacgaaatacaaacatacatatcctattacttcgctacg

SEQ ID NO: 43071 - DNA, 50 bp, synthetic construct
  source 1..50: mol_type = other DNA
aaatacaaacatacatatcctattacttcactacacaaaactaaaacaca

SEQ ID NO: 43072 - DNA, 50 bp, synthetic construct
  source 1..50: mol_type = other DNA
aaatacaaacatacatatcctattacttcgctacgcgaaactaaaacacg

SEQ ID NO: 43073 - DNA, 50 bp, synthetic construct
  source 1..50: mol_type = other DNA
taactcctaactaataaatcaatctataaaaatactaaaataaacaaaca

SEQ ID NO: 43074 - DNA, 50 bp, synthetic construct
  source 1..50: mol_type = other DNA
taactcctaactaataaatcaatctataaaaatactaaaataaacgaacg

SEQ ID NO: 43075 - DNA, 50 bp, synthetic construct
  source 1..50: mol_type = other DNA
aactacaccaaaaaataaataaaattccataacaaacacataaccaaaca

SEQ ID NO: 43076 - DNA, 50 bp, synthetic construct
  source 1..50: mol_type = other DNA
aactacaccgaaaaataaataaaattccgtaacaaacgcataaccaaacg

SEQ ID NO: 43077 - DNA, 50 bp, synthetic construct
  source 1..50: mol_type = other DNA
ctacaccaaaaaataaataaaattccataacaaacacataaccaaacaca

SEQ ID NO: 43078 - DNA, 50 bp, synthetic construct
  source 1..50: mol_type = other DNA
ctacaccgaaaaataaataaaattccgtaacaaacgcataaccaaacgcg

SEQ ID NO: 43079 - DNA, 50 bp, synthetic construct
  source 1..50: mol_type = other DNA
cctcaaaacaaatcataaaaccaaacataataactcatacctataatcca

SEQ ID NO: 43080 - DNA, 50 bp, synthetic construct
  source 1..50: mol_type = other DNA
cctcaaaacaaatcataaaaccgaacgtaataactcatacctataatccg

SEQ ID NO: 43081 - DNA, 50 bp, synthetic construct
  source 1..50: mol_type = other DNA
aaatcataaaaccaaacataataactcatacctataatccaaacacttca

SEQ ID NO: 43082 - DNA, 50 bp, synthetic construct
  source 1..50: mol_type = other DNA
aaatcataaaaccgaacgtaataactcatacctataatccgaacacttcg

SEQ ID NO: 43083 - DNA, 50 bp, synthetic construct
  source 1..50: mol_type = other DNA
aaaccaaacataataactcatacctataatccaaacacttcaaaaaacca

SEQ ID NO: 43084 - DNA, 50 bp, synthetic construct
  source 1..50: mol_type = other DNA
aaaccgaacgtaataactcatacctataatccgaacacttcgaaaaaccg

SEQ ID NO: 43085 - DNA, 50 bp, synthetic construct
  source 1..50: mol_type = other DNA
ataataactcatacctataatccaaacacttcaaaaaaccaaaactaaca

SEQ ID NO: 43086 - DNA, 50 bp, synthetic construct
  source 1..50: mol_type = other DNA
gtaataactcatacctataatccgaacacttcgaaaaaccgaaactaacg

SEQ ID NO: 43087 - DNA, 50 bp, synthetic construct
  source 1..50: mol_type = other DNA
cacacctaactaatttttttatactttttaacaaaaacaaaatttcacca

SEQ ID NO: 43088 - DNA, 50 bp, synthetic construct
  source 1..50: mol_type = other DNA
cacacctaactaatttttttatactttttaacaaaaacgaaatttcaccg

SEQ ID NO: 43089 - DNA, 50 bp, synthetic construct
  source 1..50: mol_type = other DNA
aacaaaaactactcccactcaactataaccataaatcttaaatcccacca

SEQ ID NO: 43090 - DNA, 50 bp, synthetic construct
  source 1..50: mol_type = other DNA
aacaaaaactactcccactcgactataaccgtaaatcttaaatcccaccg

SEQ ID NO: 43091 - DNA, 50 bp, synthetic construct
  source 1..50: mol_type = other DNA
tatccaaaaaataaccaaaaatactatccccaaacctaaaaacaacacca

SEQ ID NO: 43092 - DNA, 50 bp, synthetic construct
  source 1..50: mol_type = other DNA
tatccgaaaaataaccgaaaatactatccccaaacctaaaaacgacgccg

SEQ ID NO: 43093 - DNA, 50 bp, synthetic construct
  source 1..50: mol_type = other DNA
aaccaaccttataaacccttaaaacactctattaaaacactctataaaca

SEQ ID NO: 43094 - DNA, 50 bp, synthetic construct
  source 1..50: mol_type = other DNA
aaccgaccttataaacccttaaaacgctctattaaaacgctctataaacg

SEQ ID NO: 43095 - DNA, 50 bp, synthetic construct
  source 1..50: mol_type = other DNA
aaaactacaccaacctcttcccaaccaacttaaaaaaatttacataacca

SEQ ID NO: 43096 - DNA, 50 bp, synthetic construct
  source 1..50: mol_type = other DNA
aaaactacgccgacctcttcccaaccaacttaaaaaaatttacgtaaccg

SEQ ID NO: 43097 - DNA, 50 bp, synthetic construct
  source 1..50: mol_type = other DNA
ccctttccaaaaactcaactcctattaacccaaaaaccaaaattaaaaca

SEQ ID NO: 43098 - DNA, 50 bp, synthetic construct
  source 1..50: mol_type = other DNA
ccctttccgaaaactcgactcctattaacccaaaaaccgaaattaaaacg

SEQ ID NO: 43099 - DNA, 50 bp, synthetic construct
  source 1..50: mol_type = other DNA
aaatacaacccaacaccacttcctttcaataacaacacatttccaacaca

SEQ ID NO: 43100 - DNA, 50 bp, synthetic construct
  source 1..50: mol_type = other DNA
aaatacaacccaacgccacttcctttcaataacaacacgtttccaacacg

SEQ ID NO: 43101 - DNA, 50 bp, synthetic construct
  source 1..50: mol_type = other DNA
ttaaaataaaatttaccaaacacattcctttccactcacttccattccca

SEQ ID NO: 43102 - DNA, 50 bp, synthetic construct
  source 1..50: mol_type = other DNA
ttaaaataaaatttaccaaacgcattcctttccgctcacttccgttcccg

SEQ ID NO: 43103 - DNA, 50 bp, synthetic construct
  source 1..50: mol_type = other DNA
cacaatctacaaataaaatacaaataataaaaatccctaaaaaaattaca

SEQ ID NO: 43104 - DNA, 50 bp, synthetic construct
  source 1..50: mol_type = other DNA
cgcaatctacgaataaaatacgaataataaaaatccctaaaaaaattacg

SEQ ID NO: 43105 - DNA, 50 bp, synthetic construct
  source 1..50: mol_type = other DNA
ttccctaaaaaaccttcaaataaccaccatataaacaaactaacatccca

SEQ ID NO: 43106 - DNA, 50 bp, synthetic construct
  source 1..50: mol_type = other DNA
ttccctaaaaaaccttcaaataaccgccgtataaacgaactaacgtcccg

SEQ ID NO: 43107 - DNA, 50 bp, synthetic construct
  source 1..50: mol_type = other DNA
tctaccctttcctaaatctccttaaaaaaaaatattcactttcatttcca

SEQ ID NO: 43108 - DNA, 50 bp, synthetic construct
  source 1..50: mol_type = other DNA
tctaccctttcctaaatctccttaaaaaaaaatattcgctttcgtttccg

SEQ ID NO: 43109 - DNA, 50 bp, synthetic construct
  source 1..50: mol_type = other DNA
tccttaaaaaaaaatattcactttcatttccacaaacaaaacatactcca

SEQ ID NO: 43110 - DNA, 50 bp, synthetic construct
  source 1..50: mol_type = other DNA
tccttaaaaaaaaatattcgctttcgtttccgcaaacaaaacatactccg

SEQ ID NO: 43111 - DNA, 50 bp, synthetic construct
  source 1..50: mol_type = other DNA
cttaaaaaaaaatattcactttcatttccacaaacaaaacatactccaca

SEQ ID NO: 43112 - DNA, 50 bp, synthetic construct
  source 1..50: mol_type = other DNA
cttaaaaaaaaatattcgctttcgtttccgcaaacaaaacatactccgcg

SEQ ID NO: 43113 - DNA, 50 bp, synthetic construct
  source 1..50: mol_type = other DNA
atttctacttccaatcactccttacacaacctacacaaaaacatccaaca

SEQ ID NO: 43114 - DNA, 50 bp, synthetic construct
  source 1..50: mol_type = other DNA
atttctacttccgatcactccttacacaacctacacaaaaacatccgacg

SEQ ID NO: 43115 - DNA, 50 bp, synthetic construct
  source 1..50: mol_type = other DNA
aaccaaaaataaaaactaaatactccaataacacaatcaattaacacaca

SEQ ID NO: 43116 - DNA, 50 bp, synthetic construct
  source 1..50: mol_type = other DNA
aaccgaaaataaaaactaaatactccaataacgcaatcgattaacgcgcg

SEQ ID NO: 43117 - DNA, 50 bp, synthetic construct
  source 1..50: mol_type = other DNA
aaaaatatcaaaaacacactaacaaataccaacaaacctacaaaccatca

SEQ ID NO: 43118 - DNA, 50 bp, synthetic construct
  source 1..50: mol_type = other DNA
aaaaatatcgaaaacacgctaacaaataccgacaaacctacaaaccatcg

SEQ ID NO: 43119 - DNA, 50 bp, synthetic construct
  source 1..50: mol_type = other DNA
tatctatctcttctcaaaccccaaaaaaaaaaccataaacaactcataca

SEQ ID NO: 43120 - DNA, 50 bp, synthetic construct
  source 1..50: mol_type = other DNA
tatctatctcttctcaaaccccgaaaaaaaaaccgtaaacaactcgtacg

SEQ ID NO: 43121 - DNA, 50 bp, synthetic construct
  source 1..50: mol_type = other DNA
ttccaatataacaaaaataataaacactaaaaatcaaaaaataatcacca

SEQ ID NO: 43122 - DNA, 50 bp, synthetic construct
  source 1..50: mol_type = other DNA
ttccaatataacgaaaataataaacactaaaaatcaaaaaataatcaccg

SEQ ID NO: 43123 - DNA, 50 bp, synthetic construct
  source 1..50: mol_type = other DNA
atcaaataacacacctaaaaaccaacaaaaaaccaaaattcccaaaacca

SEQ ID NO: 43124 - DNA, 50 bp, synthetic construct
  source 1..50: mol_type = other DNA
gtcgaataacgcacctaaaaaccaacaaaaaaccgaaattcccaaaaccg

SEQ ID NO: 43125 - DNA, 50 bp, synthetic construct
  source 1..50: mol_type = other DNA
aaaacatcaaataaacctaatcaacccttctataaactcaccacatctca

SEQ ID NO: 43126 - DNA, 50 bp, synthetic construct
  source 1..50: mol_type = other DNA
aaaacgtcaaataaacctaatcaacccttctataaactcaccgcgtctcg

SEQ ID NO: 43127 - DNA, 50 bp, synthetic construct
  source 1..50: mol_type = other DNA
acaacaaaacacaataaacctacaaaaaaactaaccaaactcacctaaca

SEQ ID NO: 43128 - DNA, 50 bp, synthetic construct
  source 1..50: mol_type = other DNA
gcaacgaaacgcgataaacctacaaaaaaactaaccaaactcacctaacg

SEQ ID NO: 43129 - DNA, 50 bp, synthetic construct
  source 1..50: mol_type = other DNA
atttatataaatcccacaaaaactaaacccatttattccccctcaaaaca

SEQ ID NO: 43130 - DNA, 50 bp, synthetic construct
  source 1..50: mol_type = other DNA
atttatataaatcccacgaaaactaaacccgtttattccccctcgaaacg

SEQ ID NO: 43131 - DNA, 50 bp, synthetic construct
  source 1..50: mol_type = other DNA
agagtttggttaaaaagagaatttttgttaagtagatgggggaattgggt

SEQ ID NO: 43132 - DNA, 50 bp, synthetic construct
  source 1..50: mol_type = other DNA
agagtttggttaaaaagagaatttttgttaagtagatgggggaattgggc

SEQ ID NO: 43133 - DNA, 50 bp, synthetic construct
  source 1..50: mol_type = other DNA
ccaaaactttatttcattttataatttcaattaaacatttcattactaca

SEQ ID NO: 43134 - DNA, 50 bp, synthetic construct
  source 1..50: mol_type = other DNA
ccaaaactttatttcgttttataatttcgattaaacatttcattactacg

SEQ ID NO: 43135 - DNA, 50 bp, synthetic construct
  source 1..50: mol_type = other DNA
tatttcttatatattcaattattaaaccataacaataaaatacctaatca

SEQ ID NO: 43136 - DNA, 50 bp, synthetic construct
  source 1..50: mol_type = other DNA
tatttcttatatattcaattattaaaccgtaacaataaaatacctaatcg

SEQ ID NO: 43137 - DNA, 50 bp, synthetic construct
  source 1..50: mol_type = other DNA
attatcccatccattatcaccacaaaataacaataacacttctcaactca

SEQ ID NO: 43138 - DNA, 50 bp, synthetic construct
  source 1..50: mol_type = other DNA
attatcccatccattatcgccacaaaataacgataacgcttctcaactcg

SEQ ID NO: 43139 - DNA, 50 bp, synthetic construct
  source 1..50: mol_type = other DNA
tacaaaaaaattcaaaaaactaaactaacaaaacatcaaaaaacactaca

SEQ ID NO: 43140 - DNA, 50 bp, synthetic construct
  source 1..50: mol_type = other DNA
tacaaaaaaattcaaaaaactaaactaacgaaacgtcaaaaaacgctacg

SEQ ID NO: 43141 - DNA, 50 bp, synthetic construct
  source 1..50: mol_type = other DNA
ttgagaggaatttatatgtagagaagtttaggagattgaattaatggaat

SEQ ID NO: 43142 - DNA, 50 bp, synthetic construct
  source 1..50: mol_type = other DNA
ttgagaggaatttatatgtagagaagtttaggagattgaattaacggaac

SEQ ID NO: 43143 - DNA, 50 bp, synthetic construct
  source 1..50: mol_type = other DNA
tccaaaaaatccacaatcaacttaaatacaccaaaaaaatccaaacccca

SEQ ID NO: 43144 - DNA, 50 bp, synthetic construct
  source 1..50: mol_type = other DNA
tccaaaaaatccacgatcgacttaaatacgccaaaaaaatccaaaccccg

SEQ ID NO: 43145 - DNA, 50 bp, synthetic construct
  source 1..50: mol_type = other DNA
taatttaaaacaataccaaattacaacaattatcaatttaaatttaccca

SEQ ID NO: 43146 - DNA, 50 bp, synthetic construct
  source 1..50: mol_type = other DNA
taatttaaaacaataccaaattacaacgattatcaatttaaatttacccg

SEQ ID NO: 43147 - DNA, 50 bp, synthetic construct
  source 1..50: mol_type = other DNA
aaattcaaaaccaattaaaatacattaaaaaccaattaaaatactcatca

SEQ ID NO: 43148 - DNA, 50 bp, synthetic construct
  source 1..50: mol_type = other DNA
aaattcgaaaccaattaaaatacgttaaaaaccaattaaaatactcgtcg

SEQ ID NO: 43149 - DNA, 50 bp, synthetic construct
  source 1..50: mol_type = other DNA
tataaattcaaaaccaattaaaatacattaaaaaccaattaaaatactca

SEQ ID NO: 43150 - DNA, 50 bp, synthetic construct
  source 1..50: mol_type = other DNA
tataaattcgaaaccaattaaaatacgttaaaaaccaattaaaatactcg

SEQ ID NO: 43151 - DNA, 50 bp, synthetic construct
  source 1..50: mol_type = other DNA
aatccaaacaaccatacacctactactacctaaaaaattaaccaaacaca

SEQ ID NO: 43152 - DNA, 50 bp, synthetic construct
  source 1..50: mol_type = other DNA
aatccaaacgaccgtacgcctactactacctaaaaaattaaccaaacacg

SEQ ID NO: 43153 - DNA, 50 bp, synthetic construct
  source 1..50: mol_type = other DNA
aattcatttataaacaacattttcaaacacatcacaaataaaacttccca

SEQ ID NO: 43154 - DNA, 50 bp, synthetic construct
  source 1..50: mol_type = other DNA
aattcgtttataaacgacattttcgaacgcatcgcaaataaaacttcccg

SEQ ID NO: 43155 - DNA, 50 bp, synthetic construct
  source 1..50: mol_type = other DNA
gtttaaggttatgggtattatgaatttgtttgtgaatgatatttttgagt

SEQ ID NO: 43156 - DNA, 50 bp, synthetic construct
  source 1..50: mol_type = other DNA
gtttaaggttatgggtattatgaattcgtttgtgaacgatattttcgagc

SEQ ID NO: 43157 - DNA, 50 bp, synthetic construct
  source 1..50: mol_type = other DNA
atattggtattttgtttaaggttatgggtattatgaatttgtttgtgaat

SEQ ID NO: 43158 - DNA, 50 bp, synthetic construct
  source 1..50: mol_type = other DNA
atatcggtatttcgtttaaggttatgggtattatgaattcgtttgtgaac

SEQ ID NO: 43159 - DNA, 50 bp, synthetic construct
  source 1..50: mol_type = other DNA
tccaccctaacaccaacatttcatccaaaaccataaacatcataaattca

SEQ ID NO: 43160 - DNA, 50 bp, synthetic construct
  source 1..50: mol_type = other DNA
tccaccctaacaccgacatttcgtccaaaaccataaacatcataaattcg

SEQ ID NO: 43161 - DNA, 50 bp, synthetic construct
  source 1..50: mol_type = other DNA
aatctactcccaccccaaaaaaaaactccaaaaaaacaataactaaaaca

SEQ ID NO: 43162 - DNA, 50 bp, synthetic construct
  source 1..50: mol_type = other DNA
aatctactcccgccccgaaaaaaaactccaaaaaaacgataactaaaacg

SEQ ID NO: 43163 - DNA, 50 bp, synthetic construct
  source 1..50: mol_type = other DNA
caacaacacatcttctttttcacacccaataatatttataaaaaacacca

SEQ ID NO: 43164 - DNA, 50 bp, synthetic construct
  source 1..50: mol_type = other DNA
caacaacacgtcttctttttcgcgcccaataatatttataaaaaacgccg

SEQ ID NO: 43165 - DNA, 50 bp, synthetic construct
  source 1..50: mol_type = other DNA
aaaaacaccacctttcccattcactttataattactcataataaattaca

SEQ ID NO: 43166 - DNA, 50 bp, synthetic construct
  source 1..50: mol_type = other DNA
aaaaacgccgcctttcccgttcactttataattactcgtaataaattacg

SEQ ID NO: 43167 - DNA, 50 bp, synthetic construct
  source 1..50: mol_type = other DNA
acaccacctttcccattcactttataattactcataataaattacactca

SEQ ID NO: 43168 - DNA, 50 bp, synthetic construct
  source 1..50: mol_type = other DNA
acgccgcctttcccgttcactttataattactcgtaataaattacgctcg

SEQ ID NO: 43169 - DNA, 50 bp, synthetic construct
  source 1..50: mol_type = other DNA
taaattacactcactatatctaaacataacaaacaaaaaaacaaaaccca

SEQ ID NO: 43170 - DNA, 50 bp, synthetic construct
  source 1..50: mol_type = other DNA
taaattacgctcgctatatctaaacgtaacaaacaaaaaaacaaaacccg

SEQ ID NO: 43171 - DNA, 50 bp, synthetic construct
  source 1..50: mol_type = other DNA
ccacaaaaaactaaaaaccaaccctaaaaaaacaaatcttaaccttaaca

SEQ ID NO: 43172 - DNA, 50 bp, synthetic construct
  source 1..50: mol_type = other DNA
ccacgaaaaactaaaaaccgaccctaaaaaaacgaatcttaaccttaacg

SEQ ID NO: 43173 - DNA, 50 bp, synthetic construct
  source 1..50: mol_type = other DNA
tctaaacataacaaacaaaaaaacaaaacccacactaaaaccaaaactca

SEQ ID NO: 43174 - DNA, 50 bp, synthetic construct
  source 1..50: mol_type = other DNA
tctaaacgtaacaaacaaaaaaacaaaacccgcgctaaaaccaaaactcg

SEQ ID NO: 43175 - DNA, 50 bp, synthetic construct
  source 1..50: mol_type = other DNA
tacctttacaaaacaaacaatacactcaacccacaaaaaactaaaaacca

SEQ ID NO: 43176 - DNA, 50 bp, synthetic construct
  source 1..50: mol_type = other DNA
tacctttacgaaacaaacgatacactcgacccacgaaaaactaaaaaccg

SEQ ID NO: 43177 - DNA, 50 bp, synthetic construct
  source 1..50: mol_type = other DNA
attaaaaataacacaaaataatacaaatcttcttattatcacaaaccaca

SEQ ID NO: 43178 - DNA, 50 bp, synthetic construct
  source 1..50: mol_type = other DNA
attaaaaataacgcgaaataatacgaatcttcttattatcgcgaaccgcg

SEQ ID NO: 43179 - DNA, 50 bp, synthetic construct
  source 1..50: mol_type = other DNA
ataaccaattaaaaataacacaaaataatacaaatcttcttattatcaca

SEQ ID NO: 43180 - DNA, 50 bp, synthetic construct
  source 1..50: mol_type = other DNA
ataaccaattaaaaataacgcgaaataatacgaatcttcttattatcgcg

SEQ ID NO: 43181 - DNA, 50 bp, synthetic construct
  source 1..50: mol_type = other DNA
catccacaacaacaaaaaactcaacaaactactaaacaaaatcaccatca

SEQ ID NO: 43182 - DNA, 50 bp, synthetic construct
  source 1..50: mol_type = other DNA
catccgcaacgacgaaaaactcaacaaactactaaacaaaatcaccatcg

SEQ ID NO: 43183 - DNA, 50 bp, synthetic construct
  source 1..50: mol_type = other DNA
aacaacttactaatcaacaactcaaaattctaataacaccaaacatcaca

SEQ ID NO: 43184 - DNA, 50 bp, synthetic construct
  source 1..50: mol_type = other DNA
gacaacttactaatcaacaactcgaaattctaataacgccgaacgtcgcg

SEQ ID NO: 43185 - DNA, 50 bp, synthetic construct
  source 1..50: mol_type = other DNA
aaaacaacaacttactaatcaacaactcaaaattctaataacaccaaaca

SEQ ID NO: 43186 - DNA, 50 bp, synthetic construct
  source 1..50: mol_type = other DNA
aaaacgacaacttactaatcaacaactcgaaattctaataacgccgaacg

SEQ ID NO: 43187 - DNA, 50 bp, synthetic construct
  source 1..50: mol_type = other DNA
cacaaaaacaacaacttactaatcaacaactcaaaattctaataacacca

SEQ ID NO: 43188 - DNA, 50 bp, synthetic construct
  source 1..50: mol_type = other DNA
cgcaaaaacgacaacttactaatcaacaactcgaaattctaataacgccg

SEQ ID NO: 43189 - DNA, 50 bp, synthetic construct
  source 1..50: mol_type = other DNA
tattatatcacaaaattcttcaacctcactctcatacaacaacatcacca

SEQ ID NO: 43190 - DNA, 50 bp, synthetic construct
  source 1..50: mol_type = other DNA
tattatatcacaaaattcttcaacctcgctctcgtacaacgacgtcaccg

SEQ ID NO: 43191 - DNA, 50 bp, synthetic construct
  source 1..50: mol_type = other DNA
ttaataaatttaattcccaataacattccaatacatataactttcactca

SEQ ID NO: 43192 - DNA, 50 bp, synthetic construct
  source 1..50: mol_type = other DNA
ttaataaatttaattcccgataacgttccaatacgtataactttcgctcg

SEQ ID NO: 43193 - DNA, 50 bp, synthetic construct
  source 1..50: mol_type = other DNA
tatattaataaatttaattcccaataacattccaatacatataactttca

SEQ ID NO: 43194 - DNA, 50 bp, synthetic construct
  source 1..50: mol_type = other DNA
tatattaataaatttaattcccgataacgttccaatacgtataactttcg

SEQ ID NO: 43195 - DNA, 50 bp, synthetic construct
  source 1..50: mol_type = other DNA
acataaatttatatattaataaatttaattcccaataacattccaataca

SEQ ID NO: 43196 - DNA, 50 bp, synthetic construct
  source 1..50: mol_type = other DNA
acgtaaatttatatattaataaatttaattcccgataacgttccaatacg

SEQ ID NO: 43197 - DNA, 50 bp, synthetic construct
  source 1..50: mol_type = other DNA
aaaaattaaataaaataactactcaaacaaaaaccatacatactaaaaca

SEQ ID NO: 43198 - DNA, 50 bp, synthetic construct
  source 1..50: mol_type = other DNA
aaaaattaaataaaataactactcgaacgaaaaccatacgtactaaaacg

SEQ ID NO: 43199 - DNA, 50 bp, synthetic construct
  source 1..50: mol_type = other DNA
taaataaaataactactcaaacaaaaaccatacatactaaaacaccatca

SEQ ID NO: 43200 - DNA, 50 bp, synthetic construct
  source 1..50: mol_type = other DNA
taaataaaataactactcgaacgaaaaccatacgtactaaaacgccatcg

SEQ ID NO: 43201 - DNA, 50 bp, synthetic construct
  source 1..50: mol_type = other DNA
tatcattaacaaaaaaattcataattcccataaccttaaaaaaaatacca

SEQ ID NO: 43202 - DNA, 50 bp, synthetic construct
  source 1..50: mol_type = other DNA
tatcgttaacgaaaaaattcataattcccataaccttaaaaaaaataccg

SEQ ID NO: 43203 - DNA, 50 bp, synthetic construct
  source 1..50: mol_type = other DNA
aacaccttatacacatatacaaaataactctccttacaactacacttaca

SEQ ID NO: 43204 - DNA, 50 bp, synthetic construct
  source 1..50: mol_type = other DNA
aacaccttatacacgtatacgaaataactctccttacgactacgcttacg

SEQ ID NO: 43205 - DNA, 50 bp, synthetic construct
  source 1..50: mol_type = other DNA
attccaacatattaaaaacaaactacaaacctaaaacaaacaacaaatca

SEQ ID NO: 43206 - DNA, 50 bp, synthetic construct
  source 1..50: mol_type = other DNA
attccgacatattaaaaacgaactacgaacctaaaacgaacaacaaatcg

SEQ ID NO: 43207 - DNA, 50 bp, synthetic construct
  source 1..50: mol_type = other DNA
aatacaccacctactccacaaaaataattataccaaacaaattaaaacca

SEQ ID NO: 43208 - DNA, 50 bp, synthetic construct
  source 1..50: mol_type = other DNA
aatacaccgcctactccgcaaaaataattataccgaacgaattaaaaccg

SEQ ID NO: 43209 - DNA, 50 bp, synthetic construct
  source 1..50: mol_type = other DNA
aaatctcaacaatcaaatactccaacaccacaaccaaatacactaacaca

SEQ ID NO: 43210 - DNA, 50 bp, synthetic construct
  source 1..50: mol_type = other DNA
aaatctcaacgatcaaatactccaacaccgcaaccaaatacactaacgcg

SEQ ID NO: 43211 - DNA, 50 bp, synthetic construct
  source 1..50: mol_type = other DNA
ataattataccaaacaaattaaaaccaacacaccaatatacctaactaca

SEQ ID NO: 43212 - DNA, 50 bp, synthetic construct
  source 1..50: mol_type = other DNA
ataattataccgaacgaattaaaaccgacgcgccaatatacctaactacg

SEQ ID NO: 43213 - DNA, 50 bp, synthetic construct
  source 1..50: mol_type = other DNA
taaaaccaacacaccaatatacctaactacaatactaaaatacctaacca

SEQ ID NO: 43214 - DNA, 50 bp, synthetic construct
  source 1..50: mol_type = other DNA
taaaaccgacgcgccaatatacctaactacgatactaaaatacctaaccg

SEQ ID NO: 43215 - DNA, 50 bp, synthetic construct
  source 1..50: mol_type = other DNA
aaaatacctaaccactaaaatcctaaaactaactaacaatacaacccaca

SEQ ID NO: 43216 - DNA, 50 bp, synthetic construct
  source 1..50: mol_type = other DNA
aaaatacctaaccgctaaaatcctaaaactaactaacaatacgacccgcg

SEQ ID NO: 43217 - DNA, 50 bp, synthetic construct
  source 1..50: mol_type = other DNA
aaaatcctaaaactaactaacaatacaacccacaacaacaaaaaaaccca

SEQ ID NO: 43218 - DNA, 50 bp, synthetic construct
  source 1..50: mol_type = other DNA
aaaatcctaaaactaactaacaatacgacccgcgacaacaaaaaaacccg

SEQ ID NO: 43219 - DNA, 50 bp, synthetic construct
  source 1..50: mol_type = other DNA
tacacaataataactttacccaacaacttattaaactcctcatcattaca

SEQ ID NO: 43220 - DNA, 50 bp, synthetic construct
  source 1..50: mol_type = other DNA
tacgcgataataactttacccaacaacttattaaactcctcgtcgttacg

SEQ ID NO: 43221 - DNA, 50 bp, synthetic construct
  source 1..50: mol_type = other DNA
caccctacacaataataactttacccaacaacttattaaactcctcatca

SEQ ID NO: 43222 - DNA, 50 bp, synthetic construct
  source 1..50: mol_type = other DNA
caccctacgcgataataactttacccaacaacttattaaactcctcgtcg

SEQ ID NO: 43223 - DNA, 50 bp, synthetic construct
  source 1..50: mol_type = other DNA
caccaccctacacaataataactttacccaacaacttattaaactcctca

SEQ ID NO: 43224 - DNA, 50 bp, synthetic construct
  source 1..50: mol_type = other DNA
caccaccctacgcgataataactttacccaacaacttattaaactcctcg

SEQ ID NO: 43225 - DNA, 50 bp, synthetic construct
  source 1..50: mol_type = other DNA
tttaatatcaaaaaaaaaacacaaccaaaaccttaactctaaaaactaca

SEQ ID NO: 43226 - DNA, 50 bp, synthetic construct
  source 1..50: mol_type = other DNA
tttaatatcaaaaaaaaaacacgaccaaaaccttaactctaaaaactacg

SEQ ID NO: 43227 - DNA, 50 bp, synthetic construct
  source 1..50: mol_type = other DNA
taacttcatcctaacccaaatacctataaaaaaccaataaaacactcaca

SEQ ID NO: 43228 - DNA, 50 bp, synthetic construct
  source 1..50: mol_type = other DNA
taacttcgtcctaacccaaatacctataaaaaaccaataaaacgctcgcg

SEQ ID NO: 43229 - DNA, 50 bp, synthetic construct
  source 1..50: mol_type = other DNA
attactacaaccacaacacaaaatactaaccactatacaatcacaacaca

SEQ ID NO: 43230 - DNA, 50 bp, synthetic construct
  source 1..50: mol_type = other DNA
attactacgaccacaacgcaaaatactaaccactatacgatcacgacacg

SEQ ID NO: 43231 - DNA, 50 bp, synthetic construct
  source 1..50: mol_type = other DNA
accaccacaaattcacaaaatcaaaaaattcaaaaaactcaaaaaataca

SEQ ID NO: 43232 - DNA, 50 bp, synthetic construct
  source 1..50: mol_type = other DNA
accgccgcaaattcgcaaaatcgaaaaattcgaaaaactcgaaaaatacg

SEQ ID NO: 43233 - DNA, 50 bp, synthetic construct
  source 1..50: mol_type = other DNA
tcaccaaaaacccaatacccaacactacaaaaccaaatctaattttatca

SEQ ID NO: 43234 - DNA, 50 bp, synthetic construct
  source 1..50: mol_type = other DNA
tcaccaaaaacccgatacccgacactacaaaaccaaatctaattttatcg

SEQ ID NO: 43235 - DNA, 50 bp, synthetic construct
  source 1..50: mol_type = other DNA
caactccacaaacaataaaatcaaacttaaccctacaataccaaacacca

SEQ ID NO: 43236 - DNA, 50 bp, synthetic construct
  source 1..50: mol_type = other DNA
caactccacaaacgataaaatcaaacttaaccctacaataccgaacaccg

SEQ ID NO: 43237 - DNA, 50 bp, synthetic construct
  source 1..50: mol_type = other DNA
aatcaaacttaaccctacaataccaaacaccaaacccttaataatactca

SEQ ID NO: 43238 - DNA, 50 bp, synthetic construct
  source 1..50: mol_type = other DNA
aatcaaacttaaccctacaataccgaacaccgaacccttaataatactcg

SEQ ID NO: 43239 - DNA, 50 bp, synthetic construct
  source 1..50: mol_type = other DNA
atcaaaaactcttaaaaaaaaccatcccactaatcctttcatttacacca

SEQ ID NO: 43240 - DNA, 50 bp, synthetic construct
  source 1..50: mol_type = other DNA
atcaaaaactcttaaaaaaaaccgtcccgctaatcctttcatttacgccg

SEQ ID NO: 43241 - DNA, 50 bp, synthetic construct
  source 1..50: mol_type = other DNA
aataatactcaaataccaaactaacatcaacataaataaaaaaaccaaca

SEQ ID NO: 43242 - DNA, 50 bp, synthetic construct
  source 1..50: mol_type = other DNA
aataatactcgaataccgaactaacatcgacgtaaataaaaaaaccaacg

SEQ ID NO: 43243 - DNA, 50 bp, synthetic construct
  source 1..50: mol_type = other DNA
tactcaaataccaaactaacatcaacataaataaaaaaaccaacaaaaca

SEQ ID NO: 43244 - DNA, 50 bp, synthetic construct
  source 1..50: mol_type = other DNA
tactcgaataccgaactaacatcgacgtaaataaaaaaaccaacgaaacg

SEQ ID NO: 43245 - DNA, 50 bp, synthetic construct
  source 1..50: mol_type = other DNA
tctaaattacctaacccaatcctaaactcaattcctcccaaataccaaca

SEQ ID NO: 43246 - DNA, 50 bp, synthetic construct
  source 1..50: mol_type = other DNA
tctaaattacctaacccgatcctaaactcaattcctcccaaataccgacg

SEQ ID NO: 43247 - DNA, 50 bp, synthetic construct
  source 1..50: mol_type = other DNA
taaataatcaaaaaacccacaacaacaaaccaataacacaataaataaca

SEQ ID NO: 43248 - DNA, 50 bp, synthetic construct
  source 1..50: mol_type = other DNA
taaataatcgaaaaacccacaacgacgaaccaataacgcaataaataacg

SEQ ID NO: 43249 - DNA, 50 bp, synthetic construct
  source 1..50: mol_type = other DNA
cctaataaaaaataaataatcaaaaaacccacaacaacaaaccaataaca

SEQ ID NO: 43250 - DNA, 50 bp, synthetic construct
  source 1..50: mol_type = other DNA
cctaataaaaaataaataatcgaaaaacccacaacgacgaaccaataacg

SEQ ID NO: 43251 - DNA, 50 bp, synthetic construct
  source 1..50: mol_type = other DNA
ttcttaataatcctaataaaaaataaataatcaaaaaacccacaacaaca

SEQ ID NO: 43252 - DNA, 50 bp, synthetic construct
  source 1..50: mol_type = other DNA
ttcttaataatcctaataaaaaataaataatcgaaaaacccacaacgacg

SEQ ID NO: 43253 - DNA, 50 bp, synthetic construct
  source 1..50: mol_type = other DNA
ccctatctctattaaaaacacaaaaaattaacctaacataataacacaca

SEQ ID NO: 43254 - DNA, 50 bp, synthetic construct
  source 1..50: mol_type = other DNA
ccctatctctattaaaaacacaaaaaattaacctaacgtaataacgcgcg

SEQ ID NO: 43255 - DNA, 50 bp, synthetic construct
  source 1..50: mol_type = other DNA
acaaaaaaaacattaaaaaacatctcccaaaccaaacaccataacttaca

SEQ ID NO: 43256 - DNA, 50 bp, synthetic construct
  source 1..50: mol_type = other DNA
acaaaaaaaacattaaaaaacatctcccaaaccgaacgccgtaacttacg

SEQ ID NO: 43257 - DNA, 50 bp, synthetic construct
  source 1..50: mol_type = other DNA
cttcttaatacaatcataaaactaaacaaaaatatcaaaactaaatcaca

SEQ ID NO: 43258 - DNA, 50 bp, synthetic construct
  source 1..50: mol_type = other DNA
cttcttaatacgatcgtaaaactaaacgaaaatatcgaaactaaatcgcg

SEQ ID NO: 43259 - DNA, 50 bp, synthetic construct
  source 1..50: mol_type = other DNA
aaactcacaaactcttcttaatacaatcataaaactaaacaaaaatatca

SEQ ID NO: 43260 - DNA, 50 bp, synthetic construct
  source 1..50: mol_type = other DNA
aaactcgcaaactcttcttaatacgatcgtaaaactaaacgaaaatatcg

SEQ ID NO: 43261 - DNA, 50 bp, synthetic construct
  source 1..50: mol_type = other DNA
aaattcattaaattcccaacacccatcacatcacacattatctatcatca

SEQ ID NO: 43262 - DNA, 50 bp, synthetic construct
  source 1..50: mol_type = other DNA
aaattcgttaaattcccaacacccatcacatcgcacattatctatcgtcg

SEQ ID NO: 43263 - DNA, 50 bp, synthetic construct
  source 1..50: mol_type = other DNA
tccacacacctaaacctcattaaatccactttctcttaaactataaacca

SEQ ID NO: 43264 - DNA, 50 bp, synthetic construct
  source 1..50: mol_type = other DNA
tccacgcgcctaaacctcattaaatccactttctcttaaactataaaccg

SEQ ID NO: 43265 - DNA, 50 bp, synthetic construct
  source 1..50: mol_type = other DNA
ctaaataaaatttaaataacattttaaaaaactccaaatcctttaaacca

SEQ ID NO: 43266 - DNA, 50 bp, synthetic construct
  source 1..50: mol_type = other DNA
ctaaataaaatttaaataacattttaaaaaactccgaatcctttaaaccg

SEQ ID NO: 43267 - DNA, 50 bp, synthetic construct
  source 1..50: mol_type = other DNA
aattctccaacacactaaataaaatttaaataacattttaaaaaactcca

SEQ ID NO: 43268 - DNA, 50 bp, synthetic construct
  source 1..50: mol_type = other DNA
aattctccaacgcgctaaataaaatttaaataacattttaaaaaactccg

SEQ ID NO: 43269 - DNA, 50 bp, synthetic construct
  source 1..50: mol_type = other DNA
taaaatattttacatttaaattctctttaactctaatacaaacaaaaaca

SEQ ID NO: 43270 - DNA, 50 bp, synthetic construct
  source 1..50: mol_type = other DNA
taaaatattttacgtttaaattctctttaactctaatacaaacaaaaacg

SEQ ID NO: 43271 - DNA, 50 bp, synthetic construct
  source 1..50: mol_type = other DNA
atccaataaacaaatatccacataaattcaaaccccactcccaataaaca

SEQ ID NO: 43272 - DNA, 50 bp, synthetic construct
  source 1..50: mol_type = other DNA
atccaataaacaaatatccgcgtaaattcgaaccccactcccgataaacg

SEQ ID NO: 43273 - DNA, 50 bp, synthetic construct
  source 1..50: mol_type = other DNA
attaaaacattaaacttaaaatccaataaacaaatatccacataaattca

SEQ ID NO: 43274 - DNA, 50 bp, synthetic construct
  source 1..50: mol_type = other DNA
attaaaacgttaaacttaaaatccaataaacaaatatccgcgtaaattcg

SEQ ID NO: 43275 - DNA, 50 bp, synthetic construct
  source 1..50: mol_type = other DNA
aacaaacaaaactaaaaacacaaacaataaaccaaacataataactcaca

SEQ ID NO: 43276 - DNA, 50 bp, synthetic construct
  source 1..50: mol_type = other DNA
aacaaacaaaactaaaaacacaaacaataaaccgaacgtaataactcacg

SEQ ID NO: 43277 - DNA, 50 bp, synthetic construct
  source 1..50: mol_type = other DNA
aaaccaaacataataactcacaactataataccaacactttaaaaaccca

SEQ ID NO: 43278 - DNA, 50 bp, synthetic construct
  source 1..50: mol_type = other DNA
aaaccgaacgtaataactcacgactataataccaacactttaaaaacccg

SEQ ID NO: 43279 - DNA, 50 bp, synthetic construct
  source 1..50: mol_type = other DNA
ataataactcacaactataataccaacactttaaaaacccaaaaaaaaca

SEQ ID NO: 43280 - DNA, 50 bp, synthetic construct
  source 1..50: mol_type = other DNA
gtaataactcacgactataataccaacactttaaaaacccgaaaaaaacg

SEQ ID NO: 43281 - DNA, 50 bp, synthetic construct
  source 1..50: mol_type = other DNA
acctaaaatcaaaaattcaaaaccaatctaatcaaaataacaaaacccca

SEQ ID NO: 43282 - DNA, 50 bp, synthetic construct
  source 1..50: mol_type = other DNA
acctaaaatcaaaaattcgaaaccaatctaatcaaaataacgaaaccccg

SEQ ID NO: 43283 - DNA, 50 bp, synthetic construct
  source 1..50: mol_type = other DNA
ccccatatctactaaaaaatacaaaaattaaccaaaaataataacataca

SEQ ID NO: 43284 - DNA, 50 bp, synthetic construct
  source 1..50: mol_type = other DNA
ccccgtatctactaaaaaatacaaaaattaaccgaaaataataacatacg

SEQ ID NO: 43285 - DNA, 50 bp, synthetic construct
  source 1..50: mol_type = other DNA
aaaaacactccccaaaaaaaacaaaatttaaacaaaaacaatcctatcca

SEQ ID NO: 43286 - DNA, 50 bp, synthetic construct
  source 1..50: mol_type = other DNA
aaaaacgctccccaaaaaaaacgaaatttaaacaaaaacaatcctatccg

SEQ ID NO: 43287 - DNA, 50 bp, synthetic construct
  source 1..50: mol_type = other DNA
caaaataaaacaaaaccacaataaaaaacaaaacctacaaaaaaaaccca

SEQ ID NO: 43288 - DNA, 50 bp, synthetic construct
  source 1..50: mol_type = other DNA
caaaataaaacgaaaccacaataaaaaacgaaacctacaaaaaaaacccg

SEQ ID NO: 43289 - DNA, 50 bp, synthetic construct
  source 1..50: mol_type = other DNA
cactataaaaaacaaaaaacaatatccaccaaaacttaaactaaacctca

SEQ ID NO: 43290 - DNA, 50 bp, synthetic construct
  source 1..50: mol_type = other DNA
cactataaaaaacaaaaaacgatatccgccaaaacttaaactaaacctcg

SEQ ID NO: 43291 - DNA, 50 bp, synthetic construct
  source 1..50: mol_type = other DNA
aatcctaaataaaaaaaaccaaaacccaacctaaatcttaacaaacatca

SEQ ID NO: 43292 - DNA, 50 bp, synthetic construct
  source 1..50: mol_type = other DNA
aatcctaaataaaaaaaaccgaaacccaacctaaatcttaacgaacatcg

SEQ ID NO: 43293 - DNA, 50 bp, synthetic construct
  source 1..50: mol_type = other DNA
aaaataaaacaacaactacactcaaataaaacaactcaaacaacattaca

SEQ ID NO: 43294 - DNA, 50 bp, synthetic construct
  source 1..50: mol_type = other DNA
aaaataaaacgacgactacgctcgaataaaacgactcaaacaacattacg

SEQ ID NO: 43295 - DNA, 50 bp, synthetic construct
  source 1..50: mol_type = other DNA
actacactcaaataaaacaactcaaacaacattacaaacaaaactaaaca

SEQ ID NO: 43296 - DNA, 50 bp, synthetic construct
  source 1..50: mol_type = other DNA
actacgctcgaataaaacgactcaaacaacattacgaacgaaactaaacg

SEQ ID NO: 43297 - DNA, 50 bp, synthetic construct
  source 1..50: mol_type = other DNA
actcaaacaacattacaaacaaaactaaacacttacaaacccctaaacca

SEQ ID NO: 43298 - DNA, 50 bp, synthetic construct
  source 1..50: mol_type = other DNA
actcaaacaacattacgaacgaaactaaacgcttacgaacccctaaaccg

SEQ ID NO: 43299 - DNA, 50 bp, synthetic construct
  source 1..50: mol_type = other DNA
aaacactacaaacactaataaaaaatataatacaatataataaacaaaca

SEQ ID NO: 43300 - DNA, 50 bp, synthetic construct
  source 1..50: mol_type = other DNA
aaacgctacaaacactaataaaaaatataatacaatataataaacaaacg

SEQ ID NO: 43301 - DNA, 50 bp, synthetic construct
  source 1..50: mol_type = other DNA
aaacactaataaaaaatataatacaatataataaacaaacaaaaacacca

SEQ ID NO: 43302 - DNA, 50 bp, synthetic construct
  source 1..50: mol_type = other DNA
aaacactaataaaaaatataatacaatataataaacaaacgaaaacgccg

SEQ ID NO: 43303 - DNA, 50 bp, synthetic construct
  source 1..50: mol_type = other DNA
aataaaaaatataatacaatataataaacaaacaaaaacaccactaaaca

SEQ ID NO: 43304 - DNA, 50 bp, synthetic construct
  source 1..50: mol_type = other DNA
aataaaaaatataatacaatataataaacaaacgaaaacgccgctaaacg

SEQ ID NO: 43305 - DNA, 50 bp, synthetic construct
  source 1..50: mol_type = other DNA
aaaaatataatacaatataataaacaaacaaaaacaccactaaacataca

SEQ ID NO: 43306 - DNA, 50 bp, synthetic construct
  source 1..50: mol_type = other DNA
aaaaatataatacaatataataaacaaacgaaaacgccgctaaacgtacg

SEQ ID NO: 43307 - DNA, 50 bp, synthetic construct
  source 1..50: mol_type = other DNA
acaatataataaacaaacaaaaacaccactaaacatacaacaactctaca

SEQ ID NO: 43308 - DNA, 50 bp, synthetic construct
  source 1..50: mol_type = other DNA
acaatataataaacaaacgaaaacgccgctaaacgtacgacaactctacg

SEQ ID NO: 43309 - DNA, 50 bp, synthetic construct
  source 1..50: mol_type = other DNA
aacaaaaactacaattacacaacctcaacaaaacaaacaataccaattca

SEQ ID NO: 43310 - DNA, 50 bp, synthetic construct
  source 1..50: mol_type = other DNA
aacgaaaactacaattacacgacctcgacaaaacgaacaataccaattcg

SEQ ID NO: 43311 - DNA, 50 bp, synthetic construct
  source 1..50: mol_type = other DNA
actaaatattcaaaaaccccaatttcccacaatctatctcactacaaaca

SEQ ID NO: 43312 - DNA, 50 bp, synthetic construct
  source 1..50: mol_type = other DNA
actaaatattcaaaaaccccaatttcccacaatctatctcgctacgaacg

SEQ ID NO: 43313 - DNA, 50 bp, synthetic construct
  source 1..50: mol_type = other DNA
atatccttcaaataccaatttatatattatattaataaacaacttttaca

SEQ ID NO: 43314 - DNA, 50 bp, synthetic construct
  source 1..50: mol_type = other DNA
atatccttcaaataccaatttatatattatattaataaacgacttttacg

SEQ ID NO: 43315 - DNA, 50 bp, synthetic construct
  source 1..50: mol_type = other DNA
ccaatttaataaaaaacaatttttccacaaacaaaaccaatactaatcca

SEQ ID NO: 43316 - DNA, 50 bp, synthetic construct
  source 1..50: mol_type = other DNA
ccgatttaataaaaaacaatttttccacgaacgaaaccgatactaatccg

SEQ ID NO: 43317 - DNA, 50 bp, synthetic construct
  source 1..50: mol_type = other DNA
aatttaataaaaaacaatttttccacaaacaaaaccaatactaatccaca

SEQ ID NO: 43318 - DNA, 50 bp, synthetic construct
  source 1..50: mol_type = other DNA
gatttaataaaaaacaatttttccacgaacgaaaccgatactaatccgcg

SEQ ID NO: 43319 - DNA, 50 bp, synthetic construct
  source 1..50: mol_type = other DNA
aaaaaaccaaaacaaataaatcacctaaactcaaaaactaaaaaccacca

SEQ ID NO: 43320 - DNA, 50 bp, synthetic construct
  source 1..50: mol_type = other DNA
aaaaaaccgaaacgaataaatcgcctaaactcaaaaactaaaaaccaccg

SEQ ID NO: 43321 - DNA, 50 bp, synthetic construct
  source 1..50: mol_type = other DNA
acctaaactcaaaaactaaaaaccaccaaaaacaacataataaaacccca

SEQ ID NO: 43322 - DNA, 50 bp, synthetic construct
  source 1..50: mol_type = other DNA
gcctaaactcaaaaactaaaaaccaccgaaaacaacataataaaaccccg

SEQ ID NO: 43323 - DNA, 50 bp, synthetic construct
  source 1..50: mol_type = other DNA
tatcttttttaattatttcttattacacaataaatataacactactaaca

SEQ ID NO: 43324 - DNA, 50 bp, synthetic construct
  source 1..50: mol_type = other DNA
tatcttttttaattatttcttattacgcaataaatataacactactaacg

SEQ ID NO: 43325 - DNA, 50 bp, synthetic construct
  source 1..50: mol_type = other DNA
tatttatataatatttaattaaatccatcaacaatatcatatttactaca

SEQ ID NO: 43326 - DNA, 50 bp, synthetic construct
  source 1..50: mol_type = other DNA
tatttatataatatttaattaaatccgtcaacaatatcatatttactacg

SEQ ID NO: 43327 - DNA, 50 bp, synthetic construct
  source 1..50: mol_type = other DNA
acacaaacataaaatttcactttcttcccactttctcacacaaaaactca

SEQ ID NO: 43328 - DNA, 50 bp, synthetic construct
  source 1..50: mol_type = other DNA
acacaaacgtaaaatttcgctttcttcccactttctcacacgaaaactcg

SEQ ID NO: 43329 - DNA, 50 bp, synthetic construct
  source 1..50: mol_type = other DNA
aatccctaatcccaaccaacaaaaacaacttctccaatttataactctca

SEQ ID NO: 43330 - DNA, 50 bp, synthetic construct
  source 1..50: mol_type = other DNA
aatccctaatcccaaccaacgaaaacgacttctccaatttataactctcg

SEQ ID NO: 43331 - DNA, 50 bp, synthetic construct
  source 1..50: mol_type = other DNA
tcccaaccaacaaaaacaacttctccaatttataactctcaaaaaattca

SEQ ID NO: 43332 - DNA, 50 bp, synthetic construct
  source 1..50: mol_type = other DNA
tcccaaccaacgaaaacgacttctccaatttataactctcgaaaaattcg

SEQ ID NO: 43333 - DNA, 50 bp, synthetic construct
  source 1..50: mol_type = other DNA
accaacaaaaacaacttctccaatttataactctcaaaaaattcacctca

SEQ ID NO: 43334 - DNA, 50 bp, synthetic construct
  source 1..50: mol_type = other DNA
accaacgaaaacgacttctccaatttataactctcgaaaaattcgcctcg

SEQ ID NO: 43335 - DNA, 50 bp, synthetic construct
  source 1..50: mol_type = other DNA
cctctcaaataaccacctatttctaacctctaaaaaccaaactaaaccca

SEQ ID NO: 43336 - DNA, 50 bp, synthetic construct
  source 1..50: mol_type = other DNA
cctctcaaataaccacctatttctaacctctaaaaaccgaactaaacccg

SEQ ID NO: 43337 - DNA, 50 bp, synthetic construct
  source 1..50: mol_type = other DNA
tctaacctctaaaaaccaaactaaacccaaaattttataaccaacaccca

SEQ ID NO: 43338 - DNA, 50 bp, synthetic construct
  source 1..50: mol_type = other DNA
tctaacctctaaaaaccgaactaaacccgaaattttataaccaacgcccg

SEQ ID NO: 43339 - DNA, 50 bp, synthetic construct
  source 1..50: mol_type = other DNA
tctaaaaaccaaactaaacccaaaattttataaccaacacccactaacca

SEQ ID NO: 43340 - DNA, 50 bp, synthetic construct
  source 1..50: mol_type = other DNA
tctaaaaaccgaactaaacccgaaattttataaccaacgcccgctaaccg

SEQ ID NO: 43341 - DNA, 50 bp, synthetic construct
  source 1..50: mol_type = other DNA
caaaactctataaaattaaaaatcataaaaaacttctaaacacaaaaaca

SEQ ID NO: 43342 - DNA, 50 bp, synthetic construct
  source 1..50: mol_type = other DNA
cgaaactctataaaattaaaaatcgtaaaaaacttctaaacgcaaaaacg

SEQ ID NO: 43343 - DNA, 50 bp, synthetic construct
  source 1..50: mol_type = other DNA
tacctacatctatcactaattccaaaaaacataaaaaaacccaaaacaca

SEQ ID NO: 43344 - DNA, 50 bp, synthetic construct
  source 1..50: mol_type = other DNA
tacctacgtctatcgctaattccaaaaaacgtaaaaaaacccgaaacgcg

SEQ ID NO: 43345 - DNA, 50 bp, synthetic construct
  source 1..50: mol_type = other DNA
tcttttatacctacatctatcactaattccaaaaaacataaaaaaaccca

SEQ ID NO: 43346 - DNA, 50 bp, synthetic construct
  source 1..50: mol_type = other DNA
tcttttatacctacgtctatcgctaattccaaaaaacgtaaaaaaacccg

SEQ ID NO: 43347 - DNA, 50 bp, synthetic construct
  source 1..50: mol_type = other DNA
aacttctaaaaataccttactctttcaaaaaaaaacaaccaaaaaaaaca

SEQ ID NO: 43348 - DNA, 50 bp, synthetic construct
  source 1..50: mol_type = other DNA
aacttctaaaaataccttactctttcaaaaaaaaacgaccaaaaaaaacg

SEQ ID NO: 43349 - DNA, 50 bp, synthetic construct
  source 1..50: mol_type = other DNA
cacactaaatatcaattacacatcttacctaataaataaataaacactca

SEQ ID NO: 43350 - DNA, 50 bp, synthetic construct
  source 1..50: mol_type = other DNA
cgcgctaaatatcaattacacgtcttacctaataaataaataaacactcg

SEQ ID NO: 43351 - DNA, 50 bp, synthetic construct
  source 1..50: mol_type = other DNA
caaatacctacccacctatcaaataaaacatacaactaacactcaacaca

SEQ ID NO: 43352 - DNA, 50 bp, synthetic construct
  source 1..50: mol_type = other DNA
cgaatacctacccacctatcaaataaaacgtacaactaacactcaacgcg

SEQ ID NO: 43353 - DNA, 50 bp, synthetic construct
  source 1..50: mol_type = other DNA
aaacacaattctcttcaaacaaataaaccctttctcaacaaactcctcca

SEQ ID NO: 43354 - DNA, 50 bp, synthetic construct
  source 1..50: mol_type = other DNA
aaacgcaattctcttcgaacaaataaaccctttctcaacgaactcctccg

SEQ ID NO: 43355 - DNA, 50 bp, synthetic construct
  source 1..50: mol_type = other DNA
aaaaccatacaaacacaattctcttcaaacaaataaaccctttctcaaca

SEQ ID NO: 43356 - DNA, 50 bp, synthetic construct
  source 1..50: mol_type = other DNA
aaaaccatacaaacgcaattctcttcgaacaaataaaccctttctcaacg

SEQ ID NO: 43357 - DNA, 50 bp, synthetic construct
  source 1..50: mol_type = other DNA
acacaaaaaaacccactaaaaaaaaatttacctatccaaaaaaaactaca

SEQ ID NO: 43358 - DNA, 50 bp, synthetic construct
  source 1..50: mol_type = other DNA
gcgcgaaaaaacccgctaaaaaaaaatttacctatccgaaaaaaactacg

SEQ ID NO: 43359 - DNA, 50 bp, synthetic construct
  source 1..50: mol_type = other DNA
ctacatttcccaaaattatctacaactaaaaaaatttaaaatttaaaaca

SEQ ID NO: 43360 - DNA, 50 bp, synthetic construct
  source 1..50: mol_type = other DNA
ctacatttcccaaaattatctacgactaaaaaaatttaaaatttaaaacg

SEQ ID NO: 43361 - DNA, 50 bp, synthetic construct
  source 1..50: mol_type = other DNA
ataaaaaaatacctataatcttaaaaaacctaataaacattaaaacaaca

SEQ ID NO: 43362 - DNA, 50 bp, synthetic construct
  source 1..50: mol_type = other DNA
ataaaaaaatacctataatcttaaaaaacctaataaacgttaaaacaacg

SEQ ID NO: 43363 - DNA, 50 bp, synthetic construct
  source 1..50: mol_type = other DNA
aaaatacctataatcttaaaaaacctaataaacattaaaacaacaattca

SEQ ID NO: 43364 - DNA, 50 bp, synthetic construct
  source 1..50: mol_type = other DNA
aaaatacctataatcttaaaaaacctaataaacgttaaaacaacgattcg

SEQ ID NO: 43365 - DNA, 50 bp, synthetic construct
  source 1..50: mol_type = other DNA
caaaaatactcaaccaaaaacaaccaataaataaaacttacaaaacccca

SEQ ID NO: 43366 - DNA, 50 bp, synthetic construct
  source 1..50: mol_type = other DNA
cgaaaatactcgaccgaaaacgaccgataaataaaacttacaaaaccccg

SEQ ID NO: 43367 - DNA, 50 bp, synthetic construct
  source 1..50: mol_type = other DNA
ccccaaaaccaaaataaatactcttaaaaattctaaaaaacaaaaacaca

SEQ ID NO: 43368 - DNA, 50 bp, synthetic construct
  source 1..50: mol_type = other DNA
ccccgaaaccaaaataaatactcttaaaaattctaaaaaacgaaaacacg

SEQ ID NO: 43369 - DNA, 50 bp, synthetic construct
  source 1..50: mol_type = other DNA
atttaactacaaatcaaatcaaaaaacacctccacaattaaaacaccaca

SEQ ID NO: 43370 - DNA, 50 bp, synthetic construct
  source 1..50: mol_type = other DNA
atttaactacaaatcgaatcaaaaaacacctccacgattaaaacgccgcg

SEQ ID NO: 43371 - DNA, 50 bp, synthetic construct
  source 1..50: mol_type = other DNA
ctaaactaacccaccaataaaacaaacactaaaaacttcataaccccaca

SEQ ID NO: 43372 - DNA, 50 bp, synthetic construct
  source 1..50: mol_type = other DNA
ctaaactaacccgccaataaaacgaacgctaaaaacttcataaccccacg

SEQ ID NO: 43373 - DNA, 50 bp, synthetic construct
  source 1..50: mol_type = other DNA
aactatcactaccacaaaaaaactaaactaacccaccaataaaacaaaca

SEQ ID NO: 43374 - DNA, 50 bp, synthetic construct
  source 1..50: mol_type = other DNA
aactatcactaccgcaaaaaaactaaactaacccgccaataaaacgaacg

SEQ ID NO: 43375 - DNA, 50 bp, synthetic construct
  source 1..50: mol_type = other DNA
tacactcaataaacacctaaaaaacaccccaataccaaaaacctccctca

SEQ ID NO: 43376 - DNA, 50 bp, synthetic construct
  source 1..50: mol_type = other DNA
tacactcaataaacacctaaaaaacaccccaataccgaaaacctccctcg

SEQ ID NO: 43377 - DNA, 50 bp, synthetic construct
  source 1..50: mol_type = other DNA
catattacaaattccctacaaaaaaaattaaacatctaaatcctaaacca

SEQ ID NO: 43378 - DNA, 50 bp, synthetic construct
  source 1..50: mol_type = other DNA
cgtattacaaattccctacaaaaaaaattaaacatctaaatcctaaaccg

SEQ ID NO: 43379 - DNA, 50 bp, synthetic construct
  source 1..50: mol_type = other DNA
ttaaaccaaaacaaaaaaacaaaaccctccaaaaaatcaaaacaaaacca

SEQ ID NO: 43380 - DNA, 50 bp, synthetic construct
  source 1..50: mol_type = other DNA
ttaaaccaaaacaaaaaaacaaaaccctccaaaaaatcaaaacgaaaccg

SEQ ID NO: 43381 - DNA, 50 bp, synthetic construct
  source 1..50: mol_type = other DNA
ctttctcctacaaaaacctctaaacacaaaatcaaaaaaataacatcaca

SEQ ID NO: 43382 - DNA, 50 bp, synthetic construct
  source 1..50: mol_type = other DNA
ctttctcctacaaaaacctctaaacgcgaaatcaaaaaaataacgtcacg

SEQ ID NO: 43383 - DNA, 50 bp, synthetic construct
  source 1..50: mol_type = other DNA
cctacaaaaacctctaaacacaaaatcaaaaaaataacatcacaaatcca

SEQ ID NO: 43384 - DNA, 50 bp, synthetic construct
  source 1..50: mol_type = other DNA
cctacaaaaacctctaaacgcgaaatcaaaaaaataacgtcacgaatccg

SEQ ID NO: 43385 - DNA, 50 bp, synthetic construct
  source 1..50: mol_type = other DNA
ctaataacaatcaatacacttccaaacccaaaatcaaaatatataaatca

SEQ ID NO: 43386 - DNA, 50 bp, synthetic construct
  source 1..50: mol_type = other DNA
ctaataacgatcaatacgcttccgaacccgaaatcaaaatatataaatcg

SEQ ID NO: 43387 - DNA, 50 bp, synthetic construct
  source 1..50: mol_type = other DNA
aattacttcaactccctacattaaatctaataacaatcaatacacttcca

SEQ ID NO: 43388 - DNA, 50 bp, synthetic construct
  source 1..50: mol_type = other DNA
aattacttcgactccctacgttaaatctaataacgatcaatacgcttccg

SEQ ID NO: 43389 - DNA, 50 bp, synthetic construct
  source 1..50: mol_type = other DNA
acacactaaaaatccaattacttcaactccctacattaaatctaataaca

SEQ ID NO: 43390 - DNA, 50 bp, synthetic construct
  source 1..50: mol_type = other DNA
acgcgctaaaaatccaattacttcgactccctacgttaaatctaataacg

SEQ ID NO: 43391 - DNA, 50 bp, synthetic construct
  source 1..50: mol_type = other DNA
tacacattaactaaaacctctaaaaaataaaattcaaaaacaccttcaca

SEQ ID NO: 43392 - DNA, 50 bp, synthetic construct
  source 1..50: mol_type = other DNA
tacacgttaactaaaacctctaaaaaataaaattcaaaaacaccttcgcg

SEQ ID NO: 43393 - DNA, 50 bp, synthetic construct
  source 1..50: mol_type = other DNA
acaaatttacaatacacacacatacctaaaacaaaaacaaaaaactaaca

SEQ ID NO: 43394 - DNA, 50 bp, synthetic construct
  source 1..50: mol_type = other DNA
acaaatttacaatacacacgcatacctaaaacaaaaacaaaaaactaacg

SEQ ID NO: 43395 - DNA, 50 bp, synthetic construct
  source 1..50: mol_type = other DNA
ccaaaatactcaaattacaaacataaaccactacactcaatcaataaaca

SEQ ID NO: 43396 - DNA, 50 bp, synthetic construct
  source 1..50: mol_type = other DNA
ccaaaatactcaaattacaaacgtaaaccactacgctcgatcaataaacg

SEQ ID NO: 43397 - DNA, 50 bp, synthetic construct
  source 1..50: mol_type = other DNA
taaccaaacacaataactcacatctataatctaaacactttaaaaaacca

SEQ ID NO: 43398 - DNA, 50 bp, synthetic construct
  source 1..50: mol_type = other DNA
taaccgaacgcaataactcacgtctataatctaaacactttaaaaaaccg

SEQ ID NO: 43399 - DNA, 50 bp, synthetic construct
  source 1..50: mol_type = other DNA
aaaacataaaaacacattataaaatacaaaataccatacaaacaaaacca

SEQ ID NO: 43400 - DNA, 50 bp, synthetic construct
  source 1..50: mol_type = other DNA
aaaacgtaaaaacgcattataaaatacaaaataccgtacaaacgaaaccg

SEQ ID NO: 43401 - DNA, 50 bp, synthetic construct
  source 1..50: mol_type = other DNA
ccaaactaaaaacaaatataacatcatatttcctctctaaaataaataca

SEQ ID NO: 43402 - DNA, 50 bp, synthetic construct
  source 1..50: mol_type = other DNA
ccaaactaaaaacaaatataacatcgtatttcctctctaaaataaatacg

SEQ ID NO: 43403 - DNA, 50 bp, synthetic construct
  source 1..50: mol_type = other DNA
tatttttaaaattcaaaatacatcaaataacacacaaaaactttatcaca

SEQ ID NO: 43404 - DNA, 50 bp, synthetic construct
  source 1..50: mol_type = other DNA
tatttttaaaattcaaaatacgtcaaataacacgcaaaaactttatcacg

SEQ ID NO: 43405 - DNA, 50 bp, synthetic construct
  source 1..50: mol_type = other DNA
taaagagtttgtagatgtatttttaaagtttaggatgtgttaagtggtat

SEQ ID NO: 43406 - DNA, 50 bp, synthetic construct
  source 1..50: mol_type = other DNA
taaagagtttgtagatgtatttttaaagtttaggatgcgttaagtggtac

SEQ ID NO: 43407 - DNA, 50 bp, synthetic construct
  source 1..50: mol_type = other DNA
aatttaaaaacaaaaaaactcataataaaacttctacataccacttaaca

SEQ ID NO: 43408 - DNA, 50 bp, synthetic construct
  source 1..50: mol_type = other DNA
aatttaaaaacgaaaaaactcgtaataaaacttctacgtaccacttaacg

SEQ ID NO: 43409 - DNA, 50 bp, synthetic construct
  source 1..50: mol_type = other DNA
ataatcacacatttcccctaccaaatatacacaaaacaattcaacaaaca

SEQ ID NO: 43410 - DNA, 50 bp, synthetic construct
  source 1..50: mol_type = other DNA
ataatcacacgtttcccctaccaaatatacgcaaaacaattcaacgaacg

SEQ ID NO: 43411 - DNA, 50 bp, synthetic construct
  source 1..50: mol_type = other DNA
ctctataatcacacatttcccctaccaaatatacacaaaacaattcaaca

SEQ ID NO: 43412 - DNA, 50 bp, synthetic construct
  source 1..50: mol_type = other DNA
ctctataatcacacgtttcccctaccaaatatacgcaaaacaattcaacg

SEQ ID NO: 43413 - DNA, 50 bp, synthetic construct
  source 1..50: mol_type = other DNA
attttttgttagtatagtggtgagtatttttgtttgttatgtgggagatt

SEQ ID NO: 43414 - DNA, 50 bp, synthetic construct
  source 1..50: mol_type = other DNA
atttttcgttagtatagtggtgagtattttcgtttgttacgcgggagatc

SEQ ID NO: 43415 - DNA, 50 bp, synthetic construct
  source 1..50: mol_type = other DNA
aatatacttttctaaaaaaaaatttaaacctcctccccatcaaaaaatca

SEQ ID NO: 43416 - DNA, 50 bp, synthetic construct
  source 1..50: mol_type = other DNA
aatatacttttctaaaaaaaaatttaaacctcctccccgtcgaaaaatcg

SEQ ID NO: 43417 - DNA, 50 bp, synthetic construct
  source 1..50: mol_type = other DNA
ataaactttaatccacaaaataacaaacataaataattctatttatatca

SEQ ID NO: 43418 - DNA, 50 bp, synthetic construct
  source 1..50: mol_type = other DNA
ataaactttaatccacaaaataacgaacataaataattctatttatatcg

SEQ ID NO: 43419 - DNA, 50 bp, synthetic construct
  source 1..50: mol_type = other DNA
cttatcattttacttaaaaatatatataaactttaatccacaaaataaca

SEQ ID NO: 43420 - DNA, 50 bp, synthetic construct
  source 1..50: mol_type = other DNA
cttatcgttttacttaaaaatatatataaactttaatccacaaaataacg

SEQ ID NO: 43421 - DNA, 50 bp, synthetic construct
  source 1..50: mol_type = other DNA
attttttaccctcaacaacaccacaaataccaaaactaattaacacacca

SEQ ID NO: 43422 - DNA, 50 bp, synthetic construct
  source 1..50: mol_type = other DNA
attttttaccctcgacaacgccacgaataccaaaactaattaacacgccg

SEQ ID NO: 43423 - DNA, 50 bp, synthetic construct
  source 1..50: mol_type = other DNA
gttatgaaatggaatttttaaaagtgtttttagtgttaggagtaaagaat

SEQ ID NO: 43424 - DNA, 50 bp, synthetic construct
  source 1..50: mol_type = other DNA
gttacgaaatggaatttttaaaagtgtttttagcgttaggagtaaagaac

SEQ ID NO: 43425 - DNA, 50 bp, synthetic construct
  source 1..50: mol_type = other DNA
caaaataaaactttcaaaaatattcctaacattaaaaacaaaaaacacca

SEQ ID NO: 43426 - DNA, 50 bp, synthetic construct
  source 1..50: mol_type = other DNA
cgaaataaaactttcaaaaatattcctaacgttaaaaacaaaaaacgccg

SEQ ID NO: 43427 - DNA, 50 bp, synthetic construct
  source 1..50: mol_type = other DNA
ttcaaaaatattcctaacattaaaaacaaaaaacaccaaacaaacactca

SEQ ID NO: 43428 - DNA, 50 bp, synthetic construct
  source 1..50: mol_type = other DNA
ttcaaaaatattcctaacgttaaaaacaaaaaacgccgaacaaacgctcg

SEQ ID NO: 43429 - DNA, 50 bp, synthetic construct
  source 1..50: mol_type = other DNA
atattcctaacattaaaaacaaaaaacaccaaacaaacactcaaaaaaca

SEQ ID NO: 43430 - DNA, 50 bp, synthetic construct
  source 1..50: mol_type = other DNA
atattcctaacgttaaaaacaaaaaacgccgaacaaacgctcgaaaaacg

SEQ ID NO: 43431 - DNA, 50 bp, synthetic construct
  source 1..50: mol_type = other DNA
caacctaaccacactaacaaattacattattaaaaaaaccacaaaactca

SEQ ID NO: 43432 - DNA, 50 bp, synthetic construct
  source 1..50: mol_type = other DNA
caacctaaccgcgctaacaaattacgttattaaaaaaaccgcgaaactcg

SEQ ID NO: 43433 - DNA, 50 bp, synthetic construct
  source 1..50: mol_type = other DNA
aaaacaccaacctaaccacactaacaaattacattattaaaaaaaccaca

SEQ ID NO: 43434 - DNA, 50 bp, synthetic construct
  source 1..50: mol_type = other DNA
aaaacaccaacctaaccgcgctaacaaattacgttattaaaaaaaccgcg

SEQ ID NO: 43435 - DNA, 50 bp, synthetic construct
  source 1..50: mol_type = other DNA
ctaaattaataccctctccccctatatcaaaacaacccaacttaaaacca

SEQ ID NO: 43436 - DNA, 50 bp, synthetic construct
  source 1..50: mol_type = other DNA
ctaaattaataccctctccccctatatcgaaacaacccgacttaaaaccg

SEQ ID NO: 43437 - DNA, 50 bp, synthetic construct
  source 1..50: mol_type = other DNA
aatcacaaaatcaaaaaatcaaaaccatcctaacacaataaactaacaca

SEQ ID NO: 43438 - DNA, 50 bp, synthetic construct
  source 1..50: mol_type = other DNA
aatcacgaaatcaaaaaatcgaaaccatcctaacacgataaactaacacg

SEQ ID NO: 43439 - DNA, 50 bp, synthetic construct
  source 1..50: mol_type = other DNA
actaaaatataataataaaatcactactcactacaacctcaacctcccca

SEQ ID NO: 43440 - DNA, 50 bp, synthetic construct
  source 1..50: mol_type = other DNA
actaaaatataataataaaatcactactcactacaacctcgacctccccg

SEQ ID NO: 43441 - DNA, 50 bp, synthetic construct
  source 1..50: mol_type = other DNA
taataaaaactcatctctacaaaaaaattaaccaaatataataacaaaca

SEQ ID NO: 43442 - DNA, 50 bp, synthetic construct
  source 1..50: mol_type = other DNA
taataaaaactcgtctctacaaaaaaattaaccgaatataataacaaacg

SEQ ID NO: 43443 - DNA, 50 bp, synthetic construct
  source 1..50: mol_type = other DNA
acaatttaaaaaacccaaacaaacaaatcacctaaaattaaaaattcaca

SEQ ID NO: 43444 - DNA, 50 bp, synthetic construct
  source 1..50: mol_type = other DNA
acaatttaaaaaacccaaacgaacgaatcacctaaaattaaaaattcgcg

SEQ ID NO: 43445 - DNA, 50 bp, synthetic construct
  source 1..50: mol_type = other DNA
aaacaatttaaaaaacccaaacaaacaaatcacctaaaattaaaaattca

SEQ ID NO: 43446 - DNA, 50 bp, synthetic construct
  source 1..50: mol_type = other DNA
gaacaatttaaaaaacccaaacgaacgaatcacctaaaattaaaaattcg

SEQ ID NO: 43447 - DNA, 50 bp, synthetic construct
  source 1..50: mol_type = other DNA
ctatattaatcaaactaatcacaaactcccaacttcaaataatccaccca

SEQ ID NO: 43448 - DNA, 50 bp, synthetic construct
  source 1..50: mol_type = other DNA
ctatattaatcaaactaatcgcgaactcccaacttcaaataatccgcccg

SEQ ID NO: 43449 - DNA, 50 bp, synthetic construct
  source 1..50: mol_type = other DNA
ctaattaattaaaattaaaaccaaacacaataactcacacctctaatcca

SEQ ID NO: 43450 - DNA, 50 bp, synthetic construct
  source 1..50: mol_type = other DNA
ctaattaattaaaattaaaaccgaacgcgataactcacgcctctaatccg

SEQ ID NO: 43451 - DNA, 50 bp, synthetic construct
  source 1..50: mol_type = other DNA
ttcaaataatccacccacctaaacctcccaaattattcaaattaaaaaca

SEQ ID NO: 43452 - DNA, 50 bp, synthetic construct
  source 1..50: mol_type = other DNA
ttcaaataatccgcccgcctaaacctcccaaattattcgaattaaaaacg

SEQ ID NO: 43453 - DNA, 50 bp, synthetic construct
  source 1..50: mol_type = other DNA
caccacacccaacaaatttttctaattaattaaaattaaaaccaaacaca

SEQ ID NO: 43454 - DNA, 50 bp, synthetic construct
  source 1..50: mol_type = other DNA
caccgcgcccaacaaatttttctaattaattaaaattaaaaccgaacgcg

SEQ ID NO: 43455 - DNA, 50 bp, synthetic construct
  source 1..50: mol_type = other DNA
ataaaccaccacacccaacaaatttttctaattaattaaaattaaaacca

SEQ ID NO: 43456 - DNA, 50 bp, synthetic construct
  source 1..50: mol_type = other DNA
gtaaaccaccgcgcccaacaaatttttctaattaattaaaattaaaaccg

SEQ ID NO: 43457 - DNA, 50 bp, synthetic construct
  source 1..50: mol_type = other DNA
ctcaaataattcacccacctcaacctcccacaataataaaattacaaaca

SEQ ID NO: 43458 - DNA, 50 bp, synthetic construct
  source 1..50: mol_type = other DNA
ctcaaataattcgcccacctcaacctcccacaataataaaattacaaacg

SEQ ID NO: 43459 - DNA, 50 bp, synthetic construct
  source 1..50: mol_type = other DNA
caaaatcacaccactacacactccaaactaaacaacaaaataaaacttca

SEQ ID NO: 43460 - DNA, 50 bp, synthetic construct
  source 1..50: mol_type = other DNA
cgaaatcgcgccactacacactccaaactaaacgacaaaataaaacttcg

SEQ ID NO: 43461 - DNA, 50 bp, synthetic construct
  source 1..50: mol_type = other DNA
ttttaaaacaaaatctcactctatcatccaatctaaaatatacaataaca

SEQ ID NO: 43462 - DNA, 50 bp, synthetic construct
  source 1..50: mol_type = other DNA
ttttaaaacgaaatctcactctatcgtccaatctaaaatatacaataacg

SEQ ID NO: 43463 - DNA, 50 bp, synthetic construct
  source 1..50: mol_type = other DNA
ttaaaacaaaatctcactctatcatccaatctaaaatatacaataacaca

SEQ ID NO: 43464 - DNA, 50 bp, synthetic construct
  source 1..50: mol_type = other DNA
ttaaaacgaaatctcactctatcgtccaatctaaaatatacaataacgcg

SEQ ID NO: 43465 - DNA, 50 bp, synthetic construct
  source 1..50: mol_type = other DNA
caaaatctcactctatcatccaatctaaaatatacaataacacaatctca

SEQ ID NO: 43466 - DNA, 50 bp, synthetic construct
  source 1..50: mol_type = other DNA
cgaaatctcactctatcgtccaatctaaaatatacaataacgcgatctcg

SEQ ID NO: 43467 - DNA, 50 bp, synthetic construct
  source 1..50: mol_type = other DNA
cccatctccactaaaaatacaaaaacattaactcaacataataatacaca

SEQ ID NO: 43468 - DNA, 50 bp, synthetic construct
  source 1..50: mol_type = other DNA
cccatctccactaaaaatacaaaaacattaactcgacgtaataatacgcg

SEQ ID NO: 43469 - DNA, 50 bp, synthetic construct
  source 1..50: mol_type = other DNA
accccatctccactaaaaatacaaaaacattaactcaacataataataca

SEQ ID NO: 43470 - DNA, 50 bp, synthetic construct
  source 1..50: mol_type = other DNA
accccatctccactaaaaatacaaaaacattaactcgacgtaataatacg

SEQ ID NO: 43471 - DNA, 50 bp, synthetic construct
  source 1..50: mol_type = other DNA
aaaccaaacataataactcacacctataatcaaaactctataaaaaacca

SEQ ID NO: 43472 - DNA, 50 bp, synthetic construct
  source 1..50: mol_type = other DNA
aaaccgaacgtaataactcacgcctataatcaaaactctataaaaaaccg

SEQ ID NO: 43473 - DNA, 50 bp, synthetic construct
  source 1..50: mol_type = other DNA
aattactatatattcaaaaatacaattaaaaccaaacataataactcaca

SEQ ID NO: 43474 - DNA, 50 bp, synthetic construct
  source 1..50: mol_type = other DNA
aattactatatattcaaaaatacaattaaaaccgaacgtaataactcacg

SEQ ID NO: 43475 - DNA, 50 bp, synthetic construct
  source 1..50: mol_type = other DNA
aaaacccaatctctacttaaaaatacaaaaataaaccaaacataataaca

SEQ ID NO: 43476 - DNA, 50 bp, synthetic construct
  source 1..50: mol_type = other DNA
gaaacccaatctctacttaaaaatacaaaaataaaccgaacataataacg

SEQ ID NO: 43477 - DNA, 50 bp, synthetic construct
  source 1..50: mol_type = other DNA
aaccaacataacaaaacccaatctctacttaaaaatacaaaaataaacca

SEQ ID NO: 43478 - DNA, 50 bp, synthetic construct
  source 1..50: mol_type = other DNA
aaccaacataacgaaacccaatctctacttaaaaatacaaaaataaaccg

SEQ ID NO: 43479 - DNA, 50 bp, synthetic construct
  source 1..50: mol_type = other DNA
catttttcacaaataaaaacaaaattttcattttcaaaaaatacaccaca

SEQ ID NO: 43480 - DNA, 50 bp, synthetic construct
  source 1..50: mol_type = other DNA
catttttcacgaataaaaacaaaattttcattttcaaaaaatacaccacg

SEQ ID NO: 43481 - DNA, 50 bp, synthetic construct
  source 1..50: mol_type = other DNA
caaataaaaacaaaattttcattttcaaaaaatacaccacaaaccaaaca

SEQ ID NO: 43482 - DNA, 50 bp, synthetic construct
  source 1..50: mol_type = other DNA
cgaataaaaacaaaattttcattttcaaaaaatacaccacgaaccaaacg

SEQ ID NO: 43483 - DNA, 50 bp, synthetic construct
  source 1..50: mol_type = other DNA
taaaacaaacacataaaacctaaattccccacttcccaaccaataactca

SEQ ID NO: 43484 - DNA, 50 bp, synthetic construct
  source 1..50: mol_type = other DNA
taaaacaaacgcataaaacctaaattccccgcttcccaaccaataactcg

SEQ ID NO: 43485 - DNA, 50 bp, synthetic construct
  source 1..50: mol_type = other DNA
atcttctacaaaaaccatattcttactaaaacattaacaaaaaaaaacca

SEQ ID NO: 43486 - DNA, 50 bp, synthetic construct
  source 1..50: mol_type = other DNA
gtcttctacaaaaaccgtattcttactaaaacgttaacaaaaaaaaaccg

SEQ ID NO: 43487 - DNA, 50 bp, synthetic construct
  source 1..50: mol_type = other DNA
caataacaatctaatctctattttccccacatttccaccttttctattca

SEQ ID NO: 43488 - DNA, 50 bp, synthetic construct
  source 1..50: mol_type = other DNA
caataacaatctaatctctattttccccacatttccgccttttctattcg

SEQ ID NO: 43489 - DNA, 50 bp, synthetic construct
  source 1..50: mol_type = other DNA
caaatactcaaaaaaaactatccccaccatccttttatctcaacaaacca

SEQ ID NO: 43490 - DNA, 50 bp, synthetic construct
  source 1..50: mol_type = other DNA
caaatactcaaaaaaaactatccccaccgtccttttatctcaacgaaccg

SEQ ID NO: 43491 - DNA, 50 bp, synthetic construct
  source 1..50: mol_type = other DNA
aaaatcacacacttaccactacaattcccatcccaaaacaactaataaca

SEQ ID NO: 43492 - DNA, 50 bp, synthetic construct
  source 1..50: mol_type = other DNA
aaaatcacacacttaccgctacaattcccgtcccaaaacaactaataacg

SEQ ID NO: 43493 - DNA, 50 bp, synthetic construct
  source 1..50: mol_type = other DNA
acacttcccaaacctataactccaaactcaaaaaaatcacacacttacca

SEQ ID NO: 43494 - DNA, 50 bp, synthetic construct
  source 1..50: mol_type = other DNA
acgcttcccaaacctataactccgaactcaaaaaaatcacacacttaccg

SEQ ID NO: 43495 - DNA, 50 bp, synthetic construct
  source 1..50: mol_type = other DNA
ttaaaaacccttccaaacaaatcaactcttctcaaaaccttcaaaatcca

SEQ ID NO: 43496 - DNA, 50 bp, synthetic construct
  source 1..50: mol_type = other DNA
ttaaaaacccttccaaacaaatcgactcttctcgaaaccttcgaaatccg

SEQ ID NO: 43497 - DNA, 50 bp, synthetic construct
  source 1..50: mol_type = other DNA
caaaaaaaatcaccaaattttttaatacaaatcaaaaaaaactaacccca

SEQ ID NO: 43498 - DNA, 50 bp, synthetic construct
  source 1..50: mol_type = other DNA
caaaaaaaatcgccaaattttttaatacgaatcgaaaaaaactaaccccg

SEQ ID NO: 43499 - DNA, 50 bp, synthetic construct
  source 1..50: mol_type = other DNA
catttccaaaaaccccataaattacactaaaatcccaaaacaaaacacca

SEQ ID NO: 43500 - DNA, 50 bp, synthetic construct
  source 1..50: mol_type = other DNA
catttccaaaaaccccataaattacactaaaatcccgaaacgaaacgccg

SEQ ID NO: 43501 - DNA, 50 bp, synthetic construct
  source 1..50: mol_type = other DNA
cacattacaaaaatcaaaaaataacaaacaaataaaatatcaacacttca

SEQ ID NO: 43502 - DNA, 50 bp, synthetic construct
  source 1..50: mol_type = other DNA
cacattacaaaaatcgaaaaataacgaacaaataaaatatcgacgcttcg

SEQ ID NO: 43503 - DNA, 50 bp, synthetic construct
  source 1..50: mol_type = other DNA
aaacaaacaccatctactcctaaatcaaaaaaatccctacaaaatcatca

SEQ ID NO: 43504 - DNA, 50 bp, synthetic construct
  source 1..50: mol_type = other DNA
aaacgaacgccatctactcctaaatcaaaaaaatccctacaaaatcatcg

SEQ ID NO: 43505 - DNA, 50 bp, synthetic construct
  source 1..50: mol_type = other DNA
actaatacccacataaattcaaaccccactctcaataaattaaattttca

SEQ ID NO: 43506 - DNA, 50 bp, synthetic construct
  source 1..50: mol_type = other DNA
actaatacccgcgtaaattcgaaccccactctcgataaattaaattttcg

SEQ ID NO: 43507 - DNA, 50 bp, synthetic construct
  source 1..50: mol_type = other DNA
acttaaaatccaataaactaatacccacataaattcaaaccccactctca

SEQ ID NO: 43508 - DNA, 50 bp, synthetic construct
  source 1..50: mol_type = other DNA
acttaaaatccaataaactaatacccgcgtaaattcgaaccccactctcg

SEQ ID NO: 43509 - DNA, 50 bp, synthetic construct
  source 1..50: mol_type = other DNA
attaaaacattaaacttaaaatccaataaactaatacccacataaattca

SEQ ID NO: 43510 - DNA, 50 bp, synthetic construct
  source 1..50: mol_type = other DNA
attaaaacgttaaacttaaaatccaataaactaatacccgcgtaaattcg

SEQ ID NO: 43511 - DNA, 50 bp, synthetic construct
  source 1..50: mol_type = other DNA
aaatttcctcaaaaatttctaaaaaaaaacacttcactttaaacccttca

SEQ ID NO: 43512 - DNA, 50 bp, synthetic construct
  source 1..50: mol_type = other DNA
aaatttcctcgaaaatttctaaaaaaaaacgcttcgctttaaacccttcg

SEQ ID NO: 43513 - DNA, 50 bp, synthetic construct
  source 1..50: mol_type = other DNA
aaaatccaaaaaacaacacttacaaatttttcataaaaaaaatttcctca

SEQ ID NO: 43514 - DNA, 50 bp, synthetic construct
  source 1..50: mol_type = other DNA
aaaatccaaaaaacaacacttacgaatttttcgtaaaaaaaatttcctcg

SEQ ID NO: 43515 - DNA, 50 bp, synthetic construct
  source 1..50: mol_type = other DNA
taaccattaatttccataatataataattatcacattcacctaacacaca

SEQ ID NO: 43516 - DNA, 50 bp, synthetic construct
  source 1..50: mol_type = other DNA
taaccgttaatttccgtaatataataattatcacgttcgcctaacacgcg

SEQ ID NO: 43517 - DNA, 50 bp, synthetic construct
  source 1..50: mol_type = other DNA
tataaccattaatttccataatataataattatcacattcacctaacaca

SEQ ID NO: 43518 - DNA, 50 bp, synthetic construct
  source 1..50: mol_type = other DNA
tataaccgttaatttccgtaatataataattatcacgttcgcctaacacg

SEQ ID NO: 43519 - DNA, 50 bp, synthetic construct
  source 1..50: mol_type = other DNA
aaaaaactttataaccattaatttccataatataataattatcacattca

SEQ ID NO: 43520 - DNA, 50 bp, synthetic construct
  source 1..50: mol_type = other DNA
aaaaaactttataaccgttaatttccgtaatataataattatcacgttcg

SEQ ID NO: 43521 - DNA, 50 bp, synthetic construct
  source 1..50: mol_type = other DNA
ctttcacatattaaacaaacataataaccactacactacaaaaaccaaca

SEQ ID NO: 43522 - DNA, 50 bp, synthetic construct
  source 1..50: mol_type = other DNA
ctttcgcgtattaaacgaacgtaataaccactacactacgaaaaccaacg

SEQ ID NO: 43523 - DNA, 50 bp, synthetic construct
  source 1..50: mol_type = other DNA
tcctaaacttaaaatcaacttatccaaaccctaaaaacactaacacccca

SEQ ID NO: 43524 - DNA, 50 bp, synthetic construct
  source 1..50: mol_type = other DNA
tcctaaacttaaaatcgacttatccaaaccctaaaaacgctaacaccccg

SEQ ID NO: 43525 - DNA, 50 bp, synthetic construct
  source 1..50: mol_type = other DNA
atttcacataaataacacacataacaaccactacattacaaaaaccacca

SEQ ID NO: 43526 - DNA, 50 bp, synthetic construct
  source 1..50: mol_type = other DNA
atttcgcgtaaataacacacgtaacaaccactacattacaaaaaccaccg

SEQ ID NO: 43527 - DNA, 50 bp, synthetic construct
  source 1..50: mol_type = other DNA
aaacaaaaaataaaatccacaatattctaataactattaaaatctaaaca

SEQ ID NO: 43528 - DNA, 50 bp, synthetic construct
  source 1..50: mol_type = other DNA
aaacaaaaaataaaatccgcaatattctaataactattaaaatctaaacg

SEQ ID NO: 43529 - DNA, 50 bp, synthetic construct
  source 1..50: mol_type = other DNA
acaaaaaataaaatccacaatattctaataactattaaaatctaaacaca

SEQ ID NO: 43530 - DNA, 50 bp, synthetic construct
  source 1..50: mol_type = other DNA
acaaaaaataaaatccgcaatattctaataactattaaaatctaaacgcg

SEQ ID NO: 43531 - DNA, 50 bp, synthetic construct
  source 1..50: mol_type = other DNA
ataaaaaattaaacccaaacaccacaacacaaataaaattattaaaaaca

SEQ ID NO: 43532 - DNA, 50 bp, synthetic construct
  source 1..50: mol_type = other DNA
ataaaaaattaaacccgaacgccacaacgcaaataaaattattaaaaacg

SEQ ID NO: 43533 - DNA, 50 bp, synthetic construct
  source 1..50: mol_type = other DNA
aaaaataacacaaatccttattaccctataccttaacttccacatcaaca

SEQ ID NO: 43534 - DNA, 50 bp, synthetic construct
  source 1..50: mol_type = other DNA
aaaaataacgcgaatccttattaccctataccttaacttccgcatcaacg

SEQ ID NO: 43535 - DNA, 50 bp, synthetic construct
  source 1..50: mol_type = other DNA
cccaatctcatctaaaaatacaccacaaaaaattcacaactatcaataca

SEQ ID NO: 43536 - DNA, 50 bp, synthetic construct
  source 1..50: mol_type = other DNA
cccgatctcgtctaaaaatacaccgcgaaaaattcacaactatcaatacg

SEQ ID NO: 43537 - DNA, 50 bp, synthetic construct
  source 1..50: mol_type = other DNA
tattaacaattataaatctcccacaatacattttcaaacaaaatcaaaca

SEQ ID NO: 43538 - DNA, 50 bp, synthetic construct
  source 1..50: mol_type = other DNA
tattaacaattataaatctcccgcgatacattttcaaacgaaatcgaacg

SEQ ID NO: 43539 - DNA, 50 bp, synthetic construct
  source 1..50: mol_type = other DNA
ttaacaattataaatctcccacaatacattttcaaacaaaatcaaacaca

SEQ ID NO: 43540 - DNA, 50 bp, synthetic construct
  source 1..50: mol_type = other DNA
ttaacaattataaatctcccgcgatacattttcaaacgaaatcgaacgcg

SEQ ID NO: 43541 - DNA, 50 bp, synthetic construct
  source 1..50: mol_type = other DNA
ccaaaccttactaaatttacacaaaaaaacacaacccacaataacaaaca

SEQ ID NO: 43542 - DNA, 50 bp, synthetic construct
  source 1..50: mol_type = other DNA
ccaaaccttactaaatttacacaaaaaaacgcgacccgcgataacaaacg

SEQ ID NO: 43543 - DNA, 50 bp, synthetic construct
  source 1..50: mol_type = other DNA
aattttattcaacaacttcactttttttccaataaaaaaacaaaaaccca

SEQ ID NO: 43544 - DNA, 50 bp, synthetic construct
  source 1..50: mol_type = other DNA
gattttattcgacgacttcactttttttccaataaaaaaacaaaaacccg

SEQ ID NO: 43545 - DNA, 50 bp, synthetic construct
  source 1..50: mol_type = other DNA
acacatatttcccattaataaaccaacaataaaaaacccataaaaccaca

SEQ ID NO: 43546 - DNA, 50 bp, synthetic construct
  source 1..50: mol_type = other DNA
acgcatatttcccgttaataaaccgacaataaaaaacccgtaaaaccgcg

SEQ ID NO: 43547 - DNA, 50 bp, synthetic construct
  source 1..50: mol_type = other DNA
ctacacatatttcccattaataaaccaacaataaaaaacccataaaacca

SEQ ID NO: 43548 - DNA, 50 bp, synthetic construct
  source 1..50: mol_type = other DNA
ctacgcatatttcccgttaataaaccgacaataaaaaacccgtaaaaccg

SEQ ID NO: 43549 - DNA, 50 bp, synthetic construct
  source 1..50: mol_type = other DNA
aatctcccctacacatatttcccattaataaaccaacaataaaaaaccca

SEQ ID NO: 43550 - DNA, 50 bp, synthetic construct
  source 1..50: mol_type = other DNA
aatctcccctacgcatatttcccgttaataaaccgacaataaaaaacccg

SEQ ID NO: 43551 - DNA, 50 bp, synthetic construct
  source 1..50: mol_type = other DNA
aaacaaaaataaaaaatcttttttatatccatttaaaaatctcccctaca

SEQ ID NO: 43552 - DNA, 50 bp, synthetic construct
  source 1..50: mol_type = other DNA
aaacaaaaataaaaaatcttttttatatccgtttaaaaatctcccctacg

SEQ ID NO: 43553 - DNA, 50 bp, synthetic construct
  source 1..50: mol_type = other DNA
ctactaccaactcaccaacaaaaaatatacacaaaaaaaactcccaaaca

SEQ ID NO: 43554 - DNA, 50 bp, synthetic construct
  source 1..50: mol_type = other DNA
ctactaccgactcaccaacgaaaaatatacgcaaaaaaaactcccaaacg

SEQ ID NO: 43555 - DNA, 50 bp, synthetic construct
  source 1..50: mol_type = other DNA
acaaacacaaaaaaaattcctcatccctacttctcataccccctttttca

SEQ ID NO: 43556 - DNA, 50 bp, synthetic construct
  source 1..50: mol_type = other DNA
acgaacacaaaaaaaattcctcatccctacttctcataccccctttttcg

SEQ ID NO: 43557 - DNA, 50 bp, synthetic construct
  source 1..50: mol_type = other DNA
acaaattaaaattaatttccaaaatttcaaatttttaaacaaacacacca

SEQ ID NO: 43558 - DNA, 50 bp, synthetic construct
  source 1..50: mol_type = other DNA
acaaattaaaattaatttccgaaatttcaaatttttaaacgaacacaccg

SEQ ID NO: 43559 - DNA, 50 bp, synthetic construct
  source 1..50: mol_type = other DNA
actttcatcttaaactaaactttaattcaaataaaaacaactaaaaaaca

SEQ ID NO: 43560 - DNA, 50 bp, synthetic construct
  source 1..50: mol_type = other DNA
actttcatcttaaactaaactttaattcgaataaaaacgactaaaaaacg

SEQ ID NO: 43561 - DNA, 50 bp, synthetic construct
  source 1..50: mol_type = other DNA
ctatattacccaaactaattacaaactcctaaactcaaaaaatccaccca

SEQ ID NO: 43562 - DNA, 50 bp, synthetic construct
  source 1..50: mol_type = other DNA
ctatattacccaaactaattacgaactcctaaactcaaaaaatccgcccg

SEQ ID NO: 43563 - DNA, 50 bp, synthetic construct
  source 1..50: mol_type = other DNA
aaaccaaaaacaacactaaaaaaacaaaactaacatttttaatctttcca

SEQ ID NO: 43564 - DNA, 50 bp, synthetic construct
  source 1..50: mol_type = other DNA
aaaccaaaaacaacactaaaaaaacaaaactaacgtttttaatctttccg

SEQ ID NO: 43565 - DNA, 50 bp, synthetic construct
  source 1..50: mol_type = other DNA
aaaaacccaaaataaaaaccaaaaacaacactaaaaaaacaaaactaaca

SEQ ID NO: 43566 - DNA, 50 bp, synthetic construct
  source 1..50: mol_type = other DNA
aaaaacccgaaataaaaaccaaaaacaacactaaaaaaacaaaactaacg

SEQ ID NO: 43567 - DNA, 50 bp, synthetic construct
  source 1..50: mol_type = other DNA
acttccaaaaaaactaaccaaacacacaatatcaaaaaacaccaaaacca

SEQ ID NO: 43568 - DNA, 50 bp, synthetic construct
  source 1..50: mol_type = other DNA
acttccgaaaaaactaaccaaacacgcgatatcgaaaaacaccaaaaccg

SEQ ID NO: 43569 - DNA, 50 bp, synthetic construct
  source 1..50: mol_type = other DNA
acttaaaactaatatacttaataacaaccttaataccctccaacaccaca

SEQ ID NO: 43570 - DNA, 50 bp, synthetic construct
  source 1..50: mol_type = other DNA
acttaaaactaatatacttaataacgaccttaataccctccgacaccgcg

SEQ ID NO: 43571 - DNA, 50 bp, synthetic construct
  source 1..50: mol_type = other DNA
caaaaacaacaaacacacaacaatctaaatctccctaaaaataataatca

SEQ ID NO: 43572 - DNA, 50 bp, synthetic construct
  source 1..50: mol_type = other DNA
cgaaaacaacaaacgcacgacgatctaaatctccctaaaaataataatcg

SEQ ID NO: 43573 - DNA, 50 bp, synthetic construct
  source 1..50: mol_type = other DNA
ttttgagtgtattgtaagtgaggttttttgtttggtgtattataataagt

SEQ ID NO: 43574 - DNA, 50 bp, synthetic construct
  source 1..50: mol_type = other DNA
tttcgagcgtatcgtaagcgaggtttttcgtttggcgtattataataagc

SEQ ID NO: 43575 - DNA, 50 bp, synthetic construct
  source 1..50: mol_type = other DNA
gaatttttttgttaatgatatttttgagtgtattgtaagtgaggtttttt

SEQ ID NO: 43576 - DNA, 50 bp, synthetic construct
  source 1..50: mol_type = other DNA
gaattttttcgttaacgatattttcgagcgtatcgtaagcgaggtttttc

SEQ ID NO: 43577 - DNA, 50 bp, synthetic construct
  source 1..50: mol_type = other DNA
ccccaacaccaacatctcttctaaaaccataaaaatcataaactccttca

SEQ ID NO: 43578 - DNA, 50 bp, synthetic construct
  source 1..50: mol_type = other DNA
ccccgacaccgacatctcttctaaaaccataaaaatcataaactccttcg

SEQ ID NO: 43579 - DNA, 50 bp, synthetic construct
  source 1..50: mol_type = other DNA
atgttgttgatgaaggagtttatgatttttatggttttagaagagatgtt

SEQ ID NO: 43580 - DNA, 50 bp, synthetic construct
  source 1..50: mol_type = other DNA
atgtcgttgacgaaggagtttatgatttttatggttttagaagagatgtc

SEQ ID NO: 43581 - DNA, 50 bp, synthetic construct
  source 1..50: mol_type = other DNA
aaaaaaaaataacaaaaaacacaaacacaaccacaaaaaaaactactcca

SEQ ID NO: 43582 - DNA, 50 bp, synthetic construct
  source 1..50: mol_type = other DNA
aaaaaaaaataacaaaaaacgcaaacgcaaccgcaaaaaaaactactccg

SEQ ID NO: 43583 - DNA, 50 bp, synthetic construct
  source 1..50: mol_type = other DNA
tacttcaacaccttatacacatacacaaaataactctccttacaactaca

SEQ ID NO: 43584 - DNA, 50 bp, synthetic construct
  source 1..50: mol_type = other DNA
tacttcaacaccttatacacgtacacgaaataactctccttacgactacg

SEQ ID NO: 43585 - DNA, 50 bp, synthetic construct; identical to SEQ ID NO: 43583
  source 1..50: mol_type = other DNA

SEQ ID NO: 43586 - DNA, 50 bp, synthetic construct; identical to SEQ ID NO: 43584
  source 1..50: mol_type = other DNA

SEQ ID NO: 43587 - DNA, 50 bp, synthetic construct; identical to SEQ ID NO: 43583
  source 1..50: mol_type = other DNA

SEQ ID NO: 43588 - DNA, 50 bp, synthetic construct; identical to SEQ ID NO: 43584
  source 1..50: mol_type = other DNA

SEQ ID NO: 43589 - DNA, 50 bp, synthetic construct; identical to SEQ ID NO: 43583
  source 1..50: mol_type = other DNA

SEQ ID NO: 43590 - DNA, 50 bp, synthetic construct; identical to SEQ ID NO: 43584
  source 1..50: mol_type = other DNA

SEQ ID NO: 43591 - DNA, 50 bp, synthetic construct; identical to SEQ ID NO: 43583
  source 1..50: mol_type = other DNA

SEQ ID NO: 43592 - DNA, 50 bp, synthetic construct; identical to SEQ ID NO: 43584
  source 1..50: mol_type = other DNA

SEQ ID NO: 43593 - DNA, 50 bp, synthetic construct; identical to SEQ ID NO: 43583
  source 1..50: mol_type = other DNA

SEQ ID NO: 43594 - DNA, 50 bp, synthetic construct; identical to SEQ ID NO: 43584
  source 1..50: mol_type = other DNA

SEQ ID NO: 43595 - DNA, 50 bp, synthetic construct; identical to SEQ ID NO: 43583
  source 1..50: mol_type = other DNA

SEQ ID NO: 43596 - DNA, 50 bp, synthetic construct; identical to SEQ ID NO: 43584
  source 1..50: mol_type = other DNA

SEQ ID NO: 43597 - DNA, 50 bp, synthetic construct; identical to SEQ ID NO: 43583
  source 1..50: mol_type = other DNA

SEQ ID NO: 43598 - DNA, 50 bp, synthetic construct; identical to SEQ ID NO: 43584
  source 1..50: mol_type = other DNA

SEQ ID NO: 43599 - DNA, 50 bp, synthetic construct; identical to SEQ ID NO: 43583
  source 1..50: mol_type = other DNA

SEQ ID NO: 43600 - DNA, 50 bp, synthetic construct; identical to SEQ ID NO: 43584
  source 1..50: mol_type = other DNA

SEQ ID NO: 43601 - DNA, 50 bp, synthetic construct
  source 1..50: mol_type = other DNA
ttaatctaaataaaaataaaacataaaccaatcacacaacttccttttca

SEQ ID NO: 43602 - DNA, 50 bp, synthetic construct
  source 1..50: mol_type = other DNA
ttaatctaaataaaaataaaacgtaaaccaatcgcacaacttccttttcg

SEQ ID NO: 43603 - DNA, 50 bp, synthetic construct
  source 1..50: mol_type = other DNA
aatctaaataaaaataaaacataaaccaatcacacaacttccttttcaca

SEQ ID NO: 43604 - DNA, 50 bp, synthetic construct
  source 1..50: mol_type = other DNA
aatctaaataaaaataaaacgtaaaccaatcgcacaacttccttttcgcg

SEQ ID NO: 43605 - DNA, 50 bp, synthetic construct; identical to SEQ ID NO: 43603
  source 1..50: mol_type = other DNA

SEQ ID NO: 43606 - DNA, 50 bp, synthetic construct; identical to SEQ ID NO: 43604
  source 1..50: mol_type = other DNA

SEQ ID NO: 43607 - DNA, 50 bp, synthetic construct; identical to SEQ ID NO: 43603
  source 1..50: mol_type = other DNA

SEQ ID NO: 43608 - DNA, 50 bp, synthetic construct; identical to SEQ ID NO: 43604
  source 1..50: mol_type = other DNA

SEQ ID NO: 43609 - DNA, 50 bp, synthetic construct; identical to SEQ ID NO: 43603
  source 1..50: mol_type = other DNA

SEQ ID NO: 43610 - DNA, 50 bp, synthetic construct; identical to SEQ ID NO: 43604
  source 1..50: mol_type = other DNA

SEQ ID NO: 43611 - DNA, 50 bp, synthetic construct
  source 1..50: mol_type = other DNA
ccaatcacacaacttccttttcacacccaataaaaactataaaatataca

SEQ ID NO: 43612 - DNA, 50 bp, synthetic construct
  source 1..50: mol_type = other DNA
ccaatcgcacaacttccttttcgcgcccaataaaaactataaaatatacg

SEQ ID NO: 43613 - DNA, 50 bp, synthetic construct
  source 1..50: mol_type = other DNA
taaaccttttaccatatctaaacataacaaacaaaaaaacaaaactcaca

SEQ ID NO: 43614 - DNA, 50 bp, synthetic construct
  source 1..50: mol_type = other DNA
taaaccttttaccatatctaaacgtaacaaacaaaaaaacaaaactcgcg

SEQ ID NO: 43615 - DNA, 50 bp, synthetic construct
  source 1..50: mol_type = other DNA
ttatttttgtattaagaaattaatttgtgtggttgggggtgggaaagttt

SEQ ID NO: 43616 - DNA, 50 bp, synthetic construct
  source 1..50: mol_type = other DNA
ttatttttgtattaagaaattaatttgtgtggttgggggtgggaaagttc

SEQ ID NO: 43617 - DNA, 50 bp, synthetic construct
  source 1..50: mol_type = other DNA
aaaaaaccactataccaaaccaataacaataaaacttcttaacaccacca

SEQ ID NO: 43618 - DNA, 50 bp, synthetic construct
  source 1..50: mol_type = other DNA
gaaaaaccactataccaaaccgataacgataaaacttcttaacaccgccg

SEQ ID NO: 43619 - DNA, 50 bp, synthetic construct
  source 1..50: mol_type = other DNA
cacaaaaaaccactataccaaaccaataacaataaaacttcttaacacca

SEQ ID NO: 43620 - DNA, 50 bp, synthetic construct
  source 1..50: mol_type = other DNA
cgcgaaaaaccactataccaaaccgataacgataaaacttcttaacaccg

SEQ ID NO: 43621 - DNA, 50 bp, synthetic construct
  source 1..50: mol_type = other DNA
ttctaataacaacaaatctcacaaaaaaccactataccaaaccaataaca

SEQ ID NO: 43622 - DNA, 50 bp, synthetic construct
  source 1..50: mol_type = other DNA
ttctaataacgacgaatctcgcgaaaaaccactataccaaaccgataacg

SEQ ID NO: 43623 - DNA, 50 bp, synthetic construct
  source 1..50: mol_type = other DNA
ataaacttctaataacaacaaatctcacaaaaaaccactataccaaacca

SEQ ID NO: 43624 - DNA, 50 bp, synthetic construct
  source 1..50: mol_type = other DNA
ataaacttctaataacgacgaatctcgcgaaaaaccactataccaaaccg

SEQ ID NO: 43625 - DNA, 50 bp, synthetic construct
  source 1..50: mol_type = other DNA
aactttctaatcaacaactcaataaacttctaataacaacaaatctcaca

SEQ ID NO: 43626 - DNA, 50 bp, synthetic construct
  source 1..50: mol_type = other DNA
aactttctaatcaacaactcgataaacttctaataacgacgaatctcgcg

SEQ ID NO: 43627 - DNA, 50 bp, synthetic construct
  source 1..50: mol_type = other DNA
gtgattttatgtattagatgttgaaaaggtagttttttgattagtagttt

SEQ ID NO: 43628 - DNA, 50 bp, synthetic construct
  source 1..50: mol_type = other DNA
gcgattttacgtattagacgttgaaaaggtagttttttgattagtagttc

SEQ ID NO: 43629 - DNA, 50 bp, synthetic construct
  source 1..50: mol_type = other DNA
tttcaacatctaatacataaaatcacacaaaacttcaaaaccaacttaca

SEQ ID NO: 43630 - DNA, 50 bp, synthetic construct
  source 1..50: mol_type = other DNA
tttcaacgtctaatacgtaaaatcgcgcaaaacttcaaaaccgacttacg

SEQ ID NO: 43631 - DNA, 50 bp, synthetic construct
  source 1..50: mol_type = other DNA
tacaacatacaaactaaatatccttaaacataataatcacccacttaaca

SEQ ID NO: 43632 - DNA, 50 bp, synthetic construct
  source 1..50: mol_type = other DNA
tacgacgtacgaactaaatatccttaaacataataatcacccgcttaacg

SEQ ID NO: 43633 - DNA, 50 bp, synthetic construct
  source 1..50: mol_type = other DNA
ccacaaatacaacatacaaactaaatatccttaaacataataatcaccca

SEQ ID NO: 43634 - DNA, 50 bp, synthetic construct
  source 1..50: mol_type = other DNA
ccgcgaatacgacgtacgaactaaatatccttaaacataataatcacccg

SEQ ID NO: 43635 - DNA, 50 bp, synthetic construct
  source 1..50: mol_type = other DNA
atatataatcaataaatccttaaaactcaaaccctctcaccacaaataca

SEQ ID NO: 43636 - DNA, 50 bp, synthetic construct
  source 1..50: mol_type = other DNA
atatataatcaataaatccttaaaactcaaaccctctcgccgcgaatacg

SEQ ID NO: 43637 - DNA, 50 bp, synthetic construct
  source 1..50: mol_type = other DNA
aatttaggttaatgtagtttatgttggttaaagtgaaatgtttttttttt

SEQ ID NO: 43638 - DNA, 50 bp, synthetic construct
  source 1..50: mol_type = other DNA
aatttaggttaatgtagtttatgttggttaaagtgaaacgtttttttttc

SEQ ID NO: 43639 - DNA, 50 bp, synthetic construct
  source 1..50: mol_type = other DNA
ttaatataactcatactaactaaaataaaacattctctccccacccccca

SEQ ID NO: 43640 - DNA, 50 bp, synthetic construct
  source 1..50: mol_type = other DNA
ttaatataactcatactaactaaaataaaacgttctctccccgccccccg

SEQ ID NO: 43641 - DNA, 50 bp, synthetic construct
  source 1..50: mol_type = other DNA
taccttaataaccaaactaatctctaactcaacctcaaataatccaccca

SEQ ID NO: 43642 - DNA, 50 bp, synthetic construct
  source 1..50: mol_type = other DNA
taccttaataaccaaactaatctctaactcgacctcaaataatccacccg

SEQ ID NO: 43643 - DNA, 50 bp, synthetic construct
  source 1..50: mol_type = other DNA
ccccaacaccaacatctcttccaaaactataaaaatcataaactccttca

SEQ ID NO: 43644 - DNA, 50 bp, synthetic construct
  source 1..50: mol_type = other DNA
ccccgacaccgacatctcttccaaaactataaaaatcataaactccttcg

SEQ ID NO: 43645 - DNA, 50 bp, synthetic construct
  source 1..50: mol_type = other DNA
caccaacatctcttccaaaactataaaaatcataaactccttcatcaaca

SEQ ID NO: 43646 - DNA, 50 bp, synthetic construct
  source 1..50: mol_type = other DNA
caccgacatctcttccaaaactataaaaatcataaactccttcgtcaacg

SEQ ID NO: 43647 - DNA, 50 bp, synthetic construct
  source 1..50: mol_type = other DNA
tataaaaatcataaactccttcatcaacaacatctttaaacatatcacca

SEQ ID NO: 43648 - DNA, 50 bp, synthetic construct
  source 1..50: mol_type = other DNA
tataaaaatcataaactccttcgtcaacgacatctttaaacgtatcgccg

SEQ ID NO: 43649 - DNA, 50 bp, synthetic construct
  source 1..50: mol_type = other DNA
aacaataaacacacaaccatctaaatctccctcaaaataataatcaaaca

SEQ ID NO: 43650 - DNA, 50 bp, synthetic construct
  source 1..50: mol_type = other DNA
aacaataaacgcacgaccgtctaaatctccctcgaaataataatcgaacg

SEQ ID NO: 43651 - DNA, 50 bp, synthetic construct
  source 1..50: mol_type = other DNA
ttggtgtattataataagtgtttgattattattttgagggagatttagat

SEQ ID NO: 43652 - DNA, 50 bp, synthetic construct
  source 1..50: mol_type = other DNA
ttggcgtattataataagcgttcgattattatttcgagggagatttagac

SEQ ID NO: 43653 - DNA, 50 bp, synthetic construct
  source 1..50: mol_type = other DNA
ataccctcaaacacaacatacttaaccaattccccaaataacaataaaca

SEQ ID NO: 43654 - DNA, 50 bp, synthetic construct
  source 1..50: mol_type = other DNA
ataccctcgaacacgacgtacttaaccaattccccgaataacaataaacg

SEQ ID NO: 43655 - DNA, 50 bp, synthetic construct
  source 1..50: mol_type = other DNA
ctaaaaaaaacctttaaaatataaatcacaacaaaactattactacaaca

SEQ ID NO: 43656 - DNA, 50 bp, synthetic construct
  source 1..50: mol_type = other DNA
ctaaaaaaaacctttaaaatataaatcacgacgaaactattactacaacg

SEQ ID NO: 43657 - DNA, 50 bp, synthetic construct
  source 1..50: mol_type = other DNA
aaaatatacctaaacatcaaaaatttaaaatctacataaacaaaataaca

SEQ ID NO: 43658 - DNA, 50 bp, synthetic construct
  source 1..50: mol_type = other DNA
aaaatatacctaaacgtcaaaaatttaaaatctacgtaaacaaaataacg

SEQ ID NO: 43659 - DNA, 50 bp, synthetic construct
  source 1..50: mol_type = other DNA
tttgaaaagggttttttattgatagaaagggatgtttaattattgaaatt

SEQ ID NO: 43660 - DNA, 50 bp, synthetic construct
  source 1..50: mol_type = other DNA
tttgaaaagggttttttattgatagaaagggacgtttaattatcgaaatc

SEQ ID NO: 43661 - DNA, 50 bp, synthetic construct
  source 1..50: mol_type = other DNA
tttaaaaagggttttttgttgatagaaagggatgtttaattattgaaatt

SEQ ID NO: 43662 - DNA, 50 bp, synthetic construct
  source 1..50: mol_type = other DNA
tttaaaaagggttttttgttgatagaaagggacgtttaattatcgaaatc

SEQ ID NO: 43663 - DNA, 50 bp, synthetic construct
  source 1..50: mol_type = other DNA
tttttataaagtgttgggtgagattttttttgtttgttatgtttggttgt

SEQ ID NO: 43664 - DNA, 50 bp, synthetic construct
  source 1..50: mol_type = other DNA
tttttataaagcgttgggtgagattttttttgttcgttatgtttggtcgc

SEQ ID NO: 43665 - DNA, 50 bp, synthetic construct
  source 1..50: mol_type = other DNA
accaactatcatataaaaacactacctcaaaccaaaatcctcacaaaaca

SEQ ID NO: 43666 - DNA, 50 bp, synthetic construct
  source 1..50: mol_type = other DNA
gccaactatcgtataaaaacgctacctcaaaccaaaatcctcacaaaacg

SEQ ID NO: 43667 - DNA, 50 bp, synthetic construct
  source 1..50: mol_type = other DNA
ctcaaactacaacaaactaacactaatctcacctcacaaaaatcaatcca

SEQ ID NO: 43668 - DNA, 50 bp, synthetic construct
  source 1..50: mol_type = other DNA
ctcaaactacaacaaactaacgctaatctcacctcgcaaaaatcaatccg

SEQ ID NO: 43669 - DNA, 50 bp, synthetic construct
  source 1..50: mol_type = other DNA
gaattggttggtaatgtggtttgtgataataagaagatttgtattatttt

SEQ ID NO: 43670 - DNA, 50 bp, synthetic construct
  source 1..50: mol_type = other DNA
gaattggttggtaacgcggttcgcgataataagaagattcgtattatttc

SEQ ID NO: 43671 - DNA, 50 bp, synthetic construct
  source 1..50: mol_type = other DNA
ataaccaactacaaataacacaaaataatacaaatcttcttattatcaca

SEQ ID NO: 43672 - DNA, 50 bp, synthetic construct
  source 1..50: mol_type = other DNA
ataaccaactacaaataacgcgaaataatacgaatcttcttattatcgcg

SEQ ID NO: 43673 - DNA, 50 bp, synthetic construct
  source 1..50: mol_type = other DNA
ttaaaatacctaaccaccaaaatcctaaaactaactaacaacacaaccca

SEQ ID NO: 43674 - DNA, 50 bp, synthetic construct
  source 1..50: mol_type = other DNA
ttaaaatacctaaccgccgaaatcctaaaactaactaacaacgcgacccg

SEQ ID NO: 43675 - DNA, 50 bp, synthetic construct
  source 1..50: mol_type = other DNA
caactacaaataacacaaaataatacaaatcttcttattatcacaaacca

SEQ ID NO: 43676 - DNA, 50 bp, synthetic construct
  source 1..50: mol_type = other DNA
caactacaaataacgcgaaataatacgaatcttcttattatcgcgaaccg

SEQ ID NO: 43677 - DNA, 50 bp, synthetic construct
  source 1..50: mol_type = other DNA
caatattaaaatacctaaccaccaaaatcctaaaactaactaacaacaca

SEQ ID NO: 43678 - DNA, 50 bp, synthetic construct
  source 1..50: mol_type = other DNA
cgatattaaaatacctaaccgccgaaatcctaaaactaactaacaacgcg

SEQ ID NO: 43679 - DNA, 50 bp, synthetic construct
  source 1..50: mol_type = other DNA
actacaaataacacaaaataatacaaatcttcttattatcacaaaccaca

SEQ ID NO: 43680 - DNA, 50 bp, synthetic construct
  source 1..50: mol_type = other DNA
actacaaataacgcgaaataatacgaatcttcttattatcgcgaaccgcg

SEQ ID NO: 43681 - DNA, 50 bp, synthetic construct
  source 1..50: mol_type = other DNA
tcaaaaacaaatcttcaattcccaataaaccaaatacaccaactactcca

SEQ ID NO: 43682 - DNA, 50 bp, synthetic construct
  source 1..50: mol_type = other DNA
tcaaaaacgaatcttcaattcccaataaaccgaatacaccgactactccg

SEQ ID NO: 43683 - DNA, 50 bp, synthetic construct
  source 1..50: mol_type = other DNA
aacaaaacaacaaaactcacaccaaaactaaaacccattcttcaaaaaca

SEQ ID NO: 43684 - DNA, 50 bp, synthetic construct
  source 1..50: mol_type = other DNA
aacaaaacgacaaaactcgcgccaaaactaaaacccgttcttcaaaaacg

SEQ ID NO: 43685 - DNA, 50 bp, synthetic construct
  source 1..50: mol_type = other DNA
aatcaatacactcaacccactaaaaactaaaaacccacccttaaaaaaca

SEQ ID NO: 43686 - DNA, 50 bp, synthetic construct
  source 1..50: mol_type = other DNA
aatcgatacactcgacccactaaaaactaaaaacccgcccttaaaaaacg

SEQ ID NO: 43687 - DNA, 50 bp, synthetic construct
  source 1..50: mol_type = other DNA
taaattttttacatcatatcaaaacataacaaacaaaacaacaaaactca

SEQ ID NO: 43688 - DNA, 50 bp, synthetic construct
  source 1..50: mol_type = other DNA
taaattttttacgtcatatcgaaacgtaacaaacaaaacgacaaaactcg

SEQ ID NO: 43689 - DNA, 50 bp, synthetic construct
  source 1..50: mol_type = other DNA
cattactaattaaattttttacatcatatcaaaacataacaaacaaaaca

SEQ ID NO: 43690 - DNA, 50 bp, synthetic construct
  source 1..50: mol_type = other DNA
cgttactaattaaattttttacgtcatatcgaaacgtaacaaacaaaacg

SEQ ID NO: 43691 - DNA, 50 bp, synthetic construct
  source 1..50: mol_type = other DNA
attacatcaatctcaaaaacattactaattaaattttttacatcatatca

SEQ ID NO: 43692 - DNA, 50 bp, synthetic construct
  source 1..50: mol_type = other DNA
gttacgtcaatctcaaaaacgttactaattaaattttttacgtcatatcg

SEQ ID NO: 43693 - DNA, 50 bp, synthetic construct
  source 1..50: mol_type = other DNA
ctaaataaataaaattcacacaataaaactcccattttatatatttaaca

SEQ ID NO: 43694 - DNA, 50 bp, synthetic construct
  source 1..50: mol_type = other DNA
ctaaataaataaaattcgcacaataaaactcccgttttatatatttaacg

SEQ ID NO: 43695 - DNA, 50 bp, synthetic construct
  source 1..50: mol_type = other DNA
cataacaaacaaacaaccatctaaatctccctaaaaataataatcaaaca

SEQ ID NO: 43696 - DNA, 50 bp, synthetic construct
  source 1..50: mol_type = other DNA
cgtaacaaacgaacaaccgtctaaatctccctaaaaataataatcgaacg

SEQ ID NO: 43697 - DNA, 50 bp, synthetic construct
  source 1..50: mol_type = other DNA
taaatctccctaaaaataataatcaaacacttattataacacaccaaaca

SEQ ID NO: 43698 - DNA, 50 bp, synthetic construct
  source 1..50: mol_type = other DNA
taaatctccctaaaaataataatcgaacgcttattataacgcgccaaacg

SEQ ID NO: 43699 - DNA, 50 bp, synthetic construct
  source 1..50: mol_type = other DNA
taaaaataataatcaaacacttattataacacaccaaacaaaaaacctca

SEQ ID NO: 43700 - DNA, 50 bp, synthetic construct
  source 1..50: mol_type = other DNA
taaaaataataatcgaacgcttattataacgcgccaaacgaaaaacctcg

SEQ ID NO: 43701 - DNA, 50 bp, synthetic construct
  source 1..50: mol_type = other DNA
aacaccttatacaaatacacaaaacaactctccttacaactacactttca

SEQ ID NO: 43702 - DNA, 50 bp, synthetic construct
  source 1..50: mol_type = other DNA
aacaccttatacaaatacacgaaacaactctccttacgactacgctttcg

SEQ ID NO: 43703 - DNA, 50 bp, synthetic construct
  source 1..50: mol_type = other DNA
acaacaacacacacctataattccaatactttaaaaaacaaaaacaaaca

SEQ ID NO: 43704 - DNA, 50 bp, synthetic construct
  source 1..50: mol_type = other DNA
gcgacgacgcacgcctataattccaatactttaaaaaacgaaaacgaacg

SEQ ID NO: 43705 - DNA, 50 bp, synthetic construct
  source 1..50: mol_type = other DNA
ttctctcaactattctcaattcctccatttatcatttcttcatcatatca

SEQ ID NO: 43706 - DNA, 50 bp, synthetic construct
  source 1..50: mol_type = other DNA
ttctctcgactattctcaattcctccatttatcgtttcttcgtcatatcg

SEQ ID NO: 43707 - DNA, 50 bp, synthetic construct
  source 1..50: mol_type = other DNA
tcaactattctcaattcctccatttatcatttcttcatcatatcaaaaca

SEQ ID NO: 43708 - DNA, 50 bp, synthetic construct
  source 1..50: mol_type = other DNA
tcgactattctcaattcctccatttatcgtttcttcgtcatatcgaaacg

SEQ ID NO: 43709 - DNA, 50 bp, synthetic construct
  source 1..50: mol_type = other DNA
tatcatttcttcatcatatcaaaacacaacaaacaaaaaaacaaaactca

SEQ ID NO: 43710 - DNA, 50 bp, synthetic construct
  source 1..50: mol_type = other DNA
tatcgtttcttcgtcatatcgaaacgcgacaaacaaaaaaacaaaactcg

SEQ ID NO: 43711 - DNA, 50 bp, synthetic construct
  source 1..50: mol_type = other DNA
ccacaaaaaactaaaaaccaacacaaaaaaaacaaatcttaactttaaca

SEQ ID NO: 43712 - DNA, 50 bp, synthetic construct
  source 1..50: mol_type = other DNA
ccacgaaaaactaaaaaccgacacgaaaaaaacgaatcttaactttaacg

SEQ ID NO: 43713 - DNA, 50 bp, synthetic construct
  source 1..50: mol_type = other DNA
aatcaatacactcaacccacaaaaaactaaaaaccaacacaaaaaaaaca

SEQ ID NO: 43714 - DNA, 50 bp, synthetic construct
  source 1..50: mol_type = other DNA
aatcgatacactcgacccacgaaaaactaaaaaccgacacgaaaaaaacg

SEQ ID NO: 43715 - DNA, 50 bp, synthetic construct
  source 1..50: mol_type = other DNA
aaaccaaatacaccaactactccacaaaaacaactatactaaacaaatca

SEQ ID NO: 43716 - DNA, 50 bp, synthetic construct
  source 1..50: mol_type = other DNA
aaaccgaatacaccgactactccgcaaaaacaactatactaaacgaatcg

SEQ ID NO: 43717 - DNA, 50 bp, synthetic construct
  source 1..50: mol_type = other DNA
ataacacaaaataatacaaatcttcttattatcacaaacaacattaccca

SEQ ID NO: 43718 - DNA, 50 bp, synthetic construct
  source 1..50: mol_type = other DNA
ataacgcgaaataatacgaatcttcttattatcgcgaacgacgttacccg

SEQ ID NO: 43719 - DNA, 50 bp, synthetic construct
  source 1..50: mol_type = other DNA
ccttcttcttaaccaaaaatttctccaccaacactaaaataactatctca

SEQ ID NO: 43720 - DNA, 50 bp, synthetic construct
  source 1..50: mol_type = other DNA
ccttcttcttaaccgaaaatttctccaccgacgctaaaataactatctcg

SEQ ID NO: 43721 - DNA, 50 bp, synthetic construct
  source 1..50: mol_type = other DNA
acccaaaacccaaacataacaacaacacaaaacctactctttaaatttca

SEQ ID NO: 43722 - DNA, 50 bp, synthetic construct
  source 1..50: mol_type = other DNA
acccgaaacccgaacataacaacaacgcaaaacctactctttaaatttcg

SEQ ID NO: 43723 - DNA, 50 bp, synthetic construct
  source 1..50: mol_type = other DNA
tcaaaccccaaacttatataaaccaacactaccctataattaataaaaca

SEQ ID NO: 43724 - DNA, 50 bp, synthetic construct
  source 1..50: mol_type = other DNA
tcgaaccccgaacttatataaaccgacgctaccctataattaataaaacg

SEQ ID NO: 43725 - DNA, 50 bp, synthetic construct
  source 1..50: mol_type = other DNA
cttatataaaccaacactaccctataattaataaaacatccaatccacca

SEQ ID NO: 43726 - DNA, 50 bp, synthetic construct
  source 1..50: mol_type = other DNA
cttatataaaccgacgctaccctataattaataaaacgtccaatccaccg

SEQ ID NO: 43727 - DNA, 50 bp, synthetic construct
  source 1..50: mol_type = other DNA
ttttaaaaactaacaaacacaatttaaaaatccaaccacaaacaacaaca

SEQ ID NO: 43728 - DNA, 50 bp, synthetic construct
  source 1..50: mol_type = other DNA
ttttaaaaactaacaaacacaatttaaaaatccaaccgcgaacgacgacg

SEQ ID NO: 43729 - DNA, 50 bp, synthetic construct
  source 1..50: mol_type = other DNA
ataaaaatccattaaactaaaaacatcatattaattaataacatatcaca

SEQ ID NO: 43730 - DNA, 50 bp, synthetic construct
  source 1..50: mol_type = other DNA
ataaaaatccattaaactaaaaacatcatattaattaataacgtatcgcg

SEQ ID NO: 43731 - DNA, 50 bp, synthetic construct
  source 1..50: mol_type = other DNA
tttcaacacttaatacaaaaaatcacacaaaactttaaaaccaatctaca

SEQ ID NO: 43732 - DNA, 50 bp, synthetic construct
  source 1..50: mol_type = other DNA
tttcaacgcttaatacgaaaaatcgcacaaaactttaaaaccgatctacg

SEQ ID NO: 43733 - DNA, 50 bp, synthetic construct
  source 1..50: mol_type = other DNA
cctaaaaaaaacctttaaaaaaccatataaataaataaaacactcaacca

SEQ ID NO: 43734 - DNA, 50 bp, synthetic construct
  source 1..50: mol_type = other DNA
cctaaaaaaaacctttaaaaaaccgtataaataaataaaacactcaaccg

SEQ ID NO: 43735 - DNA, 50 bp, synthetic construct
  source 1..50: mol_type = other DNA
aaaacaatcacaaccataaacataatttacacactcaaacaccaaaacca

SEQ ID NO: 43736 - DNA, 50 bp, synthetic construct
  source 1..50: mol_type = other DNA
aaaacaatcacaaccataaacgtaatttacgcgctcaaacgccaaaaccg

SEQ ID NO: 43737 - DNA, 50 bp, synthetic construct
  source 1..50: mol_type = other DNA
aattacctacacaaaacacaccaaacacaaaacaatcacaaccataaaca

SEQ ID NO: 43738 - DNA, 50 bp, synthetic construct
  source 1..50: mol_type = other DNA
aattacctacacgaaacacgccaaacgcaaaacaatcacaaccataaacg

SEQ ID NO: 43739 - DNA, 50 bp, synthetic construct
  source 1..50: mol_type = other DNA
ttaaaaaatataatccacaatacaattacctacacaaaacacaccaaaca

SEQ ID NO: 43740 - DNA, 50 bp, synthetic construct
  source 1..50: mol_type = other DNA
ttaaaaaatataatccgcgatacaattacctacacgaaacacgccaaacg

SEQ ID NO: 43741 - DNA, 50 bp, synthetic construct
  source 1..50: mol_type = other DNA
actataactatcttacatttaacatactccatataaataactacatcaca

SEQ ID NO: 43742 - DNA, 50 bp, synthetic construct
  source 1..50: mol_type = other DNA
actataactatcttacgtttaacgtactccgtataaataactacatcgcg

SEQ ID NO: 43743 - DNA, 50 bp, synthetic construct
  source 1..50: mol_type = other DNA
taaaaactccacatatctcctcatatataaaacctaaaatacacttaaca

SEQ ID NO: 43744 - DNA, 50 bp, synthetic construct
  source 1..50: mol_type = other DNA
taaaaactccgcgtatctcctcgtatataaaacctaaaatacgcttaacg

SEQ ID NO: 43745 - DNA, 50 bp, synthetic construct
  source 1..50: mol_type = other DNA
accataccaaacatcaaataacaaacttaataataccctaaatattatca

SEQ ID NO: 43746 - DNA, 50 bp, synthetic construct
  source 1..50: mol_type = other DNA
gccgtaccaaacgtcgaataacgaacttaataataccctaaatattatcg

SEQ ID NO: 43747 - DNA, 50 bp, synthetic construct
  source 1..50: mol_type = other DNA
cataccaaacatcaaataacaaacttaataataccctaaatattatcaca

SEQ ID NO: 43748 - DNA, 50 bp, synthetic construct
  source 1..50: mol_type = other DNA
cgtaccaaacgtcgaataacgaacttaataataccctaaatattatcgcg

SEQ ID NO: 43749 - DNA, 50 bp, synthetic construct
  source 1..50: mol_type = other DNA
acaaacttaataataccctaaatattatcacacaaaactttacaataaca

SEQ ID NO: 43750 - DNA, 50 bp, synthetic construct
  source 1..50: mol_type = other DNA
acgaacttaataataccctaaatattatcgcgcaaaactttacgataacg

SEQ ID NO: 43751 - DNA, 50 bp, synthetic construct
  source 1..50: mol_type = other DNA
taataataccctaaatattatcacacaaaactttacaataacacttaaca

SEQ ID NO: 43752 - DNA, 50 bp, synthetic construct
  source 1..50: mol_type = other DNA
taataataccctaaatattatcgcgcaaaactttacgataacgcttaacg

SEQ ID NO: 43753 - DNA, 50 bp, synthetic construct
  source 1..50: mol_type = other DNA
ccatattacattttatttaatacaaaacatatctaaacacaacaaaaaca

SEQ ID NO: 43754 - DNA, 50 bp, synthetic construct
  source 1..50: mol_type = other DNA
ccgtattacattttatttaatacaaaacatatctaaacgcgacaaaaacg

SEQ ID NO: 43755 - DNA, 50 bp, synthetic construct
  source 1..50: mol_type = other DNA
caaaacttaccatattacattttatttaatacaaaacatatctaaacaca

SEQ ID NO: 43756 - DNA, 50 bp, synthetic construct
  source 1..50: mol_type = other DNA
cgaaacttaccgtattacattttatttaatacaaaacatatctaaacgcg

SEQ ID NO: 43757 - DNA, 50 bp, synthetic construct
  source 1..50: mol_type = other DNA
aaacatatcactattatacctaaaaacatccaacttacacatcatatcca

SEQ ID NO: 43758 - DNA, 50 bp, synthetic construct
  source 1..50: mol_type = other DNA
aaacgtatcactattatacctaaaaacatccaacttacgcgtcgtatccg

SEQ ID NO: 43759 - DNA, 50 bp, synthetic construct
  source 1..50: mol_type = other DNA
taaaaaacccaaaataaaacaaaaaattatactcactcaccacaaataca

SEQ ID NO: 43760 - DNA, 50 bp, synthetic construct
  source 1..50: mol_type = other DNA
taaaaaacccaaaataaaacaaaaaattatactcgctcgccacgaatacg

SEQ ID NO: 43761 - DNA, 50 bp, synthetic construct
  source 1..50: mol_type = other DNA
cacaaaatttcaaaaccaaccttcatttccaaaactcaacaataataaca

SEQ ID NO: 43762 - DNA, 50 bp, synthetic construct
  source 1..50: mol_type = other DNA
cgcaaaatttcaaaaccgaccttcgtttccaaaactcgacgataataacg

SEQ ID NO: 43763 - DNA, 50 bp, synthetic construct
  source 1..50: mol_type = other DNA
tacaaaaaatcacacaaaatttcaaaaccaaccttcatttccaaaactca

SEQ ID NO: 43764 - DNA, 50 bp, synthetic construct
  source 1..50: mol_type = other DNA
tacgaaaaatcgcgcaaaatttcaaaaccgaccttcgtttccaaaactcg

SEQ ID NO: 43765 - DNA, 50 bp, synthetic construct
  source 1..50: mol_type = other DNA
actaccatttcaacacctaatacaaaaaatcacacaaaatttcaaaacca

SEQ ID NO: 43766 - DNA, 50 bp, synthetic construct
  source 1..50: mol_type = other DNA
actaccatttcaacgcctaatacgaaaaatcgcgcaaaatttcaaaaccg

SEQ ID NO: 43767 - DNA, 50 bp, synthetic construct
  source 1..50: mol_type = other DNA
aactactcatccacaaactaccatttcaacacctaatacaaaaaatcaca

SEQ ID NO: 43768 - DNA, 50 bp, synthetic construct
  source 1..50: mol_type = other DNA
aactactcatccgcaaactaccatttcaacgcctaatacgaaaaatcgcg

SEQ ID NO: 43769 - DNA, 50 bp, synthetic construct
  source 1..50: mol_type = other DNA
cattatcaaaaatcaactaaactactcatccacaaactaccatttcaaca

SEQ ID NO: 43770 - DNA, 50 bp, synthetic construct
  source 1..50: mol_type = other DNA
cgttatcaaaaatcgactaaactactcatccgcaaactaccatttcaacg

SEQ ID NO: 43771 - DNA, 50 bp, synthetic construct
  source 1..50: mol_type = other DNA
ttctcacaccaaacactaaaataacaatttacaaataaacaactcaatca

SEQ ID NO: 43772 - DNA, 50 bp, synthetic construct
  source 1..50: mol_type = other DNA
ttctcgcaccaaacgctaaaataacaatttacgaataaacaactcaatcg

SEQ ID NO: 43773 - DNA, 50 bp, synthetic construct
  source 1..50: mol_type = other DNA
taaaataacaatttacaaataaacaactcaatcaacttctaataacaaca

SEQ ID NO: 43774 - DNA, 50 bp, synthetic construct
  source 1..50: mol_type = other DNA
taaaataacaatttacgaataaacaactcaatcgacttctaataacgacg

SEQ ID NO: 43775 - DNA, 50 bp, synthetic construct
  source 1..50: mol_type = other DNA
aatttacaaataaacaactcaatcaacttctaataacaacaaatctcaca

SEQ ID NO: 43776 - DNA, 50 bp, synthetic construct
  source 1..50: mol_type = other DNA
aatttacgaataaacaactcaatcgacttctaataacgacgaatctcacg

SEQ ID NO: 43777 - DNA, 50 bp, synthetic construct
  source 1..50: mol_type = other DNA
taaacaactcaatcaacttctaataacaacaaatctcacacaaaaccaca

SEQ ID NO: 43778 - DNA, 50 bp, synthetic construct
  source 1..50: mol_type = other DNA
taaacaactcaatcgacttctaataacgacgaatctcacgcaaaaccacg

SEQ ID NO: 43779 - DNA, 50 bp, synthetic construct
  source 1..50: mol_type = other DNA
tacctaacctataacaataaaacttcttcacaccaccaatcactaaaaca

SEQ ID NO: 43780 - DNA, 50 bp, synthetic construct
  source 1..50: mol_type = other DNA
tacctaacctataacgataaaacttcttcacaccgccaatcgctaaaacg

SEQ ID NO: 43781 - DNA, 50 bp, synthetic construct
  source 1..50: mol_type = other DNA
acaataactcacacctataatctaaacactttaaaaatccaaaacaaaca

SEQ ID NO: 43782 - DNA, 50 bp, synthetic construct
  source 1..50: mol_type = other DNA
gcaataactcacgcctataatctaaacactttaaaaatccgaaacaaacg

SEQ ID NO: 43783 - DNA, 50 bp, synthetic construct
  source 1..50: mol_type = other DNA
aaaacaaacacaataactcacacctataatctaaacactttaaaaatcca

SEQ ID NO: 43784 - DNA, 50 bp, synthetic construct
  source 1..50: mol_type = other DNA
aaaacgaacgcaataactcacgcctataatctaaacactttaaaaatccg

SEQ ID NO: 43785 - DNA, 50 bp, synthetic construct
  source 1..50: mol_type = other DNA
acctacctcaaacttccaaaatacttaaattacaaacataaaccactaca

SEQ ID NO: 43786 - DNA, 50 bp, synthetic construct
  source 1..50: mol_type = other DNA
gcctacctcgaacttccaaaatacttaaattacaaacgtaaaccactacg

SEQ ID NO: 43787 - DNA, 50 bp, synthetic construct
  source 1..50: mol_type = other DNA
acctcaaacttccaaaatacttaaattacaaacataaaccactacactca

SEQ ID NO: 43788 - DNA, 50 bp, synthetic construct
  source 1..50: mol_type = other DNA
acctcgaacttccaaaatacttaaattacaaacgtaaaccactacgctcg

SEQ ID NO: 43789 - DNA, 50 bp, synthetic construct
  source 1..50: mol_type = other DNA
acttccaaaatacttaaattacaaacataaaccactacactcatcctcca

SEQ ID NO: 43790 - DNA, 50 bp, synthetic construct
  source 1..50: mol_type = other DNA
acttccaaaatacttaaattacaaacgtaaaccactacgctcgtcctccg

SEQ ID NO: 43791 - DNA, 50 bp, synthetic construct
  source 1..50: mol_type = other DNA
ttccaaaatacttaaattacaaacataaaccactacactcatcctccaca

SEQ ID NO: 43792 - DNA, 50 bp, synthetic construct
  source 1..50: mol_type = other DNA
ttccaaaatacttaaattacaaacgtaaaccactacgctcgtcctccgcg

SEQ ID NO: 43793 - DNA, 50 bp, synthetic construct
  source 1..50: mol_type = other DNA
ccctccccacaaactatcctaaatctttaaaaaacttaaaaccaaacaca

SEQ ID NO: 43794 - DNA, 50 bp, synthetic construct
  source 1..50: mol_type = other DNA
ccctccccacaaactatcctaaatctttaaaaaacttaaaaccgaacgcg

SEQ ID NO: 43795 - DNA, 50 bp, synthetic construct
  source 1..50: mol_type = other DNA
caccctaaacaataataactttaccaaacaacttattaaactcctcatca

SEQ ID NO: 43796 - DNA, 50 bp, synthetic construct
  source 1..50: mol_type = other DNA
cgccctaaacgataataactttaccaaacaacttattaaactcctcgtcg

SEQ ID NO: 43797 - DNA, 50 bp, synthetic construct
  source 1..50: mol_type = other DNA
gagttggtgggtaatgtagtttgtgataataaaaagatttgtattatttt

SEQ ID NO: 43798 - DNA, 50 bp, synthetic construct
  source 1..50: mol_type = other DNA
gagttggcgggtaacgtagttcgcgataataaaaagattcgtattatttc

SEQ ID NO: 43799 - DNA, 50 bp, synthetic construct
  source 1..50: mol_type = other DNA
aaataaccaactacaaataacacaaaataatacaaatctttttattatca

SEQ ID NO: 43800 - DNA, 50 bp, synthetic construct
  source 1..50: mol_type = other DNA
gaataaccaactacaaataacgcgaaataatacgaatctttttattatcg

SEQ ID NO: 43801 - DNA, 50 bp, synthetic construct
  source 1..50: mol_type = other DNA
ataaccaactacaaataacacaaaataatacaaatctttttattatcaca

SEQ ID NO: 43802 - DNA, 50 bp, synthetic construct
  source 1..50: mol_type = other DNA
ataaccaactacaaataacgcgaaataatacgaatctttttattatcgcg

SEQ ID NO: 43803 - DNA, 50 bp, synthetic construct
  source 1..50: mol_type = other DNA
ccaatttcctataaaacaaatacaccacctactccacaaaaacaactaca

SEQ ID NO: 43804 - DNA, 50 bp, synthetic construct
  source 1..50: mol_type = other DNA
ccaatttcctataaaacgaatacaccgcctactccgcaaaaacaactacg

SEQ ID NO: 43805 - DNA, 50 bp, synthetic construct
  source 1..50: mol_type = other DNA
acccactcctctaaaactaaactccaatttcctataaaacaaatacacca

SEQ ID NO: 43806 - DNA, 50 bp, synthetic construct
  source 1..50: mol_type = other DNA
acccgctcctctaaaactaaactccaatttcctataaaacgaatacaccg

SEQ ID NO: 43807 - DNA, 50 bp, synthetic construct
  source 1..50: mol_type = other DNA
aaatcattttaccatatctaaacataacaaacaaaacaacaaaactcaca

SEQ ID NO: 43808 - DNA, 50 bp, synthetic construct
  source 1..50: mol_type = other DNA
aaatcgttttaccatatctaaacgtaacaaacaaaacgacaaaactcgcg

SEQ ID NO: 43809 - DNA, 50 bp, synthetic construct
  source 1..50: mol_type = other DNA
caactttcttaaaaccctttttaaaaacaaaaacaaatttaaccaaatca

SEQ ID NO: 43810 - DNA, 50 bp, synthetic construct
  source 1..50: mol_type = other DNA
cgactttcttaaaaccctttttaaaaacaaaaacaaatttaaccgaatcg

SEQ ID NO: 43811 - DNA, 50 bp, synthetic construct
  source 1..50: mol_type = other DNA
tttttaaaaagggttttaagaaagttgtaattaaggtttagaaaaaggat

SEQ ID NO: 43812 - DNA, 50 bp, synthetic construct
  source 1..50: mol_type = other DNA
tttttaaaaagggttttaagaaagtcgtaattaaggtttagaaaaaggac

SEQ ID NO: 43813 - DNA, 50 bp, synthetic construct
  source 1..50: mol_type = other DNA
aaacatcataaactccttcatcaataacatctttaaacacatcactaaca

SEQ ID NO: 43814 - DNA, 50 bp, synthetic construct
  source 1..50: mol_type = other DNA
aaacatcataaactccttcgtcaataacatctttaaacgcatcgctaacg

SEQ ID NO: 43815 - DNA, 50 bp, synthetic construct
  source 1..50: mol_type = other DNA
acttcataatccacccatctcaacctcccaaaatattaaaatatcaaaca

SEQ ID NO: 43816 - DNA, 50 bp, synthetic construct
  source 1..50: mol_type = other DNA
acttcgtaatccacccatctcgacctcccaaaatattaaaatatcaaacg

SEQ ID NO: 43817 - DNA, 50 bp, synthetic construct
  source 1..50: mol_type = other DNA
acccatctcaacctcccaaaatattaaaatatcaaacataaaccatcaca

SEQ ID NO: 43818 - DNA, 50 bp, synthetic construct
  source 1..50: mol_type = other DNA
acccatctcgacctcccaaaatattaaaatatcaaacgtaaaccatcgcg

SEQ ID NO: 43819 - DNA, 50 bp, synthetic construct
  source 1..50: mol_type = other DNA
ctacccatcccacatccttaaaaaaacatctaaaaaataattatcctcca

SEQ ID NO: 43820 - DNA, 50 bp, synthetic construct
  source 1..50: mol_type = other DNA
ctacccatcccgcgtccttaaaaaaacatctaaaaaataattatcctccg

SEQ ID NO: 43821 - DNA, 50 bp, synthetic construct
  source 1..50: mol_type = other DNA
aaaacaaaataacacaacaaaaacatactaaacccataacccaaaaatca

SEQ ID NO: 43822 - DNA, 50 bp, synthetic construct
  source 1..50: mol_type = other DNA
aaaacaaaataacgcaacgaaaacgtactaaacccataacccaaaaatcg

SEQ ID NO: 43823 - DNA, 50 bp, synthetic construct
  source 1..50: mol_type = other DNA
attcaattcccaaccaatacaacaataacattttattcttaaaaactaca

SEQ ID NO: 43824 - DNA, 50 bp, synthetic construct
  source 1..50: mol_type = other DNA
attcgattcccgaccaatacaacgataacgttttattcttaaaaactacg

SEQ ID NO: 43825 - DNA, 50 bp, synthetic construct
  source 1..50: mol_type = other DNA
atacataattttcaaaaataaaacatcatcattacattaaccaaaaatca

SEQ ID NO: 43826 - DNA, 50 bp, synthetic construct
  source 1..50: mol_type = other DNA
atacgtaattttcaaaaataaaacgtcatcgttacattaaccgaaaatcg

SEQ ID NO: 43827 - DNA, 50 bp, synthetic construct
  source 1..50: mol_type = other DNA
aattttcaaaaataaaacatcatcattacattaaccaaaaatcaaaccca

SEQ ID NO: 43828 - DNA, 50 bp, synthetic construct
  source 1..50: mol_type = other DNA
aattttcaaaaataaaacgtcatcgttacattaaccgaaaatcgaacccg

SEQ ID NO: 43829 - DNA, 50 bp, synthetic construct
  source 1..50: mol_type = other DNA
tatacacaaaacattaataattcaataataaaattctcacctaccacaca

SEQ ID NO: 43830 - DNA, 50 bp, synthetic construct
  source 1..50: mol_type = other DNA
tatacgcgaaacattaataattcaataataaaattctcgcctaccacgcg

SEQ ID NO: 43831 - DNA, 50 bp, synthetic construct
  source 1..50: mol_type = other DNA
caaacacttccaataaaaaaactaaacaacactacacttcaaaaattcca

SEQ ID NO: 43832 - DNA, 50 bp, synthetic construct
  source 1..50: mol_type = other DNA
cgaacacttccgataaaaaaactaaacgacgctacacttcaaaaattccg

SEQ ID NO: 43833 - DNA, 50 bp, synthetic construct
  source 1..50: mol_type = other DNA
cacttacacatttaataaaaatttaacaatctccataattaccaccacca

SEQ ID NO: 43834 - DNA, 50 bp, synthetic construct
  source 1..50: mol_type = other DNA
cgcttacgcatttaataaaaatttaacgatctccataattaccgccgccg

SEQ ID NO: 43835 - DNA, 50 bp, synthetic construct
  source 1..50: mol_type = other DNA
cttacacatttaataaaaatttaacaatctccataattaccaccaccaca

SEQ ID NO: 43836 - DNA, 50 bp, synthetic construct
  source 1..50: mol_type = other DNA
cttacgcatttaataaaaatttaacgatctccataattaccgccgccgcg

SEQ ID NO: 43837 - DNA, 50 bp, synthetic construct
  source 1..50: mol_type = other DNA
aaaaaatttaaattccaacttcacaacattaaatccatcaatcctcccca

SEQ ID NO: 43838 - DNA, 50 bp, synthetic construct
  source 1..50: mol_type = other DNA
aaaaaatttaaattccaacttcgcaacgttaaatccgtcaatcctccccg

SEQ ID NO: 43839 - DNA, 50 bp, synthetic construct
  source 1..50: mol_type = other DNA
aaactaacaaactcaacactacaaaactaaaactcaaaccctttctttca

SEQ ID NO: 43840 - DNA, 50 bp, synthetic construct
  source 1..50: mol_type = other DNA
aaactaacgaactcaacgctacgaaactaaaactcaaaccctttctttcg

SEQ ID NO: 43841 - DNA, 50 bp, synthetic construct
  source 1..50: mol_type = other DNA
cacctctctaaaaccactaaaaactaaaacacaaaaccaaaaaaaattca

SEQ ID NO: 43842 - DNA, 50 bp, synthetic construct
  source 1..50: mol_type = other DNA
cacctctctaaaaccgctaaaaactaaaacgcaaaaccgaaaaaaattcg

SEQ ID NO: 43843 - DNA, 50 bp, synthetic construct
  source 1..50: mol_type = other DNA
tctaaaaccactaaaaactaaaacacaaaaccaaaaaaaattcacaaaca

SEQ ID NO: 43844 - DNA, 50 bp, synthetic construct
  source 1..50: mol_type = other DNA
tctaaaaccgctaaaaactaaaacgcaaaaccgaaaaaaattcgcaaacg

SEQ ID NO: 43845 - DNA, 50 bp, synthetic construct
  source 1..50: mol_type = other DNA
tctataaaccaaaatcaaacttcacaacatctaaaaaaacatccaaccca

SEQ ID NO: 43846 - DNA, 50 bp, synthetic construct
  source 1..50: mol_type = other DNA
tctataaaccaaaatcgaacttcgcaacgtctaaaaaaacgtccgacccg

SEQ ID NO: 43847 - DNA, 50 bp, synthetic construct
  source 1..50: mol_type = other DNA
caacatctataaaccaaaatcaaacttcacaacatctaaaaaaacatcca

SEQ ID NO: 43848 - DNA, 50 bp, synthetic construct
  source 1..50: mol_type = other DNA
cgacatctataaaccaaaatcgaacttcgcaacgtctaaaaaaacgtccg

SEQ ID NO: 43849 - DNA, 50 bp, synthetic construct
  source 1..50: mol_type = other DNA
aaatcaacatctataaaccaaaatcaaacttcacaacatctaaaaaaaca

SEQ ID NO: 43850 - DNA, 50 bp, synthetic construct
  source 1..50: mol_type = other DNA
aaatcgacatctataaaccaaaatcgaacttcgcaacgtctaaaaaaacg

SEQ ID NO: 43851 - DNA, 50 bp, synthetic construct
  source 1..50: mol_type = other DNA
taaaaaacccaacttttacacctcatattaataaaattacaaaatctaca

SEQ ID NO: 43852 - DNA, 50 bp, synthetic construct
  source 1..50: mol_type = other DNA
taaaaaacccgacttttacgcctcgtattaataaaattacgaaatctacg

SEQ ID NO: 43853 - DNA, 50 bp, synthetic construct
  source 1..50: mol_type = other DNA
tcaaaactatccaaaaaacactaactattacacctattcctccctacaca

SEQ ID NO: 43854 - DNA, 50 bp, synthetic construct
  source 1..50: mol_type = other DNA
tcgaaactatccaaaaaacgctaactattacacctattcctccctacgcg

SEQ ID NO: 43855 - DNA, 50 bp, synthetic construct
  source 1..50: mol_type = other DNA
ccaaaaacactacataaactaaaccctaaaccaaaaacaaaaaacaaaca

SEQ ID NO: 43856 - DNA, 50 bp, synthetic construct
  source 1..50: mol_type = other DNA
ccgaaaacgctacgtaaactaaaccctaaaccaaaaacaaaaaacgaacg

SEQ ID NO: 43857 - DNA, 50 bp, synthetic construct
  source 1..50: mol_type = other DNA
aacctccttccaaaccaaaacccaaatacttaaacaaccaaaaaaaacca

SEQ ID NO: 43858 - DNA, 50 bp, synthetic construct
  source 1..50: mol_type = other DNA
aacctccttccaaaccgaaacccaaatacttaaacaaccgaaaaaaaccg

SEQ ID NO: 43859 - DNA, 50 bp, synthetic construct
  source 1..50: mol_type = other DNA
ccaaaaattcccacaaatctacaataaacctactttacaaaaaaaaccca

SEQ ID NO: 43860 - DNA, 50 bp, synthetic construct
  source 1..50: mol_type = other DNA
ccgaaaattcccacaaatctacaataaacctactttacgaaaaaaacccg

SEQ ID NO: 43861 - DNA, 50 bp, synthetic construct
  source 1..50: mol_type = other DNA
ccccaaacatcccaaaaattcccacaaatctacaataaacctactttaca

SEQ ID NO: 43862 - DNA, 50 bp, synthetic construct
  source 1..50: mol_type = other DNA
ccccaaacatcccgaaaattcccacaaatctacaataaacctactttacg

SEQ ID NO: 43863 - DNA, 50 bp, synthetic construct
  source 1..50: mol_type = other DNA
caaaataaaaaattacaaataacaacaaatacaaatccccaaacatccca

SEQ ID NO: 43864 - DNA, 50 bp, synthetic construct
  source 1..50: mol_type = other DNA
cgaaataaaaaattacgaataacgacaaatacgaatccccaaacatcccg

SEQ ID NO: 43865 - DNA, 50 bp, synthetic construct
  source 1..50: mol_type = other DNA
actacaaacctataaaaacctccaaaatacctaaaaacccacatctacca

SEQ ID NO: 43866 - DNA, 50 bp, synthetic construct
  source 1..50: mol_type = other DNA
actacaaacctataaaaacctccgaaatacctaaaaacccgcatctaccg

SEQ ID NO: 43867 - DNA, 50 bp, synthetic construct
  source 1..50: mol_type = other DNA
aaaataaaaaattttactattttattacaacccacccccaaaaaaaaaca

SEQ ID NO: 43868 - DNA, 50 bp, synthetic construct
  source 1..50: mol_type = other DNA
aaaataaaaaattttactattttattacaacccgcccccgaaaaaaaacg

SEQ ID NO: 43869 - DNA, 50 bp, synthetic construct
  source 1..50: mol_type = other DNA
attttactattttattacaacccacccccaaaaaaaaacaaactcaaaca

SEQ ID NO: 43870 - DNA, 50 bp, synthetic construct
  source 1..50: mol_type = other DNA
attttactattttattacaacccgcccccgaaaaaaaacgaactcgaacg

SEQ ID NO: 43871 - DNA, 50 bp, synthetic construct
  source 1..50: mol_type = other DNA
ctacaaaatcacaataaacaaaacaccaacaaatacaatctacaaccaca

SEQ ID NO: 43872 - DNA, 50 bp, synthetic construct
  source 1..50: mol_type = other DNA
ctacgaaatcacaataaacaaaacaccaacaaatacaatctacgaccgcg

SEQ ID NO: 43873 - DNA, 50 bp, synthetic construct
  source 1..50: mol_type = other DNA
cacacactcactatcaataataacaatcccctaaaaataaatatcaaaca

SEQ ID NO: 43874 - DNA, 50 bp, synthetic construct
  source 1..50: mol_type = other DNA
cgcgcgctcgctatcaataataacgatcccctaaaaataaatatcgaacg

SEQ ID NO: 43875 - DNA, 50 bp, synthetic construct
  source 1..50: mol_type = other DNA
caactaaaaactaacctaaaaaatccaaaaaaaaacctatacaatattca

SEQ ID NO: 43876 - DNA, 50 bp, synthetic construct
  source 1..50: mol_type = other DNA
caactaaaaactaacctaaaaaatccgaaaaaaaacctatacgatattcg

SEQ ID NO: 43877 - DNA, 50 bp, synthetic construct
  source 1..50: mol_type = other DNA
ctaaaaactaacctaaaaaatccaaaaaaaaacctatacaatattcaaca

SEQ ID NO: 43878 - DNA, 50 bp, synthetic construct
  source 1..50: mol_type = other DNA
ctaaaaactaacctaaaaaatccgaaaaaaaacctatacgatattcgacg

SEQ ID NO: 43879 - DNA, 50 bp, synthetic construct
  source 1..50: mol_type = other DNA
aaaactaacctaaaaaatccaaaaaaaaacctatacaatattcaacacca

SEQ ID NO: 43880 - DNA, 50 bp, synthetic construct
  source 1..50: mol_type = other DNA
aaaactaacctaaaaaatccgaaaaaaaacctatacgatattcgacgccg

SEQ ID NO: 43881 - DNA, 50 bp, synthetic construct
  source 1..50: mol_type = other DNA
acaaaaaacatacacaaccttaaactccaaaaaacttccaatctccacca

SEQ ID NO: 43882 - DNA, 50 bp, synthetic construct
  source 1..50: mol_type = other DNA
acaaaaaacgtacacaaccttaaactccaaaaaacttccgatctccaccg

SEQ ID NO: 43883 - DNA, 50 bp, synthetic construct
  source 1..50: mol_type = other DNA
caacaaccaaacaaaaaaaacaaaccaaaaaataacccataaaaaaaaca

SEQ ID NO: 43884 - DNA, 50 bp, synthetic construct
  source 1..50: mol_type = other DNA
cgacgaccgaacgaaaaaaacgaaccgaaaaataacccgtaaaaaaaacg

SEQ ID NO: 43885 - DNA, 50 bp, synthetic construct
  source 1..50: mol_type = other DNA
acaaaaacacttccaaaccaatctaaaattccatatctcaatatccaaca

SEQ ID NO: 43886 - DNA, 50 bp, synthetic construct
  source 1..50: mol_type = other DNA
acaaaaacacttccgaaccgatctaaaattccatatctcgatatccgacg

SEQ ID NO: 43887 - DNA, 50 bp, synthetic construct
  source 1..50: mol_type = other DNA
aacaaacaaaacaaaaacacttccaaaccaatctaaaattccatatctca

SEQ ID NO: 43888 - DNA, 50 bp, synthetic construct
  source 1..50: mol_type = other DNA
aacgaacgaaacaaaaacacttccgaaccgatctaaaattccatatctcg

SEQ ID NO: 43889 - DNA, 50 bp, synthetic construct
  source 1..50: mol_type = other DNA
aatccaaaacaaaataaacaccaaacatcaaaacataaaatcctaaacca

SEQ ID NO: 43890 - DNA, 50 bp, synthetic construct
  source 1..50: mol_type = other DNA
aatccgaaacaaaataaacgccgaacatcgaaacataaaatcctaaaccg

SEQ ID NO: 43891 - DNA, 50 bp, synthetic construct
  source 1..50: mol_type = other DNA
tcaaaaaaaaatcaacatctttattccctacccaaccattattcatacca

SEQ ID NO: 43892 - DNA, 50 bp, synthetic construct
  source 1..50: mol_type = other DNA
tcgaaaaaaaatcgacatctttattccctacccgaccattattcgtaccg

SEQ ID NO: 43893 - DNA, 50 bp, synthetic construct
  source 1..50: mol_type = other DNA
aaaaaaaaatcaacatctttattccctacccaaccattattcataccaca

SEQ ID NO: 43894 - DNA, 50 bp, synthetic construct
  source 1..50: mol_type = other DNA
gaaaaaaaatcgacatctttattccctacccgaccattattcgtaccgcg

SEQ ID NO: 43895 - DNA, 50 bp, synthetic construct
  source 1..50: mol_type = other DNA
tacacattccaaatctcataaattaactataaaaaccaaaaataaaaaca

SEQ ID NO: 43896 - DNA, 50 bp, synthetic construct
  source 1..50: mol_type = other DNA
tacgcgttccgaatctcgtaaattaactataaaaaccgaaaataaaaacg

SEQ ID NO: 43897 - DNA, 50 bp, synthetic construct
  source 1..50: mol_type = other DNA
atccccacaactaaaaataaccactctaatctaaaaaacacccaaaacca

SEQ ID NO: 43898 - DNA, 50 bp, synthetic construct
  source 1..50: mol_type = other DNA
atccccacaactaaaaataaccactctaatctaaaaaacgcccgaaaccg

SEQ ID NO: 43899 - DNA, 50 bp, synthetic construct
  source 1..50: mol_type = other DNA
aaccaaaaaaaaacacaaccctaaacacccaatctacaaaaaaccaaaca

SEQ ID NO: 43900 - DNA, 50 bp, synthetic construct
  source 1..50: mol_type = other DNA
aaccgaaaaaaaacgcaaccctaaacgcccaatctacaaaaaaccaaacg

SEQ ID NO: 43901 - DNA, 50 bp, synthetic construct
  source 1..50: mol_type = other DNA
caatcaaaaaccccatctaatcttctacaaactaaacatccaaaactaca

SEQ ID NO: 43902 - DNA, 50 bp, synthetic construct
  source 1..50: mol_type = other DNA
cgatcaaaaaccccgtctaatcttctacaaactaaacgtccaaaactacg

SEQ ID NO: 43903 - DNA, 50 bp, synthetic construct
  source 1..50: mol_type = other DNA
ctatcaattaccaaacaaaaaacaaatccacacatatactatataaaaca

SEQ ID NO: 43904 - DNA, 50 bp, synthetic construct
  source 1..50: mol_type = other DNA
ctatcaattaccaaacgaaaaacgaatccgcgcgtatactatataaaacg

SEQ ID NO: 43905 - DNA, 50 bp, synthetic construct
  source 1..50: mol_type = other DNA
aaaaaaaaccccaacaatcttaactcacaacaaaataaccctcccaacca

SEQ ID NO: 43906 - DNA, 50 bp, synthetic construct
  source 1..50: mol_type = other DNA
aaaaaaaaccccaacaatcttaactcacaacgaaataaccctcccaaccg

SEQ ID NO: 43907 - DNA, 50 bp, synthetic construct
  source 1..50: mol_type = other DNA
ttcaaaacactttcttctccactctaaaaacactaaaaaaccttaactca

SEQ ID NO: 43908 - DNA, 50 bp, synthetic construct
  source 1..50: mol_type = other DNA
ttcgaaacgctttcttctccgctctaaaaacgctaaaaaaccttaactcg

SEQ ID NO: 43909 - DNA, 50 bp, synthetic construct
  source 1..50: mol_type = other DNA
aaatatcaactctaactcttcaaaacactttcttctccactctaaaaaca

SEQ ID NO: 43910 - DNA, 50 bp, synthetic construct
  source 1..50: mol_type = other DNA
gaatatcaactctaactcttcgaaacgctttcttctccgctctaaaaacg

SEQ ID NO: 43911 - DNA, 50 bp, synthetic construct
  source 1..50: mol_type = other DNA
cactatttcaaaacatttaaatcctctaaaaccccttaaccaaataaaca

SEQ ID NO: 43912 - DNA, 50 bp, synthetic construct
  source 1..50: mol_type = other DNA
cgctatttcaaaacgtttaaatcctctaaaaccccttaaccaaataaacg

SEQ ID NO: 43913 - DNA, 50 bp, synthetic construct
  source 1..50: mol_type = other DNA
atcctctaaaaccccttaaccaaataaacaaaccctaaaactaaacccca

SEQ ID NO: 43914 - DNA, 50 bp, synthetic construct
  source 1..50: mol_type = other DNA
atcctctaaaaccccttaaccaaataaacgaaccctaaaactaaaccccg

SEQ ID NO: 43915 - DNA, 50 bp, synthetic construct
  source 1..50: mol_type = other DNA
accaaataaacaaaccctaaaactaaaccccaaactaaaacaaaactaca

SEQ ID NO: 43916 - DNA, 50 bp, synthetic construct
  source 1..50: mol_type = other DNA
accaaataaacgaaccctaaaactaaaccccgaactaaaacgaaactacg

SEQ ID NO: 43917 - DNA, 50 bp, synthetic construct
  source 1..50: mol_type = other DNA
aaactaaaacaaaactacaacctaaaaacctaaaaaacaactacttccca

SEQ ID NO: 43918 - DNA, 50 bp, synthetic construct
  source 1..50: mol_type = other DNA
gaactaaaacgaaactacgacctaaaaacctaaaaaacaactacttcccg

SEQ ID NO: 43919 - DNA, 50 bp, synthetic construct
  source 1..50: mol_type = other DNA
caaaaaatcttccctcaaccaaaaaaacaaaatccataacaaaaatatca

SEQ ID NO: 43920 - DNA, 50 bp, synthetic construct
  source 1..50: mol_type = other DNA
caaaaaatcttccctcgaccgaaaaaacgaaatccgtaacgaaaatatcg

SEQ ID NO: 43921 - DNA, 50 bp, synthetic construct
  source 1..50: mol_type = other DNA
ttaattttcaatcaaaataatatacataaatttaaaacatacttacacca

SEQ ID NO: 43922 - DNA, 50 bp, synthetic construct
  source 1..50: mol_type = other DNA
ttaattttcaatcgaaataatatacataaatttaaaacgtacttacaccg

SEQ ID NO: 43923 - DNA, 50 bp, synthetic construct
  source 1..50: mol_type = other DNA
ttttcaatcaaaataatatacataaatttaaaacatacttacaccatcca

SEQ ID NO: 43924 - DNA, 50 bp, synthetic construct
  source 1..50: mol_type = other DNA
ttttcaatcgaaataatatacataaatttaaaacgtacttacaccgtccg

SEQ ID NO: 43925 - DNA, 50 bp, synthetic construct
  source 1..50: mol_type = other DNA
cataaatttaaaacatacttacaccatccaaataaacctaaaatccaaca

SEQ ID NO: 43926 - DNA, 50 bp, synthetic construct
  source 1..50: mol_type = other DNA
cataaatttaaaacgtacttacaccgtccgaataaacctaaaatccgacg

SEQ ID NO: 43927 - DNA, 50 bp, synthetic construct
  source 1..50: mol_type = other DNA
aacaaaacaaaaaataacaacaaaaatcctcccaactcaccaaaaaaaca

SEQ ID NO: 43928 - DNA, 50 bp, synthetic construct
  source 1..50: mol_type = other DNA
aacgaaacaaaaaataacaacgaaaatcctcccgactcaccaaaaaaacg

SEQ ID NO: 43929 - DNA, 50 bp, synthetic construct
  source 1..50: mol_type = other DNA
aaaaaataacaacaaaaatcctcccaactcaccaaaaaaacaaacaacca

SEQ ID NO: 43930 - DNA, 50 bp, synthetic construct
  source 1..50: mol_type = other DNA
aaaaaataacaacgaaaatcctcccgactcaccaaaaaaacgaacgaccg

SEQ ID NO: 43931 - DNA, 50 bp, synthetic construct
  source 1..50: mol_type = other DNA
aaaaacataactaacctcataaaaaactcccaaaaaaactcaaaaaccca

SEQ ID NO: 43932 - DNA, 50 bp, synthetic construct
  source 1..50: mol_type = other DNA
aaaaacgtaactaacctcgtaaaaaactcccgaaaaaactcaaaaacccg

SEQ ID NO: 43933 - DNA, 50 bp, synthetic construct
  source 1..50: mol_type = other DNA
ttcaaaaacacacacaacaaaaacataactaacctcataaaaaactccca

SEQ ID NO: 43934 - DNA, 50 bp, synthetic construct
  source 1..50: mol_type = other DNA
ttcaaaaacgcgcacaacaaaaacgtaactaacctcgtaaaaaactcccg

SEQ ID NO: 43935 - DNA, 50 bp, synthetic construct
  source 1..50: mol_type = other DNA
aactccctcaaaaacctttcacaaaatcaactacatctttattatacaca

SEQ ID NO: 43936 - DNA, 50 bp, synthetic construct
  source 1..50: mol_type = other DNA
aactccctcgaaaacctttcacgaaatcaactacgtctttattatacgcg

SEQ ID NO: 43937 - DNA, 50 bp, synthetic construct
  source 1..50: mol_type = other DNA
tatacacattcctaaacttttaatccattaaccaacaattaaacacacca

SEQ ID NO: 43938 - DNA, 50 bp, synthetic construct
  source 1..50: mol_type = other DNA
tatacgcgttcctaaacttttaatccattaaccaacaattaaacacgccg

SEQ ID NO: 43939 - DNA, 50 bp, synthetic construct
  source 1..50: mol_type = other DNA
aaataaaaaaaaatctctccctatcaaaaaccttatttcctatatacaca

SEQ ID NO: 43940 - DNA, 50 bp, synthetic construct
  source 1..50: mol_type = other DNA
aaataaaaaaaaatctctccctatcaaaaaccttatttcctatatacacg

SEQ ID NO: 43941 - DNA, 50 bp, synthetic construct
  source 1..50: mol_type = other DNA
acttttaacaaaaaaaaacccttctctacctctaaacctcaatttcacca

SEQ ID NO: 43942 - DNA, 50 bp, synthetic construct
  source 1..50: mol_type = other DNA
acttttaacaaaaaaaaacccttctctacctctaaacctcgatttcgccg

SEQ ID NO: 43943 - DNA, 50 bp, synthetic construct
  source 1..50: mol_type = other DNA
ctttccaatccataaaaaccccaaaacaaaccccataataaatactccca

SEQ ID NO: 43944 - DNA, 50 bp, synthetic construct
  source 1..50: mol_type = other DNA
ctttccaatccataaaaaccccaaaacgaaccccataataaatactcccg

SEQ ID NO: 43945 - DNA, 50 bp, synthetic construct
  source 1..50: mol_type = other DNA
tactcccaatcaaaaccccttctctactaacaaaaaactttttcctttca

SEQ ID NO: 43946 - DNA, 50 bp, synthetic construct
  source 1..50: mol_type = other DNA
tactcccgatcgaaaccccttctctactaacaaaaaactttttcctttcg

SEQ ID NO: 43947 - DNA, 50 bp, synthetic construct
  source 1..50: mol_type = other DNA
ccctacacattcactaacctaaaacccccataaaataaataaaaatccca

SEQ ID NO: 43948 - DNA, 50 bp, synthetic construct
  source 1..50: mol_type = other DNA
ccctacacattcactaacctaaaacccccgtaaaataaataaaaatcccg

SEQ ID NO: 43949 - DNA, 50 bp, synthetic construct
  source 1..50: mol_type = other DNA
cctactccaaaacacaaacctaaaatcttctaaaaacctaacaaatcaca

SEQ ID NO: 43950 - DNA, 50 bp, synthetic construct
  source 1..50: mol_type = other DNA
cctactccaaaacacaaacctaaaatcttctaaaaacctaacgaatcgcg

SEQ ID NO: 43951 - DNA, 50 bp, synthetic construct
  source 1..50: mol_type = other DNA
atcttctaaaaacctaacaaatcacaacaaaaaaccaaaactcaccttca

SEQ ID NO: 43952 - DNA, 50 bp, synthetic construct
  source 1..50: mol_type = other DNA
atcttctaaaaacctaacgaatcgcgacaaaaaaccaaaactcaccttcg

SEQ ID NO: 43953 - DNA, 50 bp, synthetic construct
  source 1..50: mol_type = other DNA
ctttacaattaatcaatcattaaaatactacaaccccaccacctattcca

SEQ ID NO: 43954 - DNA, 50 bp, synthetic construct
  source 1..50: mol_type = other DNA
ctttacgattaatcgatcattaaaatactacaaccccgccacctattccg

SEQ ID NO: 43955 - DNA, 50 bp, synthetic construct
  source 1..50: mol_type = other DNA
aaaaaaaaccacaaaataaaatttaaccccacaataaaaaaccaacacca

SEQ ID NO: 43956 - DNA, 50 bp, synthetic construct
  source 1..50: mol_type = other DNA
aaaaaaaaccgcgaaataaaatttaaccccacaataaaaaaccgacgccg

SEQ ID NO: 43957 - DNA, 50 bp, synthetic construct
  source 1..50: mol_type = other DNA
aaaccacaaaaccatttactaaaaaaaactacaatcaaaaaaaacaacca

SEQ ID NO: 43958 - DNA, 50 bp, synthetic construct
  source 1..50: mol_type = other DNA
aaaccacaaaaccgtttactaaaaaaaactacgatcgaaaaaaacaaccg

SEQ ID NO: 43959 - DNA, 50 bp, synthetic construct
  source 1..50: mol_type = other DNA
ataaaaacaacaaaaaccacaaaaccatttactaaaaaaaactacaatca

SEQ ID NO: 43960 - DNA, 50 bp, synthetic construct
  source 1..50: mol_type = other DNA
ataaaaacgacaaaaaccacaaaaccgtttactaaaaaaaactacgatcg

SEQ ID NO: 43961 - DNA, 50 bp, synthetic construct
  source 1..50: mol_type = other DNA
aaatataaaaacaacaaaaaccacaaaaccatttactaaaaaaaactaca

SEQ ID NO: 43962 - DNA, 50 bp, synthetic construct
  source 1..50: mol_type = other DNA
aaatataaaaacgacaaaaaccacaaaaccgtttactaaaaaaaactacg

SEQ ID NO: 43963 - DNA, 50 bp, synthetic construct
  source 1..50: mol_type = other DNA
acacttaccaacatttctaaacaataataaatcacaaacactcaccaaca

SEQ ID NO: 43964 - DNA, 50 bp, synthetic construct
  source 1..50: mol_type = other DNA
acgcttaccgacatttctaaacaataataaatcacaaacgctcgccgacg

SEQ ID NO: 43965 - DNA, 50 bp, synthetic construct
  source 1..50: mol_type = other DNA
tcaacacttaccaacatttctaaacaataataaatcacaaacactcacca

SEQ ID NO: 43966 - DNA, 50 bp, synthetic construct
  source 1..50: mol_type = other DNA
tcaacgcttaccgacatttctaaacaataataaatcacaaacgctcgccg

SEQ ID NO: 43967 - DNA, 50 bp, synthetic construct
  source 1..50: mol_type = other DNA
aacccataccttccacatttacttcaaactatatatccttaaattcaaca

SEQ ID NO: 43968 - DNA, 50 bp, synthetic construct
  source 1..50: mol_type = other DNA
aacccataccttccgcgtttacttcgaactatatatccttaaattcaacg

SEQ ID NO: 43969 - DNA, 50 bp, synthetic construct
  source 1..50: mol_type = other DNA
ccactatccaaaaatatcaataaacactaaacccaaaaatacacaaccca

SEQ ID NO: 43970 - DNA, 50 bp, synthetic construct
  source 1..50: mol_type = other DNA
ccactatccaaaaatatcgataaacgctaaacccaaaaatacacaacccg

SEQ ID NO: 43971 - DNA, 50 bp, synthetic construct
  source 1..50: mol_type = other DNA
aaaccacaaataaacaatattatactctatacactacaaacaaataaaca

SEQ ID NO: 43972 - DNA, 50 bp, synthetic construct
  source 1..50: mol_type = other DNA
aaaccgcaaataaacgatattatactctatacgctacgaacaaataaacg

SEQ ID NO: 43973 - DNA, 50 bp, synthetic construct
  source 1..50: mol_type = other DNA
ttctaaccctaaaaaccacaaataaacaatattatactctatacactaca

SEQ ID NO: 43974 - DNA, 50 bp, synthetic construct
  source 1..50: mol_type = other DNA
ttctaaccctaaaaaccgcaaataaacgatattatactctatacgctacg

SEQ ID NO: 43975 - DNA, 50 bp, synthetic construct
  source 1..50: mol_type = other DNA
cactccataaaaaaaaattctcttctaaccctaaaaaccacaaataaaca

SEQ ID NO: 43976 - DNA, 50 bp, synthetic construct
  source 1..50: mol_type = other DNA
cgctccgtaaaaaaaaattctcttctaaccctaaaaaccgcaaataaacg

SEQ ID NO: 43977 - DNA, 50 bp, synthetic construct
  source 1..50: mol_type = other DNA
ctcttaccttcactccataaaaaaaaattctcttctaaccctaaaaacca

SEQ ID NO: 43978 - DNA, 50 bp, synthetic construct
  source 1..50: mol_type = other DNA
ctcttaccttcgctccgtaaaaaaaaattctcttctaaccctaaaaaccg

SEQ ID NO: 43979 - DNA, 50 bp, synthetic construct
  source 1..50: mol_type = other DNA
taataaattccaaatcccaaaaaaattcaaaacctcttaccttcactcca

SEQ ID NO: 43980 - DNA, 50 bp, synthetic construct
  source 1..50: mol_type = other DNA
taataaattccgaatcccaaaaaaattcgaaacctcttaccttcgctccg

SEQ ID NO: 43981 - DNA, 50 bp, synthetic construct
  source 1..50: mol_type = other DNA
tcaaacccttttaaaacccaaaacccatcaaaaataacccacaaaaacca

SEQ ID NO: 43982 - DNA, 50 bp, synthetic construct
  source 1..50: mol_type = other DNA
tcgaacccttttaaaacccgaaacccatcaaaaataacccacaaaaaccg

SEQ ID NO: 43983 - DNA, 50 bp, synthetic construct
  source 1..50: mol_type = other DNA
aaatcaaactaccactaaaaaacttcaaaaaaaccaatctatacactaca

SEQ ID NO: 43984 - DNA, 50 bp, synthetic construct
  source 1..50: mol_type = other DNA
aaatcgaactaccgctaaaaaacttcgaaaaaaccaatctatacactacg

SEQ ID NO: 43985 - DNA, 50 bp, synthetic construct
  source 1..50: mol_type = other DNA
cacaaatacctcaataaacttcaaaatcaaactaccactaaaaaacttca

SEQ ID NO: 43986 - DNA, 50 bp, synthetic construct
  source 1..50: mol_type = other DNA
cacgaatacctcgataaacttcgaaatcgaactaccgctaaaaaacttcg

SEQ ID NO: 43987 - DNA, 50 bp, synthetic construct
  source 1..50: mol_type = other DNA
taacatctcctctcacaaatacctcaataaacttcaaaatcaaactacca

SEQ ID NO: 43988 - DNA, 50 bp, synthetic construct
  source 1..50: mol_type = other DNA
taacatctcctctcacgaatacctcgataaacttcgaaatcgaactaccg

SEQ ID NO: 43989 - DNA, 50 bp, synthetic construct
  source 1..50: mol_type = other DNA
acactaaataacatctcctctcacaaatacctcaataaacttcaaaatca

SEQ ID NO: 43990 - DNA, 50 bp, synthetic construct
  source 1..50: mol_type = other DNA
acgctaaataacatctcctctcacgaatacctcgataaacttcgaaatcg

SEQ ID NO: 43991 - DNA, 50 bp, synthetic construct
  source 1..50: mol_type = other DNA
taatctacactaaataacatctcctctcacaaatacctcaataaacttca

SEQ ID NO: 43992 - DNA, 50 bp, synthetic construct
  source 1..50: mol_type = other DNA
taatctacgctaaataacatctcctctcacgaatacctcgataaacttcg

SEQ ID NO: 43993 - DNA, 50 bp, synthetic construct
  source 1..50: mol_type = other DNA
tccaaattttaatataattaattacctaaaaatccaaaattaaatatcca

SEQ ID NO: 43994 - DNA, 50 bp, synthetic construct
  source 1..50: mol_type = other DNA
tccaaattttaatataattaattacctaaaaatccaaaattaaatatccg

SEQ ID NO: 43995 - DNA, 50 bp, synthetic construct
  source 1..50: mol_type = other DNA
taaatcattaaaataaatcctaatactaaactaacataataacataacca

SEQ ID NO: 43996 - DNA, 50 bp, synthetic construct
  source 1..50: mol_type = other DNA
taaatcattaaaataaatcctaatactaaactaacgtaataacgtaaccg

SEQ ID NO: 43997 - DNA, 50 bp, synthetic construct
  source 1..50: mol_type = other DNA
ttcacaaaaaaaaatcacacacaaacacataaaccaaaacacaaattcca

SEQ ID NO: 43998 - DNA, 50 bp, synthetic construct
  source 1..50: mol_type = other DNA
ttcacaaaaaaaaatcacgcacaaacacataaaccaaaacgcgaattccg

SEQ ID NO: 43999 - DNA, 50 bp, synthetic construct
  source 1..50: mol_type = other DNA
cacctctttcacaaaaaaaaatcacacacaaacacataaaccaaaacaca

SEQ ID NO: 44000 - DNA, 50 bp, synthetic construct
  source 1..50: mol_type = other DNA
cacctctttcacaaaaaaaaatcacgcacaaacacataaaccaaaacgcg

SEQ ID NO: 44001 - DNA, 50 bp, synthetic construct
  source 1..50: mol_type = other DNA
aaacaaactaccacctataactaaaaaataccttaacaccaaaacccaca

SEQ ID NO: 44002 - DNA, 50 bp, synthetic construct
  source 1..50: mol_type = other DNA
aaacgaactaccacctataactaaaaaataccttaacgccgaaacccacg

SEQ ID NO: 44003 - DNA, 50 bp, synthetic construct
  source 1..50: mol_type = other DNA
aaaaaacaaaaaacaaaactccactactttaacctcaaaaaatttaatca

SEQ ID NO: 44004 - DNA, 50 bp, synthetic construct
  source 1..50: mol_type = other DNA
aaaaaacgaaaaacaaaactccactactttaacctcaaaaaatttaatcg

SEQ ID NO: 44005 - DNA, 50 bp, synthetic construct
  source 1..50: mol_type = other DNA
aaaacctactcctaaacacaaaaccaaaatcaattcaaaacctacaaaca

SEQ ID NO: 44006 - DNA, 50 bp, synthetic construct
  source 1..50: mol_type = other DNA
aaaacctactcctaaacgcgaaaccgaaatcgattcaaaacctacgaacg

SEQ ID NO: 44007 - DNA, 50 bp, synthetic construct
  source 1..50: mol_type = other DNA
aaaaaatcccaattctcattctttcaaaaacctacaaaaaaccccaccca

SEQ ID NO: 44008 - DNA, 50 bp, synthetic construct
  source 1..50: mol_type = other DNA
aaaaaatcccgattctcattctttcgaaaacctacaaaaaaccccgcccg

SEQ ID NO: 44009 - DNA, 50 bp, synthetic construct
  source 1..50: mol_type = other DNA
ctccacatccaaaaacaaaccctacataaaaccaaaaaaattcaaataca

SEQ ID NO: 44010 - DNA, 50 bp, synthetic construct
  source 1..50: mol_type = other DNA
ctccgcgtccaaaaacaaaccctacgtaaaaccgaaaaaattcaaatacg

SEQ ID NO: 44011 - DNA, 50 bp, synthetic construct
  source 1..50: mol_type = other DNA
atccaaaaacaaaccctacataaaaccaaaaaaattcaaatacatctaca

SEQ ID NO: 44012 - DNA, 50 bp, synthetic construct
  source 1..50: mol_type = other DNA
gtccaaaaacaaaccctacgtaaaaccgaaaaaattcaaatacgtctacg

SEQ ID NO: 44013 - DNA, 50 bp, synthetic construct
  source 1..50: mol_type = other DNA
ccaaaaaaattcaaatacatctacaaaacccaaaacacccaaaacaaaca

SEQ ID NO: 44014 - DNA, 50 bp, synthetic construct
  source 1..50: mol_type = other DNA
ccgaaaaaattcaaatacgtctacgaaacccaaaacacccaaaacaaacg

SEQ ID NO: 44015 - DNA, 50 bp, synthetic construct
  source 1..50: mol_type = other DNA
tctactaatttatatactccccctctactcccatacaaatttaaacaaca

SEQ ID NO: 44016 - DNA, 50 bp, synthetic construct
  source 1..50: mol_type = other DNA
tctactaatttatatactccccctctactcccgtacaaatttaaacgacg

SEQ ID NO: 44017 - DNA, 50 bp, synthetic construct
  source 1..50: mol_type = other DNA
caaaaccaaaaaaattcccttatccctctcacaaaacatacaacaaaaca

SEQ ID NO: 44018 - DNA, 50 bp, synthetic construct
  source 1..50: mol_type = other DNA
cgaaaccgaaaaaattcccttatccctctcacaaaacatacgacgaaacg

SEQ ID NO: 44019 - DNA, 50 bp, synthetic construct
  source 1..50: mol_type = other DNA
aataccaacaaaaccaaaaaaattcccttatccctctcacaaaacataca

SEQ ID NO: 44020 - DNA, 50 bp, synthetic construct
  source 1..50: mol_type = other DNA
aataccaacgaaaccgaaaaaattcccttatccctctcacaaaacatacg

SEQ ID NO: 44021 - DNA, 50 bp, synthetic construct
  source 1..50: mol_type = other DNA
tcactcacactaaaaactataaaccaaaactattcctatttaaccatcca

SEQ ID NO: 44022 - DNA, 50 bp, synthetic construct
  source 1..50: mol_type = other DNA
tcgctcacgctaaaaactataaaccgaaactattcctatttaaccatccg

SEQ ID NO: 44023 - DNA, 50 bp, synthetic construct
  source 1..50: mol_type = other DNA
tccaaaaattaaaaataaaactaccaaataaccaaataaaaacaactcca

SEQ ID NO: 44024 - DNA, 50 bp, synthetic construct
  source 1..50: mol_type = other DNA
tccaaaaattaaaaataaaactaccgaataaccaaataaaaacaactccg

SEQ ID NO: 44025 - DNA, 50 bp, synthetic construct
  source 1..50: mol_type = other DNA
attggatggttaaataggaatagttttggtttatagtttttagtgtgagt

SEQ ID NO: 44026 - DNA, 50 bp, synthetic construct
  source 1..50: mol_type = other DNA
atcggatggttaaataggaatagtttcggtttatagtttttagcgtgagc

SEQ ID NO: 44027 - DNA, 50 bp, synthetic construct
  source 1..50: mol_type = other DNA
cattttttaaacccatcaaaaaaacacaatattaaaataataataaccca

SEQ ID NO: 44028 - DNA, 50 bp, synthetic construct
  source 1..50: mol_type = other DNA
cgttttttaaacccgtcgaaaaaacgcaatattaaaataataataacccg

SEQ ID NO: 44029 - DNA, 50 bp, synthetic construct
  source 1..50: mol_type = other DNA
aacaaaccaataaaaaaaaccacataaataaattaaaaccaaacaacaca

SEQ ID NO: 44030 - DNA, 50 bp, synthetic construct
  source 1..50: mol_type = other DNA
aacaaaccaataaaaaaaaccgcgtaaataaattaaaaccaaacgacgcg

SEQ ID NO: 44031 - DNA, 50 bp, synthetic construct
  source 1..50: mol_type = other DNA
aataaaacacacactttacatatataaaatcccaatttcaatccctaaca

SEQ ID NO: 44032 - DNA, 50 bp, synthetic construct
  source 1..50: mol_type = other DNA
aataaaacgcgcgctttacatatataaaatcccgatttcgatccctaacg

SEQ ID NO: 44033 - DNA, 50 bp, synthetic construct
  source 1..50: mol_type = other DNA
ataatttaataataaaacacacactttacatatataaaatcccaatttca

SEQ ID NO: 44034 - DNA, 50 bp, synthetic construct
  source 1..50: mol_type = other DNA
ataatttaataataaaacgcgcgctttacatatataaaatcccgatttcg

SEQ ID NO: 44035 - DNA, 50 bp, synthetic construct
  source 1..50: mol_type = other DNA
aaataaaaacaccaaaaatcaaaaccaaaacctcatacatacaaaacaca

SEQ ID NO: 44036 - DNA, 50 bp, synthetic construct
  source 1..50: mol_type = other DNA
aaataaaaacgccaaaaatcgaaaccgaaacctcatacatacaaaacgcg

SEQ ID NO: 44037 - DNA, 50 bp, synthetic construct
  source 1..50: mol_type = other DNA
ataaaaacaccaaaaatcaaaaccaaaacctcatacatacaaaacacaca

SEQ ID NO: 44038 - DNA, 50 bp, synthetic construct
  source 1..50: mol_type = other DNA
ataaaaacgccaaaaatcgaaaccgaaacctcatacatacaaaacgcgcg

SEQ ID NO: 44039 - DNA, 50 bp, synthetic construct
  source 1..50: mol_type = other DNA
ttaaaaataccaaaaatcaaacccaaaacctcatacatacaaaacataca

SEQ ID NO: 44040 - DNA, 50 bp, synthetic construct
  source 1..50: mol_type = other DNA
ttaaaaataccgaaaatcgaacccgaaacctcatacatacgaaacatacg

SEQ ID NO: 44041 - DNA, 50 bp, synthetic construct
  source 1..50: mol_type = other DNA
aagatggggttttattgtgttagttaggatgatgttgattttttgatttt

SEQ ID NO: 44042 - DNA, 50 bp, synthetic construct
  source 1..50: mol_type = other DNA
aagacggggttttatcgtgttagttaggatgatgtcgattttttgatttc

SEQ ID NO: 44043 - DNA, 50 bp, synthetic construct
  source 1..50: mol_type = other DNA
tacaaaacttaccaatataaactttaaaaactcatttacaaccaaacaca

SEQ ID NO: 44044 - DNA, 50 bp, synthetic construct
  source 1..50: mol_type = other DNA
tacgaaacttaccaatataaactttaaaaactcatttacgaccgaacgcg

SEQ ID NO: 44045 - DNA, 50 bp, synthetic construct
  source 1..50: mol_type = other DNA
accacatccaaccacaaataaattttcaaaattcacattaacaaactcca

SEQ ID NO: 44046 - DNA, 50 bp, synthetic construct
  source 1..50: mol_type = other DNA
accgcgtccgaccgcaaataaattttcaaaattcacattaacaaactccg

SEQ ID NO: 44047 - DNA, 50 bp, synthetic construct
  source 1..50: mol_type = other DNA
aaaaatcaaaaaatataaatcaataataaaacacatacttcacatataca

SEQ ID NO: 44048 - DNA, 50 bp, synthetic construct
  source 1..50: mol_type = other DNA
aaaaatcaaaaaatataaatcaataataaaacgcatacttcgcatatacg

SEQ ID NO: 44049 - DNA, 50 bp, synthetic construct
  source 1..50: mol_type = other DNA
tccacaccccatctctatttctcacttaacaattattatatccacaaaca

SEQ ID NO: 44050 - DNA, 50 bp, synthetic construct
  source 1..50: mol_type = other DNA
tccacaccccatctctatttctcgcttaacgattattatatccacaaacg

SEQ ID NO: 44051 - DNA, 50 bp, synthetic construct
  source 1..50: mol_type = other DNA
tatttctcacttaacaattattatatccacaaacaaattttaaaacaaca

SEQ ID NO: 44052 - DNA, 50 bp, synthetic construct
  source 1..50: mol_type = other DNA
tatttctcgcttaacgattattatatccacaaacgaattttaaaacaacg

SEQ ID NO: 44053 - DNA, 50 bp, synthetic construct
  source 1..50: mol_type = other DNA
tccaactaaaacaaatacaaaatacaaataaaaaataccaaaaaaatcca

SEQ ID NO: 44054 - DNA, 50 bp, synthetic construct
  source 1..50: mol_type = other DNA
tccaactaaaacaaatacaaaatacaaataaaaaataccgaaaaaatccg

SEQ ID NO: 44055 - DNA, 50 bp, synthetic construct
  source 1..50: mol_type = other DNA
actaaaacaaatacaaaatacaaataaaaaataccaaaaaaatccaaaca

SEQ ID NO: 44056 - DNA, 50 bp, synthetic construct
  source 1..50: mol_type = other DNA
actaaaacaaatacaaaatacaaataaaaaataccgaaaaaatccgaacg

SEQ ID NO: 44057 - DNA, 50 bp, synthetic construct
  source 1..50: mol_type = other DNA
catacaattctcctaccttaacctaccaaataactaaaaccacaaacaca

SEQ ID NO: 44058 - DNA, 50 bp, synthetic construct
  source 1..50: mol_type = other DNA
catacgattctcctaccttaacctaccgaataactaaaaccacaaacgcg

SEQ ID NO: 44059 - DNA, 50 bp, synthetic construct
  source 1..50: mol_type = other DNA
cacaaacaaactaactttttaaaaatactccaaccttaccaaacaaaaca

SEQ ID NO: 44060 - DNA, 50 bp, synthetic construct
  source 1..50: mol_type = other DNA
cgcgaacaaactaactttttaaaaatactccaaccttaccgaacgaaacg

SEQ ID NO: 44061 - DNA, 50 bp, synthetic construct
  source 1..50: mol_type = other DNA
acaatatccaattcaataatttcacaaaaataataaaatttaatccaaca

SEQ ID NO: 44062 - DNA, 50 bp, synthetic construct
  source 1..50: mol_type = other DNA
acaatatccaattcaataatttcacgaaaataataaaatttaatccaacg

SEQ ID NO: 44063 - DNA, 50 bp, synthetic construct
  source 1..50: mol_type = other DNA
tacaatcaaaaaatataactcaataataaaacacatacttcacatataca

SEQ ID NO: 44064 - DNA, 50 bp, synthetic construct
  source 1..50: mol_type = other DNA
tacgatcaaaaaatataactcaataataaaacgcgtacttcgcatatacg

SEQ ID NO: 44065 - DNA, 50 bp, synthetic construct
  source 1..50: mol_type = other DNA
accatattaactaaaatattcttaatctcctacataatccacccacctca

SEQ ID NO: 44066 - DNA, 50 bp, synthetic construct
  source 1..50: mol_type = other DNA
accatattaactaaaatattcttaatctcctacgtaatccgcccgcctcg

SEQ ID NO: 44067 - DNA, 50 bp, synthetic construct
  source 1..50: mol_type = other DNA
caaatcacacaaaaaatcaaaaacatcctaactaacataataaaacccca

SEQ ID NO: 44068 - DNA, 50 bp, synthetic construct
  source 1..50: mol_type = other DNA
cgaatcacgcaaaaaatcaaaaacatcctaactaacataataaaaccccg

SEQ ID NO: 44069 - DNA, 50 bp, synthetic construct
  source 1..50: mol_type = other DNA
taatccttactattaaaataatacttttctaccacacacaataactcaca

SEQ ID NO: 44070 - DNA, 50 bp, synthetic construct
  source 1..50: mol_type = other DNA
taatccttactattaaaataatacttttctaccgcgcgcgataactcacg

SEQ ID NO: 44071 - DNA, 50 bp, synthetic construct
  source 1..50: mol_type = other DNA
ttgtattgttggtagagaaggggttttattatattggttaggttggtttt

SEQ ID NO: 44072 - DNA, 50 bp, synthetic construct
  source 1..50: mol_type = other DNA
ttgtattgttggtagagaaggggttttattatattggttaggttggtttc

SEQ ID NO: 44073 - DNA, 50 bp, synthetic construct
  source 1..50: mol_type = other DNA
tctatacataaacaaataaccaactctaaaaccaaaactattacttccca

SEQ ID NO: 44074 - DNA, 50 bp, synthetic construct
  source 1..50: mol_type = other DNA
tctatacataaacgaataaccgactctaaaaccgaaactattacttcccg

SEQ ID NO: 44075 - DNA, 50 bp, synthetic construct
  source 1..50: mol_type = other DNA
caacaaaaacaaaactccatcacaaactttttctcccccttataaaatca

SEQ ID NO: 44076 - DNA, 50 bp, synthetic construct
  source 1..50: mol_type = other DNA
caacaaaaacgaaactccgtcgcaaactttttctcccccttataaaatcg

SEQ ID NO: 44077 - DNA, 50 bp, synthetic construct
  source 1..50: mol_type = other DNA
cattaatataataacaaatttataacttctaactaaaaaaatcctaaaca

SEQ ID NO: 44078 - DNA, 50 bp, synthetic construct
  source 1..50: mol_type = other DNA
cgttaatataataacaaatttataacttctaactaaaaaaatcctaaacg

SEQ ID NO: 44079 - DNA, 50 bp, synthetic construct
  source 1..50: mol_type = other DNA
aatttataacttctaactaaaaaaatcctaaacaaaaaaattcattttca

SEQ ID NO: 44080 - DNA, 50 bp, synthetic construct
  source 1..50: mol_type = other DNA
aatttataacttctaactaaaaaaatcctaaacgaaaaaattcattttcg

SEQ ID NO: 44081 - DNA, 50 bp, synthetic construct
  source 1..50: mol_type = other DNA
cacattaatcatatttctaaaaaatcttcaaaaatataataaattaacca

SEQ ID NO: 44082 - DNA, 50 bp, synthetic construct
  source 1..50: mol_type = other DNA
cgcattaatcatatttctaaaaaatcttcaaaaatataataaattaaccg

SEQ ID NO: 44083 - DNA, 50 bp, synthetic construct
  source 1..50: mol_type = other DNA
tttccccttcccaactactccctaataatccccaatatttactatttcca

SEQ ID NO: 44084 - DNA, 50 bp, synthetic construct
  source 1..50: mol_type = other DNA
tttccccttcccaactactccctaataatccccgatatttactatttccg

SEQ ID NO: 44085 - DNA, 50 bp, synthetic construct
  source 1..50: mol_type = other DNA
aagttgaaattatttttaaaataatatagagattgggtttggtggtttat

SEQ ID NO: 44086 - DNA, 50 bp, synthetic construct
  source 1..50: mol_type = other DNA
aagttgaaattatttttaaaataatatagagatcgggttcggtggtttac

SEQ ID NO: 44087 - DNA, 50 bp, synthetic construct
  source 1..50: mol_type = other DNA
ttgtaatattagtattttgggagattgaggtgggtggattatttgagatt

SEQ ID NO: 44088 - DNA, 50 bp, synthetic construct
  source 1..50: mol_type = other DNA
ttgtaatattagtattttgggagatcgaggtgggcggattatttgagatc

SEQ ID NO: 44089 - DNA, 50 bp, synthetic construct
  source 1..50: mol_type = other DNA
atacataaaaccccacacccaaccccaattttatacttttaataaataca

SEQ ID NO: 44090 - DNA, 50 bp, synthetic construct
  source 1..50: mol_type = other DNA
atacgtaaaaccccgcgcccgaccccaattttatacttttaataaatacg

SEQ ID NO: 44091 - DNA, 50 bp, synthetic construct
  source 1..50: mol_type = other DNA
aacataaaaaaacctcatatctactaaaaatacaaaattaaaaccaaaca

SEQ ID NO: 44092 - DNA, 50 bp, synthetic construct
  source 1..50: mol_type = other DNA
aacataaaaaaacctcgtatctactaaaaatacaaaattaaaaccgaacg

SEQ ID NO: 44093 - DNA, 50 bp, synthetic construct
  source 1..50: mol_type = other DNA
cctcatatctactaaaaatacaaaattaaaaccaaacacaaaatctcaca

SEQ ID NO: 44094 - DNA, 50 bp, synthetic construct
  source 1..50: mol_type = other DNA
cctcgtatctactaaaaatacaaaattaaaaccgaacgcgaaatctcacg

SEQ ID NO: 44095 - DNA, 50 bp, synthetic construct
  source 1..50: mol_type = other DNA
aattaaaatttcaccatattaaccaaaataatctcaatctcctaacccca

SEQ ID NO: 44096 - DNA, 50 bp, synthetic construct
  source 1..50: mol_type = other DNA
aattaaaatttcaccgtattaaccaaaataatctcgatctcctaaccccg

SEQ ID NO: 44097 - DNA, 50 bp, synthetic construct
  source 1..50: mol_type = other DNA
acacaataaaaccccaattctactaaaaaatacaaaaaattaaccaaaca

SEQ ID NO: 44098 - DNA, 50 bp, synthetic construct
  source 1..50: mol_type = other DNA
acacgataaaaccccaattctactaaaaaatacaaaaaattaaccaaacg

SEQ ID NO: 44099 - DNA, 50 bp, synthetic construct
  source 1..50: mol_type = other DNA
aataataaaacacatacttaacatacacaaaaccccaaattcaatcccca

SEQ ID NO: 44100 - DNA, 50 bp, synthetic construct
  source 1..50: mol_type = other DNA
aataataaaacgcgtacttaacatacacgaaaccccgaattcaatccccg

SEQ ID NO: 44101 - DNA, 50 bp, synthetic construct
  source 1..50: mol_type = other DNA
aaaccttcaatataaaatacaatttactcaactatcaacaaaaaaaaaca

SEQ ID NO: 44102 - DNA, 50 bp, synthetic construct
  source 1..50: mol_type = other DNA
aaaccttcgatataaaatacgatttactcaactatcaacaaaaaaaaacg

SEQ ID NO: 44103 - DNA, 50 bp, synthetic construct
  source 1..50: mol_type = other DNA
taataaaccaaacccaacacacaaaaaacttaataaatcattcatacaca

SEQ ID NO: 44104 - DNA, 50 bp, synthetic construct
  source 1..50: mol_type = other DNA
taataaaccaaacccgacacacgaaaaacttaataaatcgttcatacgcg

SEQ ID NO: 44105 - DNA, 50 bp, synthetic construct
  source 1..50: mol_type = other DNA
ctaaaaataccaaaaattaaacccaaaacctcatacatactaaacacaca

SEQ ID NO: 44106 - DNA, 50 bp, synthetic construct
  source 1..50: mol_type = other DNA
ctaaaaataccgaaaattaaacccgaaacctcgtacatactaaacacgcg

SEQ ID NO: 44107 - DNA, 50 bp, synthetic construct
  source 1..50: mol_type = other DNA
aactaaacacaaaaacctacaaaaacaataactacaaccaaaacaaacca

SEQ ID NO: 44108 - DNA, 50 bp, synthetic construct
  source 1..50: mol_type = other DNA
aactaaacgcgaaaacctacaaaaacaataactacgaccgaaacaaaccg

SEQ ID NO: 44109 - DNA, 50 bp, synthetic construct
  source 1..50: mol_type = other DNA
attctccatcccaaaactaaacacaaaaacctacaaaaacaataactaca

SEQ ID NO: 44110 - DNA, 50 bp, synthetic construct
  source 1..50: mol_type = other DNA
attctccatcccgaaactaaacgcgaaaacctacaaaaacaataactacg

SEQ ID NO: 44111 - DNA, 50 bp, synthetic construct
  source 1..50: mol_type = other DNA
taaatcaccttacttctacatactttttattccataaaaaattccaccca

SEQ ID NO: 44112 - DNA, 50 bp, synthetic construct
  source 1..50: mol_type = other DNA
taaatcgccttacttctacatactttttattccgtaaaaaattccgcccg

SEQ ID NO: 44113 - DNA, 50 bp, synthetic construct
  source 1..50: mol_type = other DNA
aaccaaatcatactactacactccaccctaaataacaaaacaaaactcca

SEQ ID NO: 44114 - DNA, 50 bp, synthetic construct
  source 1..50: mol_type = other DNA
aaccaaatcgtactactacactccaccctaaataacaaaacgaaactccg

SEQ ID NO: 44115 - DNA, 50 bp, synthetic construct
  source 1..50: mol_type = other DNA
aaaataaaatacaataacacaacttaactcactacaacttccacctctca

SEQ ID NO: 44116 - DNA, 50 bp, synthetic construct
  source 1..50: mol_type = other DNA
aaaataaaatacaataacacgacttaactcactacaacttccacctctcg

SEQ ID NO: 44117 - DNA, 50 bp, synthetic construct
  source 1..50: mol_type = other DNA
ctaccactcaaaaaaacaataaaaaacttcaaaataaaaacacaaatcca

SEQ ID NO: 44118 - DNA, 50 bp, synthetic construct
  source 1..50: mol_type = other DNA
ctaccgctcgaaaaaacgataaaaaacttcaaaataaaaacgcgaatccg

SEQ ID NO: 44119 - DNA, 50 bp, synthetic construct
  source 1..50: mol_type = other DNA
acttcacaaaacccataatactcaactacaaccataacatctattacaca

SEQ ID NO: 44120 - DNA, 50 bp, synthetic construct
  source 1..50: mol_type = other DNA
acttcgcaaaacccataatactcgactacgaccataacatctattacgcg

SEQ ID NO: 44121 - DNA, 50 bp, synthetic construct
  source 1..50: mol_type = other DNA
aaaccaaaaaaaacaccaaaaaattaaactcaatacaaaactcaacacca

SEQ ID NO: 44122 - DNA, 50 bp, synthetic construct
  source 1..50: mol_type = other DNA
gaaccgaaaaaaacgccgaaaaattaaactcaatacaaaactcgacgccg

SEQ ID NO: 44123 - DNA, 50 bp, synthetic construct
  source 1..50: mol_type = other DNA
caaaatcacaactaaattattaaaatactcacacccctatacccaaaaca

SEQ ID NO: 44124 - DNA, 50 bp, synthetic construct
  source 1..50: mol_type = other DNA
caaaatcgcgactaaattattaaaatactcgcgcccctatacccgaaacg

SEQ ID NO: 44125 - DNA, 50 bp, synthetic construct
  source 1..50: mol_type = other DNA
tcttcaattataataaatacataaccaacattaaatcattactacattca

SEQ ID NO: 44126 - DNA, 50 bp, synthetic construct
  source 1..50: mol_type = other DNA
tcttcgattataataaatacgtaaccaacgttaaatcattactacgttcg

SEQ ID NO: 44127 - DNA, 50 bp, synthetic construct
  source 1..50: mol_type = other DNA
catttctttcattaaatcacaaacataataataacttaacactaattaca

SEQ ID NO: 44128 - DNA, 50 bp, synthetic construct
  source 1..50: mol_type = other DNA
catttctttcattaaatcgcgaacgtaataataacttaacgctaattacg

SEQ ID NO: 44129 - DNA, 50 bp, synthetic construct
  source 1..50: mol_type = other DNA
atcacaaacataataataacttaacactaattacacattcattacaatca

SEQ ID NO: 44130 - DNA, 50 bp, synthetic construct
  source 1..50: mol_type = other DNA
atcgcgaacgtaataataacttaacgctaattacgcattcattacaatcg

SEQ ID NO: 44131 - DNA, 50 bp, synthetic construct
  source 1..50: mol_type = other DNA
cttaacactaattacacattcattacaatcaaaaattatattaatttaca

SEQ ID NO: 44132 - DNA, 50 bp, synthetic construct
  source 1..50: mol_type = other DNA
cttaacgctaattacgcattcattacaatcgaaaattatattaatttacg

SEQ ID NO: 44133 - DNA, 50 bp, synthetic construct
  source 1..50: mol_type = other DNA
aaacaacaacacaccctataaataataacataaccaaacaatctaaaaca

SEQ ID NO: 44134 - DNA, 50 bp, synthetic construct
  source 1..50: mol_type = other DNA
aaacgacgacgcaccctataaataataacgtaaccgaacgatctaaaacg

SEQ ID NO: 44135 - DNA, 50 bp, synthetic construct
  source 1..50: mol_type = other DNA
ccaaataaatataaaacccataacatcctctaacactctcaatctcttca

SEQ ID NO: 44136 - DNA, 50 bp, synthetic construct
  source 1..50: mol_type = other DNA
ccaaataaatataaaacccataacgtcctctaacgctctcgatctcttcg

SEQ ID NO: 44137 - DNA, 50 bp, synthetic construct
  source 1..50: mol_type = other DNA
ccctaaaatccaaataaatataaaacccataacatcctctaacactctca

SEQ ID NO: 44138 - DNA, 50 bp, synthetic construct
  source 1..50: mol_type = other DNA
ccctaaaatccaaataaatataaaacccataacgtcctctaacgctctcg

SEQ ID NO: 44139 - DNA, 50 bp, synthetic construct
  source 1..50: mol_type = other DNA
tcctaaaaaaactttaaaaactacaaaaacaattaaatctaaactttaca

SEQ ID NO: 44140 - DNA, 50 bp, synthetic construct
  source 1..50: mol_type = other DNA
tcctaaaaaaactttaaaaactacgaaaacaattaaatctaaactttacg

SEQ ID NO: 44141 - DNA, 50 bp, synthetic construct
  source 1..50: mol_type = other DNA
aatctcataatctaaaaatcctaaattcaaacctcaaaaaaaacaaaaca

SEQ ID NO: 44142 - DNA, 50 bp, synthetic construct
  source 1..50: mol_type = other DNA
aatctcataatctaaaaatcctaaattcgaacctcaaaaaaaacaaaacg

SEQ ID NO: 44143 - DNA, 50 bp, synthetic construct
  source 1..50: mol_type = other DNA
attctatcaaacacttctaacaatctaaaacaacaaccaactaaacaaca

SEQ ID NO: 44144 - DNA, 50 bp, synthetic construct
  source 1..50: mol_type = other DNA
attctatcaaacacttctaacaatctaaaacgacaaccgactaaacgacg

SEQ ID NO: 44145 - DNA, 50 bp, synthetic construct
  source 1..50: mol_type = other DNA
aacacttctaacaatctaaaacaacaaccaactaaacaacaaaaaaacca

SEQ ID NO: 44146 - DNA, 50 bp, synthetic construct
  source 1..50: mol_type = other DNA
aacacttctaacaatctaaaacgacaaccgactaaacgacgaaaaaaccg

SEQ ID NO: 44147 - DNA, 50 bp, synthetic construct
  source 1..50: mol_type = other DNA
tcataactaaataataaaacatactctatttcaatatatacattcaacca

SEQ ID NO: 44148 - DNA, 50 bp, synthetic construct
  source 1..50: mol_type = other DNA
tcgtaactaaataataaaacgtactctatttcgatatatacattcaaccg

SEQ ID NO: 44149 - DNA, 50 bp, synthetic construct
  source 1..50: mol_type = other DNA
tcaattaaatacacacatcaaaacaaaacacattccatcatccaattaca

SEQ ID NO: 44150 - DNA, 50 bp, synthetic construct
  source 1..50: mol_type = other DNA
tcgattaaatacacacatcgaaacaaaacacgttccatcatccaattacg

SEQ ID NO: 44151 - DNA, 50 bp, synthetic construct
  source 1..50: mol_type = other DNA
aacacatacacacacaattaacttctacttttccaacaaattaatacaca

SEQ ID NO: 44152 - DNA, 50 bp, synthetic construct
  source 1..50: mol_type = other DNA
aacacatacgcacacaattaacttctacttttccgacgaattaatacacg

SEQ ID NO: 44153 - DNA, 50 bp, synthetic construct
  source 1..50: mol_type = other DNA
aacataaccatacactaactcatcaaaaaaataaaaatcaactatataca

SEQ ID NO: 44154 - DNA, 50 bp, synthetic construct
  source 1..50: mol_type = other DNA
aacataaccgtacactaactcgtcgaaaaaataaaaatcaactatatacg

SEQ ID NO: 44155 - DNA, 50 bp, synthetic construct
  source 1..50: mol_type = other DNA
aattaaaacaaaaaaacctcattccctaaccaaaaatcaaacccaaacca

SEQ ID NO: 44156 - DNA, 50 bp, synthetic construct
  source 1..50: mol_type = other DNA
aattaaaacaaaaaaacctcattccctaaccgaaaatcgaacccgaaccg

SEQ ID NO: 44157 - DNA, 50 bp, synthetic construct
  source 1..50: mol_type = other DNA
ttaaaaattaaaacaaaaaaacctcattccctaaccaaaaatcaaaccca

SEQ ID NO: 44158 - DNA, 50 bp, synthetic construct
  source 1..50: mol_type = other DNA
ttaaaaattaaaacaaaaaaacctcattccctaaccgaaaatcgaacccg

SEQ ID NO: 44159 - DNA, 50 bp, synthetic construct
  source 1..50: mol_type = other DNA
aaaaataaaaacaaataaaataaactaaccctcccacccaaaatcccaca

SEQ ID NO: 44160 - DNA, 50 bp, synthetic construct
  source 1..50: mol_type = other DNA
aaaaataaaaacaaataaaataaactaaccctcccgcccgaaatcccgcg

SEQ ID NO: 44161 - DNA, 50 bp, synthetic construct
  source 1..50: mol_type = other DNA
caacataaaatattactaataacactcctcacccaaaaaacaacactcca

SEQ ID NO: 44162 - DNA, 50 bp, synthetic construct
  source 1..50: mol_type = other DNA
caacataaaatattactaataacactcctcgcccaaaaaacgacgctccg

SEQ ID NO: 44163 - DNA, 50 bp, synthetic construct
  source 1..50: mol_type = other DNA
aaaaaacaataccccaatatacactacacaccattctaaaaaaaaataca

SEQ ID NO: 44164 - DNA, 50 bp, synthetic construct
  source 1..50: mol_type = other DNA
aaaaaacaataccccgatatacactacgcgccgttctaaaaaaaaatacg

SEQ ID NO: 44165 - DNA, 50 bp, synthetic construct
  source 1..50: mol_type = other DNA
aaaaccccaaaccccataacataaaaaacaaaaataactattaaaaaaca

SEQ ID NO: 44166 - DNA, 50 bp, synthetic construct
  source 1..50: mol_type = other DNA
aaaaccccgaaccccataacgtaaaaaacaaaaataactattaaaaaacg

SEQ ID NO: 44167 - DNA, 50 bp, synthetic construct
  source 1..50: mol_type = other DNA
aacctacaaaacaaccaacaaaaaatcaaataatctccaaatacaaacca

SEQ ID NO: 44168 - DNA, 50 bp, synthetic construct
  source 1..50: mol_type = other DNA
aacctacgaaacaaccgacaaaaaatcgaataatctccgaatacgaaccg

SEQ ID NO: 44169 - DNA, 50 bp, synthetic construct
  source 1..50: mol_type = other DNA
atcaaaacctacaaaacaaccaacaaaaaatcaaataatctccaaataca

SEQ ID NO: 44170 - DNA, 50 bp, synthetic construct
  source 1..50: mol_type = other DNA
atcgaaacctacgaaacaaccgacaaaaaatcgaataatctccgaatacg

SEQ ID NO: 44171 - DNA, 50 bp, synthetic construct
  source 1..50: mol_type = other DNA
ctaaaacaaccaataccaaaaacataaataaaccaaacttctacaaacca

SEQ ID NO: 44172 - DNA, 50 bp, synthetic construct
  source 1..50: mol_type = other DNA
ctaaaacgaccgataccgaaaacgtaaataaaccaaacttctacgaaccg

SEQ ID NO: 44173 - DNA, 50 bp, synthetic construct
  source 1..50: mol_type = other DNA
aaacactaaaacaaccaataccaaaaacataaataaaccaaacttctaca

SEQ ID NO: 44174 - DNA, 50 bp, synthetic construct
  source 1..50: mol_type = other DNA
aaacgctaaaacgaccgataccgaaaacgtaaataaaccaaacttctacg

SEQ ID NO: 44175 - DNA, 50 bp, synthetic construct
  source 1..50: mol_type = other DNA
taaaaaccaaaaccccaaattaacaaaactcaaaaaaaaaacacacaaca

SEQ ID NO: 44176 - DNA, 50 bp, synthetic construct
  source 1..50: mol_type = other DNA
taaaaaccaaaaccccgaattaacaaaactcgaaaaaaaaacgcgcgacg

SEQ ID NO: 44177 - DNA, 50 bp, synthetic construct
  source 1..50: mol_type = other DNA
ttttattttttacctccaatccattctacacattccctacaaaacaaaca

SEQ ID NO: 44178 - DNA, 50 bp, synthetic construct
  source 1..50: mol_type = other DNA
ttttattttttacctccaatccgttctacgcgttccctacaaaacaaacg

SEQ ID NO: 44179 - DNA, 50 bp, synthetic construct
  source 1..50: mol_type = other DNA
acccaaaatcaaaaattcaaaaccaacctaatcaacataaaaaaacccca

SEQ ID NO: 44180 - DNA, 50 bp, synthetic construct
  source 1..50: mol_type = other DNA
acccgaaatcaaaaattcgaaaccaacctaatcaacataaaaaaaccccg

SEQ ID NO: 44181 - DNA, 50 bp, synthetic construct
  source 1..50: mol_type = other DNA
aaaatttaatactattcataatttcaaaatatccactaaaataaaacaca

SEQ ID NO: 44182 - DNA, 50 bp, synthetic construct
  source 1..50: mol_type = other DNA
aaaatttaatactattcataatttcaaaatatccactaaaataaaacgcg

SEQ ID NO: 44183 - DNA, 50 bp, synthetic construct
  source 1..50: mol_type = other DNA
aactttcaactataaaaactaaaaaccacctacaaacttatctataccca

SEQ ID NO: 44184 - DNA, 50 bp, synthetic construct
  source 1..50: mol_type = other DNA
aactttcgactataaaaactaaaaaccgcctacgaacttatctatacccg

SEQ ID NO: 44185 - DNA, 50 bp, synthetic construct
  source 1..50: mol_type = other DNA
caaacacctactttaccaaacaacaataaacaaaaccaactttattccca

SEQ ID NO: 44186 - DNA, 50 bp, synthetic construct
  source 1..50: mol_type = other DNA
caaacgcctactttaccaaacgacaataaacaaaaccgactttattcccg

SEQ ID NO: 44187 - DNA, 50 bp, synthetic construct
  source 1..50: mol_type = other DNA
acaataaacaaaacacctaaatacaccccaaactaacccacatttcccca

SEQ ID NO: 44188 - DNA, 50 bp, synthetic construct
  source 1..50: mol_type = other DNA
acaataaacaaaacacctaaatacaccccaaactaacccacgtttccccg

SEQ ID NO: 44189 - DNA, 50 bp, synthetic construct
  source 1..50: mol_type = other DNA
tgagattatagatgtttgttattatgtttggttaatttttttgtagagat

SEQ ID NO: 44190 - DNA, 50 bp, synthetic construct
  source 1..50: mol_type = other DNA
tgagattatagatgttcgttattacgttcggttaatttttttgtagagac

SEQ ID NO: 44191 - DNA, 50 bp, synthetic construct
  source 1..50: mol_type = other DNA
aaataaatttcaaatccaaaaactctaaaaaacccaaacaatccataaca

SEQ ID NO: 44192 - DNA, 50 bp, synthetic construct
  source 1..50: mol_type = other DNA
aaataaatttcgaatccgaaaactctaaaaaacccgaacgatccgtaacg

SEQ ID NO: 44193 - DNA, 50 bp, synthetic construct
  source 1..50: mol_type = other DNA
atcccactacctcaaaataaatttcaaatccaaaaactctaaaaaaccca

SEQ ID NO: 44194 - DNA, 50 bp, synthetic construct
  source 1..50: mol_type = other DNA
atcccgctacctcgaaataaatttcgaatccgaaaactctaaaaaacccg

SEQ ID NO: 44195 - DNA, 50 bp, synthetic construct
  source 1..50: mol_type = other DNA
aataaaaaatctaaacaaatcccactacctcaaaataaatttcaaatcca

SEQ ID NO: 44196 - DNA, 50 bp, synthetic construct
  source 1..50: mol_type = other DNA
aataaaaaatctaaacgaatcccgctacctcgaaataaatttcgaatccg

SEQ ID NO: 44197 - DNA, 50 bp, synthetic construct
  source 1..50: mol_type = other DNA
aaaatctcacaccctccaaaaaataaataactacaacataaaacccaaca

SEQ ID NO: 44198 - DNA, 50 bp, synthetic construct
  source 1..50: mol_type = other DNA
aaaatctcacaccctccaaaaaataaataactacgacataaaacccgacg

SEQ ID NO: 44199 - DNA, 50 bp, synthetic construct
  source 1..50: mol_type = other DNA
aaaaacacaaatcctcattcaaaaaaatataatccttaccatcatacaca

SEQ ID NO: 44200 - DNA, 50 bp, synthetic construct
  source 1..50: mol_type = other DNA
aaaaacgcaaatcctcgttcaaaaaaatataatccttaccgtcgtacgcg

SEQ ID NO: 44201 - DNA, 50 bp, synthetic construct
  source 1..50: mol_type = other DNA
ccaaaaacacaaatcctcattcaaaaaaatataatccttaccatcataca

SEQ ID NO: 44202 - DNA, 50 bp, synthetic construct
  source 1..50: mol_type = other DNA
ccaaaaacgcaaatcctcgttcaaaaaaatataatccttaccgtcgtacg

SEQ ID NO: 44203 - DNA, 50 bp, synthetic construct
  source 1..50: mol_type = other DNA
caatccaaaaacacaaatcctcattcaaaaaaatataatccttaccatca

SEQ ID NO: 44204 - DNA, 50 bp, synthetic construct
  source 1..50: mol_type = other DNA
cgatccaaaaacgcaaatcctcgttcaaaaaaatataatccttaccgtcg

SEQ ID NO: 44205 - DNA, 50 bp, synthetic construct
  source 1..50: mol_type = other DNA
aatcactaaaataaaaccaaataacaaaaaatttctaataaaccttcaca

SEQ ID NO: 44206 - DNA, 50 bp, synthetic construct
  source 1..50: mol_type = other DNA
gatcgctaaaataaaaccaaataacaaaaaatttctaataaaccttcgcg

SEQ ID NO: 44207 - DNA, 50 bp, synthetic construct
  source 1..50: mol_type = other DNA
aataaaaactaacacccacaacttaaaaccaatcacaaactaaaaaaaca

SEQ ID NO: 44208 - DNA, 50 bp, synthetic construct
  source 1..50: mol_type = other DNA
aataaaaactaacgcccgcaacttaaaaccaatcacgaactaaaaaaacg

SEQ ID NO: 44209 - DNA, 50 bp, synthetic construct
  source 1..50: mol_type = other DNA
cacaaaaacaactttctcctcacaaactttaaacaccactactaaatcca

SEQ ID NO: 44210 - DNA, 50 bp, synthetic construct
  source 1..50: mol_type = other DNA
cacaaaaacgactttctcctcacaaactttaaacgccactactaaatccg

SEQ ID NO: 44211 - DNA, 50 bp, synthetic construct
  source 1..50: mol_type = other DNA
cccaatacaatcacttacaaaacccaaaacaaaattaaactaaacaccca

SEQ ID NO: 44212 - DNA, 50 bp, synthetic construct
  source 1..50: mol_type = other DNA
cccaatacgatcgcttacaaaacccaaaacgaaattaaactaaacgcccg

SEQ ID NO: 44213 - DNA, 50 bp, synthetic construct
  source 1..50: mol_type = other DNA
ttatgggttgtttatggattttaggatttgaaaatgtttttagttgtttt

SEQ ID NO: 44214 - DNA, 50 bp, synthetic construct
  source 1..50: mol_type = other DNA
ttacgggtcgtttacggattttaggattcgaaaacgtttttagttgtttc

SEQ ID NO: 44215 - DNA, 50 bp, synthetic construct
  source 1..50: mol_type = other DNA
aaaccaacaaaaacacaaaacactacaaccctcaaaatacaataacaaca

SEQ ID NO: 44216 - DNA, 50 bp, synthetic construct
  source 1..50: mol_type = other DNA
aaaccaacaaaaacgcaaaacgctacgaccctcaaaatacgataacaacg

SEQ ID NO: 44217 - DNA, 50 bp, synthetic construct
  source 1..50: mol_type = other DNA
aacaaaattcaaaacaccataacaccatcctcaacaactaaaaaaaatca

SEQ ID NO: 44218 - DNA, 50 bp, synthetic construct
  source 1..50: mol_type = other DNA
aacaaaattcgaaacgccataacaccatcctcgacgactaaaaaaaatcg

SEQ ID NO: 44219 - DNA, 50 bp, synthetic construct
  source 1..50: mol_type = other DNA
ccctaaacaactactacaaccaaaataaaacctataaataacaccaacca

SEQ ID NO: 44220 - DNA, 50 bp, synthetic construct
  source 1..50: mol_type = other DNA
ccctaaacgactactacaaccaaaataaaacctataaataacaccgaccg

SEQ ID NO: 44221 - DNA, 50 bp, synthetic construct
  source 1..50: mol_type = other DNA
caccaaaaccaacctacaaaaattttaactaaaaataaaaccaaataaca

SEQ ID NO: 44222 - DNA, 50 bp, synthetic construct
  source 1..50: mol_type = other DNA
cgccaaaaccaacctacgaaaattttaactaaaaataaaaccgaataacg

SEQ ID NO: 44223 - DNA, 50 bp, synthetic construct
  source 1..50: mol_type = other DNA
cccacaaattaatcctaacaaaaacaaaactcaataaacaaaactaacca

SEQ ID NO: 44224 - DNA, 50 bp, synthetic construct
  source 1..50: mol_type = other DNA
cccgcaaattaatcctaacgaaaacgaaactcgataaacgaaactaaccg

SEQ ID NO: 44225 - DNA, 50 bp, synthetic construct
  source 1..50: mol_type = other DNA
cacaaattaatcctaacaaaaacaaaactcaataaacaaaactaaccaca

SEQ ID NO: 44226 - DNA, 50 bp, synthetic construct
  source 1..50: mol_type = other DNA
cgcaaattaatcctaacgaaaacgaaactcgataaacgaaactaaccgcg

SEQ ID NO: 44227 - DNA, 50 bp, synthetic construct
  source 1..50: mol_type = other DNA
tacactaaaaatctcctcaaaaatccccccaacctaaccactaacaacca

SEQ ID NO: 44228 - DNA, 50 bp, synthetic construct
  source 1..50: mol_type = other DNA
tacgctaaaaatctcctcaaaaatccccccaacctaaccactaacaaccg

SEQ ID NO: 44229 - DNA, 50 bp, synthetic construct
  source 1..50: mol_type = other DNA
atcctaataacaactcctccaaaaaaccaaaaaccaactttcctaacaca

SEQ ID NO: 44230 - DNA, 50 bp, synthetic construct
  source 1..50: mol_type = other DNA
atcctaataacgactcctccgaaaaaccaaaaaccaactttcctaacacg

SEQ ID NO: 44231 - DNA, 50 bp, synthetic construct
  source 1..50: mol_type = other DNA
ctaaaaaaatccaaataaacaaaaaatccaattcaaaaacaaaaattcca

SEQ ID NO: 44232 - DNA, 50 bp, synthetic construct
  source 1..50: mol_type = other DNA
ctaaaaaaatccaaataaacaaaaaatccaattcaaaaacgaaaattccg

SEQ ID NO: 44233 - DNA, 50 bp, synthetic construct
  source 1..50: mol_type = other DNA
aacctaaacacataaatacaaaatctacaaaaaaataatcaaaaaaaaca

SEQ ID NO: 44234 - DNA, 50 bp, synthetic construct
  source 1..50: mol_type = other DNA
aacctaaacgcgtaaatacaaaatctacaaaaaaataatcgaaaaaaacg

SEQ ID NO: 44235 - DNA, 50 bp, synthetic construct
  source 1..50: mol_type = other DNA
ccaaataaaaacacctaaacctctcccaaatcaaaaatctcaaaatccca

SEQ ID NO: 44236 - DNA, 50 bp, synthetic construct
  source 1..50: mol_type = other DNA
ccgaataaaaacgcctaaacctctcccaaatcaaaaatctcgaaatcccg

SEQ ID NO: 44237 - DNA, 50 bp, synthetic construct
  source 1..50: mol_type = other DNA
aaaaaaaactcaccaccaaaaaaaaaactcaataccaaaaaaaaaactca

SEQ ID NO: 44238 - DNA, 50 bp, synthetic construct
  source 1..50: mol_type = other DNA
aaaaaaaactcgccgccaaaaaaaaaactcgataccaaaaaaaaaactcg

SEQ ID NO: 44239 - DNA, 50 bp, synthetic construct
  source 1..50: mol_type = other DNA
acttaacacaaaaaaaacaaaatcaaaacaaaatcctataaccccaaaca

SEQ ID NO: 44240 - DNA, 50 bp, synthetic construct
  source 1..50: mol_type = other DNA
gcttaacacaaaaaaaacgaaatcaaaacgaaatcctataaccccaaacg

SEQ ID NO: 44241 - DNA, 50 bp, synthetic construct
  source 1..50: mol_type = other DNA
aaaacaaaatcctataaccccaaacataactctcaaaatttcaaacccca

SEQ ID NO: 44242 - DNA, 50 bp, synthetic construct
  source 1..50: mol_type = other DNA
aaaacgaaatcctataaccccaaacgtaactctcaaaatttcaaaccccg

SEQ ID NO: 44243 - DNA, 50 bp, synthetic construct
  source 1..50: mol_type = other DNA
caaaataaatcttaaaaccaaaaactcacaaaaaaaacccaaaacatcca

SEQ ID NO: 44244 - DNA, 50 bp, synthetic construct
  source 1..50: mol_type = other DNA
cgaaataaatcttaaaaccgaaaactcgcgaaaaaaacccgaaacgtccg

SEQ ID NO: 44245 - DNA, 50 bp, synthetic construct
  source 1..50: mol_type = other DNA
acctcaaaataaatcttaaaaccaaaaactcacaaaaaaaacccaaaaca

SEQ ID NO: 44246 - DNA, 50 bp, synthetic construct
  source 1..50: mol_type = other DNA
acctcgaaataaatcttaaaaccgaaaactcgcgaaaaaaacccgaaacg

SEQ ID NO: 44247 - DNA, 50 bp, synthetic construct
  source 1..50: mol_type = other DNA
aacccaaaaaaatttttaacctaaactaaaaataaaaccaaataaaaaca

SEQ ID NO: 44248 - DNA, 50 bp, synthetic construct
  source 1..50: mol_type = other DNA
aacccgaaaaaatttttaacctaaactaaaaataaaaccgaataaaaacg

SEQ ID NO: 44249 - DNA, 50 bp, synthetic construct
  source 1..50: mol_type = other DNA
accacatacaacccacaaaccacaaattaaacaaacctacatctaaaaca

SEQ ID NO: 44250 - DNA, 50 bp, synthetic construct
  source 1..50: mol_type = other DNA
accacatacaacccacgaaccgcgaattaaacaaacctacatctaaaacg

SEQ ID NO: 44251 - DNA, 50 bp, synthetic construct
  source 1..50: mol_type = other DNA
aaaacccaacataatcacatatataactcaaaacacaactacactaaaca

SEQ ID NO: 44252 - DNA, 50 bp, synthetic construct
  source 1..50: mol_type = other DNA
aaaacccaacgtaatcgcgtatataactcaaaacgcgactacgctaaacg

SEQ ID NO: 44253 - DNA, 50 bp, synthetic construct
  source 1..50: mol_type = other DNA
tacaaaactattacttcactatatatctcatatacaccccctactcacca

SEQ ID NO: 44254 - DNA, 50 bp, synthetic construct
  source 1..50: mol_type = other DNA
tacgaaactattacttcgctatatatctcatatacaccccctactcaccg

SEQ ID NO: 44255 - DNA, 50 bp, synthetic construct
  source 1..50: mol_type = other DNA
aaattacaaaacaaaaacaaactatcacactaattactcatacaaaaaca

SEQ ID NO: 44256 - DNA, 50 bp, synthetic construct
  source 1..50: mol_type = other DNA
aaattacgaaacgaaaacgaactatcgcgctaattactcgtacaaaaacg

SEQ ID NO: 44257 - DNA, 50 bp, synthetic construct
  source 1..50: mol_type = other DNA
aataaccaaaaaattacaaaacaaaaacaaactatcacactaattactca

SEQ ID NO: 44258 - DNA, 50 bp, synthetic construct
  source 1..50: mol_type = other DNA
aataaccgaaaaattacgaaacgaaaacgaactatcgcgctaattactcg

SEQ ID NO: 44259 - DNA, 50 bp, synthetic construct
  source 1..50: mol_type = other DNA
aacaaaattcaacaaaaaccaatcccaaaactaatccaaaaaaaatctca

SEQ ID NO: 44260 - DNA, 50 bp, synthetic construct
  source 1..50: mol_type = other DNA
aacgaaattcgacaaaaaccaatcccgaaactaatccgaaaaaaatctcg

SEQ ID NO: 44261 - DNA, 50 bp, synthetic construct
  source 1..50: mol_type = other DNA
caataaaacaccaaaaacaacaaaataaaaactaaaatcaaacaaaacca

SEQ ID NO: 44262 - DNA, 50 bp, synthetic construct
  source 1..50: mol_type = other DNA
cgataaaacaccaaaaacaacgaaataaaaactaaaatcaaacgaaaccg

SEQ ID NO: 44263 - DNA, 50 bp, synthetic construct
  source 1..50: mol_type = other DNA
caccaaaaacaacaaaataaaaactaaaatcaaacaaaaccaaaactaca

SEQ ID NO: 44264 - DNA, 50 bp, synthetic construct
  source 1..50: mol_type = other DNA
caccaaaaacaacgaaataaaaactaaaatcaaacgaaaccgaaactacg

SEQ ID NO: 44265 - DNA, 50 bp, synthetic construct
  source 1..50: mol_type = other DNA
aacaaaataaaaactaaaatcaaacaaaaccaaaactacaccaaaaacca

SEQ ID NO: 44266 - DNA, 50 bp, synthetic construct
  source 1..50: mol_type = other DNA
aacgaaataaaaactaaaatcaaacgaaaccgaaactacgccaaaaaccg

SEQ ID NO: 44267 - DNA, 50 bp, synthetic construct
  source 1..50: mol_type = other DNA
catttaaaaaaaatctaaatacaaataattacaccaaaactataatacca

SEQ ID NO: 44268 - DNA, 50 bp, synthetic construct
  source 1..50: mol_type = other DNA
cgtttaaaaaaaatctaaatacgaataattacgccgaaactataataccg

SEQ ID NO: 44269 - DNA, 50 bp, synthetic construct
  source 1..50: mol_type = other DNA
aaaacaaaatccacaaattcactcaataaatctacacataacccttaaca

SEQ ID NO: 44270 - DNA, 50 bp, synthetic construct
  source 1..50: mol_type = other DNA
gaaacaaaatccgcaaattcactcgataaatctacgcgtaacccttaacg

SEQ ID NO: 44271 - DNA, 50 bp, synthetic construct
  source 1..50: mol_type = other DNA
cctccctacctctcttaaaaaaaacctaacccattaaaaaacccaaaaca

SEQ ID NO: 44272 - DNA, 50 bp, synthetic construct
  source 1..50: mol_type = other DNA
cctccctacctctcttaaaaaaaacctaacccattaaaaaacccgaaacg

SEQ ID NO: 44273 - DNA, 50 bp, synthetic construct
  source 1..50: mol_type = other DNA
tccaaacaaaaatcacaaaatacttcaacaaaaaaatctaaaccaaaaca

SEQ ID NO: 44274 - DNA, 50 bp, synthetic construct
  source 1..50: mol_type = other DNA
tccaaacaaaaatcgcgaaatacttcgacgaaaaaatctaaaccaaaacg

SEQ ID NO: 44275 - DNA, 50 bp, synthetic construct
  source 1..50: mol_type = other DNA
aatcacaaaatacttcaacaaaaaaatctaaaccaaaacaccaaaatcca

SEQ ID NO: 44276 - DNA, 50 bp, synthetic construct
  source 1..50: mol_type = other DNA
aatcgcgaaatacttcgacgaaaaaatctaaaccaaaacgccaaaatccg

SEQ ID NO: 44277 - DNA, 50 bp, synthetic construct
  source 1..50: mol_type = other DNA
atacttcaacaaaaaaatctaaaccaaaacaccaaaatccaccactatca

SEQ ID NO: 44278 - DNA, 50 bp, synthetic construct
  source 1..50: mol_type = other DNA
atacttcgacgaaaaaatctaaaccaaaacgccaaaatccgccgctatcg

SEQ ID NO: 44279 - DNA, 50 bp, synthetic construct
  source 1..50: mol_type = other DNA
caaaaacctcactttaataacaaccaactcactcatcaacttatctttca

SEQ ID NO: 44280 - DNA, 50 bp, synthetic construct
  source 1..50: mol_type = other DNA
cgaaaacctcactttaataacgaccaactcactcatcaacttatctttcg

SEQ ID NO: 44281 - DNA, 50 bp, synthetic construct
  source 1..50: mol_type = other DNA
cttaactctaaaaccaactaaaaaaaacaaaaccctcactatcaacacca

SEQ ID NO: 44282 - DNA, 50 bp, synthetic construct
  source 1..50: mol_type = other DNA
cttaactctaaaaccaactaaaaaaaacgaaaccctcgctatcgacgccg

SEQ ID NO: 44283 - DNA, 50 bp, synthetic construct
  source 1..50: mol_type = other DNA
tcacactaaaataactaaaactaaacacacaaataaaacttcaaaaaaca

SEQ ID NO: 44284 - DNA, 50 bp, synthetic construct
  source 1..50: mol_type = other DNA
tcacgctaaaataactaaaactaaacgcacaaataaaacttcaaaaaacg

SEQ ID NO: 44285 - DNA, 50 bp, synthetic construct
  source 1..50: mol_type = other DNA
aaaaaccctatctctactaaaaatccaaaaaattaaccaacataataaca

SEQ ID NO: 44286 - DNA, 50 bp, synthetic construct
  source 1..50: mol_type = other DNA
aaaaaccctatctctactaaaaatccaaaaaattaaccgacgtaataacg

SEQ ID NO: 44287 - DNA, 50 bp, synthetic construct
  source 1..50: mol_type = other DNA
caatataaaaaaaccctatctctactaaaaatccaaaaaattaaccaaca

SEQ ID NO: 44288 - DNA, 50 bp, synthetic construct
  source 1..50: mol_type = other DNA
caatataaaaaaaccctatctctactaaaaatccaaaaaattaaccgacg

SEQ ID NO: 44289 - DNA, 50 bp, synthetic construct
  source 1..50: mol_type = other DNA
ccttaaaataaatctaaaacccaaaaattcaaaaaaacccacaccatcca

SEQ ID NO: 44290 - DNA, 50 bp, synthetic construct
  source 1..50: mol_type = other DNA
ccttaaaataaatctaaaacccgaaaattcgaaaaaacccgcgccgtccg

SEQ ID NO: 44291 - DNA, 50 bp, synthetic construct
  source 1..50: mol_type = other DNA
aaaaaccaaataaaaacacctaaaactctccccaatctaaaatctaaaca

SEQ ID NO: 44292 - DNA, 50 bp, synthetic construct
  source 1..50: mol_type = other DNA
aaaaaccgaataaaaacgcctaaaactctccccgatctaaaatctaaacg

SEQ ID NO: 44293 - DNA, 50 bp, synthetic construct
  source 1..50: mol_type = other DNA
aatataatacaaaaaaaattataaaataaacaaactcctccacactccca

SEQ ID NO: 44294 - DNA, 50 bp, synthetic construct
  source 1..50: mol_type = other DNA
aatataatacaaaaaaaattataaaataaacgaactcctccacgctcccg

SEQ ID NO: 44295 - DNA, 50 bp, synthetic construct
  source 1..50: mol_type = other DNA
cttataacctaattcctctacacttcaaaaatcaccctaatcccaaaaca

SEQ ID NO: 44296 - DNA, 50 bp, synthetic construct
  source 1..50: mol_type = other DNA
cttataacctaattcctctacgcttcaaaaatcgccctaatcccaaaacg

SEQ ID NO: 44297 - DNA, 50 bp, synthetic construct
  source 1..50: mol_type = other DNA
atctcctatccaaaaaacaaaaacaaaaccacaaaccaaataaaaataca

SEQ ID NO: 44298 - DNA, 50 bp, synthetic construct
  source 1..50: mol_type = other DNA
atctcctatccaaaaaacaaaaacaaaaccgcaaaccaaataaaaatacg

SEQ ID NO: 44299 - DNA, 50 bp, synthetic construct
  source 1..50: mol_type = other DNA
ataaaaactacaataaaccaaaaccacaccatttcactccaatctaaaca

SEQ ID NO: 44300 - DNA, 50 bp, synthetic construct
  source 1..50: mol_type = other DNA
ataaaaactacaataaaccgaaaccacgccatttcactccaatctaaacg

SEQ ID NO: 44301 - DNA, 50 bp, synthetic construct
  source 1..50: mol_type = other DNA
atgaaaaagaatatttaaaaggatgatttgggttaggtttagtggtttat

SEQ ID NO: 44302 - DNA, 50 bp, synthetic construct
  source 1..50: mol_type = other DNA
atgaaaaagaatatttaaaaggatgatttgggttaggtttagtggtttac

SEQ ID NO: 44303 - DNA, 50 bp, synthetic construct
  source 1..50: mol_type = other DNA
acacatacaaaaaacaataacaaatcaaactatcccacaatatatatcca

SEQ ID NO: 44304 - DNA, 50 bp, synthetic construct
  source 1..50: mol_type = other DNA
acacgtacaaaaaacaataacgaatcaaactatcccgcgatatatatccg

SEQ ID NO: 44305 - DNA, 50 bp, synthetic construct
  source 1..50: mol_type = other DNA
tccctcttatctaccccacatatatttctttaccaaaaaccaccataaca

SEQ ID NO: 44306 - DNA, 50 bp, synthetic construct
  source 1..50: mol_type = other DNA
tccctcttatctaccccacatatatttctttaccaaaaaccaccgtaacg

SEQ ID NO: 44307 - DNA, 50 bp, synthetic construct
  source 1..50: mol_type = other DNA
aaacacaaaacaaacaataaacaataattatctcataaacataattaaca

SEQ ID NO: 44308 - DNA, 50 bp, synthetic construct
  source 1..50: mol_type = other DNA
aaacacgaaacaaacaataaacaataattatctcataaacgtaattaacg

SEQ ID NO: 44309 - DNA, 50 bp, synthetic construct
  source 1..50: mol_type = other DNA
tacaaaaaaccaaaaacataccacttcactccaacctaaataaaaaaaca

SEQ ID NO: 44310 - DNA, 50 bp, synthetic construct
  source 1..50: mol_type = other DNA
tacaaaaaaccaaaaacgtaccacttcactccaacctaaataaaaaaacg

SEQ ID NO: 44311 - DNA, 50 bp, synthetic construct
  source 1..50: mol_type = other DNA
atatccaactccaacaactcaacactaaccaactataaaacttactccca

SEQ ID NO: 44312 - DNA, 50 bp, synthetic construct
  source 1..50: mol_type = other DNA
atatccaactccaacaactcaacactaaccgactataaaacttactcccg

SEQ ID NO: 44313 - DNA, 50 bp, synthetic construct
  source 1..50: mol_type = other DNA
aaccaacaaccttctcaaaaactaaatccacaaaactacaacccaaatca

SEQ ID NO: 44314 - DNA, 50 bp, synthetic construct
  source 1..50: mol_type = other DNA
aaccaacaaccttctcaaaaactaaatccacgaaactacgacccaaatcg

SEQ ID NO: 44315 - DNA, 50 bp, synthetic construct
  source 1..50: mol_type = other DNA
aaactaaaacacaacccatcttaaaaccctacaaaaaaaaaccaataaca

SEQ ID NO: 44316 - DNA, 50 bp, synthetic construct
  source 1..50: mol_type = other DNA
aaactaaaacgcaacccatcttaaaaccctacgaaaaaaaaccgataacg

SEQ ID NO: 44317 - DNA, 50 bp, synthetic construct
  source 1..50: mol_type = other DNA
cacacatccaaaaaaatcccaaataaaatatctaaaaaaactaaacatca

SEQ ID NO: 44318 - DNA, 50 bp, synthetic construct
  source 1..50: mol_type = other DNA
cgcacatccgaaaaaatcccaaataaaatatctaaaaaaactaaacatcg

SEQ ID NO: 44319 - DNA, 50 bp, synthetic construct
  source 1..50: mol_type = other DNA
ctcccaaatatacataaaaaaaatcactccttcaaaaaacaataaaaaca

SEQ ID NO: 44320 - DNA, 50 bp, synthetic construct
  source 1..50: mol_type = other DNA
ctcccgaatatacgtaaaaaaaatcactccttcaaaaaacaataaaaacg

SEQ ID NO: 44321 - DNA, 50 bp, synthetic construct
  source 1..50: mol_type = other DNA
acaaaaacccaaaaccctaaaaaaaacaaaactaacaaataacatcaaca

SEQ ID NO: 44322 - DNA, 50 bp, synthetic construct
  source 1..50: mol_type = other DNA
gcaaaaacccgaaaccctaaaaaaaacgaaactaacaaataacgtcaacg

SEQ ID NO: 44323 - DNA, 50 bp, synthetic construct
  source 1..50: mol_type = other DNA
acaactactacttaaacaccttcaacatcacaataacaaaactaaaaaca

SEQ ID NO: 44324 - DNA, 50 bp, synthetic construct
  source 1..50: mol_type = other DNA
acaactactacttaaacgccttcgacatcgcgataacaaaactaaaaacg

SEQ ID NO: 44325 - DNA, 50 bp, synthetic construct
  source 1..50: mol_type = other DNA
aaaaaattattatattcattccttaaatctcacaacatcaaaaaatcaca

SEQ ID NO: 44326 - DNA, 50 bp, synthetic construct
  source 1..50: mol_type = other DNA
aaaaaattattatattcattccttaaatctcgcgacgtcgaaaaatcacg

SEQ ID NO: 44327 - DNA, 50 bp, synthetic construct
  source 1..50: mol_type = other DNA
catcacaataacaattacaactactataacaacacccaatactatttcca

SEQ ID NO: 44328 - DNA, 50 bp, synthetic construct
  source 1..50: mol_type = other DNA
catcgcgataacaattacaactactataacgacgcccgatactatttccg

SEQ ID NO: 44329 - DNA, 50 bp, synthetic construct
  source 1..50: mol_type = other DNA
catttctccccatctctccctcaataccatatactctttcttttatctca

SEQ ID NO: 44330 - DNA, 50 bp, synthetic construct
  source 1..50: mol_type = other DNA
catttctccccatctctccctcgataccatatactctttcttttatctcg

SEQ ID NO: 44331 - DNA, 50 bp, synthetic construct
  source 1..50: mol_type = other DNA
ataaaaataaaatttcaccatattaccaaaactaatttcaaactcctaca

SEQ ID NO: 44332 - DNA, 50 bp, synthetic construct
  source 1..50: mol_type = other DNA
ataaaaataaaatttcgccatattaccaaaactaatttcaaactcctacg

SEQ ID NO: 44333 - DNA, 50 bp, synthetic construct
  source 1..50: mol_type = other DNA
aattaaccaataaattcacacctcacatataatatctcacaacaaaaaca

SEQ ID NO: 44334 - DNA, 50 bp, synthetic construct
  source 1..50: mol_type = other DNA
aattaaccaataaattcacgcctcgcgtataatatctcgcgacaaaaacg

SEQ ID NO: 44335 - DNA, 50 bp, synthetic construct
  source 1..50: mol_type = other DNA
tatcatttaaattaaccaataaattcacacctcacatataatatctcaca

SEQ ID NO: 44336 - DNA, 50 bp, synthetic construct
  source 1..50: mol_type = other DNA
tatcatttaaattaaccaataaattcacgcctcgcgtataatatctcgcg

SEQ ID NO: 44337 - DNA, 50 bp, synthetic construct
  source 1..50: mol_type = other DNA
aaaatcataataactaaccaaaaaaaaccacaattttaaaatctaattca

SEQ ID NO: 44338 - DNA, 50 bp, synthetic construct
  source 1..50: mol_type = other DNA
aaaatcgtaataactaaccaaaaaaaaccgcaattttaaaatctaattcg

SEQ ID NO: 44339 - DNA, 50 bp, synthetic construct
  source 1..50: mol_type = other DNA
aacaaaaccaaaaacaaacccacaatacaaaaaacaaccccacatttaca

SEQ ID NO: 44340 - DNA, 50 bp, synthetic construct
  source 1..50: mol_type = other DNA
aacaaaaccaaaaacaaacccgcaatacgaaaaacgaccccacgtttacg

SEQ ID NO: 44341 - DNA, 50 bp, synthetic construct
  source 1..50: mol_type = other DNA
aaaatatcccacacttacacactacaaactcaaaaaaaacaactaaaaca

SEQ ID NO: 44342 - DNA, 50 bp, synthetic construct
  source 1..50: mol_type = other DNA
aaaatatcccgcgcttacgcactacaaactcgaaaaaaacgactaaaacg

SEQ ID NO: 44343 - DNA, 50 bp, synthetic construct
  source 1..50: mol_type = other DNA
caatcctcccaaatttaaaaacaatcaaacaaaatcaaaaccaaacaaca

SEQ ID NO: 44344 - DNA, 50 bp, synthetic construct
  source 1..50: mol_type = other DNA
cgatcctcccaaatttaaaaacgatcaaacgaaatcaaaaccaaacaacg

SEQ ID NO: 44345 - DNA, 50 bp, synthetic construct
  source 1..50: mol_type = other DNA
ataatttaaaaaacaaaaaccaaaaaattcataaccctactacaacacca

SEQ ID NO: 44346 - DNA, 50 bp, synthetic construct
  source 1..50: mol_type = other DNA
ataatttaaaaaacaaaaaccgaaaaattcgtaaccctactacgacgccg

SEQ ID NO: 44347 - DNA, 50 bp, synthetic construct
  source 1..50: mol_type = other DNA
aaactacaaaaaaaaatcacccaaaattaaacctcacccaaatccctcca

SEQ ID NO: 44348 - DNA, 50 bp, synthetic construct
  source 1..50: mol_type = other DNA
aaactacaaaaaaaaatcacccaaaattaaacctcacccgaatccctccg

SEQ ID NO: 44349 - DNA, 50 bp, synthetic construct
  source 1..50: mol_type = other DNA
tcaataaaccaacccaaaacttcaccctaaaactctaaaacaaaatatca

SEQ ID NO: 44350 - DNA, 50 bp, synthetic construct
  source 1..50: mol_type = other DNA
tcaataaaccgacccgaaacttcgccctaaaactctaaaacaaaatatcg

SEQ ID NO: 44351 - DNA, 50 bp, synthetic construct
  source 1..50: mol_type = other DNA
actaacttacaaaactaaaactccaaccaaaaactccaaacctctaacca

SEQ ID NO: 44352 - DNA, 50 bp, synthetic construct
  source 1..50: mol_type = other DNA
actaacttacgaaactaaaactccaaccgaaaactccaaacctctaaccg

SEQ ID NO: 44353 - DNA, 50 bp, synthetic construct
  source 1..50: mol_type = other DNA
taattccacaaaatttaaactcactcaaccaccataatacttaaaaacca

SEQ ID NO: 44354 - DNA, 50 bp, synthetic construct
  source 1..50: mol_type = other DNA
taattccgcgaaatttaaactcgctcgaccaccgtaatacttaaaaaccg

SEQ ID NO: 44355 - DNA, 50 bp, synthetic construct
  source 1..50: mol_type = other DNA
tttttttatatcctcaatatcaataaaaaaccacaaaaactaaaaataca

SEQ ID NO: 44356 - DNA, 50 bp, synthetic construct
  source 1..50: mol_type = other DNA
tttttttatatcctcaatatcaataaaaaaccacaaaaactaaaaatacg

SEQ ID NO: 44357 - DNA, 50 bp, synthetic construct
  source 1..50: mol_type = other DNA
aaacacctatcccaaataccaacctaaaaacaaaaactcctaaaacacca

SEQ ID NO: 44358 - DNA, 50 bp, synthetic construct
  source 1..50: mol_type = other DNA
aaacgcctatcccaaataccaacctaaaaacgaaaactcctaaaacgccg

SEQ ID NO: 44359 - DNA, 50 bp, synthetic construct
  source 1..50: mol_type = other DNA
caaacaatactaaaaacaaaaccaaaacctttaaaacccacactaaaaca

SEQ ID NO: 44360 - DNA, 50 bp, synthetic construct
  source 1..50: mol_type = other DNA
cgaacgatactaaaaacgaaaccgaaacctttaaaacccgcgctaaaacg

SEQ ID NO: 44361 - DNA, 50 bp, synthetic construct
  source 1..50: mol_type = other DNA
ttcccttctataacaaaaaaacaacaaaccaaaacacacatcccaaaaca

SEQ ID NO: 44362 - DNA, 50 bp, synthetic construct
  source 1..50: mol_type = other DNA
ttcccttctataacgaaaaaacaacaaaccgaaacacgcatcccaaaacg

SEQ ID NO: 44363 - DNA, 50 bp, synthetic construct
  source 1..50: mol_type = other DNA
aaaaaaaacataccttaaatacaactaaacaaaaataacttaaaaattca

SEQ ID NO: 44364 - DNA, 50 bp, synthetic construct
  source 1..50: mol_type = other DNA
gaaaaaaacgtaccttaaatacgactaaacgaaaataacttaaaaattcg

SEQ ID NO: 44365 - DNA, 50 bp, synthetic construct
  source 1..50: mol_type = other DNA
acaaaaacttaaaataaataaattctaaaaacctaacccacaactcccca

SEQ ID NO: 44366 - DNA, 50 bp, synthetic construct
  source 1..50: mol_type = other DNA
gcgaaaacttaaaataaataaattctaaaaacctaacccacgactccccg

SEQ ID NO: 44367 - DNA, 50 bp, synthetic construct
  source 1..50: mol_type = other DNA
taacacacacaaaaacttaaaataaataaattctaaaaacctaacccaca

SEQ ID NO: 44368 - DNA, 50 bp, synthetic construct
  source 1..50: mol_type = other DNA
taacgcgcgcgaaaacttaaaataaataaattctaaaaacctaacccacg

SEQ ID NO: 44369 - DNA, 50 bp, synthetic construct
  source 1..50: mol_type = other DNA
atcaacaaataaactctttttcaacacacacaatcactccacctaaatca

SEQ ID NO: 44370 - DNA, 50 bp, synthetic construct
  source 1..50: mol_type = other DNA
atcaacaaataaactctttttcgacacacgcaatcgctccacctaaatcg

SEQ ID NO: 44371 - DNA, 50 bp, synthetic construct
  source 1..50: mol_type = other DNA
actaaaaaattaaaatacaccccaaaaactaaaacaacaaaatacaaaca

SEQ ID NO: 44372 - DNA, 50 bp, synthetic construct
  source 1..50: mol_type = other DNA
actaaaaaattaaaatacgccccaaaaactaaaacaacgaaatacaaacg

SEQ ID NO: 44373 - DNA, 50 bp, synthetic construct
  source 1..50: mol_type = other DNA
atcacaaaatcaaaaaatctaaaccatcctaaccaacataataaaaccca

SEQ ID NO: 44374 - DNA, 50 bp, synthetic construct
  source 1..50: mol_type = other DNA
atcacgaaatcaaaaaatctaaaccatcctaaccaacataataaaacccg

SEQ ID NO: 44375 - DNA, 50 bp, synthetic construct
  source 1..50: mol_type = other DNA
taccatattcatcactaatcacctcccaaaactaccaaaaaaaaacaaca

SEQ ID NO: 44376 - DNA, 50 bp, synthetic construct
  source 1..50: mol_type = other DNA
taccatattcatcactaatcacctcccaaaactaccgaaaaaaaacaacg

SEQ ID NO: 44377 - DNA, 50 bp, synthetic construct
  source 1..50: mol_type = other DNA
cacaaatcccaactaattatacaaacaaaaacaaaaaccacatctataca

SEQ ID NO: 44378 - DNA, 50 bp, synthetic construct
  source 1..50: mol_type = other DNA
cacaaatcccaactaattatacaaacgaaaacaaaaaccgcgtctatacg

SEQ ID NO: 44379 - DNA, 50 bp, synthetic construct
  source 1..50: mol_type = other DNA
cacaaaccacatataactaactaactaactaactatctatcatccatcca

SEQ ID NO: 44380 - DNA, 50 bp, synthetic construct
  source 1..50: mol_type = other DNA
cacaaaccacgtataactaactaactaactaactatctatcgtccgtccg

SEQ ID NO: 44381 - DNA, 50 bp, synthetic construct
  source 1..50: mol_type = other DNA
aaaacataaaaatcacttaaatccaaaaaacacaataaaccaaaattaca

SEQ ID NO: 44382 - DNA, 50 bp, synthetic construct
  source 1..50: mol_type = other DNA
aaaacgtaaaaatcgcttaaatccaaaaaacacaataaaccgaaattacg

SEQ ID NO: 44383 - DNA, 50 bp, synthetic construct
  source 1..50: mol_type = other DNA
caaaacaaaacaaaaacacaccctccaaccaccataactaaaaaacttca

SEQ ID NO: 44384 - DNA, 50 bp, synthetic construct
  source 1..50: mol_type = other DNA
caaaacaaaacaaaaacacgccctccaaccaccataactaaaaaacttcg

SEQ ID NO: 44385 - DNA, 50 bp, synthetic construct
  source 1..50: mol_type = other DNA
aaaatctacaaacctctaaacacaaaaaacctttatcaaaaaaaacaaca

SEQ ID NO: 44386 - DNA, 50 bp, synthetic construct
  source 1..50: mol_type = other DNA
aaaatctacaaacctctaaacgcgaaaaacctttatcaaaaaaaacgacg

SEQ ID NO: 44387 - DNA, 50 bp, synthetic construct
  source 1..50: mol_type = other DNA
taactaaaacaacaaaaatataaccctccccaaactaaccaaacaaccca

SEQ ID NO: 44388 - DNA, 50 bp, synthetic construct
  source 1..50: mol_type = other DNA
taactaaaacgacaaaaatataaccctccccgaactaaccaaacaacccg

SEQ ID NO: 44389 - DNA, 50 bp, synthetic construct
  source 1..50: mol_type = other DNA
aatctttcattacccaatctacaattttcccaaataattaccccacaaca

SEQ ID NO: 44390 - DNA, 50 bp, synthetic construct
  source 1..50: mol_type = other DNA
aatctttcattacccaatctacgattttcccaaataattaccccgcgacg

SEQ ID NO: 44391 - DNA, 50 bp, synthetic construct
  source 1..50: mol_type = other DNA
aaaccaaaacacataaaaaccaaaacacaacccaactaaaactaaaccca

SEQ ID NO: 44392 - DNA, 50 bp, synthetic construct
  source 1..50: mol_type = other DNA
aaaccgaaacgcataaaaaccgaaacacaacccaactaaaactaaacccg

SEQ ID NO: 44393 - DNA, 50 bp, synthetic construct
  source 1..50: mol_type = other DNA
atacttaaaacaaaaccaaaacacacaaaaaccaaaacacataaaaacca

SEQ ID NO: 44394 - DNA, 50 bp, synthetic construct
  source 1..50: mol_type = other DNA
atacttaaaacgaaaccgaaacgcacaaaaaccgaaacgcataaaaaccg

SEQ ID NO: 44395 - DNA, 50 bp, synthetic construct
  source 1..50: mol_type = other DNA
aaaacactacaacaaaaacaccacccaatacttaaaacaaaaccaaaaca

SEQ ID NO: 44396 - DNA, 50 bp, synthetic construct
  source 1..50: mol_type = other DNA
aaaacactacaacgaaaacgccacccgatacttaaaacgaaaccgaaacg

SEQ ID NO: 44397 - DNA, 50 bp, synthetic construct
  source 1..50: mol_type = other DNA
ctccaaaatcaaattaaaaaactcaaaaacaacaaacacaaaaataaaca

SEQ ID NO: 44398 - DNA, 50 bp, synthetic construct
  source 1..50: mol_type = other DNA
ctccgaaatcaaattaaaaaactcgaaaacgacgaacacaaaaataaacg

SEQ ID NO: 44399 - DNA, 50 bp, synthetic construct
  source 1..50: mol_type = other DNA
aaacaccaaaaatacaacattaaaaacatcctctaaaaacaaaaacacca

SEQ ID NO: 44400 - DNA, 50 bp, synthetic construct
  source 1..50: mol_type = other DNA
aaacgccaaaaatacgacgttaaaaacgtcctctaaaaacaaaaacgccg

SEQ ID NO: 44401 - DNA, 50 bp, synthetic construct
  source 1..50: mol_type = other DNA
aaaaaaaaccttttaactaaattcaattcctcaactaacaactaacacca

SEQ ID NO: 44402 - DNA, 50 bp, synthetic construct
  source 1..50: mol_type = other DNA
aaaaaaaaccttttaactaaattcgattcctcgactaacaactaacgccg

SEQ ID NO: 44403 - DNA, 50 bp, synthetic construct
  source 1..50: mol_type = other DNA
aaatcaaaacctctaaaatcaaatcattccccaataactccaaaacaaca

SEQ ID NO: 44404 - DNA, 50 bp, synthetic construct
  source 1..50: mol_type = other DNA
aaatcgaaacctctaaaatcgaatcgttccccaataactccaaaacaacg

SEQ ID NO: 44405 - DNA, 50 bp, synthetic construct
  source 1..50: mol_type = other DNA
acaccaaaaacacaaccacaaaattctctaccctcaaataataaatatca

SEQ ID NO: 44406 - DNA, 50 bp, synthetic construct
  source 1..50: mol_type = other DNA
acaccgaaaacgcaaccgcaaaattctctaccctcgaataataaatatcg

SEQ ID NO: 44407 - DNA, 50 bp, synthetic construct
  source 1..50: mol_type = other DNA
acaaactccaaaaaaaaatcaaaaataaaaatctcaaaaccaaaacccca

SEQ ID NO: 44408 - DNA, 50 bp, synthetic construct
  source 1..50: mol_type = other DNA
acgaactccgaaaaaaaatcgaaaataaaaatctcaaaaccgaaaccccg

SEQ ID NO: 44409 - DNA, 50 bp, synthetic construct
  source 1..50: mol_type = other DNA
atcaaatctccacccactccctttatttaatcatcaaaatttccaaccca

SEQ ID NO: 44410 - DNA, 50 bp, synthetic construct
  source 1..50: mol_type = other DNA
atcaaatctccacccactccctttatttaatcgtcgaaatttccaacccg

SEQ ID NO: 44411 - DNA, 50 bp, synthetic construct
  source 1..50: mol_type = other DNA
tttgttgttttatttgggtattgttgtattgttgattataggtttagaat

SEQ ID NO: 44412 - DNA, 50 bp, synthetic construct
  source 1..50: mol_type = other DNA
tttgttgttttatttgggtattgttgtattgttgattataggtttagaac

SEQ ID NO: 44413 - DNA, 50 bp, synthetic construct
  source 1..50: mol_type = other DNA
actactaaccacaaacccaaaacaaaaaacaacaaaaataaacactaaca

SEQ ID NO: 44414 - DNA, 50 bp, synthetic construct
  source 1..50: mol_type = other DNA
actactaaccacaaacccaaaacgaaaaacgacaaaaataaacactaacg

SEQ ID NO: 44415 - DNA, 50 bp, synthetic construct
  source 1..50: mol_type = other DNA
ttattttaaaataaaatctcactctatcactaaaccaaaatacaataaca

SEQ ID NO: 44416 - DNA, 50 bp, synthetic construct
  source 1..50: mol_type = other DNA
ttattttaaaataaaatctcgctctatcgctaaaccgaaatacaataacg

SEQ ID NO: 44417 - DNA, 50 bp, synthetic construct
  source 1..50: mol_type = other DNA
taaaaccccatctctattaaaacacaaaaatttaaccaaacataataaca

SEQ ID NO: 44418 - DNA, 50 bp, synthetic construct
  source 1..50: mol_type = other DNA
taaaaccccgtctctattaaaacacaaaaatttaaccgaacgtaataacg

SEQ ID NO: 44419 - DNA, 50 bp, synthetic construct
  source 1..50: mol_type = other DNA
tcacaaaatcaaaaaattaaaaccaacctaaccaacaaaataaaacccca

SEQ ID NO: 44420 - DNA, 50 bp, synthetic construct
  source 1..50: mol_type = other DNA
tcacgaaatcaaaaaattaaaaccaacctaaccaacaaaataaaaccccg

SEQ ID NO: 44421 - DNA, 50 bp, synthetic construct
  source 1..50: mol_type = other DNA
accttaacctctcaaaatactataattacaaacataaaccactacaccca

SEQ ID NO: 44422 - DNA, 50 bp, synthetic construct
  source 1..50: mol_type = other DNA
accttaacctctcaaaatactataattacaaacgtaaaccactacacccg

SEQ ID NO: 44423 - DNA, 50 bp, synthetic construct
  source 1..50: mol_type = other DNA
aattctacatcaatattaccaaactaatctcaaactcctaaattcaaaca

SEQ ID NO: 44424 - DNA, 50 bp, synthetic construct
  source 1..50: mol_type = other DNA
aattctacatcaatattaccaaactaatctcgaactcctaaattcaaacg

SEQ ID NO: 44425 - DNA, 50 bp, synthetic construct
  source 1..50: mol_type = other DNA
aacttccacaaaaacaaaactcaccaaacttaacaatcaatccaaaatca

SEQ ID NO: 44426 - DNA, 50 bp, synthetic construct
  source 1..50: mol_type = other DNA
aacttccgcaaaaacaaaactcaccaaacttaacgatcgatccaaaatcg

SEQ ID NO: 44427 - DNA, 50 bp, synthetic construct
  source 1..50: mol_type = other DNA
cccaaaaaaatcaaaacctaaacatctaaacccccaaatcccttaaaaca

SEQ ID NO: 44428 - DNA, 50 bp, synthetic construct
  source 1..50: mol_type = other DNA
cccaaaaaaatcaaaacctaaacgtctaaacccccgaatcccttaaaacg

SEQ ID NO: 44429 - DNA, 50 bp, synthetic construct
  source 1..50: mol_type = other DNA
aacaacaaaacccacaaacaaaaacctaaaactcttaaaataaaaacaca

SEQ ID NO: 44430 - DNA, 50 bp, synthetic construct
  source 1..50: mol_type = other DNA
gacgacgaaacccgcgaacgaaaacctaaaactcttaaaataaaaacgcg

SEQ ID NO: 44431 - DNA, 50 bp, synthetic construct
  source 1..50: mol_type = other DNA
aaacacaaaacacaaaaccaaacaaaaaaacacaaaaaaacacaaaaaca

SEQ ID NO: 44432 - DNA, 50 bp, synthetic construct
  source 1..50: mol_type = other DNA
aaacacgaaacacaaaaccaaacaaaaaaacacgaaaaaacacaaaaacg

SEQ ID NO: 44433 - DNA, 50 bp, synthetic construct
  source 1..50: mol_type = other DNA
cccataaaattaaaataatacacactccaaaccaaacacaataactcaca

SEQ ID NO: 44434 - DNA, 50 bp, synthetic construct
  source 1..50: mol_type = other DNA
cccataaaattaaaataatacacactccaaaccgaacgcgataactcacg

SEQ ID NO: 44435 - DNA, 50 bp, synthetic construct
  source 1..50: mol_type = other DNA
ataaaaaataattatactcactcaactcaccaccaaatcaccaaaacaca

SEQ ID NO: 44436 - DNA, 50 bp, synthetic construct
  source 1..50: mol_type = other DNA
ataaaaaataattatactcactcgactcaccaccaaatcgccaaaacgcg

SEQ ID NO: 44437 - DNA, 50 bp, synthetic construct
  source 1..50: mol_type = other DNA
accaattacacacaccattaacaacataaacaaaattaattctaccttca

SEQ ID NO: 44438 - DNA, 50 bp, synthetic construct
  source 1..50: mol_type = other DNA
accgattacacgcgccgttaacaacgtaaacgaaattaattctaccttcg

SEQ ID NO: 44439 - DNA, 50 bp, synthetic construct
  source 1..50: mol_type = other DNA
aattctaccttcacaaaaccaactaatccaacttctaatatctcccctca

SEQ ID NO: 44440 - DNA, 50 bp, synthetic construct
  source 1..50: mol_type = other DNA
aattctaccttcgcgaaaccaactaatccaacttctaatatctcccctcg

SEQ ID NO: 44441 - DNA, 50 bp, synthetic construct
  source 1..50: mol_type = other DNA
aaaaactatatttctaccacttccaaaaacacttaacatcactataccca

SEQ ID NO: 44442 - DNA, 50 bp, synthetic construct
  source 1..50: mol_type = other DNA
aaaaactatatttctaccgcttccaaaaacgcttaacgtcgctatacccg

SEQ ID NO: 44443 - DNA, 50 bp, synthetic construct
  source 1..50: mol_type = other DNA
ttttaaaaacaacaaaaacataactcctaaaaacacaaaacttaaacaca

SEQ ID NO: 44444 - DNA, 50 bp, synthetic construct
  source 1..50: mol_type = other DNA
ttttaaaaacgacaaaaacataactcctaaaaacgcgaaacttaaacacg

SEQ ID NO: 44445 - DNA, 50 bp, synthetic construct
  source 1..50: mol_type = other DNA
aaaacataactcctaaaaacacaaaacttaaacacaaacctcaacaaaca

SEQ ID NO: 44446 - DNA, 50 bp, synthetic construct
  source 1..50: mol_type = other DNA
aaaacataactcctaaaaacgcgaaacttaaacacgaacctcgacgaacg

SEQ ID NO: 44447 - DNA, 50 bp, synthetic construct
  source 1..50: mol_type = other DNA
acacatcaaaacttttcttatttaataaaattataataactaacaataca

SEQ ID NO: 44448 - DNA, 50 bp, synthetic construct
  source 1..50: mol_type = other DNA
acgcgtcaaaacttttcttatttaataaaattataataactaacaatacg

SEQ ID NO: 44449 - DNA, 50 bp, synthetic construct
  source 1..50: mol_type = other DNA
caccaaactataaacactacaaaaaacccctatacaaataaaaatcacca

SEQ ID NO: 44450 - DNA, 50 bp, synthetic construct
  source 1..50: mol_type = other DNA
cgccgaactataaacactacaaaaaacccctatacaaataaaaatcgccg

SEQ ID NO: 44451 - DNA, 50 bp, synthetic construct
  source 1..50: mol_type = other DNA
aaaaccaaaacaaataatttacttaaactcaaaaattaaaaaccaactca

SEQ ID NO: 44452 - DNA, 50 bp, synthetic construct
  source 1..50: mol_type = other DNA
aaaaccgaaacgaataatttacttaaactcaaaaattaaaaaccaactcg

SEQ ID NO: 44453 - DNA, 50 bp, synthetic construct
  source 1..50: mol_type = other DNA
ccacaaaaaatcttacaaaaaacttccacattacccaattattaatcaca

SEQ ID NO: 44454 - DNA, 50 bp, synthetic construct
  source 1..50: mol_type = other DNA
ccacgaaaaatcttacgaaaaacttccacattacccgattattaatcacg

SEQ ID NO: 44455 - DNA, 50 bp, synthetic construct
  source 1..50: mol_type = other DNA
aaaactctcacaattaataaaaaacattcaaaaaaaatcaattaaaaaca

SEQ ID NO: 44456 - DNA, 50 bp, synthetic construct
  source 1..50: mol_type = other DNA
aaaactctcgcgattaataaaaaacgttcgaaaaaaatcgattaaaaacg

SEQ ID NO: 44457 - DNA, 50 bp, synthetic construct
  source 1..50: mol_type = other DNA
catacacctttccccctcctcccaacaaaataaaataaaactttaaaaca

SEQ ID NO: 44458 - DNA, 50 bp, synthetic construct
  source 1..50: mol_type = other DNA
cgtacacctttccccctcctcccaacaaaataaaataaaactttaaaacg

SEQ ID NO: 44459 - DNA, 50 bp, synthetic construct
  source 1..50: mol_type = other DNA
acaaaaatactccaacacatttaataaacccaaatttaaacaccactaca

SEQ ID NO: 44460 - DNA, 50 bp, synthetic construct
  source 1..50: mol_type = other DNA
gcgaaaatactccgacgcatttaataaacccaaatttaaacgccactacg

SEQ ID NO: 44461 - DNA, 50 bp, synthetic construct
  source 1..50: mol_type = other DNA
aaaaaaaacacataaactaaccaatcaaaaacaacacaaaaacaaactca

SEQ ID NO: 44462 - DNA, 50 bp, synthetic construct
  source 1..50: mol_type = other DNA
aaaaaaaacacataaactaaccaatcgaaaacgacacgaaaacgaactcg

SEQ ID NO: 44463 - DNA, 50 bp, synthetic construct
  source 1..50: mol_type = other DNA
aaaacacataaactaaccaatcaaaaacaacacaaaaacaaactcactca

SEQ ID NO: 44464 - DNA, 50 bp, synthetic construct
  source 1..50: mol_type = other DNA
aaaacacataaactaaccaatcgaaaacgacacgaaaacgaactcgctcg

SEQ ID NO: 44465 - DNA, 50 bp, synthetic construct
  source 1..50: mol_type = other DNA
atctatttaacaaccaaaaaaccaaaaccaaaaaaaacacaacctctaca

SEQ ID NO: 44466 - DNA, 50 bp, synthetic construct
  source 1..50: mol_type = other DNA
atctatttaacaaccaaaaaaccgaaaccaaaaaaaacgcgacctctacg

SEQ ID NO: 44467 - DNA, 50 bp, synthetic construct
  source 1..50: mol_type = other DNA
aaaaataaacaaaactacactaacctaaaacataacacataattccacca

SEQ ID NO: 44468 - DNA, 50 bp, synthetic construct
  source 1..50: mol_type = other DNA
aaaaataaacgaaactacgctaacctaaaacataacacgtaattccgccg

SEQ ID NO: 44469 - DNA, 50 bp, synthetic construct
  source 1..50: mol_type = other DNA
aaaaataacataaacactaaaaacaaaacttacaataaacaaaaatcaca

SEQ ID NO: 44470 - DNA, 50 bp, synthetic construct
  source 1..50: mol_type = other DNA
aaaaataacgtaaacgctaaaaacaaaacttacaataaacaaaaatcgcg

SEQ ID NO: 44471 - DNA, 50 bp, synthetic construct
  source 1..50: mol_type = other DNA
aaaaaatgtttgtaataagttagaaagttgagatatgttgaagaattgtt

SEQ ID NO: 44472 - DNA, 50 bp, synthetic construct
  source 1..50: mol_type = other DNA
aaaaaatgtttgtaataagttagaaagttgagatatgttgaagaattgtc

SEQ ID NO: 44473 - DNA, 50 bp, synthetic construct
  source 1..50: mol_type = other DNA
aatactaaaccaacaaaaaaaacccaaaacactacaattcacaaaataca

SEQ ID NO: 44474 - DNA, 50 bp, synthetic construct
  source 1..50: mol_type = other DNA
aatactaaaccaacgaaaaaaacccaaaacgctacgattcacaaaatacg

SEQ ID NO: 44475 - DNA, 50 bp, synthetic construct
  source 1..50: mol_type = other DNA
aaaaataacttaaacacaaaaaacaaaacttacaaaaaaccaaaatcaca

SEQ ID NO: 44476 - DNA, 50 bp, synthetic construct
  source 1..50: mol_type = other DNA
aaaaataacttaaacgcgaaaaacgaaacttacaaaaaaccgaaatcgcg

SEQ ID NO: 44477 - DNA, 50 bp, synthetic construct
  source 1..50: mol_type = other DNA
aaaaaaataacttaaacacaaaaaacaaaacttacaaaaaaccaaaatca

SEQ ID NO: 44478 - DNA, 50 bp, synthetic construct
  source 1..50: mol_type = other DNA
aaaaaaataacttaaacgcgaaaaacgaaacttacaaaaaaccgaaatcg

SEQ ID NO: 44479 - DNA, 50 bp, synthetic construct
  source 1..50: mol_type = other DNA
atccccttaaatcttaaatccaaaattaactccttcccttcctacaacca

SEQ ID NO: 44480 - DNA, 50 bp, synthetic construct
  source 1..50: mol_type = other DNA
atccccttaaatcttaaatccgaaattaactccttcccttcctacaaccg

SEQ ID NO: 44481 - DNA, 50 bp, synthetic construct
  source 1..50: mol_type = other DNA
acaactctttatcaaaactaaaaaaccaacaaacaacaacaacaactaca

SEQ ID NO: 44482 - DNA, 50 bp, synthetic construct
  source 1..50: mol_type = other DNA
acgactctttatcgaaactaaaaaaccgacaaacgacaacaacaactacg

SEQ ID NO: 44483 - DNA, 50 bp, synthetic construct
  source 1..50: mol_type = other DNA
ttcaaaacaatataatccttaccatcataaacaaactaatcatacccaca

SEQ ID NO: 44484 - DNA, 50 bp, synthetic construct
  source 1..50: mol_type = other DNA
ttcaaaacgatataatccttaccgtcgtaaacgaactaatcatacccgcg

SEQ ID NO: 44485 - DNA, 50 bp, synthetic construct
  source 1..50: mol_type = other DNA
aaaatctcacaccctccaaaaaatatctaactacaacctaaaacccaaca

SEQ ID NO: 44486 - DNA, 50 bp, synthetic construct
  source 1..50: mol_type = other DNA
aaaatctcacaccctccaaaaaatatctaactacgacctaaaacccgacg

SEQ ID NO: 44487 - DNA, 50 bp, synthetic construct
  source 1..50: mol_type = other DNA
ttcattttcaatttaaaccaaaatccccacaaattaatcaaaacaaaaca

SEQ ID NO: 44488 - DNA, 50 bp, synthetic construct
  source 1..50: mol_type = other DNA
ttcattttcgatttaaaccaaaatccccgcgaattaatcgaaacgaaacg

SEQ ID NO: 44489 - DNA, 50 bp, synthetic construct
  source 1..50: mol_type = other DNA
aaactcactcaatcaacctatacctaacacttatacttctatatctccca

SEQ ID NO: 44490 - DNA, 50 bp, synthetic construct
  source 1..50: mol_type = other DNA
aaactcactcgatcaacctatacctaacgcttatacttctatatctcccg

SEQ ID NO: 44491 - DNA, 50 bp, synthetic construct
  source 1..50: mol_type = other DNA
aattaacttctctaaaacccaacacccaataaaaataaaaattaaaaaca

SEQ ID NO: 44492 - DNA, 50 bp, synthetic construct
  source 1..50: mol_type = other DNA
aattaacttctctaaaacccgacacccaataaaaataaaaattaaaaacg

SEQ ID NO: 44493 - DNA, 50 bp, synthetic construct
  source 1..50: mol_type = other DNA
ttcacttctcccaacctacatcaaatccttcttcctaaatactcataaca

SEQ ID NO: 44494 - DNA, 50 bp, synthetic construct
  source 1..50: mol_type = other DNA
ttcacttctcccaacctacgtcgaatccttcttcctaaatactcataacg

SEQ ID NO: 44495 - DNA, 50 bp, synthetic construct
  source 1..50: mol_type = other DNA
aaatcccaaatcccaaacaaaactctcaaaatctcaaactccaaaaacca

SEQ ID NO: 44496 - DNA, 50 bp, synthetic construct
  source 1..50: mol_type = other DNA
aaatcccaaatcccgaacgaaactctcaaaatctcaaactccaaaaaccg

SEQ ID NO: 44497 - DNA, 50 bp, synthetic construct
  source 1..50: mol_type = other DNA
caaaataaccccaacacttccccacctaaaaaaaatcaactaaaacccca

SEQ ID NO: 44498 - DNA, 50 bp, synthetic construct
  source 1..50: mol_type = other DNA
caaaataaccccaacgcttccccacctaaaaaaaatcaactaaaaccccg

SEQ ID NO: 44499 - DNA, 50 bp, synthetic construct
  source 1..50: mol_type = other DNA
taaaatcaaaacaaaacacacctatacccaaaatctaaaatcactcacca

SEQ ID NO: 44500 - DNA, 50 bp, synthetic construct
  source 1..50: mol_type = other DNA
taaaatcgaaacgaaacacacctatacccgaaatctaaaatcactcaccg

SEQ ID NO: 44501 - DNA, 50 bp, synthetic construct
  source 1..50: mol_type = other DNA
ttcaaaacaatataatccttaccatcataaacatactaatcatacccaca

SEQ ID NO: 44502 - DNA, 50 bp, synthetic construct
  source 1..50: mol_type = other DNA
ttcaaaacgatataatccttaccgtcgtaaacgtactaatcatacccgcg

SEQ ID NO: 44503 - DNA, 50 bp, synthetic construct
  source 1..50: mol_type = other DNA
atataatccttaccatcataaacatactaatcatacccacaaaaaaaaca

SEQ ID NO: 44504 - DNA, 50 bp, synthetic construct
  source 1..50: mol_type = other DNA
atataatccttaccgtcgtaaacgtactaatcatacccgcgaaaaaaacg

SEQ ID NO: 44505 - DNA, 50 bp, synthetic construct
  source 1..50: mol_type = other DNA
ccaatttcattttcaattaaaaccaaaatccccacaaattaatcaaaaca

SEQ ID NO: 44506 - DNA, 50 bp, synthetic construct
  source 1..50: mol_type = other DNA
ccgatttcattttcaattaaaaccaaaatccccgcgaattaatcgaaacg

SEQ ID NO: 44507 - DNA, 50 bp, synthetic construct
  source 1..50: mol_type = other DNA
taacctcaactaaaaataaaaccaaataaacacacctaaaactctcacca

SEQ ID NO: 44508 - DNA, 50 bp, synthetic construct
  source 1..50: mol_type = other DNA
taacctcaactaaaaataaaaccgaataaacgcgcctaaaactctcgccg

SEQ ID NO: 44509 - DNA, 50 bp, synthetic construct
  source 1..50: mol_type = other DNA
actcatcctccaatttccaaataaaaaccttccaaccaatcttaaccaca

SEQ ID NO: 44510 - DNA, 50 bp, synthetic construct
  source 1..50: mol_type = other DNA
actcatcctccaatttccaaataaaaaccttccgaccaatcttaaccgcg

SEQ ID NO: 44511 - DNA, 50 bp, synthetic construct
  source 1..50: mol_type = other DNA
aaaaaaaataaatctcaaaactatacataatctacaaaaaaaacacatca

SEQ ID NO: 44512 - DNA, 50 bp, synthetic construct
  source 1..50: mol_type = other DNA
aaaaaaaataaatctcaaaactatacgtaatctacaaaaaaaacgcatcg

SEQ ID NO: 44513 - DNA, 50 bp, synthetic construct
  source 1..50: mol_type = other DNA
acctccaaaaaacaaaaacaacacaacaacaccacctaataatcaataca

SEQ ID NO: 44514 - DNA, 50 bp, synthetic construct
  source 1..50: mol_type = other DNA
acctccaaaaaacaaaaacaacgcaacaacgccacctaataatcgatacg

SEQ ID NO: 44515 - DNA, 50 bp, synthetic construct
  source 1..50: mol_type = other DNA
attaaataaacaatcaaaaaaccaaaccaaataactaaatttccacaaca

SEQ ID NO: 44516 - DNA, 50 bp, synthetic construct
  source 1..50: mol_type = other DNA
attaaataaacgatcgaaaaaccgaaccaaataactaaatttccgcgacg

SEQ ID NO: 44517 - DNA, 50 bp, synthetic construct
  source 1..50: mol_type = other DNA
aaataacaacaaacactatacaatcaaaacaaaactcctataccctatca

SEQ ID NO: 44518 - DNA, 50 bp, synthetic construct
  source 1..50: mol_type = other DNA
aaataacgacgaacgctatacgatcaaaacgaaactcctataccctatcg

SEQ ID NO: 44519 - DNA, 50 bp, synthetic construct
  source 1..50: mol_type = other DNA
aataaccacactaaaaaaacactcaaataccattcacaaaaacaacccca

SEQ ID NO: 44520 - DNA, 50 bp, synthetic construct
  source 1..50: mol_type = other DNA
aataaccgcgctaaaaaaacactcgaataccattcacaaaaacaaccccg

SEQ ID NO: 44521 - DNA, 50 bp, synthetic construct
  source 1..50: mol_type = other DNA
aaaaccaaatcccaaaacccaaaacttaactctctaaacttcaaacccca

SEQ ID NO: 44522 - DNA, 50 bp, synthetic construct
  source 1..50: mol_type = other DNA
aaaaccaaatcccaaaacccgaaacttaactctctaaacttcaaaccccg

SEQ ID NO: 44523 - DNA, 50 bp, synthetic construct
  source 1..50: mol_type = other DNA
aaatcccaaaacccaaaacttaactctctaaacttcaaaccccaaaaaca

SEQ ID NO: 44524 - DNA, 50 bp, synthetic construct
  source 1..50: mol_type = other DNA
aaatcccaaaacccgaaacttaactctctaaacttcaaaccccgaaaacg

SEQ ID NO: 44525 - DNA, 50 bp, synthetic construct
  source 1..50: mol_type = other DNA
aacttaaacctaaaaaacaaacattacaataaactaaaatcataccatca

SEQ ID NO: 44526 - DNA, 50 bp, synthetic construct
  source 1..50: mol_type = other DNA
aacttaaacctaaaaaacgaacattacgataaactaaaatcataccatcg

SEQ ID NO: 44527 - DNA, 50 bp, synthetic construct
  source 1..50: mol_type = other DNA
aaaacaaaaaaaaccactaaaataatacaaaaccaacacaacccaaaaca

SEQ ID NO: 44528 - DNA, 50 bp, synthetic construct
  source 1..50: mol_type = other DNA
aaaacgaaaaaaaccactaaaataatacaaaaccaacgcgacccaaaacg

SEQ ID NO: 44529 - DNA, 50 bp, synthetic construct
  source 1..50: mol_type = other DNA
aaaaaaaccacacattatctatcccaaaaaaaacaaaccaataaaaacca

SEQ ID NO: 44530 - DNA, 50 bp, synthetic construct
  source 1..50: mol_type = other DNA
aaaaaaaccacgcgttatctatcccgaaaaaaacaaaccaataaaaaccg

SEQ ID NO: 44531 - DNA, 50 bp, synthetic construct
  source 1..50: mol_type = other DNA
atcccaaaaaaaacaaaccaataaaaaccaacctaataaaaaaaccaaca

SEQ ID NO: 44532 - DNA, 50 bp, synthetic construct
  source 1..50: mol_type = other DNA
atcccgaaaaaaacaaaccaataaaaaccgacctaataaaaaaaccgacg

SEQ ID NO: 44533 - DNA, 50 bp, synthetic construct
  source 1..50: mol_type = other DNA
taaattccaaacctcaattttcactaaataaacaatcactaaacaaaaca

SEQ ID NO: 44534 - DNA, 50 bp, synthetic construct
  source 1..50: mol_type = other DNA
taaattccgaacctcaattttcactaaataaacgatcgctaaacgaaacg

SEQ ID NO: 44535 - DNA, 50 bp, synthetic construct
  source 1..50: mol_type = other DNA
attcctaataaccattaaacaactcacacaactccctaccaaatcaccca

SEQ ID NO: 44536 - DNA, 50 bp, synthetic construct
  source 1..50: mol_type = other DNA
attcctaataaccgttaaacaactcacacaactccctaccaaatcacccg

SEQ ID NO: 44537 - DNA, 50 bp, synthetic construct
  source 1..50: mol_type = other DNA
caacaaccaaaccatcacctataaaaaaaatatcaaaaacccatataaca

SEQ ID NO: 44538 - DNA, 50 bp, synthetic construct
  source 1..50: mol_type = other DNA
caacgaccaaaccatcgcctataaaaaaaatatcaaaaacccatataacg

SEQ ID NO: 44539 - DNA, 50 bp, synthetic construct
  source 1..50: mol_type = other DNA
taaataaactttaaccttcactacaatccatttccatctacacttctcca

SEQ ID NO: 44540 - DNA, 50 bp, synthetic construct
  source 1..50: mol_type = other DNA
taaataaactttaaccttcgctacaatccgtttccatctacgcttctccg

SEQ ID NO: 44541 - DNA, 50 bp, synthetic construct
  source 1..50: mol_type = other DNA
ccatacacactctccctatttaaataaactttaaccttcactacaatcca

SEQ ID NO: 44542 - DNA, 50 bp, synthetic construct
  source 1..50: mol_type = other DNA
ccatacgcgctctccctatttaaataaactttaaccttcgctacaatccg

SEQ ID NO: 44543 - DNA, 50 bp, synthetic construct
  source 1..50: mol_type = other DNA
ataaaaacaaattataacaaaaaccaaaacttacctaaacaaaaaaaaca

SEQ ID NO: 44544 - DNA, 50 bp, synthetic construct
  source 1..50: mol_type = other DNA
ataaaaacgaattataacgaaaaccaaaacttacctaaacaaaaaaaacg

SEQ ID NO: 44545 - DNA, 50 bp, synthetic construct
  source 1..50: mol_type = other DNA
aaaaacaaattataacaaaaaccaaaacttacctaaacaaaaaaaacaca

SEQ ID NO: 44546 - DNA, 50 bp, synthetic construct
  source 1..50: mol_type = other DNA
aaaaacgaattataacgaaaaccaaaacttacctaaacaaaaaaaacgcg

SEQ ID NO: 44547 - DNA, 50 bp, synthetic construct
  source 1..50: mol_type = other DNA
tacaaccaaaaataaaaacaaatttccctccttcatcactattactacca

SEQ ID NO: 44548 - DNA, 50 bp, synthetic construct
  source 1..50: mol_type = other DNA
tacaaccgaaaataaaaacaaatttccctccttcgtcgctattactaccg

SEQ ID NO: 44549 - DNA, 50 bp, synthetic construct
  source 1..50: mol_type = other DNA
aatttttaccacacaaatcttctctataaacacccctccataaatacaca

SEQ ID NO: 44550 - DNA, 50 bp, synthetic construct
  source 1..50: mol_type = other DNA
aatttttaccacgcaaatcttctctataaacacccctccataaatacgcg

SEQ ID NO: 44551 - DNA, 50 bp, synthetic construct
  source 1..50: mol_type = other DNA
ataaacacccctccataaatacacaaaaaacaaatataacaaaaactaca

SEQ ID NO: 44552 - DNA, 50 bp, synthetic construct
  source 1..50: mol_type = other DNA
ataaacacccctccataaatacgcgaaaaacgaatataacgaaaactacg

SEQ ID NO: 44553 - DNA, 50 bp, synthetic construct
  source 1..50: mol_type = other DNA
acaacaattacaataaaccaaaatcaaaacattacactcccacctaaaca

SEQ ID NO: 44554 - DNA, 50 bp, synthetic construct
  source 1..50: mol_type = other DNA
acaacgattacaataaaccgaaatcaaaacattacactcccgcctaaacg

SEQ ID NO: 44555 - DNA, 50 bp, synthetic construct
  source 1..50: mol_type = other DNA
cccaaaaaacaacaattacaataaaccaaaatcaaaacattacactccca

SEQ ID NO: 44556 - DNA, 50 bp, synthetic construct
  source 1..50: mol_type = other DNA
cccgaaaaacaacgattacaataaaccgaaatcaaaacattacactcccg

SEQ ID NO: 44557 - DNA, 50 bp, synthetic construct
  source 1..50: mol_type = other DNA
taaaaacaaaacttcacccatatataacctcaaataatccacccacttca

SEQ ID NO: 44558 - DNA, 50 bp, synthetic construct
  source 1..50: mol_type = other DNA
taaaaacgaaacttcacccatatataacctcaaataatccacccacttcg

SEQ ID NO: 44559 - DNA, 50 bp, synthetic construct
  source 1..50: mol_type = other DNA
acattctactcaaattaacaatattaataaaccaaacacaataactcaca

SEQ ID NO: 44560 - DNA, 50 bp, synthetic construct
  source 1..50: mol_type = other DNA
acattctactcgaattaacaatattaataaaccgaacgcgataactcacg

SEQ ID NO: 44561 - DNA, 50 bp, synthetic construct
  source 1..50: mol_type = other DNA
acactccaaactaaaaaaaataacacaaacaaaaacacaaataaaaaaca

SEQ ID NO: 44562 - DNA, 50 bp, synthetic construct
  source 1..50: mol_type = other DNA
acactccaaactaaaaaaaataacgcaaacaaaaacgcaaataaaaaacg

SEQ ID NO: 44563 - DNA, 50 bp, synthetic construct
  source 1..50: mol_type = other DNA
aaatcaaccccaaaccaaaacaacaaacacaaaacaaaaacatcataaca

SEQ ID NO: 44564 - DNA, 50 bp, synthetic construct
  source 1..50: mol_type = other DNA
aaatcaaccccgaaccgaaacaacaaacacaaaacaaaaacatcgtaacg

SEQ ID NO: 44565 - DNA, 50 bp, synthetic construct
  source 1..50: mol_type = other DNA
catacaataccatatccccataacaatcctaataaacaaaatcaacccca

SEQ ID NO: 44566 - DNA, 50 bp, synthetic construct
  source 1..50: mol_type = other DNA
catacaataccgtatccccataacgatcctaataaacaaaatcaaccccg

SEQ ID NO: 44567 - DNA, 50 bp, synthetic construct
  source 1..50: mol_type = other DNA
tcccctaccctaaatcaacaatcatttaaaaaaaacttactctaccacca

SEQ ID NO: 44568 - DNA, 50 bp, synthetic construct
  source 1..50: mol_type = other DNA
tcccctaccctaaatcaacaatcatttaaaaaaaacttactctaccgccg

SEQ ID NO: 44569 - DNA, 50 bp, synthetic construct
  source 1..50: mol_type = other DNA
aaacccaaccctaattaacttaaattctcaatcccctaaaacctcctaca

SEQ ID NO: 44570 - DNA, 50 bp, synthetic construct
  source 1..50: mol_type = other DNA
aaacccgaccctaattaacttaaattctcgatcccctaaaacctcctacg

SEQ ID NO: 44571 - DNA, 50 bp, synthetic construct
  source 1..50: mol_type = other DNA
aaatatccttaatacttatatatccccaactttccaaatccccaccccca

SEQ ID NO: 44572 - DNA, 50 bp, synthetic construct
  source 1..50: mol_type = other DNA
aaatatccttaatacttatatatccccaactttccaaatccccgcccccg

SEQ ID NO: 44573 - DNA, 50 bp, synthetic construct
  source 1..50: mol_type = other DNA
aactcaacaaaatcaaaataatcaaaccaattaatctcaacactaaatca

SEQ ID NO: 44574 - DNA, 50 bp, synthetic construct
  source 1..50: mol_type = other DNA
aactcgacaaaatcgaaataatcgaaccgattaatctcaacgctaaatcg

SEQ ID NO: 44575 - DNA, 50 bp, synthetic construct
  source 1..50: mol_type = other DNA
cctacccaaactcaacaaaatcaaaataatcaaaccaattaatctcaaca

SEQ ID NO: 44576 - DNA, 50 bp, synthetic construct
  source 1..50: mol_type = other DNA
cctacccaaactcgacaaaatcgaaataatcgaaccgattaatctcaacg

SEQ ID NO: 44577 - DNA, 50 bp, synthetic construct
  source 1..50: mol_type = other DNA
cttacaaaataataaaattacaaatacataccaccacatccaacaattca

SEQ ID NO: 44578 - DNA, 50 bp, synthetic construct
  source 1..50: mol_type = other DNA
cttacaaaataataaaattacaaatacataccaccacgtccgacaattcg

SEQ ID NO: 44579 - DNA, 50 bp, synthetic construct
  source 1..50: mol_type = other DNA
aaatatttaacccacacccatacacccaccctaaattaaaacatatatca

SEQ ID NO: 44580 - DNA, 50 bp, synthetic construct
  source 1..50: mol_type = other DNA
aaatatttaacccgcacccgtacacccaccctaaattaaaacgtatatcg

SEQ ID NO: 44581 - DNA, 50 bp, synthetic construct
  source 1..50: mol_type = other DNA
ccaaacaatctcctacatttttcccactaccataaaatcctaaacatcca

SEQ ID NO: 44582 - DNA, 50 bp, synthetic construct
  source 1..50: mol_type = other DNA
ccaaacaatctcctacatttttcccactaccataaaatcctaaacgtccg

SEQ ID NO: 44583 - DNA, 50 bp, synthetic construct
  source 1..50: mol_type = other DNA
tttttcccactaccataaaatcctaaacatccaaacccccaatattcaca

SEQ ID NO: 44584 - DNA, 50 bp, synthetic construct
  source 1..50: mol_type = other DNA
tttttcccactaccataaaatcctaaacgtccgaacccccaatattcacg

SEQ ID NO: 44585 - DNA, 50 bp, synthetic construct
  source 1..50: mol_type = other DNA
acaaaaaaatatacatcaacatcaatcaccccaatataataaacttcaca

SEQ ID NO: 44586 - DNA, 50 bp, synthetic construct
  source 1..50: mol_type = other DNA
acgaaaaaatatacgtcaacatcaatcaccccgatataataaacttcgcg

SEQ ID NO: 44587 - DNA, 50 bp, synthetic construct
  source 1..50: mol_type = other DNA
actaaacccaaccaaaaaacaaaaatacaaacctctctaatacacaaaca

SEQ ID NO: 44588 - DNA, 50 bp, synthetic construct
  source 1..50: mol_type = other DNA
actaaacccgaccaaaaaacaaaaatacgaacctctctaatacacgaacg

SEQ ID NO: 44589 - DNA, 50 bp, synthetic construct
  source 1..50: mol_type = other DNA
aactaaactaaaaaacaacaaaaaaacaaacatttctaacaaacaaaaca

SEQ ID NO: 44590 - DNA, 50 bp, synthetic construct
  source 1..50: mol_type = other DNA
aactaaactaaaaaacgacgaaaaaacaaacgtttctaacgaacgaaacg

SEQ ID NO: 44591 - DNA, 50 bp, synthetic construct
  source 1..50: mol_type = other DNA
aaaacattaaaacaccaaaaataaaaaacaacaacacacaacccataaca

SEQ ID NO: 44592 - DNA, 50 bp, synthetic construct
  source 1..50: mol_type = other DNA
aaaacgttaaaacgccaaaaataaaaaacaacgacacacgacccgtaacg

SEQ ID NO: 44593 - DNA, 50 bp, synthetic construct
  source 1..50: mol_type = other DNA
caaaaatacaatacaaatcaactaaacaattaaaacacaaaatttacaca

SEQ ID NO: 44594 - DNA, 50 bp, synthetic construct
  source 1..50: mol_type = other DNA
cgaaaatacgatacaaatcgactaaacgattaaaacgcaaaatttacacg

SEQ ID NO: 44595 - DNA, 50 bp, synthetic construct
  source 1..50: mol_type = other DNA
acaaaacaaacaccccaaaaatcaaaaaatcctaaaacaacacaaaaaca

SEQ ID NO: 44596 - DNA, 50 bp, synthetic construct
  source 1..50: mol_type = other DNA
acaaaacaaacgccccaaaaatcgaaaaatcctaaaacaacgcgaaaacg

SEQ ID NO: 44597 - DNA, 50 bp, synthetic construct
  source 1..50: mol_type = other DNA
ccatttcaaatctataataaattaaaaaaattcaataaacataacacaca

SEQ ID NO: 44598 - DNA, 50 bp, synthetic construct
  source 1..50: mol_type = other DNA
ccgtttcgaatctataataaattaaaaaaattcgataaacgtaacgcgcg

SEQ ID NO: 44599 - DNA, 50 bp, synthetic construct
  source 1..50: mol_type = other DNA
taccatttcaaatctataataaattaaaaaaattcaataaacataacaca

SEQ ID NO: 44600 - DNA, 50 bp, synthetic construct
  source 1..50: mol_type = other DNA
taccgtttcgaatctataataaattaaaaaaattcgataaacgtaacgcg

SEQ ID NO: 44601 - DNA, 50 bp, synthetic construct
  source 1..50: mol_type = other DNA
ccataaataccatttcaaatctataataaattaaaaaaattcaataaaca

SEQ ID NO: 44602 - DNA, 50 bp, synthetic construct
  source 1..50: mol_type = other DNA
ccgtaaataccgtttcgaatctataataaattaaaaaaattcgataaacg

SEQ ID NO: 44603 - DNA, 50 bp, synthetic construct
  source 1..50: mol_type = other DNA
taaaacaatacttaaatatccacacatccataatacaacacacacaaaca

SEQ ID NO: 44604 - DNA, 50 bp, synthetic construct
  source 1..50: mol_type = other DNA
taaaacgatacttaaatatccacgcatccgtaatacgacgcacgcaaacg

SEQ ID NO: 44605 - DNA, 50 bp, synthetic construct
  source 1..50: mol_type = other DNA
aaaaaataaaacaatacttaaatatccacacatccataatacaacacaca

SEQ ID NO: 44606 - DNA, 50 bp, synthetic construct
  source 1..50: mol_type = other DNA
aaaaaataaaacgatacttaaatatccacgcatccgtaatacgacgcacg

SEQ ID NO: 44607 - DNA, 50 bp, synthetic construct
  source 1..50: mol_type = other DNA
tttttcaaacatttacaataaccacctcaatcttctaacactcaaacaca

SEQ ID NO: 44608 - DNA, 50 bp, synthetic construct
  source 1..50: mol_type = other DNA
tttttcaaacatttacgataaccacctcaatcttctaacgctcaaacgcg

SEQ ID NO: 44609 - DNA, 50 bp, synthetic construct
  source 1..50: mol_type = other DNA
aacaacactaatcaattttattctcaattacttaattaaactaaatttca

SEQ ID NO: 44610 - DNA, 50 bp, synthetic construct
  source 1..50: mol_type = other DNA
aacgacactaatcaattttattctcgattacttaattaaactaaatttcg

SEQ ID NO: 44611 - DNA, 50 bp, synthetic construct
  source 1..50: mol_type = other DNA
tctaaataaaacaaatcaaacctcattaatttccaacaaccccaaaaaca

SEQ ID NO: 44612 - DNA, 50 bp, synthetic construct
  source 1..50: mol_type = other DNA
tctaaataaaacgaatcaaacctcattaatttccgacgaccccaaaaacg

SEQ ID NO: 44613 - DNA, 50 bp, synthetic construct
  source 1..50: mol_type = other DNA
ttttaaaactaaatctcactctatcaccaaaactaaaaaataataataca

SEQ ID NO: 44614 - DNA, 50 bp, synthetic construct
  source 1..50: mol_type = other DNA
ttttaaaactaaatctcactctatcaccgaaactaaaaaataataatacg

SEQ ID NO: 44615 - DNA, 50 bp, synthetic construct
  source 1..50: mol_type = other DNA
aaaaaaaaactaatatctatctatcctccactcctaccaaacaaaacaca

SEQ ID NO: 44616 - DNA, 50 bp, synthetic construct
  source 1..50: mol_type = other DNA
aaaaaaaaactaatatctatctatcctccgctcctaccaaacaaaacacg

SEQ ID NO: 44617 - DNA, 50 bp, synthetic construct
  source 1..50: mol_type = other DNA
ttacccacactccaaaaaaaatcaaacccatattctacctaataaaaaca

SEQ ID NO: 44618 - DNA, 50 bp, synthetic construct
  source 1..50: mol_type = other DNA
ttacccacgctccaaaaaaaatcgaacccgtattctacctaataaaaacg

SEQ ID NO: 44619 - DNA, 50 bp, synthetic construct
  source 1..50: mol_type = other DNA
ctcacctacacaactactccacattatttaaattaaaatactacctcaca

SEQ ID NO: 44620 - DNA, 50 bp, synthetic construct
  source 1..50: mol_type = other DNA
ctcacctacacaactactccgcgttatttaaattaaaatactacctcacg

SEQ ID NO: 44621 - DNA, 50 bp, synthetic construct
  source 1..50: mol_type = other DNA
aaaaataaaaaaactaaatcaccatcctaccttccaaaaacataaaaaca

SEQ ID NO: 44622 - DNA, 50 bp, synthetic construct
  source 1..50: mol_type = other DNA
gaaaataaaaaaactaaatcaccgtcctaccttccaaaaacgtaaaaacg

SEQ ID NO: 44623 - DNA, 50 bp, synthetic construct
  source 1..50: mol_type = other DNA
aaatactatcaaaataataactattaatattaatttctcatccttaaaca

SEQ ID NO: 44624 - DNA, 50 bp, synthetic construct
  source 1..50: mol_type = other DNA
aaatactatcaaaataataactattaatattaatttctcgtccttaaacg

SEQ ID NO: 44625 - DNA, 50 bp, synthetic construct
  source 1..50: mol_type = other DNA
cacaaaccaacaactttacccaacacccattacactaaatacaaaaaaca

SEQ ID NO: 44626 - DNA, 50 bp, synthetic construct
  source 1..50: mol_type = other DNA
cacaaaccaacaactttacccgacgcccattacactaaatacgaaaaacg

SEQ ID NO: 44627 - DNA, 50 bp, synthetic construct
  source 1..50: mol_type = other DNA
ctcaaaaaaaactccaaccaccaaataccaaaatccaaaaaacataaaca

SEQ ID NO: 44628 - DNA, 50 bp, synthetic construct
  source 1..50: mol_type = other DNA
ctcaaaaaaaactccaaccgccgaataccaaaatccaaaaaacgtaaacg

SEQ ID NO: 44629 - DNA, 50 bp, synthetic construct
  source 1..50: mol_type = other DNA
taaactctaatatccaacaactaaaactcctcttaaacacaaaaaactca

SEQ ID NO: 44630 - DNA, 50 bp, synthetic construct
  source 1..50: mol_type = other DNA
taaactctaatatccgacgactaaaactcctcttaaacgcgaaaaactcg

SEQ ID NO: 44631 - DNA, 50 bp, synthetic construct
  source 1..50: mol_type = other DNA
aaaaactcaaacacttttttctacaaaaaccaccacaaaaacaaaaacca

SEQ ID NO: 44632 - DNA, 50 bp, synthetic construct
  source 1..50: mol_type = other DNA
aaaaactcgaacacttttttctacaaaaaccgccacgaaaacgaaaaccg

SEQ ID NO: 44633 - DNA, 50 bp, synthetic construct
  source 1..50: mol_type = other DNA
caatcaccaaaaaactaaaatcataacaaacacattccaaatacaaaaca

SEQ ID NO: 44634 - DNA, 50 bp, synthetic construct
  source 1..50: mol_type = other DNA
caatcaccgaaaaactaaaatcgtaacgaacacgttccgaatacgaaacg

SEQ ID NO: 44635 - DNA, 50 bp, synthetic construct
  source 1..50: mol_type = other DNA
acctctccaaataaaccaatcaccaaaaaactaaaatcataacaaacaca

SEQ ID NO: 44636 - DNA, 50 bp, synthetic construct
  source 1..50: mol_type = other DNA
acctctccaaataaaccaatcaccgaaaaactaaaatcgtaacgaacacg

SEQ ID NO: 44637 - DNA, 50 bp, synthetic construct
  source 1..50: mol_type = other DNA
aactaccacctaaaaaatcattaccactaaaaccactacttaacaacaca

SEQ ID NO: 44638 - DNA, 50 bp, synthetic construct
  source 1..50: mol_type = other DNA
aactaccacctaaaaaatcattaccgctaaaaccgctacttaacgacacg

SEQ ID NO: 44639 - DNA, 50 bp, synthetic construct
  source 1..50: mol_type = other DNA
actaaacttccaatccctacaataacaaacaactaaaaattaaaaaaaca

SEQ ID NO: 44640 - DNA, 50 bp, synthetic construct
  source 1..50: mol_type = other DNA
actaaacttccaatccctacgataacgaacaactaaaaattaaaaaaacg

SEQ ID NO: 44641 - DNA, 50 bp, synthetic construct
  source 1..50: mol_type = other DNA
taaacctctcccaatccttcaaaactcaatctaatttatactaaatcaca

SEQ ID NO: 44642 - DNA, 50 bp, synthetic construct
  source 1..50: mol_type = other DNA
taaacctctcccaatccttcgaaactcgatctaatttatactaaatcgcg

SEQ ID NO: 44643 - DNA, 50 bp, synthetic construct
  source 1..50: mol_type = other DNA
acataaacaaaaaaccaaatcctaaaaccaaaaataataccaacacccca

SEQ ID NO: 44644 - DNA, 50 bp, synthetic construct
  source 1..50: mol_type = other DNA
acataaacgaaaaaccgaatcctaaaaccgaaaataataccaacgccccg

SEQ ID NO: 44645 - DNA, 50 bp, synthetic construct
  source 1..50: mol_type = other DNA
aaaaacaaaataacaaaaaacataattccaaaacactaacactactccca

SEQ ID NO: 44646 - DNA, 50 bp, synthetic construct
  source 1..50: mol_type = other DNA
aaaaacgaaataacaaaaaacgtaattccgaaacgctaacactactcccg

SEQ ID NO: 44647 - DNA, 50 bp, synthetic construct
  source 1..50: mol_type = other DNA
cttacataaaaaaccctaaaccatataaaaaccaaaatttaaaaatacca

SEQ ID NO: 44648 - DNA, 50 bp, synthetic construct
  source 1..50: mol_type = other DNA
cttacgtaaaaaaccctaaaccgtataaaaaccgaaatttaaaaataccg

SEQ ID NO: 44649 - DNA, 50 bp, synthetic construct
  source 1..50: mol_type = other DNA
acaaatccttatataaacaaactcatatactacaataaaacaaaaacaca

SEQ ID NO: 44650 - DNA, 50 bp, synthetic construct
  source 1..50: mol_type = other DNA
gcgaatccttatataaacgaactcatatactacgataaaacaaaaacgcg

SEQ ID NO: 44651 - DNA, 50 bp, synthetic construct
  source 1..50: mol_type = other DNA
ctaacaaaaaaaacacaatctaaatataataaacaaaacttaacaaaaca

SEQ ID NO: 44652 - DNA, 50 bp, synthetic construct
  source 1..50: mol_type = other DNA
ctaacaaaaaaaacgcaatctaaatataataaacgaaacttaacaaaacg

SEQ ID NO: 44653 - DNA, 50 bp, synthetic construct
  source 1..50: mol_type = other DNA
aaaccaaccaaatctaaataaacctaaacaacactcactaaacaatacca

SEQ ID NO: 44654 - DNA, 50 bp, synthetic construct
  source 1..50: mol_type = other DNA
aaaccgaccaaatctaaataaacctaaacaacgctcgctaaacgataccg

SEQ ID NO: 44655 - DNA, 50 bp, synthetic construct
  source 1..50: mol_type = other DNA
aattcaaaacaaaaccaatcaataaatcaacaactctctaatccaaccca

SEQ ID NO: 44656 - DNA, 50 bp, synthetic construct
  source 1..50: mol_type = other DNA
aattcaaaacgaaaccgatcgataaatcaacgactctctaatccaacccg

SEQ ID NO: 44657 - DNA, 50 bp, synthetic construct
  source 1..50: mol_type = other DNA
cccaaaaaacaaacacaataaaactaaaacaaaaatcctacttatttcca

SEQ ID NO: 44658 - DNA, 50 bp, synthetic construct
  source 1..50: mol_type = other DNA
cccaaaaaacaaacacgataaaactaaaacaaaaatcctacttatttccg

SEQ ID NO: 44659 - DNA, 50 bp, synthetic construct
  source 1..50: mol_type = other DNA
cctcctaaccactattaattaaaaaaacccaaatccaacctaaaaatcca

SEQ ID NO: 44660 - DNA, 50 bp, synthetic construct
  source 1..50: mol_type = other DNA
cctcctaaccgctattaattaaaaaaacccgaatccaacctaaaaatccg

SEQ ID NO: 44661 - DNA, 50 bp, synthetic construct
  source 1..50: mol_type = other DNA
aattcataactacaaatccatctcccttaacctctccaccttcataatca

SEQ ID NO: 44662 - DNA, 50 bp, synthetic construct
  source 1..50: mol_type = other DNA
aattcataactacgaatccatctcccttaacctctccaccttcataatcg

SEQ ID NO: 44663 - DNA, 50 bp, synthetic construct
  source 1..50: mol_type = other DNA
aaaaaaactaaaattaacaaaaatcctaaaatcaaaatcctaaaaaccca

SEQ ID NO: 44664 - DNA, 50 bp, synthetic construct
  source 1..50: mol_type = other DNA
aaaaaaactaaaattaacgaaaatcctaaaatcaaaatcctaaaaacccg

SEQ ID NO: 44665 - DNA, 50 bp, synthetic construct
  source 1..50: mol_type = other DNA
aaaatcaaaatcctaaaaacccaaaaaactaacaatacaaaaactaaaca

SEQ ID NO: 44666 - DNA, 50 bp, synthetic construct
  source 1..50: mol_type = other DNA
aaaatcaaaatcctaaaaacccgaaaaactaacgatacgaaaactaaacg

SEQ ID NO: 44667 - DNA, 50 bp, synthetic construct
  source 1..50: mol_type = other DNA
aaaacccaaaaaactaacaatacaaaaactaaacaaaactttactaccca

SEQ ID NO: 44668 - DNA, 50 bp, synthetic construct
  source 1..50: mol_type = other DNA
aaaacccgaaaaactaacgatacgaaaactaaacgaaactttactacccg

SEQ ID NO: 44669 - DNA, 50 bp, synthetic construct
  source 1..50: mol_type = other DNA
aaaccaaatacccttaaaacccataaaacctccaaaacaaaatctcctca

SEQ ID NO: 44670 - DNA, 50 bp, synthetic construct
  source 1..50: mol_type = other DNA
aaaccaaatacccttaaaacccgtaaaacctccgaaacgaaatctcctcg

SEQ ID NO: 44671 - DNA, 50 bp, synthetic construct
  source 1..50: mol_type = other DNA
aatttttccacttcattcaaaccttctcataactatatccaccctctaca

SEQ ID NO: 44672 - DNA, 50 bp, synthetic construct
  source 1..50: mol_type = other DNA
aatttttccacttcgttcgaaccttctcataactatatccaccctctacg

SEQ ID NO: 44673 - DNA, 50 bp, synthetic construct
  source 1..50: mol_type = other DNA
atcccacaatcttcccctatctctctttctccttaaatttttccacttca

SEQ ID NO: 44674 - DNA, 50 bp, synthetic construct
  source 1..50: mol_type = other DNA
atcccgcaatcttcccctatctctctttctccttaaatttttccacttcg

SEQ ID NO: 44675 - DNA, 50 bp, synthetic construct
  source 1..50: mol_type = other DNA
aaaaaaattaactaaacataataacaaacaccaataattccaactactca

SEQ ID NO: 44676 - DNA, 50 bp, synthetic construct
  source 1..50: mol_type = other DNA
aaaaaaattaactaaacgtaataacgaacgccaataattccaactactcg

SEQ ID NO: 44677 - DNA, 50 bp, synthetic construct
  source 1..50: mol_type = other DNA
cccacctactcactaaaactacataatctaaacatttccaaactaaaaca

SEQ ID NO: 44678 - DNA, 50 bp, synthetic construct
  source 1..50: mol_type = other DNA
cccacctactcgctaaaactacgtaatctaaacgtttccaaactaaaacg

SEQ ID NO: 44679 - DNA, 50 bp, synthetic construct
  source 1..50: mol_type = other DNA
aaacctacacaattataaacaaaaaactaatacaaaaaacaaattacaca

SEQ ID NO: 44680 - DNA, 50 bp, synthetic construct
  source 1..50: mol_type = other DNA
aaacctacgcaattataaacaaaaaactaatacgaaaaacgaattacgcg

SEQ ID NO: 44681 - DNA, 50 bp, synthetic construct
  source 1..50: mol_type = other DNA
atcaccaaactcaataaaactaccaaatcaaaaatattccaaaattttca

SEQ ID NO: 44682 - DNA, 50 bp, synthetic construct
  source 1..50: mol_type = other DNA
atcaccgaactcgataaaactaccaaatcgaaaatattccaaaattttcg

SEQ ID NO: 44683 - DNA, 50 bp, synthetic construct
  source 1..50: mol_type = other DNA
ccaaccaacataaaaaaaccccatctctaataaaaatacaaaattaacca

SEQ ID NO: 44684 - DNA, 50 bp, synthetic construct
  source 1..50: mol_type = other DNA
ccgaccaacataaaaaaaccccatctctaataaaaatacaaaattaaccg

SEQ ID NO: 44685 - DNA, 50 bp, synthetic construct
  source 1..50: mol_type = other DNA
caaacctccaaaaaaacctccaaaaaaaccaatcaaaaaaacaaacttca

SEQ ID NO: 44686 - DNA, 50 bp, synthetic construct
  source 1..50: mol_type = other DNA
cgaacctccaaaaaaacctccaaaaaaaccaatcgaaaaaacaaacttcg

SEQ ID NO: 44687 - DNA, 50 bp, synthetic construct
  source 1..50: mol_type = other DNA
cttacccttccaattaaccctcttaaaaaccctcttaaaaacccaaaaca

SEQ ID NO: 44688 - DNA, 50 bp, synthetic construct
  source 1..50: mol_type = other DNA
cttacccttccgattaaccctcttaaaaaccctcttaaaaacccgaaacg

SEQ ID NO: 44689 - DNA, 50 bp, synthetic construct
  source 1..50: mol_type = other DNA
aaactttttaattaaccacaacaccaaaacacatcacaaaaacaaaacca

SEQ ID NO: 44690 - DNA, 50 bp, synthetic construct
  source 1..50: mol_type = other DNA
aaactttttaattaaccgcgacaccaaaacacgtcacaaaaacgaaaccg

SEQ ID NO: 44691 - DNA, 50 bp, synthetic construct
  source 1..50: mol_type = other DNA
cctcataaaaattccttccccttcaaaccaaaaaaccaaaaaaacctcca

SEQ ID NO: 44692 - DNA, 50 bp, synthetic construct
  source 1..50: mol_type = other DNA
cctcataaaaattccttccccttcaaaccaaaaaaccaaaaaaacctccg

SEQ ID NO: 44693 - DNA, 50 bp, synthetic construct
  source 1..50: mol_type = other DNA
gttgtttgtttattttttttgtgggattagtttttgttgaattttagttt

SEQ ID NO: 44694 - DNA, 50 bp, synthetic construct
  source 1..50: mol_type = other DNA
gtcgtttgtttattttttttgcgggattagtttttgttgaattttagttc

SEQ ID NO: 44695 - DNA, 50 bp, synthetic construct
  source 1..50: mol_type = other DNA
ccttacctcctctttaaccaaaattatttatccaccaaaacaaaaataca

SEQ ID NO: 44696 - DNA, 50 bp, synthetic construct
  source 1..50: mol_type = other DNA
ccttacctcctctttaaccgaaattatttatccgccaaaacgaaaatacg

SEQ ID NO: 44697 - DNA, 50 bp, synthetic construct
  source 1..50: mol_type = other DNA
tcaacacaactaaaccaaaaacacaccacccctaaaaacaaataacaaca

SEQ ID NO: 44698 - DNA, 50 bp, synthetic construct
  source 1..50: mol_type = other DNA
tcgacacaactaaaccgaaaacgcaccacccctaaaaacaaataacaacg

SEQ ID NO: 44699 - DNA, 50 bp, synthetic construct
  source 1..50: mol_type = other DNA
ctatttccttaactaacaactcaacaaaaccctcccacttaaatattcca

SEQ ID NO: 44700 - DNA, 50 bp, synthetic construct
  source 1..50: mol_type = other DNA
ctatttccttaactaacaactcaacgaaaccctcccgcttaaatattccg

SEQ ID NO: 44701 - DNA, 50 bp, synthetic construct
  source 1..50: mol_type = other DNA
actacaaaaaaacaaacctaaaccaataaaaaaccaaacaaaaatacaca

SEQ ID NO: 44702 - DNA, 50 bp, synthetic construct
  source 1..50: mol_type = other DNA
gctacgaaaaaacaaacctaaaccgataaaaaaccgaacgaaaatacgcg

SEQ ID NO: 44703 - DNA, 50 bp, synthetic construct
  source 1..50: mol_type = other DNA
tacctaacaacccaaaaatacaacaaataatcactacaaaataaacccca

SEQ ID NO: 44704 - DNA, 50 bp, synthetic construct
  source 1..50: mol_type = other DNA
tacctaacaacccgaaaatacgacaaataatcgctacgaaataaaccccg

SEQ ID NO: 44705 - DNA, 50 bp, synthetic construct
  source 1..50: mol_type = other DNA
atatacataaactcccaaaaaaacaataaccaaacaaacctctaaaccca

SEQ ID NO: 44706 - DNA, 50 bp, synthetic construct
  source 1..50: mol_type = other DNA
atatacataaactcccgaaaaaacgataaccgaacaaacctctaaacccg

SEQ ID NO: 44707 - DNA, 50 bp, synthetic construct
  source 1..50: mol_type = other DNA
caaacattcaatatctccacttcactcaaatataatattccctaaaacca

SEQ ID NO: 44708 - DNA, 50 bp, synthetic construct
  source 1..50: mol_type = other DNA
cgaacgttcgatatctccacttcactcaaatataatattccctaaaaccg

SEQ ID NO: 44709 - DNA, 50 bp, synthetic construct
  source 1..50: mol_type = other DNA
caaaaaaaatataaacttcacaaaaaaaattaacaccaacataaccacca

SEQ ID NO: 44710 - DNA, 50 bp, synthetic construct
  source 1..50: mol_type = other DNA
cgaaaaaaatataaacttcacgaaaaaaattaacaccaacgtaaccaccg

SEQ ID NO: 44711 - DNA, 50 bp, synthetic construct
  source 1..50: mol_type = other DNA
catcaatactaaaaaaaacaataacaacacacataccaacatcacctcca

SEQ ID NO: 44712 - DNA, 50 bp, synthetic construct
  source 1..50: mol_type = other DNA
cgtcaatactaaaaaaaacgataacgacgcacataccaacatcacctccg

SEQ ID NO: 44713 - DNA, 50 bp, synthetic construct
  source 1..50: mol_type = other DNA
caacttatcatccctcaaacccatcaatactaaaaaaaacaataacaaca

SEQ ID NO: 44714 - DNA, 50 bp, synthetic construct
  source 1..50: mol_type = other DNA
caacttatcgtccctcaaacccgtcaatactaaaaaaaacgataacgacg

SEQ ID NO: 44715 - DNA, 50 bp, synthetic construct
  source 1..50: mol_type = other DNA
aacactcctttcatcatcacctaatctaaaaaaaacacccaaaaaaacca

SEQ ID NO: 44716 - DNA, 50 bp, synthetic construct
  source 1..50: mol_type = other DNA
aacgctcctttcgtcatcacctaatctaaaaaaaacgcccgaaaaaaccg

SEQ ID NO: 44717 - DNA, 50 bp, synthetic construct
  source 1..50: mol_type = other DNA
ccacaaaacttcctaaactactataactctataaaccaatcccaaaaaca

SEQ ID NO: 44718 - DNA, 50 bp, synthetic construct
  source 1..50: mol_type = other DNA
ccacgaaacttcctaaactactataactctataaaccgatcccaaaaacg

SEQ ID NO: 44719 - DNA, 50 bp, synthetic construct
  source 1..50: mol_type = other DNA
actccaaaataaaaaacaccacaacccaatccctataaaaaccaaaacca

SEQ ID NO: 44720 - DNA, 50 bp, synthetic construct
  source 1..50: mol_type = other DNA
actccaaaataaaaaacgccacgacccaatccctataaaaaccaaaaccg

SEQ ID NO: 44721 - DNA, 50 bp, synthetic construct
  source 1..50: mol_type = other DNA
ctaaaatccaaaaaacaaaaacttatacttacaaaccaaatccaacccca

SEQ ID NO: 44722 - DNA, 50 bp, synthetic construct
  source 1..50: mol_type = other DNA
ctaaaatccaaaaaacaaaaacttatacttacgaaccgaatccaaccccg

SEQ ID NO: 44723 - DNA, 50 bp, synthetic construct
  source 1..50: mol_type = other DNA
tcctccctttcctctactaacctcaaaaaccaaaaaaaccataaaaacca

SEQ ID NO: 44724 - DNA, 50 bp, synthetic construct
  source 1..50: mol_type = other DNA
tcctccctttcctctactaacctcgaaaaccaaaaaaaccgtaaaaaccg

SEQ ID NO: 44725 - DNA, 50 bp, synthetic construct
  source 1..50: mol_type = other DNA
aacctcaaaaaccaaaaaaaccataaaaaccacaaaactaaaactaacca

SEQ ID NO: 44726 - DNA, 50 bp, synthetic construct
  source 1..50: mol_type = other DNA
aacctcgaaaaccaaaaaaaccgtaaaaaccgcgaaactaaaactaaccg

SEQ ID NO: 44727 - DNA, 50 bp, synthetic construct
  source 1..50: mol_type = other DNA
ccataaaaaccacaaaactaaaactaaccaaaaccaaaacttaaaaaaca

SEQ ID NO: 44728 - DNA, 50 bp, synthetic construct
  source 1..50: mol_type = other DNA
ccgtaaaaaccgcgaaactaaaactaaccgaaaccgaaacttaaaaaacg

SEQ ID NO: 44729 - DNA, 50 bp, synthetic construct
  source 1..50: mol_type = other DNA
aactaaccaaaaccaaaacttaaaaaacaaaactaaaaaacacacctcca

SEQ ID NO: 44730 - DNA, 50 bp, synthetic construct
  source 1..50: mol_type = other DNA
aactaaccgaaaccgaaacttaaaaaacgaaactaaaaaacgcacctccg

SEQ ID NO: 44731 - DNA, 50 bp, synthetic construct
  source 1..50: mol_type = other DNA
tcccctatttttatttcttctcccttactacaatacaaaaatccccacca

SEQ ID NO: 44732 - DNA, 50 bp, synthetic construct
  source 1..50: mol_type = other DNA
tcccctatttttatttcttctcccttactacgatacaaaaatccccaccg

SEQ ID NO: 44733 - DNA, 50 bp, synthetic construct
  source 1..50: mol_type = other DNA
cacatactcaacacccaaatctcttactaatcaataaaacttccaaaaca

SEQ ID NO: 44734 - DNA, 50 bp, synthetic construct
  source 1..50: mol_type = other DNA
cacgtactcaacacccaaatctcttactaatcgataaaacttccgaaacg

SEQ ID NO: 44735 - DNA, 50 bp, synthetic construct
  source 1..50: mol_type = other DNA
aacatcccaaaaactctaccaaccaataaaaaacctaaatactaaacaca

SEQ ID NO: 44736 - DNA, 50 bp, synthetic construct
  source 1..50: mol_type = other DNA
aacgtcccgaaaactctaccgaccaataaaaaacctaaatactaaacacg

SEQ ID NO: 44737 - DNA, 50 bp, synthetic construct
  source 1..50: mol_type = other DNA
aactataaattccacaattccctacaattaaaataaccacaccaactaca

SEQ ID NO: 44738 - DNA, 50 bp, synthetic construct
  source 1..50: mol_type = other DNA
aactataaattccacaattccctacgattaaaataaccgcgccaactacg

SEQ ID NO: 44739 - DNA, 50 bp, synthetic construct
  source 1..50: mol_type = other DNA
ctacacaaccaaaatacctaacataataacaaaaaaaaccaaaccattca

SEQ ID NO: 44740 - DNA, 50 bp, synthetic construct
  source 1..50: mol_type = other DNA
ctacgcgaccaaaatacctaacataataacaaaaaaaaccgaaccattcg

SEQ ID NO: 44741 - DNA, 50 bp, synthetic construct
  source 1..50: mol_type = other DNA
ccaaaattaattatcaatatctttcccaattattccaccccctaccccca

SEQ ID NO: 44742 - DNA, 50 bp, synthetic construct
  source 1..50: mol_type = other DNA
ccaaaattaattatcaatatctttcccaattattccgccccctacccccg

SEQ ID NO: 44743 - DNA, 50 bp, synthetic construct
  source 1..50: mol_type = other DNA
aataaaaaaacctaaaacaactaaaaatccaacatttaaccaaaatccca

SEQ ID NO: 44744 - DNA, 50 bp, synthetic construct
  source 1..50: mol_type = other DNA
aataaaaaaacctaaaacgactaaaaatccgacgtttaaccgaaatcccg

SEQ ID NO: 44745 - DNA, 50 bp, synthetic construct
  source 1..50: mol_type = other DNA
cctaaaacaactaaaaatccaacatttaaccaaaatcccaaaaaacaaca

SEQ ID NO: 44746 - DNA, 50 bp, synthetic construct
  source 1..50: mol_type = other DNA
cctaaaacgactaaaaatccgacgtttaaccgaaatcccgaaaaacgacg

SEQ ID NO: 44747 - DNA, 50 bp, synthetic construct
  source 1..50: mol_type = other DNA
cctacaatctcactaaaacaaaatccctacaaccaaaataaaaatcctca

SEQ ID NO: 44748 - DNA, 50 bp, synthetic construct
  source 1..50: mol_type = other DNA
cctacgatctcgctaaaacaaaatccctacaaccgaaataaaaatcctcg

SEQ ID NO: 44749 - DNA, 50 bp, synthetic construct
  source 1..50: mol_type = other DNA
ctcaaccaatactaaaatctaaatactaaataacacaaccaacaacaaca

SEQ ID NO: 44750 - DNA, 50 bp, synthetic construct
  source 1..50: mol_type = other DNA
ctcgaccgatactaaaatctaaatactaaataacgcaaccgacaacaacg

SEQ ID NO: 44751 - DNA, 50 bp, synthetic construct
  source 1..50: mol_type = other DNA
ctaaatctatattacaaaaaacactcacacaattaccaaaaaaaacccca

SEQ ID NO: 44752 - DNA, 50 bp, synthetic construct
  source 1..50: mol_type = other DNA
ctaaatctatattacgaaaaacgctcgcgcgattaccaaaaaaaaccccg

SEQ ID NO: 44753 - DNA, 50 bp, synthetic construct
  source 1..50: mol_type = other DNA
atctatattacaaaaaacactcacacaattaccaaaaaaaaccccaaaca

SEQ ID NO: 44754 - DNA, 50 bp, synthetic construct
  source 1..50: mol_type = other DNA
atctatattacgaaaaacgctcgcgcgattaccaaaaaaaaccccgaacg

SEQ ID NO: 44755 - DNA, 50 bp, synthetic construct
  source 1..50: mol_type = other DNA
ctaacccacatccacaaatctattataccctactaaaaccaaaaatccca

SEQ ID NO: 44756 - DNA, 50 bp, synthetic construct
  source 1..50: mol_type = other DNA
ctaacccgcgtccacaaatctattataccctactaaaaccaaaaatcccg

SEQ ID NO: 44757 - DNA, 50 bp, synthetic construct
  source 1..50: mol_type = other DNA
taaacctcaacctcataaataaaatacacctaccacccccaaactaaaca

SEQ ID NO: 44758 - DNA, 50 bp, synthetic construct
  source 1..50: mol_type = other DNA
taaacctcaacctcataaataaaatacgcctaccacccccaaactaaacg

SEQ ID NO: 44759 - DNA, 50 bp, synthetic construct
  source 1..50: mol_type = other DNA
tataaaacttaaaaaaaaatctcaccaataatactaatactaacaacaca

SEQ ID NO: 44760 - DNA, 50 bp, synthetic construct
  source 1..50: mol_type = other DNA
tataaaacttaaaaaaaaatctcaccgataatactaatactaacaacacg

SEQ ID NO: 44761 - DNA, 50 bp, synthetic construct
  source 1..50: mol_type = other DNA
caaccccttccaacaacatcaacaaatcccaataattacattaataaaca

SEQ ID NO: 44762 - DNA, 50 bp, synthetic construct
  source 1..50: mol_type = other DNA
caaccccttccaacaacgtcaacaaatcccaataattacgttaataaacg

SEQ ID NO: 44763 - DNA, 50 bp, synthetic construct
  source 1..50: mol_type = other DNA
taaaactaaaaacaacccaaaaactacaaaaccaaactaaactaacacca

SEQ ID NO: 44764 - DNA, 50 bp, synthetic construct
  source 1..50: mol_type = other DNA
taaaactaaaaacaacccgaaaactacgaaaccaaactaaactaacgccg

SEQ ID NO: 44765 - DNA, 50 bp, synthetic construct
  source 1..50: mol_type = other DNA
cttctatacaaaaacaaacaccactattcctaacaacacaaaaaaaaaca

SEQ ID NO: 44766 - DNA, 50 bp, synthetic construct
  source 1..50: mol_type = other DNA
cttctatacaaaaacaaacgccgctattcctaacgacgcgaaaaaaaacg

SEQ ID NO: 44767 - DNA, 50 bp, synthetic construct
  source 1..50: mol_type = other DNA
ctcacacaaaaaacaaaaccacacccttaatactaactaccaaactaaca

SEQ ID NO: 44768 - DNA, 50 bp, synthetic construct
  source 1..50: mol_type = other DNA
ctcgcacaaaaaacgaaaccacacccttaatactaactaccaaactaacg

SEQ ID NO: 44769 - DNA, 50 bp, synthetic construct
  source 1..50: mol_type = other DNA
ctatctccccaacttctactccataacaaacaaactacaataaacactca

SEQ ID NO: 44770 - DNA, 50 bp, synthetic construct
  source 1..50: mol_type = other DNA
ctatctccccaacttctactccgtaacaaacaaactacaataaacgctcg

SEQ ID NO: 44771 - DNA, 50 bp, synthetic construct
  source 1..50: mol_type = other DNA
aatataatcccatcctctatacaaacatccactacaatttatctactaca

SEQ ID NO: 44772 - DNA, 50 bp, synthetic construct
  source 1..50: mol_type = other DNA
aatataatcccgtcctctatacgaacgtccactacaatttatctactacg

SEQ ID NO: 44773 - DNA, 50 bp, synthetic construct
  source 1..50: mol_type = other DNA
ttaaataaaaccaccaaaccaacaaacaaaaaacaacctcctcataacca

SEQ ID NO: 44774 - DNA, 50 bp, synthetic construct
  source 1..50: mol_type = other DNA
ttaaataaaaccgccaaaccgacaaacaaaaaacgacctcctcgtaaccg

SEQ ID NO: 44775 - DNA, 50 bp, synthetic construct
  source 1..50: mol_type = other DNA
acaatacaacaacaaaataaacataaccacaaacaaaacctaaatcccca

SEQ ID NO: 44776 - DNA, 50 bp, synthetic construct
  source 1..50: mol_type = other DNA
acaatacaacgacgaaataaacataaccgcgaacgaaacctaaatccccg

SEQ ID NO: 44777 - DNA, 50 bp, synthetic construct
  source 1..50: mol_type = other DNA
attataaaaaacttcacaatacaacaacaaaataaacataaccacaaaca

SEQ ID NO: 44778 - DNA, 50 bp, synthetic construct
  source 1..50: mol_type = other DNA
attataaaaaacttcacaatacaacgacgaaataaacataaccgcgaacg

SEQ ID NO: 44779 - DNA, 50 bp, synthetic construct
  source 1..50: mol_type = other DNA
caaaattataaaaaacttcacaatacaacaacaaaataaacataaccaca

SEQ ID NO: 44780 - DNA, 50 bp, synthetic construct
  source 1..50: mol_type = other DNA
cgaaattataaaaaacttcacaatacaacgacgaaataaacataaccgcg

SEQ ID NO: 44781 - DNA, 50 bp, synthetic construct
  source 1..50: mol_type = other DNA
acaattcctaaacaaatacttctataaccaaaaaaaatccatacacttca

SEQ ID NO: 44782 - DNA, 50 bp, synthetic construct
  source 1..50: mol_type = other DNA
acgattcctaaacaaatacttctataaccaaaaaaaatccgtacgcttcg

SEQ ID NO: 44783 - DNA, 50 bp, synthetic construct
  source 1..50: mol_type = other DNA
caaaaaataaactcctaaactacaaataataaacattacaaataaaacca

SEQ ID NO: 44784 - DNA, 50 bp, synthetic construct
  source 1..50: mol_type = other DNA
cgaaaaataaactcctaaactacaaataataaacgttacgaataaaaccg

SEQ ID NO: 44785 - DNA, 50 bp, synthetic construct
  source 1..50: mol_type = other DNA
aaccaaatacatctataaccaaaaaaaatacacacacttcaacaacaaca

SEQ ID NO: 44786 - DNA, 50 bp, synthetic construct
  source 1..50: mol_type = other DNA
aaccaaatacatctataaccgaaaaaaatacgcgcgcttcgacaacgacg

SEQ ID NO: 44787 - DNA, 50 bp, synthetic construct
  source 1..50: mol_type = other DNA
acatcttataaccaaatacatctataaccaaaaaaaatacacacacttca

SEQ ID NO: 44788 - DNA, 50 bp, synthetic construct
  source 1..50: mol_type = other DNA
acgtcttataaccaaatacatctataaccgaaaaaaatacgcgcgcttcg

SEQ ID NO: 44789 - DNA, 50 bp, synthetic construct
  source 1..50: mol_type = other DNA
accaacaaaacaaaacacatacatcttataaccaaatacatctataacca

SEQ ID NO: 44790 - DNA, 50 bp, synthetic construct
  source 1..50: mol_type = other DNA
accaacgaaacgaaacgcgtacgtcttataaccaaatacatctataaccg

SEQ ID NO: 44791 - DNA, 50 bp, synthetic construct
  source 1..50: mol_type = other DNA
aaatcccaaatctaaaacaccaaacacaaacaaacaaaaactaaaaatca

SEQ ID NO: 44792 - DNA, 50 bp, synthetic construct
  source 1..50: mol_type = other DNA
aaatcccaaatctaaaacgccaaacacgaacgaacgaaaactaaaaatcg

SEQ ID NO: 44793 - DNA, 50 bp, synthetic construct
  source 1..50: mol_type = other DNA
aactacaaaacaaaactacacacaaccttacaacaacaaaataaacatca

SEQ ID NO: 44794 - DNA, 50 bp, synthetic construct
  source 1..50: mol_type = other DNA
aactacgaaacgaaactacgcacgaccttacaacgacaaaataaacgtcg

SEQ ID NO: 44795 - DNA, 50 bp, synthetic construct
  source 1..50: mol_type = other DNA
cacaactacaaaacaaaactacacacaaccttacaacaacaaaataaaca

SEQ ID NO: 44796 - DNA, 50 bp, synthetic construct
  source 1..50: mol_type = other DNA
cacaactacgaaacgaaactacgcacgaccttacaacgacaaaataaacg

SEQ ID NO: 44797 - DNA, 50 bp, synthetic construct
  source 1..50: mol_type = other DNA
ccacaataaacaaaatatacaaacacaactacaaaacaaaactacacaca

SEQ ID NO: 44798 - DNA, 50 bp, synthetic construct
  source 1..50: mol_type = other DNA
ccgcgataaacaaaatatacaaacacaactacgaaacgaaactacgcacg

SEQ ID NO: 44799 - DNA, 50 bp, synthetic construct
  source 1..50: mol_type = other DNA
caaaacatcaaaaactaaaacaactataaaaacttcttaaaacaaaaaca

SEQ ID NO: 44800 - DNA, 50 bp, synthetic construct
  source 1..50: mol_type = other DNA
cgaaacatcgaaaactaaaacaactataaaaacttcttaaaacaaaaacg

SEQ ID NO: 44801 - DNA, 50 bp, synthetic construct
  source 1..50: mol_type = other DNA
cacttcaacaacaacattaaaaaattccaaacaataaccaaactaaaaca

SEQ ID NO: 44802 - DNA, 50 bp, synthetic construct
  source 1..50: mol_type = other DNA
cgcttcgacaacgacgttaaaaaattccaaacgataaccgaactaaaacg

SEQ ID NO: 44803 - DNA, 50 bp, synthetic construct
  source 1..50: mol_type = other DNA
aaaacacatacacaatataaccaaatacatctataaccacaaaaaataca

SEQ ID NO: 44804 - DNA, 50 bp, synthetic construct
  source 1..50: mol_type = other DNA
aaaacgcgtacgcgatataaccaaatacatctataaccgcgaaaaatacg

SEQ ID NO: 44805 - DNA, 50 bp, synthetic construct
  source 1..50: mol_type = other DNA
accaacaaaacaaaacacatacacaatataaccaaatacatctataacca

SEQ ID NO: 44806 - DNA, 50 bp, synthetic construct
  source 1..50: mol_type = other DNA
accaacgaaacaaaacgcgtacgcgatataaccaaatacatctataaccg

SEQ ID NO: 44807 - DNA, 50 bp, synthetic construct
  source 1..50: mol_type = other DNA
aacaaatttcacaactactaaccaaatcaaaacaacaactaaaaaataca

SEQ ID NO: 44808 - DNA, 50 bp, synthetic construct
  source 1..50: mol_type = other DNA
aacgaatttcgcaactactaaccgaatcaaaacaacgactaaaaaatacg

SEQ ID NO: 44809 - DNA, 50 bp, synthetic construct
  source 1..50: mol_type = other DNA
cataaaatacatataatctcatcctaaacactctatccccacaaaaacca

SEQ ID NO: 44810 - DNA, 50 bp, synthetic construct
  source 1..50: mol_type = other DNA
cataaaatacgtataatctcatcctaaacgctctatccccacaaaaaccg

SEQ ID NO: 44811 - DNA, 50 bp, synthetic construct
  source 1..50: mol_type = other DNA
aaaaactaaaacaaaaacccaaactacctactataaacatatatacaaca

SEQ ID NO: 44812 - DNA, 50 bp, synthetic construct
  source 1..50: mol_type = other DNA
aaaaactaaaacgaaaacccaaactacctactataaacgtatatacaacg

SEQ ID NO: 44813 - DNA, 50 bp, synthetic construct
  source 1..50: mol_type = other DNA
ataaatactttctaactaaattttataaactcattctaaaaaaactaaca

SEQ ID NO: 44814 - DNA, 50 bp, synthetic construct
  source 1..50: mol_type = other DNA
ataaatactttctaactaaattttataaactcattctaaaaaaactaacg

SEQ ID NO: 44815 - DNA, 50 bp, synthetic construct
  source 1..50: mol_type = other DNA
cacaactaataaattaatacaaaaaaaaacctaaaacaccaacaaaaaca

SEQ ID NO: 44816 - DNA, 50 bp, synthetic construct
  source 1..50: mol_type = other DNA
cgcgactaataaattaatacgaaaaaaaacctaaaacgccaacaaaaacg

SEQ ID NO: 44817 - DNA, 50 bp, synthetic construct
  source 1..50: mol_type = other DNA
tcccaacaacccaacccaaaataaaaaccttaactaaaaaaacaaaaaca

SEQ ID NO: 44818 - DNA, 50 bp, synthetic construct
  source 1..50: mol_type = other DNA
tcccgacgacccaacccaaaataaaaaccttaactaaaaaaacgaaaacg

SEQ ID NO: 44819 - DNA, 50 bp, synthetic construct
  source 1..50: mol_type = other DNA
tacaatacaaaccaaaattcaaactccaattccactatctacaaatctca

SEQ ID NO: 44820 - DNA, 50 bp, synthetic construct
  source 1..50: mol_type = other DNA
tacaatacgaaccaaaattcgaactccaattccgctatctacgaatctcg

SEQ ID NO: 44821 - DNA, 50 bp, synthetic construct
  source 1..50: mol_type = other DNA
aaacctatacaatacaaaccaaaattcaaactccaattccactatctaca

SEQ ID NO: 44822 - DNA, 50 bp, synthetic construct
  source 1..50: mol_type = other DNA
aaacctatacaatacgaaccaaaattcgaactccaattccgctatctacg

SEQ ID NO: 44823 - DNA, 50 bp, synthetic construct
  source 1..50: mol_type = other DNA
tttctctatacaatctccaaaactcactttaccccaaaaaatacaaatca

SEQ ID NO: 44824 - DNA, 50 bp, synthetic construct
  source 1..50: mol_type = other DNA
tttctctatacgatctccaaaactcgctttaccccgaaaaatacaaatcg

SEQ ID NO: 44825 - DNA, 50 bp, synthetic construct
  source 1..50: mol_type = other DNA
acccttcctaacattactccctacttaactaaacactacaaaatttcaca

SEQ ID NO: 44826 - DNA, 50 bp, synthetic construct
  source 1..50: mol_type = other DNA
gcccttcctaacgttactccctacttaactaaacactacgaaatttcacg

SEQ ID NO: 44827 - DNA, 50 bp, synthetic construct
  source 1..50: mol_type = other DNA
ctctccaaaataacaaataaaacaaacacaaccaaaacaaataccaaaca

SEQ ID NO: 44828 - DNA, 50 bp, synthetic construct
  source 1..50: mol_type = other DNA
ctctccgaaataacaaataaaacgaacgcgaccaaaacaaataccaaacg

SEQ ID NO: 44829 - DNA, 50 bp, synthetic construct
  source 1..50: mol_type = other DNA
aacacaaatatctccctaaactaaaaataatccccaactctaacaatcca

SEQ ID NO: 44830 - DNA, 50 bp, synthetic construct
  source 1..50: mol_type = other DNA
aacacaaatatctccctaaactaaaaataatccccgactctaacgatccg

SEQ ID NO: 44831 - DNA, 50 bp, synthetic construct
  source 1..50: mol_type = other DNA
ccattaactacaacactaaacttaaccctaccaaaacttaccttattcca

SEQ ID NO: 44832 - DNA, 50 bp, synthetic construct
  source 1..50: mol_type = other DNA
ccattaactacgacactaaacttaaccctaccgaaacttaccttattccg

SEQ ID NO: 44833 - DNA, 50 bp, synthetic construct
  source 1..50: mol_type = other DNA
accactaaaccatactctaactaaaaacctacaaaatcctcaaaacaaca

SEQ ID NO: 44834 - DNA, 50 bp, synthetic construct
  source 1..50: mol_type = other DNA
accgctaaaccgtactctaactaaaaacctacgaaatcctcaaaacaacg

SEQ ID NO: 44835 - DNA, 50 bp, synthetic construct
  source 1..50: mol_type = other DNA
aaacaataacaacacaataaacaccaacaaaaaaaatatacaaaacaaca

SEQ ID NO: 44836 - DNA, 50 bp, synthetic construct
  source 1..50: mol_type = other DNA
aaacaataacaacgcgataaacaccaacaaaaaaaatatacgaaacaacg

SEQ ID NO: 44837 - DNA, 50 bp, synthetic construct
  source 1..50: mol_type = other DNA
ccaacaaaaaaaatatacaaaacaacacaatccaaaacaacacccaatca

SEQ ID NO: 44838 - DNA, 50 bp, synthetic construct
  source 1..50: mol_type = other DNA
ccaacaaaaaaaatatacgaaacaacgcgatccgaaacaacacccaatcg

SEQ ID NO: 44839 - DNA, 50 bp, synthetic construct
  source 1..50: mol_type = other DNA
cctccccaaaacttctctcacataactaaaaacaatactactacttctca

SEQ ID NO: 44840 - DNA, 50 bp, synthetic construct
  source 1..50: mol_type = other DNA
cctccccgaaacttctctcgcataactaaaaacaatactactacttctcg

SEQ ID NO: 44841 - DNA, 50 bp, synthetic construct
  source 1..50: mol_type = other DNA
tctaaaataaacaaatattcccaaatcccttaaaaaaaatccccacaaca

SEQ ID NO: 44842 - DNA, 50 bp, synthetic construct
  source 1..50: mol_type = other DNA
tctaaaataaacaaatattcccgaatcccttaaaaaaaatccccgcgacg

SEQ ID NO: 44843 - DNA, 50 bp, synthetic construct
  source 1..50: mol_type = other DNA
ctccctacaaaattattctccacctcttctaaaataaacaaatattccca

SEQ ID NO: 44844 - DNA, 50 bp, synthetic construct
  source 1..50: mol_type = other DNA
ctccctacgaaattattctccgcctcttctaaaataaacaaatattcccg

SEQ ID NO: 44845 - DNA, 50 bp, synthetic construct
  source 1..50: mol_type = other DNA
caaaataaaatttaaaacaataattatattttccaacaaacactcaaaca

SEQ ID NO: 44846 - DNA, 50 bp, synthetic construct
  source 1..50: mol_type = other DNA
caaaataaaatttaaaacgataattatattttccaacaaacgctcaaacg

SEQ ID NO: 44847 - DNA, 50 bp, synthetic construct
  source 1..50: mol_type = other DNA
aaaaaaccaaaaactacaaaaaaaaccataatacacaaacatccaaacca

SEQ ID NO: 44848 - DNA, 50 bp, synthetic construct
  source 1..50: mol_type = other DNA
aaaaaaccaaaaactacgaaaaaaaccgtaatacgcaaacgtccgaaccg

SEQ ID NO: 44849 - DNA, 50 bp, synthetic construct
  source 1..50: mol_type = other DNA
aaaaccaaaaaaaccacataacccaaacctatatcccaaaacccaaaaca

SEQ ID NO: 44850 - DNA, 50 bp, synthetic construct
  source 1..50: mol_type = other DNA
aaaaccaaaaaaaccgcataacccaaacctatatcccgaaacccaaaacg

SEQ ID NO: 44851 - DNA, 50 bp, synthetic construct
  source 1..50: mol_type = other DNA
aaaaactaaaaatataaacaaacaacaacattataacactctaaatttca

SEQ ID NO: 44852 - DNA, 50 bp, synthetic construct
  source 1..50: mol_type = other DNA
aaaaactaaaaatataaacaaacaacaacgttataacgctctaaatttcg

SEQ ID NO: 44853 - DNA, 50 bp, synthetic construct
  source 1..50: mol_type = other DNA
ctccccaaaacctctaaaaaaaacattactatacaccctttatatccaca

SEQ ID NO: 44854 - DNA, 50 bp, synthetic construct
  source 1..50: mol_type = other DNA
ctccccaaaacctctaaaaaaaacattactatacgccctttatatccgcg

SEQ ID NO: 44855 - DNA, 50 bp, synthetic construct
  source 1..50: mol_type = other DNA
tatccacaataaaaaaactccaatcatcacaccacaaactaaaaattaca

SEQ ID NO: 44856 - DNA, 50 bp, synthetic construct
  source 1..50: mol_type = other DNA
tatccgcgataaaaaaactccaatcgtcacaccgcaaactaaaaattacg

SEQ ID NO: 44857 - DNA, 50 bp, synthetic construct
  source 1..50: mol_type = other DNA
cccaaaaccttaaaaactataaaatcattccaaatcccaaacctccctca

SEQ ID NO: 44858 - DNA, 50 bp, synthetic construct
  source 1..50: mol_type = other DNA
cccgaaaccttaaaaactataaaatcattccaaatcccgaacctccctcg

SEQ ID NO: 44859 - DNA, 50 bp, synthetic construct
  source 1..50: mol_type = other DNA
ctcaataatttaaaaaaataactctttcctcctttccattccctccccca

SEQ ID NO: 44860 - DNA, 50 bp, synthetic construct
  source 1..50: mol_type = other DNA
ctcaataatttaaaaaaataactctttcctcctttccgttccctcccccg

SEQ ID NO: 44861 - DNA, 50 bp, synthetic construct
  source 1..50: mol_type = other DNA
aaacattactctcatttattccctacattccaaaaaatcactacctccca

SEQ ID NO: 44862 - DNA, 50 bp, synthetic construct
  source 1..50: mol_type = other DNA
aaacattactctcgtttattccctacattccgaaaaatcactacctcccg

SEQ ID NO: 44863 - DNA, 50 bp, synthetic construct
  source 1..50: mol_type = other DNA
aaaaaacaaaactaaactcccaaaataactcctacccctcctcaaaaaca

SEQ ID NO: 44864 - DNA, 50 bp, synthetic construct
  source 1..50: mol_type = other DNA
aaaaaacgaaactaaactcccaaaataactcctacccctcctcgaaaacg

SEQ ID NO: 44865 - DNA, 50 bp, synthetic construct
  source 1..50: mol_type = other DNA
aaaaacccctaaaaaacaaatacaaatatacctttaaaaataatataaca

SEQ ID NO: 44866 - DNA, 50 bp, synthetic construct
  source 1..50: mol_type = other DNA
aaaaacccctaaaaaacgaatacgaatatacctttaaaaataatataacg

SEQ ID NO: 44867 - DNA, 50 bp, synthetic construct
  source 1..50: mol_type = other DNA
aataacatctttttcctcatttcaaattcttcactactactaccttacca

SEQ ID NO: 44868 - DNA, 50 bp, synthetic construct
  source 1..50: mol_type = other DNA
aataacgtctttttcctcgtttcaaattcttcgctactactaccttaccg

SEQ ID NO: 44869 - DNA, 50 bp, synthetic construct
  source 1..50: mol_type = other DNA
caactaaccaataaaaaaaactcccacaaaaaaatattccttccccttca

SEQ ID NO: 44870 - DNA, 50 bp, synthetic construct
  source 1..50: mol_type = other DNA
cgactaaccaataaaaaaaactcccgcgaaaaaatattccttccccttcg

SEQ ID NO: 44871 - DNA, 50 bp, synthetic construct
  source 1..50: mol_type = other DNA
aaaaacaatctctttaaaacctctcaaaaaactccaaacaacttaacaca

SEQ ID NO: 44872 - DNA, 50 bp, synthetic construct
  source 1..50: mol_type = other DNA
gaaaacaatctctttaaaacctctcgaaaaactccgaacaacttaacgcg

SEQ ID NO: 44873 - DNA, 50 bp, synthetic construct
  source 1..50: mol_type = other DNA
aaacccaaaaaaaacaacctccccccaacttaacaaattatactaaacca

SEQ ID NO: 44874 - DNA, 50 bp, synthetic construct
  source 1..50: mol_type = other DNA
aaacccaaaaaaaacgacctccccccaacttaacgaattatactaaaccg

SEQ ID NO: 44875 - DNA, 50 bp, synthetic construct
  source 1..50: mol_type = other DNA
acttaacaaattatactaaaccaaacaataaaaaaaaccaaaaccaccca

SEQ ID NO: 44876 - DNA, 50 bp, synthetic construct
  source 1..50: mol_type = other DNA
acttaacgaattatactaaaccgaacgataaaaaaaaccgaaaccacccg

SEQ ID NO: 44877 - DNA, 50 bp, synthetic construct
  source 1..50: mol_type = other DNA
ccacaactaaaaacaacaccaattccttacaatcaaaatactacaaaaca

SEQ ID NO: 44878 - DNA, 50 bp, synthetic construct
  source 1..50: mol_type = other DNA
ccgcgactaaaaacaacgccgattccttacgatcaaaatactacaaaacg

SEQ ID NO: 44879 - DNA, 50 bp, synthetic construct
  source 1..50: mol_type = other DNA
caatcaaaatactacaaaacataactccccacaataaatacatttccaca

SEQ ID NO: 44880 - DNA, 50 bp, synthetic construct
  source 1..50: mol_type = other DNA
cgatcaaaatactacaaaacgtaactccccacaataaatacgtttccgcg

SEQ ID NO: 44881 - DNA, 50 bp, synthetic construct
  source 1..50: mol_type = other DNA
aaaatactacaaaacataactccccacaataaatacatttccacaaacca

SEQ ID NO: 44882 - DNA, 50 bp, synthetic construct
  source 1..50: mol_type = other DNA
aaaatactacaaaacgtaactccccacaataaatacgtttccgcgaaccg

SEQ ID NO: 44883 - DNA, 50 bp, synthetic construct
  source 1..50: mol_type = other DNA
aaaattaaacaacaattttaaaacaataataacaactcaactactactca

SEQ ID NO: 44884 - DNA, 50 bp, synthetic construct
  source 1..50: mol_type = other DNA
aaaattaaacgacgattttaaaacgataataacgactcgactactactcg

SEQ ID NO: 44885 - DNA, 50 bp, synthetic construct
  source 1..50: mol_type = other DNA
aaattatcaatttatacactattaataccaccataacccaatcttaacca

SEQ ID NO: 44886 - DNA, 50 bp, synthetic construct
  source 1..50: mol_type = other DNA
aaattatcaatttatacgctattaataccgccgtaacccaatcttaaccg

SEQ ID NO: 44887 - DNA, 50 bp, synthetic construct
  source 1..50: mol_type = other DNA
atttagatagaagagagagtattattttttataaggtttgggtagtttat

SEQ ID NO: 44888 - DNA, 50 bp, synthetic construct
  source 1..50: mol_type = other DNA
atttagatagaagagagagtattattttttataaggtttgggtagtttac

SEQ ID NO: 44889 - DNA, 50 bp, synthetic construct
  source 1..50: mol_type = other DNA
attctttttcatattttaaaaaactcccaaattatttctaacaaaacaca

SEQ ID NO: 44890 - DNA, 50 bp, synthetic construct
  source 1..50: mol_type = other DNA
attctttttcatattttaaaaaactcccaaattatttctaacaaaacacg

SEQ ID NO: 44891 - DNA, 50 bp, synthetic construct
  source 1..50: mol_type = other DNA
acaacaaaataacataaactcaaaaaacaaaattcaataaaccaaaatca

SEQ ID NO: 44892 - DNA, 50 bp, synthetic construct
  source 1..50: mol_type = other DNA
acaacaaaataacgtaaactcgaaaaacgaaattcaataaaccgaaatcg

SEQ ID NO: 44893 - DNA, 50 bp, synthetic construct
  source 1..50: mol_type = other DNA
aacaaaataacataaactcaaaaaacaaaattcaataaaccaaaatcaca

SEQ ID NO: 44894 - DNA, 50 bp, synthetic construct
  source 1..50: mol_type = other DNA
aacaaaataacgtaaactcgaaaaacgaaattcaataaaccgaaatcgcg

SEQ ID NO: 44895 - DNA, 50 bp, synthetic construct
  source 1..50: mol_type = other DNA
ccccaaatctcaaataaaactaaaccaacccaacatcctcatctacatca

SEQ ID NO: 44896 - DNA, 50 bp, synthetic construct
  source 1..50: mol_type = other DNA
ccccaaatctcgaataaaactaaaccaacccaacatcctcatctacatcg

SEQ ID NO: 44897 - DNA, 50 bp, synthetic construct
  source 1..50: mol_type = other DNA
acacaacacttcctaaaaaaatacatctacaaccaaaaaaaattcacaca

SEQ ID NO: 44898 - DNA, 50 bp, synthetic construct
  source 1..50: mol_type = other DNA
acacaacgcttcctaaaaaaatacatctacaaccgaaaaaaattcgcgcg

SEQ ID NO: 44899 - DNA, 50 bp, synthetic construct
  source 1..50: mol_type = other DNA
ccaaaacacaaaaacaaccaaattaacctaaaaaaccttaataccaaaca

SEQ ID NO: 44900 - DNA, 50 bp, synthetic construct
  source 1..50: mol_type = other DNA
ccaaaacgcaaaaacaaccgaattaacctaaaaaaccttaataccgaacg

SEQ ID NO: 44901 - DNA, 50 bp, synthetic construct
  source 1..50: mol_type = other DNA
aaaaattcataaaaaaaacccatctaaaacttatcaaaaaaacaaacaca

SEQ ID NO: 44902 - DNA, 50 bp, synthetic construct
  source 1..50: mol_type = other DNA
aaaaattcataaaaaaaacccatctaaaacttatcaaaaaaacgaacgcg

SEQ ID NO: 44903 - DNA, 50 bp, synthetic construct
  source 1..50: mol_type = other DNA
caaacccctaacaaataaaatcaaaaacttcttcctccattcaaccttca

SEQ ID NO: 44904 - DNA, 50 bp, synthetic construct
  source 1..50: mol_type = other DNA
cgaacccctaacaaataaaatcaaaaacttcttcctccattcgaccttcg

SEQ ID NO: 44905 - DNA, 50 bp, synthetic construct
  source 1..50: mol_type = other DNA
caaacaaatacacaaaaaaacttctcaaaaataaaaacctctcctcaaca

SEQ ID NO: 44906 - DNA, 50 bp, synthetic construct
  source 1..50: mol_type = other DNA
cgaacgaatacgcgaaaaaacttctcgaaaataaaaacctctcctcgacg

SEQ ID NO: 44907 - DNA, 50 bp, synthetic construct
  source 1..50: mol_type = other DNA
taacaacaattccactaacacttatccactatacaatctttattatccca

SEQ ID NO: 44908 - DNA, 50 bp, synthetic construct
  source 1..50: mol_type = other DNA
taacaacgattccgctaacgcttatccactatacaatctttattatcccg

SEQ ID NO: 44909 - DNA, 50 bp, synthetic construct
  source 1..50: mol_type = other DNA
aaaaaaaataaacaaaacaaactaacaaaccaaaaaaaaccacctcctca

SEQ ID NO: 44910 - DNA, 50 bp, synthetic construct
  source 1..50: mol_type = other DNA
aaaaaaaataaacgaaacgaactaacaaaccgaaaaaaaccgcctcctcg

SEQ ID NO: 44911 - DNA, 50 bp, synthetic construct
  source 1..50: mol_type = other DNA
cactccacactaaccttaatcacaaattaaaaaaattctttccccaaaca

SEQ ID NO: 44912 - DNA, 50 bp, synthetic construct
  source 1..50: mol_type = other DNA
cgctccgcactaaccttaatcacaaattaaaaaaattctttccccgaacg

SEQ ID NO: 44913 - DNA, 50 bp, synthetic construct
  source 1..50: mol_type = other DNA
caccttccaaaacaaaaataaactacaaaaactacacaaaaatttaaaca

SEQ ID NO: 44914 - DNA, 50 bp, synthetic construct
  source 1..50: mol_type = other DNA
cgccttccgaaacaaaaataaactacaaaaactacgcgaaaatttaaacg

SEQ ID NO: 44915 - DNA, 50 bp, synthetic construct
  source 1..50: mol_type = other DNA
aaaccataaaacaaaaaaacaactctaaaaactcataattccaaaaccca

SEQ ID NO: 44916 - DNA, 50 bp, synthetic construct
  source 1..50: mol_type = other DNA
aaaccgtaaaacgaaaaaacaactctaaaaactcgtaattccgaaacccg

SEQ ID NO: 44917 - DNA, 50 bp, synthetic construct
  source 1..50: mol_type = other DNA
aaaatataaaccataaaacaaaaaaacaactctaaaaactcataattcca

SEQ ID NO: 44918 - DNA, 50 bp, synthetic construct
  source 1..50: mol_type = other DNA
aaaatataaaccgtaaaacgaaaaaacaactctaaaaactcgtaattccg

SEQ ID NO: 44919 - DNA, 50 bp, synthetic construct
  source 1..50: mol_type = other DNA
taaaaaaacacataacacaacaaatcaaacaaaataaacccaaaacaaca

SEQ ID NO: 44920 - DNA, 50 bp, synthetic construct
  source 1..50: mol_type = other DNA
taaaaaaacgcataacgcaacgaatcaaacgaaataaacccgaaacaacg

SEQ ID NO: 44921 - DNA, 50 bp, synthetic construct
  source 1..50: mol_type = other DNA
aaaaaacacataacacaacaaatcaaacaaaataaacccaaaacaacaca

SEQ ID NO: 44922 - DNA, 50 bp, synthetic construct
  source 1..50: mol_type = other DNA
aaaaaacgcataacgcaacgaatcaaacgaaataaacccgaaacaacgcg

SEQ ID NO: 44923 - DNA, 50 bp, synthetic construct
  source 1..50: mol_type = other DNA
aaccaattaaaaaacaactctcaaatataaaacaaaaccctaaaaaaaca

SEQ ID NO: 44924 - DNA, 50 bp, synthetic construct
  source 1..50: mol_type = other DNA
aaccaattaaaaaacgactctcgaatataaaacgaaaccctaaaaaaacg

SEQ ID NO: 44925 - DNA, 50 bp, synthetic construct
  source 1..50: mol_type = other DNA
cacaaaacaaaaactactacttcctaaaactaaaaataaatccaactcca

SEQ ID NO: 44926 - DNA, 50 bp, synthetic construct
  source 1..50: mol_type = other DNA
cgcgaaacgaaaactactacttcctaaaactaaaaataaatccgactccg

SEQ ID NO: 44927 - DNA, 50 bp, synthetic construct
  source 1..50: mol_type = other DNA
aaaatatcctaaataaatctataactaccaaacacacccaccacaaaaca

SEQ ID NO: 44928 - DNA, 50 bp, synthetic construct
  source 1..50: mol_type = other DNA
aaaatatcctaaataaatctataactaccgaacacacccgccgcgaaacg

SEQ ID NO: 44929 - DNA, 50 bp, synthetic construct
  source 1..50: mol_type = other DNA
ttaccaacaaactaaacctacatccaaaaaacctaaacaaaaaaaaacca

SEQ ID NO: 44930 - DNA, 50 bp, synthetic construct
  source 1..50: mol_type = other DNA
ttaccgacgaactaaacctacatccgaaaaacctaaacgaaaaaaaaccg

SEQ ID NO: 44931 - DNA, 50 bp, synthetic construct
  source 1..50: mol_type = other DNA
aattaccaaaaataaaactacaaaaaataaccaccactacaaccataaca

SEQ ID NO: 44932 - DNA, 50 bp, synthetic construct
  source 1..50: mol_type = other DNA
aattaccgaaaataaaactacgaaaaataaccgccgctacgaccataacg

SEQ ID NO: 44933 - DNA, 50 bp, synthetic construct
  source 1..50: mol_type = other DNA
aaacaatttcacactaaaaaaaaccctttaaaacttataactccactcca

SEQ ID NO: 44934 - DNA, 50 bp, synthetic construct
  source 1..50: mol_type = other DNA
aaacgatttcgcgctaaaaaaaaccctttaaaacttataactccactccg

SEQ ID NO: 44935 - DNA, 50 bp, synthetic construct
  source 1..50: mol_type = other DNA
caatacacctttctttacaattcataaaattcataaataaaaaaacaaca

SEQ ID NO: 44936 - DNA, 50 bp, synthetic construct
  source 1..50: mol_type = other DNA
cgatacgcctttctttacaattcgtaaaattcataaataaaaaaacaacg

SEQ ID NO: 44937 - DNA, 50 bp, synthetic construct
  source 1..50: mol_type = other DNA
tccaaccaaatcacactaaaacaatttccaaaaacacttctcctaaatca

SEQ ID NO: 44938 - DNA, 50 bp, synthetic construct
  source 1..50: mol_type = other DNA
tccaaccaaatcgcgctaaaacaatttccgaaaacacttctcctaaatcg

SEQ ID NO: 44939 - DNA, 50 bp, synthetic construct
  source 1..50: mol_type = other DNA
tcctaaatcacaccacctcttcctcctaaaaactatataataatatcaca

SEQ ID NO: 44940 - DNA, 50 bp, synthetic construct
  source 1..50: mol_type = other DNA
tcctaaatcgcaccgcctcttcctcctaaaaactatataataatatcgcg

SEQ ID NO: 44941 - DNA, 50 bp, synthetic construct
  source 1..50: mol_type = other DNA
aaacctacacaccaccacttatactacaaccataataaaactaaaatcca

SEQ ID NO: 44942 - DNA, 50 bp, synthetic construct
  source 1..50: mol_type = other DNA
aaacctacacgccgccgcttatactacaaccataataaaactaaaatccg

SEQ ID NO: 44943 - DNA, 50 bp, synthetic construct
  source 1..50: mol_type = other DNA
tacacaccaccacttatactacaaccataataaaactaaaatccatacca

SEQ ID NO: 44944 - DNA, 50 bp, synthetic construct
  source 1..50: mol_type = other DNA
tacacgccgccgcttatactacaaccataataaaactaaaatccgtaccg

SEQ ID NO: 44945 - DNA, 50 bp, synthetic construct
  source 1..50: mol_type = other DNA
accataataaaactaaaatccataccataatccaacaacatcacaactca

SEQ ID NO: 44946 - DNA, 50 bp, synthetic construct
  source 1..50: mol_type = other DNA
accataataaaactaaaatccgtaccgtaatccaacgacatcgcaactcg

SEQ ID NO: 44947 - DNA, 50 bp, synthetic construct
  source 1..50: mol_type = other DNA
aaaaaatcacaaaccctcaaaacaaaacatttccaaaaccctaacaacca

SEQ ID NO: 44948 - DNA, 50 bp, synthetic construct
  source 1..50: mol_type = other DNA
aaaaaatcgcaaaccctcaaaacaaaacgtttccaaaaccctaacaaccg

SEQ ID NO: 44949 - DNA, 50 bp, synthetic construct
  source 1..50: mol_type = other DNA
aaatttccaattccaaaaaacaaacccaaaaaaaaatcactactcaaaca

SEQ ID NO: 44950 - DNA, 50 bp, synthetic construct
  source 1..50: mol_type = other DNA
aaatttccaattccgaaaaacgaacccgaaaaaaaatcactactcgaacg

SEQ ID NO: 44951 - DNA, 50 bp, synthetic construct
  source 1..50: mol_type = other DNA
aaaaaaatataattactcacccaaattcactaaaattttcctaaaccaca

SEQ ID NO: 44952 - DNA, 50 bp, synthetic construct
  source 1..50: mol_type = other DNA
aaaaaaatataattactcacccgaattcgctaaaattttcctaaaccacg

SEQ ID NO: 44953 - DNA, 50 bp, synthetic construct
  source 1..50: mol_type = other DNA
ctttttttaaaacaaaatctcactatcacccaaattaaaatataattaca

SEQ ID NO: 44954 - DNA, 50 bp, synthetic construct
  source 1..50: mol_type = other DNA
ctttttttaaaacgaaatctcactatcgcccaaattaaaatataattacg

SEQ ID NO: 44955 - DNA, 50 bp, synthetic construct
  source 1..50: mol_type = other DNA
gatgagattttttatttatttttagaagtgatgtagttttttatgggttt

SEQ ID NO: 44956 - DNA, 50 bp, synthetic construct
  source 1..50: mol_type = other DNA
gatgagattttttatttatttttagaagtgacgtagttttttatgggttc

SEQ ID NO: 44957 - DNA, 50 bp, synthetic construct
  source 1..50: mol_type = other DNA
atcaaaataaacaaaaaaataaaaccccccactcacccccaaaaataaca

SEQ ID NO: 44958 - DNA, 50 bp, synthetic construct
  source 1..50: mol_type = other DNA
atcgaaataaacaaaaaaataaaaccccccactcacccccaaaaataacg

SEQ ID NO: 44959 - DNA, 50 bp, synthetic construct
  source 1..50: mol_type = other DNA
tatttgtagtttttgtgtttgaggttagtatattaagattattggttgtt

SEQ ID NO: 44960 - DNA, 50 bp, synthetic construct
  source 1..50: mol_type = other DNA
tatttgtagttttcgtgttcgaggttagtatattaagattattggtcgtc

SEQ ID NO: 44961 - DNA, 50 bp, synthetic construct
  source 1..50: mol_type = other DNA
acatactccaaaaaaatccataaaaacaaaaaacaaaaactaactcccca

SEQ ID NO: 44962 - DNA, 50 bp, synthetic construct
  source 1..50: mol_type = other DNA
acgtactccgaaaaaatccgtaaaaacgaaaaacgaaaactaactccccg

SEQ ID NO: 44963 - DNA, 50 bp, synthetic construct
  source 1..50: mol_type = other DNA
aaactacataatacaacatactccaaaaaaatccataaaaacaaaaaaca

SEQ ID NO: 44964 - DNA, 50 bp, synthetic construct
  source 1..50: mol_type = other DNA
aaactacataatacgacgtactccgaaaaaatccgtaaaaacgaaaaacg

SEQ ID NO: 44965 - DNA, 50 bp, synthetic construct
  source 1..50: mol_type = other DNA
acaccaaaaaaacctaaactacataatacaacatactccaaaaaaatcca

SEQ ID NO: 44966 - DNA, 50 bp, synthetic construct
  source 1..50: mol_type = other DNA
acgccgaaaaaacctaaactacataatacgacgtactccgaaaaaatccg

SEQ ID NO: 44967 - DNA, 50 bp, synthetic construct
  source 1..50: mol_type = other DNA
aacttcctaattaaaaatcaaaaaacaaaacaaaaccaaaaacaacccca

SEQ ID NO: 44968 - DNA, 50 bp, synthetic construct
  source 1..50: mol_type = other DNA
aacttcctaattaaaaatcaaaaaacgaaacaaaaccaaaaacgaccccg

SEQ ID NO: 44969 - DNA, 50 bp, synthetic construct
  source 1..50: mol_type = other DNA
aactccaaaaaacctaaaccaaaaaaacaccattcaaacttcataaaaca

SEQ ID NO: 44970 - DNA, 50 bp, synthetic construct
  source 1..50: mol_type = other DNA
gactccgaaaaacctaaaccaaaaaaacgccattcgaacttcgtaaaacg

SEQ ID NO: 44971 - DNA, 50 bp, synthetic construct
  source 1..50: mol_type = other DNA
tcaccaaaaaatcaaaaaatcaatattaacaacttataacaataaacaca

SEQ ID NO: 44972 - DNA, 50 bp, synthetic construct
  source 1..50: mol_type = other DNA
tcaccaaaaaatcaaaaaatcgatattaacgacttataacgataaacacg

SEQ ID NO: 44973 - DNA, 50 bp, synthetic construct
  source 1..50: mol_type = other DNA
cacataaaatacactcaaacaaaaaatactccaccaacaaaaatacacca

SEQ ID NO: 44974 - DNA, 50 bp, synthetic construct
  source 1..50: mol_type = other DNA
cgcataaaatacgctcaaacaaaaaatactccaccaacgaaaatacaccg

SEQ ID NO: 44975 - DNA, 50 bp, synthetic construct
  source 1..50: mol_type = other DNA
caatatatcctcactaataaaataccctctacttaaacacatctcataca

SEQ ID NO: 44976 - DNA, 50 bp, synthetic construct
  source 1..50: mol_type = other DNA
cgatatatcctcgctaataaaataccctctacttaaacgcatctcatacg

SEQ ID NO: 44977 - DNA, 50 bp, synthetic construct
  source 1..50: mol_type = other DNA
ttccaatcacctctaatcccttccaataaccctaaaccactcaaaaaaca

SEQ ID NO: 44978 - DNA, 50 bp, synthetic construct
  source 1..50: mol_type = other DNA
ttccaatcacctctaatcccttccaataaccctaaaccgctcaaaaaacg

SEQ ID NO: 44979 - DNA, 50 bp, synthetic construct
  source 1..50: mol_type = other DNA
aaatacaaaaacctttactttacaaattaccacaacaccaaatataaaca

SEQ ID NO: 44980 - DNA, 50 bp, synthetic construct
  source 1..50: mol_type = other DNA
aaatacaaaaacctttactttacgaattaccgcaacgccgaatataaacg

SEQ ID NO: 44981 - DNA, 50 bp, synthetic construct
  source 1..50: mol_type = other DNA
aaccccaattaacaaaatatcttactcaaatccataaaacaaaaccacca

SEQ ID NO: 44982 - DNA, 50 bp, synthetic construct
  source 1..50: mol_type = other DNA
aaccccgattaacgaaatatcttactcaaatccataaaacgaaaccaccg

SEQ ID NO: 44983 - DNA, 50 bp, synthetic construct
  source 1..50: mol_type = other DNA
aaataaaaataaaacaaatcaccaaacatacaaaccactcctcactcaca

SEQ ID NO: 44984 - DNA, 50 bp, synthetic construct
  source 1..50: mol_type = other DNA
aaataaaaataaaacaaatcaccaaacatacaaaccgctcctcactcgcg

SEQ ID NO: 44985 - DNA, 50 bp, synthetic construct
  source 1..50: mol_type = other DNA
caaaataaaaataaaacaaatcaccaaacatacaaaccactcctcactca

SEQ ID NO: 44986 - DNA, 50 bp, synthetic construct
  source 1..50: mol_type = other DNA
caaaataaaaataaaacaaatcaccaaacatacaaaccgctcctcactcg

SEQ ID NO: 44987 - DNA, 50 bp, synthetic construct
  source 1..50: mol_type = other DNA
ctaaaacaacaatcaccaaacctaacatataaaaacacaaataaaaaaca

SEQ ID NO: 44988 - DNA, 50 bp, synthetic construct
  source 1..50: mol_type = other DNA
ctaaaacgacgatcgccaaacctaacgtataaaaacgcgaataaaaaacg

SEQ ID NO: 44989 - DNA, 50 bp, synthetic construct
  source 1..50: mol_type = other DNA
tcacccaaaaccacaacaaaaaacaaaaacaaaaacttcataacactaca

SEQ ID NO: 44990 - DNA, 50 bp, synthetic construct
  source 1..50: mol_type = other DNA
tcacccaaaaccacaacgaaaaacaaaaacaaaaacttcataacgctacg

SEQ ID NO: 44991 - DNA, 50 bp, synthetic construct
  source 1..50: mol_type = other DNA
caaacatatctaatccccacccaaaatccacaaaataaaaataaacttca

SEQ ID NO: 44992 - DNA, 50 bp, synthetic construct
  source 1..50: mol_type = other DNA
caaacgtatctaatccccacccaaaatccacaaaataaaaataaacttcg

SEQ ID NO: 44993 - DNA, 50 bp, synthetic construct
  source 1..50: mol_type = other DNA
atccttaccatccaaaaaaaaatctcccaaaataaacaaaaacaacaaca

SEQ ID NO: 44994 - DNA, 50 bp, synthetic construct
  source 1..50: mol_type = other DNA
atccttaccgtccaaaaaaaaatctcccgaaataaacgaaaacaacgacg

SEQ ID NO: 44995 - DNA, 50 bp, synthetic construct
  source 1..50: mol_type = other DNA
acacaaataataaacataaacatatttttaaattataacaaactatatca

SEQ ID NO: 44996 - DNA, 50 bp, synthetic construct
  source 1..50: mol_type = other DNA
acacaaataataaacgtaaacatatttttaaattataacgaactatatcg

SEQ ID NO: 44997 - DNA, 50 bp, synthetic construct
  source 1..50: mol_type = other DNA
ttctttaaaaacaaaataaccaaatcaaccaaatattacccaacaacaca

SEQ ID NO: 44998 - DNA, 50 bp, synthetic construct
  source 1..50: mol_type = other DNA
ttctttaaaaacaaaataaccgaatcgaccgaatattacccaacgacacg

SEQ ID NO: 44999 - DNA, 50 bp, synthetic construct
  source 1..50: mol_type = other DNA
aatatttctttaaaaacaaaataaccaaatcaaccaaatattacccaaca

SEQ ID NO: 45000 - DNA, 50 bp, synthetic construct
  source 1..50: mol_type = other DNA
gatatttctttaaaaacaaaataaccgaatcgaccgaatattacccaacg

SEQ ID NO: 45001 - DNA, 50 bp, synthetic construct
  source 1..50: mol_type = other DNA
aacaaaaaaaaccatacaaaattctaaaaattacaacaaaaatcacctca

SEQ ID NO: 45002 - DNA, 50 bp, synthetic construct
  source 1..50: mol_type = other DNA
aacgaaaaaaaccatacgaaattctaaaaattacgacgaaaatcgcctcg

SEQ ID NO: 45003 - DNA, 50 bp, synthetic construct
  source 1..50: mol_type = other DNA
cccactacaaaccaaaaatcacaaaatttccaccttcatacaactaaaca

SEQ ID NO: 45004 - DNA, 50 bp, synthetic construct
  source 1..50: mol_type = other DNA
cccactacgaaccgaaaatcacaaaatttccgccttcatacaactaaacg

SEQ ID NO: 45005 - DNA, 50 bp, synthetic construct
  source 1..50: mol_type = other DNA
atataaaccacactaaaaatattcacaaaacaaacctactatcacctcca

SEQ ID NO: 45006 - DNA, 50 bp, synthetic construct
  source 1..50: mol_type = other DNA
atataaaccgcactaaaaatattcgcgaaacgaacctactatcacctccg

SEQ ID NO: 45007 - DNA, 50 bp, synthetic construct
  source 1..50: mol_type = other DNA
cttttataacacattatactcatttatacacatatattataacaatcaca

SEQ ID NO: 45008 - DNA, 50 bp, synthetic construct
  source 1..50: mol_type = other DNA
cttttataacgcgttatactcatttatacgcatatattataacgatcgcg

SEQ ID NO: 45009 - DNA, 50 bp, synthetic construct
  source 1..50: mol_type = other DNA
caacctcataaaaacactcaaaccacattctcaaaaaactattttcaaca

SEQ ID NO: 45010 - DNA, 50 bp, synthetic construct
  source 1..50: mol_type = other DNA
cgacctcgtaaaaacactcaaaccgcattctcaaaaaactattttcaacg

SEQ ID NO: 45011 - DNA, 50 bp, synthetic construct
  source 1..50: mol_type = other DNA
ttaaaatcaaatcataaaacacctacaacctcataaaaacactcaaacca

SEQ ID NO: 45012 - DNA, 50 bp, synthetic construct
  source 1..50: mol_type = other DNA
ttaaaatcgaatcgtaaaacacctacgacctcgtaaaaacactcaaaccg

SEQ ID NO: 45013 - DNA, 50 bp, synthetic construct
  source 1..50: mol_type = other DNA
aaaaatacaatttaaatacttttacaaaaccacaaatatctcacaaccca

SEQ ID NO: 45014 - DNA, 50 bp, synthetic construct
  source 1..50: mol_type = other DNA
aaaaatacgatttaaatacttttacgaaaccgcaaatatctcacgacccg

SEQ ID NO: 45015 - DNA, 50 bp, synthetic construct
  source 1..50: mol_type = other DNA
cttattttccatcaacataattaaaactccaacactacctctcctaatca

SEQ ID NO: 45016 - DNA, 50 bp, synthetic construct
  source 1..50: mol_type = other DNA
cttattttccgtcgacgtaattaaaactccaacgctacctctcctaatcg

SEQ ID NO: 45017 - DNA, 50 bp, synthetic construct
  source 1..50: mol_type = other DNA
aactaacacctcctaataactacaataaaaaacacacttattttccatca

SEQ ID NO: 45018 - DNA, 50 bp, synthetic construct
  source 1..50: mol_type = other DNA
aactaacgcctcctaataactacaataaaaaacgcacttattttccgtcg

SEQ ID NO: 45019 - DNA, 50 bp, synthetic construct
  source 1..50: mol_type = other DNA
taaaaacaacacaaatatcctaccctaaaaataaaaacaaaaactaacca

SEQ ID NO: 45020 - DNA, 50 bp, synthetic construct
  source 1..50: mol_type = other DNA
taaaaacgacgcaaatatcctaccctaaaaataaaaacgaaaactaaccg

SEQ ID NO: 45021 - DNA, 50 bp, synthetic construct
  source 1..50: mol_type = other DNA
atcctaccctaaaaataaaaacaaaaactaaccactccaatactatcaca

SEQ ID NO: 45022 - DNA, 50 bp, synthetic construct
  source 1..50: mol_type = other DNA
atcctaccctaaaaataaaaacgaaaactaaccgctccgatactatcgcg

SEQ ID NO: 45023 - DNA, 50 bp, synthetic construct
  source 1..50: mol_type = other DNA
acatacacaaaaaaacaataaataaaacacaactcatcacaaaaaaaaca

SEQ ID NO: 45024 - DNA, 50 bp, synthetic construct
  source 1..50: mol_type = other DNA
gcgtacgcaaaaaaacgataaataaaacgcgactcgtcacgaaaaaaacg

SEQ ID NO: 45025 - DNA, 50 bp, synthetic construct
  source 1..50: mol_type = other DNA
cacaaaaaaacaataaataaaacacaactcatcacaaaaaaaacaaaaca

SEQ ID NO: 45026 - DNA, 50 bp, synthetic construct
  source 1..50: mol_type = other DNA
cgcaaaaaaacgataaataaaacgcgactcgtcacgaaaaaaacgaaacg

SEQ ID NO: 45027 - DNA, 50 bp, synthetic construct
  source 1..50: mol_type = other DNA
caaaaaaacaataaataaaacacaactcatcacaaaaaaaacaaaacaca

SEQ ID NO: 45028 - DNA, 50 bp, synthetic construct
  source 1..50: mol_type = other DNA
caaaaaaacgataaataaaacgcgactcgtcacgaaaaaaacgaaacgcg

SEQ ID NO: 45029 - DNA, 50 bp, synthetic construct
  source 1..50: mol_type = other DNA
ccaacctctaaaatttaaaatacaaataacaatcaaaacttcaaaaacca

SEQ ID NO: 45030 - DNA, 50 bp, synthetic construct
  source 1..50: mol_type = other DNA
ccaacctctaaaatttaaaatacgaataacgatcgaaacttcgaaaaccg

SEQ ID NO: 45031 - DNA, 50 bp, synthetic construct
  source 1..50: mol_type = other DNA
actctcctcaaccaacaaataacaatttcaaattcacacaaaaacaaaca

SEQ ID NO: 45032 - DNA, 50 bp, synthetic construct
  source 1..50: mol_type = other DNA
actctcctcaaccaacaaataacaatttcgaattcacacgaaaacgaacg

SEQ ID NO: 45033 - DNA, 50 bp, synthetic construct
  source 1..50: mol_type = other DNA
catataaacccaaaactaccacttactaactaaaaaaaaccactacaaca

SEQ ID NO: 45034 - DNA, 50 bp, synthetic construct
  source 1..50: mol_type = other DNA
cgtataaacccgaaactaccacttactaactaaaaaaaaccgctacgacg

SEQ ID NO: 45035 - DNA, 50 bp, synthetic construct
  source 1..50: mol_type = other DNA
aaatcttacttcccaaaaaaaaataacaccctcctctaaaaaataaaaca

SEQ ID NO: 45036 - DNA, 50 bp, synthetic construct
  source 1..50: mol_type = other DNA
aaatcttacttcccgaaaaaaaataacgccctcctctaaaaaataaaacg

SEQ ID NO: 45037 - DNA, 50 bp, synthetic construct
  source 1..50: mol_type = other DNA
cccaaaaaacaatacaaaataaaaacaaaaccaaacaaactaaaaacaca

SEQ ID NO: 45038 - DNA, 50 bp, synthetic construct
  source 1..50: mol_type = other DNA
cccgaaaaacgatacgaaataaaaacgaaaccgaacgaactaaaaacgcg

SEQ ID NO: 45039 - DNA, 50 bp, synthetic construct
  source 1..50: mol_type = other DNA
caaaaaacaatacaaaataaaaacaaaaccaaacaaactaaaaacacaca

SEQ ID NO: 45040 - DNA, 50 bp, synthetic construct
  source 1..50: mol_type = other DNA
cgaaaaacgatacgaaataaaaacgaaaccgaacgaactaaaaacgcgcg

SEQ ID NO: 45041 - DNA, 50 bp, synthetic construct
  source 1..50: mol_type = other DNA
ccccactcaaaaaatacaacaaaaacatacaaaaaaaacaactaccacca

SEQ ID NO: 45042 - DNA, 50 bp, synthetic construct
  source 1..50: mol_type = other DNA
ccccactcgaaaaatacaacgaaaacatacgaaaaaaacaactaccgccg

SEQ ID NO: 45043 - DNA, 50 bp, synthetic construct
  source 1..50: mol_type = other DNA
tccccccactcaaaaaatacaacaaaaacatacaaaaaaaacaactacca

SEQ ID NO: 45044 - DNA, 50 bp, synthetic construct
  source 1..50: mol_type = other DNA
tccccccactcgaaaaatacaacgaaaacatacgaaaaaaacaactaccg

SEQ ID NO: 45045 - DNA, 50 bp, synthetic construct
  source 1..50: mol_type = other DNA
cttaaacttatactcttcccactcaatataaacactctcaatatcaacca

SEQ ID NO: 45046 - DNA, 50 bp, synthetic construct
  source 1..50: mol_type = other DNA
cttaaacttatactcttcccgctcgatataaacactctcgatatcaaccg

SEQ ID NO: 45047 - DNA, 50 bp, synthetic construct
  source 1..50: mol_type = other DNA
tctcatccatcaattttaaatactccttaaacttatactcttcccactca

SEQ ID NO: 45048 - DNA, 50 bp, synthetic construct
  source 1..50: mol_type = other DNA
tctcatccatcgattttaaatactccttaaacttatactcttcccgctcg

SEQ ID NO: 45049 - DNA, 50 bp, synthetic construct
  source 1..50: mol_type = other DNA
atacccacatcaaacaaaaaaaatacaaactcaaaaaatactcaaaatca

SEQ ID NO: 45050 - DNA, 50 bp, synthetic construct
  source 1..50: mol_type = other DNA
atacccacatcgaacgaaaaaaatacaaactcaaaaaatactcaaaatcg

SEQ ID NO: 45051 - DNA, 50 bp, synthetic construct
  source 1..50: mol_type = other DNA
ctcaaaaaatactcaaaatcaataaataaaaaccaactaaataaaataca

SEQ ID NO: 45052 - DNA, 50 bp, synthetic construct
  source 1..50: mol_type = other DNA
ctcaaaaaatactcaaaatcgataaataaaaaccgactaaataaaatacg

SEQ ID NO: 45053 - DNA, 50 bp, synthetic construct
  source 1..50: mol_type = other DNA
aaaaactactaaaatcctccccactacaaaaaaccaaaaaacaaaaccca

SEQ ID NO: 45054 - DNA, 50 bp, synthetic construct
  source 1..50: mol_type = other DNA
aaaaactactaaaatcctccccgctacaaaaaaccgaaaaacaaaacccg

SEQ ID NO: 45055 - DNA, 50 bp, synthetic construct
  source 1..50: mol_type = other DNA
aaacaaaaaaaacaatactaataaaaaaacacaaacccaaaatatcctca

SEQ ID NO: 45056 - DNA, 50 bp, synthetic construct
  source 1..50: mol_type = other DNA
aaacgaaaaaaacgatactaataaaaaaacacaaacccaaaatatcctcg

SEQ ID NO: 45057 - DNA, 50 bp, synthetic construct
  source 1..50: mol_type = other DNA
caacaacctacaaacctcatattaattaactactacaaacaaaaaaaaca

SEQ ID NO: 45058 - DNA, 50 bp, synthetic construct
  source 1..50: mol_type = other DNA
cgacaacctacaaacctcgtattaattaactactacaaacgaaaaaaacg

SEQ ID NO: 45059 - DNA, 50 bp, synthetic construct
  source 1..50: mol_type = other DNA
aactataacaacactataactacaaaaacaacaccacatatataacaaca

SEQ ID NO: 45060 - DNA, 50 bp, synthetic construct
  source 1..50: mol_type = other DNA
aactataacgacactataactacgaaaacaacgccgcgtatataacgacg

SEQ ID NO: 45061 - DNA, 50 bp, synthetic construct
  source 1..50: mol_type = other DNA
caatatcttaatctcaactcattataacctccacctcctaaattcaaaca

SEQ ID NO: 45062 - DNA, 50 bp, synthetic construct
  source 1..50: mol_type = other DNA
caatatcttaatctcgactcattataacctccgcctcctaaattcaaacg

SEQ ID NO: 45063 - DNA, 50 bp, synthetic construct
  source 1..50: mol_type = other DNA
ttcaaaccattctcctatctcaactttccaaacaactaaaattacaaaca

SEQ ID NO: 45064 - DNA, 50 bp, synthetic construct
  source 1..50: mol_type = other DNA
ttcaaaccattctcctatctcaactttccgaacaactaaaattacaaacg

SEQ ID NO: 45065 - DNA, 50 bp, synthetic construct
  source 1..50: mol_type = other DNA
aaaaattacaataaactaaaatcataccactatactccaaactccaacca

SEQ ID NO: 45066 - DNA, 50 bp, synthetic construct
  source 1..50: mol_type = other DNA
aaaaattacaataaactaaaatcgtaccgctatactccaaactccaaccg

SEQ ID NO: 45067 - DNA, 50 bp, synthetic construct
  source 1..50: mol_type = other DNA
ttacaataaactaaaatcataccactatactccaaactccaaccaaaaca

SEQ ID NO: 45068 - DNA, 50 bp, synthetic construct
  source 1..50: mol_type = other DNA
ttacaataaactaaaatcgtaccgctatactccaaactccaaccgaaacg

SEQ ID NO: 45069 - DNA, 50 bp, synthetic construct
  source 1..50: mol_type = other DNA
caaataaactataattaacctactcatctaaaaaactacaacactaacca

SEQ ID NO: 45070 - DNA, 50 bp, synthetic construct
  source 1..50: mol_type = other DNA
cgaataaactataattaacctactcgtctaaaaaactacaacgctaaccg

SEQ ID NO: 45071 - DNA, 50 bp, synthetic construct
  source 1..50: mol_type = other DNA
caattaacattacaactccttaaacaaataaactaaccacaacccaccca

SEQ ID NO: 45072 - DNA, 50 bp, synthetic construct
  source 1..50: mol_type = other DNA
cgattaacgttacaactccttaaacgaataaactaaccacaacccacccg

SEQ ID NO: 45073 - DNA, 50 bp, synthetic construct
  source 1..50: mol_type = other DNA
accactcaataccacatactattcaaaacccaaaaactaaaataaataca

SEQ ID NO: 45074 - DNA, 50 bp, synthetic construct
  source 1..50: mol_type = other DNA
gccgctcaataccgcatactattcaaaacccaaaaactaaaataaatacg

SEQ ID NO: 45075 - DNA, 50 bp, synthetic construct
  source 1..50: mol_type = other DNA
taccataaaaattaaaaataaacaactacccaaatccaaaataaccacca

SEQ ID NO: 45076 - DNA, 50 bp, synthetic construct
  source 1..50: mol_type = other DNA
taccataaaaattaaaaataaacgactacccgaatccaaaataaccgccg

SEQ ID NO: 45077 - DNA, 50 bp, synthetic construct
  source 1..50: mol_type = other DNA
acaaaatcacctccctcccaaaacaataccataaaaattaaaaataaaca

SEQ ID NO: 45078 - DNA, 50 bp, synthetic construct
  source 1..50: mol_type = other DNA
acgaaatcgcctccctcccgaaacgataccataaaaattaaaaataaacg

SEQ ID NO: 45079 - DNA, 50 bp, synthetic construct
  source 1..50: mol_type = other DNA
aacacaaatttaaaaaacccaaaatacaaaatcacctccctcccaaaaca

SEQ ID NO: 45080 - DNA, 50 bp, synthetic construct
  source 1..50: mol_type = other DNA
aacacaaatttaaaaaacccaaaatacgaaatcgcctccctcccgaaacg

SEQ ID NO: 45081 - DNA, 50 bp, synthetic construct
  source 1..50: mol_type = other DNA
accaaaccccttttccctccacaaaatcttcaaaatctaatacaaacaca

SEQ ID NO: 45082 - DNA, 50 bp, synthetic construct
  source 1..50: mol_type = other DNA
accaaaccccttttccctccacaaaatcttcaaaatctaatacaaacgcg

SEQ ID NO: 45083 - DNA, 50 bp, synthetic construct
  source 1..50: mol_type = other DNA
tcctaaccaaaacccataatatccttaactcaaaccccaaactaaaacca

SEQ ID NO: 45084 - DNA, 50 bp, synthetic construct
  source 1..50: mol_type = other DNA
tcctaaccaaaacccataatatccttaactcaaaccccgaactaaaaccg

SEQ ID NO: 45085 - DNA, 50 bp, synthetic construct
  source 1..50: mol_type = other DNA
aatcataaccaaaacatatttactacacttcaatacacacaaacactaca

SEQ ID NO: 45086 - DNA, 50 bp, synthetic construct
  source 1..50: mol_type = other DNA
aatcgtaaccgaaacgtatttactacacttcgatacgcacaaacactacg

SEQ ID NO: 45087 - DNA, 50 bp, synthetic construct
  source 1..50: mol_type = other DNA
aaaataacctaacaatcataaccaaaacatatttactacacttcaataca

SEQ ID NO: 45088 - DNA, 50 bp, synthetic construct
  source 1..50: mol_type = other DNA
aaaataacctaacaatcgtaaccgaaacgtatttactacacttcgatacg

SEQ ID NO: 45089 - DNA, 50 bp, synthetic construct
  source 1..50: mol_type = other DNA
caaaaaattaacaccacaatacctatacacaccaaaatacaacaaacaca

SEQ ID NO: 45090 - DNA, 50 bp, synthetic construct
  source 1..50: mol_type = other DNA
caaaaaattaacaccgcaatacctatacgcaccgaaatacaacaaacacg

SEQ ID NO: 45091 - DNA, 50 bp, synthetic construct
  source 1..50: mol_type = other DNA
aatataacacaattcaacaattctcaaatacaaacacctacacaaataca

SEQ ID NO: 45092 - DNA, 50 bp, synthetic construct
  source 1..50: mol_type = other DNA
aatataacacgattcgacaattctcaaatacgaacgcctacgcaaatacg

SEQ ID NO: 45093 - DNA, 50 bp, synthetic construct
  source 1..50: mol_type = other DNA
aaacaaactaacacccaaaaacacactcatccctttacaaaacaaattca

SEQ ID NO: 45094 - DNA, 50 bp, synthetic construct
  source 1..50: mol_type = other DNA
aaacaaactaacgcccaaaaacgcgctcatccctttacaaaacaaattcg

SEQ ID NO: 45095 - DNA, 50 bp, synthetic construct
  source 1..50: mol_type = other DNA
tacaaaaaaataaacacacctctaaacaccaacctactctcaactaaaca

SEQ ID NO: 45096 - DNA, 50 bp, synthetic construct
  source 1..50: mol_type = other DNA
tacaaaaaaataaacgcgcctctaaacgccaacctactctcaactaaacg

SEQ ID NO: 45097 - DNA, 50 bp, synthetic construct
  source 1..50: mol_type = other DNA
caccaaatctaaaaaactctcaaaactaccatccctaaaaaacccaaaca

SEQ ID NO: 45098 - DNA, 50 bp, synthetic construct
  source 1..50: mol_type = other DNA
caccgaatctaaaaaactctcgaaactaccatccctaaaaaacccaaacg

SEQ ID NO: 45099 - DNA, 50 bp, synthetic construct
  source 1..50: mol_type = other DNA
ccaaaaataacaactccaaaaaccccctaaacccaataccttacaaaaca

SEQ ID NO: 45100 - DNA, 50 bp, synthetic construct
  source 1..50: mol_type = other DNA
ccaaaaataacaactccgaaaaccccctaaacccgataccttacaaaacg

SEQ ID NO: 45101 - DNA, 50 bp, synthetic construct
  source 1..50: mol_type = other DNA
aaaaacacataaccaaactcaatacaaaaaactaaaacatccaaaaaaca

SEQ ID NO: 45102 - DNA, 50 bp, synthetic construct
  source 1..50: mol_type = other DNA
aaaaacgcgtaaccaaactcaatacgaaaaactaaaacgtccgaaaaacg

SEQ ID NO: 45103 - DNA, 50 bp, synthetic construct
  source 1..50: mol_type = other DNA
aacacctaaaaacacataaccaaactcaatacaaaaaactaaaacatcca

SEQ ID NO: 45104 - DNA, 50 bp, synthetic construct
  source 1..50: mol_type = other DNA
aacgcctaaaaacgcgtaaccaaactcaatacgaaaaactaaaacgtccg

SEQ ID NO: 45105 - DNA, 50 bp, synthetic construct
  source 1..50: mol_type = other DNA
aaaaaacacctaaaaacacataaccaaactcaatacaaaaaactaaaaca

SEQ ID NO: 45106 - DNA, 50 bp, synthetic construct
  source 1..50: mol_type = other DNA
aaaaaacgcctaaaaacgcgtaaccaaactcaatacgaaaaactaaaacg

SEQ ID NO: 45107 - DNA, 50 bp, synthetic construct
  source 1..50: mol_type = other DNA
aaacccaaaacataaaaaacacctaaaaacacataaccaaactcaataca

SEQ ID NO: 45108 - DNA, 50 bp, synthetic construct
  source 1..50: mol_type = other DNA
aaacccaaaacgtaaaaaacgcctaaaaacgcgtaaccaaactcaatacg

SEQ ID NO: 45109 - DNA, 50 bp, synthetic construct
  source 1..50: mol_type = other DNA
tcataactacaaccctccaaaacccaaaacataaaaaacacctaaaaaca

SEQ ID NO: 45110 - DNA, 50 bp, synthetic construct
  source 1..50: mol_type = other DNA
tcataactacgaccctccgaaacccaaaacgtaaaaaacgcctaaaaacg

SEQ ID NO: 45111 - DNA, 50 bp, synthetic construct
  source 1..50: mol_type = other DNA
aacatttcactcataactacaaccctccaaaacccaaaacataaaaaaca

SEQ ID NO: 45112 - DNA, 50 bp, synthetic construct
  source 1..50: mol_type = other DNA
aacatttcactcataactacgaccctccgaaacccaaaacgtaaaaaacg

SEQ ID NO: 45113 - DNA, 50 bp, synthetic construct
  source 1..50: mol_type = other DNA
gtttttgatgtgaagaaagttggatattttatttatggttgtggtttttt

SEQ ID NO: 45114 - DNA, 50 bp, synthetic construct
  source 1..50: mol_type = other DNA
gttttcgatgtgaagaaagttggatattttatttatggttgcggtttttc

SEQ ID NO: 45115 - DNA, 50 bp, synthetic construct
  source 1..50: mol_type = other DNA
aaacaatatccccaatataaaaaaaactaaacatttcactcataactaca

SEQ ID NO: 45116 - DNA, 50 bp, synthetic construct
  source 1..50: mol_type = other DNA
aaacgatatccccgatataaaaaaaactaaacatttcactcataactacg

SEQ ID NO: 45117 - DNA, 50 bp, synthetic construct
  source 1..50: mol_type = other DNA
ccaataaaaacctaaacatccccctaatctcaaaaaacaaaaacaactca

SEQ ID NO: 45118 - DNA, 50 bp, synthetic construct
  source 1..50: mol_type = other DNA
ccgataaaaacctaaacgtccccctaatctcaaaaaacgaaaacgactcg

SEQ ID NO: 45119 - DNA, 50 bp, synthetic construct
  source 1..50: mol_type = other DNA
ataaaactcaaactccctactaaaattaacaaaaaaaacctccctcaaca

SEQ ID NO: 45120 - DNA, 50 bp, synthetic construct
  source 1..50: mol_type = other DNA
ataaaactcgaactccctactaaaattaacaaaaaaaacctccctcgacg

SEQ ID NO: 45121 - DNA, 50 bp, synthetic construct
  source 1..50: mol_type = other DNA
aaactcaaactccctactaaaattaacaaaaaaaacctccctcaacaaca

SEQ ID NO: 45122 - DNA, 50 bp, synthetic construct
  source 1..50: mol_type = other DNA
aaactcgaactccctactaaaattaacaaaaaaaacctccctcgacgacg

SEQ ID NO: 45123 - DNA, 50 bp, synthetic construct
  source 1..50: mol_type = other DNA
ataaaaaattacaaactccaaactaaacctacccactcccaacaactcca

SEQ ID NO: 45124 - DNA, 50 bp, synthetic construct
  source 1..50: mol_type = other DNA
ataaaaaattacgaactccaaactaaacctacccactcccgacaactccg

SEQ ID NO: 45125 - DNA, 50 bp, synthetic construct
  source 1..50: mol_type = other DNA
ataatccaactaatttaataaacacaaatacccaccataaaaaaaaatca

SEQ ID NO: 45126 - DNA, 50 bp, synthetic construct
  source 1..50: mol_type = other DNA
ataatccgactaatttaataaacacaaatacccgccataaaaaaaaatcg

SEQ ID NO: 45127 - DNA, 50 bp, synthetic construct
  source 1..50: mol_type = other DNA
taaaaacaaacaacaacacactaaacctactaccaccaaatctacccaca

SEQ ID NO: 45128 - DNA, 50 bp, synthetic construct
  source 1..50: mol_type = other DNA
taaaaacaaacaacaacacgctaaacctactaccaccaaatctacccgcg

SEQ ID NO: 45129 - DNA, 50 bp, synthetic construct
  source 1..50: mol_type = other DNA
cattattcttatcaatccacataaaccacacttcctcttctaaatactca

SEQ ID NO: 45130 - DNA, 50 bp, synthetic construct
  source 1..50: mol_type = other DNA
cgttattcttatcaatccacgtaaaccacacttcctcttctaaatactcg

SEQ ID NO: 45131 - DNA, 50 bp, synthetic construct
  source 1..50: mol_type = other DNA
aaacacctataataactaaacacattctcatcataaacattaccaaccca

SEQ ID NO: 45132 - DNA, 50 bp, synthetic construct
  source 1..50: mol_type = other DNA
aaacacctataataactaaacacattctcgtcgtaaacgttaccgacccg

SEQ ID NO: 45133 - DNA, 50 bp, synthetic construct
  source 1..50: mol_type = other DNA
aaacaaaacacctataataactaaacacattctcatcataaacattacca

SEQ ID NO: 45134 - DNA, 50 bp, synthetic construct
  source 1..50: mol_type = other DNA
aaacgaaacacctataataactaaacacattctcgtcgtaaacgttaccg

SEQ ID NO: 45135 - DNA, 50 bp, synthetic construct
  source 1..50: mol_type = other DNA
atactaataccaacaaaaaactcaaactcaactaccaacactacctaaca

SEQ ID NO: 45136 - DNA, 50 bp, synthetic construct
  source 1..50: mol_type = other DNA
atactaataccaacaaaaaactcaaactcaactaccgacgctacctaacg

SEQ ID NO: 45137 - DNA, 50 bp, synthetic construct
  source 1..50: mol_type = other DNA
tcatatctaacccacaaaccacatcccctaaatcacataactcttaaaca

SEQ ID NO: 45138 - DNA, 50 bp, synthetic construct
  source 1..50: mol_type = other DNA
tcatatctaacccacaaaccacgtcccctaaatcacataactcttaaacg

SEQ ID NO: 45139 - DNA, 50 bp, synthetic construct
  source 1..50: mol_type = other DNA
aaccacatcccctaaatcacataactcttaaacaaatatccccaaacaca

SEQ ID NO: 45140 - DNA, 50 bp, synthetic construct
  source 1..50: mol_type = other DNA
aaccacgtcccctaaatcacataactcttaaacgaatatccccaaacacg

SEQ ID NO: 45141 - DNA, 50 bp, synthetic construct
  source 1..50: mol_type = other DNA
aaccaaaacttaaacacttacctacaacaacaaataacacaaacctttca

SEQ ID NO: 45142 - DNA, 50 bp, synthetic construct
  source 1..50: mol_type = other DNA
aaccgaaacttaaacgcttacctacgacaacgaataacacaaacctttcg

SEQ ID NO: 45143 - DNA, 50 bp, synthetic construct
  source 1..50: mol_type = other DNA
ataaacaaaaccaaacaaaaccaaaacttaaacacttacctacaacaaca

SEQ ID NO: 45144 - DNA, 50 bp, synthetic construct
  source 1..50: mol_type = other DNA
ataaacgaaaccaaacgaaaccgaaacttaaacgcttacctacgacaacg

SEQ ID NO: 45145 - DNA, 50 bp, synthetic construct
  source 1..50: mol_type = other DNA
taaccaataaacaaaaccaaacaaaaccaaaacttaaacacttacctaca

SEQ ID NO: 45146 - DNA, 50 bp, synthetic construct
  source 1..50: mol_type = other DNA
taaccaataaacgaaaccaaacgaaaccgaaacttaaacgcttacctacg

SEQ ID NO: 45147 - DNA, 50 bp, synthetic construct
  source 1..50: mol_type = other DNA
caacattttcttaaactctataaaaaataaccaataaacaaaaccaaaca

SEQ ID NO: 45148 - DNA, 50 bp, synthetic construct
  source 1..50: mol_type = other DNA
cgacgttttcttaaactctataaaaaataaccaataaacgaaaccaaacg

SEQ ID NO: 45149 - DNA, 50 bp, synthetic construct
  source 1..50: mol_type = other DNA
caaccaataccaacattttcttaaactctataaaaaataaccaataaaca

SEQ ID NO: 45150 - DNA, 50 bp, synthetic construct
  source 1..50: mol_type = other DNA
caaccgataccgacgttttcttaaactctataaaaaataaccaataaacg

SEQ ID NO: 45151 - DNA, 50 bp, synthetic construct
  source 1..50: mol_type = other DNA
ccccatttaatctcatccactaaccattcctcacaaaacttaaaaaaaca

SEQ ID NO: 45152 - DNA, 50 bp, synthetic construct
  source 1..50: mol_type = other DNA
ccccgtttaatctcgtccactaaccattcctcacaaaacttaaaaaaacg

SEQ ID NO: 45153 - DNA, 50 bp, synthetic construct
  source 1..50: mol_type = other DNA
cactaaccattcctcacaaaacttaaaaaaacaccaataccaactaacca

SEQ ID NO: 45154 - DNA, 50 bp, synthetic construct
  source 1..50: mol_type = other DNA
cactaaccattcctcacaaaacttaaaaaaacgccgataccgactaaccg

SEQ ID NO: 45155 - DNA, 50 bp, synthetic construct
  source 1..50: mol_type = other DNA
ataaacatacacaactttataaacacaccactactctccatataaaaaca

SEQ ID NO: 45156 - DNA, 50 bp, synthetic construct
  source 1..50: mol_type = other DNA
ataaacatacgcgactttataaacgcaccgctactctccgtataaaaacg

SEQ ID NO: 45157 - DNA, 50 bp, synthetic construct
  source 1..50: mol_type = other DNA
ctaaaaaataaaaacatactcataaatccaattaattaacaattaaccca

SEQ ID NO: 45158 - DNA, 50 bp, synthetic construct
  source 1..50: mol_type = other DNA
ctaaaaaataaaaacatactcgtaaatccaattaattaacaattaacccg

SEQ ID NO: 45159 - DNA, 50 bp, synthetic construct
  source 1..50: mol_type = other DNA
acatactattcctatacccaaaaaatactacccacatttcttaaacacca

SEQ ID NO: 45160 - DNA, 50 bp, synthetic construct
  source 1..50: mol_type = other DNA
acatactattcctatacccaaaaaatactacccgcgtttcttaaacaccg

SEQ ID NO: 45161 - DNA, 50 bp, synthetic construct
  source 1..50: mol_type = other DNA
aaaaaaaactcactaaaaaaacttctcacacttaataaaaccccccatca

SEQ ID NO: 45162 - DNA, 50 bp, synthetic construct
  source 1..50: mol_type = other DNA
gaaaaaaactcgctaaaaaaacttctcgcacttaataaaaccccccgtcg

SEQ ID NO: 45163 - DNA, 50 bp, synthetic construct
  source 1..50: mol_type = other DNA
acctcccaaaaaacaaactaaaaaactaacaaaaaaaccaataaacaaca

SEQ ID NO: 45164 - DNA, 50 bp, synthetic construct
  source 1..50: mol_type = other DNA
acctcccaaaaaacaaactaaaaaactaacgaaaaaaccgataaacgacg

SEQ ID NO: 45165 - DNA, 50 bp, synthetic construct
  source 1..50: mol_type = other DNA
ccaaaaaacaaactaaaaaactaacaaaaaaaccaataaacaacaacaca

SEQ ID NO: 45166 - DNA, 50 bp, synthetic construct
  source 1..50: mol_type = other DNA
ccaaaaaacaaactaaaaaactaacgaaaaaaccgataaacgacgacgcg

SEQ ID NO: 45167 - DNA, 50 bp, synthetic construct
  source 1..50: mol_type = other DNA
aaaacaaactaaaaaactaacaaaaaaaccaataaacaacaacacaaaca

SEQ ID NO: 45168 - DNA, 50 bp, synthetic construct
  source 1..50: mol_type = other DNA
aaaacaaactaaaaaactaacgaaaaaaccgataaacgacgacgcgaacg

SEQ ID NO: 45169 - DNA, 50 bp, synthetic construct
  source 1..50: mol_type = other DNA
actatttaacaaaaacttcaacacaaccaacatttctattaccccaacca

SEQ ID NO: 45170 - DNA, 50 bp, synthetic construct
  source 1..50: mol_type = other DNA
actatttaacaaaaacttcaacgcaaccgacgtttctattaccccgaccg

SEQ ID NO: 45171 - DNA, 50 bp, synthetic construct
  source 1..50: mol_type = other DNA
caaaactatttaacaaaaacttcaacacaaccaacatttctattacccca

SEQ ID NO: 45172 - DNA, 50 bp, synthetic construct
  source 1..50: mol_type = other DNA
cgaaactatttaacaaaaacttcaacgcaaccgacgtttctattaccccg

SEQ ID NO: 45173 - DNA, 50 bp, synthetic construct
  source 1..50: mol_type = other DNA
ttactataaccacaaccccaacacaaaactatttaacaaaaacttcaaca

SEQ ID NO: 45174 - DNA, 50 bp, synthetic construct
  source 1..50: mol_type = other DNA
ttactataaccacaaccccgacgcgaaactatttaacaaaaacttcaacg

SEQ ID NO: 45175 - DNA, 50 bp, synthetic construct
  source 1..50: mol_type = other DNA
caaaataacaaaaacaccaactacactaaaattcttattaaacaacccca

SEQ ID NO: 45176 - DNA, 50 bp, synthetic construct
  source 1..50: mol_type = other DNA
cgaaataacaaaaacgccgactacgctaaaattcttattaaacaaccccg

SEQ ID NO: 45177 - DNA, 50 bp, synthetic construct
  source 1..50: mol_type = other DNA
aaataacaaaaacaccaactacactaaaattcttattaaacaaccccaca

SEQ ID NO: 45178 - DNA, 50 bp, synthetic construct
  source 1..50: mol_type = other DNA
aaataacaaaaacgccgactacgctaaaattcttattaaacaaccccgcg

SEQ ID NO: 45179 - DNA, 50 bp, synthetic construct
  source 1..50: mol_type = other DNA
tcttattaaacaaccccacatcaaaactataatcacaataaaacaaaaca

SEQ ID NO: 45180 - DNA, 50 bp, synthetic construct
  source 1..50: mol_type = other DNA
tcttattaaacaaccccgcgtcgaaactataatcacaataaaacaaaacg

SEQ ID NO: 45181 - DNA, 50 bp, synthetic construct
  source 1..50: mol_type = other DNA
aaacaaccccacatcaaaactataatcacaataaaacaaaacaatcttca

SEQ ID NO: 45182 - DNA, 50 bp, synthetic construct
  source 1..50: mol_type = other DNA
aaacaaccccgcgtcgaaactataatcacaataaaacaaaacgatcttcg

SEQ ID NO: 45183 - DNA, 50 bp, synthetic construct
  source 1..50: mol_type = other DNA
aaaaaaaacttaatccatctccacaccaacatatcctctcctacaacaca

SEQ ID NO: 45184 - DNA, 50 bp, synthetic construct
  source 1..50: mol_type = other DNA
aaaaaaaacttaatccatctccacaccaacatatcctctcctacaacgcg

SEQ ID NO: 45185 - DNA, 50 bp, synthetic construct
  source 1..50: mol_type = other DNA
aaaaccaaactataaaattcctaacctccaacaaatcccaaatccaaaca

SEQ ID NO: 45186 - DNA, 50 bp, synthetic construct
  source 1..50: mol_type = other DNA
aaaaccgaactataaaattcctaacctccaacgaatcccgaatccaaacg

SEQ ID NO: 45187 - DNA, 50 bp, synthetic construct
  source 1..50: mol_type = other DNA
aaacatatctaaaaccaaactataaaattcctaacctccaacaaatccca

SEQ ID NO: 45188 - DNA, 50 bp, synthetic construct
  source 1..50: mol_type = other DNA
aaacgtatctaaaaccgaactataaaattcctaacctccaacgaatcccg

SEQ ID NO: 45189 - DNA, 50 bp, synthetic construct
  source 1..50: mol_type = other DNA
acacataaaacatatctaaaaccaaactataaaattcctaacctccaaca

SEQ ID NO: 45190 - DNA, 50 bp, synthetic construct
  source 1..50: mol_type = other DNA
acgcataaaacgtatctaaaaccgaactataaaattcctaacctccaacg

SEQ ID NO: 45191 - DNA, 50 bp, synthetic construct
  source 1..50: mol_type = other DNA
aaaccccatccctctcattacaaaaaacacataaaacatatctaaaacca

SEQ ID NO: 45192 - DNA, 50 bp, synthetic construct
  source 1..50: mol_type = other DNA
aaaccccgtccctctcattacaaaaaacgcataaaacgtatctaaaaccg

SEQ ID NO: 45193 - DNA, 50 bp, synthetic construct
  source 1..50: mol_type = other DNA
caataccaaacaaaaccccatccctctcattacaaaaaacacataaaaca

SEQ ID NO: 45194 - DNA, 50 bp, synthetic construct
  source 1..50: mol_type = other DNA
caataccaaacaaaaccccgtccctctcattacaaaaaacgcataaaacg

SEQ ID NO: 45195 - DNA, 50 bp, synthetic construct
  source 1..50: mol_type = other DNA
tcattaaaaaccaaaaactccacaactcaatcccaaacacacttcataca

SEQ ID NO: 45196 - DNA, 50 bp, synthetic construct
  source 1..50: mol_type = other DNA
tcgttaaaaaccaaaaactccacaactcgatcccaaacacgcttcatacg

SEQ ID NO: 45197 - DNA, 50 bp, synthetic construct
  source 1..50: mol_type = other DNA
atatttaaatcaataaaaattaaaaaatcatttctctataacccaaaaca

SEQ ID NO: 45198 - DNA, 50 bp, synthetic construct
  source 1..50: mol_type = other DNA
atatttaaatcaataaaaattaaaaaatcatttctctataacccaaaacg

SEQ ID NO: 45199 - DNA, 50 bp, synthetic construct
  source 1..50: mol_type = other DNA
acaaaaaacaacaatacatcctaaaccaacacaaaaaaaaaccctaaaca

SEQ ID NO: 45200 - DNA, 50 bp, synthetic construct
  source 1..50: mol_type = other DNA
acgaaaaacaacaatacgtcctaaaccgacgcaaaaaaaaaccctaaacg

SEQ ID NO: 45201 - DNA, 50 bp, synthetic construct
  source 1..50: mol_type = other DNA
taaaaataaacaaaccctcaacaccacaaaaaacaaaaaacaacaataca

SEQ ID NO: 45202 - DNA, 50 bp, synthetic construct
  source 1..50: mol_type = other DNA
taaaaataaacaaaccctcaacgccgcaaaaaacgaaaaacaacaatacg

SEQ ID NO: 45203 - DNA, 50 bp, synthetic construct
  source 1..50: mol_type = other DNA
taaacatcctttaaataaaaataaacaaaccctcaacaccacaaaaaaca

SEQ ID NO: 45204 - DNA, 50 bp, synthetic construct
  source 1..50: mol_type = other DNA
taaacatcctttaaataaaaataaacaaaccctcaacgccgcaaaaaacg

SEQ ID NO: 45205 - DNA, 50 bp, synthetic construct
  source 1..50: mol_type = other DNA
tcatcttcctaaacatcctttaaataaaaataaacaaaccctcaacacca

SEQ ID NO: 45206 - DNA, 50 bp, synthetic construct
  source 1..50: mol_type = other DNA
tcgtcttcctaaacatcctttaaataaaaataaacaaaccctcaacgccg

SEQ ID NO: 45207 - DNA, 50 bp, synthetic construct
  source 1..50: mol_type = other DNA
acactaactctctcaacttctactctaaaccaacctaaaactactactca

SEQ ID NO: 45208 - DNA, 50 bp, synthetic construct
  source 1..50: mol_type = other DNA
acgctaactctctcgacttctactctaaaccaacctaaaactactactcg

SEQ ID NO: 45209 - DNA, 50 bp, synthetic construct
  source 1..50: mol_type = other DNA
aaaacctacaataatatccaaccctccacaacttcctaaataaaaaacca

SEQ ID NO: 45210 - DNA, 50 bp, synthetic construct
  source 1..50: mol_type = other DNA
aaaacctacgataatatccgaccctccgcgacttcctaaataaaaaaccg

SEQ ID NO: 45211 - DNA, 50 bp, synthetic construct
  source 1..50: mol_type = other DNA
tacccaaaaaaccacaaaaaaccaaatatcaccataaaccccaaaaatca

SEQ ID NO: 45212 - DNA, 50 bp, synthetic construct
  source 1..50: mol_type = other DNA
tacccaaaaaaccgcgaaaaaccgaatatcaccgtaaaccccaaaaatcg

SEQ ID NO: 45213 - DNA, 50 bp, synthetic construct
  source 1..50: mol_type = other DNA
aaaaatcacataaaccaaacccaaaaccaactaaaaaaaccaaaactcca

SEQ ID NO: 45214 - DNA, 50 bp, synthetic construct
  source 1..50: mol_type = other DNA
aaaaatcgcgtaaaccgaacccgaaaccgactaaaaaaaccaaaactccg

SEQ ID NO: 45215 - DNA, 50 bp, synthetic construct
  source 1..50: mol_type = other DNA
aaaaaacaattacaaaaaaaaacccaattacacaaaaatacaccactaca

SEQ ID NO: 45216 - DNA, 50 bp, synthetic construct
  source 1..50: mol_type = other DNA
gaaaaacgattacgaaaaaaaacccgattacgcgaaaatacgccgctacg

SEQ ID NO: 45217 - DNA, 50 bp, synthetic construct
  source 1..50: mol_type = other DNA
aaaacccaaccacaaaacaaaaaacaattacaaaaaaaaacccaattaca

SEQ ID NO: 45218 - DNA, 50 bp, synthetic construct
  source 1..50: mol_type = other DNA
aaaacccgaccgcgaaacgaaaaacgattacgaaaaaaaacccgattacg

SEQ ID NO: 45219 - DNA, 50 bp, synthetic construct
  source 1..50: mol_type = other DNA
tacctaaaaccccctcatcaaaaaaattccaattaaacaaaaccaatcca

SEQ ID NO: 45220 - DNA, 50 bp, synthetic construct
  source 1..50: mol_type = other DNA
tacctaaaaccccctcatcgaaaaaattccaattaaacgaaaccaatccg

SEQ ID NO: 45221 - DNA, 50 bp, synthetic construct
  source 1..50: mol_type = other DNA
atcccctttcacaacaaccaaaacttctaaaatttactttactaactcca

SEQ ID NO: 45222 - DNA, 50 bp, synthetic construct
  source 1..50: mol_type = other DNA
atcccctttcgcaacaaccaaaacttctaaaatttactttactaactccg

SEQ ID NO: 45223 - DNA, 50 bp, synthetic construct
  source 1..50: mol_type = other DNA
aaacaaaaaaataaacaaaaaacctcctacaaacctccttaacaaatcca

SEQ ID NO: 45224 - DNA, 50 bp, synthetic construct
  source 1..50: mol_type = other DNA
aaacaaaaaaataaacaaaaaacctcctacaaacctccttaacaaatccg

SEQ ID NO: 45225 - DNA, 50 bp, synthetic construct
  source 1..50: mol_type = other DNA
taatcctcaacaactccataactaacatttcccaaacaattacaacctca

SEQ ID NO: 45226 - DNA, 50 bp, synthetic construct
  source 1..50: mol_type = other DNA
taatcctcaacaactccgtaactaacgtttcccaaacaattacaacctcg

SEQ ID NO: 45227 - DNA, 50 bp, synthetic construct
  source 1..50: mol_type = other DNA
aaaaaacaaaaaattccaaaactataactacctaaaaaacaccaaccaca

SEQ ID NO: 45228 - DNA, 50 bp, synthetic construct
  source 1..50: mol_type = other DNA
aaaaaacgaaaaattccgaaactataactacctaaaaaacgccaaccacg

SEQ ID NO: 45229 - DNA, 50 bp, synthetic construct
  source 1..50: mol_type = other DNA
aacaaaacaccaactctaaaaacaatctcaaaacacctaaaaaaccaaca

SEQ ID NO: 45230 - DNA, 50 bp, synthetic construct
  source 1..50: mol_type = other DNA
aacgaaacgccaactctaaaaacaatctcgaaacacctaaaaaaccgacg

SEQ ID NO: 45231 - DNA, 50 bp, synthetic construct
  source 1..50: mol_type = other DNA
aaacctcacatctaattaatataaaaacaaccaataataaaaaaactaca

SEQ ID NO: 45232 - DNA, 50 bp, synthetic construct
  source 1..50: mol_type = other DNA
aaacctcacatctaattaatataaaaacgaccaataataaaaaaactacg

SEQ ID NO: 45233 - DNA, 50 bp, synthetic construct
  source 1..50: mol_type = other DNA
ctaattaatataaaaacaaccaataataaaaaaactacaaaaaaaaccca

SEQ ID NO: 45234 - DNA, 50 bp, synthetic construct
  source 1..50: mol_type = other DNA
ctaattaatataaaaacgaccaataataaaaaaactacgaaaaaaacccg

SEQ ID NO: 45235 - DNA, 50 bp, synthetic construct
  source 1..50: mol_type = other DNA
aaacaaccaataataaaaaaactacaaaaaaaacccacaaaaactataca

SEQ ID NO: 45236 - DNA, 50 bp, synthetic construct
  source 1..50: mol_type = other DNA
aaacgaccaataataaaaaaactacgaaaaaaacccgcaaaaactatacg

SEQ ID NO: 45237 - DNA, 50 bp, synthetic construct
  source 1..50: mol_type = other DNA
tatacataataccttcaaaactatatataacaccaaaaaaatcaaaaaca

SEQ ID NO: 45238 - DNA, 50 bp, synthetic construct
  source 1..50: mol_type = other DNA
tatacgtaataccttcaaaactatatataacaccgaaaaaatcaaaaacg

SEQ ID NO: 45239 - DNA, 50 bp, synthetic construct
  source 1..50: mol_type = other DNA
cctcaccacctaaatttccaaacctattttatcaaaccttttacctaaca

SEQ ID NO: 45240 - DNA, 50 bp, synthetic construct
  source 1..50: mol_type = other DNA
cctcaccacctaaatttccaaacctattttatcaaaccttttacctaacg

SEQ ID NO: 45241 - DNA, 50 bp, synthetic construct
  source 1..50: mol_type = other DNA
aaaggtttgataaaataggtttggaaatttaggtggtgaggaaaggatgt

SEQ ID NO: 45242 - DNA, 50 bp, synthetic construct
  source 1..50: mol_type = other DNA
aaaggtttgataaaataggtttggaaatttaggtggtgaggaaaggatgc

SEQ ID NO: 45243 - DNA, 50 bp, synthetic construct
  source 1..50: mol_type = other DNA
ccacctataatacaaataaaaacctaacaactaaacacacaacacacaca

SEQ ID NO: 45244 - DNA, 50 bp, synthetic construct
  source 1..50: mol_type = other DNA
ccacctataatacaaataaaaacctaacgactaaacacgcaacgcgcacg

SEQ ID NO: 45245 - DNA, 50 bp, synthetic construct
  source 1..50: mol_type = other DNA
acctccacctataatacaaataaaaacctaacaactaaacacacaacaca

SEQ ID NO: 45246 - DNA, 50 bp, synthetic construct
  source 1..50: mol_type = other DNA
acctccacctataatacaaataaaaacctaacgactaaacacgcaacgcg

SEQ ID NO: 45247 - DNA, 50 bp, synthetic construct
  source 1..50: mol_type = other DNA
aaaaaaatacaaaaacaaataactctacatacacactacatattcaacca

SEQ ID NO: 45248 - DNA, 50 bp, synthetic construct
  source 1..50: mol_type = other DNA
aaaaaaatacgaaaacaaataactctacgtacgcgctacgtattcaaccg

SEQ ID NO: 45249 - DNA, 50 bp, synthetic construct
  source 1..50: mol_type = other DNA
aaactacaaaacacaaacctaaaaccccaacaaccacaaccaaaaaaaca

SEQ ID NO: 45250 - DNA, 50 bp, synthetic construct
  source 1..50: mol_type = other DNA
aaactacgaaacgcgaacctaaaaccccaacaaccacaaccaaaaaaacg

SEQ ID NO: 45251 - DNA, 50 bp, synthetic construct
  source 1..50: mol_type = other DNA
tctatcttaaacactcccctaactataactactaaaaccctaaacccaca

SEQ ID NO: 45252 - DNA, 50 bp, synthetic construct
  source 1..50: mol_type = other DNA
tctatcttaaacgctcccctaactataactactaaaaccctaaacccgcg

SEQ ID NO: 45253 - DNA, 50 bp, synthetic construct
  source 1..50: mol_type = other DNA
aaaaaaatctctttcaaaaaacaccaaaacatatacacccaaatcctcca

SEQ ID NO: 45254 - DNA, 50 bp, synthetic construct
  source 1..50: mol_type = other DNA
aaaaaaatctctttcgaaaaacgccaaaacgtatacgcccgaatcctccg

SEQ ID NO: 45255 - DNA, 50 bp, synthetic construct
  source 1..50: mol_type = other DNA
tcctatcctatatacaaaaactcacaaaatccttcctaatcctaaactca

SEQ ID NO: 45256 - DNA, 50 bp, synthetic construct
  source 1..50: mol_type = other DNA
tcctatcctatatacgaaaactcacaaaatccttcctaatcctaaactcg

SEQ ID NO: 45257 - DNA, 50 bp, synthetic construct
  source 1..50: mol_type = other DNA
tgttttttatggttttgagtttaggattaggaaggattttgtgagttttt

SEQ ID NO: 45258 - DNA, 50 bp, synthetic construct
  source 1..50: mol_type = other DNA
cgttttttacggtttcgagtttaggattaggaaggattttgtgagttttc

SEQ ID NO: 45259 - DNA, 50 bp, synthetic construct
  source 1..50: mol_type = other DNA
caaacctataaaacctcaacaaaaccaaacaacaaaccaaaacaatatca

SEQ ID NO: 45260 - DNA, 50 bp, synthetic construct
  source 1..50: mol_type = other DNA
cgaacctataaaacctcaacgaaaccaaacgacaaaccgaaacaatatcg

SEQ ID NO: 45261 - DNA, 50 bp, synthetic construct
  source 1..50: mol_type = other DNA
aataataatacaacaattccaaacctataaaacctcaacaaaaccaaaca

SEQ ID NO: 45262 - DNA, 50 bp, synthetic construct
  source 1..50: mol_type = other DNA
aataataatacgacgattccgaacctataaaacctcaacgaaaccaaacg

SEQ ID NO: 45263 - DNA, 50 bp, synthetic construct
  source 1..50: mol_type = other DNA
caaccactctaataataatacaacaattccaaacctataaaacctcaaca

SEQ ID NO: 45264 - DNA, 50 bp, synthetic construct
  source 1..50: mol_type = other DNA
caaccgctctaataataatacgacgattccgaacctataaaacctcaacg

SEQ ID NO: 45265 - DNA, 50 bp, synthetic construct
  source 1..50: mol_type = other DNA
aaccctactcaaaaaaacacaaccactctaataataatacaacaattcca

SEQ ID NO: 45266 - DNA, 50 bp, synthetic construct
  source 1..50: mol_type = other DNA
aaccctactcaaaaaaacacaaccgctctaataataatacgacgattccg

SEQ ID NO: 45267 - DNA, 50 bp, synthetic construct
  source 1..50: mol_type = other DNA
taacaacaaaattaacaaataaaaattcaaacaaaacacaataactcaca

SEQ ID NO: 45268 - DNA, 50 bp, synthetic construct
  source 1..50: mol_type = other DNA
taacaacgaaattaacaaataaaaattcaaacgaaacgcgataactcacg

SEQ ID NO: 45269 - DNA, 50 bp, synthetic construct
  source 1..50: mol_type = other DNA
aatatccctatttactccaaacccaaaaacaaaataaaaacaaatcctca

SEQ ID NO: 45270 - DNA, 50 bp, synthetic construct
  source 1..50: mol_type = other DNA
aatatccctatttactccgaacccgaaaacgaaataaaaacgaatcctcg

SEQ ID NO: 45271 - DNA, 50 bp, synthetic construct
  source 1..50: mol_type = other DNA
cttaaacactccatcaccataacaaccctacaaaacactaaaaatatcca

SEQ ID NO: 45272 - DNA, 50 bp, synthetic construct
  source 1..50: mol_type = other DNA
cttaaacgctccgtcaccataacaaccctacaaaacgctaaaaatatccg

SEQ ID NO: 45273 - DNA, 50 bp, synthetic construct
  source 1..50: mol_type = other DNA
aaccccatatcacaaccattcattccctaaaaaatataaaaccctaacca

SEQ ID NO: 45274 - DNA, 50 bp, synthetic construct
  source 1..50: mol_type = other DNA
aaccccatatcgcaaccattcattccctaaaaaatataaaaccctaaccg

SEQ ID NO: 45275 - DNA, 50 bp, synthetic construct
  source 1..50: mol_type = other DNA
caataaaaccacctccctccacttccctctaattcttaaacaataaatca

SEQ ID NO: 45276 - DNA, 50 bp, synthetic construct
  source 1..50: mol_type = other DNA
caataaaaccacctccctccgcttccctctaattcttaaacgataaatcg

SEQ ID NO: 45277 - DNA, 50 bp, synthetic construct
  source 1..50: mol_type = other DNA
ttctaccctatatcctcaatccacaaccttcataaatcccaacaataaca

SEQ ID NO: 45278 - DNA, 50 bp, synthetic construct
  source 1..50: mol_type = other DNA
ttctaccctatatcctcaatccacaaccttcgtaaatcccaacaataacg

SEQ ID NO: 45279 - DNA, 50 bp, synthetic construct
  source 1..50: mol_type = other DNA
aaaaaaataacatcccacaaacttaaaacaaacaaatctaaaaaacccca

SEQ ID NO: 45280 - DNA, 50 bp, synthetic construct
  source 1..50: mol_type = other DNA
aaaaaaataacgtcccgcgaacttaaaacgaacaaatctaaaaaaccccg

SEQ ID NO: 45281 - DNA, 50 bp, synthetic construct
  source 1..50: mol_type = other DNA
caaaaaaataccaaaaaatacaaacctaaacaattcaaacaaaaccaaca

SEQ ID NO: 45282 - DNA, 50 bp, synthetic construct
  source 1..50: mol_type = other DNA
cgaaaaaataccaaaaaatacgaacctaaacgattcaaacaaaaccgacg

SEQ ID NO: 45283 - DNA, 50 bp, synthetic construct
  source 1..50: mol_type = other DNA
aaaataccaaaaaatacaaacctaaacaattcaaacaaaaccaacaatca

SEQ ID NO: 45284 - DNA, 50 bp, synthetic construct
  source 1..50: mol_type = other DNA
aaaataccaaaaaatacgaacctaaacgattcaaacaaaaccgacgatcg

SEQ ID NO: 45285 - DNA, 50 bp, synthetic construct
  source 1..50: mol_type = other DNA
acctcaacaaactaaaaaaaatcaaactcatctctcctatcttattaaca

SEQ ID NO: 45286 - DNA, 50 bp, synthetic construct
  source 1..50: mol_type = other DNA
acctcgacaaactaaaaaaaatcaaactcgtctctcctatcttattaacg

SEQ ID NO: 45287 - DNA, 50 bp, synthetic construct
  source 1..50: mol_type = other DNA
tatagtgagttgagattgtgttattgtattttggtttgggtaataagagt

SEQ ID NO: 45288 - DNA, 50 bp, synthetic construct
  source 1..50: mol_type = other DNA
tatagtgagtcgagattgcgttattgtattttggtttgggtaataagagc

SEQ ID NO: 45289 - DNA, 50 bp, synthetic construct
  source 1..50: mol_type = other DNA
ctaaaaaaaaattccctttctactaatatcaacttccctcaactcaaaca

SEQ ID NO: 45290 - DNA, 50 bp, synthetic construct
  source 1..50: mol_type = other DNA
ctaaaaaaaaattccctttctactaatatcgacttccctcgactcaaacg

SEQ ID NO: 45291 - DNA, 50 bp, synthetic construct
  source 1..50: mol_type = other DNA
ttcttttaaacaaaaacaaactactaaaaacaccatcctcacctaaccca

SEQ ID NO: 45292 - DNA, 50 bp, synthetic construct
  source 1..50: mol_type = other DNA
ttcttttaaacaaaaacaaactactaaaaacgccgtcctcgcctaacccg

SEQ ID NO: 45293 - DNA, 50 bp, synthetic construct
  source 1..50: mol_type = other DNA
aactatatataacataatattaataaaaattcttaatttccaccaataca

SEQ ID NO: 45294 - DNA, 50 bp, synthetic construct
  source 1..50: mol_type = other DNA
aactatatataacataatattaataaaaattcttaatttccgccgatacg

SEQ ID NO: 45295 - DNA, 50 bp, synthetic construct
  source 1..50: mol_type = other DNA
aataaatcaaacataaaaaaaacaaactacaaaaaacacacatccacaca

SEQ ID NO: 45296 - DNA, 50 bp, synthetic construct
  source 1..50: mol_type = other DNA
aataaatcaaacataaaaaaaacgaactacaaaaaacgcgcgtccgcgcg

SEQ ID NO: 45297 - DNA, 50 bp, synthetic construct
  source 1..50: mol_type = other DNA
ataataaatcaaacataaaaaaaacaaactacaaaaaacacacatccaca

SEQ ID NO: 45298 - DNA, 50 bp, synthetic construct
  source 1..50: mol_type = other DNA
ataataaatcaaacataaaaaaaacgaactacaaaaaacgcgcgtccgcg

SEQ ID NO: 45299 - DNA, 50 bp, synthetic construct
  source 1..50: mol_type = other DNA
aaataataaatcaaacataaaaaaaacaaactacaaaaaacacacatcca

SEQ ID NO: 45300 - DNA, 50 bp, synthetic construct
  source 1..50: mol_type = other DNA
aaataataaatcaaacataaaaaaaacgaactacaaaaaacgcgcgtccg

SEQ ID NO: 45301 - DNA, 50 bp, synthetic construct
  source 1..50: mol_type = other DNA
ttcccattcctaaaaaataccataaaaacaaacaaaacacaaaaaaaaca

SEQ ID NO: 45302 - DNA, 50 bp, synthetic construct
  source 1..50: mol_type = other DNA
ttcccgttcctaaaaaataccataaaaacgaacaaaacgcgaaaaaaacg

SEQ ID NO: 45303 - DNA, 50 bp, synthetic construct
  source 1..50: mol_type = other DNA
acaaaacaaatttacaaaaaaaacaaacacacaaaacaaacaaaaaaaca

SEQ ID NO: 45304 - DNA, 50 bp, synthetic construct
  source 1..50: mol_type = other DNA
acgaaacaaatttacgaaaaaaacgaacgcgcgaaacgaacgaaaaaacg

SEQ ID NO: 45305 - DNA, 50 bp, synthetic construct
  source 1..50: mol_type = other DNA
acaaaataacaaaacaaatttacaaaaaaaacaaacacacaaaacaaaca

SEQ ID NO: 45306 - DNA, 50 bp, synthetic construct
  source 1..50: mol_type = other DNA
acgaaataacgaaacaaatttacgaaaaaaacgaacgcgcgaaacgaacg

SEQ ID NO: 45307 - DNA, 50 bp, synthetic construct
  source 1..50: mol_type = other DNA
cccaccactaaacaaaataacaaaacaaatttacaaaaaaaacaaacaca

SEQ ID NO: 45308 - DNA, 50 bp, synthetic construct
  source 1..50: mol_type = other DNA
cccgccgctaaacgaaataacgaaacaaatttacgaaaaaaacgaacgcg

SEQ ID NO: 45309 - DNA, 50 bp, synthetic construct
  source 1..50: mol_type = other DNA
accccaccactaaacaaaataacaaaacaaatttacaaaaaaaacaaaca

SEQ ID NO: 45310 - DNA, 50 bp, synthetic construct
  source 1..50: mol_type = other DNA
accccgccgctaaacgaaataacgaaacaaatttacgaaaaaaacgaacg

SEQ ID NO: 45311 - DNA, 50 bp, synthetic construct
  source 1..50: mol_type = other DNA
caacaaaataaacaattcataaatcaccaaaaactcacaaaaaaaacaca

SEQ ID NO: 45312 - DNA, 50 bp, synthetic construct
  source 1..50: mol_type = other DNA
cgacgaaataaacaattcgtaaatcaccgaaaactcgcgaaaaaaacgcg

SEQ ID NO: 45313 - DNA, 50 bp, synthetic construct
  source 1..50: mol_type = other DNA
caaaaacaaaacaacaacaaaaataaacaaacaaaataacaaaaacaaca

SEQ ID NO: 45314 - DNA, 50 bp, synthetic construct
  source 1..50: mol_type = other DNA
cgaaaacgaaacgacgacgaaaataaacaaacgaaataacgaaaacgacg

SEQ ID NO: 45315 - DNA, 50 bp, synthetic construct
  source 1..50: mol_type = other DNA
ataacaattaaaaatataaacattccaaaaaaaacacaaaccacacaaca

SEQ ID NO: 45316 - DNA, 50 bp, synthetic construct
  source 1..50: mol_type = other DNA
ataacgattaaaaatataaacgttccgaaaaaaacgcaaaccgcgcgacg

SEQ ID NO: 45317 - DNA, 50 bp, synthetic construct
  source 1..50: mol_type = other DNA
aatataacaattaaaaatataaacattccaaaaaaaacacaaaccacaca

SEQ ID NO: 45318 - DNA, 50 bp, synthetic construct
  source 1..50: mol_type = other DNA
aatataacgattaaaaatataaacgttccgaaaaaaacgcaaaccgcgcg

SEQ ID NO: 45319 - DNA, 50 bp, synthetic construct
  source 1..50: mol_type = other DNA
acaatataacaattaaaaatataaacattccaaaaaaaacacaaaccaca

SEQ ID NO: 45320 - DNA, 50 bp, synthetic construct
  source 1..50: mol_type = other DNA
acaatataacgattaaaaatataaacgttccgaaaaaaacgcaaaccgcg

SEQ ID NO: 45321 - DNA, 50 bp, synthetic construct
  source 1..50: mol_type = other DNA
caacaatataacaattaaaaatataaacattccaaaaaaaacacaaacca

SEQ ID NO: 45322 - DNA, 50 bp, synthetic construct
  source 1..50: mol_type = other DNA
caacaatataacgattaaaaatataaacgttccgaaaaaaacgcaaaccg

SEQ ID NO: 45323 - DNA, 50 bp, synthetic construct
  source 1..50: mol_type = other DNA
caaatatcaacaatataacaattaaaaatataaacattccaaaaaaaaca

SEQ ID NO: 45324 - DNA, 50 bp, synthetic construct
  source 1..50: mol_type = other DNA
cgaatatcaacaatataacgattaaaaatataaacgttccgaaaaaaacg

SEQ ID NO: 45325 - DNA, 50 bp, synthetic construct
  source 1..50: mol_type = other DNA
aaaaaatacaaaaaacaaaaccataacctccaataaatattcataaaaca

SEQ ID NO: 45326 - DNA, 50 bp, synthetic construct
  source 1..50: mol_type = other DNA
aaaaaatacgaaaaacgaaaccataacctccgataaatattcataaaacg

SEQ ID NO: 45327 - DNA, 50 bp, synthetic construct
  source 1..50: mol_type = other DNA
ttacccccaaacaacaaaaaacaaatcttataattactaaatataattca

SEQ ID NO: 45328 - DNA, 50 bp, synthetic construct
  source 1..50: mol_type = other DNA
ttacccccaaacaacaaaaaacaaatcttataattactaaatataattcg

SEQ ID NO: 45329 - DNA, 50 bp, synthetic construct
  source 1..50: mol_type = other DNA
aacatactcctatcaaacaaaaaacaaaaaacaaactaaaaaccaaatca

SEQ ID NO: 45330 - DNA, 50 bp, synthetic construct
  source 1..50: mol_type = other DNA
aacgtactcctatcaaacaaaaaacaaaaaacaaactaaaaaccaaatcg

SEQ ID NO: 45331 - DNA, 50 bp, synthetic construct
  source 1..50: mol_type = other DNA
taaaacaaaatctaaaaacttaaatttatactatttcacttttacaaaca

SEQ ID NO: 45332 - DNA, 50 bp, synthetic construct
  source 1..50: mol_type = other DNA
taaaacaaaatctaaaaacttaaatttatactatttcacttttacaaacg

SEQ ID NO: 45333 - DNA, 50 bp, synthetic construct
  source 1..50: mol_type = other DNA
cactcaaataatatctccacaataaataattaattcatctaatcaattca

SEQ ID NO: 45334 - DNA, 50 bp, synthetic construct
  source 1..50: mol_type = other DNA
cactcgaataatatctccgcgataaataattaattcatctaatcgattcg

SEQ ID NO: 45335 - DNA, 50 bp, synthetic construct
  source 1..50: mol_type = other DNA
aaaacaaaaatataaaccatttaaaaatccttatcaaaaattatactaca

SEQ ID NO: 45336 - DNA, 50 bp, synthetic construct
  source 1..50: mol_type = other DNA
aaaacaaaaatataaaccatttaaaaatccttatcaaaaattatactacg

SEQ ID NO: 45337 - DNA, 50 bp, synthetic construct
  source 1..50: mol_type = other DNA
taataacataataaccaacaaacataaaccaaatatcccaaaaaaataca

SEQ ID NO: 45338 - DNA, 50 bp, synthetic construct
  source 1..50: mol_type = other DNA
taataacgtaataaccgacgaacgtaaaccgaatatcccgaaaaaatacg

SEQ ID NO: 45339 - DNA, 50 bp, synthetic construct
  source 1..50: mol_type = other DNA
aaaaaaaacacaaaaatacaataaaaactctcaaaaatcacattccccca

SEQ ID NO: 45340 - DNA, 50 bp, synthetic construct
  source 1..50: mol_type = other DNA
aaaaaaaacgcaaaaatacgataaaaactctcaaaaatcgcattcccccg

SEQ ID NO: 45341 - DNA, 50 bp, synthetic construct
  source 1..50: mol_type = other DNA
aatccaaaaacacaaaaactaataacataataaccaacaaacataaacca

SEQ ID NO: 45342 - DNA, 50 bp, synthetic construct
  source 1..50: mol_type = other DNA
aatccgaaaacgcgaaaactaataacgtaataaccgacgaacgtaaaccg

SEQ ID NO: 45343 - DNA, 50 bp, synthetic construct
  source 1..50: mol_type = other DNA
ctactaaaatccaaaaacacaaaaactaataacataataaccaacaaaca

SEQ ID NO: 45344 - DNA, 50 bp, synthetic construct
  source 1..50: mol_type = other DNA
ctactaaaatccgaaaacgcgaaaactaataacgtaataaccgacgaacg

SEQ ID NO: 45345 - DNA, 50 bp, synthetic construct
  source 1..50: mol_type = other DNA
aaaactactaaaatccaaaaacacaaaaactaataacataataaccaaca

SEQ ID NO: 45346 - DNA, 50 bp, synthetic construct
  source 1..50: mol_type = other DNA
gaaactactaaaatccgaaaacgcgaaaactaataacgtaataaccgacg

SEQ ID NO: 45347 - DNA, 50 bp, synthetic construct
  source 1..50: mol_type = other DNA
atcaaaactactaaaatccaaaaacacaaaaactaataacataataacca

SEQ ID NO: 45348 - DNA, 50 bp, synthetic construct
  source 1..50: mol_type = other DNA
atcgaaactactaaaatccgaaaacgcgaaaactaataacgtaataaccg

SEQ ID NO: 45349 - DNA, 50 bp, synthetic construct
  source 1..50: mol_type = other DNA
aaacaacatatcaaaactactaaaatccaaaaacacaaaaactaataaca

SEQ ID NO: 45350 - DNA, 50 bp, synthetic construct
  source 1..50: mol_type = other DNA
aaacgacgtatcgaaactactaaaatccgaaaacgcgaaaactaataacg

SEQ ID NO: 45351 - DNA, 50 bp, synthetic construct
  source 1..50: mol_type = other DNA
tttttgggatatttggtttatgtttgttggttattatgttattagttttt

SEQ ID NO: 45352 - DNA, 50 bp, synthetic construct
  source 1..50: mol_type = other DNA
ttttcgggatattcggtttacgttcgtcggttattacgttattagttttc

SEQ ID NO: 45353 - DNA, 50 bp, synthetic construct
  source 1..50: mol_type = other DNA
tttgggatatttggtttatgtttgttggttattatgttattagtttttgt

SEQ ID NO: 45354 - DNA, 50 bp, synthetic construct
  source 1..50: mol_type = other DNA
ttcgggatattcggtttacgttcgtcggttattacgttattagttttcgc

SEQ ID NO: 45355 - DNA, 50 bp, synthetic construct
  source 1..50: mol_type = other DNA
atatttggtttatgtttgttggttattatgttattagtttttgtgttttt

SEQ ID NO: 45356 - DNA, 50 bp, synthetic construct
  source 1..50: mol_type = other DNA
atattcggtttacgttcgtcggttattacgttattagttttcgcgttttc

SEQ ID NO: 45357 - DNA, 50 bp, synthetic construct
  source 1..50: mol_type = other DNA
tgttggttattatgttattagtttttgtgtttttggattttagtagtttt

SEQ ID NO: 45358 - DNA, 50 bp, synthetic construct
  source 1..50: mol_type = other DNA
cgtcggttattacgttattagttttcgcgttttcggattttagtagtttc

SEQ ID NO: 45359 - DNA, 50 bp, synthetic construct
  source 1..50: mol_type = other DNA
gttattatgttattagtttttgtgtttttggattttagtagttttgatat

SEQ ID NO: 45360 - DNA, 50 bp, synthetic construct
  source 1..50: mol_type = other DNA
gttattacgttattagttttcgcgttttcggattttagtagtttcgatac

SEQ ID NO: 45361 - DNA, 50 bp, synthetic construct
  source 1..50: mol_type = other DNA
attatgttattagtttttgtgtttttggattttagtagttttgatatgtt

SEQ ID NO: 45362 - DNA, 50 bp, synthetic construct
  source 1..50: mol_type = other DNA
attacgttattagttttcgcgttttcggattttagtagtttcgatacgtc

SEQ ID NO: 45363 - DNA, 50 bp, synthetic construct
  source 1..50: mol_type = other DNA
taaatacatcataaatacactaataacaaaaacacaaaccaaaatactca

SEQ ID NO: 45364 - DNA, 50 bp, synthetic construct
  source 1..50: mol_type = other DNA
taaatacatcataaatacgctaataacgaaaacgcgaaccgaaatactcg

SEQ ID NO: 45365 - DNA, 50 bp, synthetic construct
  source 1..50: mol_type = other DNA
ccctctccataaatacatcataaatacactaataacaaaaacacaaacca

SEQ ID NO: 45366 - DNA, 50 bp, synthetic construct
  source 1..50: mol_type = other DNA
ccctctccgtaaatacatcataaatacgctaataacgaaaacgcgaaccg

SEQ ID NO: 45367 - DNA, 50 bp, synthetic construct
  source 1..50: mol_type = other DNA
tacatacccctctccataaatacatcataaatacactaataacaaaaaca

SEQ ID NO: 45368 - DNA, 50 bp, synthetic construct
  source 1..50: mol_type = other DNA
tacgtacccctctccgtaaatacatcataaatacgctaataacgaaaacg

SEQ ID NO: 45369 - DNA, 50 bp, synthetic construct
  source 1..50: mol_type = other DNA
caattctacatacccctctccataaatacatcataaatacactaataaca

SEQ ID NO: 45370 - DNA, 50 bp, synthetic construct
  source 1..50: mol_type = other DNA
cgattctacgtacccctctccgtaaatacatcataaatacgctaataacg

SEQ ID NO: 45371 - DNA, 50 bp, synthetic construct
  source 1..50: mol_type = other DNA
caaaacaaacaattctacatacccctctccataaatacatcataaataca

SEQ ID NO: 45372 - DNA, 50 bp, synthetic construct
  source 1..50: mol_type = other DNA
cgaaacgaacgattctacgtacccctctccgtaaatacatcataaatacg

SEQ ID NO: 45373 - DNA, 50 bp, synthetic construct
  source 1..50: mol_type = other DNA
gagtattttggtttgtgtttttgttattagtgtatttatgatgtatttat

SEQ ID NO: 45374 - DNA, 50 bp, synthetic construct
  source 1..50: mol_type = other DNA
gagtatttcggttcgcgttttcgttattagcgtatttatgatgtatttac

SEQ ID NO: 45375 - DNA, 50 bp, synthetic construct
  source 1..50: mol_type = other DNA
aactaaaaaaattaatttacactactccaaatatcaactccaacaaaaca

SEQ ID NO: 45376 - DNA, 50 bp, synthetic construct
  source 1..50: mol_type = other DNA
aactaaaaaaattaatttacactactccgaatatcgactccgacgaaacg

SEQ ID NO: 45377 - DNA, 50 bp, synthetic construct
  source 1..50: mol_type = other DNA
cactaaactaaaaaaattaatttacactactccaaatatcaactccaaca

SEQ ID NO: 45378 - DNA, 50 bp, synthetic construct
  source 1..50: mol_type = other DNA
cgctaaactaaaaaaattaatttacactactccgaatatcgactccgacg

SEQ ID NO: 45379 - DNA, 50 bp, synthetic construct
  source 1..50: mol_type = other DNA
cacacacaccactaaactaaaaaaattaatttacactactccaaatatca

SEQ ID NO: 45380 - DNA, 50 bp, synthetic construct
  source 1..50: mol_type = other DNA
cgcacgcgccgctaaactaaaaaaattaatttacactactccgaatatcg

SEQ ID NO: 45381 - DNA, 50 bp, synthetic construct
  source 1..50: mol_type = other DNA
ttggagttgatatttggagtagtgtaaattaatttttttagtttagtggt

SEQ ID NO: 45382 - DNA, 50 bp, synthetic construct
  source 1..50: mol_type = other DNA
tcggagtcgatattcggagtagtgtaaattaatttttttagtttagcggc

SEQ ID NO: 45383 - DNA, 50 bp, synthetic construct
  source 1..50: mol_type = other DNA
aacacaaatcactaacaaattaaataactacataaccacctcacttcaca

SEQ ID NO: 45384 - DNA, 50 bp, synthetic construct
  source 1..50: mol_type = other DNA
aacacgaatcgctaacgaattaaataactacgtaaccgcctcacttcgcg

SEQ ID NO: 45385 - DNA, 50 bp, synthetic construct
  source 1..50: mol_type = other DNA
aaaacacaaatcactaacaaattaaataactacataaccacctcacttca

SEQ ID NO: 45386 - DNA, 50 bp, synthetic construct
  source 1..50: mol_type = other DNA
aaaacacgaatcgctaacgaattaaataactacgtaaccgcctcacttcg

SEQ ID NO: 45387 - DNA, 50 bp, synthetic construct
  source 1..50: mol_type = other DNA
ggttatgtagttatttaatttgttagtgatttgtgttttgaaagtaagtt

SEQ ID NO: 45388 - DNA, 50 bp, synthetic construct
  source 1..50: mol_type = other DNA
ggttacgtagttatttaattcgttagcgattcgtgttttgaaagtaagtc

SEQ ID NO: 45389 - DNA, 50 bp, synthetic construct
  source 1..50: mol_type = other DNA
ttatgtagttatttaatttgttagtgatttgtgttttgaaagtaagttgt

SEQ ID NO: 45390 - DNA, 50 bp, synthetic construct
  source 1..50: mol_type = other DNA
ttacgtagttatttaattcgttagcgattcgtgttttgaaagtaagtcgc

SEQ ID NO: 45391 - DNA, 50 bp, synthetic construct
  source 1..50: mol_type = other DNA
tttaatttgttagtgatttgtgttttgaaagtaagttgtggttttgtgtt

SEQ ID NO: 45392 - DNA, 50 bp, synthetic construct
  source 1..50: mol_type = other DNA
tttaattcgttagcgattcgtgttttgaaagtaagtcgcggttttgtgtc

SEQ ID NO: 45393 - DNA, 50 bp, synthetic construct
  source 1..50: mol_type = other DNA
taaaacacaaaacacatcaatcaccataaaaacaacaacataaacaaaca

SEQ ID NO: 45394 - DNA, 50 bp, synthetic construct
  source 1..50: mol_type = other DNA
taaaacgcgaaacgcatcgatcgccataaaaacgacgacgtaaacaaacg

SEQ ID NO: 45395 - DNA, 50 bp, synthetic construct
  source 1..50: mol_type = other DNA
tcctcctaaaaaaaaacaataaaaacacaaaaacaaaaccacaatcttca

SEQ ID NO: 45396 - DNA, 50 bp, synthetic construct
  source 1..50: mol_type = other DNA
tcctcctaaaaaaaaacgataaaaacgcgaaaacgaaaccgcgatcttcg

SEQ ID NO: 45397 - DNA, 50 bp, synthetic construct
  source 1..50: mol_type = other DNA
gttttttaagttttttgaagtttgtgtttgtttgtggtttgagggttttt

SEQ ID NO: 45398 - DNA, 50 bp, synthetic construct
  source 1..50: mol_type = other DNA
gttttttaagttttttgaagttcgcgttcgtttgcggtttgagggttttc

SEQ ID NO: 45399 - DNA, 50 bp, synthetic construct
  source 1..50: mol_type = other DNA
tatttttgggttttttattgttttgagtggaggagattgtttttgtttgt

SEQ ID NO: 45400 - DNA, 50 bp, synthetic construct
  source 1..50: mol_type = other DNA
tattttcgggttttttatcgtttcgagtggaggagattgttttcgttcgc

SEQ ID NO: 45401 - DNA, 50 bp, synthetic construct
  source 1..50: mol_type = other DNA
tgtatttttgggttttttattgttttgagtggaggagattgtttttgttt

SEQ ID NO: 45402 - DNA, 50 bp, synthetic construct
  source 1..50: mol_type = other DNA
cgtattttcgggttttttatcgtttcgagtggaggagattgttttcgttc

SEQ ID NO: 45403 - DNA, 50 bp, synthetic construct
  source 1..50: mol_type = other DNA
tttgtgtatttttgggttttttattgttttgagtggaggagattgttttt

SEQ ID NO: 45404 - DNA, 50 bp, synthetic construct
  source 1..50: mol_type = other DNA
ttcgcgtattttcgggttttttatcgtttcgagtggaggagattgttttc

SEQ ID NO: 45405 - DNA, 50 bp, synthetic construct
  source 1..50: mol_type = other DNA
tttaagattttgtaggggtatttgtgtatttttgggttttttattgtttt

SEQ ID NO: 45406 - DNA, 50 bp, synthetic construct
  source 1..50: mol_type = other DNA
tttaagattttgtaggggtattcgcgtattttcgggttttttatcgtttc

SEQ ID NO: 45407 - DNA, 50 bp, synthetic construct
  source 1..50: mol_type = other DNA
ataaaaacaaaaaaaactcaaaactctataaaaacacccacacatttcca

SEQ ID NO: 45408 - DNA, 50 bp, synthetic construct
  source 1..50: mol_type = other DNA
ataaaaacgaaaaaaactcaaaactctataaaaacacccgcgcatttccg

SEQ ID NO: 45409 - DNA, 50 bp, synthetic construct
  source 1..50: mol_type = other DNA
acaaaaacaatctcctccactcaaaacaataaaaaacccaaaaatacaca

SEQ ID NO: 45410 - DNA, 50 bp, synthetic construct
  source 1..50: mol_type = other DNA
acgaaaacaatctcctccactcgaaacgataaaaaacccgaaaatacgcg

SEQ ID NO: 45411 - DNA, 50 bp, synthetic construct
  source 1..50: mol_type = other DNA
aaaaacccaaaaatacacaaatacccctacaaaatcttaaattttcccca

SEQ ID NO: 45412 - DNA, 50 bp, synthetic construct
  source 1..50: mol_type = other DNA
aaaaacccgaaaatacgcgaatacccctacaaaatcttaaattttccccg

SEQ ID NO: 45413 - DNA, 50 bp, synthetic construct
  source 1..50: mol_type = other DNA
caatttttccctacactaactacaattctaaaacaaaaaaaacattttca

SEQ ID NO: 45414 - DNA, 50 bp, synthetic construct
  source 1..50: mol_type = other DNA
caatttttccctacgctaactacaattctaaaacgaaaaaaacattttcg

SEQ ID NO: 45415 - DNA, 50 bp, synthetic construct
  source 1..50: mol_type = other DNA
cctttaaaactatctccctatatataaaaaacaaaacaaaaattaaaaca

SEQ ID NO: 45416 - DNA, 50 bp, synthetic construct
  source 1..50: mol_type = other DNA
cctttaaaactatctccctatatataaaaaacaaaacaaaaattaaaacg

SEQ ID NO: 45417 - DNA, 50 bp, synthetic construct
  source 1..50: mol_type = other DNA
tctaaatcaccaaaactaaaaaaatactaaatacactactcataaactca

SEQ ID NO: 45418 - DNA, 50 bp, synthetic construct
  source 1..50: mol_type = other DNA
tctaaatcaccaaaactaaaaaaatactaaatacgctactcgtaaactcg

SEQ ID NO: 45419 - DNA, 50 bp, synthetic construct
  source 1..50: mol_type = other DNA
ttccctaaatcctataaaaaaacaacaaaaaaaattactaatccaataca

SEQ ID NO: 45420 - DNA, 50 bp, synthetic construct
  source 1..50: mol_type = other DNA
ttccctaaatcctataaaaaaacaacgaaaaaaattactaatccaatacg

SEQ ID NO: 45421 - DNA, 50 bp, synthetic construct
  source 1..50: mol_type = other DNA
tagaaatttaggagagtatgtttagaatggaaagttgaatagtttagttt

SEQ ID NO: 45422 - DNA, 50 bp, synthetic construct
  source 1..50: mol_type = other DNA
tagaaatttaggagagtatgtttagaacggaaagttgaatagtttagttc

SEQ ID NO: 45423 - DNA, 50 bp, synthetic construct
  source 1..50: mol_type = other DNA
ctattcctaccctcctaactaacctatttcatttttccttctttattaca

SEQ ID NO: 45424 - DNA, 50 bp, synthetic construct
  source 1..50: mol_type = other DNA
ctattcctaccctcctaactaacctatttcatttttccttctttattacg

SEQ ID NO: 45425 - DNA, 50 bp, synthetic construct
  source 1..50: mol_type = other DNA
tatcatcaaaaaacaatttaaaatatacaataaaatctttaaattcccca

SEQ ID NO: 45426 - DNA, 50 bp, synthetic construct
  source 1..50: mol_type = other DNA
tatcatcaaaaaacaatttaaaatatacaataaaatctttaaattccccg

SEQ ID NO: 45427 - DNA, 50 bp, synthetic construct
  source 1..50: mol_type = other DNA
attttattttatttttaatttccttactatttttccaaatcacaacacca

SEQ ID NO: 45428 - DNA, 50 bp, synthetic construct
  source 1..50: mol_type = other DNA
attttattttatttttaatttccttactatttttccaaatcacaacaccg

SEQ ID NO: 45429 - DNA, 50 bp, synthetic construct
  source 1..50: mol_type = other DNA
ttttttttgattatggggtagtttttatgtttggtgatttatattgaaat

SEQ ID NO: 45430 - DNA, 50 bp, synthetic construct
  source 1..50: mol_type = other DNA
ttttttttgattatggggtagtttttatgtttggtgatttatattgaaac

SEQ ID NO: 45431 - DNA, 50 bp, synthetic construct
  source 1..50: mol_type = other DNA
cataaatataacataaccccaacttccaaaatacccaaataactcacaca

SEQ ID NO: 45432 - DNA, 50 bp, synthetic construct
  source 1..50: mol_type = other DNA
cataaatataacgtaaccccaacttccgaaatacccaaataactcacgcg

SEQ ID NO: 45433 - DNA, 50 bp, synthetic construct
  source 1..50: mol_type = other DNA
atgtgattttagtttttgaaatgtttaggtgatttatgtggggatatttt

SEQ ID NO: 45434 - DNA, 50 bp, synthetic construct
  source 1..50: mol_type = other DNA
acgtgattttagttttcgaaatgtttaggtgatttacgcggggatatttc

SEQ ID NO: 45435 - DNA, 50 bp, synthetic construct
  source 1..50: mol_type = other DNA
gttttgttttgtttggtttttgtaggtgtttggagaaatttttttgtttt

SEQ ID NO: 45436 - DNA, 50 bp, synthetic construct
  source 1..50: mol_type = other DNA
gtttcgtttcgttcggtttttgtaggcgttcggagaaattttttcgtttc

SEQ ID NO: 45437 - DNA, 50 bp, synthetic construct
  source 1..50: mol_type = other DNA
ttgttgttttgttttgtttggtttttgtaggtgtttggagaaattttttt

SEQ ID NO: 45438 - DNA, 50 bp, synthetic construct
  source 1..50: mol_type = other DNA
tcgttgtttcgtttcgttcggtttttgtaggcgttcggagaaattttttc

SEQ ID NO: 45439 - DNA, 50 bp, synthetic construct
  source 1..50: mol_type = other DNA
caaataactcacacaaaaacaccccaaaacaaaacaaaaaaatttctcca

SEQ ID NO: 45440 - DNA, 50 bp, synthetic construct
  source 1..50: mol_type = other DNA
caaataactcacgcgaaaacaccccgaaacgaaacgaaaaaatttctccg

SEQ ID NO: 45441 - DNA, 50 bp, synthetic construct
  source 1..50: mol_type = other DNA
aaacaaaacaaaaaaatttctccaaacacctacaaaaaccaaacaaaaca

SEQ ID NO: 45442 - DNA, 50 bp, synthetic construct
  source 1..50: mol_type = other DNA
aaacgaaacgaaaaaatttctccgaacgcctacaaaaaccgaacgaaacg

SEQ ID NO: 45443 - DNA, 50 bp, synthetic construct
  source 1..50: mol_type = other DNA
caaaaaaatttctccaaacacctacaaaaaccaaacaaaacaaaacaaca

SEQ ID NO: 45444 - DNA, 50 bp, synthetic construct
  source 1..50: mol_type = other DNA
cgaaaaaatttctccgaacgcctacaaaaaccgaacgaaacgaaacaacg

SEQ ID NO: 45445 - DNA, 50 bp, synthetic construct
  source 1..50: mol_type = other DNA
aaatttctccaaacacctacaaaaaccaaacaaaacaaaacaacaaaaca

SEQ ID NO: 45446 - DNA, 50 bp, synthetic construct
  source 1..50: mol_type = other DNA
aaatttctccgaacgcctacaaaaaccgaacgaaacgaaacaacgaaacg

SEQ ID NO: 45447 - DNA, 50 bp, synthetic construct
  source 1..50: mol_type = other DNA
ctacaaaatacatccaaccaaccaccaaaaaacacaaaaaacaaaaaaca

SEQ ID NO: 45448 - DNA, 50 bp, synthetic construct
  source 1..50: mol_type = other DNA
ctacgaaatacgtccaaccgaccgccaaaaaacgcaaaaaacgaaaaacg

SEQ ID NO: 45449 - DNA, 50 bp, synthetic construct
  source 1..50: mol_type = other DNA
aactctctaaatcaaactacaaaatacatccaaccaaccaccaaaaaaca

SEQ ID NO: 45450 - DNA, 50 bp, synthetic construct
  source 1..50: mol_type = other DNA
aactctctaaatcgaactacgaaatacgtccaaccgaccgccaaaaaacg

SEQ ID NO: 45451 - DNA, 50 bp, synthetic construct
  source 1..50: mol_type = other DNA
aaaatcacataactctctaaatcaaactacaaaatacatccaaccaacca

SEQ ID NO: 45452 - DNA, 50 bp, synthetic construct
  source 1..50: mol_type = other DNA
aaaatcacgtaactctctaaatcgaactacgaaatacgtccaaccgaccg

SEQ ID NO: 45453 - DNA, 50 bp, synthetic construct
  source 1..50: mol_type = other DNA
ggaaagttttgtggaaatttttgggtttataatttgtatataattgaaat

SEQ ID NO: 45454 - DNA, 50 bp, synthetic construct
  source 1..50: mol_type = other DNA
ggaaagtttcgtggaaattttcgggtttataattcgtatataattgaaac

SEQ ID NO: 45455 - DNA, 50 bp, synthetic construct
  source 1..50: mol_type = other DNA
tttttgggtttataatttgtatataattgaaatggggtaaagtagattgt

SEQ ID NO: 45456 - DNA, 50 bp, synthetic construct
  source 1..50: mol_type = other DNA
ttttcgggtttataattcgtatataattgaaacggggtaaagtagattgc

SEQ ID NO: 45457 - DNA, 50 bp, synthetic construct
  source 1..50: mol_type = other DNA
tacaacacactcctaccttaaccaaaacttaaaactttacaaaaaaatca

SEQ ID NO: 45458 - DNA, 50 bp, synthetic construct
  source 1..50: mol_type = other DNA
tacgacgcgctcctaccttaaccaaaacttaaaactttacgaaaaaatcg

SEQ ID NO: 45459 - DNA, 50 bp, synthetic construct
  source 1..50: mol_type = other DNA
caacacactcctaccttaaccaaaacttaaaactttacaaaaaaatcaca

SEQ ID NO: 45460 - DNA, 50 bp, synthetic construct
  source 1..50: mol_type = other DNA
cgacgcgctcctaccttaaccaaaacttaaaactttacgaaaaaatcgcg

SEQ ID NO: 45461 - DNA, 50 bp, synthetic construct
  source 1..50: mol_type = other DNA
ccaaaacttaaaactttacaaaaaaatcacaaaacccaaaaaaataacca

SEQ ID NO: 45462 - DNA, 50 bp, synthetic construct
  source 1..50: mol_type = other DNA
ccaaaacttaaaactttacgaaaaaatcgcgaaacccgaaaaaataaccg

SEQ ID NO: 45463 - DNA, 50 bp, synthetic construct
  source 1..50: mol_type = other DNA
aaacttaaaactttacaaaaaaatcacaaaacccaaaaaaataaccacca

SEQ ID NO: 45464 - DNA, 50 bp, synthetic construct
  source 1..50: mol_type = other DNA
aaacttaaaactttacgaaaaaatcgcgaaacccgaaaaaataaccgccg

SEQ ID NO: 45465 - DNA, 50 bp, synthetic construct
  source 1..50: mol_type = other DNA
acttaaaactttacaaaaaaatcacaaaacccaaaaaaataaccaccaca

SEQ ID NO: 45466 - DNA, 50 bp, synthetic construct
  source 1..50: mol_type = other DNA
acttaaaactttacgaaaaaatcgcgaaacccgaaaaaataaccgccgcg

SEQ ID NO: 45467 - DNA, 50 bp, synthetic construct
  source 1..50: mol_type = other DNA
ctacctcaaactcaccacaatcaaaaactacaaatacatattaaacaaca

SEQ ID NO: 45468 - DNA, 50 bp, synthetic construct
  source 1..50: mol_type = other DNA
ctacctcgaactcaccgcaatcaaaaactacgaatacatattaaacaacg

SEQ ID NO: 45469 - DNA, 50 bp, synthetic construct
  source 1..50: mol_type = other DNA
cacttcaaaacccaaacaaaaacatccaacaaactcccaatccaaaaaca

SEQ ID NO: 45470 - DNA, 50 bp, synthetic construct
  source 1..50: mol_type = other DNA
cacttcaaaacccaaacaaaaacgtccaacaaactcccaatccaaaaacg

SEQ ID NO: 45471 - DNA, 50 bp, synthetic construct
  source 1..50: mol_type = other DNA
aaaacttaaactacaactaactaataaaaaaacacccctcaaaccctcca

SEQ ID NO: 45472 - DNA, 50 bp, synthetic construct
  source 1..50: mol_type = other DNA
gaaacttaaactacaactaactaataaaaaaacgcccctcgaaccctccg

SEQ ID NO: 45473 - DNA, 50 bp, synthetic construct
  source 1..50: mol_type = other DNA
aacacaacaaaaatctctttcacaatatcatctatccatccatccatcca

SEQ ID NO: 45474 - DNA, 50 bp, synthetic construct
  source 1..50: mol_type = other DNA
aacacaacaaaaatctctttcacaatatcatctatccgtccgtccgtccg

SEQ ID NO: 45475 - DNA, 50 bp, synthetic construct
  source 1..50: mol_type = other DNA
gggtaatatggtgagatttaggtttttatgaaaataaaaaatgaaaaatt

SEQ ID NO: 45476 - DNA, 50 bp, synthetic construct
  source 1..50: mol_type = other DNA
gggtaatacggtgagatttaggtttttacgaaaataaaaaatgaaaaatc

SEQ ID NO: 45477 - DNA, 50 bp, synthetic construct
  source 1..50: mol_type = other DNA
caaaaatttaaaactaacctaaacaacacaataaaacctaaatctctaca

SEQ ID NO: 45478 - DNA, 50 bp, synthetic construct
  source 1..50: mol_type = other DNA
caaaaatttaaaactaacctaaacaacacgataaaacctaaatctctacg

SEQ ID NO: 45479 - DNA, 50 bp, synthetic construct
  source 1..50: mol_type = other DNA
tattttacaatttttcattttttattttcataaaaacctaaatctcacca

SEQ ID NO: 45480 - DNA, 50 bp, synthetic construct
  source 1..50: mol_type = other DNA
tattttacgatttttcattttttattttcgtaaaaacctaaatctcaccg

SEQ ID NO: 45481 - DNA, 50 bp, synthetic construct
  source 1..50: mol_type = other DNA
aaactaaacataataactcatacctttaatcctaacactttaaaaaatca

SEQ ID NO: 45482 - DNA, 50 bp, synthetic construct
  source 1..50: mol_type = other DNA
aaactaaacataataactcatacctttaatcctaacactttaaaaaatcg

SEQ ID NO: 45483 - DNA, 50 bp, synthetic construct
  source 1..50: mol_type = other DNA
acaaaacatcttactaaaaataaacttttttattaattaaaaaacattca

SEQ ID NO: 45484 - DNA, 50 bp, synthetic construct
  source 1..50: mol_type = other DNA
acaaaacatcttactaaaaataaacttttttattaattaaaaaacattcg

SEQ ID NO: 45485 - DNA, 50 bp, synthetic construct
  source 1..50: mol_type = other DNA
atttttaaacctactaataaaatcattcatcattttaaaaccatacacca

SEQ ID NO: 45486 - DNA, 50 bp, synthetic construct
  source 1..50: mol_type = other DNA
atttttaaacctactaataaaatcattcatcattttaaaaccatacaccg

SEQ ID NO: 45487 - DNA, 50 bp, synthetic construct
  source 1..50: mol_type = other DNA
gttaatgtatttggtttttgaatgaagttaattaagttagtgtttttatt

SEQ ID NO: 45488 - DNA, 50 bp, synthetic construct
  source 1..50: mol_type = other DNA
gttaatgtatttggtttttgaatgaagttaattaagttagtgtttttatc

SEQ ID NO: 45489 - DNA, 50 bp, synthetic construct
  source 1..50: mol_type = other DNA
aacaaataaaaaataattaaaaccacaaattatcaaacacataaacccca

SEQ ID NO: 45490 - DNA, 50 bp, synthetic construct
  source 1..50: mol_type = other DNA
aacaaataaaaaataattaaaaccacaaattatcaaacacataaaccccg

SEQ ID NO: 45491 - DNA, 50 bp, synthetic construct
  source 1..50: mol_type = other DNA
ataaaattaaaacttcatataaaaaattccaacatctattaactacaaca

SEQ ID NO: 45492 - DNA, 50 bp, synthetic construct
  source 1..50: mol_type = other DNA
ataaaattaaaacttcatataaaaaattccaacgtctattaactacaacg

SEQ ID NO: 45493 - DNA, 50 bp, synthetic construct
  source 1..50: mol_type = other DNA
ttccaactcaccctaaccacacccacttaaaaaatccaaaatacacttca

SEQ ID NO: 45494 - DNA, 50 bp, synthetic construct
  source 1..50: mol_type = other DNA
ttccaactcaccctaaccacacccacttaaaaaatccaaaatacacttcg

SEQ ID NO: 45495 - DNA, 50 bp, synthetic construct
  source 1..50: mol_type = other DNA
tcaaacaaataaacaaaaaaaatcacccaaaccttatatcttaacaaaca

SEQ ID NO: 45496 - DNA, 50 bp, synthetic construct
  source 1..50: mol_type = other DNA
tcaaacaaataaacaaaaaaaatcgcccaaaccttatatcttaacaaacg

SEQ ID NO: 45497 - DNA, 50 bp, synthetic construct
  source 1..50: mol_type = other DNA
tcacaacaaaaaatcacaaaacctaaaactatatctatcacccataacca

SEQ ID NO: 45498 - DNA, 50 bp, synthetic construct
  source 1..50: mol_type = other DNA
tcgcaacgaaaaatcgcgaaacctaaaactatatctatcgcccataaccg

SEQ ID NO: 45499 - DNA, 50 bp, synthetic construct
  source 1..50: mol_type = other DNA
tataacaaaaaaacaaaaccctacaaaacaaaaccaaaacaccataaaca

SEQ ID NO: 45500 - DNA, 50 bp, synthetic construct
  source 1..50: mol_type = other DNA
tataacaaaaaaacgaaaccctacgaaacgaaaccgaaacgccgtaaacg

SEQ ID NO: 45501 - DNA, 50 bp, synthetic construct
  source 1..50: mol_type = other DNA
tatctaaacaaaactaaacactatatttaaatatttaaaatattaaccca

SEQ ID NO: 45502 - DNA, 50 bp, synthetic construct
  source 1..50: mol_type = other DNA
tatctaaacaaaactaaacgctatatttaaatatttaaaatattaacccg

SEQ ID NO: 45503 - DNA, 50 bp, synthetic construct
  source 1..50: mol_type = other DNA
aacctacataaaaaaaacaccccacacaactaactaacaaaacataaaca

SEQ ID NO: 45504 - DNA, 50 bp, synthetic construct
  source 1..50: mol_type = other DNA
aacctacgtaaaaaaaacgccccgcgcaactaactaacgaaacataaacg

SEQ ID NO: 45505 - DNA, 50 bp, synthetic construct
  source 1..50: mol_type = other DNA
catacaatcattttacacatttcatacaaaaatacctccacaccaacaca

SEQ ID NO: 45506 - DNA, 50 bp, synthetic construct
  source 1..50: mol_type = other DNA
catacaatcgttttacacatttcgtacaaaaatacctccacgccaacacg

SEQ ID NO: 45507 - DNA, 50 bp, synthetic construct
  source 1..50: mol_type = other DNA
atccaaaaacaaccacaaactttccttaatcttcacaccatactaaatca

SEQ ID NO: 45508 - DNA, 50 bp, synthetic construct
  source 1..50: mol_type = other DNA
atccaaaaacaaccgcgaactttccttaatcttcacaccatactaaatcg

SEQ ID NO: 45509 - DNA, 50 bp, synthetic construct
  source 1..50: mol_type = other DNA
accataattctcacaccatccaaaaaaaacataactacaacataaaccca

SEQ ID NO: 45510 - DNA, 50 bp, synthetic construct
  source 1..50: mol_type = other DNA
accataattctcacaccatccaaaaaaaacataactacgacgtaaacccg

SEQ ID NO: 45511 - DNA, 50 bp, synthetic construct
  source 1..50: mol_type = other DNA
tactataaaataaaacaaacaaaatacaacaaacaacaaataacaaaaca

SEQ ID NO: 45512 - DNA, 50 bp, synthetic construct
  source 1..50: mol_type = other DNA
tactataaaataaaacaaacaaaatacaacaaacaacaaataacaaaacg

SEQ ID NO: 45513 - DNA, 50 bp, synthetic construct
  source 1..50: mol_type = other DNA
caactaaactacacaatatcaaaaaaccaaatataaaaaaacaataatca

SEQ ID NO: 45514 - DNA, 50 bp, synthetic construct
  source 1..50: mol_type = other DNA
caactaaactacacaatatcaaaaaaccaaatataaaaaaacgataatcg

SEQ ID NO: 45515 - DNA, 50 bp, synthetic construct
  source 1..50: mol_type = other DNA
taaactacacaatatcaaaaaaccaaatataaaaaaacaataatcaacca

SEQ ID NO: 45516 - DNA, 50 bp, synthetic construct
  source 1..50: mol_type = other DNA
taaactacacaatatcaaaaaaccaaatataaaaaaacgataatcgaccg

SEQ ID NO: 45517 - DNA, 50 bp, synthetic construct
  source 1..50: mol_type = other DNA
ctacacaatatcaaaaaaccaaatataaaaaaacaataatcaaccaaaca

SEQ ID NO: 45518 - DNA, 50 bp, synthetic construct
  source 1..50: mol_type = other DNA
ctacacaatatcaaaaaaccaaatataaaaaaacgataatcgaccgaacg

SEQ ID NO: 45519 - DNA, 50 bp, synthetic construct
  source 1..50: mol_type = other DNA
acacaatatcaaaaaaccaaatataaaaaaacaataatcaaccaaacaca

SEQ ID NO: 45520 - DNA, 50 bp, synthetic construct
  source 1..50: mol_type = other DNA
acacaatatcaaaaaaccaaatataaaaaaacgataatcgaccgaacgcg

SEQ ID NO: 45521 - DNA, 50 bp, synthetic construct
  source 1..50: mol_type = other DNA
aaaaaaccaaatataaaaaaacaataatcaaccaaacacaataactcaca

SEQ ID NO: 45522 - DNA, 50 bp, synthetic construct
  source 1..50: mol_type = other DNA
aaaaaaccaaatataaaaaaacgataatcgaccgaacgcgataactcacg

SEQ ID NO: 45523 - DNA, 50 bp, synthetic construct
  source 1..50: mol_type = other DNA
catccattcttcaccaattatctaaacaaaaacaataatcctctaccaca

SEQ ID NO: 45524 - DNA, 50 bp, synthetic construct
  source 1..50: mol_type = other DNA
catccattcttcaccgattatctaaacaaaaacgataatcctctaccgcg

SEQ ID NO: 45525 - DNA, 50 bp, synthetic construct
  source 1..50: mol_type = other DNA
cccattttcattttcacaccaaaaaatcccaccacaacaaaaaaccacca

SEQ ID NO: 45526 - DNA, 50 bp, synthetic construct
  source 1..50: mol_type = other DNA
cccattttcattttcacaccaaaaaatcccaccgcgacaaaaaaccaccg

SEQ ID NO: 45527 - DNA, 50 bp, synthetic construct
  source 1..50: mol_type = other DNA
tatttaaacaatcaataaaaaataaataacctcactttccccaacaaaca

SEQ ID NO: 45528 - DNA, 50 bp, synthetic construct
  source 1..50: mol_type = other DNA
tatttaaacaatcgataaaaaataaataacctcactttccccaacaaacg

SEQ ID NO: 45529 - DNA, 50 bp, synthetic construct
  source 1..50: mol_type = other DNA
aaaaaaaacttctaaaccaacttaacccaataaaaaattcttaaatacca

SEQ ID NO: 45530 - DNA, 50 bp, synthetic construct
  source 1..50: mol_type = other DNA
aaaaaaaacttctaaaccaacttaacccaataaaaaattcttaaataccg

SEQ ID NO: 45531 - DNA, 50 bp, synthetic construct
  source 1..50: mol_type = other DNA
tcttaaataccaacacaaaaacaaattcaaaacctaaaaccatacctaca

SEQ ID NO: 45532 - DNA, 50 bp, synthetic construct
  source 1..50: mol_type = other DNA
tcttaaataccgacgcgaaaacaaattcaaaacctaaaaccgtacctacg

SEQ ID NO: 45533 - DNA, 50 bp, synthetic construct
  source 1..50: mol_type = other DNA
aaataccaacacaaaaacaaattcaaaacctaaaaccatacctacatcca

SEQ ID NO: 45534 - DNA, 50 bp, synthetic construct
  source 1..50: mol_type = other DNA
aaataccgacgcgaaaacaaattcaaaacctaaaaccgtacctacgtccg

SEQ ID NO: 45535 - DNA, 50 bp, synthetic construct
  source 1..50: mol_type = other DNA
ggggatgttaaaggaggattttgtggtattttgtagagtttgtgtttatt

SEQ ID NO: 45536 - DNA, 50 bp, synthetic construct
  source 1..50: mol_type = other DNA
ggggatgttaaaggaggattttgtggtattttgtagagtttgtgtttatc

SEQ ID NO: 45537 - DNA, 50 bp, synthetic construct
  source 1..50: mol_type = other DNA
aaaactaaaaatatctaaaactcattctaccctcaaacccaccaaaaaca

SEQ ID NO: 45538 - DNA, 50 bp, synthetic construct
  source 1..50: mol_type = other DNA
aaaactaaaaatatctaaaactcattctaccctcgaacccaccgaaaacg

SEQ ID NO: 45539 - DNA, 50 bp, synthetic construct
  source 1..50: mol_type = other DNA
cacaaataaatacaaaaaatccttaaccctaaaactaccaacaacaatca

SEQ ID NO: 45540 - DNA, 50 bp, synthetic construct
  source 1..50: mol_type = other DNA
cacaaataaatacaaaaaatccttaaccctaaaactaccaacgacgatcg

SEQ ID NO: 45541 - DNA, 50 bp, synthetic construct
  source 1..50: mol_type = other DNA
aacaacaaaaacaaactcccaactatactatcaactcacccctacactca

SEQ ID NO: 45542 - DNA, 50 bp, synthetic construct
  source 1..50: mol_type = other DNA
aacaacaaaaacaaactcccaactatactatcaactcacccctacgctcg

SEQ ID NO: 45543 - DNA, 50 bp, synthetic construct
  source 1..50: mol_type = other DNA
aacctacccacctcctttctcaaaactaaaataccatcaaaaatatacca

SEQ ID NO: 45544 - DNA, 50 bp, synthetic construct
  source 1..50: mol_type = other DNA
aacctacccacctcctttctcaaaactaaaataccgtcgaaaatataccg

SEQ ID NO: 45545 - DNA, 50 bp, synthetic construct
  source 1..50: mol_type = other DNA
accactcacctcttcaaaacaaattaacaaacaaattcaatacatcctca

SEQ ID NO: 45546 - DNA, 50 bp, synthetic construct
  source 1..50: mol_type = other DNA
accactcacctcttcaaaacgaattaacaaacaaattcgatacatcctcg

SEQ ID NO: 45547 - DNA, 50 bp, synthetic construct
  source 1..50: mol_type = other DNA
actcacctcttcaaaacaaattaacaaacaaattcaatacatcctcaaca

SEQ ID NO: 45548 - DNA, 50 bp, synthetic construct
  source 1..50: mol_type = other DNA
actcacctcttcaaaacgaattaacaaacaaattcgatacatcctcgacg

SEQ ID NO: 45549 - DNA, 50 bp, synthetic construct
  source 1..50: mol_type = other DNA
taaaaaatttacccaaaatcacaaaactaatttaacaaaaccaaaattca

SEQ ID NO: 45550 - DNA, 50 bp, synthetic construct
  source 1..50: mol_type = other DNA
taaaaaatttacccaaaatcacaaaactaatttaacaaaaccaaaattcg

SEQ ID NO: 45551 - DNA, 50 bp, synthetic construct
  source 1..50: mol_type = other DNA
accaataaacaaccacaacaaaaccccccatatctacaaaacaaaaaaca

SEQ ID NO: 45552 - DNA, 50 bp, synthetic construct
  source 1..50: mol_type = other DNA
accaataaacaaccacaacgaaaccccccgtatctacaaaacaaaaaacg

SEQ ID NO: 45553 - DNA, 50 bp, synthetic construct
  source 1..50: mol_type = other DNA
aactccaaaataattaacctaaacaactaaaaaaatttaattaacattca

SEQ ID NO: 45554 - DNA, 50 bp, synthetic construct
  source 1..50: mol_type = other DNA
aactccaaaataattaacctaaacaactaaaaaaatttaattaacattcg

SEQ ID NO: 45555 - DNA, 50 bp, synthetic construct
  source 1..50: mol_type = other DNA
ctccccatctcccaaaaaataaatacctcaaaaacacaaactaacctaca

SEQ ID NO: 45556 - DNA, 50 bp, synthetic construct
  source 1..50: mol_type = other DNA
ctccccatctcccaaaaaataaatacctcaaaaacgcaaactaacctacg

SEQ ID NO: 45557 - DNA, 50 bp, synthetic construct
  source 1..50: mol_type = other DNA
attaaacaacttcacacaaatcactactttccaataccccaactacctca

SEQ ID NO: 45558 - DNA, 50 bp, synthetic construct
  source 1..50: mol_type = other DNA
attaaacaacttcacacgaatcactactttccaataccccaactacctcg

SEQ ID NO: 45559 - DNA, 50 bp, synthetic construct
  source 1..50: mol_type = other DNA
aaaaaacaaaatcatcttacccaataaaaaaacaaatccaaaaaacttca

SEQ ID NO: 45560 - DNA, 50 bp, synthetic construct
  source 1..50: mol_type = other DNA
aaaaaacaaaatcatcttacccgataaaaaaacaaatccaaaaaacttcg

SEQ ID NO: 45561 - DNA, 50 bp, synthetic construct
  source 1..50: mol_type = other DNA
atactattaaataattatccaaattttaaaacttttcaaattttcaaaca

SEQ ID NO: 45562 - DNA, 50 bp, synthetic construct
  source 1..50: mol_type = other DNA
atactattaaataattatccaaattttaaaacttttcaaattttcaaacg

SEQ ID NO: 45563 - DNA, 50 bp, synthetic construct
  source 1..50: mol_type = other DNA
tcctctaaaaaacattttataaacatttcccataattatctcctattcca

SEQ ID NO: 45564 - DNA, 50 bp, synthetic construct
  source 1..50: mol_type = other DNA
tcctctaaaaaacattttataaacgtttcccataattatctcctattccg

SEQ ID NO: 45565 - DNA, 50 bp, synthetic construct
  source 1..50: mol_type = other DNA
aatccaaccacctacaaaaaatataaccaacaccaacaaattatcctaca

SEQ ID NO: 45566 - DNA, 50 bp, synthetic construct
  source 1..50: mol_type = other DNA
gatccaaccacctacgaaaaatataaccgacgccaacgaattatcctacg

SEQ ID NO: 45567 - DNA, 50 bp, synthetic construct
  source 1..50: mol_type = other DNA
tctaacttaaacaatccaaccacctacaaaaaatataaccaacaccaaca

SEQ ID NO: 45568 - DNA, 50 bp, synthetic construct
  source 1..50: mol_type = other DNA
tctaacttaaacgatccaaccacctacgaaaaatataaccgacgccaacg

SEQ ID NO: 45569 - DNA, 50 bp, synthetic construct
  source 1..50: mol_type = other DNA
ccaaatacatctaacttaaacaatccaaccacctacaaaaaatataacca

SEQ ID NO: 45570 - DNA, 50 bp, synthetic construct
  source 1..50: mol_type = other DNA
ccgaatacatctaacttaaacgatccaaccacctacgaaaaatataaccg

SEQ ID NO: 45571 - DNA, 50 bp, synthetic construct
  source 1..50: mol_type = other DNA
taaaaaaaataaaccaaatacatctaacttaaacaatccaaccacctaca

SEQ ID NO: 45572 - DNA, 50 bp, synthetic construct
  source 1..50: mol_type = other DNA
taaaaaaaataaaccgaatacatctaacttaaacgatccaaccacctacg

SEQ ID NO: 45573 - DNA, 50 bp, synthetic construct
  source 1..50: mol_type = other DNA
attcaaaacccctactaaaaaaaataaaccaaatacatctaacttaaaca

SEQ ID NO: 45574 - DNA, 50 bp, synthetic construct
  source 1..50: mol_type = other DNA
attcgaaacccctactaaaaaaaataaaccgaatacatctaacttaaacg

SEQ ID NO: 45575 - DNA, 50 bp, synthetic construct
  source 1..50: mol_type = other DNA
cacacattttcacacttctattcaaaacccctactaaaaaaaataaacca

SEQ ID NO: 45576 - DNA, 50 bp, synthetic construct
  source 1..50: mol_type = other DNA
cacacattttcacacttctattcgaaacccctactaaaaaaaataaaccg

SEQ ID NO: 45577 - DNA, 50 bp, synthetic construct
  source 1..50: mol_type = other DNA
ttgttgaaaggtttaggggtttaggtgtgaagggaaagtagttattttgt

SEQ ID NO: 45578 - DNA, 50 bp, synthetic construct
  source 1..50: mol_type = other DNA
ttgttgaaaggtttaggggtttaggcgtgaagggaaagtagttattttgc

SEQ ID NO: 45579 - DNA, 50 bp, synthetic construct
  source 1..50: mol_type = other DNA
taataatactaaacccaaaatacactaactacaccctaaaatcaacaaca

SEQ ID NO: 45580 - DNA, 50 bp, synthetic construct
  source 1..50: mol_type = other DNA
taataatactaaacccgaaatacgctaactacgccctaaaatcgacgacg

SEQ ID NO: 45581 - DNA, 50 bp, synthetic construct
  source 1..50: mol_type = other DNA
ttctaataatactaaacccaaaatacactaactacaccctaaaatcaaca

SEQ ID NO: 45582 - DNA, 50 bp, synthetic construct
  source 1..50: mol_type = other DNA
ttctaataatactaaacccgaaatacgctaactacgccctaaaatcgacg

SEQ ID NO: 45583 - DNA, 50 bp, synthetic construct
  source 1..50: mol_type = other DNA
caccccaactctacaatttacctttctaataatactaaacccaaaataca

SEQ ID NO: 45584 - DNA, 50 bp, synthetic construct
  source 1..50: mol_type = other DNA
caccccgactctacgatttacctttctaataatactaaacccgaaatacg

SEQ ID NO: 45585 - DNA, 50 bp, synthetic construct
  source 1..50: mol_type = other DNA
ttaaatacaccccaactctacaatttacctttctaataatactaaaccca

SEQ ID NO: 45586 - DNA, 50 bp, synthetic construct
  source 1..50: mol_type = other DNA
ttaaatacaccccgactctacgatttacctttctaataatactaaacccg

SEQ ID NO: 45587 - DNA, 50 bp, synthetic construct
  source 1..50: mol_type = other DNA
aaaacacaaccaacacacctcaaacctaacaccattaaaaaaacaaatca

SEQ ID NO: 45588 - DNA, 50 bp, synthetic construct
  source 1..50: mol_type = other DNA
aaaacgcaaccaacgcacctcgaacctaacaccattaaaaaaacaaatcg

SEQ ID NO: 45589 - DNA, 50 bp, synthetic construct
  source 1..50: mol_type = other DNA
atttaaatacccaaccataaaccctaaaaatatctctccaacaaacacca

SEQ ID NO: 45590 - DNA, 50 bp, synthetic construct
  source 1..50: mol_type = other DNA
atttaaatacccgaccataaaccctaaaaatatctctccaacgaacgccg

SEQ ID NO: 45591 - DNA, 50 bp, synthetic construct
  source 1..50: mol_type = other DNA
ttactaaatataatacatcaaaaaaaaaccaaaaccaacaaccacaaaca

SEQ ID NO: 45592 - DNA, 50 bp, synthetic construct
  source 1..50: mol_type = other DNA
ttactaaatataatacgtcgaaaaaaaaccgaaaccgacgaccgcgaacg

SEQ ID NO: 45593 - DNA, 50 bp, synthetic construct
  source 1..50: mol_type = other DNA
caccaattactaaatataatacatcaaaaaaaaaccaaaaccaacaacca

SEQ ID NO: 45594 - DNA, 50 bp, synthetic construct
  source 1..50: mol_type = other DNA
cgccgattactaaatataatacgtcgaaaaaaaaccgaaaccgacgaccg

SEQ ID NO: 45595 - DNA, 50 bp, synthetic construct
  source 1..50: mol_type = other DNA
tcaacaccaattactaaatataatacatcaaaaaaaaaccaaaaccaaca

SEQ ID NO: 45596 - DNA, 50 bp, synthetic construct
  source 1..50: mol_type = other DNA
tcaacgccgattactaaatataatacgtcgaaaaaaaaccgaaaccgacg

SEQ ID NO: 45597 - DNA, 50 bp, synthetic construct
  source 1..50: mol_type = other DNA
ctatcaacaccaattactaaatataatacatcaaaaaaaaaccaaaacca

SEQ ID NO: 45598 - DNA, 50 bp, synthetic construct
  source 1..50: mol_type = other DNA
ctatcaacgccgattactaaatataatacgtcgaaaaaaaaccgaaaccg

SEQ ID NO: 45599 - DNA, 50 bp, synthetic construct
  source 1..50: mol_type = other DNA
tacatcctatcaacaccaattactaaatataatacatcaaaaaaaaacca

SEQ ID NO: 45600 - DNA, 50 bp, synthetic construct
  source 1..50: mol_type = other DNA
tacgtcctatcaacgccgattactaaatataatacgtcgaaaaaaaaccg

SEQ ID NO: 45601 - DNA, 50 bp, synthetic construct
  source 1..50: mol_type = other DNA
cccaaataatcaaaataacccaaaacactaaaaacaacaaaaaacaaaca

SEQ ID NO: 45602 - DNA, 50 bp, synthetic construct
  source 1..50: mol_type = other DNA
cccgaataatcgaaataacccgaaacgctaaaaacaacgaaaaacgaacg

SEQ ID NO: 45603 - DNA, 50 bp, synthetic construct
  source 1..50: mol_type = other DNA
ttaacccaaataatcaaaataacccaaaacactaaaaacaacaaaaaaca

SEQ ID NO: 45604 - DNA, 50 bp, synthetic construct
  source 1..50: mol_type = other DNA
ttaacccgaataatcgaaataacccgaaacgctaaaaacaacgaaaaacg

SEQ ID NO: 45605 - DNA, 50 bp, synthetic construct
  source 1..50: mol_type = other DNA
aaattaattaacccaaataatcaaaataacccaaaacactaaaaacaaca

SEQ ID NO: 45606 - DNA, 50 bp, synthetic construct
  source 1..50: mol_type = other DNA
aaattaattaacccgaataatcgaaataacccgaaacgctaaaaacaacg

SEQ ID NO: 45607 - DNA, 50 bp, synthetic construct
  source 1..50: mol_type = other DNA
aacaaaatcacaaaattaattaacccaaataatcaaaataacccaaaaca

SEQ ID NO: 45608 - DNA, 50 bp, synthetic construct
  source 1..50: mol_type = other DNA
aacaaaatcgcgaaattaattaacccgaataatcgaaataacccgaaacg

SEQ ID NO: 45609 - DNA, 50 bp, synthetic construct
  source 1..50: mol_type = other DNA
cactaaacaaaatcacaaaattaattaacccaaataatcaaaataaccca

SEQ ID NO: 45610 - DNA, 50 bp, synthetic construct
  source 1..50: mol_type = other DNA
cgctaaacaaaatcgcgaaattaattaacccgaataatcgaaataacccg

SEQ ID NO: 45611 - DNA, 50 bp, synthetic construct
  source 1..50: mol_type = other DNA
aaaaactaaacactaaacaaaatcacaaaattaattaacccaaataatca

SEQ ID NO: 45612 - DNA, 50 bp, synthetic construct
  source 1..50: mol_type = other DNA
gaaaactaaacgctaaacaaaatcgcgaaattaattaacccgaataatcg

SEQ ID NO: 45613 - DNA, 50 bp, synthetic construct
  source 1..50: mol_type = other DNA
caaacaacaaaaactaaacactaaacaaaatcacaaaattaattaaccca

SEQ ID NO: 45614 - DNA, 50 bp, synthetic construct
  source 1..50: mol_type = other DNA
cgaacgacgaaaactaaacgctaaacaaaatcgcgaaattaattaacccg

SEQ ID NO: 45615 - DNA, 50 bp, synthetic construct
  source 1..50: mol_type = other DNA
caaaacaaaaaacacaacaaacaacaaaaactaaacactaaacaaaatca

SEQ ID NO: 45616 - DNA, 50 bp, synthetic construct
  source 1..50: mol_type = other DNA
cgaaacgaaaaacgcgacgaacgacgaaaactaaacgctaaacaaaatcg

SEQ ID NO: 45617 - DNA, 50 bp, synthetic construct
  source 1..50: mol_type = other DNA
ctacaaaataataaaaacaaaaaacaccacaacaaaacaacaaaattaca

SEQ ID NO: 45618 - DNA, 50 bp, synthetic construct
  source 1..50: mol_type = other DNA
ctacgaaataataaaaacgaaaaacgccgcgacgaaacgacgaaattacg

SEQ ID NO: 45619 - DNA, 50 bp, synthetic construct
  source 1..50: mol_type = other DNA
tcaaaaacatacacacaaactacaaaataataaaaacaaaaaacaccaca

SEQ ID NO: 45620 - DNA, 50 bp, synthetic construct
  source 1..50: mol_type = other DNA
tcaaaaacgtacacgcgaactacgaaataataaaaacgaaaaacgccgcg

SEQ ID NO: 45621 - DNA, 50 bp, synthetic construct
  source 1..50: mol_type = other DNA
aaaactcaaaaacatacacacaaactacaaaataataaaaacaaaaaaca

SEQ ID NO: 45622 - DNA, 50 bp, synthetic construct
  source 1..50: mol_type = other DNA
aaaactcaaaaacgtacacgcgaactacgaaataataaaaacgaaaaacg

SEQ ID NO: 45623 - DNA, 50 bp, synthetic construct
  source 1..50: mol_type = other DNA
caactaaaaaactcaaaaacatacacacaaactacaaaataataaaaaca

SEQ ID NO: 45624 - DNA, 50 bp, synthetic construct
  source 1..50: mol_type = other DNA
cgactaaaaaactcaaaaacgtacacgcgaactacgaaataataaaaacg

SEQ ID NO: 45625 - DNA, 50 bp, synthetic construct
  source 1..50: mol_type = other DNA
accccaaaataaaaataacaaaatacaaaaacacaaaataccaaaaaaca

SEQ ID NO: 45626 - DNA, 50 bp, synthetic construct
  source 1..50: mol_type = other DNA
accccgaaataaaaataacgaaatacgaaaacgcgaaataccgaaaaacg

SEQ ID NO: 45627 - DNA, 50 bp, synthetic construct
  source 1..50: mol_type = other DNA
catacaaaccccaaaataaaaataacaaaatacaaaaacacaaaatacca

SEQ ID NO: 45628 - DNA, 50 bp, synthetic construct
  source 1..50: mol_type = other DNA
cgtacgaaccccgaaataaaaataacgaaatacgaaaacgcgaaataccg

SEQ ID NO: 45629 - DNA, 50 bp, synthetic construct
  source 1..50: mol_type = other DNA
aaaaaacacatacaaaccccaaaataaaaataacaaaatacaaaaacaca

SEQ ID NO: 45630 - DNA, 50 bp, synthetic construct
  source 1..50: mol_type = other DNA
aaaaaacgcgtacgaaccccgaaataaaaataacgaaatacgaaaacgcg

SEQ ID NO: 45631 - DNA, 50 bp, synthetic construct
  source 1..50: mol_type = other DNA
aataacccaaaaataaacaaaaataccaaacacacaaaaactcctaccca

SEQ ID NO: 45632 - DNA, 50 bp, synthetic construct
  source 1..50: mol_type = other DNA
aataacccgaaaataaacgaaaataccaaacgcgcgaaaactcctacccg

SEQ ID NO: 45633 - DNA, 50 bp, synthetic construct
  source 1..50: mol_type = other DNA
caaccacatcaataaataacccaaaaataaacaaaaataccaaacacaca

SEQ ID NO: 45634 - DNA, 50 bp, synthetic construct
  source 1..50: mol_type = other DNA
caaccacatcgataaataacccgaaaataaacgaaaataccaaacgcgcg

SEQ ID NO: 45635 - DNA, 50 bp, synthetic construct
  source 1..50: mol_type = other DNA
atcaaacacatcaaaaacaaccacatcaataaataacccaaaaataaaca

SEQ ID NO: 45636 - DNA, 50 bp, synthetic construct
  source 1..50: mol_type = other DNA
atcgaacacatcgaaaacaaccacatcgataaataacccgaaaataaacg

SEQ ID NO: 45637 - DNA, 50 bp, synthetic construct
  source 1..50: mol_type = other DNA
tggttgattttattgagtatattgaggataattatattggtaaatggttt

SEQ ID NO: 45638 - DNA, 50 bp, synthetic construct
  source 1..50: mol_type = other DNA
tggtcgattttatcgagtatatcgaggataattatatcggtaaatggttc

SEQ ID NO: 45639 - DNA, 50 bp, synthetic construct
  source 1..50: mol_type = other DNA
taggagtttttgtgtgtttggtatttttgtttatttttgggttatttatt

SEQ ID NO: 45640 - DNA, 50 bp, synthetic construct
  source 1..50: mol_type = other DNA
taggagttttcgcgcgtttggtattttcgtttattttcgggttatttatc

SEQ ID NO: 45641 - DNA, 50 bp, synthetic construct
  source 1..50: mol_type = other DNA
gtttggtatttttgtttatttttgggttatttattgatgtggttgttttt

SEQ ID NO: 45642 - DNA, 50 bp, synthetic construct
  source 1..50: mol_type = other DNA
gtttggtattttcgtttattttcgggttatttatcgatgtggttgttttc

SEQ ID NO: 45643 - DNA, 50 bp, synthetic construct
  source 1..50: mol_type = other DNA
ttttgtttatttttgggttatttattgatgtggttgtttttgatgtgttt

SEQ ID NO: 45644 - DNA, 50 bp, synthetic construct
  source 1..50: mol_type = other DNA
tttcgtttattttcgggttatttatcgatgtggttgttttcgatgtgttc

SEQ ID NO: 45645 - DNA, 50 bp, synthetic construct
  source 1..50: mol_type = other DNA
ccccaaaccatttaccaatataattatcctcaatatactcaataaaatca

SEQ ID NO: 45646 - DNA, 50 bp, synthetic construct
  source 1..50: mol_type = other DNA
ccccgaaccatttaccgatataattatcctcgatatactcgataaaatcg

SEQ ID NO: 45647 - DNA, 50 bp, synthetic construct
  source 1..50: mol_type = other DNA
aaaccaacaccaaaaaaactctcaatataacaccataacaaacatcacca

SEQ ID NO: 45648 - DNA, 50 bp, synthetic construct
  source 1..50: mol_type = other DNA
aaaccgacaccaaaaaaactctcgatataacaccataacaaacatcgccg

SEQ ID NO: 45649 - DNA, 50 bp, synthetic construct
  source 1..50: mol_type = other DNA
acaaaaccaacaccaaaaaaactctcaatataacaccataacaaacatca

SEQ ID NO: 45650 - DNA, 50 bp, synthetic construct
  source 1..50: mol_type = other DNA
gcaaaaccgacaccaaaaaaactctcgatataacaccataacaaacatcg

SEQ ID NO: 45651 - DNA, 50 bp, synthetic construct
  source 1..50: mol_type = other DNA
aatacctatcataatactacatcaaaaacccccctaatatcaactctaca

SEQ ID NO: 45652 - DNA, 50 bp, synthetic construct
  source 1..50: mol_type = other DNA
gatacctatcataatactacatcgaaaacccccctaatatcgactctacg

SEQ ID NO: 45653 - DNA, 50 bp, synthetic construct
  source 1..50: mol_type = other DNA
acaaaataaaattaataacaaaactcacaaataaaacctaaatccacaca

SEQ ID NO: 45654 - DNA, 50 bp, synthetic construct
  source 1..50: mol_type = other DNA
acgaaataaaattaataacaaaactcgcaaataaaacctaaatccgcgcg

SEQ ID NO: 45655 - DNA, 50 bp, synthetic construct
  source 1..50: mol_type = other DNA
acaaaccataaaaaacaaacctaacaaaataaaattaataacaaaactca

SEQ ID NO: 45656 - DNA, 50 bp, synthetic construct
  source 1..50: mol_type = other DNA
acaaaccgtaaaaaacaaacctaacgaaataaaattaataacaaaactcg

SEQ ID NO: 45657 - DNA, 50 bp, synthetic construct
  source 1..50: mol_type = other DNA
aaaattaacatctactattttaaaactaatcttaatatattaaatactca

SEQ ID NO: 45658 - DNA, 50 bp, synthetic construct
  source 1..50: mol_type = other DNA
aaaattaacatctactattttaaaactaatcttaatatattaaatactcg

SEQ ID NO: 45659 - DNA, 50 bp, synthetic construct
  source 1..50: mol_type = other DNA
aaaacacacacacaacaacaaacaataacaataatctaaataatattaca

SEQ ID NO: 45660 - DNA, 50 bp, synthetic construct
  source 1..50: mol_type = other DNA
aaaacacgcacgcaacaacaaacgataacgataatctaaataatattacg

SEQ ID NO: 45661 - DNA, 50 bp, synthetic construct
  source 1..50: mol_type = other DNA
tacaattaattaattattctaaccaatcaaataacattatttacaattca

SEQ ID NO: 45662 - DNA, 50 bp, synthetic construct
  source 1..50: mol_type = other DNA
tacaattaattaattattctaaccaatcaaataacgttatttacaattcg

SEQ ID NO: 45663 - DNA, 50 bp, synthetic construct
  source 1..50: mol_type = other DNA
aaaacaactcaaacccccaaaccacaaaaccttatcactcactaaaaaca

SEQ ID NO: 45664 - DNA, 50 bp, synthetic construct
  source 1..50: mol_type = other DNA
aaaacaactcaaacccccaaaccacgaaaccttatcactcgctaaaaacg

SEQ ID NO: 45665 - DNA, 50 bp, synthetic construct
  source 1..50: mol_type = other DNA
caactattataaacacacacaaaataacatcaaaaaatccaaaaaaaaca

SEQ ID NO: 45666 - DNA, 50 bp, synthetic construct
  source 1..50: mol_type = other DNA
caactattataaacacgcacaaaataacatcaaaaaatccaaaaaaaacg

SEQ ID NO: 45667 - DNA, 50 bp, synthetic construct
  source 1..50: mol_type = other DNA
aaacaaaacctaaacattttaatcaataaataaaatcataataattacca

SEQ ID NO: 45668 - DNA, 50 bp, synthetic construct
  source 1..50: mol_type = other DNA
aaacaaaacctaaacattttaatcaataaataaaatcataataattaccg

SEQ ID NO: 45669 - DNA, 50 bp, synthetic construct
  source 1..50: mol_type = other DNA
agttttttagaaaattataagagaatgaaatttaattagttgttgatttt

SEQ ID NO: 45670 - DNA, 50 bp, synthetic construct
  source 1..50: mol_type = other DNA
agttttttagaaaattataagagaatgaaatttaattagttgttgatttc

SEQ ID NO: 45671 - DNA, 50 bp, synthetic construct
  source 1..50: mol_type = other DNA
tattgtattgttttttgagggagggataatttttgttatattattaattt

SEQ ID NO: 45672 - DNA, 50 bp, synthetic construct
  source 1..50: mol_type = other DNA
tattgtattgttttttgagggagggataatttttgttatattattaattc

SEQ ID NO: 45673 - DNA, 50 bp, synthetic construct
  source 1..50: mol_type = other DNA
aaaatatgggtgaataatgtatattgttatgttttaggttaaaataaaat

SEQ ID NO: 45674 - DNA, 50 bp, synthetic construct
  source 1..50: mol_type = other DNA
aaaatatgggtgaataatgtatattgttatgttttaggttaaaataaaac

SEQ ID NO: 45675 - DNA, 50 bp, synthetic construct
  source 1..50: mol_type = other DNA
aagtttagttatgttagtaatattttaatgaagagtttagtaaataatgt

SEQ ID NO: 45676 - DNA, 50 bp, synthetic construct
  source 1..50: mol_type = other DNA
aagtttagttatgttagtaatattttaatgaagagtttagtaaataatgc

SEQ ID NO: 45677 - DNA, 50 bp, synthetic construct
  source 1..50: mol_type = other DNA
ttttatttaataacaattaattaaaatatataaccttactactaacatca

SEQ ID NO: 45678 - DNA, 50 bp, synthetic construct
  source 1..50: mol_type = other DNA
ttttatttaataacaattaattaaaatatataaccttactactaacatcg

SEQ ID NO: 45679 - DNA, 50 bp, synthetic construct
  source 1..50: mol_type = other DNA
ctaatcccctctctactaataacacaaaaaattaaccaaacataataaca

SEQ ID NO: 45680 - DNA, 50 bp, synthetic construct
  source 1..50: mol_type = other DNA
ctaatcccctctctactaataacacaaaaaattaaccaaacgtaataacg

SEQ ID NO: 45681 - DNA, 50 bp, synthetic construct
  source 1..50: mol_type = other DNA
ttataaaaccatttaataaacaaacaaaataaacatttccaaaatattca

SEQ ID NO: 45682 - DNA, 50 bp, synthetic construct
  source 1..50: mol_type = other DNA
ttataaaaccatttaataaacaaacaaaataaacgtttccaaaatattcg

SEQ ID NO: 45683 - DNA, 50 bp, synthetic construct
  source 1..50: mol_type = other DNA
aaaactaaaatttaaataatcaattcataaaccaaacataataactcaca

SEQ ID NO: 45684 - DNA, 50 bp, synthetic construct
  source 1..50: mol_type = other DNA
aaaactaaaatttaaataatcaattcataaaccaaacataataactcacg

SEQ ID NO: 45685 - DNA, 50 bp, synthetic construct
  source 1..50: mol_type = other DNA
taatattctctcctacataaaatcctaccaaaaaaacctctcacaaaaca

SEQ ID NO: 45686 - DNA, 50 bp, synthetic construct
  source 1..50: mol_type = other DNA
taatattctctcctacgtaaaatcctaccaaaaaaacctctcacaaaacg

SEQ ID NO: 45687 - DNA, 50 bp, synthetic construct
  source 1..50: mol_type = other DNA
acacaaacctaaaaacacaaaacccaactaaaataaataaacccaataca

SEQ ID NO: 45688 - DNA, 50 bp, synthetic construct
  source 1..50: mol_type = other DNA
acgcaaacctaaaaacgcgaaacccgactaaaataaataaacccgatacg

SEQ ID NO: 45689 - DNA, 50 bp, synthetic construct
  source 1..50: mol_type = other DNA
ataaatcacaaaaaacactctaaccacaacccaaaaccccaaaaaaccca

SEQ ID NO: 45690 - DNA, 50 bp, synthetic construct
  source 1..50: mol_type = other DNA
ataaatcacaaaaaacactctaaccacaacccgaaaccccaaaaaacccg

SEQ ID NO: 45691 - DNA, 50 bp, synthetic construct
  source 1..50: mol_type = other DNA
aatacaaaactaaaaaactaaaaacataactacctaaaaatactaaccca

SEQ ID NO: 45692 - DNA, 50 bp, synthetic construct
  source 1..50: mol_type = other DNA
aatacgaaactaaaaaactaaaaacgtaactacctaaaaatactaacccg

SEQ ID NO: 45693 - DNA, 50 bp, synthetic construct
  source 1..50: mol_type = other DNA
caattaaaaataacacaaaataatacaaatcttcttattatcacaaacca

SEQ ID NO: 45694 - DNA, 50 bp, synthetic construct
  source 1..50: mol_type = other DNA
caattaaaaataacgcgaaataatacgaatcttcttattatcgcgaaccg

SEQ ID NO: 45695 - DNA, 50 bp, synthetic construct
  source 1..50: mol_type = other DNA
caataaactaaacccaaattcaaaaaataaaaattcaaacccaaaactca

SEQ ID NO: 45696 - DNA, 50 bp, synthetic construct
  source 1..50: mol_type = other DNA
caataaactaaacccgaattcgaaaaataaaaattcaaacccgaaactcg

SEQ ID NO: 45697 - DNA, 50 bp, synthetic construct
  source 1..50: mol_type = other DNA
actaaaacaccaacactaaaactaaaacccaaactaaactaaaaaaaaca

SEQ ID NO: 45698 - DNA, 50 bp, synthetic construct
  source 1..50: mol_type = other DNA
actaaaacgccgacgctaaaactaaaacccgaactaaactaaaaaaaacg

SEQ ID NO: 45699 - DNA, 50 bp, synthetic construct
  source 1..50: mol_type = other DNA
aaaaaatcacttaaacctaaaaatatcaaaactacaataaaccataatca

SEQ ID NO: 45700 - DNA, 50 bp, synthetic construct
  source 1..50: mol_type = other DNA
aaaaaatcgcttaaacctaaaaatatcaaaactacaataaaccgtaatcg

SEQ ID NO: 45701 - DNA, 50 bp, synthetic construct
  source 1..50: mol_type = other DNA
acacacaaaaaacttaataaatcattcatacacatattaaatatatacca

SEQ ID NO: 45702 - DNA, 50 bp, synthetic construct
  source 1..50: mol_type = other DNA
acacacgaaaaacttaataaatcgttcatacgcgtattaaatatataccg

SEQ ID NO: 45703 - DNA, 50 bp, synthetic construct
  source 1..50: mol_type = other DNA
cataaaaaaaataacatatccctcctatatctaactcacaaaaaccaaca

SEQ ID NO: 45704 - DNA, 50 bp, synthetic construct
  source 1..50: mol_type = other DNA
cgtaaaaaaaataacatatccctcctatatctaactcacgaaaaccgacg

SEQ ID NO: 45705 - DNA, 50 bp, synthetic construct
  source 1..50: mol_type = other DNA
aaaaaaccacaaaacataacaaaaacaaacacaaaaaacaccaatcccca

SEQ ID NO: 45706 - DNA, 50 bp, synthetic construct
  source 1..50: mol_type = other DNA
aaaaaaccacaaaacataacgaaaacaaacacaaaaaacgccgatccccg

SEQ ID NO: 45707 - DNA, 50 bp, synthetic construct
  source 1..50: mol_type = other DNA
aaaacataacacaccatttcaaaaaaaacaaaaccaaaaactcccccaca

SEQ ID NO: 45708 - DNA, 50 bp, synthetic construct
  source 1..50: mol_type = other DNA
aaaacgtaacgcaccatttcaaaaaaaacgaaaccaaaaactcccccacg

SEQ ID NO: 45709 - DNA, 50 bp, synthetic construct
  source 1..50: mol_type = other DNA
tccataacaacctccccaattttcctttacccaatcaatttttccctaca

SEQ ID NO: 45710 - DNA, 50 bp, synthetic construct
  source 1..50: mol_type = other DNA
tccataacaacctccccaattttcctttacccaatcaatttttccctacg

SEQ ID NO: 45711 - DNA, 50 bp, synthetic construct
  source 1..50: mol_type = other DNA
catctctaccctaaaaaactaaaaccactaacaaaaaccaaaacaaatca

SEQ ID NO: 45712 - DNA, 50 bp, synthetic construct
  source 1..50: mol_type = other DNA
cgtctctaccctaaaaaactaaaaccactaacaaaaaccaaaacgaatcg

SEQ ID NO: 45713 - DNA, 50 bp, synthetic construct
  source 1..50: mol_type = other DNA
tccttcatctctaccctaaaaaactaaaaccactaacaaaaaccaaaaca

SEQ ID NO: 45714 - DNA, 50 bp, synthetic construct
  source 1..50: mol_type = other DNA
tccttcgtctctaccctaaaaaactaaaaccactaacaaaaaccaaaacg

SEQ ID NO: 45715 - DNA, 50 bp, synthetic construct
  source 1..50: mol_type = other DNA
aaactaaaaattacacttcaaatcacttaccaaatttatatacattcaca

SEQ ID NO: 45716 - DNA, 50 bp, synthetic construct
  source 1..50: mol_type = other DNA
aaactaaaaattacgcttcgaatcgcttaccgaatttatatacattcacg

SEQ ID NO: 45717 - DNA, 50 bp, synthetic construct
  source 1..50: mol_type = other DNA
tatagagatttgaattatttttttataattagttttagttttggaggttt

SEQ ID NO: 45718 - DNA, 50 bp, synthetic construct
  source 1..50: mol_type = other DNA
tatagagatttgaattatttttttataattagttttagttttggaggttc

SEQ ID NO: 45719 - DNA, 50 bp, synthetic construct
  source 1..50: mol_type = other DNA
ctacaaaccccaatcctccaaactaaacaaattatcaataaaaaaacaca

SEQ ID NO: 45720 - DNA, 50 bp, synthetic construct
  source 1..50: mol_type = other DNA
ctacaaaccccaatcctccgaactaaacaaattatcgataaaaaaacgcg

SEQ ID NO: 45721 - DNA, 50 bp, synthetic construct
  source 1..50: mol_type = other DNA
tcatctccctaatatctaaacatccaaatacccctaatatctcctaccca

SEQ ID NO: 45722 - DNA, 50 bp, synthetic construct
  source 1..50: mol_type = other DNA
tcatctccctaatatctaaacgtccaaatacccctaatatctcctacccg

SEQ ID NO: 45723 - DNA, 50 bp, synthetic construct
  source 1..50: mol_type = other DNA
ttaatttatgtatagtttttggttgtgtaagatagaaagttgttttaaat

SEQ ID NO: 45724 - DNA, 50 bp, synthetic construct
  source 1..50: mol_type = other DNA
ttaatttatgtatagtttttggttgtgtaagatagaaagttgttttaaac

SEQ ID NO: 45725 - DNA, 50 bp, synthetic construct
  source 1..50: mol_type = other DNA
ataaatcaaactaacacaaaccaacatttaacaaacaaaccacaaaaaca

SEQ ID NO: 45726 - DNA, 50 bp, synthetic construct
  source 1..50: mol_type = other DNA
ataaatcaaactaacgcaaaccaacgtttaacaaacgaaccacaaaaacg

SEQ ID NO: 45727 - DNA, 50 bp, synthetic construct
  source 1..50: mol_type = other DNA
catctataccaaacatatcaaaaccaaaacacaaatatacctaacaacca

SEQ ID NO: 45728 - DNA, 50 bp, synthetic construct
  source 1..50: mol_type = other DNA
catctataccgaacgtatcgaaaccaaaacgcaaatatacctaacgaccg

SEQ ID NO: 45729 - DNA, 50 bp, synthetic construct
  source 1..50: mol_type = other DNA
acaaaacaacaaaactcataatacacaacaaaattcaaacaaccaaccca

SEQ ID NO: 45730 - DNA, 50 bp, synthetic construct
  source 1..50: mol_type = other DNA
acaaaacgacaaaactcataatacacaacaaaattcgaacaaccgacccg

SEQ ID NO: 45731 - DNA, 50 bp, synthetic construct
  source 1..50: mol_type = other DNA
aaccaacaaaacaacaaaactcataatacacaacaaaattcaaacaacca

SEQ ID NO: 45732 - DNA, 50 bp, synthetic construct
  source 1..50: mol_type = other DNA
aaccgacaaaacgacaaaactcataatacacaacaaaattcgaacaaccg

SEQ ID NO: 45733 - DNA, 50 bp, synthetic construct
  source 1..50: mol_type = other DNA
tatacttaccaaataaaaaactcttctcaccacatccacaaacacccaca

SEQ ID NO: 45734 - DNA, 50 bp, synthetic construct
  source 1..50: mol_type = other DNA
tatacttaccaaataaaaaactcttctcaccgcatccacaaacacccacg

SEQ ID NO: 45735 - DNA, 50 bp, synthetic construct
  source 1..50: mol_type = other DNA
ttttggtagtggtagtaaaatagaaatgtgtttttgaatttgagtagttt

SEQ ID NO: 45736 - DNA, 50 bp, synthetic construct
  source 1..50: mol_type = other DNA
ttttggtagtggtagtaaaatagaaatgtgtttttgaatttgagtagttc

SEQ ID NO: 45737 - DNA, 50 bp, synthetic construct
  source 1..50: mol_type = other DNA
aatcattttcaacaaatacaaaactccctcatcaaaacaatcaaaataca

SEQ ID NO: 45738 - DNA, 50 bp, synthetic construct
  source 1..50: mol_type = other DNA
aatcattttcaacgaatacaaaactccctcgtcgaaacgatcgaaatacg

SEQ ID NO: 45739 - DNA, 50 bp, synthetic construct
  source 1..50: mol_type = other DNA
atccacaaccccaaacaataaatttctaaaaacaaatcaaaccaaaacca

SEQ ID NO: 45740 - DNA, 50 bp, synthetic construct
  source 1..50: mol_type = other DNA
atccgcaaccccaaacaataaatttctaaaaacgaatcgaaccgaaaccg

SEQ ID NO: 45741 - DNA, 50 bp, synthetic construct
  source 1..50: mol_type = other DNA
aaaattacctaatcttacaatcaactcccccaaacaaaacataatcccca

SEQ ID NO: 45742 - DNA, 50 bp, synthetic construct
  source 1..50: mol_type = other DNA
aaaattacctaatcttacgatcaactcccccaaacaaaacgtaatccccg

SEQ ID NO: 45743 - DNA, 50 bp, synthetic construct
  source 1..50: mol_type = other DNA
accacatccaatcctcaattactataataacaactacaaacacaacttca

SEQ ID NO: 45744 - DNA, 50 bp, synthetic construct
  source 1..50: mol_type = other DNA
gccacatccgatcctcgattactataataacaactacaaacacaacttcg

SEQ ID NO: 45745 - DNA, 50 bp, synthetic construct
  source 1..50: mol_type = other DNA
aactcaacaaaaataaactataaaccaaattaaatatataaaaactaaca

SEQ ID NO: 45746 - DNA, 50 bp, synthetic construct
  source 1..50: mol_type = other DNA
aactcgacaaaaataaactataaaccaaattaaatatataaaaactaacg

SEQ ID NO: 45747 - DNA, 50 bp, synthetic construct
  source 1..50: mol_type = other DNA
aaaccaaacacaatatctcccacctataatcctaacactttataaaatca

SEQ ID NO: 45748 - DNA, 50 bp, synthetic construct
  source 1..50: mol_type = other DNA
aaaccgaacacgatatctcccgcctataatcctaacactttataaaatcg

SEQ ID NO: 45749 - DNA, 50 bp, synthetic construct
  source 1..50: mol_type = other DNA
aaacacaatatctcccacctataatcctaacactttataaaatcaaaaca

SEQ ID NO: 45750 - DNA, 50 bp, synthetic construct
  source 1..50: mol_type = other DNA
gaacacgatatctcccgcctataatcctaacactttataaaatcgaaacg

SEQ ID NO: 45751 - DNA, 50 bp, synthetic construct
  source 1..50: mol_type = other DNA
aatattcttccccttctcctctttcttcttcacaaacaaatttaactaca

SEQ ID NO: 45752 - DNA, 50 bp, synthetic construct
  source 1..50: mol_type = other DNA
aatattcttccccttctcctctttcttcttcgcaaacgaatttaactacg

SEQ ID NO: 45753 - DNA, 50 bp, synthetic construct
  source 1..50: mol_type = other DNA
cctaaccaataaaaaacccaacttttacacctcatattaataaaattaca

SEQ ID NO: 45754 - DNA, 50 bp, synthetic construct
  source 1..50: mol_type = other DNA
cctaaccaataaaaaacccgacttttacgcctcgtattaataaaattacg

SEQ ID NO: 45755 - DNA, 50 bp, synthetic construct
  source 1..50: mol_type = other DNA
atggttttattttatagtaaagatgagtgtgtgtttttgtgagggtggtt

SEQ ID NO: 45756 - DNA, 50 bp, synthetic construct
  source 1..50: mol_type = other DNA
atggttttattttatagtaaagatgagtgcgtgtttttgtgagggtggtc

SEQ ID NO: 45757 - DNA, 50 bp, synthetic construct
  source 1..50: mol_type = other DNA
aaatcccatctctacaaaaaatacaaaaattacctaaacataataacaca

SEQ ID NO: 45758 - DNA, 50 bp, synthetic construct
  source 1..50: mol_type = other DNA
aaatcccgtctctacaaaaaatacaaaaattacctaaacgtaataacacg

SEQ ID NO: 45759 - DNA, 50 bp, synthetic construct
  source 1..50: mol_type = other DNA
taaccaaaaaaaatcccatctctacaaaaaatacaaaaattacctaaaca

SEQ ID NO: 45760 - DNA, 50 bp, synthetic construct
  source 1..50: mol_type = other DNA
taaccaaaaaaaatcccgtctctacaaaaaatacaaaaattacctaaacg

SEQ ID NO: 45761 - DNA, 50 bp, synthetic construct
  source 1..50: mol_type = other DNA
ccacttaaaaacccccaatttccaaaacaaaaaaacaatacccaccaaca

SEQ ID NO: 45762 - DNA, 50 bp, synthetic construct
  source 1..50: mol_type = other DNA
ccacttaaaaacccccaatttccgaaacaaaaaaacaatacccaccaacg

SEQ ID NO: 45763 - DNA, 50 bp, synthetic construct
  source 1..50: mol_type = other DNA
ctcacttattcaaacaaataccctaaaataacacatatccaccaaacaca

SEQ ID NO: 45764 - DNA, 50 bp, synthetic construct
  source 1..50: mol_type = other DNA
ctcacttattcaaacaaataccctaaaataacacatatccgccgaacgcg

SEQ ID NO: 45765 - DNA, 50 bp, synthetic construct
  source 1..50: mol_type = other DNA
caaacaaataccctaaaataacacatatccaccaaacacaataactcaca

SEQ ID NO: 45766 - DNA, 50 bp, synthetic construct
  source 1..50: mol_type = other DNA
caaacaaataccctaaaataacacatatccgccgaacgcgataactcacg

SEQ ID NO: 45767 - DNA, 50 bp, synthetic construct
  source 1..50: mol_type = other DNA
acaacaaaaacaacaacccctaaaaacaaatctttatactaaaccccaca

SEQ ID NO: 45768 - DNA, 50 bp, synthetic construct
  source 1..50: mol_type = other DNA
acgacgaaaacgacgacccctaaaaacaaatctttatactaaaccccacg

SEQ ID NO: 45769 - DNA, 50 bp, synthetic construct
  source 1..50: mol_type = other DNA
attaattaaataaaaccctcacttttaataatttcaaaattaaaataaca

SEQ ID NO: 45770 - DNA, 50 bp, synthetic construct
  source 1..50: mol_type = other DNA
attaattaaataaaaccctcacttttaataatttcaaaattaaaataacg

SEQ ID NO: 45771 - DNA, 50 bp, synthetic construct
  source 1..50: mol_type = other DNA
acaccatcctaaaaacaaacaatcttcccactttcctactaaaaaaaaca

SEQ ID NO: 45772 - DNA, 50 bp, synthetic construct
  source 1..50: mol_type = other DNA
acaccgtcctaaaaacaaacgatcttcccactttcctactaaaaaaaacg

SEQ ID NO: 45773 - DNA, 50 bp, synthetic construct
  source 1..50: mol_type = other DNA
gaatttgttttttttagtaggaaagtgggaagattgtttgtttttaggat

SEQ ID NO: 45774 - DNA, 50 bp, synthetic construct
  source 1..50: mol_type = other DNA
gaattcgttttttttagtaggaaagtgggaagatcgtttgtttttaggac

SEQ ID NO: 45775 - DNA, 50 bp, synthetic construct
  source 1..50: mol_type = other DNA
tcaaaaaaaaaccataaaaaactcaacacacaaacaaactaacatcacca

SEQ ID NO: 45776 - DNA, 50 bp, synthetic construct
  source 1..50: mol_type = other DNA
tcaaaaaaaaaccgtaaaaaactcgacgcacaaacgaactaacatcaccg

SEQ ID NO: 45777 - DNA, 50 bp, synthetic construct
  source 1..50: mol_type = other DNA
caaaaaataaactctaccctaaactaaaaatcctcactacaaacacacca

SEQ ID NO: 45778 - DNA, 50 bp, synthetic construct
  source 1..50: mol_type = other DNA
cgaaaaataaactctaccctaaactaaaaatcctcgctacaaacgcgccg

SEQ ID NO: 45779 - DNA, 50 bp, synthetic construct
  source 1..50: mol_type = other DNA
ccaaactaaaaaaacaaaaaataaactctaccctaaactaaaaatcctca

SEQ ID NO: 45780 - DNA, 50 bp, synthetic construct
  source 1..50: mol_type = other DNA
ccaaactaaaaaaacgaaaaataaactctaccctaaactaaaaatcctcg

SEQ ID NO: 45781 - DNA, 50 bp, synthetic construct
  source 1..50: mol_type = other DNA
ctaaaaaacacaccaaacaacaaacaaaaacctaaaaaaaaccaaaaaca

SEQ ID NO: 45782 - DNA, 50 bp, synthetic construct
  source 1..50: mol_type = other DNA
ctaaaaaacgcaccgaacgacgaacgaaaacctaaaaaaaaccgaaaacg

SEQ ID NO: 45783 - DNA, 50 bp, synthetic construct
  source 1..50: mol_type = other DNA
actaaaaaataccaaaaatcccaaaacacatctttactcacaactcatca

SEQ ID NO: 45784 - DNA, 50 bp, synthetic construct
  source 1..50: mol_type = other DNA
actaaaaaataccgaaaatcccgaaacacatctttactcgcaactcgtcg

SEQ ID NO: 45785 - DNA, 50 bp, synthetic construct
  source 1..50: mol_type = other DNA
acaaaaaccaccaacatcctttccacaaaaaaatccactaaaaaatacca

SEQ ID NO: 45786 - DNA, 50 bp, synthetic construct
  source 1..50: mol_type = other DNA
acaaaaaccgccaacatcctttccgcaaaaaaatccactaaaaaataccg

SEQ ID NO: 45787 - DNA, 50 bp, synthetic construct
  source 1..50: mol_type = other DNA
aaatctaaccatatctccacaaatcacaaaaaccaccaacatcctttcca

SEQ ID NO: 45788 - DNA, 50 bp, synthetic construct
  source 1..50: mol_type = other DNA
aaatctaaccgtatctccacaaatcacaaaaaccgccaacatcctttccg

SEQ ID NO: 45789 - DNA, 50 bp, synthetic construct
  source 1..50: mol_type = other DNA
caaaaacacaaaaaacaaaattaaaacttactaaaaaacaaatctaacca

SEQ ID NO: 45790 - DNA, 50 bp, synthetic construct
  source 1..50: mol_type = other DNA
caaaaacgcaaaaaacaaaattaaaacttactaaaaaacaaatctaaccg

SEQ ID NO: 45791 - DNA, 50 bp, synthetic construct
  source 1..50: mol_type = other DNA
taccctccaataaattccaattttatcccctacatttctaaaaactctca

SEQ ID NO: 45792 - DNA, 50 bp, synthetic construct
  source 1..50: mol_type = other DNA
taccctccaataaattccaattttatcccctacgtttctaaaaactctcg

SEQ ID NO: 45793 - DNA, 50 bp, synthetic construct
  source 1..50: mol_type = other DNA
taaaaactctcaaaacttaaccctaaataaaaatacactataaataatca

SEQ ID NO: 45794 - DNA, 50 bp, synthetic construct
  source 1..50: mol_type = other DNA
taaaaactctcgaaacttaaccctaaataaaaatacgctataaataatcg

SEQ ID NO: 45795 - DNA, 50 bp, synthetic construct
  source 1..50: mol_type = other DNA
aataaattacatcttaaaaataaaaacatacctcataatctaaaacttca

SEQ ID NO: 45796 - DNA, 50 bp, synthetic construct
  source 1..50: mol_type = other DNA
aataaattacatcttaaaaataaaaacgtacctcgtaatctaaaacttcg

SEQ ID NO: 45797 - DNA, 50 bp, synthetic construct
  source 1..50: mol_type = other DNA
acacaaactccaaaatccaaccaaaatacctacctaccactcaaaaaaca

SEQ ID NO: 45798 - DNA, 50 bp, synthetic construct
  source 1..50: mol_type = other DNA
acacaaactccaaaatccaaccaaaatacctacctaccgctcaaaaaacg

SEQ ID NO: 45799 - DNA, 50 bp, synthetic construct
  source 1..50: mol_type = other DNA
aggggtagttattagtaggtttgttattgtttttttagatgatttggatt

SEQ ID NO: 45800 - DNA, 50 bp, synthetic construct
  source 1..50: mol_type = other DNA
aggggtagttattagtaggtttgttattgtttttttagacgatttggatc

SEQ ID NO: 45801 - DNA, 50 bp, synthetic construct
  source 1..50: mol_type = other DNA
aaaactacacactacatactactcaaattctcctacctcccttactcaca

SEQ ID NO: 45802 - DNA, 50 bp, synthetic construct
  source 1..50: mol_type = other DNA
aaaactacacactacatactactcgaattctcctacctcccttactcacg

SEQ ID NO: 45803 - DNA, 50 bp, synthetic construct
  source 1..50: mol_type = other DNA
aacattccaaaaattctatcttttactctataaaataaaaaacccttaca

SEQ ID NO: 45804 - DNA, 50 bp, synthetic construct
  source 1..50: mol_type = other DNA
aacattccaaaaattctatcttttactctataaaataaaaaacccttacg

SEQ ID NO: 45805 - DNA, 50 bp, synthetic construct
  source 1..50: mol_type = other DNA
acattcaacaacaacaaaaaaattccataaaccatacttcctaaaaaaca

SEQ ID NO: 45806 - DNA, 50 bp, synthetic construct
  source 1..50: mol_type = other DNA
acgttcaacaacgacaaaaaaattccgtaaaccatacttcctaaaaaacg

SEQ ID NO: 45807 - DNA, 50 bp, synthetic construct
  source 1..50: mol_type = other DNA
catatataaaaactataaaaaaaacaacacacatttataatcaccataca

SEQ ID NO: 45808 - DNA, 50 bp, synthetic construct
  source 1..50: mol_type = other DNA
cgtatataaaaactataaaaaaaacaacacacgtttataatcaccgtacg

SEQ ID NO: 45809 - DNA, 50 bp, synthetic construct
  source 1..50: mol_type = other DNA
acttcatatataaaaactataaaaaaaacaacacacatttataatcacca

SEQ ID NO: 45810 - DNA, 50 bp, synthetic construct
  source 1..50: mol_type = other DNA
gcttcgtatataaaaactataaaaaaaacaacacacgtttataatcaccg

SEQ ID NO: 45811 - DNA, 50 bp, synthetic construct
  source 1..50: mol_type = other DNA
tacatatacatacacttcatatataaaaactataaaaaaaacaacacaca

SEQ ID NO: 45812 - DNA, 50 bp, synthetic construct
  source 1..50: mol_type = other DNA
tacgtatacatacgcttcgtatataaaaactataaaaaaaacaacacacg

SEQ ID NO: 45813 - DNA, 50 bp, synthetic construct
  source 1..50: mol_type = other DNA
tatctacaacccataatatcaaacccatacatacatatacatacacttca

SEQ ID NO: 45814 - DNA, 50 bp, synthetic construct
  source 1..50: mol_type = other DNA
tatctacaacccataatatcaaacccatacgtacgtatacatacgcttcg

SEQ ID NO: 45815 - DNA, 50 bp, synthetic construct
  source 1..50: mol_type = other DNA
atataccacccacaaacaatatctacaacccataatatcaaacccataca

SEQ ID NO: 45816 - DNA, 50 bp, synthetic construct
  source 1..50: mol_type = other DNA
atataccgcccacaaacgatatctacaacccataatatcaaacccatacg

SEQ ID NO: 45817 - DNA, 50 bp, synthetic construct
  source 1..50: mol_type = other DNA
aacacatatacacacacacataaacctaacaccataaactacaaacacca

SEQ ID NO: 45818 - DNA, 50 bp, synthetic construct
  source 1..50: mol_type = other DNA
aacgcatatacacgcacgcataaacctaacaccataaactacaaacaccg

SEQ ID NO: 45819 - DNA, 50 bp, synthetic construct
  source 1..50: mol_type = other DNA
caaccaaatttaatttaacaaaaaaacctcatttccttatcccaacctca

SEQ ID NO: 45820 - DNA, 50 bp, synthetic construct
  source 1..50: mol_type = other DNA
cgaccaaatttaatttaacaaaaaaacctcgtttccttatcccaacctcg

SEQ ID NO: 45821 - DNA, 50 bp, synthetic construct
  source 1..50: mol_type = other DNA
ccaaaacaaaaaacaaactacaatctataaccaaaactataccaaaccca

SEQ ID NO: 45822 - DNA, 50 bp, synthetic construct
  source 1..50: mol_type = other DNA
ccgaaacgaaaaacgaactacaatctataaccaaaactataccgaacccg

SEQ ID NO: 45823 - DNA, 50 bp, synthetic construct
  source 1..50: mol_type = other DNA
aaaaaaccaaaacaaaaaacaaactacaatctataaccaaaactatacca

SEQ ID NO: 45824 - DNA, 50 bp, synthetic construct
  source 1..50: mol_type = other DNA
aaaaaaccgaaacgaaaaacgaactacaatctataaccaaaactataccg

SEQ ID NO: 45825 - DNA, 50 bp, synthetic construct
  source 1..50: mol_type = other DNA
acacataataaactcactactactaaaaccaaaaaactacacaacaacca

SEQ ID NO: 45826 - DNA, 50 bp, synthetic construct
  source 1..50: mol_type = other DNA
acgcataataaactcactactactaaaaccgaaaaactacgcgacaaccg

SEQ ID NO: 45827 - DNA, 50 bp, synthetic construct
  source 1..50: mol_type = other DNA
ccaattcctaacacacaaccttaatcctaaaacctaactaccaacttcca

SEQ ID NO: 45828 - DNA, 50 bp, synthetic construct
  source 1..50: mol_type = other DNA
ccaattcctaacacgcaaccttaatcctaaaacctaactaccaacttccg

SEQ ID NO: 45829 - DNA, 50 bp, synthetic construct
  source 1..50: mol_type = other DNA
taaaaacaaaccaattaccaaaaaaaactaaaatcacataacaaccaaca

SEQ ID NO: 45830 - DNA, 50 bp, synthetic construct
  source 1..50: mol_type = other DNA
taaaaacgaaccgattaccgaaaaaaactaaaatcacgtaacgaccgacg

SEQ ID NO: 45831 - DNA, 50 bp, synthetic construct
  source 1..50: mol_type = other DNA
caataaaaacaaaccaattaccaaaaaaaactaaaatcacataacaacca

SEQ ID NO: 45832 - DNA, 50 bp, synthetic construct
  source 1..50: mol_type = other DNA
cgataaaaacgaaccgattaccgaaaaaaactaaaatcacgtaacgaccg

SEQ ID NO: 45833 - DNA, 50 bp, synthetic construct
  source 1..50: mol_type = other DNA
atctcaataaaaacaaaccaattaccaaaaaaaactaaaatcacataaca

SEQ ID NO: 45834 - DNA, 50 bp, synthetic construct
  source 1..50: mol_type = other DNA
atctcgataaaaacgaaccgattaccgaaaaaaactaaaatcacgtaacg

SEQ ID NO: 45835 - DNA, 50 bp, synthetic construct
  source 1..50: mol_type = other DNA
acaaaatctcaataaaaacaaaccaattaccaaaaaaaactaaaatcaca

SEQ ID NO: 45836 - DNA, 50 bp, synthetic construct
  source 1..50: mol_type = other DNA
acgaaatctcgataaaaacgaaccgattaccgaaaaaaactaaaatcacg

SEQ ID NO: 45837 - DNA, 50 bp, synthetic construct
  source 1..50: mol_type = other DNA
caaattaaacctcccttccaaattaacaaaatctcaataaaaacaaacca

SEQ ID NO: 45838 - DNA, 50 bp, synthetic construct
  source 1..50: mol_type = other DNA
caaattaaacctcccttccgaattaacgaaatctcgataaaaacgaaccg

SEQ ID NO: 45839 - DNA, 50 bp, synthetic construct
  source 1..50: mol_type = other DNA
ataaaacacaccctaacctaaccaaattaaacctcccttccaaattaaca

SEQ ID NO: 45840 - DNA, 50 bp, synthetic construct
  source 1..50: mol_type = other DNA
ataaaacacgccctaacctaaccaaattaaacctcccttccgaattaacg

SEQ ID NO: 45841 - DNA, 50 bp, synthetic construct
  source 1..50: mol_type = other DNA
ttaccaaaaaaacctaaacaacaacctaaaactccaaaacaaataaaaca

SEQ ID NO: 45842 - DNA, 50 bp, synthetic construct
  source 1..50: mol_type = other DNA
ttaccgaaaaaacctaaacaacgacctaaaactccgaaacaaataaaacg

SEQ ID NO: 45843 - DNA, 50 bp, synthetic construct
  source 1..50: mol_type = other DNA
ctcctctccctaacaatctccaaaattttaccaaaaaaacctaaacaaca

SEQ ID NO: 45844 - DNA, 50 bp, synthetic construct
  source 1..50: mol_type = other DNA
ctcctctccctaacaatctccaaaattttaccgaaaaaacctaaacaacg

SEQ ID NO: 45845 - DNA, 50 bp, synthetic construct
  source 1..50: mol_type = other DNA
aacacaacaacctcttaaaccaaccactcaaaaaatacataatccataca

SEQ ID NO: 45846 - DNA, 50 bp, synthetic construct
  source 1..50: mol_type = other DNA
aacacaacaacctcttaaaccaaccgctcaaaaaatacataatccgtacg

SEQ ID NO: 45847 - DNA, 50 bp, synthetic construct
  source 1..50: mol_type = other DNA
tctaaacaactaacccaaaaaactactataccctctaaaaaacccaacca

SEQ ID NO: 45848 - DNA, 50 bp, synthetic construct
  source 1..50: mol_type = other DNA
tctaaacgactaacccaaaaaactactataccctctaaaaaacccgaccg

SEQ ID NO: 45849 - DNA, 50 bp, synthetic construct
  source 1..50: mol_type = other DNA
caacacaacaaaaaaaaccctctacaaatcaaactaaacataaaaaaaca

SEQ ID NO: 45850 - DNA, 50 bp, synthetic construct
  source 1..50: mol_type = other DNA
caacacgacgaaaaaaaccctctacgaatcgaactaaacgtaaaaaaacg

SEQ ID NO: 45851 - DNA, 50 bp, synthetic construct
  source 1..50: mol_type = other DNA
acaacaaacaactctacttactcaactataccaaatactaaaacaaacca

SEQ ID NO: 45852 - DNA, 50 bp, synthetic construct
  source 1..50: mol_type = other DNA
acgacgaacgactctacttactcgactataccaaatactaaaacgaaccg

SEQ ID NO: 45853 - DNA, 50 bp, synthetic construct
  source 1..50: mol_type = other DNA
aaaaaccaaaaaaacaacaacaaaaaacaacaaacaactctacttactca

SEQ ID NO: 45854 - DNA, 50 bp, synthetic construct
  source 1..50: mol_type = other DNA
aaaaaccgaaaaaacaacgacgaaaaacgacgaacgactctacttactcg

SEQ ID NO: 45855 - DNA, 50 bp, synthetic construct
  source 1..50: mol_type = other DNA
aaaaataaaacaacaccaaaaaaccaaaaaaacaacaacaaaaaacaaca

SEQ ID NO: 45856 - DNA, 50 bp, synthetic construct
  source 1..50: mol_type = other DNA
aaaaataaaacgacgccgaaaaaccgaaaaaacaacgacgaaaaacgacg

SEQ ID NO: 45857 - DNA, 50 bp, synthetic construct
  source 1..50: mol_type = other DNA
aattcaataaaacaaaaacacaaactacaaaaacaaataaatctaacaca

SEQ ID NO: 45858 - DNA, 50 bp, synthetic construct
  source 1..50: mol_type = other DNA
aattcgataaaacgaaaacgcgaactacgaaaacaaataaatctaacacg

SEQ ID NO: 45859 - DNA, 50 bp, synthetic construct
  source 1..50: mol_type = other DNA
aatccaaaataaataaaatcactactaccaaaaatccctaaacctcccca

SEQ ID NO: 45860 - DNA, 50 bp, synthetic construct
  source 1..50: mol_type = other DNA
gatccgaaataaataaaatcgctactaccgaaaatccctaaacctccccg

SEQ ID NO: 45861 - DNA, 50 bp, synthetic construct
  source 1..50: mol_type = other DNA
aacaaaaaccaaaaaaatataataaatataaaccaaacccaacttacaca

SEQ ID NO: 45862 - DNA, 50 bp, synthetic construct
  source 1..50: mol_type = other DNA
aacgaaaaccgaaaaaatataataaatataaaccgaacccgacttacgcg

SEQ ID NO: 45863 - DNA, 50 bp, synthetic construct
  source 1..50: mol_type = other DNA
taaacaaaaaccaaaaaaatataataaatataaaccaaacccaacttaca

SEQ ID NO: 45864 - DNA, 50 bp, synthetic construct
  source 1..50: mol_type = other DNA
taaacgaaaaccgaaaaaatataataaatataaaccgaacccgacttacg

SEQ ID NO: 45865 - DNA, 50 bp, synthetic construct
  source 1..50: mol_type = other DNA
acaacactaaacaaaaaccaaaaaaatataataaatataaaccaaaccca

SEQ ID NO: 45866 - DNA, 50 bp, synthetic construct
  source 1..50: mol_type = other DNA
acgacgctaaacgaaaaccgaaaaaatataataaatataaaccgaacccg

SEQ ID NO: 45867 - DNA, 50 bp, synthetic construct
  source 1..50: mol_type = other DNA
acactcacacatacccaaaaataaactaaaccaaaaacctaaaaacaaca

SEQ ID NO: 45868 - DNA, 50 bp, synthetic construct
  source 1..50: mol_type = other DNA
acactcacacgtacccgaaaataaactaaaccaaaaacctaaaaacgacg

SEQ ID NO: 45869 - DNA, 50 bp, synthetic construct
  source 1..50: mol_type = other DNA
cacacactcacacatacccaaaaataaactaaaccaaaaacctaaaaaca

SEQ ID NO: 45870 - DNA, 50 bp, synthetic construct
  source 1..50: mol_type = other DNA
cacacactcacacgtacccgaaaataaactaaaccaaaaacctaaaaacg

SEQ ID NO: 45871 - DNA, 50 bp, synthetic construct
  source 1..50: mol_type = other DNA
tatatttatatcaatctatcaatcccaccaaaaaccaaactcacttacca

SEQ ID NO: 45872 - DNA, 50 bp, synthetic construct
  source 1..50: mol_type = other DNA
tatatttatatcaatctatcaatcccaccgaaaaccgaactcgcttaccg

SEQ ID NO: 45873 - DNA, 50 bp, synthetic construct
  source 1..50: mol_type = other DNA
atcaccaaattcataacaaacttcaaattaatactaaaaacatactacca

SEQ ID NO: 45874 - DNA, 50 bp, synthetic construct
  source 1..50: mol_type = other DNA
atcaccgaattcgtaacgaacttcaaattaatactaaaaacgtactaccg

SEQ ID NO: 45875 - DNA, 50 bp, synthetic construct
  source 1..50: mol_type = other DNA
acaaaaacatcaccaaattcataacaaacttcaaattaatactaaaaaca

SEQ ID NO: 45876 - DNA, 50 bp, synthetic construct
  source 1..50: mol_type = other DNA
acgaaaacatcaccgaattcgtaacgaacttcaaattaatactaaaaacg

SEQ ID NO: 45877 - DNA, 50 bp, synthetic construct
  source 1..50: mol_type = other DNA
aaaaaaaattcaccaacaaccaatacaaaaacatcaccaaattcataaca

SEQ ID NO: 45878 - DNA, 50 bp, synthetic construct
  source 1..50: mol_type = other DNA
aaaaaaaattcgccaacgaccaatacgaaaacatcaccgaattcgtaacg

SEQ ID NO: 45879 - DNA, 50 bp, synthetic construct
  source 1..50: mol_type = other DNA
ctacaacaaaactaccacatcctaaacaaattcctacaaaaaaaacacca

SEQ ID NO: 45880 - DNA, 50 bp, synthetic construct
  source 1..50: mol_type = other DNA
ctacaacaaaactaccgcatcctaaacgaattcctacaaaaaaaacaccg

SEQ ID NO: 45881 - DNA, 50 bp, synthetic construct
  source 1..50: mol_type = other DNA
acttctcctacaaaaactcacccaaaatacaataaccctactataactca

SEQ ID NO: 45882 - DNA, 50 bp, synthetic construct
  source 1..50: mol_type = other DNA
acttctcctacaaaaactcgcccaaaatacgataaccctactataactcg

SEQ ID NO: 45883 - DNA, 50 bp, synthetic construct
  source 1..50: mol_type = other DNA
aaacctaccaaaacataaatatacccaaaacaccaaaaacaataaaacca

SEQ ID NO: 45884 - DNA, 50 bp, synthetic construct
  source 1..50: mol_type = other DNA
aaacctaccgaaacataaatatacccgaaacgccgaaaacgataaaaccg

SEQ ID NO: 45885 - DNA, 50 bp, synthetic construct
  source 1..50: mol_type = other DNA
aaacacactcataccccaacaaacctaaactaaacaatataaaacaacca

SEQ ID NO: 45886 - DNA, 50 bp, synthetic construct
  source 1..50: mol_type = other DNA
gaacacactcataccccgacaaacctaaactaaacgatataaaacaaccg

SEQ ID NO: 45887 - DNA, 50 bp, synthetic construct
  source 1..50: mol_type = other DNA
aactaaacaatataaaacaaccactcaaaatactaaaaaacacataaaca

SEQ ID NO: 45888 - DNA, 50 bp, synthetic construct
  source 1..50: mol_type = other DNA
aactaaacgatataaaacaaccgctcgaaatactaaaaaacgcgtaaacg

SEQ ID NO: 45889 - DNA, 50 bp, synthetic construct
  source 1..50: mol_type = other DNA
ctaaacaatataaaacaaccactcaaaatactaaaaaacacataaacaca

SEQ ID NO: 45890 - DNA, 50 bp, synthetic construct
  source 1..50: mol_type = other DNA
ctaaacgatataaaacaaccgctcgaaatactaaaaaacgcgtaaacgcg

SEQ ID NO: 45891 - DNA, 50 bp, synthetic construct
  source 1..50: mol_type = other DNA
aaaacaatacacaaacaaaacccaacaacaactatcaattaaaaacccca

SEQ ID NO: 45892 - DNA, 50 bp, synthetic construct
  source 1..50: mol_type = other DNA
aaaacgatacacgaacgaaacccgacgacaactatcaattaaaaaccccg

SEQ ID NO: 45893 - DNA, 50 bp, synthetic construct
  source 1..50: mol_type = other DNA
taaaccaaaactcttccttttacataacaaaacaaaacacaataataaca

SEQ ID NO: 45894 - DNA, 50 bp, synthetic construct
  source 1..50: mol_type = other DNA
taaaccgaaactcttccttttacgtaacgaaacgaaacacgataataacg

SEQ ID NO: 45895 - DNA, 50 bp, synthetic construct
  source 1..50: mol_type = other DNA
acctataactaaaccaaaactcttccttttacataacaaaacaaaacaca

SEQ ID NO: 45896 - DNA, 50 bp, synthetic construct
  source 1..50: mol_type = other DNA
acctataactaaaccgaaactcttccttttacgtaacgaaacgaaacacg

SEQ ID NO: 45897 - DNA, 50 bp, synthetic construct
  source 1..50: mol_type = other DNA
cttctaaacctataactaaaccaaaactcttccttttacataacaaaaca

SEQ ID NO: 45898 - DNA, 50 bp, synthetic construct
  source 1..50: mol_type = other DNA
cttctaaacctataactaaaccgaaactcttccttttacgtaacgaaacg

SEQ ID NO: 45899 - DNA, 50 bp, synthetic construct
  source 1..50: mol_type = other DNA
atcattaatccacacaaccctaacaaacttctaaacctataactaaacca

SEQ ID NO: 45900 - DNA, 50 bp, synthetic construct
  source 1..50: mol_type = other DNA
atcattaatccgcgcaaccctaacaaacttctaaacctataactaaaccg

SEQ ID NO: 45901 - DNA, 50 bp, synthetic construct
  source 1..50: mol_type = other DNA
aaaaaaaaaactccctaatcctctacacttccaaataaaacaatacctca

SEQ ID NO: 45902 - DNA, 50 bp, synthetic construct
  source 1..50: mol_type = other DNA
aaaaaaaaaactccctaatcctctacgcttccgaataaaacaatacctcg

SEQ ID NO: 45903 - DNA, 50 bp, synthetic construct
  source 1..50: mol_type = other DNA
agatggttgaataggaatagttttggtttttagtttttagtgtgagtaat

SEQ ID NO: 45904 - DNA, 50 bp, synthetic construct
  source 1..50: mol_type = other DNA
agatggtcgaataggaatagtttcggtttttagtttttagcgtgagtaac

SEQ ID NO: 45905 - DNA, 50 bp, synthetic construct
  source 1..50: mol_type = other DNA
atcaaaattcacctaaaaaaaaccaaaataaccaaataaaaacaactcca

SEQ ID NO: 45906 - DNA, 50 bp, synthetic construct
  source 1..50: mol_type = other DNA
atcaaaattcacctaaaaaaaaccaaaataaccgaataaaaacaactccg

SEQ ID NO: 45907 - DNA, 50 bp, synthetic construct
  source 1..50: mol_type = other DNA
cttctacattactcacactaaaaactaaaaaccaaaactattcctattca

SEQ ID NO: 45908 - DNA, 50 bp, synthetic construct
  source 1..50: mol_type = other DNA
cttctacgttactcacgctaaaaactaaaaaccgaaactattcctattcg

SEQ ID NO: 45909 - DNA, 50 bp, synthetic construct
  source 1..50: mol_type = other DNA
taatcttacaaaaaaaaaaccacaaaaatatcctaatctcattctcttca

SEQ ID NO: 45910 - DNA, 50 bp, synthetic construct
  source 1..50: mol_type = other DNA
taatcttacaaaaaaaaaaccacgaaaatatcctaatctcattctcttcg

SEQ ID NO: 45911 - DNA, 50 bp, synthetic construct
  source 1..50: mol_type = other DNA
ccataacctccatataaaaactccaactctataaataaacactctacaca

SEQ ID NO: 45912 - DNA, 50 bp, synthetic construct
  source 1..50: mol_type = other DNA
ccgtaacctccatataaaaactccaactctataaataaacactctacgcg

SEQ ID NO: 45913 - DNA, 50 bp, synthetic construct
  source 1..50: mol_type = other DNA
aataaacactctacacaacacaaacataacctcttcctatctttaaaaca

SEQ ID NO: 45914 - DNA, 50 bp, synthetic construct
  source 1..50: mol_type = other DNA
aataaacactctacgcgacgcaaacataacctcttcctatctttaaaacg

SEQ ID NO: 45915 - DNA, 50 bp, synthetic construct
  source 1..50: mol_type = other DNA
tctacacaacacaaacataacctcttcctatctttaaaacaatatctaca

SEQ ID NO: 45916 - DNA, 50 bp, synthetic construct
  source 1..50: mol_type = other DNA
tctacgcgacgcaaacataacctcttcctatctttaaaacgatatctacg

SEQ ID NO: 45917 - DNA, 50 bp, synthetic construct
  source 1..50: mol_type = other DNA
cctatctttaaaacaatatctacaacaacacctcaaaataattccaatca

SEQ ID NO: 45918 - DNA, 50 bp, synthetic construct
  source 1..50: mol_type = other DNA
cctatctttaaaacgatatctacgacaacgcctcaaaataattccgatcg

SEQ ID NO: 45919 - DNA, 50 bp, synthetic construct
  source 1..50: mol_type = other DNA
catcaataatacaaacctatatccacatcttaacacctaaaaaaaaacca

SEQ ID NO: 45920 - DNA, 50 bp, synthetic construct
  source 1..50: mol_type = other DNA
catcaataatacgaacctatatccacatcttaacgcctaaaaaaaaaccg

SEQ ID NO: 45921 - DNA, 50 bp, synthetic construct
  source 1..50: mol_type = other DNA
tcacaaaaccacaattaaaaaactacacaaacaaatataaacactattca

SEQ ID NO: 45922 - DNA, 50 bp, synthetic construct
  source 1..50: mol_type = other DNA
tcgcaaaaccacgattaaaaaactacgcgaacgaatataaacgctattcg

SEQ ID NO: 45923 - DNA, 50 bp, synthetic construct
  source 1..50: mol_type = other DNA
caaataataaaaaataaatccctaccaaccccaactaaaaatacaccaca

SEQ ID NO: 45924 - DNA, 50 bp, synthetic construct
  source 1..50: mol_type = other DNA
cgaataataaaaaataaatccctaccaaccccaactaaaaatacgccgcg

SEQ ID NO: 45925 - DNA, 50 bp, synthetic construct
  source 1..50: mol_type = other DNA
cctaccaaccccaactaaaaatacaccacacaaaatcaaaaataaaaaca

SEQ ID NO: 45926 - DNA, 50 bp, synthetic construct
  source 1..50: mol_type = other DNA
cctaccaaccccaactaaaaatacgccgcgcgaaatcaaaaataaaaacg

SEQ ID NO: 45927 - DNA, 50 bp, synthetic construct
  source 1..50: mol_type = other DNA
atacaccacacaaaatcaaaaataaaaacatccaaaacacaaatatctca

SEQ ID NO: 45928 - DNA, 50 bp, synthetic construct
  source 1..50: mol_type = other DNA
atacgccgcgcgaaatcaaaaataaaaacgtccgaaacgcaaatatctcg

SEQ ID NO: 45929 - DNA, 50 bp, synthetic construct
  source 1..50: mol_type = other DNA
aaaacatccaaaacacaaatatctcaccatttatatttaataaaacaaca

SEQ ID NO: 45930 - DNA, 50 bp, synthetic construct
  source 1..50: mol_type = other DNA
aaaacgtccgaaacgcaaatatctcgccgtttatatttaataaaacaacg

SEQ ID NO: 45931 - DNA, 50 bp, synthetic construct
  source 1..50: mol_type = other DNA
catccaaaacacaaatatctcaccatttatatttaataaaacaacaacca

SEQ ID NO: 45932 - DNA, 50 bp, synthetic construct
  source 1..50: mol_type = other DNA
cgtccgaaacgcaaatatctcgccgtttatatttaataaaacaacgaccg

SEQ ID NO: 45933 - DNA, 50 bp, synthetic construct
  source 1..50: mol_type = other DNA
taataaaacaacaaccataaacactaaatacccaaatccctcacttccca

SEQ ID NO: 45934 - DNA, 50 bp, synthetic construct
  source 1..50: mol_type = other DNA
taataaaacaacgaccgtaaacactaaatacccaaatccctcgcttcccg

SEQ ID NO: 45935 - DNA, 50 bp, synthetic construct
  source 1..50: mol_type = other DNA
ccctatttaaaaaccaaaaacacaaaaaaaccacaaaaaccaaacaaaca

SEQ ID NO: 45936 - DNA, 50 bp, synthetic construct
  source 1..50: mol_type = other DNA
ccctatttaaaaaccgaaaacgcgaaaaaaccgcgaaaaccaaacgaacg

SEQ ID NO: 45937 - DNA, 50 bp, synthetic construct
  source 1..50: mol_type = other DNA
tttcccctatttaaaaaccaaaaacacaaaaaaaccacaaaaaccaaaca

SEQ ID NO: 45938 - DNA, 50 bp, synthetic construct
  source 1..50: mol_type = other DNA
tttcccctatttaaaaaccgaaaacgcgaaaaaaccgcgaaaaccaaacg

SEQ ID NO: 45939 - DNA, 50 bp, synthetic construct
  source 1..50: mol_type = other DNA
tcttaaaaactcaatacccaaatttcccctatttaaaaaccaaaaacaca

SEQ ID NO: 45940 - DNA, 50 bp, synthetic construct
  source 1..50: mol_type = other DNA
tcttaaaaactcaatacccgaatttcccctatttaaaaaccgaaaacgcg

SEQ ID NO: 45941 - DNA, 50 bp, synthetic construct
  source 1..50: mol_type = other DNA
aaaaaatcaaatcccctcctccactaaaaactcaaaacttaattcaacca

SEQ ID NO: 45942 - DNA, 50 bp, synthetic construct
  source 1..50: mol_type = other DNA
aaaaaatcaaatcccctcctccgctaaaaactcaaaacttaattcgaccg

SEQ ID NO: 45943 - DNA, 50 bp, synthetic construct
  source 1..50: mol_type = other DNA
taacattcccaactataaaatctaataacccaaaccaaacaaaaaaccca

SEQ ID NO: 45944 - DNA, 50 bp, synthetic construct
  source 1..50: mol_type = other DNA
taacgttcccgactataaaatctaataacccgaaccaaacaaaaaacccg

SEQ ID NO: 45945 - DNA, 50 bp, synthetic construct
  source 1..50: mol_type = other DNA
atattctaaacaaattcactaattcacttcctcccctttatctctactca

SEQ ID NO: 45946 - DNA, 50 bp, synthetic construct
  source 1..50: mol_type = other DNA
atattctaaacgaattcactaattcacttcctcccctttatctctactcg

SEQ ID NO: 45947 - DNA, 50 bp, synthetic construct
  source 1..50: mol_type = other DNA
accacccacaaaaataaacaaaaactactctaaataaaaaacattaccca

SEQ ID NO: 45948 - DNA, 50 bp, synthetic construct
  source 1..50: mol_type = other DNA
accgcccgcaaaaataaacaaaaactactctaaataaaaaacattacccg

SEQ ID NO: 45949 - DNA, 50 bp, synthetic construct
  source 1..50: mol_type = other DNA
caaaaaaaaaaccacaaaataaaatttaaccccacaataaaaaaccaaca

SEQ ID NO: 45950 - DNA, 50 bp, synthetic construct
  source 1..50: mol_type = other DNA
caaaaaaaaaaccgcgaaataaaatttaaccccacaataaaaaaccgacg

SEQ ID NO: 45951 - DNA, 50 bp, synthetic construct
  source 1..50: mol_type = other DNA
ccaaaaccaaaaaaaacaaactccattacatactactacctacataaaca

SEQ ID NO: 45952 - DNA, 50 bp, synthetic construct
  source 1..50: mol_type = other DNA
ccaaaaccaaaaaaaacgaactccattacatactactacctacgtaaacg

SEQ ID NO: 45953 - DNA, 50 bp, synthetic construct
  source 1..50: mol_type = other DNA
aacaaacccattcccaaccaaaacaacatcaaaaataacaaaaaatacca

SEQ ID NO: 45954 - DNA, 50 bp, synthetic construct
  source 1..50: mol_type = other DNA
aacgaacccattcccaaccaaaacgacatcaaaaataacaaaaaataccg

SEQ ID NO: 45955 - DNA, 50 bp, synthetic construct
  source 1..50: mol_type = other DNA
atcctatctccactaaaaacaaacaaataaacaaacaaaaaaattaacca

SEQ ID NO: 45956 - DNA, 50 bp, synthetic construct
  source 1..50: mol_type = other DNA
atcctatctccactaaaaacaaacaaataaacaaacaaaaaaattaaccg

SEQ ID NO: 45957 - DNA, 50 bp, synthetic construct
  source 1..50: mol_type = other DNA
caattaaataaacttttcaataatttaacacaataacaacttatttctca

SEQ ID NO: 45958 - DNA, 50 bp, synthetic construct
  source 1..50: mol_type = other DNA
caattaaataaacttttcaataatttaacacaataacaacttatttctcg

SEQ ID NO: 45959 - DNA, 50 bp, synthetic construct
  source 1..50: mol_type = other DNA
ggttttattttagatttgttgaattagaatttgtgttttaattatttttt

SEQ ID NO: 45960 - DNA, 50 bp, synthetic construct
  source 1..50: mol_type = other DNA
ggttttattttagatttgttgaattagaattcgtgttttaattatttttc

SEQ ID NO: 45961 - DNA, 50 bp, synthetic construct
  source 1..50: mol_type = other DNA
actataaatctttaaaataaataacttaaaaaaatctctactcacaacca

SEQ ID NO: 45962 - DNA, 50 bp, synthetic construct
  source 1..50: mol_type = other DNA
actataaatctttaaaataaataacttaaaaaaatctctactcacaaccg

SEQ ID NO: 45963 - DNA, 50 bp, synthetic construct
  source 1..50: mol_type = other DNA
tcctactcctccctcataactatataaacacctataattccatacactca

SEQ ID NO: 45964 - DNA, 50 bp, synthetic construct
  source 1..50: mol_type = other DNA
tcctactcctccctcataactatataaacacctataattccatacactcg

SEQ ID NO: 45965 - DNA, 50 bp, synthetic construct
  source 1..50: mol_type = other DNA
ttcaacataataatatacaaccaaataaaacaaccacaaaaccaactaca

SEQ ID NO: 45966 - DNA, 50 bp, synthetic construct
  source 1..50: mol_type = other DNA
ttcgacgtaataatatacgaccaaataaaacgaccgcgaaaccgactacg

SEQ ID NO: 45967 - DNA, 50 bp, synthetic construct
  source 1..50: mol_type = other DNA
ttcctcaccaacaaaaaattcaacataataatatacaaccaaataaaaca

SEQ ID NO: 45968 - DNA, 50 bp, synthetic construct
  source 1..50: mol_type = other DNA
ttcctcgccgacgaaaaattcgacgtaataatatacgaccaaataaaacg

SEQ ID NO: 45969 - DNA, 50 bp, synthetic construct
  source 1..50: mol_type = other DNA
aactcctcatcaacaaaaaacaacacataaaacaccaaaaaaaccataca

SEQ ID NO: 45970 - DNA, 50 bp, synthetic construct
  source 1..50: mol_type = other DNA
aactcctcgtcgacgaaaaacaacacgtaaaacgccaaaaaaaccatacg

SEQ ID NO: 45971 - DNA, 50 bp, synthetic construct
  source 1..50: mol_type = other DNA
caacaaaaaacaacacataaaacaccaaaaaaaccatacacacataaaca

SEQ ID NO: 45972 - DNA, 50 bp, synthetic construct
  source 1..50: mol_type = other DNA
cgacgaaaaacaacacgtaaaacgccaaaaaaaccatacgcacgtaaacg

SEQ ID NO: 45973 - DNA, 50 bp, synthetic construct
  source 1..50: mol_type = other DNA
aaaacaacacataaaacaccaaaaaaaccatacacacataaacacaaaca

SEQ ID NO: 45974 - DNA, 50 bp, synthetic construct
  source 1..50: mol_type = other DNA
aaaacaacacgtaaaacgccaaaaaaaccatacgcacgtaaacgcaaacg

SEQ ID NO: 45975 - DNA, 50 bp, synthetic construct
  source 1..50: mol_type = other DNA
atacactataccaaaaactaactaccacaaaacctaaactaaaacaacca

SEQ ID NO: 45976 - DNA, 50 bp, synthetic construct
  source 1..50: mol_type = other DNA
atacgctataccgaaaactaactaccgcgaaacctaaactaaaacgaccg

SEQ ID NO: 45977 - DNA, 50 bp, synthetic construct
  source 1..50: mol_type = other DNA
caacactaacactacaaacacacaaatataacataaaaatctaaacaaca

SEQ ID NO: 45978 - DNA, 50 bp, synthetic construct
  source 1..50: mol_type = other DNA
cgacgctaacgctacaaacgcgcgaatataacgtaaaaatctaaacaacg

SEQ ID NO: 45979 - DNA, 50 bp, synthetic construct
  source 1..50: mol_type = other DNA
taaacaacactaaacaactaatattaaacacaacactaacactacaaaca

SEQ ID NO: 45980 - DNA, 50 bp, synthetic construct
  source 1..50: mol_type = other DNA
taaacgacgctaaacgactaatattaaacgcgacgctaacgctacaaacg

SEQ ID NO: 45981 - DNA, 50 bp, synthetic construct
  source 1..50: mol_type = other DNA
acctaaacataaacaacactaaacaactaatattaaacacaacactaaca

SEQ ID NO: 45982 - DNA, 50 bp, synthetic construct
  source 1..50: mol_type = other DNA
acctaaacgtaaacgacgctaaacgactaatattaaacgcgacgctaacg

SEQ ID NO: 45983 - DNA, 50 bp, synthetic construct
  source 1..50: mol_type = other DNA
acccaaacctaaacataaacaacactaaacaactaatattaaacacaaca

SEQ ID NO: 45984 - DNA, 50 bp, synthetic construct
  source 1..50: mol_type = other DNA
acccaaacctaaacgtaaacgacgctaaacgactaatattaaacgcgacg

SEQ ID NO: 45985 - DNA, 50 bp, synthetic construct
  source 1..50: mol_type = other DNA
aaaccataacaaaaaaacaaaaccaaaaacaaaactcaattcccaaacca

SEQ ID NO: 45986 - DNA, 50 bp, synthetic construct
  source 1..50: mol_type = other DNA
aaaccataacgaaaaaacaaaaccgaaaacgaaactcgattcccaaaccg

SEQ ID NO: 45987 - DNA, 50 bp, synthetic construct
  source 1..50: mol_type = other DNA
attacaactccaaaaccataacaaaaaaacaaaaccaaaaacaaaactca

SEQ ID NO: 45988 - DNA, 50 bp, synthetic construct
  source 1..50: mol_type = other DNA
attacgactccaaaaccataacgaaaaaacaaaaccgaaaacgaaactcg

SEQ ID NO: 45989 - DNA, 50 bp, synthetic construct
  source 1..50: mol_type = other DNA
aaatacaattacaactccaaaaccataacaaaaaaacaaaaccaaaaaca

SEQ ID NO: 45990 - DNA, 50 bp, synthetic construct
  source 1..50: mol_type = other DNA
aaatacaattacgactccaaaaccataacgaaaaaacaaaaccgaaaacg

SEQ ID NO: 45991 - DNA, 50 bp, synthetic construct
  source 1..50: mol_type = other DNA
aatacaaaatacaattacaactccaaaaccataacaaaaaaacaaaacca

SEQ ID NO: 45992 - DNA, 50 bp, synthetic construct
  source 1..50: mol_type = other DNA
aatacgaaatacaattacgactccaaaaccataacgaaaaaacaaaaccg

SEQ ID NO: 45993 - DNA, 50 bp, synthetic construct
  source 1..50: mol_type = other DNA
acacaaaacttacacaaaaaacccccatcaaaatacaaaatacaattaca

SEQ ID NO: 45994 - DNA, 50 bp, synthetic construct
  source 1..50: mol_type = other DNA
acgcgaaacttacgcaaaaaacccccatcaaaatacgaaatacaattacg

SEQ ID NO: 45995 - DNA, 50 bp, synthetic construct
  source 1..50: mol_type = other DNA
ctaaaaactacaaacacaaaacttacacaaaaaacccccatcaaaataca

SEQ ID NO: 45996 - DNA, 50 bp, synthetic construct
  source 1..50: mol_type = other DNA
ctaaaaactacgaacgcgaaacttacgcaaaaaacccccatcaaaatacg

SEQ ID NO: 45997 - DNA, 50 bp, synthetic construct
  source 1..50: mol_type = other DNA
atacaacaaaacaaaatcaacccacaataaccaactaaaaactacaaaca

SEQ ID NO: 45998 - DNA, 50 bp, synthetic construct
  source 1..50: mol_type = other DNA
gtacgacaaaacgaaatcgacccgcaataaccaactaaaaactacgaacg

SEQ ID NO: 45999 - DNA, 50 bp, synthetic construct
  source 1..50: mol_type = other DNA
aatttacactaatataacctaactaacacacatacaacaaaacaaaatca

SEQ ID NO: 46000 - DNA, 50 bp, synthetic construct
  source 1..50: mol_type = other DNA
aatttacgctaatataacctaactaacgcacgtacgacaaaacgaaatcg

SEQ ID NO: 46001 - DNA, 50 bp, synthetic construct
  source 1..50: mol_type = other DNA
actaaaccctcacaaatttacactaatataacctaactaacacacataca

SEQ ID NO: 46002 - DNA, 50 bp, synthetic construct
  source 1..50: mol_type = other DNA
actaaaccctcacaaatttacgctaatataacctaactaacgcacgtacg

SEQ ID NO: 46003 - DNA, 50 bp, synthetic construct
  source 1..50: mol_type = other DNA
gtttgttatagataatttagttatttgttgtatgggaagtagagattttt

SEQ ID NO: 46004 - DNA, 50 bp, synthetic construct
  source 1..50: mol_type = other DNA
gtttgttatagataatttagttatttgttgtatgggaagtagagattttc

SEQ ID NO: 46005 - DNA, 50 bp, synthetic construct
  source 1..50: mol_type = other DNA
cccaaacatccctaaaatcaaaaaaaaccttacctacaaatccaaaaaca

SEQ ID NO: 46006 - DNA, 50 bp, synthetic construct
  source 1..50: mol_type = other DNA
cccaaacgtccctaaaatcaaaaaaaaccttacctacaaatccgaaaacg

SEQ ID NO: 46007 - DNA, 50 bp, synthetic construct
  source 1..50: mol_type = other DNA
aaaaataacaaaacactaacacaaacaaataaaaaattacaaaaccccca

SEQ ID NO: 46008 - DNA, 50 bp, synthetic construct
  source 1..50: mol_type = other DNA
aaaaataacaaaacgctaacgcgaacgaataaaaaattacgaaacccccg

SEQ ID NO: 46009 - DNA, 50 bp, synthetic construct
  source 1..50: mol_type = other DNA
ctctataactcccttacttcccccaacctcaaatataaatatctaaacca

SEQ ID NO: 46010 - DNA, 50 bp, synthetic construct
  source 1..50: mol_type = other DNA
ctctataactcccttacttcccccaacctcgaatataaatatctaaaccg

SEQ ID NO: 46011 - DNA, 50 bp, synthetic construct
  source 1..50: mol_type = other DNA
atataaatatctaaaccaaaattctaaaacaaacctaccacactcaccca

SEQ ID NO: 46012 - DNA, 50 bp, synthetic construct
  source 1..50: mol_type = other DNA
atataaatatctaaaccgaaattctaaaacaaacctaccgcgctcacccg

SEQ ID NO: 46013 - DNA, 50 bp, synthetic construct
  source 1..50: mol_type = other DNA
cccaaaatcaacaaaattctaaatcctatctccaaatctaaaaacaaaca

SEQ ID NO: 46014 - DNA, 50 bp, synthetic construct
  source 1..50: mol_type = other DNA
cccaaaatcaacgaaattctaaatcctatctccgaatctaaaaacgaacg

SEQ ID NO: 46015 - DNA, 50 bp, synthetic construct
  source 1..50: mol_type = other DNA
ccaccccaaaatcaacaaaattctaaatcctatctccaaatctaaaaaca

SEQ ID NO: 46016 - DNA, 50 bp, synthetic construct
  source 1..50: mol_type = other DNA
ccaccccaaaatcaacgaaattctaaatcctatctccgaatctaaaaacg

SEQ ID NO: 46017 - DNA, 50 bp, synthetic construct
  source 1..50: mol_type = other DNA
cttacactcaaaaaacaatcctaacaaaaaaaccaaccaatatacaccca

SEQ ID NO: 46018 - DNA, 50 bp, synthetic construct
  source 1..50: mol_type = other DNA
cttacactcgaaaaacgatcctaacaaaaaaaccgaccaatatacacccg

SEQ ID NO: 46019 - DNA, 50 bp, synthetic construct
  source 1..50: mol_type = other DNA
tctcaactaaaaaacctaattccaccaaaaacacataaatacccacacca

SEQ ID NO: 46020 - DNA, 50 bp, synthetic construct
  source 1..50: mol_type = other DNA
tctcaactaaaaaacctaattccaccaaaaacacgtaaatacccacgccg

SEQ ID NO: 46021 - DNA, 50 bp, synthetic construct
  source 1..50: mol_type = other DNA
aacataccaaaacccacaaaaacttaaacttcaacatccataaaaactca

SEQ ID NO: 46022 - DNA, 50 bp, synthetic construct
  source 1..50: mol_type = other DNA
gacgtaccaaaacccacgaaaacttaaacttcaacatccgtaaaaactcg

SEQ ID NO: 46023 - DNA, 50 bp, synthetic construct
  source 1..50: mol_type = other DNA
aaaaccaaaaaaaatacacctaataaatttacaacataccaaaacccaca

SEQ ID NO: 46024 - DNA, 50 bp, synthetic construct
  source 1..50: mol_type = other DNA
gaaaccaaaaaaaatacgcctaataaatttacgacgtaccaaaacccacg

SEQ ID NO: 46025 - DNA, 50 bp, synthetic construct
  source 1..50: mol_type = other DNA
aaccccaacaacacaaaaccaaaaaaaatacacctaataaatttacaaca

SEQ ID NO: 46026 - DNA, 50 bp, synthetic construct
  source 1..50: mol_type = other DNA
gaccccgacaacgcgaaaccaaaaaaaatacgcctaataaatttacgacg

SEQ ID NO: 46027 - DNA, 50 bp, synthetic construct
  source 1..50: mol_type = other DNA
aacaaccccaacaacacaaaaccaaaaaaaatacacctaataaatttaca

SEQ ID NO: 46028 - DNA, 50 bp, synthetic construct
  source 1..50: mol_type = other DNA
aacgaccccgacaacgcgaaaccaaaaaaaatacgcctaataaatttacg

SEQ ID NO: 46029 - DNA, 50 bp, synthetic construct
  source 1..50: mol_type = other DNA
ctctcccttctaaaatacccacccacaacctacatcttaaacaaaaacca

SEQ ID NO: 46030 - DNA, 50 bp, synthetic construct
  source 1..50: mol_type = other DNA
ctctcccttctaaaatacccacccacaacctacatcttaaacaaaaaccg

SEQ ID NO: 46031 - DNA, 50 bp, synthetic construct
  source 1..50: mol_type = other DNA
attccataacaaactcaaaatcaatcaaaacatactccactatattccca

SEQ ID NO: 46032 - DNA, 50 bp, synthetic construct
  source 1..50: mol_type = other DNA
attccgtaacaaactcgaaatcgatcaaaacatactccactatattcccg

SEQ ID NO: 46033 - DNA, 50 bp, synthetic construct
  source 1..50: mol_type = other DNA
actaccttaatatatatatttcatatttaataccaaaaattacacacaca

SEQ ID NO: 46034 - DNA, 50 bp, synthetic construct
  source 1..50: mol_type = other DNA
actaccttaatatatatatttcatatttaataccaaaaattacacgcacg

SEQ ID NO: 46035 - DNA, 50 bp, synthetic construct
  source 1..50: mol_type = other DNA
aataactaccttaatatatatatttcatatttaataccaaaaattacaca

SEQ ID NO: 46036 - DNA, 50 bp, synthetic construct
  source 1..50: mol_type = other DNA
aataactaccttaatatatatatttcatatttaataccaaaaattacacg

SEQ ID NO: 46037 - DNA, 50 bp, synthetic construct
  source 1..50: mol_type = other DNA
aaaccacatacacacctccttcaaacatcaaaactttcaataaccctaca

SEQ ID NO: 46038 - DNA, 50 bp, synthetic construct
  source 1..50: mol_type = other DNA
aaaccacatacacacctccttcgaacatcgaaactttcaataaccctacg

SEQ ID NO: 46039 - DNA, 50 bp, synthetic construct
  source 1..50: mol_type = other DNA
aaaactaaaaatcaaaaaatttttttcccacataatactaactaaaatca

SEQ ID NO: 46040 - DNA, 50 bp, synthetic construct
  source 1..50: mol_type = other DNA
aaaactaaaaatcaaaaaatttttttcccacataatactaactaaaatcg

SEQ ID NO: 46041 - DNA, 50 bp, synthetic construct
  source 1..50: mol_type = other DNA
aaaaaaataatactcacaaataataaaataaattaaccaacttatcccca

SEQ ID NO: 46042 - DNA, 50 bp, synthetic construct
  source 1..50: mol_type = other DNA
aaaaaaataatactcacaaataataaaataaattaaccaacttatccccg

SEQ ID NO: 46043 - DNA, 50 bp, synthetic construct
  source 1..50: mol_type = other DNA
aaacctacctaaactcaaaacaaccactcattataccatcaccatccaca

SEQ ID NO: 46044 - DNA, 50 bp, synthetic construct
  source 1..50: mol_type = other DNA
aaacctacctaaactcaaaacaaccactcattataccatcaccatccgcg

SEQ ID NO: 46045 - DNA, 50 bp, synthetic construct
  source 1..50: mol_type = other DNA
acaaacctacctaaactcaaaacaaccactcattataccatcaccatcca

SEQ ID NO: 46046 - DNA, 50 bp, synthetic construct
  source 1..50: mol_type = other DNA
acaaacctacctaaactcaaaacaaccactcattataccatcaccatccg

SEQ ID NO: 46047 - DNA, 50 bp, synthetic construct
  source 1..50: mol_type = other DNA
tttccttaaaacataaaaaaaatcattcccttaaaaaatcttcaattcca

SEQ ID NO: 46048 - DNA, 50 bp, synthetic construct
  source 1..50: mol_type = other DNA
tttccttaaaacataaaaaaaatcattcccttaaaaaatcttcaattccg

SEQ ID NO: 46049 - DNA, 50 bp, synthetic construct
  source 1..50: mol_type = other DNA
ttacttaactacccaaaataaaacaaccaaattaaacaattaacaaacca

SEQ ID NO: 46050 - DNA, 50 bp, synthetic construct
  source 1..50: mol_type = other DNA
ttacttaactacccgaaataaaacgaccgaattaaacgattaacaaaccg

SEQ ID NO: 46051 - DNA, 50 bp, synthetic construct
  source 1..50: mol_type = other DNA
atataatacatatatatactcctataaaactaaacaaaataatatctaca

SEQ ID NO: 46052 - DNA, 50 bp, synthetic construct
  source 1..50: mol_type = other DNA
atataatacgtatatatactcctataaaactaaacaaaataatatctacg

SEQ ID NO: 46053 - DNA, 50 bp, synthetic construct
  source 1..50: mol_type = other DNA
cattataccaaaaaatatataaaactaaatatatacaaaaccctaaaaca

SEQ ID NO: 46054 - DNA, 50 bp, synthetic construct
  source 1..50: mol_type = other DNA
cattataccaaaaaatatataaaactaaatatatacgaaaccctaaaacg

SEQ ID NO: 46055 - DNA, 50 bp, synthetic construct
  source 1..50: mol_type = other DNA
aaaccaaacactacaaaaatctcaactccccaaataataacataaccaca

SEQ ID NO: 46056 - DNA, 50 bp, synthetic construct
  source 1..50: mol_type = other DNA
gaaccaaacactacaaaaatctcgactccccaaataataacgtaaccacg

SEQ ID NO: 46057 - DNA, 50 bp, synthetic construct
  source 1..50: mol_type = other DNA
aaacaaaaaatacaatctaaatccctatcctctccctaccacctaactca

SEQ ID NO: 46058 - DNA, 50 bp, synthetic construct
  source 1..50: mol_type = other DNA
gaacaaaaaatacgatctaaatccctatcctctccctaccacctaactcg

SEQ ID NO: 46059 - DNA, 50 bp, synthetic construct
  source 1..50: mol_type = other DNA
aaaaatatcaatttataaacctacaacaaccccaacctaacccctaacca

SEQ ID NO: 46060 - DNA, 50 bp, synthetic construct
  source 1..50: mol_type = other DNA
aaaaatatcaatttataaacctacaacgaccccgacctaacccctaaccg

SEQ ID NO: 46061 - DNA, 50 bp, synthetic construct
  source 1..50: mol_type = other DNA
aaaaaaatacctatttacaaattcccatctacatccaattcaaatccaca

SEQ ID NO: 46062 - DNA, 50 bp, synthetic construct
  source 1..50: mol_type = other DNA
aaaaaaatacctatttacgaattcccgtctacgtccaattcaaatccgcg

SEQ ID NO: 46063 - DNA, 50 bp, synthetic construct
  source 1..50: mol_type = other DNA
ccataaaaccaaaatcaaaatctcaacaaaaacaaaacaaaacaaaaaca

SEQ ID NO: 46064 - DNA, 50 bp, synthetic construct
  source 1..50: mol_type = other DNA
ccgtaaaaccgaaatcgaaatctcgacgaaaacgaaacgaaacgaaaacg

SEQ ID NO: 46065 - DNA, 50 bp, synthetic construct
  source 1..50: mol_type = other DNA
taaaaccaaaatcaaaatctcaacaaaaacaaaacaaaacaaaaacacca

SEQ ID NO: 46066 - DNA, 50 bp, synthetic construct
  source 1..50: mol_type = other DNA
taaaaccgaaatcgaaatctcgacgaaaacgaaacgaaacgaaaacgccg

SEQ ID NO: 46067 - DNA, 50 bp, synthetic construct
  source 1..50: mol_type = other DNA
aaacaaaacatcaataattcacaaaaaaacacaaaaaaaataacacccca

SEQ ID NO: 46068 - DNA, 50 bp, synthetic construct
  source 1..50: mol_type = other DNA
aaacgaaacgtcaataattcgcgaaaaaacgcgaaaaaaataacgccccg

SEQ ID NO: 46069 - DNA, 50 bp, synthetic construct
  source 1..50: mol_type = other DNA
tacataaacaaaacatcaataattcacaaaaaaacacaaaaaaaataaca

SEQ ID NO: 46070 - DNA, 50 bp, synthetic construct
  source 1..50: mol_type = other DNA
tacataaacgaaacgtcaataattcgcgaaaaaacgcgaaaaaaataacg

SEQ ID NO: 46071 - DNA, 50 bp, synthetic construct
  source 1..50: mol_type = other DNA
aaactatatttcctcaacaaatatacaaacaatcatatacaccataaaca

SEQ ID NO: 46072 - DNA, 50 bp, synthetic construct
  source 1..50: mol_type = other DNA
aaactatatttcctcaacaaatatacgaacgatcgtatacgccataaacg

SEQ ID NO: 46073 - DNA, 50 bp, synthetic construct
  source 1..50: mol_type = other DNA
caatacctacacacaaaactatatttcctcaacaaatatacaaacaatca

SEQ ID NO: 46074 - DNA, 50 bp, synthetic construct
  source 1..50: mol_type = other DNA
cgatacctacgcgcaaaactatatttcctcaacaaatatacgaacgatcg

SEQ ID NO: 46075 - DNA, 50 bp, synthetic construct
  source 1..50: mol_type = other DNA
aaatccaccaatacctacacacaaaactatatttcctcaacaaatataca

SEQ ID NO: 46076 - DNA, 50 bp, synthetic construct
  source 1..50: mol_type = other DNA
aaatccgccgatacctacgcgcaaaactatatttcctcaacaaatatacg

SEQ ID NO: 46077 - DNA, 50 bp, synthetic construct
  source 1..50: mol_type = other DNA
taacctatttaaacatcctaaatctatatctacaccaaaaatccacacca

SEQ ID NO: 46078 - DNA, 50 bp, synthetic construct
  source 1..50: mol_type = other DNA
taacctatttaaacgtcctaaatctatatctacgccaaaaatccgcgccg

SEQ ID NO: 46079 - DNA, 50 bp, synthetic construct
  source 1..50: mol_type = other DNA
caacaaaatccttaaaattctaaccatcccaaaaatacctcccaaatcca

SEQ ID NO: 46080 - DNA, 50 bp, synthetic construct
  source 1..50: mol_type = other DNA
caacgaaatccttaaaattctaaccatcccgaaaatacctcccgaatccg

SEQ ID NO: 46081 - DNA, 50 bp, synthetic construct
  source 1..50: mol_type = other DNA
aaatccttaaaattctaaccatcccaaaaatacctcccaaatccataaca

SEQ ID NO: 46082 - DNA, 50 bp, synthetic construct
  source 1..50: mol_type = other DNA
aaatccttaaaattctaaccatcccgaaaatacctcccgaatccgtaacg

SEQ ID NO: 46083 - DNA, 50 bp, synthetic construct
  source 1..50: mol_type = other DNA
taatccctatcccaacacccaaataaatccaaaaaatcaacaaaaaccca

SEQ ID NO: 46084 - DNA, 50 bp, synthetic construct
  source 1..50: mol_type = other DNA
taatccctatcccaacgcccaaataaatccgaaaaatcgacaaaaacccg

SEQ ID NO: 46085 - DNA, 50 bp, synthetic construct
  source 1..50: mol_type = other DNA
ttaataatccataatccctatcccaacacccaaataaatccaaaaaatca

SEQ ID NO: 46086 - DNA, 50 bp, synthetic construct
  source 1..50: mol_type = other DNA
ttaataatccgtaatccctatcccaacgcccaaataaatccgaaaaatcg

SEQ ID NO: 46087 - DNA, 50 bp, synthetic construct
  source 1..50: mol_type = other DNA
tactaatcttaataatccataatccctatcccaacacccaaataaatcca

SEQ ID NO: 46088 - DNA, 50 bp, synthetic construct
  source 1..50: mol_type = other DNA
tactaatcttaataatccgtaatccctatcccaacgcccaaataaatccg

SEQ ID NO: 46089 - DNA, 50 bp, synthetic construct
  source 1..50: mol_type = other DNA
cataccctacactatactaatcttaataatccataatccctatcccaaca

SEQ ID NO: 46090 - DNA, 50 bp, synthetic construct
  source 1..50: mol_type = other DNA
cgtaccctacactatactaatcttaataatccgtaatccctatcccaacg

SEQ ID NO: 46091 - DNA, 50 bp, synthetic construct
  source 1..50: mol_type = other DNA
aaattacacaaatacaaaaaaaaatcctcacccataacaaactcccatca

SEQ ID NO: 46092 - DNA, 50 bp, synthetic construct
  source 1..50: mol_type = other DNA
aaattacacaaatacaaaaaaaaatcctcgcccataacaaactcccatcg

SEQ ID NO: 46093 - DNA, 50 bp, synthetic construct
  source 1..50: mol_type = other DNA
aaaaacactaaacttaaatcaaaccaaaaaacatcaataacatactcaca

SEQ ID NO: 46094 - DNA, 50 bp, synthetic construct
  source 1..50: mol_type = other DNA
aaaaacgctaaacttaaatcaaaccgaaaaacgtcaataacgtactcacg

SEQ ID NO: 46095 - DNA, 50 bp, synthetic construct
  source 1..50: mol_type = other DNA
tcaaaaaaaaaaaaaaaaaatataaacactcacctacctctaatccaaca

SEQ ID NO: 46096 - DNA, 50 bp, synthetic construct
  source 1..50: mol_type = other DNA
tcaaaaaaaaaaaaaaaaaatataaacactcgcctacctctaatccaacg

SEQ ID NO: 46097 - DNA, 50 bp, synthetic construct
  source 1..50: mol_type = other DNA
aaaaaatcacctaaacctaaaaaaatcaaaactacaataaaccataatca

SEQ ID NO: 46098 - DNA, 50 bp, synthetic construct
  source 1..50: mol_type = other DNA
aaaaaatcgcctaaacctaaaaaaatcgaaactacaataaaccataatcg

SEQ ID NO: 46099 - DNA, 50 bp, synthetic construct
  source 1..50: mol_type = other DNA
actacccaaactaaaatataataacacaatcataattcactacaacctca

SEQ ID NO: 46100 - DNA, 50 bp, synthetic construct
  source 1..50: mol_type = other DNA
actacccaaactaaaatataataacacgatcataattcactacaacctcg

SEQ ID NO: 46101 - DNA, 50 bp, synthetic construct
  source 1..50: mol_type = other DNA
acaaacaataaaaaaacacccaaaaaaaaactcattctcatcaaaaacca

SEQ ID NO: 46102 - DNA, 50 bp, synthetic construct
  source 1..50: mol_type = other DNA
acaaacgataaaaaaacacccaaaaaaaaactcattctcatcaaaaaccg

SEQ ID NO: 46103 - DNA, 50 bp, synthetic construct
  source 1..50: mol_type = other DNA
aaaccaccaaaaacacaaaaaaaattccccacaaaaaatacaaaaaacca

SEQ ID NO: 46104 - DNA, 50 bp, synthetic construct
  source 1..50: mol_type = other DNA
aaaccaccaaaaacgcgaaaaaaattccccgcaaaaaatacgaaaaaccg

SEQ ID NO: 46105 - DNA, 50 bp, synthetic construct
  source 1..50: mol_type = other DNA
aatcaaaaaaacaaataaaaaaccaccaaaaacacaaaaaaaattcccca

SEQ ID NO: 46106 - DNA, 50 bp, synthetic construct
  source 1..50: mol_type = other DNA
aatcaaaaaaacgaataaaaaaccaccaaaaacgcgaaaaaaattccccg

SEQ ID NO: 46107 - DNA, 50 bp, synthetic construct
  source 1..50: mol_type = other DNA
ataaaaaataaaaacacacaacacaaaaaaactcctcataaataaaacca

SEQ ID NO: 46108 - DNA, 50 bp, synthetic construct
  source 1..50: mol_type = other DNA
ataaaaaataaaaacacgcgacgcaaaaaaactcctcgtaaataaaaccg

SEQ ID NO: 46109 - DNA, 50 bp, synthetic construct
  source 1..50: mol_type = other DNA
acaaaaactatactaacaccaacaaacacaaaaaatcacaaaacaaaaca

SEQ ID NO: 46110 - DNA, 50 bp, synthetic construct
  source 1..50: mol_type = other DNA
acgaaaactatactaacgccgacaaacgcgaaaaatcacaaaacgaaacg

SEQ ID NO: 46111 - DNA, 50 bp, synthetic construct
  source 1..50: mol_type = other DNA
actaaaaactcaacctacaaaaccaaacaacaaaaactatactaacacca

SEQ ID NO: 46112 - DNA, 50 bp, synthetic construct
  source 1..50: mol_type = other DNA
actaaaaactcaacctacaaaaccgaacgacgaaaactatactaacgccg

SEQ ID NO: 46113 - DNA, 50 bp, synthetic construct
  source 1..50: mol_type = other DNA
aaaacaattaaatccaaaacaatctctacaaccaaaataccaaatcccca

SEQ ID NO: 46114 - DNA, 50 bp, synthetic construct
  source 1..50: mol_type = other DNA
aaaacaattaaatccgaaacgatctctacaaccgaaataccaaatccccg

SEQ ID NO: 46115 - DNA, 50 bp, synthetic construct
  source 1..50: mol_type = other DNA
acacaaatactacaccaaataccaaaaaccccacaaacaaaaaaactaca

SEQ ID NO: 46116 - DNA, 50 bp, synthetic construct
  source 1..50: mol_type = other DNA
gcgcaaatactacaccaaataccaaaaaccccgcaaacgaaaaaactacg

SEQ ID NO: 46117 - DNA, 50 bp, synthetic construct
  source 1..50: mol_type = other DNA
aaatattttaaaaaaccatttctattttcatctaaacacacacacacaca

SEQ ID NO: 46118 - DNA, 50 bp, synthetic construct
  source 1..50: mol_type = other DNA
aaatattttaaaaaaccgtttctattttcgtctaaacacacacacacacg

SEQ ID NO: 46119 - DNA, 50 bp, synthetic construct
  source 1..50: mol_type = other DNA
attttaaaaaaccatttctattttcatctaaacacacacacacacaatca

SEQ ID NO: 46120 - DNA, 50 bp, synthetic construct
  source 1..50: mol_type = other DNA
attttaaaaaaccgtttctattttcgtctaaacacacacacacacgatcg

SEQ ID NO: 46121 - DNA, 50 bp, synthetic construct
  source 1..50: mol_type = other DNA
ctcaaccccaatcaaccctttaataccttcttcttattaccaacaacaca

SEQ ID NO: 46122 - DNA, 50 bp, synthetic construct
  source 1..50: mol_type = other DNA
ctcaaccccaatcaaccctttaataccttcttcttattaccaacaacacg

SEQ ID NO: 46123 - DNA, 50 bp, synthetic construct
  source 1..50: mol_type = other DNA
aaacctaaaaacaacactaataaatactaaatcaatactaaaaaaaccca

SEQ ID NO: 46124 - DNA, 50 bp, synthetic construct
  source 1..50: mol_type = other DNA
aaacctaaaaacgacgctaataaatactaaatcgatactaaaaaaacccg

SEQ ID NO: 46125 - DNA, 50 bp, synthetic construct
  source 1..50: mol_type = other DNA
aaacccaccaaaaatataaccacaaaacacctaacaaataataattctca

SEQ ID NO: 46126 - DNA, 50 bp, synthetic construct
  source 1..50: mol_type = other DNA
aaacccgccaaaaatataaccgcaaaacgcctaacgaataataattctcg

SEQ ID NO: 46127 - DNA, 50 bp, synthetic construct
  source 1..50: mol_type = other DNA
aacttctaacaaacactaaccaccctccttattccttattccatattcca

SEQ ID NO: 46128 - DNA, 50 bp, synthetic construct
  source 1..50: mol_type = other DNA
aacttctaacaaacgctaaccaccctccttattccttattccgtattccg

SEQ ID NO: 46129 - DNA, 50 bp, synthetic construct
  source 1..50: mol_type = other DNA
aaattcaataacaaatatctttctataaaaaataaacacaaaaacaaaca

SEQ ID NO: 46130 - DNA, 50 bp, synthetic construct
  source 1..50: mol_type = other DNA
aaattcaataacgaatatctttctataaaaaataaacacaaaaacaaacg

SEQ ID NO: 46131 - DNA, 50 bp, synthetic construct
  source 1..50: mol_type = other DNA
caaccaaaaccactaaaaactaaaaacatctcaacacccaacataaacca

SEQ ID NO: 46132 - DNA, 50 bp, synthetic construct
  source 1..50: mol_type = other DNA
caaccaaaaccactaaaaactaaaaacgtctcaacgcccaacataaaccg

SEQ ID NO: 46133 - DNA, 50 bp, synthetic construct
  source 1..50: mol_type = other DNA
ttaaattaaaaaacaacccctcccaataataacaaaacccaccattccca

SEQ ID NO: 46134 - DNA, 50 bp, synthetic construct
  source 1..50: mol_type = other DNA
ttaaattaaaaaacgacccctcccaataataacaaaacccgccattcccg

SEQ ID NO: 46135 - DNA, 50 bp, synthetic construct
  source 1..50: mol_type = other DNA
acatcatctccacataactatacacacctcaatacatccaaataacaaca

SEQ ID NO: 46136 - DNA, 50 bp, synthetic construct
  source 1..50: mol_type = other DNA
acatcatctccacgtaactatacacacctcaatacatccaaataacgacg

SEQ ID NO: 46137 - DNA, 50 bp, synthetic construct
  source 1..50: mol_type = other DNA
ccaacatcatctccacataactatacacacctcaatacatccaaataaca

SEQ ID NO: 46138 - DNA, 50 bp, synthetic construct
  source 1..50: mol_type = other DNA
ccaacatcatctccacgtaactatacacacctcaatacatccaaataacg

SEQ ID NO: 46139 - DNA, 50 bp, synthetic construct
  source 1..50: mol_type = other DNA
aatacactaaaatatacacaaccacataaaaataatactaaaaactcaca

SEQ ID NO: 46140 - DNA, 50 bp, synthetic construct
  source 1..50: mol_type = other DNA
aatacactaaaatatacacaaccacgtaaaaataatactaaaaactcacg

SEQ ID NO: 46141 - DNA, 50 bp, synthetic construct
  source 1..50: mol_type = other DNA
acctacattctcacaaataaaacaaaaacaaaaataatatctactaccca

SEQ ID NO: 46142 - DNA, 50 bp, synthetic construct
  source 1..50: mol_type = other DNA
acctacattctcacgaataaaacaaaaacaaaaataatatctactacccg

SEQ ID NO: 46143 - DNA, 50 bp, synthetic construct
  source 1..50: mol_type = other DNA
aaaaattaaacttttaaaaaaacaacaaaaaccaatcacaataactcaca

SEQ ID NO: 46144 - DNA, 50 bp, synthetic construct
  source 1..50: mol_type = other DNA
aaaaattaaacttttaaaaaaacaacaaaaaccgatcacgataactcacg

SEQ ID NO: 46145 - DNA, 50 bp, synthetic construct
  source 1..50: mol_type = other DNA
cacactccataaaccactaactcataaaatcaataaaccaatacccatca

SEQ ID NO: 46146 - DNA, 50 bp, synthetic construct
  source 1..50: mol_type = other DNA
cgcactccgtaaaccactaactcataaaatcaataaaccaatacccatcg

SEQ ID NO: 46147 - DNA, 50 bp, synthetic construct
  source 1..50: mol_type = other DNA
tattgtggggttttatgggtttggatttaattttaattttgttttttgat

SEQ ID NO: 46148 - DNA, 50 bp, synthetic construct
  source 1..50: mol_type = other DNA
tattgtggggttttatgggtttggatttaattttaattttgttttttgac

SEQ ID NO: 46149 - DNA, 50 bp, synthetic construct
  source 1..50: mol_type = other DNA
tatacctaacacaacctaacacacaataaaactctataactcaaacacca

SEQ ID NO: 46150 - DNA, 50 bp, synthetic construct
  source 1..50: mol_type = other DNA
tatacctaacacgacctaacgcacaataaaactctataactcaaacgccg

SEQ ID NO: 46151 - DNA, 50 bp, synthetic construct
  source 1..50: mol_type = other DNA
aaacataaaaaaaactaaacaaaaacccccttttaaaaaaaccaataaca

SEQ ID NO: 46152 - DNA, 50 bp, synthetic construct
  source 1..50: mol_type = other DNA
aaacgtaaaaaaaactaaacaaaaacccccttttaaaaaaaccgataacg

SEQ ID NO: 46153 - DNA, 50 bp, synthetic construct
  source 1..50: mol_type = other DNA
caacaaaaaaaaccaaaaaacctaaacacaaacaatatacctcctaaaca

SEQ ID NO: 46154 - DNA, 50 bp, synthetic construct
  source 1..50: mol_type = other DNA
cgacgaaaaaaaccaaaaaacctaaacgcgaacgatatacctcctaaacg

SEQ ID NO: 46155 - DNA, 50 bp, synthetic construct
  source 1..50: mol_type = other DNA
cctaaacacaaacaatatacctcctaaacatccaaaccaaaaataaaaca

SEQ ID NO: 46156 - DNA, 50 bp, synthetic construct
  source 1..50: mol_type = other DNA
cctaaacgcgaacgatatacctcctaaacgtccaaaccgaaaataaaacg

SEQ ID NO: 46157 - DNA, 50 bp, synthetic construct
  source 1..50: mol_type = other DNA
accacttcccaaaaaatttcaaatttaaaaatcctaacaaaaaatctaca

SEQ ID NO: 46158 - DNA, 50 bp, synthetic construct
  source 1..50: mol_type = other DNA
gccgcttcccgaaaaatttcaaatttaaaaatcctaacgaaaaatctacg

SEQ ID NO: 46159 - DNA, 50 bp, synthetic construct
  source 1..50: mol_type = other DNA
aaaaaacaaccacaattcaaaactccaaaacaataacaaaaactttctca

SEQ ID NO: 46160 - DNA, 50 bp, synthetic construct
  source 1..50: mol_type = other DNA
aaaaaacgaccgcgattcgaaactccgaaacgataacaaaaactttctcg

SEQ ID NO: 46161 - DNA, 50 bp, synthetic construct
  source 1..50: mol_type = other DNA
accacaaactaatttaaaaactatacaaaatccaaaaaccaccaaaccca

SEQ ID NO: 46162 - DNA, 50 bp, synthetic construct
  source 1..50: mol_type = other DNA
accgcgaactaatttaaaaactatacaaaatccaaaaaccaccgaacccg

SEQ ID NO: 46163 - DNA, 50 bp, synthetic construct
  source 1..50: mol_type = other DNA
tccaaattcaataattcctaaaccttacacaatctccaaatcaatccaca

SEQ ID NO: 46164 - DNA, 50 bp, synthetic construct
  source 1..50: mol_type = other DNA
tccgaattcgataattcctaaaccttacacaatctccaaatcaatccgcg

SEQ ID NO: 46165 - DNA, 50 bp, synthetic construct
  source 1..50: mol_type = other DNA
aaaaccaacttaaaaacactctaaaaaccaccctaataacacacactaca

SEQ ID NO: 46166 - DNA, 50 bp, synthetic construct
  source 1..50: mol_type = other DNA
aaaaccgacttaaaaacactctaaaaaccaccctaataacgcacactacg

SEQ ID NO: 46167 - DNA, 50 bp, synthetic construct
  source 1..50: mol_type = other DNA
tatacaccaccaaaataatccccaaaatatccttaaatcaattctcctca

SEQ ID NO: 46168 - DNA, 50 bp, synthetic construct
  source 1..50: mol_type = other DNA
tatacgccaccaaaataatccccaaaatatccttaaatcgattctcctcg

SEQ ID NO: 46169 - DNA, 50 bp, synthetic construct
  source 1..50: mol_type = other DNA
cccaaaatatccttaaatcaattctcctcaataaaactccaaaaccaaca

SEQ ID NO: 46170 - DNA, 50 bp, synthetic construct
  source 1..50: mol_type = other DNA
cccaaaatatccttaaatcgattctcctcgataaaactccaaaaccgacg

SEQ ID NO: 46171 - DNA, 50 bp, synthetic construct
  source 1..50: mol_type = other DNA
cttaaatcaattctcctcaataaaactccaaaaccaacaaaaattaacca

SEQ ID NO: 46172 - DNA, 50 bp, synthetic construct
  source 1..50: mol_type = other DNA
cttaaatcgattctcctcgataaaactccaaaaccgacgaaaattaaccg

SEQ ID NO: 46173 - DNA, 50 bp, synthetic construct
  source 1..50: mol_type = other DNA
tcctcaataaaactccaaaaccaacaaaaattaaccaaaataaaaaaaca

SEQ ID NO: 46174 - DNA, 50 bp, synthetic construct
  source 1..50: mol_type = other DNA
tcctcgataaaactccaaaaccgacgaaaattaaccgaaataaaaaaacg

SEQ ID NO: 46175 - DNA, 50 bp, synthetic construct
  source 1..50: mol_type = other DNA
acaaaacacaaaaacctaaaaaaattaaaatatacacacaacaaaaaaca

SEQ ID NO: 46176 - DNA, 50 bp, synthetic construct
  source 1..50: mol_type = other DNA
acgaaacacaaaaacctaaaaaaattaaaatatacgcgcaacgaaaaacg

SEQ ID NO: 46177 - DNA, 50 bp, synthetic construct
  source 1..50: mol_type = other DNA
aaacctaaaaaaattaaaatatacacacaacaaaaaacacaatctataca

SEQ ID NO: 46178 - DNA, 50 bp, synthetic construct
  source 1..50: mol_type = other DNA
aaacctaaaaaaattaaaatatacgcgcaacgaaaaacgcaatctatacg

SEQ ID NO: 46179 - DNA, 50 bp, synthetic construct
  source 1..50: mol_type = other DNA
acctaaaaaaattaaaatatacacacaacaaaaaacacaatctatacaca

SEQ ID NO: 46180 - DNA, 50 bp, synthetic construct
  source 1..50: mol_type = other DNA
acctaaaaaaattaaaatatacgcgcaacgaaaaacgcaatctatacgcg

SEQ ID NO: 46181 - DNA, 50 bp, synthetic construct
  source 1..50: mol_type = other DNA
aacaaaaaacacaatctatacacacttaacaataacaaaaatccttccca

SEQ ID NO: 46182 - DNA, 50 bp, synthetic construct
  source 1..50: mol_type = other DNA
aacgaaaaacgcaatctatacgcgcttaacaataacaaaaatccttcccg

SEQ ID NO: 46183 - DNA, 50 bp, synthetic construct
  source 1..50: mol_type = other DNA
tatacacacttaacaataacaaaaatccttcccaaaacacaaaaaacaca

SEQ ID NO: 46184 - DNA, 50 bp, synthetic construct
  source 1..50: mol_type = other DNA
tatacgcgcttaacaataacaaaaatccttcccgaaacacaaaaaacacg

SEQ ID NO: 46185 - DNA, 50 bp, synthetic construct
  source 1..50: mol_type = other DNA
ccccaccccaaaacaaaaacctttaaatacataacaaattctaaaataca

SEQ ID NO: 46186 - DNA, 50 bp, synthetic construct
  source 1..50: mol_type = other DNA
ccccgccccaaaacgaaaacctttaaatacataacgaattctaaaatacg

SEQ ID NO: 46187 - DNA, 50 bp, synthetic construct
  source 1..50: mol_type = other DNA
aaaatacaaaaaaaactaaatttcctaccaaaactaacaataaatacaca

SEQ ID NO: 46188 - DNA, 50 bp, synthetic construct
  source 1..50: mol_type = other DNA
aaaatacgaaaaaaactaaatttcctaccaaaactaacaataaatacgcg

SEQ ID NO: 46189 - DNA, 50 bp, synthetic construct
  source 1..50: mol_type = other DNA
taaatttcctaccaaaactaacaataaatacacataaacccaaaaaacca

SEQ ID NO: 46190 - DNA, 50 bp, synthetic construct
  source 1..50: mol_type = other DNA
taaatttcctaccaaaactaacaataaatacgcgtaaacccgaaaaaccg

SEQ ID NO: 46191 - DNA, 50 bp, synthetic construct
  source 1..50: mol_type = other DNA
tacaaaatacatataaactccttaaacacccaaaccaatcatttaaacca

SEQ ID NO: 46192 - DNA, 50 bp, synthetic construct
  source 1..50: mol_type = other DNA
tacgaaatacgtataaactccttaaacgcccaaaccaatcgtttaaaccg

SEQ ID NO: 46193 - DNA, 50 bp, synthetic construct
  source 1..50: mol_type = other DNA
cactacaaaacaaaaccccacaaaaaatcaaaaaatatatacaaactaca

SEQ ID NO: 46194 - DNA, 50 bp, synthetic construct
  source 1..50: mol_type = other DNA
cgctacaaaacgaaaccccgcaaaaaatcgaaaaatatatacaaactacg

SEQ ID NO: 46195 - DNA, 50 bp, synthetic construct
  source 1..50: mol_type = other DNA
ctattccaaacataacttatacacattttccaatttcctacaaaactcca

SEQ ID NO: 46196 - DNA, 50 bp, synthetic construct
  source 1..50: mol_type = other DNA
ctattccaaacgtaacttatacacattttccgatttcctacgaaactccg

SEQ ID NO: 46197 - DNA, 50 bp, synthetic construct
  source 1..50: mol_type = other DNA
caaaaaccaaaacaaacaaaaatcccataaaactaaaaacccaaccacca

SEQ ID NO: 46198 - DNA, 50 bp, synthetic construct
  source 1..50: mol_type = other DNA
caaaaaccgaaacaaacaaaaatcccataaaactaaaaacccgaccaccg

SEQ ID NO: 46199 - DNA, 50 bp, synthetic construct
  source 1..50: mol_type = other DNA
aaacaaaaaacccaatataaccaaaacatctaaaaaaatacacaaaatca

SEQ ID NO: 46200 - DNA, 50 bp, synthetic construct
  source 1..50: mol_type = other DNA
aaacgaaaaacccaatataaccaaaacgtctaaaaaaatacgcgaaatcg

SEQ ID NO: 46201 - DNA, 50 bp, synthetic construct
  source 1..50: mol_type = other DNA
cccaatataaccaaaacatctaaaaaaatacacaaaatcaaataaatcca

SEQ ID NO: 46202 - DNA, 50 bp, synthetic construct
  source 1..50: mol_type = other DNA
cccaatataaccaaaacgtctaaaaaaatacgcgaaatcgaataaatccg

SEQ ID NO: 46203 - DNA, 50 bp, synthetic construct
  source 1..50: mol_type = other DNA
ataaccaaaacatctaaaaaaatacacaaaatcaaataaatccaaaatca

SEQ ID NO: 46204 - DNA, 50 bp, synthetic construct
  source 1..50: mol_type = other DNA
ataaccaaaacgtctaaaaaaatacgcgaaatcgaataaatccgaaatcg

SEQ ID NO: 46205 - DNA, 50 bp, synthetic construct
  source 1..50: mol_type = other DNA
ccaaaacatctaaaaaaatacacaaaatcaaataaatccaaaatcactca

SEQ ID NO: 46206 - DNA, 50 bp, synthetic construct
  source 1..50: mol_type = other DNA
ccaaaacgtctaaaaaaatacgcgaaatcgaataaatccgaaatcgctcg

SEQ ID NO: 46207 - DNA, 50 bp, synthetic construct
  source 1..50: mol_type = other DNA
ctaaaatcctaatacaaaccaaacacaccatactaacctaaaaaatcaca

SEQ ID NO: 46208 - DNA, 50 bp, synthetic construct
  source 1..50: mol_type = other DNA
ctaaaatcctaatacgaaccgaacacaccgtactaacctaaaaaatcacg

SEQ ID NO: 46209 - DNA, 50 bp, synthetic construct
  source 1..50: mol_type = other DNA
caccaatatcatacaaaaaaaacaccaacataattccccaaatcaacaca

SEQ ID NO: 46210 - DNA, 50 bp, synthetic construct
  source 1..50: mol_type = other DNA
caccgatatcgtacaaaaaaaacaccaacgtaattccccaaatcaacacg

SEQ ID NO: 46211 - DNA, 50 bp, synthetic construct
  source 1..50: mol_type = other DNA
aaaattacctaacaaataaaactaaaattaaaaaaattaccaactacaca

SEQ ID NO: 46212 - DNA, 50 bp, synthetic construct
  source 1..50: mol_type = other DNA
aaaattacctaacgaataaaactaaaattaaaaaaattaccaactacgcg

SEQ ID NO: 46213 - DNA, 50 bp, synthetic construct
  source 1..50: mol_type = other DNA
taataactccctcaactccaaccccacccaccaaataacttttaaaaaca

SEQ ID NO: 46214 - DNA, 50 bp, synthetic construct
  source 1..50: mol_type = other DNA
taataactccctcaactccaaccccacccgccaaataacttttaaaaacg

SEQ ID NO: 46215 - DNA, 50 bp, synthetic construct
  source 1..50: mol_type = other DNA
atacaattttacctcccaaactcacaacaaaccactaaatcttcaaaaca

SEQ ID NO: 46216 - DNA, 50 bp, synthetic construct
  source 1..50: mol_type = other DNA
atacaattttacctcccgaactcacaacaaaccgctaaatcttcgaaacg

SEQ ID NO: 46217 - DNA, 50 bp, synthetic construct
  source 1..50: mol_type = other DNA
taacacaaaactatcttacctctcctactataaaccaccacctacaaaca

SEQ ID NO: 46218 - DNA, 50 bp, synthetic construct
  source 1..50: mol_type = other DNA
taacacgaaactatcttacctctcctactataaaccaccacctacaaacg

SEQ ID NO: 46219 - DNA, 50 bp, synthetic construct
  source 1..50: mol_type = other DNA
ctttcaaccctacaccaatcccccatcttataaaaacaaacaacaaaaca

SEQ ID NO: 46220 - DNA, 50 bp, synthetic construct
  source 1..50: mol_type = other DNA
ctttcaaccctacaccgatcccccatcttataaaaacaaacgacaaaacg

SEQ ID NO: 46221 - DNA, 50 bp, synthetic construct
  source 1..50: mol_type = other DNA
accctcccaccactaacaaaaataaacctcaaaaaataattacaacaaca

SEQ ID NO: 46222 - DNA, 50 bp, synthetic construct
  source 1..50: mol_type = other DNA
accctcccaccactaacgaaaataaacctcaaaaaataattacaacgacg

SEQ ID NO: 46223 - DNA, 50 bp, synthetic construct
  source 1..50: mol_type = other DNA
aaaaaaacacatcattcaaaactctccctaacctccaaaaaacctattca

SEQ ID NO: 46224 - DNA, 50 bp, synthetic construct
  source 1..50: mol_type = other DNA
gaaaaaacgcgtcattcaaaactctccctaacctccgaaaaacctattcg

SEQ ID NO: 46225 - DNA, 50 bp, synthetic construct
  source 1..50: mol_type = other DNA
tattcaacaatattaaactcaaataaaccacaacaccaaaacaaacacca

SEQ ID NO: 46226 - DNA, 50 bp, synthetic construct
  source 1..50: mol_type = other DNA
tattcaacaatattaaactcaaataaaccgcaacgccaaaacgaacaccg

SEQ ID NO: 46227 - DNA, 50 bp, synthetic construct
  source 1..50: mol_type = other DNA
tttaaaaaacaataataactacaaattaacacacaaatataaaccaccca

SEQ ID NO: 46228 - DNA, 50 bp, synthetic construct
  source 1..50: mol_type = other DNA
tttaaaaaacgataataactacgaattaacacgcgaatataaaccacccg

SEQ ID NO: 46229 - DNA, 50 bp, synthetic construct
  source 1..50: mol_type = other DNA
aaattaaaaacaccttttaaaaaacaataataactacaaattaacacaca

SEQ ID NO: 46230 - DNA, 50 bp, synthetic construct
  source 1..50: mol_type = other DNA
aaattaaaaacaccttttaaaaaacgataataactacgaattaacacgcg

SEQ ID NO: 46231 - DNA, 50 bp, synthetic construct
  source 1..50: mol_type = other DNA
aaaaattaaaaacaccttttaaaaaacaataataactacaaattaacaca

SEQ ID NO: 46232 - DNA, 50 bp, synthetic construct
  source 1..50: mol_type = other DNA
aaaaattaaaaacaccttttaaaaaacgataataactacgaattaacacg

SEQ ID NO: 46233 - DNA, 50 bp, synthetic construct
  source 1..50: mol_type = other DNA
ccaaaatcaccacccaatttcccatttaaaaactcaattacctaataaca

SEQ ID NO: 46234 - DNA, 50 bp, synthetic construct
  source 1..50: mol_type = other DNA
ccgaaatcgccgcccaatttcccatttaaaaactcgattacctaataacg

SEQ ID NO: 46235 - DNA, 50 bp, synthetic construct
  source 1..50: mol_type = other DNA
aaaaaatataaaaaccaaaatcaccacccaatttcccatttaaaaactca

SEQ ID NO: 46236 - DNA, 50 bp, synthetic construct
  source 1..50: mol_type = other DNA
aaaaaatataaaaaccgaaatcgccgcccaatttcccatttaaaaactcg

SEQ ID NO: 46237 - DNA, 50 bp, synthetic construct
  source 1..50: mol_type = other DNA
acaaaataacaaatatattacataaataaacactaaaacccaaaaaaaca

SEQ ID NO: 46238 - DNA, 50 bp, synthetic construct
  source 1..50: mol_type = other DNA
acaaaataacaaatatattacgtaaataaacactaaaacccaaaaaaacg

SEQ ID NO: 46239 - DNA, 50 bp, synthetic construct
  source 1..50: mol_type = other DNA
aaattaaacaaaacaacctcaaatctaataaacataacaatcacaaacca

SEQ ID NO: 46240 - DNA, 50 bp, synthetic construct
  source 1..50: mol_type = other DNA
gaattaaacgaaacaacctcgaatctaataaacgtaacaatcgcgaaccg

SEQ ID NO: 46241 - DNA, 50 bp, synthetic construct
  source 1..50: mol_type = other DNA
accaataccatataaaaacataaaaatcaaaaaataacacataactaaca

SEQ ID NO: 46242 - DNA, 50 bp, synthetic construct
  source 1..50: mol_type = other DNA
gccaataccgtataaaaacgtaaaaatcgaaaaataacacgtaactaacg

SEQ ID NO: 46243 - DNA, 50 bp, synthetic construct
  source 1..50: mol_type = other DNA
taccatataaaaacataaaaatcaaaaaataacacataactaacaaaaca

SEQ ID NO: 46244 - DNA, 50 bp, synthetic construct
  source 1..50: mol_type = other DNA
taccgtataaaaacgtaaaaatcgaaaaataacacgtaactaacgaaacg

SEQ ID NO: 46245 - DNA, 50 bp, synthetic construct
  source 1..50: mol_type = other DNA
acaaaactaaaacaataaaacacacaaactaataactatatttcccacca

SEQ ID NO: 46246 - DNA, 50 bp, synthetic construct
  source 1..50: mol_type = other DNA
acgaaactaaaacgataaaacgcgcaaactaataactatatttcccgccg

SEQ ID NO: 46247 - DNA, 50 bp, synthetic construct
  source 1..50: mol_type = other DNA
caataaaacacacaaactaataactatatttcccaccaaaaacttttaca

SEQ ID NO: 46248 - DNA, 50 bp, synthetic construct
  source 1..50: mol_type = other DNA
cgataaaacgcgcaaactaataactatatttcccgccgaaaacttttacg

SEQ ID NO: 46249 - DNA, 50 bp, synthetic construct
  source 1..50: mol_type = other DNA
caaactaataactatatttcccaccaaaaacttttacacaaaaccccaca

SEQ ID NO: 46250 - DNA, 50 bp, synthetic construct
  source 1..50: mol_type = other DNA
caaactaataactatatttcccgccgaaaacttttacgcaaaaccccgcg

SEQ ID NO: 46251 - DNA, 50 bp, synthetic construct
  source 1..50: mol_type = other DNA
ttatacaaacttaacataatattaacttccaaaccccccaaccacctcca

SEQ ID NO: 46252 - DNA, 50 bp, synthetic construct
  source 1..50: mol_type = other DNA
ttatacaaacttaacataatattaacttccgaaccccccaaccgcctccg

SEQ ID NO: 46253 - DNA, 50 bp, synthetic construct
  source 1..50: mol_type = other DNA
caactcttatacaaacttaacataatattaacttccaaaccccccaacca

SEQ ID NO: 46254 - DNA, 50 bp, synthetic construct
  source 1..50: mol_type = other DNA
cgactcttatacaaacttaacataatattaacttccgaaccccccaaccg

SEQ ID NO: 46255 - DNA, 50 bp, synthetic construct
  source 1..50: mol_type = other DNA
ataaaattaaaaaataaacactcaaaaccctctaccaaaaaaatctacca

SEQ ID NO: 46256 - DNA, 50 bp, synthetic construct
  source 1..50: mol_type = other DNA
ataaaattaaaaaataaacgctcgaaaccctctaccgaaaaaatctaccg

SEQ ID NO: 46257 - DNA, 50 bp, synthetic construct
  source 1..50: mol_type = other DNA
aaacacaaatataaccaaaaatcaacaaaccccctcaacaaaaaatctca

SEQ ID NO: 46258 - DNA, 50 bp, synthetic construct
  source 1..50: mol_type = other DNA
aaacgcgaatataaccaaaaatcgacaaaccccctcgacaaaaaatctcg

SEQ ID NO: 46259 - DNA, 50 bp, synthetic construct
  source 1..50: mol_type = other DNA
cacaaaaaactcctacttaatacactccacaaaaaaatcaaacactatca

SEQ ID NO: 46260 - DNA, 50 bp, synthetic construct
  source 1..50: mol_type = other DNA
cgcaaaaaactcctacttaatacgctccgcgaaaaaatcaaacactatcg

SEQ ID NO: 46261 - DNA, 50 bp, synthetic construct
  source 1..50: mol_type = other DNA
aaccccctactaatcataaaataaaaaacactctctcctctacacctaca

SEQ ID NO: 46262 - DNA, 50 bp, synthetic construct
  source 1..50: mol_type = other DNA
aaccccctactaatcgtaaaataaaaaacactctctcctctacgcctacg

SEQ ID NO: 46263 - DNA, 50 bp, synthetic construct
  source 1..50: mol_type = other DNA
aaaaacctacaaaacaaatacaaaaccaaacctaataataaccaatcaca

SEQ ID NO: 46264 - DNA, 50 bp, synthetic construct
  source 1..50: mol_type = other DNA
aaaaacctacgaaacgaatacgaaaccaaacctaataataaccaatcgcg

SEQ ID NO: 46265 - DNA, 50 bp, synthetic construct
  source 1..50: mol_type = other DNA
tcctttctttacacatttaaaacaccaatataaaaaacataacatcatca

SEQ ID NO: 46266 - DNA, 50 bp, synthetic construct
  source 1..50: mol_type = other DNA
tcctttctttacgcatttaaaacgccgatataaaaaacgtaacatcgtcg

SEQ ID NO: 46267 - DNA, 50 bp, synthetic construct
  source 1..50: mol_type = other DNA
aaaaccaaacctaataataaccaatcacaaactaaaacaacaataccaca

SEQ ID NO: 46268 - DNA, 50 bp, synthetic construct
  source 1..50: mol_type = other DNA
gaaaccaaacctaataataaccaatcgcgaactaaaacgacgataccacg

SEQ ID NO: 46269 - DNA, 50 bp, synthetic construct
  source 1..50: mol_type = other DNA
aaaaaaaacaacaaaacccaaccaaatatccccaacatcctttctttaca

SEQ ID NO: 46270 - DNA, 50 bp, synthetic construct
  source 1..50: mol_type = other DNA
aaaaaaaacaacaaaacccaaccgaatatccccgacgtcctttctttacg

SEQ ID NO: 46271 - DNA, 50 bp, synthetic construct
  source 1..50: mol_type = other DNA
tcacaaaatccaacaaaaacacaaaactactaaaaccacaaacaataaca

SEQ ID NO: 46272 - DNA, 50 bp, synthetic construct
  source 1..50: mol_type = other DNA
tcgcgaaatccaacgaaaacacaaaactactaaaaccgcgaacgataacg

SEQ ID NO: 46273 - DNA, 50 bp, synthetic construct
  source 1..50: mol_type = other DNA
aaaaaaaccacatcacaaaatccaacaaaaacacaaaactactaaaacca

SEQ ID NO: 46274 - DNA, 50 bp, synthetic construct
  source 1..50: mol_type = other DNA
aaaaaaaccgcgtcgcgaaatccaacgaaaacacaaaactactaaaaccg

SEQ ID NO: 46275 - DNA, 50 bp, synthetic construct
  source 1..50: mol_type = other DNA
aacaaactaaccaaatacaaactaccaaaactaacacaactcaaaaacca

SEQ ID NO: 46276 - DNA, 50 bp, synthetic construct
  source 1..50: mol_type = other DNA
aacgaactaaccaaatacgaactaccgaaactaacgcaactcaaaaaccg

SEQ ID NO: 46277 - DNA, 50 bp, synthetic construct
  source 1..50: mol_type = other DNA
taaccaaatacaaactaccaaaactaacacaactcaaaaaccacaaatca

SEQ ID NO: 46278 - DNA, 50 bp, synthetic construct
  source 1..50: mol_type = other DNA
taaccaaatacgaactaccgaaactaacgcaactcaaaaaccgcgaatcg

SEQ ID NO: 46279 - DNA, 50 bp, synthetic construct
  source 1..50: mol_type = other DNA
aaaacatatcatccataaccttctaactccaacaataattaacaacaaca

SEQ ID NO: 46280 - DNA, 50 bp, synthetic construct
  source 1..50: mol_type = other DNA
aaaacgtatcgtccataaccttctaactccaacgataattaacgacgacg

SEQ ID NO: 46281 - DNA, 50 bp, synthetic construct
  source 1..50: mol_type = other DNA
aataaaacatatcatccataaccttctaactccaacaataattaacaaca

SEQ ID NO: 46282 - DNA, 50 bp, synthetic construct
  source 1..50: mol_type = other DNA
aataaaacgtatcgtccataaccttctaactccaacgataattaacgacg

SEQ ID NO: 46283 - DNA, 50 bp, synthetic construct
  source 1..50: mol_type = other DNA
ccactaaaaccaaaaaaccataaacaacacattctacctaaacaacatca

SEQ ID NO: 46284 - DNA, 50 bp, synthetic construct
  source 1..50: mol_type = other DNA
ccgctaaaaccaaaaaaccataaacgacacgttctacctaaacaacgtcg

SEQ ID NO: 46285 - DNA, 50 bp, synthetic construct
  source 1..50: mol_type = other DNA
actaaaaccaaaaaaccataaacaacacattctacctaaacaacatcaca

SEQ ID NO: 46286 - DNA, 50 bp, synthetic construct
  source 1..50: mol_type = other DNA
gctaaaaccaaaaaaccataaacgacacgttctacctaaacaacgtcgcg

SEQ ID NO: 46287 - DNA, 50 bp, synthetic construct
  source 1..50: mol_type = other DNA
taaccaaaaacacattaaacaactaccccattctacaaaaaaacaaacca

SEQ ID NO: 46288 - DNA, 50 bp, synthetic construct
  source 1..50: mol_type = other DNA
taaccgaaaacgcgttaaacaactaccccgttctacaaaaaaacaaaccg

SEQ ID NO: 46289 - DNA, 50 bp, synthetic construct
  source 1..50: mol_type = other DNA
atcaaaaaaaaactccaaaaaccacaaaaaaactccaaattcaacatcca

SEQ ID NO: 46290 - DNA, 50 bp, synthetic construct
  source 1..50: mol_type = other DNA
atcaaaaaaaaactccaaaaaccacgaaaaaactccgaattcaacatccg

SEQ ID NO: 46291 - DNA, 50 bp, synthetic construct
  source 1..50: mol_type = other DNA
aaaccacaaaaaaactccaaattcaacatccaaaaacaaacaaaatccca

SEQ ID NO: 46292 - DNA, 50 bp, synthetic construct
  source 1..50: mol_type = other DNA
aaaccacgaaaaaactccgaattcaacatccgaaaacgaacaaaatcccg

SEQ ID NO: 46293 - DNA, 50 bp, synthetic construct
  source 1..50: mol_type = other DNA
cataatccaacaaaaaccaaaaaaccacaaaaaattccaaaaaaaacaca

SEQ ID NO: 46294 - DNA, 50 bp, synthetic construct
  source 1..50: mol_type = other DNA
cgtaatccaacgaaaaccaaaaaaccgcaaaaaattccgaaaaaaacacg

SEQ ID NO: 46295 - DNA, 50 bp, synthetic construct
  source 1..50: mol_type = other DNA
atccaacaaaaaccaaaaaaccacaaaaaattccaaaaaaaacacaaaca

SEQ ID NO: 46296 - DNA, 50 bp, synthetic construct
  source 1..50: mol_type = other DNA
atccaacgaaaaccaaaaaaccgcaaaaaattccgaaaaaaacacgaacg

SEQ ID NO: 46297 - DNA, 50 bp, synthetic construct
  source 1..50: mol_type = other DNA
ataaaaacataaaaaccaataacataaaaaccttcaccaaaaccaaacca

SEQ ID NO: 46298 - DNA, 50 bp, synthetic construct
  source 1..50: mol_type = other DNA
ataaaaacgtaaaaaccaataacgtaaaaaccttcgccgaaaccgaaccg

SEQ ID NO: 46299 - DNA, 50 bp, synthetic construct
  source 1..50: mol_type = other DNA
acataataaaaacataaaaaccaataacataaaaaccttcaccaaaacca

SEQ ID NO: 46300 - DNA, 50 bp, synthetic construct
  source 1..50: mol_type = other DNA
acataataaaaacgtaaaaaccaataacgtaaaaaccttcgccgaaaccg

SEQ ID NO: 46301 - DNA, 50 bp, synthetic construct
  source 1..50: mol_type = other DNA
aaaacaacataataaaaacataaaaaccaataacataaaaaccttcacca

SEQ ID NO: 46302 - DNA, 50 bp, synthetic construct
  source 1..50: mol_type = other DNA
aaaacaacataataaaaacgtaaaaaccaataacgtaaaaaccttcgccg

SEQ ID NO: 46303 - DNA, 50 bp, synthetic construct
  source 1..50: mol_type = other DNA
ccaataaatacaaacaacaaaaccccatacaaaacaacataataaaaaca

SEQ ID NO: 46304 - DNA, 50 bp, synthetic construct
  source 1..50: mol_type = other DNA
ccgataaatacgaacgacgaaaccccgtacaaaacaacataataaaaacg

SEQ ID NO: 46305 - DNA, 50 bp, synthetic construct
  source 1..50: mol_type = other DNA
aaacaaaaccaacaatatatacaaaacataacaaaacacaacaaaaaaca

SEQ ID NO: 46306 - DNA, 50 bp, synthetic construct
  source 1..50: mol_type = other DNA
aaacgaaaccgacgatatatacgaaacataacgaaacgcgacaaaaaacg

SEQ ID NO: 46307 - DNA, 50 bp, synthetic construct
  source 1..50: mol_type = other DNA
acaaatctcattaacaaaaacaaaaccaacaatatatacaaaacataaca

SEQ ID NO: 46308 - DNA, 50 bp, synthetic construct
  source 1..50: mol_type = other DNA
acgaatctcattaacaaaaacgaaaccgacgatatatacgaaacataacg

SEQ ID NO: 46309 - DNA, 50 bp, synthetic construct
  source 1..50: mol_type = other DNA
accaaaaaaaacaaatctcattaacaaaaacaaaaccaacaatatataca

SEQ ID NO: 46310 - DNA, 50 bp, synthetic construct
  source 1..50: mol_type = other DNA
accgaaaaaaacgaatctcattaacaaaaacgaaaccgacgatatatacg

SEQ ID NO: 46311 - DNA, 50 bp, synthetic construct
  source 1..50: mol_type = other DNA
aaaaatataaccaaaaaaaacaaatctcattaacaaaaacaaaaccaaca

SEQ ID NO: 46312 - DNA, 50 bp, synthetic construct
  source 1..50: mol_type = other DNA
aaaaatataaccgaaaaaaacgaatctcattaacaaaaacgaaaccgacg

SEQ ID NO: 46313 - DNA, 50 bp, synthetic construct
  source 1..50: mol_type = other DNA
tattaactctccaattaaacaacttaataaaaatataaccaaaaaaaaca

SEQ ID NO: 46314 - DNA, 50 bp, synthetic construct
  source 1..50: mol_type = other DNA
tattaactctccgattaaacaacttaataaaaatataaccgaaaaaaacg

SEQ ID NO: 46315 - DNA, 50 bp, synthetic construct
  source 1..50: mol_type = other DNA
aaaaaaaaactccaaaccatccaaaattcaacacaatacccacaatacca

SEQ ID NO: 46316 - DNA, 50 bp, synthetic construct
  source 1..50: mol_type = other DNA
aaaaaaaaactccgaaccatccaaaattcaacacaatacccgcgataccg

SEQ ID NO: 46317 - DNA, 50 bp, synthetic construct
  source 1..50: mol_type = other DNA
caaactaaaataaattaaacaaaataaatatccaaataaacaacatcaca

SEQ ID NO: 46318 - DNA, 50 bp, synthetic construct
  source 1..50: mol_type = other DNA
cgaactaaaataaattaaacaaaataaatatccaaataaacgacatcgcg

SEQ ID NO: 46319 - DNA, 50 bp, synthetic construct
  source 1..50: mol_type = other DNA
aatacacaaactaccaaattccaaccataactcaaaaaaaacaaaaccca

SEQ ID NO: 46320 - DNA, 50 bp, synthetic construct
  source 1..50: mol_type = other DNA
gatacacaaactaccaaattccaaccataactcaaaaaaaacaaaacccg

SEQ ID NO: 46321 - DNA, 50 bp, synthetic construct
  source 1..50: mol_type = other DNA
aaacccaaaaccatatcctaactctaaaaaaaacactaatccactcctca

SEQ ID NO: 46322 - DNA, 50 bp, synthetic construct
  source 1..50: mol_type = other DNA
aaacccaaaaccatatcctaactctaaaaaaaacactaatccgctcctcg

SEQ ID NO: 46323 - DNA, 50 bp, synthetic construct
  source 1..50: mol_type = other DNA
gttatgttttaattttgagggaggtattaatttgttttttggagggtttt

SEQ ID NO: 46324 - DNA, 50 bp, synthetic construct
  source 1..50: mol_type = other DNA
gttatgttttaattttgagggaggtattaattcgtttttcggagggtttc

SEQ ID NO: 46325 - DNA, 50 bp, synthetic construct
  source 1..50: mol_type = other DNA
accaaaactcactataaaccaaaccctaaccttaactaaaatacctacca

SEQ ID NO: 46326 - DNA, 50 bp, synthetic construct
  source 1..50: mol_type = other DNA
accaaaactcgctataaaccgaaccctaaccttaactaaaatacctaccg

SEQ ID NO: 46327 - DNA, 50 bp, synthetic construct
  source 1..50: mol_type = other DNA
aaaaacacaaactcaaacacatcaacctaaccaaaactcactataaacca

SEQ ID NO: 46328 - DNA, 50 bp, synthetic construct
  source 1..50: mol_type = other DNA
aaaaacacaaactcgaacacatcaacctaaccaaaactcgctataaaccg

SEQ ID NO: 46329 - DNA, 50 bp, synthetic construct
  source 1..50: mol_type = other DNA
tctatttaatttaaaaaacaaaaaccaacacccataaataaaacaaaaca

SEQ ID NO: 46330 - DNA, 50 bp, synthetic construct
  source 1..50: mol_type = other DNA
tctatttaatttaaaaaacaaaaaccaacacccataaataaaacgaaacg

SEQ ID NO: 46331 - DNA, 50 bp, synthetic construct
  source 1..50: mol_type = other DNA
aacacaaaaacacctcaaaaaaacaaaataaacaaattcaataccaaaca

SEQ ID NO: 46332 - DNA, 50 bp, synthetic construct
  source 1..50: mol_type = other DNA
aacgcgaaaacgcctcgaaaaaacgaaataaacaaattcaataccaaacg

SEQ ID NO: 46333 - DNA, 50 bp, synthetic construct
  source 1..50: mol_type = other DNA
aaacacctccacatttaaaatataaaaactattcccaatcaacccaaaca

SEQ ID NO: 46334 - DNA, 50 bp, synthetic construct
  source 1..50: mol_type = other DNA
aaacgcctccgcgtttaaaatataaaaactattcccgatcaacccgaacg

SEQ ID NO: 46335 - DNA, 50 bp, synthetic construct
  source 1..50: mol_type = other DNA
taatccaaaatcaaacaataaatactaaaaataacaactcataaaaaaca

SEQ ID NO: 46336 - DNA, 50 bp, synthetic construct
  source 1..50: mol_type = other DNA
taatccaaaatcgaacgataaatactaaaaataacaactcataaaaaacg

SEQ ID NO: 46337 - DNA, 50 bp, synthetic construct
  source 1..50: mol_type = other DNA
aaaacccacaaaaaaaataaacacaataacacaacctaacaaaaaactca

SEQ ID NO: 46338 - DNA, 50 bp, synthetic construct
  source 1..50: mol_type = other DNA
aaaacccgcaaaaaaaataaacgcgataacgcgacctaacgaaaaactcg

SEQ ID NO: 46339 - DNA, 50 bp, synthetic construct
  source 1..50: mol_type = other DNA
taccacaaaaaatacaaaatacacccaacaaccaaaccaaaataaaaaca

SEQ ID NO: 46340 - DNA, 50 bp, synthetic construct
  source 1..50: mol_type = other DNA
taccgcaaaaaatacgaaatacacccgacaaccgaaccgaaataaaaacg

SEQ ID NO: 46341 - DNA, 50 bp, synthetic construct
  source 1..50: mol_type = other DNA
aaaaccataaccaaaatattacaaacactaaccaataaatacaaacctca

SEQ ID NO: 46342 - DNA, 50 bp, synthetic construct
  source 1..50: mol_type = other DNA
gaaaccataaccgaaatattacgaacgctaaccgataaatacaaacctcg

SEQ ID NO: 46343 - DNA, 50 bp, synthetic construct
  source 1..50: mol_type = other DNA
caaaaaacaaaaaccaaaaccaaacacaaaaccataaccaaaatattaca

SEQ ID NO: 46344 - DNA, 50 bp, synthetic construct
  source 1..50: mol_type = other DNA
cgaaaaacgaaaaccgaaaccaaacgcgaaaccataaccgaaatattacg

SEQ ID NO: 46345 - DNA, 50 bp, synthetic construct
  source 1..50: mol_type = other DNA
aaaatatcaaaaaacccccaaaaacaaaacttcaaaaacacccaaaacca

SEQ ID NO: 46346 - DNA, 50 bp, synthetic construct
  source 1..50: mol_type = other DNA
aaaatatcaaaaaacccccgaaaacgaaacttcaaaaacacccgaaaccg

SEQ ID NO: 46347 - DNA, 50 bp, synthetic construct
  source 1..50: mol_type = other DNA
acacaaaacacaaaatcctacaaaactaaaaaactacaaactacaacaca

SEQ ID NO: 46348 - DNA, 50 bp, synthetic construct
  source 1..50: mol_type = other DNA
acgcgaaacacaaaatcctacgaaactaaaaaactacaaactacgacgcg

SEQ ID NO: 46349 - DNA, 50 bp, synthetic construct
  source 1..50: mol_type = other DNA
cacaaacacaaaacacaaaatcctacaaaactaaaaaactacaaactaca

SEQ ID NO: 46350 - DNA, 50 bp, synthetic construct
  source 1..50: mol_type = other DNA
cgcgaacgcgaaacacaaaatcctacgaaactaaaaaactacaaactacg

SEQ ID NO: 46351 - DNA, 50 bp, synthetic construct
  source 1..50: mol_type = other DNA
taaaaccacaaaccaaaaccaaaaaaacaactctacctaaaaaaacatca

SEQ ID NO: 46352 - DNA, 50 bp, synthetic construct
  source 1..50: mol_type = other DNA
taaaaccgcgaaccgaaaccgaaaaaacgactctacctaaaaaaacgtcg

SEQ ID NO: 46353 - DNA, 50 bp, synthetic construct
  source 1..50: mol_type = other DNA
aaaacctctaaaacccttcaaaaaataactcctcttcacaacaaaacaca

SEQ ID NO: 46354 - DNA, 50 bp, synthetic construct
  source 1..50: mol_type = other DNA
aaaacctctaaaacccttcgaaaaataactcctcttcgcaacgaaacgcg

SEQ ID NO: 46355 - DNA, 50 bp, synthetic construct
  source 1..50: mol_type = other DNA
aaccacaacttcccaaaaacaaacctctataaacactataaaacaaaaca

SEQ ID NO: 46356 - DNA, 50 bp, synthetic construct
  source 1..50: mol_type = other DNA
aaccgcgacttcccgaaaacaaacctctataaacactataaaacgaaacg

SEQ ID NO: 46357 - DNA, 50 bp, synthetic construct
  source 1..50: mol_type = other DNA
taacaaccaaaccacacaaaacctaaataaaaattcctcaaaccaaacca

SEQ ID NO: 46358 - DNA, 50 bp, synthetic construct
  source 1..50: mol_type = other DNA
taacaaccaaaccacacaaaacctaaataaaaattcctcgaaccgaaccg

SEQ ID NO: 46359 - DNA, 50 bp, synthetic construct
  source 1..50: mol_type = other DNA
aaaaaaacaccataaatcaaaaaatacatcctccctcctaacatcaccca

SEQ ID NO: 46360 - DNA, 50 bp, synthetic construct
  source 1..50: mol_type = other DNA
aaaaaaacgccataaatcaaaaaatacatcctccctcctaacgtcacccg

SEQ ID NO: 46361 - DNA, 50 bp, synthetic construct
  source 1..50: mol_type = other DNA
ctccctcctaacatcacccaaaacaaaaataaaaaatcaaacaaaaaaca

SEQ ID NO: 46362 - DNA, 50 bp, synthetic construct
  source 1..50: mol_type = other DNA
ctccctcctaacgtcacccgaaacaaaaataaaaaatcaaacaaaaaacg

SEQ ID NO: 46363 - DNA, 50 bp, synthetic construct
  source 1..50: mol_type = other DNA
ctaaaattcacactaatccctaatatctacaccaccaactaccacacaca

SEQ ID NO: 46364 - DNA, 50 bp, synthetic construct
  source 1..50: mol_type = other DNA
ctaaaattcacactaatccctaatatctacaccaccaactaccacacgcg

SEQ ID NO: 46365 - DNA, 50 bp, synthetic construct
  source 1..50: mol_type = other DNA
taataaacacaccctaatcaaaaccttctaactcttctacctcaacccca

SEQ ID NO: 46366 - DNA, 50 bp, synthetic construct
  source 1..50: mol_type = other DNA
taataaacacaccctaatcaaaaccttctaactcttctacctcaaccccg

SEQ ID NO: 46367 - DNA, 50 bp, synthetic construct
  source 1..50: mol_type = other DNA
tcttctaaaatctaaacctattttacctaacaccacctaacactacctca

SEQ ID NO: 46368 - DNA, 50 bp, synthetic construct
  source 1..50: mol_type = other DNA
tcttctaaaatctaaacctattttacctaacgccgcctaacactacctcg

SEQ ID NO: 46369 - DNA, 50 bp, synthetic construct
  source 1..50: mol_type = other DNA
aatttttagttttaaatgtggagtgtgggggttaagtaagaagagaagtt

SEQ ID NO: 46370 - DNA, 50 bp, synthetic construct
  source 1..50: mol_type = other DNA
aatttttagttttaaacgtggagcgtgggggttaagtaagaagagaagtc

SEQ ID NO: 46371 - DNA, 50 bp, synthetic construct
  source 1..50: mol_type = other DNA
cattttaacactaccaaaaattaaccacattaaactaaacctcaaactca

SEQ ID NO: 46372 - DNA, 50 bp, synthetic construct
  source 1..50: mol_type = other DNA
cgttttaacgctaccaaaaattaaccacgttaaactaaacctcaaactcg

SEQ ID NO: 46373 - DNA, 50 bp, synthetic construct
  source 1..50: mol_type = other DNA
gttttgttgagaattgggaggtatagaagagtttatattagatttgtttt

SEQ ID NO: 46374 - DNA, 50 bp, synthetic construct
  source 1..50: mol_type = other DNA
gttttgttgagaattgggaggtatagaagagtttatattagattcgtttc

SEQ ID NO: 46375 - DNA, 50 bp, synthetic construct
  source 1..50: mol_type = other DNA
ttgttgagaattgggaggtatagaagagtttatattagatttgttttggt

SEQ ID NO: 46376 - DNA, 50 bp, synthetic construct
  source 1..50: mol_type = other DNA
ttgttgagaattgggaggtatagaagagtttatattagattcgtttcggc

SEQ ID NO: 46377 - DNA, 50 bp, synthetic construct
  source 1..50: mol_type = other DNA
aaaaaatataaaaataacactacctcaaaaaaaacactatatttaaacca

SEQ ID NO: 46378 - DNA, 50 bp, synthetic construct
  source 1..50: mol_type = other DNA
gaaaaatataaaaataacgctacctcgaaaaaaacgctatatttaaaccg

SEQ ID NO: 46379 - DNA, 50 bp, synthetic construct
  source 1..50: mol_type = other DNA
taaaaataacactacctcaaaaaaaacactatatttaaaccatataacca

SEQ ID NO: 46380 - DNA, 50 bp, synthetic construct
  source 1..50: mol_type = other DNA
taaaaataacgctacctcgaaaaaaacgctatatttaaaccgtataaccg

SEQ ID NO: 46381 - DNA, 50 bp, synthetic construct
  source 1..50: mol_type = other DNA
gtattttttggttttggggtgtatttggttatttttggttttgttttgtt

SEQ ID NO: 46382 - DNA, 50 bp, synthetic construct
  source 1..50: mol_type = other DNA
gtatttttcggttttggggtgtatttggttattttcggttttgttttgtc

SEQ ID NO: 46383 - DNA, 50 bp, synthetic construct
  source 1..50: mol_type = other DNA
caaaaccaaaaataaccaaatacaccccaaaaccaaaaaatacataccca

SEQ ID NO: 46384 - DNA, 50 bp, synthetic construct
  source 1..50: mol_type = other DNA
caaaaccgaaaataaccaaatacaccccaaaaccgaaaaatacgtacccg

SEQ ID NO: 46385 - DNA, 50 bp, synthetic construct
  source 1..50: mol_type = other DNA
aattaaatatcatacaactcaaccaaataaccaaaaaaataaacaacaca

SEQ ID NO: 46386 - DNA, 50 bp, synthetic construct
  source 1..50: mol_type = other DNA
aattaaatatcgtacgactcgaccgaataaccgaaaaaataaacgacgcg

SEQ ID NO: 46387 - DNA, 50 bp, synthetic construct
  source 1..50: mol_type = other DNA
caaattaaatatcatacaactcaaccaaataaccaaaaaaataaacaaca

SEQ ID NO: 46388 - DNA, 50 bp, synthetic construct
  source 1..50: mol_type = other DNA
caaattaaatatcgtacgactcgaccgaataaccgaaaaaataaacgacg

SEQ ID NO: 46389 - DNA, 50 bp, synthetic construct
  source 1..50: mol_type = other DNA
cttcaaattaaatatcatacaactcaaccaaataaccaaaaaaataaaca

SEQ ID NO: 46390 - DNA, 50 bp, synthetic construct
  source 1..50: mol_type = other DNA
cttcaaattaaatatcgtacgactcgaccgaataaccgaaaaaataaacg

SEQ ID NO: 46391 - DNA, 50 bp, synthetic construct
  source 1..50: mol_type = other DNA
aaccataaccaacttcaaattaaatatcatacaactcaaccaaataacca

SEQ ID NO: 46392 - DNA, 50 bp, synthetic construct
  source 1..50: mol_type = other DNA
gaccataaccgacttcaaattaaatatcgtacgactcgaccgaataaccg

SEQ ID NO: 46393 - DNA, 50 bp, synthetic construct
  source 1..50: mol_type = other DNA
tttatttttttggttatttggttgagttgtatgatatttaatttgaagtt

SEQ ID NO: 46394 - DNA, 50 bp, synthetic construct
  source 1..50: mol_type = other DNA
tttattttttcggttattcggtcgagtcgtacgatatttaatttgaagtc

SEQ ID NO: 46395 - DNA, 50 bp, synthetic construct
  source 1..50: mol_type = other DNA
agttgtatgatatttaatttgaagttggttatggttgggtttgtgttttt

SEQ ID NO: 46396 - DNA, 50 bp, synthetic construct
  source 1..50: mol_type = other DNA
agtcgtacgatatttaatttgaagtcggttatggtcgggtttgcgttttc

SEQ ID NO: 46397 - DNA, 50 bp, synthetic construct
  source 1..50: mol_type = other DNA
agtttttagttatattttgtattgtttttttaggtgtggtgttgttgttt

SEQ ID NO: 46398 - DNA, 50 bp, synthetic construct
  source 1..50: mol_type = other DNA
agtttttagttatatttcgtattgtttttttaggcgcggcgtcgttgttc

SEQ ID NO: 46399 - DNA, 50 bp, synthetic construct
  source 1..50: mol_type = other DNA
atttggtgtgagtttttagttatattttgtattgtttttttaggtgtggt

SEQ ID NO: 46400 - DNA, 50 bp, synthetic construct
  source 1..50: mol_type = other DNA
attcggcgcgagtttttagttatatttcgtattgtttttttaggcgcggc

SEQ ID NO: 46401 - DNA, 50 bp, synthetic construct
  source 1..50: mol_type = other DNA
tggatttggtgtgagtttttagttatattttgtattgtttttttaggtgt

SEQ ID NO: 46402 - DNA, 50 bp, synthetic construct
  source 1..50: mol_type = other DNA
cggattcggcgcgagtttttagttatatttcgtattgtttttttaggcgc

SEQ ID NO: 46403 - DNA, 50 bp, synthetic construct
  source 1..50: mol_type = other DNA
tatggatttggtgtgagtttttagttatattttgtattgtttttttaggt

SEQ ID NO: 46404 - DNA, 50 bp, synthetic construct
  source 1..50: mol_type = other DNA
tacggattcggcgcgagtttttagttatatttcgtattgtttttttaggc

SEQ ID NO: 46405 - DNA, 50 bp, synthetic construct
  source 1..50: mol_type = other DNA
cacaacataaaacaaatacaactcttcaaaatcaacctaaaccacaacca

SEQ ID NO: 46406 - DNA, 50 bp, synthetic construct
  source 1..50: mol_type = other DNA
cgcgacataaaacgaatacaactcttcgaaatcaacctaaaccacgaccg

SEQ ID NO: 46407 - DNA, 50 bp, synthetic construct
  source 1..50: mol_type = other DNA
caacataaaacaaatacaactcttcaaaatcaacctaaaccacaaccaca

SEQ ID NO: 46408 - DNA, 50 bp, synthetic construct
  source 1..50: mol_type = other DNA
cgacataaaacgaatacaactcttcgaaatcaacctaaaccacgaccgcg

SEQ ID NO: 46409 - DNA, 50 bp, synthetic construct
  source 1..50: mol_type = other DNA
cataaaacaaatacaactcttcaaaatcaacctaaaccacaaccacatca

SEQ ID NO: 46410 - DNA, 50 bp, synthetic construct
  source 1..50: mol_type = other DNA
cataaaacgaatacaactcttcgaaatcaacctaaaccacgaccgcgtcg

SEQ ID NO: 46411 - DNA, 50 bp, synthetic construct
  source 1..50: mol_type = other DNA
tgtagttttttgagattagtttgagttatggttgtgttgtttatagtttt

SEQ ID NO: 46412 - DNA, 50 bp, synthetic construct
  source 1..50: mol_type = other DNA
tgtagtttttcgagattagtttgagttacggtcgcgtcgtttatagtttc

SEQ ID NO: 46413 - DNA, 50 bp, synthetic construct
  source 1..50: mol_type = other DNA
aaaacaacaaaatcccaacaaaacctaaaacaaatccactataaaaaaca

SEQ ID NO: 46414 - DNA, 50 bp, synthetic construct
  source 1..50: mol_type = other DNA
aaaacgacgaaatcccgacgaaacctaaaacgaatccactataaaaaacg

SEQ ID NO: 46415 - DNA, 50 bp, synthetic construct
  source 1..50: mol_type = other DNA
aaatcccaacaaaacctaaaacaaatccactataaaaaacaccctaaaca

SEQ ID NO: 46416 - DNA, 50 bp, synthetic construct
  source 1..50: mol_type = other DNA
aaatcccgacgaaacctaaaacgaatccactataaaaaacgccctaaacg

SEQ ID NO: 46417 - DNA, 50 bp, synthetic construct
  source 1..50: mol_type = other DNA
caacaaaacctaaaacaaatccactataaaaaacaccctaaacacaaaca

SEQ ID NO: 46418 - DNA, 50 bp, synthetic construct
  source 1..50: mol_type = other DNA
cgacgaaacctaaaacgaatccactataaaaaacgccctaaacgcgaacg

SEQ ID NO: 46419 - DNA, 50 bp, synthetic construct
  source 1..50: mol_type = other DNA
aaaacctaaaacaaatccactataaaaaacaccctaaacacaaacacaca

SEQ ID NO: 46420 - DNA, 50 bp, synthetic construct
  source 1..50: mol_type = other DNA
gaaacctaaaacgaatccactataaaaaacgccctaaacgcgaacgcacg

SEQ ID NO: 46421 - DNA, 50 bp, synthetic construct
  source 1..50: mol_type = other DNA
caaaatacaaaaaaaaacccaacaaatacaaacacaaacaaaaaaaatca

SEQ ID NO: 46422 - DNA, 50 bp, synthetic construct
  source 1..50: mol_type = other DNA
caaaatacgaaaaaaaacccaacaaatacgaacgcgaacgaaaaaaatcg

SEQ ID NO: 46423 - DNA, 50 bp, synthetic construct
  source 1..50: mol_type = other DNA
cacctacaccaaaaaccaaaatacaaaaaaaaacccaacaaatacaaaca

SEQ ID NO: 46424 - DNA, 50 bp, synthetic construct
  source 1..50: mol_type = other DNA
cgcctacgccgaaaaccaaaatacgaaaaaaaacccaacaaatacgaacg

SEQ ID NO: 46425 - DNA, 50 bp, synthetic construct
  source 1..50: mol_type = other DNA
aaaacacctacaccaaaaaccaaaatacaaaaaaaaacccaacaaataca

SEQ ID NO: 46426 - DNA, 50 bp, synthetic construct
  source 1..50: mol_type = other DNA
aaaacgcctacgccgaaaaccaaaatacgaaaaaaaacccaacaaatacg

SEQ ID NO: 46427 - DNA, 50 bp, synthetic construct
  source 1..50: mol_type = other DNA
gtttttttttgtattttggtttttggtgtaggtgtttttgttgtagagtt

SEQ ID NO: 46428 - DNA, 50 bp, synthetic construct
  source 1..50: mol_type = other DNA
gttttttttcgtattttggttttcggcgtaggcgttttcgttgtagagtc

SEQ ID NO: 46429 - DNA, 50 bp, synthetic construct
  source 1..50: mol_type = other DNA
caaaaaaccaacaaaacctactaacaaataacaaaaaacacaaaaaacca

SEQ ID NO: 46430 - DNA, 50 bp, synthetic construct
  source 1..50: mol_type = other DNA
cgaaaaaccgacgaaacctactaacgaataacaaaaaacgcaaaaaaccg

SEQ ID NO: 46431 - DNA, 50 bp, synthetic construct
  source 1..50: mol_type = other DNA
tccacctcaacaaaaaaccaacaaaacctactaacaaataacaaaaaaca

SEQ ID NO: 46432 - DNA, 50 bp, synthetic construct
  source 1..50: mol_type = other DNA
tccacctcgacgaaaaaccgacgaaacctactaacgaataacaaaaaacg

SEQ ID NO: 46433 - DNA, 50 bp, synthetic construct
  source 1..50: mol_type = other DNA
attgtagtaatttgatatttagtttttgaggtttaggtgtttattttggt

SEQ ID NO: 46434 - DNA, 50 bp, synthetic construct
  source 1..50: mol_type = other DNA
attgtagtaattcgatatttagttttcgaggtttaggcgtttatttcggc

SEQ ID NO: 46435 - DNA, 50 bp, synthetic construct
  source 1..50: mol_type = other DNA
gttattgtagtaatttgatatttagtttttgaggtttaggtgtttatttt

SEQ ID NO: 46436 - DNA, 50 bp, synthetic construct
  source 1..50: mol_type = other DNA
gttattgtagtaattcgatatttagttttcgaggtttaggcgtttatttc

SEQ ID NO: 46437 - DNA, 50 bp, synthetic construct
  source 1..50: mol_type = other DNA
ttgttagtggttattgtagtaatttgatatttagtttttgaggtttaggt

SEQ ID NO: 46438 - DNA, 50 bp, synthetic construct
  source 1..50: mol_type = other DNA
ttgttagcggttattgtagtaattcgatatttagttttcgaggtttaggc

SEQ ID NO: 46439 - DNA, 50 bp, synthetic construct
  source 1..50: mol_type = other DNA
tttagggtgttttgttagtggttattgtagtaatttgatatttagttttt

SEQ ID NO: 46440 - DNA, 50 bp, synthetic construct
  source 1..50: mol_type = other DNA
tttagggcgttttgttagcggttattgtagtaattcgatatttagttttc

SEQ ID NO: 46441 - DNA, 50 bp, synthetic construct
  source 1..50: mol_type = other DNA
caaaataaaaaaatccccaacaaaaacacaacactcacaaccaaaaacca

SEQ ID NO: 46442 - DNA, 50 bp, synthetic construct
  source 1..50: mol_type = other DNA
caaaataaaaaaatccccgacaaaaacgcgacactcacaaccaaaaaccg

SEQ ID NO: 46443 - DNA, 50 bp, synthetic construct
  source 1..50: mol_type = other DNA
aaataattcccacaaaaaaccaaaataaaaaaatccccaacaaaaacaca

SEQ ID NO: 46444 - DNA, 50 bp, synthetic construct
  source 1..50: mol_type = other DNA
aaataattcccacaaaaaaccaaaataaaaaaatccccgacaaaaacgcg

SEQ ID NO: 46445 - DNA, 50 bp, synthetic construct
  source 1..50: mol_type = other DNA
ccaaataattcccacaaaaaaccaaaataaaaaaatccccaacaaaaaca

SEQ ID NO: 46446 - DNA, 50 bp, synthetic construct
  source 1..50: mol_type = other DNA
ccaaataattcccacaaaaaaccaaaataaaaaaatccccgacaaaaacg

SEQ ID NO: 46447 - DNA, 50 bp, synthetic construct
  source 1..50: mol_type = other DNA
ccaaacaacccaaataattcccacaaaaaaccaaaataaaaaaatcccca

SEQ ID NO: 46448 - DNA, 50 bp, synthetic construct
  source 1..50: mol_type = other DNA
ccaaacaacccaaataattcccacaaaaaaccaaaataaaaaaatccccg

SEQ ID NO: 46449 - DNA, 50 bp, synthetic construct
  source 1..50: mol_type = other DNA
actacttaacctataccacaacccctaaacttaccactaaaccttaacca

SEQ ID NO: 46450 - DNA, 50 bp, synthetic construct
  source 1..50: mol_type = other DNA
actacttaacctataccacaacccctaaacttaccgctaaaccttaaccg

SEQ ID NO: 46451 - DNA, 50 bp, synthetic construct
  source 1..50: mol_type = other DNA
aaactataaattctcaacaaacacaaaatcaatactattacccacacaca

SEQ ID NO: 46452 - DNA, 50 bp, synthetic construct
  source 1..50: mol_type = other DNA
aaactataaattctcaacaaacacaaaatcgatactattacccacgcgcg

SEQ ID NO: 46453 - DNA, 50 bp, synthetic construct
  source 1..50: mol_type = other DNA
aggttgagaggatagaatagagattgtgggtttttagtaggtataaaatt

SEQ ID NO: 46454 - DNA, 50 bp, synthetic construct
  source 1..50: mol_type = other DNA
aggttgagaggatagaatagagattgtgggtttttagtaggtataaaatc

SEQ ID NO: 46455 - DNA, 50 bp, synthetic construct
  source 1..50: mol_type = other DNA
aaaaacaaaaaccaccctcaaaaataaaaaactaaacctaacaactacca

SEQ ID NO: 46456 - DNA, 50 bp, synthetic construct
  source 1..50: mol_type = other DNA
aaaaacaaaaaccaccctcaaaaataaaaaactaaacctaacaactaccg

SEQ ID NO: 46457 - DNA, 50 bp, synthetic construct
  source 1..50: mol_type = other DNA
aactaccaaaaaataaacaaaatacatataaaaaaccacataaaactaca

SEQ ID NO: 46458 - DNA, 50 bp, synthetic construct
  source 1..50: mol_type = other DNA
aactaccgaaaaataaacaaaatacatataaaaaaccacgtaaaactacg

SEQ ID NO: 46459 - DNA, 50 bp, synthetic construct
  source 1..50: mol_type = other DNA
aaaaccacaaataaaacaaatataactaaccctaaacactcaacacacca

SEQ ID NO: 46460 - DNA, 50 bp, synthetic construct
  source 1..50: mol_type = other DNA
aaaaccacaaataaaacaaatataactaaccctaaacgctcgacacaccg

SEQ ID NO: 46461 - DNA, 50 bp, synthetic construct
  source 1..50: mol_type = other DNA
cccccaacccctacccacctaaatcttatactatatatacttctactaca

SEQ ID NO: 46462 - DNA, 50 bp, synthetic construct
  source 1..50: mol_type = other DNA
cccccaacccctacccacctaaatcttatactatatatacttctactacg

SEQ ID NO: 46463 - DNA, 50 bp, synthetic construct
  source 1..50: mol_type = other DNA
tacccaacaaaactaactttctacatcaaaaaacaactcaatcctctcca

SEQ ID NO: 46464 - DNA, 50 bp, synthetic construct
  source 1..50: mol_type = other DNA
tacccaacgaaactaactttctacatcaaaaaacgactcaatcctctccg

SEQ ID NO: 46465 - DNA, 50 bp, synthetic construct
  source 1..50: mol_type = other DNA
ttcctaaacaaacactacccaacaaaactaactttctacatcaaaaaaca

SEQ ID NO: 46466 - DNA, 50 bp, synthetic construct
  source 1..50: mol_type = other DNA
ttcctaaacgaacactacccaacgaaactaactttctacatcaaaaaacg

SEQ ID NO: 46467 - DNA, 50 bp, synthetic construct
  source 1..50: mol_type = other DNA
aaaaaaccaaaaaaaactaaaccatctcctaatacaaaaaatcaacccca

SEQ ID NO: 46468 - DNA, 50 bp, synthetic construct
  source 1..50: mol_type = other DNA
aaaaaaccgaaaaaaactaaaccgtctcctaatacaaaaaatcaaccccg

SEQ ID NO: 46469 - DNA, 50 bp, synthetic construct
  source 1..50: mol_type = other DNA
agttagttttgttgggtagtgtttgtttaggaagtagggttttatttaat

SEQ ID NO: 46470 - DNA, 50 bp, synthetic construct
  source 1..50: mol_type = other DNA
agttagtttcgttgggtagtgttcgtttaggaagtagggttttatttaac

SEQ ID NO: 46471 - DNA, 50 bp, synthetic construct
  source 1..50: mol_type = other DNA
actaacttatccacaaaacaacaaaaaaatacaccccttaatatatccca

SEQ ID NO: 46472 - DNA, 50 bp, synthetic construct
  source 1..50: mol_type = other DNA
actaacttatccacaaaacaacaaaaaaatacgccccttaatatatcccg

SEQ ID NO: 46473 - DNA, 50 bp, synthetic construct
  source 1..50: mol_type = other DNA
actaaccttcccaaaaccctacccaaataatactacttaaccccaaatca

SEQ ID NO: 46474 - DNA, 50 bp, synthetic construct
  source 1..50: mol_type = other DNA
actaaccttcccaaaaccctacccaaataatactacttaaccccaaatcg

SEQ ID NO: 46475 - DNA, 50 bp, synthetic construct
  source 1..50: mol_type = other DNA
atcacccaaataactacaaaaaaaataactacataaaccccaaccaacca

SEQ ID NO: 46476 - DNA, 50 bp, synthetic construct
  source 1..50: mol_type = other DNA
atcacccgaataactacaaaaaaaataactacataaaccccaaccaaccg

SEQ ID NO: 46477 - DNA, 50 bp, synthetic construct
  source 1..50: mol_type = other DNA
aaaatcaccactcaaaaactaactcccaaacttacccttatctaccaaca

SEQ ID NO: 46478 - DNA, 50 bp, synthetic construct
  source 1..50: mol_type = other DNA
aaaatcaccactcgaaaactaactcccaaacttacccttatctaccaacg

SEQ ID NO: 46479 - DNA, 50 bp, synthetic construct
  source 1..50: mol_type = other DNA
ctcttatcctcaatccttcacccaaaccacaaccctatactactataaca

SEQ ID NO: 46480 - DNA, 50 bp, synthetic construct
  source 1..50: mol_type = other DNA
ctcttatcctcaatccttcacccaaaccacaaccctatactactataacg

SEQ ID NO: 46481 - DNA, 50 bp, synthetic construct
  source 1..50: mol_type = other DNA
tatattaaaaataaaacaactactccccatccactactacaactctaaca

SEQ ID NO: 46482 - DNA, 50 bp, synthetic construct
  source 1..50: mol_type = other DNA
tatattaaaaataaaacgactactccccatccactactacgactctaacg

SEQ ID NO: 46483 - DNA, 50 bp, synthetic construct
  source 1..50: mol_type = other DNA
ttaaaaataaaacaactactccccatccactactacaactctaacaaaca

SEQ ID NO: 46484 - DNA, 50 bp, synthetic construct
  source 1..50: mol_type = other DNA
ttaaaaataaaacgactactccccatccactactacgactctaacgaacg

SEQ ID NO: 46485 - DNA, 50 bp, synthetic construct
  source 1..50: mol_type = other DNA
attattatgattttggtgggtgggttttttagttttaggttttttatttt

SEQ ID NO: 46486 - DNA, 50 bp, synthetic construct
  source 1..50: mol_type = other DNA
attattacgattttggcgggcgggttttttagttttaggttttttatttc

SEQ ID NO: 46487 - DNA, 50 bp, synthetic construct
  source 1..50: mol_type = other DNA
aaaaacaaacaaaaacacaaataaaaaaaacaaccacatacctataccca

SEQ ID NO: 46488 - DNA, 50 bp, synthetic construct
  source 1..50: mol_type = other DNA
aaaaacgaacgaaaacgcaaataaaaaaaacgaccgcgtacctatacccg

SEQ ID NO: 46489 - DNA, 50 bp, synthetic construct
  source 1..50: mol_type = other DNA
tgtatttttttggtattttggttgaggttttttttgtagatttggtttgt

SEQ ID NO: 46490 - DNA, 50 bp, synthetic construct
  source 1..50: mol_type = other DNA
cgtattttttcggtattttggtcgaggtttttttcgtagattcggtttgc

SEQ ID NO: 46491 - DNA, 50 bp, synthetic construct
  source 1..50: mol_type = other DNA
tgttttttgtatttttttggtattttggttgaggttttttttgtagattt

SEQ ID NO: 46492 - DNA, 50 bp, synthetic construct
  source 1..50: mol_type = other DNA
tgtttttcgtattttttcggtattttggtcgaggtttttttcgtagattc

SEQ ID NO: 46493 - DNA, 50 bp, synthetic construct
  source 1..50: mol_type = other DNA
acaaaccaaatctacaaaaaaaacctcaaccaaaataccaaaaaaataca

SEQ ID NO: 46494 - DNA, 50 bp, synthetic construct
  source 1..50: mol_type = other DNA
gcaaaccgaatctacgaaaaaaacctcgaccaaaataccgaaaaaatacg

SEQ ID NO: 46495 - DNA, 50 bp, synthetic construct
  source 1..50: mol_type = other DNA
tattttatttagaataaagtgaaaggttaatgaagtgaaggaagagtttt

SEQ ID NO: 46496 - DNA, 50 bp, synthetic construct
  source 1..50: mol_type = other DNA
tattttatttagaataaagtgaaaggttaacgaagcgaaggaagagtttc

SEQ ID NO: 46497 - DNA, 50 bp, synthetic construct
  source 1..50: mol_type = other DNA
tttcattaaaaataataccatcctactcaaaacaaaataaaaaatcaaca

SEQ ID NO: 46498 - DNA, 50 bp, synthetic construct
  source 1..50: mol_type = other DNA
tttcgttaaaaataataccatcctactcaaaacaaaataaaaaatcaacg

SEQ ID NO: 46499 - DNA, 50 bp, synthetic construct
  source 1..50: mol_type = other DNA
atatcaaaacaaatccactaaactattaaacattaaacttcccctcacca

SEQ ID NO: 46500 - DNA, 50 bp, synthetic construct
  source 1..50: mol_type = other DNA
atatcgaaacgaatccgctaaactattaaacattaaacttcccctcaccg

SEQ ID NO: 46501 - DNA, 50 bp, synthetic construct
  source 1..50: mol_type = other DNA
cactataatcttattatataaaattaaataaaaatcatattttaaacaca

SEQ ID NO: 46502 - DNA, 50 bp, synthetic construct
  source 1..50: mol_type = other DNA
cactataatcttattatataaaattaaataaaaatcgtattttaaacacg

SEQ ID NO: 46503 - DNA, 50 bp, synthetic construct
  source 1..50: mol_type = other DNA
caaccacaaccacaacaacaaataaaaaacaaaaaactcaaaaaaaacca

SEQ ID NO: 46504 - DNA, 50 bp, synthetic construct
  source 1..50: mol_type = other DNA
caaccgcaaccgcaacaacaaataaaaaacgaaaaactcaaaaaaaaccg

SEQ ID NO: 46505 - DNA, 50 bp, synthetic construct
  source 1..50: mol_type = other DNA
aaacaaaacaatccaaaataaacacaaaaaaacctaaaaatccaaaaaca

SEQ ID NO: 46506 - DNA, 50 bp, synthetic construct
  source 1..50: mol_type = other DNA
aaacgaaacgatccgaaataaacacgaaaaaacctaaaaatccgaaaacg

SEQ ID NO: 46507 - DNA, 50 bp, synthetic construct
  source 1..50: mol_type = other DNA
atccaaaataaacacaaaaaaacctaaaaatccaaaaacactaacatcca

SEQ ID NO: 46508 - DNA, 50 bp, synthetic construct
  source 1..50: mol_type = other DNA
atccgaaataaacacgaaaaaacctaaaaatccgaaaacgctaacgtccg

SEQ ID NO: 46509 - DNA, 50 bp, synthetic construct
  source 1..50: mol_type = other DNA
caaaataaacacaaaaaaacctaaaaatccaaaaacactaacatccacca

SEQ ID NO: 46510 - DNA, 50 bp, synthetic construct
  source 1..50: mol_type = other DNA
cgaaataaacacgaaaaaacctaaaaatccgaaaacgctaacgtccgccg

SEQ ID NO: 46511 - DNA, 50 bp, synthetic construct
  source 1..50: mol_type = other DNA
acataattcaaaactaaacacataaaaaaataaaacacaccactacacca

SEQ ID NO: 46512 - DNA, 50 bp, synthetic construct
  source 1..50: mol_type = other DNA
acgtaattcgaaactaaacacgtaaaaaaataaaacgcgccgctacaccg

SEQ ID NO: 46513 - DNA, 50 bp, synthetic construct
  source 1..50: mol_type = other DNA
aaaaaataaaacacaccactacaccacaaaaccccaaaataaaaaatcca

SEQ ID NO: 46514 - DNA, 50 bp, synthetic construct
  source 1..50: mol_type = other DNA
aaaaaataaaacgcgccgctacaccgcaaaaccccaaaataaaaaatccg

SEQ ID NO: 46515 - DNA, 50 bp, synthetic construct
  source 1..50: mol_type = other DNA
aaaaacaccaacccccaaaaactaaaaactaaaacaaccctaaaaacaca

SEQ ID NO: 46516 - DNA, 50 bp, synthetic construct
  source 1..50: mol_type = other DNA
aaaaacgccgacccccaaaaactaaaaactaaaacgaccctaaaaacgcg

SEQ ID NO: 46517 - DNA, 50 bp, synthetic construct
  source 1..50: mol_type = other DNA
ccaaaaacaccaacccccaaaaactaaaaactaaaacaaccctaaaaaca

SEQ ID NO: 46518 - DNA, 50 bp, synthetic construct
  source 1..50: mol_type = other DNA
ccaaaaacgccgacccccaaaaactaaaaactaaaacgaccctaaaaacg

SEQ ID NO: 46519 - DNA, 50 bp, synthetic construct
  source 1..50: mol_type = other DNA
ataaaaaaaactccaccatataaaaaacttaacctccaaaatcctacaca

SEQ ID NO: 46520 - DNA, 50 bp, synthetic construct
  source 1..50: mol_type = other DNA
ataaaaaaaactccgccgtataaaaaacttaacctccgaaatcctacgcg

SEQ ID NO: 46521 - DNA, 50 bp, synthetic construct
  source 1..50: mol_type = other DNA
aaaaacacaacaaaaatacacaaaaaaaaccaaaacactcactaaactca

SEQ ID NO: 46522 - DNA, 50 bp, synthetic construct
  source 1..50: mol_type = other DNA
aaaaacgcgacgaaaatacgcgaaaaaaaccaaaacgctcactaaactcg

SEQ ID NO: 46523 - DNA, 50 bp, synthetic construct
  source 1..50: mol_type = other DNA
aaaaccaaaaaaacacaacatataaatcctcaaaactaaaaaaacaaaca

SEQ ID NO: 46524 - DNA, 50 bp, synthetic construct
  source 1..50: mol_type = other DNA
gaaaccaaaaaaacgcaacgtataaatcctcgaaactaaaaaaacaaacg

SEQ ID NO: 46525 - DNA, 50 bp, synthetic construct
  source 1..50: mol_type = other DNA
aaccaaaaaaacacaacatataaatcctcaaaactaaaaaaacaaacaca

SEQ ID NO: 46526 - DNA, 50 bp, synthetic construct
  source 1..50: mol_type = other DNA
aaccaaaaaaacgcaacgtataaatcctcgaaactaaaaaaacaaacgcg

SEQ ID NO: 46527 - DNA, 50 bp, synthetic construct
  source 1..50: mol_type = other DNA
caaaatcaaaacatcaaaataaacaaaaaaacctaacctcctaacaacca

SEQ ID NO: 46528 - DNA, 50 bp, synthetic construct
  source 1..50: mol_type = other DNA
caaaatcaaaacgtcaaaataaacgaaaaaacctaacctcctaacaaccg

SEQ ID NO: 46529 - DNA, 50 bp, synthetic construct
  source 1..50: mol_type = other DNA
aaaaaacaacaaaaaataacttacccaaaatcaaaacatcaaaataaaca

SEQ ID NO: 46530 - DNA, 50 bp, synthetic construct
  source 1..50: mol_type = other DNA
aaaaaacaacgaaaaataacttacccaaaatcaaaacgtcaaaataaacg

SEQ ID NO: 46531 - DNA, 50 bp, synthetic construct
  source 1..50: mol_type = other DNA
aaacataacctcaactactaaaaaaccaaactttcccatctactctaaca

SEQ ID NO: 46532 - DNA, 50 bp, synthetic construct
  source 1..50: mol_type = other DNA
aaacgtaacctcgactactaaaaaaccaaactttcccgtctactctaacg

SEQ ID NO: 46533 - DNA, 50 bp, synthetic construct
  source 1..50: mol_type = other DNA
cataaaaaacctaaaacaatataaaaaacctaacactaataaaaaacaca

SEQ ID NO: 46534 - DNA, 50 bp, synthetic construct
  source 1..50: mol_type = other DNA
cataaaaaacctaaaacgatataaaaaacctaacgctaataaaaaacacg

SEQ ID NO: 46535 - DNA, 50 bp, synthetic construct
  source 1..50: mol_type = other DNA
aaaaaacctaaaacaatataaaaaacctaacactaataaaaaacacaaca

SEQ ID NO: 46536 - DNA, 50 bp, synthetic construct
  source 1..50: mol_type = other DNA
aaaaaacctaaaacgatataaaaaacctaacgctaataaaaaacacgacg

SEQ ID NO: 46537 - DNA, 50 bp, synthetic construct
  source 1..50: mol_type = other DNA
ccaacataataaaaccccatctctattaaaaacacaaaaattactaaaca

SEQ ID NO: 46538 - DNA, 50 bp, synthetic construct
  source 1..50: mol_type = other DNA
ccaacataataaaaccccgtctctattaaaaacacaaaaattactaaacg

SEQ ID NO: 46539 - DNA, 50 bp, synthetic construct
  source 1..50: mol_type = other DNA
ataaaaccccatctctattaaaaacacaaaaattactaaacataataaca

SEQ ID NO: 46540 - DNA, 50 bp, synthetic construct
  source 1..50: mol_type = other DNA
ataaaaccccgtctctattaaaaacacaaaaattactaaacgtaataacg

SEQ ID NO: 46541 - DNA, 50 bp, synthetic construct
  source 1..50: mol_type = other DNA
ctttctttcttattttcttttttaaaacaaaatctcactctatcacccca

SEQ ID NO: 46542 - DNA, 50 bp, synthetic construct
  source 1..50: mol_type = other DNA
ctttctttcttattttcttttttaaaacgaaatctcactctatcaccccg

SEQ ID NO: 46543 - DNA, 50 bp, synthetic construct
  source 1..50: mol_type = other DNA
actaaaatcacactactacaccccaaccaaaataacaaaataaaactcca

SEQ ID NO: 46544 - DNA, 50 bp, synthetic construct
  source 1..50: mol_type = other DNA
actaaaatcgcgctactacaccccaaccgaaataacaaaataaaactccg

SEQ ID NO: 46545 - DNA, 50 bp, synthetic construct
  source 1..50: mol_type = other DNA
ctaaactacaaaacaaatattacataacacacaatcctcaaaaaaatcca

SEQ ID NO: 46546 - DNA, 50 bp, synthetic construct
  source 1..50: mol_type = other DNA
ctaaactacaaaacgaatattacataacacgcgatcctcgaaaaaatccg

SEQ ID NO: 46547 - DNA, 50 bp, synthetic construct
  source 1..50: mol_type = other DNA
ttacctaaaaatcaaaaaaaataatttctcccaaacccctccaaaaacca

SEQ ID NO: 46548 - DNA, 50 bp, synthetic construct
  source 1..50: mol_type = other DNA
ttacctaaaaatcgaaaaaaataatttctcccgaacccctccgaaaaccg

SEQ ID NO: 46549 - DNA, 50 bp, synthetic construct
  source 1..50: mol_type = other DNA
ttaaaaacacaaacaaatacacttctcccaaacacctaaactacaaaaca

SEQ ID NO: 46550 - DNA, 50 bp, synthetic construct
  source 1..50: mol_type = other DNA
ttaaaaacacgaacgaatacgcttctcccaaacgcctaaactacaaaacg

SEQ ID NO: 46551 - DNA, 50 bp, synthetic construct
  source 1..50: mol_type = other DNA
aaaacacaaaaccaacaacatccaacaatttaaaaacacaaacaaataca

SEQ ID NO: 46552 - DNA, 50 bp, synthetic construct
  source 1..50: mol_type = other DNA
aaaacgcgaaaccgacgacgtccaacaatttaaaaacacgaacgaatacg

SEQ ID NO: 46553 - DNA, 50 bp, synthetic construct
  source 1..50: mol_type = other DNA
aacaattctaaaaaacccattttaaccacaaaaacacaaaaccaacaaca

SEQ ID NO: 46554 - DNA, 50 bp, synthetic construct
  source 1..50: mol_type = other DNA
aacaattctaaaaaacccgttttaaccacgaaaacgcgaaaccgacgacg

SEQ ID NO: 46555 - DNA, 50 bp, synthetic construct
  source 1..50: mol_type = other DNA
aaaaacaattctaaaaaacccattttaaccacaaaaacacaaaaccaaca

SEQ ID NO: 46556 - DNA, 50 bp, synthetic construct
  source 1..50: mol_type = other DNA
aaaaacaattctaaaaaacccgttttaaccacgaaaacgcgaaaccgacg

SEQ ID NO: 46557 - DNA, 50 bp, synthetic construct
  source 1..50: mol_type = other DNA
atcaaaaacaattctaaaaaacccattttaaccacaaaaacacaaaacca

SEQ ID NO: 46558 - DNA, 50 bp, synthetic construct
  source 1..50: mol_type = other DNA
atcaaaaacaattctaaaaaacccgttttaaccacgaaaacgcgaaaccg

SEQ ID NO: 46559 - DNA, 50 bp, synthetic construct
  source 1..50: mol_type = other DNA
accaaaatcaaaaacaattctaaaaaacccattttaaccacaaaaacaca

SEQ ID NO: 46560 - DNA, 50 bp, synthetic construct
  source 1..50: mol_type = other DNA
accgaaatcaaaaacaattctaaaaaacccgttttaaccacgaaaacgcg

SEQ ID NO: 46561 - DNA, 50 bp, synthetic construct
  source 1..50: mol_type = other DNA
tctccaaaaccaaaatcaaaaacaattctaaaaaacccattttaaccaca

SEQ ID NO: 46562 - DNA, 50 bp, synthetic construct
  source 1..50: mol_type = other DNA
tctccgaaaccgaaatcaaaaacaattctaaaaaacccgttttaaccacg

SEQ ID NO: 46563 - DNA, 50 bp, synthetic construct
  source 1..50: mol_type = other DNA
aaaacaacaacaacaataacaacaccaaaaaaccaaaaatccaacaacca

SEQ ID NO: 46564 - DNA, 50 bp, synthetic construct
  source 1..50: mol_type = other DNA
gaaacaacaacaacaataacaacgccgaaaaaccgaaaatccgacaaccg

SEQ ID NO: 46565 - DNA, 50 bp, synthetic construct
  source 1..50: mol_type = other DNA
aacaaaaacaaatacaactaacaaaacaacaaatcccaaaacaacactca

SEQ ID NO: 46566 - DNA, 50 bp, synthetic construct
  source 1..50: mol_type = other DNA
aacgaaaacgaatacgactaacgaaacgacaaatcccaaaacaacgctcg

SEQ ID NO: 46567 - DNA, 50 bp, synthetic construct
  source 1..50: mol_type = other DNA
aaccctcaaaaaccaaaacaaaaacaaaaacaaatacaactaacaaaaca

SEQ ID NO: 46568 - DNA, 50 bp, synthetic construct
  source 1..50: mol_type = other DNA
aaccctcgaaaaccaaaacaaaaacgaaaacgaatacgactaacgaaacg

SEQ ID NO: 46569 - DNA, 50 bp, synthetic construct
  source 1..50: mol_type = other DNA
aaaaaaaccaaaaaaaccaaaaacaaaacaactaaaaacaaccaacacca

SEQ ID NO: 46570 - DNA, 50 bp, synthetic construct
  source 1..50: mol_type = other DNA
aaaaaaaccaaaaaaaccgaaaacgaaacaactaaaaacgaccaacgccg

SEQ ID NO: 46571 - DNA, 50 bp, synthetic construct
  source 1..50: mol_type = other DNA
aaaattcaacaaaataacaaaactaaaaccccaacaaacaccaaaaacca

SEQ ID NO: 46572 - DNA, 50 bp, synthetic construct
  source 1..50: mol_type = other DNA
aaaattcgacgaaataacgaaactaaaaccccaacgaacgccgaaaaccg

SEQ ID NO: 46573 - DNA, 50 bp, synthetic construct
  source 1..50: mol_type = other DNA
tacaacaaaaattcaacaaaataacaaaactaaaaccccaacaaacacca

SEQ ID NO: 46574 - DNA, 50 bp, synthetic construct
  source 1..50: mol_type = other DNA
tacaacaaaaattcgacgaaataacgaaactaaaaccccaacgaacgccg

SEQ ID NO: 46575 - DNA, 50 bp, synthetic construct
  source 1..50: mol_type = other DNA
aaacattttctaaaaaaacaaaactacaacaaaaattcaacaaaataaca

SEQ ID NO: 46576 - DNA, 50 bp, synthetic construct
  source 1..50: mol_type = other DNA
aaacattttctaaaaaaacaaaactacaacaaaaattcgacgaaataacg

SEQ ID NO: 46577 - DNA, 50 bp, synthetic construct
  source 1..50: mol_type = other DNA
ctaaaataaaacattttctaaaaaaacaaaactacaacaaaaattcaaca

SEQ ID NO: 46578 - DNA, 50 bp, synthetic construct
  source 1..50: mol_type = other DNA
ctaaaataaaacattttctaaaaaaacaaaactacaacaaaaattcgacg

SEQ ID NO: 46579 - DNA, 50 bp, synthetic construct
  source 1..50: mol_type = other DNA
ccctataatctcaacaccacctaaacatcaaacaaatatctaaaaaaaca

SEQ ID NO: 46580 - DNA, 50 bp, synthetic construct
  source 1..50: mol_type = other DNA
ccctataatctcaacgccacctaaacgtcaaacaaatatctaaaaaaacg

SEQ ID NO: 46581 - DNA, 50 bp, synthetic construct
  source 1..50: mol_type = other DNA
cctaccctaataccccaaaaatttcccaaaaattttaaaaataacaccca

SEQ ID NO: 46582 - DNA, 50 bp, synthetic construct
  source 1..50: mol_type = other DNA
cctaccctaataccccgaaaatttcccgaaaattttaaaaataacacccg

SEQ ID NO: 46583 - DNA, 50 bp, synthetic construct
  source 1..50: mol_type = other DNA
aaaatcatttctaaaaatttcatttaaaatccccaaaattaaaattaaca

SEQ ID NO: 46584 - DNA, 50 bp, synthetic construct
  source 1..50: mol_type = other DNA
aaaatcatttctaaaaatttcgtttaaaatccccgaaattaaaattaacg

SEQ ID NO: 46585 - DNA, 50 bp, synthetic construct
  source 1..50: mol_type = other DNA
cccataataaaaaatataaccaaataaactcactaacccatatcccccca

SEQ ID NO: 46586 - DNA, 50 bp, synthetic construct
  source 1..50: mol_type = other DNA
cccataataaaaaatataaccgaataaactcgctaacccatatccccccg

SEQ ID NO: 46587 - DNA, 50 bp, synthetic construct
  source 1..50: mol_type = other DNA
cacaacttatttacacaaaaatcactaccaatatttactctacaacccca

SEQ ID NO: 46588 - DNA, 50 bp, synthetic construct
  source 1..50: mol_type = other DNA
cacgacttatttacgcaaaaatcactaccgatatttactctacaaccccg

SEQ ID NO: 46589 - DNA, 50 bp, synthetic construct
  source 1..50: mol_type = other DNA
gatatttgttattattgataggaaatggaggtaagtatgagattgtttat

SEQ ID NO: 46590 - DNA, 50 bp, synthetic construct
  source 1..50: mol_type = other DNA
gatatttgttattattgataggaaatggaggtaagtatgagattgtttac

SEQ ID NO: 46591 - DNA, 50 bp, synthetic construct
  source 1..50: mol_type = other DNA
ctaaacctcctaatcaaaacttttacacccccaccaatactttaatcaca

SEQ ID NO: 46592 - DNA, 50 bp, synthetic construct
  source 1..50: mol_type = other DNA
ctaaacctcctaatcaaaacttttacacccccaccgatactttaatcacg

SEQ ID NO: 46593 - DNA, 50 bp, synthetic construct
  source 1..50: mol_type = other DNA
aaatatcaccctaacacacattttcaaaattccacaaaacttaaaaaaca

SEQ ID NO: 46594 - DNA, 50 bp, synthetic construct
  source 1..50: mol_type = other DNA
aaatatcgccctaacgcacattttcgaaattccacaaaacttaaaaaacg

SEQ ID NO: 46595 - DNA, 50 bp, synthetic construct
  source 1..50: mol_type = other DNA
taaaaacactaccacactccccaaaccttataaaatttcaaaaatataca

SEQ ID NO: 46596 - DNA, 50 bp, synthetic construct
  source 1..50: mol_type = other DNA
taaaaacgctaccgcgctccccaaaccttataaaatttcgaaaatatacg

SEQ ID NO: 46597 - DNA, 50 bp, synthetic construct
  source 1..50: mol_type = other DNA
caccaaaacaacacctcttaataataaaaaaacaccaacaaaaaaaaaca

SEQ ID NO: 46598 - DNA, 50 bp, synthetic construct
  source 1..50: mol_type = other DNA
cgccaaaacgacacctcttaataataaaaaaacgccgacgaaaaaaaacg

SEQ ID NO: 46599 - DNA, 50 bp, synthetic construct
  source 1..50: mol_type = other DNA
taataataaaaaaacaccaacaaaaaaaaacatacaatacaatcctccca

SEQ ID NO: 46600 - DNA, 50 bp, synthetic construct
  source 1..50: mol_type = other DNA
taataataaaaaaacgccgacgaaaaaaaacgtacaatacgatcctcccg

SEQ ID NO: 46601 - DNA, 50 bp, synthetic construct
  source 1..50: mol_type = other DNA
ataataaaaaaacaccaacaaaaaaaaacatacaatacaatcctcccaca

SEQ ID NO: 46602 - DNA, 50 bp, synthetic construct
  source 1..50: mol_type = other DNA
ataataaaaaaacgccgacgaaaaaaaacgtacaatacgatcctcccgcg

SEQ ID NO: 46603 - DNA, 50 bp, synthetic construct
  source 1..50: mol_type = other DNA
aaaacatacaatacaatcctcccacaaacaaaaaacaatacaacaaaaca

SEQ ID NO: 46604 - DNA, 50 bp, synthetic construct
  source 1..50: mol_type = other DNA
aaaacgtacaatacgatcctcccgcgaacaaaaaacaatacgacaaaacg

SEQ ID NO: 46605 - DNA, 50 bp, synthetic construct
  source 1..50: mol_type = other DNA
atcaaaaccaaaatcaccaaaaacaacaacaaacaaaaaataccaaacca

SEQ ID NO: 46606 - DNA, 50 bp, synthetic construct
  source 1..50: mol_type = other DNA
atcaaaaccaaaatcaccaaaaacgacgacgaacgaaaaataccgaaccg

SEQ ID NO: 46607 - DNA, 50 bp, synthetic construct
  source 1..50: mol_type = other DNA
acactacaaactactcaattctaataaccaaacaatttcatcaaaataca

SEQ ID NO: 46608 - DNA, 50 bp, synthetic construct
  source 1..50: mol_type = other DNA
acgctacgaactactcgattctaataaccaaacaatttcgtcaaaatacg

SEQ ID NO: 46609 - DNA, 50 bp, synthetic construct
  source 1..50: mol_type = other DNA
atacaccacatcctaacaaaattatctaatcaccaaaaccaaataaccca

SEQ ID NO: 46610 - DNA, 50 bp, synthetic construct
  source 1..50: mol_type = other DNA
gtacaccgcatcctaacgaaattatctaatcaccaaaaccgaataacccg

SEQ ID NO: 46611 - DNA, 50 bp, synthetic construct
  source 1..50: mol_type = other DNA
ccacatcctaacaaaattatctaatcaccaaaaccaaataacccataaca

SEQ ID NO: 46612 - DNA, 50 bp, synthetic construct
  source 1..50: mol_type = other DNA
ccgcatcctaacgaaattatctaatcaccaaaaccgaataacccgtaacg

SEQ ID NO: 46613 - DNA, 50 bp, synthetic construct
  source 1..50: mol_type = other DNA
aaaactcaaaaccaattcctcccaaaatctcaaaactaaaaatacaaaca

SEQ ID NO: 46614 - DNA, 50 bp, synthetic construct
  source 1..50: mol_type = other DNA
aaaactcgaaaccgattcctcccgaaatctcaaaactaaaaatacaaacg

SEQ ID NO: 46615 - DNA, 50 bp, synthetic construct
  source 1..50: mol_type = other DNA
aaacaaaactcaaaaactacctaaaatcaaacataaacactaaaacacca

SEQ ID NO: 46616 - DNA, 50 bp, synthetic construct
  source 1..50: mol_type = other DNA
aaacgaaactcaaaaactacctaaaatcgaacgtaaacgctaaaacaccg

SEQ ID NO: 46617 - DNA, 50 bp, synthetic construct
  source 1..50: mol_type = other DNA
ctcaaaacaaaaaacaaaactcaaaaactacctaaaatcaaacataaaca

SEQ ID NO: 46618 - DNA, 50 bp, synthetic construct
  source 1..50: mol_type = other DNA
ctcgaaacaaaaaacgaaactcaaaaactacctaaaatcgaacgtaaacg

SEQ ID NO: 46619 - DNA, 50 bp, synthetic construct
  source 1..50: mol_type = other DNA
cacattctcaaaacaaaaaacaaaactcaaaaactacctaaaatcaaaca

SEQ ID NO: 46620 - DNA, 50 bp, synthetic construct
  source 1..50: mol_type = other DNA
cacattctcgaaacaaaaaacgaaactcaaaaactacctaaaatcgaacg

SEQ ID NO: 46621 - DNA, 50 bp, synthetic construct
  source 1..50: mol_type = other DNA
attacacattctcaaaacaaaaaacaaaactcaaaaactacctaaaatca

SEQ ID NO: 46622 - DNA, 50 bp, synthetic construct
  source 1..50: mol_type = other DNA
attacacattctcgaaacaaaaaacgaaactcaaaaactacctaaaatcg

SEQ ID NO: 46623 - DNA, 50 bp, synthetic construct
  source 1..50: mol_type = other DNA
catcacactacatttaaaattcaaacaacaacatatatccctttaatcca

SEQ ID NO: 46624 - DNA, 50 bp, synthetic construct
  source 1..50: mol_type = other DNA
catcacgctacatttaaaattcgaacaacaacgtatatccctttaatccg

SEQ ID NO: 46625 - DNA, 50 bp, synthetic construct
  source 1..50: mol_type = other DNA
tacttcaaatcttttctccaaatctaaaaaccaaaaaaaccatacccaca

SEQ ID NO: 46626 - DNA, 50 bp, synthetic construct
  source 1..50: mol_type = other DNA
tacttcgaatcttttctccaaatctaaaaaccaaaaaaaccgtacccacg

SEQ ID NO: 46627 - DNA, 50 bp, synthetic construct
  source 1..50: mol_type = other DNA
aatcttttctccaaatctaaaaaccaaaaaaaccatacccacaatcccca

SEQ ID NO: 46628 - DNA, 50 bp, synthetic construct
  source 1..50: mol_type = other DNA
aatcttttctccaaatctaaaaaccaaaaaaaccgtacccacgatccccg

SEQ ID NO: 46629 - DNA, 50 bp, synthetic construct
  source 1..50: mol_type = other DNA
acaaaaaaaattaaatttactaaaccatccaaaattaaacaacaaactca

SEQ ID NO: 46630 - DNA, 50 bp, synthetic construct
  source 1..50: mol_type = other DNA
acgaaaaaaattaaatttactaaaccatccgaaattaaacaacgaactcg

SEQ ID NO: 46631 - DNA, 50 bp, synthetic construct
  source 1..50: mol_type = other DNA
caatattcttttttttttctacacaaaattcaaacaaactcaaaataaca

SEQ ID NO: 46632 - DNA, 50 bp, synthetic construct
  source 1..50: mol_type = other DNA
caatattcttttttttttctacacaaaattcaaacgaactcaaaataacg

SEQ ID NO: 46633 - DNA, 50 bp, synthetic construct
  source 1..50: mol_type = other DNA
aaaattccctcaaatctcatccttcaaaaaaaataactcaaaacaaccca

SEQ ID NO: 46634 - DNA, 50 bp, synthetic construct
  source 1..50: mol_type = other DNA
aaaattccctcaaatctcgtccttcgaaaaaaataactcgaaacaacccg

SEQ ID NO: 46635 - DNA, 50 bp, synthetic construct
  source 1..50: mol_type = other DNA
aacaatacaaatctaaaaaaacacacaaatccaaaacacaacacaaaaca

SEQ ID NO: 46636 - DNA, 50 bp, synthetic construct
  source 1..50: mol_type = other DNA
aacaatacgaatctaaaaaaacacgcgaatccgaaacgcaacgcaaaacg

SEQ ID NO: 46637 - DNA, 50 bp, synthetic construct
  source 1..50: mol_type = other DNA
caaaaaaaacaatacaaatctaaaaaaacacacaaatccaaaacacaaca

SEQ ID NO: 46638 - DNA, 50 bp, synthetic construct
  source 1..50: mol_type = other DNA
cgaaaaaaacaatacgaatctaaaaaaacacgcgaatccgaaacgcaacg

SEQ ID NO: 46639 - DNA, 50 bp, synthetic construct
  source 1..50: mol_type = other DNA
aaaaccaaaaaaaacaatacaaatctaaaaaaacacacaaatccaaaaca

SEQ ID NO: 46640 - DNA, 50 bp, synthetic construct
  source 1..50: mol_type = other DNA
aaaaccgaaaaaaacaatacgaatctaaaaaaacacgcgaatccgaaacg

SEQ ID NO: 46641 - DNA, 50 bp, synthetic construct
  source 1..50: mol_type = other DNA
cacacaaaaccaaaaaaaacaatacaaatctaaaaaaacacacaaatcca

SEQ ID NO: 46642 - DNA, 50 bp, synthetic construct
  source 1..50: mol_type = other DNA
cacgcaaaaccgaaaaaaacaatacgaatctaaaaaaacacgcgaatccg

SEQ ID NO: 46643 - DNA, 50 bp, synthetic construct
  source 1..50: mol_type = other DNA
caacccaaaactaaaacacaacaaaaaacaaaaattcactacaaatacca

SEQ ID NO: 46644 - DNA, 50 bp, synthetic construct
  source 1..50: mol_type = other DNA
cgacccgaaactaaaacgcaacgaaaaacgaaaattcgctacaaataccg

SEQ ID NO: 46645 - DNA, 50 bp, synthetic construct
  source 1..50: mol_type = other DNA
cccaaaaaacaacaaaacccaaaatcctaaaaacaaaattaataaactca

SEQ ID NO: 46646 - DNA, 50 bp, synthetic construct
  source 1..50: mol_type = other DNA
cccgaaaaacgacgaaacccgaaatcctaaaaacgaaattaataaactcg

SEQ ID NO: 46647 - DNA, 50 bp, synthetic construct
  source 1..50: mol_type = other DNA
acaacaaaacccaaaatcctaaaaacaaaattaataaactcaaaaacaca

SEQ ID NO: 46648 - DNA, 50 bp, synthetic construct
  source 1..50: mol_type = other DNA
acgacgaaacccgaaatcctaaaaacgaaattaataaactcgaaaacacg

SEQ ID NO: 46649 - DNA, 50 bp, synthetic construct
  source 1..50: mol_type = other DNA
atcataaaaacaaaaacaaatccctatactaaaaacaataaaacaaaaca

SEQ ID NO: 46650 - DNA, 50 bp, synthetic construct
  source 1..50: mol_type = other DNA
gtcgtaaaaacaaaaacaaatccctatactaaaaacgataaaacaaaacg

SEQ ID NO: 46651 - DNA, 50 bp, synthetic construct
  source 1..50: mol_type = other DNA
acaaaaaatattttccaaaaaaacctaaaaacaactataaataataccca

SEQ ID NO: 46652 - DNA, 50 bp, synthetic construct
  source 1..50: mol_type = other DNA
acaaaaaatattttccgaaaaaacctaaaaacgactataaataatacccg

SEQ ID NO: 46653 - DNA, 50 bp, synthetic construct
  source 1..50: mol_type = other DNA
aataaacccaacaaatatttttacacatcccaacattaaatataactaca

SEQ ID NO: 46654 - DNA, 50 bp, synthetic construct
  source 1..50: mol_type = other DNA
aataaacccgacaaatatttttacgcgtcccgacgttaaatataactacg

SEQ ID NO: 46655 - DNA, 50 bp, synthetic construct
  source 1..50: mol_type = other DNA
aaacccaacaaatatttttacacatcccaacattaaatataactacaaca

SEQ ID NO: 46656 - DNA, 50 bp, synthetic construct
  source 1..50: mol_type = other DNA
aaacccgacaaatatttttacgcgtcccgacgttaaatataactacgacg

SEQ ID NO: 46657 - DNA, 50 bp, synthetic construct
  source 1..50: mol_type = other DNA
ccacaaaatccaaatacctaaatccctcctaatctatttcctcatctaca

SEQ ID NO: 46658 - DNA, 50 bp, synthetic construct
  source 1..50: mol_type = other DNA
ccgcaaaatccaaatacctaaatccctcctaatctatttcctcatctacg

SEQ ID NO: 46659 - DNA, 50 bp, synthetic construct
  source 1..50: mol_type = other DNA
aaaaacaaactaaaaaaaatttaaacatctaaactctacaaaacaaccca

SEQ ID NO: 46660 - DNA, 50 bp, synthetic construct
  source 1..50: mol_type = other DNA
aaaaacaaactaaaaaaaatttaaacatctaaactctacgaaacgacccg

SEQ ID NO: 46661 - DNA, 50 bp, synthetic construct
  source 1..50: mol_type = other DNA
aaacacacaacccatttccctataaattaaaaacacaaaaaaaataaaca

SEQ ID NO: 46662 - DNA, 50 bp, synthetic construct
  source 1..50: mol_type = other DNA
gaacgcgcaacccgtttccctataaattaaaaacgcgaaaaaaataaacg

SEQ ID NO: 46663 - DNA, 50 bp, synthetic construct
  source 1..50: mol_type = other DNA
atatcccacactaaaaactaaaaacaatccccaaatactcactaacaaca

SEQ ID NO: 46664 - DNA, 50 bp, synthetic construct
  source 1..50: mol_type = other DNA
atatcccacactaaaaactaaaaacgatccccgaatactcactaacgacg

SEQ ID NO: 46665 - DNA, 50 bp, synthetic construct
  source 1..50: mol_type = other DNA
tctatatcccacactaaaaactaaaaacaatccccaaatactcactaaca

SEQ ID NO: 46666 - DNA, 50 bp, synthetic construct
  source 1..50: mol_type = other DNA
tctatatcccacactaaaaactaaaaacgatccccgaatactcactaacg

SEQ ID NO: 46667 - DNA, 50 bp, synthetic construct
  source 1..50: mol_type = other DNA
atttcctaacatctcatcaacaactaacatcactatccaaaacctaccca

SEQ ID NO: 46668 - DNA, 50 bp, synthetic construct
  source 1..50: mol_type = other DNA
atttcctaacatctcgtcaacaactaacatcgctatccaaaacctacccg

SEQ ID NO: 46669 - DNA, 50 bp, synthetic construct
  source 1..50: mol_type = other DNA
taaactttcacaaaccaaacacttttcctatctatcaataacacattcca

SEQ ID NO: 46670 - DNA, 50 bp, synthetic construct
  source 1..50: mol_type = other DNA
taaactttcgcaaaccgaacacttttcctatctatcaataacgcgttccg

SEQ ID NO: 46671 - DNA, 50 bp, synthetic construct
  source 1..50: mol_type = other DNA
caaaccatcaacaaaactatcacaaaaacaaaaactctaaaaaaacaaca

SEQ ID NO: 46672 - DNA, 50 bp, synthetic construct
  source 1..50: mol_type = other DNA
caaaccgtcaacaaaactatcgcgaaaacaaaaactctaaaaaaacgacg

SEQ ID NO: 46673 - DNA, 50 bp, synthetic construct
  source 1..50: mol_type = other DNA
aaccatcaacaaaactatcacaaaaacaaaaactctaaaaaaacaacaca

SEQ ID NO: 46674 - DNA, 50 bp, synthetic construct
  source 1..50: mol_type = other DNA
aaccgtcaacaaaactatcgcgaaaacaaaaactctaaaaaaacgacgcg

SEQ ID NO: 46675 - DNA, 50 bp, synthetic construct
  source 1..50: mol_type = other DNA
aacaaaactatcacaaaaacaaaaactctaaaaaaacaacacaaaaaaca

SEQ ID NO: 46676 - DNA, 50 bp, synthetic construct
  source 1..50: mol_type = other DNA
aacaaaactatcgcgaaaacaaaaactctaaaaaaacgacgcgaaaaacg

SEQ ID NO: 46677 - DNA, 50 bp, synthetic construct
  source 1..50: mol_type = other DNA
tatcacaaaaacaaaaactctaaaaaaacaacacaaaaaacaaaatacca

SEQ ID NO: 46678 - DNA, 50 bp, synthetic construct
  source 1..50: mol_type = other DNA
tatcgcgaaaacaaaaactctaaaaaaacgacgcgaaaaacgaaataccg

SEQ ID NO: 46679 - DNA, 50 bp, synthetic construct
  source 1..50: mol_type = other DNA
ctctaaaaaaacaacacaaaaaacaaaataccaaaataaaaatcaaaaca

SEQ ID NO: 46680 - DNA, 50 bp, synthetic construct
  source 1..50: mol_type = other DNA
ctctaaaaaaacgacgcgaaaaacgaaataccgaaataaaaatcgaaacg

SEQ ID NO: 46681 - DNA, 50 bp, synthetic construct
  source 1..50: mol_type = other DNA
ccctccctataaaacatacaaaacataaacaacatataacaacctctaca

SEQ ID NO: 46682 - DNA, 50 bp, synthetic construct
  source 1..50: mol_type = other DNA
ccctccctataaaacatacgaaacgtaaacgacgtataacaacctctacg

SEQ ID NO: 46683 - DNA, 50 bp, synthetic construct
  source 1..50: mol_type = other DNA
aacatacaaaacataaacaacatataacaacctctacacaaacttttcca

SEQ ID NO: 46684 - DNA, 50 bp, synthetic construct
  source 1..50: mol_type = other DNA
aacatacgaaacgtaaacgacgtataacaacctctacgcaaacttttccg

SEQ ID NO: 46685 - DNA, 50 bp, synthetic construct
  source 1..50: mol_type = other DNA
cctcaatacaaaaacactacaccaccttacaaaaaaatacacacttaaca

SEQ ID NO: 46686 - DNA, 50 bp, synthetic construct
  source 1..50: mol_type = other DNA
cctcaatacgaaaacgctacgccgccttacaaaaaaatacacacttaacg

SEQ ID NO: 46687 - DNA, 50 bp, synthetic construct
  source 1..50: mol_type = other DNA
aacaaatataacttttacaaacaaaacctcaatacaaaaacactacacca

SEQ ID NO: 46688 - DNA, 50 bp, synthetic construct
  source 1..50: mol_type = other DNA
aacgaatataacttttacaaacgaaacctcaatacgaaaacgctacgccg

SEQ ID NO: 46689 - DNA, 50 bp, synthetic construct
  source 1..50: mol_type = other DNA
caaaacaaatataacttttacaaacaaaacctcaatacaaaaacactaca

SEQ ID NO: 46690 - DNA, 50 bp, synthetic construct
  source 1..50: mol_type = other DNA
cgaaacgaatataacttttacaaacgaaacctcaatacgaaaacgctacg

SEQ ID NO: 46691 - DNA, 50 bp, synthetic construct
  source 1..50: mol_type = other DNA
aaaaaaatctaaattacttttaataaaaaaccaccacccacaccaaaaca

SEQ ID NO: 46692 - DNA, 50 bp, synthetic construct
  source 1..50: mol_type = other DNA
aaaaaaatctaaattacttttaataaaaaaccgccgcccgcgccgaaacg

SEQ ID NO: 46693 - DNA, 50 bp, synthetic construct
  source 1..50: mol_type = other DNA
aacatacaaaaaaaatctaaattacttttaataaaaaaccaccacccaca

SEQ ID NO: 46694 - DNA, 50 bp, synthetic construct
  source 1..50: mol_type = other DNA
aacgtacgaaaaaaatctaaattacttttaataaaaaaccgccgcccgcg

SEQ ID NO: 46695 - DNA, 50 bp, synthetic construct
  source 1..50: mol_type = other DNA
aaaacatacaaaaaaaatctaaattacttttaataaaaaaccaccaccca

SEQ ID NO: 46696 - DNA, 50 bp, synthetic construct
  source 1..50: mol_type = other DNA
aaaacgtacgaaaaaaatctaaattacttttaataaaaaaccgccgcccg

SEQ ID NO: 46697 - DNA, 50 bp, synthetic construct
  source 1..50: mol_type = other DNA
atcaaaaacatacaaaaaaaatctaaattacttttaataaaaaaccacca

SEQ ID NO: 46698 - DNA, 50 bp, synthetic construct
  source 1..50: mol_type = other DNA
atcaaaaacgtacgaaaaaaatctaaattacttttaataaaaaaccgccg

SEQ ID NO: 46699 - DNA, 50 bp, synthetic construct
  source 1..50: mol_type = other DNA
acaccaactcacaacttataacaatcatacaatcaaatcaaaaacataca

SEQ ID NO: 46700 - DNA, 50 bp, synthetic construct
  source 1..50: mol_type = other DNA
acaccaactcgcgacttataacaatcgtacaatcaaatcaaaaacgtacg

SEQ ID NO: 46701 - DNA, 50 bp, synthetic construct
  source 1..50: mol_type = other DNA
cccaaaaaattcaactacaaaatccacaatctacactaaacaaaactaca

SEQ ID NO: 46702 - DNA, 50 bp, synthetic construct
  source 1..50: mol_type = other DNA
cccaaaaaattcgactacgaaatccacgatctacactaaacaaaactacg

SEQ ID NO: 46703 - DNA, 50 bp, synthetic construct
  source 1..50: mol_type = other DNA
aactacatctctactctcctcccaaccaacacaattaaaataaaaaacca

SEQ ID NO: 46704 - DNA, 50 bp, synthetic construct
  source 1..50: mol_type = other DNA
aactacgtctctactctcctcccgaccaacacaattaaaataaaaaaccg

SEQ ID NO: 46705 - DNA, 50 bp, synthetic construct
  source 1..50: mol_type = other DNA
ctactctcctcccaaccaacacaattaaaataaaaaaccaaaattaatca

SEQ ID NO: 46706 - DNA, 50 bp, synthetic construct
  source 1..50: mol_type = other DNA
ctactctcctcccgaccaacacaattaaaataaaaaaccgaaattaatcg

SEQ ID NO: 46707 - DNA, 50 bp, synthetic construct
  source 1..50: mol_type = other DNA
acacaattaaaataaaaaaccaaaattaatcaaaaaaactataccaaaca

SEQ ID NO: 46708 - DNA, 50 bp, synthetic construct
  source 1..50: mol_type = other DNA
acacaattaaaataaaaaaccgaaattaatcgaaaaaactataccaaacg

SEQ ID NO: 46709 - DNA, 50 bp, synthetic construct
  source 1..50: mol_type = other DNA
attaaaataaaaaaccaaaattaatcaaaaaaactataccaaacatccca

SEQ ID NO: 46710 - DNA, 50 bp, synthetic construct
  source 1..50: mol_type = other DNA
attaaaataaaaaaccgaaattaatcgaaaaaactataccaaacgtcccg

SEQ ID NO: 46711 - DNA, 50 bp, synthetic construct
  source 1..50: mol_type = other DNA
aaaccaaaattaatcaaaaaaactataccaaacatcccaaaaaaacaaca

SEQ ID NO: 46712 - DNA, 50 bp, synthetic construct
  source 1..50: mol_type = other DNA
aaaccgaaattaatcgaaaaaactataccaaacgtcccgaaaaaacaacg

SEQ ID NO: 46713 - DNA, 50 bp, synthetic construct
  source 1..50: mol_type = other DNA
catatactacaaaaataacaaaactaaaaatacccaacacaaccaactca

SEQ ID NO: 46714 - DNA, 50 bp, synthetic construct
  source 1..50: mol_type = other DNA
cgtatactacgaaaataacgaaactaaaaatacccgacacgaccgactcg

SEQ ID NO: 46715 - DNA, 50 bp, synthetic construct
  source 1..50: mol_type = other DNA
tatacaaaactcaacatatactacaaaaataacaaaactaaaaataccca

SEQ ID NO: 46716 - DNA, 50 bp, synthetic construct
  source 1..50: mol_type = other DNA
tatacgaaactcgacgtatactacgaaaataacgaaactaaaaatacccg

SEQ ID NO: 46717 - DNA, 50 bp, synthetic construct
  source 1..50: mol_type = other DNA
aaacatactttaaactaaattccaaaccctcacctatacaaaactcaaca

SEQ ID NO: 46718 - DNA, 50 bp, synthetic construct
  source 1..50: mol_type = other DNA
aaacgtactttaaactaaattccgaaccctcgcctatacgaaactcgacg

SEQ ID NO: 46719 - DNA, 50 bp, synthetic construct
  source 1..50: mol_type = other DNA
ctaccaaaaaaaacatactttaaactaaattccaaaccctcacctataca

SEQ ID NO: 46720 - DNA, 50 bp, synthetic construct
  source 1..50: mol_type = other DNA
ctaccaaaaaaaacgtactttaaactaaattccgaaccctcgcctatacg

SEQ ID NO: 46721 - DNA, 50 bp, synthetic construct
  source 1..50: mol_type = other DNA
cacaaacaaaaatccaaaacttaacccaaaacacatttcccctaacaaca

SEQ ID NO: 46722 - DNA, 50 bp, synthetic construct
  source 1..50: mol_type = other DNA
cacaaacgaaaatccgaaacttaacccaaaacacgtttcccctaacaacg

SEQ ID NO: 46723 - DNA, 50 bp, synthetic construct
  source 1..50: mol_type = other DNA
cacaaaaccaaatacaaaaaatctaaatacccataaaccacaaaccctca

SEQ ID NO: 46724 - DNA, 50 bp, synthetic construct
  source 1..50: mol_type = other DNA
cgcaaaaccgaatacaaaaaatctaaatacccgtaaaccacaaaccctcg

SEQ ID NO: 46725 - DNA, 50 bp, synthetic construct
  source 1..50: mol_type = other DNA
taaaccacaaaccctcattacccaaatataaatacaactacacaaaacca

SEQ ID NO: 46726 - DNA, 50 bp, synthetic construct
  source 1..50: mol_type = other DNA
taaaccacaaaccctcgttacccaaatataaatacaactacgcgaaaccg

SEQ ID NO: 46727 - DNA, 50 bp, synthetic construct
  source 1..50: mol_type = other DNA
cctcattacccaaatataaatacaactacacaaaaccaaattacaaaaca

SEQ ID NO: 46728 - DNA, 50 bp, synthetic construct
  source 1..50: mol_type = other DNA
cctcgttacccaaatataaatacaactacgcgaaaccgaattacaaaacg

SEQ ID NO: 46729 - DNA, 50 bp, synthetic construct
  source 1..50: mol_type = other DNA
acccaaatataaatacaactacacaaaaccaaattacaaaacaaactaca

SEQ ID NO: 46730 - DNA, 50 bp, synthetic construct
  source 1..50: mol_type = other DNA
acccaaatataaatacaactacgcgaaaccgaattacaaaacgaactacg

SEQ ID NO: 46731 - DNA, 50 bp, synthetic construct
  source 1..50: mol_type = other DNA
caaatataaatacaactacacaaaaccaaattacaaaacaaactacacca

SEQ ID NO: 46732 - DNA, 50 bp, synthetic construct
  source 1..50: mol_type = other DNA
caaatataaatacaactacgcgaaaccgaattacaaaacgaactacgccg

SEQ ID NO: 46733 - DNA, 50 bp, synthetic construct
  source 1..50: mol_type = other DNA
aaaccaaattacaaaacaaactacaccaaaccaaaccattatataaaaca

SEQ ID NO: 46734 - DNA, 50 bp, synthetic construct
  source 1..50: mol_type = other DNA
aaaccgaattacaaaacgaactacgccgaaccgaaccattatataaaacg

SEQ ID NO: 46735 - DNA, 50 bp, synthetic construct
  source 1..50: mol_type = other DNA
caaaacaaactacaccaaaccaaaccattatataaaacaactttatacca

SEQ ID NO: 46736 - DNA, 50 bp, synthetic construct
  source 1..50: mol_type = other DNA
caaaacgaactacgccgaaccgaaccattatataaaacgactttataccg

SEQ ID NO: 46737 - DNA, 50 bp, synthetic construct
  source 1..50: mol_type = other DNA
caaaccattatataaaacaactttataccaacacccctctacaaaaaaca

SEQ ID NO: 46738 - DNA, 50 bp, synthetic construct
  source 1..50: mol_type = other DNA
cgaaccattatataaaacgactttataccgacgcccctctacgaaaaacg

SEQ ID NO: 46739 - DNA, 50 bp, synthetic construct
  source 1..50: mol_type = other DNA
acacctatatccccaactttaaaaaaaatcaataaattaataaatacaca

SEQ ID NO: 46740 - DNA, 50 bp, synthetic construct
  source 1..50: mol_type = other DNA
acgcctatatccccgactttaaaaaaaatcgataaattaataaatacacg

SEQ ID NO: 46741 - DNA, 50 bp, synthetic construct
  source 1..50: mol_type = other DNA
tatccccaactttaaaaaaaatcaataaattaataaatacacaattaaca

SEQ ID NO: 46742 - DNA, 50 bp, synthetic construct
  source 1..50: mol_type = other DNA
tatccccgactttaaaaaaaatcgataaattaataaatacacgattaacg

SEQ ID NO: 46743 - DNA, 50 bp, synthetic construct
  source 1..50: mol_type = other DNA
tttaaaaaaaatcaataaattaataaatacacaattaacactactccaca

SEQ ID NO: 46744 - DNA, 50 bp, synthetic construct
  source 1..50: mol_type = other DNA
tttaaaaaaaatcgataaattaataaatacacgattaacgctactccacg

SEQ ID NO: 46745 - DNA, 50 bp, synthetic construct
  source 1..50: mol_type = other DNA
taaaaaaaatcaataaattaataaatacacaattaacactactccacaca

SEQ ID NO: 46746 - DNA, 50 bp, synthetic construct
  source 1..50: mol_type = other DNA
taaaaaaaatcgataaattaataaatacacgattaacgctactccacgcg

SEQ ID NO: 46747 - DNA, 50 bp, synthetic construct
  source 1..50: mol_type = other DNA
aaaatcaataaattaataaatacacaattaacactactccacacacccca

SEQ ID NO: 46748 - DNA, 50 bp, synthetic construct
  source 1..50: mol_type = other DNA
aaaatcgataaattaataaatacacgattaacgctactccacgcgccccg

SEQ ID NO: 46749 - DNA, 50 bp, synthetic construct
  source 1..50: mol_type = other DNA
acaaaacaaaacaaaatactaccaaccaattccaaacaccaaaaaataca

SEQ ID NO: 46750 - DNA, 50 bp, synthetic construct
  source 1..50: mol_type = other DNA
acgaaacgaaacaaaatactaccaaccaattccgaacaccgaaaaatacg

SEQ ID NO: 46751 - DNA, 50 bp, synthetic construct
  source 1..50: mol_type = other DNA
aactaaaataaaactcaaaataaccctctcccaaacaatcactaataaca

SEQ ID NO: 46752 - DNA, 50 bp, synthetic construct
  source 1..50: mol_type = other DNA
aactaaaataaaactcgaaataaccctctcccaaacgatcgctaataacg

SEQ ID NO: 46753 - DNA, 50 bp, synthetic construct
  source 1..50: mol_type = other DNA
cctatccaacccataaaaaccaaaacacattacctaaaaaaacaacatca

SEQ ID NO: 46754 - DNA, 50 bp, synthetic construct
  source 1..50: mol_type = other DNA
cctatccaacccataaaaaccgaaacgcattacctaaaaaaacaacgtcg

SEQ ID NO: 46755 - DNA, 50 bp, synthetic construct
  source 1..50: mol_type = other DNA
ctccctatccaacccataaaaaccaaaacacattacctaaaaaaacaaca

SEQ ID NO: 46756 - DNA, 50 bp, synthetic construct
  source 1..50: mol_type = other DNA
ctccctatccaacccataaaaaccgaaacgcattacctaaaaaaacaacg

SEQ ID NO: 46757 - DNA, 50 bp, synthetic construct
  source 1..50: mol_type = other DNA
aaaacaaataaacaacacaaaaaaacaacactacctctccaaataataca

SEQ ID NO: 46758 - DNA, 50 bp, synthetic construct
  source 1..50: mol_type = other DNA
aaaacgaataaacaacgcaaaaaaacgacgctacctctccaaataatacg

SEQ ID NO: 46759 - DNA, 50 bp, synthetic construct
  source 1..50: mol_type = other DNA
tacctctccaaataatacaccccaactcccataaactaaacaaaaaacca

SEQ ID NO: 46760 - DNA, 50 bp, synthetic construct
  source 1..50: mol_type = other DNA
tacctctccaaataatacgccccgactcccataaactaaacaaaaaaccg

SEQ ID NO: 46761 - DNA, 50 bp, synthetic construct
  source 1..50: mol_type = other DNA
aaataatacaccccaactcccataaactaaacaaaaaaccacctaataca

SEQ ID NO: 46762 - DNA, 50 bp, synthetic construct
  source 1..50: mol_type = other DNA
aaataatacgccccgactcccataaactaaacaaaaaaccgcctaatacg

SEQ ID NO: 46763 - DNA, 50 bp, synthetic construct
  source 1..50: mol_type = other DNA
caaatacaaactctcaaaataacttcaaatcatccaaaaacacctaaaca

SEQ ID NO: 46764 - DNA, 50 bp, synthetic construct
  source 1..50: mol_type = other DNA
caaatacaaactctcgaaataacttcgaatcatccgaaaacgcctaaacg

SEQ ID NO: 46765 - DNA, 50 bp, synthetic construct
  source 1..50: mol_type = other DNA
aatcatccaaaaacacctaaacacaaacaactaacaaacaaaattaccca

SEQ ID NO: 46766 - DNA, 50 bp, synthetic construct
  source 1..50: mol_type = other DNA
aatcatccgaaaacgcctaaacgcaaacgactaacaaacaaaattacccg

SEQ ID NO: 46767 - DNA, 50 bp, synthetic construct
  source 1..50: mol_type = other DNA
attcaaaccaaacaaaactccaaaaaaactaccaaatcccacaaaaacca

SEQ ID NO: 46768 - DNA, 50 bp, synthetic construct
  source 1..50: mol_type = other DNA
attcaaaccgaacaaaactccaaaaaaactaccaaatcccgcgaaaaccg

SEQ ID NO: 46769 - DNA, 50 bp, synthetic construct
  source 1..50: mol_type = other DNA
aactaacaaacaaaattacccaactactacatttcttaaaacaaccccca

SEQ ID NO: 46770 - DNA, 50 bp, synthetic construct
  source 1..50: mol_type = other DNA
gactaacaaacaaaattacccgactactacgtttcttaaaacgacccccg

SEQ ID NO: 46771 - DNA, 50 bp, synthetic construct
  source 1..50: mol_type = other DNA
tcaaaaccctaaaaatcacaaaacactcctctcaaacccataaacattca

SEQ ID NO: 46772 - DNA, 50 bp, synthetic construct
  source 1..50: mol_type = other DNA
tcaaaaccctaaaaatcacgaaacactcctctcaaacccgtaaacattcg

SEQ ID NO: 46773 - DNA, 50 bp, synthetic construct
  source 1..50: mol_type = other DNA
aattataaaaactatactacttcacaacctcccaacaatactccccaaca

SEQ ID NO: 46774 - DNA, 50 bp, synthetic construct
  source 1..50: mol_type = other DNA
aattataaaaactatactacttcacaacctcccgacgatactccccgacg

SEQ ID NO: 46775 - DNA, 50 bp, synthetic construct
  source 1..50: mol_type = other DNA
aactcctacaacttcttccaccccaacaataaaaaaaccataaaaatcca

SEQ ID NO: 46776 - DNA, 50 bp, synthetic construct
  source 1..50: mol_type = other DNA
aactcctacaacttcttccgccccgacaataaaaaaaccataaaaatccg

SEQ ID NO: 46777 - DNA, 50 bp, synthetic construct
  source 1..50: mol_type = other DNA
ccaccccaacaataaaaaaaccataaaaatccaaaaataaaactaaacca

SEQ ID NO: 46778 - DNA, 50 bp, synthetic construct
  source 1..50: mol_type = other DNA
ccgccccgacaataaaaaaaccataaaaatccgaaaataaaactaaaccg

SEQ ID NO: 46779 - DNA, 50 bp, synthetic construct
  source 1..50: mol_type = other DNA
accccaacaataaaaaaaccataaaaatccaaaaataaaactaaaccaca

SEQ ID NO: 46780 - DNA, 50 bp, synthetic construct
  source 1..50: mol_type = other DNA
gccccgacaataaaaaaaccataaaaatccgaaaataaaactaaaccgcg

SEQ ID NO: 46781 - DNA, 50 bp, synthetic construct
  source 1..50: mol_type = other DNA
caacaataaaaaaaccataaaaatccaaaaataaaactaaaccacaaaca

SEQ ID NO: 46782 - DNA, 50 bp, synthetic construct
  source 1..50: mol_type = other DNA
cgacaataaaaaaaccataaaaatccgaaaataaaactaaaccgcgaacg

SEQ ID NO: 46783 - DNA, 50 bp, synthetic construct
  source 1..50: mol_type = other DNA
aaaactaaaccacaaacataaaactaaactataaaaataaaactaaacca

SEQ ID NO: 46784 - DNA, 50 bp, synthetic construct
  source 1..50: mol_type = other DNA
aaaactaaaccgcgaacgtaaaactaaactataaaaataaaactaaaccg

SEQ ID NO: 46785 - DNA, 50 bp, synthetic construct
  source 1..50: mol_type = other DNA
accactaccatcactaaaaaacaaccactcttcaaaaatcaaatcaatca

SEQ ID NO: 46786 - DNA, 50 bp, synthetic construct
  source 1..50: mol_type = other DNA
accactaccgtcactaaaaaacaaccactcttcaaaaatcgaatcaatcg

SEQ ID NO: 46787 - DNA, 50 bp, synthetic construct
  source 1..50: mol_type = other DNA
taaacataccttaaaaccaacaacctcctcccaacacaaaaaacattaca

SEQ ID NO: 46788 - DNA, 50 bp, synthetic construct
  source 1..50: mol_type = other DNA
taaacataccttaaaaccaacaacctcctcccgacacgaaaaacattacg

SEQ ID NO: 46789 - DNA, 50 bp, synthetic construct
  source 1..50: mol_type = other DNA
aacacaaaaaacattacaaatcctcacataaaactcaattaaattcaaca

SEQ ID NO: 46790 - DNA, 50 bp, synthetic construct
  source 1..50: mol_type = other DNA
gacacgaaaaacattacgaatcctcacgtaaaactcgattaaattcaacg

SEQ ID NO: 46791 - DNA, 50 bp, synthetic construct
  source 1..50: mol_type = other DNA
acaaatcctcacataaaactcaattaaattcaacaccaaactatctaaca

SEQ ID NO: 46792 - DNA, 50 bp, synthetic construct
  source 1..50: mol_type = other DNA
acgaatcctcacgtaaaactcgattaaattcaacgccaaactatctaacg

SEQ ID NO: 46793 - DNA, 50 bp, synthetic construct
  source 1..50: mol_type = other DNA
caaaaaaaaaacacacaaaaaactcaatataaaaattatccaacccaaca

SEQ ID NO: 46794 - DNA, 50 bp, synthetic construct
  source 1..50: mol_type = other DNA
caaaaaaaaaacgcacaaaaaactcaatataaaaattatccgacccaacg

SEQ ID NO: 46795 - DNA, 50 bp, synthetic construct
  source 1..50: mol_type = other DNA
attaaaattaactaaacataataatacacacctataatctcaactacaca

SEQ ID NO: 46796 - DNA, 50 bp, synthetic construct
  source 1..50: mol_type = other DNA
attaaaattaactaaacataataatacgcacctataatctcaactacgcg

SEQ ID NO: 46797 - DNA, 50 bp, synthetic construct
  source 1..50: mol_type = other DNA
cccaaaataaacaacaactacacaaccaaacctcaaaatctcctaaaaca

SEQ ID NO: 46798 - DNA, 50 bp, synthetic construct
  source 1..50: mol_type = other DNA
cccaaaataaacaacaactacacgaccaaacctcgaaatctcctaaaacg

SEQ ID NO: 46799 - DNA, 50 bp, synthetic construct
  source 1..50: mol_type = other DNA
taaaaaataacaaataaaaaaacacttcaaaaaacctcaaaacctaacca

SEQ ID NO: 46800 - DNA, 50 bp, synthetic construct
  source 1..50: mol_type = other DNA
taaaaaataacgaataaaaaaacgcttcaaaaaacctcgaaacctaaccg

SEQ ID NO: 46801 - DNA, 50 bp, synthetic construct
  source 1..50: mol_type = other DNA
tcccaaaaaacttaaccttcaaattttaacataaaaaaataaaatatcca

SEQ ID NO: 46802 - DNA, 50 bp, synthetic construct
  source 1..50: mol_type = other DNA
tcccaaaaaacttaaccttcgaattttaacataaaaaaataaaatatccg

SEQ ID NO: 46803 - DNA, 50 bp, synthetic construct
  source 1..50: mol_type = other DNA
ccccatctaaaaaaaattaactaaatataataacacacacctataatcca

SEQ ID NO: 46804 - DNA, 50 bp, synthetic construct
  source 1..50: mol_type = other DNA
ccccatctaaaaaaaattaactaaatataataacacacgcctataatccg

SEQ ID NO: 46805 - DNA, 50 bp, synthetic construct
  source 1..50: mol_type = other DNA
acacacctccttcaccaaatcacaaacaaactatacaaaaaaatctacca

SEQ ID NO: 46806 - DNA, 50 bp, synthetic construct
  source 1..50: mol_type = other DNA
acacacctccttcgccgaatcacaaacaaactatacaaaaaaatctaccg

SEQ ID NO: 46807 - DNA, 50 bp, synthetic construct
  source 1..50: mol_type = other DNA
ttaccataactccaataaatttctctacataacttatctataactcaaca

SEQ ID NO: 46808 - DNA, 50 bp, synthetic construct
  source 1..50: mol_type = other DNA
ttaccgtaactccgataaatttctctacataacttatctataactcgacg

SEQ ID NO: 46809 - DNA, 50 bp, synthetic construct
  source 1..50: mol_type = other DNA
aaaaaaccaaaaaataataaatacaaactcactacaataacaatacccca

SEQ ID NO: 46810 - DNA, 50 bp, synthetic construct
  source 1..50: mol_type = other DNA
aaaaaaccaaaaaataataaatacaaactcgctacgataacaataccccg

SEQ ID NO: 46811 - DNA, 50 bp, synthetic construct
  source 1..50: mol_type = other DNA
ctaaaaacacacaaaactccctctaacttaacaccaacaaaaaatcaaca

SEQ ID NO: 46812 - DNA, 50 bp, synthetic construct
  source 1..50: mol_type = other DNA
ctaaaaacacgcaaaactccctctaacttaacaccgacaaaaaatcgacg

SEQ ID NO: 46813 - DNA, 50 bp, synthetic construct
  source 1..50: mol_type = other DNA
taattcttatcttaatacaaaaacacatctttaaaaaaatataatttcca

SEQ ID NO: 46814 - DNA, 50 bp, synthetic construct
  source 1..50: mol_type = other DNA
taattcttatcttaatacaaaaacacgtctttaaaaaaatataatttccg

SEQ ID NO: 46815 - DNA, 50 bp, synthetic construct
  source 1..50: mol_type = other DNA
gtgagatattatttatgtaatagatgatgtgtgtgatatatttgttaatt

SEQ ID NO: 46816 - DNA, 50 bp, synthetic construct
  source 1..50: mol_type = other DNA
gtgagatattatttatgtaatagatgatgcgtgtgatatatttgttaatc

SEQ ID NO: 46817 - DNA, 50 bp, synthetic construct
  source 1..50: mol_type = other DNA
ctaaaaaaaacaaactaactttccccttttctaattcctcttccacaaca

SEQ ID NO: 46818 - DNA, 50 bp, synthetic construct
  source 1..50: mol_type = other DNA
ctaaaaaaaacaaactaactttccccttttctaattcctcttccacaacg

SEQ ID NO: 46819 - DNA, 50 bp, synthetic construct
  source 1..50: mol_type = other DNA
ttatttccaaaccatccccaataaaaaaacactaaactacaaaaacctca

SEQ ID NO: 46820 - DNA, 50 bp, synthetic construct
  source 1..50: mol_type = other DNA
ttatttccaaaccatccccgataaaaaaacgctaaactacaaaaacctcg

SEQ ID NO: 46821 - DNA, 50 bp, synthetic construct
  source 1..50: mol_type = other DNA
ccaattactaaacacacaaaaatacaaaaactactaaactaacaaacaca

SEQ ID NO: 46822 - DNA, 50 bp, synthetic construct
  source 1..50: mol_type = other DNA
ccaattactaaacgcacaaaaatacaaaaactactaaactaacgaacacg

SEQ ID NO: 46823 - DNA, 50 bp, synthetic construct
  source 1..50: mol_type = other DNA
aaaacctatactactccaccaaaactaaatattttattttcaactccaca

SEQ ID NO: 46824 - DNA, 50 bp, synthetic construct
  source 1..50: mol_type = other DNA
aaaacctatactactccgccaaaactaaatattttattttcaactccgcg

SEQ ID NO: 46825 - DNA, 50 bp, synthetic construct
  source 1..50: mol_type = other DNA
tcataacaaacacatttctaacttcttcctccctccttttttccccaaca

SEQ ID NO: 46826 - DNA, 50 bp, synthetic construct
  source 1..50: mol_type = other DNA
tcataacaaacacatttctaacttcttcctccctccttttttccccaacg

SEQ ID NO: 46827 - DNA, 50 bp, synthetic construct
  source 1..50: mol_type = other DNA
aataagtatagaaagtaaagtagaaaatttgatttgatgtaagagaaatt

SEQ ID NO: 46828 - DNA, 50 bp, synthetic construct
  source 1..50: mol_type = other DNA
aataagtatagaaagtaaagtagaaaatttgattcgatgtaagagaaatc

SEQ ID NO: 46829 - DNA, 50 bp, synthetic construct
  source 1..50: mol_type = other DNA
accaaaatttactaaacacttactatatataaaactctctactcaaacca

SEQ ID NO: 46830 - DNA, 50 bp, synthetic construct
  source 1..50: mol_type = other DNA
accaaaatttactaaacacttactatatataaaactctctactcaaaccg

SEQ ID NO: 46831 - DNA, 50 bp, synthetic construct
  source 1..50: mol_type = other DNA
ttggatattaggtatagatggtttattttttatggataggaagagggtat

SEQ ID NO: 46832 - DNA, 50 bp, synthetic construct
  source 1..50: mol_type = other DNA
ttggatattaggtatagatggtttattttttatggataggaagagggtac

SEQ ID NO: 46833 - DNA, 50 bp, synthetic construct
  source 1..50: mol_type = other DNA
tcaacctataccactcctaaatcatcttttataacaccacatccaaccca

SEQ ID NO: 46834 - DNA, 50 bp, synthetic construct
  source 1..50: mol_type = other DNA
tcaacctataccactcctaaatcatcttttataacaccacgtccaacccg

SEQ ID NO: 46835 - DNA, 50 bp, synthetic construct
  source 1..50: mol_type = other DNA
aacccaaaaaacaaaacaatcctataacactctccttacaaaaataacca

SEQ ID NO: 46836 - DNA, 50 bp, synthetic construct
  source 1..50: mol_type = other DNA
aacccaaaaaacaaaacaatcctataacgctctccttacaaaaataaccg

SEQ ID NO: 46837 - DNA, 50 bp, synthetic construct
  source 1..50: mol_type = other DNA
taacactctccttacaaaaataaccaaaatctcccaatccaaccaaccca

SEQ ID NO: 46838 - DNA, 50 bp, synthetic construct
  source 1..50: mol_type = other DNA
taacgctctccttacaaaaataaccgaaatctcccaatccaaccaacccg

SEQ ID NO: 46839 - DNA, 50 bp, synthetic construct
  source 1..50: mol_type = other DNA
tcaaaaaccaccattatcaataaaaaaataactattaaatactacaaaca

SEQ ID NO: 46840 - DNA, 50 bp, synthetic construct
  source 1..50: mol_type = other DNA
tcgaaaaccaccgttatcaataaaaaaataactattaaatactacaaacg

SEQ ID NO: 46841 - DNA, 50 bp, synthetic construct
  source 1..50: mol_type = other DNA
acacctataacattcaacaatcactctcccattaataacaataactctca

SEQ ID NO: 46842 - DNA, 50 bp, synthetic construct
  source 1..50: mol_type = other DNA
acgcctataacattcaacaatcactctcccattaataacgataactctcg

SEQ ID NO: 46843 - DNA, 50 bp, synthetic construct
  source 1..50: mol_type = other DNA
tttttttttttaccaaaaatacaaaaactttccaccttcttccctcccca

SEQ ID NO: 46844 - DNA, 50 bp, synthetic construct
  source 1..50: mol_type = other DNA
tttttttttttaccaaaaatacaaaaactttccaccttcttccctccccg

SEQ ID NO: 46845 - DNA, 50 bp, synthetic construct
  source 1..50: mol_type = other DNA
tacaaaatactaacaaccttaaccaaataaaaaccaccaacctaaaaaca

SEQ ID NO: 46846 - DNA, 50 bp, synthetic construct
  source 1..50: mol_type = other DNA
tacgaaatactaacgaccttaaccgaataaaaaccgccgacctaaaaacg

SEQ ID NO: 46847 - DNA, 50 bp, synthetic construct
  source 1..50: mol_type = other DNA
caaacacaaaaacacaccaaaaaaaatttccccactaaatttctaaaaca

SEQ ID NO: 46848 - DNA, 50 bp, synthetic construct
  source 1..50: mol_type = other DNA
cgaacgcaaaaacgcaccgaaaaaaatttccccgctaaatttctaaaacg

SEQ ID NO: 46849 - DNA, 50 bp, synthetic construct
  source 1..50: mol_type = other DNA
aaaaaataaaaccaaacaaacacaaaaacacaccaaaaaaaatttcccca

SEQ ID NO: 46850 - DNA, 50 bp, synthetic construct
  source 1..50: mol_type = other DNA
aaaaaataaaaccaaacgaacgcaaaaacgcaccgaaaaaaatttccccg

SEQ ID NO: 46851 - DNA, 50 bp, synthetic construct
  source 1..50: mol_type = other DNA
aaaactacacaaaaactacacaaaaactaacaaaactaacaaaactaaca

SEQ ID NO: 46852 - DNA, 50 bp, synthetic construct
  source 1..50: mol_type = other DNA
aaaactacgcgaaaactacgcgaaaactaacgaaactaacgaaactaacg

SEQ ID NO: 46853 - DNA, 50 bp, synthetic construct
  source 1..50: mol_type = other DNA
cacaaaaactaacaaaactaacaaaactaacaaaactaacaaaactaaca

SEQ ID NO: 46854 - DNA, 50 bp, synthetic construct
  source 1..50: mol_type = other DNA
cgcgaaaactaacgaaactaacgaaactaacgaaactaacgaaactaacg

SEQ ID NO: 46855 - DNA, 50 bp, synthetic construct
  source 1..50: mol_type = other DNA
taactaaaaataccaaatcccaaaaaaccaaactaacaaaaaaactaaca

SEQ ID NO: 46856 - DNA, 50 bp, synthetic construct
  source 1..50: mol_type = other DNA
taactaaaaataccgaatcccgaaaaaccgaactaacgaaaaaactaacg

SEQ ID NO: 46857 - DNA, 50 bp, synthetic construct
  source 1..50: mol_type = other DNA
taaaaaaaccaaaaacaaaaacctaaacacaaaaccaaaaacacacaaca

SEQ ID NO: 46858 - DNA, 50 bp, synthetic construct
  source 1..50: mol_type = other DNA
taaaaaaaccaaaaacgaaaacctaaacgcgaaaccgaaaacgcacgacg

SEQ ID NO: 46859 - DNA, 50 bp, synthetic construct
  source 1..50: mol_type = other DNA
taataaaaaaaccaaaaacaaaaacctaaacacaaaaccaaaaacacaca

SEQ ID NO: 46860 - DNA, 50 bp, synthetic construct
  source 1..50: mol_type = other DNA
taataaaaaaaccaaaaacgaaaacctaaacgcgaaaccgaaaacgcacg

SEQ ID NO: 46861 - DNA, 50 bp, synthetic construct
  source 1..50: mol_type = other DNA
taactaataaaaaaaccaaaaacaaaaacctaaacacaaaaccaaaaaca

SEQ ID NO: 46862 - DNA, 50 bp, synthetic construct
  source 1..50: mol_type = other DNA
taactaataaaaaaaccaaaaacgaaaacctaaacgcgaaaccgaaaacg

SEQ ID NO: 46863 - DNA, 50 bp, synthetic construct
  source 1..50: mol_type = other DNA
ctaaacaacaaataactaataaaaaaaccaaaaacaaaaacctaaacaca

SEQ ID NO: 46864 - DNA, 50 bp, synthetic construct
  source 1..50: mol_type = other DNA
ctaaacgacaaataactaataaaaaaaccaaaaacgaaaacctaaacgcg

SEQ ID NO: 46865 - DNA, 50 bp, synthetic construct
  source 1..50: mol_type = other DNA
actccaattcacaactaaacaacaaataactaataaaaaaaccaaaaaca

SEQ ID NO: 46866 - DNA, 50 bp, synthetic construct
  source 1..50: mol_type = other DNA
gctccaattcgcaactaaacgacaaataactaataaaaaaaccaaaaacg

SEQ ID NO: 46867 - DNA, 50 bp, synthetic construct
  source 1..50: mol_type = other DNA
ccttttcctaactctaaaaatataaccaaaaccaaaacactcctactcca

SEQ ID NO: 46868 - DNA, 50 bp, synthetic construct
  source 1..50: mol_type = other DNA
ccttttcctaactctaaaaatataaccgaaaccgaaacgctcctactccg

SEQ ID NO: 46869 - DNA, 50 bp, synthetic construct
  source 1..50: mol_type = other DNA
catataacctctcaccccttttcctaactctaaaaatataaccaaaacca

SEQ ID NO: 46870 - DNA, 50 bp, synthetic construct
  source 1..50: mol_type = other DNA
catataacctctcgccccttttcctaactctaaaaatataaccgaaaccg

SEQ ID NO: 46871 - DNA, 50 bp, synthetic construct
  source 1..50: mol_type = other DNA
aactctttccacccaatctactaaaacaccatttcattttcaattaaaca

SEQ ID NO: 46872 - DNA, 50 bp, synthetic construct
  source 1..50: mol_type = other DNA
aactctttccacccaatctactaaaacgccgtttcgttttcaattaaacg

SEQ ID NO: 46873 - DNA, 50 bp, synthetic construct
  source 1..50: mol_type = other DNA
aaaaaacaaaaaaccacatatctccctctcacccaactaaaaacaaaaca

SEQ ID NO: 46874 - DNA, 50 bp, synthetic construct
  source 1..50: mol_type = other DNA
aaaaaacgaaaaaccacatatctccctctcgcccaactaaaaacgaaacg

SEQ ID NO: 46875 - DNA, 50 bp, synthetic construct
  source 1..50: mol_type = other DNA
aaaaaaaccaccccatttatcctccctataaccatcattaatattaccca

SEQ ID NO: 46876 - DNA, 50 bp, synthetic construct
  source 1..50: mol_type = other DNA
aaaaaaaccaccccgtttatcctccctataaccatcattaatattacccg

SEQ ID NO: 46877 - DNA, 50 bp, synthetic construct
  source 1..50: mol_type = other DNA
ttttttatgttttgtgggtaatattaatgatggttatagggaggataaat

SEQ ID NO: 46878 - DNA, 50 bp, synthetic construct
  source 1..50: mol_type = other DNA
ttttttatgttttgcgggtaatattaatgatggttatagggaggataaac

SEQ ID NO: 46879 - DNA, 50 bp, synthetic construct
  source 1..50: mol_type = other DNA
ttcctttttccaaattccaaattataaaaaaataaattataacaactcca

SEQ ID NO: 46880 - DNA, 50 bp, synthetic construct
  source 1..50: mol_type = other DNA
ttcctttttccaaattccgaattataaaaaaataaattataacaactccg

SEQ ID NO: 46881 - DNA, 50 bp, synthetic construct
  source 1..50: mol_type = other DNA
caatcaaccaatttatttcacctacatacaaccaaacaactaatcaaaca

SEQ ID NO: 46882 - DNA, 50 bp, synthetic construct
  source 1..50: mol_type = other DNA
caatcgaccaatttatttcacctacatacaaccgaacaactaatcgaacg

SEQ ID NO: 46883 - DNA, 50 bp, synthetic construct
  source 1..50: mol_type = other DNA
aacccaatcaaccaatttatttcacctacatacaaccaaacaactaatca

SEQ ID NO: 46884 - DNA, 50 bp, synthetic construct
  source 1..50: mol_type = other DNA
aacccaatcgaccaatttatttcacctacatacaaccgaacaactaatcg

SEQ ID NO: 46885 - DNA, 50 bp, synthetic construct
  source 1..50: mol_type = other DNA
aatccatccaactaattattcaattacatataaataaaacaaactaatca

SEQ ID NO: 46886 - DNA, 50 bp, synthetic construct
  source 1..50: mol_type = other DNA
aatccgtccgactaattattcgattacatataaataaaacaaactaatcg

SEQ ID NO: 46887 - DNA, 50 bp, synthetic construct
  source 1..50: mol_type = other DNA
ttaaaaaattagttgaatatggtggtatgtgtttatagttttagttattt

SEQ ID NO: 46888 - DNA, 50 bp, synthetic construct
  source 1..50: mol_type = other DNA
ttaaaaaattagtcgaatatggtggtatgtgtttatagttttagttattc

SEQ ID NO: 46889 - DNA, 50 bp, synthetic construct
  source 1..50: mol_type = other DNA
aaatcctcataataaaaaccaaaacctcctactaacaaacaacctacaca

SEQ ID NO: 46890 - DNA, 50 bp, synthetic construct
  source 1..50: mol_type = other DNA
aaatcctcgtaataaaaaccgaaacctcctactaacaaacaacctacacg

SEQ ID NO: 46891 - DNA, 50 bp, synthetic construct
  source 1..50: mol_type = other DNA
cctaaaaaataaataatacctacaaaaatcaaataaccaccataaaaaca

SEQ ID NO: 46892 - DNA, 50 bp, synthetic construct
  source 1..50: mol_type = other DNA
cctaaaaaataaataatacctacgaaaatcaaataaccgccgtaaaaacg

SEQ ID NO: 46893 - DNA, 50 bp, synthetic construct
  source 1..50: mol_type = other DNA
aaaaatatcataaacccaaaaaataaaacttacaataaactaaaatccca

SEQ ID NO: 46894 - DNA, 50 bp, synthetic construct
  source 1..50: mol_type = other DNA
aaaaatatcataaacccgaaaaataaaacttacaataaactaaaatcccg

SEQ ID NO: 46895 - DNA, 50 bp, synthetic construct
  source 1..50: mol_type = other DNA
catacctactacaaccaacttaaaatttactaataaccactacaacccca

SEQ ID NO: 46896 - DNA, 50 bp, synthetic construct
  source 1..50: mol_type = other DNA
cgtacctactacaaccgacttaaaatttactaataaccactacaaccccg

SEQ ID NO: 46897 - DNA, 50 bp, synthetic construct
  source 1..50: mol_type = other DNA
caacattttacacctcatttctcttactcatcacacccccaaactaaaca

SEQ ID NO: 46898 - DNA, 50 bp, synthetic construct
  source 1..50: mol_type = other DNA
caacattttacacctcatttctcttactcatcgcacccccaaactaaacg

SEQ ID NO: 46899 - DNA, 50 bp, synthetic construct
  source 1..50: mol_type = other DNA
caaacaaaaaacttcaaaaacaaatttacccttttacaaacaactccaca

SEQ ID NO: 46900 - DNA, 50 bp, synthetic construct
  source 1..50: mol_type = other DNA
cgaacgaaaaacttcaaaaacaaatttacccttttacaaacaactccgcg

SEQ ID NO: 46901 - DNA, 50 bp, synthetic construct
  source 1..50: mol_type = other DNA
tacaaatattaaacatctattccacatccaaaatataacaatcactacca

SEQ ID NO: 46902 - DNA, 50 bp, synthetic construct
  source 1..50: mol_type = other DNA
tacaaatattaaacatctattccgcgtccgaaatataacgatcactaccg

SEQ ID NO: 46903 - DNA, 50 bp, synthetic construct
  source 1..50: mol_type = other DNA
aatatctaaacctaaccaaaaaaaaactcaacccaaaaatatatacaaca

SEQ ID NO: 46904 - DNA, 50 bp, synthetic construct
  source 1..50: mol_type = other DNA
aatatctaaacctaaccaaaaaaaaactcaacccaaaaatatatacaacg

SEQ ID NO: 46905 - DNA, 50 bp, synthetic construct
  source 1..50: mol_type = other DNA
taatctcaaacacttaccaattatttattatttaacaaataatataacca

SEQ ID NO: 46906 - DNA, 50 bp, synthetic construct
  source 1..50: mol_type = other DNA
taatctcaaacacttaccaattatttattatttaacaaataatataaccg

SEQ ID NO: 46907 - DNA, 50 bp, synthetic construct
  source 1..50: mol_type = other DNA
ttttatttaaagaaatagtgggaaaggtgggtaagttagagtttgttgtt

SEQ ID NO: 46908 - DNA, 50 bp, synthetic construct
  source 1..50: mol_type = other DNA
ttttatttaaagaaatagtgggaaaggtgggtaagttagagtttgttgtc

SEQ ID NO: 46909 - DNA, 50 bp, synthetic construct
  source 1..50: mol_type = other DNA
ttataataaatcactcaaaaattaaaataactcacaaaaaaaactcctca

SEQ ID NO: 46910 - DNA, 50 bp, synthetic construct
  source 1..50: mol_type = other DNA
ttataataaatcactcaaaaattaaaataactcacaaaaaaaactcctcg

SEQ ID NO: 46911 - DNA, 50 bp, synthetic construct
  source 1..50: mol_type = other DNA
ccccaccctcatcttattatacaaataaactttccacttaaccaactcca

SEQ ID NO: 46912 - DNA, 50 bp, synthetic construct
  source 1..50: mol_type = other DNA
ccccaccctcatcttattatacaaataaactttccacttaaccaactccg

SEQ ID NO: 46913 - DNA, 50 bp, synthetic construct
  source 1..50: mol_type = other DNA
tttgttttttattgtatatatggttggtaaagagaagggaatatggggtt

SEQ ID NO: 46914 - DNA, 50 bp, synthetic construct
  source 1..50: mol_type = other DNA
tttgttttttattgtatatatggttggtaaagagaagggaatatggggtc

SEQ ID NO: 46915 - DNA, 50 bp, synthetic construct
  source 1..50: mol_type = other DNA
caaaaatattctcacctcaatcccttctcacaattccaccactatcatca

SEQ ID NO: 46916 - DNA, 50 bp, synthetic construct
  source 1..50: mol_type = other DNA
caaaaatattctcacctcaatcccttctcacaattccaccgctatcatcg

SEQ ID NO: 46917 - DNA, 50 bp, synthetic construct
  source 1..50: mol_type = other DNA
aaccccacaaaaataacaatacctaaaaactaaaaacaacaatttcctca

SEQ ID NO: 46918 - DNA, 50 bp, synthetic construct
  source 1..50: mol_type = other DNA
aaccccgcaaaaataacgatacctaaaaactaaaaacgacgatttcctcg

SEQ ID NO: 46919 - DNA, 50 bp, synthetic construct
  source 1..50: mol_type = other DNA
cacaaaaataacaatacctaaaaactaaaaacaacaatttcctcaaacca

SEQ ID NO: 46920 - DNA, 50 bp, synthetic construct
  source 1..50: mol_type = other DNA
cgcaaaaataacgatacctaaaaactaaaaacgacgatttcctcgaaccg

SEQ ID NO: 46921 - DNA, 50 bp, synthetic construct
  source 1..50: mol_type = other DNA
aacaacaatttcctcaaaccaataaaaaaaaacatatcaaaatcacaaca

SEQ ID NO: 46922 - DNA, 50 bp, synthetic construct
  source 1..50: mol_type = other DNA
aacgacgatttcctcgaaccgataaaaaaaaacatatcaaaatcacaacg

SEQ ID NO: 46923 - DNA, 50 bp, synthetic construct
  source 1..50: mol_type = other DNA
taaattcccaaatctaaaaaaatccaattatcccaaaaccaaataacaca

SEQ ID NO: 46924 - DNA, 50 bp, synthetic construct
  source 1..50: mol_type = other DNA
taaattcccgaatctaaaaaaatccgattatcccgaaaccgaataacacg

SEQ ID NO: 46925 - DNA, 50 bp, synthetic construct
  source 1..50: mol_type = other DNA
cacttctaataaattcccaaatctaaaaaaatccaattatcccaaaacca

SEQ ID NO: 46926 - DNA, 50 bp, synthetic construct
  source 1..50: mol_type = other DNA
cgcttctaataaattcccgaatctaaaaaaatccgattatcccgaaaccg

SEQ ID NO: 46927 - DNA, 50 bp, synthetic construct
  source 1..50: mol_type = other DNA
aaataacacttctaataaattcccaaatctaaaaaaatccaattatccca

SEQ ID NO: 46928 - DNA, 50 bp, synthetic construct
  source 1..50: mol_type = other DNA
gaataacgcttctaataaattcccgaatctaaaaaaatccgattatcccg

SEQ ID NO: 46929 - DNA, 50 bp, synthetic construct
  source 1..50: mol_type = other DNA
accaaatacaaataacacttctaataaattcccaaatctaaaaaaatcca

SEQ ID NO: 46930 - DNA, 50 bp, synthetic construct
  source 1..50: mol_type = other DNA
gccaaatacgaataacgcttctaataaattcccgaatctaaaaaaatccg

SEQ ID NO: 46931 - DNA, 50 bp, synthetic construct
  source 1..50: mol_type = other DNA
aatcctaaactaaacaaaacaccataccactccaaacctcaatttccaca

SEQ ID NO: 46932 - DNA, 50 bp, synthetic construct
  source 1..50: mol_type = other DNA
aatcctaaactaaacaaaacaccgtaccactccgaacctcaatttccacg

SEQ ID NO: 46933 - DNA, 50 bp, synthetic construct
  source 1..50: mol_type = other DNA
taccacaatacccacaatatactaatcaccaccaacaacaaataaaaaca

SEQ ID NO: 46934 - DNA, 50 bp, synthetic construct
  source 1..50: mol_type = other DNA
taccacaatacccacaatatactaatcaccaccaacaacaaataaaaacg

SEQ ID NO: 46935 - DNA, 50 bp, synthetic construct
  source 1..50: mol_type = other DNA
tccaaatcaacattaaaaactaacttccaaatactaaaaactccctcaca

SEQ ID NO: 46936 - DNA, 50 bp, synthetic construct
  source 1..50: mol_type = other DNA
tccaaatcaacattaaaaactaacttccaaatactaaaaactccctcgcg

SEQ ID NO: 46937 - DNA, 50 bp, synthetic construct
  source 1..50: mol_type = other DNA
aaaaaacccatacccttatctcctaaccaaatccaacactaaaatcacca

SEQ ID NO: 46938 - DNA, 50 bp, synthetic construct
  source 1..50: mol_type = other DNA
aaaaaacccgtacccttatctcctaaccgaatccaacactaaaatcaccg

SEQ ID NO: 46939 - DNA, 50 bp, synthetic construct
  source 1..50: mol_type = other DNA
aataaatccacaaaaaaacacaaatactcctcaaaactacaaaccacaca

SEQ ID NO: 46940 - DNA, 50 bp, synthetic construct
  source 1..50: mol_type = other DNA
aataaatccacaaaaaaacgcaaatactcctcaaaactacgaaccacgcg

SEQ ID NO: 46941 - DNA, 50 bp, synthetic construct
  source 1..50: mol_type = other DNA
acccaactaaacaacacacattaatatcaaattaccaaaaatctacacca

SEQ ID NO: 46942 - DNA, 50 bp, synthetic construct
  source 1..50: mol_type = other DNA
acccgactaaacaacgcgcattaatatcaaattaccgaaaatctacaccg

SEQ ID NO: 46943 - DNA, 50 bp, synthetic construct
  source 1..50: mol_type = other DNA
ccataacaaacccttatcaacatcctaaaatttcacaaaccatatctaca

SEQ ID NO: 46944 - DNA, 50 bp, synthetic construct
  source 1..50: mol_type = other DNA
ccgtaacgaacccttatcaacgtcctaaaatttcacaaaccgtatctacg

SEQ ID NO: 46945 - DNA, 50 bp, synthetic construct
  source 1..50: mol_type = other DNA
accactaatctacattccaaacaactacataaccacctatacacttatca

SEQ ID NO: 46946 - DNA, 50 bp, synthetic construct
  source 1..50: mol_type = other DNA
accgctaatctacattccaaacaactacgtaaccacctatacacttatcg

SEQ ID NO: 46947 - DNA, 50 bp, synthetic construct
  source 1..50: mol_type = other DNA
aaaaaaaactaaaaccacaacaccactaatctacattccaaacaactaca

SEQ ID NO: 46948 - DNA, 50 bp, synthetic construct
  source 1..50: mol_type = other DNA
aaaaaaaactaaaaccacaacaccgctaatctacattccaaacaactacg

SEQ ID NO: 46949 - DNA, 50 bp, synthetic construct
  source 1..50: mol_type = other DNA
gagattggaagttgtggttagaatttttttgattatggaggaaggtagat

SEQ ID NO: 46950 - DNA, 50 bp, synthetic construct
  source 1..50: mol_type = other DNA
gagatcggaagttgtggttagaatttttttgattatggaggaaggtagac

SEQ ID NO: 46951 - DNA, 50 bp, synthetic construct
  source 1..50: mol_type = other DNA
aaatcacaacacaacaaaaataaaaataaccactaaaaataaatcttaca

SEQ ID NO: 46952 - DNA, 50 bp, synthetic construct
  source 1..50: mol_type = other DNA
aaatcacaacgcgacaaaaataaaaataaccgctaaaaataaatcttacg

SEQ ID NO: 46953 - DNA, 50 bp, synthetic construct
  source 1..50: mol_type = other DNA
tgttattaggtttattatataggtttagggtgaaatttgaaaatgtgggt

SEQ ID NO: 46954 - DNA, 50 bp, synthetic construct
  source 1..50: mol_type = other DNA
tgttattaggtttattatataggtttagggtgaaatttgaaaatgtgggc

SEQ ID NO: 46955 - DNA, 50 bp, synthetic construct
  source 1..50: mol_type = other DNA
taaaaacctcaaatactaatccaacaccataatccactccaaaaacaaca

SEQ ID NO: 46956 - DNA, 50 bp, synthetic construct
  source 1..50: mol_type = other DNA
taaaaacctcaaatactaatccaacaccgtaatccgctccgaaaacaacg

SEQ ID NO: 46957 - DNA, 50 bp, synthetic construct
  source 1..50: mol_type = other DNA
agttgttttgagagtatatttgaataaaggggtaggagtttatttttgat

SEQ ID NO: 46958 - DNA, 50 bp, synthetic construct
  source 1..50: mol_type = other DNA
agtcgttttgagagtatatttgaataaaggggtaggagtttatttttgac

SEQ ID NO: 46959 - DNA, 50 bp, synthetic construct
  source 1..50: mol_type = other DNA
catcttaacaatacctaacataactcaaccactataaatataatacacca

SEQ ID NO: 46960 - DNA, 50 bp, synthetic construct
  source 1..50: mol_type = other DNA
cgtcttaacaatacctaacgtaactcgaccgctataaatataatacgccg

SEQ ID NO: 46961 - DNA, 50 bp, synthetic construct
  source 1..50: mol_type = other DNA
cctactacaaaaaaacttttcaacatcttaacaatacctaacataactca

SEQ ID NO: 46962 - DNA, 50 bp, synthetic construct
  source 1..50: mol_type = other DNA
cctactacgaaaaaacttttcgacgtcttaacaatacctaacgtaactcg

SEQ ID NO: 46963 - DNA, 50 bp, synthetic construct
  source 1..50: mol_type = other DNA
tttcaatatttcctaatacaacataccacacctacaacaatcaaatcaca

SEQ ID NO: 46964 - DNA, 50 bp, synthetic construct
  source 1..50: mol_type = other DNA
tttcaatatttcctaatacgacgtaccacacctacaacgatcgaatcacg

SEQ ID NO: 46965 - DNA, 50 bp, synthetic construct
  source 1..50: mol_type = other DNA
ttttaaaacaactacactaaccaaataacacaaaccacaaatacactaca

SEQ ID NO: 46966 - DNA, 50 bp, synthetic construct
  source 1..50: mol_type = other DNA
ttttaaaacgactacactaaccgaataacgcaaaccgcgaatacgctacg

SEQ ID NO: 46967 - DNA, 50 bp, synthetic construct
  source 1..50: mol_type = other DNA
ctcaattttaaaacaactacactaaccaaataacacaaaccacaaataca

SEQ ID NO: 46968 - DNA, 50 bp, synthetic construct
  source 1..50: mol_type = other DNA
ctcgattttaaaacgactacactaaccgaataacgcaaaccgcgaatacg

SEQ ID NO: 46969 - DNA, 50 bp, synthetic construct
  source 1..50: mol_type = other DNA
aaatccacctcaattttaaaacaactacactaaccaaataacacaaacca

SEQ ID NO: 46970 - DNA, 50 bp, synthetic construct
  source 1..50: mol_type = other DNA
aaatccgcctcgattttaaaacgactacactaaccgaataacgcaaaccg

SEQ ID NO: 46971 - DNA, 50 bp, synthetic construct
  source 1..50: mol_type = other DNA
caaacaaaaaaacaaaatccacctcaattttaaaacaactacactaacca

SEQ ID NO: 46972 - DNA, 50 bp, synthetic construct
  source 1..50: mol_type = other DNA
caaacaaaaaaacaaaatccgcctcgattttaaaacgactacactaaccg

SEQ ID NO: 46973 - DNA, 50 bp, synthetic construct
  source 1..50: mol_type = other DNA
ctctaaataactccaaacaaaaaaacaaaatccacctcaattttaaaaca

SEQ ID NO: 46974 - DNA, 50 bp, synthetic construct
  source 1..50: mol_type = other DNA
ctctaaataactccaaacaaaaaaacaaaatccgcctcgattttaaaacg

SEQ ID NO: 46975 - DNA, 50 bp, synthetic construct
  source 1..50: mol_type = other DNA
aaaactacaataaaccaaaattatatcactaaattactccaacataaaca

SEQ ID NO: 46976 - DNA, 50 bp, synthetic construct
  source 1..50: mol_type = other DNA
aaaactacaataaaccgaaattatatcgctaaattactccaacataaacg

SEQ ID NO: 46977 - DNA, 50 bp, synthetic construct
  source 1..50: mol_type = other DNA
acactaacacacaaaacaccataaaatacaatatcctcactaaaacccca

SEQ ID NO: 46978 - DNA, 50 bp, synthetic construct
  source 1..50: mol_type = other DNA
acgctaacgcgcaaaacaccataaaatacaatatcctcactaaaaccccg

SEQ ID NO: 46979 - DNA, 50 bp, synthetic construct
  source 1..50: mol_type = other DNA
acaaaactccaataaaaatactacatcccataataccttacacaccaaca

SEQ ID NO: 46980 - DNA, 50 bp, synthetic construct
  source 1..50: mol_type = other DNA
acgaaactccaataaaaatactacatcccataataccttacgcgccaacg

SEQ ID NO: 46981 - DNA, 50 bp, synthetic construct
  source 1..50: mol_type = other DNA
acacaaccattaatccaactactctatctctttttcaaattaaaacacca

SEQ ID NO: 46982 - DNA, 50 bp, synthetic construct
  source 1..50: mol_type = other DNA
acgcaaccattaatccgactactctatctctttttcaaattaaaacgccg

SEQ ID NO: 46983 - DNA, 50 bp, synthetic construct
  source 1..50: mol_type = other DNA
ctctttttcaaattaaaacaccaaatcattacttaatttctaaaaattca

SEQ ID NO: 46984 - DNA, 50 bp, synthetic construct
  source 1..50: mol_type = other DNA
ctctttttcaaattaaaacgccgaatcgttacttaatttctaaaaattcg

SEQ ID NO: 46985 - DNA, 50 bp, synthetic construct
  source 1..50: mol_type = other DNA
ttttcaaattaaaacaccaaatcattacttaatttctaaaaattcaaaca

SEQ ID NO: 46986 - DNA, 50 bp, synthetic construct
  source 1..50: mol_type = other DNA
ttttcaaattaaaacgccgaatcgttacttaatttctaaaaattcgaacg

SEQ ID NO: 46987 - DNA, 50 bp, synthetic construct
  source 1..50: mol_type = other DNA
aattaaaacaccaaatcattacttaatttctaaaaattcaaacaaaaaca

SEQ ID NO: 46988 - DNA, 50 bp, synthetic construct
  source 1..50: mol_type = other DNA
aattaaaacgccgaatcgttacttaatttctaaaaattcgaacgaaaacg

SEQ ID NO: 46989 - DNA, 50 bp, synthetic construct
  source 1..50: mol_type = other DNA
taaaaattcaaacaaaaacaaaattaataatttaacaactccaactaaca

SEQ ID NO: 46990 - DNA, 50 bp, synthetic construct
  source 1..50: mol_type = other DNA
taaaaattcgaacgaaaacgaaattaataatttaacgactccgactaacg

SEQ ID NO: 46991 - DNA, 50 bp, synthetic construct
  source 1..50: mol_type = other DNA
aacaaaattaataatttaacaactccaactaacacaaaacaaacaccaca

SEQ ID NO: 46992 - DNA, 50 bp, synthetic construct
  source 1..50: mol_type = other DNA
aacgaaattaataatttaacgactccgactaacgcgaaacaaacgccacg

SEQ ID NO: 46993 - DNA, 50 bp, synthetic construct
  source 1..50: mol_type = other DNA
taacacaaaacaaacaccacaaccaaaataccaaataaaaaacaaaaaca

SEQ ID NO: 46994 - DNA, 50 bp, synthetic construct
  source 1..50: mol_type = other DNA
taacgcgaaacaaacgccacgaccaaaataccgaataaaaaacgaaaacg

SEQ ID NO: 46995 - DNA, 50 bp, synthetic construct
  source 1..50: mol_type = other DNA
caaaccttaattttttaacaaaaaccatcataacatcacaaccaaattca

SEQ ID NO: 46996 - DNA, 50 bp, synthetic construct
  source 1..50: mol_type = other DNA
cgaaccttaattttttaacgaaaaccgtcataacgtcgcaaccaaattcg

SEQ ID NO: 46997 - DNA, 50 bp, synthetic construct
  source 1..50: mol_type = other DNA
ttaattttttaacaaaaaccatcataacatcacaaccaaattcatctaca

SEQ ID NO: 46998 - DNA, 50 bp, synthetic construct
  source 1..50: mol_type = other DNA
ttaattttttaacgaaaaccgtcataacgtcgcaaccaaattcgtctacg

SEQ ID NO: 46999 - DNA, 50 bp, synthetic construct
  source 1..50: mol_type = other DNA
acaaaacaataccctaaattcctaaaactactcaacaacccttaactaca

SEQ ID NO: 47000 - DNA, 50 bp, synthetic construct
  source 1..50: mol_type = other DNA
acgaaacaataccctaaattcctaaaactactcgacgacccttaactacg

SEQ ID NO: 47001 - DNA, 50 bp, synthetic construct
  source 1..50: mol_type = other DNA
atttcccaaactcaaaacaaaacaataccctaaattcctaaaactactca

SEQ ID NO: 47002 - DNA, 50 bp, synthetic construct
  source 1..50: mol_type = other DNA
gtttcccgaactcaaaacgaaacaataccctaaattcctaaaactactcg

SEQ ID NO: 47003 - DNA, 50 bp, synthetic construct
  source 1..50: mol_type = other DNA
aataaatacactccctaaattaacaataacactaactatcacaccaacca

SEQ ID NO: 47004 - DNA, 50 bp, synthetic construct
  source 1..50: mol_type = other DNA
gataaatacgctccctaaattaacaataacgctaactatcacaccgaccg

SEQ ID NO: 47005 - DNA, 50 bp, synthetic construct
  source 1..50: mol_type = other DNA
cctcaataaatacactccctaaattaacaataacactaactatcacacca

SEQ ID NO: 47006 - DNA, 50 bp, synthetic construct
  source 1..50: mol_type = other DNA
cctcgataaatacgctccctaaattaacaataacgctaactatcacaccg

SEQ ID NO: 47007 - DNA, 50 bp, synthetic construct
  source 1..50: mol_type = other DNA
tcaaaaaacaaccaatataacaaccaacaccactattaatccaaaaaaca

SEQ ID NO: 47008 - DNA, 50 bp, synthetic construct
  source 1..50: mol_type = other DNA
tcgaaaaacgaccgatataacaaccaacgccactattaatccaaaaaacg

SEQ ID NO: 47009 - DNA, 50 bp, synthetic construct
  source 1..50: mol_type = other DNA
acaactatttccaaacaaaaaacaacaaaactcaacaaaaacaaaaacca

SEQ ID NO: 47010 - DNA, 50 bp, synthetic construct
  source 1..50: mol_type = other DNA
acaactatttccaaacgaaaaacaacgaaactcgacgaaaacaaaaaccg

SEQ ID NO: 47011 - DNA, 50 bp, synthetic construct
  source 1..50: mol_type = other DNA
acccaaaataacaacaactatttccaaacaaaaaacaacaaaactcaaca

SEQ ID NO: 47012 - DNA, 50 bp, synthetic construct
  source 1..50: mol_type = other DNA
acccgaaataacaacaactatttccaaacgaaaaacaacgaaactcgacg

SEQ ID NO: 47013 - DNA, 50 bp, synthetic construct
  source 1..50: mol_type = other DNA
aaaacaccatccaaacctaaacccaaaataacaacaactatttccaaaca

SEQ ID NO: 47014 - DNA, 50 bp, synthetic construct
  source 1..50: mol_type = other DNA
aaaacgccgtccaaacctaaacccgaaataacaacaactatttccaaacg

SEQ ID NO: 47015 - DNA, 50 bp, synthetic construct
  source 1..50: mol_type = other DNA
aaaaaacatcaaatatacaaattacaacaacaacataaacacatacaaca

SEQ ID NO: 47016 - DNA, 50 bp, synthetic construct
  source 1..50: mol_type = other DNA
aaaaaacgtcgaatatacgaattacaacaacgacgtaaacgcgtacaacg

SEQ ID NO: 47017 - DNA, 50 bp, synthetic construct
  source 1..50: mol_type = other DNA
ctcaatataaaaaaacatcaaatatacaaattacaacaacaacataaaca

SEQ ID NO: 47018 - DNA, 50 bp, synthetic construct
  source 1..50: mol_type = other DNA
ctcgatataaaaaaacgtcgaatatacgaattacaacaacgacgtaaacg

SEQ ID NO: 47019 - DNA, 50 bp, synthetic construct
  source 1..50: mol_type = other DNA
aatatcctcaatataaaaaaacatcaaatatacaaattacaacaacaaca

SEQ ID NO: 47020 - DNA, 50 bp, synthetic construct
  source 1..50: mol_type = other DNA
aatatcctcgatataaaaaaacgtcgaatatacgaattacaacaacgacg

SEQ ID NO: 47021 - DNA, 50 bp, synthetic construct
  source 1..50: mol_type = other DNA
caaaatatcctcaatataaaaaaacatcaaatatacaaattacaacaaca

SEQ ID NO: 47022 - DNA, 50 bp, synthetic construct
  source 1..50: mol_type = other DNA
caaaatatcctcgatataaaaaaacgtcgaatatacgaattacaacaacg

SEQ ID NO: 47023 - DNA, 50 bp, synthetic construct
  source 1..50: mol_type = other DNA
aaaaattaaaaaacaacaacataaaaacaaacataaacacaacaaaccca

SEQ ID NO: 47024 - DNA, 50 bp, synthetic construct
  source 1..50: mol_type = other DNA
aaaaattaaaaaacgacaacgtaaaaacgaacgtaaacgcgacgaacccg

SEQ ID NO: 47025 - DNA, 50 bp, synthetic construct
  source 1..50: mol_type = other DNA
ctaaataaatcaacataaactcatacaccaaaatccaataaaaaaacaca

SEQ ID NO: 47026 - DNA, 50 bp, synthetic construct
  source 1..50: mol_type = other DNA
ctaaataaatcgacgtaaactcgtacaccgaaatccgataaaaaaacacg

SEQ ID NO: 47027 - DNA, 50 bp, synthetic construct
  source 1..50: mol_type = other DNA
taatacaaaaaaactaaataaatcaacataaactcatacaccaaaatcca

SEQ ID NO: 47028 - DNA, 50 bp, synthetic construct
  source 1..50: mol_type = other DNA
taatacgaaaaaactaaataaatcgacgtaaactcgtacaccgaaatccg

SEQ ID NO: 47029 - DNA, 50 bp, synthetic construct
  source 1..50: mol_type = other DNA
aacaaaataatacaaaaaaactaaataaatcaacataaactcatacacca

SEQ ID NO: 47030 - DNA, 50 bp, synthetic construct
  source 1..50: mol_type = other DNA
gacgaaataatacgaaaaaactaaataaatcgacgtaaactcgtacaccg

SEQ ID NO: 47031 - DNA, 50 bp, synthetic construct
  source 1..50: mol_type = other DNA
aacaaccaacacaacaacaaaataatacaaaaaaactaaataaatcaaca

SEQ ID NO: 47032 - DNA, 50 bp, synthetic construct
  source 1..50: mol_type = other DNA
aacgaccaacgcgacgacgaaataatacgaaaaaactaaataaatcgacg

SEQ ID NO: 47033 - DNA, 50 bp, synthetic construct
  source 1..50: mol_type = other DNA
cttacccaaaaaatcataacaaaacaaaacatacatataatcattcacca

SEQ ID NO: 47034 - DNA, 50 bp, synthetic construct
  source 1..50: mol_type = other DNA
cttacccaaaaaatcgtaacgaaacaaaacgtacgtataatcgttcaccg

SEQ ID NO: 47035 - DNA, 50 bp, synthetic construct
  source 1..50: mol_type = other DNA
caaccaccttacccaaaaaatcataacaaaacaaaacatacatataatca

SEQ ID NO: 47036 - DNA, 50 bp, synthetic construct
  source 1..50: mol_type = other DNA
cgaccgccttacccaaaaaatcgtaacgaaacaaaacgtacgtataatcg

SEQ ID NO: 47037 - DNA, 50 bp, synthetic construct
  source 1..50: mol_type = other DNA
aacaataaacaactataacaaaaacaataaaaaaacaactatcaaacaca

SEQ ID NO: 47038 - DNA, 50 bp, synthetic construct
  source 1..50: mol_type = other DNA
aacgataaacgactataacaaaaacgataaaaaaacaactatcgaacacg

SEQ ID NO: 47039 - DNA, 50 bp, synthetic construct
  source 1..50: mol_type = other DNA
caataaacaactataacaaaaacaataaaaaaacaactatcaaacacaca

SEQ ID NO: 47040 - DNA, 50 bp, synthetic construct
  source 1..50: mol_type = other DNA
cgataaacgactataacaaaaacgataaaaaaacaactatcgaacacgcg

SEQ ID NO: 47041 - DNA, 50 bp, synthetic construct
  source 1..50: mol_type = other DNA
ataaacaactataacaaaaacaataaaaaaacaactatcaaacacacaca

SEQ ID NO: 47042 - DNA, 50 bp, synthetic construct
  source 1..50: mol_type = other DNA
ataaacgactataacaaaaacgataaaaaaacaactatcgaacacgcgcg

SEQ ID NO: 47043 - DNA, 50 bp, synthetic construct
  source 1..50: mol_type = other DNA
aactataacaaaaacaataaaaaaacaactatcaaacacacacaaaaaca

SEQ ID NO: 47044 - DNA, 50 bp, synthetic construct
  source 1..50: mol_type = other DNA
gactataacaaaaacgataaaaaaacaactatcgaacacgcgcgaaaacg

SEQ ID NO: 47045 - DNA, 50 bp, synthetic construct
  source 1..50: mol_type = other DNA
acaaaaacaataaaaaaacaactatcaaacacacacaaaaacaaaaaaca

SEQ ID NO: 47046 - DNA, 50 bp, synthetic construct
  source 1..50: mol_type = other DNA
acaaaaacgataaaaaaacaactatcgaacacgcgcgaaaacgaaaaacg

SEQ ID NO: 47047 - DNA, 50 bp, synthetic construct
  source 1..50: mol_type = other DNA
aaaaacaataaaaaaacaactatcaaacacacacaaaaacaaaaaacaca

SEQ ID NO: 47048 - DNA, 50 bp, synthetic construct
  source 1..50: mol_type = other DNA
aaaaacgataaaaaaacaactatcgaacacgcgcgaaaacgaaaaacgcg

SEQ ID NO: 47049 - DNA, 50 bp, synthetic construct
  source 1..50: mol_type = other DNA
acaaaatacaaaaaaaccaatctaaatcacaatacaatcaaccccaacca

SEQ ID NO: 47050 - DNA, 50 bp, synthetic construct
  source 1..50: mol_type = other DNA
acaaaatacaaaaaaaccaatctaaatcacgatacgatcaaccccgaccg

SEQ ID NO: 47051 - DNA, 50 bp, synthetic construct
  source 1..50: mol_type = other DNA
acctacaaaatacaaaaaaaccaatctaaatcacaatacaatcaacccca

SEQ ID NO: 47052 - DNA, 50 bp, synthetic construct
  source 1..50: mol_type = other DNA
gcctacaaaatacaaaaaaaccaatctaaatcacgatacgatcaaccccg

SEQ ID NO: 47053 - DNA, 50 bp, synthetic construct
  source 1..50: mol_type = other DNA
ctaaaaacaattaacatcttaattaacattttaatatctccattattaca

SEQ ID NO: 47054 - DNA, 50 bp, synthetic construct
  source 1..50: mol_type = other DNA
ctaaaaacaattaacgtcttaattaacattttaatatctccattattacg

SEQ ID NO: 47055 - DNA, 50 bp, synthetic construct
  source 1..50: mol_type = other DNA
aaaacaattaacatcttaattaacattttaatatctccattattacaaca

SEQ ID NO: 47056 - DNA, 50 bp, synthetic construct
  source 1..50: mol_type = other DNA
aaaacaattaacgtcttaattaacattttaatatctccattattacgacg

SEQ ID NO: 47057 - DNA, 50 bp, synthetic construct
  source 1..50: mol_type = other DNA
aacaattaacatcttaattaacattttaatatctccattattacaacaca

SEQ ID NO: 47058 - DNA, 50 bp, synthetic construct
  source 1..50: mol_type = other DNA
aacaattaacgtcttaattaacattttaatatctccattattacgacgcg

SEQ ID NO: 47059 - DNA, 50 bp, synthetic construct
  source 1..50: mol_type = other DNA
acctcaaaaatttaataatacaacccaaacctaactataatcacctatca

SEQ ID NO: 47060 - DNA, 50 bp, synthetic construct
  source 1..50: mol_type = other DNA
acctcgaaaatttaataatacgacccgaacctaactataatcgcctatcg

SEQ ID NO: 47061 - DNA, 50 bp, synthetic construct
  source 1..50: mol_type = other DNA
ttaataatacaacccaaacctaactataatcacctatcaaaactaaaaca

SEQ ID NO: 47062 - DNA, 50 bp, synthetic construct
  source 1..50: mol_type = other DNA
ttaataatacgacccgaacctaactataatcgcctatcgaaactaaaacg

SEQ ID NO: 47063 - DNA, 50 bp, synthetic construct
  source 1..50: mol_type = other DNA
taatttaaggaaatttagggtgtattgtgaaaatgttagtttttaggttt

SEQ ID NO: 47064 - DNA, 50 bp, synthetic construct
  source 1..50: mol_type = other DNA
taatttaaggaaatttagggcgtattgtgaaaacgttagtttttaggttc

SEQ ID NO: 47065 - DNA, 50 bp, synthetic construct
  source 1..50: mol_type = other DNA
acacaatcccaacaataacccaaaaaaactcaaaacacactataaaaaca

SEQ ID NO: 47066 - DNA, 50 bp, synthetic construct
  source 1..50: mol_type = other DNA
acgcgatcccaacaataacccaaaaaaactcaaaacgcactataaaaacg

SEQ ID NO: 47067 - DNA, 50 bp, synthetic construct
  source 1..50: mol_type = other DNA
tttacttcctcctacacaatcccaacaataacccaaaaaaactcaaaaca

SEQ ID NO: 47068 - DNA, 50 bp, synthetic construct
  source 1..50: mol_type = other DNA
tttacttcctcctacgcgatcccaacaataacccaaaaaaactcaaaacg

SEQ ID NO: 47069 - DNA, 50 bp, synthetic construct
  source 1..50: mol_type = other DNA
caaaaatattaccataacccataaaataactttaactaaccacccccaca

SEQ ID NO: 47070 - DNA, 50 bp, synthetic construct
  source 1..50: mol_type = other DNA
cgaaaatattaccataacccataaaataactttaactaaccgcccccgcg

SEQ ID NO: 47071 - DNA, 50 bp, synthetic construct
  source 1..50: mol_type = other DNA
aactttaactaaccacccccacaaactaaatataaaatcaaaaaaaacca

SEQ ID NO: 47072 - DNA, 50 bp, synthetic construct
  source 1..50: mol_type = other DNA
aactttaactaaccgcccccgcgaactaaatataaaatcaaaaaaaaccg

SEQ ID NO: 47073 - DNA, 50 bp, synthetic construct
  source 1..50: mol_type = other DNA
taataaaccacacttacaaacaccaaatatatacatattaaaaaaaaaca

SEQ ID NO: 47074 - DNA, 50 bp, synthetic construct
  source 1..50: mol_type = other DNA
taataaaccgcacttacgaacaccgaatatatacgtattaaaaaaaaacg

SEQ ID NO: 47075 - DNA, 50 bp, synthetic construct
  source 1..50: mol_type = other DNA
cccttaaatctcccttaataaaccacacttacaaacaccaaatatataca

SEQ ID NO: 47076 - DNA, 50 bp, synthetic construct
  source 1..50: mol_type = other DNA
cccttaaatctcccttaataaaccgcacttacgaacaccgaatatatacg

SEQ ID NO: 47077 - DNA, 50 bp, synthetic construct
  source 1..50: mol_type = other DNA
aactaaaactaaatcttactaaaactctcattccaaatcccaaaaccaca

SEQ ID NO: 47078 - DNA, 50 bp, synthetic construct
  source 1..50: mol_type = other DNA
aactaaaactaaatcttactaaaactctcgttccgaatcccaaaaccgcg

SEQ ID NO: 47079 - DNA, 50 bp, synthetic construct
  source 1..50: mol_type = other DNA
actaaaactctcattccaaatcccaaaaccacaaataaatacctaaaaca

SEQ ID NO: 47080 - DNA, 50 bp, synthetic construct
  source 1..50: mol_type = other DNA
actaaaactctcgttccgaatcccaaaaccgcgaataaatacctaaaacg

SEQ ID NO: 47081 - DNA, 50 bp, synthetic construct
  source 1..50: mol_type = other DNA
atcccaaaaccacaaataaatacctaaaacataaattaaaacctctccca

SEQ ID NO: 47082 - DNA, 50 bp, synthetic construct
  source 1..50: mol_type = other DNA
atcccaaaaccgcgaataaatacctaaaacgtaaattaaaacctctcccg

SEQ ID NO: 47083 - DNA, 50 bp, synthetic construct
  source 1..50: mol_type = other DNA
aaaaccacaaataaatacctaaaacataaattaaaacctctcccaaacca

SEQ ID NO: 47084 - DNA, 50 bp, synthetic construct
  source 1..50: mol_type = other DNA
aaaaccgcgaataaatacctaaaacgtaaattaaaacctctcccgaaccg

SEQ ID NO: 47085 - DNA, 50 bp, synthetic construct
  source 1..50: mol_type = other DNA
taaattaaaacctctcccaaaccatttaccttaaaactctactcctacca

SEQ ID NO: 47086 - DNA, 50 bp, synthetic construct
  source 1..50: mol_type = other DNA
taaattaaaacctctcccgaaccgtttaccttaaaactctactcctaccg

SEQ ID NO: 47087 - DNA, 50 bp, synthetic construct
  source 1..50: mol_type = other DNA
ttaccttaaaactctactcctaccaacaaattctaaacctaataaattca

SEQ ID NO: 47088 - DNA, 50 bp, synthetic construct
  source 1..50: mol_type = other DNA
ttaccttaaaactctactcctaccgacgaattctaaacctaataaattcg

SEQ ID NO: 47089 - DNA, 50 bp, synthetic construct
  source 1..50: mol_type = other DNA
aaaactctactcctaccaacaaattctaaacctaataaattcaaatccca

SEQ ID NO: 47090 - DNA, 50 bp, synthetic construct
  source 1..50: mol_type = other DNA
aaaactctactcctaccgacgaattctaaacctaataaattcgaatcccg

SEQ ID NO: 47091 - DNA, 50 bp, synthetic construct
  source 1..50: mol_type = other DNA
taaacctaataaattcaaatcccaaacacaccaaacaacaaaaaaaacca

SEQ ID NO: 47092 - DNA, 50 bp, synthetic construct
  source 1..50: mol_type = other DNA
taaacctaataaattcgaatcccgaacacgccaaacgacgaaaaaaaccg

SEQ ID NO: 47093 - DNA, 50 bp, synthetic construct
  source 1..50: mol_type = other DNA
aaataacacaatattaactcaaccaatcaaaaacaacaaaaaccaaccca

SEQ ID NO: 47094 - DNA, 50 bp, synthetic construct
  source 1..50: mol_type = other DNA
aaataacgcgatattaactcaaccgatcaaaaacgacgaaaaccaacccg

SEQ ID NO: 47095 - DNA, 50 bp, synthetic construct
  source 1..50: mol_type = other DNA
tcctcccacctactttcccaaataactttaaccaacaaaaaactaaaaca

SEQ ID NO: 47096 - DNA, 50 bp, synthetic construct
  source 1..50: mol_type = other DNA
tcctcccacctactttcccgaataactttaaccaacaaaaaactaaaacg

SEQ ID NO: 47097 - DNA, 50 bp, synthetic construct
  source 1..50: mol_type = other DNA
ataaaaaatacacacaataccaaatctccaaataaaattaaaaatataca

SEQ ID NO: 47098 - DNA, 50 bp, synthetic construct
  source 1..50: mol_type = other DNA
ataaaaaatacgcacgataccgaatctccgaataaaattaaaaatatacg

SEQ ID NO: 47099 - DNA, 50 bp, synthetic construct
  source 1..50: mol_type = other DNA
aacaacaaatatatataaaaacaacataacaccccacaaactacaataca

SEQ ID NO: 47100 - DNA, 50 bp, synthetic construct
  source 1..50: mol_type = other DNA
aacaacaaatatatataaaaacaacgtaacgccccgcgaactacaatacg

SEQ ID NO: 47101 - DNA, 50 bp, synthetic construct
  source 1..50: mol_type = other DNA
ctaaaaacaaatacccacccacaaataaaaaacaactaaattttccttca

SEQ ID NO: 47102 - DNA, 50 bp, synthetic construct
  source 1..50: mol_type = other DNA
ctaaaaacgaatacccgcccgcgaataaaaaacgactaaattttccttcg

SEQ ID NO: 47103 - DNA, 50 bp, synthetic construct
  source 1..50: mol_type = other DNA
ctctaaataataaaacctaaaaacaaatacccacccacaaataaaaaaca

SEQ ID NO: 47104 - DNA, 50 bp, synthetic construct
  source 1..50: mol_type = other DNA
ctctaaataataaaacctaaaaacgaatacccgcccgcgaataaaaaacg

SEQ ID NO: 47105 - DNA, 50 bp, synthetic construct
  source 1..50: mol_type = other DNA
aacttccaaaactctaaataataaaacctaaaaacaaatacccacccaca

SEQ ID NO: 47106 - DNA, 50 bp, synthetic construct
  source 1..50: mol_type = other DNA
aacttccgaaactctaaataataaaacctaaaaacgaatacccgcccgcg

SEQ ID NO: 47107 - DNA, 50 bp, synthetic construct
  source 1..50: mol_type = other DNA
cccctaccattcttccttaccaccatattattttccctcttaaaaaaaca

SEQ ID NO: 47108 - DNA, 50 bp, synthetic construct
  source 1..50: mol_type = other DNA
cccctaccattcttccttaccgccatattattttccctcttaaaaaaacg

SEQ ID NO: 47109 - DNA, 50 bp, synthetic construct
  source 1..50: mol_type = other DNA
aacccttaactctaaaaaccttaaccactatataaaattcccatcaccca

SEQ ID NO: 47110 - DNA, 50 bp, synthetic construct
  source 1..50: mol_type = other DNA
aacccttaactctaaaaaccttaaccgctatataaaattcccgtcgcccg

SEQ ID NO: 47111 - DNA, 50 bp, synthetic construct
  source 1..50: mol_type = other DNA
ttaaactctcctcctcaaaaaaatcacttcccaaaattcaacctaaacca

SEQ ID NO: 47112 - DNA, 50 bp, synthetic construct
  source 1..50: mol_type = other DNA
ttaaactctcctcctcgaaaaaatcgcttcccgaaattcaacctaaaccg

SEQ ID NO: 47113 - DNA, 50 bp, synthetic construct
  source 1..50: mol_type = other DNA
aaacacaactcacattatcaatcacaacaaactaattaacaatcacatca

SEQ ID NO: 47114 - DNA, 50 bp, synthetic construct
  source 1..50: mol_type = other DNA
aaacgcaactcacgttatcgatcacgacaaactaattaacgatcacatcg

SEQ ID NO: 47115 - DNA, 50 bp, synthetic construct
  source 1..50: mol_type = other DNA
cttacaaacccaaataaaaacataaaaaccttatattatctaaaaaaaca

SEQ ID NO: 47116 - DNA, 50 bp, synthetic construct
  source 1..50: mol_type = other DNA
cttacaaacccaaataaaaacataaaaaccttatattatctaaaaaaacg

SEQ ID NO: 47117 - DNA, 50 bp, synthetic construct
  source 1..50: mol_type = other DNA
aaaaaacaatcaaaccaaaaaccaaaaacacaataaaaccaaaaacacca

SEQ ID NO: 47118 - DNA, 50 bp, synthetic construct
  source 1..50: mol_type = other DNA
aaaaaacaatcgaaccaaaaaccgaaaacgcgataaaaccgaaaacgccg

SEQ ID NO: 47119 - DNA, 50 bp, synthetic construct
  source 1..50: mol_type = other DNA
ccaaaaaaacaatcaaaccaaaaaccaaaaacacaataaaaccaaaaaca

SEQ ID NO: 47120 - DNA, 50 bp, synthetic construct
  source 1..50: mol_type = other DNA
ccgaaaaaacaatcgaaccaaaaaccgaaaacgcgataaaaccgaaaacg

SEQ ID NO: 47121 - DNA, 50 bp, synthetic construct
  source 1..50: mol_type = other DNA
caaaaaccaaaaaaacaatcaaaccaaaaaccaaaaacacaataaaacca

SEQ ID NO: 47122 - DNA, 50 bp, synthetic construct
  source 1..50: mol_type = other DNA
cgaaaaccgaaaaaacaatcgaaccaaaaaccgaaaacgcgataaaaccg

SEQ ID NO: 47123 - DNA, 50 bp, synthetic construct
  source 1..50: mol_type = other DNA
acaataacaataacctaaaacaaattcaactaatcaaaataaaaacaaca

SEQ ID NO: 47124 - DNA, 50 bp, synthetic construct
  source 1..50: mol_type = other DNA
acgataacgataacctaaaacgaattcgactaatcaaaataaaaacgacg

SEQ ID NO: 47125 - DNA, 50 bp, synthetic construct
  source 1..50: mol_type = other DNA
ttaacaataacaataacctaaaacaaattcaactaatcaaaataaaaaca

SEQ ID NO: 47126 - DNA, 50 bp, synthetic construct
  source 1..50: mol_type = other DNA
ttaacgataacgataacctaaaacgaattcgactaatcaaaataaaaacg

SEQ ID NO: 47127 - DNA, 50 bp, synthetic construct
  source 1..50: mol_type = other DNA
aacccactccaaattaccactatcatcaaatactaatatactctaaacca

SEQ ID NO: 47128 - DNA, 50 bp, synthetic construct
  source 1..50: mol_type = other DNA
aacccgctccaaattaccgctatcgtcaaatactaatatactctaaaccg

SEQ ID NO: 47129 - DNA, 50 bp, synthetic construct
  source 1..50: mol_type = other DNA
aaattaccactatcatcaaatactaatatactctaaaccacaaaaaaaca

SEQ ID NO: 47130 - DNA, 50 bp, synthetic construct
  source 1..50: mol_type = other DNA
aaattaccgctatcgtcaaatactaatatactctaaaccgcgaaaaaacg

SEQ ID NO: 47131 - DNA, 50 bp, synthetic construct
  source 1..50: mol_type = other DNA
aaaactacctcatacaactccataactaactataaacatctccaccccca

SEQ ID NO: 47132 - DNA, 50 bp, synthetic construct
  source 1..50: mol_type = other DNA
aaaactacctcatacaactccataactaactataaacatctccgcccccg

SEQ ID NO: 47133 - DNA, 50 bp, synthetic construct
  source 1..50: mol_type = other DNA
aaataaaaccaataccctttaaacaaatataaaaaattaaaacttttcca

SEQ ID NO: 47134 - DNA, 50 bp, synthetic construct
  source 1..50: mol_type = other DNA
aaataaaaccaataccctttaaacgaatataaaaaattaaaacttttccg

SEQ ID NO: 47135 - DNA, 50 bp, synthetic construct
  source 1..50: mol_type = other DNA
acattctattcaaaatctaccaaaaaacaacaaaaactaaaaaaaactca

SEQ ID NO: 47136 - DNA, 50 bp, synthetic construct
  source 1..50: mol_type = other DNA
acgttctattcaaaatctaccaaaaaacaacaaaaactaaaaaaaactcg

SEQ ID NO: 47137 - DNA, 50 bp, synthetic construct
  source 1..50: mol_type = other DNA
ccaactacccaaaaacacttccaaaaaaaccttatcacactaaaataaca

SEQ ID NO: 47138 - DNA, 50 bp, synthetic construct
  source 1..50: mol_type = other DNA
ccaactacccaaaaacgcttccgaaaaaaccttatcgcactaaaataacg

SEQ ID NO: 47139 - DNA, 50 bp, synthetic construct
  source 1..50: mol_type = other DNA
cctaacttccaacctaaccaaattaaaaaaaacaaaccctaaaccaaaca

SEQ ID NO: 47140 - DNA, 50 bp, synthetic construct
  source 1..50: mol_type = other DNA
cctaacttccgacctaaccaaattaaaaaaaacaaaccctaaaccgaacg

SEQ ID NO: 47141 - DNA, 50 bp, synthetic construct
  source 1..50: mol_type = other DNA
cccttctttccccacaacctatcaataataaaacaaattaaaaaaaaaca

SEQ ID NO: 47142 - DNA, 50 bp, synthetic construct
  source 1..50: mol_type = other DNA
cccttctttccccacgacctatcaataataaaacaaattaaaaaaaaacg

SEQ ID NO: 47143 - DNA, 50 bp, synthetic construct
  source 1..50: mol_type = other DNA
aaaaattacccaaacctatccccaaaaaactaaaaataaaacaaaccaca

SEQ ID NO: 47144 - DNA, 50 bp, synthetic construct
  source 1..50: mol_type = other DNA
aaaaattacccaaacctatccccgaaaaactaaaaataaaacaaaccgcg

SEQ ID NO: 47145 - DNA, 50 bp, synthetic construct
  source 1..50: mol_type = other DNA
aaaaaaaactaaaaatctccatcctacctaacataatattcaacaatcca

SEQ ID NO: 47146 - DNA, 50 bp, synthetic construct
  source 1..50: mol_type = other DNA
aaaaaaaactaaaaatctccatcctacctaacgtaatattcgacaatccg

SEQ ID NO: 47147 - DNA, 50 bp, synthetic construct
  source 1..50: mol_type = other DNA
aaattatatactcatttctaactacctaaaataataaaaccaaaaaccca

SEQ ID NO: 47148 - DNA, 50 bp, synthetic construct
  source 1..50: mol_type = other DNA
aaattatatactcatttctaactacctaaaataataaaaccgaaaacccg

SEQ ID NO: 47149 - DNA, 50 bp, synthetic construct
  source 1..50: mol_type = other DNA
aaaaaataatcccactacaccataacatcatcacttttttaacaaacaca

SEQ ID NO: 47150 - DNA, 50 bp, synthetic construct
  source 1..50: mol_type = other DNA
aaaaaataatcccactacgccgtaacatcatcgcttttttaacaaacgcg

SEQ ID NO: 47151 - DNA, 50 bp, synthetic construct
  source 1..50: mol_type = other DNA
tttttaacaaacacaaaaaaccccctcccatcccaatatttaatatacca

SEQ ID NO: 47152 - DNA, 50 bp, synthetic construct
  source 1..50: mol_type = other DNA
tttttaacaaacgcgaaaaaccccctcccatcccaatatttaatataccg

SEQ ID NO: 47153 - DNA, 50 bp, synthetic construct
  source 1..50: mol_type = other DNA
aaaaaacaaaacatactttccaaaaatacaattacaaaaccaaacaccca

SEQ ID NO: 47154 - DNA, 50 bp, synthetic construct
  source 1..50: mol_type = other DNA
aaaaaacgaaacgtactttccgaaaatacaattacaaaaccgaacgcccg

SEQ ID NO: 47155 - DNA, 50 bp, synthetic construct
  source 1..50: mol_type = other DNA
aaaataatatccctacatcaaaaccaatcccactactcaaaaaaaaaaca

SEQ ID NO: 47156 - DNA, 50 bp, synthetic construct
  source 1..50: mol_type = other DNA
aaaataatatccctacatcaaaaccgatcccgctactcgaaaaaaaaacg

SEQ ID NO: 47157 - DNA, 50 bp, synthetic construct
  source 1..50: mol_type = other DNA
aacactacatacacacaaaaacaatcattcaaataaaattccaatcccca

SEQ ID NO: 47158 - DNA, 50 bp, synthetic construct
  source 1..50: mol_type = other DNA
aacgctacgtacgcgcaaaaacaatcattcaaataaaattccaatccccg

SEQ ID NO: 47159 - DNA, 50 bp, synthetic construct
  source 1..50: mol_type = other DNA
ctctaaccaaaaactaaaatttcatctaaataactacccctacacacaca

SEQ ID NO: 47160 - DNA, 50 bp, synthetic construct
  source 1..50: mol_type = other DNA
ctctaaccgaaaactaaaatttcatctaaataactacccctacgcgcacg

SEQ ID NO: 47161 - DNA, 50 bp, synthetic construct
  source 1..50: mol_type = other DNA
accaaaaactaaaatttcatctaaataactacccctacacacacacaaca

SEQ ID NO: 47162 - DNA, 50 bp, synthetic construct
  source 1..50: mol_type = other DNA
accgaaaactaaaatttcatctaaataactacccctacgcgcacgcaacg

SEQ ID NO: 47163 - DNA, 50 bp, synthetic construct
  source 1..50: mol_type = other DNA
aacaaataaactcctcctcaaaacaattcttccaattctccaccataaca

SEQ ID NO: 47164 - DNA, 50 bp, synthetic construct
  source 1..50: mol_type = other DNA
aacaaataaactcctcctcgaaacaattcttccaattctccgccataacg

SEQ ID NO: 47165 - DNA, 50 bp, synthetic construct
  source 1..50: mol_type = other DNA
tcatctaccctatctacctacacattttcataaaaccaatacaactacca

SEQ ID NO: 47166 - DNA, 50 bp, synthetic construct
  source 1..50: mol_type = other DNA
tcatctaccctatctacctacacgttttcgtaaaaccaatacaactaccg

SEQ ID NO: 47167 - DNA, 50 bp, synthetic construct
  source 1..50: mol_type = other DNA
ccaaacccaacttctaattataaacctaattacactctaaacaacataca

SEQ ID NO: 47168 - DNA, 50 bp, synthetic construct
  source 1..50: mol_type = other DNA
ccaaacccgacttctaattataaacctaattacactctaaacaacgtacg

SEQ ID NO: 47169 - DNA, 50 bp, synthetic construct
  source 1..50: mol_type = other DNA
ccaacatcataaaaaaattcaataccctacacataaaaaaaccaccaaca

SEQ ID NO: 47170 - DNA, 50 bp, synthetic construct
  source 1..50: mol_type = other DNA
ccaacatcgtaaaaaaattcaataccctacacgtaaaaaaaccgccgacg

SEQ ID NO: 47171 - DNA, 50 bp, synthetic construct
  source 1..50: mol_type = other DNA
acatcataaaaaaattcaataccctacacataaaaaaaccaccaacaaca

SEQ ID NO: 47172 - DNA, 50 bp, synthetic construct
  source 1..50: mol_type = other DNA
acatcgtaaaaaaattcaataccctacacgtaaaaaaaccgccgacgacg

SEQ ID NO: 47173 - DNA, 50 bp, synthetic construct
  source 1..50: mol_type = other DNA
aataaaaacaataaacattatactacaaacaactccaaacccacacatca

SEQ ID NO: 47174 - DNA, 50 bp, synthetic construct
  source 1..50: mol_type = other DNA
aataaaaacgataaacgttatactacgaacaactccaaacccgcacgtcg

SEQ ID NO: 47175 - DNA, 50 bp, synthetic construct
  source 1..50: mol_type = other DNA
aaccacctactcaacctcacaataataaaaacaataaacattatactaca

SEQ ID NO: 47176 - DNA, 50 bp, synthetic construct
  source 1..50: mol_type = other DNA
gaccacctactcgacctcgcaataataaaaacgataaacgttatactacg

SEQ ID NO: 47177 - DNA, 50 bp, synthetic construct
  source 1..50: mol_type = other DNA
caaaaccaaacaaataaccatataccaatactactactactacaacaaca

SEQ ID NO: 47178 - DNA, 50 bp, synthetic construct
  source 1..50: mol_type = other DNA
cgaaaccgaacaaataaccgtataccaatactactactactacaacgacg

SEQ ID NO: 47179 - DNA, 50 bp, synthetic construct
  source 1..50: mol_type = other DNA
aaaccaaacaaataaccatataccaatactactactactacaacaacaca

SEQ ID NO: 47180 - DNA, 50 bp, synthetic construct
  source 1..50: mol_type = other DNA
aaaccgaacaaataaccgtataccaatactactactactacaacgacgcg

SEQ ID NO: 47181 - DNA, 50 bp, synthetic construct
  source 1..50: mol_type = other DNA
atactactactactacaacaacacacatcaaaaacactcaatatacaaca

SEQ ID NO: 47182 - DNA, 50 bp, synthetic construct
  source 1..50: mol_type = other DNA
atactactactactacaacgacgcgcatcaaaaacactcgatatacgacg

SEQ ID NO: 47183 - DNA, 50 bp, synthetic construct
  source 1..50: mol_type = other DNA
catcaaaaacactcaatatacaacataaaaatccaaaaaaataaaatcca

SEQ ID NO: 47184 - DNA, 50 bp, synthetic construct
  source 1..50: mol_type = other DNA
catcaaaaacactcgatatacgacgtaaaaatccgaaaaaataaaatccg

SEQ ID NO: 47185 - DNA, 50 bp, synthetic construct
  source 1..50: mol_type = other DNA
atatacaacataaaaatccaaaaaaataaaatccaaacaaataccctaca

SEQ ID NO: 47186 - DNA, 50 bp, synthetic construct
  source 1..50: mol_type = other DNA
atatacgacgtaaaaatccgaaaaaataaaatccgaacaaataccctacg

SEQ ID NO: 47187 - DNA, 50 bp, synthetic construct
  source 1..50: mol_type = other DNA
atacaacataaaaatccaaaaaaataaaatccaaacaaataccctacaca

SEQ ID NO: 47188 - DNA, 50 bp, synthetic construct
  source 1..50: mol_type = other DNA
atacgacgtaaaaatccgaaaaaataaaatccgaacaaataccctacgcg

SEQ ID NO: 47189 - DNA, 50 bp, synthetic construct
  source 1..50: mol_type = other DNA
aaaaaacaaaactccaaccatctctctaaacaaaacctaaacaaccaaca

SEQ ID NO: 47190 - DNA, 50 bp, synthetic construct
  source 1..50: mol_type = other DNA
aaaaaacaaaactccgaccgtctctctaaacaaaacctaaacaaccaacg

SEQ ID NO: 47191 - DNA, 50 bp, synthetic construct
  source 1..50: mol_type = other DNA
tctcacacaaaaaaaaccaactctcaaaaaaaatccaaataacaaaacca

SEQ ID NO: 47192 - DNA, 50 bp, synthetic construct
  source 1..50: mol_type = other DNA
tctcacacaaaaaaaaccgactctcgaaaaaaatccaaataacgaaaccg
